(19) United States
(12) Patent Application Publication
(10) Pub. No.: US 2006/0041961 A1
(43) Pub. Date: Feb. 23, 2006

(54) Genes and uses for pant improvement

(76) Inventors: Mark Scott Abad, Webster Grove, MO (US); Jason Cotter, Camden, NJ (US); Robert L. D'Ordine, Ballwin, MO (US); Angie Ferguson, Morrisville, NC (US); Barry S. Goldman, St. Louis, MO (US); Karen Kindle Hartsuyker, Kirkwood, MO (US); Balasulojini Karunanandaa, Creve Coeur, MO (US); Susan Norris, University City, MO (US); Steven D. Rounsley, Boylston, MA (US); Joshua Stein, Acton, MA (US); James F. Todd, Otterville (CA); Li Zhou, Belmont, MA (US)

Correspondence Address: MONSANTO COMPANY, 800 N. LINDBERGH BLVD., ATTENTION: GAIL P. WUELLNER, IP PARALEGAL, (E2NA), ST. LOUIS, MO, 63167, US

(21) Appl. No.: 11/087,099

(22) Filed: Mar. 22, 2005

Related U.S. Application Data
(60) Provisional application No. 60/556,841, filed on Mar. 25, 2004.

(51) Int. Cl. A01H 1/00; C12N 15/87

(52) U.S. Cl. 800/289

(57) ABSTRACT

Transgenic seed for crops with improved traits are provided by trait-improving recombinant DNA where plants grown from such transgenic seed exhibit one or more improved traits as compared to a control plant. Of particular interest are transgenic plants that have increased yield. The present invention also provides recombinant DNA molecules for expression of a protein, and recombinant DNA molecules for expression of mRNA complementary to at least a portion of an mRNA native to the target plant for use in gene suppression to suppress the expression of a protein.

### CROSS REFERENCE TO RELATED APPLICATIONS

[0001] This application claims benefit under 35USC § 119(e) of U.S. provisional application Ser. No. 60/556,841 filed Mar. 25, 2004, herein incorporated by reference.

### INCORPORATION OF SEQUENCE LISTING

[0002] Two copies of the sequence listing (Copy 1 and Copy 2) and a computer readable form (CRF) of the sequence listing, all on CD-ROMs, each containing the file named pa_{—}01123.rpt, which is 33,475 kilo bytes (measured in MS-WINDOWS) and was created on Mar. 21, 2005, are herein incorporated by reference.

### FIELD OF THE INVENTION

[0003] Disclosed herein are inventions in the field of plant genetics and developmental biology. More specifically, the present invention provides transgenic seeds for crops, wherein the genome of said seed comprises recombinant DNA, the expression of which results in the production of transgenic plants that have improved trait(s).

### BACKGROUND OF THE INVENTION

[0004] Transgenic plants with improved traits such as improved yield, environmental stress tolerance, pest resistance, herbicide tolerance, modified seed compositions, and the like are desired by both farmers and consumers. Although considerable efforts in plant breeding have provided significant gains in desired traits, the ability to introduce specific DNA into plant genomes provides further opportunities for generation of plants with improved and/or unique traits. The ability to develop transgenic plants with improved traits depends in part on the identification of genes that are useful in recombinant DNA constructs for production of transformed plants with improved properties.

### SUMMARY OF THE INVENTION

[0005] This invention provides transgenic seeds, transgenic plants and DNA constructs with trait-improving recombinant DNA from a gene or homolog which has been demonstrated for trait improvement in a model plant. More specifically, such recombinant DNA is from a gene identified in a model plant screen as disclosed herein or homologues of such gene, e.g., from related species or in some cases from a broad range of unrelated species. In particular aspects of the invention the recombinant DNA will express a protein having an amino acid sequence with at least 90% identity to a consensus amino acid sequence in the group consisting of the consensus amino acid sequence of SEQ ID NO:240 and its homologs through SEQ ID NO:478 and its homologs, but excluding SEQ ID NO:391 and its homologs. The amino acid sequences of homologs are SEQ ID NO: 479 through SEQ ID NO: 12463. Tables 2 identifying the sequences of homologs for proteins encoded by the trait-improving genes described supra is provided herein as appendix. In some cases of trait improvement, the recombinant DNA encodes a protein; in other cases, the recombinant DNA suppresses endogenous protein expression. In a broad aspect this invention provides transgenic seed for growing crop plants with improved traits, such crop plants with improved traits and the plant parts including transgenic seed produced by such crop plants. The improved trait provided by the recombinant DNA in the transgenic crop plant of this invention is identified by comparison to a control plant, i.e., a plant without the trait-improving recombinant DNA. In one aspect of the invention, transgenic crop plant grown from the transgenic seed has improved yield, as compared to the yield of a control plant, e.g., a plant without the recombinant DNA that produces the increased yield. Increased yield may be characterized as plant yield increase under non-stress conditions, or by plant yield increase under one or more environmental stress conditions including, but not limited to, water deficit stress, cold stress, heat stress, high salinity stress, shade stress, and low nitrogen availability stress. Still another aspect of the present invention also provides transgenic plants having other improved phenotypes, such as improved plant development, plant morphology, plant physiology or seed composition as compared to a corresponding trait of a control plant. The various aspects of this invention are especially useful for transgenic seed and transgenic plants having improved traits in corn (also know as maize), soybean, cotton, canola (rape), wheat, sunflower, sorghum, alfalfa, barley, millet, rice, tobacco, fruit and vegetable crops, and turfgrass.

[0006] The invention also comprises recombinant DNA constructs. In one aspect such recombinant DNA constructs useful for the transgenic seed and transgenic plants of this invention comprise a promoter functional in a plant cell operably linked to a DNA segment for expressing a protein associated with a trait in a model plant or a homologue. In another aspect the recombinant DNA constructs useful for the transgenic seed and transgenic plants of this invention comprise a promoter functional in a plant cell operably linked to a DNA segment for suppressing the level of an endogenous plant protein which is a homologue to a model-plant protein, the suppression of which is associated with an improved trait. Suppression can be effected by any of a variety of methods known in the art, e.g., post transcriptional suppression by anti-sense, sense, dsRNA and the like or by transcriptional suppression.

[0007] This invention also provides a method of producing a transgenic crop plant having at least one improved trait, wherein the method comprises providing to a grower of transgenic seeds comprising recombinant DNA for expression or suppression of a trait-improving gene provided herein, and growing transgenic plant from said transgenic seed. Such methods can be used to generate transgenic crop plants having at least one improved traits under one or more environmental stress conditions including, but not limited to, water deficit stress, cold stress, heat stress, high salinity stress, shade stress, and low nitrogen availability stress. In another aspect, such method also can be used to generate transgenic crop plants having improved plant development, plant morphology, plant physiology or seed component phenotype as compared to a corresponding phenotype of a control plant. Of particular interest are uses of such methods to generate transgenic crop plants having increased yield under non-stress condition, or under one or more stress conditions.

[0008] One a particular embodiment of this invention provides transgenic seeds comprising trait improving recombinant DNA in its genome for the expression of a bacterial phytochrome protein. Transgenic plants resulting from such invention have improved tolerance to water deficit stress, cold stress and low nitrogen availability stress. In another aspect, transgenic crop plants overexpressing the bacterial phytochrome protein have increased yield under non-stress condition, or under one or more stress conditions.

### DETAILED DESCRIPTION OF THE INVENTION

[0009] The present invention is directed to transgenic plant seed, wherein the genome of said transgenic plant seed comprises a trait-improving recombinant DNA as provided herein, and transgenic plant grown from such seed possesses an improved trait as compared to the trait of a control plant. In one aspect, the present invention relates to transgenic plants wherein the improved trait is one or more traits including improved drought stress tolerance, improved heat stress tolerance, improved cold stress tolerance, improved high salinity stress tolerance, improved low nitrogen availability stress tolerance, improved shade stress tolerance, improved plant growth and development at the stages of seed imbibition through early vegetative phase, and improved plant growth and development at the stages of leaf development, flower production and seed maturity. Of particular interest are the transgenic plants grown from transgenic seeds provided herein wherein the improved trait is increased seed yield. Recombinant DNA constructs disclosed by the present invention comprise recombinant polynucleotides providing for the production of mRNA to modulate gene expression, imparting improved traits to plants.

[0010] As used herein, “gene” refers to chromosomal DNA, plasmid DNA, cDNA, synthetic DNA, or other DNA that encodes a peptide, polypeptide, protein, or RNA molecule, and regions flanking the coding sequences involved in the regulation of expression.

[0011] As used herein, “transgenic seed” refers to a plant seed whose genome has been altered by the incorporation of recombinant DNA, e.g., by transformation as described herein. The term “transgenic plant” is used to refer to the plant produced from an original transformation event, or progeny from later generations or crosses of a plant to a transformed plant, so long as the progeny contains the recombinant DNA in its genome. As used herein, “recombinant DNA” refers to a polynucleotide having a genetically engineered modification introduced through combination of endogenous and/or exogenous elements in a transcription unit, manipulation via mutagenesis, restriction enzymes, and the like or simply by inserting multiple copies of a native transcription unit. Recombinant DNA may comprise DNA segments obtained from different sources, or DNA segments obtained from the same source, but which have been manipulated to join DNA segments which do not naturally exist in the joined form. A recombinant polynucleotide may exist outside of the cell, for example as a PCR fragment, or integrated into a genome, such as a plant genome.

[0012] As used herein, “trait” refers to a physiological, morphological, biochemical, or physical characteristic of a plant or particular plant material or cell. In some instances, this characteristic is visible to the human eye, such as seed or plant size, or can be measured by biochemical techniques, such as detecting the protein, starch, or oil content of seed or leaves, or by observation of a metabolic or physiological process, e.g., by measuring uptake of carbon dioxide, or by the observation of the expression level of a gene or genes, e.g., by employing Northern analysis, RT-PCR, microarray gene expression assays, or reporter gene expression systems, or by agricultural observations such as stress tolerance, yield, or pathogen tolerance.

[0013] As used herein, “control plant” is a plant without trait-improving recombinant DNA. A control plant is used to measure and compare trait improvement in a transgenic plant with such trait-improving recombinant DNA. A suitable control plant may be a non-transgenic plant of the parental line used to generate a transgenic plant herein. Alternatively, control plant may be a transgenic plant that comprises an empty vector or marker gene, but does not contain the recombinant DNA that produces the trait improvement. A control plant may also be a negative segregant progeny of hemizygous transgenic plant. In certain demonstrations of trait improvement, the use of a limited number of control plants can cause a wide variation in the control dataset. To minimize the effect of the variation within the control dataset, a “reference” is used. As use herein a “reference” is a trimmed mean of all data from both transgenic and control plants grown under the same conditions and at the same developmental stage. The trimmed mean is calculated by eliminating a specific percentage, i.e., 20%, of the smallest and largest observation from the data set and then calculating the average of the remaining observation.

[0014] As used herein, “trait improvement” refers to a detectable and desirable difference in a characteristic in a transgenic plant relative to a control plant or a reference. In some cases, the trait improvement can be measured quantitatively. For example, the trait improvement can entail at least a 2% desirable difference in an observed trait, at least a 5% desirable difference, at least about a 10% desirable difference, at least about a 20% desirable difference, at least about a 30% desirable difference, at least about a 50% desirable difference, at least about a 70% desirable difference, or at least about a 100% difference, or an even greater desirable difference. In other cases, the trait improvement is only measured qualitatively. It is known that there can be a natural variation in a trait. Therefore, the trait improvement observed entails a change of the normal distribution of the trait in the transgenic plant compared with the trait distribution observed in a control plant or a reference, which is evaluated by statistical methods provided herein. Trait improvement includes, but not limited to, yield increase, including increased yield under non-stress conditions and increased yield under environmental stress conditions. Stress conditions may include, for example, drought, shade, fungal disease, viral disease, bacterial disease, insect infestation, nematode infestation, cold temperature exposure, heat exposure, osmotic stress, reduced nitrogen nutrient availability, reduced phosphorus nutrient availability and high plant density. Many agronomic traits can affect “yield”, including without limitation, plant height, pod number, pod position on the plant, number of internodes, incidence of pod shatter, grain size, efficiency of nodulation and nitrogen fixation, efficiency of nutrient assimilation, resistance to biotic and abiotic stress, carbon assimilation, plant architecture, resistance to lodging, percent seed germination, seedling vigor, and juvenile traits. Other traits that can affect yield include, efficiency of germination (including germination in stressed conditions), growth rate (including growth rate in stressed conditions), ear number, seed number per ear, seed size, composition of seed (starch, oil, protein) and characteristics of seed fill. Also of interest is the generation of transgenic plants that demonstrate desirable phenotypic properties that may or may not confer an increase in overall plant yield. Such properties include improved plant morphology, plant physiology or improved components of the mature seed harvested from the transgenic plant.

[0015] As used herein, “yield-limiting environment” refers to the condition under which a plant would have the limitation on yield including environmental stress conditions.

[0016] As used herein, “stress condition” refers to the condition unfavorable for a plant, which adversely affect plant metabolism, growth and/or development. A plant under the stress condition typically shows reduced germination rate, retarded growth and development, reduced photosynthesis rate, and eventually leading to reduction in yield.

[0017] Specifically, “water deficit stress” used herein preferably refers to the sub-optimal conditions for water and humidity needed for normal growth of natural plants. Relative water content (RWC) can be used as a physiological measure of plant water deficit. It measures the effect of osmotic adjustment in plant water status, when a plant is under stressed conditions. Conditions which may result in water deficit stress include heat, drought, high salinity and PEG induced osmotic stress.

[0018] “Cold stress” used herein preferably refers to the exposure of a plant to a temperatures below (two or more degrees Celsius below) those normal for a particular species or particular strain of plant.

[0019] As used herein, “sufficient nitrogen growth condition” refers to the growth condition where the soil or growth medium contains or receives enough amounts of nitrogen nutrient to sustain a healthy plant growth and/or for a plant to reach its typical yield for a particular plant species or a particular strain. As used herein, “nitrogen nutrient” means any one or any mix of the nitrate salts commonly used as plant nitrogen fertilizer, including, but not limited to, potassium nitrate, calcium nitrate, sodium nitrate, ammonium nitrate. The term ammonium as used herein means any one or any mix of the ammonium salts commonly used as plant nitrogen fertilizer, e.g., ammonium nitrate, ammonium chloride, ammonium sulfate, etc. One skilled in the art would recognize what constitute such soil, media and fertilizer inputs for most plant species. “Low nitrogen availability stress” used herein refers to a plant growth condition that does not contain sufficient nitrogen nutrient to maintain a healthy plant growth and/or for a plant to reach its typical yield under a sufficient nitrogen growth condition, and preferably refers to a growth condition with 50% or less of the conventional nitrogen inputs.

[0020] “Shade stress” used herein preferably refers to limited light availability that triggers the shade avoidance response in plant. Plants are subject to shade stress when localized at lower part of the canopy, or in close proximity of neighboring vegetation. Shade stress may become exacerbated when the planting density exceeds the average prevailing density for a particular plant species. The average prevailing densities per acre of a few other examples of crop plants in the USA in the year 2000 were: wheat 1,000,000-1,500,000; rice 650,000-900,000; soybean 150,000-200,000, canola 260,000-350,000, sunflower 17,000-23,000 and cotton 28,000-55,000 plants per acre (Cheikh, et al., (2003) U.S. Patent Application No. 20030101479).

[0021] As used herein, “increased yield” of a transgenic plant of the present invention may be evidenced and measured in a number of ways, including test weight, seed number per plant, seed weight, seed number per unit area (i.e., seeds, or weight of seeds, per acre), bushels per acre, tons per acre, tons per acre, kilo per hectare. For example, maize yield may be measured as production of shelled corn kernels per unit of production area, e.g., in bushels per acre or metric tons per hectare, often reported on a moisture adjusted basis, e.g., at 15.5% moisture. Increased yield may result from improved utilization of key biochemical compounds, such as nitrogen, phosphorous and carbohydrate, or from improved responses to environmental stresses, such as cold, heat, drought, salt, and attack by pests or pathogens. Trait-improving recombinant DNA may also be used to provide transgenic plants having improved growth and development, and ultimately increased yield, as the result of modified expression of plant growth regulators or modification of cell cycle or photosynthesis pathways.

[0022] As used herein, “expression” refers to transcription of DNA to produce RNA. The resulting RNA may be without limitation mRNA encoding a protein, antisense RNA that is complementary to an mRNA encoding a protein, or an RNA transcript comprising a combination of sense and antisense gene regions, such as for use in RNAi technology. Expression as used herein may also refer to production of encoded protein from mRNA.

[0023] As used herein, “promoter” includes reference to a region of DNA upstream from the start of transcription and involved in recognition and binding of RNA polymerase and other proteins to initiate transcription. A “plant promoter” is a promoter capable of initiating transcription in plant cells whether or not its origin is a plant cell. Exemplary plant promoters include, but are not limited to, those that are obtained from plants, plant viruses, and bacteria which comprise genes expressed in plant cells such as Agrobacterium or Rhizobium. Examples of promoters under developmental control include promoters that preferentially initiate transcription in certain tissues, such as leaves, roots, or seeds. Such promoters are referred to as “tissue preferred”. Promoters which initiate transcription only in certain tissues are referred to as “tissue specific”. A “cell type” specific promoter primarily drives expression in certain cell types in one or more organs, for example, vascular cells in roots or leaves. An “inducible” or “repressible” promoter is a promoter which is under environmental control. Examples of environmental conditions that may effect transcription by inducible promoters include anaerobic conditions, or certain chemicals, or the presence of light. Tissue specific, tissue preferred, cell type specific, and inducible promoters constitute the class of “non-constitutive” promoters. A “constitutive” promoter is a promoter which is active under most conditions. As used herein, “antisense orientation” includes reference to a polynucleotide sequence that is operably linked to a promoter in an orientation where the antisense strand is transcribed. The antisense strand is sufficiently complementary to an endogenous transcription product such that translation of the endogenous transcription product is often inhibited.

[0024] As used herein, “operably linked” refers to the association of two or more nucleic acid fragments on a single nucleic acid fragment so that the function of one is affected by the other. For example, a promoter is operably linked with a coding sequence when it is capable of affecting the expression of that coding sequence (i.e., that the coding sequence is under the transcriptional control of the promoter). Coding sequences can be operably linked to regulatory sequences in sense or antisense orientation.

[0025] As used herein, “consensus sequence” refers to an artificial, amino acid sequence of conserved parts of the proteins encoded by homologous genes, e.g., as determined by a CLUSTALW alignment of amino acid sequence of homolog proteins.

[0026] As used herein, “homolog” refers to a gene related to a second gene by descent from a common ancestral DNA sequence. The term, homolog, may apply to the relationship between genes separated by the event of speciation (see ortholog) or to the relationship between genes separated by the event of genetic duplication (see paralog). Homologs can be from the same or a different organism that performs the same biological function. “Orthologs” refer to a set of homologous genes in different species that evolved from a common ancestral gene by specification. Normally, orthologs retain the same function in the course of evolution; and “paralogs” refer to a set of homologous genes in the same species that have diverged from each other as a consequence of genetic duplication.

[0027] Percent identity refers to the extent to which two optimally aligned DNA or protein segments are invariant throughout a window of alignment of components, e.g., nucleotide sequence or amino acid sequence. An “identity fraction” for aligned segments of a test sequence and a reference sequence is the number of identical components which are shared by sequences of the two aligned segments divided by the total number of sequence components in the reference segment over a window of alignment which is the smaller of the full test sequence or the full reference sequence. “Percent identity” (“% identity”) is the identity fraction times 100. “% identity to a consensus amino acid sequence” is 100 times the identity fraction in a window of alignment of an amino acid sequence of a test protein optimally aligned to consensus amino acid sequence of this invention.

[0028] As used herein “Arabidopsis” means plants of Arabidopsis thaliana.

Recombinant DNA Constructs

[0029] The present invention provides recombinant DNA constructs comprising one or more polynucleotides disclosed herein for imparting one or more improved traits to transgenic plant. Such constructs also typically comprise a promoter operatively linked to said polynucleotide to provide for expression in a target plant. Other construct components may include additional regulatory elements, such as 5′ or 3′ untranslated regions (such as polyadenylation sites), intron regions, and transit or signal peptides. Such recombinant DNA constructs can be assembled using methods known to those of ordinary skill in the art.

[0030] In a preferred embodiment, a polynucleotide of the present invention is operatively linked in a recombinant DNA construct to a promoter functional in a plant to provide for expression of the polynucleotide in the sense orientation such that a desired polypeptide is produced. Also provided are embodiments wherein a polynucleotide is operatively linked to a promoter functional in a plant to provide for expression of the polynucleotide in the antisense orientation such that a complementary copy of at least a portion of an mRNA native to the target plant host is produced.

[0031] Recombinant constructs prepared in accordance with the present invention may also generally include a 3′ untranslated DNA region (UTR) that typically contains a polyadenylation sequence following the polynucleotide coding region. Examples of useful 3′ UTRs include those from the nopaline synthase gene of Agrobacterium tumefaciens (nos), a gene encoding the small subunit of a ribulose-1,5-bisphosphate carboxylase-oxygenase (rbcS), and the T7 transcript of Agrobacterium tumefaciens. Constructs and vectors may also include a transit peptide for targeting of a gene target to a plant organelle, particularly to a chloroplast, leucoplast or other plastid organelle. For descriptions of the use of chloroplast transit peptides, see U.S. Pat. No. 5,188,642 and U.S. Pat. No. 5,728,925, incorporated herein by reference.

[0032] Table 1 provides a list of genes that can provide recombinant DNA that was used in a model plant to discover associate improved traits and that can be used with homologs to define a consensus amino acid sequence for characterizing recombinant DNA in the transgenic seeds, transgenic plants, DNA constructs and methods of this invention.

“NUC SEQ ID NO” refers to a SEQ ID NO. for a particular DNA sequence in the Sequence Listing.

[0033] “PEP SEQ ID NO” refers to a SEQ ID NO. in the Sequence Listing for the amino acid sequence of a protein cognate to a particular DNA “construct_id” refers to an arbitrary number used to identify a particular recombinant DNA construct comprising the particular DNA.

“gene” refers to an arbitrary name used to identify the particular DNA.

“orientation” refers to the orientation of the particular DNA in a recombinant DNA construct relative to the promoter.

[0034] “species” refers to the organism from which the particular DNA was derived.

TABLE 1

| Nuc SEQ ID | Pep SEQ ID | construct_id | Gene | orientation | Species |
|---|---|---|---|---|---|
| 1 | 240 | 19867 | CGPG4046 | Sense | Glycine max |
| 2 | 241 | 74518 | CGPG6792 | Sense | Pseudomonas fluorescens PfO-1 |
| 3 | 242 | 15816 | CGPG2244 | Sense | Arabidopsis thaliana |
| 4 | 243 | 17918 | CGPG2774 | Sense | Arabidopsis thaliana |
| 5 | 244 | 15306 | CGPG1909 | AntiSense | Arabidopsis thaliana |
| 6 | 245 | 12038 | CGPG1087 | Sense | Arabidopsis thaliana |
| 7 | 246 | 12046 | CGPG1106 | Sense | Arabidopsis thaliana |
| 8 | 247 | 13432 | CGPG1525 | Sense | Arabidopsis thaliana |
| 9 | 248 | 13711 | CGPG1114 | Sense | Arabidopsis thaliana |
| 10 | 249 | 14809 | CGPG692 | Sense | Arabidopsis thaliana |
| 11 | 250 | 14951 | CGPG1636 | Sense | Arabidopsis thaliana |
| 12 | 251 | 15632 | CGPG1469 | Sense | Arabidopsis thaliana |
| 13 | 252 | 16147 | CGPG2088 | Sense | Arabidopsis thaliana |
| 14 | 253 | 16158 | CGPG2169 | Sense | Arabidopsis thaliana |
| 15 | 254 | 16170 | CGPG2192 | Sense | Arabidopsis thaliana |
| 16 | 255 | 16171 | CGPG2194 | Sense | Arabidopsis thaliana |
| 17 | 256 | 16175 | CGPG2204 | Sense | Arabidopsis thaliana |
| 18 | 257 | 17430 | CGPG2478 | Sense | Arabidopsis thaliana |
| 19 | 258 | 17819 | CGPG2587 | Sense | Arabidopsis thaliana |
| 20 | 259 | 17921 | CGPG2878 | Sense | Arabidopsis thaliana |
| 21 | 260 | 17928 | CGPG2739 | Sense | Arabidopsis thaliana |
| 22 | 261 | 18637 | CGPG3450 | Sense | Arabidopsis thaliana |
| 23 | 262 | 18816 | CGPG2406 | Sense | Arabidopsis thaliana |
| 24 | 263 | 19227 | CGPG3025 | Sense | Arabidopsis thaliana |
| 25 | 264 | 19429 | CGPG3486 | Sense | Arabidopsis thaliana |
| 26 | 265 | 70235 | CGPG96 | Sense | Arabidopsis thaliana |
| 27 | 266 | 72634 | CGPG4855 | Sense | Arabidopsis thaliana |
| 28 | 267 | 72752 | CGPG5532 | Sense | Saccharomyces cerevisiae |
| 29 | 268 | 12007 | CGPG1089 | AntiSense | Arabidopsis thaliana |
| 30 | 269 | 12290 | CGPG977 | AntiSense | Arabidopsis thaliana |
| 31 | 270 | 12343 | CGPG581 | AntiSense | Arabidopsis thaliana |
| 32 | 271 | 14348 | CGPG1692 | AntiSense | Arabidopsis thaliana |
| 33 | 272 | 15708 | CGPG2167 | AntiSense | Arabidopsis thaliana |
| 34 | 273 | 17615 | CGPG2458 | Anti-Sense | Arabidopsis thaliana |
| 35 | 274 | 17622 | CGPG2454 | Anti-Sense | Arabidopsis thaliana |
| 36 | 275 | 70714 | CGPG1480 | Anti-sense | Arabidopsis thaliana |
| 37 | 276 | 17925 | CGPG2883 | Sense | Arabidopsis thaliana |
| 38 | 277 | 18541 | CGPG2971 | Sense | Arabidopsis thaliana |
| 39 | 278 | 11425 | CGPG628 | Sense | Arabidopsis thaliana |
| 40 | 279 | 12263 | CGPG799 | Sense | Arabidopsis thaliana |
| 41 | 280 | 12288 | CGPG811 | Sense | Arabidopsis thaliana |
| 42 | 281 | 12910 | CGPG985 | Sense | Arabidopsis thaliana |
| 43 | 282 | 14335 | CGPG1685 | Sense | Arabidopsis thaliana |
| 44 | 283 | 17427 | CGPG2475 | Sense | Arabidopsis thaliana |
| 45 | 284 | 19140 | CGPG1758 | Sense | Arabidopsis thaliana |
| 46 | 285 | 19179 | CGPG740 | Sense | Arabidopsis thaliana |
| 47 | 286 | 19251 | CGPG3118 | Sense | Arabidopsis thaliana |
| 48 | 287 | 19443 | CGPG2834 | Sense | Arabidopsis thaliana |
| 49 | 288 | 19607 | CGPG3397 | Sense | Arabidopsis thaliana |
| 50 | 289 | 19915 | CGPG4072 | Sense | Glycine max |
| 51 | 290 | 70222 | CGPG28 | Sense | Arabidopsis thaliana |
| 52 | 291 | 70464 | CGPG3773 | Sense | Arabidopsis thaliana |
| 53 | 292 | 70474 | CGPG3806 | Sense | Arabidopsis thaliana |
| 54 | 293 | 70484 | CGPG3853 | Sense | Arabidopsis thaliana |
| 55 | 294 | 72474 | CGPG4667 | Sense | Glycine max |
| 56 | 295 | 13047 | CGPG1324 | ANTI-SENSE | Arabidopsis thaliana |
| 57 | 296 | 13304 | CGPG1282 | ANTI-SENSE | Arabidopsis thaliana |
| 58 | 297 | 13474 | CGPG1600 | ANTI-SENSE | Arabidopsis thaliana |
| 59 | 298 | 19252 | CGPG3121 | SENSE | Arabidopsis thaliana |
| 60 | 299 | 12612 | CGPG1181 | SENSE | Arabidopsis thaliana |
| 61 | 300 | 12926 | CGPG1299 | SENSE | Arabidopsis thaliana |
| 62 | 301 | 13230 | CGPG1276 | SENSE | Arabidopsis thaliana |
| 63 | 302 | 14235 | CGPG1665 | SENSE | Arabidopsis thaliana |
| 64 | 303 | 17305 | CGPG2261 | SENSE | Arabidopsis thaliana |
| 65 | 304 | 17470 | CGPG2606 | SENSE | Arabidopsis thaliana |
| 66 | 305 | 17718 | CGPG1791 | SENSE | Arabidopsis thaliana |
| 67 | 306 | 17904 | CGPG1912 | SENSE | Arabidopsis thaliana |
| 68 | 307 | 18280 | CGPG3547 | SENSE | Arabidopsis thaliana |
| 69 | 308 | 18287 | CGPG3563 | SENSE | Arabidopsis thaliana |
| 70 | 309 | 18501 | CGPG2237 | SENSE | Arabidopsis thaliana |
| 71 | 310 | 18877 | CGPG3097 | SENSE | Arabidopsis thaliana |
| 72 | 311 | 19531 | CGPG3028 | SENSE | Arabidopsis thaliana |
| 73 | 312 | 70405 | CGPG1672 | SENSE | Arabidopsis thaliana |
| 74 | 313 | 72136 | CGPG5320 | SENSE | Glycine max |
| 75 | 314 | 72611 | CGPG4812 | SENSE | Arabidopsis thaliana |
| 76 | 315 | 12627 | CGPG1003 | SENSE | Arabidopsis thaliana |
| 77 | 316 | 12813 | CGPG825 | SENSE | Arabidopsis thaliana |
| 78 | 317 | 14945 | CGPG1776 | SENSE | Arabidopsis thaliana |
| 79 | 318 | 15345 | CGPG1504 | SENSE | Arabidopsis thaliana |
| 80 | 319 | 15348 | CGPG1514 | SENSE | Arabidopsis thaliana |
| 81 | 320 | 16325 | CGPG2195 | SENSE | Arabidopsis thaliana |
| 82 | 321 | 16702 | CGPG531 | SENSE | Arabidopsis thaliana |
| 83 | 322 | 16836 | CGPG2283 | SENSE | Arabidopsis thaliana |
| 84 | 323 | 17002 | CGPG1926 | SENSE | Arabidopsis thaliana |
| 85 | 324 | 17012 | CGPG2073 | SENSE | Arabidopsis thaliana |
| 86 | 325 | 17017 | CGPG1722 | SENSE | Arabidopsis thaliana |
| 87 | 326 | 17344 | CGPG2404 | SENSE | Arabidopsis thaliana |
| 88 | 327 | 17426 | CGPG2474 | SENSE | Arabidopsis thaliana |
| 89 | 328 | 17655 | CGPG2899 | SENSE | Arabidopsis thaliana |
| 90 | 329 | 17656 | CGPG2714 | SENSE | Arabidopsis thaliana |
| 91 | 330 | 17906 | CGPG2145 | SENSE | Arabidopsis thaliana |
| 92 | 331 | 18278 | CGPG3544 | SENSE | Arabidopsis thaliana |
| 93 | 332 | 18822 | CGPG2398 | SENSE | Arabidopsis thaliana |
| 94 | 333 | 18881 | CGPG3126 | SENSE | Arabidopsis thaliana |
| 95 | 334 | 19213 | CGPG3622 | SENSE | Arabidopsis thaliana |
| 96 | 335 | 19239 | CGPG3197 | SENSE | Arabidopsis thaliana |
| 97 | 336 | 19247 | CGPG3112 | SENSE | Arabidopsis thaliana |
| 98 | 337 | 19460 | CGPG2824 | SENSE | Arabidopsis thaliana |
| 99 | 338 | 19512 | CGPG2898 | SENSE | Arabidopsis thaliana |
| 100 | 339 | 19533 | CGPG3032 | SENSE | Arabidopsis thaliana |
| 101 | 340 | 19603 | CGPG3385 | SENSE | Arabidopsis thaliana |
| 102 | 341 | 72126 | CGPG5310 | SENSE | Glycine max |
| 103 | 342 | 72437 | CGPG5068 | SENSE | Arabidopsis thaliana |
| 104 | 343 | 72441 | CGPG5079 | SENSE | Arabidopsis thaliana |
| 105 | 344 | 72639 | CGPG4861 | SENSE | Arabidopsis thaliana |
| 106 | 345 | 14825 | CGPG1883 | Anti-Sense | Arabidopsis thaliana |
| 107 | 346 | 17931 | CGPG2890 | Sense | Arabidopsis thaliana |
| 108 | 347 | 18854 | CGPG3524 | Sense | Arabidopsis thaliana |
| 109 | 348 | 12237 | CGPG1206 | Sense | Arabidopsis thaliana |
| 110 | 349 | 13414 | CGPG1246 | Sense | Arabidopsis thaliana |
| 111 | 350 | 16160 | CGPG2172 | Sense | Arabidopsis thaliana |
| 112 | 351 | 16226 | CGPG1980 | Sense | Arabidopsis thaliana |
| 113 | 352 | 16803 | CGPG2179 | Sense | Arabidopsis thaliana |
| 114 | 353 | 18260 | CGPG3373 | Sense | Arabidopsis thaliana |
| 115 | 354 | 18642 | CGPG3230 | Sense | Arabidopsis thaliana |
| 116 | 355 | 18721 | CGPG3618 | Sense | Arabidopsis thaliana |
| 117 | 356 | 19254 | CGPG3123 | Sense | Arabidopsis thaliana |
| 118 | 357 | 70247 | CGPG34 | Sense | Arabidopsis thaliana |
| 119 | 358 | 70650 | CGPG4337 | Sense | Arabidopsis thaliana |
| 120 | 359 | 11787 | CGPG951 | ANTI-SENSE | Arabidopsis thaliana |
| 120 | 359 | 12635 | CGPG951 | Sense | Arabidopsis thaliana |
| 121 | 360 | 13641 | CGPG1211 | ANTI-SENSE | Arabidopsis thaliana |
| 122 | 361 | 14515 | CGPG1115 | ANTI-SENSE | Arabidopsis thaliana |
| 123 | 362 | 14920 | CGPG2027 | ANTI-SENSE | Arabidopsis thaliana |
| 124 | 363 | 15204 | CGPG2000 | ANTI-SENSE | Arabidopsis thaliana |
| 125 | 364 | 15216 | CGPG1906 | ANTI-SENSE | Arabidopsis thaliana |
| 125 | 364 | 19058 | CGPG1906 | SENSE | Arabidopsis thaliana |
| 126 | 365 | 15330 | CGPG1237 | ANTI-SENSE | Arabidopsis thaliana |
| 127 | 366 | 19610 | CGPG3419 | SENSE | Arabidopsis thaliana |
| 128 | 367 | 14338 | CGPG1706 | SENSE | Arabidopsis thaliana |
| 129 | 368 | 17809 | CGPG2436 | SENSE | Arabidopsis thaliana |
| 130 | 369 | 72471 | CGPG4648 | SENSE | Glycine max |
| 131 | 370 | 16403 | CGPG1983 | SENSE | Arabidopsis thaliana |
| 132 | 371 | 17737 | CGPG2623 | SENSE | Arabidopsis thaliana |
| 133 | 372 | 18395 | CGPG2994 | SENSE | Arabidopsis thaliana |
| 134 | 373 | 72772 | CGPG2418 | SENSE | Arabidopsis thaliana |
| 135 | 374 | 19441 | CGPG2783 | SENSE | Arabidopsis thaliana |
| 136 | 375 | 11409 | CGPG136 | SENSE | Arabidopsis thaliana |
| 137 | 376 | 10486 | CGPG137 | SENSE | Arabidopsis thaliana |
| 138 | 377 | 12104 | CGPG693 | SENSE | Arabidopsis thaliana |
| 139 | 378 | 12258 | CGPG836 | SENSE | Arabidopsis thaliana |
| 140 | 379 | 12909 | CGPG1195 | SENSE | Arabidopsis thaliana |
| 141 | 380 | 14310 | CGPG1037 | SENSE | Arabidopsis thaliana |
| 142 | 381 | 14317 | CGPG1150 | SENSE | Arabidopsis thaliana |
| 143 | 382 | 14709 | CGPG990 | SENSE | Arabidopsis thaliana |
| 144 | 383 | 15123 | CGPG1730 | SENSE | Arabidopsis thaliana |
| 145 | 384 | 16013 | CGPG978 | SENSE | Arabidopsis thaliana |
| 146 | 385 | 16185 | CGPG2025 | SENSE | Arabidopsis thaliana |
| 147 | 386 | 16719 | CGPG1817 | SENSE | Arabidopsis thaliana |
| 148 | 387 | 17490 | CGPG2638 | SENSE | Arabidopsis thaliana |
| 149 | 388 | 17905 | CGPG2101 | SENSE | Arabidopsis thaliana |
| 150 | 389 | 18385 | CGPG3609 | SENSE | Arabidopsis thaliana |
| 151 | 390 | 18392 | CGPG2989 | SENSE | Arabidopsis thaliana |
| 153 | 392 | 18531 | CGPG3215 | SENSE | Arabidopsis thaliana |
| 154 | 393 | 18603 | CGPG3423 | SENSE | Arabidopsis thaliana |
| 155 | 394 | 19530 | CGPG3026 | SENSE | Arabidopsis thaliana |
| 156 | 395 | 70202 | CGPG3949 | SENSE | Glycine max |
| 157 | 396 | 72009 | CGPG5273 | SENSE | Saccharomyces cerevisiae |
| 158 | 397 | 72119 | CGPG5332 | SENSE | Glycine max |
| 159 | 398 | 10188 | CGPG147 | Anti-sense | Arabidopsis thaliana |
| 160 | 399 | 10404 | CGPG25 | Anti-Sense | Arabidopsis thaliana |
| 161 | 400 | 11333 | CGPG583 | Anti-Sense | Arabidopsis thaliana |
| 162 | 401 | 11719 | CGPG710 | Anti-Sense | Arabidopsis thaliana |
| 163 | 402 | 13663 | CGPG1241 | Anti-sense | Arabidopsis thaliana |
| 164 | 403 | 13958 | CGPG1711 | Anti-Sense | Arabidopsis thaliana |
| 165 | 404 | 15214 | CGPG1904 | Anti-Sense | Arabidopsis thaliana |
| 166 | 405 | 10483 | CGPG447 | Sense | Arabidopsis thaliana |
| 167 | 406 | 11711 | CGPG466 | Sense | Arabidopsis thaliana |
| 168 | 407 | 11909 | CGPG471 | Sense | Arabidopsis thaliana |
| 169 | 408 | 12216 | CGPG1091 | Sense | Arabidopsis thaliana |
| 170 | 409 | 12236 | CGPG1193 | Sense | Arabidopsis thaliana |
| 171 | 410 | 12256 | CGPG824 | Sense | Arabidopsis thaliana |
| 172 | 411 | 12806 | CGPG714 | Sense | Arabidopsis thaliana |
| 173 | 412 | 12904 | CGPG204 | Sense | Arabidopsis thaliana |
| 174 | 413 | 13212 | CGPG1384 | Sense | Arabidopsis thaliana |
| 175 | 414 | 13232 | CGPG1281 | Sense | Arabidopsis thaliana |
| 176 | 415 | 13912 | CGPG1283 | Sense | Arabidopsis thaliana |
| 177 | 416 | 14327 | CGPG1606 | Sense | Arabidopsis thaliana |
| 178 | 417 | 14704 | CGPG1066 | Sense | Arabidopsis thaliana |
| 179 | 418 | 14714 | CGPG1431 | Sense | Arabidopsis thaliana |
| 180 | 419 | 15142 | CGPG1917 | Sense | Arabidopsis thaliana |
| 181 | 420 | 17450 | CGPG2684 | Sense | Arabidopsis thaliana |
| 182 | 421 | 18607 | CGPG3496 | Sense | Arabidopsis thaliana |
| 183 | 422 | 19409 | CGPG2691 | Sense | Arabidopsis thaliana |
| 184 | 423 | 19412 | CGPG2727 | Sense | Arabidopsis thaliana |
| 185 | 424 | 13005 | CGPG724 | ANTI-SENSE | Arabidopsis thaliana |
| 186 | 425 | 10203 | CGPG272 | ANTI-SENSE | Arabidopsis thaliana |
| 187 | 426 | 11327 | CGPG551 | ANTI-SENSE | Arabidopsis thaliana |
| 188 | 427 | 11814 | CGPG1041 | ANTI-SENSE | Arabidopsis thaliana |
| 188 | 427 | 12018 | CGPG1041 | SENSE | Arabidopsis thaliana |
| 189 | 428 | 13003 | CGPG673 | ANTI-SENSE | Arabidopsis thaliana |
| 190 | 429 | 13949 | CGPG1686 | ANTI-SENSE | Arabidopsis thaliana |
| 191 | 430 | 16416 | CGPG2258 | ANTI-SENSE | Arabidopsis thaliana |
| 192 | 431 | 16438 | CGPG1847 | ANTI-SENSE | Arabidopsis thaliana |
| 193 | 432 | 17124 | CGPG2432 | ANTI-SENSE | Arabidopsis thaliana |
| 194 | 433 | 19132 | CGPG1755 | ANTI-SENSE | Arabidopsis thaliana |
| 195 | 434 | 17922 | CGPG2880 | SENSE | Arabidopsis thaliana |
| 196 | 435 | 19719 | CGPG4171 | SENSE | Glycine max |
| 197 | 436 | 17336 | CGPG1732 | SENSE | Arabidopsis thaliana |
| 197 | 436 | 14274 | CGPG1732 | ANTI-SENSE | Arabidopsis thaliana |
| 198 | 437 | 17735 | CGPG2423 | SENSE | Arabidopsis thaliana |
| 199 | 438 | 19249 | CGPG3115 | SENSE | Arabidopsis thaliana |
| 200 | 439 | 18513 | CGPG3485 | SENSE | Arabidopsis thaliana |
| 201 | 440 | 11517 | CGPG224 | SENSE | Arabidopsis thaliana |
| 202 | 441 | 12363 | CGPG981 | SENSE | Arabidopsis thaliana |
| 203 | 442 | 12922 | CGPG1294 | SENSE | Arabidopsis thaliana |
| 204 | 443 | 15360 | CGPG1719 | SENSE | Arabidopsis thaliana |
| 205 | 444 | 16028 | CGPG2047 | SENSE | Arabidopsis thaliana |
| 206 | 445 | 16648 | CGPG2504 | SENSE | Agrobacterium tumefaciens |
| 207 | 446 | 16705 | CGPG1005 | SENSE | Arabidopsis thaliana |
| 208 | 447 | 16715 | CGPG2273 | SENSE | Arabidopsis thaliana |
| 209 | 448 | 17316 | CGPG2146 | SENSE | Arabidopsis thaliana |
| 210 | 449 | 17331 | CGPG1708 | SENSE | Arabidopsis thaliana |
| 211 | 450 | 17339 | CGPG2461 | SENSE | Arabidopsis thaliana |
| 212 | 451 | 17420 | CGPG2465 | SENSE | Arabidopsis thaliana |
| 213 | 452 | 17446 | CGPG2728 | SENSE | Arabidopsis thaliana |
| 214 | 453 | 17487 | CGPG2633 | SENSE | Arabidopsis thaliana |
| 215 | 454 | 17740 | CGPG2605 | SENSE | Arabidopsis thaliana |
| 216 | 455 | 17752 | CGPG2831 | SENSE | Arabidopsis thaliana |
| 217 | 456 | 18021 | CGPG685 | SENSE | Arabidopsis thaliana |
| 218 | 457 | 18245 | CGPG3343 | SENSE | Arabidopsis thaliana |
| 219 | 458 | 18617 | CGPG3521 | SENSE | Arabidopsis thaliana |
| 220 | 459 | 18734 | CGPG3198 | SENSE | Arabidopsis thaliana |
| 221 | 460 | 18823 | CGPG2830 | SENSE | Arabidopsis thaliana |
| 222 | 461 | 19222 | CGPG3017 | SENSE | Arabidopsis thaliana |
| 223 | 462 | 19430 | CGPG3487 | SENSE | Arabidopsis thaliana |
| 224 | 463 | 12332 | CGPG356 | AntiSense | Arabidopsis thaliana |
| 225 | 464 | 13649 | CGPG1544 | Anti-Sense | Arabidopsis thaliana |
| 226 | 465 | 16113 | CGPG2128 | AntiSense | Arabidopsis thaliana |
| 227 | 466 | 12069 | CGPG1188 | Sense | Arabidopsis thaliana |
| 228 | 467 | 12906 | CGPG313 | Sense | Arabidopsis thaliana |
| 229 | 468 | 13443 | CGPG1233 | Sense | Arabidopsis thaliana |
| 230 | 469 | 14707 | CGPG1141 | Sense | Arabidopsis thaliana |
| 231 | 470 | 15116 | CGPG1509 | Sense | Arabidopsis thaliana |
| 232 | 471 | 16117 | CGPG2234 | Sense | Arabidopsis thaliana |
| 233 | 472 | 16136 | CGPG2144 | Sense | Arabidopsis thaliana |
| 234 | 473 | 19077 | CGPG1808 | Sense | Arabidopsis thaliana |
| 235 | 474 | 19178 | CGPG3683 | Sense | Sacoharomyces cerevisiae |
| 236 | 475 | 70752 | CGPG4465 | Sense | Arabidopsis thaliana |
| 237 | 476 | 70753 | CGPG4469 | Sense | Arabidopsis thaliana |
| 238 | 477 | 70809 | CGPG388 | Sense | Arabidopsis thaliana |
| 239 | 478 | 72091 | CGPG5264 | Sense | Sacoharomyces cerevisiae |

Recombinant DNA

[0035] Exemplary DNA for use in the present invention to improve traits in plants are provided herein as SEQ ID NO: 1 through SEQ ID NO: 151 and SEQ ID NO: 153 through SEQ ID NO: 239. A subset of the exemplary DNA includes fragments of the disclosed full polynucleotides consisting of oligonucleotides of at least 15, preferably at least 16 or 17, more preferably at least 18 or 19, and even more preferably at least 20 or more, consecutive nucleotides. Such oligonucleotides are fragments of the larger molecules having a sequence selected from the group consisting of SEQ ID NO: 1 through SEQ ID NO: 151 and SEQ ID NO: 153 through SEQ ID NO: 239, and find use, for example as probes and primers for detection of the polynucleotides of the present invention.

[0036] Also of interest in the present invention are variants of the DNA provided herein. Such variants may be naturally occurring, including DNA from homologous genes from the same or a different species, or may be non-natural variants, for example DNA synthesized using chemical synthesis methods, or generated using recombinant DNA techniques. Degeneracy of the genetic code provides the possibility to substitute at least one base of the protein encoding sequence of a gene with a different base without causing the amino acid sequence of the polypeptide produced from the gene to be changed. Hence, a DNA useful in the present invention may have any base sequence that has been changed from the sequences provided herein by substitution in accordance with degeneracy of the genetic code.

[0037] Homologs of the genes providing DNA of demonstrated as useful in improving traits in model plants disclosed herein will generally demonstrate significant identity with the DNA provided herein. DNA is substantially identical to a reference DNA if, when the sequences of the polynucleotides are optimally aligned there is about 60% nucleotide equivalence; more preferably 70%; more preferably 80% equivalence; more preferably 85% equivalence; more preferably 90%; more preferably 95%; and/or more preferably 98% or 99% equivalence over a comparison window. A comparison window is preferably at least 50-100 nucleotides, and more preferably is the entire length of the polynucleotide provided herein. Optimal alignment of sequences for aligning a comparison window may be conducted by algorithms; preferably by computerized implementations of these algorithms (for example, the Wisconsin Genetics Software Package Release 7.0-10.0, Genetics Computer Group, 575 Science Dr., Madison, Wis.). The reference polynucleotide may be a full-length molecule or a portion of a longer molecule. Preferentially, the window of comparison for determining polynucleotide identity of protein encoding sequences is the entire coding region.

Recombinant DNA

[0038] Proteins useful for imparting improved traits are entire proteins or at least a sufficient portion of the entire protein to impart the relevant biological activity of the protein. The term “protein” also includes molecules consisting of one or more polypeptide chains. Thus, a protein useful in the present invention may constitute an entire protein having the desired biological activity, or may constitute a portion of an oligomeric protein having multiple polypeptide chains. Proteins useful for generation of transgenic plants having improved traits include the proteins with an amino acid sequence provided herein as SEQ ID NO: 240 through SEQ ID NO: 390 and SEQ ID NO: 392 through SEQ ID NO: 478, as well as homologs of such proteins.

[0039] Homologs of the proteins useful in the present invention may be identified by comparison of the amino acid sequence of the protein to amino acid sequences of proteins from the same or different plant sources, e.g., manually or by using known homology-based search algorithms such as those commonly known and referred to as BLAST, FASTA, and Smith-Waterman. As used herein, a homolog is a protein from the same or a different organism that performs the same biological function as the polypeptide to which it is compared. An orthologous relation between two organisms is not necessarily manifest as a one-to-one correspondence between two genes, because a gene can be duplicated or deleted after organism phylogenetic separation, such as speciation. For a given protein, there may be no ortholog or more than one ortholog. Other complicating factors include alternatively spliced transcripts from the same gene, limited gene identification, redundant copies of the same gene with different sequence lengths or corrected sequence. A local sequence alignment program, e.g., BLAST, can be used to search a database of sequences to find similar sequences, and the summary Expectation value (E-value) used to measure the sequence base similarity. As a protein hit with the best E-value for a particular organism may not necessarily be an ortholog or the only ortholog, a reciprocal BLAST search is used in the present invention to filter hit sequences with significant E-values for ortholog identification. The reciprocal BLAST entails search of the significant hits against a database of amino acid sequences from the base organism that are similar to the sequence of the query protein. A hit is a likely ortholog, when the reciprocal BLAST's best hit is the query protein itself or a protein encoded by a duplicated gene after speciation. Thus, homolog is used herein to describe protein that are assumed to have functional similarity by inference from sequence base similarity. The relationship of homologs with amino acid sequences of SEQ ID NO: 479 through SEQ ID NO: 12463 to the proteins with amino acid sequences of SEQ ID NO: 240 through SEQ ID NO: 478 is found is found in Table 2 appended.

[0040] A further aspect of the invention comprises functional homolog proteins which differ in one or more amino acids from those of a trait-improving protein disclosed herein as the result of one or more of the well-known conservative amino acid substitutions, e.g., valine is a conservative substitute for alanine and threonine is a conservative substitute for serine. Conservative substitutions for an amino acid within the native sequence can be selected from other members of a class to which the naturally occurring amino acid belongs. Representative amino acids within these various classes include, but are not limited to: (1) acidic (negatively charged) amino acids such as aspartic acid and glutamic acid; (2) basic (positively charged) amino acids such as arginine, histidine, and lysine; (3) neutral polar amino acids such as glycine, serine, threonine, cysteine, tyrosine, asparagine, and glutamine; and (4) neutral nonpolar (hydrophobic) amino acids such as alanine, leucine, isoleucine, valine, proline, phenylalanine, tryptophan, and methionine. Conserved substitutes for an amino acid within a native amino acid sequence can be selected from other members of the group to which the naturally occurring amino acid belongs. For example, a group of amino acids having aliphatic side chains is glycine, alanine, valine, leucine, and isoleucine; a group of amino acids having aliphatic-hydroxyl side chains is serine and threonine; a group of amino acids having amide-containing side chains is asparagine and glutamine; a group of amino acids having aromatic side chains is phenylalanine, tyrosine, and tryptophan; a group of amino acids having basic side chains is lysine, arginine, and histidine; and a group of amino acids having sulfur-containing side chains is cysteine and methionine. Naturally conservative amino acids substitution groups are: valine-leucine, valine-isoleucine, phenylalanine-tyrosine, lysine-arginine, alanine-valine, aspartic acid-glutamic acid, and asparagine-glutamine. A further aspect of the invention comprises proteins that differ in one or more amino acids from those of a described protein sequence as the result of deletion or insertion of one or more amino acids in a native sequence.

[0041] Homologs of the trait-improving proteins disclosed provided herein will generally demonstrate significant sequence identity. Of particular interest are proteins having at least 50% sequence identity, more preferably at least about 70% sequence identity or higher, e.g., at least about 80% sequence identity with an amino acid sequence of SEQ ID NO: 240 through SEQ ID NO: 390 and SEQ ID NO: 392 through SEQ ID NO: 478. Of course useful proteins also include those with higher identity, e.g., 90% to 99% identity. Identity of protein homologs is determined by optimally aligning the amino acid sequence of a putative protein homolog with a defined amino acid sequence and by calculating the percentage of identical and conservatively substituted amino acids over the window of comparison. The window of comparison for determining identity can be the entire amino acid sequence disclosed herein, e.g., the full sequence of any of SEQ ID NO: 479 through SEQ ID NO: 12463.

[0042] Genes that are homologous to each other can be grouped into families and included in multiple sequence alignments. Then a consensus sequence for each group can be derived. This analysis enables the derivation of conserved and class-(family) specific residues or motifs that are functionally important. These conserved residues and motifs can be further validated with 3D protein structure if available. The consensus sequence can be used to define the full scope of the invention, e.g., to identify proteins with a homolog relationship. Thus, the present invention contemplates that protein homologs include proteins with an amino acid sequence that has at least 90% identity to such a consensus amino acid sequence sequences.

Promoters

[0043] Numerous promoters that are active in plant cells have been described in the literature. These include promoters present in plant genomes as well as promoters from other sources, including nopaline synthase (NOS) promoter and octopine synthase (OCS) promoters carried on tumor-inducing plasmids of Agrobacterium tumefaciens, caulimovirus promoters such as the cauliflower mosaic virus or figwort mosaic virus promoters. For instance, see U.S. Pat. Nos. 5,858,742 and 5,322,938 which disclose versions of the constitutive promoter derived from cauliflower mosaic virus (CaMV35S), U.S. Pat. No. 5,378,619 which discloses a Figwort Mosaic Virus (FMV) 35S promoter, U.S. Pat. No. 6,437,217 which discloses a maize RS81 promoter, U.S. Pat. No. 5,641,876 which discloses a rice actin promoter, U.S. Pat. No. 6,426,446 which discloses a maize RS324 promoter, U.S. Pat. No. 6,429,362 which discloses a maize PR-1 promoter, U.S. Pat. No. 6,232,526 which discloses a maize A3 promoter, U.S. Pat. No. 6,177,611 which discloses constitutive maize promoters, U.S. Pat. No. 6,433,252 which discloses a maize L3 oleosin promoter, U.S. Pat. No. 6,429,357 which discloses a rice actin 2 promoter and intron, U.S. Pat. No. 5,837,848 which discloses a root specific promoter, U.S. Pat. No. 6,084,089 which discloses cold inducible promoters, U.S. Pat. No. 6,294,714 which discloses light inducible promoters, U.S. Pat. No. 6,140,078 which discloses salt inducible promoters, U.S. Pat. No. 6,252,138 which discloses pathogen inducible promoters, U.S. Pat. No. 6,175,060 which discloses phosphorus deficiency inducible promoters, U.S. Patent Application Publication 2002/0192813A1 which discloses 5′, 3′ and intron elements useful in the design of effective plant expression vectors, U.S. patent application Ser. No. 09/078,972 which discloses a coixin promoter, U.S. patent application Ser. No. 09/757,089 which discloses a maize chloroplast aldolase promoter, and U.S. patent application Ser. No. 10/739,565 which discloses water-deficit inducible promoters, all of which are incorporated herein by reference. These and numerous other promoters that function in plant cells are known to those skilled in the art and available for use in recombinant polynucleotides of the present invention to provide for expression of desired genes in transgenic plant cells.

[0044] Furthermore, the promoters may be altered to contain multiple “enhancer sequences” to assist in elevating gene expression. Such enhancers are known in the art. By including an enhancer sequence with such constructs, the expression of the selected protein may be enhanced. These enhancers often are found 5′ to the start of transcription in a promoter that functions in eukaryotic cells, but can often be inserted in the forward or reverse orientation 5′ or 3′ to the coding sequence. In some instances, these 5′ enhancing elements are introns. Deemed to be particularly useful as enhancers are the 5′ introns of the rice actin 1 and rice actin 2 genes. Examples of other enhancers that can be used in accordance with the invention include elements from the CaMV 35S promoter, octopine synthase genes, the maize alcohol dehydrogenase gene, the maize shrunken 1 gene and promoters from non-plant eukaryotes.

[0045] In some aspects of the invention it is preferred that the promoter element in the DNA construct be capable of causing sufficient expression to result in the production of an effective amount of a polypeptide in water deficit conditions. Such promoters can be identified and isolated from the regulatory region of plant genes that are over expressed in water deficit conditions. Specific water-deficit-inducible promoters for use in this invention are derived from the 5′ regulatory region of genes identified as a heat shock protein 17.5 gene (HSP17.5), an HVA22 gene (HVA22), a Rab17 gene and a cinnamic acid 4-hydroxylase (CA4H) gene (CA4H) of Zea maize. Such water-deficit-inducible promoters are disclosed in U.S. application Ser. No. 10/739,565, incorporated herein by reference.

[0046] In other aspects of the invention, sufficient expression in plant seed tissues is desired to effect improvements in seed composition. Exemplary promoters for use for seed composition modification include promoters from seed genes such as napin (U.S. Pat. No. 5,420,034), maize L3 oleosin (U.S. Pat. No. 6,433,252), zein Z27 (Russell et al., (1997) Transgenic Res. 6(2):157-166), globulin 1 (Belanger et al., (1991) Genetics 129:863-872), glutelin 1 (Russell (1997) supra), and peroxiredoxin antioxidant (Per1) (Stacy et al., (1996) Plant Mol. Biol. 31(6):1205-1216).

[0047] In still other aspects of the invention, preferential expression in plant green tissues is desired. Promoters of interest for such uses include those from genes such as SSU (Fischhoff et al., (1992) Plant Mol. Biol. 20:81-93), aldolase and pyruvate orthophosphate dikinase (PPDK) (Taniguchi et al., (2000) Plant Cell Physiol. 41(1):42-48).

Gene Overexpression

[0048] “Gene overexpression” used herein in reference to a polynucleotide or polypeptide indicates that the expression level of a target protein, in a transgenic plant or in a host cell of the transgenic plant, exceeds levels of expression in a non-transgenic plant. In a preferred embodiment of the present invention, a recombinant DNA construct comprises the polynucleotide of interest in the sense orientation relative to the promoter to achieve gene overexpression, which is identified as such in Table 1.

Gene Suppression

[0049] Gene suppression includes any of the well-known methods for suppressing transcription of a gene or the accumulation of the mRNA corresponding to that gene thereby preventing translation of the transcript into protein. Posttranscriptional gene suppression is mediated by transcription of integrated recombinant DNA to form double-stranded RNA (dsRNA) having homology to a gene targeted for suppression. This formation of dsRNA most commonly results from transcription of an integrated inverted repeat of the target gene, and is a common feature of gene suppression methods known as anti-sense suppression, co-suppression and RNA interference (RNAi). Transcriptional suppression can be mediated by a transcribed dsRNA having homology to a promoter DNA sequence to effect what is called promoter trans suppression.

[0050] More particularly, posttranscriptional gene suppression by inserting a recombinant DNA construct with anti-sense oriented DNA to regulate gene expression in plant cells is disclosed in U.S. Pat. No. 5,107,065 (Shewmaker et al.) and U.S. Pat. No. 5,759,829 (Shewmaker et al.). Transgenic plants transformed using such anti-sense oriented DNA constructs for gene suppression can comprise integrated DNA arranged as an inverted repeats that result from insertion of the DNA construct into plants by Agrobacterium-mediated transformation, as disclosed by Redenbaugh et al., in “Safety Assessment of Genetically Engineered Flavr Savr™ Tomato, CRC Press, Inc. (1992). Inverted repeat insertions can comprise a part or all of the T-DNA construct, e.g., an inverted repeat of a complete transcription unit or an inverted repeat of transcription terminator sequence. Screening for inserted DNA comprising inverted repeat elements can improve the efficiency of identifying transformation events effective for gene silencing whether the transformation construct is a simple anti-sense DNA construct which must be inserted in multiple copies or a complex inverted repeat DNA construct (e.g., an RNAi construct) which can be inserted as a single copy.

[0051] Posttranscriptional gene suppression by inserting a recombinant DNA construct with sense-oriented DNA to regulate gene expression in plants is disclosed in U.S. Pat. No. 5,283,184 (Jorgensen et al.,) and U.S. Pat. No. 5,231,020 (Jorgensen et al.,). Inserted T-DNA providing gene suppression in plants transformed with such sense constructs by Agrobacterium is organized predominately in inverted repeat structures, as disclosed by Jorgensen et al., Mol. Gen. Genet., 207:471-477 (1987). See also Stam et al. The Plant Journal, 12(1), 63-82 (1997) who used segregation studies to support Jorgensen's finding that gene silencing is mediated by multimeric transgene T-DNA loci in which the T-DNAs are arranged in inverted repeats. Screening for inserted DNA comprising inverted repeat elements can improve the gene silencing efficiency when transforming with simple sense-orientated DNA constructs. Gene silencing efficiency can also be improved by screening for single insertion events when transforming with an RNAi construct containing inverted repeat elements

[0052] As disclosed by Redenbaugh et al., gene suppression can be achieved by inserting into a plant genome recombinant DNA that transcribes dsRNA. Such a DNA insert can be transcribed to an RNA element having the 3′ region as a double stranded RNA. RNAi constructs are also disclosed in EP 0426195 A1 (Goldbach et al., 1991) where recombinant DNA constructs for transcription into hairpin dsRNA for providing transgenic plants with resistance to tobacco spotted wilt virus. Double-stranded RNAs were also disclosed in WO 94/01550 (Agrawal et al.,) where anti-sense RNA was stabilized with a self-complementary 3′ segment. Agrawal et al., referred to U.S. Pat. No. 5,107,065 for using such self-stablized anti-sense RNAs for regulating gene expression in plant cells; see International Publication No. 94/01550. Other double-stranded hairpin-forming elements in transcribed RNA are disclosed in International Publication No. 98/05770 (Werner et al.,) where the anti-sense RNA is stabilized by hairpin forming repeats of poly(CG) nucleotides. See also U.S. Patent Application Publication No. 2003/0175965 A1 (Lowe et al.,) which discloses gene suppression using and RNAi construct comprising a gene coding sequence preceded by inverted repeats of 5′UTR. See also U.S. Patent Application Publication No. 2002/0048814 A1 (Oeller) where RNAi constructs are transcribed to sense or anti-sense RNA which is stabilized by a poly(T)-poly(A) tail. See also U.S. Patent Application Publication No. 2003/0018993 A1 (Gutterson et al.,) where sense or anti-sense RNA is stabilized by an inverted repeat of a of the 3′ untranslated region of the NOS gene. See also U.S. Patent Application Publication No. 2003/0036197 A1 (Glassman et al.,) where RNA having homology to a target is stabilized by two complementary RNA regions.

[0053] Gene silencing can also be effected by transcribing RNA from both a sense and an anti-sense oriented DNA, e.g., as disclosed by Shewmaker et al., in U.S. Pat. No. 5,107,065 where in Example 1 a binary vector was prepared with both sense and anti-sense aroA genes. See also U.S. Pat. No. 6,326,193 where gene targeted DNA is operably linked to opposing promoters.

[0054] Gene silencing can also be affected by transcribing from contiguous sense and anti-sense DNA. In this regard see Sijen et al. The Plant Cell, Vol. 8, 2277-2294 (1996) discloses the use of constructs carrying inverted repeats of a cowpea mosaic virus gene in transgenic plants to mediate virus resistance. Such constructs for posttranscriptional gene suppression in plants by double-stranded RNA are also disclosed in International Publication No. WO 99/53050 (Waterhouse et al.,), International Publication No. WO 99/49029 (Graham et al.), U.S. patent application Ser. No. 10/465,800 (Fillatti), U.S. Pat. No. 6,506,559 (Fire et al.). See also U.S. application Ser. No. 10/393,347 (Shewmaker et al.,) that discloses constructs and methods for simultaneously expressing one or more recombinant genes while simultaneously suppressing one or more native genes in a transgenic plant. See also U.S. Pat. No. 6,448,473 (Mitsky et al.,) that discloses multi-gene suppression vectors for use in plants. All of the above-described patents, applications and international publications disclosing materials and methods for posttranscriptional gene suppression in plants are incorporated herein by reference.

[0055] Transcriptional suppression such as promoter trans suppression can be affected by a expressing a DNA construct comprising a promoter operably linked to inverted repeats of promoter DNA for a target gene. Constructs useful for such gene suppression mediated by promoter trans suppression are disclosed by Mette et al. The EMBO Journal, Vol. 18, No. 1, pp. 241-148, 1999 and by Mette et al. The EMBO Journal, Vol. 19, No. 19, pp. 5194-5201-148, 2000, both of which are incorporated herein by reference.

[0056] Suppression can also be achieved by insertion mutations created by transposable elements may also prevent gene function. For example, in many dicot plants, transformation with the T-DNA of Agrobacterium may be readily achieved and large numbers of transformants can be rapidly obtained. Also, some species have lines with active transposable elements that can efficiently be used for the generation of large numbers of insertion mutations, while some other species lack such options. Mutant plants produced by Agrobacterium or transposon mutagenesis and having altered expression of a polypeptide of interest can be identified using the polynucleotides of the present invention. For example, a large population of mutated plants may be screened with polynucleotides encoding the polypeptide of interest to detect mutated plants having an insertion in the gene encoding the polypeptide of interest.

Gene Stacking

[0057] The present invention also contemplates that the trait-improving recombinant DNA provided herein can be used in combination with other recombinant DNA to create plants with a multiple desired traits. The combinations generated can include multiple copies of any one or more of the recombinant DNA constructs.

[0058] These stacked combinations can be created by any method, including but not limited to cross breeding of transgenic plants, or multiple genetic transformation.

Plant Transformation Methods

[0059] Numerous methods for transforming plant cells with recombinant DNA are known in the art and may be used in the present invention. Two commonly used methods for plant transformation are Agrobacterium-mediated transformation and microprojectile bombardment. Microprojectile bombardment methods are illustrated in U.S. Pat. No. 5,015,580 (soybean); U.S. Pat. No. 5,550,318 (corn); U.S. Pat. No. 5,538,880 (corn); U.S. Pat. No. 5,914,451 (soybean); U.S. Pat. No. 6,160,208 (corn); U.S. Pat. No. 6,399,861 (corn) and U.S. Pat. No. 6,153,812 (wheat) and Agrobacterium-mediated transformation is described in U.S. Pat. No. 5,159,135 (cotton); U.S. Pat. No. 5,824,877 (soybean); U.S. Pat. No. 5,591,616 (corn); and U.S. Pat. No. 6,384,301 (soybean), all of which are incorporated herein by reference. For Agrobacterium tumefaciens based plant transformation system, additional elements present on transformation constructs will include T-DNA left and right border sequences to facilitate incorporation of the recombinant polynucleotide into the plant genome.

[0060] In general it is preferred to introduce heterologous DNA randomly, i.e., at a non-specific location, in the genome of a target plant line. In special cases it may be useful to target heterologous DNA insertion in order to achieve site-specific integration, e.g., to replace an existing gene in the genome, to use an existing promoter in the plant genome, or to insert a recombinant polynucleotide at a predetermined site known to be active for gene expression. Several site specific recombination systems exist which are known to function implants include cre-lox as disclosed in U.S. Pat. No. 4,959,317 and FLP-FRT as disclosed in U.S. Pat. No. 5,527,695, both incorporated herein by reference.

[0061] Transformation methods of this invention are preferably practiced in tissue culture on media and in a controlled environment. “Media” refers to the numerous nutrient mixtures that are used to grow cells in vitro, that is, outside of the intact living organism. Recipient cell targets include, but are not limited to, meristem cells, callus, immature embryos and gametic cells such as microspores, pollen, sperm and egg cells. It is contemplated that any cell from which a fertile plant may be regenerated is useful as a recipient cell. Callus may be initiated from tissue sources including, but not limited to, immature embryos, seedling apical meristems, microspores and the like. Cells capable of proliferating as callus are also recipient cells for genetic transformation. Practical transformation methods and materials for making transgenic plants of this invention, e.g., various media and recipient target cells, transformation of immature embryos and subsequent regeneration of fertile transgenic plants are disclosed in U.S. Pat. Nos. 6,194,636 and 6,232,526 and U.S. patent application Ser. No. 09/757,089, which are incorporated herein by reference.

[0062] In practice DNA is introduced into only a small percentage of target cells in any one experiment. Marker genes are used to provide an efficient system for identification of those cells that are stably transformed by receiving and integrating a transgenic DNA construct into their genomes. Preferred marker genes provide selective markers that confer resistance to a selective agent, such as an antibiotic or herbicide. Potentially transformed cells are exposed to the selective agent. In the population of surviving cells will be those cells where, generally, the resistance-conferring gene has been integrated and expressed at sufficient levels to permit cell survival. Cells may be tested further to confirm stable integration of the exogenous DNA. Useful selective marker genes include those conferring resistance to antibiotics such as kanamycin (nptII), hygromycin B (aph IV) and gentamycin (aac3 and aacC4) or resistance to herbicides such as glufosinate (bar or pat) and glyphosate (EPSPS). Examples of such selectable are illustrated in U.S. Pat. Nos. 5,550,318; 5,633,435; 5,780,708 and 6,118,047, all of which are incorporated herein by reference. Screenable markers which provide an ability to visually identify transformants can also be employed, e.g., a gene expressing a colored or fluorescent protein such as a luciferase or green fluorescent protein (GFP) or a gene expressing a beta-glucuronidase or uidA gene (GUS) for which various chromogenic substrates are known. It is also contemplated that combinations of screenable and selectable markers will be useful for identification of transformed cells. See PCT publication WO 99/61129 which discloses use of a gene fusion between a selectable marker gene and a screenable marker gene, e.g., an NPTII gene and a GFP gene.

[0063] Cells that survive exposure to the selective agent, or cells that have been scored positive in a screening assay, may be cultured in regeneration media and allowed to mature into plants. Developing plantlets can be transferred to soil less plant growth mix, and hardened off, e.g., in an environmentally controlled chamber at about 85% relative humidity, 600 ppm CO₂, and 25-250 microeinsteins m⁻² s⁻¹ of light, prior to transfer to a greenhouse or growth chamber for maturation. Plants are preferably matured either in a growth chamber or greenhouse. Plants are regenerated from about 6 wk to 10 months after a transformant is identified, depending on the initial tissue. During regeneration, cells are grown to plants on solid media at about 19 to 28° C. After regenerating plants have reached the stage of shoot and root development, they may be transferred to a greenhouse for further growth and testing. Plants may be pollinated using conventional plant breeding methods known to those of skill in the art and seed produced.

[0064] Progeny may be recovered from transformed plants and tested for expression of the exogenous recombinant polynucleotide. Useful assays include, for example, “molecular biological” assays, such as Southern and Northern blotting and PCR; “biochemical” assays, such as detecting the presence of RNA, e.g., double stranded RNA, or a protein product, e.g., by immunological means (ELISAs and Western blots) or by enzymatic function; plant part assays, such as leaf or root assays; and also, by analyzing the phenotype of the whole regenerated plant.

Discovery of Trait-Improving Recombinant DNA

[0065] To identify recombinant DNA that confer improved traits to plants, Arabidopsis thaliana was transformed with a candidate recombinant DNA construct and screened for an improved trait.

[0066] Arabidopsis thaliana is used a model for genetics and metabolism in plants. Arabidopsis has a small genome, and well documented studies are available. It is easy to grow in large numbers and mutants defining important genetically controlled mechanisms are either available, or can readily be obtained. Various methods to introduce and express isolated homologous genes are available (see Koncz, et al., eds. Methods in Arabidopsis Research. et al., (1992), World Scientific, New Jersey, N.J., in “Preface”).

[0067] A two-step screening process was employed which comprised two passes of trait characterization to ensure that the trait modification was dependent on expression of the recombinant DNA, but not due to the chromosomal location of the integration of the transgene. Twelve independent transgenic lines for each recombinant DNA construct were established and assayed for the transgene expression levels. Five transgenic lines with high transgene expression levels were used in the first pass screen to evaluate the transgene's function in T2 transgenic plants. Subsequently, three transgenic events, which had been shown to have one or more improved traits, were further evaluated in the second pass screen to confirm the transgene's ability to impart an improved trait. The following Table 3 summarizes the improved traits that have been confirmed as provided by a recombinant DNA construct.

[0068] In particular Table3 reports

“PEP SEQ ID NO” which is the amino acid sequence of the protein cognate to the DNA in the recombinant DNA construct corresponding to a protein sequence of a SEQ ID NO. in the Sequence Listing;

“construct_id” is an arbitrary name for the recombinant DNA describe more particularly in Table 1;

[0069] “annotation” refers to a description of the top hit protein obtained from an amino acid sequence query of each PEP SEQ ID NO to GenBank database of the National Center for Biotechnology Information (ncbi). More particularly, “gi” is the GenBank ID number for the top BLAST hit;

“description” refers to the description of the top BLAST hit;

“e-value” provides the expectation value for the BLAST hit;

“identity” refers to the percentage of identically matched amino acid residues along the length of the portion of the sequences which is aligned by BLAST between the sequence of interest provided herein and the hit sequence in GenBank;

“traits” identifies by two letter code the confirmed improvement in a transgenic plant provided by the recombinant DNA. The codes for improved traits are:

“CK” which indicates cold tolerance improvement identified under a cold shock tolerance screen;

“CS” which indicates cold tolerance improvement identified by a cold germination tolerance screen;

“DS” which indicates drought tolerance improvement identified by a drought stress tolerance screen;

“PEG” which indicates osmotic stress tolerance improvement identified by a PEG induced osmotic stress tolerance screen;

“HS” which indicates heat stress tolerance improvement identified by a heat stress tolerance screen;

“SS” which indicates high salinity stress tolerance improvement identified by a salt stress tolerance screen;

“LN” which: indicates nitrogen use efficiency improvement identified by a low nitrogen tolerance screen.

“LL” which indicates attenuated shade avoidance response identified by a shade tolerance screen under a low light condition;

“PP” which indicates improved growth and development at early stages identified by an early plant growth and development screen;

[0070] “SP” which indicates improved growth and development at late stages identified by a late plant growth and development screen provided herein.

TABLE 3

| PEP | | | | | | | | | | | |
|---|---|---|---|---|---|---|---|---|---|---|---|
| SEQ | | | | | | | | | | | |
| ID | construct_{—} | Annotation | | | | | | | | | |
| NO | id | e-value | identity | gi | Description | traits | | | | | |
| 240 | 19867 | 2.00E−72 | 47 | 15226242 | (NM_128336) hypothetical | CK | CS | | | | |
| | | | | | protein [Arabidopsis thaliana] | | | | | | |
| 241 | 74518 | 0 | 100 | 17980436 | bacteriophytochrome | DS | LN | PEG | PP | CK | CS |
| | | | | | [Pseudomonas fluorescens] | | | | | | |
| 242 | 15816 | 1.00E−101 | 100 | 18414706 | (NM_120565) expressed protein | CK | | | | | |
| | | | | | [Arabidopsis thaliana] | | | | | | |
| | | | | | dbj\|BAB08987.1 | | | | | | |
| 243 | 17918 | 5.00E−78 | 81 | 15232662 | (AB017071) zinc finger protein- | SS | CK | | | | |
| | | | | | like; Ser/Thr protein kinase-like | | | | | | |
| | | | | | protein [Arabidopsis thaliana] | | | | | | |
| 244 | 15306 | 1.00E−121 | 57 | 15227057 | (NM_126342) predicted by | CS | | | | | |
| | | | | | genefinder and genscan | | | | | | |
| | | | | | [Arabidopsis thaliana] | | | | | | |
| 245 | 12038 | 2.00E−47 | 100 | 18413298 | auxin-regulated protein | PP | CS | | | | |
| | | | | | [Arabidopsis thaliana] | | | | | | |
| | | | | | gi\|30681325\|ref\|NP_849354.1 | | | | | | |
| 246 | 12046 | | | | | CS | | | | | |
| 247 | 13432 | 1.00E−79 | 53 | 18396732 | (NM_111270) expressed protein | CS | | | | | |
| | | | | | [Arabidopsis thaliana] | | | | | | |
| | | | | | gb\|AAF05858.1 | | | | | | |
| 248 | 13711 | 1.00E−33 | 84 | 15232724 | expressed protein [Arabidopsis | CS | | | | | |
| | | | | | thaliana] gi\|11280688\|pir\|\|T45643 | | | | | | |
| | | | | | hypothetical protein | | | | | | |
| 249 | 14809 | 1.00E−142 | 100 | 15230177 | AF488576_1 (AF488576) | CS | | | | | |
| | | | | | putative bHLH transcription factor | | | | | | |
| | | | | | [Arabidopsis thaliana] | | | | | | |
| 250 | 14951 | 1.00E−146 | 100 | 4056434 | (AC005990) Similar to | PP | CS | | | | |
| | | | | | OBP32pep protein gb\|U37698 | | | | | | |
| | | | | | from Arabidopsis thaliana | | | | | | |
| 251 | 15632 | 0 | 89 | 9758356 | (AB013396) eukaryotic initiation | CS | | | | | |
| | | | | | factor 4, eIF4-like protein | | | | | | |
| | | | | | [Arabidopsis thaliana] | | | | | | |
| 252 | 16147 | 0 | 100 | 11890406 | (AF197940) SAM: phosphoethanolamine | CS | | | | | |
| | | | | | N- | | | | | | |
| | | | | | methyltransferase [Arabidopsis | | | | | | |
| | | | | | thaliana] g | | | | | | |
| 253 | 16158 | 1.00E−68 | 100 | 18412355 | (NM_106587) expressed protein | CS | | | | | |
| | | | | | [Arabidopsis thaliana] | | | | | | |
| 254 | 16170 | 2.00E−82 | 91 | 15224757 | (NM_127488) putative small heat | CS | | | | | |
| | | | | | shock protein [Arabidopsis | | | | | | |
| | | | | | thaliana] | | | | | | |
| 255 | 16171 | 4.00E−92 | 72 | 18401372 | (NM_128284) expressed protein | CS | | | | | |
| | | | | | [Arabidopsis thaliana] | | | | | | |
| 256 | 16175 | 1.00E−157 | 85 | 15240715 | (NM_126137) putative protein | CS | | | | | |
| | | | | | [Arabidopsis thaliana] | | | | | | |
| 257 | 17430 | 1.00E−155 | 90 | 13878155 | (AF370340) putative | CS | | | | | |
| | | | | | mitochondrial dicarboxylate | | | | | | |
| | | | | | carrier protein [Arabidopsis | | | | | | |
| | | | | | thaliana] | | | | | | |
| 258 | 17819 | 100E−140 | 95 | 15236507 | (NM_116915) hypothetical | SS | CS | | | | |
| | | | | | protein [Arabidopsis thaliana] | | | | | | |
| | | | | | emb\|CAB77971.1 | | | | | | |
| 259 | 17921 | 1.00E−110 | 74 | 18415982 | (NM_118393) HSP associated | CS | | | | | |
| | | | | | protein like [Arabidopsis thaliana] | | | | | | |
| 260 | 17928 | 1.00E−74 | 100 | 15231105 | (NM_115730) transcriptional | PP | CS | | | | |
| | | | | | coactivator - like protein | | | | | | |
| | | | | | [Arabidopsis thaliana] | | | | | | |
| 261 | 18637 | 1.00E−128 | 87 | 15233509 | (NM_118226) putative protein | CS | | | | | |
| | | | | | [Arabidopsis thaliana] | | | | | | |
| 262 | 18816 | 0 | 94 | 18398254 | (NM_102942) expressed protein | LL | CS | | | | |
| | | | | | [Arabidopsis thaliana] | | | | | | |
| 263 | 19227 | 1.00E−164 | 96 | 15219482 | (NM_106009) MAP kinase, | CS | | | | | |
| | | | | | putative [Arabidopsis thaliana] | | | | | | |
| 264 | 19429 | 0 | 100 | 15237038 | (NM_118860) GH3 like protein | CS | | | | | |
| | | | | | [Arabidopsis thaliana] | | | | | | |
| 265 | 70235 | 2.00E−94 | 100 | 15234243 | (NM_117229) phospholipid | PP | CS | | | | |
| | | | | | hydroperoxide glutathione | | | | | | |
| | | | | | peroxidase [Arabidopsis thaliana] | | | | | | |
| 266 | 72634 | 4.00E−52 | 86 | 30699033 | GAST1-related protein | CS | | | | | |
| | | | | | [Arabidopsis thaliana] | | | | | | |
| 267 | 72752 | 0 | 100 | 6319971 | (NC_001136) phosphotyrosine- | PP | CS | | | | |
| | | | | | specific protein phosphatase; | | | | | | |
| | | | | | Ptp1p [Saccharomyces | | | | | | |
| | | | | | cerevisiae] | | | | | | |
| 268 | 12007 | 1.00E−119 | 76 | 15236117 | (NM_118746) uncharacterized | HS | | | | | |
| | | | | | protein [Arabidopsis thaliana] | | | | | | |
| 269 | 12290 | 5.00E−66 | 92 | 18396460 | (NM_111186) expressed protein | HS | | | | | |
| | | | | | [Arabidopsis thaliana]] | | | | | | |
| 270 | 12343 | 1.00E−111 | 61 | 18414724 | (NM_120571) expressed protein | HS | | | | | |
| | | | | | [Arabidopsis thaliana] | | | | | | |
| | | | | | gb\|AAF61902.1\|AF208051_1 | | | | | | |
| | | | | | (AF208051) small heat shock-like | | | | | | |
| | | | | | protein | | | | | | |
| 271 | 14348 | 0 | 100 | 15234254 | (NM_118912) putative protein | HS | | | | | |
| | | | | | [Arabidopsis thaliana] pir\|\|T05878 | | | | | | |
| | | | | | isp4 protein homolog | | | | | | |
| | | | | | T29A15.220 | | | | | | |
| 272 | 15708 | 7.00E−71 | 87 | 18394214 | (NM_101391) expressed protein | HS | | | | | |
| | | | | | [Arabidopsis thaliana] | | | | | | |
| 273 | 17615 | 100E−108 | 85 | 18414711 | (NM_120567) expressed protein | CS | HS | | | | |
| | | | | | [Arabidopsis thaliana] | | | | | | |
| 274 | 17622 | 0 | 93 | 15238837 | (NM_121852) putative protein | HS | | | | | |
| | | | | | [Arabidopsis thaliana] | | | | | | |
| 275 | 70714 | 0 | 94 | 7446439 | probable serine/threonine- | HS | | | | | |
| | | | | | specific protein kinase (EC 2.7.1.- ) | | | | | | |
| | | | | | F17I5.140 - Arabidopsis | | | | | | |
| | | | | | thaliana emb\|CAA19877.1\| | | | | | | |
| | | | | | (AL031032) protein kinase-like | | | | | | |
| | | | | | protein [Arabidopsis thaliana] | | | | | | |
| 276 | 17925 | 100E−157 | 82 | 18405518 | (NM_129646) expressed protein | HS | CK | | | | |
| | | | | | [Arabidopsis thaliana] pir\|\|T00747 | | | | | | |
| | | | | | RING-H2 finger protein RHC1a | | | | | | |
| 277 | 18541 | 1.00E−128 | 83 | 15237100 | (NM_119735) hypothetical | HS | CS | | | | |
| | | | | | protein [Arabidopsis thaliana] | | | | | | |
| 278 | 11425 | 1.00E−155 | 100 | 18405364 | (AB024028) 20S proteasome | HS | | | | | |
| | | | | | beta subunit; multicatalytic | | | | | | |
| | | | | | endopeptidase [Arabidopsis | | | | | | |
| | | | | | thaliana] | | | | | | |
| 279 | 12263 | 9.00E−39 | 100 | 15241279 | small zinc finger-related protein | HS | | | | | |
| | | | | | [Arabidopsis thaliana] | | | | | | |
| | | | | | gi\|12230183\|sp\|Q9XGY4\|IM08_ARATH | | | | | | |
| | | | | | Mitochondrial import inner | | | | | | |
| | | | | | membrane translocase subunit | | | | | | |
| | | | | | Tim8 | | | | | | |
| 280 | 12288 | 0 | 97 | 7488126 | AAB01678.1\| (U27590) Fe(II) | HS | | | | | |
| | | | | | transport protein [Arabidopsis | | | | | | |
| | | | | | thaliana] | | | | | | |
| 281 | 12910 | 0 | 90 | 17065456 | (AY062804) A6 anther-specific | HS | | | | | |
| | | | | | protein [Arabidopsis thaliana] | | | | | | |
| 282 | 14335 | 0 | 93 | 15229692 | (NM_111953) omega-3 fatty acid | LL | HS | | | | |
| | | | | | desaturase, chloroplast precursor | | | | | | |
| | | | | | [Arabidopsis thaliana] | | | | | | |
| 283 | 17427 | 0 | 100 | 13878127 | (AF370326) putative 2- | HS | | | | | |
| | | | | | nitropropane dioxygenase | | | | | | |
| | | | | | [Arabidopsis thaliana] | | | | | | |
| 284 | 19140 | 0 | 100 | 15223458 | (NM_104489) SAR DNA binding | HS | | | | | |
| | | | | | protein, putative [Arabidopsis | | | | | | |
| | | | | | thaliana] | | | | | | |
| | | | | | gb\|AAF02835.1\|AC009894_6 | | | | | | |
| | | | | | (AC009894) nucleolar protein | | | | | | |
| | | | | | [Arabidopsis thaliana] | | | | | | |
| | | | | | gb\|AAG40838.1\|AF302492_1 | | | | | | |
| | | | | | (AF302492) NOP56-like protein | | | | | | |
| | | | | | [Arabidopsis thaliana] | | | | | | |
| 285 | 19179 | 7.00E−97 | 92 | 18390408 | (NM_100335) expressed protein | PP | SS | HS | | | |
| | | | | | [Arabidopsis thaliana] | | | | | | |
| | | | | | gb\|AAB80630.1\| (AC002376) | | | | | | |
| | | | | | Strong similarity to Triticum ABA | | | | | | |
| | | | | | induced membrane protein | | | | | | |
| | | | | | (gb\|U80037) | | | | | | |
| 286 | 19251 | 0 | 100 | 21553584 | (AY085451) putative 3- | HS | | | | | |
| | | | | | isopropylmalate dehydrogenase | | | | | | |
| | | | | | [Arabidopsis thaliana] | | | | | | |
| 287 | 19443 | 1.00E−171 | 100 | 15220490 | (NM_102700) zinc finger protein, | HS | | | | | |
| | | | | | putative [Arabidopsis thaliana] | | | | | | |
| | | | | | gb\|AAG51745.1\|AC068667_24 | | | | | | |
| | | | | | (AC068667) zinc finger protein, | | | | | | |
| | | | | | putative; 86473-88078 | | | | | | |
| | | | | | [Arabidopsis thaliana] | | | | | | |
| 288 | 19607 | 0 | 90 | 15239867 | (NM_124313) xylosidase | HS | | | | | |
| | | | | | [Arabidopsis thaliana] | | | | | | |
| 289 | 19915 | 2.00E−87 | 50 | 15229221 | (NM_111278) NAM-like protein | SP | HS | | | | |
| | | | | | (no apical meristem) [Arabidopsis | | | | | | |
| | | | | | thaliana] | | | | | | |
| 290 | 70222 | 0 | 97 | 15240523 | (NM_124341) amino acid | DS | PP | HS | | | |
| | | | | | permease 6 (emb\|CAA65051.1) | | | | | | |
| | | | | | [Arabidopsis thaliana] | | | | | | |
| 291 | 70464 | 1.00E−106 | 92 | 15233481 | (NM_118221) putative protein | HS | | | | | |
| | | | | | [Arabidopsis thaliana] | | | | | | |
| 292 | 70474 | 1.00E−148 | 99 | 20127049 | (AF488587) putative bHLH | HS | | | | | |
| | | | | | transcription factor [Arabidopsis | | | | | | |
| | | | | | thaliana] | | | | | | |
| 293 | 70484 | 0 | 93 | 18418491 | (NM_119632) putative protein | CS | PP | HS | | | |
| | | | | | [Arabidopsis thaliana] | | | | | | |
| 294 | 72474 | 1.00E−129 | 81 | 14150732 | (AF374475) hypersensitive- | PP | HS | | | | |
| | | | | | induced response protein [Oryza | | | | | | |
| | | | | | sativa] | | | | | | |
| 295 | 13047 | 1.00E−170 | 86 | 15237573 | (NM_123481) purine permease- | LL | | | | | |
| | | | | | like protein [Arabidopsis thaliana] | | | | | | |
| | | | | | dbj\|BAB09718.1\| (AB010072) | | | | | | |
| | | | | | purine permease-like protein | | | | | | |
| | | | | | [Arabidopsis thaliana] | | | | | | |
| 296 | 13304 | 0 | 92 | 15227905 | (NM_127337) putative | LL | | | | | |
| | | | | | senescence-associated protein | | | | | | |
| | | | | | 12 [Arabidopsis thaliana] | | | | | | |
| 297 | 13474 | 0 | 97 | 2318131 | (AF014824) histone deacetylase | LL | | | | | |
| | | | | | [Arabidopsis thaliana] | | | | | | |
| 298 | 19252 | 3.00E−85 | 100 | 18397475 | (NM_111486) putative dual- | PP | LL | SS | HS | CS | |
| | | | | | specificity protein phosphatase | | | | | | |
| | | | | | [Arabidopsis thaliana] | | | | | | |
| 299 | 12612 | 7.00E−84 | 67 | 18397426 | (NM_111472) expressed protein | LL | | | | | |
| | | | | | [Arabidopsis thaliana] | | | | | | |
| 300 | 12926 | 2.00E−08 | 63 | 18407064 | expressed protein [Arabidopsis | LL | | | | | |
| | | | | | thaliana] gi\|25408990\|pir\|\| | | | | | | |
| 301 | 13230 | 3.00E−68 | 83 | 15233017 | (NM_111160) unknown protein | LL | | | | | |
| | | | | | [Arabidopsis thaliana] | | | | | | |
| 302 | 14235 | 1.00E−142 | 82 | 18402650 | (NM_103835) expressed protein | LL | | | | | |
| | | | | | [Arabidopsis thaliana] | | | | | | |
| 303 | 17305 | 0 | 100 | 15222179 | (NM_100550) sugar kinase, | LL | | | | | |
| | | | | | putative [Arabidopsis thaliana] | | | | | | |
| 304 | 17470 | 1.00E−138 | 76 | 15219110 | AAD17313.1\| (AF123310) NAC | LL | | | | | |
| | | | | | domain protein NAM [Arabidopsis | | | | | | |
| | | | | | thaliana] | | | | | | |
| 305 | 17718 | 2.00E−91 | 91 | 15228362 | (NM_114694) putative protein | LL | | | | | |
| | | | | | [Arabidopsis thaliana] | | | | | | |
| 306 | 17904 | 0 | 97 | 18399578 | (NM_112070) expressed protein | LL | | | | | |
| | | | | | [Arabidopsis thaliana] | | | | | | |
| 307 | 18280 | 0 | 97 | 18398767 | AAM66940.1\| (AY088617) | DS | LL | | | | |
| | | | | | membrane-associated salt- | | | | | | |
| | | | | | inducible protein like [Arabidopsis | | | | | | |
| | | | | | thaliana] | | | | | | |
| 308 | 18287 | 1.00E−148 | 100 | 15223439 | (NM_100045) | LL | | | | | |
| | | | | | polyphosphoinositide binding | | | | | | |
| | | | | | protein, putative [Arabidopsis | | | | | | |
| | | | | | thaliana] | | | | | | |
| 309 | 18501 | 0 | 94 | 18418838 | (NM_121863) putative protein | LL | | | | | |
| | | | | | [Arabidopsis thaliana] | | | | | | |
| | | | | | gb\|AAG35778.1\|AF280057_1 | | | | | | |
| | | | | | (AF280057) tonneau 2 | | | | | | |
| | | | | | [Arabidopsis thaliana] | | | | | | |
| 310 | 18877 | 1.00E−85 | 100 | 18408502 | (NM_105311) calmodulin-related | LL | | | | | |
| | | | | | protein [Arabidopsis thaliana] | | | | | | |
| 311 | 19531 | 0 | 98 | 15241970 | (NM_125674) 1-deoxy-D-xylulose | LL | | | | | |
| | | | | | 5-phosphate reductoisomerase | | | | | | |
| | | | | | (DXR) [Arabidopsis thaliana] | | | | | | |
| 312 | 70405 | 0 | 85 | 18390592 | (NM_100475) expressed protein | SS | LL | | | | |
| | | | | | [Arabidopsis thaliana] | | | | | | |
| 313 | 72136 | 2.00E−37 | 66 | 123379 | HMG1/2-like protein (SB11 | LL | | | | | |
| | | | | | protein) gi\|99914\|pir\|\|S22309 | | | | | | |
| | | | | | high mobility group protein HMG- | | | | | | |
| | | | | | 1 - soybean | | | | | | |
| | | | | | gi\|18645\|emb\|CAA41200.1\| | | | | | | |
| | | | | | HMG-1 like protein gene [Glycine | | | | | | |
| | | | | | max] | | | | | | |
| 314 | 72611 | 1.00E−102 | 82 | 6721504 | (AP001072) hypothetical protein | LL | | | | | |
| | | | | | [Oryza sativa (japonica cultivar- | | | | | | |
| | | | | | group)] | | | | | | |
| 315 | 12627 | 0 | 100 | 15236663 | (NM_118524) UDPglucose 4- | LN | | | | | |
| | | | | | epimerase - like protein | | | | | | |
| | | | | | [Arabidopsis thaliana] | | | | | | |
| 316 | 12813 | 0 | 96 | 2454184 | (U80186) pyruvate | LN | | | | | |
| | | | | | dehydrogenase E1 beta subunit | | | | | | |
| | | | | | [Arabidopsis thaliana] | | | | | | |
| 317 | 14945 | 100E−122 | 92 | 18400517 | (NM_112338) expressed protein | LN | | | | | |
| | | | | | [Arabidopsis thaliana] | | | | | | |
| | | | | | dbj\|BAB02642.1\| (AP002061) | | | | | | |
| | | | | | MtN3-like protein | | | | | | |
| 318 | 15345 | 0 | 97 | 15237392 | (NM_123987) ornithine | LN | | | | | |
| | | | | | aminotransferase [Arabidopsis | | | | | | |
| | | | | | thaliana] | | | | | | |
| 319 | 15348 | 0 | 81 | 18414239 | (NM_117530) expressed protein | LN | | | | | |
| | | | | | [Arabidopsis thaliana] | | | | | | |
| 320 | 16325 | 1.00E−105 | 100 | 15225174 | (NM_128763) putative alanine | LN | | | | | |
| | | | | | acetyl transferase [Arabidopsis | | | | | | |
| | | | | | thaliana] gb\|AAD15401.1 | | | | | | |
| 321 | 16702 | 0 | 77 | 18408943 | (NM_105480) expressed protein | LN | | | | | |
| | | | | | [Arabidopsis thaliana] | | | | | | |
| | | | | | sp\|Q9M647\|IAR1_ARATH IAA- | | | | | | |
| | | | | | alanine resistance protein 1 | | | | | | |
| 322 | 16836 | 0 | 100 | 11692854 | AF327534_1 (AF327534) | LN | | | | | |
| | | | | | putative adenosine | | | | | | |
| | | | | | triphosphatase [Arabidopsis | | | | | | |
| | | | | | thaliana] | | | | | | |
| 323 | 17002 | 1.00E−138 | 56 | 18414140 | (NM_117486) Expressed protein | LN | | | | | |
| | | | | | [Arabidopsis thaliana] | | | | | | |
| | | | | | gb\|AAK68800.1\| (AY042860) | | | | | | |
| | | | | | Unknown protein [Arabidopsis | | | | | | |
| | | | | | thaliana] | | | | | | |
| 324 | 17012 | 3.00E−79 | 100 | 18398187 | (NM_127222) actin | LN | | | | | |
| | | | | | depolymerizing factor 5 | | | | | | |
| | | | | | [Arabidopsis thaliana] | | | | | | |
| 325 | 17017 | 1.00E−155 | 86 | 11358585 | nuclear envelope membrane | LN | | | | | |
| | | | | | protein-like - Arabidopsis thaliana | | | | | | |
| 326 | 17344 | 3.00E−49 | 100 | 18424201 | SKP1 family [Arabidopsis | PP | LN | | | | |
| | | | | | thaliana] | | | | | | |
| | | | | | gi\|9759236\|dbj\|BAB09760.1\| | | | | | | |
| | | | | | contains similarity to elongin | | | | | | |
| | | | | | C˜gene_id: MNC17.5 | | | | | | |
| | | | | | [Arabidopsis thaliana] | | | | | | |
| | | | | | gi\|15028385\|gb\|AAK76669.1\| | | | | | | |
| | | | | | putative elongin protein] | | | | | | |
| 327 | 17426 | 0 | 95 | 15238801 | (NM_124151) farnesyl | LN | | | | | |
| | | | | | diphosphate synthase precursor | | | | | | |
| | | | | | (gb\|AAB49290.1) [Arabidopsis | | | | | | |
| | | | | | thaliana] | | | | | | |
| 328 | 17655 | 1.00E−129 | 86 | 15227472 | (NM_129758) putative C2H2-type | LN | | | | | |
| | | | | | zinc finger protein [Arabidopsis | | | | | | |
| | | | | | thaliana] | | | | | | |
| 329 | 17656 | 1.00E−135 | 74 | 15233081 | (NM_115995) putative DNA- | LN | | | | | |
| | | | | | binding protein [Arabidopsis | | | | | | |
| | | | | | thaliana] | | | | | | |
| 330 | 17906 | 1.00E−129 | 100 | 18378887 | (NM_100065) expressed protein | PP | LN | | | | |
| | | | | | [Arabidopsis thaliana] | | | | | | |
| 331 | 18278 | 0 | 95 | 15220147 | (NM_103617) Cyclin, putative | LN | | | | | |
| | | | | | [Arabidopsis thaliana] | | | | | | |
| 332 | 18822 | 0 | 92 | 15232759 | (NM_111813) putative protein | LN | | | | | |
| | | | | | kinase [Arabidopsis thaliana] | | | | | | |
| 333 | 18881 | 0 | 100 | 18401029 | (NM_112485) putative L- | LN | | | | | |
| | | | | | asparaginase [Arabidopsis | | | | | | |
| | | | | | thaliana] | | | | | | |
| 334 | 19213 | 2.00E−70 | 91 | 18408726 | (NM_105394) expressed protein | LN | | | | | |
| | | | | | [Arabidopsis thaliana] | | | | | | |
| 335 | 19239 | 1.00E−59 | 100 | 15235876 | DNA-directed RNA polymerase | LN | | | | | |
| | | | | | subunit-related [Arabidopsis | | | | | | |
| | | | | | thaliana] gi\|25313101\|pir\|\|A85078 | | | | | | |
| 336 | 19247 | 1.00E−81 | 53 | 9711883 | (AP002524) hypothetical | LN | | | | | |
| | | | | | protein˜similar to Drosophila | | | | | | |
| | | | | | melanogaster chromosome 3L, | | | | | | |
| | | | | | CG10171 gene product [Oryza | | | | | | |
| | | | | | sativa (japonica cultivar-group)] | | | | | | |
| 337 | 19460 | 1.00E−146 | 80 | 15238816 | (NM_121850) AP2-domain DNA- | LN | | | | | |
| | | | | | binding protein-like [Arabidopsis | | | | | | |
| | | | | | thaliana] | | | | | | |
| 338 | 19512 | 0 | 85 | 15237502 | (NM_124046) bHLH protein-like | LN | | | | | |
| | | | | | [Arabidopsis thaliana] | | | | | | |
| 339 | 19533 | 0 | 99 | 18395911 | (NM_102409) expressed protein | LN | | | | | |
| | | | | | [Arabidopsis thaliana] | | | | | | |
| 340 | 19603 | 0 | 87 | 18403383 | (NM_113143) expressed protein | LN | | | | | |
| | | | | | [Arabidopsis thaliana] | | | | | | |
| | | | | | dbj\|BAB01784.1\| (AB022215) | | | | | | |
| | | | | | hydroxyproline-rich glycoprotein | | | | | | |
| | | | | | [Arabidopsis thaliana] | | | | | | |
| 341 | 72126 | 5.00E−78 | 53 | 12005328 | (AF239956) unknown [Hevea | LN | | | | | |
| | | | | | brasiliensis] | | | | | | |
| 342 | 72437 | 8.00E−89 | 92 | 11994756 | (AP001313) kinetechore (Skp1p- | LN | | | | | |
| | | | | | like) protein-like [Arabidopsis | | | | | | |
| | | | | | thaliana] | | | | | | |
| 343 | 72441 | 5.00E−95 | 84 | 15218602 | (NM_100157) ribosomal protein | LN | | | | | |
| | | | | | L19, putative [Arabidopsis | | | | | | |
| | | | | | thaliana] | | | | | | |
| 344 | 72639 | 2.00E−73 | 91 | 18403896 | (NM_104101) expressed protein | LN | | | | | |
| | | | | | [Arabidopsis thaliana] | | | | | | |
| 345 | 14825 | 0 | 93 | 15242814 | (NM_120445) protein kinase-like | PEG | | | | | |
| | | | | | protein [Arabidopsis thaliana] | | | | | | |
| 346 | 17931 | 1.00E−136 | 68 | 15242003 | (NM_125688) Dof zinc finger | PEG | CS | | | | |
| | | | | | protein-like [Arabidopsis | | | | | | |
| | | | | | thaliana] | | | | | | |
| 347 | 18854 | 1.00E−164 | 79 | 18423918 | (NM_125077) nucleosome | PEG | HS | | | | |
| | | | | | assembly protein [Arabidopsis | | | | | | |
| | | | | | thaliana] | | | | | | |
| 348 | 12237 | 1.00E−21 | 76 | 18398176 | expressed protein [Arabidopsis | PEG | | | | | |
| | | | | | thaliana] | | | | | | |
| | | | | | gi\|12322743\|gb\|AAG51367.1\|AC012562_{—} | | | | | | |
| | | | | | 28 | | | | | | |
| 349 | 13414 | 2.00E−69 | 92 | 12324443 | (AC012329) unknown protein; | PEG | | | | | |
| | | | | | 50647-51606 [Arabidopsis | | | | | | |
| | | | | | thaliana] | | | | | | |
| 350 | 16160 | 1.00E−176 | 87 | 18415888 | (NM_118352) putative protein | PEG | | | | | |
| | | | | | [Arabidopsis thaliana] | | | | | | |
| 351 | 16226 | 1.00E−138 | 96 | 9294682 | (AP001305) contains similarity to | HS | PEG | | | | |
| | | | | | RNA polymerase transcriptional | | | | | | |
| | | | | | regulation | | | | | | |
| | | | | | mediator˜gene_id: MHC9.3 | | | | | | |
| | | | | | [Arabidopsis thaliana] | | | | | | |
| 352 | 16803 | 1.00E−146 | 90 | 18394201 | (NM_101382) expressed protein | PEG | | | | | |
| | | | | | [Arabidopsis thaliana] | | | | | | |
| | | | | | gb\|AAD39643.1\|AC007591_8 | | | | | | |
| | | | | | (AC007591) Contains a | | | | | | |
| | | | | | PF\|00175 Oxidoreductase | | | | | | |
| | | | | | FAD/NADH-binding domain. | | | | | | |
| 353 | 18260 | 0 | 100 | 15219795 | (NM_100349) putative K+ | PEG | | | | | |
| | | | | | channel, beta subunit | | | | | | |
| | | | | | [Arabidopsis thaliana] | | | | | | |
| 354 | 18642 | 2.00E−68 | 71 | 15235819 | (NM_118411) predicted protein | PP | PEG | | | | |
| | | | | | [Arabidopsis thaliana] | | | | | | |
| 355 | 18721 | 3.00E−21 | 53 | 18408611 | glycine-rich protein [Arabidopsis | PEG | | | | | |
| | | | | | thaliana] | | | | | | |
| | | | | | gi\|12597766\|gb\|AAG60079.1\|AC013288_{—} | | | | | | |
| | | | | | 13 | | | | | | |
| 356 | 19254 | 0 | 96 | 18398480 | (NM_111769) expressed protein | PEG | | | | | |
| | | | | | [Arabidopsis thaliana] | | | | | | |
| 357 | 70247 | 0 | 95 | 15238559 | (NM_122954) glutamate- | CS | DS | HS | PP | PEG | |
| | | | | | ammonia ligase (EC 6.3.1.2) | | | | | | |
| | | | | | precursor, chloroplast (clone | | | | | | |
| | | | | | lambdaAtgsl1) (pir\|\|S18600) | | | | | | |
| | | | | | [Arabidopsis thaliana] | | | | | | |
| 358 | 70650 | 1.00E−83 | 57 | 18399283 | (NM_127582) expressed protein | PP | PEG | | | | |
| | | | | | [Arabidopsis thaliana] | | | | | | |
| 359 | 12635 | 0 | 97 | 15231953 | (NM_111700) putative non- | HS | | | | | |
| | | | | | phototropic hypocotyl | | | | | | |
| | | | | | [Arabidopsis thaliana] | | | | | | |
| 359 | 11787 | 0 | 97 | 15231953 | (NM_111700) putative non- | PP | | | | | |
| | | | | | phototropic hypocotyl | | | | | | |
| | | | | | [Arabidopsis thaliana] | | | | | | |
| 360 | 13641 | 1.00E−42 | 87 | 15218189 | dynein light chain-related | PP | | | | | |
| | | | | | [Arabidopsis thaliana] | | | | | | |
| | | | | | gi\|25405535\|pir\|\|E96562 | | | | | | |
| 361 | 14515 | 0 | 71 | 15128395 | (AP003255) contains ESTs | PP | | | | | |
| | | | | | AU100655(C11462), C26007(CC11462) | | | | | | |
| | | | | | ˜similar to Arabidopsis | | | | | | |
| | | | | | thaliana chromosome 3, | | | | | | |
| | | | | | F24B22.150˜unknown protein | | | | | | |
| | | | | | [Oryza sativa (japonica cultivar- | | | | | | |
| | | | | | group)] | | | | | | |
| 362 | 14920 | 0 | 100 | 4239819 | (AB010875) PHR1 [Arabidopsis | PP | | | | | |
| | | | | | thaliana] | | | | | | |
| 363 | 15204 | 0 | 96 | 15230379 | (NM_112829) putative tyrosine | PP | | | | | |
| | | | | | phosphatase [Arabidopsis | | | | | | |
| | | | | | thaliana] | | | | | | |
| 364 | 19058 | 0 | 96 | 18396298 | (NM_102496) expressed protein | LN | | | | | |
| | | | | | [Arabidopsis thaliana] | | | | | | |
| 364 | 15216 | 0 | 96 | 18396298 | (NM_102496) expressed protein | PP | | | | | |
| | | | | | [Arabidopsis thaliana] | | | | | | |
| 365 | 15330 | 5.00E−68 | 59 | 18400296 | (NM_112272) expressed protein | PP | | | | | |
| | | | | | [Arabidopsis thaliana] | | | | | | |
| 366 | 19610 | 0 | 100 | 18409509 | (NM_115079) expressed protein | PP | CS | | | | |
| | | | | | [Arabidopsis thaliana] | | | | | | |
| 367 | 14338 | 0 | 100 | 15222967 | (NM_103926) sterol delta7 | PP | HS | CS | | | |
| | | | | | reductase [Arabidopsis thaliana] | | | | | | |
| | | | | | sp | | | | | | |
| 368 | 17809 | 0 | 100 | 15242240 | (NM_124576) sorbitol | PP | HS | | | | |
| | | | | | dehydrogenase-like protein | | | | | | |
| | | | | | [Arabidopsis thaliana] | | | | | | |
| 369 | 72471 | 3.00E−83 | 52 | 18395821 | (NM_111011) expressed protein | DS | PP | HS | | | |
| | | | | | [Arabidopsis thaliana] | | | | | | |
| 370 | 16403 | 1.00E−176 | 73 | 15237042 | (NM_117178) 98b like protein | PP | LL | LN | | | |
| | | | | | [Arabidopsis thaliana] p | | | | | | |
| 371 | 17737 | 0 | 86 | 15240924 | (NM_122624) RING-H2 zinc | PP | LN | | | | |
| | | | | | finger protein-like [Arabidopsis | | | | | | |
| | | | | | thaliana] | | | | | | |
| 372 | 18395 | 0 | 84 | 18401775 | (NM_128415) putative AP2 | SS | PP | LN | | | |
| | | | | | domain transcription factor | | | | | | |
| | | | | | [Arabidopsis thaliana] | | | | | | |
| 373 | 72772 | 0 | 100 | 15226228 | (NM_128328) putative | HS | SP | PP | LN | | |
| | | | | | cytochrome P450 [Arabidopsis | | | | | | |
| | | | | | thaliana] | | | | | | |
| 374 | 19441 | 0 | 85 | 9294477 | (AB018114) RING finger protein- | PP | PEG | | | | |
| | | | | | like [Arabidopsis thaliana] | | | | | | |
| 375 | 10486 | 1.00E−99 | 100 | 15237535 | (NM_120465) Terminal flower1 | PP | | | | | |
| | | | | | (TFL1) [Arabidopsis thaliana] | | | | | | |
| 376 | 11409 | 1.00E−133 | 100 | 68888 | trichome differentiation protein | CS | LN | SS | PP | | |
| | | | | | GL1 - Arabidopsis thaliana | | | | | | |
| 377 | 12104 | 1.00E−132 | 92 | 15230178 | AF488577_1 (AF488577) | PP | | | | | |
| | | | | | putative bHLH transcription factor | | | | | | |
| | | | | | [Arabidopsis thaliana] | | | | | | |
| 378 | 12258 | 1.00E−22 | 59 | 21554390 | arabinogalactan-protein | PP | | | | | |
| | | | | | [Arabidopsis thaliana] | | | | | | |
| 379 | 12909 | 0 | 100 | 18398696 | (NM_111831) expressed protein | PP | | | | | |
| | | | | | [Arabidopsis thaliana] | | | | | | |
| 380 | 14310 | 0 | 96 | 15226784 | (NM_129655) unknown protein | PP | | | | | |
| | | | | | [Arabidopsis thaliana] | | | | | | |
| 381 | 14317 | 0 | 100 | 18395560 | (NM_126399) expressed protein | PP | | | | | |
| | | | | | [Arabidopsis thaliana] | | | | | | |
| 382 | 14709 | 0 | 91 | 15219676 | (NM_100303) putative beta- | PP | | | | | |
| | | | | | ketoacyl-CoA synthase | | | | | | |
| | | | | | [Arabidopsis thaliana] pir\|\|T00951 | | | | | | |
| | | | | | probable 3-oxoacyl-[acyl-carrier- | | | | | | |
| | | | | | protein] synthase (EC 2.3.1.41) | | | | | | |
| | | | | | F20D22.1 | | | | | | |
| 383 | 15123 | 0 | 97 | 15238451 | (NM_120596) putative protein | PP | | | | | |
| | | | | | [Arabidopsis thaliana] | | | | | | |
| 384 | 16013 | 4.00E−91 | 85 | 15241799 | (NM_125629) ripening-related | PP | | | | | |
| | | | | | protein-like [Arabidopsis | | | | | | |
| | | | | | thaliana] | | | | | | |
| 385 | 16185 | 0 | 95 | 18420375 | (NM_120069) cysteine | PP | | | | | |
| | | | | | proteinase RD19A [Arabidopsis | | | | | | |
| | | | | | thaliana] | | | | | | |
| 386 | 16719 | 0 | 100 | 18401703 | (NM_103632) expressed protein | PP | | | | | |
| | | | | | [Arabidopsis thaliana] | | | | | | |
| 387 | 17490 | 8.00E−93 | 92 | 18405248 | (NM_104392) expressed protein | PP | | | | | |
| | | | | | [Arabidopsis thaliana] | | | | | | |
| 388 | 17905 | 8.00E−75 | 69 | 18404002 | (NM_113306) PHD-finger protein, | PP | | | | | |
| | | | | | putative [Arabidopsis thaliana] | | | | | | |
| 389 | 18385 | 1.00E−117 | 100 | 15223626 | (NM_104559) integral membrane | PP | | | | | |
| | | | | | protein, putative [Arabidopsis | | | | | | |
| | | | | | thaliana] | | | | | | |
| 390 | 18392 | 0 | 95 | 15227193 | (NM_127194) putative | SS | PP | | | | |
| | | | | | homeodomain transcription factor | | | | | | |
| | | | | | [Arabidopsis thaliana] | | | | | | |
| 392 | 18531 | 1.00E−142 | 100 | 15242792 | (NM_125746) putative protein | PP | | | | | |
| | | | | | [Arabidopsis thaliana] | | | | | | |
| 393 | 18603 | 0 | 94 | 18415840 | (NM_118332) alcohol | PP | | | | | |
| | | | | | dehydrogenase like protein | | | | | | |
| | | | | | [Arabidopsis thaliana] | | | | | | |
| 394 | 19530 | 0 | 96 | 15242217 | (NM_122138) Ruv DNA-helicase- | PP | | | | | |
| | | | | | like protein [Arabidopsis thaliana] | | | | | | |
| 395 | 70202 | 0 | 61 | 15241293 | (NM_121408) putative protein | HS | PP | | | | |
| | | | | | [Arabidopsis thaliana] | | | | | | |
| 396 | 72009 | 0 | 91 | 6319543 | (NC_001134) Amino acid | PP | | | | | |
| | | | | | transport protein for valine, | | | | | | |
| | | | | | leucine, isoleucine, and tyrosine; | | | | | | |
| | | | | | Tat1p [Saccharomyces | | | | | | |
| | | | | | cerevisiae] | | | | | | |
| 397 | 72119 | 3.00E−70 | 57 | 126078 | LATE EMBRYOGENESIS | PP | | | | | |
| | | | | | ABUNDANT PROTEIN D-34 | | | | | | |
| | | | | | (LEA D-34) | | | | | | |
| 398 | 10188 | 0 | 92 | 15228011 | (NM_129846) putative | DS | | | | | |
| | | | | | cytochrome P450 [Arabidopsis | | | | | | |
| | | | | | thaliana] | | | | | | |
| 399 | 10404 | 1.00E−151 | 94 | 99713 | homeotic protein agamous - | DS | | | | | |
| | | | | | Arabidopsis thaliana | | | | | | |
| 400 | 11333 | 1.00E−145 | 100 | 7207994 | (AF083220) proliferating cellular | DS | | | | | |
| | | | | | nuclear antigen [Arabidopsis | | | | | | |
| | | | | | thaliana] | | | | | | |
| 401 | 11719 | 0 | 87 | 15240257 | (NM_126126) cyclin D3-like | DS | | | | | |
| | | | | | protein [Arabidopsis thaliana] | | | | | | |
| 402 | 13663 | 1.00E−152 | 94 | 15227497 | (NM_129769) unknown protein | DS | | | | | |
| | | | | | [Arabidopsis thaliana] | | | | | | |
| 403 | 13958 | 0 | 96 | 15222885 | (NM_101226) | SP | DS | | | | |
| | | | | | aminoalcoholphosphotransferase | | | | | | |
| | | | | | [Arabidopsis thaliana] | | | | | | |
| 404 | 15214 | 0 | 92 | 15223772 | (NM_106341) Tub family protein, | DS | | | | | |
| | | | | | putative [Arabidopsis thaliana] | | | | | | |
| 405 | 10483 | 2.00E−86 | 100 | 15223944 | (NM_100757) superoxidase | SP | DS | | | | |
| | | | | | dismutase [Arabidopsis thaliana] | | | | | | |
| 406 | 11711 | 0 | 100 | 15234217 | (NM_119505) 2-dehydro-3- | DS | | | | | |
| | | | | | deoxyphosphoheptonate aldolase | | | | | | |
| | | | | | [Arabidopsis thaliana] | | | | | | |
| 407 | 11909 | 1.00E−126 | 88 | 99735 | L-ascorbate peroxidase (EC | DS | | | | | |
| | | | | | 1.11.1.11) precursor - | | | | | | |
| | | | | | Arabidopsis thaliana (fragment) | | | | | | |
| 408 | 12216 | 0 | 100 | 15236949 | (NM_118837) putative protein | DS | | | | | |
| | | | | | [Arabidopsis thaliana] | | | | | | |
| 409 | 12236 | 2.00E−55 | 100 | 15231278 | pollen specific protein-related | DS | | | | | |
| | | | | | [Arabidopsis thaliana] | | | | | | |
| 410 | 12256 | 0 | 100 | 2317731 | (AF013628) reversibly | DS | | | | | |
| | | | | | glycosylated polypeptide-2 | | | | | | |
| | | | | | [Arabidopsis thaliana] | | | | | | |
| 411 | 12806 | 1.00E−157 | 86 | 15235640 | (NM_119926) putative protein | DS | | | | | |
| | | | | | [Arabidopsis thaliana] | | | | | | |
| 412 | 12904 | 0 | 96 | 15239631 | BAA97512.1\| (AB026634) 3′(2′), | SP | DS | | | | |
| | | | | | 5′-bisphosphate nucleotidase | | | | | | |
| | | | | | protein-like protein [Arabidopsis | | | | | | |
| | | | | | thaliana] | | | | | | |
| 413 | 13212 | 4.00E−74 | 93 | 15236917 | (AL161566) putative protein | DS | | | | | |
| | | | | | [Arabidopsis thaliana] | | | | | | |
| 414 | 13232 | 5.00E−30 | 60 | 15223263 | expressed protein [Arabidopsis | DS | | | | | |
| | | | | | thaliana] gi\|7485996\|pir\|\|T00711 | | | | | | |
| 415 | 13912 | 9.00E−68 | 100 | 18406846 | O64644\|SP18_ARATH Probable | DS | | | | | |
| | | | | | Sin3 associated polypeptide | | | | | | |
| | | | | | [Arabidopsis thaliana] | | | | | | |
| 416 | 14327 | 0 | 92 | 15221444 | (NM_102795) putative GTP- | DS | | | | | |
| | | | | | binding protein [Arabidopsis | | | | | | |
| | | | | | thaliana] | | | | | | |
| 417 | 14704 | 3.00E−71 | 46 | 17228240 | (NC_003272) hypothetical protein | DS | | | | | |
| | | | | | [Nostoc sp. PCC 7120] | | | | | | |
| 418 | 14714 | 0 | 94 | 15219541 | (NM_106032) ethylene- | DS | | | | | |
| | | | | | insensitive3-like3 (EIL3) | | | | | | |
| | | | | | [Arabidopsis thaliana] | | | | | | |
| 419 | 15142 | 0 | 74 | 15235217 | (NM_118107) putative protein | SP | DS | | | | |
| | | | | | [Arabidopsis thaliana] | | | | | | |
| 420 | 17450 | 1.00E−169 | 100 | 15232066 | AAF26152.1\|AC008261_9 | DS | | | | | |
| | | | | | (AC008261) putative homeobox- | | | | | | |
| | | | | | leucine zipper protein, HAT7 | | | | | | |
| | | | | | [Arabidopsis thaliana] | | | | | | |
| 421 | 18607 | 1.00E−151 | 94 | 15221373 | (NM_105503) putative | DS | | | | | |
| | | | | | transcription factor [Arabidopsis | | | | | | |
| | | | | | thaliana] | | | | | | |
| 422 | 19409 | 0 | 73 | 15241667 | (NM_120281) putative | DS | | | | | |
| | | | | | homeodomain protein | | | | | | |
| | | | | | [Arabidopsis thaliana] | | | | | | |
| 423 | 19412 | 0 | 96 | 15228826 | (NM_116132) putative protein | DS | | | | | |
| | | | | | [Arabidopsis thaliana] | | | | | | |
| 424 | 13005 | 0 | 99 | 15239405 | (NM_122447) cyclin 3a | SP | SS | PEG | | | |
| | | | | | [Arabidopsis thaliana] | | | | | | |
| | | | | | gb\|AAC98445.1\| (AC006258) | | | | | | |
| | | | | | cyclin 3a [Arabidopsis thaliana] | | | | | | |
| 425 | 10203 | 0 | 81 | 18405485 | (NM_104444) expressed protein | SP | | | | | |
| | | | | | [Arabidopsis thaliana] | | | | | | |
| 426 | 11327 | 0 | 92 | 12643807 | Protein farnesyltransferase alpha | SP | | | | | |
| | | | | | subunit (CAAX | | | | | | |
| | | | | | farnesyltransferase alpha | | | | | | |
| | | | | | subunit) (RAS proteins | | | | | | |
| | | | | | prenyltransferase alpha) (FTase- | | | | | | |
| | | | | | alpha)[Arabidopsis thaliana] | | | | | | |
| 427 | 12018 | 1.00E−175 | 96 | 18404664 | (NM_129374) expressed protein | LL | | | | | |
| | | | | | [Arabidopsis thaliana] | | | | | | |
| 427 | 11814 | 1.00E−175 | 96 | 18404664 | (NM_129374) expressed protein | SP | | | | | |
| | | | | | [Arabidopsis thaliana] | | | | | | |
| 428 | 13003 | 1.00E−169 | 85 | 18394319 | (NM_101474) expressed protein | SP | | | | | |
| | | | | | [Arabidopsis thaliana] | | | | | | |
| 429 | 13949 | 1.00E−160 | 85 | 18399097 | (NM_103124) expressed protein | SP | | | | | |
| | | | | | [Arabidopsis thaliana] | | | | | | |
| 430 | 16416 | 1.00E−161 | 94 | 15236283 | (NM_116570) putative | SP | | | | | |
| | | | | | chloroplast protein import | | | | | | |
| | | | | | component [Arabidopsis thaliana] | | | | | | |
| 431 | 16438 | 1.00E−167 | 78 | 18403775 | (AC004667) expressed protein | SP | | | | | |
| | | | | | [Arabidopsis thaliana] | | | | | | |
| | | | | | gb\|AAM62820.1\| (AY085599) | | | | | | |
| | | | | | zinc finger protein Glo3-like | | | | | | |
| | | | | | [Arabidopsis thaliana] | | | | | | |
| 432 | 17124 | 0 | 100 | 15221491 | (NM_104934) similar to fiavin- | SP | | | | | |
| | | | | | containing monooxygenase | | | | | | |
| | | | | | (sp\|P36366); similar to ESTs | | | | | | |
| | | | | | gb\|R30018, gb\|H36886, | | | | | | |
| | | | | | gb\|N37822, and gb\|T88100 | | | | | | |
| | | | | | [Arabidopsis thaliana] | | | | | | |
| 433 | 19132 | 0 | 92 | 18396094 | (NM_111084) expressed protein | SP | | | | | |
| | | | | | [Arabidopsis thaliana] | | | | | | |
| 434 | 17922 | 1.00E−134 | 83 | 7485939 | AAC13593.1\| (AF058914) | LL | SP | CS | | | |
| | | | | | contains similarity to Arabidopsis | | | | | | |
| | | | | | thaliana DNA-damage- | | | | | | |
| | | | | | repair/tolerance resistance | | | | | | |
| | | | | | protein DRT111 (SW: P42698) | | | | | | |
| 435 | 19719 | 1.00E−141 | 72 | 6692816 | (AB036735) allyl alcohol | PEG | SP | HS | | | |
| | | | | | dehydrogenase [Nicotiana | | | | | | |
| | | | | | tabacum] | | | | | | |
| 436 | 14274 | 8.00E−90 | 100 | 18407428 | (NM_130339) expressed protein | SP | | | | | |
| | | | | | [Arabidopsis thaliana] | | | | | | |
| 436 | 17336 | 8.00E−90 | 100 | 18407428 | (NM_130339) expressed protein | SP | LL | | | | |
| | | | | | [Arabidopsis thaliana] | | | | | | |
| 437 | 17735 | 1.00E−108 | 91 | 18404601 | (NM_129353) expressed protein | SP | LL | | | | |
| | | | | | [Arabidopsis thaliana] | | | | | | |
| 438 | 19249 | 5.00E−43 | 100 | 21553354 | glycine-rich RNA binding protein | PP | SP | LN | | | |
| | | | | | 7 [Arabidopsis thaliana] | | | | | | |
| 439 | 18513 | 0 | 96 | 15226492 | (NM_130274) putative protein | SP | PP | SS | | | |
| | | | | | kinase [Arabidopsis thaliana] | | | | | | |
| | | | | | pir\|\|T02181 protein kinase | | | | | | |
| | | | | | homolog F14M4.11 | | | | | | |
| 440 | 11517 | 1.00E−153 | 85 | 18412044 | (NM_106509) expressed protein | SP | | | | | |
| | | | | | [Arabidopsis thaliana] | | | | | | |
| 441 | 12363 | 0 | 100 | 15242458 | (NM_123934) GDSL-motif | SP | | | | | |
| | | | | | lipase/hydrolase-like protein | | | | | | |
| | | | | | [Arabidopsis thaliana] | | | | | | |
| 442 | 12922 | 7.00E−81 | 100 | 18403216 | (NM_128881) expressed protein | SP | | | | | |
| | | | | | [Arabidopsis thaliana] | | | | | | |
| 443 | 15360 | 1.00E−152 | 89 | 18398108 | (NM_111674) expressed protein | SP | | | | | |
| | | | | | [Arabidopsis thaliana] | | | | | | |
| 444 | 16028 | 0 | 100 | 15232435 | (NM_115274) peptide transport - | SP | | | | | |
| | | | | | like protein [Arabidopsis thaliana] | | | | | | |
| 445 | 16648 | 1.00E−134 | 100 | 15891409 | NP_534027.1\| (NC_003305) 3- | SP | | | | | |
| | | | | | oxoacyl-(acyl-carrier-protein) | | | | | | |
| | | | | | reductase [Agrobacterium | | | | | | |
| | | | | | tumefaciens str. C58 (U. | | | | | | |
| | | | | | Washington)] | | | | | | |
| 446 | 16705 | 0 | 95 | 15236458 | (NM_116899) nodulin-like protein | SP | | | | | |
| | | | | | [Arabidopsis thaliana] | | | | | | |
| 447 | 16715 | 0 | 96 | 15238198 | (NM_120537) putative protein | SP | | | | | |
| | | | | | [Arabidopsis thaliana] | | | | | | |
| 448 | 17316 | 1.00E−124 | 95 | 18378907 | (NM_100079) expressed protein | SP | | | | | |
| | | | | | [Arabidopsis thaliana] | | | | | | |
| 449 | 17331 | 0 | 85 | 15220100 | (NM_106680) putative sulfate | SP | | | | | |
| | | | | | transporter [Arabidopsis thaliana] | | | | | | |
| 450 | 17339 | 2.00E−79 | 100 | 15228208 | (NM_114633) putative protein | SP | | | | | |
| | | | | | [Arabidopsis thaliana] | | | | | | |
| 451 | 17420 | 1.00E−124 | 94 | 15229782 | (NM_114248) glutathione | SP | | | | | |
| | | | | | transferase-like protein | | | | | | |
| | | | | | [Arabidopsis thaliana] | | | | | | |
| 452 | 17446 | 1.00E−144 | 88 | 15230344 | (NM_115620) AP2 transcription | SP | | | | | |
| | | | | | factor - like protein [Arabidopsis | | | | | | |
| | | | | | thaliana] | | | | | | |
| 453 | 17487 | 1.00E−71 | 78 | 15218649 | (NM_102603) ethylene- | SP | | | | | |
| | | | | | responsive element binding | | | | | | |
| | | | | | factor, putative [Arabidopsis | | | | | | |
| | | | | | thaliana] | | | | | | |
| 454 | 17740 | 0 | 97 | 15232593 | (NM_114527) scarecrow-like | SP | | | | | |
| | | | | | protein [Arabidopsis thaliana] | | | | | | |
| 455 | 17752 | 1.00E−176 | 94 | 9755372 | (AC000107) F17F8.3 | SP | | | | | |
| | | | | | [Arabidopsis thaliana] | | | | | | |
| 456 | 18021 | 0 | 96 | 7262677 | (AC012188) Contains similarity to | SP | | | | | |
| | | | | | MYB-Related Protein B from | | | | | | |
| | | | | | Gallus gallus g [Arabidopsis | | | | | | |
| | | | | | thaliana] | | | | | | |
| 457 | 18245 | 1.00E−168 | 86 | 15239503 | (NM_122484) GATA transcription | SP | | | | | |
| | | | | | factor - like [Arabidopsis thaliana] | | | | | | |
| 458 | 18617 | 3.00E−69 | 94 | 18424873 | (NM_125879) expressed protein | SP | | | | | |
| | | | | | [Arabidopsis thaliana] | | | | | | |
| 459 | 18734 | 0 | 96 | 15237253 | (NM_121609) UVB-resistance | SP | | | | | |
| | | | | | protein-like [Arabidopsis thaliana] | | | | | | |
| 460 | 18823 | 0 | 82 | 15222227 | AAM62510.1\| (AY085278) | SP | | | | | |
| | | | | | homeodomain protein BELL1, | | | | | | |
| | | | | | putative [Arabidopsis thaliana] | | | | | | |
| 461 | 19222 | 0 | 100 | 18390636 | (NM_100509) expressed protein | PP | SP | | | | |
| | | | | | [Arabidopsis thaliana] | | | | | | |
| 462 | 19430 | 0 | 95 | 18405149 | (NM_129533) expressed protein | SP | | | | | |
| | | | | | [Arabidopsis thaliana] | | | | | | |
| 463 | 12332 | 1.00E−113 | 84 | 15221408 | (NM_106142) myb-related | SS | | | | | |
| | | | | | transcription activator, putative | | | | | | |
| | | | | | [Arabidopsis thaliana] | | | | | | |
| 464 | 13649 | 1.00E−127 | 92 | 11281134 | hypothetical protein F9G14.50 - | SS | | | | | |
| | | | | | Arabidopsis thaliana | | | | | | |
| 465 | 16113 | 0 | 97 | 15217485 | AAD18098.1\| (AC006416) | SS | | | | | |
| | | | | | Identical to gb\|Y10557 g5bf gene | | | | | | |
| | | | | | from Arabidopsis thaliana | | | | | | |
| | | | | | putative RNA-binding protein | | | | | | |
| | | | | | [Arabidopsis thaliana] | | | | | | |
| 466 | 12069 | 1.00E−63 | 100 | 18410081 | (NM_105902) expressed protein | SS | | | | | |
| | | | | | [Arabidopsis thaliana] | | | | | | |
| 467 | 12906 | 0 | 98 | 5915825 | Cytochrome P450 71B2 | SS | | | | | |
| | | | | | dbj\|BAA28537.1\| (D78605) | | | | | | |
| | | | | | cytochrome P450 | | | | | | |
| | | | | | monooxygenase [Arabidopsis | | | | | | |
| | | | | | thaliana] | | | | | | |
| 468 | 13443 | 1.00E−111 | 100 | 18409105 | (NM_114908) expressed protein | SS | | | | | |
| | | | | | [Arabidopsis thaliana] | | | | | | |
| 469 | 14707 | 0 | 96 | 13122288 | (AB047808) proteasel (pfpl)-like | SS | | | | | |
| | | | | | protein [Arabidopsis thaliana] | | | | | | |
| 470 | 15116 | 1.00E−167 | 100 | 15242465 | (NM_121002) inorganic | SS | | | | | |
| | | | | | pyrophosphatase - like protein | | | | | | |
| | | | | | [Arabidopsis thaliana] | | | | | | |
| 471 | 16117 | 1.00E−90 | 78 | 15227349 | (NM_129704) calmodulin-like | SS | | | | | |
| | | | | | protein [Arabidopsis thaliana] | | | | | | |
| 472 | 16136 | 1.00E−115 | 92 | 15222919 | (NM_101236) unknown protein | SS | | | | | |
| | | | | | [Arabidopsis thaliana] | | | | | | |
| 473 | 19077 | 8.00E−98 | 70 | 15221874 | (NM_101737) hypothetical | HS | PP | SS | | | |
| | | | | | protein [Arabidopsis thaliana] | | | | | | |
| 474 | 19178 | 0 | 95 | 6321456 | (NC_001139) gamma- | CK | HS | PEG | PP | SS | |
| | | | | | aminobutyrate (GABA) | | | | | | |
| | | | | | transaminase (4-aminobutyrate | | | | | | |
| | | | | | aminotransferase); Uga1p | | | | | | |
| | | | | | [Saccharomyces cerevisiae] | | | | | | |
| 475 | 70752 | 4.00E−46 | 100 | 15224299 | trypsin inhibitor - related | SS | | | | | |
| | | | | | [Arabidopsis thaliana] | | | | | | |
| | | | | | gi\|3287862\|sp\|O22867\|ITI5_ARATH | | | | | | |
| 476 | 70753 | 4.00E−86 | 100 | 15231204 | (NM_112176) DnaJ protein, | SS | | | | | |
| | | | | | putative [Arabidopsis thaliana] | | | | | | |
| 477 | 70809 | 6.00E−70 | 48 | 20503004 | (AC098693) Hypothetical protein | LL | PP | SS | | | |
| | | | | | [Oryza sativa (japonica cultivar- | | | | | | |
| | | | | | group)] | | | | | | |
| 478 | 72091 | 1.00E−177 | 94 | 6322655 | (NC_001143) Interacts with and | LL | LN | SS | | | |
| | | | | | may be a positive regulator of | | | | | | |
| | | | | | GLC7 which encodes type1 | | | | | | |
| | | | | | protein phosphatase; Sds22p | | | | | | |
| | | | | | [Saccharomyces cerevisiae] | | | | | | |

Trait Improvement Screens

[0071] DS-Improvement of drought tolerance identified by soil drought stress tolerance screen: Drought or water deficit conditions impose mainly osmotic stress on plants. Plants are particularly vulnerable to drought during the flowering stage. The drought condition in the screening process disclosed in Example 1B started from the flowering time and was sustained to the end of harvesting. The present invention provides recombinant DNA that can improve the plant survival rate under such sustained drought condition. Exemplary recombinant RNA for conferring such drought tolerance are identified as such in Table 3. Such recombinant RNA may find particular use in generating transgenic plants that are tolerant to the drought condition imposed during flowering time and in other stages of the plant life cycle. As demonstrated from the model plant screen, in some embodiments of transgenic plants with trait-improving recombinant DNA grown under such sustained drought condition can also have increased total seed weight per plant in addition to the increased survival rate within a transgenic population, providing a higher yield potential as compared to control plants.

[0072] PEG-Improvement of drought tolerance identified by PEG induced osmotic stress tolerance screen: Various drought levels can be artificially induced by using various concentrations of polyethylene glycol (PEG) to produce different osmotic potentials (Pilon-Smits et a. (1995) Plant Physiol. 107:125-130). Several physiological characteristics have been reported as being reliable indications for selection of plants possessing drought tolerance. These characteristics include the rate of seed germination and seedling growth. The traits can be assayed relatively easily by measuring the growth rate of seedling in PEG solution. Thus, a PEG-induced osmotic stress tolerance screen is a useful surrogate for drought tolerance screen. As demonstrated from the model plant screen, embodiments of transgenic plants with trait-improving recombinant DNA identified in a PEG-induced osmotic stress tolerance screen can survive better drought conditions providing a higher yield potential as compared to control plants.

[0073] SS-Improvement of drought tolerance identified by high salinity stress tolerance screen: Three different factors are responsible for salt damages: (1) osmotic effects, (2) disturbances in the mineralization process, (3) toxic effects caused by the salt ions, e.g., inactivation of enzymes. While the first factor of salt stress results in the wilting of the plants that is similar to drought effect, the ionic aspect of salt stress is clearly distinct from drought. The present invention provides genes that help plants to maintain biomass, root growth, and/or plant development in high salinity conditions, which are identified as such in Table 3. Since osmotic effect is one of the major component of salt stress, which is common to the drought stress, trait-improving recombinant DNA identified in a high salinity stress tolerance screen can provide transgenic crops with improved drought tolerance.

[0074] HS-Improvement of Drought Tolerance Identified by Heat Stress Tolerance Screen: Heat and drought stress often occur simultaneously, limiting plant growth. Heat stress can cause the reduction in photosynthesis rate, inhibition of leaf growth and osmotic potential in plants. Thus, genes identified by the present invention as heat stress tolerance conferring genes may also impart improved drought tolerance to plants.

[0075] CK and CS-Improvement of tolerance to cold stress: Low temperature may immediately result in mechanical constraints, changes in activities of macromolecules, and reduced osmotic potential. In the present invention, two screening conditions, i.e., cold shock tolerance screen (CK) and cold germination tolerance screen (CS), were set up to look for transgenic plants that display visual growth advantage at lower temperature. In cold germination tolerance screen, the transgenic Arabidopsis plants were exposed to a constant temperature of 8° C. from planting until day 28 post planting. The recombinant nucleotides identified by such screen as cold stress tolerance conferring genes are particular useful for the production of transgenic plant that can germinate more robustly in a cold temperature as compared to the wild type plants. In cold shock tolerance screen, the transgenic plants were first grown under the normal growth temperature of 22° C. until day 8 post planting, and subsequently were placed under 8° C. until day 28 post planting. In some preferred embodiments, transgenic plants transformed with the recombinant DNA constructs comprising SEQ ID NO: 1 or SEQ ID NO: 2 display more robust growth in both cold tolerance screens.

[0076] Improvement of tolerance to multiple stresses: Different kinds of stresses often lead to identical or similar reaction in the plants. Genes that are activated or inactivated as a reaction to stress can either act directly in a way the genetic product reduces a specific stress, or they can act indirectly by activating other specific stress genes. By manipulating the activity of such regulatory genes, i.e., multiple stress tolerance genes, the plant can be enabled to react to different kinds of stresses. For examples, SEQ ID NO: 37, SEQ ID NO: 38 and SEQ ID NO: 128 can be used to improve both heat stress tolerance and cold stress tolerance in plants. Of particular interest, plants transformed with SEQ ID NO: 59 can resist heat stress, salt stress and cold stress. In addition to these multiple stress tolerance genes, the stress tolerance conferring genes provided by the present invention may be used in combinations to generate transgenic plants that can resist multiple stress conditions.

PP-Improvement of Early Plant Growth and Development.

[0077] It has been known in the art that to minimize the impact of disease on crop profitability, it is important to start the season with healthy vigorous plants. This means avoiding seed and seedling diseases, leading to increased nutrient uptake and increased yield potential. Traditionally early planting and applying fertilizer are the methods used for promoting early seedling vigor. In early development stage, plant embryos establish only the basic root-shoot axis, a cotyledon storage organ(s), and stem cell populations, called the root and shoot apical meristems, which continuously generate new organs throughout post-embryonic development. “Early growth and development” used herein encompasses the stages of seed imbibition through the early vegetative phase. The present invention provides genes that are useful to produce transgenic plants that have advantages in one or more processes including, but not limited to, germination, seedling vigor, root growth and root morphology under non-stressed conditions. The transgenic plants starting from a more robust seedling are less susceptible to the fungal and bacterial pathogens that attach germinating seeds and seedling. Furthermore, seedlings with advantage in root growth are more resistant to drought stress due to extensive and deeper root architecture. Therefore, the genes conferring the growth advantage in early stages to plants may also be used to generate transgenic plants that are more resistant to various stress conditions due to improved early plant development. The present invention provides such exemplary genes that confer both the stress tolerance and growth advantages to plants, identified as such in Table 3, e.g., SEQ ID NO: 128 which can improve the plant early growth and development and impart heat and cold tolerance to plants.

SP-Improvement of Late Plant Growth and Development

[0078] “Late growth and development” used herein encompasses the stages of leaf development, flower production, and seed maturity. In certain embodiments, transgenic plants produced using genes that confer growth advantages to plants provided by the present invention, identified as such in Table 3, exhibit at least one phenotypic characteristics including, but not limited to, increased rosette radius, increased rosette dry weight, seed dry weight, silique dry weight, and silique length. On one hand, the rosette radius and rosette dry weight are used as the indexes of photosynthesis capacity, and thereby plant source strength and yield potential of a plant. On the other hand, the seed dry weight, silique dry weight and silique length are used as the indexes for plant sink strength, which are considered as the direct determinants of yield.

LL-Improvement of Tolerance to Shade Stress

[0079] The effects of light on plant development are especially prominent at the seedling stage. Under normal light conditions with unobstructed direct light, a plant seeding develops according to a characteristic photomorphogenic pattern, in which plants have open and expanded cotyledons and short hypocotyls. Then the plant's energy is devoted to cotyledon and leaf development while longitudinal extension growth is minimized. Under low light condition where light quality and intensity are reduced by shading, obstruction or high population density, a seedling displays a shade-avoidance pattern, in which the seedling displays a reduced cotyledon expansion, and hypocotyls extension is greatly increased. As the result, a plant under low light condition increases significantly its stem length at the expanse of leaf, seed or fruit and storage organ development, thereby adversely affecting of yield. The present invention provides recombinant nucleotides that enable plants to have an attenuated shade avoidance response so that the source of plant can be contribute to reproductive growth efficiently, resulting higher yield as compared to the wild type plants. One skilled in the art can recognize that transgenic plants generated by the present invention may be suitable for a higher density planting, thereby resulting increased yield per unit area. In some preferred embodiments, the present invention provides transgenic plants that have attenuated low light response and advantage in the flower bud formation.

LN-Improvement of Tolerance to Low Nitrogen Availability Stress

[0080] Nitrogen is a key factor in plant growth and crop yield. The metabolism, growth and development of plants are profoundly affected by their nitrogen supply. Restricted nitrogen supply alters shoot to root ratio, root development, activity of enzymes of primary metabolism and the rate of senescence (death) of older leaves. All field crops have a fundamental dependence on inorganic nitrogenous fertilizer. Since fertilizer is rapidly depleted from most soil types, it must be supplied to growing crops two or three times during the growing season. Improved nitrogen use efficiency by plants should enable crops cultivated under low nitrogen availability stress condition resulted from low fertilizer input or poor soil quality.

[0081] According to the present invention, transgenic plants generated using the recombinant nucleotides, which confer improved nitrogen use efficiency, identified as such in Table 3, exhibit one or more desirable traits including, but not limited to, increased seedling weight, increased number of green leaves, increased number of rosette leaves, increased root length and advanced flower bud formation. One skilled in the art may recognize that the transgenic plants with improved nitrogen use efficiency, established by the present invention may also have altered amino acid or protein compositions, increased yield and/or better seed quality. The transgenic plants of the present invention may be productively cultivated under nitrogen nutrient deficient conditions, i.e., nitrogen-poor soils and low nitrogen fertilizer inputs that would cause the growth of wild type plants to cease or to be so diminished as to make the wild type plants practically useless. The transgenic plants also may be advantageously used to achieve earlier maturing, faster growing, and/or higher yielding crops and/or produce more nutritious foods and animal feedstocks when cultivated using nitrogen non-limiting growth conditions.

Stacked Traits

[0082] The present invention also encompasses transgenic plants with stacked engineered traits, e.g., a crop having an improved phenotype resulting from expression of a trait-improving recombinant DNA, in combination with herbicide and/or pest resistance traits. For example, genes of the current invention can be stacked with other traits of agronomic interest, such as a trait providing herbicide resistance, for example a RoundUp Ready trait, or insect resistance, such as using a gene from Bacillus thuringensis to provide resistance against lepidopteran, coliopteran, homopteran, hemiopteran, and other insects. Herbicides for which resistance is useful in a plant include glyphosate herbicides, phosphinothricin herbicides, oxynil herbicides, imidazolinone herbicides, dinitroaniline herbicides, pyridine herbicides, sulfonylurea herbicides, bialaphos herbicides, sulfonamide herbicides and gluphosinate herbicides. To illustrate that the production of transgenic plants with herbicide resistance is a capability of those of ordinary skill in the art, reference is made to U.S. patent application publications 2003/0106096A1 and 2002/0112260A1 and U.S. Pat. Nos. 5,034,322; 5,776,760, 6,107,549 and 6,376,754, all of which are incorporated herein by reference. To illustrate that the production of transgenic plants with pest resistance is a capability of those of ordinary skill in the art reference is made to U.S. Pat. Nos. 5,250,515 and 5,880,275 which disclose plants expressing an endotoxin of Bacillus thuringiensis bacteria, to U.S. Pat. No. 6,506,599 which discloses control of invertebrates which feed on transgenic plants which express dsRNA for suppressing a target gene in the invertebrate, to U.S. Pat. No. 5,986,175 which discloses the control of viral pests by transgenic plants which express viral replicase, and to U.S. Patent Application Publication 2003/0150017 A1 which discloses control of pests by a transgenic plant which express a dsRNA targeted to suppressing a gene in the pest, all of which are incorporated herein by reference.

[0083] Once one recombinant DNA has been identified as conferring an improved trait of interest in transgenic Arabidopsis plants, several methods are available for using the sequence of that recombinant DNA and knowledge about the protein it encodes to identify homologs of that sequence from the same plant or different plant species or other organisms, e.g., bacteria and yeast. Thus, in one aspect, the invention provides methods for identifying a homologous gene with a DNA sequence homologous to any of SEQ ID NO: 1 through SEQ ID NO: 151 and SEQ ID NO: 153 through SEQ ID NO: 239, or a homologous protein with an amino acid sequence homologous to any of SEQ ID NO: 240 through SEQ ID NO: 390 and SEQ ID NO: 392 through SEQ ID NO: 478. In another aspect, the present invention provides the protein sequences of identified homologs for a sequence listed as SEQ ID NO: 240 through SEQ ID NO: 390 and SEQ ID NO: 392 through SEQ ID NO: 478. In yet another aspect, the present invention also includes linking or associating one or more desired traits, or gene function with a homolog sequence provided herein.

[0084] The trait-improving recombinant DNA and methods of using such trait-improving recombinant DNA for generating transgenic plants with improved traits provided by the present invention are not limited to any particular plant species. Indeed, the plants according to the present invention may be of any plant species, i.e., may be monocotyledonous or dicotyledonous. Preferably, they will be agricultural useful plants, i.e., plants cultivated by man for purposes of food production or technical, particularly industrial applications. Of particular interest in the present invention are corn and soybean plants. The recombinant DNA constructs optimized for soybean transformation and corn transformation are provide by the present invention. Other plants of interest in the present invention for production of transgenic plants having improved traits include, without limitation, cotton, canola, wheat, sunflower, sorghum, alfalfa, barley, millet, rice, tobacco, fruit and vegetable crops, and turfgrass.

[0085] In certain embodiments, the present invention contemplates to use an orthologous gene in generating the transgenic plants with similarly improved traits as the transgenic Arabidopsis counterpart. Improved physiological properties in transgenic plants of the present invention may be confirmed in responses to stress conditions, for example in assays using imposed stress conditions to detect improved responses to drought stress, nitrogen deficiency, cold growing conditions, or alternatively, under naturally present stress conditions, for example under field conditions. Biomass measures may be made on greenhouse or field grown plants and may include such measurements as plant height, stem diameter, root and shoot dry weights, and, for corn plants, ear length and diameter.

[0086] Trait data on morphological changes may be collected by visual observation during the process of plant regeneration as well as in regenerated plants transferred to soil. Such trait data includes characteristics such as normal plants, bushy plants, taller plants, thicker stalks, narrow leaves, striped leaves, knotted phenotype, chlorosis, albino, anthocyanin production, or altered tassels, ears or roots. Other improved traits may be identified by measurements taken under field conditions, such as days to pollen shed, days to silking, leaf extension rate, chlorophyll content, leaf temperature, stand, seedling vigor, internode length, plant height, leaf number, leaf area, tillering, brace roots, stay green, stalk lodging, root lodging, plant health, bareness/prolificacy, green snap, and pest resistance. In addition, trait characteristics of harvested grain may be confirmed, including number of kernels per row on the ear, number of rows of kernels on the ear, kernel abortion, kernel weight, kernel size, kernel density and physical grain quality.

[0087] To confirm hybrid yield in transgenic corn plants expressing genes of the present invention, it may be desirable to test hybrids over multiple years at multiple locations in a geographical location where maize is conventionally grown, e.g., in Iowa, Ill. or other locations in the Midwestern United States, under “normal” field conditions as well as under stress conditions, e.g., under drought or population density stress.

[0088] Transgenic plants can be used to provide plant parts according to the invention for regeneration or tissue culture of cells or tissues containing the constructs described herein. Plant parts for these purposes can include leaves, stems, roots, flowers, tissues, epicotyl, meristems, hypocotyls, cotyledons, pollen, ovaries, cells and protoplasts, or any other portion of the plant which can be used to regenerate additional transgenic plants, cells, protoplasts or tissue culture. Seeds of transgenic plants are provided by this invention can be used to propagate more plants containing the trait-improving recombinant DNA constructs of this invention. These descendants are intended to be included in the scope of this invention if they contain a trait-improving recombinant DNA construct of this invention, whether or not these plants are selfed or crossed with different varieties of plants.

[0089] The various aspects of the invention are illustrated by means of the following examples which are in no way intended to limit the full breath and scope of claims.

### EXAMPLES

### Example 1

### Identification of Recombinant DNA that Confers Improved Trait(s) to Plants

A. Expression Constructs for Arabidopsis Plant Transformation

[0090] Each gene of interest was amplified from a genomic or cDNA library using primer specific to sequences upstream and downstream of coding region. Transformation vectors were prepared to constitutively transcribe DNA in either sense orientation (for enhanced protein expression) or anti-sense orientation (for endogenous gene suppression) under the control of an enhanced Cauliflower Mosaic Virus 35S promoter (U.S. Pat. No. 5,359,142) directly or indirectly (Moore et al., PNAS 95:376-381, 1998; Guyer et al., Genetics 149: 633-639, 1998; International patent application NO. PCT/EP98/07577). The transformation vectors also contain a bar gene as a selectable marker for resistance to glufosinate herbicide. The transformation of Arabidopsis plants was carried out using the vacuum infiltration method known in the art (Bethtold et al., Methods Mol. Biol. 82:259-66, 1998). Seeds harvested from the plants, named as T1 seeds, were subsequently were grown in a glufosinate-containing selective medium to select for plants which were actually transformed and which produced T2 transgenic seed. For first pass screening T2 seeds from five independent transgenic lines of Arabidopsis were

B. Soil Drought Tolerance Screen

[0091] This example describes a soil drought tolerance screen to identify Arabidopsis plants transformed with recombinant DNA that wilt less rapidly and/or produce higher seed yield when grown in soil under drought conditions

[0092] T2 seeds were sown in flats filled with Metro/Mix® 200 (The Scotts® Company, USA). Humidity domes were added to each flat and flats were assigned locations and placed in climate-controlled growth chambers. Plants were grown under a temperature regime of 22° C. at day and 20° C. at night, with a photoperiod of 16 hours and average light intensity of 170 μmol/m²/s. After the first true leaves appeared, humidity domes were removed. The plants were sprayed with glufosinate herbicide and put back in the growth chamber for 3 additional days. Flats were watered for 1 hour the week following the herbicide treatment. Watering was continued every seven days until the flower bud primordia became apparent, at which time plants were watered for the last time.

[0093] To identify drought tolerant plants, plants were evaluated for wilting response and seed yield. Beginning ten days after the last watering, plants were examined daily until 4 plants/line had wilted. In the next six days, plants were monitored for wilting response. Five drought scores were assigned according to the visual inspection of the phenotypes: 1 for healthy, 2 for dark green, 3 for wilting, 4 severe wilting, and 5 for dead. A score of 3 or higher was considered as wilted.

[0094] At the end of this assay, seed yield measured as seed weight per plant under the drought condition was characterized for the transgenic plants and their controls and analyzed as a quantitative response according to example 1M. Two approaches were used for statistical analysis on the wilting response. First, the risk score was analyzed for wilting phenotype and treated as a qualitative response according to the example 1L. Alternatively, the survival analysis was carried out in which the proportions of wilted and non-wilted transgenic and control plants were compared over each of the six days under scoring and an overall log rank test was performed to compare the two survival curves using S-PLUS statistical software (S-PLUS 6, Guide to statistics, Insightful, Seattle, Wash., USA). Table 4 provides a list of recombinant DNA constructs that improve drought tolerance in transgenic plants.

TABLE 4

| | | | | | | | | | Survival Anaysis | | |
|---|---|---|---|---|---|---|---|---|---|---|---|
| | | | | | | | | | of wilt response | | |
| | | | Wilt Response | | | Seed | | | diff | | |
| Pep | | | Risk score | | | Weight/plant | | | time | | |
| SEQ | Construct_{—} | | RS | p- | | | p- | | to | p- | |
| ID | id | Orientation | mean | value | c | delta | value | c | wilting | value | c |
| 241 | 74518 | SENSE | −0.131 | 0.985 | / | 1.26 | 0 | S | 0 | 1 | / |
| 290 | 70222 | SENSE | −0.032 | 0.726 | / | 0.461 | 0.001 | S | −0.63 | 0.21 | / |
| 307 | 18280 | SENSE | −0.066 | 0.937 | / | 0.402 | 0.004 | S | 0 | 1 | / |
| 357 | 70247 | SENSE | 0.11 | 0.169 | T | 0.336 | 0.006 | S | −0.57 | 0.134 | / |
| 369 | 72471 | SENSE | 0.16 | 0.038 | S | −0.053 | 0.546 | / | 0.16 | 0.226 | / |
| 398 | 10188 | ANTI-SENSE | 0.133 | 0.004 | S | 0.68 | 0 | S | 0.24 | 0.297 | / |
| 399 | 10404 | ANTI-SENSE | 0.13 | 0.068 | T | 0.2 | 0.271 | / | 0.57 | 0.083 | T |
| 400 | 11333 | ANTI-SENSE | 0.266 | 0.007 | S | 0.291 | 0.293 | / | 0.77 | 0.131 | T |
| 401 | 11719 | ANTI-SENSE | 0.56 | 0.006 | S | −0.088 | 0.751 | / | 0 | 1 | / |
| 402 | 13663 | ANTI-SENSE | 0.123 | 0.024 | S | −0.198 | 0.763 | / | 0.04 | 0.852 | / |
| 403 | 13958 | ANTI-SENSE | 0.526 | 0.001 | S | 0.518 | 0.08 | T | 0 | 1 | / |
| 404 | 15214 | ANTI-SENSE | 0.018 | 0.208 | / | 0.19 | 0.243 | / | 0.06 | 0.815 | / |
| 405 | 10483 | SENSE | 0.313 | 0.012 | S | −0.095 | 0.795 | / | 0.28 | 0.358 | / |
| 406 | 11711 | SENSE | 0.346 | 0.005 | S | 0.218 | 0.009 | S | 0.3 | 0.371 | / |
| 407 | 11909 | SENSE | 0.094 | 0.021 | S | 0.002 | 0.493 | / | 0.26 | 0.767 | / |
| 408 | 12216 | SENSE | 0.623 | 0 | S | −0.195 | 0.714 | / | 2.55 | 0.007 | S |
| 409 | 12236 | SENSE | 0.233 | 0.019 | S | 0.32 | 0.026 | S | 0.29 | 0.124 | T |
| 410 | 12256 | SENSE | 0.254 | 0.001 | S | 0.133 | 0.245 | / | 0.09 | 0.869 | / |
| 411 | 12806 | SENSE | 0.198 | 0.016 | S | 0.689 | 0.018 | S | 0.16 | 0.696 | / |
| 412 | 12904 | SENSE | 0.292 | 0.033 | S | −1.195 | 0.992 | / | 0.81 | 0.023 | S |
| 413 | 13212 | SENSE | 0.24 | 0.006 | S | 0.676 | 0.01 | S | 0.25 | 0.559 | / |
| 414 | 13232 | SENSE | 0.166 | 0.134 | T | −0.044 | 0.568 | / | 0.81 | 0.105 | T |
| 415 | 13912 | SENSE | 0.3 | 0 | S | −0.084 | 0.74 | / | 0.91 | 0.054 | T |
| 416 | 14327 | SENSE | 0.181 | 0.008 | S | −0.423 | 0.831 | / | 0.75 | 0.021 | S |
| 417 | 14704 | SENSE | 0.174 | 0.01 | S | 0.26 | 0.003 | S | 0.92 | 0.538 | / |
| 418 | 14714 | SENSE | 0.313 | 0.007 | S | −0.283 | 0.987 | / | 0.3 | 0.702 | / |
| 419 | 15142 | SENSE | 0.28 | 0 | S | −0.498 | 0.871 | / | 0.29 | 0.196 | T |
| 420 | 17450 | SENSE | 0.117 | 0.102 | T | 0.238 | 0.079 | T | −0.05 | 0.834 | / |
| 421 | 18607 | SENSE | 0.161 | 0.013 | S | −0.167 | 0.782 | / | 0.64 | 0.034 | S |
| 422 | 19409 | SENSE | 0.177 | 0.032 | S | 0.33 | 0.119 | T | 0.36 | 0.298 | / |
| 423 | 19412 | SENSE | 0.501 | 0.001 | S | −0.006 | 0.515 | / | 0.15 | 0.84 | / |
| S: represents that the transgenic plants showed statistically significant trait improvement as compared to the reference (p < 0.05, p value, of the delta of a quantitative response or of the risk score of a qualitative response, is the probability that the observed difference | | | | | | | | | | | |
| # between the transgenic plants and the reference occur by chance) | | | | | | | | | | | |

T: represents that the transgenic plants showed a trend of trait improvement as compared to the reference, preferably with p < 0.2,
/: represents the transgenic plants didn't show any alteration or had unfavorable change in traits examined compared to the reference in the current dataset

C. Heat Stress Tolerance Screen

[0095] Under high temperatures, Arabidopsis seedlings become chlorotic and root growth is inhibited. This example sets forth the heat stress tolerance screen to identify Arabidopsis plants transformed with the gene of interest that are more resistant to heat stress based on primarily their seedling weight and root growth under high temperature. T2 seeds were plated on ½×MS salts, 1/% phytagel, with 10 μg/ml glufosinate (7 per plate with 2 control seeds; 9 seeds total per plate). Plates were placed at 4° C. for 3 days to stratify seeds. Plates were then incubated at room temperature for 3 hours and then held vertically for 11 additional days at temperature of 34° C. at day and 20° C. at night. Photoperiod was 16 h. Average light intensity was ˜140 μmol/m²/s. After 14 days of growth, plants were scored for glufosinate resistance, root length, final growth stage, visual color, and seedling fresh weight. A photograph of the whole plate was taken on day 14.

[0096] Visual assessment was carried out to evaluate the robustness of the growth based on the leave size and rosette size.

[0097] The seedling weight and root length were analyzed as quantitative responses according to example 1M. The final grow stage at day 14 was scored as success if 50% of the plants had reached 3 rosette leaves and size of leaves are greater than 1 mm (Boyes, et al., (2001) The Plant Cell 13, 1499-1510). The growth stage data was analyzed as a qualitative response according to example 1L. Table 5 provides a list of recombinant DNA constructs that improve heat tolerance in transgenic plants.

TABLE 5

| Pep | | | seedling weight | | | Root Length | | | growth stage | | |
|---|---|---|---|---|---|---|---|---|---|---|---|
| SEQ | Construct_{—} | | | p- | | | p- | | RS | p- | |
| ID | id | Orientation | delta | value | c | delta | value | c | mean | value | c |
| 268 | 12007 | ANTI-SENSE | 1.283 | 0 | S | 0.221 | 0.018 | S | 0.844 | 0.044 | S |
| 269 | 12290 | ANTI-SENSE | 0.92 | 0.002 | S | −0.09 | 0.683 | / | 0.4 | 0.14 | T |
| 270 | 12343 | ANTI-SENSE | 1.186 | 0 | S | 0.008 | 0.478 | / | −0.066 | 0.818 | / |
| 271 | 14348 | ANTI-SENSE | 0.917 | 0 | S | 0.047 | 0.352 | / | 0.034 | 0.314 | / |
| 272 | 15708 | ANTI-SENSE | 1.12 | 0 | S | 0.122 | 0.092 | T | 0.467 | 0.016 | S |
| 273 | 17615 | ANTI-SENSE | 1.134 | 0 | S | 0.176 | 0.084 | T | 0.541 | 0.102 | T |
| 274 | 17622 | ANTI-SENSE | 0.728 | 0 | S | −0.142 | 0.874 | / | 0.875 | 0.002 | S |
| 275 | 70714 | ANTI-SENSE | 1.029 | 0 | S | 0.032 | 0.355 | / | −0.003 | 0.515 | / |
| 276 | 17925 | SENSE | 0.969 | 0 | S | −0.027 | 0.588 | / | 0.22 | 0.215 | / |
| 277 | 18541 | SENSE | 0.977 | 0 | S | −0.012 | 0.559 | / | 0.982 | 0.028 | S |
| 278 | 11425 | SENSE | 1.255 | 0 | S | 0.152 | 0.096 | T | 0.516 | 0.005 | S |
| 279 | 12263 | SENSE | 0.869 | 0.003 | S | −0.023 | 0.552 | / | 0.481 | 0.113 | T |
| 280 | 12288 | ANTI-SENSE | 1.256 | 0 | S | 0.086 | 0.314 | / | 0.968 | 0.036 | S |
| 281 | 12910 | SENSE | 1.067 | 0.105 | T | 0.097 | 0.274 | / | −0.417 | 1 | / |
| 282 | 14335 | SENSE | 1.107 | 0 | S | 0.16 | 0 | S | −0.024 | 0.804 | / |
| 283 | 17427 | SENSE | 0.837 | 0 | S | −0.069 | 0.706 | / | 0.569 | 0.087 | T |
| 284 | 19140 | SENSE | 0.894 | 0 | S | 0.111 | 0.131 | T | 1.794 | 0 | S |
| 285 | 19179 | SENSE | 1.039 | 0 | S | −0.095 | 0.742 | / | 0.614 | 0.063 | T |
| 286 | 19251 | SENSE | 0.77 | 0 | S | −0.061 | 0.771 | / | 0.543 | 0.027 | S |
| 287 | 19443 | SENSE | 1.115 | 0 | S | 0.042 | 0.369 | / | 0.537 | 0.078 | T |
| 288 | 19607 | SENSE | 0.939 | 0 | S | 0.024 | 0.381 | / | 0.095 | 0.215 | / |
| 289 | 19915 | SENSE | 1.336 | 0.057 | T | 0.19 | 0.299 | / | 0.07 | 0 | S |
| 290 | 70222 | SENSE | 0.778 | 0.004 | S | −0.078 | 0.677 | / | 1.153 | 0.015 | S |
| 291 | 70464 | SENSE | 1.039 | 0 | S | 0.026 | 0.411 | / | 0.806 | 0.04 | S |
| 292 | 70474 | SENSE | 1.026 | 0 | S | 0.094 | 0.207 | / | 1.145 | 0.03 | S |
| 293 | 70484 | SENSE | 1.511 | 0 | S | 0.236 | 0.004 | S | 0.688 | 0.016 | S |
| 294 | 72474 | SENSE | 0.816 | 0 | S | 0.095 | 0.229 | / | 1.149 | 0.01 | S |
| 298 | 19252 | SENSE | 0.571 | 0.111 | T | 0.02 | 0.416 | / | 1.27 | 0.022 | S |
| 347 | 18854 | SENSE | 0.854 | 0 | S | −0.14 | 0.896 | / | 0.595 | 0.148 | T |
| 351 | 16226 | SENSE | 1.372 | 0 | S | 0.244 | 0.009 | S | 0.112 | 0.017 | S |
| 357 | 70247 | SENSE | 1.146 | 0 | S | 0.124 | 0.114 | T | 0.953 | 0.029 | S |
| 359 | 12635 | SENSE | 0.702 | 0.109 | T | 0.587 | 0.001 | S | 0.637 | 0.06 | T |
| 367 | 14338 | SENSE | 0.888 | 0 | S | 0.036 | 0.326 | / | 0.17 | 0.077 | T |
| 368 | 17809 | SENSE | 0.838 | 0.002 | S | 0.033 | 0.308 | / | 0.619 | 0.04 | S |
| 369 | 72471 | SENSE | 1.051 | 0.001 | S | 0.067 | 0.227 | / | 1.531 | 0.005 | S |
| 373 | 72772 | SENSE | 1.364 | 0 | S | 0.299 | 0.002 | S | 0.648 | 0.045 | S |
| 395 | 70202 | SENSE | 1.159 | 0 | S | −0.116 | 0.941 | / | 0.339 | 0.159 | T |
| 435 | 19719 | SENSE | 1.184 | 0 | S | 0.032 | 0.411 | / | 1.433 | 0.018 | S |
| 473 | 19077 | SENSE | 1.405 | 0 | S | 0.026 | 0.369 | / | 0.61 | 0.013 | S |
| 474 | 19178 | SENSE | 1.381 | 0 | S | 0.267 | 0.008 | S | 1.54 | 0.006 | S |

S: represents the transgenic plants showed statistically significant trait improvement as compared to the reference (p < 0.05)
T: represents the transgenic plants showed a trend of trait improvement as compared to the reference, preferably with p < 0.2
/: represents the transgenic plants didn't show any alteration or had unfavorable change in traits examined compared to the reference in the current dataset

D. Salt Stress Tolerance Screen

[0098] This example sets forth the high salinity stress screen to identify Arabidopsis plants transformed with the gene of interest that are tolerant to high levels of salt based on their rate of development, root growth and chlorophyll accumulation under high salt conditions.

[0099] T2 seeds were plated on glufosinate selection plates containing 90 mM NaCl and grown under standard light and temperature conditions. All seedlings used in the experiment were grown at a temperature of 22° C. at day and 20° C. at night, a 16-hour photoperiod, an average light intensity of approximately 120 mmol/m². On day 11, plants were measured for primary root length. After 3 more days of growth (day 14), plants were scored for transgenic status, primary root length, growth stage, visual color, and the seedlings were pooled for fresh weight measurement. A photograph of the whole plate was also taken on day 14.

[0100] Visual assessment was carried out to evaluate the robustness of the growth based on the leave size and rosette size.

[0101] The seedling weight and root length were analyzed as quantitative responses according to example 1M. The final growth stage at day 14 was scored as success if 50% of the plants reached 3 rosette leaves and size of leaves are greater than 1 mm (Boyes, D. C., et al., (2001), The Plant Cell 13, 1499/1510). The growth stage data was analyzed as a qualitative response according to example 1L.

TABLE 6
a list of recombinant nucleotides that improve high salinity tolerance in plants

| | | Seedling Weight | | | Root Length at | | | Root Length at | | | | | |
|---|---|---|---|---|---|---|---|---|---|---|---|---|---|
| Pep | | at day 14 | | | day 11 | | | day 14 | | | Growth Stage | | |
| SEQ | Construct | | p- | | | p- | | | p- | | RS | p- | |
| ID | id | delta | value | c | delta | value | c | delta | value | c | mean | vallue | c |
| 243 | 17918 | 0.749 | 0.001 | S | 0.007 | 0.945 | / | 0.054 | 0.348 | / | 0.107 | 0.152 | T |
| 258 | 17819 | 0.713 | 0.026 | S | 0.281 | 0.09 | T | 0.29 | 0.01 | S | 1.565 | 0.025 | S |
| 285 | 19179 | 0.939 | 0 | S | 0.228 | 0.044 | S | 0.269 | 0.001 | S | 1.561 | 0.034 | S |
| 298 | 19252 | 0.831 | 0.003 | S | 0.327 | 0.016 | S | 0.334 | 0.001 | S | 1.5 | 0.028 | S |
| 312 | 70405 | 0.266 | 0.096 | T | 0.051 | 0.628 | / | 0.202 | 0.014 | S | −0.201 | 0.766 | / |
| 372 | 18395 | 0.506 | 0.008 | S | 0.27 | 0.033 | S | 0.24 | 0.007 | S | 0.653 | 0.016 | S |
| 376 | 11409 | 0.834 | 0.004 | S | 0.305 | 0.007 | S | 0.329 | 0.001 | S | 0.712 | 0.073 | T |
| 390 | 18392 | 0.767 | 0 | S | 0.325 | 0.005 | S | 0.181 | 0.034 | S | 0.698 | 0.109 | T |
| 424 | 13005 | 0.787 | 0.003 | S | 0.228 | 0.021 | S | 0.161 | 0.12 | T | 1.079 | 0.013 | S |
| 439 | 18513 | 0.779 | 0.019 | S | 0.377 | 0.013 | S | 0.298 | 0.002 | S | 0.679 | 0.069 | T |
| 463 | 12332 | 0.292 | 0.604 | / | 0.204 | 0.22 | / | 0.057 | 0.829 | / | 0.538 | 0.188 | T |
| 464 | 13649 | 0.418 | 0.03 | S | 0.062 | 0.493 | / | 0.147 | 0.1 | T | 1.39 | 0.028 | S |
| 465 | 16113 | 0.108 | 0.305 | / | 0.168 | 0.221 | / | 0.138 | 0.076 | T | 1.09 | 0.068 | T |
| 466 | 12069 | 0.708 | 0.043 | S | 0.162 | 0.091 | T | 0.165 | 0.354 | / | 0.306 | 0.074 | T |
| 467 | 12906 | 0.764 | 0.05 | T | 0.185 | 0.039 | S | 0.175 | 0.01 | S | 1.212 | 0.009 | S |
| 468 | 13443 | 0.113 | 0.629 | / | −0.061 | 0.542 | / | −0.001 | 0.993 | / | 0.658 | 0.096 | T |
| 469 | 14707 | 0.388 | 0.159 | T | 0.088 | 0.452 | / | −0.094 | 0.564 | / | 0.366 | 0.012 | S |
| 470 | 15116 | 0.576 | 0.02 | S | 0.362 | 0.01 | S | 0.221 | 0.063 | T | 1.414 | 0.027 | S |
| 471 | 16117 | 0.038 | 0.789 | / | 0.02 | 0.87 | / | −0.003 | 0.98 | / | 0.599 | 0.224 | / |
| 472 | 16136 | 0.465 | 0.001 | S | 0.297 | 0 | S | 0.172 | 0.007 | S | 1.911 | 0.005 | S |
| 473 | 19077 | 0.525 | 0.02 | S | 0.23 | 0.006 | S | 0.214 | 0 | S | 0.299 | 0.116 | T |
| 474 | 19178 | 0.398 | 0.22 | / | 0.231 | 0.106 | T | 0.219 | 0.046 | S | 0.456 | 0.213 | / |
| 475 | 70752 | 0.273 | 0.379 | / | 0.122 | 0.387 | / | 0.096 | 0.417 | / | −0.022 | 0.519 | / |
| 476 | 70753 | 0.21 | 0.459 | / | −0.015 | 0.864 | / | 0.116 | 0.286 | / | 0.489 | 0.128 | T |
| 477 | 70809 | 0.802 | 0.007 | S | 0.233 | 0 | S | 0.348 | 0 | S | 2.24 | 0.009 | S |
| 478 | 72091 | 0.608 | 0.014 | S | 0.115 | 0.249 | / | 0.152 | 0.091 | T | 0.398 | 0.267 | / |

S: represents the transgenic plants showed statistically significant trait improvement as compared to the reference (p < 0.05)
T: represents the transgenic plants showed a trend of trait improvement as compared to the reference, preferably with p < 0.2
/: represents the transgenic plants didn't show any alteration or had unfavorable change in traits examined compared to the reference in the current dataset

E. Polyethylene Glycol (PEG) Induced Osmotic Stress Tolerance Screen

[0102] There are numerous factors, which can influence seed germination and subsequent seedling growth, one being the availability of water. Genes, which can directly affect the success rate of germination and early seedling growth, are potentially useful agronomic traits for improving the germination and growth of crop plants under drought stress. In this assay, PEG was used to induce osmotic stress on germinating transgenic lines of Arabidopsis thaliana seeds in order to screen for osmotically resistant seed lines.

[0103] T2 seeds were plated on glufosinate selection plates containing 3% PEG and grown under standard light and temperature conditions. Seeds were plated on each plate containing 3% PEG, ½×MS salts, 1% phytagel, and 10 μg/ml glufosinate. Plates were placed at 4° C. for 3 days to stratify seeds. On day 11, plants were measured for primary root length. After 3 more days of growth, i.e., at day 14, plants were scored for transgenic status, primary root length, growth stage, visual color, and the seedlings were pooled for fresh weight measurement. A photograph of the whole plate was taken on day 14. Visual assessment was carried out to evaluate the robustness of the growth based on the leave size and rosette size.

[0104] Seedling weight and root length were analyzed as quantitative responses according to example 1M. The final growth stage at day 14 was scored as success or failure based on whether the plants reached 3 rosette leaves and size of leaves are greater than 1 mm. The growth stage data was analyzed as a qualitative response according to example 1L.

TABLE 7
a list of recombinant nucleotides that improve osmotic stress tolerance in plants

| | | Seedling Weight at | | | Root Length at | | | Root Length at | | | | | |
|---|---|---|---|---|---|---|---|---|---|---|---|---|---|
| Pep | | day14 | | | day 11 | | | day14 | | | Growth Stage | | |
| SEQ | | | p- | | | p- | | | p- | | RS | p- | |
| ID | Construct | delta | value | c | delta | value | c | delta | value | c | mean | value | c |
| 241 | 74518 | 0.53 | 0.018 | S | 0.217 | 0.024 | S | 0.51 | 0.001 | S | 4 | 0 | S |
| 345 | 14825 | 0.414 | 0.181 | T | 0.271 | 0.053 | T | 0.102 | 0.34 | / | 2.105 | 0.01 | S |
| 346 | 17931 | 0.295 | 0.425 | / | 0.124 | 0.574 | / | 0.116 | 0.454 | / | 2.069 | 0.085 | T |
| 347 | 18854 | 0.484 | 0.015 | S | 0.342 | 0.011 | S | 0.159 | 0.073 | T | 1.023 | 0.238 | / |
| 348 | 12237 | 0.371 | 0.165 | T | 0.325 | 0.001 | S | 0.297 | 0.003 | S | 2.191 | 0.017 | S |
| 349 | 13414 | 0.137 | 0.311 | / | 0.241 | 0.069 | T | 0.265 | 0.045 | S | 2.461 | 0.027 | S |
| 350 | 16160 | 0.303 | 0.044 | S | 0.242 | 0.035 | S | 0.077 | 0.512 | / | 3.381 | 0.001 | S |
| 351 | 16226 | 0.367 | 0.047 | S | 0.132 | 0.224 | / | 0.097 | 0.276 | / | 4 | 0 | S |
| 352 | 16803 | 0.382 | 0.036 | S | 0.125 | 0.489 | / | 0.224 | 0.023 | S | 4 | 0 | S |
| 353 | 18260 | 0.183 | 0.315 | / | 0.125 | 0.315 | / | 0.146 | 0.143 | T | 3.362 | 0.002 | S |
| 354 | 18642 | 0.076 | 0.674 | / | 0.199 | 0.09 | T | 0.199 | 0.029 | S | 3.056 | 0.002 | S |
| 355 | 18721 | 0.336 | 0.104 | T | 0.177 | 0.145 | T | 0.109 | 0.228 | / | 2.281 | 0.02 | S |
| 356 | 19254 | 0.334 | 0.242 | / | 0.155 | 0.227 | / | 0.153 | 0.183 | T | 0.905 | 0.129 | T |
| 357 | 70247 | 0.45 | 0.138 | T | 0.334 | 0.008 | S | 0.169 | 0.07 | T | 2.692 | 0.013 | S |
| 358 | 70650 | 0.215 | 0.121 | T | 0.105 | 0.114 | T | 0.092 | 0.255 | / | 2.749 | 0.011 | S |
| 374 | 19441 | 0.413 | 0.017 | S | 0.256 | 0.003 | S | 0.098 | 0.085 | T | 2.324 | 0.04 | S |
| 424 | 13005 | 0.685 | 0.008 | S | 0.395 | 0.002 | S | 0.226 | 0.013 | S | 3.787 | 0 | S |
| 435 | 19719 | 0.306 | 0.04 | S | 0.135 | 0.051 | T | −0.028 | 0.426 | / | −0.338 | 0.598 | / |
| 474 | 19178 | 0.515 | 0.02 | S | 0.21 | 0.059 | T | 0.169 | 0.08 | T | 3.53 | 0 | S |

S: represents the transgenic plants showed statistically significant trait improvement as compared to the reference (p < 0.05)
T: represents the transgenic plants showed a trend of trait improvement compared to the reference, preferably with p < 0.2
/: represents the transgenic plants didn't show any alteration or had unfavorable change in traits examined compared to the reference in the current dataset

F. Cold Shock Tolerance Screen

[0105] This example set forth a screen to identify Arabidopsis plants transformed with the genes of interest that are more tolerant to cold stress subjected during day 8 to day 28 after seed planting. During these crucial early stages, seedling growth and leaf area increase were measured to assess tolerance when Arabidopsis seedlings were exposed to low temperatures. Using this screen, genetic alterations can be found that enable plants to germinate and grow better than wild type plants under sudden exposure to low temperatures.

[0106] T2 seeds were tested. Eleven seedlings from each line plus one control line were plated together on a plate containing ½× Gamborg Salts with 0.8 Phytagel™, 1% Phytagel, and 0.3% Sucrose. Plates were then oriented horizontally and stratified for three days at 4° C. At day three, plates were removed from stratification and exposed to standard conditions (16 hr photoperiod, 22° C. at day and 20° C. at night) until day 8. At day eight, plates were removed from standard conditions and exposed to cold shock conditions (24 hr photoperiod, 8° C. at both day and night) until the final day of the assay, i.e., day 28. Rosette areas were measured at day 8 and day 28, which were analyzed as quantitative responses according to example 1M.

TABLE 8
a list of recombinant nucleotides that improve cold shock stress tolerance in plants

| | | | | | | | | | difference in | | |
|---|---|---|---|---|---|---|---|---|---|---|---|
| | | | | | | | | | rosette area | | |
| | | | rosette area at | | | rosette area at | | | between day 28 | | |
| Pep | | | day 8 | | | day 28 | | | and day 8 | | |
| SEQ | | | | p- | | | p- | | | p- | |
| ID | Construct_id | Orientation | delta | value | c | delta | value | c | delta | value | c |
| 240 | 19867 | SENSE | −0.032 | 0.603 | / | 0.15 | 0.309 | / | 0.426 | 0.064 | T |
| 241 | 74518 | SENSE | 0.184 | 0.192 | T | 0.653 | 0.001 | S | 0.796 | 0 | S |
| 242 | 15816 | SENSE | 0.366 | 0.027 | S | 0.592 | 0.002 | S | 0.666 | 0.004 | S |
| 243 | 17918 | SENSE | 0.594 | 0 | S | 0.982 | 0 | S | 1.325 | 0 | S |
| 276 | 17925 | SENSE | 0.479 | 0.001 | S | 0.693 | 0 | S | 0.872 | 0 | S |
| 474 | 19178 | SENSE | 0.23 | 0.083 | T | 0.435 | 0.026 | S | 0.435 | 0.103 | T |

S: represents the transgenic plants showed statistically significant trait improvement as compared to the reference (p < 0.05)
T: represents the transgenic plants showed a trend of trait improvement compared to the reference, preferably with p < 0.2
/: represents the transgenic plants didn't show any alteration or had unfavorable change in traits examined compared to the reference in the current dataset.

G. Cold Germination Tolerance Screen

[0107] This example sets forth a screen to identify Arabidopsis plants transformed with the genes of interests are resistant to cold stress based on their rate of development, root growth and chlorophyll accumulation under low temperature conditions.

[0108] T2 seeds were plated and all seedlings used in the experiment were grown at 8° C. Seeds were first surface disinfested using chlorine gas and then seeded on assay plates containing an aqueous solution of ½× Gamborg's B/5 Basal Salt Mixture (Sigma/Aldrich Corp., St. Louis, Mo., USA G/5788), 1% Phytagel™ (Sigma-Aldrich, P-8169), and 10 ug/ml BASTA™ (Bayer Crop Science, Frankfort, Germany), with the final pH adjusted to 5.8 using KOH. Test plates were held vertically for 28 days at a constant temperature of 8° C., a photoperiod of 16 hr, and average light intensity of approximately 100 mmol/m²/s. At 28 days post planting, root length was measured, growth stage was observed, the visual color was assessed, and a whole plate photograph was taken.

[0109] Visual assessment was carried out to evaluate the robustness of the growth based on the leave size and rosette size.

[0110] The root length at day 28 was analyzed as a quantitative response according to example 1M. The growth stage at day 7 was analyzed as a qualitative response according to example 1L.

TABLE 9
a list of recombinant nucleotides that improve cold stress tolerance
in plants

| | | | Root Length | | | Growth Stage | | |
|---|---|---|---|---|---|---|---|---|
| Pep | | | at day 28 | | | at day 28 | | |
| SEQ | Construct_{—} | Orien- | | p- | | RS | p- | |
| ID | id | tation | delta | value | c | mean | value | c |
| 240 | 19867 | SENSE | 0.071 | 0.292 | / | 1.954 | 0.103 | T |
| 241 | 74518 | SENSE | 0.278 | 0.031 | S | 4 | 0 | S |
| 244 | 15306 | ANTI- | 0.176 | 0.142 | T | 1.582 | 0.067 | T |
| | | SENSE | | | | | | |
| 245 | 12038 | SENSE | 0.045 | 0.188 | T | 2.271 | 0.022 | S |
| 246 | 12046 | SENSE | 0.177 | 0.125 | T | 3.513 | 0 | S |
| 247 | 13432 | SENSE | 0.182 | 0.015 | S | 1.108 | 0.078 | T |
| 248 | 13711 | SENSE | 0.15 | 0.022 | S | 2.357 | 0.012 | S |
| 249 | 14809 | SENSE | −0.034 | 0.631 | / | 1.95 | 0.047 | S |
| 250 | 14951 | SENSE | 0.237 | 0.053 | T | 3.387 | 0.001 | S |
| 251 | 15632 | SENSE | 0.003 | 0.481 | / | 0.49 | 0.275 | / |
| 252 | 16147 | SENSE | 0.176 | 0.016 | S | 3.284 | 0.003 | S |
| 253 | 16158 | SENSE | 0.084 | 0.235 | / | 1.432 | 0.138 | T |
| 254 | 16170 | SENSE | 0.066 | 0.354 | / | 1.995 | 0.088 | T |
| 255 | 16171 | SENSE | −0.178 | 0.842 | / | −0.671 | 0.732 | / |
| 256 | 16175 | SENSE | −0.054 | 0.7 | / | 1.231 | 0.184 | T |
| 257 | 17430 | SENSE | 0.254 | 0.135 | T | 2.776 | 0.009 | S |
| 258 | 17819 | SENSE | 0.221 | 0.028 | S | −0.475 | 0.922 | / |
| 259 | 17921 | SENSE | −0.151 | 0.912 | / | 1.291 | 0.179 | T |
| 260 | 17928 | SENSE | 0.368 | 0.028 | S | 2.599 | 0.003 | S |
| 261 | 18637 | SENSE | 0.158 | 0.225 | / | 1.143 | 0.164 | T |
| 262 | 18816 | SENSE | 0.206 | 0.075 | T | 3.038 | 0.002 | S |
| 263 | 19227 | SENSE | 0.198 | 0.058 | T | 3.068 | 0.002 | S |
| 264 | 19429 | SENSE | 0.258 | 0.062 | T | 2.582 | 0.006 | S |
| 265 | 70235 | SENSE | 0.175 | 0.065 | T | 2.584 | 0.006 | S |
| 266 | 72634 | SENSE | 0.169 | 0.064 | T | 2.835 | 0.001 | S |
| 267 | 72752 | SENSE | 0.292 | 0.019 | S | 2.816 | 0.002 | S |
| 273 | 17615 | ANTI- | 0.317 | 0.006 | S | 2.239 | 0.022 | S |
| | | SENSE | | | | | | |
| 277 | 18541 | SENSE | 0.321 | 0.072 | T | 2.631 | 0.014 | S |
| 293 | 70484 | SENSE | 0.2 | 0.018 | S | 2.61 | 0.016 | S |
| 298 | 19252 | SENSE | 0.391 | 0.002 | S | 1.041 | 0.084 | T |
| 346 | 17931 | SENSE | 0.096 | 0.059 | T | 1.213 | 0.142 | T |
| 357 | 70247 | SENSE | 0.299 | 0.006 | S | 2.607 | 0.005 | S |
| 366 | 19610 | SENSE | 0.33 | 0.079 | T | 4 | 0 | S |
| 367 | 14338 | SENSE | 0.223 | 0.071 | T | 1.125 | 0.087 | T |
| 376 | 11409 | SENSE | 0.193 | 0 | S | 1.831 | 0.024 | S |
| 434 | 17922 | SENSE | 0.238 | 0.029 | S | 3.109 | 0.002 | S |

S: represents the transgenic plants showed statistically significant trait improvement as compared to the reference (p < 0.05)
T: represents the transgenic plants showed a trend of trait improvement as compared to the reference, preferably with p < 0.2
/: represents the transgenic plants didn't show any alteration or had unfavorable change in traits examined compared to the reference in the current dataset

H. Shade Tolerance-Low Light Screen

[0111] Plants undergo a characteristic morphological response in shade that includes the elongation of the petiole, a change in the leaf angle, and a reduction in chlorophyll content. While these changes may confer a competitive advantage to individuals, in a monoculture the shade avoidance response is thought to reduce the overall biomass of the population. Thus, genetic alterations that prevent the shade avoidance response may be associated with higher yields. Genes that favor growth under low light conditions may also promote yield, as inadequate light levels frequently limit yield. This protocol describes a screen to look for Arabidopsis plants that show an attenuated shade avoidance response and/or grow better than control plants under low light intensity. Of particular interest, we were looking for plants that didn't extend their petiole length, had an increase in seedling weight relative to the reference and had leaves that were more close to parallel with the plate surface.

[0112] T2 seeds were plated on glufosinate selection plates with ½MS medium. Seeds were sown on ½×MS salts, 1% Phytagel, 10 ug/ml BASTA. Plants were grown on vertical plates at a temperature of 22° C. at day, 20° C. at night and under low light (approximately 30 uE/m²/s, far/red ratio (655/665/725/735) ˜0.35 using PLAQ lights with GAM color filter #680). Twenty-three days after seedlings were sown, measurements were recorded including seedling status, number of rosette leaves, status of flower bud, petiole leaf angle, petiole length, and pooled fresh weights. A digital image of the whole plate was taken on the measurement day. Seedling weight and petiole length were analyzed as quantitative responses according to example 1M. The number of rosette leaves, flowering bud formation and leaf angel were analyzed as qualitative responses according to example 1L.

TABLE 10
a list of recombinant nucleotides that improve shade tolerance in plants

| | | flowerbud | | | | | | | | | Number of | | | | | |
|---|---|---|---|---|---|---|---|---|---|---|---|---|---|---|---|---|
| | | formation | | | leaf angle | | | petiole length | | | rosette leaves | | | seedling weight | | |
| Pep | | at day 23 | | | atday 23 | | | at day 23 | | | at day 23 | | | at day 23 | | |
| SEQ | Construct_{—} | RS | p- | | RS | p- | | | p- | | RS | p- | | | p- | |
| ID | id | mean | value | c | mean | value | c | delta | value | c | mean | value | c | delta | value | c |
| 262 | 18816 | 3.007 | 0.003 | S | 0.738 | 0.003 | S | 0.046 | 0.561 | / | −0.383 | 0.929 | / | 0.171 | 0.011 | S |
| 282 | 14335 | 1.81 | 0.029 | S | 0.404 | 0.032 | S | 0.204 | 0.301 | / | −0.043 | 0.814 | / | 0.39 | 0.093 | T |
| 295 | 13047 | 2.261 | 0.006 | S | 0.482 | 0.106 | T | −0.097 | 0.31 | / | 1.655 | 0.088 | T | 0.463 | 0.022 | S |
| 296 | 13304 | −0.118 | 0.643 | / | −0.164 | 0.861 | / | −0.228 | 0.106 | T | 1.214 | 0.068 | T | 0.244 | 0.421 | / |
| 297 | 13474 | −0.319 | 0.583 | / | 0.419 | 0.062 | T | −0.051 | 0.153 | T | 0.633 | 0.032 | S | 0.223 | 0.002 | S |
| 298 | 19252 | −2 | 0.962 | / | 0.239 | 0.257 | / | 0.099 | 0.242 | / | 1.153 | 0.056 | T | 0.497 | 0 | S |
| 299 | 12612 | −0.627 | 0.975 | / | −0.094 | 0.766 | / | −0.037 | 0.341 | / | 0.61 | 0.092 | T | −0.304 | 0.298 | / |
| 300 | 12926 | 0.827 | 0.15 | T | −0.278 | 1 | / | −0.02 | 0.51 | / | 0.489 | 0.218 | / | −0.374 | 0.279 | / |
| 301 | 13230 | −0.228 | 0.954 | / | −0.05 | 0.668 | / | 0.057 | 0.33 | / | 1.83 | 0.025 | S | 0.33 | 0.124 | T |
| 302 | 14235 | −0.511 | 1 | / | 0.084 | 0.271 | / | −0.324 | 0.045 | S | −0.205 | 0.848 | / | −0.536 | 0.016 | / |
| 303 | 17305 | 0.056 | 0.374 | / | 0.036 | 0.226 | / | −0.055 | 0.59 | / | 0.788 | 0.143 | T | −0.058 | 0.761 | / |
| 304 | 17470 | 0.319 | 0.344 | / | 0.231 | 0.112 | T | −0.218 | 0.24 | / | 1.314 | 0.052 | T | 0.094 | 0.612 | / |
| 305 | 17718 | −1.438 | 0.985 | / | 0.005 | 0.486 | / | −0.148 | 0.016 | S | 1.793 | 0.027 | S | 0.033 | 0.728 | / |
| 306 | 17904 | 0.965 | 0.105 | T | 0.252 | 0.071 | T | −0.15 | 0.359 | / | 1.01 | 0.027 | S | −0.022 | 0.844 | / |
| 307 | 18280 | −0.176 | 0.626 | / | 0.284 | 0.258 | / | −0.056 | 0.547 | / | 1.35 | 0.037 | S | 0.269 | 0.086 | T |
| 308 | 18287 | −2.441 | 0.941 | / | 0.078 | 0.348 | / | −0.022 | 0.785 | / | 1.193 | 0.05 | T | 0.292 | 0.056 | T |
| 309 | 18501 | −0.087 | 1 | / | −0.326 | 1 | / | −0.254 | 0.05 | T | 0.23 | 0.438 | / | −0.303 | 0.789 | / |
| 310 | 18877 | 0.181 | 0.414 | / | 0.016 | 0.41 | / | −0.119 | 0.372 | / | 0.351 | 0.212 | / | 0.076 | 0.604 | / |
| 311 | 19531 | 4 | 0 | S | 0.04 | 0.379 | / | −0.142 | 0.344 | / | −0.253 | 0.809 | / | 0.001 | 0.998 | / |
| 312 | 70405 | −0.931 | 0.991 | / | −0.114 | 0.957 | / | −0.186 | 0.038 | S | 0.674 | 0.188 | T | 0.13 | 0.177 | T |
| 313 | 72136 | −1.001 | 1 | / | 1.063 | 0.08 | T | −0.621 | 0.008 | S | 0.775 | 0.014 | S | −1.081 | 0.018 | / |
| 314 | 72611 | −0.476 | 0.834 | / | 0.868 | 0.121 | T | −0.262 | 0.102 | T | 1.728 | 0.044 | S | −0.365 | 0.23 | / |
| 370 | 16403 | 2.223 | 0.01 | S | 0.132 | 0.144 | T | −0.157 | 0.484 | / | −1.052 | 0.999 | / | 0.148 | 0.766 | / |
| 427 | 12018 | 1.283 | 0.059 | T | 0.309 | 0.254 | / | −0.006 | 0.959 | / | 0.663 | 0.14 | T | −0.643 | 0.017 | / |
| 434 | 17922 | 1.171 | 0.136 | T | −0.046 | 0.58 | / | 0.057 | 0.624 | / | −0.042 | 0.614 | / | 0.317 | 0.056 | T |
| 436 | 17336 | −0.987 | 1 | / | −0.297 | 1 | / | −0.11 | 0.079 | T | 1.082 | 0.074 | T | −0.121 | 0.636 | / |
| 437 | 17735 | −3.705 | 1 | / | −0.016 | 0.524 | / | −0.135 | 0.084 | T | 0.882 | 0.022 | S | 0.014 | 0.9 | / |
| 477 | 70809 | −1.333 | 0.913 | / | 0.184 | 0.173 | T | 0.102 | 0.256 | / | 0.236 | 0.148 | T | 0.449 | 0.046 | S |
| 478 | 72091 | 1.908 | 0.006 | S | 0.009 | 0.422 | / | 0.251 | 0.004 | / | −0.056 | 1 | / | 0.413 | 0.083 | T |

S: represents the transgenic plants showed statistically significant trait improvement as compared to the reference (p < 0.05)
T: represents the transgenic plants showed a trend of trait improvement as compared to the reference, preferably with p < 0.2
/: represents the transgenic plants didn't show any alteration or had unfavorable change in traits examined compared to the reference in the current dataset.

I. Early Plant Growth and Development Screen

[0113] This example sets forth a plate based phenotypic analysis platform for the rapid detection of phenotypes that are evident during the first two weeks of growth. In this screen, we were looking for genes that confer advantages in the processes of germination, seedling vigor, root growth and root morphology under non-stressed growth conditions to plants. The transgenic plants with advantages in seedling growth and development were determined by the seedling weight and root length at day 14 after seed planting.

[0114] T2 seeds were plated on glufosinate selection plates and grown under standard conditions (˜100 uE/m²/s, 16 h photoperiod, 22° C. at day, 20° C. at night). Seeds were stratified for 3 days at 4° C. Seedlings were grown vertically (at a temperature of 22° C. at day 20° C. at night). Observations were taken on day 10 and day 14. Both seedling weight and root length at day 14 were analyzed as quantitative responses according to example 1M.

TABLE 11
a list recombinant nucleotides that improve early plant growth and
development

| | | | Root Length | | | Seedling Weight | | |
|---|---|---|---|---|---|---|---|---|
| Pep | | | at day14 | | | at day14 | | |
| SEQ | Construct_{—} | Orien- | | p- | | | p- | |
| ID | id | tation | delta | value | c | delta | value | c |
| 241 | 74518 | SENSE | 0.216 | 0.01 | S | 0.454 | 0.049 | S |
| 245 | 12038 | SENSE | 0.101 | 0.046 | S | 0.629 | 0.003 | S |
| 250 | 14951 | SENSE | 0.15 | 0.072 | T | 0.138 | 0.378 | / |
| 260 | 17928 | SENSE | 0.062 | 0.22 | / | 0.246 | 0.069 | T |
| 265 | 70235 | SENSE | 0.079 | 0.519 | / | 0.414 | 0.026 | S |
| 267 | 72752 | SENSE | 0.301 | 0.001 | S | 0.789 | 0.002 | S |
| 285 | 19179 | SENSE | 0.216 | 0.024 | S | 0.603 | 0.01 | S |
| 290 | 70222 | SENSE | 0.047 | 0.468 | / | 0.394 | 0.014 | S |
| 293 | 70484 | SENSE | 0.068 | 0.364 | / | 0.444 | 0.024 | S |
| 294 | 72474 | SENSE | 0.241 | 0.051 | T | 0.183 | 0.564 | / |
| 298 | 19252 | SENSE | 0.065 | 0.392 | / | 0.316 | 0.054 | T |
| 326 | 17344 | SENSE | 0.042 | 0.565 | / | 0.223 | 0.066 | T |
| 330 | 17906 | SENSE | 0.11 | 0.152 | T | 0.419 | 0.011 | S |
| 354 | 18642 | SENSE | 0.1 | 0.247 | / | 0.257 | 0.043 | S |
| 357 | 70247 | SENSE | −0.04 | 0.842 | / | 0.237 | 0.134 | T |
| 358 | 70650 | SENSE | 0.121 | 0.077 | T | 0.135 | 0.442 | / |
| 359 | 11787 | ANTI- | −0.083 | 0.784 | / | 0.167 | 0.365 | / |
| | | SENSE | | | | | | |
| 360 | 13641 | ANTI- | 0.092 | 0.15 | T | 0.336 | 0.053 | T |
| | | SENSE | | | | | | |
| 361 | 14515 | ANTI- | 0.051 | 0.616 | / | 0.351 | 0.038 | S |
| | | SENSE | | | | | | |
| 362 | 14920 | ANTI- | 0.08 | 0.358 | / | 0.101 | 0.739 | / |
| | | SENSE | | | | | | |
| 363 | 15204 | ANTI- | 0.203 | 0.015 | S | 0.076 | 0.811 | / |
| | | SENSE | | | | | | |
| 364 | 15216 | ANTI- | 0.316 | 0.023 | S | 0.632 | 0.073 | T |
| | | SENSE | | | | | | |
| 365 | 15330 | ANTI- | 0.084 | 0.428 | / | 0.435 | 0.002 | S |
| | | SENSE | | | | | | |
| 366 | 19610 | SENSE | 0.192 | 0.011 | S | 0.523 | 0.008 | S |
| 367 | 14338 | SENSE | 0.145 | 0.155 | T | 0.589 | 0.072 | T |
| 368 | 17809 | SENSE | 0.014 | 0.928 | / | −0.121 | 0.753 | / |
| 369 | 72471 | SENSE | 0.07 | 0.023 | S | 0.407 | 0.048 | S |
| 370 | 16403 | SENSE | 0.199 | 0.027 | S | 0.6 | 0.003 | S |
| 371 | 17737 | SENSE | 0.049 | 0.472 | / | 0.242 | 0.073 | T |
| 372 | 18395 | SENSE | 0.219 | 0.001 | S | 0.58 | 0.002 | S |
| 373 | 72772 | SENSE | 0.224 | 0.023 | S | 0.442 | 0.106 | T |
| 374 | 19441 | SENSE | 0.271 | 0 | S | 0.482 | 0.019 | S |
| 375 | 10486 | SENSE | 0.191 | 0.03 | S | 0.343 | 0.052 | T |
| 376 | 11409 | SENSE | 0.258 | 0.034 | S | 0.468 | 0.006 | S |
| 377 | 12104 | SENSE | 0.1 | 0.379 | / | 0.489 | 0.009 | S |
| 378 | 12258 | SENSE | 0.16 | 0.05 | T | 0.392 | 0.137 | T |
| 379 | 12909 | SENSE | 0.139 | 0.267 | / | 0.322 | 0.261 | / |
| 380 | 14310 | SENSE | 0.544 | 0 | S | 0.764 | 0.026 | S |
| 381 | 14317 | SENSE | 0.134 | 0.18 | T | 0.117 | 0.64 | / |
| 382 | 14709 | SENSE | 0.206 | 0.009 | S | 0.389 | 0.117 | T |
| 383 | 15123 | SENSE | 0.026 | 0.872 | / | 0.27 | 0.348 | / |
| 384 | 16013 | SENSE | 0.046 | 0.622 | / | 0.464 | 0.01 | S |
| 385 | 16185 | SENSE | 0.191 | 0.045 | S | 0.145 | 0.596 | / |
| 386 | 16719 | SENSE | 0.019 | 0.872 | / | 0.424 | 0.088 | T |
| 387 | 17490 | SENSE | 0.186 | 0.026 | S | 0.272 | 0.102 | T |
| 388 | 17905 | SENSE | 0.239 | 0.004 | S | 0.346 | 0.196 | T |
| 389 | 18385 | SENSE | 0.287 | 0.003 | S | 0.687 | 0.003 | S |
| 390 | 18392 | SENSE | 0.088 | 0.338 | / | 0.504 | 0.012 | S |
| 392 | 18531 | SENSE | 0.313 | 0.015 | S | 0.627 | 0 | S |
| 393 | 18603 | SENSE | 0.212 | 0 | S | 0.165 | 0.187 | T |
| 394 | 19530 | SENSE | 0.106 | 0.137 | T | 0.342 | 0.025 | S |
| 395 | 70202 | SENSE | 0.218 | 0.056 | T | 0.279 | 0.223 | / |
| 396 | 72009 | SENSE | 0.191 | 0.054 | T | 0.328 | 0.043 | S |
| 397 | 72119 | SENSE | 0.236 | 0 | S | 0.259 | 0.008 | S |
| 438 | 19249 | SENSE | 0.054 | 0.375 | / | 0.222 | 0.048 | S |
| 439 | 18513 | SENSE | 0.204 | 0.044 | S | 0.193 | 0.322 | / |
| 461 | 19222 | SENSE | 0.255 | 0.072 | T | 0.622 | 0.034 | S |
| 473 | 19077 | SENSE | −0.049 | 0.669 | / | 0.2 | 0.227 | / |
| 474 | 19178 | SENSE | 0.303 | 0 | S | 0.592 | 0.001 | S |
| 477 | 70809 | SENSE | 0.128 | 0.093 | T | 0.224 | 0.185 | T |

For other responses:
S: represents the transgenic plants showed statistically significant trait improvement as compared to the reference (p < 0.05)
T: represents the transgenic plants showed a trend of trait improvement as compared to the reference, preferably with p < 0.2
/: represents the transgenic plants didn't show any alteration or had unfavorable change in traits examined compared to the reference in the current dataset

J. Late Plant Growth and Development Screen

[0115] This example sets forth a soil based phenotypic platform to identify genes that confer advantages in the processes of leaf development, flowering production and seed maturity to plants.

[0116] Arabidopsis plants were grown on a commercial potting mixture (Metro Mix 360, Scotts Co., Marysville, Ohio) consisting of 30-40% medium grade horticultural vermiculite, 35-55% sphagnum peat moss, 10-20% processed bark ash, 1-15% pine bark and a starter nutrient charge. Soil was supplemented with Osmocote time-release fertilizer at a rate of 30 mg/ft³. T2 seeds were imbibed in 1% agarose solution for 3 days at 4° C. and then sown at a density of ˜5 per 2½ pot. Thirty-two pots were ordered in a 4 by 8 grid in standard greenhouse flat. Plants were grown in environmentally controlled rooms under a 16 h day length with an average light intensity of ˜200 μmoles/m²/s. Day and night temperature set points were 22° C. and 20° C., respectively. Humidity was maintained at 65%. Plants were watered by sub-irrigation every two days on average until mid-flowering, at which point the plants were watered daily until flowering was complete.

[0117] Application of the herbicide glufosinate was performed to select T2 individuals containing the target transgene. A single application of glufosinate was applied when the first true leaves were visible. Each pot was thinned to leave a single glufosinate-resistant seedling ˜3 days after the selection was applied.

[0118] The rosette radius was measured at day 25. The silique length was measured at day 40. The plant parts were harvested at day 49 for dry weight measurements if flowering production was stopped. Otherwise, the dry weights of rosette and silique were carried out at day 53. The seeds were harvested at day 58. All measurements were analyzed as quantitative responses according to example 1M.

TABLE 12
a list of recombinant nucleotides that improve late plant growth and development

| | | Rosette Dry | | | Rosette | | | Seed Dry | | | Silique Dry | | | Silique | | |
|---|---|---|---|---|---|---|---|---|---|---|---|---|---|---|---|---|
| Pep | | Weight | | | Radius | | | Weight | | | Weight | | | Length | | |
| SEQ | construct_{—} | | p- | | | p- | | | p- | | | p- | | | p- | |
| ID | id | delta | value | c | delta | value | c | delta | value | c | delta | value | c | delta | value | c |
| 289 | 19915 | 0.234 | 0.027 | S | 0.2 | 0.002 | S | 0.214 | 0.142 | T | 0.165 | 0.138 | T | −0.172 | 0.863 | / |
| 373 | 72772 | 0.194 | 0.291 | / | 0.022 | 0.068 | T | 0.259 | 0.003 | S | 0.102 | 0.343 | / | −0.223 | 0.889 | / |
| 403 | 13958 | −0.065 | 0.797 | / | −0.279 | 0.863 | / | 0.146 | 0.041 | S | 0.092 | 0.177 | T | 0.009 | 0.158 | T |
| 405 | 10483 | −0.073 | 0.946 | / | 0.302 | 0.002 | S | 0.288 | 0.022 | T | 0.592 | 0 | S | 0.137 | 0 | S |
| 412 | 12904 | 0.048 | 0.131 | T | 0.149 | 0.003 | S | 0.349 | 0.002 | S | 0.061 | 0.066 | T | −0.045 | 0.961 | / |
| 419 | 15142 | −0.211 | 0.945 | / | 0.074 | 0.076 | T | 0.284 | 0.002 | S | −0.088 | 0.984 | / | 0.014 | 0.374 | / |
| 424 | 13005 | −0.175 | 0.954 | / | 0.091 | 0.014 | S | 0.629 | 0.013 | S | 0.169 | 0.106 | T | −0.031 | 0.627 | / |
| 425 | 10203 | 0.2 | 0.036 | S | −0.023 | 0.587 | / | −0.757 | 0.922 | / | −0.059 | 0.756 | / | 0.018 | 0.15 | T |
| 426 | 11327 | −0.046 | 0.747 | / | 0.056 | 0.138 | T | 0.327 | 0.08 | T | −0.109 | 0.94 | / | 0.009 | 0.142 | T |
| 427 | 11814 | −0.127 | 0.799 | / | −0.085 | 0.866 | / | 0.397 | 0.016 | S | −0.184 | 0.91 | / | 0.05 | 0.236 | / |
| 428 | 13003 | 0.004 | 0.47 | / | −0.018 | 0.589 | / | 0.78 | 0.003 | S | −0.168 | 0.939 | / | −0.264 | 0.94 | / |
| 429 | 13949 | −0.009 | 0.538 | / | −0.309 | 0.953 | / | 0.719 | 0.008 | S | −0.214 | 0.995 | / | 0.002 | 0.476 | / |
| 430 | 16416 | 0.396 | 0.001 | S | 0.099 | 0.03 | S | −0.654 | 0.999 | / | 0.034 | 0.187 | T | 0.013 | 0.13 | T |
| 431 | 16438 | −0.501 | 0.802 | / | −0.516 | 0.9 | / | 0.63 | 0.021 | S | −0.968 | 0.842 | / | −0.461 | 0.905 | / |
| 432 | 17124 | −0.226 | 0.898 | / | −0.022 | 0.618 | / | 0.702 | 0.012 | S | −0.479 | 0.942 | / | −0.055 | 0.99 | / |
| 433 | 19132 | 0.149 | 0.133 | T | 0 | 0.5 | / | −0.229 | 0.965 | / | 0.198 | 0.019 | S | −0.232 | 0.974 | / |
| 434 | 17922 | 0.206 | 0.012 | S | −0.002 | 0.52 | / | 0.541 | 0.037 | S | −0.017 | 0.757 | / | 0.028 | 0.3 | / |
| 435 | 19719 | 0.301 | 0.016 | S | 0.074 | 0.178 | T | −0.395 | 0.988 | / | 0.112 | 0.246 | / | −0.031 | 0.608 | / |
| 436 | 14274 | 0.03 | 0.411 | / | 0.131 | 0.087 | T | 0.429 | 0.009 | S | −0.086 | 0.948 | / | −0.181 | 0.968 | / |
| 436 | 17336 | 0.425 | 0.021 | S | −0.129 | 0.934 | / | −0.343 | 0.949 | / | 0.09 | 0.143 | T | 0.018 | 0.443 | / |
| 437 | 17735 | −0.377 | 0.995 | / | −0.194 | 0.977 | / | 0.663 | 0.024 | S | −0.315 | 1 | / | −0.024 | 0.648 | / |
| 438 | 19249 | −0.284 | 0.977 | / | −0.166 | 0.768 | / | 0.337 | 0.046 | S | −0.101 | 0.796 | / | 0.053 | 0.076 | T |
| 439 | 18513 | 0.194 | 0.202 | / | 0.096 | 0.112 | T | 0.248 | 0.159 | T | −0.13 | 0.676 | / | −0.072 | 0.802 | / |
| 440 | 11517 | −0.033 | 0.586 | / | 0.073 | 0.052 | T | 0.133 | 0.25 | / | 0.145 | 0.217 | / | −0.016 | 0.762 | / |
| 441 | 12363 | 0.204 | 0.135 | T | −0.087 | 0.926 | / | 0.578 | 0.013 | S | 0.188 | 0.053 | T | 0.036 | 0.176 | T |
| 442 | 12922 | 0.202 | 0.003 | S | −0.035 | 0.928 | / | 0.453 | 0.14 | T | 0.164 | 0.096 | T | 0.006 | 0.298 | / |
| 443 | 15360 | 0.36 | 0.018 | S | −0.046 | 0.728 | / | −0.141 | 0.75 | / | 0.07 | 0.05 | T | 0.049 | 0.099 | T |
| 444 | 16028 | 0.341 | 0.032 | S | −0.036 | 0.548 | / | 0.044 | 0.403 | / | 0.18 | 0.034 | S | −0.015 | 0.604 | / |
| 445 | 16648 | −0.49 | 0.989 | / | 0.033 | 0.374 | / | 0.471 | 0.025 | S | −0.169 | 0.8 | / | 0.018 | 0.228 | / |
| 446 | 16705 | 0.227 | 0.072 | T | −0.168 | 0.985 | / | 0.502 | 0.001 | S | −0.228 | 0.996 | / | −0.045 | 0.932 | / |
| 447 | 16715 | 0.011 | 0.442 | / | 0.059 | 0.161 | T | 0.485 | 0.042 | S | −0.087 | 0.724 | / | 0.058 | 0.03 | S |
| 448 | 17316 | −0.047 | 0.812 | / | 0.047 | 0.08 | T | 0.109 | 0.391 | / | −0.172 | 0.747 | / | 0.229 | 0.008 | S |
| 449 | 17331 | −0.451 | 0.979 | / | −0.156 | 0.916 | / | 0.443 | 0.001 | S | −0.11 | 0.761 | / | 0.043 | 0.069 | T |
| 450 | 17339 | 0.306 | 0.026 | S | 0.152 | 0.024 | S | −0.738 | 0.936 | S | 0.095 | 0.369 | / | 0.008 | 0.356 | / |
| 451 | 17420 | −0.171 | 0.931 | / | −0.242 | 0.856 | / | 0.828 | 0.015 | S | −0.291 | 0.817 | / | −1.008 | 0.898 | / |
| 452 | 17446 | −0.226 | 0.909 | / | −0.038 | 0.673 | / | 0.302 | 0.026 | S | 0.145 | 0.118 | T | −0.001 | 0.522 | / |
| 453 | 17487 | −0.331 | 0.966 | / | 0.074 | 0.016 | S | 0.479 | 0.045 | S | −0.209 | 0.995 | / | 0.04 | 0.132 | T |
| 454 | 17740 | −0.036 | 0.641 | / | 0.016 | 0.414 | / | 0.763 | 0.057 | T | 0.087 | 0.15 | T | 0.095 | 0 | S |
| 455 | 17752 | 0.35 | 0.041 | S | −0.107 | 0.673 | / | −0.619 | 0.915 | / | 0.343 | 0.004 | S | 0.022 | 0.294 | / |
| 456 | 18021 | −0.252 | 0.947 | / | −0.131 | 0.836 | / | 0.287 | 0.079 | T | −0.249 | 0.885 | / | −0.018 | 0.64 | / |
| 457 | 18245 | −0.227 | 0.99 | / | −0.031 | 0.629 | / | 0.422 | 0.011 | S | −0.126 | 0.758 | / | −0.048 | 0.827 | / |
| 458 | 18617 | −0.193 | 0.955 | / | −0.3 | 0.95 | / | 0.877 | 0.001 | S | −0.328 | 0.971 | / | 0.075 | 0.077 | T |
| 459 | 18734 | 0.248 | 0.043 | S | 0.033 | 0.192 | T | −0.959 | 0.981 | / | 0.059 | 0.146 | T | −0.012 | 0.618 | / |
| 460 | 18823 | 0.229 | 0.114 | T | 0.069 | 0.181 | T | −0.056 | 0.677 | / | 0.282 | 0.048 | S | 0.032 | 0.24 | / |
| 461 | 19222 | 0.591 | 0.014 | S | 0.045 | 0.304 | / | −0.258 | 0.767 | / | 0.156 | 0.1 | T | −0.076 | 0.698 | / |
| 462 | 19430 | 0.362 | 0.024 | S | −0.02 | 0.776 | / | −0.751 | 0.857 | / | 0.036 | 0.281 | / | −0.231 | 0.848 | / |

S: represents the transgenic plants showed statistically significant trait improvement as compared to the reference (p < 0.05)
T: represents the transgenic plants showed a trend of trait improvement compared to the reference, preferably with p < 0.2
/: represents the transgenic plants didn't show any alteration or had unfavorable change in traits examined compared to the reference in the current dataset

K. Low Nitrogen Tolerance Screen

[0119] Under low nitrogen conditions, Arabidopsis seedlings become chlorotic and have less biomass. This example sets forth the low nitrogen tolerance screen to identify Arabidopsis plants transformed with the gene of interest that are altered in their ability to accumulate biomass and/or retain chlorophyll under low nitrogen condition.

[0120] T2 seeds were plated on plates containing 0.5×N-Free Hoagland's T 0.1 mM NH₄NO₃ T 0.1% sucrose T 1% phytagel media and grown under standard light and temperature conditions. At 12 days of growth, plants were scored for seedling status (i.e., viable or non-viable) and root length. After 21 days of growth, plants were scored for visual color, seedling weight, number of green leaves, number of rosette leaves, root length and formation of flowering buds. A photograph of each plant was also taken at this time point.

[0121] The seedling weight and root length were analyzed as quantitative responses according to example 1M. The number green leaves, the number of rosette leaves and the flowerbud formation were analyzed as qualitative responses according to example 1L. We considered that the transgenic plants grew better under the low nitrogen condition evidenced by having more green leaves or greener leaves, compared to the reference. In addition, the change in the root length in either direction, i.e., either increase or decrease will benefit plant growth. Transgenic plants with increased root length under a low nitrogen condition will enable plants to obtain nutrient from a farther distance, whereas transgenic plants with decreased root length while maintain a healthy growth evidenced by green leaves may have developed an intrinsic mechanism of using nitrogen source efficiently.

TABLE 13
a list of recombinant nucleotides that improve low
nitrogen availability tolerance in plants

| | | | | | | | | | | | Number of | | | | | |
|---|---|---|---|---|---|---|---|---|---|---|---|---|---|---|---|---|
| | | flowerbud | | | Number of green | | | | | | rosette leavels | | | | | |
| Pep | | formation | | | leaves | | | Root Length | | | at day21 | | | Rosette Weight | | |
| SEQ | Construct | RS | p- | | RS | p- | | | p- | | RS | p- | | | p- | |
| ID | id | mean | value | c | mean | value | c | delta | value | c | mean | value | c | delta | value | c |
| 241 | 74518 | −0.141 | 0.97 | / | −0.123 | 1 | / | 0.097 | 0.006 | T | −0.532 | 0.983 | / | 0.104 | 0.007 | S |
| 315 | 12627 | −0.881 | 1 | / | 1.713 | 0.001 | S | −0.222 | 0.052 | S | 1.622 | 0.008 | S | −0.037 | 0.136 | / |
| 316 | 12813 | −1.269 | 1 | / | 1.151 | 0.011 | S | −0.01 | 0.89 | / | 1.858 | 0.001 | S | 0.14 | 0 | S |
| 317 | 14945 | −1.131 | 1 | / | 0.899 | 0.014 | S | −0.056 | 0.486 | / | 0.305 | 0.289 | / | −0.038 | 0.587 | / |
| 318 | 15345 | −0.158 | 0.626 | / | 0.961 | 0.014 | S | −0.352 | 0.004 | S | −0.308 | 0.739 | / | 0.069 | 0.297 | / |
| 319 | 15348 | −0.582 | 0.937 | / | 0.755 | 0.015 | S | −0.17 | 0.082 | T | 0.923 | 0.046 | S | −0.033 | 0.214 | / |
| 320 | 16325 | −0.947 | 0.999 | / | 0.995 | 0.003 | S | −0.204 | 0.079 | T | 1.15 | 0.01 | S | −0.014 | 0.652 | / |
| 321 | 16702 | −0.315 | 0.997 | / | 0.567 | 0.023 | S | 0.16 | 0.01 | S | 0.572 | 0.071 | T | 0.012 | 0.614 | / |
| 322 | 16836 | −1.291 | 1 | / | 0.149 | 0.098 | T | 0.141 | 0.029 | S | 2.117 | 0 | S | 0.035 | 0.247 | / |
| 323 | 17002 | −1.153 | 1 | / | 0.32 | 0.013 | S | 0.209 | 0.007 | S | 1.818 | 0.001 | S | 0.131 | 0 | S |
| 324 | 17012 | −1.201 | 1 | / | 0.348 | 0.025 | S | 0.291 | 0.002 | S | 1.485 | 0.001 | S | 0.082 | 0.107 | T |
| 325 | 17017 | −0.352 | 1 | / | 0.982 | 0.003 | S | −0.112 | 0.159 | T | 0.276 | 0.127 | T | −0.009 | 0.725 | / |
| 326 | 17344 | −1.897 | 1 | / | 0.736 | 0.039 | S | 0.111 | 0.181 | T | 1.344 | 0.02 | S | 0.076 | 0.001 | S |
| 327 | 17426 | −1.364 | 1 | / | 1.185 | 0.002 | S | −0.218 | 0.008 | S | 0.814 | 0.094 | T | −0.076 | 0.034 | / |
| 328 | 17655 | −1.059 | 1 | / | 1.094 | 0.002 | S | −0.084 | 0.208 | / | 1.656 | 0 | S | 0.024 | 0.637 | / |
| 329 | 17656 | −1.309 | 1 | / | 0.465 | 0.04 | S | 0.107 | 0.228 | / | 1.317 | 0.001 | S | −0.046 | 0.058 | / |
| 330 | 17906 | −1.21 | 1 | / | 0.058 | 0.369 | / | 0.213 | 0 | S | 1.251 | 0.006 | S | 0.057 | 0.262 | / |
| 331 | 18278 | 0.025 | 0.45 | / | 0.838 | 0.003 | S | 0.04 | 0.592 | / | 2.056 | 0.001 | S | 0.016 | 0.667 | / |
| 332 | 18822 | −0.47 | 1 | / | 0.697 | 0 | S | 0.189 | 0.029 | S | 1.17 | 0.001 | S | 0.048 | 0.07 | T |
| 333 | 18881 | 1.062 | 0.022 | S | −0.365 | 0.949 | / | 0.08 | 0.211 | / | −1.211 | 1 | / | 0.006 | 0.845 | / |
| 334 | 19213 | −0.095 | 0.712 | / | −0.298 | 1 | / | 0.18 | 0.001 | S | −0.802 | 1 | / | 0.056 | 0.062 | T |
| 335 | 19239 | −0.187 | 0.931 | / | 1.466 | 0 | S | −0.104 | 0.186 | T | 1.297 | 0.006 | S | −0.048 | 0.187 | / |
| 336 | 19247 | −0.346 | 0.913 | / | 0.274 | 0.022 | S | 0.013 | 0.833 | / | 1.818 | 0.001 | S | 0.088 | 0.216 | / |
| 337 | 19460 | −0.526 | 0.994 | / | 1.427 | 0 | S | −0.004 | 0.932 | / | 0.952 | 0.01 | S | 0.003 | 0.952 | / |
| 338 | 19512 | −0.546 | 1 | / | 1.611 | 0 | S | 0.152 | 0.011 | S | 0.824 | 0.001 | S | 0.041 | 0.226 | / |
| 339 | 19533 | −0.283 | 0.929 | / | 1.909 | 0 | S | 0.072 | 0.353 | / | 1.904 | 0.001 | S | −0.002 | 0.952 | / |
| 340 | 19603 | −0.25 | 0.932 | / | 0.287 | 0.213 | / | 0.208 | 0.005 | S | 0.234 | 0.214 | / | 0.135 | 0.021 | S |
| 341 | 72126 | 0.337 | 0.017 | S | −0.447 | 0.944 | / | −0.149 | 0.059 | T | 0.23 | 0.147 | T | 0.253 | 0 | S |
| 342 | 72437 | 0.907 | 0.016 | S | −0.36 | 0.989 | / | 0.111 | 0.049 | S | −0.689 | 0.999 | / | 0.09 | 0.005 | S |
| 343 | 72441 | 0.354 | 0.011 | S | 0.57 | 0.002 | S | −0.115 | 0.078 | T | 0.269 | 0.124 | T | −0.041 | 0.361 | / |
| 344 | 72639 | 0.578 | 0.065 | T | −0.198 | 0.956 | / | 0.23 | 0.001 | S | −0.181 | 0.756 | / | 0.13 | 0.005 | S |
| 364 | 19058 | 1.236 | 0.008 | S | −0.087 | 0.974 | / | −0.103 | 0.244 | / | −0.326 | 0.94 | / | 0.123 | 0.066 | T |
| 370 | 16403 | −0.972 | 1 | / | 0.63 | 0.023 | S | −0.182 | 0.006 | S | 1.751 | 0.002 | S | −0.028 | 0.202 | / |
| 371 | 17737 | −1.124 | 1 | / | 0.352 | 0.038 | S | 0.059 | 0.512 | / | 1.404 | 0.017 | S | −0.038 | 0.381 | / |
| 372 | 18395 | −0.567 | 1 | / | 0.522 | 0.023 | S | 0.182 | 0.004 | S | 0.935 | 0.007 | S | 0.027 | 0.318 | / |
| 373 | 72772 | 0.439 | 0.019 | S | −0.113 | 0.827 | / | 0.211 | 0.006 | S | −0.141 | 0.739 | / | 0.106 | 0.006 | S |
| 376 | 11409 | 0.001 | 0.498 | / | 0.327 | 0.094 | T | −0.069 | 0.316 | / | 0.264 | 0.287 | / | 0.008 | 0.843 | / |
| 438 | 19249 | −0.834 | 1 | / | 0.257 | 0.058 | T | 0.061 | 0.25 | / | 1.01 | 0.004 | S | 0.038 | 0.438 | / |
| 478 | 72091 | −0.803 | 1 | / | −0.273 | 1 | / | 0.526 | 0 | S | 1.033 | 0.029 | S | 0.167 | 0.003 | S |

S: represents the transgenic plants showed statistically significant trait improvement as compared to the reference (p < 0.05)
T: represents the transgenic plants showed a trend of trait improvement compared than the reference, preferably with p < 0.2
/: represents the transgenic plants didn't show any alteration or had unfavorable change in traits examined compared to the reference in the current dataset

[0122] L. Statistic Analysis for Qualitative Responses

TABLE 14
a list of responses analyzed as qualitative responses

| response | screen | categories (success vs. failure) |
|---|---|---|
| wilting response risk | drought tolerance screen | non-wilted vs. wilted |
| score | | |
| growth stage at day 14 | heat stress tolerance screen | 50% of plants reach stage1.03 vs. not |
| growth stage at day 14 | salt stress tolerance screen | 50% of plants reach stage1.03 vs. not |
| growth stage at day 14 | PEG induced osmotic stress | 50% of plants reach stage1.03 vs. not |
| | tolerance screen | |
| growth stage at day 7 | cold germination stress tolerance | 50% of plants reach stage 0.5 vs. not |
| | screen | |
| number of rosette leaves | shade tolerance-low light screen | 5 leaves appeared vs. not |
| at day 23 | | |
| flower bud formation at | Shade tolerance-low light screen | flower buds appear vs. not |
| day 23 | | |
| leaf angle at day 23 | Shade tolerance-low light screen | >60 degree vs. <60 degree |
| number of green leaves at | low nitrogen tolerance screen | 6 or 7 leaves appeared vs. not |
| day 21 | | |
| number of rosette leaves | low nitrogen tolerance screen | 6 or 7 leaves appeared vs. not |
| at day 21 | | |
| Flower bud formation at | low nitrogen tolerance screen | flower buds appear vs. not |
| day 21 | | |

[0123] Plants were grouped into transgenic and reference groups and were scored as success or failure according to Table 14. First, the risk (R) was calculated, which is the proportion of plants that were scored as of failure plants within the group. Then the relative risk (RR) was calculated as the ratio of R (transgenic) to R (reference). Risk score (RS) was calculated as −log₂^{RR}. Subsequently the risk scores from multiple events for each transgene of interest were evaluated for statistical significance by t-test using S-PLUS statistical software (S-PLUS 6, Guide to statistics, Insightful, Seattle, Wash., USA). RS with a value greater than 0 indicates that the transgenic plants perform better than the reference. RS with a value less than 0 indicates that the transgenic plants perform worse than the reference. The RS with a value equal to 0 indicates that the performance of the transgenic plants and the reference don't show any difference.

[0124] M. Statistic Analysis for Quantitative Responses

TABLE 15
a list of responses analyzed as quantitative responses

| response | screen |
|---|---|
| seed yield | drought stress tolerance screen |
| seedling weight at day 14 | heat stress tolerance screen |
| root length at day 14 | heat stress tolerance screen |
| seedling weight at day 14 | salt stress tolerance screen |
| root length at day 14 | salt stress tolerance screen |
| root length at day 11 | salt stress tolerance screen |
| seedling weight at day 14 | PEG induced osmotic stress tolerance screen |
| root length at day 11 | PEG induced osmotic stress tolerance screen |
| root length at day 14 | PEG induced osmotic stress tolerance screen |
| rosette area at day 8 | cold shock tolerance screen |
| rosette area at day28 | cold shock tolerance screen |
| difference in rosette area | cold shock tolerance screen |
| from day 8 to day 28 | |
| root length at day 28 | cold stress tolerance screen |
| seedling weight at day 23 | Shade tolerance-low light screen |
| petiole length at day 23 | Shade tolerance-low light screen |
| root length at day 14 | Early plant growth and development screen |
| seedling weight at day14 | Early plant growth and development screen |
| rosette radius at day 25 | Late plant growth and development screen |
| seed dry weight at day 58 | Late plant growth and development screen |
| silique dry weight at day 53 | Late plant growth and development screen |
| silique length at day 40 | Late plant growth and development screen |
| Seedling weight at day 21 | Low nitrogen tolerance screen |
| Root length at day 21 | Low nitrogen tolerance screen |

[0125] The measurements (M) of each plant were transformed by log₂ calculation. The Delta was calculated as log₂M(transgenic)−log₂M(reference). Subsequently the mean delta from multiple events of the transgene of interest was evaluated for statistical significance by t-test using S-PLUS statistical software (S-PLUS 6, Guide to statistics, Insightful, Seattle, Wash., USA). The Delta with a value greater than 0 indicates that the transgenic plants perform better than the reference. The Delta with a value less than 0 indicates that the transgenic plants perform worse than the reference. The Delta with a value equal to 0 indicates that the performance of the transgenic plants and the reference don't show any difference.

### Example 2

### Identification of Homologs

[0126] A BLAST searchable “All Protein Database” was constructed of known protein sequences using a proprietary sequence database and the National Center for Biotechnology Information (NCBI) non-redundant amino acid database (nr.aa). For each organism from which a DNA sequence provided herein was obtained, an “Organism Protein Database” was constructed of known protein sequences of the organism; the Organism Protein Database is a subset of the All Protein Database based on the NCBI taxonomy ID for the organism.

[0127] The All Protein Database was queried using amino acid sequence of cognate protein for gene DNA used in trait-improving recombinant DNA, i.e., sequences of SEQ ID NO: 240 through SEQ ID NO: 478 using “blastp” with E-value cutoff of 1e-8. Up to 1000 top hits were kept, and separated by organism names. For each organism other than that of the query sequence, a list was kept for hits from the query organism itself with a more significant E-value than the best hit of the organism. The list contains likely duplicated genes, and is referred to as the Core List. Another list was kept for all the hits from each organism, sorted by E-value, and referred to as the Hit List.

[0128] The Organism Protein Database was queried using amino acid sequences of SEQ ID NO: 240 through SEQ ID NO: 478 using “blastp” with E-value cutoff of 1e-4. Up to 1000 top hits were kept. A BLAST searchable database was constructed based on these hits, and is referred to as “SubDB”. SubDB was queried with each sequence in the Hit List using “blastp” with E-value cutoff of 1e-8. The hit with the best E-value was compared with the Core List from the corresponding organism. The hit is deemed a likely ortholog if it belongs to the Core List, otherwise it is deemed not a likely ortholog and there is no further search of sequences in the Hit List for the same organism. Likely orthologs from a large number of distinct organisms were identified and are reported by amino acid sequences of SEQ ID NO: 479 to SEQ ID NO: 12463. These orthologs are reported in Tables 2 as homologs to the proteins cognate to genes used in trait-improving recombinant DNA.

### Example 3

### Consensus Sequence Build

[0129] ClustalW program was selected for multiple sequence alignments of the amino acid sequence of SEQ ID NO:439 and 25 homologs. Three major factors affecting the sequence alignments dramatically are (1) protein weight matrices; (2) gap open penalty; (3) gap extension penalty. Protein weight matrices available for ClustalW program include Blosum, Pam and Gonnet series. Those parameters with gap open penalty and gap extension penalty were extensively tested. On the basis of the test results, Blosum weight matrix, gap open penalty of 10 and gap extension penalty of 1 were chosen for multiple sequence alignment. Attached are the sequences of SEQ ID NO: 439, its homologs and the consensus sequence at the end. The symbols for consensus sequence are (I) uppercase letters for 100% identity in all positions of multiple sequence alignment output; (2) lowercase letters for >=70% identity; symbol; (3) “X” indicated <70% identity; (4) dashes “−” meaning that gaps were in >=70% sequences.

| SEQ ID NO : | |
|---|---|
| 5211 | ------------------------------------------------------------ |
| 12100 | ------------------------------------------------------------ |
| 6033 | ------------------------------------------------------------ |
| 5630 | ------------------------------------------------------------ |
| 2801 | ------------------------------------------------------------ |
| 11474 | ------------------------------------------------------------ |
| 12365 | ------------------------------------------------------------ |
| 9090 | ------------------------------------------------------------ |
| 439 | ------------------------------------------------------------ |
| 11419 | ------------------------------------------------------------ |
| 11201 | ------------------------------------------------------------ |
| 4683 | ------------------------------------------------------------ |
| 1624 | ------------------------------------------------------------ |
| 11490 | ------------------------------------------------------------ |
| 9137 | ------------------------------------------------------------ |
| 10769 | MIGTRVLAHSRVDPAIRWGVAARGRVVFAAIRWGAAARGRVVFAAVRWGAAARGTKREAG |
| 2036 | ------------------------------------------------------------ |
| 1472 | ------------------------------------------------------------ |
| 2526 | ------------------------------------------------------------ |
| 12153 | ------------------------------------------------------------ |
| 2333 | ------------------------------------------------------------ |
| 8918 | ------------------------------------------------------------ |
| 12149 | ------------------------------------------------------------ |
| 6330 | ------------------------------------------------------------ |
| 11407 | ------------------------------------------------------------ |
| 9050 | ------------------------------------------------------------ |
| consensus | ------------------------------------------------------------ |
| 12464 | |

-------------------MSCFACCGDEDTQ-VPDTRAQYPGHHPAR------------
-------------------MSCFACCGDEDTQ-VPDTRAQYPGHHPAR------------
-------------------MSCFACCGDEDTQ-VPDTRAQYPGHHPAR------------
-------------------MSCFACCGDEDTQ-VPDTRTQYPGHHPAR------------
-------------------MSCFACCGDEDTQGVPDNRNPYPGNHPAR------------
-------------------MSCLACCGGEDTQRTPDNGGPYPGGYPPR------------
-------------------MSCLACCGGEDTQRTPDNGGPYPGGYPPR------------
-------------------MSCFVCCGDEDTQRAPDNRNQYXKAIQQG------------
-------------------MSCFGCCGEDDDMHKTADYGGRHNQAKHFPPG---------
-------------------MSCFSCCDDDDMHRATDNGPFMAHNSAGN------------
-------------------MSCFSCCDDDDMHRATDNGPFMAHNSAGN------------
-------------------MGCFSCCGADDVGKKKKRDDPYVPIPDPG--G---------
-------------------MGFLCCSGKPSKRLESSSINENNSNIKRKDQTHVTSGSLKM
-------------------MGFLCFSGKSSKRSENSSIDENNSNIKRKDQTQLTSGSMKV
-------------------MGWIPCSGKSSGKTKKRSDSDENLSRNCSVSASERS-----
QETSTSETKKTKRKWGRGFCGMASHEVEEPLTSETKKTKRKWGRGFCGMASHEAEEPLTS
------------------MKILLGVGINGGLFGSCVSSRSKVDSSTSGISSHFEIKSTN-
------------------------------------------------------------
------------------------------------------------------------
------------------------------------------------------------
------------------------------------------------------------
------------------------------------------------------------
------------------------------------------------------------
------------------------------------------------------------
------------------------------------------------------------
----------------------MAAADTSRVFLILIIALVMVIVVLLGICWRFLGPGIMR
-------------------xxxxxxxxxxxxxxxxxxxxxxxxxxxxx--x---------
------------------ADAYRPSDQPPKGPQPVKMQPIAVPAIPVDEIREVTKGFGDE
------------------ADAYRPSDQPPKGPQPVKMQPIAVPAIPVDEIREVTKGFGDE
------------------ADAYRPSDQPPKGPQPVKMQPIAVPAIPVDEIREVTKGFGDE
------------------ADAYRPADQPPKGSQPVKMQPIAVPAIPVDELREVTKGFGDE
------------------SDAYRTADPTPRGPQPVKVQPIAVPIIPVDEIREVTKNFGDE
------------------DDAYRTADPTPRGAQPLKMQPITVPTIPVEEIREVTVAFGDE
------------------DDAYRTADPTPRGAQPLKMQPITVPTIPVEEIREVTVAFGDE
------------------NDAYRTADPTPKGPQPVKVQPIAVPTIPMDEIREKNCTGGDE
----------------NDARHHQASETAQKGPPVVKLQPIEVPIIPFSELKEATDDFGSN
------------------NGGQRATESAQRETQTVNTQPIAVPSIAVDELKDITDNFGSK
------------------NGGQRATESAQRETQTVNIQPIAVPSIAVDELKDITDNFGSK
----------------NYGRSKPGPPAPSRSPPTSRNLPIAVPAIPLDEIKGITKNFSSD
KPYVNNLSKEGESKDDQLSLDVKSLNMKDEISKDRRSNGKQAQTFTFEELAAATSNFRSD
KPYVNDSREEGASKDDQLSLDVKSLNLKDEISKDIRNNGNPAQTFTFEELVAATDNFRSD
-----------------------KAKSSVSESRSRGSDNIVAQTFTFSELATATRNFRKE
ETKKKRKNVAASSEPDKKRWFKNKIWKKKKAKNEQLATLVKEISLATKLNSAMHVNINLS
-----------NVSKDQPTTSNSEHNLPTLTPEDELKVASRLRKFGFNDLKMATRNFRPE
----------------MGSKYSKATNSINDALNSSYLVPFESYRFPLVDLEEATNNFD--
----------------MGSKYSKATNSINDALSSSYLVPFESYRVPLVDLEEATNNFDDK
----------------MGSKYSKATNSISDASNSRYGVPFENYRVPLVDLEEATNNFDDN
----------------MGSKYSKATNSINDASNSSYRVPFESLRVPFVDLQEATNNFDDK
-------------------------------LNSSYRVPFESFRVPFVDLQEATNNFDEK
-------------------------------LNSSYRVPFESFRVPFVDLQEATNNFDEK
-------------------------------LNSSYRVPFESFRVPFVDLQEATNNFDEK
------------------MRSKDSKETTYISDTTSYRFPVESSQIPFAALQEATNNFNCN
---------------RLLRPRRCPSEVPEYFSGNMSGNLRTITYFDYVTLKKATKDFHQK
----------------xxxxxxxxxxxxxxxxxxxxxxpxxxxxxxxxxxxxxtxxfxxx
ALIGEGSFGRVYLGVLRNG----------RSAAVKKLDS-NKQPDQEFLA-QVSMVSRLK
ALIGEGSFGRVYLGVLRNGX---------GVAAVKKLDS-NKQPDQEFLSXQVSMVSRLK
ALIGEGSFGRVYLGVLRNG----------RSAAVKKLDS-NKQPDQEFLA-QVSMVSRLK
ALIGEGSFGRVYLGVLRNGR---------SAXRVKKLDS-NKQPDQEFLXAQVSMVSRLK
ALIGEGSFGRVYFGVLRNG----------RSAAVKKLDS-SKQPDQEFLA-QVSMVSRLK
ALIGEGSFGRVYFGVLKNG----------RSAAIKKLDS-SKQPEQEFLA-QVSMVSRLK
ALIGEGSFGRVYFGVLKNG----------RSAAIKKLDS-SKQPEQEFLA-QVSMVSRLK
ALIGEGSFGRVYFGTLRNG----------RGAAIKKLDS-SKQPDQELLA-QVSMVSRLK
SLIGEGSYGRVYYGVLNND----------LPSAIKKLDS-NKQPDNEFLA-QVSMVSRLK
ALIGEGSYGRVYHGVLKSG----------RAAAIKKLDS-SKQPDREFLA-QVSMVSRLK
ALIGEGSYGRVYHGVLKSG----------RAAAIKKLDS-SKQPDREFLA-QVSMVSRLK
ALIGEGSYARVFFGVLRDG----------RRSAVKKLDS-SKQPDQEFLV-QVSAVSRLK
CFLGEGGFGKVYKGYLDK---------INQAVAIKQLDR-NGVQGIREFVVEVVTLSLAD
CFLGEGGFGKVYKGYLEK---------INQVVAIKQLDQ-NGLQGIREFVVEVLTLSLAD
CLIGEGGFGRVYKGYLAS---------TGQTAAIKQLDH-NGLQGNREFLVEVLMLSLLH
MNICPTQTYEEHSGTYLR---------NLAVIAVKQLDK-DGLQGNREFLVEVLMLSLLH
SLLGEGGFGCVFKGWIEENGTAPVKPGTGLTVAVKTLNH-DGLQGHKEWLAEVNFLGDLG
---GKGGFGKVYRGVLRDG----------TKVALKRHNR-DSGQSIEPFRTEIEILSRRS
FFIGAGVFGKVYKGVLRDG----------TKVALKRRKP-ESSQGIEEFETEIEILSFCS
FFIAEGGFGKVYRGVLRDG----------TKVALKRHNC-DSQQSIEEFRTEIEILSRRS
FLIGWGVFGKVYMGVLRNG----------TKVALKKHMP-ESSQGIEEFRTEIEILSLCS
FHIGLGGFGKVYRGVLRDG----------TKVALKRCKR-ESSQGIEEFRTEIEILSFCS
FHIGLGGFGKVYRGVLRDG----------TKVALKRCKR-ESSQGIEEFRTEIEILSFCS
FHIGLGGFGKVYRGVLRDG----------TKVALKRCKR-ESSQGIEEFQTEIEILSFCS
SLIGLGGFGTVYRGVLCDG----------TKVALKRCKL-ESSQGIEEFQTEIEMLSHFR
NQLGRGGFGPVYLGKLDDG----------RKVAVKQLSVGKSGQGESEFFMEVNMITSIQ
xxigxgxfgxvyxGvlxxg----------xxxaxKxxxx-xxxxxxexxxxxxxxxsxxx
HENVVELLGYCADGTLRVLAYEFATMGSLHDMLHGRKGVKG-AQPGPVLSWSQRVKIAVG
HENXVELLGYCXDGTLRVLAYEFATMGSLHDMLHGRKGVKG-AQPGPVLXWSQRXKIAVG
HENVVELLGYCADGTLRVLAYEFATMGSLHDMLHGRKGVKG-AQPGPVLSWSQRVKIAVG
HENVVELLGYCADGTLRVLAYEFATMGSLHDMLHGRKGVKG-AQPGPVLSWLQRVKIAVG
HEHVVELLGYCVDGNLRVLAYEFATMGSLHDMLHGRKGVKG-AQPGPVLSWAQRVKTAVG
HGNVVELLGYCVDGNTRILAYEFATMGSLHDMLHGRKGVKG-AQPGPVLSWTQRVKIAVG
HGNVVELLGYCVDGNTRILAYEFATMGSLHDMLHGRKGVKG-AQPGPVLSWTQRVKIAVG
HENVVELLGYCLDGNTRVLAYEFATMGSLHDMLHGRKGVKG-AQPGPVLSWIQRVKIAVG
HDNFVQLLGYCVDGNSRILSYEFANNGSLHDILHGRKGVKG-AQPGPVLSWYQRVKIAVG
DENVVELLGYCVDGGFRVLAYEYAPNGSLHDILHGRKGVKG-AQPGPVLSWAQRVKIAVG
DENVVELLGYCVDGGFRVLAYEYAPNGSLHDILHGRKGVKG-AQPGPVLSWAQRVKIAVG
HENIIQLIGYCAGGSIRVLAYEYAPRGSLHDILHGKKGVKG-AQPGPALSWMQRVKIALS
HPNLVKLIGFCAEGDQRLLVYEYMPLGSLENHLHDIP------PNRQPLDWNTRMKIAAG
NPNLVKLIGFCAEGDQRLLVYEYMPLGSLENHLHDIP------PNRQPLDWNARMKIAAG
HPNLVNLIGYCADGDQRLLVYEYMPLGSLEDHLHDIS------PSKQPLDWNTRMKIAAG
HPNLVTLLGYCTECDQKILVYEYMPLGSLQDHLLDLT------PKSQPLSWHTRMKIAVD
NPNLVKLIGYCIEDDQRLLVYEFLPRGSLENHLFRR---------SLPLPWSIRMKIALG
HPHLVSLIGFCDERNEMILIYDYMENGNLKSHLYG--------SDLPTMSWEQRLEICIG
HPHLVSLIGFCDERNEMILIYKYMENGNLKSHLYG--------SDLPSMSWEQRLEICIG
HPHLVSLIGYCDGRNEMILIYDYMENGNLKSHLYG--------SDLPSMSWEQRLEICIG
HPHLVSLIGYCDERNEMILIYEYMENGNLRSHLYG--------SDLPAMSWEQRLEICIG
HPHLVSLIGYCDETNEMILVYDYIENGNLRSHLYG--------PDLPTMSWEQRLEICIG
HPHLVSLIGYCDETNVMILVYDYIENGNLRSHLYG--------PDLPTMSWEQGLEICIG
HPHLVSLIGYCDERNEMILVYDYIENGNLRSHLYG--------SDLPSMSWEQRLEICIG
HPYLVSLIGYCDENNVTILIFKYMENGSLSSHLYG--------SYLPTMTWEQRLEICIG
HKNLVRLVGCCSEGTERLLVYEYMKNKSLDKILFAAADAPAPASAPPFLNWRTRHQIIIG
hxxxvxLxGyCxxxxxxxLxyexxxxgsLxxxLxgxxxxxx-xxxxpxxsWxqrxxIxxg
AAKGLEYLHEKAQPHIIHRDIKSSNVLLFDDDVAKIADFDLSNQ-APDMAARLHSTRVLG
AAKGLEYLHEKAQPHIIHRDIKSSNVLSFDDDVAKIADFDLSNQXAPDMAARLHSTRVLG
AAKGLEYLHEKAQPHIIHRDIKSSNVLLFDDDVAKIADFDLSNQ-APDMAARLHSTRVLG
AAKGLEYLHEKAQPHIMHRDIKSSNVLLFDDDVAKIADFDLSNQ-APDMAARLHSTRVLG
AAKGLEYLHEKAQPHIIHRDIKSSNVLLFDDDVAKIADFDLSNQ-APDMAARLHSTRVLG
AAKGLEYLHEKAQPHIIHRDIKSSNVLLFDDDVSKIADFDLSNQ-APDMAARLHSTRVLG
AAKGLEYLHEKAQPHIIHRDIKSSNVLLFDDDVSKIADFDLSNQ-APDMAARLHSTRVLG
AAKGLEYLHEKAQPHVIHRDIKSSNVLLFDDDVAKIADFDLSNQ-APDMAARLHSTRVLG
AARGLEYLHEKANPHIIHRDIKSSNVLLFEDDVAKIADFDLSNQ-APDMAARLHSTRVLG
AAKGLEYLHEKAQPHIIHRDIKSSNILLFDDDVAKIADFDLSNQ-APDMAARLHSTRVLG
AAKGLEYLHEKAQPHIIHRDIKSSNILLFDDDVAKIADFDLSNQ-APDMAARLHSTRVLG
AAKGLEELHEKAEPRVVHRDIKSSNIMLFDNDVAKVGDFDVSNQ-SPDMAARLHSTRVLG
AAKGLEYLHNEMKPPVIYRDLKCSNILLGEGYHPKLSDFGLAKV-GPSGDKTHVSTRVMG
AAKGLEYLHNEMAPPVIYRDLKCSNILLGEGYHPKLSDFGLAKV-GPSGDHTHVSTRVMG
AAKGLEYLHDKTMPPVIYRDLKCSNILLGDDYFPKLSDFGLAKL-GPVGDKSHVSTRVMG
AARGLEYLHEVANPPVVYRDLKASNILLDGNFSAKLADFGLAKL-GPVGDKTHVTTRVMG
AAKGLAFLHEEAKRPVIYRDFKTSNTLLDAEYNAKLSDFGLAKD-GPEGDKTHISTRVMG
AARGLHYLHTS---AVTHRDVKSTNILLDENFVAKITDFGISKK-GTELDQTHVSTDVKG
AARGLYYLHTR---AVIHRDVKSINILLDENFVPKITDFGISKK-GTELDQTHLSTVVQG
AARGLHYLHTN---GVMHRDVKSSNILLDENFVPKITDFGLSKT-RPQLYQTHVSTDVKG
AARGLHYLHTS---AVIHRDVKSINILLDDNFVPKITDFGLSKT-GTELDQTHVSTAVKG
AARGLHYLHTS---AVIHRDVKSINILLDENFVAKITDFGISKK-GTELDQTHLSTLVQG
AARGLHYLHTS---AVIHRDVKSINILLDENFVAKITDFGISKK-GTELDQTHLSTLVQG
AARGLHYLHTS---AVIHRDVKSINMLLDENFVAKITDFGLSKK-GTELDQTHLSTLVQG
AARGLYYLHKN---AVIHRDVKSANILLDENFVAKTTDFGVSKT-RTELDQTHVSTVVKG
IGRGLQYLHEESNLRIVHRDIKASNILLDDKFQPKISDFGLAR--FFPEDQTYLSTAFAG
aaxGLxyLHxxxxxxxihRDxKssNxllxxxxvxKixDFxlsxx-xxxxxxxxxsTxvxG
TFGYHAPEYAMTGQLSSKSDVYSFGVVLLELLTGRKPVDHTLPRGQQSLVTWATPRLSED
TFGYHAPEYAMTGQLSSKSDVYSFGVVLLELLTGRKPVDHTLPRGQQSLVTWATPXLSED
TFGYHAPEYAMTGQLSSKSDVYSFGVVLLELLTGRKPVDHTLPRGQQSLVTWATPRLSED
TFGYHAPEYAMTGQLSSKSDVYSFGVVLLELLTGRKPVDHTLPRGQQSLVTWATPRLSED
TFGYHAPEYAMTGQLSSKSDVYSFGVVLLELLTGRKPVDHTLPRGQQSLVTWATPRLSED
TFGYHAPEYAMTGQLSSKSDVYSFGVVLLELLTGRKPVDHTLPRGQQSLVTWATPRLCED
TFGYHAPEYAMTGQLSSKSDVYSFGVVLLELLTGRKPVDHTLPRGQQSLVTWATPRLCED
TFGYHAPEYAMTGQLSSKSDVYSFGVVLLELLTGRKPVDHTLPRGQQSLVTWATPRLSED
TFGYHAPEYAMTGQLNAKSDVYSFGVVLLELLTGRKPVDHRLPRGQQSLVTWATPKLSED
TFGYHAPEYAMTGQLSSKSDVYSFGVVLLELLTGRKPVDHTLPRGQQSLVTWATPRLSED
TFGYHAPEYAMTGQLSSKSDVYSFGVVLLELLTGRKPVDHTLPRGNR-VCYLGNARLSED
TFGYHAPEYAMTGQLSTKSDVYSFGVVLLELLTGRKPVDHTLPRGQQSLVTWATPRLSED
TYGYCAPDYAMTGQLTFKSDIYSFGVVLLELITGRKAIDQRKERGEQNLVAWARPMFKDR
TYGYCAPDYAMTGQLTFKSDVYSFGVVLLELITGRKAIDQTKERSEQNLVAWARPMFKDR
TYGYCAPEYAMTGQLTLKSDVYSFGVVLLEIITGRKAIDNSRCTGEQNLVAWARPLFKDR
TYGYCAPEYAMSGKLTKMSDTYCFGVVLLELITGRRAIDTTKPTREQILVHWAAPLFKDK
TYGYAAPEYVMTGHLSSKSDVYSFGVVLLEMLTGRRSMDKKRPNGEHNLVEWARPHLGER
TFGYLDPEYFIKGRLTEKSDVYSFGVVLFEVLCARSAIVQSLPREMVNLAEWAVESHNNG
TLGYLDPEYFIKGRLTEKSDVYSFGVVLFEVLCARSAIVQSLPREMVNLAEWAVESHNNG
TFGYIDPEYFIKGRLTEKSDVYSFGVVLFEVLCARSAIVQSLPSEMVNLAEWAVESHNNG
TVGYLDPEYFIRGQLTEKSDVYSFGVVLFEVLCARPAIAHSHSREMISLAEWAVESHNNG
TIGYLDPEYFIRGQLTEKSDVYSFGVVLFEVLCARPAIVQSLPREMVNLAEWAVDSHNKG
TIGYLDPEYFLRGQLTEKSDVYSFGVVLFEVLFARPAIVQSLPREMVSLAEWAVDSHNKG
TIGYLDPEYFIRGQLTEKSDVYSFGVVLFEVLCARPAIVQSLPREMVNLAEWAVDSHNKG
TLGYLDPEYVIRGKLTEKSDVYSFGVVLFKVLCARSAIVHYISKGLVTLAAWAMDSHKKG
TLGYTAPEYAIRGELTVKADTYSFGVLVLEIISSRKNTDLNLPNEMQYLPEHAWRLYEQS
TxGYxxPeYxxxGqLxxksDvYsFGVvlxexlxxRxxxxxxlprxxxxlxxwaxxxxxxx
K-VRQCVDSRLGGD--YPPKAVAKFAAVAALCVQYEADFRPNMSIVVKALQPLLNAHAR-
K-VRQCVDSRLGGD--YPPKAVAKFAAVAALCVQYEADFRPNMSIVVKALQPLLNAACAG
K-VRQCVDSRLGGD--YPPKAVAKFAAVAALCVQYEADFRPNMSIVVKALQPLLNAHAR-
K-VRQCVDSRLGGD--YPPKAVAKFAAVAALCVQYEADFRPNMSIVVKALQPLLNAHARA
K-VRQCVDSRLGGD--YPPKAVAKFAAVAALCVQYEADFRPNMSIVVKALQPLLNARATN
K-VRQCVDSRLGVE--YPPKSVAKFAAVAALCVQYEADFRPNMSIVVKALQPLLNARASN
K-VRQCVDSRLGVE--YPPKSVAKFAAVAALCVQYEADFRPNMSIVVKALQPLLNARASN
K-VRQCVDSRLGGD--YPPKAVAKFAAVAALCVQYEADFRPNMSIVVKALQPLLNARAAH
K-VKQCVDARLGGD--YPPKAVAKLAAVAALCVQYEADFRPNMSIVVKALQPLLNARAVA
K-VKQCVDARLNTD--YPPKAIAKMAAVAALCVQYEADFRPNMSIVVKALQPLLPRPVPS
K-VKQCVDARLNTD--YPPKAIAKMAAVAALCVQYEADFRPNMSIVVKLFSLCCLDLYQV
K-VKQCVDPRLEGD--YPPKAVAKMAAVAALCVQYEADFRPNMSIVVKALNPLLNSRPNN
RNFSCMVDPLLQGQ--YPIRGLYQALAIAAMCVQEQPNMRPAVSDLVMALNYLASHKYDP
RNFSGMVDPFLQGQ--YPIKGLYQALAIAAMCVQEQPNMRPAVSDLVMALNYLASHKYDP
RKFSQMADPMIQGQ--YPPRGLYQALAVAAMCVQEQPNLRPVIADVVTALTYLASQRFDP
KKFTKMADPLLDSK--YPLKGLYQALAISSMCLQEEAISRPLISDVVTALTFLADPNYDP
RRFYRLIDPRLEGH--FSIKGAQKAAQLASRCLSRDPKARPLMSEVVDCLKPLPALKDMA
Q-LEQIVDPNLADK--IRPESLRKFGDTAVKCLALSSEDRPSMGDVLWKLEYALRLQESV
Q-LEQIIDPNLADK--ITPESLRKFGETAVKCLALSSEDRPSMGDVLWKLEYALRLQESV
Q-LEQIIDPNLAAK--IRPESLRKFGETAVKCLALSSEDRPSMGDVLWKLEYALRLQESV
Q-LEQIIAPNIAAK--IRPESLKKFGETVVKCLALSSEDRPSMGDVLWKLEYALRLQESV
H-LEQIIDPDLAAK--IRPESLRKFGETAVKCLALSSEDRPSMGDVL-------------
Q-LEQIVDPDLAAK--IRPESLRKFGETAVKCLALSSEDRPSMGDVL-------------
Q-LEQIIDLNLAAK--IRPESLRKFGETAVKCLALSSGDRPSMGDVL-------------
Q-LEQIVDPNLASK--TRPKYLNKFGETAVKCLADSGVDRPSVGDVL-------------
K-ILELVDGRVQGGEGFEEKEVMLVCQIALLCVQPYPNSRPAMSEVVRMLTMKTDQSIPA
x-xxqxxdxxlxxx--xxpxxxxkxxxxaxxCxxxxxxxRPxmxxvxxxlxxxxxxxxxx
ATNPGEHAGS----------------------------------------------------
RPNPGEHAGS----------------------------------------------------
ATNPGEHAGS----------------------------------------------------
TNP-----------------------------------------------------------
PGENAGS-------------------------------------------------------
NPG-----------------------------------------------------------
NPG-----------------------------------------------------------
PGAEHAGR------------------------------------------------------
PGEGVH--------------------------------------------------------
--------------------------------------------------------------
RHQACEFSPYPCLYVMK---------------------------------------------
RPASFTDAGERSGL------------------------------------------------
---QVHSVQDSRRSPSRPGLDKDRGQ------------------------------------
---QIHPFKDPRRRPSHPGLDKDNGRT-----------------------------------
---MSQPVQGSLFGPGTPPRSKRVV-------------------------------------
---PDDIEPLPISVPNYDKGISLREAEISLSGFEEKQVEDS---------------------
GPSYYLQTVQPERAGSSPDPNRTRVGSFSRNGSQHPRTLSIPNASPRHNQFLQDSPNPNGKQ
I-------------------------------------------------------------
I-------------------------------------------------------------
I-------------------------------------------------------------
I-------------------------------------------------------------
--------------------------------------------------------------
--------------------------------------------------------------
--------------------------------------------------------------
--------------------------------------------------------------
PAKPAFLDRKNLNGDRDAASSDTATMEMMRSPAGYWMMTPSPMLEVDRPYDMSFGK------
xxxxxxxxxxxxxx------------------------------------------------

### Example 4

### Corn Transformation Construct

[0130] GATEWAY™ destination vectors (available from Invitrogen Life Technologies, Carlsbad, Calif.) were constructed for insertion of trait-improving DNA for corn transformation. The elements of each destination vector are summarized in Table 16 below and include a selectable marker transcription region and a DNA insertion transcription region. The selectable marker transcription region comprises a Cauliflower Mosaic Virus 35S promoter operably linked to a gene encoding neomycin phosphotransferase II (nptII) followed by both the 3′ region of the Agrobacterium tumefaciense nopaline synthase gene (nos) and the 3′ region of the potato proteinase inhibitor II (pinII) gene. The DNA insertion transcription region comprises a rice actin 1 promoter, a rice actin 1 exon 1 intron1 enhancer, an att-flanked insertion site and the 3′ region of the potato pinII gene. Following standard procedures provided by Invitrogen the att-flanked insertion region is replaced by recombination with trait-improving DNA, in a sense orientation for expression of a trait-improving protein and in a gene suppression orientation (i.e., either anti-sense orientation or in a sense- and anti-sense orientation) for a trait-improving suppression of a protein. Although the vector with trait-improving DNA inserted at the att-flanked insertion region is useful for plant transformation by direct DNA delivery, such as microprojectile bombardment, it is preferable to bombard target plant tissue with tandem transcription units that have been cut from the vector. For Agrobacterium-mediated transformation of plants the vector also comprises T-DNA borders from Agrobacterium flanking the transcription units. Vectors for Agrobacterium-mediated transformation are prepared with each of the trait-improving genes having a sequence of SEQ ID NO: 1 through SEQ ID NO: 151 and SEQ ID NO: 153 through SEQ ID NO: 239 with the DNA solely in sense orientation for expression of the cognate trait-improving protein and in a gene suppression orientation for suppression of the cognate protein. Each vector is transformed into corn callus which is propagated into a plant that is grown to produce transgenic seed. Progeny plants are self-pollinated to produce seed which is selected for homozygous seed. Homozygous seed is used for producing inbred plants, for introgressing the trait into elite lines, and for crossing to make hybrid seed. The progeny transgenic plants comprising the trait-improving DNA with a sequence of SEQ ID NO: 1 through SEQ ID NO: 151 and SEQ ID NO: 153 through SEQ ID NO: 239 have one or more improved traits including, but not limited to increased yield and those disclosed in Table 3. Transgenic corn including inbred and hybrids are also produced with DNA from each of the identified homologs and provide seeds for plants with the improved trait of the cognate DNA of SEQ ID NO: 1 through SEQ ID NO: 151 and SEQ ID NO: 153 through SEQ ID NO: 239. Transgenic corn plants are also produced where the trait-improving DNA is transcribed by each of the promoters from the group selected from, a maize globulin 1 promoter, a maize oleosin promoter, a glutelin 1 promoter, an aldolase promoter, a zein Z27 promoter, a pyruvate orthophosphate dikinase (PPDK) promoter, a soybean 7S alpha promoter, a peroxiredoxin antioxidant (Per1) promoter and a CaMV 35S promoter.

[0131] Seed produced by the plants is provided to growers to enable production of corn crops with improved traits associated with the trait-improving DNA.

TABLE 16
Elements of an exemplary corn transformation vector

| FUNCTION | ELEMENT | REFERENCE |
|---|---|---|
| DNA insertion | Rice actin 1 promoter | U.S. Pat. No. 5,641,876 |
| transcription region | Rice actin 1 exon 1, | U.S. Pat. No. 5,641,876 |
| | intron 1 enhancer | |
| DNA insertion | AttR1 | GATEWAY ™ Cloning |
| transcription region | | Technology Instruction |
| (att - flanked | | Manual |
| insertin region) | CmR gene | GATEWAY ™ Cloning |
| | | Technology Instruction |
| | | Manual |
| | ccdA, ccdB genes | GATEWAY ™ Cloning |
| | | Technology Instruction |
| | | Manual |
| | attR2 | GATEWAY ™ Cloning |
| | | Technology Instruction |
| | | Manual |
| DNA insertion | Potato pinII 3′ region | An et al., (1989) Plant |
| transcription region | | Cell 1: 115-122 |
| selectable marker | CaMV 35S promoter | U.S. Pat. No. 5,858,742 |
| transcription region | nptII selectable marker | U.S. Pat. No. 5,858,742 |
| | nos 3region | U.S. Pat. No. 5,858,742 |
| | PinII 3′ region | An et al., (1989) Plant |
| | | Cell 1: 115-122 |
| E. coli maintenance | ColE1 origin of | |
| region | replication | |
| | F1 origin of replication | |
| | Bla ampicillin resistance | |

### Example 5

### Soybean Transformation Construct

[0132] Constructs for use in transformation of soybean may be prepared by restriction enzyme based cloning into a common expression vector. Elements of an exemplary common expression vector are shown in Table 17 below and include a selectable marker expression cassette and a gene of interest expression cassette. The selectable marker expression cassette comprises Arabidopsis act 7 gene (AtAct7) promoter with intron and 5′UTR, the transit peptide of Arabidopsis EPSPS, the synthetic CP4 coding region with dicot preferred codon usage and a 3′ UTR of the nopaline synthase gene. The gene of interest expression cassette comprises a Cauliflower Mosaic Virus 35S promoter operably linked to a trait-improving gene in a sense orientation for expression of a trait-improving protein and in a gene suppression orientation (i.e., either anti-sense orientation or in a sense- and anti-sense orientation for a trait-improving suppression of a protein.

[0133] Vectors similar to that described above may be constructed for use in Agrobacterium mediated soybean transformation systems, with each of the trait-improving DNA having a sequence of SEQ ID NO: 1 though SEQ ID NO: 151 and SEQ ID NO: 153 through SEQ ID NO: 239 with the DNA solely in sense orientation for expression of the cognate protein and in a gene suppression orientation for suppression of the cognate protein. Transgenic soybean plants are produced comprising the trait-improving DNA with a sequence of SEQ ID NO: 1 through SEQ ID NO: 151 and SEQ ID NO: 153 through SEQ ID NO: 239 have one or more improved traits including, but not limited to, those disclosed in Table 3 and increased yield. Transgenic soybean plants are also produced with DNA from each of the identified homologs and provide seeds for plants with improved trait of the cognate DNA of SEQ ID NO: 1 through SEQ ID NO: 151 and SEQ ID NO: 153 through SEQ ID NO: 239. Transgenic soybean plants are also produced where the trait-improving DNA is transcribed by a desirable promoter including, but not limited to, the enhanced 35S promoter, napin promoter and Arabidopsis SSU promoter.

[0134] Seed produced by the plants is provided to growers to enable production of soybean crops with improved traits associated with the trait-improving DNA.

TABLE 17
Elements of an exemplary soybean transformation construct

| Function | Element | Reference |
|---|---|---|
| Agro transformation | B-ARGtu.right border | Depicker, A. et al.,, (1982) Mol |
| | | Appl Genet 1: 561-573 |
| Antibiotic resistance | CR-Ec.aadA-SPC/STR | |
| Repressor of primers | CR-Ec.rop | |
| from the ColE1 plasmid | | |
| Origin of replication | OR-Ec.oriV-RK2 | |
| Agro transformation | B-ARGtu.left border | Barker, R.F. et at.,, (1983) |
| | | Plant Mol Biol 2: 335-350 |
| Plant selectable marker | Arabidopsis act 7 gene | McDowell et al., (1996) Plant |
| expression cassette | (AtAct7) promoter with | Physiol. 111: 699-711. |
| | intron and 5′UTR | |
| | 5′ UTR of Arabidopsis act 7 gene | |
| | Intron in 5′UTR of AtAct7 | |
| | Transit peptide region of | Klee, H. J. et al.,, (1987) MGG |
| | Arabidopsis EPSPS | 210: 437-442 |
| | Synthetic CP4 coding region with | |
| | dicot preferred codon usage | |
| | A 3′ UTR of the nopaline synthase | U.S. Pat. No. 5,858,742 |
| | gene of Agrobacterium | |
| | tumefaciens Ti plasmid | |
| Plant gene of interest | Promoter for 35S RNA from | U.S. Pat. No. 5,322,938 |
| expression cassette | CaMV containing a duplication of | |
| | the −90 to −350 region | |
| | Gene of interest insertion site | |
| | Cotton E6 3′ end | GenBank accession U30508 |

[0135] Appendix

TABLE 3

| SEQ ID NO: | SEQ ID NOs of homologs | | | | | | | | | | | |
|---|---|---|---|---|---|---|---|---|---|---|---|---|
| 240: | 7319 | 7772 | 4165 | 7279 | 8472 | 1915 | | | | | | |
| 241: | 872 | 9283 | 6127 | 9719 | 4864 | 6242 | 8526 | 6419 | 7759 | 9073 | 2613 | 2268 |
| | 4632 | 9988 | 706 | 4211 | 5868 | 5162 | 6778 | 2818 | 4446 | 8022 | 5640 | 2336 |
| | 937 | 9010 | 7423 | 10353 | 8552 | 4128 | 4105 | 7686 | 12195 | 10669 | 12342 | 8692 |
| | 5537 | 11579 | 2835 | 8650 | 5475 | 11890 | 7460 | 9427 | 2284 | 3244 | 11978 | 9829 |
| | 4748 | 8553 | 1446 | 2403 | 7293 | 3548 | 12319 | 6834 | 10066 | 6183 | 4312 | 7543 |
| | 5134 | 8322 | 2800 | 11545 | 6091 | 11097 | 3540 | 3961 | 7214 | 10438 | 1640 | 9780 |
| | 4934 | 7927 | 2400 | 7549 | 12416 | 10157 | 1349 | 6290 | 7629 | 4403 | 10890 | 6442 |
| | 2515 | 5801 | 12216 | 8987 | 5141 | 9726 | 6551 | 10160 | 5289 | 1354 | 4654 | 7838 |
| | 11102 | 3968 | 2890 | 6186 | 628 | 8703 | 9371 | 3860 | 10153 | 8874 | 1345 | 7931 |
| | 11204 | 11770 | 3018 | 3441 | 10577 | 10610 | 10499 | 8307 | 12271 | 1848 | 4425 | 1204 |
| | 1537 | 11923 | 3133 | 4808 | 9940 | 6766 | 3234 | 12003 | 8649 | 7112 | 12207 | 10622 |
| | 5119 | 3464 | 9955 | 6521 | 4120 | 9924 | 5693 | 8842 | 7406 | 4197 | 4325 | 11073 |
| | 9174 | 6893 | 10059 | 1792 | 9442 | 8812 | 5665 | 9783 | 1361 | 6628 | 8108 | 6348 |
| | 10795 | 6924 | 1868 | 12137 | 4042 | 2276 | 3365 | 6619 | 12076 | 2084 | 4511 | 3278 |
| | 10300 | 4514 | 7688 | 1267 | 870 | 4951 | 2767 | 8580 | 11788 | 10100 | 7117 | 5046 |
| | 6531 | 5445 | 9848 | 2178 | 713 | 10999 | 6411 | 646 | 5189 | 7310 | 10504 | 11929 |
| | 1690 | 5343 | 6267 | 1010 | 5444 | 10776 | 7548 | 3144 | 4347 | 6416 | 9264 | 9668 |
| | 1540 | 7457 | 1122 | 10665 | 8509 | 11546 | 9473 | 4244 | 3142 | 6550 | 4093 | 2863 |
| | 10916 | 9567 | 862 | 7304 | 1912 | 11709 | 884 | 11773 | 4089 | 11785 | 2325 | 5602 |
| | 8736 | 11430 | 3004 | 5891 | 11938 | 8737 | 6309 | 4091 | 10924 | 5306 | 970 | 8723 |
| | 3683 | 9687 | 7150 | 3905 | 10712 | 8324 | 8543 | 6285 | 2682 | 5065 | 2993 | 8344 |
| | 1928 | 12197 | 6661 | 3414 | 3878 | 8576 | 774 | 10904 | 8487 | 5985 | 7098 | 9655 |
| | 5534 | 7770 | 12211 | 7227 | 6188 | 11837 | 8030 | 8147 | 9951 | 9758 | 683 | 5810 |
| | 9658 | 7427 | 854 | 9096 | 9694 | 10883 | 8039 | 9649 | 1316 | 2610 | 8172 | 9902 |
| | 11673 | 9763 | 499 | 2532 | 2273 | 1867 | 10674 | 11658 | 10467 | 11143 | 1561 | 1227 |
| | 9980 | 2746 | 6047 | 9225 | 2913 | 6734 | 10827 | 3272 | 6723 | 9908 | 7466 | 1095 |
| | 3459 | 6609 | 11165 | 9800 | 10526 | 4253 | 9446 | 9328 | 5243 | 6005 | 1744 | 3090 |
| | 12421 | 3920 | 9832 | 3711 | 9011 | 8423 | 4461 | 6692 | 6831 | 8360 | 1571 | 3181 |
| | 10685 | 9072 | 11904 | 1514 | 2794 | 8680 | 1183 | 2396 | 9496 | 723 | 3283 | 5147 |
| | 998 | 10149 | 12448 | 9404 | 2278 | 9070 | 5576 | 1261 | 5939 | 3430 | 2638 | 11889 |
| | 9203 | 5258 | 12274 | 5799 | 9522 | 2209 | 11401 | 4316 | 10154 | 7581 | 4238 | 1104 |
| | 2565 | 2848 | 3349 | 4385 | 7993 | 4012 | 10842 | 544 | 2395 | 6432 | 11530 | 3630 |
| | 6887 | 1938 | 8532 | 4631 | 7779 | 9935 | 6726 | 5294 | 3500 | 2088 | 5588 | 8751 |
| | 10934 | 9077 | 12313 | 8073 | 6328 | 3806 | 12016 | 9891 | 2751 | 5347 | 3832 | 10482 |
| | 524 | 4855 | 1451 | 4889 | 9957 | 9833 | 3328 | 3098 | 11887 | 579 | 2376 | 3260 |
| | 1257 | 10421 | 5585 | 7953 | 6402 | 1187 | 8710 | 933 | 10081 | 11571 | 10018 | 11279 |
| | 929 | 11738 | 10702 | 8395 | 1157 | 3651 | 6278 | 10269 | 5139 | 1814 | 9838 | 12108 |
| | 7445 | 2303 | 9917 | 11909 | 2568 | 7488 | 10105 | 12154 | 11220 | 2690 | 3294 | 8852 |
| | 2106 | 8583 | 3726 | 9139 | 4395 | 7992 | 7908 | 9159 | 5429 | 8677 | 5538 | 1997 |
| | 10866 | 5592 | 7970 | 3940 | 8551 | 6443 | 4844 | 10921 | 7499 | 3865 | 12214 | 9624 |
| | 9142 | 10614 | 3371 | 11020 | 5516 | 3879 | 2073 | 1240 | 10773 | 867 | 6888 | 483 |
| | 7134 | 7633 | 4447 | 3518 | 9610 | 10005 | 4180 | 2410 | 2959 | 6221 | 10371 | 4837 |
| | 6806 | 10032 | 9340 | 610 | 6464 | 3840 | 6788 | 8340 | 5255 | 11301 | 3620 | 11459 |
| | 1054 | 9431 | 3644 | 6930 | 815 | 12034 | 4401 | 1154 | 10315 | 3519 | 4509 | 7105 |
| | 5666 | 8850 | 3340 | 2021 | 10868 | 3167 | 2533 | 4785 | 3507 | 1879 | 1719 | 7972 |
| | 9585 | 784 | 11284 | 10399 | | | | | | | | |
| 242: | 6383 | 3426 | 9749 | 9579 | 6504 | 8571 | 11363 | 9729 | 2774 | 2824 | 6800 | 11836 |
| | 10978 | 7535 | | | | | | | | | | |
| 243: | 5229 | 2681 | 3233 | 1102 | 12450 | 7058 | 6882 | 3684 | 4692 | 2430 | 6687 | 2702 |
| | 11159 | 493 | 3493 | 6575 | 9272 | 8970 | 4693 | 4714 | 7364 | 4741 | 11303 | 7436 |
| | 6620 | 9708 | 652 | 2422 | 6738 | 8982 | 8262 | 3429 | 5618 | 10576 | 9432 | 10821 |
| | 546 | 12282 | 7540 | 3060 | 4399 | 5507 | 4375 | 597 | 4290 | 6727 | 1992 | 2652 |
| | 10629 | 2001 | 4620 | 7522 | 3946 | 5212 | 8061 | 3108 | 11936 | 9667 | 9717 | |
| 244: | 11270 | 10304 | 1123 | 8010 | 8141 | 2919 | 10052 | 3566 | 6143 | | | |
| 245: | 9076 | 1014 | 3740 | 10454 | 2125 | 974 | 3282 | 11533 | 12119 | 7082 | 8997 | 10377 |
| 246: | 7026 | 4240 | 12380 | | | | | | | | | |
| 247: | 9507 | 5676 | 8328 | 9317 | 3732 | 4437 | 1163 | 9237 | 8320 | 2838 | 8151 | 1714 |
| | 11146 | 6077 | 9057 | 11217 | 2449 | 10690 | 9448 | 10293 | 5728 | 5782 | 2401 | 4138 |
| | 7730 | 4667 | 11152 | 2750 | 5910 | 1459 | 8501 | 967 | 3942 | | | |
| 249: | 5305 | 5158 | 1726 | 8705 | 7617 | 4366 | 12092 | 7504 | 11434 | 7904 | | |
| 250: | 909 | 10291 | 9115 | 8458 | 1394 | 8188 | 6229 | 2718 | 3041 | 1813 | 8123 | 2293 |
| | 4615 | 5989 | | | | | | | | | | |
| 251: | 5788 | 3707 | 4166 | 1309 | 11626 | 1215 | 9592 | 10564 | 11762 | 2922 | 1120 | 12246 |
| | 10130 | 6124 | 7520 | 7244 | 10681 | 11835 | 10359 | 11822 | 1766 | 2023 | 3987 | 4219 |
| | 4929 | 3514 | 7009 | 6835 | 10366 | | | | | | | |
| 252: | 2506 | 10724 | 1168 | 12248 | 3861 | 6955 | 5455 | 8083 | 2472 | 2882 | 11296 | 7518 |
| | 4531 | 2790 | 5220 | 4642 | 5764 | 10555 | 8516 | 7162 | 10500 | 9751 | 11410 | 3195 |
| | 949 | 2139 | 9846 | 4335 | 8027 | 1533 | 9734 | 7365 | 5135 | 8792 | 10929 | 10357 |
| | 8500 | 4674 | 5959 | 6248 | 9723 | 9847 | 2620 | 3874 | 6654 | 2979 | 2131 | 8267 |
| | 8917 | 1975 | 1952 | 5318 | 5235 | 10456 | 6570 | 9295 | 5997 | 8133 | 9082 | 3101 |
| | 11307 | 5913 | 10426 | 10488 | 9032 | 1935 | 11387 | 5730 | 9598 | 886 | 9453 | 3484 |
| | 2108 | 9605 | | | | | | | | | | |
| 253: | 9563 | 6621 | 3102 | 7854 | 11948 | 9707 | 2789 | 1234 | 7544 | 3885 | 709 | 3508 |
| | 2080 | 8875 | 6633 | 5726 | 583 | 9480 | 6387 | | | | | |
| 254: | 2558 | 10259 | 7830 | 12190 | 11787 | 11233 | 11804 | 11932 | 5432 | 11382 | 10976 | 10354 |
| | 8558 | 8784 | 1077 | | | | | | | | | |
| 255: | 663 | | | | | | | | | | | |
| 256: | 3155 | 8327 | 12074 | 9950 | 11278 | 1918 | 6688 | 12219 | 11002 | 11810 | 8671 | 11340 |
| | 3023 | 2359 | 11271 | 7811 | 5557 | 10846 | 11839 | 5352 | 9877 | 1249 | | |
| 257: | 5521 | 2418 | 9398 | 6286 | 3794 | 2948 | 10602 | 1167 | 9572 | 8598 | 4842 | 10051 |
| | 8479 | 1101 | 2475 | 4960 | 4151 | 11114 | 7441 | 9907 | 5012 | 10145 | 5948 | 5536 |
| | 7793 | 2678 | 1630 | 5607 | 3893 | 11211 | 4471 | 2407 | 5192 | 10494 | 9235 | 5625 |
| | 2844 | 7863 | 1916 | 11840 | 9416 | 12031 | 7637 | 5138 | 1397 | 10345 | 11318 | 10309 |
| | 533 | 5104 | 9566 | | | | | | | | | |
| 258: | 10132 | 11629 | 1984 | | | | | | | | | |
| 259: | 2502 | 2744 | 1758 | 1245 | 7521 | 1770 | 3621 | 3677 | 7322 | 6549 | 3343 | 3277 |
| | 665 | 1392 | 5927 | 4207 | 3763 | 11133 | 10919 | 8597 | 7914 | 1260 | 825 | 4249 |
| | 7390 | 8418 | 9344 | 1332 | 11207 | 9792 | 10283 | 8237 | 9052 | 10573 | 4819 | 5161 |
| | 2192 | 9433 | 9103 | 11532 | 1235 | 9170 | 7685 | 12286 | 7576 | 504 | 9858 | 5613 |
| | 773 | 12105 | 6580 | 8482 | 882 | 7672 | 11475 | 4067 | | | | |
| 260: | 5500 | 10296 | 1405 | 4006 | 3542 | 3588 | 9697 | 3853 | 9860 | 4078 | 11994 | 5042 |
| | 8840 | 5076 | 11683 | 7326 | 10026 | 11098 | 7930 | 10838 | 7510 | 4570 | 2206 | 6315 |
| | 10542 | 6334 | 790 | 3761 | 8956 | 812 | 5842 | 7642 | 9437 | 1657 | 4261 | 10932 |
| | 6736 | 7695 | 1678 | 11518 | 4057 | 11273 | 6908 | 8749 | | | | |
| 261: | 7236 | 10747 | 6886 | 8505 | 4433 | 2828 | | | | | | |
| 262: | 5541 | 12099 | 1314 | 7357 | 4849 | 6797 | 10245 | 8407 | 7689 | 11614 | 11634 | 10992 |
| | 8211 | 9445 | 11122 | 3505 | 3148 | 7133 | 5137 | 5978 | 7204 | 6146 | 1059 | 3030 |
| | 11553 | 4770 | 4028 | 2756 | 3934 | 2656 | 9282 | 5506 | 5701 | 12125 | 7721 | 5870 |
| | 10689 | 11077 | 6742 | 9122 | 3045 | 11005 | 1242 | 4623 | 1135 | 12324 | 9419 | 4799 |
| | 3549 | 860 | 4326 | 6616 | 12346 | 4982 | 1794 | 5146 | 4991 | 1988 | 4589 | 5126 |
| | 3279 | 9035 | 12249 | 8864 | 1774 | 10361 | 7949 | 3640 | 1388 | 9286 | 11235 | 1803 |
| | 6587 | 9401 | 2722 | 10861 | 1954 | 6421 | 4603 | 3258 | 6379 | 3220 | 2945 | 10757 |
| | 6351 | 7391 | 12326 | 8560 | 1725 | 11541 | 7338 | 11740 | 2415 | 5573 | 2977 | 4393 |
| | 1588 | 5712 | 6159 | 10673 | 7398 | 1137 | 10128 | | | | | |
| 263: | 5581 | 3054 | 4968 | 11826 | 7738 | 7209 | 11043 | 9303 | 8847 | 11344 | 4650 | 8603 |
| | 6538 | 7278 | 11262 | 9330 | 1403 | 3746 | 1381 | 7631 | 8428 | 2483 | 4715 | 11572 |
| | 10166 | 7872 | 4218 | 1555 | 9388 | 4651 | 5293 | 11379 | 7883 | 5692 | 6376 | 9091 |
| | 11863 | 5991 | 7677 | 3240 | 9457 | 2300 | 10016 | 6676 | 7461 | 7839 | 866 | 4971 |
| | 11657 | 5928 | 7762 | 6798 | 3314 | 7619 | 5988 | 2960 | 8922 | 1702 | 6642 | 2170 |
| 264: | 6344 | 6298 | 1512 | 7511 | 5719 | 2491 | 5202 | 10321 | 3352 | 10631 | 5917 | 6083 |
| | 9894 | 5968 | 3590 | 12458 | 7922 | 8486 | | | | | | |
| 265: | 5263 | 2200 | 8210 | 4468 | 4206 | 4894 | 5244 | 2592 | 10185 | 5266 | 7690 | 5903 |
| | 9738 | 7426 | 5696 | 649 | 2130 | 9378 | 2976 | 8828 | 5950 | 11690 | 877 | 9138 |
| | 4017 | 6360 | 1056 | 10568 | 824 | 1530 | 9517 | 8233 | 3151 | 753 | 7163 | 5754 |
| | 2049 | 530 | 8273 | 7202 | 11941 | 5905 | 6366 | 6487 | 2697 | 7635 | 6279 | 12035 |
| | 10146 | 6342 | 752 | 8246 | 9931 | 692 | 10126 | 8766 | 5561 | 11222 | 3361 | 10946 |
| | 5242 | 8076 | 2405 | 2617 | 1865 | 2657 | 8607 | 5921 | 6471 | 5322 | 5204 | 8380 |
| | 9132 | 7500 | 10092 | 3267 | 8286 | 9969 | 6973 | 11893 | 12262 | 10563 | 3738 | 822 |
| | 6392 | 622 | 10857 | 9505 | 11086 | 10533 | 2312 | 3827 | 8685 | 2271 | 6241 | 5008 |
| | 3275 | 11760 | 7717 | 8735 | 5121 | 4477 | 10541 | 2457 | 12093 | 672 | 10642 | 3263 |
| | 4132 | 3908 | 2158 | 1110 | 9674 | 4706 | 5371 | 4655 | 1385 | 7054 | 10162 | 4026 |
| | 9426 | 798 | 8527 | 7663 | 9407 | 1548 | 12317 | 1065 | 6247 | 3991 | 6995 | 10511 |
| | 3310 | 7942 | 7749 | 971 | 8054 | 3702 | 7725 | 4149 | 1430 | 4869 | 8240 | 863 |
| | 5849 | 2614 | 676 | 6373 | 9434 | 6569 | 8422 | 7905 | 2065 | 8226 | 1508 | 9293 |
| | 10963 | 7217 | 1061 | 11930 | 5694 | 4859 | 2066 | 4479 | 3376 | 3741 | 8660 | 4973 |
| | 5325 | 12445 | 7501 | 11478 | 9009 | | | | | | | |
| 266: | 5282 | 9034 | 7946 | 3565 | 11010 | 7556 | 8542 | 2900 | 11813 | 2791 | 11619 | 8609 |
| | 8565 | 3327 | 12063 | 10274 | 10374 | 900 | 7557 | | | | | |
| 267: | 11439 | 1214 | 4657 | 9436 | 2384 | 9226 | 4077 | 682 | 8386 | 4448 | 11550 | 8196 |
| | 11891 | 5540 | 8891 | 2221 | 2140 | 6220 | 8049 | 9688 | 10817 | | | |
| 268: | 10697 | 8194 | 3123 | 9121 | 966 | 3221 | 3093 | | | | | |
| 269: | 10295 | 1410 | 8017 | 3948 | 5643 | 4846 | 6118 | 9778 | 6770 | 9890 | 12451 | 1151 |
| | 3574 | 4835 | | | | | | | | | | |
| 270: | 7653 | 9879 | 12273 | 7937 | 9112 | 4263 | 8319 | 5428 | 2874 | 11856 | 9069 | 3095 |
| | 8815 | 2046 | 641 | 8043 | 4590 | 11907 | 9367 | 1159 | 3424 | 9260 | 11646 | 11305 |
| | 11376 | 7165 | 4574 | 4181 | 2391 | 12397 | 5370 | 5450 | 8238 | 11297 | | |
| 271: | 9887 | 1594 | 4561 | 739 | 2428 | 7289 | 3300 | 8694 | 1074 | 4512 | 12138 | 1956 |
| | 10699 | 1707 | 7373 | 11092 | 8691 | 1166 | 9373 | 700 | 1732 | 4645 | 10654 | 1460 |
| | 1285 | 1281 | 8288 | 11083 | 1510 | 2274 | 11977 | 10396 | 750 | 9084 | 10927 | 9906 |
| | 5155 | 1382 | 8164 | 2022 | 3091 | 2406 | 5839 | 11635 | 5635 | 7282 | 5281 | 6545 |
| | 9626 | 11931 | 2083 | 7990 | 5071 | 3039 | 9941 | 2486 | 6359 | 11986 | 8040 | 5737 |
| | 7068 | 2386 | 969 | 8753 | 10709 | 1706 | 3782 | 5246 | 2968 | 11013 | 11425 | 6000 |
| 272: | 12210 | 3011 | | | | | | | | | | |
| 273: | 4502 | 1337 | 6810 | 4527 | 5021 | 4545 | 10234 | 4774 | 8930 | 11081 | 12176 | 4641 |
| | 4805 | 10993 | 5304 | 3150 | 4398 | 2850 | 11682 | 10640 | 7643 | 2956 | 7696 | 10206 |
| | 2017 | 10653 | 12339 | 11567 | 9175 | 5639 | 9149 | 4145 | 10829 | 7654 | 7745 | 6090 |
| | 4474 | 12310 | 11298 | 4324 | 7989 | | | | | | | |
| 274: | 10151 | 1343 | 9690 | 5795 | 915 | 6283 | 12244 | 6167 | 12415 | 11244 | 7538 | 669 |
| | 10236 | 7748 | 5338 | 8272 | 3603 | 10715 | 8221 | 6126 | 8746 | 1147 | 3862 | 1386 |
| | 4626 | 9462 | 3382 | 11669 | 9745 | 1953 | 5485 | 11800 | 12029 | 7011 | 4464 | 3433 |
| | 6878 | 916 | 10508 | 9362 | 6949 | 7323 | 9591 | 3126 | 4283 | 10994 | 4969 | 5567 |
| | 2076 | 829 | 11238 | 1408 | 1733 | 8827 | 7859 | 8376 | 2390 | 6010 | 9864 | 10550 |
| | 11449 | 4453 | 11559 | 574 | 12253 | 12301 | 2742 | 3302 | 7911 | 10899 | 1584 | 10625 |
| | 907 | 6246 | 11192 | 840 | 11341 | 609 | 3764 | 10344 | 11888 | 4851 | 2989 | 7281 |
| | 5505 | 764 | 10714 | 10412 | 3223 | 2713 | 1255 | 11776 | 10389 | 3325 | 10604 | 4254 |
| | 6746 | 5745 | 2438 | 4102 | 3660 | 11358 | 6251 | 10395 | 7396 | 7923 | 5336 | 4661 |
| | 5515 | 10273 | 11125 | 8513 | 6191 | 5873 | 5865 | 5467 | 3138 | 6058 | 9002 | 6100 |
| | 3066 | 7028 | 7343 | 7983 | 11854 | 8332 | 7665 | 6357 | 8659 | 3544 | 6694 | 10434 |
| | 1608 | 9976 | 6353 | 10465 | 5897 | 3342 | 12015 | 10483 | 2353 | 3379 | 8843 | 11336 |
| | 899 | 4186 | 2077 | 11282 | 2511 | 696 | 3951 | | | | | |
| 275: | 3988 | 802 | 11542 | 11369 | 9017 | 11035 | 9816 | 5563 | 4495 | 3642 | 6836 | 1845 |
| | 8908 | 5111 | 3844 | 9772 | 8011 | 11500 | 12331 | 3612 | 3997 | 1045 | 8865 | 7631 |
| | 11726 | 9696 | 6732 | 10000 | 4895 | 3344 | 697 | 6470 | 807 | 8854 | 9589 | 10566 |
| | 9152 | 8713 | 1944 | 7340 | 702 | 3836 | 8254 | 10886 | 564 | 1886 | 3831 | 6333 |
| | 6117 | 1496 | 11477 | 8135 | 1724 | 950 | 5818 | 10193 | 8811 | 8628 | 905 | 3898 |
| | 8299 | 8358 | 12402 | 4237 | 11838 | 6642 | 1355 | | | | | |
| 276: | 2169 | 11476 | 7821 | 9495 | 559 | 1266 | 9387 | 6032 | 9172 | 6564 | 5439 | 10117 |
| | 12044 | 3527 | 12088 | 1802 | 10038 | 6104 | 11857 | 1112 | 5026 | 1804 | 1488 | 4647 |
| | 5852 | 8919 | 3271 | 10791 | 1940 | 10169 | 5685 | 4328 | 8860 | | | |
| 278: | 4220 | 5703 | 10281 | 11415 | 5739 | 1519 | 633 | 8471 | 11602 | 3177 | 10311 | 3720 |
| | 6857 | 7703 | 4881 | 8725 | 4607 | 2350 | 7783 | 8244 | 9074 | 2110 | 8593 | 11793 |
| | 9543 | 3699 | 7208 | 9578 | 2215 | 5605 | 2949 | 10824 | 5027 | 5513 | 1127 | 2378 |
| | 6061 | 8900 | 5611 | 1681 | 500 | 8962 | 2636 | 9653 | 6323 | 8203 | | |
| 279: | 7977 | 4811 | 2446 | 5969 | 7781 | 11781 | 6820 | 3168 | 5194 | 2308 | 2692 | 7979 |
| | 3206 | 3191 | 10546 | 3728 | 7408 | 7127 | 10251 | 8926 | 2683 | 4190 | 11458 | 624 |
| | 2770 | 7857 | 12407 | 12231 | 4035 | 12461 | 9756 | 2575 | 8112 | 5600 | 5560 | 3284 |
| 280: | 2287 | 7413 | 3795 | 955 | 7407 | 6771 | 3577 | 6512 | 918 | 11231 | 2508 | 9630 |
| | 4279 | 11287 | 9474 | 7449 | 1585 | 11322 | | | | | | |
| 281: | 2028 | 1786 | 5526 | 6693 | 4360 | 11647 | 11029 | 7795 | 3076 | 6567 | 12424 | 5784 |
| | 8619 | 7640 | 719 | 10603 | 3255 | 4058 | 5009 | 9469 | 3104 | 3560 | 1991 | 4995 |
| | 7473 | 3131 | 3446 | 11778 | 2436 | 11154 | 1914 | 3301 | 3697 | 6627 | 2421 | 2985 |
| | 8765 | 11696 | 2067 | 2884 | 6975 | 808 | 4659 | 12259 | 6116 | 4053 | 3061 | 1241 |
| | 2503 | 9710 | 8539 | 11176 | 5157 | 12436 | 5596 | 1069 | 7135 | 2640 | 3543 | 9315 |
| | 7926 | 1963 | 11876 | 11825 | 1926 | 4235 | 2876 | 8700 | 1574 | 12368 | 12254 | 823 |
| | 4476 | 3534 | 6997 | 1948 | 9739 | 4457 | 7074 | 566 | 5110 | 3289 | 4223 | 1173 |
| | 11332 | 2668 | 9331 | 8372 | 3257 | 5631 | 1114 | 2596 | 9870 | 5609 | 11966 | 8627 |
| | 4572 | 11263 | 1106 | 2517 | | | | | | | | |
| 282: | 6885 | 12394 | 3460 | 5431 | 10471 | 1949 | 11830 | 8616 | 10537 | 8905 | 8718 | 7566 |
| | 11255 | 7655 | 4357 | 9718 | 8693 | 10578 | 5918 | 7620 | 3719 | 6735 | 8835 | 7577 |
| | 2545 | 10266 | 4353 | 2003 | 7606 | 10833 | 4397 | 5077 | 8739 | 8635 | 9581 | 9878 |
| | 6257 | 9391 | 10046 | 9449 | 8224 | 6202 | 3529 | 7739 | 3053 | 10569 | 6689 | 9494 |
| | 3892 | 9795 | 5280 | 4728 | 8773 | 5720 | 6472 | 6961 | 12395 | 1772 | 9164 | 9819 |
| | 9351 | 12175 | 4380 | 8389 | 8062 | 5525 | 4322 | 6666 | 602 | 9760 | 6826 | 9359 |
| | 6952 | 8535 | 1524 | 1587 | 8816 | 8477 | 6697 | 3154 | 12001 | 1083 | 3502 | 4513 |
| | 3252 | 9470 | 1909 | 8651 | 2347 | 7341 | 8427 | 7945 | 5368 | 8447 | 2143 | 1516 |
| | 9817 | 8044 | 7032 | 7719 | 735 | 4038 | 4756 | 4966 | 5522 | 6631 | 11853 | 4975 |
| | 7003 | 6724 | 9360 | 9209 | 1951 | 12228 | 1609 | 1421 | 7481 | 6644 | 8777 | 12140 |
| | 10687 | | | | | | | | | | | |
| 283: | 1264 | 11225 | 3729 | 5940 | 7731 | 12370 | 659 | 7066 | 9515 | 4931 | 2567 | 6128 |
| | 3931 | 2518 | 6686 | 705 | 5223 | 5813 | 2082 | 10751 | 3378 | 10518 | 8119 | 7714 |
| | 7598 | 8128 | 5904 | 8647 | 9354 | 8977 | 6953 | 12230 | 9075 | 10913 | 621 | 2918 |
| | 6596 | 6500 | 5250 | 5906 | 3182 | 10854 | 3105 | 11319 | 10872 | 7611 | 11668 | 645 |
| | 3083 | 7126 | 3944 | 10161 | 10805 | 5835 | 2014 | 5486 | 2092 | 8804 | 4986 | 1747 |
| | 8661 | 3669 | 11765 | 3911 | 5170 | 5131 | 11064 | 4830 | 3169 | 4771 | 8468 | 2199 |
| | 9730 | 12042 | 6401 | 3880 | 10156 | 4342 | 4126 | 12422 | 2433 | 2908 | 7692 | 4703 |
| | 3001 | 5603 | 8034 | 9394 | 7102 | 11362 | 2880 | 7164 | 3841 | 2730 | 2902 | 7741 |
| | 2688 | 9762 | 10756 | 1500 | 12018 | 7554 | 6614 | 4299 | 10031 | 7987 | 4336 | 3353 |
| | 1452 | 7666 | 3538 | 7184 | 1032 | 496 | 4521 | 6170 | 1031 | 12261 | 7659 | 3522 |
| | 3406 | 6207 | 3941 | 3107 | 6114 | 1364 | 7036 | 6553 | 5645 | 11299 | 1591 | 2260 |
| | 2527 | 7807 | 10915 | 11381 | 3339 | 4106 | 3403 | 3513 | | | | |
| 284: | 6275 | 8031 | 11396 | 11068 | 6144 | 6901 | 1677 | 9747 | 5479 | 10638 | 10458 | 12008 |
| | 7191 | 4441 | 10503 | 9320 | 5378 | 6741 | 8310 | 11937 | 5463 | 5820 | 6201 | 4251 |
| | 10652 | 5984 | 3650 | 4243 | 8318 | 2772 | 690 | 4162 | 2152 | 951 | 3034 | 11886 |
| | 4131 | 4517 | 4483 | 1053 | 4076 | 12352 | 2833 | 2445 | 10815 | 10247 | 9468 | 1097 |
| | 9265 | | | | | | | | | | | |
| 285: | 940 | 9000 | 9831 | 9731 | 7276 | 8668 | 6396 | 7301 | 2470 | 10278 | 2467 | 4421 |
| | 7774 | 3286 | 2063 | 1808 | 2189 | 7260 | 11548 | 8989 | 1250 | 5911 | 4075 | 5203 |
| | 2358 | 5558 | 5226 | 7431 | 1785 | 6448 | 3767 | | | | | |
| 286: | 2145 | 8599 | 10948 | 6225 | 11072 | 2197 | 2757 | 6638 | 5311 | 7645 | 1982 | 4821 |
| | 1376 | 2555 | 2747 | 10907 | 3161 | 4905 | 1891 | 7299 | 6938 | 8788 | 893 | 11843 |
| | 8470 | 11662 | 5421 | 2349 | 11864 | 7049 | 10028 | 1222 | 2608 | 12111 | 2214 | 1335 |
| | 10383 | 8738 | 1841 | 6534 | 1246 | 6377 | 2646 | 4358 | 5942 | 7951 | 8088 | 4662 |
| | 11432 | 6967 | 5837 | 3017 | 8907 | 9593 | 9659 | 482 | 3666 | 2501 | 3744 | 3064 |
| | 9837 | 10637 | 6827 | 1996 | 9849 | 1985 | 2873 | 1882 | 5028 | 9685 | 11008 | 8686 |
| | 6446 | 7029 | 7027 | 5458 | 7033 | 6213 | 6295 | 1076 | 12256 | 8859 | 12163 | 931 |
| | 4920 | 11878 | 3715 | 9643 | 7875 | 8225 | 12038 | 8403 | 11408 | 6962 | 8291 | 12013 |
| | 9666 | 7532 | 10425 | 3996 | 4964 | 10826 | 484 | 1417 | 6821 | 8311 | 10644 | 5302 |
| | 7711 | 1979 | 8295 | 3649 | 12328 | 4085 | 5838 | 1563 | 2427 | 1369 | 10062 | 2039 |
| | 3137 | 7986 | 6801 | 1872 | 9285 | 11018 | 1415 | 3585 | 6710 | 1520 | 7573 | 5535 |
| | 12389 | 11651 | 8631 | 11896 | 1279 | 4516 | 4043 | 10442 | 4972 | 3363 | 1219 | 8277 |
| | 6808 | 10460 | 10481 | 4724 | 4086 | 4843 | 8260 | 6972 | 8897 | 9573 | 6840 | 1319 |
| | 4866 | 6354 | 8954 | 4541 | 9078 | 2367 | 7262 | 8419 | 4023 | 5593 | 2103 | 5880 |
| | 9207 | 10480 | 4878 | 8507 | 4682 | 1189 | 7154 | 2118 | 3589 | 2629 | 11281 | 9269 |
| | 9208 | 1812 | 12377 | 2700 | 6802 | 5328 | 9597 | 4302 | 10352 | 11089 | 3569 | 9420 |
| | 11397 | 896 | 7628 | 6205 | 9287 | 11031 | 5218 | 11549 | 6524 | 10574 | 1881 | 5339 |
| | 5045 | 4071 | 10233 | 10909 | 12281 | 7025 | 7971 | 11737 | 11915 | 8033 | 9418 | 8461 |
| | 8346 | 3737 | 2205 | 2107 | 606 | 11914 | 3822 | 11576 | 7789 | 5578 | 5056 | 1764 |
| | 6011 | 8217 | 12298 | 10433 | 3351 | 8600 | 1967 | 9809 | 5511 | 4280 | 10360 | 2531 |
| | 1660 | 5200 | 1817 | 1484 | 7733 | 12423 | 10823 | 5112 | 1901 | 8200 | 8462 | 5319 |
| | 7648 | 4216 | 12052 | 6554 | 10867 | 5774 | 3524 | 10230 | 1877 | 9711 | 9335 | 6059 |
| | 11667 | 8707 | 11717 | 3197 | 7064 | 11940 | 10287 | 10939 | 1480 | 844 | 4796 | 2135 |
| | 749 | 7963 | 4915 | 1352 | 6211 | 5892 | 11275 | 3046 | 4718 | 9194 | 4402 | 7782 |
| | 6584 | 7550 | 7199 | 6271 | 10918 | 9995 | 4084 | 10596 | 8450 | 2859 | 6992 | 10175 |
| | 8530 | 10138 | 850 | 9383 | 5116 | 7826 | 4456 | 2062 | 5628 | 746 | 6980 | 3618 |
| | 9693 | 8455 | 4187 | 5821 | 8832 | 9025 | 9657 | 1017 | 11242 | 9336 | 9925 | 3739 |
| | 11971 | 5185 | | | | | | | | | | |
| 288: | 5348 | 6988 | 9850 | 7061 | 12393 | 5642 | 4272 | 7664 | 5768 | 2239 | 10722 | 11731 |
| | 6181 | 8354 | 8858 | 4580 | 2292 | 11675 | 11955 | 3003 | 2309 | 6978 | 7437 | 6963 |
| | 3348 | 1384 | 3367 | 4295 | 11024 | 6522 | 10818 | 2095 | 8059 | 5391 | 4575 | 2845 |
| | 751 | 5938 | 2005 | 7757 | 8416 | 1079 | 9930 | 6064 | 8019 | 7973 | 5001 | 8966 |
| | 8103 | 3696 | 8845 | 10877 | 11016 | 3966 | 11997 | 7483 | 4704 | 1755 | 5574 | 2153 |
| | 10075 | 4543 | 613 | 4822 | 4321 | 1170 | 7459 | 10843 | 7479 | 4345 | 1028 | 821 |
| | 7615 | 10064 | 4827 | 4045 | 9607 | 3901 | 9278 | 4885 | 8800 | 3708 | 12309 | 8573 |
| | 4029 | 8098 | 976 | 11913 | 9490 | 6374 | 9234 | 892 | 11638 | 11650 | 842 | 5597 |
| | 11803 | 9447 | 532 | 10820 | 6853 | 11295 | 10415 | 10973 | 6258 | 625 | 6489 | 4373 |
| | 8623 | 1861 | 11497 | 10774 | 1341 | 5241 | 7291 | 11074 | 9223 | 1636 | 10485 | 8099 |
| | 10704 | 1689 | 3110 | 1625 | 3479 | 2459 | 7846 | 4670 | 4908 | 11404 | 7790 | 11959 |
| | 2302 | 4099 | 7169 | 2704 | 3935 | 5659 | 11109 | 1971 | 4882 | 1420 | 2724 | 7516 |
| | 2619 | 11145 | 726 | 11950 | 10404 | 11066 | 8602 | 4952 | 4595 | 8430 | 7957 | 6667 |
| | 4098 | 5760 | 3721 | | | | | | | | | |
| 289: | 1683 | 12362 | 9113 | 4392 | 7600 | 2414 | 2717 | 7366 | 11744 | 2316 | 12432 | 10453 |
| | 11679 | 8722 | 6948 | 2664 | 778 | 5462 | 5825 | 6919 | 945 | 2473 | 6807 | 8373 |
| | 2166 | 1633 | 7234 | 7776 | 12372 | | | | | | | |
| 290: | 4700 | 7981 | 9048 | 2079 | 2356 | 10812 | 9843 | 3864 | 2142 | 9836 | 1057 | 3447 |
| | 1172 | 7866 | 7140 | 8426 | 5441 | 8679 | 8292 | 7107 | 1826 | 4121 | 10814 | 1141 |
| 291: | 7236 | 8505 | 4433 | | | | | | | | | |
| 293: | 6920 | 2766 | 12174 | 5078 | 10056 | 1978 | 3146 | 3915 | 7250 | 6194 | 7842 | 3385 |
| | 12026 | 10851 | 9549 | 5924 | 9689 | 7070 | 3010 | 1015 | 3080 | | | |
| 294: | 11118 | 1686 | 1569 | 7161 | 9314 | 6479 | 5327 | 8152 | 7604 | 2735 | 6160 | 11023 |
| | 6082 | 7438 | 11324 | 658 | 6632 | | | | | | | |
| 295: | 1797 | 12327 | 9056 | 1769 | 8521 | 6141 | 4451 | 10662 | 3121 | 6729 | 4002 | |
| 296: | 11665 | 4628 | 8100 | 11272 | 2962 | 6690 | 8757 | 3907 | 736 | 10968 | 8396 | 4139 |
| | 2701 | 2537 | 11009 | 3140 | 569 | 636 | 10430 | 11348 | 11239 | 4423 | 8170 | |
| 297: | 10040 | 6879 | 1716 | 4274 | 5840 | 11946 | 10045 | 1299 | 4204 | 6868 | 1203 | 1570 |
| | 12187 | 4055 | 11034 | 11867 | 10121 | 8764 | 9896 | 4383 | 10441 | 11603 | 5197 | 7751 |
| | 2307 | 4538 | 8156 | 9640 | 9117 | 9173 | 2889 | 2739 | 1302 | 11224 | 6739 | 12406 |
| | 5005 | 2175 | 11240 | 6051 | 8920 | 4088 | 2602 | 3670 | 4411 | 2277 | 8695 | 9684 |
| | 2157 | 9102 | 12411 | 667 | 11355 | 12131 | 3377 | 4744 | 1665 | 1819 | 9771 | 6610 |
| | 3356 | 8252 | 7484 | 12046 | 2109 | 6629 | 7975 | 3550 | 12082 | 11922 | 2488 | 7468 |
| | 6702 | 3819 | 12435 | 3037 | 7503 | 8208 | 2368 | 1656 | 10950 | 7799 | 3709 | 11821 |
| | 6754 | 9570 | 3461 | 2514 | 10798 | 6302 | 9565 | 12201 | 1206 | 7542 | 7345 | 9166 |
| | 1827 | | | | | | | | | | | |
| 298: | 8139 | 8641 | 6523 | 7360 | 10848 | 7080 | 11351 | 10710 | 6316 | 8361 | 9946 | 1907 |
| | 6719 | 10272 | 12085 | 7644 | 8212 | 1763 | | | | | | |
| 299: | 6133 | | | | | | | | | | | |
| 301: | 2843 | 8911 | 6094 | 12023 | 11991 | 12055 | 2010 | | | | | |
| 302: | 10750 | 3288 | 4820 | 10759 | 7232 | 1468 | 2951 | 4205 | 1048 | | | |
| 303: | 7006 | 9229 | 1705 | 10858 | 4364 | 880 | 1760 | 7465 | 4675 | 12426 | 5360 | 2156 |
| | 9318 | 8825 | 11203 | 6042 | 7668 | 11101 | 1703 | 6193 | 7506 | 6825 | 5555 | 4308 |
| 304: | 1683 | 4392 | 7600 | 2710 | 7988 | 10089 | 2414 | 2717 | 7366 | 2316 | 960 | 1455 |
| | 10749 | 9333 | 4153 | 10429 | 6807 | 8373 | | | | | | |
| 305: | 6095 | 6918 | 10432 | 6852 | 5239 | 3438 | 10943 | 9551 | 695 | 9080 | 5993 | |
| 306: | 4430 | 2094 | 4292 | 12439 | | | | | | | | |
| 307: | 1536 | 9023 | 11880 | 10936 | 7226 | 9524 | 9199 | 6926 | 6112 | 11618 | 7321 | 8750 |
| | 11623 | 4860 | 6588 | 5722 | 8796 | 4694 | 11392 | 7090 | 10582 | | | |
| 308: | 5238 | 3842 | 10493 | 3617 | 12025 | 10781 | 7017 | 10148 | 4213 | 1647 | 734 | 1922 |
| | 1286 | 6020 | 11398 | 4553 | 4130 | 1328 | 10923 | 2987 | 997 | 9857 | 1651 | 8745 |
| | 1276 | 11827 | 5769 | 11903 | 1711 | 10772 | 2601 | 8974 | 5893 | 9389 | 3765 | 6869 |
| | 1320 | 8841 | 560 | 4916 | 9060 | 7308 | 3672 | 10804 | 7998 | 5884 | 7476 | 6162 |
| 309: | 8801 | 3541 | 1041 | 6711 | 7964 | 681 | 876 | 1839 | 9861 | 3546 | 9830 | 9865 |
| | 1265 | 6813 | 11471 | 9210 | 1347 | 9892 | 9273 | 7114 | 12376 | 2419 | 3964 | |
| 310: | 4125 | 2643 | 777 | 875 | 8914 | 5741 | 7486 | 11181 | 7454 | 10520 | 1438 | 12303 |
| | 9051 | 5051 | 7954 | 6123 | 3280 | 1495 | 3158 | 3837 | 12409 | 4690 | 2998 | 8519 |
| | 7534 | 797 | 9155 | 2452 | 10780 | 10529 | 1310 | 9092 | 6012 | 8983 | 10985 | 4080 |
| | 2765 | 2516 | 2971 | 5804 | 7794 | 9472 | 4925 | 1082 | 1535 | 8326 | 10677 | 4469 |
| | 10965 | 4601 | 5747 | 1947 | 11884 | 8621 | 2712 | 485 | 497 | 5002 | 7211 | 5018 |
| | 4902 | 11085 | 5772 | 3149 | 11134 | 3570 | 7109 | 545 | 2244 | 5163 | 4170 | 10310 |
| | 2612 | 1373 | 10624 | 1896 | 11243 | 584 | 5259 | 3993 | 4281 | 1326 | 8302 | 4033 |
| | 3299 | 1465 | 9045 | 1664 | | | | | | | | |
| 311: | 5122 | 8544 | 1850 | 3407 | 3082 | 2101 | 8807 | 1743 | 4416 | 4485 | 4518 | 3943 |
| | 4757 | 7512 | 786 | 9889 | 3591 | 2580 | 2002 | 3092 | 5789 | 9825 | 994 | 3209 |
| | 8435 | 4537 | 11593 | 7021 | 8789 | 10106 | 1573 | 6780 | 7096 | 6073 | 7736 | 7171 |
| | 4282 | 4394 | 1849 | 930 | 972 | 2847 | 1117 | 8721 | 7189 | 2100 | 5149 | 7221 |
| | 11953 | 11963 | 4974 | 1429 | 2210 | 11598 | 1531 | 7039 | 11711 | 9936 | 5224 | 10186 |
| | 4072 | 2649 | 8963 | 2382 | 10351 | 2096 | 10974 | 10636 | 11000 | 8734 | 3916 | 6796 |
| | 8657 | 11687 | 4697 | 4329 | 6832 | 2727 | 8374 | 9438 | 10668 | 3647 | 11552 | 7524 |
| | 6604 | 1885 | 11828 | 7595 | 10209 | 11411 | 7797 | 11885 | 10661 | 12019 | 10202 | 4612 |
| | 10108 | 10561 | 1613 | 1092 | 10530 | 7110 | 9015 | 3939 | 4852 | 1642 | 724 | 2015 |
| | 12189 | 9706 | 3937 | 2177 | 8937 | 11655 | 4387 | 10778 | 528 | 3692 | 1932 | 9177 |
| | 8140 | 6092 | 5247 | 1545 | 9038 | 5309 | 11555 | 5090 | 7242 | 785 | 8998 | 10155 |
| | 3954 | 1639 | 6650 | 8405 | 3305 | 10431 | 10539 | 8886 | 4361 | 1783 | 9454 | 2362 |
| | 4246 | 1134 | 11285 | 2831 | 7650 | 4979 | 12225 | 6502 | 1557 | 4758 | 6477 | 2980 |
| | 5277 | 9165 | 7722 | 7118 | 7822 | 3783 | 11529 | 1049 | 6277 | 11780 | 5477 | 11519 |
| | 11902 | 8645 | 10034 | 2590 | 9003 | | | | | | | |
| 312: | 7634 | 1055 | 5087 | 3270 | 10523 | 6530 | 4135 | 2639 | 12447 | 10719 | 3604 | 10044 |
| | 11004 | 5269 | 5981 | 9041 | 6527 | 7087 | 1003 | 12355 | 3599 | 1749 | 1820 | 5237 |
| | 7019 | 10664 | 4458 | 6210 | 6762 | 5579 | 1513 | 6086 | 10859 | 10159 | 3881 | 10294 |
| | 2398 | 12212 | 766 | 6385 | 11329 | 1607 | 1256 | 2732 | 11289 | 12151 | 9669 | 12374 |
| | 2974 | 11070 | 10739 | 3928 | 2935 | 3478 | 3994 | 8822 | 7264 | 6240 | 12089 | 1476 |
| | 5528 | 4883 | 10745 | 11984 | 2621 | 8740 | 3950 | 745 | 1798 | 3044 | 7394 | 5136 |
| | 9692 | 9466 | 10063 | 2967 | 12391 | 6677 | 2946 | 10268 | 10123 | 2008 | 8755 | 2625 |
| | 2298 | 7571 | 9242 | 3014 | 11869 | 11288 | 6433 | 5751 | 9405 | 1874 | 1578 | 9665 |
| | 9703 | 10320 | 1824 | 11681 | 948 | 6637 | 4997 | 5823 | 9683 | 604 | 3847 | 8941 |
| | 3539 | 7889 | 12124 | 6925 | 8278 | 4831 | 1027 | 6795 | 9728 | 4914 | 11590 | 4955 |
| | 3033 | 8945 | 3413 | 2133 | 3141 | 9776 | 8259 | 5604 | 661 | 6708 | 2072 | 12017 |
| | 7921 | 9961 | 3450 | 11775 | 11689 | 6597 | 1305 | 4984 | 6024 | 4604 | 7267 | 2781 |
| | 3324 | 8629 | 6970 | 4731 | 5856 | 9555 | 9063 | 10972 | 10612 | 7412 | 3246 | 9125 |
| | 4523 | 6617 | 2807 | 8556 | 2723 | 8799 | 6217 | 9664 | 1990 | 11713 | 2075 | 10468 |
| | 4467 | 6119 | 11216 | 7469 | 2925 | 2494 | 3341 | 4896 | 2416 | 4030 | 10414 | 9642 |
| | 4643 | 7255 | 9639 | 5236 | 1493 | 9646 | 4850 | 11457 | 1654 | 2507 | 12091 | 10492 |
| | 7103 | 2934 | 5863 | 8408 | 5290 | 4617 | 9606 | 8925 | 9280 | 7235 | 9904 | 5480 |
| | 2332 | 1344 | 6048 | 1870 | 4562 | 3225 | 6261 | 9429 | 11873 | 9097 | 8533 | 3625 |
| | 1562 | 3814 | 9222 | 6849 | 9779 | 9289 | 10403 | 7784 | 10394 | 10711 | 5376 | 9998 |
| | 9111 | 11670 | 2440 | 4937 | 8095 | 11790 | 3533 | 3573 | 10164 | 3631 | 5413 | 7728 |
| | 4797 | 5032 | 3704 | 4146 | 12291 | 3808 | 8279 | 3188 | 9621 | 5861 | 3160 | 1278 |
| | 9042 | 7012 | 1339 | 8067 | 4027 | 12239 | 1111 | 6505 | 1964 | 2755 | 7935 | 1146 |
| | 5619 | 11265 | 9550 | 7470 | 5941 | 2048 | 671 | 2054 | 11792 | 10983 | 4007 | 11511 |
| | 3313 | 2905 | 8370 | 577 | 6682 | 8829 | 2637 | 7402 | 10339 | 2388 | 11321 | 8431 |
| | 7853 | 5000 | 708 | 8697 | 11858 | 8007 | 3242 | 10998 | 7675 | 6001 | 6775 | 10819 |
| | 10672 | 4362 | 4303 | 6889 | 9634 | 12308 | 3291 | 10452 | 10522 | 11809 | 637 | 6341 |
| | 12285 | 12296 | 3800 | 10019 | 11112 | 9244 | 9312 | 10119 | 9168 | 6896 | 6098 | 10192 |
| | 7342 | 5015 | 2487 | 3021 | 11213 | 7043 | 986 | 9461 | 9910 | 2648 | 4195 | 4300 |
| | 11055 | 2513 | 1815 | 1005 | 2305 | 11368 | 3526 | 1900 | 8978 | 9874 | 1294 | 6139 |
| | 11757 | 9476 | 6915 | 6678 | 8672 | 11808 | 9501 | 10375 | 632 | 3130 | 11380 | 1466 |
| | 5108 | 396 | 12020 | 6945 | 2981 | 6611 | 10243 | 7593 | 4578 | 5469 | 8960 | 3071 |
| | 3977 | 9183 | 4638 | 4536 | 5335 | 7404 | 8494 | 10474 | 5464 | 8474 | 6990 | 8014 |
| | 5831 | 6203 | 12383 | 2696 | 11829 | 9304 | 2557 | 4221 | 4376 | 9927 | 10496 | 1226 |
| | 3798 | 585 | 9118 | 660 | 619 | 8366 | 12387 | 10069 | 12183 | 4463 | 4586 | 11071 |
| | 2345 | 5424 | 6894 | 10158 | 11247 | 9301 | 8176 | 6140 | 4214 | 871 | 11164 | 3381 |
| | 1638 | 4957 | 5190 | 6700 | 3735 | 1445 | 4493 | 4490 | 3902 | 5321 | 6187 | 8125 |
| | 8124 | 10068 | 10324 | 4539 | 4117 | 3925 | 3859 | 11975 | 4532 | 10405 | 11859 | 7496 |
| | 8381 | 9275 | 6259 | 803 | 6176 | 11343 | 11136 | 11610 | 9332 | 4494 | 8895 | 5353 |
| | 5936 | 11292 | 8637 | 7285 | 3825 | 10337 | 8522 | 2680 | 8726 | 7136 | 11138 | 3680 |
| | 5761 | 11442 | 6639 | 5433 | | | | | | | | |
| 313: | 3073 | 2474 | 3510 | 7075 | 4976 | 9185 | 6594 | 869 | 9518 | 10060 | 2564 | 8838 |
| 314: | 10029 | 7651 | 7037 | 7585 | 7372 | 977 | 1353 | 5662 | 11431 | 7052 | 1583 | 10463 |
| | 12267 | 6507 | 3712 | 8663 | | | | | | | | |
| 315: | 9863 | 731 | 7111 | 1547 | 6030 | 1144 | 2530 | 2947 | 7906 | 6412 | 10680 | 711 |
| | 2149 | 7709 | 1058 | 10768 | 11394 | 10997 | 1284 | 965 | 4092 | 9557 | 8392 | 9018 |
| | 11227 | 11661 | 7614 | 8846 | 8961 | 6265 | 490 | 12083 | 5584 | 6306 | 3578 | 978 |
| | 2842 | 8258 | 10448 | 3028 | 3973 | 2330 | 6069 | 9296 | 5493 | 11444 | 8227 | 1889 |
| | 1976 | 12418 | 11926 | 5310 | 9629 | 2823 | 7121 | 8824 | 7288 | 2825 | 5007 | 4727 |
| | 12316 | 11612 | 6029 | 10124 | 5395 | 1188 | 5651 | 9230 | 2587 | 9403 | 9616 | 4660 |
| | 8057 | 8263 | 12442 | 4124 | 2229 | 9270 | 4779 | 3224 | 2595 | 1363 | 1671 | 8594 |
| | 6155 | 1946 | 6712 | 8032 | 4807 | 5172 | 985 | 1160 | 11249 | 9027 | 7492 | 503 |
| | 1411 | 3627 | 6314 | 2251 | 4025 | 9899 | 2898 | 4371 | 5499 | 4640 | 1407 | 1416 |
| | 2827 | 8336 | 3321 | 6390 | 11330 | 5678 | 2357 | 7419 | 4422 | 1604 | 1334 | 9460 |
| | 9380 | 3823 | 1149 | 1878 | 3273 | 11574 | 2693 | 9855 | 6216 | 9497 | 1866 | 7358 |
| | 9376 | 3870 | 5679 | 11309 | 1521 | 5487 | 6999 | 9402 | 3639 | 5342 | 9511 | 11774 |
| | 10476 | 6643 | 10262 | 9095 | 7084 | 4824 | 6791 | 6636 | 4738 | 3470 | 11228 | 3628 |
| | 7590 | 8050 | 5438 | 3050 | 2836 | 8078 | 9535 | 11620 | 9299 | 851 | 10008 | 11688 |
| | 10302 | 9253 | 10109 | 10392 | 7447 | 10775 | 9647 | 6398 | 11767 | 2404 | 9532 | 7553 |
| | 2223 | 4320 | 12144 | 9221 | 11973 | 1195 | 6037 | 612 | 8163 | 6142 | 1835 | 11727 |
| | 10024 | 11866 | 1740 | 11823 | 1296 | 6755 | 6363 | 10020 | 1599 | 9297 | 7901 | 2689 |
| | 1450 | 12117 | 6630 | 3852 | 9369 | 5010 | 3440 | 541 | 2026 | 8352 | 11759 | 7435 |
| | 11048 | 6494 | 1923 | 2091 | 9363 | 3829 | 9321 | 11337 | 10557 | 8839 | 5332 | 9599 |
| | 9455 | 5217 | 8901 | 5962 | 6050 | 10900 | 11801 | 11059 | 578 | 9821 | 11653 | 3449 |
| | 4684 | 5740 | 3923 | 3266 | 2247 | 783 | 3906 | 1238 | 911 | 9782 | 6669 | 3056 |
| | 3331 | 8118 | 5734 | 10367 | 9491 | 11323 | 6276 | 12005 | 9249 | 5317 | 10489 | 11752 |
| | 7123 | 4021 | 6679 | 3673 | 10752 | 5998 | 10004 | 10887 | 7803 | 3768 | 10845 | 2786 |
| | 1270 | 10072 | 4981 | 7207 | 2866 | 902 | 1837 | 11543 | 8433 | 8274 | 2372 | 6706 |
| | 11025 | 9202 | 859 | 6833 | 3706 | 11172 | 9258 | 4993 | 7131 | 9538 | 4212 | 2504 |
| | 2399 | | | | | | | | | | | |
| 316: | 8724 | 5044 | 10558 | 8303 | 9909 | 12419 | 4296 | 12010 | 10150 | 6441 | 7879 | 1790 |
| | 6993 | 7248 | 6491 | 1233 | 8304 | 3559 | 5660 | 11014 | 6121 | 7157 | 10033 | 9834 |
| | 8343 | 623 | 4818 | 2695 | 8950 | 5944 | 8070 | 6179 | 7155 | 8476 | 7471 | 4735 |
| | 1999 | 3100 | 5671 | 2691 | 2148 | 10084 | 9248 | 7835 | 11562 | 2611 | 5661 | 7181 |
| | 6841 | 6612 | 11769 | 11372 | 12269 | 6349 | 7224 | 7867 | 9948 | 4404 | 8851 | 4016 |
| | 7750 | 11832 | 12148 | 11180 | 2896 | 9964 | 2111 | 3311 | 11733 | 5130 | 6634 | 3026 |
| | 11157 | 9412 | 3099 | 3498 | 5691 | 10021 | 6282 | 4159 | 2235 | 3506 | 6135 | 10583 |
| | 5471 | 7428 | 3029 | 4177 | 6845 | 5345 | 5775 | 3075 | 8251 | 1968 | 8338 | 10990 |
| | 9254 | 8337 | 9663 | 954 | 3674 | | | | | | | |
| 317: | 3309 | 1527 | 722 | 3863 | 6557 | 3497 | 9944 | 9740 | 9322 | 10027 | 1087 | 1070 |
| | 5196 | 8294 | 7902 | 1436 | 1367 | 8642 | | | | | | |
| 318: | 5591 | 1829 | 11695 | 2000 | 9068 | 10423 | 11601 | 5883 | 4658 | 7572 | 11257 | 12196 |
| | 8459 | 8921 | 10876 | 12235 | 1905 | 856 | 7764 | 7158 | 8826 | 7552 | 10363 | 6559 |
| | 3049 | 10022 | 3134 | 11123 | 959 | 5622 | 6519 | 2482 | 10006 | 7884 | 8634 | 10070 |
| | 8473 | 6909 | 1942 | 5807 | 3129 | 11586 | 6254 | 1094 | 8148 | 1685 | 7743 | 3487 |
| | 6540 | 12002 | 11155 | 3419 | 11976 | 11185 | 8314 | 8820 | 10691 | 6859 | 6339 | 11175 |
| | 7919 | 10204 | 10947 | 3213 | 11850 | 3694 | 8055 | 9086 | 1409 | 4904 | 6427 | 9284 |
| | 7984 | 1606 | 10085 | 6498 | 12180 | 4930 | 5899 | 828 | 6794 | 8456 | 8300 | 2319 |
| | 10521 | 8577 | 1989 | 10299 | 4438 | 3051 | 4884 | 9888 | 1004 | 10552 | 855 | 4405 |
| | 2535 | 1499 | 5039 | 1597 | 8767 | 11625 | 5482 | 5559 | 9932 | 10570 | 2068 | 6563 |
| | 10524 | 12314 | 4977 | 757 | 651 | 11350 | 4768 | 9005 | 4429 | 4780 | 3250 | 8964 |
| | 5900 | 8137 | 2594 | 11961 | 9012 | 754 | 1230 | 10885 | 10536 | 5399 | 8142 | 6244 |
| | 2943 | 2168 | 1691 | 4435 | | | | | | | | |
| 319: | 8234 | 755 | 4745 | 5743 | 11416 | 5655 | 10409 | 2053 | 6607 | 7820 | | |
| 320: | 9329 | 6305 | 5715 | 6935 | 1731 | 3235 | 12440 | 12412 | 4278 | 1822 | 847 | 5334 |
| | 7870 | 10648 | 9544 | 12378 | 4268 | 8349 | 5812 | 8182 | 7802 | 11782 | 1218 | 925 |
| | 717 | 3215 | 2591 | 4985 | 1602 | 2996 | 2432 | 1383 | 3682 | 6516 | 11924 | 4415 |
| | 6860 | 6131 | 5268 | 7382 | 571 | 4888 | 3972 | 11464 | 10290 | 4716 | 9677 | 5653 |
| | 9087 | 7976 | 8046 | 2070 | 7624 | 811 | 6873 | 8268 | 7044 | 1659 | 10116 | 10088 |
| | 1282 | 8742 | 5145 | 5955 | 10182 | 1895 | 7354 | 591 | 8388 | 11998 | 5166 | 4933 |
| | 4983 | | | | | | | | | | | |
| 321: | 2426 | 7091 | 11276 | 4874 | 9934 | 4591 | 1667 | 7682 | 6262 | 1393 | 10547 | 1777 |
| | 12123 | 2176 | 7559 | 6552 | 4963 | 6164 | 4840 | 9408 | 2716 | 2793 | 891 | |
| 322: | 5419 | 1980 | 10862 | 5179 | 5755 | 8819 | 8830 | 6917 | 1185 | 595 | 6593 | 1568 |
| | 7678 | 4248 | 1342 | 4787 | 11039 | 12209 | 1773 | 537 | 8102 | 2886 | 1780 | 6969 |
| | 3022 | 2431 | 9990 | 8284 | 889 | 2883 | 601 | 9129 | 6056 | 3334 | 6536 | 489 |
| | 10095 | 6789 | 2134 | 7294 | 9824 | 3856 | | | | | | |
| 323: | 4349 | 10326 | 768 | 6031 | 10342 | 4665 | 1943 | 8790 | | | | |
| 324: | 1807 | 6871 | 7314 | 1009 | 1853 | 3486 | 9866 | 10057 | 6759 | 6556 | 9450 | 7290 |
| | 4154 | 5279 | 5478 | 11702 | 7771 | 12388 | 2031 | 9217 | 8382 | 11450 | 10571 | 4891 |
| | 2887 | 2749 | 7969 | 1467 | 11587 | 4119 | 10940 | 6703 | 9822 | 10009 | 1458 | 10348 |
| 325: | 1672 | 4606 | 2593 | 3085 | 10400 | 12452 | 5312 | 8862 | 8090 | 10382 | 7674 | 7752 |
| | 10332 | 11535 | 1038 | 6913 | 7099 | 3416 | 1507 | 5055 | 5806 | 4176 | 5817 | |
| 326: | 9196 | 7256 | 12366 | 4110 | 10397 | 10333 | 11199 | 4630 | 4803 | 3350 | 4579 | 12192 |
| | 9062 | 5834 | 5404 | 2669 | 11508 | 9233 | 2116 | 5182 | 2314 | 8990 | 3210 | |
| 327: | 3079 | 1902 | 6763 | 6196 | 10297 | 525 | 1136 | 10317 | 8887 | 9143 | 6493 | 9364 |
| | 6322 | 4750 | 5504 | 4828 | 2519 | 9913 | 10221 | 721 | 10417 | 8585 | 9033 | 4739 |
| | 6515 | 11302 | 3894 | 10054 | 3781 | 7528 | 10683 | 4917 | 9992 | 11040 | 8730 | 10090 |
| | 11452 | 6125 | 7046 | 6717 | 1544 | 8931 | 1612 | 6804 | 2283 | 1567 | 3563 | 3714 |
| | 4051 | 9487 | 7312 | 5698 | 4906 | 9488 | 7768 | 10592 | 9266 | 1871 | 4306 | 6941 |
| | 5085 | 3766 | 657 | 7452 | 2721 | 7222 | 2942 | 10732 | 7982 | 2495 | 5802 | 5023 |
| | 12359 | 2051 | 7891 | 6362 | 11507 | 9238 | 599 | 4022 | 6595 | 7515 | 7974 | 3985 |
| | 7170 | 5916 | 2462 | 5466 | 7960 | 1303 | 9959 | 5841 | 1153 | 6843 | 11521 | 1442 |
| | 7399 | 2188 | 4833 | 6839 | 11489 | 5350 | 924 | 8774 | 2086 | 9533 | 3810 | 10807 |
| | 4054 | 5228 | 7206 | 10738 | 4228 | 11845 | 9187 | 11075 | 3002 | 8384 | 7124 | 4747 |
| | 10742 | 958 | | | | | | | | | | |
| 328: | 9919 | 4426 | 6725 | 7362 | 1497 | 4470 | 4262 | 781 | 6226 | 6466 | 3147 | |
| 329: | 2983 | 6189 | 952 | 4334 | 3360 | 11105 | 2813 | | | | | |
| 330: | 9520 | 5175 | 6428 | 1775 | 3228 | 2615 | 1674 | 1529 | 10556 | 12061 | 6180 | 1471 |
| | 10413 | 11057 | 4958 | 5727 | 11103 | 6356 | 4687 | 3052 | 6579 | 7318 | 5171 | 10445 |
| | 1884 | 4172 | 7024 | 6395 | 4588 | 3482 | 8574 | 3077 | 5684 | 4175 | 7684 | 8761 |
| | 8410 | 11156 | 3963 | 8793 | 7076 | 11898 | 12294 | 4594 | 2505 | 7292 | 910 | 11927 |
| | 10280 | 10853 | 2562 | 9290 | | | | | | | | |
| 331: | 5926 | 3535 | 9559 | 5422 | 9498 | 5418 | 11106 | 3035 | 8145 | 3788 | 3434 | 2958 |
| | 4528 | 5307 | 2150 | 8390 | 6071 | 7591 | 11525 | 6824 | 12012 | 5780 | 7924 | 588 |
| | 2542 | 12236 | 1781 | 3295 | 7747 | 10979 | 927 | 5393 | 5498 | 1232 | 6378 | 6060 |
| | 5705 | 4565 | 4678 | 2892 | 5214 | 2604 | 8270 | 10598 | 3347 | 6773 | 1983 | 10666 |
| | 5416 | 4535 | 2042 | 6985 | 12304 | 2254 | 12193 | 11445 | 8126 | 6218 | 11609 | 2510 |
| | 8946 | 6891 | 10623 | 9150 | 9341 | 8952 | 10725 | 6292 | 8420 | 4743 | 1894 | 5205 |
| 332: | 8023 | 7887 | 10238 | 9213 | 8562 | 6182 | 1506 | 1558 | 1435 | 3884 | 10364 | 7810 |
| | 6750 | 8165 | 9926 | 8918 | 11981 | 4257 | 6330 | 7446 | 4730 | 2526 | 2036 | 2270 |
| 333: | 7316 | 11087 | 8566 | 7430 | 8215 | 10884 | 617 | 11671 | 7403 | 771 | 5330 | 11210 |
| | 874 | 2708 | 10986 | 8079 | 10214 | 8720 | 9937 | 9954 | 12443 | 5156 | 11161 | 11236 |
| | 11274 | 3882 | 8213 | 11346 | 3833 | 1433 | 2146 | 5627 | 12305 | 6370 | 522 | 12343 |
| | 6792 | 6740 | 4809 | 5925 | 4436 | 8130 | 3983 | 7141 | 11712 | 2424 | 10882 | 3292 |
| | 10338 | 4927 | 7045 | 5949 | 1851 | 5053 | 3412 | 6405 | 9316 | 10864 | 5664 | 655 |
| | 7325 | 5686 | 3063 | 3152 | 3401 | 7125 | 8904 | 7596 | 12198 | 2961 | 9424 | 7305 |
| | 10419 | 3652 | 9133 | 3164 | | | | | | | | |
| 334: | 2706 | 10115 | 1941 | 10786 | 12217 | 1037 | 5649 | 6880 | 2468 | 8350 | 5120 | 11413 |
| | 8965 | 2552 | 5150 | 1490 | 5544 | 5454 | 10388 | 10222 | 9089 | 2064 | 1925 | 8449 |
| | 5369 | 6375 | 1883 | 7228 | 5106 | 10227 | 1628 | 11584 | 8197 | 838 | 2743 | 9261 |
| | 1906 | 12437 | | | | | | | | | | |
| 335: | 5048 | 2893 | 1470 | 8587 | 9982 | 8563 | 992 | 5407 | 3472 | 9481 | 11433 | 6747 |
| | 10703 | 3793 | 630 | 2029 | 552 | 9920 | 10658 | 11925 | 6440 | 10163 | 4087 | 4297 |
| | 3477 | 11972 | 11551 | 795 | 10649 | 7128 | 11956 | 4428 | 2600 | | | |
| 336: | 2895 | 11678 | 10073 | 8802 | 7383 | 1186 | 6288 | 6895 | 1846 | 3139 | 11160 | 7898 |
| | 953 | 6648 | 2246 | 7020 | 7962 | 12043 | 10436 | 11144 | 11645 | 767 | 6783 | 4500 |
| | 3097 | 9773 | 4921 | 1572 | 10510 | 3845 | 11447 | 895 | 9193 | 5457 | 6529 | 3256 |
| | 1148 | | | | | | | | | | | |
| 337: | 6394 | 10174 | 8413 | 2929 | 12463 | 7434 | 4194 | 2477 | 9390 | 11245 | 3690 | 7237 |
| | 989 | 4445 | 4639 | 3312 | 10763 | 7760 | 2499 | 9922 | 11703 | 7259 | 5299 | 11517 |
| | 2798 | 8113 | 4275 | 4259 | 1133 | 10427 | 763 | 492 | 11466 | 796 | | |
| 338: | 12363 | 12358 | 4801 | 8504 | 11079 | 9200 | 9918 | 2258 | 11786 | 8127 | 5101 | 9562 |
| | 1375 | 10840 | 5449 | 7015 | 7705 | 1126 | 4355 | 9939 | 2626 | 1582 | 6415 | 9793 |
| | 7240 | 9134 | 4378 | 5484 | 8595 | 1002 | 1960 | 7380 | 5733 | 12030 | | |
| 339: | 8296 | 10930 | 3512 | 4549 | 4311 | 3678 | 8316 | 12037 | 9411 | 6338 | 7588 | 1091 |
| | 3445 | 10255 | 9984 | 2081 | 5707 | 7200 | 11607 | 9106 | 2524 | 11617 | 7681 | 10626 |
| | 1113 | 2574 | | | | | | | | | | |
| 340: | 6308 | 8489 | 3318 | 5096 | 4024 | 12141 | 9463 | 2413 | 8951 | 4618 | 11140 | 6875 |
| | 2236 | 11496 | 2869 | 10416 | 6720 | 6805 | | | | | | |
| 341: | 5401 | 12226 | 2834 | 3616 | 1217 | 7007 | 10418 | 5716 | 10594 | 2310 | 3910 | 4193 |
| | 9768 | 6605 | 11899 | 8567 | 3432 | 6624 | 5099 | 8967 | 1439 | 9542 | 3431 | 1580 |
| | 10323 | 1036 | 1177 | 11223 | 7907 | | | | | | | |
| 342: | 8184 | 2250 | 6514 | 7840 | 6940 | 6635 | 10785 | 7934 | 5709 | 2204 | 5402 | 1125 |
| | 4370 | 9392 | 11049 | 5524 | 3287 | 10067 | 7632 | 6768 | 5285 | 7306 | 8805 | 7167 |
| | 2858 | 4232 | 3200 | 1748 | 6964 | 4942 | 6830 | 6320 | 5638 | 10736 | 7545 | 7179 |
| | 7873 | 6641 | 2570 | 11995 | 10216 | 2186 | 7050 | 3787 | 5272 | 6912 | 5990 | 1461 |
| | 4227 | 11698 | 1142 | 728 | 1109 | 3685 | 3116 | 12289 | 9409 | 12039 | 3725 | 11595 |
| | 5366 | 3201 | 9379 | 11360 | 6166 | 1739 | 9236 | 1011 | 5206 | 3835 | 10449 | 1684 |
| | 2915 | | | | | | | | | | | |
| 343: | 10188 | 2007 | 2016 | 5850 | 4350 | 7000 | 2306 | 6027 | 519 | 2627 | 4501 | 4773 |
| | 7047 | 2914 | 6721 | 10525 | 10225 | 11664 | 4271 | 10554 | 9443 | 8053 | 9601 | 1757 |
| | 6957 | 9214 | 12095 | 2338 | 8091 | 8158 | 9876 | 8185 | 3219 | 4001 | 10901 | 10380 |
| | 11232 | 6571 | 6321 | 7238 | 5509 | 5531 | 6190 | 1481 | 11491 | 7251 | 8202 | 1424 |
| | 9430 | 1093 | 1539 | 8094 | 9162 | 8491 | 12373 | 6691 | 4250 | 6326 | 4367 | 3120 |
| | 11992 | 9516 | 10384 | 11969 | 5383 | 7443 | 9761 | 11954 | 11438 | 6884 | 8081 | 5689 |
| | 3693 | 9510 | 3198 | 3815 | 1676 | 5420 | 1290 | 7955 | 7065 | 5890 | 4961 | 6062 |
| | 581 | 2686 | 3394 | 9435 | | | | | | | | |
| 344: | 6016 | 8669 | 7837 | 3285 | 5153 | 8414 | 5003 | 6936 | 1823 | 11693 | 6756 | 1090 |
| | 7296 | 10903 | 8308 | 3336 | 8975 | 11448 | 12311 | 5895 | | | | |
| 345: | 6350 | 10059 | 1792 | 10553 | 1052 | 9871 | 4680 | 11701 | 1620 | 6685 | 5543 | 9189 |
| | 3089 | 2955 | 3239 | 984 | 2183 | 6136 | 2550 | 2867 | 10379 | 8511 | 8936 | 7833 |
| | 9393 | 5546 | 1247 | 2344 | 9603 | 6670 | 10229 | 5013 | 5216 | 9638 | 495 | 10870 |
| | 8502 | 10014 | 2097 | 5365 | 11704 | 10925 | | | | | | |
| 346: | 10910 | 9252 | 7236 | 10747 | 11205 | 8087 | 9568 | 8505 | 3422 | 11280 | 2828 | |
| 347: | 9478 | 7851 | 9259 | 3554 | 2906 | 9872 | 1549 | 5257 | 2227 | 10439 | 712 | 2975 |
| | 1371 | 3769 | 4323 | 2624 | 10343 | 4133 | 1652 | 3408 | 3218 | 5867 | 4967 | 1191 |
| | 11187 | 1193 | 5545 | 11252 | 10671 | 5564 | 1704 | 4129 | 7409 | 9529 | 9895 | 5213 |
| | 12184 | 11141 | 6986 | 1931 | 6701 | 6585 | 3384 | 11504 | 5388 | 5954 | 3475 | 12215 |
| | 10107 | 7680 | 12113 | 1006 | 3982 | 6968 | 2578 | 12021 | 11605 | 730 | 9840 | |
| 348: | 11699 | 890 | 7060 | 5408 | 3891 | 2025 | 5553 | 6088 | 1171 | 9536 | 7944 | 2585 |
| | 6626 | | | | | | | | | | | |
| 349: | 4581 | 12427 | 4118 | 10579 | 6861 | 11017 | 8438 | 11054 | 5359 | 3828 | 670 | 11094 |
| | 10308 | 7001 | 4034 | 901 | 7814 | 2667 | 4970 | 1542 | 3173 | 3981 | 3355 | 2383 |
| | 6150 | | | | | | | | | | | |
| 350: | 11417 | 1710 | 7143 | 12413 | 4143 | 1380 | 5658 | 4141 | 2529 | 689 | 12054 | 5683 |
| | 8670 | 9716 | 7767 | 9724 | 804 | 8261 | 1972 | 8448 | 12347 | 4600 | 6403 | 8928 |
| | 836 | 6649 | 7254 | 8646 | 1538 | 4115 | 6751 | 2245 | 5315 | 1289 | | |
| 351: | 2222 | 5633 | 1475 | 12182 | 10043 | 6299 | 1275 | 10135 | 11560 | 8411 | 4729 | 11979 |
| | 10980 | 11596 | 1161 | 3153 | 2759 | 2928 | | | | | | |
| 352: | 3872 | 8759 | 1601 | 2322 | 6250 | 5881 | 8675 | 3496 | 10136 | 8605 | 7855 | 7819 |
| | 2394 | 10960 | 8041 | 11325 | 11502 | 4391 | 2074 | 10684 | 1169 | 10878 | 8550 | 775 |
| | 8673 | 3320 | 8355 | 8001 | 8863 | 1030 | 9350 | 6478 | 9459 | 4688 | 4136 | 7283 |
| | 9853 | 9923 | 5566 | 8153 | 7558 | | | | | | | |
| 353: | 10729 | 2481 | 11933 | 3274 | 9399 | 7657 | 12414 | 6573 | 2679 | 4924 | 12348 | 2129 |
| | 2299 | 3695 | 5412 | 9744 | 4871 | 2663 | 5923 | 2674 | 1178 | 1213 | 3849 | 2812 |
| | 10001 | 3040 | 7938 | 1696 | 4418 | 1816 | 2257 | 7555 | 2598 | 11267 | 1432 | 4946 |
| | 9786 | 2875 | 12110 | 3799 | 4560 | 1737 | 10215 | 3437 | 3598 | 3230 | 8884 | 11290 |
| | 7198 | 9757 | 1742 | 10197 | 5169 | 1351 | 9201 | 5459 | 9239 | 6426 | 3909 | 2267 |
| | 10834 | 7698 | 6068 | 6956 | 11540 | 7030 | 4097 | 10678 | 1428 | 9789 | 5995 | 666 |
| | 5811 | 1503 | 12315 | 7385 | 5947 | 12398 | 5400 | 6539 | 11174 | 7393 | 8239 | 3812 |
| | 1653 | 10532 | 9596 | 5128 | 2417 | 4137 | 2861 | 10966 | 9180 | 3986 | 1263 | 2984 |
| | 9218 | 8933 | 5833 | 3661 | 5314 | 2161 | 5284 | 4800 | 7097 | 9081 | 2924 | 1699 |
| | 6281 | 8441 | 3435 | 8639 | 10284 | 5275 | 8084 | 8781 | 8537 | 1919 | 11367 | 6958 |
| | 11592 | 3615 | 6817 | 7464 | 2180 | 11746 | 11385 | 11558 | 3797 | 12334 | 6057 | 9651 |
| | 8955 | 8992 | 2857 | 9806 | 4886 | 7824 | 4487 | 6178 | 9130 | 3375 | 9905 | 1398 |
| | 6760 | 8464 | 7732 | 4224 | 2586 | 5502 | 7432 | 4857 | 10490 | 7225 | 10228 | 9110 |
| | 2758 | 4533 | 1779 | 5049 | 2878 | 2816 | 8666 | 8986 | 873 | 7639 | 11037 | 9989 |
| | 8794 | 11928 | 9425 | 10771 | 5714 | 7804 | 5127 | 747 | 4868 | 4427 | 1259 | 7243 |
| | 1489 | 5103 | 1546 | 1887 | 4898 | 9628 | 10306 | 7507 | 3959 | 1423 | 9192 | 8092 |
| | 2190 | 11640 | 7115 | 10231 | 562 | 2155 | 4284 | 2253 | 2213 | 1116 | 5381 | 3855 |
| | 2045 | 7900 | 8283 | 6510 | 10386 | 8440 | 4365 | 11779 | 8018 | 4992 | 1449 | 9564 |
| | 10995 | 9255 | 6769 | 11406 | 1040 | 5650 | 2768 | 10855 | 7041 | 3867 | 9767 | 10335 |
| | 11169 | 11871 | 3491 | 7880 | 6921 | | | | | | | |
| 354: | 4928 | 539 | 6076 | 7626 | 2465 | 8883 | 12086 | 9675 | | | | |
| 355: | 10941 | 5827 | | | | | | | | | | |
| 356: | 7899 | 2286 | 11193 | 1590 | 4944 | 8228 | 5230 | 8377 | 10663 | 6499 | 7913 | 3914 |
| | 3330 | 8929 | 1366 | 6532 | 5461 | 12302 | 2425 | 5550 | 7472 | 3786 | 9953 | 7359 |
| | 638 | 2439 | 12129 | 3601 | 10559 | 5320 | | | | | | |
| 357: | 9769 | 8015 | 4161 | 2360 | 7713 | 9049 | 5894 | 1492 | 8881 | 9292 | 6846 | 11197 |
| | 10179 | 5547 | 7991 | 1577 | 10964 | 995 | 4854 | 2078 | 8454 | 11277 | 7270 | 846 |
| | 11149 | 4711 | 8179 | 8940 | 5875 | 4163 | 8004 | 6019 | 3517 | 11480 | 9759 | 11982 |
| | 2443 | 7831 | 6866 | 520 | 10288 | 11721 | 10794 | 5184 | 9263 | 9227 | 7967 | 6704 |
| | 4726 | 12229 | 12241 | 2761 | 2548 | 5888 | 5798 | 1304 | 4558 | 10053 | 10279 | 7726 |
| | 2371 | 8763 | 11964 | 1440 | 11352 | 3185 | 10955 | 5377 | 2392 | 1330 | 6764 | 9999 |
| | 7932 | 7710 | 1216 | 833 | 2822 | 1258 | 6423 | 1610 | 9479 | 7241 | 9311 | 5974 |
| | 5542 | 12079 | 11012 | 6111 | 2738 | 2779 | 9294 | 616 | 6406 | 8857 | 4171 | 4185 |
| | 7448 | 6154 | 2581 | 8570 | 2912 | 5060 | 5572 | 11258 | 6898 | 3143 | 11849 | 7311 |
| | 9897 | 8778 | 4540 | 3875 | 10589 | 3523 | 10101 | 9704 | 9915 | 6361 | 3492 | 5763 |
| | 946 | 10099 | 11632 | 4390 | 4475 | 6157 | 10420 | 6455 | 8280 | 11246 | 8247 | 5118 |
| | 11855 | 11044 | 10706 | 2632 | 7589 | 7257 | 8483 | 7583 | 5337 | 11797 | 9735 | 4686 |
| | 10244 | 1413 | 10049 | 7841 | 4148 | 1205 | 8981 | 2705 | 2841 | 3059 | 10241 | 511 |
| | 6765 | 1196 | 3400 | 4548 | 1293 | 4870 | 8298 | 6870 | 7601 | 3758 | 1806 | 6713 |
| | 7895 | 9746 | 11440 | 3296 | 11135 | 531 | 12232 | 6959 | 7712 | 2528 | 10944 | 4544 |
| | 6844 | 12396 | 10265 | 7950 | 7862 | 8733 | 5434 | 9512 | 523 | 6422 | 4564 | 2037 |
| | 4559 | 8460 | 10141 | 8241 | 6939 | 4947 | 5088 | 3115 | 1152 | 5316 | 9093 | 12321 |
| | 2484 | 570 | 5793 | 11604 | 7268 | 4359 | 6138 | 1899 | 8219 | 5061 | 1784 | 10748 |
| | 7525 | 9250 | 10620 | 7416 | 11644 | 8451 | 5301 | 7048 | 3817 | 615 | 9384 | 4912 |
| | 1646 | 10461 | 2840 | 9147 | 6007 | 6548 | 2734 | 8712 | 11513 | 6640 | 6099 | 8335 |
| | 5174 | 8138 | 5809 | | | | | | | | | |
| 358: | 9456 | 10091 | 8818 | 9686 | 491 | 6509 | 10041 | 5375 | 5497 | | | |
| 359: | 1799 | 8105 | 6680 | 5822 | 716 | 9622 | 6488 | 8882 | 6249 | 5621 | 7246 | |
| 360: | 714 | 4732 | 1511 | 9059 | 11326 | 12188 | 3337 | 7352 | 9720 | 8923 | 3113 | 2381 |
| | 688 | 11186 | 6294 | 11728 | 4873 | 12114 | 4636 | 8596 | 1858 | 4552 | 7753 | |
| 361: | 12275 | 7578 | 1271 | 8220 | 517 | 6822 | 11492 | 10740 | 8915 | 1237 | 7313 | 6003 |
| | 8089 | 502 | 3632 | 6236 | 800 | 2290 | 7104 | 10731 | 10208 | 8285 | 9695 | 2429 |
| | 11179 | 4061 | 975 | 12345 | 3469 | 4432 | 6660 | 11019 | 6525 | 7694 | 7153 | 4766 |
| | 7563 | 1551 | 7850 | 6954 | 9960 | 5047 | 10767 | 11958 | 9620 | 9043 | 1269 | 558 |
| | 11895 | 9231 | 2972 | 4156 | 5700 | 2228 | 744 | 4646 | 834 | 12048 | 3418 | 2115 |
| | 9996 | 2315 | 12024 | 8896 | 3724 | 2033 | 8309 | 12022 | 8056 | 12152 | 8698 | 596 |
| | 12222 | 7183 | 10896 | | | | | | | | | |
| 362: | 3074 | 9370 | 4079 | 5426 | 2409 | 3958 | 6274 | 3117 | 3264 | 8655 | 2301 | 6897 |
| | 8397 | 1864 | 6452 | 8528 | 2090 | 4208 | 4000 | 6705 | 10758 | 3971 | 11095 | 11734 |
| | 10908 | 5836 | 11366 | 11983 | 3945 | 10695 | 10698 | | | | | |
| 363: | 6232 | 8229 | 5094 | 2536 | 8195 | 8305 | 11129 | 7370 | 6651 | 10713 | 12329 | 10502 |
| | 3869 | 1362 | 12428 | 11633 | 4386 | 1833 | | | | | | |
| 364: | 3918 | 9184 | 6928 | 11422 | 9880 | 3754 | 3316 | 5448 | 6234 | 5494 | 7231 | 4443 |
| | 961 | 9464 | 2019 | | | | | | | | | |
| 365: | 5176 | 5308 | 11795 | 12263 | 839 | 8051 | 725 | 738 | 1801 | 1487 | 5073 | 10122 |
| | 11570 | 4047 | 3557 | 6291 | 7582 | 8394 | 12237 | 5501 | 8878 | 4245 | 8257 | 8779 |
| | 3803 | 9036 | 6984 | 10692 | 10346 | 12011 | 3038 | 3889 | 1145 | 11293 | | |
| 366: | 11753 | 3016 | 2911 | 5829 | 2185 | 9537 | 11999 | 6447 | 2243 | 9823 | 5031 | 9323 |
| | 5143 | | | | | | | | | | | |
| 367: | 1672 | 4606 | 2208 | 2593 | 3085 | 4608 | 5312 | 2365 | 4258 | 1108 | 7780 | 1474 |
| | 2670 | 6672 | 4877 | 8116 | 4113 | 567 | 5844 | 922 | 1507 | 5055 | 6371 | 12297 |
| | 5806 | 6153 | 4176 | | | | | | | | | |
| 368: | 1637 | 6662 | 7275 | 12072 | 10534 | 10235 | 7477 | 576 | 4547 | 5695 | 11725 | 11041 |
| | 2144 | 3637 | 8866 | 3065 | 12238 | 12051 | 11021 | 6537 | 1315 | 1024 | 2776 | 5470 |
| | 5271 | 11906 | 5583 | 5907 | 9609 | 2444 | 4763 | 4066 | 12204 | 4410 | 5862 | 4046 |
| | 11455 | 6668 | 4742 | 6937 | 5198 | 6748 | 6490 | 3031 | 7966 | 6454 | 6436 | 2497 |
| | 7737 | 818 | 11952 | 5274 | 2207 | 6707 | 5151 | 1248 | 6284 | 3067 | 575 | 10007 |
| | 2991 | 1336 | 1312 | 600 | 9022 | 3545 | 10301 | 8325 | 11648 | 2573 | 11182 | 7903 |
| | 12047 | 7980 | 11206 | 3655 | 7216 | 11534 | 8589 | 2655 | 6075 | 10114 | 2052 | 1673 |
| | 9678 | 7502 | 7151 | 2295 | 4856 | 11942 | 2868 | 4169 | 11253 | 8689 | 12295 | 10478 |
| | 7533 | 857 | 8484 | 7778 | 8608 | 4112 | 9338 | 837 | 1936 | 6393 | 8245 | 1834 |
| | 3359 | 861 | 10811 | 9277 | 8301 | 2937 | 10010 | 11536 | 853 | 2242 | 3345 | 4826 |
| | 5960 | 5105 | 8612 | 4918 | 883 | 8756 | 6790 | 2420 | 3917 | 11919 | 10002 | 7083 |
| | 9966 | 7808 | 4384 | 6867 | 5608 | 9513 | 3877 | 7763 | 488 | 9339 | 4829 | 518 |
| | 9901 | 8154 | 3676 | 8495 | 2121 | 9977 | 12277 | 5725 | 4140 | 1444 | 7439 | 12357 |
| | 4332 | 3531 | 2839 | 10627 | 2826 | 5935 | 11544 | 9962 | 4569 | 2554 | 6850 | 10074 |
| | 1553 | 2184 | 7145 | 7918 | 9156 | 8271 | 6902 | 4199 | 9774 | 10303 | 11493 | 8249 |
| | 6239 | 5059 | 8701 | 1162 | 5882 | 5987 | 3718 | 9160 | 11007 | 7067 | 4939 | 12064 |
| | 11600 | 1202 | 2849 | 3317 | 8129 | 10239 | 10865 | 1962 | 6325 | 4691 | 9302 | 2234 |
| | 9123 | 12322 | 8457 | 8979 | 5670 | 3024 | 4440 | 9560 | 5885 | 3421 | 4265 | 11628 |
| | 2280 | 12332 | 592 | 1494 | 11523 | 1244 | 2523 | 6110 | 2231 | 5437 | 551 | 5409 |
| | 6716 | 4573 | 3839 | 10422 | 8275 | 8588 | 737 | 9262 | 7487 | 5465 | 7493 | 4534 |
| | 11266 | 10727 | 7828 | 11115 | 8002 | 5225 | 10562 | 8378 | 9400 | 12224 | 7420 | 8290 |
| | 3780 | 6224 | 11462 | 2397 | 5411 | 8797 | 806 | 11718 | 7378 | 12283 | 9921 | 6854 |
| | 3333 | 10881 | 9100 | 1559 | 11751 | 8944 | 10954 | 2226 | 7330 | 6079 | 3924 | 1099 |
| | 2694 | 1412 | 5610 | 6149 | 8696 | 3607 | 7008 | 9274 | 2442 | 1729 | 1453 | 11468 |
| | 8334 | 6233 | 10632 | 7636 | 4455 | 535 | 1073 | 8699 | 9325 | 11585 | 9441 | 4294 |
| | 4236 | 10498 | 3813 | 7263 | 7939 | 2030 | | | | | | |
| 369: | 12323 | 718 | 9099 | 11577 | 11908 | 9361 | 7271 | 12027 | 5331 | 8889 | 12136 | 6562 |
| | 7298 | 10254 | | | | | | | | | | |
| 370: | 1105 | 10455 | 3073 | 6977 | 4330 | 5374 | 2173 | 10058 | 9053 | 6486 | 2474 | 8879 |
| | 4004 | 7530 | 11226 | 11126 | 11987 | 10782 | 10535 | 4210 | 5472 | | | |
| 371: | 3659 | 3717 | 5958 | 5227 | 5173 | 563 | 1974 | 11405 | 2411 | 10256 | 11147 | 9698 |
| | 1595 | 3775 | 3388 | 7148 | 4862 | 7827 | 3850 | 8768 | 5847 | 6009 | 1598 | 5296 |
| | 2435 | | | | | | | | | | | |
| 372: | 10050 | 9750 | 10875 | 7497 | 2584 | 2941 | 5460 | 8412 | 2471 | 11342 | 3448 | 6615 |
| | 4344 | 10212 | 11030 | 8614 | 1464 | 10355 | 8387 | 6526 | 3483 | 5803 | 3900 | 4887 |
| | 12318 | 10250 | 10765 | 1081 | 7302 | 3451 | 5781 | 8856 | 6456 | | | |
| 373: | 3742 | 9841 | 9366 | 1717 | 10514 | 6445 | 2098 | 7489 | 11807 | 10922 | 2004 | 7092 |
| | 5699 | 5406 | 9352 | 1306 | 11743 | 7252 | 4103 | 1291 | 9039 | 3402 | 7490 | 2927 |
| | 4815 | 5718 | 9085 | 3587 | 4252 | 12361 | 1119 | 11527 | 6757 | 6177 | 2117 | 957 |
| | 1619 | 7647 | 8758 | 6103 | 1550 | 3373 | 4234 | 8442 | 10275 | 3397 | 919 | 10491 |
| | 8000 | 9483 | 5624 | 7353 | 6772 | 8995 | 11944 | 3528 | 11162 | 6346 | 11389 | 10330 |
| | 12218 | 9741 | 5986 | 6424 | 9046 | 11148 | 6134 | 5934 | 9327 | 6745 | 1192 | 8662 |
| | 10515 | 759 | 5589 | 1023 | 8465 | 8035 | 1001 | 7307 | 11719 | 7387 | 6332 | 2820 |
| | 12268 | 11591 | 8391 | 6081 | 3757 | 5736 | 8020 | 12109 | 10194 | 1220 | 11399 | 557 |
| | 9619 | 12369 | 6998 | 10519 | 6297 | 10023 | 2635 | 6815 | 4672 | 1753 | 9523 | 3481 |
| | 12171 | | | | | | | | | | | |
| 374: | 2263 | 8253 | 8529 | 2957 | 5854 | 8654 | 12242 | 1321 | 9319 | 8683 | 5453 | 4689 |
| | 8478 | | | | | | | | | | | |
| 375: | 6965 | 11170 | 1791 | 4291 | 11390 | 8902 | 11875 | 6799 | 6266 | 9014 | 11320 | 3805 |
| | 5529 | 4032 | 8287 | 11865 | 10167 | | | | | | | |
| 376: | 4414 | 8762 | 11259 | 9504 | 9784 | 11748 | 5341 | 9107 | 10327 | 1525 | 9644 | 12240 |
| | 10723 | 1910 | 8082 | 6558 | 9736 | 7526 | 5682 | 6365 | 6386 | 9545 | 9617 | 6173 |
| | 7400 | 11050 | 12004 | 3364 | 11569 | 8475 | 4872 | 1043 | 9671 | 1955 | 4256 | 2500 |
| | 8467 | 10828 | 11694 | 8568 | 9268 | 2855 | 11353 | 9054 | 2577 | 7462 | 1663 | 10479 |
| | 11794 | 11561 | 7197 | 11386 | 2607 | 9614 | 1643 | 11100 | 7336 | 4389 | 1201 | 10178 |
| 377: | 5305 | 5158 | 1726 | 7617 | 8705 | 4366 | 12092 | 7504 | 11434 | 7904 | | |
| 378: | 7791 | 5199 | 11173 | 10410 | 12364 | 4074 | 3537 | 6151 | 741 | 762 | 3820 | 3868 |
| | 1629 | | | | | | | | | | | |
| 379: | 8873 | 4792 | 3802 | 648 | 7890 | 7159 | 3112 | 587 | 9007 | 3183 | 1698 | 6097 |
| | 6555 | 5115 | | | | | | | | | | |
| 381: | 3204 | 9368 | 2597 | 3132 | 8678 | 3380 | 8421 | 9867 | 10548 | 4247 | | |
| 382: | 11124 | 1434 | 12462 | 4719 | 11190 | 12213 | 1457 | 10349 | 5414 | 2201 | 629 | 10253 |
| | 2904 | 9701 | 7085 | 6219 | 4861 | 5765 | 7175 | 4363 | 6087 | 12403 | 5209 | 644 |
| | 5425 | 11916 | 8134 | 11897 | 11316 | 9508 | | | | | | |
| 383: | 8186 | 6269 | 9355 | 11705 | 5262 | 10621 | 8036 | 3610 | 2124 | 9722 | 3871 | 1741 |
| | 3293 | 9385 | 9781 | 6364 | | | | | | | | |
| 384: | 10959 | 5098 | 5436 | 9777 | 2795 | 3974 | 11831 | 7152 | 1401 | 6574 | 7742 | 1793 |
| | 5222 | 5508 | 6900 | 12449 | 9310 | 10787 | 10837 | 3205 | 11388 | 9547 | 12014 | 4307 |
| | 8890 | 8402 | | | | | | | | | | |
| 385: | 11531 | 9198 | 6864 | 9815 | 8024 | 9374 | 1209 | 1771 | 9211 | 8255 | 6256 | 9337 |
| | 10996 | 8496 | 7172 | 8276 | 9452 | 1945 | 4713 | 4611 | 9224 | 864 | 7916 | 3171 |
| | 5590 | 2342 | 6484 | 9458 | 9525 | 8711 | 5971 | 6313 | 3830 | 9611 | 1348 | 7495 |
| | 11484 | 3667 | 1068 | 10307 | 11676 | 7425 | 4337 | 3776 | 2715 | 11741 | 8903 | 3713 |
| | 10572 | 2520 | 4409 | 4568 | 9662 | 10575 | 9713 | 4522 | 4201 | 9353 | 936 | 7455 |
| | 3127 | 9055 | 11472 | 2804 | 2485 | 5992 | 7546 | 5787 | 1614 | 12272 | 820 | 8199 |
| | 7565 | 11045 | 5264 | 1051 | 2219 | 7215 | 5054 | 4622 | 12247 | 6046 | 729 | 7607 |
| | 4563 | 2792 | 2126 | 7328 | | | | | | | | |
| 386: | 11268 | 6449 | 4644 | 5349 | 12159 | 3613 | 7832 | 3553 | 10905 | 7536 | 12202 | 990 |
| | 8235 | 10686 | 2456 | 2603 | 2327 | 7754 | 12260 | 3458 | | | | |
| 387: | 2041 | 8848 | 2909 | 5750 | 7062 | 4627 | 2566 | 7094 | 2141 | | | |
| 388: | 817 | 9679 | 3392 | 4988 | 6465 | 10879 | 9281 | 11631 | 1000 | 534 | 10133 | 5512 |
| | 10286 | 2050 | 7915 | 1818 | | | | | | | | |
| 389: | 4812 | 3006 | 2832 | 11649 | 3536 | 8821 | 10336 | 12335 | 5851 | 1395 | 1668 | 4183 |
| | 9732 | 3319 | 799 | 2877 | 8991 | 8968 | 770 | 5606 | 12115 | 4496 | 7805 | 6408 |
| | 6388 | 4134 | 5270 | 827 | 7072 | 8775 | 9001 | 7871 | | | | |
| 390: | 12454 | 3012 | 6026 | 11219 | 4005 | 8748 | 9818 | 11892 | 12191 | 2496 | 6715 | 10737 |
| | 12145 | 3276 | 5188 | | | | | | | | | |
| 391: | 8545 | 662 | 1325 | 8282 | 5909 | 2352 | | | | | | |
| 392: | 3087 | 1402 | 9975 | 3048 | 11515 | 5142 | 11356 | 11860 | 8331 | 1322 | 9492 | 4784 |
| | 2179 | 2266 | 494 | 4286 | 794 | 10808 | 5496 | 7186 | 3629 | 9467 | 6453 | 2769 |
| | 678 | 620 | 3062 | 4408 | 7878 | 8400 | 7106 | 727 | 6473 | 9963 | 2035 | 2329 |
| | 1505 | 1184 | 9006 | 586 | 5387 | 7630 | 8564 | 4111 | 10667 | 2540 | 831 | 8752 |
| | 8741 | 4285 | 6108 | 4478 | 4676 | 10888 | 11470 | 8906 | 11374 | 9804 | 11082 | 12059 |
| | 10716 | 10951 | 5568 | 8984 | 6565 | 5677 | 5668 | 1692 | 12299 | 9991 | 5144 | 10080 |
| | 3759 | 7077 | 10211 | 4790 | 4990 | 5612 | 8143 | 1228 | 5168 | 3596 | 11402 | 7494 |
| | 8578 | 10799 | 9580 | 4424 | 7560 | 3595 | 6156 | 5757 | 4823 | 9770 | 8546 | 3396 |
| | 8716 | 983 | 9875 | 5474 | 9798 | 9660 | 5632 | 10938 | 8351 | 6228 | 1658 | 5249 |
| | 1655 | 8782 | 11119 | 4708 | 5361 | 3238 | 6045 | 7505 | 11188 | 1130 | 5358 | 2458 |
| | 572 | 11949 | 11349 | 7315 | 6368 | 10143 | 6467 | 10184 | 7817 | 10408 | 9191 | 10195 |
| | 3913 | 5575 | 2363 | | | | | | | | | |
| 393: | 5476 | 3156 | 7848 | 2476 | 2917 | 2879 | 3307 | 12433 | 7564 | 3663 | 7337 | 5783 |
| | 8492 | 653 | 10313 | 3936 | 4150 | 6230 | 1268 | 618 | 12371 | 6907 | 4781 | 10328 |
| | 5762 | 7523 | 7610 | 3953 | 11848 | 8038 | 5291 | 8207 | 8717 | 10645 | 3175 | 10077 |
| | 5355 | 7843 | 12205 | 675 | 8025 | 10802 | 4230 | 7442 | 11996 | 6699 | 9826 | 1847 |
| | 1129 | 9828 | 7023 | 9128 | 7245 | 5886 | 8159 | 4379 | 7579 | 4577 | 4293 | 3338 |
| | 6458 | 3801 | 5160 | 6767 | 5447 | 4196 | 5382 | 6407 | 1389 | 11917 | 10248 | 2377 |
| | 740 | 10316 | 4945 | 3203 | 7608 | 5178 | 553 | 2461 | 2973 | 10111 | 2127 | 4848 |
| | 1026 | 11706 | 10753 | 10183 | 11627 | 9775 | 2703 | 7978 | 2569 | 5828 | 5451 | 12455 |
| | 1456 | 11283 | 1701 | 8844 | 710 | 9094 | 3956 | 4188 | 3166 | 6451 | 10587 | 6671 |
| | 8321 | 11032 | 8064 | 10543 | 991 | 3456 | 5983 | 8160 | 8490 | 3876 | 3675 | 3848 |
| | 1007 | 7687 | 780 | 10198 | 10170 | 9502 | 7586 | 4377 | 10544 | 2163 | 4597 | 1857 |
| | 4260 | 2760 | 6049 | 6397 | 7101 | 7829 | 3057 | 11110 | 11974 | 2218 | 830 | 1965 |
| | 4585 | 7985 | 5385 | 3665 | 11516 | 1085 | 8026 | 10270 | 8959 | 677 | 4810 | 4525 |
| | 8508 | 2647 | 10777 | 11654 | 8066 | 3608 | 8630 | 5491 | 9485 | 6865 | 11842 | 3552 |
| | 7034 | 11656 | 11707 | 10172 | 11547 | 10144 | 10762 | 11451 | 8610 | 12102 | 10271 | 8345 |
| | 6410 | 4709 | 3036 | 11819 | 1441 | 3088 | 1483 | 1727 | 12139 | 5187 | 5912 | 7309 |
| | 5324 | 6561 | 9499 | 12155 | 7758 | 8109 | 6547 | 7609 | 2043 | 5351 | 7456 | 5256 |
| | 8175 | 4504 | 4817 | 512 | 8191 | 5510 | 8969 | 6036 | 2631 | 12120 | 9623 | 627 |
| | 3298 | 9413 | 9691 | 6673 | 6028 | 6089 | 12168 | 8409 | 1374 | 1143 | 1523 | 1957 |
| | 1239 | 964 | 8785 | 4339 | 6876 | 10707 | 3619 | 1937 | 5233 | 5129 | 9195 | 3743 |
| | 12420 | 6343 | 1970 | 10813 | 10784 | 765 | 9308 | 3751 | 556 | 2539 | 7584 | 11347 |
| | 4941 | 8101 | 11764 | 2087 | 8554 | 5556 | 8656 | 5011 | 8371 | 6231 | 9375 | 1688 |
| | 1277 | 1863 | 6863 | 2464 | 8658 | 6914 | 6506 | 5975 | 2599 | 4775 | 2970 | 10102 |
| | 4056 | 11171 | 6469 | 4664 | 5520 | 4233 | 7877 | 11046 | 10362 | 7882 | 3399 | 4648 |
| | 11663 | 8204 | 5826 | 6600 | 7417 | 10655 | 2645 | 5846 | 11520 | 908 | 7676 | 10289 |
| | 6927 | 8934 | 1600 | 2256 | 5082 | 2966 | 11209 | 8256 | 5100 | 5234 | 7616 | 11269 |
| | 4679 | 6851 | 11874 | 8281 | 6417 | 9440 | 8060 | 4903 | 11306 | 10096 | 7188 | 3960 |
| | 4609 | 5752 | 7834 | 6130 | 9279 | 5037 | 4499 | 8894 | 11304 | 3703 | 9835 | 9539 |
| | 2198 | 11027 | 7792 | 12223 | 9024 | 7561 | 506 | 2965 | 11735 | 1324 | 2059 | 3597 |
| | 5933 | 7100 | 11400 | 7740 | 8760 | 4225 | 6430 | 12071 | 11429 | 9553 | 7828 | 10142 |
| | 2328 | 9801 | 8953 | 2978 | 7185 | 8005 | 2047 | 3834 | 9754 | 12283 | 4712 | 10223 |
| | 8557 | 4996 | 6289 | 10585 | 8497 | 4486 | 7374 | 3069 | 4157 | 12169 | 8806 | 8617 |
| | 4723 | 7812 | 10588 | 3480 | 8341 | 5952 | 1251 | 8110 | 1019 | 11680 | 2191 | 9276 |
| | 8947 | 2803 | 2269 | 10226 | 3199 | 4629 | 8357 | 1356 | 973 | 4949 | 7777 | 5004 |
| | 5617 | 2910 | 1088 | 1131 | 4382 | 8944 | 4557 | 4576 | 7734 | 2385 | 3453 | 914 |
| | 4305 | 12150 | 6718 | 5647 | 9307 | 3749 | 555 | 12257 | 8626 | 5808 | 9903 | 1300 |
| | 7723 | 5794 | 3600 | 3572 | 12280 | 9079 | 6828 | 2662 | 10017 | 2676 | 10406 | 12128 |
| | 10605 | 6838 | 11469 | 6107 | 8242 | 8927 | 4901 | 11985 | 10954 | 3043 | 10030 | 10822 |
| | 9993 | 8485 | 6944 | 5708 | 8339 | 3658 | 11312 | 1715 | 8106 | 3436 | 5946 | 11078 |
| | 10835 | 962 | 6414 | 6168 | 1486 | 8813 | 8569 | 8218 | 9842 | 6652 | 12194 | 7813 |
| | 12243 | 1391 | 12065 | 9965 | 8869 | 2811 | 4663 | 5729 | 10447 | 1650 | 7956 | 8517 |
| | 9796 | 4943 | 6065 | 11108 | 2099 | 7220 | 11806 | 7844 | 10633 | 10898 | 7691 | 10676 |
| | 11939 | 2085 | 6287 | 11789 | 7317 | 9670 | 5329 | 1498 | 8582 | 3824 | 2027 | 9148 |
| | 7379 | 11715 | 5373 | 10207 | 8534 | 7177 | 4948 | 4624 | 11841 | 2311 | 2071 | 5014 |
| | 10889 | 11736 | 1357 | 3007 | 1412 | 9396 | 4515 | 11403 | 6535 | 6006 | 3561 | 5265 |
| | 5932 | 8572 | 2034 | 5253 | 1973 | 1662 | 6198 | 3688 | 10809 | 1225 | 3208 | 3638 |
| 394: | 9790 | 5879 | 6253 | 4178 | 7414 | 668 | 3932 | 6039 | 9240 | 6497 | 707 | 1809 |
| | 11817 | 7266 | 10531 | 1832 | 5033 | 3501 | 5124 | 9856 | 7284 | 3779 | 1313 | 4142 |
| | 1504 | 1828 | 5364 | 11080 | 3912 | 8681 | | | | | | |
| 395: | 2323 | 4956 | 6172 | 1800 | 10801 | 1060 | 12405 | 2783 | 8187 | 1288 | 1426 | 1541 |
| | 7327 | | | | | | | | | | | |
| 396: | 2709 | 1262 | 5083 | 2123 | 6530 | 9041 | 4778 | 2821 | 7509 | 7002 | 5183 | 8935 |
| | 10971 | 3687 | 4584 | 7122 | 1820 | 1513 | 2355 | 6762 | 5579 | 7856 | 1115 | 5240 |
| | 3881 | 11329 | 12212 | 12006 | 766 | 10294 | 2974 | 10120 | 11070 | 3994 | 5346 | 3478 |
| | 10739 | 2935 | 1476 | 9938 | 11383 | 2621 | 3950 | 9141 | 5528 | 5357 | 11499 | 745 |
| | 1034 | 9885 | 1645 | 7498 | 1798 | 10268 | 9242 | 8855 | 6677 | 12391 | 6300 | 2625 |
| | 3980 | 8755 | 10123 | 7014 | 12133 | 2946 | 2967 | 10063 | 8021 | 6070 | 11870 | 1898 |
| | 3474 | 2387 | 1138 | 6433 | 9405 | 9703 | 9665 | 1874 | 4997 | 11912 | 5823 | 604 |
| | 8941 | 9683 | 6637 | 12124 | 6925 | 8278 | 9421 | 10643 | 9728 | 11590 | 3033 | 10708 |
| | 9776 | 8259 | 2133 | 7201 | 3141 | 5604 | 1622 | 8625 | 10177 | 6435 | 10473 | 9584 |
| | 2288 | 4984 | 8665 | 9021 | 8432 | 687 | 6024 | 12375 | 4604 | 582 | 12078 | 4508 |
| | 9765 | 6109 | 2262 | 7347 | 11526 | 10717 | 3324 | 4304 | 9063 | 4731 | 11766 | 4550 |
| | 12438 | 9125 | 3246 | 4523 | 4740 | 6617 | 6217 | 2075 | 3723 | 10468 | 7469 | 11216 |
| | 4467 | 6684 | 6929 | 3341 | 7729 | 2494 | 8780 | 9642 | 5236 | 2642 | 9639 | 4643 |
| | 7255 | 10492 | 12091 | 6586 | 2507 | 1360 | 8408 | 9606 | 8925 | 9280 | 4050 | 5290 |
| | 6048 | 1344 | 5480 | 8533 | 9429 | 9377 | 3814 | 9779 | 9289 | 10403 | 12121 | 9222 |
| | 7784 | 11901 | 5095 | 9111 | 3096 | 9372 | 5032 | 7728 | 10242 | 9788 | 3704 | 3808 |
| | 4797 | 4656 | 9489 | 10368 | 9621 | 5816 | 1339 | 1111 | 1964 | 11335 | 8067 | 7935 |
| | 12239 | 6505 | 10285 | 3691 | 9985 | 5843 | 3202 | 4605 | 7470 | 11265 | 10983 | 6195 |
| | 11511 | 577 | 8370 | 3313 | 2388 | 8463 | 2255 | 3614 | 1759 | 5093 | 8364 | 11117 |
| | 5702 | 4264 | 6761 | 6682 | 8829 | 7402 | 8431 | 11858 | 656 | 8007 | 9145 | 5063 |
| | 3174 | 2324 | 4303 | 3792 | 9884 | 6775 | 6001 | 7675 | 9634 | 9313 | 12028 | 11308 |
| | 3159 | 6974 | 9168 | 5749 | 3021 | 10836 | 7671 | 9461 | 9910 | 4300 | 11055 | 8265 |
| | 9140 | 312 | 3955 | 1431 | 2547 | 11090 | 10475 | 1447 | 3005 | 10528 | 9968 | 1287 |
| | 11505 | 9648 | 3745 | 8077 | 8329 | 6678 | 8177 | 7182 | 12399 | 8672 | 11808 | 12050 |
| | 10956 | 4702 | 2366 | 10340 | 9869 | 6899 | 8192 | 11495 | 5245 | 6132 | 1730 | 1207 |
| | 1466 | 6758 | 3193 | 9040 | 632 | 3671 | 7925 | 5595 | 5108 | 3071 | 1253 | 9131 |
| | 3977 | 1966 | 1103 | 11163 | 5831 | 4583 | 12383 | 4593 | 7113 | 9309 | 2862 | 11829 |
| | 6185 | 7597 | 10496 | 585 | 7603 | 3798 | 9118 | 9291 | 619 | 660 | 12183 | 3679 |
| | 4463 | 2345 | 4214 | 7958 | 6700 | 3735 | 5190 | 4957 | 8042 | 6476 | 6812 | 748 |
| | 8888 | 12104 | 3902 | 6187 | 3251 | 5321 | 8124 | 2102 | 4539 | 12077 | 3925 | 3859 |
| | 2490 | 11859 | 10721 | 6259 | 11136 | 6176 | 11198 | 803 | 11343 | 7496 | 11610 | 5936 |
| | 4494 | 5353 | 8726 | 11033 | 5761 | 879 | 5433 | 11442 | 6639 | 7136 | | |
| 397: | 11768 | 5972 | 8910 | 6923 | 1071 | 11851 | 3710 | 1869 | 4352 | 10083 | 5081 | 5356 |
| | 11051 | 2289 | 4439 | 7568 | 5405 | 4287 | 12135 | 2238 | 2944 | 1840 | 814 | 1365 |
| | 11685 | 7720 | 2450 | 9029 | 835 | 6444 | 12097 | | | | | |
| 398: | 2241 | 3444 | 6018 | 956 | 10922 | 12070 | 7756 | 10305 | 2233 | 4152 | 1831 | 2888 |
| | 9085 | 7130 | 9343 | 10869 | 4488 | 8664 | 5915 | 1687 | 8817 | 11945 | 7519 | 11722 |
| | 2340 | 5215 | 5565 | 3125 | 1158 | 10459 | 10104 | 9271 | 3962 | 6008 | 3648 | 1644 |
| | 7928 | 2589 | 7139 | 11905 | 4777 | 9004 | 1700 | 11514 | 11036 | 4652 | 4910 | 8706 |
| | 6911 | 5860 | 8837 | 12199 | 7806 | 6227 | 4073 | 9973 | 2733 | 11001 | 4677 | 8312 |
| | 7287 | 10325 | 521 | 6781 | 1491 | 12453 | 10517 | 2560 | 7057 | 3111 | 1821 | 5721 |
| | 7273 | 704 | 12186 | 2164 | | | | | | | | |
| 399: | 548 | 9300 | 9554 | 7547 | 8636 | 11881 | 4081 | 7368 | 10874 | 7147 | 4338 | 2672 |
| | 11463 | 897 | 5276 | 4009 | 2799 | 1012 | 1575 | 5022 | 10933 | 5070 | 6434 | 8834 |
| | 8406 | 5201 | 8190 | 12049 | 8181 | 514 | 4751 | 691 | 1767 | 6329 | 11877 | 1680 |
| | 10586 | 7377 | 2658 | 9232 | 480 | 8714 | 4954 | 3145 | 7995 | 8236 | 3581 | 6223 |
| | 10411 | 5267 | 7422 | 3748 | 2852 | 8424 | 4634 | 6391 | 3124 | 9163 | 5748 | 6437 |
| | 9868 | 11575 | 7517 | 10741 | 10982 | 8916 | 7693 | 1140 | 7885 | 554 | 7514 | 3442 |
| | 1603 | 5029 | 5123 | 8183 | 4909 | 10055 | 4431 | 5473 | 7168 | 4270 | 7849 | 7531 |
| | 5394 | 7411 | 10616 | 3995 | 2860 | 9151 | 4699 | 2282 | 8849 | 8250 | 5746 | 4599 |
| | 6543 | 8198 | 12459 | 12279 | 607 | 11063 | 1212 | 4450 | 2899 | 3979 | 9037 | 8939 |
| | 2885 | 8016 | 6074 | 9176 | 4764 | 1418 | 6932 | 7599 | 640 | 4267 | 10800 | 1961 |
| | 1175 | 9484 | 1927 | 6577 | 11918 | 5133 | 8223 | 3567 | 5066 | 1789 | 8592 | 9415 |
| | 1359 | 9807 | 9047 | 4922 | 8086 | 988 | 3032 | 2572 | 12081 | 9637 | 4095 | 2630 |
| | 6483 | 11583 | 5674 | 11611 | 9987 | 8434 | 6803 | 8317 | 8909 | 2060 | 9595 | |
| 400: | 3594 | 5858 | 6163 | 8162 | 5298 | 6877 | 9676 | 7641 | 7335 | 11393 | 3236 | 10613 |
| | 8880 | 928 | 5961 | 5117 | 5323 | 11677 | 7040 | 9672 | 626 | 11053 | 10989 | 7333 |
| | 4094 | 8536 | 10370 | 10189 | 6608 | 2659 | 11501 | 2780 | 5252 | 1180 | 2806 | 611 |
| | 5273 | 698 | 9186 | 8885 | 813 | 8008 | 11483 | 1722 | 5973 | 3970 | 12157 | 3681 |
| | 5384 | 1502 | 5038 | 7864 | 9886 | 12360 | 10487 | 3582 | 6067 | 536 | 9997 | 11573 |
| | 4836 | 5853 | 11038 | 2661 | 8809 | 11980 | 1396 | 1350 | 7475 | 7888 | 12350 | 2466 |
| | 6947 | 6793 | 9650 | 10087 | 11195 | 5024 | 789 | 2707 | 6485 | 8289 | 5193 | 1462 |
| | 7392 | 5069 | 12069 | 10754 | 4717 | 5452 | 9067 | 5340 | 7623 | 3952 | 5417 | 11597 |
| | 3826 | 5648 | 11720 | 4998 | 9061 | 10975 | | | | | | |
| 401: | 11218 | 10912 | 3778 | 3297 | 9967 | 6495 | 12167 | 12233 | 9791 | 6623 | 9588 | 10369 |
| | 11113 | 1522 | 4935 | 3583 | 5697 | 5283 | 11315 | 1860 | 9530 | | | |
| 402: | 7156 | | | | | | | | | | | |
| 403: | 1556 | 906 | 2463 | 4200 | 3646 | 6052 | 7351 | 7138 | 12208 | 3362 | 5601 | 4063 |
| | 9933 | 10137 | 4783 | 7869 | 11375 | 3335 | 6733 | 12390 | 11524 | 11659 | 8359 | 2685 |
| | 7053 | 12265 | 11011 | 7166 | 3975 | 11317 | 4015 | 4255 | 7397 | 5041 | 12284 | 10201 |
| | 8893 | 10113 | 6482 | 4013 | 11697 | 6646 | 7815 | | | | | |
| 404: | 10847 | 2334 | 10082 | 10701 | 2901 | 11454 | 6589 | 5539 | 10131 | 6475 | 2653 | 10407 |
| | 4346 | 9358 | 3370 | 3643 | 685 | 3626 | 10187 | 1272 | 7016 | 3516 | 12325 | 8216 |
| | 1736 | 7213 | 12278 | 12341 | | | | | | | | |
| 405: | 4331 | 4736 | 7999 | 9625 | 7541 | 3731 | 10849 | 4158 | 11047 | 2576 | 2894 | 9714 |
| | 4155 | 10797 | 3770 | 8814 | 594 | 3515 | 7669 | 7539 | 7108 | 1782 | 5440 | 12122 |
| | 7376 | 5681 | 4269 | 10893 | 8383 | 2313 | 9571 | 9251 | 793 | 5819 | 2865 | 11777 |
| | 11121 | 10635 | 4551 | 8870 | 7765 | 6238 | 1046 | 8072 | 6340 | 5533 | 8503 | 3172 |
| | 9743 | 9558 | 7818 | 2335 | 4582 | 2249 | 4863 | 7646 | 6380 | 2304 | 9881 | 1855 |
| | 5057 | 11868 | 9613 | 2480 | 8523 | 10079 | 10398 | 6542 | 4114 | 8769 | 8798 | 4484 |
| | 2217 | 6122 | 4417 | 2193 | 4381 | 10252 | 4498 | 11771 | 5626 | 7095 | 3326 | 7825 |
| | 11761 | 12245 | 6606 | 3489 | 1155 | 10949 | 5767 | 7861 | 11486 | 9381 | 4554 | 2297 |
| | 11621 | 12066 | 10744 | 8732 | 5582 | 6819 | 9146 | 11127 | 4109 | 515 | 550 | 5855 |
| | 4340 | 1648 | 10402 | 11498 | 9972 | 4832 | 3467 | 5797 | 2114 | 3395 | 9179 | 538 |
| | 5186 | 810 | 3386 | 1331 | 631 | 9471 | 6946 | 11710 | 8206 | 2521 | 3777 | 9766 |
| | 1713 | 3653 | 1921 | 6656 | 9947 | 8993 | 11250 | 11151 | 10497 | 6934 | 2737 | 6862 |
| | 11088 | 3984 | 7363 | 10282 | 743 | 9608 | 3919 | 1981 | 7086 | 1454 | 4396 | 5114 |
| | 10991 | 4459 | 7881 | 6848 | 2296 | 8912 | 1805 | 3511 | 8065 | 1761 | 7132 | 6910 |
| | 10730 | 5195 | 3930 | 9587 | 3635 | 1390 | 3281 | 9154 | 12431 | 5562 | 2544 | 11742 |
| | 904 | 5957 | 8429 | 7356 | 9493 | 881 | 10094 | 1121 | 5637 | 7367 | 5392 | 898 |
| | 9656 | 6463 | 3636 | 11365 | 2616 | 8771 | 11943 | 8085 | 8559 | 11564 | 4481 | 10783 |
| | 8994 | 2809 | 9583 | 9144 | 8425 | 2285 | 11557 | 4876 | 12312 | 4919 | 7482 | 8180 |
| 406: | 12179 | 1132 | 4407 | 8525 | 8006 | 6599 | 6212 | 6582 | 6696 | 10015 | 8938 | 12040 |
| | 7174 | 5901 | 5443 | 8772 | 2754 | 1018 | 701 | 4168 | 3866 | 2830 | 7410 | 8541 |
| | 4867 | 12127 | 4786 | 2881 | 993 | 1626 | 10257 | 590 | 4613 | 3686 | 8232 | 10988 |
| | 8611 | 6659 | 11951 | 11970 | 5790 | 694 | 1950 | 8687 | 3243 | 1611 | 5068 | 2583 |
| | 3374 | 11300 | 4978 | 3290 | 4685 | 9245 | 8524 | 3226 | 3564 | 8297 | 5791 | 10743 |
| | 5514 | 12404 | 4160 | 10761 | 6264 | 3455 | 7381 | 4530 | 7088 | 11724 | 1340 | 12221 |
| | 3372 | 2172 | 9900 | 3009 | 6215 | 8149 | 5967 | 4031 | 516 | 2159 | 6152 | 2119 |
| | 7625 | 5636 | 11581 | 10329 | 3927 | 6951 | 5300 | 1666 | 5792 | 7176 | 1908 | 8776 |
| | 10334 | 7755 | 4489 | 4839 | 7621 | 3504 | 11772 | 2455 | 1709 | | | |
| 407: | 5164 | 1712 | 2856 | 7349 | 10914 | 10129 | 568 | 7679 | 2988 | 11811 | 1995 | 11589 |
| | 10850 | 4503 | 1298 | 1746 | 8590 | 10650 | 7429 | 10880 | 3268 | 11798 | 7896 | 3503 |
| | 10856 | 11820 | 7004 | 4010 | 6035 | 12068 | 5519 | 12333 | 1022 | 2020 | 5260 | 8174 |
| | 1100 | 6002 | 852 | 2265 | 1280 | 6971 | 6023 | 3217 | 9083 | 2999 | 3784 | 5278 |
| | 5773 | 11107 | 2778 | 9893 | 1283 | 4999 | 9158 | 4760 | 6513 | 10372 | 4789 | 8368 |
| | 7638 | 5532 | 1078 | 3476 | 2773 | 6243 | 7947 | 7219 | 3013 | 4542 | 7485 | 5050 |
| | 10180 | 2741 | 9397 | 7909 | 12344 | 8653 | 8161 | 7700 | 6270 | 10424 | 9386 | 12053 |
| | 2551 | 4239 | 7195 | 5742 | 2563 | 10387 | 9943 | 10591 | 12293 | 8401 | 598 | 10190 |
| | 1518 | 3262 | 8393 | 9357 | 3753 | 10634 | 8622 | 792 | 5503 | 6749 | 5779 | 9627 |
| | 8899 | 894 | 3609 | 868 | 2666 | 8379 | 7943 | 6084 | 8171 | 5415 | 10619 | 5830 |
| | 8058 | 11606 | 6777 | 5615 | 8744 | 8385 | 6352 | 5732 | 565 | 3042 | 4825 | 6372 |
| | 11714 | 8638 | 9414 | 6904 | 4707 | 3698 | 10607 | 3354 | 3248 | 11099 | 7933 | 2618 |
| | 7997 | 9721 | 5710 | 7081 | 1067 | 12401 | 11254 | 3611 | 5832 | 6837 | 3494 | 8037 |
| | 4520 | 10630 | 9206 | 9326 | 10451 | 1194 | 12033 | 1368 | 10356 | 3752 | 2069 | 4191 |
| | 11510 | 2671 | 4989 | 805 | 7527 | 10679 | 2579 | 9477 | 4068 | 9127 | 5744 | 2044 |
| | 3843 | 7704 | 8248 | 1156 | 6991 | 12007 | 10035 | 5766 | 4610 | 11421 | 7453 | 8264 |
| | 2829 | 2728 | 5859 | 4491 | 4669 | 6872 | 10873 | 11437 | 4497 | 1179 | 6983 | 809 |
| | 680 | 11745 | 10224 | 2441 | 1029 | 3485 | 10593 | 8293 | 11196 | 4444 | 787 | 9912 |
| | 3466 | 12067 | 11522 | 11328 | 11168 | 10705 | 3103 | 11637 | 7146 | 7013 | 12203 | 7272 |
| | 11183 | 8872 | 2339 | 3689 | 4671 | 6439 | 1564 | 2891 | 2326 | 10816 | 2058 | 9167 |
| 408: | 6842 | 10832 | 1752 | 6874 | 7594 | 7652 | 10728 | 8591 | 5091 | 1745 | | |
| 409: | 3390 | 11580 | 1139 | 2740 | 3398 | 7297 | 8096 | 11461 | 1994 | 9590 | 10039 | 4519 |
| | 1327 | 5914 | 1924 | 498 | 2711 | 11643 | 2492 | 10450 | | | | |
| 410: | 2556 | 8787 | 2810 | 2752 | 4019 | 849 | 2525 | 848 | 543 | 10440 | 5587 | 2687 |
| | 10565 | 7329 | 4633 | 10365 | 1469 | 1013 | 9911 | 6199 | 5552 | 7253 | 3387 | 6581 |
| | 6753 | 2212 | 7451 | 10191 | 9661 | 10472 | 8604 | 3947 | 1318 | 10341 | 3903 | 4192 |
| | 782 | 4804 | 4555 | 7605 | 3606 | 5072 | 11652 | 11756 | 10926 | 3556 | | |
| 411: | 10755 | 6544 | 11218 | 10912 | 3778 | 8555 | 12233 | 12167 | 9791 | 6623 | 10444 | 9588 |
| | 10369 | 5824 | 9682 | 7746 | 5706 | 11642 | 9212 | 4935 | 5697 | 8715 | 5283 | 11315 |
| | 4900 | 12457 | 858 | 10937 | 9530 | | | | | | | |
| 412: | 4734 | 2240 | 9031 | 2437 | 8481 | 8643 | 4962 | 4203 | 7203 | 10390 | 10086 | 5814 |
| | 11371 | 10513 | 9742 | 10945 | 9859 | 1632 | 1615 | 7063 | 11339 | | | |
| 414: | 7193 | 8549 | 8168 | 5092 | 8861 | 11989 | 11947 | 11178 | 5786 | 2453 | | |
| 415: | 6653 | 6714 | 9983 | 4083 | 3854 | 2748 | 7708 | 9764 | 5629 | 981 | 3439 | 10469 |
| | 7346 | 4782 | 12349 | 3163 | 8949 | 3899 | 5805 | 10540 | 5864 | 6450 | 7761 | 12090 |
| | 5874 | | | | | | | | | | | |
| 416: | 1842 | 3162 | 8971 | 3427 | 6054 | 10217 | 8729 | 1754 | 6622 | 7952 | 9382 | 11862 |
| | 7142 | 634 | 7239 | 8770 | 4506 | 8586 | 1200 | 6367 | 2113 | 12058 | 3323 | 6474 |
| | 3605 | 8047 | 4705 | 8976 | 2623 | 6722 | 2275 | 9503 | 11414 | 7230 | 487 | 7173 |
| | 6327 | 7450 | 1086 | 11139 | 10969 | 7580 | 6856 | 10788 | 9715 | 4755 | 2923 | 11730 |
| | 12425 | 3020 | 5599 | 9044 | 7078 | 10584 | 11212 | 10871 | 2684 | 1969 | 5930 | 6055 |
| | 4070 | 639 | 11128 | 1295 | 7529 | 2775 | 2543 | 11636 | 6598 | 1208 | 6425 | 11359 |
| | 3998 | 6252 | 8348 | 11758 | 8667 | 7592 | 6546 | 11716 | 6560 | 10277 | 7395 | 10601 |
| | 9873 | 5107 | 10240 | 5208 | | | | | | | | |
| 417: | 6345 | 1856 | 10958 | 11096 | 10013 | 593 | 11755 | 7187 | 6816 | 10906 | 1199 | 5652 |
| | 8452 | 7056 | 3701 | 11373 | 3562 | 12181 | 2950 | 10597 | 8606 | 5254 | 8728 | 4082 |
| | 1210 | 7300 | 3896 | 12382 | 9952 | 788 | 11241 | 10507 | 11750 | 3136 | 6728 | 9465 |
| | 3722 | 12351 | 6337 | 3008 | 6858 | 573 | 10437 | 1050 | 3645 | 9808 | 9256 | 2509 |
| | 11883 | 4020 | 11479 | 3254 | 9727 | 4044 | 12460 | 2628 | 12255 | 8136 | 5704 | 7735 |
| | 9066 | 7332 | 5711 | 4229 | 1182 | 1576 | 3656 | 11805 | 11485 | 6960 | 6101 | 2011 |
| | 8111 | 6996 | 4209 | 7129 | 12307 | 481 | 8243 | 5287 | 7912 | 10962 | 703 | |
| 418: | 3811 | 5219 | 1679 | 4621 | 4127 | 10675 | 6404 | 5800 | 3921 | 6511 | 9681 | 903 |
| | 10538 | 3558 | 4466 | 6175 | 10545 | 5132 | 2921 | 5857 | 12143 | 7941 | 7286 | 11968 |
| 419: | 3771 | 8363 | 9548 | | | | | | | | | |
| 420: | 1485 | 4911 | 7178 | 9071 | 11509 | 6647 | 1721 | 4460 | 947 | 513 | 2348 | 7249 |
| | 11150 | 11747 | 2997 | 11191 | 11443 | 3662 | 8453 | 2753 | 11791 | 6481 | 11420 | 5483 |
| | 10462 | 4788 | 4507 | 8877 | 4008 | 11334 | 8575 | 6731 | 9135 | 6192 | 2317 | 608 |
| | 5979 | 3055 | | | | | | | | | | |
| 421: | 4414 | 9504 | 1165 | 5341 | 9784 | 11748 | 9107 | 10327 | 1525 | 12240 | 10723 | 1910 |
| | 11286 | 6078 | 6558 | 9736 | 7526 | 9617 | 6173 | 5966 | 5586 | 6120 | 2380 | 9205 |
| | 6319 | 7575 | 10097 | 11594 | 8356 | 9671 | 2500 | 4722 | 2986 | 4959 | 6245 | 3949 |
| | 11353 | 2855 | 9054 | 2577 | 7071 | 5896 | 11794 | 11561 | 7197 | 4389 | 7336 | 1643 |
| | 1201 | | | | | | | | | | | |
| 422: | 6674 | 12454 | 8443 | 3602 | 3012 | 6541 | 10495 | 6389 | 2952 | 9267 | 11311 | 12145 |
| | 10737 | 9521 | 3700 | 3883 | 6429 | 4242 | | | | | | |
| 423: | 3471 | 3462 | 11861 | 2211 | 7320 | 5075 | 4333 | 1836 | 6400 | 5796 | 4892 | 647 |
| | 3269 | | | | | | | | | | | |
| 424: | 5926 | 9559 | 5422 | 9498 | 5418 | 11106 | 3035 | 6102 | 6592 | 2150 | 8390 | 6071 |
| | 7591 | 11796 | 9586 | 11310 | 4368 | 5758 | 588 | 2542 | 1781 | 12236 | 9803 | 7747 |
| | 10979 | 927 | 7683 | 3965 | 4678 | 5214 | 2604 | 8270 | 3304 | 5616 | 10831 | 2393 |
| | 8080 | 4535 | 3410 | 7371 | 11565 | 2493 | 7055 | 9785 | 2720 | 5980 | 10682 | 7295 |
| | 10506 | 2982 | 10793 | 6985 | 8126 | 6218 | 11609 | 12193 | 2042 | 12304 | 2254 | 11445 |
| | 7375 | 2510 | 8946 | 885 | 6891 | 9150 | 10623 | 9341 | 8952 | 10725 | 6292 | 8420 |
| | 4743 | 1894 | | | | | | | | | | |
| 425: | 3122 | 11494 | 10549 | 2650 | 1897 | 3804 | 5390 | 1379 | 3184 | 3716 | 2654 | 10037 |
| | 1473 | 9971 | 2731 | 5778 | 4313 | 6129 | 9561 | 10606 | 10693 | 8120 | 4938 | 4049 |
| | 4060 | 4413 | 3409 | 3015 | 2351 | 1939 | | | | | | |
| 426: | 11847 | 2995 | 4737 | 7277 | 3895 | 5688 | 1959 | 4452 | 843 | 6336 | 3128 | 11563 |
| | 2964 | 10486 | 7718 | 8069 | 12080 | 6015 | 8205 | 10512 | 2963 | 888 | 9812 | |
| 427: | 10318 | 1515 | 1150 | 11130 | | | | | | | | |
| 428: | 9750 | 6331 | 3027 | 10875 | 3668 | 7005 | 9306 | 12430 | 6106 | 9190 | 654 | 1670 |
| | 9862 | 10048 | 4319 | 7716 | 5492 | 6892 | 9026 | 6462 | 6737 | 6645 | 4749 | 10098 |
| | 12000 | 547 | 7562 | 6456 | | | | | | | | |
| 429: | 6568 | 8052 | 10608 | 1308 | 9065 | 8831 | 7384 | 8709 | 7350 | 4327 | 10609 | 12288 |
| | 9820 | 4100 | 4795 | 11684 | 7622 | 9929 | 1098 | 3192 | 4059 | 9182 | 8353 | 9417 |
| | 7137 | 5152 | 11660 | 2940 | 11467 | 2933 | 6145 | 5109 | 4388 | | | |
| 430: | 8584 | 2261 | 7656 | 2018 | 11538 | 9342 | 12107 | 12164 | 6293 | 7936 | 1661 | 11624 |
| | 4853 | | | | | | | | | | | |
| 431: | 9116 | 2171 | 7602 | 8690 | 9883 | 4473 | 6085 | 10435 | 6301 | 2203 | 9928 | 7190 |
| | 10147 | 10470 | 1862 | 2182 | 932 | 3025 | 12251 | 8266 | 7662 | 4231 | 8640 | 12434 |
| | 2151 | 4372 | 1033 | 9126 | 9810 | 3495 | 509 | 7612 | 5354 | 10770 | 10651 | 987 |
| | 9365 | 4813 | | | | | | | | | | |
| 432: | 7570 | 5554 | 4754 | 8362 | 2230 | 8469 | 9220 | 3329 | 6080 | 4356 | 9349 | 7994 |
| | 5043 | 887 | 9216 | 8097 | 4101 | 3358 | 10171 | 3190 | 10790 | 1501 | 501 | 2633 |
| | 8399 | 9527 | 6324 | 3571 | 7233 | 5016 | 1930 | 1811 | | | | |
| 433: | 1616 | 6093 | 10298 | 1333 | 9124 | 11229 | 6566 | 6576 | 11833 | 11357 | 8833 | 6618 |
| | 841 | 5759 | 1301 | 4182 | 6040 | 11022 | 8365 | 7079 | 6280 | 10112 | 7920 | 4834 |
| | 4980 | 3886 | 8075 | 5735 | 8404 | 1617 | | | | | | |
| 434: | 4462 | 1934 | 5148 | 10841 | 4816 | 5523 | 7587 | 9228 | 2939 | 4241 | 10393 | 11815 |
| | 3818 | 4301 | 11539 | 1425 | 3957 | 11067 | 6304 | | | | | |
| 435: | 7874 | 3332 | 1892 | 10839 | 1297 | 5020 | 4526 | 2872 | 6273 | 7274 | 6987 | 11568 |
| | 2916 | 5869 | 4913 | 5518 | 8150 | 7269 | 4374 | 7658 | 5945 | 5159 | 6063 | 4277 |
| | 3391 | 8028 | 9423 | 9197 | 2132 | 1694 | 3525 | 11460 | 1307 | 7893 | 12353 | 5297 |
| | 10567 | 12185 | 11482 | 4069 | 10140 | 6113 | 4710 | 8613 | 942 | 9030 | 12386 | 1875 |
| | 7823 | 6994 | 10615 | 1377 | 3165 | 1422 | 2346 | 944 | 7149 | 4721 | 9942 | 3253 |
| | 9534 | 8437 | 9109 | 6583 | 8269 | 5181 | 3727 | 2785 | 11616 | 10928 | 6013 | 3851 |
| | 6779 | 11345 | 3888 | 8115 | 12234 | 1593 | 11166 | 5064 | 9064 | 8068 | 2920 | 11723 |
| | 1292 | 3068 | | | | | | | | | | |
| 436: | 6347 | 3468 | 11338 | 11409 | 12270 | 6989 | 2546 | 5731 | 6603 | 9120 | 10134 | 11132 |
| | 8045 | 3411 | 9970 | 4217 | 8868 | 6022 | 11364 | 7706 | 8499 | 10764 | 2259 | 8466 |
| | 2660 | 11256 | 10381 | 4994 | 10726 | 7766 | 2412 | 6096 | 5641 | 505 | 7223 | 9020 |
| | 3178 | 1876 | 7265 | 3623 | 6409 | 508 | 507 | 1016 | | | | |
| 437: | 684 | 7280 | 11639 | 2549 | 7965 | 8231 | 10595 | 7331 | 6105 | 8144 | 9633 | 2093 |
| | 9958 | 4276 | 11512 | 2675 | 4465 | 7787 | 11641 | 10917 | | | | |
| 438: | 9852 | 9813 | 3420 | 3677 | 6942 | 3277 | 6017 | 791 | 7627 | 11435 | 3897 | 5927 |
| | 4207 | 7673 | 10919 | 8597 | 10213 | 7914 | 825 | 6981 | 4752 | 4018 | 4039 | 11441 |
| | 9737 | 9811 | 643 | 4090 | 4666 | 4546 | 6461 | 2864 | 1198 | 10505 | 1414 | 8510 |
| | 1332 | 9632 | 6508 | 9748 | 5207 | 7702 | 3747 | 12087 | 3357 | 9406 | 3417 | 4104 |
| | 3657 | 3772 | 11104 | 8237 | 8514 | 8436 | 2571 | 4116 | 3922 | 8122 | 6209 | 10639 |
| | 693 | 732 | 4062 | 7892 | 686 | 3094 | 3499 | 3000 | 2167 | 6655 | 1509 | 10401 |
| | 1427 | 1579 | 2802 | 9356 | 8013 | 6206 | 3904 | 7261 | 9433 | 934 | 510 | 6382 |
| | 8330 | 9157 | 10376 | 9699 | 832 | 1479 | 7796 | 2553 | 7440 | 3791 | 1738 | 5177 |
| | 7444 | 12266 | 3261 | 1236 | 5344 | 3157 | 5577 | 4289 | 9028 | 2374 | 9986 | 4510 |
| | 5313 | 12252 | 4434 | 9805 | 4625 | 2489 | 1554 | 2057 | 8415 | 7724 | 6950 | 3790 |
| | 10071 | 1888 | 10647 | 2936 | 9844 | 6590 | 642 | 5953 | 9569 | 11882 | 6358 | 2897 |
| | 2797 | 5667 | 3259 | 1008 | 2009 | 9475 | 11260 | 1252 | 8074 | 3306 | 4480 | 6785 |
| | 10892 | 7801 | 2478 | 12060 | 10181 | 10457 | 11313 | 11251 | 10961 | 5398 | 11091 | 1021 |
| | 8867 | 11189 | 2479 | 1526 | 2174 | 11424 | 6658 | 4950 | 11613 | 12337 | 2055 | 4096 |
| | 11784 | 5724 | 6115 | 11058 | 9979 | 6460 | 5035 | 6730 | 4923 | 6381 | 6683 | 3081 |
| | 6021 | 11093 | 12172 | 6580 | 7672 | 6698 | | | | | | |
| 439: | 9050 | 1624 | 11490 | 9137 | 4683 | 1472 | 11419 | 11201 | 12153 | 11407 | 2333 | 8918 |
| | 12149 | 10769 | 2801 | 9090 | 6033 | 5211 | 11474 | 12365 | 5630 | 12100 | 6330 | 2526 |
| | 2036 | | | | | | | | | | | |
| 440: | 5951 | 3216 | 9673 | 4696 | 9814 | 3530 | 10953 | 5785 | 720 | 6518 | 1693 | 11588 |
| | 10246 | 7120 | 5040 | 10911 | 11834 | 8071 | 11378 | 3196 | 5717 | 9753 | 5644 | |
| 441: | 7707 | 8538 | 2341 | 7194 | 5074 | 5690 | 2147 | 2538 | 9725 | 10428 | 4880 | 5920 |
| | 10970 | 6335 | 7744 | 8342 | 11672 | 5446 | 6675 | 8117 | 1618 | 6922 | 6664 | 1708 |
| | 10501 | 3809 | 2321 | 1477 | 3404 | 8823 | 5288 | 1911 | 4926 | | | |
| 442: | 11879 | 6492 | 3887 | 756 | 4733 | 6158 | 1728 | 5673 | 5481 | 11069 | 12381 | 1890 |
| | 1649 | 2930 | 2784 | 6431 | 1020 | 3078 | 9576 | 3232 | 7334 | 2622 | 4189 | 8439 |
| | 3249 | 3593 | 4179 | 4841 | 5713 | 12338 | 10718 | 6823 | 6695 | 3315 | 6663 | |
| 443: | 2994 | 605 | 1631 | 6296 | 1844 | 11844 | 3084 | 9395 | 1933 | 8702 | 7786 | 11988 |
| | 2128 | 10660 | 5251 | 6665 | 7785 | 5248 | 9981 | 11142 | 4174 | 3452 | 3303 | 12156 |
| | 4698 | 12118 | 2699 | 12096 | 7773 | 10611 | 2953 | 5956 | 12178 | 12170 | 5672 | 9916 |
| | 7788 | 4953 | 11739 | 4556 | 6260 | 11846 | 3109 | 8488 | 8674 | 9574 | 8624 | 3734 |
| | 11566 | | | | | | | | | | | |
| 444: | 11436 | 9600 | 4036 | 2771 | 1190 | 6072 | 6982 | 2138 | 5753 | 5102 | 4767 | 7415 |
| | 9797 | 5570 | 7192 | 1387 | 4343 | 2370 | 5680 | 10618 | 5872 | 3634 | 11291 | 10696 |
| | 1986 | 9618 | 10628 | 10894 | 1404 | 5877 | 9827 | 6200 | 1273 | 9615 | 2105 | 6034 |
| | 10168 | 4940 | 1734 | 8417 | 8948 | 3019 | 8808 | | | | | |
| 445: | 5898 | 11158 | 5363 | 4614 | 479 | 7670 | 4772 | 679 | 6014 | 3641 | 11608 | 11120 |
| | 8644 | 8810 | 9334 | 12142 | 6025 | 10895 | 5777 | 923 | 11900 | 9914 | 580 | 1904 |
| | 3473 | 8157 | 9546 | 10735 | 1346 | 4635 | 12408 | 5326 | 10987 | 4765 | 12292 | 2408 |
| | 3705 | 11060 | 920 | 10127 | 11506 | 11960 | 6468 | 2264 | 2469 | 7344 | 5771 | 9604 |
| | 2225 | 2423 | 5614 | 6255 | 4052 | 3890 | 5154 | 4753 | 2006 | 4144 | 913 | 1893 |
| | 11578 | 1641 | 10844 | 7418 | 4406 | 8743 | 3664 | 7010 | 6263 | 9188 | 8333 | 11184 |
| | 3586 | 7119 | 4592 | 10897 | 1543 | 4041 | 3967 | 10446 | 6161 | 8214 | 9019 | 8506 |
| | 8178 | 8166 | 2609 | 6272 | 11990 | 10220 | 10720 | 4720 | 1372 | 8999 | 5687 | 1064 |
| | 2764 | 7876 | 2726 | 10484 | 8618 | 8445 | 878 | 11391 | 5389 | 1532 | 4482 | 2194 |
| | 5970 | 2854 | 1329 | 5025 | 8114 | 12116 | 540 | 8209 | 6786 | 1605 | 3796 | 9500 |
| | 6774 | 2846 | 6204 | 7569 | 9752 | 3423 | 2248 | 2665 | 8972 | 12410 | 8446 | 3821 |
| | 8648 | 9439 | 6312 | 733 | 11327 | 2605 | 8876 | 10319 | 7537 | 5908 | 4987 | 9013 |
| | 3443 | 9602 | 12276 | 7661 | 1274 | 10200 | 5396 | 11003 | 10042 | 11749 | 8121 | 11076 |
| | 9974 | 11026 | 1419 | 10891 | 1463 | 5977 | 2460 | 6881 | 10165 | 3756 | 2451 | 5549 |
| | 1517 | 2237 | 9215 | 4893 | 6903 | 10551 | 603 | 8871 | 3933 | 7551 | 7660 | 6459 |
| | 2448 | 10902 | 11799 | 12162 | 11708 | 5866 | 3938 | 11582 | 5019 | 9219 | 1223 | 2361 |
| | 3750 | 10152 | 5770 | 8615 | 4412 | 7727 | 1552 | 5097 | 10590 | 6782 | 9346 | 10110 |
| | 8347 | 1399 | 4798 | 8063 | 10203 | 7369 | 3212 | 3929 | 4222 | 2932 | 2814 | 2808 |
| | 4003 | 6572 | 10580 | 7424 | 7144 | 10581 | 8029 | 614 | 12041 | 9422 | 11418 | 7355 |
| | 4890 | 9654 | 3858 | 6591 | 526 | | | | | | | |
| 446: | 2763 | 11630 | 10646 | 5423 | 8132 | 999 | 1338 | 3592 | 12392 | 1695 | 1880 | |
| 447: | 5756 | 4298 | 9204 | 3118 | 7348 | 2187 | 6044 | 11528 | 3135 | 8988 | 3176 | 11446 |
| | 4858 | 5386 | 6613 | | | | | | | | | |
| 449: | 12062 | 3366 | 9305 | 2281 | 4123 | 4637 | 8367 | 769 | 2719 | 4653 | 1084 | 7458 |
| 450: | 12147 | 9257 | 3555 | 5006 | 5380 | 3990 | 699 | 7196 | 8444 | 1317 | 486 | 5669 |
| | 9008 | 10806 | 1852 | 3245 | 1913 | | | | | | | |
| 451: | 7961 | 6784 | 10385 | 12354 | 865 | 6268 | 12456 | 4879 | 11331 | 1843 | 3415 | 3457 |
| | 8727 | 9428 | 4065 | 1063 | 1920 | 845 | 10276 | 6165 | 12385 | 11052 | 4847 | 4310 |
| | 4673 | 2038 | 4649 | 9641 | 2122 | 7093 | 11894 | 3047 | 6855 | 561 | 8107 | 4273 |
| | 7069 | 9794 | 9178 | 12356 | 1917 | 6681 | 10830 | 10176 | 11333 | 7035 | 11763 | 2291 |
| | 9680 | 10796 | 6237 | 2745 | 8942 | 1107 | 5551 | 2354 | 8913 | 5062 | 2272 | 10205 |
| | 6966 | 8747 | 11111 | 5876 | 5902 | 9949 | 12045 | | | | | |
| 452: | 6394 | 10174 | 11264 | 2929 | 1796 | 12463 | 7434 | 9390 | 4194 | 2477 | 11245 | 3690 |
| | 1838 | 5530 | 1929 | 9136 | 7237 | 989 | 11473 | 6317 | 11703 | 7760 | 2499 | 9922 |
| | 7259 | 6310 | 2561 | 2364 | 10199 | 11466 | 796 | | | | | |
| 453: | 6394 | 10174 | 11264 | 2929 | 1796 | 12463 | 9390 | 7434 | 4194 | 2477 | 11245 | 5530 |
| | 1838 | 1929 | 7237 | 989 | 7421 | 9348 | 1044 | 4048 | 10219 | 9509 | 8398 | 5286 |
| | 5871 | 11487 | 980 | 7210 | 816 | 796 | | | | | | |
| 454: | 6625 | 1795 | 11957 | 10600 | 4695 | 8786 | 1854 | 826 | 8093 | 5089 | 8783 | 5261 |
| | 542 | 6979 | 12146 | 11354 | 11208 | 4567 | 3736 | 3070 | 3227 | 2154 | 7613 | 9181 |
| | 2375 | 7852 | 10957 | 10358 | 4616 | 8853 | 2165 | | | | | |
| 455: | 11314 | 10125 | 5372 | 1221 | 9486 | 8375 | 5654 | 7809 | 1768 | 3229 | 4762 | 10599 |
| | 4701 | | | | | | | | | | | |
| 456: | 8762 | 11259 | 9107 | 10327 | 1525 | 10723 | 11286 | 8082 | 8795 | 7526 | 1751 | 9617 |
| | 6173 | 10210 | 8996 | 5165 | 9994 | 10981 | 2651 | 8924 | 5646 | 10734 | 1043 | 6503 |
| | 7160 | 674 | 10942 | 6208 | 2500 | 2232 | 5435 | 8003 | 7775 | 7197 | 11386 | 9614 |
| | 7336 | 4389 | 1201 | | | | | | | | | |
| 457: | 6933 | 2534 | 5034 | 10920 | 4668 | 801 | 7463 | 9241 | 4122 | 10093 | 8480 | 1669 |
| | 4875 | | | | | | | | | | | |
| 458: | 12340 | 917 | 2331 | 6174 | 4354 | 1998 | 5058 | 11006 | 9105 | 6744 | 12417 | 3551 |
| | 10011 | 2512 | 3369 | | | | | | | | | |
| 459: | 1750 | 2582 | 939 | 7800 | 4167 | 10863 | 1778 | 3187 | 3119 | 8688 | 9519 | 7715 |
| | 3465 | 8518 | 7218 | 3654 | 9851 | 3214 | 9839 | 8754 | 11131 | 3785 | 10516 | 5456 |
| | 1066 | 9161 | 2498 | 7968 | 4449 | 8957 | 11214 | 11622 | 11993 | 12161 | | |
| 460: | 3393 | 11215 | 6311 | 8704 | 11428 | 12454 | 7996 | 9854 | 1062 | 3012 | 10737 | 12145 |
| | 4242 | | | | | | | | | | | |
| 461: | 1596 | 11261 | 12367 | 6847 | 9799 | 1697 | 3584 | 4419 | | | | |
| 462: | 2559 | 3211 | 8719 | 9526 | 912 | 8678 | 9169 | 529 | 7339 | | | |
| 463: | 8985 | 11453 | 9101 | 1592 | 996 | 9514 | 8633 | 664 | 10466 | 11427 | 8230 | 2310 |
| | 3910 | 4193 | 2788 | 12130 | 1565 | 10560 | 8540 | 6384 | 11084 | 4965 | 9345 | 1623 |
| | 3579 | 12441 | 9119 | 1042 | 3490 | 8581 | 6214 | 7907 | | | | |
| 464: | 5490 | 9114 | 10657 | 1047 | 9324 | 2641 | 3532 | | | | | |
| 465: | 5468 | 6657 | 4173 | 4351 | 1080 | 4899 | 8973 | 2817 | 10047 | 7847 | 1370 | 2389 |
| | 11692 | 10139 | 7089 | 6369 | 5848 | 9153 | 2447 | 6533 | 10312 | 3428 | 12166 | 7229 |
| | 12336 | 1718 | 4369 | 11599 | 3520 | 1903 | 12300 | 1482 | | | | |
| 466: | 1224 | 5723 | 2541 | 11729 | 5963 | 4598 | 5738 | 2220 | 8201 | 5996 | 11234 | 5067 |
| | 943 | 2089 | 10322 | | | | | | | | | |
| 467: | 11200 | 7567 | 3580 | 4845 | 2181 | 10852 | 549 | 2202 | 11686 | 1089 | 7836 | 9898 |
| | 1118 | 4587 | 4761 | 11028 | 7798 | 9104 | 8548 | 7649 | 5889 | 1358 | 3846 | 12287 |
| | 10700 | 8601 | 5442 | 2137 | 10267 | 7042 | 2634 | 760 | 1406 | 9108 | 5922 | 3789 |
| | 6004 | 4198 | 10766 | 2454 | 3807 | 12306 | 12290 | 11237 | 9088 | 7917 | 9288 | 7212 |
| | 11361 | 1586 | 3575 | 1993 | 5292 | 10350 | 12258 | 2782 | 5845 | 8104 | 4936 | 9246 |
| | 10103 | 7474 | 1873 | 6809 | 9171 | 12400 | 6038 | 9410 | 2560 | 5403 | 2736 | 8012 |
| | 1197 | 1859 | 4317 | 1762 | 11062 | 1788 | 1589 | 8632 | 12112 | 7865 | 2796 | 10617 |
| | 1478 | 3978 | 7405 | 8958 | 12158 | 4314 | 1096 | 3383 | 6169 | | | |
| 469: | 6501 | 9978 | 9506 | 8048 | 6041 | 11554 | 7940 | 1311 | 761 | 9444 | 1675 | 9956 |
| | 8980 | 3509 | 8369 | 7051 | 10464 | 4793 | 9243 | 11137 | 9702 | 650 | 2162 | 2318 |
| | 8547 | 5167 | 2224 | 3189 | 11426 | 11921 | 12073 | 5571 | 10065 | 11294 | 1231 | 1534 |
| | 12094 | 1787 | 5994 | 2871 | 3170 | 9945 | 1211 | 6776 | 5232 | 9755 | 3346 | 4529 |
| | 7769 | 10952 | 2907 | 4108 | 1825 | 8189 | 9705 | 2337 | 5815 | 6517 | 2024 | 9712 |
| | 7508 | 10391 | 12009 | 7433 | 2870 | 5210 | 5086 | 1723 | 1765 | | | |
| 470: | 5084 | 11194 | 9575 | 8315 | 3179 | 1987 | 11812 | 3976 | 3760 | 2762 | 779 | 4164 |
| | 11691 | 10789 | 12264 | 5656 | 10659 | 2104 | 11167 | 8323 | 4400 | 10935 | 5221 | 5623 |
| | 921 | 3463 | 10656 | 10670 | 4215 | 5379 | 2522 | 6418 | 982 | 7059 | 3322 | 7858 |
| | 9733 | 8620 | 6578 | 6976 | 10694 | 5052 | 2725 | 5937 | 3180 | 5594 | 11700 | 8684 |
| | 4226 | 10509 | 12384 | 11783 | 11615 | 3194 | 8836 | 3058 | 4838 | 1075 | 589 | 6318 |
| | 12032 | 4746 | 6787 | 9636 | 2112 | 12444 | 5488 | 10076 | 9098 | 4011 | 2926 | 4776 |
| | 8892 | 12036 | 1627 | 1229 | 7868 | 12227 | 4806 | 3425 | 3106 | 5517 | 5569 | 2805 |
| | 6222 | 1072 | 3265 | 7386 | 6709 | 4420 | 8943 | 8561 | 11384 | 4492 | 6943 | 7513 |
| | 5489 | 11412 | 5620 | 935 | 4602 | 3992 | 12126 | 4524 | 5295 | | | |
| 471: | 4125 | 2643 | 8914 | 5741 | 7486 | 11181 | 7454 | 1438 | 9051 | 5051 | 7954 | 6066 |
| | 1495 | 10258 | 12409 | 2931 | 2998 | 7574 | 8519 | 10264 | 7534 | 797 | 3773 | 10985 |
| | 4080 | 10803 | 2516 | 7845 | 10965 | 4601 | 5002 | 7211 | 11852 | 3999 | 6602 | 11085 |
| | 5772 | 3149 | 11134 | 10624 | 1896 | 11243 | 5259 | 3993 | 4281 | 1326 | 4033 | 3299 |
| | 1465 | 9045 | | | | | | | | | | |
| 473: | 1243 | 1128 | 2040 | 10378 | 8222 | 10746 | 10012 | 7467 | 5079 | 1528 | 11934 | 8515 |
| 474: | 6601 | 527 | 2379 | 10196 | 6137 | 8682 | 4571 | 5965 | 1720 | 11962 | 7324 | 6890 |
| | 2000 | 3989 | 9528 | 2837 | 979 | 1830 | 4658 | 5140 | 12206 | 7572 | 11257 | 3730 |
| | 3247 | 9845 | 5430 | 6818 | 11818 | 9582 | 1443 | 9531 | 2032 | 12196 | 8459 | 12235 |
| | 1905 | 7764 | 7158 | 3049 | 7860 | 6184 | 10022 | 5125 | 11754 | 776 | 11248 | 1635 |
| | 11123 | 3134 | 3576 | 12200 | 1437 | 2294 | 10118 | 5180 | 4802 | 2992 | 6519 | 5231 |
| | 2482 | 11465 | 7884 | 2815 | 6520 | 12103 | 10061 | 758 | 8634 | 12134 | 2903 | 10025 |
| | 5634 | 5303 | 4014 | 11481 | 2853 | 4147 | 5919 | 1025 | 8579 | 11370 | 10373 | 9451 |
| | 7816 | 8473 | 6909 | 2056 | 1942 | 5495 | 9556 | 941 | 11202 | 3129 | 11586 | 7180 |
| | 4318 | 8652 | 1094 | 12057 | 8148 | 3547 | 1039 | 1685 | 7743 | 3838 | 11056 | 11872 |
| | 3487 | 6540 | 4865 | 2136 | 12002 | 1735 | 7894 | 5527 | 9635 | 6171 | 3419 | 11976 |
| | 11116 | 4202 | 2787 | 3857 | 11185 | 8493 | 7897 | 9631 | 2132 | 5397 | 11537 | 4725 |
| | 9882 | 10003 | 7886 | 11920 | 8820 | 1566 | 8009 | 6859 | 5036 | 1810 | 6339 | 5982 |
| | 10204 | 6829 | 5887 | 11503 | 1164 | 4505 | 10947 | 7478 | 11732 | 2729 | 11967 | 6906 |
| | 1181 | 12106 | 7401 | 8306 | 4315 | 3213 | 2969 | 11177 | 10260 | 11850 | 5333 | 4769 |
| | 3231 | 10237 | 11065 | 11935 | 2196 | 9700 | 8932 | 1776 | 4348 | 10232 | 2954 | 9540 |
| | 9284 | 6427 | 11488 | 1448 | 5878 | 4288 | 11911 | 1606 | 5899 | 2216 | 4930 | 828 |
| | 8456 | 8300 | 12173 | 1581 | 3969 | 3308 | 3733 | 8146 | 4107 | 318 | 318 | 10810 |
| | 10688 | 7258 | 3755 | 6413 | 3072 | 2938 | 1958 | 2013 | 3222 | 7116 | 9552 | 6743 |
| | 3633 | 5410 | 10967 | 9652 | 3051 | 4884 | 6438 | 2195 | 3521 | 715 | 11816 | 5080 |
| | 6811 | 11824 | 6148 | 7701 | 2120 | 2012 | 10779 | 7038 | 2714 | 1004 | 8131 | 3368 |
| | 8676 | 2320 | 7910 | 10733 | 11153 | 5976 | 2606 | 1254 | 10261 | 10527 | 6399 | 7022 |
| | 2373 | 12098 | 10524 | 11061 | 2677 | 2819 | 8155 | 8898 | 4897 | 3568 | 2061 | 2343 |
| | 4454 | 5367 | 5900 | 8137 | 9016 | 5191 | 9012 | 754 | 8169 | 1230 | 4040 | 9541 |
| | 8193 | 5427 | 7697 | 3237 | 10536 | 3816 | 7388 | 5399 | 11230 | 4472 | 3241 | 2168 |
| | 4442 | 3086 | 3186 | 1691 | 2369 | 9347 | 4435 | 6197 | | | | |
| 475: | 2644 | | | | | | | | | | | |
| 476: | 12084 | 6235 | 4759 | 10347 | 8520 | 3926 | 9058 | 7491 | 1621 | | | |
| 477: | 12177 | 6814 | 4681 | 6355 | 5964 | 1174 | 7480 | 2252 | 11814 | 11423 | 4309 | 10760 |
| | 10292 | 8167 | 9787 | 1400 | 10173 | 5931 | 4566 | 772 | 6147 | 5362 | 2160 | |
| 478: | 8803 | 12320 | 5017 | 819 | 1756 | 7073 | 10263 | 8731 | 3488 | 5675 | 2434 | 11042 |
| | 2673 | 2990 | 11910 | 11377 | 1682 | 12429 | 12056 | 4814 | 742 | 2402 | 12165 | 7948 |
| | 11221 | 10036 | 10314 | 10977 | 4596 | 1323 | 10078 | 7929 | 3624 | 6883 | 3114 | 10477 |
| | 3389 | 8708 | 5663 | 6480 | 3774 | 3454 | 9482 | 11666 | 5598 | 6307 | 9709 | 5580 |
| | 4619 | 5929 | 3207 | 12379 | 6931 | 5030 | 938 | 7247 | 12101 | 7031 | 4907 | 11965 |
| | 10984 | 6905 | 6496 | 673 | 2777 | 5113 | 1378 | 10218 | 1124 | 4266 | 12160 | 10249 |
| | 6752 | 4932 | 11395 | 11015 | 5999 | 10641 | 6043 | 1035 | 12446 | 4184 | 9645 | 10931 |
| | 3873 | 12330 | 5943 | 5657 | 6916 | 7389 | 2698 | 3762 | 12075 | 9802 | 12250 | 5548 |
| | 6053 | 6457 | 11456 | 1634 | 12220 | 4794 | 8173 | 4037 | 6420 | 926 | 7361 | 2588 |
| | 7618 | 11802 | 10825 | 10443 | 7699 | 1560 | 11556 | 1176 | 8791 | 7303 | 9298 | 2851 |
| | 9247 | 11674 | 2279 | 8498 | 4791 | 8531 | 6303 | 635 | 1977 | 9577 | 5776 | 8512 |
| | 10792 | 7667 | 9612 | 3405 | 4341 | 7959 | 10860 | 3622 | 6528 | 8313 | 7205 | 4064 |
| | 9631 | 9594 | 968 | 10331 | 7018 | | | | | | | |

1. Transgenic seed for a crop, wherein the genome of said transgenic seed comprises trait-improving recombinant DNA for expressing a bacterial phytochrome protein.

2. Transgenic seed according to claim 1, wherein said protein provides improved tolerance to cold stress

3. Transgenic seed according to claim 1, wherein said protein provides improved tolerance to water deficit stress.

4. Transgenic seed according to claim 1, wherein said protein provides improved tolerance to low nitrogen availability stress.

5. A transgenic seed of claim 1, wherein said DNA is derived from a Pseudomonas fluorescens.

6. Transgenic seed according to claim 1, wherein transgenic plants grown from said seed exhibit increased yield as compared to similar plants without the recombinant DNA.

7. Transgenic seed according to claim 1, wherein
(a) said crop is susceptible to a yield-limiting environment; and
(b) transgenic plants grown from said transgenic seed of claim 1 thrive in said yield-limiting environment.

8. Transgenic seed according to claim 7, wherein said yield-limiting environment is cold stress, water deficit stress or low nitrogen availability stress.

9. A method of facilitating production of a crop comprising providing to a grower of said crop transgenic seed of claim 1.

10. A method according to claim 9, wherein transgenic plants grown from said seed exhibit increased yield as compared to similar plants without the recombinant DNA.

11. A method according to claim 9, wherein
(a) said crop is susceptible to a yield-limiting environment; and
(b) transgenic plants grown from said transgenic seed thrive in said yield-limiting environment.

12. A method of claim 9, wherein said yield-limiting environment is cold stress, water deficit stress or low nitrogen availability stress.

13. Transgenic seed for a crop, wherein the genome of said transgenic seed comprises trait-improving recombinant DNA from a gene for a protein having amino acid sequence with at least 90% identity to a consensus amino acid sequence in the group consisting of a consensus amino acid sequence for SEQ ID NO: 240 and homologs thereof through a consensus amino acid sequence for SEQ ID NO: 478 and homologs thereof, but excluding SEQ ID NO:391 and homologs thereof.

14. Transgenic seed according to claim 13, wherein said protein has an amino acid sequence selected from the group consisting of SEQ ID NO: 240 through SEQ ID NO: 390, SEQ ID NO: 392 through SEQ ID NO: 478.

15. (canceled)

16. (canceled)

17. Transgenic seed according to claim 13, wherein
(a) said protein has the function of a specific protein that has been demonstrated in a model plant with efficacy for an improved trait as compared to a plant without said recombinant DNA wherein said specific protein and trait are as indicated in Table 5; and
(b) transgenic plants grown from said transgenic seed exhibit said improved trait

18. Transgenic seed according to claim 15, wherein said protein provides the trait indicated in Table 5 for a model plant-expressed protein which has an amino acid sequence which was used with homologs to build said consensus amino acid sequence and wherein transgenic plants grown from said transgenic seed exhibit an improved trait which was demonstrated in the model plant expressing said model plant-expressed protein

19. Transgenic seed according to claim 13, wherein transgenic plants grown from said seed exhibit increased yield as compared to similar plants without the recombinant DNA.

20. Transgenic seed according to claim 13, wherein
(a) said crop is susceptible to a yield-limiting environment; and
(b) transgenic plants grown from said transgenic seed thrive in said yield-limiting environment.

21. Transgenic seed according to claim 20, wherein
(a) transgenic plants grown from said seed exhibit increased yield as compared to similar plants without the recombinant DNA when said plants are grown in a yield-limiting environment of water deficit stress and said protein has the function of the protein with an amino acid sequence selected from the group consisting of SEQ ID NO: 241, 243, 258, 268 through 294, 298, 307, 312, 345 through 357, 358, 359, 367 through 369, 372 through 374, 376, 390, 395, 398 through 424, 435, 439, 463 through 478, and homologs thereof;
(b) transgenic plants grown from said seed exhibit increased yield as compared to similar plants without the recombinant DNA when said plants are grown in a yield-limiting environment of heat stress and said protein has the function of the protein with an amino acid sequence selected from the group consisting of SEQ ID NO: 268 through 294, 298, 347, 351, 359, 367-369, 435, 473, 474 and homologs thereof.
(c) transgenic plants grown from said seed exhibit increased yield as compared to similar plants without the recombinant DNA when said plants are grown in a yield-limiting environment of high salinity stress and said protein has the function of the protein with an amino acid sequence selected from the group consisting of SEQ ID NO: 242, 258, 285, 298, 312, 372, 376, 390, 424, 439, 463 through 478, and homologs thereof;
(d) transgenic plants grown from said seed exhibit increased yield as compared to similar plants without the recombinant DNA when said plants are grown in a yield-limiting environment of cold stress and said protein has the function of the protein with an amino acid sequence selected from the group consisting of SEQ ID NO: 240 through 267, 273, 276, 277, 293, 298, 346, 357, 366, 367, 434, 474 and homologs thereof;
(e) transgenic plants grown from said seed exhibit increased yield as compared to similar plants without the recombinant DNA when said plants are grown in a yield-limiting environment of low nitrogen availability stress and said protein has the function of the protein with amino acid sequence of SEQ ID NO: 241, 315 through 344, 364, 370 through 373, 376, 438, 478 and homologs thereof;
(f) transgenic plants grown from said seed exhibit increased yield as compared to similar plants without the recombinant DNA when said plants are grown in a yield-limiting environment of shade stress and said protein has the function of the protein with an amino acid sequence selected from the group consisting of SEQ ID NO: 262, 282, 295 through 314, 370, 427, 436, 437, 477, 478 and homologs thereof.

22. A recombinant DNA construct comprising a promoter functional in a plant cell operably linked to trait-improving recombinant DNA from gene for a protein having an amino acid sequence with at least 90% identity to a consensus amino acid sequence in the group consisting of a consensus amino acid sequence for SEQ ID NO: 240 and homologs thereof through a consensus amino acid sequence for SEQ ID NO: 478 and homologs thereof, but excluding SEQ ID NO: 391 and homologs thereof.

23. (canceled)

24. (canceled)

25. (canceled)

26. (canceled)

27. (canceled)

28. (canceled)

29. (canceled)

The application's sequence listing, which the Patent Office published only in electronic form, follows.

SEQUENCE LISTING (12464 sequences)

SEQ ID NO: 1 - DNA, 961 bp, Glycine max
ttaattaatgcaaaatgaatatgtcagatataatatcttgtttcaacgagaacgcagtgaatgtgtcacactcttcatgttctagctactcaaacaacgcttgcatatctccaactagtgtcacaccttcatctcaaaattcagtgtcttctgtctacaaaaccaccctctcaaaccaaaagcagcttctgatcacagtcacgtggtgcaagagccactccaaccaaggactcaccataaccttcggcgaagagaacaacaaccctttggcaccatctttcagactcaacaccaattcacgctttttcaggaaaaagaaaggaagcaaagtgttggaatccgaagactcaaaagttgaagtcttctgggatctttcaaaggccaagtatggcactggccctgaacctgttgaagggttttacgtggcgattctcgttgatgcagaaataggccttgctcttggtgaagatgtgaccaagaagttcaaaacaaagacccttttgggaaatgtttcgctgttatcacggcgtgagcattgctccggtaacgcggtctacgccaccaaggctcagttttgtgacactggaactcggcatgacattttgatcagatgcagtggcgagaatgaaggactcaaggctcctgctttgtctgtttgcatcgataagaagacggtgattcgtgtgaagaggctgcagtggaatttcaggggaaaccacacgattttcgtcgatgggttgcttgtggatttgctttgggatgttcataactggtttttcaatcctgcttctgggtatgctgtgttcatgttcaggaccaggagtggcttggatagcagattgtggttagaggagaagattgcacagaaagataaagatagagttgaattctccttgttgatctatgcctgtaagaacacatgaggggacccattcttcgtatcagatcagaggatttaaat

SEQ ID NO: 2 - DNA, 2432 bp, Pseudomonas fluorescens PfO-1
  unsure (1)..(2432): unsure at all n locations
nnnnnnnnnnnnnnnnnnnnnnnnnnnttcttgtttgttgattaacccttaattaatccgggcgcgcctgatttatcacaagtttgtacaaaaaagcaggctcctgcaggaccatgaacccgcaagacaaagaagcctttgaagagttgctggccaactgcgccgacgagccgatccgctttcccggcgcgatccagccgcacggtttgctgctgaccctgagcgagccggacctttcgatcattcagatcagcgccaacgtcgagaccttgctcgcgcgcccggcgcaagagctgatcggccagccactgcaaagcctgatcggcgatgcccatgccgcgcaggttcgcgaagccttgcagcaagcagccttgtccgatgcgccgccgctgcactttcgccttaatggcacggcgttcgaaggcttgctgcaccggcatcaggatgtgctgattctggagctggaaatccacgtcgaaaatttccagccacgcaacgtcgccggcaccgaaacccacctgggacggatgctcgcgcgcctgcaaaaggcccagagcctgcaagcgctgtacgacatcagcgtcaaggaaatccaggccatgaccggttacgaccgggtgctgatttatcgcttcgaagaggagggccacggtcaggtcatcgccgaagcgtccgatccgtcgatggaagtcttcaacggtctgtttttccctgcctccgacatccccgagcaagcccgcgagctgtaccgcaccaactggctgcggatcattccgaacgcggactaccaaccggtgccgctggtgcccaagttgcgtccggacacccagaccccgctggacctgagcttcgccacgttgcgcagcgtgtcgccgatccactgccagtacatgaaaaacatgggcgtgctgtcctcgatgagcatttccctgctcaagggcgacaagctctggggcctgatcagttgcggcaatcgccagccgctgcatgtaccgcatgaattgcgcaccgcgtgccaaaccatcggccaggtgctgtcgttgcagatcagcgcgatggaagcgctggaggtcagccgtcaacgggaagaaaagctcgaggcgctggcgctgctcaatcaggcgatgatcgactcgccacagaacgtcttcgatggcctggccaaccagccacaagtcttgatggcgctggccaatgccggcggcattgcgatcatcgaagacaagcaattgcaccgttacggcaactgcccggagccggaagaaatccgcgccctgcacaaatggctgcaggagcgtggcgagccggtgtttgccagtcatcacctggccagcgtctacccgccggccgcgcactaccagcaggtcgccagcggcgtgctcgccatgagcctacccaaaccggtggacaacggcgtgctgtggttccgccccgaagtcaaagagaacatcaactggagcggcgacccgcgcaagccgctggacctggaaaactccgacgccggcctgcgcctgcggccgcgtacttcgttcgaaatctggaaggtcgagatggccgggatttccaccaagtggagccacggtgatctgttcgccgccaacgacttgcgtcgctcggcgctggaaaatgatctggcccgccaagtacgccgcgagcaagaagcggtgcgcgcccgtgatgaactggtggcggtggtttcccacgatctgcgcaacccgatgaccgtgatctcgatgctctgcggcatgatgcagaaggcgttcagctcggacgggccgcacacttcgcggcgcatctcgactgcgatcgacaccatgcaacaagccgccgggcgcatgaacacgctgctggaagacttgctcgacacctcgaaaatagatgccgggcgctacaccatcgcgccgcagaaactcgatgtcgcgcagatgttcgaagaggcgcaatcgctgctcgcgccgctggcgctggacaaggacatcagcatctcgttcgaggccgatcctgacctgagcatccatgccgaccccgagcggttgtttcaggtgctgtcgaatctggtcggcaacgcgatcaagttcactccgcgcctgggcacggtcgacgtgtatgccaaatcggtcggtgatgacatcgtcttcacggtgcgtgacagcggcgaaggcattcccaaggatcacttgccgcacgtatttgaccgttactggacggtgaaggaaggcaatccgaccggcaccgggctgggtctgtacatcacgcagggcatcgtcgaggcccatggcgggcagatcgttgccgagagtgagccggggcagggcagcgaattccgcttcaccgtgccgcgtctggactgactcgagacccagctttcttgtacaaagtggtgataaattggagctctgcagagctttcgttcgtatcatcgnnnnnnnnnn

SEQ ID NO: 3 - DNA, 1378 bp, Arabidopsis thaliana
atggatccagcgcgggaatgcgaaggcaaaggagcttgcgaattgaaatcgaacaagcgatttgctgataaaatcatgcctcatcttctcaacttgtgagccttcttgtttgatttttctaaaaattgaggttcttcgtgaaatttagtactgtggccttattgattatccacttggtttgttctgtccgatttaggtccggtttagatactgctttatctaggacaaataggtttagattcaatctggttcagttttttggaatatgttttgttcattttggtttctttcgatttggttttggttatttgcctaaccgtagatcatggtgaatccatccgcagtgattgacgaaattggtgtcaattgtgtgcttaacttaatcctacttgttccttgcatcccaatgtttatcataagtttgttgtcgttctcacacatgagcactgtataaatttttagtttgtagattgtgattgtgataagtcttttcatggctttttgttgaattacaaaagcatcaagttactaaatatctaatgcgagttttgattttgaattaggtacgggtctagtgcaaaagccaacgattttgacatgtatgcaccaaatgcttcatttgaagaccctttgacgcatgctcaggggtatgtcaatcttccaactaaatattctttctttctactattgcagagatcatttactcactttgaaatttctatttttgacccttggctttttcagagtgaagcagatcaaatcagcattttattcactccctaaggtttttgtcaaactctcgttccctcactagtcacttctttgttaactactatgatgatggaactatctccctcaacctcacatcataattattttactataggtgtttggtgagtcgaaaatagttgaatatcatattcaagaaagtgaaacctcgccggggaagaaagaggttagaatcctcgtttactataacatggtctcgtggttcctttttagtatctaaatataacataaacaacttgtgggaaaaacagatactaattgacaacaaacaacactacaagatcatgggaaggaacatagatatgatctctctcattaagctctatgtcgaggacgggaagatcgttcgacatgaagactggtaataaccctgcagctaacctttctcataaacgctgactttttgtattagttcattgccttaacttgttggtgaatggtgtgtataaggtgggacaagaaacctctgaggaacagagacacggttagctttccattagtcggacgggtaatggagatgggtcgaagaggcttgatgctagcgactcatgccatgatgggttttggtaaagatcctgactcccaatga

SEQ ID NO: 4 - DNA, 495 bp, Arabidopsis thaliana
atgagcagacccggagattggaactgcaggtcatgcagccatctcaacttccagcgccgtgactcttgccagcgatgcggtgactctcgttccggccccggtggagttggtggcttagactttggtaatttcggtggcagagccatgtctgctttcggattcaccaccggctccgacgttcgtcccggtgattggtactgcaccgtgggaaactgcgggacacacaacttcgccagtcgctccacctgcttcaaatgcggcactttcaaggacgagaccggcgctggaggcggaggtggtggcatcggcggtccggccatgtttgacgccgacattatgcggtctagagtccccggtaacggtggtcgctctagctggaaatccggcgactggatttgcactaggattggttgcaatgagcataactttgcaagcagaatggaatgcttcaggtgcaatgcaccaagggacttcagcaacagaacctctttctaa

SEQ ID NO: 5 - DNA, 1393 bp, Arabidopsis thaliana
atgttggaggctccgagttatctggtgtcaagggacttaccatcttcatgtgaggaagagagcaagtggatatacaatgcacactgtgtgcttcagctctccctaaggaagcgtttgttggatgatactgatgtagaaggaagttccgctaagaaaatgttacgggttgatcatggaagcagaggtgaatctgacaagattacagatagtcttcagcttgctaaaacctatcagagctctaaccagagtcaacaaggtggtggtggtgatcaacagagttcaccagttactcggcttgaccaaaacgcgcttctcaactgcttggctcactgttcgttatctgatttcgggtctatagcgtcgacgaatagaaccttccgctcgttgattaaggacagcgagttgtataggttgagacgggcaaagggtattgtggagcattggatttacttctcttgcaggctcttagaatgggaggcttatgatcctaatggagatcgctggttacgtgtaccgaaaatgacattcaacgagtgtttcatgtgttcggataaagagtctctggcggttggcaccgagcttcttgttttcggaaaagagatcatgtctcatgtgatttaccgatatagcatcttaaccaatacatggacatcgggtatgcaaatgaatgtcccgaggtgcttgtttggatcagcgagtctaggcgagatcgcggttatagctggaggatgtgatccgcgtgggaggatactgagttctgcagagctttataactctgaaactggggaatggacggtcatcccgagcatgaacaaagcgaggaaaatgtgctcgagcgtgttcatggatgggaatttctattgcattggaggtatcggagagggaaactcgaagatgctattgtgcggtgaagtctatgatctgaagaagaagacatggacattgatacctaacatgttacctgaaagaagcagtggaggtggaggagatcaagcaaaagagattgctgctgcaacagcggcttcagaggctccaccgcttgtagcagttgtaaaagacgagctttatgctgcgaattacgcgcagcaagaggtgaagaaatacgataaaaggcttaatgtatggaataaggtagggaatttgccagagagggcttcttcgatgaacggttggggaatggcgtttagggcttgtggggatcagttagtggtggttggaggacctagggcaataggaggagggtttatagagatcaatgcttgtgtcccaagtgaaggaacacaactgcattggagagttcttgcttctaagccatcgggaaactttgtgtataattgtgcggtgatgggatgttgatgaagaagacttgagagagccatttcaaagttattga

SEQ ID NO: 6 - DNA, 291 bp, Arabidopsis thaliana
atggacaaagaagttacaaagattgaaagtgatgacacttcatcggtggagatcaaagtgttgttattcgccagagcacgagagctcacaggtgtgcctgatctaacactgaagatgccatcaggtagtacaacacagaaatgcctggatgagttggtgcttaagtttccaagcttggaagaggtacgtagctgtgttgttctcgctttgaacgaggaatatacaaccgattccgccattgttcaacatagagatgagttagccatcatacctccgataagcggcggctaa

SEQ ID NO: 7 - DNA, 303 bp, Arabidopsis thaliana
atggtttcttcgcttcttatgtcatttgctccggccaccgtgagggtttacgccacaagcacaaagggaggttcaggcggcccaaaggaggagaagaatcccatcgactttgttcttgggtttatgacaaaacaagatcagttctatgagactaatccacttctaaagaaggtggatgagaaagaaggcaccaccaccggaggccgaggaaccgttcgcggtggtaaaaactcagctccgacgcctgtgccgaagaagagcgagggtggatttggtggcttaggaagcctcttcaagaaatag

SEQ ID NO: 8 - DNA, 813 bp, Arabidopsis thaliana
atgggtgtggtagaagaagctcacaacgtgaaggtgattggttcaggagaagccacgatcgtgttaggtcacgggttcggcacggaccagtcagtatggaaacacttggttccacatctggtcgacgattaccgcgtcgtcctctacgacaacatgggagccggtacgaccaaccctgactatttcgacttcgatcgttactcaaatctcgaaggctactctttcgatttgattgcaatcttggaagatctcaagattgagtcttgtatctttgttggccactctgtttctgccatgattggtgtcttggcttctcttaaccgtcctgatctcttctccaaaatcgtcatgatctctgcttctccgagatacgtaaacgatgttgattaccaaggtggattcgaacaagaagacttaaaccaactattcgaagccatccgaagcaactacaaagcgtggtgcttaggtttcgctccactcgccgtcggtggcgacatggactccatcgccgttcaagaattcagcagaacactcttcaatatgcgtcccgacatagctctctccgtcggccagaccattttccaaagtgacatgagacagatcttaccttttgtcactgttccgtgtcacattctccaaagtgttaaggacttagctgtaccagtcgttgtctccgagtatcttcacgccaatcttggctgtgaatccgtcgtcgaggttattccttctgatggtcatcttcctcagcttagctcaccagattctgttattcctgtcatcctccgtcacattcgtaatgacattgctatgtga

SEQ ID NO: 9 - DNA, 219 bp, Arabidopsis thaliana
atggagcttccatctccttacagctcaagaaaggaggaatcaactgttcctccgaagagaggccgagtcaagatcatgatctttcgtgatctagtcagatcggaaacctcgatggcaccgactccgaggagaggccgaatcaagaaaatgatcgcgggtgatctagtcggatcagggaaacagaacaactacgacggagacggtaagagaggaggctag

SEQ ID NO: 10 - DNA, 809 bp, Arabidopsis thaliana
ttgtttgttgattaacccttaattaaatgtgtgctttagtcccttcatttttcacaaacttcggttggccgtcaacgaatcaatacgaaagctattacggtgccggagataacctaaataacggcacatttcttgaattgacggtaccacagacttatgaagtgactcatcatcagaatagcttgggagtatctgtttcgtcagaaggaaatgagatagacaacaatccggttgtggtcaagaagcttaatcacaatgctagtgaacgtgaccgacgcaagaagatcaacactttgttctcatctctccgttcatgtcttccagcttctgatcaatcgaagaagctaagtattcctgaaacggtttcaaagagcttaaagtacataccagagctgcaacagcaagtgaagaggctaatacaaaagaaggaagaaattttggtacgagtatcgggtcaaagagactttgagctttacgataagcagcaaccaaaggcggtcgcgagttatctctcaacggtttctgccactaggcttggtgacaacgaagtgatggtccaagtctcatcgtccaagattcataacttttcgatatcaaatgtgttgggtgggatagaagaagatgggtttgttcttgtggatgtttcatcatcaagatctcaaggagagaggctcttctacactttgcatcttcaagtggagaatatggatgattacaagattaattgcgaagaattaagtgaaaggatgttgtacttgtacgagaaatgtgaaaactcgtttaactagggcgcgccaaaaattggagct

SEQ ID NO: 11 - DNA, 1198 bp, Arabidopsis thaliana
atgggtgtatttcctggatttggtagctggatcaatcaaaacactcaacagcttcctcacaaggtcagtttcatttccatcaattatacaacccgagaactcaaaacaaataaacaatcaatagataatgattatgtttgttgttgtaggcagagtccgagagatctgagaatgcgaaatttaagtcaaagtcagagacaaacactcatgaggcgagagatgaaatgaaacagcaattaaaactttggagagatacagagaagaaggaacaatggaatgatgctcctcctaatgtgaaggtaaagaccaaatcagttaaaataaataaaaatcagctaacaaagacaatatttttgattctttgcctttcaaaatggtatatagaattaagaataaagatcttttcttttgtaatgtttgaaggtggaaagaagaaatgatctagaatggggtatgtcaactatagaaatgcaatttacattaggattgcctcctcaagcagcttacaacgttttaactaatccagacaaccaaccatacttcagaatcatcaaaggacgccaacttttggtttcttcttttaacttatcatttcattgattcaaataaaataatgataacaagatttgagagtgtgtcatagttttcttcttatgaaaggaaaacatatcaagaaaagttgtgtcgccggataccgggaaagggcagcttgtggacaccaagaaagctgtggcctggaacttcctttggttatctggaactatcccgataattgcaaattttatcgaacaccgacaagtccttaccgtaaaaacttccctcatgagaatcaatccatttttttcaatcttggaaaagatttaatttgggtttctcttgcttatttttgacaggtacaatatacggtaaagaataagatgttcataaacatgtttgtcagtataaagtggagccgctatacgtagattcagaacgcttgtgcaaacaaaagaagccgaagagtacagaagaatacgaaagatgtagccgcggacaaggaaggattgggtcgaaagtgacattggaccagatgtttaagccttcttttatttttaatctgccaccgatttcttggtacgttcgtcggataaccatcaagaccatgaaaactctgatcgaagatcttcaaattacaagtgccatgatccgaggtatttga

SEQ ID NO: 12 - DNA, 2343 bp, Arabidopsis thaliana
atgcagcaaggcgatcaaacggttctgagcttgagacctggtggcggtcgaggaaacagactatttggttcctcttcttcttcttcgtctctctcttttggctctctttcatcttcggatctacctctccttcgtcctcatggtggtgctcctgcttcctcttttcccttcaagggtggagactcgaggttcgatggccgtgaacgtgtgaagtacacccgtgagcagctcctggagcttaaagagaccactcaactctctgatgaaattctgagagtccaacgggaaactgcagctgaactgtttggtgaggaagggacttgggcacgtggagaaagtgtcgtaagcaatttggttcccgttcaatccgcaagtcgcttctctgagccagactctcgtgattggcgtagccgttctactcaacctccaccctctggggaggaaaggtcgtgggataatcttcgtgaagctaaagattccaggtatgttgaagcaagtcaatataatcgtcaagaccaacctaattcccagttttcaagggcaaacatatcatccaaccaagggggtggaccagctcctgtcctcgtcaaagccgaagttccttggtcagctagaagaggaaacctttctgaaaatgatcgtgttctgaagactgtgaaagggatactgaacaagctaacccctgaaaagtatgaccttctcaagggccaacttattgaatctggcatcacatctgctgatatcctgaagggtgtgattacccttatttttgacaaagctgtccttgagccgaccttttgccctatgtatgcaaaattgtgctctgatatcaacgaccagctgcccaccttcccacctgcagagcctggggataaggagattacatttaagagggttctactgaatatctgtcaagaggcatttgagggcgcttctcagttgagggaggagcttagacagatgagtgctccagatcaggaggctgagcggaatgacaaagaaaaattgttgaagctcaagactctaggaaatattcgtttgattggtgagcttttgaagcagaagatggtcccagaaaagattgttcatcacattgttcaggagcttctgggggccgatgagaaagtttgtccagccgaggaaaatgtcgaagctatttgtcatttcttcaaaactattggcaaacaacttgacggaaacgtgaagtcaaaacggattaatgatgtatatttcaaacgcctacaggctctgtcaaagaatcctcagttggaactgcgtctgagattcatggttcagaatatcatcgacatgcgctccaatggctgggttccaaggcgggaagagatgaaagcaagaactataaccgaaatacatactgaggcagagaagaatcttggtctccgaccaggtgccactgcaaatatgagaaggggtatggtttctagtggtgggcctgtgagccctggccctgtctaccctggtgggcgacctggtgcgggtggcttgatgcctggtatgcctgggacgcgaaggatgcctgggatgcccggagtggacaatgataactgggaggtaccccggacaagatcaatgtctagacgcgatgggccaggacctctacattctccagcagtgagcaagtcggcctcaatgaacacgaggctcttacctcaaggcagcagtggcattatgagtggcaagacaagcgcactgttgcagggaagtggttcagtgtcgcgtccagttaccgtgtcagcagaacggccagcacagtcagttgcacctctgaccgtaccagttccggtggagaaaccacagcctagtggtcccaagttgagcgaagaagtgctccaaagaaaaacaaagtcgcttctcgaggaatatttcaatgtccgactacttggtgaagctctgcagtgtgtagaggagcttggtttgccgtcatatcacccagagtttgtgaaggaagcaatatccctgtctcttgagaaaagcccgcctgtcgttgagccaattgctacactcttggagtatttgttatcaaagaaggtagtcgcacccaaggatcttgaaactgggttcttgctctacggtgctatgttggacgacattggaattgatcttcctaaggcaccaaacaattttggtgagattgtgggaaagctgattctggctggtggtgtggatttcaaattggttagagaaattatagggaagatggaagacgataggttccagaagatggtggtcgatgcagctgtacgcattgtggagtcaagcgagcaggggaagtccttgttggcctcacaggctgcagacatagaggcttgtcggaatctgtaa

SEQ ID NO: 13 - DNA, 1476 bp, Arabidopsis thaliana
atggctgcatcgtacgaagaagagcgtgatattcagaagaattactggatagagcattccgctgatctgactgttgaagctatgatgcttgactcgagagcttctgatctcgacaaggaagaacgtcctgaggtactctctttgctccctccatatgaaggcaaatcagtgttggaacttggagctggtattggtcgtttcactggtgaattagctcaaaaggctggtgaactcattgctcttgacttcattgataacgttatcaagaagaatgaaagtatcaatgggcattacaagaatgtcaagtttatgtgtgctgatgttacatcccctgacctcaagatcactgatggatctcttgacttgattttctccaactggctgctcatgtatctttctgacaaagaggtggagcttttggcagaaaggatggtcggttggatcaaggttggaggatacattttcttccgtgaatcttgcttccaccaatcaggggacagtaagcggaaatccaaccccactcactaccgtgaaccccgtttctattccaaggtctttcaagagtgtcagactcgggatgctgctggaaattcatttgagctctctatgatcggatgcaagtgcattggagcttatgtcaagaacaagaagaatcagaatcagatttgttggatatggcagaaggtcagctcagaaaatgacagaggcttccaacgtttcttggacaatgtccaatacaaatccagtggaatcctacgctatgagcgtgtctttggccaagggtttgtgagcactggtggacttgagacaaccaaagaatttgtggagaaaatgaatctgaaaccaggacagaaagtcttagatgttgggtgtggcattggtggaggtgacttctacatggctgagaagtttgatgttcacgttgttggtatcgatctttctgtcaacatgatctctttcgcattggaacgtgctattggactcagctgctcggttgagtttgaggttgctgattgcaccacaaaacactacccagataattcgtttgatgtcatttacagccgtgacactattctgcacatccaagacaaaccagccttgtttaggactttcttcaaatggcttaaaccgggaggtaaagttctcatcagcgactactgtagaagccccaaaactccatctgctgagttttcagagtacatcaaacagagaggatatgatctccatgacgttcaagcttatggacagatgctaaaagacgctggcttcactgatgtgatcgcagaggaccgtactgatcagtttatgcaagtcctgaaacgtgaattagacagggtggagaaagaaaaggaaaaattcatctccgacttctccaaagaggattacgatgacattgttggaggatggaagtcaaagctggagaggtgtgcatcggatgagcagaaatggggacttttcatcgccaacaagaattaa

SEQ ID NO: 14 - DNA, 381 bp, Arabidopsis thaliana
atgtcgttcatgtatgagaagagcaatacatggagatggctagtgatgaagacgcgagattcgagatccttcttcttcacgttcgctgctttatgtggtgtcattcctggcgttattggctatggagttatgcaggtcaccaattccagtaaccctgagctcgaagcccgcctccgtaaatctgctcgcccagatactctcatgatgggtaaagtaaaccaagagaggctagctgaatatcttggtgagttgaaacagaagcaggatacaaacgacagatacgttgctgctcttaggggagagactcttaccaggaagccttatcaaagaatccaaccaatgccaaagccagatgacacggtgacaaccaaaactcagtaa

SEQ ID NO: 15 - DNA, 489 bp, Arabidopsis thaliana
atgtcgatgattccgatcagcaatcgccggagactatctcccggcgatagaatctgggaaccatttgaactcatgaacacctttcttgatttcccatcaccagctctctttctttctcaccactttccctcactttctcgagaaatattcccacaaacttcatcatccaccgtcaatacgcagctcaattggaccgagactccgacggctcacgttttcaaagcgtatcttccgggagtggatcaagacgaagtgattgcgttcgtagatgaagaaggatatcttcagatctgtactggcgacaacaagttcatgagcagatttaagcttcctaacaacgccttgacggatcaggtcacggcgtggatggaggacgagtttcttgtcgtgttcgttgagaaagatgcttcttcgtcgccgccacagctgccggagattgaggagaatcgtaacgtgagagttgtggaaatcaccggcgatgatgattaa

SEQ ID NO: 16 - DNA, 732 bp, Arabidopsis thaliana
atgcaagatccatcacgacccgctacaggttacccatacccatacccatacccgaatccacaacaacaacaaccacccaccaacgggtacccaaaccccgccgccggaaccgcttacccctaccaaaaccacaacccatactacgcgccacaaccaaacccacgcgccgtcataatccgccgtctcttcatcgtcttcacaacattcctcctactcctaggtctaatcctcttcatcttcttcctaatcgttcgtcctcaactaccagacgttaacctaaactcactctccgtctccaatttcaatgtctccaacaatcaagtctctggtaaatgggatcttcaactccaatttcgaaaccctaattcaaagatgtcacttcactacgagactgctctttgcgctatgtattacaatcgtgtctctctatccgagactaggttacaaccgtttgatcaagggaagaaagatcaaacggtggttaatgcgactctctctgtttctggtacttatgttgatggacgtttggttgattctattggtaaagagagaagtgttaaaggaaatgttgagtttgatttgaggatgatttcttatgttacgtttcgatacggtgcgtttcggaggaggagatatgttactgtgtattgtgatgatgttgctgttggtgttccggtgagtagtggtgaagggaagatggttggttcgtctaagagatgcaaaacttattga

SEQ ID NO: 17 - DNA, 984 bp, Arabidopsis thaliana
atgctcaggttaatcgttaattaccctctgattcccaagatatcccaccgggtttgtagtaacagtagtagtaagctcgggagttactatgattcttcgtcgatcataaaatatggcggaatcagcgatgttgttggtaagaagcaggagctttttctaagtgtttcggtgaaagcagtggaagacaaaggtaacaatggaggtggaagcatgagtttctcgggtcaaagctgggatcctagttccgagattgaagttccttcagaccaaagacccgtgaatgagtattcgtctctaaaggaaggaatgttgtattcatggggagaattgggtccaagcgaattctttattcgtctaggtggtctttggttggtcactttcactgttcttggagttcctgttgcagctgctagctttaatccttccagagagcctttgagatttattctagctgcagggactggaactttatttctcgtttctttgattgtcttgagaatttatctggggtggagctatgttggagatagactactttctgcagttataccttacgaagagagtggatggtatgatggacaaatgtgggtcaaaccacctgaggtgttggctcgcgacaggttgttgggttcttacaaggtgaagccagtgatcaagatgctcaaacaaacattaatcggaacaggagctttactcgtttcagcattcgtgctattcgttttcgcaacaccagtcgaggatttctttaaaaccactctaggatctacagaaaaccaaccagaagtttccatttcaagaaccagcaacaagttcaatataagaaaagaacaattgcttcgactacccgtagatgttgtgactgacgatgatctggcagcagccgcggctgaggctgcggatggaagacctgtctattgcagagaccggtactaccgtgcattagcaggtggtcaatactgcaaatgggaagatcttgttaaatag

SEQ ID NO: 18 - DNA, 942 bp, Arabidopsis thaliana
atgggtctaaagggttttgctgaaggaggaatagcttcgattgttgcgggttgttcgacccacccgcttgatctaatcaaggtccgaatgcaacttcaaggcgaatcagctccgattcaaaccaatctccgaccagctcttgcttttcagacttcgaccaccgtcaacgcgcctcctctacgtgttggtgtaatcggagtcggatctcgtttaataagagaagaaggcatgcgtgctctgttttccggcgtctccgccaccgttcttcgtcaaactctgtattcaacgactcgtatgggtttatacgacatcatcaaaggagaatggaccgacccggaaacaaaaacgatgcctttaatgaaaaaaatcggtgccggagccatcgccggagcaatcggagccgccgttgggaatcctgctgacgtggcgatggtgaggatgcaagccgatggtcgtttaccgttgactgatagaagaaactacaaaagcgttttagacgcgatcacgcaaatgattcgcggtgaaggcgttacgtcgttgtggagaggatcgtctttgacgataaacagagcaatgcttgtgacgtcatcgcagttggcttcgtatgattctgttaaagagacgattttggagaaagggttgttgaaagatgggcttgggactcatgtgtcggcgagtttcgcggcggggtttgttgcgagcgttgcgagtaatcctgttgatgtgattaagacgagagtgatgaatatgaaggtggtggctggagttgctccgccgtataaaggagcggttgattgtgctttgaaaacggtgaaagcggaagggattatgtctttgtataaaggttttatcccgacggtttcgagacaagcaccgttcacggtggttttgtttgttacgcttgaacaagttaagaagttgttcaaggactatgacttttga

SEQ ID NO: 19 - DNA, 825 bp, Arabidopsis thaliana
atggggagaactaaggagcaggcaacattaactcggtatccaccctgtcctaggaatcctgctaaattcaatgatataaacaaagcactccaggaaaaaggatatggtaaggctctgaaaagaaaaccttggacgggtgtgacatgccctgtctgtcttgaggttcctcacaactcggtcgtcctcctttgttcatcttaccacaaaggatgccgtccgtacatgtgtgccacgggaaaccgtttctcaaattgtctagagcagtacaaaaaggcatatgccaaggatgagaaaagtgacaaaccgccagagctattgtgcccgctttgtaggggtcaggtgaaaggctggaccgttgtggaaaaggaacgtaagtatctgaattctaagaaaaggtcatgcatgaacgacgagtgtttgttttatggaagctatagacagctcaagaagcatgttaaggagaaccatccgagagccaagccaagagccatagaccctgtgctggaggcgaaatggaagaagcttgaggttgagagggagaggagtgatgtaatcagcacagtcatgtcgtcaacacctggggctatggtatttggagactatgtgattgagccatacaatggttatgatcatcaagatgacagtgacgattacagtgattcgtcggatgacgaaatggaaggtggggtattcgagcttggagcattcgacctgggccgtcttcaaccgcgttcggctgccatctcaagccggggaattcgcggtatgatcataaggaaccggtgggctcgaagcagaggtgcgagcagaaggcgacaaacataa

SEQ ID NO: 20 - DNA, 1326 bp, Arabidopsis thaliana
atggattcaacgaagcttagtgagctaaaggtcttcatcgatcaatgcaagtctgacccttcccttctcactactccttcactctccttcttccgtgactatctcgagagtcttggtgctaagatacctactggtgtccatgaagaagacaaagacactaagccgaggagtttcgtagtggaagagagtgatgatgatatggatgaaactgaagaagtaaaaccgaaagtggaggaagaagaagaagaggatgagattgttgaatctgatgtagagcttgaaggagacactgttgagcctgataatgatcctcctcagaagatgggggattcatcagtggaggtgactgatgagaatcgtgaagctgctcaagaagctaagggcaaagccatggaggccctttctgaaggaaactttgatgaagcaattgagcatttaactcgggcaataacgttgaacccgacttcagctattatgtatggaaacagagctagtgtctacattaagttgaagaagccaaacgctgctattcgagatgcaaacgcagcattggagattaaccctgattctgccaagggatacaagtcacgaggtatggctcgtgccatgcttggagaatgggcagaggctgcaaaagaccttcaccttgcatctacgatagactatgatgaggaaattagtgctgttctcaaaaaggttgaacctaatgcacataagcttgaggagcaccgtagaaagtatgacagattacgtaaggaaagagaggacaaaaaggctgaacgggatagattacgtcgccgtgctgaagcacaggctgcctatgataaagctaagaaagaagaacagtcatcatctagcagaccatcaggaggcggtttcccaggaggtatgcccggtggtttcccaggaggtatgcccggtggattcccaggaggaatgggaggcatgcccggcggattcccgggaggaatgggtggtatgggcggtatgcccggtggattcccaggaggaatgggcggtggtatgcctgcaggaatgggcggtggtatgcccggaatgggcggtggtatgcctgctggaatgggtggtggcggtatgccaggtgcaggcggtggtatgcctggtggtggcggtatgcctggtggtatggacttcagcaaaatattgaatgatcctgagctaatgacggcatttagcgaccctgaagtcatggctgctcttcaagatgtgatgaagaaccctgcgaatctagcgaagcatcaggcgaatccgaaggtggctcccgtgattgcaaagatgatgggcaaatttgcaggacctcagtaa

SEQ ID NO: 21 - DNA, 429 bp, Arabidopsis thaliana
atggccggaattggaccgattactcaggattgggaaccagttgtgatccgcaagagagctcctaacgctgcagctaagcgcgacgagaagactgtcaacgccgctcgtcgaagcggcgccgatattgagaccgttcgaaaattcaatgctggatcgaacaaggctgcatcaagcggcacctccttgaacacaaagaagctagatgatgatactgagaacttatctcatgatcgtgtgcccactgaattgaagaaagccatcatgcaagctagaggggagaagaagctgactcagtcccaacttgcccatctgatcaatgagaagccacaagtgatccaagaatacgagtctgggaaagcaattccgaatcaacagatcctttcaaagctggagagggcacttggtgctaaactccgtggaaagaagtag

SEQ ID NO: 22 - DNA, 750 bp, Arabidopsis thaliana
atggataacttgaatgttttcgcaaatgaagacaatcaagtgaatgatgtgaagcccccaccaccaccacctcgagtgtgtgcaaggtgtgattctgataatactaaattttgttattacaacaactactgtgagtttcagccacgatacttctgcaagaactgtcgtagatactggactcatggtggggctttaagaaacataccaattggtggaagtagtcgtgccaaacgggcaagggtaaatcaaccttcggttgctcggatggtttctgttgagacccaacgaggtaacaatcaacctttctctaatgttcaagaaaacgttcatcttgttggatcttttggtgcttcatcttcatcttctgttggtgctgttgggaacctttttggttctttgtatgatattcatggtggtatggtaacaaatttgcatccaactcgaactgttcgaccaaatcatcgcttagctttccatgatggatcatttgagcaagactattacgatgttgggtccgataatcttttggtcaaccaacaagttggtggctacggttatcacatgaatccagtggatcaattcaagtggaaccagagcttcaacaacactatgaacatgaattataataacgatagcactagtggaagtagcagaggatctgacatgaatgtgaaccatgataacaagaagatcagataccgcaactctgtgattatgcatccttgtcatctggagaaggatggtccttga

SEQ ID NO: 23 - DNA, 1539 bp, Arabidopsis thaliana
atggctactcttttagccactcctatcttctctcctttagcttcttctccagcaaggaaccgtctttcttgctctaagatccgtttcggttccaaaaatgggaaaattctcaattctgatggtgcccagaagttgaatctctcaaaattccgtaaacccgatggccaaagatttctacaaatgggttcttctaaagagatgaactttgagagaaaactctcagtccaagctatggatggtgcaggaacaggaaacacatcaacgatctctcgtaacgtaattgcgataagtcacttgttggtatcacttgggatcattcttgctgcagactatttcttgaagcaggcgtttgtagcagcgtctattaagttcccaagtgctttgtttgggatgttctgtattttctctgttcttatgatatttgattcggttgttcctgctgctgcaaatggtttgatgaatttcttcgagcctgcgtttctgtttatccaaagatggcttcctttgttctatgttccttctcttgttgttcttcctctttctgttagagatattccggctgcttcaggtgtcaaaatctgctacattgtagccggtggatggttggcgtcactttgtgtagcagggtacacagctattgcagtgagaaaaatggtgaaaaccgaaatgacggaagccgagcctatggcaaaaccatcaccattttcaacacttgagctatggagttggagtggaatctttgttgtgtcgtttgttggtgctctgttttaccctaattcattggggacaagtgcaagaacttctctccctttccttctttcttcaactgtgctaggttacattgtaggttctgggttgccatcttctattaagaaagttttccatccgataatctgctgcgcgctatctgcagtacttgctgctctagcttttgggtatgcttcaggatctggacttgatcctgttttaggaaactaccttaccaaagtagcatcagatcctggtgctggtgacatcttaatgggttttcttggctctgtcattctctctttcgctttctccatgttcaaacaaagaaagctcgtgaagaggcacgcagctgagatcttcacatctgtgatagtttcaacggtattctcgctctactccactgctcttgttggacgtttagtcggtttagaaccttctttaacggtttcaatcctacctcgctgcatcacggttgcattggcccttagcattgtatcactctttgaagggaccaattcgtctcttacagcagctgtagtcgttgtgactggtctgattggagctaactttgtacaagttgttcttgacaaactgcgtttacgtgatccaattgctcggggaattgcaactgcttcaagtgctcatggacttggaacagcagctttgtcggctaaggagccagaggctcttcccttttgtgcaatagcttatgctcttaccggaatcttcggatcgttactgtgttctgttcctgccgtccgacagagtttgctagcggtcgtcggctga

SEQ ID NO: 24 - DNA, 933 bp, Arabidopsis thaliana
atggctttagtacgtgaacgtcgtcagctaaatctccgtcttcctcttcctccaatctccgaccgccgcttctccacctcttcctcctcagccaccaccaccaccgtcgctggctgtaacggaatctccgcttgtgatctcgagaaactcaacgttctcggatgcggaaacggcgggattgtttacaaagtccgtcataaaaccacatcggagatctacgctttgaaaacagttaacggcgacatggatccgattttcacaagacagttgatgcgagagatggagattctccgccgtacagattcaccgtacgtcgttaagtgtcacggaatcttcgagaaacctgtcgtcggtgaagtatcgattctaatggagtatatggacggcggaaccctagaatcactacgcggcggtgtaacggagcaaaaactcgccggattcgctaaacagatcttaaaaggattaagctatttacacgctcttaagatcgttcatcgtgatatcaaaccggcgaatcttcttctcaattcgaaaaacgaagttaaaatcgctgatttcggagttagtaagatcttagtccgatcattagattcgtgtaattcgtatgttggtacttgtgcttatatgagtccggagaggtttgattcggaatcttccggtggaagctctgatatctacgccggagatatctggagtttcggattgatgatgcttgagcttctcgttggtcattttcctttgcttccgccgggacagagacctgattgggcgacgttgatgtgcgcggtgtgttttggagaaccgccgcgagcgccggagggatgttctgaagagtttaggagcttcgttgagtgttgtctccgtaaagattcgagtaagcgatggacggcgccgcagcttcttgctcatccttttctccgggaagatctttga

SEQ ID NO: 25 - DNA, 1839 bp, Arabidopsis thaliana
atgcctgaggcaccaaagaaagaatctttagaggttttcgatctgacgcttgaccaaaaaaacaagcaaaagcttcagttgatcgaagaactcacctctaacgccgaccaagtccaaagacaagtcttggaggagatcttgacccgcaatgctgacgtggagtatctcaggcgacacgacctcaacggtcgcactgaccgtgagactttcaaaaacatcatgcccgttatcacctacgaagatattgagcctgagatcaacaggatcgctaatggtgataaatcacctatcctctcttccaaacccatctctgagttcctcacaagctctgggacatctggtggggagaggaagctaatgccaacaatcgaagaggagctagacaggagatcactcctctacagtctcttgatgcctgtgatgagccagttcgttcctggtctcgaaaacggcaaaggaatgtatttcttgttcatcaagtccgaatccaagactccaggaggcctccctgctcgtcctgtcttaaccagttactacaaatcttcccatttcaaagaaagaccctatgatccttacaccaactacacaagccctaacgagaccatcctttgctctgactcttaccagagcatgtactctcagatgctttgtggcttatgtcaacaccaggaggttcttagagtcggcgctgtcttcgcctctggattcatcagagccatcaagtttcttgagaaacactggatcgagttggtccgtgacatcagaaccgggactctaagttccctgatcaccgatccttcagtgcgtgaggcggtcgccaagatccttaaaccgagcccaaagctagctgatttcgtggaatttgagtgcaagaagtcgtcctggcaagggattattactaggctgtggcctaacacaaagtatgtggatgtgattgtgaccgggacaatgtctcaatacattccaactttggactactacagtaatggcttgcctcttgtctgcacaatgtatgcttcctctgagtgttactttggtgtgaatctaaggccactctgcaaaccaagcgaggtctcttacacgctcataccatccatggcttatttcgagttcttgcctgttcatagaaacaacggtgttactaactccatcaaccttcctaaagcactcactgagaaagagcaacaagagcttgttgatctagttgatgtcaagcttggtcaggaatacgagcttgttgtcaccacttacgccgggctttgcagatacagagttggtgatttattgagagtgactggtttcaagaacaaagcgcctcaattcagtttcatatgtcgcaaaaatgtggtcttgagcatagattccgacaagaccgacgaggttgagcttcagaacgcggtgaagaacgcagtgacacaccttgtcccatttgatgcctcactctctgagtacacgagctatgcagacacaagttccatcccaggccattatgtcctgttttgggagctatgtttggatggaaacacaccgatccctccttcggtcttcgaggactgctgcttagctgtagaagagtcattcaacactgtttatagacaaggaagggttagtgacaagtccataggcccgcttgagatcaagattgttgagccagggacattcgataagctcatggattacgcaatcagcttgggagcatcgattaatcagtataagacgccgagatgcgtgaagtttgctccaattatcgagctattgaactcaagggttgttgatagttacttcagccccaagtgtcctaaatgggttcctggtcacaaacagtgggggagtaactaa

SEQ ID NO: 26 - DNA, 608 bp, Arabidopsis thaliana
ttaattaatccaatttctacaacgggagctaaactatctagatcggagcattcaatggctgcttcttccgaacccaaatctctttacgatttcaccgtcaaggatgctaagggaaacgatgttgatctaagcatctacaaagggaaggttcttttgattgtgaacgttgcttctcaatgtggcttgactaattcgaattatactgagcttgcgcagctgtatgagaagtacaaaggccatggtttcgagattcttgcgtttccgtgtaaccagtttgggaatcaagagcctggtactaatgaagagattgttcagtttgcttgtactcgtttcaaggctgagtacccgatcttcgacaaggttgatgttaacggtgacaaagctgccccagtctacaagtttctgaaatcaagcaaaggcgggctctttggagacggcattaagtggaacttcgcaaagttcttggttgacaaagatggaaatgttgtcgatcgtttcgcaccaactacctcacctctcagcattgagaaggatgtgaagaagttgttgggagttactgcttaagcaaggcaagattgcataatagacaaataaaagctcatttaaat

SEQ ID NO: 27 - DNA, 321 bp, Arabidopsis thaliana
ttaattaaatggccaaactcataacttcttttctcttactcacaattttattcactttcgtttgtctcactatgtcaaaagaagctgagtaccatccagaaagttatggaccaggaagtctgaaatcataccaatgtggaggacaatgcacaaggagatgtagcaacacaaagtatcataagccatgcatgttcttctgccaaaagtgttgtgctaaatgcctttgtgtccctccaggcacgtacggcaacaaacaagtgtgtccttgttacaacaactggaagactcaacaaggtggaccaaaatgtccataaggcgcgc

SEQ ID NO: 28 - DNA, 1180 bp, Saccharomyces cerevisiae
  unsure (1)..(1180): unsure at all n locations
aattcatttgtacacactattaagaggaaggcaaactatatttacattttattgnnnnnnnnnnnnnnnnnnnnnnnnnnaactctttgtttcttgtttgttgattaacccttaattaagatggcagctgcaccatggtatattagacagcgtgacacggatttattgggtaaattcaagttcatacagaatcaagaagacggcagattaagggaagctacaaacggaacggtgaattcacgatggtcgttgggggtcagcatagaacctcgtaacgatgctagaaacagatacgttaacattatgccgtatgagaggaaccgcgttcatttgaagactctatccgggaatgattacattaatgcctcgtatgtcaaagtgaacgtgccagggcagagcatcgaaccgggctactatattgctactcaaggtcccacgcgtaaaacttgggatcagttttggcaaatgtgctatcacaattgtcctttagacaatattgtcattgtgatggtcacgcctctggtagaatacaatagggagaagtgctaccagtactggcctcgcggtggtgtagacgatacggttagaatagcatcaaaatgggaaagtccgggcggcgccaatgatatgactcaatttccctctgatttgaaaatagagtttgttaacgtacataaggtgaaggactattatacggtcaccgatatcaaactcacacccacggaccctcttgtaggacctgtcaaaactgttcaccacttttacttcgacctttggaaagatatgaacaagccagaggaagtagtacccataatggaattatgcgctcactcccacagcttgaattcccgcgggaaccccattatcgtacactgttccgcaggcgtgggcagaacggggacgttcattgccctagatcatctcatgcatgataccttggattttaaaaatattacagaacggtcaaggcattcagacagggctacagaggagtacacacgggacttgatcgaacagatcgtgttacagttacgctcgcaaagaatgaaaatggttcagacaaaggatcagttcctatttatctaccatgctgccaagtatcttaacagtctttccgtgaaccaatagatttaaatacccagcaaattggagctctgcagagctttcgttcgtatcatcg

SEQ ID NO: 29 - DNA, 861 bp, Arabidopsis thaliana
atggagctactcacaagcttgaccaactggttaactccgacgactctcttcctcctcctcaatttcacgatcgccaccattttcatcaccaaccggttcagttcctgttcaagaaaacacaaccaacatcaagatggttacgggtcgtcgggtcatgaccaaaatcaggcacggtttggcagacctccttcgctcatagacagagtaaagtccatcaacttccatctgtacaattctccttcaccagaatccgagatccactactccgggtcggatcctaacccgaacccacctccttctctcttgcaacgggtcaaatccatcaacatgccttacttcaagttcccacaacacaattctgaaggagattacgctgcttacgagctcatgacccaacccgacgagactaaccgggtcgacccgatcgacaagatcccggaggatgacgtcacgaccgaacctagattcggagctccatcactcttgcagcgggtgaaatccataaagcttccttctttatacagatccgacccagatccaacaccagaagtgcaaacacatacgaggacgaagtcggagtcgagtaaaccggcgacgaagaagaagaagaaagctacaaagaagatgatgaaatctgctagcgagagacacatcggccgggaagaggaggagacagttgaggccgtggagaagagaaggccggagacgatgagagttgagagaacgacgtcgataggagacggaggagaagaaggtgtcgacgataaagcttcaaatttcatcaacaagtttaagcaacagcttaagctacagaggctagattcgtttctaaggtacagagagatgctcaagaacgattaa

SEQ ID NO: 30 - DNA, 393 bp, Arabidopsis thaliana
atggctctcgaatgggttgtgttaggttacgcagcagcagctgaagcgatcatggtgattctcttgacgatgcctggacttgacgctctccgcaaaggattagtcgctgtaactcgtaatctcttgaaaccgtttctctcgataatcccgttttgtctcttccttcttatggatatttactggaagtatgagactcgaccttcttgcgatggtgattcgtgtactccttctgagcatcttcgtcaccagaaatcgatcatgaagtctcagcgtaacgcgcttctgattgcgtcggctcttgttttctactggattttgtactctgtcacgaatttggttgtgaggattgagcagcttaatcagagggttgagaggctcaagaacaaggattag

SEQ ID NO: 31 - DNA, 1234 bp, Arabidopsis thaliana
tttaaccagttcataagaaagaggaaagataagtaattaataatggcagcgagacagcaacaaaaaggaacaggcttcggggttcaatacgaggactttgtccccaaatccgaatggaaagatcaacctgaagccaccattctcaacattgacctaacaggttttgcaaaggagcaaatgaaagtgacgtatgtgcacagctcgaagatgataagagtcactggagaacgtcccttggctaatcggaaatggagccgtttcaacgaggtgttcactgttccacagaattgtttagtggataagatccatgggagctttaagaacaatgtcctcaccatcaccatgcctaaggagacgatcacgaaggtggcttatcttccagaaacttctagaactgaagctgctgctctggagaaggcggcgaagctagaggagaagagattgttagaagaatctagaaggaaagagaaggaagaagaagaagctaagcagatgaagaagcagcttctggaagagaaagaggcgctaattaggaagctgcaagaagaagctaaagcaaaggaagaggctgaaatgaggaagcttcaagaagaagctaaagcaaaggaggaggccgcggcaaagaagcttcaagaagaaattgaagcaaaagagaaacttgaggagagaaagctcgaggaaaggagacttgaggagaggaagctcgaggatatgaagcttgcggaagaagctaaactaaagaagatccaggagagaaagtctgttgatgaatctggagaaaaagagaagatactaaagccagaagtggtctatacaaaatccgggcacgtggctactcccaaacctgagtcggggtctggtctcaagtccgggtttggaggagtaggcgaggtggtgaagtcagcggaagaaaaactaggaaacttggtggaaaaggaaaagaaaatggggaaagggataatggagaaaataagaaggaaagagataacaagtgaagagaagaagttgatgatgaatgtaggagtggctgctcttgttatctttgctctcggagcttatgtttcttataccttctgctcttcttcttcttcttcttcctcttcgtctccttcttcatcatcatcttctaccaaaccagaatgatatatctctaagaaagaaaaatgttgtgcaaattgaagaatgtgtatattatatactttgtgataaaaaaaaaaaaaaaaaaaaaaaaaaa

SEQ ID NO: 32 - DNA, 2445 bp, Arabidopsis thaliana
atgggagagatagcaacagagttcacgccggttatggatgatgatgatgaccggtgcgttgtaccggaggtagagctcactgtacccaagaccgacgattcaactttaccggttttaacatttcggatgtgggttcttggtataggcgcgtgcattgtactctcctttatcaaccagtttttctggtacagaacgatgccgttgagtatcaccggaatctccgctcagatcgccgtcgtgccgcttggtcatctcatggcgagagtgcttccgacaaaaagattcttggaaggtacgaggtttcagtttaccttaaacccgggtgccttcaacgtcaaggaacatgttctgataactatctttgcaaattccggcgccggctctgtttacgctactcacatacttagtgctattaagctttactacaaacgttctcttcctttcctccctgcatttctcgtcatgatcaccactcaggtactctcacttcactttatcctctgtttcttgttttgcagtttattgaaccttgaaatcgtttcttgtgtttagattcttggatttggttgggctggtctcttcaggaaacaccttgttgagcctggtgaaatgtggtggccaagcaatcttgttcaagtctctctctttggtgcgttacacgagaaagaaaagaaatcaagaggaggcatgagtagaactcaattcttcttaatcgtcctcgtagctagctttgcttactacatctttcctggttatcttttcaccatgttaacatcaatctcatgggtctgttggctcaatcccaaatcaattctggtaaaccaactcggttcaggtgaacatggtcttggcattggttccattggttttgattgggtcactattagtgcttatcttggaagccctttagctagtcctttgttcgcttccgtcaatgtagccattggtttcgtgctggttatgtatatcgtcacgcctgtttgttactggcttaacatttatgatgccaagaccttccctatcttctctagtcagctcttcatggggaatggctcacgttatgatgttttgagcattattgatagcaaattccatcttgaccgtgtggtttactctaggaccgggtccatcaatatgagcaccttctttgctgttacttatggtctcgggtttgctacattgtctgccaccattgtccatgttttagtcttcaacggaaggtacatatattcaatgatgtttaccaacacttctttttgtatcttggtcccaaactcagactaatctttatgtctatacagtgacttgtggaagcagacaagaggggcgtttcagaagaataagaaaatggatatacacacgagaatcatgaagaaaaactacagggaagttccattgtggtggtttttggtaatccttttactgaatatcgcgcttatcatgttcatctccgtgcactacaacgctactgtgcagcttccttggtggggagtgttacttgcttgtgccattgccatcagtttcactcctttgatcggtgtcatagctgccaccactaatcaggcaccgggattgaatatcataacagagtatgttatcgggtatatctacccggaacgtcctgttgcaaacatgtgtttcaaggtctatggatacattagtatgactcaagcgctaactttcatttccgacttcaagcttggtcattacatgaagatcccgcctagatccatgttcatggctcaggtatgcatgttatcaattggtcttgagacagatgtcaataaaactaaaacatagctaatcaaactgtaacaagtgcaggtggctgggacacttgtggcggtggttgtgtacacaggaacagcctggtggttaatggaagagattcctcatctttgtgatacatccttgcttccttcagacagccaatggacttgtcccatggaccgcgttttctttgacgcctctgtgatttggggactagtgggaccacgcagggtgtttggagaccttggagaatactcaaatgtcaactggttcttcctcgttggagccatagctccactcttagtttggctagccacaaagatgtttccggctcagacatggatcgccaagattcatatccctgtccttgtgggagccaccgcaatgatgccaccagcaacagcagttaacttcactagttggctcatcgtcgcattcatctttggccacttcatcttcaagtacagaagagtgtggtggaccaagtataactatgtgttgtctggtggtttagatgctggctctgcttttatgaccatacttctgtttctagcactcggacgaaaaggaattgaagtgcagtggtggggaaattccggcgaccgagatacatgtcccttagcttcttgtccaactgctaaaggtgttgtcgtcaaaggctgtcccgtcttctag

SEQ ID NO: 33 - DNA, 708 bp, Arabidopsis thaliana
aatgaagtataatgactggaatacccttatcaccgccttttcctcggaaaaaggatttaattatccaatttagggttcattcacatttcagggaagagagctctgaatctctctgcatctatggaggctacgaaagaaagagttggcttgctcgatacgatcctcccgccggcacttgcagacgccggtctcgaggattgtgctctgccgccggaatctattcaggaagcatttcgcaaagccgctaacgccgtgaagtctcgcgcagcgtcgatattcgaccacgaggaggaagacggttgtttagcggatcctattccggaaactgcagacaagattatcgttggaggagacaatgaaagggatactgggccgtgtttagctggaaaaggcattgagaagttggctgaatcgaaacaggccggagatttggtggtggctggcgaaggagaagaagggaagagctgcgttgatggtttgaaggatctagatgttgaaggtattgagagaagcagtgagaagaaggatcagagtgatgaagatgaagaagaggagatgaaaccgatcttggttgaaggatttgtctgagagtcctcacattgtcagaagtgttcttccctcgtgtatataaataaaaagtattagacttttacagcttacaaatccgtttgcgttgcttctgttgattgtgcggtgcttaaatgtctg

SEQ ID NO: 34 - DNA, 708 bp, Arabidopsis thaliana
atgaagagaatctttggagcgaagaataacaaagagcctcctccgtctattcaagatgcctctgatcggatcaataaaagaggagattcagtggaagagaaagttaagaggcttgatgctgagctctgcaaatacaaagatcagatcaaaaggactagacctggtcctgctctagaagctatcaaagctcgtgctatgagagttctcaagcaaaagaagatgtatgaaggacaacgtgacatgctctataatcagacttttaaccttgatcaagtttcatttgctgctgaaggccttaaagatgctcaacaaactatgacagcgctaaaatctgctaacaaggagctgaaaggaatgatgaaaaccgtcaagattcaagatatagataatttgcaagatgatatgatggacttaatggatgagagttctgaaattcaagagacacttggtaggagctacaatgttcctgatgacattgacgaagatgacctcctgggcgagcttgatgctcttgaagctgacatggggaacgagactgaagcagacggagtgccttcttatctccaacccgataaggaaccggatcttaatgatgagctcaacttgccttcagcaccaatggggcatacaggagctccacccggacgagctcaggctgaagatgaatggggattaccagcggtaccacgtgcatcacttcggggctaa

SEQ ID NO: 35 - DNA, 1482 bp, Arabidopsis thaliana
tatacaaagttctacgaaactcattaaagatttgagagtgtacaagggacaaaaggtgctataaatatctcttaaaagagagctaaaagttaaggaaacacttaaccaagcaaacaacaaatggctctttcaatcgttcttcttcccttcattctcattctcataccgacttttctcagttcggttttcgccgtttcaccactcaaaactgatacgttaaaaccggggcagcagctcagagactgggagcagttgatctctgcggatggtatcttcactctcggattctttacacctaaagactcatctacttccgaactcgggtcagctggtcttagatatcttggtatttggcctcaaagtattccaataaatctagtttgggtgggtaacccaaccgaatcagtttctgattcatctggttctctatccattgacaccaatggggttctaaagataacacaggcaaacgctattccaatcttggtgaaccaaagaccagccgcgcagctttcattggtcgggaatgtgtctgccattttactcgataccgggaactttgtggtccgagagatcaggccaggaggagttccgggtcgtgttctatggcaaagctttgaccatcccacaaacacattacttcccgggatgaagattgggtttaacctaagaaccaagaaagaagtatcagttacgtcttggataactgaccaagtcccagtcccaggagcattcagactaggactagacccatcaggagctaaccagttactcgtctggcgccgcggggaaatctactggtccagtggaatcttgacgaacaatggaagctctcatttgaacttagaagtatccagacactacattgattatgaattcaagttcgattcaaataagtacatgaagtacttcagctactcaatcaagaaagctaatagttcggtcttttccagctggttcttggatactctaggccaaatcactgtaaccttttctctcagcagtaacaatagcagcacctggatttccgaaagcagtgaaccctgcaagacggatttaaagaacagttcagcaatctgcatcacggagaagccaacggcttgtaggaaagggtcagagtatttcgaacccagaagaggatacatgatggaaaataataccggttattatccattttactatgacgatagtttgagcgctggtcttagcgactgtcatggaacctgctggagaaactgttcttgcatagctttccaagcctttcctgatggatgccaatattgggaaaaaggatcaaagtttgttccttatgatagcttcaactccaatttagtaacttatgttcttgattctgtaaagtgatgtgtggttgtaacttgaacgagcaattatgtaaccagactagtatcagtaaaggggtttattaagaaactaaagaatcaagcagttcaaagacatgcaccaacttcctctctttacaaa

SEQ ID NO: 36 - DNA, 1089 bp, Arabidopsis thaliana
atggatcgaccagcagtgagtggtccaatggatttgccgattatgcacgatagtgataggtatgaactcgtcaaggatattggctccggtaattttggagttgcgagattgatgagagacaagcaaagtaatgagcttgttgctgttaaatatatcgagagaggtgagaagatagatgaaaatgtaaaaagggagataatcaaccacaggtccttaagacatcccaatatcgttagattcaaagaggttatattaacaccaacccatttagccattgttatggaatatgcatctggaggagaacttttcgagcgaatctgcaatgcaggccgcttcagcgaagacgaggcgaggtttttcttccagcaactcatttcaggagttagttactgtcatgctatgcaagtatgtcaccgagacttaaagctcgagaatacgttattagatggtagcccggcccctcgtctaaagatatgtgatttcggatattctaagtcatcagtgttacattcgcaaccaaaatcaactgttggaactcctgcttacatcgctcctgaggttttactaaagaaagaatatgatggaaaggttgcagatgtttggtcttgtggggttactctgtatgtcatgctggttggagcatatcctttcgaagatcccgaggaaccaaagaatttcaggaaaactatacatagaatcctgaatgttcagtatgctattccggattatgttcacatatctcctgaatgtcgccatttgatctccagaatatttgttgctgaccctgcaaagaggatatcaattcctgaaataaggaaccatgaatggtttctaaagaatctaccggcagatctaatgaacgataacacgatgaccactcagtttgatgaatcggatcaaccgggccaaagcatagaagaaattatgcagatcattgcagaagcaactgttcctcctgcaggcactcagaatctgaaccattacctcacaggaagcttggacatagatgacgatatggaggaagacttagagagcgaccttgatgatcttgacatcgacagtagcggagagattgtgtacgcaatgtga

SEQ ID NO: 37 - DNA, 987 bp, Arabidopsis thaliana
atgtcaagcagtcgaaatacccactggtgtcacagatgtcagcgtgctgtccgccttcacggccaagagcctgtatgcttttattgcggaggtggatttgttgaagaacttgatatggctcaagccagcccctttgatatgtttagatcccacaggggtgttgtagaacgtgatcagacttttgatctcatggatgctttctctgtgtttatgaggaaccgcttagctgaaaggagccacgacagagaaatcagaggaagaaccatcagttcaggtcctgaaaactttcctggtctggcccctttgttgatctttggtggtcaagtcccttatagactaactggcgacaatgcagtcgaagccctcttcaatggcggctcccctggcattggcatcacacgtggtaacaccggcgactacttcttcggtcccggccttgaagaattgttcgagcagctttcagctggcactactcgccgaggcccaccacccgcaccgagatcagcaatagacgcattgccaactatcaagatcgcgcagaggcatcttaggtcatcggactcgaattgtcccgtgtgcaaagacgaattcgaactgggatcagaagcgaaacagatgccgtgtaaccacatctatcattctgactgcattgtcccgtggctggttcagcacaactcttgcccggtctgtcgccaagagctaccatcagctagcggaccttcaagcagtcaaaacagaaccacccctaccagaaactacagaagcagtagtagtagtagtagtagtaacagtcgtgagaacgggaatgaaagaaggaatcctttctcttccttctggccattccgttcgtcaggttcaagctcaagctccactcaaaaccgtggaggcacaagaaactcggatacaagcgatgagaaccataactaccatcaacagcaacatcaacaatcatatatgggttacagtggctggccttttgattactaa

SEQ ID NO: 38 - DNA, 828 bp, Arabidopsis thaliana
atgagtaatcccgagaagtctaaaattgctgaggaagagaatgagaattttgacgagagtgattatctttggagcgatgaagaaggagacatacgtgaaattgttcttggccttcctgcactaagacttagtgagagtctcaatgtggatgaaagcatccgtaacgaagccgtttccgcggcgaagttgatcgtggcagccgccaaggaagccacagggaatacagaacaaagtgctagtggtaccggtgacgttagtggaactccagaaatcataaaagttgggaaaccccgtgtattattggaagcgctggccgaagcatctggttgtacccctattggggtgaccactactgaaggagaggtagtcaagaaaccccgtaagaaaggttctactcagttgacacatctgccgcaaggccctcctatgtgtaatgtttgtgggaagggctttgcttcttggaaggctgtttttggacatctaaggcagcataaggatcgagggtatctaggttttcttcctccgccaacattcaatgctgctgaggaaggatttggtggagttgctactgcttcaaccggtggtgcagtagccactgctatttccgttggtgaagtccctactgcttcttccgctggtggactcgctacggcttcttccgatggtgaagggcttgtttcaagtatcggaagggcgaggattgacttaaatgccgatccagtcgaggaggaagacaaggtaattggagttggatctaagcgaaaatttgatctgaataggtcccccccaccagacggtgatgaagagaacgatgataaagtcgagtga

SEQ ID NO: 39 - DNA, 822 bp, Arabidopsis thaliana
atgtcgcaatcaaccgtagatgttccgccaaagggtgggtttagcttcgatctgtgtaagagaaatgatatgcttacacaaaagggtcttaaagctccgtcttttttgaagactggaacaaccattgttggtttgattttcaaggatggtgtgatactaggggcagatacccgagcaactgaggggccaattgttgctgataagaactgtgagaagattcactatatggcaccaaacatatattgctgtggtgcaggaactgcggctgatactgaagcagtcactgatatggtcagctcacagctgcgattgcatcgttaccagactggtcgagactctcgggtcattactgctttgacccttctcaaaaaacatcttttcagctaccaaggtcatgtctctgctgctcttgtactcggtggagttgatatcactggtccacatctgcatactatatacccacacggttcaactgacactcttccattcgccacaatgggttcgggttctcttgctgctatgtctgtgtttgaggcaaagtataaagaaggcctaactagggatgaaggaattaagctggtcgctgaatccatatgctcgggtatattcaatgacctgggtagtggtagcaacgtggacatctgcgtgatcacaaaggggaacaaggaatatctcaggaactacatggaaccaaacccaagaacctatgtcagcagcaaaggctattccttcaccaagaaaacygaggttcttctcaccaaaatcaccccattgctggagcgagtcgaaatcacagaagttggtgaagctatggaggaataa

SEQ ID NO: 40 - DNA, 631 bp, Arabidopsis thaliana
atggatcctagcatggcaaacaacccggaattgcttcaattcctcgccgtaagtctccgatttgtttttgatgaatgctaattagttctttcaattttaaagctttttaagtcgattcacatggaaacttgagcatttggacagcgaaattataagtagaagcagtgttttaagtcctgtctggattcacagaaaccatttatttgaatcttcgttgacgggtcaaattaacatttcgatgctttaaacttgaaagatctgattttttttttcatgtgtgatttagttggtatgattagaatcaagttgaattgagatttagtgtactaatatgtgtttacaagaattgggtttattagggtttatgcaaagtaatgatttttttttgtcttgggtttatgtttggtgaattgtaagagaatgtgggtgtgtgtttgtgtggcagcaagagaaagaaagagcaatggtgaacgaaatggtgtcgaagatgacaagtgtgtgctgggacaaatgcatcacaagcgcaccgggaagtaagttcagctcaagcgagagttcttgcctcactcattgtgctcaacgctacatggatatgagtatgatcatcatgaaacgctttaattcgcagtaa

SEQ ID NO: 41 - DNA, 1213 bp, Arabidopsis thaliana
atgaaaacaatcttcctcgtactcatttttgtctcttttgcaatctctccagcaacttcaactgcgccggaagaatgtggaagcgagtcagcgaacccgtgcgtcaacaaagctaaagctttgcctctcaaagtcatagcaatcttcgtaatcctcattgcaagcatgattggtgttggagctcctctctttagccgtaacgtttcgttcctccaaccagacggaaacatcttcactatcattaagtgtttcgcctccgggatcatccttggaaccggttttatgcacgttttacctgattctttcgaaatgttgtcatctatatgtcttgaagagaacccgtggcataaatttcctttctccggatttctcgctatgttatcgggtctaatcactctagccattgactccatggccacgagcctatacaccagcaagaacgcagttggtatcatgccccatggtcatggtcatggtcacggccccgcaaatgatgttaccttaccaataaaagaagatgattcgtcaaatgcacagctcttgcgataccgagtcattgccatggttcgtacgcacatatatacataccgaatatcattgtattttaaatgacatattaccgaatacataggtatatctaactttctacggatatataggtcttggaacttgggatcatagttcactcggtggtcattggattatctctaggagcaactagtgacacttgcaccattaaaggacttatagcagctctttgcttccatcaaatgttcgaaggcatgggtcttggcggttgtatcctccaggtaaatatactttagataaaagaaaaaaaattatctttagccaaatgttgaaattgtatatacaaatatgaaacatctaatgtttaagataatttcaggctgagtatacaaatatgaagaaatttgttatggcgttctttttcgcggtaacaacaccattcggaatagcgttagggatcgctctatcaactgtttaccaagataatagcccaaaagctttgatcacggttggacttctaaatgcatgctccgctggattgctcatttacatggcactcgtggatcttctagctgcggagttcatgggacctaagcttcaaggtagcatcaaaatgcagttcaagtgtttaatcgcggctcttctcgggtgcggtggaatgtcgattatcgccaaatgggcttaa

SEQ ID NO: 42 - DNA, 2130 bp, Arabidopsis thaliana
atggcttcgacttcttctttgggaccttctacactactctcttacggttctccttctcgtcagtttcctgattttgggttcagattgatttcgggtcacgaaagtgttcgaattccatcattccggcgatttcgggttcactgcgagtcaaaggaaaaagaagtgaagccgtcttctccatttcttgaaagctcctcgttttcgggagatgctgctttgcgctctagtgaatggaaggctgttcctgatatttggagatcatctgcagaaaagtatggtgatagagttgcattggtggatccttatcatgatcctcctttgaaactgacgtacaagcagttggaacaagaaattttggactttgctgagggcttacgagttcttggagtgaaagcagatgagaagattgcactttttgctgataactcctgccgatggcttgtttcagatcaaggtataatggccacaggggcagtcaatgttgtcagaggatctaggtcctctgttgaagagttactgcagatataccgtcattctgaaagcgtagccattgttgtggataatcctgagtttttcaaccgcattgctgagtcatttacgtcaaaggcatctctgagatttttgatacttctctggggtgagaaatcatcactggtcacacaggggatgcagattccagtttacagttatgcagaaattataaaccaaggacaggagagtcgtgcaaaattatcagcatctaatgataccaggagctatagaaatcaattcatcgattcagatgatacagctgcaattatgtataccagtggtaccacgggaaatccaaaaggcgttatgcttacacatcggaatctcttacaccagataaaacatttatccaaatatgtacctgctcaagctggggataaatttctaagcatgctaccatcatggcatgcctatgaacgtgctagtgaatacttcatattcacttgtggagttgagcaaatgtatacatctataagatacttaaaggatgatctaaagcggtaccaaccgaactatattgtgtccgttcctctagtatatgagacactttacagtgggattcaaaagcaaatttctgcaagttctgctggccgtaaatttctagcacttacattgatcaaagtcagtatggcatatatggagatgaaaaggatatatgagggtatgtgtctgacaaaagagcaaaagcctccaatgtatattgttgcttttgtggattggttgtgggcgagagtaattgctgccttgttgtggccattacatatgttggccaaaaagcttatctacaagaaaattcattcgtctattgggatatcgaaggctggtattagcggaggtggtagtttacccattcatgttgacaagttttttgaggccatcggtgtgattctacaaaatggttatggtttgacagagacctcacctgttgtctgtgcacggacacttagctgcaatgttcttggctcagctgggcatccaatgcatggtacagaattcaaaattgtagatcctgagactaataatgtactccctcctggttcaaagggcattatcaaagtcagaggtccacaggttatgaagggttattataagaatccatcgactacaaagcaagttctaaatgagagtggatggttcaatacaggagacaccggttggattgctcctcatcactcaaaagggcggagtcgccactgtggaggtgtcattgttcttgaaggccgtgcaaaagacacaattgtactttccacaggtgaaaatgtggaaccgttggagattgaagaagccgccatgagaagcagggtgattgaacaaattgttgttattggacaggaccgacgtcgccttggagctatcattatcccaaacaaagaggaagcacaaagagtagatcctgaaacatccaaagaaacactaaagagcttggtctaccaagaactgagaaaatggacatcagaatgttcgtttcaagtcggaccagtcttgatcgtcgacgaccctttcacgatagacaacgggttaatgacaccaactatgaagattagacgggacatggtcgtggctaaatacaaagaggagattgatcaactctacagttaa

SEQ ID NO: 43 - DNA, 1341 bp, Arabidopsis thaliana
atggcgaacttggtcttatcagaatgtggtatacgacctctccccagaatctacacaacacccagatccaatttcctctccaacaacaacaaattcagaccatcactttcttcttcttcttacaaaacatcatcatctcctctgtcttttggtctgaattcacgagatgggttcacgaggaattgggcgttgaatgtgagcacaccattaacgacaccaatatttgaggagtctccattggaggaagataataaacagagattcgatccaggtgcgcctcctccgttcaatttagctgatattagagcagctatacctaagcattgttgggttaagaatccatggaagtctttgagttatgtcgtcagagacgtcgctatcgtctttgcattggctgctggagctgcttacctcaacaattggattgtttggcctctctattggctcgctcaaggaaccatgttttgggctctctttgttcttggtcatgactgtggacatggtagtttctcaaatgatccgaagttgaacagtgtggtcggtcatcttcttcattcctcaattctggtcccataccatggctggagaattagtcacagaactcaccaccagaaccatggacatgttgagaatgacgaatcttggcatcctatgtctgagaaaatctacaatactttggacaagccgactagattctttagatttacactgcctctcgtgatgcttgcataccctttctacttgtgggctcgaagtccggggaaaaagggttctcattaccatccagacagtgacttgttcctccctaaagagagaaaggatgtcctcacttctactgcttgttggactgcaatggctgctctgcttgtttgtctcaacttcacaatcggtccaattcaaatgctcaaactttatggaattccttactggataaatgtaatgtggttggactttgtgacttacctgcatcaccatggtcatgaagataagcttccttggtaccgtggcaaggagtggagttacctgagaggaggacttacaacattggatcgtgactacggattgatcaataacatccatcatgatattggaactcatgtgatacatcatcttttcccgcagatcccacattatcatctagtagaagcaacagaagcagctaaaccagtattagggaagtattacagggagcctgataagtctggaccgttgccattacatttactggaaattctagcgaaaagtataaaagaagatcattacgtgagcgacgaaggagaagttgtatactataaagcagatccaaatctctatggagaggtcaaagtaagagcagattga

SEQ ID NO: 44 - DNA, 1002 bp, Arabidopsis thaliana
atgaaagggattctagggtttgaatacgggatagttcaggcgccattaggaccagatatctccggaccagagcttgtagccgccgtcgctaatgcaggagggattggtcttctcagatgtcctgattgggagtgtcctgattacttgagagagcttataagaaagacaaagacattgacagagaaaccatttgggatcggtgttgttcttgcgtttcctcatgatttgaacattaagacaatcttagaagagaaagtggctgtcttgcagctttattggggtgattgttcacaggagcttgtggatgatgctcactttgccggtgtcaaagttattcctcaggtggggaatgtcgaagaagctagaaaggctgttgctgtaggagtagacgccattattgtccaagggcgtgaagcaggtgggcatgttattggcaaggatggtctcttttcattgttgccaagagtggtggatttagttggggaacgcgatattcccgttattgctgctggaggaattgtggatggacgcggttatgttgcagctttgtcacttggggctcaaggggtctgtctaggcacaagatttgtggcgactcatgaaagctatgcacacccaatatacaaaaggaagttgattgaatatgaaaaaaccgaatacacggatgtatttggaagagcaaggtggcctggtgcgcctcaacgtgttctggagacgcctttctttgatgactggaggtctcttccggctcatgagaatgaagttaaccaacctattattggacgttccaccatacatggcgttgaaaaggagataagaagattttcaggaacagtaccaaacatgacgacaacaggcgacttagagagtatggctatgtatgcaggccaaagcgtaggccttatcaaggagattttaccggctggagaggtagtgaaaagtcttgtggaagaagctcaggctctgatcctccaaaagttcaacaatgctactactacatga

SEQ ID NO: 45 - DNA, 2368 bp, Arabidopsis thaliana
atggcgatgtatgttatctacgagtcttcttccggctatggtctcttcgaggttcacggactagatgagatcggacagaacactgaggcggttcggacttctgtctccgacctcagtcgctttggccgtgttgttcagctcacagcgtttcatccctttgagtctgctctcgatgctctcaaccaagtcaacgccgtctctgaaggtcagactcttcattactctcttcttattctttgttctgtatattcatgtgttgtgttgagtagcttgttcttgtatttagagctagagtagacacttcgatttaaaaccttatagttcaaatttcctggatatattgtagaaagagctttaatttatggttgattcttgtttttgtgttctgtttttgtttcattgttttggttttgtcattgatgcttttggaattggttttaatgtgatattggtaggtgttatgactgatgagcttagaagttttctggagttgaatcttcctaaggtcaaggagggaaagaaacccaagttcagtttaggattggctgagcctaaactcggttcacatatatttgaagctactaaaatcccatgccagagcaatgagtttgttcttgagcttctcagaggtgttcgccagcattttgataggtttatcaaggacttaaaggtgtgatctcctttctatgtgtttaaaatctttttgtctgtttgcttatctcatatggtttgtgttctcataaaaaatttctgtttatgtagcctggtgatcttgaaaaatctcagcttggattagctcacagctacagcagagccaaggtgaagttcaatgttaaccgagtggataacatggttattcaagctatcttcatgcttgacacgcttgataaggatatcaattcctttgccatgagagtcaggtttgttttgtgcttttccctttcagattgtgtgttttcctcgagaaaattggtagctgaactgtttataatgttattacagggaatggtattcgtggcacttccccgaactagtgaagatagtcaatgacaactatctttacgcccgtgtttcaaagatgattgatgacaagtcaaagttgactgaagatcacatccccatgcttactgaagtcttaggggatgaagataaggcaaaggaggtcatcgaagctggaaaagcatccatgggtaaaaattttgagctgacttttttggtagctttgagttaatgtgtgtttctgttaacttatgtcctgagacatttactctcttccctattggcaggctcggatttatcaccgcttgacttaatcaacgtacagacctttgctcagaaagttatggaccttgctgactacaggaagaagctctatgattatcttgtcactaagatgagcgacattgcccctaatttggctgctttgattggagaaatggtcggtgcccgtttgatttcacatgctggaagtctgactaaccttgctaaatgcccatcttccaccctccagattcttggagccgagaaggctcttttcaggtgcaatatctggcactatatttttaatgttcaccagtttccttttagtgctgcttgtgacatgaactgctgtggtatttcagggcacttaaaacacgtggaaacactcccaagtatggattgattttccattcttccttcattggccgagcatctgctaagaacaagggccgtatcgctcgttatcttgcaaacaagtgctctatagcatcccggattgattgttttgctggtaaaaatctgaaactccttgaagaagagttttggattatgaattctgttgtgaaagtgttaaattatgtgccctgatgtcctatgcagatggtgcaactactgcttttggtgagaagcttcgcgaacaagttgaggaaaggctagaattttatgacaaaggtgttgccccacgcaagaacgtggatgtaatgaaggaggtgatagagaatctaaagcaaggtatttcttgtagctgtttttttttggttgtaatcagagtcctctttatgatggcaaactcagtgtttttttatctgttcctcctttagaagaggaagggaaggagccagttgatgcctcggtgaagaaaagcaagaagaagaaggcaaagggtgaagaagaagaagaggtggtggcaatggaggaggacaagtcagagaaaaagaagaagaaagagaagaggaagatggagactgcagaggagaacgagaaatcagagaagaagaagacaaagaagagtaaagctggaggagaagaggagactgatgatggtcacagcaccaagaagaagaagaagaagtctaagagcgctgaatagaaagggatgcaacattaa

SEQ ID NO: 46 - DNA, 827 bp, Arabidopsis thaliana
ttaattaaatagcgacgacagtgggaagaaacatagcagcaccattgctgttcttgaatcttgttatgtacctgattgtgcttggttttgcaagttggtgtctcaataaatacatcaacggccaaactaaccacccaagtaaatttatttttctctttctctctagctatttatatggtcatgtagctgatctagtggaattactaagaatattagtaatgtttgaataggttttggaggcaatggagcaacaccgttcttcttgacgttttcgatattggcggctgtggtaggagtagcgtcgaagttggccggagcaaatcatattaggttttggaggaatgatagtttagccgctgctggagcttcttccatcgttgcatgggctatcacagctcttgccatggggtaattactttatttatgatgtcctattaaatcccatgaagtgctaatttttgacgactatttttctttaaaacttggttttggatattttgtgaacttctttatatagatgcatggaagtgtcagtgtttggtaaatggtataataaacttaattttgatgaaaggttggcatgcaaacaaataaacataggaggatggagaggatggagactgaagatgattgaagccttcattatcattttgacgttcacgcagcttctctacctcatgttgatccatgccggttcactcagcagcaaatatggtcctggatacagagaccaagactatgctacaggccaagctcatggtcatggtcatgtaccacacactgtgggagagcacaaggctggtgttggatctaccatggcagtctga

SEQ ID NO: 47 - DNA, 1218 bp, Arabidopsis thaliana
atggcggcggctctgcagacgaatatccggacggtcaaggttccggctacgttcagagctgtaagtaaacagtcattggcaccctttagagtaagatgtgctgttgcttcccctggtaaaaaacgatacaccatcactctccttcccggagacggcatcggtccggaggttgtctccattgccaaaaatgtgcttcagcaagctggatctttggaaggagtggaatttaacttccgtgagatgcccattggaggagctgctttggatttggtcggagtgcccttgccggaggagactatctcagctgcaaaagaatcagatgcagtgcttcttggagccattggagggtacaaatgggataacaatgaaaaacatctgaggcctgagaaggggttacttcagattcgtgcagctctcaaagtctttgcaaatctgagacctgctacagtcctcccacagttagtggatgcttccaccttaaagagagaggtagcagaaggtgttgatctaatggttgtaagggagcttacaggaggtatttactttggagagccaaggggcataaagaccaatgaaaatggcgaggaagttgggtttaatactgaggtttatgctgctcacgagattgatagaattgctcgtgttgccttcgagactgctcggaaacggcgtggcaagctgtgttctgttgacaaagctaatgttttggaagcctcaatcttatggaggaaacgagtaacagcattagcctctgaatatcctgatgttgagctgtcacatatgtatgttgacaatgccgcgatgcagcttgttcgtgacccaaaacagtttgacaccatcgtcacaaacaacatttttggtgatatattatccgatgaagcttcaatgatcacaggaagcataggaatgctgccatctgctagtctcagtgattcgggacctggactctttgaacctatacatggttctgcacctgatattgctggacaggataaggcaaacccattggcaaccattctaagcgctgcaatgcttctgaaatacggacttggagaagaaaaggcagccaagagaattgaagacgcagtgttggttgctctgaacaacggattcagaactggagacatatactccgcgggaacaaaactggtgggctgcaaggagatgggagaggaggttctgaagtcagtggactcccaagttccagcttctgtttaa

SEQ ID NO: 48 - DNA, 1606 bp, Arabidopsis thaliana
atggctaacgtttcgtttacttttgattctcaggaacaaaataaggaattgaggccgagtagattagtgggtagatctgatgagagaaatggtaggagacagggaacagagcaaaagaagaaggtaaagaaactgaacaaaaacttactctgttatctactctgtattttgtgatgaaacaagagtcgacacgatttttttcaggagaaagaagactcgggttttagagtaagcgaagagggtgagattcctttgcaacaagggtcaaatactgactcatacgcgcgggatgatctgacacaacaacagagagtgagtgatgttgtgatgcagaggagaagccatgaaacagagtcgagattatggcaaagggtaaagaaactaaagtcttgctcttacacaatatgctttgtttgatttaacgttttcttttgaatatttgatacattaggctagaactcaggataggagaggaagtgaatccagaatgatgtttgatgggagaactcagtggagtcacgcaccggtgctatcgagtgcgtatccagttcgccccggtgaagataattgtctgttttatatgaaaaaccatctgtgtgaatggggaagcgagtgttgttacaatcatcctcctctacaagtgagaaagaaaacattatctcaattaatttggctaagtataatttgcagttttcctcatttcttatacctttgttactacaaacaggagattccgtgcaggattggtaagaagctggattgcaaggtacatttcttggatgtcttgttattatctcaaaacctgattaattcgattggttgttgtggtatgagcggattataaagagtaaaaaaaacctagattttcttctgctttaatgcattcgagttgagcgtcaagtaacaagaattccaaacttctatatgcattttgttgcagttttttaaggcaggagcttgtaagagaggctcaaattgtccatttaatcacccaaaggaaagggatggtgatagtttacctatgcctcaggtaatttcaccgcggatattatattagtcttagcaacgttttattgtcaaatgtgataacttaaaccgagtttattctccagggttagaagccatgactatattagtttgatgtaacgtgttttaagttttggctctcagggtagaactccggatttgagaaggaatgattcagggaggaggtacaatacagagtcaagatcatggccagagaataaggtaaggaaacagaacaagaacttattctcttcgttactttggattatgctgagacaagggtttatacgaatttctcaggagaaagaagtgggccagtttcgtgatcaccaagactctaaagaagacgcgcaagaggttctgctacaacagagacctagagatgttgagatgcggaagagggtaaagaaactaagttcttacatagttttctttgtttgattttaacgttttcttttgaattttgattctcagtctagaagtccggattttagagcgagttcatcgagaggaagagttgaaaataaatgtcaaagacgccatggaaaggagttggccttattcaagcgagagaggctaa

SEQ ID NO: 49 - DNA, 2325 bp, Arabidopsis thaliana
atgtcttgttataataaagcactattgatcggcaacaaagtcgtcgttatacttgtattcctcttatgtttggttcactcgtcagagtcacttcgaccactgtttgcatgtgatccagcaaacgggttaacccggacgctccggttctgtcgggccaatgtaccgatccatgtgagagttcaagatttgctcggaaggctcacgttgcaggagaagatccgcaacctcgtcaacaatgctgccgccgtaccacgtctcggtattggaggctatgagtggtggtccgaggctctccacggcatttccgacgttggtccaggcgctaagttcggtggtgcttttcccggtgccaccagcttccctcaggtcatcaccaccgcagcttctttcaaccagtctctatgggaagagatcggacgggtggtgtctgatgaggcaagagctatgtacaatggtggcgtggccggtctgacatattggagtccgaatgtgaatatcttgagggacccgcggtggggccgaggccaagaaactcccggagaagatcctatcgttgccgcaaaatatgccgccagctacgtccggggacttcagggtactgctgccggtaaccgccttaaagtcgccgcatgttgcaaacattacactgcttatgatcttgataattggaatggcgtcgaccgtttccacttcaacgctaaggtcacccaacaagatttagaggacacatacaacgtgccattcaaatcatgtgtttacgaaggaaaagtagcgagtgtaatgtgttcgtacaaccaagtcaatggaaagcccacatgtgctgatgaaaatctcttaaagaacactattcgtggtcaatggcgtctcaatgggtacattgtctcagattgtgactctgttgatgttttcttcaaccaacaacattacactagcactccggaagaagccgccgccagatccattaaagccggtttggacttggactgcgggccgtttttggcgattttcacggaaggtgcagtgaagaaaggattgttaacggagaatgacatcaatttagcacttgctaatacattaacagtccaaatgagacttggtatgtttgatggtaaccttgggccgtacgctaatcttgggccaagagatgtttgtactccggcccataaacatttagctcttgaagcagcccatcaagggattgttcttctcaaaaactctgctcgctctcttccactctcccccagacgccaccgcaccgtcgccgtgattggtccaaactccgacgtcactgagactatgatcggcaactatgcagggaaagcatgcgcctatacgtcgccgttgcaagggatttcaagatacgcgaggacacttcaccaagctggctgtgccggcgtggcttgcaaagggaaccaaggatttggtgcagcggaggcagcggcgcgtgaagccgacgcgacggttcttgtgatgggattagatcagtcgatagaggcagagacacgagatcgaaccgggcttctcttaccgggttatcaacaagacctagtgacccgtgtagctcaagcttctagaggtccagtcattttggtccttatgagtggtggaccaatcgatgtaaccttcgctaagaatgatcctcgtgttgctgccatcatttgggctgggtatccgggtcaagcgggtggagctgccatcgccaatatcatctttggtgctgctaatcccggaggaaaactaccaatgacatggtatccacaagattacgtggccaaagtgccaatgacggtaatggccatgagagcatccggtaattatccaggaaggacatacagattctacaaaggtccagtagtatttccatttgggttcggtttaagttacactaccttcactcatagtttggccaaaagcccattggcccaactatcagtttcactctccaatctcaactctgccaataccattctcaactcttcatcacactccatcaaagtgtctcacaccaactgcaattcatttccgaaaatgccccttcacgtcgaagtatcaaacacaggtgaattcgatggaacacacacggtgtttgtatttgctgagccgccgataaacggaataaaaggattgggtgtgaacaaacaattgatagcgttcgagaaggttcatgtcatggcaggggcaaaacagaccgttcaagttgatgttgatgcttgcaagcatcttggtgtagtggatgagtatggaaagaggagaatcccaatgggtgagcataagctgcacattggtgaccttaaacatactattttggtccaaccgcaactttga

SEQ ID NO: 50 - DNA, 1218 bp, Glycine max
ttaattaattcaaccttatcaaattaaccccctacacatttatttagctagctagccaatttattaattaggcacataatgggaagcccagaatccaatttgccacccggttttaggttccacccaaccgatgaggagctcattcttcactaccttagtaaaaaggtagcatccatacccttgaccgtttccattattgctgaggttgatatctacaagttagatccatgggacttaccagctaaggccacctttggggagaaagaatggtatttcttcagtcctagagaccgaaagtacccaaatggtgcaaggccaaacagggcagctgcttcagggtattggaaggccactggcactgataagaccatagtgacatcattgcaaggaggagcacaagagagcgctggtgtgaagaaggctttggtgttttacaaaggaagacccccaaagggtgtcaagaccaattggatcatgcatgaatatcgccttgtagacaacaacaaacccatcaagctcaaagactcctccatgagattggatgattgggttctttgccggatttacaagaagtccaaacatgctctaacttcaacagaggcatcaataggggtgggtgaggtagatcaagcagaggagcacttattccaagagacccttttgccaatctcaaaatctccagcacctccacctcaaaacacattgatatctcagaaatctgtgtccttctccaacttgttggatgccatggactactctatcctaagtagtttcttatctgagaatcataccaaccacccaccaggggttggatcaagtgctggattcaacactgggaatttggatcagcaatgctctccaatcaataacaacaaccctaccaataattacatgtttcagaagaatccccaattgaacccttcagtctccaacatggaaaacatgatgaggccaaagcgccaagtttcaaacatggatgaggaaacgttgtacccatcaaagaaataccttagttcctcttgcaacttccctactaacatcagcaaccaatacgagaacccacaatggaactacctcatgaagcagtctttgatgaatcagcggttaatgcttggtcctcatcttcaatttcaaggataatccaaaaatatcaaaagattaaatgaaataggaaaattaaagtaaaatattcagaagctgagcacaccaaatttaaat

SEQ ID NO: 51 - DNA, 1561 bp, Arabidopsis thaliana
ttaattaatggcctcttcttcttattttatcatagctaagctcaaaaacaatcgatagatggagaagaagaagagcatgttcgttgaacagagcttcccggagcatgaaattggcgatactaacaaaaactttgacgaggatggccgcgacaaaagaactgggacatggatgaccgggagtgcacacataataacggccgtgatagggtcgggagtgttgtctttggcgtgggcaatcgcacaacttggatgggtggcaggacccgccgtactaatggctttttctttcataacatattttacatcaaccatgcttgccgattgttaccgttcccctgaccctgttaccggcaaacgcaactacacttacatggaagttgtccgatcctatctaggaggaagaaaagtgcaattatgtggattggctcaatacgggaatctgattggaataacaatcggctacacaatcacagcttcaattagcatggtggcagtgaagaggtcgaattgtttccacaaaaatgggcataatgttaaatgtgccacttcaaacactcccttcatgatcatatttgcaatcatccaaattattcttagccaaatcccaaatttccataacctctcctggctctccattcttgcggccgtaatgtccttttgttatgcctccatcggtgttggtctctccatcgccaaagcggcgggtggcggtgagcacgtaagaacaacactgacaggagttacggtcgggattgatgtatcgggtgccgagaaaatatggagaacgttccaagcgattggggacattgcatttgcctacgcatactcaactgttctcattgaaatacaggacaccttgaaagcaggtcctccatcggagaacaaagccatgaaaagagcaagccttgtgggtgtctccacaacaaccttcttctacatgttatgcggttgtgttggttacgctgcctttggaaatgatgctcctggaaatttcctaactggttttggtttctatgagccattctggctaatcgactttgccaatgtctgcatcgccgtgcaccttatcggcgcctaccaagtcttttgtcaaccaatttttcagttcgtagagagccagagcgcgaaacgttggcctgataacaagtttattacaggagaatacaaaatccatgtcccttgctgtggtgattttagtatcaacttcctcagattggtatggaggacttcatatgttgtggtcaccgcggttgtagccatgatcttccctttcttcaacgatttcttgggtcttattggagcagcttccttctggcctttgactgtttactttcccattgagatgcatattgctcagaagaagataccgaaattctctttcacttggacttggttaaaaatcttgagttggacttgtttcattgtgtccctcgttgctgcagccggatcagtgcaaggactcatacaaagtctcaaggatttcaagcctttccaggctccttagtgaaaatatgtgttctcgccaacgtctccaagaacacaagttccatgcaatttaaat

SEQ ID NO: 52 - DNA, 601 bp, Arabidopsis thaliana
ttaattaaatgaataatttgaatgtttttacaaatgaagacaatgaaatgaatgtgatgcccccaccgcgagtgtgtccaaggtgttattccgatcaaaccagattcagctacttcaacaacaacaagaagtctcaaccgcgctacaaatgcaagaattgttgtagatgttggactcatggtggagttttaaggaacataccagtcactggaatatgtgataaatccaatcttccgaagatagatcaatcttcggtttctcaaatgatcttggctgagatccaacaaggcaatcatcaacctttcaaaaaatttcaagaaaacatttcagttagtgtttcttcttcttcagatgtttctattgttgggaaccatttcgatgatttgagtgaacttcatggtataacaaattctactccaattcgaagttttacaatggatcgcttagattttggtgaagaatcgtttcaacaagatttatacgatgttggttccaatgatttgattggtaaccctttgataaaccaatcaattggtggatatgttgataatcacaaagatgaacacaagttgcaatttgaatatgaatcataaggcgcgcc

SEQ ID NO: 53 - DNA, 966 bp, Arabidopsis thaliana
ttaattaaatggactgcttaagctacttctccaactcagatgtaatccagcttcaggattgctttatccctgatgtggatatgattatccctgaaactgacagtttcttcttccaagagcaaccgcaacatcagccattgtatcccgacgaagctctttcaccgtctctcttcgggtttgatcactatgatcatttctacgagtcgtttcttccatctcaagaaatcttccttcctagccctaagacccgagtcttcaacgagtcacaggaattagattccttccacacgccaaaacaccagaaactcattgactccagcttccatttcaacagtcacgaccctttttcccctagccctgaatctaattacctcttggattcttacatcacagaagcttccaacatttccaagtttcaagctcctgatttctcatcgacgttcaaggttgggtggactgaacaaggcgacaccaagaagcgagagctatctgctcagagcatcgcagcacgaaagaggagaagaagaatcacagagaagactcaagagctgggaaaactaatccctggaagccagaaacacaacactgccgaaatgttcaatgccgcagctaaatatgtcaagttcttgcaggctcaaattgagattctccaactgaagcagaccaaaatgcaggtataagataaaccctaaatccaaatggttccttgcagtattttccttcctttttttatacgatacttgtttaaattttgcagactctggatagttcaaaggtgggaagagaaatgcagtttttgcttggttctcaagaaatccaggagaagctatctacagaagaagtgtgtgtggttccaagggaaatggttcaagtcctaaaagccgaagaatgcatcttgacaaaccctaagatttctcgagacattaacaaattgttgtcaacaaatctgatgaattagggcgcgcc

SEQ ID NO: 54 - DNA, 1222 bp, Arabidopsis thaliana
ttaattaagaaagagagaaggaagaagatttgtgaatagctcttgatctggtgaagaatggatgcaattagaaaacaagctagcaggttgagagaacaagttgcgagacagcagcaggctgtctttaagcaatttggaggagggggatatggctctggtttagctgatgaagcagaactcaatcagcatcagaagctagaaaagctttacatatccactcgtgctgctaagcattaccaaagagatattgttcgtggtgtggaaggttatatagttacagggtcaaaacaagttgaaataggtacgaaattgtctgaggatagcaggaaatatggttcagagaatacatgtacgaatggtaacgtattaacacgggctgcactgaactatgggcgtgctcgagcacaaatggagaaggaacgtggaaatatgttgaaggctcttggtacacaggttgctgagccattacgggcaatggttttgggagctccattggaggatgctagacatcttgctcaacgctatgacagaatgcgccaagaagctgaagctcaggctacagaagttgccagacgccaagcaaaggcgagagagtctcaaggtaatcctgacatcttgatgaaactggaatctgctgaagcaaaacttcacgacctaaaatcaaatatgacaatattggggaaagaagctgcttctgctttagcttccgttgaagatcaacaacagaaattgactcttgaacgacttctttcaatggttgaatctgaacgcgcctaccatcaaagagtcctccaaatacttgatcagctcgaaggagagatggtatctgagaggcaacgtatagaagctccctctactccctcaagcgcagacagtatgccgccacctccatcatatgaggaagctaatggagtgtttgcatctcagatgcatgacacgtcaacagatagcatgggttacttcttaggagaggtcttgttcccatatcacggtgtgacagatgtcgagctcagcttatcaactggtgaatacgttgttgttagaaaggttacaggcagtggatgggccgaaggtgaatgcaaaggcaaagctggttggttcccttatgggtacattgaaagacgggaacgagttcttgctagcaaagtgtccgaagttttctgagaatttgaaggtaacattatggttctttgttggttatggaattgagttgcggcgcgcc

SEQ ID NO: 55 - DNA, 979 bp, Glycine max
ttaattaaaaattctcattttcaagctgtttggtgtaaagatgggacaagtgcttggttgtgttcaagtgaagcagtcaactgtagccgtcaaggaatgtttcgggaagtacgatgatgttcttcaacctggttgccattttgtgccatggtgtcttggctgcggtgtggctggtgtcctttctacgcgtgtcatgcagctaagtcttcgttgtgaaactaagacaaaggacaatgtgtttgttaatgtggttgcctcaatccaatatcgagcattggcagaaaaggcatcagatgcttactacaaactcaccaataccaaagcacagatacaatcctatgtctttgatgttatcagagctactgttccaaagatggaacttgatgctgtttttgagcagaagaacacaattgcaaaagcagtggacgaagaacttgggaaggctatgtcagcatatgggtacgagatagttcagactcttattgtggatattgtgccggatgagcatgtgaagaaagccatgaatgagattaatgctgctgcaagattgagggtggctacaaacgacaaagctgaagcagagaaaataatgcagataaagcgagcagaaggggatgcagaatcaaagtacctagcaggccttggagtttctcgtcagcgccaagccatagttgatgggctaagagacagtgttctagcattttctggtaatgtgcctggaacatcatcaaaggatatcatggacatggttctcatgactcaatattttgacacaatgaaggagattggtgcatcctccaaatccaatgctgttttcattccacatggacctggtgctgtgagtgatgttgcttcacaagtaaggaatggtcttctccaaggaaatgcaacaacagagtcttgaagacatacacatatatcatcataccatgatttcctcctccaggcacttgtagtttagctttgcaactatttaaat

SEQ ID NO: 56 - DNA, 1077 bp, Arabidopsis thaliana
atgttgctgcttaaggaagaagatgaaggaagacgaagaactagtgttcctacacaactcatgaaactaaatagaagccaatggtggattcttgttttcataagcatcttctttctcatctctgctcaagccatttctgttcttcttggtcggttttattacaatgaaggtggaaacagtaaatggatctctactcttgttcaaactggtggctttcccattctttatctccctctttctctccttcctgcttcacaatcttcttcttcttcttcttcttcttcttctttcaagactctggtttggatttatctttctcttggttttgctattggtttagataattttttatactctgttggacttttgtatctctctgcttcaacttattcgattctatgtgcttcacagttagctttcaatggtgtcttctattattacatcaattctcagaaaatcacttgtttgattttcttctcagtgttgtttctctctatctctgctgtgttggtttctcttgacgatgattcaaatagcccatcaggagattctaagtggagttacttgattgggtgtttctgtgcagtttttgcttctcttatctattctcttcagctctctcttatgcagttttctttcgagaaggttctcaagagtgagactctctctatggttctcgagatgcaaatctatacgtcgcttgtggcttcttgtgtagcggttatcggattgttcgcaagcggggaatggatgttgttgagtgtggagatggaagagtttcaggaaggtcaagtcatttatgttttgactttggtcggggcagcggtttcgtgtcaattgggttgtgtaggagccgtgtcgcttatatttctggtgtcttcgctgttttcaaaccttattagtacgctctcactcattgttacgcctctcgcggccattgcggtgttccatgacaagctgactgaggttaagatggtggcgatgcccatcgccttcacaggattcacgttttatatctaccagaactatcttgatgacttgaaagtacaaagagcacgagaagctcaggccgaatga

SEQ ID NO: 57 - DNA, 1359 bp, Arabidopsis thaliana
atggaatcctccggcgacaagcaaacttcttctctttaccctactgttgacacatccaatcccgaagctcctataaaccctagctcatcatcttctactaacaatctctatccttctctcgatatgaatgatctcgctcgtaatctcttccctgaacaaccagagacgagttctattccggtttcagctcctcccgctgcgacggaggaagtaattttgaaaatctccggcgcgattcttcatttaatcgacaaatcttacagcgtcgagctcgcttgcggtgatcttgagatcatccgtattgttcaaggagagaatgttgtcgctgttctcgctagtgtctccgatgagattcaatggccgttgactaaggatgagaactctgtcaaggtcgatgagtctcattacttcttcacgcttcgtcctaccaaagagatctcacatgattcaagcgacgaagaagacggagatggagggaaaaacactaacgagatgttgaactacggacttacaattgcttctaaaggtcaagagcatttactggtggagcttgagaagatcttggaggattatagtagtttctctgtgcaggaggtgtcagaggaagcgaaggaagcaggtgaaaaggttttggatgtgacggtggcgagagagacgtctccggtggagcttactggggaaaggaaagagattgtggagaggcaatgttctgcttattggactactttggctccgaatgtggaggattatagcgggaaggcggcgaagctgattgcaactggctcaggacatttgataaaagggattctttggtgtggagatgtgactatggataggcttatttggggaaatggtttcatgaaaaggaggttgtcaaaggctgagaaggagagtgaagttcaccctgacaccttgaaaagaatcagaagagtgaagaggatgaccaaaatgacagagagtgtagcaaacagcatactgtctggagtccttaaagtttctggattcttcacaagttcagtggcaaacaccaaagtaggaaagaaattcttcagccttcttcctggagaagtcatccttgcatctcttgacggattcaataaggtctgtgacgctgttgaagtagctgggaggaatgtaatgtcaacctcttccactgttacaaccgaactcgttgatcacaagtatggtggtaaagcggctgaggcgacaaacgaagggctcgatgcagcaggatatgcgcttggcacagcctgggttgctttcaaaataagaaaggctattaacccgaagagtgtactcaagccttcgacgcttgcaaaaaccgccattagatctgcagcttcacaaaaaaaagcctag

SEQ ID NO: 58 - DNA, 1506 bp, Arabidopsis thaliana
atggatactggcggcaattcgctggcgtccggacctgatggtgtgaagaggaaagtttgttatttctatgaccctgaggtcggcaattactactatggccaaggtcatcccatgaagccccatcgcatccgcatgacccatgccctcctcgctcactacggtctccttcagcatatgcaggttctcaagcccttccctgcccgcgaccgtgatctctgccgcttccacgccgacgactatgtctcttttctccgcagcattacccctgaaacccagcaagatcagattcgccaacttaagcgcttcaatgttggtgaagactgtcccgtctttgacggcctttattccttttgccagacctatgctggaggatctgttggtggctctgtcaagcttaaccacggcctctgcgatattgccatcaactgggctggtggtctccatcacgctaagaagtgcgaggcctctggcttctgttacgtcaatgatatcgtcttagctatcctagagctccttaagcagcatgagcgtgttctttatgtcgatattgatatccaccacggggatggagtggaggaggcattttatgctactgacagggttatgactgtctcgtttcataaatttggtgattactttcccggtacaggtcacattcaggatataggttatggtagcggaaagtactattctctcaatgtaccactggatgatggaatcgatgatgagagctatcatctgttattcaagcccatcatggggaaagttatggaaattttccgaccaggggctgtggtattgcaatgtggtgctgattcattgtctggtgataggttggggtgctttaatctttcaatcaaaggtcatgctgagtgcgtcaaatttatgagatcgttcaatgttcccctactgctcttgggtggtggtggttacactatccgcaatgttgcccgttgctggtgctacgagactggagttgcacttggagttgaagttgaagacaagatgccggagcatgaatattatgaatactttggtccagactatacacttcacgttgctccaagtaacatggaaaataagaattctcgtcagatgcttgaagagattcgcaatgaccttctccacaatctctctaagcttcagcatgctccaagtgtaccatttcaggaaagaccacctgatacagagactcccgaggttgatgaagaccaagaagatggggataaaagatgggatccggattcagacatggatgttgatgatgaccgtaaacctataccaagcagagtaaaaagagaagctgttgaaccagatacaaaggacaaggatggactgaaaggaattatggagcgtggaaaaggttgtgaggtggaggtggatgagagtggaagcactaaggttacaggagtaaacccagtgggagtggaggaagcaagtgtgaaaatggaagaggaaggaacaaacaagggtggggcggagcaggcgtttcctcctaaaacataa

SEQ ID NO: 59 - DNA, 504 bp, Arabidopsis thaliana
atggagaaagtggttgatctcttcggagtcggagaagctaattcccagaagctactcgaaggaggcaaagatctcagcgagatccaacagggattgttcataggatcagtagctgaagcgaataacaaggattttctcaaaagctctaatatcactcatgtcttaaccgttgctgtggccttggctcctccttatcctgatgattttgtctacaaagtcattgaagtggttgatagatccgagaccgatttgacagtatatttcgatgagtgttatagcttcatcgaccaagctattcaatctggtggtggtgttttggttcattgcttcatgggaatgtctaggagtgtgactatagtggtggcttacctgatgaaaaagcatggaatgggattctctaaagctatggaacttgtaaggagccgacgacatcaggcatatcctaatcccggtttcatttcgcagctccagcaatttgaaaaatccatccaaggtaatgcatga

SEQ ID NO: 60 - DNA, 738 bp, Arabidopsis thaliana
atggttttagagacggtttcaaagacggaaccaccaccgttgcttggacctcgtatctccttctcatctgatttatctgacggtggagatttcatctgcatcacccccgtaatgtgtaaggaagatgtcgtcaaagggtcagtgaaagtctccgactttgagttcttgtcgtcggaaaatgtgagtccacagagaatgcttaccgccgatgaactcttctccgaaggtaaattgcttcctttttggcaagtaaagcactcagagaagcttaaaaacattactttgaagacgaacgaagaggaagaagcagagaaacgtaaagtggaagtgaagaagaaagatcaggagattaacaatagagataacagagtgacttggtttatagacgaagatccgtctcctcgtcctcccaagtgtaccgttctttggaaagagcttttgagattgaagaaacagaggaatccgtcttcttcgccggtgacggcgaggacagtgtcgtctttgtctccgtcgtcgtccacgtcatcatcaagttcacttgaggacgcagcgaagagagaggagaaagagaaagaagggaagagaggtaagaaaggattagagagaacgagatcggcgagtatgaggataaggccaatgattcatgttcctatttgcactccttctaaatcctctcttcctttgcctcctctgtttcctctttcgcttaagaaaaacagagtagagagacgcgcctag

SEQ ID NO: 61 - DNA, 141 bp, Arabidopsis thaliana
atgatttaccgaaagtggagtttgctgtccggcccaccggttatcctcggcggagcggtaattgctgccgtcgccgtcggattcgtcttgcaaaacgtaacgaaaggggagcagaagaagaatgtctcaacaaacaagtga

SEQ ID NO: 62 - DNA, 489 bp, Arabidopsis thaliana
atggcgtccttggtagcagctcctatctctttctcaggtgactctcatgtcaaagcacaccgaaacttcaatgcgattcgcaagagctctacattgactgttcaaacaaaatcaaaccgcagtcacaaactctcggtttctgcaggttaccgtgggggaagtaagggtggtggaagtagtgattttgttaccggttttcttctaggaagtgctgtgttcggaactctggcttatatctttgctccacagatccgaagatcagtgctgagcgagaatgaatatggtttcaagaaaccggagcagccgatgtactatgacgaaggcctagaggagagaagagagatattgaatgagaaaatcggccaactcaattccgccattgacaaggtttcgtcgcgtctgaaaggaggtcgaagcggtagcagcaagaacacttcttcgccgtctgtcccagttgaaaccgacgcagaagcagaagctactgcatga

SEQ ID NO: 63 - DNA, 909 bp, Arabidopsis thaliana
atgggaacgttcttaggacactttgtgcctggtctctcacttgctcttcttggtctttggcatctcttcaacaccataagatcttactgtcttaaaggccctgaagctttctctgcaaaattctggttccctttccctaaactcaaacatcttgagcttatcttgattctcttcttctccttcctctccatcactctcctcaccctagatttccctaatttcaacttctcctctctcaaaccagacaacctagaacatgcttccatgttcctccacctcattatctttgcgtgtttcgctctcttctgcgagctaaccctttgctcagatctcttctccggtctaatcggagttctttctgcctctgtcttcgctcaagaactcttccttcttcattttcattccactgatcattcaggtcttgaaggtcactaccatttccttctccaactcattgctttcgtctccttctcctcggcgctagcttctgcttcgttccctaaatccttctctgcggctctattcctcccgatatcggttatgtttcaaggatgctggttcttgaacatggggttcatgctttggatcccagagtatgttcctagaggttgcgtgagtaacatgtcaacatctacagacaataatagaaggagtgtttatcatagtggtgcggtggcttgtgagtcccctggtgctgagattagggcaaaagcattggcgaatctgcagtttagttggatgttgtctgctatacttatcattacatgtgccttgtgcctcaagtattccggtaaagttgtgttgcctaagattaggtcatcgttggagtacgagcgtctttgccggcaaggaagtgatcgttctgcaaccgtaacggtggaagcaccggccagttccgatcaacaatag

SEQ ID NO: 64 - DNA, 1467 bp, Arabidopsis thaliana
atgtatcaccacgctttttccctaaaatttcactccttctctcctcactatgcgttatccctctccaatttctccacccaaagccctaatcctctcctcccgccattcgctagagtccctcatgtgaccagctctgtttgcctccgctgccggagcagcgccgctgatgtatctccggttatatacgccgatggctcctcctccatctgttctttcggggaaactggagatgtcgcggtggtcgagaaacctatagatgtctcaaccttgggtaatctctgcgtcgacattgttctcagtgttcacgaattgccccctccttctcgtggagaacgcaaggccctcatggacgaactctctatgtctcccccagataagaaatactgggaagcaggtggcaactgtaacatggctatagcagctgctagattggggcttcattgtgttgctattggtcacgttggggatgaaatctatggtgagtttcttcttgatgtgcttcatgaggaaggaataggtacggttgcattgaatggaggaacaaatgaaaaagataccagctcattctgtgaaactctcatttgctgggttcttgtggatcctttgcagaggcatgggttttgcagtcgagctgatttcaaggaggaacctgctttcagttggatcactgacctatctgatgaagtaaagatggcaatcagacagtcaaaagttcttttctgcaatggttatgactttgacgatttcagccctagttttattatgtcaacgatagattacgctgccaaagttgggacagctatcttcttcgatcctggaccacggggaaagagtctgtccaagggaactcctgatgagcgtagagcacttgctcatttcttaagaatgagtgatgttcttcttctaacatctgaggaggtggaggctctaactggcatcaggaaccctgttaaagcaggacaagaaattctgaggaacggaaagggaacgaaatgggtgattgtaaagatgggcccaaagggttcaattctagtgacgaaatctagtgtctcagtggcacctgcgtttaaggtggaagtggttgacactgttggatgtggagacagttttgtggctgcaattgcattaggttatatacgcaacatgccgcttgttaataccttaacaattgcaaatgcggttggagcagcaactgcaatgggctgtggagcaggtagaaatgttgcaaaaaggcatcaggtggtggatctgatgaaggcctcgaaactcaatgatgaagagaagtttttcgaacaactcctggctgaaaattcagagtcatctagaatcaatcttctttcaaaagggatgataaaggatgggaggagcaacaagcagctgatagaaacaatctcaatggaaaaagtggtttctgaattgcttgcagaacttgaacttgggaggtgttgtgtgaaggcttcatcttga

SEQ ID NO: 65 - DNA, 963 bp, Arabidopsis thaliana
atggagagtacagattcttccggtggtcctccgccgccgcaaccaaacctccctccaggattccggtttcatccaacagacgaagaacttgtaattcattacctcaaacgcaaagcagattctgttcctttaccagtcgcgatcatcgccgacgttgatctttacaaatttgatccatgggaacttcccgcgaaagcttcgtttggagaacaagaatggtattttttcagtccaagagatcggaaatatcccaacggagctagacctaaccgagctgcgacttccggttattggaaagcgactggtacagataaaccggtgatttcaaccggcggtggtggtagtaaaaaagtgggagttaaaaaggctctagtgttttacagtggtaaaccaccaaaaggagttaaatcagattggattatgcatgaatatcggttaactgataataaacctactcatatttgtgacttcggcaacaagaaaaactctctcaggcttgatgattgggtgttgtgtcgtatctacaagaaaaacaatagtacagcatctagacatcatcatcatcttcatcatattcatctagataatgatcatcatcgtcatgatatgatgattgatgatgatcgattccgtcatgttcctcctggtcttcacttcccggcgattttttctgacaataatgatccgacggctatatatgatggtggcggcggcggatacggaggtggaagttactcgatgaatcattgtttcgcatctggatcaaagcaggagcagttgtttccaccggtgatgatgatgactagtctaaatcaagattccggtattggatcgtcgtcgtcacctagcaagagatttaacggcggcggcgttggagattgttcgacttctatggcggcgacgccgttaatgcagaaccaaggtgggatttaccaattgcctggtttgaattggtattcttga

SEQ ID NO: 66 - DNA, 543 bp, Arabidopsis thaliana
atggtggccgtagctgagaatcagaaaacgaagaacagtctcaagttcctctgcagttacggcggaagaatcctccctcgttctatcgatggaaagctccgttacgtcggcggtttcaccagagtactctccgttcatcactctatctctttcacagaattgacgatgaagttggaggaattttgtggatactccgttgaattgaagtgtcaattaccaaatggagatctcgagacactaatctccgtcaaatcggacgaagatctggtgaatatcgttgaagaatatgatcgtgtttacggaggcaagatccgtgcgattttgtcgcctcctaagcagatgtcaccacgatctagcggcggcggtggagatctatcgccgaaatcgccgttctccgtcgtggcttctccatctccgcctcggtattgtgtggctccgccgacggagaatcttctcagtagattccgtatgagaactggagaatactctcgttgctgtaactgccgtgttccaaacagagactccaagcttatctggcaataa

SEQ ID NO: 67 - DNA, 1479 bp, Arabidopsis thaliana
atggctacatttgcacttcccttctgcgaaattcccgaggatctccagctccgaatcttatccctcctcacaccagcggagatctccagcttcgcctgcacatcgaaacgcttcgcctcgctatgtcaagaagacggcaaaatctggcacgttatgtgcgatcagagatgggggaagaaaactaagatccagaaatgggcaaacggtcaaatcccttatagacacctttacaagactctaaagggattggagaatctaattggcttctggcgtctctgcggcagagcaaatcccgccgcttcatcgccgccgcttgttttcttcgattggggttcttcttttatattgggatctagagttttatccaccggagatgatacttatgaggtaaagaagacaccttttctcttaatggggatttcgccggagggacgatctgagaatttcttggatctcgtcggtggtaatctcagatctgtggatgatgatttgaaagaattagaagcttctaacaatctcgtctcggtggatgtgaatttcatggggaatggtcatatcatggtggaggagaatcgatgttttaccaacaacaatcgtagagaagaccagaggagctcaggggatgagagtgatgatttgatctcatcgcccaatttttcggaaatgtacactcaattggcgaataagacgagtccaggcggtgacaggaggagacagaagaggaaggagaaggagaggcaagcgtcgaggactaagtgggaaccagaacactttctcaaagttgctgattgctcccccacgcctactagacccttacaaggcttatggaaggtctcaattataactccttatcatattgttttcattgataatgtttgagattgagaaaagcctttgtctttaaggtaaagggaatgcaaaatttggtttttttctaagtctagttgattgaatagaccaatctttcattagttatcttcgttgtaatgatgatggttgtgttgttaagtagtttatctccatgattcttgaactcggcagggtttctgtgagggaagcatcgagttgtatttggtcaaatatgatgaagttggaggcattatatgcagaaaagtagaggacttgtccctctcacggtacactcctcctgtgttctggacacccaaacatacgttcatcagatctcctttttcagctgaagaagagctgctactgaatagtcgaatccatattagccctttcgctgaagttcatgaaaatgttgtatctggaatgttgtacatgaagtctagctgcgatctggtgttgccaggagaacctggcaatggcattggttttcttagaggtgaagggcgggtctggttgtatgacaatgggactttcggtttcgggtttcttcgagatcaatttatcattgatctgaaacgtgttgctctggaagatgggtgtctagctgacgaggtagaagcttgtatgtga

SEQ ID NO: 68 - DNA, 1257 bp, Arabidopsis thaliana
atgacgtcatctcgcctctatctccgtttcctccgccgcttctccaccgccaccggtatagattctcaaaccactgcttaccccggcgcaatcactatgtccaaagctaaatccaaactccgcaaagtacaagatccagacaaagccttagcgatttacaaatccgtctccaacaattccacatctccactctcctctcgttacgcaatggagcttacagtccaacgtctcgctaaatctcaacgcttctccgacatagaagctctaattgagtctcacaaaaacaacccaaagatcaaaacagagacttttctctctacacttatcagatcttatggacgagcttcaatgtttgatcatgctatgaagatgttcgaggagatggataagcttggcacacccagaaccgttgtttccttcaatgccttactcgctgcttgtcttcattctgatttgtttgaaagagtcccccaactgttcgacgaatttcctcagaggtataataatatcactcctgataaaatctcttacggtatgttgattaagtcgtattgtgactctggtaagcctgaaaaagctatggagattatgagagatatggaggttaaaggtgtggaagttactatcattgctttcactaccattttaggatctttgtataagaatggtttagtcgatgaagcggagagcttgtggattgagatggtgaacaaaggttgtgacttggataacacagtttataatgttagacttatgaatgctgcgaaggaaagtcccgagagagttaaggaattgatggaagaaatgagtagtgtaggattgaaacctgatactgttagctataactatcttatgactgcgtactgcgtgaaaggaatgatgagtgaagccaagaaagtgtatgaagggcttgagcaaccaaacgcagcgacgttcaggacattgatatttcatctgtgtataaacgggttgtatgatcaaggtttaacggtgtttaagaagagcgcgatagtgcacaagattccggatttcaaaacttgtaagcatttgactgaaggattggtgaagaataacagaatggaagatgcaagaggagtggccaggatcgtgaagaagaaattccctccgcgtttggtgaccgagtggaagaaactagaggagaagctgggattgtattcaaagggtaatgcagctgctgtttcatcttcttctcaaactagagaagtgttagatcaagaaagagaggatgatgtataa

SEQ ID NO: 69 - DNA, 768 bp, Arabidopsis thaliana
atggaaaacaaagagaccaagcaagaaccagcagcagcagctgagcaaaagaccgttccgttgatcgaagatgagatcgagaggagcaaagtcgggatcatgagagctctctgcgaccgacaagatcctgaaactaaggaggtggatgatctgatgataaggaggtttctgagagcgcgtgacctggacattgaaaaggcttcaacgatgtttctaaattacctgacttggaagagaagcatgctcccaaaggggcacataccagaagcagagattgcaaatgatctatcgcataacaagatgtgtatgcaaggtcatgacaagatgggtcgacctatcgctgttgccattgggaacagacataacccttccaaaggcaaccctgacgagttcaagcgttttgttgtctacacgctcgagaagatttgtgctagaatgccgagaggtcaagagaaattcgtagcaattggagatctgcaaggctggggatattctaattgtgacatccgtggctaccttgctgctctttccactttgcaggattgttacccagagagattagggaaactctatatagttcatgccccctacattttcatgaccgcatggaaggtcatttatccttttatcgacgccaacaccaagaaaaagattgttttcgtggagaacaagaaactcactccaacgctgcttgaagacatagacgaaagccaacttcccgacatctacggaggcaaattgccacttgttcctattcaggagacctga

SEQ ID NO: 70 - DNA, 1458 bp, Arabidopsis thaliana
ttaattaaatgtatagcggatctagcgatggtgagagtcatgatacatcgacgcagaggaagatcccaccggcgtcttcgatgctttgggttagaaatctacgacgatatattggttccggtgccggattaggatccgaagctctaatggagcttgagacgaagagaatcttgctcgagatttttaaagagaagcaacagaaaagccaagaagcaggcacaataccgagtttctacaagaagaaaccagaagaaggatctattagtcaaagggtccagaagcttgcaaagtaccgtttcttgaagaaacaatcggatcttttgttaaacgctgatgatttggctgctatgtgggtttgtttgagagaaaattgtgtgattgatgatgccactggtgctgaaaagatgaactatgaagacttctgtcacattgcctctgtatgcactgaacaaatcggtcccaaatgtcgccggttttttagcccatccaatttcatgaaatttgagaaggatgaggctgggaggattgccattttaccgttttatctttatgtgatgcgcacggtgtcgcttacacaagctaggattgatatgagtgagcttgacgaagactctgatggtttccttcattctgatgaaatggagtcctatattggtggtctaatccctaatctggcacaactgagagacatgcctccggcctttaatcaaatgtattgccgcatagcttcacaaaagtttttcttcttctgtgatccccataggcgaggaagagcctgcattaaaaagatactgctcagtaactgtctgcaggaactaatggaattgcatcaggaaagcgaggaggaagtcacagacactgaacaggcagaaaattggttctctttgacttcagcccaacgcatatgtgatatgttcctcgcacttgataaagatatgagtggatcgctgtgcaaacaagaacttaaagaatatgctgatgggaccctaactgagattttcattgaaagagtgttcgatgagcatgtccgccgtggtaaaatcgtggcaggcaattcccgggaaatggactttgacagtttcctcgattttgttcttgctttggagaacaaagatactccagagggtttgacgtatttattccgttgccttgatctccaagggagaggctttctcactactgctgatattcactctcttttcagagatgttcaccagaaatggatagaaggtgggaactatgaactgtgcatagaagatgttcgagacgagatctgggacatggtgaaaccgtctgacccattaaagatcactctgggtgatctcttgggatgtaaacaaggtggaaccgttgcgagcatgcttatagatgtgcgtggcttctgggctcatgacaaccgtgagaaccttcttcaagaagaagaagaaccacctgaggaagagtctcagtgagcgcgcc

SEQ ID NO: 71 - DNA, 474 bp, Arabidopsis thaliana
atgtcgaagaacgtttcgagaaactgcttaggatcaatggaagacatcaagaaagtattccaacgattcgacaaaaacaacgatgggaaaatctctatcgatgagcttaaagacgtgataggagctctctctccaaacgcttcacaagaagaaaccaaagcaatgatgaaagagtttgatcttgacggtaatggtttcattgatttggatgagtttgttgctttgtttcaaatcagtgatcaaagtagcaacaatagtgcgattagagatttgaaagaagcttttgatttgtatgatttggatcgtaatggaaggatctcggctaatgagttacactcggttatgaagaatcttggtgagaagtgttcgattcaagattgtcaaaggatgattaataaagttgattctgatggtgatggttgtgttgattttgaagagtttaagaagatgatgatgattaatggtagtgcttga

SEQ ID NO: 72 - DNA, 1524 bp, Arabidopsis thaliana
ttaattaacggttctctggaaaatattcgatttttaaaagactctgatgatgacattaaactcactatctccagctgaatccaaagctatttctttcttggatacctccaggttcaatccaatccctaaactctcaggtgggtttagtttgaggaggaggaatcaagggagaggttttggaaaaggtgttaagtgttcagtgaaagtgcagcagcaacaacaacctcctccagcatggcctgggagagctgtccctgaggcgcctcgtcaatcttgggatggaccaaaacccatctctatcgttggatctactggttctattggcactcagacattggatattgtggctgagaatcctgacaaattcagagttgtggctctagctgctggttcgaatgttactctacttgctgatcaggtaaggagatttaagcctgcattggttgctgttagaaacgagtcactgattaatgagcttaaagaggctttagctgatttggactataaactcgagattattccaggagagcaaggagtgattgaggttgcccgacatcctgaagctgtaaccgttgttaccggaatagtaggttgtgcgggactaaagcctacggttgctgcaattgaagcaggaaaggacattgctcttgcaaacaaagagacattaatcgcaggtggtcctttcgtgcttccgcttgccaacaaacataatgtaaagattcttccggcagattcagaacattctgccatatttcagtgtattcaaggtttgcctgaaggcgctctgcgcaagataatcttgactgcatctggtggagcttttagggattggcctgtcgaaaagctaaaggaagttaaagtagcggatgcgttgaagcatccaaactggaacatgggaaagaaaatcactgtggactctgctacgcttttcaacaagggtcttgaggtcattgaagcgcattatttgtttggagctgagtatgacgatatagagattgtcattcatccgcaaagtatcatacattccatgattgaaacacaggattcatctgtgcttgctcaattgggttggcctgatatgcgtttaccgattctctacaccatgtcatggcccgatagagttccttgttctgaagtaacttggccaagacttgacctttgcaaactcggttcattgactttcaagaaaccagacaatgtgaaatacccatccatggatcttgcttatgctgctggacgagctggaggcacaatgactggagttctcagcgccgccaatgagaaagctgttgaaatgttcattgatgaaaagataagctatttggatatcttcaaggttgtggaattaacatgcgataaacatcgaaacgagttggtaacatcaccgtctcttgaagagattgttcactatgacttgtgggcacgtgaatatgccgcgaatgtgcagctttcttctggtgctaggccagttcatgcatgaagaattggttgtggaagaacataaggaagcttctgaggcgcgcc

SEQ ID NO: 73 - DNA, 1726 bp, Arabidopsis thaliana
ttaattaaatgggaggccacgaaggtttcagcaaccaacgcctctcctccgccacatggttctctcatttccgtgcttcagctctccgatctaaatcactgccccctccgtcctcgcagactgccgttcgctccacctctggcgactctctggttcgtcgcctcggccttttcgacctcatactgttgggcgtcggcgcttccatcggcgccggtgtcttcgtcgtcaccggaaccgtcgctcgcgatgctggacctggagtcacaatcagcttcttgctagctggagcatcgtgtgtgttgaacgctctctgttatgctgaactttcatctcgtttccctgctgttgttggtggagcttacatgtactcttactcagctttcaatgagatcacagcttttcttgttttcgttcaactcatgcttgactatcatattggcgccgctagtatctcccgtagcttggccagctatgctgttgctcttcttgagctttttccagccctcaagggctctattcctctctggatgggaagcggcaaagagctcttgggagggcttctctctttgaatattttggctcccattttacttgctctcttgacccttgttctatgccaaggtgtgcgagaatcttccgctgtcaactccgttatgactgctactaaggtcgtgatcgttctcgttgtgatttgtgccggtgcttttgaaattgatgtagcaaattggtctccttttgcgcctaatggttttaaagcagttctcactggagctactgttgtcttcttttcatatgttggatttgatgcagttgctaattctgctgaagaatcgaagaaccctcagcgcgatttgccaatcggaattatggggagccttctggtttgtatctcgctgtatattggcgtatgtttggtgctcaccgggatggtcccttttagcctcctcagcgaagatgctcctttagctgaagccttttcatcaaagggtatgaagttcgtctcaatcttaatcagtattggtgctgttgctggactcacaactactctgcttgttggtctttatgttcagtccaggttatatctgggacttggaagggatggtctattgccttcaatcttttccagaatacacccaactcttcatacacctcttcattctcaaatctggtgcggcattgtagctggcgttttagctggcatatttaatgtacatagtctttcccatattctgtctgttggtacattgactgggtattcagttgttgcggcttgtgttgtggcattgagactgaatgataaaaaagatagagagtcgtccaatagatggacatcaagttggcaggaaggcgtcatttgccttgttataattgcatgcagtggttttggtgctggcgtattttaccgtttcagtgcttcagttatatttattctcctctcagttggtgtggcagttgttgcttcagcagttcttcattatcgccaagcttatgctctgcctctaggttctgggtttagctgtcctggtgtacccattgtgccatccgtttgcattttcttcaacatcttcttatttgctcagttgcattatgaagcatggataagatttgttgttgtcagtgtgcttgcaactgccgtttatgccttgtatgggcagtaccacgcagatccgagcatgttggattatcagagggcacctgaaactgaaagcgacgcttagggcgcgcc

SEQ ID NO: 74 - DNA, 671 bp, Glycine max
atttatttgtcagctttcaaactctttgtttcttgtttgttgattaacccttaattaagctctccacccaaaccctaactcccgaccctgttcccctctcgtatccgtcatgaaaggaggaaagtccaagaccgaatctaagagagccgatcccaaacttgctgtgaataagaagggagccgccaccaaggctaggaaacccgccggcaaggggaaggcagcgaaagaccctaacaagccaaagaggcctccaagtgctttcttcgttttcatggaggagttcaggaaggtattcaacaaagaacatcctgaaaacaaagcagtgtctgctgtgggcaaagctgctggagcaaaatggaagaccatgtctgatgctgaaaaagcaccttatgtggcaaagtctgagaaaaggaaagtggagtacgagaagaacatgagagcctataacaagaaacaggcggaaggtcctactggtggggatgaagaagaatctgagaagtctgtatctgaggtgaatgatgaagatgatgatgaggaaggcagtggcgaggaagaggatgacgattagagaatggactgataattgcatttatgtaggttctgatgattttgatcatcatttaaatacccagaaattggagctctgcagagctttcgttcgtatcatcggt

SEQ ID NO: 75 - DNA, 741 bp, Arabidopsis thaliana
ttaattaagtgtatttatctcgggagaagaagaatggatactttcacggcggaggatctgtcgacgatcggcggaatagcgacagtatcgctccttcactcgtttattccgacgcattggctacctttctccatcgtcggacgtgcgcagaaatggacgctttcgagaacactcctcgtcactgcatttggagcagtcctacatgttatatccacttctctccttggtataacagcaatcacaatggcgaataccatcgctggtgaagagactgttcacaaacttgcttcccttttgcttgtatttctcggtggaagctatgttttgctgtttttggctggtaaaggtggtcacactcattctcataaccaacccatggagaaaatggctgttgctggacttgtccttgttcctgcattatctccttgtgcaacaactctcccggttttcctcgctgttggaaattccaagtccatgatggttctcgccatcatagttctgctcttcagcaccatattggttatgacatcgctggttgctctatcgttctatggtgcaagccagctcaagtttcactgggtggagcggtacgacaaactactggttggttcagtcctgtgtttggtaggtatcttaacccttctcttccatgatcatgaccatggcggtcatgaagcacatcaactccacaggaaaatcattactctttagataccgtttcgagtctctgtttggcgcgcc

SEQ ID NO: 76 - DNA, 1053 bp, Arabidopsis thaliana
atggcgaagagtgttttggttaccggcggcgctggctatatcggaagtcatactgttcttcaactgcttgaaggtggttactccgccgtcgttgttgacaattacgacaattcctctgctgcttcgcttcagcgcgtgaagaaactcgccggcgaaaacggaaaccgcctctccttccaccaggtggatctccgagacaggcctgcgcttgagaagatattctcagaaacaaagtttgatgcagtgatacactttgctggacttaaagcagtaggtgagagtgtggagaagcctttgctctattataataataacattgttggcactgttactcttttggaggttatggctcaatacggctgcaaaaatcttgtattttcatcatcagctactgtctatggctggcctaaggaggttccttgcactgaggagtcaccaatttctgccactaacccatatggccgtacaaagctttttatcgaagagatttgccgggatgtacatcgttctgactcggaatggaagatcatattgcttagatacttcaaccctgttggtgcacatcctagtggttacattggtgaagatcctcttggagttcccaacaatctcatgccttatgtccaacaagttgcagttggccggagacctcaccttactgtctttggaaccgactacaagacaaaggatggtacaggggttagagattacattcatgtcatggatttagcagatggacacatagctgctctgcgtaagctagatgatctcaaaatcagttgtgaggtatacaatcttggaacgggtaatggaacatcggtcctagaaatggtcgctgcctttgaaaaagcatccggaaagaaaatccctttggtgatggctggacgacgtcctggagacgctgaagttgtttacgcctcaacggaaaaagcagagcgcgaactaaattggaaggctaagaatgggatagaggagatgtgtagggatctatggaattgggcaagcaataacccctacggctacaattcctcctccaatggctcctcttcataa

SEQ ID NO: 77 - DNA, 1221 bp, Arabidopsis thaliana
atgtcttcgataatccatggagctggagctgctacgacgacgttatcgacgtttaattccgtcgattccaagaaactcttcgttgctccttctcgcacaaatctttcagtgaggagccagagatatatagtggctggatctgatgcgagtaagaagagctttggttctggacttagagttcgtcactctcagaaattgattccaaatgctgttgcgacgaaggaggcggatacgtctgcgagcactggacatgaactattgcttttcgaggctcttcaggaaggtctggaagaagagatggacagagatccacatgtatgtgttatgggtgaagatgttggccattacggaggttcctacaaggtaaccaaaggccttgctgataaatttggtgacctcagggttctcgacactcctatttgtgaaaatgcattcaccggtatgggcattggagctgccatgactggtctaagacccgttattgaaggtatgaacatgggtttcctcctcctcgccttcaaccaaatctccaacaactgtggaatgcttcactacacatccggtggtcagtttacgatcccggttgtcatccgtggacctggtggagtgggacgccagcttggtgctgagcattcacagaggttagaatcttactttcagtccatccctgggatccagatggttgcttgctcaactccttacaacgccaaagggttgatgaaagccgcaataagaagcgagaaccctgtgattctgttcgaacacgtgctgctttacaatctcaaggagaaaatcccggatgaagattacgtctgtaaccttgaagaagctgagatggtcagacctggcgagcacattaccatcctcacttactcgcgaatgaggtaccatgtgatgcaggcagcaaaaactctggtgaacaaagggtatgaccccgaggttatcgacatcaggtcactgaaaccgttcgaccttcacacaattggaaactcggtgaagaaaacacatcgggttttgatcgtggaggagtgtatgagaaccggtgggattggggcaagtcttacagctgccatcaacgagaactttcatgactacttagatgctccggtgatgtgtttatcttctcaagacgttcctacaccttacgctggtacactggaggagtggaccgtggttcaaccggctcagatcgtgaccgctgtcgagcagctttgccagtaa

SEQ ID NO: 78 - DNA, 1416 bp, Arabidopsis thaliana
atggatgtttttgctttcaatgcttctttatccatgtgtaaagatgttgccggaatcgcaggtaataactttatcctattcactgttttttttttgtttggtaattttaagctaattgtggtaaaacccaatattcaaattccttttttgattccatgtaatatatataactagatctggcttaggttccatgaatatccccaaatcagtatatattttggccatttttggtccgcatattttccttttctaggcactgaaacaacgttaataagattcaaatttgtttctgaattttgtcggaaaaattctagaaatctgcttctgtagagtccaaattgatgcaattcacaaacaaagatagaaacttttttccatttgttaatatcactgtttcatttgttcttctgtgttcaggcaacatatttgcatttggactcttcgtttcaccaatgtgagttcttcttattcacttattcgttgtatgtattaaacagagtttttctttgtctatggacttgactgttttttcttctttcaggccaacgtttaggaggatcatgaggaacaaatcgacggagcaattctccggtttaccatacatttacgctctcttaaactgcttgatctgcctttggtatggcacacctttcatatcacacagcaatgccatgcttatgactgtgaattccgttggagctacgtttcagctttgctacattatcctcttcatcatgcatacagacaagaagaacaaggtttttggattgtttctacttcttactcacacaaacaaattattgtttttttttctaactctaaatcaacattttgatcatggcagatgaagatgcttggtttgctttttgtggtgtttgctgtggttggagtgattgtagctggaagtttgcagatacctgaccagctcacacggtggtactttgtcgggttcttgagctgcggttctcttgtttcaatgtttgcctcgccgttgtttgttattgtaagttcccaaaaaatgtcaacaaatcttttcaaaatatatatgtagctttcttgattgcctgacttgtttggtctttgcagaacctagtgattcggactaagagcgttgagtttatgccgttttatctctcgctatcgactttcttgatgagtgcttccttccttctttacgggttattcaacagcgatgcctttgtttatgtaagttactcaacaatatttcctattggaatctctgttttctttcattagatagtactaattacaaaacttgttgtttttttggccactcagacaccaaatggaataggaacgattcttggcattgtgcagctggctttgtactgttactaccacaggaattctatagaagaagaaacaaaagagcctttgattgtttcttacgtgtga

SEQ ID NO: 79 - DNA, 1428 bp, Arabidopsis thaliana
atggcagccaccacgagacggttgctttactatgtgtccaaaagattctctaccgccggagtgcggcggagctatggcggtctgccacaatcgaattccaaatctcctccgtcttcttctcaacgattgatggaattggaatctgaattcagtgcccacaattaccatcctgttccggttgtgttttctcgcgcgaatggctcaactatatgggaccctgaaggaaagagatacattgattttcttgcagcttactctgcagttaatcagggacattgtcatcctaagatcatgaaggcattgcaggaacaagtggagaagctcactttaagttcacgagcgttttacaacgataaattcccggtatttgctgagcgtctcacaaacatgttcggttatgatatggtgcttcctatgaacacgggtgctgaaggtgtcgaaactgctttgaaactagcaagaaaatggggtcatgaaaagaaaaatattcccaaagacgaggctatcattgtctcttgttgtggctgctttcatggacgtacattagcaattgtttccatgagttgtgacaatgatgctactcgtggattcgggccattgttgccagggaatcttaaagttgattttggtgatgcggattcacttgagaaaatctttaaagaaaagggagatagaatagcgggatttctattcgagcctattcaaggcgaagctggagttattattcctcccgacggttacttgaaagctgttagagaactctgcacaaaatacaatgttttgatgatagcggatgaagtacaaagcggtctggctagatccgggaagatgctagcttgtgattgggaagaaattcgtcctgacatggtgatacttgggaaagcattaggtggaggagtaattccagtaagtgcagtgcttgctgataaagacgtgatgcttcatataaaacctggtcaacacggaagcacatttggtggtaaccctttagctagtgctgtagctatggcttctttagacgttatcgtggaagaaaaactcgttgaaagatcagcaagtcttggagaggaactgaggattcaattgaatgaaatcaagaaacagtttccgaagtacataaaggaagtacgaggaagaggcttgtttaatgcgattgagttcaatagcgaaagcttgtccccggtttcagcttacgatatttgcttgagcttgaaggagagaggagtcttggctaaacctactcacaacactattgtccggttaactccaccactctctataagctctgatgaactccgagatggatctgaggctcttcacgatgtactcgagctcgatcttccaaatctgctgaaaatcaattccggtaaaactccggtttctcatataaccgagtgtgatcgctgtggaagaaacctctatgcttga

SEQ ID NO: 80 - DNA, 1302 bp, Arabidopsis thaliana
atggatgagacctattttgatctattgaatttctttaagaatccctcttttacagagacatttgtcgacatcttactatgcgcagttccgatttggctcgccgttatgatcgggttattaatcggatggtcttggcgtccaagatggaccggtttgatctatttagggtttcgttctaagcttcggtttttatggaccgcaccgcctgggtttggtgctcgtcggctttggcttgctttcaccgctctctctgctttctccgtttgccgaaccatctggtcaaggaatgacaccagagctaataaatcggcgaccggttcagcttcgtcgcagacgcctgttgaggataatgatgaatcaggattggcctcaagaggtagcgataacgggacggtgacagaggatattgtgacagagaatgatttagagcatctgcttcagctgcttgaagttggaaatgcagctttggaatggcaatctatgatggataagactactccaaatatgagctaccaggcttggcgtcatgagcctgagacaggtcctgttatttatcgcagccggactgtgtttgaggatgcaactccagatattgttagggatttcttctgggatgatgagtttcgacctaaatgggatttcatgcttgccaacttcaaaacgttggaggaggacactcagacaggaacaatgattgttcagtggagaaaaaagtttccttttttctgtagtgaccgagagtatatcattggccggagaatatgggagtctgggaagaagtattattgtgtcacaaagggagttccttatccagctctaccaaagcgtgataagccaaggcgtgttgagctttatttctcaagttgggttatcagagcggttgaatcccgaaaaggagatggacagcaaacggcttgtgaagtttcccttgtccactacgaagacatgggcatcccaaaagacgtagcaaagttaggtgtccgtcatggcatgtggggagctgtcaagaagctaaactctggtttacgagcgtaccaatccgccagaaaatcagactcatctctatctcggatcgcccaaatggcaagaatcactacaaaactgaacatggattctgcagaatcatcttcaagagatgaagacagaagcagagcaatggaatatgcgagacaacgggaccatttgagaatggactggaaatgggttgttgtaggaggtgtcgcattggcttgtggccttcactctgggatcattggcaaggctttactggctggagctggccagagactggctcgtaggtga

SEQ ID NO: 81 - DNA, 567 bp, Arabidopsis thaliana
atggagatggactcaactactacgatcaaaccggagaccctatccaccgtgagttcctcacctccggagaaaatccatctccggccaatgactctttccgacgtcgacgatttcatggtttgggccactgactcaaacgtcacacgcttttgcacgtgggagccttacactagccgagaagccgcgatcgcgtacttaaacgacgctcttttgccacacccttggcttagagctatatgcttagataacgaccgtccgattggctcgatctccgtaacgccagtcgatgagatcagaggagagattggttatgtcctcggaagcaagtattgggggaaagggatcgccactgaagcggtgaggcttgtggcgggggagatattcaaggagaagccagagatgcagaggcttgaggcacttgttgacgttgacaatgttggatctcaaaaggttcttgaaaaagttgggtttgtgaaagaaggtgtgatgaggaaatttatgtatcttaaaggaaatgttagagatatggtcatgtttagtttcttgccttctgattcgttgcactga

SEQ ID NO: 82 - DNA, 1410 bp, Arabidopsis thaliana
atgtcgttctcgctgagaaagctactggttccgattctggttttggtactgtttctggatctgtgcgttgaatccggattctctcagtcaacgccggcgcgtgacgatcacgtgcatcatcacggtggtgggtgtagtcattctcatgaccacgaccacgaccacgatcatgatcatcatgtgaagaagacgacggcgaaggtggagatgaagttgccggaggagcttgctgaagaggaggatatgagattatgtgggtttgggccttgtcttcatgatcacgatcacgaatcaagttccactcttacggggtttgctctgtggcttaatgcattgggatgctctcttttagttagcttggcctcactcatctgccttgttttgcttcccattatgtttgttcaagggaagccatcaaaatggttcgttgattctttggctctctttggggcaggagctatgttgggagatgcttttcttcaccaactgccccatgcttttggtggtggccactctcactctaatgatcaccatgagaaccatgaccatcatgatcattctcattcggattcgccttcacactcacattctatacaagatttgtctgttggattgtctgttcttgctgggattgtggtcttccttcttgtggagaagttggtgcggtatgtcgaagaaaactcatctgggtccaatacttggggtcatcatcaccaccaccaccatgcaggcagtaagaaactgaaggatgaaggcgatcataacaacttggaccaacaatcttcttctgatgcaattgtaaattcatcagagaaagtctctggcggctctacagataaatctctccgtaagagaaagacttctgctagtgacgctactgataaatcagattcaggaacagaaattacttccgatggaaaatcggacaaaccagaacaggtggagacgcgttcttcgagcctagtctttggttacctcaacttgttctctgatggtgttcacaatttcactgatggaatggcattaggaagtgcgtttctcatctatggatcagttggtggttggtcaagaactatgtttttacttgcccacgagcttccccaagagataggtgattttgggattctagtaagatcaggcttcacagtaacaaaagcactcttcttcaacttcctctctgcactcgtcgcacttgccggaactgcattggttttggtctggggaaatgaaccaggacaatcatcgttgattgagggattcacagcgggaggattcatatacatagctgttgctggagttcttgcagaaatgaacaactcgggaaaatcaacacttaaaaacagtgcctgccatttgatatctttgattcttggcatgagtgttgctctttgcatctctcttatagaatga

SEQ ID NO: 83 - DNA, 1056 bp, Arabidopsis thaliana
atgtacggattcgaggcgcttaccttcaacatccatggcggatatttggaggcgatcgttagaggccaccgtgctgggcttctcaccaccgccgattacaataatctatgtcagtgtgagaacctagacgatatcaagatgcatctctctgccaccaaatacggctcttatctccaaaacgaaccgtcacctctgcataccaccaccattgtggagaagtgtactcttaagcttgttgatgactacaagcatatgctttgccaagctactgagccaatgtctacctttttagagtacatcagatatggccacatgattgacaatgtcgtgctcattgttactggaaccctgcatgagagagatgttcaagagttgattgagaaatgtcaccctttaggcatgtttgacagtattgctacactagcagttgctcagaacatgcgggaactctaccggttggtgcttgtggatactcctttggctccatacttttctgaatgcttaacgtcagaggatctcgatgacatgaacatagagattatgaggaacaccctctacaaagcataccttgaggatttttacaagttctgtcagaaacttggtggcgcaacagcggagattatgtctgaccttttggcctttgaggccgatagaagagcagtgaatatcactatcaacagcattggcactgagctcacaagagaagacagaaagaaactgtactctaactttggtctactctatccatatggtcacgaagagcttgctatctgcgaggatatagaccaggttcgtggtgttatggagaaatatcctccgtatcaagctatattctcgaagatgtcttatggagagagccagatgctcgacaaagcattttatgaagaagaagtcagaaggctttgcttagcctttgagcagcagttccattacgcggtattctttgcgtatatgaggttaagagagcaggagatcaggaaccttatgtggatatctgaatgtgttgcacagaaccagaagtccaggatccacgacagtgtcgtctacatgttctga

SEQ ID NO: 84 - DNA, 1731 bp, Arabidopsis thaliana
atggattttgtctcaagagatagaatcagcagtctaccaaatcctgtagtatcccacatcttgtctttccttcccacaaaagaagcagcttctacttcggtcctctccaaaaaatggcgttatttgtttgcgtatgtaacaaatcttgactttgatgactcggactatcaggatggtaaaccaaaaagcgatgttgaacttagtagaagttttatggaatttgtggacagagtcttggctttgcaagggaatggttccgtaaataaattctctctagagtgtagtaattatgatgttgatcttgctcgtgtcactggttggatattgaatgtgttaggacgcggtgtatcagagcttgatttaagcatcttggagtatcccttaccttcggagatctttgtgagtaagacactggttaggctgaaattaggaccggcaaatgatcttactctcacccttgataggaaagatgtttttcttccaaagctcaagactctctatattgattgtgttgatgttcaagagcgtggttttgggtttgtaaagcttctttctggctgtcccgtgctcgaggagttagttctgatgaatatcgggtgggaaaattggaagttttgctctgtgtctgtcaaaaccctgaagaggctgacgtttttctgtgaggagacttatgagaatccaaagagcgtgtcatttgatactccaaaccttgtttacctagagtattctgacgctattgcgagcaagtatccgaaagtgaactttaattcgctcgttgaagctcatatcggtcttcgactgacagaagatcagagtggagatgcagacttttcagaagaagactatttctcagaaggtgatgagaaaaaacagatggtcggtaatgcaacggattttcttaagggaataagcactgttcagatcctttacctatctgcccaagctattgaggtttgtctatcaattcctttagttggtggtcataagaaagtgatgatatagttggtttgatttttgtttcaggtacttactttctgctgtgagccaataccggttttcaacaacctgattcagttaacaatcgagaataactcagaaataagatgggattcactgccaggtctactcaagaactgtccaaatctagaaacccttgttttaaaggtataaaacaaaaccactaaagcatctttgtttatcagtgacataaaaacaaatacaacttaactatgaaaccttttctttatgctacttcttcagcgtcttctccacaagtataacaaggcatgtgggaacgtgtgctgttgtaagcgtccgaagcagccttcttgcctttcatcttctccggtgaaggttcttaagatatttctgtttgatgacaacgatgaagaagacgggtcggaaatgaggcagatcaagtatttcttggagaaaatgccccgtctagaagagttggtagtatactacaatacagcatatgaccctgctgtgttagaattatccaagaagcttcagaagattcctaagatagcttcaccaaagtgcaagatccaggtaatctctgagaatcttagtttgtcatctaccgtgccttctttcttgacaacgagatggtcttctcttcctcctgaagaagcatatccatgggttgactctcctcctccccaaataatagatcccatgttagagtatggttctcctccagaagatgatgattcctggttgtactag

SEQ ID NO: 85 - DNA, 751 bp, Arabidopsis thaliana
atggcgatggctttcaagatggtaaattcaaatttgtttttctacgtttaaagattcttgatctgatctttaaacaaatagctaatgatgattcgcaggcgacgacggggatgcgtgtgacggatgagtgtacgagttcattcatggacatgaaatggaagaaagttcatagatacatcgttttcaagatcgaagagaagtcacgtaaagtcaccgtcgataaagtcggcggcgccggtgaaagctaccacgatctcgaagattctttaccggtggatgattgtcgctacgctgtctttgatttcgactttgtcaccgtcgataactgccgcaagagcaagatcttcttcattgcatggttagtccaatttacctttatacccttcttaattctagttgcaagcaagggtaaaacagttatttgataatattcgtgcgtcttagaaacgccatatgcccatatccttaaacattcgtattggctaaagggtaaagtagtaatatatgtgttgccggagatgtagaggatttgatcttctatttagtgtagaattcccttgtaaattcattatgggctaaagggcaaaatggtaattataggtcaccggaggcatcaaagataagggcaaagatattgtacgcaacgtcgaaagatgggctgaggagagtgttggaagggattcactatgaacttcaagctactgatccgacggagatgggtttcgatattatccaagaccgtgccaaatag

SEQ ID NO: 86 - DNA, 1098 bp, Arabidopsis thaliana
atggatctcggtgttcttcttccatcattgcaatctgtttatgtgctggtgttttacttcgtttacttggccgttgccggagaaattctccccgggaaagttattcgcggcgtccttttatcagatggctctcaacttcgttaccgatgcaatggtctattggcactaatattgttggtagctattttgggaatctgtgcaaaacttggcattgtatcacctcttgtggttgcggatagaggacttgagttactctcagctacttttattttctgtgttttggtgacattagcattgtatgttactgggcgaagttcctcgaataagggttcttccctaaagcctcatgtctcaggaaatcttgtacatgactggtggtttggaatacagctgaatcctcagtttatgagcattgatctcaagtttttctttgtcagagccgggatgatgggatggctgcttatcaatctctctattctggcaaaaagtgtgcaggatggttccttgagtcagtcgatgattctttaccagatcttctgtgcgttatatatattggactactttgttcatgaagaatacatgacctctacgtgggacataattgcagagagactaggcttcatgctagtgtttggagatctcctgtggattcctttcacttttagcattcagggctggtggcttttgcacaacaaagtagaactaacagttcctgcgattgtagtcaattgccttgtcttcttgatagggtacatggtttttcgaggagctaacaaacaaaaacatatctttaagaagaacccaaaaacaccaatatggggcaagcctccagtggtagttggtggaaagttactggtttcaggctattggggaattgcaaggcactgtaattaccttggcgacttgatgcttgctctgtccttcagtttgccatgtggaataagttctccggttccatatttctacccgatataccttctgatactattgatatggagagaacgaagagacgaggttcgatgtgcagagaagtacaaggagatatgggcagagtatcttagacttgtcccctggagaatacttccttatgtttattag

SEQ ID NO: 87 - DNA, 291 bp, Arabidopsis thaliana
atgagagagacggtgaagttgataagcatggaaggtttcgagttcgtcatcgacagagaagccgctatggtttctcagactatccgaagcatgctcacttctccaggtggtttctcggaatcgaaagatggcgtagtgactttccctgatataagcaccacaatactagagaagatttgccagtacttctactggtctcttcaatactccagaggcaaagagacagagtttcatattgagcctgaactgactctagagctgatgatggctgctaactatcttcacacttga

SEQ ID NO: 88 - DNA, 1155 bp, Arabidopsis thaliana
atgagtgtgagttgttgttgtaggaatctgggcaagacaataaaaaaggcaataccttcacatcatttgcatctgagaagtcttggtgggagtctctatcgtcgtcgtatccaaagctcttcaatggagaccgatctcaagtcaacctttctcaacgtttattctgttctcaagtctgaccttcttcatgacccttccttcgaattcaccaatgaatctcgtctctgggttgatcggatgctggactacaatgtacgtggagggaaactcaatcggggtctctctgttgttgacagtttcaaacttttgaagcaaggcaatgatttgactgagcaagaggttttcctctcttgtgctctcggttggtgcattgaatggctccaagcttatttccttgtgcttgatgatattatggataactctgtcactcgccgtggtcaaccttgctggttcagagttcctcaggttggtatggttgccatcaatgatgggattctacttcgcaatcacatccacaggattctcaaaaagcatttccgtgataagccttactatgttgaccttgttgatttgtttaatgaggttgagttgcaaacagcttgtggccagatgatagatttgatcaccacctttgaaggagaaaaggatttggccaagtactcattgtcaatccaccgtcgtattgtccagtacaaaacggcttattactcattttatctccctgttgcttgtgcgttgcttatggccggcgaaaatttggaaaaccatattgatgtgaagaatgttcttgttgacatgggaatctacttccaagtgcaggatgattatctggattgttttgctgatcccgagacgcttggcaagataggaacagatatagaagatttcaaatgctcgtggttggtggttaaggcattagagcgctgcagcgaagaacaaactaagatattatatgagaactatggtaaacccgacccatcgaacgttgctaaagtgaaggatctctacaaagagctggatcttgagggagttttcatggagtatgagagcaaaagctacgagaagctgactggagcgattgagggacaccaaagtaaagcaatccaagcagtgctaaaatccttcttggctaagatctacaagaggcagaagtag

SEQ ID NO: 89 - DNA, 774 bp, Arabidopsis thaliana
atggacgaaaccaacggacgaagagaaactcacgatttcatgaacgtcaacgttgaatccttctctcagcttcctttcatccgccgtactcctcccaaagaaaaagccgccattattcgtctcttcggccaagagctcgtcggtgataactccgacaacttatccgcagaaccttctgatcatcaaaccactaccaagaacgatgagagctctgagaatatcaaggacaaagacaaagaaaaagataaggacaaagacaaagataacaacaacaacaggagattcgagtgtcactactgcttcagaaacttcccaacttctcaagccctaggtggacatcaaaacgctcacaaacgtgaacgtcaacacgccaaacgcggttccatgacatcataccttcatcatcatcagcctcatgaccctcaccacatctacggcttcctcaacaaccaccaccaccgtcactatccgtcttggacgacggaagctagatcatactacggcggagggggacatcaaacgccgtcgtactactcaaggaatactcttgctcctccttcttctaacccaccgacaatcaacggaagtcctttaggtttgtggcgtgtaccgccttccacgtcaacaaatactattcaaggcgtttactcatcttcaccagcttcagcgtttaggtcgcatgagcaagagactaataaggagcctaataactggccgtacagattgatgaaacccaatgtgcaagatcatgtgagtctcgatcttcatctctga

SEQ ID NO: 90 - DNA, 1065 bp, Arabidopsis thaliana
atggatcgaagagacgcaatggcgttatccgggtcgggttcttactatatccaaagaggaatccccggttctggtcctcctcctcctcaaactcaaccaacgtttcacggatcacaaggatttcatcatttcaccaattccatctctccttttgggtcaaacccaaacccaaatccaaaccctggaggtgtctctactggattcgtgtctcctcctttacccgttgactcttctccggctgattcgtcagcggcggcggcgggagctttggttgctcctccttcaggtgacacgtctgtgaagcggaagagaggacggcctagaaaatatggacaagatggtggttctgtttcgttggcattgtctccttctatctccaacgtttccccgaactctaacaaacgtggccgtggaagacctcctggctccggcaagaagcaacggctatcttccattggtgaaatgatgccttcatcaactgggatgagcttcacaccgcatgtaatcgtagtttccattggtgaagacattgcttcaaaggttatatcgttctcgcatcaaggtccacgagcgatatgtgtcttatccgcaagtggtgctgtctctactgcaactcttcttcagccagcaccttctcatggaactattatatacgagggtctattcgagctcatatctctctcaacttcttatctgaacacaactgacaatgactacccaaaccgcactggaagtctagcggtctcacttgctagccccgatggtcgtgtcattggtggtggaattggaggtcctctaatagcagcaagccaagtccaggtcattgttggcagcttcatttgggcaattccgaaagggaagattaaaaaacgtgaagaaacttctgaagatgtccaagatactgatgctttggaaaacaacaacgataacacagcagcaacgtcacctcctgttcctcagcaaagtcagaacattgttcagactcctgtaggcatttggtcaactggttcaaggtcaatggatatgcatcacccccatatggacattgatctaatgcgtggatga

SEQ ID NO: 91 - DNA, 1511 bp, Arabidopsis thaliana
atgagtacccttgagaccacaagagctgagcttggtctggtagttgtgtatttgaataaagcggaggcgagagacaagatttgtcgagctattcaatatggttccaagttcttgagtgatggccaacctggcactgctcaaaatgtcgacaagaacaccagcttggctaggaaagttttccgtctcttcaaggttggtttcttcatcttttatcaaacttcaaatcacacttttacctgaaaccagtcttaagggtatgagctagctaacatctgttttaagttggtgactttaaggggaaaagactatttgttctattatgggagttgataaatgcaactagatgtatagatccatggttatacctcagttataggatttatgggttatatcacttgaattatggagatacaagatttgcaactggaatacatatcttatggggaattatataattcagactccgaaaggaaaaaaatggttctgtgattatgcttagtggttttattgtaaatctagttaaatggtgttcttcttgtgttgtgcagtttgtaaatgatcttcatgctctcattagccctgttcccaaagggactccactcccgcttgttctgctcggaaaggtaatgttattgttgctttgcttgcttttagagcttgtcttttccaaacattgattgatcttctggttttggcagtctaaaaacgcgttgctgtcaacgttcttgttcctagatcaaattgtgtggcttggcaggactgggatttacaaggttaggagaagcctgcaatataggagactttatttccttcaggttaaactgagcctactctgtttatgttatgaatctgctgctttaggacaaagaacgtgctgagattcttggacgtatatcacttttctgttggatgggttcttcggtttgcacatccttggttgaggtctgttcactgccattgaattgtctcttacttctggttcaaatgcaataccgcataatgtaataatttcgacatgtttaggttggggagcttggtaggctgtcagcatcaattaagaagttagaaaaagagatagggaacaaggataaacaccaggtacgcaagctttcctcaagatattggttccctttctctatggagtgaagaagaaattttgctgatttttgagataacatcattaagcagaatgagcaataccgtgcaaaagtagagaaatcaaacgagaggtcattggctctgatcaaagcagggatggatgtagttgttgctttcggattgcttcaattggctccaaagaaagtcactccccgagtcacaggtgctttcggattcgcctcatcacttatctcttgttatcaggtatatttaccagatctcatttcaagaaaacagtttgcttatatatatatgtgtgtgttgcaatcttgggatcaaaccaatgaataaaagccatcaatctctcgcttgtgcagctattgccgtcacatcccaagtccaagatggtctga

SEQ ID NO: 92 - DNA, 1110 bp, Arabidopsis thaliana
atggcggagaatcagaactgtgcgaggatgacgagagcggcggcgaaacgaaaagcgtcgtccatggcgttagacgaaaacccagttagtaagaagagagttgttctcggagagcttccgaatatgtccaatgtcgttgctgtacccaatcaagaaagagagacccttaaggctaaaacaagtgttaatacctcgaagaggcagatgaagaaggctttgatgattcctgaagctagcgtactaatcgaatcgagatctgttgatcctcagatgtgtgagccttttgctagtgatatttgtgcttatctccgtgaaatggaggggaagccgaaacatagaccactacctgattatattgaaaaggttcagagtgatttaactccacacatgagagcggttttggtggattggttagtggaggttgctgaggagtacaagcttgtttcggatacgctttatctcactatctcctatgttgatagattcttgtctgtgaagcctattaacaggcagaagcttcagcttgtgggagtttctgcaatgcttattgcgtcgaaatatgaagagataggtcctcctaaagttgaagatttttgttacattacggataatacatttactaaacaagaagtggtgtcgatggaggcggatatacttcttgctctgcagtttgaattaggaagcccaaccatcaaaacattcctaagacggtttacacgggttgcacaagaagatttcaaagactcacaattgcagatagagttcctttgttgctatctatcagaattgagtatgttagattacacctgtgtgaagtatttgccatctcttttgtctgcttcagctgtatttcttgcccggttcatcatccgtccaaaacaacatccttggaatcaaatgctagaagaatacacaaagtacaaagcagctgatctacaagtgtgcgtgggtatcatacatgacttgtatctaagcagaagaggaaacactctagaagctgttagaaataagtacaagcaacacaagtacaagtgcgttgcgaccatgcctgtttcaccggagctacctcttgctttctttgaagatattaccattagaggaatggcgtaa

SEQ ID NO: 93 - DNA, 2328 bp, Arabidopsis thaliana
atggaaacccgttgctctctcctctttctctctctcattctcctgtatttgcccaaacccggatccggatttggatcctccggtccgattgcggcgtcgttcggcggctctgctttcttctgcgccattgacgctagtggtcgtcaagatgttatctgctggggaaagaactattcatctccttcttctccctcttcttcttcttcttcgtcgtctattgcttcttccacttccgcaagctacaacattccgtcaatggcggttctttcaggcggagacgggtttctctgcggcattttgtcgaacacttctcaagcattctgttttagttcacttgggtcttcttcaggtatggatcttgtccctctagcttacaggactactgcttactctcagatagctgctggaaacagccatgtctgtgctgttagaggagcttactattccgatcacgattctgggactatcgattgttgggagataactagagctacgaacaacaacagcttaatcgccaaggagaatcctaacttctatgatcagattgttagtaatctcgtcttcaacaatattgtttctggtgatgggtttagctgtggtggaatcagagatggtgggatgctctgttttggtcccaattcttctaatttagggtttaacacaacttctgataacttccaagtcttagccgccggtaaaaactccgtttgtgctattcttaatttatctcgagaggttaaatgttggggagaagatgaatcttttgtcaattctccgatgaatgattctcgattcgtctcgctaaccgcgggtcctcgccatttctgcggaatccgtgaggataatcatgaggttgagtgttggggaaactctaatttctctttgattccaaaaggttctggatttaaagcaatagcttcgtctgatttcattgtttgtggtattagagaagaggatcttgttcttgattgttggatggttaatggttcgtccacattagcttacgatcctccgttagagctctgcagtccagggatgtgtagagctggtccttgtaatgaaaaagagtttgctttcaacgcaagtatactcaatgaacctgacctaacgagtttgtgtgtaaggaaagagttaatggtctgttcaccttgcggctcggattgctctcacggattcttcttgtcaagttcgtgcaccgcgaactctgatcggatatgtacgccttgctcgctctgtcaaaacagttcttgttcggatatatgtaagcttcataacagcaattttccagataagcattggcatcaactacagagacttgttcttatcatcgggtcttgcgcatccgctctattgatcattataattggttgctgtgttgtgccacggattgtcactagtcctaataaagaagacggagcagcgaatcaattcaaatcttgcataggaaagcccgatttagacactgatcagccacttgaaaatgtatcccctgctccatcggtaacgccttttgctcaagtgtttagactctctgagcttaaagacgcgaccaacgggtttaaagagttcaatgagttaggcagaggaagctatgggtttgtctacaaagccgtgttggcggacgggaggcaagtagcggttaagagagcaaacgcagcaaccataatccacacaaacactagagaattcgagacagaattggagattctctgcaacattaggcattgcaacattgtgaatctccttggttactctaccgaaatgggagagaggcttcttgtttacgagtacatgcctcacggtacgcttcacgatcatctgcacagtgggttttcgccattgagttggagcttaaggatcaaaatcgctatgcaaaccgcaaagggtcttgagtatcttcacaatgaagctgagccgagaatcattcatggcgatgtgaagtcttcgaatgtactattggactcggaatgggtggcgagagttgcggatttcgggctcgtgacatcgtcgaacgagaagaatttggacatcaaaagagatgtttatgactttggagttgtgctgttagagattttaaccggtaggaaacgttatgatagggactgtgatccgccggagattgttgaatggacggttccggtgatcagagaaggcaaagcggcggcgattgtggatacgtatattgcgttgccgagaaacgtggagccgttgttgaaacttgctgacgtggcagagttgtgtgtacgggaggatccgaatcaacaaccaactatgtcggaacttgcgaattggttggaacatgtcgcaagagatgcattgatcttctag

SEQ ID NO: 94 - DNA, 978 bp, Arabidopsis thaliana
atgggtgggtgggcaatcgcagtacacggtggtgccggtatcgaccctaatcttccggcggagagacaagaagaggctaaacagcttttaactcgttgtctcaacctcggcataatagctttgcgttccaatgtctccgccattgacgtcgttgagctcgtcattagagaattggagacggatcctctgtttaattcaggccgtggatctgctttgacggaaaaaggaacggttgagatggaagctagcattatggacggtacgaagagacgatgcggtgccgtttcggggataaccaccgtgaaaaatcctatatctcttgctcgtctcgtcatggacaaatctccccactcttaccttgctttctcaggtgcagaggatttcgcccgcaaacagggagttgaaattgtggacaacgagtactttgtcacggacgacaacgtaggaatgctcaagttggccaaggaagctaactccatcttgtttgattaccggattccgccgatgggatgtgccggtgcagctgcgaccgacagtccaatccaaatgaacggtcttccgatcagcatttacgcaccggagacagtcgggtgcgttgtggttgacgggaaaggacattgtgccgccgggacatccacgggtggtttaatgaacaagatgatgggaaggattggtgactcgccgctgataggagccgggacgtatgcgtcggagttttgtggtgtgtcgtgtaccggagaaggagaagccattataagagcaaccctagctcgtgatgtgtcagctgttatggagtataaaggacttaacctccaagaagcggttgattacgtcatcaagcatcgacttgacgaagggttcgctggactcattgctgtctcgaataaaggagaggtggtttgtggttttaactctaatgggatgttcaggggatgtgcaactgaggatggattcatggaggttgctatttgggagtga

SEQ ID NO: 95 - DNA, 426 bp, Arabidopsis thaliana
atggagtctgagaaaaagatagctcatgagatcggtggtgtcaaaaacgacgctcttcgatttggtcttcacggcgttaagagcaacatcatcggatctcacccactcgaatcgtcatacgaatctgaaaagaaatcgaaagaggcgttgaagaggacggtcattgcgcatgcctacgggactgcacttccgttgaagatggatatggataggcaaattctctcaaggtttcagagacctcctggaccaattccgtcgtcgatgctcggtttagaagtctacacgggagctgtggatgactttggttttgaggattacttgaatgatcctcgtgattccgagacattcaagccggtagacttccaccacgggatggaagttcgtcttggcatctcaaagggaccgatttacccaagtttcatgtaa

SEQ ID NO: 96 - DNA, 321 bp, Arabidopsis thaliana
atggagttttgtcccacatgtgggaatctgttgcgctacgagggaggtgggagttcgagattcttctgttccacatgtccatacgttgccaatatcgaaagacgggttgagataaagaagaagcaacttctggttaagaaatctatagaacctgttgttactaaagatgatatacccacagctgctgaaacagaagctccatgtccaaggtgtggccacgacaaggcgtacttcaaatcaatgcagattcgttcagcagatgagccagaatcaagattttatagatgcttgaagtgcgagttcacttggcgtgaggaatga

SEQ ID NO: 97 - DNA, 867 bp, Arabidopsis thaliana
atggaaacgtcgccgcaattcagacttatcttcgccgtaatcatttcttctctcatcgctttccgatcgtacaagcggaagtcgctcgatctctccggtggaattgctggattcctcgttatgaccattcacttcaccgccggtttcaggtacggagctctgctgcttgtattctttcttacttcctcgaaacttaccaaagttggcgaagataaaaaaagacgcgttgatgttgagttcaaagaaggtggacaaaggaactgggtacaagtgctatgcaatagtggaattgcttcagttctagttgtaattgcttgtactttaacgggttggaaggacaagtgtttggactcgaagcagtcagaaattgtaacagctcttattggtgggatcattggtcattacgcctgctgtaatggagacacttggtcctcagagcttggggttcttagtgatgcccagcctcgactaatcacaacgtttaagccggtgaagaagggcacaaatggtggagttacaaaggcaggactcttagctgccttggcagcaggcaccactgttggattaacattccttatcttcggactctttaccgcgagttgtgcaagtgatgtagctctaaagcaactcttagtcataccactctctgcactagctggactatgtgggagtcttattgattctatactaggagcaaccattcaattcagtggtttctgctctgtccggaacaaggttgtagggaaaccgggtccaaccgtaaagaagatttcaggtgtggacattcttgacaacaatggtgtgaactttgtctccatactcttgacatcttttctgacttccattgcttctgtgtacattttctga

SEQ ID NO: 98 - DNA, 924 bp, Arabidopsis thaliana
atggaagaagagcaacctccggccaagaaacgaaacatggggagatctagaaaaggttgcatgaaaggtaaaggcggtccagagaacgccacgtgtactttccgtggagttaggcaacggacttggggtaaatgggtggctgagatccgtgagcctaaccgtgggactcgtctctggctcggcacgtttaatacctcggtcgaggccgccatggcttacgatgaagccgctaagaaactctatggacacgaggctaaactcaacttggtgcacccacaacaacaacaacaagtagtagtgaacagaaacttgtctttttctggccacgggtcgggttcttgggcttataataagaagctcgatatggttcatgggttggaccttggtctcggccaggcaagttgttcacgaggttcttgctcagagagatcgagttttctacaagaagatgatgatcatagtcataatcgatgttcgtcttcaagtggttcgaatctttgttggttattacctaaacaaagtgattcacaagatcaagagaccgttaatgctacgactagttatggcggtgaaggcggtggtggctctacgttaacgttttcgaccaatttgaaaccaaagaatttgatgagtcagaattatggattatacaatggagcttggtctaggtttcttgtggggcaagaaaagaagacggaacatgacgtgtcatcgtcgtgtggatcgtcggacaacaaggagagtatgttggttcctagttgcggcggagagaggatgcataggccggagttggaagagcgaacaggatatttggaaatggatgatcttttggagattgatgatttaggtttgttgattggcaaaaatggagatttcaagaattggtgttgtgaagagtttcaacatccatggaattggttctga

SEQ ID NO: 99 - DNA, 1779 bp, Arabidopsis thaliana
atgaacggcacaacatcatcaatcaacttcttgacctccgacgatgacgcgtcggcggcggctatggaagctttcattggaacaaaccaccactcatctctctttcctccaccaccacaacaaccacctcagcctcagttcaacgaagatactcttcaacaacgtctccaagctttaatagaatccgccggagaaaactggacttacgctatcttctggcagatctcacacgacttcgattcatccaccggagataacacagtgatcctcggctggggagatggttactacaaaggagaggaagataaagagaagaagaagaacaacaccaacacggcggagcaagagcatcggaaaagagtaatacgtgagcttaactcgttaatctccggcggaattggggtttccgatgaatcaaacgatgaagaagtaacagatactgaatggttcttcttagtttcgatgactcaaagcttcgttaacggtgttggtctccccggagaatctttcttaaactctcgtgtgatttggttatccgggtctggtgctttaaccgggtcgggttgtgaaagagcgggtcaaggtcagatttacgggttaaagacgatggtgtgtatcgcgactcaaaacggcgtcgttgagcttggttcgtcggaggttataagtcaaagctcagatctgatgcataaagttaacaacttgtttaatttcaacaacggtggtggaaacaatggtgttgaagcttcttcgtggggttttaatctgaatccagatcaaggagagaatgatccagctttgtggattagtgaaccgacgaacaccggaatcgaatctccggcgagggttaataatggtaataactcgaattctaattctaagtctgattctcatcaaatttctaagcttgagaagaatgatattagctctgtagagaatcagaatcgtcaaagttcgtgtcttgtcgagaaagatttgacctttcaaggtgggttgttgaaatctaatgagactttgagtttctgtggtaatgagagtagtaagaagagaacttcggtatctaaagggagtaataatgatgaagggatgctttcgtttagtactgtggttagatcagctgcgaatgattcggatcattctgatcttgaagcatctgttgttaaggaagcgattgttgttgagccaccggagaagaagccgaggaaacgggggaggaaaccggcgaatgggagagaagagccgttgaatcatgttgaagcagagaggcagagaagagagaagttaaaccagagattctactctttgagagctgttgttcctaacgtttcgaagatggataaagcttcgcttctcggagacgcgatttcgtatatcaatgagcttaagtcgaagctgcagcaagcggagtctgataaagaggagattcagaagaagctagatgggatgagtaaggaagggaataatgggaaaggttgcgggtcaagggcaaaagaacggaaaagttcgaatcaagattctacggcgagttctatagaaatggagattgatgttaagatcataggttgggatgtgatgatacgtgtacaatgcggcaagaaagatcatcccggtgctaggttcatggaagcacttaaggaattggatttggaagtgaatcatgcgagtttatccgttgtgaatgatttgatgattcaacaagctacggtgaagatggggagccaatttttcaatcatgaccagctcaaagttgctttgatgacgaaagtcggagaaaactattga

SEQ ID NO: 100 - DNA, 1993 bp, Arabidopsis thaliana
ttaattaagataaaccccaaaactcaaaaaccaaatctttccacaatggcgtctcatctctttacccgatctcgaatctctctcctcaaaaccctaaaacccaatccttttacctcagcttcacccatcagagccatttccggtacaccattcctctctcaagatcctctgctcgcaaccgaatcaacagatcacgacccatcaaaccatcaatcaacctccacgccgcttccaccgaatccagcaacaggaagtcctctttaccaagagaattggcgtagtccgatcccaaacactccttccttcaaccaatctctagttccattaggatttctaaatcaagctcctgctcctcgtatcagagctctctctgagacgcttgacatgaactcgctgctgaatatgtttgcggattggactgcttcgcagcgttggtctgacatgaagcagctttttgaggtttgggttcgatcgcttgacaagaatgggaagccgaataagcctgatgtgaacctttacaatcattaccttcgagctaacttgatgatgggtgcttctgctggagatatgcttgatcttgttgcgccaatggaggagttttctgttgaacctaatacagcgtcttataatctagttttgaaggctatgtaccaggcaagagagactgaagccgccatgaagctgcttgaacggatgctcctcttggggaaggactctcttccggatgatgaatcatatgatttggttattggaatgcattttggagttgggaagaatgacgaagccatgaaagttatggacacggcactgaaatctggttatatgttatccaccagtgtctttactgaatgtgttcgtagttgtgtagccaaaggtaggacagatacactggtctccatcatcgagaggtgtaaggctgttgatcggaacaagtctctttgccctagctggatactgtgtaactatattgcagaagttgcaattcaagaggataatagcaagttggccttttatgcgtttgaatttatgttcaagtggatcactagaggcgaaatggctaggccgtcggttattttttctgttgatgaagggttggtagtagcaggccttgcaagtgctgctaggacttgtagttcatctttagtggaaggatcatggacgattctgaaacagagtctgcgtgggaggaaggcagccaaccctgcatcttacattgcaaagattaatgcctatgcatcgttggggaatctgcaaaaagctttcacttcacttcatgaacttgaatccgcatacgcagactctgaaaaagaagttgtggaggaaatgctttcaccttttacatcattatacccgctggttgtggcgtgctctaagaaaggttttgagacattggatgaggtatacttccagttggagagtttgagtcaaggtgatactccatataagtctgttgctgctctaaactgtataattcttggctgcgcaaacacatgggatctggatcgtgcttatcagacgtttgaggcaataagtgcctcttttgggctgactcctaatatcgattcatacaacgctttactatatgcatttggaaaagtcaagaagactttcgaggccacgaatgtattcgagcatctggttagcataggtgttaaacctgattcccggacgtattcattactggttgatgctcatctcattaaccgggatcccaaatcagctctgaccgtcgttgatgacatgatcaaggctggatttgaaccctctagggagacattgaaaaagctgagaaggagatgtgtcagggaaatggacgatgaaaacgatgatcaagtggaggcattggccaagaagtttcagatcagaatgggaagcgagaaccgcaggaacatgctgttcaacatagactactccaggggccgagcattaaacaattgaaatccaaaatggatggttgtaataacgaacccttgtgagaagtaaggggcgcgcc

SEQ ID NO: 101 - DNA, 1599 bp, Arabidopsis thaliana
atggggtcagtccccgatccaggcgagttaactgagttagctcagccgagtttcgaggagtttcagaaacagacgtcgttgatgactagctgtactcttctatggcaagagctctccgatcacttcacttctctagagcagaatctgatgaagaaatctgaagcgttgaagcagatgattgaaactctagataaccagactcagacctcgctcgagtctctgaagcgtagagaggtaacaatcgaccatagcgttgagatcgtagctgggaaagtaggtgaacgagctagagctgctcttgaatcgttagagaaagctagagatggttgtggtgatggttctaatgatgattccggtgatgttgacgatgaagaaggtcttctttctgctttgaaatctctttgtcttaaaatggatgcgagaggtttttggaactttgtgacggcgaggaagaaggagttggagaatctccggtcaaagattccggcggcgttggttgattgtgtagatccggcgatgttagtgcttgaagcgatatctgaggtttttccggtggatacaagaggagataaagttagcaatgattatggatgggcttgtgttgtgattcttgagagtttaacacctgtaattgttgatccagtgattgggaaatcgaggttgcttgttactccgagtgttaaggagaaagctaaggagattgctgagacgtggaagaagagtttggaagagagaggaaggatagagaatgtgaagactcctgatgttcatacgtttttgcagcatcttgttacatttggaattgttaaaagtgaagatcttgctttgtatagaaagcttgttgttggatctgcgtggcgtaaacagatgcctaagcttgcggtttctgttggtttgggtgatcaaatgcctgacatgattgaagaattaatcagcaggggacaacagcttgatgctgttcattttacttatgaagttgggcttgtggataagttccctcctgttcctttgctcaaagcttatctaagggacgcaaagaagtcagcagcttctatcatggaggactctagcaatactggccgagctacgcatctcgtggcgcgcaaggagcaatcagcacttaaggcggttttaaaatgcatagaagagtacaaactcgaggaagagttccctccagagaacctcaagaaacggttggatcagctagagaagaccaaaaccgagaagagaaagccagcagctgttcctgccaacaaaagaacccgagccagctacaacggtccaatgccaccagccaaagccgggcgtatcacaaacgcatacgtctcttccttcccgttcatcagatcaccctctcactctcctcaatacgcttcaccagcagcttacccatccccacctacaacagtctacagcaacagaagcccaccttatccatactctccggagatcatcccaggctcataccaaggctctcctatcggttacccagcgtacaacggttattgtaatggtccagttcctgctccagctcctccagtttaccacccacaccatcatcaacaccaccaattccaccatcagcaacattactactga

SEQ ID NO: 102 - DNA, 957 bp, Glycine max
ttcttgtttgttgattaacccttaattaagatggaattggaaaccctctacaccccttgttatatgccaaactcaaattggtttgtgcaagagagcctcagcacagagtggactagagaagataacaagaagtttgaaagtgcccttgctatatatgacaaggacaccccagatagatggttcaaggtggccgctatgatccctgggaagactgtgtttgatgtgatcaagcaatatagggaactggaagaagatgtgagtgaaatcgaagcagggcatgttccgattcccggctaccttgcatcttctttcacctttgagctggttgacaaccacaactatgatggatgcagaagaaggcttgcacctgtcagaggctctgatcaagagagaaagaaaggagtcccatggactgaagaggaacacagacgttttctgatgggacttttgaagtatggtaaaggagattggagaaatatctctcgcaattttgtggtcacaaagactccaacccaagttgctagccatgcacaaaagtactacataaggcaaaaggtttctggaggcaaagataaaaggagacctagcatccatgatataaccactgttaatcttacagaaacttctgcatcagacaagaacaagcctcctgtgattgcaccacagcagaagctgaatagcatgtcaaaagtacagctggactggactagtagccactacaatgatggatcactcatggttttcaacccaaatagtgatgacttgtttgtgtcatcttcatctgatgtcacttccatggccctgaaaatgcaagggcaagatctctatgaatgtgccttacgtgaggcttatgccaaggtaaaagttccaggtttcagcatggctcctagagacttcaataatgaagctgtttttggtattcatgcactgtaaatttaaatacccagcaaattggag

SEQ ID NO: 103 - DNA, 600 bp, Arabidopsis thaliana
ttaattaaatgtcttctaacaagattgtgttgactagttccgatggcgagtctttccaagttgaggaagtggtggcacgaaaactgcagatcgtaaagcacctgctcgaagacgactgtgttattaacgaaatccctcttcaaaacgttacaggaaatattctctccatcgttctcgagtattgcaagaaacacgtcgacgatgtggtcgatgatgatgcatctgaggagccgaagaagaagaagcccgatgatgtggcgggccggttcctgaatcaactgaagaaggagatgatgcatctgaggaggcgaagcagaatctcgatgcttgggacgcagagttcatgaaaaatattgatatggaaacaatcttcaagctcattctcgctgctaactatctcaacgtcgaaggtcttcttggtctcacttgccagactgttgcagattacatcaaagataagacgccagaggaagttcgagaactctttaatatcgagaatgatttcacacatgaagaagaagaagaagcgattcgcaaggagaacgcttgggcttttgaggctgacacaaaacacgaagatccaaagccctagggcgcgcc

SEQ ID NO: 104 - DNA, 691 bp, Arabidopsis thaliana
ttaattaaaagcaaaaatggtttctctgaagctccagaagcggctcgccgcatcagtgatgaagtgcgggaagggcaaagtttggctcgatcccaacgaaagctccgacatctccatggccaattcccgccaaaacatcaggaagcttgtgaaggatggtttcatcatcaggaagccaaccaagattcactctcgttccagagctcgcaaaatgaagattgccaagatgaagggtcgtcactctggatacggtaagaggaagggtacccgtgaagctaggttgccaacaaaggtactgtggatgcgtaggatgcgtgttcttaggcgtctgttgaagaaatacagagagacgaagaagattgacaagcacatgtaccatgacatgtacatgcgtgttaagggtaatgtgttcaagaacaagcgtgtcttgatggagagtatccacaagtcaaaggctgagaaggctagggagaagactctgtctgatcagtttgaggctaagagggcgaagaacaaggctagccgagaaaggaagcatgctaggagagaggagcgtttagctaagggtcccggtggagatgttgcgcctgtagctgctccagcacctgctgctacacctgctccaactgcagctgtaccgaagaagaagtctaagaagtgaagaggatatatagtgtgaagctggcgcgcc

SEQ ID NO: 105 - DNA, 487 bp, Arabidopsis thaliana
ttaattaaatggcttcaatttctgcaactttgccttcgccattgttactcacacagagaaaatccaatctcacatcgattcaaaaactcccattttctctaactcgaggtacgaatgatctttctccattatctcttactcgaaaccctagcagcatcagtctgatggtgaaagctagtggagaaagctcagattcatcgactgatctcgacgttgttagtacgattcagaatgtttgggataagtctgaagataggttaggtcttattggtttgggttttgctggtattgtagctctttgggcatcattgaatctcatcacggcaatcgacaaattgcccgttatctcgagcggattcgaactagttggtatcttgttctccacgtggttcacatatcgatatctcttgttcaaaccggacagacaggagctttcgaaaattgtcaagaaatcagtagcggatatacttggccagtgaggcgcgcc

SEQ ID NO: 106 - DNA, 2867 bp, Arabidopsis thaliana
atgggttcatttgccggaaagtgtgaaatagttgaagaaaaagaagaccgtcaaaactcgattggttactcagcgaaatcaaccactattccacattctagatcaagcattgtcgacgacaaggatctggagcgaccggtactgaaattaggttacagaggttcactagaagatgacataaaccaacttttcgagtctataagcattcgaacatcaggaatgattccttcttaccaagttggtgcaactagtagcagtagaaacaacactcctttacaacggaatgctttgaagagtcccgcgaatcccgcaggacctcgatcgcctagcaagagaaatgcggaaccagcgacgttaaaacaagctttgagagatttatgcgtcactaaggcatcggaaaccgcagctaccaaacggattcctaagagtactagtactggaggctcagtttatggttcggttttggttgaaccgggaagtggagctagcgaagaagggaaagcggttcttgtcgagttactcggcgaggatcaaagcagttcatcggatagtatatcgcagcagcttcgtcttctgaagatacattcttctagccaaaactctcagacatcaaagcggtattgcgatgagatgacaatacttaaaaaacacaagaacctgtctcttgacgaccaagaaatgagtatcgagaacaagaacttcggttcatcatcgcccggatcaggaaacaacaagaccgtggttggactgaaatcagttagaaaagtgaggttgttgtatgccaatacaccgagttccaccatagttaacgggaagagagtggctaagttaaccagaaccattccaagaggaggaggagctaaacctgcactaaggaacaaaggttccatgaagaagaaggctacaaatgtgtatgatgaagtagatggcttctatgatcccattgcaaaggaacttctctgccatagatgccatttctctttgaagaacactgcagctaaggaagatccctctaaagattcacttgtagaaccacatgagatctgtgctaaagatgaattggcttctgatttctccagctcaagctatgagagctcgcatgagatcagtgctagtgcagagaccaaacttgataagataagaagctctctggatttgatgaattcagagacctctcacgtttctttaacatctgcattccgtaataagaacatcaaagatgtttctgaatacggcaacaatgagatcatggaggaagattctctatctggcaaagaagttgatcagaaagattctgtctttatgtcggaacagagcgtggagattggttctttcagtgagaaatctgttgtgatgaatccagatagtcctccaaacaaactcagtttaggcggagcagccattgaagatgtcaacgaaaactcagaaatcataaacaaaggcgacggatacaacagttcaaccacgagtatcagcgaggaagaagtacaacaacagagtaataatataatgacaaggtctagctttggaaacagacctcatatgtctaaggatgtgagatgggaagctattcagcatataagggcacaacacgggcttggttcattgggtcttaggcatttcaatcttctgaagaagctcggctgcggagatattggaacggtttatctcgctgagctcacgggaacaaactgtttgtttgctataaaagtgatggataatgaattcttggagagaaggaacaagatgtctagggctcaaactgagaaagatattctcaaaatgcttgatcacccgtttcttccaacgttatacgctcacttcacttcggataacttatcttgtttggtcatggaatgttgtccgggaggtgatttacatgtcttaaggcagaagcagcccggaaggtggtttcccgagccagcagctaggtaccttggttcttacgattagtggttaacttttttatgctttatgatttgtgatgttgtagttactaattgtttttgtcttataggttctatgtcgcggaggtgcttcttgcattggagtatttgcatatgctcggggtaatataccgagatttgaagcccgagaacattttggtacgtgatgatggacatatcatggtgacagattttgatctctctttgaggtgtaccgtgagcccaacgcttctaaactcatcatctccactccatgcggatgcaatgagactctcttcgggtagccgcactggatctaactgcatcgagccatcgtgtttccgccctaaactctcccgcggatcagggcccaagaaaaaaggcaaacaacaccgcatgatgatgaaaaaactcaagaaatctgacctaatcgcgcggttcaaatcattgccacagctcgtggcagaaccaacagatgcgagatcaaactcttttgttggaacacacgagtatctcgcgcccgagatcattaaaggagaaggtcacggtgctgcggttgactggtggacatttgggatctttctatatgagcttctttacgggaaaactccattcaaaggagctactaatgaggagactatagctaatgtggtgcttcagagcttgaagtttcctgataaccctaatgtgagtttccaagctaaggatcttataagaggtttgttggtcaaggaacctgagaaccggttagggacagagaaaggagcagcggagataaaacggcatgcgttcttcgaaggcttgaactgggcgttgatccggtgtgcgatcccgcctgagcttccggatttctatgactatggagttcctaatcaagaagggaaaagcaattacttagattgcaaggcagttggggaacatcttgagtttgagttattctag

SEQ ID NO: 107 - DNA, 1047 bp, Arabidopsis thaliana
atgttagactcttcaacgaattctccgtcagcagccgacatactagcagcttgcagcactagaccacaagcctcggccgtggctgtagccgctgcagctctgatggacggtggaaggaggctgcgtccacctcacgaccatcctcaaaagtgtcctcgttgcgagtcaacacatactaagttctgttactacaataactacagcctctctcagcctcgttacttctgcaagacttgtcgccgttactggacaaaaggcggaactctaaggaatattccggttggtggtggatgccgtaaaaacaagaaaccatcttcctctaattcctcctcctccacttcttccggcaaaaaaccatccaacatcgttaccgccaatacctctgatcttatggctttagcacattctcatcaaaattaccaacattctcctctagggttttcacattttggtgggatgatggggtcttactcaactccggagcatggtaacgttggtttcttggagagcaagtatggcggtttgctttcgcagagccctagacctattgatttcttggacagtaagtttgatctcatgggagtgaacaatgacaacctggtcatggttaatcatggaagtaacggagatcatcatcatcatcataatcatcacatgggtctgaatcacggtgtaggtcttaacaacaacaacaacaatggtggatttaatgggatttctacgggaggcaatggaaatggtggtggtctcatggatatatcgacatgccaaagacttatgctatctaattatgatcatcaccattacaatcatcaagaagatcatcaaagggtagcaacaataatggatgtgaagccaaatccgaagttgttatcgcttgattggcagcaagatcaatgctactccaatggtggtggtagcggaggcgcaggaaaatccgacggtggtggatacggcaatggtggttatatcaacggtttaggttcgtcgtggaatggtttgatgaatggctatggaacgtccactaaaacaaactccttggtttga

SEQ ID NO: 108 - DNA, 1125 bp, Arabidopsis thaliana
atgagcaacgataaggacagtttcaatgtcagcgatctcacttctgctcttaaagatgaggatcgagctggtcttgtcaacgctcttaagaacaagctccagaatctagctggacaacattctgatgtgctcgagaatctgactcctaaaattagaaggcgtgttgaggttttgcgggagattcagggcaaacatgatgaaatagagacaaaattccgcgaggagagagctgctcttgaagccaagtatcaaaagttatatcagcctttgtataacaagcgttatgagattgtgaatggagctactgaagttgaaggggctccagaggatgctaagatggaccaaggagacgagaaaactgcagaagagaaaggagtccctagtttctggctgactgctctgaaaaataatgatgttatatctgaagagatcacagagcgtgatgaaggagcccttatatatcttaaagatatcaagtggtgcaagattgaagaaccaaagggattcaaacttgagtttttcttcgaccagaatccttacttcaaaaacaccctattaacaaaggcgtatcatatgattgatgaagatgagcctctgcttgagaaggctattgggacagagattgattggtatcctggaaaatgcttaactcagaagattcttaagaagaagcctaagaaaggtgcaaagaatgccaagccaattaccaaaactgaagattgtgaaagcttcttcaacttcttcaatcctccccaagttcctgatgatgatgaagacattgacgaagaaagagccgaggaacttcagaatctgatggaacaagattatgacattggttctacaatccgggagaagatcatacctcatgctgtctcatggtttactggtgaggctattgagggagaggagtttgaaatagacaatgacgatgaagatgatatcgatgaggatgaagatgaggatgaagaagatgaagacgaagatgaggaagaagacgacgaagatgaggaggaagaagtaagcaagaccaaaaagaagccatcagtcttacacaagaaaggagggagacctcaggttaccgatgatcaacaaggagagaggcctcctgaatgcaaacaacagtaa

SEQ ID NO: 109 - DNA, 334 bp, Arabidopsis thaliana
atgtcgttggtatggttggaagcgatgttgcctctcggaatcatcggtgggatgctctgtatcatgggcaattctcagtactacatccacaaagcttatcatggccgtgtatgaatttccccccttttcgattcattgctctctctctctcctagggtttgctcgatttgatccggtttatacaaatttgggtactctattgaacatttggttgatgatttgatttgaatttgtgattgggcagcctaagcacatcggccacgatgaatgggatgttgctatggaaagacgcgacaagaaagtcgtcgagaaagctgcagctccttcctcatga

SEQ ID NO: 110 - DNA, 423 bp, Arabidopsis thaliana
atgatgtcctttgaaatgaatgaccggaaaaaaatcgggttaggcctgacaggatttggcgtattcttctcgtttttgggaatagtctttgtctttgataagggattacttgccatgggaaatattcttttcatctcgggggttagtctaaccattggcttcaagtctaccatgcagttcttcatgaagcgtcaaaattataagggaaccatctcttttggcgtcggtttcttctttgttatcatcgggtggcctatcttgggaatgatgttggagacctatggctttttcgtactcttcagtggcttctggcctaccttggcagtctttgctcagaagatacccgttctcggttggattattcagcaaccatatattagatcgttctttgacaagtaccggggcaagcgtgtgccggtctag

SEQ ID NO: 111 - DNA, 1056 bp, Arabidopsis thaliana
atggcggcgatttcaggcatctcctctggtacgttgacgatttcacggcctttggttactcttcgacgctctagagccgccgtttcgtacagctcctctcaccgattgcttcatcatcttcctctctcttctcgtcgtctgctattaaggaacaatcatcgagtccaagcaacgattttgcaagacgatgaagagaaagtggtggtggaggaatcgtttaaagccgagacttctactggtacagaaccacttgaggagccaaatatgagttcttcttcaactagtgcttttgagacatggatcatcaagcttgagcaaggagtgaatgttttccttacagactcggttattaagatacttgacactttgtatcgtgaccgaacatatgcaaggttctttgttcttgagacaattgctagagtgccttattttgcgtttatgtctgtgctacatatgtatgagacctttggttggtggaggagagcagattatttgaaagtacactttgctgagagctggaatgaaatgcatcacttgctcataatggaagaattgggtggaaattcttggtggtttgatcgttttctggctcagcacatagcaaccttctactacttcatgacagtgttcttgtatatcttaagccctagaatggcatatcacttttcggaatgtgtggagagtcatgcatatgagacttatgataaatttctcaaggccagtggagaggagttgaagaatatgcctgcaccggatatcgcagtaaaatactatacgggaggtgacttgtacttatttgatgagttccaaacatcaagaactcccaatactcgaagaccagtaatagaaaatctatacgatgtgtttgtgaacataagagatgatgaagcagaacactgcaagacaatgagagcttgtcagactctaggcagtctgcgttctccacactccattttagaagatgatgatactgaagaagaatcagggtgtgttgttcctgaggaggctcattgcgaaggtattgtagactgcctcaagaaatccattacaagttaa

SEQ ID NO: 112 - DNA, 774 bp, Arabidopsis thaliana
atggattcctctctgctctcggcggctacggccgataccttcaacggcaatgcggcggatcaaattcctcctccgttacagcctccgggaacggatatgactggaatttccttcagggatcagctctggatcaattcataccctcttgatcgtaactacatcttcgattacttcgctttgtctcctttctacgatacaacttgcaacaatgagattcttcggagaagatccattcaccctctcgatctctctcacctctcgaagatgacaggtctagaatatatgttaactgatgctactgaaccaaacctgttcgtctttcgtaagcaaaagagagatggtcctgagaaagtcacaccgatgctaacatattatatcttggatggttctatttaccaagctcctcagctttgtagtgtcttcgcagctcgagttagtcggactatttataatatatccaaggctttcactgatgctgcatcgaaattggagaccattagacaagttgatactgaaaaccagaacgaacctgctgagtcgaagcctgctagtgagacagttgatctaaaggaaatgaagcgagtcgatgtcattcttacctcattatatcgcaagttagcgccaccacctccacccccaccctttcctgaaggttatgttagccaagaagcattaggagaaaaggaagagcttggaacacagggaggagagtcacaaccgcctcaagttgatccaattatcgatcaaggtcctgctaaaagaatgaagttctaa

SEQ ID NO: 113 - DNA, 888 bp, Arabidopsis thaliana
atgtccactcttcctttcgcgccttctgtcacccatgcgcactttagccactccctctcccccatgtttatcctgcgccatctccctcttacacgccatctccgtttatcccgaaataaccgcgtcgcttccgttgtatccgccgccgccgttcgccaggacgcttccctctggactccagctcctctctctctaatcgaatcagctgcagaatcgcttttccacatctcaatcgacatttcaaacgctccggatctcgtagcttcgtacacgagacccggtcagtatctccagatccgtgttcctgatgttgagaagccttcttttatggcaatcgcttctcctccttccttggcgtcttctcgtggtgctttcgaattcttggtcaagagcatcgctggttctaccgcggagattctctgcgggttgaagaaaggagagaccgttgagcttagctctgtgatgggtaatggtttcaatatcgatctgattgatcctcctgaggaatatcccaccgttttgattttcgccactggatctggaattagccccatccgctcactaatcgaatcaggatttggcgctgatagaagatctgacgtaagactctattacggggctaggaacctgaataggatggcttaccaggaaaagtttaaagagtgggaatcagcgggtgtcaaagttgtgccggtattatcacagccagatgatgggtggaaaggggaaactggatatgtgcaggctgcttttgcaagggctaaacagctatcagctcccaaggccacgggagcggtgctgtgcggacagaaacaaatggctgaggagataacttcaatgcttgtagctgatggagtctcaaatgacaagctgctcaaaaacttttga

SEQ ID NO: 114 - DNA, 987 bp, Arabidopsis thaliana
atgcagtacaagaatctggggaaatcgggtttaaaagtgagcacgctctcgttcggagcgtgggttacgttcgggaaccagctcgatgtgaaagaagcgaaatcgattcttcagtgttgtcgtgatcatggagtcaatttcttcgataacgctgaggtttacgctaatggtcgcgctgaggagattatgggtcaagcgattcgtgaactgggttggcgtcgatccgatatcgtcatctctaccaagatcttctggggtggtcctggtcctaacgataagggtttatctaggaaacatatcgttgaaggcactaaagcttctctcaaacgacttgatatggattacgttgatgtgctctattgccacaggccggatgcttcaactcctatcgaagagactgtgagggcgatgaactacgtgattgataagggttgggccttctattggggaaccagtgaatggtcagctcaacaaattacggaggcatggggagctgctgaccggttggatttggttggtccaattgtcgaacagccagaatacaacatgttcgctaggcacaaagttgagacagagtttcttcctctgtacaccaaccatggtataggtctcactacctggagcccacttgcatctggtgtgctcactggtaaatacaacaagggagctattccctcagacagccgatttgcattggagaactacaaaaaccttgccaatagatcacttgtggatgacgtgctgaggaaagttagcggtctcaaacccattgcagatgagctaggtgtaaccttggctcagcttgcaatcgcatggtgtgcttcaaatcctaatgtgtcatctgttatcactggtgccacaagggagtcacagattcaagaaaatatgaaagctgttgatgtgatcccattgttgacccctattgttctggacaagattgagcaagtgatacagagcaaaccaaaacgtcctgaatcatataggtaa

SEQ ID NO: 115 - DNA, 531 bp, Arabidopsis thaliana
atgggatcggaacaaaacgatagcacaagcttcacgcaatcgcaagcttcagagccaaagctatgtgttaaaggatgtggtttctttggatcaccatcaaacatggatctctgttctaaatgttacagaggcatttgtgctgaggaagctcaaacagcagttgctaaagctgctgttgaaaaatctttcaagccttctcctcctcgtagtctcttcatagcagaacctcctgctgttgttgtggaacccaaacccgaaaaggcggcagttgttgttgtctcggccgagccatcttcctcggcggttcctgaggcgaacgagccatcgagacctgcacgaaccaaccggtgtttgtgttgtaacaagaaggttgggatcatggggtttaagtgcaaatgcgggagcactttctgcggcgaacatcggtacccggagactcatgattgcagctttgatttcaaagaagttggacgtggagagattgccaaagctaatcctgtggttaaggctgataaaattcaaaggttctga

SEQ ID NO: 116 - DNA, 330 bp, Arabidopsis thaliana
atgggatcaactaataaactctggagccgtaaaccagacgtcaaaaccgggaaatcagaatttccggttaccagattcctccgtacacaaatcgataacatcaagacaacaaccgtcggtcccggaatcggcggcggcattggctgcggcgctggaatcggcattggtctctccggcgggctcggaataggtgcctctgaaggacttgaccattctaacgtggttcttggattcggtattggttgtggtatcgggttcgggtttggatacggatttggagttggcggcgggtacagtttcgatgacatcaaagagagatttgacctatga

SEQ ID NO: 117 - DNA, 1092 bp, Arabidopsis thaliana
atggcgaaagacggacctaattgggatggtttgcttaagtggagtctctctcacgccgacggtactcgacccactcgccagttgagtgaggaggatcgaaaatggtttatggaggctatgcaatcgcagactgtagatgtagtcaaacgcatgaaggagattacactagttatgcaaacacctgaacaagttttggtggaacatggagtaacacctgaagatatccaagatttgctggatgagctgcaagagcacgttgaatcgatcgatatggctaacgatcttcattcaattggaggcttggttcctcttcttagtttccttaaaaactctcatgctaatattcgggcaaaagctgcggatgtcgttagcacaatagttcagaacaatcctagaagtcaggaacttgttatggaaaccaatgctctggagtcattgctctcgaatttcacttcagacactgatattcacgctcgaacccaggctcttggcgcaatatcatctttgattcgccataacaaaccaggagtaacggctttcaagcttgccaatggttatgctggcctaagagacgccttggcatctgatagtgtgagatttcaaaggaaagccttaaacttgttgcaatatctactgcaagaggatgattcagaccgcagtattgccactggacttggattcccccgagtgatgatgcatcttgcctctagtgacgatgctgagatcagagaagccgctcttcgtggattacttgagctttcaagagagaaaaacgatggaagtagcagcatagataaaagcgatgagaaactgaggcagctactagaagaacggatcaaaggaatcaccttgatgtcacaagaggatcttgaaacggttaaagaagagagacagctcgtggatttactgtggagcatttgctacaatgaaccttcttctctgagagaaaaaggacttgtcgttcttcccggtgaagacgcattgcctcctgatgtcgctagcaagctctttgagcctcctcttagagcttctgcagcaaaccgtaatgctactgagaagaaagatgaacctatgaaactacttggaccatag

SEQ ID NO: 118 - DNA, 1310 bp, Arabidopsis thaliana
tttaattaaatggctcagatcttagcagcttctccaacatgtcagatgagagtgcctaaacactcatcagtcattgcatcatcatccaagttatggagctctgttgtgttgaaacagaagaagcagagcaacaacaaagtcagaggctttagagttcttgctctccaatcggataacagtactgtcaatagagttgagactcttctcaatttagacaccaaaccttactctgacaggatcattgctgaatacatttggattggaggatctggaattgaccttagaagcaagtcaaggactatcgaaaagccggtggaggatccttctgagctacctaagtggaactatgatggttcgagtaccggtcaagcacctggtgaagatagtgaagtgattctatacccgcaagctatcttcagagatcctttccgtggaggcaataacatcttggttatctgtgatacttggacaccagctggtgagccaattccaacaaacaaacgtgctaaagctgctgagatcttcagtaacaagaaggtctctggcgaggttccatggttcggcattgaacaagagtacactttacttcagcaaaacgtcaaatggcctttaggttggcctgttggagcgttccctggtcctcagggtccttactactgtggagttggagctgacaagatttgggggcgtgacatttcagatgctcattacaaagcttgtttatatgctggaattaacattagtggtactaatggtgaagttatgcctggacagtgggagttccaagttggcccgagcgtaggaatcgatgcaggtgatcatgtttggtgtgctagataccttcttgagagaatcacagaacaagctggtgttgtcctaacacttgatcccaaaccgatagagggagactggaacggtgctggttgccacaccaattacagtacaaagagcatgagagaggaaggaggatttgaggtgatcaagaaggctatcttgaacctctcacttcgccacaaggagcacatcagtgcctacggtgaaggaaacgagagaaggttgaccggaaagcacgagacagctagtattgaccagttctcatggggcgtggctaaccgtggatgctctattcgtgtgggacgtgacaccgaggcgaaaggaaaaggttacttagaagatcgccgtccagcatctaacatggacccatacattgtgacctcacttttggcagagaccacactcctgtgggagccaactcttgaggctgaagcccttgcagctcaaaagctttctttgaatgtttaaatttaaat

SEQ ID NO: 119 - DNA, 956 bp, Arabidopsis thaliana
ttaattaagatcgctgctcagaagtttgatttcgatatcaagaatcgtgatagaaaaaatgcgacacaattgttgccatgtctcgttcgcttcgattctcaagatccttaattttctccaagctttcatcggtatatcaatcataatctactcgatttggatgctcgatcaatacaatcatcacgttcccgttgaccctcctccgtctcagcctccggcagcttcatcaccggattcttcttattccttctctaattcaataattgagatcaacagtgtttctgattctttgaagaatccgatcgatttcgtatcgggtatcgttctcgggtctggtggtggagattcgggtttcaatctccgttctttagatcttcctgctccatggtttatctactgtttcatggcgattgggattttggtctgcattgtcactatcattggtttcattgcagctgaagctatcaatggatgttgcttgtgtttctattcaattctcaaaactcttttaatcattatcgaagcagctctagtgggattcatagtgattgaccgtcactgggagaaggatcttccttatgatccaactggagaactcaatagtcttcgagctttcatcgaagaaaacatcgatatttgcaaatgggtcggaattgttgtggtagccatccagttactgtcattgctactggctttggttttgagagctatggtttcacctcggcaatcagagcttgatgatgaagatgattttgagaatccgatgagtagagcacgagacaatcttcttggtccacaggcaaaccagacatcttctggatcaagcaatattgacaactggaggtcccgaatcagagagaagtacggattgatcaacagtcagagccacactccatcagcttaactcaaaagactgagttcttgtgtctggaattatcagtactttggggcgcgcc

SEQ ID NO: 120 - DNA, 2024 bp, Arabidopsis thaliana
atgggctcagacagcactttgtctctcccttcttcatctcctccttgtaacaatcgctcctctgttcctccaactttcaccactcggtctgtcttctttctctatctctcccccgagttctgtattaatctctgttaagcttatctgtattcacttgttattatgaatgtaatggtttgagttttgtttttatgaaaattacagcatattctctgatgttgcgggtgacatcattgttgttgtcgatggagaatcatttctacttcacaaggttagtgcacacttttctggtttgagtttttttttttttttctttacagtttttagatcaaacgcatcagagaataataataaacattgcagtttccgttagtagctaggagtggaaagatgaggaagatggtgagagatctcaaggactcttcttctatgattgagcttagagatttccctggtggaccttcgacgtttgaactcaccatgaaattttgctacggcattaatttcgatatcactgcctttaacgtggtctctctccgttgcgctgctggttatcttgagatgactgaggactacaaagaacagaacttgatctttcgagccgagaattacctcgaccagatcgtttttcgcagttttcatgaatctgtcctagtactttgctcctgcgagacgcaagagattgctgaaacatatgaaattcctgaccggtgcgtggaggccatcgccatgaatgcttgcagaaagcagttagtatcaggtttatcagaggagctcaaggggagagattgtctcgagatgtggactgaagaactctctgctctcgggattgattactacgtccaagttgtatctgcgatggcgaggttaagcgtgcggtcagagagtatcgtcgcttctctggtgcattacgctaaaacatcattaaagggtatcatcgatcgaaactgccaggaacagaggaaaatcgttgaagccatggttaaccttttgccgaatgacgaaaaaggatcttactctttatcaattattcctctcggtttcctctttggaatgctcaaggtcggaactataatagatatagagatctcttgcaggctcgagcttgaacgtagaatcgggcatcagttagagaccgcgtctctcgatgatctgcttataccttctgtccaaaacgaagattcaatgtacgatgtggataccgtccacaggatactcacattctttcttgagaggattgaagaggaagatgatgaatgtggttacgattcggattccactggacaacacagttcgttgctgaaagtgggacggatcatggatgcttacttggttgagatcgcaccggatccatacctgagtctacacaagtttacggctattatagagacactacccgaacactcacgtatcgttgacgatgggatctacagagccattgatatgtatctcaaggtaaacaaaaacacaattgaacaaagtctttttatgttttgaaaacatctgaaactgataatcaaatatggaaattaggctcatccattattgacagaagaagaacgcaagaagctatgcaacttcattgactgcaagaaactttcacaagaagcaagcaaccacgtggcacaaaacgatcggctgcctgtacaaatggtggttagagtgctttacacagaacagttgcgactgaagaaagctctgtcgggagattcagaagaagggtcgtgggttttgccttctggagtacaaagccgagcggtttcgccaagagacacgtatgcagcgttgaggagagaaaacagagagctgaagctggaaatatcaaggatgagagtgagagtgagcgagttagagaaagaacataatttgatgaaacatgagatgatggagaaatccggtaataatggtggaacgttcttgacgtcactgtccaaaggaattggaaggatcgcgacattcggtggagaaacccggcaaaaggtgaaccggaaatcaaggtcggtgtcggagagaaaatcaagtag

SEQ ID NO: 121 - DNA, 392 bp, Arabidopsis thaliana
atgttggaaggcaaagcaatggtggaagattcagacatgccagtgaagatgcagatgcaagctatggcatttgcttctcaagctcttgacctttttgatgtctttgactgtaaatccattgctggtcacatcaagaaggtattagtaatgattttcttcaattctatttataagtcataaatacatcattatcatctatatataactacttggttaattttgtttgttctataatgaattttcaggagtttgatgagagatatgggagtggatggcaatgtgtggtgggatcaaattttgggtgtttcttcacacattctaaagggacttttatctattttcaattggagacacttaagttcctcatctttaaaggcgcttctactccttaa

SEQ ID NO: 122 - DNA, 2122 bp, Arabidopsis thaliana
atggaaggaagaaggattacggcaagccctagaccttgtagtggaagaagaattgtggctaagaaaaggtctcgacccgatggattcgtcaacagtgttaaaaagcttcaacgaagagaaatctcttctcgtaaagatcgagctttctctattagcaccgcccaagagagatttcgtaacatgcgtctcgtggtatgttctgaattttcaatcttttgtaatttgccctaattcccaaaccctagagattgcttctctctcttaattgggatttgatttgagtactaatttaagctgctcttgcttgatgaattttgatttcaggagcaatatgatactcacgatcctaaagggcactgtttagttgcattaccgtttttgatgaagagaactaaagttattgagattgttgctgcaagggacattgtttttgcgcttgcacattctggtgtttgcgcagcttttagtagaggtaattatcgtaacttgactacttactctcagctttgtgtctatgtgactgatagtatgatttaccttaaactgcagagtcgaacaaaagaatatgctttttaaatgttagtccagatgaagtcatcaggagcttgttctacaacaagaacaatgattctctcatcacagtttctgtttatgcttcagacaatttcagctctttgaaatgcagatccactagaattgagtaagttttctaccatctaccaaatcggtatcatgtcgtctgttgcgttattcaaactaatgtgtgtttctggttgtaatcaactattaggtatattctgagaggtcagccggatgcagggtttgctctttttgagtctgaatcattaaagtggcctggttttgttgagtttgatgatgtcaatggaaaggtgctgacttattctgcgcaggacaggttatttttctagtctcacagcctaaatttttttttacgacaagtttcatcctctgagcctgatagctgtttctgcagtgtatacaaggtgtttgatctgaaaaactacaccatgctatattcgatatcagataaaaatgtccaggaaattaaaatcaggtaacttttctccatctttctttgacccttttgttgtttcttgtttgcaaatattgagcaagctgcttttctaactgtgctgtccactagattggattgacagacttgtgaattttctaactgttgtgcccatttgattccctgcatcagtccagggataatgttattgatcttcaagagagctgccagtcatgttcctctgaagattctgtcgatagaagatggcactgttctcaagtccttcaatcatttgcttcaccgaaacaagaaagttgacttcattgaacaattcaatgagaaacttcttgttaagcaagagaatgagaatcttcaaattcttgacgtgagttgattttttgtctgattcaatcaatcttttagctgttgttttacttgttttctttatcaagttggtttctgatttacaaattcaggtcagaaatgctgagctaatggaagttagtagagctgagttcatgacaccgtctgcattcatatttctgtatgagaaccagttgtttctgacattcaggaaccggaacgtttctgtgtggaactttcgcggagagctcgttacttcctttgaggaccatcttctatggcatccagactgtaacactaataatatctacattacaagtgatcaagatctgatcatctcgtactgcaaagcagataccgaagatcagtggatagaaggaaatggtaagaaaaataacccctcaagataatattaaccagatattataacctaacaaatctcattgatggatattgattattggtgttttgtgggatgatccagcgggatcaatcaatatcagcaatatattgactgggaaatgcttagctaaaataacaccaagcagtgggcctccaaaagatgatgagagcagcagcagtaattgtatgggaaagaactcaaagcaaagaagaaacgctgtagctgaagctttggaagacataaccgctcttttctacgacgaagaacgcaatgagatatacacaggaaacagacacggccttgttcatgtgtggtccaattga

SEQ ID NO: 123 - DNA, 2343 bp, Arabidopsis thaliana
atggcgtcgacagtctcagttcaaccgggtcggatccggatcctaaagaaaggctcatggcaaccgttggatcaaacggtgggtcccgtcgtttactggatgttcagagatcaacggttgaaagataactgggcgttaatccacgccgttgatctggcaaacagaaccaacgcgccggtggccgtcgttttcaatctgttcgatcaatttctggacgcaaaagcgaggcaattagggtttatgttaaagggtttgcgtcagcttcaccaccaaatcgattctctccaaattccgttttttctcttacaggtgagtccatagctcgatctcacaccaaacccattttaaattagagcaatcatagaggaaaagttagggtttttacgctctttgttatatgaggaattgaaatggtagatgaagctaatttagacattgaataaacctttgaatttcgtaggtttattgaaaattagctgtaaagttatgttctttacttatctcaagatgaactttacgattcagggagatgcaaaggagacaatccctaatttcctcacagaatgtggagcttcacatctggttactgatttctctcctttacgggaaatccggcgttgtaaagatgaggttgtcaagagaacgagtgattcattagcgatacatgaagttgatgctcacaatgtagttccaatgtgggctgcttcgagtaaattggagtacagtgctagaacaattaggggtaagatcaacaagctactacctgattacctcattgagtttcctaaacttgagccgccgaagaagaaatggacggggatgatggataagaagcttgttgattgggatagcctcattgataaagttgtaaggttagttgctgtttaatgtgtttaataacgcctgcttctttatgcttatttgagttttgagttctatggtgattgtgatatgtggatagggagggtgcagaagttcctgaaattgaatggtgtgtgcctggagaagatgcagggattgaagtattgatggggaataaagatggttttttgacgaagaggttgaagaattattcaactgaccggaataatcctataaagccgaaagcactctctggtctctctccttatctacatttcgggcaggtatcagctcagcgttgtgccttggaggcgcgtaaagtccggagtacttcccctcaggttcataggcctatcatacttttgaatgtatatacttgtgtagttttctctgtttgttacctgttggtcactctcttagtttggtatttgcattgtttgtctttgtccattaaaggcggtagacacattcttggaagaattgattgtgcgaagagaactctccgacaatttttgctattatcaacctcattatgattctttgaagggagcttgggagtgggcacgcaagtcactaatggatcatgcttcagataagagggaacacatttactcgtaatgttttagccattactccttaattcttttggaaagaaaatcttccaagcttctatatgcacgttaaacggtattgaaattgtaggttggagcagttagagaagggactgacagcagatcctgtaagccaccaatctcttttctcatagcatttgcatttaagtgttattttttgagttgttgaatcttggcagctatggaatgcttcacagttagagatggtttatcaagggaaaatgcacggtttcatgcggcaagtgaaatcatttatctggattttgactgtgctatataatagcaactatggtaaaaactgacgtttatcaacattacatgcagaatgtattgggcaaagaagattctagaatggaccaagggacctgaagaggctctctcaatatccatctatctaaataacaaggttttcttccaacttaatttctgtatctaccatgaatttcctttttgttgcttaaagtttttgatattttgtagtatgagattgatggtcgtgacccgagtggatatgttgggtgcatgtggtctatatgtggcgttcatgatcaggttctttcattttctcctcttacttgactagaagtgatagtagaatagattggtgaatgttgtgcgtgtgattgaattttgatttatcgattcgtgctttgacgggttttagggatggaaagagaggccggtttttgggaagatacggtacatgaactacgcgggttgcaaacggaaattcaatgtggatagttacatctcttatgtcaagagtttggtgtcagtaacaaagaagaagaggaaagctgaagaacagctcaccagagactctgttgatcccaagataactattgtttag

SEQ ID NO: 124 - DNA, 3771 bp, Arabidopsis thaliana
catgttttatttgatttagatgtataaagaatcttttactcaaatgtattttgattgatgcttacagaagaaagggatttgcaaatttgagaattcacattttggattaagatagaaacgatgtcgtctgagtcaccgaatttgcctgctgctgcgggaacagtaccagataatcatcctcctcctcctcctgttgttactgctgcagaagctggaagcgatgattcacctaaaggagtagcatcaaaactatctgctgctgggatttcaaattgggccaaaaacttgaaagttccacagccttttgcttccacacaaaacgactctggtgtcgaaaacaccgagaagtctgcgtttgcaaagtttacaagcgggttagggattcgtttatctccgaaatctcctcaaacgaatgacactaccacagaaggaacttcgagtgctacagaatctagttttattgggactattacgaaaggtttggtagatacatcaaagaatgctgtcaaggcagtacaagtcaaggctcgacatgctgtatcacagaacaaacgaagatatcaggaaggaggatttgatttggatttgacgtacataacagagaacatcattgcaatggggtttcctgctggtgatatgagttctggcttttttggatatgttgaggtgagtcaataagcatgcttttaatcgttccccctggatttgtttcaagttaatatgattaatattcgttcaaaacatcgttgtagggtttctaccgtaaccaaatggaagaagttattaactttcttgaaactcaacacaaggtactactacttatttgttagtgaaacaaattaatcccttatctttggccatgtgacgcacttatgctttattgttgttgatctagctatttctcccttttgtatcacttggaatatatttttaacataaagactgggtcaccttatgttataagttcttgatgatatatctgtattcataagctgctctgcataatgacatattgccgaatagaagattctactcaaattaaagatattagtctgtggatacttatattgtgtttctagaattttgtcatattagttggatttcaatgatataagaaatttttcattggcattttgatattcatatctcaataatagctaatgtgtctaattattttcaaacgtgttcaatctcgtcttaccatctttctttttgagattaacttatatatgatgtagtttgcagtttgttacagccttatatttttaggttctgctcttctcttgtactgtttttataattgctttgttcttttttgtagggaaaatacaaggtttacaatctttgttcagagagattgtatgatgtatcattatttgaagggaaggtatgttatcccttattcttcttttttcctcttttccttgcatctggcgaacacatggcttccttaagaaaaaatggcttagtcaaaattcagaaaatttgctccgtagatcttccactggcttagagaaaattcagaaaaaatggcttagtcaaaattcaagtttctttagctctggagtacttattaaacagtatccaccaaaaagattgtttacattgttgcatatgtacaaagttgaatcttgtgataatttgctcattttcttacctgaatcgttggacatgatcatataaaaaccggctgccatgaagtggcttaattctctgttgcagataatgtagccacttcttctgtacggcatcatttctttttctaggttgataactattatgttcaaataatgggggcacagttgtttactatttaccctcagtcttctgtccgttttaatgtccctataaatcttattttgtgctgatcatcttgcatccaggtggccagtttcccatttgatgatcataattgcccgccaatccatttggtcacctcattctgccaaagtgcatattcatggttaaaggaggacattgagaacgttgtggttgttcactgtaaggctggcatggcaaggacagggcttatgatatgcagtcttctgttgtatctgaaggtaagaaattccttttaacgttgtatgaaacaatctgtcactgggaaccaatcatgtttcattttcttttatagttctttcccactgccgaagagtgtatggacttctacaaccagaaacgatgtgtggatggaaaaggacttgtgctacccagccaaattgtatgtctagttttgtgattttaagccgctcatgtaaacattctttgctcttctgctaactattgagtctgtttgctcattattgtgtagagatatgtgaaatactttgaaagaattttgacctacttcaacggtgaaaaccaaccaggccgtaggtaagtatcttattcatacaccttaatatagcatacaattgtttattgacatcaaacacttttttttgttaggtgtatgcttaggggattccggctccataggtgtccctattggattaggccatccatcactatttcagatcacaatggtgagttggtcgatccattgcttcatgacaacatataaagccagtattttgcagagctaacatctggttgtaaattctatgcaggtgttctctttaccacgaaaaagcatcctcggaccaaggatctctcggtacgccattgttattactttattgttatcaagtattttgttgaagcctttgtgaattttcatgatttttcagcctgaagacttttggttcagtgccccaaagaaaggggttatggtctttgccttacctggagagccaggtctaacagaattggctggggacttcaaaatccaatttcatgaccggcaaggagatttctactggttaggaagctaatacctcgtcatccaaaatacattaccaaaatcgcttttattttttgcttctctcactaatattttttgtatgctctctcagctggttaaacacgacaatgatggaaaatagagtgatcctaaaaaccagtgagcttgatgggtttgacaaggtaatatagctgaatccttgactttgtgtgtgaagtctgaggtggggctctttctccatccgtcctcatgtttgaaatgatacatatttgtgtttggcctttgttccactgcagaggaagctaccatcgcctggatttatggttgaagttgttctagctgatataaatgcaacaatccctacgaaccctagttctgaaacagcatccaaaacaccggaagaaacttcagcagctaattcgtcccctgtagacggctctgcatcggttccaggacccgataaagaaacagagaatcctgataaggacgatgtgttctctgataacgaaggagactcaactggcccgaccaaaaccacatcatcggcttcttctcaaaccccagaagccaaaaagagcgcagatgaaaccgctgttctgactaaagcgacagagaaagtgtctatttctggaaacaaaggatcatcacagccggtgcaaggagtaactgtgagcaagggtgaagcaacagaaaaaccctctggggctggggtcaatgcttcttcaagctcagagagtgagttcaaggttatggcggctgatgcatctgtgttctcatttggagatgaagacgactttgaaagcgattgaagaaagataatcaaaagcaggaaggatgtgtacataaaaacagggaatggtaaatcaatcagatgatggaatccatttattgtgttgtggtttcgtgttgtgatgttgaattctacggtc

SEQ ID NO: 125 - DNA, 1404 bp, Arabidopsis thaliana
atggaagaagagcttgccatgcttagacagctcatcggtcagcttcaagagctcttgcacaacggctctcctcctcctccttcttcttcttcatctctgtcgtcttcttctccgtcatttttggttctccaccatcctcagtatcagaacggatggtgtttgccctgtattgaggatacttctgctgatgattgttgtgatattgtaatggctggtggaaagaggcctgggatcttcaagatgttagaaactgtcaagcctcccgtcaaacgaactcgaaaagaacggactcaagggaaatcatgtacggaagtagatgagataagtgggaacatggatcaagaaatatggcaggaattccctcaagatctctttgaagacgttgtttccagactaccaatggctacttttttccagttccgtgcagtttgccgtaaatggaatgctcttattgattcagatagcttctccagatgcttcactgagcttcctcagaccatcccatggttctacaccataacccacgagaatgtcaactcaggacaagtgtacgacccttctttgaagaaatggcaccatccgattatcccagcactacccaagaagagtattgttttgccaatggcttctgcaggaggtctagtgtgcttcctcgacattggtcataggaacttctacgtgagcaacccgcttaccaagtctttcagggagttgcctgctaggtcgttcaaggtctggtctcgtgttgcggtaggaatgactctgaatggaaactccaccagtcatgggtataaggtcttgtgggttggatgtgaaggagagtacgaagtctatgattccctgagtaatgtgtggaccaaacgagggaccatcccgtccaacataaagctcccggtgttgctcaactttaagtcacagccagtggctatccacagcacactttacttcatgttaacagatcccgaagggatattgtcctatgacatggtctctgggaaatggaaacagttcattatacctggcccaccagacctgagcgatcacacgctggctgcgtgcggagagcggttgatgctggtgggtctactgactaaaaacgctgccacttgcgtttgcatatgggagctgcagaagatgacactgttgtggaaggaggttgacagaatgccaaacatatggtgcttggagttttacggaaagcacattaggatgaattgtctgggcaacaaaggttgtctgatattattgtccttgaggtccagacagatgaaccgtctgataacctacaatgctgtgactagggaatggaccaaggtccctggctgcaccgttcctcgtgggaggaaaagactttggatcgcttgcggaacagcgtttcatccctcccctacagctagggcttga

SEQ ID NO: 126 - DNA, 2048 bp, Arabidopsis thaliana
atgttacgaggcccatgggcccatgtaattaaaatagtgtaatttgaaattactgatgtgttctcgggaagatcaatatataattagaaagaaggctctgcgccgacggcgtagaagacgatgcgtctcttgtcgtcgccgataaatcgaggcttcttcgactatgttgaactctatccatcgctcgtttcatcttacttcccgccaccagatcgtccttcggctgtgctctccgtcggcgagtaggacgataatgagttcttctcctcactctccgatcccaaagacgcatgtgagtgatcgttttcgcattctctagactattatctttcaacctagtttcgctgattttgaaccatttttactatgccgctgatcgcatgaatttgattggaaaaaaatgctctcatgctttcatagtttatattcaatttccagtggcataccatatcaagtactgttgtttagagattatgaactctccattggctcccagtgattttcctatgatcaaagcataatcgtggcggtatctaaaggacacgttatgttaattctgttaagcagactgcatcgcttgactcacttaatgattatgaagagcaatttccaccacttactggtggctctaagacgaagaagttttatcttggttctaccaatccttctactccatgtcaaagttcacagcttcaaaactggacaagcggtaaggatgctttgtctttgcagaggaatttgggatgtaagaataggaggaggagacgggcttcacggtttttacatgaagaatccaatgggacaacttttgaggttggcgctggtattggctctccaacaagtatggttcattttgattctaccaacccttcttcttctagtaaaagttcacaatctcaaaatttgaaaatccgcaaggttaggaatcacaggaattctggattcaagagtagggatcaaagtcctcagaggataaaggatcctccgcctttcgacatatgttcttcagtcctcgaaagaaatgatacaagtataaaagattggattttggcggatgaaacaaacagagaaactgttgaagttagtaataaacacaaagttataaggcctggaatggtgcttcttaaagacttccttacgcctgatatacaggtaaaaaactgtgaaaatgatcacataatccacatatttctctagtaaagtaaagagttgtacatgcttataggttgacattgtgaaaacatgccgagaacttggtgttaagcccacaggattttaccaaccggggtatagtgttggttcaaagcttcatctgcaaatgatgtgccttgggcgaaactgggatcctcagactaaatacaggaaaaacactgacattgatagtaaagcaccagagatccctgtcacatttaatgtcttggtagaaaaggcgatccgagaggcacatgctctcatagatagagaatcaggaacagaagatgcggagaggatacttccagtgatgtcaccagacatttgcatagtcaatttctactcagaaactggaagacttggtctccatcaggtgttgtgcagtttgactttaaacctctttgaagggttctcttgacactaataatgcgttgttttgtattggcgtataactatggcaggaccgtgacgaaagcgaagagagtatagcaagagggttgccgatagtgtccttctccataggtgattctgcagagttcttgtacggagagaagagagacgtagaagaagctcaaggagtgatattagaatcaggagatgtgttaatattcgggggagaatcgcgaatgatcttccatggcgtcaagtcaatcataccaaactcagctcccatgtctctactcaacgagtccaagctccgaacaggacgtctcaatcttacttttaggcatttctaatcatctttcaattttatcaaatatataaagaattattgaaaaaataagtaaaccctaaatttgaagaatttctctttattaattttaaaaatacataaaaatccaaaatctcaaaataaa

SEQ ID NO: 127 - DNA, 1197 bp, Arabidopsis thaliana
atggagattgaagaagcgagtcgtgaaagtggacatgttgtgtgcggatcatggattcgtcgcccgaagaaagtaaactgggttcttatcgctaaagcttccaaacgccgtggctcatctgtttcttctcctgctctcctcaacatcttctcttttgaccccattactgcttctctttcctcctctcctttggcaacacacacgcttaaggatagtgatggtgatcctgtggctgtttcagtgcaccctggtggggattactttgtttgctcaacctccaaaggtggttgcaagttatttgagcttgtcggaggagcaacaggtattacgatcttagccaaagaactccttcctctccaaaatgctggactacaaaagtgtatggccttcagctttgatgggtctaaattagctgttgggggagtggatggatgtcttagaattatggagtggccaaacctaagtgtaattttggatgagccaaaggcacacaaatccatccgggacatggattttagtcttgactcagagttcttagctacaacatcaactgatggatcagctagaatatggaaagcagaagatggttttcctttgtctactttggaacgtagtggggatgaaaatattgaactgtgccgtttctctaaagacggaacaaaaccttttttgttttgtgctgctcaaagaggtgatacgcctatggtcaatgtttatgacattagtacatggaagaagcttgggttcaagaagctgtcaaggaagactgcatcgacaatggcagtgagcttggacgggaaatatattgctttgggtgggaaagatggagatgtatctgttgctgaagttaagacaatggaaatctaccactacagtaagaggctgcatcttggtcaatccattgcttcacttgagttctgccccagtgaaagggttatgctgacaacttctagcgaatggggagagatggtgaccaaactcactgtaccaaaggagtggaaagagtggcagatatatgcactgctgttttgcttgttcatggcatcagtgatagctgcatacgtattcttcgagaactcagattcgttttggaagttaccaatgggaaaagatcaaaaaagaccaaagattagtctatttggaggttcctcctccacgccttctgaggatcatagtaggtggaacttggacctatag

SEQ ID NO: 128 - DNA, 1299 bp, Arabidopsis thaliana
atggcggagactgtacattctccgatcgttacttacgcatcgatgttatcgcttctcgccttctgtccacctttcgtcattctcctatggtacacaatggttcatcaggatggttctgttactcagacctttggcttcttttgggagaatggagttcaaggacttatcaacatatggccaagacccactttgattgcttggaaaattatattttgctatggagcatttgaagctattcttcagctgcttctgcctggtaaaagagttgagggtccaatatctccagccggaaaccgaccagtttacaaggccaatggtctggctgcttactttgtgacactagcaacctatcttggtctttggtggtttggaatcttcaaccctgcaattgtctatgatcacttgggtgaaatattttcggcactaatattcggaagcttcatattttgtgttttgttgtacataaaaggccatgttgcaccttcatcaagtgactctggttcatgtggtaacctaataattgacttctattggggcatggagttgtaccctcgaattggtaagagctttgacatcaaggtgtttactaattgcagattcggaatgatgtcttgggcagttcttgcagtcacgtactgcataaaacagtatgaaataaatggcaaagtatctgattcaatgctggtgaacaccatcctgatgctggtgtatgtcacaaaattcttctggtgggaagctggttattggaacaccatggacattgcacatgaccgagctggattctatatatgctggggttgtctagtgtgggtgccttctgtctacacttctccaggcatgtaccttgtgaaccaccccgtcgaactcggaactcagttggcaatatacattctcgttgcaggaattctgtgcatttacataaactatgactgtgatagacaaaggcaagagttcaggaggacaaacgggaaatgtttggtttggggaagggccccgtcaaagattgtggcgtcgtatactacaacatctggtgaaactaaaactagtcttctcttaacgtctggatggtggggattggctcgtcatttccattatgttcctgagatcttaagtgctttcttctggaccgtaccggctctcttcgataacttcttggcatacttctacgtcatatttctcacccttcttctctttgatcgagccaagagagacgatgaccgatgccgatcaaagtatgggaaatattggaagctgtattgtgagaaagtcaaatacaggatcattccgggaatttattga

SEQ ID NO: 129 - DNA, 1705 bp, Arabidopsis thaliana
acatcgatgctgacactttcattttcttaatcattctttaaggctctggtagctttggcttttgatctaaaagctgagagtcaatagagagctttgtgctgagcatagcagagaagagttatggggaaaggagggatgtctcaaggagaaggctcaaaggttgaagaagaaaacatggctgcttggttggttggtatcaataccctcaagatccaaccttttcttcttccttccgttggtaagacaaagatttgatttgattggatatttggattgtcctgtgaccctttggttcggaaccttggaaactgatagatttatgttcattcaaaggtcctcatgatgtgagagttaggatgaaagctgttggtatttgtggaagtgatgttcattaccttaaggtacttatgatataatcagagagatatttggttttttctttgatttggtatggctcttgacattggtttttgatgggtgtgaatgttgcaaaacaaagaccatgagatgtgcggattttgtggtgaaagagccgatggtgattggacatgaatgtgctgggatcattgaagaagtaggtgaagaagtgaaacatttagtggttggtgaccgtgtagctcttgaacctgggattagttgttggagatgcaatctctgcagggaaggacgatacaacctttgtccagaaatgaagttctttgcaactccaccggttcatggctctttagctaaccaagtggtacaccctgcggacctatgcttcaaattgcctgagaatgtgagtttggaggaaggagcaatgtgtgaaccacttagtgttggtgtccatgcttgtcgccgagctgaggttggtcctgaaacaaacgttttggtaatgggagctggacctattggccttgttacaatgttggctgctcgggctttcagtgtgcctagaattgttattgtggatgttgatgagaaccgtttagccgtagcaaaacagctcggcgcagatgagattgtacaagtgacaacaaacttagaggttctttacagtttctttatctttctgaaacattagtgatcggattgtataaagataagaacttttcccatttttcttccacaggatgttggttctgaggttgaacagattcagaaagctatggggtcaaacatcgatgtaacattcgactgtgcgggttttaacaaaaccatgtcgacagcattagcagccactcgttgtggcggtaaagtctgtcttgtcggaatgggtcacggtataatgactgtccctctcactcctgcagctgcaaggtaacctcctttgaccatcatagtaagaaactttctaacttttgaaaagtacaatcacataataaccaagtaaatgtgttggtttggagacagggaggtagatgtggtgggtgtgttcaggtacaagaacacatggccattgtgtcttgagttcctgacaagtggtaagattgatgtaaagccactcataacccacagattcggtttctctcaaaaggaagtggaagatgcctttgaaaccagtgctcgtgggagcaatgccatcaaagttatgttcaatctctgaaaacaatctttgcttttctaagaacatattaaggtttcataataaggaagcttctgtaactttgttatccattgtatatcaactctgaatctctcttgaataagataatcctttatgata

SEQ ID NO: 130 - DNA, 1206 bp, Glycine max
ttaattaatgtctcagctactcatcgcattctctgcatttatcctccgatcacattttctctctcttcgttcgactatagctgacagggatgtcggagaaagctcttagggatctcaatacaattcttggaactgaaaggaagaatgaggactccagtaaggcatgtttatccaagccttctgttgacaatgctgttgaaaatattgaagaatggcaaaagaaaaataatagcccctccttggtttctccagctgttaatggaaatctggctgtgactgctaattctggtgcggaggttgtaaatccagaagtagaatatattgaatctgagaacttgaatgatgtagacgatattgatacttgtctcaagaccctattagctggacttgactcaaaggattgggtcctggtttgtgacacactgaataacgtacgtcgattgtctatatttcataaggaagcaatgcttgatatgctgggggatgtgatcacatctattgcaaagtcactgaaaagtcctagaagtgctgtttgcaaaactgccattatgacatctgcagacattttcagtgcatataatgatcttataatagattcattggaccctctgctagtacaacttcttctcaagtcttcacaagacaaacgctttgtatgtgaggcagctgaaaaagccttgatatcaatgactatttggatttcccctatttctttattgccaaaattgcaaccataccttaagaacaagaatcctcgtatccgtgcaaaggcatcaatgtgcttttctcggagtgttcctcagctgggtgcagaaggcataaagacatatgggattgacaaattgatccaagtagctgcatctcagttgagtgaccagctcccagagtccagggaagcggcccgaactctacttctcgagcttcaaaatgtgtatgagaaatctcatgatctcatcaagccagctactcctactgtcaataatgagcatactgtgaatgaggagaatccagaggtgagttcttgggaaagcttctgtcagtcaaaactttctcctcttagtgctcaagctgtacttcgtgtaaccaccagtatcgctcgggagggtcttgtttcatgacacgcacattaaacctcactttgcggctttcatcatttccttgtttgcttatcattttcttctgtaaatacagtgcgacaatttaaat

SEQ ID NO: 131 - DNA, 2375 bp, Arabidopsis thaliana
atgtcgacagtttcttcagatcctgctcatgcgaagaaatcgagaaacagtagaaaagcgttaaagcaaaagaatgagatcgtcgagtcatcaccggtctcagacaaggggaaagaaacgaagtcgtttgagaaagatctgatggagatgcaagcgatgttggagaagatgaagatcgagaaggagaaaactgaggatttgttgaaggagaaggacgagatcttgaggaagaaggaagttgaacaggaaaaacttaagacggagctgaagaaactgcagaagatgaaggaattcaagcctaacatggtacgattttctagatctggctctgattcttcttcacttgtatttcgcagattaggttttttgataaaggattcgagatgattttaatctggttaatcttatgcgttatggagcttgttgatggttgattcgcttattgatggaccttgttgctaagttcatgttatgtgaaattgattcatgatgattttggggatggatatattcagaaaatctgattaatcttatgcgtttaggagcttgttgattgttgattcgcttattgatgaagattgaagctagttcaggttctgtgaaattgattaaagatgattgatggaagtttcgcttagatttgagactaatcatcattcacagatgttagattgatttctatgcttctgtttaagatagagatgttaaatttggtgctaaatcgatagattacttcatgtttcgttgatgtatcatttctatgttgtgataatgtttattttgtgattgattttgggagtattgttgttgcttccacagacttttgcttttagtcaatctttggcacaaactgaagaagaaaagaagggaaagaagaagaagaaggattgtgctgaaacaaagagaccatcaacaccatatattttgtggtgtaaggataattggaacgaagtgaagaaacagaatcctgaagctgatttcaaggagacttcgaacattctgggtgctaagtggaaggggattagtgctgaagagaagaagccttatgaggagaagtatcaggcggataaggaagcttatcttcaggttattacaaaggagaagcgtgagagggaagcaatgaagcttcttgatgatgagcagaagcagaaaactgcaatggaattgcttgatcagtatcttcactttgttcaggaagctgaacatgacaacaagaaaaaggccaagtaatgatactgattcaagtatttaaatcgagaactgttttgttttgaatgataagttataaaactgaatgaatttcttgttttgtaggaagataaaggatcccctgaagcctaaacaaccaatatctgcttacctgatctatgcaaacgagaggagagctgctttaaaaggagaaaacaaaagcgttattgaggtaagtaaagaattaggagttgtcttttctcaatgtcatttgaaactcttgaagctaaggtgtgtgttgatgatgaatgatgattataggtcgctaagatggctggagaagagtggaagaacttgtcggaagaaaaaaaggctccttatgatcaggtctagttcatccatactcatcatagacattgatgtgtcaagaagtgaagtttaataaagggatgttcttaacgtatgtgtaacaacagatggcgaaaaagaacaaggagatatatctgcaagaaatggaaggatataaaagaacaaaggaagaagaagcaatgagccagaagaaagaagaagaagaattcatgaaactccataaacaagaagctctccaacttctcaagaagaaggagaaaaccgacaatatcataaaggttaatatactaaactcacagtgcattgagctattttgggatataagtcagtaactaacacaacacatgttttctttcttgcagaagacgaaagagacggcgaagaacaagaaaaagaacgagaatgttgatcctaacaaacccaaaaagcctacttcttcatactttctcttctggtatatactttaaaaccctgaatccacaaaacaatcagatgctaaactggttttataatctcaaatctttttacagcaaagacgcaagaaagagtgtgttagaagaacatcctgggatcaacaactcaactgttactgctcacatttcattgaaatggatggtatattataaatcatgaaactcgaatccaacgagtaagattttatcactgttagttgtgaaattgagttggttttggttacaattttgttgtaggaacttggtgaagaggagaaacaagtttacaatagcaaagctgctgagttaatggaagcttacaagaaagaagtggaagagtacaataagaccaagacttcgtcgtag

SEQ ID NO: 132 - DNA, 1107 bp, Arabidopsis thaliana
atggatcccataaaacacatctctttaccagttcttgtcttgtttctactattatccgtgtcggcgggtcaacccggaaccccggaccagagacatgacccgtatgcttacagcggcagtctaagtccagccatggctgttgtcgttgtagttgtcatcgcagctctcttcttcatgggcttcttcaccgtctatatacgtcactgtactggcgcagtagacggtagcgttactcctgcaggaggagctaggaggagagtgacgaacgcaacggttgcgcgtgggttagacgcggagacgatcgagacgtttccgacttttgtttactcagaagtgaagacacagaagattggtaaaggagcgttggagtgtgcgatttgtttgaatgagtttgaagacgatgaaacgctgcgtctgttgcctaaatgtgatcacgtgtttcatcctcattgtatcggcgcgtggcttcaaggtcacgtgacttgtccggtttgtcggactaatcttgctgaacagacgcctgaaccggaagtggtggtggaaaccgatcttgaggcgcagcagcaatcggcggttcctgtaccggtggtggaacttccacgtgttaaattcccgaggtcgcatacgacagggcattcggtggttttaccgggagagagtaccgaccggtttacgcttagagtaccggaagaattaaggaagaagataatggcgaattggaaattgaaccggtcgaatagtgtttttgttttaccgagaggaggaagctcgaggagtggtaaacaggttgaccggtcgagggctaaatcggaccggtggttgttccgtaaaactccgtcgtttctatggaggaaccgggatgatggttcgattaggctaggtggtaccggtagtgttagaggaaattcagtaacaagtccgagcggtgactcggtacgagcagaccggtgggcttttcttagaaacccatcgtttctctggaggaatacgacgccggttccttcgccgagagttgaagtcaataataaggacggtgaaggaacatcgtcagttcaacatatcggtacagttggttcaactagcggttcccttaggctaccggtttag

SEQ ID NO: 133 - DNA, 1350 bp, Arabidopsis thaliana
atgttggatcttaacctcaacgctgattctcccgagtcgactcagtacggtggtgactcatacttagatcggcagacatcagacaactccgccgggaatcgagtggaagagtccggtacatcgacgtcgtcagttatcaatgccgatggagacgaagactcttgctctactcgagctttcactctcagtttcgatattttaaaagtcggaagtagtagcggcggagacgaaagccccgccgcttcagcttccgttactaaagagttttttccggtgagtggagactgtggacatctacgagatgttgaaggatcatcaagctctagaaactggatagatctttcttttgaccgtattggtgacggagaaacgaaattggtaactccggttccgactccggctccggttccggctcaggttaaaaagagtcggagaggaccaaggtctagaagttcacagtatagaggagttactttttatagaagaactggtcgatgggagtcacatatttgggattgtgggaaacaagtttatttaggtggtttcgacactgctcatgctgcagctagagcttatgatcgagctgctattaaatttagaggtgttgatgctgatatcaactttactcttggtgattatgaggaagatatgaaacaggtacaaaacttgagtaaggaagagtttgtgcatatactgcgtagacagagcacggggttttcgcgggggagttcgaagtatcgaggggttacgttacacaaatgtggtagatgggaagctaggatggggcagtttcttggtaaaaaggcttatgacaaggctgcaatcaacactaatggtagagaagcagtcacgaacttcgagatgagttcataccaaaatgagattaactctgagagcaataactctgagattgacctcaacttgggaatctctttatcgaccggtaatgcgccaaagcaaaatgggaggctctttcacttcccttctaatacttatgaaactcagcgtggagttagcttgaggatagataacgaatacatgggaaagccggtgaatacacctcttccttatggatcctcggatcatcgcctttactggaacggagcatgcccgagttataataatcccgccgagggaagagcaacagaaaagagaagtgaagctgaagggatgatgagtaactggggatggcagagaccggggcaaacaagcgccgtgagaccgcagccaccgggaccacaaccaccaccattgttctcagttgcagcagcatcatcaggattctcacatttccggccacaacctcccaatgacaatgcaacacgtggttacttttatccacacccttaa

SEQ ID NO: 134 - DNA, 1559 bp, Arabidopsis thaliana
aactctttgtttcttgtttgttgattaacccttaattaaatgttactaatcatatcattcaccatcgtctccttcttcttcatcataatattctcactctttcacttactcttccttcaaaaactacgttactgcaactgcgagatctgtcatgcttatctcacttcaagctggaaaaaagacttcatcaatctcagtgattggtacactcatcttctccggcggtctccgacgtcaacgatcaaagtacacgtcttaaacagcgttatcacagcgaatccatcaaacgttgaacatatcctcaaaaccaatttccacaattacccaaaaggcaaacaattctctgttatcctcggtgatcttttaggccgtggaatcttcaattccgatggtgacacgtggcgtttccagagaaaactcgcgagtttggaacttggaagtgtttctgtaagagttttcgctcatgagattgttaagaccgagatcgagacacgtcttcttccgatattgacttcgttttccgacaatcctggttctgttttggatctacaagatgtgtttagaagattctcgtttgatacgattagtaaattgtcgtttgggtttgacccagattgtctccggttaccttttccgatatcggaattcgccgtcgctttcgatacggcgtcgttgttatcggcgaaacgagctttagctccgtttcctctgttatggaaaaccaaaaggcttttaagaattggttctgagaaaaagcttcaagaatctatcaatgtgataaaccggttagctggtgatttaatcaagcaacggaggttaaccggtttgatgggtaaaaatgatttgatttctagattcatggcggttgtggcggaggacgatgatgagtatctccgagacatcgttgtgagttttctattggctggtcgggatacggtagctgctggtttaaccggatttttctggttattgacccgtcatccggaagtggagaaccggatccgggaagaactggaccgggttatggggaccggttttgactcagtcactgctcgttgcgatgaaatgagagagatggattatttgcatgcgtcgctgtacgagagcatgagattgtttccgccggttcaattcgattccaaattcgctttaaacgatgacgttttgtctgatggtacatttgtgaatagtgggactagagtcacgtaccatgcttatgcaatgggtcggatggaccggatctggggcccggattacgaagagtttaaaccagagaggtggttggataacgaaggtaagttccggcccgagaatccggttaagtacccggttttccaggccggagctagggtttgtatcgggaaagagatggctatcatggagatgaaatccatagctgtggcaatcattaggaggttcgaaacacgggtcgcaagtcccgaaacaaccgagacactccggtttgcgcctggtttaactgcgacggttaacggtggattgccggttatgatccaagaaaggagttagggcgcgccaaaaattggagctctgcagagctt

SEQ ID NO: 135 - DNA, 1746 bp, Arabidopsis thaliana
atggatgacgaatatatgagcctcgaggaggaggaagataattgttacccctctgaatttgatgatcatgatcagatgtgttccaacgcggaagagtccgatttgcaacactcgagagaaccaacgagccaggttatcacgaaggaagcacttgtagcagcacagaaggaagttttggtttaaggttatggaatttttatcggttacggagaaccaagcaaggactcttcttattcagtatcaatggaacgttgataagttgttttctgtgtatactgatcaaggcaaagatgttttgttctctcgtgctggtcttactgtttttgacccttctttagttaatacgaagaggaagaagaaggagaagacaaggaagaggaagaaggaggagaagacgaggaagaggaagaaggaggagaagacgaggaagcggaagaaggaggagaagacgaggaagcggaagaaggagttgaagacgaggaagaggaagaagacgaaaaagacgatgaagtgtgatatctgcatggaagaggatttatcaaaatatgccatgacaagaatggagtgtggtcataggttttgcaatgattgttggaaggaacattttaccgtgaggattaatgaaggtgagggcaaaaggattagatgtatggcctataaatgcaacacaatttgcgacgaagaaggcaactagttagcacggagttagctgagaagtttgatcgtttccttattgaatcttatgtggaagataacaatatggtgaagtggtgtccaagcacaccgcattgcgggaatgcgatacgaaatatcaaagatgatggcgatgttgatgaggtggaatgttcatgtggacttcagttctgtttcagttgtttaagtgagtctcactctccttgctcttgtttgatgtggaagctatggaaaaagaaatgtgaagacgagtctgagacggttaattggatgaccgttaacacgaagctgtgtcccaaatgtagcaaacctattcaaaagagagatggttgcaatcacatgacttgtaagtgtgggcagcatttttgctggctgtgtggtcaagctactggaagagatcattcttattcgagtattgccggtcatagttgtggtcggtacaaagaagaaaaagtgaggcaattggagagagcccaaagggatttagacaggtatacacattaccattaccgctacaaagcacatatcgattcattaaagctagaggacaaacttaagaagagtatcctgaagaaggcagtgttaaattctgaaaccaaggatcaaaaggtgtttaaagaatacagttggattatagatgcagtcaaccggttattcagatcaagaagaattctttcgtattcttatcctttcgtgttctacatgtttggcaaagagttgttcaaagatgatatgagcgatgaagagagaaatataaagaagaatctgtttgaagatcagcagcaacaacttgaaggtaatgttgagagactttccaagatattagaagagccttttgatgagtatgatcatgaaaaagttgtggagatgatgagacacctcaccaatttgactgctgtggttgataacctctgcaaggaaatgtatgagtgcattgagaatgagttattaggtccactcatatctggaatccacaacattgcaccttacagatcaaagggaatagaacaagctgctgagttttctgcttcttccgcttgtggttcaagctga

SEQ ID NO: 136 - DNA, 534 bp, Arabidopsis thaliana
atggagaatatgggaactagagtgatagagccattgataatggggagagtggtaggagatgttcttgatttcttcactccaacaactaagatgaatgttagttataacaagaagcaagtctccaatggccatgagctctttccttcttctgtttcctccaagcctagggttgagatccatggtggtgatctcagatccttcttcactttggtgatgatagacccagatgttccaggtcctagtgacccctttctaaaagaacacctgcactggatcgttacaaacattcccggcacaacagatgctacgtttggcaaagaggtggtgagctatgaattgccaaggccaagcatagggatacataggtttgtgtttgttctgttcaggcagaagcaaagacgtgttatctttcctaatatcccttcgagagatcacttcaacactcgtaaatttgcggtcgagtatgatcttggtctccctgtcgcggccgtcttctttaacgcacaaagagaaaccgctgcacgcaaacgctag

SEQ ID NO: 137 - DNA, 687 bp, Arabidopsis thaliana
atgagaataaggagaagagatgaaaaagagaatcaagaatacaagaaaggtttatggacagttgaagaagacaacatccttatggactatgttcttaatcatggcactggccaatggaaccgcatcgtcagaaaaactgggctaaagagatgtgggaaaagttgtagactgagatggatgaattatttgagccctaatgtgaacaaaggcaatttcactgaacaagaagaagacctcattattcgtctccacaagctcctcggcaatagatggtctttgatagctaaaagagtaccgggaagaacagataaccaagtcaagaactactggaacactcatctcagcaaaaaactcgtcggagattactcctccgccgtcaaaaccaccggagaagacgacgactctccaccgtcattgttcatcactgccgccacaccttcttcttgtcatcatcaacaagaaaatatctacgagaatatagccaagagctttaacggcgtcgtatcagcttcgtacgaggataaaccaaaacaagaactggctcaaaaagatgtcctaatggcaactactaatgatccaagtcactattatggcaataacgctttatgggttcatgacgacgattttgagcttagttcactcgtaatgatgaattttgcttctggtgatgttgagtactgcctttag

SEQ ID NO: 138 - DNA, 883 bp, Arabidopsis thaliana
atgtgtgcattagtacctccattgtttccaaactttgggtggccatcaacgggagagtacgacagctactacctcgccggagatatcctcaacaacggcgggtttcttgattttccggtaccggaggagacttatggagctgttacagcggtgactcaacatcagaatagctttggtgtttctgtttcgtcggagggaaatgaaatagacaacaatccggtggtcgtcaagaagcttaatcacaatgctagtgagcgtgaccgtcgcaggaaaattaactctttgttctcatctctccgttcatgtcttcctgcctctggccaatcggtaagaagctactccgactcattgattagacccgttatagtttatgcatctatacaatttagaagaagaatactgcgttaaaccttttttctttcctttcttgcagaagaagctaagcattcctgcgacggtttctcgaagcttgaagtacataccagagctgcaagagcaagtgaagaagctaataaaaaagaaggaagagctcttggtgcaaatttcaggtcaaagaaacactgaatgttacgttaagcagccaccaaaggccgtcgcgaattatatctcgaccgtttctgcgactaggcttggtgacaacgaagtgatggtccaaatctcatcgtccaagattcataacttttcgatatctaatgttttaagtgggttagaagaagataggtttgttcttgtggacatgtcatcttcaaggtctcaaggagaaaggcttttctacactttgcatttacaagtggagaagattgaaaattacaagctgaattgcgaagagttaagtcagaggatgttgtacttgtatgaggaatgtggaaactcatatatatga

SEQ ID NO: 139 - DNA, 396 bp, Arabidopsis thaliana
atggctttttccaaatctctagtgtttgttcttctcgctgctcttttgatttcttccgcagtggctcaatctccggctccagctccatctaacgtcggaggtagacggatctcaccggctccttcacctaagaagatgactgctcctgctcctgcacctgaagtttctccttctccttctccggcagccgcattgactccagaatcctctgcttcaccaccatcgccgcctctagctgattctcctaccgctgactccccggctttgtctccatctgcgatctccgattctccgactgaagctcctggtcctgctcagggcggcgccgtttcgaacaaattcgccagtttcggatctgtggcggttatgttaactgctgccgttttggttatctag

SEQ ID NO: 140 - DNA, 1465 bp, Arabidopsis thaliana
atgatgacccaaaaaccacgaactgtgatctgcgtcggagacatccatggaaacatatcaaagctcaataaactctggcttaatcttcaatccgatatccaaaactcagatttcagctcagctctcgtcatcttcctcggcgactactgcgatcgtggaccggagactcgaaaagtcatcgacttcttgatctctttgccggagaaacatcccgatcagacccatgtctttcttgccggaaaccacgactttgcttttgctggcttcttgggtttgttacctcgcccttcagatgggtctgagtttaaggaaacgtggaaagagtactcaaaaagtgaggagagagaaggatggtataaaggtgaagggtttgagaatatgcatctccaaagcaggagatgggcgggaaagattagggttcagttcgattattccgcatatggagtgttgtataatggatcaatatacgatgcggcgtctacttttgaatcttatggcgttcctcatggatcttctggtgacattctccattgattcttctttctggttatagtttatgattagacgtttgtctttgtcggaaactgtaaatataggtcaagtgatcgatcatgtaattggtgatcagtcaaataagtaatgattggatctttggttaaccaaaaatataattgaatctttctcgatttggagttttcatgttctcatctctgtactagtgaaattatgaaattttataactgttttgaatctattggtattggttttgaaacttgtttgttttcttttccttgatagatttgataaaggcagtacctgagagtcacaagaaattcttgaccaatatggtttgggtacataaagaggtaagggcttttctcctaccatgtgacgtttcttaggaacaaatgttgagttgttataaagcaaatactttttgtctaagaaagcataagctaaatttgtaggaaaatgtacatgtagtaatagttatcatattgttgatactattgtaggatgatgtttgtatagaaacagaggaaggccttacgcattgtaagttgattgccgtacatgctggtctagagacaaagaataacgtagaagaacagcttaaactattgagagataaagacacaagcatcccaagaatacaacctctaactggtcggaaaaccgtttgggggatcccacaggtaaaaaaaacattgaaagaaccaaactttgtattaagatcttgctctcttttgaaatctctttgtatgactttgtttgctctggaacatactctgtaggaactggatgataaaaagactattgttgttagcggccaccatgggaaacttcacatcgatggcttgagattgatcatcgatgaaggtggtggatataccgatacacctttggctgcaattgttcttccttctaagaagattatccgcgacaccgataatttttccaatta

SEQ ID NO: 141 - DNA, 1311 bp, Arabidopsis thaliana
atgaagagaagaaggaaggatctgaaacaagcggcggagtcagagcaggaggaatgtcagagcattgcccaggtcgtctctctcggagattccgatcaaattcagccgccacccaacaagaaagaagaagaagatatatgtgaatacttactgcagaattttgatcttgatcatgtgatggaaattcttatgagatttcctttaacctccctgacgaggttcaagtgcgtctctaagcagtggtcatccctcatttctagtcgatatttttgcaaccttttatatactacggtcacacgacaacaaccacgcctatacatgtgtttaaaggatgacggcgggcaccgtgtactgctatctatatcatcaccgtctcgaggcaacacttctttcgtggtggtcgagcaagatttgagcatcccagggatgggaggcttcttcttgaacgttgttcgtggcttgatgtgtttctctcgcagaaaaaaggcgcgtatctataaccccagcaccaaacaactcttgaccttacccgccataaagtccgacattgtagctcaacaaggtcaaacgaagcatcatccccggtattacatcggacacgaccctgttagtgatcaatacaaactagtctgcacggttgcgatatcctcgctattgccacgtttgggtaatctgaagtcagagcactgggtcttcgcactagaagctggaggttcgtggaaaaaggttgttccactggaaaattatcgtcatcatgccccttccacggaaggacggtctaccagtggatcagtagtgcgttatatggcctggcctgataattataattgtgtggttgtgagtttcgacattaggtctgaacagttgactatcatcccagtacctagggagatccaccttgacgaggttgtgcctgcagttacgatgatggcggatcttatagagtatggtgggaagatagcaattttctatcatacaaaccttaaagacgagggttccgcggatttatgggttttggaagacactgggaagagtgaatggtcgaaaaagactctggttctgcagccttgtcaaaggcatttagtcgaagacattgaattgatcgtaaaaggtacaactcaagacggcaaggtgatcttggcaccggtggagatgcattctcgattctacattctgtattacaacttgcaaagcaatgacttgagaaaggttgaaatcaaaggagtaccagactcttggtttgataaagaatgctatttcgacttgaattctatggataagagtgagagcttcatctacttggaaacttga

SEQ ID NO: 142 - DNA, 1860 bp, Arabidopsis thaliana
atgagaggttcttggtacaagagtgtttcctctgtttttggtctcagaccacggatcagagggttgttattcttcattgttggtgttgtggctctagttactattttagcaccattgacatctaattcgtatgattcttcgtcaagttcgacacttgtgccgaacatttatagtaactataggaggataaaggagcaagctgctgttgattatcttgatctgaggtctctttctttaggggctagtttaaaagagtttcctttttgtggtaaagaaagagaaagttatgtgccttgttataacataactgggaatttgcttgctgggcttcaagagggtgaggagttagatcgacattgcgagtttgaaagagagaaggaaagatgtgtagttcgtcctccgagagattataaaataccacttaggtggccacttggtagagatatcatatggagtgggaacgtgaagattaccaaagaccagtttctttcttcaggaactgtgacaacgaggttaatgttgcttgaagagaatcaaataacctttcactcggaggacggcctggtctttgatggggtcaaagactatgctcgtcaaattgctgagatgataggtttaggaagtgatactgaatttgctcaagcgggtgtacggactgtgttagacattggttgcggatttggtagctttggtgctcatttagtgtctttgaagctgatgcctatatgtattgctgagtatgaggcaactgggagccaagttcagttagctctagagagaggccttcctgcaatgattggcaatttcttttcaaaacagcttccttatccagcactgtcttttgatatggtccattgtgctcaatgtggcactacttgggatatcaaagatgcaatgctacttttggaagtggatcgtgttctgaaacccgggggatactttgttttaacttctcccacaaacaaagcacagggaaacttaccagataccaagaaaacgagcatctcaacacgggtgaatgagttatctaagaaaatctgttggagtctaacagctcagcaggatgagacgtttctttggcagaaaacttctgattcaagttgctattcttctcgttcgcaagcttctatacctctttgcaaagatggagatagcgttccgtattaccacccattggttccatgtataagcggaaccacgagtaaacgctggatttctatacagaacaggtctgctgttgcaggaacaacctctgccgggcttgaaattcatggtttaaaaccggaagaattcttcgaggatacacaaatatggagatcagctctgaaaaactattggtccttgcttacacctctaattttctctgaccatccgaagagacccggtgatgaggatcctctcccgcctttcaacatgatacgcaatgtgatggacatgcatgctcgttttgggaatttaaatgccgctttactcgacgaaggaaaatctgcttgggtaatgaacgtcgtcccagtcaatgcacgtaatactcttcctatcatacttgatcgtggtttcgccggtgttctacatgactggtgtgaaccattcccgacatatcctcgaacatatgacatgcttcatgccaatgaacttctcacacatcttagctcagaacgatgcagcctaatggacttgttcttggagatggaccggattcttcgccctgagggatgggttgttctaagcgacaaagtgggagtaatcgagatggctcgagcacttgcagctcgagtgcgttgggaagcaagagtcattgatcttcaagatggtagtgaccaaagacttctcgtctgtcaaaaaccattcatcaaaaaataa

SEQ ID NO: 143 - DNA, 1587 bp, Arabidopsis thaliana
atgaatgagaatcacattcaaagtgatcacatgaacaacaccattcatgtaacaaacaaaaaactcccaaacttcctcttatccgtacgtctcaaatatgttaaacttggttaccattacctaatctcgaatgccgtctacattctcatactccccgtcggcctcctcgccgcaacctcctcctcctttagtctcaccgatctcacactcttatacaaccaccttctcaaattccacttcctctcttccactctcttcgccgctcttcttatctttctaaccaccctctacttcacaactcgtcctcgcagaatctttctcctcgatttcgcttgttacaaacccgactcttctctaatatgcacacgagaaacgttcatggaccggtctcagcgtgtcggtatcttcacagaagacaacctcgctttccaacaaaagatcctcgaacgttccggtcttggacaaaagacttacttcccggaggctctcttacgtgtcccgcctaatccttgtatgtctgaagcaaggaaagaagccgagacggttatgtttggagctatagacgcagtgcttgagaaaaccggagtgaatcctaaggatattgggatacttgtcgtgaattgtagcttgtttaatccgacgccttcgttatcggctatgatcgtgaataaatataagctcagaggaaacgttttgagctataaccttggtggaatgggttgtagtgctggtcttatctccattgatctcgctaaacagcttcttcaggttcaaccaaattcatatgcactagtagtgagcacagagaacataaccctaaactggtatttaggcaacgaccgatcaatgcttctctcaaactgcatcttccgaatgggtggcgccgccgttctcctctctaaccgctcctccgaccgctgccgctccaaataccaactcatccacaccgtccgtacacacaaaggatctgacgacaacgcctttaactgcgtttaccaacgcgaagacaacgacgacaacaaacaaatcggtgtctcactttccaaaaacctaatggctatagctggagaagctctcaagacgaacataaccactctgggaccgctagttctaccaatgtctgaacaacttctctttttcgcaacactagtggcgcgaaaagtctttaatgtgaagaaaataaaaccttatattcctgatttcaagctagctttcgagcacttctgcatccacgcgggaggcagagcagtgctcgatgagattgagaagaatttggatttatctgagtggcatatggaaccttcgaggatgactttgaaccggtttggaaatacttcgagtagctcgctttggtatgagcttgcgtatagtgaggctaaaggaaggattaagagaggagataggacttggcagattgcttttggatccggttttaagtgtaatagtgcggtttggagagctttgagaactatcgatccgtccaaggagaagaagaagaagactaatccttggattgatgagattcatgagtttcccgtgccggttccaaggacatctccggtgacatcttcctcggaatctcgatag

SEQ ID NO: 144 - DNA, 1945 bp, Arabidopsis thaliana
atgaaagcatcgggttcattagatagctggagagaatatttccgacggcgaggagattccgatatattcgggatcatcgatcatgcgatcatggtggctgctactgattgtcctaacaaattcaaatccagaagagacaaaatcgccgagcttttattctcctgtagagtgaatcgttgcgtcggatgcgaccatcttgaattgtctgttcccggagacgacgaggctaaccgtggaaccaccggaaatggtggtggtggtacggcggttgatgaagattatgaggttgctggtggtagtaaagagagcaaagctaatagtagcagaggggataataatcagattgttagcaattatacatttgatgaagctgaggctttgagtgatgagattgaagagttttctgtggtttctaaggaggttgctaggatcaaagagatcttgctcaacaaagaagatgaggtttgattctcaagttcttgaaatttcatcaatgtgaagattttttttttgtgttttctgattggttcttttttgtattctcttgcagccaaactcggtgttactcgattctttaagacatcttaagttgatgtctttgaatgtggatattcttaaggttggttatcttggtggatagtgtatgaagttgttgttgatgatccttgagattcttaaggtttgcggttattctcgcagagtactgagattggaaaggctgttaatggcctcaggaaacattcttctgataagattcgacaactcgctaagactcttatcgcgtatgagtttttgatctttcacaagtttgattgacatttgctatgcttttgcacttttgaatctcacatttgagtttttgatatgtttatgcagagaatggaaggagttggtggatcaatgggtgaataccacaaaggaaatcactggtaattgcgctttctctgtctcgcttttcgatcttttatgactggcttcgtgtcttaccgtttggtttcttgaattagatccatagtctttggttctaattttgtgtttaaaacaggtgctgaaggtacaccagagtctgcaaacccgtctgtccttgatgaagaagaggcgtttccatcgcttccatatgatgttgatatctttacacctgaaccaaacggatttgaaatctcacacttctttgattccttggactttgatggaagtgagttttaaaactatgtcttgtttgtttgagaacatgttcttagctacgtgttgattgattttcttggggatgtttgtttcagatcctcgtaactctgaagaacacaacacaagccgagagcatgaaagaaggccacaaaatatcgccaagagaaaacctgagggaacacaaatgaggatacaagatgctccttttagatctattaagccatcatcagctactgattttgatgggactagaagacctgtaaagcaaagtacagagcaaaggatgaagaacgaaacggtatctgttcacaagtctgaaaaacccatgatccaaaggaaaccggttgttacagaacagaagcggaaagctcctggacctcaacaagaagtgagtgtggagacaaagctcttgtctaatatcctattcttggacgtagaattgatggtgtttttgctcttgtcccttgcagaaacttaaaggtcttgatgcagacgcaaagtttgagtttgcaaagaggaaacttcaagaaagctaccagcatcacgagaatggttcgtttcatttcctttcttttgtttcgagttttttgttacattcttgaaaacaaaagaacttaaaaatgtttgtgatcttgccacagccaagaagcagcgaacgatacaagtacttgagatgatcccaaagcaaggtagtgctcagaaaccgcaactcaagagacctggaatgagcaacaggaattgggctaatgggagaaaatag

SEQ ID NO: 145 - DNA, 609 bp, Arabidopsis thaliana
atggcaaaacaatatctctttgtactcctctcaatctcctatctcttatcactggagctcacggcggccaccgcagcctcacagaccggagcttccaaaaaagccataaacttcatccaatcttcttgcaaaaccaccacataccctgccttatgtgtccactcactctccgtctacgcaaacgacatccaaacaagccctaaacgtttagctgagaccgctatagccgtgacactaagccgagcccaatccacgaagctcttcgtctcgcgtctaacacgtatgaagggtcttaagaagcgcgaggtcgaagccatcaaagattgcgtcgaggagatgaacgataccgttgaccgtttgaccaaatctgttcaagaactgaagttgtgtgggagtgccaaagatcaagaccagtttgcgtaccacatgagtaatgctcagacttggactagtgcggctttgactgacgagaacacttgctccgatgggttctcgggtcgggttatggatgggaggatcaagaactcggttcgggctagaatcatgaacgtgggacatgaaaccagcaacgctttgtccttgattaatgcctttgctaaaacttactaa

SEQ ID NO: 146 - DNA, 1107 bp, Arabidopsis thaliana
atggatcgtcttaagctttatttctccgttttcgttttgtctttctttatcgtctcggtttcgtcgtctgatgtcaacgacggcgatgatctcgtgatccgtcaggtggttggtggagccgagcctcaggttttgacctcagaggatcacttttctctcttcaagcggaagttcgggaaggtctacgcttccaacgaggagcatgactatagattctcggttttcaaagcgaatctcaggcgagcgaggcgtcaccagaagttggatccgtcggcgactcatggtgttacgcagttctcagatctgactcggtctgagttccgtaagaagcacttgggggttagaagtggctttaagcttcctaaagatgccaacaaggctccgattctccctaccgaaaatctccctgaggattttgattggagagatcatggcgccgttactcccgtcaaaaatcagggatcttgcggctcttgctggagtttcagcgccactggagctttggaaggtgctaacttcctcgctaccggcaaactcgtcagcctcagcgaacaacagctcgtcgactgtgatcacgagtgtgatcccgaggaggcagattcctgcgactctggttgcaatggtgggctaatgaacagcgcttttgaatacaccctcaaaaccggagggctcatgaaagaagaagactatccttacaccggaaaggacggcaagacctgcaagctagacaagtccaagatcgttgcctctgtctccaacttcagtgttatctccattgatgaagaacagattgctgcaaaccttgtcaagaacggacctcttgctgtagccatcaacgctggctatatgcagacttacattggaggagtctcatgcccttacatatgcaccaggaggctcaaccacggtgtcttattggttggctatggagcggcaggttacgctccggctaggttcaaggagaagccttactggatcatcaagaactcgtggggagagacttggggtgaaaatggtttctacaaaatctgcaaaggccgtaacatttgtggtgttgacagtatggtctccactgttgcagccaccgtctcaaccaccgcccattaa

SEQ ID NO: 147 - DNA, 1287 bp, Arabidopsis thaliana
atgtcaacaaagggagaacatcatacagttccactttctgtgttgcttaaacgtgaatcagctaatgaaaagatagacaatcctgaacttatacacggccagcacaaccaaagcaagaaaggagaggattttactcttgttaaaacagagtgtcaacgtgttatgggcgatggtgttaccaccttctccgtttttgggctttttgatggacacaatggttctgcagcagctatctacactaaagagaaccttttgaataatgtattagctgcaataccttctgatcttaacagagatgagtgggttgctgcacttcctagggctttggttgcaggatttgtgaaaactgataaagatttccaggaaagagcaaggacgtctggaacgactgtaacttttgtcatagtagaaggatgggtggtgagtgttgcatctgtaggtgactctcgttgcatacttgagcctgctgagggcggtgtctattatttgtctgctgatcatcggcttgaaataaacgaagaagagcgagatcgagtcactgcaagtggtggtgaagttggtcggttaaatactggtggcggtactgagattggtcctctgagatgttggcctggtggtctgtgtctctcaagatccattggagatctggatgttggcgaatacattgttccagttccttatgtaaagcaagtcaagttgtcttcagctggtggtcgactgatcatctcaagtgatggtgtgtgggatgcaatatctgcagaagaggctcttgattgttgccgggggttgccacctgaatcttctgcggagcatatcgttaaagaagctgtgggtaaaaaaggtattcgtgatgatacaacctgtattgttgttgatatattgccactagaaaaaccggctgcttccgtgccgcctccaaaaaagcaaggaaaaggaatgttaaagtccatgttcaaaaggaaaacatctgactcctcttctaatatcgagaaagagtacgcagaacctgatgtagttgaagaactctttgaagagggctctgctatgctatcagagagattagacacaaagtacccgctttgcaatatgtttaagttgttcatgtgtgctgtgtgtcaagtagaagtgaaacctggagaaggtgtctcgatccatgccgggtcggataattgccgtaagcttcgtccctgggatggtccattcctttgtgcaagttgccaagataagaaagacgcaatggaagggaaaagatcatcgggagatagacatagtagtgaaagcgactag

SEQ ID NO: 148 - DNA, 570 bp, Arabidopsis thaliana
atgacgaactacggggcgattccgacgtcgtctcatccatcaccggcgatagatctcgaatacatctcacgcgccaaacaccgtataaaatccggtctagctacgcgccgcccatggaaatcaatgttcgatttcgaatcaatgactctccctcacggtttcttcgacgcgatctcgaggatcaaaacgaatctcggctatttcagagctaattacgccatcggagttctcttcatcctcttcctaagccttctatatcacccaacctcgttgatcgtgttatcaatcttggtcgtcttctggatctttctctatttcctccgtgacgagcctcttgttgtttttggttatcagattgatgatcggacggttcttattggtttatcggttttgacggttgtgatgcttttgttgactcacgctacttcgaatattctgggatctttgttaaccgccgccgtgttggttctgattcatgcggcggttagaagaagtgataatttgtttcttgatgaagaagctgcggcggttactgaagcttcagggctgatgtcatacccttcgtcgtaa

SEQ ID NO: 149 - DNA, 1464 bp, Arabidopsis thaliana
atgaagcaactctttcttgatatctatgtgcagatcttgtttcgctggcccatgttttgcagaagaaatatgctctcctgcgcgatttggataaaagtttgcaaggtaacaatcaatagagtcgtacttacagcagattaaggcatcattgttgtcattatgtatcctcactgattagtaatttgttagaaaaggggtaccgcagacatgatctttagtcattagactaaacccatttcgttgtagttcatgtgctgcatagtttgttgttttcggatgagttgtttgctgggttttagtataaagtaagactttgtaaagcatctatatatgcactttgttgatttgttatgtggattgctttcatctttgtttgtgtcttttgtggtttaagcagaaaaccaacgacaaaatgaacaacgctgtgaaaaagaaatagaggatataagaaggggcagagctggaaatatcacacctaatacctctcttacaaagttctcagaggaagcacttgatgaacagaaacacagtgtccggattgctgacgagaaagtcacactggctatgcaggcatatgatctggtatggttatgaagtttttttttccttgtctctttaagaggacacttctctgttatggtgtctgacctcggatttgtgtagcttaagttagcagttcagttttagccttgtggaatttttgatatttcttaaagtcattatttttcagatgatatattgcttcaggtggatatgcatgttcagcaacttgaccagtatatgaaaaaatccgacgaagtgatccgcaaaggtcattttttggcttgctgttattcttgtcttagtgtttttaaagcttgagcttctctcttatcttattcagtaataaacataaaactgtgtggtttctatcagagaaagaagctgccgctgcgacattagaactggagaacaacgggaaagccgggaatgctggtgaaggtggaagaggagggcgaaaaaagtaggtggctttcagcctcatcttttatatcattagcatatgttgctcaataaattacatcgcctaaacctcagcaagcttaggtccaatgaaaccatccatttaatgttgtgacaggacaaggctagcaacagcagcgtcaacagcagcagcatcaactgggatgacttcaagtaatatggatctggatctgcctgtggatccaaacgaaccaacttactgcatctgcaaccaagttagctttggcgagatggttgcgtgtgacaacaatgcggtatggcttcttgaaactaatgtctcttttcacattgtgagacactctttaagactgaaaataaaattcaatgcagtgcaagattgagtggttccatttcggttgcgtcggtctgaaagaacaacccaaggggaaatggtactgcccggagtgtgctacagtaaagaagagcaggaaaggtcgatga

SEQ ID NO: 150 - DNA, 639 bp, Arabidopsis thaliana
atgaagaagaagatgattccgacgacgatcttactctcagctctcattttctctctatcaccgatctgtgaagctgtgtggcttactgtacctcacaccggatcaaagtgcgtctccgaagaaatccaaagcaacgtcatcgttttagctgattaccttgttatctccgaggaacattctatcttccctactgtctccgttaaggttacagcaccttatggcaccgtgttacaccacagggaaaatacaacaaacggtcagtttgcattcacaacccaagaatcaggaacttacttggcgtgttttgaggccgatgctaaaagtcatggtaacaaagattttagcatcaacatcgactggaaaactggaatcgcagctaaagattgggactccattgctagaaaagaaaagatcgagggtgtagagctggagtttaagaaacttgaaggtgcagttgaagcaatccatgaaaatctgatttacctcagaaacagagaagcagagatgaggattgtgagtgaaaaaacaaactcgagagtcgcatggtacagtataatgtcgctggggatttgcattgtggtctctggtttacagattttgtacttgaagcaatactttgaaaagaagaagcttatttag

SEQ ID NO: 151 - DNA, 1449 bp, Arabidopsis thaliana
atggccacttattacaaaactggctcaagtgagatttattccagaccagaatttgtccctggaaacgcaatgaactacacaaattctttcacagagacatttcctagagattcaactaataatgtgtcaccttcaaaagagattcaagtgttgtcaagccttggtggagtttcacaaatggttgagattcaagattctggttcttggagagatcaagaagacaatgacaggaatcgcttcccggtgatgaggcgtcttggcctcagctcgcagattgagacatcgagaggcaataataacaatgagtatgcaacacaggttgtttcgggatttactcgaaccattcacaactcaaagtatctcaaagctgctcaagagcttcttgatgaaactgttaatgttaagaaagctctaaagcagtttcagccagagggagataagattaatgaagtgaaagagaagaatcttcagacgaatactgctgaaatccctcaagcagagaggcaagaattgcagagcaagttgtcgaaacttttatcgatattagacgaggtggatagaaattacaagcagtattaccatcagatgcagatagtcgtgtcgtctttcgatgtaatagccggatgtggagcagccaaaccatacacagcccttgcgcttcagaccatctcgaggcatttccgttgcttaagggatgcgatatccggacaaatcttggtgataaggaaaagtttaggaggggaacaggatggatcagatgggagaggagtggggataagcaggttaaggaatgttgatcaacaggtaaggcaacaaagagcgttgcagcggttaggtgtgatgcaacctcacacttggcggcctcaacgcggtttaccagattcttctgttttggttctccgtgcttggctatttgagcatttcctccacccttatccaaaggattcagacaagatcatgctcgctagacaaacggggttgagccgaggccaggtatcgaactggttcataaatgcgcgtgtgcgtctctggaaaccgatggtggaggagatgtacaaggaggaattcacagatgcattgcaggagaatgatcccaaccagtcttctgaaaacacaccagaaatcaccgagattcaagagctgcaaactgagtctagttccaacaatgggcatgtacctggtgtggcaagcagtagcatgagacaaaacacagtggcccatggtggtgaccggttcatgatggtgactgacatgacaagaaatggtaatggtgggatgtctttaacgttggggattcagaattccgatgctcgtggcgatgttcctatgtccggtgggatagataactacaagaataccatctcgggaaccgatctacagtacttaaactctcgcaaccaccagcaccagattggctcttcacaattgttgcatgattttgtagcttga

SEQ ID NO: 152 - DNA, 321 bp, Arabidopsis thaliana
atggataacactgaccgtcgtcgccgtcgtaagcaacacaaaatcgccctccatgactctgaagaagtgagcagtatcgaatgggagtttatcaacatgactgaacaagaagaagatctcatctttcgaatgtacagacttgtcggtgataggtgggatttgatagcaggaagagttcctggaagacaaccagaggagatagagagatattggataatgagaaacagtgaaggctttgctgataaacgacgccagcttcactcatcttcccacaaacataccaagcctcaccgtcctcgcttttctatctatccttcctag

SEQ ID NO: 153 - DNA, 759 bp, Arabidopsis thaliana
atggcgacttcgatagctcgattgtctcggagaggagtcacttctaacctgatccgtcgttgcttcgctgcggaagcggcgttggcgaggaagacagagttacctaaaccgcaattcacggtgtcgccgtcgacggatcgtgtgaaatgggactacagaggccaacgacagatcattcctttgggacagtggcttccgaaggtagccgttgatgcttacgtggcacccaacgttgtgctggctggtcaggtcacagtctgggacggctcgtctgtttggaacggtgccgttttgcgcggcgatctcaacaaaatcactgttggattctgctcgaatgtacaggaacggtgtgttgttcatgccgcctggtcttccccaacaggattaccagcagcgacaataatcgacaggtatgtgacagtaggtgcctacagtcttctgagatcatgtaccatcgaaccagagtgcatcatcggtcaacactcaatactaatggaaggctcactggttgagacccggtcaatcttggaagcgggttcagttgtgccgccaggaagaaggatcccatcaggtgaactatggggaggcaatccagcaagattcattagaaccctaaccaacgaagaaaccctagagatcccaaaactcgctgtagccatcaaccacttaagcggagattacttctctgagttcctaccttactcaactgtctacttagaggtagagaagttcaagaagtcccttgggatcgccgtttag

SEQ ID NO: 154 - DNA, 1170 bp, Arabidopsis thaliana
atggagaaaacatcaatgttctccattcacgaaggaaagccgattcgatgcaaagcagcagtatctagaaaaccaggagaagcattggtgatagaagagatccatgtggatccacctcaagcttatgaagttaggataaagatcatatgtacatctttatgtcataccgatgtttctttctcgaaaatagacagtggaccgcttgcaaggtttcctaggattctaggacacgaagcagtcggtgtgatcgagagcattggtgaacatgtgaatggatttcaacaaggtgacgtcgttttgccagtgtttcaccctcactgtgaagaatgtagagattgcaaatcctcaaagagcaactggtgcgcaagatttgccgacgatttcttatcaaacacgagacgatatggaatgacttcacgattcaaagactcctttggagaagatatttaccattttctctttgtctcgagtttttctgaatatacggtcgtcgacatcgcacatcttgtcaaaatctctcctgatattccggttgataaagcagcattgcttagctgcggtgtttccacaggaattggagcagcttggaaagtggctaacgtggaaaaaggctccaccgttgcagtttttggccttggtgctgttggacttgcggttggagaaggagccaggctgcgtggagccggcaagatcattggtgttgatctcaatccagaaaaattcgagctaggcaagaaatttggtttcacggatttcatcaattctaccttgtgtggagaaaataagattagcgaggtgattaaagaaatgactggaggaggagttgactatagtttcgaatgcgttggtttaccttctttattgaccgaagctttctccagcactcgcacgggttcaggaaaaacggtagtgttggggatagataagcatctaacgccagtaagtttgggtagctttgatcttctcagaggcagacatgtttgtggaagcttgtttggtggtcttaaacccaaactagatattccgattctggttgatcattacttaaaaaaggagcttaatttggatagttttattacacatgaattgaaatttgaggaaatcaacaaagctttcgatttattagtgcaaggaaagtctctccgctgcattctttggatgaacaagtga

SEQ ID NO: 155 - DNA, 1477 bp, Arabidopsis thaliana
ttaattaacaacaaaagacctaaagcagatcaaagtaattgtagttgacggagatggagaaagtaaagattgaagaaattcagtccaccgctaagaaacaacggattgctactcacacccatatcaaaggccttggcctcgagccaactggtatccctataaaattggcagctggatttgttggtcaacttgaggctagagaggcagctggtcttgtagttgacatgattaagcagaagaaaatggcgggcaaggctcttttgcttgctggacctcctggaactgggaaaacagctttggctcttggaatctctcaagagctgggaagcaaggttccattctgtccaatggttggatctgaggtttactcatcagaggttaagaaaacagaggttctcatggagaattttagacgtgccattggtctacgtatcaaggaaaccaaagaagtctatgaaggggaggtcaccgagctgtcaccagaagaaactgaaagcctcactggaggttatggtaaaagcatcagccatgttgtaattacactcaagacagtcaaaggaaccaaacatctgaaattggatcccactatctatgatgccttgattaaggaaaaggtagctgtaggagatgtaatctatatcgaagcaaacagtggagctgtcaaacgggtaggtagaagtgatgcttttgccactgaatttgatctggaagcagaagaatatgttccacttcccaaaggagaggtccacaaaaagaaagagatagtgcaggatgtcacactccaagatctggatgcagcaaatgctcgacctcaaggtggccaggatatactttctttgatgggccaaatgatgaaaccgcggaagactgagatcactgataagcttcggcaagaaattaacaaggttgtgaaccgatatatagatgaaggtgtggcagagcttgttccaggagttctatttattgatgaggttcatatgcttgatatggagtgcttctcatacttgaaccgtgctcttgagagctcattatctccgatagtgatatttgcaacaaatagaggtgtttgcaacgtaagagggactgatatgcccagcccccatggagtccctattgatctattagatcgattggttatcatccggactcaaatctatgatccctctgaaatgatccagattatagccattcgtgcgcaagttgaagaattaaccgtggatgaagaatgcttggttctacttggggagattgggcaaagaacttcactaaggcacgctgtgcagcttctgtctcctgccagcattgtagcgaaaatgaatggccgtgacaatatttgcaaggctgatatagaggaagtaacatcactctacttggatgctaaatcttcagcaaagcttttgcatgagcaacaagaaaaatacatctcatgagaagaacactaatcgcacattttgttaaacatctcataaggcgcgcc

SEQ ID NO: 156 - DNA, 1802 bp, Glycine max
ttaattaaaccaccgtctcgctcaattccgagttggctattaaacaaaggttgggttgtgaaaaatgagtttgatatcccaaaacgctagcactaaaaatgtggtcaataagagcaagagggaggttgaagatgatgttgagaatagtgatactctgaaagtgaagaagaagaagaaatatgacgagggggaacaattggcaatggaacaagtgaaagagatgaagaagcttgagaactttttgtttggttctttatattccccacttgagtttggaaaggaggaggatgaagttgaacctccgaaggctgctgaaaaggtttctgatttgttcttcactgaccgttctgcggatagcgttctcacggtttaccgggaagaagatgctgacttgtctgagggaagtcatgatgatgatgaccgcgctttgcagaagaaacctgtgtgggtggatgatgaagaagaaaatgccacagtgaacatagccaaggttaacagattaaggaagttgaggaagggagaggatgaggatttgatctcgggttcagagtacgtgtcaagattgagggctcagcatgttaagcttaacccaggaactgaatgggcacgggctgattctagaatagatagatcctctgatgatgagttgacggatgatgaaaacgaagctgttttgagccatggttatgaggatgtgaatgatgttctcaggacaaatgaagacctggttgtgaagagtggcacaaaattgttgccgggacatcttgaatactcgagacttgtggatgcaaatattcaggatcctgctaatggtcccataaattcagtccagttccatcctaatgcacagttgtttcttgcagccggattggaccggaagcttagattctttcaaattgatggcaagcggaacaccaaaattcagagcatcttccttgaagattgccccattcgaaaagcctcttttttgccggatggatctcaggttatagtatcaggaagaagaaagttcttctatagttttgatttagttaaggctagagttgataaaataggtcctctggttggtagggaagagaagagtttggaggtttttgaggtgtctcctgattctcaaatgatagcatttacgggtaatgaaggttatattttgttggtatcaacaaaaacaaagcaattggttggtactctaaagatgaatggaacaatccgttccttagcttttgctgagaatggacaaaagttgttgagtggtggtggtgatggtcaggtttaccactgggatctgagaacaatgacttgcctgcataaaggtgtagatgaaggttgcatcaatggcacagctctctgtacttcaccaagtgggactcattttgcagctggttcagacagtggaattgtgaatatttacaatagagaggaatttcttgggggtaagagaaagcctatcagaaccatagagaatttgactacaaaagtggattttatgagatttaatcatgactctcaaatattagcaatctgttcaggcatgaagaagagcagcttaaaattaatacatatcccatcgtattctgtgttctccaactggccaccgtcaaacacgaacctgcattatccccgctgtattgattttagtcctggtggtggattcatggctgtcggaaacgcgtcaggcaaagtgttattgtataagctgcaccattaccagcatgcctaaggtagatttaaaatacgggcaggatttgagaattttgtttgtattattttgttggaagctttgagacttacttgatttaaat

SEQ ID NO: 157 - DNA, 1996 bp, Saccharomyces cerevisiae
ttcatttatttgtcagctttcaaactctttgtttcttgtttgttgattaacccttaattaagatggacgatagtgtcagtttcattgccaaagaggccagtccagcacaatattcgcacagtttgcatgaaagaacacacagtgaaaaacaaaagagagactttacaataacagaaaaacaagatgaggtatctggacaaacagcggagcctcgaaggacggacagcaaatccatattacagaggaaatgcaaagaattcttcgactcttttaaaaggcagctgccaccagaccgtaattccgaactagagtcccaagaaaaaaacaacctgacaaagtcgatcaaatctcgtcacttagtcatgatcagtctcggtaccggtataggtactggtttactggtcggtaatggtcaggtgctgggaacagctggtcctgccgggttagtccttggttacggaatagcatcgatcatgctttactgtatcatccaagcggcaggcgagttaggtctctgttatgcaggactaaccggcaattacaccagatatccttctattttagtcgacccttcgttgggttttgcagtttctgtggtttacaccattcaatggctaactgttctgcccttacaattggtcactgcggcaatgacagttaagtactggacgagtgtaaatgcagacatctttgttgccgtggttttcgtttttgtaattatcattaatctatttgggtccagaggctatgctgaagccgagttcattttcaattcctgtaagatattgatggtaatcggattcgtcattctggcgattatcatcaattgtggtggtgcaggtgacagaagatacatcggtgctgagtactggcacaatcctggtccatttgcccacggtttcaaaggtgtatgtacggttttctgttatgctgcattcagctacggtggaattgaagttctacttctatctgccgctgagcaggaaaacccaacaaaatctattcccaatgcctgcaaaaaagtggtataccgtattctgctgatttacatgctcaccaccattttggtttgctttcttgttccatacaacagtgacgaattattagggtctagtgactcctctggatcccatgcctccccatttgtcattgctgttgcatcacatggtgtcaaagttgtgcctcactttataaatgctgttattttgatttctgtcatttctgttgcaaactcttcgttatattctgggccaagattgttattatcattggcagaacaaggcgtcttacctaaatgcttagcatatgttgatagaaacggcaggcctttactttgtttttttgtttcccttgtctttggatgcattgggtttgtagccactagtgacgctgaagaacaggttttcacctggttattggcaatttctagtctttcgcaattatttatctggatgtcaatgtccttgtcacatataagatttagagatgccatggcaaagcaaggtcgttcgatgaacgaagttggatacaaagcacaaactggctattggggttcatggcttgcagttttaattgcaatcttcttccttgtgtgccagttctgggtagccatcgcacctgttaatgaacatggaaaacttaacgtcaaagtgtttttccaaaattatttggcaatgcccatcgttttgtttgcctattttggtcacaagatatacttcaaatcatggagcttttggattccagccgaaaaaattgatttggactcacatagaaacatatttgtgtctccatcgcttacagagatcgacaaagttgacgataacgatgatcttaaagagtatgaaaattcagaatcgtcggaaaatccaaacagctcgcgttcaagaaagttttttaagaggatgaccaatttctggtgctaaatttaaatacccagcaaattggagctctgcagagctttcgttcgtatcatcggtttcgacaacgttcgtcaagt

SEQ ID NO: 158 - DNA, 958 bp, Glycine max
atttgtcagctttcaaactctttgtttcttgtttgttgattaacccttaattaaaactgtaattgtagtagtagacagtagcaccatgagccaggaacagctcaagaaacctcaaggggagcaggaccccatcaaatacggcgacgttttcaaagtctccgacgaactcgctttcaaacccatcgcgccaagagacgcagctctcatgcaagccacggagaaccaagcattgggccaaactcaaaaaggaggtcccgcctcggtgatgcaatccgccgcaaccgaaaacctccgcgccggcgtcgtgggccgccaagacatctccgacgtggcgaggaacgaaggcgtgagcgtgaccgaaaccaaagtgggctgccaccgcgtcatcacggagttcgtgggaagacacgtggtggggcagttcgtggagcccgacgtccccatgaacaccccaggcaccgcgctggagcgtgacgccataaccatcggcgaggctctcgaggcatcggcgatagccggagcaagcgacaagccggtggatgaaagcgacgccgccgcgatacaagctgcggagatgagagcgacaggaaagaacgagacagagcctggcgggctgggcgccagggcccagtcagcagccacgcggaatactcgtactgtgtcccactctcacaagacaaccttgtctgatgtcttaacggatgcgaaggagaagctaccagcggataaggcggtgacgcgagaagatgcggagggagtgattggagctgagcttaggaacaaattggacatgagaaccacccctggtggggtcgctgcatccatggctgcagcagccacacttaatcaaaacagacaagtgactgatgcgtgaagatctcaagtttccatgcatccagtggagatttaaattggagctctgcagagctttcgttcgtatcatcggtttcgacaacgt

SEQ ID NO: 159 - DNA, 1683 bp, Arabidopsis thaliana
ttaattaatttaagtaaacaaacaaaaatggttttagaaccaaacttcgttctctcatgggtcttcttatgcatagctgcaacaatctccagcacacttttcttcttccgcaagaaacatcaccgattcataacaaagaagattcagaagaaaaagaagcttcttcctggagaaatggggcttccatggattggtgaaacaatggatttctacaaagctcagaaaagcaacagagtttttgaggattttgtaaatccaaggatcatcaaacatgggaacatcttcaagacaagaatcatgggatcaccaacaatagtagtcaatggagctgaagccaataggctcatattatccaacgagtttagcttggtggtgagctcgtggccttcatcttctgttcaactaatgggcatgaactgcatcatggctaaacaaggcgagaagcatcgggtcctcagagggattgtagctaatagtcttagctacattgggttagagtccttaatacctaagctctgtgataccgttaagtttcatcatgaaaccgaatggcgaggcaaggaagagattagcctctaccgttcggcaaaagttctcactttcactgtagtatttgagtgtctgtatgggataaaagtggagattgggatgttagaggtctttgagagggttttagaaggtgttttcgctttgccggttgagtttccttgttctaagtttgctagagcaaagaaagcaaggctagagatagagacatttctagttgggaaggtcagggagaagcgaagagaaatggaaaaagagggagctgagaagccaaacacaacgcttttctcgaggctagtagaagagttgatcaaaggtgtgataaccgaagaagaggttgtagataatatggttttgctagtgtttgcagctcatgacacaacctcttacgccatgtccatgactttcaagatgttagctcagcacccaacttgtcgtgacactctccttcaaggtaacaatcaactgaatatcagaatgttctcttcctatcagcaaaaatcatatactcaactctcagttttctcttgattcatatcagaacatgctcaaataaaagcaaacaaaggggaaggagaatatcttacagtggaagatgtgaaaaagatgaagtatagttggcaagttgttcgtgaaacaatgcgattatcccctccaatcttcggttctttcagaaaagcagtggctgatattgactatggaggatacacaatccccaaaggctggaaggtttaacacatccatctcttaagattcttcagcttctaatcaaaactctatttctttgaagaaatactaataaataaacctctgcttctttgtttgaatgcagatactctggaccacttatggaactcattataatcctgaaatatttcaagatccaatgagttttgatccaacaagatttgataagccaatacaggcatatacatatctaccatttggaggtggaccaaggctttgtgcaggtcaccaactagccaaaatcagcattctcgttttcatgcattttgttgtgacaggttttgactggtccttagtctacccagatgagacaattagcatggatcctctcccatttccgtcccttggaatgccaatcaaaatttctcccaaggtgtcatagatttaaat

SEQ ID NO: 160 - DNA, 1096 bp, Arabidopsis thaliana
  unsure (1)..(1096): unsure at all n locations
nnnnnnnnnnnnnnnnnnnnnnnnnnnnnnnnnnnnnnnnnnnnnnnnnnnccacgcgtgcgattttctgcaacttctccaaatctcatactttccagaaaatcattttcccaagaaaaataaaactttcccctttgttcttctccccccaacagcaatcacggcgtaccaatcggagctaggaggagattcctctcccttgaggaaatctgggagaggaaagatcgaaatcaaacggatcgagaacacaacgaatcaagtcactttttgcaaacgtagaaatggtttgctcaagaaagcttacgagctctctgttctttgtgatgctgaagtcgcactcatcgtcttctctagccgtggtcgtctctatgagtactctaacaacagtgtaaaagggactattgagaggtacaagaaggcaatatcggacaattctaacacccgatcggtggccgaattaatgcacagttttatcaaccagaagtcaccaaattnnnnnnnnnnnnnnnnnnnnnnnnnnnnnnnnnnnnnnnnnnnnnnnnnnnnnnnnnnnnnnnnnnnnnnnnnnnnnnnnnnnnnnnnnnnnnnnnnnnnnnnnnnaatgagaggaacaatccgagtataagtctaatgccaggaggatttaactacgagcagcttatgcccccccctcaaacgcaatctcaaccgtttgattccgggaattatttccaagtcgcggcattgcaacctaacaatcaccattactcatccgcgggtcgccaagaccaaaccgctctccagttagtgtaatataggctgaaggaaatggccgggagtgaataaaaaccagaattgggttgagcaagcaatataaagctaatgcatgttatatatatatttatcccatgaatgttgtatcagtgaattttatgcttatgttgatgtgaaattaatatcttaaagacatgtcattaatgtgcttaatttgcttcaaaaacattctatgtgtataagtgtactattagttccaattgttgtatttaattaaaaaaaaaaaaacaagnnnnnnnnnnnnnnnnnnnnnnnnnnnnnnnnnnnnnnnnnnnnnnnnnnn

SEQ ID NO: 161 - DNA, 823 bp, Arabidopsis thaliana
ttaattaagacgaaatgttggagctacgtcttgttcagggctcgttgttgaagaaggttctagaatcaatcaaggatctggtgaacgatgcgaatttcgactgctccagcactgggttctcactccaagctatggattcgagtcacgttgctctggtgtctctcttgctaagatccgaaggcttcgaacactacagatgcgacaggaatctctccatggggatgaatctcggcaacatgtcgaagatgctcaaatgcgccggaaatgatgacatcatcaccatcaaggctgatgacggcggcgacaccgttaccttcatgtttgagagccccacgcaagacaagattgctgattttgagatgaagttgatggatatagacagtgaacatctgggaatacctgatgctgagtaccactcaatcgtgaggatgccttccaatgagttttccaggatttgcaaagatctcagtagcattggtgacacagttgtgatctctgtgactaaagaaggcgtgaagttttctactgccggtgacattggaaccgctaacattgtgctcaggcagaacacaactgtagacaagccggaagatgcaattgtgatagagatgaaggagccagtgtctctctcatttgccctgaggtacatgaattccttcacaaaggcaactccattgtcagacacagtgacaatcagcttatcgtcggagttgccagtggttgtggagtataaggttgctgagatgggttacattcgttactacttggctcctaagattgaagaagaagaagacactaatccctaagacccctttatttaaat

SEQ ID NO: 162 - DNA, 1104 bp, Arabidopsis thaliana
atggctttggagaaagaggaagaagcgtcacaaaacggtgcgttttgtgtccttgatgggctctattgcgaggaagaaaccgggtttgtggaggacgatcttgatgacgatggagatttagattttctcgagaaatctgatgagagtgttgtaaagtttcagtttttacctcttttggatatgttcttatgggatgacgatgagattctgagtttgatttcaaaggaaaacgaaacgaatccatgttttggggaacaaatcttagatggctttttggtttcttgtaggaaagaggctttagattgggttcttagggttaaatctcattatgggtttacttcattgacggctatacttgctgtgaactacttcgataggtttatgacaagtataaagcttcagactgataagccatggatgtctcagcttgttgctgtggcttctttgtctttagctgctaaagttgaagagattcaagttccattgctcttagacctccaagtggaagaagcaagatatctctttgaagctaagacgattcaaagaatggagcttttgattctttctactcttcaatggagaatgcaccctgtgactccaatctctttctttgatcacattatccggcgatttggctctaaatggcaccagcaattagacttctgtaggaagtgtgagcgtcttctgatctctgttattgctgatacgaggtttatgaggtacttcccttctgtcttagctactgcaataatgatccttgtcttcgaggaattgaagccatgtgatgaagttgaataccaatctcaaataacgactctactcaaagtcaatcaggagaaagtaaatgaatgctatgaactgttgttggagcacaatccaagcaagaagaggatgatgaatttggttgatcaggacagtccaagtggtgtattagactttgatgacagctcaaatagctcctggaatgtctccactactgcttcagtgtcctcatcatcttcgtctccagagcctctgctcaagagaagaagagttcaggagcagcaaatgagattgccctcaataaaccgtatgtttctcgatgtgcttagtagtcctcgctag

SEQ ID NO: 163 - DNA, 807 bp, Arabidopsis thaliana
atggagtacaaacatttcagccatccacacactctaaaactccaacagattcagccacataaaagctcagattcttcagtaatctgctcaggttgtgaatcagccatctctgaatccgaaaccgcgtatatctgttcaacatgtgacttcaatcttcatgagcaatgtggtaacgcagtgcgtgggatgcaacatccttctcacgctggtctccaccacttgactctagtcccttacacaacttacagcgctggtaccttcctctgcagagcctgtggctgcactggaggtaaagggttctcttactgttgtcctttgtgtgactttgaccttcatgttcaatgcgctcacctgcctcaggtcttggttcatgagtctcatcctatgcatagtcttcttcttgtctacaacagtactcctcctatgtcttttactcagtttggtttcgggaatcagcttgtttgcaatctttgtaatatgactatggatggtaggttttggtcttacaactgttatgcttgtaactatcatattcatgcttcatgtgctgtgaataagcccaatccagtggctgcttctgctgagaactgtggggcgagtgatgaaggaaagacaccgactgctgaatctgttcctgttcagggtttggagactgagcagacggaacaagtagctgcaataacagagcaagtggaagatccagttttgaggcaacagcttgagcttcagaagcttcagcttgagctagatatgagttctgctctcgcaaacatgattggttccttcaatctcagttctttcgtttga

SEQ ID NO: 164 - DNA, 1148 bp, Arabidopsis thaliana
atgggttacataggagctcatggtgtagcagctcttcataggtacaaatacagtggagtggatcactcttatcttgccaaatacgtcctccaacctttttggactcgatttgtcaaagtcttccctctatggatgccaccaaacatgataacgcttatggggtttatgtttctagtcacttcctccctgctaggctatatatattcacctcagttggattctcctcctccacgatgggttcacttcgcacatggtttacttctcttcttgtatcagacatttgatgcggttgatgggaagcaagcaagaaggacaaattcctctagccccctaggagagctcttcgatcatggttgtgacgcgcttgcttgtgcgtttgaagccatggcatttggaagcactgcaatgtgtggaagagatactttctggttctgggttatttcagctattccattttatggagctacatgggaacactatttcaccaacacacttattcttccggttatcaatgggcctacagaggggcttgcacttatatttgtcagccacttcttcacagccatcgtcggtgctgaatggtgggctcagcagttagggcagtcaataccattgtttagttgggtgccatttgtgaatgagattcaaacttctagagcagtgctatacatgatgatcgcttttgctgttataccaaccgttgcattcaatgtaacaaatgtctacaaagtcgttcgatcaagaaacgggagcatggtgttagcgttagctatgctgtatcccttcgttgtcttacttggaggagttttgatatgggattacttgtctccaatcaatctcatagcaacatatcctcacttagttgtactcggaactggacttgcatttggatttttagtgggaagaatgattcttgctcacttgtgtgatgagcctaaaggactaaaaacaaacatgtgcatgtcactactctatcttccctttgcacttgcaaatgcgctaaccgcaagattgaatgctggggttcctctagtcgacgaattatgggttcttcttggctactgcatattcacagtgtcattatacttgcactttgcaacatcagtcatccatgagatcactgaggcccttggaatctactgctttag

SEQ ID NO: 165 - DNA, 1368 bp, Arabidopsis thaliana
atgtcgttccgtagcatagttcgtgatgtgagagatagtataggaagtctatcgaggcgtagtttcgactttaagttaagcagcttgaacaaagaaggtggtaaatcccgtggttcggttcaagattctcatgaggaacaacttgtagtaacgattcaagaaacaccgtgggcgaatctacctccagagttattacgtgatgtgatcaaaagacttgaagagagtgaaagtgtgtggcctgctcgtagacatgttgttgcttgtgcttctgtttgcaggtcatggagagatatgtgtaaagagattgttcaaagtccggagctctcaggcaaaatcacatttcctgtttcgttgaaacagcctggaccaagagatgcaacaatgcaatgctttatcaaaagggataaatctaacttgacttatcatttatatctttgtctcagtcctgctttgttggttgagaatggaaagtttcttctttctgcaaaacgcataagaagaactacatacaccgagtacgtgatctctatgcacgccgacaccatttcgagatcaagcaatacctacattggcaaaatcaggtctaattttctggggacgaagtttataatatacgatacacaaccagcatacaacagcaacatcgctcgagcggtccaaccggtaggtcttagccgcagattctactcaaagagagtctctcccaaagtacctagtgggagctacaaaattgcgcaggtttcttatgagctaaacgttcttggtacccgtggtccgaggagaatgcattgtgcgatgaactcaattcccgcctcttcccttgcggaaggcggaactgtgcctggacagcccgatatcattgtcccgcgctctattctcgacgaatcgttccgcagcattacctcttcgtcatcgagaaaaatcacttacgattactcgaatgattttagcagtgcacggttttccgacattcttggcccgttaagcgaagaccaagaagtggtattagaagaagggaaagagcggaattcgccaccacttgtgcttaagaacaagccgccgaggtggcatgaacagcttcagtgttggtgtttaaacttcaggggacgtgtaacagtcgcatcagttaagaactttcagctcattgcagcaaaccaaccacagcctcagcctcagcctcaaccgcaacctcaacccctaactcagccgcaaccgtctggtcagaccgatggtcccgacaagatcatattgcagtttgggaaagtgggaaaagacatgttcacgatggatttccggtatccgctctctgcgtttcaggctttcgctatctgtttgagcagtttcgacacaaaacttgcttgcgaataa

SEQ ID NO: 166 - DNA, 459 bp, Arabidopsis thaliana
atggcgaaaggagttgcagttttgaacagcagtgagggtgttacggggactatctttttcacccaggaaggcgatggtgtgaccactgtgagtggaacagtttctggccttaagcctggtcttcatggtttccatgtccatgctcttggtgacaccactaacggttgcatgtctactggtccacatttcaaccccgatggtaaaacacacggtgcccctgaggatgctaatcgacatgctggtgatctaggaaacatcactgttggagatgatggaactgccaccttcacaatcactgattgccagattcctcttactggaccaaactctattgttggtagggctgttgttgtccatgcagaccctgatgacctcggaaagggaggccatgaactcagcctggctactggaaacgcaggcggccgtgttgcttgcggcatcattggtctccagggctaa

SEQ ID NO: 167 - DNA, 1524 bp, Arabidopsis thaliana
atggtgactctaaacgcttcttctcctctcacgaccaagtcgttcctcccctaccgtcacgctcctcgccgtccaatctctttctcccctgtcttcgccgttcattcgactgaccccaagaaatctacccaatcagcctccgcttcggttaaatggagtctagagagttggaagtcgaagaaagctttgcaattgccggattatcctgatcagaaggatgttgattcggttctacagacgctttcttcttttcctcctatagttttcgctggtgaggctaggaaactagaggataagcttggtcaagcggctatgggtcaagcctttatgcttcaaggtggtgattgtgctgagagtttcaaggaatttaacgctaataacattagagacacctttagggttcttcttcagatgggtgttgttctcatgttcggtggccagttaccagttatcaaggtgggaagaatggctggtcagtttgcgaagccgagatcagacccatttgaggagaaagatggtgtgaagctgccgagttacagaggagataacataaatggtgatgcttttgatgagaaatcgaggattcctgatcctcataggatggttagagcgtacacacagtctgtggctacgttgaatctcttgagagcatttgctactggaggttatgcagctatgcagagagttagccagtggaaccttgatttcacgcaacatagtgaacagggtgacaggtaccgtgaattggctaatagagttgatgaggctttgggattcatgggtgcagctggacttactagtgctcacccgatcatgactactactgagttttggacatcccatgagtgtttgttattgccttatgagcaagcactcacaagagaggattcaacatctggactttactatgattgctctgcgcacatgctttgggttggagaacgaactcgccaacttgatggtgctcatgttgagtttctgaggggaatcgctaaccccctcggaatcaaggtgagtgataaaatggtccctagtgaactggttaagctgatagagatactaaaccctcagaacaagcctggaaggattacggttatagtgagaatgggagctgagaatatgcgggtcaagcttcctaatttgatcagagcagtccgtggagccggtcagattgtgacttgggttagtgatccaatgcacggaaacacaatcatggctcctggtgggctaaaaactcgttctttcgatgcaatcagggcggaattgagagcgttcttcgacgtccatgatcaagaagggagtttccctggcggggttcatttagaaatgactggtcaaaacgtgacagaatgtgtcggagggtcacgcaccatcacttacaacgatctaagctcacgctaccacactcactgtgacccaagactcaacgcatctcagtctctggagcttgcattcatcattgcagagcgtctgcgaaagagaaggcttggttccgggaatcttccgtcatctattggagtctag

SEQ ID NO: 168 - DNA, 1431 bp, Arabidopsis thaliana
atgacgaagaactacccaaccgtgagcgaagattacaagaaggctgttgagaagtgcaggaggaagctcagaggtttgatcgctgagaagaactgtgcacccatcatggtccgactcgcgtaagtaactaaccatatttgcttgtggttttgaagtatgtaggattatgaactttctcatggctgatctgtctggctaaactgcagatggcactctgctggaactttcgattgtcaatcaaggactggaggtccattcggaacaatgaggtttgacgctgagcaagctcatggagccaacagtggtatccacattgctcttaggttgttggaccccatcagggagcaattccctaccatctcttttgctgatttccatcaggtacatggttttaaattttaaaaagcactatttggttaacggtgataactgtaaggtttggattctaactctagatatccttgtggtgtgaaattgatcattcagcttgctggtgttgtggccgttgaagttactggtggccctgacattcctttccaccctggaagagaggttagtcattgctgtagatttgtttgccgtctctaaggttatcatatactcaatttggtcgagagaacgtgttctgctttctttgtagagatggctgattgataattgtgggacttgattttctgtttctaaaatgcatatcttgatttcaggacaagccccaaccacctccagagggtcgtcttcctgatgctaccaagggttgtgaccatttgagagatgtctttgctaagcagatgggcttatctgacaaagacattgtcgctttatctggtgcccacactctggttcgtttctctccaactgcttaaaactttaaaatttgtttgctccaagcttacaaattctgatgagtgctagcaaaatatgatatcgcagggacgatgccacaaggataggtctggcttcgaaggtgcatggacatcaaaccctctaatcttcgacaactcttacttcaagtgagtatcccaagttcccttgtaggaggattcagtggcttatatggttactaatcaaattatatatgggcagggaactcttgagcggagagaaggaaggccttcttcagcttgtctctgacaaagcactattggacgaccctgttttccgtcctttggtcgagaaatacgctgctgtatgtctttcattcccttttttctgtttttcacttggtagagagagagagaagagaactcatggtttcttgtgacaatgtgaacaggatgaagatgcctttttcgctgattacgctgaggcccacatgaagctttctgagcttgggtacttatcctgaatctatgaatcatttagaaagtaaatattaattcagtggtgtgatttgagtttgtatctgttggttgcaggtttgctgatgcttaa

SEQ ID NO: 169 - DNA, 972 bp, Arabidopsis thaliana
atggctgtatcacttccaaccaagtaccctctacgacctatcaccaacatcccaaaaagccaccgtccctcgcttctccgtgtacgtgtcacctgctctgttactaccaccaagcctcagcctaatcgtgagaagcttctggtagagcaacgcactgtgaatcttcctctgtccaacgaccaatctctgcaatcgaccaagcctcgccctaaccgtgagaagcttgtggttgagcaacgccttgccagccctcctctgtccaatgacccaactttgaaatcgacatggactcaccggttatgggttgcagcgggctgcaccactttgtttgtctctttagctaaatctgtcattggagggtttgattctcatctctgcctcgaaccagctttagccggttatgcagggtacatcttagctgatctaggttccggtgtctaccactgggccattgataactacggtgatgagtcaacacctgtagtaggaacccaaatcgaagcatttcagggtcaccacaagtggccttggacaatcaccagacggcaatttgccaacaatctacacgctctggctcaagtcataaccttcacagttcttccactagaccttgcatttaacgaccctgtgtttcacggctttgtgtgcacatttgcattttgcatattgtttagccagcaattccatgcttgggcacatggaaccaagagcaagcttccacctctcgtggtcgcgttgcaggacatggggttacttgtttcacggagacagcatgcggaacatcatcgagcaccgtataacaacaattactgcatcgtgagtggagcatggaacaatgttctggatgagagtaaggtctttgaggcattggagatggtgttttatttccagcttggggtgagacctaggtcatggagtgagccaaactctgactggatagaagaaaccgaaatctccaacaaccaagcataa

SEQ ID NO: 170 - DNA, 413 bp, Arabidopsis thaliana
atggatacttcaagtccttcagcttttgtgaacggagctttgttgaggagattcattggccaaaaagtcagaactgtgattcaagtgactggttcagagattggatctgtggttggcaaatctactgatgatcttcagatcgttgttagaggatcgtctcctccttctcctcttactacttaccttgaggttattggaattgcagagagtgataacgctattcgagctgaaacttggaccaattttggcaacacttttggtaatttagtgattccattactgtgtcgagtttatcagatttgctattgagttgtgttttgatgttttggttgttatttttggttgcagatacacagaactacaacgagctatgtaagctagcaaatggggagttcaagcacttgttcatctaa

SEQ ID NO: 171 - DNA, 1094 bp, Arabidopsis thaliana
atggttgagccggcgaatactgttggtcttccggtgaacccgactccgttgctgaaagatgagctcgatatcgtgattccgactatcagaaacctcgatttcctcgagatgtggaggccttttcttcagccttaccatctgatcatcgtccaggacggagatccatcgaagaagatccatgtccctgaaggttacgactacgagctctacaacaggaacgacattaaccgaatcctcggacctaaggcttcttgtatctcgtttaaggattctgcttgtcgatgctttgggtacatggtgtctaagaagaagtatatcttcaccattgatgacgattgcttcgttgccaaggatccatcaggcaaagcagtgaacgctcttgagcaacacatcaagaaccttctctgcccatcgtctccctttttcttcaacaccttgtatgatccttaccgtgaaggtgctgatttcgtccgtggataccctttcagtctccgtgaaggtgtttccactgctgtttcccatggtctttggctcaacatccctgactacgatgccccgacccaactcgtgaagcctaaggagaggaacaccaggtatgtggatgctgtcatgaccatcccaaagggaacacttttcccaatgtgtggtatgaacttggcttttgaccgtgatttgattggcccggctatgtactttggtctcatgggtgatggtcagcctattggtcgttacgacgatatgtgggctggttggtgcatcaaggtgatctgtgaccacttgagcttgggagtgaagaccggtttaccgtatatctaccacagcaaagcgagcaacccttttgttaacctgaagaaggaatacaagggaatcttctggcaggaggagatcattccgttcttccagaacgcaaagctatcgaaagaagcagtaactgttcagcaatgctacattgagctctcaaagatggtcaaggagaagttgagctccttagacccgtactttgacaagcttgcagatgccatggttacatggattgaagcttgggatgagcttaacccaccagcagccagtggcaaagcttgagagcagtatga

SEQ ID NO: 172 - DNA, 972 bp, Arabidopsis thaliana
atgggtgagcctaaagacagtctcgctctcttcctctgccacgaatcggagtcttctctaaacgaagacgacgacgagacgattgagagatctgataagcaagaacctcactttactactacgatcgatgatgaagattatgtggcagaccttgttcttaaagagaatctccgattcgaaaccctaccctctaaaacgacgtcgtcttccgatagattgattgccatcgattggattctcactacaagaacaagatttgggttccaacatcaaacagcttacattgcaatctcatacttcgatctgtttctccacaaaagattcatcggtttgcagaaagatgaaacatgggcgatgcgattgttatcagtagcttgtttatcattagctgctaaaatggaggaacgtattgttcctggtttatcacaataccctcaagatcatgacttcgttttcaaacccgatgtcattcgtaaaactgaactgttgattctatccacattggactggaagatgaacttgatcactccttttcattacttcaactacttccttgctaaaatctctcaggacaaccattctgtttctaaagacttggtgttgttaagatcctctgattctcttcttgctttaactaaagagataagttttacggagtatcgacagtttgttgttgctgctgttactacattgctagcttcttcttctacctcatcggatattagattgactagagaagagatagctaacaagtttggttcgatctcttggtggacttctaatgagaatgaaaatgtatatttgtgttatcagagaacgctagagattgaggagaggaaacatatgacacctccaccggaaatagcggtttctcgcgaaccgccggcttcaggaagtggcgctaaacgccgattgtcttttgatgattctgatcaaagttctccaccagccaagagaatgcgtaggctatga

SEQ ID NO: 173 - DNA, 1122 bp, Arabidopsis thaliana
atggcggtggactccttagaaacggagattgacacggcggtgcgtgttgtccacctcgcttcttctctctgtgttaaagttcaagagaagcttcatcttcctaacggtggtcacgttaagtctaaagacgatgattcccctgtcaccgtcgctgattttggtgtacaagcaattgtgagctgggttttagctgaagtgtttggtgatcaaaacctttcaattgttgctgaagaagacactgagacactctctgaggctgattctttaggtcttttaggagctgtgtcgaatgcggttaatgaagcattgtccgaagctcagaactacgggcttccgaagccagttaagccattggggtctagtgaaattcttaaggctattagtagatgtaactctgttggaggacctaaaggaaggcattgggttcttgatcctgttgatggaacgttagggtttgttcgtggggatcagtatgctgttgctttagctttgatagagaatggtaaagttcttttgggtgtactaggatgtcctaattatccggttaagaaagaatgtttaagtaatggttgtaaccaagctatgaagacgaaagctgttgctggttcagtatcgaaaggatgtgttatgtatgcaaagagaggtagtggtcaagcttggatgcaacctttgatcgttggaggaataccagaatctgcaacacttcttaaggtttcttcagttgatgatccggttttagctacagtttgtgagccagtagagagagcaaactcaaaccacttgttcactgcaggacttgccaatagcatgggagttagaaagcagcctatgcgagtgtatagcatggtgaaatatgcagcgattgcacgtggagacgctgaagtgtttatgaagtttgcacagtcaagttacaaagagaagatatgggatcacgcagctggagttgttattgtggaagaagctggtggtgtggtgactgatgcgggagggagaaacttagacttctcgaaaggtgtttacttggaaggtcttgaccgtggaatcatcgcatgttctggtcaagttttacatgagaagattataggtgctgtttatgctagttgggaatcttccagtctctga

SEQ ID NO: 174 - DNA, 467 bp, Arabidopsis thaliana
atgttatgttttgtagaagcaggtgagtatcaatggagaagagctacatgaagcatgagctatggggagatggagattttcaagaagatgatgtgtgggatgttcttgatggatatcaatcaccgtttatgattagtagtaaccatacgactaaaccttctttctcaacccaaactttacttccaagcgaacctagaatgattcctgagaggcagaggacagaaggaatggcacctatgagacaacagtcggtccctgtcaatgtccctgattggtcaatggttcaaagaaagaagacaaagaaagttgttgatgatgagaatgtgtcaccggaggaatatttcctgcggcgcagtcgatcatcatcgtcgtcttcagttatggaaggagttggaagaaaactgaaaggaagagatttgagcaaagtaaggaatgcaatattgaagcaaactggatttcttgagtag

SEQ ID NO: 175 - DNA, 372 bp, Arabidopsis thaliana
atggccaagtacaacgagattgcgaagaagaagagagaggctaaagccgatagaaaacgagccattcacggcgatcctctcaccaataaattgaagaccagaactccggtcccctccgtctccggcaaacgtcagagaaagctccttcgcaaatggcgcagagagcagaaagatatggtggagaagggtcttgttactatggaagatgtggagatggcttctgctcaagctgcatcagaagactccaagaaatcccccagaaaatttagcgttaagaagagcttgaagttgaacaaactaaataataaaggcaaaaagaagaaaaaccagaaagccagtggtgaaaaatctgctgattgtatgctagaatga

SEQ ID NO: 176 - DNA, 459 bp, Arabidopsis thaliana
atggctgaagcagcgagaagacaaggtggtgggagaccattaccgccacctccgagaggcgttaaccaacaacctcctcgccctaaacctgaacctgtcgatcgtgaaaagacatgtccccttcttcttcgtgttttcaccaagagtggtggtcatcatactagtgaagattatgctgtgagaggcaaagaaccaaaggatgaagttcaaatctacacttggaaagatgccagtcttcgcgagctaacagatttggttaaagaagtttctgtagcagctaggagaaggaatgctagattgtcttttgcgtttgtttatcctaacaataaaggtggctataatgtgagagaggttggggagacgatggcttatccaaaccgaaaacaaccagatgacagtaaaacgctttccgaacttccgtttgagattggagattatctggatgtggcaatttactag

SEQ ID NO: 177 - DNA, 1185 bp, Arabidopsis thaliana
atgcctccgaaagccaaagctaaagatgcaggtcccgtagagaggcctattcttggccgtttctcttctcacctcaagatcggaattgttgggttaccaaatgttggaaaatctactcttttcaacactcttacaaagctttcaattccagctgagaatttccccttttgtaccattgagcctaatgaggcacgtgtgaatatccccgatgagaggttcgattggctttgccaaacttacaagcctaagagtgagattccagctttcttggaaattcatgacattgctgggcttgttagaggagctcatgaaggacagggtcttggaaacaacttcttgtcccatattcgtgcagttgatggaattttccatgttttacgtgcttttgaagatgctgatattatccatgtcgacgatatcgtggatcctgttagagatttggagaccattactgaagagttgcggctaaaggatattgaatttgttggaaagaagattgatgatgtcgagaagagcatgaagaggagcaatgacaagcagctgaaaatagaacttgagctcttgcaaaaggtaaaagcttggctagaagatggtaaggatgtccgttttggggactggaaaacagctgatatcgagattttgaacactttccaattgctttctgcaaagcccgttgtttacttgattaacctgaatgagagagactatcagaggaagaaaaacaagttcttgccaaagattcatgcctgggttcaagaacacggtggtgatactatgattcctttcagtggtgtgtttgaaaggagtctcgctgatatggccccagatgaagcagcaaagtattgtgaggagaacaaactgcaaagtgctcttccgaggatcatcaaaactggattttcagcaattaacctcatatacttctttacagcagggcctgatgaggtgaagtgctggcaaataagacggcagtcaaaggctcctcaagctgcaggggccattcatactgattttgagagaggatttatttgtgctgaggtcatgaaattcgaggatctcaaggaacttggcaatgaacctgcagtcaaggccgcaggaaaatacagacaggagggtaaaacatatgttgttcaggatggagatatcattttcttcaagttcaatgtttccggtggtgggaagaaatga

SEQ ID NO: 178 - DNA, 1936 bp, Arabidopsis thaliana
atgtttgctcagttagcaccatcgccgtctccttctccggcgaacgttagccacttcgttcaccgtcgcaccttccgtcaatgtacatacgccgtctccgcttctcttcccactgcaaattcctctcgtccaccaccaattcaggcaaacattgtcattctaattctactacttcgtggtcttcttcgttatctgaaatgaaattgagaaactcggaaacttgttttgcagattgttggaggaaaggatttgaatttggatgttacacggaaagatgattcaattgggttcaaattagaggcaaatgaagatgaaattgattggatgaatctagaatctgatattcgtctatggactagagcattacgtcctgttcaggtaaaacaattacgagattatgttgtaaagttttggtttttctgaatatgaatttgttggattgttgtttactgtgtgtgtgtacgtgggttcttggtttcatagtggtatccagggcacataatgaaaactgaaaaggaacttagggaacagcttaagttgatggatgttgtgattgaagtccgtgatgctaggattcctttatcgaccactcatccaaaggttagtactttgcatctaaaggtctttgatccggttttttagactatgctaattatattactcagtctctctaatctttgttcaataggagcaagtgaagtctatgacaaaacttttgtgttgttcaataatgtttgcacctacttttgggggttatgtatgtggtattttgtagatggatgcgtggcttgggaataggaaacggatattggtattaaatagagaagatatgatctcgaacgatgatcgaaatgattgggcgagatactttgcaaagcaaggaataaaggtcattttcactaatggcaaacttgggatggtatggtttcttcaagtttaaactttgctttgggattggtttttttctttctatatgtttaatctgagagatggttacagggagctatgaagctaggtcggttagccaaaagtttagcaggtgacgtaaatgggaaacggcgagaaaaaggacttctccctagatcagtaagtaaagtgtctcatgatccattattctctgatgcaacatatatgatttaaattttaagttcatttcaaatgatgcaggttagagctggaataattggataccctaatgttgggaaatcatctctgatcaatcgtctattgaaacgaaaaatttgcgcagcagctccaagaccaggtgtaactagagaaatgaagtaagaatgccttttgaaagcttggttttttttgcctcttaaaactcagtttccaaacttcatatctggcactggtcatttttcttatcttactgtaaacagatgggtcaagcttgggaaagatcttgatctcttagattcacctggaatgcttcctatgcgtatcgatgatcaagcagctgctataaagctggcaatttgtgatgacattggagagaaagcttatgacttcactgatgttgctggaatccttgtgcagatgttagcacggattccagaagtaggtaagtttctgaacattaccattttttgcgatttactcttttctctcattttcctgcgctaaaaatgaaacttgatattctctcctttataacaaaaaggcgcaaaggctctttacaaccgatacaagatccagctagaaggcaactgcgggaaaaagtaatgaaacttcctcaaagagagctcatttcttttggcaaaccattgttcatggattcttattgaatctctgctctctcttttgcagatttgtgaagacgcttggtcttaatttgtttggtggagatagtcatcaagctgcatttagaatactaacggattttcgcaaaggcaaattcgggtatgtctcgttggagagacctccactgtga

SEQ ID NO: 179 - DNA, 1704 bp, Arabidopsis thaliana
atgggcgatcttgctatgtccgtagcagacatcaggatggagaatgagcctgatgatttagctagtgataatgttgctgagattgatgtgagtgatgaagagattgatgctgacgaccttgagagacggatgtggaaagatcgtgtcaggcttaaaagaatcaaagagcgacaaaaagctggctctcaaggagctcaaacgaaggagacacctaagaaaatctctgatcaagctcagaggaagaaaatgtctagagctcaagatggtatccttaagtacatgttgaagcttatggaagtctgcaaagttcgcgggtttgtctatggtataataccggaaaagggcaagcctgtgagtggttcctctgacaatataagagcttggtggaaagagaaagtgaagtttgataagaacggtcctgctgctattgctaaatacgaagaggagtgtttagcgtttgggaaatctgatgggaataggaattcacagtttgttctccaggatttgcaagatgctactttagggtctttgttatcttctttgatgcaacattgtgatcctcctcaaaggaagtatccgttggagaaagggacgcctccgccttggtggccaacggggaatgaagaatggtgggtgaaactcggtctgcctaaaagccagagtcctccttaccgaaaacctcatgatctcaagaagatgtggaaggttggagttttaacggcagtgatcaatcatatgttacctgatattgcaaagattaagaggcatgttcgtcagtcgaaatgtttacaggacaagatgacagctaaagagagtgcgatttggttggcggttttgaaccaagaggaatctttgattcagcagcctagcagtgacaatggaaactccaatgtgactgagacacatcgtaggggtaataacgctgacaggaggaaacctgtggtcaacagtgacagtgactatgatgttgatgggacagaggaagcttcaggttcagtttcatctaaagacagtagaagaaatcagattcaaaaagaacaaccaacagccatctcacattcagtaagagatcaagataaagcagagaaacatcgcagaaggaaaagacctcgaattagatccggaactgtcaatcgacaagaggaagaacaacctgaagctcaacaaagaaacatcttacctgatatgaatcatgttgatgcccctctgctagaatataacatcaacggtactcatcaagaggacgatgttgtcgacccaaatattgccttaggaccagaggataatggtctggaactagtggttcctgagttcaataacaactatacttatcttccacttgttaatgaacaaactatgatgcctgtagacgaaaggccaatgctttatggaccaaaccctaaccaagagcttcaatttgggtcagggtacaacttctacaatccctctgcagtgtttgtacataaccaggaagacgacattctccatacacagatagaaatgaatacacaagcaccacctcacaacagtgggttcgaggaggccccaggaggagtacttcaaccccttggtttactcggaaatgaagacggtgtaacagggagtgagttgcctcagtatcagagtggcattctgtctccattgactgacttggactttgactatggtggttttggtgatgatttctcatggtttggagcttag

SEQ ID NO: 180 - DNA, 1203 bp, Arabidopsis thaliana
atgaaacgccaagcaaaaccaccggagaagaagacgaagaggacgacaaatgcttcgtcaccaactccgtcgtcttcatctccttcgttgtcttctctcccagacgaaatcgtcgagaactgcttagctcggatctcgaggtcgtactatccaacactctcaatcgtttcgaaaagcttccgttcaattatctcatccaccgagctctatgtagccagatctcacctccgaaacaccgaagagtgtgtctatgtctgtctatctgataaaagttttgaatttcccaaatggtttacactctgggttaaccctaatcaagccaactccatggttgagaagaagaggaagaagaagaagacaattggaaagttgttggttccaattccctcttctaatctttctcctgtatcaaaatccgccatagctgttggttctgaaatatatgtgatcggcggaaaagtcgatggtgcactgtcttcggccgtgcgaatcctcgattgtcgcagtaacacttggcgcgatgctcctagcatgaccgtagcccgaaagaggcctttcatatgtctctacgatgggaaaatttacgtaattggagggtacaacaaattatcagaaagcgaaccatgggctgaggtattcgatataaagactcagacttgggaatgcctttctgatccgggtactgagatacgtaactgtaccatttacagaatagcagagatcgaaggaaagattcactttgggtatacacaaaaaacgtatgcttatgacccaaagcaaggtgaatgggaatgctgtgaaggcgaggttgcatttccgaggtcccaatgtgtgatggagagtgtattgtacacctttgctaataactacacttgggaggacgactacgggtgcaagtggtggtcaacggatggatatggggaaaaggtaaaagggttggagtcactattagagatacacaagaggaatggtggctcaagtgataatacgactaaactagttgcctgtggtgggaaactcttacttttatgggaagggtacatgaagcataatcccaataataggaagaagatttggtgcgcggttatcgcgttagaaaagcgtgatggaggtaaggtttggggaattgttgagtgggttgatgttgtgcatatcgtccccacatcatgcaagctcttgcattgtctcgttgtctcggtttga

SEQ ID NO: 181 - DNA, 861 bp, Arabidopsis thaliana
atgtatgtgtttgatccaacaacagaagctggattgagattagagatggcgtttcctcaacatggttttatgttccaacaacttcatgaagacaacagtcaagatcagctcccttcttgtcctcctcatctcttcaatggaggaggaaactacatgatgaacagatctatgtctttaatgaacgtgcaagaagatcataatcaaaccttggatgaggagaatctatcagacgatggggcacatactatgctgggagagaagaagaagaggctgcaattagagcaagttaaggcattagagaagagctttgagcttggtaacaagctggagccagagaggaagatacaactagctaaagcattagggatgcaaccaagacagatcgcgatttggtttcaaaacaggagagctaggtggaagactagacagctcgagagagattatgattcactcaagaaacagtttgagtctcttaaatccgacaatgcttctctacttgcctataacaagaaactccttgctgaggtaatggctttaaagaacaaagaatgtaatgaaggaaacatagtaaagagagaagcagaagcttcatggagcaacaacggaagcacagagaatagttcagacatcaatctggagatgcctagagagaccattacaacacatgtgaacacgatcaaagacctattcccttcatcgattcgatcatctgcacatgatgatgatcatcatcagaatcatgaaatagttcaagaagaaagcctttgtaacatgtttaatggcattgatgaaacgacgccggctggttactgggcatggtctgacccaaaccacaaccaccaccaccaccagttcaactga

SEQ ID NO: 182 - DNA, 861 bp, Arabidopsis thaliana
atggaaaattcgatgaagaagaagaagagcttcaaagaaagtgaagatgaagaactaagaagagggccttggactttggaggaagacacacttctcacaaattacatcctccataacggtgagggtcgttggaatcacgtcgccaaatgtgctgggctaaagagaactgggaaaagttgtagattgagatggttgaattacttgaaacccgacataagacgagggaatcttactcctcaagaacagcttttgatccttgagcttcactctaaatggggtaataggtggtccaagattgcacagtacttgccaggaagaacggataacgagatcaagaactattggagaacaagagttcaaaaacaagctcgtcaactcaacatcgaatctaacagcgacaagttctttgacgctgttcgtagtttttgggtccctagattgatcgagaagatggaacaaaactcatccactactactacttattgttgtccccaaaacaacaacaacaactctcttcttcttccttctcaatctcacgactctttaagtatgcaaaaagatatagattactcgggtttcagcaacatagacggttcttcttcaacttctacttgcatgtctcatctaacaacagttccacactttatggatcaaagcaacaccaatatcatcgatggctcgatgtgtttccatgaaggcaatgttcaagaattcggaggatatgttcctggcatggaggattacatggtaaactcggacatctcaatggaatgtcacgtggcggatggttattcagcgtacgaggatgttacacaagatcccatgtggaatgtggatgacatttggcagtttagggagtaa

SEQ ID NO: 183 - DNA, 1744 bp, Arabidopsis thaliana
ttaattaaatggctgatgcatacgagccttatcatgttcttcaacaaagccggcgagacaaacttcgtattccatctctcgattcccacttccactttcaccctcctcctcctccttcctccggcggcggaggtggcgtctttcctctcgctgattccgatttcctcgcagccggtggctttcactccaacaacaacaacaaccacatatctaaccctagctacagtaatttcatgggatttctcggtggcccttcttcttcttcatccaccgcagtcgccgtcgccggagatcattcctttaacgccggactttcttccggagacgttcttgtcttcaaacccgagcctctatctctatctttgtcctctcaccctagactcgcttacgatctagtcgttcccggtgttgttaactccggattctgtagatctgccggtgaagccaacgccgccgccgtcaccatcgcgtctagaagctctggtcctctcggacctttcacgggctacgcgtcgattcttaaaggatcaaggttcttgaaaccagcacagatgcttcttgatgagttttgtaatgtgggtcgtgggatttacaccgacaaagtcatcgacgacgatgattcttctctgctttttgatccgacggttgagaatctctgcggtgtttctgatggcggcggaggagataatggaaagaaaaaatcaaaactcatctccatgctcgacgaggtttacaagaggtataagcaatactatgagcagctacaagctgtgatgggatcattcgaatgcgttgcaggtctcgggcacgctgctccgtacgctaacttagccttgaaagcattgtctaagcatttcaagtgtttgaagaatgctataacggaccagcttcaattcagccacaacaacaagatccaacaacaacaacaatgtggtcatccgatgaactctgagaataagactgattctttaagatttggaggaagtgatagttctagaggcttatgttctgctggtcaaagacatggatttcctgatcatcatgctcctgtttggagaccgcaccgtggcctacccgaacgtgctgttactgttctaagggcttggctcttcgatcatttcttgcatccttatccaacagatacagacaaactcatgctggctaagcagacaggtctctccagaaatcaggtatcgaattggttcataaacgcaagagttagggtttggaagccgatggtggaagagattcacatgctggagactcgacaatctcagagatcttcttcttcctcttggagagacgaacgtactagcaccaccgtcttccctgacaacagcaacaacaacccatcttcgtcctcggcacagcaaagacctaacaactcatctccgcctagacgggcacgaaacgacgacgttcatggcacaaacaacaacaacagctatgtaaacagtgggagcggcggcggtagtgcggttggtttctcgtatggaattgggtcgtcgaatgtgccggtgatgaatagcagcacaaacggaggagtgtctttgacgttagggcttcatcatcagattgggttaccggagccttttccgatgacaactgctcagaggtttgggcttgatggtggtagtggcgatggtggtggtgggtatgaagggcaaaatcgtcagtttgggagagattttattggtggtagtaatcatcagtttctacatgattttgtaggttgaggcgcgcc

SEQ ID NO: 184 - DNA, 1755 bp, Arabidopsis thaliana
ttaattaaatgtcagttttttcgaacatactcgatgagaactctcgcaacttgcgaaacgaaataccttgtgatgatggaattgcatctcccatcaacgacgacgacgaagagttcttgactaaaagtaatagggttcttttggtcggtgcagattccaattcgtctttgaagaatctcatgacacagtattcctatcaaggtatctaggtagattgagttagttttttttttttttatgtttctttgacgaattaaggttggttagggttttacgttactttttttttttcggtaattgaggggtttacattaattgcggtctatggttatgcttaatttcgtgtttcagtaacgaaatatgagagcggagaagaggccatggctttcttgatgaagaataagcatgagatcgatctagtgatttgggatttccatatgcccgatatcaatggactcgacgctctcaatatcattggtaaacagatggatttacccgtagtaagtaagtatatatcccttattaattataccaatattttttattgtattcttctcgatatatataacgtaacgtagtaagacattctctaatctttaatatgatccaatgtgaaattattcatgtcaagtcatgtctcatgaatacaagaaggaaacggtgatggaatcgattaagtacggtgcgtgtgactttcttgtgaagccggtgagcaaagaggtcattgcagttctatggcgacatgtttatcgaaaaaggatgtcaaaatctggtttagataaaccgggtgaatcaggtacggttgaatcagatccggacgaatacgacgatttagagcaagacaatctctatgagagcaacgaagaaggctccaaaaacacttgcgatcacaaagaagagaagtctccgaccaagaaaccgcggatgcaatggactcctgaacttcaccacaaatttgaagtagccgtcgaaaaaatgggcagccttgagagtaattaattacactaattaatcttgcgtgaataagcaagttacttgattattatctgaccttttaattgcattttgcagaggcttttccaaagacgattctcaaatatatgcaagaagaattgaatgtccaggggctcactagaaacaacgtagccagtcatctccaggtaattttggatctttattctattttagggttttcttgtttcttagtggacaagaaaccagtaataagggctataacaatttaaaacgattccgatggcagaagtaccgtcaaagttccaaaaagacctgcactcctcaggagcctcaagaagattttgtctggggtaatgctgggccagatgtcactcttgcagcctctaaaacgctcctaagctcccatgctacaccatcgtatttgataaacaatcaagctgcgcctagaggatcatatttcatgaacaatatcccgtatccatcaaccagttgcctgccagtgaacaacaacaactgcttcatgaccaacccttccacttatattgaccaattccagcaccagctgcagcagcagcagcaacatcaacagtaccagtctactctaaatagtatatctgccatgctaaccaagcaagaatctagacacgtgccatcatcagccatggaaaattccgagccgctcatgatctataattcaaatctacctttcggtatcgacgagtgtttcccacctgcaggattcaacattttcgatcagattggtcacaattgaggcgcgcc

SEQ ID NO: 185 - DNA, 1452 bp, Arabidopsis thaliana
tctgattgattcaggtttggcttgttgaatcagtggagtgtttttttataatttgaaatcatgcatagagcttcttctaagcacactaatgcgaagaaagaagcaatctctacttcgaaaattcgagataataatgtgagagtcactagatcaagagctaaggccttaggagtgtcgaattctccatcaaaacccgcttttaaacatgaaacgaagcgtgttgctagaccgagtaataaacgaatggcatcggataatatcacagtttgtaatcagaaaagacgagcggtgctcaaggatgtgactaacactttggcagaaagtataatttctacagaaggcaatgttaagcaggcttgcaagcgaggtggtaaagaaactaagcaaatagaagaagatggtttggtagatgtggatggcgaaaaatctaaactagcagaagatttgtcaaagattagaatggttgaatctttagatgcatctgcttcaaagcaattagtggattgtgcagaagaagacagatctgatgtcacagattgtgttcagattgtagatatagattcaggtgtccaagatcctcagttttgtagcttatatgctgcaagtatatatgacagcattaatgttgcagagcttgaacaaagaccttcaactagctatatggtgcaagtgcagcgagatatcgatccaacgatgcgcggaattctgattgattggctcgtggaggtctctgaagagtacaagttggtttcagatacactttaccttaccgtgaatctaattgatcggttcatgtctcataattacattgaaaagcagaagctccagctacttggtatcacttgcatgttaatagcctccaaatacgaagagattagtgcaccgcggttggaggagttttgcttcattacagacaatacatacacaagactagaagtactaagtatggagattaaagttttaaactctcttcattttcggttatcagttcccaccaccaaaacgtttctcaggcggttcattcgcgccgctcaagcgtctgataaggttcctctcattgaaatggagtacttagccaactatttcgcggaactaactctcacagaatatactttcctaaggttccttccatccctaattgccgcttcagcggttttcttagcaagatggacactcgaccaatctaaccatccttggaaccaaactctacaacactatacaagatatgaaacatccgctctaaaaaacacggtacttgcaatggaggagttgcagctcaacaccagtggaagcactcttatcgctatacacaccaaatacaaccaacaaaagtttaaaagagtggcaacattaacatctcctgaacgtgtgaacacactcttctcaagatgaaaccgcagattttctgattctcctgatatgaccaagtcagcacaactctctggcttcagc

SEQ ID NO: 186 - DNA, 1475 bp, Arabidopsis thaliana
gtttcttgtttgttgattaacccttaattaaagaatgtctaattatcaaggggatgatgctgagtacatggaagatgtggatgatgaaatggatgaggatgatttagatgaggattttcgtggggatgatatggctgcctctgattccgatgtcgatgagtttgactactctaataataaaatagctgacacttcagctgaccaagcccggaaagggaaagacatccaggggattccttgggacaggcttagtattacgagagagacatacagacaaactagactagaacagtataaaaattatgaaaatgtccctaactctggggaatcttcagggaaagattgcatggccacacagaaaggggctcttttttatgatttctggcggaatacaagatctatcaaatcaagtattcttcatttccagttgaggaatttggtttgggcaacttctaagcacgatgtctaccttatgtcacaatatttggtgagccactattctactttgacatccggaaagcatgatgttctcaatgttcaaggtcatgtttccccatctgagaaacatcctggaagtttgttggaggggtttacaaagactcaagtgagtacactcgcagtgagagataaatttttagttgccggtggatttcaaggagaacttatatgcaagcatcttgatagacctggtgtgagcttttgttcacgtactacttatgatgataatgctataaccaatgctattgagatttataacaaacccagtggggcacttcattttactgcgtcgaataatgattgtggagtcagagattttgatatggagagataccagcttgttaaccagtttcgctttccatggccggtgaatcacacatctttaagtcctgatggtaaattgttgacgattgtgggagacaaccctgaaagccttctggtagaccccaacactggaaagacactggcaacgctatcaggacatctggacttttcctttgcatcagcatggcacccagatggattcacgttctccacaggtaaccaggacaagacctgccgggtttgggacattcgtaacctgtcaaaatctgttgctgtcttgaggggtaaccttggagcaatccgatccattcgctacacatctgatgggaagtacatggccatggctgagccggctgactttgtccatgtgtatgatgtctcaaacgggtatgaaacggagcaagagatcgacttctttggggagatctcgggaatatcatttagccccgacacagaagcactcttcataggcgtttgggaccgcacttacggaagtctaattgagtatagccggcgccacaactactcctaccttgattcatttctatgatcggcgcgcccaaaattggagctctgcagagctttcgttcgtatcatcggtttcgacaacgttcgtcaagttcaatgcatcagtttcattgcgcacacaccag

SEQ ID NO: 187 - DNA, 1101 bp, Arabidopsis thaliana
attagttttcaacttttcatggagtcttcggttttcgactttggatcggagtcggggaacatgaatttcgacgagaccgtgccactgagccaacgattggagtggtcagacgtggtcccattgactcaggacgatggtccgaatccagtggtgccaattgcctacaaggaagagttccgcgagactatggattacttccgtgcgatttacttttccgacgagcgatctcctcgcgcactacgactcacggaagaaaccctcctcttaaactccggcaactacacagtgtggcatttcaggcgcctagtactcgaggcccttaatcacgacttgtttgaagaactcgagttcatcgaacgcattgctgaggataactctaagaactaccaactgtggcatcatcggcgatgggttgcagagaaactgggtcctgatgttgcagggagagaacttgaatttacccgtagagtactttcacttgatgccaaacattatcatgcttggtcacataggcagtggacactacgggcattaggaggatgggaagatgagctcgattactgtcacgagctccttgaagctgacgtctttaacaattccgcctggaatcagaggtattatgtcatcacccaatctcctttgttgggaggcctagaagccatgagagaatctgaagtaagctacacaatcaaagccattttaaccaatcctgcaaacgagagctcatggcgatacctaaaagctctttacaaagacgacaaagaatcctggattagtgatccaagtgtttcctcagtctgtttgaatgttctatcccgcacagattgcttccatggattcgctctgagcacccttttggatcttctatgtgatggactgagaccaaccaacgagcataaagactcagtgagagctctagctaatgaagaaccagagactaacttggccaatttggtgtgtactattcttggtcgtgtagatcctgtaagagctaactattgggcatggaggaagagcaagattacagtggcagcaatttgaatatgtgacgccccaaaatcacacttgaaaaagacttgattattagtttttacgtatgta

SEQ ID NO: 188 - DNA, 939 bp, Arabidopsis thaliana
atggttggaccagtaagacctcaaatcgtacttttcggttcttcaattgttcaatatagcttcactgatcgtggttggggtgccactctcgctgacctctactctcgcacggctgatatcattcttcgtggatatgctggttggaattctaggtttgccttgaaggttcttcaccaagtattcccaaaggatgctgtgatacaaccttctttggtgatagtctatttcggtgggaatgattcaactcatcctcatccttcaggtcatggccctcatgttcctttatctgaattcatcgaaaacatgaggaagattggtgaacatcttttgagcctttctgataaaactcgtgtcattttcctcactccgccaccaatgaatgagaaacagatcgagatagtttttggagatgcaataaaaggccggagtaacgagttgtgccgtccatatgcagaagagttgttaaatctatgcagagagatcaatgtgaaaggtatcgatatttggaccgcgatacagcagcaagatgattggttgaacagctgcttcacagatgggatccatttcactgcgaaggcaagtgagattgttgttaaggagatattgaaggtactgagaggagcggattggaaaccaagtctttactggaaatcattaccggttgaatttccatttgattttgatgctccaaactctataagccttcatgacctagagttaaccagaaacaaccattttgagtcaccgcaccttgtaagcctttgtgaacaagagttaaccagaaacgagcagctggagccgccacaccctgtaagcctttgtgaccatgagttaacccgaaacgagcagctggagccgccacaccctgtaagcctttgtgaccatgagttaacccaaaacgagcagctggagccaccacagcctacggcgcgcttgtaa

SEQ ID NO: 189 - DNA, 1054 bp, Arabidopsis thaliana
ttaattaaatgttcatcgccgtcgaagtttctccggtaatggaagacatcacacggcagagcaaaaaaacttcggttgagaatgaaaccggcgatgatcagtcagcaacatcagtagtccttaaagctaaacgcaaacgccgatcgcaaccacgagacgctccaccccaacgtagctccgtccatagaggcgtcacaaggcatcgatggactggaaggtacgaagcacatttgtgggataagaatagttggaacgaaactcagaccaagaaaggaagacaagtatatttaggggcatatgacgaggaagatgcagcagcacgtgcctacaacttagcagcattgaaatattggggacgagacaccatcttgaacttccctttgtgtaattatgaagaagacatcaaagaaatggaaagccagtcaaaggaagagtatattggatctttgagaagaaaaagtagtgggttttcacgaggtgtatcaaaatacagaggcgttgcaaagcatcaccacaatgggagatgggaagctcgaatcggaagagtgtttggcaataaatatttataccttggaacttacgcgacgcaagaagaagcagctatagcgtacgatatcgcagctatcgagtaccgtggactcaacgccgttactaacttcgacatcagccgttatctgaaactcccggtgccggagaaccctatcgataccgcgaataatctcctcgagagtccgcattctgatcttagcccatttataaaacctaaccacgagtctgacttatcacagagtcaatcttcgtcagaggacaacgatgatcggaaaacaaagctcttgaagtcgtcacctttagtggcagaggaggtaatcggaccatcgacgccacctgagattgctccgcctcgtcggagcttcccggaagatatccagacgtatttcgggtgtcaaaactccggcaagttaacggcggaggaagatgatgttatcttcggtgatttagattctttccttacgcctgatttctacagcgagttaaatgattgctaaatttaaat

SEQ ID NO: 190 - DNA, 1008 bp, Arabidopsis thaliana
atggctccagtgagtaaagctgataagaaggcagccgtagatgctgctgcgtggatgttcaatgtcgtcacttctgttggtatcatcattgttaataaagctttaatggcgacttatggttatagctttgctacaacgttaactggtttacatttcgctacaacgactctgatgacgcttgttttaagatgtcttggttacattcagccttctcatcttccgtttacggagcttttgagatttattctgtttgctaatttctccattgttggaatgaatgtcagtcttatgtggaactctgttggtttttatcagattgctaagctcagcatgattcctgtatcttgtttgttggaaatggttttcgataagattcgttattccagagatacaaagcttagcataggactggttcttgtgggtgttggtgtttgcactgttactgatgttagtgtaaacactaaaggatttgtagccgctttcgttgctgtgtggagtactgctctgcaacaatactatgtacattaccttcagcgcaagtactcgcttaactcattcaacctattgggacataccgctccagcccaagccgcaacattactggtagttggcccgtttcttgattattggctgacagaaaaaagagtagacatgtacgattacaacttggtttcagtgctgtttataaccctgtcgtgcacaatagcgattggaaccaacctaagccagttcatctgcatcggaagattcacagctgtatcgttccaagtgctgggacacatgaagacgatcctggtgctgataatgggcttcttcttctttggtagagaaggtcttaacttgcacgtggttgttggaatgataattgcagtactgggtatgatctggtacggtaatgcctcttcgaagccaggaggcaaagagcgacgaaactattctcttccaactacccgtcaacagaaactcggagctgcttcggattctgacgacaacgaagacaaagcctag

SEQ ID NO: 191 - DNA, 855 bp, Arabidopsis thaliana
atgcagggtttggcggcgaccaccaccaaccgtggctctctcaccttcctcgctccgaggaaccatagtccaatttcaaagaaatttgtgaatccaagagtgttctttcccaacgttgattcatccgcaaaattaagattatcagctagctcaatttcacggagatgtccacgagagattgctcctctttcagcaactgcatctgtggactttgcagcagcagcaacatcatccaaccagctctttgctaatggcttgccaccattagctcctggtttgagaagacaccggagaccgatagagcctgcaagagtggctaaagatgacttctttaaaatcaaactgcctaaaatcgcagagagacctgaatggtggtggaggacgttagcttgtgttccttatttgatatccctccaaatatctgatgttggtttctatgtccaaccttttctcgaaaagcacgacgctattggggacatgatatatttcatcccgggagcgataaacagatggccgacatggttcttcatggtgtactgctacttgggttatatgtgggtggtgaagaacaaagagctgcctcattacttgaggtttcacatgatgatgggtatgcttcttgaaacagctcttcaggtcatatggtgcactagcaatttcttcccgctgattcatttcaaaggacggttcggaatgtattattggatggccatcggattcacctacatatgtctgcttctcgaatgcatacggtgcgctcttgctggagtctatgctcagattcctttcatgacagatgctgcttccattcacaccctcttcaacttgggaggttttcagagaccactcaggtga

SEQ ID NO: 192 - DNA, 1188 bp, Arabidopsis thaliana
atggcgtctgagaatctgaatgacaagatctctgtttttaagaaactcaaagccaaatcagataataagatttgttttgattgcaatgcgaagaacccaacatgggcttccgttacttacgggatctttctctgcatcgattgctcagctgttcatcggagtcttggcgtccacattagcttcgtcaggtcaaccaatttagattcatggagctcagagcaattgaaaatgatgatatatggaggaaacaacagggcacaagtctttttcaaacagtacggatggagcgatggaggtaaaaccgaggctaagtatacctcaagagctgctgatttgtataaacagatacttgctaaagaagttgctaaaagcaaggctgaggaagaattggatttgcctccatctcctcctgattcaacacaagtgcctaatggactctccagcatcaaaaccagtgaagctcttaaagagagtaatactctaaagcagcaagaaaagcctgatgttgttcccgtctcaccaagaatttctcgcagcgttaagaaacctcttggtgctaagaagacaggcaaaactggcggacttggcgcccggaagctaactactaagtcgagtgggactctttatgatcaaaagccagaggaatctgttattatacaagcgacatcaccagtttcagctaaatcagccaggtcatcgttttcctctcgttttgattatgcggacaatgttcaaaacagggaagattacatgagccctcaagtcgttagtcatgtagctccaccaaaatcatcaggcttctttgaggaagagttggagatgaacggaggcaggtttcagaagaaaccaatcacaagttcctcaaaactgcaaattcaagaaacagacgaagcacggaagaaattcacaaacgccaaatcaatatcctctgctcagtactttggaaatgacaacaactctgctgatcttgaggccaaaagttcattgaagaagttttctggttcatcagcaatctctagtgctgacctgtttggagacggtgatggagatttccctcttgatctcactgcgggtgatcttctcaaccgcctatctctccaggcacaacaagacatatcatcattgaagaacatggcagaggagacaaagaagaagcttggctctgttgcttccagcttatgggtttga

SEQ ID NO: 193 - DNA, 1389 bp, Arabidopsis thaliana
atggcaccagctcaaaaccaaatcacttctaaacacgtggcagtgatcggagccggaccagccggtctcataacgtctagggagctccgtcgtgaaggtcacagtgtagttgtgtttgaacgggagaaacaagtcggtggtctatgggtttacacacctaaatccgattccgatccacttagccttgaccccacccgatccaaagtccactcgagcatctacgagtctctccgaaccaatgtcccgagagaaagtatgggtgtcagggacttcccgtttttgccacgtttcgatgacgagtcaagagacgcgagacgttatccaaatcatagggaagttcttgcgtatattcaagactttgctagagagtttaaaatagaggagatgatccggttcgagaccgaggtggttcgcgttgaaccggttgacaacgggaactggagggtccagtcgaaaaactccggcgggttcttggaagatgagatctatgacgccgtcgtggtttgcaatggtcactatacagaaccaaatattgctcatattcctggtataaaatcgtggccaggaaagcagattcatagccacaactatagagttcctgatccattcgaaaacgaggtggtggtggtgataggaaattttgcgagtggtgccgatattagtagggacatagctaaggtcgcaaaagaagtccacattgcgtctagagcaagggaaccccacacatacgagaagatttccgttccccaaaacaatctatggatgcattccgaaatcgacaccacccatgaggatgggtcgattgttttcaaaaacgggaaggtgatatttgctgatagcattgtgtattgcaccgggtacaagtataacttcccatttcttgaaacaaatggctatttgcgcattgatgaaaaacgtgttgaacctctatacaagcatgtctttccaccagcgcttgcccctggacttgctttcgttggtttgccagcaatggggatagtatttgttatgtttgaaatccaaagcaaatgggtggcagcagtcttgtcaggacgagttacacttccctcaacagataagatgatggaagatattaatgcgtggtatgcgtcgcttgatgccttaggtattcccaagagacatactcatacgataggtagaattcagagtgagtacctcaattgggtcgcgaaagaatctggttgtgaactcgtagaacgttggagaggtcaagaagttgacggcggatacctgagacttgtggcccatccagaaacttaccgtgatgaatgggacgacgatgaactcatagaagaagcgtacaatgatttttctaggaagaagttgattagtgttgatccttcttattacctcgaaaatggaagatga

SEQ ID NO: 194 - DNA, 3202 bp, Arabidopsis thaliana
ttaattaaatgtctgcaaaacttctatataacttgtcagatgagaatccaaatctgaataaacagtttggatgcatgaatgggatctttcaagtgttttaccggcaacattgtcccgcgacaccagtcaccgtctccggcggcgcagagaagtctttgcctccaggtaacttaaactctctctctcttctaaatctcagttgagtgtttaggaccacaaagaaacagagtagtttcactagaaccaaaaatatggttataggcttatagctaagaacaaggggttaacttttgcaggggaaagaagaggtagcgtcggtgaaaccaacatggaaagtgataaagaaacggtaagaatctgaactcagtttatttactcgtctctaaagaatgagaattcaggaaacacaaactgaaagaaacagagacttttatgggattgcaggagaggagtagtaccaaaaagaagaagtctgcagcaaaagagaagcatagagtctcttttgaatcatcttcaagaccttcattttcgtcttctccacgctcctctagcttctcgtctgcagaagtcagtaccacagcttctcaatttgaccagcctggtgagaatctgatcagagaacagcccaatggtggcttgatgatgccgtatgatctaaaggagcttgtcaaaggctctattaatagagaaattagaactagaggtgaagaagcatccttcactcagcagcagcagcccatttcagctcgaagtagcatgttgcttctcaaagaatcatcattgcgttcaccatgtcggagttctaatgagtggaatgaaggaagaggagcggctatgaagtttaaggaaagtcaccggctttcttatgatgagagggagatgagaaacaacggattcagggtgggttcaaagttgaaagagacaccgaggttgtcgttggatagtagatccaattcctttaggagtccgagagcagatgctgcgagatcgagttgtccagaggaacccgcaacaatgactcacaggagatcgagttctagtgttgttgccaaattgatgggtcttgaagtcattgcagacaattctgatactgaacagagaagagagaaccggttttgtgactctccaaggccaatgtcccgagtggaaccaacagctctacagagatctagaagcgtagattcgatcaagaggatacctgcttcagctgcttctaagtttccaatggaaccagctccatggaagcaaatgaaagcaggagactctgcactgacggtatatggtgaaattcagaagcggcttacgcagttggagttcaaaaagtcgggaaaagatctcagagctcttaagcaaatacttgaggctatggagaaaacgcagcagctgatagatgaaagcagggacgacggtactctgagtacaaccactcttatgcagagaactcacaagccagtttcagctgcaacaagtccagccaggaacttcaaatcttcatcgatcgttgttatgaaatctgcagctccagtttccacctctccgctgccacagaatgtcaccctaccaaatgtcaaggttggaaactctagacaaacccggaaagtcacctcagggaagcagaacgcaatggatttaaccccaaggccaggcctttacaagggccaactcgattccacgaagagcaatagcccaaaaacagtacggtcgaggcaagctttggctgcagatgctggttccatgaccaagtcaggtaggagccaacagcacagtgtcagcccaagaacacagccaaaaaagctcgggttcgagaaacagactcgacccacaactccaaaatcagagccaggcaaaaggcaactcggaaggcagcaaacagaggtagcctctccgagaagaaaacagatgataaaacctcacagtactcttcagcaacctgatgaccgattaagcgatgcaaggagcgacttgaggagtctaaggtctgacagcaacataagcttgggatcgaatgttgacatcgaggttacaagcagacataggctggagaggaactgtgacttcccagagcagcacacccccaaacaaagggtactaaatagatctctatctcacgtatcttcacttctcaagttaattcattagtactcaataaactgaatctcttctgtctaccaatgtagagtccagactttggaatcaaacaagacagaccgtccctaaaacctctgaaagttaccgttgaacaaccgagccctgtttcagttcttgatgcagtcttcgacgaagaggattcaccgtcccctgtgaggaagatatcccttagttttaaaggtgaggcacttagaaaagaacattcagactgattagtgactcattcatatatactaacaattacgtgttcacgatgcttattaactacatgtattcacaaggttttggttagtataaagttctcaccgtgtttttgttctcttgccacagaggaggatgccttacgttctgaagaatctgagtggataaacaagcctaccagcttctgcagatccgtaccatttcctcagagtaaccggggaccaatgaagccaagttctgatcattttgaatgctcacctgaagaaggtgcagacttcaaaagcggcaaccacaagtacatcttagagatattgttggcctcagggattctaagagatcttgaatacagcatgataagctttcagctgcaccaaacgcgcctcccgatcaaccctggactgttctttatcctggaacagaacaaggccagtaatgtgactctaccggacaacaaacacagaggtagaggattcagacaacagcagacaaacccaacagagacaatcaggagaaaactcgtcttcgacaccgttaacgagattttagctcggaagttcactgcagaaggctgcatcaaaccacgtttaatcgcaaatccacttaaaaaattggagaaaatatcaaaagaggagcaacttctgcagactctgtgttcagagattgataggttacaacaaaacaactcaaactgtatcttggaggacgacgaggaagacatcatatgggaggacctgcaaagtcaaagcatgaacttgaaggagtttgaaggagagactccaggaattgtgttagatattgagagaatgattttcagagacttggttaatgaagtttgcttctgctaaggcgcgcc

SEQ ID NO: 195 - DNA, 906 bp, Arabidopsis thaliana
atggatattagccggcgtgaaagtaagacggaagcaagtagtagagagaaacggatttatgagaaagatcagatgaatcaagagtcttttattgagggattggcagaggagtttcggttgccaattactcatagggttactgaaaatgttgatttggaggatgtggagcaagcttcgttagatgtaaagatatcgtcgtcgaatgtcgggtttcgtcttcttcagaaaatgggttggaaaggaaaaggtcttggaaagcaagagcaaggtataacggagcctataaagtccggtataagagatcgaagactcggtttagggaaacaagaagaagatgattatttcactgcagaggaaaacatccagcggaagaaacttgatatcgagattgaggagactgaggaaatcgcaaagaaacgggaggtcctagcagaacgtgagcagaagatccagagcgatgttaaagaaatccgtaaagtcttctattgtgaactatgcagcaaacagtatagaacggtgatggagtttgaaggtcacttgagctcatacgatcacaaccataagaagcgattcaaagaaatgaaagaaatgcacggagcaagcggccgcgatgagaggaagaaacgagagcagcaacgtcaagagagggagatgactaaaatggctgatgctcgcaaacaacatcagatgcaacagagccagcaagaagtcccagagaatgtcccggtttctgcaccggctaagaccacggttgcaccacttgctgtccaagatcagcgaaaaacattgaagtttggcttctcttctaaaagcggcattatatcaaagagccaacccacaagcagcatcaagaagccgaaagtagcaatcgcgtccgttttcgggaacgatagcgacgaagattaa

SEQ ID NO: 196 - DNA, 1172 bp, Glycine max
ttaattaaactgaactctcttcactgaaacgacacacacaaaaaaaagctttagtttaggatgacccaagtgaggaacaagcaagtggttctaagagattatgtcaccggattccctaaagaatccgacatgaacattgttgaaggcaccataatattgaaggttccagaaggttccaatgatgtccttctaaaaaatctctacttgtcatgtgatccatacatgcgactcctcatggccaaggaccgttctttcggagatggctccttcacccttgcctctccattgaaaggatatggtgtgtctcaagtgctggaatctggacgtccagattacaagaaaggtgatttagtgtgggggattactaaatgggaagagtatagcttggtcccctcatctctcatacatttcaaaattgagcacactgatgtcccactttcctactacactggaattcttggtatgccaggaatgactgcttatgctggtttctttgaggtaggttctcccaaaaaaggagacactgttttcgtttcagctgcctctggtgctgttggtcaacttgttggccaatttgctaagttgactggttgttatgttgttggaagtgctggaagtaaagagaaggtggatctgctgaagaataaattaggatttgatgaagcttttaactacaaagaagagccagacctcaatgcagctttgaaaaggtactttccagaaggcattgacatttactttgagaatgttgggggcaagacacttgatgcagtactcccaaacatgaaatttcatggccgcatacctgtctgtggaatgatctcgcagtacaatcttactcagttcgatggtgtaacaaatttggcaaatctcatatttaagcgggttaaaatggaaggttttattgcaactgatttctatcatttatatccaaaattcttggagtttgtcctgcctcatatcagagaagggaaggttgtgtatgtggaagacattgctgagggccttgagaagggccctgcagccttggttggcctctataccggtcgcaatgttggtaaacaagtggttgttgttactcacgagtaaaattatataaatatattgttattctctaagctttaattccgaattttcaattttctgttggatattgaaccttgcatttaaat

SEQ ID NO: 197 - DNA, 489 bp, Arabidopsis thaliana
atggccaccggagatgggaaatcggtgatggtcgtcggagttgacgacagcgagcagagcacttacgccttggagtggacgctcgatcgtttcttcgctccttacgctcccaattatccttttaagctcttcatcgtccacgccaaacctaacgccgtctccgccgttggtctcgctggtcccggaactgcggaggttgtaccttatgttgatgctgatctgaagcataccgctgctaaggttgtcgagaaagccaaagcaatttgtcagagcagatcggttcatggcgcggtgatcgaagttttcgaaggtgatgcaaggaatatcctatgtgaagttgtagataagcatcatgcttctattcttgttgtgggaagccatggatatggagctatcaagagggcggttctcgggagtacgagtgactactgcgctcatcatgctcattgctcggtgatgatcgtgaagaagcctaagatcaaggtctga

SEQ ID NO: 198 - DNA, 648 bp, Arabidopsis thaliana
atgggaatggtttttggtaaaatcgctgtagagactcctaaatacacggtgactaaatccggtgacggttatgagatccgtgaatatccaccagcggttgcggcggaggttacatacgatgcgtcggagttcaaaggtgataaagacggaggctttcagcttttggctaagtacataggtgtgtttggcaaaccggagaatgagaaaccggagaaaattgctatgactgcaccggtgatcactaaggaaggtgagaagattgcgatgactgctccggtgattactaaggagagtgagaagattgagatgacttctccggttgtaactaaggaaggtggtggagaaggaaggaagaagttggtgacgatgcagtttttgttgccgtcgatgtataagaaggcggaggaggcaccacgtccaacggatgagagggttgtgattaaggaggaaggagggaggaagtatggtgtgattaagtttagtggtatagcgtcggagagtgtggtgagtgagaaggtgaagaagctgagtagtcatcttgagaaagatgggtttaagatcaccggagatttcgttcttgctaggtataatcctccatggacgttaccaccgtttaggaccaatgaggtcatgattcctgttgaatga

SEQ ID NO: 199 - DNA, 531 bp, Arabidopsis thaliana
atggcgtccggtgatgttgagtatcggtgcttcgttggaggtctagcatgggccactgatgacagagctcttgagactgccttcgctcaatacggcgacgttattgattccaagatcattaacgatcgtgagactggaagatcaaggggattcggattcgtcaccttcaaggatgagaaagccatgaaggatgcgattgagggaatgaacggacaagatctcgatggccgtagcatcactgttaacgaggctcagtcacgaggaagcggtggcggcggaggccaccgtggaggtggtggcggtggataccgcagcggcggtggtggaggttactccggtggaggtggtagctacggaggtggcggcggtagacgcgagggtggaggaggatacagcggcggcggcggcggttactcctcaagaggtggtggtggcggaagctacggtggtggaagacgtgagggaggaggaggatacggtggtggtgaaggaggaggttacggaggaagcggtggtggtggaggatggtaa

SEQ ID NO: 200 - DNA, 1098 bp, Arabidopsis thaliana
atgagttgctttgggtgttgtggggaggatgatgatatgcataaaactgctgattatggaggtcgtcataaccaagccaaacactttcctccaggaaatgatgcaaggcaccaccaagcctctgaaactgcacagaagggtcctccagttgtgaagttgcagcctattgaagtacctattatcccttttagtgaactcaaagaagcaactgatgattttggatcgaattctctcatcggtgaaggctcttatggaagagtatactacggggtattaaacaatgatctgccttcagcgattaaaaagttggattctaacaaacagcctgacaatgaattccttgctcaggtttccatggtttctaggcttaaacatgataactttgttcaacttcttggctactgtgttgatgggaattcacggatactttcttatgaatttgccaataatggatctcttcatgatattcttcatgggagaaaaggtgtgaaaggagcacagccaggtcctgtcttgtcgtggtatcaacgagtcaaaattgcagttggagctgcaagaggccttgagtacttgcatgaaaaagctaatcctcacatcattcaccgtgacattaaatccagcaatgtcctcctctttgaagatgatgttgccaaaattgctgactttgatctctctaatcaagctcctgatatggcagctcgccttcattccacccgagttcttgggacttttggttaccatgcccctgaatatgcaatgaccgggcagttaaatgccaagagtgatgtctacagctttggagttgtcttactcgaacttcttacaggtcgaaagcctgttgatcatagactacccagaggccagcaaagtttagtcacatgggctacacctaaactgagtgaagacaaggttaaacaatgcgttgatgcaagactcggtggcgattaccctccaaaagctgttgctaagttagccgcggttgctgcgttgtgtgtgcaatatgaagcagattttaggccgaatatgagtatcgttgtcaaagctcttcaacctttgttgaatgctcgagccgtagctccaggggaaggagtacattag

SEQ ID NO: 201 - DNA, 1002 bp, Arabidopsis thaliana
atggcaacgatttcgtcaactctactcttaaattcttctagatcagctttaccactaagattcccaaaattctcgggattttcttcttcctctccattcgctagatcttacagatttggacgacgtaatctggaaccactttccaacggaatgctttcgtcgggaagtagagccgacggtgctacggcggcggctgcatcgatggaaggagtgatgacggaggcgatgaaactgattcaatcggcgtcaccaacttggaaatcagctgtggctaacaatttattgatttttgttctcggttcaccgcttcttgttaccggattgtccgcttctgggatcgccgccgcgtttttgcttggtactttaacttggagagcttatggctctgctggtttcctcttagtcgctgcttacttcgtcataggaacagcggcaacgaaggttaaaatgacgcaaaaggaagcacaaggtgtggccgaaaagagaaagggtagaagaggaccacgcagtgtgattggttcaagtgctgctggttgtgtctgtgcttttctttcaatatatcaagtgggaggagcagctttttcccagcttttccggcttggttttgtttccagtttctgcactaaagtatctgacactgtctcgagcgagataggcaaagcttatggaaaaacaacgtatttagctacgacatttaagattgtaccaagaggaacagagggagctatgagtcttgaaggaacattggctggacttttagcatcattttttcttgcatctgttggctgcttcctgggtcagataactcctccagaagcagctgtatgtgtactagcttcccagattgccaatcttggagagagcataataggtgcttcttttcaagacaaagaaggattcaaatggctaaacaatgatgtagtcaacgtgatcaacataagcttgggaagcattgtggcgattttgatgcaacagtttatactccagaactgggtcaagtaa

SEQ ID NO: 202 - DNA, 1078 bp, Arabidopsis thaliana
atggcgagaatgagtttgatgatcatgatgattatggttgctgtgaccatgattaacattgctaagagtgatcccattgcaccatgttacttcatatttggtgactctttggttgataatggcaacaataatcagcttcagtcattagctagagctaattactttccttacggtattgactttgctgccggtccaaccggtcggtttagcaacggcttaaccactgtcgatgttatcgctcagcttttgggtttcgaggactacattacaccttacgcttctgcaagaggacaagacattctccgaggagttaactatgcttccgctgctgccggaatccgagacgaaaccggcagacaattgggaggtcgaatagcatttgcagggcaagtagcaaatcacgtgaacactgtgtcacaagtagtgaacatacttggtgatcaaaacgaagcctcgaattacctcagcaaatgcatttactctatcggattaggcagtaacgattatcttaacaactacttcatgcctactttttactctaccggtaaccagttctcccccgaatcctatgccgacgatctcgttgcccgttacaccgaacaactcagggtactgtataccaatggagcgaggaagtttgcgttgataggagtcggggcaatcggttgcagcccgaacgagctagctcaaaacagcagagacggaagaacgtgtgacgaaagaatcaactcagcgaacagaatctttaacagcaaactcatatctatagtcgacgcttttaaccagaacacaccagatgcaaaattcacttacatcaacgcttatggcatcttccaagacattattacaaaccctgctcgctacgggtttagagtgacaaatgcaggatgttgtggagttgggaggaacaatggacagataacttgtcttccaggtcaagcaccatgtctaaataggaatgagtatgtgttttgggatgcgtttcatcccggtgaagctgcgaatattgttattggaagacgatcttttaagcgagaagctgcttctgatgctcatccttatgatattcagcagctag

SEQ ID NO: 203 - DNA, 432 bp, Arabidopsis thaliana
atgacggaggcgatgataagaaataagccaggaatggcgagtgtgaaggatatgccgctgcttcaggatggtccgccaccgggtgggttcgcaccggtccgatatgcccgccggatatccaatacgggtcctagtgcaatggccatgttccttgccgtttctggtgcctttgcttggggaatgtaccaggtcggccagggaaacaaaatccgcagggcattgaaggaagagaaatatgctgctcgtagaacaatacttcccattcttcaagcagaagaagatgaaaggtttgtgtctgagtggaaaaagtatctggaatatgaggctgatgtaatgaaagatgttccgggatggaaagttggcgagaatgtgtacaattctggtcgctggatgcctccggctactggggaactccgtcctgatgtgtggtga

SEQ ID NO: 204 - DNA, 915 bp, Arabidopsis thaliana
atgagttctccgggaacgagtatgttcaccaatttcactaagctctgcaaaggacttgccctggtacttgtggtgggacacctcgtggttcagttcattcccgctaccgtcccataccttgctctgattccggcgaggactattccttttgcctggaatctgataacaagcggctattttgaactctcagtatatggggttgtcttcagcaccgtttctctcctttttatgggaaagttcctggaacctgtctggggttccacggagttccttaagttcatctttgtggtgaacttccttacgtatctctgtgttttcgttacagccattgccttatactacataacgaggctggaagtttacctatatatgccctttgctggttttcatggtgtcttggcaggccttcttgtagggataaagcagataatacctgaccaggagatattgctgttaaagataaaagcaaagtggttgccctcaattatgctaattttgtcaatagcctcaagcttcttcacactagattcagcagcatatcttcccactttgatatttggtacatatatgggctggttatacctcaggtacctacagaggagaccagaaacaaagctcagaggtgatccaagtgatgactttgccttctctactttctttcctgaacttctcaggccagtaattgaccccattgccttaatctttcaccggatgctttgtggaagatcaaatgccaccagtgaagaccatgattattctaccagtggtgcaccattgccaggttctgattctgctgaagcatccaggaggagagaaagaggggcaagagctctagaggagagactaggaacggaaagattggttcctgcaaggaacaaagatgaattgcagagtgatggtttagataacgtataa

SEQ ID NO: 205 - DNA, 2270 bp, Arabidopsis thaliana
atggaagaaaaagatgtgtatacgcaagatggaactgttgatattcacaaaaatcctgcaaacaaggagaaaaccggaaattggaaagcttgccgcttcattctcggtaacgttctaatcgtttcaccaatctttttcttcattattgccgtataggacctggaccagcttaagtaatggcctctcgtgtcccctgttttttaaggtccactaaaaacatttacatgtaaataataaatgtaatgattaaaaagagattatatacgattaaaagcaaattgaatgatagagaacaaataaaatttaaaatattattggaaatgtttagttttgtagggtgatcactatgaaaaaagagttataaacctaaaatctgctctgttttcttcaaaaaaattgtctaaataaagaaagggccattatatttttttattatatagcttgggccctgattggatctatccatataagattaaccagttttatgtgttttgtgtaggaaatgagtgctgtgaaagattggcctactatggcatgggcactaaccttgtgaattatcttgagagccgtctgaatcaaggcaatgctacggctgcaaataacgtcacgaattggtctggaacatgttatataactcctttgattggagcctttatagctgatgcttaccttggacgatattggactattgcaacttttgttttcatctatgtctccgtgagttttacttgtttcttatcttttggttaaaaatgtgaatcttttggttaaaactaattaagtttgttttttctcttgaagggtatgactcttttgacattatcagcttcagttcctggacttaaaccaggtaactgcaatgctgatacttgtcatccaaattctagtcagactgctgttttctttgtcgcgctttatatgattgctcttggaactggcggtataaagccgtgtgtttcgtcctttggagctgatcagtttgatgagaatgatgagaatgagaagatcaagaaaagttctttcttcaactggttttacttctccattaatgttggagctctcattgctgcaactgttctcgtctggatacaaatgaatgttggttggggatggggtttcggtgttccaacagtcgcgatggttatcgcggtttgctttttcttcttcggaagccgtttttacagacttcagagacctggagggagtccacttactaggatctttcaggttatagtagcggcttttcggaagataagtgttaaggttccagaggacaagtctctgctctttgaaactgcagatgatgagagtaacatcaaaggtagccggaaacttgtgcacacagataacttaaagtaagaaactaaagtttgaatctttatcctaacttcaaaaatactctgttttcaaatctaaagttttgaaaacatctcaggttttttgacaaggcagcggttgagagtcaatctgatagcatcaaagacggggaagtcaatccatggagactatgttctgttactcaagttgaagaacttaagtcaataatcacacttcttccagtttgggccacaggaatagtcttcgccacagtgtacagccaaatgagcacaatgtttgtgttacaaggaaacacaatggaccaacacatgggaaaaaactttgaaatcccatcagcttcactctcacttttcgacactgtcagtgtactcttctggactcctgtctatgaccagttcattatcccgctggcaagaaagttcacacgcaatgaacgaggcttcactcagcttcaacgtatgggtataggtcttgtggtctccatctttgccatgatcactgcaggagtcttggaggttgtcaggcttgattatgtcaaaactcacaatgcatatgaccaaaaacagatccatatgtcgatattctggcagataccgcagtatttacttatcggttgtgcagaagttttcacctttataggtcagcttgagtttttctatgatcaggctcctgatgccatgagaagtctctgctctgctttgtcgttgaccacggttgcgttggggaactatttgagcacagttcttgtgacggttgtgatgaagataacgaagaagaacggtaaaccgggttggataccggataacttgaaccgaggccatcttgattactttttctacttgttggcaactctcagtttcctcaacttcttagtgtacctctggatttcaaaacgctacaaatacaagaaagctgttggtcgagcacattga

SEQ ID NO: 206 - DNA, 804 bp, Agrobacterium tumefaciens
ttaattaaaggagacagaatggaactgaaacacaagaccgcgctcgtaacgggcgcgtgcggcggcatcggccgcgccgtggttgcggcgctggtggcgcaaggggcgagggtgatcgccttcgatcgcgatatcgaggctgtaacagcgctcgcgaaggggttcggcagtgcctgcgatccagtcgccgtcgatctcggtgatgcggcggcgctacaggccgtcatgagggatatagccggccgtttcaaggtcatcgacattctcgtcaacaatgccggtgtgctgtctccgcacaagctggccgcgaccacgctcgaagaatggcacaggctgatggccgtcaatctcgatgccgcgctgctgctgacgcaggccgtcgttcccgccatgaaggaaaaccgctgggggcgactgatcaacatctcctcctacgcctggaaatccggcggactgacggcgggtacggcctattcggtctcgaaatcggcactggtcggcctcacctactcctccgcccgtgaactcgcctccttcggcatcactgccaatgcggtcgcgccggcctatgtggtttcgccgatgatcatggagcaattgtcggaggaagatcgtcagcgccagcttgcagccattcccgtcggccgtttctgccagccggaagaggtcgcgcatgcggtgcgtttccttgcctcgccgctgtccggcttcatgaccggcactgtcgttgacatgaatggtggcctgcaattcggctgagatacggagataataacgtgaccaatcgactttcttcatttaaat

SEQ ID NO: 207 - DNA, 1107 bp, Arabidopsis thaliana
atggataaattgaagccaataatagcaatcatatcactccaatttggatatgcaggcatgtacatcattactatggtctccttcaagcatggcatgaaccattggatccttgctacttaccgacatgtcgtcgccacaattgtcatagctccttttgctctcattctcgagaggaaaataaggcctaagatgacatggccattgttccttaggattcttgcccttggattcctagaaccacttttggaccagaacttgtactacataggaatgaaagccacgtcagcaacgtatagttctgcctttgttaatgcacttcccgccattaccttcataatggctgtcattttcaggatagaaactgtaaatttgaagaagacacgaagtcttgcaaaagtgattggaacagcaataactgtgggaggagcaatggttatgacgttgtacaaaggtccagccattgagctctttaagactgctcatagctctttacacggcggctcctcgggcacctcctccgagaccactgatcagaattgggttaccggaactctagcggttatgggtagtatcaccacttgggcaggtttcttcattctacaatcgttcacgttgaaaaaatatccggctgagctttcgctagtgatgtggatttgtgccatgggaacggtcttaaacaccatcgcttcgctcataatggtgcgcgacgtaagcgcatggaaagtcggtatggactcgggcacacttgcggctgtttactccggagtggtttgttcgggtatggcgtattacatacaaagcattgtgattagggaacgaggtccggtttttacgacatcgtttagtcctatgtgcatgatcatcactgctttcctcggcgtgttagttttggctgaaaagattcaccttggaagtataatcggggcgatttttatcgtcttcgggctatatagcgttgtgtgggggaaagctaaggacgaagtgatatcggtggaagagaaaataggaatgcaggagctgccgatcaccaacacatcgacaaaagtggagggtggtggtattaccagtgaagtaaacgaaggtgtgactaacaatacccaagtgtaa

SEQ ID NO: 208 - DNA, 1800 bp, Arabidopsis thaliana
atggtttcagagacttggtttcgtaatctgtggaggtttccaaagaaacatgatggtcataaagataaggcggttctaggagtattagcgtttgaggttgcgagtttgttgtcgaagcttgttcatttgtggcagtcattaagtgataagaatgttgcaaggcttagggacgagattacacattccactggtataaagaagttagtttcagaagatgatgattttattgtgaggttaatacgtgatgaaatgatggagaacgttgagaatgtagcgaaagctgtggctaggcttgcgaggaaatgcaacgatcccaagttgaagtgctttgagaattgttttagtgatatgatgaagactggagctgacccttatggttggcagtttgggtggaagaaaatggataagaaagctaagaaaatggaacgtttcatatcatctaatgctagtctctaccaggagactgagattcttgctgatcttgaacagactttcaagagaatgaagagcaatgaatctgctactgacaatcttttggagtatcagaaaaaagttacatggaaaagacacgaagtgaagaatctgcgggatgtgtctctttggaaccgtacttatgactataccgtcattctcttggttagatcagttttcacaatccttagcaggactaaacatgtttttggcattagttacagagtggaagcaagtgatgttagctctgcagattctgattttattggccgcagccactccgtttctactattttaactcctgtatctcataaatctgagtctagtggtcttcctagatttgcttctggcccccttggaagatttaccggtccagcatcgggttcagctgctacaaggtccacgaagatgagtgatttcctttcgggttctctcagcgccgaatcacctaagtcaggtcctcttgttgcagaaaaacacaaacgtttcaagttttactctggtcagcttgggaagatcacctccaaatcaggaccacttatcggaatgggcaaaaacaacaagaagatggggcagaccccggaaaggccttcaatttcctcagtgaaaaagcaattgaaagccaaccgattaacacaggttggcccatttaaaggctgtatggtgtctcacgatgggattacgcctctcagcactagggcccggaatggagctaggaatagtagtgctgagcatcacattcttgaagataattctaactctgttcacgttgaaaacttgacacttccttcccgacccaagctgtcagatgctgctcctaatacccttggtaccgcttgcttagcattacactatgctaatgtcatcatcgtgatagagagatttgttgcgtctcctcacttgataggagatgatgcaagagacgacctttacaacatgttaccggcgagcgtgagaacatcgcttagagaaaggctaaaaccttactcgaaaaacttgagttcttccacagtttatgatccaggcctagcaagagaatggacagacgcaatggcgggtatcttggaatggttgggtccattagctcacaacatgataaaatggcaatctgagcggagttacgagcaccaaagcttggtttcaaggacgcacatagttcttgcacaaacccttttctttgcaaaccagcagaagacagaagccatcattaccgagcttctcgtaggcctcaattatgtctggagatttggcagagaactcaatgccaaggctcttcaggagtgtaccagtagtaaaacccttgagaaatgcttggacacagataactag

SEQ ID NO: 209 - DNA, 738 bp, Arabidopsis thaliana
atggggagtttagtgaaagcatattactgtaaccagatgcatcacaacagcatcatcccccactttcaccattacagaccttcaagccttcaaaaccctatctccctcttcgccatcacttctccctcctcctctgaacctccttctcctcctgttaaacatccccttcctcaattcggcggcggcggccacttcatcatccccaccatcgccgtcgctgcttccgcctggttcttcttccgtctacaccaataccctcctatcatcacctcccccgttgatctccacctcgatttggaagaagaaggcgctatcaaagagcttcctttggagagcaagcctggttacgttaaagctcttcacttctacaaaatcaagccaggtaccgtcttgaaactcttggacgttttcgactccgacagctacgactccttgaaagcccggattcgtttatccgccgagtggttagaaactgccaggagagaattggaggaggtggttgagagagaccctggtcgggtcatggagtattctcaggtggttgatgagctcatggagattctcagggacatggaggtttacattgataaatgccaaaaggacaacgtcaagggttacctcagatcctgcaaccgattgcttgctcgtgtcaggagaatggaagctcagattctcaatgtcctcaaagagtttcacgacgaccacgaccaaggaggaggaggaggagatacttattag

SEQ ID NO: 210 - DNA, 1414 bp, Arabidopsis thaliana
atggagacaactacaactcctctgctccccggtgatcgcagcagatgcgggtggctccgtcgccgtctccgcctcaaaaaccctctttcttctgaactctccggcgctgtcggtgatctcggcaccttcatccccatcgtccttacactaactctagtctccaatcttgatctctccaccactctcatcttcactggtttctacaacatcgccaccggtctcctctttgacatccctatgcccgtccagcccatgaaatccatcgccgctgtcgctgtctccgaatccccgcatctaactccttctcagattgccgccgctggtgcatccactgccgccacgctcctcctccttggcgccaccggagctatgtctttcctctacaacatcatccctctcccagttgtacgcggcgtccagctttctcaaggtcttcagttcgccttcaccgccatcaaatacgtcaggtttaattacgatactgccactctcaaaccctcttcttctcctcgtatttggcttggcctcgacggccttatcttggctctagctgctctgctcttcatcattttgtccaccggctctggcaacgacagagaagctgaagatggagatctcgccgagacttccagcaacgaaagccagtctcgccggaggagactgcgtcttctgtcttcgattccatctgcgctgatcgtgttcgcactcgggttagtgctctgtttcatacgtgatccatccattttcaaagaccttaaattcggtccctcgaagttccacattctgagaatcagttgggatgattggaaaatcgggtttctgagggcggcgattcctcagattccactctctgtactgaactcagtgatcgcagtttgtaaattatccaatgacttgtttgacaaggaactctctgcgactacagtctccatcagcgttggggtgatgaacttaatagggtgctggtttggcgctatgcccgtctgtcacggtgctggtgggttagctggtcagtatcggtttggggcaaggagtggattatccgttatttttctcggaatcgggaaactgattgtgggtctggtgtttggaaactcctttgtaaggattctgagtcagtttccgattggaattttaggggttctgttgctattcgcgggaatcgaactggcaatggcttccaaagacatgaactccaaagaagattccttcatcatgctggtctgcgccgctgtgtcgatgactggctcgagtgccgccttaggatttggttgtggagttgttctttacttgttactgaagctaagaacgttagactgttcttcagtaactctgttttcccggtcaagtgatgagtcgcaggtcgattccgaagccgctcctcgtgatgtctaagatggacttgccaaaatga

SEQ ID NO: 211 - DNA, 411 bp, Arabidopsis thaliana
atggcgaattcactatgcttcttctcttctcctcctaccttttgcttccaatctccaagcaaaaaccctaaaccttctcacttcttctcaactaatgataacacctcttccttggtacagaagagagaactgcttcagacttcaagatcccaaagttttgaagttaaggccgcaaacaataatcctcagggcactaaaccaaacagtttagtttgtgcaaattgtgaaggggaaggttgtgtggcatgttctcaatgcaaaggaggtggtgtgaatttgattgatcatttcaatggtcagtttaaagctggtgcactctgttggctttgcagaggtaaaaaggaggtgttgtgtggggactgcaatggagctggtttcattggtgggttcttgagcaccttcgatgagtag

SEQ ID NO: 212 - DNA, 684 bp, Arabidopsis thaliana
atgtcagaagaagaagtggtggtgttgaacttctggccaagcatgttcggagcaagagtgatcatggcattagaggagaaagagatcaagttcgagtacaaggaagaagatgtgtttggtcagaagaccgatctattgctccaaagcaacccggttaacaagaaaattccggttctcatccacaacggtaaaccggtatgcgagtccaatatcatagtcgaatacatcgatgaggtctggaaagacgataagactctccgtctactaccttctgatccttatcagaagtcacagtgtagattttgggctgatttgattgacaaaaaggtttttgacgctggaagaagaacgtggacaaagaggggcaaagaacaagaagaagcgaaacaagagttcatagagatattgaaagtgttagaaagagagcttggagataaggtctacttcggaggaaacgacaacgtttcgatggtggacttggttctcatctcctactacccttggttccacacatgggagactattggtggttttagtgtcgaggaccacactcccaagctaatggactggatccgtaaatgcttaacccgacccgctatctcgaaatctttacctgacccgctgaagatatttgatcgagtcactcagatcataaaggtccatgagtttttctatggttattga

SEQ ID NO: 213 - DNA, 834 bp, Arabidopsis thaliana
atggagaaatcatcctcaatgaaacaatggaagaagggtcctgctcggggtaaaggcggtccacaaaacgctctttgtcagtaccgtggagtcaggcaaaggacttggggcaaatgggtggctgagatcagagagcccaagaagagggcaagactttggcttggctctttcgctacagctgaagaagcagctatggcttatgatgaggctgccttgaaactctatgggcacgacgcatacctcaacttacctcatcttcagcggaatacaagaccttctctgagtaactctcagaggttcaaatgggtaccttcaaggaagtttatatctatgtttccttcatgtggtatgctaaacgtgaatgctcagcctagtgttcacataatccagcaaagactagaagaactcaagaaaactggacttttatctcaatcctattcttctagttcttcctccaccgaatcaaaaactaatactagctttcttgatgagaagaccagcaagggagaaacagacaatatgttcgaaggtggtgatcagaagaaaccagagatcgacctgaccgagtttcttcagcaactaggaatcttgaaggatgaaaatgaagcagaaccaagtgaggtagcagagtgtcattcccctccaccatggaacgagcaagaagaaactggaagtcctttcagaactgagaatttcagctgggataccctgatcgagatgccaagaagtgaaaccacaactatgcaatttgactccagcaacttcggaagctatgattttgaggatgatgtatccttcccttccatctgggactactacggaagcttagattga

SEQ ID NO: 214 - DNA, 501 bp, Arabidopsis thaliana
atggcaccgacagttaaaacggcggccgtcaaaaccaacgaaggtaacggagtccgttacagaggagtgaggaagagaccatggggacgttacgcagccgagatcagagatcctttcaagaagtcacgtgtctggctcggtactttcgacactcctgaagaagccgctcgtgcctacgacaaacgtgctattgagtttcgtggagctaaagccaaaaccaacttcccttgttacaacatcaacgcccactgcttgagtttgacacagagcctgagccagagcagcaccgtggaatcatcgtttcctaatctcaacctcggatctgactctgttagttcgagattcccttttcctaagattcaggttaaggctgggatgatggtgttcgatgaaaggagtgaatcggattcttcgtcggtggtgatggatgtcgttagatatgaaggacgacgtgtggttttggacttggatcttaatttccctcctccacctgagaactga

SEQ ID NO: 215 - DNA, 1752 bp, Arabidopsis thaliana
atggatgctattttgccagtacccgttgatgggttcagattcgacaccggttctggatcttgttgcaaaccgaggaacaatcttgaatctgggacgaccaatcgtttcacttgtttcaacgaatctgaatctcagagcaacccttctccgaccgagtctaaggtatgttcagattaccttcctgtctttaagtacatcaatgacatgttgatggaagaagatcttgaaggtcagtcttgtatgttggaagacagtttggctttacaagccgcagagagatctttcttcgaagtgcttcaagatcaaactccaatctcgggtgatctagaggatggttctcttggaaacttcagttctataacgagtttgcatcaacctgaagtttcagaggagtcaaccagaaggtatcgacatagggatgatgatgaagatgatgatcttgagagtggaaggaaatcgaagctccctgcgatttctacggtggatgagttagcagagaagtttgaggaagtgttgttggtatgtcaaaagaatgatcagggagaagcaacagagaagaaaacaagacacgtaaaaggctcatcgaatcgatacaagcagcaaaagtcagatcagccagtagatatgaggaatcttttgatgcaatgcgcgcaagctgtggcgagttttgaccagagaagagcttttgagaaactgaaggagataagagaacactcttctcgccacggtgatgcgactcaaagacttggttatcactttgctgaggcgcttgaagctcgtattacaggaaccatgactacaccaatatctgctacttctagcagaacatcaatggtggacattttgaaggcgtacaagggatttgttcaggcttgccccaccttaataatgtgttatttcactgcaaacagaacaatcaatgagcttgcttccaaagcaaccacacttcacatcattgattttgggattctctatggatttcaatggccttgtctgatacaagctttgtcaaaacgtgacatcggaccaccactgctccgtgtgactggtatcgagcttcctcagtcaggtttccgtccatcagagcgggtagaagagaccgggcgaagactaaagaggttctgtgacaagttcaatgtcccgtttgagtacagtttcatagccaagaattgggagaacataactcttgatgatctggtgatcaatagtggcgagacaacagttgtcaactgcatcctccggctacaatatacacctgatgaaaccgtgtccctcaactcaccgagagacacggctctgaaactattcagagacatcaaccctgacctctttgtgtttgcagagattaacgggacttacaattcacccttcttcctaacaaggttcagagaagctctcttccattgctcgtcactctttgacatgtatgagaccacattatcagaagacgacaattgcaggacactggtggagagggaactaatcataagagatgcaatgagtgtgatagcctgtgaagggtctgagcggtttgcaaggccagagacctacaagcaatggcaggttaggattctaagagcaggatttagaccagcgaaactaagcaaacagatagtaaaggacgggaaagagatagtgaaagaacgttaccacaaagattttgtgatcgacaatgataaccactggatgtttcagggctggaaaggaagagtcctttatgctgtttcttgctggaaacctgctaagaagtaa

SEQ ID NO: 216 - DNA, 960 bp, Arabidopsis thaliana
atggatcatcatcatcacatagcatcaagaaattcatcaacaacatcagaattaccatcattcgagccagcgtgccataacggtaatggtaacggttggatctatgacccaaatcaagttaggtacgatcaaagtagtgaccaacggctgtcaaagttgacggatcttgtaggcaagcactggtcaattgcaccaccgaataatcccgacatgaaccataaccttcatcatcacttcgatcatgatcattctcaaaacgacgacatttctatgtacagacaagccttggaggtgaaaaatgaggaagatctttgttacaataatggctcaagtggtggtggttccttgttccatgatcctatagaaagttctagaagtttccttgatataaggttaagtaggccattaacggatattaatccgtcatttaagccatgctttaaggccttaaacgtatccgagtttaacaagaaagaacatcaaacggcatctctggcagcagtgagactgggaacaacaaacgctggaaaaaagaagagatgtgaagaaatttccgatgaggtttcaaagaaggccaagtgcagtgagggctctacactttcgccagagaaggaactacccaaagccaaacttcgagacaagatcacgactctacagcaaattgtgtctccctttggaaagactgatactgcttctgtgcttcaagaggccatcacttacataaatttttatcaagagcaagttaagctgctaagcactccttatatgaagaattcatcaatgaaggatccatgggggggatgggacagagaagatcacaacaaaaggggaccgaagcatcttgatctaaggagtagagggctttgtttggttcctatttcatataccccaatcgcataccgcgataacagtgcaactgactactggaatcccacgtatagaggttctttgtatcgttag

SEQ ID NO: 217 - DNA, 1467 bp, Arabidopsis thaliana
gacatatacagtaagaaaatataaagagagagacagtagtaagaaagaagaagaagaaaaatggaagatacgaagaagaaaaagaagaagaatattaacaacaaccaagattccaagaaaaaagagcgtcatattgttacttggtcacaagaggaagatgttatactaagagaacaaataactctacatggaactgaaaattgggcgatcattgcatcaaagttcaaagacaaaagcacaagacaatgcagaagaagatggtatacatacttaaactctgatttcaaaagaggaggttggtcccctgaagaagatatgcttttgtgtgaggcacaaagagtatttggtaatagatggactgagatagcaaaggtggtttcaggcagaactgataatgctgtgaagaacaggtttacaacactttgtaagaagagagccaagcatgaagctatgactaaagacagcaactcaaacaccaaaagaatgttgttcttagacggtatcagtacaccgcgaaaatccgagaatgaaactcctattgctaagaaattgaagagaagtcacattctagatctcacagagatcagtaactatggaagggccgaggcatgtgtgaatcagcagataaggtctccattttcggttttagctcgaaatgccactggtattgatagcttggaagaacagaatcaaacaagcaatgtgaatgagagtgatggtgaagggatgtttcttaagaaggatgatccaaaagtgacagctttgatgcaacaagctgaacttttaagctccttggcgcagaaagttaatgcagacaacacagaacagagtatggagaatgcttggaaggttcttcaggacttcttgaataaaggcaaggagaatgatttattcagatatggaatacctgatatagattttaagatcgaggaatttaaggaccttatagaggatttgaggagtggttatgaagacaatcaattatcttggaggcaacctgatcttcatgactcaccagctagctctgagtatagttccggatcaaccatcatggtggatcagtctggtgataaaacacaaccattctcagcagatactcagacagaacataagcaagttggagaggagttgctcgtcccgaaaaatcctgatgagaatatgcccatctcaggcgaagaaaagttcagctcgcctattcaggtcacgccattgttcagatctttggcagacggtataccaagtccacagttctccgaaagtgtaagcttcgcaccttctttgttcatcatacaatacttaggctttgaaaaaacaatgagtcttaaaagactgattgcttttgtaggagaggagcttcctgctaaaaacactagggatcgagtcctcatctccatgtccaagtgctaatccttcaaaaccacccccttgcaaaagagtccttctccatagcttgtaaaccaaccaacc

SEQ ID NO: 218 - DNA, 996 bp, Arabidopsis thaliana
atggaagatgaagcacatgaattcttccacacatctgattttgccgttgatgaccttttagttgatttctctaacgatgatgacgaagaaaacgatgttgttgctgattccaccactaccaccaccataaccgacagctctaacttctccgctgctgatcttcccagtttccacggtgatgttcaagacggcactagcttctccggtgacctttgtataccttctgatgatttggctgatgagttagagtggctttcgaacattgtggatgaatcattgtcgcctgaagatgtacacaagctcgagctaatatccggttttaagagtcgaccggacccgaaatccgataccggaagcccggaaaacccgaatagcagcagtccgatttttactaccgacgtttctgtaccggccaaagctagaagcaaacgctcacgcgccgctgcgtgtaattgggcctcacgtgggcttctcaaggaaacgttttacgacagtcctttcaccggagaaaccattctctctagccaacaacacttgtctccgccaacctcgccgcctttgttgatggctccgctagggaaaaagcaagccgttgatggaggacaccgacggaagaaggatgtttcttcaccggagtctggtggcgcagaggagagacggtgtctccactgcgccacggataagactccgcaatggcggacaggcccaatgggcccgaagacgttgtgcaacgcttgcggtgttaggtacaaatcgggacgtttagtgccggagtatcggcccgcggcgagtccgacgtttgtgctggcgaaacactcaaattctcatcggaaagttatggagctccggcgacagaaggagatgagtagggcccatcatgagttcatacatcaccatcacggtacggacactgccatgattttcgacgtttcatcggacggtgatgattacttgatccaccacaacgttggcccagatttcagacagcttatttga

SEQ ID NO: 219 - DNA, 393 bp, Arabidopsis thaliana
atggtggaggtgtggtggtcactgataggagcagcagtgcctgcactaattgctggtcaagcttggaggataaagaagagacatggcgaagaagagaggatcaagagtgctcgaggaagagagaaaagctctgatgaaatctttgtctgtgaaagagtttgcacttccaaaagaatgctgaaaaaagttggagctttctctaaagatcctatccccgacacttgtgttactgtctgcggtgtatctgagctcgacgcttgctctgatgcttgtgctcgaactgtttgcgttaaccagcatcaagttgctaattggaatgacatttgtctcagaagatgtcaaagtgaatgtcttaagctctcttcttcttcttcttcttctcgctattcttga

SEQ ID NO: 220 - DNA, 1191 bp, Arabidopsis thaliana
atggcttcagctacttccgtcatagcctggggttctggagaagatgggcaactaggacttggaaccgatgaagaaaaggaattggcttccgtcgtcgacgctcttgagcctttcaacgttcgctccgtcgtcggtggtagccgcaattccctcgccatttgcgatgatggcaagctgtttacatggggttggaatcaaaggggtacattaggacacccacctgagacaaaaacagaaagcaccccaagtctagttaagtctcttgccaacgtcaagattgttcaggcagctattggtggctggcattgtttagctgtcgatgatcaaggccgagcatatgcttggggtggaaatgaatatggacagtgtggtgaagagccttccaaggatgagacaggtaggcctgtgcggagggatattgtaatacctaagcgttgtgcccagcaacttacagtccgacaggtagctgcagggggtactcactctgtggttctaacccgtgaaggttatgtatggacttggggtcaaccgtggcctcccggtgacataaaacaaatttctgttcctgtaagagttcagggtcttgaaaacgttcgtctgattgctgtgggagcatttcataacttggctctgaaagaagatgggactttgtgggcttggggtaataatgaatatggacaacttggaactggagacacacaaccgagatcgtatcctattcctgtccaaggccttgacgatctcactttggttgatatcgctgcgggtggatggcattcaacagctttaaccaatgaaggagaggtttatggttggggaagaggagagcatggaaggctcgggtttggtgacaatgataagagcagtaaaatgcttccgcagaaagttaatctcttagctggagaagacatcattcaggtctcttgtggcggaactcattcagtcgctttgacaagagacggtaggatcttctcgtttggtcggggagaccacggtagactcgggtatggaagaaaagtaactacgggacaaccattggagcttcctatacacattccaccaccagaaggacggttcaaccacaccgatgaagaagacgatggaaaatggatagctaaacatgtagcttgtggtggccgacacactctagcaattgtggaatggaagtatgatcaggaggaaacagaataa

SEQ ID NO: 221 - DNA, 1575 bp, Arabidopsis thaliana
atggctgtgtattaccctaatagtgtcggcatgcaatctctttaccaagaatccatttacctcaacgaacaacaacaacaacaacaacaagcttcttcttcctctgctgcatctttctccgagattgtttccggtgatgttcgaaacaacgagatggtatttatcccaccaacaagcgacgtagccgtcaacggaaacgtaacggtgtcaagtaacgatctaagctttcacggtggaggactttctttaagtcttggtaatcagatccagtcagctgtctctgtttctccgtttcagtatcattaccagaatctttcgaaccaattgagttacaataatcttaatccttctactatgtctgatgagaatgggaagagcttgagtgttcatcagcatcactctgatcaaattttaccttcctctgtttacaacaacaatggtaataatggtgttggattctacaacaattaccgttacgagacatcagggtttgtgagtagtgtactgagatctcgttaccttaaaccaacacaacaattgcttgatgaagttgttagtgtaaggaaagatttgaaattggggaataagaagatgaagaatgataaaggtcaagactttcacaatgggtctagtgataacattacagaagatgataaatctcaatcgcaggagttgtctccttcagaacgtcaggagctacagagcaagaagagcaagcttttaacaatggtggatgaggtagataaaaggtataaccaataccatcatcaaatggaagctttagcatcgtctttcgagatggtaacaggtcttggagcagctaagccttacacatccgtagctctgaatagaatctctcgccatttccgctgtttacgcgacgcgataaaagaacagattcaggtgatcagagggaagcttggggagagagagacttctgatgaacaaggagagaggataccgcgtcttaggtacttagatcaacggttgagacaacagagagctttgcatcaacaacttggaatggttagaccagcttggagaccacaaagaggcttacctgaaaactctgtctctatacttcgagcttggctctttgagcatttccttcatccatatcctaaagaatcagagaaaatcatgctttcaaagcagacaggactatcgaaaaaccaggttgcaaattggtttattaacgcgagagttcgactatggaaaccaatgattgaagagatgtataaagaagagtttggagaatcagcagagttactctctaactctaatcaagacaccaaaaaaatgcaggaaacatctcagctcaaacacgaagactcttcgtcttcgcaacaacagaatcagggaaacaacaacaacaacatcccatatacatctgatgcagaacaaaacctagtctttgcagatcctaaaccagaccgtgctactactggagattacgacagcttgatgaactatcatgggtttggtattgatgattacaatcgttacgttggccttggaaaccaacaagatggcagatattctaatccccatcaattacacgactttgttgtctaa

SEQ ID NO: 222 - DNA, 1032 bp, Arabidopsis thaliana
atggcaattcgcttgacgcatctgcgaaaacctcttgcttattctcggtcctttgatgtctgcattccgtttttccggtcaatctcgtcctttgaagcggttgaaaaggcgataaaatgtgctgttgaaacaaaggagtatcttagaatccccgaacttgttgtttcactcaaagagccttaccaaaactcaacgttgttttcttttctctctgctttccaacgtcatcatagaatcagagtcattgacgaaatcctccaaagttttgttcctgtgagacctcgttcactgcccaagattgtctactccagtcttcttacttattgccttcagagttccgatcctcttcctttgtctttcgcaatcctccaacgcactcttcgttctggctgtctacctaaccctcagactcatctccttctctctgatgcttggcttgaacggcgacgaggatcccagtctgttgcagatattattaatgagatgaaattgattggatacagtcctgatactggaacctgcaattacttagtgtcctctctctgtgctgttgataagttggatgaggcgattaaagttgttgaggaaatgagtgcagctggctgtattcctgatgtggaaagttatggggcggtgattaattcattgtgtttggctagaaagactactgatgtggtgaagattgtcaaagagatggtgagcaaagctgggatctctccacggaaagggatgctgacaaaagtagcagcagctctcagagccaacagggaaatttggaaagccattgagatgatcgagtttgtagaaagtcgggattaccctgtggagtttgagagttatgaggtagtagtcgagggttgcctggaggttagggaatacattttggcagggaaggtggtgatgagaatgactgatagagggttcataccgtatatcaaggttaggcaaaaagtggttgagcgtctgattaacatcggtgaatggaagcttgcttgtactgttagacaaagggtttctgaactgaggtcttag

SEQ ID NO: 223 - DNA, 2085 bp, Arabidopsis thaliana
atgaagcctctcactaatggcgatctgttcaaatccccaactctgatcaagatctccgccttagttttcgtcaccgtcgctttcttctacttaggcaagcattggtccgacgatggctaccaacagctcgtcttcttctcctcttccacttccggtagctcgatcccggaggtctccgtttcaccgaatagtaacagagtctttaatttatcagcgataattcctactaaccatacccagattgaaatccccgccacaatacgacaacaacctccgtcggtggtggcggacacggagaaggttaaggtggaagctaatcctcctcctcctccacctccttctccttcacctcctcctccgcctggtccggttaagagctttgggatagttgatgcgaacggtgtgatgtctgacgattttgaggtgggtgaggttgagagtgatacagtggaagattgggggaatcagactgagatcgttgaggcgaaaagcgacggtgattctaaggctagggttagaattaagaaatttgggatgtgtcctgagagtatgagagagtatataccttgtttggataatactgatgtgataaagaagcttaaatcgacagagcgaggtgagagattcgagcgtcattgtcctgagaaaggtaaaggcttgaattgcttagttccacctcctaaaggttaccgtcagccgattccatggcctaaaagccgtgacgaggtatggtttagcaatgttcctcatactcggcttgttgaagacaaaggaggtcagaactggatttcacgagacaagaacaagttcaagtttcctggaggtggtacacagtttattcatggggctgatcagtacttggaccagatgtctaagatggtttctgatattacgtttggcaagcatattagggttgctatggatgttggttgtggtgtggcgagttttggtgcttatctattgtctcgtgatgtcatgacaatgtctgttgcaccaaaagatgtccatgagaaccaaattcaatttgctcttgagcgtggtgtgcctgctatggcggcagcatttgcgacaaggcgtttgttatatccaagccaagcttttgatcttattcattgttcaagatgtagaatcaactggactcgtgatgatggaattttgctccttgagatcaatagaatgctgcgcgctggaggatattttgcttgggctgcacagcctgtttataagcatgaacccgctttggaagaacaatggacagaaatgctgaatcttactattagcctctgctggaaattggtaaagaaggaaggatacgttgcaatctggcagaagcctttcaacaacgactgctatttgagtcgtgaggctgggactaaacctcctctttgtgatgaatcagatgatcccgataatgtttggtacacaaatctgaaaccttgcatcagtcgcatacctgagaaagggtacggaggaaacgtccccttatggcctgcccgtctgcatactccacctgataggctgcagacgataaaatttgattcctacattgctaggaaagagctattcaaggcagaatcaaaatattggaatgaaataattgggggctatgttcgcgccttaaaatggaaaaagatgaaactaagaaatgttttggacatgagagcaggctttggcggatttgcagctgcactaaatgatcataaactcgattgctgggttctaagcgtggttcctgtcagtgggcctaacacattgcctgtcatttatgaccgtggactgttaggagtgatgcacgattggtgtgaaccatttgatacatacccacggacatatgacttcttacatgcctctggactcttctcgatcgagagaaaaagatgtgagatgtcaaccatattgttagagatggaccggatattaagacccggtggaagagcatacattagggattcaattgatgttatggatgaaattcaagaaatcacaaaggccatgggttggcatacttctctgcgtgacacatccgagggtcctcacgcaagttacaggattctaacatgcgagaagcgtctccttcgagcttaa

SEQ ID NO: 224 - DNA, 798 bp, Arabidopsis thaliana
atggccgacggtagtactagttcttcggagtccactaccgcctgcgctggaagcggcacaagaagagagattatgctgttcggagtcagggttgtgcttgacccgatgagaaagtgcgtgagtttgaacaatctgtctgactatgaacagacggcggagactccaaagatcgacggcgaagatagagatgaacaagatatgaacaaaaccccggccggttacgcctcggcggatgaagctcttcccatgtcttcttctaacggcaaaatcgagaggaaacgaggagttccatggactgaagaagaacacaagctgttcttgcttgggctgcagagagtcggtaaaggagattggaaaggaatatcaagaaactttgtcaagaccagaacctctacacaagttgctagtcatgctcagaaatacttcctcaggcgaagtaatcttaaccgtcgccgccgaagatctagcctttttgacatgactactgatacggtcatacccatggaagaagatcaccaagtgcttatacaggagaacacatctcaatcatcttctcctgtaccggaaatcaacaacttctctatacatccggttatgcaagtctttcccgagttcccggtaccaacagggaatcaatcatacggacagcttacttcatcgaatctcatcaatttggttccattaacttttcagtcaagtccagcaccgctttctctcaacctctcactagcttcatctaatcttaatgaaccatctccttcaatgcatccagcattcaacacgattggagtcgcttag

SEQ ID NO: 225 - DNA, 688 bp, Arabidopsis thaliana
atgagtatcactcgtagcgcgatcagatcgagtttgtgtctccggaaattggatccggaaatcagtcgtagctcgcttccgtttcttcaagagtggaggaaatgcctatctaccgccacggagcagcctcctcctgcctctccgttaccaccgcctccgggaggttctccgggagaagggaggttttatgggaagttttcaggcttttcaaaacatgctctgaagacagacataatgaacgtactcgagggctgcagtctgacatcagatgatctcaaattcaactatccgcgtggcggaaacttaactcctgcggcagtctttgtgcagttcccatccctttccgcatatgataaagcactgcggaatatcgcaaagaaaggaaagctatatagattagaaaaggctgctcgtgctcagtgggatcccattgttccttatgaggggaaagtggttgcactacatgggattccggtgaatgctataacagatgacatagataggttcttatctggctgtctctattatcctggatccatccagttcctcacagttcaaggacttggaacttcaaagagggtagcattggtgcgtttcacatcacaaacccaggcaatgaacgcatacattacaaagaacaggaacttccttctcaaccaacgaatcacattgcaagttctgcagtaat

SEQ ID NO: 226 - DNA, 1137 bp, Arabidopsis thaliana
atggcgaagatgatgatgttgcaacagcatcagccttctttctctctccttacttcttctctgtctgacttcaatggcgctaagctccatttacaagtccagtacaagaggaaggttcatcagccaaaaggagcactctatgtttcagcgtcgagcgaaaagaagattctgataatgggtggtactcgattcattggtctgttcttgtccaggatccttgtcaaagagggacatcaggttacattgttcacaaggggtaaatctcctattgccaaacaattgcccggtgaatctgaccaagactttgctgatttctcttctaagattcttcacttgaaaggagacagaaaggactatgactttgtgaagtcaagtctttcagcagaaggcttcgatgttgtttatgatatcaacgggagggaggccgaagaagttgagcccatactagaagcactacccaaactagagcagtacatctactgttcttcagctggtgtttatctgaaatctgatatcttgccacattgtgaggaggatgcagttgatccgaagagcaggcacaaggggaagctggagactgagagcttactgcaatcaaaaggtgtaaactggacttctatacgtcctgtctacatctacggtccattgaattacaaccccgtcgaagaatggtttttccaccgtctaaaggcaggtcgcccaatcccggttccaaactctgggatacagatctcacaactcggtcacgttaaggacttggcaacagcctttctcaacgtgcttggtaacgagaaagccagcagagagatattcaacatctcgggggagaaatatgttacctttgatgggttagcaaaagcttgcgcaaaggccggtgggtttccggagccagagattgttcattacaacccgaaagagttcgactttgggaagaagaaggcattccctttccgtgatcagcatttctttgcatcggtggagaaagcaaagcatgtcctcggatggaaaccggagttcgacttagtggagggtctcactgactcatacaaccttgatttcggtcgcggaacattccggaaagaagcggatttcaccactgacgacatgattctgagcaagaaacttgttcttcaataa

SEQ ID NO: 227 - DNA, 360 bp, Arabidopsis thaliana
atggccaaagttgggaagctgacaaagcttaagtcggctatgaagaaatggccttctttcgccaagaaccaccaccactcaacctcctcagccgctgtttccgacgaactctcagaagacaacaatctccatgtggtttacgttggtcaaactcgaagaccttacatgcttagaccagacatcatctctcacccactctttcaagaactcgtggatcggtcttcttctagatccatcgaacaagatcgtgagattgttgtagcttgtgaagtcgttttgttcgagcacttgctgtggatgctcaagtctggtcaagaaggaggatccgttgaagaattggctgagttctatacttattga

SEQ ID NO: 228 - DNA, 1509 bp, Arabidopsis thaliana
atgacgatcttgctctgtttcttcttagtttcacttcttactatcgtatcatcaatctttcttaaacagaataaaacctcaaaattcaatcttcccccaagcccttcaagccttccgatcattggaaacttacaccatctcgcaggattgcctcacagatgttttcataagctctctatcaaatacggacccttggtctttcttcgtctcgggtctgttccggttgttgtgatctcatcgagtgaagcagctgaagcagttctcaaaaccaatgacttggaatgttgcagccgaccaaagacggtggggagcggaaaactctcttacggtttcaaagacatcactttcgcaccatacggtgagtattggcgagaagtgcgaaaactcgcggttatcgagctttttagctctaaaaaggttcaatctttcaggtatataagagaggaagaggtcgacttcgtggtcaagaaagtgtcagaatcagctttgaagcaatctcctgtggatttaagcaaaacctttttctccctcaccgctagtatcatttgtagagtcgccttaggacagaatttcaatgaaagcggctttgttatcgatcaagacaggatcgaagaacttgttaccgaatcagcagaagctctagggactttcactttctctgacttcttccctggtggacttggaagatttgtagattggttgtttcaacgacacaagaagatcaacaaagtctttaaggaacttgatgctttttatcagcatgtgattgatgatcacttgaagccagagggaagaaagaatcaagatattgtcaccttgattttggatatgatcgataaacaagaagattcagattctttcaaactcaacatggataatctcaaggcaattgtcatggatgtatttctcgcggggatagatacaagcgcggtaacaatgatttgggcgatgacagaacttattagaaaccctagagtgatgaagaaggctcaagaaagtattcgaaccactctgggtctcaagaaggaaagaatcactgaagaagatttaggcaaagttgagtatttgaaccacatactcaaggaaacttttaggttacacccggcacttccatttgtggtgccaagggaaacaatgtctcacatcaagatccaaggctatgatattccaccgaaaacacaaatccagcttaacgtgtggacgatcggacgtgaccctaagcgttggaatgaccctgaagaattcaaccctgaaaggtttgcaaatagctctgtagattttagaggacaacattttgacctattaccgtttggttctggtcgaaggatttgtcccggaatgccaatggcgattgctagtgtggaactagcattgatgaatttgctttattattttgattggagtatgcctgatgggactaaaggtgaagacattgatatggaagaagctggtaatatctctattgtcaagaaaatacctcttcaacttgtgcctgttcaacgttattga

SEQ ID NO: 229 - DNA, 603 bp, Arabidopsis thaliana
atgccgattgctgagcttgctgtaatcaaaacagtgggtgggcctctgatagcggctgctcttggagttggagcccaagtcatttacgacggcttcagaaaaggaaaagatacatctatcataaaccgtctcggccgtacaatggaaagtatcagtccggtgcgggatcgaatcggtaagctcagtaatgtggaaggtaaaccatttagggaagtccacgaaagtcttacgcgtctccttgaagatgcgaaatctattattgagaaatattggaaactcagatggagcagacacgtttgcaggaagtacaggtacatcaaaaaactcgaatcgatagaacttgaattagtaagggtagcacgtgagatacaagtccaccaatggaccgatatcaaagaaatgaaggcgatacaagtccaccaatggaccgatatcaaagaaatgaaggcgatacaagtcgaccaatggaccgatatcaaagaaatgaaggcgatacaagtcgaccaatggatcgatatcaaagaaatgaaggcgatacaagtcgaccaatggaccgatatcaaagaaatgaaggcccagatatctgaaaagcataataaatga

SEQ ID NO: 230 - DNA, 1579 bp, Arabidopsis thaliana
atggcatcggcggttcagaaatcagcgttgctcttatgtggagactacatggaagcctatgaaacgattgttcctctctatgttctccaatcgtttggggttagcgttcattgcgtttcacccaaccgcaacgccggcgatcgctgcgttatgtctgcccacgatttcttgggcctcgaggttccaattttcccactaaaacgaatttcgaactttctttttctttgtgataattcgcttaattttgtttttctgttctaaaaaagctatacaccgagcttgtcgttgaccagttgactttaaacgcaaacttcgatgacgtcactccggagaattacgacgtcatcatcatcccaggaggccgattcacggagcttctcagcgccgacgagaaatgcgttgacctcgtggcgcgattcgccgaatccaagaagctgatcttcactagctgtcatagccaggttatgctgatggcggccggaatcctcgccggtggtgtgaaatgcacggcgtttgaaagcataaagcctttgatcgaactctccggcggtgagtggtggcaacagcctgggattcagagcatgttcgagatcaccgattgcgttaaagacgggaatttcatgagtacggttggttggccaacgcttggtcacggcattaagcttttgcttgaatctcttggtggcaaagtctgtagcttggagaagaagcaagcttctgtgcttttcctcattggggtgagtaaaaggcgtaatctttagttatatcaatcttgttttgatcatcagactcgttgagcattactctgtttttaggactatgtagaagattatgggatcaatgtaccgtttagagcactacaagctttaggttgtaaagtggatgctgtgacaccgaacaagaagaagggagaagtgtgtgcaacggcggtttatgaccttgaggatggacggcagattcctgcagagaagcgtggacataacttctttgtgactgcatcgtgggatgatatatgtgtggatgattatgactgtgtagtggttccaggagggagatcacctgagctattggtgatgaatgaaaaggctgttgctttggttaagagttttgcagagaaagataaggtgtttgcagctattggacaggggaaattgcttcttgcagccactggtgttcttaaggtaaaatcatcacctgtcttttcttttgggaggttatgagctctgtcaaaacagaaaatgtacttggaggaaatagtattcactaatcttgtaatgaatatagaaaatgtgatgttgaggatacaatggtgatcccaatgtttatatcaagtcatgcttgtggaatctagtaactaactaattttgttcatgtggtgtttctctttatggatttgcaggggaagcgatgcgcgagtgggaaagggatgaaggtgatggtgaaggtggctggaggtgaggctgtgatggaaaagggatgtgtaactgatgggaaggttgtgacggcagcatcagccacggatctgcctgcctttttgtttgatttatcaactgctcttggtctaactgtcatgttctaa

SEQ ID NO: 231 - DNA, 903 bp, Arabidopsis thaliana
atggcggctactagagtgttaactgcagcgacggccgtgacccaaaccacctcctgtttcctcgccaagcaagctttcactcttccggcgaagaaatcctgcggcggatttggtggtctctgcttcagcagaagagctttggtgttgaaatctaagagacctttctcctgcagtgccatttacaatcctcaggttaaggttcaagaagaaggtccggccgaatccctagattatcgagttttcttcctcgatggttctggaaagaaggtttctccatggcatgatataccattgaccttaggcgatggagttttcaactttatagttgaaatacctaaagagtcaaaagcaaaaatggaggttgctactgatgaagatttcactcctattaagcaggatactaagaaggggaagctcagatattatccgtataacattaactggaactatgggttgcttcctcaaacatgggaagatccatctcatgcaaattctgaagttgaaggatgttttggggataatgatccagttgatgttgttgagattggtgaaacacaaaggaagataggcgatattctaaagataaagcctttagctgctttagctatgattgatgaaggtgagctagactggaagattgttgccatttctttggatgacccaaaagctcatcttgtgaatgatgttgaagatgttgagaaacatttcccgggtacactaacagccattagagactggtttagagactacaagatcccagatggaaagcctgctaacagatttggtcttggagacaaaccagcaaacaaagactatgctttgaagatcatccaagaaacaaatgaatcatgggctaaacttgtgaagagatcagttgatgctggagacctttcactttactga

SEQ ID NO: 232 - DNA, 651 bp, Arabidopsis thaliana
atgaagctcgccgctagcctcaaccgcctcagccccaaacgtctcttccgtaccaaatcaaaagcttccgtctccagatctgagccttcttccttcagctccaatgcttcttcctcttcctctgatggatcttacggtaacctcaaacaaggtccaaccgcgactccgatcagtgttctccctcaaaactccggcgatttttacactgagcttgttcaagcttttaaactgatcgatcgtgatgacgacggtgttgtttccagaggagatctcgcggcgttgattagcaggttaagtcatgaaccaccgagtcaagaagaggtgagtttgatgctaagagaagtagacggcggagacggtggttgtatcagccttgaagatcttgctagccgtgtcgctggtacttccggtgaaggctctgttgagacggaggagctgagagaggtgttcgagatttttgacgtggatcgtaacggaaaaatatcggcggaggagttacacagagtttttggagtgatcggagatgaacggtgcacgttagaagagtgtatgcgtatgatagcgacggttgatggaaacggtgacggttttgtttgcttcgatgacttttgccgcatgatggttccagcgatgaatgatcatcatcattag

SEQ ID NO: 233 - DNA, 678 bp, Arabidopsis thaliana
atgtcggagatggccggagattcttcaacatcagaagataaaatccataaaccaaaccgcgagaggaatgtctccggcgaacttgacgtcttcgaagccactcgatatttttccgacttcaacgaaccaacgacgatcgagtactcaagaatccaaatacagaaacaaagcattgttacagaaaatcgacagaagagagtacaccctgagacagaagaacacctccctaaacctagagtcgtcgtcataaagccgcagaagaaagagatgacacgtggcggcggtaagaagctaaccagtttcttgaactctcttcttcgctcagctggtctaaagaagaagtcaaagtcagcgccggaggtggagacaccacgagtagaaaggatgaggaggaagagctgcgtagtgactacacacgccgcagatgcttcgcctctcaccaatgccggcgcgtggagtttaaacgcgcgtagaagaagctttgatgagaaagatttgaagaagagtgatcagaagttgaacataagattttgtgagagtctgtattcggaccaaagggttgagacaaaagacccaaatgcaggagacaagaacgatgtaattggtggatgcgagagtgattcaagttctgaatctgatctttttgagttggatttgtttgctaaatcaaacccctaa

SEQ ID NO: 234 - DNA, 1196 bp, Arabidopsis thaliana
atgatgaaatcgttttgcaagttggagtatgatcaagtgtttggcaaagaaaataattcattctcatttctaaaccactcatcactttactctcatcaaaggtaaattaattgatcatgcatgacttttttttagttttacatgtttatataatagttcttgatccatgttttgttgttgtgtgttcttaatgcagcgagttagcaaatcctttcttcgagttggaagacgagatgcttccttctgctacctctagtaattgttttacttctgcctcaagctttctggctttacctgatcttgaacccatctccattgtgtctcatgaaggtatgtatattgtagttgtttgatctcatggattttatgtgtgcacttctcattcttgtcgttctgtttaagcagatatacttagtgtgtatggttctgcttcatggaccgcagaagagacgatgttcgtttctgattttgcgaaaaagagtgaaaccacaactaccaagaagaggagatgcagagaagaatgtttttctagttgttctgtttcaaagacattgtcgaaggaaaccatctcattgtacttttacatgccgataactcaagcggctagagagcttaacattggtttaactcttttgaagaagagatgccgcgaattgggtattaaacgttggcctcatcgtaagctcatgagcctacaaaaactcatcagcaatgtcaaggtataaacaactataaacataagacaactaagttataacaagttaaattcctctattgtgtatcattaggaattattttttgcattttttagttcgccaaattttcttgaaaatttgatttttgttgttttggaaatgaaaacgctatataaagccttaatgctatggtctaccgatttagtgaatttgatgtgactatttttataattgtaacaggagctagagaagatggaaggggaagaaaatgaagataagctaagaaacgctttggaaaagctcgagaaggagaagaaaacgattgagaagttaccagatttgaagtttgaggataagacaaagagattgagacaagcttgtttcaaggctaaccataagaggaagagaagaagtggcatgtccacgcccatcacatcatcatcttcttctgcttctgcttcttcttcttcttactcttctgtttcgggttttgagagataa

SEQ ID NO: 235 - DNA, 1432 bp, Saccharomyces cerevisiae
ttaattaaatgtctatttgtgaacaatactacccagaagagccaaccaaaccaactgttaagaccgagtccattcctggtcctgaatcccagaagcagttaaaggaactgggtgaagtttttgacacaagaccagcatattttttggctgattatgagaaatctttaggtaactatatcactgatgtggatgggaacacatatttggatttgtatgcccaaatctcttcaattgcacttggttataacaaccctgctttgatcaaggcagcacaatcaccagaaatgatccgtgctttggtcgaccgtcctgccttaggtaacttcccatctaaggatttagacaagatattgaagcaaatattgaaatctgcgccaaagggtcaagatcacgtctggtcagggctttccggtgcagatgccaatgaattagcgttcaaggctgcctttatttattaccgtgccaaacaaaggggctatgatgccgatttttctgaaaaggaaaacttgtctgtcatggacaatgacgcccctggcgcccctcatcttgccgtactatcgttcaagagagcgttccacggtagattgtttgcctccggttccacaacttgttctaaaccaattcacaagttggatttcccagccttccactggcctcatgctgagtatccatcttaccaatacccattagatgaaaattctgatgcaaaccgtaaagaggatgaccattgcttggccattgttgaagaattaatcaaaacctggtctattccagttgctgccttaatcatcgaaccaattcaatctgagggaggtgataaccacgcttctaagtatttcttacaaaagctaagagacattaccttgaagtataacgttgtctacatcatagatgaagtgcaaacaggtgtcggagccaccggtaagctatggtgtcatgagtacgccgatattcaaccacctgtggatttagtgaccttttccaagaaattccaaagtgcaggatatttcttccacgaccctaaattcattccaaacaaaccatacagacaattcaacacatggtgtggtgaacctgcaagaatgatcattgcaggtgccattggacaggaaatctccgacaagaagttgactgaacaatgttcaagagtaggtgattatttgttcaagaaattggagggtttgcagaagaaataccctgaaaactttcaaaacttgagaggtaaaggaagaggcacattcattgcctgggatttgcctactggtgagaagagagacttactattgaagaaattgaagttgaatggttgcaacgttggtggatgtgcagtccatgcagtgagattaagaccttcattaacattcgaggagaagcatgctgatatctttattgaagcattagccaaatcagttaatgaattatgaatttaaat

SEQ ID NO: 236 - DNA, 274 bp, Arabidopsis thaliana
ttaattaaatgggcatggcaatgaagtcagtttctaacttcgcaatctttttaatcctctttttggtcacctctgaaatatctgagatagaagcgaaagataaggaatgtctaaaaggatacattgatgcgcctttaagctattgtatggctaggatttatccgtcgttgtgttatcgaaattgtcgtttttacaagggcgcgaaaggtggaaaatgcgacggtcttaagtgcttctgcgacttctgcagcgacaagcctttttagggcgcgcc

SEQ ID NO: 237 - DNA, 570 bp, Arabidopsis thaliana
ttaattaacgaatttgcccctcaagttttattttaattgctaaaatggctggaaccctagttaactccgccgggagattctcaccgggaaattgtattcttcctcaacagagaacagccagattctacagcggaaccgcgagatttcccaccggagctccgtcgtttaaggcttcagctcagacgcttaacgccgagccagctgtaacggaatccgttcgtcggagagtttctagcctctacgaattactgaaagtgaatgaaacggcgtccttgacggagatcaagacggcgtaccggagcttagctaaagtatatcatccagatgcgtcggaatcggacggtcgagattttatggagattcacaaagcttacgcgacacttgcggatccgactacaagagcgatttacgactcgacgcttagagtaccacggagacgggtacacgccggagcgatgggtcggtcggggcgggtttacgctacgacccggagatgggagacggatcagtgttggtgattttaggcttcctatgattttgcagcagcgaaagggcactttttggcgcgcc

SEQ ID NO: 238 - DNA, 1759 bp, Arabidopsis thaliana
ttaattaaatgggtgaggtagctgataataatacattgatgaagaggaagaagaaaggtaggccatcacttcttgacctccaaaagcgagctctcaaacagcaacaattgcttcagagaagaaatcccaatgaagaaaacgaagaagagcttagatccagttccagaaaccctaatttcagcaaccgatcaaatcgccggaggaattcaaattctgaagacgacgacgatgagaggagagacaaaaagcatcggcttttacacggattgaattcacacgagggtcgtgattcttctaattccaaatctggcggcggcgatttggactccgatgcacgcaaccgccggaaaattgacggatctgacaatacgggagaaaaggcttcgaaagcgacagacattcttcttcaaagagggtcacttgtggagtctacacctttgccagacaaaaagttgttgttcttcattcttgatagagttcaaaagaaggatacttatggagtgtactctgatccagctgatccagaggagcttcctgattattatgagattatcaagaatccgatggatttcaccacattgcggaagaaattagaatccggggcatacaccaccttagaacaatttgagcaagacgtatttttaatatgtacgaatgcgatggagtacaattcagcagatacagtatactaccgacaggcaagagctatgcttgagttggcgaaaaaggactttggaaatttgagacaagaaagtgatggagaagaaccagtgtcactgtcacaacagccgaaagtagtcaaaagaggccgtcctccaggctcaggccttaagaaacagcttgagcaatctttgattgatcgcacgacttctgatatttctgctgatgcagcagcattcacttatgctggagatagctctagattatccggttcttacaatctaagaaaaaatcctccttcatatggattccgtcatgcagaaacttcggttagaatcaaccataatagcgagaaccaaagtggcttgttgatagattgggagaaggagtttccaccttctgttgtgaaggctgtcaataaatacgggatgaaaaatgtcgacgagaacaggcgagatacctacaaccagaactctgcttccttgcaagattcttcgatttttacactgcttgatgataatttaaaacaattaactccagttggactgaaagctgaatatgggtatgctaggagtctagcacggtatgcagcaaatattggtcctgttgcttggacatttgccaatgtaaggattgaaaaactgttaccaactggaaccgaatttggtcccgggtgggttggagagaaccctgagaatcctcctcaacagcaaaacttaatgtcgggaaagcaaaagtgttcgaatgactatgcatctgatgatcatcatcagtcaagtagaatcatgtctccatcaacctctgtctcaagctccatcataggaaacatacattcttcccatgaaagtaaagagtctgttcaggtattgaatcaagaaaccgagataaatggtctagtccgtggttccagcggatttaaccataaaccaaaccagatgctggaaacagctggctcgcagcaaggcaacataaaacaggaatttcagcggttgccaccagatctcaatgctaggctttcctcaccaaactcaccaggctctaaccaccaggcaggttcatcgcagcatccggatttggcgttacaactctaaatttaaat

SEQ ID NO: 239 - DNA, 1105 bp, Saccharomyces cerevisiae
aactctttgtttcttgtttgttgattaacccttaattaagatggataagaattcagttaacaaagatagtgaagaaaaagacgaaagacacaagattgaggttgtagatgatacaaatcctgacttcatcactgcagattcggaactgacacaagatctgcctgatgatgtagaggttattgacttggtccatttaaaaatcaaatcgttagaagatttgaacctttataggtttaagaatttgaaacaattatgtctcagacagaacctgatcgaaagcataagcgaagtggaagttttaccccatgacaagattgttgaccttgatttttacgataacaaaattaaacatatctcctctaatgttaataagctcaccaaattaacgtctctagacctgtcgtttaacaagatcaagcacatcaaaaatctagaaaatttgactgatctggagaatttatacttcgtgcagaacagcatttccaaaattgaaaatctgtccactttgaaatcactgaaaaacttagaattaggtggtaataaggttcattctattgaacccgattccttcgaaggtctgtcaaacttggaagaaatttggttgggtaaaaattccataccaagacttattaacttacatcctttaaagaatttgaagatattgtccatccaatctaataaattaaaaaaaattgaaaatctagaagagttgtccaatcttgaagagctctatctgtcacacaatttcatcaccaagattgaaggtctagagaaaaacctcaaactaactactttggacgtgacctccaacaaaattacctccctggaaaacttgaaccacctgtcaaatttaactgacatatgggcctcctttaacaagatagatcaatcctttgagagcttgggtgaaaacctgtccgccctatcacgcttggagaccatttatctggagggaaaccctattcaactggaaaataagacttcgtatagaagaaaactgactatgaacttacctccatccctacagaagattgatgcgacatatataagaggctgaatttaaatacccagcaaattggagctctgcagagctttcgttcgtatc

SEQ ID NO: 240 - protein, 302 aa, Glycine max
MNMSDIISCFNENAVNVSHSSCSSYSNNACISPTSVTPSSQNSVSSVYKTTLSNQKQLLITVTWCKSHSNQGLTITFGEENNNPLAPSFRLNTNSRFFRKKKGSKVLESEDSKVEVFWDLSKAKYGTGPEPVEGFYVAILVDAEIGLALGEDVTKKFKTKTLLGNVSLLSRREHCSGNAVYATKAQFCDTGTRHDILIRCSGENEGLKAPALSVCIDKKTVIRVKRLQWNFRGNHTIFVDGLLVDLLWDVHNWFFNPASGYAVFMFRTRSGLDSRLWLEEKIAQKDKDRVEFSLLIYACKNT

SEQ ID NO: 241 - protein, 745 aa, Pseudomonas fluorescens PfO-1
MNPQDKEAFEELLANCADEPIRFPGAIQPHGLLLTLSEPDLSIIQISANVETLLARPAQELIGQPLQSLIGDAHAAQVREALQQAALSDAPPLHFRLNGTAFEGLLHRHQDVLILELEIHVENFQPRNVAGTETHLGRMLARLQKAQSLQALYDISVKEIQAMTGYDRVLIYRFEEEGHGQVIAEASDPSMEVFNGLFFPASDIPEQARELYRTNWLRIIPNADYQPVPLVPKLRPDTQTPLDLSFATLRSVSPIHCQYMKNMGVLSSMSISLLKGDKLWGLISCGNRQPLHVPHELRTACQTIGQVLSLQISAMEALEVSRQREEKLEALALLNQAMIDSPQNVFDGLANQPQVLMALANAGGIAIIEDKQLHRYGNCPEPEEIRALHKWLQERGEPVFASHHLASVYPPAAHYQQVASGVLAMSLPKPVDNGVLWFRPEVKENINWSGDPRKPLDLENSDAGLRLRPRTSFEIWKVEMAGISTKWSHGDLFAANDLRRSALENDLARQVRREQEAVRARDELVAVVSHDLRNPMTVISMLCGMMQKAFSSDGPHTSRRISTAIDTMQQAAGRMNTLLEDLLDTSKIDAGRYTIAPQKLDVAQMFEEAQSLLAPLALDKDISISFEADPDLSIHADPERLFQVLSNLVGNAIKFTPRLGTVDVYAKSVGDDIVFTVRDSGEGIPKDHLPHVFDRYWTVKEGNPTGTGLGLYITQGIVEAHGGQIVAESEPGQGSEFRFTVPRLD

SEQ ID NO: 242 - protein, 178 aa, Arabidopsis thaliana
MDPARECEGKGACELKSNKRFADKIMPHLLNLYGSSAKANDFDMYAPNASFEDPLTHAQGVKQIKSAFYSLPKVFGESKIVEYHIQESETSPGKKEILIDNKQHYKIMGRNIDMISLIKLYVEDGKIVRHEDWWDKKPLRNRDTVSFPLVGRVMEMGRRGLMLATHAMMGFGKDPDSQ

SEQ ID NO: 243 - protein, 164 aa, Arabidopsis thaliana
MSRPGDWNCRSCSHLNFQRRDSCQRCGDSRSGPGGVGGLDFGNFGGRAMSAFGFTTGSDVRPGDWYCTVGNCGTHNFASRSTCFKCGTFKDETGAGGGGGGIGGPAMFDADIMRSRVPGNGGRSSWKSGDWICTRIGCNEHNFASRMECFRCNAPRDFSNRTSF

SEQ ID NO: 244 - protein, 451 aa, Arabidopsis thaliana
MLEAPSYLVSRDLPSSCEEESKWIYNAHCVLQLSLRKRLLDDTDVEGSSAKKMLRVDHGSRGESDKITDSLQLAKTYQSSNQSQQGGGGDQQSSPVTRLDQNALLNCLAHCSLSDFGSIASTNRTFRSLIKDSELYRLRRAKGIVEHWIYFSCRLLEWEAYDPNGDRWLRVPKMTFNECFMCSDKESLAVGTELLVFGKEIMSHVIYRYSILTNTWTSGMQMNVPRCLFGSASLGEIAVIAGGCDPRGRILSSAELYNSETGEWTVIPSMNKARKMCSSVFMDGNFYCIGGIGEGNSKMLLCGEVYDLKKKTWTLIPNMLPERSSGGGGDQAKEIAAATAASEAPPLVAVVKDELYAANYAQQEVKKYDKRLNVWNKVGNLPERASSMNGWGMAFRACGDQLVVVGGPRAIGGGFIEINACVPSEGTQLHWRVLASKPSGNFVYNCAVMGC

SEQ ID NO: 245 - protein, 96 aa, Arabidopsis thaliana
MDKEVTKIESDDTSSVEIKVLLFARARELTGVPDLTLKMPSGSTTQKCLDELVLKFPSLEEVRSCVVLALNEEYTTDSAIVQHRDELAIIPPISGG

SEQ ID NO: 246 - protein, 100 aa, Arabidopsis thaliana
MVSSLLMSFAPATVRVYATSTKGGSGGPKEEKNPIDFVLGFMTKQDQFYETNPLLKKVDEKEGTTTGGRGTVRGGKNSAPTPVPKKSEGGFGGLGSLFKK

SEQ ID NO: 247 - protein, 270 aa, Arabidopsis thaliana
MGVVEEAHNVKVIGSGEATIVLGHGFGTDQSVWKHLVPHLVDDYRVVLYDNMGAGTTNPDYFDFDRYSNLEGYSFDLIAILEDLKIESCIFVGHSVSAMIGVLASLNRPDLFSKIVMISASPRYVNDVDYQGGFEQEDLNQLFEAIRSNYKAWCLGFAPLAVGGDMDSIAVQEFSRTLFNMRPDIALSVGQTIFQSDMRQILPFVTVPCHILQSVKDLAVPVVVSEYLHANLGCESVVEVIPSDGHLPQLSSPDSVIPVILRHIRNDIAM

SEQ ID NO: 248 - protein, 72 aa, Arabidopsis thaliana
MELPSPYSSRKEESTVPPKRGRVKIMIFRDLVRSETSMAPTPRRGRIKKMIAGDLVGSGKQNNYDGDGKRGG

SEQ ID NO: 249 - protein, 253 aa, Arabidopsis thaliana
MCALVPSFFTNFGWPSTNQYESYYGAGDNLNNGTFLELTVPQTYEVTHHQNSLGVSVSSEGNEIDNNPVVVKKLNHNASERDRRKKINTLFSSLRSCLPASDQSKKLSIPETVSKSLKYIPELQQQVKRLIQKKEEILVRVSGQRDFELYDKQQPKAVASYLSTVSATRLGDNEVMVQVSSSKIHNFSISNVLGGIEEDGFVLVDVSSSRSQGERLFYTLHLQVENMDDYKINCEELSERMLYLYEKCENSFN

SEQ ID NO: 250 - protein, 254 aa, Arabidopsis thaliana
MGVFPGFGSWINQNTQQLPHKAESERSENAKFKSKSETNTHEARDEMKQQLKLWRDTEKKEQWNDAPPNVKVERRNDLEWGMSTIEMQFTLGLPPQAAYNVLTNPDNQPYFRIIKGRQLLENISRKVVSPDTGKGQLVDTKKAVAWNFLWLSGTIPIIANFIEHRQVLTYKVEPLYVDSERLCKQKKPKSTEEYERCSRGQGRIGSKVTLDQMFKPSFIFNLPPISWYVRRITIKTMKTLIEDLQITSAMIRGI

SEQ ID NO: 251 - protein, 780 aa, Arabidopsis thaliana
MQQGDQTVLSLRPGGGRGNRLFGSSSSSSSLSFGSLSSSDLPLLRPHGGAPASSFPFKGGDSRFDGRERVKYTREQLLELKETTQLSDEILRVQRETAAELFGEEGTWARGESVVSNLVPVQSASRFSEPDSRDWRSRSTQPPPSGEERSWDNLREAKDSRYVEASQYNRQDQPNSQFSRANISSNQGGGPAPVLVKAEVPWSARRGNLSENDRVLKTVKGILNKLTPEKYDLLKGQLIESGITSADILKGVITLIFDKAVLEPTFCPMYAKLCSDINDQLPTFPPAEPGDKEITFKRVLLNICQEAFEGASQLREELRQMSAPDQEAERNDKEKLLKLKTLGNIRLIGELLKQKMVPEKIVHHIVQELLGADEKVCPAEENVEAICHFFKTIGKQLDGNVKSKRINDVYFKRLQALSKNPQLELRLRFMVQNIIDMRSNGWVPRREEMKARTITEIHTEAEKNLGLRPGATANMRRGMVSSGGPVSPGPVYPGGRPGAGGLMPGMPGTRRMPGMPGVDNDNWEVPRTRSMSRRDGPGPLHSPAVSKSASMNTRLLPQGSSGIMSGKTSALLQGSGSVSRPVTVSAERPAQSVAPLTVPVPVEKPQPSGPKLSEEVLQRKTKSLLEEYFNVRLLGEALQCVEELGLPSYHPEFVKEAISLSLEKSPPVVEPIATLLEYLLSKKVVAPKDLETGFLLYGAMLDDIGIDLPKAPNNFGEIVGKLILAGGVDFKLVREIIGKMEDDRFQKMVVDAAVRIVESSEQGKSLLASQAADIEACRNL

SEQ ID NO: 252 - protein, 491 aa, Arabidopsis thaliana
MAASYEEERDIQKNYWIEHSADLTVEAMMLDSRASDLDKEERPEVLSLLPPYEGKSVLELGAGIGRFTGELAQKAGELIALDFIDNVIKKNESINGHYKNVKFMCADVTSPDLKITDGSLDLIFSNWLLMYLSDKEVELLAERMVGWIKVGGYIFFRESCFHQSGDSKRKSNPTHYREPRFYSKVFQECQTRDAAGNSFELSMIGCKCIGAYVKNKKNQNQICWIWQKVSSENDRGFQRFLDNVQYKSSGILRYERVFGQGFVSTGGLETTKEFVEKMNLKPGQKVLDVGCGIGGGDFYMAEKFDVHVVGIDLSVNMISFALERAIGLSCSVEFEVADCTTKHYPDNSFDVIYSRDTILHIQDKPALFRTFFKWLKPGGKVLISDYCRSPKTPSAEFSEYIKQRGYDLHDVQAYGQMLKDAGFTDVIAEDRTDQFMQVLKRELDRVEKEKEKFISDFSKEDYDDIVGGWKSKLERCASDEQKWGLFIANKN

SEQ ID NO: 253 - protein, 126 aa, Arabidopsis thaliana
MSFMYEKSNTWRWLVMKTRDSRSFFFTFAALCGVIPGVIGYGVMQVTNSSNPELEARLRKSARPDTLMMGKVNQERLAEYLGELKQKQDTNDRYVAALRGETLTRKPYQRIQPMPKPDDTVTTKTQ

SEQ ID NO: 254 - protein, 162 aa, Arabidopsis thaliana
MSMIPISNRRRLSPGDRIWEPFELMNTFLDFPSPALFLSHHFPSLSREIFPQTSSSTVNTQLNWTETPTAHVFKAYLPGVDQDEVIAFVDEEGYLQICTGDNKFMSRFKLPNNALTDQVTAWMEDEFLVVFVEKDASSSPPQLPEIEENRNVRVVEITGDDD

SEQ ID NO: 255 - protein, 243 aa, Arabidopsis thaliana
MQDPSRPATGYPYPYPYPNPQQQQPPTNGYPNPAAGTAYPYQNHNPYYAPQPNPRAVIIRRLFIVFTTFLLLLGLILFIFFLIVRPQLPDVNLNSLSVSNFNVSNNQVSGKWDLQLQFRNPNSKMSLHYETALCAMYYNRVSLSETRLQPFDQGKKDQTVVNATLSVSGTYVDGRLVDSIGKERSVKGNVEFDLRMISYVTFRYGAFRRRRYVTVYCDDVAVGVPVSSGEGKMVGSSKRCKTY

SEQ ID NO: 256 - protein, 327 aa, Arabidopsis thaliana
MLRLIVNYPLIPKISHRVCSNSSSKLGSYYDSSSIIKYGGISDVVGKKQELFLSVSVKAVEDKGNNGGGSMSFSGQSWDPSSEIEVPSDQRPVNEYSSLKEGMLYSWGELGPSEFFIRLGGLWLVTFTVLGVPVAAASFNPSREPLRFILAAGTGTLFLVSLIVLRIYLGWSYVGDRLLSAVIPYEESGWYDGQMWVKPPEVLARDRLLGSYKVKPVIKMLKQTLIGTGALLVSAFVLFVFATPVEDFFKTTLGSTENQPEVSISRTSNKFNIRKEQLLRLPVDVVTDDDLAAAAAEAADGRPVYCRDRYYRALAGGQYCKWEDLVK

SEQ ID NO: 257 - protein, 313 aa, Arabidopsis thaliana
MGLKGFAEGGIASIVAGCSTHPLDLIKVRMQLQGESAPIQTNLRPALAFQTSTTVNAPPLRVGVIGVGSRLIREEGMRALFSGVSATVLRQTLYSTTRMGLYDIIKGEWTDPETKTMPLMKKIGAGAIAGAIGAAVGNPADVAMVRMQADGRLPLTDRRNYKSVLDAITQMIRGEGVTSLWRGSSLTINRAMLVTSSQLASYDSVKETILEKGLLKDGLGTHVSASFAAGFVASVASNPVDVIKTRVMNMKVVAGVAPPYKGAVDCALKTVKAEGIMSLYKGFIPTVSRQAPFTVVLFVTLEQVKKLFKDYDF

SEQ ID NO: 258 - protein, 274 aa, Arabidopsis thaliana
MGRTKEQATLTRYPPCPRNPAKFNDINKALQEKGYGKALKRKPWTGVTCPVCLEVPHNSVVLLCSSYHKGCRPYMCATGNRFSNCLEQYKKAYAKDEKSDKPPELLCPLCRGQVKGWTVVEKERKYLNSKKRSCMNDECLFYGSYRQLKKHVKENHPRAKPRAIDPVLEAKWKKLEVERERSDVISTVMSSTPGAMVFGDYVIEPYNGYDHQDDSDDYSDSSDDEMEGGVFELGAFDLGRLQPRSAAISSRGIRGMIIRNRWARSRGASRRRQT

SEQ ID NO: 259 - protein, 441 aa, Arabidopsis thaliana
MDSTKLSELKVFIDQCKSDPSLLTTPSLSFFRDYLESLGAKIPTGVHEEDKDTKPRSFVVEESDDDMDETEEVKPKVEEEEEEDEIVESDVELEGDTVEPDNDPPQKMGDSSVEVTDENREAAQEAKGKAMEALSEGNFDEAIEHLTRAITLNPTSAIMYGNRASVYIKLKKPNAAIRDANAALEINPDSAKGYKSRGMARAMLGEWAEAAKDLHLASTIDYDEEISAVLKKVEPNAHKLEEHRRKYDRLRKEREDKKAERDRLRRRAEAQAAYDKAKKEEQSSSSRPSGGGFPGGMPGGFPGGMPGGFPGGMGGMPGGFPGGMGGMGGMPGGFPGGMGGGMPAGMGGGMPGMGGGMPAGMGGGGMPGAGGGMPGGGGMPGGMDFSKILNDPELMTAFSDPEVMAALQDVMKNPANLAKHQANPKVAPVIAKMMGKFAGPQ

SEQ ID NO: 260 - protein, 142 aa, Arabidopsis thaliana
MAGIGPITQDWEPVVIRKRAPNAAAKRDEKTVNAARRSGADIETVRKFNAGSNKAASSGTSLNTKKLDDDTENLSHDRVPTELKKAIMQARGEKKLTQSQLAHLINEKPQVIQEYESGKAIPNQQILSKLERALGAKLRGKK

SEQ ID NO: 261 - protein, 249 aa, Arabidopsis thaliana
MDNLNVFANEDNQVNDVKPPPPPPRVCARCDSDNTKFCYYNNYCEFQPRYFCKNCRRYWTHGGALRNIPIGGSSRAKRARVNQPSVARMVSVETQRGNNQPFSNVQENVHLVGSFGASSSSSVGAVGNLFGSLYDIHGGMVTNLHPTRTVRPNHRLAFHDGSFEQDYYDVGSDNLLVNQQVGGYGYHMNPVDQFKWNQSFNNTMNMNYNNDSTSGSSRGSDMNVNHDNKKIRYRNSVIMHPCHLEKDGP

SEQ ID NO: 262 - protein, 512 aa, Arabidopsis thaliana
MATLLATPIFSPLASSPARNRLSCSKIRFGSKNGKILNSDGAQKLNLSKFRKPDGQRFLQMGSSKEMNFERKLSVQAMDGAGTGNTSTISRNVIAISHLLVSLGIILAADYFLKQAFVAASIKFPSALFGMFCIFSVLMIFDSVVPAAANGLMNFFEPAFLFIQRWLPLFYVPSLVVLPLSVRDIPAASGVKICYIVAGGWLASLCVAGYTAIAVRKMVKTEMTEAEPMAKPSPFSTLELWSWSGIFVVSFVGALFYPNSLGTSARTSLPFLLSSTVLGYIVGSGLPSSIKKVFHPIICCALSAVLAALAFGYASGSGLDPVLGNYLTKVASDPGAGDILMGFLGSVILSFAFSMFKQRKLVKRHAAEIFTSVIVSTVFSLYSTALVGRLVGLEPSLTVSILPRCITVALALSIVSLFEGTNSSLTAAVVVVTGLIGANFVQVVLDKLRLRDPIARGIATASSAHGLGTAALSAKEPEALPFCAIAYALTGIFGSLLCSVPAVRQSLLAVVG

SEQ ID NO: 263 - protein, 310 aa, Arabidopsis thaliana
MALVRERRQLNLRLPLPPISDRRFSTSSSSATTTTVAGCNGISACDLEKLNVLGCGNGGIVYKVRHKTTSEIYALKTVNGDMDPIFTRQLMREMEILRRTDSPYVVKCHGIFEKPVVGEVSILMEYMDGGTLESLRGGVTEQKLAGFAKQILKGLSYLHALKIVHRDIKPANLLLNSKNEVKIADFGVSKILVRSLDSCNSYVGTCAYMSPERFDSESSGGSSDIYAGDIWSFGLMMLELLVGHFPLLPPGQRPDWATLMCAVCFGEPPRAPEGCSEEFRSFVECCLRKDSSKRWTAPQLLAHPFLREDL

SEQ ID NO: 264 - protein, 612 aa, Arabidopsis thaliana
MPEAPKKESLEVFDLTLDQKNKQKLQLIEELTSNADQVQRQVLEEILTRNADVEYLRRHDLNGRTDRETFKNIMPVITYEDIEPEINRIANGDKSPILSSKPISEFLTSSGTSGGERKLMPTIEEELDRRSLLYSLLMPVMSQFVPGLENGKGMYFLFIKSESKTPGGLPARPVLTSYYKSSHFKERPYDPYTNYTSPNETILCSDSYQSMYSQMLCGLCQHQEVLRVGAVFASGFIRAIKFLEKHWIELVRDIRTGTLSSLITDPSVREAVAKILKPSPKLADFVEFECKKSSWQGIITRLWPNTKYVDVIVTGTMSQYIPTLDYYSNGLPLVCTMYASSECYFGVNLRPLCKPSEVSYTLIPSMAYFEFLPVHRNNGVTNSINLPKALTEKEQQELVDLVDVKLGQEYELVVTTYAGLCRYRVGDLLRVTGFKNKAPQFSFICRKNVVLSIDSDKTDEVELQNAVKNAVTHLVPFDASLSEYTSYADTSSIPGHYVLFWELCLDGNTPIPPSVFEDCCLAVEESFNTVYRQGRVSDKSIGPLEIKIVEPGTFDKLMDYAISLGASINQYKTPRCVKFAPIIELLNSRVVDSYFSPKCPKWVPGHKQWGSN

SEQ ID NO: 265 - protein, 187 aa, Arabidopsis thaliana
LINPISTTGAKLSRSEHSMAASSEPKSLYDFTVKDAKGNDVDLSIYKGKVLLIVNVASQCGLTNSNYTELAQLYEKYKGHGFEILAFPCNQFGNQEPGTNEEIVQFACTRFKAEYPIFDKVDVNGDKAAPVYKFLKSSKGGLFGDGIKWNFAKFLVDKDGNVVDRFAPTTSPLSIEKDVKKLLGVTA

SEQ ID NO: 266 - protein, 101 aa, Arabidopsis thaliana
MAKLITSFLLLTILFTFVCLTMSKEAEYHPESYGPGSLKSYQCGGQCTRRCSNTKYHKPCMFFCQKCCAKCLCVPPGTYGNKQVCPCYNNWKTQQGGPKCP

SEQ ID NO: 267 - protein, 335 aa, Saccharomyces cerevisiae
MAAAPWYIRQRDTDLLGKFKFIQNQEDGRLREATNGTVNSRWSLGVSIEPRNDARNRYVNIMPYERNRVHLKTLSGNDYINASYVKVNVPGQSIEPGYYIATQGPTRKTWDQFWQMCYHNCPLDNIVIVMVTPLVEYNREKCYQYWPRGGVDDTVRIASKWESPGGANDMTQFPSDLKIEFVNVHKVKDYYTVTDIKLTPTDPLVGPVKTVHHFYFDLWKDMNKPEEVVPIMELCAHSHSLNSRGNPIIVHCSAGVGRTGTFIALDHLMHDTLDFKNITERSRHSDRATEEYTRDLIEQIVLQLRSQRMKMVQTKDQFLFIYHAAKYLNSLSVNQ

SEQ ID NO: 268 - protein, 286 aa, Arabidopsis thaliana
MELLTSLTNWLTPTTLFLLLNFTIATIFITNRFSSCSRKHNQHQDGYGSSGHDQNQARFGRPPSLIDRVKSINFHLYNSPSPESEIHYSGSDPNPNPPPSLLQRVKSINMPYFKFPQHNSEGDYAAYELMTQPDETNRVDPIDKIPEDDVTTEPRFGAPSLLQRVKSIKLPSLYRSDPDPTPEVQTHTRTKSESSKPATKKKKKATKKMMKSASERHIGREEEETVEAVEKRRPETMRVERTTSIGDGGEEGVDDKASNFINKFKQQLKLQRLDSFLRYREMLKND

SEQ ID NO: 269 - protein, 130 aa, Arabidopsis thaliana
MALEWVVLGYAAAAEAIMVILLTMPGLDALRKGLVAVTRNLLKPFLSIIPFCLFLLMDIYWKYETRPSCDGDSCTPSEHLRHQKSIMKSQRNALLIASALVFYWILYSVTNLVVRIEQLNQRVERLKNKD

SEQ ID NO: 270 - protein, 366 aa, Arabidopsis thaliana
MAARQQQKGTGFGVQYEDFVPKSEWKDQPEATILNIDLTGFAKEQMKVTYVHSSKMIRVTGERPLANRKWSRFNEVFTVPQNCLVDKIHGSFKNNVLTITMPKETITKVAYLPETSRTEAAALEKAAKLEEKRLLEESRRKEKEEEEAKQMKKQLLEEKEALIRKLQEEAKAKEEAEMRKLQEEAKAKEEAAAKKLQEEIEAKEKLEERKLEERRLEERKLEDMKLAEEAKLKKIQERKSVDESGEKEKILKPEVVYTKSGHVATPKPESGSGLKSGFGGVGEVVKSAEEKLGNLVEKEKKMGKGIMEKIRRKEITSEEKKLMMNVGVAALVIFALGAYVSYTFCSSSSSSSSSSPSSSSSSTKPE

SEQ ID NO: 271 - protein, 736 aa, Arabidopsis thaliana
MGEIATEFTPVMDDDDDRCVVPEVELTVPKTDDSTLPVLTFRMWVLGIGACIVLSFINQFFWYRTMPLSITGISAQIAVVPLGHLMARVLPTKRFLEGTRFQFTLNPGAFNVKEHVLITIFANSGAGSVYATHILSAIKLYYKRSLPFLPAFLVMITTQILGFGWAGLFRKHLVEPGEMWWPSNLVQVSLFGALHEKEKKSRGGMSRTQFFLIVLVASFAYYIFPGYLFTMLTSISWVCWLNPKSILVNQLGSGEHGLGIGSIGFDWVTISAYLGSPLASPLFASVNVAIGFVLVMYIVTPVCYWLNIYDAKTFPIFSSQLFMGNGSRYDVLSIIDSKFHLDRVVYSRTGSINMSTFFAVTYGLGFATLSATIVHVLVFNGSDLWKQTRGAFQKNKKMDIHTRIMKKNYREVPLWWFLVILLLNIALIMFISVHYNATVQLPWWGVLLACAIAISFTPLIGVIAATTNQAPGLNIITEYVIGYIYPERPVANMCFKVYGYISMTQALTFISDFKLGHYMKIPPRSMFMAQVAGTLVAVVVYTGTAWWLMEEIPHLCDTSLLPSDSQWTCPMDRVFFDASVIWGLVGPRRVFGDLGEYSNVNWFFLVGAIAPLLVWLATKMFPAQTWIAKIHIPVLVGATAMMPPATAVNFTSWLIVAFIFGHFIFKYRRVWWTKYNYVLSGGLDAGSAFMTILLFLALGRKGIEVQWWGNSGDRDTCPLASCPTAKGVVVKGCPVF

SEQ ID NO: 272 - protein, 155 aa, Arabidopsis thaliana
MEATKERVGLLDTILPPALADAGLEDCALPPESIQEAFRKAANAVKSRAASIFDHEEEDGCLADPIPETADKIIVGGDNERDTGPCLAGKGIEKLAESKQAGDLVVAGEGEEGKSCVDGLKDLDVEGIERSSEKKDQSDEDEEEEMKPILVEGFV

SEQ ID NO: 273 - protein, 235 aa, Arabidopsis thaliana
MKRIFGAKNNKEPPPSIQDASDRINKRGDSVEEKVKRLDAELCKYKDQIKRTRPGPALEAIKARAMRVLKQKKMYEGQRDMLYNQTFNLDQVSFAAEGLKDAQQTMTALKSANKELKGMMKTVKIQDIDNLQDDMMDLMDESSEIQETLGRSYNVPDDIDEDDLLGELDALEADMGNETEADGVPSYLQPDKEPDLNDELNLPSAPMGHTGAPPGRAQAEDEWGLPAVPRASLRG

SEQ ID NO: 274 - protein, 413 aa, Arabidopsis thaliana
MALSIVLLPFILILIPTFLSSVFAVSPLKTDTLKPGQQLRDWEQLISADGIFTLGFFTPKDSSTSELGSAGLRYLGIWPQSIPINLVWVGNPTESVSDSSGSLSIDTNGVLKITQANAIPILVNQRPAAQLSLVGNVSAILLDTGNFVVREIRPGGVPGRVLWQSFDHPTNTLLPGMKIGFNLRTKKEVSVTSWITDQVPVPGAFRLGLDPSGANQLLVWRRGEIYWSSGILTNNGSSHLNLEVSRHYIDYEFKFDSNKYMKYFSYSIKKANSSVFSSWFLDTLGQITVTFSLSSNNSSTWISESSEPCKTDLKNSSAICITEKPTACRKGSEYFEPRRGYMMENNTGYYPFYYDDSLSAGLSDCHGTCWRNCSCIAFQAFPDGCQYWEKGSKFVPYDSFNSNLVTYVLDSVK

SEQ ID NO: 275 - protein, 362 aa, Arabidopsis thaliana
MDRPAVSGPMDLPIMHDSDRYELVKDIGSGNFGVARLMRDKQSNELVAVKYIERGEKIDENVKREIINHRSLRHPNIVRFKEVILTPTHLAIVMEYASGGELFERICNAGRFSEDEARFFFQQLISGVSYCHAMQVCHRDLKLENTLLDGSPAPRLKICDFGYSKSSVLHSQPKSTVGTPAYIAPEVLLKKEYDGKVADVWSCGVTLYVMLVGAYPFEDPEEPKNFRKTIHRILNVQYAIPDYVHISPECRHLISRIFVADPAKRISIPEIRNHEWFLKNLPADLMNDNTMTTQFDESDQPGQSIEEIMQIIAEATVPPAGTQNLNHYLTGSLDIDDDMEEDLESDLDDLDIDSSGEIVYAM

SEQ ID NO: 276 - protein, 328 aa, Arabidopsis thaliana
MSSSRNTHWCHRCQRAVRLHGQEPVCFYCGGGFVEELDMAQASPFDMFRSHRGVVERDQTFDLMDAFSVFMRNRLAERSHDREIRGRTISSGPENFPGLAPLLIFGGQVPYRLTGDNAVEALFNGGSPGIGITRGNTGDYFFGPGLEELFEQLSAGTTRRGPPPAPRSAIDALPTIKIAQRHLRSSDSNCPVCKDEFELGSEAKQMPCNHIYHSDCIVPWLVQHNSCPVCRQELPSASGPSSSQNRTTPTRNYRSSSSSSSSNSRENGNERRNPFSSFWPFRSSGSSSSSTQNRGGTRNSDTSDENHNYHQQQHQQSYMGYSGWPFDY

SEQ ID NO: 277 - protein, 275 aa, Arabidopsis thaliana
MSNPEKSKIAEEENENFDESDYLWSDEEGDIREIVLGLPALRLSESLNVDESIRNEAVSAAKLIVAAAKEATGNTEQSASGTGDVSGTPEIIKVGKPRVLLEALAEASGCTPIGVTTTEGEVVKKPRKKGSTQLTHLPQGPPMCNVCGKGFASWKAVFGHLRQHKDRGYLGFLPPPTFNAAEEGFGGVATASTGGAVATAISVGEVPTASSAGGLATASSDGEGLVSSIGRARIDLNADPVEEEDKVIGVGSKRKFDLNRSPPPDGDEENDDKVE

SEQ ID NO: 278 - protein, 273 aa, Arabidopsis thaliana
  unsure (1)..(273): unsure at all Xaa locations
MSQSTVDVPPKGGFSFDLCKRNDMLTQKGLKAPSFLKTGTTIVGLIFKDGVILGADTRATEGPIVADKNCEKIHYMAPNIYCCGAGTAADTEAVTDMVSSQLRLHRYQTGRDSRVITALTLLKKHLFSYQGHVSAALVLGGVDITGPHLHTIYPHGSTDTLPFATMGSGSLAAMSVFEAKYKEGLTRDEGIKLVAESICSGIFNDLGSGSNVDICVITKGNKEYLRNYMEPNPRTYVSSKGYSFTKKXEVLLTKITPLLERVEITEVGEAMEE

SEQ ID NO: 279 - protein, 77 aa, Arabidopsis thaliana
MDPSMANNPELLQFLAQEKERAMVNEMVSKMTSVCWDKCITSAPGSKFSSSESSCLTHCAQRYMDMSMIIMKRFNSQ

SEQ ID NO: 280 - protein, 339 aa, Arabidopsis thaliana
MKTIFLVLIFVSFAISPATSTAPEECGSESANPCVNKAKALPLKVIAIFVILIASMIGVGAPLFSRNVSFLQPDGNIFTIIKCFASGIILGTGFMHVLPDSFEMLSSICLEENPWHKFPFSGFLAMLSGLITLAIDSMATSLYTSKNAVGIMPHGHGHGHGPANDVTLPIKEDDSSNAQLLRYRVIAMVLELGIIVHSVVIGLSLGATSDTCTIKGLIAALCFHQMFEGMGLGGCILQAEYTNMKKFVMAFFFAVTTPFGIALGIALSTVYQDNSPKALITVGLLNACSAGLLIYMALVDLLAAEFMGPKLQGSIKMQFKCLIAALLGCGGMSIIAKWA

SEQ ID NO: 281 - protein, 709 aa, Arabidopsis thaliana
MASTSSLGPSTLLSYGSPSRQFPDFGFRLISGHESVRIPSFRRFRVHCESKEKEVKPSSPFLESSSFSGDAALRSSEWKAVPDIWRSSAEKYGDRVALVDPYHDPPLKLTYKQLEQEILDFAEGLRVLGVKADEKIALFADNSCRWLVSDQGIMATGAVNVVRGSRSSVEELLQIYRHSESVAIVVDNPEFFNRIAESFTSKASLRFLILLWGEKSSLVTQGMQIPVYSYAEIINQGQESRAKLSASNDTRSYRNQFIDSDDTAAIMYTSGTTGNPKGVMLTHRNLLHQIKHLSKYVPAQAGDKFLSMLPSWHAYERASEYFIFTCGVEQMYTSIRYLKDDLKRYQPNYIVSVPLVYETLYSGIQKQISASSAGRKFLALTLIKVSMAYMEMKRIYEGMCLTKEQKPPMYIVAFVDWLWARVIAALLWPLHMLAKKLIYKKIHSSIGISKAGISGGGSLPIHVDKFFEAIGVILQNGYGLTETSPVVCARTLSCNVLGSAGHPMHGTEFKIVDPETNNVLPPGSKGIIKVRGPQVMKGYYKNPSTTKQVLNESGWFNTGDTGWIAPHHSKGRSRHCGGVIVLEGRAKDTIVLSTGENVEPLEIEEAAMRSRVIEQIVVIGQDRRRLGAIIIPNKEEAQRVDPETSKETLKSLVYQELRKWTSECSFQVGPVLIVDDPFTIDNGLMTPTMKIRRDMVVAKYKEEIDQLYS

SEQ ID NO: 282 - protein, 446 aa, Arabidopsis thaliana
MANLVLSECGIRPLPRIYTTPRSNFLSNNNKFRPSLSSSSYKTSSSPLSFGLNSRDGFTRNWALNVSTPLTTPIFEESPLEEDNKQRFDPGAPPPFNLADIRAAIPKHCWVKNPWKSLSYVVRDVAIVFALAAGAAYLNNWIVWPLYWLAQGTMFWALFVLGHDCGHGSFSNDPKLNSVVGHLLHSSILVPYHGWRISHRTHHQNHGHVENDESWHPMSEKIYNTLDKPTRFFRFTLPLVMLAYPFYLWARSPGKKGSHYHPDSDLFLPKERKDVLTSTACWTAMAALLVCLNFTIGPIQMLKLYGIPYWINVMWLDFVTYLHHHGHEDKLPWYRGKEWSYLRGGLTTLDRDYGLINNIHHDIGTHVIHHLFPQIPHYHLVEATEAAKPVLGKYYREPDKSGPLPLHLLEILAKSIKEDHYVSDEGEVVYYKADPNLYGEVKVRAD

SEQ ID NO: 283 - protein, 333 aa, Arabidopsis thaliana
MKGILGFEYGIVQAPLGPDISGPELVAAVANAGGIGLLRCPDWECPDYLRELIRKTKTLTEKPFGIGVVLAFPHDLNIKTILEEKVAVLQLYWGDCSQELVDDAHFAGVKVIPQVGNVEEARKAVAVGVDAIIVQGREAGGHVIGKDGLFSLLPRVVDLVGERDIPVIAAGGIVDGRGYVAALSLGAQGVCLGTRFVATHESYAHPIYKRKLIEYEKTEYTDVFGRARWPGAPQRVLETPFFDDWRSLPAHENEVNQPIIGRSTIHGVEKEIRRFSGTVPNMTTTGDLESMAMYAGQSVGLIKEILPAGEVVKSLVEEAQALILQKFNNATTT

SEQ ID NO: 284 - protein, 522 aa, Arabidopsis thaliana
MAMYVIYESSSGYGLFEVHGLDEIGQNTEAVRTSVSDLSRFGRVVQLTAFHPFESALDALNQVNAVSEGVMTDELRSFLELNLPKVKEGKKPKFSLGLAEPKLGSHIFEATKIPCQSNEFVLELLRGVRQHFDRFIKDLKPGDLEKSQLGLAHSYSRAKVKFNVNRVDNMVIQAIFMLDTLDKDINSFAMRVREWYSWHFPELVKIVNDNYLYARVSKMIDDKSKLTEDHIPMLTEVLGDEDKAKEVIEAGKASMGSDLSPLDLINVQTFAQKVMDLADYRKKLYDYLVTKMSDIAPNLAALIGEMVGARLISHAGSLTNLAKCPSSTLQILGAEKALFRALKTRGNTPKYGLIFHSSFIGRASAKNKGRIARYLANKCSIASRIDCFADGATTAFGEKLREQVEERLEFYDKGVAPRKNVDVMKEVIENLKQEEEGKEPVDASVKKSKKKKAKGEEEEEVVAMEEDKSEKKKKKEKRKMETAEENEKSEKKKTKKSKAGGEEETDDGHSTKKKKKKSKSAE

SEQ ID NO: 285 - protein, 186 aa, Arabidopsis thaliana
IATTVGRNIAAPLLFLNLVMYLIVLGFASWCLNKYINGQTNHPSFGGNGATPFFLTFSILAAVVGVASKLAGANHIRFWRNDSLAAAGASSIVAWAITALAMGLACKQINIGGWRGWRLKMIEAFIIILTFTQLLYLMLIHAGSLSSKYGPGYRDQDYATGQAHGHGHVPHTVGEHKAGVGSTMAV

SEQ ID NO: 286 - protein, 405 aa, Arabidopsis thaliana
MAAALQTNIRTVKVPATFRAVSKQSLAPFRVRCAVASPGKKRYTITLLPGDGIGPEVVSIAKNVLQQAGSLEGVEFNFREMPIGGAALDLVGVPLPEETISAAKESDAVLLGAIGGYKWDNNEKHLRPEKGLLQIRAALKVFANLRPATVLPQLVDASTLKREVAEGVDLMVVRELTGGIYFGEPRGIKTNENGEEVGFNTEVYAAHEIDRIARVAFETARKRRGKLCSVDKANVLEASILWRKRVTALASEYPDVELSHMYVDNAAMQLVRDPKQFDTIVTNNIFGDILSDEASMITGSIGMLPSASLSDSGPGLFEPIHGSAPDIAGQDKANPLATILSAAMLLKYGLGEEKAAKRIEDAVLVALNNGFRTGDIYSAGTKLVGCKEMGEEVLKSVDSQVPASV

SEQ ID NO: 287 - protein, 287 aa, Arabidopsis thaliana
MANVSFTFDSQEQNKELRPSRLVGRSDERNGRRQGTEQKKKEKEDSGFRVSEEGEIPLQQGSNTDSYARDDLTQQQRVSDVVMQRRSHETESRLWQRARTQDRRGSESRMMFDGRTQWSHAPVLSSAYPVRPGEDNCLFYMKNHLCEWGSECCYNHPPLQEIPCRIGKKLDCKAGACKRGSNCPFNHPKERDGDSLPMPQGRTPDLRRNDSGRRYNTESRSWPENKEKEVGQFRDHQDSKEDAQEVLLQQRPRDVEMRKRRVHREEELKINVKDAMERSWPYSSERG

SEQ ID NO: 288 - protein, 774 aa, Arabidopsis thaliana
MSCYNKALLIGNKVVVILVFLLCLVHSSESLRPLFACDPANGLTRTLRFCRANVPIHVRVQDLLGRLTLQEKIRNLVNNAAAVPRLGIGGYEWWSEALHGISDVGPGAKFGGAFPGATSFPQVITTAASFNQSLWEEIGRVVSDEARAMYNGGVAGLTYWSPNVNILRDPRWGRGQETPGEDPIVAAKYAASYVRGLQGTAAGNRLKVAACCKHYTAYDLDNWNGVDRFHFNAKVTQQDLEDTYNVPFKSCVYEGKVASVMCSYNQVNGKPTCADENLLKNTIRGQWRLNGYIVSDCDSVDVFFNQQHYTSTPEEAAARSIKAGLDLDCGPFLAIFTEGAVKKGLLTENDINLALANTLTVQMRLGMFDGNLGPYANLGPRDVCTPAHKHLALEAAHQGIVLLKNSARSLPLSPRRHRTVAVIGPNSDVTETMIGNYAGKACAYTSPLQGISRYARTLHQAGCAGVACKGNQGFGAAEAAAREADATVLVMGLDQSIEAETRDRTGLLLPGYQQDLVTRVAQASRGPVILVLMSGGPIDVTFAKNDPRVAAIIWAGYPGQAGGAAIANIIFGAANPGGKLPMTWYPQDYVAKVPMTVMAMRASGNYPGRTYRFYKGPVVFPFGFGLSYTTFTHSLAKSPLAQLSVSLSNLNSANTILNSSSHSIKVSHTNCNSFPKMPLHVEVSNTGEFDGTHTVFVFAEPPINGIKGLGVNKQLIAFEKVHVMAGAKQTVQVDVDACKHLGVVDEYGKRRIPMGEHKLHIGDLKHTILVQPQL

SEQ ID NO: 289 - protein, 353 aa, Glycine max
MGSPESNLPPGFRFHPTDEELILHYLSKKVASIPLTVSIIAEVDIYKLDPWDLPAKATFGEKEWYFFSPRDRKYPNGARPNRAAASGYWKATGTDKTIVTSLQGGAQESAGVKKALVFYKGRPPKGVKTNWIMHEYRLVDNNKPIKLKDSSMRLDDWVLCRIYKKSKHALTSTEASIGVGEVDQAEEHLFQETLLPISKSPAPPPQNTLISQKSVSFSNLLDAMDYSILSSFLSENHTNHPPGVGSSAGFNTGNLDQQCSPINNNNPTNNYMFQKNPQLNPSVSNMENMMRPKRQVSNMDEETLYPSKKYLSSSCNFPTNISNQYENPQWNYLMKQSLMNQRLMLGPHLQFQG

SEQ ID NO: 290 - protein, 481 aa, Arabidopsis thaliana
MEKKKSMFVEQSFPEHEIGDTNKNFDEDGRDKRTGTWMTGSAHIITAVIGSGVLSLAWAIAQLGWVAGPAVLMAFSFITYFTSTMLADCYRSPDPVTGKRNYTYMEVVRSYLGGRKVQLCGLAQYGNLIGITIGYTITASISMVAVKRSNCFHKNGHNVKCATSNTPFMIIFAIIQIILSQIPNFHNLSWLSILAAVMSFCYASIGVGLSIAKAAGGGEHVRTTLTGVTVGIDVSGAEKIWRTFQAIGDIAFAYAYSTVLIEIQDTLKAGPPSENKAMKRASLVGVSTTTFFYMLCGCVGYAAFGNDAPGNFLTGFGFYEPFWLIDFANVCIAVHLIGAYQVFCQPIFQFVESQSAKRWPDNKFITGEYKIHVPCCGDFSINFLRLVWRTSYVVVTAVVAMIFPFFNDFLGLIGAASFWPLTVYFPIEMHIAQKKIPKFSFTWTWLKILSWTCFIVSLVAAAGSVQGLIQSLKDFKPFQAP

SEQ ID NO: 291 - protein, 194 aa, Arabidopsis thaliana
MNNLNVFTNEDNEMNVMPPPRVCPRCYSDQTRFSYFNNNKKSQPRYKCKNCCRCWTHGGVLRNIPVTGICDKSNLPKIDQSSVSQMILAEIQQGNHQPFKKFQENISVSVSSSSDVSIVGNHFDDLSELHGITNSTPIRSFTMDRLDFGEESFQQDLYDVGSNDLIGNPLINQSIGGYVDNHKDEHKLQFEYES

SEQ ID NO: 292 - protein, 288 aa, Arabidopsis thaliana
MDCLSYFSNSDVIQLQDCFIPDVDMIIPETDSFFFQEQPQHQPLYPDEALSPSLFGFDHYDHFYESFLPSQEIFLPSPKTRVFNESQELDSFHTPKHQKLIDSSFHFNSHDPFSPSPESNYLLDSYITEASNISKFQAPDFSSTFKVGWTEQGDTKKRELSAQSIAARKRRRRITEKTQELGKLIPGSQKHNTAEMFNAAAKYVKFLQAQIEILQLKQTKMQTLDSSKVGREMQFLLGSQEIQEKLSTEEVCVVPREMVQVLKAEECILTNPKISRDINKLLSTNLMN

SEQ ID NO: 293 - protein, 368 aa, Arabidopsis thaliana
MDAIRKQASRLREQVARQQQAVFKQFGGGGYGSGLADEAELNQHQKLEKLYISTRAAKHYQRDIVRGVEGYIVTGSKQVEIGTKLSEDSRKYGSENTCTNGNVLTRAALNYGRARAQMEKERGNMLKALGTQVAEPLRAMVLGAPLEDARHLAQRYDRMRQEAEAQATEVARRQAKARESQGNPDILMKLESAEAKLHDLKSNMTILGKEAASALASVEDQQQKLTLERLLSMVESERAYHQRVLQILDQLEGEMVSERQRIEAPSTPSSADSMPPPPSYEEANGVFASQMHDTSTDSMGYFLGEVLFPYHGVTDVELSLSTGEYVVVRKVTGSGWAEGECKGKAGWFPYGYIERRERVLASKVSEVF

SEQ ID NO: 294 - protein, 287 aa, Glycine max
MGQVLGCVQVKQSTVAVKECFGKYDDVLQPGCHFVPWCLGCGVAGVLSTRVMQLSLRCETKTKDNVFVNVVASIQYRALAEKASDAYYKLTNTKAQIQSYVFDVIRATVPKMELDAVFEQKNTIAKAVDEELGKAMSAYGYEIVQTLIVDIVPDEHVKKAMNEINAAARLRVATNDKAEAEKIMQIKRAEGDAESKYLAGLGVSRQRQAIVDGLRDSVLAFSGNVPGTSSKDIMDMVLMTQYFDTMKEIGASSKSNAVFIPHGPGAVSDVASQVRNGLLQGNATTES

SEQ ID NO: 295 - protein, 358 aa, Arabidopsis thaliana
MLLLKEEDEGRRRTSVPTQLMKLNRSQWWILVFISIFFLISAQAISVLLGRFYYNEGGNSKWISTLVQTGGFPILYLPLSLLPASQSSSSSSSSSSFKTLVWIYLSLGFAIGLDNFLYSVGLLYLSASTYSILCASQLAFNGVFYYYINSQKITCLIFFSVLFLSISAVLVSLDDDSNSPSGDSKWSYLIGCFCAVFASLIYSLQLSLMQFSFEKVLKSETLSMVLEMQIYTSLVASCVAVIGLFASGEWMLLSVEMEEFQEGQVIYVLTLVGAAVSCQLGCVGAVSLIFLVSSLFSNLISTLSLIVTPLAAIAVFHDKLTEVKMVAMPIAFTGFTFYIYQNYLDDLKVQRAREAQAE

SEQ ID NO: 296 - protein, 452 aa, Arabidopsis thaliana
MESSGDKQTSSLYPTVDTSNPEAPINPSSSSSTNNLYPSLDMNDLARNLFPEQPETSSIPVSAPPAATEEVILKISGAILHLIDKSYSVELACGDLEIIRIVQGENVVAVLASVSDEIQWPLTKDENSVKVDESHYFFTLRPTKEISHDSSDEEDGDGGKNTNEMLNYGLTIASKGQEHLLVELEKILEDYSSFSVQEVSEEAKEAGEKVLDVTVARETSPVELTGERKEIVERQCSAYWTTLAPNVEDYSGKAAKLIATGSGHLIKGILWCGDVTMDRLIWGNGFMKRRLSKAEKESEVHPDTLKRIRRVKRMTKMTESVANSILSGVLKVSGFFTSSVANTKVGKKFFSLLPGEVILASLDGFNKVCDAVEVAGRNVMSTSSTVTTELVDHKYGGKAAEATNEGLDAAGYALGTAWVAFKIRKAINPKSVLKPSTLAKTAIRSAASQKKA

SEQ ID NO: 297 - protein, 501 aa, Arabidopsis thaliana
MDTGGNSLASGPDGVKRKVCYFYDPEVGNYYYGQGHPMKPHRIRMTHALLAHYGLLQHMQVLKPFPARDRDLCRFHADDYVSFLRSITPETQQDQIRQLKRFNVGEDCPVFDGLYSFCQTYAGGSVGGSVKLNHGLCDIAINWAGGLHHAKKCEASGFCYVNDIVLAILELLKQHERVLYVDIDIHHGDGVEEAFYATDRVMTVSFHKFGDYFPGTGHIQDIGYGSGKYYSLNVPLDDGIDDESYHLLFKPIMGKVMEIFRPGAVVLQCGADSLSGDRLGCFNLSIKGHAECVKFMRSFNVPLLLLGGGGYTIRNVARCWCYETGVALGVEVEDKMPEHEYYEYFGPDYTLHVAPSNMENKNSRQMLEEIRNDLLHNLSKLQHAPSVPFQERPPDTETPEVDEDQEDGDKRWDPDSDMDVDDDRKPIPSRVKREAVEPDTKDKDGLKGIMERGKGCEVEVDESGSTKVTGVNPVGVEEASVKMEEEGTNKGGAEQAFPPKT

SEQ ID NO: 298 - protein, 167 aa, Arabidopsis thaliana
MEKVVDLFGVGEANSQKLLEGGKDLSEIQQGLFIGSVAEANNKDFLKSSNITHVLTVAVALAPPYPDDFVYKVIEVVDRSETDLTVYFDECYSFIDQAIQSGGGVLVHCFMGMSRSVTIVVAYLMKKHGMGFSKAMELVRSRRHQAYPNPGFISQLQQFEKSIQGNA

SEQ ID NO: 299 - protein, 245 aa, Arabidopsis thaliana
MVLETVSKTEPPPLLGPRISFSSDLSDGGDFICITPVMCKEDVVKGSVKVSDFEFLSSENVSPQRMLTADELFSEGKLLPFWQVKHSEKLKNITLKTNEEEEAEKRKVEVKKKDQEINNRDNRVTWFIDEDPSPRPPKCTVLWKELLRLKKQRNPSSSPVTARTVSSLSPSSSTSSSSSLEDAAKREEKEKEGKRGKKGLERTRSASMRIRPMIHVPICTPSKSSLPLPPLFPLSLKKNRVERRA

SEQ ID NO: 300 - protein, 46 aa, Arabidopsis thaliana
MIYRKWSLLSGPPVILGGAVIAAVAVGFVLQNVTKGEQKKNVSTNK

SEQ ID NO: 301 - protein, 162 aa, Arabidopsis thaliana
MASLVAAPISFSGDSHVKAHRNFNAIRKSSTLTVQTKSNRSHKLSVSAGYRGGSKGGGSSDFVTGFLLGSAVFGTLAYIFAPQIRRSVLSENEYGFKKPEQPMYYDEGLEERREILNEKIGQLNSAIDKVSSRLKGGRSGSSKNTSSPSVPVETDAEAEATA

SEQ ID NO: 302 - protein, 302 aa, Arabidopsis thaliana
MGTFLGHFVPGLSLALLGLWHLFNTIRSYCLKGPEAFSAKFWFPFPKLKHLELILILFFSFLSITLLTLDFPNFNFSSLKPDNLEHASMFLHLIIFACFALFCELTLCSDLFSGLIGVLSASVFAQELFLLHFHSTDHSGLEGHYHFLLQLIAFVSFSSALASASFPKSFSAALFLPISVMFQGCWFLNMGFMLWIPEYVPRGCVSNMSTSTDNNRRSVYHSGAVACESPGAEIRAKALANLQFSWMLSAILIITCALCLKYSGKVVLPKIRSSLEYERLCRQGSDRSATVTVEAPASSDQQ

SEQ ID NO: 303 - protein, 488 aa, Arabidopsis thaliana
MYHHAFSLKFHSFSPHYALSLSNFSTQSPNPLLPPFARVPHVTSSVCLRCRSSAADVSPVIYADGSSSICSFGETGDVAVVEKPIDVSTLGNLCVDIVLSVHELPPPSRGERKALMDELSMSPPDKKYWEAGGNCNMAIAAARLGLHCVAIGHVGDEIYGEFLLDVLHEEGIGTVALNGGTNEKDTSSFCETLICWVLVDPLQRHGFCSRADFKEEPAFSWITDLSDEVKMAIRQSKVLFCNGYDFDDFSPSFIMSTIDYAAKVGTAIFFDPGPRGKSLSKGTPDERRALAHFLRMSDVLLLTSEEVEALTGIRNPVKAGQEILRNGKGTKWVIVKMGPKGSILVTKSSVSVAPAFKVEVVDTVGCGDSFVAAIALGYIRNMPLVNTLTIANAVGAATAMGCGAGRNVAKRHQVVDLMKASKLNDEEKFFEQLLAENSESSRINLLSKGMIKDGRSNKQLIETISMEKVVSELLAELELGRCCVKASS

SEQ ID NO: 304 - protein, 320 aa, Arabidopsis thaliana
MESTDSSGGPPPPQPNLPPGFRFHPTDEELVIHYLKRKADSVPLPVAIIADVDLYKFDPWELPAKASFGEQEWYFFSPRDRKYPNGARPNRAATSGYWKATGTDKPVISTGGGGSKKVGVKKALVFYSGKPPKGVKSDWIMHEYRLTDNKPTHICDFGNKKNSLRLDDWVLCRIYKKNNSTASRHHHHLHHIHLDNDHHRHDMMIDDDRFRHVPPGLHFPAIFSDNNDPTAIYDGGGGGYGGGSYSMNHCFASGSKQEQLFPPVMMMTSLNQDSGIGSSSSPSKRFNGGGVGDCSTSMAATPLMQNQGGIYQLPGLNWYS

SEQ ID NO: 305 - protein, 180 aa, Arabidopsis thaliana
MVAVAENQKTKNSLKFLCSYGGRILPRSIDGKLRYVGGFTRVLSVHHSISFTELTMKLEEFCGYSVELKCQLPNGDLETLISVKSDEDLVNIVEEYDRVYGGKIRAILSPPKQMSPRSSGGGGDLSPKSPFSVVASPSPPRYCVAPPTENLLSRFRMRTGEYSRCCNCRVPNRDSKLIWQ

SEQ ID NO: 306 - protein, 422 aa, Arabidopsis thaliana
MATFALPFCEIPEDLQLRILSLLTPAEISSFACTSKRFASLCQEDGKIWHVMCDQRWGKKTKIQKWANGQIPYRHLYKTLKGLENLIGFWRLCGRANPAASSPPLVFFDWGSSFILGSRVLSTGDDTYEVKKTPFLLMGISPEGRSENFLDLVGGNLRSVDDDLKELEASNNLVSVDVNFMGNGHIMVEENRCFTNNNRREDQRSSGDESDDLISSPNFSEMYTQLANKTSPGGDRRRQKRKEKERQASRTKWEPEHFLKVADCSPTPTRPLQGLWKGFCEGSIELYLVKYDEVGGIICRKVEDLSLSRYTPPVFWTPKHTFIRSPFSAEEELLLNSRIHISPFAEVHENVVSGMLYMKSSCDLVLPGEPGNGIGFLRGEGRVWLYDNGTFGFGFLRDQFIIDLKRVALEDGCLADEVEACM

SEQ ID NO: 307 - protein, 418 aa, Arabidopsis thaliana
MTSSRLYLRFLRRFSTATGIDSQTTAYPGAITMSKAKSKLRKVQDPDKALAIYKSVSNNSTSPLSSRYAMELTVQRLAKSQRFSDIEALIESHKNNPKIKTETFLSTLIRSYGRASMFDHAMKMFEEMDKLGTPRTVVSFNALLAACLHSDLFERVPQLFDEFPQRYNNITPDKISYGMLIKSYCDSGKPEKAMEIMRDMEVKGVEVTIIAFTTILGSLYKNGLVDEAESLWIEMVNKGCDLDNTVYNVRLMNAAKESPERVKELMEEMSSVGLKPDTVSYNYLMTAYCVKGMMSEAKKVYEGLEQPNAATFRTLIFHLCINGLYDQGLTVFKKSAIVHKIPDFKTCKHLTEGLVKNNRMEDARGVARIVKKKFPPRLVTEWKKLEEKLGLYSKGNAAAVSSSSQTREVLDQEREDDV

SEQ ID NO: 308 - protein, 255 aa, Arabidopsis thaliana
MENKETKQEPAAAAEQKTVPLIEDEIERSKVGIMRALCDRQDPETKEVDDLMIRRFLRARDLDIEKASTMFLNYLTWKRSMLPKGHIPEAEIANDLSHNKMCMQGHDKMGRPIAVAIGNRHNPSKGNPDEFKRFVVYTLEKICARMPRGQEKFVAIGDLQGWGYSNCDIRGYLAALSTLQDCYPERLGKLYIVHAPYIFMTAWKVIYPFIDANTKKKIVFVENKKLTPTLLEDIDESQLPDIYGGKLPLVPIQET

SEQ ID NO: 309 - protein, 480 aa, Arabidopsis thaliana
MYSGSSDGESHDTSTQRKIPPASSMLWVRNLRRYIGSGAGLGSEALMELETKRILLEIFKEKQQKSQEAGTIPSFYKKKPEEGSISQRVQKLAKYRFLKKQSDLLLNADDLAAMWVCLRENCVIDDATGAEKMNYEDFCHIASVCTEQIGPKCRRFFSPSNFMKFEKDEAGRIAILPFYLYVMRTVSLTQARIDMSELDEDSDGFLHSDEMESYIGGLIPNLAQLRDMPPAFNQMYCRIASQKFFFFCDPHRRGRACIKKILLSNCLQELMELHQESEEEVTDTEQAENWFSLTSAQRICDMFLALDKDMSGSLCKQELKEYADGTLTEIFIERVFDEHVRRGKIVAGNSREMDFDSFLDFVLALENKDTPEGLTYLFRCLDLQGRGFLTTADIHSLFRDVHQKWIEGGNYELCIEDVRDEIWDMVKPSDPLKITLGDLLGCKQGGTVASMLIDVRGFWAHDNRENLLQEEEEPPEEESQ

SEQ ID NO: 310 - protein, 157 aa, Arabidopsis thaliana
MSKNVSRNCLGSMEDIKKVFQRFDKNNDGKISIDELKDVIGALSPNASQEETKAMMKEFDLDGNGFIDLDEFVALFQISDQSSNNSAIRDLKEAFDLYDLDRNGRISANELHSVMKNLGEKCSIQDCQRMINKVDSDGDGCVDFEEFKKMMMINGSA

SEQ ID NO: 311 - protein, 477 aa, Arabidopsis thaliana
MMTLNSLSPAESKAISFLDTSRFNPIPKLSGGFSLRRRNQGRGFGKGVKCSVKVQQQQQPPPAWPGRAVPEAPRQSWDGPKPISIVGSTGSIGTQTLDIVAENPDKFRVVALAAGSNVTLLADQVRRFKPALVAVRNESLINELKEALADLDYKLEIIPGEQGVIEVARHPEAVTVVTGIVGCAGLKPTVAAIEAGKDIALANKETLIAGGPFVLPLANKHNVKILPADSEHSAIFQCIQGLPEGALRKIILTASGGAFRDWPVEKLKEVKVADALKHPNWNMGKKITVDSATLFNKGLEVIEAHYLFGAEYDDIEIVIHPQSIIHSMIETQDSSVLAQLGWPDMRLPILYTMSWPDRVPCSEVTWPRLDLCKLGSLTFKKPDNVKYPSMDLAYAAGRAGGTMTGVLSAANEKAVEMFIDEKISYLDIFKVVELTCDKHRNELVTSPSLEEIVHYDLWAREYAANVQLSSGARPVHA

SEQ ID NO: 312 - protein, 569 aa, Arabidopsis thaliana
MGGHEGFSNQRLSSATWFSHFRASALRSKSLPPPSSQTAVRSTSGDSLVRRLGLFDLILLGVGASIGAGVFVVTGTVARDAGPGVTISFLLAGASCVLNALCYAELSSRFPAVVGGAYMYSYSAFNEITAFLVFVQLMLDYHIGAASISRSLASYAVALLELFPALKGSIPLWMGSGKELLGGLLSLNILAPILLALLTLVLCQGVRESSAVNSVMTATKVVIVLVVICAGAFEIDVANWSPFAPNGFKAVLTGATVVFFSYVGFDAVANSAEESKNPQRDLPIGIMGSLLVCISLYIGVCLVLTGMVPFSLLSEDAPLAEAFSSKGMKFVSILISIGAVAGLTTTLLVGLYVQSRLYLGLGRDGLLPSIFSRIHPTLHTPLHSQIWCGIVAGVLAGIFNVHSLSHILSVGTLTGYSVVAACVVALRLNDKKDRESSNRWTSSWQEGVICLVIIACSGFGAGVFYRFSASVIFILLSVGVAVVASAVLHYRQAYALPLGSGFSCPGVPIVPSVCIFFNIFLFAQLHYEAWIRFVVVSVLATAVYALYGQYHADPSMLDYQRAPETESDA

SEQ ID NO: 313 - protein, 152 aa, Glycine max
MKGGKSKTESKRADPKLAVNKKGAATKARKPAGKGKAAKDPNKPKRPPSAFFVFMEEFRKVFNKEHPENKAVSAVGKAAGAKWKTMSDAEKAPYVAKSEKRKVEYEKNMRAYNKKQAEGPTGGDEEESEKSVSEVNDEDDDEEGSGEEEDDD

SEQ ID NO: 314 - protein, 225 aa, Arabidopsis thaliana
MDTFTAEDLSTIGGIATVSLLHSFIPTHWLPFSIVGRAQKWTLSRTLLVTAFGAVLHVISTSLLGITAITMANTIAGEETVHKLASLLLVFLGGSYVLLFLAGKGGHTHSHNQPMEKMAVAGLVLVPALSPCATTLPVFLAVGNSKSMMVLAIIVLLFSTILVMTSLVALSFYGASQLKFHWVERYDKLLVGSVLCLVGILTLLFHDHDHGGHEAHQLHRKIITL

SEQ ID NO: 315 - protein, 350 aa, Arabidopsis thaliana
MAKSVLVTGGAGYIGSHTVLQLLEGGYSAVVVDNYDNSSAASLQRVKKLAGENGNRLSFHQVDLRDRPALEKIFSETKFDAVIHFAGLKAVGESVEKPLLYYNNNIVGTVTLLEVMAQYGCKNLVFSSSATVYGWPKEVPCTEESPISATNPYGRTKLFIEEICRDVHRSDSEWKIILLRYFNPVGAHPSGYIGEDPLGVPNNLMPYVQQVAVGRRPHLTVFGTDYKTKDGTGVRDYIHVMDLADGHIAALRKLDDLKISCEVYNLGTGNGTSVLEMVAAFEKASGKKIPLVMAGRRPGDAEVVYASTEKAERELNWKAKNGIEEMCRDLWNWASNNPYGYNSSSNGSSS

SEQ ID NO: 316 - protein, 406 aa, Arabidopsis thaliana
MSSIIHGAGAATTTLSTFNSVDSKKLFVAPSRTNLSVRSQRYIVAGSDASKKSFGSGLRVRHSQKLIPNAVATKEADTSASTGHELLLFEALQEGLEEEMDRDPHVCVMGEDVGHYGGSYKVTKGLADKFGDLRVLDTPICENAFTGMGIGAAMTGLRPVIEGMNMGFLLLAFNQISNNCGMLHYTSGGQFTIPVVIRGPGGVGRQLGAEHSQRLESYFQSIPGIQMVACSTPYNAKGLMKAAIRSENPVILFEHVLLYNLKEKIPDEDYVCNLEEAEMVRPGEHITILTYSRMRYHVMQAAKTLVNKGYDPEVIDIRSLKPFDLHTIGNSVKKTHRVLIVEECMRTGGIGASLTAAINENFHDYLDAPVMCLSSQDVPTPYAGTLEEWTVVQPAQIVTAVEQLCQ

SEQ ID NO: 317 - protein, 236 aa, Arabidopsis thaliana
MDVFAFNASLSMCKDVAGIAGNIFAFGLFVSPMPTFRRIMRNKSTEQFSGLPYIYALLNCLICLWYGTPFISHSNAMLMTVNSVGATFQLCYIILFIMHTDKKNKMKMLGLLFVVFAVVGVIVAGSLQIPDQLTRWYFVGFLSCGSLVSMFASPLFVINLVIRTKSVEFMPFYLSLSTFLMSASFLLYGLFNSDAFVYTPNGIGTILGIVQLALYCYYHRNSIEEETKEPLIVSYV

SEQ ID NO: 318 - protein, 475 aa, Arabidopsis thaliana
MAATTRRLLYYVSKRFSTAGVRRSYGGLPQSNSKSPPSSSQRLMELESEFSAHNYHPVPVVFSRANGSTIWDPEGKRYIDFLAAYSAVNQGHCHPKIMKALQEQVEKLTLSSRAFYNDKFPVFAERLTNMFGYDMVLPMNTGAEGVETALKLARKWGHEKKNIPKDEAIIVSCCGCFHGRTLAIVSMSCDNDATRGFGPLLPGNLKVDFGDADSLEKIFKEKGDRIAGFLFEPIQGEAGVIIPPDGYLKAVRELCTKYNVLMIADEVQSGLARSGKMLACDWEEIRPDMVILGKALGGGVIPVSAVLADKDVMLHIKPGQHGSTFGGNPLASAVAMASLDVIVEEKLVERSASLGEELRIQLNEIKKQFPKYIKEVRGRGLFNAIEFNSESLSPVSAYDICLSLKERGVLAKPTHNTIVRLTPPLSISSDELRDGSEALHDVLELDLPNLLKINSGKTPVSHITECDRCGRNLYA

SEQ ID NO: 319 - protein, 433 aa, Arabidopsis thaliana
MDETYFDLLNFFKNPSFTETFVDILLCAVPIWLAVMIGLLIGWSWRPRWTGLIYLGFRSKLRFLWTAPPGFGARRLWLAFTALSAFSVCRTIWSRNDTRANKSATGSASSQTPVEDNDESGLASRGSDNGTVTEDIVTENDLEHLLQLLEVGNAALEWQSMMDKTTPNMSYQAWRHEPETGPVIYRSRTVFEDATPDIVRDFFWDDEFRPKWDFMLANFKTLEEDTQTGTMIVQWRKKFPFFCSDREYIIGRRIWESGKKYYCVTKGVPYPALPKRDKPRRVELYFSSWVIRAVESRKGDGQQTACEVSLVHYEDMGIPKDVAKLGVRHGMWGAVKKLNSGLRAYQSARKSDSSLSRIAQMARITTKLNMDSAESSSRDEDRSRAMEYARQRDHLRMDWKWVVVGGVALACGLHSGIIGKALLAGAGQRLARR

SEQ ID NO: 320 - protein, 188 aa, Arabidopsis thaliana
MEMDSTTTIKPETLSTVSSSPPEKIHLRPMTLSDVDDFMVWATDSNVTRFCTWEPYTSREAAIAYLNDALLPHPWLRAICLDNDRPIGSISVTPVDEIRGEIGYVLGSKYWGKGIATEAVRLVAGEIFKEKPEMQRLEALVDVDNVGSQKVLEKVGFVKEGVMRKFMYLKGNVRDMVMFSFLPSDSLH

SEQ ID NO: 321 - protein, 469 aa, Arabidopsis thaliana
MSFSLRKLLVPILVLVLFLDLCVESGFSQSTPARDDHVHHHGGGCSHSHDHDHDHDHDHHVKKTTAKVEMKLPEELAEEEDMRLCGFGPCLHDHDHESSSTLTGFALWLNALGCSLLVSLASLICLVLLPIMFVQGKPSKWFVDSLALFGAGAMLGDAFLHQLPHAFGGGHSHSNDHHENHDHHDHSHSDSPSHSHSIQDLSVGLSVLAGIVVFLLVEKLVRYVEENSSGSNTWGHHHHHHHAGSKKLKDEGDHNNLDQQSSSDAIVNSSEKVSGGSTDKSLRKRKTSASDATDKSDSGTEITSDGKSDKPEQVETRSSSLVFGYLNLFSDGVHNFTDGMALGSAFLIYGSVGGWSRTMFLLAHELPQEIGDFGILVRSGFTVTKALFFNFLSALVALAGTALVLVWGNEPGQSSLIEGFTAGGFIYIAVAGVLAEMNNSGKSTLKNSACHLISLILGMSVALCISLIE

SEQ ID NO: 322 - protein, 351 aa, Arabidopsis thaliana
MYGFEALTFNIHGGYLEAIVRGHRAGLLTTADYNNLCQCENLDDIKMHLSATKYGSYLQNEPSPLHTTTIVEKCTLKLVDDYKHMLCQATEPMSTFLEYIRYGHMIDNVVLIVTGTLHERDVQELIEKCHPLGMFDSIATLAVAQNMRELYRLVLVDTPLAPYFSECLTSEDLDDMNIEIMRNTLYKAYLEDFYKFCQKLGGATAEIMSDLLAFEADRRAVNITINSIGTELTREDRKKLYSNFGLLYPYGHEELAICEDIDQVRGVMEKYPPYQAIFSKMSYGESQMLDKAFYEEEVRRLCLAFEQQFHYAVFFAYMRLREQEIRNLMWISECVAQNQKSRIHDSVVYMF

SEQ ID NO: 323 - protein, 520 aa, Arabidopsis thaliana
MDFVSRDRISSLPNPVVSHILSFLPTKEAASTSVLSKKWRYLFAYVTNLDFDDSDYQDGKPKSDVELSRSFMEFVDRVLALQGNGSVNKFSLECSNYDVDLARVTGWILNVLGRGVSELDLSILEYPLPSEIFVSKTLVRLKLGPANDLTLTLDRKDVFLPKLKTLYIDCVDVQERGFGFVKLLSGCPVLEELVLMNIGWENWKFCSVSVKTLKRLTFFCEETYENPKSVSFDTPNLVYLEYSDAIASKYPKVNFNSLVEAHIGLRLTEDQSGDADFSEEDYFSEGDEKKQMVGNATDFLKGISTVQILYLSAQAIEVLTFCCEPIPVFNNLIQLTIENNSEIRWDSLPGLLKNCPNLETLVLKRLLHKYNKACGNVCCCKRPKQPSCLSSSPVKVLKIFLFDDNDEEDGSEMRQIKYFLEKMPRLEELVVYYNTAYDPAVLELSKKLQKIPKIASPKCKIQVISENLSLSSTVPSFLTTRWSSLPPEEAYPWVDSPPPQIIDPMLEYGSPPEDDDSWLY

SEQ ID NO: 324 - protein, 140 aa, Arabidopsis thaliana
GDGFQDGKFKFVFLRLKILDLIFKQIANDDSQATTGMRVTDECTSSFMDMKWKKVHRYIVFKIEEKSRKVTVDKVGGAGESYHDLEDSLPVDDCRYAVFDFDFVTVDNCRKSKIFFIAWLVQFTFIPFLILVASKGKTVI

SEQ ID NO: 325 - protein, 365 aa, Arabidopsis thaliana
MDLGVLLPSLQSVYVLVFYFVYLAVAGEILPGKVIRGVLLSDGSQLRYRCNGLLALILLVAILGICAKLGIVSPLVVADRGLELLSATFIFCVLVTLALYVTGRSSSNKGSSLKPHVSGNLVHDWWFGIQLNPQFMSIDLKFFFVRAGMMGWLLINLSILAKSVQDGSLSQSMILYQIFCALYILDYFVHEEYMTSTWDIIAERLGFMLVFGDLLWIPFTFSIQGWWLLHNKVELTVPAIVVNCLVFLIGYMVFRGANKQKHIFKKNPKTPIWGKPPVVVGGKLLVSGYWGIARHCNYLGDLMLALSFSLPCGISSPVPYFYPIYLLILLIWRERRDEVRCAEKYKEIWAEYLRLVPWRILPYVY

SEQ ID NO: 326 - protein, 96 aa, Arabidopsis thaliana
MRETVKLISMEGFEFVIDREAAMVSQTIRSMLTSPGGFSESKDGVVTFPDISTTILEKICQYFYWSLQYSRGKETEFHIEPELTLELMMAANYLHT

SEQ ID NO: 327 - protein, 384 aa, Arabidopsis thaliana
MSVSCCCRNLGKTIKKAIPSHHLHLRSLGGSLYRRRIQSSSMETDLKSTFLNVYSVLKSDLLHDPSFEFTNESRLWVDRMLDYNVRGGKLNRGLSVVDSFKLLKQGNDLTEQEVFLSCALGWCIEWLQAYFLVLDDIMDNSVTRRGQPCWFRVPQVGMVAINDGILLRNHIHRILKKHFRDKPYYVDLVDLFNEVELQTACGQMIDLITTFEGEKDLAKYSLSIHRRIVQYKTAYYSFYLPVACALLMAGENLENHIDVKNVLVDMGIYFQVQDDYLDCFADPETLGKIGTDIEDFKCSWLVVKALERCSEEQTKILYENYGKPDPSNVAKVKDLYKELDLEGVFMEYESKSYEKLTGAIEGHQSKAIQAVLKSFLAKIYKRQK

SEQ ID NO: 328 - protein, 257 aa, Arabidopsis thaliana
MDETNGRRETHDFMNVNVESFSQLPFIRRTPPKEKAAIIRLFGQELVGDNSDNLSAEPSDHQTTTKNDESSENIKDKDKEKDKDKDKDNNNNRRFECHYCFRNFPTSQALGGHQNAHKRERQHAKRGSMTSYLHHHQPHDPHHIYGFLNNHHHRHYPSWTTEARSYYGGGGHQTPSYYSRNTLAPPSSNPPTINGSPLGLWRVPPSTSTNTIQGVYSSSPASAFRSHEQETNKEPNNWPYRLMKPNVQDHVSLDLHL

SEQ ID NO: 329 - protein, 354 aa, Arabidopsis thaliana
MDRRDAMALSGSGSYYIQRGIPGSGPPPPQTQPTFHGSQGFHHFTNSISPFGSNPNPNPNPGGVSTGFVSPPLPVDSSPADSSAAAAGALVAPPSGDTSVKRKRGRPRKYGQDGGSVSLALSPSISNVSPNSNKRGRGRPPGSGKKQRLSSIGEMMPSSTGMSFTPHVIVVSIGEDIASKVISFSHQGPRAICVLSASGAVSTATLLQPAPSHGTIIYEGLFELISLSTSYLNTTDNDYPNRTGSLAVSLASPDGRVIGGGIGGPLIAASQVQVIVGSFIWAIPKGKIKKREETSEDVQDTDALENNNDNTAATSPPVPQQSQNIVQTPVGIWSTGSRSMDMHHPHMDIDLMRG

SEQ ID NO: 330 - protein, 236 aa, Arabidopsis thaliana
MSTLETTRAELGLVVVYLNKAEARDKICRAIQYGSKFLSDGQPGTAQNVDKNTSLARKVFRLFKFVNDLHALISPVPKGTPLPLVLLGKSKNALLSTFLFLDQIVWLGRTGIYKDKERAEILGRISLFCWMGSSVCTSLVEVGELGRLSASIKKLEKEIGNKDKHQQNEQYRAKVEKSNERSLALIKAGMDVVVAFGLLQLAPKKVTPRVTGAFGFASSLISCYQLLPSHPKSKMV

SEQ ID NO: 331 - protein, 369 aa, Arabidopsis thaliana
MAENQNCARMTRAAAKRKASSMALDENPVSKKRVVLGELPNMSNVVAVPNQERETLKAKTSVNTSKRQMKKALMIPEASVLIESRSVDPQMCEPFASDICAYLREMEGKPKHRPLPDYIEKVQSDLTPHMRAVLVDWLVEVAEEYKLVSDTLYLTISYVDRFLSVKPINRQKLQLVGVSAMLIASKYEEIGPPKVEDFCYITDNTFTKQEVVSMEADILLALQFELGSPTIKTFLRRFTRVAQEDFKDSQLQIEFLCCYLSELSMLDYTCVKYLPSLLSASAVFLARFIIRPKQHPWNQMLEEYTKYKAADLQVCVGIIHDLYLSRRGNTLEAVRNKYKQHKYKCVATMPVSPELPLAFFEDITIRGMA

SEQ ID NO: 332 - protein, 775 aa, Arabidopsis thaliana
METRCSLLFLSLILLYLPKPGSGFGSSGPIAASFGGSAFFCAIDASGRQDVICWGKNYSSPSSPSSSSSSSSIASSTSASYNIPSMAVLSGGDGFLCGILSNTSQAFCFSSLGSSSGMDLVPLAYRTTAYSQIAAGNSHVCAVRGAYYSDHDSGTIDCWEITRATNNNSLIAKENPNFYDQIVSNLVFNNIVSGDGFSCGGIRDGGMLCFGPNSSNLGFNTTSDNFQVLAAGKNSVCAILNLSREVKCWGEDESFVNSPMNDSRFVSLTAGPRHFCGIREDNHEVECWGNSNFSLIPKGSGFKAIASSDFIVCGIREEDLVLDCWMVNGSSTLAYDPPLELCSPGMCRAGPCNEKEFAFNASILNEPDLTSLCVRKELMVCSPCGSDCSHGFFLSSSCTANSDRICTPCSLCQNSSCSDICKLHNSNFPDKHWHQLQRLVLIIGSCASALLIIIIGCCVVPRIVTSPNKEDGAANQFKSCIGKPDLDTDQPLENVSPAPSVTPFAQVFRLSELKDATNGFKEFNELGRGSYGFVYKAVLADGRQVAVKRANAATIIHTNTREFETELEILCNIRHCNIVNLLGYSTEMGERLLVYEYMPHGTLHDHLHSGFSPLSWSLRIKIAMQTAKGLEYLHNEAEPRIIHGDVKSSNVLLDSEWVARVADFGLVTSSNEKNLDIKRDVYDFGVVLLEILTGRKRYDRDCDPPEIVEWTVPVIREGKAAAIVDTYIALPRNVEPLLKLADVAELCVREDPNQQPTMSELANWLEHVARDALIF

SEQ ID NO: 333 - protein, 325 aa, Arabidopsis thaliana
MGGWAIAVHGGAGIDPNLPAERQEEAKQLLTRCLNLGIIALRSNVSAIDVVELVIRELETDPLFNSGRGSALTEKGTVEMEASIMDGTKRRCGAVSGITTVKNPISLARLVMDKSPHSYLAFSGAEDFARKQGVEIVDNEYFVTDDNVGMLKLAKEANSILFDYRIPPMGCAGAAATDSPIQMNGLPISIYAPETVGCVVVDGKGHCAAGTSTGGLMNKMMGRIGDSPLIGAGTYASEFCGVSCTGEGEAIIRATLARDVSAVMEYKGLNLQEAVDYVIKHRLDEGFAGLIAVSNKGEVVCGFNSNGMFRGCATEDGFMEVAIWE

SEQ ID NO: 334 - protein, 141 aa, Arabidopsis thaliana
MESEKKIAHEIGGVKNDALRFGLHGVKSNIIGSHPLESSYESEKKSKEALKRTVIAHAYGTALPLKMDMDRQILSRFQRPPGPIPSSMLGLEVYTGAVDDFGFEDYLNDPRDSETFKPVDFHHGMEVRLGISKGPIYPSFM

SEQ ID NO: 335 - protein, 106 aa, Arabidopsis thaliana
MEFCPTCGNLLRYEGGGSSRFFCSTCPYVANIERRVEIKKKQLLVKKSIEPVVTKDDIPTAAETEAPCPRCGHDKAYFKSMQIRSADEPESRFYRCLKCEFTWREE

SEQ ID NO: 336 - protein, 288 aa, Arabidopsis thaliana
METSPQFRLIFAVIISSLIAFRSYKRKSLDLSGGIAGFLVMTIHFTAGFRYGALLLVFFLTSSKLTKVGEDKKRRVDVEFKEGGQRNWVQVLCNSGIASVLVVIACTLTGWKDKCLDSKQSEIVTALIGGIIGHYACCNGDTWSSELGVLSDAQPRLITTFKPVKKGTNGGVTKAGLLAALAAGTTVGLTFLIFGLFTASCASDVALKQLLVIPLSALAGLCGSLIDSILGATIQFSGFCSVRNKVVGKPGPTVKKISGVDILDNNGVNFVSILLTSFLTSIASVYIF

SEQ ID NO: 337 - protein, 307 aa, Arabidopsis thaliana
MEEEQPPAKKRNMGRSRKGCMKGKGGPENATCTFRGVRQRTWGKWVAEIREPNRGTRLWLGTFNTSVEAAMAYDEAAKKLYGHEAKLNLVHPQQQQQVVVNRNLSFSGHGSGSWAYNKKLDMVHGLDLGLGQASCSRGSCSERSSFLQEDDDHSHNRCSSSSGSNLCWLLPKQSDSQDQETVNATTSYGGEGGGGSTLTFSTNLKPKNLMSQNYGLYNGAWSRFLVGQEKKTEHDVSSSCGSSDNKESMLVPSCGGERMHRPELEERTGYLEMDDLLEIDDLGLLIGKNGDFKNWCCEEFQHPWNWF

SEQ ID NO: 338 - protein, 592 aa, Arabidopsis thaliana
MNGTTSSINFLTSDDDASAAAMEAFIGTNHHSSLFPPPPQQPPQPQFNEDTLQQRLQALIESAGENWTYAIFWQISHDFDSSTGDNTVILGWGDGYYKGEEDKEKKKNNTNTAEQEHRKRVIRELNSLISGGIGVSDESNDEEVTDTEWFFLVSMTQSFVNGVGLPGESFLNSRVIWLSGSGALTGSGCERAGQGQIYGLKTMVCIATQNGVVELGSSEVISQSSDLMHKVNNLFNFNNGGGNNGVEASSWGFNLNPDQGENDPALWISEPTNTGIESPARVNNGNNSNSNSKSDSHQISKLEKNDISSVENQNRQSSCLVEKDLTFQGGLLKSNETLSFCGNESSKKRTSVSKGSNNDEGMLSFSTVVRSAANDSDHSDLEASVVKEAIVVEPPEKKPRKRGRKPANGREEPLNHVEAERQRREKLNQRFYSLRAVVPNVSKMDKASLLGDAISYINELKSKLQQAESDKEEIQKKLDGMSKEGNNGKGCGSRAKERKSSNQDSTASSIEMEIDVKIIGWDVMIRVQCGKKDHPGARFMEALKELDLEVNHASLSVVNDLMIQQATVKMGSQFFNHDQLKVALMTKVGENY

SEQ ID NO: 339 - protein, 630 aa, Arabidopsis thaliana
MASHLFTRSRISLLKTLKPNPFTSASPIRAISGTPFLSQDPLLATESTDHDPSNHQSTSTPLPPNPATGSPLYQENWRSPIPNTPSFNQSLVPLGFLNQAPAPRIRALSETLDMNSLLNMFADWTASQRWSDMKQLFEVWVRSLDKNGKPNKPDVNLYNHYLRANLMMGASAGDMLDLVAPMEEFSVEPNTASYNLVLKAMYQARETEAAMKLLERMLLLGKDSLPDDESYDLVIGMHFGVGKNDEAMKVMDTALKSGYMLSTSVFTECVRSCVAKGRTDTLVSIIERCKAVDRNKSLCPSWILCNYIAEVAIQEDNSKLAFYAFEFMFKWITRGEMARPSVIFSVDEGLVVAGLASAARTCSSSLVEGSWTILKQSLRGRKAANPASYIAKINAYASLGNLQKAFTSLHELESAYADSEKEVVEEMLSPFTSLYPLVVACSKKGFETLDEVYFQLESLSQGDTPYKSVAALNCIILGCANTWDLDRAYQTFEAISASFGLTPNIDSYNALLYAFGKVKKTFEATNVFEHLVSIGVKPDSRTYSLLVDAHLINRDPKSALTVVDDMIKAGFEPSRETLKKLRRRCVREMDDENDDQVEALAKKFQIRMGSENRRNMLFNIDYSRGRALNN

SEQ ID NO: 340 - protein, 532 aa, Arabidopsis thaliana
MGSVPDPGELTELAQPSFEEFQKQTSLMTSCTLLWQELSDHFTSLEQNLMKKSEALKQMIETLDNQTQTSLESLKRREVTIDHSVEIVAGKVGERARAALESLEKARDGCGDGSNDDSGDVDDEEGLLSALKSLCLKMDARGFWNFVTARKKELENLRSKIPAALVDCVDPAMLVLEAISEVFPVDTRGDKVSNDYGWACVVILESLTPVIVDPVIGKSRLLVTPSVKEKAKEIAETWKKSLEERGRIENVKTPDVHTFLQHLVTFGIVKSEDLALYRKLVVGSAWRKQMPKLAVSVGLGDQMPDMIEELISRGQQLDAVHFTYEVGLVDKFPPVPLLKAYLRDAKKSAASIMEDSSNTGRATHLVARKEQSALKAVLKCIEEYKLEEEFPPENLKKRLDQLEKTKTEKRKPAAVPANKRTRASYNGPMPPAKAGRITNAYVSSFPFIRSPSHSPQYASPAAYPSPPTTVYSNRSPPYPYSPEIIPGSYQGSPIGYPAYNGYCNGPVPAPAPPVYHPHHHQHHQFHHQQHYY

SEQ ID NO: 341 - protein, 300 aa, Glycine max
MELETLYTPCYMPNSNWFVQESLSTEWTREDNKKFESALAIYDKDTPDRWFKVAAMIPGKTVFDVIKQYRELEEDVSEIEAGHVPIPGYLASSFTFELVDNHNYDGCRRRLAPVRGSDQERKKGVPWTEEEHRRFLMGLLKYGKGDWRNISRNFVVTKTPTQVASHAQKYYIRQKVSGGKDKRRPSIHDITTVNLTETSASDKNKPPVIAPQQKLNSMSKVQLDWTSSHYNDGSLMVFNPNSDDLFVSSSSDVTSMALKMQGQDLYECALREAYAKVKVPGFSMAPRDFNNEAVFGIHAL

SEQ ID NO: 342 - protein, 194 aa, Arabidopsis thaliana
  unsure (1)..(194): unsure at all Xaa locations
MSSNKIVLTSSDGESFQVEEVVARKLQIVKHLLEDDCVINEIPLQNVTGNILSIVLEYCKKHVDDVVDDDASEEPKKKKPDDVAGXVPESTEEGDDASEEAKQNLDAWDAEFMKNIDMETIFKLILAANYLNVEGLLGLTCQTVADYIKDKTPEEVRELFNIENDFTHEEEEEAIRKENAWAFEADTKHEDPKP

SEQ ID NO: 343 - protein, 214 aa, Arabidopsis thaliana [sequence omitted]

SEQ ID NO: 344 - protein, 156 aa, Arabidopsis thaliana
MASISATLPSPLLLTQRKSNLTSIQKLPFSLTRGTNDLSPLSLTRNPSSISLMVKASGESSDSSTDLDVVSTIQNVWDKSEDRLGLIGLGFAGIVALWASLNLITAIDKLPVISSGFELVGILFSTWFTYRYLLFKPDRQELSKIVKKSVADILGQ

SEQ ID NO: 345 - protein, 926 aa, Arabidopsis thaliana
MGSFAGKCEIVEEKEDRQNSIGYSAKSTTIPHSRSSIVDDKDLERPVLKLGYRGSLEDDINQLFESISIRTSGMIPSYQVGATSSSRNNTPLQRNALKSPANPAGPRSPSKRNAEPATLKQALRDLCVTKASETAATKRIPKSTSTGGSVYGSVLVEPGSGASEEGKAVLVELLGEDQSSSSDSISQQLRLLKIHSSSQNSQTSKRYCDEMTILKKHKNLSLDDQEMSIENKNFGSSSPGSGNNKTVVGLKSVRKVRLLYANTPSSTIVNGKRVAKLTRTIPRGGGAKPALRNKGSMKKKATNVYDEVDGFYDPIAKELLCHRCHFSLKNTAAKEDPSKDSLVEPHEICAKDELASDFSSSSYESSHEISASAETKLDKIRSSLDLMNSETSHVSLTSAFRNKNIKDVSEYGNNEIMEEDSLSGKEVDQKDSVFMSEQSVEIGSFSEKSVVMNPDSPPNKLSLGGAAIEDVNENSEIINKGDGYNSSTTSISEEEVQQQSNNIMTRSSFGNRPHMSKDVRWEAIQHIRAQHGLGSLGLRHFNLLKKLGCGDIGTVYLAELTGTNCLFAIKVMDNEFLERRNKMSRAQTEKDILKMLDHPFLPTLYAHFTSDNLSCLVMECCPGGDLHVLRQKQPGRWFPEPAARFYVAEVLLALEYLHMLGVIYRDLKPENILVRDDGHIMVTDFDLSLRCTVSPTLLNSSSPLHADAMRLSSGSRTGSNCIEPSCFRPKLSRGSGPKKKGKQHRMMMKKLKKSDLIARFKSLPQLVAEPTDARSNSFVGTHEYLAPEIIKGEGHGAAVDWWTFGIFLYELLYGKTPFKGATNEETIANVVLQSLKFPDNPNVSFQAKDLIRGLLVKEPENRLGTEKGAAEIKRHAFFEGLNWALIRCAIPPELPDFYDYGVPNQEGKSNYLDCKAVGEHLEFELF

SEQ ID NO: 346 - protein, 348 aa, Arabidopsis thaliana
MLDSSTNSPSAADILAACSTRPQASAVAVAAAALMDGGRRLRPPHDHPQKCPRCESTHTKFCYYNNYSLSQPRYFCKTCRRYWTKGGTLRNIPVGGGCRKNKKPSSSNSSSSTSSGKKPSNIVTANTSDLMALAHSHQNYQHSPLGFSHFGGMMGSYSTPEHGNVGFLESKYGGLLSQSPRPIDFLDSKFDLMGVNNDNLVMVNHGSNGDHHHHHNHHMGLNHGVGLNNNNNNGGFNGISTGGNGNGGGLMDISTCQRLMLSNYDHHHYNHQEDHQRVATIMDVKPNPKLLSLDWQQDQCYSNGGGSGGAGKSDGGGYGNGGYINGLGSSWNGLMNGYGTSTKTNSLV

SEQ ID NO: 347 - protein, 374 aa, Arabidopsis thaliana
MSNDKDSFNVSDLTSALKDEDRAGLVNALKNKLQNLAGQHSDVLENLTPKIRRRVEVLREIQGKHDEIETKFREERAALEAKYQKLYQPLYNKRYEIVNGATEVEGAPEDAKMDQGDEKTAEEKGVPSFWLTALKNNDVISEEITERDEGALIYLKDIKWCKIEEPKGFKLEFFFDQNPYFKNTLLTKAYHMIDEDEPLLEKAIGTEIDWYPGKCLTQKILKKKPKKGAKNAKPITKTEDCESFFNFFNPPQVPDDDEDIDEERAEELQNLMEQDYDIGSTIREKIIPHAVSWFTGEAIEGEEFEIDNDDEDDIDEDEDEDEEDEDEDEEEDDEDEEEEVSKTKKKPSVLHKKGGRPQVTDDQQGERPPECKQQ

SEQ ID NO: 348 - protein, 65 aa, Arabidopsis thaliana
MSLVWLEAMLPLGIIGGMLCIMGNSQYYIHKAYHGRPKHIGHDEWDVAMERRDKKVVEKAAAPSS

SEQ ID NO: 349 - protein, 140 aa, Arabidopsis thaliana
MMSFEMNDRKKIGLGLTGFGVFFSFLGIVFVFDKGLLAMGNILFISGVSLTIGFKSTMQFFMKRQNYKGTISFGVGFFFVIIGWPILGMMLETYGFFVLFSGFWPTLAVFAQKIPVLGWIIQQPYIRSFFDKYRGKRVPV

SEQ ID NO: 350 - protein, 351 aa, Arabidopsis thaliana
MAAISGISSGTLTISRPLVTLRRSRAAVSYSSSHRLLHHLPLSSRRLLLRNNHRVQATILQDDEEKVVVEESFKAETSTGTEPLEEPNMSSSSTSAFETWIIKLEQGVNVFLTDSVIKILDTLYRDRTYARFFVLETIARVPYFAFMSVLHMYETFGWWRRADYLKVHFAESWNEMHHLLIMEELGGNSWWFDRFLAQHIATFYYFMTVFLYILSPRMAYHFSECVESHAYETYDKFLKASGEELKNMPAPDIAVKYYTGGDLYLFDEFQTSRTPNTRRPVIENLYDVFVNIRDDEAEHCKTMRACQTLGSLRSPHSILEDDDTEEESGCVVPEEAHCEGIVDCLKKSITS

SEQ ID NO: 351 - protein, 257 aa, Arabidopsis thaliana
MDSSLLSAATADTFNGNAADQIPPPLQPPGTDMTGISFRDQLWINSYPLDRNYIFDYFALSPFYDTTCNNEILRRRSIHPLDLSHLSKMTGLEYMLTDATEPNLFVFRKQKRDGPEKVTPMLTYYILDGSIYQAPQLCSVFAARVSRTIYNISKAFTDAASKLETIRQVDTENQNEPAESKPASETVDLKEMKRVDVILTSLYRKLAPPPPPPPFPEGYVSQEALGEKEELGTQGGESQPPQVDPIIDQGPAKRMKF

SEQ ID NO: 352 - protein, 295 aa, Arabidopsis thaliana
MSTLPFAPSVTHAHFSHSLSPMFILRHLPLTRHLRLSRNNRVASVVSAAAVRQDASLWTPAPLSLIESAAESLFHISIDISNAPDLVASYTRPGQYLQIRVPDVEKPSFMAIASPPSLASSRGAFEFLVKSIAGSTAEILCGLKKGETVELSSVMGNGFNIDLIDPPEEYPTVLIFATGSGISPIRSLIESGFGADRRSDVRLYYGARNLNRMAYQEKFKEWESAGVKVVPVLSQPDDGWKGETGYVQAAFARAKQLSAPKATGAVLCGQKQMAEEITSMLVADGVSNDKLLKNF

SEQ ID NO: 353 - protein, 328 aa, Arabidopsis thaliana
MQYKNLGKSGLKVSTLSFGAWVTFGNQLDVKEAKSILQCCRDHGVNFFDNAEVYANGRAEEIMGQAIRELGWRRSDIVISTKIFWGGPGPNDKGLSRKHIVEGTKASLKRLDMDYVDVLYCHRPDASTPIEETVRAMNYVIDKGWAFYWGTSEWSAQQITEAWGAADRLDLVGPIVEQPEYNMFARHKVETEFLPLYTNHGIGLTTWSPLASGVLTGKYNKGAIPSDSRFALENYKNLANRSLVDDVLRKVSGLKPIADELGVTLAQLAIAWCASNPNVSSVITGATRESQIQENMKAVDVIPLLTPIVLDKIEQVIQSKPKRPESYR

SEQ ID NO: 354 - protein, 176 aa, Arabidopsis thaliana
MGSEQNDSTSFTQSQASEPKLCVKGCGFFGSPSNMDLCSKCYRGICAEEAQTAVAKAAVEKSFKPSPPRSLFIAEPPAVVVEPKPEKAAVVVVSAEPSSSAVPEANEPSRPARTNRCLCCNKKVGIMGFKCKCGSTFCGEHRYPETHDCSFDFKEVGRGEIAKANPVVKADKIQRF

SEQ ID NO: 355 - protein, 109 aa, Arabidopsis thaliana
MGSTNKLWSRKPDVKTGKSEFPVTRFLRTQIDNIKTTTVGPGIGGGIGCGAGIGIGLSGGLGIGASEGLDHSNVVLGFGIGCGIGFGFGYGFGVGGGYSFDDIKERFDL

SEQ ID NO: 356 - protein, 363 aa, Arabidopsis thaliana
MAKDGPNWDGLLKWSLSHADGTRPTRQLSEEDRKWFMEAMQSQTVDVVKRMKEITLVMQTPEQVLVEHGVTPEDIQDLLDELQEHVESIDMANDLHSIGGLVPLLSFLKNSHANIRAKAADVVSTIVQNNPRSQELVMETNALESLLSNFTSDTDIHARTQALGAISSLIRHNKPGVTAFKLANGYAGLRDALASDSVRFQRKALNLLQYLLQEDDSDRSIATGLGFPRVMMHLASSDDAEIREAALRGLLELSREKNDGSSSIDKSDEKLRQLLEERIKGITLMSQEDLETVKEERQLVDLLWSICYNEPSSLREKGLVVLPGEDALPPDVASKLFEPPLRASAANRNATEKKDEPMKLLGP

SEQ ID NO: 357 - protein, 430 aa, Arabidopsis thaliana
MAQILAASPTCQMRVPKHSSVIASSSKLWSSVVLKQKKQSNNKVRGFRVLALQSDNSTVNRVETLLNLDTKPYSDRIIAEYIWIGGSGIDLRSKSRTIEKPVEDPSELPKWNYDGSSTGQAPGEDSEVILYPQAIFRDPFRGGNNILVICDTWTPAGEPIPTNKRAKAAEIFSNKKVSGEVPWFGIEQEYTLLQQNVKWPLGWPVGAFPGPQGPYYCGVGADKIWGRDISDAHYKACLYAGINISGTNGEVMPGQWEFQVGPSVGIDAGDHVWCARYLLERITEQAGVVLTLDPKPIEGDWNGAGCHTNYSTKSMREEGGFEVIKKAILNLSLRHKEHISAYGEGNERRLTGKHETASIDQFSWGVANRGCSIRVGRDTEAKGKGYLEDRRPASNMDPYIVTSLLAETTLLWEPTLEAEALAAQKLSLNV

SEQ ID NO: 358 - protein, 281 aa, Arabidopsis thaliana
MRHNCCHVSFASILKILNFLQAFIGISIIIYSIWMLDQYNHHVPVDPPPSQPPAASSPDSSYSFSNSIIEINSVSDSLKNPIDFVSGIVLGSGGGDSGFNLRSLDLPAPWFIYCFMAIGILVCIVTIIGFIAAEAINGCCLCFYSILKTLLIIIEAALVGFIVIDRHWEKDLPYDPTGELNSLRAFIEENIDICKWVGIVVVAIQLLSLLLALVLRAMVSPRQSELDDEDDFENPMSRARDNLLGPQANQTSSGSSNIDNWRSRIREKYGLINSQSHTPSA

SEQ ID NO: 359 - protein, 578 aa, Arabidopsis thaliana
MGSDSTLSLPSSSPPCNNRSSVPPTFTTRIFSDVAGDIIVVVDGESFLLHKFPLVARSGKMRKMVRDLKDSSSMIELRDFPGGPSTFELTMKFCYGINFDITAFNVVSLRCAAGYLEMTEDYKEQNLIFRAENYLDQIVFRSFHESVLVLCSCETQEIAETYEIPDRCVEAIAMNACRKQLVSGLSEELKGRDCLEMWTEELSALGIDYYVQVVSAMARLSVRSESIVASLVHYAKTSLKGIIDRNCQEQRKIVEAMVNLLPNDEKGSYSLSIIPLGFLFGMLKVGTIIDIEISCRLELERRIGHQLETASLDDLLIPSVQNEDSMYDVDTVHRILTFFLERIEEEDDECGYDSDSTGQHSSLLKVGRIMDAYLVEIAPDPYLSLHKFTAIIETLPEHSRIVDDGIYRAIDMYLKAHPLLTEEERKKLCNFIDCKKLSQEASNHVAQNDRLPVQMVVRVLYTEQLRLKKALSGDSEEGSWVLPSGVQSRAVSPRDTYAALRRENRELKLEISRMRVRVSELEKEHNLMKHEMMEKSGNNGGTFLTSLSKGIGRIATFGGETRQKVNRKSRSVSERKSS

SEQ ID NO: 360 - protein, 94 aa, Arabidopsis thaliana
MLEGKAMVEDSDMPVKMQMQAMAFASQALDLFDVFDCKSIAGHIKKEFDERYGSGWQCVVGSNFGCFFTHSKGTFIYFQLETLKFLIFKGASTP

SEQ ID NO: 361 - protein, 467 aa, Arabidopsis thaliana
MEGRRITASPRPCSGRRIVAKKRSRPDGFVNSVKKLQRREISSRKDRAFSISTAQERFRNMRLVEQYDTHDPKGHCLVALPFLMKRTKVIEIVAARDIVFALAHSGVCAAFSRESNKRICFLNVSPDEVIRSLFYNKNNDSLITVSVYASDNFSSLKCRSTRIEYILRGQPDAGFALFESESLKWPGFVEFDDVNGKVLTYSAQDSVYKVFDLKNYTMLYSISDKNVQEIKISPGIMLLIFKRAASHVPLKILSIEDGTVLKSFNHLLHRNKKVDFIEQFNEKLLVKQENENLQILDVRNAELMEVSRAEFMTPSAFIFLYENQLFLTFRNRNVSVWNFRGELVTSFEDHLLWHPDCNTNNIYITSDQDLIISYCKADTEDQWIEGNAGSINISNILTGKCLAKITPSSGPPKDDESSSSNCMGKNSKQRRNAVAEALEDITALFYDEERNEIYTGNRHGLVHVWSN

SEQ ID NO: 362 - protein, 505 aa, Arabidopsis thaliana
MASTVSVQPGRIRILKKGSWQPLDQTVGPVVYWMFRDQRLKDNWALIHAVDLANRTNAPVAVVFNLFDQFLDAKARQLGFMLKGLRQLHHQIDSLQIPFFLLQGDAKETIPNFLTECGASHLVTDFSPLREIRRCKDEVVKRTSDSLAIHEVDAHNVVPMWAASSKLEYSARTIRGKINKLLPDYLIEFPKLEPPKKKWTGMMDKKLVDWDSLIDKVVREGAEVPEIEWCVPGEDAGIEVLMGNKDGFLTKRLKNYSTDRNNPIKPKALSGLSPYLHFGQVSAQRCALEARKVRSTSPQAVDTFLEELIVRRELSDNFCYYQPHYDSLKGAWEWARKSLMDHASDKREHIYSLEQLEKGLTADPLWNASQLEMVYQGKMHGFMRQVKSFIWILTVLYNSNYEWTKGPEEALSISIYLNNKYEIDGRDPSGYVGCMWSICGVHDQGWKERPVFGKIRYMNYAGCKRKFNVDSYISYVKSLVSVTKKKRKAEEQLTRDSVDPKITIV

SEQ ID NO: 363 - protein, 611 aa, Arabidopsis thaliana
MSSESPNLPAAAGTVPDNHPPPPPVVTAAEAGSDDSPKGVASKLSAAGISNWAKNLKVPQPFASTQNDSGVENTEKSAFAKFTSGLGIRLSPKSPQTNDTTTEGTSSATESSFIGTITKGLVDTSKNAVKAVQVKARHAVSQNKRRYQEGGFDLDLTYITENIIAMGFPAGDMSSGFFGYVEGFYRNQMEEVINFLETQHKGKYKVYNLCSERLYDVSLFEGKVASFPFDDHNCPPIHLVTSFCQSAYSWLKEDIENVVVVHCKAGMARTGLMICSLLLYLKFFPTAEECMDFYNQKRCVDGKGLVLPSQIRYVKYFERILTYFNGENQPGRRCMLRGFRLHRCPYWIRPSITISDHNGVLFTTKKHPRTKDLSPEDFWFSAPKKGVMVFALPGEPGLTELAGDFKIQFHDRQGDFYCWLNTTMMENRVILKTSELDGFDKRKLPSPGFMVEVVLADINATIPTNPSSETASKTPEETSAANSSPVDGSASVPGPDKETENPDKDDVFSDNEGDSTGPTKTTSSASSQTPEAKKSADETAVLTKATEKVSISGNKGSSQPVQGVTVSKGEATEKPSGAGVNASSSSESEFKVMAADASVFSFGDEDDFESD

SEQ ID NO: 364 - protein, 467 aa, Arabidopsis thaliana
MEEELAMLRQLIGQLQELLHNGSPPPPSSSSSLSSSSPSFLVLHHPQYQNGWCLPCIEDTSADDCCDIVMAGGKRPGIFKMLETVKPPVKRTRKERTQGKSCTEVDEISGNMDQEIWQEFPQDLFEDVVSRLPMATFFQFRAVCRKWNALIDSDSFSRCFTELPQTIPWFYTITHENVNSGQVYDPSLKKWHHPIIPALPKKSIVLPMASAGGLVCFLDIGHRNFYVSNPLTKSFRELPARSFKVWSRVAVGMTLNGNSTSHGYKVLWVGCEGEYEVYDSLSNVWTKRGTIPSNIKLPVLLNFKSQPVAIHSTLYFMLTDPEGILSYDMVSGKWKQFIIPGPPDLSDHTLAACGERLMLVGLLTKNAATCVCIWELQKMTLLWKEVDRMPNIWCLEFYGKHIRMNCLGNKGCLILLSLRSRQMNRLITYNAVTREWTKVPGCTVPRGRKRLWIACGTAFHPSPTARA

SEQ ID NO: 365 - protein, 449 aa, Arabidopsis thaliana
MRLLSSPINRGFFDYVELYPSLVSSYFPPPDRPSAVLSVGETRYVNSVKQTASLDSLNDYEEQFPPLTGGSKTKKFYLGSTNPSTPCQSSQLQNWTSGKDALSLQRNLGCKNRRRRRASRFLHEESNGTTFEVGAGIGSPTSMVHFDSTNPSSSSKSSQSQNLKIRKVRNHRNSGFKSRDQSPQRIKDPPPFDICSSVLERNDTSIKDWILADETNRETVEVSNKHKVIRPGMVLLKDFLTPDIQVDIVKTCRELGVKPTGFYQPGYSVGSKLHLQMMCLGRNWDPQTKYRKNTDIDSKAPEIPVTFNVLVEKAIREAHALIDRESGTEDAERILPVMSPDICIVNFYSETGRLGLHQDRDESEESIARGLPIVSFSIGDSAEFLYGEKRDVEEAQGVILESGDVLIFGGESRMIFHGVKSIIPNSAPMSLLNESKLRTGRLNLTFRHF

SEQ ID NO: 366 - protein, 398 aa, Arabidopsis thaliana
MEIEEASRESGHVVCGSWIRRPKKVNWVLIAKASKRRGSSVSSPALLNIFSFDPITASLSSSPLATHTLKDSDGDPVAVSVHPGGDYFVCSTSKGGCKLFELVGGATGITILAKELLPLQNAGLQKCMAFSFDGSKLAVGGVDGCLRIMEWPNLSVILDEPKAHKSIRDMDFSLDSEFLATTSTDGSARIWKAEDGFPLSTLERSGDENIELCRFSKDGTKPFLFCAAQRGDTPMVNVYDISTWKKLGFKKLSRKTASTMAVSLDGKYIALGGKDGDVSVAEVKTMEIYHYSKRLHLGQSIASLEFCPSERVMLTTSSEWGEMVTKLTVPKEWKEWQIYALLFCLFMASVIAAYVFFENSDSFWKLPMGKDQKRPKISLFGGSSSTPSEDHSRWNLDL

SEQ ID NO: 367 - protein, 432 aa, Arabidopsis thaliana
MAETVHSPIVTYASMLSLLAFCPPFVILLWYTMVHQDGSVTQTFGFFWENGVQGLINIWPRPTLIAWKIIFCYGAFEAILQLLLPGKRVEGPISPAGNRPVYKANGLAAYFVTLATYLGLWWFGIFNPAIVYDHLGEIFSALIFGSFIFCVLLYIKGHVAPSSSDSGSCGNLIIDFYWGMELYPRIGKSFDIKVFTNCRFGMMSWAVLAVTYCIKQYEINGKVSDSMLVNTILMLVYVTKFFWWEAGYWNTMDIAHDRAGFYICWGCLVWVPSVYTSPGMYLVNHPVELGTQLAIYILVAGILCIYINYDCDRQRQEFRRTNGKCLVWGRAPSKIVASYTTTSGETKTSLLLTSGWWGLARHFHYVPEILSAFFWTVPALFDNFLAYFYVIFLTLLLFDRAKRDDDRCRSKYGKYWKLYCEKVKYRIIPGIY

SEQ ID NO: 368 - protein, 364 aa, Arabidopsis thaliana
MGKGGMSQGEGSKVEEENMAAWLVGINTLKIQPFLLPSVGPHDVRVRMKAVGICGSDVHYLKTMRCADFVVKEPMVIGHECAGIIEEVGEEVKHLVVGDRVALEPGISCWRCNLCREGRYNLCPEMKFFATPPVHGSLANQVVHPADLCFKLPENVSLEEGAMCEPLSVGVHACRRAEVGPETNVLVMGAGPIGLVTMLAARAFSVPRIVIVDVDENRLAVAKQLGADEIVQVTTNLEDVGSEVEQIQKAMGSNIDVTFDCAGFNKTMSTALAATRCGGKVCLVGMGHGIMTVPLTPAAAREVDVVGVFRYKNTWPLCLEFLTSGKIDVKPLITHRFGFSQKEVEDAFETSARGSNAIKVMFNL

SEQ ID NO: 369 - protein, 342 aa, Glycine max
MSEKALRDLNTILGTERKNEDSSKACLSKPSVDNAVENIEEWQKKNNSPSLVSPAVNGNLAVTANSGAEVVNPEVEYIESENLNDVDDIDTCLKTLLAGLDSKDWVLVCDTLNNVRRLSIFHKEAMLDMLGDVITSIAKSLKSPRSAVCKTAIMTSADIFSAYNDLIIDSLDPLLVQLLLKSSQDKRFVCEAAEKALISMTIWISPISLLPKLQPYLKNKNPRIRAKASMCFSRSVPQLGAEGIKTYGIDKLIQVAASQLSDQLPESREAARTLLLELQNVYEKSHDLIKPATPTVNNEHTVNEENPEVSSWESFCQSKLSPLSAQAVLRVTTSIAREGLVS

SEQ ID NO: 370 - protein, 446 aa, Arabidopsis thaliana
MSTVSSDPAHAKKSRNSRKALKQKNEIVESSPVSDKGKETKSFEKDLMEMQAMLEKMKIEKEKTEDLLKEKDEILRKKEVEQEKLKTELKKLQKMKEFKPNMTFAFSQSLAQTEEEKKGKKKKKDCAETKRPSTPYILWCKDNWNEVKKQNPEADFKETSNILGAKWKGISAEEKKPYEEKYQADKEAYLQVITKEKREREAMKLLDDEQKQKTAMELLDQYLHFVQEAEHDNKKKAKKIKDPLKPKQPISAYLIYANERRAALKGENKSVIEVAKMAGEEWKNLSEEKKAPYDQMAKKNKEIYLQEMEGYKRTKEEEAMSQKKEEEEFMKLHKQEALQLLKKKEKTDNIIKKTKETAKNKKKNENVDPNKPKKPTSSYFLFCKDARKSVLEEHPGINNSTVTAHISLKWMELGEEEKQVYNSKAAELMEAYKKEVEEYNKTKTSS

SEQ ID NO: 371 - protein, 368 aa, Arabidopsis thaliana
MDPIKHISLPVLVLFLLLSVSAGQPGTPDQRHDPYAYSGSLSPAMAVVVVVVIAALFFMGFFTVYIRHCTGAVDGSVTPAGGARRRVTNATVARGLDAETIETFPTFVYSEVKTQKIGKGALECAICLNEFEDDETLRLLPKCDHVFHPHCIGAWLQGHVTCPVCRTNLAEQTPEPEVVVETDLEAQQQSAVPVPVVELPRVKFPRSHTTGHSVVLPGESTDRFTLRVPEELRKKIMANWKLNRSNSVFVLPRGGSSRSGKQVDRSRAKSDRWLFRKTPSFLWRNRDDGSIRLGGTGSVRGNSVTSPSGDSVRADRWAFLRNPSFLWRNTTPVPSPRVEVNNKDGEGTSSVQHIGTVGSTSGSLRLPV

SEQ ID NO: 372 - protein, 449 aa, Arabidopsis thaliana
MLDLNLNADSPESTQYGGDSYLDRQTSDNSAGNRVEESGTSTSSVINADGDEDSCSTRAFTLSFDILKVGSSSGGDESPAASASVTKEFFPVSGDCGHLRDVEGSSSSRNWIDLSFDRIGDGETKLVTPVPTPAPVPAQVKKSRRGPRSRSSQYRGVTFYRRTGRWESHIWDCGKQVYLGGFDTAHAAARAYDRAAIKFRGVDADINFTLGDYEEDMKQVQNLSKEEFVHILRRQSTGFSRGSSKYRGVTLHKCGRWEARMGQFLGKKAYDKAAINTNGREAVTNFEMSSYQNEINSESNNSEIDLNLGISLSTGNAPKQNGRLFHFPSNTYETQRGVSLRIDNEYMGKPVNTPLPYGSSDHRLYWNGACPSYNNPAEGRATEKRSEAEGMMSNWGWQRPGQTSAVRPQPPGPQPPPLFSVAAASSGFSHFRPQPPNDNATRGYFYPHP

SEQ ID NO: 373 - protein, 495 aa, Arabidopsis thaliana
MLLIISFTIVSFFFIIIFSLFHLLFLQKLRYCNCEICHAYLTSSWKKDFINLSDWYTHLLRRSPTSTIKVHVLNSVITANPSNVEHILKTNFHNYPKGKQFSVILGDLLGRGIFNSDGDTWRFQRKLASLELGSVSVRVFAHEIVKTEIETRLLPILTSFSDNPGSVLDLQDVFRRFSFDTISKLSFGFDPDCLRLPFPISEFAVAFDTASLLSAKRALAPFPLLWKTKRLLRIGSEKKLQESINVINRLAGDLIKQRRLTGLMGKNDLISRFMAVVAEDDDEYLRDIVVSFLLAGRDTVAAGLTGFFWLLTRHPEVENRIREELDRVMGTGFDSVTARCDEMREMDYLHASLYESMRLFPPVQFDSKFALNDDVLSDGTFVNSGTRVTYHAYAMGRMDRIWGPDYEEFKPERWLDNEGKFRPENPVKYPVFQAGARVCIGKEMAIMEMKSIAVAIIRRFETRVASPETTETLRFAPGLTATVNGGLPVMIQERS

SEQ ID NO: 374 - protein, 493 aa, Arabidopsis thaliana
MDDEYMSLEEEEDNCYPSEFDDHDQMCSNAEESDLQHSREPTSQVMEFLSVTENQARTLLIQYQWNVDKLFSVYTDQGKDVLFSRAEEEEGEDKEEEEGGEDEEEEEGGEDEEAEEGGEDEEAEEGVEDEEEEEDEKDDEVQLVSTELAEKFDRFLIESYVEDNNMVKWCPSTPHCGNAIRNIKDDGDVDEVECSCGLQFCFSCLSESHSPCSCLMWKLWKKKCEDESETVNWMTVNTKLCPKCSKPIQKRDGCNHMTCKCGQHFCWLCGQATGRDHSYSSIAGHSCGRYKEEKVRQLERAQRDLDRYTHYHYRYKAHIDSLKLEDKLKKSILKKAVLNSETKDQKVFKEYSWIIDAVNRLFRSRRILSYSYPFVFYMFGKELFKDDMSDEERNIKKNLFEDQQQQLEGNVERLSKILEEPFDEYDHEKVVEMMRHLTNLTAVVDNLCKEMYECIENELLGPLISGIHNIAPYRSKGIEQAAEFSASSACGSS

SEQ ID NO: 375 - protein, 177 aa, Arabidopsis thaliana
MENMGTRVIEPLIMGRVVGDVLDFFTPTTKMNVSYNKKQVSNGHELFPSSVSSKPRVEIHGGDLRSFFTLVMIDPDVPGPSDPFLKEHLHWIVTNIPGTTDATFGKEVVSYELPRPSIGIHRFVFVLFRQKQRRVIFPNIPSRDHFNTRKFAVEYDLGLPVAAVFFNAQRETAARKR

SEQ ID NO: 376 - protein, 228 aa, Arabidopsis thaliana
MRIRRRDEKENQEYKKGLWTVEEDNILMDYVLNHGTGQWNRIVRKTGLKRCGKSCRLRWMNYLSPNVNKGNFTEQEEDLIIRLHKLLGNRWSLIAKRVPGRTDNQVKNYWNTHLSKKLVGDYSSAVKTTGEDDDSPPSLFITAATPSSCHHQQENIYENIAKSFNGVVSASYEDKPKQELAQKDVLMATTNDPSHYYGNNALWVHDDDFELSSLVMMNFASGDVEYCL

SEQ ID NO: 377 - protein, 258 aa, Arabidopsis thaliana
MCALVPPLFPNFGWPSTGEYDSYYLAGDILNNGGFLDFPVPEETYGAVTAVTQHQNSFGVSVSSEGNEIDNNPVVVKKLNHNASERDRRRKINSLFSSLRSCLPASGQSKKLSIPATVSRSLKYIPELQEQVKKLIKKKEELLVQISGQRNTECYVKQPPKAVANYISTVSATRLGDNEVMVQISSSKIHNFSISNVLSGLEEDRFVLVDMSSSRSQGERLFYTLHLQVEKIENYKLNCEELSQRMLYLYEECGNSYI

SEQ ID NO: 378 - protein, 131 aa, Arabidopsis thaliana
MAFSKSLVFVLLAALLISSAVAQSPAPAPSNVGGRRISPAPSPKKMTAPAPAPEVSPSPSPAAALTPESSASPPSPPLADSPTADSPALSPSAISDSPTEAPGPAQGGAVSNKFASFGSVAVMLTAAVLVI

SEQ ID NO: 379 - protein, 311 aa, Arabidopsis thaliana
MMTQKPRTVICVGDIHGNISKLNKLWLNLQSDIQNSDFSSALVIFLGDYCDRGPETRKVIDFLISLPEKHPDQTHVFLAGNHDFAFAGFLGLLPRPSDGSEFKETWKEYSKSEEREGWYKGEGFENMHLQSRRWAGKIRVQFDYSAYGVLYNGSIYDAASTFESYGVPHGSSDLIKAVPESHKKFLTNMVWVHKEDDVCIETEEGLTHCKLIAVHAGLETKNNVEEQLKLLRDKDTSIPRIQPLTGRKTVWGIPQELDDKKTIVVSGHHGKLHIDGLRLIIDEGGGYTDTPLAAIVLPSKKIIRDTDNFSN

SEQ ID NO: 380 - protein, 436 aa, Arabidopsis thaliana
MKRRRKDLKQAAESEQEECQSIAQVVSLGDSDQIQPPPNKKEEEDICEYLLQNFDLDHVMEILMRFPLTSLTRFKCVSKQWSSLISSRYFCNLLYTTVTRQQPRLYMCLKDDGGHRVLLSISSPSRGNTSFVVVEQDLSIPGMGGFFLNVVRGLMCFSRRKKARIYNPSTKQLLTLPAIKSDIVAQQGQTKHHPRYYIGHDPVSDQYKLVCTVAISSLLPRLGNLKSEHWVFALEAGGSWKKVVPLENYRHHAPSTEGRSTSGSVVRYMAWPDNYNCVVVSFDIRSEQLTIIPVPREIHLDEVVPAVTMMADLIEYGGKIAIFYHTNLKDEGSADLWVLEDTGKSEWSKKTLVLQPCQRHLVEDIELIVKGTTQDGKVILAPVEMHSRFYILYYNLQSNDLRKVEIKGVPDSWFDKECYFDLNSMDKSESFIYLET

SEQ ID NO: 381 - protein, 619 aa, Arabidopsis thaliana
MRGSWYKSVSSVFGLRPRIRGLLFFIVGVVALVTILAPLTSNSYDSSSSSTLVPNIYSNYRRIKEQAAVDYLDLRSLSLGASLKEFPFCGKERESYVPCYNITGNLLAGLQEGEELDRHCEFEREKERCVVRPPRDYKIPLRWPLGRDIIWSGNVKITKDQFLSSGTVTTRLMLLEENQITFHSEDGLVFDGVKDYARQIAEMIGLGSDTEFAQAGVRTVLDIGCGFGSFGAHLVSLKLMPICIAEYEATGSQVQLALERGLPAMIGNFFSKQLPYPALSFDMVHCAQCGTTWDIKDAMLLLEVDRVLKPGGYFVLTSPTNKAQGNLPDTKKTSISTRVNELSKKICWSLTAQQDETFLWQKTSDSSCYSSRSQASIPLCKDGDSVPYYHPLVPCISGTTSKRWISIQNRSAVAGTTSAGLEIHGLKPEEFFEDTQIWRSALKNYWSLLTPLIFSDHPKRPGDEDPLPPFNMIRNVMDMHARFGNLNAALLDEGKSAWVMNVVPVNARNTLPIILDRGFAGVLHDWCEPFPTYPRTYDMLHANELLTHLSSERCSLMDLFLEMDRILRPEGWVVLSDKVGVIEMARALAARVRWEARVIDLQDGSDQRLLVCQKPFIKK

SEQ ID NO: 382 - protein, 528 aa, Arabidopsis thaliana
MNENHIQSDHMNNTIHVTNKKLPNFLLSVRLKYVKLGYHYLISNAVYILILPVGLLAATSSSFSLTDLTLLYNHLLKFHFLSSTLFAALLIFLTTLYFTTRPRRIFLLDFACYKPDSSLICTRETFMDRSQRVGIFTEDNLAFQQKILERSGLGQKTYFPEALLRVPPNPCMSEARKEAETVMFGAIDAVLEKTGVNPKDIGILVVNCSLFNPTPSLSAMIVNKYKLRGNVLSYNLGGMGCSAGLISIDLAKQLLQVQPNSYALVVSTENITLNWYLGNDRSMLLSNCIFRMGGAAVLLSNRSSDRCRSKYQLIHTVRTHKGSDDNAFNCVYQREDNDDNKQIGVSLSKNLMAIAGEALKTNITTLGPLVLPMSEQLLFFATLVARKVFNVKKIKPYIPDFKLAFEHFCIHAGGRAVLDEIEKNLDLSEWHMEPSRMTLNRFGNTSSSSLWYELAYSEAKGRIKRGDRTWQIAFGSGFKCNSAVWRALRTIDPSKEKKKKTNPWIDEIHEFPVPVPRTSPVTSSSESR

SEQ ID NO: 383 - protein, 436 aa, Arabidopsis thaliana
MKASGSLDSWREYFRRRGDSDIFGIIDHAIMVAATDCPNKFKSRRDKIAELLFSCRVNRCVGCDHLELSVPGDDEANRGTTGNGGGGTAVDEDYEVAGGSKESKANSSRGDNNQIVSNYTFDEAEALSDEIEEFSVVSKEVARIKEILLNKEDEPNSVLLDSLRHLKLMSLNVDILKSTEIGKAVNGLRKHSSDKIRQLAKTLIAEWKELVDQWVNTTKEITGAEGTPESANPSVLDEEEAFPSLPYDVDIFTPEPNGFEISHFFDSLDFDGNPRNSEEHNTSREHERRPQNIAKRKPEGTQMRIQDAPFRSIKPSSATDFDGTRRPVKQSTEQRMKNETVSVHKSEKPMIQRKPVVTEQKRKAPGPQQEKLKGLDADAKFEFAKRKLQESYQHHENAKKQRTIQVLEMIPKQGSAQKPQLKRPGMSNRNWANGRK

SEQ ID NO: 384 - protein, 202 aa, Arabidopsis thaliana
MAKQYLFVLLSISYLLSLELTAATAASQTGASKKAINFIQSSCKTTTYPALCVHSLSVYANDIQTSPKRLAETAIAVTLSRAQSTKLFVSRLTRMKGLKKREVEAIKDCVEEMNDTVDRLTKSVQELKLCGSAKDQDQFAYHMSNAQTWTSAALTDENTCSDGFSGRVMDGRIKNSVRARIMNVGHETSNALSLINAFAKTY

SEQ ID NO: 385 - protein, 368 aa, Arabidopsis thaliana
MDRLKLYFSVFVLSFFIVSVSSSDVNDGDDLVIRQVVGGAEPQVLTSEDHFSLFKRKFGKVYASNEEHDYRFSVFKANLRRARRHQKLDPSATHGVTQFSDLTRSEFRKKHLGVRSGFKLPKDANKAPILPTENLPEDFDWRDHGAVTPVKNQGSCGSCWSFSATGALEGANFLATGKLVSLSEQQLVDCDHECDPEEADSCDSGCNGGLMNSAFEYTLKTGGLMKEEDYPYTGKDGKTCKLDKSKIVASVSNFSVISIDEEQIAANLVKNGPLAVAINAGYMQTYIGGVSCPYICTRRLNHGVLLVGYGAAGYAPARFKEKPYWIIKNSWGETWGENGFYKICKGRNICGVDSMVSTVAATVSTTAH

SEQ ID NO: 386 - protein, 428 aa, Arabidopsis thaliana
MSTKGEHHTVPLSVLLKRESANEKIDNPELIHGQHNQSKKGEDFTLVKTECQRVMGDGVTTFSVFGLFDGHNGSAAAIYTKENLLNNVLAAIPSDLNRDEWVAALPRALVAGFVKTDKDFQERARTSGTTVTFVIVEGWVVSVASVGDSRCILEPAEGGVYYLSADHRLEINEEERDRVTASGGEVGRLNTGGGTEIGPLRCWPGGLCLSRSIGDLDVGEYIVPVPYVKQVKLSSAGGRLIISSDGVWDAISAEEALDCCRGLPPESSAEHIVKEAVGKKGIRDDTTCIVVDILPLEKPAASVPPPKKQGKGMLKSMFKRKTSDSSSNIEKEYAEPDVVEELFEEGSAMLSERLDTKYPLCNMFKLFMCAVCQVEVKPGEGVSIHAGSDNCRKLRPWDGPFLCASCQDKKDAMEGKRSSGDRHSSESD

SEQ ID NO: 387 - protein, 189 aa, Arabidopsis thaliana
MTNYGAIPTSSHPSPAIDLEYISRAKHRIKSGLATRRPWKSMFDFESMTLPHGFFDAISRIKTNLGYFRANYAIGVLFILFLSLLYHPTSLIVLSILVVFWIFLYFLRDEPLVVFGYQIDDRTVLIGLSVLTVVMLLLTHATSNILGSLLTAAVLVLIHAAVRRSDNLFLDEEAAAVTEASGLMSYPSS

SEQ ID NO: 388 - protein, 230 aa, Arabidopsis thaliana
YLCADLVSLAHVLQKKYALLRDLDKSLQAENQRQNEQRCEKEIEDIRRGRAGNITPNTSLTKFSEEALDEQKHSVRIADEKVTLAMQAYDLVDMHVQQLDQYMKKSDEVIRKEKEAAAATLELENNGKAGNAGEGGRGGRKKTRLATAASTAAASTGMTSSNMDLDLPVDPNEPTYCICNQVSFGEMVACDNNACKIEWFHFGCVGLKEQPKGKWYCPECATVKKSRKGR

SEQ ID NO: 389 - protein, 212 aa, Arabidopsis thaliana
MKKKMIPTTILLSALIFSLSPICEAVWLTVPHTGSKCVSEEIQSNVIVLADYLVISEEHSIFPTVSVKVTAPYGTVLHHRENTTNGQFAFTTQESGTYLACFEADAKSHGNKDFSINIDWKTGIAAKDWDSIARKEKIEGVELEFKKLEGAVEAIHENLIYLRNREAEMRIVSEKTNSRVAWYSIMSLGICIVVSGLQILYLKQYFEKKKLI

SEQ ID NO: 390 - protein, 482 aa, Arabidopsis thaliana
MATYYKTGSSEIYSRPEFVPGNAMNYTNSFTETFPRDSTNNVSPSKEIQVLSSLGGVSQMVEIQDSGSWRDQEDNDRNRFPVMRRLGLSSQIETSRGNNNNEYATQVVSGFTRTIHNSKYLKAAQELLDETVNVKKALKQFQPEGDKINEVKEKNLQTNTAEIPQAERQELQSKLSKLLSILDEVDRNYKQYYHQMQIVVSSFDVIAGCGAAKPYTALALQTISRHFRCLRDAISGQILVIRKSLGGEQDGSDGRGVGISRLRNVDQQVRQQRALQRLGVMQPHTWRPQRGLPDSSVLVLRAWLFEHFLHPYPKDSDKIMLARQTGLSRGQVSNWFINARVRLWKPMVEEMYKEEFTDALQENDPNQSSENTPEITEIQELQTESSSNNGHVPGVASSSMRQNTVAHGGDRFMMVTDMTRNGNGGMSLTLGIQNSDARGDVPMSGGIDNYKNTISGTDLQYLNSRNHQHQIGSSQLLHDFVA

SEQ ID NO: 391 - protein, 106 aa, Arabidopsis thaliana
MDNTDRRRRRKQHKIALHDSEEVSSIEWEFINMTEQEEDLIFRMYRLVGDRWDLIAGRVPGRQPEEIERYWIMRNSEGFADKRRQLHSSSHKHTKPHRPRFSIYPS

SEQ ID NO: 392 - protein, 252 aa, Arabidopsis thaliana
MATSIARLSRRGVTSNLIRRCFAAEAALARKTELPKPQFTVSPSTDRVKWDYRGQRQIIPLGQWLPKVAVDAYVAPNVVLAGQVTVWDGSSVWNGAVLRGDLNKITVGFCSNVQERCVVHAAWSSPTGLPAATIIDRYVTVGAYSLLRSCTIEPECIIGQHSILMEGSLVETRSILEAGSVVPPGRRIPSGELWGGNPARFIRTLTNEETLEIPKLAVAINHLSGDYFSEFLPYSTVYLEVEKFKKSLGIAV

SEQ ID NO: 393 - protein, 389 aa, Arabidopsis thaliana
MEKTSMFSIHEGKPIRCKAAVSRKPGEALVIEEIHVDPPQAYEVRIKIICTSLCHTDVSFSKIDSGPLARFPRILGHEAVGVIESIGEHVNGFQQGDVVLPVFHPHCEECRDCKSSKSNWCARFADDFLSNTRRYGMTSRFKDSFGEDIYHFLFVSSFSEYTVVDIAHLVKISPDIPVDKAALLSCGVSTGIGAAWKVANVEKGSTVAVFGLGAVGLAVGEGARLRGAGKIIGVDLNPEKFELGKKFGFTDFINSTLCGENKISEVIKEMTGGGVDYSFECVGLPSLLTEAFSSTRTGSGKTVVLGIDKHLTPVSLGSFDLLRGRHVCGSLFGGLKPKLDIPILVDHYLKKELNLDSFITHELKFEEINKAFDLLVQGKSLRCILWMNK

SEQ ID NO: 394 - protein, 458 aa, Arabidopsis thaliana
MEKVKIEEIQSTAKKQRIATHTHIKGLGLEPTGIPIKLAAGFVGQLEAREAAGLVVDMIKQKKMAGKALLLAGPPGTGKTALALGISQELGSKVPFCPMVGSEVYSSEVKKTEVLMENFRRAIGLRIKETKEVYEGEVTELSPEETESLTGGYGKSISHVVITLKTVKGTKHLKLDPTIYDALIKEKVAVGDVIYIEANSGAVKRVGRSDAFATEFDLEAEEYVPLPKGEVHKKKEIVQDVTLQDLDAANARPQGGQDILSLMGQMMKPRKTEITDKLRQEINKVVNRYIDEGVAELVPGVLFIDEVHMLDMECFSYLNRALESSLSPIVIFATNRGVCNVRGTDMPSPHGVPIDLLDRLVIIRTQIYDPSEMIQIIAIRAQVEELTVDEECLVLLGEIGQRTSLRHAVQLLSPASIVAKMNGRDNICKADIEEVTSLYLDAKSSAKLLHEQQEKYIS

SEQ ID NO: 395 - protein, 551 aa, Glycine max
MSLISQNASTKNVVNKSKREVEDDVENSDTLKVKKKKKYDEGEQLAMEQVKEMKKLENFLFGSLYSPLEFGKEEDEVEPPKAAEKVSDLFFTDRSADSVLTVYREEDADLSEGSHDDDDRALQKKPVWVDDEEENATVNIAKVNRLRKLRKGEDEDLISGSEYVSRLRAQHVKLNPGTEWARADSRIDRSSDDELTDDENEAVLSHGYEDVNDVLRTNEDLVVKSGTKLLPGHLEYSRLVDANIQDPANGPINSVQFHPNAQLFLAAGLDRKLRFFQIDGKRNTKIQSIFLEDCPIRKASFLPDGSQVIVSGRRKFFYSFDLVKARVDKIGPLVGREEKSLEVFEVSPDSQMIAFTGNEGYILLVSTKTKQLVGTLKMNGTIRSLAFAENGQKLLSGGGDGQVYHWDLRTMTCLHKGVDEGCINGTALCTSPSGTHFAAGSDSGIVNIYNREEFLGGKRKPIRTIENLTTKVDFMRFNHDSQILAICSGMKKSSLKLIHIPSYSVFSNWPPSNTNLHYPRCIDFSPGGGFMAVGNASGKVLLYKLHHYQHA

SEQ ID NO: 396 - protein, 619 aa, Saccharomyces cerevisiae
MDDSVSFIAKEASPAQYSHSLHERTHSEKQKRDFTITEKQDEVSGQTAEPRRTDSKSILQRKCKEFFDSFKRQLPPDRNSELESQEKNNLTKSIKSRHLVMISLGTGIGTGLLVGNGQVLGTAGPAGLVLGYGIASIMLYCIIQAAGELGLCYAGLTGNYTRYPSILVDPSLGFAVSVVYTIQWLTVLPLQLVTAAMTVKYWTSVNADIFVAVVFVFVIIINLFGSRGYAEAEFIFNSCKILMVIGFVILAIIINCGGAGDRRYIGAEYWHNPGPFAHGFKGVCTVFCYAAFSYGGIEVLLLSAAEQENPTKSIPNACKKVVYRILLIYMLTTILVCFLVPYNSDELLGSSDSSGSHASPFVIAVASHGVKVVPHFINAVILISVISVANSSLYSGPRLLLSLAEQGVLPKCLAYVDRNGRPLLCFFVSLVFGCIGFVATSDAEEQVFTWLLAISSLSQLFIWMSMSLSHIRFRDAMAKQGRSMNEVGYKAQTGYWGSWLAVLIAIFFLVCQFWVAIAPVNEHGKLNVKVFFQNYLAMPIVLFAYFGHKIYFKSWSFWIPAEKIDLDSHRNIFVSPSLTEIDKVDDNDDLKEYENSESSENPNSSRSRKFFKRMTNFWC

SEQ ID NO: 397 - protein, 262 aa, Glycine max
MSQEQLKKPQGEQDPIKYGDVFKVSDELAFKPIAPRDAALMQATENQALGQTQKGGPASVMQSAATENLRAGVVGRQDISDVARNEGVSVTETKVGCHRVITEFVGRHVVGQFVEPDVPMNTPGTALERDAITIGEALEASAIAGASDKPVDESDAAAIQAAEMRATGKNETEPGGLGARAQSAATRNTRTVSHSHKTTLSDVLTDAKEKLPADKAVTREDAEGVIGAELRNKLDMRTTPGGVAASMAAAATLNQNRQVTDA

SEQ ID NO: 398 - protein, 485 aa, Arabidopsis thaliana
MVLEPNFVLSWVFLCIAATISSTLFFFRKKHHRFITKKIQKKKKLLPGEMGLPWIGETMDFYKAQKSNRVFEDFVNPRIIKHGNIFKTRIMGSPTIVVNGAEANRLILSNEFSLVVSSWPSSSVQLMGMNCIMAKQGEKHRVLRGIVANSLSYIGLESLIPKLCDTVKFHHETEWRGKEEISLYRSAKVLTFTVVFECLYGIKVEIGMLEVFERVLEGVFALPVEFPCSKFARAKKARLEIETFLVGKVREKRREMEKEGAEKPNTTLFSRLVEELIKGVITEEEVVDNMVLLVFAAHDTTSYAMSMTFKMLAQHPTCRDTLLQEHAQIKANKGEGEYLTVEDVKKMKYSWQVVRETMRLSPPIFGSFRKAVADIDYGGYTIPKGWKILWTTYGTHYNPEIFQDPMSFDPTRFDKPIQAYTYLPFGGGPRLCAGHQLAKISILVFMHFVVTGFDWSLVYPDETISMDPLPFPSLGMPIKISPKVS

SEQ ID NO: 399 - protein, 285 aa, Arabidopsis thaliana
HFLQLLQISYFPENHFPKKNKTFPFVLLPPTAITAYQSELGGDSSPLRKSGRGKIEIKRIENTTNRQVTFCKRRNGLLKKAYELSVLCDAEVALIVFSSRGRLYEYSNNSVKGTIERYKKAISDNSNTGSVAEINAQYYQQESAKLRQQIISIQNSNRQLMGETIGSMSPKELRNLEGRLERSITRIRSKKNELLFSEIDYMQKREVDLHNDNQILRAKIAENERNNPSISLMPGGSNYEQLMPPPQTQSQPFDSRNYFQVAALQPNNHHYSSAGRQDQTALQLV

SEQ ID NO: 400 - protein, 263 aa, Arabidopsis thaliana
MLELRLVQGSLLKKVLESIKDLVNDANFDCSSTGFSLQAMDSSHVALVSLLLRSEGFEHYRCDRNLSMGMNLGNMSKMLKCAGNDDIITIKADDGGDTVTFMFESPTQDKIADFEMKLMDIDSEHLGIPDAEYHSIVRMPSNEFSRICKDLSSIGDTVVISVTKEGVKFSTAGDIGTANIVLRQNTTVDKPEDAIVIEMKEPVSLSFALRYMNSFTKATPLSDTVTISLSSELPVVVEYKVAEMGYIRYYLAPKIEEEEDTNP

SEQ ID NO: 401 - protein, 367 aa, Arabidopsis thaliana
MALEKEEEASQNGAFCVLDGLYCEEETGFVEDDLDDDGDLDFLEKSDESVVKFQFLPLLDMFLWDDDEILSLISKENETNPCFGEQILDGFLVSCRKEALDWVLRVKSHYGFTSLTAILAVNYFDRFMTSIKLQTDKPWMSQLVAVASLSLAAKVEEIQVPLLLDLQVEEARYLFEAKTIQRMELLILSTLQWRMHPVTPISFFDHIIRRFGSKWHQQLDFCRKCERLLISVIADTRFMRYFPSVLATAIMILVFEELKPCDEVEYQSQITTLLKVNQEKVNECYELLLEHNPSKKRMMNLVDQDSPSGVLDFDDSSNSSWNVSTTASVSSSSSSPEPLLKRRRVQEQQMRLPSINRMFLDVLSSPR

SEQ ID NO: 402 - protein, 268 aa, Arabidopsis thaliana
MEYKHFSHPHTLKLQQIQPHKSSDSSVICSGCESAISESETAYICSTCDFNLHEQCGNAVRGMQHPSHAGLHHLTLVPYTTYSAGTFLCRACGCTGGKGFSYCCPLCDFDLHVQCAHLPQVLVHESHPMHSLLLVYNSTPPMSFTQFGFGNQLVCNLCNMTMDGRFWSYNCYACNYHIHASCAVNKPNPVAASAENCGASDEGKTPTAESVPVQGLETEQTEQVAAITEQVEDPVLRQQLELQKLQLELDMSSALANMIGSFNLSSFV

SEQ ID NO: 403 - protein, 382 aa, Arabidopsis thaliana
MGYIGAHGVAALHRYKYSGVDHSYLAKYVLQPFWTRFVKVFPLWMPPNMITLMGFMFLVTSSLLGYIYSPQLDSPPPRWVHFAHGLLLFLYQTFDAVDGKQARRTNSSSPLGELFDHGCDALACAFEAMAFGSTAMCGRDTFWFWVISAIPFYGATWEHYFTNTLILPVINGPTEGLALIFVSHFFTAIVGAEWWAQQLGQSIPLFSWVPFVNEIQTSRAVLYMMIAFAVIPTVAFNVTNVYKVVRSRNGSMVLALAMLYPFVVLLGGVLIWDYLSPINLIATYPHLVVLGTGLAFGFLVGRMILAHLCDEPKGLKTNMCMSLLYLPFALANALTARLNAGVPLVDELWVLLGYCIFTVSLYLHFATSVIHEITEALGIYCF

SEQ ID NO: 404 - protein, 455 aa, Arabidopsis thaliana
MSFRSIVRDVRDSIGSLSRRSFDFKLSSLNKEGGKSRGSVQDSHEEQLVVTIQETPWANLPPELLRDVIKRLEESESVWPARRHVVACASVCRSWRDMCKEIVQSPELSGKITFPVSLKQPGPRDATMQCFIKRDKSNLTYHLYLCLSPALLVENGKFLLSAKRIRRTTYTEYVISMHADTISRSSNTYIGKIRSNFLGTKFIIYDTQPAYNSNIARAVQPVGLSRRFYSKRVSPKVPSGSYKIAQVSYELNVLGTRGPRRMHCAMNSIPASSLAEGGTVPGQPDIIVPRSILDESFRSITSSSSRKITYDYSNDFSSARFSDILGPLSEDQEVVLEEGKERNSPPLVLKNKPPRWHEQLQCWCLNFRGRVTVASVKNFQLIAANQPQPQPQPQPQPQPLTQPQPSGQTDGPDKIILQFGKVGKDMFTMDFRYPLSAFQAFAICLSSFDTKLACE

SEQ ID NO: 405 - protein, 152 aa, Arabidopsis thaliana
MAKGVAVLNSSEGVTGTIFFTQEGDGVTTVSGTVSGLKPGLHGFHVHALGDTTNGCMSTGPHFNPDGKTHGAPEDANRHAGDLGNITVGDDGTATFTITDCQIPLTGPNSIVGRAVVVHADPDDLGKGGHELSLATGNAGGRVACGIIGLQG

SEQ ID NO: 406 - protein, 507 aa, Arabidopsis thaliana
MVTLNASSPLTTKSFLPYRHAPRRPISFSPVFAVHSTDPKKSTQSASASVKWSLESWKSKKALQLPDYPDQKDVDSVLQTLSSFPPIVFAGEARKLEDKLGQAAMGQAFMLQGGDCAESFKEFNANNIRDTFRVLLQMGVVLMFGGQLPVIKVGRMAGQFAKPRSDPFEEKDGVKLPSYRGDNINGDAFDEKSRIPDPHRMVRAYTQSVATLNLLRAFATGGYAAMQRVSQWNLDFTQHSEQGDRYRELANRVDEALGFMGAAGLTSAHPIMTTTEFWTSHECLLLPYEQALTREDSTSGLYYDCSAHMLWVGERTRQLDGAHVEFLRGIANPLGIKVSDKMVPSELVKLIEILNPQNKPGRITVIVRMGAENMRVKLPNLIRAVRGAGQIVTWVSDPMHGNTIMAPGGLKTRSFDAIRAELRAFFDVHDQEGSFPGGVHLEMTGQNVTECVGGSRTITYNDLSSRYHTHCDPRLNASQSLELAFIIAERLRKRRLGSGNLPSSIGV

SEQ ID NO: 407 - protein, 249 aa, Arabidopsis thaliana
MTKNYPTVSEDYKKAVEKCRRKLRGLIAEKNCAPIMVRLAWHSAGTFDCQSRTGGPFGTMRFDAEQAHGANSGIHIALRLLDPIREQFPTISFADFHQLAGVVAVEVTGGPDIPFHPGREDKPQPPPEGRLPDATKGCDHLRDVFAKQMGLSDKDIVALSGAHTLGRCHKDRSGFEGAWTSNPLIFDNSYFKELLSGEKEGLLQLVSDKALLDDPVFRPLVEKYAADEDAFFADYAEAHMKLSELGYLS

SEQ ID NO: 408 - protein, 323 aa, Arabidopsis thaliana
MAVSLPTKYPLRPITNIPKSHRPSLLRVRVTCSVTTTKPQPNREKLLVEQRTVNLPLSNDQSLQSTKPRPNREKLVVEQRLASPPLSNDPTLKSTWTHRLWVAAGCTTLFVSLAKSVIGGFDSHLCLEPALAGYAGYILADLGSGVYHWAIDNYGDESTPVVGTQIEAFQGHHKWPWTITRRQFANNLHALAQVITFTVLPLDLAFNDPVFHGFVCTFAFCILFSQQFHAWAHGTKSKLPPLVVALQDMGLLVSRRQHAEHHRAPYNNNYCIVSGAWNNVLDESKVFEALEMVFYFQLGVRPRSWSEPNSDWIEETEISNNQA

SEQ ID NO: 409 - protein, 107 aa, Arabidopsis thaliana
MDTSSPSAFVNGALLRRFIGQKVRTVIQVTGSEIGSVVGKSTDDLQIVVRGSSPPSPLTTYLEVIGIAESDNAIRAETWTNFGNTFDTQNYNELCKLANGEFKHLFI

SEQ ID NO: 410 - protein, 360 aa, Arabidopsis thaliana
MVEPANTVGLPVNPTPLLKDELDIVIPTIRNLDFLEMWRPFLQPYHLIIVQDGDPSKKIHVPEGYDYELYNRNDINRILGPKASCISFKDSACRCFGYMVSKKKYIFTIDDDCFVAKDPSGKAVNALEQHIKNLLCPSSPFFFNTLYDPYREGADFVRGYPFSLREGVSTAVSHGLWLNIPDYDAPTQLVKPKERNTRYVDAVMTIPKGTLFPMCGMNLAFDRDLIGPAMYFGLMGDGQPIGRYDDMWAGWCIKVICDHLSLGVKTGLPYIYHSKASNPFVNLKKEYKGIFWQEEIIPFFQNAKLSKEAVTVQQCYIELSKMVKEKLSSLDPYFDKLADAMVTWIEAWDELNPPAASGKA

SEQ ID NO: 411 - protein, 323 aa, Arabidopsis thaliana
MGEPKDSLALFLCHESESSLNEDDDETIERSDKQEPHFTTTIDDEDYVADLVLKENLRFETLPSKTTSSSDRLIAIDWILTTRTRFGFQHQTAYIAISYFDLFLHKRFIGLQKDETWAMRLLSVACLSLAAKMEERIVPGLSQYPQDHDFVFKPDVIRKTELLILSTLDWKMNLITPFHYFNYFLAKISQDNHSVSKDLVLLRSSDSLLALTKEISFTEYRQFVVAAVTTLLASSSTSSDIRLTREEIANKFGSISWWTSNENENVYLCYQRTLEIEERKHMTPPPEIAVSREPPASGSGAKRRLSFDDSDQSSPPAKRMRRL

SEQ ID NO: 412 - protein, 373 aa, Arabidopsis thaliana
MAVDSLETEIDTAVRVVHLASSLCVKVQEKLHLPNGGHVKSKDDDSPVTVADFGVQAIVSWVLAEVFGDQNLSIVAEEDTETLSEADSLGLLGAVSNAVNEALSEAQNYGLPKPVKPLGSSEILKAISRCNSVGGPKGRHWVLDPVDGTLGFVRGDQYAVALALIENGKVLLGVLGCPNYPVKKECLSNGCNQAMKTKAVAGSVSKGCVMYAKRGSGQAWMQPLIVGGIPESATLLKVSSVDDPVLATVCEPVERANSNHLFTAGLANSMGVRKQPMRVYSMVKYAAIARGDAEVFMKFAQSSYKEKIWDHAAGVVIVEEAGGVVTDAGGRNLDFSKGVYLEGLDRGIIACSGQVLHEKIIGAVYASWESSSL

SEQ ID NO: 413 - protein, 144 aa, Arabidopsis thaliana
MEKSYMKHELWGDGDFQEDDVWDVLDGYQSPFMISSNHTTKPSFSTQTLLPSEPRMIPERQRTEGMAPMRQQSVPVNVPDWSMVQRKKTKKVVDDENVSPEEYFLRRSRSSSSSSVMEGVGRKLKGRDLSKVRNAILKQTGFLE

SEQ ID NO: 414 - protein, 123 aa, Arabidopsis thaliana
MAKYNEIAKKKREAKADRKRAIHGDPLTNKLKTRTPVPSVSGKRQRKLLRKWRREQKDMVEKGLVTMEDVEMASAQAASEDSKKSPRKFSVKKSLKLNKLNNKGKKKKNQKASGEKSADCMLE

SEQ ID NO: 415 - protein, 152 aa, Arabidopsis thaliana
MAEAARRQGGGRPLPPPPRGVNQQPPRPKPEPVDREKTCPLLLRVFTKSGGHHTSEDYAVRGKEPKDEVQIYTWKDASLRELTDLVKEVSVAARRRNARLSFAFVYPNNKGGYNVREVGETMAYPNRKQPDDSKTLSELPFEIGDYLDVAIY

SEQ ID NO: 416 - protein, 394 aa, Arabidopsis thaliana
MPPKAKAKDAGPVERPILGRFSSHLKIGIVGLPNVGKSTLFNTLTKLSIPAENFPFCTIEPNEARVNIPDERFDWLCQTYKPKSEIPAFLEIHDIAGLVRGAHEGQGLGNNFLSHIRAVDGIFHVLRAFEDADIIHVDDIVDPVRDLETITEELRLKDIEFVGKKIDDVEKSMKRSNDKQLKIELELLQKVKAWLEDGKDVRFGDWKTADIEILNTFQLLSAKPVVYLINLNERDYQRKKNKFLPKIHAWVQEHGGDTMIPFSGVFERSLADMAPDEAAKYCEENKLQSALPRIIKTGFSAINLIYFFTAGPDEVKCWQIRRQSKAPQAAGAIHTDFERGFICAEVMKFEDLKELGNEPAVKAAGKYRQEGKTYVVQDGDIIFFKFNVSGGGKK

SEQ ID NO: 417 - protein, 375 aa, Arabidopsis thaliana
MFAQLAPSPSPSPANVSHFVHRRTFRQCTYAVSASLPTANSSRPPPIQANIIVGGKDLNLDVTRKDDSIGFKLEANEDEIDWMNLESDIRLWTRALRPVQWYPGHIMKTEKELREQLKLMDVVIEVRDARIPLSTTHPKMDAWLGNRKRILVLNREDMISNDDRNDWARYFAKQGIKVIFTNGKLGMGAMKLGRLAKSLAGDVNGKRREKGLLPRSVRAGIIGYPNVGKSSLINRLLKRKICAAAPRPGVTREMKWVKLGKDLDLLDSPGMLPMRIDDQAAAIKLAICDDIGEKAYDFTDVAGILVQMLARIPEVGAKALYNRYKIQLEGNCGKKFVKTLGLNLFGGDSHQAAFRILTDFRKGKFGYVSLERPPL

SEQ ID NO: 418 - protein, 567 aa, Arabidopsis thaliana
MGDLAMSVADIRMENEPDDLASDNVAEIDVSDEEIDADDLERRMWKDRVRLKRIKERQKAGSQGAQTKETPKKISDQAQRKKMSRAQDGILKYMLKLMEVCKVRGFVYGIIPEKGKPVSGSSDNIRAWWKEKVKFDKNGPAAIAKYEEECLAFGKSDGNRNSQFVLQDLQDATLGSLLSSLMQHCDPPQRKYPLEKGTPPPWWPTGNEEWWVKLGLPKSQSPPYRKPHDLKKMWKVGVLTAVINHMLPDIAKIKRHVRQSKCLQDKMTAKESAIWLAVLNQEESLIQQPSSDNGNSNVTETHRRGNNADRRKPVVNSDSDYDVDGTEEASGSVSSKDSRRNQIQKEQPTAISHSVRDQDKAEKHRRRKRPRIRSGTVNRQEEEQPEAQQRNILPDMNHVDAPLLEYNINGTHQEDDVVDPNIALGPEDNGLELVVPEFNNNYTYLPLVNEQTMMPVDERPMLYGPNPNQELQFGSGYNFYNPSAVFVHNQEDDILHTQIEMNTQAPPHNSGFEEAPGGVLQPLGLLGNEDGVTGSELPQYQSGILSPLTDLDFDYGGFGDDFSWFGA

SEQ ID NO: 419 - protein, 400 aa, Arabidopsis thaliana
MKRQAKPPEKKTKRTTNASSPTPSSSSPSLSSLPDEIVENCLARISRSYYPTLSIVSKSFRSIISSTELYVARSHLRNTEECVYVCLSDKSFEFPKWFTLWVNPNQANSMVEKKRKKKKTIGKLLVPIPSSNLSPVSKSAIAVGSEIYVIGGKVDGALSSAVRILDCRSNTWRDAPSMTVARKRPFICLYDGKIYVIGGYNKLSESEPWAEVFDIKTQTWECLSDPGTEIRNCTIYRIAEIEGKIHFGYTQKTYAYDPKQGEWECCEGEVAFPRSQCVMESVLYTFANNYTWEDDYGCKWWSTDGYGEKVKGLESLLEIHKRNGGSSDNTTKLVACGGKLLLLWEGYMKHNPNNRKKIWCAVIALEKRDGGKVWGIVEWVDVVHIVPTSCKLLHCLVVSV

SEQ ID NO: 420 - protein, 286 aa, Arabidopsis thaliana
MYVFDPTTEAGLRLEMAFPQHGFMFQQLHEDNSQDQLPSCPPHLFNGGGNYMMNRSMSLMNVQEDHNQTLDEENLSDDGAHTMLGEKKKRLQLEQVKALEKSFELGNKLEPERKIQLAKALGMQPRQIAIWFQNRRARWKTRQLERDYDSLKKQFESLKSDNASLLAYNKKLLAEVMALKNKECNEGNIVKREAEASWSNNGSTENSSDINLEMPRETITTHVNTIKDLFPSSIRSSAHDDDHHQNHEIVQEESLCNMFNGIDETTPAGYWAWSDPNHNHHHHQFN

SEQ ID NO: 421 - protein, 286 aa, Arabidopsis thaliana
MENSMKKKKSFKESEDEELRRGPWTLEEDTLLTNYILHNGEGRWNHVAKCAGLKRTGKSCRLRWLNYLKPDIRRGNLTPQEQLLILELHSKWGNRWSKIAQYLPGRTDNEIKNYWRTRVQKQARQLNIESNSDKFFDAVRSFWVPRLIEKMEQNSSTTTTYCCPQNNNNNSLLLPSQSHDSLSMQKDIDYSGFSNIDGSSSTSTCMSHLTTVPHFMDQSNTNIIDGSMCFHEGNVQEFGGYVPGMEDYMVNSDISMECHVADGYSAYEDVTQDPMWNVDDIWQFRE

SEQ ID NO: 422 - protein, 575 aa, Arabidopsis thaliana
MADAYEPYHVLQQSRRDKLRIPSLDSHFHFHPPPPPSSGGGGGVFPLADSDFLAAGGFHSNNNNNHISNPSYSNFMGFLGGPSSSSSTAVAVAGDHSFNAGLSSGDVLVFKPEPLSLSLSSHPRLAYDLVVPGVVNSGFCRSAGEANAAAVTIASRSSGPLGPFTGYASILKGSRFLKPAQMLLDEFCNVGRGIYTDKVIDDDDSSLLFDPTVENLCGVSDGGGGDNGKKKSKLISMLDEVYKRYKQYYEQLQAVMGSFECVAGLGHAAPYANLALKALSKHFKCLKNAITDQLQFSHNNKIQQQQQCGHPMNSENKTDSLRFGGSDSSRGLCSAGQRHGFPDHHAPVWRPHRGLPERAVTVLRAWLFDHFLHPYPTDTDKLMLAKQTGLSRNQVSNWFINARVRVWKPMVEEIHMLETRQSQRSSSSSWRDERTSTTVFPDNSNNNPSSSSAQQRPNNSSPPRRARNDDVHGTNNNNSYVNSGSGGGSAVGFSYGIGSSNVPVMNSSTNGGVSLTLGLHHQIGLPEPFPMTTAQRFGLDGGSGDGGGGYEGQNRQFGRDFIGGSNHQFLHDFVG

SEQ ID NO: 423 - protein, 426 aa, Arabidopsis thaliana
MSVFSNILDENSRNLRNEIPCDDGIASPINDDDEEFLTKSNRVLLVGADSNSSLKNLMTQYSYQVTKYESGEEAMAFLMKNKHEIDLVIWDFHMPDINGLDALNIIGKQMDLPVVIMSHEYKKETVMESIKYGACDFLVKPVSKEVIAVLWRHVYRKRMSKSGLDKPGESGTVESDPDEYDDLEQDNLYESNEEGSKNTCDHKEEKSPTKKPRMQWTPELHHKFEVAVEKMGSLEKAFPKTILKYMQEELNVQGLTRNNVASHLQKYRQSSKKTCTPQEPQEDFVWGNAGPDVTLAASKTLLSSHATPSYLINNQAAPRGSYFMNNIPYPSTSCLPVNNNNCFMTNPSTYIDQFQHQLQQQQQHQQYQSTLNSISAMLTKQESRHVPSSAMENSEPLMIYNSNLPFGIDECFPPAGFNIFDQIGHN

SEQ ID NO: 424 - protein, 443 aa, Arabidopsis thaliana
MHRASSKHTNAKKEAISTSKIRDNNVRVTRSRAKALGVSNSPSKPAFKHETKRVARPSNKRMASDNITVCNQKRRAVLKDVTNTLAESIISTEGNVRQACKRGGKETKQIEEDGLVDVDGEKSKLAEDLSKIRMVESLDASASKELVDCAEEDRSDVTDCVQIVDIDSGVQDPQFCSLYAASIYDSINVAELEQRPSTSYMVQLQRDIDPTMRGILIDWLVEVSEEYKLVSDTLYLTVNLIDRFMSHNYIEKRKLQLLGVTCMLIASKYEEISAPRLEEFCFITDNTYTRLEVLSMEIKVLNSLHFRLSVPTTKTFLRRFIRAAQASDKVPLIEMEYLANYFAELTLTEYTFLRFLPSLIAASAVFLARWTLDQSNHPWNKTLQHYTRYETSALKNAVLAMEDLQLNTSGSTLIAIRTKYNQQKFKRVATLTSPERVNTLFSR

SEQ ID NO: 425 - protein, 445 aa, Arabidopsis thaliana
MSNYQGDDAEYMEDVDDEMDEDDLDEDFRGDDMAASDSDVDEFDYSNNKIADTSADQARKGKDIQGIPWDRLSITRETYRQTRLEQYKNYENVPNSGESSGKDCMATQKGALFYDFWRNTRSIKSSILHFQLRNLVWATSKHDVYLMSQYLVSHYSTLTSGKHDVLNVQGHVSPSEKHPGSLLEGFTKTQVSTLAVRDKFLVAGGFQGELICKHLDRPGVSFCSRTTYDDNAITNAIEIYNKPSGALHFTASNNDCGVRDFDMERYQLVNQFRFPWPVNHTSLSPDGKLLTIVGDNPESLLVDPNTGKTLATLSGHLDFSFASAWHPDGFTFSTGNQDKTCRVWDIRNLSKSVAVLRGNLGAIRSIRYTSDGKYMAMAEPADFVHVYDVSNGYETEQEIDFFGEISGISFSPDTEALFIGVWDRTYGSLIEYSRRHNYSYLDSFL

SEQ ID NO: 426 - protein, 340 aa, Arabidopsis thaliana
MESSVFDFGSESGNMNFDETVPLSQRLEWSDVVPLTQDDGPNPVVPIAYKEEFRETMDYFRAIYFSDERSPRALRLTEETLLLNSGNYTVWHFRRLVLEALNHDLFEELEFIERIAEDNSKNYQLWHHRRWVAEKLGPDVAGRELEFTRRVLSLDAKHYHAWSHRQWTLRALGGWEDELDYCHELLEADVFNNSAWNQRYYVITQSPLLGGLEAMRESEVSYTIKAILTNPANESSWRYLKALYKDDKESWISDPSVSSVCLNVLSRTDCFHGFALSTLLDLLCDGLRPTNEHKDSVRALANEEPETNLANLVCTILGRVDPVRANYWAWRKSKITVAAI

SEQ ID NO: 427 - protein, 312 aa, Arabidopsis thaliana
MVGPVRPQIVLFGSSIVQYSFTDRGWGATLADLYSRTADIILRGYAGWNSRFALKVLHQVFPKDAVIQPSLVIVYFGGNDSTHPHPSGHGPHVPLSEFIENMRKIGEHLLSLSDKTRVIFLTPPPMNEKQIEIVFGDAIKGRSNELCRPYAEELLNLCREINVKGIDIWTAIQQQDDWLNSCFTDGIHFTAKASEIVVKEILKVLRGADWKPSLYWKSLPVEFPFDFDAPNSISLHDLELTRNNHFESPHLVSLCEQELTRNEQLEPPHPVSLCDHELTRNEQLEPPHPVSLCDHELTQNEQLEPPQPTARL

SEQ ID NO: 428 - protein, 345 aa, Arabidopsis thaliana
MFIAVEVSPVMEDITRQSKKTSVENETGDDQSATSVVLKAKRKRRSQPRDAPPQRSSVHRGVTRHRWTGRYEAHLWDKNSWNETQTKKGRQVYLGAYDEEDAAARAYNLAALKYWGRDTILNFPLCNYEEDIKEMESQSKEEYIGSLRRKSSGFSRGVSKYRGVAKHHHNGRWEARIGRVFGNKYLYLGTYATQEEAAIAYDIAAIEYRGLNAVTNFDISRYLKLPVPENPIDTANNLLESPHSDLSPFIKPNHESDLSQSQSSSEDNDDRKTKLLKSSPLVAEEVIGPSTPPEIAPPRRSFPEDIQTYFGCQNSGKLTAEEDDVIFGDLDSFLTPDFYSELNDC

SEQ ID NO: 429 - protein, 335 aa, Arabidopsis thaliana
MAPVSKADKKAAVDAAAWMFNVVTSVGIIIVNKALMATYGYSFATTLTGLHFATTTLMTLVLRCLGYIQPSHLPFTELLRFILFANFSIVGMNVSLMWNSVGFYQIAKLSMIPVSCLLEMVFDKIRYSRDTKLSIGLVLVGVGVCTVTDVSVNTKGFVAAFVAVWSTALQQYYVHYLQRKYSLNSFNLLGHTAPAQAATLLVVGPFLDYWLTEKRVDMYDYNLVSVLFITLSCTIAIGTNLSQFICIGRFTAVSFQVLGHMKTILVLIMGFFFFGREGLNLHVVVGMIIAVLGMIWYGNASSKPGGKERRNYSLPTTRQQKLGAASDSDDNEDKA

SEQ ID NO: 430 - protein, 284 aa, Arabidopsis thaliana
MQGLAATTTNRGSLTFLAPRNHSPISKKFVNPRVFFPNVDSSAKLRLSASSISRRCPREIAPLSATASVDFAAAATSSNQLFANGLPPLAPGLRRHRRPIEPARVAKDDFFKIKLPKIAERPEWWWRTLACVPYLISLQISDVGFYVQPFLEKHDAIGDMIYFIPGAINRWPTWFFMVYCYLGYMWVVKNKELPHYLRFHMMMGMLLETALQVIWCTSNFFPLIHFKGRFGMYYWMAIGFTYICLLLECIRCALAGVYAQIPFMTDAASIHTLFNLGGFQRPLR

SEQ ID NO: 431 - protein, 395 aa, Arabidopsis thaliana
MASENLNDKISVFKKLKAKSDNKICFDCNAKNPTWASVTYGIFLCIDCSAVHRSLGVHISFVRSTNLDSWSSEQLKMMIYGGNNRAQVFFKQYGWSDGGKTEAKYTSRAADLYKQILAKEVAKSKAEEELDLPPSPPDSTQVPNGLSSIKTSEALKESNTLKQQEKPDVVPVSPRISRSVKKPLGAKKTGKTGGLGARKLTTKSSGTLYDQKPEESVIIQATSPVSAKSARSSFSSRFDYADNVQNREDYMSPQVVSHVAPPKSSGFFEEELEMNGGRFQKKPITSSSKLQIQETDEARKKFTNAKSISSAQYFGNDNNSADLEAKSSLKKFSGSSAISSADLFGDGDGDFPLDLTAGDLLNRLSLQAQQDISSLKNMAEETKKKLGSVASSLWV

SEQ ID NO: 432 - protein, 462 aa, Arabidopsis thaliana
MAPAQNQITSKHVAVIGAGPAGLITSRELRREGHSVVVFEREKQVGGLWVYTPKSDSDPLSLDPTRSKVHSSIYESLRTNVPRESMGVRDFPFLPRFDDESRDARRYPNHREVLAYIQDFAREFKIEEMIRFETEVVRVEPVDNGNWRVQSKNSGGFLEDEIYDAVVVCNGHYTEPNIAHIPGIKSWPGKQIHSHNYRVPDPFENEVVVVIGNFASGADISRDIAKVAKEVHIASRAREPHTYEKISVPQNNLWMHSEIDTTHEDGSIVFKNGKVIFADSIVYCTGYKYNFPFLETNGYLRIDEKRVEPLYKHVFPPALAPGLAFVGLPAMGIVFVMFEIQSKWVAAVLSGRVTLPSTDKMMEDINAWYASLDALGIPKRHTHTIGRIQSEYLNWVAKESGCELVERWRGQEVDGGYLRLVAHPETYRDEWDDDELIEEAYNDFSRKKLISVDPSYYLENGR

SEQ ID NO: 433 - protein, 905 aa, Arabidopsis thaliana
MSAKLLYNLSDENPNLNKQFGCMNGIFQVFYRQHCPATPVTVSGGAEKSLPPGERRGSVGETNMESDKETERSSTKKKKSAAKEKHRVSFESSSRPSFSSSPRSSSFSSAEVSTTASQFDQPGENLIREQPNGGLMMPYDLKELVKGSINREIRTRGEEASFTQQQQPISARSSMLLLKESSLRSPCRSSNEWNEGRGAAMKFKESHRLSYDEREMRNNGFRVGSKLKETPRLSLDSRSNSFRSPRADAARSSCPEEPATMTHRRSSSSVVAKLMGLEVIADNSDTEQRRENRFCDSPRPMSRVEPTALQRSRSVDSIKRIPASAASKFPMEPAPWKQMKAGDSALTVYGEIQKRLTQLEFKKSGKDLRALKQILEAMEKTQQLIDESRDDGTLSTTTLMQRTHKPVSAATSPARNFKSSSIVVMKSAAPVSTSPLPQNVTLPNVKVGNSRQTRKVTSGKQNAMDLTPRPGLYKGQLDSTKSNSPKTVRSRQALAADAGSMTKSGRSQQHSVSPRTQPKKLGFEKQTRPTTPKSEPGKRQLGRQQTEVASPRRKQMIKPHSTLQQPDDRLSDARSDLRSLRSDSNISLGSNVDIEVTSRHRLERNCDFPEQHTPKQRSPDFGIKQDRPSLKPLKVTVEQPSPVSVLDAVFDEEDSPSPVRKISLSFKEEDALRSEESEWINKPTSFCRSVPFPQSNRGPMKPSSDHFECSPEEGADFKSGNHKYILEILLASGILRDLEYSMISFQLHQTRLPINPGLFFILEQNKASNVTLPDNKHRGRGFRQQQTNPTETIRRKLVFDTVNEILARKFTAEGCIKPRLIANPLKKLEKISKEEQLLQTLCSEIDRLQQNNSNCILEDDEEDIIWEDLQSQSMNLKEFEGETPGIVLDIERMIFRDLVNEVCFC

SEQ ID NO: 434 - protein, 301 aa, Arabidopsis thaliana
MDISRRESKTEASSREKRIYEKDQMNQESFIEGLAEEFRLPITHRVTENVDLEDVEQASLDVKISSSNVGFRLLQKMGWKGKGLGKQEQGITEPIKSGIRDRRLGLGKQEEDDYFTAEENIQRKKLDIEIEETEEIAKKREVLAEREQKIQSDVKEIRKVFYCELCSKQYRTVMEFEGHLSSYDHNHKKRFKEMKEMHGASGRDERKKREQQRQEREMTKMADARKQHQMQQSQQEVPENVPVSAPAKTTVAPLAVQDQRKTLKFGFSSKSGIISKSQPTSSIKKPKVAIASVFGNDSDED

SEQ ID NO: 435 - protein, 342 aa, Glycine max
MTQVRNKQVVLRDYVTGFPKESDMNIVEGTIILKVPEGSNDVLLKNLYLSCDPYMRLLMAKDRSFGDGSFTLASPLKGYGVSQVLESGRPDYKKGDLVWGITKWEEYSLVPSSLIHFKIEHTDVPLSYYTGILGMPGMTAYAGFFEVGSPKKGDTVFVSAASGAVGQLVGQFAKLTGCYVVGSAGSKEKVDLLKNKLGFDEAFNYKEEPDLNAALKRYFPEGIDIYFENVGGKTLDAVLPNMKFHGRIPVCGMISQYNLTQFDGVTNLANLIFKRVKMEGFIATDFYHLYPKFLEFVLPHIREGKVVYVEDIAEGLEKGPAALVGLYTGRNVGKQVVVVTHE

SEQ ID NO: 436 - protein, 162 aa, Arabidopsis thaliana
MATGDGKSVMVVGVDDSEQSTYALEWTLDRFFAPYAPNYPFKLFIVHAKPNAVSAVGLAGPGTAEVVPYVDADLKHTAAKVVEKAKAICQSRSVHGAVIEVFEGDARNILCEVVDKHHASILVVGSHGYGAIKRAVLGSTSDYCAHHAHCSVMIVKKPKIKV

SEQ ID NO: 437 - protein, 215 aa, Arabidopsis thaliana
MGMVFGKIAVETPKYTVTKSGDGYEIREYPPAVAAEVTYDASEFKGDKDGGFQLLAKYIGVFGKPENEKPEKIAMTAPVITKEGEKIAMTAPVITKESEKIEMTSPVVTKEGGGEGRKKLVTMQFLLPSMYKKAEEAPRPTDERVVIKEEGGRKYGVIKFSGIASESVVSEKVKKLSSHLEKDGFKITGDFVLARYNPPWTLPPFRTNEVMIPVE

SEQ ID NO: 438 - protein, 176 aa, Arabidopsis thaliana
MASGDVEYRCFVGGLAWATDDRALETAFAQYGDVIDSKIINDRETGRSRGFGFVTFKDEKAMKDAIEGMNGQDLDGRSITVNEAQSRGSGGGGGHRGGGGGGYRSGGGGGYSGGGGSYGGGGGRREGGGGYSGGGGGYSSRGGGGGSYGGGRREGGGGYGGGEGGGYGGSGGGGGW

SEQ ID NO: 439 - protein, 365 aa, Arabidopsis thaliana
MSCFGCCGEDDDMHKTADYGGRHNQAKHFPPGNDARHHQASETAQKGPPVVKLQPIEVPIIPFSELKEATDDFGSNSLIGEGSYGRVYYGVLNNDLPSAIKKLDSNKQPDNEFLAQVSMVSRLKHDNFVQLLGYCVDGNSRILSYEFANNGSLHDILHGRKGVKGAQPGPVLSWYQRVKIAVGAARGLEYLHEKANPHIIHRDIKSSNVLLFEDDVAKIADFDLSNQAPDMAARLHSTRVLGTFGYHAPEYAMTGQLNAKSDVYSFGVVLLELLTGRKPVDHRLPRGQQSLVTWATPKLSEDKVKQCVDARLGGDYPPKAVAKLAAVAALCVQYEADFRPNMSIVVKALQPLLNARAVAPGEGVH

SEQ ID NO: 440 - protein, 333 aa, Arabidopsis thaliana
MATISSTLLLNSSRSALPLRFPKFSGFSSSSPFARSYRFGRRNLEPLSNGMLSSGSRADGATAAAASMEGVMTEAMKLIQSASPTWKSAVANNLLIFVLGSPLLVTGLSASGIAAAFLLGTLTWRAYGSAGFLLVAAYFVIGTAATKVKMTQKEAQGVAEKRKGRRGPRSVIGSSAAGCVCAFLSIYQVGGAAFSQLFRLGFVSSFCTKVSDTVSSEIGKAYGKTTYLATTFKIVPRGTEGAMSLEGTLAGLLASFFLASVGCFLGQITPPEAAVCVLASQIANLGESIIGASFQDKEGFKWLNNDVVNVINISLGSIVAILMQQFILQNWVK

SEQ ID NO: 441 - protein, 359 aa, Arabidopsis thaliana
MARMSLMIMMIMVAVTMINIAKSDPIAPCYFIFGDSLVDNGNNNQLQSLARANYFPYGIDFAAGPTGRFSNGLTTVDVIAQLLGFEDYITPYASARGQDILRGVNYASAAAGIRDETGRQLGGRIAFAGQVANHVNTVSQVVNILGDQNEASNYLSKCIYSIGLGSNDYLNNYFMPTFYSTGNQFSPESYADDLVARYTEQLRVLYTNGARKFALIGVGAIGCSPNELAQNSRDGRTCDERINSANRIFNSKLISIVDAFNQNTPDAKFTYINAYGIFQDIITNPARYGFRVTNAGCCGVGRNNGQITCLPGQAPCLNRNEYVFWDAFHPGEAANIVIGRRSFKREAASDAHPYDIQQL

SEQ ID NO: 442 - protein, 143 aa, Arabidopsis thaliana
MTEAMIRNKPGMASVKDMPLLQDGPPPGGFAPVRYARRISNTGPSAMAMFLAVSGAFAWGMYQVGQGNKIRRALKEEKYAARRTILPILQAEEDERFVSEWKKYLEYEADVMKDVPGWKVGENVYNSGRWMPPATGELRPDVW

SEQ ID NO: 443 - protein, 304 aa, Arabidopsis thaliana
MSSPGTSMFTNFTKLCKGLALVLVVGHLVVQFIPATVPYLALIPARTIPFAWNLITSGYFELSVYGVVFSTVSLLFMGKFLEPVWGSTEFLKFIFVVNFLTYLCVFVTAIALYYITRLEVYLYMPFAGFHGVLAGLLVGIKQIIPDQEILLLKIKAKWLPSIMLILSIASSFFTLDSAAYLPTLIFGTYMGWLYLRYLQRRPETKLRGDPSDDFAFSTFFPELLRPVIDPIALIFHRMLCGRSNATSEDHDYSTSGAPLPGSDSAEASRRRERGARALEERLGTERLVPARNKDELQSDGLDNV

SEQ ID NO: 444 - protein, 570 aa, Arabidopsis thaliana
MEEKDVYTQDGTVDIHKNPANKEKTGNWKACRFILGNECCERLAYYGMGTNLVNYLESRLNQGNATAANNVTNWSGTCYITPLIGAFIADAYLGRYWTIATFVFIYVSGMTLLTLSASVPGLKPGNCNADTCHPNSSQTAVFFVALYMIALGTGGIKPCVSSFGADQFDENDENEKIKKSSFFNWFYFSINVGALIAATVLVWIQMNVGWGWGFGVPTVAMVIAVCFFFFGSRFYRLQRPGGSPLTRIFQVIVAAFRKISVKVPEDKSLLFETADDESNIKGSRKLVHTDNLKFFDKAAVESQSDSIKDGEVNPWRLCSVTQVEELKSIITLLPVWATGIVFATVYSQMSTMFVLQGNTMDQHMGKNFEIPSASLSLFDTVSVLFWTPVYDQFIIPLARKFTRNERGFTQLQRMGIGLVVSIFAMITAGVLEVVRLDYVKTHNAYDQKQIHMSIFWQIPQYLLIGCAEVFTFIGQLEFFYDQAPDAMRSLCSALSLTTVALGNYLSTVLVTVVMKITKKNGKPGWIPDNLNRGHLDYFFYLLATLSFLNFLVYLWISKRYKYKKAVGRAH

SEQ ID NO: 445 - protein, 246 aa, Agrobacterium tumefaciens
MELKHKTALVTGACGGIGRAVVAALVAQGARVIAFDRDIEAVTALAKGFGSACDPVAVDLGDAAALQAVMRDIAGRFKVIDILVNNAGVLSPHKLAATTLEEWHRLMAVNLDAALLLTQAVVPAMKENRWGRLINISSYAWKSGGLTAGTAYSVSKSALVGLTYSSARELASFGITANAVAPAYVVSPMIMEQLSEEDRQRQLAAIPVGRFCQPEEVAHAVRFLASPLSGFMTGTVVDMNGGLQFG

SEQ ID NO: 446 - protein, 368 aa, Arabidopsis thaliana
MDKLKPIIAIISLQFGYAGMYIITMVSFKHGMNHWILATYRHVVATIVIAPFALILERKIRPKMTWPLFLRILALGFLEPLLDQNLYYIGMKATSATYSSAFVNALPAITFIMAVIFRIETVNLKKTRSLAKVIGTAITVGGAMVMTLYKGPAIELFKTAHSSLHGGSSGTSSETTDQNWVTGTLAVMGSITTWAGFFILQSFTLKKYPAELSLVMWICAMGTVLNTIASLIMVRDVSAWKVGMDSGTLAAVYSGVVCSGMAYYIQSIVIRERGPVFTTSFSPMCMIITAFLGVLVLAEKIHLGSIIGAIFIVFGLYSVVWGKAKDEVISVEEKIGMQELPITNTSTKVEGGGITSEVNEGVTNNTQV

SEQ ID NO: 447 - protein, 599 aa, Arabidopsis thaliana
MVSETWFRNLWRFPKKHDGHKDKAVLGVLAFEVASLLSKLVHLWQSLSDKNVARLRDEITHSTGIKKLVSEDDDFIVRLIRDEMMENVENVAKAVARLARKCNDPKLKCFENCFSDMMKTGADPYGWQFGWKKMDKKAKKMERFISSNASLYQETEILADLEQTFKRMKSNESATDNLLEYQKKVTWKRHEVKNLRDVSLWNRTYDYTVILLVRSVFTILSRTKHVFGISYRVEASDVSSADSDFIGRSHSVSTILTPVSHKSESSGLPRFASGPLGRFTGPASGSAATRSTKMSDFLSGSLSAESPKSGPLVAEKHKRFKFYSGQLGKITSKSGPLIGMGKNNKKMGQTPERPSISSVKKQLKANRLTQVGPFKGCMVSHDGITPLSTRARNGARNSSAEHHILEDNSNSVHVENLTLPSRPKLSDAAPNTLGTACLALHYANVIIVIERFVASPHLIGDDARDDLYNMLPASVRTSLRERLKPYSKNLSSSTVYDPGLAREWTDAMAGILEWLGPLAHNMIKWQSERSYEHQSLVSRTHIVLAQTLFFANQQKTEAIITELLVGLNYVWRFGRELNAKALQECTSSKTLEKCLDTDN

SEQ ID NO: 448 - protein, 245 aa, Arabidopsis thaliana
MGSLVKAYYCNQMHHNSIIPHFHHYRPSSLQNPISLFAITSPSSSEPPSPPVKHPLPQFGGGGHFIIPTIAVAASAWFFFRLHQYPPIITSPVDLHLDLEEEGAIKELPLESKPGYVKALHFYKIKPGTVLKLLDVFDSDSYDSLKARIRLSAEWLETARRELEEVVERDPGRVMEYSQVVDELMEILRDMEVYIDKCQKDNVKGYLRSCNRLLARVRRMEAQILNVLKEFHDDHDQGGGGGDTY

SEQ ID NO: 449 - protein, 464 aa, Arabidopsis thaliana
METTTTPLLPGDRSRCGWLRRRLRLKNPLSSELSGAVGDLGTFIPIVLTLTLVSNLDLSTTLIFTGFYNIATGLLFDIPMPVQPMKSIAAVAVSESPHLTPSQIAAAGASTAATLLLLGATGAMSFLYNIIPLPVVRGVQLSQGLQFAFTAIKYVRFNYDTATLKPSSSPRIWLGLDGLILALAALLFIILSTGSGNDREAEDGDLAETSSNESQSRRRRLRLLSSIPSALIVFALGLVLCFIRDPSIFKDLKFGPSKFHILRISWDDWKIGFLRAAIPQIPLSVLNSVIAVCKLSNDLFDKELSATTVSISVGVMNLIGCWFGAMPVCHGAGGLAGQYRFGARSGLSVIFLGIGKLIVGLVFGNSFVRILSQFPIGILGVLLLFAGIELAMASKDMNSKEDSFIMLVCAAVSMTGSSAALGFGCGVVLYLLLKLRTLDCSSVTLFSRSSDESQVDSEAAPRDV

SEQ ID NO: 450 - protein, 136 aa, Arabidopsis thaliana
MANSLCFFSSPPTFCFQSPSKNPKPSHFFSTNDNTSSLVQKRELLQTSRSQSFEVKAANNNPQGTKPNSLVCANCEGEGCVACSQCKGGGVNLIDHFNGQFKAGALCWLCRGKKEVLCGDCNGAGFIGGFLSTFDE

SEQ ID NO: 451 - protein, 227 aa, Arabidopsis thaliana
MSEEEVVVLNFWPSMFGARVIMALEEKEIKFEYKEEDVFGQKTDLLLQSNPVNKKIPVLIHNGKPVCESNIIVEYIDEVWKDDKTLRLLPSDPYQKSQCRFWADLIDKKVFDAGRRTWTKRGKEQEEAKQEFIEILKVLERELGDKVYFGGNDNVSMVDLVLISYYPWFHTWETIGGFSVEDHTPKLMDWIRKCLTRPAISKSLPDPLKIFDRVTQIIKVHEFFYGY

SEQ ID NO: 452 - protein, 277 aa, Arabidopsis thaliana
MEKSSSMKQWKKGPARGKGGPQNALCQYRGVRQRTWGKWVAEIREPKKRARLWLGSFATAEEAAMAYDEAALKLYGHDAYLNLPHLQRNTRPSLSNSQRFKWVPSRKFISMFPSCGMLNVNAQPSVHIIQQRLEELKKTGLLSQSYSSSSSSTESKTNTSFLDEKTSKGETDNMFEGGDQKKPEIDLTEFLQQLGILKDENEAEPSEVAECHSPPPWNEQEETGSPFRTENFSWDTLIEMPRSETTTMQFDSSNFGSYDFEDDVSFPSIWDYYGSLD

SEQ ID NO: 453 - protein, 166 aa, Arabidopsis thaliana
MAPTVKTAAVKTNEGNGVRYRGVRKRPWGRYAAEIRDPFKKSRVWLGTFDTPEEAARAYDKRAIEFRGAKAKTNFPCYNINAHCLSLTQSLSQSSTVESSFPNLNLGSDSVSSRFPFPKIQVKAGMMVFDERSESDSSSVVMDVVRYEGRRVVLDLDLNFPPPPEN

SEQ ID NO: 454 - protein, 583 aa, Arabidopsis thaliana
MDAILPVPVDGFRFDTGSGSCCKPRNNLESGTTNRFTCFNESESQSNPSPTESKVCSDYLPVFKYINDMLMEEDLEGQSCMLEDSLALQAAERSFFEVLQDQTPISGDLEDGSLGNFSSITSLHQPEVSEESTRRYRHRDDDEDDDLESGRKSKLPAISTVDELAEKFEEVLLVCQKNDQGEATEKKTRHVKGSSNRYKQQKSDQPVDMRNLLMQCAQAVASFDQRRAFEKLKEIREHSSRHGDATQRLGYHFAEALEARITGTMTTPISATSSRTSMVDILKAYKGFVQACPTLIMCYFTANRTINELASKATTLHIIDFGILYGFQWPCLIQALSKRDIGPPLLRVTGIELPQSGFRPSERVEETGRRLKRFCDKFNVPFEYSFIAKNWENITLDDLVINSGETTVVNCILRLQYTPDETVSLNSPRDTALKLFRDINPDLFVFAEINGTYNSPFFLTRFREALFHCSSLFDMYETTLSEDDNCRTLVERELIIRDAMSVIACEGSERFARPETYKQWQVRILRAGFRPAKLSKQIVKDGKEIVKERYHKDFVIDNDNHWMFQGWKGRVLYAVSCWKPAKK

SEQ ID NO: 455 - protein, 319 aa, Arabidopsis thaliana
MDHHHHIASRNSSTTSELPSFEPACHNGNGNGWIYDPNQVRYDQSSDQRLSKLTDLVGKHWSIAPPNNPDMNHNLHHHFDHDHSQNDDISMYRQALEVKNEEDLCYNNGSSGGGSLFHDPIESSRSFLDIRLSRPLTDINPSFKPCFKALNVSEFNKKEHQTASLAAVRLGTTNAGKKKRCEEISDEVSKKAKCSEGSTLSPEKELPKAKLRDKITTLQQIVSPFGKTDTASVLQEAITYINFYQEQVKLLSTPYMKNSSMKDPWGGWDREDHNKRGPKHLDLRSRGLCLVPISYTPIAYRDNSATDYWNPTYRGSLYR

SEQ ID NO: 456 - protein, 448 aa, Arabidopsis thaliana
MEDTKKKKKKNINNNQDSKKKERHIVTWSQEEDVILREQITLHGTENWAIIASKFKDKSTRQCRRRWYTYLNSDFKRGGWSPEEDMLLCEAQRVFGNRWTEIAKVVSGRTDNAVKNRFTTLCKKRAKHEAMTKDSNSNTKRMLFLDGISTPRKSENETPIAKKLKRSHILDLTEISNYGRAEACVNQQIRSPFSVLARNATGIDSLEEQNQTSNVNESDGEGMFLKKDDPKVTALMQQAELLSSLAQKVNADNTEQSMENAWKVLQDFLNKGKENDLFRYGIPDIDFKIEEFKDLIEDLRSGYEDNQLSWRQPDLHDSPASSEYSSGSTIMVDQSGDKTQPFSADTQTEHKQVGEELLVPKNPDENMPISGEEKFSSPIQVTPLFRSLADGIPSPQFSESVSFAPSLFIIQYLGFEKTMSLKRLIAFVGEELPAKNTRDRVLISMSKC

SEQ ID NO: 457 - protein, 331 aa, Arabidopsis thaliana
MEDEAHEFFHTSDFAVDDLLVDFSNDDDEENDVVADSTTTTTITDSSNFSAADLPSFHGDVQDGTSFSGDLCIPSDDLADELEWLSNIVDESLSPEDVHKLELISGFKSRPDPKSDTGSPENPNSSSPIFTTDVSVPAKARSKRSRAAACNWASRGLLKETFYDSPFTGETILSSQQHLSPPTSPPLLMAPLGKKQAVDGGHRRKKDVSSPESGGAEERRCLHCATDKTPQWRTGPMGPKTLCNACGVRYKSGRLVPEYRPAASPTFVLAKHSNSHRKVMELRRQKEMSRAHHEFIHHHHGTDTAMIFDVSSDGDDYLIHHNVGPDFRQLI

SEQ ID NO: 458 - protein, 130 aa, Arabidopsis thaliana
MVEVWWSLIGAAVPALIAGQAWRIKKRHGEEERIKSARGREKSSDEIFVCERVCTSKRMLKKVGAFSKDPIPDTCVTVCGVSELDACSDACARTVCVNQHQVANWNDICLRRCQSECLKLSSSSSSSRYS

SEQ ID NO: 459 - protein, 396 aa, Arabidopsis thaliana
MASATSVIAWGSGEDGQLGLGTDEEKELASVVDALEPFNVRSVVGGSRNSLAICDDGKLFTWGWNQRGTLGHPPETKTESTPSLVKSLANVKIVQAAIGGWHCLAVDDQGRAYAWGGNEYGQCGEEPSKDETGRPVRRDIVIPKRCAQQLTVRQVAAGGTHSVVLTREGYVWTWGQPWPPGDIKQISVPVRVQGLENVRLIAVGAFHNLALKEDGTLWAWGNNEYGQLGTGDTQPRSYPIPVQGLDDLTLVDIAAGGWHSTALTNEGEVYGWGRGEHGRLGFGDNDKSSKMLPQKVNLLAGEDIIQVSCGGTHSVALTRDGRIFSFGRGDHGRLGYGRKVTTGQPLELPIHIPPPEGRFNHTDEEDDGKWIAKHVACGGRHTLAIVEWKYDQEETE

SEQ ID NO: 460 - protein, 524 aa, Arabidopsis thaliana
MAVYYPNSVGMQSLYQESIYLNEQQQQQQQASSSSAASFSEIVSGDVRNNEMVFIPPTSDVAVNGNVTVSSNDLSFHGGGLSLSLGNQIQSAVSVSPFQYHYQNLSNQLSYNNLNPSTMSDENGKSLSVHQHHSDQILPSSVYNNNGNNGVGFYNNYRYETSGFVSSVLRSRYLKPTQQLLDEVVSVRKDLKLGNKKMKNDKGQDFHNGSSDNITEDDKSQSQELSPSERQELQSKKSKLLTMVDEVDKRYNQYHHQMEALASSFEMVTGLGAAKPYTSVALNRISRHFRCLRDAIKEQIQVIRGKLGERETSDEQGERIPRLRYLDQRLRQQRALHQQLGMVRPAWRPQRGLPENSVSILRAWLFEHFLHPYPKESEKIMLSKQTGLSKNQVANWFINARVRLWKPMIEEMYKEEFGESAELLSNSNQDTKKMQETSQLKHEDSSSSQQQNQGNNNNNIPYTSDAEQNLVFADPKPDRATTGDYDSLMNYHGFGIDDYNRYVGLGNQQDGRYSNPHQLHDFVV

SEQ ID NO: 461 - protein, 343 aa, Arabidopsis thaliana
MAIRLTHLRKPLAYSRSFDVCIPFFRSISSFEAVEKAIKCAVETKEYLRIPELVVSLKEPYQNSTLFSFLSAFQRHHRIRVIDEILQSFVPVRPRSLPKIVYSSLLTYCLQSSDPLPLSFAILQRTLRSGCLPNPQTHLLLSDAWLERRRGSQSVADIINEMKLIGYSPDTGTCNYLVSSLCAVDKLDEAIKVVEEMSAAGCIPDVESYGAVINSLCLARKTTDVVKIVKEMVSKAGISPRKGMLTKVAAALRANREIWKAIEMIEFVESRDYPVEFESYEVVVEGCLEVREYILAGKVVMRMTDRGFIPYIKVRQKVVERLINIGEWKLACTVRQRVSELRS

SEQ ID NO: 462 - protein, 694 aa, Arabidopsis thaliana
MKPLTNGDLFKSPTLIKISALVFVTVAFFYLGKHWSDDGYQQLVFFSSSTSGSSIPEVSVSPNSNRVFNLSAIIPTNHTQIEIPATIRQQPPSVVADTEKVKVEANPPPPPPPSPSPPPPPGPVKSFGIVDANGVMSDDFEVGEVESDTVEDWGNQTEIVEAKSDGDSKARVRIKKFGMCPESMREYIPCLDNTDVIKKLKSTERGERFERHCPEKGKGLNCLVPPPKGYRQPIPWPKSRDEVWFSNVPHTRLVEDKGGQNWISRDKNKFKFPGGGTQFIHGADQYLDQMSKMVSDITFGKHIRVAMDVGCGVASFGAYLLSRDVMTMSVAPKDVHENQIQFALERGVPAMAAAFATRRLLYPSQAFDLIHCSRCRINWTRDDGILLLEINRMLRAGGYFAWAAQPVYKHEPALEEQWTEMLNLTISLCWKLVKKEGYVAIWQKPFNNDCYLSREAGTKPPLCDESDDPDNVWYTNLKPCISRIPEKGYGGNVPLWPARLHTPPDRLQTIKFDSYIARKELFKAESKYWNEIIGGYVRALKWKKMKLRNVLDMRAGFGGFAAALNDHKLDCWVLSVVPVSGPNTLPVIYDRGLLGVMHDWCEPFDTYPRTYDFLHASGLFSIERKRCEMSTILLEMDRILRPGGRAYIRDSIDVMDEIQEITKAMGWHTSLRDTSEGPHASYRILTCEKRLLRA

SEQ ID NO: 463 - protein, 265 aa, Arabidopsis thaliana
MADGSTSSSESTTACAGSGTRREIMLFGVRVVLDPMRKCVSLNNLSDYEQTAETPKIDGEDRDEQDMNKTPAGYASADEALPMSSSNGKIERKRGVPWTEEEHKLFLLGLQRVGKGDWKGISRNFVKTRTSTQVASHAQKYFLRRSNLNRRRRRSSLFDMTTDTVIPMEEDHQVLIQENTSQSSSPVPEINNFSIHPVMQVFPEFPVPTGNQSYGQLTSSNLINLVPLTFQSSPAPLSLNLSLASSNLNEPSPSMHPAFNTIGVA

SEQ ID NO: 464 - protein, 228 aa, Arabidopsis thaliana
MSITRSAIRSSLCLRKLDPEISRSSLPFLQEWRKCLSTATEQPPPASPLPPPPGGSPGEGRFYGKFSGFSKHALKTDIMNVLEGCSLTSDDLKFNYPRGGNLTPAAVFVQFPSLSAYDKALRNIAKKGKLYRLEKAARAQWDPIVPYEGKVVALHGIPVNAITDDIDRFLSGCLYYPGSIQFLTVQGLGTSKRVALVRFTSQTQAMNAYITKNRNFLLNQRITLQVLQ

SEQ ID NO: 465 - protein, 378 aa, Arabidopsis thaliana
MAKMMMLQQHQPSFSLLTSSLSDFNGAKLHLQVQYKRKVHQPKGALYVSASSEKKILIMGGTRFIGLFLSRILVKEGHQVTLFTRGKSPIAKQLPGESDQDFADFSSKILHLKGDRKDYDFVKSSLSAEGFDVVYDINGREAEEVEPILEALPKLEQYIYCSSAGVYLKSDILPHCEEDAVDPKSRHKGKLETESLLQSKGVNWTSIRPVYIYGPLNYNPVEEWFFHRLKAGRPIPVPNSGIQISQLGHVKDLATAFLNVLGNEKASREIFNISGEKYVTFDGLAKACAKAGGFPEPEIVHYNPKEFDFGKKKAFPFRDQHFFASVEKAKHVLGWKPEFDLVEGLTDSYNLDFGRGTFRKEADFTTDDMILSKKLVLQ

SEQ ID NO: 466 - protein, 119 aa, Arabidopsis thaliana
MAKVGKLTKLKSAMKKWPSFAKNHHHSTSSAAVSDELSEDNNLHVVYVGQTRRPYMLRPDIISHPLFQELVDRSSSRSIEQDREIVVACEVVLFEHLLWMLKSGQEGGSVEELAEFYTY

SEQ ID NO: 467 - protein, 502 aa, Arabidopsis thaliana
MTILLCFFLVSLLTIVSSIFLKQNKTSKFNLPPSPSSLPIIGNLHHLAGLPHRCFHKLSIKYGPLVFLRLGSVPVVVISSSEAAEAVLKTNDLECCSRPKTVGSGKLSYGFKDITFAPYGEYWREVRKLAVIELFSSKKVQSFRYIREEEVDFVVKKVSESALKQSPVDLSKTFFSLTASIICRVALGQNFNESGFVIDQDRIEELVTESAEALGTFTFSDFFPGGLGRFVDWLFQRHKKINKVFKELDAFYQHVIDDHLKPEGRKNQDIVTLILDMIDKQEDSDSFKLNMDNLKAIVMDVFLAGIDTSAVTMIWAMTELIRNPRVMKKAQESIRTTLGLKKERITEEDLGKVEYLNHILKETFRLHPALPFVVPRETMSHIKIQGYDIPPKTQIQLNVWTIGRDPKRWNDPEEFNPERFANSSVDFRGQHFDLLPFGSGRRICPGMPMAIASVELALMNLLYYFDWSMPDGTKGEDIDMEEAGNISIVKKIPLQLVPVQRY

SEQ ID NO: 468 - protein, 200 aa, Arabidopsis thaliana
MPIAELAVIKTVGGPLIAAALGVGAQVIYDGFRKGKDTSIINRLGRTMESISPVRDRIGKLSNVEGKPFREVHESLTRLLEDAKSIIEKYWKLRWSRHVCRKYRYIKKLESIELELVRVAREIQVHQWTDIKEMKAIQVHQWTDIKEMKAIQVDQWTDIKEMKAIQVDQWIDIKEMKAIQVDQWTDIKEMKAQISEKHNK

SEQ ID NO: 469 - protein, 398 aa, Arabidopsis thaliana
MASAVQKSALLLCGDYMEAYETIVPLYVLQSFGVSVHCVSPNRNAGDRCVMSAHDFLGLELYTELVVDQLTLNANFDDVTPENYDVIIIPGGRFTELLSADEKCVDLVARFAESKKLIFTSCHSQVMLMAAGILAGGVKCTAFESIKPLIELSGGEWWQQPGIQSMFEITDCVKDGNFMSTVGWPTLGHGIKLLLESLGGKVCSLEKKQASVLFLIGDYVEDYGINVPFRALQALGCKVDAVTPNKKKGEVCATAVYDLEDGRQIPAEKRGHNFFVTASWDDICVDDYDCVVVPGGRSPELLVMNEKAVALVKSFAEKDKVFAAIGQGKLLLAATGVLKGKRCASGKGMKVMVKVAGGEAVMEKGCVTDGKVVTAASATDLPAFLFDLSTALGLTVMF

SEQ ID NO: 470 - protein, 300 aa, Arabidopsis thaliana
MAATRVLTAATAVTQTTSCFLAKQAFTLPAKKSCGGFGGLCFSRRALVLKSKRPFSCSAIYNPQVKVQEEGPAESLDYRVFFLDGSGKKVSPWHDIPLTLGDGVFNFIVEIPKESKAKMEVATDEDFTPIKQDTKKGKLRYYPYNINWNYGLLPQTWEDPSHANSEVEGCFGDNDPVDVVEIGETQRKIGDILKIKPLAALAMIDEGELDWKIVAISLDDPKAHLVNDVEDVEKHFPGTLTAIRDWFRDYKIPDGKPANRFGLGDKPANKDYALKIIQETNESWAKLVKRSVDAGDLSLY

SEQ ID NO: 471 - protein, 216 aa, Arabidopsis thaliana
MKLAASLNRLSPKRLFRTKSKASVSRSEPSSFSSNASSSSSDGSYGNLKQGPTATPISVLPQNSGDFYTELVQAFKLIDRDDDGVVSRGDLAALISRLSHEPPSQEEVSLMLREVDGGDGGCISLEDLASRVAGTSGEGSVETEELREVFEIFDVDRNGKISAEELHRVFGVIGDERCTLEECMRMIATVDGNGDGFVCFDDFCRMMVPAMNDHHH

SEQ ID NO: 472 - protein, 225 aa, Arabidopsis thaliana
MSEMAGDSSTSEDKIHKPNRERNVSGELDVFEATRYFSDFNEPTTIEYSRIQIQKQSIVTENRQKRVHPETEEHLPKPRVVVIKPQKKEMTRGGGKKLTSFLNSLLRSAGLKKKSKSAPEVETPRVERMRRKSCVVTTHAADASPLTNAGAWSLNARRRSFDEKDLKKSDQKLNIRFCESLYSDQRVETKDPNAGDKNDVIGGCESDSSSESDLFELDLFAKSNP

SEQ ID NO: 473 - protein, 270 aa, Arabidopsis thaliana
MMKSFCKLEYDQVFGKENNSFSFLNHSSLYSHQSELANPFFELEDEMLPSATSSNCFTSASSFLALPDLEPISIVSHEADILSVYGSASWTAEETMFVSDFAKKSETTTTKKRRCREECFSSCSVSKTLSKETISLYFYMPITQAARELNIGLTLLKKRCRELGIKRWPHRKLMSLQKLISNVKELEKMEGEENEDKLRNALEKLEKEKKTIEKLPDLKFEDKTKRLRQACFKANHKRKRRSGMSTPITSSSSSASASSSSYSSVSGFER

SEQ ID NO: 474 - protein, 471 aa, Saccharomyces cerevisiae
MSICEQYYPEEPTKPTVKTESIPGPESQKQLKELGEVFDTRPAYFLADYEKSLGNYITDVDGNTYLDLYAQISSIALGYNNPALIKAAQSPEMIRALVDRPALGNFPSKDLDKILKQILKSAPKGQDHVWSGLSGADANELAFKAAFIYYRAKQRGYDADFSEKENLSVMDNDAPGAPHLAVLSFKRAFHGRLFASGSTTCSKPIHKLDFPAFHWPHAEYPSYQYPLDENSDANRKEDDHCLAIVEELIKTWSIPVAALIIEPIQSEGGDNHASKYFLQKLRDITLKYNVVYIIDEVQTGVGATGKLWCHEYADIQPPVDLVTFSKKFQSAGYFFHDPKFIPNKPYRQFNTWCGEPARMIIAGAIGQEISDKKLTEQCSRVGDYLFKKLEGLQKKYPENFQNLRGKGRGTFIAWDLPTGEKRDLLLKKLKLNGCNVGGCAVHAVRLRPSLTFEEKHADIFIEALAKSVNEL

SEQ ID NO: 475 - protein, 85 aa, Arabidopsis thaliana
MGMAMKSVSNFAIFLILFLVTSEISEIEAKDKECLKGYIDAPLSYCMARIYPSLCYRNCRFYKGAKGGKCDGLKCFCDFCSDKPF

SEQ ID NO: 476 - protein, 157 aa, Arabidopsis thaliana
MAGTLVNSAGRFSPGNCILPQQRTARFYSGTARFPTGAPSFKASAQTLNAEPAVTESVRRRVSSLYELLKVNETASLTEIKTAYRSLAKVYHPDASESDGRDFMEIHKAYATLADPTTRAIYDSTLRVPRRRVHAGAMGRSGRVYATTRRWETDQCW

SEQ ID NO: 477 - protein, 580 aa, Arabidopsis thaliana
MGEVADNNTLMKRKKKGRPSLLDLQKRALKQQQLLQRRNPNEENEEELRSSSRNPNFSNRSNRRRNSNSEDDDDERRDKKHRLLHGLNSHEGRDSSNSKSGGGDLDSDARNRRKIDGSDNTGEKASKATDILLQRGSLVESTPLPDKKLLFFILDRVQKKDTYGVYSDPADPEELPDYYEIIKNPMDFTTLRKKLESGAYTTLEQFEQDVFLICTNAMEYNSADTVYYRQARAMLELAKKDFGNLRQESDGEEPVSLSQQPKVVKRGRPPGSGLKKQLEQSLIDRTTSDISADAAAFTYAGDSSRLSGSYNLRKNPPSYGFRHAETSVRINHNSENQSGLLIDWEKEFPPSVVKAVNKYGMKNVDENRRDTYNQNSASLQDSSIFTLLDDNLKQLTPVGLKAEYGYARSLARYAANIGPVAWTFANVRIEKLLPTGTEFGPGWVGENPENPPQQQNLMSGKQKCSNDYASDDHHQSSRIMSPSTSVSSSIIGNIHSSHESKESVQVLNQETEINGLVRGSSGFNHKPNQMLETAGSQQGNIKQEFQRLPPDLNARLSSPNSPGSNHQAGSSQHPDLALQL

SEQ ID NO: 478 - protein, 338 aa, Saccharomyces cerevisiae
MDKNSVNKDSEEKDERHKIEVVDDTNPDFITADSELTQDLPDDVEVIDLVHLKIKSLEDLNLYRFKNLKQLCLRQNLIESISEVEVLPHDKIVDLDFYDNKIKHISSNVNKLTKLTSLDLSFNKIKHIKNLENLTDLENLYFVQNSISKIENLSTLKSLKNLELGGNKVHSIEPDSFEGLSNLEEIWLGKNSIPRLINLHPLKNLKILSIQSNKLKKIENLEELSNLEELYLSHNFITKIEGLEKNLKLTTLDVTSNKITSLENLNHLSNLTDIWASFNKIDQSFESLGENLSALSRLETIYLEGNPIQLENKTSYRRKLTMNLPPSLQKIDATYIRG

SEQ ID NO: 479 - protein, 302 aa, Rhodobacter sphaeroides
MCMSRGCPPSPCGRAESSASTTATGSGSRRRPTRSTASAPTERRSDMRLDGKTALITGSARGIGRAFAEAYVREGARVAIADINLEAARTTAAEIGPAACAIGLDVTDQASIDRCVAELLDRWGRIDILVNNAALFDLAPIVEITRESYDRLFAINVSGTLFMMQAVARAMIAGGRGGKIINMASQAGRRGEALVGVYCATKAAVISLTQSAGLNLIRHGINVNAIAPGVVDGEHWDGVDAKFADYENLPRGEKKRQVGAAVPFGRMGRAEDLTGMAIFLATPEADYIVAQTYNVDGGNWMS

SEQ ID NO: 480 - protein, 245 aa, Eucalyptus globulus
MGRGRVQLKRIENKINRQVTFSKRRCGLLKKAHEISVLCDADVALIVFSTKGKLFEYATDCCMERILERYERYSYAESQVLTNNAETNGNWTLEHAKLKARMEILQKNQKNLMGEELDSLSLKELQNLEHQLDTALKNIRSRKIQLMCESISELQRKDKALQEQNNMLAKKVKEKEKALAQQTQWDNPQDDGLTSSSVILSQSLQPLNIGGPYHPSGIEEGAALGPPQHRNATLFPSWMLSHLQE

SEQ ID NO: 481 - protein, 266 aa, Prochlorococcus marinus subsp. pastoris str. CCMP1378
MINRVDLVIEVRDARIPLSTGHPHLNQWIRNKKHILVINRADMISTETITNWNKWFKKDNIYPLWCDAKNGKGIKEICKSAKESRLSIDNKRLSRGMKVRPIRALTLGFPNVGKSALINRIAKKKVVESARKAGVTRNLRWIRLDNGIDLLDAPGVIPPNLENQKSALNLALCDDIGEAAYEIESVAIEFIKIIFKLKEDKNANISLSKISDRYGVDILKNFDNPHEWIDLVALKHTSGDKRRMAHKLLEDYRNQMLGKISLEVPR

SEQ ID NO: 482 - protein, 360 aa, Pseudomonas putida KT2440
MSKQILILPGDGIGPEIMAEAVKVLELANDKFQLGFSLAHDVIGGAAIDKHGVPLADETLERARKADAVLLGAVGGPKWDKIERDIRPERGLLKIRSQLGLFANLRPAILYPQLADASSLKPEIVSGLDILIVRELTGGIYFGAPRGQRELEGGERQAYDTLPYSESEVRRIARVGFDMARVRGKKLCSVDKANVLASSQLWREVVEDVAKDYPDVELSHMYVDNAAMQLVRAPKQFDVMVTDNMFGDILSDEASMLTGSIGMLPSASLDADNKGMYEPCHGSAPDIAGLGIANPLATILSVSMMLRYSFNQSAAAEAIEKAVSLVLDQGLRTGDIFSEGCRKVGTQEMGDAVVAALRNL

SEQ ID NO: 483 - protein, 775 aa, Nostoc punctiforme
MSQPENTTTQATALTNHDRKPIHIPGSIQPHGILLALSTQLEIVQVSNNTQVYLCKAPEDLLGRPLSYLLEPQPVEIVKQCLVKKVGSANAFKVLINTLYGEIYFDAIAHRTEEAVILELEPTDSEFEVSFLNFHSFASEAIAKMQRTSNLGEFLHLVAQEVQKIISFDRVMVYQFDESEAGSVVAEVKREDLSPYLGLHYPATDIPAQARELYTRCFLRFLPDLTAEPVKLVPTENPTTHQHLDLSYCLLRSFDWCCAEYHQNMGVKALLVISLIQEQKLWGLISCHHQTPKYISYEVRKMCEFLGQIVSSELAHKISSSEWDYKVKLKSLQSEFLESISQADNFIDALIKPEIRLLDFVSASGAAVCLDNEINLVGTTPNIDEVRALIEWADTQVTDNLFSTDSLPKLYPEALIFKDTASGLLLLRISKVRRYYILWFRPEVIQTVHWAGNPQESIKAEGDGSYTLSPRKSFEQWQETVRLTSLPWKGCELESAIALSNAIVGIVLSKADELAKINLELERSNQELASFAYAASHDLKEPLRGIYNFSTVLLEDYAQVLDDDGIECLQTVVSLSVRMETLINALLRLSQLGQAHLREQATDLNELLNQVIDVFRASRQDSGLVDIRIPRPLPTIQCDRVLVNEVFSNLLGNAFKYNDKAEQWVEIGYLSQEEGQGVGSRGQGAGGAGEAIIHQSPIPNAPCPIFYIRDNGIGIPQHHLETIFRLFKRLHSQEKYGGGAGAGLAIVKKIVELHNGQIWVESTLGVGSIFYFTLE

SEQ ID NO: 484 - protein, 343 aa, Bifidobacterium longum DJO10A
MAKTYKIAVIPGDGIGKEVTPWAQKALEKAAEGVADFEYENFDLGAERYLRDGAILPEDEEERIKANDAILLGAVGDPRIKAGILERGLLLKLRFDLDQYVNLRPSKLYKGVTSPLANPGDIDFVVVREGTEGLYCGAGGAVRRNTPQEVATEVSINTAYGVERVVRYAFKLAMKRKKHVTLVHKKNVLVNAGDMWQRIVDKVGEEYPEVTHDYQHIDAATIFLVSDPSRFDVILTDNLFGDILTDEAGSVVGGVGYSASGCINASDEFPSMFEPIHGSAPDIAGQNKANPTAAILSAAMLLEHLGFDDAAKKIHTAVEADIEELGSTVRSTDQVGKDILARM

SEQ ID NO: 485 - protein, 171 aa, Olea europaea
MAANTDRNSKPSVYLQEPNEVQGVFNRFDANGDGKISGDELAGVLKALGSNTSKEEIGRIMEEIDTDKDGFINVQEFAAFVKAETDPYPSSGGENELKEAFELYDQDHNGLISSVELHKILTRLGERYAEHDCVEMIKSVDSDGDGYVSFEEFKKMMTNKSGNNSQAEPPK

SEQ ID NO: 486 - protein, 138 aa, Zea mays
  unsure (1)..(138): unsure at all Xaa locations
MANSLCFFSSPPTFCFQSPSKNPKPSHFFSTNDNTSSLVQKRELLQTSRSQSFEVKAANNNPQGXTKPNSLVCANCEGEGCVACSQCKGGGVNLIDHFNGQFKAGALCWLCRGKKXEVLCGDCNGAGFIGGFLSTFDE

SEQ ID NO: 487 - protein, 50 aa, Vibrio vulnificus CMCP6
MGFKCGIVGLPNVGKSTLFNALTKAGIEAANFPFCTIEPNTGVDQCQICV

SEQ ID NO: 488 - protein, 338 aa, Bacteroides thetaiotaomicron VPI-5482
MKAVQIVNPSEMKVVELEKPTVGAGEVLVRIKYVGFCGSDLNTFLGRNPMVKLPVIPGHEVGAVIEEIGPDVPAGFEKGMNVTLNPYTNCGKCASCRNGRVNACEHNETLGVQRNGVMCEYAVLPWTKIIPAGNISSRDCALIEPMSVGFHAVSRAQVIDNEYVMVIGCGMIGIGAIVRAALRGATVIAVDLDDEKLVLAKRVGASYAVNSKTENVHERIQEITAGFGADVVIEAVGSPVTYVMAVDEVGFTGRVVCIGYAKKEVAFQTKYFVQKELDIRGSRNALPADFRAVINYMKEGKCPVEELISKIAKPEDALEAMKEWAADPGKVFRILVEM

SEQ ID NO: 489 - protein, 122 aa, Zea mays
  unsure (1)..(122): unsure at all Xaa locations
REWTRDVRMKLYSCFALLYPYGHNXLPACEDADQARDAMHKYPPYQSIFSIISYGESQMLNKGFYEDEVKRLCLPFEQEFHYAVFFSYIRLPSQDITYLMRISXCGGHNHKSRAHDRVIFIF

SEQ ID NO: 490 - protein, 333 aa, Streptococcus mutans
MAILVLGGAGYIGSHMVDRLIEKGEEEVVVVDSLVTGHRAAVHPAAKFYQGDLADREFMSMVFRENPDVDAVIHFAAYSLVAESMKKPLKYFDNNTAGMIKLLEVMSEFGVKYIVFSSTAATYGIPNEIPIKETTPQRPINPYGESKLMMETIMKWSDRAYGIKFVPVRYFNVAGAKPDGSIGEDHSPETHLLPIILQVAQGVREKIMIFGDDYNTPDGTNVRDYVHPFDLADRHLLALNYLRQGNPSTAFNLGSSTGFSNLQILEAARKVTGQKIPAEKAARRSGDPDTLIASSEKAREVVGWKPQFDDIEKIIASAWAWHSSHPKGYDDRD

SEQ ID NO: 491 - protein, 246 aa, Triticum aestivum
MARGGRSEKGGGGCGRCCLGFLLKLLAFLQAFAALSAVLYAASILSRWARHHELHIHHLLPDLWFACAVMAAGLLYCAILLAGYVAAEISSGCCLCFYTGLAMVMMLLEAAVAGRILLNEHWIQDLPYDRTGELQNLVSFVHDNLDLCKWAALATVATQALSLLLAMVLRAMVSPTSSDYDSDEDFVVIRRPLLIAQGAPSYLPTTADPRGVHPNLWSSSMRQKYGLNSSGDYTYNTLGQNAAPPQ

SEQ ID NO: 492 - protein, 258 aa, Zea mays
MDRLAPPVAVEVPVVHRQQQQQFVHHSQVHQQQRTHQQQQHQNGGGSKPGGRKCCPLRRSRKGCMKGKGGPDNQQCPFRGVRQRTWGKWVAEIREPNRGARLWLGTFGSALEAARAYDAAARALYGDCARLNLQLPPPSAAAGGGPAIVASPSPDTGCHVDDTTTTTMAMQRHQQMLRELAAAPLHQEADDFEDFMTRLPKAEDFGLQGFQEVPPEVFDEAAGIWDHTAAWSSPTMMIDSAGAQRQQVVDSSSLFNSR

SEQ ID NO: 493 - protein, 131 aa, Triticum aestivum
  unsure (1)..(131): unsure at all Xaa locations
MNRKPGDWDCRSCQHLNFSRRDLCQRCGEPRSAADRGSVGRRXGGDYANFGGRGGGGSSFGTGFGAGSDVRPGDWYCTCGAHNFASRSSCFKCAAFKEEAAVNGGAGGFDGDMSRSRGFGFGAVGGMGAGA

SEQ ID NO: 494 - protein, 161 aa, Enterococcus faecium
MERFIASNATVIGDVTLSEDVTIWYQAVLRGDSNWIKIGQRTNIQDGTIIHVDHDAPVDIAENVTVGHQCMLHGCTIEKGALIGMGTTILNHAVIGENSLIGAGSLVTEGKVIPPNVLAFGRPAKVIRPLTKEEIQKNKENIQHYVEIGRMHAQGKFKEQR

SEQ ID NO: 495 - protein, 623 aa, Neurospora crassa
MPSTKNANGEGHFPSRIKQFFRINSGSKDHKDRDAHTTSSSHGGAPRADAKTPSGFRQSRFFSVGRLRSTTVVSEGNPLDESMSPTAHANPYFAHQGQPGLRHHNDGSVPPSPPDTPSLKVDGPEGSQQPTAATKEELARKLRRVASAPNAQGLFSKGQGNGDRPATAELSKEPLEESKDSNTVGFAEQKPNNDSSTSLAAPDADGLGALPPPIRQSPLAFRRTYSSNSIKVRNVEVGPQSFDKIKLIGKGDVGKVYLVKEKKSGRLYAMKVLSKKEMIKRNKIKRALAEQEILATSNHPFIVTLYHSFQSEDYLYLCMEYCSGGEFFRALQTRPGKCIPEDDARFYAAEVTAALEYLHLMGFIYRDLKPENILLHQSGHIMLSDFDLSKQSDPGGKPTMIIGKNGTSTSSLPTIDTKSCIANFRTNSFVGTEEYIAPEVIKGSGHTSAVDWWTLGILIYEMLYGTTPFKGKNRNATFANILREDIPFPDHAGAPQISNLCKSLIRKLLIKDENRRLGARAGASDIKTHPFFRTTQWALIRHMKPPIVPNQGRGIDTLNFRNVKESESVDISGSRQMGLKGEPLESGMVTPGENAVDPFEEFNSVTLHHDGDEEYHSDAYEKR

SEQ ID NO: 496 - protein, 172 aa, Zea mays
VAPRGGKNFGRPIPRLIREKKVYFWGCKFATGIVASGEGRGRRQRETQGSEPPCTGYTAVFGRARWPGAPHRVLKTPFYVEWKNLPDHETEENQPIIGHSIIHGVHKDICRFAGTVPNATTTGDIDSMAMYAGQSVGLITEIVPAREVVKRLVAEAQRVIGEKLSGFPKSSE

SEQ ID NO: 497 - protein, 171 aa, Olea europaea
MAANTDRNSKPSVYLQEPNEVQGVFNRFDANGDGKISGDELACALKALGSNTSKEEIARMMEEIDTDKDGFINVQEFAAFVKAETDPYPSSGGENELKEAFELYDQDHNGLISSVELHKILTRLGERYAEHDCVEMIKSVDSDGDGYVSFEEFKKMMTNKSGNNSQAEPPK

SEQ ID NO: 498 - protein, 106 aa, Zea mays
MDTSSPAALVNAQMLNMFVGRRVRTVVQVQHNEGGVLVGQSTDGHQLCVKSAMDVPVSHFMEVYGIAENSQTIRAEVCTDFGPNFDPKVFDELCKLASGRFKHLFL

SEQ ID NO: 499 - protein, 412 aa, Thermotoga maritima
MSVFLFVIVAVLFVLLFLVFKKRLSEYKILIEKLSDMLGEKGVPPLYLFERLKKYVDNLKETISRVEVSRDNFLTILNSLSEPIFILDREGKITFLNEIARELVQGRINPEGRPYYEIFEDYYINEMVEETIKSEEPQEGTLVTYVGNEKKYFHVKVIPVELKSGDKIFVILFHDVTKERKLDEMRREFIATVSHELRTPLTSIHGYAETLLEDDLENKELVKRFLKIIEEESARMTRLINDLLDLEKIEESEANFEMKDVDLCEVIEYVYRIIQPIAEENEVDLIVECEDVVVRGNKERLIQMLLNLVDNAVKYTSLKEKGEKKVWVRAYDTPDWVVVEVEDTGPGIPKEAQSRIFEKFYRVDKARSRKMGGTGLGLTIVKTIVDKHGGKIEVESEINQGTLMRVLLPKRR

SEQ ID NO: 500 - protein, 232 aa, Saccharomyces cerevisiae
TTIVGVKFNNGVVIAADTRSTQGPIVADKNCAKLHRISPKIWCAGAGTAADTEAVTQLIGSNIELHSLYTSREPRVVSALQMLKQHLFKYQGHIGAYLIVAGVDPTGSHLFSIHAHGSTDVGYYLSLGSGSLAAMAVLESHWKQDLTKEEAIKLASDAIQAGIWNDLGSGSNVDVCVMEIGKDAEYLRNYLTPNVREEKQKSYKFPRGTTAVLKESIVNICDIQEEQVDITA

SEQ ID NO: 501 - protein, 172 aa, Triticum aestivum
  unsure (1)..(172): unsure at all Xaa locations
GASGKDIAMEVRRVAKEVHLVAKSMEEVTQELAKVLSKYSASLHLQLHVERLCEDGRVVFGDGSSILADTIIYCTGFNYSFPFLDTEGAVTVDXXCVGPLFEHVFPPSXAPSLSFVGIPXKVFAPWVLXAQXKWXAQVLSGKRXLPPEEEIVRSVXDIXRQEAXGAPXNYTT

SEQ ID NO: 502 - protein, 65 aa, Glycine max
  unsure (1)..(65): unsure at all Xaa locations
LITVSVYASDSYSSLKCRSTRIEYIRRVKPDAGFAXXESESLKWPGFVEFDDVNGKVLTYSAQDR

SEQ ID NO: 503 - protein, 389 aa, Xanthomonas axonopodis pv. citri str. 306
MRILVTGGTGYIGSHTCVELAQRGHEVCIVDNLSNSSERVLDHLQHLMGFRPEFHRMDVRAPELADLLIGKRIDAVLHFAALKAVGESVREPLLYFNNNVTGTLALLRAMRTAKVCNLVFSSSATVYGDANRSPIDESAPLKAINPYGRTKLMMEEMIGDLSAAWPDFNAALLRYFNPVGAHPSGYLGEDPRGVPNNLMPYIAQVAVGRREALQVFGDDYPTDDGTGVRDYLHVMDLARAHVDAIDYLQRQRKGLVVNLGTGRGYSVREVAAAFARASGRRIPLSIAPRRDGDVAVYFASTALANRLLGWTAEYDLDRMCRDTWRWQSMYPDGYAGSRLPRPRTAAAVPEREGARELPAPAPRLSPGPDTRRRSEPVSTLVVATGFSRV

SEQ ID NO: 504 - protein, 159 aa, Zea mays
  unsure (1)..(159): unsure at all Xaa locations
TCHFVCFCPQINPDSAKGYKTRGMAYAMLGKWEEAAHDLHTASNMDYDEEINAVLKKVEPNAHKIVEHRRKYERLRKEREEKRAQFDRLRQRAEAQAAYDKGQEEGAMVNWLIRSXFPKGFLEGMPGGGFPRGMPGGGFPGGGMPGGFPGGGMPGGFPG

SEQ ID NO: 505 - protein, 171 aa, Zea mays
MAEEASAPAAGTEAPPGKMTMVVGVDESEHSFYALQWALQHFFPPGQPQQYRLVVVTAKPTAASAVGLAGPGAADVLPYVEADLKRSALRVVEKAKGLCTQASDAVFEALEGDARNVLCEAVERHGAEMLVVGSHGYGAIKRAVLGSVSDYCAHHAHCTVMIVKKPKQHKH

SEQ ID NO: 506 - protein, 203 aa, Gossypium somalense
GYTPLFPRILGHEASGIVESVGEGVNDLKPGDHVLPIFTGECKECRHCLSEESNNMCELLRINCDRGVMLADGKTRFSINGKPIYHFVGTSTFSQYTVVHVGQVAKISPTAPLDKVCPISCGICTGFGATVNVAKPKKGQTVAVFGLGAVGLAAAEGARVCGASRIIAVDVNPRRFEEAKRFGITEFVNPKDYDKPVQEVIVE

SEQ ID NO: 507 - protein, 137 aa, Zea mays
MAAEAEVGSGLAAGEKQRTVVVVAVDDSDHSYHALEWTVRHVAAPGGGVAGGAADLVVARARRVCAASSARALVEVVEGEPRTVLCSAAEKHRADLLVLGSHGYGAVKRALLGSVSDYCAHHAPCSVMIVKQPTKSK

SEQ ID NO: 508 - protein, 137 aa, Zea mays; identical to SEQ ID NO: 507

SEQ ID NO: 509 - protein, 120 aa, Zea mays
  unsure (1)..(120): unsure at all Xaa locations
MAAACDAYTDKNAVFRRLKAMPENKMCLDCNAQIPTWASVTXYGIFLWLDCCAAHRSLGVHITFVRSTNLDXWTPYQLKMMAFGGNIRAHAFFKHHGWTDGGKVEAKCTSRAGELYRQML

SEQ ID NO: 510 - protein, 142 aa, Sorghum bicolor
NSLHSAFSTYGEVLESKIILDRETQRSRGFGFVTFSTEEAMRSAIEGMNGKELDGRNITVNEAQSRGGRGGGGGGGYGGGRGGGGGYGRRDGGGGGYGGGGGGYGGGRGGYGGGGYGGGGGGYGGGSRGGGGYGNSDGNWRN

SEQ ID NO: 511 - protein, 428 aa, Oryza sativa
MAQAVVPAMQCQVGAVRARPAAAAAAAGGRVWGVRRTGRGTSGFRVMAVSTETTGVVTRMEQLLNMDTTPFTDKIIAEYIWVGGTGIDLRSKSRTISKPVEDPSELPKWNYDGSSTGQAPGEDSEVILYPQAIFKDPFRGGNNILVMCDTYTPAGEPIPTNKRNRAAQVFSDPKVVSQVPWFGIEQEYTLLQRDVNWPLGWPVGGYPGPQGPYYCAVGSDKSFGRDISDAHYKACLYAGINISGTNGEVMPGQWEYQVGPSVGIEAGDHIWISRYILERITEQAGVVLTLDPKPIQGDWNGAGCHTNYSTKSMREDGGFEVIKKAILNLSLRHDLHISAYGEGNERRLTGLHETASIDNFSWGVANRGCSIRVGRDTEAKGKGYLEDRRPASNMDPYVVTALLAETTILWEPTLEAEVLAAKKLALKV

SEQ ID NO: 512 - protein, 399 aa, Mycobacterium abscessus
MPGDHPGQFARPPCAVGTTTSEASLDRRDFNMKTRAAVLWGLEQKWEVEEVDLDPPGPGEVLVRLAATGLCHSDEHLVTGDLPIPLPVVGGHEGAGTVVECGEGVEDLSEGDSVILTFLPSCGRCSYCARGMGNLCELGAALMMGPQIDGTYRFHARGEDVGQMCLLGTFSEYTVVPQASVVKIDGGIPLDRAALIGCGVTTGYGSAVRTGEVRAGDTVVVVGAGGIGMNAIQGARIAGALAIVAVDPVNFKREQASGFGATHTAASMDEAWSLVSDMTRGKLADVCILTTDVAEGSYTAEALALVGKRGRVVVTAIGHPDESSISGSLLEMTLYEKQIRGALYGSSNAPHDIPRLVELYSAGLLKLDELVTREYSLDQINEGYQDMRSGRNIRGLVRF

SEQ ID NO: 513 - protein, 293 aa, Glycine max
  unsure (1)..(293): unsure at all Xaa locations
MAFPPSHTFMFQTHEDHDPHQLHLRSTSTSLNAFPSFPPHHFQGAGGLMMKRSMSFSGIDNNNNNNKCDESHGDDELSDEGSQLLGEKKKRLSLEQVKALEKSFELGNKLEPERKMQLAKALGLQPRQIAIWFQNRRARWKTKQLEKEYEVLKKQFEAVKADNDSXLKSQNQKLHTELQTLKRRDCNETGTVISLKKETDQGSWSNGSNNSSEINLDLSRTPVMNTSPVSSQNGKSLLPTTSSKPTSITQLLQCSSRPDLQDESFCNMFHIIDEQQNFWPWPDHQQQQQHQFH

SEQ ID NO: 514 - protein, 221 aa, Ginkgo biloba
MGRGKIEIKRIENTTNRQVTFCKRRNGLLKKAYELSVLCDAEVALIVFSSRGRLYEFANNSVKRTIDRYKKTCADNSQGGAISECNSQYWQQEAGKLRQQIDILQNANRHLMGDALTSLSVKELKQLEIRLERGISRVRSKKNEMLLEEIEIMQRREHILLAENQFLRTKIAECESSQNANMLPGPEFDALPGFDSRHFLHASIMDAHHYAQQDQTALQLG

SEQ ID NO: 515 - protein, 152 aa, Triticum aestivum
MVKAVAVLTGSEGVKGTIFFTQEGEGPTTVTGSVTGLKEGLHGFHVHALGDTTNGCMSTGPHFNPAGHVHGAPEDEIRHAGDLGNVTAGVDGVASINITDCHIPLTGPNSIVGRAVVVHGDADDLGKGGHELSKSTGNAGARVACGIIGLQG

SEQ ID NO: 516 - protein, 180 aa, Zea mays
  unsure (1)..(180): unsure at all Xaa locations
QKNPXDLLKXXEXXDPANKXGRXTXRTRXGAENXRXKXXXXNXXXRKXGXXXTXXXXXXXGNTXKAGGGXKXXPXDXXXXEGRAXXDXXEQEGXHPGGXHXEXXGQNXTEXXXGXRXXTXXDXXDRXHTHXDPRXNAXQXREXAXNXAERXRKRRXRXGXNNSXPXPPRXXEAEEQRRKR

SEQ ID NO: 517 - protein, 255 aa, Glycine max
LFYNKNNDSLITVSVYASENFCSLKCRSTKIEYIRRGKPDAGFPLFQSESLKWPGFVEFDDVNGKVLTYSAQDCIYKVFDLKNYTLLYSISDRNVQEIKISPGIMLLIYNRTSGHIPLKIISIEDGTILKVFNHLLHRNKKVDFIEQFNEKLLVKQENENLQILDVRSSELMEVSRLEFMTPSAFIFLYENQLFLSFRNRTVSVWNFRGELVTSFEDHQLWHPDCNTNNIYITSDQDLIISYCKADSDDQWIEAL

SEQ ID NO: 518 - protein, 342 aa, Coxiella burnetii RSA 493
MKVLSKLKPAPGLWLHKAPTPKPGRDEVLIKIKKTAICGTDLHIYKWDEWAQKTIPVPMHVGHEFVGEIVEVGEAASALAVGDRVSGEGHITCGDCRNCRAGKRHLCRYTVGVGVNRPGAFAEYLVIPAKNAYKIPAKISDDIAAILDPFGNAAHSALEFDLVGEDVLITGAGPVGLMSAAIARHVGARHVVITDVNDYRLALAEKVGVTAAVNSTKTPLTETMKNLGMTEGFDVGLEMSGNAEAFRSMLTVMNNGGKIAFLGIPPEPFAIDWNQVVFKSLLIKGIYGRRMFETWYKMTNLLLSGLDISPIITHEFPMKDFQQAFDVMLSGKTGKVILNWEQ

SEQ ID NO: 519 - protein, 151 aa, Methanocaldococcus jannaschii
MIIMDVSVQRRMAAEILKCGIERVWIDPTQLDRVKMAMSKDDIRALIKEGVIKKKQKKGISSARVKKLKEQRKKGRRRGPGSRRGAAGARTPPKERWMATIRALRKTLKQLRDSGKIDRKVYRKLYRMAKGGAFRSRSHLFLYMREHELLK

SEQ ID NO: 520 - protein, 73 aa, SINNINGIA GLAZIOVIANA
  unsure (1)..(73): unsure at all Xaa locations
ISGTNGEVMPGQWEFQVGPSVGIEAGDHIWCARYLLERITEQTGVVLSLDPKPIXGDWNGAGCHTNYSTKSMR

SEQ ID NO: 521 - protein, 394 aa, Zea mays subsp. mays
LGSARRARLPPGEMGWPLVGGMWAFLRAFKSGKPDAFIASFVRRFGRTGVYRSFTFSSPTVLVTTAEGCNQVLMDDDAFVTGWPKATVALVGPRSFVPIPHDEHRRIRKLTAAPINGFDALTGYLPFIDRTVTSSLRAWADHGGSVEFLTELRRMTFKIVVQIFLGGADQATTRALERSYTELNYGMRAMAINLPGFAYRGALRARRRLVAVLQGVLDERRAARAKGVSGGGVDMMDRLIEAQDERGRRLDDDEIIDVLVMYLNAGHESSGHITMWATVFLQENPDMFARAKAEQEAIMRSIPSSQRGLTLRDFRKMEYLSQVIDETLRLVNISFVSFRQATRDVFVNGYLIPKGWKVQLWYRSVHMDPQVYPDPTKFDPSRWEGHSPRAGTFL

SEQ ID NO: 522 - protein, 340 aa, Chryseobacterium meningosepticum
MRIIYKQQTMNNNRRDFIKKLGIATAAIAINPLEAKNLLDTSEPKTTNKPIVLSTWNFGLHANVEAWKVLSKGGKALDAVEKGVRLVEDDPTERSVGYGGRPDRDGRVTLDACIMDENYNIGSVACMEHIKNPISVARAVMEKTPHVMLVGDGALEFALSQGFKKENLLTAESEKEWKEWLKTSQYKPIVNIENHDTIGMIALDAQGNLSGACTTSGMAYKMHGRVGDSPIIGAGLFVDNEIGAATATGHGEEVIRTVGTHLVVELMNQGRTPQQACKEAVERIVKIVNRRGKNLKDIQVGFIALNKKGEYGAYCIQDGFNFAVHDQKGNRLETPGFALK

SEQ ID NO: 523 - protein, 349 aa, Neurospora crassa
MAEYIWIDSEGNTRSKSRTLDEKPEGYKPEELPIWNFDGSSTGQAPGDNSDVYLKPVAVYPDPFRPPNNILVLAECWDADGTPNKYNHRHECAKLMELHAKHEPWFGLEQEYTLLDLNDRPYGWPQNGYPAPQGPYYCGVGAGKVVMRDIVEAHYRACLYSGIKISGTNAEVMPAQWEFQVGPCVGIEMGDQLWLARFLLHRVAEEFAVKVSLDPKPIPGDWNGAGLHSNFSTVEMRKEGGMKQIEAAIKKLEGRHKEHIAGEFVRSEEEWSGVGTEANAGKTVYGEGNEKRLTGRHETGAIDTFTYGVANRGASIRIPRECAAKGYGYFEDRRPASNADPYLITGIIT

SEQ ID NO: 524 - protein, 1135 aa, Nicotiana plumbaginifolia
MASGSRTKHSHQSGQGQGQVQAQSSGTSNVNYKDSISKAIAQYTADARLHAVFEQSGESGKSFDYSQSVKTTTQSVVPEQQITAYLTKIQRGGHIQPFGCMIAVDEASFGVIAYSENACEMLSLTPQSVPSLERPEILTVGTDVRTLFTPSSSVLLERAFGAREITLLNPIWIHSKNSGKPFYAILHRVDVGIVIDLEPAKTEDPALSIAGAVQSQKLAVRAISHLQSLPGGDVKILCDTVVESVRELTGYDRVMVYKFHEDEHGEVVAESKRPDLEPYIGLHYPATDIPQASRFLFKQNRVRMIVDCHATPVRVVQDESLMQPLCLVGSTLRAPHGCHAQYMANMGSIASLTLAVIINGNDEEAVGGRSSMRLWGLVVGHHTSARCIPFPLRYACEFLMQAFGLQLNMELQLASQLSEKHVLRTQTLLCDMLLRDSPTGIVTQSPSIMDLVKCDGAALYCQGKYYPLGVTPTEAQIKDIVEWLLTYHGDSTGLSTDSLADAGYPGAALLGDAVCGMAVAYITSKDFLFWFRSHTAKEIKWGGAKHHPEDKDDGQRMHPRSSFKAFLEVVKSRSLPWENAEMDAIHSLQLILRDSFKDAEASNSMAVVHAQLGEMELQGIDELSSVAREMVRLIETATAPIFAVDVDGRINGWNAKVAELTDLSVEEAMGKSLVHDLVHEESQETAENLLFNALRGEEDKNVEMKLRTFGSEQPKKAVFVVVNACSSKDYTNNIVGVCFVGQDVTGQKVVMDKFIHIQGDYKAIVHSPNPLIPPIFVSDENTCCSEWNTAMENLTGWSRGEIIGKMLVGETFGSCCRLKGPDAMTKFMIVLHNAIGGQDTDKFPFSFSDRNGKYVQALLTANKRVNMEGQIIGAFCFIQIASPELQQALRVQRQQDKKCYSQMKELAYLCQEIKSPLNGIRFTNSLLEATDLTEDQKQYLETSTACERQMSKIIRDVDLENIEDGSLTLDKEEFFLGSVIDAVVSQVMLLLRERSVQLIRDIPEEIKTLTVHGDQVRIQQVLADFLLNMVRYAPSPDGWVEIQLQPNMKQISDEVTVVHIEFRIVCPGEGLPPELVQDMFHSNRWVTKEGLGLSMCRKILKLMNGEIQYIRESERCYFLIILDLPMTGRGSKSVG

SEQ ID NO: 525 - protein, 349 aa, Kluyveromyces lactis
MSDNRAQFLEVFPSLVQELRDILAGYGMPEEAIEWYEKSLNYNTPGGKLNRGLSVVDTYALLKGYKSVSELSAEEYKKVAILGWCIELLQAYFLVADDMMDQSITRRGQPCWYKVENVGDIAINDAFMLEGAIYCLLKKHFRTEPYYVDLLELFHDVTFQTELGQLLDLITAPEDKVDLSKFSLEKHSFIVIFKTAYYSFYLAVALAMFAAGITDSKDLKQASDVLIPLGEYFQIQDDFLDCFGKPEDIGKIGTDIQDNKCSWVINVALKNATKEQRDILDENYGRKDSEKEQKCRAVFNELNIQDIYHKYEEETASNLREKIANIDESRGFKAEVLTLFLNKIYHRKK

SEQ ID NO: 526 - protein, 254 aa, Salmonella typhimurium LT2
MNDLFSLAGKNILITGAAQGIGYLLATGLGRYGARIIVNDITPERAETAVTKLQQEGIKAIAAPFNVTHKQDIEAAVEHIEKDIGVIDVLINNAGIQRRHPFTEFPEQEWNDVIAVNQTAVFLVSQAVTRRMVARQAGKVINICSMQSELGRDTITPYAASKGAVKMLTRGMCVELARHNIQVNGIAPGYFKTEMTKALVEDEAFTSWLCKRTPAARWGDPQELIGAAVFLSSKASDFVNGHLLFVDGGMLVAV

SEQ ID NO: 527 - protein, 423 aa, Streptomyces coelicolor A3(2)
MTITQPDLSVFETVESEVRSYCRGWPTVFDRAVGSRMYDEDGHEYLDFFAGAGSLNYGHNNAVLKRALIDYLERDGVTHGLDMSTTAKRRFLETFQNTILRPRDLPYKVMFPGPTGTNAVESALKLARKVKGRESIVSFTNAFHGMSLGSLAVTGNAFKRAGAGIPLVHGTPMPFDNYFDGTVEDFIWFERLLEDQGSGLNKPAAVIVETVQGEGGINVARAEWLRALADLCERQDMLLIVDDIQMGCGRTGAFFSFEEAGITPDIVTVSKSISGYGMPMALTLFKPELDVWEPGEHNGTFRGNNPAFVTATATLEAYWADGSAMEKQTRKRGEQVEQHMIAITEENLADVKEYRGRGLVWGLEFHDKDRAGRVAKRAFELGLLIETSGPESEVVKLLPALTITPDELDEGMKTLARAVRETA

SEQ ID NO: 528 - protein, 473 aa, Oryza sativa (japonica cultivar-group)
MALKVVSFPGDLAAVSFLDSNRGGAFNQLKVDLPFQTRDRRAVSLRRTCCSMQQAPPPAWPGRAVVEPGRRSWDGPKPISIVGSTGSIGTQTLDIVAENPDKFRVVALAAGSNVTLLADQVKTFKPKLVAVRNESLVDELKEALADCDWKPEIIPGEQGVIEVARHPDAVTVVTGIVGCAGLKPTVAAIEAGKDIALANKETLIAGGPFVLPLAQKHKVKILPADSEHSAIFQCIQGLPEGALRRIILTASGGAFRDWPVDKLKEVKVADALKHPNWNMGKKITVDSATLFNKGLEVIEAHYLFGAEYDDIEIVIHPQSIIHSMIETQDSSVLAQLGWPDMRIPILYTMSWPDRIYCSEVTWPRLDLCKLGSLTFKAPDNVKYPSMDLAYAAGRAGGTMTGVLSAANEKAVELFIDEKIGYLDIFKVVELTCDAHRNELVTRPSLEEIIHYDLWAREYAASLQPSTGLSPVPV

SEQ ID NO: 529 - protein, 687 aa, Oryza sativa
MKPLGAHGADLLCGPRVLRAAALAFACAAAFLVGYHWSDSSPRLLFFSSTASSSSSPLLSTGSPSVAVSPNANLSFDPSLIPTPAASTPPASPTANASPPPSLPPPPPPLRPPPPPARLGIVGEDGAMRDDFDVVVGGANDTDLAATDEALPQEPTDAGPAVGSRVRIGRFPVCPESMREYIPCLDNEEEIRRLPSTERGERFERHCPAKDKGLSCLVPAPKGYKAPIPWPRSRDEVWFSNVPHTRLVDDKGGQNWISKAKDKFRFPGGGTQFIHGANQYLDQISQMVPDIAFGSHTRVALDVGCGVASFGAYLLSRDVLTLSIAPKDVHENQIQFALERGVPAMAAAFATHRLLYPSQAFDLIHCSRCRINWTHDDGILLLEVNRMLRAGGYFAWAAQPVYKHEEAQQEAWKEMEDFTARLCWELVKKEGYIAMWRKPLNNSCYMNRDPGVKPALCDPDDNPDDVWYVNLKACISRLPENGDGLTPFPWPARLMEPPKRLEGVEMDAHSSKKELFKAETKFWDDIVEGYIRVFKWRKFKLRNVLDMRAGFGGFAAALINRKLDCWVMNVVPVSEPNTLPVIYDRGLLGVAHDWCEPFDTYPRTYDLLHAFSLFSKEQKRCNISSILLEMDRILRPGGRAYIRDLKQVVQDVKEITTAMGWRSIMRDTAEGPYASRKVLMCDKPMVR

SEQ ID NO: 530 - protein, 159 aa, Streptococcus pyogenes M1 GAS
MPNLYDFTVKAQDGSDISLVDYKEKVVLVVNTATKCGLTPQYQALQALYDTYHDKGFEVLDFPCNQFLNQAPGDAEEINHFCSLTYHTTFPRFAKIKVNGKDADPLFTWLKEEKSGPLGKRIEWNFTKFLIDQNGQVIKRYSSKTDPKLIEEDLKALLG

SEQ ID NO: 531 - protein, 95 aa, Oxalis tuberosa
LYAGINISGTNGEVMPGQWEYQVGPSVGIEAGDHVWASRYILERITEQAGVVLTLDPKPIEGDWNGAGCHTNYSTKSMRDEGGFEVIKKAILNLS

SEQ ID NO: 532 - protein, 780 aa, Botryotinia fuckeliana
MSLTLLTRASTSFQNWTHAHHLALTFVNQLNITEKSNIVTGTYHTSTLDGKPMNCIGNIGPIPRLNFTGICLNDGPALLLVRDLISVFPSGVTLAATWDRELVYQSYKALGEEFRGKGTHVALGPVAGPLGRHPLGGRNWEGFSPDPYLTGHLMTASITGMQSVGVQTSSKHFIGNEQETQRSNSPLPDGTNIDAISSNIDDRTLHELYLWPFADAVRAGTTSILCSYNRINETYACENPHLLNNILKGELGFQGYVVSDWFATHSGYPAANAGLDMDMPGYISQSAINTGETYFGPHLISAIQAGNMTEDRLDDMVTRIMTSYFLLNQSSNYPTPDPSQTYVMANMYGYDYGAQIPARDVRANHSSLIRQIGSAGTVLLKNTNNILPLSKPLNIGVFGNSAPDPTDGLTWPQSDLQTGFDIGTLDIGGGSGSARHTTLISPLTALRTRAATYARVQYLTNNALLSSSSSSSFAGIYPIPEICLVFLKTFSSEGVDRTSYPLDWNSTLVVNNVASFCQGNTIVITHSSGINTLPFAQNPNVSAILLAHYPGQESGNSIVDVLFGVVNPSGKLPYTIPVHESDMHIPVVNLSTSEVLAHHQSQNAWQSNFTEKLAIDYRGFEMKNVTPLYEFGHGLSYTTFNLTTPTPSIKHVTTQPITARPNPLSPILPGGNADLYTPLFTLTTRVKNTGTRTGATILQLYISLPETSTPEGTPKKVLRGFEKVEMRGGEERDVEFVLQRRDVSYWDTVLGDWVVPEGDIGVMVGFSVQDLRARVGVVVR

SEQ ID NO: 533 - protein, 309 aa, Neurospora crassa
MSTTAGAFIAGGIAACGAVTATHPFETVKIRMQLQGELQSSTSSPHFYRGPIHGVSVIVRNEGLGGIYRGIGCAYIYQILLNGCRLGFYEPMRHALATTLFNDAKTQNLGINMFAGAASGIMGAMAGSPFFLAKTRLQSYSPFLPVGTQHQYKNAWDGLTKIYKGEGVKGLYRGVGAAMIRTGFGSSVQLPTYFFAKRRLVKHLGMEEGPALHLASSTASGFVVCVVMHPPDTIMSRLYNQNGNLYKGVFDCLAKTIRAEGFFAIYKGVIPHLTRILPHTILTLSLAEQTTKLVKKLEDKILGPETRVL

SEQ ID NO: 534 - protein, 305 aa, Schizosaccharomyces pombe
MGTSGIEIFAALNDFTDAIVSVPESVCGKFTSLKEIDAQVRDIRQNVIQEIGVVLKNEKNDELSGEERCERLQKTLKEILPYSDSKICLATDAMNNIKSCIDRLDAGFEYVELEIPQQLRLGYPDDRALMNYHSTVTPQTSERRRETRRHQNNQHSQQYSSQERSSSYNNFEDASSPQSSYHTPTKRRKNAVPRKSSSPPLSSTKHAPQSTERRPVRRSESRLKQTNGEPLVKHDTLDSSDISREGEQLYCYCQQVSYGQMIGCDNENCKREWFHLPCVGLVEPPKGIWYCKECEELAKSSESRQ

SEQ ID NO: 535 - protein, 240 aa, Pseudolarix amabilis
YTYTLGNKGPEDVIVRVIYCGICHSDLVQMRNEMGMSHYPMVPGHEVVGIVTELGSEVKKFKVGEHVGVGCIVGSCRKCGNCNESMEQYCSKRIWTYNDVNHDGTPTQGGFASTMVVDQMFVVRIPANIPLEQAAPLLCAGVTVYGPLKHFGMTESGKRCGILGLGGVGHMGVKIAKAFGLHVTVISSSDKKKEEALEVLRADAYLVSKDAEKMQEAAESLDFIMDTIPVAHPLEPYLAL

SEQ ID NO: 536 - protein, 100 aa, Aureococcus anophagefferens
SDFELKLMDIDAESLGIPDQEYNTTIKMSSSEFQRIVRDMTVLGDTCSIGCTKEGVKFSVHGDLGAGHITLRSNASVDKEDEAVEIQMEEPVELTFALRY

SEQ ID NO: 537 - protein, 252 aa, Triticum aestivum
  unsure (1)..(252): unsure at all Xaa locations
MEGLYYNVNNGYVEGIVRGYRNSLLTGAAYNNLTQCETIDDLKLQLGPSYGDFLASLPPNPSTSALAAKTTDKLISEFRYVRAQAVGSLATFMDYVTYGYMIDNVALLITGTLHERDTRELLDRCHPLGWFETMPVLCVATNIEELYNSVLIETPLAQYFKGSLSHQVLDELNIEIVRNTLYKNYLEDVYNFVNTPPEMAGTPTAEVMSEILEFEADXRAINITLNSFGTDLXQQDRNKLYPXFGKLYPEGL

SEQ ID NO: 538 - protein, 152 aa, Zea mays
MVKAVAVLGSSDGVKGTIFFTQEGDGPTTVTGSVSGLKPGLHGFHVHALGDTTNGCMSTGPHYNPASKEHGAPEDENRHAGDLGNVTAGADGVANINVTDSQIPLTGPNSIIGRAVVVHADPDDLGKGGHELRKSTGNAGGRVACGIIGLQG

SEQ ID NO: 539 - protein, 148 aa, Glycine max
NHSFSISVSVLRFKVCVFRRFSVMGSEQNDSFSPSEPKLCVNGCGFFGSPSNMNLCSKCYRDIRATEEQAASAKAAVDKSLNPNKPHTKPPQQSLETAPEPSSSASVGDSSDPPRATRCLSCNKKVGVTGFKCRCGSTFCGAHRYPES

SEQ ID NO: 540 - protein, 336 aa, Pseudomonas syringae pv. syringae B728a
MPTPMRCTSRSAAASNRSEIPASARRAWERTGRRFACSRRQYFKRRIFGGHTGLFANKFAPTAFGQNQKLTCLNLQKNSATGVIFMSEFWNKAFDLNGRCAVITGGAAGIGLACASLLVARGARVALLDRDPAVAEVAAGLGSGHLGIAVDLRRVDQVNSTIDSVFEHFQRIDYLVNSAGVAMLDKAVDVSEEAWDTTLDINLKASFFVAQACARHMLGQGSGRIVNLASQAAVIGLDRHVAYCASKAAVVGMTKVLAMEWAPHINVNAISPTIVETALGKKAWAGEVGERAKTQIPAGRFAQPEEIAGLALYLLSDAASMITGENVVIDGGYSIQ

SEQ ID NO: 541 - protein, 391 aa, Glycine max
MASRVSIGNLTSSAPYINSPHFRSPLKISNNPSLQNASHKVLMRDKTVLVTGGAGYIGSHTVLQLLLGGFRAVVLDNLENSSEVAIHRVRELAGEFGNNLSFHKVDLRDRAALDQIFSSTQFDAVIHFAGLKAVGESVQKPLLYYNNNLTGTITLLEVMAAHGCKKLVFSSSATVYGWPKEVPCTEEFPLSAMNPYGRTKLIIEEICRDVHCAEPDCKIILLRYFNPVGAHPSGYIGEDPRGIPNNLMPFVQQVAVGRRPALTVFGNDYNTSDGTGVRDYIHVVDLADGHIAALLKLDEPNIGCEVYNLGTGKGTSVLEMVRAFEMASGKKIPLVMAGRRPGDAEIVYASTKKAERELKWKAKYGIDEMCRDQWNWASKNPYGYGDQGSTD

SEQ ID NO: 542 - protein, 578 aa, Zea mays subsp. mays
MKREYQDAGGSGGDMGSSKDKMMAAAAGAGEQEEEDVDELLAALGYKVRSSDMADVAQKLEQLEMAMGMGGVGGAGATADDGFVSHLATDTVHYNPSDLSSWVESMLSELNAPPAPLPPATPAPRLASTSSTVTSGAAAGAGYFDLPPAVDSSSSTYALKPIPSPVAAPSADPSTDSAREPKRMRTGGGSTSSSSSSSSSMDGGRTRSSVVEAAPPATQASAAANGPAVPVVVDTQEAGIRLVHALLACAEAVQQENFSAAEALVKQIPMLASSQGGAMRKVAAYFGEALARRVYRFRPPPDSSLLDAAFADLLHAHFYESCPYLKFAHFTANQAILEAFAGCRRVHVVDFGIKQGMQWPALLQALALRPGGPPSFRLTGVGPPQPDETDALQQVGWKLAQFAHTIRVDFQYRGLVAATLADLEPFMLQPEGDDTDDEPEVIAVNSVFELHRLLAQPGALEKVLGTVRAVRPRIVTVVEQEANHNSGTFLDRFTESLHYYSTMFDSLEGAGSGQSADASPAAAGGTDQVMSEVYLGRQICNVVACEGAERTERHETLGQWRSRLGGSGFAPVHLGSNA

SEQ ID NO: 543 - protein, 322 aa, Vigna unguiculata
  unsure (1)..(322): unsure at all Xaa locations
MASKKKYIYTIDDDCFVATTPSGQQITALEQHIKNLLCPSTPFFFNTLYDPYREGADFVRGYPFSLREGVPTAVSHGLWLNIPDYDAPTQLVKPLERNTRYVDAVMTIPKGTLFPMCGMNLAFDRDLIGPAMYFGLMGDGQPIGRYDDMWAGWCCKVICDHLGLGIKTGLPYIYHSKASNPFVNLRKEYKGIFWQEDIIPFFQSIVLPKEATTVQKCYIVLAKLVKEKLSKVDPYFGQVGRCHGHLDLKLGMNXNPAGASLANGKKLNQLWANCMTARKLATQINYTVLFCLVCIFNLAVIVLLKFAALLAVTLSVTFGLSF

SEQ ID NO: 544 - protein, 396 aa, Thysanolaena maxima
  unsure (1)..(396): unsure at all Xaa locations
TGYDRVMVYRFHEDEHGEVVAESRRDGLEPYLGLHYPATDIPQASRFLFRQNRVRMIVDCHATAVRVIQDPGLSQPLCLVGSTLRAPHGCHAQYMANMGSIASLVMAVIISSGGDDEQTMRGGISSAMKLWGLVVCHHTSPRFIPFPLRYACEFLMQAFGLQLNMELQLAHQLSEKHILRTQTLLCDMLLRDSPTGIVTQSPSIMDLVKCDGAALYYHGRYYPLGVTPTEFQIKDIIEWLTACHGDSTGLSTDSLADAGYHGAAALGDAVCGMAVAYITPSDYLFWFRSHTAKEIKWGGAKHHPEDKDDGQRMNPRSSFKAFLEVVKSRSLPWENAEMDAIHSLQLILRDSFRDSAEGTSNSKAIVNGQVQLGELELRGINELSSVAREMVRXIET

SEQ ID NO: 545 - protein, 161 aa, Saccharomyces cerevisiae
MSKNRSSLQSGPLNSELLEEQKQEIYEAFSLFDMNNDGFLDYHELKVAMKALGFELPKREILDLIDEYDSEGRHLMKYDDFYIVMGEKILKRDPLDEIKRAFQLFDDDHTGKISIKNLRRVAKELGETLTDEELRAMIEEFDLDGDGEINENEFIAICTDS

SEQ ID NO: 546 - protein, 184 aa, Zea mays
  unsure (1)..(184): unsure at all Xaa locations
MNRKPGDWDCRACQHLNFSRRDICQRCSEPRGVADRGGGGGGGDYASFGGRGGSSFGGGFGAAGSDVRPGDWYCSCGAHNFASRSSCFKCSAYKEEAAVNSGAGGFDGDMSRSRGYGFGSGACWCWCWRCPVXTNRPGWKSGDWXICTRSGCNEHNFASRMECFRCNAPRDSGSAAMTYENYLH

SEQ ID NO: 547 - protein, 232 aa, Zea mays
TSPSSFLLSSLSPHAQWRGLARTAPPPNNNSNTTNAGNAAVDLAARVKPKRTRKSVPRESPSQRSSVYRGVTRHRWTGFFELWYVYNNGGVLLTIVSLHGLHAGAYDDEDAAARAYDLAALKYWGPDTILNFPASAYEAELKEMEGQSREEYIGSLRRKSSGFSRGVSKYRGVARHHHNGRWEARIGRVFGNKYLYLGTYGTQEEAAMAYDMAAIEYRGLNAVTNFDLSRYI

SEQ ID NO: 548 - protein, 236 aa, Heuchera americana
VQLRRMENKINRQVTFSKRRGGLVKKAHEISVLCDVEVALIVFSNKGKLFEYSTDSCMEKILERYERYSYAERRLVATGSESQENWSLEYTKLKAKIELLQRSQRQFMGEDLDLLSLRELQNLEQQLDTALKHIRSRKNQLMNQSISDLQKKEKAIQEQNNLLAKKIKEKEKAMSQQAEWEQQNNGASTSNFLNPQPLPCLNISSTYQGGAQPEAMRRNELDLTLEPIYSCHLGCF

SEQ ID NO: 549 - protein, 372 aa, Hemerocallis hybrid cultivar
STEIFSPVRIRSLAAVRQEEVKLMITGILASTSTDNSVKVNMKVVFSELMFNVIMKIIAGKRYFGVNTDSEVEEGQKFRVVFDEMFSTLEVASPQDFLPFLKWFGFKRMENRLTKLAKELDQLFQKLIEERRSERGKVQSTVIDVLLSLQETDREQYSDKLIKGMILSLIAAGTHTTAGTMEWAMSLLLNHPEALLKVRDEIDKKVGQDRLIDHSDLQNLSYLNNAIKESLRLFPTAPLLLAHESSAECTVGGFTIPSNTILFANAYALHRDPKVWTDPVSFKPERFENNGQQGSRIYVPFGLGRRSCPGEGLATQVVGLALGTLIQCFEWDRNGEEKVDMTDGSGLAMHMEKPLEAMCKPRQSIVDVINRL

SEQ ID NO: 550 - protein, 152 aa, Triticum aestivum; identical to SEQ ID NO: 515

SEQ ID NO: 551 - protein, 151 aa, Zea mays
MWSARFSSGPLPVTMAWTKKPNMENMAADEVERIRAAMGSDIDVSLDCAGFSKTMSTALEATRPGGKVCLVGMGPNEMTLPLTAAAAREVDVVGVFRYKDTWPLCIDFLRSGKVDVKPLITPRFGFSQRDVEEAFEVSARGRDAIKVMFNL

SEQ ID NO: 552 - protein, 103 aa, Glycine max
  unsure (1)..(103): unsure at all Xaa locations
MEFCPTCGNLLRYGQSQFFCSTCPYIARIERQVEIKKKQLLVKKSIDPVVKKDDIPKGPETEAPXPRCXHDKXYFKTMQIRXAXEXQSRFYRCXXXEQTXREE

SEQ ID NO: 553 - protein, 305 aa, Miscanthus condensatus
IESVGEGVTDVAPGDHVLPVFTGECKECAHCRSAESIMCDLLRINTDRGVMIGDGKSRFSINGKPIYHFVGTSTFSEYTVMHVGCVAKINPEAPLDKVCVLSCGISTGLGASINVAKPPKGSTVAIFGLGAVGLAAAEGARIAGASRIIGVDLNPSRFEEARKFGCTEFLNPKDHKKPVQEVLAEMTNGGVDRSVECTGNINAMIQAFECVHDGWGVAVLVGVPHKDAEFKTHPMNLLNERTLKGTFFGNFKPRTDLPNVVELYMKKELEVEKFITHSVPFAEINKAFDLMAKGEGIRCIIRMEN

SEQ ID NO: 554 - protein, 243 aa, Glycine max
MAFPNQSMSSESPQRKMGRGKIEIKRIENTTSRQVTFCKRRNGLLKKAYELSVLCDAEVALIVFSNRGRLYEYANNSVKASIERYKKASSDSSSGGRSASEANAQFYQQEAAKLRVQISNLQNHNRQMMREGLSTMNGKDLKNLETKLEKGISRIRSKSGSRLFAEIEHMKKREIHLNNDNQLLRAKIAAGERSHHNVNGLSGSISYESMQSQFDSRGFFQVTGLQPNNNQYAGQDNMSLQFV

SEQ ID NO: 555 - protein, 169 aa, Leavenworthia crassa
NTDRVRMIHDGESRFSIKGKPIHHFLGTSTFSEYTVVHSGQVAKINPEAPLDKVCIVSCGLSTGLGATLNVAKPKKGQSVAVFGLGAVGLGAAEGARIAGASRIIGVDLNSNRFEQAKKFGVTEFVNPKEHDKPVQQVIAEMTNGGVDRSVECTGSVQAMIQAFECVHD

SEQ ID NO: 556 - protein, 214 aa, Paeonia peregrina
  unsure (1)..(214): unsure at all Xaa locations
IVESVGEGVTDLKPGDHVLPVFTGECKECRHCKSEESNMCDLLRINTDRGVMLNDGKSRFSINGQPIFHFVGTSTFSEYTVVHVGCVAKINPEAPLDKVCVLSCGISTGLGATLNVAKPKKGSSIAIFGLGAVGLAAAEGPRIAXASRIIGVDLNPKRFEEAKKFGVTEFVNPKDYNKPVQEVIAEMTGGGVDRSVECTGSIMAMISAFECVHD

SEQ ID NO: 557 - protein, 517 aa, Candida tropicalis
MIEQILEYWYIVVPVLYIIKQLIAYSKTRVLMKQLGAAPITNQLYDNVFGIVNGWKALQFKKEGRAQEYNDHKFDSSKNPSVGTYVSILFGTKIVVTKDPENIKAILATQFGDFSLGKRHALFKPLLGDGIFTLDGEGWKHSRSMLRPQFAREQVAHVTSLEPHFQLLKKHILKHKGEYFDIQELFFRFTVDSATEFLFGESVHSLKDETIGINQDDIDFAGRKDFAESFNKAQEYLSIRILVQTFYWLINNKEFRDCTKSVHKFTNYYVQKALDATPEELEKQGGYVFLYELVKQTRDPKVLRDQSLNILLAGRDTTAGLLSFAVFELARNPHIWAKLREEIEQQFGLGEDSRVEEITFESLKRCEYLKAFLNETLRVYPSVPRNFRIATKNTTLPRGGGPDGTQPILIQKGEGVSYGINSTHLDPVYYGPDAAEFRPERWFEPSTRKLGWAYLPFNGGPRICLGQQFALTEAGYVLVRLVQEFSHIRSDPDEVYPPKRLTNLTMCLQDGAIVKFD

SEQ ID NO: 558 - protein, 151 aa, Triticum aestivum
IEDGTTLKTFTQLLHRNRKVDFIEQFNEKLLVKQDKENLQIIDVRNSGLIEVNKTEFMTPSAFIFLYENNLFLTFCNRTVAAWNFRGELVTSFDDHELWHPNCNTNNIYITADQDLIISYCKVSGGGTNDADDEGQEGSRMGSINMSNIFT

SEQ ID NO: 559 - protein, 335 aa, Glycine max
  unsure (1)..(335): unsure at all Xaa locations
MSSGATHWCHACRQPVVLDGRDAVCPYCDGGFVQELDELEGIAPHHTFCSQSGEFHQMPDIFDAIPAFMGQRGSDQRSRLMDDAVDNFMRHRTAGRNSNFDVRGRSGSRPVPERSWGVFSSGPYLIFHGQVPGSTFAAGSPRGGSRHVDFGDYFMGLGLEELIEQLTMNDRRGPPPAALSSIDAMPTIKITQAHLRLDSHCPVCKEXFELGTEAREMPCNHIYHSDCIVPWLVQHNSCPVCRVELPPQGQASSRGTQNWGGRNDSNTSSSGSNDSSRGRENSRQNHGRRNPSSFLWPFRSSNSNNNHHSDTGGSSSSXTPDQNNGTSYSGWPFDC

SEQ ID NO: 560 - protein, 307 aa, Zea mays
  unsure (1)..(307): unsure at all Xaa locations
MANAGGGAAGEGEWLKVAQLRALVQAQDEDHRAKEVDNLTLRRFLRARGHNVDKAAAMLLKSLRWRAEAAPAGATVREEQVRGELEQDKIYMGGVDRTGRPXSIVGLLAKHYSANRDMAEFKSTSTTWPLLSSSIKMRVYCTYVRRFSFLFLGRXARACVCALSLSCSCCAGFVVYFFDKICARIPRGQEKFLAIMDLKGWGYANCDVRAYIAAIEIMQNYYPERLGKALMINVPYIFLKVWKTMIYPFIDANTRDKFVFVDDKSLRETLRREIDESQLPEFLGGKMPLVSLKDYAQQPQPVSSESS

SEQ ID NO: 561 - protein, 226 aa, Triticum aestivum
MEKAMDAGRQSEVTCVDFWCNEFGMRVRIALRELGVPFEYIEEDLRVRERSELVRRMNPVHRSIPILIHHGRPVCGSVNIVEYIDEVWGEEARLLPGDPADRADARFWADFIDHKVFSTQTKFFTSKGEEKEAAKEELVEHLKRLEEVLGDKCFFSGDDFGFLDVVFIPFSSMFYGYEQHGGIDLEAECPKLTRWEKRCRERESVSEVLPDGKVQYELHKKFYGIE

SEQ ID NO: 562 - protein, 349 aa, Phytophthora infestans
MAASTHNMKYRFLGNTGLLVSRLSFGSWVTFDNQLDFEKAYSIMEHAYKNGVNFFDNAEVYANGQSELIMGKVVKAGIERKVWEREDLVISTKLFFGTKSGPNDVGNSRKHIVEGMKASLKRFDLDYVDLVFCHRPDPATPIEETVRAMNFIIEQGWAFYWGTSEWCAKDIIEACEIADRLGLIRPVYDQPQYHILERSRVEYDFDVLYKKYNYGLTTWSPLASGILTGKYSKGIPEGSRLSMPSYKQMLSNGLEEKVAKADKLAEVAKEVGCSLAQLSIAWVAANPHVSTVILGATSIKQLDENLKAMEFVDKITPEVREKIDAIADFKAKLVPQAEPHVINLRQKWL

SEQ ID NO: 563 - protein, 375 aa, Glycine max
MKKHIHIALFLLLVSPLIPIAVAQAQSQPNDFSDANLNQFSPSIAIIIVILVAALFLMAFFSIYVRHCADSPSTTVSPLTTARSRRAARGLDPAVIQTFPILEYSEVKIHKIGKEALECAVCLCEFEDTETLRLIPKCDHVFHPECIDEWLGSHTTCPVCRANLVPTDSEDAIANGNANGVVPVPETFTRDIEAQNDAVQAAPEQQNAEADPVLPEPEVVSLDKTLNRNRTRGSRSNRPRRFPRSHSTGHSLVQPGENTDRFTLRLPLEVRKQLINRQLQRASSLIVLPREGSLRQGYRTGGEGSSRGKISRRLDRSLKSDRWIFSMAAPFFARALSIRSPRVRNNDVEGTASSSSSSTAPILPPTAVDSARPLV

SEQ ID NO: 564 - protein, 633 aa, Saccharomyces cerevisiae
MSSNNNTNTAPANANSSHHHHHHHHHHHHHGHGGSNSTLNNPKSSLADGAHIGNYQIVKTLGEGSFGKVKLAYHTTTGQKVALKIINKKVLAKSDMQGRIEREISYLRLLRHPHIIKLYDVIKSKDEIIMVIEYAGNELFDYIVQRDKMSEQEARRFFQQIISAVEYCHRHKIVHRDLKPENLLLDEHLNVKIADFGLSNIMTDGNFLKTSCGSPNYAAPEVISGKLYAGPEVDVWSCGVILYVMLCRRLPFDDESIPVLFKNISNGVYTLPKFLSPGAAGLIKRMLIVNPLNRISIHEIMQDDWFKVDLPEYLLPPDLKPHPEEENENNDSKKDGSSPDNDEIDDNLVNILSSTMGYEKDEIYESLESSEDTPAFNEIRDAYMLIKENKSLIKDMKANKSVSDELDTFLSQSPPTFQQQSKSHQKSQVDHETAKQHARRMASAITQQRTYHQSPFMDQYKEEDSTVSILPTSLPQIHRANMLAQGSPAASKISPLVTKKSKTRWHFGIRSRSYPLDVMGEIYIALKNLGAEWAKPSEEDLWTIKLRWKYDIGNKTNTNEKIPDLMKMVIQLFQIETNNYLVDFKFDGWESSYGDDTTVSNISEDEMSTFSAYPFLHLTTKLIMELAVNSQSN

SEQ ID NO: 565 - protein, 250 aa, Brassica oleracea
MTKNYPAVSEEYQKAIEKCKRKLRGLIAEKNCAPIMVRLAWHSAGTFDCASRTGGPFGTMRFDDELAHGANNGLHIALRLLEPIREQFPTISHADFHQLAGVVAVEVTGGPEIPFHPGREDKPQPPPEGRLPDATKGCDHLRQVFLKQMGLTDQDIVALSGAHTLGRCHKDRSGFEGAWTSNPLIFDNSYFKELLSGEKEGLFQLPSDKALLDDPVFRPLVEKYAADEEAFFTDYAEAHLKLSELGFADA

SEQ ID NO: 566 - protein, 694 aa, Saccharomyces cerevisiae
MSEQHSVAVGKAANEHETAPRRNVRVKKRPLIRPLNSSASTLYEFALECFNKGGKRDGMAWRDVIEIHETKKTIVRKVDGKDKSIEKTWLYYEMSPYKMMTYQELIWVMHDMGRGLAKIGIKPNGEHKFHIFASTSHKWMKIFLGCISQGIPVVTAYDTLGESGLIHSMVETESAAIFTDNQLLAKMIVPLQSAKDIKFLIHNEPIDPNDRRQNGKLYKAAKDAINKIREVRPDIKIYSFEEVVKIGKKSKDEVKLHPPEPKDLACIMYTSGSISAPKGVVLTHYNIVSGIAGVGHNVFGWIGSTDRVLSFLPLAHIFELVFEFEAFYWNGILGYGSVKTLTNTSTRNCKGDLVEFKPTIMIGVAAVWETVRKAILEKISDLTPVLQKIFWSAYSMKEKSVPCTGFLSRMVFKKVRQATGGHLKYIMNGGSAISIDAQKFFSIVLCPMIIGYGLTETVANACVLEPDHFEYGIVGDLVGSVTAKLVDVKDLGYYAKNNQGELLLKGAPVCSEYYKNPIETAVSFTYDGWFRTGDIVEWTPKGQLKIIDRRKNLVKTLNGEYIALEKLESVYRSNSYVKNICVYADESRVKPVGIVVPNPGPLSKFAVKLRIMKKGEDIENYIHDKALRNAVFKEMIATAKSQGLVGIELLCGIVFFDEEWTPENGFVTSAQKLKRREILAAVKSEVERVYKENS

SEQ ID NO: 567 - protein, 433 aa, Zea mays
CCSSPPISPHTYTSMLALLSLCPPFVILLWYTMVHADGSVVRTYEHLRDHGVLEGLKAIWPMPTLVAWKIIFGFGLFEAVLQLLLPGKRFEGPISPAGNVPVYKANGLQAYAVTLITYLGLWWFGIFNPAIVYDHLGEIYSALVFGSFVFCIFLYIKGHVFPSSSDSGSSGNVIIDFYWGMELYPRIGKYFDIKVFTNCRFGMMSWAVLAVTYCIKQYEMNGRVADSMLVNTALMLIYITKFFWWESGYWCTMDIAHDRAGFYICWGCLVWVPSIYTSPGMYLVNHPLNLGPQLALSILLAGMLCIYINYDCDRQRQEFRRTNGKCSVWGKAPSKIVASYQTTKGETKTSLLLTSGWWGLSRHFHYAPEILSAFFWTVPALFNHFLPYFYVIFLTILLFDRAKRDDDRCSSKYGKYWKIYCNKVPYRVIPGIY

SEQ ID NO: 568 - protein, 751 aa, Geobacillus stearothermophilus
MENQNRQNAAQCPFHGSVTNQSSNRTTNKDWWPNQLNLSILHQHDRKTNPHDEEFNYAEEFQKLDYWALKEDLRKLMTESQDWWPADYGHYGPLFIRMAWHSAGTYRTGDGRGGASTGTQRFAPLNSWPNNANLDKARRLLWPIKKKYGNKISWADLFILAGNVAIESMGGKTIGFGGGRVDVWHPEEDVYWGSEKEWLASERYSGDRELENPLAAVQMGLTYVNPEGPDGKPDPKAAARDIRETFRRMGMNDEETVALIAGGHTFGKAHGAGPATHVGPEPEAAPIEAQGLGWISSYGKGKGSDTITSGIEGAWTPTPTQWDTSYFDMLFGYDWWLTKSPAGAWQWMAVDPDEKDLAPDAEDPSKKVPTMMMTTDLALRFDPEYEKIARRFHQNPEEFAEAFARAWFKLTHRDMGPKTRYLGPEVPKEDFIWQDPIPEVDYELTEAEIEEIKAKILNSGLTVSELVKTAWASASTFRNSDKRGGANGARIRLAPQKDWEVNEPERLAKVLSVYEDIQRELPKKVSIADLIVLGGSAAVEKAARDAGFDVKVPFFPGRGDATQEQTDVESFAVLEPFADGFRNYQKQEYSVPPEELLVDKAQLLGLTAPEMTVLVGGLRVLGANYRDLPHGVFTDRIGVLTNDFFVNLLDMNYEWVPTDSGIYEIRDRKTGEVRWTATRVDLIFGSNSILRSYAEFYAQDDNQEKFVRDFINAWVKVMNADRFDLVKKARESVTALQTGDSDRSMKKTILQ

SEQ ID NO: 569 - protein, 139 aa, Triticum aestivum
RHEANSILSGVLKVTGFVTSTVLNSKPAQKFFKLMPGEVILASLDGFGKVWDAVEVSGKNVMQTSSVVTTSVVTHRYGEQAGEATHNYLHATGNALGAAWAVFKIRKALDPKGNLKKSSFVSQAAHPVAKESIARQKKK

SEQ ID NO: 570 - protein, 423 aa, Mesorhizobium sp. HN14A16
WGFDGSSTQQAEGHSSDCVLKPVAVYPDPARTNGVLVMCEVMMPDGVTPHASNKRATILDDEGAWFGFEQEYFFYKDGRPLGFPESGYPAPQGPYYTGVGYSNVGSVARQIVEEHLDLCLAAGINHEGINAEVAKGQWEFQIFGKGSKKAADQMWMARYLMQRLTEKYGIDIEYHCKPLGDTDWNGSGMHANFSTAYMREVGGKAYFEALMAAFDKNLMDHIAVYGPDNDKRLTGKHETAPWNRFSYGIADRGASIRVPHSFVKNDYKGYLEDRRPLGANEQVVEIETVPTGSLGLDIALGVGGLPRGRIIEIYGPESSGKTTLALHTVAEAQKKGGICAFVDAEHALDPVYARKLGVDLENLLISQPDTGEQALEICDTLVRSGAIDVLVVDSVAALTPRAEIEGEMGDSLPGLQARLMSQA

SEQ ID NO: 571 - protein, 176 aa, Bacillus cereus ATCC 14579
MYTKRLMLRKMNMSDSLHIYEYATDKEMTTFTVWDAHRSLCDTYNYVEEIVGQYNEGQVAPLGIVLKEEKKLIGTCGFIKYDLVTHTAEIAYALSRKYWGRGLATEAALAFFYYGFHELHLNSIEAGCDSENEASEKLMKRLNMEYKYTIQKDMFIKGKNRDTKRYCISREGYMNQ

SEQ ID NO: 572 - protein, 174 aa, Mycobacterium tuberculosis H37Rv
MPLFSFEGRSPRIDPTAFVAPTATLIGDVTIEAGASVWFNAVLRGDYAPVVVREGANVQDGAVLHAPPGIPVDIGPGATVAHLCVIHGVHVGSEALIANHATVLDGAVIGARCMIAAGALVVAGTQIPAGMLVTGAPAKVKGPIEGTGAEMWVNVNPQAYRDLAARHLAGLEPM

SEQ ID NO: 573 - protein, 283 aa, Streptococcus mutans UA159
MSKIQWFPGHMSKARRQVQENLKFVDFVTILVDARLPLSSQNPMLTKIIGDKPKLIILNKVDLADSTCTAEWCNFFEKQGIKALAVNSKEQSAVKKVTEAAKGLMTDKLVKLRERGIQKENLRTMIVGIPNVGKSTLMNRLAGKKIAIVGNKPGVTKGQQWLKSNKNLEILDTPGILWPKFEEEAVGLKLAMTGAIKDNLLPMDEITIFGLDFFKRYYPERLLERYKGIDLEEEAPEIIMSMTQKLGFRDDYDRFYQVFIKDVRDGRLGCYTLDRLAELDGND

SEQ ID NO: 574 - protein, 437 aa, Brassica rapa
TFSFLLVFVVMILFHPALSIYINTLSSTESLKISSNRTLVSPGSIFELGFFRTNSRWYLGIWYKKLPYRTYVWVANRDNPLSNSTGTLKISGNNLVILGHSNKSVWSANLTRGSERSTVVAELLANGNFVMRDSNKNDAILWQSFDFPTDTLLPEMKLGYDLKTGLNRFLTSWRSSDDPSSGNFSYKLENQRLPEFYLSSHGIFRLHRSGPWNGIGFSGIPEDEKLSYMVYNFTENSEEVAYTFRMTNNSIYSRLTLSSKGDFQRLTWDPSLEIWNMFWSSPVDPQCDSYIMCGAYAYCDVNTSPVCNCIQGFNPRNIQRWDQRVWAGGCVRRTQLSCNGDGFTRMKNMKLPETTMAIVDRSVGVKECEKRCLSDCNCTAFANADIRNGGTGCVIWTGQLDDMRNYAIGATDGQDLYVRLATADIAEKRNANGEIIS

SEQ ID NO: 575 - protein, 371 aa, Agrobacterium tumefaciens str. C58 (Cereon)
MECCRFSRTAAILDANRNWREETRMRGVVIHAAKDLRVEDVAGQPLAADEVRVAVAVGGICGSDLHYYNHGGFGTVRVREPMALGHEFAGTVVEVGSSVSHLVPGMRVAVNPSLPCGTCRYCAQGRQNQCLDMRFMGSAMRSPHVQGGFREVVTVHSTQPVQIADGLSMGEAAMAEPLAVCLHAARQAGSLLGKTVLITGAGPIGMLSLLVARLAGAAHIVVTDVADAPLDLARRIGADEAVNILRDADMLEKYRFEKGVFDVLFEASGNQAALLPALDLLRPGGIIVQLGLGGDFTIPMNLIVAKELQLRGTFRFHEEFAQAVNMMGRGLIDVKPLISATLPFDQAREAFDLAGDRAKSMKVQLAFSGAA

SEQ ID NO: 576 - protein, 426 aa, Rhodopseudomonas palustris
MPRRARHRIRRDRACDRSCLCVGPAILHRDHDRSGRRASGHRRGARHDQRREARDHDPLLREHPDPSAGVNGSHQRGGDQMKAAVFEKTGERLVVRDVAAPALGDNELLLKVAFTGICGSDLHAAETPGMLQSGTVMGHEFTGEIVQSTASDWPVGARVAANPYWLCDACAAGGSCSGGGDAACANGSFMGFRPDLPGAYADYVRIRAGQAIRLPDKVSLRDGALMEPLAVARHAVDVCGPMQGADVLVIGGGPIGLGVVLMARDAGAARVVVSEPDPNRRACALEVGAVAAIDPIAEDLPTALGRLGIGAPGIVFECVGAPGFLQQTIDVMALRGRAVIVGVCMTEDRVLPRAAIRKEATLKFVLGYTMADFHHVSRYLEEHAATAAAMISRVVSLSELPEIFDRLRAEKSLIKVLVRPDQGSGT

SEQ ID NO: 577 - protein, 469 aa, Pseudomonas syringae pv. tomato str. DC3000
MSETTAPSGELKRGLKNRHIQLIALGGAIGTGLFLGSAGVLKSAGPSMILGYAICGFIAFMIMRQLGEMIVEEPVAGSFSHFAHNYWGGFAGFLSGWNCWLLYILVGMSELTAVGKYIHYWLPHIPSWVSAAVFFVLINAINLTNVKVFGETEFWFAIIKVVAIIGMIALGSYMLVSGSGGPQASVSNLWEHGGFFPNGVSGLVMALAIIMFSFGGLEMLGFTAAEAEQPKTVIPKAINQVIYRILIFYIGALVVLLSLTPWDSLLASLNASGDSYSGSPFVQVFSMLGSDAAAHILNFVVLTAALSVYNSGTYCNSRMLVGMAEQGDAPKLLAQVDKRGVPVKAIFASAAVTLVAVLLNYFVPQQALELLMSLVVATLVINWAMISYSHLKFRQHMNRTGQVPLFKALWYPYGNYVCLAFVVFILGIMLMIPGIQISVYAIPVWLAVMWVCYRAKNRRSVVVNAETGK

SEQ ID NO: 578 - protein, 343 aa, Acinetobacter calcoaceticus
  unsure (1)..(343): unsure at all Xaa locations
MKILITGGAGFIGSAVIRHIIQNTENEVLNVDKLTYAGNLESLLSVASNSRYKFSQTDICDRSALDQLFSSFQPDAIMHLAAESHVDRSITGPYAFIETNIIGTYQMLEASRCYWLSLDEEKKAAFRFHHISTDEVYGDLEGTTDLFTETTSYSPSSPYSASKASSDHLVRAWNRTYGLPVLITNCSNNYGPYHLPEKLIPMMILNALQGKSLPVYGNGQQIRDWLFVEDHARALFTVVTQGAVGXTYNIGGHNEKANLDVVHAICELLEEFAPNKPEGIATYKDLITYVKDRPGHDVRYAIDATKIKKELNWVPQESFETGLRKTVEWYLSNTEWVEHVXKW

SEQ ID NO: 579 - protein, 396 aa, Danthonia spicata
  unsure (1)..(396): unsure at all Xaa locations
TGYDRVMVYKFHEDEHGEVVAESRRPDLEPYLGLHYPATDIPQASRFLFQQNRVRMIHDCHATAVRVIQDPGLQQALCLVGSTLRAPHGCHAQYMANMGSIASLVMAVIISSGSDDEQMARGGXSSAMKLWGLVVCHHTSPRFIPFPLRYACEFLMQAFGLQLNMELQLAHQMSEKHILRXQTLLCDMLLRDSPTGIVTQSPSIMDLVKCDGAALYYHGKYYPLGVTPTESQIKDIIEWLTVCHGDSTGLSTDSLADAGYLGAAALGDAVCGMAVAYITPSDYLFWFRSHTAKEIKWGGAKHHPDDKDDGLRMHPRSSFKAFLEVVKSRSLPWENAEMDAIHSLQLILRDSFRXAAEGTSNSKAIVBGQVQLGELELRGINELSSVAREMVRLIET

SEQ ID NO: 580 - protein, 248 aa, Neisseria meningitidis Z2491
MSTQDLSGKIALVTGASRGIGAAIADTLAAAGAKVIGTATSESGAAAISERLAQWGGEGRALDSAEPETIESLIADIEKAFGKLDILVNNAGITRDNLLMRMKEEEWDDIMQVNLKSVFRASKAVLRGMMKQRSGRIINITSVVGVMGNAGQTNYAAAKAGLIGFAKSMAREVGSRGITVNCVAPGFIDTDMTRALPEETRQAFTAQTALGRFGDAQDIADAVLFLASDQAKYITGQTLHVNGGMLMP

SEQ ID NO: 581 - protein, 190 aa, Guillardia theta
MSSVKMHKTIASKLLNCGKRKIWIDPNETKNILFTDSRNSIRKLIRDGFILKKKDKNHSRNRIRSRKEEIKLGRHEGLGKRKGSKNSRYSIKLIWIIRIRVMRNLLKRLRNSSKLNRHLYRSLYLKSKGNVFKNKKILTEFIHKAKNEQKRKEEFLDKFKLMREKKKINIEKKKSNFNSRMSEIVSDILV

SEQ ID NO: 582 - protein, 488 aa, Bacillus anthracis str. A2012
MNSATNQTTSQTETTKGKGELRRGLKSKHLTMISLGGTIGTGLFLASGGVIHSAGPGGALIAYAAIGIMVYFLMTSLAELAAYMPVTGSFSTYATKFVDPSLGFALGWNYWYNWAITIAAELAAVTLIMKFWFPDTPSLIWSGLCLAIIFLLNYLSVKGFGESEYWFALIKVATIIIFLIVGFMMIFGIMGGETVGFKNFTVADAPFNGGIMAIIGVFMAAGFSFQGTELLGVAAGETSDPERNIPKAIRSIFWRILLFYILAILVIGLLIPYTTESLAASDVTVSPFTLIFEKAGVAFAASVMNAVILTAVLSAGNSGMYASTRMLWDLARQGKAPKFLGKLDSRGVPVNALIVTSIVGSIAFIASLFGDGVVYIWLLNASGMSGFIAWVGIAISHYRFRKAYIAQGKDLNDLPYRAKWFPFGPIFAFALCVIVILGQNYGAFMGESIDWNGVLVSYIGLPLFLVLWLGYKFTKKTKVIPLDKCELK

SEQ ID NO: 583 - protein, 138 aa, Zea mays
MSILWEKSAGWRWLVRRTRDSKPFFFTFAALCGVVPGVIGYGVMQLTGSRNEQLEAHLRSTARPETTMMGQVNRERLAEFLGELQRKEDTNDRYVAALRGETLTRKRYERIQPVPAANAQASQETAGASAEEERPKAK

SEQ ID NO: 584 - protein, 149 aa, Glomerella cingulata
MADSLTEEQVSEFKEAFSLFDKDGDGQITTKELGTVMRSLGQNPSESELQDMINEVDADNNGTIDFPEFLTMMARKMKDTDSEEEIREAFKVFDRDNNGFISAAELRHVMTSIGEKLTDDEVDEMIREADQDGDGRIDYNEFVQLMMQK

SEQ ID NO: 585 - protein, 467 aa, Escherichia coli
MQTTQQNAPLKRTMKTRHLIMLSLGGVIGTGLFFNTGYIISTTGAAGTLLAYLIGALVVWLVMQCLGELSVAMPETGAFHVYAARYLGPATGYTVAWLYWLTWTVALGSSFTAAGFCMQYWFPQVPVWVWCVVFCAIIFGLNVISTRFFAEGEFWFSLVKVVTIIAFIILGGAAIFGFIPMQDGSPAPGLSNITAEGWFPHGGLPILMTMVAVNFAFSGTELIGIAAGETENPRKVIPVAIRTTIARLIIFFIGTVFVLAALIPMQQVGVEKSPFVLVFEKVGIPYAADIFNFVILTAILSAANSGLYASGRMLWSLSNERTLPACFARVTKNGVPLTALSVSMLGGVLALFSSVVAPDTVFVALSAISGFAVVAVWLSICASHFVFRRRHLQQGKALSELHYRAPWYPLVPVLGFVLCLVACVGLAFDPAQRIALWCGLPFVALCYGAYFLTQPRNAKQEPEHVAE

SEQ ID NO: 586 - protein, 176 aa, Caulobacter crescentus CB15
MTVYSLGATTPTLPAQGEYWIAPSASVMGNVILKKNASIWWGAVARGDNDPITIGENSNVQDGSVLHTDLGAPLTIGANVTIGHMVMLHGCTIGDGSLIGIGSIVLNGAKIGKNCLIGAGALITEGKEIPDNSMVMGAPGKVVREIGEQHAMILQASALHYVENWKRYVRDLKIVE

SEQ ID NO: 587 - protein, 278 aa, Oryza sativa
  unsure (1)..(278): unsure at all Xaa locations
MSPPPPPPPPRVVICVGDVHGYISKLESLWANLQSALPPDAFATALVVFLGDYCDRGPSTRXRVIDFLLALPSRHPAQRHAFLCGNHDLAFAAFVGALPPPPDGTPFSSTWGEYIQNEENEGWYRGPGHEGMHCQGRRWGGIMKEKRNPKRGSSYMGSIYDARPTFESYGVAHGSPDLVKAVPEEHKKFLRELVWIHEEENVPIDTNEGQIICKLIAVHAGLERSIDLNEQFKNLRTKDTKISKGAMLSGRQDVWNIPKVSKSKRSTYPAEHFGLXYX

SEQ ID NO: 588 - protein, 452 aa, Medicago sativa subsp. falcata
MKEVAPGTQDQKQPLRANSKRALSDVTYLPHKKRAILQDVTNNCGENTKRSCLNPTEIQAKKRKVAKPAQPNVSNEVPSAAELPPFIADSKPVSSMEMRLRSSEDFRCLDDLEDNAPFRMSSNQCGTNNNLLQSQTSRISARPSSSQKKASQIVAAKKANISELLDVSKHPDVADIDADFEDPQLCSHYAADIYDHLRVAELSRRPYPNFMETVQQDITPSMRAILVDWLVEVSEGYKLQANTLYLAVYLIDWFLSKNCIEKERLQLLGITCMLIASKYEEINAPRIEDFCFITDNTYTKEEVVKLESLVLKSSSYQLFAPTTKTFLRRFLRAAQASYKRPSIELEYLTNYLAELTLLNYGFLNFLPSMIAASAVFLARWTLDQSSHPWNPTLEHYASYKASDLKATVLALQDLQLNSNDDCPLTAIRKKYTQDKLNCVAALSSPKLLETLF

SEQ ID NO: 589 - protein, 315 aa, Oryza sativa
  unsure (1)..(315): unsure at all Xaa locations
PGPHVPAPAAAAAVHSAPTPTIXXGELSTMATAATASATAATRFTRLAGVGLRRTARLPTAVRFQRRVLATTALLRTAELRPKEQGLPETLDYRVFLVDGGGRKVSPWHDVPLRAGDGVFHFVVEIPKESSAKMEVATDESFTPIKQDTKKGNLRYYPYNINWNYGLFPQTWEDPTLANTDVEGAFGDNDPVDVVEIGERRANIGDVLKVKPLAALAMIDEGELDWKIVAISLDDPKASLVNDVDDVEKHFPGTLTAIRDWFRDYKIPDGKPANRFGLGNKPTSKEYALKVIEETNESWEKLVKRNIPAGELSLA

SEQ ID NO: 590 - protein, 104 aa, Pseudomonas aeruginosa UCBPP-PA14
  unsure (1)..(104): unsure at all Xaa locations
MHGNTIVAPCGNKTRLVRSIAEEVAAFRLAVSGSGGVAAGLHXETTPDDVTECVADSSGLHQVSRHYTSLCDPRLNPWQALSAVMAWAGAEAIPSATFPLETVA

SEQ ID NO: 591 - protein, 178 aa, Halobacterium sp. NRC-1
MPGRPFISGERVDLCPVSEDDVDFLHDTINDPAVWPPVGARTPVTEREEREWYEEQASADNGTVNFVVAVDGAPIGSLGVHGVDDTNGSAELGVFLAEDHWGEGYGTEAGRLATTYAFDQHRRHRVFARVFEDNQASMRVWERLGFEREGTHRDAMFLHGEYLDVHCYGVLESEWRDQ

SEQ ID NO: 592 - protein, 201 aa, Triticum aestivum
MSIAPESEFVIPNQSTINLGVQLKEKDDLQLVEIPVPKPEKDHVQVQLKCVGICGSDIHLWKYGEIGIFPVTQPQLLGHEGAGIVTAVGENVTSLRVGDRVAIEAGIPCSFCDQCMSGRYHLCPDVIFKSTPPYDGILAKYITHPARWLHKIPASISFEEGALLEPLSVAIAAVDRVRAKFGKSLLITGCGPVGLLILAGA

SEQ ID NO: 593 - protein, 505 aa, Neisseria meningitidis MC58
MAIQWFPGHMNKAKKAIAERAKSVDMVIEMLDARMPASSENPLLAQLSKGKPKLKILNKQDLADPERTKIWLEHYNSRPDTCAIALDSSETGAHGKITQACRAMIPHRQGIDKPLRVLICGIPNVGKSTLINGMIGKKSAKTGNEPGITKAEQRLFLADDFWLYDTPGMLWPKIIVEEGGYNLAAGGAVGRNALDEEEVALELLDYLRRHYLPMLQERYQADKDPSSHWDENVWLEWIAKKRGAVLSGGRINYQKAAENILTDFREGKIGRITLETPNQWETWLKKARQKEAELKAIREARKAERKGQKLRKHKECRLKNIFQAASLYSNRFQTAYPNPCRFSTDTRMTDKISPDALIEAALLTQTEPLTEKSMRELCVPPLSQDKLIDVLAQLKTRWQDRALQLVHTQEGWRFQIVQTAFERLGSLQEQRAPRYSRAVMETLAIIAYQQPVTRGDIEGIRGVAVSQNVMQTCRIGGGLKSSDIGTHWENPHCGRQRQRSSAIWV

SEQ ID NO: 594 - protein, 195 aa, Yersinia pestis KIM
MKLSTLLLPVILYSSATLAANMAGMNDKASMNDKASMNGKASMTVKINESLPQGNGKALGTVTVTETAYGLLFTPHLTGLAPGIHGFHLHEKPSCAPGMKDGKAVPALAAGGHLDPNKTGVHLGPYNDKGHLGDLPGLVVNADGTATYPVLAPRLKSLSEVKQHALMIHAGGDNYSDHPMPLGGGGARMACGVIE

SEQ ID NO: 595 - protein, 57 aa, Glycine max
  unsure (1)..(57): unsure at all Xaa locations
DVTELTRDDRRKEDSKNDLLYPYGHEELAVCXDVDQDRAVIDKYSYYHSIYAKLSYG

SEQ ID NO: 596 - protein, 111 aa, Zea mays
  unsure (1)..(111): unsure at all Xaa locations
ISFNHLLYSTKKIDSGGQFYDKLLVNQQNENYLIFDDRSHNLKDNCVYNTMTPSGRIXQDEINLLTAFTIITKSAWIFTSKLVTSFEDHSLWHNYCCTTDSYIMSDQYLSI

SEQ ID NO: 597 - protein, 188 aa, Zea mays
MNRKPGDWDCRACQHLNFSRRDICQRCSEPRGVADRGGGGGGGGDYASFGGRGGSSFGGGFGAAGSDVRPGDWYCSCGAHNFASRSSCFKCSAYKEEAAVNSGAGGFDSDMSRSRGYGFGSGAAGAGAGAARTTNRPGWKSGDWICTRCVLLNLNPFHLSDYMFHGRAAWVFTVSMNPCACFVVVHKV

SEQ ID NO: 598 - protein, 751 aa, Geobacillus stearothermophilus
MENQNRQNAAQCPFHGSVTNQSSNRTTNKDWWPNQLNLSILHQHDRKTNPHDEEFNYAEEFQKLDYWALKEDLRKLMTESQDWWPADYGHYGPLFIRMAWHSAGTYRTGDGRGGASTGTQRFAPLNSWPNNANLDKARRLLWPIKKKYGNKISWADLFILAGNVAIESMGGKTIGFGGGRVDVWHPEEDVYWGSEKEWLASERYSGDRELENPLAAVQMGLTYVNPEGPDGKPDPKAAARDIRETFRRMGMNDEETVALIAGGHTFGKAHGAGPATHVGPEPEAAPIEAQGLGWISSYGKGKGSDTITSGIEGAWTPTPTQWDTSYFDMLFGYDWWLTKSPAGAWQWMAVDPDEKDLAPDAEDPSKKVPTMMMTTDLALRFDPEYEKIARRFHQNPEEFAEAFARAWFKLTHRDMGPKTRYLGPEVPKEDFIWQDPIPEVDYELTEAEIEEIKAKILNSGLTVSELVKTAWASASTFRNSDKRGGANGARIRLAPQKDWEVNEPERLAKVLSVYEDIQRELPKKVSIADLIVLGGSAAVEKAARDAGFDVKVPFFPGRGDATQEQTDVESFAVLEPFADGFRNYQKQEYSVPPEELLVDKAQLLGLTAPEMTVLVGGLRVLGANYRDLPHGVFTDRIGVLTNDFFVNLLDMNYEWVPTDSGIYEIRDRKTGEVRWTATRVDLIFGSNSILRSYAEFYAQDDNQEKFVRDFINAWVKVMNADRFDLVKKARESVTALQIIYDDRSEKTVDLQ

SEQ ID NO: 599 - protein, 138 aa, Triticum aestivum
  unsure (1)..(138): unsure at all Xaa locations
LLSGRNLDDYVQVKHILVEMGVYFQSQDDYLDCFGDPEVMGKVGTDIEDFKCSWLFVQALVRVDERQKDILFENYGKSDPACVAKVKALYKELNLERVFSEYESETYXKLISDIEAQPNEAVQAVLKSFLHKIYRRRK

SEQ ID NO: 600 - protein, 338 aa, Agrobacterium tumefaciens str. C58 (Cereon)
MTMHAIQFVEKGRAVLAELPVADLPPGHALVRVKASGLCHTDIDVLHARYGDGAFPVIPGHEYAGEVAAVASDVTVFKAGDRVVVDPNLPCGTCASCRKGLTNLCSTLKAYGVSHNGGFAEFSVVRADHLHGIGSMPYHVAALAEPLACVVNGMQSAGIGESGVVPENALVFGAGPIGLLLALSLKSRGIATVTMADINESRLAFAQDLGLQTAVSGSEALSRQRKEFDFVADATGIAPVAEAMIPLVADGGTALFFGVCAPDARISVAPFEIFRRQLKLVGSHSLNRNIPQALAILETDGEVMARLVSHRLPLSEMLPFFTKKPSDPATMKVQFAAE

SEQ ID NO: 601 - protein, 206 aa, Zea mays
  unsure (1)..(206): unsure at all Xaa locations
MYGWEMLSFNIHDGFLEAIVRGNRSGLLTAADYNNLCQCETLDDIKMHLTATEYGPYLQNEPSPLHTTTIVEKCTLKLVDEYKHMLCQATEPLSTFLQYITYGHMIDNVVLIVTGTLHERDVNELLEKCHPLGMFDSIASLAVAQNMRELYRLVLVDTPLAPYFSECITSEDLDDMNIEIMRNTXYQAYLEDFYQFCQKXLGGATA

SEQ ID NO: 602 - protein, 269 aa, Oryza sativa (japonica cultivar-group)
NNVVGHLLHSFILVPYHGWRFSHRTHHQNHGHIERDESWHPITEKLYWQLETRTKKLRFTLPFTLLAFPWYRSPGKTGSHFLPSSDLFSPKEKSDVIVSTTCWCIMISLLVALACVFGPVPVLMLYGVPYLVFVMWLDLVTYLHHHGHNDLPWYRGEEWSYLRGGLTTVDRDYGWINNIHHDIGTHVIHHLFPQIPHYHLVEATKAARPVLGRYYREPEKSGPLPLHLFGVLLRTLRVDHFVSDVGDVVYYQTDHSLNGTDWAEDAKHK

SEQ ID NO: 603 - protein, 245 aa, Mesorhizobium loti
MFELTGRKALVTGASGGIGEAIARVLHAQGAIVGLHGTRIEKLEALAAELGDRVKLFPANLSNRDEVKALGQKAEADLEGVDILVNNAGITKDGLFVRMSDADWDSVIEVNLTAVFRLTRELTHPMMRRRHGRIINITSVVGVTGNPGQTNYCASKAGMIGFSKSLAQEIATRNITVNCVAPGFIESAMTDKLNDKQKEAIMAAIPTRRMGTGAEVASAVAYLASNEAAYVTGQTVHVNGGMAMI

SEQ ID NO: 604 - protein, 458 aa, Staphylococcus epidermidis ATCC 12228
MAKQLQRELNNRHIQLIAIGGAIGTGLFLGSGQTISLTGPSLLFTYMLIGIVLFAFMRALGELLLSNSKFNSFVDIANEYLGPFGGFVIGWTYWVCWIVSSMSDLTAMGQYFAYWYPQVPHWLTVLFIVLLLISFNLLGARLFGELEFWFSIIKVVTIITMVIVGLVLIFLSFKTEYGHASFGNLIHHGGMFPHGAAGFLMSFQIAVYSFIGIELIGVTAGETKNPEKTIPKAINNVPIRILLFYIGGLLVIMSVIPWFKVDPDSSPFVKLFTLIGVPFAAGIVNFVVLTAAASATNSGIYSNSRILFGLAKQGLGPKVLTKTNSNGVPYLSMLVSSITLLIAALLNFIFPDAIKLFIYVTTLSTVLFLVVWGMIIVSYIAYVKKNPEQHQSSAFKLWGGKIIAYIVLSFFIFIFILLFFSKDTRVAIFISPLWFIFLFFYYKKYKNNAESLADRQRH

SEQ ID NO: 605 - protein, 305 aa, Glycine max
MSTPALSGGTGLFSGFTRLCKGLAVVLVCGHIAVQFFPSAVNYLALIPARTIPFAWNLITAGYVEQSIYGVVVSTLSLLFIGKLLEPIWGSREFFKFIFVGNLLTSVCLFITAIALYYITRLETYLYMPLSGFHGVVSGFLVGVKQIIPDQELPFIKIKTKWLPSITVLLSIAISFWTLEATAYLPTIISGTYISWIYLRYWQRKPETKHRGDLSEDFAFSTFFPEFLRPVIDPIASIFHRMLCGRYDASNDDGYSLENEPLPGSDSIEASRRRERGARALEERLAAERLAAARRELQREAEENV

SEQ ID NO: 606 - protein, 362 aa, Zygosaccharomyces rouxii
MSKNIVVLPGDHAGQEIAQEAIKVLEAISEVSPEAKFNFQHHLIGGAAIDATGSPLPDDALAAAKKADAVLLGAVGGPKWGTGSVRPEQGLLKIRKELQLYANLRPCNFASESLLDLSPLKPQHAKGTDFVVVRELVGGIYFGERKEDEGDGVAWDSEKYTKPEVQRLTRMAAFLALQHNPPLPIWSLDKANVLASSRLWRKTVEETIKNEFPQLKLNHQLIDSAAMILVKSPTQLNGIVLTSNLFGDIISDEASVIPGSLGLLPSASLASLPDTNEAFGLYEPCHGSAPDLPKGKVNPIAMILSAAMMLKLSLNLSKEGEAVEKAVKQVLDSGVRTGDLGGSNSTSEVGDAIAKAVKEILA

SEQ ID NO: 607 - protein, 303 aa, Zea mays
  unsure (1)..(303): unsure at all Xaa locations
LTSSFSSLSGSLPEERHCHTTTPPMLNMMTDLSCGPSSKAKGGQPAATTGSGGDRQGRGKIEIKRIENTTNRQVTFCKRRNGLLKKAYELSVLCDAEVALVVFSSRGRLYEYANNSVKSTIERYKKANSDTSNSGTVAEVNAQHYQQESSKLRQAIDSLQNANRTIVGDSIHTMGLRELKQMEGKLEKAINKIRARKNELLYAEVEYMQKREMDLQTDNMYLRSKIAENNNETGQPAMNMIGVPSTSEYDHMASFVDSRNFLQVNMQQQQPQHYSHXAATNDPPTRMMKLRIFGQQSMHASTQ

SEQ ID NO: 608 - protein, 139 aa, Arabidopsis lyrata subsp. petraea
STGKRSEREEDTDPQGSRGISDDEDGDNSRKKLRLSKDQSVILEETFKDHSTLNPKQKQALAKQLGLRARQVEVWFQNRRARTKLKQTEVDCEFLRRCCENLTEENRRLQKEVTELRALKLSPQFYMHMSPPTTLTMCP

SEQ ID NO: 609 - protein, 428 aa, Brassica rapa
HHSYTLSFLLVFLVMILFRPAFSINTLSPTESLTISSNRTLVSPGDVFELGFFRTNSRWYLGMWYKKVSERTYVWVANRDNPISNSIGSLKILGNNLVLRGNSNKSVWSTNITRRNERSLVLAELLGNGNFVMRDSNNKDASEYLWQSFDYPTDTLLPEMKLGFQPKTGLNRFLTSWRSSDDPSSGDFSYKLEAQRLPEFYLWNKELFRVHRSGPWNGIRFSGIPEDQKLSYMVYNFTENSEEVAYTFRLTNSSIYSRLIVSSEGYIERQTWNPTLGMWNVFWSFPLDSQCESYRMCGPYSYCDVNTSPVCNCIQGFNPSNVEQWDLRSWSGGCIRRTRVSCSGDGFTRMKNMKLPETTMATVDRSIGVKECEKKCLSDCNCTAFANADIRNGGTGCVIWTGRLDDMRNYVADHGQDLYVRLAAADLV

SEQ ID NO: 610 - protein, 376 aa, Cymbopogon flexuosus
ALSIAGAVQSQKLAVRAISRLQALPGGDVKLLCDTVVEHVRELTGYDRVMVYRFHEDEHGEVVAESRRDNLEPYLGSHYPATDIPQASRFLFRQNRVRMIADCHATPVRVIQDPGLSQPLCLVGSTLRAPHGCHAQYMANMGSIASLVMAVIISSGGDDEQTGRGGISSAMKLWGLVVCHHTSPRCIPFPLRYACEFLMQAFGLQLNMELQLAHQLSEKHILRTQTLLCDMLLRDSPTGIVTQSPSIMDLVKCDGAALYYHGKYYPLGVTPTESQIKDIIEWLTVCHGDSTGLSTDSLADAGYLGAAALGDAVCGMAVAYITPSDYLFWFRSHTAKEIKWGGAKHHPEDKDDGRRMHPRSSFKAFLEVVKSRSLPW

SEQ ID NO: 611 - protein, 261 aa, Glycine max
MFEARLIQGSILKKVLEALKDLINEACWDVSSGGVNLQSMDSSHVSLVQLTLRSEGFDTYRCDRNLAMGVNLTSMSKILKCAGNEDIITLRAEDNADTLALVFEAPNQEKVSDYEMKLMDLDVEHLGIPEQEYSCVIKMPSGEFARICRDLSHIGDAVVISCAKNGVKFSASGELGNGNIKLSQTSNVDKEEEAVTIEMNEPVHLTFALRYLNFFTKATPLSPTVTLSMSADVPLVVEYKIADMGHLKYYLAPKIEDEEAS

SEQ ID NO: 612 - protein, 330 aa, Geobacter metallireducens
MKILVTGGAGYIGSHVVKALGLEGHELLVYDNLSTGHEWAVMYGTLVKGDLEDRALLEKVFREFRPDAVMHFAASIQVEESVRRPLLYYGNNTAGTLNLLDVMVRTGVRCLVHSSTAAVYGIPDVVPVAETAPLAPINPYGSSKAMVEKILADLALAEDFRYVAIRYFNVAGADVACRLGQAYREATHLITRALKTAHGQYERLQIFGTDYQTPDGTCIRDYIHVDDLAAAHVLALDYLTEGGASEIVNCGYGHGFSVREVIEAVAHVTGTPFPVEETGRRPGDPPALVADSSKLRSLMKWEPQYDNLDFIIRTAWEWELALKRRESCAA

SEQ ID NO: 613 - protein, 863 aa, Bacteroides thetaiotaomicron VPI-5482
MKKVLLTLSLSIVASMGSFAQNEPYKNPKLTPEERAEDLLGRLTLKEKIGLMKNSSFAVERLGVAPYNWWSEALHGVARNGLATVFPITMGMASTFDDEAIERVYVAVSDEGRAKFHDAHRSNRYGYGNEGLTFWNPNVNIFRDPRWGRGQETFGEDPYLTTRMGVAVVKGMQGPADAEYDKAHACVKHYAVHSGPEAKRHSFDVEDLSPRDLWETYLPAFKALVQEADVKEVMCAYQRLEGEPCCDSNRLLTQILRDEWGYKHLVVSDCGAIDDFFVKGRHETHKDAADASASAVINGTDLECGSIYSHLEEAVKQGLITEERIDTSLRRLLKARFALGEMDPDSIVPWSRISIDTVDCDLHKQMALDLARKSMVLLCNNGVLPLAKTGARIAVMGPNAVDSVMQWGNYEGVPSHTYTILEGIRCKIGDVPFEKGCELLDNRIFESYFNEISNNGRPGLTATYWNNMNLSGDVAATSQITSPINLSNGGNTVFATGVGLYNFTAVYEGTFRPKESGAYELLIEGDDGYRVYVNGEKVIDYWGEHASAKREYTLKAIAGTDYKIRIEYMQAGAEALLRFDLGIYRHISPEMVVDRVKEADIVIFAGGISPSLEGEEMYSVNSPGFAGGDRTSIELPQVQRDILKALKKAGKKVVFVNCSGSAVALVPEMESCDAILQAWYPGQSGGLAVADVLFGDFNPSGKLPVTFYRSTDQLPDFEDYSMKNRTYRYMTEVPLFPFGYGLSYTTFDISKGRLNKKIISAGQDLNFKVNVKNTGKYDGAEVIQVYVRKVDDAEGPIKSLRAFRRVPLKAGETCVVSIDLLPTTFEFFDPTTNTMRIMPGKYEIMYGNSSDIPSGNKLSVTLR

SEQ ID NO: 614 - protein, 256 aa, Mycobacterium tuberculosis H37Rv
MNHPDLAGKVAIVTGAGAGIGLAVARRLADEGCHVLCADIDGDAADAAATKIGCGAAACRVDVSDEQQIIAMVDACVAAFGGVDKLVANAGVVHLASLIDTTVEDFDRVIAINLRGAWLCTKHAAPRMIERGGGAIVNLSSLAGQVAVGGTGAYGMSKAGIIQLSRITAAELRSSGIRSNTLLPAFVDTPMQQTAMAMFDGALGAGGARSMIARLQGRMAAPEEMAGIVVFLLSDDASMITGTTQIADGGTIAALW

SEQ ID NO: 615 - protein, 293 aa, Rhizobium sp. USDA 1177
RGKTQIKEFDAFPTLEQLPLWGFDGSSTQQAEGRSSDCVLKPVAVYPDPVRTNGALVMCEVMMPDGKTPHPSNTRATVLDDESAWFGFEQEYFFYKNGRPLGFPEQGYPAPQGPYYTGVGYKNVGDIARQIVEEHLDICLAAGINHEGINAEVAKGQWEFQVFGKGSKKAADEVWLARYLLLRLTEKYGIDVEFHCKPLGDTDWNGSGMHANFSTAYLREVGGKDYFEALMAAFEKNLHDHINVYGPDNHLRLTGKHETAPWDKFSYGVADRGASIRVPHSFVTRCSASTSST

SEQ ID NO: 616 - protein, 428 aa, Brassica napus
MAQILAASPTCQMRLTKPSSIASSKLWNSVVLKQKKQSSSKVRSFKVMALQSDNSTINRVESLLNLDTKPFTDRIIAEYIWIGGSGIDLRSKSRTLEKPVEDPSELPKWNYDGSSTGQAPGEDSEVILYPQAIFRDPFRGGNNILVICDTYTPAGEPIPTNKRARAAEIFSNKKVNEEIPWFGIEQEYTLLQPNVNWPLGWPVGAYPGPQGPYYCGVGAEKSWGRDISDAHYKACLYAGINISGTNGEVMPGQWEFQVGPSVGIEAGDHVWCARYLLERITEQAGVVLTLDPKPIEGDWNGAGCHTNYSTKSMREDGGFEVIKKAILNLSLRHMEHISAYGEGNERRLTGKHETASIDQFSWGVANRGCSIRVGRDTEKKGKGYLEDRRPASNMDPYIVTSLLAETTLLWEPTLEAEALAAQKLSLKV

SEQ ID NO: 617 - protein, 471 aa, Pirellula sp.
MNFKTTILAAAVAFAFVAPRTIQSKEPAMKTKWAIVIHGGAGSSPAQLGDASSKQRTKGLQHALQTGRDMLADGATAMDTVEAVIRTLEDDPIFNAGRGSVVTNEGRVEMDSSVMDGKTLACGAVAGVTRVKNPISLARRVMTETKHVLLVGPGADEFAETQQVPLVDPKYFLSQRDGDDASSIASATQDEDESHLGTVGCVVLDSHGNLAAGTSTGGTANKLPGRVGDSPIVGAGTYAANGLCAVSGTGVGEEYIRNSVAYDIAAQMRYANQSLESAVTDIMLNRLDPGVGGLIAVSQQGEIVMQHNTPGMSCAAADSTGRFETHLILDNGGAPAEATTKSNPSASDESKIRELIQQQASDWNAGNIDAFMKVYWKSDQLTFSSGGDVTRGFDATLQRYKERYPTSEKMGKLTFTDLEFLPLGNSAMQVLGVWKLDRMEPMEGKFTLVFRRFPEGWKIVHDHTSKSPDSQ

SEQ ID NO: 618 - protein, 197 aa, Oryza schlechteri
GQTPVFPRILGHEAGGIVESVGEGVTELAPGDHVLPVFTGECKECAHCKSEESNMCDLLRINVDRGVMIGDGQSRFTINGKPIFHFVGTSTFSEYTVIHVGCLAKINPEAPLDKVCILSCGISTGLGATLNVAKPKKGQTVAIFGLGAVGLAAMEGARLSGASRIIGVDLNPAKFEQAKKFGCTDFVNPKDHKNPVQ

SEQ ID NO: 619 - protein, 461 aa, Escherichia coli
  unsure (1)..(461): unsure at all Xaa locations
MADNKPELQRGLEARHIELIALGGTIGVGLFMGAASTLKWAGPSVLLAYIIAGLFVFFIMRSMGEMLFLEPVTVAFAVYAHRYMSPFFGYLTAWSYWFMWMAVGISEITAIGVYVQFWFPEMAQWIPALIAVALVALANLAAVRLYGEIEFWFAMIKVTTIIVMIVIGLGVIFFGFGNGGQSIGFSNLTEHGXFFAGGWKGFLTALCIVVASYQGVELIGITAGEAKNPQVTLRSAVGKVLWRILIFYVGAIFVIVTIFPWNEIGSNGSPFVLTFAKIGITAAAGIINFVVLTAALSGCNSGMYSCGRMLYALAKNRQLPAAMAKVSRHGVPVAGVAVSIAILLIAHAWNYIIPNPQRVFVYVYSASVLPGMVPWFVILISQLRFRRAHKAAIASHPFRSILFPWANYVTMAFLICVLIGMYFNEDTRMSLFVGIIFMLAVTAIYKVFGLNRHGKAHKLEE

SEQ ID NO: 620 - protein, 187 aa, Xylella fastidiosa 9a5c
MNPIRPFLDKTPQLGCAVYIDPTSTVIGDVILGDDVSVWPQTVIRGDVNHIRIGARTNIQDGTIIHVSHHSPYNTAGYPTLIGTDVTIGHGTIIHACTIEKLCLIGMGACILDGATIKKYGFVGAGAVISPNKVVGEAELWLGNPARLVRKLSDKEIESLHYSAQHYVKLKNGYLSLSAETTSTPSP

SEQ ID NO: 621 - protein, 343 aa, Xylella fastidiosa Temecula1
MKINSNLFDCLLPIVAAPMAGGPTTVALAQAVSGVGGFPFLAGGYKSVEALATEIAVLRASGGNFGVNLFVPSPDMVDAEAFRIYAAKLQSEALPYGLRLDPLPVMGDDDGWPDKLALLLNDPVPVVSFTFGLPAVRDIAALRCAGSRVLASVTLPAEAQAAMEAGVDGLVVQGPDAGGHSATYDPGRPFTPLKTVSLVRRVCAVSSLPVIAAGGVDGPVMVRALLQAGAAAVAIGTLLLRTKESGATQVHKDALANPAYTETVITHAFTGRPARTLRNGFVNRYHASAPLGYPAIHHLTRPLRQAAASAGDADVLHLWAGTGYRQAMDGSAVDVIQYLAAGL

SEQ ID NO: 622 - protein, 162 aa, Shewanella oneidensis MR-1
MTSTIYRHNAIDIQGNPTPLTQYQGKVILIVNTASECGFTPQYKGLEALYQEYKARGFVVLGFPCNQFGAQEKANEQGIKSFCELNFGVSFPLFSKIEVNGEHTHPLYQYLKKAAPGMLGTERIKWNFTKFLINRQGEAVARFAPTTKPEDIRDKIESLLNK

SEQ ID NO: 623 - protein, 333 aa, Streptococcus pyogenes MGAS315
MMSETKLMALREAVNLAMTEEMRKDENIFLMGEDVGVYGGDFGTSVGMIEEFGPKRVKDTPISEAAISGAAIGAAITGLRPIVDVTFMDFLTIMMDAIVNNGAKNNYMFGGGLITPVTFRVASGSGIGSAAQHSQSLEAWLTHIPGIKAVAPGNANDAKGLLKSAIRDNNIVLFMEPKALYGKKEEVNQDPDFYIPLGKGDIKREGTDLTIVSYGRMLERVLQAAEEVAADGINVEVVDPRTLIPLDKELIIESVKKTGKLMLVNDAYKTGGFIGEIATMITESEAFDYLDHPIVRLASEDVPVPYARVLEQAILPDVEKIKAAIVKMANKGN

SEQ ID NO: 624 - protein, 93 aa, Triticum aestivum
MSAQQLNIDNADLEKLNDKDRTELRQFLANEQQRSQIQAQTHSLTQMCWSKCVPGTIKNPKLDKSEETCLANCVERFLDVNYLTMKHLNGMRN

SEQ ID NO: 625 - protein, 361 aa, Triticum aestivum
SCIQEGRASCLMCSYNQVNGVPACAHKDLLQKIRDEWGFKGYIVSDCDAVAIIHENQTYTSSDEDSVAIVLKAGMDVNCGSFLIRHTKSAIEKGKIQEEDINHALYNLFSVQLRLGLFEKTSENQWFTRLGPSNVCTKEHRELAAEAVRHGTVLLKNDNSFLPLKRSEVSHIAIIGAAANDAYIMGGDYTGVPCDPITFLKGMQAFVPQTTVAGGCKNVSCDSTDGFGEAIEVAKRADIVVVNAGLNLTQETEDLDRVTLLLPGKQQDLVHIIAGVTKKPIVLVITGGGPVDVSFAKQDPRIASVLWIGYPGEVGGQVLPEILFGEYNPGGKLTMTWYPESFTAVPMTDMNMRADPSRGYP

SEQ ID NO: 626 - protein, 259 aa, Sulfolobus solfataricus
MIYLKSFERNIRLINMKVVYDDVRVLKDIIQALARLVDEAVLKFKQDSVELVALDRAHISLISVNLPREMFKEYDVNDEFKFGFNTQYLMKILKVAKRKEAIEIASESPDSVIINIIGSTNREFNVRNLEVSEQEIPEINLQFDISATISSDGFKSAISEVSTVTDNVVVEGHEDRILIKAEGESEVEVEFSKDTGGLQDLEFSKESKNSYSAEYLDDVLSLTKLSDYVKISFGNQKPLQLFFNMEGGGKVTYLLAPKV

SEQ ID NO: 627 - protein, 188 aa, Anomochloa marantoidea
VIHVGCLAKINPEAPLDKDCVLSCGISTGLGAALNVAKPPKGSSVAIFGLGAVGLAAAEGARLAGASRIIGVDLNPNRFELAKKFGCTEFVNSKDLDKPVQEVLAEMTNGGVDRSIECTGNINAMISAFECVHDGWGVAVLVGVPRKDAEFKTNPMNVLNERTLKGTFFGNYEPRTDLPNVVEMYMRK

SEQ ID NO: 628 - protein, 371 aa, Tripterygium regelii
ALSIAGAVQSQKLAVLAISQLQSLQGGDIKLLCDTVVESVRDLTGYDRVMVYKFHEDEHGEVVAESKRPDLEPYIGLHYPATDIPQASRFLFKQNRVRTIVDCHALPVRVIQDDGLMQPLCLVGSTLRAPHGCHAQYMENMGSMASLAMAVVINGNDEKVIGGRNTTRLWGLVVCHHTSARCIPFPLRYACEFLMQAFGLQLNMELQLAAQLMEKHVLKTRTLLCDMLLRDSPTGIVTQSPSIMDLVKCDGAALHYQGNYYPLGVTPTEAQIKDIVGWLLDFHGDSTGLSTDSLADAGYPEAALLGDAVCGMAVAYITNRDFLFWFRSHTAKEIKWGGAKHHPEDKDDGQRMHPRSSFKAFLEVVKSRSLP

SEQ ID NO: 629 - protein, 168 aa, Brassica rapa
FRCVQQGDDENGKTGVSLSKDITDVAGRTVKKHIATLGPLILPLSEKLLFFVTFMGKKLFKDKIKHYYVPDFKLAIDHFCIHAGGRAVIDVLEKNLALAPIDVEASRSTLHRFGNTSSSSIWYELAYIEAKGRMKKGNKVWQIALGSGFKCNSAVWVALNNVKASTNS

SEQ ID NO: 630 - protein, 100 aa, Thermoplasma acidophilum
MFCPKCGSLMTPVNGKYVCPSCGYEISKNKETIKIVSKSADKETIMIKEEVSAEPLDSDAVCPRCHHKGARYVLKQTRSADEPETKFYTCEECGYRWREY

SEQ ID NO: 631 - protein, 152 aa, Zea mays
MVKAVAVLGSSDGVKGTIFFTQEGDGPTAVTGSVSGLKPGLHGFHVHALGDTTNGCMSTGPHYNPASKEHGAPEDENRHAGDLGNVTAGADGVANINVTDSQIPLTGPNSIIGRAVVVHADPDDLGKGGHELSKSTGNAGGRVACGIIGLQG

SEQ ID NO: 632 - protein, 574 aa, Schizosaccharomyces pombe
MLSKFYEDIDSKLENAMLSQIESSTITCDGKSLNTLPTPKQEDVEFGVPLQPEDTQDLQRKLKPRHMQMIAIGGCVGTGLFVGSGNALADGGPASILIAFAVIGTYVLFTTSALAELSAIYPVSGSFYTYFSKFIDPAWGFAVGIQYWLSFAVTVPLELTVAPLIINFWNASGPVSIWISVFYVIIIAINIWGTEGYGEVEFFLSIMKVISVIGFVILSIIIAAGGVPTDDRGVIGVSYWKQPLVFNNGFKGLCAVSVIAIFSLSGTELVGLAASEAKNPQKTVPAAVKQIFWRIFLFYIVALFMLTLVVPSDLPGLRTSDNSNVLISPFVIAIQLANIRALPSIMNVVILLSTLSVGNSASYAASRALFALAKNGYAPKIFNKTNKRGHPIYAIAVTLLFGSIAYFTEAGVGGALFGWLLSICGLSTTFIWGSICLAHIQFRRAWKIQNRKLEDLPYRSIFGVYGSIYGVAMTILALIAQFYVAVFPIGKKPNPVDFFQAYMAAPILIISFVAWKFFRRTSFVRIEKIDLSEGAHGEQKQNLEPVINIPVEEIDFPMKVATKESMKNVEKNAL

SEQ ID NO: 633 - protein, 163 aa, Glycine max
MSPSLDLPPKGGFSFDLCRRNAMLQNKGLKAPTFLKTGTTIVGLVFQDGVILGADTRATEGPIVADKNCEKIHYMAPNIYCCGAGTTADTDAVTDMVSSKLQLHRYHTGRESRVVTALTLLKKHLFNYQGHVSAALVLGGVDITGPHLHTIYPHGSTDTLPFA

SEQ ID NO: 634 - protein, 356 aa, Mycobacterium leprae
MSLSLGIVGLPNVGKSTLFNALTRSNVVVANYPFATIEPNEGVVSLPDPRLAKLAELFGSERILPAQVTFVDIAGLVKGASEGAGLGNKFLAHIRECDAICQVVRVFSGDDITHVTGRVDPQSDIGIIDTELILADLDTLERALPRLEKEARNHKERKPIYAAAINAQQVLNVGTTLFAAGVDGSALRELNLLTNKPFLYVFNADEAVLTAAAWVAELRQLVAPADAVFLDAAIEAELAELDDESAAELLESIGQTERGLDALARAGFRTLALQTFLTVGPKEVRAWTIHQGDTASKAAGVIHTDFEKRFIKAEIVSYDDLIATGSMSAAKAAGKVRTEGKDYVMADGDVVEFRHG

SEQ ID NO: 635 - protein, 861 aa, Nicotiana tabacum
MMMVGKLFSLLHFFTLFCLFTVTFASTKEATALLKWKATLQNQSNSLLVSWTPSSKACKSWYGVVCFNGRVSKLDIPYAGVIGTLNNFPFSSLPFLEYIDLSMNQLFGSIPPEIGKLTNLVYLDLSFNQISGTIPPQIGSLAKLQTLHILDNHLNGSIPGEIGHLRSLTELDLSINTLNGSIPPSLGNLHNLSLLCLYKNNISGFIPEEIGYLSSLIQLDLNTNFLNGSIPASLENLHNLSLLYLYENQLSGSIPDEIGQLRTLTDIRLNTNFLTGSIPASLGNLTSLSILQLEHNQLSGSIPEEIGYLRTLAVLSLYTNFLNGSIPISLGNLTSLSSLSLYENHLSGPIPSSLGNLDNLVYLYLYANQLSGPIPSELGNLKNLNYMKLHDNQLNGSIPASFGNLRNMQYLFLESNNLTGEIPLSICNLMSLKVLSLGRNSLKGDILQCLINISRLQVLKIPDNNLSEEIPSSICNLTSLRILDLSRNNLKGSIPQCFGDMGGHLEVLDIHKNGISGTLPTTFRIGSVLRSFTLHENELEGKIPRSLANCKELQVLDLGDNLLNDTFPMWLGTLPKLQVLRLKSNKLYGSIRTSKDENMFLELRIINLSYNAFTGNIPTSLFQQLKAMRKIDQTVKEPTYLGKFGADIREYNYSVTVTTKGLELKLVRILTVYIIIDLSSNRFEGHVPSIMGELIALRVLNLSRNGLQGHIPPSLGNLFVIESLDLSFNQLSGEIPQQIASQLTSLAVLNLSYNHLQGCIPQGPQFHTFENNSYEGNDGLRGFPISKGCGNDRVSETNNTVSTLDDQESTSEFLNDFWKAALMGYGSGLCIGLSILYFMISTGKLKWLSRITEWLQNRFII

SEQ ID NO: 636 - protein, 456 aa, Zea mays
MAFASSNAKQSLYPDVDQSHPDLNTPFFSAPTTSTCAGAGAATGNSLYPTVDPNELAQNLFPETVEEDAAPPPPTTEETIIAVPGAQLHLIDPDRSVDLGAGTLSIVRLRQGDHSVAEPVQWPLARDVAAVKLDPAHYFFSLHVPHTDHPDDKDDADGAEADAEAALSYGLTVVGKGQEEVLAELDRVLEEYTTFSVKQVETAAKEKSEVMDARAVAEITPEEAVGDKKEVVEEKSAAFWTTIAPNVDDYSSSVARLIARGSGQLVRGIIWCGDITAGGLRRGEEVMKKSVGPSTKPTQVKPSTLRRMKRARRVTKMSNRVANSILSGVLKVTGFVTSTVLNSKPAQKFFKLMPGEVILASLDGFGKIWDAVEVSGKNVMQTSSVVTTSVVTHRYGEQAGEATHNYLHATGNVLGAAWAVFKIRKALDPKGNMKKSFVSQAAHAVAKESVARQKKK

SEQ ID NO: 637 - protein, 480 aa, Streptomyces avermitilis MA-4680
MPALRIKSPELLVAESGADLEGHGLKRTMGLFQLICFGVGAIVGTGIFVGLSDSVAQAGPAVVVSFVLAAITCVFTAFAFAELGGAIPVSGSSYSFAYAGLGERTAFLVGWCLLLEYGVSVSAVAVGWSQYVNELLDSLTGLELPAALSAGPGDGGVINLPAVVVIALASVLLVRGVRESARATAAMAVLKLAILVVFCAIGFSAFKDGNLTPFSPAGLGGIGAGTTAAFFSYIGFDAITTAGEEARNPRRDIPIAILVCLGLATLLYCAVALAAIGAIGGDQVGGRPAALSYVVNEVTGSTAGGAVIAFGAVVAIASVVLAVMYGQTRILMSMARDGLVPRVFERVSPKTSTPVTGTLLVALVFAVPAAFASLDAVVNLCTIGTLAIMAVVNVTVIALRRREPGLTRSFRVPLYPVIPVLGVGFCLYLMYETGWTTWIQFAAFLAAGCLVYALYGRRNSRLAKSAAATRTDAEAVSQAV

SEQ ID NO: 638 - protein, 135 aa, Zea mays
MAKDGGPDWNGLLKWSLAHGDSTNPPRALSEEDRKWFMDAMQANTVDVVKRMKEITQVMKTPEDVLQSQGVTPENIEDMLDELQEHVESIDMANDLHSIGGLDPLLSYLKNSNAGIRAKAAEVVSTIVQNNPKSQ

SEQ ID NO: 639 - protein, 217 aa, Triticum aestivum
MAPKKPEAVIDNVVAFGRVRKNLKMGCVGLPNVGKSSLFNLLTEQSAAAENYPFCTIEPNEARCAVPDARYDFLCDLWKPPSMYPAYLQVTDIAGLIKGASQGEGLGNAFLSHIQAVDGIFHIVRAFDNDQVLHVDDSIDPVRDLNTIQSELCKKDLDILDKQIVAEEMIVKNAGGKYKMLPLFYETTSKIRAVLEEGKPERDGSWTPVEIALHHEK

SEQ ID NO: 640 - protein, 313 aa, Ceratopteris richardii
MAMPCSDIDLLDSDNDNVDDQHISLELRQVHEDTDDGSHDEPRELSLLNHESNLCKIVNSKGKGAEAGNSLLPSTGTSRGKIQIRRIENTTSRQVTFSKRRNGLLKKAHELSVLCDAEIALIIFSSTGKLFEYSSSRGIKKILERYKRCSGILQDVGGTVIRDVEYWKQEAERLKERLTYMEEIQRNMLGESLGSLQIKDLQNLEAKLDSGLYKIRGAKTQLMARQVQELQKKEQILLQQNEALRAKLAELSCLQAPVSGLTTATTSQDVQESSSGRGSRQRETSLSAAETTLQLASHNEQTFLLRAVPHMRL

SEQ ID NO: 641 - protein, 358 aa, Glycine max
  unsure (1)..(358): unsure at all Xaa locations
MDFRQRAPTFRPQLSVRRVYETLEPRSETKELPEAYLLRVYIPGFPRENVKITYVASSRTVRITGERQLQGNRWHKIDKSYPIPDYCEAEALQGKFEIPILTITMPKKATSQAATKQQEVGTSQEKAKRTPTMLTKVKTAERPQKGEEEFEAKSTPAMLTKAKTAERPQKGEEEFEAKQTPTMLTKVKTAERPHKGVEEEESRPSITNVTRKPSVKEQLEEKKTEETSAEDAKKERISNKESXKEESCESRKPMKDKEEGDFEEKETKAEKLLAKEAETSAPKVQKKKEKQSSNRTNSKRKGKSEDNAMEKVGPVSQVFTKIAEGIWNEEEKKLVGNIGAAVLVIAALGYYVSYRFAS

SEQ ID NO: 642 - protein, 157 aa, Zea mays
MAAADVEYRCFVGGLAWATSNESLENAFASYGEILDSKVITDRETGRSRGFGFVTFSSENSMLDAIENMNGKELDGRNITVNQAQSRGGGGGGGGYGGGRGGGGYGGGRRDGGYGGGGGYGGRREGGGGGYGGGGGYGGRREGGGGGYGGGGGGWRD

SEQ ID NO: 643 - protein, 160 aa, Glycine max
MASADVEYRCFVGGLAWATDDHALERAFSQYGEIVETKIINDRETGRSRGFGFVTFASEQSMKDAIGAMNGQNLDGRNITVNEAQSRGGGGGGGGGGGGYNRGGGGYGGRSGGGGGGGGYRSRDGGYGGGYGGGGGGGYGGGRDRGYSRGGDGGDGGWRN

SEQ ID NO: 644 - protein, 524 aa, Triticum aestivum
  unsure (1)..(524): unsure at all Xaa locations
MSMEDSTRPAGAGASAGERASSPSPSRRLPDFLQSVRLKYVKLGYHYLITHGMYLLLTPLIVLIAVHLSALSPGDVTDASTPLRGNILSVIASSTPLVSISSGYSATRPRSVYLVXFGCYKPGPERRCSRETFMRCSKLTGNFTEANLDFQRKILERSGLGEDTYIPPALVTVPPNPSMELARQEAQVCMFGAIDNMLAKTGVKPKDIGILVVNCSLFNPTPSLSAMVVNHYKLRGNIVRYNLGGMGCSAGLLSIDLAKDLLQVHPNSYAMVVSTENITLNWYFGNNRSMLVSNCLFRMGCAAILLSNKRSDRRRSKYELVHTVRTHKGADDKCFSCVTQEEDDSGKVGVALSKDLMAVAGDALKTNITTLGPLVLPFSEQLLFMVTLVGKKLFKMKIKPYIPDFKLAFEHFCIHAGGRAVLDEIEKNMDLTDWHMEPSRMTLFRFGNTSSSSLWYELAYSEAKGRIRRRDRIWQIAFGSGFKCNSAVWKALRSVNPAKEQNNPWMDEIDTFPVDVPKVSKVAE

SEQ ID NO: 645 - protein, 355 aa, Clostridium perfringens str. 13
MNIKPLTIGNLTARLPIIQGGMGIGVSLSNLASAVTKAGGIGIISGAQPGYLEEDFKNNPLEANLRALKKHIRIAKEKSQNGIIGVNLMVAMNNYAEHVKAAIDSGVDLIISGAGLPSHLPKFTKGSNVKIAPIVSSLKAAKVILKLWDRHHKVSPDMIVIEGPKAGGHLGFTKESLEDESKKFDSTILDIIKETSIYEDKYEKKIPIIVAGGIFDGKDIAKYLKLGASGVQMATRFVATYECDANIKFKEAYINCNKESISIVKSPVGMPGRAIRNSFVQFTETEKSKVSHCYNCLIPCNPADTPYCISQALINAVKGDIDNGLIFCGENASKIDKIVSVETLMNELEKDLLEA

SEQ ID NO: 646 - protein, 390 aa, Echinopterys eglandulosa
DLEPVNPADVPVTAAGSLKSYKLAAKAISRLQSLPSGNISLLCDVLVKEVRELTGYDRVMVYKFLEDEHGDVVSECRRSDLESYLGLHYPATDIPQASRFLFMKNKVRMICDCLAPPVKVIQDERLPQPLSLCGSALRSPHGCHAQYMMGTIASLVMSVTINEDDDTMDGDQQQMARKLWGLVVCHHTSPRFVPFPLRYACEFLIQVFGVQINKEVGLAGQVREKHILRIQTMLCDMLLRDAPVAIITQSPNVMDLVMCDGAALYYKNKFWLLGVTPTEAQIRDIAEWLLKYHSQNTGLSTDSLMEAGYPGASVLGDAVCGMAAVSLTSKDFLFWFRSHTAEGIKWGGATHDPDDKDDGRKMHPRLSFKAFLEVVKWRSLPWEDVEMDAI

SEQ ID NO: 647 - protein, 157 aa, Triticum aestivum
PRCDYHVTTTGQAATALRMLRENKDQFDLVISDVHMPDMDGFKLLELVGLEMDLPVIMLSANGETQTVMKGITHGACDYLLKPVRLEQLKTIWQHVIRRNTKNRGSDNDDAGQKGPNAEGENGGANRNKRQSRRDRDDNGDDGDDSDENSNDNGDSS

SEQ ID NO: 648 - protein, 146 aa, Glycine max
  unsure (1)..(146): unsure at all Xaa locations
YSTKLINLPAHIGYLVKAVPDDHKKFLADLVWVHEEDDVFVNTDDGVKCCKLIAVHAGLEKGKDLKEQLKLLKARDTRVPKVEALSGRKSVWDIPEELTASXHHGKLHVEGLRLIIDEGGGYKDRPVAAIILPSMKIIRDTDVLAK

SEQ ID NO: 649 - protein, 164 aa, Ralstonia metallidurans
MSNVYQFEANSLSGQPQPLADYRGKVLLIVNTASECGFTPQYAGLQTLQASYQARGFDVLGFPCNQFGKQEPGDAEQIGAFCESRFHVTFPMFEKIDVNGADAHPLYKWLTSEKRGFLGTQAIKWNFTKFLLRRDGTVFKRYASTTKPEEIRADIESLLAEQPA

SEQ ID NO: 650 - protein, 171 aa, Bacillus anthracis str. A2012
MSKKIAILITDYFEDTEYTEPAEAFKQKGYELTTIEAEKGKTVHGKQGKSEVVIDTGIDDVSPENFDALFIPGGFSPDILRADERFVRFSKAFMDAEKPVFAICHGPQLLITAQTLEGRDVTGYKSIEVDLKNAGGNFHDKEVVVCQNQLVTSRQPEDIPAFIEESLRILR

SEQ ID NO: 651 - protein, 423 aa, Saccharomyces cerevisiae
MSEATLSKQTIEWENKYSAHNYHPLPVVFHKAKGAHLWDPEGKLYLDFLSAYSAVNQGHCHPHIIKALTEQAQTLTLSSRAFHNDVYAQFAKFVTEFSGFETVLPMNTGAEAVETALKLARRWGYMKKNIPQDKAIILGAEGNFHGRTFGAISLSTDYEDSKLHFGPFVPNVASGHSVHKIRYGHAEDFVPILESPEGKNVAAIILEPIQREAGIVVPPADYFPKVSALCRKHNVLLIVDEIQTGIGRTGELLCYDHYKAEAKPDIVLLGKALSGGVLPVSCVLSSHDIMSCFTPGSHGSTFGGNPLASRVAIAALEVIRDEKLCQRAAQLGSSFIAQLKALQAKSNGIISEVRGMGLLTAIVIDPSKANGKTAWDLCLLMKDQGLLAKPTHDHIIRLAPPLVISEEDLQTGVETIAKCIDLL

SEQ ID NO: 652 - protein, 174 aa, Zea mays
  unsure (1)..(174): unsure at all Xaa locations
MNRKPGDWDCRACQHLNFSRRDICQRCSEPRGVADRGGGGGGGDYASFGGRGGSSFGGGFGAAGSDVRPGDWYCSCGAHNFASRSSCFKCSAYKEEAAVNSGAGGFDGDMSRSRGYGFGSGAAXAGAGAARTTNRPGWKSGDWICTRSGCNEHNFASRMECFRCNAPRDSGTEV

SEQ ID NO: 653 - protein, 369 aa, Rhodopseudomonas palustris
MKTRAAVAFEAKKPLEIVELDLEGPKAGEVLVEIKATGICHTDAYTLDGFDSEGIFPSILGHEGAGIVREIGPGVTSVKPGDHVIPLYTPECRQCKSCLSQKTNLCTAIRATQGKGLMPDGTSRFSYKGQTIYHYMGCSTFSNFTVLPEIAVAKIRDDAPFDKSCYIGCGVTTGVGAVVNTAKVTPGSNVVVFGLGGIGLNVIQGAKMVGADKIVGVDINDDKEEWGRRFGMTHFVNPKKIDGDIVQHLVGLTDGGADYTFDCTGNTNVMRQALEACHRGWGVSVVIGVAEAGKEISTRPFQLVTGRVWKGSAFGGARGRTDVPKIVDWYMNGKIEIDPMITHVLKLEEINKGFDLMHQGKSIRSVVVY

SEQ ID NO: 654 - protein, 692 aa, Oryza sativa (japonica cultivar-group)
MATMNNWLAFSLSPQDQLPPSQTNSTLISAAATTTTAGDSSTGDVCFNIPQDWSMRGSELSALVAEPKLEDFLGGISFSEQQHHHGGKGGVIPSSAAACYASSGSSVGYLYPPPSSSSLQFADSVMVATSSPVVAHDGVSGGGMVSAAAAAAASGNGGIGLSMIKNWLRSQPAPQPAQALSLSMNMAGTTTAQGGGAMALLAGAGERGRTTPASESLSTSAHGATTATMAGGRKEINEEGSGSAGAVVAVGSESGGSGAVVEAGAAAAAARKSVDTFGQRTSIYRGVTRHRWTGRYEAHLWDNSCRREGQTRKGRQGGYDKEEKAARAYDLAALKYWGPTTTTNFPVNNYEKELEEMKHMTRQEFVASLRRKSSGFSRGASIYRGVTRHHQHGRWQARIGRVAGNKDLYLGTFSTQEEAAEAYDIAAIKFRGLNAVTNFDMSRYDVKSILDSAALPVGTAAKRLKDAEAAAAYDVGRIASHLGGDGAYAAHYGHHHHSAAAAWPTIAFQAAAAPPPHAAGLYHPYAQPLRGWCKQEQDHAVIAAAHSLQDLHHLNLGAAAAAHDFFSQAMQQQHGLGSIDNASLEHSTGSNSVVYNGDNGGGGGGYIMAPMSAVSATATAVASSHDHGGDGGKQVQMGYDSYLVGADAYGGGGAGRMPSWAMTPASAPAATSSSDMTGVCHGAQLFSVWNDT

SEQ ID NO: 655 - protein, 121 aa, Triticum aestivum
MARWAIAIHGGAGVDPNLPEHRQEEAKRVLARCLQVGVDLLRSGAAALDVVEAVVRELETDPCFNSGRGSALTRAGTVEMEASIMDGRGRRCGAVSGVSTVRNPVSLARRVMDKCVDAAAN

SEQ ID NO: 656 - protein, 450 aa, Enterococcus faecalis V583
MSETQQTTLKKQLSSRHITMLALGGAIGAGLFKGSGEAIGIAGPSVLIAFLIGGAVLFIVMSGLGKLVLDGGDTHHGLSGLVRPFLGAHSADFIDWVYYSMWTINIIAEAVAAASFLQLWFPNIPAWFFVFILAILTTLINLYSVRLFAETEYWLAFAKISVIILLIIFGVYLVGQQMLGSGVFPTLQSITDHGGFAPHGMKGIVNSLLVVIYSYGGSELIAITVSEADDPKKAIPKAIRGVMGRIISFYIIPLFLLLIIFPWNTLAGTTVSPFVMVFEKMNIPFAADIVNFVIILALFSSINSGVYASSRLLYFRLKDKKGPMSKLGVLNKHQVPQRSVFFCASVLYLGVILSYFVGDELFGYLAGSLSYTVLLIWILISAAAFVLSLKRGSLFEKSINLLALIILGLIFIGILFTNSLGVTLLTGLLYFVIFFSYRKKNDSFLLSDES

SEQ ID NO: 657 - protein, 172 aa, Oryza sativa
  unsure (1)..(172): unsure at all Xaa locations
XADDLAKYSIEVRRRIVKYKTAYYSFYLPVANALLLSGAKLEDFSGLKDILIEMGIYFQIQDDYLDCFADPNTIGKIGTDIEDHKCSWLIVQALGHADNNQIEVLHRNYGKKDSSSVSEVKRTYAALDLKDIFSEFERRCYNHLVTSIEAQKDHAAREILISFLKKIHQRKK

SEQ ID NO: 658 - protein, 311 aa, Rickettsia prowazekii
MEYALLIFSIITILVIIQMVKVVPQQQAWVVEKLGKFDKVLQPGLNLLIPIIQRVAYKHTLKEEAIDVTAQTAISNDNVTLSIDGVLYVKIIDPMAASYGVNNPYYAITQLAQTTMRSEIGKLPLDRTFEERDTLNVAIVSAINQAAINWGIQCMRYEIKDIQPPQTILKAMELQVAAERQKRAQILESEGNRQAKINHAEGEKAQIVLNSEASYTDQVNRAKGEAEAIGLVATATANSIEIVAAAIQKTGGSDAVALKIAEQYISAFGNLAKDTNTVILPTNLSEPSSFVTGALTIFNQLKTSAEKKKDK

SEQ ID NO: 659 - protein, 354 aa, Rhodospirillum rubrum
MKDAAMNGWAEERLDELWARGRAFLGCDTAILGGAMAWVSERHLVSAISGAGGFGVIACGSMPSDLLSKEIAATRALLEGMGGERPFGVNLITMHPELDRLIDLCGEHRVSHVVLAGGLPSAASIKRVKDLGARCICFAPALALARKLVRSGADALVIEGAEAGGHIGPVSTSVLAQEILPEVPEIPIFVAGGIGRGEAILSYLEMGAAGVQIGTRFVCATECIAHPNFKKAFIRASARDAVPTIQIDPQFPVIPVRALANKGTARFMEMQRTVIDRFHNGEIDQKSAQLEIEHFWAGALRRAVIEGDVDSGSLMAGQSVGMVKREEPVAEILAELRGQAVAALTRRAARQAGG

SEQ ID NO: 660 - protein, 499 aa, Escherichia coli
MSKHDTDTSDQHAAKRRWLNAHEEGYHKAMGNRQVQMIAIGGAIGTGLFLGAGARLQMAGPALALVYLICGLFSFFILRALGELVLHRPSSGSFVSYAREFLGEKAAYVAGWMYFINWAMTGIVDITAVALYMHYWGAFGGVPQWVFALAALTIVGTMNMIGVKWFAEMEFWFALIKVLAIVTFLVVGTVFLGSGQPLDGNTTGFHLITDNGGFFPHGLLPALVLIQGVVFAFASIEMVGTAAGECKDPQTMVPKAINSVIWRIGLFYVGSVVLLVMLLPWSAYQAGQSPFVTFFSKLGVPYIGSIMNIVVLTAALSSLNSGLYCTGRILRSMAMGGSAPSFMAKMSRQHVPYAGILATLVVYVVGVFLNYLVPSRVFEIVLNFASLGIIASWAFIIVCQMRLRKAIKEGKAADVSFKLPGAPFTSWLTLLFLLSVLVLMAFDYPNGTYTIAALPIIGILLVIGWFGVRKRVAEIHSTAPVVEEDEEKQEIVFKPETAS

SEQ ID NO: 661 - protein, 334 aa, Magnetospirillum magnetotacticum
FSPGESQHFGPCHLIVGLFASPCSVSHEILRRLSPLGIIFGRFCDRSPVNLLSVSRPVLSGLCLPAFEAAHLEPFSPFGFSKSVQADGVERGIMAAAAIIFFAFYGFDAIATAAEETRNPGRDLTIGIVGSMLACVLIYVAVAVAAVGAVAYTRFADSPEPLALILRELGRPRVAHYLAASAVIALPTVILAFFYGQSRIFFTMARDGMLPERLARVSSRGTPVRITLFTAAIVVVLAGFIPLSQLAALANAGTLAAFIAVAACMLVMRARAPDAPRTFRAPAPWVIGPVTILGCGYLFFSLPSQTQFWFVIWNALGVAFYLLYGRRRAGIADV

SEQ ID NO: 662 - protein, 80 aa, Oryza sativa
MDSSSGSQGKNSKTSDGCETKEVNNTAQNFVHFTEEEEDLVFRMHRLVGNRWELIAGRIPGRTAKEQYKIWCLETFPRRM

SEQ ID NO: 663 - protein, 243 aa, Glycine max
MQDPSRPAPPPFYHQNGGQPPPPAASAAIATGYPYAAQQQYYNTTYPPPRSYASRSFFRAFFATMICLAVVFGVVLIITWLVLRPSLPHFTLHSLSVSNLSSTSQSLSATWHLSFLVRNGNKKMTVSYNALRSSIFYRQNYISESQLAPFRQDTRSQTTLNATLTAAGTYLEPKLIDNLNAERNASSVLFDVQVVAATSFRSGSWRFRTRVLKVLCRKVPVGVSSKSSSGDLVGGDRECQVWT

SEQ ID NO: 664 - protein, 328 aa, Glycine max
  unsure (1)..(328): unsure at all Xaa locations
LVLCLNFSSFSLFLSPSHALGSTRTDSDPPRVTLSQHHRPIRRCLAPLSAASGEIMLFGVRVVVDSMRKSVSMSNLSQYEHPLDATTTNNNKDALAAGYASADDAAPQNSGRHRERERKRGVPWTEEEHKLFLVGLQKVGKGDWRGISKNYVKTRTPTQVASHAQKYFLRRSNLNRRRRRSSLFDITTDTVSAIPMEEEQVQNQDTLCHSQXNPVFPAETSKINGFPAMPVYQFGVGSSGVISVQGTGNPMEELTLGQGNVEKHNVPNKASTVSGIITPGSSSSAIDPPPTLSLGLSFSSDQRQTSSRHSALHAMQCFSNGDSIISVA

SEQ ID NO: 665 - protein, 737 aa, Chlamydomonas reinhardtii
MDYGGALSAVGRELLFVTNPVVVNGSVLVPEDQCYCAGWIESRGTNGAQTASNVLQWLAAGFSILLLMFYAYQTWKSTCGWEEIYVCAIEMVKVILEFFFEFKNPSMLYLATGHRVQWLRYAEWLLTCPVILIHLSNLTGLSNDYSRRTMGLLVSDIGTIVWGATSAMATGYVKVIFFCLGLCYGANTFFHAAKAYIEGYHTVPKGRCRQVVTGMAWLFFVSWGMFPILFILGPEGFGVLSVYGSTVGHTIIDLMSKNCWGLLGHYLRVLIHEHILIHGDIRKTTKLNIGGTEIEVETLVEDEAEAGAVNKGTGKYASRESFLVMRDKMKEKGIDVRASLDNSKEVEQEQAARAAMMMMNGNGMGMGMGMNGMNGMGGMNGMAGGAKPGLELTPQLQPGRVILAVPDISMVDFFREQFAQLSVTYELVPALGADNTLALVTQAQNLGGVDFVLIHPEFLRDRSSTSILSRLRGAGQRVAAFGWAQLGPMRDLIESANLDGWLEGPSFGQGILPAHIVALVAKMQQMRKMQQMQQIGMMTGGMNGMGGGMGGGMNGMGGGNGMNNMGNGMGGGMGNGMGGNGMNGMGGGNGMNNMGGNGMAGNGMGGGMGGNGMGGSMNGMSSGVVANVTPSAAGGMGGMMNGGMAAPQSPGMNGGRLGTNPLFNAAPSPLSSQLGAEAGMGSMGGMGGMSGMGGMGGMGGMGGAGAATTQAAGGNAEAEMLQNLMNEINRLKRELGE

SEQ ID NO: 666 - protein, 400 aa, Methanosarcina acetivorans C2A
MLYRKMPKNGDELSILGFGCMRLPVKEDGSVDEERATRQVRYAIDQGVNYVDTAWPYHMGESEPFLGRALADGYREKVKLATKLPSWMVKSREDMDKFLNAQLEKLKTDHIDYYLIHNLSGETWDRIEALNVIDFFEKAKSDGRIVNAGFSFHGLANDFKRIVDAYPWTFCQIQYNFMDEKHQAGTEGLKYAASKGLGVMIMEPLRGGNLARTVPLAIENIWSEADVERTPVEWALRWVWNHPEVTVVLSGMNEEVHIKENLKIASEAYPNSLTEAELQLVSKVEQKYRQIMKVGCTGCQYCMPCPSGVNIPECFSIYNHLSTFGNAEDANLLYIGLLSGAVSGGKPGMASQCVQCGQCLEKCPQHIDIPTILESVAEELEGSDLEERIAIVKQEMHKQI

SEQ ID NO: 667 - protein, 342 aa, Mesorhizobium loti
MKAFYAEEQKRHDPKAFLSSGAAQPNPEKPERVEKLLAGAKSAGCMIEQPRNHGLGPVSAVHTPEYLDFLEHIFERWQRIEGASAEVIPNIHPIARNGSYPASAVGQAGYHMADTACPISGETWQSALWSAWSAVEAAEAVMAGAPAAYALCRPPGHHAFADVAGGFCFINNSAVAAQVLRKQAARVAILDVDLHHGNGTQGIFYARPDVFTVSLHADPVRFYPFFWGHADERGEGPGLGYNFNLPLPRKSADAAFLEALGVAFQRIRAFSPDALVVALGLDAFEGDPFGGLSVTTPGFSRIGEAIGKLGLPSVVVQEGGYLCDALSDNLTAFLTGFGGKVR

SEQ ID NO: 668 - protein, 112 aa, Sulfolobus solfataricus
MAQIREIKKIEREKASIHSHITGLGLDEKGKAKFIADGLVGQVEAREASGIVVQLIRQGKMAGKGILFVGPPGTGKTALAVAIAKELGEDTPFTTINASEVYSTELKKTEIL

SEQ ID NO: 669 - protein, 419 aa, Brassica barrelieri
FYHSCIIFFAVLLQFHHVFSTNTLSSNEALTISSNRTLVSPGDVFELGFFKTTTRNSQDGGDRWYLGIWYKTTSDLRTYVWVANRDNPLHNSIGTLKISHSDLVLLDQSDTPVWSTNCMGVVQSSVTAELLANGNFVLRDSKTKDLNRFMWQSFDFPVDTLLPEMKLGRKRNSSENEKILTSWKSPTDPSSGDYSFILETEGFIHEFYLLKNEFKVYRTGPWNGVRFNGIPKIQNWSYIINNFIDNKKEVAYTFQVSNNHNIHSRFRMSSTGYLQVITWTKTVPQRNMFWSFPEDTCDLYKVCGTYAYCDMHTTPTCNCIKGFVPKNAAAWELRDMSGGCVRSKRLSCGEGDGFLRLGQMKMPETSEAFVDESIGLKECKEKCIRDCNCTGFANMDIMNGGSGCVTWTGELVDMRKYDA

SEQ ID NO: 670 - protein, 140 aa, Triticum aestivum
MVSFEMNDLKKIGLGLTGFGVFFSFLGIVFFFDKGLIAMGNILFLSGLGLTIGLKSTMQFFTKPKNYKGTISFGAGFFLVLIGWPFFGMLLEAYGFIVLFSGFWPTLAVFLQRIPILGWIFQQPFVTSFLDRYRGKRVPV

SEQ ID NO: 671 - protein, 753 aa, Methanosarcina barkeri
MASVETTERLGCSLGFFSTFAIGTGTMIGAGIFVLPGIALADAGSGAIISFLLGGLISIATAISMSELATGMPLAGGSYYYISRTMGAALGAIIGLGSWLALIFKGTFALIGLAEYAQIFYPLPLYFVAAATGVILLVINYRGAKSSGSLQNFIVIFLLVILALFIARVSFMVNPANLSPATSYGGTSIITTAGVIFISYLGLAEAAAVSEEVKNPSKTLPLAFIASAVVVTLFYVSTMAVVVGFSDPQVTGKSITPLADIAGLLAGESGRIAISLSALLATLSTANGAILSSSRFPFAMSRDALMPEWFVLIHQKFETPHNAILVTGIVMVLLLFLFDIEELARLGGAFNILIFILLNMAVIILRKRNLPGYEPTFRDPFFPYTQIFGIVGSIVLLPLLGGLPLLFTIMMIFAGIGWYSFYGRGKAVPEYNLFDLLENTVEKKEIEPVPLVKVLVPISNQKHERDLLKLADFMGSEIICLHVIEVPDQTNLKLAQEAYHEKKIEMDCRFKEEFENYPAILGHKREYIAAFDHNISNSILEQAEIEHADMIIMGWHEPKRFEYSHGVTNQVLLSSKSPIALLKGHLPDSINKILVGYNGKENSIYGLSLAEKLAVNTGAGIEIISIISPDEAQENRQKITDELESLVKKISSIPVSFRVLEKYSIEDALLEASNNNDLTIIGDSSERFKISLLGTLSQRIAKHSKKPIVVVKKSKPISKESFNYLVKKHARKIYARLRGKEVKLNSDKSAVLA

SEQ ID NO: 672 - protein, 164 aa, Mycoplasma penetrans
MFKMSDFYKFKVNKINGKEIELSEYKNKVVLVVNVASKCGFVKQYENLENMYQKYKDQGLVILGFPCNQFFFQEPKTNQEILSFCTTKYNVTFDMFEKINVNGKEANPLYTWLKEQMPWTARAKNVKWNFEKFLLDKNGNVKYRFESKKIPEEFEQEVVNLINE

SEQ ID NO: 673 - protein, 656 aa, Listeria innocua
MKSKGRLFLYVVLALSIVIGTNVFIKIDAYAAAAPPAAINQIFPDDALAKEIQTALGKSSTAEVVTQTDLDTINSLTLTSKGISSIEGMNYLTNLGTLILSSNQVSDISPLKGLTNLTMLQLSGNPISDISALSNLKNLQALDINDAQITDITPLSGLTNLKGLGLYNNQLENLSGVNNLQQLRSLNVSNNKLTNLDELQALSNLGVLYANGNQINNLQGLSTLKNLFLLDLSTNQIVDTTPLAGLTNVQTLYLSNNQISDVTGLSSLINLDWLDISQNKISNIRPLNSLTKLTIIQMTNQLIVNEPISFESTITIPNLIKNIAEQTIDPDTISDSGVYANGSVTWNLPTYIPKVSYTFIERDTVGNATGNFSGTVEQPLVQYFKATFNIEGQETTENVETGTLLQEPPTPVKEGYTFNGWYDAETGGTKWDFTADTMPANDITLYAQFSINSYTATFDVDGVTSTQTVDYQGLLEEPPAPTKDGYTFKGWYDAKTGGTKWDFTNNQMPAKDITLYAQFSINSYTATFDVDGVISTQTVDYQGLLEEPPAPTKDGYTFKGWYDAKSGGTKWDFANNQMPAKDIILYAQFSKDAASGGDGGGTDEGGGNSENSTDGTTNTDTINHIVLPATGDHRVLFPIFIGTFLTGLALFTLRRK

SEQ ID NO: 674 - protein, 302 aa, Hordeum vulgare
MGRPSSGAVGQPKVRKGLWSPEEDEKLYNHIIRHGVGCWSSVPRLAALNRCGKSCRLRWINYLRPDLKRGCFSQQEEDHIVALHQILGNRWSQIASHLPGRTDNEIKNFWNSCIKKKLRQQGIDPATHKPMASADTATAAAALPDAEEEDRKPLCPAVDGSLVPKQPAVFDPFPLCVDYGAGFAEELGAANAAALYGQLCGGKEVADDDAGFGAADYSCVLDVSENLGYGESSSNSSNWNYGGEVGSVLDGEVPHWAKAEPAFAEMERQQQHSPAEQKLSLPCQEQSLLASFDFNLELEPYF

SEQ ID NO: 675 - protein, 369 aa, Escherichia coli O157:H7 EDL933
MKSRAAVAFAPGKPLEIVEIDVAPPKKGEVLIKVTHTGVCHTDAFTLSGDDPEGVFPVVLGHEGAGVVVEVGEGVTSVKPGDHVIPLYTAECGECEFCRSGKTNLCVAVRETQGKGLMPDGTTRFSYNGQPLYHYMGCSTFSEYTVVAEVSLAKINPEANHEHVCLLGCGVTTGIGAVHNTAKVQPGDSVAVFGLGAIGLAVVQGARQAKAGRIIAIDTNPKKFDLARRFGATDCINPNDYDKPIKDVLLDINKWGIDHTFECIGNVNVMRAALESAHRGWGQSVIIGVAGSGQEISTRPFQLVTGRVWKGSAFGGVKGRSQLPGMVEDAMKGDIDLEPFVTHTMSLDEINDAFDLMHEGKSIRTVIRY

SEQ ID NO: 676 - protein, 168 aa, Zea mays
MAAASSATSVHDFTVKDASGKDVDLSTYKGKVLLIVNVASQCGLTNSNYTELSQLYEKYKDQGFEILAFPCNQFGGQEPGTNEEIVQFACTRFKAEYPIFDKVDVNGDNTAPIYKFLKSSKGSLFGDNIKWNFSKFLVDNEGRVVERYAPTTSPLSIEKDIKKLLGSS

SEQ ID NO: 677 - protein, 319 aa, Pseudomonas sp.
MPRREMMKCLFVSESCVCHTDLAIKDGVLPFPLPAVLGHEGSGIVEAVGPGVKHLKPGDAVVMTFASCGHCASCEHERPSYCLDFGAQNYSAQRADGPVLLSQGDEVISGFFFGQSSFSSMAMAREHNLVKIDALVDDAPIELLGPLGCGVQTGAGAVMISLDVRAGRSFLVLGGGAVGLSAVMAAKLRGCSRIIVSEPSAAKREQALALGATEVIDPLNENLVERVQQITEGQGCDYALECTGLVSVMEQAIDSMAMRGQLAVVGVPPKLDATAAVSPLALIQKGLKLMGVIEGDSCRVYSSTSCTRSSRLGVFRSPR

SEQ ID NO: 678 - protein, 199 aa, Pseudomonas putida KT2440
MPCYRLDGLTPVVHPTAYVHPSAVLIGDVIVGPRCYIGPLASLRGDFGRIVLEEGANLQDTCVMHGFPGGDTVVERNGHVGHGAVLHGCRVGEDSLIGMNAVVMDGAHVAPRCIVAATAFVKAGFECAAQSLVMGSPAQVKRPLSEQELAWKQRGTAEYQHLAQRCMNSMVECPPLAEAEPGRPRMEDTGVRPKGQASA

SEQ ID NO: 679 - protein, 271 aa, Rhodopseudomonas palustris
MAPTTSCRRKTRWRPDARLKPAQGGEMFDLTGRTALVTGATGGIGGAIAQALHGQGATVAISGTRREALDALAAKLGERVHVLPCNLSDAADVEALVPAAAEAMGGLDILVCNAGITRDNLFVQLRDEDWDEVIKVNLTATFRLTRAATKLMMRKKFGRIIAITSVVGVTGNPGQGNYTASKAGLIGMIKTIGAEYAKRNVTANCIAPGFIATPMTDVLNDKQREAILGKVPAGRLGTPDDIAAAAVYLSSNEAAYVTGQTIHVNGGMAMI

SEQ ID NO: 680 - protein, 211 aa, Zea mays
GRVGGRVGGRVGGRVGCAPLMLRLAWHSAGTFDVATKTGGPFGTMKNPAEQAHGANAGLEIAIRLLEPIKEQFPILSYADFYQLAGVVAVEVTGGPDVPFHPGRQDKPEPPPEGRLPDATQGSDHLRQVFSTQMGLSDQDIVALSGGHTLGRCHKDRSGFEGAWTSNPLIFDNSYFKELLSGEKEGLLQLPSDKALLSDPSFRPLVDKSQF

SEQ ID NO: 681 - protein, 578 aa, Oryza sativa (japonica cultivar-group)
MEVEAARRDAATLDPELLQLPELSPGALRENPALAEALYSQWLALPETSKLVNSLIEDAKAGATLNVTGSSASTNAASSGSLPSMFPAGSAPPLSPRSTSGSPRVMRRGSGAGPSSLGSPLKVVSEPVREVIPQFYFKYGRPAPKDLKEQCLSRIDHLFFAGEGLQIQEFRSVTKDICKLPSFFSSVLFKKIDAAGSGTVTRLFKFYTLLHGEAISVLILFYLRGSLYLELNLLYLEVRDAFVDYWINDNKITMDTASQIFEILRKPDYNYLTQEDFKPVLKELLATHPGLEFLQGTPEFQERYAETVIYRIFYSINRAGNGHLTLRELKRGNLIAAMQQLDEEEDINKVLRYFSYEHFYVIYCKFWELDTDHDFLIDKENLIRYGNHSLTYRIVDRIFSQVPRKFTSMTEGKMGYEDFVYFILSEEDKSSEPSLEYWFKCIDLDGNGILTTTEMQFFYEEQLHRMECMAQEPVLFEDILCQMIDMIGPENECYFTLRDLKRCKLSGNIFNILFNLNKFMAFETRDPFLIRQERENPTLTEWDRFAHREYIRLSMEEDGEDASNGSGDVWDESLEAPF

SEQ ID NO: 682 - protein, 332 aa, Pisum sativum
MGGSSAPPSSTSSHNNSTFSPDFPSRIPLTSDQIKHCTEALALLKNKLLNPHTVSQKFFHLQSNRITLSETTKKCHVALNSANLSKNRYSDVIPFDKNRVVLKSSSDYRSEALGYINASKISTSSPGIVSEFIATQGPMPHTFEDFWEMMIQYHCPAIVMLTGLVDNYKTVKCGDYFQSEDRPREFGNISLTCKWTKTTKTSLVLRHLEVNRKEVEDTPLSVFHIQYPEWPDHGVPNNTLAVRAIWKRLYHLPPNLGPIVVHCSAGIGRTGTYCTIHNTIQRILAGDMSAIDIANTVSVFRSQRIGMVQTQDQYIFCYEAIIDELEDLVSQQ

SEQ ID NO: 683 - protein, 392 aa, Microsteira sp. Davis et al. 38-01
DLEPVNPADVPVTAAGALKSYKLAAKAISRLQSLPSGNISLLCDVLVKEVRDLTGYDRVMVYKFHEDEHGEVVSECRRSDLESYLGLHYPATDIPQASRFLFMKNKVRMICDCVAPPVKVIQDERLPQPLSLCASTLRSPHGCHAQYMTNMGIIASLVMSVTVNEEDDMVDGDQLQMARKLWGLVVCHHTSTRFVPFPLRYACEFLIQVFGVQINKEVELAAQVREKHILQIQTMLCDMLLRDAPVAIITQSPNAMDLVKCDGAALYFKNKTWLLGVTPTEEQIRDIAEWLLEYHSGNTGLSTDSLMEAGYPGASALGDTVCGMAAVSITSRDFLLWFRAHTAKEIKWGGAKHDPDDKDDGRKMHPRSSFKAFLEVVKWRSMPWEDVEMDAI

SEQ ID NO: 684 - protein, 209 aa, Rhodopseudomonas palustris
MASAIWYYTVLVAESVLGIVGLRLYEEPAYTVLDRPSDTIEIRRYAPRVAAEVDLERRGNADGQAFTLLFNYIAGANRGGSGTSERVAMTVPVDVARPAKIAMTAPVETATQDRMTRMRFFLPATFTADTAPKPSDERVQIVTVPEQTIATLRFSGTGRDLREREQQLIAALANTPWQPVGAPYGLFYDAPFTLPFVRRNEAAVEVAKR

SEQ ID NO: 685 - protein, 437 aa, Zea mays
MSFRSIVRDVRDGFGSLSRRGFEVKFLGHRRGRSHGAVHELRDPAPVIQSSCWANLPPELLRDVIERLEASEATWPNRKSVVSCAAVCRTWREICKEIVKNPEFSGKITFPVSLKQPGPRDVTIQCFIKRDKSTQTYYLYLCLSTAVLVESGKFLLCAKRTSRPTCTEYTIFMNSENLSRSSKMYIGKLRSNLLGTKFAIYDTQPPCNAAEPGKTSRRFYSRKVSPKVSSSTYNIAQVSYELNVLGTRGPRRMNCVMHSIPTSCLEAGGTVPSQLDSILARSTDESFGSISFSKSSVVDRSMRFSSSRFSDISMSSSRRIGDTASGDNDECKERPLILRNKAPRWHEQLQCWCLNFRGRVTVASVKNFQLVAATQPAAGAPTPSQATPVPPPEHEKVILQFGKVAKDMFTMDYRYPLSAFQAFAICLSSFDTKLACE

SEQ ID NO: 686 - protein, 161 aa, Oryza sativa
MAAPDVDYRCFVGGLAWATDNRSLEAAFSTYGEILESKIINDRETGRSRGFGFVTFSSEQAMRDAIEGMNGKELDGRNITVNEAQSRRSGGGGGGGYGQRGGGGGYGGGGYGGGGGGGGYGQRREGGYGGGGGYGGGRGGGGYGGGYGSRGGGNSDGNWRN

SEQ ID NO: 687 - protein, 493 aa, Xanthomonas axonopodis pv. citri str. 306
MYRMLKSLLRVKPIEPAGHVDAGEPVEGSLQGEATLQRTLTAKHLIMLGIGAVIGAGIFVLTGQAAANHAGPAVMLSFVFAGIACAFAGLCYAEFAAMMPVSGSAYSYSYATLGEGIAWFIGWCLVLEYLFAGSSVAVGWSAYLISFITGTLGLPFPAELAGAPLAWDGHGFVSSGNLVNLPAVLIVAAVSILCYVGVTQSAFANAIVVAIKVVVICLFVGFGIAYIDPANWHPFIPENTGPGQFGWDGVFRAASIVFFSYIGFDAVSTSAGETKDPQKNMPIGILVSLAICTIIYIIVCAVLTGLLPYTQLGTAKPVATALEAHPQLTWLKTAVEIGAIAGLSSVVLVMLMAQPRIFYTMAKDGLMPKLFGKVHPKFRTPYVGTLFVGVVAALLAGVIPLNVLGELVSMGTLLAFATVCAGVLVLRFTKPDLARPFRVPLAMVICPLGALACLFLFFQAFQEHWKVFVGWTVIGLAIYFGYGIHHSRLAKRA

SEQ ID NO: 688 - protein, 99 aa, Triticum aestivum
MLEGKATVEDTDMPAKMQLQATSAASRALDRFDVLDCRSIAAHIKKEFDTIYGPGWQCVVGCSFGCYFTHSKGSFIYFKLESLRFLVFKGMADEQPLPC

SEQ ID NO: 689 - protein, 353 aa, Catharanthus roseus
MMSRGATRISRSLICQISPRYFSSAAVRGHEPSLGILTSGGTTTFLHGNPGNGSERTALTWIKLPMMRARSASTVATVDQKDKDEKREDKNGVADGENGNKAVVSYWGVEAPKLTKEDGTVWRWTCFRPWETYKPDTDIELKKHHVPVTLLDKVAFFTVKALRWPTDLFFQRRYGCRAMMLETVAAVPGMVGGMLLHCKSLRRFEHSGGWIKALLEEAENERMHLMTFMEVSKPRWYERALVFAVQGVFFNAYFLTYLASPKLAHRIVGYLEEEAIHSYSEFLNELDKGNIENVPAPAIAIDYWQMPPDSTLRDVVMVVRADEAHHRDVNHYASDIHYKGLELKEAAAPLDYH

SEQ ID NO: 690 - protein, 540 aa, Triticum aestivum
MALYLLFESASGYALFHAHGIDEIGQSVDAVRSTVLDLKRFSKAVKLAGFTPFLSAVDALNQCNAISEGIMTDELRNFLELNLPKVKEGKKAKFTVGVMEPKVGSHITEATGIPCQSNDYVQELLRAVRLHFDQFIEQLKPSDLEKAQLGLGHSYSRAKVKFNVNRVDNMVIQAIFLLDTLDKDVNSFSMRVREWYGWHFPELVKIVNDNYLYAKLAKFVVNKSDLSEKDIPALADLIGDEDKAKEIVEAAKASMGQDLSPVDLINVQQFAQRVMNLSEYRKNLYEYLVTKMNDIAPNLTSLIGEMVGARLISHAGSLSNLAKCPASTLQILGAEKALFRALKTRGNTPKYGLIFHSSFIGRASTKNKGRMARYLANKCSIASRIDCYSDMSSSIFGEKLREQVEERLDFYDKGVAPRKNLDVMKAAIDGLTNTEDDDGKENGDTSVKKSKKKKSKAEANGDAMDVENAATEAETGTEKKKKKKHKLEEPKDEEMQANGDDETPKKKKKKNREAESVDPKTGTEGKSKKKKKKSKTDDDE

SEQ ID NO: 691 - protein, 222 aa, Picea mariana
MGRGKIEIKRIENTTNRQVTFCKRRNGLLKKAYELSVLCDAEVALIVFSSRGRLYEFANHSVKRTIERYKKTCVDNNHGGAISESNSQYWQQEAGKLRQQIEILQNANRHLMGDGLTALNIKELKQLEVRLEKGIGRVRSKKNEMLLEEIDIMQRREHILIQENEILRSKIAECQNSHNTNMLSAPEYDALPAFDSRNFLHANLIDAAHHYAHQEQTTLQLG

SEQ ID NO: 692 - protein, 161 aa, Xanthomonas campestris pv. campestris str. ATCC 33913
MTTLSTYQFTDLDGQPQSLAEYAGKVVLVVNVASKCGFTPQYAGLQALWQRYRDRGLVVIGFPCDQFGHQEPGDAADIRQFCSLDYAVDFPLAAKVEVNGSGAHPLWQWLKHEKRGVLGSEAIKWNFTKFLIGRDGSVLERYAPTTKPEALAADIERALGA

SEQ ID NO: 693 - protein, 160 aa, Oryza sativa
MAAPDVEYRCFVGGLAWATDDRSLEAAFSTFGEILESKIINDRETGRSRGFGFVTFSSEQAMRDAIEGMNGKELDGRNITVNEAQSRRSGGGGGGGYGQRGGGGGYGGGGGYGGGGGGGYASREGGYGGGGGYGGGRGGGGGYGGGYGRGGGNSDGNWRN

SEQ ID NO: 694 - protein, 400 aa, Pseudomonas chlororaphis
MEDLLKRVFSCVAFQQPQWSEPSQLHDAQAYLRDSASLIRVEDILVVRATLARVAAGEAMIIQSGDCAEDMDESTPDHVARKAAVLDILAGAFRLVTQQPVVRVGRIAGQFAKPRSNNNERIGDVELPVYRGDMVNGREAVCGHRQHDAQRLVRGYSAARDIMQHLGWKASAGQEQLIGSPAWTSHEMLVLDYELPQLRQDEQGRVFLGSTHWPWIGERTRQWTGAHVALLSEVLNPVACKVGPDITRDQLLSLCERLDSKREPGRLTLIARMGAHKVADRLPPLVEAVRQAGHKIIWLSDPMHGNTIVAPCGNKTRMVQAITEEITAFRHAVTSAGGVAAGLHLETTPDDVSECASDAAGLNQVASRYKSLCDPRLNPWQAITAVMAWKNQPSSTLASF

SEQ ID NO: 695 - protein, 228 aa, Zea mays
MAGTSSWSSSSSCASSFGSPDHDVVCVTEPDSVGAAGAVADAEGSVKFLCSYGGRILPRRTDGTLRYVGGDNRVLSVDRPIRFYVLQRKLRELCGGWEAHLRCQLPTEDLDALISVTCDDDLAKLLEEYDEASKDRLQSLKIRAFLFPTRTPAPSILQRRSPPSIAHLHWQNTSPPPAAAGVSLTCAPRWWAAPQASRQAQAPQAQNYDRHSLGEERPRLYYSYMPRT

SEQ ID NO: 696 - protein, 363 aa, Hirschfeldia incana
SSNKTLVSPGDVFELGFFKTTSSSRWYLGIWYKKVDFRTYVWVANRDNPLSSSIGTLKMSNMNLVLLDHSNKSVWSTSLTRGNERSPVVAELLANGNFVMRDSNNKDASGFLWQSFDFPTDTLLPEMKLGYDLKKGRNRFLTSWRNSDDPSSGEISYQLDTQTGMPEFYLLQSGVRVHRSGPWNGVRFSGMPGDQELNYMVYNFTENNEDVAYTFRMTNNSIYSILKTSSEGFLERLTWTPNSIAWNLFWSSPLENCDMYLICGPYSYCDVNTSPLCNCIQGFKPWNMQQWDLRDASVGVKRSTRLSCSGDGFTRMKNMKLPETKMAIVDRSIGVKECEKRCLMDCNCTAFANADIRNGGSGG

SEQ ID NO: 697 - protein, 366 aa, Zea mays
MAGPAPDRAALTVGPGMDMPIMHDSDRYELVRDIGSGNFGVARLMRDRRTSELVAVKYIERGEKIDENVQREIINHRSLKHPNIIRFKEVILTPTHLAIVMEYASGGELFERICKNVRFSEDEARYFFQQLISGVSYCHSMQVCHRDLKLENTLLDGSDAPRLKICDFGYSKSSVLHSQPKSTVGTPAYIAPEVLLKKEYDGKIADVWSCGVTLYVMVVGAYPFEDPEEPKNFRKTIQRILNVQYAIPDNVNISPECRHLISRIFVGDPATRITIPEIRNHSWFLKNLPADLMDDDSMSNQYEEPDQPMQTMDQIMQILTEATIPPACSRSINVLADGLDMDDDMDDLDSDSDLDVDSSGEIVYAM

SEQ ID NO: 698 - protein, 135 aa, Glycine max
  unsure (1)..(135): unsure at all Xaa locations
MLELRLVQGSLLKKVLESVKDLVNDANFDCSSTGFSLQAMDSSHVALVSLLLRSEGFEHYRCDRNLSMGMNLGNMSKMLKCAGNDDIITXKADDGGDTVTFMFESPTQDKIADFEMKLMDIDSEHLGIPDAEXHS

SEQ ID NO: 699 - protein, 133 aa, Glycine max
MAATSGLTATVTSPPAALRTSPPPVLFLRPISRCSRLHSLKAKAAAKDQDEKKPEATKKKAYSLVCTACEGNGAIACTQCKGGGENLEDHFGGRFKAGGLCWLCRGKREILCGSCNGAGFLGGFMSTADDTSE

SEQ ID NO: 700 - protein, 136 aa, Glycine max
PPRIFGALGEYAKVNLFFLGGAIAPFLVWLAPKAFPKQKWIPLIPTPVLLGAPSIIPPPPPVNFPSWKLVGFFSGSIAFRSPQKWWKPSNYVLFGGFNAGTPFMPILLFFALTKNNIMFNWWGNTPKGCPLANFPP

SEQ ID NO: 701 - protein, 446 aa, Campylobacter jejuni subsp. jejuni NCTC 11168
MWAKNSWKNYPIKQQPIYPDQEEMNRVLARLEKLPPLVFAGEVRNLQKSLARVCKKEAFLLQGGDCAESFENFGAVNIRDMFKILLQMAIVLTFAGGCPVIKIGRIAGQFAKPRSSDFEELDGISLPSYRGDIINGFEFSEQARIPDPHRMLEAYYQSAITLNLLRGFAKGGLADLHEVHRWNLGFLKKSELHKQYTDISEKISQALAFMEACGINTSNTPSLREVSVYTSHEALLLPYEEALTRVDSLSGEIYDCSAHMLWIGERTRALDEAHVHFLSGVKNPLGVKIGPSASADDIIALANVLNPNNEEGRLNIIIRMGADKIINNLPKIFSKLKSEGLNLVYSIDPMHGNTVKAGNFKTREFDKIMQEVRSFFEIAISEGVYPGGVHLEMTGKDVTECTGGASNVTAQSLEDRYETQCDPRLNADQALELAFLIADLVKKTRK

SEQ ID NO: 702 - protein, 391 aa, Zea mays
MPSASANLRLLPDQLTSAPFTPHLLLRRRLPLLRLAWPWPPPALRSHAAMERYEVIRDIGSGNFGVTKLVRDVRTKELFAVKFIERGQKIDEHVQREIMNHRSLKHPNIIRFKEVVLTPTHLAIVMEYAAGGELFERICSAGRFSEDEARFFFQQLISGVSYCHSMQVCHRDLKLENTLLDGSVAPRLKICDFGYSKSSVLHSQPKSTVGTPAYIAPEVLSRKEYDGKVADVWSCGVTLYVMLVGAYPFEDPDDPKNFRKTITRILSVQYSIPDYVRVTMECGHLLSRIFVGNPEQRITIPEIKKHPWFLKNLPIEMTDEYQQSMQLADMNTPGQSLEEVMAIIQEARKPGDAMNLAGQLPCLGSVDLDDIDFDDIDDIDTENSGDFVCAV

SEQ ID NO: 703 - protein, 284 aa, Bacillus halodurans
MTIQWFPGHMAKARREVTEKLKLIDVVIELLDARVPLSSRNPMMDEIVAHKPRLVLLNKDDLADPSKTKEWTRFFEEGGATVLPINAQTGQGVSRISPACQTLAQALIEKQRAKGMKPRAIRAMILGIPNVGKSTLINRLASKRIAKVGDRPGITKQQQWIKVGKELELLDTPGILWPKFDDQATGFRLAATGAIKDELLDFQDVALFVLRYMREMYPDRLMDRYKLNELPEDGVTLFDAIGKKRGHLLSGGYIDYDKTAEMILRELRAGTLGRITLEVPGKTV

SEQ ID NO: 704 - protein, 432 aa, Prochlorococcus marinus str. MIT 9313
MASSDDAKLRPLPNTAALSGVLEAFAFFRDPAFAQKRFERHGNVFETSLLGQPMVFIQGGQAIRDLLAQPNAVEGWWPESVRQLLGSHSLANRNGASHRARRRVIGQLFSASALQRYSAGIISMVQDLADELQAAKTALPLAERMRRFAFSVIATTVLGLEGTDRDELFVDFEIWTRALFSIPIALPGSSFAKALKARERLLRRLQKVLLKASNGNGGLDLLAGGLDEAGIPLTDEDMVEQLLLLLFAGYETTASSLSCLMRELLLNPQVETWLREEINGVDWPPAPEQATTAYDQVNAPKLDAVVSEVMRLTPAVGGFFRRTKCALVIDGVEVPKNRVVQVALAASNRHGAGDLEAFRPQRHLEDGCSATLLPFGGGERVCLGKPLAELEIRLMVVGLFHQLRLHLIPDQDLTLQMLPSPTPRDGLLTKVL

SEQ ID NO: 705 - protein, 449 aa, Burkholderia fungorum
MRHRRSNGIWSPASCRTTICSRSHEASRGRSPPIRLTLCGWPSGCCAKACIAGWIRCWKCRRLIRRFRIRRRTIARPCPRSSGNGRRRSMDRAAADSLACEGTREASIPQRFRTRITDCFGIRHPILLGGMHHLGESGIVAAVVNAGAMGFITARSFSSTDALRGDLRRCRALTGGRPFGVNLTLSRRAEQNREVADWIRTALEEGVRHFESAGASPEQLVEPIQRGGGLLIHKCPSVRHAVSAQRLGVDALALVGLEEGGHPGANQLSAFVNGAYALEEIHIPLVIGGGIGNGRQIAAALALGADGVVMGSRFMVATEIVAHDALKQRIVAAGAHCSTAILASLGDTWRVMDNEAAREVQRLEAAGARRHSEFGDLILSSRTRQRVYRDGEVEAGIVSLGPAGGFADAIVPAAQIVGQLIGEAAQAAHAFARRVVDADASCPATGAVS

SEQ ID NO: 706 - protein, 897 aa, Rhodospirillum rubrum
MGFPVNHGNRGTNREAGTNPVRSAWRFQAGTGMCPCGLGAAMDTVHSTCDQEPIHVPGLVQPHGFLVVLDSKSGRIAQVTPGIEAVAGVVAQRLIGEPLERVLDPRSAQRCRHRIARPEYPHLIDPFPVRAPGGQSFSAVAHATDQADLVELWSDDQETTVEGVFGRLPFAIGHASRAASIEDLCGRAAATVADLTGYERVMVYRFAENWEGEVIAETLNGPVESYKGQRFPASDIPAQARALYSRNLLRSIPDVHYRPLPLVGRSPDGRELDMTFCNLRSVSPVHLEYLRNMGVAASFSVSLVVDGRLWGLVACHDRVPRRLSLATMGACQVYAETIAQQVLRLDNTRRSRHRSRTGDLIDDISVLLGSGRSLAEALDYTLDDTLALFGASRAVISLDGRQWTAEGPLEGAPIQVPPHQRLLLSERLGGRLRLPAELAGSFVGGVLLPLSDQPDRDFLLLGRPETLRSIEWAGRPEKQPEITPEGGLKIHPRTSFSLWREEVRGRSVAFDPLDRETAETLSLFLAERLAKQRRQQAVVALEETRQRLRDLAECSSDWLWETTGDGTLALVSDRINGLGDLRPEELVGRKLVDLVGGGDSGGAPGVDADEIASAFDEGRAFHGLTVSLALLGRGQWWVRLSGVPQYDGRGQLLGFRGTGTDVTPFKRLQEERVRTQRLEALGRLAGGIAHEIGNVLQPVLTMAHYASKRLDDRDFLEAALADICEGGARAKDIVRSVLTFARQTPAERRPLVLAPALARSVAFAAKGHPGLEIITDIPDTAGEIAANSTELSQIVLNLVGNAADAMGGRGRVFVSLAEAPDLGRMVITIRDEGPGMTLQTQARVFEPFFTTKPEGSGTGMGLAVVHGLVEAWGGTIGLESAPGSGTKFVISFPINNP

SEQ ID NO: 707 - protein, 993 aa, Oryza sativa
MGTLNMLGLAKRIGARFLLTSTSEVYGDPLEHPQKETYWGHVNPIGVRSCYDEGKRTAETLTMDYHRGGGVEVRIARIFNTYGPRMCLDDGRVVSNFVAQALRRQPMTVYGDGKQTRSFQYVSDLVAGLMALMEGDHIGPFNLGNPGEFTMLELAQVVKETIDPMATIEFKPNTADDPHMRKPDITKAKHLLRWEPKVSLREGLPLMVKDFRQRILDDCSDNGETGGAVVPSCPSDHRDVRLFLVVAMDPEEPDAILLAVAGKQGRHCHNTAIVVILQAGDENSLKLPSQWHPELFLAVEPLVDDGRRAGLERSRPRQDAQPAAGVVADWAVAGEDGVLRRRNAGSFCRRGYGGVERHGLVGAMGGERGFVARRPAAGCRVYRGQQERECNAGLGEDATTRWTRFPIASRLGHTFEERPKVDAVLGGVQPGAPHPARFGCSSVLSTTICHGTRRNAITGFPLLGPNVWIVIGEWRGNSLTSSSQQRRLRHPETPNTRSILAGHMTHANQRSPPFPNLLRRERVGETSSGGGGACSAAAMRIEEVQSAAKKQRIATHTHIKGLGLDANGAAIGLASGFVGQAAAREAAGLVVDMIRQKKMAGRALLLAGPPATGKTALALGISQELGSKVPFCPMVGSEVYSSEVKKTEVLMENFRRAIGLRIKENKEVYEGEVTELSPEEAESTTSGYGKSISHVIIGLKTVKGTKQLKLDPTIYDALIKEKVAVGDVIYIEANSGAVKRVGRCDSFATEYDLEAEEYVPIPKGEVHKKKEIVQDVTLHDLDAANAQPQGGQDILSLMGQMMKPRKTEITDKLRQEINKVVNRYIDEGIAELVPGVLFIDEVHMLDIECFSYLNRALESPLSPIVILATNRGICNLRGTDMTSPHGIPVDLLDRLVIIRTETYGPTEMIQILAIRAQVEEIEIDEESLAFLGEIGQQTSLRHAIQLLSPASVVAKANGREKISKADLEEVSGLYLDAKSSARLLQEQQERYIT

SEQ ID NO: 708 - protein, 477 aa, Bradyrhizobium japonicum USDA 110
MTGTPSIQKLSLFALTAMVVGSMVGSGIFSLPRTFGIATGPFGAIFAWCIAGGGMYTLARVFQALAERKPELDAGVYAYAKEGFGDYPGFLSAFGYWIGSCIGNVSYWVLIKSTLGAFFPVFGDGNTVTAIIVASIGIWLFHFMILRGVQQAAAINTIVTVAKIVPILVFIVILIFSFNADMFRGNFWGGEGMPDKGLFEQIRATMLVTVFVFLGIEGASVYSRYAKERAHVGAATLLGFAIVTSLMVLVTMLPYAVLLRAEIAGMRQPSMATVLEAVVGHWGAIFVSIGLLVSVLGAYLAWSLICAEVLSAAGRTRDMPALFGTENANKVPAAALWLTNVIVQLFVISTYWSQDAFALMLNLTSVMSLIPFFLVAAYGLLLVRRGETYEKSGSERTRDTIFAGIAVIYTLFLIYSAGMKFLLLSLILYAPGTALYFWARLEQKARVFTAVEWGIFIAAAVGAAVGIHGLATGYITI

SEQ ID NO: 709 - protein, 136 aa, Triticum aestivum
MSILWEKSPAWRWLVGRTRDSKPFFFTFAALCGVVPGVVGYGVMQLTSSRNDKLEAHLRSNARPETTMMGQVNRERLAEFLGEIQRKENTNDRYVAALKGETLTRKRYERIQPVPQQAAQENAKDQKATQENAKAK

SEQ ID NO: 710 - protein, 305 aa, Miscanthus sinensis var. sinensis
IESVGEGVTDVAPGDHVLPVFTGECKECAHCRSAESNMCDLLRINTDRGVMIGDGKSRFSINGKPIYHFVGTSTFSEYTVMHVGCVAKINPQAPLDKVCVLSCGISTGLGASINVAKPPKGSTVAIFGLGAVGLAAAEGARIAGASRVIGVDLNPSRFEEARKFGCTEFVNPKDHKKPVQEVLAEMTNGGVDRSVECTGNINAMIQAFECVHDGWGVAVLVGVPHKDAEFKTHPMNFLNERTLKGTFFGNFKPRTDLPNVVELYMKKELEVEKFITHSIPFAEINKAFDLMAKGEGIRCIIRMEN

SEQ ID NO: 711 - protein, 338 aa, Synechocystis sp. PCC 6803
MATQQTILVTGGAGYIGSHGVLALQQAGFDVLIYDNLSYGHKELVQPLGVELVVGHTGDRQKLDQLFATRNIAAVMHFAAFIAVGESVQKPDIYYQNNVVGTLTLLEAMLAAGIKKFVFSSTCAVYGMPKEIPMTESHPIDPLSPYAASKRMVEQILADFDQAYGFKSVIFRYFNASGADPQGRLGEDHNPETHLIPLALLTALKQRPQLSVFGTDYDTLDGTALRDYIHVCDLAIAHVLGLQYLLEGGESNIFNLGNGNGFSVRQVIEVAKAVTGLDIPYQLCPRRPGDAPILVGSSAKAREILGWNPQYPDLHTIIDHAWQWHQRRHGDYKKSNKI

SEQ ID NO: 712 - protein, 275 aa, Glycine max
  unsure (1)..(275): unsure at all Xaa locations
RYEIVNGVVEVEGVTNVAXPXEANKXAXNKXXPXFWLTAMKTNGSLAEEITERDEGSLKYLKDIKWCRIDDPKGFKLEFYFDSKPYFKNSVLTKTYHMIEDDDPISEKAIGTEIEWHPGKCLTQKILKKKPSKGSKNAKPITKTEKCESFFNFFNPPQVPEDDDDIDDDAVEELENLMEHDYDIGSTIRDKIIPHAVSWFTGEAAQSDFEDIDEDDYEDEEGDDDDDEDEDEDEDGEDEEEKKGKSKSRSNLQSGGRAIPGKDQPMERPPECKQQ

SEQ ID NO: 713 - protein, 392 aa, Dinemandra ericoides
DLEPVNPADVPVTAAGALKSYKLAAKAISRLQSLPSGNIPLLCDVLVKEVRDLTGYDRVMVYKFHEDEHGEVVSECRRSDMESYLGLHYPATDIPQASRFLFMKNKVRMICDCLSPPVEVIQDERLPQPLSLCGSTLRSPHGCHAQYMANMGTIASLVMSVTVNEDDDMMDGDQQRMARKLWGLVVCHHTSPRFVPFPLRYACEFLIQVFGVQINKEVDLAAQVREKHILRIQTMLCDMLLRDAPVAIITQSPNVMDLVKCDGAALYYKNKFWLLGVTPTEAQIRDIAEWLLEYHRGNTGLSTDSLMEAGYPGASVLGDAVCGMAAVSITSRDFLFWFRSHTAKEIKWGGAKHDPGDKDDGRKMHPRSSFKAFLEVVKWRSLPWKDMEMDAI

SEQ ID NO: 714 - protein, 94 aa, Emericella nidulans
MASEKKDKLEPQIKSVDMSEDMQQEAVEVAIEAMEKYHIEKDIAQYIKREFDSRKGATWHCVVGRNFGSFVTHETKHFIYFYLGHCAILLFKTQ

SEQ ID NO: 715 - protein, 504 aa, Glycine max
MVIIIKYYTYIYIPTIEKSEQNPTKAAMAAMQRPLKRTIAIAKQRACFSSLLPSAAAAAAADTVAPPQLPPFDHQPHPYNGPSADEVFAKRKTFLGPSVFHYYKKPLNIVEGKMQYLYDDSGRRYLDAFAGIVTVSCGHCHPEILNAITEQSKLLQHATTIYLHHTIGDFAEALAAKMPGNLKVVYFVNSGSEANELAMMMARLYTGNLGMISLRNAYHGGSSSTLGLTALNSWKYPIPEGHVHHVMNPDPYHGAFGTDAASYANDVQDHIDYGTSGKVAGFIAESIQGVGGAVELAPGYLKLVYDIIHKAGGVCIADEVQTGFGRTGSHYWGFETQGVIPDIVTMAKGIGNGLPLGAVVTTPEIASVMAQKIQFNTFGGNPVCSAGGLAVLRVLDKEKRQAHCADVGSYLLERLRFLMERHDIIGNVRGRGLMVGLELVTDRTNKTPAKAETAVVFEKLRELGVLVGKGGLHGNVFRIKPPMCFSKDDADFLVDALDYSLSKL

SEQ ID NO: 716 - protein, 563 aa, Triticum aestivum
  unsure (1)..(563): unsure at all Xaa locations
MLPPGAELELHERTPSSSSRHARLTGALLSMQASSRSSSMERTSQWLSSQDVQTDLVVRVAGAAFPLHKAVMVPKCGYIRKAVAVATRPDPAATVEIELDGLPGGADAFEKAARYCYGANFEISARNAAALLCAAAFLDMQPADGGLARRVEEFLAQAGLRTLPNAIAVLRSCEGPLLTAAEELGVARRAADAVALRICNEVLFPTRSPPEWWASELAALSPVSFHRVFTALRCRRAGPEVLVAAATAYAELLLADGKASDHRALLESVVAVLPSADDAPLPXSXFLCRLLHDAVTTEASAKTCRDLELRLAAVLDQATAGDLLAFAFDGAGERVINTESLRRVIAAFVERESGAGRNRRASLSGAAALGAGALQKVAKMVDEVAAEIATDESLPISKFVGVAGAVPKDARXPPHDCLYRAVDIYLKAHPKLDEIEREKVCSVMDTLKLSYTARIHASQNKRLPLQAVLSALYYDQLKLRSAGVGHDDEDSDARSEAGSARMQAKADAALARENEALRSELARMRAHMSSGVQQSKGSGSRTAARRRRWRGRKRASSGRCRAR

SEQ ID NO: 717 - protein, 187 aa, Oenococcus oeni MCW
MFVLSSFQIGQQMIKLVFPEEKQAEELFEIIETDRKALSEWMPWTKNVKSKKDEIEFINYAREKNAKYQLLELAIIAGNQPIGMIDLHSIDRDDRRAEVGYWMFSKYQGKGIMTESLKHLLSIAFNELDLNKIIVMADSKNEKSRAIPQRLGFRQEGTLKEEIFMNKQFRDLDVFAITTSEYKIKNS

SEQ ID NO: 718 - protein, 326 aa, Arabidopsis thaliana
MAAKALKDLKNLPVSERNIDYKTKLLVGKMNGTAEDKPPQNSVPFDHNHPKGDEIEKPEAERVIVEIEYIESKDLNNVTQVDAVLKSLVTELDSKDWVLVCDALNTIRRLSIFHKEEMLHMLEKVILFIVKSLKNPRSAVSKTACMTSADIFSSYNDHTIDQLDLLLTQLLLKSSQDKRFVCEAAEKALVAMTAHVSPALLLPKLQPFLKNRNPRIRAKASTCFSRCVPRLGIEGIREYGIEKLVQAASSQLSDQLPESREAARAVLLELQTVYKKTTNVEPKEEHPEPVTWQIFCQSNLSPLSAQAVIRVTNVAGVAREGLVAGS

SEQ ID NO: 719 - protein, 469 aa, Listeria innocua
MDMTNWLQKRVRLSPGETALVFEGKQETFEEIYEAVEKLAGKLFARGIRKDEMVALLGKNDRMTFLLIHALQQLGAITLFLNNRLTKKEITFQLANAEVKQVIVADAFVDKVTSGISYEELQQTTYVEPDLCKTWDLSRTASVMYTSGTTGKPKGVMQTYENHWWSAVSSVLNLGLTEKDSWLCAVPIFHISGLSIMMRSVIYGIPVYLEEHFDEEKITQLLESGKISTISVVTSMLERLLKIQGGSYHPNVRTVLLGGGPANKAVLEICKQRDIPLVQSFGMTETASQIVTLPPKDALNKIGSSGKALFPAEVKIADDGEILLKGPSITPGYLHNEKATAKAFIDGWFKTGDIGYLDEEGFLFVLERRSDLIISGGENIYPTEIEHVIGAYEAVEEVAVVGKSDAKWGSVPVAFIVVNEGFDEGVLKDICQTNLASFKIPKQITIVEHLPKTASGKIQRNKLKERHSN

SEQ ID NO: 720 - protein, 346 aa, Glycine max
MESATWRNPLPLSTLTSPSHLRHPSPYKFSTLHAFPLSSLSSSFSFHPFPLHLTPSLSPFSPKPISFNPLRPLPRTMHATRIQDAVGGALALVQSSPATWQSALLSNALIFLLGSPILVSGLSLSGIGAAFLLGTLTWRAFGPSGFFLVATYFVIGTAATKVKMAQKVAQGVAEKRRGRRGPGSVIGSSAAGCICAFLTIFGVGGEAFSRLWRLGFVASFCTKLSDTVSSEIGKAYGKTTYLVTTFKIVPRGTEGAVSVEGTLAGILASIVLAFVSFLIGEVGSHEAIICVLAAQIANLGESIIGAALQEKEGFKWLNNDAVNVINISMGSIIAVFMQQALQIWGS

SEQ ID NO: 721 - protein, 342 aa, Glycine max
MADLKSTFLNVYSVLKSELLHDPAFEFSDDARNWVDRMLDYNVPGGKLNRGLSVIDSYRLLKEGQALNDDEIFHASALGWCIEWLQAYFLVLDDIMDNSHTRRGQPCWFRVPKVGMIAANDGVLLRNHIPRILKKHFRGKPYYVDLLDLFNEVEFQTASGQMIDLITTLEGEKDLSKYTLTLHRRIVQYKTAYYSFYLPVACALLMAGEDLDNHVDVKNILVEMGTYFQVQDDYLDCFGDPQTIGKIGTDIEDFKCSWLVVKALELSNEQQKKVLHENYGKADPENVAKVKALYNELNLQAVFEEYENGSYAKLVSSIEAHPSKAVQAVLKSFLAKIYKRQK

SEQ ID NO: 722 - protein, 235 aa, Glycine max
MSLFGAYSICEVGKDAAGVAGNIFAFGLFVSPIPTFRRIIRNGSTEMFSGLPYIYSLLNCMICLWYGTPLISPDNLLVTTVNSIGAAFQLVYIILFLMYAEKARKVRMVGLLLAVLGIFVIILVGSLQIDDSAMRRMFVGFLSCASLISMFASPLFIIKLVIRTKSIEFMPFYLSLSTFLMSFSFFLYGLLSDDAFIYVPNGIGTVLGIIQLVLYFYYKGSSSEECREPLIVSYE

SEQ ID NO: 723 - protein, 1146 aa, Populus balsamifera subsp. trichocarpa
MASQSQRQSNQPVHNQAQSSGTSNMRQHHHATESVSKAIAQYTVDAQLHAVFEQSGGTGRSFDYSKSVRTTNQSVPEQQITAYLSKIQRGGHIQPFGCMIAADEQSFRVIAYSENAKDMLGLTPQSVPSLEKQEILFVGADVRILFRPSSAVLLEKAFGAREITLLNPIWIHSKNSGKPFYAILHRIDVGIVIDLEPARTEDPALSIAGAVQSQKLAVRAISQLQSLPGGDIKLLCDTVVDSVRELTGYDRVMVYKFHEDEHGEVVAENKRVDLEPYIGLHYPSTDIPQASRFLFKQNRVRMIVDCHAIPVRVIQDEALMQPLCLVGSTLRAPHGCHAQYMENMGSIASLAMAVIIYGNDEEAIGGRNSMRLWGLVVCHHTSARCIPFPLRYACEFLMQAFGLQLNMELQLASQLLEKHVLRTQTLLCDMLLRDSPTGIVTQSPSIMDLVKCDGAALYYQGQYYPLGVTPTETQIKDIVEWLLTLHGDPTGLSTDSLADAGYPGAAFLGDAVCGMAVAYIAERDFLFWFRSHTAKEVKWGGAKHHPEDKDDGQRMHPRSSFKAFLEVVKSRSLPWENAEMDAIHSLQLILRDSFRDAEATNSKAVVHTQLKDMELQGMDELSSVAREMVRLIETATAPIFAVDVDGRINGWNAKVAELTGLSVEEAMGKSLVHDLVYKEYEEIVDKLIHRAVKGEEDKNVEIKLRTFCSEHQKKAVFVVVNACSSKDYMDNIVGVCFVGQDITGQKVVMDKYVLIQGDYKAIVHSPNPSIPPIFASDENTCCLEWNTAMEKLTGWSRGEVVGKMLVGEVFGSCCRLKGPDALTKFMIALHNAIGGIDTDKLPFSFFDRNEKNVQTLLTANKRVNMEGDIIGAFCFLQIASPELQQTLKVQKQQEKKSFARMKELAYICQEIKNPLSGIHFTNSLLENTDLTEDQQQFLETSAACEKQILKIIRDIDLESIENGSLELEKAEFLLGSVINAVVSQAMLLLRERNLQLLRDIPEEIKTLAVYGDQARIQQVLADFLLNMVRYAPSSAGWVEIHVCPTLKQISDGHTLVHTEFKYLERVLQTRMLGLQHPLRSFLNFKLTLVMLHREGMVPKIQFQGLSVCQGRLIWLSYPENTTVTLYPLTIWFLLLYRRQSRSITHT

SEQ ID NO: 724 - protein, 133 aa, Glycine max
PTVAAIEAGKDIALANKETMIAGAPFVLPLAHKHNIKILPADSEHSAIFQSIQGLPKGALRKILLTGSGGAFREWPAEKMKDIKLADALKHPIWSLGRKITIDSATLFNKGLEVIKCLLKKRLVIWIYSRLWN

SEQ ID NO: 725 - protein, 192 aa, Caulobacter vibrioides
MARPAGYSAQRALVEAVLAGAEQAPFSNYRTAYGKPMSVAMTALGSLGWTSDARGYRYVDRHPETGRPWPDMPPALLDLWTVLGDPETPPDSCLVNLYATGARMGLHQDRDEADPRFPLLSISLGDTAVFRIGGVNRKDPTRSLRLASGDVCRLLGPARLAFHGVDRILPGSSSLVPGGGRINLTLRRARTA

SEQ ID NO: 726 - protein, 838 aa, Streptomyces narbonensis
MHQAQREKSTVTGKTRIPRVRRSRTTPRAFTLAVVGTLLAGTTVAAAAPGAAGTGHVQYTSKAAELVAQMTLDEKISFVHWALDPDRQNVGYLPGVPRLGIPELRAADGPNGIRLVGRTATALPAPVALASTFDDSMADSYGRVMGRDGRALGQDMVLGPMMNNIRVPHGGRNYETFSEDPLVSSRTAVAQIKGIQGAGLMTTAKHFAANNQENNRFSVNATVDEQTLREIEFPAFEASSKAGAASFMCAYNGVNGKPSCGNDELLNNVLRTQWGFQGWVMSDWLATPGTDAITKGLDQEMGVELPGDIPPGEPSPPAKFFGDALKQAVLNGTVPEAAVTRSAERIVNQMDKFGLLLATPAPRPERDKAGAQAVSRKVAENGAVLLRNEGQALPLAGDAGKSIAVIGPTAVDPKVTGLGSAHVVPDSAAAPLDTIKARAGAGATVTYETGEETFGTRIPAAQLSPAFNQGHQLEPGKAGALYDGTLTVPADGEYRISVKATGGYATVQLGSHTIEAGQVYGKVSSPLLKLTKGTHKLTISGFAMSATPLSLELGWVTPEAADATIAKAVESARKARTAIVFAYDDGTEGVDRPNLSLPGTQDKLISAVADANPNTIVVLNTGSSVLMPWLSKTRAVLDMWYPGQAGAEATAALLYGDVNPSGKLTQSFPAAENQHAVAGDPNRYPGVDNQQTYSEGIHVGYRWFDKENVKPLFPFGHGLSYTSFTQSAPTVVRTSTGGLKVTVTVRNSGQRAGQEVVQAYLGASPKVTAPQAEKKLVGYTKVALAAGESKTVTVNVDRRQLQYWDAASDSWRTGTGSRLLQTGSSSADLKNSSQVTVW

SEQ ID NO: 727 - protein, 172 aa, Magnetospirillum magnetotacticum
MSGTILAFQGVSPTIAPDVFVAPTAVVIGDTVIGAGTSVWFNCVIRGDVHEIRIGERTNIQDGTIIHVTGGKLGTYIGSDITIGHGAILHACTLEDGCFVGMGAVVLDGAVVETGGMVAAGAVVTPGKRVKKGELWGGNPARMLRSLSDEEMAFFPVSAEKYAELAAKYFKA

SEQ ID NO: 728 - protein, 168 aa, Zea mays
MAEKKMVTLRSSDHEEFEVEEAVAMKSEIIRLLIEDDCADNAIPLPNVDSKTLALVIEYCNKHVHAAAADDSAAAETSNASSAAGGGDVDLKKWDAEFVKVEQATLFDLILAANYLDIKGLLDLTCQTVADMMKGKSPEEIRRTFNIKNDFTEEEEEEIRRENSWAFD

SEQ ID NO: 729 - protein, 175 aa, Lavatera thuringiaca
ECDPQQYGACNAGCSGGLMTSAFEYTLKAGGLEREEEYPYTGIDRGGCKFDKTKIAASVSNFSVISVDEDQIAANMVKHGPLAVGINAAFMQTYIGGVSCPYICFRSLDHGVLLVGYGAAGYAPVRFKEKPFWIIKNSWGANWGEDGYYKICRGRNVCGVDSMVSSVAALQTKSQ

SEQ ID NO: 730 - protein, 407 aa, Neurospora crassa
MAEPIRNKRADPPIAPTPQNTPLNTAPISSHAQQPGVASIKEEDLDRAAAASIFAKDPRLVSLIQGRLGSLVGRSSGYIESLPTDVKRRVAGLKGIQKEHSKLEAEFQEEVLQLEKKYFAKFTPLYQQRAAIVNGQTEPTEDQVQAGEEDEEEEDEETEAAPQEEKATESAEKVSGIPEFWLSAMKNQISLAEMITDRDEEALKSLTDIRMEYLDKPGFRLIFEFAENEYFTNKTITKTYYYQNESGYGGDFIYDHAEGDKINWKEDKDLTVRVEQKKQRNKTTKQTRIVKKTVPTESFFNFFSPPKAPTDDDESTTSDIEERLELDYQLGEDIKEKLIPRAIDWFTGEALAFEELDEEDFEDAEFDDEDDEDDEDASEDQDDEDESDEDDEDGSKPKQEAAECKQS

SEQ ID NO: 731 - protein, 326 aa, Streptomyces coelicolor A3(2)
MTWLITGGAGYIGAHVVRAMTEAGEKAVVYDDLSTGIAERVPDGVPLVVGSVLDGERVARALADHSVTGVVHLAAKKQVGESVDLPLHYYRQNVEGLRVLLDAVTAAGVPSFVFSSSAAVYGMPDVDLVTEETPCVPMSPYGETKLAGEWLVRATGRATGLATASLRYFNVAGAASPDLVDTGVYNLVPMVFEKLTESAAPRIFGDDYATPDGTCVRDYIHVVDLAEAHVAAARALQSSPGTALTLNIGRGEGVSVREMIDRINAVTGCDQPPTVTPRRPGDPARVVASADRAAVELGWKAKYDVEDMITSAWAGWVRLHPEAARD

SEQ ID NO: 732 - protein, 161 aa, Oryza sativa
  unsure (1)..(161): unsure at all Xaa locations
MAAPDVEYRCFVGGLAWATDDRSLEAAFSTYGEILESKIINDRETGRSRGFGFVTFSSEQAMRDAIEGMNGKELDGRNITVNEAQSRRSGGGGGGGYGQRGGGGXYGGGGYGGGGGGGGYGQRREGGYGGGGGYGGGRGGGGYGGGYGSRGGGNSDGNWRN

SEQ ID NO: 733 - protein, 261 aa, Streptomyces sp. WP 4669
MSDKHERVALVSGATSGIGLAAARLLAQQGHRVFLGSRDADNVARTVKELTAEGLDVDGGTLDVRSALSIESFVQAAVDRFGPVDVLVNNAGRSGGGVTADIDDELWYDVVETNLNSVFRLTRAVLTTGGMRHKNRGRIINIASTAGKQGVVLGAPYSASKHGVVGFTKALGNELAPTGITVNAVCPGYVETPMAQRVRAGYAAAYDTTEDAIMEKFTAKIPLGRYSTPEEVAGLVGYLASDTAASITAQALNVCGGLGNF

SEQ ID NO: 734 - protein, 247 aa, Oryza sativa (japonica cultivar-group)
MAGNRGGDAGEGEWLKVAELRATVEAQDPHAKEVDNLTLRRFLRARDHNVEKASAMLLKALRWRREAVPGGSVPEEKVQSDLDDDKVYMGGADRTGRPILLAFPAKHFSAKRDMPKFKSYCVYLLDSICARIPRGQEKFVCIVDLKGWGYSNCDIRAYIAAIEIMQNYYPERLGKALMIHVPYMFMKAWKMIYPFIDNVTRDKFVFVDDKSLQEVLHQEIDDSQIPDTLGGKLAPVSLKNNARINLD

SEQ ID NO: 735 - protein, 1007 aa, Zea mays
MARLVLSECCGLAPLRLRAGRGAIAAPSPPALSAAAAPGRPAPAAIHRDWALRVSAPTRLTSAVEEDKRSSPLGEGDEHVAASGAAGGEFDPGAPPQFGLAEIRAAIPKHCWVKDPWRSMAYVLRDVVVVLGLAAAAARLDSWLVWPLYWAAQGTMFWALFVLGHDCGHGSFSNNPKLNSVVGHILHSSILVPYHGWRISHRTHHQNHGHVEKDESWHPLPERLYKSLDFMTRKLRFTMPFPLLAFPLYLFARSPGKSGSHFNPSSDLFQPNEKKDIITSTASWLAMVGVLAGLTFLMGPVTMLKLYGVPYFVFVAWLDMVTYLHHHGHEDKLPWYRGQEWSYLRGGLTTLDRDYGLINNIHHDIGTHVIHHLFPQIPHYHLIEATEAAKPVLGKYYKEPKKSGPLPWHLFGVLAQSLKQDHYVSDTGDVVRAVPEDLASLLRPLIGVCVTGFVNSRIVAIKKLRSNRCGRACRVPAGGGLVGVAGRQGLASWGSPEVGALAAGAWGRADEGAERRPALARTAVGLRGGRPGGWGVGLGGCLRLGPGGQPARAGLGGWGRRVTGSMGHGLTEEELDQEIRNMEIIHQQVQRKKEKMARLADLQRQIDEAIEEVRHLTQDEQDRRLQHRELHQEGLFNEDGWYDDFNHDTFTFDDASPLAAELQAIPWPPSYKPPQLPMYDGHSDPKQFLMSYEATISSYGGNAAVMDKSFVMAVRNVAQTWYFSLRPGTITSWQKLKDMLVTSFQGFQTKPVTAQALFQCTQDHEEYLQAYVRRFLRLRAQSSTVPNEIVIEAMIKGLRPGPTAQYFARKPPQTLEKLLQKMDEYIRADNDIHQRREEAYRFSEMTRGFGGRIHPRHIRSIHNSTQSDDRGSQLQRPQYTSQSSGQQQSSFRLPAPRGRGARGFGRRYGDQPRKIYCLFCGEDKGHTTRMCQITIQKQKEIAEVEARQSQPKQVLLLGHSFHLRHHYNLPIHEISVKKFPPIKLASAEGSFVSSTEKAALAWAKVLT

SEQ ID NO: 736 - protein, 91 aa, Oryza sativa
  unsure (1)..(91): unsure at all Xaa locations
XKICDAVEVAGTNVLSTSSTVTTGLVSHKYGEKAAAATNEGMDAAGHAIGTAWAVFKIRQALNPKSVLKPTSLAKSTIKAAAADYRAKQKK

SEQ ID NO: 737 - protein, 348 aa, Kluyveromyces marxianus
MAIPETQKGVIFYEHGGELQYKDIPVPKPKPNELLINVKYSGVCHTDLHAWQGDWPLDTKLPLVGGHEGAGIVVAMGENVTGWEIGDYAGIKWLNGSCMSCEECELSNEPNCPKADLSGYTHDGSFQQYATADAVQAARIPKNVDLAEVAPILCAGVTVYKALKSAHIKAGDWVAISGACGGLGSLAIQYAKAMGYRVLGIDAGDEKAKLFKELGGEYFIDFTKTKDMVAEVIEATNGVAHAVINVSVSEAAISTSVLYTRSNGTVVLVGLPRDAQCKSDVFNQVVKSISIVGSYVGNRADTREALDFFSRGLVKAPIKILGLSELASVYDKMVKGQIVGRIVVDTSK

SEQ ID NO: 738 - protein, 215 aa, Pseudomonas putida KT2440
MIQSDLDLFGPQPQRLASHTVLLPGFALAETEALLDALRPVLRAAPFRHMYTPGGLRMAVALTNCGTLGWVSDQHGYRYSPSDPVSGQPWPALPPVLLALASRAAAMAGFDGFVPDACLVNHYLPGTRLSLHQDRDEQDFGQPIVSVSLGLPAVFLFGGLQRADKAQRIALSHGDVLVWGGVDRLRFHGVLPIKPGVHPRLGERRINLTLRKAGA

SEQ ID NO: 739 - protein, 439 aa, Glycine max
  unsure (1)..(439): unsure at all Xaa locations
LIVYVVIPVSYWGLNVYNANRFPIFSSHLFTAQGQKYNIPKIVDNHFELNVAEYEKQGSSRFGSSFALTYGFGFATIASTLTHVVCFYGREIMERYRASSKGKEDIHTKLMRRYKDIPSWWFHSLLLVTLLVSLALCIFLKDQVQMPWWGLLFAGVLAFGFTLPISIITATTNQTPGLNIITEYVFGLIYPGRPIANVCFKTYGYISMAQAVSFLSDFKLGHYIIHFVHTCIYVXFIGTMLAGTINIGVAWWLLNSIKNICHDDLLPEGSPWTCPGDRVFFDASVIWGLVGPKRIFGSQGNYSAMNWFFLGGAVGPIIVWLLHKAFPKQSWIPLINLPVLLGATGMMPPATPLNYNAWIFVGTIFNFFIFRYRKKWWQRYNYVLSAALDSGVAFMTVLLYFALGLENKSLNWWGNDGEHCPLAVCPTAKGVIVDGCPAN

SEQ ID NO: 740 - protein, 305 aa, Miscanthus condensatus
IESVGEGVTDVAPGDHVLPVFTGECKECAHCRSAESNMCDLLRINTDRGVMIGDGKSRFSINGKPIYHFVGTSTFSEYTVMHVGCVAKIDPEAPLDKVCVLSCGISTGLGASINVAKPPKGSTVAIFGLGAVGLAAAEGARIAGASRIIGVDLNPSRFEEARKFGCTEFLNPKDHKKPVQEVLAEMTNGGVDRSVECTGNINAMIQAFECVHDGWGVAVLVGVPRKDAEFKTHPMNFLNERTLKGTFFGNFKPRTDLPNVVELYMKKELEVEKFITHSVPFAEINKAFDLMAKGEGIRCIIRMEN

SEQ ID NO: 741 - protein, 131 aa, Oryza sativa (japonica cultivar-group)
MAASHLAVLSVLALLAVAATAQAPASSPGAAPPQAATPPPTVAPVPAPKAPAPAPKVAAPAPAPKAAATPAPTPAAAAPAPDSAVSPSPSSDVSPSPAAEPPSTTSPTGAAAGLRPAFAMFAVAAAAIYAF

SEQ ID NO: 742 - protein, 344 aa, Listeria monocytogenes
  unsure (1)..(344): unsure at all Xaa locations
LDXVTTLQADRLGIKSIDGLEYLNNLTQINFSNNQLTDITPLKDLTKLVDILMNNNQIADITPLANLSNLTGLTLFNNQITDIDPLKNLTNLNRLELSSNTISDISALSGLTSLQQLSLGNQVTDLKPLANLTTLERLDISSNKVSDISVLAKLTNLESLIATNNQISDITPLGILTNLDELSLNGNQLKDIGTLASLTNLTDLDLANNQISNLAPLPGLTKLTELKLGANQISNIXPLAGLTALTNLELNENQLEDISPISNLKNLTYLTLYFNNISDISPVSSLTKLQRLFFYNNKVSDVSSLANLTNINWLSAGHNQISDLTPLANLTRITQLGLNDQEWT

SEQ ID NO: 743 - protein, 151 aa, Zea mays
MVKAVAVLAGTDVKGTIFFSQEGDGPTTVTGSISGLKPGLHGFHVHALGDTTNGCMSTGPHFNPVGKEHGAPEDEDRHAGDLGNVTAGEDGVVNVNITDSQIPLAGPHSIIGRAVVVHADPDDLGKGGHELSKSTGNAGGRVACGIIGLQG

SEQ ID NO: 744 - protein, 462 aa, Zea mays
  unsure (1)..(462): unsure at all Xaa locations
MEPRRISASPRPCSGRRVVARKRPRQEAVVSSVRKLQRREISSRRDRAFTMSAAQERFRNIHLQEEFDTHDPKENTSLLPYLRKRSKIIEIVAARDIVFALSQSGVCAAFSREANERICFLNGSPDEVIRSLFYNKNNDSLITVSVYGSENFSALRCRTTRIEYIRRGQPDAGFPLFESESLKWPGFVEFDDVNGRVLTYSAQDSTYKVFDLKNYTLLYLVSDKNVQEIKISPGIMLLIYARTSSSVPLKILSIDDGTVLKSFSHLLHRNKKVDFIEQFNEKLLVKQEGENLQILDVRNFQLTEVSRTEFMTPSAFIFLYELQLFLTFRNRSVAVWNFRGELVTSFEDHLLWHPDCNTNNIYITSDQDLIISYCKAXDSTDSSSEENAGSINISSILTGKCLAKINPGNSRKQKDPCKQKKVWRFQNTVSEALEDITALYYDEDRDEIYTGNRHGLVHVWSN

SEQ ID NO: 745 - protein, 346 aa, Staphylococcus aureus subsp. aureus N315
MARKLHRELNNRHIQLIAIGGAIGTGLFLGSGQTISLTGPSLLFTYMIIGVVLFAFMRALGELLLSNTRFNSFVDIANEYLGPFGGFVIGWTYWLCWIVSSMSDLTAMGQYFAFWYPQVPNWITVLFIVLILISFNLLGARLFGELEFWFSIIKVVTIIAMVIVGLVLIFFSFKTHYGHASFTNLISHGGMFPGGTFGFLMSFQIAVYSFIGIELIGVTAGETKDPEKTLPKAINNVPIRILLFYIGGLLVIMSVIPWNDIDPNSSPFVKLFTLIGVPFAAGVVNFVVLTAAASATNSGIYSNSRILFGLSQQGLGPKVLNWRALFINVSFINCITYSSLVKLHFP

SEQ ID NO: 746 - protein, 86 aa, Buchnera aphidicola
LYEPAGGSAPDISGKNIANPIAQILSISMLVRYTMGLNKIADDIESAVNNALKKGYRTLDIANKNENYVSTSHMGDIISNILNKRV

SEQ ID NO: 747 - protein, 320 aa, Candida dubliniensis
KVNTVAIGTMRLGSNWRGFNGDIDECLKILKFCYDNGFRTFDTADTYSNGKSEELLGLFIKKYNIPRERIVILTKCYFSVKDDAEDSTLEIDPIDFMNGKGLSRKHILAAAEASVKRLGTYIDVLQIHRLDRNVTYEEIMRSLNDVVEQGLTRYIGASSMKTWEFVESQNVAKANGWHQFISMQSHYSLLYREDERELNDYCKKNGIGLIPWSPNGGGVLCRPFDAEKTKQFLDNKQWSSLFGLDNAREADRIIVNRVEELSLKYNASMMQVSLAWCMAKGVIPIAGVSKFAQAEELVGIYNVNLTEEDIKYLEEPYHAK

SEQ ID NO: 748 - protein, 489 aa, Mycobacterium tuberculosis H37Rv
MSAASQRVGAFGEEAGYHKGLKPRQLQMIGIGGAIGTGLFLGAGGRLAKAGPGLFLVYGVCGVFVFLILRALGELVLHRPSSGSFVSYAREFFGEKAAYAVGWMYFLHWAMTSIVDTTAIATYLQRWTIFTVVPQWILALIALTVVLSMNLISVEWFGELEFWAALIKVLALMAFLVVGTVFLAGRYPVDGHSTGLSLWNNHGGLFPTSWLPLLIVTSGVVFAYSAVELVGTAAGETAEPEKIMPRAINSVVARIAIFYVGSVALLALLLPYTAYKAGESPFVTFFSKIGFHGAGDLMNIVVLTAALSSLNAGLYSTGRVMHSIAMSGSAPRFTARMSKSGVPYGGIVLTAVITLFGVALNAFKPGEAFEIVLNMSALGIIAGWATIVLCQLRLHKLANAGIMQRPRFRMPFSPYSGYLTLLFLLVVLVTMASDKPIGTWTVATLIIVIPALTAGWYLVRKRVMAVARERLGHTGPFPAVANPPVRSRD

SEQ ID NO: 749 - protein, 427 aa, Coxiella burnetii
MTELTGVSIVTYQHIKVPSQGEKITVNKAVLEVPDRPIIPFIEGDGIGIDIAPVMKNVVDAAVEKSYAGKRKIEWMEIYAGEKATKVYGKDNWLPDETLEAIKGYQVAIKGPLTTPVGGGIRSLNVALRQQLDLYVCLRPVRYFTGVPSPVKTPEKVNMVIFRENSEDIYAGIEWPAGSPEAVKLINFLQNEMGVKKIRFPETAGIGIKPVSKEGTSRLVRRAIQYAIDNDRDSVTLVHKGNIMKFTEGAFKDWGYEVAVKEFGAKPLDGGPWHVFENPKTGQKITIKDVIADAFLQQILLRPAEYSVIATLNLNGDYISDALAAEVGGIGIAPGANLSDTVGLFEATHGTAPKYAGQDKVNPGSLILSAEMMLRYLGWKEAADLVVQGIEGAIESKTVTYDFARLMTGAKEVSTSQFGKAIIKHIL

SEQ ID NO: 750 - protein, 101 aa, Glycine max
MIFNYFVFRPHTRWWQKSNYVLSHALDAGTPFMGVLIFFPPQNAAHNLKWWGSELAHCPLATCPPAPGIEVEACPVLKYQDPITIMGLAFSFFFVCPGGPS

SEQ ID NO: 751 - protein, 861 aa, Streptomyces lividans
MTADVAVETTPEIPLWNDPNHPVASRVDALVAAMTLEEKIAQLYGVWVGASDQGGEVAPISTTWRRPSTSTRSCPPGSVSSPGPSAPSRSTPRSAPSRSCARRPRITSAGRFGIPAVAHEECLAGFAPWGATAYPVPLSWGATFDPDAVRRMAAAIGRDMRSVGIHQGLAPVLDVVRDGRWGRVEETIGEDPYLVGTIGTAYVQGLESAGIVATLKHFVGYSASRAGRNLGPSSVGTRERTDVLLPPFEMAVREGGSRSVMSAYTDIDGVPAAADEALLTGAVRDTWGFEGTVVADYFGIAFLKTLHGITADWADAAGAALKAGLDVELPTVQDFGTPLVDAVTDGRVPEALIDRAAPRPGTEGGARTARPGLEPGPAALDGVDLSHPEALRGRIDLDRPENRELAREIAEKAVVLLTNDGTLPLARPRRIALIGPNAAEATAVLGCYSFPRHVGVQHPEVPVGLDLPTLYDTLTAEFPDADIALARGTGVDDGEVSGIGEAVDAARAADVVVAVLGDRAGLFGRGTSGEGCDAESLTLPGAQQRLLDALLDSGTPVVTVLLAGRPYALGRARQSAAIVQSFFPGEEGTAALAGVLSGRTSPTGRLPVSVPGSAAQPTTYLGARLAQASEVSNIDPTPAFGFGHGLTYTTFAWSDLVAHTKEAPTDGAFSLELTVRNTGERHGTEVVQLYLHDPVASVVQPVQRLIGYTRVPLRPGEARRVRVEVPADLASFNRRDGRRIVEPGDLELRFAASSTEPRLTATVALTGPERRVDQHPATARRLRAGDRGRRGRGRLSGPWEAPVVPATTARRAVQRTTSKTFFWMPLAYTSCSTSLSFRASLSVSLNSRLPAPSSSGKTSRW

SEQ ID NO: 752 - protein, 165 aa, Leptospira interrogans serovar lai str. 56601
MRFNMNETLYDLTATLNNGKEQKLENYKGKVLLIVNTASECAFTPQYAGLQNLYSKYKTEGLEILGFPCDQFKHQEPGSDETIKNFCQKNYGVEFPIFKKIEVNGDNAHPVFRFLRNKASGFFGNSIKWNFTKFLVDKQGNVIKRYSPITTPENIEKEIQNLLKR

SEQ ID NO: 753 - protein, 165 aa, Staphylococcus aureus subsp. aureus Mu50
MNNRNVYDIEVSDYKGLTYKLEAFRGKVILVVNTATECIYSEQLKKLETLFQKYKDRGFVVLSFPNNNFDNRQPGSNEEILKISREKFGVTFPVLAKISVNGNDEHPLFTHLKNEQPGIFGSPIKWNFTKFIIDRQGNVVNRFLPMEDPLDISTNIEILLQESSS

SEQ ID NO: 754 - protein, 421 aa, Halobacterium sp. NRC-1
MAVTHAEGIEVTDAGGTTYLDCLAGAGTLALGHNHPAVTAELERLLAEDRPLHTLDITTPEKEAFVDALFDSLPASFANTAKVQFCSPAGTDAIEAALKLTKTATGNRSVLAFHGGYHGMTAGALSLMGDIDAKEPVSGLMPNVHHLPYPDQYRHPFGLPAGEHESIHTYIEHAISSPERGFTEPAAVVLELVQGEGGVNPAPDAWVQELRRITREHDIPLVVDEIQTGLGRTGETWSFEHAGIEPDVVTCSKAVGGGLPLAVVLYNEGLDVWEPGAHAGTFRGNQLAMAAGRVTIEHVIEQDLPAHADKTGARLRSALTDLEADFDVVGDVRGRGLMLGVEFVAPDAAGDERPPPDGDLAAAVKQACFERGLIIETGGRDSAVARFLPPLIVSSHQIDEIAARFSDAVTAVLSSSAEVSA

SEQ ID NO: 755 - protein, 434 aa, Glycine max
MEDSFFDVVEFLKKPSLTETFVDILLCAVPIWLAVMIGLVIGWSWRPRWTGLVFLGLRSKFRFLWTAPPGFGARRLWLAFTALSAFTYWFNFKGKTKAKTQDPSPSQSDTADSNAISLTARSGDMAEEREQDTVTQADLEHFLHLLEGKDEMMDWQSFMERSTPNMQYKAWRHDPETGPTVYCSRTVFDDATPELVRDFFWDDDFRPKWDAMLAYCKVLEECPRNGTMISHWIKKFPFFCSDREYIIARRIWQAGNTYYCVTKGVPYPSLPKRDKPRRVELYFSSWVIKPVESRKGDGQMSACEVTLLHYEDMGIPKDVAKLGVRHGMWGAVKKLHSGMRAYQNARKTEASLSRCALMASKTTKISSDTNMHSSEPASCMEDRVQAMSNTAQKGNGIDWKWVAVGGTVALVLGLHTSAVGRALLLGAGHRIARR

SEQ ID NO: 756 - protein, 99 aa, Glycine max
  unsure (1)..(99): unsure at all Xaa locations
MTEAMXRKKPGMASVKDMPLLQDGPPPGGFAPVRYARRISNTGPSAMAIFLTVSGAFAWGMYQVGQGNKIRRALKEEKYAARRAILPILQAEEDERFVS

SEQ ID NO: 757 - protein, 424 aa, Saccharomyces cerevisiae
MSEATLSSKQTIEWENKYSAHNYHPLPVVFHKAKGAHVWDPEGKLYLDFLSAYSAVNQGHCHPHIIKALTEQAQTLTLSSRAFHNDVYAQFAKFVTEFFGFETVLPMNTGAEAVETALKLARRWGYMKKNIPQDKAIILGAEGNFHGRTFGAISLSTDYEDSKLHFGPFVPNVASGHSVHKIRYGHAEDFVPILESPEGKNVAAIILEPIQGEAGIVVPPADYFPKVSALCRKHNVLLIVDEIQTGIGRTGELLCYDHYKAEAKPDIVLLGKALSGGVLPVSCVLSSHDIMSCFTPGSHGSTFGGNPLASRVAIAALEVIRDEKLCQRAAQLGSSFIAQLKALQAKSNGIISEVRGMGLLTAIVIDPSKANGKTAWDLCLLMKDHGLLAKPTHDHIIRLAPPLVISEEDLQTGVETIAKCIDLL

SEQ ID NO: 758 - protein, 467 aa, Agrobacterium tumefaciens str. C58 (U. Washington)
MTIDIKNIAEMDRNAVLHPFTQLKDFASGKLGEPTIVETGKGIRIQDAHGKQLIDGFAGLYCVNVGYGRTEVAEAISRQAYRLAYYHSYAAHTTDELAILSDRLVRMAPGKMSKVFYGMSGSDANETQAKLVWYYNNLRGKPQKKKIISRERGYHGCSVVAGSMTGMSFYHDHMDLPRVGILHTGVPHHYWGAEAGETELEFSKRRAAELEALILREGPDTIGAFIAEPVLGTGGITPPPEGYWPAIQEVLKKYDVLLIADEVITGFGRTGSMFGSQHYGIEPDLITVAKGLTSAYFPLSGAIVGEKVYTVMEDGADRVGAFSHGYTYSGHPIGAAAANAVLDIVEKEDLPGNAQAVGSYFQEQLKAKFAQLPIVGEVRGVGLMGAIEFVADREKKTRFAPHLTVGARVSKAARNGGLIARAMPHGDILGFAPPLVTTKAEVDEIIAIAEAAVRTVMDDLVQAGEKI

SEQ ID NO: 759 - protein, 519 aa, Candida maltosa
MIFTAFILDYWYFTLLFLIAAYFIGKHVYTNYLMRKHHAEPILDVVDDGAFGFKFGFQSLKAKKIGNQIDLLFLKFNEAKHPSIGTFVTRSFGMQFIATKDPENIKAMLATQFNEYTLGQRLNFLAPLLGKGIFTLDGNGWKHSRAMLRPQFSRDQIGHVKMLEPHFQLLKKHIIKNKGTFFDIQELFFRFTVDSATEFLFGESVSSLKDESIGYDQEEIDFAGRKDFAEAFNKSQVYLSTRTLLQLLYWLVNSADFKRCNKIVHKFSDYYIKKALTATPEELEKHSSYIFLYELAKQTRDPIVLRDQSLNILLAGRDTTAGLLSFAVFELGRNPEVWSKLRQEIGHKFGLDSYSRVEDISFELLKLCEYLKAVLNETLRLYPSVPRNARFAAKNTTLPHGGGPDGMSPILVRKGQTVMYSVYALQRDEKYYGKDANEFRPERWFEPEVRKLGWAFLPFNGGPRICLGQQFALTEASYVLARLIQSFETLELSPEAAYPPAKLSHLTMCLFDGTPVRFE

SEQ ID NO: 760 - protein, 523 aa, Medicago truncatula
MLVELAVTLLVIALFIHLRPTPTAKSKALRHLPNPPSPKPRLPFIGHLHLLDNPLLHHTLIKLGKRYGPLYTLYFGSMPTVVASTPDLFKLFLQTHEATSFNTRFQTSAISRLTYDNSVAMVPFAPYWKFIRKLIMNDLLNATTVNKLRPLRSREILKVLKVMANSAETQQPLDVTEELLKWTNSTISTMMLGEAEEVRDIARDVLKIFGEYSVTNFIWPLNKFKFGNYDKRTEEIFNKYDPIIEKVIKKRQEIVNKRKNGEIVEGEQNVVFLDTLLEFAQDETMEIKITKEQIKGLVVDFFSAGTDSTAVATEWTLAELINNPRVWKKAQEEIDSVVGKDRLVDESDVQNLPYIRAMVKEVFRLHPPLPVVKRKCTEECEINGYVIPEGALILFNVWQVGRDPKYWEKPLEFRPERFLENASQGEGEAASIDLRGQHFTLLPFGSGRRMCPGVNLATAGMATLLSSIIQCFDLQVPGPHGQILKGDDVKVSMDERPGLTVPRAHNLMCVPLARAGVAAKLLS

SEQ ID NO: 761 - protein, 190 aa, Deinococcus radiodurans
MTKAKDLTGKKIAILAADGVEEIELTSPRAAIEAAGGTTELISLEPGEIQSMKGDIEPQEKYRVDHVVSEVQVSDYDGLLLPGGTVNPDKLRLEEGAMKFVRDMYDAGKPIAAICHGPWSLSETGIAQGLKMTSWPSLKRELTLAGAQWVDEECVTDKGVVTSRKPDDLPAFNKKIVEEFAEGDHSSRRK

SEQ ID NO: 762 - protein, 173 aa, Oryza sativa
PPPPLGSCKAKPTNLKNPNPSSPRRHPMARLHLVVVAMAALFAAAAVAQGPSASPTPAPKAQPPVATPPTRPPAVAPVSPPAAQPPVTTPPPVSAPAPVPAPSAAATPSPQASAPTAEPPVLSPPAPAPGSISQSPTEAPTSPPPPSAASGVSPSAAAVVAAWAAVAAVAAFY

SEQ ID NO: 763 - protein, 265 aa, Zea mays
MDRVPPPVSMQVAAMQRHQQQQQFVHHLQQVHQQGTQHEQPPPPHQNGSSSSGGRTGGGRKCCPLRRSRKGCMKGKGGPDNQQCPFRGVRQRTWGKWVAEIREPNRGARLWLGTFGSALEAARAYDAAARTLYGDCARLNLQLVPPSAAAAAAGGGGPAVVASPSPDTGFHVGDDDTTTAMAMHRHQQMMRELAEAPLHQEADDFEDFVTRLPKAEDFGLQGFQEVAPEVFDDAAGIWDHAAAWEPPTMMIDSGAQPQQQLVVPL

SEQ ID NO: 764 - protein, 436 aa, Brassica rapa
TSFLLVYVVMILFHPALAIYINTLSATESLTISSNRTLVSPGNVFELGFFITNSSSRWYLGIWYKKLTDRTYVWVANRDNPLSSSTGTLKISGNNLVIFGHSNKSVWSTNLTIGNERSPVVAELLANGNFVMRDPNNNEASGFLWQSFDYPTDTLLPEMKLGYDLKTGLNRFLISWRSSDDPSSGEITYKLEPRRFPEFYIFSDDFRVHRIGPWNGIGFIGIPEDQNSTYIVYNFTENSEEVAYSFRMTNNSIYSRLIITSEGYFQRLMWTPSTEIWQVFWSSPMSLQCDPYRICGPYAYCDESTSPMCICIQGFDPKNRQQWDLRSHASGCIRRTRLRCSGDGFTRMKNMKLPDTTTAIVDRSIGVKECEKRCLSDCNCTAFANADIRNGGTGCVIWTGELEDIRTYVADGQDLYVRLAAADLVRKRNANGKIVS

SEQ ID NO: 765 - protein, 214 aa, Paeonia peregrina
IVESVGEDVTDVKPGDHVLPIFTGECKECRHCKSEESNLCDLLRINTDRGVMLNDGKSRFSINGQPIFHFVGTSTFSEYTVLHVGCLAKINPEAPLDKVCVLSCGISTGLGATFNVAKPKKGSTVAIFGLGAVGLAAAEGARIAGASRIIGVDLNPKRFDEARKFGVTEFVNPKDYNKPVQEVIAEMTGGGVDRSVECTGSIMAMMSAFECVHD

SEQ ID NO: 766 - protein, 455 aa, Clostridium acetobutylicum
MDQTKSKNQNLSRGLKNRHVQLLAIGGAIGTGLFLGSGRSIHLAGPSILFAYMITGAICFLVMRALGELLVSNLNYHSFVDFVQDYLGNGAAFITGWTYWFCWISLAMADVTATGLYVQYWIPSLPRWVPSLVILLILLIMNLTAVRLFGEMEFWFALIKVVAILALIIVGIFMIIKGFSTSAGAASFTNLWKHGGWFPNGSNGFILSFQMVVFAFTGIELVGLTAGETEDPEHVIPKAINNIPVRIIIFYIGALAVIMSIYPWNSINPDKSPFVQVFAAVGVAAAATIVNFVVLTSAASACNSGIFSTSRMVFSLANENNAPESMKKLTSHKIPSNATIFSAAVILIAVILNYIMPEGVFVLITSISTFCFIFIWAIIVICHIKYRKANPELASKNNFKMPLYPIANYIILAFFAFVIVTLALNSETRVALFVTPVWFIVLGIIYFISKSKKKN

SEQ ID NO: 767 - protein, 143 aa, Triticum aestivum
ELGILSKSEPRIITTFKRVRKGTNGGVTIDGLLAAAAAGCSIGLAFVLIGFLTTQCASDVFWRQLLVIPLATAAGLCGSLIDSLLGATVQYSGYCSVRKKVVGVDGPTVRRISGMNILDNNGVNVVSIFLTSLLTALVCTCIF

SEQ ID NO: 768 - protein, 444 aa, Oryza sativa
MADDGGDGPPCDSDYISNLPENVLVTILSLLRLDEAARSTVLSTRWRHLFPYTLLDFRAYALGRDVVAAVNTILAAHPAARVRSFRTGLLYFPPEDDPSVEAWLRDLAGRGVKELSLSFRERWQKIPASLFACTSLKRLHASSCTFPDATQAPVPLAALAEIDLFGVNISEESLGALLSRCTALEHLRMRSMGWCHRIHVRSESLKTLCGCGDFDELLIEHAPNLEQVYGNYMYMRSTHLKVAHAPKLEFLGYLGMSFDTIEIGQSVFTEDDFDIKTLMPSLKTLAIELSYTSEGYINWFMQLLKLFPCLETLYIRSDTWSKVRAAAPGSWDVLRSVPCIDNHLERVVFEVYRGHEWQREMAKFLHGRARFLKAMEFHCQGDKGCSELLGEEWVREQQELLCLDSRASLDARFLFFKGALVNNHHDVSHHEWYKRKYYHYLYNV

SEQ ID NO: 769 - protein, 144 aa, Triticum aestivum
MASSASDPLLPGEPPHRRRFLPPSIRLKTSVWSELGGAVGDLGTYIPIVLALSLASHLDLGTTLIFTALYNFASGVLFGIPMPVQPMKSIAAVALSSAHLTVPQIMGAGIAVAAILLFLGATGLMTCLYRILPLPVVRGVQLSQ

SEQ ID NO: 770 - protein, 207 aa, Zea mays
MAGALALAVLLAVASLHAEAVWLDVPQSGTKCVSEEIQSNVVVLTDYSIMFESHPYSHPTIAVKVTSPYGNTLHHSENSTVGQFAFTTAEAGNYVACFWVDSAEKGSGVSVNLDWKIGIATKDWDAIAKKEKIEGVELELRKLEVAVQAIHQNLIYLKEREAEMRTVSETTNSRVVWFSTLSLWVCIAVSVLQVRHLQGFFRKKKLI

SEQ ID NO: 771 - protein, 321 aa, Escherichia coli O157:H7 EDL933
  unsure (1)..(321): unsure at all Xaa locations
MGKAVIAIHGGAGAISRAQMSLQQELRYIEALSAIVETGQKMLEAGESALDVVTEAVRLLEECPLFNAGIGAVFTRDETHELDACVMDGNTLKAGAVAGVSHLRNPVLAARLVMEXSPHVMMIGEGAENFAFAHGMERVSPEIFSTPLRYEQLMAAREEGATVLDHSGAPLDEKQKMGTVGAVALDLDGNLAAATSTGGMTNKLPGRVGDSPLVGAGCYANNASVAVSCTGTGEVFIRALAAYDIAALMDYGGLSLAEACERVVMEKLPALGGSGGLIAIDHEGNVALPFNTEGMYRAWGYAGDTPTTGIYREKGDTVATQ

SEQ ID NO: 772 - protein, 264 aa, Zea mays
MAKTRKPPAPPSPPPPPAETPSPQRRRKKKGRPSLLDLQRRSLRLQAQNPSPAASPTRRDPNPSDDDEDGTGSGRRRQKRLKSVLSGVVKEEQGEGKKDAAKATGKEDAASDGGPTGTPLPDKKLLLFILDRLQKKDTYGVFSEPVDAEELPDYFDIIDHPMDFSTIREKLLNDSYSKLEQFEDDVFLLTSNAMSYNSADTIYFRQARSIEALAKKDFENLRQPSDEEEPKPPARRGRPPKNPKTEGDVSPDLSNVKANKPEDN

SEQ ID NO: 773 - protein, 414 aa, Saccharomyces cerevisiae
MSEAQETHVEQLPESVVDAPVEEQHQEPPQAPDAPQEPQVPQESAPQESAPQEPPAPQEQNDVPPPSNAPIYEGEESHSVQDYQEAHQHHQPPEPQPYYPPPPPGEHMHGRPPMHHRQEGELSNTRLFVRPFPLDVQESELNEIFGPFGPMKEVKILNGFAFVEFEEAESAAKAIEEVHGKSFANQPLEVVYSKLPAKRYRITMKNLPEGCSWQDLKDLARENSLETTFSSVNTRDFDGTGALEFPSEEILVEALERLNNIEFRGSVITVERDDNPPPIRRSNRGGFRGRGGFRGGFRGGFRGGFSRGGFGGPRGGFGGPRGGYGGYSRGGYGGYSRGGYGGSRGGYDSPRGGYDSPRGGYSRGGYGGPRNDYGPPRGSYGGSRGGYDGPRGDYGPPRDAYRTRDAPRERSPTR

SEQ ID NO: 774 - protein, 392 aa, Ptilochaeta nudipes
DLEPVNPVDVPVTAAGALKSYKLAAKAISRLQSLPGGNISLLCDVLVKEVRDLTGYDRVMVYKFHEDEHGEVVSECRRSDLESYLGLHYPATDIPQASRFLFMKNKVRMICDCLAPPVKVIQDERLSQPLSLCGSTLRSPHGCHAQYMANMGTIASLVMSVTVNEDDDMMDGDQQQMARKLWGLVVCHHTRPRFVPFPLRYACEFLIQVFGVQINKEVELAAQVREKHILRIQTMLCDMLLRDAPVAIITQSPNVMDLVKCDGAALYYKNKFWLLGVTPTEAQIREVAEWLLEYHSGNTGLSTDSLMEAGYPGASVLGDAVCGMAAASITSRDFLLWFRSHTAKEIKWGGAKHDPEDKDDGRKMHPRSSFKAFLEVVKWRSLPWEDVEMDAI

SEQ ID NO: 775 - protein, 299 aa, Oryza sativa
  unsure (1)..(299): unsure at all Xaa locations
VSSYLPGAPRSRHRHLSSSPRPAXLLLHMPAPRRLHHLRPHHLSTAAALAAAPPTPTEWTTAPVASVGAATADASLFHVSLDLSSRADLLASHVAAGQFLPFRLPAAPYPIFLAISSSPPAPGLATSFDFLVKRLPGTPSACLCDLRPGDLVHVGGSVVGRGFEVGRIADARXXVLVFATGSGISPIRSLIESGFGENENIDVKLFYGVRNLQRMAYQNAFSRMKKVXVNPSSMGAILCGHKQMSEKSYGDHDGDGGGGGGDDGVRISFCLRCCFELLLPFQWGFFLLKDSLLFLFKQL

SEQ ID NO: 776 - protein, 411 aa, Xylella fastidiosa Dixon
MSAVSESVLSLSRYYLPVYRPCQVVLVRGQGSRVWDEQGRDYLDLAAGIAVCCLGHCDPDLVAALVEQAGRLWHTSNVFYSEPSLRLAQELVDVSRFAERVFLCSSGTEANEAAIKLVRKWSAAQGRLPEHRTIVTFRGSFHGRTLGAVTATAQPKYQEGYEPLPGGFRYVDFNHIEALEAAMVGGDVAAVMLEPIQGEGGVMPVVPGYLAQVRALCDRYGALLVLDEIQCGMGRTGTLFAYWQEEVVPDIVTLAKGLGGGFPIGAMLAGPKVAEVMQFGAHGTTFGGNPMAAAVARVALRKLVSVEIAANVQRQSVALRAGLEEISEAFGGVFTQVRGRGLMLGAVLAPLYAGQASAILEVAAEHGVLLLQAGPDVLRFVPALNVSDEELADGLVRLRAALGDYVSRFGG

SEQ ID NO: 777 - protein, 149 aa, Magnaporthe grisea
MADSLTEEQVSEFKKAFSLFDKDGDGQITTKELGTVMRSLGQNPSESELQDMINEVDADNNGTIDFPEFLTMMARKMKDTDSEEEIREAFKVFDRDNNGFISAAELRHVMTSIGEKLTDDEVDEMIREADQDGDGRIDYNEFVQLMMQK

SEQ ID NO: 778 - protein, 316 aa, Triticum aestivum
MMTAMVKAEPTGAAAGAEGSSGRRDAEAELNLPPGFRFHPTDDELVVHYLCRKVAGQPQPVPIIAEVDLYKFNPWDLPERALFGSREWYFFTPRDRKYPNGSRPNRSAGTGYWKATGADKPVAPRESGGRTVGIKKALVFYSGRAPRGVKTDWIMHEYRIAEADRAPGKKGSLKLDEWVLCRLYNKKNNWEKLKVEQDMAVEAGPNGEVMDALATDAMSDSFQTHDSSEIDSASGLQQHGFMDMAQGQPRGGMVTVKEDSDWFTGLSMDDLQTCYMNMGQMVNPATMPGQNGSGYLQPMSSPQMMRPMWQTILPPF

SEQ ID NO: 779 - protein, 164 aa, Tropheryma whipplei str. Twist
MVRLRMQTLTAIVEIPRGSRSKYEIDKKTGRLFLDRVVSTAFGYPTNYGFIENTLALDGDPIDALILVQNQLFPGVALHIRPVGVLHMTDDGGEDDKVLCVALKDPYCDHINDLDDVPKHVLNQIEHFFQHYKDLEEGKWVKLGAWNGKDKAIEIITEGLSRFN

SEQ ID NO: 780 - protein, 362 aa, Bradyrhizobium japonicum USDA 110
MKAAVLYEVNKPLVIEDVSLPKPGPREVLIRTSVAGLCHSDLHFMEGLYPHPLPAVLGHESAGVVEQVGSDVTYVKPGDHVVTCLSVFCGTCDNCTTGRTVLCTDTTVKLLPGVSDRMQWSRSEKLHQFLNLSSFAEQMLVHENAIVKIRKEMPLDLAALIGCGVITGYGAVVNTAKVTAGETVAVIGCGGVGMAAINGAQIAGAGRIIAIDTNPAKLQLATKLGATDIINPADGDVVKQVRDLTNGGVHHSFEVLGRKETAEQAFAMLASGGTATIVGMIPFGQKIELHGFDFLRERKIQGSSMGSNHFRVDMPRLVDFYLRGRLHLEDWISAKLKLSEINEGFANMKAGKTLRSVIVFDS

SEQ ID NO: 781 - protein, 175 aa, Zea mays
MAKPQEVRSVDSFSQLPFIRPAPPPAPAQPRDATIRLFGCDFSNDDQQQRQAKQQQQHRQDAGAAADSPDAANGSSITSESNNGANKSGGADRKFECHYCCRNFPTSQALGGHQNAHKRERQHAKRAHLQASLAMHRYVPGHMYGLFNYHQQQQHHLGGGGGGRFDYPAPLQACK

SEQ ID NO: 782 - protein, 366 aa, Zea mays
MAGTVTVPGSSKPSTPLLKDELDIVIPTIRNLDFLEMWRPFFQPYHLIIVQDGDPTKTIKVPEGFDYELYNRNDINRILGPKASCISFKDSACRCFGYMVSKKKYIYTIDDDKKCFVAKDPSGKDINALEQHIKNLLSPSTPFFFNTLYDPYREGADFVRGYPFSLREGAHTAVSHGLWLNIPDYDAPTQLVKPKERNERYVDAVMTIPKGTLFPMCGMNLAFDRDLIGPAMYFGLMGDGQPIGRYDDMWAGWCVKVICDHLSLGVKTGLPYIWHSKASNPFVNLKKEYKGIFWQEDIIPFFQNVTIPKDCDTVQKCYIYLSGQVKEKLGKIDPYFAKLGDAMVTWIEAWDELNPAGPAAGKDKAK

SEQ ID NO: 783 - protein, 337 aa, Novosphingobium aromaticivorans
MQLSMTRVPVLVTGGAGYIGSHAVLALKDAGWAVSVIDNLTTGFRFAVPEGVPFYEGDIEDAGLLARIIAEQGIKAVMHFAGSIIVPESVENPLKYYHNNTAKSRALIEAAVKGGVPHFIFSSTAATYGIPEVSPVTEDSPRRPINPYGMSKLMTETMLADVAAAHPLNFCVLRYFNVAGADPQARTGQSTAGATHLIKVAVEAALGKRASVGVYGTDYATPDGTGVRDYIHVSDLAAAHVLALEALIAAPDESLTMNCGYGRGFSVLEVLDAVDRVTNRRIAREMQGRRAGDPDSLISDNRRIRSTLPWVPQYADLDTIVAHALAWERKLDGIRGQ

SEQ ID NO: 784 - protein, 393 aa, Sporobolus giganteus
EPARTEDPALSVAGAVQSQKLAVRAISRLQALPGGDVKLLCDTVVEHVRELTGYDRVMVYRFHEDEHGEVVAESRRDDLEPYLGLHYPATDIPQASRFLFRQNRVRMIADCHATPVRVIQDPGLSQPLCLVGSTLRAPHGCHAQYMANMGSIASLVMAMIIIVVVMTKQTSRSGISSAMKLWGLVVCHHTSPRFIPFPLRYACEFLMQAFGLQLNMELQLAHQLSEKHILRTQTLLCDLLLRDSPTGIVTQSPSIMDLVKCDGAALYYHGKYYPLGVTPTESQIKDIIEWLTVCHGDSTGLSTDSLADAGYHGAAALGDAVCGMAVAYITPSDYLFWFRSHTAKEIKWGGAKPHPEDKDDGQRMHPRSSFKAFLEVVKSRSLPWENAEMDAIH

SEQ ID NO: 785 - protein, 160 aa, Triticum aestivum
MALKASFPGELAALLDSGNTRSRRGAAFRPRQHQRKVDFTFQRRDKRAAYLRTCCSMQQGPPPAWPGRAVVEPERRSWEGPKPISIVGSTGSIGTQTLDIVAENPDKFRVVALAAGSNVTLLADQVRTFKPKLVAVRNESLLNELKESVAGCEEMPEIIP

SEQ ID NO: 786 - protein, 394 aa, Neisseria meningitidis Z2491
MTPQVLTILGSTGSIGESTLDVVSRHPEKFRVFALAGHKQVEKLAAQCQTFHPEYAVVADAEHAARLEALLKRDGTATQVLHGAQALVDVASADEVSGVMCAIVGAVGLPSALAAAQKGKTIYLANKETLVVSGALFMETARANGAAVLPVDSEHNAVFQVLPRDYTGRLNEHGIASIILTASGGPFLTADLNTFDSITPDQAVKHPNWRMGRKISVDSATMMNKGLELIEAHWLFNCPPDKLEVVIHPQSVIHSMVRYRDGSVLAQLGNPDMRTPIAYCLGLPERIDSGVGDLDFDALSALTFQKPDFDRFPCLKLAYEAMNAGGAAPCVLNAANEAAVAAFLDGQIKFTDIAKTVAHCLSQDFSDGIGDIGGLLAQDARTRAQARAFIGTLR

SEQ ID NO: 787 - protein, 361 aa, Saccharomyces cerevisiae
MTTAVRLLPSLGRTAHKRSLYLFSAAAAAAAAATFAYSQSQKRSSSSPGGGSNHGWNNWGKAAALASTTPLVHVASVEKGRSYEDFQKVYNAIALKLREDDEYDNYIGYGPVLVRLAWHTSGTWDKHDNTGGSYGGTYRFKKEFNDPSNAGLQNGFKFLEPIHKEFPWISSGDLFSLGGVTAVQEMQGPKIPWRCGRVDTPEDTTPDNGRLPDADKDADYVRTFFQRLNMNDREVVALMGAHALGKTHLKNSGYEGPWGAANNVFTNEFYLNLLNEDWKLEKNDANNEQWDSKSGYMMLPTDYSLIQDPKYLSIVKEYANDQDKFFKDFSKAFEKLLENGITFPKDAPSPFIFKTLEEQGL

SEQ ID NO: 788 - protein, 294 aa, Staphylococcus aureus subsp. aureus MW2
MVIQWYPGHMAKAKREVSEQLKKVDVVFELVDARIPYSSRNPMIDEVINQKPRVVILNKKDMSNLNEMSKWEQFFIDKGYYPVSVDAKHGKNLKKVEAAAIKATAEKFEREKAKGLKPRAIRAMIVGIPNVGKSTLINKLAKRSIAQTGNKPGVTKQQQWIKVGNALQLLDTPGILWPKFEDEEVGKKLSLTGAIKDSIVHLDEVAIYGLNFLIQHDLARLKSHYNIEVPEDAEIIAWFDAIGKKRGLIRRGNEIDYEAVIELIIYDIRNAKIGNYCFDIFKDMTEELANDANN

SEQ ID NO: 789 - protein, 280 aa, Zea mays
  unsure (1)..(280): unsure at all Xaa locations
GYYHLSPPAAAGSNSQRRAAPSRVLSQGSLLKKXLGGSRELVTDDNLDCSGTAFSLHAMDSRHAAVVWLLLRGEGFQHYRCDRNLSMGMNLNNMAKMLRCAGNEDIITIKGDDGSDTVTFMFESPKQDKIADFKMKLMDIDSEHLGIPDSEYQAIVRMPSAELMRIXKDLSSIGDTVVISVTKEGVKFSTSGEIGSANIVCRQNQTIDKPEEATIIEMQEPVSLTFALRYMNSFTKASSLSEQVTISLSSELPVVGEDKIAEMGYIRFYLAPKIDDDDEM

SEQ ID NO: 790 - protein, 142 aa, Zea mays
MAGIGPIRQDWEPVVVRKKAPTAAAKKDEKAVNAARRSGAEIETMKKYNAGMNKAASSGTSLNTKRLDDDTENLAHERVPSDLKKNLMQARLDKKLTQAQLAQMINEKPQVIQEYESGKAIPNQQIIGKLERALGTKLRGKK

SEQ ID NO: 791 - protein, 162 aa, Physcomitrella patens
MAGGEEFRCFVGGLAWATTDGRLEGAFRPFGEVVQSKVISDRETGRSRGFGFVTFADENSMNAAIKEMNGQELDGRNITVNQAQSRGGGGGGGGGGGGYGRREQGGGGYGGGYGGSRGGGDREGSGYGGSRGGGYGGGGGGGYGGRGGPSSGNWRNDRQPEY

SEQ ID NO: 792 - protein, 751 aa, Geobacillus stearothermophilus
MENQNRQNAAQCPFHGSVTNQSSNRTTNKDWWPNQLNLSILHQHDRKTNPHDEEFNYAEEFQKLDYWALKEDLRKLMTESQDWWPADYGHYGPLFIRMAWHSAGTYRTGDGRGGASTGTQRFAPLNSWPNNANLDKARRLLWPIKKKYGNKISWADLFILAGNVAIESMGGKTIGFGGGRVDVWHPEEDVYWGSEKEWLASERYSGDRELENPLAAVQMGLTYVNPEGPDGKPDPKAAARDIRETFRRMGMNDEETVALIAGGHTFGKAHGAGPATHVGPEPEAAPIEAQGLGWISSYGKGKGSDTITSGIEGAWTPTPTQWDTSYFDMLFGYDWWLTKSPAGAWQWMAVDPDEKDLAPDAEDPSKKVPTMMMTTDLALRFDPEYEKIARRFHQNPEEFAEAFARAWFKLTHRDMGPKTRYLGPEVPKEDFIWQDPIPEVDYELTEAEIEEIKAKILNSGLTVSELVKTAWASASTFRNSDKRGGANGARIRLAPQKDWEVNEPERLAKVLSVYEDIQRELPKKVSIADLIVLGGSAAVEKAARDAGFDVKVPFFPGRGDATQEQTDVESFAVLEPFADGFRNYQKQEYSVPPEELLVDKAQLLGLTAPEMTVLVGGLRVLGANYRDLPHGVFTDRIGVLTNDFFVNLLDMNYEWVPTDSGIYEIRDRKTGEVRWTATRVDLIFGSNSILRSYAEFYAQDDNQEKFVRDFINAWVKVMNADRFDLVKKARESVTALQSDLSFRSVGVDILQ

SEQ ID NO: 793 - protein, 171 aa, Aquifex aeolicus VF5
MKKLSGVLAGSLLLISASFSQDLKAHAELINTEGEVIGKAELIETNSGVLIKLNAKGLPPNAELAFHIHERGECKPPTFKSAKGHFNPYGKKHGLLNPEGPHAGDMPNIYTDDKGNVRVQVLNPFVTLKKGEKNSLFKEGGTALVIHSGPDDYKSDPAGNAGKRIACGVIR

SEQ ID NO: 794 - protein, 256 aa, Escherichia coli O157:H7 EDL933
MKCFTLSSQRRRIIGIPIFCTSTFLIFFSVCCFFTLFAAFAHKTVLFCILKDLHKANNAPKVISKSFIAEVSMSDVLRPYRDLFPQIGQRVMIDDSSVVIGDVRLADDVGIWPLVVIRGDVHYVQIGARTNIQDGSMLHVTHKSSYNPDGNPLTIGEDVTVGHKVMLHGCTIGNRVLVGMGSILLDGAIVEDDVMIGAGSLVPQNKRLESGYLYLGSPVKQIRPLSDEEKAGLRYSANNYVKWKDEYLDQGNQTQP

SEQ ID NO: 795 - protein, 106 aa, Thermoplasma volcanium
MQSSLSMFCPKCGSLMTPVNGRYVCPSCGYEVSKKKEDLKIVNKSNDKETIMIREEVSAEPLDSDAICPRCHHKGARYVLKQTRSADEPETKFYTCEECGYRWREY

SEQ ID NO: 796 - protein, 235 aa, Matricaria chamomilla
MIRNNAFDSDFALLESVRRHLLDDNAPPMSCRSNNFLFPHLSDSWGELPLQQNDSEDMLIAKFLNEALPLQQNDSEGIITPEMTSSSENIFFVKSEPETSSFQPKSLGSQKGKHYRGVRRRPWGKYAAEIRDPAKNGARVWLGTYETAEDAAVAYDMAAYRMRGSRALLNFPLRINSGEPEPVRITSKRKTTSPSEGLVVKKVKVELEMSTQAEFPLVYGCYYCVILGPFLVKCF

SEQ ID NO: 797 - protein, 149 aa, Malus x domestica
MADQLTDDQISEFKEAFSLFDKDGDGCITTKELGTVMRSLGQNPTEAELQDMINEVDADGNGTIDFPEPLNLMARKMKDTDSEEELKEAFRVFDKDQNGFISAAELRHVMTNLGEKLTDEEVDEMIREADVDGDGQINYEEFVKVMMAK

SEQ ID NO: 798 - protein, 221 aa, Glycine max
  unsure (1)..(221): unsure at all Xaa locations
MLSISATRIFFLRSTTIRLSSSSSSLQFFSNPNRTLFRPFLHTSFKPLPSSFSFRTDHTMATSNAKSVHDFTVKDAKGNDINLGDYKGKVLIIVNVASQCGLTNSNYTELSQLYEKYKQKGLEILAFPCNQFGAQEPGSNEQIQEFVCTRFKAEFPXFDKVDVNGDKAAXLYKYLKSSKGGLFGEGIKWNFSKFLVDKEGNVVDRYAPTTSPLSIEVRQLV

SEQ ID NO: 799 - protein, 211 aa, Zea mays
  unsure (1)..(211): unsure at all Xaa locations
MAASVFPALLLAVAAVLLLPVAEAVWLELPPSGTKCVSEEIQPNVVVLADYAIMYESHPSSHPTVAVKVTSPYGNTVHHNENATTGQFAFTTSEAGNYLACFWIDSVEKGSGTSLNLDWKIGIAAKDWDTIAKKEKIEGVELELRKLEAAVESIHHNLLYLKAREADMRTVSERTNSRVAWFSILSLGVCVAVSVLQLWXLQGFFRKKKLI

SEQ ID NO: 800 - protein, 78 aa, Glycine max
  unsure (1)..(78): unsure at all Xaa locations
VSTTRLQGGFFTHDPGGPTPAVLQFLRKRSKIIETVAXRDIVYALAQSGVCAAFSRETNERICLLNVSSDEVIRSSAL

SEQ ID NO: 801 - protein, 343 aa, Oryza sativa
  unsure (1)..(343): unsure at all Xaa locations
MEVAAADYAGGVRVKKEAGGCGGSGDMFLVDDLLDLPCDEEEEETGLDDRAAGNASADSSTVTAVDSCSNSFSGLADGDFSGGLCEPYEQLAELEWVSNMGEETLPTEDLRKLQLISGIPAAPRAPPALAVSAVQLPAGGAGALPTEAPVPGKARSKRSRVAPCSWSSRLMVLPPPPASPPSPASAVISPSESGTAAPAFPAKKAAKSAKKKDGPSPAPAPNAAAQAAAEGRRCLHCETDKTPQWRTGPMGPKTLCNACGVRYKSGRLVPEYRPAASPTFVVSKHSNSHRKVVELRRQKEMQLLHHHQQPPPHPTSSAPLFXXGADEFLIHNRISPDYRRQAT

SEQ ID NO: 802 - protein, 221 aa, Castanea sativa
DEARYFFQQLISGVCYCHSMQICHRNLKLENTLLDGSPAPRLKICDFGYSKSSLLHSRPKPTVGTPAYIAPEVLSRREYDGKMADVWSCGVTLYVMLVGAYPFEDPADPKNFRKTINRIMAVQYKIPDYVHISQECRHLLSRIFVASSLKEGITIKEIKSHPWFLKTLPRELTEPAQQCTTRKENPSFSLQEFRIYKNGEEAKFLPTSKRGGFGWGGKKKG

SEQ ID NO: 803 - protein, 467 aa, Salmonella enterica subsp. enterica serovar Typhi
MVDQVKVAADEQAPAEQSLRRNLTNRHIQLIAIGGAIGTGLFMGSGKTISLAGPSIIFVYMIIGFMLFFVMRAMGELLLSNLEYKSFSDFASDLLGPWAGYFTGWTYWFCWVVTGMADVVAITAYAQFWFPGLSDWVASLAVVVLLLSLNLATVKMFGEMEFWFAMVKIVAIVALIVVGLVMIAMHFKSPTGVEASFAHLWNDGGWFPKGISGFFAGFQIAVFAFVGIELVGTTAAETKDPEKSLPRAINSIPIRIIMFYVFALIVIMSVTPWSSVVPDKSPFVELFVLVGLPAAASVINFVVLTSAASSANSGVFSTSRMLFGLAQEGVAPKAFAKLSKRAVPAKGLTFSCICLLGGVVMLMVNPSVIGAFTMITTVSAILFMFVWTIILCSYLVYRKKRPHLHEKSIYKMPLGKLMCWVCMAFFAFVLVLLTLEDDTRQALIVTPLWFIALGLGWLFLRKNKLAK

SEQ ID NO: 804 - protein, 158 aa, Oryza sativa
DRFLARFAAFFYYFMTVAMYMVSPRMAYHFSECVERHAYSTYDKFIKLHEDELKKLPAPEAALNYYLNEDLYLFDEFQTARVPCSRRPKIDNLYDVFVNIRDDEAEHCKTMKACQTHGNLRSPHSMQKCLETDTECVIPEDDCEGIVDCVKKSLVSKE

SEQ ID NO: 805 - protein, 251 aa, Triticum aestivum
  unsure (1)..(251): unsure at all Xaa locations
MAKTYPVVSAEYQEAVEKARQKLRALIAEKNCSPLMLRLAWHSAGTFDVSSKTGGPFGTMKKPAEQAHAANAGLDIAVRMLEPIKEEIPTISYADLYQLAGVVAVEVSGGPXVIPFHPGREDKPQPPPEGRLPDATKGSDHLRQVFGKQMGLSDQDIVALSGGHTLGRCHKERSGFEGPWTRNPLKFDNSYFTELLSGDKEGLLQLPSDKTLLTDPVFRPLVEKYAADEKAFFEDYKEAHLRLSELGYAEA

SEQ ID NO: 806 - protein, 346 aa, Escherichia coli
MKSVVNDTDGIVRVAESVIPEIKHQDEVRVKIASSGLCGSDLPRIFKNGAHYYPITLGHEFSGYIDAVGSGVDDLHPGDAVACVPLLPCFTCPECLYGFYSQCAKYDFIGSRRDGGFAEYIVVKRKNVFALPTDMPIEDGAFIEPITVGLHAFHLAQGCENKNVIIIGAGTIGLLAIQCAVALGAKSVTAIDISSEKLALAKSFGAMQTFNSLEMSAPQMQGVLRDVRFNQLILETAGVPQTVELAVEIAGPHAQLALVGTLHQDLHLTSTTFGKILRKELTVIGSWMNYSSPWPGQEWETASRLLTERKLSLEPLIAHRGSFESFTQVVRDIARNAMPGKVLLIP

SEQ ID NO: 807 - protein, 384 aa, Zea mays
MDRAALTVGPGMDMPIMHDGDRYELVRDIGSGNFGVARLMRNRADGQLVAVKYIERGEKIDENVQREIINHRSLRHPNIIRFKEVILTPTHLAIVMEYASGGELFERICNAGRFSEDEARFFFQQLISGVSYCHSMQVCHRDLKLENTLLDGSTAPRLKICDFGYSKSSVLHSQPKSTVGTPAYIAPEVLLKKEYDGKVADVWSCGVTLYVMLVGAYPFEDPDEPKNFRKTIQRILGVQYSVPDYVHISPECQDLISRIFVANPSTRITMPEIRSHPWFLKNLPADLVDDSATTTSKQYEEPEQPMQGMDEIMQILGEATIPAAGSRGLNQFLNDGLDLDDDMEDLDSDADLDLESSGEIVYAMWRRRVLSDEAMSRCARRLPR

SEQ ID NO: 808 - protein, 715 aa, Fusobacterium nucleatum subsp. vincentii ATCC 49256
MSIKYLYDRKKIAVTYGEQKYSYADVIKYVNYYSEFLDISKGDRVALMMENRPESIFSFFSIWAKKGIALSLDAGYTVEQLAFVLNDSKPKYIFVSNKVKEVVKKANEKIGNIVKIIVVDEITLPTNYVAKQEEFENDSDEDVAIIVYTSGTTGNPKGVMITYENIKANMDGVRAVDLVTDTDTILGMLPYHHIMPLCFTLILPMYLGVPVILLTEISSASLLKTLQENRVTVILGVPRVWEMLDKAIMTKINQSALARFMFKVASKIDSMSVRKMLFSKVHKQFGGHIRLMVSGGAKIDKNILEDFRTMGFRAIQGYGMTETAPIIAFNVPGRERSDSVGEVIPDVEVKIADDGEILVKGKNVMKGYYNNEQATKEAFDKDGWFHTGDLGRMEGKYLIIIGRKKEMIVLPNGKNIDPNDVEAEIIKNTEQIVNIKDAIKWEVIDKYNVTAPNYKKIHDIKIVKEELPKTRLGKIRRFMLKDLLEDKTENTDKKVEKKVVEVPAEMKEKFNVINKYIDERYHKAIDLDSHIELDLGFDSLDIVEFMNFLNDTFGITLVEQDFVENKTISAIIKLVDEKAGKLVEKVDKNENLKKIIESDSNVKLPKDARYAKVLKFILSPMFKFYFKYKYSGKENLGEGAGIIVGNHQSYLDAFMLNNAFTYKEMENNYYIATALHFKSDFMKYLSGHGNIILVDANRNLKNTLPASLLKVLKNG

SEQ ID NO: 809 - protein, 497 aa, Zea mays
  unsure (1)..(497): unsure at all Xaa locations
CAETWREAAAQLGWPCCCSCSRPSQCSSHPPWPTTCSPWTSTPRRARSWTASCAPPCRPPSGGRSRSPRASSASSSTTASRRAATRPCSSRATPRSRPWGPTPRCSRGRCSSSTTSAPRCTPPAGPPCPAPTSRRSPPAPPSSRRGDPPTPCPWASATASPRRPRTTSTRSRRPPPPASRSSWRRSGAGASATWPQPLVSRLATTEFIPLPPPSPPIGRTHRASSGADRVSSTAVKAYPTVNEDYLKAVDKAKRKLRGLIAEKNCAPXSWLRLAWHSAGTFDVATKTGGPFGXTMKNPAEQAHGANAGLQIAIRRPXKEQFPILSSAECXHLPGFAAVAATRWTGRSWPVEVTRRAPDVPFHPGQXRTKPEPPPEGRLPDATQGSDHLRQVFSTQMGLSDQDIVALSGGHTLGRCHKDRSGFEGAWTSNPLIFDNSYFKELLSGEKEGLLQLPSDKALLSDPSFRPLVDKYAADEDAFFADYAEAHLKLSELGFAEA

SEQ ID NO: 810 - protein, 152 aa, Zea mays; identical to SEQ ID NO: 631

SEQ ID NO: 811 - protein, 190 aa, Oryza sativa
TRTGSQIDRRQEPPHAAAARGAVEVSLRRFDLADVDAMMVWASDPQVAAVCRWEPYESTEPLLAYLRDTVLPHPWFRAICVGDDRPVGAVSVSPTADACRAELGYVVARAHWGKGVATAAVKRVVAAVFGEVEGLERVEALVDVRNAASQRVLEKAGFRREAVLRSYCVLKGEVRDMVIYSFISTDPLVS

SEQ ID NO: 812 - protein, 142 aa, Zea mays
MAGIGPIRQDWEPVVVRKKAPTAAAKKDEKAVNAARRAGAEIDTMKKYNAGTNKAASSGTSLNTKRLDDDTENLAHERVPSDLKKNLMQARLDKKLTQAQLAQMINEKPQVIQEYESGKAIPNQQIISKLERALGTKLRGKK

SEQ ID NO: 813 - protein, 82 aa, Glycine max
  unsure (1)..(82): unsure at all Xaa locations
STVFSLLAMDGSGVALIALLLRSEGLEHYRCDRNTYMGMYLINMAKMLKCAGYYDFISIMAYDWSDTVCFXLESPTQVKISE

SEQ ID NO: 814 - protein, 161 aa, Triticum aestivum
GRQPYLAPDGADPARGAAGDDTKMTIGEALEAAGYAAGDRPVEHSDAAAIQAAKVRATGQDVYIPGDLAAQAQSAADANLWAARDEEKAKLGEVLSNATAKLVAHKERNATAKLVADKEVESDDAARVASAETRNKDDKTVRPGGIAASVAAAARLNKQDA

SEQ ID NO: 815 - protein, 554 aa, Pleea tenuifolia
  unsure (1)..(554): unsure at all Xaa locations
DLEPVNPADVPVTAAGALKSYKLAAKAISKLQSLPTGNISLLCDVLVREVSDLTGYDRVVAYKFHEDEHGEVIAECRRSELEPYLGLHYPATDIPRASRFLFMKNKVRMICDCSAAPVKVIQDKRLAQPLSLCGSILRAPHGCHAQYMASMGSVASLVMSVTIIEDDNETGSDQQEKGRKLWGVVVCHHTSPRFIPFPLRYACEFLIQVFCMQLTKEVELADQMREKHILQTQTVLCDMLLRDAPVGIFTQSPNVMDLVKCDGAALYYRNQFWLLGISPREAQIRDIAGWLLEYHDGTTGLSTDSLLDAGYPGASALGDEVCGMAAIRITDKDFLFWFRSHTAKEXTWGGAKHDLVEKDSDGRKMHPRSSFKAFLEVVEGRSLPWEDVEMDAIHSLQLILRDSLQGERASIDSKAIVNAPLDDAKKIQGMDELSLVTNEMIRLIETAAVPILAVDVLGNVNGWNIKAAELTGLVVQQAIGMPLIDLVEGDSIDVAKNMLFLALQGKEERDVEIKLKTFGHQEKNGPKILVVNACCSRDMKEDIVGVCFVAQDVT

SEQ ID NO: 816 - protein, 245 aa, Zea mays
  unsure (1)..(245): unsure at all Xaa locations
MAPRVADKSPLPPATGLGLGVGGGVGGVGMGPHYRGVRKRPWGRYAAEIRDPAKKSRVWLGTYDTAEEAAKAYDSAAREFRGAKAKTNFPFPSQCSVASGAAGSASSNSTVDSSGGGSGCGIQAPMQAMPLPPALDLDLFSSGSSRPXHRAAAVNAVSTGMRFPFKGYPVACPTPQQYFFYEQAAAAASGYRMLKVAPPAVTVAAVAQSDSDSSSVVDHSPSPPAVTANKVGFELDLNWPPPAEN

SEQ ID NO: 817 - protein, 239 aa, Glycine max
MSFLEEFHANLDSLPVILRKKYTLLRDLDKSLQDIKRQNEQRCEQEIEDIKRGVRSGNITPDTSAIRFSDEALDEQKHSIRVADEKVALAVQAYDLVDTNIQQLDQYLKKFDEEIRRERENAAITGVPASGPEGNTKSGRGNESGTGRGGRKKTRQTTMVTEAQATSNPTGMDLELPVDPNEPTYCFCNQVSYGAMVACDNPNCKIEWFHFGCVGLKEQPKGKWYCSNCAATKNRRRSK

SEQ ID NO: 818 - protein, 347 aa, Sulfolobus sp. RC3
MRAVRLVEIGKPLVLKDIDIPKPKGAQVLIKVEAAGVCHSDVHMRQGRFGNLRIVEDLGVKLPVTLGHEIAGKIEEMGDEVVGYSKGDLVAVNPWQGEGNCYYCRIGEEHLCDSPRWLGINFDGAYAEYVLNPHYKYMYKLRRLNAVEASPLTCSGITTYRAVRKASLDPTKTLVVVGAGGGLGTMAVQIAKAVGGATIIGVDVREEAVETAKRAGADYVINASVQDPLAEIRRITEGKGVDAVIDLNNSEKTLSVYPKALAKQGKYIMVGLFGADLHFHAPLITLSEIQFVGSLVGNQSDFLGIMRLAEAGKVKPMITKTMKLEEANEAIDNLENFKAVGRQVLIP

SEQ ID NO: 819 - protein, 2160 aa, Magnaporthe grisea
MTRNDALSRFSSITSSSTDSAHSTATVKPLPSTPIASDTRRHSSGSRPAIPSRLRIDDDLNRITASPLRDDTQVSPTNTFGTRVALSPSSPTSNVFPREQRLSDFGNYRRDLAVLDPGGSRVPQIQQPPPNTGPSLSSQVAPWMTSNGTGGAPAAINTSFYNDSSDNLSVASQLSPGFRIPGGRPSISQPSGVGADNNEASYFGDERRPSIASITTTASSQGSKASGNRGGFRKLQGFFGEEFPGRDSSDTSLPPAVPGKEHRSHSYSHGRPYRDRNYSNATDHTRDGSPSSSRPRTPVPAPEVVPFLYQEADDIAKYGEAPVRDILSGPDRERYVTGDSLQNPPKTSSSSRSGHSLAHLSGQHRHQKSNDDPRTLRPTMSRDDSAVPTYKDRSGSATTMMTTSRDRAHSPAPSGHSIGGYFSSKNGTYDGQTSPPGHQKKSLLGRFKRNKDKEDTGSLKKTSLSSTSLNLKPSRSEFGGDGASTMGQDWPSRLAEPSQYNSNSNSASARPPQARHGTFKSPFAKRGRTHHRHDDRDEAIGPTDKHDGMQAGGTMFHLDTDLNDMSGILSRPLPLTPMDADFVGTIKGEKSTVTSNGRNGAWDAPDSWAVKRTGDDLAYHGPENDEAGPSPRPEEKMTSYCIRVFKSDGTFATLQMSIDSSVQDLIGQLSKKSYVSGGLEYHIALRKHGLIRVLGSAEKPLFIQKRLLRQVGFEERDRIEDIGREDNSYLCRFLFMSSRELEQQARTQDLGLGRTQKFNHVDLSARNIIRIPIYLYSKVQDIISLNLSKNLSLDLPRDFISSCQNLRDIKFNNNEARKLPASLGRASRLTYLDVSNNRIDHLENAELNGLVGLLKLNLANNRLKHLPPYFGAYRSLRTLNVSSNFLDKFPSFLCELESLVDLDLSFNLIGAFPPAIENLRNLEKLVITNNRLAGTLPDSFSRLQSLRELDIKYNAISGIDVISLLPKLEILAADHNAISQFVGSFERVRSLKLKDNPITRFELTSTVPTLKLLNLSNAKLASIAESFNHMLNLERLVLDRNHFVSLPSQIGRLRRLEHFSIAHNALAELPPEVGCLQELKFLDVRGNNLKKLPLEIWWANKLETLNASSNVMTDFPKPASRPPQPPESSPGSMQGSNGKVAMVGSLSTPPSIEDLDPDDSRRPSQASSSTLLSVGPSPVPAGPDRKSSVVSVYGKGGRKTSIISRSANSSGNAPAPPNTRKDSGLSARITNTFSGSLRNLFLADNLLDDDVFDQIMLLCELRVLNLSFNQISDMPQRCIKSWPQLSELYLSGNELTTIPVDDLEEYSLLQVLHINCNKFTNLPADISRAKKLAVLDCGSNFLKYNISNVPYDWNWNLNPNLRYLNLSGNRRLEIKQPAYGSGAGNREQYTDFSRLQNLRVLGLMDVTLTQPSIPEQSEDCRVRTSGSSAGYLPYAMADTLGKNEHLSTVDLVVPRFNASETETLLGLFDGQALSSGGSKIAKYLHENFGQILATELRALKTGLKETPEDALRRAFLALNKELVTIAIQHSEDRPSVPHRSGSQAHVILNKEDLNSGGVATVVYLQGQDLYVANVGDAQAMIILSDQTHKMLTRKHDPAEPTERSRIREAGGWVSRNGKLNDQLGVSRAFGYVDLMPAVQAAPHVSHVAIREQDEMILLATSELWEHLAPELIVDIARQERGDLMRATQKLRDLAIAYGSTNKIMIMMISVADLKRRTERTRINRGQSMSIHNLSLHGEQYKFPTRGRRKKDQVMDSTLQRLEAEVPAPTGMIAIVFTDIKNSTNLWETYPAAMRSAIRLHNEMMRRQLRRIGGFEVKTEGDAFMVSFPTATSALLWCFAVQLQLLEVNWPSEMLNSLSCKPTVDKNNQVIFKGLSVRMGIHWGEPLCEPDPITRRMDYYGPMVNKASRISAVADGGQITVSSDFISEIQRCLETYQGANAAALVNESFDEDPFSMAIRKELRSLSSQGFEVKELGERKLKGLENPEVVYSLYPHQLAGRIETHQAHDKGVTAAAPELIENTPAVLKEGSELDFDPKIIWGLWKLSLRLEMLCSSLEYVGGRGLQAPETELLERMKQRGGEVTESFLVNFMEHQISRIETCVSTLSIRHLNMGGGTIKELDDLRGPISSVLANFSKQMAELQRYKALYGPLDAIEDGQQAS

SEQ ID NO: 820 - protein, 382 aa, Oryza sativa
  unsure (1)..(382): unsure at all Xaa locations
MARHRHRLAAAAALLLLLLSSAAALSSSAAEGEEDPLIEQVVGGGEEEDAQLDAEAHFASFERRFGRTYRDAGERAYRMSVFAANLRRARRHQRLDPTATHGVTKFSDLTPGEFRDRFLGLRRPSLEGLVGGEPHEAPILPTDGLPDDFDWREHGAVGPXVKDQGSCGSCWSFSTSGALEGAHFLATGKLEVLSEQQMVDCDHECDASESRACDSGCNGGLMTTAFSYLMKSGGLQSEKDYPYAGRENTCKFDKSKIVAQVKNFSVISVNEDQIAANLVKHGPLAIAINAAYMQTYIGGVSCPFICGRHLDHGVLLVGYGSAGYAPIRFKEKPYWIIKNSWGENWGEKGYYKICRGPHDKNKCGVDSMVSSVTAIHTSKKEE

SEQ ID NO: 821 - protein, 821 aa, Thermotoga neapolitana
MGAALCERILGRQQGSGQSHHQKPVAEGNQKIHMGTRRMRRESYGTVQDPSQPVEVRVKDLLSRMTLEEKIAQLGSVWGYELIDERGKFKREKAKDLLKNGIGQITRPGGSTNLEPQEAAELVNEIQRFLVEETRLGIPAMIHEECLTGYMGLGGTNFPQAIAMASTWDPDLIEKMTAAIREDMRKLGAHQGLAPVLDVARDPRWGRTEETFGESPYLVARMGVSYVKGLQGENIKEGVVATVKHFAGYSASEGGKNWAPTNIPEREFREVFLFPFEAAVKEARVLSVMNSYSEIDGVPCAANRRLLTDILRKDWGFEGIVVSDYFAVNMLGEYHRIAKDKSESARLALEAGIDVELPKTDCYQHLKDLVEKGIVPESLIDEAVSRVLKLKFMLGLFENPYVDVEKAKIESHRDLALEIARKSIILLKNDGTLPLQKNKKVALIGPNAGEVRNLLGDYMYLAHIRALLDNIDDVFGNPQIPRENYERLKKSIEEHMKSIPSVLDAFKEEGIDFEYAKGCEVTGEDRSGFKEAIEVAKRSDVAIVVVGDRSGLTLDCTTGESRDMANLKLPGVQEELVLEIAKTGKPVVLVLITGRPYSLKNLVDRVNAILQVWLPGEAGGRAIVDVIYGKVNPSGKLPISFPRSAGQIPVFHYVKPSGGRSHWHGDYVDESTKPLFPFGHGLSYTRFEYSNLRIEPKEVPSAGEVVIKVDVENVGDMDGDEVVQLYIGREFASVTRPVKELKGFKRVSLKAKEKKTVVFRLHTDVLAYYDRDMKLVVEPGEFRVMVGSSSEDIRLTGSFSVTGSKREVVGKRKFFTEVYEE

SEQ ID NO: 822 - protein, 184 aa, Pseudomonas aeruginosa PAO1
MKPRVLLSVLALAGLPLSGWAADCPELLQGQLTKLRSKESIDLCQRYAGKPLVVVNTASHCGFTPQFKGLEALYQRYKGQGLEVLGVPSDDFKQEAADTAETAKICYGNYGVTFAMTQPQHVRGDEAIPLFRQLAEQSGQAPRWNFYKYVVDRQGRVVAQFSSKTTPDDPQLQAAIEKAIASQP

SEQ ID NO: 823 - protein, 239 aa, Triticum aestivum
  unsure (1)..(239): unsure at all Xaa locations
GAINVVRGTKSSDEELFQIYSHSESIALVVDSPQFFNRLAESFISRINARFIVXLWGDKSSLNSKAVMDIPVYDYNDITELGRENRNALCYSSELFEQGQQGVFEAIGPEDVATLIYTSGTGGTPKGVMLTHRNLLHQINNLWDIVPAVPGDRFLSMLPXHAYERSTEYFIFTHGIQQVYTTVKHLKADLQHHQPHYIISVPLVYETLYSSIQRQISASPPARKTVALALIKDKFAIYG

SEQ ID NO: 824 - protein, 183 aa, Escherichia coli O157:H7 EDL933
MQDSILTTVVKDIDGEVTTLEKYAGNVLLIVNVASKCGLTPQYEQLENIQKAWADRGFVVLGFPCNQFLEQEPGSDEEIKTYCTTTWGVTFPMFSKIEVNGEGRHPLYQKLISAAPTAVAPEESGFYARMVSKGRAPLYPDDILWNFEKFLVGRDGLVIQRFSPDMTPEDPIVMESIKLALAK

SEQ ID NO: 825 - protein, 138 aa, Cicer arietinum
ENGLTDEKNFFHRPGFGGGAGGVVDLVVVVEEGLGSGLGGGFGAGGGGGAGGGTGGGAGGGFGGGGGGGFGGGGGVGGGSGFGGGSGFGSGVGNGGGLGGGSGGGFGGGGGGGLGGGAGAGGGFGGGAGGGVGGGGFP

SEQ ID NO: 826 - protein, 431 aa, Triticum aestivum
RHPLAPSDATGIVRSRCLRIPRPVAVPETGSGAATAATGWGRGRRGGSDVVDLRTLLIHCAQSVATDDRRSATELLKQVKLHARPDGDGTQRLAHCFAEGLQARLAGTGGLVHQSLMATRISAVDMLKAYQLYMAAICFKKVSFLFSNSTIYNASLGKKKIHIIDYGIQYGFQWPCFLRRISTRPGGPPDVRITGIDLPQPGFRPRERIEETGRRLKKYAHEFNVPFEYRAIATAKMESLRKEDLKIDPDEVLIVNSLFQFKNLMDESVVLESPRDVVLKNIRKMRPHTFIHAIVNGSFSAPFFVTRFREVLFYYSALFDVLDTTTPRDNEQRMLIEQNILGRAALNVIACEGTDRVERPETYKQWQVRNQRAGLKLLPLNPEVIELARDKVKNCYHKDFVIDIDQHWLLQGWKGRILYAISTWTANDASS

SEQ ID NO: 827 - protein, 216 aa, Saccharomyces cerevisiae
MLSHYIFLAFVLLPFRVSAFYFYGYGGDRKCFLKELSKDTLLKGSYNLEVYDDKLADYALPSYNDYGIVIDVEEVFDNNHRVVHQQGSPSGDFSFLALESGEYKICLQSRVNNWVGKTKTKLEIEFEVGFEAMLDMQRKETLESLHGKVSILNSKIVDIRREQQLMREREESFRDISESVNSRAMWWTVTQVTLLIIICVWQMKSLRSFFVKQKVL

SEQ ID NO: 828 - protein, 764 aa, Pseudomonas stutzeri
  unsure (1)..(764): unsure at all Xaa locations
MLSQPRRIAERVVEGVNALKDEGAELVGLGGFTSIVGNRGLQTLDRTQIPVTTGNSLTAYAAYMNLLGVLSALEIPPEKAEVAVLGYPGSIALAIVCLLAPLGCRLRLVHRGGKQQVDTLLEYLPSQFHGQVTLHAGLEDCYAQVRLFVAATSTGGVIDPRRLACGSVVVDAALPKDMQPGWEKRDDILVIDGGLVSATDAVDFGAMALGLGPKRNINGCLAETMILALQGRAEAFSIGRELPAEKVLEIGRIAEGHGFLPYPMASGGESVDGARFDELRRFHGARPPAVVHDLNTGSQELRSEVLRCFGTHINPILREFYEFNHVERVFSNGQGCWLTDLDGRRYLDFVAGYGCLNTGHNHPEIAARLQEYLTQQHPTFVQYLSAPLHASLLAKRLAELAPAGLERVFLSNSGTEAVEAALKLALAASDKSTLLYCTNGYHGKTLGALSVTGREKHRKAFEPLLPRCEEIPFADVSALRNRLLKGDVAXFIMEPIQGEGGVTMAPDGYLRVVRDLCSEHECLWILDEIQTGLGRTGKMFACEWEDVSPDIIVLSKSLSGGLVPIGATLSSKEVWQRAYGNIDRFALHTSTFGGGNFAAAAAMAALDVIEHEDLPGNAALVGAHLRQGLEALARKHYFIKEVRGRGLMIAIEFQNDVSNGIEAFVRDMTSRMPANAAATYRMMPAKAREHLEAAMRELESTLADMFVLRIMTKLSQEHGILTFVTANNNRVMRIQPPLVLSLAEADRFIKALGEVCEDLSTFES

SEQ ID NO: 829 - protein, 838 aa, Brassica rapa
MRGVLFSVLLLFPAFSFSANTLSATESLTISSNKTISSPGNIFELGFFKPSSSSRWYLGIWYKAISKRTYVWVANRDHPLSTSTGTLKISDSNLVVVDGSDTAVWSTNLTGGGDVRSPVVAELLDNGNLVLRDSNNNDPDGVLWQSFDFPTDTLLPEMKLGWDLKTGFNRFLRSWKSPDDPSSGDYSFKLETRGFPEAFLWNKASQVYRSGPWNGIRFSGVPEMQPFDYIEFNFTTSNQEVTYSFHITKDNMYSRLSLSSTGSLQRFTWIEAIQNWNQFWYAPKDQCDEYKECGTFGYCDSNTYPVCNCMRGFEPRNPQAWALRDGSDGCVRKTALSCNGGDGFVRLKKMKLPDTAATSVDRGIGIKECEEKCKSDCNCTAFANTDIRGGGSGCVVWTGDILDTRNYAKGGQDLYVRLAATDLEDTTNRNAKIIGSCIGVSVLLLLCFIFYRFWKRKQKRSIAIETSFVRSQDLLMNEVVIPSRRHISRENKTDDFELPLMDFEAVAIATDNFTNANKLGQGGFGIVYKGRLLDGQEIAVKRLSKMSVQGTDEFKNEVKLIARLQHINLVRLLGCCVDEGEKMLIYEYLENLSLDSHLFDKTRSCKLNWQKRFDITNGIARGLLYLHQDSRFRIIHRDLKASNVLLDKDMTPKISDFGMARIFGRDETEANTRKVVGTYGYMSPEYAMDGIFSTKSDVFSFGVLLLEIISGKRNKGFYNSDHDLNLLGCVWRNWKKGKGLDIVDPIILDSSPSTYRPLEILRCIKIGLLCVQERANDRPTMSSVVMMLGSETTAIPQPEPPGYCVGRSPLDTDSSSSNQRNDESWSVNQMTVSVIDPR

SEQ ID NO: 830 - protein, 197 aa, Oryza grandiglumis
GQTPVFPRILGHEAGGIVESVGEGVTELAPGDHVLPVFTGECKECAHCKSEESNMCDLLRINVDRGVMIGDGQSRFTINGKPIFHFVGTSTFGEYTVIHVGCLAKINPEAPLDKVCILSCGISTGLGATLNVAKPKKGQTVAIFGLGAVGLAAMEGARLSGASRIIGVDLNPAKFEQAKKFGCTDFVNPKDHSKPVH

SEQ ID NO: 831 - protein, 186 aa, Corynebacterium glutamicum ATCC 13032
MTPQPLILPFGDKVPRIHESAWIAPNATIIGDVEIGPDASIFYGVVLRGDVNKITIGARTNVQDNCVLHVDGDAPCTLGDDVTVGHMALVHGATVGNGTLVGMKSALLSGSHVGAGALIAAGAVVLEGHEIPAKALAAGVPAKVRRLLDDAQSQSFIPHAGRYVETSKAQASIAEALSLDEVRVRE

SEQ ID NO: 832 - protein, 168 aa, Triticum aestivum
MAETEYRCFVGGLAWATDDNNLQQAFSQYGEILDAKIINDRETGRSRGFGFVTFGSEESMRQAIEEMNGKELDGRNITVNEAQSRRSGGGGGGGGGGYGGQRGGGGGYGGGGGYGGGGGGYGGQGGGGYGGQRGGGGGYGGGGGYGGGGGYGGQRGGGGGDSGGQWRN

SEQ ID NO: 833 - protein, 430 aa, Canavalia lineata
MAQILAPSTQWQMRITKTSPNASPVTSNMWSSLLMKQNKKATSSAKFRVLAIKSENGTINRLENLLDLDITPYTDKIIAEYIWVGGTGIDVRSKSRTIARPVEHPSELPKWNYDGSSTGQAPGDDSEVILYPQAIFKDPFRGGNNILVICDAYTPAGEPIPTNKRHRAAEIFSNPKVQAEVPWYGIEQEYTLLQTNVNWPLGWPVGGYPGPQGPYYCSAGADKSFGRDISDAHYKACLYAGINISGTNGEVMPGQWEFQVGPSVGIEAGDHIWAARYILERITEQAGVVLSLDPKPIQGDWNGAGCHTNYSTKSMREEGGFEVIKKAILNLSLRHSDHIRAYGEGNERRLTGKHETADINTFSWGVANRGCSIRVGRDTEKNGKGYLEDRRPASNMDPYVVTSLLAETTLLWEPTLEAEALAAQKIALKV

SEQ ID NO: 834 - protein, 483 aa, Zea mays
  unsure (1)..(483): unsure at all Xaa locations
MDGPKRSHLRVRLRVTARRRGAYGDGAGGALGPRRRKCRMETPVLNSAAKLQRREIGGRQXRHAGGGPAAAVPERFRNMQLQEEFDTYDDNANLFVKLQFLKRRSKINEIVAAKDIIFALANSGLCAAFNRVTNKRIGFLNLSPDEVIRSLFYNKNNDSLITVSVYASDNFSTLKCRTTPIEYIRRNQLDAGFPLFESESLKWPGFVEFDDVNGKVLTYSAQDGIYKVFELKNYSFLYSIPDENVQEIKISPGIMLLIYDRTPSYVPLKILSIEDGKQLKSFKHLLHRNKKIDFIEQFNEKLLVKQENENFQIFDVRSSELIEVSVSKFMTPSAFIFLYENNLFLTFRNRTVAVWDFRGELVTSFEDHLLWHNDCSTNNIYITSDQDLIISYCKSEAVAEDGTVVPVGSINISEIMTGRCIAKITANDPSLSVPGRRNGYSKRSSDWSTVPEALEDVTALFYDEDRNEIYTGNSHGLVHVWSN

SEQ ID NO: 835 - protein, 205 aa, Zea mays
MEARPSRIECSEPNEQPEPKDPGRVFHAERVAPRDATESVTEKLAHGGCGHDGVIDETYDTRIKIAEALEASARAIGDKHVEPSDAAAIRVAEASAAGRGAIPGGVSERAQAAVAANARAARDEDKVTMADVLTWEATVKLPTGKAVTGEVAAAAAEAEAEAANDPRAKTNPRGVSAALGMAAKHNCGHESARTGTAFPDEAKQD

SEQ ID NO: 836 - protein, 314 aa, Triticum aestivum
  unsure (1)..(314): unsure at all Xaa locations
MAASAAPLPAGPARGSGLPASARPRRGALQVPAGAPDTRPHPFSPAPAGASRSRAEATAFTRALNVEVDAVDCAAGDNFPVNEATAGSSTVVEGGFHDEPNLASDDGDWVVRFEQSFNVFLTDTVIFILDILYRDRDYARFFVLNXIVQGALIFAFISVLHLYEXFGWSRRXDNIKVXHFAESMNEFHHLLIMEALGGNSVWLDRFLARFSAFFYYFVTVAMYMLSPRMAYHFSECVERHAYSTYDKFLKLNGEELKKLPAPEVAVNYYMNEDLYMFDEFQTSRAPNSRRPKVDNLYDVFVNVRDDEXRSIARQ

SEQ ID NO: 837 - protein, 352 aa, Haemophilus somnus 129PT
MSINFVKEGNIMSKYVRSVCLVEPKKVDIKTVLYPKKGECDVLIKVESIGICGSDIGAFRGTNPLVTYPRILGHEIVGTVIESGVGMPKNINIGDRVILEPYIYCGHCYPCSISRTNCCEALKVLGVHIDGAMQEIVRHPAHMLIKAPDIPIHELALAEPLTISLHAIRRTKVKAGEHVAIIGAGAIGLMAALVAKAYGATPILIDILDKRLDYAKSIGIPNIINPAKENDLEAIKSITNGRMAEVVIEASGANIAVQNTLKYTSFAGRIALTGWPKNETPLPTNLITFKELNIYGARTSKGEFEEALKLLESRKIEPKNIISKVITFDEIPHYIEELSENPDDYLKIIAVF

SEQ ID NO: 838 - protein, 281 aa, Zea mays
MASGSIVKKEVGENHDVLLFGVNNSVKGDLAPQHPIQATVHKEAKFWADKKRFGAEAIYGSAFNIRKDLDAQILSKFQRPPGALPSSMLGYEALTGSLDDFGFEDYLNLPQDSDSFHAPDMHHGMEKNLLKIGICKKYIHTRSRGDSGGRGVRLPNLAPSRSDPACPALEADPQATTSGEVTARTWRWQSEDYGSPTRRGDARGRCRQVDAGGTSGSRRLAWTASGGWRDNDKEASLTDGVKVDARANGKEAGLTDGMEVNTVMTGSPMMVVCATRHAETD

SEQ ID NO: 839 - protein, 212 aa, Uncultured proteobacterium
MDFIKLNGQNTPSPTLTVGGISVFKEFLSPSDQLHLVKELRAVAAQAPVFSPKTKSGKPMSVRLTAAGDFGWFSDQRGYRYVEQHPSGVNWPEIPDAIMAIWRAVAGAVPDPECCLVNFYGDGARMGLHQDRDEANFDWPVVSISLGDDALFRVGGTERGGKTESIWLQSGDVAVMGGAARLNYHGIDRIKFGSSSLLKEGGRLNVTLRVVR

SEQ ID NO: 840 - protein, 437 aa, Brassica rapa
MKGVRKPYDNSYTFSFLLVFFVLILFRPTFSINTLSSTESLTVSINRTLVSSGNVFELGFFRTNSSSRWYLGIWYKKMSERTYVWVANRDNPLSNSIGTLKISGNNLVLLGYSNKPVWSTNRTRGNESSLVVAELLDNGNFVMRDSNNNEASQFLWQSFDYPTDTLLPEMKLGYDLKKGLNRFLTSWRNSDDPSSGEISYKLDIQRGMPEFYLLKSGLRAHRSGPWNGDRFSGIPEDQYLSYMVYNFIKNSEEVVYTFRLNDNSIYSRLKISSEGFLERLTWTPTSIAWNLFWSAPVDLKCDVYKACGVYSYCDENTSPVCNCIQGFMPLNEQRWDLRDWTSGCTRRTRLSCSGDDFTMMKNMKLPDTTMATVDRSIDVKECEKRCLSDCNCTAFANTDIRDGGTGCVIWTGELDDMRTYFANGQDLYVRLAPADLV

SEQ ID NO: 841 - protein, 574 aa, Oryza sativa
  unsure (1)..(574): unsure at all Xaa locations
MPSRMMRAFAQEASDFDRQMGCMAGMFQIFDRRRLLTARQRGGARGAAPPGHVLPNSNSNDPVASNNTLDKTFSKSMTENSSLSMESSRASSSSSSCSSFSSTDINRPIQQELSYINKERFAGKPPRSSQXKECEMFQDRGQNHPHTGFRDIVKESINRETHGMTIKTSTKESRKGLHKDSPRPLLISKSTDGTYVIGIDRSTGVPGYVHESSRPPRFSCDDRQLLRSVEAQDSKKPSAKLKELPRLSLDSRKESMNPCSRLKNSGYISLDVLKHQESPSHQRASSVVAKLMGLEGTTPDIHETARSPTPVHGTQIDQPSHCQRIKNXXDHSVPVQKNHSPVLKTNPSPRIIPEAAPWRQNERXXVTGRAAEVKPRTASIYADIQRRLRGLELSECNKELRAXQDIEHTAQKGWPKPERQQSXINXAIQKKASEQIVDSENFQSPIVIMKPARCITKPDASDTLVAPLSRPKGIRRLRHEXRHLSPGRMKXSDSKRNHSPNESAHSSGEEPVNSARSPRLSSSLSPRLAQKKADSERRSRPPVLPTSPGKKSKETXQLIDKKKKKKKKKKKKKX

SEQ ID NO: 842 - protein, 839 aa, Oryza sativa (japonica cultivar-group)
MAMAARGVLAMVVAVAVVWCNNVARAQTPVFACDASNATVSGYGFCDRTKSSAARAADLLGRLTLAEKVGFLVNKQAALPRLGIPAYEWWSEALHGVSYVGPGTRFSTLVPGATSFPQPILTAASFNASLFRAIGEERMCVNIVSMVHALPQQQLRCNAPMHGCACAVQDLRQDMLVSLVTGVLRHCLMGINSEMEAQKAWSMMYNLIVLVVSTEARAMHNVGLAGLTFWSPNINIFRDPRWGRGQETPGEDPLLASKYAVGYVTGLQDAGGGSDALKVAACCKHYTAYDVDNWKGVERYTFDAVVSQQDLDDTFQPPFKSCVIDGNVASVMCSYNKVNGKPTCADKDLLSGVIRGDWKLNGYIVSDCDSVDVLYNNQHYTKNPEDAAAITIKSGLDLNCGNFLAQHTVAAVQAGKLSESDVDRAITNNFIVLMRLGFFDGDPRKLPFGSLGPKDVCTSSNQELAREAARQGIVLLKNTGALPLSAKSIKSMAVIGPNANASFTMIGNYEGTPCKYTTPLQGLGANVATVYQPGCTNVGCSGNSLQLSAATQAAASADVTVLVVGADQSVERESLDRTSLLLPGQQPQLVSAVANASRGPVILVVMSGGPFDISFAKSSDKISAILWVGYPGEAGGAALADILFGYHNPGGRLPVTWYPASFADKVSMTDMRMRPDSSTGYPGRTYRFYTGDTVYAFGDGLSYTKFAHSLVSAPEQVAVQLAEGHACHTEHCFSVEAAGEHCGSLSFDVHLRVRNAGGMAGGHTVFLFSSPPSVHSAPAKHLLGFEKVSLEPGQAGVVAFKVDVCKDLSVVDELGNRKVALGSHTLHVGDLKHTLNLRV

SEQ ID NO: 843 - protein, 346 aa, Lycopersicon esculentum
MDSCEVTKTRIPFKERPDWADVKPVPQDDGPCPVVPIAYTEDFSETMDYFRAIYVADERSTRALQLTGEAIQLNPGNYTVWQFRRVVLEALGVDLREELKFVDRIAGENTKNYQIWHHRRWLAEKLGADAVTNELEFTKKIFSQDAKNYHAWSHRQWVLQALGGWEDELAYCQQLLEDDIYNNSAWNQRYFVVTRSPLLGGLVAMRELEVNYTVQAIRASPENESPWRYLRGLYKNDTQSLVQDSQVASVLWDVLTSQNSHVHALRFLLDLLCHDLEPSQELKSAVDVLTPQSCSPDLALTKKICSILEHADPMRVKYWNWRKSMVRVQLLQSQNAERLANLSVQE

SEQ ID NO: 844 - protein, 427 aa, Coxiella burnetii
MTELTGVSIVTYQHIKVPSEGEKITVNKAVLEVPDRPIIPFIEGDGIGIDITPVMKNVVDAAVEKSYAGKRKIEWMEIYAGEKATKVYGKDNWLPDETLEAIKEYQVAIKGPLTTPVGGGIRSLNVALRQQLDLYVCLRPVRYFTGVPSPVKTPEKVNMVIFRENSEDIYAGIEWPAGSPEAVKLINFLQNEMGVKKIRFPETAGIGIKPVSKEGTSRLVRRAIQYAIDNDRDSVTLVHKGNIMKFTEGAFKDWGYEVAVKEFGAKPLDGGPWHVFENPKTGQKITIKDVIADAFLQQILLRPAEYSVIATLNLNGDYISDALAAEVGGIGIAPGANLSDTVGLFEATHGTAPKYAGQDKVNPGSLILSAEMMLRYLGWKEAADLVVQGIEGAIESKTVTYDFARLMTGAKEVSASQFAKAIIKHIL

SEQ ID NO: 845 - protein, 218 aa, Daucus carota
MAHQGVKLLGAWASPYSRRVEIALKLKGIDYEFVAETLSPKSADILKYNPVHKKLPIFLHNGKPVVESLVIVEYIDETWSSGPSILPADPLGKANARFWAKFIDDKLMPAIMNIRRCQGEEQVKAIDEVVELFKLLENQLNGKKFFGGDTIGLVDITANFLALWLIIHQEIMGLQIVTEEKLPVFCKWIDEYLNSSVIKQSLPSKEELSAALLAYHKS

SEQ ID NO: 846 - protein, 356 aa, Securigera parviflora
MSLLTDLVNLNLSESTEKIIAEYIWVGGSGLDIRSKARTLPGPVSDPAKLPKWNYDGSSTDQAPGEDSEVILYPQAIFRDPFRRGSNILVICDVYTPAGEPLPSSYRYNAAKIFSHPEVAAEEPWYGIEQEYTLLQKDINWPLGWPVGGFPGQQGPYYCGIGADKAYGRDIVDAHYKACLYAGINISGINGEVMPGQWEFQVGPSVGISAGDEIWAARYILERITEIAGAVVSFDPKPIPGDWNGAGAHTNYSTKSMREDGGFEIIKKAIEKLGLKHKEHIAAYGKGNERRLTGKHETADINTFSWGVANRGASVRVGRETEKEGKGYFEDRRPASNMDPYIVTSMIAETTILWKP

SEQ ID NO: 847 - protein, 179 aa, Listeria monocytogenes EGD-e
MENRKQMIKTERLFLSEMTLADTEILFGYWSDDSVTRYMNIEPFQSLQPVEEMIRMLRQLEIEGKALRCVIILQATEEIIGTCGFNYIDHENHRAEIAYDLGTRFWKRGYATEAVRALMEWGKESFELHRIEAKVDPRNSASIALLEKLGFSEEGLLRDYEKIGETYQDVQLFSWIDEI

SEQ ID NO: 848 - protein, 346 aa, Vigna unguiculata
MWRPFFEQYHLIIVQDGDPSKTIKVPEGFDYELYNRNDINRILGPKASCISFKDSACRCFAYMVSKKKYIYTIDDDCFVAKDPSGKDINALEQHIKNLLCPATPFFFNTLYDPYREGADFVRGYPFSLREGAPTAVSHGLWLNIPDYDAPTQLVKPRERNTRYVDAVLTIPKGTLFPMCGMNLAFDRELIGPAMYFGLMGDGQPIGRYDDMWAGWCVKVICDHLGLGVKTGLPYIWHSKASNPFVNLKKEYKGIFWQEEIIPFFQSATLPKECTSVQKCYIELSKQVKEKLGAVDPYFNKLADAMVTWIEAWDELNNTSEQTSSKKAGQWGCQVNQSNIAFQSCGL

SEQ ID NO: 849 - protein, 382 aa, Glycine max
  unsure (1)..(382): unsure at all Xaa locations
MHLQTQHTHCVCETPSHTQVTKTTCVVPMASATPLLKDELDIVIPTIRNLDFLEMWRPFFEPYHLIIVQDGDPSKTIKVPEGFDYELYNRNDINRILGPKANCISFKDSACRCFGYMVSKKKYIYTIDDDCFVATDPSGHKINALKQHIENLLCPSTPFFFNTLYEPFREGADFVRGYPFSLREGVPTAVSHGLWLNIPXDYDAPTQLVKPLERNTRYVDAVLTIPKGTLFPMCGMNLAFDRDLIGAAMYFGLMGDGQPIGRYDDMWAGWCCKVICDHLGLGIKTGLPYIYHSKASNPFVNLKKEYKGIFWQEDIIPFFQSVVLPKEATTVQKCYIELAKQVKEKLTKVDPYFDKLADAMVTWIEAWDELNPAGASVANGKA

SEQ ID NO: 850 - protein, 98 aa, Buchnera aphidicola
LPSASLNDSNFGLYEPAGGSAPDIAGKNIANPIAQILSIAMLVRYTMKLPMISDHIESAVIDTLKKGYRTLDIANDKEQYVSTNDIGDIISDILKKRI

SEQ ID NO: 851 - protein, 339 aa, Bacillus subtilis subsp. subtilis str. 168
MAILVTGGAGYIGSHTCVELLNSGYEIVVLDNLSNSSAEALNRVKEITGKDLTFYEADLLDREAVDSVFAENEIEAVIHFAGLKAVGESVAIPLKYYHNNLTGTFILCEAMEKYGVKKIVFSSSATVYGVPETSPITEDFPLGATNPYGQTKLMLEQILRDLHTADNEWSVALLRYFNPFGAHPSGRIGEDPNGIPNNLMPYVAQVAVGKLEQLSVFGNDYPTKDGTGVRDYIHVVDLAEGHVKALEKVLNSTGADAYNLGTGTGYSVLEMVKAFEKVSGKEVPYRFADRRPGDIATCFADPAKAKRELGWEAKRGLEEMCADSWRWQSSNVNGYKSAE

SEQ ID NO: 852 - protein, 748 aa, Geobacillus stearothermophilus
MENQNRQNAAQCPFHGSVTNQSSNRTTNKDWWPNQLNLSILHQHDRKTNPHDEEFNYAEEFQKLDYWALKEDLRKLMTESQDWWPADYGHYGPLFIRMAWHSAGTYRIGDGRGGASTGTQRFAPLNSWPDNANLDKARRLLWPIKKKYGNKISWADLFILAGNVAIESMGGKTIGFGGGRVDVWHPEEDVYWGSEKEWLASERYSGDRELENPLAAVQMGLIYVNPEGPDGKPDPKAAARDIRETFRRMGMNDEETVALIAGGHTFGKAHGAGPATHVGPEPEAAPIEAQGLGWISSYGKGKGSDTITSGIEGAWTPTPTQWDTSYFDMLFGYDWWLTKSPAGAWQWMAVDPDEKDLAPDAEDPSKKVPTMMMTTDLALRFDPEYEKIARRFHQNPEEFAEAFARAWFKLTHRDMGPKTRYLGPEVPKEDFIWQDPIPEVDYELTEAEIEEIKAKILNSGLTVSELVKTAWASASTFRNSDKRGGANGARIRLAPQKDWEVNEPERLAKVLSVYEDIQRELPKKVSIADLIVLGGSAAVEKAARDAGFDVKVPFFPGRGDATQEQTDVESFAVLEPFADGFRNYQKQEYSVPPEELLVDKAQLLGLTAPEMTVLVGGLRVLGANYRDLPHGVFTDRIGVLTNDFFVNLLDMNYEWVPTDSGIYEIRDRKTGEVRWTATRVDLIFGSNSILRSYAEFYAQDDNQEKFVRDFINAWVKVMNADRFDLVKKARESVTALQYFISIRSKIAG

SEQ ID NO: 853 - protein, 358 aa, Arthrobacter sp. BP2
MKRCSAMHAFAVLPDDATIHDLEFSTPRPEGRQVLLKVMRAGVCHTDTHLREGGYDLGSRGHMSMKDRGIQYPMVLGHEVVGVVEQVGADVASVSAGDVRLIYPWIGCGTCRQCREGHDNRCAAGQNLGVARHGGYAEYIIVPDEKYLVDIEGLDPSWAATLACSGLTAHSAVDKVLPLEPDEPVVIFGAGGLGLTAIAILRARGHRNICAVDVAERNLALARDMGATSTVLSGAGSGAADIQRAAGGPASAVVDFVNNGATATAAFDALAKAGTMVQVGLFGGEVTLPTAMLALRMIRIEGSFVGALSQLQDLVRIAKAGELPTIPVSERTLSAAEVSRALDDLTAGGIAGRIVLTA

SEQ ID NO: 854 - protein, 1003 aa, Pseudomonas syringae pv. syringae B728a
MEFTQLIKDMLDAKPDAALEAALAECAREPIRVPGAIQPHGVLLSVAGDPLCIEQVSANCATEFGMAADELLGKPLSWLLSPEQSALIDHAYGHPAAPHIDPIKLTIGTAHYSASLQRADDVLIIELEPFVETGHGQSRIITRVLRNLQAATTLETLFDISVHEIQALTGYDRVMIYRFEPEGHGQVVAQALTGPLPSYSGLNFPGSDIPAQARELYRLNWIRVIPDATYVPVPLIPTLRPATGQPLDLGFSTLRSVSPVHCEYLKNMGVRSSMSISLLDGGELWGLVACGHPEPLRVSRELRDACAMIGQLLSVKISAIVATNIQREREEKVVLLGQLADAMSRANHEVLDGLVSRPELLMSLTLADGAAVLIDDQVYLFGTCPSIEQVRELYTWIRDTGLASQRSRQRATGLQGLGVFHTNSMQRELADSAVYRDIASGVIAFTLPKPIDNAVMWFRAQLTSTMNWSGNPTHHVSTRPESSASHRLHPRQSFDVWEQEVTGIASPWSRADLYGAEDIRRSALESDLERQVQREQEAVRLRDELVAVVSHDLRNPMSIIIMQCGMMQSWAVGDTHFENRNIRRALGTIEKATTRMNSLLEDLLDTAQIEAGRYQLSRLPLSVTSLLEEACSLLVMLTTEKNIELNCTAAQGLVIDADPERIFQVLSNLVGNAIKFTPKGGRINIDAVADQNEVLFRVSDDGIGIPAEHLPFIFQRYWSVKEGNPRGNGLGLYICQGIITAHGGRLWADSSLDSGSVFSFTLPVHQGTDSIGETTFLKQSGTTHRLAQSISSKLERQQLEDRLTRAGLLNELNHRVKNTLATVQAIASLTVNSSASLESFHKSFGARLFALSQAHDALARAEWISTELVDLIEQLQEQDSGAHRISFEGDPVTLEPRFSLTLSMVLHELMANALQHGALSSASGQVTVTSTLTAEHTPPTLKIEWKETGGPPVVATTVKGFGLRLIRRSIERELKGQADIQFARTGIIWSMLIPWPDKPESRL

SEQ ID NO: 855 - protein, 478 aa, Nicotiana tabacum
MAAVNGVGISWPSKLTQSQRPKLVFSPSPRRCTPSSSTIKMTASVDEKKKTFTLQKSEEAFSKAKELMPGGVNSPVRAFKSVGGQPIIIDSVKGSRMRDIDGNDYIDYVGSWGPAIIGHADDEVLAALAETMKKGTSFGAPCLLENTLAEMVISAVPSIEMVRFVNSGTEACMGVLRLARAFTGRPKIIKFEGCYHGHADPFLVKAGSGVATLGLPDSPGVPKAATTDTLTAPYNDISAVESLFKEHKGEVAAIILEPVVGNAGFIQPNPDFLAAIRKITKENDALLIFDEVMTGFRLAYGGAQEYFGITPDLTTLGKIIGGGLPVGAYGGRRDIMEMVAPAGPMYQAGTLSGNPLAMTAGIHTLKRLQGPGTYDYLDKITGELTQGILDAGKKTGHAMCGGYIRGMFGFFFVEGPVNNFSDAKKSDTEKFGRFYRGMLEEGVYFAPSQFEAGFTSLAHTSEDIQRTVAAAEKVLKQI

SEQ ID NO: 856 - protein, 92 aa, Bacillus sp.
  unsure (1)..(92): unsure at all Xaa locations
VKTTKEIIEITEKLGAHNYHPLXIVIXXAXGVVSWDPEGGQYFDMLSAYSALNQGHRHPKIIQALKNQADNVTLTSRAFHNDQLGPWYEKIT

SEQ ID NO: 857 - protein, 342 aa, Oenococcus oeni MCW
MICMKQVQVTAVGENSFVDVDQPQVGRQDVLIKIKANGICGSDTFYTSIGGIPPRQGHTPLGHEAAGIVADIGSDVDDVSIGDHVVINPMSAEDGIIGNGGAQGALSDYVNLINAKANRNFRIIPKNIPWEVAALNEPMAVAQHAVNRSKAKADSKVAVFGAGPIGLGAIISLKALGVKNVVAIDIIPERLQKALDVGADSIIDSGKEDVLEQLIKFHGQGLEKVPSGNKRSATDIYIDAAGASIVPKTVFKIAQYRAVYTIVAVHKKEVPVNFGDLLDRELDIRLSVGYPTEIFQVTDNIIKYPELYAKIISNVFPFSDALKALKTAATPGAADKVVVSFD

SEQ ID NO: 858 - protein, 286 aa, Triticum aestivum
MPGMEEAEDYASCAFSLTCPEDGAELGDGVVDDGDLFLFYVGGGAAADDEDGDDEYVEQLVSKEASFCSSSDSGDNGCSFSTRGPALLQARRTPPTYGRRAGRTDTRLATPRRGCTEEEVEDDVVVCVQRAAMPWAARLLSVACVSVAAKMEEYCAPALSELDAGGGYEFCFASVRRMELLVLSTLGWRMAAVTPFDYLPCFSSRLDRHDGRGGGGLDPAGVALKSIGSICATAEAGSVLDYMPSTAAAAAILVASYEALLTKEALESKMDNLSPSCPIEKVSCTN

SEQ ID NO: 859 - protein, 338 aa, Mannheimia haemolytica
MAILVTGGAGYIGSHTLVELLNENREIVVLDNLSNSSEVSLERVKQITGKSVKFYQGDILDRDILRKIFAENQIESVIHFAGLKAVGETSENRYVTIKNNVTGSIVLVEEMLKANVNTIVFSSSATVYGDPQIIPIVESCPVGGTTNPYGTSKYMVERILEDTVKAFPQLSAVVLRYFNRVGAHESGLIGEDPNGIPNNLMPFISQVAVGKLPQLSVFGGDYNTHDGTGVRDYIHVVDLALGHLKALDKHQNDAGFHVYNLGTGTGYSVLDMVKAFEAANGITIPYKVVDRRPGDIAVCYSAPQKALEQLGWETERGLEQMMKDTWNWQKNNPNGYKG

SEQ ID NO: 860 - protein, 229 aa, Oceanobacillus iheyensis HTE831
MINSLLTIVFIIGTLSIYILSRKLNKKWNHPLTLPVLVSSVAIIVFLLISEIPYETYMLGGDWIHYLLGPAVVALAYPLYIRRQLLLKWLYPIFMGTIAGAFIGILSGIILAKLLQVDETIIYSLVPKSVTTPIAIEVTNIIGGQVSLTAVFVIMAGISGVFMRSFLFKTMRIEHVVGRGVGIGSASHAIGSAHSLEIDELEGTLGTVAMVVSAVIVSMLAPLLVSFIF

SEQ ID NO: 861 - protein, 393 aa, Pseudomonas aeruginosa UCBPP-PA14
MDVLRRRPARRVPLAVPARNRARRAGAPAQRAYLRPARKPTMKALRWHAARDLRLSELERQAPRPGEVELEVAYCGICGSDLHEYQSGPHSIPQAEAHPLSGCRAPLTLGHEFCGVVAALGPGVEGLRIGDRVAVEPEYRCGECRYCREGRYNLCESMGFIGLMGDGGFAERARVPAYMLHRLPDAVGFRQAAVLEPAAVALHALRRSSLAPGQRCAVFGLGPIGLLLVMLARLRGIEDIAAVDVSPERLALAGEFGASRALDARDGDTAARLREGGALDCAFEAAGSQASLDAALASLRKGGELVLVSLMGEVRLDAFDLVNRELRLLGSVGYRDAYPELIALLADGRLDLARAVTRSVPLEQAVEHGFEALLRDKSQVKVLVNPNPALADA

SEQ ID NO: 862 - protein, 392 aa, Ryssopterys timorensis
DLEPVNPADVPVTAAGALKSYKLAAKAISRLQSLPSGNISLLCDVLVKEVRDLTGYDRVMVYKFHEDEHGEVVSECRRSDLESYLGLHYPATDIPQASRFLFMKNKVRMICDCLAPPVKVLQDERLPQPLSLCGSTLRSPHGCHAQYMTNMGTIASLVMSVTINEDDDMMDGDQQQMTRKLWGLVVCHHNSPQFVPFPLRYACEFLIQVFGVQINKEVELAAQVREKHILQIQTMLCDMLLRDAPVAIITQSPNVMDLVKCDGAALYFKNKTWLLGVTPTEEQIRDIAQWLLEYHSGNTGLSTGSLMEAGYSGASALGDAVCGMAAVSITLRDFLFWFRSHTAKEVKWGGAKHDPDDKDDLRKMHPRSSFKAFLEVVKWRSMPWEDIEMDAI

SEQ ID NO: 863 - protein, 246 aa, Zea mays
MPPRPVPLFSRLRFRLPSCAAVSISTPPSSAAPLHYGHRTPLASPFPLSPPCPRILRAAVAVSSLDLRPITGGFALFSMAAASSATSVHDFTVKDASGKDVDLSTYKGKVLLIVNVASQCGLTNSNYTELSQLYEKYKDQGFEILAFPCNQFGGQEPGTNEEIVQFACTRFKAEYPIFDKVDVNGDNTAPIYKFLKSSKGSLFGDNIKWNFSKFLVDKEGHVVERYAPTTSPLSIEKDIKKLLGSS

SEQ ID NO: 864 - protein, 380 aa, Actinidia deliciosa
MGLPKSFVSMSLLFFSTLLILSLAFNAKNLTQRTNDEVKAMYESWLIKYGKSYNSLGEWERRFEIFKETLRFIDEHNADTNRSYKVGLNQFADLTDEEFRSTYLGFTSGSNKTKVSNRYEPRVGQVLPSYVDWRSAGAVVDIKSQGECGGCWAFSAIATVEGINKIVTGVLISLSEQELIDCGRTQNTRGCNGGYITDGFQFIINNGGINTEENYPYTAQDGECNVELQNEKYVTIDTYENVPYNNEWALQTAVTYQPVSVALDAAGDAFKQYSSGIFTGPCGTAIDHAVTIVGYGTEGGIDYWIVKNSWDTTWGEEGYMRILRNVGGAGTCGIATMPSYPVKYNNQNYPEPYSSLINPPAFSMSKDGPVGVEDGQRYSA

SEQ ID NO: 865 - protein, 225 aa, Bradyrhizobium japonicum USDA 110
MTASLKLISHKLCPYVQRAVIALKEKGVPFERVDIDLANKPDWFLKLSPLGKVPVLVVTTDKGEVALFESNVICEYIEETQAGAKLHPADALSRAEHRAWMEFGSAILGDLWGLETTTDPATFESKRQALAAKFARVEAALGAGPYFAGEAFSLVDAVFAPVFRYFDLFDELTEHGIFTDVPKVRAWRAELAKRPSVRSAVGADYPQLLRAFLVRHDAHLLKLAA

SEQ ID NO: 866 - protein, 637 aa, Neurospora crassa
MSDHDPDHGPASPNEYDDESNPASPGSVDESSEASTPMDPPSSGSDAMPGFTPEGDLPRRVPSLRTISDPQHTNSMSPSSSVPGTLNAARRPAASAANLPTDLMAKARALHQQRMGMAPRPSMSPQNSGLGMGPMGSGMGGMGSMGGMGHSMNLNMNHGGPAPGGLPGGLRLPPGIARPPPQGFPKSAPAIAGLGAKKAPSLSERRAMKLGGLPGGPGSPVTATPKLSDMGAEDAKAPAINGEGRGSKLSDFKNYIDAEKGWITFADAATITRTGVNFANGQTFRISLDEVEVMDELGKGNYGTVYKVRHSKVMAMKEIRLELDESKFSTILKELVILHECASPYIIDFYGAFYQEGAVYMCIEYMDGGSIDKLYAGGIPENVLRKITYATIMGLKCLKEDHNIIHRDVKPTNILVNTNGQVKICDFGVSGNLVASIAKTNIGCQSYMAPERISGGGMSAAGGAAAGTYSVQSDIWSLGLTIIECAMGRYPYPPEVSSTIFSQLSAIVEGDPPGLPSEGYSGTAQDFVKSCLNKIPAKRHTYPMLLMHPWIKSLGRPETITEEVEAEEKAADDQLADATGSLDINSNGPINDQGDREVAEWVTNVLDRKLKGLLSDKAEKPALHAAPLDQVSPGIAA

SEQ ID NO: 867 - protein, 393 aa, Miscanthus sinensis
EPARTEDPALSMAGAVQSQKLAVRAISCLQALPGGDVKLLCDTVVEHVRELTGYDRVMVYRFHEDEHGEVVAESRRDNLEPYLGLHYPATDIPQASRFLFRQNRVRMIADCHATPVRVIQDPGLSQPLCLVGSTLRASHGCHAQYMANMGSIASLVMAVIISSGGDDEQTGRGGISSAMKLWGLVVCHHTSPRCIPLPLRYACEFLMQAFGLQLNMELQLAHQVSEKHILRTQTLLCDMLLRDSPTGIVTQSPSIMDLVKCDGAALYYHGKYYPLGVTPTESQIKDIIEWLTVCHGDSTGLSTDSLADAGYLGAAALWDAVCGMAVAYITPSDYLFWFRSHTAKEIKWGGAKHHPKDKDDGQRMHPRSSFKAFLEVVKSRSLPWENAEMDAIH

SEQ ID NO: 868 - protein, 364 aa, Ganoderma applanatum
MFSKVFLSLVVLASSVAAAVPTVGRRATCANGKTTANDACCVWFDVLDDIQENLFHGGQCGEDAHESLRLTFHDAIAFSPALTAAGQFGGGGADGSIIAHSDVELTYPVNDGLDEIVEASRPFAIKHNVSFGDFIQFAGAVGVANCNGGPQLSFFAGRSNDSQPSPPNLVPLPSDTADTILSRFSDAGFDAVEVVWLLVSHTVGSQNTVDSSIPGAPFDSTPSDFDAQFFVETMLNGTLVPGNGLQDGEVLSPYPGEFRLQSDFALSRDSRTTCEWQKMIADRANMLEKFEITMLKMSLLGFDQSALTDCSDVIPTATGTVQDPFIPAGLTVDDLQPACSSSAFPTVTTVAGAVTSIPAVPLNS

SEQ ID NO: 869 - protein, 93 aa, Saccharomyces cerevisiae
MVTPREPKKRTTRKKKDPNAPKRALSAYMFFANENRDIVRSENPDITFGQVGKKLGEKWKALTPEEKQPYEAKAQADKKRYESEKELYNATLA

SEQ ID NO: 870 - protein, 392 aa, Blepharandra heteropetala
DLEPVNPADVPVTAAGALKSYKLAARAISRLQSLPSGNISLLCDVLVKEVRDLTGYDRVMVYKFHEDEHGEVISECCRPDLEAYLGLHYPATDIPQASRFLFMKNKVRMICDCLAPAVKVIQDERLPQALSLCGSTLRSPHGCHAQYMANMGTIASLVMSVIINEDNDMMDGDQQHIARKLWGLVVCHHTSPRFVPFPLRYACEFLIQVFGVQINKEVELAAQVREKHILRTQTLLCDMLLRDAPVAIITQSPNVMDLVKCDGAALYYRKKFWLLGVTPTEVQIRDTAEWLLEYHGGNAGLSTDSLMEAGYPGASDLGNAVCGMAAVRITSRDFLFWFRSHTAKEIKWGGAKHHPNDKDDVRKMHPRSSFKAFLEVVKWRSLPWEDIEMDAI

SEQ ID NO: 871 - protein, 437 aa, Pasteurella multocida
MSARNNKIGVVQLTILTMVNMMGSGIIMLPTKLAEIGTISILSWLVTAVGSTALAYAFAQCGMFSKKSGGMGGYAEYAFGKAGNFMANYTYGVSLVIANTAIAISAVGYGSELLEVSLSPVAIAGWTIITLWLATSLNFGGARITGNISSFTIWGVIIPVVGLCIIGWKWFDADMYINAWNPHHVPTFEAIGVSISMTLWAFLGLESACANTDVVENPERNVPIAVLGGTLGAAAIYIVSTNVIAGIVPNMDLANSTAPFGLAFAHMFNETTGKIVMGLMVLSCFGSLLGWQFTIAQVFRSSAEEGYFPAFFKKVTSKDAPIIGMVTITVIQSLLSLMTISPSLNKQFNVLVDLAVVTNVIPYILSMAALMVLQKVEKVPAQKAKITTFVAFIGSVYSIYALYAAGQEPMLYGSIATFIGWTLYGFVSDKFDIKAKV

SEQ ID NO: 872 - protein, 379 aa, Streptomyces coelicolor A3(2)
MSVGTSSAPGARQVPRPLAPRTSGDPADLGIDPDQLPDGLVVADEHGRVVCFNAAAVRITATPAAEALGQLLESALPLEDLEGRRWWQLTDPYGGLAIRVRQPERNLLLPGGREVLVTARYVRAERLGPVHRVVVTLRDTEARRRTERSHAELIATVAHELRSPLTSVKGFTATLLAKWERFTDDQKRLMLETVDADADRVTRLIAELLDISRIDSGRLEVRRQPVDIGAAVGRHIQAYVASGLEADRFLLRLAQPLPDLWADPDKVDQVLSNLLENAVRHGEGTVTIDVTPTASPREGEDTGTSVTVSDEGAGIPEESMNRVFTRFWRGSKRGGTGLGLYIVKGIVEAHGGTITVGRAPGGGAEFRFTLPVAAPAYLT

SEQ ID NO: 873 - protein, 349 aa, Sinorhizobium meliloti
MEYRRLGRSGLKISTITMGTMTIGGGGKFAQVGDVGIADARRYVDLCLDAGVNLIDTADIYSTGACEEIIGEVLGGKRKDGVLIATKARFSMGPGPNDGGLSRHHLISACEASLKRLKTDVIDLYQVHEWDGQTPLEETMEALDTLVRQGKVRYIGCSNYSGWHIMKALGISALEHRQRFVSQQIHYTLEAREAEYELVPISIDQGLGILVWSPLAGGLLSGKHRRGQSPEGTRQLAGWNEPPIRDEERLWKIVDMLVAIAAERNVSPAQIALAWLIGRDAVTSVIIGGRTEDQFRDNLAAAGLKLTDEERELLDAVSLPPVLYPYWHQLWTAKDRLGEADLSLLGPHI

SEQ ID NO: 874 - protein, 314 aa, Agrobacterium tumefaciens str. C58 (U. Washington)
MTKIALAIHGGCGVMPEDSMTAAEWAAAREDLAAALRAGYGVLKAGGTALEAVEAAVVVMEDSPHFNAGHGAALNENGIHELDASIMDGATLSAGAISASRAIRNPVKAARALMVDERAVYLTGEAADRFATEKGLATEPQSYFTTQKRLEALAAMKRHAATGTEATENEKHGTVGAVALDAAGHLAAATSTGGYTNKPDGRVGDSPVIGAGTYARDGACAVSGTGKGEFFIRYVVGHEIASRVAYLGQDLETAAGNLVHRDLAPYDIGAGLVAIDAKGGITAPYNTPGMFRGWVTASGEAFVATHAEAYAVKL

SEQ ID NO: 875 - protein, 149 aa, Magnaporthe grisea
MADSLTEEQVSEFKEAFSLFDKDGDGQITTKELGTVMRSLGQNPSESELQDMINEVDADNNGTIDFPEFLTMMARKMKDTDSEEEIREAFKFFDRDNNGFISAAELRHVMTSIGEKLTDDEVDEMIREADQDGDGRIDYNEFVQLMMQK

SEQ ID NO: 876 - protein, 532 aa, Oryza sativa (japonica cultivar-group)
MEVEAARRDAATLDPELLQLPELSPGALRENPALAEALYSQWLALPETSKLVNSLIEDAKAGATLNVTGSSASTNAASSGSLPSMFPAGSAPPLSPRSTSGSPRVMRRGSGAGPSSLGSPLKVVSEPVREVIPQFYFKYGRPAPKDLKEQCLSRIDHLFFAGEGLQIQEFRSVTKDICKLPSFFSSVLFKKIDAAGSGTVTRLFKFYTLLHGEAISVLILFYLRGSLYLELNLLYLEVRDAFVDYWINDNKITMDTASQIFEILRKPDYNYLTQEDFKPVLKELLATHPGLEFLQGTPEFQERYAETVIYRIFYSINRAGNGHLTLRELKRGNLIAAMQQLDEEEDINKVLRYFSYEHFYVIYCKFWELDTDHDFLIDKENLIRYGNHSLTYRIVDRIFSQVPRKFTSMTEGKMGYEDFVYFILSEEDKSSEPSLEYWFKCIDLDGNGILTTTEMQFFYEEQLHRMECMAQEPVLFEDILCQMIDMIGPENECYFTLRDLKRCKLSGNIFNILFNLNKFMAFETRDPFLIRQ

SEQ ID NO: 877 - protein, 157 aa, Lactococcus lactis subsp. lactis
MNFYDFSAFKMNGETVSMSDFKGKVVIVVNTASKCGFTPQFEGLEKLYENYKDQGLEILGFPCNQFVNQDAGENSEINEFCQLNYGVTFPMFQKIKVNGKEAHPLYQFLKKEAKGALSGTIKWNFTKFLIDREGNVIERFAPKTEPKEMEEEIQKLL

SEQ ID NO: 878 - protein, 252 aa, Thermobifida fusca
MPQTPRVAIVTGAARGIGAATAQRLAAEGHAVAVLDLTKESAQATVDAITEAGGKAIALGADVSDTQQVEAAVKETAERLGPPTILVNNAGVIRDNLLFKMTDDDWDTVMRVHLRGAFLMSRAAQAYMTEQGWGRIINLSSSSALGNRGQANYSAAKAGLQGFTKTLAIELGKFGVTANAVAPGFIVTDMTRATAQRIGVDFEEFKAARAAQIPVRRVGVPEDIAATVAFLASEEAGYISGQVIYVAGGPLD

SEQ ID NO: 879 - protein, 466 aa, Salmonella typhimurium LT2
MGQLSESHALGGGLKSRHVTMLSIAGVIGASLFVGSSVAIAEAGPAVLLAYLFAGLLVVMIMRMLAEMAVATPDTGSFSTYADKAIGPWAGYTIGWLYWWFWVLVIPLEANIAAIILNSWIPGIPVWLFSLVITLALTGSNLLSVKNYGEFEFWLALCKVIAILAFIALGATAISGFYPYAEVSGISRLWDHGGFMPNGFGAVLSAMLITMFSFMGAEIVTIAAAESDTPDKHIVRATNSVIWRISIFYLCSIFVVVALIPWNMPGLKSVGSYRSVLELLHIPHAKFIMDCVILLSVTSCLNSALYTASRMLYSLSRRGDAPAIMGKTNRSKTPWVAVLLSTGAAFLTVIVNYYAPAKVFKFLIDSSGAIALLVYLVIAISQLRMRKILLAQGGEIKLKMWLYPWLTWLVIGFICFVLVVMLFRPAQQLEVISTGLLGLGIIGTVPIMSRWKKLIRWQKAPLQNLR

SEQ ID NO: 880 - protein, 319 aa, Staphylococcus aureus subsp. aureus MW2
MRRLFSIGEALIDFIPNITNANLKDVQTFTKQIGGAPCNVACTVQKLGQQAYMITQLGNDAFGDSIIETISSIGVDVSKVYRTNEANTALAFVSLTEAGERDFSFYRKPSADMLFEPSFVNDIDVNENDVVHFCSVDLVDSPMRDAHYQLITKTLNANGTVVFDPNVRLPLWDNAEDLRQTIHTFLPLAHIVKVSDEELEFITGIHDENEAIQSLFTGNVTVVIYTKGADGAAVYLKNGINHYHSGYKVKPVDTTGAGDAFIGAVISRILATDVLNLTQLFENEGEEILAFSNRVAAIVTTKYGAINSLPTLQEVEQAF

SEQ ID NO: 881 - protein, 152 aa, Brassica rapa subsp. pekinensis
MAKGVAVLNSSEGVKGTIFFTQEGDGATTVTGTVSGLKPGPHGFHVHALGDTTNGCMSTGPHFNPDGKTHGAPEDANRHAGDLGNIIVGDDGTATFTITDSQIPLTGPNSIVGRAVVVHADRDDLGKGGHELSLSTGNAGGRVACGIIGLQG

SEQ ID NO: 882 - protein, 1329 aa, Mycobacterium tuberculosis H37Rv
MSLVIVAPETVAAAALDVARIGSSIGAANAAAAGSTTSVLAAGADEVSAAIATLFGSHAREYQAISTQVAAFHDRFAQTLSAAVGSYVSAEATNAAPLATLEHNVLNALNAPTQALLGRPLIGDGAAGAPGTGQAGGAGGILWGNGGAGGSGAPGQVGGAGGAAGLFGTGGAGGAGGAGAAGGAGGSGGWLLGNGGVGGAGGQSLLGGATGGAGGNAGLFGVGGTGGPGGPGGPGGVGGTGGAGGLGGTLYGAGGHGGAGGPGPIGGVGGHGGVGGAAGLLGVGGHGGAGGHGAEGVAGAAGEDLSPHGTSGGVGGDAGDGGTGGRGGWLAGAGGAGGAGGVGGTGGAGGAGFSRALIVAGDNGGDPGAGGAGGTGGAGSTIGAHGAAGASPTSGGNGGAGGNGAHFSSGGKAGGNGGAGGAGGLVGNGGAGGAGGNGAPGAPPSGGDPNGGGGGAGGAGGKGGDGGAQAGDGGAGGAGGKGGNGGNGATGATGLNGLGAGADGTDGGKGGNGGAGGGGGAGGQGGKALAATHQDGSMGAGGAGGNGGAGGMGGDGGNGAKGTFDNGGDGVGGNGGNGGSRGIGGAGGIGGAGSTAGADGARGATPTSGGNGGTGGNGANATVAGGAGGAGGKGGNGGLVGNGGAGGKGGDGMAGVAGSSPTTAGESGTSGQNGGAGGAGGAGGRGGDFGGDGGTGGAGGNGANGANATTPGAKGGDGGHGGPGAQGGNGGQGGPGGLAGNLFGQNGIQGVGGSGGKGGAGGLAGDGGNGANGNFAFGDGNGGHGGNGGNPGAGGQGGSGGAGSTPGAKGAHGFTPTSGGDGGDGGNGGNSQVVGGNGGDGGNGGNGGSAGTGGNGGRGGDGAFGGMSANATNPGENGPNGNPGGNGGAGGAGGAGLNGGNGGAGGNGGLGGFGGNGAAGANGVAVGAPGQPGGAGGHGGAGGNGGAGGNGGQGVVSDGAGGAGGAGGDGGAPGDGANGGNGQGAGAFAGGGGGRGGDGGNAGNAGAGGPGGTGSTAGKAGPAGSILHDGGNGGHGGHGAASGGNGGPGGHGGNGGNGGTGANGGNGGIGGTGGAGSTGAKGVLGTNEGDGGDGGRGGNGGRGGNGGQGLTGAGGNGGTGGTPGNGGNGGNGASGDLVTSPGDGGGGGRGGDAGRGGDAGLGGSSGPGGTPGDWGTGGTGGTGGTGGQGANGGLTGGRGGTGGNGGNGNTGGTGGAGGTGGTGHNGSQPGMGGNGGAGGFGGNGFAGVGGRGGMGGSGGTGGTGDAGPFGTGTGGTGGHGGQGGGGGFSILLGLGGLGGLGSPGSIATGTAGGAGGGGGFGGLGGGEFV

SEQ ID NO: 883 - protein, 352 aa, Methanosarcina barkeri
MKGFAMLEIGKVGWIDTERPSAGPYDAIVRPIAVAPCTSDVHTVWEGALGNRKNMILGHEAVGVIEETGSEVKDFKPGDKVIVPAITPDWRSIEAQDGMPMHSNGMLSGWKFSNFKSGVFAEFFHVNDADMNLALLPKGMPLEQAVMLSDMATTGIQGAEMAKIKMGSTVAVIGIGPVGLMAVAGATILGAGRLIAVGSRKVCVDLALEYGASEIVDYRKGGLVEQILEKTNGKGVDSVIIAGGNENTISDAVKIVKPGGTVSNVNYYGTGDILPIPRIEWGSGMSQKDIRGGLTTGGRLRMERMADLCTYGRIKPEKMATHVFKGFDKMEEALMLMKEKPRDLIKPVVLLD

SEQ ID NO: 884 - protein, 392 aa, Stigmaphyllon sagraeanum
DLEPVNPADVPVTAAGALKSYKLAAKAISRLQSLPSGNISLLCDVLVKEVRDLTGYDRVMVYKFHEDEHGEVVSECRRSDLESYLDLHYPATDIPQASRFLFMKNKIRMICDCMAPPVKVIQDETLPQPLSLCGSTLRSPHGCHAQYMTNMGTIASLVMSVTINEDDDTMDGDQQQMTRKLWGLVVCHHTSPRFVPFPLRYACEFLIQVFGVQINKEVELAAQVREKHILQIQTMLCDMLLRDAPVAIITQSPNVMDLVKCDGAALYFKNKTWLLGVTPTEEQIRDMAQWLLEHHSGNTGLSTDSLMEAGYPGASALGDAVCGMAAVSITSRDFLFWFRSHTAKEVKWGGAKHDPDDKDDLRKMHPRSSFKAFLEVVKWRSMPWEDIEMDAI

SEQ ID NO: 885 - protein, 416 aa, Neurospora crassa
MVTSRHNDETFFVESDDQPAPRVNVRDAAKLIARNKQEMIANNLSRLACDEYLEDIMQHIRHMEDETLPDANLIDMQREIQWFMRPYLIDFLIEAHAAFSLLPETLFLTVNLLDRYCSKRVVYKQHYQLVGCAALLIAAKYGDKKDRVPQINELNNMCCGLYDAGMFTQMEMHVLNTLDWNIGHPTVDFFTQLIVAEERDSRDVEHMAAYICEIALYHRDFVSTKPSIMARVSLVLARAILGKPEVNDGEWDQVENATLLALSQHLHQPSVTLSRKYSSAYLSKVSGKLADFLAQQAAINRRGGAPPSSPGELTPNSSKASNVYSTPHKGLGAVPGAADGYMTPPITPDAASFAQNGTMMKEYPAPRCPVTPTPQPNSHSQSYPPAAQHQTSASSTSSSTKAPSYFETAPSSQVTY

SEQ ID NO: 886 - protein, 277 aa, Aphanothece halophytica
MTKADAVAKQAQDYYDSGSADGFYYRIWGGEDLHIGIYNTPDEPIYDASVRTVSRICDKIKNWPAGTKVLDLGAGYGGSARYMAKHHGFDVDCLNISLVQNERNRQMNQEQGLADKIRVFDGSFEELPFENKSYDVLWSQDSILHSGNRRKVMEEADRVLKSGGDFVFTDPMQTDNCPEGVLEPVLARIHLDSLGSVGFYRQVAEELGWEFVEFDEQTHQLVNHYSRVLQELEAHYDQLQPECSQEYLDRMKVGLNHWINAGKSGYMAWGILKFHKP

SEQ ID NO: 887 - protein, 427 aa, Oryza sativa (japonica cultivar-group)
MPSPSLRLAVVGAGAAGLVAARELRREGHSPVVFERAASVGGTWLYDAAPATSDPLAAGAAHSSLYASLRTNLPREVMGFLDFPFASSAAEAGGGGDTRRFPGHDEVLRYLEEFARRFDLYGLVRFGTEVVRVRRDGGGGGGRWAVTSRKIGEKGRREEEEEVYDAIVVCNGHYTEPRVAHIPGVEAWPGKQMHSHNYRVPEPFHDQVVIIIGASASAVDISRDLAGVAEEVHVADRSAPACTCKRQPGYDNMWLHSMVNALFSCYLYDFPFLEDDSAITVDDNCVDPLYKHVFPPEVAPHLSFIGLPWKVIPFPLFELQSKWVAGVLSGRVKLPSSEEMMEDVKAFHSKMEARGWPKRYAHNFSDCQFEYDDWLAEQCGHPPIEQWRKLMYAANSENKAARPESYRDEWDDDHLVAEAAEDFKKYL

SEQ ID NO: 888 - protein, 306 aa, Candida albicans
MTDSKYDYSDITPVDINTEEPQICQILYDEDYKQIMGLLLALMKAEEYSERALHITELGINELASHYTIWIYRFNILKNLPNRNLYDELDWCEEIALDNEKNYQIWNYRQLIIGQIMELNNNDFDPYREFPILEAMLSSDPKNHHVWSYRKWLVDTFDLHNDAKELSLVDKVIDTGLKNNSAWSHRFFLLFSKKHLATDNTIDEELNYVKDKIVKCPQNPSTWNYLLGIHERFDRSITQLEQFRLQFVDLEKDQVTSSFALETLAKIYTQQKKYNESRTVYDLLKSKYDPIRSNFWDYQISKLTSV

SEQ ID NO: 889 - protein, 351 aa, Zea mays
MYSWEMLSFNIHDGFLEAIVRGNRSGLLTQADYNNLCQCETLDDIKMHLSATEYGPYLQNEPSPLHTTTIVEKCTLKLVDEYKHMLCQANEPLSTFLQYITYGHMIDNVVLIVTGTLHERDVNELLEKCHPLGMFDSIASLAVAQNMRELYRLVLVDTPLAPYFSECITSEDLDDMNIEIMRNTLYKAYLEDFYKFCAKLGGATAEIMCNLLSFEADRRAVNITINSIGTELTRDDRRKLYSNFGLLYPYGHEELAVCEDVDQVRGAMEKYPPYQSIFSRISYGESQMLDKAFYEEEVKRLCLSFEQQFHYAVFFAYIRLREQEIRNLMWISECVAQNQKSRVHDSVVFIF

SEQ ID NO: 890 - protein, 66 aa, Glycine max
MARFRFHWLEAMLPLGIIGGFLCIMGNGQYYIHRAAHGRPKHIGNDMWDVAMERRDKKLVDKPAAN

SEQ ID NO: 891 - protein, 531 aa, Neurospora crassa
MAVGISRAKCLMMLFALASIAVLQVYARGTHETYGMERKASPSDMSLEELDGLLQDCPVVQALSAEKVIAHAHQSSSATERLFAILFPGSPAVNAILATLYISGPPNFLLALCPTNIDPSSLSVMVAFAVGGLLGDTLFHLLPEIFIGEDSHESAKFVLVEPNRNLLLGLAILVGFMTFVAMDKGLRIATGGEGGHDHSHGHSHGGHSHEHGAATGVDVAKKGDAKNRKGEKNELKKKDVDAQEEDDKKEVNPSAKLGGYLNLIADFTHNITDGLAMSASFYASPTIGATTTVAVFFHEIPHEVGDFALLVQSGFSKRQAMGAQFVTAIGAMLGTLIGIAVQEFGGSSGPSEAAMGMKEGIWGTSLTWGDMLLPFTAGTFLYVGTVAVIPELLETGKDKAKELKKTLVQFAAIAVGAGIMLVKGFVITSGNGNGNRHYHNLNSVLTNLQGHGPSYSGNDHSHQAHIYAPSQVLLGQAMSSAPKDRHKHREKSVTPRYKQPWCQSIMGRRCFTVESNWAVFTTEFKTPYRML

SEQ ID NO: 892 - protein, 774 aa, Glycine max
MACENDKKGHLLLALGLVLCVTLTFFPRVTEGRVPFACDPRNGLTRGFKFCNTHVPIHVRVQDLIARLTLPEKIRLVVNNAIAVPRLGIQGYEWWSEALHGVSNVGPGTKFGGAFPGATMFPQVISTAASFNQSLWQEIGRVVSDEARAMYNGGQAGLTYWSPNVNIFRDPRWGRGQETPGEDPTLAAKYAASYVKGLQGDGAGNRLKVAACCKHYTAYDLDNWNGVDRFHFNAKVSKQDLEDTYDVPFKACVLEGQVASVMCSYNQVNGKPTCADPDLLRNTIRGQWGLNGYIVSDCDSVGVFFDNQHYTRTPEEAAAEAIKAGLDLDCGPFLAIHTDSAIRKGLISENDLNLALANLITVQMRLGMFDGEPSTQPFGNLGPRDVCTPAHQQLALEAARESIVLLQNKGNSLPLSPSRLRTIGVIGPNADATVTMIGNYAGVACGYTTPLQGIARYVKTAHQVGCRGVACRGNELFGAAEIIARQVDATVLVMGLDQTIEAETRDRVGLLLPGLQQELVTRVARAAKGPVILVIMSGGPVDVSFAKNNPKISAILWVGYPGQAGGTAIADVIFGATNPGGRLPMTWYPQGYLAKVPMTNMDMRPNPATGYPGRTYRFYKGPVVFPFGHGLSYSRFSQSLALAPKQVSVQILSLQALTNSTLSSKAVKVSHANCDDSLETEFHVDVKNEGSMDGTHTLLIFSKPPPGKWSQIKQLVTFHKTHVPAGSKQRLKVNVHSCKHLSVVDQFGVRRIPTGEHELHIGDLKHSINVQTTH

SEQ ID NO: 893 - protein, 363 aa, Buchnera aphidicola (Uroleucon solidaginis)
  unsure (1)..(363): unsure at all Xaa locations
MKTKYRIAVLPGDGIGPEVMREAYKILNILKNYFSLPIETREFNVGGAAIDQDGVALPKTTLLGCENSDAILFGSXXXXXXXXXXXXXXXXXXXLLPLRKHFNLFGNLRPAQLYSELIHLSPLRSDIINNGFNILCIRELTGGIYFGKPAGRLKKNNIEYAFDTEIYYNYEINRIAHLAFQLAKTRNYKVCSIDKSNVLNSSILWREIVQKVSKNYPDVHLSHLYIDNATMQIIKNPNQFDILLCSNLFGDIISDECAMITGSIGMLPSASLNEKKFGLYEPAGGSAPDIEGKNIANPIAQILSVSMLVRYSMNLKTIADKIDQSVISVLKKGYRTADISNNSHYLKTNEMGDVIASALISGE

SEQ ID NO: 894 - protein, 530 aa, Leptospira interrogans serovar lai str. 56601
MILVNFENEKEISLSKPQNLLEISLNNGIPHTHACGGNARCSTCRVLVLENPSHLSPPEQKEKELSQKKGFPKSVRLACQTTVLGDVRVRRIVLDEEDYNLTIPGSATISGEEKEIAILFSDIRDFTLFSESHLPYDVIHILNRYFYKMGDVILKHGGKIDKYIGDGLMALFGVNGGSPQEICISALRAAKEMELELYSLNEYLKSHLHTSFRIGVGVHYGNCILGQLGHPANMSYTAIGDSVNIASRIESKTKKSGASVLISESLYKQVKEKVVKGRVFSAQLKGKTGNYKLYEIQEILEKVDANLWEEAKNSLRRIILVREVGSWLKLVYHLSCLFDENQNWIGLSAANSFQKFSKLPENGDLVQNFYQIKDTFNEQFQNSFSFADLLALAGAVAIEKSGGPKIPIQPGRKDRLLSEVFQILPLSMQTQKDQLPYLQKMKLGIRDIVLISGARTIGWLGGESFTSNPYNFDNSYFHVLLKAGLEGPLLIPNDRELLKNDESRAFVLDYALDPSKFFEDFTSTYLKLTS

SEQ ID NO: 895 - protein, 65 aa, Zea mays
SLINSFLGATVQKSGFSSVPKKVVGVNGPTVTRISGMNKLDNNGVKEVFVFLTTALTGVACTNIF

SEQ ID NO: 896 - protein, 373 aa, Triticum aestivum
  unsure (1)..(373): unsure at all Xaa locations
MAGSVRCSAAARSYSITLLPGDGIGPEVVAVAKDVLSVAGSKEGVELRFQEMLMGGAALDAAGVPLPDETLAAARASDAILLGAIGGYKWDNNEKHLKPETGLLNIRAGLGVFANLRPAXTVLPQLEVAEGVDNMVVRELTGGIYFGKPRGFGTNDKGDVTTDNSEEETGFNTEIYSAAEIDRIARVAFEVARKRGGKLCSVDKANVLEASMLWRKRVTAIASEFPDVELXAMQLIRNPNQFDTIVTNNIFGEIILFVASXLYDEASMTAGSIGMLPAAGVGESGPGLFEPHRCPAPDIAGQDKANPLATILSAAMLLKYGLGVESAAKRIEAAVTETLDNGFRTGDIYSAGTTLVGCKRMGEEVLKALESQK

SEQ ID NO: 897 - protein, 214 aa, Michelia figo
  unsure (1)..(214): unsure at all Xaa locations
RPCAEMSMLCDAEVALIVFSSRGKLYEFGSAGVNKTLERYQRCCYTFQDANITDRDTQGWYQEVSKLKAKCDSLQRSQRHLLGEDLGPLSVKELQKLERQLESALTQTRQRKTQIMLEHMEALREKERQLGDINKELKNKLEAKGQGAFRAMQASWESGPLVGNNGFPMHPSQSAAIECEPTLQIGYHSFAAPEASIPRTVVAESNFMPXGMLC

SEQ ID NO: 898 - protein, 153 aa, Solidago canadensis var. scabra
MVKAVAVLSSSEGVSGTIFFSQEAEGAPTTVTGDLSGLKPGPHGFHVHALGDTTNGCMSTGPHYNPHGKDHGAPDDEHRHAGDLGNVTVGEDGTAKFTIVDKQIPLIGAQSIIGRAVVVHADPDDLGKGGHELSKTTGNAGGRVACGIIGLQG

SEQ ID NO: 899 - protein, 412 aa, Crambe kralikii
YHHSCTLFFILLLQFHHVFSTNTLSSNETLTISSNKTLVSPGDVFELGFFKTTQDGHDRWYLGTWYKTTSERTYVWIANRDNPLHNSMGTLKVSHANLVLLDQSDTPVWSSNLTGTAQLPVTAELLSNGNFVLRDSKTNDLNQSMWQSFDFPVDTLLPEMKLGRNLKTGHDRVLTSWKSPTDPSSGDYSFKLETQGLHEFYLLKNEFKVYRTGPWNGVRFNGIPKMQNWSYIVNNFIDTKEEVAYTFHVNNRNIHTRFRISSSGVLQVITWTSTVPQRNMFWSFPEDDCDMYQMCGPYAYCDMNTTPRCNCIKGFVHKNASAWDLRDMSGGCVRSSKLSCGGEGDGFLRMSQMKLPETSEAVVDERIGLEECKEKCVRDCNCTGFANVDNRNGGSGCVIWTGELVDMRNYVA

SEQ ID NO: 900 - protein, 83 aa, Zea mays
KGGGGGGGGGSVSGSGGGNLNPWECSPKCGSRCSKTQYRKACLTLCNKCCAKCLCVPPGFYGNKGACPCYNNWKTKEGGPKCP

SEQ ID NO: 901 - protein, 140 aa, Zea mays
MVSFEMNDLKKIGLGLTGFGIFFSFLGIIFFFDKGLIAMGNILFLSGLGLTIGLKSTMQFFTKPKNYKGTISFGAGFFLVLIGWPFLGMLLEAYGFVVLFSGFWPTLAVFLQRIPIIGWIFQQPFVTSFLDRYRGKRVPV

SEQ ID NO: 902 - protein, 338 aa, Vibrio cholerae
MKVLVTGGMGYIGSHTCIQMIQAGMTPVILDNLYNSKVTVLDRIEKVIGVRPQFVQGDIRDKALLVDLMQQHNIEAVVHFAGLKAVGESVQKPLEYYDNNVNGTLVLVAAMREAGVKSLVFSSSATVYGEPTSVPITESFPTKAANPYGRSKLMVEECLTDFQKANPDWSITLLRYFNPVGSHPSGELGEDPQGIPNNLMPFVTQVAVGRREYLSVFGSDYPTKDGTGVRDYIHVMDLADGHIAALKKVGTCAGLHIYNLGTGKGYSVLDVVKAFETASGRTVPYKLVDRRPGDIAEYWADPTKAAQDLGWKATRNLHTMAQDAWCWQSNNPQGYPEA

SEQ ID NO: 903 - protein, 601 aa, Lycopersicon esculentum
MGIFEDMGFSGNFEFLSDSMGCGAQEVEHKPVGLEEDDYSDEEMDVEELERRMWRDRMLLRRLKEKNKNKVVGDGAKQRQSQEQARRKKMSRAQDGILKYMLKMMEVCNAQGFVYGIIPEKGKPVTGASDNLRAWWKEKVRFDRNGPAAIAKYQADNQIPGRVEESSVIVSTPHTLQELQDTTLGSLLSALMQHCDPPQRRFPLEKGVSPPWWPSGKEEWWGQLGLPNDQVQPPYKKPHDLKKAWKVGVLTAVIKHISPDIAKIRKLVRQSKCLQDKMTAKESATWLAIINQEEALARKLYPDSYPQGSLAVGNGSFFISDASDYDVEGVDNERNNEVECKPHDINLQTGIMLPKDRVLMPGLAPVKGEIIDLTSDFIQKRKEPCFEESVDQKIYTCEYLHCPYSNYQAGFLDRTSRNNHQMSCPFRFNSAQTLTTPKYQINYEHNTVFPAQTATSKPAVSSVTASSSMSASGLGLPEDDQRIISDLITSYDNNFQQNGSICSGISEILVNQSLPQQQTVELPMDGNINLGHMETSAQETSMPVYRSTEFQYDQCKMSFDAPFGGNINDITDYRFGSPFNLGGSDYAVEQLTKQDISTWYL

SEQ ID NO: 904 - protein, 153 aa, Aspergillus flavus
MVKAVAVRGDSKISGTVTFEQADANAPTTVSWNITGHDANAERAFHVHQFGDNTNGCTSAGPHFNPFGKEHGAPEDENRHVGDLGNFKTDAEGNAVGSKQDKLIKLIGAESVLGRTLVIHAGTDDLGRSEHPESKKTGNAGARPACGVIGIAA

SEQ ID NO: 905 - protein, 765 aa, Sclerotinia sclerotiorum
MNRYDDGELEISLAPSANHRAQHRSSEASSNPRRDSQNGGNRRMESAPQKKTEQRVGAYSVVRTLGEGSFGKVKLAVHRVTQQQVALKIIARRKLISRDMAGRVEREIEYLQLLRHPHIIKLYTVIKTPHEIIMVSEYAGNELFDYIVQHGKMREDEARRFFQQIICAVEYCHRHKIVHRDLKPENLLLDENLNVKIADFGLSNIMTDGNFLKTSCGSPNYAAPEVINGKLYAGPEVDVWSCGVILYVLLVGRLPFDDEHIPSLFAKIARGQYNVPSYMGREAAALIKKMLAVNPVYRATIAEIRDDPWFTTNLPAYLQPPVEEFIDTGVDPAKAINPRAIAPHASPAIQEKLHVQVTEKISKTMGYGIKDVQEALAAEEPSAIKDAYLIVRENKLMQANPNLTDDKNQLLFQIPSPPTYDSTIPPSMPDSPSPLVKERPGNIPPTAPPFQPRPSPLLDAVSPRSSSSIGTDRSFVRPYVSKIGILPSSIPQYHKEFMETHKSGHQESTLSNSHSETIEPSPQTEAEKAETVRRLNPHSRSLAKLDEGKKPAGMTPVPVKKAKPTKWQFGIRSRNQPLEAIGCIYRALQKLGAEWLVGDEWTPGQSENNGNKRNDDNDDNDDPNGSGASLHRETSMNDNSKKNRFSGIDKKGNYKLPEDPWVLHVRWKKTDIRRHSIASLNSSTSSPAHPSSMPKDEGLDSIDGGVIMHLDIQLYEMEPGVYLVDFKCAGYETADGMMCEEKDVTSPFPFLDLASKLIIQLAEAD

SEQ ID NO: 906 - protein, 389 aa, Brassica rapa
MGYIGAHGVAALHRYKYSGVDHSYLAKYVLQPFWTRFVKVFPLWMPPNMITLMGFMFLVTSSLLGYIYSPQLDSPPPRWVHFAHGLLLFLYQTFDAVDGKQARRTNSSSPLGELFDHGCDALACAFEAMAFGSTAMCGRDTFWFWVISAIPFYGATWEHYFTNTLILPVINGPTEGLALIFVSHFFTAIVGAEWWAQQLGQSIPLFSWVPFVNAIQTSRAVLYMMIAFAVIPTVAFNVSNVYKVVQSRKGSMLLALAMLYPFVVLLGGVLIWDYLSPINLIETYPHLVVLGTGLAFGFLVGRMILAHLCDEPKGLKTNMCLSLVYLPFALANALTARLNDGVPLVDELWVLLGYCIFTVSLYLHFATSVIHEITTALGIYCFRITRKEA

SEQ ID NO: 907 - protein, 427 aa, Brassica rapa
NNSCTLSFLLVFFVLILFRRAFSINSFSSTESLTISSNRTLVSPGNVFELGFFRTTSSSRWYLGIWYKKLSNRTYVWVANRDSPLSNAVGTLKISNMNLVLLDHSNKSVWSTNQTRGNERSPVVAELLANGNFVIRFSNNNDASGFLWQSFDFPTDTLLPEMKLGYDLKKGLNRFLTSWRNSDDPSSGEISYKLDTQRGLPEFYLLQSGLQVHRSGPWNGVRFSGIPEDQKLNYMVYNFTENSEEVAYTFRMTNNSIYSRLKLSSEGFLERLTWTPTSIAWNLFWSSPVDTRCDVYMTCGPNAYCDLNTSPVCNCIQGFKPLNVQQWDLRDGSSGCIRRTRLSCSGDGFTRMRRMKLPETTKAIVDRSIGVKECEKRCLSDCNCTAFANADIRNRGTGCVIWTGELEDIRTYFAEGQDLYVRLAPTY

SEQ ID NO: 908 - protein, 410 aa, Zea mays
  unsure (1)..(410): unsure at all Xaa locations
ALCIWCPLRSRSISAGTVPVRHGGRTGSPKPIHCKAAVCRAAGEPLTIEEIVVDPPKAYEXRIRVICTSLCHTDITFWKAKVAPVFPRILGHEAYGVVESVGEHVEGFAAGDTVVPTFLGQCERCASCASEHSNVCDGGAVRHRPRDAARRHHXRFRDRAGGAPLHDLLAVSSFSEYTXVVDVNQVVKGRTPAVPPKLACLLSXAAPAPGVGAAWRSAKVEPGSTVAIFGLGSVGLAVVQGAKMCGASKIIGVDLNPDKEEVGRSFGVTDFVNPSQLDKRSVVEVIVEMTGGGVDYSFECIGXPSVMTDAFRCTKMGKGKTIVLGLGRDSDEVCLPSLELLFGRCVMGSLFGGLKPKTHIPVLAKKCMDKELQLDALVTHELGLQDINKAFDLLLQGKSLRCILWMDKDK

SEQ ID NO: 909 - protein, 334 aa, Glycine max
MMGDSEVAKFGLKVGKNEKNGFPRGLDPAISKFFVQLQSVVKSRLSRLAKQDGMSLMSSVQRKGDKSFSYSEAELNEQLQAWRENPSWVDKPPLIKVTAPKGSLCNLDVEVDVGLPPDAVYNIVIDPDNRRVFKNIKEVVSRKVLVDEGHRQVVDLDQAAIWKFLWWSGTISINVLVDQNRKDHSMKFKQTKAGFMKKFEGCWRVEPLFVDEAMCHPFKPVTKEDYYACARGKGRIGSKVSLKQTLQPSIVPPPPLSWYLRGITARTTEMLINDMLAETARIRGGYEAEKSKAEELQGKPGENVDLVSNTSDIKERWKLRRENAKHSHRRLLTK

SEQ ID NO: 910 - protein, 209 aa, Zea mays
  unsure (1)..(209): unsure at all Xaa locations
MASLDAVRGDLALLILYLNKAEARDKICRAIQYGSKFISNGEPGPAQNADKSTSLARKVFRLCKVLLCSRILVWFRXDSEPVLVLQFVNDLHALISPPAKGTPLPLILLGKSKNAMLSTFLFLDQIVWAGRTGIYKNKERAEFLGRIAFYCFLGSNTFTAIIELAELQRLSTSMKKLEKELKHQELYKNEQYRMKLHKSNERLLALVKS

SEQ ID NO: 911 - protein, 689 aa, Pachysolen tannophilus
MSYILVTGGAGYIGSHTVVELVNNGYNVVVVDNLVNSSYDVIVRIEVLTRKQIPFFKIDLNDHDALDQVFKLYPIQAVLHFAALKAVGESTKFPLNYYSNNVGGAISLLKVMEENNVKNIVFSSSATVYGDATRFENMIPIPEHCPTGPTNPYGETKITIENIIRDVYANDKSWKCAILRYFNPIGAHPSGLIGEDPLGIPNNLLPFLAQVAIGRREKLSVFGSDYNSKDGTPIRDYIHVIDLAKGHIAALNYLFNHKDNGLCREWNLGTGNGSTVFEVFNAFCEAVGKKLPFEVVGRRDGDVLNLTANPKRANTELKWKAQLSINDACKDLWNWTTKNPFGFQINNYSWTKFDSESLTNYDRLNTVRTFNGKFEVSISNHGATIVAAKLNGIKLNLGFDNLKGYLREDNPFFGATIGRVANRISKGDLLINGTHYQVGLNELHRTSLHGGTYGYNKRTFLGPIVKTNEKEKETTMEFVLIDLDGTEGYPGDVETKVIYTVRDTGVGGELGIEYEAKLLEESGRDSTAVSLTNHSYWNIGNQPSIEGTHIKLVSNKHLESNPLDSTPTGKIVTSTDLDSQNSAKLGPDGPVFDYCFVTKQQDKLDTRNDELRVVATATHPKTRIAFTTLTTEPAFQFYTGDGVDVAGVFTKRSGFCLEASRYIYNPKWFIPLNKGEVYGSYTIYRFENF

SEQ ID NO: 912 - protein, 592 aa, Glycine max
MTGHFLRTPLTLKIAAFFFIAVTFFYFGKHWSDGYQQLVFFTQRSDPDSNSNPFVSTSPNNAKSFNVSALIENNTQPAPPENAPPPPAPEEGSIEKLGVVNENGTMSDEFEVGDFDPGMVDQWVNETQVDESEGSSSDVGFGIKKFGLCPREMSEYIPCLDNEDEIRKLPSTEKGERFERHCPEQGRGLNCLVPAPNGYRTPIPWPRSRDEMIPDITFGKHIRVVLDVGCGVASFGAYLLSRNVVTMSVAPKDVHENQIQFALERGVPAMAAAFATRRLLYPSQAFDLVHCSRCRINWTRDEMLNLTTRLCWNFLKKDGYIAVWQKPSDNSCYRDREAGTKPPMCDPSDDPDNVWYVDLKACISELPKNGYGANVTEWPARLQTPPDRLQSIKLDAFTSRSELFRAESKYWNEIIASYVRVLHWKEIRLRNVMDMRAGFGGNFPMRIFNLQYIEFCRFAAALINQNLDSWVMNVVPVSGPNTLPVIYDRGLIGVMHDWCEAFDTYPRTYDLLHAANLLSVEKKRCNVSSIMLEMDRILRPGGRVYIRDSLDIMDELQEIAKAIGWYVMLRDTEEGPHASYRVLVCDKHLLRS

SEQ ID NO: 913 - protein, 260 aa, Pyrobaculum aerophilum str. IM2
MLLKDRVSIVTAASRGIGAGVATVLAREGSNLVIAARNLERLEGLAKQLSSQYGVSVVPVQADLTRREDVRKIVDEALRHFGKVDILAYNTGPPKPGTFLELTEDDWDYGVRLLLMSAVWITKDVLPYMIERRWGRLIYITSSTLKQPIPTLTLSNVIRISLAGLVKTLAYQLGKYNILVNGIMQGYIDTERVREVAEARAKREGRSLDEILRELEREIPLGRIGKPEEIGELVAFLASEKASYITGSLILIDGGRTLCI

SEQ ID NO: 914 - protein, 199 aa, Leavenworthia crassa
SVGEGVTDLQPGDHVLPIFTGECGECPHCHSEESNMCELLRINTERGGMILDGESRFSINGKPIHHFLGTSTFSEYTVVHSGQVVKINPKAPLDKVCIVSCGLTTGLGATLNVAKPKKGQSVAVFGLGAVGLGAAEGARIAGASRIIGVDLNSNRFEEAKKFGVTEFVNPKEHNKPVQKVIAEMTNGGVDRSVECTGSV

SEQ ID NO: 915 - protein, 367 aa, Raphanus raphanistrum subsp. raphanistrum
SSNKTLVSPGGVFELGFFKPLATHVGIWGIWYKKVFQKTYAWIANRDSPLSNSIGTLKISGNNLVLIGQSNNTVWSTNITRGNARSSVIAELLPNGNFVMRYSNNRDPSGFLWQSFDFPTDTLLPDMKLGYDLKTGRNRFLTSWRSYDDPSSGIPRTNSKFEGDCPEFILMTEPFEIQRSGPWNGIEFSGIPEDEGLNYMVYNYTENSEEIAYSFHMTNQSIYSRLIVREDTLNRFTWIPPSRAWSTFWGLPKDGCDYLYFCGSYSYCDLNTSPNCNCIKGFVPKNQQRWDLRDGTDGCVRTTRLSCGGDGFLRLNNMNLPDTKTATVDRRIDVKKCEEKCLSDCNCTSFAIADVRNGGSGCVMWTG

SEQ ID NO: 916 - protein, 858 aa, Brassica napus
MKGVRKTYDSSYTLSFLLVFFVMFLFHPALSIHINTLSSTESLTISNNRTLVSPGNVFELGFFRTTSSSRWYLGIWYKNLPYKTYVWVANRDNPLSDSIGTLKISNMNLVLLDHSNKSVWSTNLTRGNERSPVVAELLENGNFVIRYSNNNNASGFLWQSFDFPTDTLLPEMKLGYDRKKGLNRFLTAWRNSDDPSSGEISYQLDTQRGMPEFYLLKNGVRGYRSGPWNGVRFNGIPEDQKLSYMVYNFTDNSEEAAYTFRMTDKSIYSRLIISNDEYLARLTFTPTSWEWNLFWTSPEEPECDVYKTCGSYAYCDVNTSPVCNCIQGFKPFNMQQWELRVWAGGCIRRTRLSCNGDGFTRMKNMKLPETTMAIVDRSIGRKECKKRCLSDCNCTAFANADIRNGGSGCVIWTGELEDIRNYFDDGQDLYVRLAAADLVKKRNANGKTIALIVGVCVLLLMIMFCLWKRKQKRAKTTATSIVNRQRNQDLLMNGMILSSKRQLPIENKTEELELPLIELEAVVKATENFSNCNKLGQGGFGIVYKGRLLDGQEIAVKRLSKTSVQGTGEFMNEVRLIARLQHINLVRILGCCIEADEKMLVYEYLENLSLDSYLFGNKRSSTLNWKDRFNITNGVARGLLYLHQDSRFRIIHRDMKVSNILLDKNMTPKISDFGMARIFARDETEANTRKVVGTYGYMSPEYAMDGVFSEKSDVFSFGVIVLEIVSGKRNRGFYNLNHENNLLSYVWSHWTEGRALEIVDPVIVDSLSSLPATFQPKEVLKCIQIGLLCVQERAEHRPTMSSVVWMLGSEATEIPQPTPPGYSLGRSPYENNPSSSRHCDDDESWTVNQYTCSDIDAR

SEQ ID NO: 917 - protein, 134 aa, Glycine max
FVVSVFEMGEIWWSLLGAAIPVVVAGQAFRVKKRRAEEQRLQSARGRERSSDEIFVCERVCTSKRMLKKVGSFSKDPIPDTCVTVCGASDLDACADACARTVCVNQHQVPNWNDICLRRCQSECLKLSSQSHSS

SEQ ID NO: 918 - protein, 381 aa, Zea mays
MSWRRNQLRAFLVLAVILLITAATYRANAQPAPPADPTPAADTCADPSVEGACRNVPKALRLKLIAIPTILVSSVIGVCLPLLSRSVPALRPDRNLFVIVKAFASGVILATGYMHVLPDSFSNLTSPCLPRKPWADFSFTTFVAMLAALFTLMVDSLMLSFYNRRKGGNTSGRRTSGAVADHESPAHEHHWHSHGHGHGHGHAGGIVVADKPEDDEASQVQLRRNRVVVQVLEMGIVVHSVVIGLGMGASQNVCTIRPLVTAMCFHQLFEGMGLGGCILQAEYGAKMKAGLVFFFSTTTPFGIALGLALTKVYRENSPTALIVVGLLNAASAGLLHYMALVELLAADFMGPKLQSSVRLQLLCFLAVLLGAGGMSIMAKWA

SEQ ID NO: 919 - protein, 513 aa, Yarrowia lipolytica
MIIIETLIGAVVFVAVYVAFVKLDYYRRKAKFETSDMPVAYNGLLGWKGLRHMLTVFNNDIGPVGWREVFATYGKTLKYYAFPSNTILTYDPDNIKAMLATQFKDFSLGLRKEALAPSLGYGIFTLDGSSWSHSRALLRPQFSREQISRLESVETHVQEMMSCIDRNQGAYFDIQRLFFSLAMDTATDFLLGEAVGNLQEILHPEMPRTGTTFQVAFDRAQRLGSLRIICQEAFWVVGSLFWRRDFNNTNQHIHDYVDRYVDKALLARKEKSEIYTNPDKYIFLYELARETTNKITLRDQVLNILIAGRDTTASTLSWIFMELAKKPDIFHKLREAILNDFGTSCESISFESLKKCDYLRQVLNEGLRLHPVVPVNLRVAVRDTTLPRGGGPQGDKPIFVAKGQKINYAIFWTHRDKEYWGEDAEEFRPERWETTSGGALGKGWEFLPFNGGPRICLGQQFALTEMGYVITRLLQEYSDISIQPSDAAVKVRHSLTMCSAQGINISLTRAKEE

SEQ ID NO: 920 - protein, 247 aa, Bacillus megaterium
MTTLQGKVAIVTGGSKGIGAAITRELASNGVKVAVNYNSSKESAEAIVKEIKDNGGEAIAVQADVSYVDQAKHLIEETKAAFGQLDILVNNAGITRDRSFKKLGEEDWKKVIDVNLHSVYNTTSAALTHLLESEGGRVINISSIIGQAGGFGQTNYSAAKAGMLGFTKSLALELAKTGVTVNAICPGFIETEMVMAIPEDVRAKIVAKIPTRRLGHAEEIARGVVYLAKDGAYITGQQLNINGGLYM

SEQ ID NO: 921 - protein, 173 aa, Helicobacter pylori
MNLEKLEISHDANALCVVIEISKHSNIKYELDKESGALMVDRVLYGAQNYPANYGFVPNTLGSDGDPVDALVLSDVAFQAGSVVKARLVGVLNMEDESGMDEKLLALPIDKIDPTHSYVKDIDDLSKHTLDKIKHFFETYKDLEPNKWVKVKGFENKESAIKVLEKAIKAYQG

SEQ ID NO: 922 - protein, 188 aa, Zea mays
  unsure (1)..(188): unsure at all Xaa locations
PTRSLEGLKAICPMPTLVACRIILRVRLFEAGLQMLLPGKRCXWPIWSGGNLPCYRAYGLQAYAGTLITYLGWRRLEICNPAIVYDDWWEIYXALIVEAENSXTILYMQGHVFISXSDSGSSGNVIIDFYCGMVLYPXIGRYCDIKVLTMXRASMMTWAVLADAYCIIQYEDTGCVADSMLVNTALML

SEQ ID NO: 923 - protein, 249 aa, Ralstonia metallidurans
MSKTLENQVALVTGASRGIGRAIALELARQGATVIGTATSESGAAGISEYLAGEGLKGGGVVLNVNDAARCEAVIDEIIKANGGLNVLVNNAGITQDQLAMRMKDEDWSAVIDTNLTAVFRLARAVLRPMMKARGGRIINITSVVGSTGNPGQMNYAAAKAGVEGMTRALAAEIGSRNVTVNCVAPGFIDTDMTKVLSEEQHAALKTRIPLGRLGQPEDIANAVAFLAGPQAAYITGTTLHVNGGMYMN

SEQ ID NO: 924 - protein, 83 aa, Zea mays
  unsure (1)..(83): unsure at all Xaa locations
THPISLILQRHFKRXPYYADLLDWSKEVESXTAGSQLLDLITTHEGELDLTEFNITXHGRIVXYKSGFYPFXPPEACALQLSG

SEQ ID NO: 925 - protein, 165 aa, Leuconostoc mesenteroides subsp. mesenteroides ATCC 8293
MKLRPLEKRDLPYIYEQENSRKVMALWFEEPYTSFDELQILYDRHILDQTERRFVVEENDRFIGVVELMDIDTLHRHTEIQIIIHSEFQGHGYAQAAMRAGIEYAFTVLNMHKVYLYVDVNNSAAIHIYKKIGFIPEGTLRQHFFAEGEYHDSLMMGIFPHEFTF

SEQ ID NO: 926 - protein, 677 aa, Arabidopsis thaliana
MVRFSCFNAHIHRHRPKKSVEGFSERVIKEDGSKSKGLSSIIFGRNIASVSENSKPAAVERVWKSEEIKPSGILEHGIGTHQVLHLKKSQSHGNELYLDGRDATENGTDDASDRITSPNSLEQQSGIHEAGSSKRVDESPNLYQQGPRASVSAYQGSNQALCGSIFSVGDLHHTDKDSRQLDDTSLYGEQMDNSNSQTPHDSPLMVRSNSLPNIADSSSEKSSPFKYSSHHSRSSDDLHALDTRQTDKSVHETDEEVKQEEDQDRDYDMHNSGDNNKENLVEDGYDDSYDYSSLAKDWIVPPTDELKLSKFLEGETTNQQAEFSGKDSKFKRIEDWVNDLQHVNLSEEADEITGYDDELPREPVVLNEQATSSAKVDAIKLTPGMEAAKKYISSLSASATTAQLVSHGLVVIPFLSAFVGLRVLNLSGNAIVRITAGALPRGLHALNLSKNSISVIEGLRELTRLRVLDLSYNRILRLGHGLASCSSLKELYLAGNKISEIEGLHRLLKLTVLDLRFNKFSTTKCLGQLAANYSSLQAISLEGNPAQKNVGDEQLRKYLLGLLPNLVYYNRQGTKDARLGTSTHQLDRGLRSELKNSSRKSSHGASSSHKPGSSTARKAPALQKRSKERRSRLPPVGHKLSPAAYENYHVATGDRLSSLRTELSMRRSRSEGTLGPI

SEQ ID NO: 927 - protein, 341 aa, Daucus carota
APSMTTPEPASKRRVVLGEISNNSSAVSGNEDLLCREFEVPKCVAQKKRKRGVKEDVGVDFGEKFDDPQMCSAYVSDVYEYLKQMEMETKRRPMMNYIEQVQKDVTSNMRGVLVDWLVEVSLEYKLLPETLYLAISYVDRYLSVNVLNRQKLQLLGVSSFLIASKYEEIKPKNVADFVDITDNTYSQQEVVKMEADLLKTLKFEMGSPTVKTFLGFIRAVQENPDVPKLKFEFLANYLAELSLLDYGCLEFVPSLIAASVTFLARFTIRPNVNPWSIALQKCSGYKSKDLKECVLLLHDLQMGRRGGSLSAVRDKYKKHKFKCVSTLSPAPEIPESIFNDV

SEQ ID NO: 928 - protein, 245 aa, Archaeoglobus fulgidus DSM 4304
MIDVIMTGELLKTVTRAIVALVSEARIHFLEKGLHSRAVDPANVAMVIVDIPKDSFEVYNIDEEKTIGVDMDRIFDISKSISTKDLVELIVEDESTLKVKFGSVEYKVALIDPSAIRKEPRIPELELPAKIVMDAGEFKKAIAAADKISDQVIFRSDKEGFRIEAKGDVDSIVFHMTETELIEFNGGEARSMFSVDYLKEFCKVAGSGDLLTIHLGTNYPVRLVFELVGGRAKVEYILAPRIESE

SEQ ID NO: 929 - protein, 1129 aa, Avena sativa
MSSSRPASSSSSRNRQSSQARVLAQTTLDAELNAEYEESGDSFDYSKLVEAQRDGPPVQQGRSEKVIAYLQHIQKGKLIQTFGCLLALDEKSFNVIAFSENAPEMLTTVSHAVPSVDDPPRLGIGTNVRSLFSDQGATALHKALGFADVSLLNPILVQCKTSGKPFYAIVHRATGCLVVDFEPVKPTEFPATAAGALQSYKLAAKAISKIQSLPGGSMEVLCNTVVKEVFDLTGYDRVMAYKFHEDDHGEVFSEITKPGLEPYLGLHYPATDIPQAARLLFMKNKVRMICDCRARSIKVIEAEALPFDISLCGSALRAPHSCHLQYMENMNSIASLVMAVVVNENEEDDEAESEQPAQQQKKKKLWGLLVCHHESPRYVPFPLRYACEFLAQVFAVHVNREFELEKQLREKNILKMQTMLSDMLFREASPLTIVSGTPNIMDLVKCDGAALLYGGKVWRLRNAPTESQIHDIAFWLSDVHRDSTGLSTDSLHDAGYPGAAALGDMICGMAVAKINSKDILFWFRSHTAAEIRWGGAKNDPSDMDDSRRMHPRLSFKAFLEVVKMKSLPWSDYEMDAIHSLQLILRGTLNDASKPKREASLDNQIGDLKLDGLAELQAVTSEMVRLMETATVPILAVDGNGLVNGWNQKAAELTGLRVDDAIGRHILTLVEDSSVPVVQRMLYLALQGKEEKEVRFEVKTHGPKRDDGPVILVVNACASRDLHDHVVGVCFVAQDMTVHKLVMDKFTRVEGDYKAIIHNPNPLIPPIFGADEFGWCSEWNAAMTKLTGWNRDEVLDKMLLGEVFDSSNASCPLKNRDAFVSLCVLINSALAGEETEKAPFGFFDRSGKYIECLLSANRKENEGGLITGVFCFIHVASHELQHALQVQQASEQTSLKRLKAFSYMRHAINNPLSGMLYSRKALKNTDLNEEQMKQIHVGDNCHHQINKILADLDQDSITEKSSCLDLEMAEFLLQDVVVAAVSQVLITCQGKGIRISCNLPERFMKQSVYGDGVRLQQILSDFLFISVKFSPVGGSVEISSKLTKNSIGENLHLIDLELRIKHQGLGVPAELMAQMFEEDNKEQSEEGLSLLVSRNLLRLMNGDVRHLREAGVSTFIITAELASAPTAMGQ

SEQ ID NO: 930 - protein, 396 aa, Xanthomonas campestris pv. campestris str. ATCC 33913
MSGSSLRRVAVFGATGSIGASALDVIARHPERLRASVLSAGSKVDALLALCVLHRPAHAVIADAALYPALRDGLRAAGLTTQAHAGDQALDALAASDACDTVVAAIVGAAGLSSTLAAAAAGKRLLLANKESLVLAGELLTRTAAAAGAEIIPIDSEHSAIFQCLRSCDASRGVRRVILTASGGPFRGRQRAQLAEVTPAQAVAHPKWSMGPKISVDSATLMNKGLEVIEAHHLFGLPGEQIDVLVHPQSLVHSLVEFVDGSTLAQLGLPDMRTTLAVGLAWPERVESGVGGLDLLQQGRLDFEAPDTEAFPCLRLAWDALRAGGTAPAILNAANEVAVSAFLQGKVGFLAIPALVEHTLTTLQRQNADTLNALLFADAEARRTTERALAHHSLHA

SEQ ID NO: 931 - protein, 354 aa, Bacillus anthracis str. A2012
MEKRIVCLAGDGVGPEVMESAKEVLHMVERLYGHHFHLQDEHFGGVAIDLTGQPLPQRTLAACLASDAVLLGAVGGPRWDGAKERPEKGLLALRKGLGVFANVRPVTVESATAHLSPLKKADEIDFVVVRELTGGIYFSYPKERTDEVATDTLTYHRHEIERIVSCAFQLASKRKKKVTSIDKANVLESSKLWRIVTEEVALRYPDVELEHILVDAAAMELIRNPGRFDVIVTENLFGDILSDEASVLAGSLGMLPSASHAEKGPSLYEPIHGSAPDIAGKNKANPIAMMRSVAMMLGQSFGLTREGCAIEEAISAVLKSGKCTADIGGTETTTSFTKAVMQEMEEQALVGRGR

SEQ ID NO: 932 - protein, 484 aa, Zea mays
  unsure (1)..(484): unsure at all Xaa locations
MRINVCGCRGSTVHLHHLSSSSSPPPLPFHLLPPGDSSSSLPRRSIGPPIDRARGRRFQSGVVSIRSGSLPVWVGAMAAMDASADKNAVFRKLRAKSDNKMCFDCNAKNPTWASVTYGVFLCIDCSAAHRSLGVHVSFVRSTNLDSWTPEQLKMMVYGGNNRAQAFFKQHGWTDGGKIEAKYTSRAADLYRQLLAKDVAKSSTEDGNNSWPSSPVAASQAPNQAAAFPDLKLTEVSKENVSEKKDSEIVRSPRAPTHSFKKPIXVLKKPGNKTGGLGARKLTSKPNESLYEQKPEEPAPVLPSSVIESTTTRSKSHTSRFDYVENAPALKNGNSSEGNHMSGHVAPPMSSNFFAEFGMDSGYQKKSTSSSSKVQIEESREARQKFSKAKSISSSQFFGDQASFEKDAQVSLQKFSGSSAISSADLFGHPANNSSVDLSASDLINRISFQATQDLSSLKNMAGETGKKLTSMASNIITDLQDRIL

SEQ ID NO: 933 - protein, 463 aa, Ceratophyllum demersum
GKPFYAVVHRVTGSLVIDFEPVRPYEVPTTAAGALQSYKLAAKAITKLQSLPSGSMQRLCDTIVKEVYELTGYDRVMVYKFHEDDHGEVVAEVTKPNMEPYLGLHYPATDIPQASRFLFMKNKVRMICDCHAKAIKVYQDGNLPMDLTLCGSTLRAPHSCHVQYMHNMGSVASLVMAVVVNEGEDDQGESTESGQQRKKKLWGLVVCHNTSPRFVPFPLRYACEFLMQVFAIHVGKQIELENQLQEKNILRIQTLLCDMLMRDSPLGIVSKSPSIMDLVKCDGAALLYKNKVWLLGLTPSELQIHDIASWLSTHHMDSTGLSADSLYDAGYPGALSLGNAVCGMASVRITSKDMIFWFRMHTASEVRWGGAKHYPDDKDDGQKMHPRSSFKAFLEVVKTRSLPWKDYEMDAIHSLQLILQGTFKEIENGGIKNTIDSQFDGLKIDQMEELQVVANEMVRLMET

SEQ ID NO: 934 - protein, 170 aa, Sorghum bicolor
MAAADVEYRCFVGGLAWATNNETLEHAFANFGQVLDSKVITDRETGRSRGFGFVTFSSEQSMLDAIENMNGKELDGRNITVNQAQSRGGGGGGGGYGGGGGGYGGRREGGGYGGGGGGYGGRREGGGGYGGGGYGGGGGGYGGRREGGGGYGGGGGYGGNRGDSGGNWRN

SEQ ID NO: 935 - protein, 387 aa, Neurospora crassa
MASFPQHHHGGNHHNSDNYSDHDSDNNTQIKYTLSKSGRPYTLSHKIYFLRISSPDDDDGKHPKTIPISPFHDIPLFHSRSQQVYNMIVEIPRWSQTKFEISRSLPLNPIVQDVLSARPNQPRFVPNLFPYKGYPWNYGCLPQTWESPHYKGPGPDAEGAEGARGDNDPIDACEIGTRVAYTGEVKQVKVLGVLGLVDAGEMDWKVLVVDVRDKLAQKVDDIKDVERECPGLLEATRDWFTWYGVPEGRKKNRFALGGEWKGREYAVGVIKECEEMWKELVKGEVEGSEDVCLKNTTLDGTPGKVDPESVKLPPNEDLPPAEVEQDLEEVAYVDRKKGDEDEDEVGTEDKGTNYEEDSKTNDDEWDDLANDSALDDLKMLNVNLNSW

SEQ ID NO: 936 - protein, 368 aa, Ipomoea batatas
MAFRFSLLFLCTLLATTSLVFAAEDDDGDDILIRQVVGDGDGDLLNADHHFTVFKRRFGKAYASDEEHDYRLSVFKANMRRAKRHQELDPAAVHGVTQFSDSTPTEFRRKFLGLNRRLKFPADAKTAPILPTDELPSDFDWRDRGAVTPVKNQGTCGLCWSFSTTGALEGANFLATGKLVSLSEQQLVDCDHECDPEEAGSCDFGCNGGLMNSAFEYTLKAGGLMREEDYPYTGNDLQVCRFDKTKIAAKVANFSVVSLDEDQIAANLVKNGPLAVAINAVFMQTYIGGVSCPYICSKRLDHGVLLVGYGSAGYAPIRMKEKPYWIIKNSWGESWGENGYYKICRGRNVCGVDSMVSTVAAVSTTTSD

SEQ ID NO: 937 - protein, 136 aa, Leptolyngbya sp. PCC 7376
VYRFDRDGVGIIEAESKAEHMTSYLGLHFPNVDIPVSARELFQMNALRLISDVEDEPIPLLALNDSELLDLSYAILRPPSPCHVQYLQNMDVAASMVMPLIKDGQLWGLINCHHSSPKHIPCDIRTACVFLGKLMC

SEQ ID NO: 938 - protein, 504 aa, Listeria monocytogenes
KPLTNLKNLGWLFLDENKIKDLSSLKDLKKLKSLSLEHNGISDINGLVHLPQLESLYLGNNKITDITVLSRLTKLDTLSLEDNQISDIVPLAGLTKLQNLYLSKNHISDLRALAGLKNLDVLELFSQECLNKPINHQSNLVVPNTVKNTDGSLVTPEIISDDGDYEKPNVKWHLPEFTNEVSFIFYQPVTIGKAKARFHGRVTQPLKEVYTVSYDVDGTVIKTKVEAGTRITAPKPPTKQGYVFKGWYTEKNGGHEWNFNTDYMSGNDFTLYAVFKAETTEKAVNLTRYVKYIRGNAGIYKLPREDNSLKQGTLASHRCKALTVDREARNGGKLWYRLKNIGWTKAENLSLDRYDKMEYDKGVTAYARVRNASGNSVWTKPYNTAGAKHVNKLSVYQGKNMRILREAKTPITTWYQFSIGGKVIGWVDTRALNTFYKQSMEKPTRLTRYVSANKAGESYYKVPVADNPVKRGTLAKYKNQKLIVDCQATIEGQLWYRIRTSSTF

SEQ ID NO: 939 - protein, 383 aa, Magnetospirillum magnetotacticum
  unsure (1)..(383): unsure at all Xaa locations
MXCPRGQQGDGTTSSKAFFQKIAFPAGAGNVRYLACSHTPGGPGDAEAIYALMDNGDVYAWGYNGYGQLGLGDTNNRAVPTKIGMFNRNVRAVIAGGGSYGHVAFITTDNKLYLCGYNGSGQIGDGTTSNKTIPVLVDVGGPVVKVAMGGSFSGYGWTLVLRADGKLYGMGYNGYGQLGDNSSTNRATPILVTMLGLTDATKVIDIWAVCGMFGSSFAMTKDGSFWSWGANTNGKLGLGDTANRVAPTLVPNVTHVSQVISPTTGINATYIYDNIVLLRHATAADRIARVNGYVMTVGYGTSFIAGPNIPNPQMSFRMVGFPNRYHGKIRRIAVSGFHQGNDGEPQAMALAMDGTVFSWGPSNTFSLGLPENQSSNAPLRVRF

SEQ ID NO: 940 - protein, 181 aa, Glycine max
MATVGRNVAAPLLFLNLIMYFIVLGFASWCLNRFINGQTYHPSFGGNGATMFFLTFSILAAVLGIVSKLLGGNHMRTWRSDSLASAGATSMVAWAVTALAFGLACKQIHLGGHRGWRLRVVEAFIIILTFTQLLYLILIHAGLYSSRYGPGYHDTDYGHGHGVGGTTGDPMHKPATAGTRV

SEQ ID NO: 941 - protein, 392 aa, Caulobacter crescentus CB15
MSALMNTYARANIDIVRGEGCWLYDQDGRDYLDLAAGVAVNTLGHGDPRLVQALKTQADILWHASNLYRLPAQEALATKLTDATFADRVFFANSGAEAVEAAIKTARRWQGAKGRPERYRVLTFGNAFHGRTLATISATDQMKVREGFTPLYDAFDTTPFNDIEGAARAITPQTAAILVEPIQGEGGLTPATPGFLAGLRALCDQHDLLLILDEVQTGIGRTGHLFAHELYGVRPDIIAVAKGLGGGFPIGACLATEDAASGMTPGSHGSTYGGNPLACAVASAVLDAVLAPGFLETVRERAALVDALLERLLRRHSDLFVRAQGHGLMRGLQVRASARDVVAHLRDFGVMTVAAGADVVRLLPPLTISELEIAEAEARLLRAAEAWLPIAA

SEQ ID NO: 942 - protein, 351 aa, Arabidopsis thaliana
MTNAEAVTVTNKQIIFPDYVTGFPKESDLKITTTTIDLRLPEGSTSVLVKNLYLSCDPYMRICMGKPDPLSSSLVPPYKTGVPIIGLGVSKVIDSGHPDYKKGDLLWGLVGWEEYSVITLTTYSHFKIEHTDVPLSYYTGLLGMPGMTAYAGFYEVCSPKKGETVFVSAASGAVGQLVGQFAKLMGCYVVGSAGSKEKVDLLKTKFGFDDAFNYKEEKDFSAALKRYFPEGIDIYFENVGGKMLDAVLINMKLHGRVAVCGMISQYNLVDPEGVHNLPTILYKRIQLQGFGVCDFYDKYPKFLDFVLPYIREGKITYVEDIAEGFESGPSALLGLFEGKNVGKQLFVVARE

SEQ ID NO: 943 - protein, 137 aa, Zea mays
  unsure (1)..(137): unsure at all Xaa locations
MAKGGLGKLRCMIRRWHSSSRIARAPPAASHGDDDDGAVVAVSSGGGASSFHGADEVPKGLHPVYVGKSRRRYLIAEELVGHPLFRTLVDRSGGGAAAGTVVVGCXVVLFEHLLWMLENADPPPESLDELVXYYACC

SEQ ID NO: 944 - protein, 346 aa, Arabidopsis thaliana
MATTINKQVVLLDYVTGFAKESDLVITSTTIDLRVLKGSMTALVKNLYLSCDPYMRNRMRKPDPLSPATAQSFTPGKPISGFGVSKVIDSGHSDYEEGDLIWGAVGWEEYSVITPIPNLHFKIHHTNFPLSYYTGLLGMPGMTAYVGFYEICTPKKGDTVFVSAASGAVGQLVGQFAKLMGCYVVGSAGSKEKVDLLKNKFGFDDAFNYKEEHNLIGALKRCFPEGIDIYFENVGGKMLDAVILNMRPHGRIAACGMISQYNLKNPEGIYGLSLITYKRIRIEGFNCFDYFHKYSEFLEFVVPYIKEGKIKYVEDVADGLESAPAALVGLFHGKNVGKQLVVVSPS

SEQ ID NO: 945 - protein, 180 aa, Triticum aestivum
MMTAMVKAEPTAAEGSSGRRDAEAELNLPPGFRFHPTDDELVVHYLCRKVAGQPQPVPIIAEVDLYKFNPWDLPERALFGSREWYFFTPRDRKYPNGSRPNRSAGTGYWKATGADKPVAPKESGGRTVGIKKALVFYSGRAPRGVKTDWIMHEYRIAEADRAPGKKGSLKLDEWVLCRLY

SEQ ID NO: 946 - protein, 276 aa, Mesorhizobium ciceri
WGFDGSSTQQAEGHSSDCVLKPVAVYPDPARTNGVLVMCEVMMPDGVTPHASNKRATILDDEGAWFGFEQEYFFYKDGRPLGFPESGYPAPQGPYYTGVGYSNVGSVARQIVEEHLDLCLAAGINHEGINAEVAKGQWEFQIFGKGSKKAADQMWMARYLLQRLTEKYGIDIEYHCKPLGDTDWNGSGMHANFSTAYMREVGGKAYFEALMAAFDKNLMDHIAVYGPDNDKRLTGKHETAPWNRFSYGIADRGASIRVPHSFIKSDYKGYLENRRP

SEQ ID NO: 947 - protein, 268 aa, Glycine max
MAFLPSHGFTFNTTHEEDHCHFPPTSLDAFPSLPPQHFQGGAPFMLKRSMSLSGIENKCNEVHGDDELSDDGVFQSGEKKKRLNLEQVKALEKSFDQGNKLEPERKVQLAKALGLQPRQVAIWFQNRRARWKTKQLEKEYEVLKKQFEAVKADNDVLKVRNQKLQAELQAVKSRDCCEAGMMSLKKETEGSWSNGSDNSLDLNLDPSRALGLNSPISSHNIKNLLPNSLKPNSITQLLQDDGLCNMFHNIDAQQNFWPWPDQQHQRFH

SEQ ID NO: 948 - protein, 496 aa, Staphylococcus epidermidis ATCC 12228
MENKNNNVDRGNLKQNLSEKFVWAIAYGSCIGWGAFILPGDWIKQSGPIASSIGIVIGALLMILIAVSYGALVEKFPVSGGAFAFSFLSFGRYVSFFSSWFLTFGYVCVVALNATAFSLLIKFLLPNVLNNGKLYTVAGWDVYITEIVIATVLLIVFMLITIRGASVSGSLQYYFCVAMVLVVALMFIGSFFSSHFSLSHLEPLASVDKGWFQSIIMIVSIAPWAYVGFDNIPQTAEEFNFSPNKTFKLIVYSLLAASLTYVVMLLYTGWLSTQATSLNGNLWLTGAVTQDAFGFIGLAVLAVAIIMGIFTGLNGFLMSSSRLLFSMGRSGIMPTVFSKLHSKHKTPYVAIIFLVAVSLIAPWLGRTALTWIVDMSSTGVSIAYFITCLSATKLFSFNKQSNTYAPVYKIFGIIGSIVSFVFLCLLLIPGSPAALSIPSYIALGIWLVIGLIFFIIRLPKLKKMNNDELSRLILNHSEDEVLEMVHEPGQSNSTNK

SEQ ID NO: 949 - protein, 236 aa, Glycine max
ESVFGQGFVSTGGLETTKEFVAKLGLKPGQKVLDVGCGTGGGDIYMAENFDVEVVGIDLSINIISLAIERAIGLKCCVEFECADCTKKTFPVNTFDVIYSRDTLLHIKDKPSLFRSFYKWLKRGGTLLITDYCKSEGSLSLGYAEYIKKGGYYIHDMKTYCRMLENAGFDDVVAEDRTNLFMKTLQQELNALHSKKDDFIDDFSEEDYNEITERWKAKQMRGADGEQIWSLFIAKK

SEQ ID NO: 950 - protein, 880 aa, Cochliobolus carbonum
MSAAIDNEDLEELSISMPSQRRGAAQTSTTKAQDPAPPPPTALGTAVHETKSKDTKASQRLGQYTIVRTLGEGSFGKVKLATHQVSGQKVALKIINRKRLVTRDMAGRIEREIQYLQLLRHPHIIKLYTVITTPTEIIMVLEYAGGELFDYIVNHGKLQEAQARKFFQQIVCAVEYCHRHKIVHRDLKPENLLLDHDSNVKIADFGLSNIMTDGNFLKTSCGSPNYAAPEVISGKLYAGPEVDVWSCGVILYVLLVGRLPFDDEYIPTLFKKIAAGQYSTPSYLSPGATSLIRKMLMVNPVHRITIPELRQDPWFTTDLPAYLEPPAQEFFDSGADPNKAIDPKALAPLADAPRVQALHENVVTKLGKTMGYAKHDVQDALARDEPSAIKDAYLIVRENEMMRENPLLTNQDGVPVWNHQSPPAHDSYMEKFRPQSLNAVSRPQFIPPAPSDHERARQGSNASSQLASIRSPVSTIAILPSSLTEYHKAYMKGHPRPTNKISESEALPPTPEQTEEQRQISARRLKPNFRTMPEAGRTKPEPMTSLPTKKPRATKWQFGIRSRNQPAEAMLAIFKALKAMGADWEVPKIRRAGGRSGSRSRSTSQAPEDRKSKSRNHSQDSISSHSSDEDQGSRKGSPRREPLSVRNNGTSEQEARGRQKKHYNHTNDWGYHVPEDPWVIHARFLKEGMFPPGVAHPSSTHSSRVDLANDSSGARRRSSTNTSTSSAGHGVEGMTPSERAGSVSEDHVNPDEAVYIYMSIQLYSIDRDFFVVDFKCAGYERLVTNLVREIKASIPLSGSHQPPPHHQDGWDDEQGVWRRLDENEPLPEDLAKKLNEGGTEILRERTELVGAGRQEGEKIVTSPFPFLDVASTLILQLSGE

SEQ ID NO: 951 - protein, 545 aa, Zea mays
MALYLLFESASGYGLFHAYGIDEIGQSVEAVRSSVLDLDRFGKAVKLTAFNPFSSAVDALNQCNAISEGIMTDELRSFLELNLPKPKEGKKAKYSLGVVEPKVGSHISEVTGIPCQSNEFVQELLRGVRLHFDRFINELKDSDLEKAQLGLGHSYSRAKVKFNVNRVDNMVIQAIFLLDTLDKDINSFSMRVREWFSWHFPELVKIVNDNYLYAKLAKFIVNKSDLTEKDIPALADIVGDEDKAKEIVEAAKASMGQDLSPVDLINVQQFAQRVMNLSEYRKNLYEYLVTKMNDIAPNLTSLIGEVVGARLISHAGSLSNLAKCAASTLQILGAEKALFRALKTRGNTPKYGLIFHSSFIGRASTKNKGRMARYLANKCSIASRIDCYSEASTSVFGQKLREQVEERLEFYDKGVAPRKNLDVMKAAIDSMVNGTSMDDDDIEKTDASPKKSKKKKTKTKADGDAMDVDKPSNVAGGEAEPGTEKKKKKKKHKLEEEAQEENGAADTTPKKKKKKSREASEEAEPKTATDGKKKKKKKAKAEDDE

SEQ ID NO: 952 - protein, 315 aa, Glycine max
  unsure (1)..(315): unsure at all Xaa locations
MDRGDQMTFPGSASYYMQRGIPGAGNQPELHNSPNIRPLSNSNLPFQSSIGGGGTIGSTLPLESSGISAPCVNVGAPSGAVPGETVKCKRGRPKXMGSMGRCPGTGKQQQLASLGELMSGSAGMGFTPHIINIASGEDIATKIMAFSQQGPRVVCILSANGSVSTVTLRQPSTSGGTVTYEGRFEIVCLSGSYLVTENGGSRNRTGGLSVSLACPDDRVIGGGVGGXLIASSPVQVVVGSFLWGGSKTKNKKKESSEGAEVAVESDHQGVHNPVSTEXISQNQNLPPTPPSLSPWSTSRPLDMRNSHVDIDLMRG

SEQ ID NO: 953 - protein, 265 aa, Oryza sativa (japonica cultivar-group)
MGIPAASVAARTAVGAALAAVIAARAVRRRSLDGSGGAAGFVVMAIHLACGYRYGALVLAFFFTSSKATKIGADRKRRIEDDFKEGGQRNWIQVLANSLIATILVIILATMTGGQDQCLDSHESKVITGIIGGIIGHYCCCNGDTWSSELGVLSDEQPRLITTLKPVRKGTNGGVTLQGLLAATAGGLIIGLTFVFVGLLTVECSFDVALRQLLVIPISATAGLLGSLIDSVLGATLQFSGYCSVRKKVLPLIAQRFDPQLCFYD

SEQ ID NO: 954 - protein, 326 aa, Chaetosphaeridium globosum
MAEVLLFEALRDALDEEMQRDPSVLVMGEDVGHYGGSYKVTKGFHEKYGDLRLLDTPIAENSFTGMAIGAAMTGLRPIVEGMNMGFLLLAFNQIANNAGMLHYTSGGNFKIPIVIRGPGGVGRQLGAEHSQRLESYFQSVPGLQMVACSTPYNGKGLLKSAIRNDNPVIFFEHVLLYNLNENLIEQEYLLCLEKAEVVRPGNDITILTYSRMRHHVLQAAKVLVNKGYDPEIIDILSLKPLDMGTISLSVRKTHKVLIVEECMRTGGIGASLRAAILEDLFDYLDAPIQCLSSQDVPTPYSGPLEELTVIQPNQIIQAVEEMCKIE

SEQ ID NO: 955 - protein, 350 aa, Lycopersicon esculentum
MANYNFKYIAIFLLLISILAPRVLSVVEDCGAEEDNSCVNKSKALPLKIIAIVSILITSMIGVCLPLVTRSIPALSPERNLFVIVKAFAAGIILATGFMHVLPDSFDMLSSSCLKEHPWHKFPFTGFVAMLSAIVTMAIDSIATSLYSKKHNGGVVNPEGDQEMAVAGNHVHSHHHHGSLSTKDGLDGKKLLRYRVIAMVLELGIIVHSIVIGLSLGASSNTCTIKGLVAALCFHQMFEGMGLGGCILQAEYKFMKKAIMAFFFAVTTPFGIALGIALSTTYEENSPRALITVGLLNASSAGLLIYMALVDLLAADFMGDKLQGSVKLQIKSYMAVLLGAGGMSVMAIWA

SEQ ID NO: 956 - protein, 444 aa, Synechocystis sp. PCC 6803
MITSPTNLNSLPIPPGDFGLPWLGETLNFLNDGDFGKKRQQQFGPIFKTRLFGKNVIFISGALANRFLFTKEQETFQATWPLSTRILLGPNALATQMGEIHRSRRKILYQAFLPRTLDSYLPKMDGIVQGYLEQWGKANEVIWYPQLRRMTFDVAATLFMGEKVSQNPQLFPWFETYIQGLFSLPIPLPNTLFGKSQRARALLLAELEKIIKARQQQPPSEEDALGILLAARDDNNQPLSLPELKDQILLLLFAGHETLTSALSSFCLLLGQHSDIRERVRQEQNKLQLSQELTAETLKKMPYLDQVLQEVLRLIPPVGGGFRELIQDCQFQGFHFPKGWLVSYQISQTHADPDLYPDPEKFDPERFTPDGSATHNPPFAHVPFGGGLRECLGKEFARLEMKLFATRLIQQFDWTLLPGQNLELVVTPSPRPKDNLRVKLHSLM

SEQ ID NO: 957 - protein, 318 aa, Triticum aestivum
MDAVELSWGARCAGLAFFVLSVLVVALAAVLLLVRRWPWCSCHVCRTYLTGSWAKDFTNLGDWYAHLLRESPTGTVHIHVLGCTVTANPANVEYMLKTNFENFPKGKRFSALLGDLLGGGIFNVDGDAWRHQRKMASLELGSVTVRSYAYKIVAHEVETRLLPVLTDAADKGKVVDLQDVFRRFAFDTICKISFGLDPGCLDLDMPMSDLANAFDTVSRLSAMRGAAASPLVWKMKRMLNIGSERELKKAIKLVDDLASAMILQRRKLGFENSHDLLSRFMASDGDVHAMDDKYLRDIVVSFLLAGRDTVAFALTTLF

SEQ ID NO: 958 - protein, 148 aa, Xanthoceras sorbifolium
SFYLPVACALLMAGENLDNHVDVKNTLVDMGIYFQVQDDYLDCFGAPEVIGKVGTDIEDFKCSWLVVKAVERCNEEQRKSLNENYGKADQACVAKVKELYNALDLQGAFTQFESESYEKLIKSIEAHPSKAVQAVLKSFSGKIYKWQK

SEQ ID NO: 959 - protein, 389 aa, Lactobacillus plantarum
MTMQHVFPTYQRFPFAITDGQGVHLTDNHGKTYLDFTAGIGVCNFGYHQPQIQAAVTQQLTHIWHTSNLYENELQDAVAGLLANGEERLVYFANSGTEANEAALKLARKYTGKTGILAFQHSFHGRTYGAMSMTGNPHIQAGYAPLVPGITFATYNDDAALDKITPELAAVILEVVQGEGGVFAGQTAWLQAVNAKCQATGVLLIIDEVQTGIGRTGYRMAYEGYGLDPDIYTVAKGLANGLPVGAMVGRRQLATAFGPGSHGSTFAGNAVAMAAAKRVLTQLTPALLTTVRAHAKLVWQSLATQVEPIPVVKQITGKGLMIGIHLDEQIPVNQVITRLQVEGLLTLSAGDNTLRLLPPIVMQPADLLAGIALIAKVLTTLTTEVTTNE

SEQ ID NO: 960 - protein, 304 aa, Petunia x hybrida
MTTAELQLPPGFRFHPTDEELVMHYLCRKCASQPIAVPIIAEIDLYKYDPWDLPDLALYGEKEWYFFSPRDRKYPNGSRPNRAAGTGYWKATGADKPIGHPKAVGIKKALVFYAGKAPKGEKTNWIMHEYRLADVDRSARKNNNSLRLDDWVLCRIYNKKGSIEKNQLNNKKIMNTSYMDMTVSSEEDRKPEILPPLPPQPAPQQQQVYNDFFYLDPSDSVPKIHSDSSCSEHVVSPEFTCEREVQSEAKLSEWEKAALDLPFNYMDATTGATTLDNSLLGSQFQSSYQMSPLQDMFMHLHKPF

SEQ ID NO: 961 - protein, 222 aa, Zea mays
GWSSIAVGLVLNGRSSSDGYRVMWFGNDGNFEVYDSTKNMWSRPGTFPPSIKLPLALNFRSQPVAVGSTVYFMCAEPDGVLSYDVSTGIWRQFAIPLPPHLTDHTLAELQGRVMLVGLLCKNAATCVCIWELQKMTLLWTAVPGVPNIWCLEFYGKHMKMTCLGNSGLLMLSLKAKRMNRLVTYNLLKREWQKVPDCVLPYSRKKQWIACGTAFDPVPCALT

SEQ ID NO: 962 - protein, 305 aa, Miscanthus transmorrisonensis
IESVGEGVTDVAPGDHVLPVFTGECKECPHCKSAESNMCDLLRINTDRGVMIGDGKSRFSINGKPIYHFVGTSTFSEYTVMHVGCVAKINPQAPLDKVCVLSCGISTGLGASINVAKPPKGSTVAIFGLGAVGLAAAEGARIAGASRIIGVDLNPSRFEEARKFGCTEFVNPKDHKKPVQEVLAEMTNGGVDRNVECTGNINAMIQAFECVHDGWGVAALVGVPHKDAEFKTHPMNFLNERTLKGTFFGNFKPRTDLPNVVELYMKKELEVEKFITHSVPFAEINKAFDLMAKGEGIRCIIRMEN

SEQ ID NO: 963 - protein, 506 aa, Pseudomonas fluorescens PfO-1
MRFQNRKTCMCAPRPERAPARCAVLVTIHSVLRGREMSVATSLIEESSARIASAPAETLYQFNESPLLARQSRQESNARSYPRRIPLALKRAKGLYVEDVEGRSFIDCLAGAGTLALGHNHPVVIEAIQQVLSDELPLHTLDLTTPVKDQFVQDLFGLLPPALAKEAKIQFCGPTGTDAVEAALKLVRTATGRSTVLSFSGGYHGMSQGALSLMGSLGPKKPLGALLSSGVQFMPFPYDYRCPFGLGGAAGVKANLSYLENLLNDPEAGVQLPAAVIVEAVQGEGGVIPADIEWLRGLRRITEKAGVALIIDEIQSGFARTGKMFAFEHAGIIPDVVVLSKAIGGSLPLAVVVYREWLDSWQPGAHAGTFRGNQMAMAAGSAVMRYLVEHKVCEHAAAMGERLSEHLRILQRDFPQLGDIRGRGLMLGVELVDPSGTPDALGHPPAFARLAPLVQRECLKRGLILELGGRHGAVVRFLPPLVITAAEIDRVAEIFGRALSAATATL

SEQ ID NO: 964 - protein, 214 aa, Paeonia anomala
IVESVGEGVTDLKPGDHVLPVFTGECKECRHCKSEESNMCDLLRINTDRGVMLNDGKSRFSINGQPIFHFVGTSTFSEYTVVHVGCVAKINPEAPLDKVCVLSCGISTGLGATLNVAKPKKGSSIAIFGLGAVGLAAAEGARIAGASRIIGVDLNPKRFEEAEKFGVTEFVNPKDYNKPVQEVIAEMTDGGVDRSVECTGSIMAMISAFECVHD

SEQ ID NO: 965 - protein, 218 aa, Neisseria meningitidis MC58
MAFTLMRRAMIRKMPYTEDMRPGDTANPYGASKAMVERMLTDIQKADPRWSMILLRYFNPIGAHESGLIGEQPNGIPNNLLPYICQVAAGKLPQLAVFGDDYPTPDGTGMRDYIHVMDLAEGHVAAMQAKSNVAGTHLLNLGSGRASSVLEIIRAFEAASGLTIPYEVKPRRAGDLACFYADPSYTKAQIGWQTQRDLTQMMEDSWRWVSNNPNGYDD

SEQ ID NO: 966 - protein, 284 aa, Oryza sativa
MLRRRRRRRSRGRRPFLTGSARSDSTASAPVTSLPSTLLLRRPATSQLHHQRTEEVVSSSPVDEVKLQGHYARSRSEPAAAPAQEERKAASRLRNSSSEVRRAEVVRAPARVVEAFPEEAAAAVDATAEDDFTPKQQRDLPLQQEYVPPPAPAPAPLARTSSVLDRLRSFTLYSFRSGDLATDDIPADAAAAATPAQAHYGRTRSEPAREQDKKAKKQAASEAKTMTKSSSEARKDTAAEDADDGGVDARADDFINKFRQQLQLQRLNSLLNYKEMLNRGSSKQ

SEQ ID NO: 967 - protein, 266 aa, Acinetobacter calcoaceticus
VSEIHSIMITNRQGKTLSVQINGPENAPAIVFSNSLGTDHGMWQPQVAALKSQYRVVTYDTRGHGQSDVIENTTLQNLGEDVLDILDALNIEKAHFCGISMGGLTALWLGIYQAARFYSITVANSAAKIWTEDGWNARAEAVEANGLADLVASTHTRWFSDKFDYKNDNLAQKTIQSLADTPAQGYANACRALAKADVREKLASISIPTLIIAGSADPVTTITDGEFMQQHIQCNQFEVIDASHLSNIEQPEKFIQIFSGFVKSIQ

SEQ ID NO: 968 - protein, 383 aa, Neurospora crassa
MPAPIEEGSNTPGRQSPGHHIELVDDHPSPRHEGEAGSPALRDSKGWDGKLRVPKSAVLTNPEALSDPEYSDDDNVVPGEEVAADEGKQFECAQTRTLGLLHSISALRLERFKQVARICLRQNLIQDIEGLAAVAETLQDLDLYDNLISHIGRGLTDLTNLTSLDLSFNKIKHIKHINHLTNLTDLFFVSNKISRIEGLEGLDKLRNLELGSNRIRELQNLDSLKNLEELWVAKNKITELTGLGGLPKLRLLSIQSNRIRDLSPLREVPQLEELYISHNALESLEGLENNTKLRVLDISNNKIASLKGIGPLEELEELWASYNMVGDFAEVERELKDKKNLTTVYFEGNPLQLRAPALYRNKVRLALPQVQQIDAIDFVTTLV

SEQ ID NO: 969 - protein, 801 aa, Neurospora crassa
MLRNFFRRRHGDEDVMPDMVDDGSLEGDSTGIEALTALKRFEKMHRLDPNLPLDELDEVETALNSANIEKGTEIDQILAEDNSPYPEVRASVRNYDVEMPVNTIRAWTIGMLLCTIGSAVNMLLSLRNPSISLSTLAIQLIAYPIGLGWDLIFPDRVFTVFGIKFNLKPGPFNFKEHVIIVVMSNAAYGGGALYATDVILAQEIWYKQSFGWAWQILFGISTLCTGYGLAGLARRFLVWPAAMIWPADLINCTLFYTLHDHSPSDPARTNGWSISRYRWFLIVMAGSFAWYWFPGYLFQGLSWMCWITWIWPDNVIVNQLFGGQSGYGLFPITLDWSIISGYLLSPLASPFHAIANVVGGVTFFFVIVSLGIQYSNIWYSAYLPVQESHSYDNTGKRYVVLRILNENLHFDEAKYHAYSPLYLPTQFALAYGLSFAAVAAVIVHVGLYHGKDIWNQWKLARHQEDDVHMRLMKKYRDAEDWWYIILFAVMLGMSFAVVCAWDTGFPWWAFIICILIPVVWTIPIGIIQAITNIQLGLNVLTEYVIGYMLPGRPLVMMMFKNYGYLVMSQALYFIQDLKLGHYMKVPPRVMFWSQLIASVWSAIVQIAVMNWALGAIPDICTDGQANQFDCPSAKVFFTASVIWGAIGPARMFSGKALYSSLQWFWLVGAVAPVISWFFVRRYPRSLWRYVNFPLVFGGSGWIPPATVYIYYCWGIVGTVFNFFIRRRKTGWWLQYNYLTSAALDVGLLLSTLVIFFSLTLSHTKAPEWFGNTVAKSTMDTTATAVQKLVPPGEIFGPREWP

SEQ ID NO: 970 - protein, 847 aa, Pseudomonas putida KT2440
MTYNPQVNLTNCDREPIQIPGSIQPHGCLLACDASATVVLRHSVNAPQMLGVANDINGQKLHAVLGDEVTHTLRNALARTRDASRPALSFGVTLPNGAAVDIAAHLYKGTAILEFEPAGASIAEPIELARTLIAQLREIDQTHKLFRDAARFVRAVLGYDRVMIYQLGADGAGKVVAESKRSDLESFMGQYFPASDIPQQARALYLRNPIRVISDAQFNTVAINPVLDPSGEPLDLSYAHLRSVSPIHCEYLCNMGVGASMSISVIVNGELWGMIACHHYAPRTLAMGQRVAAEMFGEFFSLHIETLRSRQKLEAAVRIHKALDSLLRDANQAADIDGFFHARLPRLMSLIPCDGIGMSLLGRWSCAGLAPPQTAVPDLLRLADMVSEGRIWASNRLSTVLPSAQAYFNDVSGVLIIPMSQHPRDYLIFFRKEVVETLDWAGDPNKTYDSGALGDRLTPRKSFAIWKETVHQQSLPWTEQDRQFGDAIRTAIVEVVLHNSELLASERAKADVRQRMLNEELNHRVKNILSLIGALVAHPTPESQTLQDYVATLKGRIQALSLAHDQVVRGDGGGRLAKLLEAELSPYRTAADVIELQGPNVILDARAYSVMALVLHELATNAAKYGALSRAGGKLSVSWAIDASNACAISWREMGGPTVRPPSRSGFGTVLIDRSIPFDLGGTSAVEYHPEGLQGFFRIPAKHLSVAEAAETALPATPLARANGAFAARSGLCVLILEDQLVIAVGLEQILNDAQIKDVITASSEDQAMQLLGSHKPDAAILDVNLGTGTSISVADELVRRQVPFLFATGYGDGISIPEHLQHVPVARKPYDANAILASLQSLLELG

SEQ ID NO: 971 - protein, 168 aa, Triticum aestivum
MAAASSATSVHDFTVKDASGKDVDLSVYKGKVLLIVNVASQCGLTNSNYTELSQLYPKYKDQGFEILAFPCNQFGGQEPGTNDEIVQFACTRFKAEYPIFDKVDVNGNNVSPLYKFLKSSKGGLFGDSIKWNFSKFLVDKEGRVVDRYAPTTSPLSIEKDIKKLLGSS

SEQ ID NO: 972 - protein, 396 aa, Xanthomonas axonopodis pv. citri str. 306
MAGSSPRQVAVFGATGSIGTSALDVIARHPERLRASVLSAGSKVDELLALCATHRPAHALIADATLYPALRDGLRARGLATQAHAGAEALDALASSDACDTVVAAIVGAAGLPSTLAAARAGKRLLLANKESLVLAGELLTRTAAAAGAEIIPIDSEHSAIFQCLRSCDASRGVRRVILTASGGPFRGRDRAALAAVTPAQAVAHPKWSMGPKISVDSATLMNKGLEVIEAHHLFGLPGEQIDVLVHPQSLVHSLVEFVDGSTLAQLGLPDMRTTLAVGLAWPERVESGVGGLDLLSQGRLDFEAPDTAAFPCLRLAWDALRAGGTAPAILNAANEVAVSAFLQGQVGFLAIPALVEHTLTTLQRHNADSLDTLLFADAQARQITERALAHHALHA

SEQ ID NO: 973 - protein, 214 aa, Paeonia officinalis
  unsure (1)..(214): unsure at all Xaa locations
IVESVGEGVTDVKPGDHVLPIFTGECKECRHCKSEESNMCDLLRINTDRGVMLNDGKSRFSINGQPIFHFVGTSTFSEYTVLHVGCLAKINPEAPLDKVCVLSCGISTGLGATLSVAKPKKGSTVAIFGLGAVGLAAAEGARIAXASRIIGVDLNPKRFDEARKFGVTEFVNPKDYNKPVQEVIAEMTGGGVDRSVECTGSIMAMMSAFECVHD

SEQ ID NO: 974 - protein, 105 aa, Triticum aestivum
MLPDAAPGDSPAAGSPPAAAAVAKVRVKVLFFARARDLTGVAESSVEVPSGSTAGECLGRVLASFPKLDEIRRSMVLALNEEYAPESAPVADGDELAIIPPISSG

SEQ ID NO: 975 - protein, 444 aa, Oryza sativa
MEARRVSANPRPSCVRRVLARKRRRPEATANSARKLQRREISALPCRAFSASTTRERFRNIQLQEEFDTHDPKEMGSLLPYLMKRSEIIEIVGASDIIFALSQSGVCAAFSRVSNQRICFLNGRPDEVIRSLFYNKNNDSLITVSVYGSENFSALRCRTTRIEYIRRGKPDAGFPLFETESLKWPGFVEFDDVNGKVLTYSAQDSTYKVFDLKNYTLLYTISDKNVQEIKIRKKGCIPLDILSIEDGKRLKSFKHLLHRNKKVDFIEQFNEKLLIKQEGENLQILDVRNFQSIEVSRSEFVTPSAFIFLYEMQLFLTFRSRSVSVWNFRGELVTSFEDHMLWHPDCNTNSIYITSNQDLIISYCKADPNDPSSEENACSINISEILTGKCLAKIKAGNLNKQRVSKFQSTPSEALGDITALYYDEEREEIYTGNRLGLVHVWSN

SEQ ID NO: 976 - protein, 387 aa, Gaeumannomyces graminis var. tritici
MLRSSAFALLAWASLSEAQFGIKHTQYGTSEPVYPSPEISGSGGWEAGLAKAKDFVAQLTPEEKANMVTGTPGPCVGNIAPVPRLNFTGLCLQDGPATLRQATYVTVFPGGVSAASSWDKDLIYKHGVLMAREFRDKGSHIILGPVIGPLGRSPYAGRNWEGFSPDSYLAGVLAEQTVKGMQSVGVQTCTKHYIGNEQEEQRNPTTVDGKGVEAISSNIDDRTMHETYLWPFYNAVRAGTTSIMCSYQRINGSYGCQNSKTLNGLLKTELGFQGFVVSDWAATHSGVASIEAGLDMNMPGPLNFFAPTLESYFGKNITTAVNNGTLSSRRVDDMIERIMTPYFALGQDKDYPPVDGSTVPIGYLQPDAWNHEFPLGPTVDVRRNHHE

SEQ ID NO: 977 - protein, 344 aa, Oryza sativa
  unsure (1)..(344): unsure at all Xaa locations
MDGGGGGGGGGFGLGGLQWTAEEASTIGGIATVSLLHSFIPTHWLPFSIVARAQRWPLSRTLLVSEETVHKLASLLLIVLGGSYILLFALGKGGHGHAHNHPMEKMAVAGLVLVPALSPCATTLPVFLAVGNSSSMMILAIIVLLFSTITVMTSLVALSFYGASQIKFHWVERYDKILVGSVLCLVGLRLRRRHRSMAPGGDGDYYRTLGIERGASKAEVKAAFYRLAPLHHPDRHAASDAAARAAAGGRFRRVYDAYTVLHSDATRAAYDHLPRTATSPPTSRGSGGAAASGSSYGRCFSRPQPPSMKLPVILFFSLVTGXGATMAQGNXWIDQGLDRLRRLX

SEQ ID NO: 978 - protein, 109 aa, Enterococcus faecium
MYFNNNVYGMQILLEVMHEFNVNKIVFSSTAATYGEPKESPITEDTPANPKNPYGESKLMMEKMMKWCDQAYGMRYVALRYFNVAGAKADASIGEDHTPETHLSQSFYK

SEQ ID NO: 979 - protein, 447 aa, Rhodospirillum rubrum
MSDFDPALAGGLSRAELEAHWMPFTANREFKANPRMVVGAEGVHYIDARGRKLYDSLSGLWCCGAGHGRREIIEAVSAQIAALDYAPAFQFGHPSSFKLANKVASLTPKGLDHVFFTNSGSESVDTALKMARAYWRLKGEPARTKLIGRAKGYHGVNFGGLGVGGIGGNRKLFGVGIDADHLPHTMLPENAFTKGCPETGAELADALEDLVALHDASNIAAVIVEPLAGSTGVLPPPKGYLQRLRAICDKYGILLIFDEVITGFGRMGAAFGADAFGVVPDIMTIAKGLTNGAVPMGAVVASGEIYRTFMENSGPDHLVEFPHGYTYSAHPVACAAGLAALEIFEKDQLAARAAALAPYFENSLHGLRGLKHIVDIRNYGLAGAVQIENAPGQPAKRPLEIGRKCWEAGYYVRFGGDSLQFGLPFFSEPAQIDGLMNAVADAVSSVA

SEQ ID NO: 980 - protein, 204 aa, Zea mays
MAKIGLKPDPVNNNAKEIRYRGVRKRPWGRYAAEIRDPGKKTRVWLGTFDTAEEAARAYDAAARDFRGAKAKTNFPNFLELSEKMPAAGGGFERSPSQSSTLDCDSPPAAVTPASAGIVPPQLELRLGGYQIPMARPIYFLDVMGVGNGGRAQPPVASAFRSPVACVAQSDSDSSSVVDFEGVMEKRSQLFDLDLNLSPPSEQA

SEQ ID NO: 981 - protein, 189 aa, Oryza sativa
AIYKKFTRVFFASLASPSEVIGRRGAASGRAGGGLVAMAGRGEMPMRPVRPGPPMQYRGPPPMARARVEPVDREKTCPLLLRVFTKVGGHHQNEEFAVRGKEPKDEVQIYTWKDATLRELTDLVKEVALAARKRNARLSFAFVYPDKHGRFVVKEVGSTFSYGHGRGDDAKTLAELGFQIGDYLSVAIY

SEQ ID NO: 982 - protein, 173 aa, Helicobacter pylori
MNLDQLEVSHDADSLCVVIEISKHSNIKYELDKESGALMVDRVLYGAQNYPANYGFVPNTLGSDGDPVDALVLSDVVFQAGSVVKARLVGVLNMEDESGMDEKLLALPIDKIDPTHSYVKDIDDLSKHTLDKIKHFFETYKDLEPNKWVKVKGFENKESAIKVLEKAIKAYQG

SEQ ID NO: 983 - protein, 257 aa, Oryza sativa (japonica cultivar-group)
MAGLGKAFYAVGFWIRETGQALDRLGCRLQGNYYFHEQLSRHRTLMNIFDKTPHVHRDAFVAPSASLIGDIQVGQGASIWYGCVLRGDANNVQIGSGTNIQDNSLVHVAKSNLSGKVFPTIIGDNVTVGHSAVLQGCTVEDEAFVGMGATLLDGVVVEKHGMVAAGALLYWIQVWGGNPAKFLRKLTDDEITFIKESASNYSTLAKAHAAENAKPVEKTEFEKLFRKKSAHQDEEHDSMIGATREVTPELTPSSSAQ

SEQ ID NO: 984 - protein, 467 aa, Lycopersicon esculentum
MSTKPTPLELSEMSTMSLDETFHPNKVSESTESSSSSTTPLKPHTGGDIRWDAINSATGRGGPPLNLSNFRLLKRLGYGDIGSVYLVELRGTNAFFAMKVMDKGSLASRNKLLRAQTEREILSLLDHPFLPTLYSHFETDKFYCLVMEFCSGGNLHTLRQKQPNKHFTEEASRFYASEVLLALEYLHMLGIVYRDLKPENVLVRDEGHIMLSDFDLSLRCSVNPTLVKSSSVHGGGGGGNPSSGSGILDNDNAVQGCIQPSTFFPRNILPTKKNRKSKSDFGLFVGGSLPELMAEPTNVRSMSFVGTHEYLAPEIIRGEGHGSAVDWWTFGIFLYELLHGTTPFKGAGNRATLFNVVGQPLRFPETPQVSAIARDLIRGLLVKEPHKRIAYKRGATEIKQHPFFEGVNWALVRSAVPPSIPEPVDFAQYASKDASAPCSDKKMPDTESHDKSKNTCTDSSYIDFEYF

SEQ ID NO: 985 - protein, 323 aa, Leptospira interrogans serovar lai str. 56601
MRLLITGGAGYIGSHVVALLLEKKHELVIVDNLEKGNRSNLFSETQLIQGNIQDESVLENAFSKPIDAVFHFAAWKAAGESMTDPSKYALNNINGTLKLLTFMEKAGTNQFIFSSSAAVYGSPEYLPIDEKHPVRPENYYGYTKLAIEQNLKWYETLKGFKFAALRYFNAAGYDPKGRVRGLERTPANLLPIIMEAAVGIRKDFEVFGTDYETPDGSCVRDYIHVTDLAKAHVLSLDYLDSEKKSLTVNLGSEKGYSVLEMVRLAEEVVGRSIPHKISGRRAGDPAKLLASSAMAQRLLQWVPEYSEAKTLLKTMWDVYQNPA

SEQ ID NO: 986 - protein, 481 aa, Arthrobacter nicotinovorans
MQSSSSDITGTSADGGQAPPPQDIAHADLQLGHLTGPQVMGLSISSFIPAVGLSAVPAFLAAYTGRSSWLAMAASVVAFTIIGLFVTAFARRFIGTGSLYSYIRHVFGSWSPLVIAAAMVPGYIVVVMVLVVSLGLYVGSFLMSVGVSSAAGPEIQLVIYVLAALIAMGIAYRGLDVSVRSSVILTVVSVPVMLVITVATAFGGNVDLASQLSLSDFTFNSFLQGLAIGSTFFIGFESSAALGAETRNPTRAIPRAIMVIPVVLGMAFLAATVIQVPTLVDSADQLALGVSPNAVLAEAAGVGFLSNISDLVLAAAVFASLIGFFNYGSRVVVSAASDGLLPSALTKVSKRYKSPLAAIAFLGVPSLVGPPVMLWLTSSTPLEIYGYIATLLVYFWVIPYFLICIGGAVLLNRLSPRKSVLVNIGAALASATVLWLYVNGILYPAPGPLSALPYVMIGTVAVFLVGFVASVRSKRRTSISA

SEQ ID NO: 987 - protein, 493 aa, Saccharomyces cerevisiae
MSNDEGETFATEQTTQQVFQKLGSNMENRVCFDCGNKNPTWTSVPFGVMLCIQCSAVHRNMGVHITFVKSSTLDKWTINNLRRFKLGGNHKARDFFLKNNGKQLLNTANVDAKTKYTSPVAKKYKIHLDKKVQKDMELYPSELVLNGQDSSDSPLDTDSDASRSTSKENSVDDFFSNWQKPSSNSSSKLNVNTGSLAPKNNTTGSTPKTTVTKTRSSILTASRKKPVLNSQDKKKHSILSSSRKPTRLTAKKVDKSQAEDLFDQFKKEAQQEKEDEFTNSSSSTKIRQNDYDSQFMNNSKGNNNNSIDDINTQPDEFNDFLNDTSNSFDTTRKEQQDTLTPKFAKLGFGMTMNDANDLAKQQKESQKIAQGPRYTGRIAERYGTQKAISSDQLFGRGSFDEAANREAHDKLKTFDNATSISSSSYFGEDKEVDEFGNPINSSGSGAGNFDGRNSNNGFIDFNASADDELQMLRDVVEQGAEKLGSYLRDYLRK

SEQ ID NO: 988 - protein, 205 aa, Eucalyptus globulus subsp. globulus
MVRGKTQMKRIENDTSRQVTFSKRRNGLLKKAFELSVLCDAEVALIIFSPRGKLYEFSSSSLCKTIEKYQTRAKDMEAKTAEISMQPSKGNTLDMEKKIEHFEISRRRLLGEGLDSCSVEELQQTENQLERSLTKIRARKNHLIREHIERLKAEERKLLEEKRKLLQEIECGKGLTPVSSERPREEIRAESMDVETELFIGPPKR

SEQ ID NO: 989 - protein, 153 aa, Narcissus pseudonarcissus
MCGGAIISDFIPPSRSRKLTADYLWPNLNKGKDKKKSFGFEDDFEADFNEFEDESEEGESEAVDVKPFKFGAKAGFSREGSTYLKPIELNGAAERSSKRKRKNQYRGIRQRPWGKWAAEIRDPNKGVRVWLGTFNTAEEAARAYDDEARRIRG

SEQ ID NO: 990 - protein, 437 aa, Zea mays
MEVHADVDGSGVPLAVLLKRELCNQKVERPDILFGEANKSKKGEDFTLLLPRCHRTTGEGGGSGGGENAGDDDDDTISVFAIFDGHNGSLAAIYTRENLINNVLAAIPPNLTSEEWKAALPRALVAGFVKTDKNFQIKAARSGTTVTFVIIDGWVVTVASVGDSRCILESAEGSVYLLSADHRLDANEEEVERVTASGGEVGRINIAGGAGIGPLRCWPGGLCLSRSIGDIDVGEFIVPVPHVKQVKLSNAGGRLVIASDGVWDALCFQEALNYIRGLPAEAAANRIVKEAVTSKGLRDDTTCIVVDILPPEKLSPPLKRPGKGVIKTLFRRRPSDEMSEDQMDRGCLEPDVVEEIYEEGSAMLARRLNINYPSGNMFKLHDCAVCQLEMKPGEGTSVHGNMPKHSRVDPWGGPFLCSSCQLKKEAMEGKLHSRTAE

SEQ ID NO: 991 - protein, 305 aa, Miscanthus sinensis var. formosanus
IESVGEGVTDVAPGDHVLPVFTGECKECAHCRSAESNMCDLPRINTDRGVMIGDGKSRFSINGKPIYHFVGTSTFSEYTVMHVGCVAKINPQAPLDKVCVLSCGISTGLGASINVAKPPKGSTVAIFGLGAVGLAAAEGARIAGASRIIGVDLNPSRFEEARKFGCTEFVNPKDHKKPVQEVLAEMTNGGVDRGVECTGNINAMIQAFECVHDGWGVAVLVGVPHKDAEFKTHPMNFLNERTLKGTFFGNFKPRTDLPNVVELYMKKELEVEKFITHSIPFAEINKAFDLMAKGEGIRCIIRMEN

SEQ ID NO: 992 - protein, 105 aa, Methanothermococcus thermolithotrophicus
MVEFCPKCNNIMLPKNGRLKCTVCGFEEELGNRTEEYELKEKIEAKKQEVTVIEDVDTLPTTRIECPSCGNMEASWWLQQTRCADEPETRFYKCKKCGHTWREYD

SEQ ID NO: 993 - protein, 405 aa, Pseudomonas aeruginosa UCBPP-PA14
MDDLLQRVRRCEALQQPEWGDPSRLRDVQAYLRGSPALIRAGDILALRATLARVARGEALVVQCGDCAEDMDDHHAENVARKAAVLELLAGALRLAGRRPVIRVGRIAGQYAKPRSKPHEQVGEQTLPVYRGDMVNGREAHAEQRRADPQRILKGYAAARNIMRHLGWDAASGQEANASPVWTSHEMLLLDYELSMLREDEQRRVYLGSTHWPWIGERTRQVDGAHVALLAEVLNPVACKVGPEIGRDQLLALCERLDPRREPGRLTLIARMGAQKVGERLPPLVEAVRAAGHPVIWLSDPMHGNTIVAPCGNKTRLVRSIAEEVAAFRLAVSGSGGVAAGLHLETTPDDVTECVADSSGLHQVGRHYTSLCDPRLNPWQALSAVMAWAGAEATPSATFPLETVA

SEQ ID NO: 994 - protein, 355 aa, Magnetococcus sp. MC-1
MVALSAGQNSARMIAQAKHFRPEVVAMADTKAAAEVTEALAGENIRVLAGEEGVIEVASWASAQMTVSAIVGGAGLRPTLAAIRARKDIALANKECLVMAGSLFMAEIGRYQVRLIPVDSEHSAIFQVFQNSNWMRRLVLTASGGPFRGWRRQQLHGVTPAQAVAHPNWSMGRKISVDSSTMMNKGLEVIEAHWLFGLPAEQIDVVVHPQSIVHSMVEYQDGSVLAQMGVPDMRTPIAVALAWPERIPTTVKSLDLPKLGQLDFYDKPDKRDFPCLELAYEALRRGGIAPVVLNAANEIAVAAFLEGAIGYLEIADLIVKTMDYLGHAPIESIDHLFAVDLQARMTAQQLGRLAH

SEQ ID NO: 995 - protein, 351 aa, Gelidium crinale
MEKSFDQLLSLNVDEGCIVEYVWIDGYDAVRSKGRYLKNIPSKASDLPDWNYDGSSTNQASGEDSEVIIKPQRIFPDPFRGKPNLLVMCDTYTPNGEPLKTNTRFECERIMNQAKDLKPWFGLEQEYFLINPNTGKPLGFPNDKDPEPQGPYYCGVSGSKMFGRDIADAHFKACVYAGIKISGINAEVAPGQWEFQVGPCVGIEEGDELWMGRYLLQRIAEMKGLDVNYDPKPVKGDWNGSGCHSNFSTKPMREKDGYQNAIIPALEKLSKKHKEHIAAYGIGNEDRLTGKHETASIEQFKWGVADRGASCRVGHDVEKKGYGYFEDRRPAGNCDPYVVTMMLVKTCCLED

SEQ ID NO: 996 - protein, 292 aa, Glycine max
  unsure (1)..(292): unsure at all Xaa locations
MLLSSSCSAAGSAVSGEIMLFGVRVVVDSMRKSVSMNNLSQYELPRDAANAKDDVAAGYASADDAAPINSGKNRDRKRGIPWTEEEHKLFLVGLQKVGKGDWRGISRNYVKTRTPTQVASHAQKYFLRRTNLNRRRRRSSLFDITTDSVSTTPVEEGQIQHQDNVSLFRPVYPVTPEGSYMNGFPMMSMYPKDVGSRVMSVQAGNPMETLTLXQGNVEQNDPSTKLVCTIPIVPDHSGSXVSDITASLSSIDPPTLSLGLSLSSSQRQTSSTHSALHALPCFNNQDSIISVA

SEQ ID NO: 997 - protein, 159 aa, Triticum aestivum
  unsure (1)..(159): unsure at all Xaa locations
MDFGTDERQHSHGDGGDAAEWKKVVELRAVAEAQDPAAKEEDDFVLRRFLRARDYNIGKASMMLLQYLAWKRVAKPHGSISDEEVRGEIAKKRVDMQGFDCLGRPMAYIYGARHFPARRDLDGFKRYVAYVLDKICTMLPVGXEKFAAVIDLKGWGYAN

SEQ ID NO: 998 - protein, 1111 aa, Arabidopsis thaliana
MSSNTSRSYSTRSRQNSRVSSQVLVDAKLHGNFEESERLFDYSASINLNMPSSSCEIPSSAVSTYLQKIQRGMLIQPFGCLIVVDEKNLKVIAFSENTQEMLGLIPHTVPSMEQREALTIGTDVKSLFLSPGCSALQKAVDFGEISILNPITLHCRSSSKPFYAILHRIEEGLVIDLEPVSPDEVPVTAAGALRSYKLAAKSISRLQALPSGNMLLLCDALVKEVSELTSYDRVMVYKFHEDGHGEVIAECCREDMEPYLGLHYSATDIPQASRFLFMRNKVRMICDCSAVPVKVVQDKSLSQPISLSGSTLRAPHGCHAQYMSNMGSVASLVMSVTINGSDSDEMNRDLQTGRHLWGLVVCHHASPRFVPFPLRYACEFLTQVFGVQINKEAESAVLLKEKRILQTQSVLCDMLFRNAPIGIVTQSPNIMDLVKCDGAALYYRDKLWSLGVTPTETQIRDLIDWVLKSHGGNTGFTTESLMESGYPDASVLGESICGMAAVYITEKDFLFWFRSSTAKQIKWGGARHDPNDRDGKRMHPRSSFKAFMEIVRWKSVPWDDMEMDAINSLQLIIKGSLQEEHSKTVVDVPLVDNRVQKVDELCVIVNEMVRLIDTAAVPIFAVDASGVINGWNSKAAEVTGLAVEQAIGKPVSDLVEDDSVETVKNMLALALEGSEERGAEIRIRAFGPKRKSSPVELVVNTCCSRDMTNNVLGVCFIGQDVTGQKKLTENYSRVQGDYARIMWSPSTLIPPIFMTNENGVCSEWNNAMQKLSGIKREEVVNKILLGEVFTTDDYGCCLKDHDTLTKLRIGFNAVISGQKNIKKLLFGFYHRDGSFIEALLSANKRTDIEGKVTGVLCFLQVPSPELQYALQVQQISEHAIACALNKLAYLRHEVKDPEKAISFLQDLLHSSGLSEDQKRLLRTSVLCREQLAKVISDSDIEGIEEGYVELDCSEFGLQESLEAVVKQVMELSIERKVQISCDYPQEVSSMRLYGDNLRLQQILSETLLSSIRFTPAWKGLCVSFKVIARIEAIGKRMKRVELEFRIIHPAPGLPEDLVREMFQPLRKGTSREGLGLHITQKLVKLMERGTLRYLRESEMSAFVILTEFPLI

SEQ ID NO: 999 - protein, 424 aa, Triticum aestivum
  unsure (1)..(424): unsure at all Xaa locations
MGVGKKVLNDVKPYMMMILLQIGXAGMYIVSVASLKRGMSHYVLVTYRNLVATLVMLPFALFFEKGTRPKMTLRIFIKILGLALLEPVLDQNLYYVGNARASASFSSALVNILPAVTFIMAIVLRMEKLRLRSSHSQAKVAGTICTVIGAVLMIMYHGPVVQFPWARGAHHVDQAASAAAAQSSATWLKGTIAIITSCVAWAGFFVLQSNTLNSYPAALTLTTLICAMGTGINGSMALVAERHDMSAWVIGLDTRLFTVVYSGVVCSGVAFFVQGIVTETRGPVFVTAFQPLCMIITAVLGSVILKEETTLGSVIGAAIIVLGLYSLIWGKSNDIIDKPVHSVAEKLALAHLRQRQRQRHQRHQRDQRRQARQRRPGRPRRRDAGGEGRDLPLATTRRHLARAPTYVLRAFLRSRVWSRNLLYV

SEQ ID NO: 1000 - protein, 216 aa, Zea mays
  unsure (1)..(216): unsure at all Xaa locations
MGFLEDFQASVEALPSMLHRNYSLMRELDKSLHGSAAXIMAHDASALLLNCECAXILIMLIYXVDAHIQQLDQFMRKLEEIRQEKEAAAAVTAGTAVAITATPTVNAGATTADATLKSGRSGERGRGGRKKAKVPTEQPVPVPVPLPPIDLELPVDPNEPTYCLCNQVSYGEMVACDNPNCKIEWYHYGCVGVKEQPKGKWYCPNCIGFQKKRKGK

SEQ ID NO: 1001 - protein, 510 aa, Candida maltosa
MIDALYILIVALVIYKTAQFVHRKSLEKKHHCQPVKQIPLVSILSGLGFDMFFKDTAEMTKNGGLHKKLQQMLESLQTTTFRSRMLTGSQIVTMEPENERTMCSSAHMKDWTIGYRPFALKPLLGDGIFSSEGESWKHSRIMLRPIFAKEHIKQITAMEPYMLLLIEIIKSSSANEGPVDLQPLFHAFTIDYASDFLFGESCDVLKENLGGKSTSGMDAQVKRDFASVFNDVQNYLTKRMMLGPLAFLVSSKDFHDGIKKQHEFVSYFVQKAISMSDEELNDESKNYVFLYQLAKQTKDAKVLQDELLSILLAGRNTTASLLSFLFFELSHHENVWTTLKEVVDQSFPDVESITFETIQNCDYLRWCLFESLRVNPSVPFNSRTANKDTILPRGGGEDCSHPILVKKGDQVLFPLYASNRQEKYFGRKPEEFIPERWRDLPKTGGPAFMPFSTGPRMCLGQQFALIEASYVTIRLVQTFSKLKSHSLEYAPKRLVAATIRLIDGCFVSFE

SEQ ID NO: 1002 - protein, 132 aa, Triticum aestivum
  unsure (1)..(132): unsure at all Xaa locations
MNLWTDHMGAMMGAFMASADMPAFPWGAAATPPPPAAVPQQPAFNQDTLQQRLQAIIEGSRETWTYAIFWQSSTDAGASLLGWGDGYYKGCDDADKRRQQPTPAXAAEQEHRKRVLRELNSLIAGGGAAAPD

SEQ ID NO: 1003 - protein, 464 aa, Oenococcus oeni
MKKRTKKSGIGLISLIAIVINSSIGAGIFGLISGIASSASPGAALIAWMICGIGILGLVLSINNLVLKKPKLNGIFVYAQEGFGPFDGFISGWGYWLSSWLSNIAFATMLMSATGFFFPVFGNGQNLPSVVAASILSWVLTVLVNRGIESASFINTFIAICKLIPIFIFITFSFILFKFNVFDSDFWSTFNSNISSGFHFGDVANQIRGCLMVIMWVFVGIEGASVMAKHAKSKRDVGLATVLGLSCLLAIYVLVSILPYGILSQAKLSQLRSPSMQYLFQRMVGKWGGTLIGLGVVISITGSWLSWTMIPAQTMSDMANEGLLPKIFGRTNKRNASTFALFSTECLFQLFLLTLLVTDKAYIFAYSLCTVATIVTYVFVAAYQIKFSLLDKELNNKRQFFYGIIAFVFQVNVIILAGIPVYCYLQKHDNHTKVFGPIELAVAGLTVLAAIYAIYGLIVGSITF

SEQ ID NO: 1004 - protein, 469 aa, Medicago truncatula
MASTRRVQCLMRRFYRGSRTFGVATQPNASSSSQTIIDKEFQHSAHNYHPLPIVFAHAKGSAVWDPEGNKYIDFLSGYSAVNQGHCHPKILKALKNQAGRLTVSSRAFYNDRFPVFAEYSTALFGYDMVLPINTGAEGVETALKLARKWGYDKKKIPNDEALIVSCCGCFNGRTLGVISMSCDNEATRGFGPLIPGHLKVDFGDAEALEKILKEKGDAIAAFILEPIQGEAGVKIPPDGYLKAVRDLCSKYNVLMIADEIQTGLARTGKMLACEWEEVRPDVVVLGKALGGGIIPVSAVLADKEVMLCIKPGQHGSTFGGNPLASAVAIASLEVIKEERLAERSTKLGGELLGLLEKIQKQYPDHVKEVRGRGLFIGVELNSESLSPVSFFELSEKLKDRGVLAKSTHDTIIRFTPPLCISADEIQQGSKALADVLEIDLPMLKKMKPKDAAPPAGPSACDRCGRVVYG

SEQ ID NO: 1005 - protein, 477 aa, Mesorhizobium loti
MTGKSEQKLSLFALIGMVVGSMIGAGIFNLPGRFATATGPFGAIIAWCIAGTGMYMLARVFQALAEKRPDIDSGVFAYAKAGFGDYMGFLSAFGYWLGSCLGNVFYWVLIGSTLGRFFPGIFGDGSTAIAIIVSLVGIWAFHFMILRGVEQATFINSVVTVAKIVPIIVAILAMAIAFNYTQFSENFLGGVGMPEKTLVAQVRDTMLITVFVFLGIEGASVYSRFAQKRSDVGTATILGFVGVTGLMVAITLLPYATAPRAAIAGVQQPSLAGALELVVGHWGAVFISVGVLVSVLGAYLAWSLICAEVLFAAAKSQDMPKLFAAQNGNRVPANALWLTNIVVSLFIISTYWSRDAFNFMLDMTSVTALLPYLLVAGYGVLIARRGEGYQTTPGERGRDQLFAWIAVVYTLIMFVAAGLKYVLLVAVLFVPGTILYLWARREQKARFFTSVELIIFAVTLVAGLAGFVGLLTGAITP

SEQ ID NO: 1006 - protein, 114 aa, Zea mays
  unsure (1)..(114): unsure at all Xaa locations
MDGENEPYVISDLNASLPAAAAALSAEDRAGLVNALKDKLQSLAGQHADVLKTLSPNVRKRVEFLRGIQSQHDXIDGKFFEERVALEAKYHKALXKPLYTKRVLKLVKGENGGR

SEQ ID NO: 1007 - protein, 382 aa, Vibrio parahaemolyticus RIMD 2210633
MTLEIKPGQTHIKSKAMVAWAAGEPLKMEEVDVQLPKAGEVLVRIVATGVCHTDAFTLSGDDPEGIFPSILGHEGGGIVEMVGEGVTSVEVGDHVIPLYTAECGECKFCKSGKTNLCQAVRETQGKGLMPDGTSRFSINGETIFHYMGCSTFSEYTVLPEISLAKVNKQAPLEEVCLLGCGVTTGMGAVLNTAKVEKGDTVAIFGLGGIGLSAIIGARMAGASRIIGIDINESKFDLAKQLGATDVINPQKFDKPIQEVIVEMTDGGVDYSFECIGNVNVMRQALECCHKGWGESVIIGVAGAGQEISTRPFQLVTGRVWRGSAFGGVKGRSELPEIVNRYMAGEFGLQEFITHTMGLEDVNKAFDLMHEGKSIRTVIHMDK

SEQ ID NO: 1008 - protein, 155 aa, Zea mays
MAPQHDEERCYADGLAWATDDHSLHNAFSTYGEVLESKIILDRETQRSRGFGFVTFSTEEAMRNAIEGMNGKELDGRNITVNEAQSRGGRGGGGGGYGGGRGGGGYGGGGRRDGGGGYGGGGGYGGGGGYGGGGGGYGGGNRGGGYGNSDGNWRN

SEQ ID NO: 1009 - protein, 143 aa, Glycine max
  unsure (1)..(143): unsure at all Xaa locations
MAMAFKMATTGMWVTDECKNSFMEMKWKKVHRYIVFKIDEKSRLVTVDKVGGPGESYGDLAASLPDDDCRYAVFDFDFVTVDNCRKSKIFFIAWSPTASRIRAKMLYATSKDGLRRALDGXSYEVQATDPTEMGFDVIQDRAK

SEQ ID NO: 1010 - protein, 392 aa, Hiptage benghalensis
DLEPVNPADVPVTAAGALKSYKLASKAISRLQSLPSGNISLLCDVLVKEVRDLTGYDRVMVYKFHEDEHGEVVSECRRSDLGSYLGLHYPATDIPQASRFLFMKNKVRMICDCLAPPVKVIQDERLPQPLSLCGSTLRSPHGCHAQYMTDMGTIASLVMSVTINEDDDMMDGDQQQMARKLWGLVVCHHTSPRFVPFPLRYACEFLIQVFGVQINKEVELAAQVREKHILQIQTMLCDMLLRDAPVAIITQSPNVMDLVKRDGAALYFKNKTWLLGVTPTEEQIRDIAEWLLEYHSGNTGLSTDSLMEAGYPGASVLGDAVCGMAAVSITSRDFLFWFRSHTAKEIKWGGAKHDPDDKDDGRKMHPRSSFKAFLEVVKWRSMPWEDVEMDAI

SEQ ID NO: 1011 - protein, 194 aa, Saccharomyces cerevisiae
MVTSNVVLVSGEGERFTVDKKIAERSLLLKNYLNDMHDSNLQNNSDSDSDSDSETNHKSKDNNNGDDDDEDDDEIVMPVPNVRSSVLQKVIEWAEHHRDSNFPDEDDDDSRKSAPVDSWDREFLKVDQEMLYEIILAANYLNIKPLLDAGCKVVAEMIRGRSPEEIRRTFNIVNDFTPEEEAAIRRENEWAEDR

SEQ ID NO: 1012 - protein, 224 aa, Cycas edentata
MGRGKIEIKRIENTTNRQVTFCKRRNGLLKKAYELSVLCDAEVALIVFSSRGRLYEFANNSVKRTIERYKKTCADNTQGGAISESNSQYWQQEAGKLRQQIDILQNANRHLMGDALTSLSVKELKQLEIRLERGLSRVRSKKNEMLLEEIEIMQRREHILLAENQFLRTKIAEYESNQNTNVLIPGPEFDALPAFDSRNFLHANLIEAAAHHYTQQDQAALQLG

SEQ ID NO: 1013 - protein, 341 aa, Oryza sativa
MAGTVTVPSASVPSTPLLKDELDIVIPTIRNLDFLEMWRPFFQPYHLIIVQDGDPTKTIRVPEGFDYELYNRNDINRILGPKASCISFKDSACRCFGYMVSKKKYVFTIDDDCFVAKDPSGKDINALEQHIKNLLSPSTPFFFNTLYDPYREGADFVRGYPFSLREGAKTAVSHGLWLNIPDYDAPTQMVKPRERNSRYVDAVMTVPKGTLFPMCGMNLAFDRDLIGWCMKFICDHLSLGVKTGLPYIWHSKASNPFVNLKKEYKGIFWQEDIIPFFQNATIPKECDTVQKCYLSLAEQVREKLGKIDPYFVKLADAMVTWIEAWDELNPSTAAVENGKAK

SEQ ID NO: 1014 - protein, 105 aa, Glycine max
MLPDAAPGDGPAAGSPPAAAAVAKVRVKVLFFARARDLTGVAESSVEVPSGSTAGECLGRVLASFPKLDEIRRSMVLALNEEYAPESAPVADGDELAIIPPISGG

SEQ ID NO: 1015 - protein, 294 aa, Zea mays
  unsure (1)..(294): unsure at all Xaa locations
MEAIRKQASKFREQVARQQQAVMKQFGGGYGADGVFANEAEAQQHSKLEKLYISTRAAKHFQRDIVRGVEGYIVTGSKQVEIGNKLCEDGKKYGTENTCSSGSTLSKAALSFAKARSMMEKERGNLLKALGTQVAEPLRAMVMGAPLEDARHLAQRYDRMRQEAEAQAIEVSKRQMKLRGASGNSDMVSRLEAAESKLQEVKSNYXVLGKGAVAAMTAVEAQQQRLTLQRLIALGXREKLPTKRSFQILDQLEREMVSDRQRIEGAPPPVVESSMPSPPAYEEVNGIFMRNTVA

SEQ ID NO: 1016 - protein, 121 aa, Zea mays
  unsure (1)..(121): unsure at all Xaa locations
MAEEASAPAAGTEAPPGKMTMVVGVDXSEHSFYALQWALQHFFPPGQPQQYRLVVVTAKPTAASAVGLAGPGAADVLPYVEADLKRSALRVVEKAKGLCTQGCSWKCERLLPSRALHRDDS

SEQ ID NO: 1017 - protein, 392 aa, Ferroplasma acidarmanus
MAKITFENGKWKVPDNPTILYTDGDGIGPEIMDVTRKVVDAAVKKAYKNKKIEWKEILVGDKALKEKNDRFPEESQEAIKQYRVLLKSPLGTPIGTGFKSINVRIRVMLDLYSNIRPVSFMKGLESPLKHPENVNLTIFRENTDDLYTGIEYKYDSKEAAEIRKFFKDKLHVEISDDSGIGIKPMSKYKTQRITRAAAKFAIENNKKKITIMHKGNVMKYTEGAFREWAYETLKNEFGNYTSTDDSSKILVNDMIADNMFQQIITRPENYEVILAPNIDGDYISDAAGALIGNIGTLGGANVGDDAGMFEAVHGTAPKYAGQNVADPLGLIRGAQLMIKYLNWHEAFDVIEKAIGEAIETKKVTKDLAKFFDVPAMGTKEFGDSLVKIIDGL

SEQ ID NO: 1018 - protein, 146 aa, Streptomyces lividans
LQYIERLDPEREPGRLTFIVRMGADKIRDKLPELVERSPPPATVAWITDPMHGNTYEAAPVHKTRRFDDVLDEVKGFFEVHKSLGTHPGGIHVELTGDDVTECVGGGDEIFVDDLHQRYETACDPRLNRSQSLDLAFLVAEMYRDQ

SEQ ID NO: 1019 - protein, 379 aa, Arabis gemmifera
MSTTGQIIRCKAAVAWEAGKPLVMEEVEVAPPQKHEVRIKILFTSLCHTDVYFWEAKGQTPLFPRIFGHEAGGIVESVGEGVTDLHPGDHVLPIFTGECGDCPHCHSEESHMCDLLRINTERGGMIHDGESRFSINGKPIHHFLGTSTFSEYTVVHSGQVAKINPDAPLDKVCIVSCGLSTGLGATLNVAKPKKGQSVAIFGLGAVGLAAAEGARIAGASRIIGVDLNSQRFDQAKEFGVTEFVNPRDHDKPVQQVIAEMTNGGVDRSVECTGSVQAMIQAIECVHDGWGVAVLVGVPSKDDAFKTHPMNFLNERTLKGTFFGNYKPKTDIPGVEEKYMNKELELEKFITHTVPFSEINKAFDYMLKGESIRCIITMGA

SEQ ID NO: 1020 - protein, 143 aa, Zea mays
MTESLVRNKPGMASIKEMPVVQDGPPPGGFAPVRFARRIPTSGPSATAIFLTTFGAFAYGMYQVGQGNKVRRALKEEKIAARSAILPMLQAEEDERFVKEWKKCLEEEARIMKDVPGWKVGESVYNSGKWMPPATGELRPEVW

SEQ ID NO: 1021 - protein, 150 aa, Zea mays
GEREEMAASDVEYRCFVGGLAWATDDHSLNNAFSTYGEVLESKIILDRETQRSRGFGFVTFSTEDAMRSAIEGMNGKELDGRNITVNEAQSRGGRGGGGGGYGGGRRDGGGYGGGGGGYGGGRGGYGGGGGYGGANRGGGYGNNDGNWRN

SEQ ID NO: 1022 - protein, 751 aa, Geobacillus stearothermophilus
MENQNRQNAAQCPFHGSVTNQSSNRTTNKDWWPNQLNLSILHQHDRKTNPHDEEFNYAEEFQKLDYWALKEDLRKLMTESQDWWPADYGHYGPLFIRMAWHSAGTYRTGDGRGGASTGTQRFAPLNSWPNNANLDKARRLLWPIKKKYGNKISWADLFILAGNVAIESMGGKTIGFGGGRVDVWHPEEDVYWGSEKEWLASERYSGDRELENPLAAVQMGLTYVNPEGPDGKPDPKAAARDIRETFRRMGMNDEETVALIAGGHTFGKAHGAGPATHVGPEPEAAPIEAQGLGWISSYGKGKGSDTITSGIEGAWTPTPTQWDTSYFDMLFGYDWWLTKSPAGAWQWMAVDPDEKDLAPDAEDPSKKVPTMMMTTDLALRFDPEYEKIARRFHQNPEEFAEAFARAWFKLTHRDMGPKTRYLGPEVPKEDFIWQDPIPEVDYELTEAEIEEIKAKILNSGLTVSELVKTAWASASTFRNSDKRGGANGARIRLAPQKDWEVNEPERLAKVLSVYEDIQRELPKKVSIADLIVLGGSAAVEKAARDAGFDVKVPFFPGRGDATQEQTDVESFAVLEPFADGFRNYQKQEYSVPPEELLVDKAQLLGLTAPEMTVLVGGLRVLGANYRDLPHGVFTDRIGVLTNDFFVNLLDMNYEWVPTDSGIYEIRDRKTGEVRWTATRVDLIFGSNSILRSYAEFYAQDDNQEKFVRDFINAWVKVMNADRFDLVKKARESVTALQNSFVCRSVGTIDLQ

SEQ ID NO: 1023 - protein, 538 aa, Candida maltosa
MPVSFVHNVLEVVTPYVEYYQENLTKWYILIPTILLTLNFLSILHTKYLEYKFNAKPLTNFAQDYSFGVITPLMLMYFKWHGTVMEFACNVWNNKFLVLNGNVRTVGLRIMGLNIIETTDPENVKAILATQFNDFSLGTRHDFLYSLLGDGIFTLDGAGWKHSRAMLRPQFAREQVAHVKLLEPHVQVLFKHVRKSQGKTFDIQELFFRLTVDSSTEFLFGGSVESLRDASIGMTPSTKNIAGREEFADAFNYSQTYNAYRFLLQQFYWILNGSKFNKSIKTVHKFADFYVQKALSLTEADLEKQEGYVFLYELAKQTRDPKVLRDQLLNILVAGRDTTAGLLSFLFFELSRNPTVFEKLKEEIHNRFGAKEDARVEEITFESLKLCEYLKACVNEALRVYPSVPHNFRVATRNTTLPRGGGKDGMSPIAIKKGQNVMYTILATHRDPNIYGEDANVFRPERWFEPETRKLGWAYVPFNGGPRICLGQQFALTEASYVTVRLLQEFHTLTQDADTRYPPRLQNSLTLSLCDGANIQMY

SEQ ID NO: 1024 - protein, 370 aa, Deinococcus radiodurans
MTSPSSTATSSPTTTTAPTPARMRALSKQQPGEGIWMIETEVPTPGPNDLLIRIRKGSICGTDVHIYKWDDWASQTVPVPMVVGHEYVGVVAGMGSEVRGFEIGDRVSGEGHVTCGHCRNCRAGRRHLCRNTQGVGVNRPGSFAEYLVLPAFNAFKLPDDIPDDVAAIFDPFGNAVHTALSFDLVGEDVLITGAGPIGCMAAAVARHVGARNVVITDVNDYRLDLARQMGVTRAVNVAREDLWTVATQELDMHEGFDVGMEMSGSGPAFAQMVSVMNNGGKVALLGIPSGEVQIDWNAVIFKMLTIKGIYGREMFETWYKMAALIQSGLDLTPVITHHYGIGDFQQGFDAMLSGQSGKVILDWETEEQSA

SEQ ID NO: 1025 - protein, 390 aa, Magnetospirillum magnetotacticum
MFPDNLLAVFDRTDVIFEHGEGAWLTAADGRRFLDFGAGVAVNALGHAHPRLVAALGEQAGKLWHCSNLYRVPGQERVAQRLVDASFADTAFFCNTGAEAMELVIKIARRYHHCAGHPERNRIIACTGSFHGRTIATLAAAGTAKYLEGFGPVAQGFDHVPYGDLEAVQGAIGSNTAAILVEPVQGEGGIRPGDPAYLRGLRALADEFGLLLLMDEVQTGIGRTGKLFAHEWSGIAPDVMGLAKGLGGGFPVGAVLATEKAAACMTPGTHGCTFGGNPLAMAVAEAVLDEIMAPGFLDRVQAVAAMLRGKLDDLARRYPQAIAEVRGQGLMLGLKTVPLNTEFNAKLFAAGLLAVGAGDNVVRLVPPLIIGEAEVVRAVEIIEGVCASFS

SEQ ID NO: 1026 - protein, 376 aa, Microbulbifer degradans 2-40
MTDTFIKSRAAVAWAAGEPLSIEEVDVMMPKAGEVLVKIVATGVCHTDAFTLSGEDPEGIFPAILGHEGGGIVEALGEGVTSVAVGDHVIPLYTPECGECKFCLSGKTNLCQKIRATQGKGLMPDGTTRFYKDGQPIYHYMGTSTFSEYTVLPEISLAKVNQKAPLEEVCLLGCGVTTGMGAVMNTAKVKEGDTVAIFGLGGIGLSAVIGATMAKASRIIAIDINESKFELAKKLGATDCINPKLYDKPIQDVIVELTDGGVDFSFECIGNVNVMRSALECCHKGWGESIIIGVAGAGQEISTRPFQLVTGRVWRGTAFGGVKGRSELPGIVEQYLAGDFKLDDFITHTMGLEDINTAFDLMHHGKSIRSVIHFNK

SEQ ID NO: 1027 - protein, 504 aa, Agrobacterium tumefaciens str. C58 (U. Washington)
MDSSSSGVSYKKADASYFEKRGLSRYAGVWSLWALGVGAVISGHFSGWNFGFSTGGWGGMLVAGIIIAIMYLGLTFSIAEMSPALPHTGAAYSFARTAMGPWGGFVTGLCENVEYVLTPAVVVTFITAYVNSILGLDPAYSPFVWIVFYAIFLALNVFGLELSFKVTLVITLISLAVLVFFWISAIPNIDFSRFALNIGVGPDGKAVELPEGGGSFFPFGFSGVLATLPFAVWLFLAIEQLPLAAEESVDPKRDMPKGIILGMVTLMVSAFMIVLLNPSLPGVGAFHLSSSLEPLLDGFKAIYGDGGVVLLGLVALTGLIASFHTILYAQGRQIYSLSRAGYFPTVLSITHSKYRTPYVANITGAIVGLAVMLVIWFSLGAEQGGSIIGSVLLNMAVFGAMFSYIMQAISFILLRKNLPNIERPFRSPFGIPGALLTIIIAIVTLLYQIQDPNFTKGVLWVAVWFAVAIAYFAFVGRHRLILSPEEEFALEHKQAAVAAAAAKA

SEQ ID NO: 1028 - protein, 721 aa, Thermotoga maritima
MERIDEILSQLTTEEKVKLVVGVGLPGLFGNPHSRVAGAAGETHPVPRLGIPAFVLADGPAGLRINPTRENDENTYYTTAFPVEIMLASTWNRDLLEEVGKAMGEEVREYGVDVLLAPAMNIHRNPLCGRNFEYYSEDPVLSGEMASAFVKGVQSQGVGACIKHFVANNQETNRMVVDTIVSERALREIYLKGFEIAVKKARPWTVMSAYNKLNGKYCSQNEWLLKKVLREEWGFDGFVMSDWYAGDNPVEQLKAGNDMIMPGKAYQVNTERRDEIEEIMEALKEGKLSEEVLDECVRNILKVLVNAPSFKGYRYSNKPDLESHAEVAYEAGAEGVVLLENNGVLPFDENTHVAVFGTGQIETIKGGTGSGDTHPRYTISILEGIKERNMKFDEELASTYEEYIKKMRETEEYKPRTDSWGTVIKPKLPENFLSEKEIKKAAKKNDVAVVVISRISGEGYDRKPVKGDFYLSDDELELIKTVSKEFHDQGKKVVVLLNIGSPIEVASWRDLVDGILLVWQAGQEMGRIVADVLVGKINPSGKLPTTFPKDYSDVPSWTFPGEPKDNPQRVVYEEDIYVGYRYYDTFGVEPAYEFGYGLSYTKFEYKDLKIAIDGETLRVSYTITNTGDRAGKEVSQVYIKAPKGKIDKPFQELKAFHKTKLLNPGESEEISLEIPLRDLASFDGKEWVVESGEYEVRVGASSRDIRLRDIFLVEGEKRFKP

SEQ ID NO: 1029 - protein, 377 aa, Phanerochaete sordida
MAFTTLFAFVALAAMTRAAPTAVCSDGTRVSNAACCAFVPLAQDLQQTLFMGDCGEDAHEVVRLTFHDAIAISQSQGPKAGGGADGSMLLFPTIEPNFGANNGIDDSVNNLIPFMQKHNTISAGDLVQFAGAVALANCPGAPRLEFLAGRPNKTIAAVDGLIPEPQDSVTKILQRFEDAGNFSPFEVVSLLASHSIARADKVDETIDAAPFDSTPFTFDTQVFLEVLLKGTGFPGQTNVTGEVASPIPVGSGEDTGEMRLQSDFALARDSRTACFWQGFVNEQAFMAASFRAAMAKLAVLGHNRNSLIDCSDVVPQPKPAVNKPATFPATKGPKDLELTCNARFPTLTTDPGAQETLIPHCSDGGMDCPAVQFDGPA

SEQ ID NO: 1030 - protein, 294 aa, Zea mays
MAAVSAAPRPSMPPRLALRAHLFSSASPLPMRALPLLRSRFRSLTTAYAVKQDTALWTPAPVSAISAATDDGSVSLIAVDLSDATDLVDSYTNPGQYLLIRVPGEELKPAYMVISSPPKAGPRFEFLVKSVPGATAGRLCALRDGDVVELGAVTGKGFPLDRINPPDVAQTVLIFAAGTGISAIRSLIEFGFAAKERADVRLYYGDTSLKSMSYQERLSNWESTGIKIIPVLSQPDDSWKGERGYVQDAFFRNKNIVNPSSTGAILCGPNEMQEELTLSLVADGVSRDKILTNY

SEQ ID NO: 1031 - protein, 57 aa, Zea mays
  unsure (1)..(57): unsure at all Xaa locations
RRGHDALPTSPPFPLLLRVVDLVSDSSIPVIANGXIVDGRGYVATLALGAQSVCLGT

SEQ ID NO: 1032 - protein, 110 aa, Zea mays
WRGILGFHYGIVQAPLGPDISGPELVAAVANAGAIGLLRLPDWPAPDHVRELIRKTRSLTSKPFGAAIVLAFPHEENLRVVLEEKLAVLQVYWGDFPNHRVQEAHRAGVK

SEQ ID NO: 1033 - protein, 220 aa, Zea mays
MAAAAFDAYTDKNAIFRRLKAKPENKMCFDCNAKNPTWASVTYGIFLCLDCSAVHRSLGVHITFVRSTNLDSWTPDQLKMMAFGGNNRAHAFFKQHGWTDGGKVEAKYTSRAAELYRQMLNKEVAKSAITDNALPSSPVTASEASKPSDDFPEFKLSDAPAPPAENLNGKHEPKSPKAAPRSPKAATHPTFATSREKPIGAKKVGGKTGGLGVRNSHKAK

SEQ ID NO: 1034 - protein, 457 aa, Lactobacillus gasseri
MSKNNSETSEIKTMKRSLTNTHIQLIALGGTIGTGLFLGVGNSIELAGPAVIFIYCLVGFFLFLLMRALGELILSDIKKNTYIDFITEYLGKSIGTTTGYLYWFSWLTLAMAEITALGIYFQYWWPNLQSWIPGLITLLVLLSINLISARVFGNLEFSFAIIKIVTIIAFVILVFYLLITNSATKYGHVSWQNMVIDGGIFAKGPKGFLLGFQMVIFSFIGVELIGLTAAEAKEPKKTITRAIDQLPIRIILFYVLAILSILLAIPWDKVSTSSSPFVQALGATGIKNAGSIINFVVISAAISSTNSFIYSAGRLLFSINYKGKTKLSKHLGKLDRRQLPKNALIFSTILIALAPLLNFFLKDTFTFISATATSMFLVIWSIMIITHMTYRKKTPENELPTFKMPLYPLSDVAVLTFFLAMIIILLIFPNYRIPMISAGIIFVVLVCITHFIQKKMN

SEQ ID NO: 1035 - protein, 1275 aa, Streptococcus pyogenes MGAS8232
MKKISKCAFVAISALVLIQATQTVKSQEPLVQSQLVTTVALTQDNRLLVEEIGPYASQSAGKEYYKHIEKIIVDNDVYEKSLEGERTFDINYQGIKINANLIKDGKHELTIVNKKDGDILITFIKKGDKVTFISAQKLGTTDHQDSLKKDVLSDKPVPQNQGTQKVVKSGKNTANLSLITKLSQEDGAILFPEIDRYSDNKQIKALTQQITKVTVNGTVYKDLISDSVKDTNGWVSNMTGLHLGTKAFKDGENTIVISSKGFEDITITVTKKDGQIHFVSAKQKQHVTAEDRQSTKLDVTTLEKAIKEADAIIAKESNKDAVKDLAEKLQVIKDSYKEIKDSKLLADTHRLLKDTIESYQAGEVSINNLTEGTYTLNFKANKENSEESSMLQGAFDKRAKLVVKADGTMEISMLNTALGQFLIDFSIESKGTYPAAVRKQVGQKDINGSYIRSEFTMPIDDLDKLHKGAVLVSAMGGQESDLNHYDKYTKLDMTFSKTVTKGWSGYQVETDDKEKGVGTERLEKVLVKLGKDLDGDGKLSKTELEQIRGELRLDHYELTDISLLKHAKNITELHLDGNQITEIPKELFSQMKQLRFLNLRSNHLTYLDKDTFKSNAQLRELYLSSNFIHSLEGGLFQSLHHLEQLDLSKNRIGRLCDNPFEGLSRLTSLGFAENSLEEIPEKALEPLTSLNFIDLSQNNLALLPKTIEKLRALSTIVASRNHITRIDNISFKNLPKLSVLDLSTNEISNLPNGIFKQNNQLTKLDFFNNLLTQVEESVFPDVETLNLDVKFNQIKSVSPKVRALIGQHKLTPQKHIAKLEASLDGEKIKYHQAFSLLDLYYWEQKTNSAIDKELVSIEEYQQLLQEKGSDTVSLLNDMQVDWSIVIQLQKKASNGQYVTVDEKLLSNDPKDDLTGEFSLKDPGTYRIRKALITKKFATQKEHIYLTSNDILVAKGPHSHQKDLVENGLRALNQKQLRDGIYYLNASMLKTDLASESMSNKAINHRVTLVVKKGVPYLEVEFRGIKVGKMLGYLGELSYFVDGYQRDLAGKPVGRTKKAEVVSYFTDVTGLPLADRYGKNYPKVLRMKLIEQAKKDGLVPLQVFVPIMDAISKGSGLQTVFMRLDWASLTTEKAKVVKETNNPQENSHLTSTDQLKGPQNRQQEKTPTSPPSAATGIANLTDLLAKKATGQSTQETSKTDDTDKAEKLKQLVRDHQTSIEGKTAKDTKTKKSDKKHRSNQQSNGEESSSRYHLIAGLSSFMIVALGFIIGRKTLFK

SEQ ID NO: 1036 - protein, 305 aa, Zea mays
  unsure (1)..(305): unsure at all Xaa locations
MMRETYMDVLPPVDHIAASRSGGWFPGAARLWTAAENKQFERALAGLDLCRPDWEKVARAIPGRTVREVVSHFKSLQVDVQQIESGLVPMPVXYGAGAGSFTLQWDGCYGPADSRHNGYRFGSGGCGRRHHGRTPEQDRKKGVPWTEEEHRLFLLGLKKYGKGDWRNISRNYVQTRTPTQVASHAQKYFIRLNSGGKDKRRSSIHDITTVNLTDDERAPSPSRSSLITTTSQPNAPAPAAAVIGGPFSSAAAARGQAAXHGAGNLPPNRTSVVPAVYRMDDSQDHGLQCGPLRHQLVASHHSVLF

SEQ ID NO: 1037 - protein, 141 aa, Glycine max
  unsure (1)..(141): unsure at all Xaa locations
MESPKKIAHEIGGVKRDALRFGLNGVKSDIVGSHPLESSYESEKRSHEAMKRTIIGHTYGTALPLKMDMDRQILSRFQRPAGPIPSSMLGLEVYTGAIDDFXFEDYLNDPRDSETVRPVDFHHGMEVRLGMSKGPVAPSFI

SEQ ID NO: 1038 - protein, 380 aa, Zea mays
MEAAAAVLPTLVPSGSAVVSRRSSLATVVVLLAYLGYLAAAGAILPGKLVDGALLPDSSRLHYRCNGLLSLLLLLGLSAFGVYMGWMSPTVVADMGLELLSVTFIFSVIVSFALYIAGIKSGHKSSSLRPHVSGSLMQDWWFGVQLNPHFMEVDLKFFFVRAGMMAWLFINLSLFAKSYLAGSANLSVILYQFFCAWYIIDYFVHEEFMTSTWDIIAERLGFMLVFGDLVFIPFTFTIQGWWLLKNKVELSLLSGLANLCIFLIGYLVFRGANKQKHMFKKDPKAPIWGKPPKVVGGKLLASGYWGIARHCNYLGDLLLALSFSLPCGVSSVVPYFYPTYLLILLVLRERRDEARCSQKYREIWAEYCKLVPWRILPYLY

SEQ ID NO: 1039 - protein, 450 aa, Bacillus anthracis str. Ames
MMKTKQTDELLAKDEQYVWHGMRPFSPNSTMVGAKAEGCWVEDIQGKRYLDGMSGLWCVNSGYGRKELAEAAYKQLQTLSYFPMSQSHEPAIKLAEKLNEWLGGEYVIFFSNSGSEANETAFKIARQYYAQKGEPHRYKFMSRYRGYHGNTMATMAATGQAQRRYQYEPFASGFLHVTPPDCYRMPGIERENIYDVECVKEVDRVMTWELSETIAAFIMEPIITGGGILMPPQDYMKAVHETCQKHGALLISDEVICGFGRTGKAFGFMNYDVKPDIITMAKGITSAYLPLSATAVKREIYEAFKGKGEYEFFRHINTFGGNPAACALALKNLEIIENENLIERSAQMGSLLLEQLKEEIGEHPLVGDIRGKGLLVGIELVNDKETKEPIDNDKIASVVNACKEKGLIIGRNGMTTAGYNNILTLAPPLVISSEEIAFVIGTLKTAMERI

SEQ ID NO: 1040 - protein, 324 aa, Halobacterium sp. NRC-1
MGLDAVPLGRTGLRVTELAFGTWRFGRETDAGDIEVGEQRAHELLDAYANAGGRFIDTADMYGGGRAERYIGDWLADRDRDRYVIASKVYWPTSTAPNGRGLNRKHLRASVDNILDRLGTDYIDILYIHRWDDATPADALMRTLDGFVREGTVHYLGASTFHPNAWKIAKANEIAARRGSEPFTVAQPRFNAVNREIVGNYLEMCREYGLGVVPWSPLAGGFLTGKYERDAEPPAGSRGATDQQFVDSYLTPSNFDTLDAVEAVADAVDATPAQVSLAWLRHHDQVAAPITGARTPAQLRENMAATNIELTATQRDRITDAARR

SEQ ID NO: 1041 - protein, 155 aa, Glycine max
  unsure (1)..(155): unsure at all Xaa locations
APPPNFSPAAALLILLSAAASAPAGRRIPPASSMXWVRNIRRFVDTGAGLGSEAIMELETKRILLEIFKERQRKSAEAGSIPSFYKKPEEGSISSRVQRLAKYRFLXXQSELLLNADDLDAMWVCLRENXVIDDAXGAEKMNYEXFXHIGTVXTE

SEQ ID NO: 1042 - protein, 340 aa, Zea mays
MPRDSRPAGMRLFGVTIAPAPEADPPVRDPSPNPPVAAREDVMRKCKSMGNLAALGAVVDGGGGGADGGGAGDGYLSDGGLMQSSGKRRRAQERKKAVPWTEEEHRTFLAGLEKLGKGDWRGIAKNFVTTRTPTQVASHAQKYFLRQTNPNKKKRRSSLFDMMPRELSPAPNCPILPPSMAKVHDVVAMTKQLQNSNLEGTSSSNAASQVGRDLPPVPSFKATNMDPSFSKFSHMERVWRTPYPFGPVPRAPEGTPSPTPAAAAAAAANAAVPVSQANLTTACTSNTFLSQPKPSDTPSLPPKGGPPSEEDGLELTVAPPSQQNMTNMSSQNAVGVIQVI

SEQ ID NO: 1043 - protein, 280 aa, Petunia x hybrida
MGRAPCCEKMGLKKGPWTPEEDQILVSYIEKNGHGNWRALPKLAGLLRCGKSCRLRWTNYLRPDIKRGNFTREEEDTIIQLHEMLGNRWSAIAARLPGRTDNEIKNVWHTHLKKRLKNYQPPQNSKRHSKNNHDSKAPSTSKMLDNSESFSTIQENINEPMTGPNSPQRSSSESSTVTADSLAATDVTNDDQTFIKHEEMDSYENFPEIDESFWTEDLSMGDNLDLDMEVAGEKSQVQFPYSHDMKEQSVDMVGAKLEDDMDFWYNVFIKAEDLLDLPEF

SEQ ID NO: 1044 - protein, 210 aa, Catharanthus roseus
MYQSNAHNSDHLTFLPPLVDYQFLNNDFDFSEIFTDFNYANYNYNTSTSDNFSGFQFNENCEEIISPNYASEDLSDIILTDIFKDQDNYEDEVVAGEQEEELITTPTSRGGGGGGCEQRSNEEWIRYRGVRRRPWGKFAAEIRDPKRKGSRIWLGTYETAEDAALAFDQAAFQLRGSRARLNFPNLIGSANAPVRVSPRRRSSSCHLRPQ

SEQ ID NO: 1045 - protein, 355 aa, Craterostigma plantagineum
MEKYELVKDIGSGNFGVARLMRNKETKELVAMKYIERGHKIDENVAREIINHRSLRHPNIIRFKEVVLTPTHLAIVMEYAAGGELFERICNAGRFSEDEARYFFQQLICGVHYCHALQICHRDLKLENTLLDGSPAPRLKSCDFGYSKSSLLHSRPKSTVGTPAYIAPEVLSRREYDGKLADVWSCGVTLYVMLVGAYPFEDQEDPFFFRKTILWIMAVQYKIPDYVRISQSCRHLLSRIFVANPLRRITIKEIKSHLWFLKNLPRELTEVAQAAYFRRDNPTYSLQSEEEIMKIVEEAKVPPQASRSIGGFGWGTEEDEENVEEEEEGESEGEEDEYEKQVKAAHASGEVPPLT

SEQ ID NO: 1046 - protein, 120 aa, Aspergillus japonicus
NSSSVPLHGFHVHALGDTTNGCMSTGPHFNPTGKEHGAPQDENRHAGDLGNITAGADGVANVNVSDSQIPLTGAHSIIGRAVVVHADPDDLGKGGHELSKTTGNSNSSMDSCAHGIQGIL

SEQ ID NO: 1047 - protein, 227 aa, Triticum aestivum
MSRLAAAALRGALTASGARSCSISVAFSPASSRLFSTDASGAVAGSQVDSSSGEGHTYGRFYTNISGVGRLGKNMLKTDIIHYLDQCELSLDDVKIDYNKGFYPMGALLKFPSVESFETAVRQTIQGRMYRLERVSPDEWEHKISLNGKAVLLQGVPRNAQVDDIERFLCGTNYEPPPFENFIRAGVPEPVRMVLVKFGSRTDATNAFIAKNKGFCLNNPVTVRVIQ

SEQ ID NO: 1048 - protein, 297 aa, Zea mays
  unsure (1)..(297): unsure at all Xaa locations
MGTLVGHVAPGAGFLLIGLWQLFSHTRLFLLRPSSYSAPVWFPVPGVRHLELILIIIGTVLSILMELVIGPAKHQPFDDDGTIPSDHLHNFEHASISLALLVFAAVTIHLDRARAPMRDAVSQLVAAAAFAQQLLIFHLHSADHMGVEGQFHWLLQTAIAVTLATTLLGIPYPRSFAVSLVRSASLVFQGVWFVVMGVMLWTPALIPKGCFLNFEEXGHDVVRCRTDDALDRAKSLVNLXFSWYLTGTVVFVVLFYLQMAKLYPEEPQYLPLVKGGIGDDDHDDEDDVEAAKRGGFG

SEQ ID NO: 1049 - protein, 398 aa, Escherichia coli K12
MKQLTILGSTGSIGCSTLDVVRHNPEHFRVVALVAGKNVTRMVEQCLEFSPRYAVMDDEASAKLLKTMLQQQGSRTEVLSGQQAACDMAALEDVDQVMAAIVGAAGLLPTLAAIRAGKTILLANKESLVTCGRLFMDAVKQSKAQLLPVDSEHNAIFQSLPQPIQHNLGYADLEQNGVVSILLTGSGGPFRETPLRDLATMTPDQACRHPNWSMGRKISVDSATMMNKGLEYIEARWLFNASASQMEVLIHPQSVIHSMVRYQDGSVLAQLGEPDMRTPIAHTMAWPNRVNSGVKPLDFCKLSALTFAAPDYDRYPCLKLAMEAFEQGQAATTALNAANEITVAAFLAQQIRFTDIAALNLSVLEKMDMREPQCVDDVLSVDANAREVARKEVMRLAS

SEQ ID NO: 1050 - protein, 291 aa, Mycoplasma pulmonis
MNSKKNNNENDNLNEIKINWFPGHMAKGMREIEEKAVVADLFVILLDVRAPLSCYNKSFDKIAPNKPRLFVFSKIDLGDKDKYNKIKEHFGSNKNVVFVDLKKPQSRQIILKKIDYLLKEKVLQEQKKGLNKPRLRVFVLGVPNTGKSTFINLLLKEKKVKVGNMPGITRGQQWIKVDNILLLDTPGILWPNLDDQDVAIKLSIIGSIRSEIIPSDFLFKNTYKIISKNYPEILTNMNLFSSNDENKIHENLLKIAEQKNMFIKNGEYDLERARKWFYNFIKNSKGLTYDF

SEQ ID NO: 1051 - protein, 371 aa, Zea mays
MAHRVLLLLSLASAAAVAAAVDAEDPLIRQVVPGGDDNDLELNAESHFLSFVQRFGKSYKDADEHAYRLSVFKANLRRARRHQLLDPSAEHGVTKFSDLTPAEFRRTYLGLRKSRRALLRELGESAHEAPVLPTDGLPDDFDWRDHGAVGPVKNQGSCGSCWSFSASGALEGAHYLATGKLEVLSEQQFVDCDHECDSSEPDSCDSGCNGGLMTTAFSYLQKAGGLESEKDYPYTGSDGKCKFDKSKIVASVQNFSVVSVDEAQISANLIKHGPLAIGINAAYMQTYIGGVSCPYICGRHLDHGVLLVGYGASGFAPIRLKDKPYWIIKNSWGENWGENGYYKICRGSNVRNKCGVDSMVSTVSAVHASKE

SEQ ID NO: 1052 - protein, 553 aa, Saccharomyces castellii
MFPRSDKDVDQLVGNLNQLGLNKPNARFVSVTPTRANKENRSSLSPSPSPNKTKRFTADETELKNSPKKLPHDFYKKALSNDTKRIVNVCQMYFLDYYCDMFDYVISRRQRTKSVLNYLERNQNSLSTEELNNEWTAYLQQEHDVLRKRRLKPKNKDFEMITQVGQGGYGQVYLARKRDTKEVCALKILNKKLLFKLNETNHVLTERDILTTTRSDWLVKLLYAFQDTESLYLAMEFVPGGDFRTLLINTRFLRNTHARFYISEMFCAVNALHELGYTHRDLKPENFLIDSEGHIKLTDFGLAAGTISTERIQSMKIRLEEVKNLEFPAFTEKSIEDRRKMYTHLRQTEVNYANSMVGSPDYMALEVLEGKKYDFTVDYWSLGCMLFESLVGYTPFSGSSTNETYENLRHWKKTLRRPVLDNGRPAFSDRTWDIITRLIADPINRLRSFEHIKRMPYFAEVNFNTLRQSAPPFTPQLDSETDAGYFDDFTNEADMAKYADVFKRQNKLSSMVDDSAVDSKLVGFTFRHRNGQKGLSGILYNGSEHSDPFATFY

SEQ ID NO: 1053 - protein, 504 aa, Saccharomyces cerevisiae
MAPIEYLLFEEPTGYAVFKVKLQQDDIGSRLKEVQEQINDFGAFTKLIELVSFAPFKGAAEALENANDISEGLVSESLKAILDLNLPKASSKKKNITLAISDKNLGPSIKEEFPYVDCISNELAQDLIRGVRLHGEKLFKGLQSGDLERAQLGLGHAYSRAKVKFSVQKNDNHIIQAIALLDQLDKDINTFAMRVKEWYGWHFPELAKLVPDNYTFAKLVLFIKDKASLNDDSLHDLAALLNEDSGIAQRVIDNARISMGQDISETDMENVCVFAQRVASLADYRRQLYDYLCEKMHTVAPNLSELIGEVIGARLISHAGSLTNLSKQAASTVQILGAEKALFRALKTKGNTPKYGLIYHSGFISKASAKNKGRISRYLANKCSMASRIDNYSEEPSNVFGSVLKKQVEQRLEFYNTGKPTLKNELAIQEAMELYNKDKPAAEVEETKEKESSKKRKLEDDDEEKKEKKEKKSKKEKKEKKEKKDKKEKKDKKEKKDKKKKSKD

SEQ ID NO: 1054 - protein, 374 aa, Celastrus orbiculatus
ALSIAGAVQSQKLAVRAISRLQSLPGGDIKLLCDTVVESVRDLTSYDRVMVYKFHEDEHGEVVAESKRPDLEPYFGLHYPSTDIPQASRFLFKQNRVRMIADCRASPVGVIQDDGLMQPLCLVGSTLRAPHGCHAQYMENMGSRSSLAMAVIIHGNDEEVIGGRNATRLWGLVVCHHTSVRCIPFLLRYACEFLMQAFGLQLNMELQLAAQLSEKHVLKTQTLLCDMFLRDSPTGIVTQSLSIMDLVKCDGAALYYQGKYYPIGVTPAEAQIKDIVEWLLTFHGDSTGLSTDSLADAGYPGAALLGDAVCGMAVAYITKRDFLFWFRSHTTKEIKWGGAKHHPEDKDDGQRMHPRSSFKAFLEVVKSRSLPWEN

SEQ ID NO: 1055 - protein, 468 aa, Streptomyces coelicolor A3(2)
MARFRMGEGVLRRKPIEHIEETESGGGLVRSLGLWQLTAIGVGGIIGAGIFTLAGTVANGTAGPAVLISFLIAGVASAAAALSYAEFAGLIPKAGSAYTYGYAVLGELVGWFIGWDLLLEYTAIVAVVAIGISGYFSFLVGEMGADLPNWMLGAPGTGDGHKVDLFAAALCLLIAYLLTLGIRNAARFEMVVVVLKVLVVLLVIGVGVFHINSSNYHPFFPFGVGGAFTGAATVFFAVFGYDAMSTAAEESKDAQRHMPKAIIYSLIISMVLYVAACLVLTGMQNYKDIDPESGFSTAFKSVGLSSLADIIAVGAIIGILTVMFTFMLGVTRVWFSMSRDGLLPKWFAKTHPTRHVPTRVTWIVGVASAVIAGFLPIGEAAELTNIGILLAFVVVCAAVIVLRYRQPDLPRTFRTPWMPFVPALGIVFSIWLITFLQWQTWVRFAVWFVIGLVIYFAYSYRKSELARR

SEQ ID NO: 1056 - protein, 181 aa, Clostridium acetobutylicum
MSIYDFKVKDINGEDISMEEYRGKALLIVNTASKCGFTPQYEDLEALYKKFKGENFEVLGFPCNQFENQEPGTNNDIKKFCQINYGVTFKIFDKVDVNGENEAPLYRYLKEQAPFKELDESTPTAKIIAAFLREKLPETLIGDSIKWNFTKFLIDKNGRVVNRFESGVEPMEIESYIKALI

SEQ ID NO: 1057 - protein, 261 aa, Vicia faba
AHIITAVIGSGVLSLAWAIAQLGWIAGPSMMLLFSFVTYYTSTLLSACYRTGDQLNGKRNYTYTDAVRAYLGGFKVKICGLVQYVNLFGVAIGYTIAASISMMAIKRSNCFHSSGGKDPCHMNGNLYMISFGIVEIFFSQIPDFDQLWWLSTLAAVMSFTYSTIGLGLGVGKVIENKGIKGSLTGITVGTVTQTQKVGRSFQALGNIAFAYSYSMILIEIQDTIKSPPSESKTMKAATLISVVVTTIFYMLCGCLGYAAFG

SEQ ID NO: 1058 - protein, 329 aa, Thermoanaerobacter tengcongensis
MAILVCGGAGYIGSHAVYALLKRNEEVVVVDNLATGHSESVLGGKLYIGDLRDEDFLDKVFSENDIEAVMHFAASSLVGESVENPFKYYENNVCGTLSLLKAMKKHGVKKIVFSSTAAVYGEPERIPIEEEDRTEPTNPYGETKLAIEKMLKWADAAYGIKYVALRYFNVAGALETGEIGEDHSPETHLIPIILQVALGKRDKVMIYGDDYPTKDGTPIRDYIHVMDLVDAHILALEKLRKENKSEVYNLGNGEGFTVKEVIEVARKVTGHPIPAEVTGRRPGDPAVLVASSEKAMKDLGWRPKYASLEEIIKSAWMWHKNHPNGFKRD

SEQ ID NO: 1059 - protein, 244 aa, Fusobacterium nucleatum subsp. nucleatum ATCC 25586
MLKIKRRGKMSDIINKILFSPFFGIVLSLIAYEIGKYFFSKTKSIFCNPLLIGIILTIVFLMVLNIPFEAYDKGGSIIKIFISPVESVIIGVALYEQFQILKRNWFPILVSTVLGSTFSIIILYILGKVFGLPDDIFHATLPKSVTTAIALDIASKFGWQESLIPMMTVSTGIIGAVIAPLVTKFMKSPVAKGLAMGTASHAVGTAKAIEMGEVEGAMSGLALSLSAISTSFMIPLLLNTILKL

SEQ ID NO: 1060 - protein, 164 aa, Triticum aestivum
QLFFSLFYAGDGEVYVWDVNSRKCLNRFVDEGSLYGLSIATSRNGQYVACGSNCGVVNIYNQDSCLQETNPKPIKAIMNLVTGVTSLTFNPTTEILAIASEKMKDAVRLVHLPSWTVFSNFPVIKNKNIFHVHTMDFFPRSGYFALGNEKGKALMYRLHHYSDF

SEQ ID NO: 1061 - protein, 163 aa, Saccharomyces cerevisiae
MSEFYKLAPVDKKGQPFPFDQLKGKVVLIVNVASKCGFTPQYKELEALYKRYKDEGFTIIGFPCNQFGHQEPGSDEEIAQFCQLNYGVTFPIMKKIDVNGGNEDPVYKFLKSQKSGMLGLRGIKWNFEKFLVDKKGKVYERYSSLTKPSSLSETIEELLKEVE

SEQ ID NO: 1062 - protein, 512 aa, Glycine max
MSACVPNLKGTSSLKDDEASLQRELRNAECMASLASSGGFHKRDGLYNPQHPSMCLGEGQSHGSQGSSNNVLNSQYLKAAQELLDEIVNVRKALKQTGLEKQQSFRDTGLDGSKDSDGKSTSQSVQMSSGPNGSAANASCELSPAERQNLLDKKTKLLSMLDEVDKRYRQYCHQMQIVVSSFDMVAGCGAAEPYTTLALRTISRHFRCLRDAISGQIQVTQRSLGEQEGIPRLRYVDQQLRQQKALQQLGVMRQAWRPQRGLPETSVSVLRAWLFEHFLHPYPKDSEKIMLARQTGLTRNQVANWFINARVRLWKPMVEEMYKEEFGDSEMSSNLLSSEKTLKAPRDDVQASDNKREESQDNLINVDDSVQHHGLKLDHASELDRGIQSSDHGENAMDPRIGKLQGDQRFNMNNSNNNSPYYGDGCIMASTPATYDLPELGNIAVDGHVSLALELRNCESQGFGVSNDDMHKRHKKTLASSPETDLLDYHFTDPGKQQNKFGNPHLLHEFVV

SEQ ID NO: 1063 - protein, 214 aa, Euphorbia esula
VKLLGTWASPFSRRVELALKLKGVPYEYIEEDLYNKSDLLLKSNPIHKKIPVLIHNGNPISESMLILEYIDETWPINPLFPINPFDKAIARFWAQFVDAKILGIARKYRSAKLEEKKQIIEEVGDQLRVLENELKGNKYFGGERIGNVDITAFYILYMFLIREEIMQVGLISKQKFPVLLEWMENMQETDGVKQCMPPKDKYLDYLRVLIGNPT

SEQ ID NO: 1064 - protein, 249 aa, Corynebacterium efficiens YS-314
MNSLNGRICIVTGAAQGIGKGIAERLAAEGATVVVADLNGEAASATAAELGNDSIGVTVDISDRTAVDAMVAEAKDKYGRIDVLVNNAGWDKIGPFLEIEPEIWDRIININLYGTLHCSQSVARIMVEQEGGGTIINIGSDAARVGSSGEAVYSACKGGVVSFTKTLARELARYGVTANAICPGPADTPLFAQISEENPKLRTALEKAIPLRRLAQPEDLANAVAFFASPESSYITGQTLSVSGGLTMI

SEQ ID NO: 1065 - protein, 169 aa, Nicotiana tabacum
MASQSSKPQSIYDFTVKDAKGNDVDLSIYKGKVLIIVNVASQCGLTNSNYTDMTEIYKKYKDQGLEILAFPCNQFGGQEPGSIEEIQNMVCTRFKAEYPIFDKVDVNGDNAAPLYKFLKSSKGGFFGDSIKWNFSKFLVDKEGNVVDRYSPTTTPASMEKDIKKLLGVA

SEQ ID NO: 1066 - protein, 709 aa, Desulfitobacterium hafniense
MRKRMKLMVMLILLTLLSGGCADQQVQQQKIVQIACGNDFSLFLYDTGKVRAIGKNSSGQLGVGDTEDRYELTEVLLPEAVSEIGVSDDSAFALTQDGTLYTWGDNRCRQAENSAEPAVPTPIRYQIKEQEKVTQFALGWYASYGLTESDVLYGWGSKLGLVTLEDLNYEPIYQAVPLPQSRAFPIVDGKENKRYIPPKISKIDISNYTIMGIGDDGTFFGPVGENIFGAIPYTPGEIVKIAAGRLFCVLLTAEGSLYLWGDNFRGELASGDYQLRKVPLFRSFAEDPLRDVAVGPSHILALTRSGKVLAWGDNARNQLGLADRKEVLSPENIAFPEKITLIATGFHHSDALGESGKLYAFDANDYGQLMTGDQTSRDTPTVADLQSVVANPDPVIIPEFSQEVAIAATMEAFLTESGRVFTKGPGDMGTLGTATANSHEEPTYVPMSEAITQIEAGLFTFTVLTAKGEVYNWGLSQLNSLGHDHKENKWYLTPTQVPLPEKITKIRSDMYSTGALAESGNWYMWGDNTYGSLATGTKDYAAGPVKLETPVPFAELFPSRSYWLALTAEGEVYQWGTWQNKFAEEMYMPDVQTQDLKYQKIALPEKVIKAKSTAYDNFVLSATGNLYAWGFRFKQEPQIFLENVQDFVVSPRESDFLALTHDGKVYYWGYNLMEPYIPVEIHYPEIIRTVFPGGRDFLCGRGRGYVHGL

SEQ ID NO: 1067 - protein, 250 aa, Vigna unguiculata
MGKSYPTVSADYQKAIEKAKKKLRGFIAEKRCAPLMLRLAWHSAGTFDVSTKTGGPFGTIKHPAELAHGANNGLDIAVRLLEPIKAEFPILSYADFYQLAGVVAVEVTGGPEVPFHPGREDKPEPPPEGRLPDATKGSDHLRDVFGKAMGLSDQDIVALSGGHTIGAAHKERSGFEGPWTSNPLIFDNSYFKELLSGEKEGLLQLPSDKALLSDPVFRPLVEKYAADEDAFFADYAVAHQKLSELGFADA

SEQ ID NO: 1068 - protein, 362 aa, Cicer arietinum
MDRSFLLALLLFSVVATATKDDNNDDFLIRQVTDHEDDQLLNAEHHFTTFKSKFSKSYATKEEHDYRFGVFKSNLKKAKLHQKLDPSAEHGVTKFSDLTASEFRRQFLGLKKRLRLPAHAQKAPILPTNNLPEDFDWREKGAVTPVKDQGSCGSCWAFSTTGALEGANYLATGKLVSLSEQQLVDCDHVCDPDEYNSCDSGCNGGLMNNAFEYLLQSGGVVREQDYSYTGRDGSCKFDKSKIAASVSNFSVVSVDEDQIAANLVKNGPLAVAINAAWMQTYMSGVSCPYICAKSRLDHGVLLVGFGNGFAPIRLKEKPYWIIKNSWGQNWGEEGYYKICRGRNICGVDSMVSTVAAVHASNN

SEQ ID NO: 1069 - protein, 543 aa, Rubus idaeus
MAVQTPQHNIVYRSKLPDIHIPNHLPLHSYIFQNKSHLTSKPCIINGTTGDIHTYAKFKLTARKVASGLNKLGIEKGDVFMLLLPNTSEFVFAFLGASFCGAMMTAANPFFTPAEIAKQAKASKAKLIITFACYYDKVKDLSCDEVKLMCIDSPPPDSSCLHFSELTQSDENDVPDVDISPDDVVALPYSSGTTGLPKGVMLTHKGLVTSVSQQVDGENPNLYYSSDDVVLCVLPLFHIYSLNSVLLCGLRAGAAILLMQKFEIVSLLELMQKHRVSVAPIVPPTVLAIAKFPDLDKYDLGSIRVLKSGGAPLGKELEDTVRAKFPNVTLGQGYGMTEAGPVLTMSLAFAKEPFEVKPGGCGTVVRNAELKIVDPETGASLPRNHPGEICIRGHQIMKGYLNDPEATRTTIDKQGWLHTGDIGFIDDDEELFIVDRLKELIKYKGFQVAPAELEALLVTHPNISDAAVVPMKDDAAGEVPVAFVVSPKGSQITEDEIKQFISKQVVFYKRIKRVFFIEAIPKSPSGKILRKELRAKLAAGFAN

SEQ ID NO: 1070 - protein, 243 aa, Zea mays
MDWDAPALTSFVADLSFRHLCCYGAGIAGNAFAFVLFVSPLPTFKRIVRNGSTEQFSCTPYIYSLLNCLICMWYGLPFVSYGVVLVATVNSIGAVFQLAYTAVFIAFADAKQRLKVSALLAAVFLVFGLIVFVSLALLDHKARQVFVGYLSVASLVCMFASPMSIVNLVIRTKSVEYMPFYLSLSMFLMSASFVIYGVLLGDGFIYIPNGIGTILGIVQLLLYAYIRKGSSEEAKLPLLITHT

SEQ ID NO: 1071 - protein, 182 aa, Arabidopsis thaliana
MAQHQHSPQRPRDQDNTRPHDQYGIVFSVSGDDVARKQGDSFSQPDPTVATMGSVDTVTIGEALEATALSLGDKPVDRRDAAAIQAAETRATGESKGRPGGLAVAAQAAATTNEQTVSEEDKVNIADILTDAAERLPGDKVVTSEDAEAVVGAELRSSSEMKTTPGGVADSMSAGARLNQQL

SEQ ID NO: 1072 - protein, 126 aa, Pichia anomala
DPLAPKLNDIEDVERHLPGLLRATNEWFTVYKIPDGKPENQFAFSGEAKNKKYAEEVIRECAEAWEKLIKGETQPGDISLTSTVLKDVPSFDESAASKVPVGSQDLKDAPIDKSIDKWFFISGASA

SEQ ID NO: 1073 - protein, 341 aa, Salmonella enterica subsp. enterica serovar Typhi
MKALSKLKAEEGIWMTDVPEPEVGHNDLLIKIRKTAICGTDVHIYNWDEWSQKTIPVPMVVGHEYVGEVVGIGQEVKGFKIGDRVSGEGHITCGHCRNCRGGRTHLCRNTTGVGVNRPGCFAEYLVIPAFNAFKIPDNISDDLASIFDPFGNAVHTALSFDLVGEDVLVSGAGPIGVMAAAVAKHVGARHVVITDVNEYRLELARKMGVTRAVNVAKESLNDVMAELGMTEGFDVGLEMSGAPPAFRTMLDTMNHGGRIAMLGIPPSDMSIDWTKVIFKGLFIKGIYGREMFETWYKMAALIQSGLDLSPIITHRFSVDDFQKGFDAMCSGQSGKVILSWD

SEQ ID NO: 1074 - protein, 340 aa, Glycine max
  unsure (1)..(340): unsure at all Xaa locations
GDVHTRIMKRNYEQVPEWWFVSILLLMIVVSLITCEGFGKQLQLPWWGVLMSLVIALVFTLPIGVIQATTNTQVGLNVITELIIGYIYPGRPLANVAFKTYGYISMSQALGFLQDFKLGHYMKIPPKSMFVVQLVGTIVASGVYFGTAWWLLTSIPHICDETSLPAGSPWTCPGDEVFYNASITXGVVYPGMNWFFLIGLLAPVPVWMLSRKCSCYSWTACSQMPLIIAGSGSSRIASSLLVVVAXPPARSVNYITWGFVGIFFNFYVYSKFKAWWARHTYILSAALDAGVAFMGVILYFALQNYGVFGPIWWGQDADDHCPLAKCPTAPGVIAHGCPLL

SEQ ID NO: 1075 - protein, 205 aa, Oryza sativa (japonica cultivar-group)
MSEADGGEGAKPKRPAPRLNERILSSLSRRSVAAHPWHDLDTGADAPAVFNVVVEISKGSKVKYELDKKTGFIMVDRVLYSSVVYPHNYGFIPRTLCEDNDPMDVLVLMQEPVIPGCFLRARAIGLMPMIDQGEKDDKIIAVCVDDPEYRHYNDLSELSPHRVQEIRRFFEDYKKNENKEVAVNEVLPVTAARDAIQYSISAKLP

SEQ ID NO: 1076 - protein, 358 aa, Leptospira interrogans serovar lai str. 56601
MKNVAVLSGDGIGPEVMEIAISVLKKALGAKVSEFQFKEGFVGGIAIDKTGHPLPPETLKLCEESSAILFGSVGGPKWETLPPEKQPERGALLPLRKHFDLFANLRPAIIYPELKNASPVRSDIIGNGLDILILRELTGGIYFGQPKGREGSGQEEFAYDTMKYSRREIERIAKVAFQAARKRNNKVTSIDKANVLTTSVFWKEVVIELHKKEFSDVQLNHLYVDNAAMQLIVNPKQFDVVLCENMFGDILSDEASIITGSIGMLPSASLSESGFGLYEPSGGSAPDIAGKGVANPIAQVLSAALMLRYSFSMEEEANKIETAVRKTIASGKRTRDIAEVGSTIVGTKEIGQLIESFL

SEQ ID NO: 1077 - protein, 150 aa, Agrostis stolonifera var. palustris
MSIVRWSNVFDPFSLDLWADPFDAFRSILPAASGNHDTAAFVNARMDWKETPEAHVFKADLPGVKKEEVKVEVEGGNVLVVSGERKGEGGQERQVATLERSSGKFVRRFRLPENAKVEEVKAGLENGVLTVTVPKAEVKKPEVKAIEISG

SEQ ID NO: 1078 - protein, 747 aa, Geobacillus stearothermophilus
MENQNRQNAAQCPFHGSVTNQSSNRTTNKDWWPNQLNLSILHQHDRKTNPHDEEFNYAEEFQKLDYWALKEDLRKLMTESQDWWPADYGHYGPLFIRMAWHSAGTYRTGDGRGGASTGTQRFAPLNSWPNNANLDKARRLLWPIKKKYGNKISWADLFILAGNVAIESMGGKTIGFGGGRVDVWHPEEDVYWGSEKEWLASERYSGDRELENPLAAVQMGLTYVNPEGPDGKPDPKAAARDIRETFRRMGMNDEETVALIAGGHTFGKAHGAGPATHVGPEPEAAPIEAQGLGWISSYGKGKGSDTITSGIEGAWTPTPTQWDTSYFDMLFGYDWWLTKSPAGAWQWMAVDPDEKDLAPDAEDPSKKVPTMMMTTDLALRFDPEYEKIARRFHQNPEEFAEAFARAWFKLTHRDMGPKTRYLGPEVPKEDFIWQDPIPEVDYELTEAEIEEIKAKILNSGLTVSELVKTAWASASTFRNSDKRGGANGARIRLAPQKDWEVNEPERLAKVLSVYEDIQRELPKKVSIADLIVLGGSAAVEKAARDAGFDVKVPFFPGRGDATQEQTDVESFAVLEPFADGFRNYQKQEYSVPPEELLVDKAQLLGLTAPEMTVLVGGLRVLGANYRDLPHGVFTDRIGVLTNDFFVNLLDMNYEWVPTDSGIYEIRDRKTGEVRWTATRVDLIFGSNSILRSYAEFYAQDDNQEKFVRDFINAWVKVMNADRFDLVKKARESVTALQVNYITDLPLG

SEQ ID NO: 1079 - protein, 765 aa, Shigella flexneri 2a str. 301
MKWLCSVGIAVSLVLQPALADDLFGNHPLTPEARDAFVTDLLKKMTVDEKIGQLRLISVGPDNPKEAIREMIKDGQVGAIFNTVTRQDIRAMQDQVMELSRLKIPLFFAYDVLHGQRTVFPISLGLASSFNLDAVKTVGRVSAYEAADDGLNMTWAPMVDVSRDPRWGRASEGFGEDTYLTSIMGKTMVEAMQGKSPADRYSVMTSVKHFAAYGAVEGGKEYNTVDMSPQRLFNDYMPPYKAGLDAGSGAVMVALNSLNGTPATSDSWLLKDVLRDQWGFKGITVSDHGAIKELIKHGTAADPEDAVRVALKSGINMSMSDEYYSKYLPGLIKSGKVTMAELDDAARHVLNVKYDMGLFNDPYSHLGPKESDPVDTNAESRLHRKEAREVARESLVLLKNRLETLPLKKSATIAVVGPLADSKRDVMGSWSAAGVADQSVTVLTGIKNSVGENGKVLYAKGANVTSDKGIIDFLNQYEEAVKVDPRSPQEMIDEAVQTAKQSDVVVAVVGEAQGMAHEASSRTDITIPQGQRDLIAALKATGKPLVLVLMNGRPLALVKEDQQADAILETWFAGTEGGNAIADVLFGDYNPSGKLPISFPRSVGQIPVYYSHLNTGRPYNADKPNKYTSRYFDEANGALYPFGYGLSYTTFTVSDVKLSAPTMKRDGKVTASVQVTNTGKREGATVVQMYLQDVTASMSRPVKQLKGFEKITLKPGETQTVSFPIDIEALKFWNQQMKYDAEPGKFNVFIGTDSARVKKGEFELL

SEQ ID NO: 1080 - protein, 291 aa, Listeria monocytogenes EGD-e
MKILVFGGTRFFGKKLVERLVSEGHDVTIGTRGKTEDNFGDTVKRVVLNRESRDALFQLAKEDWDVIYDNICFSPKEALYAVDAFKGKVKRYIYTSSLSVYSQKGRALVEADFNPEHYEIVIGDKEDFDYGEGKRLAEAVFFQKASFPVVAVRFPIVLGLDDYTKRLHFHINHIKNHQEIGISNGQAEIGFITSDEAAHFLEWVGVESDLTGPVNATSNGTYALNGFIKMLEEKIGELALVEEVTDDVDDSPFGIEKTYYLDNAKATEAGFVFNDLKVWLPALVTDILKEN

SEQ ID NO: 1081 - protein, 433 aa, Zea mays
MVLDLNVASPADSGTSSSSVLNSADGGFRFGLLGSPVDDDDCSGEMAPGASTGFMTRQLFPSPTPPAEPEPEPVAAPVPVWQPQRAEDLGMAQKPVAPAKNTRRGPRSRSSQYRGVTFYRRTGRWESHIWDCGKQVYLGGFDTAHAAARAYDRAAIKFRGLDADINFSLSDYEDDLKQMRNWTKEEFVHILRRQSTGFARGSSKYRGVTLHKCGRWEARMGQLLGKKYIYLGLFDSEVEAARAYDRAALRFNGREAVTNFEPSSYNAGDNNLRDTETEAIDDGDAIDLDLRISQPNVQDPKRDNTLAGLQPTCDSPESSNTMASQPMSSSSPWPGYHQNPAVSFHHQRLYSSACHGFFPNHQVQERPVERRPELGAQPFPSWAWQAQGSPHVPLHHSAASSGFSTAAGANGGMPLPSHPPAQFPTTTNPFFFP

SEQ ID NO: 1082 - protein, 149 aa, Capsicum annuum
MADQLTDDQISEFKEAFSLFDKDGDGCITTKELGTVMRSLGQNPTEAELQDMINEVDADGNGTIDFPEFLNLMARKMKDTDSEEELKEAFRVFDKDQNGFISAAELRHVMTNLGEKLTDEEVDEMIREADVDGDGQINYDEFVKVMMAK

SEQ ID NO: 1083 - protein, 381 aa, Oryza sativa
MAASATQEADCKASEDARLFFDAAKPPPFRIGDVRAAIPVHCWRKTPLRSLSYVARDLLIVAALFAAAASSIDLAWAWAWPLYWARQGTMVWALFVLGHDCGHGSFSDSAMLNNVVGHLLHSFILVPYHGWRFSHRTHHQNHGHIERDESWHPITEKLYWQLETRTKKLRFTLPFTLLAFPWYRSPGKTGSHFLPSSDLFSPKEKSDVIVSTTCWCIMISLLVALACVFGPVPVLMLYGVPYLVFVMWLDLVTYLHHHGHNDLPWYRGEEWSYLRGGLTTVDRDYGWINNIHHDIGTHVIHHLFPQIPHYHLVEATKAARPVLGRYYREPEKSGPLPLHLFGVLLRTLRVDHFVSDVGDVVYYQTDHSLNGTDWAEDAKHK

SEQ ID NO: 1084 - protein, 459 aa, Zea mays
MASAAADPLLPGEGSGRRLGFLPSNIRLKTSVWSELGGAVGDLGTYIPIVLALSLASHLDLGTTLIFTALYNFATGLLFGIPMPVQPMKSIAAVALSSAHLTVPQIMSAGLAVAAVLLFLGATGLMTCIYRLLPLPVVRGVQLSQGLSFAFTAVKYVRYVQDFSRSSSASTAVARPLLGLDGLVLALAALLFIILATGSGDDEDVSSDGMARRRRSCSRVPAALIVFALGLVLCFVRDPSILQGLRFGPAPLRLVGITWDDFKIGFWEGAVPQLPLSVLNSVIAVCKLSSDLFPERAELSPARVSVSVGLMNFVGCWFGAMPCCHGAGGLAGQYRFGGRSGASVVFLAIGKLALGLVFGNSFVTILGQFPIGILGVMLLFSGIELAMASRDMGTKEESFVMLICAGVSLTGSSAALGFISGIVLYLLLRLRDVDYQALAGRWGSDRRRTGNKVGDDEDA

SEQ ID NO: 1085 - protein, 366 aa, Pseudomonas putida
MEIKAAIVRQKNGPFLLEHVALNEPAEDQVLVRLVATGLCHTDLVCRDQHYPVPLPMVFGHEGAGVVERVGSAVKKVQPGDHVVLTFYTCGSCDACLSGDPTSCANSFGPNFMGRSVTGECTIHDHQGAEVGASFFGQSSFATYALSYERNTVKVTKDVPLELLGPLGCGIQTGAGSVLNALNPPAGSAIAIFGAGAVGLSAVMAAVVAGCTTIIAVDVKENRLELASELGATHIINPAANDPIEAIKEIFADGVPYVLETSGLPAVLTQAILSSAIGGEIGIVGAPPMGATVPVDINFLLFNRKLRGIVEGQSISDIFIPRLVELYRQGKFPFDKLIKFYPFDEINRAAEDSEKGVTLKPVLRIG

SEQ ID NO: 1086 - protein, 368 aa, Borrelia burgdorferi B31
MRLNAGIVGLPNVGKSTLFSSLTSSNVEIANYPFCTIEPNIGIVEIPDERLLKISECIIPRKIIPAVMEFVDIAGLVKGASTGEGLGNKFLANIREVSLIVHVVRCFEEKEVIHINDDINPEKDITTINVELCLSDLETVQKSLQKQEKNAKSTDKKISESSKAIVLMLKRLEDHLSNMNPAVEFKFDDFEYNFIRSLNLLTFKKVLYVCNVDENSLSGNKYTDIVKNIALKEGNDFLILCAKIEAELAQIKDISYKNEMLKLFGINDSGLGNLIKKAYYTLGLRTYFTAGLQEVRAWTFKQGMRAPKAAGIIHSDFERGFIKAEVYSCEDLFKFQSVQKLKEKGLVRIEGKEYIVRDGDVIFFKFNV

SEQ ID NO: 1087 - protein, 301 aa, Triticum aestivum
  unsure (1)..(301): unsure at all Xaa locations
MDSLSLYEISCFAAGFAGNLFAFALFLSPVPTFKRILKAKSTEQFDGLPYLLSLLNCFICLWXYGLPWVSDGRLLVATVNGTGAAFQLAYISLFFIYADSRKTRLRMVGLLVLLVCAFALVAHASIAFFDQPTRQQFVGAVSMASLISMFASPLAVMGVVIRTECVEFMPFYLSLSTLLMSASFAVYGLLLRDLFIYLPXGLELSWEQRSWHSTLTTAGNGDARIHLRRCLPDQTSSDQFSVLAWLERAGVGFCRRELYAPALFSPVDAESVCTDLLAYASVYMLLKYHSFPEECRGGYFV

SEQ ID NO: 1088 - protein, 214 aa, Paeonia sinjiangensis
IVEGVGEGVTDVKPGDHVLPIFTGECKECRHCKSEESNMCDLLRINTDRGVMLNDGKSRFSINGQPIFHFVGTSTFSEYTVLHVGCLAKINPEAPLDKVCVLSCGISTGLGATLNVAKPNKGSTVAIFGLGAVGLAAAEGARIAGASRIIGVDLNPERFDEARKFGVTEFVNPKDYNKPAQEVIAEMTGGGVDRSVECTGSIMAMMSAFECVHD

SEQ ID NO: 1089 - protein, 499 aa, Vitis vinifera
MELLSCLLCFLAAWTSIYIMFSARRGRKHAAHKLPPGPVPLPIIGSLLNLGNRPHESLANLAKTYGPIMTLKLGYVTTIVISSAPMAKEVLQKQDLSFCNRSIPDAIRAAKHNQLSMAWIPVSTTWRALRRTCNSHLFTSQKLDSNTHLRHQKVQELLANVEQSCQAGGPVDIGQEAFRTSLNLLSNTIFSVDLVDPISETAQEFKELVRGVMEEAGKPNLVYYFPVLRQIDPQGIRRRLTIYFGRMIEIFDRMIKQRLQLRKIQGSIASSDVLDVLLNISEDNSNEIERSHMEHLLLDLFAAGTDTTSSTLEWAMAELLHNPETLLKARMELLQTIGQDKQVKESDISRLPYLQAVVKETFRLHPAVPFLLPRRVEGDADIDGFAVPKNAQVLVNAWAIGRDPNTWENPNSFVPERFLGLDMDVKGQNFELIPFGAGRRICPGLPLAIRMVHLMLASLIHSYDWKLEDGVTPENMNMEERYGISLQKAQPLQALPVRV

SEQ ID NO: 1090 - protein, 152 aa, Zea mays
MMMACALAVAQPAASLAPPSGKRTLSGGRPPRLPPPRLSGKLIRSRAVVAKAAQDGSESSGTGSIVKYVTSSFSTAEDIFALAGIGFAAVAALWASVNLIEIIDKLPVLPLLFELVGILVAWLFIYNNLLFKPKRKEFLENIKSSGSRILGQ

SEQ ID NO: 1091 - protein, 378 aa, Oryza sativa
  unsure (1)..(378): unsure at all Xaa locations
XRVRTISSSVFVEYVRACVRSGRLDTLASVIEKCKATDQNKVLCPPWSWCVETAEAAFEANNSKLGLFALEYLARWIARSERVIPPLHLSVDEGLVLSALSAAARTCSTDLLNAAWSILRMSLLQKWAPTPEAYLAKIYAHSSNGHLQRAFCTLREFENTYGNFEDIDSELFSPFTSLRPLVVACCKDGYTTLDSVYVQLENLSSADSPYKSVAALNCGILGGXANIWDLERAYETFEAIKEKWGLTPDIHSYNAXLHAFGKRKKTEEACNVFQHLVSLGVKPNATTYGLLVDTHLVNRDAKAALAVIAEMVDAGFTPSKETLKKVRRRCSRESDFDSDEKVQSLAKQFNYRMGGENRREMLFNIEYSAEFTSTPSPS

SEQ ID NO: 1092 - protein, 475 aa, Glycine max
MMALNISSPAEVKSIFFADYFKSNCITAKFTGGFAFKRKERGAASGGRVCCSVLAPPPPPAWPGRAVPEQGSKTWDGPKPISIVGCTGSIGTQTLDIVAENPDKFKVVALAAGSNVTVLADQVKRFKPQLVAVRNESLIAELKEALHDVEEKPEIIPGEQGIIEVARHPDAVSVVTGIVGCAGLKPTVAAIEAGKYIALANKETLIAGGPFVLPLAQKHNVKILPADSEHSAIFQCIQGLPEGALRRVILTASGGAFRDWPVDKLKDVKVADALKHPNWNMGKKITVDSATLFNKGLEVIEAHYLFGADYDHIEIVIHPQSIIHSMIETQDSSVLAQLGWPDMRLPILYTLSWPDRIYCSEDTWPCLDLCKIGSLTFKTPDNVKYPSMNLAYAAGRAGGTMTGVLSAANEKAVEMFIDEKISYLDIFKVVELTCEKHQNELLSSPSLEEIIHYDLWAREFAASLQDSSSFTPILA

SEQ ID NO: 1093 - protein, 207 aa, Zea mays
MVSLKLQKRLAASVLKCGKGKVWLDPNEVSEISMANSRQNIRKLVKDGFIIRKPQKVHSRSRARRAHEAKQKGRHSGYGKRRGTREARLPTKILWMRRMRVLRRLLRKYREAKKIDKHMYHDMYMKVKGNMFKNKRVLMESIHKSKAEKAREKTLSDQFEAKRAKSKASRERKIARREERLAQGPREPTAPVAAPAPSTGVPKKAKK

SEQ ID NO: 1094 - protein, 394 aa, Staphylococcus aureus subsp. aureus MW2
MNSIIELTDYYSSNNYAPLKLVISKGKGVKVWDTDGKQYIDCISGFSVANQGHCHPTIVKAMTEQASKLSIISRVLYSDNLGKWEEKICHLAKKDKVLPLNSGTEAVEAAIKIARKWGSEVKGITDGQVEIIAMNNNFHGRTLGSLSLSNHDAYKAGFHPLLQGTTTVDFGDIEQLTQAISPNTAAIILEPIQGEGGVNIPPKGYIQAVRQLCDKHQILLIADEIQVGLGRTGKWFAMEWEQVVPDIYILGKALGGGLYPVSAVLANNDVMRVLTPGTHGSTFGGNPLAIAISTAALDVLKDEQLVERSERLGSFLLKALLQLKHPSIKEIRGRGLFIGIELNTDAAPFVDQLIQRGILCKDTHRTIIRLSPPLVIDKEEIHQIVAAFQDVFKN

SEQ ID NO: 1095 - protein, 1126 aa, Physcomitrella patens
MSTTKLAYSSGSSVKSKHSVRVAQTTADAKLQAVYEESGDSGDSFDYSKSVHASKSTGENVPALAVTAYLQRMQRGGLVQTFGCMLCVDESSFRVIAYSENAPEMLDLMPQAVPSVGQQEVLGIGTDARTLFTPSSAAALEKCAGAVDVTMLNPISVHCRSSGKPFYAILHRIDVGLVIDFEPVRPNDAVVSSAGALQSHKLAAKAISRLQALPGGDIGLLCDTVVEEVRQLSGYDRVMAYKFHEDEHGEVLAEIRRSDLEPYLGLHYPATDIPQASRFLFMKNRVRMIGDCYAPPVKVVQDKDLRQPISLAGSTLRAPHGCHAQYMGNMNSIASLVMAVIVNDPDEDPNSRGGQQRGRKLWGLVVCHHTSPRTVSFPLRSACEFLMLVFGLQLNMEVELAAQLREKHILRTQTLLCDMLLRDAPIGIVSQSPNIMDLVKCDGAALYYGKRFWLLGITPNEVQIKEIADWFLEHHQDSTGLSTDSLADAGYPGAAQLGDAVCGMAAAKITPRDFLFWFRSHTAKEIKWGGAKHDPDEKDDGRKMHPRSSFKAFLEVVKRRSLPWEDIEMDAIHSLQLISRGSFQDIDDSDTKTMIHARLNDLKLQGMDELSTVANEMVRLIETATAPILAVDSSGFINGWNAKVAELTGLPVGEAMGRSLVKDLILEESIDVVQRLLYLALQGEEEQNIEIQLKTFGPQKEKGAVILIVNACSSRDVQDNVVGVCFVGQDVTGQKQVLDKFTRIQGDYKAIVQNPNPLIPPIFGTDEYGYCSEWNPSMEKLTGWKREEVLGKLLVGEIFGMQLMCCRLKGQDAMTKFMIALNSAMDGQDTDRFPFSFFDRQGKYVDALLTVNKRTDAEGSITGVFCFLHTTSVELLQALTVQRATEKVAFAKLKELAYIRQEIKNPLYGIMFTRNLMEDTDLSEDQRQFVETSAVCERQLRKVLDDMDLESIEDGYLELDTNEFVMGTVMDAVVSQGMITSREKGLQLIRETPREIKNMCLFGDQVRLQQVLADFLLNAVKFTPSSGGWVGIKVVPTKKRLGGGIHVMHLEFRVTHSGMGLPEELVHEMFDRGRGMTQEGLGLSMCRKLVKLMNGNVQYIRETGKSYFLVEVELPLAQRDDAGSVR

SEQ ID NO: 1096 - protein, 513 aa, Lolium rigidum
MVMEMEPSSATLFFLSVVTLVILVSLVSRKPSSKLRRPPGPRDLPFVGSLHHLLTSQPHVALRNLAKTHGPVMRLRLGQVEAVVVSSSAAAQEVLRDNDLSFASRPNLLATEIMCYGNLDVAFAPYGAYWRALKKLCVLELLSSRKVRQFKPVRDSETMSLIKEICAAGKGGKPVKLRSLLVKCTSSVTGKATFGERCDIDLREQFMAAMEVAQIHSSGFCVGDLFPSLGFLDVATGMRYQLWRARQQLDNVVDKIISDCEARREEKKSTPTGDEDLLSLMLRIRDEGGSDFPIETINIKAIIVDLFTAGTETTSSTAEFVMSELMRNPKVMKKAQEEVWRMMENKSPQDHENHMDELPYLRMVIKETMRLHPVVPLLLPRLCRESCHVGGFEITKGTRVIINAWALATSPENWNEPEEFRPERFEDSVVVNDKGTQFKLMPFGGGRRMCPGDGFALATLELMVARLLYYFEWSLPDGMRPDELDMDVKVGTTSRRRNELRVVASPCRIPIEI

SEQ ID NO: 1097 - protein, 277 aa, Halobacterium sp. NRC-1
MTTHGWFADTAVRDADAAADAVRNGHADAPENWPAAAVEDGVVDDADEYYDRLRDATRAATRAAVRERERADDQQLVHAVRTIGDLSDAANEVAERAVEWARTLFDGVDDGIAGARDVAGRSANSPTEERAIALCERATDLADERDRAQGFVETHAPTVAPNLSMLAGPVLAARLIALAGGLDDLAKLPSGTVQVLGAEDALFAHLRGHAPSPKHGVIYTHEYVRGTHPDQRGSAARALAGKLTIAARVDHYSGDRRPDLEAELDARMERIRARETE

SEQ ID NO: 1098 - protein, 251 aa, Triticum aestivum
ITLVFFANLSIVGMNVSLMWNSVGFYQIAKLSIIPLLCIMEVLFENFRYSRDTKLSIVVVLVGVGVCTVSDVSVNAQGLVAAVIAVCGTALQQHYVNYLQRKYSLNSLKLLGHTAPAQAASLLILGPFVDFWLTRNRIDTFHYTSTVTFFIVLSCVISVGTNLSQFICIGRFTAVTFQVIGHMKTILVLTLGFLLFGKEGLNFHVAFGMILAIVGMIWYSSASSKPGGKERQGLASEKAQKSPQSELDDKV

SEQ ID NO: 1099 - protein, 353 aa, Candida sp. HA167
MSTPENLSFVLQKPFDVKFEDRPIPKLSDPYSVKIQVKKTGICGSDVHYFTHGAIGDFVVKAPMVLGHESSGVVLEVGSEVKSLKVGDRVAMEPGVPSRHSDEYKSGRYNLCPHMAFAATPPYDGTLCKYYILPEDFCVKLPEHVSLEEGALVEPLSVAVHSSKLGNIKPGSHVAIYGAGPVGLLVAAVASAFGAESVTIIDLVESRLNLAKELGATATVQVDFKDTPKESAAKVVAANNGIAPDVVIDASGAEASINSAINAIRPGGTYVQVGMGKPDVSFPIATLIGKELTVKGSFRYGYGDYPLAVSLLASGKVNVKKLITHEVKFEDAAEAFQLVRDGKAIKCIINGPE

SEQ ID NO: 1100 - protein, 751 aa, Geobacillus stearothermophilus
MENQNRQNAAQCPFHGSVTNQSSNRTTNKDWWPNQLNLSILHQHDRKTNPHDEEFNYAEEFQKLDYWALKEDLRKLMTESQDWWPADYGHYGPLFIRMAWHSAGTYRIGDGRGGASTGTQRFAPLNSWPDNANLDKARRLLWPIKKKYGNKISWADLFILAGNVAIESMGGKTIGFGGGRVDVWHPEEDVYWGSEKEWLASERYSGDRELENPLAAVQMGLIYVNPEGPDGKPDPKAAARDIRETFRRMGMNDEETVALIAGGHTFGKAHGAGPATHVGPEPEAAPIEAQGLGWISSYGKGKGSDTITSGIEGAWTPTPTQWDTSYFDMLFGYDWWLTKSPAGAWQWMAVDPDEKDLAPDAEDPSKKVPTMMMTTDLALRFDPEYEKIARRFHQNPEEFAEAFARAWFKLTHRDMGPKTRYLGPEVPKEDFIWQDPIPEVDYELTEAEIEEIKAKILNSGLTVSELVKTAWASASTFRNSDKRGGANGARIRLAPQKDWEVNEPERLAKVLSVYEDIQRELPKKVSIADLIVLGGSAAVEKAARDAGFDVKVPFFPGRGDATQEQTDVESFAVLEPFADGFRNYQKQEYSVPPEELLVDKAQLLGLTAPEMTVLVGGLRVLGANYRDLPHGVFTDRIGVLTNDFFVNLLDMNYEWVPTDSGIYEIRDRKTGEVRWTATRVDLIFGSNSILRSYAEFYAQDDNQEKFVRDFINAWVKVMNADRFDLVKKARESVTALQFNISSRSVSSGNLQ

SEQ ID NO: 1101 - protein, 388 aa, Lupinus albus
MVDQVQRPTIMEKVSSQLHLRSGVSSDIQSYDAAFRRPAVYQRRSFGNYSNAALQYPVMPSCRATTDLSSVATASPVFAAAPAEKGHFLIDFLMGGVSAAVSKTAAAPIERVKLLIQNQDEMIKSGRLSEPYKGIGDCFKRTMADEGVVALWRGNTANVIRYFPTQALNFAFKDYFKRLFNFKKDRDGYWKWFAGNLASGGAAGASSLFFVYSLDYARTRLANDSKAAKKGGERQFNGLVDVYKKTLASDGVAGLYRGFNISCVGIIVYRGLYFGMYDSLKPVLLTGSLQDSFFASFGLGWLITNGAGLASYPIDTVRRRMMMTSGEAVKYKSSLDAFSQILKNEGAKSLFKGAGANILRAVAGAGVLAGYDKLQVIVFGKKYGSGGA

SEQ ID NO: 1102 - protein, 188 aa, Glycine max
MNRKPGDWDCRSCQHLNFSRRDLCQRCGEPRSAADRGSVGGALGGDYANFGGRGGGGSSFGTGFGAGSDVRPGDWYCTCGAHNFASRSSCFKCAAFKEEAAVNGGAGGFDGDMSRSRGFGFGAVGGMGGGMGAGAAGGRASRPGWKSGDWICTRSGCNEHNFASRQECFRCNAPRDSGSATPYENFLH

SEQ ID NO: 1103 - protein, 529 aa, Thermoplasma volcanium
MAEQQHEVKLKKALTFPQMLVIGLIAAVGTGALFAPVAMVGVAGPSAIMGWIIGAIMYTFVSFTFVELSKTYPEAGGPSRYSLYTHGRFTNALNAFADLIWYIFIPPIEALATVEGLQYLYPHFIASSGAPTLLGAGLGVLVLALFLPLNYFGVKAFGKYSLYIGFVKLAVYLLAAFGMMFVFFKFDNFYIYRGGFLPFGFSGILFAIPFAMFAFGGIRVVPDYAEETTETKENRFLGRTIIYTVIGQSLIYILFSIAFIAGLKWSAISIAPGAWADVKSNITENPFVFLASSYHNYVVLIIVLVVSILGPFVTGYVYVGSGARVLLATARSKIMASSMKKLSETYAVPYWSVIAFVIVGAIVAFISAPVPDIYALLTDAVVAGYLGFSVTPVAMIVSRRQGATKKEDKLPAGTTIAVIAFISSSLIAFWSGWPSVPYAMFILALAMLVFGIVYKIKEHFLNSIWYILYMAFILLMSYIGSDGALNLIPFTYSTLIVAAISAAIFFPWGIISGLDSPYNVDNAPIPNIE

SEQ ID NO: 1104 - protein, 368 aa, Glycine max
  unsure (1)..(368): unsure at all Xaa locations
STSKAIAQYTEDARLHAVFEQSGESGRSFDYSQSIRVTSESVPEQQITAYLLKIQRGGFIQPFGSMIAVDEPSFRILAYSDNARDMLGITPQSVPSLDDKNDAAFALGTDIRTLFTHSSAVLLEKAFSAREISLMNPIWIHSRTSGKPFYGILHRIDVGIVIDLEPARTEDPALSIAGAVQSQKLAVRAISQLQSLPGGDVKLLCDTVVESVRELTGYDRVMVYRFHEDEHGEVVAETKRPDLEPYIGLHYPATDIPQASRXXFKQNRVRMIVDCHASAVRVVQDEALVQPLCLVGSTLRAPHGCHAQYMANMGSTASLVMAVIINGNDEEGVGGRTSMRLXXLVICHHTSARCIXXPLRYACDFLMQ

SEQ ID NO: 1105 - protein, 160 aa, Hordeum vulgare subsp. vulgare
MKGAKSKGAAKADTKLAVKSKGAEKPAAKGKKGKAGKDPNKPKRAPSAFFVFMGEFREEFKQKNPKNKSVAAVGKAAGERWKSLSESEKAPFVAKANKLKGEYNKAIASYNKGESTTAAPKKASSKEVEEEDEEESDKSKSEINDDDDDEGSDEAEDAAE

SEQ ID NO: 1106 - protein, 552 aa, Bacteroides fragilis
MEQSFIAYIENSIKNNWDLDALTDYKGATLQYKDVARKIEKLHIIFEESGIRKGDKIAVCGRNSSHWGVTFLATLTYGAVIVPILHEFKADNVHNIVNHSEAKLLFVGDVVWENLNESAMPLLEGILMMNDFTLLVSRSERLTHAREHLNEMFGKKFPKNFRKEHIEYHKDQPEELAVINYTSGTTSYSKGVMLPYRSLWSNMAFAFEVLPLKAGDKIVSMLPMAHMYGLAFEFLYEFAVGCQIYFLTRMPSPKIIFQAFADVKPNLIVAVPLIIEKIIKKSVLPKLETPTMKLLLKVPIINDKIKATVREEMIKGFGGNFEAVIVGGAAFNQEVEQFLRMIDFPYTVGYGMTECGPIICYEDWKRFKPGSCGKAALNMEVKVLSPDPENVVGEIVCKGPNVMLGYYKNEEATAQVIDKDGWLHTGDLALEDAEGNITIKGRSKNMLLSASGQNIYPEEIEDKLNNLPYVAESIIVQQNDKLVGLVYPDFDEAFAHGLKNEDMERVMEENRITLNEMLPAYSQISKMKIYPEEFEKTPKKSIKRFLYQEAKG

SEQ ID NO: 1107 - protein, 229 aa, Zea mays
MQVAMAGETKKGLVLLDFWVSPFGQRCRIALAEKGIAYEYSEQELLGGAKSDILLRSNPVHKKIPVLLHDGRPVCESLVILEYLEEAFPEASPRLLPDAAYARAQARFWAAYSDKVYEAGTRLWKLRGDARAQARAEIVQVVRNLDGELGDKAFFGGEAFGFVDVALVPFVPWLPSYERYGDFSVAEIAPRLAAWARRCAQRESVARTLHPPEKVDEFINLLKKTYGIE

SEQ ID NO: 1108 - protein, 130 aa, Oryza sativa
RAEDINYDCDRQRQEFRRTNGKCSIWGKAPSKIVASYQTTNGETKSSLLLTSGWWGLSRHFHYVPEILSAFFWTVPALFDHFLPYFYVIFLTILLFDRAKRDDDRCSSKYGKYWKMYCNKVPCRVIPGIY

SEQ ID NO: 1109 - protein, 168 aa, Zea mays; identical to SEQ ID NO: 728

SEQ ID NO: 1110 - protein, 125 aa, Betula pendula
LKQEPGTSEETEQFACTRYKAEYPIFQKIRCNGPDTAPLYKFLKASKTGFLGSRIKWNFSKVAFPCNQFLKQEPGTSEETEQFACTRYKAEYPIFQKIRCNGPDTAPLYKFLKASKTGFLGSRIK

SEQ ID NO: 1111 - protein, 457 aa, Yersinia pestis CO92
MEQQLQNSSLKRGLKNRHIQLIALGGAIGTGLFLGIAQTINMAGPSVILGYAIGGFIAFLIMRQLGEMVVEEPVAGSFSHFAYKYWGDFAGFLSGWNYWAMFILVGMAELTAVGIYIQYWWPEIPTWVSAAVFFIIINAINLVNVRLYGETEFWFAIIKVAAIIGMIVFGAYLLASGSGGPAASVTNLWAQGGFMPHGFRGLIMAMAVIMFSFGGLEMVGITAAEAEDPRNSIPKATNQVVYRILIFYIGSLTVLLSLFPWNNVVEGGSPFVMIFDALDSPWVATALNVVVLTAALSVYNSGVYCNSRMLFGLASQGNAPKLLTKLNKRGVPIRSIALSALATSAGVVINYIMPGKAFELLMALVVSTLVINWVMICLAHLKFRKAKVKEGVVPRFKALWYPYGNYLCLVFLALILVIMYLTEGIRISVLMMPVWIALLWCGFVLTRRKCPKTVTSL

SEQ ID NO: 1112 - protein, 354 aa, Triticum aestivum
  unsure (1)..(354): unsure at all Xaa locations
MARRPPIPPPRRDHRDVMSNKATHWCFPCRRPIRCPGQDIFQPQCWHDIIQEVXTRIGGALXNNYGMFGPRFDDRLDGRFGMMDAMSALMRRRMAXEMSSNPVFDPNAAWASTTQGRPSPIGPRLIFGSNMPXRGAKDSGVNVLVRGGRRIGADRPNFSGFLVGGPSLXEALFEQLLLRAIAXGNRQGPAPAPQSAIDSMPVVKITRRHLSDDPVCPVCTDRFEVGSEAREMPCKHLYHASCIIPWLVQHNSCPVCRHPLPPQRGSDSNAARPQPLAHAGEAVSRGVAGAGADPAPVTRNGDDDGGSPFSFLWPFGSSSPGPSSYQYGGGGGGRPAVYDDDPGQITYSEWHYDP

SEQ ID NO: 1113 - protein, 127 aa, Zea mays
  unsure (1)..(127): unsure at all Xaa locations
LSVNEGLVISALSAAGRTYNTDLLNAAWSLLRKSLRQKRAPTPRXYLAKIYAHSSIGQLQRAFGTLREFENAYGNSEDIDLELFSPFTSLHPLVVACCKDGFGALVCVFGLLVFVFRVCLSFFCVAG

SEQ ID NO: 1114 - protein, 553 aa, Nostoc punctiforme
  unsure (1)..(553): unsure at all Xaa locations
MSKTQTASSFLSNISEQEREALKRLVDYTKVESLPEVWPLASQRFGDVVALRSPHAKPEIVITYTQLAEQIQLFAAGLQALGVKLGDRISLISDNSPRWFIADQGIMTAGAVDAVRSSQAEKEELLFIIANSGSTAIVVEDLKTLKKLQDRIQDLPIQFAILLSDEAPPTDGTLKVLNFAQLIEIGKNHNFVPVKQNRDALATLIYTSGTTGRPKGVMLSYSNLMHQITTFGTVLQPNAGDIVLSILPSWHSYERTVEYYLLSQGCTQIYTNLRSVKGDLRQFKPNYMVGVPRLWESIYEGVQKQFREQPAKKQRLINFLLGISDKYIKARRVAQGLDLNNLHASAIERLTAKIQAAALLPLHALGERLVYAKVREATGGHVKQMISGGGALPRHIDNFFEIIGVQILQGYGLTETSPVTHVRRPWRNLIGASGLPLPATEAKIVDPETKAPLPIEKRGLVLLRGPQIMQGYYQNPEATAKAIDAEGWFDSGDLGWLTPQDDLVLTGRAKDTIVLTNGENIEPQPIEEDVFAIAYMGFXRPVISFARQLGXSR

SEQ ID NO: 1115 - protein, 457 aa, Lactococcus lactis subsp. lactis
MNTNQNEENKPSQRGLKNRHIQLIAIAGTIGTGLFLGAGKSIHLTGPSIIFVYLIIGALMYILLRAIGEMLYQDPNQHSFLNFVSRYLGEKPGYFIQWSYLLVVVFVAMAELIAIGTYINFWLPDLPIWMTEVFVLVLLTLLNTLNPKFFGETEFWFGMIKIVAIIGLILTAIILIFSHYHTGTDTVSVTNITKGFEFFPNGLSNFFESFQMVMFAFVSMEFIGMTAAETDNPRPTLKKAINQIPIRIVLFYVGALLAIMSIYQWRDIPADKSPFVTIFQLIGIKWAAALVNFVVLTSAASALNSALFSITRNLYSLSKLNNDKILKPFTKFSKAGVPVNALLFTSLLILFTPFISMIPAISNSFVFITSVATNLFLVVYLMTLITYLKYRKSSDFDPKGFVLPAAHIFIPLAIAGFVLIFISLFCFKDTIVPAIGSVIWVLIFGLFTFFKKIKTAE

SEQ ID NO: 1116 - protein, 339 aa, Thermoplasma volcanium
MKYVRYGSTASFVSVLSFGAMTFGERNRWKLGGVTQELSDRMVKRAYDAGINLFDTADVYDDGDSEVMLGRSLKPYRDSVMIATKVRGKIGQGVNSSGLSRHHMHIAIKKSLERLGTEWIDIYQYHGWDVYGNFEEFLETMESFVEQGLVIYPAVSNFTAWQISVLQTMAIERGYARYESAQMNYSLLNRDVEYEVLPFMKYSGMTLLSWSPLHGGVLAGKYKKGEKPATGTRMGNRGFFFPYFDEDHGWDVVEEVKKVAQEQGCKPSQVALAWIISKSHVAILGARSMEQLEENLGSLDVQLTKEQMDRLDNVSKNREIYPNWMVERQNHERDFEIIN

SEQ ID NO: 1117 - protein, 380 aa, Bacillus anthracis str. A2012
MKNISLLGASGSIGTQTLDVLRSHPDQFRLVAFSVGKNIDYAVKVIQEFSPQIVSVQREEDVLKLQAVSGNTKIVYGSEGLLEVALHPDAEIVVNAVVGSVGLLPTLRAIEAKKTIGIANKETLVTAGHLVMEAARKHNVSLLPVDSEHSAIFQCLNGENEKRISRLIITASGGSFRDKTRDELHHVTVEDALRHPNWSMGSKITIDSATMMNKGLEVIEAHWLFGIPYEQIDVVLHKESIIHSMVEFEDRSVMAQLGSPDMRVPIQYALTYPDRLPLSDTKQLNLWEIGTLHFEKMNQERFRCLRFAYEAGKAGGSMPAVMNAANEVAVEAFLQKRIGFLTVEDLIEKAMNHHNVIARPSLEEILEIDAATRRFVMEQI

SEQ ID NO: 1118 - protein, 506 aa, Lithospermum erythrorhizon
MALPAIPLAIIIFLIISYKLYQKLRLKLPPGPRPLPIIGNIYQVKPVKFRCFYNWSKTYGPIFSIYYGSQMNVIVSTTELAKEVLKENDQHLADRFRTRSSASMSRGGKDLIWADYGPHYVKVRKLCNVELFSPKRLEAIRPMREDEYTALVESIYKDCTKPELKGKSLLVREYLSSVAFNNITRLAFGKRFMDSNGVVNEQGQEFKKITHDGIKITAKLSIAEYIPWIRWMFKVEQDALDKFAADRDHLTRVIMEEHIKSGNTKQHFVDALLTLQKQYDISEDTIIGLLWDMIAAGMDTATISTEWAMAELVRNPRVQRKAQEELDRVVGPDRIMTEADVPKLPYLQCIVKESLRLHPPTPLMLPHRASANVKIGGYDIPKGSIVHVNVWAIARDPAYWKNPEEFRPERFMEEDIDMKGTDYRLLPFGAGRRICPGAQLAINLITSSLGHLLHQFTWSPQPGVKPEEIDLSENPGTVTYMRNPVKAVVSPRLSAVHLYKRVESDM

SEQ ID NO: 1119 - protein, 513 aa, Solanum tuberosum
MIMTAATVVIAAIVVILVAYFVGKVLYTVWWWPKMIEIKLKKEGIHGEPYKLLFGNFKEMMKMSKEAKKQPLLNHDIIPWVNPFLLRLSNTYKKIFVVWYGPTPRVTVTDPKLIREVLNRYNEFHKPEANAFIHLFVSGLGSYNGEKWDTHRKILNPAFHVERLKRMFPAISVCCDEMINRWDKLVSKEGSCELDVTDEFLNLSGDVISRAAFGSNIEEGRSIFLLQKEQCELIFASPFTLFFPSLRFLPTASNRKAKYIHKKVISLIRGIIEKREDAVRRGVSENDDILGLLLKARNEENAAGRGSVSLSTDDVIEECKQFYFAGQDTATALLSWTLVVLSMHPEWQDKARNEVFQVIGKNKPQFDDLNQLKLMNMIFQEVLRLYPAIFLIRGTSKDTQLGDMTIPPGVQVCVPTHLVHRDPQVWGDDALMFNPERFSEGVTKAAKEQLYFPFGWGARMCIGLNFGMLEAKLIFAQILQHFWFELSPSYTHSPQLILVMKPQYGAQIILHKL

SEQ ID NO: 1120 - protein, 669 aa, Oryza sativa
  unsure (1)..(669): unsure at all Xaa locations
MRLHVWHRNGIFVLDVRPPDTRIMTQADQAVISLRPGGGGGIGGPRAGRLFPFGASTGSLDFLRPRGGASSGFAAKIIDIPENILKLKQDIDIELHGEDEPWINNDSSVQTQSYNRYAETDNRDWRSRIEQPVQTPAIGGEEKSWDKFREAKESYISSGKQDQFNNQDKLSSQFSAKAQRGNLSNKERVLKTVKGILNKLTPEKFDLLKGQLIEAGITTADILKDVISLIFEKAVLEPTFCPMYAQLCFDLNEKLPSFPSEEPGGKEITFKRVLLNNCQEAFEGADNLRSEVNKLTGLDQEMERRDKERLVKLRTLGNIRLVGELLKQKMVPEKIVHHIVQELLGSESNRCPAEENVEAICQFFNTIGKQLDENPKSRRFNDVYFNRLKDLTTNSQLASRLRFMARDVLDLRSNQWVPRREEMKAKKISEIHREAENNLGLRPGSTASIRTGRTGTGGGGPLSPGAFSMNQPGIVGMLPAXXSVDPIVEQPAAAPKPSSTELQKKTISLLKEYFHILLLHEAQQCIEELKSPDYYPEVVKEAINLALDKGTNSIDPLLRLLEHLYNKNVFKATDLETGCLLYSSLLDELAIDLPKAPVHFGEVIGRLVLSHCLSIEVVEDTLKKIEDSFFRAAVFEAMMKIMKANPSGQAILGSHVAKIDACSKLLSSE

SEQ ID NO: 1121 - protein, 167 aa, Neurospora crassa
MHYWLEDSTANLFHIRPVAVVRGDSNVKGTVIFEQESESAPTTITYDISGNDPNAKRGFHIHTFGDNTNGCTSAGPHFNPHGTTHGDRTAEVRHVGDLGNIETDAQGNAKGTVTDNLVKLIGPESVIGRTVVVHAGTDDLGKGGNEESLKTGNAGPRPACGVIGISQ

SEQ ID NO: 1122 - protein, 392 aa, Mascagnia chasei
DLEPVNPADVPVTAAGALKSYKLASKAISRLQSLPSGNISLLCDVLVKEVRDLTGYDRVMVYKFHEDEHGEVVSECRRSDLESYLGLHYPATDIPQASRFLFMKNKVRMICDCLAPPVEVIQDERLAQPLSLCGSTLRSPHGCHAQYMTNMGTIASLVMAVTINEDDDMMDGDQQQMTRKLWGLVVCHHTSPRFVPFPLRYACEFLIQVFGVQINKEVELAAQVREKHILQIQTMLCDMLLRDAPVAIIMQSPNVMDLVKCDGAALYFKNKTWLLGVTPTEEQIRDIAEWLLEYHSGNTGLSTDSLMEAGYPGASALGDAVCGMAAVSITSRDFLFWFRSHTAKEIKWGGAKHDPDVKDDGRKMHPRSSFKAFLEVVKWRKMPWENIEMDAI

SEQ ID NO: 1123 - protein, 417 aa, Triticum aestivum
  unsure (1)..(417): unsure at all Xaa locations
VSRSLPSSCEQESRLAYMTYHLLEITRTKRPSGVLAIEHDGIAVAAVLAKRPKSEDSHDAVPVDCQGGNQGYSDSSTLISSIGRDNSINCLARCSRSDYGSIASLSRNFRSLVRDGGLYRERRRLGIAEHWVYFSCNVQEWEAYDPYRERWMTLPRMPPNECFMCSDKESLAVGTELLVFGKEILSHIGLSYSILTNSWSRGVEMNAPRCLFGSASFGEKAIIAGGMDSFGSVLSSAELYNSETKSWVTXPSMNKRRRMCSGVFMDGKFYVIGGMASNTEVLTCGEEYDLEKGTWRLIENMSEGLNGASGAPPLVAVVDNELYAAQYAGKLVRKYNKSDNTWTTLGELPERPEAVNGWGIAFRGCGERLLVIGGPRVLGGGMIELHSWIPREGPLQWNMIGSKPSGNFVYNCAVMGC

SEQ ID NO: 1124 - protein, 521 aa, Listeria innocua
MINYMKKTITMSLLVVSLVLISFISSPNANAAEKSILTSPKPINEVFPDENMAKVIAEVTYKSSSADEVSQADLDNITKLDGSTSDRMPGPIIYSIEGVEYLQNLSEFNISGQSVSNISPLEGLSELETVYISENNINDLSPLSKSPKIKILDASNNNISDISTLSSLPNLNSVRLNNNSISNISVLRDFPTNQFVYIYLADNKIKDISPLAGKSFQQLTLNNNEISDISPLSKMTLYSEDPLADDFYIDISNNHISDISSLKNADFGKLDYFFAEDQSIVNQPKAFSTNFTLENKVKNINGTLVTPKNISNSGSYSNAILSWQLPSFVANLDYSFSETTQIGRSTGEFSGKVTQSLVGGYTVTFDNEGTLSTRTFASDELVTEPAKPSKTGFTFTGWYDAKTGGKKWNFATDKMPANNMTLYAQYEEQTTDPVDPASPVAPTKPTDPVKPDEIVSSEGSGDMEIKGEQSGTIAASENATSLDDSKQQRTLPKTGDTNLYLVLIGLLFVGFASLFWKKKQI

SEQ ID NO: 1125 - protein, 157 aa, Glycine max
MASTKKITLKSSDGEAFEVEEAVAVAVESQTIKHMIEDNCADSGIPLPNVTSKILAKVIEYCKKHVEANCADEKPSEDELKAWDADFVKVDQATLFDLILAANYLNIKSLLDLTCQTVADMIKGKTPEEIRKTFNIKNDFTPEEEEEVRRENQWAFE

SEQ ID NO: 1126 - protein, 139 aa, Pennisetum glaucum
KKHVMSERKRREKLNEMFLVLKSLVPSIHKVDKASILAETIAYLKELQRRVQELESSREPMISRPSETRKVTRRHDDDEDVGNGSGSKRKASELGSGVEREHPTKDDTTNVTVTISNKEVLLEVQCRWEELMMTRVFDA

SEQ ID NO: 1127 - protein, 89 aa, Zea mays
  unsure (1)..(89): unsure at all Xaa locations
MTGSMDLPAKGGFSFDLCRRNNMLEKNGLKVPGFRKTGTTIVGLVFQDGAVLGADTRATEGPIVADKNCEKIHFMAPNIYCCGAXTAAD

SEQ ID NO: 1128 - protein, 329 aa, Glycine max
  unsure (1)..(329): unsure at all Xaa locations
MESTLLTNLLVFNNTLQPELMRSVHVYRRGDGEKREVEREFVFSESGSYGEMQATPIPGLVKSRVSEVCEGHRNGVWLCVFAFHADHTPQFCRIPPVLLVTRNPKLKMIPNLLDDLHVIYKLDRKEEDSDIAQDYTGEERQGNSNNCQPSWKVFPVLDQDLNCLPYEDDESESLDNETDVESSPGFAGFLVKKKRAPSDXVAKISLSDXVKYXGMPXVEASRNLNVGLTVLKRKCREFGIPRWPHRKIKSLDSLIHDLQEEVKSQELEDREAALAVAKRQRMLESEKENIEKKPFMDIQSETKRFRQDVFKRRHRARAVGKHNSTVSST

SEQ ID NO: 1129 - protein, 372 aa, Agrobacterium tumefaciens str. C58 (U. Washington)
MTQPATAAVLEEKNGRFILREVKLEAPRPDEVLIRMVATGICATDAHVRQQLMPTPLPAILGHEGAGIVERVGSTVSHLKPGDHVVLSYHSCGHCKPCMSSHAAYCDHVWETNFAGARLDGTIGVAAPDGNTLHAHFFGQSSFSTYALAHQRNAVKVPDDVPLELLGPLGCGFQTGAGSVLNALKVPVGASIAIFGVGAVGLSAIMAAKVADAAVIIAIDVNTERLKLASELGATHCVNPREQADVASAIRDIAPRGVEYVLDTSGRKENLDGGIGALAPMGQFGFVAFNDHSGAVVDASRLTVGQSLIGIIQGDAISGLMIPELVGLYRSGRFPFDRLLTFYDFADINEAFDDVAAGRVIKAVLRFPPQAA

SEQ ID NO: 1130 - protein, 172 aa, Ehrlichia ruminantium
MNIFNYMQIMPNISVDAFVAPTAVIIGDVCVNDKCSIWYNSVLRGDVGQIVIGVGTNIQDGTIIHVDRKYGNTNIGKKVTIGHGCILHACEIQDYVLVGMGSIIMDNVVVEKNAMVAAGSLVVRGKVVKTGELWAGRPAQFLRMLSSDEIKEISKSADNYIELASDYITGKL

SEQ ID NO: 1131 - protein, 214 aa, Paeonia sinjiangensis
IVESVGEGVTDLKPGDHVLPVFTGECKECRHCKSEESNMCDLLRINTDRGVMLNDGKSRFSINGQPIFHFVGTSTFSEYTVVHVGCVAKINPEAPLDKVCVLSCGISTGLGATLNVAKPKKGSSIAIFGLGAVGLAAVEGARIAGASRIIGVDLNPKRFEEAKKFGVTEFVNPKDYNKHVQEVIAEMTDGGVDRSVECTGSIMAIISAFECVHD

SEQ ID NO: 1132 - protein, 484 aa, Streptomyces coelicolor A3(2)
MTASDTYTQPRTAPAGTGTAAPGPTGPAADAGRGGWTPGSWRSRPAAQQPEWPDPGELRGVEDTLALRPPLVLPDEILDLRRSLAQVAAGEGFLLQAGDCAERFGSCTEAGVRGKLRVILQVAILLTYGSGLPVVKVGRIAGQFGKPRSRPTEAVDGVELPVYRGDIVNGPEFTAEARRPDAGRLLSAYHHASAALNVLRALTLGGYADLGQVHEWNQEFVRRSPAGQRYEKAADDITWALRFMSACGLDTRSQAALHQVQLYTSHEALLPQYEQALIRYDEKRRGWFDTSAHLLWIGDRTRRVDGAHVELLAGVDNPVGVKVGPTMGVDDLRELCERLDPDRAPGRLVLISRLGAGRGAELLPPLLRAVRDAGHAPVWACDPMHGNTFVSASGYKTRRLSDITTEVAEFFAVHREEGLHPGGIHLELTGDDVTECLGGDLDEVLDTHLASRYETACDPRLNAAQSIELAFGVARLLRELRGGA

SEQ ID NO: 1133 - protein, 345 aa, Triticum aestivum
MTVDRKDAEAAAAAAPFEIPALQPGRKKRPRRSRDGPNSVSETIRRWKEVNQQLEHDPQGSKRSRKPPAKGSKKGCMQGKGGPENTQCGFRGIRQRTWGKWVAEIREPNRVSRLWLGTFPTAEDAARAYDEAARAMYGALARTNFPMHPAQAPAVALPAAIEGVVRGASASCESTTTSANHSDVASNLPRQAQALEIYSQPDVLESTESVVLESVEHYSHKDTVPDAGSSIARSTSEEDVFEPLEPISSLPDGEADGFDIEELLRLMEADPIEVEPVTGGSWNCGTNTGVEMGLQEPLYLDGLDQGMLEGMLQADYPYPMWISEDRAMRNPAFHDAEMSEFFEGL

SEQ ID NO: 1134 - protein, 388 aa, Zymomonas mobilis
MSQPRTVTVLGATGSIGHSTLDLIERNLDRYQVIALTANRNVKDLADAAKRTNAKRAVIADPSLYNDLKEALAGSSVEAAAGADALVEAAMMGADWTMAAIIGCAGLKATLAAIRKGKTVALANKESLVSAGGLMIDAVREHGTTLLPVDSEHNAIFQCFPHHNRDYVRRIIITASGGPFRTTSLAEMATVTPERAVQHPNWSMGAKISIDSATMMNKGLELIEAYHLFQIPLEKFEILVHPQSVIHSMVEYLDGSILAQIGSPDMRTPIGHTLAWPKRMETPAESLDFTKLRQMDFEAPDYERFPALTLAMESIKSGGARPAVMNAANEIAVAAFLDKKIGFLDIAKIVEKTLDHYTPATPSSLEDVFAIDNEARIQAAALMESLPA

SEQ ID NO: 1135 - protein, 244 aa, Shewanella oneidensis MR-1
MSSLNLSPAAVSELVFSQTGLALISLLLTLFCYFAAKILYQRHRVWWLAPIVLAPVVITLLVFNLDIPLPTYFEYTHWLMAMLAPATIAFALPIYRERKLIRQYPLTIAFGVIAGLLLGMVSSWLLVKFVPLPVELSKSLLVRSVSTPFAMEATGAFGGVPELTAMMVLITGIIGMLVCEPLFKLMHIRTSLGKGVALGASAHGAGAAKASELGQQEGVIASLTMIFIGIAMVLGAPFFALIFS

SEQ ID NO: 1136 - protein, 342 aa, Gossypium arboreum
MADLRSAFLNVYSQLKSELLQDPSFELTDESRQWVERMLDYNVPGGKLNRGLSVIDSYRLLKDGKELTQDEIFLTSALGWCIEWLQAYFLVLDDIMDSSHTRRGQPCWFRLPKVGMIAVNDGVILRNHITRILKNHFRGKPYYVDLLDLFNEVEFQTASGQMIDLITTLEGEKDLSKYSLQQHRRIVQYKTAYYSFYLPVACALVMCGENLDNHIDVKNILVDMGIYFQVQDDYLDCFGNPETIGKIGTDIENFKCSWLVVKALEFCNEEHNKVLYENYGETRPANVAKVKALYNELNLKGVFEDYESKSYERLVTSIEAHPSKPVQAVLKSFLGKIYKRQK

SEQ ID NO: 1137 - protein, 229 aa, Salmonella enterica subsp. enterica serovar Typhi
MNNVQLSVLCLVITLGIYFANKRLYRRFRKLPLMPLVLTPALLVLMLVFGHISWQNYISESHWLLWLLGPATIAFAVPVYDNLAIIKRHWMSLTAGVVTATVVAVTSSVWLARLFTLSDEIQRSLAVRSVTTPFALAAAEPLGGQPDLVALFVVVTGVFGMAVGDALFLRLSIREGMAKGAGFGAASHGAGTARSYELGQQEGVVASLVMMLSGVVMVLAAPLVARVMF

SEQ ID NO: 1138 - protein, 458 aa, Listeria innocua
MEEQKEELQRGLKNRHIQLIAIGGAIGTGLFLGAGKSIHLAGPSIMLVYLIIGAILFFVMRALGELLIHNPTTGSFTEFAEQFIGPWAGFITGWTYWFCWIVTGIAEITAVGMYVKFWVPDLPQWIPALGCVLILLLFNLATVKAFGEIEFWFAIIKVVVIIALIVIGFVLVFIGYKHGTSTASFSNLIDYGGFFPNGVAGFLLAFQMATFSFVGIELVGVTAGEADDPERTLPKAINNIPIRILIFYIGALLVLMSIYPWSNIDPDTSPFVSVFTMIGIPAAAGIINFVVLTAAMSSCNSGIFSTSRMLYTLSAEGKAPKKMHHLSSNGVPATALITSTACLLIGVFLNYILPEQVFILVTSIATICFIWVWGIILVAHLRFRHKHPEISAKSKFKMPLSPFMNWVSLIFFAGLLIILGFAADTRIALFVTPVWFLILAIAYQILKASNRKTKIRHN

SEQ ID NO: 1139 - protein, 100 aa, Glycine max
  unsure (1)..(100): unsure at all Xaa locations
VNAELLHFYVGRRVRIVVQVVRSDGGVVIGKSTDEKQLVXVKGSPPPAAPLTTFVEVYGLVNSDKSIGAEIWTNFGDAIHMDSYNKLCQLAHGEFKHLFL

SEQ ID NO: 1140 - protein, 243 aa, Glycine max
MAFPDPSMSASPQRKMGRGKIEIKRIENTTNRQVTFCKRRNGLLKKAYELSVLCDAEVALIVFSSRGRLYEYANNSVKATIERYKKASSDSSGAGSASEANAQFYQQEADKLRQQISNLQNNNRQMMGDSLGSLTAKDLKNLETKLEKGISRIRSKKNELLFAEIEYMQKREIDLHNNNQLLRAKIAESERNHHNMAVLPGGSNYDSMQSSQQQFDSRGYFQVTGLQPNNQYARQDQMSLQLV

SEQ ID NO: 1141 - protein, 518 aa, Lilium longiflorum
ASHQAMEVQSMPVTPRSGTPRVTPPISAPPSQLHSPSLTRSPLLGPATPRASRLTPLASPIRKAIVSMRGYLEEVGHVTRLDPQDEWLPITQSRNGNSYYSAFHTLSSGIGFQALVVPVAFTFLGWLWGIVLLSVGFCWQLYTLWLLVELHESVPGTRYSRYLHLAKDTFGEKLGKFMALVPIIYLSAGTCSALIIVGGSTMKGFFQIVCGPTCRYMPLTTVEWYLVFVCLAVVLAQLPHLNSIAGVSLIGAVTAVTYCTMIWVISVRKGKIPNISYEAVDTSWDVARVLSILNAIGIIAFAFRGHNLVLEIQGTMPSTQKHPARVPMWRGVKVAYVLIAFCLFPVALIGFWSYGNQIPPNGVLTALNQFHSHDTSRTILGLTTLLVVINCLSSFQIYAMPIFDNMEAGYTSKKNKPCPQWLRSGFRAFFGAVAFLISSAFPFLPQLAGLIGAVALPVTFAYPCFMWIVIKKPERFGVMWWLNWCLGCLGMGLSVVLVVAGVWRLVETGVNISFFDPQ

SEQ ID NO: 1142 - protein, 167 aa, Zea mays
MAEKKMVTLRSSDHEEFEVEEAVAMKSEIIRLLIEDDCADNAIPLPNVDSKTLALVIEYCNKHVHAAADDSAAAETSNASSAGGSGEVDLKKWDAEFVKVEQATLFDLILAANYLDIKGLLDLTCQTVADMMKGKSPEEIRRTFNIKNDFTEDEEEEIRRENSWAFD

SEQ ID NO: 1143 - protein, 306 aa, Oryza sativa (japonica cultivar-group)
MYENCKVIDLGVTNCRVVESVGEHVEGFAAGDPVVPTFLGQCTECVDCASERSNVCSTYRFAVRPGMPRDGTARFRDRHGAPIHHFLGVSSFSEYTVVDANQVVRVDPAVPPATASLLSCGATTGVGAAWKLAKVEPGSSVAIFGLGAVGLAVAEGARICGKKFGVTHFINPQELGDKPVSQAIIEMTDGGADYCFECIGLASVMSDAFRSSREGWGKTIILGVEMHGAPLSIPSLEILNGKCVMGSLFGGVKPKQDIPILADKYLNKELELDKFITHEVPLKDINTAFDLLLQGKSLRCTIWMDK

SEQ ID NO: 1144 - protein, 330 aa, Rhodobacter sphaeroides
MPDTILVTGGAGFIGSHTCKALARAGHRPVSFDNLSTGHADAVRFGPLVQGDVRDPNAVEAALRAHGAKAVIHFAASAYVGESMADPAKYYDNNVGGMIGLVQGCRAAGVSRIVFSSSCATYGTPDRLPIRETTPQRPINPYGRTKLIGEEILRDLGVEGMRHVALRYFNAAGADPEGELGERHDPETHLLPLALRAASGQGGPLSIFGTDYPTPDGTCIRDYIHVADLARAHVLALGRLMAGGESLAVNLGTGRGQSVREIVAAIERITGRAVPVRLEARRPGDPAELVADPALAASELGFRTQLSDIGSIVRHAAPWFGLEPAHVEAA

SEQ ID NO: 1145 - protein, 216 aa, Salmonella enterica subsp. enterica serovar Typhi
MLDLFADEAPWQEPLAPGAVVLRRFAFRAAQSLLDDIGFVASQSPFRQMVTPGGYTMSVAMTNCGALGWTTDGHGYCYAVRDPLTDKPWPALPLSFASVCRQAAIAAGYASFQPDACLINRYAPGAKLSLHQDKDEPDLRAPIVSVSLGVPAVFQFGGLRRSDPLQRILLEHGDIVVWGGESRLFYHGIQPLKAGFHPMTGEFRYNLTFRQAAEKE

SEQ ID NO: 1146 - protein, 417 aa, Vibrio vulnificus CMCP6
MSELKQEITLLSGIGQLSTTLMGTGLFMIPAIAASIAGQYSLWAWLFLFVLICPVALTFAQLGKRYPNAGGTAYFVRQAFDKRLESAVAWLFVSVIPVGVPAAIALAAGFLQQLLPSALNHALIAQLITVALLVAVNLLGARSSGHLQTLIALAIFALVGAFLWRGEVSVEDLHMPIFTSDSLLPIGAALAVMFWCFVGIEAFAHMGEEFKNPQRDFPIAIVIGCFVAGATYWACSVVILKFGAYGSAEFDSASIPWLSEQLFGTQVKTLISLIGFSACFASINLYTQSLSRMIWAQAREHNPSGKMAKISRRGVPINATLVVGLVLALACLVGEISGLDLEFFLKLANSVFVLIYLLAMLAAFKLLNGHAKWLAGVSLILCSLVFVCLGWSMLYALSVFALFFLQAKKQMNKAESV

SEQ ID NO: 1147 - protein, 419 aa, Eruca sativa
YHHSYTLFFLVLLQFHHVFSTNTLSSNETLTISSNKTLVSPGDVFELGFLKTNTKNSQDGTDRWYLGIWYKTTSERTYVWVANRDNPLHNSIGTLKISHANLVLLNQFNTPVWSTNLTESVTSPVTAELLANGNFVLRDSKTKDLNHFMWQSFDFPVDTLLPEMKLSRNIKPGNDRILTSWKSPTDPSSGDFTFVLEPHNHGLHEFYLLKNEIEVYRTGPWNQNRFNGIPKIQNWSYIANNFIDNNNEEVAYTFHVNNSNIHSRFRMSSLGYLQVITWTKTIPQRDMFWSFPEDACDLYQVCGSYAYCDINTTPNKCNCIKGFVPKNPDAWTLRDATGGCVRSSRLSCGEGDGFVRMSKMKLPETSEARVDKGIGLEECKERCVRDCDCTGFANMDIGSGGSGCVMWIDELVGMRNYVA

SEQ ID NO: 1148 - protein, 240 aa, Ferroplasma acidarmanus
MVPMSIYYIIESAVLLILLFVLALKFRIFDLKGTIAALIVGVIIVVLGSLYWLILMLIFAITAQMATKYRIKEKTKMKLQEGENGERHASNVIYAAVIGIAIAAMHFAKIGGFPYFLIFGVSFASVNADTFASEIGVFDSKVYMITGFKKITPGVNGGVSLLGEGAALLGAFIIGLSYIILDFHGFAIIPLLAITILGFVGCQIDSILGAVFENKGKMSKGQVNAVSTLLAVALAFVIFI

SEQ ID NO: 1149 - protein, 338 aa, Shigella flexneri 2a str. 2457T
MRVLVTGGSGYIGSHTCVQLLQNGHDVIILDNLCNSKRSVLPVIERLGGKHPTFVEGDIRNEALMTEILHDHAIDTVIHFAGLKAVAESVQKPLEYYDNNVNGTLRLISAMRAANVKNFIFSSSATVYGDQPQIPYVESFPTGTPQSPYGKSKLMVEQILTDLQKAQPDWSIALLRYFNPVGAHPSGDMGEDPQGIPNNLMPYIAQVAVGRRDSLAIFGNDYPTEDGTGVRDYIHVMDLADGHVVAMEKLANKPGVHIYNLGAGVGSSVLDVVNAFSKACGKPVNYHFAPRREGDLPAYWADASKADRELNWRVTRTLDEMAQDTWHWQSRHPQGYPD

SEQ ID NO: 1150 - protein, 238 aa, Saccharomyces cerevisiae
MDYEKFLLFGDSITEFAFNTRPIEDGKDQYALGAALVNEYTRKMDILQRGFKGYTSRWALKILPEILKHESNIVMATIFLGANDACSAGPQSVPLPEFIDNIRQMVSLMKSYHIRPIIIGPGLVDREKWEKEKSEEIALGYFRTNENFAIYSDALAKLANEEKVPFVALNKAFQQEGGDAWQQLLTDGLHFSGKGYKIFHDELLKVIETFYPQYHPKNMQYKLKDWRDVLDDGSNIMS

SEQ ID NO: 1151 - protein, 132 aa, Zea mays
MALEWVVLGYAAGAEAVMLLLLTLPGLDGLRRGMVSVVRSALKPMMSVVPFCLFLLMDIYWKYETRPTCDDEHACTPSEHLRHHKSVMKSQRNALLIAAALLLYWILFSVTQLVVRLDQMQQRVDKLKKRDD

SEQ ID NO: 1152 - protein, 185 aa, Sandersonia aurantiaca
MSLLSDLVNLNLTDTTEKIIAEYIWIGGTGMDLRSKARTLPGPVSDPSKLPKWNYDGSSTGQAPGQDSEVILYPQAIFKDPFRRGNNILVMCDCYTPAGSPSHQQRHIAAKLFSHPDVVVEEPWYGIEQEYTLLQKDVKWPIGWPIGGYPGPQGPYYCAAGADKAFGRDVVDAHYKACLYAGINI

SEQ ID NO: 1153 - protein, 356 aa, Zea mays
  unsure (1)..(356): unsure at all Xaa locations
MATVEVVVANGLGGADTKTVFKETYSKLKEEMLDDPAFEFTDESLQWIDRMLDYNVLGGKCNRGLSVIDSYRILKGVDVLSKEETFLACTLGWCIEWLQAYFLVLDDIMDNSQTRRGQPCWFRVPQVGLIAVNDGIILRNHISRILQRHFKGKPYYVDVIDLFNEVEFKTASGQMLDLITTHEGEKDLTKYNLTVRRHIVQYKTAYYSFYLPVACAXLLLAGENLDNFGDVKNILVEMGTYFQVQDDYLDCFGDPKFIGKIGTDIEDYKCSWLVVQALERADEKQKSILFESYGKSDPACVAKVKDLYKELKLEEVFQAYERESYNKLIADIEAQPSKAVQSVLKSFLHKIYKRDK

SEQ ID NO: 1154 - protein, 245 aa, Afrostyrax sp. Cheek 5007
ALSIAGAVQSQKLAVRAISQLRSLPGGDIKLLCDTVVESVRELTGYDRVMVYKFHEDEHGEVVAESKRSDLEPYLGLHYPATDIPQASRFLFKQNRVRMIVDCNAMPVPVSQDEGLMQPLCLVGSTLRAPHDCHAQYMANMGSIASLAMAVIINGNDDEAIGGRNSMRLWGLVVCHHTSARCIPFPLRYACEFLMQAFGLQLNMELQLASQLLEKHVLRTQTLLCDMLLRDSPTGIVTQNPSTMD

SEQ ID NO: 1155 - protein, 152 aa, Olea europaea
MVKGVTVLNSSEGVTGTVYFTQEGDGPTTVTGNLSGLKPGLHGFHVHALGDTTNGCMSTGPHFNPVGKEHGAPGDENRHAGDLGNITVGEDGTAAINIVDKQIPLTGPHSIIGRAVVVHSDPDDLGRGGHELSKSTGNAGGRVACGIIGLQG

SEQ ID NO: 1156 - protein, 250 aa, Zea mays
MVKAYPTVNEDYLKAVDKAKRKLRGLIAEKNCAPLMLRLAWHSVGTFDVVTKTGGPFGTMKNPVEQAHGANAGLEIAIRLLEPIKEQFPILSYADFYQLAGVVAVEVTGGPDVPFHPGRQDKPEPPPEGRLPDATQGSDHLRQVFSTQMGLSDQDIVALSGGHTLGRCHKDRSGFEGAWTSNPLIFDNSYFKELLSGEKEGLLQLPSDKALLSDPSFRPLVDKYAADEDAFFADYAEAHLKLSELGFAEA

SEQ ID NO: 1157 - protein, 392 aa, Lolium perenne
TGYDRVMVYKFHDDEHGEVLAESRRADLEPYLGLHYPATDIPQASRFLFRQNRVRMIADCHAAPVRVIQDPAMPQPLCLVGSTLRSPHGCHAQYMANMGSIASLVMAVIISSGGEDEHNMGRGAVPSAMKLWGLVVCHHTSPRCIPFPLRYACEFLMQAFGLQLNMELQLAHQMSEKHILRTQTLLCDMLLRDSPTGIVTQSPSTMDLVKCDGAALYYHGKYYPLGITPTEAQIKDIIKWLTVCHGDSTGLSTDSLADAGYPGATELGDAVCGMAVAYITPSDYLFWFRSHTAKEIKWGGAKHHPEDKDDGQRMHPRSSFKAFLEVVKSRSLPWENAEMDAIHSLQLILRDSFRDAGEGTSNSKAIVNGHVQLGELELRGIDELSSVAREMV

SEQ ID NO: 1158 - protein, 394 aa, Zea mays subsp. mays
  unsure (1)..(394): unsure at all Xaa locations
LGAERRARLPPGEMGWPLVGGMWDFLRAXKSGKPDXFIASFVRRFGRTGVYRSFMFSSPTVLVTTAEGCKQVLMDDDAFVTGWPKATVALVGPRSFVAMPYDEHRRIRKLTAAPINGFDALTGYLPFIDRTVTSSLRAWADHGGSVEFLTELRRMTFKIIVQIFLGGADQATTRALERSYTELNYGMRAMAINLPGFAYRGALRARRRLVAVLQGVLDERRAARAKGVSGGGVNMMDRLIEAQDERGRRLDDDEIIDVLVMYLNAGHESSGHITMWATVFLQENPDMFARAKAEQEAIMRSIPSSQRGLTLRDFRKMEYLSQVIDETLRLVNISFVSFRQATRDVFVNGYLIPKGWKVQLWYRSVHMDPQVYPDPTKFDPSRWEGHSPRAXTFL

SEQ ID NO: 1159 - protein, 499 aa, Lycopersicon esculentum
MKVPEDVIEEVLAGTEVPAIVHGVPKSTKKKKNLWEMEAQFMKTVLGRGSYSFFDNRRNKKKSSQLFNVFQEKPDFENCNGWSTVINRKKLPALKGSQIGIYVVNLTKGSMMGPHWNPMATEIGIAIQGEGMVRVVCSKSGTGCKNMRFKVEEGDVFVVPRFDPMAQMAFNNNSFVFVGFSTTTKKHHPQYLTGKASVLRTLDRQILEASFNVGNTTMHQILEAQGDSVILECTSCAEEEKRLMEEEMRKEEEEAKKKEEARKAEEERREKEAEEERKRQEEEARKREEEEIRRRQEEEEARRRQEEEEEERERQEARKKQEEEEAAQREAEQARREEEEAEKRRQEEEESRREEKARRRQQEEARRREEEEAAKRQHEEEAEREAEEARRIEEEEAQREAEEARRIQQEEEAERARRREEEAETRRKEEEEEESRRQEEESRRSEEEAAREAERERQEEAERQEEARRREEETEERHQQEETEEEEPGQPEMNGYSSN

SEQ ID NO: 1160 - protein, 309 aa, Methanopyrus kandleri AV19
MILVTGGAGFIGSHVVEELVDRGHDVVVLDNFSVGCEENLREVRDDIEIVRADVTDPRAVERTFREYRPEAVIHLAAQVNVRYSMESPFVDARINALGTLNLVSLAAEHDVERFVYASSGGAVYGEPEYLPVDEEHPTRPISNYGVSKLAGEYYVRVYAERDGFEYVILRYANVYGPRQDPRGEAGVIPIFLLRAARGEPLTIFGDGEQTRDFVFVEDVARVTAEAVERGDGVYNIGTGRETSVNDIVNAVKAVTGVDVEVVYEDPRPGEVRRIYLDPSRAREELGFEPRVDLEEGIERTWEWIRRKIA

SEQ ID NO: 1161 - protein, 110 aa, Zea mays
QAVPTFPSNLGVRFLFLAETNSGAFLTKRWGTPLPPPGPDGSVALLPSPGTDMTGICFLDQLRLDTYPLYRNLVFDYFALSPFYDITCNNESLRSRQIHPLNMSHLTYNT

SEQ ID NO: 1162 - protein, 348 aa, Mesorhizobium loti
MRALVLEKKGELSLREIALPLDVGPDDVKIAIHTVGVCGSDVHYYTHGAIGSYVVRAPMVLGHEAAGTVVETGANVETFKAGDRVCMEPGVPNLSSRATKLGIYNVDPDVSFWATPPVHGVLAPYAVHPAAFTYKLPDNVSFAEGAMVEPFAIGMQAASRARIVPGDVAVVVGCGPIGIMIALAALAGGCSKVLISDFSAPKLKIAAQYAGIVPVNIGERSLVDAVAAATDKWGADIVFEASGSPKAFADLFDVVRPGGAVVLVGLPVEPVALNVPAAISKEVRIETVFRYANIFDRALQLIASGKVDLKPLITGTYDFADSIKAFERAAQGNPEDVKLQILLTGEKG

SEQ ID NO: 1163 - protein, 266 aa, Leptospira interrogans serovar lai str. 56601
MQRASLHNLKIIGSEKETIVFSHGFGCDQSTWNKLIPNLKDHYRLVLFDTIGSGKTDPSLFSADRYSNLYSYAEDLILLMDELKIRNSLYVGHSVSGMIGLITSIRRPELFSKLAFISASPRYLNDTNYKGGFEQTDLDQLFAAMETNFFSWAGGFAPLAMGNPDRPELAQSFAESLREIRPDIGLTVSRTIFQSDHRKDLNQCKQPVLILQPSSDIAVPIEVGKYLSANIPQAIFKSIPATGHLPHFSSPESVLQEIKSFFKSLN

SEQ ID NO: 1164 - protein, 399 aa, Oceanobacillus iheyensis HTE831
MSSTTKVSSAVMQTYNRFPITATKGKGSFLWDDNGEKYLDYTSGIATCNLGHVPDNVQHAISNQLKDLWHCSNLYHIPSQEKLAALLTEYSCLDQVFFCNSGAEANEAAIKIAKKYAKDKGYDDRTEIITFEQSFHGRTGSTMAATAQEKIHQGFTPLTEGFRYLPFNNKESLSEIDNGKTSAVLLEVIQGEGGIHTAEKDWLKQLAAICKQADILLMIDEIQTGIGRTGSLFAYQPYGIEPDVITVAKGLGSGFPIGAMLAKQHIAASFSPGTHGSTFGGNPVAAAAGIATLKEILSDGFLENCKEGQEELFNQLKSIKEISPLIKDIRGKGYLMGIEVMNQASAWIEKLREKQILVLPAGEKVVRILPPLTTTKEELQICIQALKEVALELGGNTNG

SEQ ID NO: 1165 - protein, 184 aa, Lilium hybrid division I
MDRKVGTNEDVEVRKGPWTMEEDLILINYIANHGDGVWNTLARSAGLKRTGKSCRLRWLNYLRPDVRRGNITPEEQLLIMELHDRWGNRWSKIAKELPGRTDNEIKNFWRTRVQKKSKNGESSEGQISMLSDETSAMQMEDVDVGVSQTSYDQGQTSNNLDAFEIPFEPGDNLLSVEELWAMQY

SEQ ID NO: 1166 - protein, 208 aa, Glycine max
  unsure (1)..(208): unsure at all Xaa locations
PHTRLMRRYRSAPHAEXYIIVADNIALIISISEYYNESLQIPWRGVXIACAIDIFFTLTSGLINATTNQQPGLDIITEYIIAYMYTDRTVDNMCLKVYSLHXALASTHXLSFCQELLNIATHIVKIPPRTMDIAHVVRTILSAYIYTVSVWRMMRTIPHLCDTTMLDPDRRLTXPRDNVFYEASDIWXLIGPRVTVRDLGEYAKVNSF

SEQ ID NO: 1167 - protein, 262 aa, Picea abies
RLAEPYKGIGDCFGRTIKDEGFIALWRGNTANVIRYFPTQALNFAFKDYFKRLFNFKKDRDGYWKWFAGNLASGGAAGASSLLFVYSLDYARTRLANDSKAAKKGGERQFNGLVDVYKKTLKSDGIAGLYRGFNISCVGIIVYRGLYFGMYDSLKPVVLTGDLQNNFLASFLLGWGITIGAGLASYPIDTVRRRMMMTSGEAVKYKSSLDAFNQIVKNEGTKSLFKGAGANILRAIAGAGVLAGYDQLQLILLGKKYGSGGG

SEQ ID NO: 1168 - protein, 321 aa, Agrobacterium tumefaciens str. C58 (Cereon)
MPVGRRHVHGRARWRRPRVRTAWLRTDRKRKDVDMAQQNAEHIADWRGQSGERWAAYQARLDAMMAPFGQAAIEAAAPTTGERVLDVGCGAGASSRDLAARVGAEGHVLGVDISEPLIERARALAPQDMSVVFRVTDASRAELPDGAFDILFSRFGVMFFNDPTGAFAHMRRALKPGGRAAFVCWRGVTENDWMRLPMGAMKGILPSMTPPGPEAPGPFSFGDQERVERILTKAGFTDIAIEPFDASVSFGEGATRDAALDDAVNMTLEVGPLSRVLADQPDDIRDRASVAVRAALSGCPGERSVMINGATWIVTARNPAS

SEQ ID NO: 1169 - protein, 139 aa, Glycine max
FGTVLVFAPGFGISPIRSLIESGFYSSKRFYVRLYYGARTLQKMAYQDRFKNWESSGVKIVPVLFQPNKSWTGESGYVQAAFSKKKQIFDPLATGAVLFGQKQMPEEVPPIFVAAGVSPYKIFKNFCPKWTFGPCCILF

SEQ ID NO: 1170 - protein, 771 aa, Bacteroides thetaiotaomicron VPI-5482
MINKKIFFSLLLLAAGFLSAAAQKSPQDMDRFIDALMKKMTVEEKIGQLNLPVTGEITTGQAKSSDIAAKIKRGEVGGLFNLKGVEKIRDVQKQAVEQSRLGIPLLFGMDVIHGYETMFPIPLGLSCTWDMTAIEESARIAAIEASADGISWTFSPMVDISRDPRWGRVSEGSGEDPFLGAMIAEAMVLGYQGKDMQRNDEIMACVKHFALYGAGEGGRDYNTVDMSRQRMFNEYMLPYEAAVEAGVGSVMASFNEVDGVPATANKWLMTDVLRGQWGFNGFVVTDYTGISEMIDHGIGDLQTVSARAINAGVDMDMVSEGFVSTLKKSIQEGKVSMETLNTACRRILEAKYKLGLFDNPYKYCDLKRPARDIFTKAHRDAARRIAAESFVLLKNDNVTLRPGTPAEPLLPFNPKGNIAVIGPLADSRTNMPGTWSVAAVLDRCPSLVEGLKEMTAGKANILYAKGSNLISDASYEERATMFGRSLNRDNRTDEQLLNEALTVANQSDIIIAALGESSEMSGESSSRTDLNIPDVQQNLLKELLKTGKPVVLVLFTGRPLTLTWEQEHVPAILNVWFGGSEAAYAIGDALFGYVNPGGKLTMSFPKNVGQIPLYYAHKNTGRPLAQGKWFEKFRSNYLDVDNEPLYPFGYGLSYTTFSYGDIDLSRSTIDMTGELTAAVMVTNTGTWPGSEVVQLYIRDLVGSTTRPVKELKGFQKIFLEPGQSEIVRFKIAPEMLRYYNYDLQLVAEPGEFEVMIGTNSRDVKSARFTLK

SEQ ID NO: 1171 - protein, 64 aa, Zea mays
MARLHWLEAVLPLGIIGGMLCIMGNAQYFIHKAAHGRPKHIGNDMWDVAMERRDKKLVEQSSGN

SEQ ID NO: 1172 - protein, 154 aa, Narcissus pseudonarcissus
KVMKKASFIGVSTTTTFYLLCGCLGYAAFGNKAPGNILTGFGFYEPFWLVDIANLCIIIHLVGAYQVFSQPIFSAVETWITNRHPNINFLNHDRVLVIGKCFRYKINLFRLIWRTLFVIACTFIAILMPFFNDILGFLGAVGFWPLTVYFPTEM

SEQ ID NO: 1173 - protein, 578 aa, Penicillium chrysogenum
MVFLPPKESGQLDPIPDNIPISEFMLNERYGRVRHASSRDPYTCGITGKSYSSKEVANRVDSLARSLSKEFGWAPNEGSEWDKTLAVFALNTIDSLPLFWAVHRLGGVLTPANASYSAAELTHQLLDSKAKALVTCVPLLSISLEAAAKAGLPKNRIYLLDVPEQLLGGVKPPAGYKSVSELTQAGKSLPPVDELRWSAGEGARRTAFVCYSSGTSGLPKGVMISHRNVIANTLQIKAFEQNYRDGGGTKPASTEVALGLLPQSHIYALVVIGHAGAYRGDQTIVLPKFELKSYLNAIQQYKISALFLVPPIIIHMLGTQDVCSKYDLSSVTSLFTGAAPLGMETAADFLKLYPNILIRQGYGLTETCTVVSSTHPHDIWLGSSGALLPGVEARIVTPENKEITTYDSPGELVVRSPSVVLGYLNNEKATAETFVDGWMRTGDEAVIRRSPKGIEHVFIVDRIKELIKVKGLQVAPAELEAHILAHPDVSDCAVIAIPDDRAGEVPKAIVVKSASAGSDESVSQALVKYVEDHKARHKWLKGGIRFVDAIPKSPSGKILRRLIRDQEKEARRKAGSKI

SEQ ID NO: 1174 - protein, 476 aa, Glycine max
NTINKLESLPASYNMSNQPIVRSDSIFMTFESEMKHLVTVGLQAEYSYARSLARFSASLGPIAWKIASHRIQHALPTGCKFGRGWVGEYEPLPTPILMVNNRVQKETSLVMKLHSTTELPKGNQNCKNVESSILHPVNGQKLEGNPPSIPDLEGKPFFGSAAVRFSAPVNILNQVQNAQSRKLGKSENKKQLELNSLTSSNQNNNDLVAKFTSNAPAVESKPREMGPRNMFKHPHTNGVVSGEFPNGKVTNTSLIRQVTGSSPESTSHQSSRAAPAVVHGQEQGLSDPVQLMRMFAERAQKQHTSSNHSLVDTPPVTLSGPSGQRNDSGNASAAAAHAWMSVGAGGFKQGPNNSSSPKNHISADSLYNSTRELHQHISRIRGEFPSGGMPFQPFQAGAVSQFPNRPMVFPQLASADQSRFQMQPPWGGLSPHSQSRQKQETLPPDLNIDFESPGSPVKQSPGVLVDSQQPDLALQL

SEQ ID NO: 1175 - protein, 205 aa, Juglans regia
KRRNGLLKKAYELSVLCDAEVALIVFSSRGRLYEYANNSVKSTIDRYKKARADSSNTGSVSEANTQFYQREAATLRQQINSVQESNRKMLGESLSGMAFRDLKSLESKLESGIRRIRSKKNELLFAEIEYMQKREVDLHNNNQLLRAKIAENERNQQNLNVMPGGGNLELMHSQPFDSRNYFQVDALQPNHDQYPRQDQMALQLV

SEQ ID NO: 1176 - protein, 638 aa, Glycine max
MAMVRCFSLLPVRKDKHKGNERSSKEDFNTLLAKLQSTKKITSESTTFDAIGIQKNSRFNATRIMTLESPVKDEAHETYKDEDSPLIKRELSDFDLQDHEAVASNAYDTTDKKVEYPILYENQVNNELEDKNDRFSQKSVDTTESGHITDPGIGKADSWASPKFKRHFSNLEKFDEHGKITRHLPASKSKSFENFQELSAMVNLESPRSVMSHYSADRVLLKRHSSSQVLPSRSKKLWWKMILWSHRNTRRTLPSNSTLVPTSAALNSGYSSDTLELKQGKALRPVKSSDSITMESFNKRRIGKNIDNQRGSRFQSDQWIAFSTESSSFSRVDAWLEPRRLEQILPQDDFADDNARRSIVFPPSPNAGGSMMRTTSQLTYPDANLSKEALTAISVVQSLNPASTIAHISGIGVKAIPAISHLSSLRAVNLSNNFIVHISPGVLPKGIQTLNLSKNKISALEGLRELAKLRVLDLSYNRISRIGQGLSSCTLIKELYLVGNKISDVEGLHRLLKLTVLDLSFNKITTAKALGQLVANFNSLKALNLLGNSIQSNISDDQLSKAVCGLLPKMVYLNKQPVKAHRTRGILSDSVARAALGSSTRSCNRRSIRRVGHGGSNLSRGNRRSTSVSQKSTNRTRK

SEQ ID NO: 1177 - protein, 205 aa, Zea mays
  unsure (1)..(205): unsure at all Xaa locations
MMAEAWTPVLLPATAPCFWQQDTHSVLWRRGDAWTVEENKLFEKALAQIDRNAPDRWEKVAAVLPWKTVDDVRSQYHALEKDVGVIEAGGLVPFPRYSGSVPPPSGFALXGLGAVATAGSGARAARRRXQERKKGVPWTEEEHKLFLQGLKKYGRGDWRNISRFSVRTRTPXTQVASHAQKYFNRQFNPASRNSKRKSIHDITTP

SEQ ID NO: 1178 - protein, 341 aa, Burkholderia fungorum
MEYRHLGASGFKVPVLSFGTGTFGGKGEFFQAWGATDVAEARRLIDICFDAGVTMFDSADIYSSGASESVLGEALKGKRDKAIISTKATFRFDDGPNSVGSSRFHLIQAVDAALKRLQTDYIDLFQLHGFDARTPVAEVLSTLDDLVRAGKIRYTGVSNFSGWHLMKSQDVADRYGYPRYVANQTYYSLVGRDYEWELMPLGIDQGVGAVVWSPLGWGRLTGKIKRGQPLPDSSRLHKTADMGPPVPDEYLFRVLDAIDEIAAETGKTVPQIALNWLLQRPTVSTVLIGARNEEQLRQNLGAVGWNLTPEQVAKLDAASAVRPAYPYWHQEGFAERNPKAV

SEQ ID NO: 1179 - protein, 256 aa, Zea mays
  unsure (1)..(256): unsure at all Xaa locations
MAKNYPTVSAEYSEAVXKARRKLRALIAEKSCAPLMLRLAWHSAGTFDVXSRTGGPFGTMKHQSELAHGANAGLDIAVRLLEPIKEEFPILSYADFYQLAGVVAVEVTGGPEIPFHPGREDKPQPPPEXGRLPDATKGSDHLRQVFGKQMGLSDQDIVALSGGHTLXGRCHKERSXGFEGAWTTNPLXFDNSYFXELLSGDKXRALLQLPSDKALLSDPVFXRPLVEKYAADEKAFFDDYKEAHLKLSRTGGLLML

SEQ ID NO: 1180 - protein, 236 aa, Glycine max
SSTGFSLQAMDSSHVALVALLLRSEGFEHYRCDRNISMGMNLNNMAKMLKCAGNDDIITIKADDGSDTVTFMFESPTQDKISDFEMKLMDIDSEHLGIPEAEYHAIVKMPSSEFARICKDLSSIGDTVVISVTKEGVKFSTKGDIGTANIVCRQNTSVDKPEEATVIEMNEPVSLTFALRYMNSFTKATPLSNTVTISLSNELPVVVEYKIAEMGYVRFYLAPKIEEDEEDTKPQV

SEQ ID NO: 1181 - protein, 970 aa, Pseudomonas syringae pv. tomato str. DC3000
MPLATLIRRSSLPCPEVSVDQALQLLAQHYGLSGTLKTLGSQQDRNFLLETDKRRYVLKICHGAYSTRELMAQHAALQHLASHRAVSVPGVIRANDTEPLLSVDVDGQAVHVRLLEFIDGQSLGHVGHLSHDIVVGLGELCARVDLALADFEHPGLERILQWDPRHAQALIKHLLPVIKDADARACVIEAGEQAHRRLLPLIPSLPIQAVHLDITEHNVVWLRDSQRQWQMQGLIDFGDLVSTWRVADLSVTCAALLHHAEGDPLYILPAIRAYHALNPLKREELQALWPLIVARSAVLVLSSEQQASVEPGNAYIQANLAGEWNIFDVATSVPMALMEAAILQAAGVDLPSVDQPVYQPLLPGLPGLTPTVVDLGVLSEHFVAGNWEQGGIDEYLLSQAAGDDGLAASRFGEYRLSRTLPDCAKEPETFALHVELHVPAGTAVHAPFSGTLRLTADAALLLVGDAISLKLWGVLPNASLADHVSAGALIGQGGGSLLLQLCTAPDLSPPLFTTPSWAAAWRRFCPSPSMLLGFDCDAPALADPAQLLARRDASFARSQKHYYQAPPQIERGWRNHLIDMQGRSYLDMLNNVAVLGHGHPRMAYEAARQWSLLNTNSRFHYAAIAEFSERLLKLAPDGMDRVFLVNSGTEANDLAIRLAWAYSGGRDMLSVLEAYHGWSVATDAISTSIADNPQALSTRPDWVHPVTAPNTYRGPYRGADSAPEYVRSVDQVLAALAEQQRQVAGFICEPVYGNAGGISLPAGYLQQVYQKVRAVGGVCIADEVQVGYGRLGHYFWGFEEQGVVPDIISMAKGMGNGHPLGAVITRREIAEALEAEGYFFSSSGGSPVSCRIGMAVLEVMEEEKLWDNARIVGDHFKARLQALTDKHPLVGAVHGMGFYLGVELVRDRQTLEPATEETAQLCERLRELGIFMQPTGDHLNILKIKPPMCTTRQSVDFFVDNVSKVLYELE

SEQ ID NO: 1182 - protein, 603 aa, Oryza sativa (japonica cultivar-group)
MVKKSKKSKSKRVTLRQKHKVLRKVKEHHRKKRKEAKKEGKSHRKKVEKDPGIPNEWPFKEQELKALEARRAQALQELELKKEARKERARKRKLGLLEDEDIANLASAASAQGSEFAEKDAAKENASLDVVKSQVTLFLNLLVVSPDHSERAFYKELVKVIEASDVILEVLDARDPLGTRCIDMEKMVRKADPSKRIVLLLNKIDLVPKESVEKWLTYLREEMPTVAFKCNTQEQRTKLGWKSSKIDKSSNIPQSSDCLGAENLIKLLKNYSRSHELKLAITVGIVGLPNVGKSSLINSLKRSRVVNVGSTPGVTRSMQEVQLDKKVKLLDCPGVVMLKSSNSGVSVALRNCKRVEKMEDPISPVKEILDLCPHEKLLSLYRVPTFTSVDDFLQKVATLRGKLKKGGIVDVEAAARIVLHDWNEGKIPYFTVPPKRDAVDDSDAVIISETGKEFNIDEIYKAESSYIGGLKSLEEFRHIEIPSNAPPQIDEEMLEDGKKQNEPAQENHDESMSDANEREGAKTASASTQNDKLYTAEGILDPRKRKAEKKRRKANKFSVLTDMDADYDFKVDYQMKDALAEEGNDGGDEEPKEADPMTGVDDA

SEQ ID NO: 1183 - protein, 1124 aa, Cucurbita pepo
MSTSRPSQSSSNSGRSRHSTRIIAQTSVDANVQADFEESGNSFDYSSSVRVTSDVSGDQQPRSDKVTTAYLHHIQKGKLIQPFGCLLALDDKTFKVIAYSENAPEMLTMVSHAVPSMGDYPVLGIGTDVRTIFTAPSASALLKALGFGEVTLLNPILVHCKTSGKPFYAIVHRVTGSLIIDFEPVKPYEGPVTAAGALQSYKLAAKAITRLQSLPSGSMARLCDTMVQEVFELTGYDRVMAYKFHDDDHGEVISEVAKPGLQPYLGLHYPATDIPQAARFLFMKNKVRMIVDCRAKHLKVLQDEKLQFDLTLCGSTLRAPHSCHLQYMENMNSIASLVMAVVVNEGDEENEGPALQQQKRKRLWGLVVCHNSSPRFVPFPLRYACEFLAQVFAIHVNKELELENQIIEKNILRTQTLLCDMLMRDAPLGIVSRSPNIMDLVKSDGAALLYKKKIWRLGLTPNDFQLLDIASWLSEYHMDSTGLSTDSLYDAGYPGAIALGDEVCGMAAVRITNNDMIFWFRSHTASEIRWGGAKHEHGQKDDARKMHPRSSFKAFLEVVKTRSLPWKDYEMDAIHSLQLILRNTFKDTDATEINRKSIQTTLGDLKIEGRQELESVTSEMVRLIETATVPILAVDLDGLINGWNTKIAELTGLPVDKAIGKHLLTLVEDSSVEVVRKMLFLALQGQEEQNVQFEIKTHGSHIEVGSISLVVNACASRDLRENVVGVFFVAQDITGQKMVMDKFTRLEGDYKAIVQNPNPLIPPIFGSDEFGWCSEWNPAMAKLTGWSREEVIDKMLLGEVFGVHKSCCRLKNQEAFVNLGIVLNNAMCGQDPEKASFGFLARNGMYVECLLCVNKILDKDGAVTGFFCFLQLPSHELQQALNIQRLCEQTALKRLRALGYIKRQIQNPLSGIIFSRRLLERTELGVEQKELLRTSGLCQKQISKVLDESDIDKIIDGFIDLEMDEFTLHEVLMVSISQVMLKIKGKGIQIVNETPEEAMSETLYGDSLRLQQVLADFLLISVSYAPSGGQLTISTDVTKNQLGKSVHLVHLEFRITYAGGGIPESLLNEMFGSEEDASEEGFSLLISRKLVKLMNGDVRYMREAGKSSFIITVELAAAHKSRTT

SEQ ID NO: 1184 - protein, 186 aa, Xanthomonas campestris pv. campestris str. ATCC 33913
MPESAVTPIRPFLEHTPQLGARVYVDPACTIIGKVQLGDDVSVWPGTVIRGDVNSVQIGARTNVQDGTIIHVSHHSPFNKGGYPTVIGEDVTVGHGTILHACTIEDLCLIGMGACVLDNATIKRYGFVGAGAVVGPGKVVGEAELWLGNPARLARRLSDQEIESLHYSAQHYVRLKDQYLGAASAG

SEQ ID NO: 1185 - protein, 80 aa, Glycine max
MYGFEALTFNIHGGFLEAIVRGHRSGLLTTGDYNNLCQCETLRIKSPEFMTALSSYFSRTARYSSYVRWDNLHTFCIIHL

SEQ ID NO: 1186 - protein, 477 aa, Chlorobium tepidum TLS
MGVVMFFIPSYFSSNFYPLAAAFLFAVVGLVSLKAGILQSLHGEPVVTQEGERVISYGPVLFPLVFFLQALFLWGEHVWILQISMLVLGIGDALAALVGTAAGGRHIENLTKSRKSIEGSMAMFISSLVILSVSIFVFRDAFTGGLVGQPIWKLLALALLLALLVTAVEALLSWGLDNLFIPLAIAYVLYVVDVNSMVTIDGLLLGGLFALFIAIFSIKVKFLNNSGATATFLLGTTIFGVGGMVWTVPMLTFYLLSSILSKLGHKRKAKFDLVFEKGSQRDAGQVYANGGVAWIMMVIYSLTGDPYIFFAYLGTLAAVQADTWATEIGTMWPNAKARLITTFKDVPVGTSGGVSIPGTLASFLGSLLICSSAVLMNVSWIDQVGIVTSLLVIGVSGLFASLVDSFFGATVQAQYYDPIRQKVTERTHSIASDGSRVANELLKGYDFVNNDLVNTLCAISGSAVAYLVVRNLVSLSL

SEQ ID NO: 1187 - protein, 415 aa, Nymphaea odorata
GKPFYAIVHRVVSGLVMDFEPVKPSELPITAAGALQSYKLAGKAISRLQSLPGGSITRLCDTVVEEVHQLTGYDRVMTYKFHDDDHGEVVSEIRKPDLEPYLGLHYPATDIPQAARFLFMKNKVRMICDCRAKPVKVYQDENLKTDLTLCGSTLRAPHSCHLQYMENMSSIASLVMAVVINEGEDEGEDETDPNQRSQKRKRLWGLVVCHNTSPRFVPFPLRYACEFLAQVFAIHVNKEVELENQNALKKNILRTETLLCDMLLRGSPLGIVSQTPNIMDLVKCDGAAFLYGSKLYLLGRTPAESQIRDIAIWLSEYHKDSTGLSTDSLCEAGYPGALAIGSPVCGMAAVRITANDMLFWFRSHTASEIRWGGAKHDPEEKDDGRRMHPRCSFKAFLEVVKTRSLPWKDFEMDAI

SEQ ID NO: 1188 - protein, 339 aa, Streptococcus pneumoniae TIGR4
MQEKILVTGGAGFIGTHTVIELIQAGHQVVVVDNLVNSNRKSLEVVEGITGVEIPFYEADIRDTDTLRDIFKQEEPTGVIHFAGLKAVGESTRIPLAYYDNNIAGTVSLLKAMEENNCKNIIFSSSATVYGDPHTVPILEDFPLSVTNPYGRTKLMLEEILTDIYKADSEWNVVLLRYFNPIGAHESGDLGENPNGIPNNLLPYVTQVAVGKLEQVQVFGDDYDTEDGTGVRDYIHVVDLAKGHVAALKKIQKGSGLNVYNLGTGKGYSVLEIIQNMEKAVGRPIPYRIVERRPGDIAACYSDPAKAKAELGWEAELDITQMCEDAWRWQSKHPNGFED

SEQ ID NO: 1189 - protein, 364 aa, Agrobacterium vitis
MREYKIAAIPADGIGPEVIAAGLQVLEALEKRSGDFSIHTETFDWGSDYYKKNGVMMPADGLEQLKKFDAIFFGAVGAPDVPDHITLWGLRLPICQGFDQYANVRPTKVLPGITPPLRNCGPGDLDWVIVRENSEGEYSGHGGRAHKGLPEEVGTEVAIFTRVGVTRIMRYAFKLAQARPRKLLTVVTKSNAQRHGMVMWDEIAAEVSKEFPDVTWDKMLVDAMTVRMTLKPQSLDTIVATNLHADILSDLAGALAGSLGVAPTANIDPERRFPSMFEPIHGSAFDITGKGIANPVATFWTAAQMLEHLGEKDAATRLMSAVERVTEAGILTPDVGGTADTQQVTDAVCEAIAGSNILNMAAVG

SEQ ID NO: 1190 - protein, 620 aa, Xanthomonas campestris pv. campestris str. ATCC 33913
MVYRHGVQSPNAQWQAATLAGRRPHTGAVRSARNAARPTAAVASPGTPLLPLHRLPRRHTHASAAACGPFRTSNPVPRDGGQQAAAGTIGLVFCSTGLPLTTSTLPAPAADARLPRQIPFIIGNEACERFSFYGMRNILVQFLITSLLLQEVGAPERDAEAKHILHSFMIGVFFFPLLGGWLADRFFGKYTTIIWFSLIYCAGHACLALFEDSRSGFFVGLGLIAFGAGGIKPLVASFMGDQFDQSNKHRAKVVFDAFYWIINFGSLFASLLIPLALKHLGPSWAFGIPGILMFIATAVFWLGRKRYVRVPLPPKDPHGFGAVVRSALLAHAPGQGRPGLALAAISVLLALACLGLTEQLGLVICLCMALVLLLAGIGGGTWWQLERARGTHPDAAVDGVRALLRVLVIFALVTPFFSLFDQKASTWVLQGREMRMPAWFTASQMQALNPLLVMLLIPFNNLVLYPLLRRLGWEPTSLRRMTSGIAFSGVAWIAVGAIQVAMDGGEPMHIAWQILPYALLTFGEVLVSATGIEFAYSQAPPSMKGVVMSFWYLTTTVGNLWVLLSNVAVRNATVTSHIADTGLSEAAFLMFFFAAFAFLAALAFGLYARRYRMVDNYRPA

SEQ ID NO: 1191 - protein, 202 aa, Oryza sativa
  unsure (1)..(202): unsure at all Xaa locations
MSDGKDSLDLSGLGAAVPNAKELSAEDKANLVESIKNTLQGLAARHTDVLESLEPKVRKRVEVLREIQSQHDDLEAKFFEERAALEAKYQKMYEPLYSKRYEIVNGVVEVDGVTKEAADETPAEQKEEKGVPEFWLNAMKNHEILSEEIQERDEEALKYLKDXIKWDTIQXPKGFMLGFYFDTNPFFQNSVLTTTYHMIDGX

SEQ ID NO: 1192 - protein, 523 aa, Candida maltosa
MAIEQIIEEVLPYLTKWYTILFGAAVTYFLSIALRNKFYEYKLKCENPVYFEDAGLFGIPALIDIIKVRKAGQLADYTDTTFDKYPNLSSYMTVAGVLKIVFTVDPENIKAVLATQFNDFALGARHAHFDPLLGDGIFTLDGEGWKLSRAMLRPQFAREQIAHVKALEPHVQILAKQIKLNKGKTFDLQELFFRFTVDTATEFLFGESVHSLYDEKLGIPAPNDIPGRENFAEAFNTSQHYLATRTYSQIFYWLTNPKEFRDCNAKVHKLAQYFVNTALNATEKEVEEKSKGGYVFLYELVKQTRDPKVLQDQLLNIMVAGRDTTAGLLSFAMFELARNPKIWNKLREEVEVNFGLGDEARVDEISFETLKKCEYLKAVLNETLRMYPSVPINFRTATRDTTLPRGGGKDGNSPIFVPKGSSVVYSVYKTHRLKQFYGEDAYEFRPERWFEPSTRKLGWAYLPFNGGPRICLGQQFALTEASYVIARLAQMFEHLESKDETYPPNKCIHLTMNHNEGVFISAK

SEQ ID NO: 1193 - protein, 365 aa, Oryza sativa
MNGIELSSGDKAKLVETLKNKLQALAEQHVDMLESLAPAVRKRVDVLMEIQRSKIVSGVLEVEGETEEREEKGVPDFWLNAMKKNEILAEEIHESDETEIEWHLGYCLTQQVLTKESSESTKPITKTEECESFFNFFSPPQVPDDDAKNDEYTLAHVARSTLRDKIIPHAVSWFTREAVQDEDYGASWVDDEEEDDDDDEYKVQAQRDAVHANIYIGLVRGISKATTSNQRQDEGILKKKSQIFMLHQSHTTTQTQGGTLPTGSPPCRRRLLPRAAPLLLCRALSRYLSCYMATTLCSIQPQFRPPATEQRRCKLQRGNGSQCHCQLRWFPHLAGTLPCTLSPLHSQRRPVGRKEQRGYIHYERL

SEQ ID NO: 1194 - protein, 387 aa, Ceriporiopsis subvermispora
MAFTSLLALVALAAITRAAPTTICPDGTRVSNHVCCDFIPLAQALQSTLYMGDCGEDAHETIRLTFHDAIAISQSQGPSAGGGADGSMFIFPTVEPFFHANAGIDDSVNNLIPFLSKFPTITAGDLIQFAGTVALSNCPGAPQLEFLAGRPNATAPAVDGLIPEPQDNVTHILERFADAGGFTPFEVVSLLASHTVARADKVDLTIDAAPFDSTPFTFDTQIFLEVLLKGVGFPGTDNNTGEVESPLPLGNNKQGGNDTGEMRLQSDFALARDDRTACFWQGFVNEQEYMMSSFKAAMSKLAILGHNRNDLIDCSEVVPTPKPPVGKPATFPATTGPQDLQLTCKSERFPSLTIDHGARETLIPHCSNGGQDCPTVQFTGPAGEDDS

SEQ ID NO: 1195 - protein, 338 aa, Acinetobacter lwoffii
MAKILVTGGAGYIGSHTCIELLNAGHEVIVFDNLSNSSEEALRRVQKLTNKSLVFIQGDIRNQSELDLVFQDHQIDAVIHFAGLKAVGESQQIPLTYFDNNIAGSIQLTKSMEKAGVFKLVFSSSATVYDEVNTSPLNEDMSTGIPNNNYGYTKLIVEQLLQKLAHADRRWSIALLRYFNPVGAHKSGQIGEDPQGIPNNLMPYVTQVAVGRREKLSIYGNDYDTVDGTGVRDYIHVVDLANAHLCALSNRLSAQGCRVWNIGTGNGSSVLQVKNTFEQVNGVSIAFEFVSRRAGDVATSFADNTRAQLELGWKPQYSLEDMLTDSWNWQKQNPNGYN

SEQ ID NO: 1196 - protein, 427 aa, Triticum aestivum
MAQAVVPAMQCQVGARGRSAVPARQPAGRVWGVRRTARAASGFKVLALGPETTGVIQRMQQLLDMDTTPFTDKIIAEYIWVGGSGIDLRSKSRTISKPVEDPSELPKWNYDGSSTGQAPGEDSEVILYPQAIFKDPFRGGNNILVICDTYTPQGEPIPTNKRHMAAQIFSDPKVTSQVPWFGIEQEYTLMQRDVNWPLGWPVGGYPGPQGPYYCAVGSDKSFGRDISDAHYKACLYAGIEISGTNGEVMPGQWEYQVGPSVGIDAGDHIWASRYILERITEQAGVVLTLDPKPIQGDWNGAGCHTNYSTLSMREDGGFDVIKKAILNLSLRHDLHIAAYGEGNERRLTGLHETASISDFSWGVANRGCSIRVGRETEAKGKGYLEDRRPASNMDPYTVTALLAETTILWEPTLEAEALAAKKLALKV

SEQ ID NO: 1197 - protein, 510 aa, Eustoma grandiflorum
MAVGNGVLLHIARSLMLFFHVQKLVQYLWMNSRRHRLPPGPIGWPVLGALPLLGTMPHVALANMAKKYGPVMYLKVGSCGLAVASTPEAAKAFLKTLDMNFSNRPPNAGATHLAYNAQDMVFADYGPRWKLLRKLSNIHILGGKALQGWEEVRKKELGYMLYAMAESGRHGQPVVVSEMLTYAMANMLGQVMLSKRVFGSQGSESNEFKDMVVELMTVAGYFNIGDFIPSIAWMDLQGIQGGMKRLHKKFDALLTRLLEEHTASAHERKGSPDFLDFVVANRDNSEGERLHTVNIKALLLNMFTAGTDTSSSVIEWALAELLKNPIILKRAQEEMDGVIGRDRRFLEADISKLPYLQAICKEAFRKHPSTPLNLPRIASQACEVNGHYIPKGTRLSVNIWAIGRDPSLWENPNEFNPDRFLERKNAKIDPRGNDFELIPFGAGRRICAGTRLGILLVEYILGTLVHSFDWELPSSVIELNMDEPFGLALQKAVPLAAMVTPRLPLHIYCP

SEQ ID NO: 1198 - protein, 172 aa, Glycine max
MASADVEFRCFVGGLAWVTGNDALEKAFSIYGDIVESKVINDRETGRSRGFGFVTFASEQSMKDAIAGMNGQDLDGRNITVNEAQTRASRGGGGGGGFGSGGGYNRGSGGYGGGGGGGGYGGRREGGYNRNGGGGGGGYGGGRDRGYGGDGGSRYSSRWGRRWIRWKLEKLG

SEQ ID NO: 1199 - protein, 283 aa, Clostridium acetobutylicum
MMIESINWFPGHMAKTTREIRENLKLVDAVIEIRDARIVYSSSNPDINSICKDKPRIILLNKFDLAEKSITDNWVKALSSESIRAIPVNALEGRGLNSIKPALNELLKPKLDNMAAKGIQNYIIRVMVVGIPNVGKSSFINKMAKNKVAKVGNKPGVTKSKQWIKTNIGIELMDTPGVLWPKFQDQKVGLNLAFTGAIKDEIMDIEELALKLVQFLQKNYPEKLMERYKLEDINEDPLINMNNIAAKRGALLKGGEIDYNRVSIIIVDEFRSGKIGKISLERP

SEQ ID NO: 1200 - protein, 402 aa, Methanopyrus kandleri AV19
MGVQVGIVGKPNVGKSTFFAAATLSPVETADYPFTTVDPNQGVAHVRTECPCKAFGVECQPRNSSCIDGNRFVPVELIDVAGLVPGAHEGRGLGNKFLDDLRQASVLIHVVDVSGSTDEEGRPCDPGTREPAEDVRFLERELDEWIAGILRRDWDRTAKRASLEKIPAAEVLRERLAGIGVSASDVESAMERAEVPSDLTKWSDEDIRRFAREVRRVNKPMVIAANKIDVECAEENLKRLEEEVEYPVVPTCAEAELALRRAADQGLIRYLPGDSDFEILQEEKLSDEQLQALEFIREKVLKRWGSTGVQEALNRAVFDVAKMIVVYPVENENKLSDSEGRVLPDALLLPEGTMVRELAYNIHTEIGESFNRAILVKPDGSREVVGEDHELEHGDVVKIQTS

SEQ ID NO: 1201 - protein, 375 aa, Populus x canescens
MGRAPCCEKNGLKRGPWTPDEDQKLIGYIQKHGYGNWRTLPKNAELQRCGKSCRLRWTNYLRPDIKRGRFSFEEEETIIQLHGILGNKWSAIAARLPGRTDNEIKNYWNTHIRKRLLRMGIDPVTHSPRLDLLDLSSILNSPLYDSSRMNMSRILGVQPLGDPELLRLATSLLSSQRDQTQDFAIPNGHQENHLSSPQVHQNQNQSIIHQANQFQPAGQEMPACTALTTTPCVTFSNEAQQMDPNGDQYHLSTITTFSSPNSQVSTHDQWQSNRMGSNLSEDYYVPAVSSYNSADNCRGTDLVDPSSEASTFISNNSNQTFGFASVLSTPSSSPAPLNSNSTYINCSSTEDERDSYCSNFLKFEIPDILDVSNFM

SEQ ID NO: 1202 - protein, 337 aa, Sinorhizobium meliloti
MKAVRLYDIRDLRVEEVAELAAPPPGFVNLEVRAAGICGSDLHNYRTGQWISRRPSTAGHEFCGRVTAIGEGVSHLVRGDVVSADSRMWCGTCPACASGRSNVCETLGFLGEVCDGGFAEAVQLPSRLVFRHDPKLSPHVAAMAEPLAVALHAVRRLAVPDGAPVLVMGCGTIGGLSALLLSRLHQGPLLLTDLNADKAALVAEVTGGVVVALDGAAIEEALPGTRLRHALDATGSIQAIARALDILSGGGALALVGIGHGKLDLDPNILVEREISLVGCHAFAGELPEAIELLADLAPALQRFIEVLPTLDDVPEAYERLLRGESNALKTIIEVAG

SEQ ID NO: 1203 - protein, 385 aa, Neisseria meningitidis Z2491
MPSVPTVYRSLPVHKPMSLTRLILKFYALLRLFLGKNARTAWISHPACAGHEPGANHPDSPDRILCIEQALRRAGIWQHLQTIEAEEISDTRLALVHSSKYLNRLESCQPQKGKIFRLNDDTAISTGSLSAARFAAGSAVQAVDMVMNRKAWHAFCAARPPGHHAGSGKAGGFCLLNNVAAGVMHAIAEYRLKRIAVIDFDVHYGDGTAEIFKDDPRILFFNLFETDLFPFPENNDMPDGGNMVHLPLPPGTGSRTFREAVRRQWLPRLAAFKPELVLLSAGFDAHRLDESGRLNLHEADFAWLTHKIIQTASGCPGKIVSVLEGGYTLEPLAQSAAEHIRVLAGLGKSDAATAYQKTLDPTKKRFAKPKTGQVRQPTQSDRYDI

SEQ ID NO: 1204 - protein, 341 aa, Piper nigrum
DLEPVNPADVPVTAAGALKSYKLAAKAISRLQSMPNGDIALLCDVLAREVSDLTGYDRVMAYKFHEDEHGEVIAECKRSDLEPYLGLHYPATDIPQASRFLFMKNKVRMICDCLAPPVKVVQDKRLGQPLSLAGSTLRAPHGCHSQYMSNMGSIASLVMSVMVCEGDEDSNGEKTARKLWGLVVCHHTSPRFIPFPLRYACEFLIQVFAIQLSKEVELAAQVKEKHVLRMQTVLCDMLLRDAPMGIMTQSPNVMDLVMCDGAALYYHSQCWLLGATPTENMVRDIAEWLQQYHGTSTGLSTDSLVEAGYPGAHELSDAVCGMAAITITNRDFSFWFRSHTA

SEQ ID NO: 1205 - protein, 166 aa, Helianthus annuus
EFQIGPSVGISAADEFWVARYILERVTEIAGVVVSFDPKPVPGDWNGAGGHTNYSTKSMREDGGYETIQKAIEKLGLRHEDHIAGYGEGNERRLTGHHETADINTSSWGVAKRGVSIRVGRDTAEEGKGYFEDRRPGSNMDPYVVTSMIAETTIIVEAFRLFCGSE

SEQ ID NO: 1206 - protein, 320 aa, Aeropyrum pernix
MTPPVGDVGLYTRVHSPAYLRHVLSTAESGLDWLDPDTYVGPGTLVALKRLGGASVEVYNIVRSGGEALLLGRPPGHHAGIRGRALGAPTAGFCIVNTAALIARMLSEQGKTVILDFDLHHGNGTQEIFYDDPDVYHVDVHQDPTTIYPGTGFPEDIGEGDAKGTKINIILPPNSGDDIYVSAARLALGILERLEPDYIVVSAGFDAYRGDNAFTVMRGGTAMYYLIGSELSRMARRGVAAVLEGGYGVGLRRALPAFAAGLANLENPYPDTEEESPPSVKRMYVAGLKRLAAAIKGLNRVVEEAVLEELERGGWEKRYG

SEQ ID NO: 1207 - protein, 579 aa, Schizosaccharomyces pombe
MSAKDYDFDIESVLPEEKAPQVSEAKKDYISQESTVLSGQVDFVEPEHKGFFQNLIDGFKPAREADGNGGPALKRGLSTRHMQLMSIGGAIGSGLYVGSGSALADGGPASVIINYILIGIMMFFVIYALGEMAVAYPVAGSFNTYATRFIDPAWGFAVSWNYFFNYFVTFPFELTTCAITFTFWTDVNCAVWISIFLVVVIGINLFGVRVFGEVEFVLALIKVVATVGFIILAIIINCGGVPTDHRGYIGGSIIKQKPFRHGFKGFCSVYTTAAFSFSGTEIVGLAAAEVGDPRKTLPGAVKQVFWRVAIFYIVSLILIGLLISPDDPKLMGNGSASVSPFVLAIQEANIKGLPSVFNAVIIISVISVTNSSTYTAGRTLHGMANLKQAPAFFKYTDRLGRPLIAMIVVLSFGFFAYINEANNNGNDISDTVFDWLLAISGLSNFFTWGSICLSHIMFRLAFKKQGHSLKELGFVSPMGIWGSVIGLGFNILCLMAEFYVSLFPIGGSPNANDFFQGYLAACITLVFFIGYKIYDRSHIPSLDKLDITTGLKTYEYEETKDSSDTGRFRFFKKIINTVC

SEQ ID NO: 1208 - protein, 411 aa, Saccharomyces cerevisiae
MPRDPLIGIVGKPSSGKSTTLNSLTDAGAAVGAFPFTTIEPNQATGYLQVECACSRFGKEDLCKPNYGWCSKGKRHIPIKLLDVAGLVPGAHSGRGLGNKFLDDLRHADALIHVVDVSGTTDAEGKNTRGYDPLNDIEWLQDEIRLWVEGNLKKRWGSIVRKHTATKSSIVDTLQAQFGGYGSHAPMIQKALDRLKGLPPLEKWDDEWITRVVKSFMMEKFPTVLALNKIDHPDADKNVSKIMLKYPDTKAVLTSAVTEVFLRKLKKQGFILYEEGTEFVDTFEDEPDKLKPLDDKILNRIENIRDLVLYRFGSTGVVQVLQAATDILGLIPVYTVKNIQTFTGGNGTNVFRDCFLVKRGTPVGKVARYIMGGEVTIASIETVGGVRVSEESLVEPGKNDILGFKIAPRSA

SEQ ID NO: 1209 - protein, 176 aa, Carica candamarcensis
PQRMDWRKKGAVTPVKDQNPCGSCWAFSTVATVEGINKIVTGKLISLSEQELLDCDRRSHGCKGGYQTTSLQYVVDNGVHTEKVYPYEKKQGKCRAKDKGPKVKIYRVKRVPSNDEISLIKAIATQPVSVLVESKGRAFQFYKGGVFGGPCGTKLDHAVTAVGYGKDYIIIKNSWG

SEQ ID NO: 1210 - protein, 254 aa, Methanosarcina acetivorans C2A
MTSYKVLVRDVIKKADVLLEVIDARFPDETRNNEVEKEIIRLKKPFIIVINKCDLVSKDKLEKTKARLSRIAPTVFVSGKARFGTTMLRHQILASACIKGQDILVGTLGYPNVGKSSVINGVTGRHRASTSPVSGHTKGVQHVGAGSRIMFVDTPGVIPFDENDDYVQGLLGIKDATHLKDPIGVALKIIEKMLVENKTALEVFYNVTLETQDSYSGLELIGKQCNFLQKKGEVDEMRTAIRIINDWQTGLLLI

SEQ ID NO: 1211 - protein, 169 aa, Bacillus subtilis subsp. subtilis str. 168
MSKKIAVLVTDQFEDIEYTSPVKAYEEAGYSVVAIDLEAGKEVTGKHGEKVKIDKAISDVDASDFDALLIPGGFSPDLLRADDRPGEFAKAFVENKKPVFAICHGPQVLIDTDLLKGKDITGYRSIRKDLINAGANYKDAEVVVSHNIVTSRTPDDLEAFNRESLNLLK

SEQ ID NO: 1212 - protein, 259 aa, Zea mays
MLNMMTDLSCGPSSKVKEQVAAAPTGSGDRQGQGRGKIEIKRIENTTNRQVTFCKRRNGLLKKAYELSVLCDAEVALVVFSSRGRLYEYANNSVKSTIERYKKANSDSSNSGTVAEVNAQYYQQESSKLRQMIHSLQNANTRNIVGDSIHTMGLRDLKQMEGKLEKAIIKIRARKNELLYAEVDYMQKREMDLQTDNMYLRSKIAESNETGQPAMHMTMGAPPTSEYDHMAPFDSRNFLQVSMPQHYSHQLQPTTLQLG

SEQ ID NO: 1213 - protein, 331 aa, Burkholderia fungorum
MQYRKFGRTGLTVSRLCLGTMTFGLQTEEDVSHRILDTAADAGVNFIDTANVYPLGGGESIAGRTEEIVGRWLKGKRDRFILATKAVGKMGPSAWDQGASRKHLLDAIDASLQRLGTDYVDLYQLHSDDANTPLDETLEALDVIVRSGKARYIGVSNFLAYRLARALGRADVLRVARFVSVQPRYNLLFRQIERELLPLAGEEQLAVMPYNPLAGGLLTGKHQLDVTPASGRFTEAVGKAGAMYQQRYWHKREFETIEQLKAIAAPTGESLTRVSLAWVLANPLITSAIIGASRAEQLSDTLAAADFVLDPQIRTQLDEASMEYRWGDAAR

SEQ ID NO: 1214 - protein, 340 aa, Arabidopsis thaliana
MATGKTSSAANLFTGSTRFDLSSADSPPSKLSLSSDQLNHCHQALGVFRGKIQNPDSIAHEFTGLQANRMWPSELLLNSTVAMNSVNVEKNRYSDVVPFDKNRIVLNPCKDSSAKGYVNASLIKTSESESISQFIATQGPLPHTMEAFWEMVIQQHCPIIVMLTRLVDNNRTVKCGDYFQDEDGPREFGNISLTTKWIKTTDTSLMLRNLEVNYKETEDQPMSVLHIQYPEWPDHGVPKDTVAVREILKRLYQVPPSLGPIIVHCSAGIGRTGTYCAIHNTIQRILAGDMSALDLAKTVALFRKQRIGMVQTMDQYFFCYNAIVDELEDLTAGTNAGTSS

SEQ ID NO: 1215 - protein, 792 aa, Oryza sativa (japonica cultivar-group)
MEKDHQPVISLRPGGGGGGPRPGRLFSPAFAAAASGSGDLLRSHVGGASKIGDPNFEVRERVRYTRDQLLELREIVDIPEAILIKQEIDIELHGEDQIWGRPESDVQVQTQTQAQPHNRYGETDNRDWRARTVQPPAANEEKSWDNIREAKAAHASSGRQQEQVNRQDQLNHQFASKAQVGPTPALIKAEVPWSARRGNLSEKDRVLKTVKGILNKLTPEKFDLLKGQLMESGITTADILKDVISLIFEKAVFEPTFCPMYAQLCSDLNEKLPSFPSEEPGGKEITFKRVLLNNCQEAFEGAESLRAEIAKLTGPDQEMERRDKERIVKLRTLGNIRLIGELLKQKMVPEKIVHHIVQELLGSGPDKKACPEEENVEAICQFFNTIGKQLDENPKSRRINDTYFIQMKELTTNLQLAPRLRFMVRDVVDLRSNNWVPRREEIKAKTISEIHDEAIKTLGLRPGATGLTRNGRNAPGGPLSPGGFPMNRPGTGGMMPGMPGTPGMPGSRKMPGMPGLDNDNWEVPRSKSMPRGDSLRNQGPLLNKPSSINKPSSINSRLLPHGSGALIGKSALLGSGGPPSRPSSLMASPTHTPAQTAPSPKPVSAAPAVVPVTDKAAGSSHEMPAAVQKKTVSLLEEYFGIRILDEAQQCIEELQCPEYYSEIVKEAINLALDKGPNFIDPLVRLLEHLHTKKIFKTEDLKTGCLLYAALLEDIGIDLPLAPALFGEVVARLSLSCSLSFEVVEEILKAVEDTYFRKGIFDAVMKTMGGNSSGQAILSSHAVVIDACNKLLK

SEQ ID NO: 1216 - protein, 410 aa, Skeletonema costatum
MKLAVTFLATIGPTGRFAPAANTVARTSALNMVQQLDLKTGQSQLDTSVVDRFSALPYPDDKVLAEYVWVDAKGECRSKTRTLPVARTEAVDKLPNWNFDGSSTDQAPGDDSEVILRPCRIFKDPFRPRAHGLDNNLVMCDTYTPAGEAIPTNTRAIAAKAFEGKEDEEVWFGLEQEFTPLQPRPTHSPRLAQEPVSQPRSGPYYSSAGPENSFGRAVTDAMYRCCLYAGLEISGTNGEVMPGQQEYQIGPCVGIDAGDQLFMSRYILQRVCEEFQVYCTLHPKPITDEDWNGAGMHTNDSTKSMREAGGLDIIKQAIYKLGAKHKEHIAIYGEGNELRLTGKFETASMDEFSFGVANRGASVRIGRDTEAEEMLGYFEDRKPQFPNADPYLVTGKRSWLPIIMEDIEVS

SEQ ID NO: 1217 - protein, 277 aa, Arabidopsis thaliana
METLHPLLSHVPTSDHRFVVQEMMCLQSSSWTKEENKKFERALAVYADDTPDRWFKVAAMIPGKTISDVMRQYSKLEEDLFDIEAGLVPIPGYRSVTPCGFDQVVSPRDFDAYRKLPNGARGFDQDRRKGVPWTEEEHRRFLLGLLKYGKGDWRNISRNFVGSKTPTQVASHAQKYYQRQLSGAKDKRRPSIHDITTVNLLNANLSRPSSDHGCLVSKQAEPKLGFTDRDNAEEGVMFLGQNLSSVFSSYDPAIKFSGANVYGEGGYCISQDLETRK

SEQ ID NO: 1218 - protein, 193 aa, Clostridium perfringens str. 13
MGENKREKVFLEFPIIETERFILKEIEEKHRNHFISLFSDEDIMKYSGTEVYDPEKQVEFYFKKVKLMYKEKKGIRWAIINKESKAFIGDIGLYNIDFYSNNTEIGYTIEKNFWRKGVASECIKAIENFAFETLDMNRIIAMIDSNNISSIKLSEKLGFHRDGILREHYYNKSKDEYINICVYSLIKSDIKVK

SEQ ID NO: 1219 - protein, 345 aa, Thermus thermophilus
MKVAVLPGDGIGPEVTEAALKVLRALDEAEGLGLAYEVFPFGGAAIDAFGEPFPEPTRKGVEEAEAVLLGSVGGPKWDGLPRKIRPETGLLSLRKSQDLFANLRPAKVFPGLERLSPLKEEIARGVDVLIVRELTGGIYFGEPRGMSEAEAWNTERYSKPEVERVARVAFEVARKRRKHVVSVDKANVLEVGEFWRKTVEEVGRGYPDVALEHQYVDAMAMHLVRSPARFDVVVTGNIFGDILSDLASVLPGSLGLLPSASLGRGTPVFEPVHGSAPDIAGKGIANPTAAILSAAMMLEHAFGLVELARKVEDAVAKALLETPPPDLGGSAGTEAFTATVLRHLA

SEQ ID NO: 1220 - protein, 543 aa, Candida tropicalis
MSSSPSIAQEFLATITPYVEYCQENYTKWYYFIPLVILSLNLISMLHTKYLERKFKAKPLAVYVQDYTFGLITPLVLIYYKSKGTVMQFACDLWDKKLIVSDPKAKTIGLKILGIPLIETKDPENVKAILATQFNDFSLGTRHDFLYSLLGDGIFTLDGAGWKHSRTMLRPQFAREQVSHVKLLEPHMQVLFKHIRKHHGQTFDIQELFFRLTVDSATEFLLGESAESLRDESVGLTPTTKDFDGRNEFADAFNYSQTNQAYRFLLQQMYWILNGSEFRKSIAIVHKFADHYVQKALELTDEDLEKKEGYVFLFELAKQTRDPKVLRDQLLNILVAGRDTTAGLLSFLFFELSRNPEIFAKLREEIENKFGLGQDARVEEISFETLKSCEYLKAVINETLRIYPSVPHNFRVATRNTTLPRGGGEGGLSPIAIKKGQVVMYTILATHRDKDIYGEDAYVFRPERWFEPETRKLGWAYVPENGGPRICLGQQFALTEASYVTVRLLQEFGNLKQDPNTEYPPKLQNTLTLSLFEGAEVQMYLIL

SEQ ID NO: 1221 - protein, 336 aa, Oryza sativa (japonica cultivar-group)
MHVFSSREEEHGSNDDSFRESLVSLLDNTRDYVMAPEVFEGVPVACDYLKGMDSDGMAASAVAAYSLDNNGQHASVSSIEHGIASSPLLAYQLGKNSAVVQRSIQQQEVGSPMAAFLQQLIPTSVLDQSGIGFGGVCLDGSALEASFCMRTSPDVSSFSGHRSATAEELMSTDTREQEITRLARSCSSSGSDRNKKKLSEVRGGGKAKKFKSETSHSTSSPKHQSPKVKLGEKITALQQIVSPFGKTDTASVLLETITYIKFLHEQIQLFSQPYMTNSTNKGHIHWGGEGKRKAGLEHDLRGRGLCLVPVSWTSQEYCDSILPECWAPAYRNYFYR

SEQ ID NO: 1222 - protein, 391 aa, Streptococcus thermophilus
MAERILMTNGKLKVTDNPIIPFIEGDGVGRDIWKNAQAIFDKAVEAAYEGQRRIEWQEFLAGKKAFDKTGEWLPQETLEAIRESLVAIKGPLETPVGGGIRSLNVALRQELDLYACVRPVRYFEGVASPLKEPEKTDITIFRENTEDIYAGIEWEAGTVDVERVIAFFQTEMNVDKIRFPKSSSIGIKPISIEGSKRLIRSAIDYALKNNLKKVTLVHKGNIQKFTEGGFRKWGYEVAEEEYKEEMLAGRLEVNDIIADNFLQQILLNPEKFDVVALTNLNGDYASDALAAQVGGIGISPGANINYQTGHAIFEATHGTAPDIADQDRANPCSILLSGCMLLEYIGWSEAAELIISAIEKNFKSGIFTVDLAFGKRAYSTSGFSNQILSII

SEQ ID NO: 1223 - protein, 338 aa, Desulfitobacterium hafniense
MRAGQGPHRVDQAHRQIHRRPRHRHPGGVRNRPVRLALNPQPHHRAQRYSIAASACRLAAPGPRARRAGSQDAAVISSGATTSQHYGVKPMSTTPLSGEIALVTGASRGIGAAIADELAAQGATVIGTATSESGAKAIGERLAAHGGHGRVVDVADPASVESLLDAVAKEIGAISILVNNAGITRDNLLMRMKDEDWQAILDTNLTSVYRTSKAVMRSMMKARKGRIINIASVVGVTGNPGQANYAAAKAGVIAFSKSLAREIGSRGVTVNVVAPGFIDTDMTRDLPEDAKKAMFDQIALGRFGEPADIARAVAFLAGPGAGYITGETLHVNGGMYMP

SEQ ID NO: 1224 - protein, 121 aa, Glycine max
MSKAGKLTKLKSVLRKWNSFSNKHSQVSVISAVANDGGDTSSLLPVYVGRTRRRYLVSADVVGHPLFRELVGRSRDGSKDEDEDTINVACEVVLFEHLLWMLHNADPQPESLDELADFYAC

SEQ ID NO: 1225 - protein, 305 aa, Miscanthus sinensis f. glaber
IESVGEGVTDVAPGDHVLPVLTGECKECAHCRSAESNMCDLLRINTDRGVMIGDGKSRFSINGKPIYHFVGTSTFSEYTVMHVGCVAKINPQAPLDKVCVLSCGISTGLGASINVAKPPKGSTVAIFGLGAVGLAAAEGARIAGASRIIGVDLNPSRFEEARKFGCTEFVNPKDHKKPVQEVLAEMTNGGVDRNVECTGNINAMIQAFECVHDGWGVAVLVGVPHKDAEFKTHPMNFLNERTLKGTFFGNFKPRTDLPNVVELCMKKELEVEKFITHSVPFAEISKAFDLMAKGEGIRCIIRIEN

SEQ ID NO: 1226 - protein, 326 aa, Escherichia coli
MSSDADAHKVGLIPVTLMVSGNIMGSGVFLLPANLASTGGIAIYGWLVTIIGALGLSMVYAKMSFLDPSPGGSYAYARRCFGPFLGYQTNVLYWLACWIGNIAMVVIGVGYLSYFFPILKDPLVLTITCVVVLWIFVLLNIVGPKMITRVQAVATVLALIPIVGIAVFGWFWFRGETYMAAWNVSGLGTFGAIQSTLNVTLWSFIGVESASVAAGVVKNPKRNVPIATIGGVLIAAVCYVLSTTAIMGMIPNAALRVSASPFGDAARMALGDTAGAIVSFCAAAGCLGSLGGWTLLAGQTAKAAADDGLFPPIFARVNKAGSQWRG

SEQ ID NO: 1227 - protein, 376 aa, Cleistachne sorghoides
ALSIAGAVQSQKLAVRAISRLQALPGGDVKLLCDTVVEHVRELTGYDRVMVYRFHEDEHGEVVAESRRDNLEPYLGLHYPATDIPQASRFLFRQNRVRMIADCHATPVRVIQDPGLSQPLCLVGSTLRAPHGCHAQYMANMGSIASLVMAVIISGGGDDEQTGRGGISSAMKLWGLVVCHHTSPRCIPFPLRYACEFLMQAFGLQLNMELQLAHQLSEKHILRTQTLLCDMLLRDSPTGIVTQSPSIMDLVKCDGAALYYHGKYYPLGVTPTESQIKDIIEWLTVCHGDSTGLSTDSLADAGYLGAAALGDAVCGMAVAYITPSDYLFWFRSHTAKEIKWGGAKHHPEDKDDGQRMHPRSSFKAFLEVVKSRSLPW

SEQ ID NO: 1228 - protein, 170 aa, Bacillus cereus ATCC 14579
MIYPYKEKKPKIASSAFIADYVTITGDVYVGEESSIWFNTVIRGDVSPTIIGDRVNVQDQCTLHQSPQYPLILEDDVTVGHQVILHSCHIKKDALIGMGSIILDGAEIGEGAFIGAGSLVSQGKKIPPNTLAFGRPAKVIRELTAEDRKDMERIRTQYVEKGQYYKSLQK

SEQ ID NO: 1229 - protein, 228 aa, Zea mays
  unsure (1)..(228): unsure at all Xaa locations
MASNYTVRKVAAPNTLEHRVYVEKDGQPVSPFHDIPLYANQEQTILNMVVEIPRWTNAKLEISKEELLNPIKQDIKKGKLRYVRNCFPHKGYLWNYGAFPQTWEDPNTVHPETKAKGDNDPLDVCEIGELVGYPGQIKQVKXVLGVMALLDEEETDWKVIVIDVNDPLAXQLNDVEDVERHLPGLLRXTNEWFRIXQIPDGXPENQFAXFTGECKNKXYALDVVRECA

SEQ ID NO: 1230 - protein, 442 aa, Streptomyces spectabilis
MSTTAMPASTHHTIALEQSHRLPGGQSMTDLSGLVVDRARNAEVWDKDGKRYIDFFTGVGVCNIGHSHPRFLAEVGEQLSACAVGTFYTDARSRYYELLAAQLPERLGRIHMFSTGSEAVEAAVKLARAATGKHEVVSFWGGFHGKTQGALSLHGGPRKHRSGPFPPGSHQVPYAYCYRCPLQLEHSTCGQRCVDLAEQSIENGSVGDIAAIIVEPVQGTNGNIIPPAGYLRAVRRLADRHGALLILDEVITGFGRTGSLFAFEQDPEVRPDVVVLGKAMASGVPASAIVSRAELVEGTSFGQPSAAASTFGGNPLASAAALATLRILLDERLPERSRLLGETVARRLASWKEEFPFVGNAANVGLMVGVELVEPGTRRPLPKDVTRRIFQGLLAEGVLAMAYDSRIRIYPPLSIPADHLDEGLTAFESVFRSLRSLRSTQT

SEQ ID NO: 1231 - protein, 255 aa, Desulfovibrio desulfuricans G20
MQGFYPVHARLYIAPYYVLWQSICNVGYVAAVTAAAVFITCSAMLPAGSGGADLSRKETKMAEKRILMLVGDFVEDYEAMVPFQMLGMVGHTVHAVCPGKKAGETVKTAVHDFEGDQTYTEKPGHNFMLNCDFDSVDVAHYDALVVPGGRAPEYIRLNARVIEIVRQFDKARKPIAAVCHGQQVLVTAGVLQGHTCTAYPAVKPDVEAAGATWCEVNDTASNACVSGHVVTAPAWPAHPEWMRKFLEVLGTRIEP

SEQ ID NO: 1232 - protein, 378 aa, Lycopersicon esculentum
MVDEENKVPATAAASRGSNKRAFDSIAITNENDPLQISERPYPANKKRVVLGELNNLGNVIVSTQNSDLTETHESKRKIKLRKTRNVVKETVELKTSANSSPKDNLQKCSYGPLIYQHLHSLEVEERRRPLSNYMEKVQNNVIPSMRTVLVDWLVEVTEEYKLVSDTLYLAVSYIDRFLSSHVLAMEKLQLLGVSCMLVASKYEEISPPHVEDFCYITDNTYTREEVVNMERDLLSFLNFEISSPTTITFLRIFLKAAQDNLSFLTLQFEFLSCYLAELSLLDYSCVRFLPSMTAASAIFLSRFTVLPEVCPWTLALQQCTGYKPSELKDCVLVIHELQSSLMEATGRALREKYMNHKYKCVAALHPPDIPSCFFDDA

SEQ ID NO: 1233 - protein, 330 aa, Streptococcus pneumoniae R6
METKTMSFRDTIILAMSEEMRRDENVFLMGEDVGVFGGDFGTSVGMLEEFGPERVRDCPISEAAISGAAAGAAMTGLRPIVDMTFMDFSVIAMDNIVNQAAKTRYMFGGKGQVPMTVRCAAGNGVGSAAQHSQSLESWFTHIPGLKVVAPGTPADMKGLLKSSIRDNNPVIILEYKSEFNQKGEVPVDPDYTIPLGVGEIKRQGTDVTVVTYGKMLRRVVQAAEELAEEGISVEIVDPRTLVPLDKDIIINSVKKTGKVILVNDAHKTSGYIGEISAIISESEAFDYLDAPIRRCAGEDVPMPYAQNLENAMIPTVESIKDAIRKTYNKD

SEQ ID NO: 1234 - protein, 136 aa, Triticum aestivum
MSILWEKSPAWRWLVGRTRDSKPFFFTFAALCGVVPGVVGYGVMQLTSSRNDKLEAHLRSNARPETTMMGQVNRERLAEFLGEIQRKEDTNDRYVAALKGETLTRKRYERIQPVPQQAAPEKAKDQQATKESAKAK

SEQ ID NO: 1235 - protein, 354 aa, Triticum aestivum
MDPSKLSELRSFVEACKKDPALLADPALAFFRDYLTSLGATLPASAAAAGKPAPKARSMDDIDDDDDEEDEGEGEDDQDMRDPTPEPDELDEEIVESDLELDNDGVVHPDHDDAPQKMGDSSVEVTEESRDASQEAKGQAMEAMSEGKLEEAVVHLTKAILLNPTSAIMYGTRASVFIKMKKPAAAIRDANAALEINPDSAKGYKTRGMANAMLGKWEEAARDLHAASNIDYDDEINAVLKKVEPNAHKIVEHRRKYDRLRKERAEKKAERDRLRRRAEAQAAYEKAKRKEQSSSRSSGGMPGGMPGGFPFPGGMGGMPGGFPGGMGGGFPGGMGGGGPPGGGGGMPAGMGGGL

SEQ ID NO: 1236 - protein, 116 aa, Triticum aestivum
MAAPDVEYRCFVGGLAWATDERSLETAFSKFGELVDSKIINDRETGRSRGFGFVTFKDEQSMKDAIEGMNGQDLDGRSITVNEAQSRGSGGGGRGGGGGYRGGGGGGYGGGGGGYG

SEQ ID NO: 1237 - protein, 113 aa, Glycine max
  unsure (1)..(113): unsure at all Xaa locations
YITSDQDLIISYCKADSDDSLSEGNAGSINVSNXLTGKCLAKIRASNSFPVDNSCSDNPSGSCCCNSKKRKHGSKTRSTVAEALEDITALFYDEERNEIYTGNRHGLVHVWSN

SEQ ID NO: 1238 - protein, 713 aa, Schizosaccharomyces pombe
MAVQDEYILVTGGAGYIGSHTVIELINHGYKVIIVDNLCNSCYDAVARVEFIVRKSIKFFKLDLRDKEGLAQIFDTFKIKGVIHFAALKAVGESMKLPLEYYDNNICGTITLLNVMREHRVKTVVFSSSATVYGDATRFDNMIPIPESCPNDPTNPYGKTKYAIENIIKDLHTSDNTWRGAILRYFNPIGAHPSGLLGEDPLGIPNNLLPFLAQVAIGRREKLLVFGDDYDSHDGTPIRDYIHVVDLAKGHIAALNYLNKINNSEGMYREWNLGTGKGSSVFDIYHAFCKEVGKDLPYEVVGRRTGDVLNLTASPNRANSELKWKAELSITDACRDLWKWTIENPFGFQIDNYKWKLFNTLGIMDYKNRLHTICFQDLEVSIANYGALVQAVRYKGRNLVNGFNDFSRYKLKENPFFGATIGRFANRIANGQFEVDGHLYTLCKNENNKTTLHGGNNGFDKQFFLGPIARQYEDYNTLEFILVDKDGNNGFPSDLETLVKYTIKNNSLEIEYKSVIPEYSKLNVTAVNLTNHSYWNLASPNKTIDGTIIKSTTNVYLKVNSETSLPTGDIVEWQNDITKPTKLDPNISFDNCFIVDREASKFCLDTRKYSLKNIVEVIHPSVPVKLVVSTTEPAFQLYTGDGNDICEFQSRSGFCVETGRFINALNNEKWSKQVILRKGEVYGARSKFSLYAQDLEENKHFLDSASYNSGEYY

SEQ ID NO: 1239 - protein, 214 aa, Paeonia anomala
IVESVGEGVTDVKPGDHVLPIFTGECKECRHCKSEESNLCDLLRINTDRGVMLNDGKSRFSINGQPIFHFVGTSTFSEYTVLHVGCLAKINPEAPLDKVCVLSCGISTGLGATLNVAKPKKGSTVAIFGLGAVGLAAAEGARIAGASRIIGVDLNPKRFDEARKFGVTEFVNPKDYNKPVQEVIAEMTGGGVDRSVECTGSIMAMMSAFECVHD

SEQ ID NO: 1240 - protein, 394 aa, Anisopogon avenaceus
EPARTEDPALSIAGAVQSQKLAVRAISRLQALPGGDVKLLCDTVVEHVRELTGYDRVMVYKFHDDEHGEVLAESRRADLEPYLGLHYPATDIPRASRFLFRQNRVRMIADCHAAPVRVIQDPAMPQPLCLVGSTLRSPHGCHAQYMTNMGSIASLVMAVIISSGGDQDHNIARGAIPSAMKLWGLVVCHHTAPRCIPFPLRYACEFLMQAFGLQLNMELQLAQHLSQNLILTTQTLLCDMLLRDSPTGIVPQSRSIMDLVKCDGAALYYHGKYYPLGVTPTEAQILDIIEWLTVCHGDSTGLSTDSLADAGYPGAASLGDAVCGMAVAYITPSDHLFWFQSHTAKEIKWGGAKHHPEDKDDGQRMHPRSSFKAFLEVVKSRSLPWENAEMDAIH

SEQ ID NO: 1241 - protein, 599 aa, Coxiella burnetii RSA 493
MMNNITDSANLLEALEKTGKKYPQQIALTIQRDDQQVNYGYQRLLEKVDEFAARFKSANIQSGQRVVIISQNHPEAIVAYFAILKCQATAALIDINLPKKDIVQLIQAAKPSALVFSEELANLLSHTAATGYPAFDHYNNAALHVNFAKEAPLSEDETSDVATLLFTSGTTGNYKGVMLTHQNLLSQIESCRQALKITCNDRFLSVLPLHHVFPFVSSLLTPLIIGCSTMQISKIEGSFLLTAIQVHKPTILVVVPSILELFYQRIRGKINQLDSKQQKFISWLEKINQTSLNLLKLNLGKIFFRKIQNNFGGKLRYIVSGGATLDGQLHLALARLGFLILEGYGLTEVSGPCTVNRIDNNLLAAVYTLSALSRATMQWQQHPHFSGPLSITCKIFGPEFLGFGVDRLVQLLGGRGYIESNQVPQLFRDARLLRIFEGPTEMLLMYLGMFAVNFYSQLRELIQQLSPRLEISTKIAPPIKDLPGLIAKNFPQLNDEQQKQLYYLLLGKLTGFVILMACADFTEKDTQHYTLIKAWLNHQLKSATLPMAQFSPHIGISLCSDILLTEQEIAVQVDNFKQDVGDIYQGLPSEQWKLDDYLK

SEQ ID NO: 1242 - protein, 231 aa, Streptococcus mutans UA159
MNFIFSNPLFGLWLSIFAYLIGILIFRRFPHPLTTPLLLATIIVIIFLKVTHISYQDYYKGGAYLNTLIVPSTVALGIPLYQTFHLMRHHARSIILGSFLAAVVNTSFTAFVAKVFGMDFFLAISLFPKSVTTAMAVGIVDKMQGITTVTLVVVVATGILTSVLGPTLLKLLKIEDPVAIGLALGGTGHAVGTGTALKYGRISGAMAGLAIGITGLMYVFVSPIVAAIILK

SEQ ID NO: 1243 - protein, 75 aa, Glycine max
NNSSCRTLSRKTISQYFYMPISQAATELNVGITLLKKRCREVGIRRWPHRKLMSLQTLINNVQVSSHCVKLRSQF

SEQ ID NO: 1244 - protein, 328 aa, Triticum aestivum
RHWFYCINNKERSCLETGEVLIRVAASGICGTDLHICKGETPQATKNVVVGHEFCGYVEEIHPETMAVVKVGDLVAIDPNMPCNQCTFCRNKKYHLCLNLFCIGVTVDGGMSQYVAVPARAAITVPAHVPPEVACLSEPLSCVVHAVDKGHVKSGDSVLVIGAGPIGLMTTALVNASGGKVTVIEPNEFRRKEALEIFGAAAAYGPGELGPVNGALGEGYDVVFECVGRPNTADDAVKFAKAGGTVVWVGVAKVEDRVSISPYDVYRRELTITSTFTNPYGIDRAVKILAEGRVNWRALVSHSFKLSEFDKAWEVFTAGTGLKVVVKP

SEQ ID NO: 1245 - protein, 3132 aa, Magnetococcus sp. MC-1
MNKSQAKAACVSAPLASIPAKKLSFLWRGVPVCLIMLSFPGQALAGPSGEQVIAGQVTIDRNLNDTIINQATDKAIINWKNFDINPNELVKFIQPDVGSIALNRVESNLPTNILGQLQANGRLFILNANGVIFGRSAQVDVAGLLATTLSIKDNNFLSGKYAFEKVPGLKDAAVENKGEIHIGEGGFAFLVAPGVRNEGLIIAKLGSVALASGDKMTIDFHGDGLVSYEVTGAVAEKVLGADGQPLEALVSNTGTIQADGGNVVMQGHSAGDVFSSVVNNEGIIQAQSLQKKNGKIYLGGDDEGGIVSNSGILDVSAAEPNSAGGEVVMTGHFVGNEGVIEAKGSGSGDGGQVTLISAQHTLTTVNSVIDVSGGADSGSGGVVQIRSANRATFDGVVKADAGQNGGDGGLVDVSSEGEVQLIGKVVGLAPRGRNAKLVIDPKHIEINDAGGGAYNSTTVQFDDSQSGTTVITAASINAQVADVVLQANTDITVTTAINIANAGTGLTLQAGRSILINADLTTNNGVVTLTANDHTALSADRDAGVASIAMASGTTINAGSAAVNMTIDASGHGLMGDITAYNVTSSGAVALDSAGSIIVNGPNFASGSTSIGLTADNDVTVGSALTTGSLTIAAGRSVALNSNVTTTSTVNIKANDSTQTLANRGSGDGAISMAAGTTLNGGSAAITLTVDSTNASTAGGITIDLVTTDGNLTVSSHDAITEIDADSEVDLRGDILSLTTTDTNGAYIGAPGTSTTDYLEVHAKTRVDVTTNNGSVALASPGYLSGTVDWFGAAPTDDIGTTDIDESKIVNLNLGTVNVGTATFMLVVTDGGILDGLAGTGTNITAGSANLTTNGGESVVAGAIVLGNDGTRGGSIGDATHALKTELGILTASSSNGSVYIDEASGILINSINANQKGVTAKVNSSYAVVVTTLDGQTETGTNNVTVTAAGDIIIGTASATSTVTLTSTAGNIYDNNDATNNILAKNVVLNAGLNMGLSGDVLELTTESATLTATNGGVYFAMGVPSTVASVTAGGGHDVVINASDGVLSLGMVSAVGGSVTIDGGTGSILDNNGATANIIANSASIKSDKGAGTASDALETTVDTLAVEITGSGKSFYIDESDALTSINAKVNNGSTNLNFTGGSFAFNATTGAFSSTGVGSVTFENTGGGVAIGTVTATGGSATITASTAITDATSAITADTVVLTAGTSIGASGSTIKSTATTLTYLASAGSIYAQESDGATVNAKAVGTGKNIEFATTTGNLTIGTISAKGSVTLTATAGSVLSGGTSSSATGATVVLSAGTAIGASGASVNTVAANLSATASAGGVYLSNAGDVTLTTAVATGAGFQLSNTGALVLNGVTAAGQAVSLTASGAITDGNGATNNISAESLTLVGLSIGSTATNGAVDTQVNSVTATTTSGGIYLNELGSGGLTITAATAVGSDANVSITGAGDIALGVITAKGDDVTLVSAGKITDNNGAANNVTADILNVTGPNGVEGLETSITQLSSTGSTDIVNAGAMAITKASLEGGSSSFIAESLTILDMAGDTATIANNTSLTLQTTTGNIVFLDTNDTIVAQGSGTVTINAGTTDKSGAVAIIGNITTANQNISITADSHITIGLLNAGIGDVSVSSDYGVVLDGNSTAVNVIARNFSLSGTTPTVRQAELHTTNSIANAHAHDSEVAAKLTLLEANTAAMDIMSTAESTANYSLTLASSAYDTAQAEVDRLAPIENGLKITTYVLDGVSIALSTAASAIEVAAGAAQAIPFSGDAGSEAAAAVTGLAANVAGIAAYAIGIAHSEIAGQLDDAEDLAFNKDAEMYAAKSTLTDAIANHQAYKEATSISQAAYDAAVIERNHNWQVARQAVLAEDASSTAGTLALPFGIQISGQLDVNAVNSDVVLAITGPAVLNSMSATKTAGTGIMSITATDNISVVGALVADDYIRLETTGQIINGNAGHSLTASKFVGVAGTGIGASGGLNTSVTTMAASTTTGDVTVTNNKALTLGTVDGVSGITTAGNIVIAATSPLTVSNNVTTSGGTVALTAGNSANSGDDFTLSANTTISAASTVTLTAGDNVAVESGAQITGTTVTITANNTGDGEADGVNGGATIAGNINASSLVLSGGGVNHSGTITSAGSVNISATSTAASSVNGITLGSVTAGGQIDVVSSNKLVMNQNVTTTSGAVVLTAGDSSASGDDLTLAAGKTISSGDNTITLTSGDNMSIGAAAQITGTTLVLAANHEGAGVADGVSGSMVLAGNLSGQTVTISGAGLTHTGSITSNSTVSVNVNSAATSAISGISLAAVTAGGQIDVTSSHALTLTQNVQSTGGPITITAGLQTTSVDNLTVDAGVTVQSSAGVAFSAGDSMTFGLGSQVTGTGITLIADKAGDGDGDGVSGSINLYGNVNGSSVDVSAAGFRQTGTITSSGDVDIAVVSTLSSPYNGIALGTISAAGHSVKISATGTATAGIADNNGAATNVTAADLAMVANGGVGASADALETQVSNLAATGGSGGVTISNSGDLSLTTVEGVTSFSAADGALSLVTTGNLLISDGFVQGAGLTVTLQATGGNINETNSGAAADVVGNIITLTTTGLGNGVGDVANRLELNAQVLNVTTDKGDVYLHDTAGGVAVGLITTGTTEGTRVDMMVSNGGVTEDPGHGHAPKIIADELYLNVTGHGFGIGHVDNDLNVDLTTFVNVTTEGGSIYMADADYGFYVDLVSTNSASTNIAMGTELRLVSLEGSIEESPTRSDAAVDLKAERVVLLAQGENDNIGTVEDAIEIKAANLFSETESGARSSLVAPDGDSPIVEAPGQSANALLIDGDFVGGDDSNLFQEIQSTGNRVGGDIGGGAGGGFGGAGGAGGGFGGAGGDFGGAGGGLVSDAGGFGGEGAPGGDAGGFGGEGAPGGDAGGFGGEGAPGGDAGGFGGEGAPGGDAGGFGGEGAPGGDAGGFGGEGAPGGDAGGFGGEGAPGGDAGGFGGEGAPGGDAGGFGDEGAPGGDAGGFGGEGAPGGDAGGFGGEGAPGGDAGGFGGEGAPGGDAGGFGGEGAPGGDAGGFGGEGAPGGDAGGFGGEGAPGGGPGGDAGGIGGTDGAGGDRGGPGGTDGAGGDTGSPGSGDGDVNKQGEGG

SEQ ID NO: 1246 - protein, 365 aa, Phaeosphaeria nodorum
MPSHNIVVLAGDGVGPEVVAEAFKILKVVEKHTDNTFNFQEHLFGGCSIDAHNNPLTDEALAAAKGADAIILGAVGGPKWGTGKVRPEQGILKLRKELGTFGNLRPCFFASDSLVDSSPLKAENVRGVNFNIIRELTGGIYFGERKEDEGDGKAMDTEPYSVEEIERVVRLAGSLASAENPPVPVWSLDKANVLATSRLWRKTFERIMKDEYPHLKSGTHLIDSAAMLMIKNPRALNGVVVTSNLFGDIISDEASVIPGSLGLLPSASLGGIPDGKTKLNGIYEPIHGSAPDIAGQGIVNPIATILSISMMFKYSLCLPELALKIDEATKITIDKGVRTGDIGGTSKTAEVGDAIAAELETLLKK

SEQ ID NO: 1247 - protein, 425 aa, Blastocladiella emersonii
MTLIDKLMEKTKKVVGSSDKDAPAPASPSSPSTAAGAGSASSTASSTTTAAASGNLSIPSPLVAGSTTSSSISHAQKMATAAHTNSDYSPSPAATPSAPLDAVAERRRRKTTLADLELRQTLGTGSFGRVHLVRLRSTGKYYAMKVLKKAEVVKHKQVEHTLNEKGILEQIDHPFLVALHSSFQDSANLYMVMEYVTGGELFTYLRRSQRFSNNVAKFYAAEVVLAFEYLHSKDIIYRDLKPENLLLDAQGHVKITDFGFAKHVPDITWTLCGTPDYLAPEIIQSRGYGRAVDWYALGVLIFEMLAGYPPFYDEDHVRMYEKILQGKVKWPSHFDPAAKDLLKRLLTTDLTKRYGNLKGGSKDIKMHKWFAGLDWTKLFNKQIPPPYTPPNRGDGDTSNFDAYPEETEPYGKVQPDPYAQLFKDF

SEQ ID NO: 1248 - protein, 347 aa, Agrobacterium tumefaciens str. C58 (U. Washington)
MRGVVIHAAKDLRVEDVAGQPLAADEVRVAVAVGGICGSDLHYYNHGGFGTVRVREPMALGHEFAGTVVEVGSSVSHLVPGMRVAVNPSLPCGTCRYCAQGRQNQCLDMRFMGSAMRSPHVQGGFREVVTVHSTQPVQIADGLSMGEAAMAEPLAVCLHAARQAGSLLGKTVLITGAGPIGMLSLLVARLAGAAHIVVTDVADAPLDLARRIGADEAVNILRDADMLEKYRFEKGVFDVLFEASGNQAALLPALDLLRPGGIIVQLGLGGDFTIPMNLIVAKELQLRGTFRFHEEFAQAVNMMGRGLIDVKPLISATLPFDQAREAFDLAGDRAKSMKVQLAFSGAA

SEQ ID NO: 1249 - protein, 164 aa, SYNECHOCOCCUS SP. WH 8102
MDELVSCPVPPEQRPLEEFQQLSESWFFSWPTGEVSSLKRSLLISWMLMLPLCTLVASGSLTLKADPPRLVVAGAVAALVLPLLLLVRQWLGWTYVMHRLLSESVDYEESGWYDGQTWEKPLSWRTRDLLVARHEVRPILSRLGRAMAMAAGLMLGGASLCQAL

SEQ ID NO: 1250 - protein, 170 aa, Triticum aestivum
MAGVGRNMVAPLLVLNLIMYIIVIGFASWNLNHFINGLTNRPGVGGNGATFYFLVFAILAGVVGTWRGDSLATSASSALVAWAITALAFGLACKEIHIGGYRGWRLRVLEAFVIILMFTQLLYVLALHSGLFGNQFGNHAGAGGYGAEHGAYGAGDPHNKGMGTGGVARV

SEQ ID NO: 1251 - protein, 379 aa, Arabis gemmifera
MSTTGQIIRCKAAVAWEAGKPLVMEEVEVAPPKKHEVRIKILFTSLCHTDVYFWEAKGQTPLFPRIFGHEAGGIVESVGGGVTDLQPGDHVLPIFTGECGDCPHCHSEESNMCDLLRINTERGGMIHDGESRFSINGKPIHHFLGTSTFSEYTVVHSSQVAKINPDAPLDKVCIVSCGLSTGLGATLNVAKPKKGQSVAIFGLGAVGLAAAEGARIAGASRIIGVDLNSQRFDQAKEFGVTEFVNPRDHDKPVQQVIAEMTNGGVDRSVECTGSVQAMIQAFECVHDGWGVAVLVGVPSKDDAFKTHPMNFLNERTLKGTFFGNYKPKTDIPGVVEKYMNKELELEKFITHTVPFSEINKAFDYMLKGESIRCIITMGA

SEQ ID NO: 1252 - protein, 155 aa, Zea mays
MAASNVENRCFVGGLAWATDDHSLHNAFRTYGEVLESKIILNRKTQRSRGFGFVTFSTEEAMRNAIEGMNGKELDGRNITVNEAQSRGGREGGGGGNGGAREGGVYGGGGRRDGGGGYGGGGGYGGGGGYGGGGGGYGGGNRGGGYGNSDGNWRN

SEQ ID NO: 1253 - protein, 238 aa, Desulfitobacterium hafniense
MIAFGLVMIFFGLGEQGAVGFSNLWTHGGFLPNGVWGLLLSLVIVMFSFGGVELIGITAAEADDPKRSIPKAINQVVWRILIFYIGALTILMILYPWDQIGTSGSPFVEIFSAIGIPAAAHILNFVVLTAALSVYNSGIYSNGRMLHGLALQGNAPKFLTKVSRNGIPINGVFASSAVTLIAVILNFLVPGKVFLYLISIATIAGIFNWAMILVTQLRFRKVEAEKGREDQCIQRYDN

SEQ ID NO: 1254 - protein, 487 aa, Oryza sativa
  unsure (1)..(487): unsure at all Xaa locations
MAVSSSSLLLRRGATGGAGRRWGPGEALRRLVSSSEAAPAAARSPPVMPPFEHRPRPYAGWSGDEILAKRKQFLGSSVFYYYQKPLNIVEGKMQYLYDENGKRYLDCFGGIVTVSCGHCHPDIVNAVVEQTKLLQHTTTIYLNQPIVEFAEALASKMPGNLRLVYFXVNSGTEANELAMLMARLYSGNLNMIALRNAYHGGXSAGTIGLXTGLQTXWKYPIPQGEIHHVMNPDPYRGTFGSDAVAYAKEVEEQINYGTSGRVAGFIAETFQGVGGAVELAPGYLKLAYDTVRKAGGVCIADEVQSGFGRTGSHYWGFQTQDVIPDIVTMAKGIGNGLPLGAVVTTPEIANVLAQKIQFNTFGGNPVCSVGGLAVLKVLDKEKRQAHCADVGSHLVNRLKELQQKHEIIGDVRGRGLMLGVELVTDRKEKTPAKAETNLLFEKLKDLNILVGKGGLHGNVFRIKPPMCFTRDDADYLVDAMDYAMSGL

SEQ ID NO: 1255 - protein, 428 aa, Brassica rapa
HHSYTLYFLLVFFVLILPRPAFSINTLSSTESLTISSNRTLVSPGNFFELGFFRTNSRWYLGMWYKKLSVRTYVWVANRDNPVANSVGTLKISGNNLVLLGHSSKSVWSTNLTRRNERSSVVAELLANGNFVMRDSNNNDASRFLWQSFDYPTDTLLPEMKLGYDLKTGLNRFLTAWRSSDDPSSGEISYKLEPRRLPEFYLLKRRVFRLHRSGPWNGIRFSGIPEDQKLSYMIYNFTENSEELAYTFRITNNSIYSILTVSSEGKLERLMWNPSLAMWNVFWFFPVDSQCDTYMMCGPYSYCDVNTSPVCNCIQGFNPSNVQQWDQRSWSDGCIRKTLLSCSGDGFTRMKNMKLPETTMATVDRSIGVKECEKKCLSDCNCTAFANADIRNGGIGCVFWTGRLDDMRNYVADRGQDLYVRLAAADLV

SEQ ID NO: 1256 - protein, 476 aa, Clostridium perfringens
MAEQHNEPKKLGFAQLAALIVGSMIGGGAFNLPSDMARGAGTGAVIIGWIITGIGMIALAFVYQSLANRKPELTGGVYSYAKGFGEYIGFNSAWGYWLSAWIGNVSYSVLLFGAVGYFLPMFGAGNNVASIIGASVLLWAFTLLILNGVSGAALINLITTIAKLVPIFLFIVISLFMFNFDKFTFQFWGTSDLGGIVTQVKSTMLVTLWCFIGIEGAVVSGRAKKQSDVGKATVLGLIGTLIIYMLITLMALGVMDRVKLSGLENPSMAYVLEFAVGKWGAVLINLGLIISLFGSLLGWALLAAEIPYVAAKDGVLPKVFAKLNKKGTPSGSLIITNLLVQAFLILTLVVSSTYQALYSVASTAILVPYLLSAMYGFKLALTGETYDKNPTGRTRDKIFGGIATVYAIWLCYAAELKYLLLCFILYAVGIIFFYIGKKQNNKDAEVFVGKEKILAIIVLVIAIIAIVMLFNGTITI

SEQ ID NO: 1257 - protein, 374 aa, Euonymus alatus
ALSIAGAVQSQKLAVRAISQLQSLPGGDIKLLCDTVVETVRDLTGYDRVMVYKFHDDEHGEVVAENKKPDLEPYIGLHYPATDIPQASRFLFKQNRVRMIVDCHASTVRVIQDDRLVQPLCLVGSTLRAPHGCHAQYMENMGSQASLALAVISNGNDEEVIGGRNATRLWGLVVCHHTSARCIPFLFRYACEFLMQAFGLQLNMELQLAAQVSEKHVLKTQTLLCDMFLRDSPTGIVTKSPSIMDLVKCDGAAFYYQGKYYPLGVTPAEAQIKDIVEWLLAFHGDSTGLSTDSLADAGYPAAASLGDSVCGMAVAYITNRDFLFWFRSHTTEEIKWGGAKHHHEDKDDGQRMHPRSSFKAFLEVVKSRSFPWEN

SEQ ID NO: 1258 - protein, 276 aa, Rhizobium etli
WGFDGSSTMQAEGRSSDCVLKPVAIYPDPARTNGVLVMCEVMMPDGVTPHPSNARATILDDEDAWFGFEQEYFFYQNGRPLGFPEQGYPAPQGPYYTGVGYSNVGDVAREIVEEHLDLCLAAGINHEGINAEVAKGQWEFQIFGKGSKKAADQIWMARYLLQRLTEKYGIDIEYHCKPLGDTDWNGSGMHCNFSTKYMREVGGKAYFEALMAQFEKNLMDHINVYGPDNDKRLTGKHETAPWNKFSYGVADRGASIRVPHSFVKNDYKGYLEDRRP

SEQ ID NO: 1259 - protein, 340 aa, Oryza sativa
  unsure (1)..(340): unsure at all Xaa locations
MSMSFLYVAEKNPWLADIAPCRTVAAAASPSPFLALSKPTSPSTRKKAAAAAEAKAAKMQYKNLGRSGLRVSQLSYGAWVTFGNQLDVKEAKALLQACRDAGVNFFDNAEVYANGRAEEIMGQAMRDLGWRRSDVVVSTKLFWGGQGPNDKGLSRKHIVEGLRGSLKRLDMDYVDVVYCHRPDATTPVEETVRAMNWVIDHGMAFYWGTSEWSAQQITEAWSVANRLDLVGPIVEQPEYNLFSRHKNLANRSLVDDTLRKVNGLKPIASELGVSLAQLAIAWCASNPNVSSVITGATKENQIVENMKALDVIPLLTPEVVDKIEAVESSXIHRCXNWRQK

SEQ ID NO: 1260 - protein, 250 aa, Sinorhizobium meliloti
MRRTGKTIIGSLLGLAYVVATPFASLASFDDGLRQSTALAGPHGDVLVVADAGSAPGGSQETGSGGGQDTGSSGGQDSGSGGGEGSGGGQDTGSGGGQDTGSGGGQDTGSGGGQDSGSGGGEGSGGGQDSGSGGGQDTGSGGGQDTGSGGGQDSGSGGGEGSGGGQDSGSGGGQDTGSGGGQDSGSGGGQDSGSGGGEGSGGGQDTGSGGGQDSGSGGGEGSGGGQDSGSGGGQDTGSGGGETPASTSSD

SEQ ID NO: 1261 - protein, 1122 aa, Armoracia rusticana
MSGSRPSQSSEGSRRSRHSARIIAQTTVDAKLHADFEESGSSFDYSTSVRVTGPVVENQPPRSDKVTTTYLHHIQKGKLIQPFGCLLALDEKTFKVIAYSENAPELLTMASHAVPSVGEHPVLGIGTDIRSLFTAPSASALQKALGFGDVSLLNPILVHCKTSAKPFYAIVHRVTGSIIVDFEPVKPYEVPMTAAGALQSYKLAAKAITRLQSLPSGSMERLCDTMVQEVFELTGYDRVMAYKFHEDDHGEVVSEVTKPGLEPYLGLHYPATDIPQAARFLFMKNKVRMIVDCNAKHARVLQDEKLSFDLTLCGSTLRAPHSCHLQYMANMDSIASLVMAVVVNEEDGEGDAPDSTTQPQKRKRLWGLVVCHNTTPRFVPFPLRYACEFLAQVFAIHVNKEVELENQIVEKNILRTQTLLCDMLMRDAPLGIVSQSPNIMDLVKCDGAALLYKDKIWKLGTTPSELHLQEIASWLYEYHTDSTGLSTDSLHDAGFPKALSLGDAVCGMAAVRISLKDMIFWFRSHTAGEVRWGGAKHNPDDRDDARRMHPRSSFKAFLEVVKTRSLPWKDYEMDAIHSLQLILRNAFKDGESTDVNTNIIHSKLNDLKIDGIQELEAVTSEMVRLIETATVPILAVDSDGLVNGWNTKIAELTGLPVDEAIGKHLLTLVEDSSVEIVKRMLENALEGTEEQNVQFEIKTHQSRADAGTISLAVNACASRDLHENVVGVCFVAHDLTGQKTVMDKFTRIEGDYKAIIQNPNPLIPPIFGTDEFGWCTEWNPAMSKLTGLKREEVIDKMLLGEVFGTQKSCCRLKNQEAFVNLGIVLNGAVTSQESEKVSFAFFTRGGKYIECLLCVSKKLDREGVVTGVFCFLQLASHELQQALHVQRLAERTALKRLKAIAYIKRQIRNPLSGVMFTREMIEGTELGPEQRQILHTSALCQEQLSKVLDDSDLESIIEGCLDLEMKEFSLNEVLTASTSQVMMKSNGKSVRITNETGEEVMSDTLYGDSIRLQQVLADFMLMSVNFTPSGGQLTVTASLRKDQPGRSVHLAYLEIRLTHTGAGIPEFLLNQMFGTEEDVSEEGLSLMVSRKLVKLMNGDVQYLRQAGKSSFIISAELAAANK

SEQ ID NO: 1262 - protein, 461 aa, Streptomyces coelicolor A3(2)
MSNSTTAKAPRQPADASLSHGLKQRHLSMIALGGVIGAGLFVGSGAGIAAAGPSIVVAYTVSGLLVMLVMRMLGEMSAAYPSSGSFSAHAERAIGPWAGFTAGWAFWVLLCTAVGLEGIGAAQIVHGWLPGTPEWAWVALFMVVFCGTNLAAVKNFGEFEFWFAALKVGAISLFLVLGVLAICGVLPGTDSPGTSHLGDFLPHGGNGLIIGLLASVFAYGGLETVTIAAAESENPVRGVASAVRTAMWRIALFYIGSMAVIVTLVPWDSPEVVEKGPYVAALDELGIPGAGQLMNIVVLVALLSAMNANIYGASRIGYSLVERGQGPKVLGRVSGGVPRVAVLVSSLFGFGCVLLSYWRPDDVFSWLLNMIGAVILVVWIFIAAAQLRLRRRLEREAPEKLVVRMWAFPWLTWVALAGMAAVFVLMAREPDTRVQLYSTGGMTLVLAAVGYARQRRGAARD

SEQ ID NO: 1263 - protein, 441 aa, Thermobifida fusca
MPRPPQGAGPTRSRPAPLRETPPARQPLPPRPPPQGHHPWLPDALPRRPRLGQAHPKHSSKGPNPAGTGYPAQPRHGRIVPMVHRGDIPRNDVPPAGVYRADPERYNGRMPYRRTGRSGLDLPAISLGLWHNFGDNRPLETQRAILRRAFDLGVTHFDLANNYGPPPGAAELNFGRILREDFRPYRDELVISTKAGWDMWPGPYGSGSSRKYLLASLDQSLARLGLDHVDIFYSHRYDPSTPLEETMAALDAAVRSGKALYVGISSYSPQHTVEAATILRQMGTPLLIHQPSYSMVNRWIEDDGLLDTLEAEGVGCIAFSPLAQGMLTDKYLNGIPANSRAAAGTSLSPDWLTEANLARIRALNDIAARRGQSLAQMAISWVLRDPRVTSALIGVSSVQQLEENIAAVHAPEFTDAELAEIDRHATDLGVNLWQRSSRPRT

SEQ ID NO: 1264 - protein, 364 aa, Streptomyces coelicolor A3(2)
MSSALTDLFPYPIVQAPMAGGVSVPRLAAAVSEAGGLGFLAAGYKTADGMYQEIKQLRGLTSRPFGVNLFLPQPETADPAAVDVYAHQLAGEAAWYETELGDPDCGRDDGYDTKVAVLLDNPVPVVSFHFGVPSREVVDSLHRVGTFALVGATTADEARAVEQSGADAVIAQGMEAGGHQGTHRDNPETGGAGTGLLSLVAQVREAVSLPILAAGGIMRGGQIAAVLAAGASAAQLGTAFLATSESGAHDLHKQALTNPLFVRTELTRAFSGRPARALVNRFLREHGPYAPAAYPEVHHLTAPVRKAAAKAGDAQGMALWAGQGHRMARELPAGQLVEVLVAELAAAGTALSGLSGYATGGGAR

SEQ ID NO: 1265 - protein, 503 aa, Zea mays
  unsure (1)..(503): unsure at all Xaa locations
KKKKKKKKKKKKKKKKKKKNFSPAAALLILISARAASAPAGRRIPPASSMLWVRNIRRFVDTGAGLGSEAIMELETKRILLEIFKERQRKSAEAGSIPSFYKKKPEEGSISSRVQRLAKYRFLKKQSELLLNADDLDAMWVCLRENCVIDDATGAEKMNYEDFCHIATVCTEQIGQKCKRFFSPSNFMKFEKDDSGRIAILPFYLYVMRTVSLTQARIDMSELDEDSDGFLQPHEMEAYIRGLIPNLAQLRDMPXAFVQMYCRIAARKFFFFCDPHRRGKACIKKVLLSNCLQELMELHQESEEEVTDTEQAENWFSLTSAQRICDMFLALDKDTNGTLSKQELKEYADGTLTEIFIERVFDEHVRRSKVGGGNSREMDFESFLDFVLALENKDTPEGLTYLFRCLDLNGRGFLTTADIHTLFRDVHQKWIEGGNYELCIEDVRDEIWDMVKPADPLRISLSDLLSCKQGGTVASMLIDVRGFWAHDNRENLLQEEEEQVEEA

SEQ ID NO: 1266 - protein, 335 aa, Glycine max
  unsure (1)..(335): unsure at all Xaa locations
MSSGATHWCHACRQPVVLDGRDAVCPYCDGGFVQELDELEGIAPHHTFCSQSGEFHQMPDIFDAIPAFMGQRGSDQRSRLMDDAVDNFMRHRTAGRNSNFDVRGRSGSRPVPERSWGVFSSGPYLIFHGQVPGSTFAAGSPRGGSRHVDFGDYFMGLGLEELIEQLTMNDRRGPPPAALSSIDAMPTIKITQAHLRLDSHCPVCKRKFELGTEARDMPCNHIYHSDCIVPWLVQHNSCPVCRVELPPQGQASSRGTQNWGGRNDSNTSSSGSNDSSRGRENSRQNHGRRNPSSFLWPFRSSNSNNNHHSDTGGSSSSXTPDQNNGTSYSGWPFDC

SEQ ID NO: 1267 - protein, 392 aa, Blepharandra heteropetala
DLEPVNPADVPVTAAGALKSYKLAARAISRLQSLPSGNISLLCDVLVKEVRDLTGYDRVMVYKFHEDEHGEVISECCRPDLEAYLGLHYPATDIPQASRFLFMKNKVRMICDCLAPAVKVIQDERLPQALSLCGPTLRSPHGCHAQYMANMGTIASLVMSVIINEDNDMMDGDQQHIARKLWGLVVCHHTSPRFVPFPLRYACEFLIQVFGVQINKEVELAAQVREKHILRTQTLLCDMLLSDAPVAIITQSPNVMDLVKCDGAALYYRKKFWLLGVTPTEVQIRDIAEWLLEYHGGNAGLSTDSLMEAGYPGASDLGNAVCGMAAVRITSRDFLFWFRSHTAKEIKWGGAKHHPNDKDDVRKMHPRSSFKAFLEVVKWRSLPWKDVEMDAI

SEQ ID NO: 1268 - protein, 198 aa, Oryza granulata
GQTPMFPRIFGHEAGGIVESVGEGVTDLSPGDHVLPVFTGECKECPHCKSAESNMCDLLRINTDRGVMIGDGKSRFSINGKPIYHFVGTSTFSEYTVMHVGCVAKINPKAPLDKVCVLSCGISTGLGATINVARPPKGSTVAIFGLGAVGLAAAEGARIAGASRIIGVDLNANRFEEARKFGCTEFVNPKDHDKPVQQ

SEQ ID NO: 1269 - protein, 185 aa, Triticum aestivum
SKTRENLQIIDARNSDLIEVNKTEFMTPSAFIFLYENNLFLTFCNRTVAAWNFRGELVTSFEDHELWHPNCNTNNIYITADQDLIISYCKISKQSTDCADSEAGEVSSMGSINMSNIFTGKCVAKISPSDPTLTIAPRKRGGNSRSTIHSTVPEALEDITALFYDEDRNEIYTGNSKGLVHVWSN

SEQ ID NO: 1270 - protein, 338 aa, Yersinia pseudotuberculosis
MYVLVTGGSGYIGSHTCVQLIEAGYKPVILDNLCNSKSSVLARIHSLTGYTPELYAGDIRDRTLLDSIFAAHPIHAVIHFAGLKAVGESVNRPLEYYNNNVFGTLVLLEAMRAAQVKNLIFSSSATVYGDQPQIPYVESFPTGSPSSPYGRSKLMVEQILQDVQLADPQWNMTILRYFNPVGAHPSGLMGEDPQGIPNNLMPFIAQVAVGRRESLAIFGNDYPTPDGTGVRDYIHVVDLADGHVAAMKTLHGKPGVHIFNLGAGVGHSVLQVVAAFSKACGKPLAYHFAPRREGDLPAYWADATKAAEQLGWRVSRSLDEMAADTWHWQSKNPQGYPD

SEQ ID NO: 1271 - protein, 484 aa, Glycine max
  unsure (1)..(484): unsure at all Xaa locations
MEGGGRRITVSPRPCCGRRVVAKKRPRLVDGFVNSVKKLQRREISSNRDRAFSMTDAQERFRNIRLQEEYDTHDPKGPSSVVLSFLRKRSKIIEIVAARDIVFALAQSGVCAAFSRETNERICFLNVSPDEVIXRSLFYNKNNDSLITVSVYASDSYSSLKCRSTRIEYIRRVKPDAGFALFESESLXKWPGFVEFDDVNXGKVLTYSAQDSIYKVFDLXKNYSMLYSISDKNVQEIKISPGIMLLIFTKSSSHVPLKILSIEDGTVLKSFNHLLHRNKKVDFIEQFNEKLLVKQENENLQILDVRTFELTEVSRSEFMTPSAFIFLYENQLFLTFRNQTVAVWNFRGELVTSFEDHLLWHPDCNTNNIYITSDQDLIISYCKADSDDSLSEGNGSINVSNILNXAKCLAKIRASNGFPMVKECSCSDDNCSSSACNSGKQKRSSRIRSTVAEALEDITALFYDEERNEIYTGNRHGLVHVWSN

SEQ ID NO: 1272 - protein, 448 aa, Zea mays
MPFRSIVRDVRDGFGSLSRRGFEVRFLSHRRGKSHGAVHELHDPVLVVQSSCWASLPPELLRDVIERLETSEDTWPSRKHVVACAAVCRTWREMCREIVKSPEFSGKITFPVSLKQPGPRDGTIQCFIKRDKSTQIYSLYLSFSSAVPVENGKFLLSAKRNCRATYTEYIISINSGDTSRCTSNNTYIGKLRSNFLGTKFVIYDTHPPYNGTSQTVAGKTSQRFYSKKGSTKVSCRWYSIAQISYELNVLGTRGPRRMNCVMHSIPASCLEAGGSVPCQPDSIAAHSVGGSFSSVSLSKSSTMDHSMHFTSSRLSDAITGDGIVNRGQALNDADDEECKDMPLILRNKAPRWHEQLQCWCLNFRGRVTVASVKNFQLVAATQPAAGALTPSQAAPQPAPPPPPDQEKVILQFGKVGKDIFTMDYCYPLSAFQAFAICLSSFDTKLACE

SEQ ID NO: 1273 - protein, 580 aa, Zea mays
MGEVEDMYTQDGTVDMKGNPAVKKGTGNWRACPYILANECCERLAYYGMSTNLVNYMKTRLGQVNSVASNNVTNWQGTCYITPLIGAFFADAYMGRFWTIAIFMIIYIFGLALLTMASSVKGLVPTSCGDKDVCHPTDAQAAVVFVALYLIALGTGGIKPCVSSFGADQFDENDEREKKSKSSFFNWFYFSINIGALVASTVLVYVQTHVGWGWGFGIPAVVMAIAVGSFFVGTPLYRHQKPGGSPLTRIAQVLVACARKWNVAVPADKSRLHETVDGESGIEGSRKLEHSEQLACLDRAAVVTAEDGAEASPWRLCSVTQVEELKSVIRLLPIWASGIVFAAVYSQMSTMFVLQGNTLDQSMGPRFKIPSATLSMVDTISVIVWVPVYDRAIVPLVRSYTGRPRGFTQLQRMGIGLVVSIFSMVAAGVLDIVRLRAIARHGLYGENDIVPISIFWQIPQYFIIGCAEVFTFVGQLEFFYDQAPDAMRSMCSALSLTTVALGNYLSTVLVTIVTHITTRHGRIGWIPENLNRGHLDYFFWLLAVLSLLNFLAYLVIASWYKYKKTADDYPGAKGEHGTEH

SEQ ID NO: 1274 - protein, 246 aa, Thermotoga maritima
MRLEGKVCLITGAASGIGKATTLLFAQEGATVIAGDISKENLDSLVKEAEGLPGKVDPYVLNVTDRDQIKEVVEKVVQKYGRIDVLVNNAGITRDALLVRMKEEDWDAVINVNLKGVFNVTQMVVPYMIKQRNGSIVNVSSVVGIYGNPGQTNYAASKAGVIGMTKTWAKELAGRNIRVNAVAPGFIETPMTEKLPEKARETALSRIPLGRFGKPEEVAQVILFLASDESSYVTGQVIGIDGGLVI

SEQ ID NO: 1275 - protein, 249 aa, Zea mays
MSATPLPPPGPDGAVALLPPPGTDMTGICFRDQLWLDTYPLDRNLVFDYFALSPFYDITCNNESLRSRQIHPLDMSHLTKMTGMEYLLSEVMEPHLFVIRKQKRESPEKSSPMLAYYILDGSIYQAPQLCNVFASRISRAMHHISKAFTIACSKLEKIGNVETEPDAVASESKTQKEAIDLKELKRIDHILSSLKRKIGAAPPPPPYPEGYVPPSAEQEKASDDVAASEAPPQLDPIIDQGPSKRPRFQ

SEQ ID NO: 1276 - protein, 77 aa, Triticum aestivum
VAALDIMQSYYPERLGRVFLIHVPYMFMAAWKMVYPFIDEKTKKKFVFVADRDLDATLRDAIDESQLPEEYGSKLKL

SEQ ID NO: 1277 - protein, 379 aa, Hordeum vulgare
MATAGKVIKCKAAVAWEAGKPLTMEEVEVAPPQAMEVRVKILFTSLCHTDVYFWEAKGQIPMFPRIFGHEAGGIVESVGEGVTDVAPGDHVLPVFTGECKECPHCKSAESNMCDLLRINTDRGVMIGDGKSRFSIGGKPIYHFVGTSTFSEYTVMHVGCVAKINPEAPLDKVCVLSCGISTGLGASINVAKPPKGSTVAIFGLGAVGLAAAEGARIAGASRIIGVDLNAVRFEEARKFGCTEFVNPKDHTKPVQQVLADMTNGGVDRSVECTGNVNAMIQAFECVHDGWGVAVLVGVPHKDAEFKTHPMNFLNERTLKGTFFGNFKPRTDLPNVVEMYMKKELEVEKFITHSVPFSEINTAFDLMAKGEGIRCIIRMDN

SEQ ID NO: 1278 - protein, 406 aa, Shewanella oneidensis MR-1
MATTLLGTGVFILPQMTIAKAHAGALIAWSLLTLAIIPVALIFGRLASVFPHAAGPAYFVEKAFGRTAGRTIGLIFLLVVPMGAPAAILMTFQFVNALIPLDGWFKVSAEVLVIFGLFLLNLRGIQVSAKLQFGLTLCIVAIVVVLFGASSLQPGHLTSLASYGTPEISTMMIAAGIAFWSFLGIEAMTHLADDFRRPQQDMIPAMMMGTVLVGIIYVACTLILLLVPTDNSVAMIGVFDALLGGYGAQVIGVLGIASGLATVNVYAASAARLVWSFSCEGILPRCFAVKNRHGVPIRALGALLSVMASVIVLTHITGQELEHLIAWSNGVFVVIYLMAMLAAAKLLPRHNLPLVVLGCGFCLALGIALGASMAYVLVLILFVAPFLWWQKTHISRKQTLVDNKVS

SEQ ID NO: 1279 - protein, 405 aa, Thermoplasma acidophilum
MAYIQVKDDGTLQVPDRVTIGYIEGDGIGPDISKTTINVLNAALEIAYGGKRSIEWKKILAGDEAYDKTGDRLPQSSLDELKKCVVALKGPLTTPIGEGFRSLNVTLRQYLDLYANIRPVRYFPGVPSPVVHPEYMNMVVFRENTEDLYAGIEWRYDSDGPKKVREFLASTFNINLTADTGIGIKPISKFKSTRLVRKAIQYAIANKRKSVTLVHKGNIMKYTEGAFKEWGYEVAKTEFGNYTVTETEYLQDPEKYSNKIVIKDRITDNMFQQVLTRTQEYDVIATPNLNGDYLSDALAAQVGGIGLAPGANIGDHYAVFEAVHGTAPKYAGMDVANPTSLILSGEMMLQHIGWNEAANILDEAIMQTYKDQKLTQDIARLLNVKALKCSEFGEEIINRMKKPVH

SEQ ID NO: 1280 - protein, 752 aa, Geobacillus stearothermophilus
MENQNRQNAAQCPFHGSVTNQSSNRTTNKDWWPNQLNLSILHQHDRKTNPHDEEFNYAEEFQKLDYWALKEDLRKLMTESQDWWPADYGHYGPLFIRMAWHSAGTYRTGDGRGGASTGTQRFAPLNSWPNNANLDKARRLLWPIKKKYGNKISWADLFILAGNVAIESMGGKTIGFGGGRVDVWHPEEDVYWGSEKEWLASERYSGDRELENPLAAVQMGLTYVNPEGPDGKPDPKAAARDIRETFRRMGMNDEETVALIAGGHTFGKAHGAGPATHVGPEPEAAPIEAQGLGWISSYGKGKGSDTITSGIEGAWTPTPTQWDTSYFDMLFGYDWWLTKSPAGAWQWMAVDPDEKDLAPDAEDPSKKVPTMMMTTDLALRFDPEYEKIARRFHQNPEEFAEAFARAWFKLTHRDMGPKTRYLGPEVPKEDFIWQDPIPEVDYELTEAEIEEIKAKILNSGLTVSELVKTAWASASTFRNSDKRGGANGARIRLAPQKDWEVNEPERLAKVLSVYEDIQRELPKKVSIADLIVLGGSAAVEKAARDAGFDVKVPFFPGRGDATQEQTDVESFAVLEPFADGFRNYQKQEYSVPPEELLVDKAQLLGLTAPEMTVLVGGLRVLGANYRDLPHGVFTDRIGVLTNDFFVNLLDMNYEWVPTDSGIYEIRDRKTGEVRWTATRVDLIFGSNSILRSYAEFYAQDDNQEKFVRDFINAWVKVMNADRFDLVKKARESVTALQCSPISRSTVGRVCSK

SEQ ID NO: 1281 - protein, 122 aa, Glycine max
  unsure (1)..(122): unsure at all Xaa locations
DIVPFIVWFAIKAFQEQKWIHLILMHVLLGVTLIIPLANAVSLTSWTVVGFFSGFIAYICTQEWCNRCNYVLSXGGLKGEAAFMSILLFLALXKNGFTLNWWGNNHEGCPLANCPSKKGNCS

SEQ ID NO: 1282 - protein, 195 aa, Zea mays
MEVQVQQRGSPAPAAELEVSLREFTMSDAEAFMSWASDPRVVRFQRRDAYEHVDQARRYIADHILPHPWYRAICVGAGAPLPVVGSISVKPGPTEDGRPFRAFVGYRLARAHWGRGIATRAVRAAAAAVFAARPWLLRLEAVADVDNPASQRVLEKAGFAREGVLRKYVLLKGQPRDMVMFSIVVETEQDKPDGP

SEQ ID NO: 1283 - protein, 751 aa, Geobacillus stearothermophilus
MENQNRQNAAQCPFHGSVTNQSSNRTTNKDWWPNQLNLSILHQHDRKTNPHDEEFNYAEEFQKLDYWALKEDLRKLMTESQDWWPADYGHYGPLFIRMAWHSAGTYRIGDGRGGASTGTQRFAPLNSWPDNANLDKARRLLWPIKKKYGNKISWADLFILAGNVAIESMGGKTIGFGGGRVDVWHPEEDVYWGSEKEWLASERYSGDRELENPLAAVQMGLIYVNPEGPDGKPDPKAAARDIRETFRRMGMNDEETVALIAGGHTFGKAHGAGPATHVGPEPEAAPIEAQGLGWISSYGKGKGSDTITSGIEGAWTPTPTQWDTSYFDMLFGYDWWLTKSPAGAWQWMAVDPDEKDLAPDAEDPSKKVPTMMMTTDLALRFDPEYEKIARRFHQNPEEFAEAFARAWFKLTHRDMGPKTRYLGPEVPKEDFIWQDPIPEVDYELTEAEIEEIKAKILNSGLTVSELVKTAWASASTFRNSDKRGGANGARIRLAPQKDWEVNEPERLAKVLSVYEDIQRELPKKVSIADLIVLGGSAAVEKAARDAGFDVKVPFFPGRGDATQEQTDVESFAVLEPFADGFRNYQKQEYSVPPEELLVDKAQLLGLTAPEMTVLVGGLRVLGANYRDLPHGVFTDRIGVLTNDFFVNLLDMNYEWVPTDSGIYEIRDRKTGEVRWTATRVDLIFGSNSILRSYAEFYAQDDNQEKFVRDFINAWVKVMNADRFDLVKKARESVTALQGNYFYRSGGIIRLQ

SEQ ID NO: 1284 - protein, 339 aa, Neisseria meningitidis MC58
MKKILVTGGTGFIGSHTVVSLLKSGHQVVILDNLCNSSINILPRLKTITGQEIPFYQGDIRDREILRRIFAENRIDSVIHFAGLKAVGESVAEPMKYYDNNVSGSLVLAEEMARAGVFSIVFSSSATVYGDPGKVPYTEDMPPGDTTSPYGASKSMVERILTDIQKADPRWSMILLRYFNPIGAHESGLIGEQPNGIPNNLLPYICQVAAGKLPQLAVFGDDYPTPDGTGMRDYIHVMDLAEGHVAAMQAKSNVAGTHLLNLGSGRASSVLEIIRAFEAASGLTIPYEVKPRRAGDLACFYADPSYTKAQIGWQTQRDLTQMMEDSWRWVSNNPNGYDD

SEQ ID NO: 1285 - protein, 131 aa, Glycine max
  unsure (1)..(131): unsure at all Xaa locations
IGLLAPVPVWLLARKFPNXKWIELEPNRLEIAGGGGIPPARSVNYITWGFVGIFFNFYVYSKFKAWWARHTYILSAALDAGVAFMGVILYFALQNYGVFGPIWWGQDADDHCPLAKCPTAPGVIAHGCPLL

SEQ ID NO: 1286 - protein, 247 aa, Oryza sativa
MAGNRGGDAGEGEWLKVAELRATVEAQDPHAKEVDNLTLRRFLRARDHNVEKASAMLLKALRWRREAVPGGSVPEEKVQSDLDDDKVYMGGADRTGRPILLAFPAKHFSAKRDMPKFKSYCVYLLDSICARIPRGQEKFVCIVDLKGWGYSNCDIRAYIAAIEIMQNYYPERLGKALMIHVPYMFMKAWKMIYPFIDNVTRGKFVFVDDKSLQEVLHQEIDDSQIPDTLGGKLAPVSLKNNARINLD

SEQ ID NO: 1287 - protein, 396 aa, Oryza sativa
  unsure (1)..(396): unsure at all Xaa locations
ERKRKKKDRAFLAASWGVNPRFPRGRILMGLEEGGAMRALMRRKQVDSDRGAAGGHQLAKELSVTQLVAIGVGSTIGAGVYVLVGTVAREHAGPALTLSFLIAGVAAALSAFCYAELASRCPSAGSAYHYSYICVGEGVAWLIGWALILEYTIGGSAVARGISPRLALFFGGQDSLPWFLARHELPWFDVVVDPCAAFLVLVVTALLCKGIKESSFVQGVVTVLNCFVMLFVIIAGSYIGFQTGWVGYKVAGGFFPYGANGMLAGSATVFFAYIGFDSVASTAEEVKNPQRDLPLGIGTALSVCCSLYMLVSVVIVGLVPYFAMDPDTPISSAFARHGMHWAMYLVTTGAVLALCSTLMGSILPQPRILMAMARDXALPSFFSDVNQRTQVPVKST

SEQ ID NO: 1288 - protein, 556 aa, Schizosaccharomyces pombe
MEKDTEELELENAVFGNINNFSSFLDKENETFDVMMNEAPELSEDNDAQEDELEKLEDAELFMFDTGSADGAKDSVPLDIIAGDNTVKEDEEASNEIPSIWEDSDDERLMISLQDHSRLRKLRQYEDEDMVNGLQYARRLRTQFERVYPVPEWAKKQDVTEEEDEFNALSEKSVIPKSLKSLFKSSVSYINQSSKLLAPGTINIKRLKDANFQAPSHSGIRCMSIHPYFPLLLTCGFDRTLRIYQLDGKVNPLVTSLHLRSSALQTALFHPDGKRVIAAGRRKYMYIWDLESAQVQKVSRMYGQENFQPSMERFHVDPTGKYIALEGRSGHINLLHALTGQFATSFKIEGVLSDVLFTSDGSEMLVLSYGAEVWHFNVEQRSVVRRWQVQDGVSTTHFCLDPSNKYLAIGSKSGIVNIYDLQTSNADAAPKPVTTLDNITFSINSMSFSQDSQVLAIASRGKKDTLRLVHVPSFSVFRNWPTSATPLGRVTCLAFGKGGELCVGNEAGRVGLWKLAHYDLKFVPDKIINWEIRLGKFGYVLLGIQILILHVDVVIL

SEQ ID NO: 1289 - protein, 207 aa, SYNECHOCOCCUS SP. WH 8102
METKTRKAATAHKIIEAGEGVLNLVWGKADERRAASLEIIARTAYTAEESACHYLETIGLDKEGTIRDTLELARYQDTNEQTHEDIFARDLDGLKNWGDRFLARHIAVVIYWVFAITTLIDHEMAALLGEAVEVEAVKTYRRMLKEQPEEWLDQPAAPTATHYWEKPNSMWRVRGDHMPGSMRDVVEAIVRDEADHVKANSKKATAF

SEQ ID NO: 1290 - protein, 186 aa, Schizosaccharomyces pombe
KRLAASVLKCGKRKVWMDPNEISEISNANSRQNIRKLVKDGLVIRKPNLMHSRFRIRKTHAAKRLGRHTGYGKRKGTAEARMPSTVVWMRRQRVLRRLLRKYRESGKIDKHLYHTLYLEAKGNTFKHKRALIEHIQRAKAEANRTKLIQEQQDARRARAKAARQRRAKAVEEKREQIYTAAEKIEE

SEQ ID NO: 1291 - protein, 527 aa, Glycine max
  unsure (1)..(527): unsure at all Xaa locations
MQLFTNIPFGSTLCLSLAIIIITLVILTTFSSSLFLRWPKIITFFCSCETCQAYXTSGWSKTFDNLCDWYAHLLRNSPTKTIHIHVLRNTITANPDNVEYMLKTRFHNFPKGKTFSTILGDFLGRGIFNVDGESWSFQKKMASLELSKNSIRSFAFEVVKFEIKDRLIPLLVLSKQNDCVLDLQDVFKRFSFDSICRFSFGLDPMCLELSLPISEFAMSFDLASKLSAERAMSVSPLIWKIKRFLNVGSEKKLRKAIKMIDILAREVIRQRRKVGFSSISPDKDDLVSRFMRTIADDTYLKDIIASFLLAGRDTXASALTSFFWLLSXHPVVESQILLXAEQVIGSDYHKDLTSYEELQQLHYLQAAANESMRLYPPIQFDSKFCLEDDVLPDGTFVKRGTRVTYHPYAMGRLEEIWGSDCFEFRPERWLKEGLFCPQNPFKYPVFQAGIRVCLGKEMALLELKSVALSLLRRFHIELAAPPPHHHHHSTPRFSPGLTATFSCGLRVKVREQGTQQRQHTTQPLHHS

SEQ ID NO: 1292 - protein, 345 aa, Salmonella enterica subsp. enterica serovar Typhi
MKQQTNRNRRWVLASRPHGAPQMDNFRLEEDDVATPGEGQVLLRTVFLSLDPYMRGRMSDEPSYAPPVEPGCVMVGGTVSRVVASNHPDYRPDEWVLSYNGWQDYDISDGEGLVKLGDNPQHPSWSLGVLGMPGFTAYMGLLDIGQPKEGETLVVAAATGPVGATVGQIGKLKGCRVVGIAGGAEKCRHATDVLGFDLCLDHHADNFPQQLAQACPQGIDIYYENVGGKVFDAVLPLLNTSARIPLCGLVSGYNATTLPDGPDRLPLLMATLLKKRIRLQGFIINQDYGHRIHEFQQEMGRWIKEGKIHYREQITDGLENAPEAFIGLLAGKNFGKVVIRLADDA

SEQ ID NO: 1293 - protein, 72 aa, Teramnus labialis
WEYQVGPSVGIEAGDHIWASRYILERITEQAGVALSLDPKPIEGDWNGAGCHTNYSTKSMREDGGYEVIKKA

SEQ ID NO: 1294 - protein, 323 aa, Glycine max
  unsure (1)..(323): unsure at all Xaa locations
MRIGSPSSSSSSSGCSRFWSSALRSKRLMSPAEKAARESSDLGLSRRLGVLDLVLLGIGASIGAGIFVVTGTVARDAGPGVTISFILAGASCVINALCYAELATRFPAVVGGAYLYAYTAFNELTAFLVFGQLMLDYHIGAASIARSLASYLINILELFPVFKDNIPKWIGHGEDIGDVLSINVLAPILLVLLTFILCRGVQESSVVNSLMTVTKIIIVIIVIFAGAFEGDVSNWSPFAPNGLKAIFTGASSLFFAYVVFDACKNSAEISXPLRGIPIGILGSAFKYVLFCIGVCLVSLXGMGAYNLLGEDAPLAEAFSSKGL

SEQ ID NO: 1295 - protein, 392 aa, Schizosaccharomyces pombe
MPPKKQQEVVKVQWGRPGNNLKTGIVGMPNVGKSTFFRAITKSVLGNPANYPYATIDPEEAKVAVPDERFDWLCEAYKPKSRVPAFLTVFDIAGLTKGASTGVGLGNAFLSHVRAVDAIYQVVRAFDDAEIIHVEGDVDPIRDLSIIVDELLIKDAEFVEKHLEGLRKITSRGANTLEMKAKKEEQAIIEKVYQYLTETKQPIRKGDWSNREVEIINSLYLLTAKPVIYLVNMSERDFLRQKNKYLPKIKKWIDENSPGDTLIPMSVAFEERLTNFTEEEAIEECKKLNTKSMLPKIIVTGYNALNLINYFTCGEDEVRSWTIRKGTKAPQAAGVIHTDFEKAFVVGEIMHYQDLFDYKTENACRAAGKYLTKGKEYVMESGDIAHWKAGKR

SEQ ID NO: 1296 - protein, 215 aa, Acetabularia acetabulum
TGGAGFIGSIVVEQLVKQGEQVVVFDNLSLGHRESFIRDAAFVHADLNDRAAIDQALETHQPEAVMHFAAYSLVGESMKFPFQYIGENVTNFLNLLQSMIAHDVKKIILSSTANLFDDPERMPIVESERIVPGSPYGESKFICERMLYWLDQIHDLNYAALRYFNAAGASKERGEDHTPSLHLIPIVLQVALGQRERVSMFGGDYDTADGTCVRD

SEQ ID NO: 1297 - protein, 333 aa, Rhodopseudomonas palustris
MTATVNRQILLIEKPKEKLGPEHFRLAESPIPEPKDGEALVKVRYISLDAANRAWMQGATYRAAVETDSVMPGGSVAEVVSSKAPGLVSGDLVFADTGWQDYAVLPAKHLAKLPKVEPMTHLLSVYGIAGLTAYFGLLDIGKPRAGETVVVSAAAGSVGSIVGQIAKIKGCRVVGIAGGKQKCDWLVNELGFDAAVDYKDGALFKALRAAAPNGIDVYFDNVGGDILEACLPQMNLKGRIACCGAVSQYDRTPSATGPRGIPGLIVVKRLIMQGFIVMDYMDQRDEAVAKLQEWVTSGKLKVQEDVIDGLENTPQALIGLLAGENRGKRMVKV

SEQ ID NO: 1298 - protein, 751 aa, Geobacillus stearothermophilus
MENQNRQNAAQCPFHGSVTNQSSNRTTNKDWWPNQLNLSILHQHDRKTNPHDEEFNYAEEFQKLDYWALKEDLRKLMTESQDWWPADYGHYGPLFIRMAWHSAGTYRTGDGRGGASTGTQRFAPLNSWPNNANLDKARRLLWPIKKKYGNKISWADLFILAGNVAIESMGGKTIGFGGGRVDVWHPEEDVYWGSEKEWLASERYSGDRELENPLAAVQMGLTYVNPEGPDGKPDPKAAARDIRETFRRMGMNDEETVALIAGGHTFGKAHGAGPATHVGPEPEAAPIEAQGLGWISSYGKGKGSDTITSGIEGAWTPTPTQWDTSYFDMLFGYDWWLTKSPAGAWQWMAVDPDEKDLAPDAEDPSKKVPTMMMTTDLALRFDPEYEKIARRFHQNPEEFAEAFARAWFKLTHRDMGPKTRYLGPEVPKEDFIWQDPIPEVDYELTEAEIEEIKAKILNSGLTVSELVKTAWASASTFRNSDKRGGANGARIRLAPQKDWEVNEPERLAKVLSVYEDIQRELPKKVSIADLIVLGGSAAVEKAARDAGFDVKVPFFPGRGDATQEQTDVESFAVLEPFADGFRNYQKQEYSVPPEELLVDKAQLLGLTAPEMTVLVGGLRVLGANYRDLPHGVFTDRIGVLTNDFFVNLLDMNYEWVPTDSGIYEIRDRKTGEVRWTATRVDLIFGSNSILRSYAEFYAQDDNQEKFVRDFINAWVKVMNADRFDLVKKARESVTALQFDTSTRSGSGENLQ

SEQ ID NO: 1299 - protein, 305 aa, Pirellula sp.
MRLYYTDHFDLPLPEGHRFPMSKYRLLRQRVVESEHHRDDTLIVPQAATDEQLLHCHTPDYVQRVQSGTLTKQEIRRIGFPWSAKMVERSRRSTGATISAARAALDEGISANLAGGTHHAFAGEGEGYCVFNDAAVAIRTLQSEGLIQRAAIIDLDVHQGNGTASILKDVPSVFTCSVHGVKNFPLRKMPSDLDVSLPDGTGDDDYCDALRSVLAKLEKHQSESGQFDLVIYLAGADPYKNDRLGRLSLTMDGLRRRDELVLQWCHHNDLPVAIAMAGGYSVEVKEIVDIHSQTLHIAKVWSLSR

SEQ ID NO: 1300 - protein, 380 aa, Leavenworthia stylosa
MTTTTGQIIRCKAAVAWEAGKPLVMEEVEVAPPQKHEVRIKILFTSLCHTDVYFWEAKGQTPLFPRIFGHEAGGIVESVGEGVTDLQPGDHVLPIFTGECGHCPHCHSEESNMCELLRINTERGGMILDGESRFSINGKPIHHFLGTSTFSEYTVVHSGQVVKINPKAPLDKICIVSCGLTTGLGATLNVAKPKKGQSVAVFGLGAVGLGAAEGARIAGASRIIGVDLNSKRFEEAKKFGVTEFVNPKEHNKPVQQVIAEMTNGGVDRSVECTGSVQAMIQAFECVHDGWGVAVLVGVPSKDDAFKTHPINFLNERTLKGTFFGNYKPKSDIPGVVEMYMNKELELEKFITHKVPFSEINKGFDYMLKGEGIRCIITMGA

SEQ ID NO: 1301 - protein, 299 aa, Oryza sativa
  unsure (1)..(299): unsure at all Xaa locations
SGRSRSRRRRCLRRGCSAAVVEEGXLGDEAPELERQMGCMAGIFQIFDRRHLLTARRRRPPPKMLPPGPGHTLPRSSSNGSAELKYLQDRSGENIXSKSMTENSSLSIESSRASCSSSSCSSFSSLDGNKSIQQXAAIHQRAALCTEATEELTKSEGPSHGHXGLDIRDIVKDSINRDTGGLTVKTSVXXDARRNGQYKDSPRPLLLSKSMDGTYVIGIDRSTKVPANAVESSRRFPEQSRFSCDERPVEAQENKKPSTRLKELPRLSLDSRKETLSSSXSPEDLQLQENRRQSHGRSX

SEQ ID NO: 1302 - protein, 473 aa, Desulfovibrio desulfuricans G20
MRPLRPMRFLNRSAAPWPMCLPSAELLTATGRVPMLEAANKLGIIFFPAYDWAISPTHPEREERLLYTQDQLREEGLFDIPGITEYKPLVAGREDVERVHFCIPDIERVCTKSHLVSAGGAIQAARLVMEGKEDKAFALVRPPGHHAMKVVHGNRGFCNVNIEALMIEHIREHFGPLRVAVIDTDCHHGDGTQDIYWNDPDTLFISLHQDGRTIFPGTGFPAELGGVNALGRTLNIPLPPRTSDRGFLHVIDHLVLPVLEHFKPDIVINSAGQDNHFSDPITDMRFSAQGYAALNSRLNPDIAVLEGGYAIQGALPYVNLGIALAMAGLDYSSVREPDFDPAAIEQSPRITEYVERLCEEMLKVYFNPPSQPRQGEKSGDWWVRTKDIFYDTDGINESQVESVRICPDCAGVMKIETWSTANPLSLGVQVPQNACEKCRGIGIRTVEEAHVKGNYRYIQLINRKDKQYVQYGF

SEQ ID NO: 1303 - protein, 350 aa, Zea mays
MAAGGNGAGGDTRAAFARIYKTLKEELLTDPAFEFTEESRQWIDRMVDYNVLGGKCNRGLSVVDSYKLLKGADALGEEETFLACTLGWCIEWLQAFFLVLDDIMDDSHTRRGQPCWFRVPQVGLIAANDGIILRNHISRILRRHFKGKPYYADLLDLFNEVEFKTASGQLLDLITTHEGEKDLTKYNITVHGRIVQYKTAYYSFYLPVACALLLSGENLDNYGDVENILVEMGTYFQVQDDYLDCYGDPEFIGKIGTDIEDYKCSWLVVQALERADESQKRILFENYGKKDPACVAKVKNLYKELDLEAVFQEYENESYKKLIADIEAQPSIAVQKVLKSFLHKIYKRQK

SEQ ID NO: 1304 - protein, 92 aa, Oxalis megalorrhiza
GINISGTNGEVMPGQWEYQVGPSVGIEAGDHIWASRYILERITEQAGVVLTLDPKPIDGDWNGAGCHTNYSTKSMREEGGFEVIKKAILNLS

SEQ ID NO: 1305 - protein, 453 aa, Fusobacterium nucleatum subsp. nucleatum ATCC 25586
MKFWSIVLLTINSIIGTGIFLSPGAVAKLVGDKAATIYLAAAVFAAVLAVTFAAASKYVVKSGAAYAYSKAAFGDEVGSYVGITRVVSASIAWGVMATGVVKTTLSIFGQDSSNVKNVTIGFITLMFVLLIINLIGTKLLTLISNISTIGKIGALGITIIAGIFILVFSDGANLQGLTLLKDAEGNNLIPEFTTSVFVTALVGAFYAFTGFESVASGSADMEKPEKNLPRAIPLAIAIIAAIYFGIVFVSMYIDPVAMVTSKDPVVLASVFKNQLLQKIIVMGALMSMFGINVAASFHTPRVFEAMAKEKQVPDFFAKRTKSGLPLTSFILTAIIAVVIPLAFNYNMAGIIIISSISRFIQFIVVPVAVIVFFYGKSKEEILNTNKNFIIDVIIPIIALLLTILLLVKFNWAQQFSTKLDDGTVTVNLKAVVSMVIGYLILPIVLRIYMRTKK

SEQ ID NO: 1306 - protein, 455 aa, Mesorhizobium loti
MDTQPAPFVPPAPKPRTSPPSTLEMIRIVYRNPLELWGEPTYNEPWISANGVGGHLIVANDPGLIRHVLVDNAKNYKMATVRQKILRPILRDGLLTAEGEVWKRSRKAMAPVFTPRHIFGFAQPMLKRTKEFVTRYEEGGASDIAHDMTLLTYDILAETLFSGEIAGEPGSFANEIDRLFETMGRVDPLDLLRAPDWLPRLTRIRGRKTMAYFRKIVTDTVKMREEKFRRDPDAVPQDFLTLLLKAEGPDGLTRSEVEDNIITFIGAGHETTARALGWTLYCLAESPWERNRVEQEIDEVLAREPDPTKWLDAMPLTRAAFDEALRLYPPAPSINREPIEPEMWKDLYIPRHAAVLVMPWVVHRHRKLWDRPDAFLPERFHPGNREKIDRFQYLPFGAGPRVCIGASFAMQEAIIALAILLSRFRFDTTAETKPWPVQKLTTQPQGGLPMQVTPR

SEQ ID NO: 1307 - protein, 344 aa, Vibrio parahaemolyticus RIMD 2210633
MTNATNRRIVLASRPHGAPTTENFRLEEVAKPVPQAGEMLLRTVYLSLDPYMRGRMSDAESYAEPVALDDVMIGGTVCQVEASNHPDYEAGEWVLAYTVGWQDYAISTGEMVIKLGKEPQNPSYALGVAGMPGFTAYMGLLDIGQPKPGETIVVAAATGPVGATVGQIGKIKDCRVVGIAGGEEKCRYAKEVLGFDECIDHKADDFEQQLKDACYNGIDVYFENVGGKVFEAVMPLLNTSARIPLCGLISQYNATELPEGTDHLPLLMGKLLTKRIKVQGFIIFDDYGHRYGEFAQDINQWLAEGKIQYREHLVEGLDNAPEAFIGLLEGKNFGKLVVKINDPL

SEQ ID NO: 1308 - protein, 333 aa, Glycine max
MSSVSKGDRKASIDAASWLFNVVTSVGIILVNKALMATYGFSFATTLTGLHFATTTLLTLILKSLGYIQTSHLPLSDIIKFVLFANFSIVGMNVSLMWNSVGFYQIAKLSMIPVSCFLEVVLDNVRYSRDTKLSIFLVLLGVAVCTVTDVSVNAKGFIAAVIAVWSTSLQQYYVHFLQRKYSIGSFNLLGHTAPAQAASLLLVGPFLDYWLTGKRVDAYGYGLTSTLFIILSCTIAVGTNLSQFICIGRFTAVTFQVLGHMKTILVLILGFIFFGKEGLNLHVVLGMIIAIAGMVWYGSASSKPGGKERRSFSLPKTQDYSSLPVSSEPDTKE

SEQ ID NO: 1309 - protein, 778 aa, Glycine max
  unsure (1)..(778): unsure at all Xaa locations
MQQGDPTVLSLRPGGGRGGGSRLFAHSSSSSSLSADLPLCRPHAYFSLKTRDSRFEGHERVRYSRDQLLQLQEAVEVPDDILKIKQDIEAEIFGENPSWGRAESNLPHQLQNRYSEPDNRDWRGHSGQLPANSDERSWENLRDNREXLVIDSRMLSQVNRHDQLNSQFARTQISSMQGGGPTPTLVKAXEVPWSARRGSLSEKYCVLKTVKGILNKLTPEKFDVLKGQLIDSGITSADILKDVISLIFDKAVLEPTFCPMYAHLCSDLNEKLPPFPSEEPGGKEITFKRVLLNNCQEAFEGAENLREELKRMTVPEREMERTDKGTLLKLRTLGNIRLIGELLKQKMVPEKIVHHIVQELLGSPDSKSCPVEENVEAICQFFNTIGKQLDESLKXRRINDIYFSRLKELSSNLQLVPRLRFMIRDVIELRASNWVPRREEVKAKTITEIHSEAEKNLGLRPGATASMRNPRGGVQGNASSGGFPIARPGAGGLMPGMPGTRKMPGMPGFDNGNWEMPKTRSMPRGDLPGVQAAGQSNSALLSKSTTLNSKLLPQGSGGIISGRNSALVHGCGTFFGLGPEAAPQLSSPAKTATPVPVSSEKPQHPAARLNTDNLRCRTVSLLEEYFSVQLLEEALQCVEELKSPSYHPEVVKEAISLALDKSPPCVEPVANLIEYLYIKKILTPIDIGTGCLLFGSLLDDIGIDLPKAPSNFGEIIGKLILAGGLDCKLVREILKKVDDGMFQRAIFDSVVGAIRSASGQAVLDAQTSDIEACQSMLK

SEQ ID NO: 1310 - protein, 139 aa, Glycine max
MDEEEVRKIFSKFDKNGDGKISCAELKEMMAALGSKTTSDEVKRMMAELDRNGDGYIDLKEFGEFHCGGGGDGRELREAFELYDLDKNGLISAKELHSVMRRLGEKCSLSDCRRMIGNVDADGDGNVNFEEFKKMMSRS

SEQ ID NO: 1311 - protein, 209 aa, Ralstonia metallidurans
MARQFEHPQPATIQETTVAKKILMLAGDFAEDYETMVPFQALQMVGHTVHAVCPDKKAGDHCATAIHDFEGDQTYTEKRGHNFTLNATFADIDPARYDALVIPGGRAPEYLRLNARVLEIVRHFAQANKPIAAVCHGAQLLAAAGVLEGRTCSAYPACAPEVRLAGGKYADIPVDQAHTDGNLVTAPAWPAHPAWLAQFLAVLGTRIVE

SEQ ID NO: 1312 - protein, 336 aa, Agrobacterium tumefaciens str. C58 (Cereon)
MLAIFCDTPGQLTAKDLPNPVRGEGEVLVRIRRIGVCGTDLHIFTGNQPYLSYPRIMGHELSGTVEEAPAGSHLSAGDVVTIIPYMSCGKCNACLKGKSNCCRNIGVLGVHRDGGMVEYLSVPQQFVLKAEGLSLDQAAMTEFLAIGAHAVRRGAVEKGQKVLIVGAGPIGMAVAVFAVLDGTEVTMIDGRTDRLDFCKDHLGVAHTVALGDGDKDRLSDITGGNFFDAVFDATGNPKAMERGFSFVGHGGSYVLVSIVASDISFNDPEFHKRETTLLGSRNATADDFERVLRALREGKVPEALITHRMTLADVPSKFAGLTDPKAGVIKGMVEVA

SEQ ID NO: 1313 - protein, 438 aa, Zea mays
MRIEEVQSTSKKQRIATHTHIKGLGLDANGMAIALAAGFVGQKKMAGRAVLLAGPPATGKTALAGIAQELGSKVPFCPMVGSEVYSSEVKKTEVLMENFRRAIGLRIKENKEVYEGEVTELSPEEAESTTGGYAKSISHVIISLKTVKGTKQLKLDSSIYDALIKEKVAVGDVIYIEANSGAVKRVGRCDSFATEYDLEAEEYVPIPKGEVHKKKEIVQDVTLHDLDAANAQPQGGQDILSLMGQMMKPRKTEITEKLRQEINKVVNRYIDEGIAELVPGVLFIDEVHMLDIECFSYLNRALESPLSPIVILATNRGICNVRGTDMTSPHGIPVDLLDRLVIIRTETYGPTEMIQILAIRAQVEEIDMDEESLAYLGEIGQQTSLRHAIQLISPASVVSKTNGREKICKADLEEVSGLYLDAKSSARLLQEQQERYIT

SEQ ID NO: 1314 - protein, 193 aa, Rhodospirillum rubrum
MAIAVLLLVGLLKITGTDYHDYFSGAQFVHFLLGPATVALAVPLFENIGKVRQALIPMGIALVVGSTVAAGSAMGLAALTGATPEVLLSMAPKSATTPIAMGISESIGGLPELTAVMVILTGVLGAVIVTPLMTLLGIKDMRARGFAAGVAAHGLGTARAFQVDPLAGTFAGIGMGMNGLMTTLVVAVLVGFF

SEQ ID NO: 1315 - protein, 338 aa, Leuconostoc mesenteroides
MEALVLTGTKKLEVKDIDRPKVLPNEVLIHTAFAGICGTDHALYAGLPGSADAVPPIVLGHENSGVVAEIGSAVTNVKVGDRVTVDPNIYCGQCKYCRTARPELCENLSAVGVTRDGGFEEFFTAPASVVYPIPDNVSLKSAAVVEPISCAVHGIQLLKVTPYQKALVIGDGFMGELFVQILQAYGIHQVDLAGIVDEKLAMNKEKFGVKNTYNTMKGDKIPEGEYDVIIEAVGLPQTQEAAIEASARGAQVLMFGVGGPDAKFQMNTYEVFQKQLTIQGSFINPNAFEDSLALLSSGKLNVEALMSHELDYKTVDDFVNGKLGVVSKAVVKVGGEEA

SEQ ID NO: 1316 - protein, 745 aa, Pseudomonas syringae pv. tomato str. DC3000
MSQLDKDAFEVLLANCADEPIQFPGAIQPHGLLFTLKEPELTILQVSANVQSVLGKVPDQLAGQTLDCVLGAGWAEVIRSTSANDSLVDVPRLLMSVEGVEFEALLHRSQEALVLELEIQDKAAQAISYSERTGNMGRMLRQLHAAADLQTLYEVSVREIQRMTGYDRVLIYRFEEEGHGQVIAEASAPAMELFNGLFFPASDIPEQARELYRRNWLRIIPDANYTPVPLVPQLRPDTQQQLDLSFSTLRSVSPIHCQYMKNMGVLSSMSVSLIQGGKLWGLISCGHRTPLYVSHELRSACQAIGQVLSLQISAMEALEVSRQRETKIQTLQQLHQMMATSDTDVFDGLAQQPQLLMDLVGATGVAIIEDRQTHCYGNCPEPSDIRALHTWMMAGGEPVYASHHLSSVYPPGEAYQTLASGVLAMSLPKPVDNGVIWFRPEVKQSVQWSGDPNKPLNLDASDNTLRLQPRTSFEIWKVEMTGIATKWSHGDVFAANDLRRSALENDLARQVSKEQQAVRARDELVAVVSHDLRNPMTVISMLCGMMQKSFSSDGPHTSRRISTAIDTMQQAASRMNVLLEDLLDTSKIEAGRYTITPQPLEVSQIFEEAYTLLAPLAMDKSIEISFNAEPDIKVNADPERLFQVLSNLIGNAIKFTPKLGRIGVAAMSNGDEVVFTVRDSGEGIPPEQLPHIFERYWTVKEGNPTGTGLGLYISQGIIKAHGGELAAQSQVGHGSEFRFTVPIAH

SEQ ID NO: 1317 - protein, 133 aa, Triticum aestivum; identical to SEQ ID NO: 699

SEQ ID NO: 1318 - protein, 376 aa, Zea mays
MLSLARHHSRQAMAGTVTVPGSSKPSTPLLKDELDIVIPTIRNLDFLEMWRPFFQPYHLIIVQDGDPTKTIKVPEGFDYELYNRNDINRILGPKASCISFKDSACRCFGYMVSKKKYIYTIDDDCFVAKDPSGKDINALEQHIKNLLSPSTPFFFNTLYDPYREGADFVRGYPFSLREGAHTAVSHGLWLNIPDYDAPTQLVKPKERNERYVDAVMTIPKGTLFPMCGMNLAFDRDLIGPAMYFGLMGDGQPIGRYDDMWAGWCVKVICDHLSLGVKTGLPYIWHSKASNPFVNLKKEYKGIFWQEDIIPFFQNVTIPKDCNTVQKCYIYLSGQVKEKLGKIDPYFAKLGDAMVTWIEAWDELNPAGPAAGKDTAK

SEQ ID NO: 1319 - protein, 266 aa, Photorhabdus luminescens
MNKKILILPGDGIGQEVCDAALPVFQALNLPVTLEIGDIGWTCWERDGDPVPASTWEKIASVDAVLLGAITSKGKEEAQQALPPHLRVKTRNYVSPVIQLRQRLGLYANIRPVRYVEGDRKPFRCCVIRENTEGLYAGFDFKGIPSTATTWLQHPNIDKYGPEEAAWTVRLQTRFGLERLFITAFEYAKENNYSRVTFADKPNVMRESGHFAKGIFDTVAAHYPEIKADIHNIDAVALWMVKKPHEFGVIVSENMFVIFCLIWQRA

SEQ ID NO: 1320 - protein, 301 aa, Zea mays
  unsure (1)..(301): unsure at all Xaa locations
MANAGGGAAGEGEWLKVAQLRALVQEDHRAKEVDNLTLRRFLRARGHNVDKAAAMLLKFLRWRAEAAPGGGTVREEQVRGELEQDKIYMGGVDRTGRPIIVACXAKHYSANRDMAEFKSTSTTWPFFLHQSKCVCTYVRRFSFLFLGRXARACVCALSLSCSCCAGFVVYFFDKICARIPRGQEKFLAIMDLKGWGYANCDVRAYIAAIEIMQNYYPERLGKALMINVPYIFLKVWKTMIYPFIDANTRDKFVFVDDKSLRETLRREIDESQLPEFLGGKMPLVSLKDYAQQPQPVSSESS

SEQ ID NO: 1321 - protein, 416 aa, Triticum aestivum
  unsure (1)..(416): unsure at all Xaa locations
RFDRFLLESYLEDNDFVKWCPSIPHCGRAIRVGTGDRYCEVKCLCGVTFCFNCMEQTHSPCPCTIWRHWNTRIHGESENIKWIVKNTKSCPKCFKPIEKRDGCNLVKCKCGQYMCWLCGGPTGSAHTWTNIEGHSCNRYKESKDKVDTGRRQLERYAHYCNRFKIHEDSYKEQHEKLGPAIKEKVKQLESNHLRPRLIRDGDWLTDAXKRLLWSRQVVSRSYAFAYHMFGGELQAHRSERGSLAPAQNLFESQQEQLERHVEQLSKVLVTDILALPDQGDSEGEAGGRQPPTSSPERLLRGDVHLHSRTSCCPLPNGTHGHRRLHPGRPCAGQGVPGLTGFFTWCPLLRAHILGATDCGALASLSCCRRKGGRTGAPHGGSCPPRTRWCPPPYPSWTNGDFFFSLRPNVSHFLTLH

SEQ ID NO: 1322 - protein, 202 aa, Ralstonia metallidurans
MPRRPTGTGSFNRDGHPQLPTLLQAGDPMALYQLGEIAPTIHDDAYVAAEATIIGNVTLKARASAWPGVVIRGDNEPIVVGEDTNIQEGSVLHTDPGRPLTLGDKVSIGHQAMLHGCTVGEGSLIGIQAVVLNGAVIGKECLVGAGAVVTENKVFPDRSLILGAPAKVVRELTDADVANLYRNAETYAKRQATYKTDLKRIG

SEQ ID NO: 1323 - protein, 743 aa, Listeria monocytogenes
MKTVLGKTNVTDTVSQTDLDQVTTLQADRLGIKSIDGLEYLNNLTQINFSNNQLTDITPLKDLTKLVDILMNNNQIADITPLANLSNLTGLTLFNNQITDIDPLKNLTNLNRLELSSNTISDISALSGLTSLQQLSFGNQVTDLKPLANLTTLERLDISSNKLSDISVLAKLTNLESLIATNNQISDITPLGILTNLDELSLNGNQLKDIGTLASLTNLTDLDLANNQISNLAPLSGLTKLTELKLGANQISNISPLAGLTALTNLELNENQLEDISPISNLKNLTYLTLYFNNISDISPVSSLTKLQRLFFYNNKVSDVSSLANLTNINWLSAGHNQISDLTPLANLTRITQLGLNDQAWTNPPVNYKVNVSIPNTVKNVTGALIAPATISDGGSYAEPDITWSLPSYTNEVSYTFNQSVTIGKGTTTFSGTVKQPLKAIFNAKFHVDGKETTKEVEAGNLLTEPANPVKEGHTFIGWFDAQTGGTKWNFSTDKMPTNDIDLYAQFSINSYTATFDNDGVTTSQTVDYQGLLQEPTAPTKEGYTFKGWYNAKTGGDKWDFATSKMPAKNITLYAQYSANSYTATFDVDGKTTTQAVDYQGLLKEPKTPTKAGYTFKGWYDEKTDGKKWDFATDKMPANDITLYAQFTKNPVAPPTTGGNTPPTTNNGGNTTPPSANIPGSDTSNTSTGNSASTTSTMNAYDPYNSKDASLPTTGDSDNALYLLLGLLAVGTAVVLTKKNRAK

SEQ ID NO: 1324 - protein, 434 aa, Novosphingobium aromaticivorans
MWRFRAVWPRPRKCRYRPLPRPRLSRPSDCSLFSSCNSVSRIAQFNRAVAIMLSDRHVKGRPHEMKTRAAVAFAPKQPLEIVELDLEGPKAGEVLVEIMATGVCHTDAYTLDGFDSEGIFPSVLGHEGAGIVREVGPGVTSVKPGDHVIPLYTPECRQCKSCLSGKTNLCTAIRATQGQGLMPDGTSRFSYKGQTVFHYMGCSTFSNFTVLPEIAVAKIREDAPFKTSCYIGCGVTTGVGAVINTAKVQVGDNVVVFGLGGIGLNVIQGARLAGAGKIIGVDINPDREEWGRKFGMTDFLNSKGMSREDVVAKVVAMTDGGADYTFDATGNTEVMRTALEACHRGWGTSIIIGVAEAGKEISTRPFQLVTGRNWRGTAFGGAKGRTDVPKIVDMYMTGKIEIDPMITHVMGLEEINTAFDLMHAGKSIRSVVVF

SEQ ID NO: 1325 - protein, 62 aa, Triticum aestivum
  unsure (1)..(62): unsure at all Xaa locations
AAKAWARTPRSWVAVKXKEAEEDLVFRMHRLVGNRWELIAGRIPGRTAEEVEMFWAKRHQDQ

SEQ ID NO: 1326 - protein, 148 aa, Stevia rebaudiana
MADPLTDDQISEFKEAFSLFDKDGDGCITTKELGTVMRSLGQNPTEAELQDMINEVDADGNGTIDFPEFLNLMARKMKDTDSEEELKEAFRVFDKDQNGFISAAELRHVMTNLGEKLTDEEVDEMIREADVDGDGQINYEEFVKVMMA

SEQ ID NO: 1327 - protein, 81 aa, Triticum aestivum
LKVQKTQGGVLVAQSTDGHQLTIRGASEGRESHYLEVIGIADNDQSISAESCKDFDDNFDADAFNGLCKLVVNGKVKEVFL

SEQ ID NO: 1328 - protein, 225 aa, Triticum aestivum
  unsure (1)..(225): unsure at all Xaa locations
YSTEDEHQHGHGYGDGDDAAEWKKVAELRAVVEAQDPAAKEEDDFSLRRFLRARXHNIGKASAMLLQYLSWRRVAKPHGSISADEVRERDLQRIRVRMQGLRTVSIRPMXISYWGHDNFPCPGRDPVEFKRYVTYVLDKICTRLPVGQEKFAAVIDMKGWGYANCDIRGYVAALEIMQGYYPERLGRVFLIHVPYMFMAAWKMVYPFIDDRTRKKFVFVTDKDLK

SEQ ID NO: 1329 - protein, 265 aa, Brucella suis 1330
MELTEITPESLRLRPSHKERNVLITGAARGIGRAIAQAFVERSATVGICDLNLADVARTCEELNGLGLGRAVPIACDVSDYDALVAAIDDTGLVFDTVVNNAGISPKHNGVAHKVWEMAPDEWRRLVDVNLTGTFNTIRALTPGMVEARRGWIVNTSSVAGKTYSPIVACHYAATKSAIIGFTKHLAAELGPYSIRVNAMAPGRIATPMVAGVAPEVNAEQVKLTPMARLGQPAEVADVALWLTSTESSFVTGQTVDVAGGLYMA

SEQ ID NO: 1330 - protein, 429 aa, Spiraea nipponica
MAHILAPTTQWQTRITKNATSASPMTAKMWGSLLLKQNKKGPTKTSTKFRVLAVKSEGYTINRLEGLLNLDLTPFTDKIIAEYIWIGGTGVDVRSKSRTISKPVEHPSELPKWNYDGSSTGQAPGEDSEVILYPQAIFKDPFRGGNNILVICDAYTPQGEPIPTNKRAKAAEIFAKQKVIDEVPWYGIEQEYTLLQTDVKWPLGWPVGGYPGPQGPYYCGAGADKSFGRDISDAHYKACLYAGINISGTNGEVMPGQWEYQVGPSVGIEAGDHIWASRYILERITEQAGVVLTLDPKPIEGDWNGAGCHTNYSTKSMREEGGFEVIKKAIHKLSLRHKEHISAYGEGNERRLTGKHETASINTFSWGVANRGCSIRVGRETEKQGKGYLEDRRPASNMDPYIVTGLLAETTLLWEEAEALAATKLEQNV

SEQ ID NO: 1331 - protein, 152 aa, Zea mays; identical to SEQ ID NO: 631

SEQ ID NO: 1332 - protein, 408 aa, Vigna unguiculata
FGGGGGGGAGGGFGGGSGGGFGGGAGGGGGAGGGFGGGAGGGVGGGAGGGFGKGGGIGGGAGGGFGKGAGVGGGIGKGGGLGGGGGFGKGGGVGGGIGKGGGLGGGGGFGKGGGVGGGIGKGGGLGGGGGFGKGGGVGGGIGKGGGGGFGKGGGVGGGIGKGGGLGGGGGFGKGGGVGGGIGKGGGGGFGKGGGVGGGIGKGGGLGGGGGFGKGGGVGGGIGKGGGGGFGKGGGVGGGIGKGGGLGGGGGFGKGGGVGGGIGKGGGGGFGKGGGVGGGIGKGGGLGGGGGFGKGGGVGGGIGKGGGLGGGGGFGKGGGVGGGIGKGGGFGGGGGFGKGGGIGGGIGKGGGFGGGIGKGGGIGGGIGKGGGFGGGGGFGGGGGFGGGSGGGGGFGGGGGAGGGGGIGHP

SEQ ID NO: 1333 - protein, 332 aa, Glycine max
  unsure (1)..(332): unsure at all Xaa locations
EAPWYYAQTKEFSKDPHEVKDGHWHSISKGAPWFPYEGKEISRISFESRETIKSTPKLKELPRLSLASESTGFLSFCSXPPPPQMTNSLPYNXPSATPSRPPSVVAKLMGLEALPDSSLAGDGQSSSTETYSAQDNGQFPRSSKNGLTRPLRVSNSPKMSLKDPTSPRRKNHDLVMKPIRSSRVPIEPAPWKQQDGNQSSQKQNLRGVKAPTRAPDSFPSVYSEIEKRLKDLEFKQSGRDLRALKQILEAMQEKGLLESRKEEQAPNVVGSQSDYEPKATNQNQNTRSVRQQNTQRNNFLSSTVKGSDSARAFESSIVIMKPAKLVETTVIP

SEQ ID NO: 1334 - protein, 328 aa, Campylobacter jejuni
MKILISGGAGYIGSHTLRQFLKTDHEICVLDNLSKGSKIAIEDLQKIRTFKFFEQDLSDFQGVKALFEREKFDAIVHFAASIEVFESMQNPLKYYMNNTVNTTNLIETCLQTGVNKFIFSSTAATYGEPQTPVVSETSPLAPINPYGRSKLMSEEVLRDASMANPEFKHCILRYFNVAGACMDYTLGQRYPKATLLIKVAAECAAEKRNKLFIFGDDYDTKDGTCIRDFIHVDDISSAHLSALDYLKENESNVFNVGYGHGFSVKEVIEAMKKVSGVDFKVELAPRRAGDPSVLISDASKIRNLTSWQPKYDDLGLICKSAFDWEKQC

SEQ ID NO: 1335 - protein, 360 aa, Burkholderia fungorum
MSKKYRIAVIPGDGIGVEVMPEAIRVLEAVKARFGIELEYQHIEWASCEYYAKHGKMMPDDWKAQLLSADAILFGAVGWPDTVPDHISLWGSLLKFRREFDQYINLRPARLFAGVPSPLAGRKAGDIDFWIVRENTEGEYSSVGGVMFEGTEREFVLQESVFTRHGSERVLKFAFDLAQRRARKKITVATKSNGIAISMPWWDKVAAGIAAQYPDVTWDKQHIDILCARFVLNPDRFDVVVATNLFGDILSDLGPACTGTIGLAPSGNLNPDRKFPSLFEPVHGSAPDIAGKNIANPIAMIWSAAMMLDFLGNHAGKEREAHDAILAAIEATLIEGPHTGDLGGKANTTEVGQAIAKKLA

SEQ ID NO: 1336 - protein, 397 aa, Agrobacterium tumefaciens str. C58 (Cereon)
MAGRKTGLPQNPAISGLRWRKPFWHGHCTFSGIKCHRGENMRALRFHAAKDLRIEDIAEPKRPGPGQVLVRNRFVGICGTDLHEYSYGPIFIPTEPHPFTGAHGPQILGHEFGGVVEAIGDGVTSVNVGDRVSIQPLIMPRSGDYFADRGLFHLSTQLALVGLSWDGGGMAEAALVNEYNVQKIPDEMTDEEAALVEPSAVAVYACDRGGVTAGNSVLVTGAGPIGMLTLLAARAAGATQLFVSDLNDARLELARNVIRDVITINPKRDNVGDVVRSATEGKVGCDVAIECVGNEHALKACVDAVRKQGVVVQTGLHPHENPIDWFQVTFRDLEIKGSWAYPTHYWPRVIRLIASGLLPATKIVTKRITLDTAVTEGFDALLDPAGTHLKILIDLSK

SEQ ID NO: 1337 - protein, 213 aa, Glycine max
MKRVFGVKKNKDPPPSIQDASDRITKRGDSVDDKIKKLDAELSRYKEQIKKTRPGPAQEAVKARAMRVLKQKRMYEGQRDMLYNQTFNLDQVQFAAEGIKGALALRGMMTALKSANKELKGMMKTVKIQDIDNLQDEMMDLMDVSNEIQETLGRSYNVPDDIDEDDLMGELDALELDMGNETEADGVPSYLQPDKEPDLDAELNLPAAPTGQT

SEQ ID NO: 1338 - protein, 316 aa, Triticum aestivum
PYLAMVLLQVGFAGMYIVAVASLKRGMSHFVLVVYRNIVATVVMAPFALYFERGLRPKMTITIFIKIMGLALLEPVLDQNLYYMGANLTSAGFATALVNILPAVTFVLALILRMEKVRLRSLHSQAKIAGTVLTVAGAVLMVLYHGPVVQFPWAKGQHHAGSAAAAADGAAWLNGTIMAIAACVAWACFFILQSSTLRGYPAELSRAVPLRGMGSLMSGAIALVAERANTQAWVIGFDTRLFTAVYAGIVCSGVAYYVQGIVSRQRGPVFVTAFNPLCMIVTAVMGSIILKEEINLGSVIGAAIIVGGLYFLIWGK

SEQ ID NO: 1339 - protein, 503 aa, Yersinia pestis CO92
MTQQNTKIPAQQGAQRLRRELKSRHLAMIAIGGSIGTGLFVASGATVSQAGPGGALLSYALIGLMVYFLMTSLGELAAFMPVSGSFSTYGSKYVEEGFGFALGWNYWYNWAVTIAVDLVAAQLVMNYWFPDAPGWIWSALFLGLMFLLNYISVKGFGEAEYWFSLIKVTTVVIFIIVGVMMITGIMKGGETAGWHNWTIGDAPFAGGFSAMIGVAMIVGFSFQGTELIGIAAGESKDPGKNIPKAIRKVFWRILLFYIFAILIISLIIPYTDPSLLRNDVKDISVSPFTLVFQNAGLLSAAAVMNAVILTAVLSAGNSGMYASTRMLFTLASEGKAPRIFAKLSKGGVPRNALYATTVVAGLCFLSSMFGNQTVYLWLLNTSGMTGFIAWLGIAISHYRFRRGYMMQGRDLNDLPYQSGFFPLGPIFAFVLCLIITLGQNYQAFLQDRIDWYGVTATYIGIPLFLVIWFGYKLSRGTRVVKYQEMEFPKWRDESEEHQKPTSR

SEQ ID NO: 1340 - protein, 324 aa, Zea mays
  unsure (1)..(324): unsure at all Xaa locations
MALATNVAAAAAAAISGGSASQPRRASPSLLLLRRRCAVGAVHAAEPSKNTGVVPAAAKASTPTVVPENDTVPAPSLAPDASSRARWAVDSWRTKKALQQPEYPNQTELEEAVNTIEKSPPIVFAGEARHLEERLADAAVGRAFLLQGGDCAESFKEFTSANIRDTFRVILQMAVVLTFGGQMPVVKVGRMAGQFAKPRSDAFEERGGVKLPSYRGDIINGEAFDEKSRVPDPQRMLKAYYQSASKLNLLRAFATGGYADIQRVTQWNLDFTKHSEQGDRYRELAHRVDDALGFMGAAGLTVDQPLTTMIEFWXTSHECLLLLY

SEQ ID NO: 1341 - protein, 825 aa, Pichia anomala
MLLPLYGLASFLVLSQAALVNTSAPQASNDDPFNHSPSFYPTPQGGRINDGKWQAAFYRARELVDQMSIAEKVNLTTGVGSASGPCSGNTGSVPRLNISSICVQDGPLSVRAADLTDVFPCGMAASSSFNKQLIYDRAVAIGSEFKGKGADAILGPVYGPMGVKAAGGRGWEGHGPDPYLEGVIAYLQTIGIQSQGVVSTAKHLIGNEQEHFRFAKKDKHAGKIDPGMFNTSSSLSSEIDDRAMHEIYLWPFAEAVRGGVSSIMCSYNKLNGSHACQNSYLLNYLLKEELGFQGFVMTDWGALYSGIDAANAGLDMDMPCEAQYFGGNLTTAVLNGTLPQDRLDDMATRILSALIYSGVHNPDGPNYNAQTFLTEGHEYFKQQEGDIVVLNKHVDVRSDINRAVALRSAVEGVVLLKNEHETLPLGREKVKRISILGQAAGDDSKGTSCSLRGCGSGAIGTGYGSGAGTFSYFVTPADGIGARAQQEKISYEFIGDSWNQAAAMDSALYADAAIEVANSVAGEEIGDVDGNYGDLNNLTLWHNAVPLIKNISSINNNTIVIVTSGQQIDLEPFIDNENVTAVIYSSYLGQDFGTVLAKVLFGDENPSGKLPFTIAKDVNDYIPVIEKVDVPDPVDKFTESIYVDYRYFDKYNKPVRYEFGYGLSYSNFSLSDIEIQTLQPFSENAEPAANYSETYQYKQSNMDPSEYTVPEGFKELANYTYPYIHDASSIKANSSYDYPEGYSTEQLDGPKSLAAGGLGGNHTCGMLVTLSLLKSQIKVLMLVGLHLNCMLDIQIMMNSQHLQCNYVDLKRCFWIKIILKLFLLN

SEQ ID NO: 1342 - protein, 136 aa, Oryza sativa
  unsure (1)..(136): unsure at all Xaa locations
IDSAPHIVTVTLRERDANELXTKCHASGTYDRLELVAGSQNVHQLYRVDTVDTHIDRYYXKCITSEDMDXDMNIANTTTTAHIAYTGDVHKLCEKLGGASGATMGHILLLQSAYIAXSITIYKIVTDADLEMTVGX

SEQ ID NO: 1343 - protein, 368 aa, Raphanus raphanistrum subsp. raphanistrum
SSNKTLVSPGNVFELGFFTTGSSSRWYLGIWYKKVSGRTYVWVANRDNPLSSSIGTLRFSNMNLVLLDQSNKSVWWTNLTRGNERSPVVAELLANGNFVIRDCSNNDASGFLWQSFDYPTDTLFPEMKLGYDLKKGLNRFLTSWRNSDDPSSGNISYKLDTQRGMPEFFLLKDGLRATGVVHGMESNLVAYQRDQKLSYMVYNFTENSEEVAYTFRMTNSSIYSRLKISSEGFLERWTTPTSIPWNLFWSAPVDLKCDVYKTCGPYSYCDLNTSPLCNCIQGFMPSNVQQWDLRDPSAGCIRRTRLSCSGDGFTRMKNMKLPETRMAIVDRSIGVKECEKRCLSDCNCTAFANADIRNGGSGCVMWTG

SEQ ID NO: 1344 - protein, 473 aa, Pseudomonas syringae pv. syringae B728a
MPRSSCTGGFMSSTANSSELEQGLKPRHITMLSIAGVIGAGLFVGSGHAIAEAGPAVLLAYAAAGTLVVLVMRMLAEMAVASPDTGSFSTYADRAIGHWAGFTIGWLYWWFWVLVIPLEANAAATILHAWFPNIAIWVFTLVITLVLTATNLFSVKNYGEFEFWFALIKVVAIIAFVVLGVAAIFGLLPTSNVSGVSHLFDTGGFLPNGMGAVLAAMLTTMFSFMGTEIVTIAAAESKNPGKQITKATNSVIWRIFLFYLVSIFIVVSLVPWNDPRLAEVGSYQTVLDAMGIPNAKLIVDLVVLVAVTSCLNSALYTASRMLFSLGKRGDAPAVSKRTSKGGTPHWAVIMSTAAAFLTVFANYIAPAAVFDFLLASSGAIALLVYLVIAVSQLRMRQKRIAAGEAIDFKMWLFPWLTWAVIAFIVAVLTIMLLQEEHRLEIIATGVLSLLVIGAGMIVSRRRKDGRVGAAALG

SEQ ID NO: 1345 - protein, 374 aa, Zinowiewia concinna
ALSIAGAVQSQKLAVRAISQLQSLPGGDIKLLCDTVVETVRVLTGYDRVMVYKFHEDEHGEVVAESKRPDLEPYIGLHYPATDIPQASRFLFKQNRVRMIVDCHATPVSVIQDAGLMQPLCLVGSTLRAPHGCHAQYMENMGSIASLAMAVIINGNDEEGIGGRNTTRLWGLVVCHHTTARCIPFPLRYACEFLLQALGLQLNMELQLAAQLSEKHVLRTQTLLCDMLLRDSHTGIVTQSPSIMDLVKCDGAALYYQGKYYPLEVTPTEAQIKDIVEWVLAFHGDSTGLSTDSLADAGYPGAASLGDAVCGMAVAYITDRDFLFWFRSNTAKEIKWGGAKHHPEDKDDGQRMHPRSSFKAFLEVVKSRSLPWEN

SEQ ID NO: 1346 - protein, 268 aa, Burkholderia fungorum
MLAARSMNEADMNRTVLVTGACGGIGSVLCKRFVEQGDTVLALDIDAAALNALTAQLGEAHVTPVAVDLGDAAAVQRAVAAAVEVRGPVDVLVANAGAAQGLTLATTDAASWQRDIHLNLNGTYHTVEAVRASMIERQRGVLVLIGSVNGMAALGHPAYSAAKAGLIGYTKALALELGRYGIRANIVCPGTVKTQAWQARVEKNPQVFEDLKKWYPLRDFATPDDIADAVLFLASPMARVITGVALPVDGGLMAGNRLMAEELTLESL

SEQ ID NO: 1347 - protein, 192 aa, Zea mays
  unsure (1)..(192): unsure at all Xaa locations
SLSLRALHRRPPGGGWPPASSMLWVRNIRRFVDTGAGLGSEAXLMELETKRILLEIFKERQRKSAEAGSIPSFYKKPEEGSISSRVQRLAKYRFLKKQSELLLNADDLDAMWVCLRENCVIDDATGAEKMNYEDFCHIATVCTEXIGQKCKRFFSPSNFMKSARSTCTDCLANYKIISVFWFEFRVYLCMKY

SEQ ID NO: 1348 - protein, 227 aa, Carica papaya
YPQSIDWRAKGAVTPVKNQGACGSCWAFSTIATVEGINKIVTGNLLELSEQELVDCDKHSYGCKGGYQTTSLQYVANNGVHTSKVYPCQAKQYKCRATDKPGPKVKITGYKRVPSNCETSFLGALANQPLSFLVEAGGKPFQLYKSGVFDGPCGTKLDHAVTAVGYGTSDGKNYIIIKNSWGPNWGEEGYMRLKRQSGNSQGTCGVYKSSYYPFKGFAKDLGFHTYI

SEQ ID NO: 1349 - protein, 374 aa, Pristimera andina
ALSIAGAVQSQKLAVRAISQLQSLPGGDIKLLCDTAVESVRDLTGYDRVMVYKFHEDEHGEVVAESKRPDLEPYIGLHYPATDIPQASRFLFKQNRVRIIVDCHASPVNVIQDGGLMQPLCLVGSTLRAPHGCHAQYMENMGSIASLAMAVVINGNDEDGIGGRNPTRLWGLVVCHHTSARCIPFPLRYACEFLMQAFGLQLNMELQLAAQLLEKHVLKTQTLLCDMLLRESPTGIVTQSPSIMDLVKCDGAALYYQANYYPLGVTPTEAQIKDIVEWLLVFHGDSTGLSTDSLADAGYPGATLLGDAVCGMAVAYITNRDFLFWFRSHTAKEIKWGGAKHHPEDKDDGLRMHPRSSFKAFLEVVKSRSLPWEN

SEQ ID NO: 1350 - protein, 118 aa, Triticum aestivum
  unsure (1)..(118): unsure at all Xaa locations
MLEARLEQADLLKKIVDAIKDLVQDCNFDCNDSGVALQAMDNSHVALVSMMLKAESFSPYRCDRNLALGLNLGSLTKVLRAAQGDDILTIKAEDAPDVLNLLFESSEXNDRINEYDLK

SEQ ID NO: 1351 - protein, 343 aa, Agrobacterium tumefaciens str. C58 (U. Washington)
MVWQPAENRYASMKYNHCGKTGLKLPAISLGLWHNFGNDTPHQTKQAICRRAFDLGITHFDLANNYGPPPGSAETAFGEILKTDFRGYRDEMIISSKAGYNMWPGPYGEWGSRKYLISSCDQSLKRMGLDYVDIFYSHRFDPNTPLEETCGALDQIVRSGKALYVGISSYNSKRTREAAAILKDLGTPCIIHQPSYSMINRWIEEDGLVDTLEELGIGSIVFSPLAQGMLTTKYLGGVPDGSRASQSKSLNPAFLNERNVENIRALNSIAERRGQTLAQMAIAWVLRGGRITSALIGASRVEQVEDCVKALDNAEFSTEELAEIDRYAKDADINLWAKSAERV

SEQ ID NO: 1352 - protein, 353 aa, Bacteroides fragilis
MDFKIAVLAGDGIGPEISVQGVEVMSAVCEKFGHKVNYEYAICGADAIDKVGDPFPEETYRVCKNADAVLFSAVGDPKFDNDPTAKVRPEQGLLAMRKKLGLFANIRPVQTFKCLVHKSPLRAELVEGADFLCIRELTGGMYFGEKYQDNDKAYDTNMYTRPEIERILKVGFEYAMKRRKHLTVVDKANVLASSRLWRQIAQEMAPQYPEVTTDYMFVDNAAMKMIQEPKFFDVMVTENTFGDILTDEGSVISGSMGLLPSASTGESTPVFEPIHGSWPQAKGLNIANPLAQILSVAMLFEYFDCKAEGALIRKAVDASLDANVRTPEIQVEGGEKFGTKEVGAWIVDYIRKA

SEQ ID NO: 1353 - protein, 304 aa, Triticum aestivum
EAAASPLSPASHSTPPSPLPDLPTTRPRAPEKRSETAASGKTAKGERPPQLAYRRWVGGGVRHASAYQVMDAGGGGLGGFQWTAEEASTIGGIATVSLLHSFIPTHWLPFSIVGRAQRWPLSRTLLVTAFGAVLHVVSTALLGITAVTMANTIAGEETVHKLASLLLIFLGAGYILLFALGKGGHSHAHNHPMEKMAVAGLVLVPALSPCATTLPVFLAVGNSSSMMILAIIVLLFSTITVMTSLVALSFYGASQIKFHWVERYDKVLVGSVLCLVGVLTYVFHHHDGDEHSLHAHVHRKLVGP

SEQ ID NO: 1354 - protein, 374 aa, Salaciopsis glomerata
ALSIAGAVQSQKLAVRAISQLQSLPGGDIKLLCDAVVESVRDLTGYDRVMVYKFHEDEHGEVVAESKRSDLEPYIGLHYPATDIPQASRFLFKQNRVRMIADCHASPVRVIQDDGLMQPLCLVGSTLRAPHGCHAQYMENMGSVASLAMAVIVNGNDEEVIGGRNATRLWGLVVCHHASVRCIPFPLRYACEFLMQAFGLQLNMELQLAAQLSEKPVLKTQSLLCDMLLRDSPTGIVTQSPSIMDLVKCDGAALYYQGNYYPLGVTPAEPQIKDIVGWLLAFHGDSKGLSTDSLADAGYPGAALLGDAVCGMAVAYITNRDFLFWFRSHTAKEIKWGGAKHHPEEKDDGQRMHPRSSFKAFLEVVKSRSFPWEN

SEQ ID NO: 1355 - protein, 339 aa, Colletotrichum gloeosporioides f. sp. malvae
MVVSQPEVDFAREKDRLAEAQPQGQRAASSHDDAAPPPIGMTEPDERRGTRSRHDHSGKRDKVVRFGDYILGNTIGEGEFGKVKLGRKQDGGVQVIPVAVKLIKRDSVGNNPSRLAKIYREIAILRGISHPNIVRLHEMVETERHIGIILEYASGGELFDYILNHRYLKDNAARRLFAQLVSGVGYLHKKGIVHRDLKLENLLLDRNRNIIITDFGFANTFDGTRKGDLMQTSCGSPCYAAPELVVSDSLYTGRKVDVWSCGVILVSTAARYAMLAGYLPFDDDPANPEGDNINLLYKIVNTPLTFPEYVTPTPVTYSAASRSQSPQASGSLRGGRTAG

SEQ ID NO: 1356 - protein, 214 aa, Paeonia officinalis
IVESVGEDVTDVKPGDHVLPIFTGECKECRHCKSEESNLCDLLRINTDRGVMLNDGKSRFSINGQPIFHFVGTSTFSEYTVLHVGCLAKINPEAPLDKVCVLSCGISTGLGATLNVAKPKKGSTVAIFGLGAVGLAAAEGARIAGASRIIGVDLNPKRFDEARKFGVTEFVNPKDYNKPVQEVIAEMTDGGVDRSVECTGSIMAMMSAFECVHD

SEQ ID NO: 1357 - protein, 379 aa, Arabis lignifera
MSTTGQIIRCKAAVAWEAGKPLVMEEVEVAPPQKHEVRIKILFTSLCHTDVYFWEAKGQTPLFPRIFGHEAGGIVESVGEGVTDLQPGDHVLPVFTGECGDCRHCHSEESNMCDLLRINTERGVMIHDGESRFSINGKPIYHFVGTSTFSEYTVVHSGQVAKINPDAPLDKVCIVSCGLSTGLRATLNVAKPKKGQSVAIFGLGAVGLAAAEGARIAGASRVIGVDLNPKRFDEAKKFGVTEFVNPKDHDKPVQQVIAEMTDGGVDRSVECTGSVQAMIQAFECVHDGWGVAVLVGVPSKDDAFKSHPMNFLNERTLKGTFFGSYKPKTDIPGIVEMYMNKELELEKFITHTVPFSEINKAFDYMLKGESIRCIITMGA

SEQ ID NO: 1358 - protein, 481 aa, Papaver somniferum
SLVAVVITTFLYLIFRDSSPKGLPPGPKPWPIVGNLLQLGEKPHSQFAQLAETYGDLFSLKLGSETVVVASTPLAASEILKTHDRVLSGRYVFQSFRVKEHVENSIVWSECNETWKKLRKVCRTELFTQKMIESQAEVRESKAMEMVEYLKKNVGNEVKIAEVVFGTLVNIFGNLIFSQNIFKLGDESSGSVEMKEHLWRMLELGNSTNPADYFPFLGKFDLFGQSKDVADCLQGIYSVWGAMLKERKIAKQHNNSKKNDFVEILLDSGLDDQQINALLMEIFGAGTETSASTIEWALSELTKNPQVTANMRLELLSVVGKRPVKESDIPNMPYLQAFVKETLRLHPATPLLLPRRALETCKVLNYTIPKECQIMVNAWGIGRDPKRWTDPLKFSPERFLNSSIDFKGNDFELIPFGAGRRICPGVPLATQFISLIVSSLVQNFDWGFPKGMDPSQLIMEEKFGLTLQKEPPLYIVPKTRD

SEQ ID NO: 1359 - protein, 95 aa, Fagopyrum cymosum
GRLYEYANHSVKATIDRYKKACSDSAGVTSVAEANAQYYQQEAAKLRNQIRTLQNNSRNLSRHMMGEGLSSLSMKDLKNLETRLEKGISRIRAKK

SEQ ID NO: 1360 - protein, 456 aa, Oenococcus oeni MCW
MKKLNDSKNNMKRELSNRHIQLISIGGTIGTGLFLGASRSIAFTGPSIMLVYLAAGIFMFLVTRAMGEMLYMDPDQHTFINFISKYLGKPFGFFSGWTYWLSIIFTGMGELTAVGIYFQFWFPKMPMWIIQLMFLAAIMSINLITVKFFGEAEFWFAMIKISAIVALILTSIFMLATDFKTPIGAVGLTNISKNFQLFPNGFKNFVMAFPMVFFAYQGIEFVGITTSETKNPRAVLPKAINQIIIRILIFYIGSLIAIMLIYPWQSLDPKQSPFVWIFKLLGISWAAGLINFVVLTAASSALNSILYSSGRHLYQLASDSSGKFNKNCAVISKNGVPARTICLSALAVAVSPIINSIPTIKDAFSVIASVSSGAYLLIYILTLFAHRKYTQSKDYLANGFLMPKPKFFGPLTIAFMVFILISMLFQKETCPGVVTALIWLVVFGGYSLAKYKNENS

SEQ ID NO: 1361 - protein, 459 aa, Illicium oligandrum
SGKPFYAIMHRIDVGLVIDLEPVNPADVPITAAGALKSYKLAAKAISRLQSLPSGNIGILCDVLVREVSELTGYDRVMAYKFHEDEHGEVIAEYRRTDLEPYLGLHYPATDIPQASRFLFMKNKVRMICDCYAPPVKVIQDKKLAQPLSLGGSTLRAPHGCHAQYMANMGSIASLVMSVTINEDYDETSSNQQKGRKLWGLVVCHHTSPRFVPFPLRYACEFLLQVCGIQLNKEVELVAQMKEKHILKTQTLLCDMLLRDAPIGIMTKSPNVMDLVKCDGAALYYGKQLWLLGITPTEAQIRDITEWLLECHDSTTGLSTDSLMEAGYPGATTLGDTVCGMAAIKVASKDFLFWFRSHTAKEIKWGGSKHDPADKDGKKMHPRSSFKAFLEVVKRRSLPWEDVEMDAIHSLQLILRGSLQQVLESETKAIVDARLDDEQIQGPDELRIVTNEMVRLIET

SEQ ID NO: 1362 - protein, 241 aa, Zea mays
  unsure (1)..(241): unsure at all Xaa locations
MEEHQVKPSDLPPTSLHNQDSAATPVTSADPARPAASNDSPSQVASAAPAAVSAPTAAPAEDAAGREASASVFSASGLSSWAKNLKIPQPSPGQESPTGKNTFAXFTSGIGLRLSPKAPQQDEGAEEAPXNTGQPGVFGSLTKSVVDSSKNAVKAVQVKARHMVSQNKRRYQEGGFDLDMTYITENIIAMGFPAGDLSSGLFGYFEGFYRNHMEEVIRFFEMHHKLAKYNNDGEQDDFESN

SEQ ID NO: 1363 - protein, 325 aa, Methanothermobacter thermautotrophicus str. Delta H
MILIVGGAGYIGSHVNKFLSERGYETLILDNLTRGHRDFVKWGEFIEGNLGDRRLLDRTFETHDVDAVMHFAAFTDVGESVLKPGRYYHNNVVNTINLLDSMVDHGVRDFIFSSTCAVYGNPMEIPISEEHPLNPISPYGRSKLMVEEILGDYRDAYGLNYVSLRYFNAAGADPEGEVGELHNPETHLIPIVLDVALGLRDAVRIFGTDYPTPDGTCVRDYIHVMDLADAHWRALRYLEGGESGVFNLGNGNGFSVMEVIETCREVTGASINAVEDDRRPGDPPELVGSAGRARRVLGWRPEFTELEDIIETAWNWHSRIRGGIS

SEQ ID NO: 1364 - protein, 333 aa, Neurospora crassa
MARVSGGPLAAAVSNAGGLGVIGGFMYTPDQLRSIIAEMKANFSRPDLPFGVDLALPQIGGSARKTNHDYTGGKLDELIDITIESGARLFVSAVGVPPKRIIDKLHANGILVMNMVGHPKHAVKALQLGVDMVCAQGGEGGGHTGDVANSVLIPSVVDVARMFKPTMLNKVLGTTDQPALVVAAGGIADGRGLASSLMQGAAGVWVGTRFVASKEASCSDQHKEAVVTCGFQDTERTLVLSGRPLRMKTNQYIAKWHAQPEKIAELTEKGIVPIEWDMDQGNEIDPPHLMGQVAGLVKKVQPAGEIVEEMVQEAVEQLKLGQAYLNGGRTSKL

SEQ ID NO: 1365 - protein, 175 aa, Triticum aestivum
MAQAQATRGSGDPMKAQQEQPEPIQYGHVFAVTGDLAVQAIAPRDAEAMRTAEESVQGVQVPQASGGGFSAAVAMETAATYNQAVGAVRPGQASDAATKQGITVTQTAVPGGRIVTEFVAGQVVGQYSVADQAMMQQQQVEEDTSKVTIGEAMEAAALSAGDRPLEEADAAAIRA

SEQ ID NO: 1366 - protein, 171 aa, Triticum aestivum
MAGDRMSWARLLKWSLSYMDGARPSRDISEEEQRWLAEAVERHMAEDVVGRLREIALLMRTPLSVLEAQGITPEDIEDLLAELQVHVESIDIANDLHSVGGLVPVIRYLRNTNARIRAKAADVVTTVVQNNPTSQQLVMEASGFEPLVSNFTSDPDLTARIKALGALSSLI

SEQ ID NO: 1367 - protein, 219 aa, Lilium longiflorum
VEQFSPVPYLATLLNCMLWVVYGLPLVHPHSTLVLTINGLGLIIELTYVLLFLLYSNGRARIRVLAMLLTEIVFVGLITVIVLSTAHTLVTRSLIIGVLCVFFGTMMYAAPLSVMKLVIQTKSVEYMPLFLSVASFLNGICWTTYALIRFDLFITIPNALGTMFAVAQLILHAMYYKSTKIQMEAQKRKLEMGFEEVMAPVENTEKIRGASQTGKYPPV

SEQ ID NO: 1368 - protein, 251 aa, Oryza sativa
MGSKSYPTVSDEYLAAVGKAKRKLRGLIAEKNCAPLMLRLAWHSAGTFDVSSRTGGPFGTMKNPGEQSHAANAGLDIAVRLLDPIKDQLPILSYADFYQLAGVVAVEVTGGPEVPFHPGRQDKPEPPPEGRLPDATQGSDHLRQVFSAQMGLSDKDIVALSGGHTLGRCHKERSGFEGAWTSNPLIFDNSYFTELVSGEKEGLLQLPSDKALMADPAFRPLVEKYAADEDAFFADYAEAHLKLSELGFAEE

SEQ ID NO: 1369 - protein, 353 aa, Oceanobacillus iheyensis HTE831
MKNFKIANIPGDGIGKEVVPAAANVLKAIAAIHGGLRFEFTEFPWSCEYYMEHGKMMPEDGLEIIKDYNAIFLGAVGNIELVPDHISLWGLLIKFRREFEQVINYRPAKVLPGVKSKIVNPKDFDLIVVRENSEGEYSEVGGRIFRGEDEIAIQNSIFSRRGTERVMRFAFELAAKRKKHVTSATKSNGIFHSMPFWDEVFKDVSRDYSTIETDSQHIDALAAFFVTNPERFDVIVASNLFGDVLSDLGAAIMGSVGVAPAANINVNGKYPSMFEPVHGSAPDIIGKNIANPIGQIWTAKLMLDHFGEEELGSLLLDVIENTTNKGILTPDIGGKHTTSEVTEEIIEGLKARF

SEQ ID NO: 1370 - protein, 341 aa, Bacillus cereus ATCC 14579
MKILILGGTRFLGRAFVDEALQRGHEVTLFNRGTNKEVFPEVEQLIGDRNNDVSSLKNRKWDVVIDTCGFSPHHIRNVGEVLNDNIEHYVFISSLSVYKDWILHDIKEDYILQPEPTDDQIKAVENGEVSPYEYYGALKVLCEKEAEKYWPGRVLHVRAGLLSGMFDYTDRLPYWIQRVAKGGKVLVPGRKDRPVQIVDIKDVANWGLNMAENKNAGTFNVTGPNYDLTMEELLNTCKKVMNSDAEFVWVEESFMNEHNVQPWTEMPLWLPEIFSLEGETKPWKGGFTISIENAVKEGLTFRRIEETVTDVYEWMKSTDEWELKAGISGEREKELLERWYQ

SEQ ID NO: 1371 - protein, 119 aa, Glycine max
  unsure (1)..(119): unsure at all Xaa locations
GSKNAKPITKTENCESFFNFFNPPQVPEDDEDIDEDVAEELQNQMEQDYDIAATIRDKXVPHAVSWFTGEAIQGDEFGDLEDDEDDEDIEEDDDEDEEDDDDDDDDDDDEEESKTKKKV

SEQ ID NO: 1372 - protein, 261 aa, Streptomyces peucetius
MSEAADRVALVTGGTSGIGLAVVRKLAQDGTRVFLCARDESAITGTVKELQASGLEVDGAPCDVRSTADVDRLVQTARNRFGPIDIVVNNAGRGGGGVTAEITDDLWLDVVDTNLSGAFRVTRAVLTGGAMQEHGWGRIISIASTGGKQGVALGAPYSASKSGLIGFTKAVALELAKTGITVNAVCPGYVETPMAQGVRQRYAAFWGITEDDVLEKFQAKIPLGRYSMPEEVAGMVHYLASDSADSITAQAINVCGGLGSY

SEQ ID NO: 1373 - protein, 263 aa, Neurospora crassa
MTPKYPTLTPEHIAQFREVFDIFDKDHTGDITAEELGVVMRELGLNPSKAELEDLVNEADTNKDGVINFEEFLNLMSQSVKETDSEKELLEAFKVFDKDNSGTISTEELRAVLKSLGEDMTDADVDEMIKLADKNGDGQIDCESCFFLFYEVDPVVRMGLGAAKEGQVRLARWTVEAQGGGGGGGGGGGGGEARRHGRLEPLMRRSNDIGLAGTGAHTLRKGQIAWQLRSGRQGCGMRAAEAEAARLFYQRAEILSGMRCEEG

SEQ ID NO: 1374 - protein, 360 aa, Oryza sativa (japonica cultivar-group)
MEDQSLKPIRCKAAVCRAASEPLIVEEIVVDPPKAYEIRIKIICTSLCHTDVTLWHKVDPAFPRILGHEAYGVVESVGENVEGLAAGDTVVPTFMGQCDSCASCAAEWTNQCTAVPFTMGPGMRRDGTTRFWDGEGKPLSDTVAVTSFSQYTVVDVNQVVKVDPAVPPKIACLLGCCGGTGEPEIRRYIEPAWGRSSMEVGQSATRFVGGCLRAGIRRIGGKEFGVTDFVNPSQLGDKSVSEVINAMTDGGADYSFECIGISSVMTEAGRGKTIILGVEKDSQPLCLPSFEFLFGKCVMGSLFGGAKPKTDIPILAEKCMNKELELEKLVTHEVGLTEINTAFDLLLQGKSLRCIIWMDK

SEQ ID NO: 1375 - protein, 580 aa, Oryza sativa
  unsure (1)..(580): unsure at all Xaa locations
RSPLPNQIXNLEEEEIEIKSMNLWTDDNASMMEAFMASADQQQVLPPPAAAPAAAAFNQDTLQQRLQSIIEGSRETWTYAIFWQSSIDVSTGASLLGWGDGYYKGCDDDKRKQRSSTPAAAAEQEHRKRVLRELNSLIAGAGAAPDEAVEEEVTDTEWFFLVSMTQSFPSGVGLPGQALFAASPLDRPGLSSAPCDRARQAYTFGLRTMVCLPLATGVLELGSTDVIFQTGDSIPRIRALFNLSAAAASXXWPPHPDAASADPSVLWLADAPPMDMNSISAADISVSKPPPPPPHQIQHFENGSTSTLTENPSPSVHAPTPSQPAAPPQRQQQQQQSSNTNNHPAATANEGMLSFSSAPTSESDHSDLEASVREVESSRVVAPPPEAEKRPRKRGRKPANGREEPLNHVEAERQRREKLNQRFYALRAVVPNVSKMDKASLLGDAISYINELRGKLTALETDKETLQSQMESLKKXAGRAAAGAVGRRXGDGGARCHAVEIEAKILGLEAMIRVQCHKRNHPAARLMTALRELDLDVYHASVSVVKDLMIQQVAVKMASRVYSQDQLNAALYTRIAEPGT

SEQ ID NO: 1376 - protein, 355 aa, Spirulina platensis
MTQNYRITLLSGDGIGPEIMAVAVDVLKAVGKQLDLNFEFKEALMGGVAIDATGEPLPEESLQACRDSDAVLLAAIGGYKWDNLPRPERPETGLLALRAGLGLFANRARLLFCPHVLDASSLKREVVEGVDIMVVRELTGGIYFGQPKGIFETETGKNEGSNTMAYGESEIDRIGRVGFETAKKRQGRLCSVDKANVLDVSQLWRDRIMALAADYPEVELSHLYVDNAAMQLVRWPKQFDTIVTGNLFGDILSDAAAMLTGSIGMLPSASLGASPGGVFEPVHGSAPDIAGQDKANPLAQVLSAAMMLRYGLDEPAASDPVEKAVLKVLDWGYPTGDIMSEGMKAVGCRKWGICY

SEQ ID NO: 1377 - protein, 353 aa, Arabidopsis thaliana
MANIGVVTTATNNQVILRNYVSGFPKESDLYIAATTVDLRVPPGSMAVLVKNLYLSCDPFSRIRMEKPDPSSPASLARAYSIGKPISGYGVAKAIDSGHPNYKTGDLLWGRVGWEEYSVINPTPSSHFKIHHADVPLSFYTGLLGIPGLTAYVGFYEICSPKKGETVFVSAASGAVGQLVGQFAKMAGCYVVGSASSKEKVDLLKTKFGYDDAFNYKEEHDLSAALKRCFPEGIDIYFENVGGKMLEAVLENMRTHGRIAACGMISQYNLKEPEGVHNLASIVYKRIRVQGFAAVEFFDKYSKFLDFILPYVREGKITYVEDIAQGLENGPSALIGLFHGKNVGKQLVAVARE

SEQ ID NO: 1378 - protein, 505 aa, Listeria innocua
MNVRTLLVRVGVILTMALGISLWLGTSPGIDAQAASLAQPTPINEVFPDTQMALTMANKLGKTKVTDLVSQSELDSLTELRSNLPIASIEGIQYLTNLTELNISNAEVSDISALKDLTKLTKLEMYQNNISDINVLENLTNITDLDLHDNQITDISPVRNLTNLVVLNLSYNQISDISAVSTLSKLNDLGFTDNQVSDISAVAGLNNLSSLSLGYNQISDISILTNLTNLDGLSIDHNQISDLTPIANLTNLTFVGLHNNQISDLTPIANLTNLTRMYLSGQQITNNPIPYHSNIAIPNNVKNNKNDVIAPLVISNEGTYDNSNVVWNLADYVNKVSYTFSQQVTIGSATETFNGTVTQPLELYTVTFDVDGVTTNETLEADTLLTEPTPPTKEGYTFTGWYDAKTNGTKWDFETDKMPAKDITLYAQFSEDKGPADDDTDKDTPNDPAINDGDAVHSLDSSEPPAEVNVNISLPKTGDSQNPLVIFMGLFLLGTGIISLHKIRN

SEQ ID NO: 1379 - protein, 412 aa, Oryza sativa
MAAAVRDGAAVAGYMAEDDPDGAASEDGDMDVEVGGEESQARDGDRRDGGDGDDEYALNFPQSGELMDKICKQVDKISKYYEFHYNTRLVKPSILHFQLRNLLWATSKHDVYFMSNSTVGHWSSLSHNLSEVLDFSGHVAPAQKHPGSLLEGFSGVQVSTLSVNEGLLVAGGFQGELICKVVGDRDVKFCTRTTLSDNAITNAIDIHRSASGSLRVTVSNNDCGVREFDMETFQLLNHFSYNWPVNHTSVSPDRKLLAVVGDDRDALLVDSRNGKVTSTLVGHLDYSFASAWHPDGRTFATGNQDKTCRVWDVRNLSTSLSVLRGNIGAIRCIRYSSDGQFMLFSEPADFVHVYSAAADYKKRQEIDFFGEISGISLSPDDESLFVGVCDRVYASLLHYRMVHSFGYLDSFM

SEQ ID NO: 1380 - protein, 110 aa, Glycine max
MNLKKMPAPEVAVNYYTGDDLYLFDEFQTSRVPNSRRPKIKNLSDVFVNIRDDEAVHCKTMKACQTHGNLRSPHSYAEDDDSSVCALEADCEGIVDCIKKSVTFNAAKVK

SEQ ID NO: 1381 - protein, 917 aa, Botryotinia fuckeliana
MPSLHGLWSHINVTLANLTNNRDEDGDHIDSDTPRSGVATPQPDPSDKRTPGILHSFYGQVGLGSSSSQNSAKHISRTSQNPNTSALEGHYTSPRQRFEAEGALLKATPSSLDERRIDGGVEKENSLLPPHELLGSSQISKQQYPYPTPPVSHPSSLHKVKLSDASFEDIGNNVQKTAAPTDRDCISESIPSHARRASSMTPLSNIVTPSNVHAAHFSNPSDTPSEHKLSTPPLSRLNSEFHKSPSYDRLKKLTCDGLKSIPSTPTRALSNQTSKSDQSVMSTNSEHVAQNGKSGASERPAVTPRTDSSMGGTVVPPKGKLTVKINEARGLRRSVDPYVVAVFQRNELVSKGPQSEEDDEDDGNSHSPGGIPIGGIPIGGIPITRSGSDSGRSMAIPMKSRQSSNTSLSEYRDFKNKGRKMFTHPKWDAEAVFDVVGSDTRVNITIYDRAQQAEEFLGHVDLQANLVENVDAPVSGWFQLRGKDMTSNAGNVGEVHVEISFQRTEKRHYGPDDFQILKLIGKGTFGQVYQVRKKDTKRIYAMKVLQKKVIVQKKEVAHTVGERNILVRTATADSPFIVGLKFSFQTPTDLYLVTDYMSGGELFWHLQKEGRFDEQRAKFYIAELILALEHLHKHDIVYRDLKPENILLDANGHIALCDFGLSKANLTKNATTNTFCGTTEYLAPEVLLDEAGYTKMVDFWSLGVLVFEMCCGWSPFYAEDTQQMYKNIAFGKVRFPRDTLTTEGRNFVKGLLNRNPKHRLGATDDAEELKRHPFFQDIDWHALTQKLITPPFKPKLKSETDTSNFDPEFTNALNGASSLNARAAALAAGMATSTPLSPGMQANFKGFTFVDESSIEENMKDRIKDEYEDRMDQDNNDPERDWEDTFDIPDKSRMDRMSGVVRNHNEDERMFNGDDFH

SEQ ID NO: 1382 - protein, 211 aa, Triticum aestivum
  unsure (1)..(211): unsure at all Xaa locations
PLFATANIAAGFFIYIXTPIAYWFNVYEAWNFPIFSDGLFTVTGQKYNISSIVDSEFHFDANAYEKNGPLYISTFFAVSYGLGFACLTATIVHVLLFHGSEIWELSKSAFQDRKMDVHTKLMRRYGQVPEWWFICILVASAAITVFTCEYYIEQLQLPWWGILLACALSIFYTLPIGIITATTNQTPGLNIITEYIMGYLYPGRPVANMCF

SEQ ID NO: 1383 - protein, 181 aa, Bacillus subtilis subsp. subtilis str. 168
MLKGKTIYVRPLEVTDAEENLGLQSENRDFFEQFSMIRADDYYTVEGQRKRITEYQERLEKDEEYHFGIFTASDDRLIGTVSLFQIIRGALQTAFIGYFLDKAHNGKGIMTEAVRLVVDYAFHELKLHRIEAGVMPRNLGSMRVLEKAGFHKEGIARKNVKINGVWEDHQVLAILNPDDEQ

SEQ ID NO: 1384 - protein, 882 aa, Xylella fastidiosa Temecula1
MPLPIAAPPILASTLTLLLATTPTAAALTPEQHAAALVAQMTRQEKIAQTMNAAPAIPRLGIPAYDWWSEGLHGIARNGYATVFPQAIGLAASWNTDLLQHVGTVTSTEARAKFNLTGGPGKDHPRYAGLTLWSPNINIFRDPRWGRGMETYGEDPYLTSQLAVSFIRGLQGDTPDHPRTIATPKHFAVHSGPEQGRHSFDVDVSAYDLEATYTPAFRAAIVDGHAGSVMCAYNALHGTPACASDWLLNTRLRNDWGFNGFVVSDCDAIEDMTRFHFFRQDNASASAAALKSGNDLNCGNTYRDLNQAIARGDIDESTLDQALIRLFTARQRLGTLQPREHDPYAAIGIKHIDTPAHRALALQAAAQSLVLLKNSGNTLPLPPETTLAVLGPDADSLTALEANYQGTSSTPVTPLTGLRTRFGTAKVHYAQGASLAPGVPNTIPETALRNHGHPGLKGEYFDTIDFSGPPHLVRQDRIIAFNWDHVAPAPGMNPHRYAVRWTGELLPPGPGTYTFAVHVARCFDCNGRDPIRLYIDDRQIIPDNATAAQATTAPQQTNNTHLEATLHFTDTRPHHIRLDMEHRGEDQGVRLEWLAPETPQLAEAERAVAHADAIVAFVGLSPEVEGEELHIDTPGFSGGDRTTIDLPATQETLLQHVKTTGKPLIVVLMSGSAVALNWAQHHADAILAAWYPGQSGGTAIAQALAGDVNPGGRLPVTFYRSTQDLPPYISYDMTGRTYRYFKGQPLYPFGYGLSYTQFAYEAPQLSTATLKAGNTLTVTTHVRNTGTRAGDEVVQLYLEPPYSPQAPLRSLVGFKRVTLRPGESRLLTFTLDARQLSSVQQTGQRSVEAGHYHLFVGGGQPNTGAPGGTAAFSIIGRALLPK

SEQ ID NO: 1385 - protein, 170 aa, Gossypium hirsutum
MASQSSKPQSIYDFTVKDAKGNDVDLSIYKGKVLIIVNVASQCGLTNSNYTDLTEIYKKYKDQGLEILAFPCNQFGGQEPGSIEESIQNMVCTRFKAEYPIFDKVDVNGDNAAPLYKFLKSSKGGFFGDSIKWNFSKFLVDKEGNVVDRYSPTTTPASMEKDIKKLLGVA

SEQ ID NO: 1386 - protein, 420 aa, Sinapis arvensis
YHHSYTFFFVVLVLFPHVFSTNTLSSNDALTISSNKTLVSPGDVFELGFFRTTTRNSRDGTDRWYLGIWYKTTSDQRTYVWVANRDNPLHNSIGTLKISNANLVLLDHSDTPVWSTNLTGVVEPPVTAELLANGNFVLRGSYSTDDEFMWQSFDFPVDTLLPEMKLGRNRKPGPERILTSWKSPTDPSSGDFSFMLETHTIGLHEFYLRKNDFIMYRTGPWNGVRFSGIPKMQNWSYIVNSFVDNHKEVAYTFHVDNHKINSRFRMSSTGYLQVITWTMTVPQRNMFWSFPEDTCDLYQVCGPYAYCDMNTAPTCNCIKGFVPKNAAQWELRDASGGCVRSSRLSCGEGDGFLRMSQMKLPETSEAVAVLVDKRNGFKECKERCTRDCNCTGFANMDSMNGESRCVIWSDELVDMRNYVA

SEQ ID NO: 1387 - protein, 484 aa, Cucumis sativus
MVTITISAILPSLHPPPCPTQINCTQASGTQLMILYLALLLTSLGAGGIRPCVVAFAADQFDMTKVGIAGRTWNFFNWYYFCMGMATLTALTVVVYIQDNVGWGWGFGLPTIAMALSVVAFVVGSPLYNKLKPSGSPLVRLAQVVVAAFKNRKAVLPDDSKLLYRNHELDAAIAIQGRLVHTDQFKWLDKAAVITSPDSTANPPNLWRLATVHRVEELKSIIRMLPIWAAGILLVTASSHQHSFTIQQARTMNRHLTPTFQIPPATLSIFGILSMLTGLVLYDRLLVPFAKKLTHNPSGITCLQRMGVGFAINILATLVSSIVEIKRKKVAANHGLLDNPTATIPFSVFWLVPQFWLHGIAEVFMSVGHLEFMYDQSPESLRSTATALYWLAISVGNYIGTLMVYLVHKYTGEEHNWLPDRNLNRGRLEYYYWLVSGIQVMNLVYYVICAWFYTYKPLEEEKINIENKDGDQEWERCEDTIKIA

SEQ ID NO: 1388 - protein, 171 aa, Glycine max
  unsure (1)..(171): unsure at all Xaa locations
SKRLWLILSFSFSMFKERKLVKRHAXEIFTSVIISTGFSLYSTALVGRLVQLEPSLTVSILPRCITVALALSIVSLFDGANSSLTAAVVVLTGLVGANFVQATLDKLSFRDPIARGIATASSAHGLGTAALSAKEPEALPFCAIAYALNGIFGSILCSIPAVRQSLLAIVG

SEQ ID NO: 1389 - protein, 231 aa, Echinochloa crus-galli var. formosensis
VLPVFTGECKECAHCKSAESNMCDLLRINTDRGVMIGDGKSRFSINGKPIYHFVGTSTFSEYTVMHVGCVAKINPVAPLDKVCVLSCGISTGLGASINVAKPPKGSTVAIFGLGAVGLAAAEGARIAGASRIIGVDLNAARFEEARKFGCTEFVNPKDHDKPVQQVLAEMTNGGVDRSVECTGNINAMIQAFECVHDGWGTAVLVGVPHKDAEFKTHPMNFLNERTLKGTF

SEQ ID NO: 1390 - protein, 154 aa, Saccharomyces cerevisiae
MVQAVAVLKGDAGVSGVVKFEQASESEPTTVSYEIAGNSPNAERGFCIHEFGDATNGCVSAGPHFNPFKKTHGAPTDEVRHVGDMGNVKTDENGVAKGSFKDSLIKLIGPTSVVGRSVVIHAGQDDLGKGDTEESLKTGNAGPRPACGVIGLTN

SEQ ID NO: 1391 - protein, 315 aa, Hordeum vulgare subsp. spontaneum
MATAGKVIKCKAAVAWEAGKPLSVEEVEVAPPQAMEVRVKILYTALCHTDVYFWEAKGQTPVFPRILGHEAGGIVESVGEGVTELVPGDHVLPVFTGECKDCAHCKSEESNLCDLLRINVDRGVMIGDGQSRFTINGKPIFHFVGTSTFSEYTVIHVGCLAKINPEAPLDKVCVLSCGISTGLGATLNVAKPKKGSTVAIFGLGAVGLAAMEGARMAGASRIIGVDLNPAKYEQAKKFGCTDFVNPKDHTKPVQEVLVEMTNGGVDRAVECTGHIDAMIAAFECVHDGWGVAVLVGVPHKEAVFKTHPMNFLNEK

SEQ ID NO: 1392 - protein, 197 aa, Pennisetum ciliare
MKVKSAVLLCVVLASLLLATQDATYARELTEANGPEGSVKLAGGPGFKDVKWLLGGHKHGGGYGNEGGYGGGYGNNGGYGGGNDPPSYGGGSGPGYGGPGYGTGGRYGGPGFGRSYKHHVHGGGGYGPGYGGGYGPGYGGGNSCPPCGSGNAGPGYGGGYGGGNGGGYGSGSGSGSGNGGGGGGGYGGGYGSSGISP

SEQ ID NO: 1393 - protein, 62 aa, Glycine max
CTTCPANCHVLQGFTAGGFIYIAVAGVLPQMNDQKTTLKSSVAQLIPLAMGMLVALGISLVE

SEQ ID NO: 1394 - protein, 217 aa, Glycine max
ITLALSQFSATQLGDVFLCKEVVSRKVLVDQGHRQVVDLDQAAIWKFLWWSGTISINVLVDQNRKDHSMKFKQTKAGFMKKFEGCWRVEPLFVDEAMCHPFKPVTKEDYNACTRGKGRIGSKVSLEQTLQPSIVPPPPLSWYLRGITARTTEMLINDMLAETARIRGGYEAEKSKAEELQGKPGENVDLVSNTSDIKERWKLRRENAKHSHRRLLTK

SEQ ID NO: 1395 - protein, 233 aa, Triticum aestivum
HDFPRRLGQTGSPRSEQMTAAAGAATRPALVVGALVAALMMLGSEAVWLDLPPSGTKCVSEEIQPNVVVVADYMLMYEAHATAHPTVAVKVTSPYGNTVHHKENATVGQFAFTTSEAGNYLACFWLDSAEKGSGVSLNLDWKIGIATKDWDSVAKKEKIEGVELELAKLEAAVESIHHNLLYLKAREAEMREVSEKTNSRVAWFSILSLGVCIVVSALQLWHLQGFFQKKKLI

SEQ ID NO: 1396 - protein, 298 aa, Triticum aestivum
MFELKMVKGSTLQGVLEAILDLVNVANVDCSSEGFSLQALDTEHVVFLSLFFPSEAFQSYRCDEDRSMGIAIADMVDFLRSSNDGDIITIKATDQNLEDITITLESPDKIKTMAIDLRLVDATSQCLKIPDWNDMESDYQAIFCMPSEVFMLNCKSLSVIGDDAVVVIRVNEEVISFSTKGKRRCVNISHVLNKTDKHVTLTHARGPVSLALNLRYMKSCAKVSTLFDQVKIGLSTTLPLMVECKIAEKGYIRYFVATKNLTEEEEGKTETEEAEGEEGRLGRGKQKKNDETGDEMLG

SEQ ID NO: 1397 - protein, 306 aa, Neurospora crassa
MTSDKPVVAATTTKTKKSKQQTIHYPFWFGGSASSMAATVTHPLDLVKVRLQMRTGDAPKTMSGTVLHIIRHNGITGLYNGLSASLLRQITYSTTRFGIYEELKTRFTTKDHPASFPVLIAMATVSGVAGGLVGNVADVLNVRMQHDAALPPAQRRNYAHAIDGLARMTREEGFRSWFRGVWPNSARAAAMTASQLASYDVFKRILIRHTPLEDNLATHFSASFLAGVAAATVTSPIDVVKTRVMSASGKSSIGQVLGSLYAQEGVRWMFKGWVPSFLRLGPQTICTFIFLEGHRKMYKKVKGIEE

SEQ ID NO: 1398 - protein, 314 aa, Streptomyces avermitilis MA-4680
MTSLRKLGPSDLEVFPLSLGGNVFGWTADEAQSFAVLDAYTAGGGNFVDTADAYSAWVPGNEGGESETIIGRWFAARGNRSEVVLATKVGAHPRFKGLAAANIKAAAEASLRRLDTDYIDLYYTHYDDPSVPVEEIITALDGLVREGKVRAIAASNISPERLQESLEFSDREGLARYVALQPHYNLVSRDTYEGQLQDVASRNGLAAVPYYALASGFLTGKYRPGTKVDSARAEGAGKHLGTERGVRVLAALDEIAGARGAEAATVALAWLAAQPTVAAPIASARTVDQLPALLAVGELTLTDAELSKLTQASA

SEQ ID NO: 1399 - protein, 248 aa, Vibrio cholerae
MSQFMNLEGKVALVTGASRGIGKAIAELLAERGAKVIGTATSESGAQAISDYLGDNGKGMALNVTNPESIEAVLKAITDEFGGVDILVNNAGITRDNLLMRMKEEEWSDIMETNLTSIFRLSKAVLRGMMKKRQGRIINVGSVVGTMGNAGQANYAAAKAGVIGFTKSMAREVASRGVTVNTVAPGFIETDMTKALNDEQRTATLAQVPAGRLGDPREIASAVAFLASPEAAYITGETLHVNGGMYMI

SEQ ID NO: 1400 - protein, 98 aa, Triticum aestivum
EIIAAKPSQKLFVVDETRRKTYHEHEDQPSSDSDLIFDAFCAEPKELISVGLHAVHSYARSLARFAGSLGAQGWRIASERLQQTLPAEVRFGRGWVGE

SEQ ID NO: 1401 - protein, 187 aa, Medicago sativa
MTTKFTLVFLLLTLLSIATSTPTNFIKSSCSTTSYPTLCVESLSVYATTIQQDPHQLVQTALSLSLNKTQSTKSFVTKCKSFRGLKPREYAALHDCVEEITDSVDRLRRSLKGLKLCKIQGEDFSWHISNVETWVSSALTDESTCSDGFGGKALDGRMKASIRSRMVNVAQVTSNALSLINQYATKH

SEQ ID NO: 1402 - protein, 202 aa, Nostoc sp. PCC 7120
MIFWFCNQPPRMELFQCSWVPYSYSIVSTTSYWPSPDFSQAAFIAANAVVMGSVKIAAGASIWYGAVVRADVESIEIGECTNIQDGAILHGDPGLPTVLEDHVTVGHRAVIHSAHIERGSLIGIGAVILDGVRVGAGSIIGAGSIVTKNIPPLSLVVGVPGKVLRPITPEEAADLIQHAERYKKLALVHAGKGSDIGFYPQE

SEQ ID NO: 1403 - protein, 1001 aa, Oryza sativa (japonica cultivar-group)
MATVAAAASPFAAPHEMMARPAAAAPEATMMDLGQLLRLTDFDKIANLGDGASGVVAKVLLRGCGSSAVFALKTAHYCGGGAEVEVEALRRVAAGAGPSGSWSPHVVRCHAVFRCAGGEPAMLLELMDAGSLGRVLAARRGGEGRRGLPEPALAEVAARCLAGLAHLHSRGVVHLDLKPDNLLASARGDVKIGDFSVSRIFLGGAGERLRVPVAAGSTAYLSPERFEPNAHAGPRGACAADVWALGVTVLELFLGRCPILPVGERPSWERLKKAICDGEAPSLPASAAASAELRGFVASCLHKDPRRRATVAQLLAHPFVARRDGEACRRQLREIIVETIARSRTYGTRRSLAAAGIYSAPAFLAYLAAEASPVHPLAARNKARAAATLVQAWRARRQPHHGRAYHGSPPRAPAHRPHPSLSSASLTPASAAAVAVASTSAAGGGGGGGEAEYEVSDDHRAARERHERVVQELLQRRRTFAMAVPTNDFAVRARLRRLGEPVTLFGEREMESQDRLRALMVCLEADGHLDRLVRAQEKEQGGASAEEEELAATDCRWRTARLRPARTEICARQWQRTPEDSGRRIWVEVDRGKRSHGGMRANSGRPVVAPTAAANCRRRSRPRAAPIVAPPSPPPPPLCRPWRDGHEEDGEGRKKTEMERMDRKGKIAVVWIKLTHSKNKTSAQCDTAAAVVASNSRSPERARCGAERPDRGAGDGAGSGRSDSGRQLRPSYWPAGGPGERWAEQATARGAAGWPAGQSSEAGGDLAIVRVRPSSPVTLMELSSHRPNSKTLVEAGVVPDMVEELYIRKVDDEPLRNKAMAVAVLANSDTTVVNKEGHVLTSKYSIYDFVHMLKCFIPDELNASTSASSVSPRTPIRSPPWSRSSRRTTGATPSWSSRTEALGVAATRLLITLSVHMGHTIAERLRKMQSAGASEGGRRGAEGRSATGGSRSWAAACRRCHAPPCEPPWRGEERGREMVRGGEEVADMWDPRGSHAESTAI

SEQ ID NO: 1404 - protein, 612 aa, Triticum aestivum
  unsure (1)..(612): unsure at all Xaa locations
MAEAGDPTLEQGLLANPEESNQLTYTGDGSVDFSGNPVVKEKTGRWKACPFILGNECCERLAYYGISTNLVTYLTKKLHDGNSSAARNVTTWQGTCYLTPLIGAILADAYWGRYWTIATFSTIYFIGMSVLTLSASVPMLMPPSCEGAICPEASPLQYTVFFLGLYLIALGTGGIKPCVSSFGADQFDDTDPAERIQKGSFFNWFYFSINIGALISSSFLVWVQDNLGWGLGFGIPTVFMGLAIISFFAGTSLYRFQKPGGSPITRVCQVVAATLRKWNAPVPEDSSLLYELADGVSAIEGSRQLEHTDELRCLDKAATITDLDVKEDSFNNPWRXCTVTQVEELKILVRMFPVWATTIVFSAVYAQMSTMFVEQGMVLDPTIGSFKXIPPASLSTFDVVSVIIWVPIYDSILVPIARRFTGKERGFSELQRMGIGLVISILAMSAAAVLEIKRLAIAREAHLVDQNVPVPLSILWQIPQYFLVGASEVFTFIGALEFFYDQSPDAMRSLCSALQLITTAXLGNYLSALILTMVACFTTRGGRPGWIPDTLNEGRLDYFFWLLAGLSYFNFLVHVVCANRFKSKKAACSFFNGRTSWTASEQQSCTRTLENL

SEQ ID NO: 1405 - protein, 142 aa, Glycine max
MSGVGPLSQDWEPVVLRKKAPTAAAKKDEKAVNAARRSGAEIETLKKYNAGTNKAASSSTSLNTKRLDDDTESLAHEKVPTELKKAIMQARMDKKLTQSQLAQLINEKPQVIQEYESGKAIPNQQIIGKLERALGAKLRGKK

SEQ ID NO: 1406 - protein, 521 aa, Pueraria montana var. lobata
MLLELALGLLVLALFLHLRPTPTAKSKALRHLPNPPSPKPRLPFIGHLHLLKDQLLHHALIDLSKKYGPLYSLYFGSMPTVVASTPELFKLFLQTHEATSFNTRFQTSAIRRLTYDNSVAMVPFGPYWKFIRKLIMNDLLNATTVNKLRPLRTEQIRKFLRVMAQSAEAQQPLNVTEELLKWTNSTISMMMLGEAEEIRDIAREVLKIFGEYSVTNFIWPLMYLKVGKYEKRIDDIFNKFDPVIERVIKKRREIVRRRKNGEVVEGEASGVFLDTLLEFAEDETMEIKITKEQIKGLVVDFFSAGTDSTAVATEWALAELINNPRVLQKARDEVYSVVGKDRLVDEVDTQNLPYIRAIVKETFRMHPPLPVVKRKCVEECEVNGFVIPEGALILFNVWAVGRDPKYWDRPLEFRPERFLESGAEGEVGPIDLRGQHFQLLPFGSGRRMCPGVNLATSGMATLLASLIQCFDLQVVGPKGEILKGNDAKVSMEESAGLTVPRAHNLRCVPLARTSVAAKLLS

SEQ ID NO: 1407 - protein, 348 aa, Azospirillum brasilense
MTDQTAASPRVLVTGGAGYIGSHVLHALTDAGIPAVTIDDLSAGRREAIPAAVPLVEGDIGSAELLDRVMRDHRVDAVMHFAGSIVVPESVVKPLDYYRNNTANSLTLLGACLRAGIDKVVFSSTAAVYGAPESVPIREDAPTVPINPYGASKLMTEQMLRDAGAAHGLRSVILRYFNVAGADPAGRTGQATPVATHLIKVACQALLGRRPPLAIFGTDYDTPDGTCIRDYIHVSDLADAHVLALLHLRRGGGSLLMNCGYGRGASVREVVRTLEEVSGEQVPATFADRRPGDPPQLVAGADRIREQLGWVPKHDRLDGIVRSALSWERSLEQSVGQAGAPGGSASRS

SEQ ID NO: 1408 - protein, 431 aa, Brassica rapa
DNSYTLSFLLVFFVMILFRPALSMYFNTLSSTESLTISNNRTLVSPGDVFELGFFRTNSSSPWYLGIWYKQLSERTYVWVANRDSPLSNAMGILKISGNNLVILDHSNKSVWSTNLTRGNERSPVVAELLANGNFVMRDSNNNDASGFLWQSFDYPTDTLLPEMELGYDLKTRLNRFLTSWKNSDDPSSGEISYKLDTQRGLPEFYLLKDGLRAQRSGPWNGVKFSGIPKDQKLNYMVYNFIENSEEVAYTFRMTNNSIYSRIQVSPAGFLARLTTTPTAWEWNWFWYAPEDPQCDVYKTCGPYAYCDLNTSPLCNCIQGFKPKNRQQWDMSNPSGGCIRKTPLSCSGDGYIRMKNMKLPETTMAVVDRSIGVKECEKMCLSDCNCTAFANADIRNGGTGCVIWTGELEDIRNYFDDGQDLYVRLAAADLV

SEQ ID NO: 1409 - protein, 408 aa, Streptomyces avermitilis MA-4680
MTAPARTRSSADLIRAEAPVLAHNYHPLPVVVARAEGTWVEDVEGRRYLDMLAGYSALNFGHRHPVLIEAAHRQLDQLTLTSRAFHNDRLAQFAESLAELTGLDMVLPMNTGAEAVESAIKVARKWAYEVKGVAPDQATIVVAADNFHGRTTTIVSFSTDDTARTGFGPFTPGFRIVPYNDLAALEAAVDETTAAVLIEPIQGEAGVVIPDDGYLAGVRELTRRTGCLFIADEIQSGLGRTGRTLAVEHESVVPDMLLLGKALGGGIVPVSAVVARRDVLAVLRPGEHGSTFGGNPLAAAVGSAVVGLLETGEFQRGAAELGVVLRDGLAALVGKGVVGFRARGLWAGVDIDPAIGTGREISERLMREGILVKDTHGSTIRLAPPLTITGEELASALGTLEKVLTQEA

SEQ ID NO: 1410 - protein, 130 aa, Glycine max
  unsure (1)..(130): unsure at all Xaa locations
MALEWVVLGYXSAAEAIMVILLTIPGLEALRKGLIAVTRNLLKPFLSVVPFCLFLFMDIYWKYETRPSCEGDSCTPSEHLRHQKSIMKSQRNALLIAAALLFYWLLYSVTNLVVRIDHLNQRLERLKNRD

SEQ ID NO: 1411 - protein, 327 aa, Caulobacter crescentus CB15
MQTVLVTGGAGYVGSHCCLALAEAGFRPVVFDDLSNGHREHVQWGPLEVGDIRDAARLDAVFAAYAPVAVLHFAARIEVGESVKNPGAFFDTNVGGTITLIEAARRAGVKVVVFSSTCATFGDPVDLPMKETHPQAPLNPYGRSKLMVEQALADYDRYVGLKSAVMRYFNAAGADPQGRIGEWHEPETHAVPLAIQVALGQRPRFTIFGDDYDTRDGTAVRDYVHVLDLADAHVAALKRLLVGGSSETYNLGTGTGTTVRELVDGVGKVAGAPLPVEIASRRPGDAPVLVGDHAKARAELGWKASRSLDEILSTAWRWHRGRLEQEP

SEQ ID NO: 1412 - protein, 379 aa, Arabis procurrens
MITTGQIIRCKAAVAWEAGKPLVMEEVEVAPPQKHEVRIKILFTSLCHTDVYFWEAKGQTPLFPRIFGHEAGGIVESIGEGVTDLAPGDHVLPIFTGECGDWPHCHSEESNMCDLLRINTERGGMIHDGESRFSINGKPIHHFVGTSTFSEYTVIHSGQVAKINPDAPLDKVCIVSCGLSTGLEAPLNVANPKKGQSVAIFGLGAVGLAAVEGARIAGASRIIGVDLNSKRFDEAKKFGVTEFVNPKDHDKLVQQVIAEMTNGGVDRSVECTGSVQAMIQAFECVHDGWGVAVLVGVPSKDDAFKTHPMNFLNERTLKGTFFGNYKPKTDIPGLVEKYMNKELEIEKFITHTVPFSEINKAFDYMMKGEGIRCIITMGA

SEQ ID NO: 1413 - protein, 174 aa, Helianthus annuus
GSQVGPSVGIEAGDHIWCARYLLERITEQAGVVLTLDPKPIEGDWNGAGCHTNYSTKAMREDGGFEVIKKAILNLSLRHTEHISAYGEGNERRLTGKHGTASINQFSWGVANRGCSIRVGRDTDAAGKGYLEDRRPASNMDPYTVTGLLAETPFLWEPSLEAEALAAQKLALNV

SEQ ID NO: 1414 - protein, 105 aa, Medicago sativa
MADVEDRCFVGGLAWATDNDALEKAFSQYGEIVDSKIINDRETGRSRGFGFVTFANEKSMNDVIEAMNGQDLDGRNITVNQAQSRGSGGGGGGRGGGGYGGGGGG

SEQ ID NO: 1415 - protein, 388 aa, Bradyrhizobium japonicum USDA 110
MDSLCRTSGMNTLSNTITVAVVGGEGIGPEVTDQSHRILKWFSDRRGAPVILREAQYGLIPYLATGKVLPDDTVEAMEEADAILWGATGGPETTEVPPAARKAGSLLSLRSKYDLYANLRPIVANPALADSAPLKAAVLKDVDFIIIRELTSGIYFGEPRGIETLPDGQRRGFNTQQYTTSQIRRVARTAFELARTRKGRVCSVDKANVLETSVLWREEVTALHEAEFSDVELTHLYVDNAAMQIVRAPSQFDVMVTCNIFGDILSDCAAMASGSLGMLPSVSLGPPDRLGRRKALYEPVHGSAPDIAGKGIANPLGSILSVAMMLRITLHRPEDAALLEKAVDTALAAGARTADIAEPGAKRLSTQEMGDAVLNALDKVVGKEREHA

SEQ ID NO: 1416 - protein, 328 aa, Campylobacter jejuni subsp. jejuni NCTC 11168
MKILISGGAGYIGSHTLRQFLKTDHEICVLDNLSKGSKIAIEDLQKTRAFKFFEQDLSDFQGVKALFEREKFDAIVHFAASIEVFESMQNPLKYYMNNTVNTTNLIETCLQTGVNKFIFSSTAATYGEPQTPVVSETSPLAPINPYGRSKLMSEEVLRDASMANPEFKHCILRYFNVAGACMDYTLGQRYPKATLLIKVAAECAAGKRDKLFIFGDDYDTKDGTCIRDFIHVDDISSAHLAALDYLKENESNVFNVGYGHGFSVKEVIEAMKKVSGVDFKVELAPRRAGDPSVLISDASKIRNLTSWQPKYDDLELICKSAFDWEKQC

SEQ ID NO: 1417 - protein, 358 aa, Haemophilus somnus 129PT
MKSYTIAVLSGDGIGPEIMAEAIKVLDAVQKKYNFKLNYRTFDVGGIAIDNHGTPLPASTLNGCEESDAILFGSVGGPKWEHLPPNQQPERGALLPLRKHFKLFCNLRPATLYQGLEKFCPLRADIATKGFDMMTVRELTGGIYFGQPKGRDGEGMQTRAFDTEVYYKYEIERIAKVAFETAMKRRKHVTSVDKANVLISSVLWRETVNEVAKNYPDVTLDHIYIDNATMQLIKQPEFFDVLLCSNIFGDIISDEAAMITGSMGMLPSASLNEHGFGLYEPAGGSAPDIAGKGIANPIAQILSAAMMLRYSFNLNEAADSIENAVKQVLSQGYRTADLADEHPPISTAEMGDLIVNAI

SEQ ID NO: 1418 - protein, 259 aa, Zea mays
MLNMMTDRRGGPSANREEQVAAAHIRQAPRRGAREGIRALRAIRSTSSRQVTFCKRRNGLLKKAYELSVLCEAEVALDGFSSRCRLYEYANNSVKSTIERYKKANSDSSNSGTVAEVNAQYYQQESSKLRQMIHSLQNANTRNIVGDSIHTMGLRDLKQMEGKLEKAIIKIRARKNELLYAEVDYMQKREMDLQTDNMYLRSKIAESNETGQPAMHMTMGAPPTSEYDHMAPFDSRNFLQVSMPQHYSHQLQPTTLQLG

SEQ ID NO: 1419 - protein, 255 aa, Ralstonia solanacearum
MPHAPSTSSNPRLAGRAAIVTGGSRGIGAAIARRLAADGAHVAVVYRSHHDEADAVVRAIRDTGAKAIAVQADVSDAASVRAMVDTVQRAFGEIDILVNNAGILASQPVGSIDQAAFDRQFRINAFSAILVSQAVLPQMPARGGRIVNVSSSLVFRPRAGLAVYAASKAAVSALTQAFALELGPRNITVNAVAPAMTRTDMTAPLPDALKARLRDATPLGRLAEPEDIADAVAFLACDDSRWITGRTLLTDGGFV

SEQ ID NO: 1420 - protein, 861 aa, Agaricus bisporus
MPPSDFANADIDKIVDALTTDEAILLSAGVGFWHTHAIERLQIPAVKVSDGPNGIRGNHFFMGTPAKCLPSSTAMGATFDRDLLEEVGLKLLAREAKLRSASVILAPTCNIQRNPLGGRSFESFSEDPFLSGMLCSAYINGIQKGGIGATIKHFVGNDKEDDRTGYDSIHYRTTSSGDLSPSVHAGSRNMPLHGAIMTAYNRVNGIHVCENPELLQKILRDEWKSDVMIMSDWFGTYSVDVGLNAGLDLEMPGLNKWRSLESVNRSIQSRKVTAKKVKERARKVLELVKKCAQGAPEILDGDGLERTLDSDEDNALMRKFAAESIVLLKNDKKVLPLDRKSLKKVAIVGGNAKAAVLSGGGSAALKPSYFVARPAGLVKALKEVNPNIEVTYSEGARAAKTLPTLDFDLFTESGQRGWTGSWHAHENDDSLVALPTPIKTQYVDETRMFISSSSPAGITKKWTLRMKGYLKPRERDCKFEFGLTAAGRAKLFVDGKLVIDNWTRQRRGVEFFGCGSEEETGVVELKAGVKHEIYVDFCNVRGPADGDETETIMDSNPGIRLGGAEVEDPDELLNSAVSIAKDADAVIIVVGLNGDWETEGNDRTTLALPGRTDELVQKVVAANPRAVVVTQAGSAITMPWVDQVSSLLHTWYLGNATGDAIADVIFGNHNPSGKLSLTFPKRLEDVPAHGYFHSEKGKVTYAEGLYVGYKHYQHRNIEPLFAFGHGLSYTSFNISDLRLSQPIVSGDQFDLKATVKLTNTGNITGSQVVQLYIGLPKTSELTHPRWQLRGFKKMRDVKPGESREVELVMDRLSVSYWDKEWVVENGAYDVRVAFTSEEGVGEGQELLGRFNVEKGFGWRGL

SEQ ID NO: 1421 - protein, 400 aa, Mortierella alpina
MAPPNTIDAGLTQRHISTSAAPTSAKPAFERNYQLPEFTIKEIRECIPAHCFERSGLRGLCHVAIDLTWASLLFLAATQIDKFENPLIRYLAWPAYWIMQGIVCTGIWVLAHECGHQSFSTSKTLNNTVGWILHSMLLVPYHSWRISHSKHHKATGHMTKDQVFVPKTRSQVGLPPKENVAVAVQEEDMSVHLDEEAPIVTLFWMVIQFLFGWPAYLIMNASGQDYGRWTSHFHTYSPIFEPRNFFDIIISDLGVLAALGTLIYASMQLSLLTVTKYYIVPYLFVNFWLVLITFLQHTDPKLPHYREGAWNFQRGALCTVDRSFGKFLDHMFHGIVHTHVAHHLFSQMPFYHAEEATHHLKKLLGEYYVYDPSPIVVAVWRSFRECRFVEDHGDVVFFKK

SEQ ID NO: 1422 - protein, 353 aa, Arabidopsis thaliana
MANICIATTATNNQVILRDYVSGFPKQSDLYIATTTIDLRVPPGSMAVLVKNLYLSCDPHSRTRMGKPDPSSQASMAHAFTIGKPISGFGVAKAIDSGHPNYKTGDLLWGRVGWEEYSVITPTPSSHFKIHHTDVPLSFYTGLLGIPGLTAYVGFYEICSPKKGETVFVSAASGAVGQLVGQFAKMAGCYVVGSASSKEKVDLLKTKFGYDDAFNYKEEKDLSAALKRCFPEGIDIYFENVGGKMLDAVLQNMRTHGRIAACGMISQYNLKEPEGLHNTATIVHKRIRVQDFAAVEFFDRYSKFLDFILPHVREGKITYVEDIAQGLENGPSALIGLFHGKNVGKQLVEVARE

SEQ ID NO: 1423 - protein, 261 aa, Zea mays
  unsure (1)..(261): unsure at all Xaa locations
PKPTPTGGEPPTSQPSKMQYNNLGRSGLRVSQLSYGAWVTFGNQLDVKEAKSLLQACRDAGVNFFDNAEVYANGRAEEIMGQAIRDLGWRRADVVISTKLFWGGQGPNDKGLSRKHVVEGLKASLKRLDMEYVDVVYCHRPDATTPIEETVRAMNWVIDQGWAFYWGTSEWTAQQITEAWGVANRLDLVGPIVEQPEYNLFSRHKVESEFVPLYNTYGIGLTTWSPLASGVLTGKYSKGNIPXESRFALDNYXNLANRVSG

SEQ ID NO: 1424 - protein, 211 aa, Zea mays
MVSLKLQKRLASSVLKCGKGKVWLDPNEVNEISMANSRQNIRKLVKDGFIIRKPQKIHSRSRARRAHEAKQKGRHSGYGKRRGTREARLPTKILWMRRMRVLRRLLRKYREAKKIDKHMYHDMYLKVKGNMFKNKRVLMESIHKSKAEKAREKTLSDQFEAKRAKSKASRERKHARREERLAQGPRDHAPAPAAAAPAPAAAAPKKAKAKK

SEQ ID NO: 1425 - protein, 297 aa, Zea mays
MESKQWGKTPQEVVGAGGGRQVDLDEEDDLEEFRLPMGHRPTENLDTEGLQQASVYTQLTASNVGFRLLQKMGWKTGKGLGKNEQGILEPIRADMRDAKLGVGKQEEDDFFTSEENVQRKKLNIELEETEEHIKKREVIAEREHKIRSEVKEIQKVFFCNLCNKQYKLAHEFESHLSSYDHNHRKRFKEMREMQSSSGSRDDRQKREQQREEKELAKIAQLADAHRKQQKDKQEKSETEDAAPKNMAASSNQDQRQTLKFGFSKMAPSKVLVGSASKKPKVATKVSSVFGNESDEDS

SEQ ID NO: 1426 - protein, 251 aa, Schizosaccharomyces pombe
FHPDGKRVIAAGRRKYMYIWDLESAQVQKVSRMYGQENFQPSMERFHVDPTGKYIALEGRSGHINLLHALTGQFATSFKIEGVLSDVLFTSDGSEMLVLSYGAEVWHFNVEQRSVVRRWQVQDGVSTTHFCLDPSNKYLAIGSKSGIVNIYDLQTSNADAAPKPVTTLDNITFSINSMSFSQDSQVLAIASRGKKDTLRLVHVPSFSVFRNWPTSATPLGRVTCLAFGKGGELCVGNEAGRVGLWKLAHYD

SEQ ID NO: 1427 - protein, 211 aa, Oryza sativa
  unsure (1)..(211): unsure at all Xaa locations
MAAPDVEYRCFVGGLAWATDDRSLEAAFSTYGEILDSKIINDRETGRSRGFGFVTFSSEQSMRDAIEGMNGKELDGRNITVNEAQSRRSGGGGGGYGGGGGGYRGGRGGGGYRGGGGGGYRRREXAATVAAAATGGAAAAAATVAALAAAPAATPAGTGGTDWWGPSWPVIXLAIRVRIILSSSRVVIVSSGSLESRSPLSIHPVLGVLRP

SEQ ID NO: 1428 - protein, 210 aa, Magnetospirillum magnetotacticum
FGDVNPFETQRAVLRRAFDLGITHFDLANNYGPPYGSAEENFGRHLAQDLGAYRDELVISSKAGYDMWPGPYGDGGSRKYLLSSLDQSLRRMGLDYVDVFYHHRPDPSTPLEESMRALHDAVQQGKALYVGVSNYSPARTREAAAILADLGTPLLIHQPSYSMLNRHVEDPAHEDAYDGVQTESLLDVVGDLGVGTIVFSPLQQGLLTDR

SEQ ID NO: 1429 - protein, 385 aa, Bacillus anthracis str. Ames
MVKYISILGSTGSIGTSALDVVSAHPEHFKIVGLTANYNIELLEQQIKTFQPRIVSVATKELADTLRTRISTNTKITYGTDGLIAVATHPNSNLVLSSVVGVSGLLPTIEALKAKKDIAIANKETLVAAGHIVTELAKQNGCRLIPVDSEHSAIFQCLNGENNKEIDKLIVTASGGAFRDKTREEMKTLQAKDALKHPNWLMGAKLTIDSATLMNKGFEVMEARWLFDIPYEKINVMIHKESIIHSLVEFIDGSVIAQLGAPDMRMPIQYAFHYPTRLPSSYEKLNLLEIGSLHFEKPDLEKFPCLQYAYECGKIGGITPAVLNAANEIANALFLKNEIAFFDIEKTIYKTVEAHHNVKDPSLDAILEADQWARQYANQLLIKKS

SEQ ID NO: 1430 - protein, 228 aa, Triticum aestivum
  unsure (1)..(228): unsure at all Xaa locations
MPSRPAPLVHRLRLLRSAVVCSSSALLPCSRPRLAIPFAQPPLRGPAFAAASSPLLRSVGARFSLFSSMAAAASSASSIHDFTVKDASGKDVDLSTYKGKVLLIVNVASQCGLTNSNYTELAQLYEKYKDQGFEILAFPCNQFGGQEPGTNEEIVQFACTRFKGEYPIFDKVDVNGDNVAPVHKLLXNIKWDFSKYLXDKEGHVVXRYAPTTSPLSTKKDIKNLLATY

SEQ ID NO: 1431 - protein, 600 aa, Arabidopsis thaliana
MNSLVRRKQVDSVHLIKNDGPHQLAKKLSAVDLVAIGVGTTIGAGVYILVGTVAREHTGPALAVSFFIAGVAAALSACCYAELASRCPSAGSAYHYAYICLGEGIAWLVGWALVLDYTIGGSAIARGITPNLASFFGGLDNLPVFLARQTIPGVGIVVDPCAALLIMIVTILLCFGIKESSTVQAIVTSVNVCTLVFIIVVGGYLACKTGWVGYDLPSGYFPFGLNGILAGSAVVFFSYIGFDTVTSTAEEVKNPQRDLPLGIGIALLICCILYMLLSVVIVGLVPYYSLNPDTPISSAFGDSGMQWAAYILTTGAITALCASLLGSLLAQPRIFMAMARDGLLPAFFSEISPRTQVPVKSTIAIGVLAAALAFFMDVAQLSEMVSVGTLMAFTAVAVCVLVLRYVPPDGVPLSSSSQTLSDTDESRAETENFLVDAIESSDSPLLGNETARDEKYFGKRRKIAAWSIALVCIGVLGLASAASAERLPSFPRFTICGVSAVILLGSLITLGYIDEDEERHNFGHKGGFLCPFVPYLPVLCILINTYLIINIGAGTWIRVLIWLLIGSMIYIFYGRSHSLLNNAVYVPTMTCTRKTTDHLA

SEQ ID NO: 1432 - protein, 346 aa, Escherichia coli O157:H7 EDL933
  unsure (1)..(346): unsure at all Xaa locations
MVWLANPERYGQMQYRYCGKSGLRLPALSLGLWHNFGHVNALESQRAILRKAFDLGITHFDLANNYGPPPGSAEENFGRLLREDFAAYRDELIISTXAGYDMWPGPYGSGGSRKYLLASLDQSLKRMGLEYVDIFYSHRVDENTPMEETASALAHAVQSGKALYVGISSYSPERTQKMVELLHEWKIPLLIHQPSYNLLNRWVDKSGLLDTLQNNGVGCIAFTPLAQGLLTGKYLNGIPEDSRMHREGNKVRGLTPKMLTEANLNSLRLLNEMAQQRGQSMAQMALSWLLKDERVTSVLVGASRAEQLEENVQALNNLTFSTEELAQIDQHIADGELNLWQASSDK

SEQ ID NO: 1433 - protein, 307 aa, Enterococcus faecalis V583
MAHDGLLKATEELQQGGAAGTAVEQLIKEVEDYPFYKSVGYGGLPNEEGILEMDAAYMDGDTFAIGAVAGITDVKNPISVAKALSKEKFNSFRVGAGATKYSMLHGFERKNMLTERANQWWQKRLKEIQENQLNPYDGHDTVGAITLDQTGSMAAGTSSSGLFMKKAGRVGDSPLSGSGFYVDSEIGGAAATGLGEDLMKGCLSYEIVRLMGEGRSPQQACDQAVYAFHEKLTQRYGKAGAFSLVAMNKQGDWGVATNVEFTFTVGTDMQQPEIYIANPGKNHTTEIQPISQEWLAAYEKRIKALIE

SEQ ID NO: 1434 - protein, 517 aa, Hemerocallis hybrid cultivar
MDRERLTAEMAFRDSSIVIKIRRKLPDFLQSVKLKYVKLGYRSTTKPPFYLLLPLLLIAASLIFRIHTTLTFPANFSIDFVTAFSSSSIALLLLGVYYTRRPRPVYLVDFACYKPEDEHKISNEGFLEMTESTTAFNDKSLDFQTKITVRSGLGDETYLPPGIQARPPKLSMAEARLEAETVMFGCLDALFESTGINPSRDIGILIVNCSLFNPTPSLSAMIVNHYKMREDVKSFNLGGMGCSAGLISIDLAKDMLQANPNSYALVLSTENITLNWYFGNDRSMLLSNCIFRMGGAAVLLSNKRKDAKRAKYRLLHTVRTHKGADDSCYNCVYQREDEGGKVGVSLAKELMAVAGDALKTNITTLGPLVLPLTEQGKFLATLITRKLLKLKGVRPYIPNFKRAFEHFCVHAGGRAVLDEVEKNLGLEKTDMEASRSVLHRFGNTSSSSLWYELAYNEAKGRVGKGDRVWQIGFGSGFKCNSAVWKAMKDVPAIDRTASGSSRMCNPWGDCIDRYPVK

SEQ ID NO: 1435 - protein, 627 aa, Medicago truncatula
MEETKFCALAFICAFFLLLLHPLWLVSANMEGDALHNLRTNLQDPNNVLQSWDPTLVNPCTWFHVTCNNDNSVIRVDLGNAALSGTLVPQLGQLKNLQYLELYSNNITGPIPSDLGNLTNLVSLDLYLNRFNGPIPDSLGKLSKLRFLRLNNNSLMGPIPMSLTNISALQVLDLSNNQLSGVVPDNGSFSLFTPISFANNLNLCGPVTGHPCPGSPPFSPPPPFVPPPPISAPGSGGATGAIAGGVAAGAALLFAAPAIAFAWWRRRKPQEFFFDVPAEEDPEVHLGQLKRFSLRELQVATDTFSNKNILGRGGFGKVYKGRLADGSLVAVKRLKEERTPGGELQFQTEVEMISMAVHRNLLRLRGFCMTPTERLLVYPYMANGSVASCLRERPPHQEPLDWPTRKRIALGSARGLSYLHDHCDPKIIHRDVKAANILLDEEFEAVVGDFGLAKLMDYKDTHVTTAVRGTIGHIAPEYLSTGKSSEKTDVFGYGIMLLELITGQRAFDLARLANDDDVMLLDWVKGLLKEKKLEMLVDPDLKTNYIEAEVEQLIQVALLCTQGSPMDRPKMSDVVRMLEGDGLAERWDEWQKGEVLRQEVELAPHPNSDWIVDSTENLHAVELSGPR

SEQ ID NO: 1436 - protein, 318 aa, Zea mays
  unsure (1)..(318): unsure at all Xaa locations
MRCPSLGPSSSAGRYLKPHQRPQGGIFAGPAAPEDEVCGEAALPYQKADRGPRKEAGIRLCSATMSSLYDVSCFAAGLAGNVFALALFLSPVPTFKRVLKAKSTEQFDGLPYLLSLLNCCICLWYGLPWVSDGGRALVATVNCTGALFQLAYISLFIFYADSRTTRLKVAGLLVLVVFAFALIAHASIAFFDQPLRQLFVGSVSMASLVSMFASPLAVMGVVVRTECVEFMPFYLSLSTFLMSASFAVYGLLLRDFFIXSRMGSESSWEQCSWCCTRTTAGDGKAATRQHRCLPDHVAEFVSPIARAVLSVVLCSAIL

SEQ ID NO: 1437 - protein, 463 aa, Pseudomonas putida KT2440
MDKQKQDLISQQDRGAVLHPFTQLKDFASGKAGDPTIIETAKGITITDATGREYIDGFAGLYCMNVGYGRTEVAEAISKQAHKLAYYHTYAAHTTEELARLSDRLVKMAPGKMSKVFYGMSGSDANETQAKLVWYYNNLRGKPNKKKIIARERGYHGCSVVSGSMTGMSFYHDHMDLPIAGILRTGAPHYYWGAEPGETELEFSARRARELEELILREGPDTIGAFIAEPVLGTGGITPPPEGYWAAVQPVLKKYDILLIADEVITGFGRTGAMFGCDKYGIEPDLITVAKGLTSAYAPLSASIVGEKVYKVMEEGADRVGAFSHGYTYSGHPIGVAAANAVLDIVEGENIPAHVDKVGQYFQKSMQETFSSLPIVGEVRGVGMMAAIEFVADPATKKRFDPALKVGARISKAARDRNLIARAMPHGEILGFAPPLVTTEQEVDRIISIAHEAVLSVLDELKV

SEQ ID NO: 1438 - protein, 138 aa, Symbiodinium microadriaticum
EFKEAFSLFDKDGDGTITTKELGTVMRSLGQNPTEAELQDMINEVDADGNGTIDFPEFLSLMARKMKDTDTEEELIEAFKVFDRDGNGFISAAELRHVMTNLGEKLTDEEVDEMIREADVDGDGQINYEEFVKMMMAK

SEQ ID NO: 1439 - protein, 299 aa, Zea mays
MMRETYMDVLPPVDHIAARSNWFPAAARLWTAAENKQFERALAGLDLCRPDWEEVARAIPGRTVREVVSHFKHLEVDVQQIESGQVPLPAYGGGASSFTLQWDGYGPGPGDFRHGYRFAGGCGRRHHGRTPEQERKKGVPWTEEEHRLFLLGLKKYGKGDWRNISRNFVQTRTPTQVASHAQKYFIRLNSGGKDKRRSSIHDITTVNLTDDQPPSPSQSSLITSQSNAPAPAPAPAPAAGICQVPLAADAKRHGAGTLPFSSPNRTSAAPAYRMEFHDQQGLQCGPLHDQLLASQSVLF

SEQ ID NO: 1440 - protein, 84 aa, Oxalis staffordiana
  unsure (1)..(84): unsure at all Xaa locations
ISGTNGEVMPGQWEYQVGPSVGIEAGDHIWASRYILERITEQAGVVLTLDPKPIDXXXXXXXXXXXXXTKSMRDEGGFEVIKKA

SEQ ID NO: 1441 - protein, 214 aa, Gossypium aridum
DIYYWECKGYTPLFPRILGHEASGIVESVGEGVNDLKPGDHVLPIFTGECKECRHCLSEESNNMCELLRINCDRGVMLADGKTRFSINGKPIYHFVGTSTFSQYTVVHVGQVAKISPTAPLDKVCPISCGICTGFGATVNVAKPKKGQTVAVFGLGAVGLAAAEGARVCGASRIIAVDVNPRRFEEAKRFGITEFVNPKDYDKPVQEVIVEMTG

SEQ ID NO: 1442 - protein, 206 aa, Zea mays
MAAAAVALSNGSGGDSKAEFAEIYSRLKEEMLEDPAFEFTDESLQWIDRMLDYNVLGGKCNRGLSVIDSYKTLKGVDVLRKEETFLACTLGWCIEWLQAYFLVLDDIMDNSQTRRGQPCWFRVPQVGLIAVNDGIILRNHISRILQRHFRGKPYYVDLIDLFNEVEFKTASGQLLDLITTHEGEKDLTKYNLNVHRRIVQYKTAYY

SEQ ID NO: 1443 - protein, 465 aa, Burkholderia fungorum
MPIQSLIEADRKHLIHPVINYRVHEARGVTVLESASGAFLRDAAGNELLDAFSGLWCVNVGYGQQSIVEAATAQMQKLPYATGYFHFGSEPAIELAQKLVEVSPASLQHVYFTLGGSDAVDSALRFITHYFNATGRPSKKHVIALQRGYHGSSSTGAGITALPAFHRNFDLPLPNQHHLPSPYAYRSHFPDDAALIAASVAALEAKVAELGANNVAAFFCEPIQGSGGVIVPPAGWLKAMRESCRKLGILFVADEVITGFGRTGPLFACQGENVEPDLMTVAKGLTAGYAPMGAVLMSDEIYQGIADGDAEAVVGHGHTYSAHPVSAAIGLEVLRLYHEGGLLANGVARAPRFARGLDALLAHPLVGDSRHRGLLGALELVADKDSKAGFDPALKLSDRIAAAAYENRLIFRAFGDNILGFAPALSYTEGEFDLMFERLEKTLDDVLAQADVRAALKLRTHAAAC

SEQ ID NO: 1444 - protein, 346 aa, Pseudomonas aeruginosa
MRAAVYESFQGKITVQTMPDPEPSEFGAVIEVKASGICRSDWHGWVGHDTDIVLPHVPGHEFAGVVAAVGRGVTKWKVGDRVTMPFMGVCGSCGECSSGNEQMCDHQFQPGFKHWGSFAQYVAIDMADRNLVALPEAVAFSTAAGLGCRFATSFRAMAFQARIEPGQWVAVHGCGGVGLSAIMIAEALGANTIAIDIADDKLELARALGAARTINARQVDNVASAIADLTGGGAHVSVDALGSVVTCRNSIESLRKRGKHLQVGLLAGDQALPAIPMGRVVLKELQLLGSYGLQPHKYGDMLAMIEAGKLKPEKLIGRTVTLEEATTILPKMDSFQERGVAIIDRF

SEQ ID NO: 1445 - protein, 462 aa, Escherichia coli K12
MTANSPLQRIGQEKGIAMGSQELQRKLGFWAVLAIAVGTTVGSGIFVSVGEVAKAAGTPWLTVLAFVIGGLIVIPQMCVYAELSTAYPENGADYVYLKNAGSRPLAFLSGWASFWANDAPSLSIMALAIVSNLGFLTPIDPLLGKFIAAGLIIAFMLLHLRSVEGGAAFQTLITIAKIIPFTIVIGLGIFWFKAENFAAPTTTAIGATGSFMALLAGISATSWSYTGMASICYMTGEIKNPGKTMPRALIGSCLLVLVLYTLLALVISGLMPFDKLANSETPISDALTWIPALGSTAGIFVAITAMIVILGSLSSCVMYQPRLEYAMAKDNLFFKCFGHVHPKYNTPDVSIILQGALGIFFIFVSDLTSLLGYFTLVMCFKNTLTFGSIIWCRKRDDYKPLWRTPAFGLMTTLAIASSLILVASTFVWAPIPGLICAVIVIATGLPAYAFWAKRSRQLNALS

SEQ ID NO: 1446 - protein, 364 aa, Celastrus scandens
VQSQKLAVRAISRLQSLPGGDIKLLCDTVVESVRDLTSYDRVMVYKFHEDEHGEVVAESKRPDLEPYFGLHYPSTDIPQASRFLFKQNRVRMIADCRASPVGVIQDDGLMQPLCLVGSTLRAPHGCHAQYMENMGSKSSLAMAVIINGTDEEVIGGRNATRLWGLVVCHHTSARCIPFPLRYACEFLMQAFGLQLNMELQLAAQLSEKHVLKTQTLLCDMLLRDSPTGIVTQSPSIMDLVKCDGAALYYQGKYYPIGVTPVEAQIKDIVEWLLTFHGDSTGLSTDSLADAGYPGAALLGDAVCGMAVAYITKKDFLFWFRSHTTKEIKWGGAKHHPEDKDDGQRMHPRSSFKAFLEVVKSRSLP

SEQ ID NO: 1447 - protein, 616 aa, Oryza sativa (japonica cultivar-group)
MAAVDTPEKPYEGKPAAEARSYWRWQKEDFFPEPSFASWGAYRAALAATPARFRDRFAGRSTDADELGALRRRSENEMRRCLTWWDLTWFGFGSVIGAGIFVLTGQEAHDHAGPAIVLSYVASGLSAMLSVFCYTEFAVEIPVAGGSFAYLRVELGDVAAFIAAANLILESIIGTAAVARSWTSYLASLINKPASALRIQTSLAEGYNELDPIAVVVIAVTATLAILSAKGTSRVNWVASAVHVLVIAFVIVAGFLHAKTSNLTPFMPHGVPGVFRAAAIVYFAYGGFDNIATMAEETKNPSRDIPLGLLGSMSVITAIYCVMALVLSMMQPYTAIDRSAAYSVAFSNVGMRWAQYVVALGALKGMTTVLLVGALGQARYTTHIARSHIIPPVFALVHPRTGTPVHATVLIAAAGACIGLFSSLDVLSSLLSVSTLFIFMMMATALLVRRYYVRGVTSRTHARRLVALLSVVIGSSAGIAAYWGAAPERWVGYTVLVPAWAAGTLGIQLLVPAARAPKVWGVPLVPWLPSLSIATNLFLMGSLGAQAFIRFGVCTAIMLLYYVLVGLHATYDVAHGACSGDDVDEEVYADAAHVDDAKAAAAVAANADVERAGAKI

SEQ ID NO: 1448 - protein, 415 aa, Geobacter metallireducens
MGWKTVPRDENLEEMRMKSADWIAKGDKYIMKTYGRYPLVPVRGEGCRVWDADGKEYLDFLAGVAVNNLGHCHPKVVAALQKQAAEMIHCSNYYNIPTQIELAELLCSNSFADKAFFCNSGAEANEAAIKLARKYAREKTGDVERYEIITAIASFHGRTMATISATGQEKVQKFFDPLLHGFTYVPFDDADALEAAVTPKTCAVMLEPIQGEGGVVIPSADYFRKVREICDRHGLLLIFDEVQVGIGRTGKLFAHEHFDVTPDIMTLAKALAGGAPIGSMLAKDEVAASFSPGTHGSTFGGNPLVTAAGVAAVRAVLEEGLLNRAEEMGEYLVGELERLKEKYAFITDVRGIGLMIGMELSAPAGEIVLKGLERGVLLNVAQDKVLRFVPPLIVTKQEVNEMIAVLDGILEEIKQ

SEQ ID NO: 1449 - protein, 149 aa, Salmonella typhimurium
MIYQPDENRYHTMEYRRCGRSGVKLPAISLGLWHNFGDTTRVENSRALLQRAFDLGITHFDLANNYGPPPGSAECNFGRILQEDFLPWRDELIISTKAGYTMWDGPYGDWGSRKYLIASLDQSLKRMGLEYVDIFYHHRPDPETPLKET

SEQ ID NO: 1450 - protein, 350 aa, Streptomyces nogalater
MASHTSATTDVNILVTGAVGFIGSAYVRMLLENRAPGAGAPAVRVTVLDKLTYAGNLTNLDAVRGDRLRFVRGDILDAELVDELMAHSDQVVHFAAESHVDRSIRAADDFVLTNVVGTQRLLDAALRHGVEPFVLVSTDEVYGSIASGSWPEEHPLSPNSPYAASKASADLMAFACHRTHGLDVRVTRCSNNYGPRQHPEKLIPRFVTNLLDGLPVPLYGDGRNVREWLHVEDHCRGVDLVRTAGRPGGVYHIGGGRELSNRELVGMLLELCGADWSSVRHVPDRKGHDLRYSLDWGRAREELGYRPAREFSSGLRSTVQWYRENRSWWEPLKRGVTAPGGTSTVVPGVR

SEQ ID NO: 1451 - protein, 1132 aa, Nicotiana tabacum
MASGSRTKHSHQSGQGQVQAQSSGTSNVNYKDSISKAIAQYTADARLHAVFEQSGESGKSFDYSQSIKTTTQSVVPEQQITAYLTKIQRGGHIQPFGCMIAVDEASFRVIAYSENACEMLSLTPQSVPSLERPEILTVGTDVRTLFTPSSSVLLERAFGAREITLLNPIWIHSKNSGKPFYAILHRVDVGIVIDLEPARTEDPALSIAGAVQSQKLAVRAISHLQSLPGGDVKLLCDTVVESVRELTGYDRVMVYKFHEDEHGEVVAESKIPDLEPYIGLHYPATDIPQASRFLFKQNRVRMIVDCHATPVRVVQDESLMQPLCLVGSTLRAPHGCHAQYMANMGSIASLTLAVIINGNDEEAVGGRSSMRLWGLVVGHHTSARCIPFPLRYACEFLMQAFGLQLNMELQLASQLSEKHVLRTQTLLCDMLLRDSPTGIVIQSPSIMDLVKCDGAALYCQGKYYPLGVTPTEAQIKDIVEWLLTYHGDSTGLSTDSLADAGYPGAALLGDAVCGMAVAYITSKDFLFWFRSHTAKEIKWGGAKHHPEDKDDGQRMHPRSSFKAFLEVVKSRSLPWENAEMDAIHSLLILRDSFKDAEASNSKAVVHAQLGEMELQGIDELSSVAREMVRLIETATAPIFAVDVEGRINGWNAKVAELTDLSVEEAMGKSLVHDLVHKESQETAEKLLFNALRGEEDKNVEIKLRTFGPEQLKKAVFVVVNACSSKDYTNNIVGVCFVGQDVTGQKVVMDKFIHIQGDYKAIVHSPNPLIPPIFASDENTCCSEWNTAMEKLTGWSRGEIIGKMLVGEIFGSCCRLKGPDAMTKFMIVLHNAIGVQDTDKFPFSFFDRNGKYVQALLTANKRVNMEGQIIGAFCFIQIASPELQQALRVQRQQEKKCYSQMKELAYLCQEIKSPLNGIRFTNSLLEATDLTENQKQYLETSAACERQMSKIIRDVDLENIEDGSLTLEKEEFFLGSVIDAVVSQVMLLLRERSVQLIRDIPEEIKTLTVHGDQVRIQQVLADFLLNMVRYAPSPDGWVEIQLQPNMKQISDEVTVVHIEFRIVCPGEGLPPELVQDMFHSSRWVTKEGLGLSMCRKILKLMNGDIQYIRESERCYFLIILDLPMTRRGSKSLG

SEQ ID NO: 1452 - protein, 69 aa, Triticum aestivum
FQHKDICRFAGTVPNATTTGDIDSMAMYAGQSVGLITEIVPAREVVKRLVAEAQRVIGEKLSGFPKSSE

SEQ ID NO: 1453 - protein, 385 aa, Corynebacterium sp. ST-10
MKAIQYTRIGAEPELTEIPKPEPGPGEVLLEVTAAGVCHSDDFIMSLPEEQYTYGLPLTLGHEGAGKVAAVGEGVEGLDIGTNVVVYGPWGCGNCWHCSQGLENYCSRAQELGINPPGLGAPGALAEFMIVDSPRHLVPIGDLDPVKTVPLTDAGLTPYHAIKRSLPKLRGGSYAVVIGTGGLGHVAIQLLRHLSAATVIALDVSADKLELATKVGAHEVVLSDKDAAENVRKITGSQGAALVLDFVGYQPTIDTAMAVAGVGSDVTIVGIGDGQAHAKVGFFQSPYEASVTVPYWGARNELIELIDLAHAGIFDIGGGDLQSRQRCRSVSTTGCRNAQRPCGCGPWSVVPTAVERQRKNTDARPNSIRPGISVRNSVCASCTPR

SEQ ID NO: 1454 - protein, 152 aa, Zea mays
MVKAVAVLGSSDGVKGTIFFTQEGDGPTTVTGSVSGLKPGLHGFHVHALGDTTNGCMSTGPHYNPASKERGAPGDENRHAGDLGNVTAGADGVANINVTDSQITLTGPNSIIGRAVVVHADADDLGKGVHELSKSTGNAGGRVACGIIGLQG

SEQ ID NO: 1455 - protein, 312 aa, Petunia x hybrida
MIKGVSGNQQLELPAGFRFHPTDEELVQHYLCQKCAGQPICVSIIAEIDLYKFDPWQLPEKALYGEKEWYFFSPRDRKYPNGSRPNRAAGTGYWKATGADKPVGKPRTLGIKKALVFYAGKAPRGIKTNWIMHEYRLANVDRSAGKSNNLRLDDWVLCRIYNKKGTLEKHYNVDNKEDVRFEEVEEDQKPNILTFSQRNEMLTQLAPAPMPPRPQSMPASDYFHFETSDSVTRMHTTNSSSNCSEHVLSSCDKEVQSAPTWEDLESALNYQLNYLDGFQDEPFGPQMQQQNCNIIDQFNPFHDMFMYMQKPY

SEQ ID NO: 1456 - protein, 305 aa, Miscanthus sinensis var. sinensis
IESVGEGVTGVAPGDHVLPVFTGECKECPHCKSAESNMCDLLRINTDRGVMIGDGKSRFSINGKPIYHFVGTSTFSEYTVMHVGRVAKINPQAPLDKVCVLSCGISTGLGASINAAKPPKGSTVAIFGLGAVGLAAAEGARIAGASRIIGVDLNPSRFEEARKFGCTEFVNPKDHKKPVQEVLAEMTNGGVDRSVECTGNINAMIQAFECVHDGWGVAVLVGVPHKDAEFKTHPMNFLNERTLKGTFFGNFKPRTDLPNVVELYMKKELEVEKFITHSIPFAEINKAFDLMAKGEGIRCIIRMEN

SEQ ID NO: 1457 - protein, 506 aa, Brassica rapa
MTSINVKLLYHYVITNLFNLCFFPLTAIVAGKAYRLTIDDLHHLYYSYLQHNLITIAPLFAFTVFGSVLYIATRPKPVYLVEYSCYLPPTHCRSSISKVMDIFYQVRKADPSRNGTCDDSSWLDFLRKIQERSGLGDETHGPEGLLQVPPRKTFAAAREETEQVIIGALENLFKNTNVSPKDIGILVVNSSMFNPTPSLSAMVVNTFKLRSNVRSFNLGGMGCSAGVIAIDLAKDLLHVHKNTYALVVSTENITYNIYAGDNRSMMVSNCLFRVGGAAILLSNKPGDRRRSKYELVHTVRTHTGADDKSFRCVQQGDDENGKTGVSLSKDITDVAGRTVKKNIATLGPLILPLSEKLLFFVTFMGKKLFKDKIKHYYVPDFKLAIDHFCIHAGGRAVIDVLEKNLALAPIDVEASRSTLHRFGNTSSSSIWYELAYIEAKGRMKKGNKVWQIALGSGFKCNSAVWVALNNVKASTNSPWEHCIDRYPVKIDSDSGKSETRVQNGRS

SEQ ID NO: 1458 - protein, 144 aa, Thinopyrum elongatum
MANSVSGVAVNEECVKVFQELRAERKHRFVVYKMDDDEDAQQVVVDKVGALDATFDDLAAAMPADDCRYAVYDLDFVSEDSAGDTPRSKIFFIHWSPEAADARSKMVYASSTEGLKKELDGVQIDVQATDASELTLDILKDYTT

SEQ ID NO: 1459 - protein, 249 aa, Zea mays
  unsure (1)..(249): unsure at all Xaa locations
MGIVEEAHNLRVVGEGKRGVIVLAHGFGTDQSVWKHLVPHLVADYRVVLFDTMGAGPTNPDYFDFSRYATLEGYALDLLAILQELGVRSCIYVGHSVSAVIGALASISRPDLFTKLVLLSASPRYLNDVDYYGGFEQEXLDELFEAMRSNYKAWCSGFAPLCVGGDMESVAVQEFSRTLFNIRPDIALSVAQTIFQSDVRXLLPHVTVPCHIVPSTTDLAGPVVVSEYLRRPLRGGSIVEVMPPEGHLP

SEQ ID NO: 1460 - protein, 132 aa, Glycine max
QEEEDHGDQITAPLLPNRPSTSRSSPEHHDDGHGESSENSPIEQVALTVPVGDDLDTPVLTFRMWVLGMASCAVLSFLNQFFWYRKEPLTITAISAQIAVVPLGRLMAAALPERAFLRGTRWEFTLNPGPST

SEQ ID NO: 1461 - protein, 176 aa, Zea mays
MAAEGEKKMITLKSSDGEEFEVEEAVAMESQTIRHMIEDDCADNGIPLPNVNSKILSKVIEYCNKHVHAAAAAAAASKAGSDDVGAASANSTAASGEDLKNWDADFVKVDQATLFDLILAANYLNIKGLLDLTCQTVADMIKGKTPEEIRKTFNIKNDFTPEEEEEIRRENQWAFE

SEQ ID NO: 1462 - protein, 158 aa, Zea mays
  unsure (1)..(158): unsure at all Xaa locations
KEGVKSFPLWKNWGCKLVCGQNPTFAKPKRAPLIKMQEPVSLPFALGDMNPFPKGFSLFEQVPITLWSELPVVVEDKIPXMGSLKFSRAPKIPDYEEINPRWPVPTKSPCCRLFLPPVVCLAPLSKRKRDFLCFFRPPRPSRFLWLPHEPLDFCFPGP

SEQ ID NO: 1463 - protein, 246 aa, Ralstonia solanacearum
MTKRIAYVTGGMGGIGTAICQRLARDDFIVVAGCGPNSPRKDKWLEQQRELGFDFIASEGNVADWDSSKAAFDKVKAEVGEVDVLINNAGITRDVVFRKMTRSDWDAVIGTNLTSLFNVTKQVIDGMVDRGWGRIVNISSVNGQKGQFGQTNYSTAKAGLHGFTMALAQEVATKGVTVNTVSPGYIATDMVKAIRQDVLDKIIGTIPVKRLGDPNEIASICAWLASEESGFSTGADFSLNGGLHMG

SEQ ID NO: 1464 - protein, 427 aa, Oryza sativa
  unsure (1)..(427): unsure at all Xaa locations
MVLDLNVESPGGSAATSSSSTPPPPPDGGGGGYFRFDLLGGSPDEDGCSSPVMTRQLFPSPSAPPLTMPMPAAAGEGPWPRRAADLGVAQSQRSPAGGKKSRRGPRSRSSQYRGVTFYRRTGRWESHIWDCGKQVYLGGFDTAHAAARAYDRAAIKFRGLDADINFNLNDYEDDLKQMRNWTKEEFVHILRRQSTGFARGSSKYRGVTLHKCGRWEARMGQLLGKKYIYLGLFDSEIEAARAYDRAAIRFNGREAVTNFDPSSYDGXXVLPETDNEAVVDGDIIDLNLRISQPNVHELKSDGTLTGFQLNCDSPEASSSVVTQPISPQWPVLPQGTSMSQHPHLYASPCPGFFVNLRLQEVPMEKRPELGPQSFPTSWSWQMQGSPLPLLPTAASSGFSTGTVADAARSPSSXXPIHFPATTXFYFP

SEQ ID NO: 1465 - protein, 165 aa, Juniperus oxycedrus
MDEVPSSDGSKSACSGEVVMEQSVHELEEVFKKFDANGDGKISGSELADILRSLGSDVGEAEVKAMMEEADADGDGYVSLQEFVDLNNKGASVKDLKNAFKVFDRDCNGSISAAELCHTLESVGEPCTIEESKNIIHNVDKNGDGLISVEEFQTMMTSEMTDKSK

SEQ ID NO: 1466 - protein, 585 aa, Schizosaccharomyces pombe
MNAYVRDSESVYSESYPPENFISNEPEKSKDKDNFNGEEVISYVGEVETVPAKEENVFRRFINGFKIEKNQQDSAGQGLKRRLKSRHIQMIGIGGAIGTGVWVGSSKSLYRGGAASVLIDYCIVGTMVFCTVYALGELAVAFPTRGSFVTHATRFIDESWGFALSWNYVFSFIVTIPLELTTGTMMIKYWTNLNSGIWVTVFIVFLFFINIFGVKGYGEMEFIMSTIKVVAMCGFIILGIIIDCGGVPTDHRGYMGTHIFRENAFRHKFKGFCAVFTSAAFSFSGTEYVGVAAAETENPAKAFPVAVRQTLFRIAIFYILSLFIVSLLISGADPRLTSYHGVDASPFVLAIKDANIKALPSILNAIILISVISSANAQLYAGSRAIHSLGCNGFAPKCFTLVDREGRPLVALLILFLFMFLGYLVETGQYDTVFDWMLSISGLGTLFCWGSICLAHIRYRAAMKHQNRSLKEVGFVSPFNVYASYYAFILVCLVLAAEFYVSIFPVGGKPDASAFFENYLSAPVILVFFICHKLYYKTKRITLSNMDLETDFAYKTPVEEEEEEEKSAGSLSIKQRMKKLSDMMC

SEQ ID NO: 1467 - protein, 143 aa, Zea mays
MAMAYKMATEGMDVKEECQRWFMEMKWKKVHRFVVYRIDERSRAVLVDRVGGPGEGYEELVAALPGDDCRYAVFDFDFVSVDNCQKSKIFFIAWSPAASRIRAKILYATSKQGLRRLLDGVHYEVQATDPSEMGFDVIRGRAQ

SEQ ID NO: 1468 - protein, 269 aa, Triticum aestivum
MGTLVGHVAPGAGFLLIGLWQLFNHIRLFVLRPGSYVAPLWFPARGVRHLELILIIAGTVASILMELVIGPARHQPFDDDGTIPSDHLHNFEHASISLALLAFAAVTIHMDRVRAPMRDAVSQLVAAAAFAQELLVFHLHSTDHMGVEGQFHWLLQTVIVVTLATTLLGIPYPRSFVVSLVRSASLVLQGVWLIVMGVMLWTPGLVSKGLLPHRPPPPPPGPRRPPGAPYRPRRPRRAPPPGRPGGRRGPDPRARLGAARPPPPPAPPP

SEQ ID NO: 1469 - protein, 420 aa, Oryza sativa
  unsure (1)..(420): unsure at all Xaa locations
VPFLPVHAKPNKKEAHHGPSGPPPRLPPFYTRLVSPHSPRPAPSPPPLPPPPPPAMAFSDAAAAQAATPLLKDELDIVIPTIRNLDFLERGRPFFQPYHLIIVQDGDPKKTIRVPEGFDYELYNRDDINRILGPRASCISFKDSACRCFGYMGSKMMFIYTIDDDCFGAKDPSGKDINALEQHIKNPLNPSTPFFFNTLYDPYRDGADFVRGYPFSLREGAPTAVSHGLWLNIPDYDAPTQLVKPLERNSRYVDAVMTIPKGTLFPMCGMNLAFDRDLIGPXAMYFGLMGDGQPIGRYDDVWAGWCTQGITDHLGLGVKTGLPYIWHSKASNPFVNLKKEYNGIFWQEELIPFFQSASLPKEADTVQKCYLEXGQASRAKLGKVDGYFNKLADSMVTWIEAWDQLNPPTVATANGTAKSK

SEQ ID NO: 1470 - protein, 110 aa, Pyrococcus furiosus DSM 3638
MVKFCPKCGSIMIPDRRRGVFVCRKCGYEEPINPEDTKAYRRTEEVKHRPDEGVVVIEQEVSTLPTAKVTCPKCGHNEAWWWELQTRAGDEPSTIFYKCKKCGYVWRSYE

SEQ ID NO: 1471 - protein, 422 aa, Oryza sativa (japonica cultivar-group)
MTMIPKTPETRVAKITGGGGHNVLLTKVFLHWEPIFSKEPGEELDLERCFVVPDKLPIEARRQFTALDKIEVARLQNVTRIFRVSHIRSVICRTAKAWGDGNPPRFGELAWSTQIIRTCKTGAGTFPSARSKLLDVQRVESLSRSPLLINHNFASRLAAAISSKHHAAAAVEADLLRAERIASVHQLYSMSSLESARADLALLILYLNKAEARDKICRAIQYGSKFVSNGQPGPAQNVDKSTSLARKVFRLFKFVNDLHALISPPAKGTPLPLILLGKSKNALLSTFLFLDQIVWAGRTGIYKNKERAEFLSKIAFYCFLGSNTCTSIIEVAELQRLSKSMKKLEKELKHQELLKNEQYQMKLQKCNERRLALIKSSLDIVVAIGLLQLAPKKVTPRVTGAFGFASSLIACYQLLPAPAKSK

SEQ ID NO: 1472 - protein, 314 aa, Capsicum annuum
MGSKYSKATNSINDALNSSYLVPFESYRFPLVDLEEATNNFDGKGGFGKVYRGVLRDGTKVALKRHNRDSGQSIEPFRTEIEILSRRSHPHLVSLIGFCDERNEMILIYDYMENGNLKSHLYGSDLPTMSWEQRLEICIGAARGLHYLHTSAVIHRDVKSTNILLDENFVAKITDFGISKKGTELDQTHVSTDVKGTFGYLDPEYFIKGRLTEKSDVYSFGVVLFEVLCARSAIVQSLPREMVNLAEWAVESHNNGQLEQIVDPNLADKIRPESLRKFGDTAVKCLALSSEDRPSMGDVLWKLEYALRLQESVI

SEQ ID NO: 1473 - protein, 372 aa, Triticum aestivum
  unsure (1)..(372): unsure at all Xaa locations
RTKPGYRKDRLGLYEDRENFPXAEEYMDKVCXQMESNSKFYGFQYNTRIVKPSILHFQLRNLLWATSKHDVYFMSNSTVGHWSSLSHKMTDVLDFSGHVAPAKKHPGCALEGFTGVQVSTLAVNEGLLVAGGFQGELVCKSLGERDVKFCTRTTLSDNAITNAMDIHRSTSGSLRITVSNNDSGVREFDMERFQLLNHFRFNWPVNHTSVSPDKKLLAVVGDDRDALLVDSRNGKVTSTLVGHLDYSFASAWHPDGVTFATGNQDKTCRVWDIRNPSTSLAVLRGNIGAIRCIRYSSDGRFLLFSEPADFVHVYSAAECYRKRQEIDFFGEISGISLSPDDESLFVGVCDRVYASLLNYRMVHANGYLDSYM

SEQ ID NO: 1474 - protein, 149 aa, Oryza sativa
  unsure (1)..(149): unsure at all Xaa locations
ANGLQAYAVTLITYLRGHLAPSSSDSGSSGNVIIDFYWGMELYPRIGKHFDIKVFTNCRFGMMSWAVLAVTYCIKQYEMNGRVADSMLVNTALMLIYVTKFFWWESGYWCTMDIAHDRGYHIIIIKLLXAITSYYYFKEVLHVNLKIHX

SEQ ID NO: 1475 - protein, 209 aa, Oryza sativa
  unsure (1)..(209): unsure at all Xaa locations
PAANVGDASSPTGAAAAAAGGRRAXDGAAALPPPPGTDMTGICFRDQLWLNTYPLDRNLVFDYFALSPFYDLTCNNESLRPRQIHPLDMSHLTKMTGMEYVLSDVMEPHLFVIRKQRRESPEKSNAMLAYYILDGSIYQAPQLCSVFASRISRAMHHISKAFTTACSKLEKIGHVXETEPDTELFESKTQKEAIYLKGVXRRVDHILMS

SEQ ID NO: 1476 - protein, 478 aa, Xylella fastidiosa Ann-1
MFKQLWATKLSQPSQDSAEGLSLQRVLGVWGLTALGIGAVIGGGIFVITGQAAANHAGPAIMLSFALAAICCTFCALAYAEFAAMVPVSGSAYTYTYATFGELAAWFIGWMLVLEYGVSAAAVAVSWSGYFLSLLQHLGIHLPAALVNAPLDGTLHATGAIANLPAATIVLLLTWLCYFGIRKSSKINIAMVALKSGLILLIIGVGWKYVNPDYWQPFIPTNQGPGKYGWNGVLHGASMVFFAYIGFEAVSVAAQESHRPQRDLPISMMSALAICTVLYIMMAAVMTGLVPYTQLGTDEPVVTAVAAHPQLGWLRVVVEIGALVGLSSVVLVMLIGQPRIFMIMAGDGLLPPIFSTIHSKHRTPHINTVITGLGIALLAALLAAVFPLDVLGELTSMGTLIAFTAVCAGVLILRCTRPDLPRPFRMPAAWLFCSAGVLSCITLLSAMTRHNWMLMSVWTVLGFSLYFSYGYHHSKLHQ

SEQ ID NO: 1477 - protein, 307 aa, Zea mays
MMAYVRGDMSLDARAHRHVLMCRFSARLLGFDDYIPAYAGASGDQLLTGVNFASAAAGIRDETGQQLGQRISFGGQLQNYQAAVQQLVSILGDEDSAASHLSQCIFTVGMGSNDYLNNYFMPAVYSTSQQYTPEQYADVLINQYSQQLRTLYSYGARKVALMGVGQVGCSPNELAQRSTDGTTCVPQINAAIDIFNRKLVALVDQFNALPGAHFTYINVYGIFQDILRAPGSHGLTVTNQGCCGVGRNNGQVTCLPFQTPCANRNEYLFWDAFHPTEAANILVGRRAYSAALPSDVHPMDLRTLARI

SEQ ID NO: 1478 - protein, 457 aa, Torenia hybrida
MAKTYGPLMHLKFGLKDAVVASSASVAEQFLKKHDVNFSNRPPNSGAKHIAYNYQDLVFAPYGPRWRLLRKICSVHLFSSKALDDFQHVRHEEICILIRAIASGGHAPVNLGKLLGVCTTNALARVMLGRRVFEGDGGENPHADEFKSMVVEIMVLAGAFNLGDFIPVLDWFDLQGIAGKMKKLHARFDKFLNGILEDRKSNGSNGAEQYVDLLSVLISLQDSNIDGGDEGTKLTDTEIKALLLNLFIAGTDTSSSTVEWAMAELIRNPKLLVQAQEELDRVVGPNRFVTESDLPQLTFLQAVIKETFRLHPSTPLSLPRMAAEDCEINGYYVSEGSTLLVNVWAIARDPNAWANPLDFNPTRFLAGGEKPNVDVKGNDFEVIPFGAGRRICAGMSLGIRMVQLVTASLVHSFDWALLDGLKPEKLDMEEGYGLTLQRASPLIVHPKPRLSAQVYCM

SEQ ID NO: 1479 - protein, 165 aa, Triticum aestivum
  unsure (1)..(165): unsure at all Xaa locations
MADVEYRCFVGGLAWATDDQSLQNAFSKYGDVIDSKIITDRETGRSRGFGFVTFASDEAMRQAIEAMNGQDLDGRNITVNEAQSRRSGGGGGGFSGGGGGGYGGQRREGGGXGGYGGGGGGYGGGRSGGGGGYGSREGGGGYGGGXGGGYGGSRGGSXGGGNWRE

SEQ ID NO: 1480 - protein, 427 aa, Coxiella burnetii
MTELTGVSIVTYQHIKVPSQGEKITVNKAVLEVPDRPIIPFIEGDGIGIDITPVMKNVVDAAVEKSYAGKRKIEWMEIYAGEKATKVYGKDNWLPDETLEAIKEYQVAIKGPLTTPVGGGIRSLNVALRQQLDLYVCLRPVRYFTGVPSPVKTPEKVNMVIFRENSEDIYAGIEWPAGSPEAMKLINFLQNEMGVKKIRFPETAGIGIKPVSKEGTSRLVRRAIQYAIDNDRDSVTLVHKGNIMKFTEGAFKDWGYEVAVKEFGAKPLDGGPWHVFENPKTGQKITIKDVIADAFLQQILLRPAEYSVIATLNLNGDYISDALAAEVGGIGIAPGANLSDTVGLFEATHGTAPKYAGQDKVNPGSLILSAEMMLRYLGWKEAADLVVQGIEGAIESKTVTYDFARLMTGAKEVSTSQFGKAIIKHIL

SEQ ID NO: 1481 - protein, 161 aa, Triticum aestivum
  unsure (1)..(161): unsure at all Xaa locations
VRPRVRPRVRPRVRPRVREAKQKGRHSGYGKRRGTREARLPTKILWMRRMRVLRRLLRKYREAKKIDGHMYHDMYLKVKGNMFKIRRVLMESIHRSKAEKAREKTLSDQFEAIRAKSKASRERKIARREEXLAQGPRDHAPAPAAAAALAQASSAPMNAIK

SEQ ID NO: 1482 - protein, 377 aa, SYNECHOCOCCUS SP. WH 8102
MQSGCALLLPTEGLSDRVIAKAGDLLVIPLVQAHAGSVQQINSGKDLHAGETSAPILQLRASMAALLQCVAVKILVMGGTRFVGKPLVARLQAQGHALTLFTRGRNALPEGVEHLSGDRSSSEGLSPLEGRQFDVIVDSSGRKLEDSRRVVEITGAPSHRFVYVSSAGVYAGSELWPLDETAATDPNSRHAGKADTEAWLRAEGIPFTSFRPTYIYGPGNYNPVERWFFDRITHDRPVPLPGDGSTITQLGHVDDLAEAMARCIDVEAAANRIYNCSGKQGITFRGFIQAAAVACAKDPDAVELRPFDPSGLDPKARKAFPLRLNHFLTDITRVERELAWQPRFDLAKGLADSFQNDYAKTPTTEPDFSADAALIGA

SEQ ID NO: 1483 - protein, 220 aa, Gossypium schwendimanii
DIYYWECKGYTPLFPRILGHEASGIVESVGEGVNDLKPGDHVLPIFTGECKGCRHCLSEESNNMCELLRTNCDRGVMLADGKTRFSINGKPIYHFVGTSTFSQYTVVHVGQVAKISPTAPLDKVCPISCGICTGFGATVNVAKPKKGQTVAVFGLGAVGLAAAEGARVCGASRIIAVDVNPRRFEEAKRFGITEFVNPKDYDKPVQEVIVEMTGGGVDRS

SEQ ID NO: 1484 - protein, 251 aa, Candida maltosa
MSVKTKTITILPGDHVGTEIVNEAIKVLEAIEAATPYQKIHFDFKHHLIGGAAIDATGVPLPDDALESAKNSDAVLLGAVGGPKWGTGALRPEQGLLKIRKELNLYANIRPCNFASDSLLELSPLRPEVVKGTNLIIVRELVGGIYFGDREEQEESEDKQTAWDTEKYTVDEVTRITRMAAFMALQHNPPLPIWSLDKANVLASSRLWRRTVDKVISEEFPTLSVQHQLIDSACHDFNSKPNQIEWYNYHF

SEQ ID NO: 1485 - protein, 249 aa, Physcomitrella patens
MVVPSLPAFGGQNAMLRRNIDNNTDTLISLLQGSCSPRVSMQQVPRSSESLENMMGACGQKLPYFSSFDGPSVEEQEDVDEGIDEFAHHVEKKRRLSLEQVRSLERNFEVENKLEPERKMQLAKELGLQPRQVAVWFQNRRARWKTKQLERDYETLKKAYDRLKADFEAVTLDTSALKAEVSRLKGISNDDVKPAEFVQGKCDTTSHPASPAQSERSDIVSSRNRTTPTIHVDPVAPEEAGAHLTIELG

SEQ ID NO: 1486 - protein, 305 aa, Miscanthus transmorrisonensis
IESVGEGVTDVAPGDHVLPVFTGECKECPHCKSAESNMCDLLRINTDRGVMIGDGKSRFSINGKPIYHFVGTSTFSEYTVMHVGCVAKINPQAPLDKVCVLSRGISTGLGASINVAKPPKGSTVAIFGLGAVGLAAAEGARIAGASRIIGVDLNPSRFEEARKFGCTGFVNPKDHKKPVQEVLAEMTNGGVDRSVECTGNINAMIQAFECVHDGWGVAVLVGVPHKDAEFKTHPMNFLNERTLKGTFFGNFKPRADLPNVVELYMKKELEVEKFITHSVPFAEINKAFDLMARGEGIRCIIRMEN

SEQ ID NO: 1487 - protein, 226 aa, Streptomyces hygroscopicus
MNALIPRPRLEVAPGAVHVPSWLTLEQQRELVLACRGWATGPVPIRHTKLPRGGVMSVRTVCIGWHWQPYAYTRTADDVNGARVAEFPDWMVELGRRALVDAYDDETAGEGYTPDTALINFYDAQAKLGMHQDKDERSSAPVVSLTIGDSCVFRFGNTETRTKPYTDLELASGDLFVFGGPSRYAYHAVPRILPGTGDPATGLKSGRLNITMRVTGLADPQSSVVP

SEQ ID NO: 1488 - protein, 325 aa, Zea mays
MSNRATHWCYACRRPIRLRGQDIVCPNCNDGFIQEISEMGGILNTYGLIEPDFEERRARRFGMMDAMSSLMRQRMEEMGRDGLFDIRGRQGTGTEYGRRPTAVPTLVFGGIPSPGVDSGDVNVVLRGGRRVGAAQPNFSSLVVGPSLEALFEQLLLQNNRQGPAPAPQSAIDSMPVVKINRRHLDDDPQCAVCKDKFEVGAEAREMPCKHLYHTDCIIPWLVQHNSCPVCRHPLPSQRSGSTSSARPSAYYNEAADPPGVTRADLEPAPRDGGRESQERRRSFSFLWPFGPSSSRSSSYQYEQNVDEPAVYDPNQIAYSEWHYDH

SEQ ID NO: 1489 - protein, 326 aa, Triticum aestivum
  unsure (1)..(326): unsure at all Xaa locations
MQYNNLGRSGLRVSQLSYGAWVTFGNQLDVKEAKSLLQACRDAGVNFFDNAEVYANGRAEEIMGQAIRDLGWRRADVVISTKLFWGGQGPNDKGLSRKHIVEGLKASLKRLDMEYVDVVYCHRPDATTPIEERVRAMNWVIDXGWALYWGTSEWTAQQITGAWGAAXLVGPIVEQPEYNLXFSRHKVESEFVPLYSTYGIGLTTWSPLASGVLTGKYSKGNIPAESRFALDNYKNLANRSLVDDTLRKVNGLKPIASELGVSMAQLGIAWCASNPNVSSVITGATKESQIVENMKALEVIPLLTPEVLEKIEAVVQSKPKRLESYR

SEQ ID NO: 1490 - protein, 143 aa, Triticum aestivum
MASGGGPMTKKELGETHDVLRFGVNDSVRGDLAPAHPVQATIHKENKFWEEKKKFGTEAIYGSAFNIRRDLDAQILSRFQRPPGALPSSMLGYEAMTGSLDDFGFEDYLNLPQDSDSLRIPDMHHGMEVRLGLSKGPICPSFN

SEQ ID NO: 1491 - protein, 394 aa, Zea mays subsp. mays
  unsure (1)..(394): unsure at all Xaa locations
LGAERRARLPPGEMGWPLVGGMWAFLRAFKSGKPDAFIASFVRRFGRTGVYRSFMFSSPTVLVTTAEGCKQVLMDDDAFVTGWPKATVALVGPRSFVAMPHDEHRRIRKLTAAPINGFDALTGYLPFIDSTVTSSLRAWADHGGSVEFLTELRRMTFKIIVQIFLGGADQATTRALERSYTELIYGVRAMAINLPGFAYRGALRARRRLXGALXGVLYXSPAARAKGVSGGGVDMMDRLIEAQDERGRHLDDDEIIDVLVMYLNAGHESSGHITMWATVFLQENPDMFARAKAEQEAIMRSIPSSQQGLTLRDFRKMEYLSQVIDETLRLVNISFVSFRQATRDVFVNGYLIPKGWKVQLWYRSVHMDPHVYPDPTKFDPSRWEGHSPRAGTFL

SEQ ID NO: 1492 - protein, 426 aa, Hordeum vulgare subsp. vulgare
AQAVVQAMQCQVGVRGRTAVPARQPAGRVWGVRRAARATSGFKVLALGPETTGVIQRMQQLLDMDTTPFTDKIIAEYIWVGGSGIDLRSKSRTISKPVEDPSELPKWNYDGSSTGQAPGEDSEVILYPQAIFKDPFRGGNNILVICDTYTPQGEPIPTNKRHMAAQIFSDPKVTSQVPWFGIEQEYTLMQRDVNWPLGWPVGGYPGPQGPYYCAVGSDKSFGRDISDAHYKACLYAGIEISGTNGEVMPGQWEYQVGPSVGIDAGDHIWASRYILERITEQAGVVLTLDPKPIQGDWNGAGCHTNYSTLSMREDGGFDVIKKAILNLSLRHDLHIAAYGEGNERRLTGLHETASISDFSWGVANRGCSIRVGRDTEAKGKGYLEDRRPASNMDPYTVTALLAETTILWEPTLEAEALAAKKLALKV

SEQ ID NO: 1493 - protein, 514 aa, Thermobifida fusca
MMCAARHAGGTGDQVSIWRTKSIEQSIRDTDEPGYRLRRDLNGFDLIVFGIGVIIGTGIFVVTGRQAAENAGPAIVLSFLAAGAVCALAAMCYAEFASTVPVAGSAYTFGYATLGEFVAWIIGWDLILEFTLAASVVSVGWSEYAGDLLALPTTVTLAGLPVNLGAVAIAVLLGLVGMLGAKLSGRVTAVVVAIKVGIVLFIIAVGAAYVDPANWTPFIPPAQPAAADTTGVSDATLTHVLFGLEPTSFGPWGVVAAASVVFFSFIGFDIVATTAEETRNPRRDIPVGIFGSLLIVTLLYMAVAAVVTGMRPYTELNVTAPLSDAFRSVGADWAATLISLGGVIGITTVILVLMMGQARVAFAMSRDGLLPRALSRIHPRFGTPYVTTLLTTAAVALLGGLVPISTLEEMVNIGTLFAFVVVSVGVVVLRSLRPDLPRAFRVPWSPVLPLLAALSCLWLMLNLTALTWIRFAVWLVIGVAIYFLYGIHHSRLAAPPAQPSGEEGEGVGEGFLGA

SEQ ID NO: 1494 - protein, 213 aa, Triticum aestivum
  unsure (1)..(213): unsure at all Xaa locations
MSPSAVEGNGVVDVKTTLKPNVGVYTNPNHDLWVAPAEPSAEAVKSGSDLKQGEVSVAIRSTGICGSDVHFWHAGCIGPMIVEGDHILGHESAGEVIAVHPSVSHLKVGDRVAVEPNIPCGTCEPCLTGRYNGCETVQFLSTPPVPGMLRRYINHPAVWCHKIGNMSYENGALLEPLSVALAGMQRAEVRLGDPVLICGAGPIGLITLQXCAA

SEQ ID NO: 1495 - protein, 148 aa, Spermatozopsis similis
  unsure (1)..(148): unsure at all Xaa locations
LTEEQKQEXREAFDLFDTDGSGTIDAKELKVXMXALGFEPKKEEIQKMISDIDKDGSGTIDFEEFLQMMTAKMGERDSREEIMKAFRLFDDDQTGKITFKNLKRVAKELGENLTDEEIQEMIDEADRDGDGEINEEEFFRIMKKTSLF

SEQ ID NO: 1496 - protein, 865 aa, Saccharomyces cerevisiae
MSYTNKRHTYYGGFTNDLSDTFQYPQRTDEQRRKHVTFGPYILGSTLGEGEFGKVKLGWPKNFSNSSNSTFDFPKQVAIKLIKRDSISNDYRKEVKIYREINALKHLSHPNIVKLEEVLQNSRYIGIVLEYACGGEFYKYIQKKRRLKEMNACRLFSQLISGVHYIHSKGLVHRDLKLENLLLDKNENLVITDFGFVNEFCSRNELMKTSCGSPCYAAPELVISAEPYEARKADIWSCGVILYAILAGYLPWDDDPNNPEGSDIGRLYNYINSTPLKFPDYILPIPRDLLRRMLVSDPKKRINLKQIKKHEWLKPHSSFLSITPDEWDKLNNTQSVFRLAKPRRRYGSRPQSSCSTSSLGSRSDKRDSLVIDSTLITFPAPPQESQNHIITRPASIASDQRLSPIRRSNRHNRSNSAASVALQAVVNADREYVLSHEQSLSPVQNIRQTTGNMTASLSPPPAISPGDIIIETTPIKRNTISGSSIVPSLEEESSTTMQTSKIQPNNMASSQNHQYNKNKTQNSLQSAKNFYRTSSSSHTKPRPTSYHPGSYTTPPYNSNTLSIYEINEKAKSSASSQTLNQRDTSPFDSTPYLALDTCITSSSSIESSPKLITHGQFSVAKPSVDLQSVSGDLIKYKRDADVVTRIYDEKYKQKRKSLRYSGIFSDISCDTVTEESDELRPPESPLQQHEGQESIDKAKTEDTSEKGSKSSNIAKATAQKHVNNHLERSLNEAESTKKRFSFLSLYSYDTSKSSLYSSMDSKRKPSPPSQRRPKKDDSYQTNSKNHYITASNMQTSHQVSKDLPAPTMVQNKCTLETKKAVRSNRSSIMVSEVNKASVDNKAAQSPEHSTAKRVLGFFKRRSMKI

SEQ ID NO: 1497 - protein, 288 aa, Sorghum bicolor
MAAAPHDMHGVDSFAQLPFIPRGAAPARAAAPKTTPAPASSRVDAASIRLFGRDFPNDDQQQAATAHQLLLLKEDAVAAVGDGEETAAASAGGGERRFECHYCCRNFPTSQALGGHQNAHKRERQHARRAHLEASFAAHCGAYLPGAHLYGLFGYGGHTALPPPPHYTAATAAAVWAAGAVPGMCGGVGPVARPPVYGGVAVPGMWRPSRTPPGAGSGGGFVAAGRPVGADPAAGYGEMIMAGNDDKVAMSVVTSLPPLPSPSCLSGGQQSAEMIGRPELGHKDGVIS

SEQ ID NO: 1498 - protein, 197 aa, Leersia perrieri
GQTPVFPRILGHEAGGIVESVGEGVTELAPGDHVLPVFTGECKECAHCKSEESNMCDLLRINVDRGVMIGDGKSRFTINGKPIFHFVGTSTFSEYTVIHVGCLAKINPEAPLDKVCILSCGISTGLGATLNVAKPKKGSTVAIFGLGAVGLAAMEGARLSGASRIIGVDLNPAKYEQAKKFGCTDFVNPKDHKKPVQ

SEQ ID NO: 1499 - protein, 268 aa, Oryza sativa
  unsure (1)..(268): unsure at all Xaa locations
XLRNFCELATRTPYAAXPQASSSSPPPTSEELMRMERERSAHNYHPIPVVFSKGEGSHILDPEGNKYIDFLSAYSAVNQGHCHPKVLRALKEQAERLTLSSRAFYNDKFPIFAEYLTSMFGYEMMLPMNTGAEGVETAIKLVRKWGYEKKKIPKNEALIVSCCGCFHGRTLGVISMSCDNDATRGFGPLVPGHLKVDFGDTDGLEKIFKDHGERICGFLFEPIQGEAGVIIPPDGYLKAVRDLCSRHNILMIADEIQTGIARTGKMLX

SEQ ID NO: 1500 - protein, 120 aa, Glycine max
  unsure (1)..(120): unsure at all Xaa locations
MGWIGRLGSEYGLVQAPLGPDISAPPLVAAVANAGALGLLRAPDRQSPDYLRELIKTTWTLTXIPFPDGGGLTFPFDEKLHDILEEKRAFLPVDWWECTKDLVNHAYSDAIKVVTQVGFL

SEQ ID NO: 1501 - protein, 221 aa, Triticum aestivum
RLHPRIRQLQADGRVEFADGSSVVADTVIYCTGYAYSFPFLDTGGAVTVSDDGYVVGPLFEHVFPPSLAPSLSFVGVPRKIPIPWFLEVQARWVAQVLSGRRELPPEEEMLRSVEEHLRAREAAGVPRKLTHNIGSIEPHTIFEFGEKYCDFTPLEEWKKELMVSSVVSMMDDVETFRDLANDSENVHKGLQEWRLGAAALLKVKQNRPITTPVDTEGDGL

SEQ ID NO: 1502 - protein, 133 aa, Daucus carota
DYEMKLMDIDSEHLGIPESEYEAIVRMPSAEFARICKDLSTIGDTVVISVTKEGVKFSTRGDIGTANIVCRQNTSVDKPEDATIIEMQETVSLTFALRYMNSFTKATPLANQVTISLSSELPVVVEYKIAEMG

SEQ ID NO: 1503 - protein, 356 aa, Xanthomonas campestris pv. campestris str. ATCC 33913
MQHATSLDQYRLLGRSGLRVSPLALGTMTFGKEWGWGADEADATRIFDAYVERGGNFIDTAVNYTNGASERMLGRLIADKRERVVVATKFTMARDPGNINSGGNHRLNLMRSVETSLRQLATDRIDLLYLHAWDFTTAPDEVMRALDDLVRAGKVLYLGICNTPAWRVAQLQTLADLRGWSPLVALQIEYSLVERTVEHELMPMARELGLGVMPWSPQGGGILTGKYTRADLSDENGAEVAASRKGVIASTGHLNARSLDIADVVGEVADELGASRSQVALAWTLRNPAVVAPVMGARTLEQALDNFGAFDLTLSDAQLQRLDAASAPAPIFPERFIGRPMAQQLIYGTGSVQLRR

SEQ ID NO: 1504 - protein, 250 aa, Zea mays
  unsure (1)..(250): unsure at all Xaa locations
REQRALLLAGPPATGKTALALGIAQELGSKVPFCPMVGSEVYSSEVKKTEVLMENFRRAIGLRIKENKEVYEGEVIELSPEEAESTTGGYAKSISHVIIGLKTVKGTKQLKLDPSIYDALIKEKVAVGDVIYIEANSGAVKRVGRCDSFATEYDLEAEEYVPIPKGEVHKKKEIVQDVTLHDLDAANAQPQGGQDILSLMGQMMKPRKTEITEKLRQEINKVVNRYIDEGIAELVPGGLVIDEXHMLDIE

SEQ ID NO: 1505 - protein, 165 aa, Methanopyrus kandleri AV19
MRRLKIEGRAYIHPTATVLGEVELGQDASLWPGAVVRGDLEPVRIGRESNIQDNAVVHVSKGYPVEIGDRVSVGHGAVVHGATIEEDCLIGMNATVMNGAVIRRGSIIGAGAVVTEGTEVGPYEIWVGVPAKRIGTTDEERVDEIRENARRYLKLAREELPEWRG

SEQ ID NO: 1506 - protein, 901 aa, Medicago truncatula
MELQVIRIFRLVVAFVLCLCIFIRSASSATKGFESIACCADSNYTDPKTTLTYTTDHIWFSDKRSCRQIPEILFSHRSNKNVRKFEIYEGKRCYNLPTVKDQVYLIRGIFPFDSLNSSFYVSIGVTELGELRSSRLEDLEIEGVFRATKDYIDFCLLKEDVNPFISQIELRPLPEEYLHGFGTSVLKLISRNNLGDTNDDIRFPDDQNDRIWKRKETSTPTSALPLSFNVSNVDLKDSVTPPLQVLQTALTHPERLEFVHDGLETDDYEYSVFLHFLELNGTVRAGQRVFDIYLNNEIKKEKFDVLAGGSKNSYTALNISANGSLNITLVKASGSEFGPLLNAYEILQARSWIEETNQKDLEVIQKMREELLLHNQENEALESWSGDPCMIFPWKGITCDDSTGSSIITKLDLSSNNLKGAIPSIVTKMTNLQILDLSYNDLSGWLPESIISLPHLKSLYFGCNPSMSDEDTTKLNSSLINTDYGRCKAKKPKFGQVFVIGAITSGSLLITLAVGILFFCRYRHKSITLEGFGKTYPMATNIIFSLPSKDDFFIKSVSVKPFTLEYIEQATEQYKTLIGEGGFGSVYRGTLDDGQEVAVKVRSSTSTQGTREFDNELNLLSAIQHENLVPLLGYCNEYDQQILVYPFMSNGSLLDRLYGEASKRKILDWPTRLSIALGAARGLAYLHTFPGRSVIHRDVKSSNILLDQSMCAKVADFGFSKYAPQEGDSYVSLEVRGTAGYLDPEYYKTQQLSEKSDVFSFGVVLLEIVSGREPLNIKRPRIEWSLVEWAKPYIRASKVDEIVDPGIKGGYHAEALWRVVEVALQCLEPYSTYRPCMVDIVRELEDALIIENNASEYMKSIDSLGGSNRYSIVMDKRALPSTTSTAESTITTQTLSHPQPR

SEQ ID NO: 1507 - protein, 438 aa, Saccharomyces cerevisiae
MVSALNPRTTEFEFGGLIGALGISIGLPVFTIILNQMIRPDYFIKGFFQNFDIVELWNGIKPLRYYLGNRELWTVYCLWYGILAVLDVILPGRVMKGVQLRDGSKLSYKINGIAMSTTLVLVLAIRWKLTDGQLPELQYLYENHVSLCIISILFSFFLATYCYVASFIPLIFKKNGNGKREKILALGGNSGNIIYDWFIGRELNPRLGPLDIKMFSELRPGMLLWLLINLSCLHHHYLKTGKINDALVLVNFLQGFYIFDGVLNEEGVLTMMDITTDGFGFMLAFGDLSLVPFTYSLQARYLSVSPVELGWVKVVGILAIMFLGFHIFHSANKQKSEFRQGKLENLKSIQTKRGTKLLCDGWWAKSQHINYFGDWLISLSWCLATWFQTPLTYYYSLYFATLLLHRQQRDEHKCRLKYGENWEEYERKVPYKIIPYVY

SEQ ID NO: 1508 - protein, 162 aa, Novosphingobium aromaticivorans
MSGPRTIADFKARKPNGEEIDLAEKKGKVLLVVNTASKCGFTPQYDGLEALWRQYGERGFEVLAFPCNQFGKQEPGTADEIESFCKVNFGLSFPLMAKIEVNGDNADPLYDWLKSEAPGVLGTKSIKWNFTKFLIDREGRVVRRYAPTDKPESIAGDIERLL

SEQ ID NO: 1509 - protein, 228 aa, Oryza sativa
  unsure (1)..(228): unsure at all Xaa locations
MAAPDVEYRCFVGGLAWATDDRSLEAAFSTYGEILDSKIINDRETGRSRGFGFVTFSSEQSMRDAIEGMNGKELDGRNITVNEAQSRRSGGGGGGYGGGGGGYGGGRGGGGYGGGGGGGYGRREXAATVAAAATAAAVAAAAAATVAAVAAATAATPAGTGGTDWWGPXRGPVIXLAIRVRIILSSSRVVIVSSGSLEAENALSIPSILSVMVSPRSSCSREGCGCWI

SEQ ID NO: 1510 - protein, 172 aa, Glycine max
  unsure (1)..(172): unsure at all Xaa locations
LRLRSYWGLNVYNANTNPIFSXHLYTVQGQKYNIPKIVDDHIELNVAEYEXQGIIHLRVLFDLTYSFGFATITSTLTHAVCFYGKEIMERYRASSRGIEYMHTLLFIRYDDIPXRWYHSLLLETLLVTVALCMFIKDQVQMPWCGLLYAGVLAFGCTLPISLITATTYQTPG

SEQ ID NO: 1511 - protein, 95 aa, Glycine max
MLEGKAVIEDTDMPDKMQIQAMASAYEALDLYDVFDCTSIAAHIKKEFDTKYGSGWQCVVGSSFGCFFTHSKGTFVYFTLETLNFLIFKGASYLI

SEQ ID NO: 1512 - protein, 171 aa, Pringlea antiscorbutica
KLWPNAKYVSSIMTGSMLPYLKKLRHYAGGLPLVSADYGSTESWIGVNVDPHFPPEDVSFAVIPTFSYFEFIPLYRQQNQQDICSDGDFVEEKPVPLSQVKLGQEYELVLTTFTGLYRYRLGDVVEVTGFHKGTPKLSFIYRRKLILTINIDKNTEKDLQRVVDKASQLLS

SEQ ID NO: 1513 - protein, 506 aa, Lactococcus lactis subsp. lactis
MSLSQTSRCRINFIRERILENSSNSTTETQVKRGLKSRHVSMIALGGTIGTGLFLTSGDVIHTAGPFGALTAYVLIGAMVYFLMTSLGEMATYLPTSGSFSDYGTRYVDPAFGFALGWNYWLNWAITVAVDLTAVALCIKFWLPDVPSWIFSLIALIIVFAINALSVKTFGETEYWLSAIKITVVVLFLIIGFLSIFGIMGGHIDVAKNLSVGNHGFVGGLGSFTTGGGILGVLLVAGFSFQGTELLGITAGEAENPEKSIPKAMNSIFWRILVFYILSIFVMAAIIPFTDPHLVGGNSAAQSPFTIVFERVGLSIAASIMNAVVLTSVVSAANSGMYASTRMLYSLAKDGGAPKIFSKTSKNGIPFIALLATTAIALLTFLTSIYGVSFFTFLVSASGLTGFIAWIGIAISHFRFRRAYVAQGKDVKKLPYHAKLFPFGPILALIMTVLVTLGQDPMLLFGKTWVQGVIMYAAIPLFFILYLGYKFKNKTKLIPLKEVDLSRHKD

SEQ ID NO: 1514 - protein, 393 aa, Calycanthus floridus
DLEPVNPDDVPVTAAGALKSYKLAAKAISKLQSLPSGNISLLCDVLVREVSELTGYDRVMAYKFHEDDHGEVIAECRRSDLEPYLGLHYPATDIPQASRFLFMKNKVRMICDCLAPPVKVIQDKRLAQPLSLCGSTLRAPHGCHAQYMANMNSIASLVMSVMVHENDDRQEMSSSRKGRKELWGLVVCHHTTPRLSFPLRYACEFLIQVFGIQLNKEIELAAQMREKHILRTQTVLCDMLQRDAPVGIIRQTPNVMDLVKCDGAALYYRNQFWLLGTTPTDAQIRDIAEWLLEYHSSSTGLSTDSLMEAGYPGASVLGDAVCGMAAIRITSKDFLFWFRSHTAKEIKWGGAKHDPVDQDDDDRKMHPRSSFKAFLEVVKCRSLPWEDIEMDAI

SEQ ID NO: 1515 - protein, 264 aa, Oryza sativa
  unsure (1)..(264): unsure at all Xaa locations
MLGFAPAPGRPLFVLFGSSIVQFSFSNGGWGAALADIYARKADILLRGYIGWNSRRALQVIDKIFPKDSPVQPSLVIVYFGGNDSVAAHSSGLGPHVPLEEYIDNMRKIADHLKSLSEKXTRVIFLSCPPLNEGDAPKNQPALSXSEIVRTNQTCRLYSEXACVSLCKXEMDLKVVDLWNAMQKRDDWATACFTDGLHLSEEGSKIVAEEILRILKEAEWDPCLHWKAMPTEFGEDSPYDLVSSSGQSTVNPSDWTFHRTIQWD

SEQ ID NO: 1516 - protein, 398 aa, Zea mays
WALRVSAPTRLTSAVEEDKRSSPLGEGDEHVAASGAAGGEFDPGAPPPFGLAEIRAAIPKHCWVKDPWRSMAYVLRDVVVVLGLAAAAARLDSWLVWPLYWAAQGTMFWALFVLGHDCGHGSFSNNPKLNSVVGHILHSSILVPYHGWRISHRTHHQNHGHVEKDESWHPLPERLYKSLDFMTRKLRFTMPFPLLAFPLYLFARSPGKSGSHFNPSSDLFQPNEKKDIITSTASWLAMVGVLAGLTFLMGPVAMLKLYGVPYFVFVAWLDMVTYLHHHGHEDKLPWYRGQEWSYLRGGLTTLDRDYGLINNIHHDIGTHVIHHLFPQIPHYHLIEATEAAKPVLGKYYKEPKKSGPLPWHLFGVLAQSLKQDHYVSDTGDVVYYQTDSKTNTSAQKSD

SEQ ID NO: 1517 - protein, 252 aa, Azotobacter vinelandii
MSKYLDKAFDLQGRCAIVTGGAAGIGLACARLLTECGARVALLDRNPAVETVAAGLGSGHLGVALDVRQLDEIQAAVERVVAAFGQIDYLVNSAGVARLDKALDVDEESWDITLDINLKASFFAAQAVARHMRERGAGRIVNLASQAAVIGLDRHAAYCASKAAIVGLTKVLAMEWAEHGITVNAVSPTIVETELGKQAWAGEVGERAKQQIPVGRFAQPEEVASLVLYLLSDAAAMITGENVVIDGGYTIK

SEQ ID NO: 1518 - protein, 751 aa, Geobacillus stearothermophilus
MENQNRQNAAQCPFHGSVTNQSSNRTTNKDWWPNQLNLSILHQHDRKTNPHDEEFNYAEEFQKLDYWALKEDLRKLMTESQDWWPADYGHYGPLFIRMAWHSAGTYRIGDGRGGASTGTQRFAPLNSWPDNANLDKARRLLWPIKKKYGNKISWADLFILAGNVAIESMGGKTIGFGGGRVDVWHPEEDVYWGSEKEWLASERYSGDRELENPLAAVQMGLIYVNPEGPDGKPDPKAAARDIRETFRRMGMNDEETVALIAGGHTFGKAHGAGPATHVGPEPEAAPIEAQGLGWISSYGKGKGSDTITSGIEGAWTPTPTQWDTSYFDMLFGYDWWLTKSPAGAWQWMAVDPDEKDLAPDAEDPSKKVPTMMMTTDLALRFDPEYEKIARRFHQNPEEFAEAFARAWFKLTHRDMGPKTRYLGPEVPKEDFIWQDPIPEVDYELTEAEIEEIKAKILNSGLTVSELVKTAWASASTFRNSDKRGGANGARIRLAPQKDWEVNEPERLAKVLSVYEDIQRELPKKVSIADLIVLGGSAAVEKAARDAGFDVKVPFFPGRGDATQEQTDVESFAVLEPFADGFRNYQKQEYSVPPEELLVDKAQLLGLTAPEMTVLVGGLRVLGANYRDLPHGVFTDRIGVLTNDFFVNLLDMNYEWVPTDSGIYEIRDRKTGEVRWTATRVDLIFGSNSILRSYAEFYAQDDNQEKFVRDFINAWVKVMNADRFDLVKKARESVTALQCFCNFRSVGINTLQ

SEQ ID NO: 1519 - protein, 294 aa, Glycine max
LALSLRTPQHPFSVHLLCRLHSLCLRRWIFPPRVGFSFDLCRRNAMLQNKGLKAPTFLKTGTTIVGLVFQDGVILGADTRATEGPIVADKNCEKIHYMAPNIYCCGAGTAADTEAVTDMVSSQLQLHRYHTGRESRVVTALTLLKKHLFNYQGHVSAALVLGGVDITGPHLHTIYPHGSTDTLPFATMGSGSLAAMSVFESKYKESLSRDEGIKLVVEAICAGIFNDLGSGSNVDVCVITKGHKEYLRNHLLPNPRTYVNPKGFDFPKKTEVLLTKITPLKEKVEVIEGDAMEE

SEQ ID NO: 1520 - protein, 366 aa, Buchnera aphidicola str. Bp (Baizongia pistaciae)
MKRNYKIAVLPGDGIGPEIMREGYKILRILKSKLSLNIMTQEFDVGGVAIDKYGVALPKKTLQGCRDSHAILFGSIGGPKWEDLPSHLQPERGALLPLRKYFNLFSNLRLARIYSGLEKLSPLKSRISNLGCDILCVRELTGGIYFGDPKGSKVSKSLNCAFDTEVYYQFEIERIAHMAFDLALTRRCKVTSIDKANVLESSMFWRKIVNRISTQYSQVKLSHLYVDNAAMQIIKNPSQFDVLLCSNLFGDILSDECAAITGSIGLLPSASLNDKNFGLYEPAGGSAPDIKGKNIANPIALILSIGMMMRYSFKLYDVADLIDWAVNKTLKLGYRTQDISENNKFINTSSMGDIIAEILANRIHKI

SEQ ID NO: 1521 - protein, 394 aa, Pseudomonas syringae pv. syringae B728a
MFFWHLQYVFPTRWSGPDFRKRGSSVVLLRKVTTTSRQLASCRGGENPGRTIMILVTGGAGYIGAHIALELLEDGRDVVVLDNLCNSSREPLRRIEELCGRQVAFIHGDVRSKATLHRLFAQYPVKAVVHCAGLKAVGESVREPLRYFETNVSGSVNLCQAMAEAGVFDLLFSSSATVYGGCEQMPLDENCPLGLPTNPYGHSKLMAEHVMQSVARSDPRWSIGLLRYFNPIGAHPSGLLGESPCNTPNNLLPFLLQVANRLRPALHIFGSDYPTLDGTGVRDYLHVMDLAEGHLKALDKIHDERGVSVWNLGTGQGYSVLEVVHAFERISGKAVPLIFEPRRPGDIAACWSDPGKAARELDWRARFNLDSMLTDAWRWQCMNPQGYRPTALVS

SEQ ID NO: 1522 - protein, 343 aa, Antirrhinum majus
MYQQNSPSLCFDALYCEEEQNWDNGEIINDCFIEEQEPFSDLLKHDLLCGVDDDDDDKEELSSLLCKEQEYELYRVLEDNPSLAKARDEAVEWMFKVIGYYSFSALTAVLAVNYLDRFLCTFQFQQDKPWMYQLAAVACLSLAAKVEETQVPLLLDLQVEESKYVFESKTIQRMELLVLSTLKWKMNPVTPISFLEYIARRLALKSHLCKEFLNRCECLLLSLITDCRFMCHLPSALATATMLYVISSLEPCIGVEYQDQLINILGINKDKVEECCKLIQEVATSVHFQSGNKRKFGSLPYSPKGVVDISFSCDDSWPLDSTASVSSSPEHLSKKIKTQNPDH

SEQ ID NO: 1523 - protein, 422 aa, Linum usitatissimum
MASLPVSFAKPDKNGVITCKAIMLKEAKLPGMSYADTVQIIDIQVDPPQNVELRVKMLCASVCRTDILTIEGFMAPTQFPKINGHEGVGIIESMGPDTKNFKVGDVIVAPTLGECQTCSSCRSGRTNFCQNYGANESALEPDGTSRFSYIDSDGKKKLLYYKLGCSTWTQYMVVDSNYATKLNEIAPELPPPHGSILSCAFATGYGAVWLDAAVQEGDSVAIFGVGSVGISAVIAAKELKAKQIIVVDRNEYKLKMAMELGATHCINSEKLPEGVTPSQAVRKLTPKEVGVDASIESSGYDVFMNEAMKAAIHGKAKTVITGEGIYENDRIFFDFKDFLFGGNVVGNVTGRVRIHSDFPGLLRKAQEPVIRAGMDKILGYDAATMKCKYEVDIREGTPALLKALEEVENVDCVKLVIKLNDY

SEQ ID NO: 1524 - protein, 431 aa, Solanum tuberosum
MASWVLSECGLRPLPRIYPKPRIGSSSVCATNLNLRRISPSPIRTDRNCWALRVSAPLRIQIAGEEEEQTTNNGDEFDPGASPPFKLSDIKAAIPKHCWVKNPWTSMSYVVRDVAIVFGLAAAAAYFNNWLVWPLYWFAQSTMFWALFVLGHDCGHGSFSNNHNLNSVAGHILHSSILVPYHGWRISHRTHHQNHGHVENDESWHPLSEKLYNSLDDITKKFRFTLPFPLLAYPFYLWGRSPGKKGSHFDPSSDLFVASEKKDVITSTVCWTAMAALLVGLSFVMGPLQVLKLYGIPYWGFVMWLDIVTYLHHHGHEDKVPWYRGEEWSYLRGGLTTLDRDYGWINNIHHDIGTHVIHHLFPQIPHYHLVEATEAAKPVLGKYYKEPKKSGPLPFYLLGYLIKSMKEDHFVSDTGNVVYYQTDPNLYGSEK

SEQ ID NO: 1525 - protein, 371 aa, Dendrobium sp. XMW-2002-2
MWRHSCCYKQKLRKGLWSPEEDEKLLKHITKYGHGCWSSVPKLAGLQRCGKSCRLRWINYLRPDLKRGTFSQQEENLIIELHGVLGNRWSQIAAQLPGRTDNEIKNLWNSCIKKKLRLRGIDPNTHKPLAETEVQLAEIDSADQPAPEPEKHTVQQTETGVPNNSVRPGNSPAASYFSLPDLTYSPDCGGSIGQIQQFWLNQSGKFFSNNNSNSEFSFNSVSSLVPSVPRSTLSTSKELKPLTSLLMENSPSGFYWETGNSSNSSASSGSNDPLFDGSIFQWTQLIPERDINVQLHGETEDLKWSEYLNGSIPLSTELQSQNPELCNGMKAEEQFGIDGLSIWLQNHQQQQQQQQQASNNYGKDSQRDIIC

SEQ ID NO: 1526 - protein, 147 aa, Zea mays
EEMAASDVEYRCFVGGLAWATDDHSLNNAFSTYGEVLESKIILDRETQRSRGFGFVTFSTEDAMRSAIEGMNGKELDGRNITVNEAQSRGGRGGGGGGYGGGRRDGGGYGGGGGGYGGGRGGYGGGGGYGGANRGGGYGNNDGNWRN

SEQ ID NO: 1527 - protein, 235 aa, Glycine max; identical to SEQ ID NO: 722

SEQ ID NO: 1528 - protein, 300 aa, Zea mays
MYSAPPAVGDEYFSDLLAPDADGIDEALLMPFSDIDLQVFDSDDEHRPPVDQMVNMIPPAVLHHPSTAGTQNGGAVHAHQKAMAVIDDSCFRRGASGVEMAVVRHHGEPRQGSSSVAPVPPPSLPGTRARRSDGRSARAGKTTKLDYIGFDELRKYFCMPITRAAREMNVGLTVLKKRCRELGVARWPHRKMKSLKSLMANVQEMGNVMSSVAVQQELAALETYCTLMEDNPWIELTDRTKKLRQACFKERYKRRRAAEVNVMDMDRIYCFGQHHHQQLLPPTTSSSDDRHGQCSRSFGY

SEQ ID NO: 1529 - protein, 155 aa, Glycine max
MSTLDATRAELGLLVLYLGKAEARDKICRAIQYGSKFLSNGEPGTAQNVDKTTSLARKVFRLFKFVNDLHALISPTPQGTPLPLILLGKSKNALLSTFLFLDQFVWLGRTGIYQNKERTELIGRISLYCWLGCLFLYYYIEIPYSGTRVLCLITE

SEQ ID NO: 1530 - protein, 168 aa, Xylella fastidiosa Dixon
MTSIYTFTFTRLDGRPQALADWRGQVLLLVNVASHCGFTPQYAGLEMLWQRYRDAGLIVIGFPCDQFAGQEPGDEAKIAEFCTLTYGVDFPMAAKIKVNGADAHPLWQWLKHRRRGLFGVAAIKWNFTKFLIGRNGQPIARYSPIKSPEQLEVHIVRALGEEGGGNTH

SEQ ID NO: 1531 - protein, 459 aa, Thermobifida fusca
MGKATGLRVSWLHRYRALEAADPGQTKRTLRHNGGVTTAVPPQEVFDPTPAPAARMPRRVVILGSTGSIGTQAIEVVRQEPHRFDVVGLAAGGGRLDLLADQACALDVQAVAVADAVKAAELRDKLSARGSAAKVLAGPEGVAELAAWDCDVVLNGITGALGLESTLAALRAGRLLALANKESLIIGGPLVRELAVPGQIVPVDSEHYAIAQCFPRLPADQLTSLAQGNLAARRDHVRRLVITASGGPFRGRSSAELADVTPEQALAHPTWRMGPVITINSATLVNKGLEVIEAHLLFDIPFEQIEVVVHPQSVIHSMVEYVDGSTIAQASPPSMRIPIAYGIAWPDRVPEAAPAIDWTRAHQWTFEPLDHEAFPAVRLACEVGSVGGTAPAVYNAANEEAVAAFLAGRLAFPAILDTVARVVSEHRGESRGTVPRLEDVYEADDWARQRAKELISRQG

SEQ ID NO: 1532 - protein, 245 aa, Leuconostoc mesenteroides subsp. mesenteroides ATCC 8293
MIEQNYTNKNVLLTGAASGIGFSQLKTYLSQGATVYALDKEKITYTHKHLHTYQIDIRQHKKLEMLVEHITSDVSIDILLNTAGILDDYQPSLTIDLETWQRVMDTNLTPMFILSNAVLPKMIASGYGHIINMASIAGFTAGGGGAAYTTSKHAIIGYTKQLAFDYASKGLHINAIAPGAIKTPMNAKDFAGDASMAQQVANQTPAKRWAAPQEVADLTMFLTSPQADYINGTVVPIDGGWTLGH

SEQ ID NO: 1533 - protein, 117 aa, Glycine max
  unsure (1)..(117): unsure at all Xaa locations
SQDDRGVQSVRRGGPQYHKDILLYERAGGKGLEHRRTRTTKEIXKKKGQKPGQKVLDEERGTGGGDMYMAENFEEEDVGIDRYINIISVAIERAIGLRCCAEFECADCTNRTRAVKT

SEQ ID NO: 1534 - protein, 194 aa, Pseudomonas aeruginosa PAO1
MMAAKKILMLVGDYAEDYETMVPFQALQMVGHQVHAVCPDKRAGQSVRTAIHDFEGDQTYSEKPGHNFTLNADFAQARAEDYDALLIPGGRAPEYLRLNEQVLALVRDFDAARKPIAAVCHGAQLLAAAGVLQGRACSAYPACAPEVRLAGGEYVDLPPDQAHVDGHLVTAPAWPAHPAWLARFLEALGTRISH

SEQ ID NO: 1535 - protein, 150 aa, Capsicum annuum
MADQLTDDQISEFKEAFSLFDKDGDGCITTKELGTVMRSLGQNPTEAELQDMINEVDADGNGTIDFPEFLNLMARKMKDTDSEEELKEAFRVFDKDQNGFISAAELRHVMTNLGEKLTDEEEVDEMIREADVDGDGQIQYDEFVKVMMAK

SEQ ID NO: 1536 - protein, 665 aa, Ipomoea nil
MGEFGKEAAIVRKNKKGTVASKSQISASPTMESHLHEGEAHLVSTPVSYPTQVVRCTACWGNDGCQTVRSRTKLMKTLIERGKPQEVHSITKGLTEEGHRPTLVTYTTVLAALTLQKRFKSIPLLLKKVEQNGLRPDSIFFNPMINAFCESGNVKEAMKIFRKMREKGCKPTASTFNALIKGFGIIGKPEESSKLLEIMSREENIKPDDRTYNILVQAWCNKNNIEKAWGVVHRMVGAGLKPDVVTYNTIARAYARGKETSRAAELISQMQNNKVAPNVRTCGIVVDGYSKEGNMADALKFIYKMQGFGVHPNLFIFNSLLKGFLDITDTKGVDETLTLMQEFGVKPDVVTYSTIMNAWSSAGLMEKCEEMFQDMIKSGIEPDNHAFSILAKGYVRAGEPKKAEALLEAMATHGAHPNVVMFTTIISGWCSAAKMEDALRVYDRMCRMDVQPNLNTFETLIWGYGEANEPWKAEELLQIMEEMGVLPRKNTVQLVADAWRAIGFINEAKRILNDDQSSVLIPRTDEKPVEEDLQRVYQEKTNGSYKTLPDNDKRPTLNAKMVENREDNVHRGDHHEQIMKGSFSSLPEMTGSTITNQNGSSTFTLRSQTTPKSSRTATKSMNMAAKAILISNNCGFKPNPLMVIQRPLHVQIGIHRYINSCRLVA

SEQ ID NO: 1537 - protein, 391 aa, Saruma henryi
DLEPVNPDDVPVTAAGALKSYKLAAKAISRLQSLPSGNISLLCDVVVREVSDLTGYDRVMAYKFHEDEHGEVIAECKRSDLEPYHGLHFPASDIPQASRFLFMKNKVRMICDCSAPPVKVIQDKRLAQPISLGGSTLRAPHGCHAQYMANMGSIASLVLSVTISEDDDETCSKQKGRKLWGLVVCHHTSPRFIPFPLRYACEFLIQVFGIQLNKEVELAAQMRETHILRTQTMLCDMLLRDAPMTIVTQSPNVMDLVKCDGAALYYRKESWLLGVTPTKAQIQDLAEWLLKDHNGTTGLSTDSLVEAGYPRAHNLGDMVCGMAAVRITNQDFLFWFRSHTAKEVKWGGAKHDPADKDDDRGKMHPRSSFKAFLEVVKRRSLPWEDVEMDAI

SEQ ID NO: 1538 - protein, 171 aa, Zea mays
ALGSYQELGGNAIWIDCFLARFMAFFYYFMTVAMYMLSPRMAYHFSECVERHAYSTYDKFLKLHEEELKTLPAPEAALNYYLNEDLYLFDEFQTTRIPCSRRPKIDNLYDVFVNIRDDEAEHCKTMKACQTHGTLRSPHSMPNCLEAATECVIPENDCEGIVDCVKKSLTK

SEQ ID NO: 1539 - protein, 207 aa, Zea mays; identical to SEQ ID NO: 1093

SEQ ID NO: 1540 - protein, 392 aa, Mascagnia anisopetala
DLEPVNPADVPVTAAGALKSYKLAAKAISRLQSLPSGNISLLCDVLVKEVRDLTGYDRVMVYKFHEDEHGEVVSECRRSDLESYLGLHYPATDIPQASRFLFMKNKVRMICDCLAPPVKVIQDERLPQPLSLCGSTLRSPHGCHAQYMTNMGTIASLVMSVTINEDDDMMDGDQQQMTRKLWGLVVCHHTSPRFVPFPLRYACEFLIQVFGVQINKEVELAAQVREKHILQIQTMLCDMLLRDAPVAIITQSPNVMDLVKCDGAALYFKNKTWLLGVTPTEEQIRDIAEWLLDYHSGNTGLSTDSLMEAGYPGASVLGDAVCGMAAVSISSRDFLFWFRSHTAKEIKWGGAKHDPDVKDDGRKMHPRSSFKAFLEVVKWRSMPWEDIEMDAI

SEQ ID NO: 1541 - protein, 594 aa, Saccharomyces cerevisiae
MTMATTAMNVSVPPPDEEEQLLAKFVFGDTTDLQENLAKFNADFIFNEQEMDVEDQEDEGSESDNSEEDEAQNGELDHVNNDQLFFVDDGGNEDSQDKNEDTMDVDDEDDSSSDDYSEDSEEAAWIDSDDEKIKVPILVTNKTKKLRTSYNESKINGVHYINRLRSQFEKIYPRPKWVDDESDSELDDEEDDEEEGSNNVINGDINALTKILSTTYNYKDTLSNSKLLPPKKLDIVRLKDANASHPSHSAIQSLSFHPSKPLLLTGGYDKTLRIYHIDGKTNHLVTSLHLVGSPIQTCTFYTSLSNQNQQNIFTAGRRRYMHSWDLSLENLTHSQTAKIEKFSRLYGHESTQRSFENFKVAHLQNSQTNSVHGIVLLQGNNGWINILHSTSGLWLMGCKIEGVITDFCIDYQPISRGKFRTILIAVNAYGEVWEFDLNKNGHVIRRWKDQGGVGITKIQVGGGTTTTCPALQISKIKQNRWLAVGSESGFVNLYDRNNAMTSSTPTPVAALDQLTTTISNLQFSPDGQILCMASRAVKDALRLVHLPSCSVFSNWPTSGTPLGKVTSVAFSPSGGLLAVGNEQGKVRLWKLNHY

SEQ ID NO: 1542 - protein, 140 aa, Zea mays
MVSFEMNDLKKIGLGLTGFGIFFSFLGIVFFFDKGLIAMGNILFLSGLGLTIGLKSTMQFFTKPKNYKGTISFGAGFFLVLIGWPFFGMLLEAYGFIVLFSGFWPTLSVFLQRIPIIGWIFQQPFVTSFLDRYRGKRVPV

SEQ ID NO: 1543 - protein, 261 aa, Streptomyces aureofaciens
MSDQDKRVAVVTGATSGIGLAVARLLAAQDHRVFIGARSAENVAQTVKELQDEGLEVDGAVVDVRSTDGVRAWIQAAVDRFGSVDVVVNNAGRSGGGVTADIAEELWHDVIDTNLNSVFRVTREALTTGGLRAKDRGRIINIASTAGKQGVVLGAPYSASKHGVVGFTKALGNELAPTGITVNAVCPGYVETPMAQRVRQGYAAAYDATEEAILEKFQAKIPLGRYSTPEEVAGLVGYLASDAAASITLQALNVCGGLGNF

SEQ ID NO: 1544 - protein, 186 aa, Oryza sativa (japonica cultivar-group)
TASGQLLDLITTHEGEKDLNKYNIGVHRRIVQYKTSYYSFYLPVACALLLSGEDLTKYGAVEDILVKMGIYFQVQDDYLDCYGDPKFIGKIGTDIEDYKCSWLVVQALERADESQKSVLFENYGKKDPACVAKVKSLYRELNLEAVFLDYENESYKKLIADIEAQPSIAVQNVLKSFLHKIYKRQK

SEQ ID NO: 1545 - protein, 50 aa, Oryza sativa
MGKKITVDSATLFNKGLEVIEAHYLFGAEYDDIEIVIHPQSIIHSMIETQ

SEQ ID NO: 1546 - protein, 245 aa, Triticum aestivum
MPVETAYDPKDMLFRHLGPTGLKVSVFSLGGWLTYGGTQKGDIVKQILQTAWDHGVNTFDTAEVYANGESEIEMGRALKELNWPRDEYVLTTKVFFGTGRKEPNTRGLSRKHVVEGLKSSLKRMEQPYVDVVFAHRPDYATPMKEIVEGFTQVIRNLNLAYYWGTSEWSAAQITEATQIAERYNLIAPVVEQPQYNAFHRERFETEYAPLYDQFQYGTTIWSPLASGLLTGKYNNGIPDDSRFAT

SEQ ID NO: 1547 - protein, 336 aa, Nostoc sp. PCC 7120
MNQKVLVTGGAGYIGSHVVRQLGEAGYDVVVYDNCSTGSPQAVLHGELIIGDLKNSECLSQVFHQHKFTAVLHFAASLSVPESVARPLDYYANNTRNTLNLLRCCHDTGVNQIIFSSTAAVYGQPETAVVTESTATEPINPYGRSKLSCEWLIRDHAKASDLRYVILRYFNVAGAEPGGRLGQMTKDASHLIRVTCDAALKRRLGVKIFGTDFPTPDGTAIRDYIHVEDLATAHLDALVYLEQGNSSQILNCGYGQGYSVRQVIDRVKAISGVDFPVIEAERRSGDPVCVTACTDKIRQVLGWQPKYDDIDQIVHSTLAWEMSKQELFLNSLAGAA

SEQ ID NO: 1548 - protein, 169 aa, Lycopersicon esculentum
MATQTSNPQSVYDFTVKDAKGKDVDLSIYKGKVLIIVNVASQCGLTNSNYTDMTELYKKYKDQGLEILAFPCNQFGGQEPGNIEDIQQMVCTRFKAEYPIFDKVDVNGDNAAPLYRFLKSSKGGFFGDGIKWNFSKFLIDKEGHVVDRYSPTTSPASMEKDIKKLLGVA

SEQ ID NO: 1549 - protein, 346 aa, Glycine max
MFNCEQSKIQSLAGQHSDILESLSPNVRKRVEVLREIQGQHDELEAKFFEERAALEAKYQKLYQPLYTKRYEIVNGTTEVEEGAVKETAPDNEEDQEKGVPAFWLTAMKNNEVLAEEISERDEGALKYLKDIKWSRIENPKGFKLDFFFDTNPYFTNSVLTKTYHMIDEDEPILEKAIGTEIQWHPGKCLTQKILKKKPKKGSKNAKPITKTENCESFFNFFNPPQVPEDDEDIDEDVAEELQNQMEQDYDIGSTIRDKIIPHAVSWFTGEAIQGDEFGDLEDDEDDEDIEEDDDEDEEDDDDDDDDDDDEEESKTKKKSSAPKKSGRAQLGDGQQGERPPECKQQ

SEQ ID NO: 1550 - protein, 513 aa, Zea mays
  unsure (1)..(513): unsure at all Xaa locations
MEAADALPWAAQCAGMAVLASSLCLVALALVLLLLRRWPWCSCHVCRAYLTGSWARDFTNLGDWYAHLIRESATGTVHVHVLGCTVTANPANVEYMLKTNFDNFPKGETFAALLGDLLGRGIFNVDGHAWRYQRKMASLELGSVAVRSYAFGIIAREVEARLMPLLAGAADAGAVVDLQDVFRRFAFDTICKISFGLDPGCLEXGMPMSKLADAFDTATRLCAMRGAAASPLLWRAKRLLNVGSERELREAIRLVDELAAAVIRERRKLGVASSHDLLSRFMVASAGGDAHPGVDDKYLRDIVVSFLLAGRDTVSSALTTLFMLLSKNPAVVAAMRAEAGDGDGDGDSAPLTYEHLKRLHYTHAVLYENMRLFPPVQFDSKFCAGPDVLPDGIYVSGGTRVMYHPYAMGRMPRIWGADHDAFRPDRWLTGAGGSFVPESLYKYPVFQAGLRVCLGKELAITEMKAVGVAVVRAFDVHVVGDSGSAACAPKFVSGLTASISGGLPVRISRRVRS

SEQ ID NO: 1551 - protein, 255 aa, Oryza sativa
  unsure (1)..(255): unsure at all Xaa locations
PRVVPAPLPYTSSVPRLSPCPRPSLPPRRRGRALEHHHHKPGLRVRLRITAAPRGCPRACSRACRKPPRRDPSDSVHKVARREIGGGHRRPPRPAAPSFSAFSCPEKFRNFQLQEEYDTYDDEVHFLVQLPFLWSRTKIIEIVAAKDVIFALAQSGLCGAFNRVYESDRFSSLKCRTTPIEYIRRGQLNDGFPLFETESLKYPGFVEFDDVNGKVLTFSAQDSTYKVFDLKNYNFLYSICDKNIQEIKIRFGYHX

SEQ ID NO: 1552 - protein, 243 aa, Aeropyrum pernix
MTGGSRGIGRATVLRFAREGWSVVIAYKSRADLAEKTAEEARRLGSPEAYTVRVDVGDPDSVTEMSSRVGELIPHLNVLVNAAGVLQLGGIEETSISEWEETLRVNLTGVYLVTKLLLPLLRKAKWASIVNVASIAGETGNVVAGVAYSASKAGVIGLTKRLAVQLAGYGIRVNAVAPSFVETDMTRSFLDTPEKRERIASLHPLKIILKPEDVAEAILFLADPRRSRGITGHVLSINAGRRT

SEQ ID NO: 1553 - protein, 338 aa, Leuconostoc pseudomesenteroides
MEALVLTGTKKLEVENIEQPEVKPNEVLIHTAFAGICGTDHALYAGLPGSADAVPPIVLGHENSGVVAEIGSDVTNVAVGDRVTIDPNIYCGQCKYCRTARPELCENLSAVGVTRNGGFEEYFTAPASVVYQIPDNVSLKSAAVVEPISCAVHGIQLLKVTPYQKALVIGDGFMGELFVQILQAYGIHQVDLAGIVPEKLAMNKEKFGVKNTYNTKDGDKIPEGTYDVVVEAVGLPQTQEAAIEASARGAQVLMFGVGGPDAKFQMNTYEVFQKQLTIQGSFINPNAFEDSLALLSSGKLDVESLMSHELDYQTVDDFVNGKLGVVSKAVVKVGGEEA

SEQ ID NO: 1554 - protein, 157 aa, Zea mays
MAASDVEYRCFVGGLAWATDDHSLHNAFSTYGEVLESKIILDRETQRSRGFGFVTFSTEEAMRNAIEGMNGKELDGRNITVNEAQSRGGRGGGGGGGYGGGRGGGGYGGGGRRDGGGGYGGGGGYGGGGGGYGGGGGGYGGGNRGGGYGNSDGNWRN

SEQ ID NO: 1555 - protein, 406 aa, Zea mays
MSDQALFSNKRAPHDKPRAAVGRRRIQTESRRRHHYYHPRPNELLPTPTPAQSDPRTTPCARAASRPSSPARRAARAAARISPSPCPSARSPPPSPSRSLSRQPPPPPGGPPRRASPRPPPRRSSSSSRPPLAELERVRRVGSGAGGTVWMVRHRGTGRPYALKVLYGNHDDAVRRQIAREIAILRTAEHPAVVRCHGMYERGGELQILLEYMDGGSLDGRRIAAEPFLADVARQVLSGIAYLHRRHIVHRDIKPSNLLIDSARRVKIADFGVGRILNQTMDPCNSSVGTIAYMSPERINTDLNDGSYDGYAGDIWSFGLSILEFYLGRFPFGENLGRQGDWAALMCAICYNDPPEPPPTASREFRGFIACCLQKNPAKRLTAAQLLQHPFVAGPHPQPLAAPPPS

SEQ ID NO: 1556 - protein, 389 aa, Brassica napus
MGYIGAHGVAALHRHKSSGVGSLLPCQIRPPTFWNRFVKIFPLWMPPQHDNTYGVHVSHHICALRLCILTSVGFSSSSMVHLAHGLLLFLYQTFDAVDGKQARRTNSSSPLGELFDHGCDALACAFETMAYGSTAMCGRNTFWFWIISAIPFIGSTWETYFTNILTLPVVNGPTESPCTYILWSLLPQPLLVLNGGLSSWRVNPLFSWGAFLKEITTSRVVLITDGCFCCYTNTCIQRVQCIQSYTAKKRKHVCSIIMLFPFVGLLAGVLIWDYLSPTDLIRNYPHLVVLGTGLAFGFIVGRIILAHICDEPKGLKTNMCMSLLYLPFALANALTARLNNGVALVDEFGASWLLYIQQWHYNMHFATSVIHEITTALGIYCFRITRKEA

SEQ ID NO: 1557 - protein, 115 aa, Klebsiella pneumoniae
MKQLTVLGSTGSIGCSTLDVVRHNPGRFSVAALVAGKNVDRMVEQCLEFTPRYAVMDDAQSAERLRTRLHEHGSRTEVLSGQQAAAEVAALDEVDQVMAAIVGAAGLVPTLAAIR

SEQ ID NO: 1558 - protein, 925 aa, Medicago truncatula
MMELQVIRIFRLVVAFVLCLCIFIRSASSATKGFESIACCADSNYTDPKTTLTYTTDHIWFSDKRSCRQIPEILFSHRSNKNVRKFEIYEGKRCYNLPTVKDQVYLIRGIFPFDSLNSSFYVSIGVTELGELRSSRLEDLEIEGVFRATKDYIDFCLLKEDVNPFISQIELRPLPEEYLHGFGTSVLKLISRNNLGDTNDDIRFPDDQNDRIWKRKETSTPTSALPLSFNVSNVDLKDSVTPPLQVLQTALTHPERLEFVHDGLETDDYEYSVFLHFLELNGTVRAGQRVFDIYLNNEIKKEKFDVLAGGSKNSYTALNISANGSLNITLVKASGSEFGPLLNAYEILQARSWIEETNQKDLEVIQKMREELLLHNQENEALESWSGDPCMIFPWKGITCDDSTGSSIITKLDLSSNNLKGAIPSIVTKMTNLQILNLSHNQFDMLFPSFPPSSLLISLDLSYNDLSGWLPESIISLPHLKSLYFGCNPSMSDEDTTKLNSSLINTDYGRCKAKKPKFGQVFVIGAITSGSLLITLAVGILFFCRYRHKSITLEGFGKTYPMATNIIFSLPSKDDFFIKSVSVKPFTLEYIEQATEQYKTLIGEGGFGSVYRGTLDDGQEVAVKVRSSTSTQGTREFDNELNLLSAIQHENLVPLLGYCNEYDQQILVYPFMSNGSLLDRLYGEASKRKILDWPTRLSIALGAARGLAYLHTFPGRSVIHRDVKSSNILLDQSMCAKVADFGFSKYAPQEGDSYVSLEVRGTAGYLDPEYYKTQQLSEKSDVFSFGVVLLEIVSGREPLNIKRPRIEWSLVEWAKPYIRASKVDEIVDPGIKGGYHAEALWRVVEVALQCLEPYSTYRPCMVDIVRELEDALIIENNASEYMKSIDSLGGSNRYSIVMDKRALPSTTSTAESTITTQTLSHPQPR

SEQ ID NO: 1559 - protein, 246 aa, Tsuga canadensis
YTYNLRNKGPEDVIVRVIYCGICHSDLIQMRNEMGMSHYPMVPGHEVVGIVTELGSEVKKFKVGEHVGVGCIVGSCRKCGNCNESMEQYCSKRIWTYNDVNHDGTPTQGGFASSMVVDQMFVVRIPENLPLEQAAPLLCAGVTVYSPMKHFGMTEAGKRCGILGLGGVGHMGVKIAKAFGLHVTVISSSDKKKEEALEVLHADAYLVSKDAEKMQEAAESLDYILDTIPVAHPLEPYLSLLKTNGK

SEQ ID NO: 1560 - protein, 271 aa, Glycine max
SQTPLSGHTPVVCRKIHLTAISVVLSINPTSTIAHISGIGIKAIPSISHLSSLRAINLSNNFIGYISPGFLPKGIQTLNLSRNKISTIEGLRELTRLRVLDLSYNRISRIGQGLSNCTLVKELYLAGNKISDVEGLHRLLKLTVLDLSFNKIATTKALGQLVANYNSLQALNLLGNPIQSNISDDQLRKAVCGLLPKLVYLNKQSIKTQRGREILTDSVAKAALGNSSRTSYRRALKKGGGHGGSSSSVHRSSASVSQKIRNRSRSQTKHH

SEQ ID NO: 1561 - protein, 394 aa, Brachypodium pinnatum
EPARTEDPALSIAGAVQSQKLAVRAISRLQALPGGDVKLLCDTVVEHVRELTGYDRVMVYKFHDDEHGEVLAESRRTDLEPYLGLHYPATDIPQASRFLFRQNRVRMIADCHAAPVRVIQDPAMPQPLCLVGSTLRSPHGCHAQYMANMGSIASLVMAVIISSGGEDEHNMGRGAIPSAMKLWGLVVCHHTSPRCIPFPLRYACEFLMQAFGLQLNMELQLAYQLSEKHILRTQTLLCDMLLRDSPTGIVTQSPSIMDLVKCDGAALYYHGKYYPLGVTPTEVQIKDIIEWLTVSHGDSTGLSTDSLADAGYSGATALGDAVCGMAVAYITPSDYLFWFRSHTAKEIKWGGAKHHPEDKDDGQRMHPRSSFKAFLEVVKSRSLPWENAEMDAIH

SEQ ID NO: 1562 - protein, 519 aa, Pseudomonas fluorescens PfO-1
MGAGLPAKTAALTTSHPTGAQQCSHQAANIPDTTAFSSLRPANTKWHAHCTRPSPSFPNRSGSKHMNTQLKPTLGTLHLWGIAVGLVISGEYFGWSYGWGVAGTLGFLVTSFMVATMYTCFIFSFTELTTAIPHAGGPFAYSRRAFGEKGGLIAGLATLIEFVFAPPAIALAIGAYLNVQFPALDPKHAAVGAYIVFMGLNILGVKLAATFELIVCILAVAELLVFMGVVAPAFSFSNFALNGWAGSDVFGAPAIAGMFAAIPFAIWFFLAIEGAAMAAEEAKDPKRTIPKAYISGILTLVLLAMGVMFFAGGVGDWRTLSNINDPLPQAMKTVVGDNSGWLHMLVWIGLFGLVASFHGIILGYSRQFFALARAGYLPASLAKLSRFQTPHRAIIAGGVIGIAAIYSDGLINLGGMTLTAAMITMAVFGAIVMYIMSMLSLFKLRKSEPNLERTFRAPCYPLIPLIALVLAVVCLVAMAWFNALIGLIFLGFMAVGFGYFLLTGQLRANAPADAMLTGL

SEQ ID NO: 1563 - protein, 375 aa, Methanosarcina barkeri
MTQYKIPVLPGDGIGPEIIAEGRKVIDAAGERFGFDVEWIEYPQGADHYLETGELISEDTLKELSGYPAIYLGSIGDPRIAPGVLEKGILLTARFYFDEYVNLRPIKLLDGVWTPLKDKTSKDIDFVVVRENTEDFYVGVGGRAKKGASKDLLEVKRTLYSAKFGLDIETDSEEIGYQIGLISKEGTDRVIEYAFDLAENRRKHVSSVDKANVLSDIYGFWREEFNAISAKHPGVTTDFNFVDAVTMWFVKNPEWFDVVVTPNMFGDIITDLGAMIQGGLGLAPGGNINPTGTSMFEPIHGSAPKYKGQNKVNPIATIWAGAMLIEHLGEKEAADTIVNAIQKNILDSKVKTYDMGGKSTTSDVGDDIARIIKGE

SEQ ID NO: 1564 - protein, 250 aa, Zantedeschia aethiopica
MGKSYPAVSEEYQTAVGKAKRKLRALIAEKNCAPLMLRLAWHSAGTYDVSTRTGGPFGTMRFQAELAHGANNGIDIAVRLLEPIKEQFPILSYADFYQLAGVVAVEVTGGPEIPFHPGREDKPAPPVEGRLPDATKGSDHLRQVFSQQMGLNDQDIVALSGAHTLGRCHKERSGFEGAWTTNPLIFDNSYFKELLSGEKEDLLQLPSDKALLSDPVFRPLVEKYAADEDAFFADYTEAHLKLSELGFAEC

SEQ ID NO: 1565 - protein, 391 aa, Triticum aestivum
MTRDGVPPAAPAGGGAGDGPRRCSQCGHHGHNSRTCTARPVKLFGVRIGDKPIRKSVSMGNLAQLAEGSGGARAEGYGSEGDDDKPHRKRGESWSEEEHKNFLLGLNKLGKGDWRGISRNYVVSRTPTQVASHAQKYFIRQTNVNRRKRRSSLFDMVIEDPGDQPLSRSSSQEMPLSRSSSQDVEEFVDDLRPVTAPVTPPAPMPVITSVSVPPPVPVMAPPAPVPMLTYASAPSPVLAMAHQPQGNESAGSSSIAGEAGMVMPQVMPPYGYPPPMMIPAPHYVQAVFPYPYYGYAPMFYGPPVSMQASSPVTVQASHEPVRPVAVHSAPPVNVEDLYNMSKLNLKGDSSTSGVAPNLALPPNPNGRPERQSAFHGKGAENGSSNGLIPTK

SEQ ID NO: 1566 - protein, 405 aa, Shewanella oneidensis MR-1
MSVDMKLNRAQFDAVMVPNYAPAAVIPVRGEGSRVWDQEGNEFIDFAGGIAVNCLGHCHPALVNALKTQGEKLWHLSNVMTNEPALELATKLVNSTFAERVYFANSGAEANEAALKLARRYALEKHGVEKDEIIAFDKAFHGRTFFTVSVGGQAAYSDGFGPKPQSITHLPFNDVAALEAAVSDKTCAIMLEPLQGEGGIIDADPAFLKAVRELANKHNALVIFDEVQTGVGRTGELYAYMGTDIVPDILTTAKALGGGFPIAAMLTTTEIAEHLKVGTHGSTYGGNPLACAIGNAVLDVVNTPEVLNGVKHREQLLRDGLNKINEKYHVFSEVRGKGLLLGAVLNEQYQGRSRDFLVASVAEGLMSLMAGANVVRFAPSLVIPEADIAEGLARFERAVASIAAA

SEQ ID NO: 1567 - protein, 342 aa, Eucommia ulmoides
MSDLKSKFLEVYSVLKSELLNDPAFDFTDDSRLWVERMLDYNVPGGKLNRGLSVIDSFKLLKEGKEPTDEEIFLACVLGWCIEWLQAYFLVLDDIMDSSHTRRGQPCWFRLPKVGMIAVNDGLILRNHIPRILKKHFKGKPYYVDLLDLFNEVEFQTASGQMIDLITTLVGEKDLSKYSLPLHHRIVQYKTAYYSFYLPVACALVMSGENLDNHVDVKNILVEMGTYFQVQDDYLDCFGDPKFIGKIGTDIEDFKCSWLVVKALELANDEQKKLLHENYGKEDPECVAKVKKLYETLNLQDVFGEYERQSHGKLIKAIEGHSNKAVQFVLKSSLEKIYQRQK

SEQ ID NO: 1568 - protein, 351 aa, Oryza sativa (japonica cultivar-group)
MYGWEMLSFNIHDGFLEAIVRGNRSGLLTAADYNNLCQCENLDDVKMHLTATEYGPYLQNEPSPLHTTTIVEKCTLKLVDEYKHMMCQATEPLSTFLQYITYGHMIDNVVLIVTGTLHERDVNELLEKCHPLGMFDSIASLAVAQNMRELYRLVLVDTPLAPYFSECITSEDLDDMNIEIMRNTLYKAYLEDFYKFCEKLGGATAEIMCDLLSFEADRRAVNITINSIGTELTRDDRRKLYSNFGLLYPYGHEELAVCEDVDQVRGVMEKYPPYQAIFAKISYGESQMLDKAFYEEEVRRLCLSFEQQFHYAVFFAYIRLREQEIRNLMWISECVAQNQKNRVHDSVVFIF

SEQ ID NO: 1569 - protein, 274 aa, Streptococcus pneumoniae TIGR4
MVRQQSVAIIERFGKYQKVANSGIHIRLPFGIDSIAARIQLRLLQSDIVVETKTKDNVFVMMNVATQYRVNEQSVTDAYYKLIRPESQIKSYIEDALRSSVPKLTLDELFEKKDEIALEVQHQVAEEMTTYGYIIVKTLITKVEPDAEVKQSMNEINAAQRKRVAAQELAEADKIKIVTAAEAEAEKDRLHGVGIAQQRKAIVDGLAESITELKEANVGMTEEQIMSILLTNQYLDTLNTFASKGNQTIFLPNTPNGVDDIRTQILSALRAEKK

SEQ ID NO: 1570 - protein, 385 aa, Staphylococcus xylosus
MSNMQQTTGYVYANELLQYRFSNKHPFNQMRLKLTTELLMELGQLKQHHIISPRIATDDELSLIHAYDYIQAIRHASHGILSENEAKKYGLDGEDTLQFRMMHKHSARIVGGALNLADQIMSGTLTNGCHLGGGLHHSLPGRANGFCIYNDVAITISYLMQKYNQRVLCIDTDAHHGDGTQWSFYTNDQALIYSIHETGKFLFPGSGHYTERGAEKGFGYTVNIPLEPYTEDQSFLDVFKQTIEPVVASFKPDIIVSVHGVDVHYLDPLTHMSCTLNTLYEIPYIVKSLADTYTQGKVIMFGGGGYNIWKVVPRAWSHVFLALIGEQPPTGSLPERWLTKWQPYATCTLPTNWSDDKENYIEIPRRKEISEINMKQAQKVLSWFE

SEQ ID NO: 1571 - protein, 388 aa, Drimys winteri
PMTAAGALQSYKLAAKAIARLQSLPGGSLKRLIDTVVLEVFELTGYDRVMAYKFHEDDHGEVISEVTKPDLEPYLGLHYPATDIPQAARFLFMKNKVRMICDCNAKPVKVYQDEKLTFDLTLCGSTLRAPHSCHLQYMENMGSIASLVMAVVINEREEQDENSGSEQQREQPRRKRLWGLVVCHNTTPKFVPFPLRYACEFLAQVFAIHVNKELELENQIQENNILRTQTLLCDMLMRAALLGIVTQSPSILDLVKCDGASLLYQNKIWRLGVAPTESQILDIALWLSEYHMDSTGLSTDSLQDAGHPGALSLGDVVCGMAAVRINSKDTLFWFRSHTAAEIRWGGAKHDPNQKDDGRKMHPRSSFKAFLEVVKTRSSPWADYEMDAI

SEQ ID NO: 1572 - protein, 374 aa, Zea mays
  unsure (1)..(374): unsure at all Xaa locations
MLLLIYFLFLQPGTEYVRTPCSAAPQRTREAEERYRTEISPPPFPPPLWSLAASYSSPPAAIGPRDAPLHCLSCCSTPRTDHLAPSACSRAGTKDGSTGHPWGTQKRSRYLVAAMDHGGGGVGGSGIWIRAAVAVAAGAAIAARAVRRKSVDSSAVFVGVPAMVAHTVAGYRFAGLLLVFFFTSSRVTRVGEARKRALDPEFKEGGQRNWKQVLSNSGIASILVVLIASVTGGTDRCLDSKESTLVTALIGGVIGHYACCNGDTWSSELGILSKAEPRIITTFKRVRKGTIGGVTIDGLLAAAAGFLIGLAFVLIGFFTTQCDPDVFWNQLLAIPLXTAAALCRSLIDSFLSATVQYSGFYSVRKKVKPTNFNI

SEQ ID NO: 1573 - protein, 380 aa, Listeria monocytogenes EGD-e
MKKIILLGATGSIGTQTLAIIRENPEKFQVVALSFGRNMERGRAIIKEFKPKMVAVWHTRDRVTLEAEFPNVKFFNGLEGLREVATYLDGDVLLNAVMGSVGLLPTLDAIEAGKAIAIANKETLVTAGHLVMRAAKEKNISLLPVDSEHSAILQALNGENTERIEKIILTASGGSFRDKTREQLSAVTVKEALKHPNWNMGNKLTIDSATMFNKGLEVMEAHWLFGVDYDDIEVVIQRESIIHSMVQFVDGSFIAQLGTPDMRMPIQYALTYPDRLYIPYEKEFRITDFSALHFEKVDYERFPALKLAYNAGKIGGTMPTVLNAANEIAVAGFLNGQVAFYNIEALVENAMNRHTSISNPDLDTILQVDQETRAYVKTLL

SEQ ID NO: 1574 - protein, 545 aa, Solanum tuberosum
MPMDTETKQSGDLIFRSKLPDIYIPKHLPLHSYCFENLSEFNSRPCLIDGANDRIYTYAEVELTSRKVAVGLNKLGIQQKDTIMILLPNCPEFVFAFIGASYLGAISTMANPLFTPAEVVKQAKASSAKIIITQACFAGKVKDYAIENDLKVICVDSAPEGCVHFSELIQSDEHEIPDVKIQPDDVVALPYSSGTTGLPKGVMLTHKGLVTSVAQQVDGENANLYMHSDDVLMCVLPLFHIYSLNSVLLCALRVGAAILIMQKFDIAQFLELIPKHKVTIGPFVPPIVLAIAKSPLVHNYDLSSVRTVMSGAAPLGKELEDAVRAKFPNAKLGQGYGMTEAGTVLTMCLAFAKEPFDIKSGACGTVVRNAEMKIVDPDTGCSLPRNQPGEICIRGDQIMKGYLNDPEATARTIEEEGWLHTGDIGFIDDDDELFIVDRLKELIKYKGFQVAPAELEALLINHPDISDAAVVPMIDEQAGEVPVAFVVRSNGSTITEDEVKDFISKQVIFYKRIKRVFFVETVPKSPSGKILRKDLRARLAAGISN

SEQ ID NO: 1575 - protein, 95 aa, Fagopyrum esculentum subsp. ancestralis
GRLYEYANHSVKATIDRYKKACSDSAGVTSVAEANAQYYQQEAAKLRNQIRTLQNNSGNLSRHMMGEGLSNLSMKDLKNLETRLEKGISRIRAKK

SEQ ID NO: 1576 - protein, 244 aa, Oryza sativa
  unsure (1)..(244): unsure at all Xaa locations
YPPLAMAAASLAPPTASFSPAPAPGRVKAAAPLLSRRPPGRFLLRVASESSSISGDTLLGLYEKERLSHSLYANEDYDKEMFWDNLDADLRYWTRSLRPVQWYPGHIAKTEKELKEQLKLMDVVIEVRDARIPLATSHPKMDAWLGNRKRIIVMNREDMVSNEDRNAWASYFANQGTKVVYSNGQLGMGTMKLGRMAKSLASTVNTKRREKGLLPRAVRAXGIVGYPNVAKSSLXINRFLKRGX

SEQ ID NO: 1577 - protein, 180 aa, Rhizobium gallicum bv. gallicum
EFDAFPALEQLPLWGFDGSSTMQAEGRSSDCVLKPVAVYPDPARTNGALVMCEVMMPDGVTPHPSNSRATILDDEDAWFGFEQEYFFYENGRPLGFPEQGYPAPQGPYYTGVGYKNVGSVAREIVEEHLDLCLAAGINHEGINAEVAKGQWEFQIFGKGFKRAADQIWMARYLLLRLCEK

SEQ ID NO: 1578 - protein, 463 aa, Listeria monocytogenes EGD-e
MNSLFRRKPIEDLMHNKSGSTHLKQTLGPLDLTLLGVGAIVGTGIFILPGTVAAKNAGPAIIFSFVIAAIVCAIAAMCYSEFASSVPVAGSAYTYGYVVFGELIGWLLGWALILEYGLAVASVASGWSSYLNALLSGFHISIPEAISGPFNPEVGTFINLPAIIIVLVIAFLLTLGIKESTRVNTIMVVIKVGVILLFLVVGVFYVKPDNWQPFMPFGISGVMNGAALVFFAYLGFDAVSSAAEEVKDPQRTMPIGIIGSLLICTVLYVAVSAVLTGMVPYTDLNVTDPVAYALQVINQDWVAGIVSLGAVVGMITVILVMSYGATRLIFAMGRDGLLPKVLAEINQKYQTPVKNTWIFAVIVAIISGLVPLDRLAELVNIGTLLAFMMVSIGIIFLRKNKDIQARGFKVPLYPVLPIVSFLLCAFLISRLSVHTWILCGIWFVIGLIVYFAYGRKHSELLKK

SEQ ID NO: 1579 - protein, 201 aa, Oryza sativa
  unsure (1)..(201): unsure at all Xaa locations
MAAPDVEYRCFVGGLAWATDDRSLEAAFSTYGEILESKVRWIPSSLCFFLMRFGGGVRQIWLRKSDYGGGYAVQIINDRETGRSRGFGFVTFSNEQAMRDAIQGMNGKELDGRNITVNEAQSRRSRSGSGGGYCHPGGSGSYRGGGYGGGGGGGGYGQRRESGYRGGGGYGGGRGGGGYGGGTAVXYGSRGGGNSDGNWRN

SEQ ID NO: 1580 - protein, 296 aa, Zea mays
  unsure (1)..(296): unsure at all Xaa locations
MMRETYMDVLPPVDHIAARSNWFPAAARLWTAAENKQFERALAGLDLCRPDWEEVARAIXPGRTVREVVSHFKHLEVDVQQIESGQVPLPAYGGGASSFTLQWDGYGPGPGDFRHGYRFAGGCGRRHHGRTPEQERKKGVPWTEEEHRLFLLGLKKYGKGDWRNISRNFVQTRTPTQVASHAQKYFIRLNSGGKDKRRSSIHDITTVNLTDDQPPSPSQSSLITSQSNAPATAPAAGICQVPLAADAKRHGAGTLPFSSPNRTSAAPAYRMEFHDQQGLQCGPLHDQLLASQSVLF

SEQ ID NO: 1581 - protein, 451 aa, Alnus glutinosa
MTSLQYFSLNRPVFPATHLHRPGIRHLQVSACANVEVQAPSSVKKQGVSKEVMEAAGRVLVGTYARVPVVLSRGKGCKLYDPEGREYLDLSAGIAVNVLGHADSDWLRAVTEQAATLTHVSNVFYSIPQVELAKRLVASSFADRVFFSNSGTEANEAAIKFARKFQRFTRPDEKQPATEFVSFSNSFHGRTMGSLALTSKENYRSPFEPVMPGVTFLEYGNIEAATQLIQRRKIAAVFVEPIQGEGGVYSATKEFLYALRKACDDSGTLLVFDEVQCGLGRTGYLWAHEIYDVFPDIMTLAKPLAGGLPIGAVLVTERVASAITYGDHGTTFAGGPLVCKAALTVLDKILRPGFLASVSKKGHYFKEMLINKLGGNSHVREVRGVGLIVGIELDVSASPLVNACLNSGLLVLTAGKGNVVRIVPPLIITEQELEKAAEILLQCLPALDRHG

SEQ ID NO: 1582 - protein, 146 aa, Sorghum bicolor
KKHVMSERKRREKINEMFLILKSLVPSIHKVDKASILTETIAYLKELQRGVQELESSRELTTPSETTTRTTRPRGISNESARKKLCAGSKRRPSPEVGGDVVNKEHPWVLPKDGTSNVTVTVANTDVLLEVQCRWEELLMTRVFDA

SEQ ID NO: 1583 - protein, 311 aa, Zea mays
MGDWDPRGRPGSLWHPRGRPPAHTQSHTHRPPSLVLGSPCYLAFTDLPLPNRTVTSRRPGAVVLRLVAARRWWRAADRIEQRMDGGGGLGGLRWTAEEASTIGGIATVSLLHSFIPTHWLPFSIVARAQRWPLSRTLLVTAFGGVLHVVSTALLGITAVTMANTIAGEETVHKLASLLLIFLGASYILLFALGKGGHSHAHNHPMEKMAVAGLVLVPALSPCATTLPVFLAVGNSSSMMILAIIVLLFSTITVMTSLVALSFYGASQIKFHWVERYDKILVGTVLCLVGVLTYVFHHHDGDEHVHQKLVSP

SEQ ID NO: 1584 - protein, 431 aa, Brassica rapa
ENSCTLSFLLVFFVMILFHPALSIYINTLSATESLTISSKRTLVSPGNVFELGFFKTTLSSRWYLGIWYKKLSNRTYVWVANRDNPLSNSIGTLKISNMNLVLFDHSNKSVWSTNLTRENARCPVVAELLANGNFVMRDSNNNDASGFLWQSFDYPTDTLLPEMKLGYDLKTGLNRFLTSWRNSDDPSSGEFSYQLDTQRGMPEFYLLKSGLRAHRSGSWNGVQFSGIPEGQNLSYMVYNFTETSEEVAYSFRMTNNSIYSRIQISSEGFLERLTWTPNSIAWNLFWSSPVEPKCDVYKACGPYSYCDLNTSPVCNCIQGFKPLNVQQWDLRDWSSGCIRRTQLSCSGDGFTRMRRMKLPETTKAIVDRSIGVKECEKRCLSDCNCTAYANVDIRNGGTGCVIWTGALEDIRTYFAEGQDLNVRLAPADLV

SEQ ID NO: 1585 - protein, 1074 aa, Neurospora crassa
MNCPSRNDDAELEHPFWNQQPHYLAADLTTRQDLNGIANSRVHRHGSQGSEVGVCALNHHAGGGIRLHEADRRPQVPPDRNNNSAGRRSLDPAPQKPPAAGGEDRACRTRTSVAPLLRSAAGSAVPGWVTWVLSVVVTSLIMSTIMTRQQHGNDRQIQVDAALHVSAVAEPGTSQVLKRASTCPKGGVSDEELYNTAFHGAALAIIFGVSFLACAFPVLMTRFPMIRLPPVFFFAVRHFGTGVLIATAFVHLLPTAFISLSNQCLDRFWTQQYPAMPGAIALAAIFMVTIVEMVFHPGRHVHHGSHEQEQISGAPAQSNTNDESIDPLSRLPSNARAPDDTTNNLPSRPKGALRGRAHSIGRRLSHVSRQGQDPHDRDAVLPALPSEDYYLDTTTPKFNKEIFQSDLTLSSPSTQQLESQLPHDGYMYLTAEMKRRKETMQCVLLECGILFHSVFIGMALSVSVGTDFVVLLIAIAFHQTFEGLALGSRIASITWPEGSKQPWFMALAYGCTTPIGQAIGLATHRLYSPESEVGLILVGTMNAISSGLLVFASLVELLSEDFLSDESWRTLRGKRRAAAFPAAWLLAPSGRKSVDPTSAAGPAFQPILGGSKSNTHCNIPLDPQGQTVRNMDQLKHTLAGLGEFAKENLPPQVTGTVTDLTSSVRSRLTLGSRRRTQPIDDEEAGDIIPLDAHAGGGHSTCKHGPQLRVSPALQSFIARNHILSSGETVADLLAKSHIAVPREVINRDYPLPEYFVSSSHNTYLCAHQLFGESSTDPYRHTLQAGSRCVEIDVWDNPDNLDEPKVTHGYTLVSNIPFREVCKIILQVVEEEEESGGGGGGGAPVLISLENHCGAQGQEALVRIMKEVWGRHLLDKPVETESHIEQDQHVRLRDLGSKIVVIVEHHLVNEASSDSSSDSSSEDEAEKKERKQRKQAKKDTPEAKLIIPSLAELGVYGQSVKPPDNSWFTSSDLLPSRDGPHHHLINVSESGLNALLSSGNGASIAKHNARHLMRVFPKGTRISSKNLKPLPFWGLGAQRGDGGISRKRVSRASGEDETQETIELGGGGRVGCSRS

SEQ ID NO: 1586 - protein, 501 aa, Solanum chacoense
MQLISIFLFICFLFLLRKWKKYSKNSQTKKLPPGPWKLPFIGSMHHLAGGRPHRVLRDLAKKYGPLMHLQLGEVSAVVVTSPDMAKEVLKTHDIAFASRPKLLAMDIICYDRCDIAFSPYGEYWKQMRKICVTEVLSAKSVRSFSSIRCDEVVRLIDSIQSSSSSGELVNFKERVIWFTSSMTCRSAFGQLPKEQDMFIKLIREVIRLAEGFDVADIFPSYKFLHVFGRAKRKLLNVHRKVDAIVEDVINEHKKNFATRKNDDHALGGENLIDVLLKLMNDKSLQFPINNDNIKAIIIDMFAAGTETSSTTTVWAMVEMLKNPRVLAKAQAEVREAFRNKVTFDENDVEDLKYLKLVIKETMRLHAPIPLLVPRECRKETEINGYTIPVKTKVMVNVWALGRDPKYWDDVECFKPERFEQCSIDFIGNNFEYLPFGGGRRICPGTSFGLANDYLPLAQLLCHFDWKLPTGMEPKDLDLTELAGMSAASKDDLYLIATPYQP

SEQ ID NO: 1587 - protein, 447 aa, Sesamum indicum
MASWVLSECGLRPLPRVYPKPRTGHPLLNSNPTKLRFSRTDLGNGSSFCLSSGILREKNWALRVSAPLRVLQVEEEEENKEGERVINGGEEFDPGAPPPFKLSDIREAIPKHCWVKDPWRSMGYVVRDVAVVFGLAAVAAYFNNWVVWPLYWFAQSTMFWALFVLGHDCGHGSFSNDPKLNSVVGHILHSSILVPYHGWRISHRTHHQNHGHVENDESWHPLSEKIYKNLDTATKKLRFTLPFPLLAYPIYLWSRSPGKQGSHFHPDSDLFVPNEKKDVITSTVCWTAMLALLVGLSFVIGPVQLLKLYGIPYLGNVMWLDLVTYLHHHGHEDKLPWYRGKEWSYLRGGLTTLDRDYGWINNIHHDIGTHVIHHLFPQIPHYHLIEATEAAKPVLGKYYREPKKSAPLPFHLLGDLTRSLKRDHYVSDVGDVVYYQTDPQLTGAEKS

SEQ ID NO: 1588 - protein, 231 aa, Haemophilus influenzae Rd
MQQYIIYLYTFLTIFGFWLALQISKRWKSMIFNTFVLTVLILAAILVIGKIPYDDYMAGNAPINNLLGLSIVALALPLYEQLRQIARQWKIILSTVVIASFLAMLSGGLLALLLGSTPEMVATVLPKSITMPIAMEVSRHLGGIPAVTAVGVVVAGLQGSIFGYLVLKKLGVKHQEAIGLSVGSVSHALGTVSCMETNPTAGSYSSISLVLCGIISSILAPFVFKLIYFFV

SEQ ID NO: 1589 - protein, 533 aa, Triglochin maritimum
LITILPSVLPNIHSSATLFLLLLMTTALSFLFLFKQHLAKLTKPKSTTLPPGPRPWPIVGSLVSMYMNRPSFRWILAQMEGRRIGCIRLGGVHVVPVNCPEIAREFLKVHDSDFASRPVTVVTRYSSRGFRSIAVVPLGEQWKKMRRVVASEIINAKRLQWQLGLRTEEADNIVRYITYQCNTSGDTSGAIIDVRFALRHYCANVIRRMLFGKRYFGSGGVGGGPGKEEIEHVDATFDVLGLIYAFNAADYVSWLKFLDLHGQEKKVKKAIDVVNKYHDSVIDARTERKVEDKDPEDLLDVLFSLKDSNGKPLLDVEEIKAQIADLTYATVDNPSNAVEWALAEMLNNPAILQKATDELDQVVGRHRLVQESDFPNLPYIRACAREALRLHPVAAFNLPHVSLRDTHVAGFFIPKGSHVLLSRVGLGRNPKVWDNPLQFNPDRHLHGGPTAKVELAEPELRFVSFTTGRRGCMGGLLGTAMTYMLLARFVQGFTWGLHPAVEKVELQEEKCSMFLGEPLRAFAKPRLELLQSF

SEQ ID NO: 1590 - protein, 326 aa, Glycine max
MFAFALASVVLIIGWLMDLCFLCFNTYMSHLFPDLHSIGGLVPLLGYLKNSHANIRAMAADVVTTIVQNNPRSQQLVMEANGFEPLISNFSSDPDVTVRTKALGAISSLIRHNRPGITAFRLANGYAALKDALASENVRFQRKALNLIHYLLHENNSDCNIVNELGFPRMLMHLASSEDSDVREAALRGLLQLARDPQDGKDGNEEDSEKMKQLLQERINNISLMSAEDLGVVREERQLVDSLWSTCFNEPSSLREKGLLVLPGEDAPPPDVASKFFEPPLRSSTANPSSKKDSNNEKKEIPLLLGSGPSLADTNNQGSNRENANS

SEQ ID NO: 1591 - protein, 334 aa, Zymomonas mobilis
MILPIKARCLNMEYKNSRLSAILKIQYPLIQAPMSWITNADFVAAVSEAGGLGVLGPHAGYHTPPKDPQEILDRVRLEIRKVKSLTDKPFGLNLLLLKDDPLDDFTKAWLNIAFEEGVTHFVSVGNADNRVFNLIKEHDGIIIHRPLTASITNMREAESLGADVLVATGYDEGGMIPTRAIGTFTVVPTMVDAVDIPVMATGGINDRRGVKAAFALGAEGVYIGTRFIVTKENPASEITKKKIVESGCDDIEFVSPKQRSIRTQAADILGSLYLNKENTLDLDTEISRLGGVRPAMLEGKLDEGIISVNTGIDVIRSIPTVKELVIDLLGLNEE

SEQ ID NO: 1592 - protein, 294 aa, Glycine max
MPLSSSSSSAVDSAVSGEIMLFGVRVVVDSMRKSVSMNNLSQYELPRDAANAKDDAAGYASADDAAPINSDKNRDRKRGIPWTEEEHKLFLVGLQKVGKGDWRGISRNYVKTRTPTQVASHAQKYFLRRTNLNRRRRRSSLFDITTDSVSTTPMEEGVQIQHQDNVSLFHPVYPVTPEGSNMNGFPKMSMYPKDVGSGVMSVQAGNPMETLTLGQGNVEQNGPSTKLVCTTPIVPDHRGSTVSDITASLSSIDPPTLSLGLSLSSSPRQTSSSIHAALHALPYFNNQDSIISAA

SEQ ID NO: 1593 - protein, 362 aa, Neurospora crassa
MAPTHNKTLVFKKIPEGYPVPGEHIVIEDRGFDPDAAPPPGGMTVSILWASFDPYQRGRMRDASVKSYAPAYQLGGPVTNDTVAKVLKSDNPDYQPGDLVVAHLPIAEYAALTKTEVGSVMGGIVGQVVQTKIDNKYGFKDLGLFLGPLGMPGLTAWSSYKEIGQPKAGETIFISSAAGAVGQVVGQIAKREGLKVIGSVGAGEKLDFIINELGFDGGFNYKKEKPLDALKRLAPQGIDIYYENVGGEHLDAALECLNTFGRIVACGMISQYNVKPGEAYGVKNLIQVVAKRLTMRGFIVFDKDFGPKYAKEHQEQLSKWIAEGSVKFKLHVTEGIDNAPKGLVGIFKGENFGKAVLHIKDE

SEQ ID NO: 1594 - protein, 661 aa, Brassica juncea
MQIAVLPIGKFMARTLPTTSHRLMGWEWSLNPGPFNIKEHIIITIFANCGVAYGGGDAYSIGAITVMKAYYKQSLSFICGLFIVLTTQILGYGWAGILRRYLVDPVDMWWPSNLAQVSLFRALHEKEHKSKGLTRMQFFLVALGASFLYYALPGYLFPILTFFSWVCWAWPNSITAQQVGSGYHGLGVGAFTLDWAGISAYHGSPLVAPWSSILNVGVGFIMFIYIIVPVCYWKFDTFDARKFPIFSNQLFTSAGQKYDTTKILTPRFDLDINAYNNYGKLYLSPLFALSIGSGFARFTATLTHVALFNGRDIWRQTWSAVKTVKLDIHGKLMQRYKQVPEWWFYVLLVGSVALSLLMSFVWKESVQLPWWGMLFAFAMAFIVTLPIGVIQATTNQQPGYDIIGQFIIGYILPGKPIANLIFKIYGRISTVHALSFLADLKLGHYMKIPPRCMYTAQLVGTVVAGVVNLGVAWWMLESIQDICDIEGDHPNSPWTCPKYRVTFDASVIWGLIGPKRLFGAGGMYRNLVWLFLIGAVLPVPVWAMSKIFPDKKWIPLINIPVISYGFAGMPPATPTNIASWLVTGTIFNYFVFNYHKRWWQKYNCVLSAALDAGTAFMGVLLFFALQNAGHDLKWWGTEVDHCPLASCPTAPGIIAKGCPVF

SEQ ID NO: 1595 - protein, 861 aa, Oryza sativa
  unsure (1)..(861): unsure at all Xaa locations
MWPVRPCYSATARKLAVVVLSEGPIGLAGQTEVEWPVRPALARSDRHRLGLTDYGSVGFVSAIPSSTIPASTGXRPPLCVRSDRPXXTRQSDRHYVAGLTAPDQAEPSEYKGSPRDPPAIRLGAPDQGAVKVRCAVGPDGMTSSSRVSVFASGKKNRGRMNVWGKEFLENDEGLEPPLEDDLVDLNNRGMDNQGQSTQHTPPSYACRDVRRDRDDDRVYGGNVPHPPPPSGRSRSTWTGRLSRFAPAHALDEAADLSTRANPRAAALQNGSLDRSPVPRRVRTRATVTRYGSSPIGRLDSRDRQTIDACTLSVKPTAACVLPSHARHEVRKSNPRADARPTRNTWTARIPRPRPVTDAKTPSRLVHSNPSKPKPPNSDRANRDSRHHQTRRHDTLRPKSYTARRDLVQQTQRKHSLDRHMPTPRPRHRHHALPLALALAAPLLLLAAADGQPNESRDKNNGGGGGGFMAPSGGGGGMGSQSPSFSAPMVVLLVALIAAFFFIGFFSIYIRRCGGEASTGPTIPAAALAALSRQEQRSRRQRGLDPAVVESFPTMKYAEARELRDGGKDAVLECAVCLSEFDDDEELRLLPKCSHAFHPDCIGEWLAGHVTCPVCRCNLAPDAAAAEANVVSGEVDGEQQEEEVVVAIDVDREGEEEDEERRREAMELERIGSQRRAVRSRSGRPLPLPRSHSTGHSLATTRLGDAGDLERFTLRLPEHVRREMVAAAGEESLRRTAVREGRVGGGARSARIGRSDRWPSFIARTFSSRIPFWSASRRVLDAAEAGADAAATTTTTTPTSTARTKRDKTAAAADGSVSSAKGSVRFDCLGGGGGGGGPSNRVVAFANDDEEDDDEKPIARQV

SEQ ID NO: 1596 - protein, 219 aa, Glycine max
  unsure (1)..(219): unsure at all Xaa locations
RTLRSGCVPVPQTHVLLSSAWLDQHCLSHSVANILLQMQSIGYHPDCGTCNYLLSSLCAVDQLEEAVKVLRGMGGAGCIPDSSSYGAVIGAMCRVRKTAKALDLMKQMVVQYGLTPGQGTLVKLLAALRANREIWKAVEMIEFLEKEGNSVGFRGYELVIEGCLEKREYVLAAKVATGMTERGFIPYIRVRXKIIXSLASIDKWNLACAVKQKFAALKS

SEQ ID NO: 1597 - protein, 372 aa, Triticum aestivum
  unsure (1)..(372): unsure at all Xaa locations
MAAIISRRGAARALALAMARRGMCSAPAPAAALSSEELIRMEQDCSAHNYHPIPMVFSKGEGSHILDPEGNKYIDFLSAYSAVNQGHCHPKVLRALIEQAERLTLSSRAFYNDKFPVFAQYLTSMFGYDMMLPMNTGAEGVETAIKLARKWGYEKKNIPKNEALIVSCCGCFHGRTLGVISMSCDNDATRGFGPLVPGHLKVDFGDIDGLEKIFKEHGDRICGFLFEPIQGEAGVIIPPDGYLKAVRDLCSRHNILMIDDEIQTGIARTGKMLACDWEDVRPDMVILGKALGAGVVPVXSAVLADKEVXLCIKPGEHGSTFGXGNPLASAVAVPSLRVVKDEGLVERAAVGRQAFTFQSQQIPQITRNTGKL

SEQ ID NO: 1598 - protein, 279 aa, Zea mays
MGPINGRRRRRLLLLAAVALAGAAVDAQPDYFNPKNFNPSMAIVMVVLVTAFFLLGFFSIYLRRCAGPPLGGPDDHYHVRQLGLGLGNNSYAPPPSRRMRGLDRAVLDSFPTMAYADVRAHKGALECAVCLSEFDDGDTLRLLPRCAHAFHTDCIDAWLASHVTCPVCRAILLVPDAAEPTALAAAPVTAAPDDDHAVVVDAAAAAGETEDQRLREGGGRRAAADRQRQARAAKQQVAVPALAHHGPLNFRRVAAWLRSSFTPSGRVLYSFFLQQKACT

SEQ ID NO: 1599 - protein, 310 aa, Mesorhizobium loti
MVAKCLVLGGGGFIGSNICRRLSAEGLSVTAFGRRKGIAPLPREIAWFEGDFRDNLAVTKALQSHDTVIHLVHSTWPSTADADMAADIRDSVIPSVELLDACVRSGVKRIIYFSSGGTVYGEVDEIPIREDSPTNPVGAYGVSKLMIEHYVRLYERKYGLNSFIVRLANPFGPWQVEAHNQGLVAFAGHLIQSDRQVTVYGDGSARRDYVYVEDVANFVARLINYNGAKRTFNVGGGGNGQSILDVIHAIETSLGKRAMIKREPSRPFDVPSNVLSIERAEKELGWRPATSFPDGIDYTLSWQREFYARP

SEQ ID NO: 1600 - protein, 195 aa, Zea perennis
APLDKVCILSCGISTGLGASINVAKPPKGSTVAVFGLGAVGLAAAEGARIAGASRIIGVDLNPSRFEEARKFGCTEFVNPKDHIKPVQEVLAEMTNGGVDRSVECTGNINAMIQAFECVHDGWGVAVLVGVPHKDAEFKTHPMNFLNERTLKGTFFGNYKPRTDLPNVVELYMKKELEVEKFITHSVPFAEINKA

SEQ ID NO: 1601 - protein, 345 aa, Burkholderia fungorum
MTRSNAFRGHILDYQISVADSDIAFHCEAGETVLDAAERSGYSVPYSCRKGVCSTCEGGVVAGAGRSSVQGDVQGPAGHVLLCCLRPSSDMTIAPRKIDRREPVVRKTLDMSVYRITQPAADVSIVQLRLPTGVRAKFRAGQYLQIELEDGSRRNYSMANPPHESDSIQLHVRHVPGGRFSEGMLRRLDKGHKLRVELPFGEFSLQDDSTKPVILLATGTGFAPVKSIVEDAIKRRLDRPLTLYWGARRAEDLYLAELAQKWHDSGKLKFVPVLSEPNADWNGRRGFVHETVLEDFGSLDGYQVYACGNPAMTTAAHESFLKAGLPDDDFFSDAFVHTDTAPAMT

SEQ ID NO: 1602 - protein, 192 aa, Streptococcus agalactiae NEM316
MSNLDILYCKLAMCTTLLTERLRLQPVDLSNINDFLEFSSDSETVFYMQRYKANTTEEAQMVLANVCMKSPLGIYAMIETESNKMIGIIELEIRDEFSAEFGYILNKNYSGKGYMTEACSKLMSVGFEYLDLERIYARFDINNKKSGNVMERLGMKKEGELRHLAKNPKGEWKTRAYYSILKEEYFNKVNTK

SEQ ID NO: 1603 - protein, 242 aa, Panax ginseng
MSFYDDQSGNLSPQRKLGRGKIEIKRIENTTNRQVTFCKRRNGLLKKAYELSVLCDAEVALIVFSTRGRLYEYANNSVKGTIERYKKACTDSPNTSSVSEANAQFYQQEASKLRQEISSIQKNNRNMMGESLGSLTVRDLKGLETKLEKGISRIRSKKNELLFAEIEYMQKKEIDLHNNNQYLRAKIAENERAQQHMNLMPGSSDYELAPPQSFDGRNYIQLNGLQPNNHYSRQDQTALQLV

SEQ ID NO: 1604 - protein, 330 aa, Campylobacter jejuni
MMMKILISGGAGYIGSHTLRQFLKTDHEICVLDNLSKGSKIAIEDLQKIRTFKFFEQDLSDFQGVKALFEREKFDAIVHFAASIEVFESMQNPLKYYMNNTVNTTNLIETCLQTGVNKFIFSSTAATYGEPQTPVVSETSPLAPINPYGRSKLMSEEVLRDASMANPEFKHCILRYFNVAGACMDYTLGQRYPKATLLIKVAAECAAEKRNKLFIFGDDYDTKDGTCIRDFIHVDDISSAHLSALDYLKENESNVFNVGYGHGFSVKEVIEAMKKVSGVDFKVELAPRRAGDPSVLISDASKIRNLTSWQPKYDDLGLICKSAFDWEKQC

SEQ ID NO: 1605 - protein, 267 aa, Bifidobacterium longum NCC2705
MTEQSDMARRPMVNLDGRTAIITGSGKGIGAAVAKCLASHGAAVVINYVHDAASAQRTVEDIHSLGGSAIAVQADVCDESQSSKLVGTAVDSFGGVDILVNNAFGRFSFDPRRRSTFAGGDWDEFSAQIEGCLHGAYLMCSHVVPLMRAQTSGRIINISSNLVDSPIVPYHSYITAKGGLVGMTRSLAQELGGFGITVNAIAAGLTAGTASSAATTEDVRERIIAMTPLGRLARPDDIAGGVALLASDMAGFITGQCLHVDGGLTMR

SEQ ID NO: 1606 - protein, 466 aa, Vitis vinifera
MALATRRFFNTICRGTRSFGALPEGIPSSSQHLINLEYEYSAHNYHPIPIVFSQAKGSTIWDPEGKKYLDFLSAYSAVNQGHCHPKVLKALVEQAERLTLSSRAFYNDRFPIFAERLMNMFGYDMVLPMNTGAEGVETALKLARKWGYEKKKIPKDQAIIVSCCGLLHGRTLAVISMSCDNEATRGFGPLLPGHLKVDFGDEVALEKIFEENGDRIAGFLFEPIQGEAGVIIPPDGYLKAVRELCSKFNILMIADEIQSGLGRSGRMLACDWAEVRPDVVILGKALGGGVIAVSAVLADKDVMLSIQPGEHGSTFGVNPLASAVAVASLDVITEEGLSERSDQMGQELRNQLMKIHQLFPNLIKEVRGKGLFNAVELNSKALFPVSAYDICLKLKERGVLAKPTHDTIIRLTPPLSISLDELQEGSNALRDVMEFDVPKMQKAKHKRVPQTTTNICDRCGRNMDDS

SEQ ID NO: 1607 - protein, 615 aa, Clostridium acetobutylicum
MMDKFLDILLGKPLANEQGSHEKFNIPFGLAVMASDAISSVAYAAEEILIVLIVVLGLQAYTWLSIVALMIIGLLAILTVSYLQIIRAYPQGGGAYIVAKENIGTVPGLVAGAALLIDYILTVAVSASAGGAAILSAFPGLLNYKVLIVIVFIVVLTILNLRGVSESSKIFSLPTYIFVFGMMFMIVFGIFKYAFWGGAANQVNKVVLKQTADVSIFLILRAFSQGCSALTGLEAVSNSVPNFKEPSQRNAKIVMILLSSIILFIFGGSSILANLYRAVPGENVTVLAQIAEGVFGRNFMFYLIQVSTAIILLMACNTAFTGFPMLMYVVARDGFVPRQFTHRGKRLSFSIGIVSLSVIAGILVIVFKAVTHNLLPLYSVGVFMSFTLAQTGMVIHWRQGKERNWRIRALINGFGAVVTTITTGIIAYEKFEAGAWIVIILIPILVFIMLAIKRHYNIVAEQLRAHLKDYKAADLQKKFTHLAVVPIASLNKASLSALQYAKSVTDNVIALNISISKEQMEKLKASWSELDTDIVLVSKYSPYRHIVTPLLQSIDDIASRASDDEKITVVLPQFITHKWWGNLLHNNTGIFLRESILRNKNVIVSTYPYHLDDDE

SEQ ID NO: 1608 - protein, 340 aa, Raphanus sativus
MKGVQNIYHHSYTFSFLLVFLVLIQFHPALSTYVNTMSSSESLTISSKRTLVSPGGVFELGFFRPSGRSRWYLGIWYKKNSWKFYPWVAWVANRDSPLSNSIGTLKISGNNLVLLCQSNNTVWSTNITRGNARSSVIAELLPNGNFVMRYSDNKDSSGFLWQSFDFPTDTLLPEMKLGYDLETGRNRFLTSWRSYDDPDSGNYTYKLDIRRGLPEFILMNGSYEIQRSGPWNGIEFSGIPEVQGLNYMVYNYTDNGEEITYSFHMTNQSIHSRMLVSDYTLNRFTWIPPSPGWLQFWILPTDVCDSLYFCGSYAYCDLNTSPNCNCIRGFVPKNRQQWDL

SEQ ID NO: 1609 - protein, 399 aa, Mortierella alpina
MAPPNTIDAGLTQRHISTSAPNSAKPAFERNYQLPEFTIKEIRECIPAHCFERSGLRGLCHVAIDLTWASLLFLAATQIDKFENPLIRYLAWPVYWIMQGIVCTGVWVLAHECGHQSFSTSKTLNNTVGWILHSMLLVPYHSWRISHSKHHKATGHMTKDQVFVPKTRSQVGLPPKENAAAAVQEEDMSVHLDEEAPIVTLFWMVIQFLFGWPAYLIMNASGQDYGRWTSHFHTYSPIFEPRNFFDIIISDLGVLAALGALIYASMQLSLLTVTKYYIVPYLFVNFWLVLITFLQHTDPKLPHYREGAWNFQRGALCTVDRSFGKFLDHMFHGIVHTHVAHHLFSQMPFYHAEEATYHLKKLLGEYYVYDPSPIVVAVWRSFRECRFVEDQGDVVFFKK

SEQ ID NO: 1610 - protein, 200 aa, Dunaliella tertiolecta
PKWNFDGSSTGQAPADDSEVYLVPRAIYKDPFRMGDNIMVMCETYEPPREKKDGTMNPLKPRPPTRALGCAQPMEKAKPQEPWFDIEQEYTLLNSVTKWPLGWPKGGYPAGQGPYYCSVGAGRSIRRDIPEVHYRSCLHAGIQISGVNGEVLPSQWEYQVGPVEGIAMGDQMWMSRYLMYRVAELFNVEVTFDPKPITGD

SEQ ID NO: 1611 - protein, 457 aa, Mesorhizobium loti
MTKWSPNSWRAKPIKQVPAYPDLAALKNTEAQLATFPPLVFAGEARKLKKQLAAVAAGEAFLLQGGDCAESFAEHGADNIRDFFRVFLQMSVVLTFAGAQPVVKVGRVAGQFAKPRSSDNETKGEVTLPSYRGDIINGIEFDAKSRIPDPARQEMAYRQSAATLNLLRAFAQGGYANLENVHSWMLGFVSDSPQGEKYESLANRITETMDFMKAVGITSETNYALRETDFYTSHEALLLGYEEALTRVDSTSGDWYATSGHMIWIGDRTRQPDHAHVEYCRGIKNPLGLKCGPSLTADGLLELIDLLNPENEPGRLTLIARFGSDKVADHLPKLVRAVQKEGRSVVWSSDPMHGNTIEAAGYKTRPFDRILKEVQTFFEVHRAEGTHPGGIHVEMTGKNVTECTGGARAITAEELQDRYHTHCDPRLNADQAIELAFLVSDLLKKSHPVQHRQAVNG

SEQ ID NO: 1612 - protein, 342 aa, Lycopersicon esculentum
MADLKKKFLDVYSVLKSDLLEDTAFEFTDDSRKWVDKMLDYNVPGGKLNRGLSVIDSLSLLKDGKELTADEIFKASALGWCIEWLQAYFLVLDDIMDGSHTRRGQPCWYNLEKVGMIAINDGILLRNHITRILKKYFRPESYYVDLLDLFNEVEFQTASGQMIDLITTLVGEKDLSKYSLSIHRRIVQYKTAYYSFYLPVACALLMVGENLDKHVDVKKILIDMGIYFQVQDDYLDCFADPEVLGKIGTDIQDFKCSWLVVKALELCNEEQKKILFENYGKDNAACIAKIKALYNDLKLEEVFLEYEKTSYEKLTTSIAAHPSKAVQAVLLSFLGKIYKRQK

SEQ ID NO: 1613 - protein, 475 aa, Glycine max
MMALNISSPAEVKSIFFADSFKSNCLTAKFSGGFAFKRKERRAASGGRVYCSVQATPPPPAWPGRAVPEQGRKTWDGPKPISIVGSTGSIGTQTLDIVAENPDKFKVVALAAGSNVTLLADQVKRFKPQLVAVRNESLIAELEEALHDVEEKPEIIPGEQGIVEVARHPDAVSVVTGIVGCAGLKPTVAAIEAGKDIALANKETLIAGGPFVLPLAQKHNVKILPADSEHSAIFQCIQGLPEGALRRVILTASGGAFRDWPVDKLKDVKVADALKHPNWNMGKKITVDSATLFNKGLEVIEAHYLFGADYDHIEIVIHPQSIIHSMIETQDSSVLAQLGWPDMRLPILYTLSWPDRIYCSEVTWPRLDLCKLGSLTFKTPDNVKYPSMNLAFSAGRAGGTMTGVLSAANEKAVEMFIDEKISYLDIFKVVELTCEKHQNELVSSPSLEEIIHYDLWARKYAASLQDSSSFTPILA

SEQ ID NO: 1614 - protein, 359 aa, Lolium multiflorum
MAHGRILVLALAVLATAAVAAASFADSNPIRPVTERAASAVESTVLGALGRTRHALRFARFAVRHGKSYGSAAEVQRRFRIFSESLDEVRSTNRKGLSYKLGINRFSDMTWEEFQATKLGAAQTCSATLAGNHLMRDANALPETKDWRETGIVSPVKDQASCGSCWTFSTTGALEAAYTQATGKNISLSEQQLVDCAGAYNNFGCNGGLPSQAFEYIKYNGGIDTEESYPYKGVNGVCKYRPENAAVQVADSVNITLNAEDELKNAVGLVRPVSVAFEVIDGFKQYKSGVYTSDHCGTTPDDVNHAVLAVGYGVENGVPYWLIKNSWGADWGEDGYFKMEMGKNMCAVATCASYPILAA

SEQ ID NO: 1615 - protein, 105 aa, Candida albicans
PTTVAKQTVNLDSQVKYCVLASGQADIYLRLPVSDTYREKIWDHAAGNILIYESGGQVGDVTGAPLNFGNGRTLDSKGVIAANKEIFDKVIDAVTEIRKSSTPRV

SEQ ID NO: 1616 - protein, 461 aa, Glycine max
ENRQSSVKHSGSVSPRLQQKKLELEKRSRPPAPPSDSNKPRRQSGKKATESGSPGGRQRPKSLNVPHGDEQLSEISNEPRSLSFQGDEISLQSNSLTVNSKMDMEVTSSLQTVEIDDSQSPSLKAVKQLISETVQKKSTPRLDEEETVAELATDAPEHPSPISVLDGSVYRDDMPSPVKQISEDSKGEDAQESKENEIKDQWNPEDSLSFNSTGPLEINRKKLQNINHLVQKLRRLNSSHDEARIDYIASLCENTNPDHRYISEILLASGLLLRDLSSELLTFQLHSSVHPINPELFLVLEQTKASSLLSKEESIPGKDANSKLNKEKFHRKLIFDSVNEILGAKFSSSPEPWIQPNSNRLTKKTLSAQKLLKELCFEIEKIQAKKPECSLEEEDDGLKNILCEDVLHGSESWTDFHGYLPGVVLDVERLIFKDLVDEVVIGESTGLRVKSLVRRRKLFGK

SEQ ID NO: 1617 - protein, 236 aa, Zea mays
LKHCSLKPADDERETLEEPWKPSVAIQSKNNKLANVASLLEKLQQLSVNKDEDAPPVDHIAFLCETESPDHRYVSEILLASGLLMKDLGSGQTGLQLHSSGYPINPDLFHVLEQRKAGWVSTPDGIHQSRSGTKSDPRRAHRKLMFDTVNELLLQKFEKETAVYALSSFTRAKDPPDAEILRRLQGWTSFSKELPGMVLEIERSIFKELVDEVVHGESADGPEMKAAGRQRRRLFL

SEQ ID NO: 1618 - protein, 368 aa, Zea mays
MEEARQRRRLCLCLVVAAGSWALLAAVARCDPQVPCYFIFGDSLVDNGNNNYIVSLARANYPPYGIDFAAGPSGRFTNGLTTVDVIAQLLGFDNFIPPFAATSADQLLGGANFASAAAGIRAETGQQLGGRIPFAGQVQNYQTAVQTLVSILGDQDTASDHLSRCIFSVGMGSNDYLNNYFMPAFYNTGSRYTPEQFADSLIADYRRHLRVLYNYGARKVVMIGVGQVGCSPNELARYSADGVTCVDRIDDAIQMFNRRLVGLVDEFNALPGAHFTFINAYNIFDDILANAASYGFTVTNAGCCGVGRNNGQVTCLPYQAPCANRDQHIFWDAFHPSEAANIIVGRRSYRAESPNDVYPMDISTLASI

SEQ ID NO: 1619 - protein, 500 aa, Zea mays
  unsure (1)..(500): unsure at all Xaa locations
PQVAAVFFVSAACTVALAALLAVLRMRPPWWCACPVCEAYLTASWAGDFDNLCDWYAHLLRTSPAQTVHVHVLRNVLTANPATVDHMLRARFDNYPKGAPFSAILADFLGRGIFNVDGDAWLFQRKLAAAELASPALRAFAVRVVASELRGRLIPLLRSAAXGGGRVLDLQDVFRRFAFDCICKISFGLDPGCLQLSMPVSSFEDAFDTASTLSARRATAPMHVVWKLKRLLNLGDERRLRDAVHLVDALAAEVIRQRRKLGGAASSGSDLLSRFMGSIDDDKYLRDIVVSFMLAGRDTVASALTAFFLLLSDHPEVAAAIRDEAARVAGDDDDGDGDDGRLTDSAFGKLKGMHYVHAALYESMRLFPPVQFDSKFAAGDDTLPDGTAVAKGTRVTYHAYAMGRMESVWGPDCGEFRPERWLRDGRFVPESPYRYPVFQAGARVCVGKELALMEMKAVIVAVVRGFDIEAVGRSSRRPRFAPGLTATFAGGLPVRVRRRA

SEQ ID NO: 1620 - protein, 336 aa, Euglena gracilis
MAQTIPDQTALPDTTNWQLSDLTLKETLGTGTFGRVRLCLHKSSGNYYAIKCLKKSEVLRMKQVEHILAEASILGSIRHPFIVNMLKTFQDDKRLYIVLEYVVGGELFSHLRKAGKFPNDVAKFYAAEVILAFEYIHSMDILYRDLKPENLLLDVGGHIKITDFGFAKKVPERTFTLCGTPEYLAPEIIQSKGHGKAVDWWALGILTYEMLVGYPPFFDESPFRIYEKILEGKVQFPKWVDGRAKDLIKGLLTTDHTKRLGTLKRGVTDIKKHKWFYGVDWDMLLARKIPAPIPVKVTTPGDSRYFDRYPESKEDKSQPLTPAQQELFKGFGPYST

SEQ ID NO: 1621 - protein, 157 aa, Zea mays; identical to SEQ ID NO: 476

SEQ ID NO: 1622 - protein, 304 aa, Magnetospirillum magnetotacticum
  unsure (1)..(304): unsure at all Xaa locations
MLLVLGXAAPGRSXXSARXEPXLXGPRGGXSXPEGWGGIAAGLLVVVFAFGGIEIVTIAAAEAREPRTAVARATRSIVWRILVFYLGSVAIMVLVLPWDSPLLAESPFVAVLDLAGLPGAARVMEVVVVVALLSAFNANVYGTSRMAYSLAGRGDGPRALRRVSRRDVPWVSVLVSVFFALVAVGLNWLLPEALLGILLNAVGAALLVVWVLVAVSQLRLRRRIEAQARASGEPMTLRMWGFPWLTWAVLVGLAALAVLMLTDAAARAQLVSTAGLVVVILAVYLVTRRGRARRGAAAGARADG

SEQ ID NO: 1623 - protein, 314 aa, Zea mays
  unsure (1)..(314): unsure at all Xaa locations
MTRRCSHCSHNGHNSRTCPNRGVKIFGVRLTDGSIRKSASMGNLSLLGGSTSGGGGASPADVGHDAAAEGYASDDFVQGSSSANREREKGVPWTEEEHRRFLLGLQKLGKGDWRGISRNFVVSRTPTQVASHAQKYFIRQANMSRRKRRSSLFDLVPDESDLPPLPGNQEPEAQILNHPPLPPPXREEEVESMESDTSVIAESSSASAIMPESLQPSYPMIVPAYFSPFLQFSVPFWPNQEDGGDLPQETHEIVKPVAVHSQNPINVDELVGMSKLSIWEHGQETVSTSLSLNLLGGQNRQSAFHANPQTRAQA

SEQ ID NO: 1624 - protein, 405 aa, Populus nigra
MGFLCCSGKPSKRLESSSINENNSNIKRKDQTHVTSGSLKMKPYVNNLSKEGESKDDQLSLDVKSLNMKDEISKDRRSNGKQAQTFTFEELAAATSNFRSDCFLGEGGFGKVYKGYLDKINQAVAIKQLDRNGVQGIREFVVEVVTLSLADHPNLVKLIGFCAEGDQRLLVYEYMPLGSLENHLHDIPPNRQPLDWNTRMKIAAGAAKGLEYLHNEMKPPVIYRDLKCSNILLGEGYHPKLSDFGLAKVGPSGDKTHVSTRVMGTYGYCAPDYAMTGQLTFKSDIYSFGVVLLELITGRKAIDQRKERGEQNLVAWARPMFKDRRNFSCMVDPLLQGQYPIRGLYQALAIAAMCVQEQPNMRPAVSDLVMALNYLASHKYDPQVHSVQDSRRSPSRPGLDKDRGQ

SEQ ID NO: 1625 - protein, 798 aa, Aspergillus oryzae
MPGAASIVAVLAALLPTALGQANQSYVDYNIEANPDLFSECLETGGTSFPDCESGPLSKTLVCDTSAKPHDRAAALVSLLTFEELVNNTANTGHGAPRIGLPAYQVWNEALHGVAHADFSDAGDFSWSTSFPQPISTMAALNRTLIHQIATIISTQGRAFMNAGRYGLDVYSPNINTFRHPVWGRGQETPGEDAYCLASTYAYEYITGIQGGVDANPLKLIATAKHYAGYDIENWDNHSRLGNDMQITQQDLAEYYTPQFLVASRDAKVHSVMCSYNAVNGVPSCSNSFFLQTLLRDTFDFVEDGYVSGDCGAVYNVFNPHGYATNESSAAADSIRAGTDIDCGVSYPRHFQESFHDQEVSRQDLERGVIRLYASLIRAGYFDGKTSPYRNITWSDVVSTNAQNLSYEAAAQSIVLLKNDGILPLTSTSSSTKTIALIGPWANATTQMLGNYYGPAPYLISPLQAFQDSEYKITYTIGTNTTTDPDSTSQSTALTTAKEADLIIFAGGIDNTLETEAQDRSNITWPSNQLSLITKLADLGKPLIVLQMGGGQVDSSALKNNKNVNALIWGGYPGQSGGQALADIITGKRAPAARLVTTQYPAEYAEVFPAIDMNLRPNGSNPGQTYMWYTGTPVYEFGHGLFYTNFTASASAGSGTKNRTSFNIDEVLGRPHPGYKLVEQMPLLNFTVDVKNTGDRVSDYTAMAFVNTTAGPAPHPNKWLVGFDRLSAVEPGSAKTMVIPVTVDSLARTDEEGNRVLYPGRYEVALNNEREVVLGFTLTGEKAVLFKWPKEEQLIAPQ

SEQ ID NO: 1626 - protein, 376 aa, Pseudomonas aeruginosa UCBPP-PA14
MDDLLQRVRRCEALQQPEWGDPSRLRDVQAYLRGSPALIRAGDILALRATLARVARGEALVVQCGDCAEDMDDHHAENVARKAAVLELLAGALRLAGRRPVIRVGRIAGQYAKPRSKPHEQVGEQTLPVYRGDMVNGREAHAEQRRADPQRILKGYAAARNIMRHLGWDAASGQEANASPVWTSHEMLLLDYELSMLREDEQRRVYLGSTHWPWIGERTRQVDGAHVALLAEVLNPVACKVGPEIGRDQLLALCERLDPRREPGRLTLIARMGAQKVGERLPPLVEAVRAAGHPVIWAEATRCTATPSSRPAATRPAWCAASPRRWRRSAWRCPAPAAWPPGCTWRPPRTTSPSASPIPAACTRSAGTTPASAIRG

SEQ ID NO: 1627 - protein, 230 aa, Zea mays
MAYSVRKVAAANTLEHRVFIEKDGQPISAWHDIPLYANEQQTVLNMIVEVPRWSNAKMEISKEETLNPIKQDIKKGKLRFVRNCFPHKGYLWNYGAFPQTWEDPNVTHPETKANGDNDPLDVCEIGELVNKPGDVIQVKVLGVMALLDEGETDWKIIVVNVNDPLAPKLNDVEDVERHLPGLLRATNEWFRIYKIPDGKPENQFAFSGECKNKKYAMDIVRECAEAWEKL

SEQ ID NO: 1628 - protein, 140 aa, Zea mays
MQSSSMKREISEAHDTIRFGINAGVKADLAPPHPLQSTIQSETKFWADKKKFGTDAIYGSALNIRKDLDAQILSRFQRPPGALPSSLLGYEALTGSLDDFGFEDYLNMPHDSDSFRQPDMHHGMEVRLGLSKGPICPPFN

SEQ ID NO: 1629 - protein, 115 aa, Zea mays
MSISKVLGFLILTCLLIASAMAQSPSPAPFIGGGRRVISPSPSKTPTPESSVASPPSLPQADSPSIDSAAVTPSSISDSPSEAPAPSQQSSAVSNQYTVFAGSITVILYAAVLAF

SEQ ID NO: 1630 - protein, 302 aa, Panicum miliaceum
MADAKQQQAVAPSAAWMMVKPFVNGGASGMLATCVIQPIDMVKVKIQLGEGSAATVTKKMLANEGIGSFYKGLSAGLLRQATYTTARLGSFRVLTNKAVEANEGKPLPLLQKAVIGLTAGAIGASVGSPADLALIRMQADSTLPAAQRRNYKNAFHALYRIVADEGVLALWKGAGPTVVRAMSLNMGMLASYDQSVELFRDKLGAGELSTMLGASAVSGFCASACSLPFDYVKTQIQKMQPDANGKYPYTGSLDCVMKTLKSGGPFKFYTGFPVYCVRIGPHVMLTWIFLNQIQKFEKDMGL

SEQ ID NO: 1631 - protein, 322 aa, Glycine max
TKSRRLQILDLVSMSTPPLSVSLSQCTRLFGASGFTRLCKGLSLVLISLHILLHLFPSAITCLALIPARTIPFAWNLITAGYVEQSVYGVVVSTIGLLFIGKLLEPVWGPREFLKFIFIVNFLTSLCIFITAIALYCITGQESYLYMPFSGFHGVIFGFLVGIKQIVPDQELPFLKIKVKWLPSIALLCSIATSFWSLEATSYLPTVIYGTYMSWIYLRYWQRKPETKLKGDPSEDFAFSTFFPEFLRPVIDPIASIFHRMLCGRLDASNDAQGYTVRGEPLPGSDPIEASRRRERGARALEERLATAPSAGELETDATEIV

SEQ ID NO: 1632 - protein, 463 aa, Neurospora crassa
MTVTTPNPSKPSYQHERHIAELAVQRASLLTRRVLAGILNPSSTSTSSTSTSGTSTPQLDHDDHPDRRVSVASISKPDFSPVTAADFAVQALLTAAIRAHFPTDGFIGEEDADALRGDPVLARQVFDLVRSCASTESGDEALSSALPQTIPEMLSLIDLGGRGTGSPTARFWAMDPIDGTAAFMRGQQYAVSLCLIEGGREVVGVLGCPNLGITLPSSSPSSSSSSACTATYIISEDSTPSPSPDTQDQDQQQTTNGILLSAVRSQGATIRPIADQTSQTDLLPAISLTKSSSITENPQTNPPDMSNLHFIDSLSTPATSSSLVARVATLAGVPNYSFPGTELYSSHMRYVAMILGGPSHVQVRIPKPRTKATYIWDHAGAQLIYVEATAGKGKVTDLWGRPIDYGRGRKLDGNWGVITAHEEVAGKLLEIMPKFPASFRLVLPDARGSVAPADSHHIAHPVP

SEQ ID NO: 1633 - protein, 395 aa, Zea mays
MTMAATTTMMSAAAQAATSQLPPGFRFHPTDEELILHYLRNRAASAPCPVPIIADVDIYKFDPWDLPAKALYGDGEYYFFSPRDRKYPNGIRPNRAAGSGYWKATGTDKPIHDAATGEGVGVKKALVFYKGRPPRGSKTNWIMHEYRLAAVAGCTSPLAAYRPPSKFRNVSMRLDDWVLCRIYKKSGHASPMVPPLADYEHLDRDGPSPGGFFDDYFCGSTSLYAAAAPAIGGGAAAAGTTNTTTTPAVVMQQHQQPAALPRLPKIPSISELLWDEYALAQILDPPADVAADHASFAVHPSLNQLLAVGDDGSDLMMFSPPPAAAAGGKRKAMVAMNMSPADECAATAHQHQSPAAKRLNGGSCFDDAPQPASGLPATMSSVLGGGLNHHMLPQF

SEQ ID NO: 1634 - protein, 760 aa, Bacillus cereus ATCC 14579
MKKNYMKALVVATTLAIPFATYSTPALAALKVEANQSVAAASDRTYDTEIKIYKDQKDEPSMVSQYIKDPKVTIAAGKKIVTVTMQDSDYFQYLRIEDKNQPGVFHDVKVLSEDKRKNGTKVVQFEIGEFEKKHNMQMHILIPAIGYDHKYQVQFEIKDPTVGNKETEKPDDNSNSGNTETDNPVDNQNMITDNKLRELVNKKVFNRKDLNTPITKEDLLQVKDLFLNTNEILDYSALKYMPNLKSLTVANAKIKDPSFFANLKQLNHLALRGNEFADVTPLVKMDNLESLDLSNNKITNVAPLTEMKNVKSLFLSGNQIEDVTALAKMEQLDYLNLANNKITNVAPLSNLKNVTYLTLAGNQIEDIKPLYTLPLKDLVLTRNKVKDLSGIDQLNQLQELWIGKNEITDVTPLSKMTQLKILNLPNNELKDITPLSSLVNLQKLDLEANYISDLSPVSNLKKLVFLSFVANEIRDVRPVIELSKTAYINVQNQKVFLEETEVNKEVKVPIYEKDGEISTKIRLKSDNGTYSNGVVKWSTPGEKVYEFGVKDPFADTGIFFTGSVIQNVVESKDGNTSKEDEKTEVVEFKDVPKGHWSEEAINYLAKEKLFIGYGNGEFGFGDNITRGQVALLIQRYLKLENNLEQKTAFTDTKGNMYETAIDAVVQAGIMTGYGNGMFRPDGVLTRYEMSVVLQRVFQLKENENSAENFKDVPNGHWAKGYVKALVDNKISKGDGEGNFLGDNFVTREQYAQFLYNAIKK

SEQ ID NO: 1635 - protein, 397 aa, Magnetococcus sp. MC-1
MRGLGIMSDKVSSIMSTYGRYPVAFERGEGVRLWDTNGRVYLDFLSGIGVNNLGHSHPTVVKAVQEQVAKLTHTCNLYRIPNQEALAARLVATCFADQVFFSNSGADANEAAIKLVRKYMKDRGQPGRYEIITATNSFHGRTMATLTATGQEKVQSGFEPLVPGFRYVPYNDMEAMEKAVGPYTAAIMVEPIQGESGVRVPDADYLNQLRALCDRKDILLVLDEVQSGMGRTGKMWAYQWSDIEPDIMTSAKALASGVPMGACLARRGVAAAFAPGSHGSTFGGNPLSAAAALATLDVMLAPDFLPTVQARGDYFMNALRQLAQGRRMVKQIRGRGLMVAMELNAPGEEVASIALSRGLLINCCMGTVLRFLPPLVVSEQEIDQGLAILGEVLSDLF

SEQ ID NO: 1636 - protein, 870 aa, Cochliobolus heterostrophus
MASLLFLSLSGLAAGAAIQQRDPVPAGYVAPPYYPAPHGGWVSDWAESYRKASLLVSNMTLAEKTNLTAGTGIFMGRCVGNTGSALRVGIPQLCLQDGPLGVRNTDHNTAFPAGITAGATWDKDLIYRRAVAIGEEFRGKGVNIHLGPSVGPLGRKPRGGRNWEGFGSDPVLQAFGGSLSVEGIQSTGVIATIKHLIANEQEMYRMWNIVKPGYSSNVDDRTLHELYLWPFAEGVRSGVGSVMIAYNAVNGSACAQNSYMINGLLKDELGFQGFVMSDWLAQISGVSSTLAGLDMSMPGDRNDIPLVLGNSYWMYEQTRSVLNGSVPVDRVNDAVTRILATYFQMGQDQNYPRPNFDTNTQNAEGPLYPGALISPSGVVNEFVDVQGNHAEVAREVARDAITLLKNQDNILPLAASAPLKIFGTDAEKNPDGINSCADQGCNKGTLGMGWGSGSARYPYMDSPIDGFKARGANYQFFNTDNFPGNSNPSPNDTAIVFVTADSGENYITVEDNPGDRTSANLNLWHNGDRLIQDVAAKYSNVVVVVHTVGVILMNEWHDLPSVKAIVFAHLPGQEAGNSLMQVLYGDVSPSGHLPYTLPNAEDDFGNSVKLVGYQLGQPQDTFTEGLYIDYRHFHKANITPRYAFGHGLSYTTFSFSDATITPVTPLTRTPPARPAKGTTPSYSTAIPPASEAYWPANFNRIWRYLYSWLDKNDADAAAQVGTSPSTYPYPAGYSNEQKPGPAAGGAQGGNPALFDVAYDIAVTVTNTGNRSGKAVAQLYLQFPSESTVDTPILQLRDFAKTSTLAAGASQTLKMRLTRKDLSVWDVVEQNWVVPAVSGDYGVWIGGASDDLHLRCGTATGRCQGDQASPV

SEQ ID NO: 1637 - protein, 358 aa, Streptomyces coelicolor A3(2)
MSAGERVPEEFVPGCVIHGAGDLRVTDVPVRPPGPGEALVAVRYGGVCGSDLHYWRHGGVGDFHLREPMLLGHEVVGTVVAYGSPDTPGPAAGTSVAVHPATPCGVCPECVDRRRNVCRDTRYLGSAARFPHVQGGFAARIVVPAGQLRPLPAGLDPRRAALAEPLSVALHAVRRAGDPAGRHVLVTGAGPIGCLVVAAAKAAGAAHVTVTDLLPAALEYARAAGADTLVRADDPDDAGWPVEVDTAVEASGVAAGLDTCLRLVRRGGVVVQLGMLPPGQSPFAGNLLVSREIELRGAFRFDGEFDDALRLLAAEPAFDALVSAVVPVRDAASAFELAADRSRSCKVLLDFGAAPAAV

SEQ ID NO: 1638 - protein, 470 aa, Rickettsia prowazekii
MSFLRKKSFESVKEIGSSSGLSKTLGAFDLILLGLGAMIGTGVFVVTGIIAAKFSGPAVMISYMIAGITCIFVALVYTELAAMLPTSGSIYTYSYVAFGEVFAWMIGSVIILELGVSAGIVAAGWSGYVQGILEAGGIYLPKVLTTVPSNGGVINLPAFLISAFIGFILFLGTKDSKKINAILVFIKMVAIFAFVLAAAPHFDATNWSNFMPFGFGSVVMGSSILFLAFTGFGTIATAAEECKNPKRDIVIGIIGSLILTTLVYVIMSGLVTGIAPFDQLNNDRPLAYALTINNSKIGSAIVSTGAVCGMMTVLMMNIYGTSRIFYAIARDGLLPKSFAKLHPKYDSPYITIIIFSALAAFLGGFCPTEIITQLTSMGALIDYIAVAIIVMMFRIKLPTAQRAFKCPIVFIIAPFILFACIYLLLTQMYGDEIYKGNFNLLTSGRVLIYWFITIFILYLVRSFFMGKEQH

SEQ ID NO: 1639 - protein, 472 aa, Zea mays
MAALKASFRGELSAASFLDSSRGPLVQHKVDFTFQRKGKRAISLRRTCCSMQQAPPPAWPGRAVAEPGRRSWDGPKPISIVGSTGSIGTQTLDIVAENPDKFRVVALAAGSNVTLLADQVKTFKPKLVAVRNESLVDELKEALADCEEKPEIIPGEQGVIEVARHPDAVTVVTGIVGCAGLKPTVAAIEAGKDIALANKETLIAGGPFVLPLAHKHKVKILPADSEHSAIFQCIQGLSEGALRRIILTASGGAFRDWPVDRLKDVKVADALKHPNWNMGRKITVDSATLFNKGLEVIEAHYLFGAEYDDIEIVIHPQSIIHSMVETQDSSVLAQLGWPDMRLPILYTLSWPDRIYCSEVTWPRLDLCKLGSLTFRAPDNVKYPSMDLAYAAGRAGGTMTGVLSAANEKAVELFIDEKISYLDIFKVVELTCNAHRNELVTSPSLEEIVHYDLWARRYAASLQPSSGLSPVPA

SEQ ID NO: 1640 - protein, 245 aa, Mortonia greggii
ALSIAGAVQSQKLAVRAISQLQSLPGGDIKLLCDAVVENVRNLTGYDRVMVYKFHEDEHGEVVAESKRPDLEPYIGLHYPATDIPQASRFLFKQNRVRMIVDCHSTPVSVIQDDGLMQPLCLVGSTLRAPHGCHAQYMANMGSIASLAMAVIINGNDEDGIGGRNTTRLWGLVVCHHTSARCIPFPLRYACEFLMQAFGLQLNMELQLASQLLEKHVLKTQTLLCDMLLRDSPTGIVTQSPSIMD

SEQ ID NO: 1641 - protein, 248 aa, Agrobacterium tumefaciens str. C58 (Cereon)
MNRIDLDGQAAVVTGGAQGIGLAIARRLIESGAKVSLWDMSETAIEQACGVLGEGASGKVVDVTDFAGLARVHAEVEAETGPVSILVNSAGIAGSNATLEDYDIEEWRRVVEINLNGTFYVNKTVIPSMKARNYGRIVNISSVAGKEGNPKLSAYSAAKAGVIGLTKSLGKELAAHDIAVNAITPATARTRILETLTPEFIDYMLTRIPRGRFLEVEEAAAMVAWLVSRENSFTTASVFDLSGGRTTY

SEQ ID NO: 1642 - protein, 152 aa, Glycine max
FSFCSFQDSSVIAQLGIPDMRLPLLYTLSWPERIYCSEVTWPRIDLSKYGSLTFKTPDNVKYPSMNLAYAAGRAGGTMTGVLSAANEKAVEMFIDEKISYLDIFKVVELTCEKHQNELLSSPSLEEIIHYDLWAREFAASLQDSSSFTPILA

SEQ ID NO: 1643 - protein, 113 aa, Zea mays subsp. parviglumis
MGRTACCAKEGVKRGAWTSKEDDALAAYVKAHGEGKWREVPQKAGLRRCGKSCRLRWLNYLRPNIRRGNISYDEEDLIIRLHRLLGNRWSLIAGRLPGRTDNEIKNYWNSTLV

SEQ ID NO: 1644 - protein, 394 aa, Zea mays subsp. mays
LGAERRARLPPGEMGWPLVGGMWAFLRAFKSGKPDAFIASFVRRFGRTGVYRSFMFSSPTVLVTTAEGCKQVLMDDDAFVTGWPKATVALVGPRSFVAMPHDEHRRIRKLTAAPINGFDALTGYLPFIDSTVTSSLRAWADHGGSVEFLTELRRMTFKIIVQIFLGGADQATTRALERSYTELNYGMRAMAINLPGFAYRGALRARRRLVAVLQGALDERRAARAKGVSGGGVDMMDRLIEAQDERGRHLDDDEIIDVLVMYLNAGHESSGHITMWATVFLQENPDMFARAKAEQEAIMRSIPSSQQGLTLRDFRKMEYLSQVIDETLRLVNISFVSFRQATRDVFVNGYLIPKGWKVQLWYRSVHMDPQVYPDPTKFDPSRWEGHSPRAGTFL

SEQ ID NO: 1645 - protein, 449 aa, Lactobacillus gasseri
MDEKEKLKLKRSLKSRHVTMIAIGGAIGTGLFLGSGTAIQSAGPSIILSYLIVGIISFFMMRALGELILAEPDQHSFIESVKKYLGNRMEFVAGWTYWLCWLSLAMADLTATGIYLKYWFKDLPQWVGPLVIVVLLMLVNMVNVGLFGELESWFSMIKVLAILALIVTGLILLVMHSKIDSRTVSLSNLINYGGFFPTGSWGFLKSFQMVVFAFVGIEIVGLTAGETANPDKDIPKAINTLPVRIGLFYVGSMIAIMAVYPWNKIVTTTSPFVQVFGAIGIPAAAGILNFVVLTAAMSATNSAIFSTSRSLYALSRGNNAPKRFGKLSRKAVPNNALTFSSLILFIVVILNYIMPAQVFDIISSVSTINFIMVWIIIMWTHLKYRAENKGKLGSFRMPGFPITSWVTIIFYLVILIILALIPATRLPLLISIIFILALALSYTLLERKN

SEQ ID NO: 1646 - protein, 297 aa, Rhizobium sp. USDA 1955
  unsure (1)..(297): unsure at all Xaa locations
RGKTQIKEFDAFPTLEQLPLWGFDGSSTLQAEGRSSDCVLKPVAVYPDPVRTNGALVMCEVMMPDGKTPHASNTRATVLDDESAWFGFEQEYFFYKNGRPLGFPEQGYPAPQGPYYTGVGYKNVGDFARQXVEEHLDICLAAGINHEGINAEVAKGQWEFQIFGKGSKKAADEVWLARYLLLRLTEKYGIDVEFHCKPLGDTDWNGSGMHANFSTAYLREVGGQDYFEALMAAFEKNLHDHINVYGPDNHLRLTGKHETAPWDKFSYGVADRGASIRVPHSFVNNGYRGYLEDRRPN

SEQ ID NO: 1647 - protein, 261 aa, Oryza sativa (japonica cultivar-group)
MDYCKQQERDGHRDDGDVTEWKKVAELRAVVEAQDPACKEEDDYQLRRFLRARDHNIGKASAMLVKYLQWKREVKPGGRAIADEEVRGELAQEKLYMQGYDRQGRPLVYGFGARHFPARRDLDEFKRYVVYVLDRTCARLGGNGGQEKFAAVADLQGWGYYGNCDIRAYVAALEIMQNYYPERLGRVFLIHVPYVFMAAWKIIYPFIDDNTKKKFVFVADKDLHATLRDAIDDSNLAEDYGGKLKLVSPLINGATESNRRR

SEQ ID NO: 1648 - protein, 153 aa, Triticum aestivum
  unsure (1)..(153): unsure at all Xaa locations
MVKAVAVLTGSEGVKGTIFFTQEGEGPTTVTGSVTGLKEGLHGFHVHALGDTTNGCMSTGPHFNPAGHVRGAPEDEIRHAGDLRKVTARVDGVASINITDCHIPLTXPNSIVGRAVFVHGDADDLGKGGHXLSKSTGNACARVVCGNILLPGL

SEQ ID NO: 1649 - protein, 122 aa, Triticum aestivum
RNLPRRGLSGYSMLAIGIGTLIYGHWSIMKWNRERRRLQIEDFEARIALLPLLQAETDRRTLQMLRENLEEEAIIMKDVPDWKVGESVFHTTRWVPPLIGELYGLRTTEEALHASHGFMWYT

SEQ ID NO: 1650 - protein, 312 aa, Hordeum vulgare subsp. spontaneum
MATAGKVIKCKAAVAWEAGKPLSMEEVEVAPPQAMEVRVKILYTALCHTDVYFWEAKGQTPVFPRILGHEAGGIVESVGEGVTELVPGDHVLPVFTGECKECAHCMSEESNLCDLLRINVDRGVMISDGQPRFTIDGKPIFHFLGTSTFSEYTVIHVGCVAKIDPEAPLDKVCLLSCGISTGLGATLNVAKPKKGMVVAIFGLGAVGLAAMEGARMSGASRIIGVDLNPAKHEQAKKFGCTDFVNPKDHTKPVQEVIVEMTDGGVDRAVECTGNADAMISAFECVHDGWGVAVLVGVAHKEPVFKTHPMNFL

SEQ ID NO: 1651 - protein, 306 aa, Triticum aestivum
  unsure (1)..(306): unsure at all Xaa locations
MKEVEGLPRARAALCPASSGPRQVPAWWLGFPRVAPISRGRPVRRGRKASGRDCGGGEGARPNGHAGDGGDPAEWKKVPGRRRGGKARVAAAEGEAGRVLGPGQRSRDGNVGKAAAMFLKPLPRTRASQPRGSITDAPVRGELVQDKLYVQGFDSAGRPLVYLFGHRLVAAGRPLVDLFRYRLFAPDRARAEFKRYVVYILDNTCTKLPAGPDYDIRAKLAALGGLPNCDPRPLRAALEIMVPYVFMPAWKMVYPFIDDNTKKKFVFVADKDLDATLRDAIVXSQLPEQYGGKLRLEGYKSSSTCN

SEQ ID NO: 1652 - protein, 301 aa, Oryza sativa (japonica cultivar-group)
MSNPELLSEEKAILVETLKNKLQALAEQHVDVLESLAPVVRKRVDVLIEIQSQHDELEAKFLEEKAALEANYQKLYGPLYSKRSEIVSGVLEVEGETEEREEKGVPDFWLKAMKNNEILAEEIHESDEEALKYLKDIKWCRIDDPKGFKFEFFFDTNPFFKNQVLTKTYHMIDEDDEPILEKAIGTEIEWHPGNCLTQEVLTKESSESTKPITKTEEYESFFNFFSPPQVPEDDAKIDENTAEELQNQMERDYDIASTLRDKIIPHVVSWFTGEAVQDEDYGASWVDDEEDDDDEYSDEEA

SEQ ID NO: 1653 - protein, 312 aa, Staphylococcus aureus subsp. aureus MW2
MKQFVNLGKSDVEVFPIALGTNAVGGHNLYPNLDEEQGKDVVRQAINHGINLLDTAYIYGPERSEELVGEVVKEYPREQIKIATKGSHEFDENQEVHQNNQPEYLKQQVENSLKRLQTDYIDLYYIHFPDNNTPKDQAVAALQELKEQGKIKAIGVSNFTLDQLKEANKDGYVDVVQLEYNLLHRENEAVLQYCVDHQITFIPYFPLASGILAGKYDENTKFSDHRTTRRDFKPGVFEENVRRVKALESIAAAHQTSIANIVLAFYLTRPAIDVIIPGAKRAEQVVENIKAADIVLSDDEIQYIDELFPIED

SEQ ID NO: 1654 - protein, 444 aa, Leuconostoc mesenteroides subsp. mesenteroides ATCC 8293
MMGNNEQKLNRGFGLTASLALVVGTIIGSGIFFKQGSVLESAGSTNAAMLAWIAGGLLTLASGISVAEIGSQMDKTGGIYIYIEKIYGKVWGFLAGWMQVVFYGPAMMGSIAAYFGILFVDLFGLSKSLAIPSAIIALSFVGLINSIPNRFSAGFQIITTTVKMLPIIALIIFGLFFGQHDAIGQTVAQVSQSGQGGFGVAVLATLFAYDGWVTLANISGEIKNPQKVLPKAIIFGILIVLVAYVGVSFGVYQSLPANTIVKLGQNTTLYMATNAFGIIGGRLLSIAVLISLLGTLNGKIVSFPRVLFAMANDGLFPFAKQFAKINMRSRTPNKSIWFMIFLGILMIVFTNPDRLTDIAIFTTFLFYILVFAGVFKLRKKDPFGEKRSFSMPLYPWIPIVAICGSLYVEISEIMHDLSGVIISIAIVAAGYPVYIFLSRRTNKE

SEQ ID NO: 1655 - protein, 173 aa, Pyrococcus horikoshii
MAIYEINGKKPRIHPSAFVDENAVVIGDVVLEEKTSVWPSAVLRGDIEQIYVGKYSNVQDNVSIHTSHGYPTEIGEYVTIGHNAMVHGAKVGNYVIIGISSVILDGAKIGDHVIIGAGAVVPPNKEIPDYSLVLGVPGKVVRQLTEEEIEWTKKNAEIYVELAEKHIKGRKRI

SEQ ID NO: 1656 - protein, 201 aa, Saccharomyces cerevisiae
MVYEATPFDPITVKPSDKRRVAYFYDADVGNYAYGAGHPMKPHRIRMAHSLIMNYGLYKKMEIYRAKPATKQEMCQFHTDEYIDFLSRVTPDNLEMFKRESVKFNVGDDCPVFDGLYEYCSISGGGSMEGAARLNRGKCDVAVNYAGGLHHAKKSEASGFCYLNDIVLGIIELLRYHPRVLYIDIDVHHGDGVEEAFYTTD

SEQ ID NO: 1657 - protein, 143 aa, Zea mays
  unsure (1)..(143): unsure at all Xaa locations
MAGIGPIRQDWEPVVVRKKAPTAAAKKDEKAVNAARRXAGAEIDTMKKYNAGTNKAASSGTSLNTKRLDDDTENLAHXRVPSDLKKNLMQARLDKKLTQAQLAQMINEKPQVIQEYESGKAIPNQQIISKLERALGTKLRGKK

SEQ ID NO: 1658 - protein, 169 aa, Thermoplasma volcanium
MRIGKNVYIAETAVVIGDVDIADGVSIFDSAVLRADLEKIIIGENTNIQDNVTIHTDVGYPTRIGKYVSIGHNAVVHGCTVEDEVLIGMGAIIMNGAQIGHGSIVGAGAVVTKGFKAPEYSVILGLPAKVMRLNQDQISYVKANAEDYIKLRDLYLSGKFERYRKNSDH

SEQ ID NO: 1659 - protein, 146 aa, Triticum aestivum
MATEVTLRRFAPSRGEPMMAWASVTLRAAFCRWAPFASTETEALLAHIRDTALSHQWYRAICLAGDARPVGSVSLEPTADPCRGELGYVVARAHWGRGVATAAVRAALAAVFGEVEGLARVEALVDVDNAASQRVAEKAGFRREGV

SEQ ID NO: 1660 - protein, 373 aa, Candida maltosa
MSVKTKTITILPGDHVGTEIVNEAIKVLEAIEAATPYQKIHFDFKHHLIGGAAIDATGVPLPDDALESAKNSDAVLLGAVGGPKWGTGALRPEQGLLKIRKELNLYANIRPCNFASDSLLELSPLRPEVVKGTNLIIVRELVGGIYFGDREEQEESADKQTAWDTEKYTVDEVTRITRMAAFMALQHTPPLPIWSLDKANVLASSRLWRRTVDKVISEEFPTLSVQHQLIDSAAMILIQNPTKLNGIIITSNMFGDIISDEASVIPGSLGLLPSASLASLPDTNTAFGLYEPCHGSAPDLPANKVNPIATILSAASMLRLSLDCVKEAEALEEAVKQVLDKGIRTADLRGTSSTTEVGDAIVEAVTKILKEKA

SEQ ID NO: 1661 - protein, 254 aa, Zea mays
MVLCQGVSVGNAQLLAFPGRSSSFKSTQFHVKTDHFSARALRVGTDSIHHGMSTSFPRENSLKGIPSLSGQHNQHPRSVSCRASSLASFSYPELTSKPRWWWRTLACVPYLLPLHNMWSYADVIYQLHTYLQGFSLLYTFIDTMTLCPGWLFLVIFMTVYFFVVRRKWSPHFLRFHVILAILLDTGSQAVATMCTWMPSIVYQGKPMQYFWMSIAFIQIFTVLECLRCALCGMYPNVPFISHTAFIHSDLNLFR

SEQ ID NO: 1662 - protein, 366 aa, Bacillus halodurans
MKIQAAVLHNKGEPFSIEEVELAEPKADEILVKIVASGVCHTDAVAREQLIPIPLPAVLGHEGSGVVEAVGTHVTSVKPGDHVVLTFTTCGECENCQSGHPSFCTEFAPLNFFGKMSDRTNRIQQNGKDVSTFFGQASFGTYAIANARNVVKVDPDVDLALLGPLACGIQTGAGTVLNKLRPEFGSSVAIFGCGAVGLSAVMAAKIVGCQKIIAIDIHDSRLALAKELGATHVFNGNDSRLVEAIQAVTNGGTNYAVETTGISHVFHQSIKALTTLGVVAVVGVGGDVTVNMNDDILSQGKTITGVIEGDVVPQLFIPKLIDYYKAGHFPFDRLVKLYELDEINQAFEDSKNGSAVKPIIKMNHHI

SEQ ID NO: 1663 - protein, 157 aa, Gossypioides kirkii
NKGSWTAEEDRRLAKYIEIHGAKRWKTIAIRSGLNRCGKSCRLRWLNYLRPNIKRGNISDEEEDLIIRLHKLLGNRWSLIAGRLPGRTDNEIKNYWNSRLSKKIINHDVRTEQTSSSEQFVPHKAWETFQMEEEEVVKGSGEIENSELSIDVEDFFD

SEQ ID NO: 1664 - protein, 92 aa, Elaeis oleifera
ADGNGTIDFPEFLNLMARKMKDTDSEEELKEAFRVFDKDQNGFISAAELRHVMTNLGEKLTDEEVDEMIREADVDGDGQINYEEFVKVMMAK

SEQ ID NO: 1665 - protein, 473 aa, Glycine max
MESGGNSLPSGSDGVKRKVSYFYDPEVGNYYYGQGHPMKPHRIRMTHALLAHYGLLQHMQVLKPTAAKDRDLCKFHADDYVAFLRGITPETQQDQLRQLKRFNVGEDCPVFDGLYSFCQTYAGGSVGGALKLNHGACDVAINWAGGLHHAKKCEASGFCYVNDIVLAILELLKIHERVLYVDIDIHHGDGVEEAFYTTDRVMTVSFHKFGDYFPGTGDIRDIGYGKGKYYSLNVPLDDGIDDESYQSLFKPIMGKVMEIFRPGAVVLQCGADSLSGDRLGCFNLSIKGHAECVRHMRSFNVPLLLLGGGGYTIRNVARCWCYETSVALGIELDDKMPQHEYYEYFGPDYTLHVAPSNMENKNSRHLLDEIRAKLLDNLSRLQHAPSVPFQERPPDAELLERDEDQDDRDERWDPDSDREVGDDSNPVRRRVKSECVDAEDKDAVLGVDSMAVDEPCIKEEQDNLKELSDHRPR

SEQ ID NO: 1666 - protein, 99 aa, Zea mays
  unsure (1)..(99): unsure at all Xaa locations
VLQLLEYPNLTXLETTLKTIEALLPIVFARETRHLNECLVDTVMGRAFLXRVTTXAESFKEFNIDNICGTICVLLQIFVVLTFGTQMPVNRGQDTPSTP

SEQ ID NO: 1667 - protein, 155 aa, Glycine max
MLCYFQLSILFFLFYLIFLSRFCLLLTCTFHWYYWFQILLLFHLKFYAICFFHIQIGDFGILIRSGFSIPKALFFNFLSALVALAGTALALLWGKDPGQSSLIEGFTAGGFIYIAIAGVLAEMNNGGNTTLRSTVVQIISLTIGMAVALGISLVE

SEQ ID NO: 1668 - protein, 213 aa, Triticum aestivum
  unsure (1)..(213): unsure at all Xaa locations
MPAPAALALAAALLLAAASICAEAVWLDMPQTGTKCVSEEIQANVVVLADYALMYESHPSAHPTLAVKGTSPYGYTLHESGNVTVGQFAFTTSEAGNFLACFWIDSAQKGSGVSVNLDWKTGIATKDWDAIAKKEKIEGVELELRKLEVAVQSIHQNMVYLKAREAEMRXEVSEKTNGRVXAWFSIMSLGVCVVVSVLQLWHLQGYFRKKKLI

SEQ ID NO: 1669 - protein, 207 aa, Zea mays
CSNSISGSGLADGDFSGGLCEPYDQLAELEWLSNYLGEDNFPTEDLKKLQLITGIPPAATAMAPAPAPAAAQAQPAAGVLPQEAPVLGKARSKRSRVAPCSWASRVLAFPARKPSKPAKKKEAPSPSPPPVPNNAAAAGAGEGRRCLHCETDKTPQWRTGPLGPKTLCNACGVRYKSGRLVPEYRPAASPTFVVSKHSNSHRKVLEL

SEQ ID NO: 1670 - protein, 655 aa, Oryza sativa (japonica cultivar-group)
MASADNWLGFSLSGQGNPQHHQNGSPSAAGDAAIDISGSGDFYGLPTPDAHHIGMAGEDAPYGVMDAFNRGTHETQDWAMRGLDYGGGSSDLSMLVGSSGGGRRTVAGDGVGEAPKLENFLDGNSFSDVHGQAAGGYLYSGSAVGGAGGYSNGGCGGGTIELSMIKTWLRSNQSQQQPSPPQHADQGMSTDASASSYACSDVLVGSCGGGGAGGTASSHGQGLALSMSTGSVAAAGGGGAVVAAESSSSENKRVDSPGGAVDGAVPRKSIDTFGQRTSIYRGVTRHRWTGRYEAHLWDNSCRREGQSRKGRQGGYDKEDKAARAYDLAALKYWGTTTTTNFPMSNYEKELEEMKHMTRQEYIAHLRRNSSGFSRGASKYRGVTRHHQHGRWQARIGRVAGNKDIYLGTFSTEEEAAEAYDIAAIKFRGLNAVTNFDMSRYDVKSILDSSTLPVGGAARRLKEAEVAAAAAGGGVIVSHLADGGVGGYYYGCGPTIAFGGGGQQPAPLAVHYPSYGQASGWCKPEQDAVIAAGHCATDLQHLHLGSGGAAATHNFFQQPASSSAVYGNGGGGGGNAFMMPMGAVVAAADHGGQSSAYGGGDESGRLVVGYDGVVDPYAAMRSAYELSQGSSSSSVSVAKAANGYPDNWSSPFNGMG

SEQ ID NO: 1671 - protein, 343 aa, Micromonospora echinospora
MNTTRILVTGGAGFIGSHYVRTLLRPAGPGGVRITVLDKLTYAGNLANLRPVAGHPAYRFVRGDICDSLLVDRLVAEHDQVVHFAAESHVDRSIADGGDFVRTNTLGTYTLLEAVRRRHGDRAVFVHVSTDEVYGSIEHGTWPETDPVLPSSPYAAAKAASDLLALAFVRTHGLDVRVTRCANNYGPHQHPEKLVPLAITNLLDGGDVPLYGDGLHVRDWLHVDDHVRALELVRTRGRAGQVYNVGGGTQLTNREMADRLLAACGAGPERIRYVEDRKGHDRRYAVDWSKIRCELGYAPRKDLDRGLADTVAWYRANRSWWEPLRRRPVAQAGRPTGTDHGLA

SEQ ID NO: 1672 - protein, 485 aa, Nectria haematococca
MALKSSKAVSEEQHGYEFFGPPGAFAISFLLPVLVYVFNFVCNDISGCPAPSLLSPKTLSLDKLKQEVGWPQDGFAGLVSWEASAATAGYILLSLILYRVLPAHEVEGTELRSGGRLKYRLNTLYSSSFTLAILAAGTAAQGAEFPVWTFISDNFIQILTANTIFSYAVATFVYVRSFSVKPGNKENRELAAGGHTGNMLYDWFIGRELNPRVVIPLIGEVDLKEWLELRPGMMGWIIFNCSWCAQQYRNYGYVTDSSICITLVQAVYVFDSWWNEPAILTTMDITTDGFGMMLAFGDIVWVPFVYSLQTRYLAVHPVSLGPVGLAVMLSLIGLGFYIFRSANSEKNNFRTNPNDPKVSQLKYIQTKKGSKLLISGWWGIARHINYLGDWIQSWPYCLPTGLAGYQILNAGAQAEGALVMRDGREVVQGEAKGWGMLITYFYILYFAILLIHRERRDDDKCHRKYGEDWEKYRKIVRYRIIPGIY

SEQ ID NO: 1673 - protein, 349 aa, Streptococcus pyogenes MGAS315
MKAATYLSTGNLQLIDKPKPVIIKPTDAIVQLVKTTICGTDLHILGGDVPACKEGTILGHEGIGIVKEVGDAVTNFKIGDKVIISCVTSCHTCYYCKRGLSSHCEDGGWILGHLINGTQAEYVHIPHADGSLYHAPDTIDDEALVMLSDILPTSYEIGVLPSHVKPGDNVCIVGAGPVGLAALLTVQFFSPANIIMVDLSQNRLEAAKTFGATHTICSGSSEEVKTIIDDITNGRGVDISMECVGYPATFDICQKIISVGGHIANVGVHGKPVDFNLDELWIKNITLNTGLVNANTTEMLLNVLKTGKIDATRLITHHFKLSEVEKAYETFKHAGANNALKVIIDNDIS

SEQ ID NO: 1674 - protein, 209 aa, Glycine max
  unsure (1)..(209): unsure at all Xaa locations
MSTLDATRAELGLLVLYLGKAEARDKICRAIQYGSKFLSNGEPGTAQNVDKTTSLARKVFRLFRFVNDLHALISPTPQGTPLPLALLGKVCELXEHFSFFSSLFYFPNILLNFFQSKNALLSTFLFLDQFVWLGRTGIYQNKERTELIGRISLYCWLGSSVCATLVELGELGRLSASMKKLEKDLKNKNKYDDEQYRAKLNKSNERTLS

SEQ ID NO: 1675 - protein, 169 aa, Clostridium acetobutylicum
MVNLIILVEDGFEDIELLYPLYRLREAGYDVTLVGTGSKYNYTGTHGYIVDVDASAEEIDENNYDGVIIPGGSASYKLRTNDDVKRIIRHMKEKDKLLAVICDGNYVLISAKVLSGHKVTCTEAISDDVINAGGEYVRIGNCVDKNIITAKMQVNLPQFMSDIFQYLNK

SEQ ID NO: 1676 - protein, 193 aa, Schizosaccharomyces pombe
MANLRTQKRLAASVLKCGKRKVWMDPNEISEISNANSRQNIRKLVKDGLVIRKPNLMHSRFRIRKTHAAKRLGRHTGYGKRKGTAEARMPSTVVWMRRQRVLRRLLRKYRESGKIDKHLYHTLYLEAKGNTFKHKRALIEHIQRAKAEANRTKLIQEQQDARRARAKAARQRRAKAVEEKREQIYTAAEKIEE

SEQ ID NO: 1677 - protein, 336 aa, Methanosarcina mazei Goe1
MKVNTWFGVLELDSNGKTLSSEVFPKDIRELALRSLSLRESRQNLPPEGFDLKTAALECGFTESLSEYYSLLHKVTLETVKLQVSQALTPDQRIIQAVEALDDINETTNSLSERLFEWYGGYFPESGLSGEELAVFISRYGSRENLPPEDPHYLKAKNSMGAKLEAADEVLLKGLAESVCSLYERRKQIEAYIESSMEILAPNLALLAGPMLGARLISIAGSLEKLAAFPSSTIQVIGASKALFKHLRSRAPSPKHGIIYSHPLINTSPWWVRGKVARALAAKLSLAARIDFYSAKRNPSLENELEEKIRKIRAENPRPPQKRQEIRAKPKKKRRK

SEQ ID NO: 1678 - protein, 148 aa, Schizosaccharomyces pombe
MSDWDTVTKIGSRAGPGARTHVAKTQSQINSARRAGAIVGTEKKYATGNKSQDPAGQHLTKIDRENEVKPPSTTGRSVAQAIQKGRQAKGWAQKDLSQRINEKPQVVNDYESGRAIPNQQVLSKMERALGIKLRGQNIGAPLGGPKKK

SEQ ID NO: 1679 - protein, 594 aa, Fagus sylvatica
MELMLVDDALGDSSDLEIDDLRCDNIADKDVSDEEIEAEELERRMWKDRIKLKRLKERQKIAAQQAAEKQKPKQTTDQAPRKKMSRAQDGILKYMLKLMEVCKARGFVYGIIPEKGKPVSGASDNIRAWWKEKVRFDKNGPAAITKYEAECLAMSEAENNRNGNSQSILQDLQDATLGSLLSSLMQHCDPPQRKYPLEKGVPPPWWPTGNEDWWVKLGLPHGQRPPYKKPHDLKKMWKVGVLTAVIKHMSPDIAKIRRHVRQSKCLQDKMTAKESAIWLGVLSREEALIRQPSSDNGTSGVTDMPRGGRDENKRAAVSSDSDYDVDGVDDGVSSVPSTDERRNQPMDVEPSDNLQNNTPVQDKAPGEKQPKRKRARVRSNCADQIPAPSHNEPLNVEPIITLPDVNHTDVQVGFQIHGDQQETGKIAALRLREKDFDVQPQLPVSEFNHFSALPADNVISTQSMYVDGRPLLYPVVQNTEMHHGDNYNFYNPSMEYGLTHDRQQSLIVMNEPQIRPEEVGLHVPTLHGSSTELYVKDPFNNEQHRPVDSQFGSAIDSLSLDCGGLNSPFHYDIDGLSSLEDFLHDEDLIQYFGA

SEQ ID NO: 1680 - protein, 247 aa, Gnetum gnemon
MGRGKIEIKRIENTTNRQVTFCKRRNGLLKKAYELSVLCDAEVALIVFSSRGRLYEFANNSVKRTIERYRKTCADNNQGGAIAESNAQYWQQEAVKLKQQIDVLNNQIRHYMGECLQSMTIKELKQLEGKLEKGLGRVRSKRNEKLLEDIDTLQRREDNLIRENEYIRNKIAECQSHQHANMLTAAAVEYDAIPAAYDSRNFMHANLIEAAAAHHHYAQQEQTALHLGSEHKYSVHYPDPQAHKFQT

SEQ ID NO: 1681 - protein, 261 aa, Saccharomyces cerevisiae
MAGLSFDNYQRNNFLAENSHTQPKATSTGTTIVGVKFNNGVVIAADTRSTQGPIVADKNCAKLHRISPKIWCAGAGTAADTEAVTQLIGSNIELHSLYTSREPRVVSALQMLKQHLFKYQGHIGAYLIVAGVDPTGSHLFSIHAHGSTDVGYYLSLGSGSLAAMAVLESHWKQDLTKEEAIKLASDAIQAGIWNDLGSGSNVDVCVMEIGKDAEYLRNYLTPNVREEKQKSYKFPRGTTAVLKESIVNICDIQEEQVDITA

SEQ ID NO: 1682 - protein, 315 aa, Listeria ivanovii
MRKNDWLKNVLITILVTVFVVCVNMSLETKAQAANIPHPLPINRIFPDPDLAERVKETLKKSNVTDVVSQRELDEVQIFNGNGRTIISIDGLQYFTNLKELYLSRNHIRDLTPLKDLTNLAILCLDKNRLENLNGIPSNKLVRLSLEDNELTQVDALANLTQLETLFISKNQLKNIDALANLTNLKTLDLNRNELEDLSPLARLENLTSLDLANQKCVKEALVYKPKLVIPNTIKGPDKVLITPSYISDNGSYTNGQLKWNLPVCKEKVCYTFAQLVRSWENRGPYLMVWVIQPLYPKKLETKKRASFYLCGLTK

SEQ ID NO: 1683 - protein, 281 aa, Picea mariana
AAGSGYWKATGADKPITAKGGKKRVGVKKALVFYVGKAPNGSKTNWLMHEYRVTNVSRPVKKKNSLILDDWVLCRIYNRRISAEKLALQQKESFNDVPMETIDEKEMENQLTSTSIEHSGIEQSNPSFDHLSKLGSSPTCYNSAPLCVSPMNSNICLQNLDFFQNSTTPFSDSTLKAPVQNTTFNPISSSINHQWTNCNSTDLMSGLHNDSSCSKPSSFSEPISEKEEVQSSFRLENFSQEQQQSLFNFGLEGLQNTFTHLDQITLPGAYQDWFYPNEPFH

SEQ ID NO: 1684 - protein, 153 aa, Nicotiana clevelandii
MKMIVLRSSDGETFEVEESVALESQTIKHMIEDDCADTSIPLPNVTSKILAKVIEYCKRHVDAASKTEDKAVEDDLKAFDADFVKVDQSTLFDLILAANYLNIKSLLDLTCQTVADMIKGKTPEEIRKTFNIKNDFTPEEEEEVRRENAWAFE

SEQ ID NO: 1685 - protein, 405 aa, Bacillus anthracis str. Ames
MSDWFQLDKEYMMSTYCRTKIAIERGEGCKLYDVDGKEYLDLFSGVGVNVLGYNHPKIVQTTMDQVTKSLHLPFHFLNPVAIEYAKKLVDCSLKNGKVFFTNSGTEATETTLKLIDKYRAITNEEREGIVVLKNSFHGRTLGALHFTRQESVYQNFPTTSIPVYEVERENIEQLEETIINENPIAILLEPVLGSGGIYPLSREYLHGVQNLCDKYNVILIVDEVQSGMGRTGKLFAYQNFNITPHIIQIGKGAGGGIPLGGIIVGEKLCDVFAPGDHGTTFAHSSMGTALGLTVLNTLLDDGLMQEAYEMSLYLNDKLQEIQKENSYYIEEVRHAGMMFGISLNDTNENVKKLQVELMEKGILVDVTQGNIIRLLPPYIITKEEIDTFITQFIFCIDKVAAVVSA

SEQ ID NO: 1686 - protein, 296 aa, Streptococcus pyogenes M1 GAS
MLGPFIFIAFGVIVILAIVASTLYVVRQQSVAIVERFGRYQKTATSGIHIRLPFGIDKIAARVQLRLLQSEIIVETKTKDNVFVTLNVATQYRVNEQNVTDAYYKLMKPESQIKSYIEDALRSSVPKLTLDELFEKKDEIALEVQHQVAEEMSTYGYIIVKTLITKVEPDAEVKQSMNEINAAQRKRVAAQELANADKIKIVTAAEAEAEKDRLHGVGIAQQRKAIVDGLAESIQELKEANISLNEEQIMSILLTNQYLDTLNTFAAKGNQTLFLPNTPSGVEDIRTQVLSALKTK

SEQ ID NO: 1687 - protein, 487 aa, Oryza sativa
  unsure (1)..(487): unsure at all Xaa locations
MDASAMLVALLTILATAAAAAAAAAVASSSLRRRKNQPPGSLGLPVVGHTLALLRALRSNAAEDWLRRRAAAYGPVSTISLFGRPTAFLAGASCNKLLFSSXXKLAAMSSASFLRMVGRRNIREVAGDDHRRVRAMMARFLRLDAVKNYVSAMDDEVRRHLRAEWGGRAAVAVMPSMKSLTFDVMCTVLFGLERPAVRRELSSEFQQLVRGIWAVPVNLPFTTFGKCLAASRRGRRAVAWIVEERRRAMRGGGGGSAGDLVTHMLAEGMDEEEIIDNVVFLMVAAHDTTAVLLTFLLRHLDGNRAAYERVAAEQEAIAAQRRRRGGSGSALTWDDLAGMRYTWAAAMETLRMVPPTFANMRKAVADVEVGGYVIPKWWQVITAATMTHLDPTIFPDPGRFEPARFEAAAAKSAPPPFSYVPFGGGARACPGNEFARAETLVAMHYIVTGFRWRLAAGCDGGFSRHPLPCPNQGLLLDIEPKEYNELC

SEQ ID NO: 1688 - protein, 371 aa, Acetobacter pasteurianus
MDVRAAVAFEAGRPLEIERVQLEGPRAGEVLVEVKATGLCHTDKYTLSGADPEGLFPAILGHEGAGVVVEVGAGVQHLRPGDHVIPLYTPECRECKSCLSRKTNLCTAIRATQGKGLMPDGTSRFSFKGQPIHHYMGCSTFANYTVLPEIALAKIRPDAPFDKVCYIGCGVTTGIGAVLFTAKVEPGSTVVVFGLGGIGLNVIQGAKMVGADRIIGVDINPAREAMARQFGMTDFVNPRDLGPNGDVVGHLVELTGGGADYTFECVGNPTLMRQALECAHRGWGVSTIIGVAAAGQEISTRPFQLVTGRRWIGSAFGGARGRTDVPKIVDWYMENRINIDDLITHKLPLERINEGFDMMERGESIRTVVEF

SEQ ID NO: 1689 - protein, 804 aa, Aspergillus niger
MAHSMSRPVAATAAALLALALPQALAQANTSYVDYNVEANPDLYPLCIETIPLSFPDCQNGPLRSHLICDESATPYDRAASLISLFTLDELIANTGNTGLGVSRLGLPAYQVWSEALHGLDRANFSDSGSYNWATSFPQPILTTAALNRTLIHQIASIISTQGRAFNNAGRYGLDVYAPNINTFRHPVWGRGQETPGEDVSLAAVYAYEYITGIQGPDPDSNLKLAATAKHYAGYDIENWHNHSRLGNDMNITQQDLSEYYTPQFHVAARDAKVHSVMCAYNAVDGVPACADSYFLQTLLRDTFGFVDHGYVSSDCDAAYNIYNPHGYASSQAAAAAEAILAGTDIDCGTTYQWHLNESITAGDLSRDDIEKGVIRLYTTLVQAGYFDSNTTKANNPYRDLTWSDVLETDAWNISYQAATQGIVLLKNSNNVLPLTEKAYPPSNTTVALIGPWANATTQLLGNYYGNAPYMISPRAAFEEAGYKVNFAEGTGISSTSTSGFAAALSAARSADVIIYAGGIDNTLEAEALDRESIAWPGNQLDLIQKLASSAGSKPLIVLQMGGGQVDSSSLKNNTNVTALLWGGYPGQSGGFALRDIITGKKNPAGRLVTTQYPASYAEEFPATDMNLRPEGDNPGQTYKWYTGEAVYEFGHGLFYTTFAESSSNTTTKEVKLNIQDILSQTHEELASITQLPVLNFTANIKNTGKLESDYTAMVFANTSDAGPAPYPVKWLVGWDRLGDVKVGETRELRVPVEVGSFARVNEDGDWVLFPGTFELALNLERKVRVKVVLEGEEEVVLKWPGKE

SEQ ID NO: 1690 - protein, 392 aa, Glandonia macrocarpa
DLEPVNPADVPVTAAGALKSYKLAAKAISRLQSLPSGNISLLCDVLVKEVRDLTGYDRVMVYKFHEDEHGEVVSECHRSDLESYLGLHYPATDIPQASRFLFMKNKVRMICDCLAPPVKVIQDERLPQPLSLCGSTLRSPHGCHAQYMANMGAIASLVMSVTINEDDDMIDGDEQQMARKLWGLVVCHHTSPRFVPFPLRYACEFLIQVFGVQITKEVELAAQVREKHIFRIQTLLCDMLLRDAPVAIITQSPNVLDLVKCDGAALYYKKKFWLLGITPTEAQIRDIAEWLLEYHSGNTGLSTDSLMEAGYPGASSLGDAVCGMAAVSITSRDFLFWFRSHTAKEIRWGGAKHDPDDKDDGRKMHPRSSFKAFLEVVKWRSLPWEDVEMDAI

SEQ ID NO: 1691 - protein, 410 aa, Cytophaga hutchinsonii
MNTTVSLSQQAIELEDKYGAHNYHPLPVVLAKGEGVHVWDVEGKHYYDFLSAYSAVNQGHCHPRIINALIEQAQTLTLTSRAFYNDKLGEAEKFICDLFGYDKALLMNSGAEANESAIKLARKWGYQVKGIPTDQAVIVAVERNFHGRTTGIISASTDPDSRNNFGPFMPGYQIIPYNDVIALEEALKNPNVCGFWVEPIQGEAGVFVPGDGYLKKAQELCTKYNVILMMDEIQTGCGRTGKLIASNHEGVHPDMLILGKALSGGTYPVSCVLTSDEIMLTIKPGEHGSTFGGNPLACAVLVESLAVLMDEGLIDNAASMGELFRDRMNALKDKCEHVTLVRGKGLLNAIIIKPTADGRTAWDVCMKLMENGLLAKPTHGDIIRFAPPLIITEEQINACCDIIEKTLLEF

SEQ ID NO: 1692 - protein, 159 aa, Methanocaldococcus jannaschii
MISKNVRIAKGAVIVGDVTIGDYSSVWYNAVIRGDVDKIIIGNYSNIQDCCVVHCSKGYPTIIGDYVSIGHGAVIHGCRIEDNVLVGMNATILNGAKIGENCIIGANALVTQNKEIPPNSLVLGVPGRVVRELTEEEIKSIKENALRYVKLSETLESYK

SEQ ID NO: 1693 - protein, 349 aa, Glycine max
  unsure (1)..(349): unsure at all Xaa locations
MESATSWSNPLPLSSLPSPSHSRHPSAFKFMAFSTLHTFSLPSLSSPSSFHPFPLSSLSPKPTSFNPRPLFPRTMHASRIQDAVGGALALVQSSPATWQSALLSNALIFFLGSPILVSGLSLSGIGAAFLLGTLTWRAFGPSGFFLVATYFVIGTAATKVKMAQKVAQGVAEKKRGRRGPGSVIGSSAAGCICAFLTIFGVGGEAFSRLWRLGFVASFCTKLSDTVSSEIGKAYGKTTXYLVTTFKIVPRGTEGAVSVEGTLAGILASIVLALVSFLMGEVGSHEAIICVLAAQTANQGESKMADALQEKGGLKRLNQDAVNVINICMGSIWSFLKFRKRFRGAASIIT

SEQ ID NO: 1694 - protein, 343 aa, Vibrio vulnificus CMCP6
MTQPTNRQIVLASRPVGAPTADNFALTQSDIPTPAQGEMLLRSVYLSLDPYMRGRMSDAKSYAEPVGIDEVMVGGTVCQVEASNHAEFEVGEWVLAYTGWQDYALSDGEGLIKLGKQPSHPSYALGVMGMPGFTAYMGLLDIGQPKEGDTLVVAAATGAVGSMVGQIGKLKGCRVIGIAGGEEKCQFAKETLGFDECIDHKATDFAEQLAKVCHNGIDIYFENVGGKVFDAVMPLLNTGARIPLCGLISQYNATSLPEGPDRMSMLMAQLLIKRIKMQGFIIFDDYGHRYGEFAADMTQWLAQGKIHYREHLVQGLENAPDAFIGLLEGKNFGKMVVQTNQPR

SEQ ID NO: 1695 - protein, 356 aa, Triticum aestivum
  unsure (1)..(356): unsure at all Xaa locations
MGVGKKVLNDVKPYMMMILLQIGYAGMYIVSVASLKRGMSHYVLVTYRNLAATLVMLPFALFFEKGIRPKMTLRIFIKILGLALLEPVLDQNLYYVGNKLTSASFSSALVNILPAGARVTHVRFLRSQCMVKSILLLRVDARKELLPYVTLIIGPAYDAHACVVLLRSAIXRWKSIKINHKSYTAALTLTTLICAMGTGINGSMALVAERHDMSAWVIGLDTRLFTVVYSGVVCSGVAFFVQGIVTETRGPVFVTAFQPLCMIITAVLGSVILKEETTLGSVIGAAIIVLGLYSLIWGKSNDIIDKPVHSVAEKLALPLTSVNGNGTNGTNGGRHVNGGQVAHDVETPAVKGAICH

SEQ ID NO: 1696 - protein, 304 aa, Enterococcus faecium
MKKIQLGTSDQKAAAVILGCMRINNAEDPVKVIETAYENGIDFFDHADIYGNGECEEIFADALAKTSIKREDLFIQTKCGIVPGVMFDFSKKHIIESVEKSLTRLKMDYVDALLLHRPDTLVEPEEVAEAFDELERSGKVRYFGVSNQKPMQIELLKKYVRQPLVANQLQFGLKHTGMIDQGIHVNMTDEASIDHDGSVLDYSRLHDMTIQAWSPYQYGFFEGVFIGNEKFPELNQTLEELAAKYQTTPTGLASAWILRHPANMQVIAGTMNVGRIKEIAQASEINMSREDWYELYRAAGNILP

SEQ ID NO: 1697 - protein, 553 aa, Triticum aestivum
MAPPAAAPPPAMSALPTFASSHPYPSLTTPKTAALKPRLNLAYAGAAAAPNAVPHRSAAASNDRLRGLVRRGDLEEALRLVESMAGIEPSAAAAGPCAALIKKLCASGRTAEARRVLAACEPDVMAYNAMVAGYCVTGQLDNARRLVAAMPMEPDAYTYNTLIRGLCGRGRTDNALAVLDDMLRRGCVPDVVTYTILLEATCKRSGYKQAMKLLDEMRDKGCAPDIITYNVVVNGICQEGRVDDAMEFLKSLLSYGCEPNTVSYNIVLKGLCTAERWEDAEKLMAEMSRKGCPPNVVTFNMLISFLCRRGLVEPAMEILEQIPKYGCTPNSLSYNPILHAFCKQKKMDRAMAFVELMVSSGCYPDIVSYNTLLTALCRGGEVDAAVELLHQLKDKGCTPVLISYNTVIDGLTKAGKTEEALELLNEMVTKGLQPDIITYSTISSGLCREDRIEEAIKAFCKVQDMGIRPNTVLYNAILLGLCKRRETHSAIDLFTYMISNGCMPNESTYTILIEGLAYEGLVKEAREMLAELCSRGVVSKTLVNKGAIRLLDA

SEQ ID NO: 1698 - protein, 148 aa, Triticum aestivum
  unsure (1)..(148): unsure at all Xaa locations
EGQSPPFKFLGRCPSDPPDFKKAVRRDPKKFFHDLVWVQKEKDFCFENRGEGQFLCKXLFAVHSGLEKVLGFEXQLKFLKTKXTRVPKFQILSGRQDFWNIPQDLAAKQTIVVSGHHGKLRVDGFRFIIAEGGGYPDKPIAPVVFPSK

SEQ ID NO: 1699 - protein, 340 aa, Pseudomonas syringae pv. syringae B728a
MEMLSMNYRTLGQSGLKVSTLTLGSMMFGEQTGADESLRIIDKARDQGINFIDTADVYNAGRSEEIVGRAIAAQRSDWVLATKVAIGPSDGVPNRAGLNRKHMFNAIENSLRRLDTDYVDIYYLHKEDHDTPLEVTVSAIGDLIRQGKIRYWGVSNFRGWRIAEIVNVAQRLGVDKPVISQPLYNIVNRQAEVEQITAAAHHGLGVVPYSPLARGVLSGKYAPDIAPDSESRAGRQDKRLLETEWRMESLRIAQRIQAYVQDKGVGIVEFAIAWVLNNQAVTSAIVGPRTEQQWDGYTKALTVDITAEDEAFIDSLVTPGHASTPGFNDVQHFVSGRLTR

SEQ ID NO: 1700 - protein, 394 aa, Zea mays subsp. mays
LGAERRARLPPGEMGWPLVGGMWAFLRAFKSGKPDAFIASFVRRFGRTGVYRSFMFSSPTVLVTTAEGCKQVLMDDDAFVTGWPKATVALVGPRSFVAMPYDEHRRIRKLTAAPINGFDALTGYLPFIDRTVTSSLRAWADHGGSVEFLTELRRMTFKIIVQIFLGGADQATTRALERSYTELNYGMRAMAINLPGFAYHGALRARRRLVAVLQGVLDERRAARAKGVSGGGVDMMDRLIEAQDERGRRLDDDEIIDVLVMYLNAGHESSGHITMWATVFLQENPDMFARAKAEQEAIMRSIPSSQQGLTLRDFRKMEYLSQVIDETLRLVNISFVSFRQATRDVFVNGYLIPKGWKVQLWYRSVHMDPQVYPDPTKFDPSRWEGHSPRAGTFL

SEQ ID NO: 1701 - protein, 305 aa, Miscanthus sinensis var. sinensis
IESVGEGVTDVAPGDHVLPVFTGECKECPHCKSAESNMCDLLRINTDRGVMIGDGKSRFSINGKPIYHFVGTSTFSEYTVMHVGCVAKINPQAPLDKVCVLSCGISTGLGASINVAKPPKGSTVAIFGLGAVGLAAAEGARIAGASRIIGVDLNPSRFEEARKFGCTEFLNPKDHKKPVQEVLAEMTNGGVDRSVECTGNISAMIQAFECVHDGWGVAVLVGVPHKDAEFKTHPMNFLNERTLKGTFFGNFKPRTDLPNVVELYMKKELEVEKFITHSIPFAEINKAFDLMAKGEGIRCIIRMEN

SEQ ID NO: 1702 - protein, 1230 aa, Candida albicans
MSILSENNPTPTSITDPNKSSHLHNPELNSGTRVASGPGPGPEAESTPLAPPTEVMNTTSANTSSLSLGSPMHEKIKQFDQDEVDTGETNDRTIESGSGDIDDSQQSHNNNNNNNNNNNESNPESSEGDDEKTQGMPPRMPGTFNVKGLHQGDDSDNEKQYTELTKSINKRTSKDSYSPGTLESPGTLNALETNNVSPAVIEEEQHTSSLEDLSLSLQHQNENARLSAPRSAPPQVPTSKTSSFHDMSSVISSSTSVHKIPSNPTSTRGSHLSSYKSTLDPGKPAQAAAPPPPEIDIDNLLTKSELDSETDTLSSATNSPNLLRNDTLQGIPTRDDENIDDSPRQLSQNTSATSRNTSGTSTSTVVKNSRSGTSKSTSTSTAHNQTAAITPIIPSHNKFHQQVINTNATNSLSSLEPLGVGINSNSSPKSGKKRKSGSKVRGVFSSMFGKNKSTSSSSSSNSGSNSHSQEVNIKISTPFNAKHLAHVGIDDNGSYTGLPIEWERLLSASGITKKEQQQHPQAVMDIVAFYQDTSENPDDAAFKKFHFDNNKSSSSGWSNENTPPATPGGSNSGSGSGGGGAPSSPHRTPPSSIIEKNNVEQKVITPSQSMPTKTESKQSENQHPHEDNATQYTPRTPTSHVQEGQFIPSRPAPKPPSTPLSSMSVSHKTPSSQSLPRSDSQSDIRSSTPKSHQDVSPSKIKIRSISSKSLKSMRSRKSGDKFTHIAPAPPPPSLPSIPKSKSHSASLSSQLRPATNGSTTAPIPASAAFGGENNALPKQRINEFKAHRAPPPPPSAPPAPPVPPAPPANLLSEQTSEIPQQRTAPSQALADVTAPTNIYEIQQTKYQEAQQKLREKKARELEEIQRLREKNERQNRQQETGQNNADTASGGSNIAPPVPVPNKKPPSGSGGGRDAKQAALIAQKKREEKKRKNLQIIAKLKTICNPGDPNELYVDLVKIGQGASGGVFLAHDVRDKSNIVAIKQMNLEQQPKKELIINEILVMKGSSHPNIVNFIDSYLLKGDLWVIMEYMEGGSLTDIVTHSVMTEGQIGVVCRETLKGLKFLHSKGVIHRDIKSDNILLNMDGNIKITDFGFCAQINEINSKRITMVGTPYWMAPEIVSRKEYGPKVDVWSLGIMIIEMLEGEPPYLNETPLRALYLIATNGTPKLKDPESLSYDIRKFLAWCLQVDFNKRADADELLHDNFITECDDVSSLSPLVKIARLKKMSESD

SEQ ID NO: 1703 - protein, 273 aa, Triticum aestivum
  unsure (1)..(273): unsure at all Xaa locations
QLRHLPKYWEAGGNCNLAFAAARLGLRCSTLGHVXEEIYGKFLLDVLEAXSISVVGMLENADVTACRQAYETLLCWTLLCWVLVDPFQRHGFCSRADFSKEPAFSWIRKLPAETKIAIHHSKILFSNGYAFDEFSPDVIASAIDCAIDAGTSVFFDPGPRGRSLLHGNRDEQXRALEHALRLSDVLLLTADEAESLTNIGNQFKAXQELLRKREPEQNGVGIKMGSRGGHVTKARLCFLSLVNVDRILMRLRQADTPSQSHGCRGFHKDLNVR

SEQ ID NO: 1704 - protein, 366 aa, Triticum aestivum
MSDGKDTLDLSALGAAVPNAAELSAEDKANLVESIKNTLQGLAARHTDVLESLEPKVRKRVEALREIQSQHDEFEAKFFEERAALEAKYQKMYEPLYSKRHDVVNGVVEAEGVTKDSGEAAPDEKEEKGVPDFWLNAMKNHEILAEEIQERDEEALKYLKDIKWYRITEPKGFKLEFHFNTNPFFKNEVLSKTYHMIDEDEPILEKAIGTEIEWYPGKSLTQKVLKKKPKKGSKNTKPITKIENCESFFNFFSPPQVPDDDEEIDEDTAEQLQNQMEQDYDIGSTIRDKIIPHAVSWLTGEAAQDEDFDGIMDDDEDDDEDDEEDEDEDEDDEEDEDDDDGDKKKGGRVPAGEGQAGERPAECKQQ

SEQ ID NO: 1705 - protein, 325 aa, Listeria innocua
MNLNKHSERKFDLITVGRACIDLNAVEYNRPMEETMTFSKYVGGSPANIAIGTAKLGLKVGFIGKISDDQHGRFIEKYMRDLNINTDGMVKDTAGRKVGLAFTEIKSPEECSILMYRENVADLYLTPEEISEDYIKETRVLLVSGTALAQSPSREAVLKAVHLAQKNDVIVAFELDYRPYTWKNTEETAVYYSLVAEQADVIIGTRDEFDMMENQIGGNNEMTIDNLFKHKAEIIVIKHGVEGSFAYTKAGETFRAQAYKTKVLKTFGAGDSYASAFLYGLFSGENIETALKFGSAAASIVVSKHSSSDAMPTADEIKALIANAD

SEQ ID NO: 1706 - protein, 847 aa, Neurospora crassa
MAQNVTEIHDMGVDKKSSPYDEGHIDEKAPHDFAAEEATVDRAVEADFSVTEQDLLEAKALADSMSLEEVRALMEQVLKIHGNDPNFPHTIMTKIEEFLGNANILTNPEKHEEIIYEMKIEAALITNNSPYAEVRAVVDNHDDPTMPCSTIRAWVIGLIFSGALGAINQLFSIRMPAITVGLNVAQLLAYPVGKICEKALPDVGFTLFGSRHSLNPGPFSRKEHMLITIMANVAGSTPYTNNIIWSQYLPEYFNQSYAGQFSYQILVALSTNLIGYGMAGLTRRFLVYPSYCVWPASLVTIALNNAFHTESNVPVLGPLKKVFSMSRYTFFLWATLAMFVYFWLPNYLFLALSAFSWLSWISPNNMVLSNITGFNNGLGLNPWPTFDWNVLLFDGTDPLMVPFFSTLNKFLGMFCSFFVVIGIWWTNTYNTGYLPINSNKVYDNTGNRYDISRAINEKGLFDAAKYEAYSPAYLAAGNLVIYLFFFAIYPATLTYILLNHRYEVSMGFKNLWNSLRRNKNTEAGQYKDVHNRLMAVYPEVPEWWYLIILLGAIGCGIGGIAGWETYTTPAVVFYGLILCFIFVIPVGIVKAMTGMEVTLNVLAEFIGGSWVQGNALAMNYFKSFGYVTCAHAVWFANDLKLAHYVKIPPKHTFAAQVVATLVSTFICTGILNFQMNDIPRVCTNEAPNKMTCPGINTFFTASVLWGTIGPKKIFGHNGQYTALMLGWPLGLLLPVITWYIQKKFPQKKWLRQIHPIVLLYGAMYWAPYNLSSRFLGFWSKYNFVLSAAFTTGISVAAVIIFFSLDWSGVEVSWWGNDVVSEGCEGKPCLLKTLKEGEIFGPGPGQFH

SEQ ID NO: 1707 - protein, 189 aa, Glycine max
  unsure (1)..(189): unsure at all Xaa locations
PDICKDTSSVWTCPSDTVFYDASVXWGLIGPRRIFGDLGTYEKVNWFFLGGAIAPLLVWLAARSFPQQEWIRLINMPVLIGATGMMPPATAVNYPSWIIAGFLSGFVVFRYKPEWWKRHNYVLSGALDAGLAFMGVLLYLCLGLEDISLNWWGNDLDGCTLAHCPTAKVVEETRLCRFSLEHNCKLNHN

SEQ ID NO: 1708 - protein, 315 aa, Zea mays
MRWRLQPAPAPAPTLLLVLLVATVAAVVVVVRAEPQVPCYFVFGDSLVDNGNNNDIASLARANYPPYGIDFAAGPTGRFSNGLTTVDAISRLLGFDDYIPAYAGASGDQLLTGVNFASAAAGIRDETGQQLGQRISFGGQLQNYQAAVQQLVSILGDEDSAANHLSQCIFTVGMGSNDYLNNYFMPAVYSTSQQYTPEQYADVLINQYSQQLRTLYSYGARKVALMGVGQVGCSPNELAQRSTDGTTCVPQINGAIDIFNRKLVALVDQFNALPGAHFTYINVYGIFQDILRAPGSHGLTVTNQGCCGVGRNNGQ

SEQ ID NO: 1709 - protein, 449 aa, Helicobacter pylori J99
MSNTTWSPTSWHSFKIEQHPTYKDEQELERVKKELRSYPPLVFAGEARNLQERLAQVIDNKAFLLQGGDCAESFSQFSANRIRDMFKVMMQMAIVLTFAGSIPIVKVGRIAGQFAKPRSNATEILDDEEVLSYRGDIINGISKKEREPKPERMLKAYHQSVATLNLIRAFAQGGLADLEQVHRFNLDFVKNNDFGQKYQQIADRITQALGFMRACGVEIERTPILREVEFYTSHEALLLHYEEPLVRKDSLTNQFYDCSAHMLWIGERTRDPKGAHVEFLRGVCNPIGVKIGPNASVSEVLELCDVLNPHNLKGRLNLIVRMGSKIIKERLPKLLQGVLKEKRHILWSIDPMHGNTVKTNLGVKTRAFDSVLDEVKSFFEIHRAEGSLASGVHLEMTGENVTECIGGSQAITEEGLSCHYYTQCDPRLNATQALELAFLIADMLKKQRT

SEQ ID NO: 1710 - protein, 471 aa, Chlamydomonas reinhardtii
MDSMAPMALGQRGPCVRTLQQRRTLRACPVSRGTVGRLVVRAVASPPKMDTEAAALKAKASGVQQPVYFADSVASVSMDEECSAFIDRDGDFMEVMCCDYGFRSGASRMYQQENDGRIPKNAFQLGWDNFKSELRSLRQSIRFDDYSTISEANPPRTPMSRAAYSVGQAALDSLDAVDRALEAAQVLEPLRPRAVTLDGVTRDSESGSKLINNCAEIRSKLKQLKLSNKAMWDREHAREQSGRGVETPWLIKGVYLSLCLLLDFLYENRPIQRFWFLETVARMPYFSYISMLHLYESLGWWRAGAELRKIHFAEEWNELHHLQIMESLGGDQLWFDRFAAQHAAILYYWILLGLYVFSPRLAYNFSELIEYHAVDTYGEFWDANEELLKSLPPPLVAAVYYRSQDLYMFDSFQTSQPMQNPRRPSCKTLYDVFKNICDDEMEHVKTMKACQDETVSQDIITRREDGPRVGL

SEQ ID NO: 1711 - protein, 271 aa, Zea mays
  unsure (1)..(271): unsure at all Xaa locations
MRPRARPHQLLRSSAMAEREQQEQVASDDAAEWKQVAELRAVTQAQDPSCKDEDDYTLRRFLRARDHNIGKASAMLLKYLKWKPAAKPHGAIAAAEVAREAAQGKLYLQGHDREGRPLIYGFGARHHPARRDLDEFKRYVVHVLDATVARLXLLLPPGDARQEKFAAVADLAGWGYANCDIRGYLAALDIMQSYYPERLARVFLVHVPYVFMAAWKIVYPFIDDNTKKKFVFVPDKDLDRTLREAIDDSQLPEIYGGKLKLVTPAAKLPSH

SEQ ID NO: 1712 - protein, 250 aa, Hordeum vulgare subsp. vulgare
MAKSYPVVSAEYLEAVEKARQKLRALIAEKNCSPLMLRLAWHSAGTFDVSSKTGGPFGTMKKPAEQAHAANAGLDIAVRMLEPIKEEIPTISYADLYQLAGVVAVEVSGGPVIPFHPGREDKPQPPPEGRLPDATKGSDHLRQVFGKQMGLSDQDIVALSGGHTLGRCHKERSGFEGPWTRNPLKFDNSYFTELLSGDKEGLLQLPSDKTLLTDPVFRPLVEKYAADEKAFFEDYKEAHLRLSELGYAEA

SEQ ID NO: 1713 - protein, 152 aa, Zea mays
MVKAVAVLGSSDGVKGTIFFTQVGDGPTTVTGSVSGLKPGLHGFHVHALGDTTNGCMSTGPHYNPASKEHGAPEDENRHAGDLGNVTAGADGVANINVTDSQIPLTGPNSIIGRAVVVHADPDDLGKGGHELSKSTGNAGGRVACGIIGLQG

SEQ ID NO: 1714 - protein, 260 aa, Bradyrhizobium japonicum USDA 110
MPMIDADGCLINVSVEGRDGGPTLMLSNSLGCTLQMWEPQMKALTQVFRVIRYDRRGHGKSNVPPGPYTMERFGRDVLAILNDLNIEKVHWCGLSMGGMVGQWLGANAPERFGKLILANTSCYYAEPTKWLERIDAVKKGGIAAVADAVIAGWLTQDFREREPDITARMKAMLLASPVEGYLACCEALSTLDQRELLPKIKSPTLVIAGRHDMATPISAGELIRSKIPGANMTIIDAAHISNVEQPHAFTDAVVGFLTQR

SEQ ID NO: 1715 - protein, 305 aa, Miscanthus transmorrisonensis
IESVGEGVTDVAPGDHVLPVFTGECKECPHCKSAESNMCDLRRINTDRGVMIGDDKSRFSINGKPIYHFVGTSTFSEYTVMHVGCVAKINPQAPLDKVCVLSCGISTGLGASINVAKPPKGSTVAIFGLGAVGLAAAEGARIAGASRIIGVDLNPSRFEEARKFGCTEFVNPKDHKKPVQEVLAEMTNGGVDRSVECTGNINAMIQAFECVHDGWGVAVLVGVPHKDAEFKTHPMNFLNERTLKGTFFGNFKPRTDLPNVVELYMKKELEVEKFITHSVPFAEINKAFDLMAKGEGIRCIIRMEN

SEQ ID NO: 1716 - protein, 309 aa, Rhodopseudomonas palustris
MTTLFLTHSACLDHHTPEGHPERAARLVAINKTLGEERFAPLARAESPIGSLEHIALCHTDHHIVELRHMSPSTGIVYVDGDTSMSPGTFEAALRGVGGSVAAVDAVMKGEAANAFVATRPPGHHAEITKPMGFCFFGNAAIAARYAQRQYGIERAAVVDFDVHHGNGTQDIFWGDRTVMYCSTHQMPLFPGTGSQGERGEYDNIVNAPLASEDGGTEFRFAFEQLILPQLKRFSPELIVISAGFDAHYRDPLASLNLRAEDFGWVTERLMEVAAQTAGGRIVSVLEGGYDLQGLSESVAAHVGALMGA

SEQ ID NO: 1717 - protein, 455 aa, Bacillus megaterium
TIKEMPQPKTFGELKNLPLLNTDKPVQALMKIADELGEIFKFEAPGRVTRYLSSQRLIKEACDESRFDKNLSQALKFVRDFAGDGLFTSWTHEKNWKKAHNILLPSFSQQAMKGYHAMMVDIAVQLVQKWERLNADEHIEVPEDMTRLTLDTIGLCGFNYRFNSFYRDQPHPFITSMVRALDEAMNKLQRANPDDPAYDENKRQFQEDIKVMNDLVDKIIADRKASGEQSDDLLTHMLNGKDPETGEPLDDENIRYQIITFLIAGHETTSGLLSFALYFLVKNPHVLQKAAEEAARVLVDPVPSYKQVKQLKYVGMVLNEALRLWPTAPAFSLYAKEDTVLGGEYPLEKGDELMVLIPQLHRDKTIWGDDVEEFRPERFENPSAIPQHAFKPFGNGQRACIGQQFALHEATLVLGMMLKHFDFEDHTNYELDIKETLTLKPEGFVVKAKSKKIPL

SEQ ID NO: 1718 - protein, 374 aa, Zea mays
MAATSSLKSSLLLPSTIFDFSGAAAAVSISTQKRRSRGARVQVSAAADSKNILVMGGTRFIGVFLSRLLVKEGHQVTLFTRGKAPITQQLPGESDAEYADFSSKVLHLKGDRQDFEFVKTSLAANGYDVVYDINGREAVQVEPIIEALPNLQQYIYCSSAGVYLKSDILPHCEVDAVDPKSRHKGKLETESLLTSRGVNWTSIRPVYIYGPLNYNPVEEWFFHRLKAGRPIPIPGAGNQITQLGHVKDLARAFNLVLGNPKASKQIFNISGAKYVTFDGLARACAKAGGFPEPELVHYNPKEFDFGKKKAFPFRDQHFFASVEKATSELGWTPEFDLVEGLTNSYNLDFGRGTFRKEADFTTDDMILDKKLATV

SEQ ID NO: 1719 - protein, 394 aa, Phalaris arundinacea
EPASTEDPALSIAGAVHSQKLAVRAISRLQALPGGDVKLLCGTVVEHVRELTSYDRVMVYKFHDDEHGEVLAESRRADLEPYLGLHYPATDIPQASRFLFRQNRVRMIADCHAAPVRVIQDPAMPQPLCLVGSTLRSPHGCHAQYMANMGSIASLVMAVIISSGGEDEHSMGRGAVPSAMKLWGLVVCHHTSPRCIPFPLRYACEFLMQAFGLQLNMELQLAHQLSEKHILRTQTLLCDMLLRDSPTGIVTQSPSIMDLVKCDGAALYYHGKCYPLGITPTEAQIKDIIEWLTVCHGETTGLSTDSLADAGYPGATALGDAVCGMTVAYITPSDYLFWFRSHTAKEIKWGGAKHHPEDRDDGQRMHPRSSFKAFLEVVKSRSLPWENAEMDAIH

SEQ ID NO: 1720 - protein, 420 aa, Rhodopseudomonas palustris
MRVTRPAGGPLFPIGSAMSQSASTSHLLPVFARADVAFERGEGVWLHGTDGERYLDFTSGVAVNALGHCHPHLVEALQQQASKLWHVSNLFKSPEGERLAARLCEQSFADKVFFCNSGAEAVECALKMARHYHFSKGEPERTRVITFEGAFHGRTLGTLAATGSAKYLEGYGQPLEGFDQLPLGDLDAVKAAIGPNTAAILIEPLQGEGGVRSPELAFFRGLRELCDAHGLLLVFDEVQTGMGRTGELFAYKRIGVAPDIMALAKALGGGFPIGACLSTAEAAKGMAPGAHGSTFGGNPLAVAVANAVLDVMLQPGFFDHVKKMSLLLKQKLAGVVDRHPRVVSEIRGEGLLLGLKAVVPSPELIAALRAEKLLSVGAGDNVVRLLPPLIVNEAELDEAVGRLERACVTLAGQAAQKEAV

SEQ ID NO: 1721 - protein, 95 aa, Zinnia elegans
WFQNRRTRWKTKQLEKDYDVLQESYNQLKANYENLLQEKEKLKSQVLELSEKLSMQENEKGTSDSSSTKSPSDPLQQEHVTDCVNDEDVTKVSND

SEQ ID NO: 1722 - protein, 100 aa, Prorocentrum minimum
SDFELKLMEIDSEQLAIPETPYNCTIQMPSTEFQRIVRDLQVLGDTCQISCTKEGVRFSVTGNIGTGNVLIRSNAAAEKEDDRVVIEMQEPVELTFALRY

SEQ ID NO: 1723 - protein, 172 aa, Salmonella enterica subsp. enterica serovar Typhi
MSKKIAVLITDEFEDSEFTSPAAEFRQAGHEVITIEKEAGKTVKGKKGEASVTIDKAIDDVRPDEFDALLLPGGHSPDYLRGDSRFVDFTRDFVNSGKPVFAICHGPQLLISADVIRGRKLTAVKPIIIDVKNAGAEFYDQEVVVDKDQLVTSRTPDDLPAFNREALRLLGA

SEQ ID NO: 1724 - protein, 901 aa, Saccharomyces cerevisiae
MVNPVGSSKLEQNNIKSIIGSSYNRLYSQFTSDELTEVGNYKILKQIGEGSFGKVYLALHRPTHRKVCLKTSDKNDPNIVREVFYHRQFDFPYITKLYEVIVTESKVWMALEYCPGKELYDHLLSLRRISLLECGELFAQISGAVYYAHSMHCVHRDLKLENILLDKNGNAKLTDFGFTRECMTKTTLETVCGTTVYMAPELIERRTYDGFKIDIWSLGVILYTLITGYLPFDDDDEAKTKWKIVNEEPKYDAKVIPDDARDLISRLLAKNPGERPSLSQVLRHPFLQPYGSVVLDQTQKILCRQRSGGTQFKSKLERRLLKRLKQSGVDTQAIKQSILKKKCDSLSGLWLLLLAQGKKQENCKYPKRSRSVLSVKKVIESATHNDTNGISEDVLKPSLELSRAASLSKMLNKGSDFVTSMTPVSRKKSKDSAKVLNPTLSKISSQRAYSHSIAGSPRKSNNFLQKVSSFFKSKKSSNSNSNNSIHTNVSESLIASNRGAPSSGSFLKKNSGSIQKSRTDTVANPSRTESIGSLNENVAGAIVPRSANNTTLENKKTSGNEIGLKVAPELLLNEHIRIEEPRLKRFKSSISSEISQTSTGNYDSESAENSRSISFDGKVSPPPIRNRPLSEISQISNDTYISEYSTDGNNSSFKISDTIKPSYIRKGSETTSQYSASSEKMTNGYGRKFVRRDLSIVSTASSTSERSSRTDSFYDITTATPVVTTDNRRNKNNNLKESVLPRFGTQRPWTGKRTYTTSRHGKNARRSSKRGLFKITSSNTDSIIQEVSSSEEEDHNVIYSKGKGLPTPVLQTKGLIENGLNERDEEGDDEYAIHTDGEFSIKPQFSDDVIDKQNHLPSVKAVATKRSLSEGSNWSSSYLDSDNNRRRVSSLLVEDGGNPTA

SEQ ID NO: 1725 - protein, 179 aa, Zea mays
MAATAMIRITTLRCRHDPLSSLPRTTSAACSCTLPPRCRQCRLLPPHSSGCSPSSSIFPRRVRVRPTAALKRIGGGNTSFMGPANNGATTLQRSSSPDLRRSLIVLKSTAGTGGGNASSGLLPTILGVAHLLVSLGIVLATDKFLKQAFVAASIKFPSALFGMFCVFSVLVVFDTFVPA

SEQ ID NO: 1726 - protein, 249 aa, Oryza sativa
  unsure (1)..(249): unsure at all Xaa locations
MEQLFVDDPAFASSMSSLEADIFSGAGQLPSSPWLDLDLDDDVQDLSMAPTTANAVSSGYGSGGSGSHRKLSHNAYXERDRRKQLNELYSSLRALLPDADHTKKLSIPTTVSRVLKYIPELQKQVENLERKKKELTTTSTTNCKPGVLGSQLMSEGMAPIVSATCINDMEIMVQVSLLSNVAGSVLPLSKCIKVLENEGLHFISSSTSSGFGNRTFYSIHLQRSEGTINEECPAFCERLEKVVRNKAKL

SEQ ID NO: 1727 - protein, 216 aa, Gossypium schwendimanii
DVYYWECKGYTPLFPRILGHEASGIVESVGEGVNDLKPGDHVLPIFTGECKECRHCLSEESNNMCELLRINCDRGVMLADGKTRFSINGKPIYHFVGTSTFSQYTVVHVGQVAKISPTAPLDKVCPISCGICTGFGATVNVAKPKKGQTVAVFGLGAVGLAAAEGARVCGASRIIAVDVNPRRFEEAKRFGITEFVNPKDYDKPVQEVIVEMTGGG

SEQ ID NO: 1728 - protein, 207 aa, Oryza sativa
MTEAWVRHKPGMASVKDMPVLQDGPPPGGFAPVRYARRIPTKGPSAIAIFLTTFGAFAWGMYQVGQGNKVRRALKEEKIAARTALVPVLQAEEDERFVKEWTKSLMWEEIIMKDVPGWKVGQSVYNSGKWMPPATGELRLKIDEIQGACRSLPKMPSCLLGMHKAFEPEYPKKIATRNSLLKHSLCICCVDEILANNWTCQTDICFT

SEQ ID NO: 1729 - protein, 341 aa, Escherichia coli O157:H7
MKALSKLKAEEGIWMTDVPVPELGHNDLLIKIRKTAICGTDVHIYNWDEWSQKNIPVPMVVGHEYVGEVVGIGQEVKGFKIGDRVSGEGHITCGHCRNCRGGRTHLCRNTIGVGVNRPGCFAEYLVIPAFNAFKIPDNISDDLASIFDPFGNAVHTALSFDLVGEDVLVSGAGPIGIMAAAVAKHVGARNVVITDVNEYRLELARKMGITRAVNVAKENLNDVMAELGMTEGFDVGLEMSGAPPAFRTMLDTMNHGGRIAMLGIPPSDMSIDWTKVIFKGLFIKGIYGREMFETWYKMAALIQSGLDLSPIITHRFSIDDFQKGFDAMCSGQSGKVILSWD

SEQ ID NO: 1730 - protein, 581 aa, Schizosaccharomyces pombe
MSHSDYNFDIEQNAFEKEAPKVSIERKGDVVEEEVIATGEVENYAEPKSRNFLQRFFDDFKPALTTRGDGVALKRKLTSRHMQMISVGGAIGSGLYVGSGSAFADGGPASVIINYILIGIMMIFVIYALGELAIAYPVAGSFNTYATRFIDPAWGFAVSWNYFLNYFVTCPLELTTCAITFKFWTEINSAAWISIFLAVVIVINLFGVRAYGEVEFILSTIKVIATVGFIILAIIINCGGVPTDHRGYIGGSIIKQKPFRHGFKGFCSVFTTAAFSFSGTEIIGLAAAEVGNPRKSVPSAVKQVFWRIAIFYVVSLILIGLLVSPDDPRLMGNGDVSVSPFVLAIQEANIKGLPSVFNAVIIISVVSVTNSTTYTAARTLQGMATLKQAPKFFSYTDRVGRPLIAMVVVLLFGFFAYINEADKNGSDISDTVFDWLLAISGLSSFFTWGSICLSHIMFRLAFKKQGHSLKELGFVSPMGIWGSVIGLGFNILCLMAEFYVSLFLIGGSPNANDFFQGYLAACIALAFFIGYKIYDRSHIPSLDKLDIDTGLKTYDNQDEEKEEYSSKGPLNILKKAWNAVC

SEQ ID NO: 1731 - protein, 185 aa, Thermoanaerobacter tengcongensis
MFYQPVLETSRLILKKISLEDAEDMFEYASDPEVTKYVSWEYHKNIEDSLKFINLLLSRYEKGEPSDWGLYLKENGKLIGTCGFLFIDEKNMVGEVGYVLGRKYWNKGIMTEAVRKVIEFGFEKLNLNRIQARCKVENIASERVMQKVGMKFEGVLREAVFVKGRFWDMKMYSILKREYEKNREA

SEQ ID NO: 1732 - protein, 126 aa, Glycine max
  unsure (1)..(126): unsure at all Xaa locations
VGTVVASSVYFATAWWLLTSIENICDEELLPKGSPWTCPGDDVFYNASIIWGVVGPKRMFTKDGVYPGMNWXXLIGLLAPLPVWLLSXXFPNHKWIQLINFPIIIAGASNIPPFRSVNYITWGIVG

SEQ ID NO: 1733 - protein, 431 aa, Brassica rapa
NNSYILSFLLVFFVLILLPPAFSINTLSSIESLKISSNRTLVSPGNVFELGFFRTNSSSRWYLGIWYKEVSDRTYVWIANRNNPLSSSIGTLKISCNNLVLLDHSNKSVWSTNITRGNERSPVVAELLANGNFVMRDSNNNDASGFLWQSFDYPTDTLLPEMKLGYDLKTGLNRFLTSRRSSDDPSSGDFSYKLEPRRLPEFYLSSGVFLLYRSGPWNGIRFSGLPDDHKLSYMVYNFTENNEEVAYTFRMTNNSFYSRLFVSFSGYIEQQTWNPSSGMWNSFWAFPLDSQCDTYRACGPYSYCAVNTSAICNCIQGFNPSNVEQWDQRVWAGGCMRSTRLSCSGDGFTKMKNMKLPETTMAIVDRSIGVKECEKRCLNDCNCTAFANADIRNGGTGCVIWTGELEDMRSYATGATDSQDLYVRLAAADSV

SEQ ID NO: 1734 - protein, 582 aa, Zea mays
  unsure (1)..(582): unsure at all Xaa locations
MGEVEDMYTQDGTVDMKGNPAVKKGTGNWRACPYILANECCERLAYYGMSTNLVNYMKTRLGQVNSVASNNVTNWQGTCYITPLIGAFFADAYMGRFWTIAIFMIIYIFGLALLTMASSVKGLVPTSCGDKDVCHPTDAQAAVVFVALYLIALGTGGIKPCVSSFGADQFDENDEREKKSKSSFFNWFYFSINIGALVASTVLVYVQTHVGWGWGFGIPAVVMAIAVGSFFVGTPLYRHQKPGGSPLTRIAQVLVACARKWNVAVPADKSRLHETVDGESGIEGSRKLEHSEQLACLDRAAVVTAEDGAEASPWRLCSVTQVEELKSVIRLLPIWASGIVFAAVYSQMSTMFVLQGNTLDQSMGPRFKIPSATLSMVDTISVIVWVPVYDRAIVPLVRSYTGRPRGFTQLQRMGIGLVVSIFSMVAAGVLDIVRLRAIARHGLYGEDDIVPISIFWQIPQYFIIGCAEVFTFVGQLEFFYDQAPDAMRSMCSALSLTTVALGNYLSTVLVTIVTHITTRHGRIGWIPENLNRGHLXDYFFXLLAVLSXLLNFLAYLVIASWYKYKKTADDYPGAKGEHGTEH

SEQ ID NO: 1735 - protein, 406 aa, Escherichia coli CFT073
MAIEQTAITRATFDEVILPIYAPAEFIPVKGQGSRIWDQQGKEYVDFAGGIAVTALGHCHPALVNALKTQGETLWHISNVFTNEPALRLGRKLIEATFAERVVFMNSGTEANETAFKLARHYACVRHSPFKTKIIAFHNAFHGRSLFTVSVGGQPKYSDGFGPKPADIIHVPFNDLHAVKAVMDDHTCAVVVEPIQGEGGVTAATPEFLQGLRELCDQHQALLVFDEVQCGMGRTGDLFAYMHYGVTPDILTSAKALGGGFPVSAMLTTAEIASAFHPGSHGSTYGGNPLACAVAGAAFDIINTPEVLEGIQAKRQHFVDHLQKIDQQYDVFSDIRGMGLLIGAELKPQYKGRARDFLYAGAEEGVMVLNAGPDVMRFAPSLVVEDADIDEGMHRFAHAVAKVVGA

SEQ ID NO: 1736 - protein, 456 aa, Zea mays
MSFRSIVRDVRESFGSLSRRSLEVRISGLPGLSGGHHRGKSVGSVSDLRDRPVVVDQSRWVGLPPELLRDVMRRLEEGESNWPSRKNVVACAAVCGTWREICKDIVLSPEFCGKLTFPVSLKQPGPRNGIIQCFIKRDKSTSTYYLYLCLSPVVLSEDGKFLLAAKRNRRTTYTEYIISVDPKSISRSSDGCVGKMRSNFLGTKFIVHDTRAPHNAGSLVSCERGSRRISSRRVSPKVPTASYPIARVNYELNLLGTRGPRRMNCTMHSIPASTLDPQGMVPEPGQPKQIFVPGSSSFEDSFRSANNTPSSSRFSVADRSLDWSSSRFSETSGLAQQDDDDSDQAKERPLVLCNKEPRWHEQLQCWCLNFHGRVTVASVKNFQLIAAPQLDSEPSQQAQQQTQPSNSSSASDHDKVILQFGKVANDMFTMDYRYPLSAFQAFAICLTSFDSKLACE

SEQ ID NO: 1737 - protein, 387 aa, Xylella fastidiosa 9a5c
MKSIQFNSIHTIGHVRIVGCGTPGSFEQAAWGSEDDVYLAVLCVVVFFGCCMGCLLILASFREWSFMHYRRLGSTGLQLSVLSFGTWVTFGNQVARDEARNLVACAWDHGVNFFDGAENYAQGRAEQVLGDVIADLRLPRDGYCVSSKVFFGPVKEPRPTQCGLSRKHVHDACHAALKRLRVDYLDLFFCHRPDADTPIEETVRAMTTLIRQGKVLYWGTSEWSAAQIAEAIAIASREHLERPWVEQPQYNLLHRERVEREYVSLYAQGLGTTIWSPLASGLLTGKHNVGVASGSRLVHPGYEWLQGGVLGEGEARLVQARRFSEVAADLGQPPAQLAIAWCLRNPHVSTVILGASRVAQLKENLRALQVVAALDAAAWRCVEAAME

SEQ ID NO: 1738 - protein, 157 aa, Triticum aestivum; identical to SEQ ID NO: 642

SEQ ID NO: 1739 - protein, 161 aa, Schizosaccharomyces pombe
MSKIKLISSDNEEFVVDQLIAERSMLIKNMLEDVGEINVPIPLPNVSSNVLRKVLEWCEHHKNDLYSGTEEESDIRLKKSTDIDEWDRKFMAVDQEMLFEIVLASNYLDIKPLLDTGCKTVANMIRGKSPEDIRKTFNIPNDFTPEEEEQIRKENEWAEDR

SEQ ID NO: 1740 - protein, 336 aa, Streptomyces griseoflavus
MTATRILVTGGAGFIGSHYVRTLLGPHGPAGVRITVLDKLTYAGNPANLDPVRAHPGFRLVQGDVCDAAVVDRLVAEHDQIVHFAAESHVDRSILGGAEFVRTNVGGTQVLLDAALRHHGRGRGVFVQVSTDEVYGSIPYGSWPETHPLSPSSPYAASKAAADLVALAHHRTHGLDVRVTRCSNNYGHHHFPEKLIPLFITRLLEGRTVPLYGDGLNVRDWLHIDDHVQGIELVRTKGRPGEVYNIGGGTELTNRELVSLLLEACGAGWESVEYVADRKGHDRRYSVDCAKITLELGYEPRKDFATGLAETVSWYRENRDWWEPLRQRAELGQAVR

SEQ ID NO: 1741 - protein, 408 aa, Oryza sativa
MEGGGAGSGMERWREMFRGADIYDVIRNAILIAGADSPRELLRRRQGIIEWLFAVAPVTVPVPAPLACGRVVDGAGNRLPPAAIPDGGGHHHDDNDGNFAAAEAQTSLIDQQILEALYDEIEEDTQVINEVLRIKDILINYKEQSVDTLFDGLRRLQLMRLSISVLKSTQIAEAVAPLNKHRSPVICKIARDLAKGWKGVAADWVGPSSANADTSPDISNPSTVEDDFGLPTPPMDVGAFFLPQSAAEQYVSETLINFLLLSIFFYCHYMKFLHKADDDDDESLIPNAKNDCGFGGYKMEIAKPVANMDENILRKGKDLSRQHGPPMRQANLQMKLAQHHAIAITEQRPIAVVRKPLPDHVSKLERQATILEGCKVGIGKRNNTDIADLRLEATKRKLNDAYQEAENS

SEQ ID NO: 1742 - protein, 301 aa, Mycobacterium leprae
MRRFWRTVVEVTSQNSQALAQASGAFTLGGDLKVNRLGFGAMRLTGKGVWGPPVDRYEAVRVLRRAVELGVNFIDTADSYGPYVSEEIIAEALHPYKGLVIATKAGLLRTGRDVWIPLGNPSYLRQELEMSLRRLNVDTIDLFQLHRIDPNFPLADQVGELFTLKNEGKIRHIGLSEINLDQLTAAQQITEIVSVQNMYNLSARAAEPLLDAVTSRGIGFIPWSPLAAGPLAAPDGPLQRIAVNHHATPSQLALAWLLKRSPVMLPIPGTSRVAHLEENVAAAEISLSDDEFEMLSAAGAQ

SEQ ID NO: 1743 - protein, 394 aa, Synechocystis sp. PCC 6803
MVKRISILGSTGSIGTQTLDIVTHHPDAFQVVGLAAGGNVALLAQQVAEFRPEIVAIRQAEKLEDLKAAVAELTDYQPMYVVGEEGVVEVARYGDAESVVTGIVGCAGLLPTMAAIAAGKDIALANKETLIAGAPVVLPLVEKMGVKLLPADSEHSAIFQCLQGVPEGGLRRIILTASGGAFRDLPVERLPFVTVQDALKHPNWSMGQKITIDSATLMNKGLEVIEAHYLFGLDYDHIDIVIHPQSIIHSLIEVQDTSVLAQLGWPDMRLPLLYALSWPERIYTDWEPLDLVKAGSLSFREPDHDKYPCMQLAYGAGRAGGAMPAVLNAANEQAVALFLQEKISFLDIPRLIEKTCDLYVGQNTASPDLETILAADQWARRTVLENSACVATRP

SEQ ID NO: 1744 - protein, 1134 aa, Selaginella martensii
MSTTKLTYSSGSSAKSKHSVRVAQTTADAKLHAVYEESGESGDSFDYSKSINATKSTGETIPAQAVTAYLQRMQRGGLVQPFGCMLAVEEGSFRVIAFSDNAGEMLDLMPQSVPSLGSGQQDVLTIGTDARTLFTAAASALEKAAGAVDLSMLNPIWVQSKTSAKPFYAIVHRIDVGLVMDLEPVKASDTRVGSAAGALQSHKLAAKAISRLQSLPGGDIGLLCDTVVEEVRDVTGYDLVMAYKFHEDEHGEVVAEIRRSDLEPYLGLHYPATDIPQASRFLFMKNRVRMICDCSAPPVKITQDKELRQPISLAGSTLRAPHGCHAQYMGNMGSVASLVMAMIINDNDEPSGGGGGGGQHKGRRLWGLVVCHHTSPRSVPFLRSACEFLMQVFGLQLNMEAAVAAHVREKHILRTQTLLCDMLLRDAPIGIVSQSPNIMDLVKCDGAALYYGKRFWLLGITPSEAQIKDIAEWLLEHHKDSTGLSTDSLADAGYPGAASLGDEVCGMAAAKITAKDFLFWFRSHTAKEVKWGGAKHDPDDKDDGRKMHPRSSFKAFLEVVKRRSLPWEDVEMDAIHSLQLILRGSFQDIDDSDTKTMIHARLNDLKLQGMDELSTVANEMVRLIETATAPILAVDSSGFINGWNAKVADVTGLPVTEAMGRSLAKELVLHESADMVERLLYLALQGDEEQNVELKLKTFGGQKDKEAVILVVNACASRDVSDNVVGVCFVGQDVTGQKVVMDKFTRIQGDYKAIVQNPNPLIPPIFGADEFGYCSEWNPAMEKLSGWRREEVLGKMLVGEIFGIQMMYCRLKGQDAVTKFMIVLNSAADGQDTEKFPFAFFDRQGKYVEALLTATKRADAEGSITGVFCFLHIASAELQQALTVQRATEKVALSKLKELAYIRQEIKNPLYGIMFTRTLMETTDLSEDQKQYVETGAVCEKQIRKILDDMDLESIEDGYLELDTTEFMMGTVMDAVISQGMITSKEKNLQLIRETPKEIKAMFLYGDQVRLQQVLADFLLNAIRFTPSSENWVGIKVATSRKRLGGVVHVMHLEFRITHPGVGLPEELVQEMFDRGRGMTQEGLGLSMCRKLVKLMNGEVEYIREAGKNYFLVSLELPLAQRDDAGSVKFQASS

SEQ ID NO: 1745 - protein, 302 aa, Zea mays
  unsure (1)..(302): unsure at all Xaa locations
MYTLIPRCHLQPVHRSPPPCQAATTTSSAPPSPSPSLSIRFRPDQDELRSTWPQRAWTLAGTAAILSSLSTSASLAASGSGSPAEPIAAALAAYSLADLATGVCHWFVDNYGDAATPVFGSQIAAFQGHHRYPSTITLRETCNNLHALARGAALALAPVDAALSATGAPAAAHAFVGAFTACVVLSQQFHAWAHXKRRRLPPGVEALQDAGVLVSRAQHAAHHRQPYXTNYCIVSGMWNGLLDRYKVFEALEMVVYFRTGIRPRSWGETDASWKEDTGAEAAAAAASNAGLLQTAGISSDSD

SEQ ID NO: 1746 - protein, 751 aa, Geobacillus stearothermophilus
MENQNRQNAAQCPFHGSVTNQSSNRTTNKDWWPNQLNLSILHQHDRKTNPHDEEFNYAEEFQKLDYWALKEDLRKLMTESQDWWPADYGHYGPLFIRMAWHSAGTYRIGDGRGGASTGTQRFAPLNSWPDNANLDKARRLLWPIKKKYGNKISWADLFILAGNVAIESMGGKTIGFGGGRVDVWHPEEDVYWGSEKEWLASERYSGDRELENPLAAVQMGLIYVNPEGPDGKPDPKAAARDIRETFRRMGMNDEETVALIAGGHTFGKAHGAGPATHVGPEPEAAPIEAQGLGWISSYGKGKGSDTITSGIEGAWTPTPTQWDTSYFDMLFGYDWWLTKSPAGAWQWMAVDPDEKDLAPDAEDPSKKVPTMMMTTDLALRFDPEYEKIARRFHQNPEEFAEAFARAWFKLTHRDMGPKTRYLGPEVPKEDFIWQDPIPEVDYELTEAEIEEIKAKILNSGLTVSELVKTAWASASTFRNSDKRGGANGARIRLAPQKDWEVNEPERLAKVLSVYEDIQRELPKKVSIADLIVLGGSAAVEKAARDAGFDVKVPFFPGRGDATQEQTDVESFAVLEPFADGFRNYQKQEYSVPPEELLVDKAQLLGLTAPEMTVLVGGLRVLGANYRDLPHGVFTDRIGVLTNDFFVNLLDMNYEWVPTDSGIYEIRDRKTGEVRWTATRVDLIFGSNSILRSYAEFYAQDDNQEKFVRDFINAWVKVMNADRFDLVKKARESVTALQDHSNVRSEVSDMLQ

SEQ ID NO: 1747 - protein, 373 aa, Desulfovibrio desulfuricans G20
MVFPNLKIGDIVARVPIIQGGMGVGISLSGLASAVANEGGIGVIAGAMIGMNEPDVAKNPLEANIRALRKEIRKAKEMTRGILGVNIMVALTNFADLVKTSIDEKIDVIFSGAGLPLELPRYLKEASEQGKEEVRTKLVPIVSSARAASIICKKWLNRFDYLPDAFVVEGPKAGGHLGFKPEELDDPEFALEKVIPQVIEAVKPFEAQRNRRIPVIAAGGVYSGDDIRSYIDMGAAGVQMGTRFVATHECDADDRFKQAYVDAKQEDVVVIKSPVGMPGRAIRSQFVKDVDEGRRQPVKCAFHCIHSCKVEKSPYCIAAALLNAKKGNLNKGFAFSGTNVHRVDKIQSVKELVDSLKEEFEASRLSHPLPRTS

SEQ ID NO: 1748 - protein, 402 aa, Oryza sativa (japonica cultivar-group)
MADNSLVTVAAAGSGGEGGGGEAGERVGEEGGQRAGGGRKEASEEAVTEPQPSPSRATPTVAESPQRWHANNRSRLTRKLQEGGRMAKRERGEGGADVPLSRASSPTPATSSAVSTPASSTPPPLLSLICLAGVDWLRSHSQLTCGTYVGPTLTQPEDIPEPGKRGVVVVYKTAATPIILRSTSPRIHRERSANSLANQKRRLEFRRERARVMEADKSGEGEKAGGKTISFRCSDGQAFHMPVAAAMLSTAIRKMFDKYPSIDHGGVIELPHQISSGIFPKVKEYCTKHAKVDDKGNPTVSTNTGAAAAASSSSTDDEEEDLKNWDKEFVNMEVKPLHDLLLVAHLLDIKGLFHITCRKVADMLKGKTSEEMRQILNIRNDFTEEEDKAIKEQNPWVFPDPE

SEQ ID NO: 1749 - protein, 471 aa, Burkholderia fungorum
MHYWRPSPMSLFRKKSVEHMIAASAQNAGLKKALGALDLTFLGVGAIIGTGIFVLTGTGAVQAGPALMISFLIAALACGFAALAYAEFASTIPVAGSIYTYSYATLGELAAWIIGWDLMLEYGLATSAVSVGWSGYLQSLLSGFGVSLPVALTAAPGALPGHDTLFNLPAFLVMMAITALLSFGVRESARINNIMVAIKVIVVLLVICVGVFHVTPANWHPFMPNGWNGVFGAAAVMFFAFIGFDSVSSAAEEVKNPKRDLPIGIIASLGVCAVLYVAVAAVVTGIVPSAQFANISHPVSYALQVAGQKWVAGFIDLGAVLGMLTVILVMAYGQTRVIFAMSRDGLLPARLSRVHPRFATPFFTTWLVGIFFGLIGAVVPLNVLAELINIGTLAAFSMVSIAVLVLRKTHPELPRAFRCPGVPVVPVLAVASCLFLMINLQAVTWVAFVVWLLVGMVVYFGYSRRHSRLSS

SEQ ID NO: 1750 - protein, 177 aa, Chloroflexus aurantiacus
MGQPYIPVDVFGLWSGVTAITAGLHHTCALTTGSAQVQCWGGNYDGQLGDGTTNLRRFPQTVIGLEGSETAIAAGGAHTCALTVSGGMKCWGDNFYGQLGDGSMHDRSTPVDVIRLESNVDAIAAGFFHTCALTTDKGVKCWGDNFYAQLGDGRPLWRSVPVDVVDRLNVFLPLTMK

SEQ ID NO: 1751 - protein, 548 aa, Lolium temulentum
MYRVKSESTCEMMHQDQMDSPLADDGGGSSGGSPHRGGGPPLKKGPWTSAEDAILVDYVKKHGEGNWNAVQKNTGLFRCGKSCRLRWANHLRPNLKKGAFTPEEERLIIQLHSKMGNKWARMAAHLPGRTDNEIKNYWNTRIKRCQRAGLPVYPASVINQSANEDQQGSSDFNCGENLSNNHLNGNGLYLPDFTCDNFIANSEALSYAPQLSAVSISNLLGQSFASKRCGFMDQAGMLKQSDSLLPGLSDTVNGALSSVDQFSNDSGKLRQALGFDYLHEANSSSKILAPFGGALTGSHAYLNGTFSASRSTNGPLKMELPSLQDTESDPNSWLKYTVAPTMHPTELVDPYLQSPTATPSAKSECASPRNSGLLEELLHQAEALRSGKNQQPSVRSSSSSVSTPCDTTVVSPDFDLCQEYWEEHSGAMLHEYVPFSGNSLTESTAPVSAASPDAFQLSKISPESNSLGSGEQAMEPTYEPGAGDASPRPENLRPDAFFSGNTADSSLFNNAIAMLLGNDMNTECKPGLFDPSSWSNMPHAFQMSEEFK

SEQ ID NO: 1752 - protein, 281 aa, Myxococcus xanthus
MKTQEIEKKVRQQDAQVLAQGYSPAIRAMEIAAIVSFVSLEVALVYRLWGTPYAGTWLLLSAVLLGYLAADFVSGFVHWMGDTWGSTEMPVLGKALIRPFREHHVDEKAITRHDFVETNGNNCLISLPVAIIALCLPMSGPGWVFCASFLGAMIFWVMATNQFHKWSHMDSPPALVGFLQRVHLILPPDHHRIHHTKPYNKYYCITVGWMNKPLTMVHFFPTAERLITWATGLLPRQDDIGAEAARALVVAAGGSEAPVVQAAKELLTQATVQEKPASTRP

SEQ ID NO: 1753 - protein, 461 aa, Mycobacterium tuberculosis CDC1551
MATATTQRPLKGPAKRMSTWTMTREAITIGFDAGDGFLGRLRGSDITRFRCAGRRFVSISHPDYVDHVLHEARLKYVKSDEYGPIRATAGLNLLTDEGDSWARHRGALNSTFARRHLRGLVGLMIDPIADVTAALVPGAQFDMHQSMVETTLRVVANALFSQDFGPLVQSMHDLATRGLRRAEKLERLGLWGLMPRTVYDTLIWCIYSGVHLPPPLREMQEITLTLDRAINSVIDRRLAEPTNSADLLNVLLSADGGIWPRQRVRDEALTFMLAGHETTANAMSWFWYLMALNPQARDHMLTELDDVLGMRRPTADDLGKLAWTTACLQESQRYFSSVWIIAREAVDDDIIDGHRIRRGTTVVIPIHHIHHDPRWWPDPDRFDPGRFLRCPTDRPRCAYLPFGGGRRICIGQSFALMEMVLMAAIMSQHFTFDLAPGYHVELEATLTLRPKHGVHVIGRRR

SEQ ID NO: 1754 - protein, 89 aa, Ralstonia metallidurans
MSLKCGIVGLPNVGKSTLFNALTKAGIAAENYPFCTIEPNVGVVEVPDPRLAKLAEIVKPERILPATVEFVDIAGLVAGESKGGTELIT

SEQ ID NO: 1755 - protein, 449 aa, Pseudomonas aeruginosa UCBPP-PA14
MNMNDDLYSTWLPKLLAAGEIDQADIDRACRDVLAAKYDLGLFADPYRRLGKPDDPPFDTNAESRLHRQAAREVAREGLVLLKNRDGLLPLKKQGRIAVIGPLAKSQRDVIGSWSAAGVPRQAVTVYQGLANAVGERATLLYAKGANVSGDQAILDYLNSYNPEVEVDPRSAEAMLEEALRTARDADLVVAVVGESQGMAHEASSRTDLRIPASQRRLLKALKATGKPLVLVLMNGRPLSLGWEQENADAILETWFSGTEGGNAIADVLFGEHNPSGKLTMSFPRSVGQVPVYYNHLNTGRPMDHDNPGKYTSRYFDEANGPLYPFGYGLSYTEFSLSPLRLSSERLARGDTLEARVTLSNSGKRAGATVVQLYLQDPVASLSRPVKELRGFRKVMLEPGESREIVFRLGEADLKFYDSQLRHTAEPGEFKVFVGLDSAQTESRSFTLL

SEQ ID NO: 1756 - protein, 849 aa, Clostridium acetobutylicum
MRELKFKHLLSTLVCFISFSIFIPLNTYKADTINTTNIGVTYDAHVQNIGWQTPWAKDGETAGTDGKGLRIEALKLNLVNAPADAKILYQAHVQNIGWQNWYKDGEEAGTDGKGLRVEAIRIKLENMPDYSIEYQAHVQNIGWQNWVQDGEEAGTDGQGLRVEAIRIKISKKVHPDSIKLNKNSENLKVGDTDTLSALFSPDTTTNKSLSWTSSDKSTVVVDDTGKITALNEGTANITAASLDGQKTDSCFVTVTKADSKIQYQAHVENVGWQYPVYDGNEAGTNGQGLRVEALKINLLNAPIGAKIVYQAHVQNVGWQTPVSNGEEAGTDGKGLRIEAIKMHLENMPGYLVEYQAHVQNIGWQDWTREGQEAGTDGKGLRIEAIRIRLIKAVPVDSITLSNSNYTLKVGDTYTLTATVNPGNATNKDIHWSSSDGSKVSVDGNGKITALSEGTATITASSSDDSKHVSCIVSVNGIVNNPVVFSDKNLEAAVRNSINKQTGTLYESDVQNISSLNANNANITDLTGIENLKSLDTLYLNSNSISNLTPLRSLINLQNLYLGNNKITDTTALSSLSSLQRLDLYGNALNTFDGIKNLSNLTELDLSNTNLSSLAFLSVVTKLQNLNLSSNKIADISALSNLTNLNQLDLSTNQISNISSLNNLIGLNILNLNSNKINDISSLTNLKQLQTLSLNSNTIQDIDVLKNFTVLNVLGLSNNKITDISTLANLNSLKNISLSNNQITNISCLCNLTNAQYLHLENNQINDISALNKLKNLAYLYLNNNQITDITALGFLDKLNTLYLSYNKITKVDSLKNLTNLKILILAENNITSTDQTSLKESLPNCSIVY

SEQ ID NO: 1757 - protein, 228 aa, Oryza sativa
  unsure (1)..(228): unsure at all Xaa locations
MVSLKLQKRLAASVLKCGKGKVWLDPNEVNEISMANSRQNIRKLVKDGFIIKKPQKIHSRSRARRAHEAKQKGRHSGYGKRRGTRGPGLPTQALWMRRMRVLRRLLRKYREAKKIDKHMYHDMYMKVKGNMFXKNKRVLMESIHKSKAEKAREKTLSDQFEAKRAKSKASRERKIARREERLAQGPREPAAPXXAAAPAQTAAAPKKAKKXTPGLKCGRLSETSGGVS

SEQ ID NO: 1758 - protein, 594 aa, Xylella fastidiosa Ann-1
MSFSKHFGKLMLATCLSLSAAPAFSYSISHGKVVDDKGNQIQLRGVNWFGFETGDHVVNGLWARNWKEFITQLQGMGFNAIRLPFCPANLNSNTSPSSIDYSRNPDLQGLSSLQILDKVVKELSDRRMYVLLDHHRPDCSAISELWHTDSYSEKQWIDDLRFVAHRYANVPGVIGLDVKNEPHGRATWGTGDFQTDWNTAVEHAAAAILEAAPKWVIGIEGIGENPICSSTIGHFWGENLEPMDCTPLKVPADHLLLMPHVYGPDVYVQPYFNSPDFPNNMAAIWDKHFGHFAKAGYAMAIGEFGGKYGEGDPRDIAWQNAFVDYLISIGVTDAFYWAANQNSGDTGGMVGNDWTTPRDDKVKLLNKLWNAGGGASGGSGSGAGGGSGGGAGAGSGSGAGGGSGGGAGAGSGSGAGGGSGSGAGAGSGSGAGGGSGSGAGGGSGGGAGAGSGSGAGGGSGSGAGVGSGSGAGGGSGSGAGAGSGSGAGGGSGSGAGAGSGSGAGGGSDPTKSKISVNTIVDSDWHTGYCERIQVTNTSDSPNTWTVTIPIKGKIQTLWSARWSVKDNALTAFGMDWNKTLDPKGRTEFGFCSNY

SEQ ID NO: 1759 - protein, 463 aa, Bacillus subtilis subsp. subtilis str. 168
MQKQKQELHRGLEERHISLMSLGAAIGVGLFLGSASAIQLAGPGILVAYAASGLVMFFIMRALGEMAIQKPVAGSFSRYARDYLGPLAGYLTGWNYWFLWVVTCMAEITAVGIYMGFWFPDVPNWIWALSALVIMTGVNFLAVKAYGELEFWFALIKIVAILSMIAVGLLMIIAGVGNGGIATGISNLWNNGGFFPHGLKGVLLSLQMVMFAYLGIEMIGVTAGEVKNPQKSLAKAIDTVFWRILIFYVGALFVIMSIYPWQEIGSQGSPFVLTFQKVGIPSAAGIINFVVLTAALSSCNSGIFSTGRMLFNLAEQKEAPQAYGQLTKGGIPGKAVLASAGALLVGVLLNYVVPAKVFTWVTSIATFGAIWTWAIILLSQIKYRKSLKPEEKKQLKYKMPLFPFTSYVSLAFLAFVVILMAYSPDTRVAVIIGPIWFLILLAVYYGKGFHKKNAAAASERNIS

SEQ ID NO: 1760 - protein, 323 aa, Clostridium thermocellum ATCC 27405
MFDVVAVGELLIDFLPAGTNENGMPLFSSNPGGAPANVLAMLSKLGAKTAFIGKVGKDGFGQFLKATLDNAGIDTSNLLMSSSEMTTLAFVHLNEKGDRSFSFYRKHCADVSLDAGELDKDLLRTCHFLHFGAVSLTDEPSRTATLEAARIAKEAGAIISYDPNYRPALWSNEHEARKYMLKAVEYADLVKVSEEELWLLAESEDFSKGAHKLLAMGPSVVFVTCGEKGSYVFTGSCKANHCGYDVKVVDTTGAGDAFVGAMLWQLRGMSLEEISQICEQKWGELLAFSNAAGTIVATKKGAIPAMPDLDTINTFMRQFLEEK

SEQ ID NO: 1761 - protein, 152 aa, Populus tremula x Populus tremuloides
MVKAVAVLNSSEGVKGTINFTQEGDGPTTVTGSLCGLKPGLHGFHVHALGDTTNGCMSTGPHFNPVGKEHGAPEDENRHAGDLGNVTVGDDGTATVSIIDNQIPLTGPNSIVGRAVVVHADPDDLGKGGHELSKSTGNAGGRVACGVIGLQG

SEQ ID NO: 1762 - protein, 426 aa, Phalaenopsis sp. SM9108
MAFSVGLTRFIVSSHPKTAKEILSSPAFADRPIKESAYELLFNRAMGFAPFGDYWRNLRRISSTYLFSPRRVSSFEKQRSEIGEGMVRDMKRMMERNGVVEVRRMLHYGSLNNIMLTVFGKKFDFAKDEGLELELILKEGYELLGIFNWGDHLPLLGWLDLQGVRRRCRTLVAKVNVFVKKIIDEHKRRANGVGIDEGEGEDFVDVLLGLEEKDRLSESDMVAVLWEMIFRGTDTVAILLEWTLARMVLHPDIQSKAQVEIDSVVDSSRPVLDSDIQRLPYLQSIVKETLRMHPPGPLLSWARLAIHDVPVDGHMIPAGTTAMVNMWAITHDECNWAEPNKFNPDRFIDEDVNILGSDLRLAPFGSGKRVCPGKTMALAAVHLWLAQLLKSFKLLPSRNGVDLSECLKMSLEMKNPLVCVAVPRFE

SEQ ID NO: 1763 - protein, 712 aa, Neurospora crassa
MATIALPPPFDNYRSTSTIGSMTTTITIEQPPSHPTPVPNKHIPVCPPGTASRDDADTPPPSPWPVTNGADEHSPPRSFLYPPHRFHHVDSGHLSLYEIDAADVAAALDHLSRQPLPDPAHVFPWYHGLHPRNQVQQHFFTSPRTWRAQKKTPSCLRGITLVKADGDLNFSRLKGAIAPYEFLHSSSAEFIDVDPEHGFSVRNFQIQAAKAAMTSDIIVYGDNEAAVRKLGWDIASAQHKWRYKHELQCHWVPEYNTFICLSPFDEFEQNHREIVAVDSTGNLTGNVLDFVNQERLEMYLMTQASEIAPNVWMGPTPDPIIEEDNGYHIQLECSDMGRANTCAAFLQALAEDGLGDVPEPVHFDFPSSGSFLVPDYSHEDADALLDTCKWLWHLSHGTRPEKSSDTGRDKSWPPLSPRKILIHCADGYTESTVLAIAYYSYSTGLPIPEAWLKLHTIMKRNFFAYPSDVNFLATIAPRLLQESPMGTDRSLAQVTELVRNEPKWWTGFDGSLPSRILDYMYLGNLTHANNPDLLRAMGIGQILSVGEMAMWRDGELQEWGEENTCIVRRVQDNGIDPLTDEFERCLEFIDRGRRLGTATLVHCRVGVSRSATICIAEVMRSMGMSFPRAYCFVRARRLNVIIQPHLRFAYELLKWEEFLRSNQETKDHGNYTLTADGKDDNESSSEGQGIMRELEWGEIAREVALMNKPYSR

SEQ ID NO: 1764 - protein, 442 aa, Ralstonia eutropha
MPQRHLPESRRPAMNRRQSQPFRTGDVMYQHIKVPAGEKITVNQDFSLNVPDNPIIPYIEGDGTGLDITPVMIKVVDAAVAKAYCGKRKIAWMEIYAGEKSTKVYGLDVWLPDETLEVLKDYVVSIKGPLTTPVGGGIRSLNVALRQTGPDVCLRPVRYFKGVPSRCVSSEKTDMVIFRENSEDIYAGIEWAAESEHAKKLIKFLQDEMGVKKIRFPRTSGIGIKPVSREGTERLVRKAIQYAIDNDKPSVTLVHKGNIMKFTEGGFRDWGYELAHKEFGAELVDGGPWCKFKNPKTGKDIVIKDAIADAFLQQILLRPAEYSVIATLNLNGDYVSDALAAQVGGIGIAPGANMSDSVAMFEATHGTAPKYAGKDYVNPGSEILSAEMMLRHMGWTEAADLIISSMEQSILSKKVTYDFARLLEGATQVSCSGFGQVMIDNM

SEQ ID NO: 1765 - protein, 186 aa, Ferroplasma acidarmanus
MAKILILTGDAGESLEVMYPLQRMKEEGFDVDLAAPEKKKIQLVVHDFEDGFDTYTEKLGYKVQADIAFKDVDPSQYDALIIPGGRAPEYIRNDKDFIRIVQYFFEKNAPVAELCHAPLGLAAAGVLHGRKTAAYPALAPDVTIAGGTFVDAAVVVDGNLISSRAWPDHPQWMREFIKLLHERDIK

SEQ ID NO: 1766 - protein, 786 aa, Zea mays
  unsure (1)..(786): unsure at all Xaa locations
MQSDQPVISLRPGGGGGPRAGRLFSPAFATSVSGDFLRPHGGGASGISKIGDSHFEPRERVRYTRDQLLELREIVDVSEEILRIKQEIDVELHGEDQSWVRNDSTVQGQAQAQTQAQNRYAETDSRDWRARSAQLTPTNEEKSWDNIREAKEAYASSGRQQEQANRQDQLSSQFASKAQIGSTXALIKADVPWSARXRGNLSEKERVLKTVKGILNKLTPEKFDLLKGQLMEAGKLLLLDILKDVISLIFEKAVFEPTFCPMYAQLCSDLNEKLPTFPSEEPGGKEITFKRVILNNCQEAFEGASNLRAEISKLTGPDQGMERRDKERLVKLRTLGNIRLIGELLKQKMVPEKIVHHIVMELLGSGPDKKTCPEEEDVEAICHFFNTIGKQLDENPKSRRINDTYFIQMKELTMNPQLAPRLRFMVRDVIDLRSNNWVPRREEIKAKKISEIHSEAEKNLGLRPGAASGIRNGRSSPGGALLPGGAFPMNRPGTGGMMPGMPGSRKMPGMPGLDNDNWEVARSKSMPRGDSIRNQGPLLNKPSTVHKTSSINTRLLPQGSGAALIGKSALLGTGAPPSRPLSFTPGPTPAQTTPKPIRAAPAVVPAPDKQASAPKGNTAELQKKTIALLEEYFGIRILDEAHQCIVELQSPDYYPEIVKEAVNLALDKGTNFVDPLVRLLEHLYTKKIFKTQDLESGCLLYGTLLDDIGIDLPKAPAQFGEIIARLTLLGALRFEVMEEILKKMEDTMYRKAVFDAVKKTLEANPSGQTILGSHAAVIDACNSLLE

SEQ ID NO: 1767 - protein, 222 aa, Picea mariana
MGRGKIEIKRIENTTNRQVTFCKRRNGLLKKAYELSVLCDAEVALIVFSSRGRLYEFANHSVKRTIERYKKTCVDNNHGGAISESNSQYWQQEAGKLRQQIEILQNANRHLMGDGLTALNIKELKQLEVRLEKGIGRVRSKKNEMLLEEIDIMQRREHILIQENEILRSKIAECQNSHNTSMLSAPEYDALPAFDSRNFLHANLIDAAHHYAHQEQTTLQLG

SEQ ID NO: 1768 - protein, 347 aa, Zea mays
LSSGYGGGALAHQHQHAAAGGAPERLTANLSDLVSNWSIAPPNPCLGDAHHHHRTGVVAAACDNDNAKAGMFLGSGGGVCNHEIGGHGAMLEGAATGGGGGGGQEFLRPAAGAGYSSMLGLSRNNRTMYMEAPWGSNAAGATRSLSDLISFGGAPLGKAEEPAPPTSTKALAEYKKQGHDIPSPAKTSSGGGSKGSSEGKKKRSEQQGSSEGNTKKSKSEVSSPTSSLKASSQVPKVKLGDKITALQQIVSPFGKTDTASVLYEAINYIKWLHEQVQLLSDPYMKTSSKDYNYNAWGRLEDKEGAEMVDLRSRGLCLVPVSCTPQAYRDSNDGPDYWTPPYRSCLYR

SEQ ID NO: 1769 - protein, 298 aa, Triticum aestivum
RTRALPPPSPSSTWIAPASVSSAETWPATTATATATPSALIYIALGLIIAADDLMYSYGLLYLPVSTYSLICASQLAFNAVFSYFLNAQKFTPLIFNSVLLLTFSASLLGVDEDSPSSSDISQGNHVLGFVLTLGASATYSLILSLMQVTFEKVIKRETFSVVLNMQIYTAFVATLASLVGLFASGEWKTLEGEMHMFSPGKVSYVMTVLWTAISWQIASVGVVGLIFVVSSLFSNVISTLALPIIPVFAVIFFHDKMDGIKIIAMLIAIWGFISYGYQLYVDDKKSRKTSSSVEENS

SEQ ID NO: 1770 - protein, 592 aa, Xylella fastidiosa 9a5c
MSFSKHFGKLMLATCLSLSAAPVFSYSISHGKVIDDKGNQIQLKGGSWFGFETTNHVVHGLWTRNWKEFITQIQSMGLNAVRLPFCPASLNSNTSPSSIDYNRNPDLQGLSSLQIMDKVVKELSDRGIYVLMDHHTPDCAAISELWYTDSYSEKQWIDDLRFVAHRYANVPGVIGLDVKNEPHGRATWGTGDPKTDWNTAVEHAAAAILEAAPKWLIGVEGIGENPSCSSTIGHFWGENLEPMDCTPLKVPADHLLLIPHVYGPDVYVQPYFNSPDFPNNMAAIWDKHFGHFAKAGYAMAIGEFGGKYGEGDPRDVAWQNALVDYLISIGVTDTFYWSINANSSDTGGLFRDDWNHVREDKLTLLKKLWNGKDGSGGGGGSGGGSGSGGGSGSGGGSGSGGGSGSGGGSGSGGGSGSGGGSGSGGGSGSGGGGGSGGGSGSGGGSGSGGGSGSGGGSGSGGGSGSGGGGGSGGGGSGGGGGSGGGSGSGGGSGSGGGSGTGGGGSDPTKSKISVNTIVDSDWHTGYCERIQVTNISNSPTTWTVTISIRGNIQTLWSARWSVKGNALTASGMDWNKTLDPKGTTEFGFCSNY

SEQ ID NO: 1771 - protein, 181 aa, Carica candamarcensis
YPQRMDWRKKGAVTPVKNQGGCGSCWTFSSVAAVEGINKIVTGQLLSLSEQELLDCERRSYGCRGGFPLYALQYVANSGIHLRQYYPYEGVQRQCRASQAKGPKVKTDGVGRVPRNNEQALIQRIAIQPVSIVVEAKGRAFQNYRGGIFAGPCGTSIDHAVQRLGTEMPLILKNSWGNFWG

SEQ ID NO: 1772 - protein, 380 aa, Glycine max
MVKDTKPLAYAANNGYQQKGSSFDFDPSAPPPFKIAEIRASIPKHCWVKNPWRSLSYVLRDVLVIAALVAAAIHFDNWLLWLIYCPIQGTMFWALFVLGHDCGHGSFSDSPLLNSLVGHILHSSILVPYHGWRISHRTHHQNHGHIEKDESWVPLTEKIYKNLDSMTRLIRFTVPFPLFVYPIYLFSRSPGKEGSHFNPYSNLFPPSERKGIAISTLCWATMFSLLIYLSFITSPLLVLKLYGIPYWIFVMWLDFVTYLHHHGHHQKLPWYRGKEWSYLRGGLTTVDRDYGWINNIHHDIGTHVIHHLFPQIPHYHLVEATQAAKPVLGDYYREPERSAPLPFHLIKYLIQSMRQDHFVSDTGDVVYYQTDSLLLHSQRD

SEQ ID NO: 1773 - protein, 181 aa, Triticum aestivum
  unsure (1)..(181): unsure at all Xaa locations
MYSWEMLSFNIHDGFLEAIVRGNRSGLLTQADYNNLCQCETLDDIKMHLSATEYGPYLQNEPSPLHTTTIVEKCTLKLVDEYKHMYGHMIDNVVLIVTGTLHERDVNELLEKCHPLGMFDSIASLAVAQNMRELYRLGSSDTPXTYFSECXTSEDLDDMXIEIMRNXLYKRILRFLPFCPN

SEQ ID NO: 1774 - protein, 447 aa, Azotobacter vinelandii
MERSSRKVSCRKTGARAFHAAASTGVPLVVMGSSVAQTPRPCPAGAGQAVALYGERLCLPIMGPFPAVYPGACPAPAEFFRRRPDYGGSYVAARPHLAGVVPIARHGHPGALPAHAARADRRAAAVVRLSGLARRGERAGTGGRQQPPALPAAAAGAAGGGGDGLCRGYRCRLLGYRRGVAAVPAGVAGFRRLADATADRPSGARGGRGMSFDWHGAWQALVQHPLFAFGITLGTYQLAVAAYEKTRWVFLQPVLVSMLLVIGVLSVCGVDYASYRDDARILTLFLGPATVALAVPLFLNLKRIRLLFWPVVLTLLAGGFFTTLLGVGLAWLFGTERLMLMTLAPKSVTSPIAMLVSEQIGGVAGLAAVFVLITGILGAVCGPVLLRRCGVRHPAALGMALGLTSHAVGTSRALQEGEECGAFAALGMSLMGVFTAILLPLSVAMVA

SEQ ID NO: 1775 - protein, 233 aa, Glycine max
  unsure (1)..(233): unsure at all Xaa locations
MASLDTVRGDLGLVVLYLSKAEARDKICRAIQYGSKFLSNGQPGPAQNVDKSTSLARKVFRLFKFVNDLQALISPPAKGTPLPLILLGKSKNAMLSTFLFLDQIVWAGRTGVYKNKERAEFLGRIAFYCFLGSNTCTIIIELAAPAKGTPLTADLAXESTKNDHAENEQHRMKLKKSNERLLALIKSSLDIVVAVGLLQLAPKKVTPRVTGAFGFASSLIACYQLLPAPAKSK

SEQ ID NO: 1776 - protein, 426 aa, Streptomyces avermitilis MA-4680
MSDLYGRHRSVLPDWLALYYADPIEITHGEGRHVWDAAGNRYLDFFGGILTTMTAHALPEITKAVSEQAGRIVHSSTLYLNRPMVELAERIAQLSGIPDARVFFTTSGTEANDTALLLATTYRQSNQILAMRNSYHGRSFSAVGITGNKGWSPTSLSPLQTLYVHGGVRTRGPYAELGDADFIAACVEDLKDLLGHIRPPAALIAEPVQGVGGFTAPPDGLYAAFREVLQEQGILWIADEVQTGWGRTGEHFWGWQAHGQSGPPDILTFAKGIGNGMSIGGVVARADIMNCLDANSISTFGGTQITMAAGLANLIYLLEHDLQGNARRVGGLLIERLRAIGAQLPVVREVRGRGLMIGIELVKPGTDEANPQAASAVLEAAREAGLLLGKGGAHNTSALRIAPPLSLTVAEAEEGAAILDRALRSV

SEQ ID NO: 1777 - protein, 187 aa, Oryza sativa
  unsure (1)..(187): unsure at all Xaa locations
XTRGLSSGSNSADREPVNSESAAPNKALSSEDSSVSNSNMVFGYLNLFSDGVHNFTDGMALGSAFLLHGSVGGWSRTLFLLAHELPQEVGDFGILVRSGFTVTKALFFNFLSALVALAGTALALSLGKDPGHSSLIEGFTAGGFIYIAVAGVLPEMNDQKTTVKSSMIQLVSLTMGMLVALGISLVE

SEQ ID NO: 1778 - protein, 298 aa, Clostridium thermocellum ATCC 27405
  unsure (1)..(298): unsure at all Xaa locations
MFFMRKYGLKKIVWMLGILCFLVVSLNTSIFAADGKNVVLGDVNGDSKINAIDVLLMKKYILKVINDLPSDGVKAADVNADGQINSIDFTWLKKYMLKAVEKFPGEASNNPDAVIQFESGFAHSVLLKKDGTVWVLGNNGKGQLGLPEVSAVNEPVMINGLSGIKSVAAGREHTLALQEDGTLWAWGNNYSLQLIEYMERDPDTKERFTSIPIKVETHSDIKYVAAKFSRTLIVKNDGTVWLYSLPPINTSSDAEYMPWXXXXXXXXXXXXXXXXXXKREVDYNEQTVSNDSGSNLCS

SEQ ID NO: 1779 - protein, 344 aa, Mesorhizobium loti
MDYRRLGASGLKVPALSFGAGTFGGSGPLFGAWGNSDAKEARRLVDICLEAGVNLFDTADVYSNGASEEVLGEAIKGRRDAVLISTKTSLPMGDGPADYGSSRSRLIKSVDAALKRLGTDYIDLLQLHAFDAGTPVEEVLSTLDELVRAGKLRYVGVSNFSGWQVMKSLAQADRHGYPRYVAHQVYYSLVGRDYEWELMPLGLDQGVGALVWSPLGWGRLTGKIRRGQPLPEKSRLHDTAGFGPPVEDEHLYRVMDALDAVAQETGKTVPQIAINWLLQRPTVSSVIIGARNEEQLRQNLGAVGWSLTPEQMKKLDAASEVTAPYPYFAYRRQEGFARLNPQAV

SEQ ID NO: 1780 - protein, 77 aa, Triticum aestivum
QFIFSRISYGESQMLDKAFYEEEVKRLCLSFEQQFHYAVFFAYIRLREQEIRNLMWISECVAQNQKSRVHDSVVFIF

SEQ ID NO: 1781 - protein, 480 aa, Medicago sativa
MRKSVTLKAGEVPSRLTRARAVALSTSGQLPPMKEVAPGTQNQKQPLRANSKRAVSDVTYLPHEMRAILQDVTNNCGENTNRSCLNPTEIQAKKRKVAKPAQPDVSNEVPSAAERPPFIADSKRVSSMEMRLRSSEDFRCLDDLEDNAPFRMSSNQSGTNNNLLQNQTSRISARLLSSQKKASQIVAAKKGNISELLDVSKHPDVADIDADFEDPQLCSHYAADIYDHLRVAELSRRPYPNFMETVQQDITPSMRAILVDWLVEVSEGYKLQANTLFLTVYLIDWFLSKNCIERERLQLLGITCMLIATKYEEINAPRIEDFCFITDNTYVVKLESLVLKSSSYQLFAPTTKTFLRRFLRAAQASYKRPSIELEYLANYLAELTLMNYGFLNFLPSMVAASSVFLARWTLDQSSHPWNPTLEQYASYKASDLKATVLALQDLQLNSNDDCPLTAIRKKYTQDKLNCVAALSSPKLLETLF

SEQ ID NO: 1782 - protein, 165 aa, Xanthomonas campestris pv. campestris str. ATCC 33913
MVTEAAATTTATAELKPTKGNEVKGTVTFKTVDGALRVTGQLSGLKPNSEHGFHIHEKGDCSAPDGSSAGGHFNPAQTDHGMVGADPHHGGDMPNIKADAQGNASIDGPVASNVNLGKADQSDIAGHAVIVHADPDDYKTQPTGNAGGRLACGVITTDNAPAPTK

SEQ ID NO: 1783 - protein, 62 aa, Zea mays
GYLLVANRDRWPGLIFIRLVIHVLLFSQDSSALAQLGWPDMRIPILYTLSWPDRIYRPSSIC

SEQ ID NO: 1784 - protein, 295 aa, Rhizobium sp. CIAM1146
RGKTQIKEFDTFPTLEQLPLWGFDGSSTMQAEGRSSDCVLKPVALYPDPARTNGALVMCEVMMPDGVTPHASNARATILDDEDAWFGFEQEYFFYQNGRPLGFPEQGYPAPQGPYYTGVGYSNVGDVAREIVEEHLDLCLAAGINHEGINAEVAKGQWEFQIFGKGSKKAADQIWMARYLLQRLTEKYGIDIEYHCKPLGDTDWNGSGMHCNFSTKYMREVGGKDYFEALMAAFDKNMMDHIAVYGPDNDKRLTGKHETAPWNKFSYGVADRGASIRVPHSFIKNDYKGYLEDRR

SEQ ID NO: 1785 - protein, 101 aa, Zea mays
MAGVSRSMVAPLLVLNLVMYIVVIGLASWNLNHFINGTTNYAGVAGNGATFYFLLFAILAGVVGAASKLAGVHHVRTWRGDSLATSASSALVAWAITALAF

SEQ ID NO: 1786 - protein, 744 aa, Rhodobacter sphaeroides
MIPGGWRKSRNRREGACPAVGRRAPPGGGGHKTAGAGTARPSRPVTIRKDCEKVAQPLQARLLGRRAGSPRILPSPDRSRRRGPVASGRIGMAETGDLVSIPALLHRNATAFPRQPAYREKEFGIWQVWSWAEAASEIRAIALGFLALGMQRGDHVAVVGRNRPALYWSMVAAQMCGAVPVPLYQDAVAEEMVYVLDHCGARFVICGDQEQVDKVIEVQDRIHHIEQVVYVDKRGMRKYDHSRMNWLEDVVAEGRAAHRRFDEELDRRIAELDYGSTCVMLYTSGTTGKPKGVVLSNRNIIETSKNSVAFDGLRPGDEVLAYLPMAWVGDFIFSVGQAMWTGFCVNCPESATTMMNDLREIGPTYFFAPPRVFEGQLTNVMIRMEDAGRIKKALFRHYMEVARRVGPAILDGRPVSTADRIAYWIGDKLIYGPLKNTLGFSRVRVGYTAGEAIGPEIFDFYRSLGINLKQLYGQTEASVFITQQPDGQVRSDTVGVPSPGVEVRIAETGEVFYRSPGTFVAYYKNPESTASTKDAEGWVATGDAGFFEEATGHLRIIDRAKDVGKMADGRLFAPKYVENKLKFYPSILEAVVFGNGRERCTAFLNIDLAAVGNWAERNNIAYSSYQELAGHPKVYEMMKGHVEEVNRSVAEDPMLSGCQIHRFLILHKELDADDGEMTRTRKVRRKVIEEKYHDLIAALYDGRTSIHTETEVTYEDGRKGAIRATLRIEDAATHGASAQRMAAE

SEQ ID NO: 1787 - protein, 189 aa, Methanosarcina barkeri
MSKKILILTGDCAEDYEVKVPQQSLQMLGYQVDIAAPNKKTGDVLQLVVHDFTTLDTYIELPGHRIPVDVSVSEVKADDYAGLVVPGGRAPEYIRMYDETIKLVQDFFAAGKPVAVICHGLQLLAAAKVLEGYKVTSYPACAPECRLAGANWQSESVIIDKNLVTAQAWPDHPAWLRAFVELLGASISI

SEQ ID NO: 1788 - protein, 540 aa, Triglochin maritimum
MELITILPSVLPNIHSTATVLFLLLLTTALSFLFLFKQHLTKLTKSKSKSTTLPPGPRPWPIVGSLVSMYMNRPSFRWILAQMEGRRIGCIRLGGVHVVPVNCPEIAREFLKVHDADFASRPVTVVTRYSSRGFRSIAVVPLGEQWKKMRRVVASEIINAKRLQWQLGLRTEEADNIMRYITYQCNTSGDTNGAIIDVRFALRHYCANVIRRMLFGKRYFGSGGEGGGPGKEEIEHVDATFDVLGLIYAFNAADYVSWLKFLDLHGQEKKVKKAIDVVNKYHDSVIESRRERKVEGREDKDPEDLLDVLLSLKDSNGKPLLDVEEIKAQIADLTYATVDNPSNAVEWALAEMLNNPDILQKATDEVDQVVGRHRLVQESDFPNLPYIRACAREALRLHPVAAFNLPHVSLRDTHVAGFFIPKGSHVLLSRVGLGRNPKVWDNPLRFDPDRHLHGGPTAKVELAEPELRFVSFTTGRRGCMGGPLGTAMTYMLLARFVQGFTWGLRPAVEKVELEEEKCSMFLGKPLRALAKPRQELLQSF

SEQ ID NO: 1789 - protein, 199 aa, Tradescantia virginiana
GLVKKAHEISVLCDAELALIIFSPKGKLYEYATDSKMEIILERYERYTYAEKALIASDPDVQGNWCHEYIKLKAKFEALNKSQRHLMGEQLDTLNQKELLQLETKLEGSLKNVRSRKTQLMLDSISELQEKGKSLQEQNTCLEKEILGKQKDKAPKQHVQWEKQNQPPPTSSAPMPFLIGDIHPTPNIRNFQGRTVADA

SEQ ID NO: 1790 - protein, 324 aa, Lactobacillus reuteri
MAKKTYIKAITEGIDIALAEDPKTLVFGEDVGKNGGVFRATNGLQEKYGKDRVFSTPLAESGILGLSIGLAATGWRPVSEIQFMGFTFEAMDSIAGQMSRVRFPIGWSKNMPITIRLHTVVVSTAELHGDDLENFFVGIPGLRVVTPSSAYDAKGLVISAIENNDPVLFLENLRLYRSVKGEVPDDKYTVPLDKANVVEEGNDVTIIAYGGEVSEAQKAAKKLAKKNISAEIIDLRSLYPLDTDTIFESIKKTHRVVIVQEAQKMAGVGAQVASAISEGAIMYLDAPVIRVAAPNSVYPFPQAENVWLPGADDIEDAATQAVNY

SEQ ID NO: 1791 - protein, 178 aa, Brassica napus
MENMGTRVIEPLIVGRVVGDVLDNFAPTIKMNVSYNKKQVSNGHELFPLAVSSKPRVEIHDGDLRSFFTLVMTDPDVPNPSDPFLKERLHWLVMNIPGTTDATFGKEVVSYELPKPNIGIHRYVFVLFRQKQRRVKFPSNIISRDQFNTREFAIENDLGLPVAAVFFNAQRETASRRR

SEQ ID NO: 1792 - protein, 1465 aa, Adiantum capillus-veneris
MATPGGPKTKHSVSVAQTRADARLHAAFEGSGDAGAGGSRAPFDYSKSGMDASSVTSVAPEAITAYLQRMQRGGLTQAFGCMLVVAGQKIVAFSENAPEMLEVAAGLGTDLRMLFTQGSTAALDQAVKEEDLSSVNPLVLQSCGGSAKQFYAMLHRIEDVAGVVIDLEPIENGVVEKKSSAEMAVKPIARVQSLPGGEIGRLCQVVVEEVQEMTGYDRVMAYKFHEDGHGEVVAEVRRPDLEPYLGLHYPSTDVPQASRMMFMKNGVRMIGDCTLPPVRVVQAKELAQPISLAGSTLRAPHGCHAQYMSNMGSAASLTMAVAIDDYDDDSSLSCGSRKLWGLVVCHHPSPRTVSYPLRCACEKLMVAFGVQLNIELDLAAQLRENHILTTQALLCDMLRRIRGAPIGIVSRSPSIMDLVKCDGAALYYGGRFWPLGTTPSEFQIRDLAEWLLGASEEIASTGVTCTDSLAEMGYPGAALLGDAVCGMAAAMITPNSDFLFWFRSHTAKEVYWGGAEHDPQSRDDDSWMQLPRSSFKAFLEIVKRRSLPWEEVEVDAIRSLQLILREDLEQFCAAVGAVKASDGDDEDSLVPSAKKLSLKETEENGGADNSKKLERMHSAAAGGGGGGGRWEKMRLPSSLAQEWMEAIRGTGDGGASGGGGGGPFDWDLISAFQHNSFIVVDALKPDFPIIYASTGFFNLTGYTSREVIGGNCRFLQGPDTNPADVASIREALAQGTGTFCGRLLNYRKDGSSFWNLLTIAPIKDDLGSIVKLIGVQLEVSKYTEGIRANNRRPNGMPQSLIRYDVRHQDKVSAFIAQLVAALTKPDKVETPRLSSAMRFSLTGQTIESLPQPTAIPREGGGRTRRPRSSSFLSLLGMEKEKDIPEEDELQELEVIMLEDASVGRPGSLDDPERTRRGIDLATTLERIGKSFVITDPRLPDNPIIFASDRFLELTEYTREEVLGNNCRFLQGRGTDRKAVQLIRDAVKEQRDVTVQVLNYTKGGRAFWNLFHLQVMRDENGDVQYFIGVQQEMVAPRPVHQPPELPDILPDRVEQEKAEVVRATAQRVDAAARELPDANLVPDHLFAPHSKVVTPLPHSKTNSSSWFAIRRVQRRLSRGERLGLKHFRPIKPLGSGDTGSVHLVELRGTGQVFALKAMDKSMMLQRNKVHRARAEREILAIMDLPFLPTLYASFQTKTHVCLITDYCPGGDLFLLQDKQPTQTLSERTASFYAAEVVVALEYLHCMGVIYRDLKPENVLLQKNGHILLTDFDLSFLTSCRPQLILQGGKGRSRRSKRRRRVTFCAEPRVSSNSFVGTEEYIAPEIISGEPHSSAVDWWALGILLYEMLYGRTPFVGRNRQKTFYNVLNKELIFPTSIPVSLAGRQLIAGLLQRDPTIRLGTLRGASELKKHPFFREINWPLIRWRKFSANQAHNANNVSSLDEGESDSGNAWEANGGSTQSFQDTF

SEQ ID NO: 1793 - protein, 553 aa, Linum usitatissimum
MAWSESNRTKNIFLLLTFSAAILITATTATVHHPVIKSSCSTTLYPELCHSAASASAAVLSDIKTTTDVVDLSLNATIAAVQANNQAIKKIISSRSLSLTKREKAALADCIELCGETMDEPVKTIEELHGKKKSAAERGEDLKTLLSAAMTNQETCLDGFSHDKGDKKVRELLAAGQTNVGRMCSNSLAMVENITEEEVFREGKTASFLSEGRKMGEEEDGWPRWISAGDRRLLQAGTVTPNVVVAADGSGNFRTVSQAVAAAPEGSTSRYVIRIKAGVYRETLVVPKKKTNLMFVGDGRTSTIITGSMNVVDGSTTFNSATVAVVGDRFMARDLTFQNTAGPSKHQAVALRVNADFTAFYRCDMLAYQDTLYVHSLRQFYVSCFIAGTVDFIFGNAAVVLQNCDIHARRPNSGQRNMVTAQGRDDPNQNTGIVIQKCRIGATQDLLQVQSSVESYLGRPWKMYSRTVIMQTDISNVIRPAGWFMWDGNFALATLTYREYANTGAGSGTSGRVRWGGYKVITSASEAQPFAPRSFIGGASWLPATGFPFSLDL

SEQ ID NO: 1794 - protein, 231 aa, Bacillus subtilis subsp. subtilis str. 168
MESTMSPYFGIVVSLAAFGIGTFLFKKTKGFFLFTPLFVAMVLGIAFLKIGGFSYADYNNGGEIIKFFLEPATIAFAIPLYKQRDKLKKYWWQIMASIIAGSICSVTIVYLLAKGIHLDSAVMKSMLPQAATTAIALPLSKGIGGISDITAFAVIFNAVIVYALGALFLKVFKVKNPISKGLALGTSGHALGVAVGIEMGEVEAAMASIAVVVVGVVTVLVIPVFVQLIGG

SEQ ID NO: 1795 - protein, 380 aa, Anisocarpus madioides
MKRSRERKKEASSVPDSGGMDELLEVLGYKVKSTDMADVAQKLEQLEMVMGEDGILQLSDTVHYNPSDLSGWVQSMLLVLNDNNTTTTADDSGHILLPGDSSTTMIDFSSETVVHGKPGSKIHQDDDLRAIAGGAIYRSESESSMPGNANPNGNGVKRMKTTAAGSEVVDVQPESPRPVVLVDSQEAGIRLVHTLMACAEAIQHNDLKLADALVKHVGILVASQAGAMAKVATYFAGALAQRIYNIYPQNALETSCYEILQMHFYETCPYLKFAHFTANQAILEAFAGAKRVHVIDFSLNQGMQWPALMQALALRSGGPPAFRLTGIGPPQPDNSDALQQVGWKLAQLADTIGVEFEFRGFVANSIADIDANMLDIRLPE

SEQ ID NO: 1796 - protein, 280 aa, Prunus armeniaca
EKSAKRKRKNQYRGIRQRPWGKWAAEIRDPRKGVRVWLGTFNTAEEAARAYDSEARRIRGKKAKVNFPDETPRSSAKRSVKANPQKMQPKTNMNAIQPNLNQNINFVNDPNQDYYNAMGFLDEKPPTNNFGFMSTFPANDVALKSSTPSDAVPLYFGSDQGSNSFDCSDFGWGEQGSKTPEISSVLSSVMEESDDSLFLEDASPTKKLRSNPEDLVPVQDNAGKTLTDELSAFEMKYFQTPYLDGSWDASVDAFLSGDATQDGGNSVDLWCFDDLVGGGF

SEQ ID NO: 1797 - protein, 362 aa, Glycine max
  unsure (1)..(362): unsure at all Xaa locations
MTDNEEPMIVPGSMSELAFNKYKRWQWWCLVTLSIAFLIVGQSAAVILGRFYYDQGGNSKWMATLVQTAAFPILFIPLFTIPSPPEASTSASPPIKIILLIYXVFGVLIAADNMMYSTGLLYLSASTYSLICASQLAFNAVFSYFINSQKFTALIINSTVVLTLSAALLAVNEDTDEPSGFSKGKYIIGFLCTLGASAVYSLLLSLMQLTFEKVLKKETFSVVLEMQIYTSFVASGASVIGLFASGEWRTLHGEMEGFQKGYVAYVMTLVWTSIAWQVCSVGVVGLIFLVSSLYSNVISTVSLAVTPIAAVIVFHDKMNGVKIISMLLALWGFASYIYQNYLDDSKTRHAQAATKSQNDSSC

SEQ ID NO: 1798 - protein, 462 aa, Lactobacillus gasseri
MKLNPFRKESLKRYLGTDKHFAKTLGAFDLLTIGIGAVIGTGIFILPGTVAAKEAGPGVTLSFLVAALVCTLASMCYAELSSSIPVAGSAYSYGNILYGEVIGWILGWALILEYMLSVAAVSAGWASYFNSLLHSFGLHTPHHFEGPFDPLNGTYLNLWAVISVLLIGILLSRGMKTSMKFNNAAVLIKIAIIFIFIGVGLFFIKPKNYHPFTPYGTTGVLRGATTVFFAFLGFDVVSSSAAEVKNPKKNMPIGIIGTLIVAALLYMGVSVVLTGMVNYKQLDVANPVAYALKLVNQGWVADLLSIGAIVGMSTMMLTMIYSSSRLIYSIGRDGLLPNFLGKIDKHGLPENALWIVTIVIALMGGLFSLEELTSLVSIGTLLAFTFVSFGVILLRRRKDIPEGNFKVPLYPVIPILSGLACIGMMCFLSVKTYLFAGIWFLFGLFIYCVYGYKHSKISKKNN

SEQ ID NO: 1799 - protein, 612 aa, Oryza sativa
  unsure (1)..(612): unsure at all Xaa locations
LTQRIYFLXVICLDEMFDXFVNCEIFSDVAGDLTVSVDGQSFLLHKFPLVSRCGRIRRMVAESKDXXDLSKLELVNVPGGALAFELAAKFCYGSNFEINTVNVAHLRCIAEYLEMTEEYQEENLIVRTETYLNEIVVKNLDKSLEVLCACDGLDPTVEDVGLVDMCVDAIAMNASKEQLVSGLAHLECDVGSGKLRMHCQDWWVEDLSALRIDYYQRVIVAMRRTGVRPESIGTSIVHYAQTALKGIXXRRHVWDSGPLVGDNQRVIVETLIDLLATEKITSVTLSFLFGMLRMAIEVDAGLDYRIEVEKRIGLQLEMASLDDLLIPATQTSDSMFDVDTVHRILVNFLQRIEEDDSGNLSPCGYESDDGLKSPSHSSVLKVGRLMDGYLAEIAPDPYLKLQKFMALIELLPDYARIVDDGLYRAIDIYLKAHPSLTESECKKMCKLIDCQKLSQDASSHAAQNDRLPIQTVVRVLYFEQLRLKSTVSSTTPHTTSLGGDGCGGSLSQRMMMTRDNYACLRRENRELKLEIARMRVRLTELEREQGVMRQGMRDGRGGGEHGRALLASISRGIGRIAMLGVGAQGGAERRRKTKTKKSSHSQSQWSSDGGGK

SEQ ID NO: 1800 - protein, 458 aa, Triticum aestivum
  unsure (1)..(458): unsure at all Xaa locations
MTSLISQNALQKRRLEKDDDSSSDEETMDSPVASDAEAGKKPRPEDRRKDRKRKKKALQARQGQEADEMRRLESSLFGNIYTPLEFGTEAGAAVPARDQDDDAPLFFVDRSAGDDLPVYXEEDLGSEDEVVDKGRKPAWVDEEEDSTEVDILKVARLRKLRKEADERVISGKEYEARLRGHHAKLNPFTGWADMDRKAPLRDGDSDEEESGVDNMLRSNDELVVKGTAKLLPGMLDYSRLVDANAQDPSSGPINSVQFHRNGQLMLVAGLDKHLRFFQIDGKRNPKIQSIFVEDCPIQKAAFLPDGSEVILSGRRKFFYSFDLVKAAVSKIGPLTGREEKSLESFEISPDSRTIAFIGNEGYILLISSKTKQLIGTLKMNGNVRSLAFADGGNQLLSSGGDGHVYHWDLRTRKCMHNAVDEGSLSGLSLCTSQDSSYFATGSSSGIVNVYKRDEFLGG

SEQ ID NO: 1801 - protein, 220 aa, Caulobacter crescentus CB15
MAVVRRAVAARGLQMIAKPLTVVPGFDVWPGLLDISAQRALVEAVLAGAEQAPFSNYRTAYGKPMSVAMTALGSLGWTSDARGYRYVDRHPETGRPWPDMPPALLDLWTVLGDPETPPDSCLVNLYRDGARMGLHQDRDEADPRFPVLSISLGDTAVFRIGGVNRKDPTRSLRLASGDVCRLLGPARLAFHGVDRILPGSSSLVPGGGRINLTLRRARTA

SEQ ID NO: 1802 - protein, 348 aa, Oryza sativa
  unsure (1)..(348): unsure at all Xaa locations
MASDSERCPPTSKRKKNGQIVADTPTAAAFSTLPARDRLSIISPLPIIQFIPPIHSPPPKPSAYPKIVTGIKQKMSNRATHWCYVCRRPVRIRGGSQDVTCPSCDDGFVQEMSEMGRRTASSTLGFVGPDAGDEFFPVMEAMSTLMRHAATVGGDEREVDVHDEHGGGDGVPAHARLGVLFRGGPRVGVERRGGYYRAGLEALFEQLQNQLGSSRQGPPPAPPSAIDAMPVVTISRRHLRAEPRCPVCQDEFQLGAEAREMPCAHLYHADCIVPWLVHHNSCPVCRHSLPPPATTASGGGASGGERQVRRGSRSSTSHSHECGLERHDGLRRSWXSXIYSMAXXTTIX

SEQ ID NO: 1803 - protein, 520 aa, Oryza sativa (japonica cultivar-group)
MAATSSSSSPCMIASLRSSHRCRLSPSATATSPPRLRTLPPRRCRRNPSSSSSSSRQAAAISMAPANPRHRLIAPIHAAAAAGGGGGGAGATSPSGLPSLVGIAHLLVSLGIVLASDKFLKQAFAAASIKFPSALFGMFCVFSVLVVLDAFAPALAKGFMDFFEPATLFIQRWLPLFYVPSLVVLPLAVRDVPAASGLKIFLIIFGGWFASLMVAGYTALTVRKIVQTQLIPAEPMSKPSPFATLEFWAWGAVFVASFAVAYVNPTALGTTARTCLPFLLASTVLGYMVGSGIPSGVKKVLHPIICCALSADLAAIAYGYLSRSGVDAVLGCDYLTKAPSNPGAGDVLMGFLGSVIISFAFSMFKQRKLVKRHAAEIFTSIAIASTFSLYSTAILGRVIGLEPSLTISILPRCITVALALSIVSFFEGVNSSLTAAVVVLTGLIGANFVQAAMDKLGLNDPIARGIGTASSAHGLGTAALSAKEPEALPFCAIAYGLTGIFGSLICSVPAVRQSLVFIAG

SEQ ID NO: 1804 - protein, 423 aa, Zea mays
  unsure (1)..(423): unsure at all Xaa locations
MRRRPHPPRPRPDWAHCPGAYWCATPRAPPPTGCTALAFCPPLESVLDHQPYHSLPAARARSGALPCGDWCARPSSLTPSPATPSSILPDGAPGSRNKMSNRATHWCYACRRPIRLRGQDIVCPNCNDGFIQEISEMGGILNTYGLIEPDFEERRARRFGMMDAMSSLMRQRMEEMGRDGLFDIRGRQGTGTEYGRRSTAVPTLVFGGIPSPAVGSSDVNVVIRGGRRAGAARPNFSSLVVGPSLEALFEQLLLQNNRQGPAPAPQSAIDSMPVVKINRRHLDDDPQCAVCKDKFEVGAEAREMPCKHLYHTDCIIPWLVQHNSCPVCRHPLPSQRSGSTSSARPSAYYNEAADPPGVTRADLEPAPRDGGRESQERRRSFSFLWPFGXSSSRSSSYQYEQNVDEPAVYDPNQIAYSEWHYDH

SEQ ID NO: 1805 - protein, 111 aa, Zea mays
MAKGVAVLNSSEGVKGTIFFTHEGNGATTVTGTVSGLKPGLHGFHVHALGDTTNGCMSTGPHFNPDGKTHGAPEDANRHAGDLGNIIVGDDGTATFTITDSQIPLSGPNSI

SEQ ID NO: 1806 - protein, 354 aa, Suillus bovinus
MAYQYHNDLLAPYLALSQGDKVQAEYVWIDGDGGLRSKTMTMTKKTTDIGQLRIWDFDGSSTNQAPGGDSDVYLRPAAIFKDPFRGGDNILVLAETFNNDGTPNRTNHRHHTKKVMDLAKDSVPWFGLEQEYTLFDADGTPFGWPKGGFPGPQGPYYCGAGTGKVFARDLIEAHYRACLYAGVNISGINAEVMPSQWEFQVGPCEGISMGDHLWMARYLLVRIAEQWGIKVSFHPKPLAGDWNGAGCHTNYSTKVMREPGGMKYIDEAIEKLSKRHAEHIAVYGEDNDLRLTGRHETGHIGDFSSGVANRGASIRVPRHVAAQGYGYLEDRRPASNIDPYRVTGIIVETTVLDK

SEQ ID NO: 1807 - protein, 126 aa, Brassica napus
EDNCKLKFLELKKRIFRFIIFRIDGQQVVVEKLGNPQETYDDFTASLPADECRYAVFDFDFTTNENCQKSKIFFIAWSPDSSRVRMKMVYASSKDRFKRELDGIQVELQATDPSEMSFDIIKSRAL

SEQ ID NO: 1808 - protein, 180 aa, Triticum aestivum
MAGVGRNMVAPLLVLNLIMYLIVIGFASWNLNHFINGLNNRPGVGGNGATFYFLVFAILAGVVGAASKLAGVHHVRTWHGDSLATSASSSLVAWAITALAFGLACKEIHIGGYRGWRLRVLEAFVIILVFTQLLYVLALHSGLFGNMLGNHAGGYGAEHGGYGAGDPHNKGMGTGGVARV

SEQ ID NO: 1809 - protein, 550 aa, Oryza sativa
AAAMRIEEVQSTTKKQRIATHTHIKGLGLDANGAAIGLAAGFVGQGAAREAAGLVVDMIRQKKMAGRALLLAGPPATGKTALALGISQELGSKVPFCPMVGSEVYSSEVKKTEVLMENFRRAIGLRIKENKEVYEGEVTELSPEEAESTTGGYGKSISHVIIGLKTVKGTKQLKLDPTIYDALIKEKVSVGDVIYIEANSGAVKRVGRCDAFATEYDLEAEEYVPIPKGEVHKKKEIVQDVTLHDLDAANAQPQGGQDILSLMGQMMKPRKTEITEKLRQEINKVVNRYIDEGIAELVPGVLFIDEVHMLDIECFSYLNRALESPLSPIVILATNRGICNILAIRAQVEEIDIDEESLAFLGEIGQQTSLRSSKEDTLLKFLLQYDDKLENLSLFMLYTEITIEIQIIVLCKLLVVVVIRFYRAIVDRTNEQSTIVRGVQRRGSLAWVIGVIAHWILNVDIEATVKRMEERYRGSQRESAIAPRYRSINQRGGRWVGLRYHTRRARYRISVALPMRETEEHGDWRVGPRYRTLKVRKHRWYHSFKARYRL

SEQ ID NO: 1810 - protein, 403 aa, Vibrio vulnificus CMCP6
MTVEMKVERGLFDEVMVPCYNPMEMIPVKGQGSRIWDQNGNEYIDFAGGIAVSCLGHCHPVMVNALTEQAGKLWHLSNVMTNEPALRLAKKLTEVSFAERVFFANSGAEANEAALKLARRYAADVYGPEKSEIIAFKQGFHGRTFFTVTVGGQAAYSDGFGPKPGDVTHLPYNDIEALQAHISDRTCAVMMEPLQGEGGIIPPTAEFIQAVRELCDKHNALLVFDEVQTGNGRTGEFYAYQGLGVTPDILSTAKSLGGGFPIGAMLTTAKLAEHLKVGTHGSTYGGNPLACAVAEAVVTEVSKPETLQGVKEREQWFREGLAKLNEKYQIFAEIRGKGLLLGAALNEQWKGRARDVLVAAGKEGLLVLVAGANVVRFTPSLVITKQEIEEGFAKLDKAIASLV

SEQ ID NO: 1811 - protein, 350 aa, Bacillus halodurans
MESIKVVIVGGGQAGIAMGYYLVKEKVPFMILDANEQVGDSWRNRYDSLVLFTPRTYSQLPGFPMDGAPNGFPTKDEMASYLQQYANHFNLPMRHHTKVDRVTRQQNGRFHLKTTNGWIEAEKVVIATGAFQKPYLPPVLDSANNEMSQVHSSAYRNPAQIPGKSVLVVGGGNSGAQIAVELAKERNVTMAISHPFRFLPLKLLNKSMFSWLEWGGLLYAGIDTTRGRWFKKQKDPIFGKELKSLIKKGQIHLKPRVMNVQGKEVEFADHSRLSFDRIIWSTGFSPSYEWIDIDGVIATNGWPIHNRGITNIRGLYFLGLPWQYQRGSALVCGVGRDAEYLVPFIKHGDK

SEQ ID NO: 1812 - protein, 247 aa, Glycine max
SARAEGVDIMLIRELTGGIYFGEPRGFGTNDNGEEIGFNTEIYATHEIDRIAHFAFKVAQKRRRKLCSVDKANVLEASMLWRKRFLAIAQEYPDVELSHMYVDNASMQLIRDPKQFDTMVTNNIFGDILSDEASMVTGSIGMLPSASLGASGPGLFEPIHGSAPDIAGQDKANPFATVLSAAMLLRYGLGEEKAAERIENAVMDTLNRGFRTGDIYSAGTKLVGCKQLGEEILKSVESNVPAGAAAV

SEQ ID NO: 1813 - protein, 191 aa, Oryza sativa
  unsure (1)..(191): unsure at all Xaa locations
XNREPVPARGFGSLVQIPDKIQNSLKVHLRFLKKNGFGGGSEAEMLPMXNAGNSTVAPEVRLDKQLQAWKNNPIWSDEPPEIKVTVPQGSLCNLNLKFKAGLPPDAVYNIIIDPENKRVFKNIKEVISRKVVLDEGQRQIVEVEQAAIWRFLWWSGVLSVHXSNVASSSRQQPRPSSGXRRRRRRHQLRQI

SEQ ID NO: 1814 - protein, 1128 aa, Oryza sativa
MSSSRPTQCSSSSSRTRQSSRARILAQTTLDAELNAEYEEYGDSFDYSKLVEAQRTTGPEQQARSEKVIAYLHHIQRAKLIQPFGCLLALDEKTFNVIALSENAPEMLTTVSHAVPSVDDPPKLRIGTNVRSLFTDPGTTALQKALGFADVSLLNPILVQCKTSGKPFYAIVHRATGCLVVDFEPVKPTEFPATAAGALQSYKLAAKAISKIQSLPGGSMEVLCNTVVKELFDLTGYDRVMAYKFHEDDHGEVFAEITKPGLEPYLGLHYPATDIPQAARFLFMKNKVRMICDCRARSIKIIEDESLHLDISLCGSTLRAPHSCHLQYMENMNSIASLVMAVVVNENEDDDEVGADQPAQQQKRKKLWGLLVCHHESPRYVPFPLRYACEFLAQVFAVHVNKEFELERQVREKSILRMQTMLSDMLLRESSPLSIVSGTPNIMDLVKCDGAALLYGGKVWRLQNAPTESQIRDIAFWLSDVHRDSTGLSTDSLHDAGYPGAAALGDMICGMAVAKINSKDILFWFRSHTAAEIRWGGAKHDPSDKDDSRRMHPRLSFKAFLEVVKMKSLPWNDYEMDAIHSLQLILRGTLNDDIKPTRAASLDNQVGDLKLDGLAELQAVTSEMVRLMETATVPILAVDSNGLVNGWNQKVAELTGLRVDEAIGRHILTVVEESSVPVVQRMLYLALQGKEEKEVKFEVKTHGSKRDDGPVILVVNACASRDLHDHVVGVCFVAQDMTVHKLVMDKFTRVEGDYKAIIHNPSPLIPPIFGADEFGWCSEWNAAMTKLTGWHRDEVINKMLLGEVFDSTNASCLVKNKDAFVSLCILINSALAGDETEKAPFSFFDRNGKYIECLLSVNRKVNADGVITGVFCFIQVPSHELQHALHVQQASQQNALTKLKAYSYMRHAINNPLSGMLYSRKALKNTGLNEEQMKEVNVADSCHRQLNKILSDLDQDSVMNKSSCLDLEMVEFVLQDVFVAAVSQVLITCQGKGIRVSCNLPERYMKQTVYGDGVRLQQILSDFLFVSVKFSPVGGSVEISCSLTKNSIGENLHLIDLELRIKHQGKGVPADLLSQMYEDDNKEQSDEGMSLAVSRNLLRLMNGDVRHMREAGMSTFILSVELASAPAK

SEQ ID NO: 1815 - protein, 472 aa, Mesorhizobium loti
MGTDMTAAVETAQTTTIHGDRVSLLRVLGPAHVWALGVGIVLVGEFTGWNFAADKGGALAALIVCWVVGLLYTSVAMIDSEVTSTVAAAGGQYAQAKHIVGPLMAFNVALFLVFAYTMLEVSDAILLGDTIVSKAGVEGLTHNSFIAATIVVLAWLNYRGVLMTLNVNFVITAIAYVSIVILFFSVSPWTQGAVLKLNELVTPENALPYGWIGVIAAFQFGIWYYLGIEGTTQAAEEVRSPARSLPYGTMAGMITLLIAAAMTWYVCASLMPWEYLGITYYPLWDAGKLTGSPLLENLLFIATLLAALASANGCINDAARAWFSLGRDRYLPSWFSAVHPKYRTPYRSILFLLPIALAFAFIADLNQAITFSILSGVLQYTFMSINIMMFRKKWPLDTIRRGYTHPFHPLPAIVLFCLCVVTFFAIFLGFGSQLIAMTIFYFLISLWFHFYRYKFVRRGDQFTMPWPKPQGY

SEQ ID NO: 1816 - protein, 287 aa, Lactococcus lactis subsp. lactis
MTYIPNPTRYDHMIYRPAGNSGLLLPALSLGLWHNFGSVDDFENARDMIHTAFDLGITHFDLANNYGPEPGSAERNFGRILKEDFQKLRDELIISTKAGYPMWPGPYGNWGSKKSLLASLDQSLERLGLDYVDIFYSHRPDPNTPIEETMGALKSALDSGKALYVGLSNYSAKETEAAVLAAEKLGFKLLIHQPRYSMLDRWIEDDLQETLTEAGIGIIAFKPLYQGLLTEKYLHGIPEDSRMRDPHYATLHDDSLTKKRLEQVQALNDLAQSRGQSLAQMALAWVL

SEQ ID NO: 1817 - protein, 373 aa, Candida maltosa
MSVKTKTITILPGDHVGTEIVNEAIKVLEAIEAATPYQKIHFDFKHHLIGGAAIDATGVPLPDDALESAKKSDAVLLGAVGGPKWWTGALRPEQGLLKIRKELNLYANIRPCNFASDSLLELSPLRPEVVKGTNLIIVRELVGGIYFGDREEQEESEDKQTAWDTEKYTVDEVTRITRMAAFMPLQDNPPLPIWSLDKANVLASSRLWRRTVDKVISEEFPTLSVQHQLIDSAAMILIQNPTKLNGIIITSNMFGDIISDEASVIPGSLGLLPSASLASLPDTNTAFGLYEPCHGSAPDLPANKVNPIATILSAASMLRLSLDCVKEAEALEEAVKQVLDKGIRTADLRGTRSTTEVGDAIVEAVTKILKEKA

SEQ ID NO: 1818 - protein, 901 aa, Neurospora crassa
MDAIVGASVVVPCPVAARSCGIAAVDRSRALQHLTAVEVRPRESLGNPQAFTVPNPSGALVYCPSTRVRHQTSPLPIMKTAKPPAAEAPSGPSGSNRRAQPVRQTRINPPRTSSLNRTNSFPNGPTPEQPIDIFPAVTHFTDAITALPKELVRHFTLLKEVDAKIFAPEATLFELVDAALKAPVPDRTRSVTDGNNSVAPASTPMSAQNSTSGRVASNANPATVPPSITDSAHAAVFDPTNLPRRHLFRQAAWKIQEMLVSLEEKNHVISTANDALHKQLSRIEEIWPHLENEFSDEAKWGSTTHWAYAENRVPKTNHKEAERSRREGAATLSAAAQQIAEEAAARSSDRKQALAAKKNNKGQATEPEADSKAQETTKKGPGTGKSRKHQAEATPVGLGIANGTPTNGTGPSKRRKVEKEPKANGSAPMERAMSSVFGNGTAKSKTTASPRGSPAPDGATPTGPTTKKRKALPSGSTQAKKSRTNAANSPSVAASPLLGSLPDTKAGRNSPVPLPPRPASSRARGNSTASTTLPIQQRPATATTNKPNGITPAVAEAVPQSKSTSDAKAPKEADPPAPTPAKTEAAKPETEIKPPVPPEPVANASTSKKENSKAVTAPAEEPETKKRTNSIVSQTAILPPPISTTVTTTKSGRASKPSTPATGTFAEAANATTTTARSRPSRNSTNQSDKDSNSTSGKDTFGNSTTTTSGTTTSKRSHKKGASSVSAVAVSVALQDEKPGKSAAASDEKKDAASDENSGRPTTSGRGKGSAAAHRDSKAERGSERDRGGERDTKTETNHGHGHGRRGTATAAAARAQQQQPQHQQRQEEEDDDDDDDDVDADEQRYCFCNGISYGEMVACDGDGCPREWFHLECVGLKVAPKGNAKWYCEDCKKRLRASGR

SEQ ID NO: 1819 - protein, 473 aa, Glycine max
MESGGNSLPSGSDGVKRKVSYFYDPEVGNYYYGQGHPMKPHRIRMTHALLAHYGLLQHMQVLKPMAAKDRDLCKFHADDYVAFLRGITPETQQDQLRQLKRFNVGEDCPVFDGLYSFCQTYAGGSVGGALKLNHGVSHASVNWAGGLHHAKKCEASGFCYVNDIVLAILELLKIHERVLYVDIDIHHGDGVEEAFYTTDRVMTVSFHKFGDYFPGTGDIRDIGYGKGKYYSLNVPLDDGIDDESYQSLFKPIMGKVMEIFRPGAVVLQCGADSLSGDRLGCFNLSIKGHAECVRHMRSFNVPLLLLGGGGYTIRNVARCWCYETSVALGIELDDKMPQHEYYEYFGPDYTLHVAPSNMENKNSRHLLDEIRAKLLDNLSRLQHAPSVPFQERPPDAELLERDEDQDDRDERWDPDSDREADNDSNPVRRRVKSECVDAEDKDAVLGVDSMAVDEPCIKEEQDNLKELSDHRSR

SEQ ID NO: 1820 - protein, 302 aa, Enterococcus faecium
MLVVIFVTYIVSLEAKKALRLNNAMVYVKFGIIALFIIVGIFFVKPDNWQPFMPFGFSGVLDGAALVFFAFLGFDAVAMAAEEVKNPQKDVPRGIIGSILIATVLYIIVTLILTGIVPYTELGVNDPVAFAMRYVGHGTVGAVIAVGAILTLLTVTISMMYSLARLLFAVSKDGLLPKFMTEIDQKHRTPKKATYAAGVAAVFFAGFFPLNVLAELTNIMALAYLMLVSLGLLKLRKMFGKPKAGEFKVPFVPLLPIVSILTCIVLMLRLQTVTWIVFGIVMVIGLIIYFGYGYGHSKMNEK

SEQ ID NO: 1821 - protein, 479 aa, Gibberella zeae
MAENSTPDVPGPAGIPYFGNYLEIYPDHLGNHQRLFEKYGPLFTTTSMGNRLYQTNSAELSNIFLSEDHYFTKDIVPGHPLHPIKNQEAGVFLADTNTEQWRLAHKFLPPALGPKAVRHYAPTMQRTVESSFKVFDELDQKGEAWNVYQYMLKLGSQAVGKLVLGMDFAHFEQVDSPLHEMVLKIAENLELNKRVSSMGAWYAQMPFGDPKKVRQTMARIMEMMDESIARASKGQEDLELQDAALKADTVVDYFLRATDNKGNKLPPSQFAPALLVATAAGFTTTSSLLSWLIYSLVKYHGNQERLLQELIDNDWDENTQVTADTTSKLTFLDKFIKETQRLHNPSFQPGRTAKVDMILPGGYRLPKGAVVISALHHMHNNKDVWENPGRFDPDRWDTEQVKNRPPGSYIPFATGPRMCVGFNFALQEIKVFLPKLVYRYKFSLAQDGPIEYDPYFQLIRPNNLYVQAEKRVKWPPKSE

SEQ ID NO: 1822 - protein, 180 aa, Listeria innocua
MENRKQMIKTERLFLSEMTLADTEILFGYWSDDSVTRYMNIEPFQSLQPVEEMIRMLRQLEIEGKALRCVIILQATGEIIGTCGFNYIDHENHRAEIAYDLGTRFWKRGYATEAVKALMEWGKESFKLHRIEAKVDPRNEASITLLEKLGFLEEGLLRDYEKIGTEYQSLKLFSWLDTGK

SEQ ID NO: 1823 - protein, 145 aa, Triticum aestivum
MAATCRFAAPLGLAPLPRSCAGAKSVAFSIGTTKVATRTRSVAVRAGDGSAETPEILKAAQDAWAKVEDKYAVATIGVAGLVALWTAVGALKSIDKLPILPGVLELVGIGYTGWFTYRNLIFQPDRETLISNIKSTYNEITGSSS

SEQ ID NO: 1824 - protein, 467 aa, Streptococcus pneumoniae R6
MESKMNIFRTKNVSLDKTEMHRHLKLWDLILLGIGAMVGTGVFTITGTAAATLAGPALVISIVISALCVGLSALFFAEFASRVPATGGAYSYLYAILGEFPAWLAGWLTMMEFMTAISGVASGWAAYFKGLLSQYGIALPQALNGTFNPQAGTFVDLLPILVLVLVTSLVLLNAKAALRFNSILVILKFSALALFVLVGIWNIKFDNWSNFAPYGFGQIYGASTGIMAGASLMFFGFLGFESISMAVDEVKTPQKNIPRGIVLSLSIVTILYALVTLVLTGVVHYSHLNVDDAVAFALRSVGISWAANYVSLVAILTLITVCISMTYALSRMIYSLARDGLVPAAFKELTKTSKVPKNATILTGLASAVAAGMFPLASIAAFLNICTLAYLILLAYGLIRLRKEKGMPKAGEFKTPLVPLLPILSIIICLSFMLQYNVNTWIAFLVALLVGSIIYFTYGYKHSTIEE

SEQ ID NO: 1825 - protein, 192 aa, Ralstonia solanacearum
MAKKILMLVGDYVEDYEVMVPFQALQMVGHTVHAVCPDKQAGESIATAVHDFEGAQTYSEKPGHRFTVNASFADVDPAAYDALVVPGGRAPEYLRLDPRVLDIVRHFSGAGKPIAAICHGAQLLSGAGVLKDRACSAYPACGPEVTAAGGTYQDIPVDQAHTDGNLVTAPAWPAHPAWLAQFLEVLGTRVLH

SEQ ID NO: 1826 - protein, 503 aa, Oryza sativa
RAREREGLRLATRERRDGEGRGDGGAERRRRRRRRLLRPHPHGGAGGEDVDDDGKQRRTGNVWTASAHIITAVIGSGVLSLAWATAQLGWVVGPVTLMLFALITYYTSGLLADCYRTGDPVSGKRNYTYMDAVAAYLGGWQVWSCGVFQYVNLVGTAIGYTITASISAAAVHKANCYHKNGHDADCGVYDTTYMIVFGVVQIFFSMLPNFSDLSWLSILAAVMSFSYSTIAVGLSLARTISGATGKTTLTGVEVGVDVTSAQKIWLAFQALGDIAFAYSYSMILIEIQDTVKSPPAENKTMKKATLLGVSTTTAFYMLCGCLGYAAFGNAAPGNMLTGFGFYEPYWLIDFANVCIVVHLVGAYQVFCQPIFAAVETFAARRWPGSEFITRERPVVAGRSFSVNMFRLTWRTAFVVVSTVLAIVMPFFNDILGFLGAVGFWPLTVYYPVEMYIRQRRIQRYTSRWVALQTLSLLCFLVSLASAVASIEGVSESLKHYVPFKTKS

SEQ ID NO: 1827 - protein, 389 aa, Bacillus halodurans
MKKASFVYSENQLSYQFHSTHPFNHQRLRLTYDLLKSMDALDDSEIVAPRVATEAELRLIHDQAFIDAVKAAGNGTLSDGVALNYGLGTEDTPIFKNMHEAAALLVGGTLTAVDQVMEGHAEHACHLGGGLHHGFRGKASGFCVYNDSSIAIEYMRRKFGARVLYIDTDAHHGDGVQWAFYEEDDVCTLSIHETGRYLFPGTGNFNEKGQGEGYGYSINIPLDAFTEDDSFLFAYEQAVTNVVKFFKPDVILTQNGADAHFHDPLTHLCASMRTFRYIPQLAHALAHEYCEGRWIAVGGGGYDIWRVVPRAWAMIWLEMTDQLQKANGPLPERWLSKWTTYAQHPLPSHWEDENEELPTIPRRDEITEKNKKIVEKALYHIYTELKTQT

SEQ ID NO: 1828 - protein, 456 aa, Schizosaccharomyces pombe
MVQISEVKGNGRDNRITTHSHIKGLGLKEDGTCESVGGGFIGQEKAREACGIITDLIKSKKFGGKGVLFAGGAGTGKTALALAIAQELGPKVPFCPMVGSEVYSSEIKKTEALMENFRRAIGLRVKETKEVYEGEVTEMVPEEAENPLGGYGKTISHVLLGLKTHKGTKQLKLDPSIYESLQREQVSTGDVIYIEANTGAVKRVGRSDAYATEFDLEAEEYVPMPKGEVHKRKEIVQDVTLHDLDIANARPQGGQDIMSMMGQLMKPKKTEITDKLRGEINKVVNKYIEQGIAELIPGVLFIDEVHMLDIECFTYLNQALESTISPIVIFASNRGICTIRGTEDIQAPHGIPTDLLDRLLIVRTLPYSESEIRSILQIRAKVENIILTDECLDKLAQEGSRTSLRYVIQLLTPVSIIASLHGNKEIGVQDIEECNDLFLDARRSAQVVKSSSGFLQ

SEQ ID NO: 1829 - protein, 461 aa, Streptomyces coelicolor A3(2)
MTVSPPSTASTASTGSTGSTGSTATTGPSAGLAAPPSEPSAPRAGTAAPTGRPDIVDLYLKHIGSGRAVMGRVMGGMAEVRSEGVWIHADDGRRFLDFGGYGVFIMGHRHPAVVEAVHRQIDTHPLASRVLLEPVAARAAQALAAHTPPGLDYVHFVNSGAEATEAALKLARAHGLTSVITTRSGFHGKTLGALSVTANTTYQTPFQPLLPDVTQVAYDDPADLEQALAAHRDRACVIVEPVQGEGGVRIPRPGYLGQVRALCRTYGALLVVDEIQTGMGRLGTWWGVDAEDVRPDVLLVGKGLSGGVVPVAAMVATAEAYAPFSRDPYLHTSTFGASPIACAAALATVRAMEEEDTVARAAALGPRILTAVRDVCAPYQGGLVREVRGRGLLIGIEFAEEQAVGELMLELISRGVLVNNSLNSTRVLRLTPPAVVEDSALDLFLTTLGAALRGTADRMTG

SEQ ID NO: 1830 - protein, 429 aa, Synechocystis sp. PCC 6803
MTYSPVVESVEAQAFAVTDLSPAAEFKTADFDTYVMNTYGRFPIAIARGQGSTLWDTEGKSYLDFVAGIATCTLGHAHPALVRAVSDQIQKLHHVSNLYYIPEQGELAKWIVEHSCADRVFFCNSGAEANEAAIKLVRKYAHTVLDFLEQPVILTAKASFHGRTLATITATGQPKYQQYFDPLVPGFDYVPYNDIRSLENKVADLDEGNSRVAAIFLEPLQGEGGVRPGDLAYFKRVREICDQNDILLVFDEVQVGVGRTGKLWGYEHLGVEPDIFTSAKGLAGGVPIGAMMCKKFCDVFEPGNHASTFGGNPLACAAGLAVLKTIEGDRLLDNVQARGEQLRSGLAEIKNQYPTLFTEVRGWGLINGLEISAESSLTSVEIVKAAMEQGLLLAPAGPKVLRFVPPLVVTEAEIAQAVEILRQAIATLV

SEQ ID NO: 1831 - protein, 240 aa, Cicer arietinum
NSARGGNQNDGDTMIDHLLKLRVTQPEYYSDHMIKGLIQAMLLAGTDTSAVAIEWVMSELLNHPDVLNKAKEEIETQIGRDKLKEEHDLSKLPYLQNIINETLRLHPPAPLLLPHYSSEDFTLGGFNVPKDTIILSNVWAIHRDPNLWSDPLSFKPERFEIEGELNKLIAFGLGRRACPGLNLAQRSVGLTVGMLIQCFEWKRESDEKLDMMEDKGITMPKKVPLEAMCKPLPIVNDIMK

SEQ ID NO: 1832 - protein, 511 aa, Triticum aestivum
  unsure (1)..(511): unsure at all Xaa locations
SHPPPPSCSTPPNPPPLSPASSAPPRRLLTRARGSAANPSRRAGDREEAAPGEPALRTGEVHSRTYKHSCAAHAHLQGPDLVASGAELGLSARFVVQAGGREAGGLEVGMIREEDRAGSGLRLGGRHDPGETARGIGISQXRRSNLRFCPTGASXEVYSSEIKNTEGLMESFRRAIGLRIKANIEVYEGGVTELSPEESESSVDGGGESVRPPVIGLKTVKGTKQLKLDPTIYDALIKEKVAVGDVIYIEANSGAVKRVGRCDAFATEYDLEAEEYVPIPKGEVHKKKEIVQDVTLHDLDAANAQPQGGQDILSLMGQMMKSRKTEITEKLRQEINKVVNRYIDEGIAELVPGVLFIDEVHMLDIECFSYLNRALESPLSPFVILATNIWICTVRGTDMTSPYGIPVDLLDRLVIVRTQIYGPIEMIQILAIRAQVEEIEIDEDSLAFLGEVGQQTSLRHAIQLLSPASVVAKANGREKICKADLEEVRVLYLDAKSSAQLLHKQQGSYIT

SEQ ID NO: 1833 - protein, 348 aa, Schizosaccharomyces pombe
MNILRSVVSRGRKGLKQEKVNRSFAYLDMVYITSKVIAMSTPAAGIHKLYRNDELDVFKYLTTQLKDNWILLNLCAEETVYHLELFKPNVINYGFQDHNPPPLLFLWAIVMNMDALFQTQPLLTLVVHCKAGKGRTGTVICSYLVAFGGLTAKQSLELYTEKRMVRGHGLTISSQIRYVYYIEILKQFPNYLKAVEFNTGTTFFKSFKCLNIKKNSSLILSLHAFSKGRNINPVALWKSSDISSHNVSIKEGKRIWGIQCNLETSEKDLLLRVERKGQFYFPSSVQCWFHTHFQPMLVEYTNGINFQQGINSFLQGQQSISFSWSEMDNSRRSDPFFEQLTIVYENVF

SEQ ID NO: 1834 - protein, 352 aa, Pseudomonas aeruginosa UCBPP-PA14
MKALRWHAARDLRLSELERQAPRPGEVELEVAYCGICGSDLHEYQSGPHSIPQAEAHPLSGCRAPLTLGHEFCGVVAALGPGVEGLRIGDRVAVEPEYRCGECRYCREGRYNLCESMGFIGLMGDGGFAERARVPAYMLHRLPDAVGFRQAAVLEPAAVALHALRRSSLAPGQRCAVFGLGPIGLLLVMLARLRGIEDIAAVDVSPERLALAGEFGASRALDARDGDTAARLREGGALDCAFEAAGSQASLDAALASLRKGGELVLVSLMGEVRLDAFDLVNRELRLLGSVGYRDAYPELIALLADGRLDLARAVTRSVPLEQAVEHGFEALLRDKSQVKVLVNPNPALADA

SEQ ID NO: 1835 - protein, 687 aa, Kluyveromyces lactis
MSEDKYCLVTGGAGYIGSHTVVELCEAGYKCIVVDNLSNSSYESVARMELLTGQEIKFAKIDLCELEPLNKLFDDYKIDSVLHFAGLKAVGESTQIPLTYYFNNIVGTINLLECMKSHDVKKLVFSSSATVYGDATRFENMIPIPETCPTGPTNPYGKTKLTIEDMMRDLHFSDKSFSFAILRYFNPIGAHPSGVIGEAFGIPNNLLPFMAQVAIGRRPKLYVFGDDYDSVDGTPIRDYIHVVDLAKGHLAALKYLEKYAGTCREWNLGTGHGTTVLQMYRAFCDAIGFNFEYVVTARRDGDVLNLTAKCDRATNELEWKTELDVNKACVDLWKWTQDNPFGYQIKGVDSKFFGDKGDFSSRVVSLGKGTSFEVKLANLGATIVDIVVNGCSVVASLDNETEYKDQSNPFFGATVGPYANRIANGTFEINGKRIQLTVSKEDGNVVHSGINSYHSKKFLGPIVKNPEAHIWTADFKYVDEETEFPARLSTLVRYKVDSEKKTLTVEYESKVAGQGSTGANITNHTYFNLNKFNEATIKGSKVQLIDNTGLEVNNKLLPTGNLKKYTQVATFNDSPTEITEKEPVLDFCFVSGLPAKLDTRSSPLTPVFKLSNEDAKLEVEVATTEPTFQVYTGDYVDVKDKYENRAGICCEPGRYIDAVNNPEWKSSVVLPAGETYGHKLSYTFRTL

SEQ ID NO: 1836 - protein, 341 aa, Oryza sativa (japonica cultivar-group)
MDHRELWPYGLRVLVIDDDCSYLSVMEDLLLKCSYKVTTYKNVREAVPFILDNPQIVDLVISDAFFPTEDGLLILQEVTSKFGIPTVIMASSGDTNTVMKYVANGAFDFLLKPVRIEELSNIWQHIFRKQMQDHKNNNMVGNLEKPGHPPSILAMARATPATTRSTATEASLAPLENEVRDDMVNYNGEITDIRDLGKSRLTWTTQLHRQFIAAVNHLREDKAVPKKILGIMKVKHLTREQVASHLQKYRMQLKKSIPTTSKHGATLSSTALDKTQDHPSRSQYFNQDGCKEIMDYSLPRDDLSSGSECMLEELNDYSSEGFQDFRWDSDKQEYGPCFWNF

SEQ ID NO: 1837 - protein, 338 aa, Edwardsiella ictaluri
MAILVTGGAGYIGSHTVLALLSRGDEVVVLDNFVNASVQALARVEQICDRQPHLYRGDVRDRALLQQIFAQHVISDVIHFAGLKAVGESVEKPLEYYDNNVSGTLVLLEEMRRAGVQGFIFSSSATVYGDPESVPLTESSRTGGTTNPYGTSKLMVEQILQDVSRARPEMRITALRYFNPVGAHPSGLIGEDPNGIPNNLIPYVAQVAVGKLACLSIFGHDYPTQDGTGVRDYIHVMDLATGHLAALDRRDEGASYKVYNLGTGVGYSVLDIVAAFERCSGVTIPYRFAPRRAGDIAECWSNPALAAQELGWCAQYGLEAMMTDTWRWQQNNPNGYQD

SEQ ID NO: 1838 - protein, 238 aa, Stylosanthes hamata
MAPREKTPAVKVNGKSNAGVKEVHFRGVRKRPWGRYAAEIRDPGKKSRVWLGTFDTAEDAARAYDAAAREFRGPKAKTNFPFPDSDDINNNNIVVVKNNNRSPSQSSTVESSSRDRDSYSAAAATAVADSSPLDLNLAPQELDSPDPFGSHSTQPFAVFPGGMPAAKQALYLDAVLRASMASHGQFGFGYNRPAAAGAQSDSDSSSVIDLNQNEGDVAKNNGRGLVLDLNEPPPQEMA

SEQ ID NO: 1839 - protein, 529 aa, Oryza sativa
  unsure (1)..(529): unsure at all Xaa locations
MSTASGDGGDGGGGGDGASSAAGGGGRRIPPASSMPWVRNLRRFVGTGAGLGSEALMELETKRILLEIFKERQRKSMEAGAIPSFYKKKPEDGSISNRVQKLAKYRFLKKQSELLLNADDLDAMWVCLRENCVIDDATGAEKMNYEDFCHIATVCTEQIGQKCKRFFSPSNFMKFEKDDSGRIAILPFYLYVMRTVSLTQARIDMSELDEDSDGFLQPHEMEAYIRGLIPNLAQLRDMPSAFVQMYCRIAARKFFFFCDPHRRGKACIKKVLLSNCLQELMELHQESEEEVTDTEQAENWFSLTSAQRICDMFLALDKDTNGTLSKQELKEYADGTLTDIFIERVFDEHVRRSKVGGGNSREMDFESFLDFVLALENKDTPEGLTYLFRCLDLNGRGFLTTADIHTLFRDVHQKWIEGGNYELCIEDVRDEIWDMVKPADPLRIALTDLLSCKQGGTIASMLIDVRGFWAHDNRENLLQEEEEQVEEAXVLQLPCNQPGKLSTARHWQLLVSRNRKARAIACTTVCVPL

SEQ ID NO: 1840 - protein, 224 aa, Triticum aestivum
MSDQPQPVRTGDVYPPSAAAHDARRQRDEVLTHDDQQQKQDGRRGELRVTETDEPHAGRRVVTATAGGQVMAQFTVPVPGAGVEEATDAVTIGEALQAAAQTSAGERPVDLADAAAVQAAETRATGLGGVVPGGVAAAAQQAAETNMRPRVSDGEKLRLRDVLDSAAAVLPANKVATREDAVAVATAAERNAAAGAGGGGKGVADAVAVAAEMNDKRMTRTRQA

SEQ ID NO: 1841 - protein, 345 aa, Lactococcus lactis subsp. lactis
MSKKIVTLAGDGIGPEIMSAGLSVLKAVSKKIDFEYELEAKDFGGIAIDKHGHPLPEETLQAVKNADAILLAAIGHPKYNNAKVRPEQGLLALRKELGLYANVRPLKIYPALKKLSPIRNVENVDFLMIRELTGGIYFGQHELADDKARDVNDYSADEIRRILHFAFKSAQSRPRKLLTSVDKQNVLATSKLWRKMADEIADEYPDVRLEHQLVDSCAMLLITNPQQFDVIVTENLFGDILSDEASSLAGSLGVMPSSSHGFNGLALYEPIHGSAPDIAGKGIANPVSMILSIAMMLRESFGQEDGATMIEKAVTQTFTDGILTKALGGTATTKEMTEAILKNCQ

SEQ ID NO: 1842 - protein, 362 aa, Streptomyces coelicolor A3(2)
MSLTIGIVGLPNVGKSTLFNALTKNDVLAANYPFATIEPNVGVVGVPDPRLTKLAEIFSSEKILPATVDFVDIAGIVRGASEGEGLGNKFLANIRESDAICQVIRAFKDENVVHVDGKVSPKDDIETINTELILADLQTIEKVLPRLQKESRIKKDVAPKVKAVEEAKEILEKGDTLFSQGILQGSERAELLHDLHLLTTKPFLYVFNVDEDELTDDDFKSEQRALVAPAEAIFLNAKLEADLAELDEDEALELLQSVGQDEPGLATLAHVGFRTLGLQTYLTAGPKESRAWTIKKGATAPEAAGVIHTDFQKGFIKAEVISFDDLVETGSVTEARAKGKARMEGKEYVMRDGDVVEFRFNV

SEQ ID NO: 1843 - protein, 224 aa, Mesembryanthemum crystallinum
MGEEVILLDFWPSMFGMRLRIALAEKGVKHERKEEDLLIGKSPLLLQLNPVHKKIPVLVHNGKPINESMIAVQYIDEVWNEKSPSLLPSDPYQRAQARFWADFIDKKLYDECRKIYTTKEAEIGEETYKGFLEIIKVLEAEVGEKSYFGGDTFGFVDVALIPFYSWFYALEMLGKFNIETECPKLIAWAKRCMERESVSKSLPDRHKIYDFITLQLRKALGVDQ

SEQ ID NO: 1844 - protein, 207 aa, Glycine max
  unsure (1)..(207): unsure at all Xaa locations
ILRGIQFSISTLNKYSFDLNTLVECSSYMPLSGFHGVVSGFLVGVKQIIPDQELSFIKIKTKWLPSITVLLSIAISFWTLXATAYLPTIISGTYISWIYLRYWQRKPETKHRGDLSEDFAFSTFFPEFLRPVIDPIASIFHRMLCGRYDASNDDQGYSLENEPLPGSDSIEASRRRERGARALEERLAAERLAAARRELQREAEENV

SEQ ID NO: 1845 - protein, 516 aa, Pisum sativum
MAVVAAPKKNNSFNKKDNPNLLLGRFELGKLLGHGTFAKVHLAKNIKTGEAVAIKIISKDKILKSGLVSHIKREISILRRVRHPNIVQLFEVMATKTKIYFVMEYVRGGELFNKVAKGRLKEEVARKYFQQLICAVEFCHARGVFHRDIKPENLLLDENGNLKVSDFGLSAVSDEIKQDGLFHTFCGTPAYVAPEVLSRKGYDGGKVDIWSCGVVLFVLMAGYLPFHDPNNVMVMYKKIYKGDFRCPRWFSPELVNLLTRLLDTKPQTRISIPEIMENRWFKIGFKRIKFYVEDDVVCNLDSLGLDGNNGNDGNDDKKVLNIDEHRDEALESVSESEWDSEVVNRRKNRQLGSLPRPASLNAFDIISFSQGFDLSGLFEEKGDEARFVSGASVSKIMTKLEEVAQLVSFKVRKKDCRVSFEGSREGVKGPLSIAAEVFELTPSLVVVEVKKKGGDKVEYDRFLNTELKSALHSLTMEESAGSSCQNTPDETLQQRAFSDSAIDKHSDSIESLNLDT

SEQ ID NO: 1846 - protein, 236 aa, Thermoplasma acidophilum
METIVLTLLILAILFVLSLKLRVLDLKGSVAALFIGAIVSFIGSIYWLILMLIFVASSFLATKAFFSKKVKMKVQEGEHGERRISNVTYAALVGIMITLIYGIYPHMHNYFFELFAISFAVINSDTFASEIGVIDQRVYMITTFKRVRPGVNGGVSLTGELAAILGGFIIAMFYSIFAYHGFNVPRIAEVTAAGFVGCQIDSILGALFENRGKLNKGQVNFLSSFLTVMASAAMFI

SEQ ID NO: 1847 - protein, 353 aa, Pyrobaculum aerophilum str. IM2
MKIPIKMRAALYKAPGQPLELAETEIPTPGEGEILIKVAATGVCHSDLHILDGEIVPPPEGFILGHEVSGWVVDFGPRCENPHGLSPGDPVVISWIIPCGKCYWCVRGQENYCPYAAARMPGLVGLNGGHAEYMSVPETAVFPIPKEVDVHTAAVISCAYGTAYRALKEAAVGPGTSLVVIGVGGVGLAAVELASALGARPIIAVDVRKHVLEKAAELGATHLINATNGDPLSKIRDILPQGADVVYETKPNPDLKLAVEIVRRGGTIVVTGLGTSTIEIPANHIVMNGIRIIGSLGYKPRTDIPELLTLAASGKIKPQRLISHKYAPNEINEAYKNLRIGLHHRAIIIWNTK

SEQ ID NO: 1848 - protein, 397 aa, Chloranthus spicatus
DLEPVNPADVPVTAAGALKSYKLAAKAISRLQSLPSGNISLLCDVLVREVSELMGYDRVMAYKFHEDEHGEVIAECRRVDLEPYLGLHYPATDIPQASRFLFMKNKVRMICDCSAAPVKVIQDKRLGQPLSLCGSTLRAPHGCHALYMANMGSIASLVMSVTINEDDDETKSDPQQQQQENRRKLWGLVVCHHTSTRFAPFPLRYACEFLLQVFSLQLNKEVELAAQLREKNMLRMQTLLCDMLLRDTPTGILTQSPNVMDLVKCDGAALYYRNQFWLFGTTPTDVQIRDMAEWLLECHDGSTGLSTDSLMEAGYPCASILGNAVCGMAAVKITSKDFLFWFRSHTAKEVKWGGAKHDPIDKDGDGRKMHPRSSFKAFLEVMKQRSLPWEDMEMDAI

SEQ ID NO: 1849 - protein, 390 aa, Fusobacterium nucleatum subsp. nucleatum ATCC 25586
MIKMKKILILGSTGSIGTNALELIRNNREQYQVVGISGNKNIDLLKKQIEEFKPISIYVGSEQDAIYLKKEYSFIKEVYFGENGLAELSKNSDYDIILTAVSGAIGIDATVEAIKRGKRIALANKETMVSAGVYINKLLKEYPKAEIVPVDSEHSALFQSLQGFKKENLKKLIITASGGTFRGKDLAYLENVTVEQALKHPNWSMGKKITIDSSTLVNKGLEVIEAHELFNVDYDDIEVVIHPQSVIHSMVEYVDGSIIAQMGVANMKTPILYAFTYPEKEYNSSINFLDLIKNNNLTFEEADRKVLKGIDLAYRAGRTGDTMPTVFNASNEIAVELFMKKQIKFLDIYRIIEEAMNSHQVLTLNTDNALNVIKEVDREIRKKVREQWEK

SEQ ID NO: 1850 - protein, 394 aa, Rhodobacter sphaeroides
MRSLSIFGATGSIGESTFDLVMRKGGPEAFRTVALTGGRNIRRLAEMARALKAELAVTAHEDCLPALREALAGTGTEVAGGAQAIAEAADRPADWTMSAIVGAAGLVPGMRALKHGRTLALANKESLVTAGQLLMRTARENGATILPVDSEHSAVFQALAGEDTACVERVIITASGGPFRDWSLERIRACTVAEAQAHPNWSMGQRISIDSASMFNKALELIETREFFGFEPDRIEAVVHPQSIVHAMVGFCDGGLMAHLGPADMRHAIGFALNWPGRGEVPVARIDLAQIASLTFQRPDEERFPALRLARDVMAARGLSGAAFNAAKEIALDHFIAGRIGFLDMAAVVEETLAGVSTDPLFGKVPDALEEVLAMDHLARRAAEEAAGLRQQKR

SEQ ID NO: 1851 - protein, 322 aa, Oryza sativa
MARWAIAIHGGAGVDPNLPEHRQEEAKRVLARCLQVGVDALRSGAAALDVVEAVVRELESDPFFNSGRGSALTRLGTVEMEASIMDGRGRRCGAVSGVSTVKNPVSLARLVMDKSPHSYLAFDGAEQFARDQGLEVVDNSYFITEDNVGMLKLAKEANSILVRYEQFDYRIPLSGSETCGAQAVSSDNSHGTVGCAVVDSSGHTAAATSTGGLMNKMTGRIGDSPLIGSGTYACGACAVSCTGEGEAIIRSTLARDVAAVMEYRGAGLQEAVDYCVKKRLDEGFAGLIAVSSTGEVAYGFNCTGMFRGCATEDGFMEVGIWE

SEQ ID NO: 1852 - protein, 129 aa, Zea mays
  unsure (1)..(129): unsure at all Xaa locations
MAAPASLTTTAPSPPALLKASAPLLISFRPVSRHCKNLCIKTKATENDQSAKKHQKVKSILCQXCEGNGAITCTKCEGNGVNSVDYFEGRFKAGSLCWLCRGKREILCGNCNGAGFLGGFLSTFDETAQ

SEQ ID NO: 1853 - protein, 143 aa, Glycine max
MAMAFKMATTGMWVTDECKNSFMEMKWKKVHRYIVFKIDEKSRLVTVDKVGGPGESYGDLAASLPDDDCRYAVFDFDFVTVDNCRKSKIFFIAWSPTASRIRAKMLYATSKDGLRRALDGISYEVQATDPAEMGFDVIQDRAK

SEQ ID NO: 1854 - protein, 266 aa, Tripsacum dactyloides
ASADPSTDSAREPKRMRTGGGSTSSSSSSSSSMDGGRTRSSVVEAAPPATQASAAANGPAVPVVVVDTQEAGIRLVHALLACAEAVQQENFSAAEVLVKQIPMLASSQGGAMRKVAAYFGEALARRVYRFRPPPDSSLLDAAFADLLHAHFYESCPYLKFAHFTANQAILEAFAGCRRVHVADFGIKQGMQWPALLQALALRPGGPPSFRLTGVGPPQPDETDALQQVGWKLAQFAHTIRVDFQYRGLVAATLADLEPFMLQPEGD

SEQ ID NO: 1855 - protein, 152 aa, Glycine max
MVKAVAVLGSSEGVTGTIFFVQEGSGPTTVTGSLAGLKPGLHGFHVHALGDTTNGCLSTGSHFNPNNKEHGAPEDENRHAGDLGNVNVGDDGTVSFTITDSQIPLTGPNSIIGRAVVVHADPDDLGKGGHELSKTTGNAGGRVACGIIGLQG

SEQ ID NO: 1856 - protein, 265 aa, Sulfolobus tokodaii
MIREVLRFINKSDLVIEVIDAREPDLTRSKKLEEYALNRERKILIVLNKADLIPREILEGWKKIFENEGKNAIYISATMHLGTKILRDKIKELLRGKEGTVIFVGYPKTGKSSIINALKGKHSASTSKIPMAYGYTKTIQKFKIDSKIYAWDSPGIIPPDGNELEKVIRGISVEKLEDPVKAGEMLLLRIIKYNPNAIKETYNITFNSPYEFFEKLALKRGWLYKSTKEPNIEEAAKAFIRDYHKGKIIYYVPPLSMNDDKDSSV

SEQ ID NO: 1857 - protein, 368 aa, Nitrosomonas europaea ATCC 19718
MKTRAAVAWQAGQPLTIEEVDLAGPRTGEVLVEIKATGICHTDYYTLSGADPEGLFPAILGHEGAGIVVEVGADVKSLRPGDHVIPLYTPECRECKFCLSRKTNLCQAIRATQGRGLMPDGTSRFSLDGKAIMHYMGTSTFSNYIVVPEIALAKIREDAPFDKACYIGCGVTTGIGAVLFTAKVEVGANVAVFGLGGIGLNVIQGARMAGADKIIGIDLNPEREALGRQFGMTHFIDPSQVENVVDAVIQLTDGGADYSFECIGNTTVMRQALECTHKGWGRSIIIGVAKAGAEISTRPFQLVTGRKWEGSAFGGARGRSDVPRIVDWYMDGKISIDPLITHILKLEEINEGFKLMEAGESIRSVVVF

SEQ ID NO: 1858 - protein, 103 aa, Zea mays
  unsure (1)..(103): unsure at all Xaa locations
MLEGRARVEDTDMPARMQDAATSAASRALDLFDVADCRAIAGHIKXHEFDKRYGVGWQCVVGANFGCFFTHSSGTFIYFSMERLSFLLFKAAVVAAAAAAVAS

SEQ ID NO: 1859 - protein, 510 aa, Eustoma grandiflorum
MAVGNGVLLHIAASLMLFFHVQKLVQYLWMNSRRHRLPPGPIGWPVLGALRLLGTMPHVALANMAKKYGPVMYLKVGSCGLAVASTPEAAKAFLKTLDMNFSNRPPNAGATHLAYNAQDMVFADYGPRWKLLRKLSNIHILGGKALQGWEEVRKKELGYMLYAMAESGRHGQPVVVSEMLTYAMANMLGQVMLSKRVFGSQGSESNEFKDMVVELMTVAGYFNIGDFIPSIAWMDLQGIQGGMKRLHKKFDALLTRLLEEHTASAHERKGSPDFLDFVVANGDNSEGERLQTVNIKALLLNMFTAGTDTSSSVIEWALAELLKNPIILRRAQEEMDGVIGRDRRFLEADISKLPYLQAICKEAFRKHPSTPLNLPRIASQACEVNGHYIPKGTRLSVNIWAIGRDPSVWENPNEFNPDRFLERKNAKIDPRGNDFELIPFGAGRRICAGTRLGILLVEYILGTLVHSFVWELPSSVIELNMDESFGLALQKAVPLAAMVTPRLPLHIYSP

SEQ ID NO: 1860 - protein, 367 aa, Zea mays; identical to SEQ ID NO: 401

SEQ ID NO: 1861 - protein, 763 aa, Novosphingobium aromaticivorans
MPERIASQLRSGPPLVALRRYRSTHSMFLSRRLLVSASSVLALSATAIHAAPASPADIAKADARAAATVRQMTGEEKVVLTHGIMPLPLAGPVPGMPADAIPGAGYIAGIERLGIPALKETDASLGVSYVMGIRKDGATALPSGVAQAASWNPDLLYRGGAMIGSEARAKGFNVLLAGGVNLMRDPRNGRTFEYLAEDPLLSGMLVGAAIRGIQSNNIISTIKHFALNGQETGRKYVDVKIDEGAARESDLLAFQIGIEQGQPGSVMCAYNRVWGEQACANDWLLNKVLKQAWGYKGFVMSDWGAVPNIEAALKGLDQQSGEQLDPGVFFADKLKEKAASDPAYKARLDDMNRRILTAIYASGLDKAPATPGGKIDFAANAQVAEEVAKQGIVLLKNDGALPLAKSARSIAIIGGYADGAVLSGAGSSQVHGEGGPAVVRPVGGKGVWAGFIAQQYHRSSPMDAIQELAKDAKVTFRDGRYIADAVEKARQSEVAIVFATQWQTEGLDVPDLSLPDGQDELIAAVAAANPRTIVVLETGGPVKMPWLDKVAGVIEAWYPGARGGPAIASVLFGDTNPSGRLPLTFPKDESQLPRPRLDGSDWVEPDFSGNPSSGSDKLVSDYDIEGSDVGYRWFARKGQKALFPFGHGLSYTTFESSGLKVKGLAASFTVKNTGQRAGDDVAQVYLVSRNGQARQRLVAFQRVSLAPGASKSVTVTFDPRILADYRNGGWVMGGGEYAFALGKDAENLSAPVKVKLAAKKWKD

SEQ ID NO: 1862 - protein, 483 aa, Zea mays
MRINVCGCRGSTVHLHHLSSSSSPPPLPFHLLPPGDSSSSLPRRSIGPPIDRARGRRFQSGVVSIRSGSLPVWVGAMAAMDASADKNAVFRKLRAKSDNKMCFDCNAKNPTWASVTYGVFLCIDCSAAHRSLGVHVSFVRSTNLDSWTPEQLKMMVYGGNNRAQAFFKQHGWTDGGKIEAKYTSRAADLYRQLLAKDVAKSSTEDGNNSWPSSPVAASQAPNQAAAFPDLKLTEVSKENVSEKKDSEIVRSPRAPTHSFKKPIGAKKPGNKTGGLGARKLTSKPNESLYEQKPEEPAPVLPSSVIESTTTRSKSHTSRFDYVENAPALKNGNSSEGNHMSGHVAPPMSSNFFAEFGMDSGYQKKSTSSSSKVQIEESREARQKFSKAKSISSSQFFGDQASFEKDAQVSLQKFSGSSAISSADLFGHPANNSSVDLSASDLINRISFQATQDLSSLKNMAGETGKKLTSMASNIITDLQDRIL

SEQ ID NO: 1863 - protein, 379 aa, Hordeum vulgare
MATAGKVIKCKAAVAWEAGKPLSIEEVEVAPPQAMEVRVKILYTALCHTDVYFWEAKGQTPVFPRILGHEAGGIVESVGEGVTELVPGDHVLPVFTGECKDCAHCKSEESNLCDLLRINVDRGVMIGDGQSRFTINGKPIFHFVGTSTFSEYTVIHVGCLAKINPEAPLDKVCVLSCGLSTGLGATLNVAKPKKGSTVAIFGLGAVGLAAMEGARMAGASRIIGVDLNPAKYEQAKKFGCTDFVNPKDHTKPVQEVLVEMTNGGVDRAVECTGHIDAMIATFECVHDGWGVAVLVGVPHKEAVFKTHPMNFLNEKTLKGTFFGNYKPRTDLPEVVEMYMRKELDLEKFITHSVPFSQINTAFDLMLKGEGLRCITRTDQ

SEQ ID NO: 1864 - protein, 400 aa, Myxococcus xanthus
MDMATGCAARGLPYWLELPRTSKEHRPRLAQLGRRAAAIVSDLFPTYIIPGHLRGAAKALDVPLFAVDASCVVPMQRIATRQIGAYTLRPKLKKLWPEYLDRAVPNRAVKAAAAGRKLEPDFATSDARESRESLDAFDFDHSVAPIQERGGRKAGLDALQAFVHQRLEGYDEGRNDPGLARQSNLSPFFHWGNLFAGEAARAAIRARGAQDASVQGFLEELLVRRELGFNYCFHTPGPQQLSVASLPPWAKETLTRHQKDAREHRYSLKQLETARTADGLWNAAQRELVERGRIHNYLRMLWGKKILEWTPSPQEALQRIAFLNDKYAVDGRDPASVANFMWVLGLHDRPFQERQVLGKVRPMSSLRTAARYNLAPYLERWGRPEDPPVKLKRVRKTAGP

SEQ ID NO: 1865 - protein, 159 aa, Corynebacterium glutamicum ATCC 13032
MTSIHDISVTLNDGTETTMADWAGHLLLIVNVASKCGLTPQYEGLQKLYEEYQDRGFFVIGVPCNQFNGQEPGTDAEVCAFAQNQYDVTFPLLSKTEVNGEGAHPLYKVLKEATDGSEIEWNFEKFLVDAEGNTIKRFAPRTEPSAAEVVEAIEENLPI

SEQ ID NO: 1866 - protein, 339 aa, Microbulbifer degradans 2-40
MTVLVTGGAGYIGSHTCIELIEAGFDVVVVDNLRNSKSESLKRVEKIVGKTIPFHKVDICDKAALSDVFASYKVSSVIHFAGLKAVGESCEMPLEYYRNNVGGTVTLCEVMDEHSVHNLLFSSSATVYGDPASVPILESFPTGATNPYGRSKLIVEEILRDVCKIPNSNWRISLLRYFNPIGAHISGTIGEDPQGIPNNLLPYVAQVAVGKLPKLGVFGSDYDTVDGTGVRDYIHVVDLAKGHVKALQKLEKSEPAAYTYNLGTGQGYSVLQVVEAFEKASGKKVPYELKPRRPGDIAECYADPALAASELGWKAEFGIERMVEDTWRWQSSNPQGYEG

SEQ ID NO: 1867 - protein, 365 aa, Averrhoa carambola
ALSIAGAVQSQKLAVRAISQLQLLPGGDIKLLCDTVVESVRELTGYDRVMVYKFHEDEHGEVVAESKRPDLEPYIGLHYPATDIPQASRFLFKQNRVRMIVDCNAKPVRVIQDEGLMQPLCLVGSTLRVPHGCHAQYMANMGSIASLAMAVIINGNDEEAIGGRNSMRLWGLVVCHHTSARCIPFPLRYACEFLMQAFGLQLNMELQLASQLSEKHVLRTQTLLCDMLLRDSPTGIVTQSPSIMALVKCDGAALYYQGKYYRLGVTPTEAQIKDIIEWLLAFHGDSTGLSTDSLADAGYPGATSLGDAVCGMAVAYITKTDYLFWFRSHTAKEIKWGGAKHHPEDKDDGQRMHPRSSFKAFLEVV

SEQ ID NO: 1868 - protein, 435 aa, Heuchera canadensis
SGKPFYAIIHRIDVGLVIDLEPVNPADVPITAAGALKSYKLAAKAISRLQSLPNGNITLLCDVLVKEVSDLTGYDRVMVYKFHEDEHGEVIAESCRPDLEPYLGLHYPATDIPQASRFLFMKNKVRMICDCLASSVKVIQDKRLPQPLSLCGSTLRSPHGCHTQYMANMGTIASLVMSVTINEEDDEMVTDQPKGRKLWGLVVCHHTSPRFVPFPLRYACEFLIQVFGVCINKEVELASQTREKHILQTQTVLCDMLLRNAPVGIVTQSPNVMDLVKCDGAALYYKKKAWLLGSTPTDAQIRDITDWLLEYHGGSTGLSTDSLVEAGYPDALNLGDAVCGMAAIKITSNDFLFWFRSHTAREIKWGGAKHDPDEKDDGRKMHPRSSFKAFLEVVKRRSLPWEDVEMDVIHSLQLILRGSLQDETVDDSKTIVNES

SEQ ID NO: 1869 - protein, 278 aa, Oryza sativa
MSQEQPRRPSEKAAGGGGGEQGIRYGDVFPVTGSLAAKPIAPRDAATMQSAENLVLGKTVKGGPAAAMESAASRNEEMGVVGHDQATDAAAEQGVNVSDTLVPGGGRIVTEFVAGQAVGHYVEQDDGAAVVAGVVGAAPGAVRVEEPAKITIGEALEAAALAAGGTPVERSDAAAIQAAEAKATGTDTYMPGGLAAQAQSAAVANLWTARDADKTKLGDVLSNATAKLAADKEVESGDAARVAGAEMRNKPGAAARPGGVAASMAAAARLNRGPTTWD

SEQ ID NO: 1870 - protein, 475 aa, Pseudomonas syringae pv. syringae B728a
MSTPPGKLRLGALVALVVGSMIGGGIFSLPQNMAASAEVGAVLVGWAITAIGMLTLAFVFQTLANRKPDLDGGVYVYAKAGFGDYMGFSSAWGYWISAWLGNVGYFVLLFSTLGYFFPVFGEGNTVAAVIGASVLLWGVHFLVLRGIQEAAFINLVTTVAKVVPLILFVLIAVFAFKLDIFTTDIWGLEKPDMGSVMNQVRHMMLVTVWVFIGIEGASIFSARASKRSDVGKATVIGFITVLLLLVLVNVLSLGVMTQPELAKLQNPSMAAVLEHIVGPWGAALISVGLIISLLGALLSWVLLCAEIMFAAAKDHTMPEFLSRENANHVPANALWLTNAMVQVFLVITLFSSSTYLSLIYLATSMILIPYLWSAAYALRLAIGGEGYENARRERRKDLFIAAVALLYAIWLIYAGGVKYLLLSALLYAPGVILFAKAKLEAKKPVFTHLENMMFVAVLIGALIAAYGLYDGFLTL

SEQ ID NO: 1871 - protein, 408 aa, Oryza sativa
  unsure (1)..(408): unsure at all Xaa locations
MGALAASIASHLPSGVSAAVAALAASPGEVVRRAAGLEDELRELLRLNGGGRGRGGAAAEQGQGEQTRDRFVRAYERLKSELLNDRAFNFDFTEETRQWVAKMMDYNVPGGKLNRGLSVVDSYMLLRQGTEVDDEDFYLACVLGWCVEWLQASALVLDDITDNAYTRRDNLCWYKLPTVGMSAINDGVLLKCHVQAIIKRYFKEKFYFLDLMELXWNEIGLQTAMGQMLDLITTHTGAKDLARYRIQGYRRIVKYKTSYYSFYLPVACALLLNGARLSDYVELKNVLIEMGVYFQIQDDYLDCFGDPEVIGKVGTDIEDYKCSWLIVQAMELANENEMKILYENYGKSDPKCVAEVKSVYRELDLQDIFLEYESRVYKHLVSTIDAETDRAIRDILKSFLKKIYRRKK

SEQ ID NO: 1872 - protein, 301 aa, Bacillus subtilis subsp. subtilis str. 168
MTMKQFEIAAIPGDGVGKEVVAAAEKVLHTAAEVHGGLSFSFTAFPWSCDYYLEHGKMMPEDGIHTLTQFEAVFLGAVGNPKLVPDHISLWGLLLKIRRELELSINMRPAKQMAGITSPLLHPNDFDFVVIRENSEGEYSEVGGRIHRGDDEIAIQNAVFTRKATERVMRFAFELAKKRRTLVTSATKSNGIYHAMPFWDEVFQQTAADYSGIETSSQHIDALAAFFVTRPETFDVIVASKLFGDILTDISSSLMESIGIAPPDINPSGKYPSMFEPVHGSAPDIAGQALPIRSARFGQRS

SEQ ID NO: 1873 - protein, 523 aa, Glycyrrhiza echinata
MEPQLVAVSVLVSALICYFFFRPYFHRYGKNLPPSPFFRLPIIGHMHMLGPLLHQSFHNLSHRYGPLFSLNFGSVLCVVASTPHFAKQLLQTNELAFNCRIESTAVKKLTYESSLAFAPYGDYWRFIKKLSMNELLGSRSINNFQHLRAQETHQLLRLLSNRARAFEAVNITEELLKLTNNVISIMMVGEAEEARDVVRDVTEIFGEFNVSDFIWLFKKMDLQGFGKRIEDLFQRFDTLVERIISKREQTRKDRRRNGKKGEQGSGDGIRDFLDILLDCTEDENSEIKIQRVHIKALIMDFFTAGTDTTAISTEWALVELVKKPSVLQKVREEIDNVVGKDRLVEESDCPNLPYLQAILKETFRLHPPVPMVTRRCVAECTVENYVIPEDSLLFVNVWSIGRNPKFWDNPLEFRPERFLKLEGDSSGVVDVRGSHFQLLPFGSGRRMCPGVSLAMQEVPALLGAIIQCFDFHVVGPKGEILKGDDIVINVDERPGLTAPRAHNLVCVPVDRTSGGGPLKIIEC

SEQ ID NO: 1874 - protein, 463 aa, Listeria monocytogenes EGD-e
MTKVNSFFRKKSFHNPATDKHHLNKSLGAFDLTMLGVGAVVGGGIFILPGQVASVIAGPGIIISFIIAGIACCLAALCYSEFASKLPVAGSAYTYSYHVFGEGVAWILGWSLILEYGLAVAAIASGWSSYMKSLLAGFDLHIPTAISSAYDPSAGTYFDLLAFVVVMVIGILLSFGIRESTRVNNIMVLVKIAVVVLFILVGAFYVKPDNWTPFLPFGVQGVITGASTVFFAYIGFDAVSSAAEEVKNPQKNMPIGIISSLAVCTLLYILLSAVLTGVVPYTDLVDVSAPVAFALQAINQNWIAGLLSVGAIVGMTTVVLVMSYGGTRLLFAMGRDGLLPKSFSKISKNDTPVRNTMIFATVMGLIASTVPMADLAQLINIGTLFAFAMVSIGIFFLRRNPDLNQKGFKTPFYPVVPALSFLLCVYLMINLSKTTWIAFGIWFVIGILVYTFYGRKHSALRIK

SEQ ID NO: 1875 - protein, 351 aa, Arabidopsis thaliana
MTNAEAVTVTNKQIIFPDYVTGFPKESDLKITTTTIDLRLPEGSTSVLVKNLYLSCDPYMRICMGKPDPLSSSLVPPYKTGVPIIGLGVSKVIDSGHPDYKKGDLLWGLVGWEEYSVITLTTYSHFKIEHTDVPLSYYTGLLGMPGMTAYAGFYEVCSPKKGETVFVSAASGAVGQLVGQFAKLMGCYVVGSAGSKEKVYLLKTKFGFDDAFNYKEEKDFSAALKRYFPEGIDIYFENVGGKMLDAVLINMKLHGRVAVCGMISQYNLVDPEGVHNLPTILYKRIQLQGFGVCDFYDKYPKFLDFVLPYIREGKITYVEDIAEGFESGPSALLGLFEGKNVGKQLFVVARE

SEQ ID NO: 1876 - protein, 174 aa, Zea mays
MDMAEEAAAGAGGSWSSSEKPVMVVGIDDSDHSYYALNWTLQHFFVAGQPQQYQLVVLTAKPPASSVIGIAGVGSAELLPKVETDLKRSVARVMDKAKKLCTETEVTDVGYEAIEGDARSVICDAVERHHAEILVVGCHAYSKWKRAVLGSVSDYCTHHAHCTVMIVKRPKHKH

SEQ ID NO: 1877 - protein, 363 aa, Nostoc punctiforme
MESLSKASYRIVAIPGEGIGPEVVEASLKILQHVAKIQGFTLQVDYGWLGATAFEQLGSYFPQATTELCDGADGIVFGAVSQGGLLELRKHFDFFCNLRPIRSVNSLLHKSSLRPEKIQGLDILIVRELVSGIYFGPSGRSSDERGNYGYHTMRYYDEEIRRIARKALEQAQYRRGLLTVAHKENALPHLHWTRLVQEEATKFPNVIVEPMLVDNLAMQMVLNPQRFDVILASNLFGDILSDIGGALVGSIGLLGSASLNANGFGLYEAIHGTAPDIAGLGIANPLGTLGACVLMLQQWGEVQAAQQIIAAQDRILAKGYRTADLFTQGEEILVNTATLVDLLLEELSVVQHSQLGVLHESRK

SEQ ID NO: 1878 - protein, 335 aa, Escherichia coli CFT073
MNILVTGGAGYIGSHTAIELLNAGHEIIVLDNFSNASYKCIEKIKEITRRDFITITGDAGCRKTLSAIFEKHAIDIVIHFAGFKSVSESKSEPLKYYQNNVGVTITLLQVMEEYRIKKFIFSSSATVYGEPEIIPIPETAKIGGTTNPYGTSKYFVEKILEDVSSTGKLDIICLRYFNPVGAHSSGKIGEAPSGIPNNLVPYLLDVASGKRDKLFIYGNDYPTNDGTGVRDFIHVVDLAKGHLAAMNYLSINSGYNIFNLGTGKGYSVLELITTFEKLTNIKVNKSFIERRAGDVASCWADADKANSLLDWQAEQTLEQMLLDSWRWKKNYPDGF

SEQ ID NO: 1879 - protein, 394 aa, Ehrharta erecta
EPARTEDPALSIAGAVQSQKLAVRAISRLQALPGGDVKLLCDTVVEHVRELTGYDRVMVYRFHEDEHGEVVAESRRNDLEPYLGLHYPATDIPQASRFLFRQNRVRMIADCHAAPVRVIQDPGLPQQLCLVGSTLRSPHGCHAQYMANMGSIASLVMAVIISSAGDDENNMARGGIPSAMKLWGLVVCHHTSPRCIPFPLRYACEFLMQAFGLQLNMELQLAHQLSEKHILRTQTLLCDMLLRDSPTGIVTQSPSIMDLVKCDGAALYYHGKYYPLGVTPTESQIKDIIEWLTVCHGDSTGLSTDSLADAGYPGSAALGDAVSGMAVAYITPSDYLFWFRSHTAKEIKWGGAKHHPEDKDDGQRMHPRSSFKAFLEVVKSRSLPWENAEMDAIH

SEQ ID NO: 1880 - protein, 407 aa, Triticum monococcum
MAAVAMADGGGKKPYVVAVAIQAINTGTFVVSKAAFDSGMYTYIFVFYRLAAATALLVPIALINCACRRSQSTTSTPAQAMSCRLLFKLFLCAFLGSAGLTLQALTKFVKKSCQEVGGFTSLLSSSLLQGKAEHLHPQVYHASLKQTSATVASAATNSMPVVTFLLALVLRMETIKLRRRSGLGKLAGVALCLAGVLVIAFYVGPSIRPLAHHPVFAHKTQSVGNGAWIRGTFLLILSCTTWSLWITLQVPLLIEYPNKLMATAMQCLFSALQSFVVAVVVEKDFTKWKLGLDIGLLAAFLGTGALMYLQAWCAEMSGPVFVVMWSPLAFIFTIFSSSFFLGEVVHLGSILGGILLVGGLYSVLWGKSNERKNMILPVMPEKSQGQGDGDGATTQEKHGETNLTSQV

SEQ ID NO: 1881 - protein, 313 aa, Neisseria lactamica
MTKHIAILRGDGIGPEIVAETVRVLDKLIEQGLDAGYEYAPLGGEAYDEYGHPYPEFTQNLCRKADAVLLGAVGSPQYDNLDRPLRPERGLLAIRKDLNLFANLRPAVLYPELANASTLKPEIVAGLDILIVRELTGDIYFGEPRGIRVLENGEREGYNTMKYSESEIRRIAHVAFQSAQKRSKKVCSVGKANVLETTELWREIFEEIGKEYPDVELSHMYVDNAAMQLVRAPKQFDVIATGNIFGDILSDEASMLTGSLGMLPSASLDENGKGLYEPSHGSAPDIAGQNKANPLATILSLAMLLRYSLNDEA

SEQ ID NO: 1882 - protein, 347 aa, Agrobacterium tumefaciens str. C58 (U. Washington)
MKTHRIALIPGDGIGQSVTDAAWQVLNAVAKTSGFVLEGTEFPWSCAFYKETGAMMPKDGIETLRGFDAIMLGAVGWPAEVPDSVSLHGLLLPIRKAFVQYANIRPHRLLSGVQGPLKADGFDILCIRENTEGEYSGAGGRVHQGTEDEVAVETSIFTRKGVERILRFGFEQAQKRRGKLASITKSNAQKYSMVFWDEVTHKLAAEYPDVEVSSYHIDAMAARMVMAPESLDVVVASNLFGDILTDLGAAIQGGLGFAASANINPDRSAPSMFEPVHGSAPDIAHLGIANPIAAIWSGAMMFEHLGEKDAAAKIMAALETATGRGIGTVPGKDKTDTITAAVLAALA

SEQ ID NO: 1883 - protein, 140 aa, Zea mays
MQSNSMKREISEAHDTIRFGINAGVKADLAPPHPLQSTIQSETKFWADKKKFGTDAIYGSALNIRKDLDAQILSRFQRPPGALPSSLLGYEALTGSLDDFGFEDYLNMPHDSDSFRQPDMHHGMEVRLGLSKGPICPSFN

SEQ ID NO: 1884 - protein, 235 aa, Triticum aestivum
MASLDAVRGDLALLILYLNKAEARDKICRAIQYGSKFISNGEPGPAQNVDKSTSLARKVFRLCKFVNDLHALISPPAKGTPLPLILLGKSKNAMLSTFLFLDQIVWAGRTGIYKNKERAEFLGRIAFYCFLGSNTFTAIIELAELQRLSTSMKKLEKELKHQELYKNEQYRMKLHKSNERLLALVKSSLDIVVAVGLLQLAPKKVTPRVTGAFGFASSLIACYQLLPSPPAKQSK

SEQ ID NO: 1885 - protein, 154 aa, Haemophilus somnus 2336
MEVIIHPQSIIHSMVRYIDGSVIAQMGNPDMRTPIAETMAYPHRTFAGVEPLDFYQLSGLTFLKPDYQRYPCLKLAIEAFSAGQYATTALNAANEMAVEAFLNKRIKFTDIAKINTAVLEKIESQVITSIEDVLLVDKQARELANSFVLRTSGT

SEQ ID NO: 1886 - protein, 1518 aa, Saccharomyces cerevisiae
MTGHVSKTSHVPKGRPSSLAKKAAKRAMAKVNSNPKRASGHLERVVQSVNDATKRLSQPDSTVSVATKSSKRKSRDTVGPWKLGKTLGKGSSGRVRLAKNMETGQLAAIKIVPKKKAFVHCSNNGTVPNSYSSSMVTSNVSSPSIASREHSNHSQTNPYGIEREIVIMKLISHTNVMALFEVWENKSELYLVLEYVDGGELFDYLVSKGKLPEREAIHYFKQIVEGVSYCHSFNICHRDLKPENLLLDKKNRRIKIADFGMAALELPNKLLKTSCGSPHYASPEIVMGRPYHGGPSDVWSCGIVLFALLTGHLPFNDDNIKKLLLKVQSGKYQMPSNLSSEARDLISKILVIDPEKRITTQEILKHPLIKKYDDLPVNKVLRKMRKDNMARGKSNSDLHLLNNVSPSIVTLHSKGEIDESILRSLQILWHGVSRELITAKLLQKPMSEEKLFYSLLLQYKQRHSISLSSSSENKKSATESSVNEPRIEYASKTANNTGLRSENNDVKTLHSLEIHSEDTSTVNQNNAITGVNTEINAPVLAQKSQFSINTLSQPESDKAEAEAVTLPPAIPIFNASSSRIFRNSYTSISSRSRRSLRLSNSRLSLSASTSRETVHDNEMPLPQLPKSPSRYSLSRRAIHASPSTKSIHKSLSRKNIAATVAARRTLQNSASKRSLYSLQSISKRSLNLNDLLVFDDPLPSKKPASENVNKSEPHSLESDSDFEILCDQILFGNALDRILEEEEDNEKERDTQRQRQNDTKSSADTFTISGVSTNKENEGPEYPTKIEKNQFNMSYKPSENMSGLSSFPIFEKENTLSSSYLEEQKPKRAALSDITNSFNKMNKQEGMRIEKKIQREQLQKKNDRPSPLKPIQHQELRVNSLPNDQGKPSLSLDPRRNISQPVNSKVESLLQGLKFKKEPASHWTHERGSLFMSEHVEDEKPVKASDVSIESSYVPLTTVATSSRDPSVLAESSTIQKPMLSLPSSFLNTSMTFKNLSQILADDGDDKHLSVPQNQSRSVAMSHPLRKQSAKISLTPRSNLNANLSVKRNQGSPGSYLSNDLDGISDMTFAMEIPTNTFTAQAIQLMNNDTDNNKINTSPKASSFTKEKVIKSAAYISKEKEPDNSDTNYIPDYTIPNTYDEKAINIFEDAPSDEGSLNTSSSESDSRASVHRKAVSIDTMATTNVLTPATNVRVSLYWNNNSSGIPRETTEEILSKLRLSPENPSNTHMQKRFSSTRGSRDSNALGISQSLQSMFKDLEEDQDGHTSQADILESSMSYSKRRPSEESVNPKQRVTMLFDEEEEESKKVGGGKIKEEHTKLDNKISEESSQLVLPVVEKKENANNTENNYSKIPKPSTIKVTKDTAMESNTQTHTKKPILKSVQNVEVEEAPSSDKKNWFVKLFQNFSSHNNATKASKNHVTNISFDDAHMLTLNEFNKNSIDYQLKNLDHKFGRKVVEYDCKFVKGNFKFKIKITSTPNASSVITVKKRSKHSNTSSNKAFEKFNDDVERVIRNAGRS

SEQ ID NO: 1887 - protein, 138 aa, Triticum aestivum
MQYNNLGRSGLRVSQLSYGAWVTFGNQLDVKEAKSLLQACRDAGVNFFDNAEVYANGRAEEIMGQAIRDLGWRRADVVISTKLFWGGQGPNDKGLSRKHVVEGLKASLKRLDMEYVDVVYCHRPDATTPIEETVRAMN

SEQ ID NO: 1888 - protein, 157 aa, Zea mays; identical to SEQ ID NO: 642

SEQ ID NO: 1889 - protein, 138 aa, Clostridium perfringens
HLIPLILQVALGKRDKIMMFGDDYNTKDGTCVRNYIHVSNLASAHSLALERLMNGGESRIYNLGNGTGFTVKEVVEVARKVTGHPIPAEVAPRRAGDPAILIASSDKAIEELNWKPKFNSLETIIETAWNWHKNHPNG

SEQ ID NO: 1890 - protein, 74 aa, Triticum aestivum
TESMVRTKPGMASVRVIPVLQTGPPPGGFARVRYARGIPSKGPSAIALFLAGFGAFSWGMWQVGQGSKLFRALT

SEQ ID NO: 1891 - protein, 363 aa, Buchnera aphidicola (Uroleucon helianthicola)
MKQKYRIAILPGDGIGPEVMREAYKILSILKDHFSLSLEIQEFNIGGSAIDQEGIALPKKTLLGCQNSDAILFGSVGGKRWDHLPINERPERASLLPLRKHFNLFANLRPAKLYSELQHLSPIRSNIIKNGFDILCVRELTGGIYFGKPSDRVKKNNVEYAFDTEVYYDYEINRIAHLAFQLARTRKFKVCSIDKSNVLNSSILWREVVEKVSKMYPDVHLSHLYIDNATMQIIKNPNQFDVLLCSNLFGDIISDECAVITGSIGMLPSASFNEKNFGLYEPAGGSAPDIAGKNTANPIAQILSLSMLVRYGMKLNKIADKIDDAVALSLKAGYRTADISNDNNFLKTNEMGDVIANFLINGK

SEQ ID NO: 1892 - protein, 426 aa, Rhodobacter sphaeroides
MHRCGSGHRHRAGTGLRSATGGPAARPLLPARTTEAQIVQAAAPAQERDRGSRSRRATVAASPAAAPSRAGLRHYIRPDSREKYMPQRSDINRRVVLAQRPKGTPDESTLRMEEVPISEPAEGQMLLRTVWLSLDPYMRGRMNDTKSYAKPVEIGGVMTGQVVAEVMQSSLPGFEAGDMVLAGSGWQDYALSDGTEVVNLGKAPERPSRALGILGMPGYTAYAGLLKIGEPQPGETVVVAAASGPVGATVGQIAKLKGCRAVGVAGGADKCRYVVETLGFDACIDHRAPDFEAQLAAACPNGIDIYFENVGGRVLYGVLPLLNPFARMPVCGIVSWYNSPGLPEGPDMAPALMGTILRMKVKLQGFIIFDSFPRSLYAEFAREMTGWLAEGKVKYREQVVEGLEAAPQALNDLLAGRNFGKMVVKL

SEQ ID NO: 1893 - protein, 249 aa, Agrobacterium tumefaciens str. C58 (U. Washington)
MSTHYDLDGRVAVVTGATGGFGVAISQRLRDCGATVIHWDLPAAVKDGALGDLPHAGVDISDAKSIETAAIDLKQRFGRLDILVNNAGIVGNVAPLWEIPIEEFRRIIDINLFGSFLVCRALVPLMIETARTSRFGRIVNVASIQAKEGMHQAAAYSASKAGLVAMTKSLGKELATADILVNAITPAASMTAMSIDAPKERLDDILSRIPMRRFLEPAEVANMVAWLSSSECSFSTGAVFDLSGGRATY

SEQ ID NO: 1894 - protein, 63 aa, Pfiesteria piscicida
MRGILVDWLVEVHLKYKLKAETLYLTVNLIDRYLEVQQVVHGELQLVGVTAMLIASKYEEIYP

SEQ ID NO: 1895 - protein, 189 aa, Desulfitobacterium hafniense
MRHRGTKELETEGLILRRFELTDAEAMFKNWANDGEVTKYLTWPPHENVEVSLEVLKDWVSLYEDEKFYQWAIVLKENGSEPIGSISIVKMDDRIDMVHVGYCIGKRWWGKGVTSEALAELMRFFFAEVQVNRIESRHDPRNPNSGKVMKKCGLLYEGTLKQGDRCNQGICDCSMYGLVAEDYYANHQR

SEQ ID NO: 1896 - protein, 149 aa, Pleurotus ostreatus
MADQLSEEQISEFKEAFSLFDKDGDGTITTKELGTVMRSLGQNPTEAELQDMINEVDADGNGTIDFPEFLTMMARKMRDTDSEEEIKEAFKVFDKDGNGYISAAELRHVMTNLGEKLTDNEVDEMIREADVDGDGQINYEEFVKMMLSK

SEQ ID NO: 1897 - protein, 474 aa, Oryza sativa (japonica cultivar-group)
MAAAVRDGAAVAGYMAEDDPDGAASEDGDMDVEVGGEESQARDGDRRDGGDGDDEYALNFPQSGELMDKICKQVDKISKYYEFHYNTRLVKPSILHFQLRNLLWATSKHDVYFMSNSTVGHWSSLSHNLSEVLDFSGHVAPAQKHPGSLLEGFSGVQVSTLSVNEGLLVAGGFQGELICKVVGDRDVKFCTRTTLSDNAITNAIDIHRSASGSLRVTVSNNDCGVREFDMETFQLLNHFSYNWPVNHTSVSPDRKLLAVVGDDRDALLVDSRNGKWRSHGGCRGGPDTYVTLIGAGIEGRQRHWAPVEADSGGRIRDGGKATQRRCRRRRCDGDWGSEERGAVGHLDYSFASAWHPDGRTFATGNQDKTCRVWDVRNLSTSLSVLRGNIGAIRCIRYSSDGQFMLFSEPADFVHVYSAAADYKKRQEIDFFGEISGISLSPDDESLFVGVCDRVYASLLHYRMVHSFGYLDSFM

SEQ ID NO: 1898 - protein, 570 aa, Emericella nidulans
MSPPSAKSMEEGRTPSVQYGYGDPKTLEGEIEEHTATKRGLSSRQLQLLAIGGCIGTGLFVGTSTVLTQTGPAPLLMSYIVMASIVWFVMNVLGEMTTYLPIRGVSVPYLIGRFTEPSIGFASGYNYWYSFAMLLACEVSTMALLSFLSCWNPDNVGHCLGLIIEYWNPPVSVGLWIAIVLVESEFWFAGLKILAIIGLIILGVVLFFGGGPNHERLGFRYWQDPGAFNPYLVPGDTGKFLGFWTALIKSGFSFIFSPELITTAAGEVEAPRRNIPKATKRFIYRVFTFYILGSLVIGVTVAYNDPTLEAGVESGGSGAGASPFVVAIKTLVLEGSTMSSMLPSGSLPGHPVTHGCYAGSEKLYSLAGEGQAPKIFTRTNRTGVPYVAVLATWTIGLLSFLNLSSSGQTVFYWFTNITTVGGFINWVLIGIAYLVCFPPSLHLNTPDQKQRFRKALQFHGMLDMLPFKTPLQPYGTYYVMFIISILTLTNGYAVFFPGRFTASDFLVSYIVFAIFLALYAGHKIWYRTPWLTKVSEVDIFTGKDEIDRLCENDMERQPRNWLERVWWWIF

SEQ ID NO: 1899 - protein, 297 aa, Rhizobium sp. CIAM0128
RGKTQIKEFAEFPTLEQLPLWGFDGSSTMQAEGHSSDCVLKPVAVYPDPARTNGVLVMCEVMMPDGVTPHASNKRATILDDEGAWFGFEQEYFFYKDGRPLGFPESGYPAPQGPYYTGVGYSNVGSVARQIVEEHLDLCLAAGINHEGINAEVAKGQWEFQIFGKGSKKAADQMWMARYLMQRLTEKYGIDIEYHCKPLGDTDWNGSGMHANFSTAYMREVGGKAYFEALMAAFDKNLMDHIAVYGPDNDKRLTGKHETAPWNRFSYGIADRGASIRVPHSFIKSDYKGYLEDRRPN

SEQ ID NO: 1900 - protein, 475 aa, Sinorhizobium meliloti
MTSTAQKLSLASLAALVVGSMVGAGIFSLPRTFGDATGPFGAIVAWCIAGAGIFTLAHVFRVLAERKSDLDAGVYAYANAGFGDYAGFLSVLGYWLVGCIADVSYWVLIKATLGAFFPIFGDGNTIAAVLVSSVALWGFHFMILRGIKEAAAINTVVTVAKIVPILIFIVILLGAFETDLFRSNFWGGADMPEASLFEQIRATMLVTVFVFIGVEGASVYSRYARKRSDVGVATTLGFVVVLGLMVLVTLLPYGALERPEIAAMRQPSMASVLESIVGPWGSVFVSAGLIVSVLGAYLAWSLICVEVLFCAAKNGDMPSVLARENSNSVPAAALWLSNGVIQLFLISTLFSEDAFRLMVNLTSAMVLIPYLLVAAYGFLVAKRGETYNIRPKERFRDLILAGAATVYTAFMIYAGGLKFLLLSAILYALGTALFFYARREQKKPLFSPREWLVFIAVVAGCLVGIYGLVTGSITI

SEQ ID NO: 1901 - protein, 429 aa, Caldococcus noboribetus
MVSHPCTADEAKPPSEGQLARFENGKLIVPDNLIVAYFKGDGIGPEIVESAKKVLDAAVDKAYGGTRRIVWWEVTAGEEAQKECGSLLPDGTLQAFKLARVNLKGPLTTPVGGGFRSLNVTLRMVLDLYSNVRPVKWYGQPTPHCHPENIDWVIFRENTEDVYAGIEWPFDSPEAQKIRDFLKKEFGIELTPDTGIGIKPISKWRTQRHVRRAMEWAIRNGYKHVTIMHKGNIMKYTEGAFRQWAYDLILSEFRDYVVTEEEVNTKYGGKAPEGKIIVNDRIADNMLQQIITRPGEYNVIVTPNLNGDYISDEANALVGGIGMAAGLDMGDGIAVAEPVHGSAPKYAGKNVINPTAEILSGMYLLSDFVGWPEVKLLVEYAVKQAIAHKQVTYDLAREMGGVTPISTTEYTDVLVDYIRHADLKALKGQ

SEQ ID NO: 1902 - protein, 341 aa, x Citrofortunella mitis
MSDLKSRFIDVYGVLKQELLYDPAFEFDHDSRQWVDRMLDYNVPGGKLNRGLSVVDSYRLLKEGKTTDDEFFLSSALGWCIEWLQAYFLVLDDIMDGSHTRRGQPCWFRVPKVGMIAANDGVLLRNHISRILKNHFRDKPYYVDLLDLFNEVEFQTASGQMIDLITTIEGEKDLSKYSLPLHRRIVQYKTAYYSFYLPVACALLMAGENLDKHVEVKDILVQMGIYFQVQDDFLDCFGSPEVIGKVGTDIEDYKCSWLVVKALELCNEEQKNVVHENYGKVDPACVAKVKELYKTLDLEGAFVEYEKESYEKLTKSIEAHPTKEVQAVLKSFLAKIYKRQK

SEQ ID NO: 1903 - protein, 329 aa, Halobacterium sp. NRC-1
MDTALVIGGTRFIGRHLVAELLAHDYDVTTFNRGTHDNPFADDDRVARVEGDRTERRALLDAKRTVDPDAVFDCVAYKPRDVESATDIFGDVDAYVYVSSGAAYAAEEVPKREGETRLESCSAEEATDDSSATYGARKAAGDRIVFEAAARGVPAMAVRPPVVYGPHDYTERLAYWVERVAERDEIVVPGDGTNLWQRVYVEDVARGLRLVAEDGEPGEAYNVGDRNAVTLDGMLDLIADALDTSVERSYTSPRELSIVDLGPGEFPLYRDAPHVLDTTKIAELGYESTPPAEAMQRTVDAHREHGRTGDDNGPDRETEDRLLDVLDTV

SEQ ID NO: 1904 - protein, 256 aa, Brevibacterium sp. HCU
MNRLGGKVAVITGGAAGMGRIQSELYASEGAQVAVVDVNEQEGRATADAIRASGGVANYWKLDVSDESEVEIVVSDIAKRFGAINVLVNNAGVTGADKPTHEIDERDLDLVLSVDVKGVFFMTKHCIPYFKQAGGGAIVNFASIYGLVGSQELTPYHAAKGAVVALTKQDAVTYGPSNIRVNAVAPGTILTPLVKELGSRGPDGLDGYTKLMGAKHPLGRVGTPEEVAAATLFLASEEASFITGAVLPVDGGYTAQ

SEQ ID NO: 1905 - protein, 311 aa, Bacillus coagulans
MDMLSAYSAVNQGHRHPKIIEALKNQADKVTLTSRAFHNELLGPWTKRMAKLTKKDKVLPMNTGVEAVETAIKAARRWAYQVKGVTENQAEIIAADGNFHGRTLNAISLSNDPDATKNYGPFVPGINKVSYGDINAIEKAITENTAAIILEPIQGEAGIIIPPEGYLKKVRELCSERNILFIADEVQTGFARTGKMFACEWENVEPDIYVMGKALGGGVFPISAIAANNEIMDVFTPGSHGSTFGGNPLACAVSMAAIDVIEEENLVNKSLESGKYFADKLRAINFEGIKEVRARGLFIGMEFHQPVRAIC

SEQ ID NO: 1906 - protein, 74 aa, Zea mays
  unsure (1)..(74): unsure at all Xaa locations
DLXAQILFLFLKPPRAFSGSLLGYEGLTTSPDDFGLXDYLNMPHDFYSFRQPHMHHGMKVVLRMFIGPICSSFY

SEQ ID NO: 1907 - protein, 180 aa, Zea mays
  unsure (1)..(180): unsure at all Xaa locations
MSMPETGQAAERDEQQQSRGIALMQGICAVVYRKADNTPCPIKQGLYLGSVGAAFNKDALKSLNITHILIVAKSLDPVFPAEFNYKKIEVLDIPDTDLLKHSDECFGFIDEAISSGGNVLVHCFAGRSRXKHQMSLESALSLVRSKRPQVAPNGGFISQLEKFQKSLQVEQERRMQPVQH

SEQ ID NO: 1908 - protein, 136 aa, Zea mays
  unsure (1)..(136): unsure at all Xaa locations
MNLALCISKYMLSETLDYWRKAKHHVVIFTCRIECISSNMRMKNVLPLPEYFNLVDTETTLKTIERXDEESRHLDERLIDVIVGHSFLLXHGDCTESFKEFDNDNICGTVYVLMXMFVVLTFGTQMPMDRDQVIPL

SEQ ID NO: 1909 - protein, 439 aa, Triticum aestivum
  unsure (1)..(439): unsure at all Xaa locations
MARLALSDCRGLTPLRARSRGGAIALPSPPHLAAGPRRPAAAAIHRDWALRVAAPTRLASVFEEDKRSLGGAEEAGSSSAGFNPGAPPPFGLAEIRAAIPKHCWVKDPWRSMSYVLRDVLVVLGLAAAAARVDSWLVWPLYWAAQGTMFWALFVLGHDCGHGSFSSNPKLNSVVGHILHSSILVPYNGWRISHRTHHQNHGHVEKDESWHPLPQRLYNSLDNMTKKLRFSMPFPMLAFPLYLFARSPGKEGSHFNPNSDLFQPNENKDVLTSTASWLAMIGVLAGLSFVMGPLKMLKLYAVPYVIFVMWLDFVTYLHHHGHEDKVPWYRGKEWSYLRGGLXTLDRDYGLINNIXHDIGTHVIXHLFPQIPHYNLVEATEAAKPVLGKYYKEPEKSAPLPFHLLQVLSRSLKEDHYVSDTGDIVYYQSESETSTSAQSSD

SEQ ID NO: 1910 - protein, 220 aa, Dendrobium sp. XMW-2002-10
MGRSACCEKAHTNKGAWTKEEDERLIAHIRTHGEGCWRSLPKAAGLLRCGKSCRLRWINYLRPDLKRGNFTDEEDELIIKLHSLLGNKWSLIAGRLPGRTDNEIKNYWNTHIRRKLLNRGIDPATHRPVSTATASNLTMSFSSGSSVKDKRTSSSSSSSRVGRISALLPRCPDLNLDLCISPSLEEQMPQDLLVEESNCGGEFLRLGSSFLLDYRSLEMK

SEQ ID NO: 1911 - protein, 299 aa, Nostoc punctiforme
MQRKKWLLRTGLALLIFIMVVAAKFMDKTHPISELYVFGDSLSDTGMVFRATGGMYPPNPTYFQGRYSNGRVWIEYLAESLHLSPKQTHNFAYGGATTANVGNSYVPSLLNQVQSFTQTHQQTNPDALYVLWAGANDYLQGVSSASIPVKNVTTAINSLTDVGAKKILVGNLPDLGQLPATRNSTNSVSLSALTQAHNQGLRRSLKVLGQQHSDLEIVQLDANALYRHAIAKPAAFNFTNVISPCLSGDRTCSNPDQFLFWDGIHPTAAAHRIIAETAFSTIQEAGMTNPLLSLSLEYN

SEQ ID NO: 1912 - protein, 392 aa, Stigmaphyllon paralias
DLEPVNPADVPVTAAGALKSYKLAAKAISRLQSLPSGNISLLCDVLVKEVRDLTGYDRVMVYKFHEDEHGEVVSECRRSDLESYLGLHYPATDIPQASRFLFMKNKVRMICDCLAPPVKVIQDERLPQPLSLCGSTLRSPHGCHAQYMTNMGTIASLVMSVTINEDDDTMDGDQQQMTRKLWGLVVCHHTSPRFVPFPLRYACEFLIQVFGVQINKEVELAAQIREKHILQIQTMLCDMLLRDAPVAIITQSPNVMDLVKCDGAALYFKNKTWLLGVTPTEEQIRDIAQWLLEYHSGNTGLSTDSLMEAGYPGASALRDAVCGMAAVSITSRDFLFWFRSHTAKEVKWGGAKHEPDDKDDLRKMHPRSSFKAFLEVVKWRSMPWEDVEMDAI

SEQ ID NO: 1913 - protein, 84 aa, Zea mays
  unsure (1)..(84): unsure at all Xaa locations
QNDQSANKHLXVKSIFSQFWNYNGAIVCPXCERNGVNSVDKYNGPFTGGSLSWLCIRKRQILCGTCTGPGLLGEFLSTCDELVQ

SEQ ID NO: 1914 - protein, 682 aa, Corynebacterium efficiens YS-314
MIWCRSFNEVTLVVPAGAGTETLWINEPIGPGEHTPGGSRGPHTPRAPMPRWIRGEPTTHGRREHEMTSASQPREFTVEAEYTIGENETCLTALIDQVKTRPYGVLFTRPANFEWVNVTAQEFLNEVFAVAKGIIATGVEQGDRVALLADTRYEWSVLDYAIWAAGAVSVPIYSSSSLSQVQWIIEDSGAVLAITETPDHTDLMKHLVLTEDGTPALKGSTSKLRRILEINSSALDTLRFEGRELSDDLVRERIEATRSADLASLVYTSGTTGRPKGCELTHHNWLAEVRALLTHPIGAIAVPGSRVLTFLPLAHVLARAVSLAFTIGGATQSHWSDFSTLALELQRARPNFILGVPRVFEKVRNSAATNAADGGPVKAALFARAEKAAIDYSRAQDTEEGPSRVLAAAHKVFDRLVYAKIRAAVGNSVQYAVTGGSAMSHDLLHFYRGIGIPIYEGYGLTETAAAAAIDFEDQKIGTVGKPLPGMTIRINDQGEILLKGQMLFRGYWNNPKATAESIVDGWFNTGDLGELLDSGHLVITGRKKDLIVTAGGKNVSPGPLEDIIRAHPLISQAMVVGDGKPFVGLLVTLDPDALKRWKLNRNIPESRTIEELATEPALRGEIQDAINNANATVSHSEAIKRFYILDRDLTEEDDELTPTLKVKRNVVYRRYADAIEHIYRGK

SEQ ID NO: 1915 - protein, 131 aa, Triticum aestivum
MKDLVSCFSEHAVRISDVACSGSAAANAAAAAAAGPADGGGRAAGISAVTTVYRSRLSAFGKDLLVDVTWARSPDGPALSVAVHDAGAPRHRAAAAAPRHLHRRKGSGTFTAGSCVVGVFWDYAAARYGAG

SEQ ID NO: 1916 - protein, 320 aa, Schizosaccharomyces pombe
MSEKQTIKALPAHNPTQVKKLGPVSGFLSGGLAACGAVTLTNPFEVIKTRFQLQGQLTKLDPSKRIYKSVGQAFSLIARHEGIRGLQRGLGTAYVYQICLNGCRLGFYEPIRRTLNTWFLDDPKGNKLAINVASGAGSGLCGALFGSPFFLVKTRMQSYSPKFPVGQQYGYKHIFNAFSRIIKENGVKGLFVGADAAILRTVSGSSVQLPIYNWAKRMIEHYNLLEEGMIKHLTASAVSGFGVCCTMQIFDTVMTRMYNQKNKELYKNPIDCILKTIRSEGFFALYKGFGAHLARIAPHTIFCLTFVEQTNKLFLKFQKD

SEQ ID NO: 1917 - protein, 222 aa, Zea mays
MAAAAEVVLLDFWVSPFGQRCRIALAEKGVAYEYREQDLLDKGELLLRSNPIHKKIPVLLHAGRPVCESLVILQYIDEAWPDVAPLLPKDDPYARAQARFWADYIDKKIYDSQTRLWKFEGEAREQAKKDLVEVLETLEGELADKPFFGGGALGFVDVALVPFTSWFLAYEKLGGFSIQEHCPRIVAWAARCRERESVAKAMSDPAKVLEFVQFLQSKFGAK

SEQ ID NO: 1918 - protein, 159 aa, Cyanophora paradoxa
MCTFCPIPTEQQPLNEYQILNNSVLFNWPSQKLKIYFFYLFTIYSIGFLLTFLITFYNDLFIVHPVNIFVHGIIGGNFVLILDLLRLYLGWSYICQRLLSATVSYEESGWYDGQIWVKSSEVLIQDRLIGIYQVRPVLNRLKQTLGVVILILGFTLLIQ

SEQ ID NO: 1919 - protein, 284 aa, Streptococcus mutans UA159
MVYDIIKASLQGRINWLDTAEYYGHGNSEKFIGSILKLLAKEGSLTETIYIADKWFPLLRSAKTIAQTFSGRLSNLQRPFIDLYQIHHPTSISSLKKQAEELANLQEKGLIKAIGVSNFSAHQMVKMDELLKSFGLRLDSNQVKYNLLHRKPERNGVLDVAKERGISLIAYSPLQQGVLTGRFHAESDSIKKISMLRRLNSELSSRSLKKTQPLIELLQKLADKYHKTPAQISLNWLIHAHVSTIFAIPGASSLKQAQSNLEAQNFKLTKTDLQKLSVDSEKLN

SEQ ID NO: 1920 - protein, 228 aa, Oryza sativa (japonica cultivar-group)
MADEVVLLDLWVSPFGQRCRIALAEKGVEYEYSEQSLADKSDLLLRSNPVHKKVPVLLHAGRPVCESLVILEYIDETWPPEPEKKKESPRLLPSDPYARARARFWADYVDKKLFDCQTRLWKLRAGDAAHEQAKRDMAEALGTLEAELGEGDYFGGEAFGYLDVVLVPFVAWFHAYERLAGFAVAEICPRLVAWGERCKGRDSVAKTLTDPEKVYEFALYLKAKFGAK

SEQ ID NO: 1921 - protein, 152 aa, Zea mays; identical to SEQ ID NO: 1713

SEQ ID NO: 1922 - protein, 259 aa, Oryza sativa
MDYCKQQERDGHRDDGDVTEWKKVAELRAVVEAQDPACKEEDDYQLRRFLRARDHNIGKASAMLVKYLQWKREVKPGGRAIADEEVRGELAQEKLYMQGYDRQGRPLVYGFGARHFPARRDLDEFKRYVVYVLDRTCARLDGGQEKFAAVADLQGWGYYGNCDIRAYVAALEIMQNYYPERLGRVFLIHVPYVFMAAWKIIYPFIDDNTKKKFVFVADKDLHATLRDAIDDSNLAEDYGGKLKLVSPLINGATESNRRR

SEQ ID NO: 1923 - protein, 354 aa, Oryza sativa (japonica cultivar-group)
MVSALLRTILVTGGAGYIGSHTVLQLLQLGFRVVVLDNLDNASELAILRVRELAGHNANNLDFRKVDLRDKQALDQIFSSQRFEAVIHFAGLKAVGESVQKPLLYYDNNLIGTITLLQVMAAHGCTKLVFSSSATVYGWPKEVPCTEESPLCAMNPYGRTKLVIEDMCRDLHASDPNWKIILLRYFNPVGAHPSGYIGEDPCGIPNNLMPFVQQVAVGRRPALTVYGTDYNTKDGTGVRDYIHVVDLADGHIAALRKLYEDSDRIGCEVYNLGTGKGTSVLEMVAAFEKASGKKIPLVFAGRRPGDAEIVYAQTAKAEKELKWKAKYGVEEMCRDLWNWASKNPYGYGSPDSSN

SEQ ID NO: 1924 - protein, 145 aa, Zea mays
MFLKKANLAVCKTPPTAVAARQPASERSPLHPFAALKDEMDTSSPAALVNAQMLNMFVGRRVRTVVQVQHNEGGVLVGQSTDGHQLCVKSAMDVPVSHFMEVYGIAENSQTIRAEVCTDFGPNFDPKVFDELCKLASGRFKHLFL

SEQ ID NO: 1925 - protein, 140 aa, Zea mays
MASGSMKREISETHDTLRFGLNAGVKADLAPPHPLQSTIQSEAKFWADKKKFGTEAIYGSALNIRKDLDAQILSRFQRPPGALPSSLLGYEALTGSLDDFGFEDYLNMPQDSDSFRQPDMHHGMEVRLGLSKGPICPSFN

SEQ ID NO: 1926 - protein, 542 aa, Nicotiana tabacum
MEKDTKQVDIIFRSKLPDIYIPNHLPLHSYCFENISEFSSRPCLINGANKQIYTYADVELNSRKVAAGLHKQGIQPKDTIMILLPNSPEFVFAFIGASYLGAISTMANPLFTPAEVVKQAKASSAKIIVTQACHVNKVKDYAFENDVKIICIDSAPEGCLHFSVLTQANEHDIPEVEIQPDDVVALPYSSGTTGLPKGVMLTHKGLVTSVAQQVDGENPNLYIHSEDVMLCVLPLFHIYSLNSVLLCGLRVGAAILIMQKFDIVSFLELIQRYKVTIGPFVPPIVLAIAKSPMVDDYDLSSVRTVMSGAAPLGKELEDTVRAKFPNAKLGQGYGMTEAGPVLAMCLAFAKEPFEIKSGACGTVVRNAEMKIVDPKTGNSLPRNQSGEICIRGDQIMKGYLNDPEATARTIDKEGWLYTGDIGYIDDDDELFIVDRLKELIKYKGFQVAPAELEALLLNHPNISDAAVVPMKDEQAGEVPVAFVVRSNGSTITEDEVKDFISKQVIFYKRIKRVFFVDAIPKSPSGKILRKDLRAKLAAGLPN

SEQ ID NO: 1927 - protein, 214 aa, Elaeis guineensis
MVRGKTEMKLIENATSRQVTFSKRRNGLLKKAFELSVLCDAEVAVIVFSPRGKLYEFSSTSMEKTIDRYRRHAKSGINNNEVTQQWKFEAASMSRKIESLEVSKRKLLGENLESCSAEELHEIEGKIEQSLCHVRGKKNQLLEEQIATLKEQEQTLMEENALLREKCKLQSQLRPAAAPEETVPCSQDGENMEVETELYIGWPGRGRTNCRSQG

SEQ ID NO: 1928 - protein, 392 aa, Hiraea fagifolia
DLEPVNPADVPVTAAGALKSYKLAVKAISRLQSLPSGNISLLCDVLVKEVRDLTGYDRVMVYKFHEDEHGEVVSECRRPDLESYLGLHYPATDIPQASRFLFMKNKVRMICDCLAPPVKVIQDKRLPQPLSLCGSTLRSPHGCHAQYMTNMRTIASLVMSVAINEDDDTMDGDQQQMTRKLWGLVVCHHASPRFVPFPLRYACEFLIQVFGVQINKEVELAAQVREKHILQIQTMLCDMLLRDAPVAIITQSPNVMDLVKCDGAALYFKNKIWLLGVTPKEEQIRDIAEWLLEYHSGNTGLSTDSLMEAGYPGASVLGDAVCGMAAVSITSRDFLFWFRSHTAKEIKWGGAKHDPGDKDDGRKMHPRSSFKAFLEVVKWRSMPWEDVEMDAI

SEQ ID NO: 1929 - protein, 344 aa, Cicer arietinum
GFREFKDDSDFDEDEEDDDDDEGLLVGGKGFTFSSNNTKSFKTFSRGSTAAKSVSPKSNEQAEKACKRKRKNQYRGIRQRPWGKWAAEIRDPRKGVRVWLGTFNTAEEAARAYDAEARRIRGKKAKVNFPEEAPVTSSKRFKPNLENKLVNKNLNSFNPNGNKMFNFGENVENYYSPMDQVEQKPLVNNNNQYANMGPFSGNGVQHSQISPSADVTAYFSSEHSSNSFDYSDLGWGEQGPKTPEISSMLSAAAPLESESQYVQNNMQSNNNQNMLPVEDNSAKTLSEELADIESQLKFFETPYDDNWGDASLASFLGGDATQDGGNPMNLWSFDDLPSISGGVF

SEQ ID NO: 1930 - protein, 266 aa, Escherichia coli
MNIAIIGAGPAGIISARNAIKAGHSVVLFEKNTRIGGIWNPWSGGAYRNACMQNSRYTFHYTGFPPGDIDEFPGVEQVFRYLSAVAGEDALRESIRLNTEVVSLRKDAGHRVIRCASEGKDTEDIFDRVIIATGELWQPRRPPLPGEENFSGTLITSRDYQEPEAFKGKNILIIGGGVSGADIASDLVPFARSVSLSVKKMGLYLPRQFPTGPNDMMHSYLGRCLLSQMNYEDFIGYLDTMMPDYMQAYRASSLLPDMANNNAVHV

SEQ ID NO: 1931 - protein, 199 aa, Zea mays
MGGEKENLDLSDLNTSLPAAAAALSAEDRVGLVNALKDKLQSLAGQHADVLESLSPNVRTRVEFLRGIQSQHDEIETKFFEERAALEAKYQKLYEPLYAKRYDIVNGVVEVDGVAKEPTTENAAEGGDSDAKGVPDFWLTALKTNDVLTEEIQERDEPVLKYLKDIKWSRIDDPKGFKLEFFFDTNPFFKNSVLTNPII

SEQ ID NO: 1932 - protein, 475 aa, Lycopersicon esculentum
MALNLLSPAEIKSISFLDNSKSSYNLSHLKFTGGLSIRRKECSGAFAKRVQCSAQLPPPPAWPGRAVAEPGRQSWDGPKPISIVGSTGSIGTQTLDIVAENPDKFRVVALAAGSNVTLLADQVKTFRPKLVAVRNESLVEELKDALADMEDKPEIIPGEQGVIEVARHPDAVTVVTGIVGCAGLKPTVAAIEAGKDIALANKETLIAGGPFVLPPAHKHKVKILPADSEHSAIFQCIQGLPEGALRRIILTASGGAFRDWPVEKLKEVKVADALKHPNWNMGKKITVDSATLFNKGLEVIEAHYLFGAEYDNIEIVIHPQSIIHSMVETQDSSVLAQLGWPDMRLPILYTLSWPDRVYCSEITWPRLDLCKLGSLTFKAPDNVKYPSMDLAYSAGRAGGTMTGVLSAANEKAVELFISERISYLDIFKIVELTCAKHREELVSSPSLEEIIHYDLWARDYAASLEPSSGLSPALV

SEQ ID NO: 1933 - protein, 56 aa, Glycine max
  unsure (1)..(56): unsure at all Xaa locations
TNILFDLNTLVECSSYMPLSGFHGVVSGFLVGIKQIIPDQELPFIKIKXKWLPSIT

SEQ ID NO: 1934 - protein, 304 aa, Glycine max
  unsure (1)..(304): unsure at all Xaa locations
MEYRRTSGRQETGGRDRRQSKREQAYQDSLIEDLSQDFRLPINHRPTENVDLDNVEQASLDTQITSSNIGFKLLQKMGWKGKGLGKDEQGIIEPIKSGIRDPRLGIGKQEEDDFFTAEENIQRKKLDVELEETEEHVKKREVLAEREQKIQTEVQEIRKVFYCDLCNKQYKLAMEFEAHLSSYDHNHRKRXKQMKEMHGGSSPDDRAKREQLRAEREMAKFAPIADAPKQHQLQLQQESGSATVPSESKTATALTDQEQRNTLKFGFSSKGSASKITFGAKKQNVAKKQNVPISSIFSNDSDEE

SEQ ID NO: 1935 - protein, 359 aa, Pneumocystis carinii
MHGKDAAKERGLLSSFRRIKKPKTERLDSYFGFWGDKCTSEKKNDVHPPERFKFYATLTRHYYSLVTDFYEYGWSISFHFCRLCKNESFSQAIARHEHYIALHAGIREGETVLDVGCGVGGPDCQISVFTGANIVGLNNNDYQIQRAKYYSEKKGLSDKLKFIKGDFMQMPFPENSFDKIYSIEATIHAPSLEGVYSEIYRVLKPGGLYASYEWVMLTEYDENDPEHQQIVYGIEIGDSIPKISKIGEAEAALIKVGFEIIHSEELSTKNSPLPWYYYLDGYLKRVRSFRDFISIARMTTIGKWLISSFIGLMEFIGLLPKGSKKVNDILLVAADSLVKAGKKEIFTPMQLWVCRKPLV

SEQ ID NO: 1936 - protein, 347 aa, Haemophilus somnus 129PT
MKAIVLESNRNMAICDIPKPLVEDPDDVLVKVHYSGLCGSDIPRIFHHGTHFYPIVLGHEFSATVEEVGSDVTELDKGDLVSCAPLQPCFKCDECNRGFYSLCKNYNFIGSRRFGANSEYLCVKKSNLVKLPQGSDTLQASFIEPITVGLHAIHLAGGCKGKNVVIVGAGTIGLLAAQSTKALGANSVSVIDINQEKLVLAKTLGADYVFNSMDLKADEILACLDGNRFDQLILETAGVPKTVELSIQIAGPRAQVVLVGTLHHDLNLDQKEFGLILRKELIIFGSWMNYSKPWPGVEWREAVNLIAENKICFEPLISSINTIEDYVEEVKSLDGKPMNGKLVLKFD

SEQ ID NO: 1937 - protein, 214 aa, Paeonia cambessedesii
IVESVGEGVTDVKPGDHVLPIFTGECKECRHCKSEESNMCDLLRINTDRGVMLNDGKSRFSINGQPIFHFVGTSTFSEYTVLHVGCLAKINPEAPLDKVCVLSCGISTGLGATLNVAKPKKGSTVAIFGLGAVGLAAAEGARIAGASRIIGVDLNPKRFDEARKFGVTEFVNPKNYNKPVQEVIAEMTGGGVDRSVECTGSIMAMMSAFGCIHD

SEQ ID NO: 1938 - protein, 1124 aa, Pisum sativum
MSTTRPSQSSNNSGRSRNSARIIAQTTVDAKLHATFEESGSSFDYSSSVRVSGSVDGDQQPRSNKVTTAYLNHIQRGKQIQPFGCLLALDEKTCKVVAYSENAPEMLTMVSHAVPSVGDHPALGIGTDIRTVFTAPSASALQKALGFAEVSLLNPILVHCKTSGKPFYAIIHRVTGSLIIDFEPVKPYEVPMTAAGALQSYKLAAKAITRLQSLASGSMERLCDTMVQEVFELTGYDRVMAYKFHEDDHGEVIAEIAKPGLEPYLGLHYPATDIPQAARFLFMKNKVRMIVDCNAKHVKVLQDEKLPFDLTLCGSTLRAPHSCHLQYMANMDSIASLVMAVVVNDSDEDGDSADAVLPQKKKRLWGLVVCHNTTPRFVPFPLRYACEFLAQVFAIHVNKEIELEYQILEKNILRTQTLLCDMLMRDAPLGIVSQSPNIMDLVKCDGAALFYRNKLWLLGATPTESQLREIALWMSEYHTDSTGLSTDSLSDAGFPGALSLSDTVCGMAAVRITSKDIVFWFRSHTAAEIRWGGAKHEPGDQDDGRKMHPRSSFKAFLEVVKARSVPWKDFEMDAIHSLQLILRNASKDTDIIDLNTKAINTRLNDLKIEGMQELEAVTSEMVRLIETATVPILAVDVDGTVNGWNIKIAELTGLPVGEAIGKHLLTLVEDSSTDIVKKMLNLALQGEEEKNVQFEIKTHGDQVESGPISLIVNACASKDLRENVVGVCFVAQDITAQKTVMDKFTRIEGDYKAIVQNPNQLIPPIFGTDEFGWCCEWNAAMIKLTGWKREEVMDKMLLGEVFGTQMSCCRLKNQEAFVNFGIVLNKAMTGLETEKVPFGFFSRKGKYVECLLSVSKKIDAEGLVTGVFCFLQLASPELQQALHIQRLSEQTALKRLKVLTYMKRQIRNPLAGIVFSSKMLEGTDLETEQKRIVNTSSQCQRQLSKILDDSDLDGIIDGYLDLEMAEFTLHEVLVTSLSQVMNRSNTKGIRIANDVAEHIARETLYGDSLRLQQVLADFLLISINSTPNGGQVVIAASLTKEQLGKSVHLVNLELSITHGGSGVPEAALNQMFGNNVLESEEGISLHISRKLLKLMNGDVRYLKEAGKSSFILSVELAAAHKLKG

SEQ ID NO: 1939 - protein, 934 aa, Neurospora crassa
MSGEVGCSSLSSVSLQATTWLAVRLEFLKHRILKTSFFDLPSGFMKTQILLPTSALSARHRERRGHNSIREQKKAYERCPCLPRLGVLELTSEPAPAHQHPKQGNHGSRRPVQSQSFTAPIAHSCSGFRSAKGQARPHSPASQNARRLGPPVLRSATKDSRPYPPAVAMRDTNMRNGNRPQVSQGSHGTGALTDMPSGNSAVAGSSWPTIIPMSTIAGEEDGVINYQVENHQVVIGQPLNHFSESGSEYEDVEDEEHQHEDGQGEQEVEEHDDDNDGHESLFYGHHYLHTDQMLSHHPQPSFYLGLDGYLSDDVDMSDDAGAPLVDYLQVANLLTNDMDTDADHEDSISMTSSLSDEEQFSQYPPAPPAPFTPFTLDLVNQMLATTGQGWLPTTTASQVISGIINTVHPQVPPTTLLDTFHHPAHGPNPHSMTSLGPSNHCLTQLLYDWARSDHRGQGVHLPRGPYPWPSRIADLAAQKLSRIRYTDLAGDQCDFQGVNWEELGVTRQEARQHRLLTYRNYVNVSGSDRWDENCPDVSLPCTDSFFKFRRMDFKSNINLSHFQLRNILATTSRTKIFYPGSGAIHQFNPVSGKTRVVMKLGDAQGSHVSTMAAGHGVLIAGSFNGEYTLRHMDSDEPESSACHEGIITSNQSGITNHAQVYQDRNSDRPLAGFASNDAVFRVLDITTEKWLFHEVYNFPLNCTAVSPDRRLRVAVGDHKNVFITTTESTLGGGKPQILQELSGHRDHGFSCAWADDGWTVATGFQDKAIMIWDARRWTDSNGSSTPLCTIRAEMAGVRNLQFSPIGSGKRVLVAAEEADYINIIDAQTFRSKQTVDVFAEIGGVSFTNSGQDLAVLCYDPTRGGLLQLERCGMSQMMTGDFDERGLDDRYYRRHMGGSGDSDWLQSSFTEEKRIKDSVVWRSQRRAALADLGPF

SEQ ID NO: 1940 - protein, 381 aa, Zea mays
LGALHWWCARPSSVVTHSLPHIPFPPTAPLAARNNMSNRATHWCYACQRPIRLRGQDIICPNCSDGFIQEISEMGGVLNTYGLTEPDFEERQARRFGMMDAISSLMRQRLSEIGRDSLFDIHGRQGTGTEYGRRSTAIPTLVFGGIPSPAVGSSDINVVIREGRRAGAARPNFSSLVVGPSLEALFEQLLLQNNRQGPPPAPQSAIDSMPVVKINRRHLDEDPQCAVCKDKFEVGAEAREMPCKHLYHTDCIIPWLVQHNSCPVCRHPLPSQRSGSSTSSARVPSAYYNETACPPAVARADFDPVPSAYYNETATDPPAVTRADFDPAPGNYGSESQESHVPFSFLWPFGPSSSYQYEENVDEPAVYDPNQIAYSAWHYDH

SEQ ID NO: 1941 - protein, 46 aa, Picea mariana
GSLDEFSFEDYLNDPRESETFVPADMHHGMEVRLGLSKGPVCRSFM

SEQ ID NO: 1942 - protein, 270 aa, Streptomyces coelicolor
MTRDLFARHRAVLPDWLALYYEDPLEITHGEGRYVWDAAGNKYLDFFGGILTTMTAHALPEVTKAVAEQAGRIVHSSTLYLNRPMVELAERVAQLSGIPDARVFFTTSGTEANDTALLLATAYRRSNAILAMRNSYHGRSFSTVGITGNRGWSPTSLSPLQTLYVHGGVRTRGPYADLDDRDFIDACVTDLKDLLGHSRAPAALIAEPVQGVGGFTSPPDGLYAAFREVLHERGILWISDEVQTGWGRTGEHFWGWQAHARSGPPDIVTF

SEQ ID NO: 1943 - protein, 405 aa, Triticum aestivum
  unsure (1)..(405): unsure at all Xaa locations
KTGCLLIKAVAVHLPPPGCGVDGVERPRAPPEPPAHHLFDETPLSSDPMAEASGDGSMEDRISALPDDLLIHVLSHLRSREAVQTCVLARRWRYLWRSVTCIDVSFEEFEDRAAANDLEREEMFKMFVNHLLILRERVDLKEFHLEYSLVVGVSRLSAKSDEANLWIRHALQYKAQTVKIGNHSEPLQLLPSVFTSTYLKRLHITNAQLILGFFDRLRKGCPALVXLFLSTCDIEDLDIFSDTLKVLILSDAIGFSFSFEHDAQVSISAPSLISLSVKECPSGARLPILKNMSSLETASVLLSEGDITTCDADGIRQFLGGLSGVRSLDFYYGDRQLEVKNNHGWCPTFNNLTNLTLDRWCMHADLYAMIVFLQNSPNLKKLTLKLNEPRYHNEVVSAVIGELEG

SEQ ID NO: 1944 - protein, 339 aa, Zea mays
MERYEVIKDIGSGNFGVAKLVRDVRTKELFAVKFIERGMKIDENVQREIMNHRSLRHPNIVKFKEVVLTPTHLAIVMEYAAGGELFERICNAGRFSEDEARFFFQQLISGVSYCHSMQICHRDLKLENTLLDDSIAPRLKICDFGYSKSSVLHSQPKSTVGTPAYIAPEVLARKEYDGKVADVWSCGVTLYVMLVGAYPFEDPDEPKNFRKTLTRIISVQYAVPDFVRVSMECRHLLSRIFVAKPEQRITIPEIKNHPWFLKNLPIEMTDEYQMNLQLVDMNVPSQSLEEIMSIILEARKPGDGLKHAGQLPGLGSMELDDIDVDDIDVEDSGDFVCAL

SEQ ID NO: 1945 - protein, 214 aa, Carica pubescens
  unsure (1)..(214): unsure at all Xaa locations
YPESIDWRKKGAVTPVKNQGSCGSCWAFSTIATVEGINKIVHGNLTSLSEQELVDCDRRSHGCKGGYQTTSLKYVVDHGVHTEKEYPYEEKQYKCRAKDKKPPIVKISGYKKVPSNDEISLIKAIAKQPVSVLVESKGKAFQFYKKGIFGGPCGTKVDHAVTAVGYGKDYILIKNSWGPXWGEXGYIKIKRASGHCEGICGIYKSSYFPAEGYR

SEQ ID NO: 1946 - protein, 356 aa, Magnetospirillum magnetotacticum
MNTGSTLGGWTISPRPMAIMIMFSEAPMADPRPVLIAGGAGYIGSHVALALADAGRPVVILDDLSTGRQALVPEGAVFVRGDMGDRALVRRLLAEHGCSGVMMFAGSIIVSESFREPLPYWRNNAGSGLAFVETCVEAGIRHFVYSSTAAVYGTPDTLPISESAALRPISPYGRSKLAVEWALSDICETAPTRFAALRYFNVAGADHRGRSGQVSPVATHLIKIAVEAALGRREGMAIYGDDYPTADGTCIRDYIHVTDLAEAHVLALAHLERGGESLIANCGYGHGFSVREVIDVVRRVSGRDFPVHSSERRRGDPPALVADSGLLKAKLGWVARRDDLELMVRSALEWEAKQQP

SEQ ID NO: 1947 - protein, 149 aa, Solanum tuberosum
MAEQLTEEQIAEFKEAFSLFDKDGDGCITTKELGTVMRSLGQNPTEAELQDMISEADADQNGTIDFPEFLNLMARKMKDTDSEEELKEAFKVFDKDQNGFISAAELRHVMTNLGEKLTDEEVDEMIREADIDGDGQVNYEEFVRMMLAK

SEQ ID NO: 1948 - protein, 238 aa, Zea mays
MSLWIAGTGAMLAASASSGQMAGLCVPRRSPTPPLLARRGRGRGRLLPRRPATLLRRDLRPAAAASPPPPSTGSALEHRVRKKCSPLLESALLPGGSDSTLHEWKAVPDIWRTAAEKYADLVAVVDPYHEPPTEWTYTQLEQEILDFSQGLRAIGVAPDEKLALFADNSCRWLVADQGIMATGAINVVRGTRSSDEELFQIYTPSESIALVGDSPQFFNRLAESFMSRINTRSIVLLW

SEQ ID NO: 1949 - protein, 393 aa, Ralstonia metallidurans
MTAPSDTLSPADADAISQAPNHGTNRPKRPAKNIPLPEPIAFEAPFPNRKTIRSWLIPLGGRSTARALLLFAFDYALFAAVLAGVVLASPWWAKVGLGVLAGLIIARLFIIGHDACHQSLTDRRGLNKWLGRLTFLPSLTPYSLWEVGHNVVHHGYTNLKGFDFVWAPYSLEEFRALPRSRRILERIYRNGLGAGLYYLIEIWWFKLFFPSKRQMATRRPIFMWDCALVGAFGAVWIGALVWLAVATGQSPLLLVGTGFVLPFLIWNATVGFVLYVHHTHTSVAWYDTKAMWAKAQPFVSTTVHLRFNFGIGAALHHIMEHTAHHVDMSIPLYQLKRAQALLEHALPGRIIIEKFSWRWYFHTAHRCKLYDFKALCWTDFRGRQTSENAPTPV

SEQ ID NO: 1950 - protein, 478 aa, Xanthomonas campestris
MGPAAAGVCDLLEYTMSASSPSTDHQPDAWSPQSWRQRTALQMPTYPDAAALEHTLDELRQLPPLVTSWEIFALKRQLAEAQEGKRFLLQGGDCAENFSDCESGTISNRLKVLLQMSLVLVHGLRLPVVRVGRFAGQYAKPRSADTETRDGVTLPSYRGDVINAPAFTEAARVPDPRRMITAHSRSAMTMNFVRALIDGGFADLHHPEYWNLQWVGYSPLAADYQKMVSSIGDAVRFMETLSGAEVYNLNRIDFYTSHEALLLPYEEGLTRQVPRQWGWFNLSTHYPWIGMRTRQLDGAHVEYLRGVRNPIAIKVGPSVQPDQLLRLMDVLNPEDEPGRLSFIHRMGAAQIAEKLPPLLDAVKRDGRRVLWVCDAMHGNTESTGNGYKTRRFDNIRSEVELSFDLHAAAGTRLGGVHLELTGEDVTECTGGARELTERDLERAYRSSVDPRLNYEQSLEIAMAIVRKQQQVAAQPLGG

SEQ ID NO: 1951 - protein, 375 aa, Prochlorococcus marinus subsp. pastoris str. CCMP1378
MSDIPSMKEFQSVIPNNCFKSQTITSLGYLLQSIIIQAIVVAIGLTIPFSQRMVPIWILYALLSGTTAMGFWVIAHECGHGAFSKNKTLETITGYLLHSLLLVPYFSWQRSHAVHHRFTNHITNGETHVPIVIDGNGISEKVGGEKELSFSSKLGKTKYGILQLVLHLIFGWPAYLLSGSTGGLKYGTSNHFWPRKPFSKTLWPAVWAKKVWISDIGVAAVIVGLIIFIIKHGFFPIIGMYVGPLLVVNCWLVIYTWLHHTDSDVPHLSNSEFSFMRGAFLSIDRPYGKIINILHHNIGSSHVVHHVCPTIPHYHATKATLAIRKAFNKAYLFNPDPIHKALWNIACNCIAVKSDIDEGRYIWQSSYKKKIKTTY

SEQ ID NO: 1952 - protein, 127 aa, Triticum aestivum
MSEQGAGQGTKEQSPAELELELETDHPALPPPLARGGSASEVLAILPSYTGKTVLELGAGVGLFTGELAKEASHVIALEFIDNMIKKNEEINGHIHKNITFMCADVTSPELKIDDNFIYLVFSKWLL

SEQ ID NO: 1953 - protein, 431 aa, Brassica napus
DNSYTLSFLLVFFVMILFRPALSMYFNTLSSTESLTISNNRTLVSPGDVFELGFFRTNSSSPWYLGIWYKQLSERTYVWVANRDSPLSNAMGILKISGNNLVILDHSNKSVWSTNLTRGNERSPVVAELLANGNFVMRDSNNNDASGFLWQSFDYPTDTLLPEMELGYDLKTRLNRFLTSWKNSDDPSSGEISYKLDTQRGLPEFYLLKDGLRAQRSGPWNGVKFSGIPEDQKLNYMVYNFIENSEEVAYTFRMTNNSIYSRIQVSPAGFLARLTTTPTAWEWNWFWYAPEDPQCDVYKTCGPYAYCDLNTSPLCNCIQGFKPKNRQQWDMSNPSGGCIRKTPLSCSGDGFIRMKNMKLPETTMAVVDRSIGVKECEKMCLSDCNCTAFANADIRNGGTGCVIWTGELEDIRNYFDDGQDLYVRLAAADLV

SEQ ID NO: 1954 - protein, 270 aa, Oryza sativa
  unsure (1)..(270): unsure at all Xaa locations
MAVDDLNHHLIAVGVGEEAATAHCGLRTLVRNMAQLVVSLGILVAADKLVEQAFAAASIKFPSALFAMFCVFALLLFLPPSLANGFMAFFDPATVFIHRWLPLFFVPSLVVLPLAVRDVSPASALKILFITXXDYLTESPSNPGAGDILMGFLGSVIISFAFSMFNQRKVXLVRRHAAEIFTSIAVASTFSLYSTAILGRVVELEPILTISILPRCITVALXFEGVNTSVTAAVVVLTGLIGANFAQAVMDKLRLKDPIARGIGTASSIX

SEQ ID NO: 1955 - protein, 251 aa, Hordeum vulgare
MGRSPCCEKEHTNKGAWTKEEDQRLIAYIRANGEGCWRSLPKAAGLLRCGKSCRLRWMNYLRPDLKRGNFTDDEDELIIRLHSLLGNKWSLIAGQLPGRTDNEIKNYWNTHIKRKLLSRGMDPHTHRPLTAVIDAAAPTRPAQIAVPARAAPTTMFALPTKQQQPPVPVESSDDDGSSGATSTGEPRCPDLNLDLSVGPPAADTPTSHPVCLCRHLGFRGGEACSCRQADSAGSQGGGFRYFRPLEEGQYI

SEQ ID NO: 1956 - protein, 235 aa, Glycine max
  unsure (1)..(235): unsure at all Xaa locations
MIMEESSVHEIKTPLLSSNKEEDEVGSSTSHRQQNEENSPIKQVALTVPTTDDPSLPVLTFRMWVLGTLSCVLLSFLNQFFWYRIQPLTITAISAQIAVVPLGQLMAATITKRVFFRGTRWEFTLNPGPFNVKEHVLITIFANSGAGTVYAIHVVTAVKIFYHKHISFFVSLLVVITTQVLGFXGWAGIFRRYLVEPAAXMWWPANLVXQVSLFRALHEKDERPKGGLTRIAVLS

SEQ ID NO: 1957 - protein, 422 aa, Linum usitatissimum [sequence omitted]

SEQ ID NO: 1958 - protein, 504 aa, Arabidopsis thaliana
MVVINSLRRLARTTQVHLHSRYATCMSGNSTSRRIFTTEAAPEKKNTVGSKGHDMLAPFTAGWQSADLDPLVIAKSEGSYVYDDTGKKYLDSLAGLWCTALGGNEPRLVSAAVEQLNTLPFYHSFWNRTTKPSLDLAKVLLEMFTANKMAKAFFTSGGSDANDTQVKLVWYYNNALGRPEKKKFIARKKSYHGSTLISASLSGLPPLHQNFDLPAPFVLHTDCPHYWRFHLPGETEEEFSTRLAKNLEDLIIKEGPETIGAFIAEPVMGAGGVIPPPATYFEKVQAVVKKYDILFIADEVICAFGRLGTMFGCDKYNIKPDLVTLAKALSSAYMPIGAILMSQEVADVINSHSSKLGVFSHGFTYSGHPVSCAVAIEALKIYKERNIPEYVAKVAPRFQDGVKAFASGSPIIGETRGTGLILGTEFVDNKSPNEPFPPEWGVGAFFGAECQKHGMLVRVAGDGILMSPPLIISPEEIDELISIYGKALKATEEKVKELKAQHKK

SEQ ID NO: 1959 - protein, 139 aa, Glycine max
  unsure (1)..(139): unsure at all Xaa locations
FHSRRDSCSSDAKHYHAWSYIQRAMQTLXGWEDKLYDGTYLLKGHIFNICAWNHRYMAITWCAFLVGRKARRETDELYTIEAIIVYPENESWLRYLHGLYXGETTSWVNDPQDGLACXLTVRTNSYYKSALSTIIDHIC

SEQ ID NO: 1960 - protein, 118 aa, Triticum aestivum
MNLWTDDNASMMEAFMASADMPAFPWGAAATPPPPAFNQDTLQQRLQAIIEGSRETWTYAIFWQSSTDAGASLLGWGDGYYKGCDDADKRRQQPTPASAAEQEHRKRVLRELNSLIAG

SEQ ID NO: 1961 - protein, 218 aa, Corylopsis sinensis
GLVKKAHEISVLCDAEVALIVFSTKGKLFEYSTDSCMEKILERYERYSYAERQLVATDPNSQGNLSLEYSRLKAKVELLQRNQRHFLGEDLDSLSLRELQTMEQQLDTALKRIRSRKNQLMYESISELQKKEKAMQEQNNMLAKKIKEKEKTMTQQAQWEEQNQDPGAASFLLQQPLPCLNIGNTYNQGVGGGAPEVRRNELDLTLEPVYPCHIGCFA

SEQ ID NO: 1962 - protein, 364 aa, Glycine max
MGKGGMSIDEHGEGKEENMAAWLVGMNTLKIQPFKLPTLGPHDVRVRMKAVGICGSDVHYLKTLRCAHFIVKEPMVIGHECAGIIEEVGSQVKSLVPGDRVAIEPGISCWHCNHCKHGRYNLCDDMKFFATPPVHGSLANQIVHPADLCFKLPDNVSLEEGAMCEPLSVGVHACRRANIGPETYVLIMGAGPIGLVTMLAARAFGAPKTVIVDVDDHRLSVAKSLGADDIVKVSTNIQDVAEEVVQIQKVMGAGIDVTFDCAGFDKTMSTALSATQPGGKVCLVGMGHSEMTVPLTPAAAREVDVVGVFRYMNTWPLCLEFLRSGKIDVKPLITHRFGFSQKEVEEAFETSARGGNAIKVMFNL

SEQ ID NO: 1963 - protein, 202 aa, Oryza sativa (japonica cultivar-group)
MAALCSPSPTLPTASLLLLRRRRLRLLHPPPSAAALLLLLPARRRGRHHHRRGGVLRCDAAAASPSAGSTLENPVRRKCSPLLESALLPGGNGLTTHDWMAVPDIWRTAAEKYADRVALVDPYHEPPSELTYKQLEQEILDFSQGLRAIGVAPDEKIALFADNSCRWLVADQGIMATGAINVVRGTRSSDEELFQIYTHSER

SEQ ID NO: 1964 - protein, 465 aa, Yersinia pestis CO92
MSDQQEGAELKRGLKNRHIQLIALGGAIGTGLFLGIAQTIKMAGPSVLLGYAIGGFIAFLIMRQLGEMVVEEPVAGSFSHFAYKYWGHFAGFASGWNYWVLYVLVAMAELTAVGIYVQYWWPEIPTWVSAAVFFLAINAINLANVKVYGEMEFWFAIIKVIAIIAMILFGGYLLISGRGGPEATVTNLWAQGGFFPNGIMGLVMAMAVIMFSFGGLELVGITAAEAEDPAKSIPKATNQVIYRILLFYIGSLAILLSLYPWGKVVEGGSPFVLIFDALDSNSVATVLNIVVLTAALSVYNSCVYCNSRMLFGLAKQGNGPKILLKVDGRGVPVIAIAVSAFATAFCVLINYLLPGRAFELLMALVVSALVINWAMISLAHLKFRAAKNRQGVIPKFKAFWYPFGNCLCLLFLTGILVIMFLTPSIRISVILIPVWVVVLAIGYILKNQSQRQNQQLSASSRKVTK

SEQ ID NO: 1965 - protein, 266 aa, Gossypium raimondii
LSIEEVEVAPPQKDEVRIKILFTSLCHTDVHFWDAKGQNPLFPRILGHEAGGIVESVREGVTDLKPGDHVLPIFTGECKECPHCLSEESNMCDLLRINTDRVGMINDGKSRFSINGKPIYHFLGTSTFSEYTVVHVGQVAKINPHAPLDKVCVLSCGMSTGFGATVNVAKPKKGQSVAIFGLGAVGLAAAEGARVSGASRIIGIDLNPSRFEQAKKFGVTESVNPKDYNKPVQEVVVEMTGGGVDRSVECTGSIQAMISAFECVHD

SEQ ID NO: 1966 - protein, 547 aa, Thermoplasma volcanium
MFVFAKFYIVFSSSLYDIMAEQQHEVKLKKALTFPQMLVIGLIAAVGTGALFAPVAMVGVAGPSAIMGWIIGAIMYTFVSFTFVELSKTYPEAGGPSRYSLYTHGRFTNALNAFADLIWYIFIPPIEALATVEGLQYLYPHFIASSGAPTLLGAGLGVLVLALFLPLNYFGVKAFGKYSLYIGFVKLAVYLLAAFGMMFVFFKFDNFYIYRGGFLPFGFSGILFAIPFAMFAFGGIRVVPDYAEETTETKENRFLGRTIIYTVIGQSLIYILFSIAFIAGLKWSAISIAPGAWADVKSNITENPFVFLASSYHNYVVLIIVLVVSILGPFVTGYVYVGSGARVLLATARSKIMASSMKKLSETYAVPYWSVIAFVIVGAIVAFISAPVPDIYALLTDAVVAGYLGFSVTPVAMIVSRRQGATKKEDKLPAGTTIAVIAFISSSLIAFWSGWPSVPYAMFILALAMLVFGIVYKIKEHFLNSIWYILYMAFILLMSYIGSDGALNLIPFTYSTLIVAAISAAIFFPWGIISGLDSPYNVDNAPIPNIE

SEQ ID NO: 1967 - protein, 365 aa, Mycosphaerella graminicola
MPTYNIVVFGGDHCGPEVTAEALKVLDVIDNSNADVHFNIQPHLLGGASIDAHGEPLTDEALAAAKAADAVILGAIGGPKWGTGKVRPEQGILRLRKEMGTYGNLRPCFFASESLVKTSPLKEEVCRGVNFNIVRELTGGIYFGERTEDDGSGYAVDTEPYSRAEIERVARLAGFLALAEDPPCPVWSLDKANVMATSRLWRKTVTDVFANEFPQLKIGHHLIDSAAMLMVKNPRALNGVIVTSNLFGDIISDEASVIPGSLGLLPSASLTASPDGKSKCNGIYEPIHGSAPDISGKGIVNPVAMILSLGMMCKYSLQQPELAKKIDEAVRNVIEKGINTADIGGSAKTAEVGDAIAKELEALLK

SEQ ID NO: 1968 - protein, 326 aa, Rickettsia conorii
MQITVREALRDAMQEEMIRDDKVFVIGEEVAEYQGAYKVTQGLLEQFGPKRVIDTPITEYGFAGLAVGAAFAGLRPIVEFMTFNFAMQAFDHIVNSAAKTHYMSGGQVKCPIVFRGPNGAASRVAAQHSQNYTACYSHIPGLKVVAPYSAEDHKGLMLTAIRDDNPVVFLENEILYGHSFDVPKTIEPIPFGQAKILREGSSVTIVTFSIQVKLALDAANFVQNDNIDCEVIDLRTIKPLDTETIIESVKKTNRLVVVEEGWFFAGVGASIASIVMKEAFDYLDAPIEIVSGKDLPLPYAVNLETLALPSESDVIEAVKKVCYYSI

SEQ ID NO: 1969 - protein, 395 aa, Triticum aestivum
  unsure (1)..(395): unsure at all Xaa locations
MPPKASKKDAEPAERPILGRFSSHLKIGIVGLPNVGKSTFFNIVTKLSIPAENFPFCTIEPNEARVHVPDERFDYLCQLFKPKSEVAAYLEINDIAGLVRGASAGEGLGNAFLSHIRAVDGIFHVLRAFEDTEITHIDDTVDPVRDLETISQELRLKDIEFVQAKIDDLEKSMKRSNDKQLKIDHELCQRVMTHLQDGKDVRLGEWKAAEIEILSALQLLTAXPVVYLVNWXKGNMSEKEYKRQKNKYVPEIDDGGEAIVSFSCDFXQQLVDMPDDGAARCCTVNQTASMIPRIIKSALAAIHLIILLHSIDMITSRCWQIRCQSKAPQGNGAIHTDFERGFICAEVMKFEDLKELGSESAVKAAGKYRQEGKTYVVQDGDIIFFKFNVSGGGKK

SEQ ID NO: 1970 - protein, 214 aa, Paeonia mlokosewitschi
IVESVGEGVTDLKPGDHVLPVFTGECKECRHCKSEESNMCDLLRINTDRGVMLNDGKSRFSINGQPIFHFVGTSTFSEYTVVHVGCVAKINPEAPLDKVCVLSCGISTGLGATLNVAKPKKGSSVAIFGLGAVGLAAAEGARIAGASRIIGVDLNPKRFEEAKKFGVTEFVNPKDYNKPVQEVIAEMTGGGVDRSVECTGSIMAMISAFECVHD

SEQ ID NO: 1971 - protein, 823 aa, Phanerochaete chrysosporium
MGLTLVVLLHLALGLLTGVQAQSGLYQQCGGIGWTGATTCVSGATCTVLNPYYSQCLPGAATTSVSSSHSSSSSVSSHSSSASSSSISSTSTSPPAPSQTVANVSPEWAAAYVKAQAAVAKLSVTDMVNLATGVQWQKGPCVGNTPAISSIPGFTGLCLQDSPVGVRYADGTSVFPPEINVAATWNRTLMRQRGAAMGAEFKGKGVHVALGPMMNLMRVPAAGRNWEGGGGDPFLSGEVAFETITGIQSSGAQACAKHFINNEQEHFRDSSSSNVDDRTEHELYGHPFLRSVQANVASVMCSYNQINGTFSCENEKTLSGLLKGEYGFQGYVMSDWWATHSGAPAVNAGLDMTMPGDETLSSGTTYFGQNLVNAVNSGQVSQARVKDMATRILAAWYLLGQDQNFPAVNFNSWNSGQGQHVNVSGNHASLIRTIGAASQILLKNVNSALPLKKPKTIGIIGNGAGSNPNGPNAFSDRAGDVGVLALGWGSGTANFPYLVAPVDAITARASQDGTTVSSSLSDTDLTGAANTATGKDVAMVFITADSGEGYLTVEGNAGDRNDLQAWHGGDALVQQVASHNKNTIVVINSVGPINMEAWVNHPNVTAIVWSGLPGQEAGNAVTDVLFGAVNPGGKLPFTIGKSISDYSAQIITTGSGIVPIPYNEGLFIDYRHFDQAGIAPRFEFGFGLSYTTFDYSNLVITGSTAGGTRQPPGPGSSLDPWLHDSVVTVSFTLTNNGTVDGTEVPQLYLSPPASAKSAPQNLKGFDSVFLPAGASTTVSFELSRYSFSVWDVVSQSWQIPAGVTGISVGASSRDLRLKGSITN

SEQ ID NO: 1972 - protein, 99 aa, Oryza sativa
  unsure (1)..(99): unsure at all Xaa locations
XRTCSLXPAAFISMLHMYETFGWWRRADYIKVHFAESWNEFHHLLIMEKLSCGTXWTHQLLNRNASCYVFDFSLTKYKNAPRMPYNYSDSLRVRAHITF

SEQ ID NO: 1973 - protein, 369 aa, Escherichia coli K12
MKSRAAVAFAPGKPLEIVEIDVAPPKKGEVLIKVTHTGVCHTDAFTLSGDDPEGVFPVVLGHEGAGVVVEVGEGVTSVKPGDHVIPLYTAECGECEFCRSGKTNLCVAVRETQGKGLMPDGTTRFSYNGQPLYHYMGCSTFSEYTVVAEVSLAKINPEANHEHVCLLGCGVTTGIGAVHNTAKVQPGDSVAVFGLGAIGLAVVQGARQAKAGRIIAIDTNPKKFDLARRFGATDCINPNDYDKPIKDVLLDINKWGIDHTFECIGNVNVMRAALESAHRGWGQSVIIGVAVAGQEISTRPFQLVTGRVWKGSAFGGVKGRSQLPGMVEDAMKGDIDLEPFVTHTMSLDEINDAFDLMHEGKSIRTVIRY

SEQ ID NO: 1974 - protein, 366 aa, Glycine max
MKTVLFLLLVSALIPIAVAQPNDFSDANLNEFNSSIAIIIIILVIAFFLMAFFSIYVRHCADSPSNTVRPLTTARSRRAARGLDPALIQTFPILEYSVVKIHKIGKEALECAVCLCEFEDTETLRLLPKCDHVFHPECIDEWLSSHTTCPVCRANLLPTESEDAIANANANGVVPVPETLTRDIESQNDAVQAAPEQQNAEADPVLPEPEVVSLDKTLNRNRTRGSRSNRPRRFPRSHSTGHSLVQPGENTDRFTLKLPLEVRKQLINRQLQRASSLIVLPREGSSRQGYRTGGEGSSRAKISRRLDRSLKSDRWIFSMAAPFFARALSIRSPRVRNNDVEGAASSSSPTAPIMPPTAVDSARPPV

SEQ ID NO: 1975 - protein, 176 aa, Triticum aestivum
INMVSFAIERAIGRSCSVEFEVADCTTKEYAENTFDVIYSRDTILHIQDKPALFRNFFKWLKPGGKVLISDYCRSPGTPSEEFAAYIKQRGYDLHDVKTYGKMLEDAGFHDVVAEDRTDQFLRVLERELGETEKNKEAFLADFTQEDYDDIVNGWSAKLKRSSAGEQKWGLFIATK

SEQ ID NO: 1976 - protein, 338 aa, Escherichia coli O157:H7 EDL933
MRVLVTGGSGYIGSHTCVQLLQNGHDVIILDNLCNSKRSVLPVIERLGGKHPTFVEGDIRNEALMTEILHDHAIDTVIHFAGLKAVGESVQKPLEYYDNNVNGTLRLISAMRAANVKNFIFSSSATVYGDQPKIPYVESFPTGTPQSPYGKSKLMVEQILTDLQKAQPDWSIALLRYFNPVGAHPSGDMGEDPQGIPNNLMPYIAQVAVGRRDSLAIFGNDYPTEDGTGVRDYIHVMDLADGHVVAMEKLANKPGVHIYNLGAGVGSSVLDVVNAFSKACGKPVNYHFAPRREGDLPAYWADASKADRELNWRVTRTLDEMAQDTWHWQSRHPQGYPD

SEQ ID NO: 1977 - protein, 1262 aa, Hordeum vulgare
MAHVAGLLASAVVSAVGNKLGSAIGDEVTMLWSFKDDLKDMKDTLESMEAVLKDAERRSVKEELVRLWLNRLKHAAYDISYMLDEFQANSEPASRKMIGKLDCFAIAPKITLAYKMKKMRGQLRKIKEDHESFKFTHANSSLINVHQLPDPRETSSNVVESLIIGREKDRMNVLSLLSTSNNIKEDFTVLPICGLGGIGKTTLAQLVFNDAQFNDYHRVWVYVSQVFDLNKIGNSIISQVSGKGSEHSHTLQHISKQLKDLLQDKKTLIVLDDLWETGYFQLDQLKLMLNVSTKMKVLVTTRSIDIARKMGNVGVEPYMLDPLDNDMCWRIIKQSSRFQSRPDKEQLEPNGQKIARKCGGLPLAAQALGFLLSGMDLSEWEAICISDIWDEPFSDSTVLPSLKLSYNTLTPYMRLCFAYCGIFPKGHNISKDYLIHQWIALGFIEPSNKFSAIQLGGKYVRQFLGMSFLHHSKLPETFGNAMFTMHDLVHDLARSVITEELVVFDAEIVSDNRIKEYCIYASLTNCNISDHNKVRKMTTIFPPKLRVMHFSDCKLHGSAFSFQKCLRVLDLSGCSIKDFASALGQLKQLEVLIAQKLQDRQFPESITRLSKLHYLNLSGSRGISEIPSSVGKLVSLVHLDLSYCTNVKVIPKALGILRNLQTLDLSWCEKLESLPESLGSVQNLQRLNLSNCFELEALPESLGSLKDVQTLDLSSCYKLESLPESLGSLKNVQTLDLSRCYKLVSLPKNLGRLKNLRTIDLSGCKKLETFPESFGSLENLQILNLSNCFELESLPESFGSLKNLQTLNLVECKKLESLPESLGGLKNLQTLDFSVCHKLESVPESLGGLNNLQTLKLSVCDNLVSLLKSLGSLKNLQTLDLSGCKKLESLPESLGSLENLQILNLSNCFKLESLPESLGRLKNLQTLNISWCTELVFLPKNLGNLKNLPRLDLSGCMKLESLPDSLGSLENLETLNLSKCFKLESLPESLGGLQNLQTLDLLVCHKLESLPESLGGLKNLQTLQLSFCHKLESLPESLGGLKNLQTLTLSVCDKLESLPESLGSLKNLHTLKLQVCYKLKSLPESLGSIKNLHTLNLSVCHNLESIPESVGSLENLQILNLSNCFKLESIPKSLGSLKNLQTLILSWCTRLVSLPKNLGNLKNLQTLDLSGCKKLESLPDSLGSLENLQTLNLSNCFKLESLPEILGSLKKLQTLNLFRCGKLESLPESLGSLKHLQTLVLIDCPKLEYLPKSLENLSGNRF

SEQ ID NO: 1978 - protein, 362 aa, Glycine max
MDAIRKQASKLREQVARQQQAILRQLGQISNEPLMIDESEIECHQQLQKLYTSTKTAKHFQRHIVRAIEGFVSVCSKQMEIVRRMARDCCKYGTENLGSSYLLARASLQFGNTYDTMENERETLLGILGDQISEPLRAQITGAPLEDARHLTRRYDKLHQEVEAQAAEVLRRRSKLRNSSVSAESSARLQNAETRLKELKSALAALGREATSAMLSVEEQQQQMTLQSLRTMVDAERSYHQHVLVILEKLYTEIIEDRQPKEATSFTLPKDGYNQPADENANSSGIDYKHNSQTATYFFAKVVHPFDAQAEGELSLSVDDFVVVRQVGPNGWSEGECKGNAGWFPSAYVERQDMIPASKITE

SEQ ID NO: 1979 - protein, 360 aa, Pseudomonas aeruginosa PAO1
MSKQILVLPGDGIGPEIMAEAVKVLELANDRFQLGFELAEDVIGGAAIDKHGVPLADQTLQRARQADAVLLGAVGGPKWDRIERDIRPERGLLKIRSQLGLFANLRPAILYPQLAAASSLKPEVVAGLDILIVRELTGGIYFGQPREQRVLENGERQAYDTLPYSESEIRRIARVGFDMARVRNNRLCSVDKANVLASSQLWREVVEEVAKDYPDVELSHMYVDNAAMQLVRAPKQFDVMVTDNMFGDILSDEASMLTGSIGMLPSASLDANNKGMYEPCHGSAPDIAGQGIANPLATILSVSMMLRYSFSQATAADAIEQAVSKVLDQGLRTGDIWSEGCRKVGTREMGDAVVAALKNL

SEQ ID NO: 1980 - protein, 351 aa, Glycine max
MYGFEALTFNIHGGFLEAIVRGHRAGLLTTADYNNLCQCETLDDIKMHLSATEYGPYLQNEPSPLHTTTIVEKCTLKLVDDYKNMLCQATEPLSTFLEYITYGHMIDNVVLIVTGTLHERDVQELLEKCHPLGMFDSIATLAVAQNMRELYRLVLVDTPLAPYFSECITSEDLDDMNIEIMRNTLYKAYLEDFYRFCQKLGGATAEIMSDLLAFEADRRAVNITINSIGTELTRDDRRKLYSNFGLLYPYGHEELAVCEDIDQVRAVMEKYPPYQSIFAKLSYGESQMLDKAFYEEEVKRLCLAFEQQFHYAVFFAYMRLREQEIRNLMWISECVAQNQKSRVHDSVVFIF

SEQ ID NO: 1981 - protein, 151 aa, Zea mays; identical to SEQ ID NO: 743

SEQ ID NO: 1982 - protein, 362 aa, Synechocystis sp. PCC 6803
MSQTYNVTLLPGDGIGPEIMAVAVAVLGKVADQFGFAFNFQEALIGGAAIDATGQPLPEATLAQAKDSDAVLLAAIGGYAWDNLPRSQRPETGLLAIREGLGLFANLRPATIFPQLIDASSLKREVVEGVDIMVVRELTGGIYFGKPKGIFETETGEKRGVNTMAYTVGEIDRIAKVAFETARKRRGQLCSVDKANVLDVSQLWRDRVMAIAVDYPDVELSHLYVDNAAMQLVRSPRQFDTIVTGNLFGDILSDIAAMLTGSIGMLPSASLGSDGPGLFEPVHGSAPDIAGQDKANPLAQVLSAAMMLRYGLDQPQAADRLEDAVKKVLEQGYRTGDILSPGTQLVGCRQMGEQLLSILDEM

SEQ ID NO: 1983 - protein, 372 aa, Zea mays
MENSAAAAADRPRLTRAAAKRSAVVTAVAVAAKRKRVALSQLPTLPNAVLGAHDDDDDKPVRKQRLLPAAKPKPKPKAAPAPAAPAAADDTDDDIQLCKPYASDIYSYLRSMESQAKRRLAVDYIAAVQIDVTPNMRGILIDWLVEVAEEYKLVSDTLYLTVSYIDRFLSAKVLNRQKLQLLGVSAMLIASKYEEISPPNVEDFCYITDNTYTKQEVVKMESDILNVLKFEVGSPTAKTFLRMFIRSAQEDNKKYPSLQLEFLGSYLSELSLLDYGLIRSLPSLVAASAVFVARLTLDPHTHPWSKKMQTLTGYKPSELKDCVAAIHNLQLNRKYQSMVAIREKYRQHRFKGVSALLPPVEIPAPYFEKLKE

SEQ ID NO: 1984 - protein, 319 aa, Triticum aestivum
MARTPRHRDLSSRRLRSSPLDAPSHYQKATRAAKENKLKLTSEKKDWKHATCPICLERPHDAVLLLCSSHTKGCRPYMCGTNYHQSNCLEQFKNAYVKEKPANEVSIAVAAASKKPKDVELACPICRGEVKGWTVVEPARRFLNRKKRTCIHEDCSFMGSYKKLCKHVKARHPSSKPREVDPARLAEWKELESAKERQDAISIVTGLNPGSMIIGDYLIDPNSGSSDSFMDNSDWSDDSDSYTFPDGGDIMFSGAPDIRSLRRVVRRAYRTSGARPRQNVQRRALTISRSSGRRRWPQVGSALSARMPRGRQARSTNDS

SEQ ID NO: 1985 - protein, 336 aa, Mycobacterium leprae
MKLAIIGGDGIGPEVVAQAVKILDVVLPGVQKTTYDLGARRYHTTGELLPESVLAELREHDAILLGAVGDPSVPSGVLERGLLLRLRFELDHHINLRPARLYPGVNSLLAGKPDIDFVVVREGTEGPYTGTGGAIRVGTPNEVATEVSVNTAFGVRRVVQDAFERARQRRKHLTLVHKNNVLTYAGTLWCRIVQEVGEKYPDVEVVYQHIDAATIYLVTEPSRFDVIVTDNLFGDIITDLAAAVCGGIALAASGNIDATRTNPSMFEPVHGSAPDIAGQGIADPTAAIMSLALLLAHLGEDEPAARLDQAVASYLATRGNGRFSTGEVGERIAAAL

SEQ ID NO: 1986 - protein, 579 aa, Hordeum vulgare
MGEVAAEMYTQDGTVDIKGNPALKKDTGNWRACPYILANECCERLAYYGMSTNLVNFMKDRMGMANAAAANNVTNWGGTCYITPLIGAFLADAYLGRFWTIASFMIIYIFGLGLLTMATSVHGLVPACASKGVCDPTPGQSAAVFIALYLIALGTGGIKPCVSSFGADQFDEHDDVERKSKSSFFNWFYFSINIGALVASSVLVYVQTHVGWSWGFGIPAVVMAIAVGSFFVGTSLYRHQRPGGSPLTRIAQVLVAATRKLGVAVDGSALYETADKESGIEGSRKLEHTRQFRFLDKAAVETHADRTAAAPSPWRLCTVTQVEELKSVVRLLPIWASGIVFATVYGQMSTMFVLQGNTLDASMGPKFKIPSASLSIFDTLSVIAWVPVYDRILVPAVRSVTGRPRGFTQLQRMGIGLVVSMFAMLAAGVLELVRLRTIAQHGLYGEKDVVPISIFWQVPQYFIIGCAEVFTFVGQLEFFYDQAPDAMRSMCSALSLTTVALGNYLSTLLVTVVAKVTTRGGKQGWIPDNLNVGHLDYFFWLLAALSLVNFAVYLLIASWYTYKKTAGDSPDAKGGAHDQ

SEQ ID NO: 1987 - protein, 178 aa, Pyrococcus furiosus DSM 3638
MNPFHDLEPGPDVPEVVYAIIEIPKGSRNKYELDKKTGLLKLDRVLYSPFFYPVDYGIIPRTWYEDDDPFDIMVIMREPVYPLTIIEARPIGLFKMIDSGDKDYKVLAVPVEDPYFKDWKDIDDVPKAFLDEIAHFFKRYKELQGKEIIVEGWEGAEAAKREILRAIEMYKEKFGKKE

SEQ ID NO: 1988 - protein, 227 aa, Enterococcus faecalis V583
MNPYVGIIISLAVFGIGTWLFKKSKGFFLFTPLFVAMILGVVVLKVTGISYEQYNEGGKYISFFLEPATVAFAIPLYKKRDVLKKYWLEILTALTIGSFGSLVAVYFAGKVIGMDNHLVASILPQAATTAIAVPISQTVGGIASITAFTVIFNGVLTYALGRIALKWFKINNPIAKGLALGAAGHALGVAVGIEMGETEAAMASISVVVVGVVTVLVVPFFATVIGL

SEQ ID NO: 1989 - protein, 473 aa, Brassica napus
MSATLTGSGTALGFSCSSKISKRVSSSPSTRCSIKMSVSVDEKKKSFTLQKSEEAFNAAKNLMPGGVNSPVRAFKSVGGQPVLIDSVKGSKMWDIDGNEYIDYVGSWGPAIIGHADDEVLAALAETMKKGTSFGAPCLLENVLAEMVISAVPSIEMVRFVNSGTEACMGVLRLARAFTNKEKFIKFEGCYHGHANAFLVKAGSGVATLGLPDSPGVPKAATSDTLTAPYNDIEAVAKLFEAHKGEISAVILEPVVGNSGFITPTPEFINGLRQLTKDNGALLIFDEVMTGFRLAYGGAQEYFGITPDLTTLGKIIGGGLPVGAYGGRRDIMEMVAPAGPMYQAGTLSGNPLAMTAGIHTLKRLKQPGTYEYLDKITKELTNGILEAGKKTGHPMCGGYISGMFGFFFAEGPVYNFADAKKSDTEKFGKFFRGMLEEGVYFAPSQFEAGFTSLAHTSEDIQFTISAAERVLGRI

SEQ ID NO: 1990 - protein, 452 aa, Shigella flexneri 2a str. 301
MSHNVTPNTSRVELRKTLTLVPVVMMGLAYMQPMTLFDTFGIVSGLTDGHVPTAYAFALIAILFTALSYGKLVRRYPSAGSAYTYAQKSISPTVGFMVGWSSLLDYLFAPMINILLAKIYFEALVPSIPSWMFVVALVAFMTAFNLRSLKSVANVNTVIVVLQVVLIAVILGMVVYGVFEGEGAGTLASTRPFWSGDAHVIPMITGATILCFSFTGFDGISNLSEETKDAERVIPRAIFLTALIGGMIFIFATYFLQLYFPDISRFKDPDASQPEIMLYVAGKAFQVGALIFSTITVLASGMAAHAGVARLMYVMGRDGVFPKSFFGYVHPKWRTPAMNIILVGAIALLAINFDLVMATALINFGALVAFTFVNLSVISQFWIREKRNKTLKDHFQYLFLPMCGALTVGALWVNLEESSMVLGLIWAAIGLIYLACVTKSFRNPVPQYEDVA

SEQ ID NO: 1991 - protein, 643 aa, Magnetospirillum magnetotacticum
MSEYLDTTIHDTFPKALVHNAQRWPGEIAMREKEFGIWNAFTWADYLDRVRNLALGMLALGVQRGDVVAILGKNRPESLWGEVAAHAVGAMSLGIYHDSMNAEVAYLLSYTGAAVVLAEDEEQVDKLLEISAEVPTIRHIVYFDPRGMRKHKDPRLISAEDLKSKAQEIAAANPGRFDEEVGKGKGDDVAILCTTSGTTSNPKLAMLQAGPFLRHSTAYLRADPKSAGDDYVSVLPLPWIMEQIYAVAQPLICRNIVNFVEEPETMMADMREIGPNFVLLAPRMWEGIAADVRARMMDSTPFKQAMFNLGMKLGMKALDQGKRSKLANWILFDALKDRIGFTFLKSAATGGAALGPDTFRFFLAMGVPLRQIYGQTELAGAYTVHREGDIDFDSVGIPFDDAQLRIENPDANGVGEIVATTDGMFTGYFRNPEASTADIVDGNWLKTGDAGYIKKENGHLVVIDRIKDLATTSHAVRFSPQFIENKLKFSPFIAEAVILGDTKPYLSALICIRFSIVSKWAESKGISFTNYTNLSAQGAVYDLLQAEVEKVNATLPEPQRIRKFLLLYKELDADDGELTRTRKVRRGVINEKYGDIIDAMYADRAMVPVDAVITFQDGTTTRVKTELKVVTLLPPPSQQLAAE

SEQ ID NO: 1992 - protein, 141 aa, Zea mays
MEKMNVVASRKQQGGDWICRSCQYVNFCKRDACQRCGEAKLGVERTDYGALGGDWDVKPGDWYCYRCGVNNYASRAGCFKCGAAKNESPPAAVAQGWGYTAAGQAGMKPGDWICPRLGCNVQNYANRTECFRCSMPKSYYG

SEQ ID NO: 1993 - protein, 507 aa, Solenostemon scutellarioides
MTSLLAHPLLPPPRRRPLPPLLPPPVSHPAGPRPGRWWRNLYDVKPVRFRCFAEWAQLFGPTFSVWFGSTLNVIVSSSELAKEVLKEKDGQLADPPRSRSAVKLSRDGKDLIWADYGPHYVKVRKVCTVVLFSPKRLELLRPIREDEITVMVESIYQDSAASGKSVVIKKYLASMAFHNITRLVFGKRFVNSEGEVDKQGQEFKAIAINGLKLGASLAVSEHIPWLRWMFPLDEDAFTQHGVRMERLTREIMQEHTLARQKTGGAKQHFFDALLTLKDEYDLSEDTIIALLWDMIAAGMDTPAISVEWAMAELVRNPRVQEKVQEELDRVIGHERIMTELDIPNLPYLQCVVKESLRLHPPTPVMLPHRSNADVKIGGYDIPKGSNVHVNVWAIARDPKSWKVPLEFRPERFLEEDVDIKGHDFRLLRFGAGRRVCPGAQLGIDLATSMIGHLLHHFRWTPPTGVRAEDIDMGENPGTVTYMRTPVEAVPTPRLPANLYKRVAVVDI

SEQ ID NO: 1994 - protein, 232 aa, Oryza sativa
MDTSGPAAFVNGEILKMFVGRRVRTVVQAQREEGGLLIGQSTDGHQLTIKGASGAPMSHYVEIIGIAEPNQAIRAEVCTDFGENFDGITYKTFCQQSMSHVHDFSSFKIRPTVFVSHLSIIKLLRLRAPNPRHPRTRPCRYGSDVARRRGGGADDLSDEVDRRAGCSDGGHGHGQGNASVAVFLDRDDGQMDGGQKPDDLSAAAAADEEEEEEEVEVEEDDDDAKESEGSAI

SEQ ID NO: 1995 - protein, 745 aa, Geobacillus stearothermophilus
MENQNRQNAAQCPFHGSVTNQSSNRTTNKDWWPNQLNLSILHQHDRKTNPHDEEFNYAEEFQKLDYWALKEDLRKLMTESQDWWPADYGHYGPLFIRMAWHSAGTYRIGDGRGGASTGTQRFAPLNSWPDNANLDKARRLLWPIKKKYGNKISWADLFILAGNVAIESMGGKTIGFGGGRVDVWHPEEDVYWGSEKEWLASERYSGDRELENPLAAVQMGLIYVNPEGPDGKPDPKAAARDIRETFRRMGMNDEETVALIAGGHTFGKAHGAGPATHVGPEPEAAPIEAQGLGWISSYGKGKGSDTITSGIEGAWTPTPTQWDTSYFDMLFGYDWWLTKSPAGAWQWMAVDPDEKDLAPDAEDPSKKVPTMMMTTDLALRFDPEYEKIARRFHQNPEEFAEAFARAWFKLTHRDMGPKTRYLGPEVPKEDFIWQDPIPEVDYELTEAEIEEIKAKILNSGLTVSELVKTAWASASTFRNSDKRGGANGARIRLAPQKDWEVNEPERLAKVLSVYEDIQRELPKKVSIADLIVLGGSAAVEKAARDAGFDVKVPFFPGRGDATQEQTDVESFAVLEPFADGFRNYQKQEYSVPPEELLVDKAQLLGLTAPEMTVLVGGLRVLGANYRDLPHGVFTDRIGVLTNDFFVNLLDMNYEWVPTDSGIYEIRDRKTGEVRWTATRVDLIFGSNSILRSYAEFYAQDDNQEKFVRDFINAWVKVMNADRFDLVKKARESVTALQSTFLRRSG

SEQ ID NO: 1996 - protein, 345 aa, Streptococcus pneumoniae R6
MAKKIVALVGDGIGPEIMEAGLEVLEALAEKTGFDYEIDRRPFGGADIDAAGPPLPDETLKASREADAILLVAIGSPQYDGVAVRPEQGLMALRKELNLYANIRPVKIFDSLKYLSPLKPERISGVDFVVVRELTGEIYFGDHILEERKARDINDYSYEEVERIIRKAFEIARNRRKIVTSIDKQNVLATSKLWRKVAEEVAQDFPDVTLEHQLVDSAAMLMITNPAKFDVIVTENLFGDILSDESSVLSGTLGVMPSASHSENGPSLYEPIHGSAPDIAGQGIANPISMILSVVMMLRDSFGRYEDTERIKRAVETSLAAGILTRDIGGQASTKEMMEAIIARL

SEQ ID NO: 1997 - protein, 394 aa, Pariana radiciflora
EPARTEDPAISIAGSVQSQKLAVRAISRLQALPGGDVKLLCDTVVEDIRELTGYDRVMVYRFHEDEHGEVVAESRRADLEPYLGLHYPATDIPQASRFLFRQNRVRMIADCHTAPVRVIQDPALPQPLCLVGSTLRAPHGCHAQYMANMGSIASLVMAVIISSGGDDSHNSSRGGIPSAMKLWGLVVCHHTSPRCIPFPLRYACEFLMQAFGLQLNMELQLAHQLSEKHILRTQTLLCDMLLRDSPTGIVTQSPSIMDLVKCDGAALYYHGKYYPLGVTPTEAQIKDIIEWLTLCHGDSTGLSTDSLADAGYPGAAALGDAVCGMAVAYITPSDYLFWFRSHTGKEIKWGGAKHHPEDKDDGQRMHPRSSFKAFLEVVKSRSLPWENAEMDAIH

SEQ ID NO: 1998 - protein, 150 aa, Oryza sativa
  unsure (1)..(150): unsure at all Xaa locations
MVDAWWPLLAAAIPAVVAGQAFRVKRRRDEEQRLKAARGREKSSDEVFVCERVCTSKRMLKKVGAFSKDPIPETCVTVCGVSELDACADACARTVCVNQHQVPNWNDVCLKRCQSECLKLSSTXSCSIPHCKPSLFVPCFWYKPSSSSCS

SEQ ID NO: 1999 - protein, 337 aa, Streptococcus mutans UA159
MRRKRYMSETKVVALREAINLAMSEEMRKDEKIILMGEDVGIYGGDFGTSVGMLAEFGEKRVKDTPISEAAIAGSAVGAAQTGLRPIVDLTFMDFVTIAMDAIVNQGAKANYMFGGGLKTPVTFRVASGSGIGSAAQHSQSLEAWLTHIPGIKVVAPGTVNDAKALLKSAIRDNNIVIFMEPKALYGKKEEVNLDPDFYIPLGKGEIKREGTDVTIVSYGRMLERVLKAAEEVAAEDISVEVVDPRTLIPLDKDLIINSVKKTGKVILVNDAYKTGGFIGEIASVITESEAFDYLDAPVLRLASEDVPVPYSHVLETAILPDVAKIKEAIYKQVRKR

SEQ ID NO: 2000 - protein, 415 aa, Rhodospirillum rubrum
MTSLAPPLAAGLASPTPEDLRDYLEVEHRLGAHNYKPLDVVLTRGQGVWVWDVAGRRYLDCLSAYSAVNQGHCHPRILEALIAQAGRLTLTSRAFHNDQLAPFYEEICALTGSHKVLPMNSGAEAVESALKCVRKWGYREKGVAEDQAEIIVCSDNFHGRTIAIVGFSSDPDARRDFGPFAPGFRCVPFGDGDALEAAITPRTVAVLIEPIQGEAGVIIPPPGYLKRVRDLCTAQGVMLILDEIQTGLGRTGALLAEEHEGIEADLTLVGKALSGGFYPVSAVLSNSEVLGVLRPGEHGSTFGGNPLACAVARMALKVLVDEDMIGNAARQGAYFLEKLRGLGNPLIRAVRGRGLMLAVEFAPEAGGARPFCEKLKDKGILCKETHRDIIRFAPPLVITEKEIDWAMERIAEVIG

SEQ ID NO: 2001 - protein, 113 aa, Zea mays
  unsure (1)..(113): unsure at all Xaa locations
MNRKPGDWDCRACQHLNFSRRDACQRCSEPRGVGDRSGGGGDLGGRGGSSXFGGGFGAGSDVRPGDWYCSCGAHNFASRSNCFRCSAYKEEAAGAFDSDMSRSRGYAGFGSGA

SEQ ID NO: 2002 - protein, 385 aa, Clostridium acetobutylicum
MKNISILGATGSIGTQTLDVIRNDSEAFKLLAVSAHSNFKKMIEIIDEFKPELVVMVDKLAYNKVLDYCCEKKLKTSVKVGYEAFNEVASYKDSNIVVTSIVGMIGLIPTLEAIKAGKDIALANKETLVVAGELVTKEAKKYGVNILPVDSEHGAIFQCLQGNKYKDINKILLTASGGPFRGKSFDELNNVTLNDALNHPKWTMGRKITIDSATLMNKGLEVIEAHWLFNVDYEKIQVLVHPQSIVHSMVQYKDGSVIAQLGPTDMRLPIQYALNYPVRKERIVEPVDFYSTPDLHFEKPDMDTFRCLRLAYDAGMAGGIMPAILNSANEYAVDLFLKDKIKFTNIQEIIEDALNHFENVNNLTANTIINKSNEVTKYLKGKIGF

SEQ ID NO: 2003 - protein, 382 aa, Persea americana
MGAGGRMSVVTPSVKKDVLERVPIAKPPFTFGQLKKAIPPHCFNRSIPRSMSYVVSDLTISSILYYLATTYIPLLPSPLSYFIAWPLYWALQGCVLTGVWVIAHECGHHAFSDYSWLDDTVGLILHSFLLVPYFSWKYSHRRHHSNTGSLTSDEVFVPKPKSQMPWFSKYLNNPPGRFLTLAFSLTLGWPLYLAFNVSGRKYDRFACHFDPYGPIYSDRERLQILISDLGVLAVLCGLFRLVAVCGLGWVVCVYGVPLLIVNGFLVLITFLQHTHPSLPHYDSEEWDWLRGALATVDRDYGVLNKVFHNITDTHVAHHLFSTMPHYHAMEATKAIRPILGDYYHSDGTPVYKAMYREAKECVYVEPDEGSGVKGVFWYRNKF

SEQ ID NO: 2004 - protein, 535 aa, Rhodotorula sp. CBS 8446
MLALVCVGLFLYLLCKYRSHAIATSDRTDLAGPKGWPLMGVFKFPLPTLSVTYVVVDVTEKTLSGNLIFYATQSSTRGLEWGVRFVKTYGHAWTLSVPGLRLIDISTRPDWIEYVQKTNYHNYVKGSAFRNRLSDIIGNGIFVTDGRVWQFQRKVTSHIFTGRSFQDAICPAIAEELRSLNKLLDNYADTGETVDLQDVFYRFTFQAFGRFAFNLDLRNLEIDHKPVPFTTAFDQCQKPSLDASSTRSGAFASALPLPAVEYQTPPSCFRLCLRNDDKRAALLAKKDAKVPSDLLTMFMTARYDDSRPLSRVEIRDAIINLLLAGRDTTAQSLTWALYRLVDNPAHQRLVREEICGQLAGGTEPVTLENVKNLVQTQAAHLESLRLHPPVPRIVKQAVKDDALPNGGPLIKAGEFIRLSDWALGRNEEVWGADAKEWKPSRWIDDEGRPIQYSQWKAHFFNGGPRICLGKSLATLEGVAVIANLLHRYNIAFAPGWWENVEKTGRIAGDLEETPLYGPALTLPMKSPFWVTISRR

SEQ ID NO: 2005 - protein, 831 aa, Paenibacillus sp. TS12
MAQLTLEEKAGLCSGESFWRTKAIDRLGIPSIMMTDGPHGLRKQAGEADHLGLNESIPATCFPTAAGLASSWDRELVRKVGEALGKESQAENVSILLGPGANIKRSPLCGRNFEYFSEDPYLTGELAAAHIAGVQSQGVGTSLKHFAVNNQEHRRMTTDAVVDERTLREIYLTGFEIAVKKSQPWTVMSAYNRMNGTYCSENETLLTRILKEEWGHEGIVVSDWGAVNEAAASVAAGMELEMPSSHGIGQRKIVAAVESGELSVEALDRAVTRLLTVIFKAVDSRKTDATYDKEAHHLLAREIARESMVLLKNEGNLLPLAKTGKLAIIGAMAEQVRYQGGGSSHIKPTKLDSIRDEIEKSARSAEIRYSKGYLLESDESDESLLNEAKQAAADSDVAVLFVGLPDRYESEGYDRTHLNLPANHIELIERIASVQPNVVVILSNGSPVVMPWLGHAKAVLEAYLGGQAAGGAIADLLFGDANPSGKLAETFPHSLKHNPSHPFYPGEGDRTEYREGIFVGYRYFDAKDIEPLFPFGHGLSYTAFSYSGLKLDKSEMTDRDIVQVRVNVKNTGGRFGKETVQLYVHSRNSSVIRPEKELKGFAKVSLNPEEEQTVTFALDKRSFAYYNAELKEWHAETGEYEILIGSSSRDIALRTALTVQSTTEIVPTFHRNTTLGELMENPATLPILAHLQSMAPQQQAQSDSVSPDMMMAMMRYMPLRALLPFTGGAMTEETLGMLLEQFNQAVRGEKNQPHASEGSSAAFNEYSTLGDLLAHEAAVAVLEKHLPGISTNPMISMGKGLTLKQLAGIPQANIPEELISTIVTDLSVVRG

SEQ ID NO: 2006 - protein, 253 aa, Mycobacterium leprae
MTDAAAKVSAAPGRGKPAFVSRSILVTGGNRGIGLAVARRLVADGHRVAVTHRASVVPDWFFGVECDVTDNDAIGAAFKAVEEHQGPVEVLVANAGITSDMLIMRMSEEQFQKVIDVNLTGVFRVAKLASRNMIKQRFGRYIFMGSVVGLSGVPGQANYAASKSGLIGMARSLARELGSRSITANVVAPGFIDTEMTRAMDSKYQEAALQAIPLGRIGAVEEIAGAVSFLASEDAGYISGAVIPVDGGLGMGH

SEQ ID NO: 2007 - protein, 147 aa, Pyrobaculum aerophilum str. IM2
MVDVKRLAADILGVGVSRIKISPEAAERLEEVVTKDDVRALIDQGLIWAEPERGVSRGRWRVRHIKKKKGRRRGHGSRKGPRTDEEEAWKEKVRAMRRFLNTLKRKGKLEPRVWRQLYRMVKGNYFRDLDHLKTYINEHKLAKEPVR

SEQ ID NO: 2008 - protein, 535 aa, Pseudomonas putida KT2440
MSESEPCTQGLLKQFQNLRQILMSNYTEAGRPPDVAADAGNTQRSKGLAKGRLGLLASVVLGISTIAPVYTLTGALGPTVREVGAHLPAVFIVGFLPMLLVALGYRELNSAEPDSGTSFTWSARAFGPMIGWIGGWGLVVATTIVLSNLAGVAVDFFYLFLGQITGKHELAALADNLLINIVTCCVFIGLAVWICCRGIATTMTVQYGLVALQLLVLIGFAFAAFGGTTAPPPLAFDFAWFNPFGVESFSAFAAGLSLSIFIFWGWDTCLTVSEESVGSEEVPGKAATWTVMLILGLYLFTAIATLQFAGISETGLGLNNPRIQENVFAHLAGPVMGPLAILMSIAVLASTAASLQSTFVAPARTLLAMGYYGAVPQKFASVCPRSQTPRYATICAGLAAGLFYVTMRTLSENVLADTITALGMMICFYYSLTAFACVWYFRGSLFDSLRHFIMRGLCPLLGGVILSVIFVRTAIDSASPDFGSGSHVGGLGLVFVIAAIISVLGIGLMMLSRMRAPAYFLGATLRQQATLPLQD

SEQ ID NO: 2009 - protein, 141 aa, Zea mays
MAAADVEYRCFVGGLAWATSNESLENAFASYGEILDSKVITDRETGRSRGFGFVTFSSENSMLDAIENMNGKELDGRNITVNQAQSRGGGGGGGGYGGGRGGYGGRREGGGGGYGGGGGYGGRREGGGGGYGGGGGGGWRD

SEQ ID NO: 2010 - protein, 167 aa, Zea mays
MAALSTSLSLSRNTQQLHPSSGFSLKPIARRANVSFGLNPSKKIQLSAPRGKRILTIPSAYRDDDSSGSTGLFVGGFILGGLIVGALGCVYAPQISKAIAGADRKDLMRKLPKFIYDEEKALEKTRKVLADKIAQLNSAIDDVSSQLKSEDTPNGAALSTDEVEATA

SEQ ID NO: 2011 - protein, 233 aa, Zea mays
  unsure (1)..(233): unsure at all Xaa locations
MLLPTRRLPAAPSGPAVHPYISPARPSLRFRRQHGRAATARATSATPPVFGDTLLGLYEKERLGLSRYADEESREDVFWETLDADLQYWTRSLRPVQWYPGHIAKTEKELKGQLKLMDVVIEVRDARIPLATTHPKMDSWLGNRRRIIVMNREDMVSADDRNAWATYFSSQGIXVIYSNGQLXMGTMKLGRMAKSAASTVNTRRREKGLLPRPVRAGIVGYPNVGKSSLINRL

SEQ ID NO: 2012 - protein, 475 aa, Glycine max
MAVSLAMRLVRRRSPPLLWRRSFSMSAVDAEKEVVVVPELPPFDYSPPPYVGPTAEEILAKRREYLSPSILHSYKNPVNIVEGKKQYLFDEKGRRYVDAFGGIATVCCGHCHHDVVEAIVNQTKKLQHSTVLYLNHVITDFAQALASKLPSDLKVVFFTNSGTEANELAMLIARLYTGCHDIISLRNAYHGNATGTMAATAQSIWKFNVVQSGVHHAVNPDPYRGIFGSDGEKYARDVQDIINFGTSGNVAAFISEAIQGVGGIIELAPGYLPVVYNTIKKAGGLFIADEVQAGFGRTGSHFWGFEAHNVVPDIVTIAKGIGNGIPLGAVVTTPEIAEVLTRRSYFNTFGGNPVCTAAGLAVLKVIEKEQLQQNAFVVGSHLKERLTALKDKYELIGDVRGRGLMLGVELVTDRELKTPAKNETLHVMDQMKELGVLIGKGGYYGNVFRITPPLCFTKEDADFVADAMDLTLSRM

SEQ ID NO: 2013 - protein, 481 aa, Arabidopsis thaliana
MRKLTAVNSLLKRNNYLLPRHGSSQTAAQRTSSVRETETETKLPKMPPFNYSPPPYDGPSTAEIIAKRREFLSPALFHFYNTPLNIVEAKMQYVFDENGRRYLDAFGGIATVSCGHCHPEVVNSVVKQLKLINHSTILYLNHTISDFAEALVSTLPGDLKVVFFTNSGTEANELAMMMARLYTGCNDIVSLRNSYHGNAAATMGATAQSNWKFNVVQSGVHHAINPDPYRGIFGSDGEKYASDVHDLIQFGTSGQVAGFIGESIQGVGGIVELAPGYLPAAYDIVRKAGGVCIADEVQSGFARTGTHFWGFQSHGVIPDIVTMAKGIGNGIPLGAVVTTPEIAGVLSRRSYFNTFGGNPMCTAAGHAVLRVLHEEKLQENANLVGSHLKRRLTLLKNKYELIGDVRGRGLMLGVEFVKDRDLKTPAKAETLHLMDQMKEMGVLVGKGGFYGNVFRITPPLCFTLSDADFLVDVMDHAMSKM

SEQ ID NO: 2014 - protein, 322 aa, Brucella suis 1330
MALPDILKDRLRIPVVGAPLFIISHPALVLAQCKAGVVGSFPALNARPEAQLDEWLAEITEDLTAYNAVNPGRPAAPFAVNQIVHRSNKRLEHDLGLCVKYKVPIVISSLGAVPEVNAAIHSYGGIVLHDVINNRHANSAIRKGADGLIAVAAGAGGHAGSLSPFALIQEIRSWFDGPLLLSGAIANGRSILAAQAMGADLAYMGSPFIATTEARAVDAYKQMIVDSDSSDIVYSNYFTGIAGNYLKPSIAKAGLDPDNLPQADPSKMDFEKAQQEGAKAWKDIWGCGQGIAAIKEIAPTASLVDRLEREYRDARAKLCAGA

SEQ ID NO: 2015 - protein, 140 aa, Glycine max
MMALNISSPAEVKSIFFADYFKSNCITAKFTGGFAFKRKERGAASGGRVYCSVLAPPPPPAWPGRAVPEQGSKTWDGPKPISIVGCTGSIGTQTLDIVAENPDKFKVVALAAGSNVTLLADQVKRFKPQLVAVRNESLIA

SEQ ID NO: 2016 - protein, 150 aa, Pyrococcus furiosus DSM 3638
MNTLKMQRRIAAEILKCGENRIWIDPERIDDVASAITREDIKRLIKEGVIKKKPIKGQSRYRAKIRHEQKKKGRHRGPGSRKGKKTARMGKKELWIKTIRALRKELRKLKAQKKIDRKTYRMLYIRAKGGQFKNKHQLYLFLEEHGLLKK

SEQ ID NO: 2017 - protein, 220 aa, Triticum aestivum
  unsure (1)..(220): unsure at all Xaa locations
MNRLFGKAKXPKAPPPSLTDCIGTVDSRAESIDKKISRLDAELVKYKDQIKKMREGPAKNMVKQKALRVLKQKRMYEQQRDNLAQQSFNMEQANYTIQSLKDTKTTVDAMKLGVKEMKKAYKQVKIDQIEDLQDQLEDMMEDANEIQEALSRSYGTPELDEDDLEAELDALGDELLADEDSSYLDEAASAPAIPEGVPTDTKNKDGVLVDEFGLPQIPAS

SEQ ID NO: 2018 - protein, 249 aa, Oryza sativa (japonica cultivar-group)
MECKTCATSCRKEEFFHGSFAALNSDAYLIYLIYLAVGTGFVQNDMLASFGRDDSIKGIPSLAARHSQHRRLEVGCRASSLASFSYPELTSKPRWWWRTVACVPYLLPLHNMWSYADVIYQLHTYLQGFSLVYTFIDTMTLFPGWLLLVIFMTVYFFVVRRKWSPHFLRFHVILAILLDTGSQAVATMCTWMPSIVYQGTPMQYFWMAIAFIQIFTVLECMRCALAGMYPNVPFISHTAFIHSDLNLFR

SEQ ID NO: 2019 - protein, 114 aa, Zea mays
FQGRVMLVGLLCKNAATCICIWELQKMTLLWKEVDRMPNLWCLEFYGKHMKMKCLGNSGLLMLSLKAKHMNRLVTYNLLKREWQKVPDCMLPWSRKRQWITCGTAFDPVPCALV

SEQ ID NO: 2020 - protein, 751 aa, Geobacillus stearothermophilus
MENQNRQNAAQCPFHGSVTNQSSNRTTNKDWWPNQLNLSILHQHDRKTNPHDEEFNYAEEFQKLDYWALKEDLRKLMTESQDWWPADYGHYGPLFIRMAWHSAGTYRIGDGRGGASTGTQRFAPLNSWPDNANLDKARRLLWPIKKKYGNKISWADLFILAGNVAIESMGGKTIGFGGGRVDVWHPEEDVYWGSEKEWLASERYSGDRELENPLAAVQMGLIYVNPEGPDGKPDPKAAARDIRETFRRMGMNDEETVALIAGGHTFGKAHGAGPATHVGPEPEAAPIEAQGLGWISSYGKGKGSDTITSGIEGAWTPTPTQWDTSYFDMLFGYDWWLTKSPAGAWQWMAVDPDEKDLAPDAEDPSKKVPTMMMTTDLALRFDPEYEKIARRFHQNPEEFAEAFARAWFKLTHRDMGPKTRYLGPEVPKEDFIWQDPIPEVDYELTEAEIEEIKAKILNSGLTVSELVKTAWASASTFRNSDKRGGANGARIRLAPQKDWEVNEPERLAKVLSVYEDIQRELPKKVSIADLIVLGGSAAVEKAARDAGFDVKVPFFPGRGDATQEQTDVESFAVLEPFADGFRNYQKQEYSVPPEELLVDKAQLLGLTAPEMTVLVGGLRVLGANYRDLPHGVFTDRIGVLTNDFFVNLLDMNYEWVPTDSGIYEIRDRKTGEVRWTATRVDLIFGSNSILRSYAEFYAQDDNQEKFVRDFINAWVKVMNADRFDLVKKARESVTALQDCSIIRSDVTNKLQ

SEQ ID NO: 2021 - protein, 464 aa, Sarcandra glabra
SGKPFYAIIHRVTASLIIDFEPVKPYEVPMTAAGALQSYKLAAKAIARLQSLPGGSMEKLCDTVVQEVFDLTGYDRVMAYKFHEDDHGEVISAITKPGLEPYLGLHYPATDIPQAARFLFMKNKVRMICDCDAKPVKVFQDEKLVFDLTLCGSTLRAPHSCHLQYMANMNSIASLVMAVVVNEGEEDDSLEPGQQQQRKRKRLWGLIVCHNTTPRFVPFPLRYACEFLMQVFAIHVNKELELESQIQEKNIFRTQTLLCDMLMRDTPLGIVSQNPNVMDLVKCDGAALLYKKKIWRLGLTPSETQIHDISFWLSEYHMDSTGFSTDSLNDAGYPGALAIGDAVCGMAAVWITSKDMLFWFRSHTAAEVRWGGAKHDPDDKDDNRGMHPRSSFKAFLEVVKTRSLPWKDNEMDAIHSLQLILRGTFKDVENSHTKTMIYSQLNDLKLEGMEELQAVTNEMVRLIE

SEQ ID NO: 2022 - protein, 213 aa, Triticum aestivum
PPRCMYTAQLVGTVVAGVVNLAVAWWMLDSIDNICDVEALHPDSPWTCPKYRVTFDASVIWGLIGPGRLFGQHGLYRNLVWLFVVGAVLPVPVWLLSRAFPEKKWIALVNVPVISYGFAGMPPATPTNIASWLVTGTVFPAVPFRYRKGWWQKYNYVLSAALDAGTAFMGVLIFFALQNAHHDLKWWGTEVDHCPLATCPTAPGIVVKGCPVF

SEQ ID NO: 2023 - protein, 786 aa, Zea mays
  unsure (1)..(786): unsure at all Xaa locations
MQSDQPVISLRPGGGGGPRAGRLFSPAFATSVSGDFLRLHVGGASGISKIGDSHFEPRERVRYTRDQLLELRELVDVSEDILRLKQEIDIELHGEDQTWIHNDSAVQGQVQAQTQAQNRYAETDSRDWRARSAQPPSTNEEKSWDNISEAKEAYTSSGRQQEQANRQDQLSSQFASKAQFGSTPALIKAEVPWSARXGNLSEKERVLITDKYNCFKLTPEKFDLLKGQLMEAGITTADILKDVISLIFEKAVFEPTFCPMYAQLCSDLNEKLPTFPSEEPGGKEITFKRVILNNCQEAFEGASNLRAEISKLTGPDQGMERRDKERLVKLRTLGNIRLIGELLKQKMVPEKIVHHIVMELLGSGTDKKTCPEEEDVEAICHFFNTIGKQLDENPKSRRINDTYFIQMKELTMNPQLAPRLRFMVRDVIDLRSNNWVPRREEIKAKKISEIHSEAEKNLGLRPGAASGIRNGRSSPGGALLPGGAFPMNRPGTGGMMPGMPGSRKMPGMPGLDNDNWEVARSKSMPRGDSIRNQGPLLNKPSTVHKTSSINTRLLPQGSGAGLIGKSALLGTGVPPSRPLSFTPGPTPAQTTPKPIRAAPAVVPAPDKQASAPKGNTAELQKKTIALLEEYFGIRILDEAHQCIVELQSPDYYPEIVKEAVNLALDKGTNFVDPLVRLLEHLYTKKIFKTQDLESGCLLYGTLLDDIGIDLPKAPAQFGEIIARLTLLGALRFEALEVILKKMEDTYNRKAVSNAFMKTLEANPSGQAILGSPAAAAVIDACNSLLE

SEQ ID NO: 2024 - protein, 387 aa, Glycine max
MAPKKVLLLCGDFMEDYEAMVPFQALQAFGLAVDAVCPGKKSGDVCRTAVHVLAGAQTYSETVGHNFSLNATFDEVDAASYDGLWVPGGRAPEYLAHVPGVVELVTKFVSLGKQIASICHGQLILAAAGVVKGRTCTAFPPVKPVLVAAGAHWVEPDTEAATVVDGDLITAATYEGHPELIRHFVKALGGKISGFDKKILFICGDYMEDYEVKVPFQSLQALGCHVDAVCPSKKAGDTCPTAVHDFEGDQTYSEKPGHTFALTATFDDVDPSGYDALVIPGGRAPEYLALNESVIALVKYFFENKKPVASICHGQQILSAAGVLKGRKCTAYPAVKLNVVLSGATWLEPDPISRCFTDGNLVTGAAWPGHPEFIAQLIALLGIQVSF

SEQ ID NO: 2025 - protein, 202 aa, Oryza sativa
MIRVREEIKDDEERGEGTKKTVRREEREEEGIKLPHKHHIITTTKIKLDNNLRNLNRTYSNDGLKWESRPIQGPEDTAHYSTPTSRAPPRRPPRRRSQPLLVDSKLGSGESRRRITAAAAARRFDLRSRHLAARIPMARLHWLEAMLPLGIIGGMLCIMGNAQYYIHRAAHGRPKHIGNDNWDMAMARRDKVLLHQASSENN

SEQ ID NO: 2026 - protein, 349 aa, Glycine max
MRDKTVLVTGGAGYIGSHTVLQLLLGGFRTVVVDNLENSSEVAIHRVRELAGEFGNNLSFHKVDLRDRAALDQIFSSTQFDAVIHFAGLKAVGESVQKPLLYYNNNLTGTITLLEVMAAHGCKKLVFSSSATVYGWPKEVPCTEEFPLSAMNPYGRTKLIIEEICRDVHCAEPDCKIILLRYFNPVGAHPSGYIGEDPRGIPNNLMPFVQQVAVGRRPALTVFGNDYNTSDGTGVRDYIHVVDLADGHIAALLKLDEPNIGCEVYNLGTGKGTSVLEMVRAFEMASGKKIPLVMAGRRPGDAEIVYASTKKAERELKWKAKYGIDEMCRDQWNWASKNPYGYGDQGSTD

SEQ ID NO: 2027 - protein, 197 aa, Porteresia coarctata
GQTPVFPRILGHEAGGIVESVGEGVKELVPGDHVLPVFTGECKDCAHCKSEESNMCDLLRINVDRGVMIGDGQSRFTIKGKPIFHFVGTSTFSEYTVIHVGCLAKINPEAPLDKVCILSCGISTGLGATLNVAKPKKGQTVAIFGLGAVGLAAMEGARLSGASRIIGVDLNPAKFEQAKKFGCTDFVNPKDHSKPVQ

SEQ ID NO: 2028 - protein, 683 aa, Nostoc sp. PCC 7120
MEKRYSNVVAELIKKKQFIPFEVCFMTNSQPGYSLLSDITKEQSKEIQRLVDYTNVESLPEIWPIAGKKFGETLALYNPHAKPEVKITYQQLADKIQLFASGLQALGVQAGDRISLIADNSPRWFIADQGIMTAGAVDAVRSSQAEKEELLYIVAHSGSTALVVEDLKTFNKLQDRLHDLPIQVVVILTDETPPTEQSLKVLNFLQLIEVGKNHTFVPVKRKRNELATLIYTSGTTGKPKGVMLSYSNLLHQVTTFRVVVQPKVGDTALSILPSWHSYERTVEYYLLSQGCTQIYTNLRSVKADLKQYKPNYMVAVPRLWESIYEGVQKQFREQPANKQRLIKFLLGMSEKYIKAQRIAQGTSLDHLHASSLERLIAKVLEFAFLPFHVLGQKLVYGKVKEATGGRFKQVISGGGALPKHIDTFFEIIGVQILQGYGLTETSPVTNVRRPWRNFIGTSGQPIPGTEVKIVDPETRQPLPVGKRGLVLLKGPQVMQGYYQNPEATAKAIDPQGWFDSGDLGWVTPDNELVLTGRAKDTIVLSNGENIEPQPIEDACLRSPYIDQIMLVGQDQRSIGALIVPNVEALAKWAESQNLVLSVEDDNLTSSSSQKINLESKMIQGLFRQELNREVQNRPGYRPDDRVGPFKLILEPFSIENGLMTQTLKLRRHVVTERYRDIINAMFA

SEQ ID NO: 2029 - protein, 110 aa, Pyrococcus abyssi
MVKFCPKCGSIMIPDKKRGVFVCRRCGYEEPINPEDAKAYKRTEEVKHKPDEGVIVVEQDFSTLPTAKVTCPKCGYHEAWYWELQTRAGDEPSTIFYKCKRCGYVWRSYE

SEQ ID NO: 2030 - protein, 341 aa, Salmonella typhimurium LT2
MKVKAVFINKPGEVETRWVDYPHKKENEVLIKVDAAGICGSDIGAFRGTNPLVTYPRIIGHEVTGIVLQEGAGMPDNIKEGDRVIVDPYIYCGHCYPCSVGRTNCCENLNVIGVHVDGAMQEVVTHPAHLIHKIPDNVPSEMAPLAEPLTIALHALHRANVKAGEYVAIIGAGAIGLMAALSARHYKATPILIDIVEERLRYAQKLGVPYVLNAADDQVIDAIKNITHGTMAQVVIEASGANSAIRNTLDLASFAGRISFTGWPKQETSLPTNLITYKELDLRGSRTSAGEFDEALRMLSTLEINPQDVVSKVVNLDEIPDAVKELDRYPERYLKINAVFH

SEQ ID NO: 2031 - protein, 143 aa, Zea mays
MAMAYKMATEGMNVKEECQRWFMEMKWKKVHRFVVYKIDERSRAVLVDKVGGPGEGYEELVAALPGDDCRYAVFDFDFVTVDNCQKSKIFFIAWSPAASRIRAKILYATSKQGLRRLLDGVHYEVQATDPSEMGFDVIRGRAQ

SEQ ID NO: 2032 - protein, 442 aa, Burkholderia fungorum
MSTVFHRLPKQLLPVAVAGEGIEIIDSTGKRYIDASGGAAVSCLGHSNQRVIDAIKRQSQQLPYAHTSFFTTEPAEALADRLVASAPQGLEHVYFVSGGSEAIEAALKLARQYFVEKGEPRRRHFIARRQSYHGNTLGALAIGGNAWRREPFLPILIEAHHVSPCYAYREQRADETEEAFAQRLADELERKILELGADTVAAFIAETVVGATAGAVPPVREYFRKIRAVCDRYGVLLILDEIMSGMGRTGYLYACEEDGVAPDILTIAKGLGAGYQPIGATLVSERIYQAIVGGSGFFQHGHTYIGHATACAAALEVQRVIEEDNLLPNVLARGEQLRVRLREHYAQHPHIGDVRGRGLFVGVELVRDRAGKTPFDAALKLHAAIRREAFARGLMVYPMGGTVDGKIGDHVLLAPPFICTARDIDEIVSRLTDAIDGALAAV

SEQ ID NO: 2033 - protein, 142 aa, Zea mays
LFLTFRNRTVAVWNFRGDLVTSFEDHLLWHHDCSTNNIYITSDQDLIISYCKSEAVAEDGTVVPVGSINMSEIMTGKCIAKITANDPALSAPPRRNGRSKRRSSVWSTVPEALEDVTALFYDEDRNEIYTGNSHGLVHVWSN

SEQ ID NO: 2034 - protein, 375 aa, Mycobacterium tuberculosis H37Rv
MKTKGALIWEFNQPWSVEEIEIGDPRKDEVKIQMEAAGMCRSDHHLVTGDIPMAGFPVLGGHEGAGIVTEVGPGVDDFAPGDHVVLAFIPSCGKCPSCQAGMRNLCDLGAGLLAGESVTDGSFRIQARGQNVYPMTLLGTFSPYMVVHRSSVVKIDPSVPFEVACLVGCGVTTGYGSAVRTADVRPGDDVAIVGLGGVGMAALQGAVSAGARYVFAVEPVEWKRDQALKFGATHVYPDINAALMGIAEVTYGLMAQKVIITVGKLDGADVDSYLTITAKGGTCVLTAIGSLVDTQVTLNLAMLTLLQKNIQGTIFGGGNPHYDIPKLLSMYKAGKLNLDDMVTTAYKLEQINDGYQDMLNGKNIRGVIRYTDDDR

SEQ ID NO: 2035 - protein, 181 aa, Leptospira interrogans serovar lai str. 56601
MMKSNNQILEYMGKKPQIHESVFLAPGSQVVGDVVIGKNSSIWFQTLVRGDVNYIRIGENVNIQDLTVIHVARDVYPVEIGNNVSIGHRATIHGCKLKDNSFVGMCATLMDDVEVGEFAFIGAGALVTPGKKIPPGVLVMGSPGKIIRDITDKEKEIIVRTTNNYIKYKENYMQDPFYNRG

SEQ ID NO: 2036 - protein, 439 aa, Aster tripolium
MKILLGVGINGGLFGSCVSSRSKVDSSTSGISSHFEIKSTNNVSKDQPTTSNSEHNLPTLTPEDELKVASRLRKFGFNDLKMATRNFRPESLLGEGGFGCVFKGWIEENGTAPVKPGTGLTVAVKTLNHDGLQGHKEWLAEVNFLGDLGNPNLVKLIGYCIEDDQRLLVYEFLPRGSLENHLFRRSLPLPWSIRMKIALGAAKGLAFLHEEAKRPVIYRDFKTSNILLDAEYNAKLSDFGLAKDGPEGDKTHISTRVMGTYGYAAPEYVMTGHLSSKSDVYSFGVVLLEMLTGRRSMDKKRPNGEHNLVEWARPHLGERRRFYRLIDPRLEGHFSIKGAQKAAQLASRCLSRDPKARPLMSEVVDCLKPLPALKDMAGPSYYLQTVQPERAGSSPDPNRTRVGSFSRNGSQHPRTLSIPNASPRHNQFLQDSPNPNGKQ

SEQ ID NO: 2037 - protein, 92 aa, Oxalis andina
  unsure (1)..(92): unsure at all Xaa locations
GINISGTNGEVMPGQWEYQVGPSVGIEAGDHVWASRYILEXITEQAGVVLTLDPKPIEGDWNGAGCHTNYSTKSMRDEGGFEVIKKAILNLS

SEQ ID NO: 2038 - protein, 222 aa, Triticum aestivum
MAGEKGLVLLNFWVSPFGQRCLIALAEKGLPYEYVEENLMAGKSDRLLRSNPIHKKIPVLLHDGRPVNESLIILNYLDDAFPDTPSLLPSDPYERSQARFWADYVDKKVYDCGTRLWKLKGEPHAQARAEMVEILKNLDGALGDKSFFGGDAFGFVDAAFAPFTSWFHSYEKYGEFSVAEVAPKIAAWAKRCGERESVAKSLYSPDKIYEFIGVLKKMHGVE

SEQ ID NO: 2039 - protein, 364 aa, Pseudomonas syringae pv. tomato str. DC3000
MNNKKLRIAAIAGDGIGLEVLPEGVRVVQAAAARHGLELQFEYFEWASCDYYLEHGKMMPDDWFDQLKSFDAIFFGAVGWPDKVPDHISLWGSLLKFRREFDQYANIRPVRLFPGVPCPLANRKPGDIDFVVVRENTEGEYSSLGGIMFENTDNEFVLQESVFTRRGVDRILKFAFEMARKRERKHVTSATKSNGMAISMPYWDKRTEAMASHYPEISWDKQHIDILCARFVLQPERFDVVVASNLFGDILSDLGPACAGTIGIAPSANLNPERRFPSLFEPVHGSAPDIFGKNIANPIAMIWSGALMLEFLGQGDKRFTAAHDEIIMAIEQAIASGEVTPDLGGQRSTQEVGAAIAGRVGAAR

SEQ ID NO: 2040 - protein, 136 aa, Glycine max
  unsure (1)..(136): unsure at all Xaa locations
KRAXSDLVAKIXLSDLVXXFGMPIVEASRNXNVGLTVLKRKCREFGIPRWPHRKIKSLDSLIHDLQEEVKSQELEDREAALAVAKRQRMLESEKENIEKKPFMDIQSETKRFRQDVFKRRHRARAVGKHNSTVSST

SEQ ID NO: 2041 - protein, 185 aa, Glycine max
  unsure (1)..(185): unsure at all Xaa locations
MTNYGTIPTSSSPSTNLDFISRAKQRVKEGLGTRRXWKLMFNFRSFGSPRRGSETPSARVRENISYFQMNYAIVVLIVLFLSLLWHPISLIVFVVLMAAWLFLYFLRDEPLIIFGRLISDRVVLIVMAVLTVVLLLLTGAIGNILVALLIGAVLIVAHAALRKTDDLFLDEEEATGFSPPGAPLS

SEQ ID NO: 2042 - protein, 460 aa, Saccharomyces cerevisiae
MMLEGYTVQPPQSTLIGDIEIQDENANQEVKNVLYQGVQKGIKRLEKRQRRVALGDVTSQKANKIHNAIHNKFHQTKNNFEIENIRSSALVKEQQRDVRHEDSDYFLIDSSEGSSTDDEQVNEDAIDDLLSRRVNDQQIQADEVYEDFDGEMQDVIEEDVDSQIEPLSPINNDEIQTELDRAFEKYFRSVPNPLDDDTHDVVMVVEYASDIFYYLRELEVKYRPNPYYMQNQVELTWPFRRTMIDWLVQLHFRFQLLPETLYLTINIVDRFLSKKTVTLNRFQLVGVSALFIAAKFEEINCPTLDDLVYMLENTYTRDDIIRAEQYMIDTLEFEIGWPGPMPFLRRISKADDYDFEPRTLAKYLLETTIVEPKLVAAAPSWLAAGAYFLSRTILGSNDWSLKHVFYSGYTSSQIIPLASLILENCKNASRRHHSIWKKYFDQKHYRCSQIVEEWIVSTEA

SEQ ID NO: 2043 - protein, 198 aa, Gossypium barbadense
GQNPLFPRILGHEAGGVVESVGEGVIDVQPGDHVLPIFTGECKECPHCLSEASNMCDLLRINTERGGMLHDGHTRFSKDGKPIYHFLGTSTFSEYTVVHVGQVAKINPEAPLDKVCVLSCGMSTGFGATVNVAKPKKGGSVAIFGLGAVGLAAAEGARVCEASRIIGIDLNPNRFEEAKKFGCTEFVNPKDHNKPVQE

SEQ ID NO: 2044 - protein, 250 aa, Zea mays
MAKNYPTVSAEYSEAVEKARRKLRALIAEKSCAPLMLRLAWHSAGTFDVSSRTGGPFGTMKCPAELAHGANAGLDIAVRLLEPIKEEFPTLSYADFYQLAGVVAVEVTGGPEIPFHPGREDKPQPPPEGRLPDATKGSDHLRQVFGKQMGLSDQDIVALSGGHTLGRCHKERSGFEGAWTTNPLVFDNSYFKELLSGDKEGLLQLPSDKALLSDPVFRPLVEKYAADEKAFFDDYKEAHLKLSELGYADA

SEQ ID NO: 2045 - protein, 388 aa, Aspergillus parasiticus
MVLPTAPEPPTLLGYHRILSPSAGVRVSPLCLGTMSFGNGWKGVMGECDQATSFNMLDTFYESGGNFIDVANFYQGGDTERWVGEWMAQRQNRDEIVLSTKYTMGYTMFGPQKIKSNFQGNHAKSLRLSVKASLQKLQTDYIDLLYVHMWDFTTSVEEVMRSLNHLVANGKVLYLGVSDTPAWLVVKCNAFARANGLTPFSVYQGHWSSAFRDFERDILPMCESEGMGLAPWGVLGRGQFRSAEEFSREGRKMGPQDEKHRRLGEKLDQMAQQKNTKATSIAQAYVMHKAPYVFPVIGGRKVEHLKENIEALGLVLSEEEIREIDDAEPFDVGFPMNFLFETPTQSYRTNMTSKDIWQLSCNTRLETVPKQQPIEPLQGAKYFGSASK

SEQ ID NO: 2046 - protein, 452 aa, Azotobacter vinelandii
MQRRERSPSESYFWPAVLAVGLHLLVFAMLFVSFSMAPEMPPARPIIQATLYQMKSQSQATTQTNQKIAGEAKKTAARQYEVEQMEQKKNEQQVAMAKAAEQRKAEEARRAEADKRAAEEASRQKASEEAKKAAEETARQKAAEEAKKAVEAAAKQKTAEDAKKAAEEVAKQKAAEDAKKKVAAEAAKQKAAEEAKKKSTEEAARQKAAEEAKKKAAEEAAKQKAAEEAKKKAAEAAAKQKAAEDAKKAAQEAAKQKAAEEAKKKAAEEVAKQKAAEEAKKKAAEEAAKQKAAEEAKKKAAEDAKKKAAEEAKKKAAAEAARKAAEDKKAQALAELLSDNTERQQALAESRGNQVAGSFDDLIVSLVSQQWRRPPSARNGMSVEVLIQMLPDGTITSARVTRSSGDAPFDNSAVAAVRNVGRIPELQQLDRATFDRNYRQRRMIFKPEDLDL

SEQ ID NO: 2047 - protein, 212 aa, Eragrostis japonica
KSRFSINGKPIYHFVGTSTFSEYTVMHVGCLAKINPEAPLDKVCVLSCGISTGLGASINVAKPPKGSTVAVFGLGAVGLAACEGARIAGASRIIGVDLNPNRFEEARKFGCTEFVNPKDHNKPVQEVLAEMTNGGVDRSVECTGNINAMIQAFECVHDGWGVAVLVGVPHKDAEFKTRPMNFLNERTLKGTFFGNFKPRTDLPNVVELYMKK

SEQ ID NO: 2048 - protein, 455 aa, Lactobacillus plantarum WCFS1
MDLKHTPSSSNTNLDEFGYQQELKRTLSVKDLVIYGLIFMVPIAPMGIYGAVISVSQGMIALTYAIGMLAMFFTALSYGQMSQAFPVAGSVYAYAKLGINKSIGFLSGWMIILDYIFVPALLYIIAANSLKSLLPTIPTWLWLVGFIAINTLINVGGIAFTAIANRIFLIGELIVLAFFIILGSYGLMRGIGNGFTLKPFYDASHFNLNFVMTATSVAVLSFLGFDGISTLAEETTGGNQAVGKGILWSLLIVGALFIIQTYLAALIVPNWHSFNDLNTAFYVVAGKVGGPFLTDLTTIATILSWGFANALAAQAAISRILFGMARDHNLPHVLARVHPRFKTPYMSTLLVAIISLLVGLTFMNDSGTLSEIVNCGALTAFLVIHIAVINHFFIKQHSHDYWHHLIVPIIGFIIIGFVMINLNVLAKEIGGIWLLIGIGYYLILRVLQRNTEMNL

SEQ ID NO: 2049 - protein, 202 aa, Pseudomonas putida KT2440
MCVRRYPASSRIVMREKRVMRAHWLTVPVLALLASTSSWAADCPALLQGSLPELRGKGQVDLCERFAGKPLVVVNTASYCGFAPQFEGLEATYKEYHEQGLEMLGVPSNDFKQEDADSEKTAKVCYANYGVTFTMTKTQAVRGKDAIPLFAELASQSSAPKWNFYKYVVDRKGKVIGNFSSLTKPDDPAFRAAIEKAIASQP

SEQ ID NO: 2050 - protein, 219 aa, Saccharomyces cerevisiae
MEHLANENSDSDIRYSFLSTLDHLPCELIRSLRLMQTIDLFKNEEDEPGMERACRDLLLVATYINDLVDDQIHFLKQHKKELEIQKSVTKNFNSSLENIKSKLTLEEPGAYKEPKLLLKINLKKAKSRERKESITSPTIGINQGDVTEGNNNQEEVYCFCRNVSYGPMVACDNPACPFEWFHYGCVGLKQAPKGKWYCSKDCKEIANQRSKSKRQKRRK

SEQ ID NO: 2051 - protein, 345 aa, Triticum aestivum
QKKKQKTFLSVFPTLRDEVLAELKKYNMPEDAYEWTKRNLEYNVPGGKLNRGISVVDTVRILKGDSVTEDDIFKATVLGWLIEFLQAFFLVSDDIMDASITRRGQPCWYKSSGVGMVAINDAFILESCIYIFLKKYFKGTDYYVELIELFHEVTFQTELGQLCDLITAPEDHVDLSKFSVKKHQFIVIYKTAYYSFYLPVALAMHMVGVKNEEAFKSAHDILIPLGEYFQVQDDYLDCYGAPEVIGKIGTDIMDNKCSWLINQALDKANPEQRKVLDENYGKKDAEAEAKIKQLYIELDIEGVYKAYEEKSYNELSALIEKLDESVGVKKQVFVEFMDKIYKRTK

SEQ ID NO: 2052 - protein, 346 aa, Shigella flexneri 2a str. 301
MKSVVNDTDGIVRVAKSVIPEIKHQDEVRVKIASSGLCGSDLPRIFKNGAHYYPITLGHEFSGYIDAVGSGVDDLHPGDAVACVPLLPCFTCPECLKGFYSQCAKYDFIGSRRDGGFAEYIVVKRKNVFALPTDMPIEDGAFIEPITVGLHAFHLAQGCENKNVIIIGAGTIGLLAIQCAVALGAKSVTAIDISSEKLALAKSFGAMQTFNSSEMSAPQMQSVLRELRFNQLILETAGVPQTVELAVEIAGPHAQLALVGTLHQDLHLTSATFGKILRKELTVIGSWMNYSSPWPGQEWETASRLLTERKLSLEPLIAHRGSFESFTQAVRDIARNAMQGKVLLIP

SEQ ID NO: 2053 - protein, 438 aa, Zea mays
MAGWCEEAVALLQRPAAAEMAVDVLLCAVPIWAAVMIGLVVGWSWRPRWTGLLFLGLRTRLRIIWLPPGLGARRLWFACTALSACSVAPRLLSSAFRRCRGKQQDKASPEDTAAVARDGGGCADGRTNFEGEHDTVTEKDLELLLQLLDNKESGDTAWQNLMERTTSNMTYKAWRREPEEGPIMYCSRTIFEDATPELVRDFFWDGDFRLKWDPMLAYSKSLDEFPQNGATIVHWIKKFPFFCSDREYIFGGRIWESGKTYYCVTKGVPYPSLPKKEKPRRVELYFSSWRIRAVQSPKHVGQQSACEVTLVHYEDMGIPKDVARVAIRHGMWGAVKKLQSGFRAYQQMRDTENTLSHSAIMARMTTRVSIKASNGGLDHDLSIADKISGENDSSHAVQHGFDWKWVVFGGAVAAVCVLNTGLVGKVLLLGAARRQAKK

SEQ ID NO: 2054 - protein, 467 aa, Methanosarcina barkeri
MSEHESASLVKTLRPFHVWALGVGIVLVGEYMGWNFTVAKGGVLGSLLAMLVAGTMYVIISLCASELGSATKLAGGPYDWARLFIGPGAAASVGLAVYMEYIALEAADAIVVASISQSIFPELQVYPVTLLVIALLTFINYRGVVAALTLNFVLTMIAFIAILAFFFSTAFGIGDIHPEYLLQGALPNGMIGLFAALQFGPWFYLGIEGAAMCAEECKHPSRAVPLGQQAGMITLLIGAAMTLYLCSVLIPADLLGVSVYPLFEAAQNSGIFIFVALLGLGTFLTCVASANGCVCDSSRSWFALSRDNYVSSWFSAVHPKYNTPYRAVIFTVPVAIGFAFSGYLDQVITFSIVSGLLCYVLIPFSLIRFRKLFPETTSKVRPFVGPLQPYIAYFAIAIAITILSTLFWGYKYNLIFAFVFYGIAYFYFSHKHKKSNIENNWAEMGWPLPKGSGNKRIKKEATGIGDE

SEQ ID NO: 2055 - protein, 148 aa, Zea mays
  unsure (1)..(148): unsure at all Xaa locations
REEMAASDVEYRCFVGGLAWATDDHSLNNAFSTYGEVLESKIILDRETQRSRGFGFVTFSXXXAMRSAIEGMNGKELDGRNITVNEAQSRGGRGGGGGGYGGGRRDGGGYGGGGGGYGGGRGGYGGGGGYGGANRGGGYGNNDGNWRN

SEQ ID NO: 2056 - protein, 389 aa, Methanopyrus kandleri AV19
MDARELIDKYHMNTYSRFPVTLVPGEGARVWDDEGNEYIDLVAGIAVNVLGHCHPAVVEAVKEQVERLIHCSNLYYNEPQAEAARLLAEAAPKDLNKVFFCNSGTESVECAIKLARKFTGCTKFIAFEGGFHGRTMGALSATWKPEFREPFEPLVPEFEHVPYGDVNAVEKAIDDDTAAVIVEPVQGEAGVRIPPEGFLRELRELCDEHGLLLIVDEVQSGMGRTGQFFAFEHEDVLPDIVCLAKGLGGGVPVGATIAREEVAEAFEPGDHGSTFGGNPLACAAVCAAVSTVLEENLPEAAERKGKLAMRILSEAEDVVEEVRGRGLMMGVEVGDDERAKDVAREMLDRGALVNVTSGDVIRLVPPLVIGEDELEKALAELADALRASG

SEQ ID NO: 2057 - protein, 251 aa, Zea mays
MAAADVEYRCFVGGLAWATSNESLENAFASYGEILDSKVITDRETGRSRGFGFVTFSSENSMLDAIENMNGKELDGRNITVNQAQSRGGGGGGGGYGGGRGGGGYGGGRRDGGYGGGGGYGGRREGGGGGYGGGGGYGGRREGGGGGGSGGGGGGGGGTSGRCPVDALGLGVCANLLNGLINATLGTPPRTPCCTLIQGLADLEAAVCLCTVLRANVLGINPQPAHQPQPPRQLLRQARPIGLPVLLIYMV

SEQ ID NO: 2058 - protein, 123 aa, Astragalus membranaceus
RLVEADATKGSDHLRDVFGKGMGLSDQDIVALSGGHTIGAAHKERSGFGGPWTSNPLIFDNSYFKELLSGEKEGLLQLPSDKALLTDPVFRPLVEKYAADEDAFFADYAVAHQKLSELGFAEA

SEQ ID NO: 2059 - protein, 367 aa, Novosphingobium aromaticivorans
MKTRAMVCHAPGAPLVEEELDLAPPGPGEVLIEIMASGLCHTDLSQLEGVAAPYPFPIVVGHEGAGVVREVGPGVTSLRVGDHVVPLGIGECGECGNCRSGLTNLCEAFLADMASQPTPFSLGGKRVSAYSGVGSLAQFIVTAERNVALIRKDVPFELACTVGCCVATGVGAVLHTADVGEGATVAVFGLGGIGLNVVQGARLAGASRIIGVDINPLRDAQGRRFGMTDFIDARNADPVDAIRALTGGGCDFAFECAGNIKLMQQAFESTRIGWGCTVVLGVPPDGAALSLVPFQLQLGRRVQGSFMGNMKGRSQLPGLLDHYAEGRLNLDDLVTHRLPMREVNNGFALMKRGEALRTVVSFARNES

SEQ ID NO: 2060 - protein, 95 aa, Fagopyrum sp. C97106
GRLYEYANHSVKATIDRYKKACSDSAGVTSVAEANAQYYQQEAAKLRNQIRTLQNNSRNLSRHMMGEGLSSLSMKDLKNLEARLEKGISRIRAKK

SEQ ID NO: 2061 - protein, 515 aa, Neurospora crassa
MASRLLRSSYSGSLRAVSTASTVRPAAVSAVHQFSNRRQFTASSSKMASSFYKDWEPEGPTVKTEIPGPKAKEAIKELDEVFDTRSLNMLTDYHKSVGNYIADPDGNVLLDVYAQIASIPIGYNNPVLQDAARSSDMVNSIINRPALGNFPPTDWASVLKTGILKVAPKGLNQVFTAMAGSDANETAYKAAFMWRRQKERGGPQVEFTAEEMESAMINQSPGASSLSILSFKSAFHGRLFGSLSTTRSKPIHKLDIPAFDWPQATFPLLKYPLEEHAEENAAAEQAALDEVEHLIKNYHIPPAAVIIEPIQSEGGDNHASPAFFRGLRAITKKHGVLLIVDEVQTGVGATGKFWAHEHWDLQDPPDMVTFSKKAQTAGYYFGNPELRPNKPYRQFNTWMGDPARALLFKAIIGEIERLGLVEHTARVGDYLYGKLEGLAQKYPGQFANLRGKGQGTFIAFDNPRRDEFLARAKKFGVNIGGSGQSAVRLRPMLIFEEKHADILVDALEKIVKSFQ

SEQ ID NO: 2062 - protein, 98 aa, Buchnera aphidicola
  unsure (1)..(98): unsure at all Xaa locations
LPSASLNXSNFGLYEPAGGSAPDIAGKNIANPIAQILSIAMLVRYTMKLPMISDHIESAVIDTLKKGYRTLDIANDKEXYVSTNDIGDIISDILKKRI

SEQ ID NO: 2063 - protein, 182 aa, Triticum aestivum
MAGVGRNMVAPLLVLNLIMYIVVIGFASWNLNHFINGLTNRPGVGGNGATFYFLVFAILAGVVGAASKLAGVHHVRTWRGDSLATSASSALVAWAITALAFGLACKEIHIGGYRGWRLRVLEAFVIILMFTQLLYVLALHSGLFGNQFGNHAGAGGYGAEHGAYGAGDPHNKGMGTGGVARV

SEQ ID NO: 2064 - protein, 141 aa, Zea mays
MESPKKIAHEIGGVKRDALRFGLNGVKSDIVGSHPLESSYESEKRSHEAMKRTIIGHTYGTALPLKMDMDRQILSRFQRPAGPIPSSMLGLEVYTGAIDDFGFEDYLNDPRDSETVRPVDFHHEMEVRLGMSKGPVAPSFI

SEQ ID NO: 2065 - protein, 140 aa, Zea mays
STYKGKVLLIVYVASQCGLTDSNYTELSHLYEKHKGQGFEILAFPCNQFGAQEPGTNDEIVEFACTRFKAEYPIFDKVDVNGDTAAPIYKFLKSSKGSLFGDGIKWNFAKFLVDKEGHVVHRYAPTTSPLSIEKDIKKLL

SEQ ID NO: 2066 - protein, 222 aa, Pseudomonas wisconsinensis
MSIRRLACSLLLSSLALPVLAAECPAMLQGELPKLRAKGENIELCQYAGKPLVVVNTASFCGFTPQFKGLEALYQRYKDQELEVLGVPSDDFRQESADSKETATVCYVNYGVTFAMTEPQPVSGANAIPLFKGLAEQSRQPRWNFFKYVVDRQGKVVASFSSLTKPDDPELIAARREGDRLATLIPSRFTALHPSGRWALSVCLPRLARRRTQFTRRALQEQ

SEQ ID NO: 2067 - protein, 551 aa, Pseudomonas fluorescens PfO-1
MSSAFRLPLDVFYEREARHPRQRFLVQPIGGGQVETLTWADVGHQARCAAHWLRSRELPQGSHIALISKNCAHWIIADLAIWMAGHVSVPLYPNLTAESVNQVLTHSESVLAFIGKLDDWPGMSPGVPAGLTTVSLPLHPPGTFDFNWDDLQRSSPIQDDPRPAAEQLATIIYTSGTTGLPKGVMHSFANLGFATTRGTQLFGLNENDRLLSYLPLCHVAERMFVELASIYTGQTVFFAESLDTFLADLKRARPTAMFGVPRIWTKFQMGVYSKIPAKRLDFLLGLPFIGKRVGHKVLAGLGLDALRVALSGAAPVPLTLLRWYQKLGLDVLEVYGMTESCGYSHICLPGQYKEGWIGRPCPEVEVRIDESGEVQVRSQANMLGYFKEPQKTAETLTEDGFLRTGDKGEQDAEGRLRLTGRLKEIFKTSKGKYVAPAPIENRLAVHSRIEQVCVVGDGLSAPLGLCVLSAVGREEPRAPLHSSLEKLLEEVNAVLDKHERLRRLVVVKDSWAVENGFLTPTLKIKRNIIEDTYGARFEEWSERSEAVLWQD

SEQ ID NO: 2068 - protein, 3482 aa, Anabaena sp. 90
MAQNTDYKKLIATTLTKMEAMQARITELETRQSEPIAVVGMGCRFPGGISSPEAYWNFCQAGLDAIVEVPQSRWDISKFYAPEPTPGKMNTRYGGFLQQDITEFDARFFSISSREATSMDPQHRLLLEVAWEALENANLPPTNLAGDRVGVFVGITSVDHAMTVYKSKYDEIDSFFGTGNSLSAAAGRLSYFLNLRGPCMSIDAACASSLVALHQAIRSLRNHECKIALVGGVNLILDPAITINLCQSGMMSPDGRCKTFDAAANGYVRGEGCGVLVLKRLSVAEKNGNRILALLRGSAVNHNGAAAGLTVPSGPAQQDLLRQALADARVKPQEVGYIEAHGTGTSLGDPIEMNAIAAVYGERSQPLYVGSVKTNIGHLEAAAGIAGTIKTILALQHGEIPSHLHFQEPNPLINWQGYPIKIPSQAIPWSNNGQVRIAGVSSFGFSGTNAHIIIEQAPAANIPEIKLQRPSHLLTISAHSETGLKELALRFHTRLESHPEMGDICHSAAIGRSSLPERLAIVADTLTELQQRLAAFAEEKNIDHGIFYRRFTGEKYPKIVFLFTGQGACYAGMGNQLYQTQPTFRQYIDQCADILGNYLEFPLQQILFGDRTDLLNQTAYAQPAIFALEYSLAMLWQSWGIKPSLLIGHSVGEYVAACIAGVFSLEAGLALIVKRGQLMQTAPLGKMASVFADEATVSALIQNYGNTVSIAAINHPQQIVISGESNSIDEIVANCKSQKIAVQLLSVNGAFHSPLMESILDDFEIAAREVSYHPPQILLVSGIDGQPLTTAPDASYWRQQSRQAVQYFQSLITALNKGYNLFLEVGPRPILAEQGRRYNDDAIWLSSLNRGLDNWQTMLSALAQLYINGVNFNAEKFNKDYGYRNIQLPNYPFQRKRFQFKSTVLSQSSLTKEVPLERELMETNMNLAKVANIKKNQQEIGNKLKSILALLLKEDENDIRDDETLLNLGADSIILTDFVRKIEEKFGVKVKIDQLFTDLQTIDEISIYLSDYIKQKPSNTSDETAINDILTKTSVQVSNSESELNNYLWVISQLQPIAVAYILKALEVLGKRLSIADTWTTEDLLQTLPIASKYHILVNRYLKTLEQTGIIQNQGNVWIVKSLPTPFSLPEAIENLQTICPAAKPELDMLQRCGENLAEVLKGNIDPLELIFPAGSVVHAESIYGNSPVSRLMNQRVSQAINSILNNFSSSDRPYQIIEVGGGTGATSEAIVNNLNLNHTTYFFTELSPVLLNKARQKFKNRHKFNFNQLDIEKSPVSQGLTAHSYHIVVAANVLHSTRNITETLNNIRELLIPGGYLVLLETVENNSWLDLTFGLTPGWWRFQDKELRLDTPLLSGESWCAALKRCGFVNADIYSQQNNISIYNGQELIIASTSPESAIDHQSKTVAVSIPTSGKEALMMAQLQSLKELKDIHEKTIIKQLEILQSAPVAPSNTPEVLLIQTETAPTPKISKTETTPPTQKISSPNLNPLALKLTESKSLTEQQQAFIQKLEIVYNQRTAKSKAYSQNSRKTMVDVKPTIDFRMALKEFQYPIVSESAQGAYFRDIDGNDYIDLAMGFGVNFFGHSPDFVLTEIQQQMQHGIGLGMQSNIAAETAALICEITGVERVAFSNTGTEAIMAAVRIARSRTKRQKIVIFAGSYHGTFDGILARAGEEAGTAEPLSLGTPSGMVEDVIVLTYGAEESLEIIAEQADNLAAVLVEPVQSRKPDLQPKEFIQKLRKLTQQKEIALIFDEIITGFRITPGGAQEWFEIEADIVVYGKAIGGGLPISMICGKADFLDTVDGGFWSYGDDSHPQTELTAYGGTFCRHPLALAACRAVLLHLREQGATLQETVNQLTNRLAIEVNQFFQETGIPIRIVHFGSLFRFESSGAYSIFLKPIELPLFYYLLNLKGVYTWEKRVCFLSTRHTNEDINKVVAAVKEAIIELRQAGFFANAKPPQTKKREASDRTEDEDARNNLNQQFPTSEAQRQLWLLAELDTTASASYNVTTSLELRGALDISSLQQAINEVVNRHEALRTKILEQGELQEVISSVTIDLPLINLMDEDNPEATALVLRTELSQKPFDLGVAPLFAAVLMRLAPEHYLLTLKTHHIVADGWSLGLILNELGKLYSAKIGVATESLSPPMQFRKYLALRQQEAQSPQMQAHRDFWLKTYEGEIPIFELPTDFPRPAVKTYTGGRESKIIAPQLWQNLQTVGRKNQATLFMTMFAAYTAFLRRISGHDDLVIGIPISGRQVEGSEKLVGFCSQFLPIRIQTDVTASFVTHLRHTKETLIAAFKHQTHALEELLAALQLQRDFSRSPLISVSFNLDPKLTLPEFEGLNVSLPPEPIGYTPFDLGFNFIEVNDALIIYCNYNTELFKPETIKQFLESFEILMQGVIKDANILLSELHLLTQVQQEELLAKLTGSTIELPQNSTIIDDFIAQVKSTPDAPALIVEEKTLTYRELNEKVNRLTNYLREKYNLGAGKAIALAIGRNQNLIIAILATFKTGAIYVPIDPQYPSSRIDFILKDSGCHLCLTESNFISQLPQEIEAICLDKIDNILTDFDINEPNFQPDTNQIAYILYTSGSTGNPKGVMGRHISILNVIRSLRLTFNLNKHPEWRYIFTAPVTHDPSFRNIFLPLTIGAALYMYEVQHIGHLVSFLQENKINVLHTTPSIYREILAVLAPEETIPTLKYISCGGEKLDRETAIALRKRFPAEIVSNVYGSTETCVGVSQYTIDDNLNTDVPLGQVFHNNRLFVLDEFNHPVPLHVIGEICVEGAALAVGYRNLPEITREKFQPNFLNSEKILFRTGDLGKQIAPGVIEFIGRKDNQVKVNGYRVDPGEIEYQISRYAEIEKAIVLPIEVNNQIQLSAYCQTDKDIKFSEIREFLAKYLPVYMIPSSFIFLKQFPLTKHGKFDLRSLIALKPTDQLTQVSYTAPRNTLESKLVHIWEKILTKHPIGIFDNFFEIGGHSLLLSRVVTHVHKELNVLVKLADFFKVPTILGLAALISKAQSNYQEPIPAITQQESYPMSHGQRRLWALEFLDHNHYAYGMPSAYQFNGDLNIAAFENAFKKLIERHEILRTTFTLINNEPRQIVNEQVDFAVNQIDLVDDENQAAKIAEAIRNNAKTTFDLESGLLLKINVLKLSQQSNIVLFNMHHIISDGWSAGVLIKDFLAHYHAYGKENVELPPPLRIHYKDYTSWQNQQLQTPKLQAQRDYWLPKLIPAPAPLDLPLDYTRPAVQSFSGSVVIWKPNQEFIKDFELLTKTQEASLFMGLLTLVKGFLFRYTEQNEITVGSPIAGRNHPDLEEQIGFYVNTLVLRDQITVDDSFATLLAKVKTTTIEAYDNQEYPFDKLVSDLNFKRDPSRNPLFDVVVVLQNNQNVDLAIDGIAVNTLEQELVTAKFDLEFIFVDEAELYLKLIYNTDIFANERISLMIKLLETLLEEVVKSPDTPLLHLCDHTDKACQEDNSLFATNFNF

SEQ ID NO: 2069 - protein, 250 aa, Oryza sativa
MAKNYPVVSAEYQEAVEKARQKLRALIAEKSCAPLMLRLAWHSAGTFDVSSKTGGPFGTMKTPAELSHAANAGLDIAVRMLEPIKEEIPTISYADFYQLAGVVAVEVSGGPAVPFHPGREDKPAPPPEGRLPDATKGSDHLRQVFGAQMGLSDQDIVALSGGHTLGRCHKERSGFEGPWTRNPLQFDNSYFTELLSGDKEGLLQLPSDKALLSDPAFRPLVEKYAADEKAFFEDYKEAHLKLSELGFADA

SEQ ID NO: 2070 - protein, 169 aa, Oryza sativa (japonica cultivar-group)
METVTLRRFELADADAMMAWASDPEVTAFMTWEPYESVDSLRAFIRDTVLPHPWFRAICLAGDGDGGAVSVTPTADRCRAEVAVAVARAHWGKGVATAALRRALAAAFADLDGVERVEALVDVGNAASRRALEKAGFQQEAVLRSYCVVKGQLRDMVIYSFISTDPLVE

SEQ ID NO: 2071 - protein, 226 aa, Arabidopsis lyrata subsp. lyrata
CKAAVAWEAGKPLVMEEVEVAPPQKHEVRIKILFTSLCHTDVYFWEAKGHTPLFPRIFGHEAGGIVESVGEGVTDLQPGDHVLPIFTGECGDCPHCHSEESNMCDLLRINTERGGMIHDGESRFSINGKPIHHFLGTSTFSEYTVVHSGQVAKINPDAPLDKVCIVSCGLSTGLGATLNVAKPKKGQSVAIFGLGAVGLAAAEGARIAGASRIIGVDLNSQRFDQA

SEQ ID NO: 2072 - protein, 148 aa, Magnetospirillum magnetotacticum
MLRFALGIRKPIAALATEAEGPALARNLSAFSLVCIGVGATVGAGIFVLTGTAAANFAGPGLMLSFVLGAVASGLVALCYAELAAMIPVAGSTYSYTYATLGALPAWIIGWDLVLEFAFAAATIAVGWRATPKASCRCRVSCRHAPPK

SEQ ID NO: 2073 - protein, 384 aa, Bunchosia armeniaca
DVPVTAAGALKSYKLAAKAISRLQSLPSGNISLQCDVLVKEVRDLIGYDRVMVYKFHDDEHGEVVSECCRSDLESYLGLHYPATDIPQASRFLFMKNKVRMICDCLAPPVKVIQDERLPQPLSLCGSTLRSPHGCHAQYMENMGTIASLVMSVTINEDDDMMDGDQQQMARTLWGLVVCHHTSPRFVPFPLRYACEFLIQVFGVQINKEVELAAQVREKQILRIQTMLCDMLLRDAPVAIITQSPNVMDLVKCDGAALYYKNKFWLLGVTPTEAQIRDIAEWLLEYHSGNTGLSTDSLMEAGYPGASVLGDAVCGMAAVSITSRDFLFWFRSHTAKEIKWGGAKHDPDDKDDGRKMHPRSSFKAFLEVVKWRSLPWEDIEMDAI

SEQ ID NO: 2074 - protein, 295 aa, Glycine max
MSLLFSPPPSLTGLSLHPHVHFSPSMSILRRLPLNLRTTRRRRLATVSAALRQDTAVWTPAPLSEVEHAAESLFHIAIDVSDAPDLAASHTLAGQYLQLRVPDAPKPSFLAIASPPKLAAARGVFEFLVKSVAGSTAEALCALKRGDVVELSQVMGNGFDIDRIHPPENFGTVLVFATGSGISPIRSLIESGFDAGKRSDVRLYYGARNLQRMAYQDRFKDWESSGVKIVPVLSQPDENWTGESGYVQAAFSREKQISDPLTTGAVLCGQKQMTEEVTSILVADGVSADKILKNF

SEQ ID NO: 2075 - protein, 489 aa, Shigella flexneri 2a str. 301
MGSETKTTEAPGLRRELKARHLTMIAIGGSIGTGLFVASGATISQAGPGGALLSYMLIGLMVYFLMTSLGELAAYMPVSGSFATYGQNYVEEGFGFALGWNYWYNWAVTIAVDLVAAQLVMSWWFPDTPGWIWSALFLGVIFLLNYISVRGFGEAEYWFSLIKVTTVIVFIIVGVLMIIGIFKGAQPAGWSNWTIGEAPFAGGFAAMIGVAMIVGFSFQGTELIGIAAGESEDPAKNIPRAVRQVFWRILLFYVFAILIISLIIPYTDPSLLRNDVKDISVSPFTLVFQHAGLLSAAAVMNAVILTAVLSAGNSGMYASTRMLYTLACDGKAPRIFAKLSRGGVPRNALYATTVIAGLCFLTSMFGNQTVYLWLLNTSGMTGFIAWLGIAISHYRFRRGYVLQGHDINDLPYRSGFFPLGPIFAFILCLIITLGQNYEAFLKDTIDWGGVAATYIGIPLFLIIWFGYKLIKGTHFVRYSEMKFPQNDKK

SEQ ID NO: 2076 - protein, 431 aa, Brassica rapa
DNSYILSFLLVFSVMILFHPALSIYVNTLLSTESLTISSNRTFVSPGNVFELGFFTPGSSSRWYLGIWYKKLSDRTYVWVANRDSPLSSSIGTLKISNMNLVLLDHSNKSVWSTNLTRGNERSPVVAELLANGNFVIRYCNNNDVSGFLWQSFDFPTDTLLPEMKLGYDLKKGLNRFLTSWRNSDDPSSGEISYKLDTQTGMPEFYLLQSGARMHRSGPWNGVRFSGMPGDQKLNYMVYNFTENSEDVAYTFRMTNKSIYSRLKISSEGFLERLTWTPNSITWNMFWYLPLENQCDIYMICGRYAYCDVNTSPLCNCIQGFNRSNEERWDLKDWSSGCIRRTPLSCSGDGFTRMRKMKLPDTRMAIVDRSIGVKECEKRCLSDCNCTAFANADIRNGGTGCVIWTGELEDIRNYFDDGQDLYVRLAAADLV

SEQ ID NO: 2077 - protein, 363 aa, Hirschfeldia incana
SSNKTLVSPGGVFEFGFFKIASSSRWYLGIWYKNIPKRSYVWVANRDNPLCSSTGTFKITGTNLVLLDQSKNTVWSTNLTRRCVKSPVVAELFDNGNFVMRYSDNNDPSGYLWQSFDFPTDTLLPEMKLGFDLKTGSHRFLRSWKSPDDPASGDYTYKLETRGRPECFLRSKDFLLYRTGPWNGFRFSGVPEMPQLLVNIFTENKEEITYTFRMTNHSTYSKLIVTPSGFFQLLTWTPKVQLWIVLWSVPKDQCDLYMLCGPYGYCDAKTSMCNCIKGFKPKASQAWASGDMSQGCVRRTRLTCGGDGFIRLTKMKLPDTMYATVDKLVGIKECKMRCLNNCKCTAFANADIQNGGSGCVMWT

SEQ ID NO: 2078 - protein, 431 aa, Beta vulgaris
MAQILAPNMQCQMKLSKSLTNSMIPNSWTSILLKGSQKGSIKCSTKFKVCAALKTEHGTVNRMEQLLNLDVTPFTDKIIAEYIWIGGSGIDLRSKSRTLSRPVEDPSELPKWNYDGSSTGQAPGEDSEVILYPQAIFKDPFRGGNNILVICDAYTPAGEPIPTNKRHKAAEIFSNPKVASEVPWFGIEQEYTLLQPNVQWPLGWPVGAYPGPQGPYYCGVGADKSFGRDISDAHYKACLYAGINISGTNGEVMPGQWEFQVGPSVGIEAGDHIWCARYLLERITEQAGVVLTLDPKPIEGDWNGAGCHTNYSTKTMREDGGFEVIKKAILNLSLRHKEHISAYGEGNERRLTGKHETADIDTFSWGVANRGCSIRVGRDTEKEGKGYMEDRRPASNMDPYVVTGLLAESTLLWEPTLEAEALAAQRLSLNV

SEQ ID NO: 2079 - protein, 479 aa, Glycine max
MNSDQFQKNSMFVETPEDGGKNFDDDGRVRRTGTWITASAHIITAVIGSGVLSLAWAIAQMGWVAGPAVLFAFSFITYFTSTLLADCYRSPDPVHGKRNYTYSDVVRSVLGGRKFQLCGLAQYINLVGVTIGYTITASISMVAVKRSNCFHKHGHHVKCYTSNNPFMILFACIQIVLSQIPNFHKLWWLSIVAAVMSFAYSSIGLGLSVAKVAGGGEPVRTTLTGVQVGVDVTGSEKVWRTFQAIGDIAFAYAYSNVLIEIQDTLKSSPPENKVMKRASLIGILTTTLFYVLCGCLGYAAFGNDAPGNFLTGFGFYEPFWLIDFANICIAVHLVGAYQVFCQPIFGFVENWGKERWPNSHFVNGEHALKFPLCGTFPVNFFRVVWRTTYVIITALIAMMFPFFNDFLGLIGSLSFWPLTVYFPIEMYIKQSKMQRFSFTWTWLKILSWACLIVSIISAAGSIQGLAQDLKKYQPFKAQQ

SEQ ID NO: 2080 - protein, 136 aa, Triticum aestivum
  unsure (1)..(136): unsure at all Xaa locations
MSILWEKSRAWRWLVXRARASDPFFVAFEALCGVVPGVVGYRLIQLTTARNNKLEAHRRSNARPETXMMGQVNRERLAEFLGEIQRKENTNDRYVAALKGETLTRKRYERIQPVPQQAAQENAKDQQATKESAKAK

SEQ ID NO: 2081 - protein, 548 aa, Triticum aestivum
  unsure (1)..(548): unsure at all Xaa locations
IPFYGDNWRTPAASGPAPPLLPPVVAFPDPPPFAPLAAARRAARLPEAAPAGLAELLGVGFTPPFESRVRARGPASREPDRPGVDLLHPLRRXELADGPVRPRRELLYNIEYSXRVLKHLILMMPAFFQSMFAGTRIVERMLQTGIVPDDESYNLVVDLLLRHNRADSAFKYLELMLKSGYAVSSPVFAEYVRVCVKSGSLDTLASIIEKCKATEKNKLLCPQWAWCIDIAEAAFEANNSKLAMFGLEFLARWIAHGEGSKPPVHRSVNEGLVLSAFSACXRTCSSDLLNAAWSILRKSLRQKRAPTPETYLAKIYAHSSIGQLQRAFGTLREFENAYRNFEGIDKELFSPFTSLQPLVVACCKDGFTTLDSVYVQLENLSSADPPYKSVAALNCVILGCANIWDIERAYETFEAMKEKFGLTPDIHSYNALLHAFGKLKKTEEASNVFQHLVSLEDVKPNATTYSLLVDAHLVNRDPKAALAVLDEMVDVGFTPSKETLKKVRRRCSRESDFDSDEKLQSLCKRLNLRMGGEARRELLYNIEYSAEY

SEQ ID NO: 2082 - protein, 310 aa, Clostridium acetobutylicum
MLKTQFCDIIGIKYPIIQGGMAWVADSSLAAGVSNAGGLGIIAAANAPVEYVRDEIRKAKKLTDKPFGVNIMLLSDNAEEVAKMVCEEGVKVVTTGAGNPGKYIDMWKEHDIKVIPVVASVALARRMERCGVDAVVAEGCESGGHVGELTTMALVPQVVDAINIPVIAAGGIGDGRGVAAAFALGASGVQVGTRFLIAKECTVHQNYKNKVLKAKDIDTEVTGRSTGHPVRVLRNKLARKYKLMEKEGASPEEMEELGRGALPRAVREGDVDNGSVMAGQIAGLINKEETCDEIVESMFKEAVEVIDRIK

SEQ ID NO: 2083 - protein, 143 aa, Triticum aestivum
  unsure (1)..(143): unsure at all Xaa locations
MASSSHQEELHEQGQEDEEGEDHDQHVQPSSSPEEGEEWEEAENSPVEQVALTVPVGDDPSTPVLTFRMWVFGATACVALSFLNTXXXYRKEPLEITAISAQVAVVPLGRLMAAALPERAFFRGRRWEFTLNPGPFNVKEHVL

SEQ ID NO: 2084 - protein, 392 aa, Acmanthera latifolia
DLEPVNPADVPVTAAGALKSYKLAARAISRLQSLPSGNISLLCDVLVKEVRDLTGYDRVMVYKFHEDEHGEVVSECRRPDLEAYLGLHYPATDIPQASRFLFMKNKVRMICDCLAPPVKVFQDKRLAQPLGLCGSTLRSPHGCHAQYMANMGAIASLVMSVTINEGDDMIDGDQQQMARKLWGLVVCHHTSPRFVPFPLRYACEFLIQVFGVQINKEVELAAQVREKHILRTQTLLCDMLLRDAPVAIVTQSPNVMDLVKCDGAALYYRKKFWLLGVTPTEVQIKEIAEWLIEYHSGNTGLSTDSLMEAGYPGASVLGDAVCGMAAVKITSKDFLFWFRSHTAKEIKWGGAKHDPDDKDDGRKMHPRSSFKAFLEVVKWRSLPWEDMEMDAI

SEQ ID NO: 2085 - protein, 262 aa, Hordeum vulgare subsp. spontaneum
SAESNMCDLLRINTDRGVMIGDGKSRFSIGGKPIYHFVGTSTFSEYTVMHVGCVAKINPEAPLDKVCVLSCGISTGLGASINVAKPPKGSTVAIFGLGAVGLAAAEGARIAGASRIIGVDLNASRFEEARKFGCTEFVNPKDHTKPVQQVLADMTNGGVDRSVECTGNVNAMIQAFECVHDGWGVAVLVGVPHKDAEFKTHPMNFLNERTLKGTFFGNFKPRTDLPNVVEMYMKKELEVEKFITHSVPFSEINKAFDLMEKG

SEQ ID NO: 2086 - protein, 99 aa, Zea mays
  unsure (1)..(99): unsure at all Xaa locations
AANCVTGPVTLYEPKTTLSLQGTTLDWNGLDQESQQINVNTQFKGYDYLDCYGDPEFIGKIGTDIEDYKCSWLVVQALDRADXSQKHILFVGHLQTSLK

SEQ ID NO: 2087 - protein, 214 aa, Paeonia veitchii
IVESVGEGVTDLKPGDHVLPVFTGECKECRHCKSEESNMCDLLRINTDRGVMLNDGKSRFSINGQPIFHFVGTSTFSEYTVVHVGCVAKINPEAPLDKVCVLSCGISTGLGATLNVAKPKKGSSIAIFGLGAVGLAAAEGARIAGASRIIGVDLNPKRFEEAKKFGVTEFVNPKDYNKPVQEVIAEMTDGGVDRSVECTGSIMAIISAFECVHD

SEQ ID NO: 2088 - protein, 245 aa, Siphonodon australis
ALSIAGAVQSQKLAVRAISQLQSLAGGDIKLLCDTVVESVRDLIGYDRVMVYKFHEDEHGEVLAESKRPDLEPYIGLHYPATDIPQASRFLFKQNRVRMIVDCHASPVRVIQDDGLMQPLCLVGSTLRAPHGCHAQYMENMGSTASLVMAAMINGNDEKATGGRNTTKLWGLVVCHHTSARCIPFPLRYACEFLMQAFGLQLNMELQLAAQLSEKHVLKTQTLLCDMLLRDSPTGIVTQSPSIMD

SEQ ID NO: 2089 - protein, 137 aa, Zea mays
MAKGGLSKLRCMVKRRWHSSSRIVSRAPSPPAHADAVAVAATSGNARGASFHGADEAPKGLHAVYVGRSRRRYLVAQELVGHPLFQTLVHRAGGAGGPAGTVIVGCEVVLFEHLLWMLEHADPQPESLDELVDYYAC

SEQ ID NO: 2090 - protein, 211 aa, Glycine max
MASTASPMTVQAGRVRTLKEGSRGESGLGPVVYWMFRDQRVTDNWALIHAVAEANKANVPVAVVFNLFHTFLGAKSRHLGFMLRGLRQLCHRMQHSLQIPFFLFQGEAEETVPKFLRECGASLLVTDFSPLREVRRCKEEICKRVSDSVAVHEVDAHNVVPLWVASDKLEYSARTIRAKITKRLSDYLVDFPDIEVEPPAGKWVATEQPFH

SEQ ID NO: 2091 - protein, 408 aa, Oryza sativa (japonica cultivar-group)
MAVEKTVPGGVRTVLVTGGAGYIGSHAVLQLLLAGFRAVVVDNLNNSSELAVRRVAALAGDHSRNLAFHKVDLRDKGALEKVFASTRFDAVVHFAGLKAVGESVQKPLLYYDNSVNGTVNLLEVMSAHGCKKLVFSSSAAVYGSPKNSPWTEEFPLTPNNPYGKTKLVVEDICRDIYRTDPEWKIILLRYFNPVGAHPSGYLGEDPCGIPNNLMPYVQQVAVGRRPALTILGNDYATRDGTGVRDYIHVVDLADGHIAALQKLFESSSIGCEAYNLGTGKGTSVLEIVKAFEKASGKKIPLIIGPRRPGDAEILFSLPAKAEKELNWKAKFGIDEMCRDQWNWASKNPYGYGSLDSTKQNGHHSYGSIGSPKQNGHCTNGFSESTRHNGHNGYGLVDSAKHNGNGHFH

SEQ ID NO: 2092 - protein, 359 aa, Pseudomonas syringae pv. syringae B728a
MSQWPDSRITELFAVELPLLQAPMAGASGSQMAIAVAQAGGLGALPCAMLTPEKIEQEVATFRQQTGNAPLNLNFFCHQPPAHDAERAERWKQSLKPYYEELGADFDAPTPVSNRAPFDSDSCTLIERLRPEVVSFHFGLPQPSLLDRVRATGAKIISSATTVEEAIWLEQHGCDAVIAMGYEAGGHRGLFLSDQLHTQVGTFALVPQIADATSIPVIAAGGIADGRGVAAAFILGASGVQVGTAYLFCPEASVSALHRQALHDATGSQTALTNLFTGRPARGIVNRIMREAGPISPLTPAFPLAGGALMPLRAQAEKLGSSDFVNLWAGQAVGIKHRLGATELTRQLAENALKILSPR

SEQ ID NO: 2093 - protein, 77 aa, Oryza sativa
  unsure (1)..(77): unsure at all Xaa locations
MGMVLGKITVETPKHEVLHTGAGYEVRKYPPCVVAEVTYDPAEMKGDRNGGFTVLGNYIGALGNPQNTKPEKIDMTX

SEQ ID NO: 2094 - protein, 185 aa, Triticum aestivum
  unsure (1)..(185): unsure at all Xaa locations
RRRERHGRRKGGRMEPEHFVRIPDAEPTKARPLQGLWKGVCENKTLEFYIISYDDIGGVTCRRVSENRGQNSGYSPVFWTTDATFLEPPFSEREXIVIVALSILEVVTCGHTETWNKAVSRILCINSSFDLVHPHLLAPFDDTRNVEGRIWLYEDGTFGFGFTGSNSIIDLKHVSMDGCIIDTSS

SEQ ID NO: 2095 - protein, 901 aa, Xanthomonas axonopodis pv. citri str. 306
MPSHPPTRFRSLAQGVLLALGCATGAAHAATPPYLDTQRSFEARAADLVSRMTLEEKAAQMQNAAPAIPRLQVPAYDWWNEALHGVARAGGATVFPQAIGMAATFDLPLMHEVATAISDEARAKHHQFLRQNQHARYQGLTFWSPNINIFRDPRWGRGQETYGEDPFLTARMGVTFVQGLQGEGAAAPKNAQGEPYRKLDATAKHLAVHSGPEADRHHFDARPSQRDLYETYLPAFEALVKEGKVDAVMGAYNRVYGESASASKFLLQDVLRDQWGFRGYVVSDCWAIVDIWKHHKIVATREQAAALAVKHGTELECGEEYATLPAAVRQGLIDEAQIDTALKTLMTARMRLGMFDPPGQLPWSTIPASVNQSPAHDALARRTARESLVLLKNDGLLPLSRAKFKRIAVIGPTADDTMALLGNYYGTPAAPVTVLQGIRAAAPNAQVLYARGADLVEGRDDPAATPLIEPQYLRPSANSPERGLRGEYFRNRDLSGKPALVRVDAQIGFKWDRGSPTDNLLARGEAGPSEAVPADNFSIRWSGQLVPPTTGTYHLEAAADDGVRLYLDGKPVIDRWSTSDRLHADGVDVQLQAGRAYEVRLEYFEGERDAAVRLAWRQPGARPPLQEALDVARSADVVVFVGGLTGDVEGEEMKVNYPGFAGGDRTDLRLPKPQRDLLEALQATGRPVVAVLTTGSALAIDWAQQHLPAILLAWYPGQRGGTAVADTLFGDANPGGRLPVTFYKESETLPAFDDYAMRGRTYRYFGGTPLYPFGHGLSYTQFAYSGLRLDRTTIATDGSLAATVTVKNTGQRAGDEVVQLYLHPLAPQRERAGKELHGFQRIALQPGEQRELGFTINAKDALRLYDEQRKAYGVDPGAYEVQIGASSADIRARQRFTVTDK

SEQ ID NO: 2096 - protein, 417 aa, Desulfovibrio desulfuricans G20
MNMKQQENDGVNGYISPLPDAAWNSRFPRSLVLLGSTGSIGTSALRVVERQPELFRITALAGARNVRLLARQAAAYRPPHLAVINGNAADELASLLPAGYRPRIHTGQEGYEFLAALPEADCVLSAQVGAAGLRATVAAARAGKTIALANKESLVLAGGLIRRLCHETGASVLPVDSEHNAIFQALQGHDAAQMRRIILTASGGPFRGRDRTFLQSVTREQALNHPNWSMGAKISIDSATLMNKGLEVIEACHLYNAPLEKVEVVVHPQSIIHSLVEYNDGSQIAHMGTPDMRIAIAYCLGWPRVMHTGVEPLDLLSVGSLTFESPDISLFPCLELARKAYAGGNGLPVVLNAANEVAVDLFLQGAIAFLDIPRLIEAAMQAHDAAPHQNMYDEVESILTLDKTTRRVTADLAGARG

SEQ ID NO: 2097 - protein, 109 aa, Salvia columbariae
DLKPENVLVREDGHIMLSDFDLALRCVVSPTLITTSALHSHPSKQRARFCAQPSSACIQPSCFLPRIFHQRSKKRSGKTPSGTLPELVAEPTAARSMSFVGTHEYLAPE

SEQ ID NO: 2098 - protein, 450 aa, Streptomyces carzinostaticus subsp. neocarzinostaticus
MNGRRPVSPPLRALPGLLRKLAVDRLGMMRDAAALDDAVLVSMGPKKLFVFNRPDYAKHVLADNAANYRKGIGLIESRKMLGDGLLTSEGELWREQRRTVQPAFRPARVAAQADAVAEETMNLRDLLMRRGADGPVDVLQEVTGFTLGVLGRTVLNTDLGGYGGIAHAFEAVQDQAMFDMVTQNMVPTWAPLATQRRFRRARRELIRTVDELVADRSARMTDGEEADDAFSLMIAAARRQTDPRTGQGRLRDELVTLLLAGHETTASTLAWTLLLLARHPHMRDLVREEARGVLADGRAPDAGDLRKLTYTTQVVQEAMRLYPPVWILPRVARQSDEVGPYSVSAGADVLICPYTLHRHPDLWERPEQFDPGRFDPARVADRPRYAYIPFGAGPRFCVGSNLGMMEAVFVTALLTRDLVLEVVPGDERTPEPMMSLRMRGGLPMTVRPVR

SEQ ID NO: 2099 - protein, 306 aa, Hordeum vulgare subsp. spontaneum
MATAGKVIKCKAAVAWEAGKPLSMEEVEVAPPQAMEVRDKILYTALCHTDVYFWEAKGQTPVFPRILGHEAGGIVESVGEGVTELVPGDHVLPVFTGECKECAHCMSEESNLCDLLRINVDRGVMIDDGQSRFTIDGKPIFHFLGTSTFSEYTVIHVGCVAKIDPEAPLDKVCLLSCGISTGLGATLNVTKPKKGMTVAIFGLGAVGLAAMEGARMSGASRIIGVDLNPAKHEQAKKFGCTDFVNPKDHTKPVQEVIVEMTDGGVNRAVECTGNADAMISAFECVHDGWGVAHKEAVFKTHPMNFL

SEQ ID NO: 2100 - protein, 356 aa, Campylobacter jejuni subsp. jejuni NCTC 11168
MILFGSTGSIGVNALKLAALKNIPISALACGDNIALLNEQIARFKPKFVSIKDSKNKHLVKHDRVFIGQEGLEQILTECQDKLLLNAIVGFAGLKSTLKAKELGKNIALANKESLVVAGSFLKGAKFLPVDSEHAALKFLLEGKKNIAKLYITASGGAFYRYKIKDLNQVSVKDALKHPNWNMGAKITIDSATMANKLFEIIEAYHLYDFKEIDALIEPRSLVHAMCEFKNGASTAYFSKADMKLAISDAIFEKQDTPILEAVDFSKMPALKFHPISTKKYPIFKLKNTFLKEPNLGVIINAANEVGVYNFLENKSGFLDIAKCIFKALDHFGVPKISSIEEVFEYDFKTREYLRS

SEQ ID NO: 2101 - protein, 400 aa, Rhodospirillum rubrum
MSGTANGTPRRVSILGSTGSIGKNTLDLIGRSPERYQVVALTANGNAEALAAQAKATRAEIAVVADEAAYGRLKEALAGSGIEAAAGPQAVCEAAARDADWVMAAIVGAAGLAPTLAAVERGATIALANKECLVCAGDLFMAEIRRAGATFLPVDSEHNAIFQVFDFEKKERIERIILTASGGPFRDWTREAMAKATPEQAVAHPNWSMGAKISVDSASMFNKGLEFIEAYHIFGIAPERIEILVHPQSVIHSMVGYVDGSVLAQLGSPDMRTPIAYCLAWPDRMVAPVPHLDFPKLGHMDFRAPDPDRFPAIRIVRETLRRGGVAPTAMNAANEVAVAGFLGRQIGFLDIPAVVEATINDVMAGPLGNQAVDHLDAVMAVDGEARRIAAGHALAHAAAA

SEQ ID NO: 2102 - protein, 466 aa, Escherichia coli K12
MGQSSQPHELGGGLKSRHVTMLSIAGVIGASLFVGSSVAIAEAGPAVLLAYLFAGLLVVMIMRMLAEMAVATPDTGSFSTYADKAIGRWAGYTIGWLYWWFWVLVIPLEANIAAMILHSWVPGIPIWLFSLVITLALTGSNLLSVKNYGEFEFWLALCKVIAILAFIFLGAVAISGFYPYAEVSGISRLWDSGGFMPNGFGAVLSAMLITMFSFMGAEIVTIAAAESDTPEKHIVRATNSVIWRISIFYLCSIFVVVALIPWNMPGLKAVGSYRSVLELLNIPHAKLIMDCVILLSVTSCLNSALYTASRMLYSLSRRGDAPAVMGKINRSKTPYVAVLLSTGAAFLTVVVNYYAPAKVFKFLIDSSGAIALLVYLVIAVSQLRMRKILRAEGSEIRLRMWLYPWLTWLVIGFITFVLVVMLFRPAQQLEVISTGLLAIGIICTVPIMARWKKLVLWQKTPVHNTR

SEQ ID NO: 2103 - protein, 360 aa, Azotobacter vinelandii
MSKQILVLPGDGIGPEIMAEAVKVLQLANEKYQLGFVLGYDELGGAAVDKYGVPLADETLERARRRCHPARRRRRSEMGRHRPGHPPGARPAENPFATGPVRQPAPGVLYPQLAEASTLRPEVVAGLDILIVRELTGGIYFGAPRESRLLANGERMAYDTLPYSESEIRRIAKVGFDMARVRGKKLCSVDKANVLASSQLWRAVVEEVAKDYPDVVLSHMYVDNAAMQLVRAPKQFDVIVTDNMFGDILSDEASMLTGSIGMLPSASLDADNKGMYEPCHGSRRPDIAGKGIANPLATILSVSMMLRYSFGQVEAANAIEQAVSKVLDQGLRTGDIWSEGCRKVGTAEMGDAVVAALATL

SEQ ID NO: 2104 - protein, 173 aa, Helicobacter pylori
MNLEKLEISHDANALCVVIEISKHSNIKYELDKESGALMVDRVLYGAQNYPANYGFVPNTLGSDGDPVDALVLSDVAFQAGSVVKVRLVGVLNMEDESGMDEKLLALPIDKIDPTHSYVKDIDDLSKHTLDKIKHFFETYKDLEPNKWVKVKGFENKESAIKVLEKAIKAYQG

SEQ ID NO: 2105 - protein, 590 aa, Zea mays
ASRHLSTDGRHGEVEDMYTQDGTVDMKGNPAVKKGTGNWRACPYILANECCERLAYYGMSTNLVNYMKTRLGQVNSVASNNVTNWQGTCYITPLIGAFFADAYMGRFWTIAIFMIIYIFGLALLTMASSVKGLVPTSCGDKDVCHPTDAQAAVVFVALYLIALGTGGIKPCVSSFGADQFDENDEREKKSKSSFFNWFYFSINIGALVASTVLVYVQTHVGWGWGFGIPAVVMAIAVGSFFVGTPLYRHQKPGGSPLTRIAQVLVACARKWNVAVPADKSRLHETVDGESVIEGSRKLEHSEQLACLDRAAVVTAEDGAEASPWRLCSVTQVEELKSVIRLLPIWASGIVFAAVYSQMSTMFVLQGNTLDQSMGPRFKIPSATLSMVDTISVIVWVPVYDRAIVPLVRSYTGRPRGFTQLQRMGIGLVVSIFSMVAAGVLDIVRLRAIARHGLYGEDDIVPISIFWQIPQYFIIGCAEVFTFVGQLEFFYDQAPDAMRSMCSALSLTTVALGNYLSTVLVTIVTHITTRHGRIGWIPENLNRGHLDYFFWLLAVLSLLNFLAYLVIASWYKYKKTADDYPGAKGEHGTEH

SEQ ID NO: 2106 - protein, 394 aa, Triticum aestivum
EPARTEDPALSIAGAVQSQKLAVRAISRLQALPGGDVKLLCDTVVEHVRELTGYDRVMVYKFHDDEHGEVLAESRRGDLEPYLGLHYPATDIPQASRFLFRQNRVRMIADCHAAAVRVIQDPAMPQPLCLVGSTLRSPHGCHAQYMANMGSIASLVMAVIISSGGEDEHNMTRGVIPSAMKLWGLVVCHHTSPRCIPFPLRYACEFLMQAFGLQLNMELQLAHQLSEKHILRTQTLLCDMLLRDSPTGIVTQSPSIMDLVKCDGAALFYHGKYYPLGVTPTEAQIKDIIEWLTVCHGDSTGLSTDSLADAGYPGATALGDAVCGMAVAYITPSDYLFWFRSHTAKEIKWGGAKHHPEDKDDGQRMHPRSSFKAFLEVVKSRSLPWENAEMDAIH

SEQ ID NO: 2107 - protein, 362 aa, Zygosaccharomyces bailii
MSKNIVVLPGDHVGQEIAQEAIKVLEAISEVSPKAKFNFQHHLIGGSAIDATGSPLPDEALAAAKKADAVLLGAVGGPKWGTGAVRPEQGLLKIRKELQLYANLRPCNFASESLLELSPLKPQHARGTDFIVVRELVGGIYFGQRKEDDGDGVAWDSERYTKPEVQRITRMAAFLALQHNPPLPIWSLDKANVLASSRLWRKTVEETIKNEFPQLTVKHQLIDSAAMILIKNPTQLNGIIITSNMFEDIISDEASVIPGSLGLLPSASLASLPDTNEAFGLYEPCHGSAPDLPKGKVNPVAMILSAAMMLKLSLNMAKEGEALETAVKQVLDSGVRTGDLGGSNSTSEVGDAIAKAVKQILA

SEQ ID NO: 2108 - protein, 309 aa, SYNECHOCOCCUS SP. WH 8102
MLAGLLLLTGAAGATALLIWLQRDRRYHSSDSVAAAYDAWTDDQLLERLWGDHVHLGHYGNPPGSVDFRQAKEAFVHELVRWSGLDQLPRGSRVLDVGCGIGGSARILARDYGLDVLGVSISPAQIRRATELTPAGLSCRFEVMDALNLQLPDRQFDAVWTVEAGPHMPDKQRFADELLRVLRPGGCLAAADWNRRAPKDGAMNSTERWVMRQLLNQWAHPEFASISGFRANLEASPHQRGLISTGDWTLATLPSWFDSIAEGLRRPWAVLGLGPKAVLQGLRETPTLLLMHWAFATGLMQFGVFRLSR

SEQ ID NO: 2109 - protein, 493 aa, Oryza sativa
MDASAGGGGNSLPTAGADGAKRRVCHFYDAEVGNYYCGQGHPMKPHRIRMTHALLAHYGLLDQMQVLKPHPARDRDLCRFHADDYVAFLRSVTPETQQDQIRALKRFNVGEDCPVFDGLYSFCQTYAGGSVGGAVKLNHGHDIAINWAGGLHHAKKCEASGFCYVNDIVLAILELLKYHQRVLYVDIDIHHGDGVEEAFYTTDRVMTVSFHKFGDYFPGTGDIRDIGYSEGKYYCLNVPLDDGIDDDSYQSIFKPIISKVMEMYRPGAVVLQCGADSLSGDRLGCFNLSGKGHAECVKFMRSFNVPLLLLGGGGYAIRNVARCWCYETGVALGHELTDKMPPNEYFEYFGPEYSLFVAASNMENRNTNKQLEEIKCNILDNLSKLQHAPSVQFEERIPETKLPEPDEDQEDPDERHDPDSDMVLDDHKPMGHSARSLIRNIEVKREITESEAKDQHGKRLTTEHKGPEPMADDPGSSKQAPVSRRLLYPSANP

SEQ ID NO: 2110 - protein, 279 aa, Triticum aestivum
  unsure (1)..(279): unsure at all Xaa locations
MAGSMELPTKGGFSFDLCRRNAMLEKNGLKMPGFRKTGTTIVGLVFADGVVLGADTRATEGPIVADKNCEKIHFMAPNIYCCGAGTAADTEAVTDMVSSQLQLHRYATSRESRVVTALTLLKTHLFNYQGHVQCCSRFLAEDDVTGPHLHTVYPHGSTDTLPFATMGSGSLXAAMSVFESKYRRRSSLRPWMGIETLKLEAIQALDIFNELGXVGSNVDVCVINKGGTESMREHELSKPKGFVXSAGVKTQXGNTKTLATKITQLKPTPEVASGGAKGS

SEQ ID NO: 2111 - protein, 405 aa, Glycine max
MPMATTHFQGLGVVTPSFSSSHSNKFLLSSRSERKDGIFMVRSDAARVLKTEGRKHELLVTNAVATKGGASSAASTSKSGSGHELLLFEALREGLEEEMERDPCVCVMGEDVGHYGGSYKVTKGLAPKFGDLRVLDTPIAENAFTGMGIGAAMTGLRPVVEGMNMGFLLLAFNQISNNCGMLHYTSGGQFKIPIVIRGPGGVGRQLGAEHSQRLESYFQSIPGIQMVACSTPYNAKGLMKAAIRSENPVILFEHVLLYNLKERIPDEEYVLSLEEAEMVRPGEHVTILTYSRMRYHVMQAAKTLVNKGYDPEVIDIRSLKPFDLHTIGNSVKKTHRVLIVEECMRTGGIGASLTAAITENFHDYLDAPIVCLSSQDVPTPYAGTLEEWTVVQPAQIVTAVEKLCQ

SEQ ID NO: 2112 - protein, 204 aa, Triticum aestivum
  unsure (1)..(204): unsure at all Xaa locations
NSKEENGIPMNRARNDECENLFNMIVEIPRWTNAKMEIATKEPMNPIKQYVKDGKLRYVANIFPYKGYIWNYGTLPQILSCGEVXHVKILGILALIDEGETDWKLIAINANDPEASKFHDIDDVKKFKPGYLEATLNWFRLYKVPDGKPENQFAFNGEFKNKAFALEVIKSTHQCWKALLMKKCNGGAINCTNVQISDSPFRCT

SEQ ID NO: 2113 - protein, 362 aa, Streptomyces viridochromogenes
MSLTIGIVGLPNVGKSTLFNALTKNDVLAANYPFATIEPNVGVVGVPDARLTKLAEIFSSQRILPATVDFVDIAGIVRGASEGEGLGNKFLANIRESDAICQVIRAFKDENVVHVDGKVSPKDDIETINTELILADLQTIEKVLPRLQKDSRIKKDLAPKVKAVEEAKEILERGDTLFAHGIVQGTERNELLHDLHLLTTKPFLYVFNVDEDELIDEDFKNEQRALVAPAEAIFLNAKLEADLAELDDDEALELLQSVGQDEPGLATLARVGFNTLGLQTYLTAGPKESRAWTIKKGATAPEAAGVIHTDFQKGFIKAEVISFTDLVETGSVAEARAKGKARMEGKDYVMQDGDVVEFRFNV

SEQ ID NO: 2114 - protein, 152 aa, Zea mays
MVKAVAVLGSSDGVKGTIFFTQEGDGPTTVTGSVSGLKPGLHGFHVHALGDTTNGCMSTGPHYNPASKEHGAPEDENRHAGDLGNVTAGADGVANINVTDSQIPLTGPNSIIGRAVVVHADPDDLGKGGHELSKSTGNAGGRVACGIIGLQG

SEQ ID NO: 2115 - protein, 217 aa, Zea mays
MEPRRISASPRPCSGRRVVARKRPRQEAVVSSVRKLQRREISSRRDRTFTMSAAQERFRNIQLQEEFDTHDPKENASLLPYLRKRSKIIEIVAARDIVFALSQSGVCAAFSRETNRRICFLNGSPDEVIRSLFYNKNNDSLITVSVYGSENFSALRCRTTRIEYVRRGQPDAGFPLFESESLKWPGFVEFDDVNGRGLTYSAQDSTYKVFDLKNYTL

SEQ ID NO: 2116 - protein, 71 aa, Zea mays
KADMVSNMVCNMLTYMVGFSETLYGKVHFQDILTNILNNIFQYFYWSFHYSIGYETAKVMIEPLITLELMM

SEQ ID NO: 2117 - protein, 561 aa, Oryza sativa
  unsure (1)..(561): unsure at all Xaa locations
ILVPTYHNILIIRSTSITRHGCHHHRVHGDGIAVGRAVRXGLAFFAFSVCLAALGVVLLVARRWPWCSCHVCRAYLTGSWAREFTNLGDWYAHLLRRSPTGTVHVHVLGCTVTANPANVEHMLRTRFDNFPKGRPFAALLGXDLLGDGIFNVDGHAWXAHQRKMASLELGSVAVRSYAYKIIAQEVEARLMPVLADAADRGAVLDLQDVFRRFAFDNICKISFGLDPGCLDREMPVSELADAFDAASRLSAMRGAAASPLLWRAKRFLNVGSERELRKAIKVVDELAAAMIRERQKLGVGSSHDLLSRFMASTGVDDAAADDKFLRDIVVSFLLAGRDTVSTALTTLFMLLSKNPEVAAAMRAEAEAGDGGETGAAITYEHLKGLHYTHAVLHENMRLFPPVQFDSKFCAAADVLPDGTYVGGDARVMYHPYAMGRIPHIWGADYAAFRPARWLTGPGASFVPANPYKYPVFQAGQRVCLGKELAVTEMKAASVAVVRAFDVEVVGENGRRPRFVPGLTASISGGLQVRVRRRVHTXTARRLHFYCNNKLKQVITGLYIEK

SEQ ID NO: 2118 - protein, 362 aa, Arxula adeninivorans
MSKNIIILSGDHVGPEVTAEAIKVLEAITQARPNVKFNFDHKLIGGAAIDATGSPLPDETLEASKKADAVLLGAVGGPKWGTGAVRPEQGLLKIRKELNLYANLRPCNFMSEKLLDLSPLRSEIVKGTNFTVVRELVGGIYFGTRKEDEGNGEAWDTEKYTVEEVKRITRMAAFLALQSNPPLPVWSLDKANVLASSRLWRKTVTETIEKEFPQLTLNHQLIDSAAMILIQNPSKMNGVIVTSNMFGDIISDEASVIPGSLGLLPSASLSSLPDKNTAFGLYEPCHGSAPDLPPNKVNPIATILSAAMMLRLSLNLKEEADAVEKAVSKVIDNGIVTADLKGASSTTEVGDAVAAEVQKLLK

SEQ ID NO: 2119 - protein, 76 aa, Zea mays
STTRAPTRVPTRRFDFHFQDGSQPGRVHLDMTGQNVTECTGGSSNVTFDNLRDRYHTHCDPRLNTYHSLELSLILS

SEQ ID NO: 2120 - protein, 267 aa, Glycine max
FGSSFHGRTLGALALTSKVQYRMPFEPVMPGVTFLEYGNAQAAVELIKQGKIAAVFVEPIQGEGGIYSATKEFLQSLRNACDETGALLVFDEVQCGLGRSGFLWAHEAYGVFPDMMTLAKPLAGGLPIGALLVTERVASAINYGDHGSTFAGSPLVCSAALAVLDKISKPDFLSSVSKKGLYFKELLREKLGENRHVKEIRGVGLIIGIDLDVPASPLVDACRSSGLLVLTAGKGNVVRLVPPLIITEKELEQAAGILCQTLPVLDN

SEQ ID NO: 2121 - protein, 345 aa, Sulfolobus solfataricus
MVEGFSPMKSVIMENGKAVIKELPLPKLQQGDVLVKMKACGLCGTDIEKICGQYTASQPILGHEPTGIIQESTVDWLKPGDRVFAHHHVPCYECYYCKKGSPTMCPYYRKTNLDPGGFSEYFRVPAWNVARGGVLKLPDNVSFEEGAFIEPLATVIRAQKRVAIDNGDTVFIVGIGPMGLLHAMMAKVNKAGVIIASDVSDFRTEFGYKVGINYSLNAKKVNVVDEVKRLTDGRGADVTIIASGSPSAIVSGLNATRKGGRVLLFGVPYKGTILNYDISDLLNNEISIIPSNAAVEEDTKEALAIIANKKIDVTKLITHRFSLDEFNEAVRIGKEGNAIKVIIYS

SEQ ID NO: 2122 - protein, 222 aa, Triticum aestivum
MAGEKGLVLLDFWVSPFGQRVRIALAEKGLPYEYAEEDLMAGKSDRLLRANPVHKKIPVLLHDGRPVNESLIILQYLEDAFPDAPALLPSDPYARAQARFWADYVDKKVYDCGSRLWKLKGEPQAQARAEMLDILKTLDGALGDKPFFGGDKFGFVDAAFAPFTAWFHSYERYGEFSLPEVAPKIAAWAKRCGERESVAKSLYSPDKVYDFIGLLKKKYGIE

SEQ ID NO: 2123 - protein, 489 aa, Streptomyces coelicolor A3(2)
MSKDAVDTAQVAAHPQATGTIPADAGDAGYSKDLKARHVNMIAIGGAIGTGLFLGAGGRLRDAGPALAIAYLVAGVFAFFVVKALGELVLYRPSSGSFVSYAREFLGEKGAYVAGWMYFLNWSTTGIADITAIALYTHYWSMFTSIPQWVLALVALAVVLAVNLISVKIFGEMEFWFAIVKVATLVGFMLIGIFLLATQHEVSGQTPGMGMITDHGGILPHGVMPVVLVMQGVIFSYAALELVGVAAGETAEPHKIVPRAVNSIMWRVALFYVGSVVLLALLLPSSLYSGDESPFVTVLSGIGVPAAGDVMNLVVLTAAMSSLNSGLYSTGRILRSMAMAGSAPRFTGVMSRSQVPYGGILLTCAVCVLGVGLNYLVPSKAFEIVLNVASLGIISTWVIIMICHLVFVRRARAGLVERPGFRLPGSPVTEIVTIAFLLAVVGLMWNDEEVGRKTVLLVPVIAVMLVAGWFGVRRRVAHQAGQERPAPRE

SEQ ID NO: 2124 - protein, 341 aa, Oryza sativa
  unsure (1)..(341): unsure at all Xaa locations
EEEEQEAAPAEEDEEQELDPEAVELEALTNEIDEESQVVGEVLRIKDLFLHKEDHSDATLFESLRRLQLMQLSVSTLKATEIGRAVNGLRKHNSQQIRHLVRTLIEGWKILVDEWVSTTXXVALTDNSPGSSKTSVVDDADDEGLPSPPLDEGVFATQTTAIQLSEFFDEMDEDGNLRHNNDGSLGNKRENYGRRANPQTPQNSSLQVKQQAMLHKQSKPLSSDSGPGRPLRAAPQQKPFVEMKSRLAREQVAVERKPAASQDKSRLPAPKPKIYDGLESNSRLEAAKRRLQERYQEAENAKRQRTIQVMELGDIPKPKHQNRQPMMKSRNHIRSWANGRR

SEQ ID NO: 2125 - protein, 130 aa, Oryza sativa
  unsure (1)..(130): unsure at all Xaa locations
RPGASAAAEQIGIRRFLLLRRWRWIPKPITLPLLLLPPTTPRRRRRRRRXRXKVLFFARARDLTGVTEAPVEVPAGSTAGDCLARVLAAFPRLEEIRRSMVLALNEEYAPEDAAVGDGDELAIIPPISGG

SEQ ID NO: 2126 - protein, 221 aa, Zingiber officinale
  unsure (1)..(221): unsure at all Xaa locations
DVLPDSIDWREKGAVVPVKNQGGCGSCWAFDAIAAVEGINQIVTGDLISLSEQQLVDCSTRNHGCEGGWPYRAFQYIINNGGINSEEHYPYTGTNGTCDTKENAHVVSIDSYRNVPSNDEKSLQKAVANQPVSVTMDAAGRDFQLYRNGIFTGSCNISANHYRTVGGRETENDKDYWTVKNSWGKNWGESGYIRVERNIAESSGKCGIAISPSYPIKEXXX

SEQ ID NO: 2127 - protein, 359 aa, Thermobifida fusca
MKAAVLHEFRKDLVIEDVTVSEPAPDEVLIRVAASGVCHTDRTMQQGANDLPLPLILGHEVAGIVERVGSAVTAVEPGDHVVTCASAFCGTCRWCMRGELQHCAHKRRSRDPGQPPRLSQGDTPVEPFVGLGGFAEQVLVYEGAVVKLPEEMPLDRAALLGCSVITGMGAVRNAAQVQSGQTVAVIGCGGVGLNVIQGARLCGAAQIIAIDRLADKLDLARQFGATHTIDASTTDPVEAVRELTGGGVDHAIEVVGIAATMEQAFRMLDTKGTATVVGVAHPEVQVSIRATDLLLEKRLQGSKMGSARPRIDIPFYCQLYLDGRLKLDELLTARVPLSEVNSALAALDNPLGARTVLTF

SEQ ID NO: 2128 - protein, 334 aa, Oryza sativa
  unsure (1)..(334): unsure at all Xaa locations
GPGTSRARTFTRTCKGLVVVLVGGYVLLQLLPSSLDYLAIIPAKTIPFVWTVFTAGYIEQVLPGAIGSSLGLLFCGKDIEPVWGRKEFLKFIILVNSICGVLAFCFAVALYYVTGKESFLVTPLSGFHGALAGFLVGLKQLLPNLELLFWKIKAKWMPFFVLCFSTIMAFIVPDSINFXLPTLLSGMYVSWIYLRYFQRNPLTGLKGDSSDDFSFPSLFPDAMRPVTDPVANLFDRMLCARSRXXSELALPVSDPAKASRRRERGERVLEERLAADHAADTEAPALGHSTAEDXYSSSTVNTPYCDRSHGHLPMCFVTPKICVLENAIQFTMDQ

SEQ ID NO: 2129 - protein, 326 aa, Chloroflexus aurantiacus
MQYTRFGSTGMHVSRICLGCMSYGSPQWREWVLDEDASRPFIFRALELGINFFDTADMYSLGVSEEILGRAIRDSGVRREELVIATKVYQPMSDRPNDRGLSRKHIMQAIDASLRRLGMDYVDLYQIHRWDYETPIEETLEALNDVVRAGKALYIGASSMFAWQLAKALGIQERRGWARFVSMQNHLNLVYREEEREMLPLCRDAGLAVIPWSPLARGFLTGNRPQGTGAATVRGRSDTISHAMYDASDYVIVERVSELARERGVSNAQIALAWLLHKPEVTAPIIGATKMYQLEEAVAALDVKLSPEEIQRLEEPYRPKPIRGHA

SEQ ID NO: 2130 - protein, 208 aa, Ralstonia metallidurans
MSRQRTLESVQRTALAGALTLAAAVAVMLPPPAHAAEKAVPAAAQPAGNCPASLNFRFPRLQDESPQNLCQYAGKVVLVVNTASYCGFTPQYEGLEALYAKYRERGLVVLGFPSNDFSQEPGSSKDIADFCYNTYGVKFPMLGKSHVRGSDANPMYALLAQETGTAPKWNFYKYLIDRKGQVIGSYNSMVKPDDKQFVSKIEELLNAR

SEQ ID NO: 2131 - protein, 504 aa, Triticum aestivum
  unsure (1)..(504): unsure at all Xaa locations
MDTITVVENVFGEVERKVQKSYWEEHSKDLTVESMMLDSRAKDLDKEERPEVLAILPSYAXGKTVLELGAGIXGRFTGELAKEAXGHVIALDFIDSVIKKNEEINGDIYKNITFMCADVTSPELKIEDNSVDIVFSNWLLMYLNDEEVEKLIGRIVKWLKPGGHIFIRESCFHQSGDSKRKVNPTHYREPRFYTKVFKECHSYDQEGNSFELSLVTSKCIGAYVKSKKNQNQICWLWEKVKCTEDKGFQRFLDNVQYKSTGILRYERVFGEGYVSTGGFETTKEFVDKLDLKAGQKVLDVGCGIGGGDFYMAETYDVHVLGIDLSINMVSFAIERAIGRSCSVEFEVADCTTKEYAENTFDVIYSRDTILHIQDRXKPALFRNFFKWXLKPGGKVLISDYCRSPGTPSEEFAAYIKQRGYDLHDVKTYGKMLEDAGFHDVVAEDRTDQFLRVLERELGETEKNKEAFLADFTQEDYDDIVNGWSAKLKRSSAGEQKWGLFIATK

SEQ ID NO: 2132 - protein, 345 aa, Pseudomonas aeruginosa PAO1
MSQSTQVNRRIVLASRPHGAPTRDNFRIEQVPLPEPGAGQVLLRTVYLSLDPYMRGRMSDAPSYAPPVELGAVMVGGTVSRVEASNHPGFKVGDWVLSANGWQDYALSDGSGLARLGESPEHPSYALGLLGMPGFTAYMGLLDIGKPQAGETLVVAAATGPVGATVGQIGKLKGCRVVGVAGGAEKCRHAVQVLGFDACLDHHAADFAERLAEACPDGIDIYYENVGGKVFDAVFPLLNAKARIPVCGIVAHYNDTELPPGPDRLPALMGTILRKRIKVQGFIIFDDYGHRYDEFQRDMSKWFADGLIQYREERVDGLENAPEAFFGLLQGRNFGKLVVRVGADA

SEQ ID NO: 2133 - protein, 472 aa, Yersinia pestis KIM
MRECTMKNDSSTLKRGLSARHIRFMALGSAIGTGLFYGSAEAIRLAGPAVLLAYLIGGAAVFMVMRALGEMAVHDPVAGSFGHYASRYLGPLAGFLTGWTYTFEMVVVALADVTAFGIYMGLWFPDAPQWVWVLSIIFFIGALNLCSVKVFGEMEFWLSLLKVAAIIAMIAAGLGIMMFGFGAGHDSTGVSNLWAHQGFMPNGITGVIASFAVVMFAFGGIEIIGVTASEAKDPGKVLPRAINTVPIRILLFYVLTLFVLMAIYPWNSIGQNGSPFVEIFSSLGINSAANILNLVVITAAISAINSDIYGAGRMMYGLAQEGLAPKSFSRLTRNGVPYMTILVMAITLLCGVVLNYLIPKNVFLVIASIATFATVWVWLMILVSQVAMRRSMSKAQVARLAFPVPFWPLAPILTILFMAFIIAVLGYFPATRIAMYVGLAWVALMTLAWWIWLRKAPSCVIQERAKSSEMPS

SEQ ID NO: 2134 - protein, 343 aa, Schizosaccharomyces pombe
MDALSFNTNSGYIEALVRGYESALLEQHIYSNLSQCESLEDFRLQLSSTDYGGFLANQSKLTSSIISAKATEKLLDEFDLIRRQADETLSKFMDYITYAYMIDNIMLLLTGTVNGQDTHDLLERCHPLGWFETLPALCVATNVEELYSVVLIETPLAPYFKDCLSADDLDEQHIEIIRNTLYKAYLEDFYNFCKKIGACTADTMLPILEFEADRRAITITINSFGTELSKEERAKMYPSFGRLYPFSTSILARAENAGDVENACSLVKEYSDFFDQNSQKSLDDHFNEKEVELNKLAFLQQFHYGIVYAFLKLREQEIRNLTWIAECISQNQRDRALNIVPIL

SEQ ID NO: 2135 - protein, 427 aa, Coxiella burnetii
MTELTGVSIVTYQHIKVPSQGEKITVNKAVLEVPDRPIIPFIEGDGIGIDIAPVMKNVVDAAVEKSYAGKRKIEWMEIYAGEKATKVYGKDNWLPDETLEAIKEYQVAIKGPLTTPVGGGIRSLNVALRQQLDLYVCLRPVRYFTGVPSPVKTPEKVNMVIFRENSEDIYAGIEWPAGSPEAVKLINFLQNEMGVKKIRFPETAGIGIKPVSKEGTSRLVRRAIQYAIDNDRDSVTLVHKGNIMKFTEGAFKDWGYEVAVKEFGAKPLDGRPWHVFENPKTGQKITIKDVIADAFLQQILLRPAECSVIATLNLNGDYISDALAAEVGGIGIAPGANLSDTVGLFEATHGTAPKYAGQDKVNPGSLILSAEMMLRYLGWKEAADLVVQGIEGAIESKTVTYDFARLMTGAKEVSTSQFGKAIIKHIL

SEQ ID NO: 2136 - protein, 406 aa, Escherichia coli CFT073
MSQPITRENFDEWMIPVYAPAPFIPVRGEGSRLWDQQGKEYIDFAGGIAVNALGHAHPELREALNEQASKFWHTGNGYTNEPVLRLAKKLIDATFADRVFFCNSGAEANEAALKLARKFAHDRYGSHKSGIVAFKNAFHGRTLFTVSAGGQPAYSQDFAPLPPDIRHAAYNDINSASALIDDATCAVIVEPIQGEGGVVPASNAFLQGLRELCDRHNALLIFDEVQTGVGRTGELYACMHYGVTPDLLTTAKALGGGFPVGALLATEECASVMTVGTHGTTYGGNPLASAVAGKVLDLINTPEMLNGVKQRHDWFVERLNSINHHYSLFSEVRGLGLLIGCVLNADYAGQAKQISQEAVKAGVMVLIAGGNVVRFAPALNVSEEEVTTGLDRFAAACEHFVSRGSS

SEQ ID NO: 2137 - protein, 520 aa, Brassica napus
MESSISQTLSQVIDPTTGILIVVSLFIFIGLITRRRRPPYPPGPRGWPIIGNMSMMDQLTHRGLANLAKKYGGLCHLRMGFLHMYAVSSPDVAKQVLQVQDSVFSNRPATIAISYLTYDRADMAFAHYGPFWRQMRKVCVMKVFSRKRAESWASVRDEVDKMIRSVSSNVGKSINVGEQIFALTRNITYRAAFGSACEKGQDEFIRILQEFSKLFGAFNVADFIPYFGWIDPQGINKRLVKARNDLDGFIDDIIDEHMKKKENQNSVDAGDVVDTDMVDDLLAFYSEEAKLVSETADLQNSIKLTRDNIKAIIMDVMFGGTETVASAIEWALTELLRSPEDLNRVQQELAEVVGLDRRVEESDIEKLTFLKCTLKETLRLHPPIPLLLHETAEDTEIDGYFVPKKSRVMINAFAIGRDKNSWVDPETFRPSRFLEPGVPDFKGSNFEFIPFGSGRRSCPGMQLGLYALELAVAHILHCFTWKLPDGMKPSELDMSDVFGLTAPKATRLYAVPSTRLICSV

SEQ ID NO: 2138 - protein, 462 aa, Vibrio vulnificus CMCP6
MPNQHQYFGHPRGLFLLFGTELWERFSYYAMRAILVLYLTDTTINGGLGWTTKDALDLYGTYTGLVYITPLIGGYLADNYLGQRRSILIGGALMAIGQFTLALPADALGLGSLHTFYLGLALLIAGNGLFKPNISTMVGDLYQEGDNRRDGAFTIFYMGINLGALIAGVVSGSVTTEFGWKAGFVAAGIGMLISLVMQMALAQSWLGDIGREPAAKRDLAIKKSAQKEALTKEEVDRIKVILVMSLFTIVFWAGFEQAGGLMNIYTQQYTDRMIGSFEIPAAWFQSLNPFFIITLAPVLAVLWVKLGKREPNSPVKFALAMFFLALGFLCMVGAVVEQSGDTSVKTSMLWLVGAFFFHTLGELCLSPIGLSLVTKLAPLRLASLMMGAWFGCNAIANYVAGYVGSHVGELGAFAIFSGIAVTATVSGVILLLFSNQLVHWMHGAESGSSTAEQIEEQQALVS

SEQ ID NO: 2139 - protein, 169 aa, Glycine max
  unsure (1)..(169): unsure at all Xaa locations
MNDAFRKSYCIEHTTDLSVESMMLDSNASDLNKEERPEVLSLLPPYEGKSVVXLGAGIGRFTDELAKKADQLLAEDXIESAIQKNESITGHHKNVKIMCADATSPNLYISEGSVDLIFSDRLLMYLSDEEVENLPARMIMWSIAGAYGFFTETCLHQSEDSTREYNPAH

SEQ ID NO: 2140 - protein, 550 aa, Schizosaccharomyces pombe
MNFSNGSKSSTFTIAPSGSCIALPPQRGVATSKYAVHASCLQEYLDKEAWKDDTLIIDLRPVSEFSKSRIKGSVNLSLPATLIKRPAFSVARIISNLHDVDDKRDFQNWQEFSSILVCVPAWIANYVTNAEVIGEKFRKESYSGDFGILDLDYSKVSGKYPSVIDNSPVKSKLGALPSARPRLSYSAAQTAPISLSSEGSDYFSRPPPTPNVAGLSLNNFFCPLPENKDNKSSPFGSATVQTPCLHSVPDAFTNPDVATLYQKFLRLQSLEHQRLVSCSDRNSQWSTVDSLSNTSYKKNRYTDIVPYNCTRVHLKRTSPSELDYINASFIKTETSNYIACQGSISRSISDFWHMVWDNVENIGTIVMLGSLFEAGREMCTAYWPSNGIGDKQVYGDYCVKQISEENVDNSRFILRKFEIQNANFPSVKKVHHYQYPNWSDCNSPENVKSMVEFLKYVNNSHGSGNTIVHCSAGVGRTGTFIVLDTILRFPESKLSGFNPSVADSSDVVFQLVDHIRKQRMKMVQTFTQFKYVYDLIDSLQKSQVHFPVLT

SEQ ID NO: 2141 - protein, 192 aa, Zea mays
MSKYGTIPTTSSTPAPEGSSQLDFISRAKARGASALATRRPWRELADPRALSVPRGFSDAYRRARANLAHFAANYALVVLLVVFVSLLWRPVSMLVFLACFAAWLVLYFLRDRDVDGTLVICGRGVGDGVVVAVLSAVTLALLLLTGATGFILTSLLVGLLLVLLHALLHRPADSIDDEAGRWYTPVPPSNY

SEQ ID NO: 2142 - protein, 509 aa, Vicia faba
MLQRSRTLPSKIYQGVIEERKDGRHYIELEPLPKMETETKPITIQSKCLDDDGRVKRTGTFWTASAHIITAVIGSGVLSLSWAIAQLGWAVGPVVMVLFAVVNLYTSTLLTQCYRSDDSVAGPRNYTYTDAVKSILGGKKFKICGVIQYVNLFGVAIGYTIAASVSMMAIKRSNCYHESHGNDPCHMSSNVYMIAFGIAEVILSQIPDFDQVWWLSIVAAIMSFTYSAVGLGLGVAKVAENGTFHGRLMGISIGTVTPAGTVTGTQKVWRSLQALGAMAFAYSFSIILIEIQDTIKSPPAEHKTMKKATMLSIMVTTVFYILCGSMGYAAFGDHVPGNLLTGFGFYNPYWLLDIANFAIVVHLVGAYQVFSQPFFAFVEKWSAHKWPKNKFVTEEYDIPIPCIGVYKLNLFRLIWRTIFVLLTTLIAMLLPFFNDVVGLLGAFGFWPLTVYFPIDMYISQKKIGRWTNRWLGLQMLSGCCLIISTLAAVGSIAGVVLDLKTYKPFKTSY

SEQ ID NO: 2143 - protein, 435 aa, Zea mays
MASSVLSECGFRPLPRFYPKHTTSFASNPKPTFKFNPPLKPPSSLLNSRYGFYSKTRNWALNVATPLTTLQSPSEEDTERFDPGAPPPFNLADIRAAIPKHCWVKNPWMSMSYVVRDVAIVFGLAAVAAYFNNWLLWPLYWFAQGTMFWALFVLGHDCGHGSFSNDPRLNSVAGHLLHSSILVPYHGWRISHRTHHQNHGHVENDESWHPLPESIYKNLEKTTQMFRFTLPFPMLAYPFYLWNRSPGKQGSHYHPDSDLFLPKEKKDVLTSTACWTAMAALLVCRNFVMGPIQMLKLYGIPYWIFVMWLDFVTYLHHHGHEDKLPWYRGKEWSYLRGGLTTLDRDYGWINNIHHDIGTHVIHHLFPQIPHYHLVEATEAAKPVLGKYYREPKNSGPLPLHLLGSLIKSMKQDHFVSDTGDVVYYEADPKLNGQRT

SEQ ID NO: 2144 - protein, 346 aa, Pirellula sp.
MKALLLTEYKNMQVTDVDEPEVGPDDVLVQVEACGICGSDIHGYDGSTGRRIPPLVMGHEAAGVVVQVGENVRDLELGARVTFDSMVSCGNCEFCREGHGNLCDNRMVLGVSCGDYRRHGAFAERISVPRRIVYRLPDTLPFEHAALVEAVSVAVHAAEVTPIKLGDTAVVVGAGMIGLLAVQAVRAAGATQVIAVDLNDKRLETAGTLGADVLLRADQVDVPEKVRELTGGRGADVALEVVGATPTVKTAIESVRKGGAVTLVGNVSPTIELPLQSVVTREIRLQGTCGCNGEYPQCIDLMNRGVINVEPLITAKISLADGPKWFDRLHAGDAEQMKVLVCPRSE

SEQ ID NO: 2145 - protein, 347 aa, Streptomyces coelicolor A3(2)
MSRSLNLAVIPGDGIGQEVVAEGLKVLSAVLPQDVKLETKEFDFGARRYHATGETLTDADLDALKAHDAILLGAIGDPSVPSGVLERGFLLKLRFAFDHHVNLRPSKLLPGVATPLAGQPEIDFVVVREGTEGPYTGNGGTIRKGTEHEVATEVSVNTAYGVERVVRDAFARAQARPRKKLTLVHKNNVLTFAGHLWTNIFNKVAAEYPEVTTDYLHVDAATIFLVTDPARFDVIVTDNLFGDIITDLAAAVSGGIGVAASGNINPSGDFPSMFEPVHGSAPDIAGQGKADPTATVLSVALLLRHLGYEDEAARIEDAVSADLGERGDLPARSTSEIGDTLAARVAG

SEQ ID NO: 2146 - protein, 320 aa, Haemophilus somnus 2336
MNNSRWGMIATWRMAFEGLCQAVELLKNKGSARDAILTAVTQVENYPLYKSVGYGGLPNEEGDVELDAAFMDGTSLALGAVAGLRNIANPILVAEALSHERFNSFLVGHGAEKWALKKGFPAKDMLTPRVKTFYEKRYQETLGRGLSPYSGHDTVGIIALDKNNNICVGTSTSGLFMKRHGRVGDSPISGSGFYADSHIGAATATGLGEDLMKGCTSYEIVRKMKEGMTPQQAADATINELEIRLLERYGTAGDLSVVCMNMQGEFGVSTNIDNFSFVVSTEQYNPIIYLAKRENGITQYEPASESWLQAYLDRIHGELK

SEQ ID NO: 2147 - protein, 355 aa, Oryza sativa (indica cultivar-group)
MAAKLSLLLPVTCFILFVLHAVHVEARPDPAAFGDSDNGFYTLFVFGDSFADTGNLPKRRLSEQSREWYYPYGRDRGNNRPTGRFSNAMVQSDLIARMLGRHEAPPTYRRVDNYVHPHGMNFAAGGSGVFKLPSGAPTLDKQVDHFRDLVQDGTITRRNLRNSIALVAVSGNDYARLANVNDTSKMIKFVDEVTSEIAKQVHRLKNNGARKILVNNLHPVGCTPWVTRPGNYSGCSSTGNMGAYLHGSNLQQKLSHLDYVHHVDLNTAFSNIVNPDQGSKHKVSSQFEHKMQPCCESLDPNGFCGQKGHDGKDLFSVCNDPEKYFYWDDVHPTEAGWKAVMQQLEGPIKKFLGIN

SEQ ID NO: 2148 - protein, 325 aa, Shewanella oneidensis MR-1
MAEMNMLQAVNEALSIAMQADERMVVFGEDVGHFGGVFRATSGLQEKFGRARCFNTPLTEQGIAGFANGLASNGMTAVAEIQFADYIFPAFDQIVNESAKFRYRSGNEFNVGSLVFRTPYGGGIAGGHYHSQSPEAYFTQTPGLKVVVPRNPAQAKGLLLASIRDKNPVVFFEPKRLYRASVGDVPAGDYEIELGKAEVLREGKDITLVAWGAQMEIIEKAADMAAKEGISCEIIDLRTLAPWDVNTVADSVKKTGRLLVNHEAPLTGGFAGEIAATIQQECFLYLESPISRVCGLDTPYPLVHEKEYMPDALKTFEAIKASVNF

SEQ ID NO: 2149 - protein, 340 aa, Synechocystis sp. PCC 6803
MTQSSPPKILVTGGAGYIGSSVVRQLGEAGYSIVVYDNCSTGFPSSILYGQLVIGDLADTERLHQVFHEHEILAVMHFAGSLIVPESLIHPLNYYANNTSNTLSLIRCCQIFGVNRLIFSSTAAVYGNSSSNPISEAEIPCPINPYGRSKLASEWIIQDYAKSSALQYVILRYFNVAGADPEGRLGQMSKTTTHLVRSVCDAILNLKPSLDIFGTDFPTRDGTAVRDYIHVEDLAKAHLDALRYLENGGESQILNCGYGQGYSVREVVDRAKAISGVDFLVRETERRLGDPASVIACADSIRQVLNWTPKYNNLDIILRTALAWEIKRNNLNNRRIHNII

SEQ ID NO: 2150 - protein, 64 aa, Isochrysis galbana
MRGILADWLIEVHHKFKLHIETLYGSVDLIDRYLSKCAPITRSKLQLVGVAAMFIASKYEEIYP

SEQ ID NO: 2151 - protein, 293 aa, Zea mays
TNLDSWTPDQLKMMAFGGNNRAHAFFKQHGWTDGGKVEAKYTSRAAELYRQMLNKEVAKSAITDNALPSSPVTLSDAPAPPAENLNGKHEPKSPKSAPRSPKAATHPTFATSVKKPIGAKKVGGKTGGLGVRKLTTKPNESLYEQKPEEPKPAIPALTAPTAKGGPSLHSRFEYVDNEQSSVSRTGGSGSRVTGHVAPPKSSDFFQEYGMGNGFQKKSSNASKAQQIEETDEARKKFSNAKAISSSQFFGTQNREEKEAQLSLQKFAGSSSISSSDLFGRTNVDDSNLDLSAA

SEQ ID NO: 2152 - protein, 541 aa, Triticum aestivum
  unsure (1)..(541): unsure at all Xaa locations
MALYLLFESASGYALFHAHGIDEIGQSVDAVRSTVLDLKRFSKAVKLAGFTPFLSAVDALNQCNAISEGIMTDELRNFLELNLPKVKEGKKAKFTVGVMEPKVGSHITEATGIPCQSNDYVQELLRAVRLHFDQFIEQLKPSDLEKAQLGLGHSYSRAKGKFNVNRVDNMVIQAIFLLDTLDKDVNSFSMRMREWYGGQFPELAQTLRDNCQDAKQAKXSGKKNTLEKERNXIDLADTSGDXIDGEGKESKGKDLXPVDLINVEQVNSKQSXSISSILKSTFKIFIRNWXKEMTHIVPNLISLMGEAVXAPQTSHASSLANFANCTASILGTVNAVKALFRALKTRGNTPKYGLIFHSSFIGRASTKNKGRMARYLANKCSIASRIDCYSDMSSSIFGEKLREQVEERLDFYDKGVAPRKNLDVMKAAIDGLTNTEDDDGKENGDASVKKSKKKKSKAEANGDAMDVENAAAEAETGTEKKKKKKHKLEEPQDEEMQANGDDETPKKKKKKNREAESVDPKTGTEGKSKKKKKKSKTDDDE

SEQ ID NO: 2153 - protein, 933 aa, Vibrio vulnificus CMCP6
MRNPAIEKAQQALVSVSRQAAAEGIVLLKNDDQALPIEPSQVLSLFGRCQMDTYRSGTGSGGAVNVPYAVTALQGLQANPTIQLNTSLIALYQDWLAHHPFDDGGGGWAAEPWFQHEMPLTDEVVAQAASQSDKAVVFIGRTAGEDKDYADEAGSYRLTELETDMLTKVCRHFSCVIVVMNVTNIIDMSWLTRLENHQAIKAVLYSWAAGMEGGHALADVLSGAVSPSGRLTDTIAHRLQDYPSSAHFGRKDFNLYAEDIYVGYRYFETFAPEAVQFEFGAGLSYSQFERRLVQCSSDVADAGGDLTNAKSLYFEIEVRNIGQQFSSKEVVQLYVEAPQGQLGKPARALCGFAKTSELAPNCSEVVRISVPVALLASFDDSGASGYPNSYVLEAGQYHFYLGGSVRQAQKIDATWWVEHTTSLETLSEACAPTREFERLVPAERHANGVYQPRYQPVPQRTVDLAQRIEANLPPTYAFTGDQGIKLADVAQGRASLEAFVAQLTAEQLAILVRGEGMCSPKVTPGTAAAFGGVCTSLFEFGIPVAAAADGPSGIRMDSGHQATQVPIGTLLACTWNTELNQQLYYLLGQELQAYQIDTLLGPGINIHRHPLNGRNFEYFSEDPLLTGWIAAAQTTGLKQAGVSGTIKHFAANDQETARVDVDSVMSQRALREIHIKPFEMAVKYGQASTIMTAYNPVNGHWAASNYDLNTTILRGEWGYTGIVMTDWWAKMNHPVDGGEESKRFTGYMLRAQNDLYMVVENDAAERNPMDDDTLHALAHGELTLGELQRSAMNICRFILQAPVMQRPLQAYQAVKPFAPLADALPDAAPLLPVTQRMVVNSQNHCELWVEVAQAGHYLCFAEMAYDREPLAQSSCSLSINGEFAMSLPTNGTEGKTVEIEGIAIHLQAGIYRIDTQFVKKGAELKTLRFEGQA

SEQ ID NO: 2154 - protein, 581 aa, Zea mays subsp. mays
MKREYQDAGGSGGDMGSSKDKMMAAAAGAGEQEEEDVDELLAALGYKVRSSDMADVAQKLEQLEMAMGMGGVGGAGATADDGFVSHLATDTVHYNPSDLSSWVESMLSELNAPPAPLPPATPAPRLASTSSTVTSGAAAGAGYFDLPPAVDSSSSTYALKPIPSPVAAPSADPSTDSAREPKRMRTGGGSTSSSSSSSSSMDGGRTRSSVVEAAPPATQASAAANGPAVPVVVVDTQEAGIRLVHALLACAEAVQQENFSAAEALVKQIPMLASSQGGAMRKVAAYFGEALARRVYRFRPPPDSSLLDAAFADLLHAHFYESCPYLKFAHFTANQAILEAFAGCRRVHVVDFGIKQGMQWPALLQALALRPGGPPSFRLTGVGPPQPDETDALQQVGWKLAQFAHTIRVDFQYRGLVAATLADLEPFMLQPEGDDTDDEPEVIAVNSVFELHRLLAQPGALEKVLGTVRAVRPRTVTVVEQEANHNSGTFLDRFTESLHYYSTMFDSLEGAGAGSGQSTDASPAAAGGTDQVMSEVYLGRQICNVVACEGAERTERHETLGQWRSRLGGSGFAPVHLGSNA

SEQ ID NO: 2155 - protein, 344 aa, Schizosaccharomyces pombe
MASATTHFQPKNVPFRFLGRSGLKVSAFSLGGWLTYGNEGYDVEHTKNCLKQAWDLGINTFDTAEIYSNGNSETVMGKAIKELGWDRSEYVITTKVFFGAGTKLPNTTGLSRKHIIEGLNASLKRLGLPYVDVIMAHRPDPSVPMEEVVRAFTQLIQDGKAFYWGTSEWSAFEIEHAHHIATKYNLIAPVADQPQYNYLTRDHFEKDLLPLQQIYGYGATVWSPLKSGILTGKYNDGIPEGSRLSTTFTSLAGQLQTPEGKTQLDQVRQISKIAEQIGATPSQLALAWTLKNPYVSTTILGASKPEQIVENVKAVEFIDKLTPEILKKIDEILNFTPLEIQYRR

SEQ ID NO: 2156 - protein, 182 aa, Glycine max
MPLSVPARARIHHLHGPSFFPSISKPKQKPIWPTLLPLNRAFGCRSLEIAVPSPSSSLPSNVGPNSWKHVDVATLSNLCVDIVLNVPQLPPPSPLQRKAFMDRLAQSPPDKKYWEAGGNCNMAIAAARLGLNCISIGHVGNEIYGKFLSDVLRDEGIGLVGMITNDDIVNSSSGSASCELFM

SEQ ID NO: 2157 - protein, 323 aa, Ralstonia solanacearum
MLMQAFYTDHFVLPLPPGHRFPMRKYSLLRERALAEVPGLVMHEAPRAGDDALLLAHAPDYVSAVGAGRLDPARQREIGFPWSPEMVERSRRSAGATMAACEAAMADGIAVNLAGGTHHAYADKGGGFCVFNDAAIASRWMQRRPGRTPEHFPVAIVDLDVHQGNGTASILRDDASVFTLSEHGEKNYPFRKEASDLDVGLPDGCGDAAYLEALAGALDTLAARFAPRLIIYLAGADPHEGDRLGRLRLTMDGLARRDRQVFDFAFLRRIPIAVTMAGGYGNNIDDTVAVHAQTIALAALHAARWAAGEAATSVSSSSLPLSA

SEQ ID NO: 2158 - protein, 167 aa, Blumeria graminis
MGPTTTLYDFMPKDKNGEPVPLEKYKGQVVLIVNTASKCGFTPQFEGLEKLYKSVSSTHPGKFTILGFPCNQFGGHDPGSNDEIQNFCRINYGVTFPMLGKVNVNGDTADPLFEWLKVEKPGIMGMKRVKWNFEKWLVSKDGKPIKRYSSTAGPEGFQSLIIEEIEK

SEQ ID NO: 2159 - protein, 97 aa, Zea mays
HWVPRGRPGFFFLHDQEGKSPQEGIPLEMTGQNVTECIGGSRTVTFDDLSDRYPTPCDPRLNASQSLELAFIIAKRLRKRRMRSGLNNSLPLPPLAF

SEQ ID NO: 2160 - protein, 381 aa, Zea mays
PRVRGQTPTARVRPCSSVLAIALGCLPSVICGSGWCPSPLPPLPRLAVKRTDKIGDYSGSSKWGKKPVSLDDDRRSTYDQHYSRNIFLGIRLEDERKLLVPVGVQQPHAYARSLARFASKLGPVGWDVAANRIRRALPPGTSFGPGWVVDGEPPQNSQWAPAASTNPSSEPTAPPNMPSKNDVLDHKSGPSSNGDVTAEEHLIRTQTVASTSASFDKSSDISSKVTKLENGVTESCGGTDNTGSSAPPMQQHSHNREIHSNINGFAAMSNAMSQYAGQGLFGSGIHMTHAQVLGMFSGMNGKVNGYIHRHPVTADSLKTAGQNGDVGKATVNPVQGAGQDPKTATENSSAHPGLNSRAQSSGSSPRGKLANPKHPDLALQL

SEQ ID NO: 2161 - protein, 314 aa, Oenococcus oeni MCW
MDKQNVVIGKSDVVSTPLGLGTNAVGGTNLFPNLQDNTGVEIVKTGLDNGIKLLDTAFAYGMGHSEELIGQAIKDYKRDQIVIASKAAQDTSTGDVTINNSPDFLKKAVDDSLMRLKTDYIDIFYIHFPDEKTPKNEAVATLNELKKAGKIRAIGVSNFSLAQIKEANQDNYVDVVENEYSLLHRDAEKDVFPYLHDHKISFVPFFPLASGLLTGKYSKTVTFPEDDIRHDNPDFKGDRFAKIVDKVSSIKSIADSHDATVAQTILAWYIANPEISVVIPGAKKASQVESNAKALDVRLSDSEYKQIDDTFKEF

SEQ ID NO: 2162 - protein, 144 aa, Methanosarcina mazei Goe1
MKEEGITTHVASMKKGKIKGKYGYDVEVDIAFKDVNPEDYDILVISGGKGPEKMRLDKDALEITKHFFEKNKPVAAICHGPQVLVSAGVIKGRKATCWIGIRDDIIAAGALYEDSEVVIDGNFVSSRSPDDLYAFGREMIKLLK

SEQ ID NO: 2163 - protein, 349 aa, Streptomyces avermitilis MA-4680
MRGVVFDGKQTQVVDDLEIREPGPGEVAVAISAAGLCHSDLSVVDGTIPFPVPVVLGHEGAGVVEAVGSGVTHVRPGDHVALSTLANCGACAECDRGRPTMCRKAIGRPQQPFARGGRPLYQFAANSAFAERTVVKAVQAVRIPKDIPLPSAALIGCGVLTGVGAVLNRARVEHGDSVLVIGTGGIGLNVLQGARIAGALTIVAVDANPAKEAVARQFGATHFLTSTEGVRDILPTGADHAFECVGRAALIRQAVDLLDRHGQAVLLGVPPATAEASFLVSSLFLDKSILGCRYGSSRPQRDIALYADLYREGRLLLDELVTATYPVEDFEKAAADAHEGRVARAVLTF

SEQ ID NO: 2164 - protein, 414 aa, SYNECHOCOCCUS SP. WH 8102
MTAAPLPSTGAVTGLGETLAFFRDPSFSQRRFSELGDVFETKLLAQSIVFIRGERAIGDLLKQEDCLQGWWPDSVRQLLGSKSLANRSGADHKARRRVVGQLFSSAALSRYTPAIEALVNDLANELQQAEGPIPLAARMRRFAFSVIATTVLGLEAENRDALFADFEIWTRALFSIPLALPGTPFARALAARQRLLARLKTVLQTNNNRQQGGLDLLSGGLDEAGLPLDDDDLVEQLLLLLFAGYETTASSLSCLFRALLLNPEVEQWLMQDLNNHERPSRLDATVLEVMRMTPPVGGFFRQNTQSIELADVAIPQGRVIQVVLSSSSTTNQIDLETFRPQRHLDGSFQQTLLPFGGGERVCLGKALAELEIRLMAMGLLQRVQLHLEPDQDLNLQLIPSPTPRDGLLVRATAR

SEQ ID NO: 2165 - protein, 537 aa, Dubautia knudsenii
ERKKEAKTTSSVPDSGGMDELLEVLGYKVKSTDMADVAQKLEQLEMVMGEDGILQLSDTVHYNPSDLSGWVQTMLLVLNDDNNNTADDSGHILLPGDSSTTMIDFSSEIVVHGKPGSKIHLDDDLRAIAGGAIYRSESESLMPGNGNPNGNGVKRMKTTVAGSEVVDVQPESPRPVVLVDSQEAGIRLVHTLMACAEAIQRNELKLADALVKHVGILVASQAGAMAKVATYFAGALAQRIYNIYPQNALETSCYEILQMHFYETCPYLKFAHFTANQAILEAFAGATRVHVIDFSLNQGMQWPAFMQALALRYGGPPAFRLTGIGPPQPDNSDALQQVGWKLAQLANTIGVEFEFRGFVANSIADIDANILDIRAPETEVLAVNSVFEVHRLLARPGAVEKVLSSITGMKPKIVTLVEQESNHNGNVFMERFNEALHYYSTMFDSLESSALTLPNSQDDLVMSEVYLGRQICNVVACEGTDRVERHETLTQWRVRMNSAGFEPVHLGSNAFKQASMLLALFADGDGYRVEENDGCLM

SEQ ID NO: 2166 - protein, 475 aa, Zea mays
MPRSGGGGNGGGISSSSRVMPNLPAGFRFHPTDEELMVHYLMRQAASMPCPVPIIAEVNIYQCNPWDLPAKALFGDKEWFFFSPRDRKYPNGARPNRAAGSGYWKATGTDKAILSSSTPTSHGGANIVVGVKKALVFYGGRPPKGTKTDWIMHEYRLSGAADDDCKGSTRRRVSSSSSSSMRLDDWVLCRIHKKSNDFQLSSSSEHEHEQEEPAAGGSATTVEELDALVVVDNSSSSDTTTTTITTNDNNSTETAATHHDPQTMMMLSKSCSLTDLLDSIDYAALSSQMLLLDAPHPHADDPPPHMVYYPPAASATHQQAIIANNTNSNDDYYDDDNLLPTAAATAVDAAAAAVLLSSSPADTNGVNKRKRVTAVDYYGAAEPPTFFHHHLDDGGNSFFSTTKKLKPPPPSDSRHGGHFGTATASSYRDSQQLVDSASSSGVFFHQYGYGYSSSNPFLNLNQQQQLLLNSHIGMQ

SEQ ID NO: 2167 - protein, 161 aa, Oryza sativa
  unsure (1)..(161): unsure at all Xaa locations
MAAPDVEYRCFVGGLAWATDDRSLEAAFSTYGEILESKIINDRETGRSRGFGFVTFSSEQAMRDAIEGMNGKELDGRNITVNEAQSRRSGSGSGGGYGQRGGSGSYGGGGYGGGGGGGGYCQRRESGYRGGGGYRGGRGGGNYRGGYGSRGGGNSXGNWXN

SEQ ID NO: 2168 - protein, 429 aa, Salmonella enterica subsp. enterica serovar Typhi
MKALNREVIDYFKEHVNPGFLEYRKSVTAGGDYGAVEWQAGSLNTLVDTQGQEFIDCLGGFGIFNVGHRNPVVVSAVQNQLAKQPLHSQELLDPLRAMLAKTLAALTPGKLKYSFFCNSGTESVEAALKLAKAYQSPRGKFTFIATSGAFHGKSLGALSATAKSTFRRPFMPLLPGFRHVPFGNIDAMSMAFSEGKKTGDEIAAVILEPIQGEGGVILPPQGYLTEVRKLCDEFGALMILDEVQTGMGRTGKMFACEHENVQPDILCLAKALGGGVMPIGATIATEEVFSVLFDNPFLHTTTFGGNPLACAAALATINVLLEQNLPAQAEQKGDTLLDGFRQLAREYPNLVHEARGKGMLMAIEFVDNETGYRFASEMFRQRVLVAGTLNNAKTIRIEPPLTLTIELCEQVLKSARNALAAMQVSVEEV

SEQ ID NO: 2169 - protein, 309 aa, Glycine max
  unsure (1)..(309): unsure at all Xaa locations
MSNSRNTHWCYSCRRPVWLGRRDAVCPSCNEGFVHELNDMVHVNPFDLFEMDNNEERDQRLGLMETFSAFMRHQMADRGRSHDIRAQTDSNPEHSAGFAPLLIFGGQIPFRLSGHGGFEALFNGAPGIGLTRGNTGDYFIGPGLEXLFEQLSANNRQGPPPASRSSIDAMPTIKITQRHLRSDSHCPVCKDKFEVGSEARQMPCNHLYHSDCIVPWLVQHNSCPVCRQELLPQGLSSSNRSTNGRSRSASLSSSGRESHGRRNPFSFLWPFRSSHSSSNDEATGSSSPTPTIPENSHHHHAGYSGWPFE

SEQ ID NO: 2170 - protein, 621 aa, Populus x canescens
MEQYEVLEQIGKGSFGSALLVKHKHEKKKYVLKKIRLARQTDRSRRSAHQEKELISRIRNPFIVEYKDSWVEKGCYVCIIIGYCEGGDMAEAIKKANGVHFPEEKLCKWLVQLLMALDYLHMNHILHRDVKCSNIFLTKGQDIRLGDFGLAKILTSDDLASSVVGTPSYMCPELLADIPYGSKSDIWSLGCCIYEMTSLKPAFKAFDMQALINKINKSIVAPLPTKYSGAFRGLVKSMLRKNPELRPSAAELLRHPHLQPYVLKIHIKMNSPRQNTLPFQWPEPHYMKKTKFLVPEDNPLKAHREKRYSLSNDRALNPSISAAEQDSVCSTEGIHDTPSYLNQSLSDSSIESSHEGTVICRSIASKPSNFAKTTKPAPTKASVTTRRRTEPVKKRESLPVTRTPTKKSNPTTRRTSLPLPSRTAIQNSAHGTNNSILLQIKSPDVSVNAPRIDRIAEFPLASYDKPYLPFRRTSSTSAQGSSNSLHHGDRSITKDKCTVQISDRTSAKPNFTEAWQGIEHGMFQVDEENGSNSSNQNATAGASSRTSSDIRRRRFDTSSFQQRAEALEGLLEFSARLLQDARYDELGVLLKPFGPGKVSPRETAIWLTKSFKENTAKTEDC

SEQ ID NO: 2171 - protein, 412 aa, Oryza sativa (japonica cultivar-group)
MAFDAFTDKNAVFRRLKAKPENKMCFDCSAKNPTWASVTYGIFLCLDCSAVHRSLGVHITFVRSTNLDSWTPDQLKMMAFGGNNRAHAFFKQHGWTDGGKVDAKYTSRAAELYRQILQKEVAKSSADNVLPSSPVAASQPQNPSDDFPEFKLPEAPAENTNGKQEPDVTNSQKAPTQTPKAPTHPTFATSVKKSIGAKKIGGKTGGLGVKKLTTKPSESLYDQKPEEPKPAAPVMTTSTTKSGPSLHSRFEYVENEPAVDSRNGGTQMTGHVAPPKSSNFFQEYGMDNGFQKKTSTAATKTQIQETDEARKKFSNAKAISSSQFFGNQSREEKDAQMSLQKFAGSSSISSADLFGRRDMDDSNLDLSAADLINRISFQASQDLSSLKNMAGETGKKLTSIASNFISDLDRIL

SEQ ID NO: 2172 - protein, 152 aa, Zea mays
MAVVLTFGGQMPVVKVGRMAGQFAKPRSDAFEERGGVKLPSYRGDIINGEAFDEKSRVPDPQRMLKAYYQSASKLNLLRAFATGGYADIQRVTQWNLDFTEHSEQGDRYRELAHRVDDALGFMGAAGLTVDQPLTTMIEFWTSHECLLLLYE

SEQ ID NO: 2173 - protein, 298 aa, Glycine max
PVLKKFKRLKKGRRDIEEEPSGLSDEEELVGSGKAGRTAEEKLKRSLFGDDEGAPLEDIAEEEEQGEEEEDADIEEELENRGREQEKLQSELKKLQKLKEFKPTMNLPVLKDNEEKKDKKKKGCSEKKRPSPPYILWMKDQWNEIKKANSEAEFKEISTMLGSKWKTVTAEEKKPYEEIYHAEKEAYLQMIAKEKRETEAMRLLEDEQKQKTAMELLEQYMQFKQEAEKEGKKNKKEKDPLKPKHPMSAYFLFTNDRRAALVAENKNFLEVPKITAEEWKNMTEEQKRPYEEKAKKKE

SEQ ID NO: 2174 - protein, 154 aa, Zea mays
  unsure (1)..(154): unsure at all Xaa locations
FWFVGEREEMAASDVEYRCFVGGLAWATDDHSLNNAFSTYGEVLESKIILDRETQRSRGFGFVTFSXEDAMRSAIEGMNGKELDGRNITVNEAQSRGGRGGGGGGYGGGRRDGGGYGGGGGGYGGGRGGYGGGGGYGGANRGGGYGNNDGNWRN

SEQ ID NO: 2175 - protein, 387 aa, Bacillus subtilis subsp. subtilis str. 168
MRDSVFIYSPSYQTYMFHQEHPFNQQRVLLTYDLLKTINAFDDGDIVTPRLASEEELSLVHTDDYIQAVKLAGAGKLPAEEGESYGLGTEDTPVFAGMHEAASLLVGGTLTAADWVMSGQALHAANLGGGLHHGFRGRASGFCIYNDSAVAIQYIQKKYSARVLYIDTDAHHGDGVQFTFYDNPDVCTLSIHETGRYLFPGTGQIQEKGSGKGYGYSFNIPLDAFTEDDSFLEAYRTAASEVAAYFEPDVIISQNGADAHYYDPLTHLSATINIYEEIPRLAHTLAHQYCGGKWIAVGGGGYDIWRVVPRAWARIWLEMKGIDPGHEIPPEWIVKWQKQCPVALPSSWSDPADLYPPIPRKPEITEKNAQTVSKALYAIRSEQQRTK

SEQ ID NO: 2176 - protein, 115 aa, Oryza sativa
  unsure (1)..(115): unsure at all Xaa locations
XQESXGXXNLXSDXVHNFXDXXXLGSXFQLHXSXGXWSXPLXXLAHELXQEVGDFGILVRSGFTXVTKALFFNVLSTLXXXAXTDLXLXXXGKDPGHSXMIXEGFTAGGFXFIXA

SEQ ID NO: 2177 - protein, 80 aa, Glycine max
  unsure (1)..(80): unsure at all Xaa locations
SLAAGSNISLIAYQIRGFRPEGGRLKNDSLTDELRXALGEVDHKPXIIPGALGFIAAARHPEATTVVTRIVGCAGLKSTV

SEQ ID NO: 2178 - protein, 392 aa, Dinemandra ericoides
DLEPVNPADVPVTAAGALKSYKLAAKAISRLQSLPSGNIPLLCDVLVKEVRDLTGYDRVMVYKFHEDEHGEVVSECRRSDMESYLGLHYPATDIPQASRFLFMKNKVRMICDCLSPPVEVIQDERLPQPLSLCGSTLRSPHGCHAQYMANMGTIASLVMSVTVNEDDDMMDGDQQRMARKLWGLVVCHHTSPRFVPFPLRYACEFLIQVFGVQINKEVDLAAQVREKHILRIQTMLCDMLLRDAPVAIITQSPNVMDLVKCDGAALYYKNKFWLLGVTPTEAQIRDIAEWLLEYHRGNTGLSTDSLMEAGYPGASVLGDAVCGMAAVSITSRDFLFWFRSHTAKEIKWGGAKHDPGDKDDGRKMHPRSSFKAFLEVVKWRSLPWKDVEMDAI

SEQ ID NO: 2179 - protein, 240 aa, Deinococcus radiodurans
MPRDFRPCPACPDGHADRAQDGPDDGPDGCATFGSKITAGVVGVFALSPPAPAPAPEAHMPLHTLEDLTPDIHPTAFVAPSADVIGQVKVEAGASIWFGAVLRGDTEQLRVGERSNVQDGAVLHADPGFPCTLHEDVTVGHRAVVHGATCEAGSLVGMGAIMLNGSRLGRGAVLGAGALLPEGKEVPDGMLAVGTPARVVRPVAATPNAASYVRNGERYRAGLRSQADPASPTGPAGDPT

SEQ ID NO: 2180 - protein, 335 aa, Pseudomonas syringae pv. tomato str. DC3000
MKYRTLGQSGLKVSTLTLGSMMFGEQTAAEESLRIIDKARDQGINFIDTADVYNGGRSEEIVGRAIAAQRSDWVLATKVAIGPADGVPNRAGLNRKHIFNAIENSLRRLDTDYVDIYYLHKEDHDTPLEVTVSAIGDLIRQGKIRYWGVSNFRGWRIAEIVNVAQRLGVDKPVISQPLYNIVNRQAEIEQITAAAYHGLGVVPYSPLARGVLSGKYAPDIAPDSESRAGRQDKRLLETEWRVESLRIAQRIQEYVQDKGVGIVEFAIAWVLNNKAVTSAIVGPRTEQQWDGYTKALEVSITAEDEAFIDSLVTPGHASTPGFNDTQHFVSGRPVR

SEQ ID NO: 2181 - protein, 503 aa, Nierembergia sp. NB17
MMQLSTELAIAAIIFLLAHILISKTSGRRLPPGPRGWPVIGALPLLGDMPHVSLAKMAKKYGPIMYLKVGTCGMAVASTPHAAKAFLKTLDINFSNRPPNAGATHFAYNAQDMVFAPYGPRWKLLRKLSNLHMLGGKALEDWSNVRANELGHMLKSMLDLSREGQRVVIADMLTFAMANMIGQVILSKRVFVDKGVEVNEFKNMVVELMTVAGYFNIGDYIPCLAWLDLQGIEKGMKILHKKFDVLLTKMFDEHKTTSHEREGKSDFLDMVMANRDNSEGERLSTTNIKALLLNLFTAGTDTSSSVIEWALTEMLKNPSILKKAQVEMDQVIGKNRRLLESDISNLPYLRAICKETFRKHPSTPLNLPRISSESCEVDGYYIPKNTRLSVNIWAIGRDPDVWENPLKFNPERFLSGKYAKIDPRGNDFELIPFGAGRRICAGTRMGIVMVEYILGTLVHSFDWKLPSDVIELNMEEVFGLALQKAVPLEAMVTPRLPLNVYAP

SEQ ID NO: 2182 - protein, 483 aa, Zea mays
  unsure (1)..(483): unsure at all Xaa locations
MRINVCGCRGSTVHLHHLSSSSSPPPLPFHLLPPGDSSSSLPRRSIGPPIDRARGRRFQSGVVSIRSGSLPVWVGAMAAMDASADKNAVFRKLRAKSDNKMCFDCNAKNPTWASVTYGVFLCIDCSAAHRSLGVHVSFVRSTNLDSWTPEQLKMMVYGGNNRAQAFFKQHGWTDGGKIEAKYTSRAADLYRQLLAKDVAKSSTEDGNNSWPSSPVAASQAPNQAAAFPDLKLTEVSKENVSEKKDSEIVRSPRAPTHSFKKPIGAKKPGNKTGGLGARKLTSKPNESLYEQKPEEPAPVLPSSVIESTTTRSKSHTSRFDYVENAPALKNGNSSEGNHMSGHVAPPMSSNFFAEFGMDSGYXKKSTSSSSKVQIEESREARQKFSNAKSISSSQFFGDQASFEKDAQVSLQKFSGSSAISSADLFGHPANNSSVDLSASDLINRISFQATQDLSSLKNMAGETGKKLTSMASNIITDLQDRIL

SEQ ID NO: 2183 - protein, 118 aa, Lycopersicon esculentum
DFKPENVLVREDGHIMLSDFDLSLRCAVNPTLVKSSSPIIELPKKSSPCSASCIDPFCLHPSWQVSCFGPRFLSTEAKTRKIKADLAAQVSPLTQLVVEPTNARSNSFVGTHEYLAPE

SEQ ID NO: 2184 - protein, 349 aa, Myxococcus xanthus
MIPVRGYAAQDAKSPLAPFQFERREPGPSDVQIEILYCGVCHSDLHQVRDEWGGSRFPMVPGHEIIGRVVRVGDQVKKVKVGDMAGVGCMVDSCRTCPSCQEGLEQYCEKGNVQTYNGKEKDGQTATQGGYSEAIVVDEAFTLKIPENLDPAAAAPLLCAGITTYSPLRHWKVQPGQRVGVVGLGGLGHMGVKLAKAMGAHVTVFSHTDSKKQDATRLGADAVVVSSNKEEMAAQTGGFDFILDTVSAQHDINAYLRLLRRDGHLVLVGAPEKPLDVRPFSLIPTRRSFSGSMIGGIQETQEMLDFCGKHNIVSDIELISIQQVNDAYERLLKGDVKYRFVIDLASLRK

SEQ ID NO: 2185 - protein, 361 aa, Oryza sativa (japonica cultivar-group)
MAAEVGIGRATCAAWARRRGGGGPARLLVVYGRASTASSPPRIDLHAFDAGASAVAADPLVSFVMGHEEDDAPRAIAVHPSGDEFVCATAKGCRLFKLVTEESSVHLISKDAPTLQSIGPQKCLSFSTDGAKFAVGGEDGHLRIFHWPDLNLLLGEPKAHKSFRDMDISLDSELLVSTSTDGSARIWNIDEGAPLVNLSRSSDEKIECCCFSRDGNKPFLFCTLVKGHNVVTVVLDISNWKRIGYKRLLEKHISTLSVSLDGKYLALGSHDSDFCVVDVKKMEVLHLSKKVHLGSPISSIEFCPTERVVISTSHKWGAEVTKLDVPTDWKVWQMWLVLSCLFVTSAILFYAFFKHVVHLEP

SEQ ID NO: 2186 - protein, 176 aa, Zea mays
MAAEGEKKMITLKSSDGEEFEVEEAVAMESQTIRHMIEDDCADNGIPLPNVNSKILSKVIEYCNKHVHAAAAAAAASKAGSDDVGAAAANSTAASGEDLKNWDADFVKVDQATLFDLILAANYLNIKGLLDLTCQTVADMIKGKTPEEIRKTFNIKNDFTPEEEEEIRRENQWAFE

SEQ ID NO: 2187 - protein, 471 aa, Oryza sativa (japonica cultivar-group)
MWMPVDLRLPSGPQAALGILAFEAAAAMSKLLSLHRSLSEQEVSRLRSDTMRSPGVAYLNSTDQAFLLRLACAELVVSLDAAAAAVARLGLRCGIDFGGVYASLKAGAPDARLDPLVAKGLRVKAKKMERLVASTARLCSEMEALDELEASERKLAFRGWNRLSGPIPMQPVAPSAAGDSPGADSLQQDLKAQRIKVRRLKEESLWNQSYEKAVGLMARAACAVFSRICTIFGAFVPGLPPPLPSAATDSVQTRLSKLLNPRAVRAKASSGPITRRDGPSRVHPPVISSSCPIIGLRPSGQKAAIDWRKLLDAPASTVGGAGLDQQYANVIVSAEQLLQMEAEGRQEEANAERAEMYEMLPAKLRAAVRSKLRDWWRDPGPLDAGLAQGWKDAVDRIMAWLGPMARDTVQWQAERNMDRTRRFDGGARVYALQTLRWADKEKAEAALVEVLVALSCVCWYEERRRGSVRLL

SEQ ID NO: 2188 - protein, 288 aa, Zea mays
IRLEILGRPLTEEEYFKAATLGWMTELLQAFFLVSDDIMDGSITRRGQPCWYRQEGVGMIAINDSFLLEAGIYIILKKYFRDHPRYIELVELFHESSFQTELGQLCDLLTAPEDVVNLDNFSMEKYSFIVIHKTAYYSFYLPIALALYMLDIASPENLQTAKDILIPLGEYFQIQDDYLDNFGLPEHIGKIGTDIKDNKCSWLVNQALLLATPEQRKILEENYGQKDDAKEQVIKKLYDDMKLKEKYEAFEEKRAAELMELINKIDESQGLKKQVFEVFLSKIYKRSK

SEQ ID NO: 2189 - protein, 176 aa, Triticum aestivum
  unsure (1)..(176): unsure at all Xaa locations
MAGVGRNMVAPLLVLNLIMYLIVIGFASWNLNHFINGLTNRPGVGGNGATFYFLVFAILAGVVGAASKLAGVHHVRTWRGDSLATSASSSLVAXAVTALAFGLACKEIHIGGYRGWRLRVLEAFVIILVFTQLLYVLALHSGLFGNHAGGYGAEHGGYGAGDPHNKGMGTGGVARV

SEQ ID NO: 2190 - protein, 170 aa, Zea mays
  unsure (1)..(170): unsure at all Xaa locations
RRRSSTTDSDLVGPIVEQPEYNLFSRHKVESEFLPLYSTYGIGLTTWSPLASGVLSGKYGKGDIPXADSRFALDNYKNLANRSLVDDTLRKVNGLKPIAAELGVSLAQLSIAWCASNPNVSSVITGATKESQIVENMKALDVIPLLTPEVVDRIEAVVQSKPKRNVESYR

SEQ ID NO: 2191 - protein, 361 aa, Arabis glabra
CKAAVAWKAGKPLVMEEVEVAPPQKHEVRIKILFTSLCHTDVYFWEAKGQTPLGPRIFGHEAGGIVESVGEGVTDLQPGDHVLPIFTGECGDCRHCHSEESNMCDLLRINTERGGMIHDGESRFSINGKPIYHFPGTSTFSEYTVVHSGQVAKINPDAPLDKVCIVSCGLSTGLGATLNVAKPKKGQSVAIFGLGAVGLAAAEGARIAGASRIIGVDLNSKRFDQAKEFGVTEFVNPRDHDKPVQQVLAEMTDGGVDRSVECTGSVQAMIQAFECVHDGWGVAVLVGVPSKDDAFKSHPMNFLNERTLKGTFFGNYKPKTDIPGVVEKYMNKELELEKFITHTVPFSEINKAFDYMLKGES

SEQ ID NO: 2192 - protein, 170 aa, Oryza sativa
  unsure (1)..(170): unsure at all Xaa locations
WTRGAATPASPRLRPSPRRPLIVALQLAGEGKAEQRRRQEDRSKASFEDEIMESDIELEGEAVEPDNDPPQKMGDPSVEVSDEKRDQAQLCKNKGVDAFSEXXAALKINPDSAKGYKSRGMAKAMLGKWEEAAQDLRMAAKLDYDEEIGAELKRGEPMYSKXEEHKEKYX

SEQ ID NO: 2193 - protein, 95 aa, Oryza sativa (japonica cultivar-group)
MLKAVDVLASSECVNGLITVKENVSGLKPVLHGFHVHALGGTTNGCMNMGGTRRLETSCWWRWKYNDLNWSGCFFLQLFYCLHSKNILVHTVCIG

SEQ ID NO: 2194 - protein, 247 aa, Microbulbifer degradans 2-40
MSFENKVAIVTGASRGIGEAIATALAEAGATVIGTATSDAGAAKITARIAEAGHKGEGMTLNVSDADSVAAVIKAVTDKYGAAQILVNNAGITKDNLLMRMSDEEWFDVVNTNLSAIFRMSKGCLRGMMKARWGRIVNISSIVGQMGNAGQTNYSATKAGVMGFARSLAKEVGSRNITVNSVSPGFIDTDMTKVLPEEQKQAMQTAIALGRLGQPEEIAKVVKFLCSEDASYITGENIHVNGGMYMC

SEQ ID NO: 2195 - protein, 463 aa, Glycine max
MGAVYFSQSCYKPRQIFNLERESTLVGRCPVVQIRCRRVVSACLNVDVDAPNTGNTTSEKKKTKDVIEMEGMYLVGTYARTPVVLERGEGCKLYDVEGNEYLDLSAGIAVNALGHGDADWLKAVVEQAGTLTHTSNIFHTIPQVELAKRLVASSFADRVFFANSGTEANEAAIKFARKYQRHTTSNGKVPATEFIAFSNCFHGRTLGALALTSKVQYRMPFEPVMPGVTFLEYGNAQAAVELIKQGKIAAVFVEPIQGEGGIYSATKEFLQSLRNACDETGALLVFDEVQCGLGRSGFLWAHEAYGVFPDMMTLAKPLAGGLPIGALLVTERVASAINYGDHGSTFAGSPLVCSAALAVLDKISKPDFLSSVSKKGLYFKELLREKLGENRHVKEIRGVGLIIGIDLDVPASPLVDACRSSGLLVLTAGKGNVVRLVPPLIITEKELEQAAGILCQTLPVLDN

SEQ ID NO: 2196 - protein, 419 aa, Streptomyces avermitilis MA-4680
MSALSPHLRQATPVVAVRGEGVHLYGEDGRRYLDFTAGIGVTSTGHCHPRVVAAAQEQAGTLVHGQYTTVLHPPLRRLVDRLGEVLPAGLDSLFFTNSGSEAVEAALRLARQATGRPNVLVCHGGFHGRTVAAAAMTTSGTRFRSGFSPLMSGVVVTPFPTAFRYGWDEETATRFALQELDYTLRTISSPDDTAAIIVEPVLGEGGYVPATRAFLEGLRERADRHGFVLILDEVQTGVGRTGRFWGHDHFGVTPDILITAKGLASGFPLSGIAASAELMGKAWPGSQGGTYGANAVACAAACATLDVVRDEKLVDNAEAMGARLRAGLAAVAATTPAIGDVRGLGLMLASEFVTEDGGPDPETAARVQRAAVDEGLLLLLCGAWNQVVRMIPALVIDEAEVDEGLRAWSAAVEVGVPAR

SEQ ID NO: 2197 - protein, 386 aa, Rhodopseudomonas palustris
MDRRVKPGDDACKDPIMATHKLLLLPGDGIGTEVMAEVSRLIDWLNKAGIASFETEHGLVGGAAYDADKVAITDATMALAQASDAVIFGAVGGPKWDGVPYDARPEAGLLRLRKDLGLFANLRPAVCYPALADSSSLKRDVVEGLDIMIVRELTGGVYFGEPKTITDLGNGQKRAVDTQVYDTYEIERIGRVAFDLARKRRNKVTSMEKRNVMKTGVLWNEVITAVHDREYKDVQLDHQLADSGGMNLVKWPKQFDVIVTDNLFGDMLSDIAAMLTGSLGMLPSASLGEVDAKTGKRKSMYEPVHGSAPDIAGKGMANPVAMLASFGMALRYSLDMGALADKLDEAIAAVLAKGLRTADIKSEGTTVISTSQMGEAIVTELQALHA

SEQ ID NO: 2198 - protein, 228 aa, Gossypium populifolium
  unsure (1)..(228): unsure at all Xaa locations
FTSLCHTDVYFWEAKGQTPLFPRIFGHEAGGIVESVGEGVTHLKPGDHVLPVFTGECGNCRHCKSKESNMCDLLRINTDRGVMLSDGKTRFSINGKPIYHFVGTSTFSEYTVAHXGSVAKINPAAPLDKVCILSCGISTGLGATLNVAKPAKGSTVAIFGLGAVGLAAAEGARIAGAXRIIGVDLNPNRFEEAKKFGCTEFVNPKDHNKPVQEVLAEMTNGGVDRSVE

SEQ ID NO: 2199 - protein, 309 aa, Lactobacillus plantarum WCFS1
MSITEMLGIQYPIFSGAMMRIATHELVGAVSEAGGLGVLGSAGLSAEQLRAEIQATRKLTDKPFGVNLMLQMKNCPELAQVIIDEGVKVVTTGAGNPTSYIPPLHAAGIKVIPVIASVHHAHKMVAAGADAVVAEGQESGGHIGQTSTMALLPQVVDAVDIPVIGAGGVGDGRSIAAMFALGAQGVQCGTIFLTAEECPVPASYKQRVLAASDTDTIVTGRSQRDPVRALVNPMLAQYLQLEQTNAPVAELHALADGSFAKAVEDGDMEHGTPMAGEVAGMMTTIRPVKEIIMTLFGQAREVAAQLKIE

SEQ ID NO: 2200 - protein, 163 aa, Chlamydomonas sp. W80
MASPFYALAATDIAGKEFPFAQLQGKVVLVVNVASQCGFTPQYKGLQELYDKYKDEGLVIIGFPCDQFGHQEPGQESEIASFCQKNFGVTFPMMAKIEVNGDNTHPVYQFLKSEKKQLFMERIKWNFEKFLINKQGEVVERFSSAGDPMRNIAPAVAKLLAEA

SEQ ID NO: 2201 - protein, 509 aa, Brassica rapa
MTSVNVKLLYHYVITNLFNLCFFPLTAIVAGKAYRFTIDDLHHLYYSYLQHNLITIASLFAFTVSGFGLYIARLPKPLYLVEYSCYLPPRHLKVSVSKIMDIFYQIKADTSSRNVACDDPSSLDFLRKIQERSGLGDETYSPEGLIHVPPRKSFAGSREETEKVIIGGIENLFENTKVKPKDIGILVVNSSKFNPTPSLSAMVVNTFKLRSNIKSFNLGGMGGSAGVIAIAIDLAKDLLHVHKNTYALVVSTEGITQGIYAEENRSMMFSNCLFRVGGAAILLSNKSGDRRRSKYELVHTVRTHTGADDKSFRCVQQGDDEDGKTGVCLSKDITNVAGTTLTKHIAICRPLILPLSEKFLFFATSVAMKLLKDKIKHYYVPDFKLAVDHFCIQPGGRAVIDELEKNLGLSPIDVEASRSTLHRFGNTSSSSIWYELAYIEPKERLKKGNKKGWQIALGLGFKGNSAVWVALNNVKASANSPWEHCIDRYPVKNDSDLSKSKHQVQNGRS

SEQ ID NO: 2202 - protein, 496 aa, Mentha spicata
MELDLLSAIIILVATYIVSLLINQWRKSKSQQNLPPSPPKLPVIGHLHFLWGGLPQHVFRSIAQKYGPVAHVQLGEVYSVVLSSAEAAKQAMKVLDPNFADRFDGIGSRTMWYDKDDIIFSPYNDHWRQMRRICVTELLSPKNVRSFGYIRQEEIERLIRLLGSSGGAPVDVTEEVSKMSCVVVCRAAFGSVLKDQGSLAELVKESLALASGFELADLYPSSWLLNLLSLNKYRLQRMRRRLDHILDGFLEEHREKKSGEFGGEDIVDVLFRMQKGSDIKIPITSNCIKGFIFDTFSAGAETSSTTISWALSELMRNPAKMAKVQAEVREALKGKTVVDLSEVQELKYLRSVLKETLRLHPPFPLIPRQSREECEVNGYTIPAKTRIFINVWAIGRDPQYWEDPDTFRPERFDEVSRDFMGNDFEFIPFGAGRRICPGLHFGLANVEIPLAQLLYHFDWKLPQGMTDADLDMTETPGLSGPKKKNVCLVPTLYKSP

SEQ ID NO: 2203 - protein, 468 aa, Triticum aestivum
  unsure (1)..(468): unsure at all Xaa locations
AQHHFLASPGSGRVCVCVDRGVASSLFLPPPIPISPPPPQFGGSEGSRPIGLVARRDGDRTPARADRSSVFARKLRAKSDXKMCFDCNAQRTPPGPPLPYGVFLCIDCSAVHRSLGVHVSFVRSTNLDSWTPEQLKMMVYGGNXNRAQSFXLKQHGXWTDGGKIEAKXTLLRAADLYRQLLXKEVSKSSTEDGNNSGPPSPVAASQTSSQAAAFPXIFKLVEVPERSCEMRPESEIIRSPKAPTHSFKKPIGGKKPGSKTGGLGARKLTXKPSESLYEQKPEEPAPALPSVAESTTARSKSHTSRFEYVENVPSAGSSSAENQAFGHVAPPKSSNFFGEYGMDSGYHKKSTSGASKMQXEESSEARQKFSNAKSISSSQFFGXQTNLEKEGQISLQKFSGSSAISSADLFGQQANNSNADLSASDLINRIXPFQATQDLTSLKSMAGQTGKKLTSMASNIISDLDRIL

SEQ ID NO: 2204 - protein, 155 aa, Glycine max
MASTKKITLKSSDGEAFEVEEAVALESQTIKHMIEDDCADSGIPLPNVTSKILAKVIEYCKKHVEANSADEKPSEDVLKAWDVDFVNVDQATLFDLILAANYLNIKSLLDLTCQTVADMIKGKTPEEIRKTFNIKNDFTPEEEEEVRRENQWAFE

SEQ ID NO: 2205 - protein, 226 aa, Yarrowia lipolytica
MEPETKKTKTDSKKIVLLGGDFCGPEVIAEAVKVLKSVAEASGTEFVFEDRLIGGAAIEKEGEPITDATLDICRKADSIMLGAVGGAANTVWTTPDGRTDVRPEQGLLKLRKDLNLYANLRPCQLLSPKLADLSPIRNVEGTDFIIVRELVGGIYFGERKEDDGSGVASDTETYSVPEVERIARMAAFLALQHNPPLPVWSLDKANVLASSRLWRKTVTRVLKDEF

SEQ ID NO: 2206 - protein, 140 aa, Triticum aestivum
  unsure (1)..(140): unsure at all Xaa locations
MAGIGPIRQDWEPIVVRKKAQNAADKKDEKAVNAARRSGAEIDTTKKYNAGTNKAASSGTSLNTRGXXDTENLSLERVSSXLRKPYAGRLDRRMTQAQLAQMIIGSHQLSQEYESGKAIPNNQIIGKLERALGAKLRSKK

SEQ ID NO: 2207 - protein, 348 aa, Listeria monocytogenes EGD-e
MKALKLYGKRDLRYEEADMPTIEEPDDVILKVKTVGICGSDISRYSKLGPYVPGMVWGHEFSGEVIEVGSEVTDIEIGDRAAGCPALYCGECEYCKKGEFARCRKLTVIGARHPGAYAEYIKLPAENVVKIPNELDYEAAALVEPSAVVVHGFYHTKLQAGDDVVVVGSGNIGLLAIQWAKVFGARRVIAIDVDDKKLALAKEVGADVVINSLKEDPLEVVAAHTDGLNADLVVEAAGSPITSAQVFAYAKKGGGVVFLGIPYADVTIERFYFEKIVRSELTVWGSWNAISAPFPGKEWQTTIHFLANKQINIEPMITHRLSLAEGPEVFERIYERNEFFGKVLFFPE

SEQ ID NO: 2208 - protein, 67 aa, Castanea sativa
YQQILSAFFWTVPALFNHFLPFFYVIFLTILLFDRAKRDDDRCRSKYGKYWKVFCEKVPYRIIPGIY

SEQ ID NO: 2209 - protein, 1131 aa, Glycine max
MSTSRPSQSSSNSRRSRHSARMAQATVDAKIHATFEESGSSFDYSSSVRVSGTADGVNQPRSDKVTTAYLRGKMIQPFGCLLAIDEKNHMQTCKVIAYSENEPEMLTMVSHAVPSVGDHPALGIGTDIKTLFTAPSVSGLQKALGCADVSLLNPILVHCKTSGKPFYAIVHRVTGSLIVDFEPVKPYEVPMTAAGALQSYKLAAKAITRLQSLPSGNMERLCDTMVQEVFELTGYDRVMAYKFHEDDHGEVIREITKPCLEPYLGLHYPATDIPQASRFLFRKNKVRMIVDCHAKHVRVLQDEKLQFDLILCGSTLRAPHSCHAQYMANMDSIASLVLAVVVNDNEEDGDTDAVQPQKTERLWGLVVCHNTTPRFVPFPLRYAREFLPQVFADHVHKEIELEYQIIEKNILHHPGHLLCMLMRDAPLGIASESPNIMDLVKCDGAALIYRNKVWRLGVTPSEPQIREIALWLSEYHMDSTSFSTDSLFDAGFPSALSLGDVVCGMASVRVTAKDMVFWFRSHTAAEIRWGGAKHEAGEKDDSRRMHPRSSFKAFLEVVKARSLPWKEYEMDAIHSLQIILRNAFKEDTESLDLNAKAINTRLRDLKIEGINDLKIERMQELEAVTSEIVRLDYTATVPILAVDVDGLVNGWNIKIAELTGLPIGEATGKHLLTLVEDSSTDRVKKMLNLALLGEEEKNVQFEIKTLGSKMDSGPISLVVNRCASRDLRDNVVGVCFVAHDITAQKNVMDKFIRIEGDYKAIVQNRNPLIPPIFGTDEFGWCCEWNPAMMKLTGWKREEVMDKMLLGEIFGTQMAACRLKNQEAFVNLGVVLNKAMTGSETEKVPFGFFARNGKYVECLLSVSKKLDVEGLVTGVFCFLQLASPELQQALHIQRLSEQTASKRLNALSYMKRQIRNPLCGIVFSRKMLEGTDLGTEQKQLLRTSAQCQQQLSKILDDSDLDTIIDGYLDLEMAEFTLHEVLVTSLSQVMEKSNGKSIRIVNDVAGHIMMETLYGDSLRLQQVLADFLLISINFTPNGGQVVVAGSLTKEQLGKSVHLVKLELSITHGGSGVPEVLLNQMFGNNGLESEEGISLLIRAKLLKLMNGDVRYLREAGKSAFILSAELAAAHNLKA

SEQ ID NO: 2210 - protein, 398 aa, Shigella flexneri 2a str. 301
MKQLTILGSTGSIGCSTLDVVRHNPEHFRVVALVAGKNVTRMVEQCLEFSPRYAVMDDEASAKLLKTMLQQQGSRTEVLSGQQAACDMAALEEVDQVMAAIVGAAGLLPTLAAIRAGKTILLANKESLVTCGRLFMDAVKQSKAQLLPVDSEHNAIFQSLPQPIQHNLGYADLEQNGVVSILLTGSGGPFRETPLRDLATMTPDQACRHPNWSMGRKISVDSATMMNKGLEYIEARWLFNASASQMEVLIHPQSVIHSMVRYQDGSVLAQLGEPDMRTPIAHTMAWPNRVNSGVKPLDFCKLSALTFAAPDYERYPCLKLAMEAFEQGQAATTALNAANEITVAAFLAQQIRFTDIAALNLSVLEKMDMREPQCVDDVLSVDANASEVARKEVMRLAS

SEQ ID NO: 2211 - protein, 249 aa, Cyanidium caldarium
MRIENKQNKRQHHLLIVDDENNIRKILQTRLTLLGYSVSTACNGEEALKIFTTHSIDLIILDVMMPKLDGYGVCQEIRKESDIPIIMLTALEDVLDKVTGLELGADDYVIKPFSPRELEARIQSILRRIQTRNAKLKPYDNINLFKTGSLNIDLEKKQIYKNNELIRLTEMEFSLLELLVSQSGKAFSRSKILKEVWGYKLSKHEPIADTRIVDVHISRLRAKLEDDPTNPTLILTARGTGYLCRKLIT

SEQ ID NO: 2212 - protein, 320 aa, Triticum aestivum
  unsure (1)..(320): unsure at all Xaa locations
MAGTVTVPGSSVPSTPLLKDELDIVIPTIRNLDFLEMWRPFFQPYHLIIVQDGDPSKVIKVPEXGFDYELYNRNDINRILGPKASCISFKDSACRCFGYMVSKKKYVFTIDDDCFVAKDPSGXKDINALEQHIKXLLSPSTPFFFNTLYDPYREGADFVRGYPFSLREGAPTAVSHGLWLNIPDYDAPTQMVKPRERNSXRYVVALLTIPERDTVHHCLMNLAXFDRQLIGPGLHFGLIGDSWPIGCYDGLWGAWWAXVIRDDLALGVATQLSYLXHSKPSSKFAKGSRKSTRGHFRLGGHPPPPYAVRTPLPKESRIPF

SEQ ID NO: 2213 - protein, 334 aa, Thermoplasma volcanium
MKYVRLGSSGTLVSQLALGTWHLPGSNRYSSDGVEKVDESEFQRIFKKAYDAGINFFDTANIYHGRVEKNEDHIDHIGNSERILGKAIKGYERESLVIATKVRGPVSKFINGEGLSRKHIMWQIKESLQRLGLEYVDLYQIHWSDSLTPHEETARVLSHIVDLDMARYIGESNHSAEDIVDFMNISEKLNLHHFVTMQEPYNILQRGIEKDKIPVAKKYGMGILAYVPLAQGVLTGKYVSGPEKGSRSSYYPEIIDFHQKNQKKIDALINFAKEKDITGGQLAIAWLIKKSQIEGIPIIPLLGITKEKYLEENLKALEVNLTDSDMREIDRMVL

SEQ ID NO: 2214 - protein, 362 aa, Burkholderia fungorum
MTRKYRIAVIPGDGIGNEVMPEGLRVLDAACRRFDIGIEYRQIGWASCDYYAQHGQMMPDNWKEQLQDCDAILFGAVGWPEKVPDHISLWGSLLKFRREFDQYVNLRPARLFEGVPCPLANRKPGDIDFMIVRENTEGEYSSVGGTMFEGTEREVVMQQSIFTRHGTERVMKFAFDLAQRRAKKITVATKSNGIAISMPWWDARADEMAARYPDVKMDRQHIDILCARVVLNPDRFDVVVASNLFGDILSDLGPACTGTIGIAPSGNLNPDRRFPSLFEPVHGSAPDIAGKGIANPVATIWSTAMMLEFLGNGARVERDAHDAIVAAITEVLKDGPHTGDLGGRASTTEVGAAIAARVAQAG

SEQ ID NO: 2215 - protein, 274 aa, Zea mays
  unsure (1)..(274): unsure at all Xaa locations
MDLPAKGGFKLRPVRAGNNMLEKNGLKVPGFRKTGTTSRGLVFSGWGLFLGQTQGQLEGPIVADKNCEKIHFMAPNIYCCGAGTAADTEAVTDMVSFQLQLHRYATGRESRVVTVLTLLKSQVLASIKGHVGAALXVLGGGEWYLGHIYTLFNPHGSTDTLPFATMGSGSLAAMSVFESKYKEGLTREEGIQIVCEAICAGIFNDLGSGSNVDVCVITKGKTEYLRNHQLPNPRTYASSKGYSFTKGQTEVLSSKVTLLKQKVEVAEGGDAMEE

SEQ ID NO: 2216 - protein, 434 aa, Ralstonia solanacearum
MDVFSEFESEARSYCRRFNATFDKAKGSYIYGNAGKRYLDFLSCAGALNYGHNPAGLKAALLAYLADDGIQGALDLHTEAKRAFIEAFTRHILAPRGLGYKMQFTGPTGTSVVESAVKLARKVTGRQTVAAFTNGFHGMSGVSLGLTGARYHRQATQDPHVVRLPYDGYMPGLDGMAYFRRLLEDASSGVDLPAAVVVETIQGEGGVNVASRQWLRSLRELTRAFGILLIVDDIQAGCGRTGTFFSFEFAEIEPDLVCLSKSLSGYGLPLSVLLLAPRHDIWAPAEDNGTFRGNSLAFVSATAAIEQFWRDDALQRAIGEREQQFAGFATALVAEHGALIKAIRGRGLFQGIEFHDPGHARKVAEACFAQGLLIERCGAEDQVLKIMPALTIDADVFQQGLQIIRQAFGELARQRESGAAAAAKGGANQPVALA

SEQ ID NO: 2217 - protein, 152 aa, Hevea brasiliensis
MLKAVAVITSSEGISGKIFFTQEGDGPTTVTGSVSGLKPGLHGFHVHTFGDTTNGCLSTGLHFNPASKDHGGPEDENRHAGDLGNVNVGDDGTANFTIVDKHIPLSGPHSIAGRSVVFHEGRDDLGKGGHELSKITGNAGDRIACGIIGLQE

SEQ ID NO: 2218 - protein, 198 aa, Oryza eichingeri
GQTPVFPRIFGHEAGGIVESVGEGVTDLAPGDHVLPVFTGECKECPHCKSAESNMCDLLRINTDRGVMIGDGKSRFSVNGKPIYHFVGTSTFSEYTVMHVGCVAKINPAAPLDKVCVLSCGISTGLGATINVAKPPKGSTVAIFGLGAVGLAAAEGARIAGASRIIGIDLNANRFEEARKFGCTEFVNPKDHDKPVQQ

SEQ ID NO: 2219 - protein, 371 aa, Zea mays
MAHRVLLLLSLASAAAVAAAVDAEDPLIRQVVPGGDDNDLELNAESHFLSFVQRFGKSYKDADEHAYRLSVFKDNLRRARRHQLLDPSAEHGVTKFSDLTPAEFRRTYLGLRKSRRALLRELGESAHEAPVLPTDGLPDDFDWRDHGAVGPVKNQGSCGSCWSFSASGALEGAHYLATGKLEVLSEQQFVDCDHECDSSEPDSCDSGCNGGLMTTAFSYLQKAGGLESEKDYPYTGSDGKCKFDKSKIVASVQNFSVVSVDEAQISANLIKHGPLAIGINAAYMQTYIGGVSCPYICGRHLDHGVLLVGYGASGFAPIRLKDKPYWIIKNSWGENWGENGYYKICRGSNVRNKCGVDSMVSTVSAVHASKE

SEQ ID NO: 2220 - protein, 170 aa, Triticum aestivum
  unsure (1)..(170): unsure at all Xaa locations
MAKGGLSSKLKCMIRRWHSSSRISRTPSAASHGGGGGEEEDPWGRGVGGGAASFHGADSVPPGLHPVYVGKSRRRYLIAADLVCHPLFQNLVDRSGGGVGGDGAXATIIGCEVVLFEHLLWMLENADPQPESLHDLVECYASPPPRPPASPPHHPHLAAPTPPELVAWPL

SEQ ID NO: 2221 - protein, 276 aa, Zea mays
MGKRRDDLSDEFRSLSVSDIRHMKTISVAHYPVNREKNRYIDVLPFDNTRVQLKSSARPPNNDYINASFIKATENNRVATFISTQGPLVKTFGDFWEMVFEYQCPAIVMLTHFDSIKCDKYLPPGSERRTYGNYDIKITKTRTDSHHLQLRDVKVQNIETGKVHSVLHIEYPDWPDHGVATNTDAVREIWKRLHHIPTEHPIVIHCSAGIGRTGTYITIHTTIERILLGDKSSYDLAKTVKNFRSQRPGMVQTEEQYKFCYRAIADELKDLLNSDH

SEQ ID NO: 2222 - protein, 252 aa, Glycine max
MATAPGNQMLEGGGGAPQPPGTDMTGICFRDQLWLNSFPLDRNLVFDYFALSPFYDWTCNNEQLRMRSVHPLDISQLSKMTGTEYMLSEVMEPHLFVIRKQKRDSPDKVTPMLAYYVLDGSIYQAPQLCNVFAARIGRALYYIQKAFTTAASKLEKIGYAGSADSENETALLESKTAKETIDIKEVKRVDHILASLQRKLPPAPPPPPFPEGYVPPPTAETEKGTETQEAAETQAPTADPIIDQGPAKRMKF

SEQ ID NO: 2223 - protein, 333 aa, Streptomyces avermitilis MA-4680
MRVLVTGGAGFIGSHVVEALGARGHEPVVFDVREDAGADVRDRDAVARALAGVDAVCHQAAMVGLGNGFTDAAEYVSRNDLGTAVLLTGMAEAGVRRLVLAGSMVVYGEGRYLCEWHGVVRPGPRTVADLTAGRFEPVCPACGEALSPGLVGEDAPVDPRNVYATTKLAQEHLAAAWARSTDGTAVSLRYHNVYGPRMPRDTPYAGVASFFRSALARGEAPHVFEDGAQRRDFVHVRDVAAANVAALEASSPVGALTVYNTGSGEPHTVGAMARALAAAYGGPEPVVTGEYRLGDVRHITADSSRLRAELGWKAETGFEDGMREFARARLRDE

SEQ ID NO: 2224 - protein, 149 aa, Clostridium thermocellum ATCC 27405
MVRTSIHDFEGDQTYSEKRGHNFALNGTFDEVDEKNYDALVIPGGRAPEYIRLNKRVLEIVKHFANENKPIAAICHGPQVLVAAGVLSGRECAAYPAVSPDIEAAGGKYISLDMDKAHVDGNLVTAPAWPAHPEWLAKFLKVLGAEIKI

SEQ ID NO: 2225 - protein, 247 aa, Azotobacter sp. FA8
MSNQRIAFVTGGMGGIGTSISQRLYKENFKVIVGCTPQSKRKDGWLSAQRDSGFSFEACEHDVTDWESTQRAFAELRERVGTIDVLVNNAGITRDASFRKLTPENWSAVINTNLNGMFNTTKQVIEDMLGKGWGRIIDISSINGQRGQFGQTNYSAAKAGIHGFTMALAREVASKGVTVNTISPGYILTEMTGAMRPEVLEQIAAGIPVGRLGQPEEIASMVAWLASDEAAYATGADFSINGGLNMQ

SEQ ID NO: 2226 - protein, 342 aa, Haemophilus influenzae Rd
MKERIKAICLEKPNNVVVKEVPYPEKSDNDVLIQVESMGICGSDIGAYRGTNPLVTYPRILGHEIVGRVIESGIGMSDGVRVGDRVIVDPYVCCGQCYPCSIGRTNCCESLKVIGVHIDGGMQEVIRHPAHLLTKVPDNLPIHQLPLAEPLTIALHALHRTTLKSGEHIVIIGAGAIGLMAALAAVQYGAIPILVDILEQRLEYAKSLGIEHIVNPHKEDDIKRIKEITSGRMAEVVMEASGANISIKNTLHYASFAGRIALTGWPKTETPLPTNLITFKELNIYGSRTSKGEFEEALDMLATNKINASHIITKCIKFEEIPSFISDLSDHPENYLKINAVF

SEQ ID NO: 2227 - protein, 389 aa, Glycine max
  unsure (1)..(389): unsure at all Xaa locations
RAVRFLFPPSLAVFVLHSLHSFAMSDLGSDLPAAAAALSAEDRAGLVNALKDKLQLLAGQHVDILETLPPKVRQRVEILRDLQSQHDEVEAKFLEERSKLEAKYQKLYEPLYTKRYEIVNGVVEVEGVTNVAVPEEANKAAEDKGVPEFWLTAMKTNETLVEEITELEEGSLKYLKDIKRYINDXSLGHHSRFLGXKLDYFKNSELTKTYHMIEDDDPILEKAIGTEIEWHPGKCLTQKILKKKPSKGSKNAKPITKTEKCESFFNFFNPPQVPEDDDDIDDDAVEELENLMEHDYDIGSTIRDKIIPHAVSWFTGEAAQSDFEDIDEDDYEDEEGDDDDDEDEDEDEDEEDEEEKKGKSKSKSKLQSGGRAIPGKDQPMERPPECKQQ

SEQ ID NO: 2228 - protein, 77 aa, Triticum aestivum
  unsure (1)..(77): unsure at all Xaa locations
PDDPSSEDXACSINISDILTGKCMAKIKAGNLCKQKSSKFLCTPLEALGDITSLYYDEEREEIITGNHQGLIHVWSN

SEQ ID NO: 2229 - protein, 343 aa, Agrobacterium tumefaciens str. C58 (Cereon)
MAVLVTGGAGYIGSHMVWALLDAGEEVVVVDRLSTGSRWAVAPAARFYLGDAADRALLDQVFEENHIETIFHFAGSVSVPESISQPLEYYENNTGTTRALVAAAVRSGIRNFIFSSTAAVYGNQPFDGPVPETAILSPENPYGLSKLASEIMLRDVVQAHDFNYVALRYFNVAGADPQGRAGPSPTGVANLIKVACEAATGRRDRVEVYGTDYPTADGTGVRDYIHVSDLIDAHMLAMAHLRAGGGTRTLNCGYGVGYSVLDVLQAVQRESACEFAVIHCPRRPGDIAAMVADSSRIQSELGWRPRFNDLATIVRTALQWEAKRQAQQSGRIPPMRRKLAAIG

SEQ ID NO: 2230 - protein, 347 aa, Bacillus anthracis str. Ames
MKDLIIIGAGQAGLTMGYYLKQEGYNFLLLEAGNRVGDSWRNRYDSLQLFTPRSYSSLPGMALIGEKNEFPYKDEIATYLEEYARHFQLPVQLQTEVLKIRKEKGIFELHTSTEILQTKKVIIATGGFQQPFIPSVSANLSSHVFQIHSSQYKSPSQIPQGKVLVVGGGNSGMQIAVEFAKTHEVTMSISHPLTFLPLHLFRKSIFNWLDKLGLLYAEVNTKRGKWFQKRKDPIFGFEGKELIRNGAIQLQEKVVSASENNIMFQNGETYSAESIIWSTGFIQNYNWIEIEKVVNENGLPNHIKGISPVRGLYYIGLPWQSQRGSALICGVGKDAAYLLSEIKKIDQ

SEQ ID NO: 2231 - protein, 373 aa, Zea mays
  unsure (1)..(373): unsure at all Xaa locations
MGKGAQGSDAAAAGGEVEENMAAWLXVAKNTLKIMPFKLPPVGPYDVRVXMKAVGICGSDVHYLREMRIAHFVVKEPMVIGHECAGVVEEVGARRERTCPVGDRVALEPGVSCWRCRHCKGGRYNLCEDMKFFATPPVHGSLXANQVVHPAXDLCFKLPDGVSXLEEGAMCEPLSVGVHACRRAXVGPETGVLVVGGXAPIGLVSLLGXRGPFGAPRVVVVDVDDXRLAVARSLGADAAVXLSPRAEDLADEVERIRAAMGSDIDVSLDCAGFSKTMSTALEATRPGGKVCLVGMGHNEMTLPLTAAAAREVDVVGVFRYKDTWPLCIDFLRSGKVDVKPLITHRFGFSQRDVEEAFEVSARGRDAIKVMFNL

SEQ ID NO: 2232 - protein, 365 aa, Oryza sativa
  unsure (1)..(365): unsure at all Xaa locations
RLVSSSPPNPTQLGRRRRLPLESTVQKFPPLAPISPNPSRPRLAAARRPPAAYLGLSGSVRGTCGIPDHGDRTRSDPTRRRRLRQKRXSASAAKKDRHIVSWSTEEDDVLRTQIALHGTDNWTIIAPQFKFCIDLWLLRRWLFLLKIPXQDXIMYSSLLGIVMQAQKVLGNKWTEIAKVVSGRTDNAVKNRFSTLCKRRAKDDELFKENGSLCSSTSSKRALVQTGCLTSXXASGSAPPIKQMRXHVILISKXNMTPNMRLVGQDKSTQDSRQPLAIVYQNNQDNMNTMDTQNLGKTIICXGTDVKHEGNFLNKDDPKIATLLQRADLLCSLATXINTENTSQSMDEAXQQLQHHLDXKDDNDMX

SEQ ID NO: 2233 - protein, 475 aa, Myxococcus xanthus
MGTSEPVEPDHALSKPPPVAPVGAQALPRGPAMPGIAQLMMLFLRPTEFLDRCAARYGDTFTLKIPGTPPFIQTSDPALIEVIFKGDPDLFLGGKANNGLKPVVGENSLLVLDGKRHRRDRKLIMPTFLGERMHAYGSVIRDIVNAALDRWPVGKPFAVHEETQQIMLEVILRVIFGLEDARTIAQFRHHVHQVLKLALFLFPNGEGKPAAEGFARAVGKAFPSLDVFASLKAIDDIIYQEIQDRRSQDISGRQDVLSLMMQSHYDDGSVMTPQELRDELMTLLMAGHETSATIAAWCVYHLCRHPDAMGKLREEIAAHTVDGVLPLAKINELKFLDAVVKETMRITPVFSLVARVLKEPQTIGGTTYPANVVLSPNIYGTHHRADLWGDPKVFRPERFLEERVNPFHYFPFGGGIRKCIGTSFAYYEMKIFVSETVRRMRFDTRPGYHAKVVRRSNTLAPSQGVPIIVESRLPS

SEQ ID NO: 2234 - protein, 365 aa, Apium graveolens
MAKSSEIEHPVKAFGWAARDTTGLLSPFKFSRRATGEKDVRLKVLFSGVCHSDHHMIHNNWGFTTYPIVPGHEIVGVVTEVGSKVEKVKVGDNVGIGCLVGSCRSCESCCDNRESHCENIIDTYGSIYFDGTMTHGGYSDTMVADEHFILRWPKNLPLDSGAPLLCAGITTYSPLKYYGLDKPGTKIGVVGLGGLGHVAVKMAKAFGAQVTVIDISESKRKEALEKLGADSFLLNSDQEQMKGARSSLDGIIDTVPVNHPLAPLFDLLKPNGKLVMVGAPEKPFELPVFSLLKGRKLLGGTINGGIKETQEMLDFAAKHNITADVEVIPMDYVNTAMERLVKSDVRYRFVIDIANTMRTEESLGA

SEQ ID NO: 2235 - protein, 511 aa, Zea mays
MQNKRAGAGRRPSARPVDRRRWNRGSHSHPRTCTRSTRATAGPVSPRRASQAGPGPHRSVHRPRAWTASIHSAQHPHLVSRHREAEAAAAACWSFVRLVLSASPHPPPRFLLRASFAEASAPMAAAASSALHAVGAVASAKPRSVAPAVATRRSVRVAPAAKRGPGSGGGRLAKADEAAAAAGSKSGGHELLMFEALREALIEEMNLDPTVCVMGEDVGHYGGSYKVTKGLAEMFGDLRVLDTPIAENSFTGMGVGAAMKGLRPVVEGMNMGFLLLAYNQISNNCGMLHYTSGGQFKIPVVIRGPGGVGRQLGAEHSQRLESYFQSIPGLQMVACSTPYNAKGLMKAAIRSENPVVLFEHVLLYNLKEKIPDEEYICCLEEAEMVRPGEHVTILTYSRMRYHVMQAAKTLVNKGYDPEVIDIRSLKPFDLHTIGNSIKKTHRVLIVEECMRTGGIGASLRSAIIDNFWDYLDAPIMCLSSQDVPTPYAATLEDATVVQPAQIVAAVEQICQ

SEQ ID NO: 2236 - protein, 368 aa, Triticum aestivum
GLLPPARATAARVRSIDASVKLALSRLDALAKSPAPKRDREDGDGPPSPPPPPSDDVAEGLAALCAAMDPAGFLAFVVERRKEVDALRAELPAALQRCVDPARFAMDAVSEVFPVDRRAVRSPTDLAWACVLILEAVVPALADPDPEIGAARPMVPQAARDRARGMADEWKEAAERKGGVEGAKPPDAHAFLQHVATFAVAEKEDKELYKRIVLSFSWRRQMPRLALTLGLEDDMEEIIEELITKGQQLDAVNFAYEAGLLEKFSPVPLLKSYLEDSKKIYCISDNVSTSSGQSGVNANKKEQSVLRAVIKCVEDHKLEGEFPLEDLRKRLERLEMAKTEKKKAALSCSSGGPASKRIQGSAGGTMSP

SEQ ID NO: 2237 - protein, 241 aa, Rickettsia sibirica
MIDLTGKTSLITGASGGIGGAIARLLHKLGSHVIISGSNEEKLKALGKVVKDNYTIEVCNLADKEECSNLISKASKLDILVCNAGITSDTLAIRMKDEDFDKVIDINLKANFILNREAIKKMIQNRYGRIINISSIVGISGNPGQANYCASKAGLIGMTKSLSYEVATRGITVNTVAPGFIKSDMTDKLNEKQREAIIQKIPLGTYGMPEDVANAVAFLASDQASYITGQTIHVNGGMLMV

SEQ ID NO: 2238 - protein, 140 aa, Triticum aestivum
MSQGQPRRPEGGEAMQADRPIKYGDVFDVSGELAAQPVAPRDAAMLQSAENEVLGLGQTQKGGPAAVMQSAATLNARAGHVGRGQLTGPVADAGVTVTEADLPGRRVVTESVAGQVVGRFVAPASVTATEPSGALDKDAV

SEQ ID NO: 2239 - protein, 690 aa, Ruminococcus flavefaciens
MLVEKYLDEALSDLERAEDITDRLSTEEKAEQQKYDAPAEERLGKDAYNWWSEGLHGVARAGTATMFPQTIGMAAMFDDEAVHRAGETTSREARAKYNEYSAHDDRDIYKGLTLWSPNVNIFRDPRWGRGQETYGEDPYLTSCLGVAYAKGLQGDGKVLRTAACAKHFAVHSGPEATRHEFDAKANMKDMTETYIAAFEALVKDAKVESVMGAYNRVNGEPACASDFVMNKLEEWGFDGHFVSDCWAIRDFHTNHGVTKTAPESAALALKKGCDLNCGNTYLHLLAAFNEGLINEEDLRRSCIKLMRTRVRLGMFDKSTEYDGLDYDIVACDEHKEFSLRCSERSMVLLKNNGILPLDGSKYKTIGVIGPNADSVPALEGNYNGKADEYITFLSGIREAHDGRVLYTEGSHLYKDRCMGLALPDDRLSEAEIITRTLRCSGSLCWLDATIEGEEGDTGNEFSSGDKNDLRLPESQRKLVKTVMAKGKPVIIVTAAGSAINVEADCDALIQAWYPGQLGGRALANILFGKVSPSGKLPVTFYEDASKLPDFSDYSMKNRTYRYSEGNILFPFGYGLTYSETECSELSFENGVATVKVTNTGSRFTEDVVQIYIKGYSENAVPNHSLCGFKRVALDAGESRIVQITLPERAFMAVNEKGEWIKEGSEFTLYAGTSQPDELSKKLTGKECTTL

SEQ ID NO: 2240 - protein, 325 aa, Chlamydophila pneumoniae J138
MHSELPNYQNIVESVVTEITTQLLNYRSEHRLVPFWEKSDGSFITAADYGSQYYLKQQLAKAFPNIPFIGEETLYPDQDNEKIPEILKFTRLLTSSVSRDDLISTLVPPPSPTSLFWLVDPIDGTAGFIRHRAFAVAISLIYEYRPILSVMACPAYNQTFKLYSAAKGHGLSIVHSQNLDRRFVYADRKQTKQFCEASLAALNQQHHATRKLSLGLTNTPSPRRVESQYKYALVAEGAVDFFIRYPFIDSPARAWDHVPGAFLVEEAGGRVTDALGAPLEYRKESLVLNNHAVILASGDQETHETTLAALQNQLNVVPTDKLIAL

SEQ ID NO: 2241 - protein, 461 aa, Streptomyces coelicolor A3(2)
MTVESVNPETRAPAAPGAPELREPPVAGGGVPLLGHGWRLARDPLAFMSQLRDHGDVVRIKLGPKTVYAVTNPELTGALALNPDYHIAGPLWESLEGLLGKEGVATANGPLHRRQRRTIQPAFRLDAIPAYGPIMEEEAHALTERWQPGKTVDATSESFRVAVRVAARCLLRGQYMDERAERLCVALATVFRGMYRRMVVPLGPLYRLPLPANRRFNDALADLHLLVDEIIAERRASGQKPDDLLTALLEAKDDNGDPIGEQEIHDQVVAILTPGSETIASTIMWLLQALADHPEHADRIRDEVEAVTGGRPVAFEDVRKLRHTGNVIVEAMRLRPAVWVLTRRAVAESELGGYRIPAGADIIYSPYAIQRDPKSYDDNLEFDPDRWLPERAANVPKYAMKPFSAGKRKCPSDHFSMAQLTLITAALATKYRFEQVAGSNDAVRVGITLRPHDLLVRPVAR

SEQ ID NO: 2242 - protein, 351 aa, Streptococcus agalactiae NEM316
MRAATYLSANELSLTDKAKPQVIKPTDAVVRLVKTTICGTDLHILGGDVPACKPGTTLGHEGIGIVEEVGSAVNHFKVGDKVIISCVTACNTCYYCKHQLPSHCEDGGWILGHLIEGTQAEYVHIPHADGSLYHAPEGVCDDALVMLSDILPTSYEIGVLPSHIKPGDTVCIVGAGAIGLSALLTAQFYSPAKIIMVDLSQKRLEASKKFGATHTILSTSTQEVKEEIDKITKGRGVDVVLECVGYPATFDICQNVVSIGGHIANVGVHGKPVEFNLQDLWIKNITLNTGLVNANTTEMLLEVLETGKIDATQLVTHHFKLSEIEEAYKVFKAAEENNTLKVIIENDITPA

SEQ ID NO: 2243 - protein, 314 aa, Oryza sativa
  unsure (1)..(314): unsure at all Xaa locations
MAAEVGIGRATCAAWARRRGGGGPARLLVVYXXRASTASSPPRIDLHAFDAGASAVAADPLVSFVMGHEEDDAPRAIAVHPSGDEFVCATAKGCRLFKLVTEESSVHLISKDAPTLQSIGPQKCLSFSTDGAKFAVGGEDEKIECCCFSRDGNKPFLFCTLVKGHNVVTVVLDISNWKRIGYKRLLEKHISTLSVSLDGKYLALGSHDSDFCVVDVKKMEVLHLSKKVHLGSPISSIEFCPTERVVISTSHKWGAEVTKLDVPTDWKADDPLAAACTARMAGWVSAVVIFERREEYVVLRNTKILSRYRIKLLX

SEQ ID NO: 2244 - protein, 161 aa, Saccharomyces cerevisiae
MSKNRSSLQSGPLNSELLEEQKQEIYEAFSLFDMNNDGFLDYHELKVAMKALGFELPKREILDLIDEYDSEGRHLMLYDDFYIVMGEKILKRDPLDEIKRAFQLFDDDHIGKISIKNLRRVAKELGETLTDEELRAMIEEFDLDGDGEINENEFIAICTDS

SEQ ID NO: 2245 - protein, 351 aa, Populus tremula x Populus tremuloides
MMMASRGEGVKLASSMMLFSRSFSTAISRGIIAKEAVTAKAVECHGDVVRKNIGEFWVRGSVFGVRHGSTMSFGEKDQQKVEMKQTQSVAEGGDKEEKKEIASYWGVPPSRVTKEDGAEWKWNCFRPWETYSADLSIDLKKHHVPATFLDKMAYWMVKALRFPTDLFFQRRYGCRAMMLETVAAVPGMVGGMLLHCKSLRRFEHSGGWIKTLLDEAENERMHLMTFMEVAKPRWYERALVITVQGVFLNAYFLGYIISPKFAHRMVGYLEEEAIHSYTEFLKELDKGNIENVPAPAIAVDYWRLPPDATLRDVVLVVRADEAHHRDVNHFASDIHYQGRELKEAPAPIGYH

SEQ ID NO: 2246 - protein, 266 aa, Oryza sativa
  unsure (1)..(266): unsure at all Xaa locations
MGIPAASVAARTAVGAALAAVIAARAVRRRSLDGSGGAAGFVVMATHLACGYRYGALVLAFFFTSSKATKIGADRKRRIEDDFKEGGQRNWIQVLANSLIATILVIILATMTGGQDQCLDSHESKVITGIIGGIIGHYCCCNGDTWSSELGVLSDEQPRLITTLKPVRKGTNGGVTLQGLLAATAGGLIIGLTFVFVGLLTVECSXDVALRQLLVIPISATAGLLGSLIDSVLGATLQFSGYCSVRKKVMFSPYSSLSFVSRCSEI

SEQ ID NO: 2247 - protein, 354 aa, Novosphingobium aromaticivorans
MRDSMIFDGSSERRGSILVTGGAGYIGSHAVLALLDAGWPVIVLDNLTTGFRWAVDPRASFVEGDVTDSALVRSILTYHEVAAIMHFAGSVVVPESVVDPLKYYGNNTAATCSLLRNAVDCGVPHIVFSSTAATYGSPDVAQVCENTPTRPINPYGRSKLVVEAMLADAAAAYPINYCALRYFNVAGADPAGRTGQSTAGATHLIKVCVEAALGRRELVEVYGTDYDTHDGTGVRDYIHVSDLADAHVHALHLLMDDPEASHTMNCGYGTGFSVLDVLDAVERISGREIRRVMRPRRPGDPAALIADNNLILSRTRWRPRHARLGDIVRHALAWEDQLARRKPGQPVGQREIAA

SEQ ID NO: 2248 - protein, 244 aa, Yersinia pestis CO92
MSFEGKIALVTGASRGIGRAIAELLVERGACVIGTATSEKGAEAISAYLGENGKGLMLNVVDPTSIDTVLATIRAEFGEVDILVNNAGITRDNLLMRMKDDEWQDIIDTNLTSVFRLSKAVMRAMMKKRFGRIITIGSVVGTMGNAGQVNYAAAKAGVIGFSKSLAREVASRGITVNVVAPGFIETDMTRTLTDDQRAGILAQVPANRLGDAKEIASAVAFLASDEASYISGETLHVNGGMYMI

SEQ ID NO: 2249 - protein, 152 aa, Brassica juncea
MGKGVAVLNSSEGVKGTIFFAQEGEGKTTVTGTVSGLKPGLHGFHVHALGDTTNGSMSTGPHFNPDGKQHGAPEDANRHAGDLGNIIVGDDGTATFTITDCQIPLSGPNSIVGRAVVVHADPDVLGKGGHELSLTTGNAGGRVACGIIGLQG

SEQ ID NO: 2250 - protein, 117 aa, Hordeum vulgare subsp. vulgare
KHMIEDDCADNGIPLPNVNSKILSKVIEYCNKHVQAKPADAAGPGASDALPPADDLKNWDAEFVKVDQATLFDLILAANFLNIKGLLDLTCQTVADMIKGKTPEEIRKTFNIKNDFS

SEQ ID NO: 2251 - protein, 332 aa, Streptomyces globisporus
MRMLVTGGAGFIGSQFVRATLHGELPGSEDARVTVLDKLTYSGNPANLTSVAAHPRYTFVQGDTVDPRVVDEVVAGHDVIVHFAAESHVDRSIDTATRFVTTNVLGTQTLLEAALRHGVGRFVHVSTDEVYGSIASGSWTEDTPLAPNVPYAASKAGSDLMALAWHRTRGLDVVVTRCTNNYGPYQYPEKVIPLFVTNILDGLRVPLYGDGAHRRDWLHVSDHCRAIQMVMNSGRAGEVYHIGGGTELSNEELTGLLLTACGTDWSCVDRVADRQGHDRRYSLDITKIRQELGYEPLVAFEDGLAATVKWYHENRSWWQPLKEAAGLLDAVG

SEQ ID NO: 2252 - protein, 722 aa, Oryza sativa (japonica cultivar-group)
MAKTRKAAAAPPPPPPPPPAETPARRKGKKKGRPSLLDLQRRSLRLQAQNPSPAPSPSRRDANPSDEDDDGVGSGGRRRQKRLKSVLSSSGGGEVGRAPPLLPVAPIFRNLPEVFGGLPEERRGGFLPWDTRRCGCRSGWICDFGIFLRGVGFVDDEAPAAAVVVKVEVEEKKKKVSSKATGKGDAASDGGPTTGTPLPDKKLLLFILDRLQKKDTYGVFSEPVDHEELPDYHEIIEHPMDFSTIREKLLNDSYTTLEQFENDVFLLTSNAMSYNSDDTVYYRQARSIEALAKKDFENLRQASEPEEEQQPKTVPRRGRPPKYAKKIEKTENDVSPDLSNAKTKSADHAETIRKRLTGDRTRNANITTRDSPFLQHNTPGSFAGKRTDRFGDYSGPSKYGKKTTPTISDDERRSTYDQQYFHSSPLFSALGGERKVLVPVGLQQQHAYARSLARFAAKFGPVGWDIAAKRIRRLLPSGTNFGPGWVVDGEPPENSQWPRVPMLSDPSIQSTGVPASNVISKNDESNQKSGLTSNEDSGEEHLARTEPVASTSACVNTNSVSATKLATKCENGANVSCDGVGSTGQTPPLQQHSHSREIHSNMNGFTALPNTISQYAGQGFLGQMQLTHAQVLGMFSGVNGRTNGFIHGHPLVANSIKAPQNGDVGKVATNPSPDAGHDSEAALSQTMTSSAPSLSAGVQPSGSMPSEKLANPKKHPDLALQL

SEQ ID NO: 2253 - protein, 273 aa, Desulfitobacterium hafniense
MIATKFSLCTDPGDPNAGGNHRKNLRRSVEASLRRLGSDYIDLLYLHAWDATTPVEEVLRAMDDLVRAGKLVYVGISDAPAWQVARMQAIADLRGWSPLIALQIQYSLIERTVERELMPMARELGLGVVPWSPLGMGVLTGKYSRADLDIGSGVPEAVGTRKNVAASNGTLTARALDIAEMVKEVASELGKTPAQVALAWTLLDPAVASPIVGVRTLAQLHDNLGALEVRFDDSQRARLDAASRIELGFPHDFLQSPMVHSVVYGEVKPPVRL

SEQ ID NO: 2254 - protein, 427 aa, Saccharomyces cerevisiae
MHHNSQSLSSGHIRSPEDENVAPIGNLKHRTGSLSHISSAHPRVALSRVTNIVATNSSNNSISKPKVAPIKERLDSAAIIEEERLDANSVAQRKEADHNDLLTDREQEEPVEDDGESEEDEEEDQEPLLLQHYASDTLVWEHAFRTYYRTTLDPNDDDVYDVVMVAELSNEIFEYMRKLEDLYKPNPYYMDKQPELRWSFRSTLIDWIVQVHEKFQLLPETLYLCINIIDRYLCKEVVPVNKFQLVGAASLFIAAKYEEINCPTIKDFVYMSENCYSRNDLLDAERTILNGLEFELGWPGPMSFLRRISKADDYEHDTRTLAKYLLESTIMDHRLVSAQPSWLAAGAYFLSKIILGQNQWSLAHVYYSNYTQEQILPLATIILENCRYASKRHNAIWRKYSSRRYLHSSQIVAKWIALAEHRVERSN

SEQ ID NO: 2255 - protein, 470 aa, Bacillus subtilis subsp. subtilis str. 168
MQNHKNELQRSMKSRHLFMIALGGVIGTGLFLGSGFTISQAGPLGAIAAYIIGGFLMYLVMLCLGELAVAMPVAGSFQAYATKFLGQSTGFMIGWLYWFSWANTVGLELTSAGILMQRWLPSVPIWIWCLVFGIVIFLINALSVRSFAEMEFWFSSIKVAAIILFIVIGGAAVFGLIDFKGGQETPFLSNFMTDRGLFPNGVLAVMFTLVMVNFSFQGTELVGIAAGESESPEKTLPKSIRNVIWRTLFFFVLAMFVLVAILPYKTAGVIESPFVAVLDQIGIPFSADIMNFVILTAILSVANSGLYAASRMMWSLSSNQMGPSFLTRLTKKGVPMNALLITLGISGCSLLTSVMAAETVYLWCISISGMVTVVAWMSICASQFFFRRRFLAEGGNVNDLEFRTPLYPLVPILGFCLYGCVLISLIFIPDQRIGLYCGVPIIIFCYAYYHLSIKKRINHETIEKKQTEAQ

SEQ ID NO: 2256 - protein, 195 aa, Zea perennis
APLDKVCVLSCGISTGLDASINVAKPPKGSTVAVFGLGAVGLAAAEGARIAGASRIIGVDLNPSRFEEAMKFGCTEFVNPKDHNKPVQEVLAEMTNGGVDRSVECTGNINAMIQAFECVHDGWGVAVLVGVPHKDAEFKTHPMNFLNERTLKGTFFGNYKPRTDLPNVVELYMKKELEVEKFITHSVPFAEINKA

SEQ ID NO: 2257 - protein, 330 aa, Micromonospora megalomicea subsp. nigra
MGTTGAGSARVRVGRSALHTSRLWLGTVNFSGRVTDDDALRLMDHALERGVNCIDTADIYGWRLYKGHTEELVGRWFAQGGGRREETVLATKVGSEMSERVNDGGLSARHIVAACENSLRRLGVDHIDIYQTHHIDRAAPWDEVWQAAEHLVGSGKVGYVGSSNLAGWHIAAAQESAARRNLLGMISHQCLYNLAVRHPELDVLPAAQAYGVGVFAWSPLHGGLLSGVLEKLAAGTAVKSAQGRAQVLLPAVRPLVEAYEDYCRRLGADPAEVGLAWVLSRPGILGAVIGPRTPEQLDSALRAAELTLGEEELRELEAIFPAPAVDGPVP

SEQ ID NO: 2258 - protein, 688 aa, Oryza sativa (japonica cultivar-group)
MEAFMASADLPAFPWGAASTPPPPPPPPHHHHQQQQQQVLPPPAAAPAAAAFNQDTLQQRLQSIIEGSRETWTYAIFWQSSIDVSTGASLLGWGDGYYKGCDDDKRKQRSSTPAAAAEQEHRKRVLRELNSLIAGAGAAPDEAVEEEVTDTEWFFLVSMTQSFPNGLGLPGQALFAAQPTWIATGLSSAPCDRARQAYTFGLRTMVCLPLATGVLELGSTDVIFQTGDSIPRIRALFNLSAAAASSWPPHPDAASADPSVLWLADAPPMDMKDSISAADISVSKPPPPPPHQIQHFENGSTSTLTENPSPSVHAPTPSQPAAPPQRQQQQQQSSQAQQGPFRRELNFSDFASNGGAAAPPFFKPETGEILNFGNDSSSGRRNPSPAPPAATASLTTAPGSLFSQHTPTLTAAANDAKSNNQKRSMEATSRASNTNNHPAATANEGMLSFSSAPTTRPSTGTGAPAKSESDHSDLEASVREVESSRVVAPPPEAEKRPRKRGRKPANGREEPLNHVEAERQRREKLNQRFYALRAVVPNVSKMDKASLLGDAISYINELRGKLTALETDKETLQSQMESLKKERDARPPAPSGGGGDGGARCHAVEIEAKILGLEAMIRVQCHKRNHPAARLMTALRELDLDVYHASVSVVKDLMIQQVAVKMASRVYSQDQLNAALYTRIAEPGTAAR

SEQ ID NO: 2259 - protein, 169 aa, Oryza sativa
MAEEAAAASSAAEGRMTMVVGVDESEHSYYALQWTLRHFFAAAAGQPPQYRLVVVNAKPTAASAVGLAGPGAADVLPFVEADLKKSSMRVIEKARELCAQVSDALFEVLEGDARNVLCESVERHQAEMLVVGSHGYGAIKRAVLGSVSDYCSHHAHCTVMIVKKPKHKH

SEQ ID NO: 2260 - protein, 360 aa, Mycobacterium tuberculosis CDC1551
MSAVAMRLRTPLTELIGIEHPVVQTGMGWVAGARLVSATANAGGLGILASATMTLDELAAAITKVKAVTDKPFGVNIRADAADAGDRVELMIREGVRVASFALAPKQQLIARLKEAGAVVIPSIGAAKHARKVAAWGADAMIVQGGEGGGHTGPVATTLLLPSVLDAVAGTGIPVIAAGGFFDGRGLAAALCYGAAGVAMGTRFLLTSDSTVPDAVKRRYLQAGLDGTVVTTRVDGMPHRVLRTELVEKLESGSRARGFAAALRNAGKFRRMSQMTWRSMIRDGLTMRHGKELTWSQVLMAANTPMLLKAGLVDGNTEAGVLASGQVAGILDDLPSCKELIESIVLDAITHLQTASALVE

SEQ ID NO: 2261 - protein, 253 aa, Pisum sativum
MIQNGGTVSQGSVLCYACQIPAKVAVSSIRSFWGHSLENKPRGMTFTDMSATSSLLLSGGQNFLSRTIPVLPTLHKSSTTPRATKDSSGFRFPPMTKKPRWWWRTLSCIPYLLPFHQAWMYARTAYHLHPFIPYFQPMTYPFLMAIGTLPRWSLIAYFLIAYLTIVRRKEWPHFFRFHVAVGMLIEIALQVTGIVSRWMPRSFYWGKLGMHFWTTAFFVFLFTTIECIRCALVGMYADVPFVCDAAYIQIPHE

SEQ ID NO: 2262 - protein, 463 aa, Bacillus anthracis str. A2012
MQHSNKSGTLNRGLKERHITLMSLGSAIGVGLFLGSASAIKLAGPSILLGYMIAGLVIFFIMRALGEMAIEQPVAGSFSKYAYDYLGPLAGYITGWNYWFLWVVTCMAEITAAGIYMQYWFPDIPRWTWALLALLLMSAFNFLSVKVFGELEFWFALIKIVTIICMIVVGAGIILFGFGNGGIATGISNLWSHGGWFPNGFSGLLLSMQMVLFAYLGVELIGVTAGEAQNPKKTLAKAIDNVFWRILLFYVGALFVMMAIYPWNELGEKGSPFVLTFQQIGIAKAAGIINFVVLTAALSSCNGGLFSTGRMLYTLAQQKKAPERFGRLNKNGIPSQGIVATAIVLLIGVILNYLVPAKVFTWLTSISTFGAIWTWGIILVAQIKFRKSLPTQNRQKLSYKMPLYPLSSYFSLAFLVLVLGIMAYSEDTRIALIVGPIWLIGLAIVYYMKGFHKIDETPNSKIS

SEQ ID NO: 2263 - protein, 624 aa, Oryza sativa (japonica cultivar-group)
MVTDAEEVSPTASSSELEQEDDDDDCYLSDQEDDALEESVLQVLEDERDEDCHWSSTSVCPPTIHRFILVVFVVRVPIASVVDGFLRLQVITKESLLAAQREDLRKVMELLGLREHHARTLLIHYRWDVERIFELLDQKGRDRLFSEAGIPLQPANNPGSPSSTEVTCNVCYDDVPLSDASKMDCGHNYCNECWTGYFIVKINEGQSRRIKCMALKCNTICDEAIVRKLVNAKRPDIAERFERFLLESYIEDNDTVKWCPSTPHCGNAIRVKGDIHCEVECTCGRQFCFNCSSEAHSPCSCVMWELWIKKCRDESETVNWITVNTKPCPKCHKPVEKNGGCNLVACICGQAFCWLCGGATGRDHTWSSISGHSCGRFTEDQSKKTEQARRNLYRYMHYHNRYKAHTDSLKQEAKLKGDIQGKISISENKDSKIKDYSWVINGLNRLFRSRRVLSYSYPFAFYMFGDEIFKDEMTSDERELKQNLFEDQQQQLEFNVERLSGFLERDFQNFSDDEVMDTMKHVINLSNVVDRLCKQMYQCIENDLLYPLRTPHNIAPYKSKGLDRASELNVCWDSSEQGSSIFGKRQLGSSSNNNGRPHKRERNDAHGGAALFDLNVPAEVADKI

SEQ ID NO: 2264 - protein, 267 aa, Clostridium sordellii
MNKLENKVALVTSATRGIGLASAIKLAQNGAIVYMGVRRLEATQEICDKYKEEGLILKPVFFDAYNIDIYKEMIDTIIKNEGKIDILVNNFGTGRPEKDLDLVNGDEDTFFELFNYNVGSVYRLSKLIIPHMIENKGGSIVNISSVGGSIPDISRIGYGVSKSGVNNITKQIAIQYAKYGIRCNAVLPGLIATDAAMNSMPDEFRKSFLSHVPLNRIGNPEDIANSVLFFVPSEDSSYITGSILEVSGGYNLGTPQYAEFVGSKVVE

SEQ ID NO: 2265 - protein, 751 aa, Geobacillus stearothermophilus
MENQNRQNAAQCPFHGSVTNQSSNRTTNKDWWPNQLNLSILHQHDRKTNPHDEEFNYAEEFQKLDYWALKEDLRKLMTESQDWWPADYGHYGPLFIRMAWHSAGTYRIGDGRGGASTGTQRFAPLNSWPDNANLDKARRLLWPIKKKYGNKISWADLFILAGNVAIESMGGKTIGFGGGRVDVWHPEEDVYWGSEKEWLASERYSGDRELENPLAAVQMGLIYVNPEGPDGKPDPKAAARDIRETFRRMGMNDEETVALIAGGHTFGKAHGAGPATHVGPEPEAAPIEAQGLGWISSYGKGKGSDTITSGIEGAWTPTPTQWDTSYFDMLFGYDWWLTKSPAGAWQWMAVDPDEKDLAPDAEDPSKKVPTMMMTTDLALRFDPEYEKIARRFHQNPEEFAEAFARAWFKLTHRDMGPKTRYLGPEVPKEDFIWQDPIPEVDYELTEAEIEEIKAKILNSGLTVSELVKTAWASASTFRNSDKRGGANGARIRLAPQKDWEVNEPERLAKVLSVYEDIQRELPKKVSIADLIVLGGSAAVEKAARDAGFDVKVPFFPGRGDATQEQTDVESFAVLEPFADGFRNYQKQEYSVPPEELLVDKAQLLGLTAPEMTVLVGGLRVLGANYRDLPHGVFTDRIGVLTNDFFVNLLDMNYEWVPTDSGIYEIRDRKTGEVRWTATRVDLIFGSNSILRSYAEFYAQDDNQEKFVRDFINAWVKVMNADRFDLVKKARESVTALQSFNLRRSAGTTRLQ

SEQ ID NO: 2266 - protein, 184 aa, Burkholderia fungorum
MRSDRSRGDTVTIYKLGDAAPTIHESVFVADSASIIGNVTLEENASVWFGATIRGDNELITIGKGSNVQENAVLHTDPGFPLTVEPNVTIGHQVMLHGCTIKEGSLIGIQAVVLNGAVIGRNCLVGAGAIVTEGKVFPDNSLILGAPAKVVRELTGADIANMQRGAATYAERREYYKAQLVRIG

SEQ ID NO: 2267 - protein, 356 aa, Agrobacterium tumefaciens str. C58 (Cereon)
MPKTISLDQYRLLGRSGLRVSPLSLGTMTFGSEWGWGADEGEARRIFDAYVDRGGNFIDTSVNYTDGASERILGGFVKDKRERVVLSTKFTMARDAQNINSGGNHRLNLMRSVETSLRQLDTDRIDLLYLHAWDFTTTPEEVMRALDDLVSAGKVLYVGICNTPAWRVAQMQTLADLRGWSPFVALQIEYSLVERTVEFELMPMAHELGLGVLPWSPLGGGILTGKYSRADLSDENDANVAPTRKGVIASTGHLNERSLEIADVVGTVAEELGASRSQVALAWTLLNPAVTSPIVGARTLEQVEDNFGALEIMFSDKQIDLLNRSSALPPIFPERFIGRPMGQQLIFGTNKVVDRR

SEQ ID NO: 2268 - protein, 771 aa, Rhodopseudomonas palustris
MMHSGLDNSAELRVSDFDPITLAGGTRTEVLPGAIQPHAALLALAPADLTIVHAAGATASLLGAAAELLPGTAASTAFSSDQIARLQALATAERWIERPQHAFTLNAPDATPIDVIVHHASGLLVVELDPRREPAPENSLALVQSMIRRARPAPNLQGFCDAMAAELRSVTGFDRVMVYRFARDGSADVIAEARGPETSPFLGLRDPQPDISNQPGSISRIRVQPDVHAPAAPLWPAHSPRNGLALDLSFSATRSASPEHRLYLAQLGVAASLSLSLVVEGELWGLIVCHHATPRFLPYRMREACALFAEMASLQLETRLAADQLAARLRSTRIHEELVTRMSQESDLAEGLIRFYPNLLDFIPAAGVGLWIDGQFTGIGATPGPAQVAAMMGWLHGVPHDGVYHTDCLALAYPPAKAFAGCASGLLALSLSNTPHNYVLWFRPEVVRVVTWAGMPNKPVGVDAGAPRTPKGCASSWQESVRLHGEPWLDTDVDAAHRLRESLLDVVLRRIDGIARERRSAQLLQEQLMRQVELGLSRSKDVAKTLQEEKRRRVLVEADLSKVLRRTVEDQEAERLRIARELHDTLGQSLTLLQLGFDKLGQAAGDNPELQQRIAEMKSLTADVGRQANRLAWEIRPTALDDLGIQTAIQNLLDSWSEKSSIEFDLHMTLGSRRLPSPVETTLYRVLQEALTNVVRHASARHVSVILQLGDDQVTMIVEDDGCGFVTAGRKPPSGRLGLLGIRERLSLVGGSLEIESAPGKGTALYARIPL

SEQ ID NO: 2269 - protein, 119 aa, Dioscorea tokoro
  unsure (1)..(119): unsure at all Xaa locations
GGVMIGDGQSRFSINGKPIYHFVGTSTFSEYTVVHVGCVAKINPSAPLDKVCVLSCGISTGLGAALNVAKPVKGSSVAVFGLGAVGLAAAEGARIAGAXRIIGVDINPKRFNAAKKFGV

SEQ ID NO: 2270 - protein, 1166 aa, Capsella rubella
MKQKWLFVLILCFFTALGIHGKRLINSDFDETALLMAFKQFSVKSDPNNVLGNWIYESGRGSCSWRGVSCSDDGRIVGLDLRNGGVTGTLNLANLTALPNLQNLYLQGNYFSSSSGGDSSSGSYCYLQVLDLSSNLISDYSLVDYVFSKCSNLVSVNFSNNKLVGKLGFAPSSLKSLTTVDFSYNILSEKIPESFISEFPASLKYLDLTHNNFSGDFSDLSFGMCGNLSFFSLSQNNISGVKFPISLPNCRFLETLNISRNNLAGKIPGGEYWGSFQNLKQLSLAHNRFSGEIPPELSLLCKTLETLDLSGNALSGELPSQFTACVWLQNLNIGNNYLSGDFLSTVVSKITRITYLYVAFNNISGSVPISLTNCTNLRVLDLSSNGFTGNVPSGLCSQQSSPVLEKLLIANNYLSGTVPVELGKCKSLKTIDLSFNELTGPIPKDVWMLPNLSDLVMWANNLTGSIPEGVCVKGGKLETIILNNNLLTGSIPQSISRCTNMIWISLSSNRLTGKIPTGIGNLSKLAILQLGNNSLSGNVPRQLGNCKSLIWLDLNSNNLTGDLPGELASQAGLVMPGSVSGKQFAFVRNEGGTDCRGAGGLVEFEGIRAERLERFPMVHSCPATRIYSGMTMYTFSANGSMIYFDISYNAVSGLIPPGYGNMGYLQVLNLGHNRITGNIPDSLGGLKAIGVLDLSHNDLQGYLPGSLGSLSFLSDLDVSNNNLTGPIPFGGQLTTFPVSRYANNSGLCGVPLRPCGSAPRRPITSSVHAKKQTLATAVIAGIAFSFMCLVMLFMALYRVRKVQKKELKREKYIESLPTSGSCSWKLSSVPEPLSINVATFEKPLRKLTFAHLLEATNGFSAETMVGSGGFGEVYKAQLRDGSVVAIKKLIRITGQGDREFMAEMETIGKIKHRNLVPLLGYCKVGEERLLVYEYMKWGSLETVLHEKSSKKGGIFLNWTARKKIAIGAARGLAFLHHSCIPHIIHRDMKSSNVLLDEDFEARVSDFGMARLVSALDTHLSVSTLAGTPGYVPPEYYQSFRCTAKGDVYSYGVILLELLSGKKPIDPGEFGEDNNLVGWAKQLYREKSGTEILDPELVTEKSGDAELFHYLKIASQCLDDRPFKRPTMIQVMAMFKELKADTEEDESLDEFSLKETPLVEESRDKEP

SEQ ID NO: 2271 - protein, 162 aa, Pseudomonas syringae pv. tomato str. DC3000
MSAFHDIRLKALGGQELPLADFKNKVVLVVNVASKCGLTPQYAALENLYQQYRDKGLVILGLPCNQFAGQEPGTEQEIAEFCQLNYGVTFPLGEKLDVNGPNRHSLYRLLAGEGAEFPGDITWNFEKFLVGKNGGVSARFSPRTAPDDPAVIQAIEKALAHN

SEQ ID NO: 2272 - protein, 175 aa, Zea mays subsp. mays
RLLAANPVYGKIPVLLLPDGRAICESAVIIQYIEDVARGSGGAEASSLLLPDDPYERAMHRFWTAFIDDKFWPALDAVSLAPTPGARAQAVEDTRAALSLLEVAFKDRSNGRAFFSGGDAAPGLLDLALGCFLPALRACERLHGLSLIDASATPLLDGWSQRFAAHPAAKRVCRT

SEQ ID NO: 2273 - protein, 595 aa, Pseudomonas aeruginosa
MSMPLPMKLRTRLFLSISALITVSLFGLLLGLFSVMQLGRAQEQRMSHHYATIEVSQQLRQLLGDQLVILLRETPDGQALERSQNDFRRVLEQGRANTVDSAEQAALDGVRDAYLQLQAHTPALLEAPMVDNDGFSEAFNGLRLRLQDLQQLALAGISDAETSARHRAYLVAGLLGLVGVAILLIGFVTAHSIARRFGAPIETLARAADRIGEGDFDVTLPMTNVAEVGQLTRRFGLMAEALRQYRKTSVEEVLSGERRLQAVLDSIDDGLVIFDNQGRIEHANPVAIRQLFVSNDPHGKRIDEILSDVDVQEAVEKALLGEVQDEAMPDLVVDVAGESRLLAWSLYPVTHPGGHSVGAVLVVRDVTEQRAFERVRSEFVLRASHELRTPVTGMQMAFSLLRERLDFPAESREADLIQTVDEEMSRLVLLINDLLNFSRYQTGMQKLELASCDLVDLLTQAQQRFIPKGEARRVSLQLELGDELPRLQLDRLQIERVIDNLLENALRHSSEGGQIHLQARRQGDRVLIAVEDNGEGIPFSQQGRIFEPFVQVGRKKGGAGLGLELCKEIIQLHGGRIAVRSQPGQGARFYMLLPV

SEQ ID NO: 2274 - protein, 64 aa, Glycine max
GNSKKIDIHTRLMRRYKSVPTWWFYIILAANIALIIFICEYYNESLQLPWWGVLLACAISIFRT

SEQ ID NO: 2275 - protein, 369 aa, Mycoplasma pulmonis
MMSLKAGIVGLPNVGKSSLFSAITKKSVESANYAFTTIEPNIASVELIDKRLQKLAKLANSKKIIYATFDFVDIAGLVAGASKGEGLGNKFLANIREVDAIIHVVRCFENNDVLHVGGKIDPVFDAETINLELILADLQSVENILNRIKKRALSSNDATVKKEYELLNKIKEALSNQKLAISINLNQEEKDLIKSHQLLTMKPQIFVANIGLNDLDNLDKNQNYQKLLKFAQEQNFMTIPICIKIETELSSIENEEEKNEMMQAMNIEDSSINILARKAFELLDLETFFTVGKVEARAWVYKKNSLAPQCAGIIHSDFEKKFIKAEVISYKDFIEAGSEQNAKENGKMRLEGKNYLMQDGDICHFKFGK

SEQ ID NO: 2276 - protein, 465 aa, Pachysandra americana
  unsure (1)..(465): unsure at all Xaa locations
SGKPFYAIVHRVTGSLIIDFEPVKPYEVPMTAAGALQSYKLAAKAIARLQSLPSGSMERLCDTMVQEVFELTGYDRVMAYKFHEDDHGEVVSEITKPGLEPYLGLHYPATDIPQAARFLFMKNKVRMICDCNAKHVKVLQDEKLPFDLTLCGSTLRAPHSCHLQYMDNMGSIASLVMAVVINEGDEDGEGSDPAQPQKRKRLWGLVVCHNTSPRFVPFPLRYACEFLAQVFXIHVNKEIGLENQILEKNILRTQTLLCDMLMRDAPLGTVSQSPNIMDLVKCDGAALLYKNKIWRLGMAPGDFQINDISSWLSEYHMDSTGLSTDSLYDAGYPGALALGDVVCGMAAVRITTKDMLFWFRSHTAGEVRWGGAKHERGEKDDGRRMHPRSSFKAFLEVVKTRSLPWKDYEMDAIHSLQLILRNAFRDVETMDLDTNTIRMQLNDLKIKGMEELEAVTNEMVRLMET

SEQ ID NO: 2277 - protein, 432 aa, Kluyveromyces lactis
MVYEAKPFDPITVKANEKKRVAYFYDADVGNYAYGAGHPMKPHRIRMTHSLIMNYGLYKKMEIYRAKPATKQEMCQFHTDEYIDFLSRVTPDNLDMFQKESVKFNVGDDCPVFDGLYEYCSISGGGSMEGAARLNRGKCDVAINYAGGLHHAKKSEASGFCYLNDIVLGIIELLRYHPRVLYIDIDVHHGDGVEEAFYTTDRVMTCSFHKYGEFFPGTGELRDTGVGKGKYYAVNVPLRDGIDDATYKSVFEPVIGKIMEWYQPSAVVLQCGGDSLSGDRLGCFNLSMKGHANCVNYMKSFGVPLMIVGGGGYTMRNVARTWAFETGILNNVILDEELPYNDYYEYYGPDYKLDVRPSNMYNVNTPEYLDKVLLNIFSNLKHTKYAPSVQLNHVPRDAEDKGDAEEDTAAAKDTRGGSQYARDITIENATEF

SEQ ID NO: 2278 - protein, 1164 aa, Arabidopsis thaliana
MVSGGGSKTSGGEAASSGHRRSRHTSAAEQAQSSANKALRSQNQQPQNHGGGTESTNKAIQQYTVDARLHAVFEQSGESGKSFDYSQSLKTAPYDSSVPEQQITAYLSRIQRGGYTQPFGCLIAVEESTFTIIGYSENAREMLGLMSQSVPSIEDKSEVLTIGTDLRSLFKSSSYLLLERAFVAREITLLNPIWIHSNNTGKPFYAILHRVDVGILIDLEPARTEDPALSIAGAVQSQKLAVRAISHLQSLPSGDIKLLCDTVVESVRDLTGYDRVMVYKFHEDEHGEVVAESKRNDLEPYIGLHYPATDIPQASRFLFKQNRVRMIVDCYASPVRVVQDDRLTQFICLVGSTLRAPHGCHAQYMTNMGSIASLAMAVIINGNEEDGNGVNTGGRNSMRLWGLVVCHHTSARCIPFPLRYACEFLMQAFGLQLNMELQLALQVSEKRVLRMQTLLCDMLLRDSPAGIVTQRPSIMDLVKCNGAAFLYQGKYYPLGVTPTDSQINDIVEWLVANHSDSTGLSTDSLGDAGYPRAAALGDAVCGMAVACITKRDFLFWFRSHTEKEIKWGGAKHHPEDKDDGQRMNPRSSFQTFLEVVKSRCQPWETAEMDAIHSLQLILRDSFKESEAMDSKAAAAGAVQPHGDDMVQQGMQEIGAVAREMVRLIETATVPIFAVDIDGCINGWNAKIAELTGLSVEDAMGKSLVRELIYKEYKETVDRLLSCALKGDEGKNVEVKLKTFGSELQGKAMFVVVNACSSKDYLNNIVGVCFVGQDVTGHKIVMDKFINIQGDYKAIIHSPNPLIPPIFAADENTCCLEWNTAMEKLTGWPRSEVIGKLLVREVFGSYCRLKGPDALTKFMIVLHNAIGGQDTDKFPFPFFDRKGEFIQALLTLNKRVSIDGKIIGAFCFLQIPSPELQQALEVQRRQESEYFSRRKELAYIFQVIKNPLSGLRFTNSLLEDMDLNEDQKQLLETSVSCEKQISKIVGDMDVKSIDDGSFLLERTEFFIGNVTNAVVSQVMLVVRERNLQLIRNIPTEVKSMAVYGDQIRLQQVLAEFLLSIVRYAPMEGSVELHLCPTLNQMADGFSAVRLEFRMACAGEGVPPEKVQDMFHSSRWTSPEGLGLSVCRKILKLMNGGVQYIREFERSYFLIVIELPVPLMMMMPSS

SEQ ID NO: 2279 - protein, 2139 aa, Botryotinia fuckeliana
MTSKDGSCRNSSATSSSTGSWKSTDTIKGPGYFQGSSMKRGAPMQVKTDRSSRVEIDAQVSPTSAGPRNTISPSSSISPNVSPREQRMADFGNYRRDLAVLETSGGRIPQIHHNPPTAIASSNQIAPWMSNGGGATGSPNGFTSFYNDSSDALSQASQLSPVARPGTAVTGNTNASDSPADALFGDGDERRPSVASITTASSTGSKGSVSRAVGGLHKKLTSFFGEDPTSSDTSLPSQQGKEARSHSFARSHRDRNHSSATDHGHYRDASPAGGSRPRTPVPSSEVVPFLYQNSQDISLYGEAPVRENLSGPDRERYINDSSDKPPKTSSSSKSHHLPGHHLRNRSNDDTRSLRPTISREESAFSNRFKDRNNPMGTVSANASNPNLQRPKSPTPSGMSTWSQPTKNGNGDAPSSPRDNNNGAKRSLLNLTGRFKRHKDKDHTPSRLKETPAPSRAPINGSSRQDAGRIYESPDLAKYSQDGSITGSELNLTPQYTNGSARPPAGRQGTFPKLPFRKGRGRAEDTDQTYDTLDRGGDNIHHLDTNLSNMEGILTKPPPLTPLDNNIFNGNGHDDENKTDAESAGGLGWNAPDSWAVKKVDDDNMSRLPEIDEAGIPQKADEKASPYCIRIFKVDGTFATLSTALNTTVTELVAQLNKKTYQADNLENYQIVMRKHDLQRILAPGERPLVIQRRLLEQAGYEPGDRIEDVGREDNSYLCRFSFLPARQGGYASVSNDNGLALKSQKYSHVDLSGRNLITIPIALYSKTSEMISLDLSRNLSLDVPKDFISSCVNLRDIKFRSNEAWKLPVSLTRGSRVTMLDLTNNRIENLDHAELSRLQGLVSLKFANNRLKSLPSYFGIYRSMRTLNLSSNFLEEFPEFLCNMVSLTDMDMSFNGISDLPVEIGKLTALERFVFTNNRLIGSLPNSFGKLVNLKEVDIRYNLLSSIDIVATLPKVEQISADHNSVSVCECEFANIRILRLNSNPVTKFEIKNSVPTLTTLNLSNAKLAQIPDAAFDKMPNLNKLVLDINHFVFLPAQIGKLRKLEYFSIARNSLSSLPADVGCLTELRYLDIRQNNLKKLPMEIWWANKLEFLNVSSNVLENFPKPGSRPPQPPGDVGSANNNLNPNSQNSSFEELGPLDFGHRRPSQASSGLLSVGSSPVPDARKGSVVSVYGKGGRKTSVVSRSTSASTINQPPPVNIRKDSGLSAKLVNTFAGSLRNLHLADNGLDDDVFDELTLLSELRVLNLSYNDLNDMPSRSIKSWPQLVELYLSGNELTSLPSDDFEEFELVLQVLHINGNKFQTLPAELGKAHRLTVLDCGSNSLKYNVSNWPYDWNWNWNTNLKYLNLSGNKRLEIKPSLPGSAGARDGRDLTDFSALQSLRILGLMDVTLTIPSIPDQTEDRRVRTSGSLAGQLAYGMADSLGNDSHLSIIDMVVPRFNSTETETLLGMFDGAISSNRGSRIAKYLHENFGHIFSDELKRLNALNNETPKDALRRAFLSLNKDLATAAAQSNEERAVLSQRGSTTPAVLSQDDLTSGGVLPIMFLQQSELYVANVGDAQAMLIHEKDGHRILTRKHDPAEPNERQRIRDAGGWVSKQGKLNDVLEVSRAFGYVHLLPAVQAAPHVTHVTIKEQDEMVLIASRELWEYLSPELVVDIARYEKHDLMRAAQRLRDLASIFGASGKIMVMMMGVSDLKKRAQIRPHRVQSLSFNPNMMMDEGYVPSKRPKKKINDIEDSSLRRLKQEVQAPVGDIGIVFTDIKSSTALWETYPNAMRSAIRLHNEVMRRQLRIIGGYEVKTEGDAFMVSFPTATSALLWCFAVQAALLEVNWPAEVITSHMGHEVYDSNQNLIFKGLSVRMGAHWGRPVCENDPVTRRMDYFGPMVNRAARISAVADGGQITVSADFISEIQRCLETYSESDRSGSTGSEDAFDSDLISQSIRRELRSLSSQGFEVKDMGERKLKGLENPEYIYLMYPHSLAGRMNSQRSLEGEAAVITEEPATLAPDSELTIDPAHVWDIWRLSLRLEMLCSTLEEPRGEPLQPPETAMLEKMKNRGGEVTDRFLLNFLTHQVSRIETCITAIATRHLALGQIAISDLDQLRAPMADVMEGLAADPLTCRSTQIRLPFTRLRSLSCKIY

SEQ ID NO: 2280 - protein, 199 aa, Triticum aestivum
MSSNLSFVLNKPGDVSFEERPKPSLASPHDVLVAVNYTGICGSDVHYWVHGSIGKFVVEDPMVLGHESAGTVVEVGDKVKTLKAGDRVALEPGYPCRRCQNCLAGKYNLCPDMVFAATPPYHGTLTGFWSAPADFCFKLPDNVSLQEGALIEPLAVAGHIVKQARVKPGDSVVVMGAGPVGLLCAAVAKAYGASKDVSV

SEQ ID NO: 2281 - protein, 447 aa, Brassica napus
METTTTPLLPDRCGWLRRRLRLKNPLSSELSGAVGDLGTFIPIVLTLTLVSNLDLSATLIFTGFYNIATGLLFDIPMPVQPMKSIAAVAVSETPHLTPSQIAAAGASTAATPLLLGATGAMSFLYNLIPLPVVRGVQLSQGLQFAFTAIKYVRYDYDTATLKPSSSPRSWLGLDGLILALAALLFIILSTGSGTDRDCAGDGDFAESSPSNETQSRRRRLRLLSSIPSALIVFFVGLVLCFIRDPSIFKDLKFGPSKFKILKITWEDWKIGFVRAAIPQIPLSVLNSVIAVCKLSNDLFDKELSATTVSVSVGVMNLIGCWFGAMPVCHGAGGLAGQYRFGARSGLSVVFLGVGKLIVGLVFGNSFVRILSQFPIGILGVLLLFAGIELAMASKDMNTKEDSFIMLVCAAVSMTGSSAALGFGCGVVLYLLLKLRTLDSSETASHVA

SEQ ID NO: 2282 - protein, 236 aa, Oryza sativa
MGRGKIEIKRIENTTNRQVTFCKRRNGLLKKAYELSVLCDAEVALIVFSSRGRLYEYANNSVKSTVERYKKANSDTSNSGTVAEVNAQHYQQESSKLRQQISSLQNANSRTIVGDSINTMSLRDLKQVENRLEKGIAKIRARKNELLYAEVEYMQKREVELQNDNMYLRSKVVENERGQQPLNMMGAASTSEYDHMVNNPYDSRNFLQVNIMQQPQHYAHQLQPTTLQLGQQPAFN

SEQ ID NO: 2283 - protein, 341 aa, Helianthus annuus
MASDLKSKFLHVYQTLKSELLNDPAFEFHHDSRQWIDKMLDYNVPGGKLNRGLSVVDSYQLLKGAELTDDEIFLASALGWCIEWLQAYFLVLDDIMDGSHTRRGQPCWFRLPKVGMIAANDGLILRNHVPRILKKHFRGKPYYVDLVDLFNEVEFQTASGQMIDLITTLVGEKDLSKYSLSIHRRIVQYKTAYYSFYLPVACALLMFGEDLDNHVEVKNVLVEMGTYFQVQDDYLDCFGAPEVIGKIGTDIEDFSSWLVVKALELANEEQKKVLHENYGKKDPSSVAKVKELYNTLNLQGVFEDYESTSYKKLITSIEGHPSKAVQAVLKSFLGKIYKRQK

SEQ ID NO: 2284 - protein, 374 aa, Acanthothamnus aphyllus
ALSIAGAVQSQKLAVRAISHLQSLPGGDIKLLCATVVDSVRDLTGYDRVMVYKFHEDEHGEVVAESKRPDLEPYIGLHYPATDIPQASRFLFKQNRVRMIVDCRASPVGVRQDDGLMQPLCLVGSTLRAPHGCHAQYMENMGSKASLAMAVIINGNDEESIGGRNATRLWGLVVCHHTSARCIPFPLRYACEFLMQAFGLQLNMELQLAAQLSEKHVLKTQTLLCDMLLRDSPTSIVTQSPSIMDLVKCDGAALYYQGKYCPLGVTPAEAQIKDIVEWLLAFHGDSTGLSTDSLGDAGYPGAALLGNAVCGMAVAYITNRDFLLWFRSHTTKEIKRGGAKHHPEDKDDGQRMHPRSSFKAFLEVVKSRSLPWEN

SEQ ID NO: 2285 - protein, 190 aa, Actinobacillus pleuropneumoniae
MKLTNLALAFTLFGASAVAFAHADHDHKKADNSSVEKLVVQVQQLDPVKGNKDVGTVEITESAYGLVFTPHLHGLAQGLHGFHIHQNPSCEPKEKDGKLVAGLGAGGHWDPKDTKQHGYPWSDDAHLGDLPALTIAHDGSATNPVLAPRLKKLDEVKGHSLMIHEGGDNHSDHPAPLGGGGPRMACGVIK

SEQ ID NO: 2286 - protein, 392 aa, Glycine max
MGLAPIIRMAKEGPNWDGLLKWSIAHSDGTSPTRNLSEEDRKWFMEAMQAQTIDVVKRMKEITLVMQTPEQVLKDQGVTPADIEDMLEELQEHVESIDMANDLHSIGGLVPLLGYLKNSHANIRAMAADVVTTIVQNNPRSQQLVMEANGFEPLISNFSSDPDVTVRTKALGAISSLIRHNKPVITAFRLANGYAALKDALASENVRFQRKALNLIHYLLHENNSDCNIVNELGFPRMLMHLASSEDSDVREAALRGLLQLAHNAKDGKDGNEKDSAKIKQLLQERINNISLMSAEDLGVVREERQLVDSLWRTCFNEPSSLREKGLLVLPGEDVPPPDVASKYFEPPLRSSTANPSSKKDPEKNEIPLLLGSGPSPTYTNNQGSNKGDASS

SEQ ID NO: 2287 - protein, 346 aa, Thlaspi caerulescens
MASTSTLLMKTIFLVLIFVSFAISPATSTAPDDCASESANPCVNKAKALPLKIIAIAAILVASMIGVGAPLFSRSVPFLQPDGNIFTIVKCFASGIILGTGFMHVLPDSFDMLSSKCLGENPWHKFPFSGFLAMLACLVTLVIDSMATTLYTSKNVVGIVPHGHGHGHGPENDVALPIKEDDSANAQLLRYRVIAMVLELGIIVHSVVIGLSLGATSDTCTIKGLIAALCFHQMFEGMGLGGCILQAEYTNMKKFVVAFFFAVTTPSGIALGTALSTVYRENSPSALITVGLNACSAGLLIYMALVDLLAAEFMGPKLKGSIKMQAKCFLAALLGCGGMSIIAKWA

SEQ ID NO: 2288 - protein, 433 aa, Xanthomonas campestris pv. campestris str. ATCC 33913
MSSQGNESPALVRAVSRWQIVGLSINDVIGSGIYLLPAATAALLGPMSLWAVMLAGLAVALLVLCYAQAASYFDTPGGSYLYTREAFGPFTGFQIGWMIWLTRISSAAALSNGLADAVARFWPAAGSDGWERLLVVVGSLGLLTAINVIGVKSAARTGVALVIGKLVPLLLFVAIGLFYVDWSWAFAGSTPDLRDLGNLGEAALLLLFAYAGFENIPAAAGEYRNPRRDVPFALITMIVTVTLIYAAVQVVAQGTLPNLAASPTPLADAASRFGGEALALILTVGATISILGTTSNTVMLGPRFLFALAQDGYGPALLARVHPRFHTPAAAVLTQGVLSLALALSGSFTQLALLSMVTRLFAYIGTAAAVIVLARRYRARTDALRLPGGPLIPIAALLLSLGLLASASWQNLAAAGLALLVGCVFYLFPRKPA

SEQ ID NO: 2289 - protein, 132 aa, Oryza sativa
  unsure (1)..(132): unsure at all Xaa locations
ITEFVAGQVVGQYSVADQAVEQDATNITVCKALEATALAADERSVDRTDVEAIRSAEMAAQGSDVTMPSGLGDQAQAAELSNADSDRDDYKITVGDVLTDATAKLAVDKVTGAEDAVKVVQAETYRDAVARX

SEQ ID NO: 2290 - protein, 54 aa, Glycine max
HEKVLTYSAQDSIYKVFDLENYTLLYSISDKNVQEIKISPEIMLLIYAKASYHV

SEQ ID NO: 2291 - protein, 222 aa, Zea mays
MAGEKGLVLLDFWVSPFGQRVRIALAEKGLPYEYAEEDLMAGKSDRLLRANPVHKKIPVLLHDGRAVNESLIILQYLEEAFPDAPALLPSDPYARAQARFWADYVDKKVYDCGSRLWKLKGEPQAQARAEMLDILKTLDGALGDKPFFGGEKFGFVDAAFAPFTAWFHSYERYGEFSLPEVAPKIAAWAKRCGERESVAKSLYSPDKVYDFIGLLKKKYGIE

SEQ ID NO: 2292 - protein, 869 aa, Cellvibrio japonicus
MKDDFPQRLLRVSAASLLVLAALAGCYSRAPSTTDSTTTVSADTVTTQATEKVEWPVLNSAIKKDPAVEARVDDLLARMTLEEKIGQLVQPEIRHVTPEDIKQYHVGSVLNGGGSTPGANKYASLEDWCKLADSFYYASVDKSDGRIGIPVIWGTDAVHGLGNVIGATLFPHNIGLGATNNPELLKQIGWATAREIAATGLDWYFSPTVAVARDDRWGRTYESWSEDPQIVHAFAGKMVEGLQGTGGSDRLFTHEHVIATAKHFIGDGGTLNGVDRGETQGDEKVLRDIHGAGYFSAIESGVQVVMASFTSWEGTRMHGHKYLLTDVLKDLSGFDGLVVGDWSGHSFIPGCTALNCPQSLMAGLDIYMVPEPDWEELYKNLLAQAKTGELPMARVDDAVRAILRVKIRAGLFEKGAPSTRPLAGKKDVLGAPEHREVARQAVRESLVLLKNKNNLLPLARQQTVLVTGDGADNSGKQSGGWSVSWQGTGNTNADFPGATSIYAGINAVVEQAGGKTLLSDDGSFSEKPDVAIVVFGEDPYAEMQGDVGNMAYKPRDTSDWELLKKLRSQGIPVVSLFISGRPLWVNREINASDAFVAVWLPGTEGQGIADVIFRNAQGEINYDVKGRLSFSWPKRPEQTPLNRGDANYDPLFPYGYGLSYGDKDTLGDNLSEEGIQLAEALDVLDLFNRRPIEPWQLEIIGYQNDRVPMASSTVTASSLKIQAVDRNEQEDARRVQWNGSGPGQVALSVGDRQDFIGYVKSDSALVFDIKVNAAPTVTTYLRLGCGSYCASDIDLTEKLKGFAGQDVQTVTVPLHCYPNSGANFGVTQPPEEFWTQVLQPFSLLTSGTLDVTFAQVRVVKGAGKDVACP

SEQ ID NO: 2293 - protein, 126 aa, Oryza sativa
  unsure (1)..(126): unsure at all Xaa locations
XKEACHPLDPCTLEKYDSCTNGTGRVGSSITLDQLIEPAMVPPPPFSWYLRGITTRTTEMLVNDLIAETARLRGLANNAIDKQYVEGKCDTSRDHLTEECNDIKERWRQRRKTGRHGNSLRLTAQG

SEQ ID NO: 2294 - protein, 425 aa, Pseudomonas putida KT2440
MSKTNESLMQRRVAAVPRGVGQIHPIFVDTAKNSTVIDVEGRELIDFAGGIAVLNTGHLHPKVVAAVQEQLTKVSHTCFQVLAYEPYVELCEKINKLVPGDFDKKTLLVTTGSEAVENAVKIARAATGRAGVIAFTGGYHGRTMMTLGLTGKVVPYSAGMGLMPGGIFRALFPSELHGISVDDAIASVERIFKNDAEPRDIAAIILEPVQGEGGFLPAPKELMKRLRALCDQHGILLIADEVQTGAGRTGTFFAMEQMGVAPDLTTFAKSIAGGFPLAGVCGKAEYMDAIAPGGLGGTYAGSPIACAAALAVIEVFEEEKLLDRSKAVGERLTAGLREIQKKYPIIGDVRGLGSMIAVEVFEKGTHTPNAAAVGQVVAKAREKGLILLSCGTYGNVLRILVPLTAEDALLDKGLAIIEECFAEIA

SEQ ID NO: 2295 - protein, 336 aa, Escherichia coli CFT073
MDKITQVLFSDIGKVTTQYVEVPHQQLKPHEVRIAPVFYGICGSDLHVLKGGHPFAKPPVVPGHEIAARVTEVGSDVKNVQPGDHVVVDPIMACMECRACKAGRFNLCEPPQVAGFRAPGFARSQHIVPARNCHVAPASLPLKVLAFAEPAACARHCVNRMPKASLESVLVIGAGTIGLSIVQALRIMGAGKITVIEPDAAKRALALKLGAAEVWAPGELAADVRFTGAIDVVAAQATLNDACTRVYAGGTVVCMGVPSGPREIPLPMMQRFERDLLNSGMYIPEDFDAVIEWLADGRFDTSELVTDLFAIEDAAAAFERAQQNDSIKVMLQFAPE

SEQ ID NO: 2296 - protein, 188 aa, Zea mays
  unsure (1)..(188): unsure at all Xaa locations
MVKAVAVLAGTDVKGTIFFSQEGDGPTTVTGSISGXSSPGLHGFHVHALGDTXTNGCMSTGPHFNXVGKEHGAPEDEDRHAXGDLGNVTAGEXGVVNVNITDSQIPLAGPHSIIGXRAVVVHADPDDLGKGGHELSKXTGNAGGRVACGIIGAPRLKQLTSRGKHHRRSKRAPQGCCCSISPCIGNTI

SEQ ID NO: 2297 - protein, 152 aa, Oryza sativa
MVKAVVVLGSSEIVKGTIHFVQEGDGPTTVTGSVSGLKPGLHGFHIHALGDTTNGCMSTGPHYNPAGKEHGAPEDETRHAGDLGNVTAGEDGVANIHVVDSQIPLTGPNSIIGRAVVVHADPDDLGKGGHELSKTTGNAGGRVACGIIGLQG

SEQ ID NO: 2298 - protein, 475 aa, Pseudomonas putida KT2440
MSEPGQKLRLGALIALVVGSMIGGGIFSLPQNMAARADVGAVLIGWGITAVGMLALAFVFQTLANRKPELDSGVYAYAKAGFGEYMGFSSAWGYWISAWLGNVGYFVLLFSTLGFYFPVFGEGNTPIAIGCASLLLWSVHFLVLRGIKEAAFINQVTTVAKVVPLLIFVVIAAFAFRADIFTRDIWGLSNPQFGSVLEQVRNMMLVTVFVFIGIEGASVYSGRAQRRSDVGKATVIGFLGVLALLVLVNVLSLGIMTQPELAGLQNPSLASVLEHIVGPWGALLISLGLAVSLLGALLSWALLCAEILYATARDKTMPRFLAKENANHVPANALWLTNCMIQGFLLITLFSAGTYTSLIYLASSMILVPYLWSAAYAVLLAMRAETYAGQPRLRRKDLLVALVALLYAVWLLYAGGLKYLLLSALLYAPGVILFARAKHEQGQTLFTAWEKLIFAAVLVGAALAAYALYSGLLSL

SEQ ID NO: 2299 - protein, 329 aa, Sulfolobus tokodaii
MWYYMNLRKIDHTNIEVSEIGIGVWSLVTDWWGGEINKAEEILKKALENGINFFDTADVYGEGLGEKILAKVFNTKRDKIIILTKIGYDFYNKSNNRISQRFSIEYIDYAFKKSLERLNTDYIDILMIHNPKMHIIKNKEILDFLQGLKKEGKVRLIGVALGPTLGWGEEGIEAIKMGYESLEYIYNLIELKPGIDFLNYDIGHFVRVPHASDALIEDKWPIYNDPKLHRSLKDINWIRRAVELSKPLLSFARNKGMKLSQLALKFILYNKRVSSVLPNISSINELNEFLEVEKLPELTEEEYKYLYEYSINNFSELNKESIEETKRYK

SEQ ID NO: 2300 - protein, 340 aa, Schizosaccharomyces pombe
MFKRRRNPKGLVLNPNASVKSSDNDHKEELINNQKSFESNVEAFMEQCAHMNRRPAWISDLDNSSLEVVRHLGEGNGGAVSLVKHRNIFMARKTVYVGSDSKLQKQILRELGVLHHCRSPYIVGFYGAFQYKNNISLCMEYMDCGSLDAILREGGPIPLDILGKIINSMVKGLIYLYNVLHIIHRDLKPSNVVVNSRGEIKLCDFGVSGELVNSVAQTFVGTSTYMSPERIRGGKYTVKSDIWSLGISIIELATQELPWSFSNIDDSIGILDLLHCIVQEEPPRLPSSFPEDLRLFVDACLHKDPTLRASPQQLCAMPYFQQALMINVDLASWASNFRSS

SEQ ID NO: 2301 - protein, 462 aa, Methanosarcina barkeri
MNPKRIRTILSGKPGKGPVAYWMSRDQRVEDNWALLFARKIALEADVPVFVVFCLVDKFLGAIRRQYEFMLKGLQEVEATLARKKIPFFFLQGDPEEKIPDFIEKYGIGTLITDFSPLRIKRTWTEKVASSIKVPFFEVDAHNVVPCWEASKKQEYAAHTFRPKLLRLLPEFLTEYPELETNLEFPEIAVRSGKAERFSEVQKSGIGTRLPGEFLEKKAGFLPDLALFEAGETAARKVMDEFLTNKLDSYSSLRNDPTKDALSNLSPYLHFGQISAQRVALKVEKAKADLESKRVFLDELLVRKELADNFCYYNPFYDSFDGFPDWAKKTLNSHRRDQRSHIFTLEELETGRTYDPLWNASQIELIRKGKMHSYMRMYWAKKILEWSESPEKALETAIYLNDKYELDGRDPNGYAGIAWSIGGVHDRAWQEREIFGKIRYMSYEGSKRKFDVKSYIDKYSAL

SEQ ID NO: 2302 - protein, 744 aa, Hypocrea jecorina
MRYRTAAALALATGPFARADSHSTSGASAEAVVPPAGTPWGTAYDKAKAALAKLNLQDKVGIVSGVGWNGGPCVGNTSPASKISYPSLCLQDGPLGVRYSTGSTAFTPGVQAASTWDVNLIRERGQFIGEEVKASGIHVILGPVAGPLGKTPQGGRNWEGFGVDPYLTGIAMGQTINGIQSVGVQATAKHYILNEQELNRETISSNPDDRTLHELYTWPFADAVQANVASVMCSYNKVNTTWACEDQYTLQTVLKDQLGFPGYVMTDWNAQHTTVQSANSGLDMSMPGTDFNGNNRLWGPALTNAVNSNQVPTSRVDDMVTRILAAWYLTGQDQAGYPSFNISRNVQGNHKTNVRAIARDGIVLLKNDANILPLKKPASIAVVGSAAIIGNHARNSPSCNDKGCDDGALGMGWGSGAVNYPYFVAPYDAINTRASSQGTQVTLSNTDNTSSGASAARGKDVAIVFITADSGEGYITVEGNAGDRNNLDPWHNGNALVQAVAGANSNVIVVVHSVGAIILEQILALPQVKAVVWAGLPSQESGNALVDVLWGDVSPSGKLVYTIAKSPNDYNTRIVSGGSDSFSEGLFIDYKHFDDANITPRYEFGYGLSYTKFNYSRLSVLSTAKSGPATGAVVPGGPSDLFQNVATVTVDIANSGQVTGAEVAQLYITYPSSAPRTPPKQLRGFAKLNLTPGQSGTATFNIRRRDLSYWDTASQKWVVPSGSFGISVGASSRDIRLTSTLSVA

SEQ ID NO: 2303 - protein, 1171 aa, Oryza sativa
MASGSRATPTRSPSSARPAAPRHQHHHSQSSGGSTSRAGGGGGGGGGGGGGAAAAESVSKAVAQYTLDARLHAVFEQSGASGRSFDYTQSLRASPTPSSEQQIAAYLSRIQRGGHIQPFGCTLAVADDSSFRLLAYSENTADLLDLSPHHSVPSLDSSAVPPPVSLGADARLLFAPSSAVLLERAFAAREISLLNPLWIHSRVSSNPFYAILHRIDVGVVIDLEPARTEDPALSIAGAVQSQKLVVRAISRLQALPGGDVKLLCDTVVEHVRELTGYDRVMVYRFHEDEHGEVVAESRRSNLEPYIGLHYPATDIPQASRFLFRQNRVRMIADCHAAPVRVIQDPALTQPLCLVGSTLRSPHGCHGQYMANMGSIASLVMAVIISSGGDDDHNIARGSIPSAMKLWGLVVCHHTSPRCIPFPLRYACEFLMQAFGLQLNMELQLAHQLSEKHILRTGTLLCDMLLRDSPTGIVTQSPSIMDLVKCDGAALYYHGKYYPLGVTPTEVQIKDIIEWLTMCHGDSTGLSTDSLADAGYSGAADLGDAVSGMAVAYITPSDYLFWFRSHTAKEIKWGGAKHHPEDKDDGQRMHPRSSFKAFLEVVKSRSLPWENAEMDAIHSLQLILRDSFRDSAEGTSNSKAIVNGQVQLGELELRGIDELSSVAREMVRLIETATVPIFAVDTDGCINGWNAKVAELTGLSVEEAMGKSLVNDLIFKESEETVNKLLSRALRGDEDKNVEIKLKTFGPEQSKGPIFVIVNACSTRDYTKNIVGVCFVGQDVTGQKVVMDKFINIQGDYKAIVHNPNPLIPPIFASDENTCCSEWNTAMEKLTGWSRGEVVGKLLVGEVFGNCCRLKGPDALTKFMIVLHNAIGGQDCEKFPFSFFDKNGKYVQALLTANTRSRMDGEAIGAFCFLQIASPELQQAFEIQRHHEKKCYARMKELAYIYQEIKNPLNGIRFTNSLLEMTDLKDDQRQFLETSTACEKQMSKIVKDASLQSIEDGSLVLEKGEFSLGSVMNAVVSQVMIQLRERDLQLIRDIPDEIKEASAYGDQYRIQQVLCDFLLSMVRFAPAENGWVEIQVRPNIKQNSDGTDTMLFPFRFACPGEGLPPEIVQDMFSNSRWTTQEGIGLSICRKILKLMGGEVQYIRESERSFFHIVLELPQPQQAASRGTS

SEQ ID NO: 2304 - protein, 152 aa, Cicer arietinum
MVKAVAVLGSSDTVSGTINFSQEGDGPTTVTGNLAGLKPGLHGFHIHALGDTTNGCISTGPHFNPNGKEHGSPEDPIRHAGDLGNINVGDDGTVSFSITDNQIPLTGPNSIIGRAVVVHADPDDLGKGGHELSKTTGNAGGRVACGIIGLQG

SEQ ID NO: 2305 - protein, 441 aa, Sinorhizobium meliloti
MSAPSSGKSLGLAACTAIVVGNMVGSGFYLSPAAVAPYGNLAIVIWIVMGAGAICLGLTFARLAKLSPAVGGPYAYTRLAYGDFPGFLIAWGYWISIWASLPVIAVAFAGVVIDFFPFLRGRGTATLLTLSVIWLVVLVNLRGVHAAGLFSEITTYAKMIPFGAVALLGLFYIDFSHFADFNPSGQPLLQASAALAPLTMFAYLGLESATVPAGDVRDAERTIPRSTVLGIAIAVTLYVLGTIVVMGLVPREELVHSVAPFSEAARRMWGPAGELAISLAVVLSSIGALNGWTLLMGQVPMAAARDGLFPPLFSRLSARHVPATGIVVSATLATILVLVQAAGSEGFSSIYRLFVGLSTMTAVIPYAFCALASSLVSARVSGGTLIPRVTLIELVGFTFAIFTLYGCGAEPVLYGLVLLLLSIPVYIWQRRRSFVPGDFGQ

SEQ ID NO: 2306 - protein, 153 aa, Methanosarcina mazei Goe1
MSKMSDLANQRRLASKVLECGLDRVWLNPEASEEIASAITREDIRGLIEKGVIKAKPVKGVSRGRARALAAKRKYGHCKGHGSRKGKKGARTPKKEQWMKKIRALRRRLKELRADGALDKSVYCRLYRKAKGGEYRSVSHLNSHLESEKLLQK

SEQ ID NO: 2307 - protein, 303 aa, Xanthomonas axonopodis pv. citri str. 306
MLVFTHPACLGHDAGPEHPESPARLEAVVQALRGAFPDLDWREAPLAKLGDLCRVHEREQVDAVLETAFDGYRQLDVDTRMVPASRAAALRAAGAGIAAVDAVMQDQTRTAFCAVRPPGHHATAQVSMGFCLFNNIAVAAAHARDRHGLERITIVDFDVHHGNGTQAIFERDPAVQYLSTHQSGLYPHSGSVYERGVGNIHNLLLPPGSDGLRFRNVWEDEMLPLVDAFRPQLILISAGFDAHLRDPLADLMLDDDDFAWLTGALRTLADRHARGRVVSMLEGGYDLQALAECSIAHVRVLLQ

SEQ ID NO: 2308 - protein, 105 aa, Oryza sativa
MTAAAAASRFLPFSSAPSKSVARVLGFWRLGAMENSAEMQRFIEQEQQKAMVSEMVGKLTSVCWDKCITSTPGSKFSSGETTCLTNCAQRFLDMSVIIAKRFEMQ

SEQ ID NO: 2309 - protein, 882 aa, Xylella fastidiosa 9a5c
MPLPIAAPPILASTLTLLLATTPTAAALTPEQHAAALVAKMTLQEKITQTMNAAPAIPRLGIPAYDWWSEGLHGIARNGYATVFPQAIGLAASWNTDLLQHVGTVTSTEARAKFNLAGGPGKDHPRYAGLTLWSPNINIFRDPRWGRGMETYGEDPYLTGQLAVSFIRGLQGNIPDHPRTIATPKHFAVHSGPEPGRHSFDVDVSAYDLEATYTPAFRAAIVDGHAGSVMCAYNALHGTPACASDWLLNTRLRNDWGFNGFVVSDCDAIDDMTRFHFFRQDNASASAAALKSGNDLNCGNTYRDLNQAIARGDIDEALLDQALIRLFAARQRLGTLQPREHDPYATIGIKHIDTPAHRALALQAAVQSLVLLKNSGNTLPLTPGTTLAVLGPDADSLTALEANYQGTSSTPVTPLTGLRTRFGAAKIHYAQGASLAPGVPGTIPETALRNHGHPGLKGEYFDTIDFAGPPHLVRQDRIIAFNWDHVAPAPGMNPHRYAVRWTGELLPPGPGTYTFAVHVARCFDCNGHDPVRLSIDDRQIIPDNATAAQATTAPQQTDNTHLEATLHFTDTRPHHIRLDMEHRGEDQGVRLEWLAPAAPQLAEAERAVAHADAIVAFVGLSPEVEGEELHIDTPGFSGGDRTTIDLPATQETLLQHVKTTGKPLIVVLMSGSAVALNWAQHHANAILAAWYPGQSGGTAIAQALAGDVNPGGRLPVTFYRSTQDLPPYISYDMTGRTYRYFKGQPLYPFGYGLSYTQFTYEAPQLSTATLKAGDTLTVTAHVRNTGTRAGDEVVQLYLEPPHSPQAPLRNLVGFKRVTLRPGESRLLTFTLDTRQLSSVQQTGQRSVEAGHYHLFVGGGQPNTGAPGGTAAFSIIGRALLPK

SEQ ID NO: 2310 - protein, 191 aa, Lycopersicon esculentum
GDSMSTWTRDDDKLFEHGLVLYPENSADRWQLIADHVPGKTADDIMAHYDDLVHDVYEIDSGRIDLPSYTDDPVELEGDCQITSGSNKKSNEIERKKGTPWTEDEHRLFLIGLDKYGKGDWRSISRNVVVSRTPTQVASHAQKYFIRQQAMKKERKRSSIHDITTAVDTNPVPPQSSFQNQSGSQNFNFAM

SEQ ID NO: 2311 - protein, 238 aa, Arabidopsis lyrata subsp. lyrata
CKAAVAWEAGKPLVMEEVEVAPPQKHEVRIKILFTSLCHTDVYFWEAKGHTPLFPRIFGHEAGGIVESVGEGVTDLQPGDHVLPIFTGECGDCPHCHSEESNMCDLLRINTERGGMIHDGESRFSINGKPIHHFLGTSTFSEYTVVHSGQVAKINPDAPLDKVCIVSCGLSTGLGATLNVAKPKKGQSVAIFGLGAVGLAAAEGARIAGASRIIGVDLNSQRFDQAKEFGVTEFVNPR

SEQ ID NO: 2312 - protein, 158 aa, Oceanobacillus iheyensis HTE831
MSVHDFTVTTIEGEEKRLSDYKGKVILIVNTASQCGFTPQLEDLQKLYKQYQDNDFEILGFPCNQFGNQDPGASEEISAFCQKNYGVTFQMFKKVDVKGKEAHPLYKHLTEEKKGILGGQIKWNFTKFLIDQNGNVIERFSPQKNPNTLNKDIEVLLR

SEQ ID NO: 2313 - protein, 170 aa, Vibrio vulnificus CMCP6
MNKHTLLAAILLYSTSSFAQSLSVDMKDLSSNQTLGTVTISSSDYGTVFTPDLKGLPSGLHGFHLHANGSCESSNKDGKVVLGGAAGGHYDPQNSGKHGYPWTEDNHLGDLPALFADASGNASQPVLAPRVALKDVQGRALMIHAGADNHSDHPMPLGGGGARIVCGVIK

SEQ ID NO: 2314 - protein, 99 aa, Saccharomyces cerevisiae
MSQDFVTLVSKDDKEYEISRSAAMISPTLKAMIEGPFRESKGRIELKQFDSHILEKAVEYLNYNLKYSGVSEDDDEIPEFEIPTEMSLELLLAADYLSI

SEQ ID NO: 2315 - protein, 209 aa, Zea mays
KLAVQEEYDTYDDEVHFLVKLPFLCTRTKIIEIVAAKDVIFALAQSGLCAAFNRTTNKRICYLNISPDEVIRSLFYNKNNESLITVSVYESDRFSSLKCRTTPIEYIRRGQLKDGFPLFETESLKYPGFVEFDDVNGKVLTFSAKGCTYKVFDLKNYNFLYSICDENIQEIKISPGIMLVIYNYKKTNCHGPLTILSIEDGTPLKTFNQ

SEQ ID NO: 2316 - protein, 425 aa, Oryza sativa (japonica cultivar-group)
MESPDSSSGSAPPRVLRRQQQQPGSAPELPPGFRFHPTDEELVVHYLKKKAASVPLPVTIIAEVDLYKFDPWDLPEKANFGEQEWYFFSPRDRKYPNGARPNRAATSGYWKATGTDKPIMSSGSTREKVGVKKALVFYRGKPPKGVKTNWIMHEYRLTDTSSSAAAVATTRRPPPPITGGSKGAVSLRLDDWVLCRIYKKTNKAGAGQRSMECEDSVEDAVAAYAPSSQQHATAAAGMAGSDGAGGVAAAHGGDYSSLLHHDSHEDTFLVNGLLTAEDAAGLSTGASSLSQLAAAARAAATPCDATKQLLAPSPTPFNWFEAFLPRAKEFPSGLSRSSRDIGDMSLSSTVDRSLSEAGAVAIDTGDAANGANTMPAFINPLGVQGATYQQHQAIMGASLPSESAAAAAACNFQHPFQLSRVNWDS

SEQ ID NO: 2317 - protein, 310 aa, Brassica rapa subsp. pekinensis
MMKRLSSSDSVGGLISLCPTTSTDQPSPRRYGREFQSMLEGYEEEEEEAVTEERGQTGLAEKKRRLSINQVKALEKNFELENKLEPERKVKLALELGLQPRQVAVWFQNRRARWKTKQLEKDYGVLKTQYDSLRHNFDSLRRDNESLLQEIGKLKAKLNGEEEVEKMMKMENNAVTMECDVSVKEEEVSLPEELTDPPSSPPQALEHSDSFNYRSFTDLRDLLSLKAAASSVAAAGSSDSSDSRAVLNEESSSNVTAGPVTVPQGGFLQFVKMEQTEDHDDFLSGEEACGFFSEEQPPSLHWYSTVDQWN

SEQ ID NO: 2318 - protein, 205 aa, Thermosynechococcus elongatus BP-1
MGEVKVMSGKRILMLVGDYVEDYEVMVPFQALQMVGHTVHAVCPDKVAGDSVRTAVHDFERDQTYSEKRGHNFTLNATFTEIDPTTYDALVVPGGRAPEYLRLNSRVLEITKHFGETQKPIAAICHGLQLLAAAGVLAGKTCTAYPACGPEVVSAGGKFTNVAVDAVVVDGNLVTAPAWPAHPQWLAAFLEVLGTKISHQPSAAL

SEQ ID NO: 2319 - protein, 432 aa, Amycolatopsis mediterranei
MTMTVQKAPSQLLAAKLQIPPIPYSHAAGSWVYASDGTRYLDGASGIVNVNIGHAHPTVVAALRDQVGICTYASPGTFAPDLMEQLAAAAARAVHRPDDRVMFTPTGTHATESAIALARLVQRARGEEGRHKILTSTLGYHGNSAFVLALSGHRSRRPHEDDSFGLAPAFNPPYPGQHLGCPFDACRVECVRAVRDAIVAAGPESVAAVLMEPVNGTTGGGYVPPAGYLRALREVCDEFGVLVIHDEVLTGLGRCGLPLASHHTPGSAADIVTLSKGLGAGYVPLAATMLSPDLAEDIMTSGKWLPLMGTMSATPLQGRAGLAVLSVLEELGALDRDEVRGAALGRLVADAVRGRQVVTDVRGLGYFYGIELAPGTLGDVMRITRSRGLLLYPYVGFRPDRTGEGLLVAPRSTRPTAISASSARRWARHWTS

SEQ ID NO: 2320 - protein, 515 aa, Lycopersicon esculentum
MAKISRLFGSTVKAAITAQAGFHGKRIPAVSSLQEHIVKSTPARYNSTQACLENDISGTDNKGFKGHDMLAPFTAGWQSTDVDPLIIEKSEGSHVYDMQGRKYIDTLAGLWCTALGGNEPRLVDAATKQLNTLPFYHSFWNRTTKPSLDLAKELLDMFTAKKMAKAFFTNSGSEANDTQVKLVWYYNNALGRPNKKKFIARAKAYHGSTLISASLTGLPALHQNFDLPAPFVLHTDCPHYWRYHLPGETEEEFSTRLAKNLEDLILKEGPETIAAFIAEPVMGAGGVIPPPATYFDKIQAVVKKYDILFIADEVICAFGRLGTMFGSDMYNIKPDLVTLAKALSSAYMPIGAVLVSPEVSDVIHSQSNKLGSFSHGFTYSGHPVACAVALEAIKIYKERNMVERVNRISPKFQEGLKAFSDSPIIGEIRGLGLILATEFANNKSPNDHFPPEWGVGAYFGAQCQKNGMLVRVAGDTIMMSPPFVVTPEELDELIRIYGKALRETEKRVEELKSQK

SEQ ID NO: 2321 - protein, 301 aa, Zea mays
  unsure (1)..(301): unsure at all Xaa locations
MRWRLQPAPAPTLLLVLLVATVAAVVVVVRAEPQVPCYFVFGDSLVDNGNNNDIASLARANYPPYGIDFAAGPTGRFSNGLTTVDAISRLLGFDDYIPAYAGASGDQLLTGVNFASAAAGIRDETGQQLGQRISFGGQLQNYQAAVQQLVSILGDEDSAASHLSQCIFTVGMGSNDYLNNYFMPAVYSTSQQYTPEQYADVLINQYSQQLRTLYSYGARKVALVGVGQVGCSPNELAQRSXEGVACVEQINXAVRMFNRRLVALVDSFNRILPGAHFTYVNVYGIFEDIIKSPGAHGGGVN

SEQ ID NO: 2322 - protein, 405 aa, Burkholderia fungorum
MVAARARSACRRRRNLRLTRAAGGSFVSLSWWTHCSPQARQVPRGGYGESDNDYRLFDFEHSMAFNVTLRQSGRQFQVEQDEPVLSAALRQGIGLPYGCKNGACGSCKGTVISGEIEQRAHSSSALSNEEKTRGMALFCCATACTDLEVDIREVAGVGDVQVKKLPCRVNAIERKADDVIVLKLQLPANERLQYLAGQYLEFILKDGKRRSYSMANAPHTEGPIELHIRHMPGGAFTDHVFNTMKERDILRFEAPLGTFFLREDSDKPIVLLASGTGFAPLKAIIEHAVFKNLNRPMTLYWGARRKKDLYLLELAEQWAREIPNFKFVPVLSEPDAGDAWTGRVGFVHRAVIEDLPDLSAYQVYACGAPVMVESAQRDFTQHHGLPEDEFYADSFTSAADLANAV

SEQ ID NO: 2323 - protein, 546 aa, Arabidopsis thaliana
MSLSQNAPKSKGIKREELKKQYEDVEDEEEIGSDDDLTRGKRRKTEKEKQKLEESELVEMKKLENLIFGSLYSPVTFGKEEEEDGSALFHVDRSAVRQIPDYEDDGDDDEELSDEENGQVVAIRKGEAAWEDEEEKQINVDIASVNRLRKLRKEENEGLISGSEYIARLRAHHAKLNPGTDWARPDSQIVDGESSDDDDTQDGGVDDILRTNEDLVVKSRGNKLCAGRLEYSKLVDANAADPSNGPINSVHFHQNAQLLLTAGLDRRLRFFQIDGKRNTKIQSIFLEDCPIRKAAFLPNGSQVIVSGRRKFFYSFDLEKAKFDKIGPLVGREEKSLEYFEVSQDSNTIAFVGNEGYILLVSTKTKELIGTLKMNGSVRSLAFSEDGKHLLSSGGDGQVYVWDLRTMKCLYKGVDEGSTCGTSLCSSLNGALFASGTDRGIVNIYKKSEFVGGKRKPIKTVDNLTSKIDFMKFNHDAQILAIVSTMNKNSVKLVHVPSLTVFSNWPPPNSTMHYPRCLDFSPGSGFMAMGNAAGKVLLYKLHHYQNA

SEQ ID NO: 2324 - protein, 474 aa, Bacillus cereus ATCC 14579
MAQVSNTNNELKRTMKSRHLFMIALGGVIGTGLFNGSGFIISQAGPGGSVLAFIAGGLLMYFVMLCLGELAVAMPVSGSFQEYATKFINPATGFTIGWLYWLSWANTTGLEFTTAGITMQRWFPDIPVWVWCLIFGVTIFTINALSARSYAETEFWFSSIKVSAIIAFILLGGAAMFGFIDLKGDEPAPLLSNFVNHGGLFPNGLAAILLTMVTVNYSFQGTELVGIAAGESEDPAKTLPRSIRNIIWRTMFFFVLAIFVLVALIPWEEAGLTKSPFVAVFDNIGIPYAADIMNFVILTAVLSVANSGLYAATRMLWSLSKNEMAPAFLKKLSSRGIPLNALIMTIAISAFSLLTSVVAAETVYLWLISISGVITIIVWMSICVSQFFFRKHYLADGGKLEDLKFKTPLYPLVPILGFGLYGIILISLIFIPEQRLGIYCTVPFIIFCYTYYHFKVKKRNSTNTHSETKISETS

SEQ ID NO: 2325 - protein, 392 aa, Tristellateia madagascariensis
DLEPVNPADVPLTAAGALKSYKLAAKAISRLQSLPSGNISLLCDVLVKEVRDLTGYDRVMVYKFHEDEHGEVVSECRRSDLESYLGLHYPATDIPQASRFLFMKNKVRMICDCLAPPVKVIQDERLPQPLSLCGSTLRSPHGCHAQYMANMGTIASLVMSVTINEDDDTMDGDQQQMARKLWGLVVCHHTSPRFVPFPLRYACEFLIQVFGVQITKELELAAQVREKHILRIQTMLCDMLLRDAPVGIITQSPNVMDLVKCDGAALFYKNKFWLLGITPTEAQIRDIAEWLLEYHSGNTGLSTDSLMEAGYPGASVLGDAVCGMASVSITSRDFLFWFRSHTAKEIKWGGAKRDPDDKDDGRKMHPRSSFKAFLEVVKWRSLPWEDVEMDAI

SEQ ID NO: 2326 - protein, 175 aa, Crocus sativus
MGKSSPTVSAEYLKAVEKCKRKLRGFIAEKNCAPLMLRIAWHSAGTFDCKSKTGGPFGTMRHKAELAHGANNGLDIAVRLLEPIKEQFPIISYADFYQLAGVVAVEITGGPDVPFHPGREDKPEPPVEGRLPDATKGCDHLRTVFGEQMGLSDKDIVALSGGHTLGRCHKDRSGF

SEQ ID NO: 2327 - protein, 444 aa, Zea mays
  unsure (1)..(444): unsure at all Xaa locations
MSASRSGRRRTGSVALGDLLQREASAERAALGCGERPSVAAGQACRAKKGEDFALLKPACERRPGAPSTSFSAFALFDGHNGSAAAVYAKEHLLGNVLSCVPTDLAWDDWLAALPRALVAGFVKTDKDFQTKAHSSGTTVTLAIIDGSVVTVASVGDSRCVLEAEGSIYYLSADHRFDANEEEVGRVTECGGEVGRLNVVGGAEIGPLRCWPGXGLCLSRSIGDQDVGEFIIPVPYVKQIKLSNAGGRLIISSDGVWDALTAEMAFKCARGLPPEAAAEQIVKEAVEAKGLRDDTTCIVIDIISPEKPKRTIQSQRSPRKGLVLLKNFFLRKTASDSLSLPDKDNYPEPDLEEVFEDGCPSLSRRLNSEYPVRDMFKLFACAICQIDLESGQGISIHEGLSRPGKLRPWDGPFLCHSCQEKKEAMEGKRHSRDSSSRNSGSSES

SEQ ID NO: 2328 - protein, 198 aa, Oryza alta
GQTPMFPRIFGHEAGGIVESVGEGVTDLAPGDHVLPVFTGECKECPHCKSAESNMCDLLRINTDRGVMIGDGKSRFSINGKPIYHFVGTSTFSEYTVMHVGCVAKINPAAPLDKVCVLSCGISTGLGATINVAKPPKGSTVAIFGLGAVGLAAAEGARIAGASRIIGIDLNANRFEEARKFGCTEFVNPKDHDKPVQQ

SEQ ID NO: 2329 - protein, 189 aa, Leptospira interrogans serovar lai str. 56601
MNIHKTAFIHPLATAIGLVEMGPYSSLWPGTVVRADMNRIVLGKGVNIQDNSTLHTDSSRGITIGDYTLVGHNTMLHGCKIGRGCLIGIGSIVLDEAEIGDGAMITAGCMIRGGKKIPPGAMVIQKNGELKILEGKSKPILSVAGCLEYIALSDRFRKGIFGPFTLEEEIEFQNQAKTVLKEMGIPFKE

SEQ ID NO: 2330 - protein, 326 aa, Lactococcus lactis subsp. lactis
MTVLVLGGAGYVGSHAVDMLLKRGYDVAVVDNLVTGHRESVPANVRFYEGDVRDQAFLADVFEKENIEGIMHFCAYSLVGESMQKPLMYFNNNVGGAQVILETMEEFGVKHIVFSSTAATFGIPEKSPISEKTPQKPINPYGESKLIMEKMMKWQSQATDMTYVALRYFNVAGAKDDGSIGEAHKNETHLIPIILQTALGQREFITIYGDDYHTPDGTCIRDYIDMEDLIEAHIKALEYLKAGGQSDQFNLGSSKGYSNLEVLETARKVTGKEIPSQMGERRAGDPDELVADSTKAGEILGWKAQNDLEHIITNAWKWHQSHPKGY

SEQ ID NO: 2331 - protein, 134 aa, Glycine max; identical to SEQ ID NO: 917

SEQ ID NO: 2332 - protein, 560 aa, Pseudomonas syringae pv. syringae B728a
MTGVWQADMSVVSGKSKSARIVAEPAHRRDPSIGICPNSVLRLLNSMHPWRSSPHQTGPNLYNELNRFTLTFCKRPVLKHHDSDPCTGTASATGCFNVYRIPGRETMSTQLKPTLGTIHLWGIAVGLVISGEYFGWSYGWGVAGTLGFLVTALMVATMYTCFIFSFTELTTAIPHAGGPFAYSRRAFGEKGGLIAGMATLIEFVFAPPAIAMAIGAYLNVQYPGLDPKHAAVGAYIVFMALNIVGVKLAATFELVVCILAVAELLVFMGVVAPAFSFSNFALNGWAGSQTFGPEAIAGMFAAIPFAIWFFLAIEGAAMAAEEAKDPKRTIPKAYISGILTLVILAIGVMLFAGGVGDWRTLANINDPLPQAMKAVVGDSSGWLHMLVWIGLFGLVASFHGIIMGYSRQFFALARAGYLPASLARLSRFQTPHRAIIAGGLIGIAAIYSDGLINLSGMTLTAAMITMAVFGAIVMYIMSMLSLFKLRKTEPGLERTFRAPGYPVVPGIALALAVVCLVAMAWFNALIGLIFLGLMAVGFIYFSLTAKLRADAPTDAMLTGE

SEQ ID NO: 2333 - protein, 319 aa, Solanum nigrum
MGSKYSKATNSINDASNSSYRVPFESLRVPFVDLQEATNNFDDKFLIGWGVFGKVYMGVLRNGTKVALKKHMPESSQGIEEFRTEIEILSLCSHPHLVSLIGYCDERNEMILIYEYMENGNLRSHLYGSDLPAMSWEQRLEICIGAARGLHYLHTSAVIHRDVKSINILLDDNFVPKITDFGLSKTGTELDQTHVSTAVKGTVGYLDPEYFIRGQLTEKSDVYSFGVVLFEVLCARPAIAHSHSREMISLAEWAVESHNNGQLEQIIAPNIAAKIRPESLKKFGETVVKCLALSSEDRPSMGDVLWKLEYALRLQESVI

SEQ ID NO: 2334 - protein, 462 aa, Oryza sativa (japonica cultivar-group)
MSFRSIVRDFRDSFGTLSKRSFEVKISGFSGRHRGKSIGPSSELDDTPVVAQQSKWAGLPPELLRDVMKRLEEDDSNWPSRKDVVACASVCTTWRDMCKDIVRNPEFCGKLTFPVSLKQPGPRDGVIQCFIKRDKSKLTYHLYLCLSSAVLDETGKFLLSAKRSRRTTHTDYIISMDSKNISRSSSGYIGKLRSNFLGTKFIIYDTQPPYNARTLCSQERTSRRFSSRKVSPKVPTGCYPIVQVNYELNVLGTRGPRRMQCAMHSIPASAVEPGGIVPGQPKELLPRLFEESFRSMATSFSKYSITDHSTDFSSSRFSEFGGGALQGQEQEQDGDDVNKERPLVLRNKAPRWHEQLQCWCLNFRGRVTVASVKNFQLIAAAPQPSSGAASEPSQAGQAAQQQTQPSQPSSSSSSSSSNHDTVILQFGKVAKDMFTMDYRYPLSAFQAFAICLTSFDTKLACE

SEQ ID NO: 2335 - protein, 152 aa, Brassica juncea
  unsure (1)..(152): unsure at all Xaa locations
MGKGVAVLNSGEGVKGTIFFTQEGDGVTTVTGTVSGLKPGLHGFHVHALGDTTNGCMSTGPHFNPDGKQHGAPEDANRHAGDLGNIIVGDDGTATFTITDCQIPLSGPNSIVGRAVVVHADPDDLXKGGHELSLATGNAXGRVACGIIGLXG

SEQ ID NO: 2336 - protein, 139 aa, Stanieria cyanosphaera str. PCC 7437
LYKFDEDDHGSVIAEEKRSDLVSYLGLHYPESDIPRPARKLFSYNWIRLIPDAQTQPVEMIPAINPISDRPLDLTHSILRSAFPCHLEYLHNMGVGASLTISLIKDQKLWGLIACHHQTPKHVPYELRKACEFLGRVVF

SEQ ID NO: 2337 - protein, 206 aa, Mesorhizobium loti
MAGKKILMLVGEFSEEYEIFVFEQAMHAVGHTVHVVCPDKKAGDVLKTSLHDFEGHQTYTEKLGHDYILNKTFSEVDPAKYDAVYAAGGRGPEYIRIDKRVQALVRHFHEAGKPIFTICHGVQILIAVDGVVRGREVAALHYCEPEVTLAGGIYIDVAPTGAHVDGNLVSAKGWPGLSNFIRECLKVLGTEIRHGEILMREERQAA

SEQ ID NO: 2338 - protein, 124 aa, Oryza sativa
  unsure (1)..(124): unsure at all Xaa locations
XQNIRKLVKDGFIIKKPQKIHSRSRARRAHEAKQKGRHSGYGKRRGTREARLPTKILWISRMRVLXXVKGNMFKSKRVLMESIRKSKAEKAREKTLSDQFEGKRAKSKASRERKIARRDERLAQ

SEQ ID NO: 2339 - protein, 382 aa, Phanerochaete chrysosporium
MAFGSLLAFVALAAITRAAPTAESAVCPDGTRVTNAACCAFIPLAQDLQETLFQGDCGEDAHEVIRLTFHDAIAISQSLGPQAGGGADGSMLHFPTIEPNFSANNGIDDSVNNLLPFMQKHDTISAADLVQFAGAVALSNCPGAPRLEFMAGRPNTTIPAVEGLIPEPQDSVTKILQRFEDAGNFSPFEVVSLLASHTVARADKVDETIDAAPFDSTPFTFDTQVFLEVLLKGTGFPGSNNNTGEVMSPLPLGSGSDTGEMRLQSDFALARDERTACFWQSFVNEQEFMAASFKAAMAKLAILGHSRSSLIDCSDVVPVPKPAVNKPATFPATKGPKDLDTLTCKALKFPTLTSDPGATETLIPHCSNGGMSCPGVQFDGPA

SEQ ID NO: 2340 - protein, 478 aa, Triticum aestivum
MAAFILFLCLLVPLVLACAVRARKGAAGRASSGGGGKKGGTSLPLPPGSMGWPYVGETTQLYSSKNPNVFFARKRNKYGPIFKTHILGCPCVMVSSPEAAKFVLVTQAHLFKPTFPASKERMLGPQAIFFQQGDYHAHLRRLVSRAFSPEAIRGSVPAIEAIALRSLGSWEDLQVNTFQEMKTYALNVALLSIFGEEEMQYIEELKQCYLTLEKGYNSMPVNLPGTLFHKAMKARKRLGAIVAHIISARRERERGSDLLGSFMDGREALTDDQIADNAIGVIFAARDTTASVLTWMVKFLGDNPAVLKAVTEEHAEIAREKALSGEPLSWADTRRMRMTGRVIQETMRVASILSFTFREAVEDVEYQGYLIPKGWKVLPLFRNIHHNPDHFPSPEKFDPSRFEVAPKPNTFMPFGNGTHSCPGNELAKLEMLVLCHHLATKYRWSTSKSESGVQFGPFALPINGLPMTFTRKDDKNKA

SEQ ID NO: 2341 - protein, 378 aa, Glycine max
MAALDLPISMLALIVVVVSLGLWGGVQGAPQVPCYFIFGDSLVDNGNNNQLQSLARADYLPYGIDFPGGPSGRFSNGKTTVDAIAELLGFDDYIPPYADASGDAILKGVNYASAAAGIREETGQQLGGRISFRGQVQNYQNTVSQVVNLLGNEDSAANYLSKCIYSIGLGSNDYLNNYFMPQFYSSSRQYSTDEYADVLIQAYTEQLKTLYNYGARKMVLFGIGQIGCSPNELAQNSPDGKTCVEKINSANQIFNNKLKGLTDQFNNQLPDARVIYVNSYGIFQDIISNPSAYGFSVTNAGCCGVGRNNGQITCLPMQTPCQNRREYLFWDAFHPTEAGNVVVAQRAYSAQSASDAYPVDIQRLSSDMISEQSTCSSG

SEQ ID NO: 2342 - protein, 367 aa, Carica papaya
MAMIPSISKLLFVAICLFVHMSVSFGDFSIVGYSQDDLTSTERLIQLFNSWMLNHNKFYENVDEKLYRFEIFKDNLNYIDETNKKNNSYRLGLNEFADLSNDEFNEKYVGSLIDATIEQSYDEEFINEDIVNLPENVDWRKKGAVTPVRHQGSCGSCWAFSAVATVEGINKIRTGKLVELSEQELVDCERRSHGCKGGYPPYALEYVAKNGIHLRSKYPYKAKQGTCRAKQVGGPIVKTSGVGRVQPNNEGNLLNAIAKQPVSVVVESKGRPFQLYKGGIFEGPCGTKVDHAVTAVGYGKSGGKGYILIKNSWGTAWGEKGYIRIKRAPGNSPGVCGLYKSSYYPIKNRDNGRIQIRPSSQHLTSHE

SEQ ID NO: 2343 - protein, 510 aa, Ustilago maydis
MISSKATSAARACARTSRVMQQQQRRLLATVVSSSSLFPGEPSSPHVVTSQIPGPKSKELSDRIGTFQENRTHGFVVDYAKSQGNWIADADGNVLLDMFAQIASIAIGYNNPDLLALAKTDEFITATMNRAALGSFPPTNWQELVETSFGTVKPDGLNNIFTAMCGSCANENAFKASFMAYRARERGEKAEFTPEEMSSCMKNQSPGSPDLSILSFTSAFHGRLFGSLSATRSKAIHKLDIPSFNWPVVEWPDVKYPFAQNSRENAEAEKVALAAVEEAIVSSKKTGSSYGPVAALIVEPIQSEGGDNHASPAFFQGLRDVTKKHGVFMIVDEVQTGTVGATGAFWAHSKWNLTSPPDFVTFSKKMQAAGFYHNIETRPSLPYRNYNTWMGDPARTLQARQIIRTIQDHNLIQKTDKVGNYIYEKLFDLIENGAGRGKIEKLRGENAGTFLAFDGRTAKVRDQLIMEMRKLGVHMGGCGDKALRLRPMLVFEQKHADIFLDKLETALGQL

SEQ ID NO: 2344 - protein, 404 aa, Blastocladiella emersonii
APAPASPSSPSTAAGAGSASSTASSTTTAAASGNLSIPSPLVAGSTTSSSISHAQKMATAAHTNSDYSPSPAATPSAPLDAVAERRRRKTTLADLELRQTLGTGSFGRVHLVRLRSTGKYYAMKVLKKAEVVKHKQVEHTLNEKGILEQIDHPFLVALHSSFQDSANLYMVMEYVTGGELFTYLRRSQRFSNNVAKFYAAEVVLAFEYLHSKDIIYRDLKPENLLLDAQGHVKITDFGFAKHVPDITWTLCGTPDYLAPEIIQSRGYGRAVDWYALGVLIFEMLAGYPPFYDEDHVRMYEKILQGKVKWPSHFDPAAKDLLKRLLTTDLTKRYGNLKGGSKDIKMHKWFAGLDWTKLFNKQIPPPYTPPNRGDGDTSNFDAYPEETEPYGKVQPDPYAQLFKDF

SEQ ID NO: 2345 - protein, 728 aa, Halobacterium sp. NRC-1
MKTLERDLGLGAVFAISVGAMIGSGIFILPALALKMAGPAVIVAYLLAGLLVVPAALSKSEMATAMPEAGGTYIYIERGMGPLLGTVAGVGTWFSLSFKSALALVGGVPYLVLLFDLPVQPVALGLAALLIVVNLLGAKQTGRLQTVIVSLMLGALGWFVAGSAGQVQQANFQGFLTGGWEGLLAATGLVFVSYAGVTKVASVAEEVENPDRNLPLGILGSLAFTTLLYVGIVAVMVGVTDSGAVAGSATPVAVAADATLGTAGVYAVIAAAVLALVSTANAGILSSSRYPFAMSRDQLAPPTFAEIHDRFGTPTTAITLTGAVVLALIAFVPILDIAKLASAFQILVFVLVNLALVAFRTGTTDYDPDFESPLYPWMQGFGVLSGLALLTQMGWVPIAGAAVITLGSVVWYRVYARPRVRREGAATDVVRRRLGRDVLTETEALVDATGAEAGGPEVLVALTREASADRERALLSLAADRARNEDGQVVVVRFDEVPDQAPLDHAADVQSPADVRFEERTEGLSTEFDVDIAYGEVVSHDTKRAILNVAEQRSVDTVVAEHERLRLRSRLLGDPIDWVVRHAPCDVLLVENRGYDAPQNVVLEGDGGPYDPATVAVADAVAGAAGGTVTLQFPLSADHPDKRQETVHAYQDELAGLLSAPVRTADLRADGGDQTAPDLVVRTGAHRRVRGGRGSHTQTAADCTELTVYPHESRQPGLLRRLAERLVF

SEQ ID NO: 2346 - protein, 346 aa, Arabidopsis thaliana
MATKINKQVVLLDYVTGFAKESDLVITSTTIDLRVPKGSMTALVKNLYLSCDPYMRNRMRKPDPLSPATAQSFTPGKPISGFGVSKVIDSGHSDYEEGDLIWGAVGWEEYSVITPIPNLHFKIHHTNFPLSYYTGLLGMPGMTAYVGFYEICTPKKGDTVFVSAASGAVGQLVGQFAKLMGCYVVGSAGSKEKVDLLKNKFGFDDAFNYKEEHNLIGALKRCFPEGIDIYFENVGGKMLDAVILNMRPHGRIAACGMISQYNLKNPEGIYGLSLITYKRIRIEGFNCFDYFHKYSEFLEFVVPYIKEGKIKYVEDVADGLESAPAALVGLFHGKNVGKQLVLVSPS

SEQ ID NO: 2347 - protein, 383 aa, Triticum aestivum
MAPAMRPEQEASCKATEDHRSEFDAAKPPPFRIGDVRAAVPAHCWPQEPPASLSYVARDVAVVAALAAAAWRADSWALWPLYWAVQGTMFWALFVLGHDCGHGSFSDSGTLNSVVGHLLHTFILVPYNGWRISHRTHHQNHGHIDRDESWHPITEKVYQKLEPRTKTLRFSVPFPLLAFPVYLWYRSPGKEGSHFNPSSDLFTPKERRDVIISTTCWFTMIALLIGMACVFGLVPVLKLYGVPYIVNVMWLDLVTYLHHHGHQDLPWYRGEEWSYLRGGLTTVDRDYGWINNIHHDIGTHVIHHLFPQIPHYHLVEATKAARPVLGRYYREPEKSGPLPMHLITVLLKSLRVDHFVSDVGDVVFYQTDPSLSGDKWTGTDKQK

SEQ ID NO: 2348 - protein, 327 aa, Phaseolus vulgaris
MAGGKLHPGSNMSLLLQNDRLPCSSEVLESLWAHTSNAASFQGSKSMVDFENVSGGRVTDRPFFQALEKEDNCDDDYEGCFHQPGKKRRLTSEQVQFLERNFEVENKLEPERKVQLAKELGLQPRQVAIWFQNRRARFKTKQLEKDYGTLKASYDRLKGDYESLLQENDKLKAEVNSLESKLILRDKEKENSDDKSSPDAVNSPHKEPMDLISNSTSENGTKVSLPIMVTCKQEDANSAKSDVLDSDSPHCTDGNHPSSFVEPADSSHAFEPDHSDFSQDEEDNLSESLLTLPCLPKVEEACYDDPPENPCNFGFHVEDQTFCFWPY

SEQ ID NO: 2349 - protein, 356 aa, Neisseria meningitidis Z2491
MTKHIAILRGDGIGPEIVAETVRVLDKLIAQGLDVGYEYAPLGGEAYDEYGHPYPEFTQNLCRKADAVLLGAVGSPQYDNLDRPLRPERGLLAIRKDLNLFANLRPAILYPELANASTLKSEIVAGLDILIVRELTGDIYFGEPRGIRVLENGEREGYNTMKYSESEIRRIAHVAFQSAQKRSKKVCSVGKANVLETTELWREIFEEIGKEYPDVELSHMYVDNAAMQLVRAPKQFDVIATGNIFGDILSDEASMLTGSIGMLPSASLDENGKGLYEPSHGSAPDIAGQNKANPLATVLSLAMLLRYSLNDEARAQQVENAVQKVLQQGLRTGDIYEEGTKLVSCSEMGDAVLATL

SEQ ID NO: 2350 - protein, 272 aa, Oryza sativa
MAGATDLPPKGGFSYDNCARNAMLVEKGLKMPGFLKTGTTIVGLVFQDGVVLGADTRATEGPIVADKNCEKIHYMAPNIYCCGAGTAADTEAVTDMVSSQLQLHRYATGRESRVVTSLTLLKSHLFSYQGHVSAALVLGGVDVTGPHLHTVYPHGSTDTLPFATMGSGSLAAMSVFESKYKEGLTREEGIQLVAEAIRGGIFNDLGSGSNVDVCVITKGKTEYLRNHQLPNPRTYVSSKGYNFTKGQTVVLSTKITQLKPKVEVTEGDAMEE

SEQ ID NO: 2351 - protein, 418 aa, Schizosaccharomyces pombe
MLKLAESGAILQDYLDDYFYTSWYTGNRNLIQLDHYGFPTASNFELNPKSTDNCGTVDFQGIPWGNKAIGKRKNFRLYRLHTYSLSCNHSDWSPEELSLDTVQVAAEDSFYEFQRFLKNPNCLRNHHHLCKSVKVVGEHSVIYVSNNSIRMENTLHDNSVQIIDLKNNILQKKAISCLDTTNAVGCLGTLYGQYCIFNFKNGSFSTRKLSDDSINHIQLFSEKKFILGCNDGAVYVEDVQRTSPILVYRCSNAVNCVQLFDETPLALVCTDSKDAMLIDIRSNSVSAKLPHSDSVLTGSWHPNGNILATGGQDTTAKVWDIRALGKSFRNLGSQMSAVTNLCFSPLGESLAVTEQADFVQLFDTKLFNTSQVIDFFGEIAGTAYSSSGDSLFIGVDDPMLGGILEFRRPLQHPLSFIF

SEQ ID NO: 2352 - protein, 75 aa, Zea mays
WFFFSYSRDQLYPFTIIAEANSTAQHLVDFTEAEEDLVSRMHRLVGNRWEIIAGRIPGRTAEEVEMFWSKKYQER

SEQ ID NO: 2353 - protein, 190 aa, Triticum aestivum
GCRPKYEMAAGALPLGAFVVLLCVGVVRAADADIVAAGRPLSGDQKLVSPGGKFALGLFHPDGAADGSWYVGIWYHKISVHTPVWVANRETPVSNTSRLAIAPDGNLALFDGAGSIVWSTNASTSGVANASDTVAVLLDSGNLVLAPASNASAVLWQSFDHITDTWLPGGKLRRDKRTGAIQAMALWRAR

SEQ ID NO: 2354 - protein, 160 aa, Zea mays
  unsure (1)..(160): unsure at all Xaa locations
MAEEVVLLDTWASMFGMRVRIALAEKDVKYEYKEENPRNKSPFFLQMNPIHKKIPVLIHNGKPICESAIIVQYIDEIWKDETPIMPSDPYERAQARFWVDYIDKKVSDTWXKMWLSKGXEHXVGKKELIXIFKXLEETLGDKXFYGGDXXAFLDXGMXXF

SEQ ID NO: 2355 - protein, 477 aa, Lactococcus lactis subsp. lactis
MENQNQVKRNLKQRHITMIALGGTIGTGLFLTSGATISQAGPWGAVLAYCFIGIMVYFVMTSLGEMATYLPTSGSFSDYGGRYVDPAFGFALGWNYWLNGAITIAVDLTTAGLITQFWFPHLPSWIFSGIATVLIFIINVMAVGAFGETEYWLSTIKVITIVLFLAIGLLTIFGVLGQGNVDVVANLSAGNHGFVGGISGFVGVLLIAGFSFQGTELLGITAGESEDPGKSIPKAMNSIFWRILLFYIFSIIVIAAIINFKDPRLLNPNSTAVMSPFTIVFKNIGFAVAASVMNAVILTSVISSANSVMYASTRILYSLGQEKGAPKFFGRTAKNGIPFYALLATTIICFIAFLTGIFGTQIYLFLVDLSSLTGFLAWLGISISHIRFRRAYIAQGKKLEDLPYKAKWFPFGPIVALLMTAAIAINLDPAMLFSEHWGEGLALYAAIPIFIILYFGYKWKYNTKIIPLEEVDLSREK

SEQ ID NO: 2356 - protein, 479 aa, Glycine max
MNPDQFQKNSMFVETPEDGGKNFDDDGRVKRTGTWITASAHIITAVIGSGVLSLAWAIAQMGWVAGPAVLFAFSFITYFTSTLLADCYRSPDPVHGKRNYTYSDVVRSVLGGRKFQLCGLAQYINLVGVTIGYTITASISMVAVKRSNCFHKHGHHDKCYTSNNPFMILFACIQIVLSQIPNFHKLWWLSIVAAVMSFAYSSIGLGLSVAKVAGGGEPVRTTLTGVQVGVDVTGSEKVWRTFQAIGDIAFAYAYSNVLIEIQDTLKSSPPENKVMKRASLIGILTTTLFYVLCGCLGYAAFGNDAPGNFLTGFGFYEPFWLIDFANICIAVHLVGAYQVFCQPIFGFVENWGKERWPNSHFVNGEHALKFSLFGTFPVNFFRVVWRTTYVIITALIAMMFPFFNDFLGLIGSLSFWPLTVYFPIEMYIKQSKMQKFSFTWTWLKILSWACLIVSIISAAGSIQGLAQDLKKYQPFKAQQ

SEQ ID NO: 2357 - protein, 336 aa, Streptomyces caeruleus
MRILVTGGAGFIGSEFVRATLRGTLPGSSGTQVTVLDKLTYSGNVLNLAPIADLRNYRFVRGDICDQDLVDDVVAGHDAIVHFAAETHVDRSIGSAASFVRTNAMGTQVLLEAASRHRLGRFVHISTDEVYGSIPEGAWDEESPVAPNAPYAAAKAAGDLLALAWHRTHGLDVVVTRCTNNYGPYQYPEKLIPLFTTNVMDGQQVPVYGEGHNRRQWLHVSDHCRAIQLVLLGGRAGEVYHIGGGTELTNLELAEQILKSCGAGWDMVRHVPDRPGHDFRYSLDTTKIRTELGFSPRVAFADGLVETVEWYRDNRAWWEPLKSPDEATGSPGDAGR

SEQ ID NO: 2358 - protein, 124 aa, Triticum aestivum
  unsure (1)..(124): unsure at all Xaa locations
HSSILHLHLDQEEGSSSKSQWRAWCRNMVAPLLVLNLIMYIIVIGFASWNLNHFINGLTNRPGVCGNGATYYFLLFAILAGVVGAASKLAGVHHVRTWRGDSLATXSASSALVAWAITALAFGL

SEQ ID NO: 2359 - protein, 316 aa, Triticum aestivum
MLLRLKITTVQPVALLLGHDHGATASPRRLAGALPQGGGASTRAKRLRSVAVAMALKEEEPESSRSRFAGGGPSWDPRMEIGVPYEQRPVNEYSALKESTLYSWAELSPGSFFMRLGSLCLVTFTVLAAPISAASFSPGKDPLKFVLAAGIGTLLLVSLVVLRLYLGWSYVGDRLLSAVVPYEDPGWYDGQMWVKPAEVLARDRLLGSYGVAPVLPPQTHTRGRPGAPRRGPGPLFAFAAPVEEFVHSFNGAPTAASSKPMMRREDLLKLPAEVRQDDDLAAAAAEAANGRPVYCRDRYYRALAGGQYCTSDDLLN

SEQ ID NO: 2360 - protein, 72 aa, Calopogonium caeruleum
WEYQVGPSVGIEGGDHIWASRYILERITEQAGVVLSLDPKPIEGDWNGAGCHTNYSTKSMREDGGYELIKKA

SEQ ID NO: 2361 - protein, 258 aa, Ralstonia eutropha
MLNGKTALVTGSTSGIGLGIAKALAAQGANIIVNGFGDADAAKAEIAQAGQGIRVGYHGADMSKAAEIEDMMRYAQSDFGGADILVNNAGIQHVAAIEDFPPERWDAIIAINLTSAFHTTRLALPGMKQKDWGRIINVASTHGLVASAQKSAYVAAKHGIVGFTKVTALETAQTGVTANAICPGWVLTPLVQKQVEARAQKEGIPVEQAKRELVLEKQPSGQFVTPDELGALAVFQSSEAARQVRGAIWNMDGGWVAQ

SEQ ID NO: 2362 - protein, 325 aa, Desulfitobacterium hafniense
MKEKPARELKQRVSDLDIEVVSGMEGLLRTVTDEVPDTVVTAISGRIGLEPTMEALKAGKDIALANKETLVAGGDLVMGTAQRLGRTILPVDSEHSAIFQCLEEDPRTLDKIILTASGGPFRGWSEEQLREVTPERALQHPNWAMGAKITIDSATMMNKGLEVIEAHHLFNMEYDQIDVLIHPQSVIHSMVQYCDGSVLAQCGRPDMRLPIQYALTYPTRWPNPFERLDLRGKTLSFFDPEDYDFPALKLAYACGKRGGTLPAVMNAANEVAVHAFLARRVAYLEIIGLVDKVCSEHDVLDATDLETILNADHWARIRTEELIHS

SEQ ID NO: 2363 - protein, 198 aa, Salmonella typhimurium LT2
MSYYAFEGLIPVVHPDAFVHPSAVLIGDVIVGAGVYIGPLASLRGDYGRLILEAGSNLQDGCIMHGYCDTDTIVHENGHIGHGAILHGCVVGRDALVGMNSVIMDGAVIGEESIVAAMSFVKAGFQGEARQLLVGSPARVLRQVTDQELHWKHLNTKEYQDLAIRCRTGLSETKPLTQAEENRPRLKGTTDVKPKSAQ

SEQ ID NO: 2364 - protein, 136 aa, Zea mays
MQSYGRKRAWKKGPTRGKGGPQNAACEYRGVRQRTWGKWVAEIREPNKRTRLWLGSFATAEEAALAYDEAARRLYGPDAFLNLPHLRASAVSSAAAHQRIRWLPASARGAAAAAVPAYGLLNLNAQHNVHVIHQRL

SEQ ID NO: 2365 - protein, 342 aa, Oryza sativa
  unsure (1)..(342): unsure at all Xaa locations
PPPPPPPRKIFQANGLQAYAVTLITYLSLWWFGIFNPAIVYDHLGEIYSALVFGSFVFCIFLYIKGHLAPSSSDSGSSGNVIIDFYWGMELYPRIGKHFDIKVFTNCRFGMMSWAVLAVTYCIKQYEMNGRVADSMLVNTALMLIYVTKFFWWESGYWCTMDIAHDRAGFYICWGCLVWVPSIYTSPGMYLVNHPVNLGPQLPFSFFLVGIWCIYINYDCVRQRQEFRRTNGKCSIWGKAPSKIVASYQTTNGETKSSLLLTSGWWGLSRHFHYVPEILSAFFWTVPALFDHFLPYFYVIFLTILLFDRAKRDDDRCSSKXSKLYHLXIYKLKFNILANVSH

SEQ ID NO: 2366 - protein, 636 aa, Zea mays
  unsure (1)..(636): unsure at all Xaa locations
MALEAGSSAGGGGGWGGGFRSLMRRKQGDSDRVRAEGQPQLAKELNVPXELVAIGVGSTAGAGVYVLVGTVAREHAGPALTISFLIAGIAAALSAFCYAELASRCPSAGSAYHYSYICVGEGVAWLIGWALVLEYTIGGSAVARGISPNLALFFGGQDSVPWILARHQLPWFDIIVDPCAAALVFVVTVLLCVGIKESSFAQGVVTVLNACVMIFVIVAGSYIGFQIGWVGYKVSDGYFPHGVNGMLAGSATVFFAYIGFDTVASTAEEVKNPQRDLPLGIGVALAICCALYMAVSVVIVGLVPYFAMDPDTPISSAFARHGMQWAMYVVTSGAVLALCSTLMGSLLPQPRILMAMARDGLLPSFFSDVNKQTQVPVKSTIVTGICAAALAFAMDVSQLAGMVSVGTLLAFTVVAVSILILRYVPPDEVPLPPSMQESFRLNQECDEERDRGLLGVGNCNLSQTKDVIVVVESVKDPLIDKRLHKGKMDETKRRKIASLSIGSVCVGVLILASSASATWLPFLPICIGCTIGVVLLLAGLSLLSWIDQDAGRHSFGHSGGFTCPFVPVLPVLCILINTYLLINLSGDTWMRVGIWLLLGVLVYAFYGRTHSSLIDVVYVPAAQADEIYRSSSGYVS

SEQ ID NO: 2367 - protein, 361 aa, Ralstonia solanacearum
MKTYRIATIPGDGIGKEVVPAGREVMEALAAAGAGFRFEFENFDWGGDYYRQHGAMMPADGLDALRGKDAILFGSAGDAQIPDHITLWGLRLKICQGFDQYANVRPTRILPGIDAPLKRCGPQDLDWVIVRENSEGEYAGVGGRVHQGHPIEAATDVSMMTRAGVERIMRFAFRLAQSRPRKLLTVITKSNAQRHAMVMWDEIAVQVSKEFPDVQWDKELVDAATARMVNRPASLDTIVATNLHADILSDLAAALAGSLGIAPTGNIDPERRYPSMFEPIHGSAFDIMGKGLANPVGTFWSVVMLLEHLGEQAAARRLMQAIEAVTANPALHTRDLGGNATTVQVTRAVCECLAVSQAQAA

SEQ ID NO: 2368 - protein, 452 aa, Saccharomyces cerevisiae
MSGTFSYDVKTKENEPLFEFNSAYSPRVSYHFNSKVSHYHYGVKHPMKPFRLMLTDHLVSSYGLHKIMDLYETRSATRDELLQFHSEDYVNFLSKVSPENANKLPRGTLENFNIGDDCPIFQNLYDYTTLYTGASLDATRKLINNQSDIAINWSGGLHHAKKNSPSGFCYVNDIVLSILNLLRYHPRILYIDIDLHHGDGVQEAFYTTDRVFTLSFHKYNGEFFPGTGDLTEIGCDKGKHFALNVPLEDGIDDDSYINLFKSIVDPLIMTFKPTLIVQQCGADSLGHDRLGCFNLNIKAHGECVKFVKSFGLPMLVVGGGGYTPRNVSRLWTYETGILNDVLLPEDIPEDIHSGTHSGRIIHFIPMLDDLYENKNSKKLLEDIRIRCLENIRYLQGAPSVRMDAECIPTQDISALTEEEDKIIQEMNEETEADSSNRLEEMEKENSGLIAFS

SEQ ID NO: 2369 - protein, 408 aa, Salmonella typhimurium LT2
MSLSVTRENFDEWMVPVYVPAPFIPVRGEGSRLWDQQGKEYIDFAGGIAVNALGHAHPALREALNEQANRFWHIGNGYTNEPALRLAKKLIDATFAERVFFCNSGAEANEAALKLARKYAHDRVGNHKSGIVAFKNAFHGRTLFTVSAGGQPTYSQDFAPLPPDIRHAAYNDLNSASALIDDNTCAVIVEPVQGEGGVIPATKAFLQGLRELCDRHQALLIFDEVQTGVGRTGELYAYMHYGVTPDILTTAKALGGGFPIGAMLTTQDYASVMTPGTHGTTYGGNPLATAVAGKVLDIINTPEMQNGVRQRHDAFIERLNTLNVRFGMFSEIRGLGLLLGCVLQTEFAGKAKLIAQEAAKAGVMVLIAGGDVVRFAPALNVSDEEIATGLDRFALACERLQTGGVPCG

SEQ ID NO: 2370 - protein, 201 aa, Cicer arietinum
AILITLAVNDRIIMPLWKKMKGKPGFTNLQRIAIGLLLSTFGMAAASLCEVKRLSVAKSVKGNQATIPISVFLLIPQFFLVGSGEAFIYTGQLDFFITQSPKGMKTMSTGLFLTTLSLGFFISSFLVSVVKKVTGTRDGQGWLADNINKGRLDLFFALLTILSFINFVAFLVCAFWYKPKKAKPSMQMGAINNGSSVEEKC

SEQ ID NO: 2371 - protein, 91 aa, Oxalis picchensis
INISGTNGEVMPGQWEYQVGPSVGIEAGDHIWASRYILERITEQAGVVLTLDPKPIDGDWNGAGCHTNYSTKSMRDEGGFEVIKKAIFNLS

SEQ ID NO: 2372 - protein, 338 aa, Haemophilus influenzae
MAILVTGGAGYIGSHTVVELLNVGKEVVVLDNLCNSSPKSLERVKQITGKEAKFYEGDILDRALLQKIFAENEINSVIHFAGLKAVGESVQKPTEYYMNNVAGTLVLIQEMKKAGVWNFVFSSSATVYGDPKIIPITEDCEVGGTTNPYGTSKYMVEQILRDTAKAEPKFSMTILRYFNPVGAHESGLIGEDPNGIPNNLLPYISQVAIGKLAQLSVFGSDYDTHDGTGVRDYIHVVDLAVGHLKALQRHENDAGLHIYNLGTGHGYSVLDMVKAFEKANNITIPYKLVERRSGDIATCYSDPSLAAKELGWVAERGLEKMMQDTWNWQKNNSKGYRD

SEQ ID NO: 2373 - protein, 146 aa, Triticum aestivum
PAGSEEGQAAGFYYADPAIRPNKPYRQFNTWMGDPARAILFKAIVDEINKNDLVNHTAKVGDQLFKDLEGLSKKYPGQIENLRGKGQGTFIAFDSPKRDKFLAEAKTLGVNIGGSGADAVRLRPMLIFQQKHADILLDAVEKIVKQ

SEQ ID NO: 2374 - protein, 117 aa, Triticum aestivum
MAETEYRCFVGGLAWATDDNNLQQAFSQYGEILDAKIINDRETGRSRGFGFVTFGSEESMRQAIEEMNGKELDGRNITVNEAQSRRSGGGGGGGGYGGQRGGGGGYGGGGGGYGGQG

SEQ ID NO: 2375 - protein, 581 aa, Zea mays subsp. mays
MKREYQDAGGSGGDMGSSKDKMMAAAAGAGEQEEEDVDELLAALGYKVRSSDMADVAQKLEQLEMAMGMGGVGGAGATADDGFVSHLATDTVHYNPSDLSSWVESMLSELNAPPAPLPPATPAPRLASTSSTVTSGAAAGAGYFDLPPAVDSSSSTYALKPIPSPVAAPSADPSTDSAREPKRMRTGGGSTSSSSSSSSSMDGGRTRSSVVEAAPPATQASAAANGPAVPVVVVDTQEAGIRLVHALLACAEAVQQENFSAAEALVKQIPMLASSQGGAMRKVAAYFGEALARRVYRFRPPPDSSLLDAAFADLLHAHFYESCPYLKFAHFTANQAILEAFAGCRRVHVVDFGIKQGMQWPALLQALALRPGGPPSFRLTGVGPPQPDETDALQQVGWKLAQFAHTIRVDFQYRGLVAATLADLEPFMLQPEGDDTDDEPEVIAVNSVFELHRLLAQPGALEKVLGTVRAVRPRIVTVVEQEANHDSGTFLDRFTESLHYYSTMFDSLEGAGAGSGQSTDASPAAAGGTDQVMSEVYLGRQICNVVACEGAERTERHETLGQWRSRLGGSGFAPVHLGSNA

SEQ ID NO: 2376 - protein, 376 aa, Hyparrhenia hirta
ALSIAGAVQSQKLAVRAISRLQALPGGDVKLLCGTVVEHVRELTGYDRVMVYKFHEDEHGEVVAESKRDNLEPYLGLHYPATDIPQASRFLFRQNRVRMIADCHATPVRVIQDPGLSQPLCLVGSTLRAPHGCHAQYMANMGSIASLVMAVIISSGGDDEQTGRGGISSAMKLWGLVVCHHSSPRCIPFPLRYACEFLMQAFGLQLNMELQLAHQLSEKHILRTQTLLCDMLLRDSPTGIVTQSPSIMDLVKCDGAALYYHGKYYPLGVTPTESQIKDIIEWLTVCHGDSTGLSTDNLADAGYLGAAVLGDAVCGMAVAYITPSDYLFWFRSHTAKEIKWGGAKHHPEDKDDGQRMHPRSSFKAFLEVVKSRSLPW

SEQ ID NO: 2377 - protein, 369 aa, Escherichia coli CFT073
  unsure (1)..(369): unsure at all Xaa locations
MKSRAAVAFAPGKPLEIVEIDVAPPKKGEVLIKVTHTGVCHTDAFTLSGDDPEGVFPVVLGHEGAGVVVEVGEGVTSVKPGDHVIPLYTEXCGECEFCRSGKTNLCVAVRETQGKGLMPDGTTRFSYNGQPLYHYMGCSTFSEYTVVAEVSLAKINPEANHEHVCLLGCGVTTGIGAVHNTAKVQPGDSVAVFGLGAIGLAVVQGARQAKAGRIIAIDTNPKKFELARRFGATDCINPNDYDKPIKDVLLDINKWGIDHTFECIGNVNVMRAALESAHRGWGQSVIIGVAGSGQEISTRPFQLVTGRVWKGSAFGGVKGRSQLPGMVEDAMKGDIDLEPFVTHTMSLDEINDAFDLMHEGKSIRTVIRY

SEQ ID NO: 2378 - protein, 168 aa, Zea mays
  unsure (1)..(168): unsure at all Xaa locations
RRAPRAATTQRTGRXTGXKXXPAKGGXSXDPXRRNNSRXKNGXKGPGXRKTGTTIFFLXXQXGXXXGAGXGATEGGRXXXKNXEKXHXXAPKKKXRGAGTXADTEAXTXXXSXQXQXHXXATGREXRXXTXXTXXKXHXXKXQGXXXXAXXXXGXXXTGPXXHXXXPH

SEQ ID NO: 2379 - protein, 427 aa, Streptomyces coelicolor A3(2)
MTRDLFARHRAVLPDWLALYYEDPLEITHGEGRYVWDAAGNKYLDFFGGILTTMTAHALPEVTKAVAEQAGRIVHSSTLYLNRPMVELAERVAQLSGIPDARVFFTTSGTEANDTALLLATAYRRSNAILAMRNSYHGRSFSTVGITGNRGWSPTSLSPLQTLYVHGGVRTRGPYADLDDRDFIDACVTDLKDLLGHSRAPAALIAEPVQGVGGFTSPPDGLYAAFREVLHERGILWISDEVQTGWGRTGEHFWGWQAHARSGPPDIVTFAKGIGNGMSIGGVVARAEIMNCLDANSISTFGGTQVTMAAGLANLNHLLEHDLQGNARRVGGLLIERLRAVAAQVPHVREVRGRGLMIGVELTRPGTDEAAPEAASTVLEEARAGGLLVGKGGGHSTSVLRIAPPMSLTVAEAEEGAAILERALRSI

SEQ ID NO: 2380 - protein, 317 aa, Glycine max
MCTSKSVSSSSEDDNELRRGPWTLEEDNSLSQYISSHGEGRWNLLAKRSGLKRTGKSCRLRWLNYLKPDVKRGNLTPQEQLIILELHSKWGNRWSKIAQNLPGRTDNEIKNYWRTRIQKQARHLKIDTDSREFQELVRRFWMPRLLQKAKESSSSAMSIQNQATPMPFDGVSQHSTVGTIPSHSHTPWQGPCMNEAGPTYMDQHEQNSDSEHNNGSCISLSESANFPKVPQHFGRTTITQYHALNNNDFGTFTYDGYNVSNNVYEMDNFKTPTTRVAEDAQYPTGDCQMVGSNWVNSDFACNMWNMDELWQFSKLQK

SEQ ID NO: 2381 - protein, 109 aa, Oryza sativa
  unsure (1)..(109): unsure at all Xaa locations
GEGAPGAGQKPKGKGRGEDTDKPGRKQAAAPARGARAXADLXDGAGCRANAGHNKAEVAQRYGVGWQRGVGANFGWFFTHTRGTFIYFSLEGLSFLLFKGAAAAAIAAX

SEQ ID NO: 2382 - protein, 386 aa, Kitasatospora griseola
MVILGSTGSIGTQAIDVVLRNPGRFKVVALSAAGGAVELLAEQAVALGVHTVAVADPAAEEAAARGPGGQGAGRPLPRVLAGPDAATELAAAECHSVLNGITGSIGLAPTLAALRAGRVLVLANKESLIVGGPLVKAVAQPGQIVPVDSEHAALFQALAGGARAEVRKLVVTASGGPFRNRTREQLAAVTPADALAHPTWAMGPVVTINSATLVNKGLEVIEAHLLYDVPFDRIEVVVHPQSVVHSMVEFVDGSTMAQASPPDMRMPIALGLGWPDRVPDAAPGCDWTKAATWEFFPLDNEAFPAVELAREVGTLGGTAPAVFNAANEECVDAFLKGALPFTGIVDTVAKVVAEHGTPQSGTSLTVEDVLHAESWARARARELAAG

SEQ ID NO: 2383 - protein, 138 aa, Saccharomyces cerevisiae
MWLTEAQKFGVAFTFGGFLFFLFGIFTFFDRALLALGNILFLIGVFLIIGSQKTYIFFTRPNKRRGSLFFLVGAFLILLKWTFLGFIIESLGIIGLFGDFFGVIVQFLRSMPIIGPILSHPAIAPIVDKLAGVRVLPV

SEQ ID NO: 2384 - protein, 338 aa, Glycine max
MAGNSATATATSSALSPENLKFNFSPDNPSRIILTSDQVNHCTQALNLLKEKLHDPHVITQEFAHLQANRITPSEMRRRCTVAYDAVNLSKNRYTDVLPFNKNRVVLKSSTDYRPEAQGYINASLISTSSAGNVSHFIATQGPLPHTCEDFWEMITQYHCPVIIMLTRLVDNYKMVKCVDYFQAEDGPREVGNISIIGKWENTTETSLVLRHLEVNHREVDDAPLSVLHIQYPEWPDHGVPKDTLAVREILKRLYHLPSNLGPIVVHCSAGIGRTGAYCTIHNTIQRILAGDMSAVRIANTIAMFRSQRIGMVQTQDQYIFCYNAIIDELEDLVSQQQ

SEQ ID NO: 2385 - protein, 199 aa, Leavenworthia crassa
SVGEGVTDLQPGDHVLPIFTGECGECPHCHSEESNMCELLRINTERGGMILDGESRFSINGKPIHHFLGTSTFSEYTVVHSGQVVKINPKAPLDKVCIVSCGLTTGLGATLNVAKPKKGQSVAVFGLGAVGLGAAEGARIAGASRIIGVDLNSNRFEEAKKFGVTEFVNPKEHNKPVQQVIAEMTNGGVDRSVECTGSV

SEQ ID NO: 2386 - protein, 836 aa, Yarrowia lipolytica
MSQYSRHAFDTDSDSDTELTPIYIDDRYSSMVSNDSRAGLLRRGGDLERDAESEKTREEKEEELRNHSFSKSRDKTRETVADATLESSSCVDSQYDTVETTSIFSVGRKKAINSPYPEVRAAVPATDDPLMPQNTPRMWVIGIFLVTICSGLNILFTLHWPAFVISSFFAAMVAWPLGRIWDQFVPNWRIPLTNIYLNNSPFNIKEHCLIIVMANVSYGTGVSYVPVIVLTMKHRYNNTYFGWGFSIVSSICVQCLGYGMAGICRRILVYPASLIWPSNLVTTTFLTNIHMNVNHTADGWKISRLRFFLIVFSAYFVWNWLPGYLAPFLSNFAFVTYAAPDNVIVNQIFGSSSGLGLIPINFDWNVIAGYIGSPLVPPFFSIGNVAAGVVVIFWIITPILHYSNAWYGRYLPMSDSNSYDRFQRTYDAERVLKPLVKGGKKKFELDVEKYKEYSPLYLSTTFALSYGVSFAAITSTVVHTILFHGKEIMYYWKHSRKEPEDVHMELMRKYPEVPEWWYALVLAICFALACVTVSVWETDLPIWALIIALLIAGGLLIPAGMIAALTNVTMGLNVLTEFVVGYILPGRPVGMMFFKTFGYISNAQALNFLVDLKLGHYLKLAPRVMFCAQILATTWGSICQLAVVEWAQMAIPDLCEESQKTNFSCPQVQVFYSASVIWGLVGPGRIFGEGQLYHGLLWMFLVGAALPFFSWLWLKRHPNSRLKFIHWPVFFNGPSQIPPATPYNYASWCVVGYIFNWLIKRRWFNWWAKYNYTLSAGLDVGMAVSAAVIFVSLQLPNINPPSWWGTNIFTPTMDIQGNAFQEVLKEGESFGMKTWK

SEQ ID NO: 2387 - protein, 486 aa, Listeria innocua
MKKETHGEIRRDLKTRHLSMIAIGGSIGTGLFLASGNAIHTAGPGGALVAYIAIGIMVYFLMTSLGEMATYMPVSGSFSTYASRFVDPAFGFALGWNYWFNWAITLAVDISTAAIIVQFWLPNTPAWLWSAIFLLLIFGLNALSVKAYGESEYWFSIIKVATVIIFLIVGVLTIVGILGGEVIGFSNFTAGDAPFKGGFFAILGTFLIAGFSFQGTEMVGIAAGESATPEKSVPKAIKQVFWRILLFYIFAIFIIGMIIPYTNPNLLSAEATDVAISPFTLVFEKAGLAFAASVMNAVILTSVLSAGNSGLYASTRMLWAMARDKKAPKFLGKVNRRGIPMAALIVTTIVGAMTFITTLTENGTVIYTWLLSASGLTGFIAWVGIAISHYRFRKAFIKQGHDLNELKYKAKFFPFGPILALILCILVIVGQDYAAFLKPEFTNPAWWQKIGISYIGLPIFLIFWLSFKFTNKTKVIPLEDCKFDQK

SEQ ID NO: 2388 - protein, 475 aa, Bacillus subtilis subsp. subtilis str. 168
MNLQENSSQQLKRTMKSRHLFMISLGGVIGTGLFLSTGYTLHQAGPGGTILAYVIGGLMMYLVMQCLGELSVANAVTGSFQKYATTFIGPSTGFMVGIMYWINWVVTVGSEFTASGILMQRWFPDSSVWMWSAIFAALLFICNAFSVKLFAETEFWFSSVKIVTIILFIILGGAAMFGLISLNGTADAPMLSNFTDHGGLFPNGFLAVFIAMISVSFAFSGTELIGVTAGESANPQKDIPRSIRNVAWRTVIFFIGAVFILSGLISWKDAGVIESPFVAVFAEIGIPYAADIMNFVILTALLSVANSGLYASTRMMWSLANENMISSRFKKVTSKGIPLNALMISMAVSCLSLVSSIVAPGTVYVVMVAIAGFAGVVVWMSIALSQLLFRKRFLKKGGDVKDLTFRTPLYPLMPIAALLLCSASCIGLAFDPNQRIALFCGVPCIILCYLIYHFKRNVTKAKKISQEEYPADHIL

SEQ ID NO: 2389 - protein, 318 aa, Mesorhizobium loti
MTRVVIIGGSGHVGTYLVPRLVEAGYEVVNVSRGQRAAYTLNAAWKSVEPVVIDRDTEEKAGTFGEKVRALKADIVVDMISFTLDSTKQIVGALRGEVQHFLHCGTIWVYGHNTAIPATEDQPKNPFGSYGTQKAEIESWLLNEARRNGFPATVFRPGHIVGPGWEPLNPAGHFDVGVFSQIARGEPLVLPNLGNETVHHVHADDVAQMVMRAIVSWSNAVGEAFNTVSPQAINLRGYAEALYNWFGHAPRLSYEPFDTWKGKQTEENWRATWEHIARSPSHSIAKARNLLGYDPRYSSLQAVYESVEWLVANGKLSR

SEQ ID NO: 2390 - protein, 446 aa, Brassica rapa
MKGVIPHYHHSYTFFFVILVLFPHAFSTNTLSSNEALTISSNKTLVSPGDVFELGFFKTATKNSQDGSTDRWYLGIWYKTTSDKRTYVWVANRDNPLHNSIGTLKISHASLVLLDQSDTTVWSTNLTGVAHLPVTAELLANGNFVLRDSKTNDLDRFMWQSFDYPVDTLLPEMKIGRKHKSSEKEKILTSWKSPTDPSSGDYSLILETEGFLHEFYLFKNEFKVYRTGPWNGVRFNGIPKKMQNWSYIDNSFIDNNEEVAYTFKVHNNNNMIHSRFRMSSTGYLQVITWTKTVPQRNMFWSFPEDTCDLYKVCGPYAYCDMHTSPTCNCIKGFVPKNAGRWDLRDMSGGCVRSSKLSCGEGDGFLRMSQMKLPETSEALVEKRIGLKECREKCVRDCNCTGYANMDIMNGGSGCVTWTGELVDMRKYDAGGQDLYVKVAEASLVPS

SEQ ID NO: 2391 - protein, 2479 aa, Neurospora crassa
MAGHNFKQLVFEQFFTESVPLPEPEPTTTTSLVPSALASDTEQPKEEAKAPEPDTAEKEDVQVTTIPLSGEATPAAADVAPPESDSPELESPGSELADYEQETGYESFTQGQSSSDNDKRLSTIPEEPSDSEGSHDNFLPVDSPDQPVDPREEDHTDVQSTDLHGEPPQMVPEGPTAPETLTGFSPAQLHPESFPPLYVNPDRTPVSDGERQNIDAWARGEAELTTHVEPDDEAGSPDIPELCNVLRPPRSLNSSDNNSSDTSEVAAKGQFQHESLDAWQRRLQDESRGFPEPPMGTMASMFDYTPFSETASNAPASKDTPPNDLPGDRIAEPTDAASSSDGTLFDAETTPLATPPHNGNGVIPTLISSFDKRTFFENLSRVFKKGRKRAEKLRERITLLETGIGGAVPTSIDEQKNKDHVQHMPEERSRYNSIMIKLLKEGYNVPIPWDALEEPQNEEEDISSSAGPLMKQAQAGVSPPQNISEAGKEESLEAGRALDKLLDEKLGEAKNAQKKVAKGETKTDGPQVNPIEHQKPNVAKTPDNPEKPEVLEARGEQAPEYKTLAEERRKAEREDADRKPAEQTVKGEEEETAKNDGDVKPKTLEEQQKAKQEEEDRKLAQQIAKTQQEEAAKASEDAKRRQAEEADDLAKSTEAEKDKALGERIKAAEAEMLKEIGHARAKVAEAERLTKTEKNKVKTANSEMSVARIDAEALEEKRRKAAQEGKAKDAEALEDRRRKALELAEKAAVAEKEASEKVKVYQEAEDKAREELRLLELVRQDAVKAEKAKAAELGNWNVAVNEKAAAAERRRIVREAEEATLAKTTVEKTPKTFTPGGKLTSVAASRGDVSRTRDNHKFVPFLKTSKVAAARSEAAKDADRKHAAAGAEKRQALEAAGAEKRKEIKKGNQQPGVVKASEANVPKSADPAISKSPEASIPTALTEAEKPRNFYETIRRRREWEAQREEAKKKDEAEKIIKPPEADISKPFEANVPKPADPVISKSPEASIPTPLTEVEKPRNFYETIRRRREWEAQREEAKKTDEAEKIIKPPKADISKPSEANVHKAPEKINKPPEADISKPSEANVHKPADPAISKSPEASIPTPLTEAEKQRNFYEAIRRRREWEAKREEAKKKDEETRRDWLEEKKKQMHANDKPASTQQAKVEEAWPSLPSTSQQVKPEALGAAPPSVKLPKIIKIAPPKEKSQSSAKANPQQKPQSPTRKPQQAWSQPKPDGNDRGKTQTLVQVKSQEKTQEQAQASAAENTQGQSQKTMKGPAPKTHPVPAKEKPQPPAQKKPQDPVKKQPQSQAQKKSQQPPQRKDEAPAQQKPQVPAEEKPQPSPQKKPQQPPQQKSQAPARVEKPEPSAWKKRINNLNAKISEESTHTKSQPPRPSIVFGEKKNELQKGNSADQTQAEVPTDNKPQLEPTSSKTKQDVGPEATPATKMDDKKVEETLYVPPQHQETVDTKAQEDQLKAQKVETERLEHEKAEQERVAREKAERAEREKAEREKAEREQVALEKAREKAEQEKAEREKAEREKAERERVEREKAREKLEQERIAREKAELEKAERERIAAEEARKKAELEKAELEKAERERIAAEKARKKAELEKAELEKAELEKAERERVAAEKARKKAEQEKAEQERVEREKAQEKALQEKAEQERIARKKAEQEKAERRKADLEKAERERVALEEARKKAEEEKAEQKRISRKKAELEKAKQEKAEREKADRERAKQEKAEQERISREKAEHEKAERDKAEQERVAREQAERKQAEQERVAREKAEHEKSERGKIQQERLAHERAEHQKAEREKAEHEEAKRQVFERELANRQRVARETAEREEAERERLMHEKFKAEEFERHNLAAQRIAREMAEYERVKECGPEDKYMEAEKPKPVVQSGTANPVVKEKEERTHAGQPIFNLDGSEPKHKDKMLQVCLNLKAKRLELVESAEEYGEAAKRQNEKMEELVHLRDHNLMIREQELQKIKLIDEQLEKEVRAIRRVIAEERRKIEAKQRMLDAVQAELKAEKPLDWVPFIVSSAQPNLNREQGHERGRERERRSAVGLSSQIPGAPENYGEEYPLEGHPAWGHVPEQDQYPSVDAPSWNSYPFNESKNSAPEQEQSGGPRNPLPEAPRSLGVPQKAVILPTEDYDTSQVSRLPAEFQSTIPGQTHVQNFENQPPETGFAGMFCMNCHWVFEKLRCSCTWGSLSRARPLLCQWCGWEHGFLYCPTHRLSFWDHTSVPVQPPAELTRVSHPTSSYQSGYQGQTYVPQPQWNAPPPQWNAPPPHLNAPQQGLHEFQPQFNPSQGPLMSPREPVWVHNDAIPEPNLQGPYTQPNHHRQLYDPRNPSRSQNEPYTQPNHHRQLYDPRNPSRSQNEPYPSGSNPPKGSRAERPSRPRRTSSSHSGPNQPGLGPRLWSPNQKKLLDSFKGDGDRGEQVPSQAPVAEGNIVTSSTLPSVQEETKSAGRGRQRKHRNSR

SEQ ID NO: 2392 - protein, 432 aa, Crataegus crus-galli
MAQILAPTSQWRMKVTRSSATASPMTAKMWGSLVLKQNKKGPARSSTKFRVLATKSEGYTINRLEGLLNLDLTPFTDKIIAEYIWIGGSGVDVRSKSRTISKPVEDPSELPKWNYDGSSTGQAPGEDSEVILYPQAIFKDPFRGGNNILVICDAYTPQGEPIPTNKRARAAEIFKNKKVIDEVPWYGIEQEYTLLQTDVKWPLGWPIGGYPGPQGPYYCGAGADKSFGRDISDAHYKACLYAGINISGTNGEVMPGQWEYQVGPSVGIEAGDHIWASRYILERITEQAGVVLTLDPKPIEGDWNGAGCHTNYSTKSMREDGGFEVIKKAILNLSLRHVEHISAYGEGNERRLTGKHETASINTFSWGVANRGCSIRVGRETEKQGKGYLEDRRPASNMDPYIVTSLLAETTLLWEPTLEAEALAAQKLALNV

SEQ ID NO: 2393 - protein, 489 aa, Zea mays
MAMRKENPVLNACQASNGRITRAQAAANRRSFGAFPSVPLPAKTERKQTAQGKAKRGSSYDNTSASVALSGPQPKRRTVLRDVTNLSNANSNKSFAAAPKLQTKPSLRTGRTVSKSKPCAKKIPKKPPPAGNGSALTNVLNIAEETQAEKILAERVEPVLLLENRGPLSLQNVERNRDSACHEVFFEERNLRDKCEPSVSKNGDSYVLDIVDIDKDNGNPQMCASYVVEIYSNLMASELMRRPSPNYMEGLQRDITKGMREILIDWLVEVSEEYKLVPDTLYLTVYLIDRFLSRNYIERQRLQLVGITSMLVASKYEEICAPRVEEFCFITDNTYTKAEVLKMESQLLNDLGFNLSVPTTKTFLRRFLRAAQASRKTPSMTLGFLANYLAELTLTEYEFLKFLPSLVAASAVFLARWTLDQSDLPWNQTLEHYTSYKCSDIQLCVCALRELQHNTSNCPLNAIREKYRHQKFECVANLTSPEFPRSFFS

SEQ ID NO: 2394 - protein, 348 aa, Pseudomonas putida
MSFFKKISGLFVPPRESTVSVRGQGFQFKVPRGQTILESALHQGIAFPHDCKVGSCGTCKYKLISGRVNELTSSAMGLSGDLYQSGYRLGCQCIPKEDLEIELDTVLGQALVPIETSALIRKQKRLAHDIVELELVSDKQIAFYPGQYADVECAECSAVRSYSFATPPQPDGSLSFHVRLVPGGIFSGWLFGGDRTGATLTLRAPYGQFGLHESNATMVCVAGGTGLAPIKCVLQSMTQAQRKRDVLLFFGARQQRDLYCLDEIEALQFDWGGRFELIPVLSEESSTSSWKGKRGMVTEYFKEYLTGQAYEGYLCGPPPMVDAAETELVRLGVARELVFADRFYNRPL

SEQ ID NO: 2395 - protein, 394 aa, Streptochaeta angustifolia
EPASTEDPALSIAGAVQSQKLAVRAISRLQALPGGDVKLLCDTVVEHVRELSGYDRVMVYRFHDDEHGEVVAENRRADLEPYLGLHYPAMDIPQASRFLFRQNRVRMIADCHAAPVRVIQDPSLKQPLCLVGSTLRAPHECHAQYMANMGSIASLVMAVIISSGGDDENSVGRSGISSATKLWGLVVCHHTSPRCIPFPLRYACEFLMQAFGLQLNMELQLAHQLSEKHILRTQTLLCDMLLRDSPTGIVMQSPSIMDLVKCDGAALYYHRKYYPLGITPTEAQIKDIIDWLAMCHGDSTGLSTDSLADAGYPGAAALGDAVCGMAVAYITPNDYLFWFRSHTAKEIKWGGAKHHPEDKDDGQRMHPRSSFKAFLEVVKSRSLPWENAEMDAIH

SEQ ID NO: 2396 - protein, 1125 aa, Populus tremuloides
MSSSRPSHSSSNSARSRHSARIIAQTTVDAKLHADFEESGSSFDYSSSVRVTDSVGGDQPPRSDKVTTAYLHHIQKGKLIQPFGCLLALDEKTFRVVAYSENAPELLTMVSHAVPSVGEHPVLGIGTDIRTIFTAPSASALQKAMGFGDVSLLNPILVHCKTSGKPFYAIVHRVTGSLIIDFEPVKPYEVPMTAAGALQSYKLAAKAITRLQSLPSGSMERLCDTMVQEVFELTGYDRAMAYKFHDDDHGEVVSEVTKPGMEPYLGLHYPATDIPQASRFLFMKNKVRMIVDCHAKHVKVLQDEKLPFDLTLCGSTLRAPHSCHLQYMENMNSIASLVMAVVVNDGDEDGDTPDSANPQKRKRLWGLVVCHNTSPRFVPFPLRYACEFLAQVFAIHVNKELELENQIVEKNILRTQTLLCDMLMRDAPLGIVTQSPNIMDLVKCDGAVLFYRNKIWRLGITPSDLQLQDIAFWLSEYHMDSTGLSTDSLYDAGYPGALALGDVVCGMAAVRITSKDMLFWFRSQTAAEIRWGGAKHEPGEKDDGRRMHPRSSFKAFLEVVKTRSLPWKDYEMDAIHSLQLILRNTFKDIETMDVDTKTIHARLSDLKIEGMQELEAVTSEMVRLIETATVPILAVDVDGLVNGWNTKISELTGLLVDKAIGKHLLTLVEDSSVDIVKRMLFLALQGKEEQNIQFEIKTHGSKSECGPICLVVNACASRDLHENVVGVCFVGQDITGQKMVMDKFTRIEGDYKAIVQNRNPLIPPIFGTDEFGWCSEWNPAMTNLTGWKREEVLDKMLLGEVFGLNMACCRLKNQEAFVNLGVVLNTAMTGQESEKVSFGFFARTGKYVECLLCVSKKLDREGAVTGVFCFLQLASQELQQALHVQRLSEQTALKRLKALAYLKKQIWNPLSGIIFSGKMMEGTELGAEQKELLHTSAQCQCQLSKILDDSDLDSIIEGYLDLEMVEFTLREYYGCYQSSHDEKHEKGIPIINDALKMAETLYGDSIRLQQVLADFCRCQLILTPSGGLLTVSASFFQRPVGAILFILVHSGKLRIRHLGAGIPEALVDQMYGEDTGASVEGISLVISRKLVKLMNGDVRYMREAGKSSFIISVELAGGHKSQKRA

SEQ ID NO: 2397 - protein, 336 aa, Candida parapsilosis
MSIPSSQYGFVFNKQSGLNLRNDLPVHKPKAGQLLLKVDAVGLCHSDLHVIYEGLDCGDNYVMGHEIAGTVAAVGDDVINYKVGDRVACVGPNGCGGCKYCRGAIDNVCKNAFGDWFGLGYDGGYQQYLLVTRPRNLSRIPDNVSADVAAASTDAVLTPYHAIKMAQVSPTSNILLIGAGGLGGNAIQVAKAFGAKVTVLDKKKEARDQAKKLGADAVYETLPESISPGSFSACFDFVSVQATFDVCQKYVEPKGVIMPVGLGAPNLSFNLGDLALREIRILGSFWGTTNDLDDVLKLVSEGKVKPVVRSAKLKELPEYIEKLRNNAYEGRVVFNP

SEQ ID NO: 2398 - protein, 317 aa, Clostridium acetobutylicum
MKIFRKKSLDKMMVSAEKTHLKKTLKTKDIAALGIGAVVGVGIFVATGTGAHKAGPGIIISFLLAGIVACLCGLCYSELATMFPVSGSTYSYAYITFGEIVAMIVGWCLTSEYLVACSAVASGWSGTFIGILKNAGIVLPKVITASPSKGGIVDLPAVLITLILTYILYYGMKESSRVNNIIVIVKIAIIVMFLVLGATHIKMTNYKPFAPFGFKGIFAGASVIFFSYIGFDAISTTAEEAENPGRDVSRGLIICLAVVSILYISVAFVLTGMVHYDKIVTEDAVPAALASVGIRWGSALVGIGAILGMISTMIAVL

SEQ ID NO: 2399 - protein, 338 aa, Salmonella typhimurium LT2
MRVLVTGGSGYIGSHTCVQLLQNGHDVVILDNLCNSKRSVLPVIERLGGKHPTFVEGDIRNEALITEILHDHAIDTVIHFAGLKAVGESVARPLEYYDNNVNGTLRLVSAMRAANVKNLIFSSSATVYGDQPKIPYVESFPTGTPQSPYGKSKLMVEQILTDLQKAQPEWSIALLRYFNPVGAHPSGDMGEDPQGIPNNLMPYIAQVAVGRRESLAVFGNDYPTEDGTGVRDYIHVMDLADGHVVAMEKLADKSGVHIYNLGAGVGSSVLDVVNAFSKACGKPINYHFAPRRDGDLPAYWADASKADRELNWRVTRTLDEMAQDTWHWQSRHPQGYPD

SEQ ID NO: 2400 - protein, 361 aa, Peripterygia marginata
QKLAVRAISHLQSLPGGDIKLLCDTVVESVRDLTGYDRVMVYKFHEDEHGEVVAESKRPDLEPYIGLHYPATDIPQASRFLFKQNRVRMIVDCHASPVRVIQDDGLMQPLCLVGSTLRAPHGCHAQYMENMGSIASLAMAVIINGNDEEVIGGRNATRLWGLVVCHHTSARCIPFPLRYACEFLMQAFGLQLNMELQLAAQLSEKHVLKTQTLLCDMLLRDSPTGIVTQSPSIMDLVKCDGAALYYQGNYYPLGVTPTEPQIKDIVEWLLAFHGDSTGLSTDSLADAGYAGAALLGDAVCGMAVAYITNRDFLFWFRSHTAKEIKWGGAKHHPEDKDDGQRMHPRSSFKAFLEVVKSRSLP

SEQ ID NO: 2401 - protein, 271 aa, Triticum aestivum
  unsure (1)..(271): unsure at all Xaa locations
MGIVEEAHNLRVVGEGKRGVIVLAHGFGTDQSVWKHLVPHLVADYRVVLFDTMGAGPTNPDYFDFSRYATLEGYALDLLAILEELGMASCIYVGHSVSAVIGVLASISRPDLFSKLVLLSASPRYLNDVDYYGGFEQEELDELFEAMRSNYKAWCSGFAPLCVGGVFSKLVLLSASPXTFNIWPDIAVSVAQTIFQSDVRTLLPLVSVPCHIVQSTKDLAVPVVVSEYLHKHLGGDSIVEVMPSEGHLPQLSSPDIVTPVLLRHIQHDIAF

SEQ ID NO: 2402 - protein, 744 aa, Listeria monocytogenes
MKTVLGKTNVTDTVSQTDLDQVTTLQADRLGIKSIDGVEYLNNLTQINFSNNQLTDITPLKNLTKLVDILMNNNQIADITPLANLTNLTGLTLFNNQITDIDPLKNLTNLNRLELSSNTISDISALSGLTSLQQLSFGNQVTDLKPLANLTTLERLDISSNKVSDISVLAKLTNLESLIATNNQISDITPLGILTNLDELSLNGNQLKDIGTLASLTNLTDLDLANNQISNLAPLSGLTKLTELKLGANQISNISPLAGLTALTNLELNENQLEDISPISNLKNLTYLTLYFNNISDISPVSSLTKLQRLFFYNNKVSDVSSLANLTNINWLSAGHNQISDLTPLANLTRITQLGLNDQAWTNAPVNYKANVSIPNTVKNVTGALIAPATISDGGSYTEPDITWNLPSYTNEVSYTFSQPVTIGKGTTTFSGTVTQPLKAIFNVKFHVDGKETTKEVEAGNLLTEPAKPVKEGHTFVGWFDAQTGGTKWNFSTDKMPTNDINLYAQFSINSYTATFDNDGVTTSQTVDYQGLLQEPTAPTKEGYTFKGWYDAKTGGDKWDFATSKMPAKNITLYAQYSANSYTATFDVDGKSTTQAVDYQGLLKEPKAPTKAGYTFKGWYDEKTDGKKWDFATDKMPANDITLYAQFTKNPVAPPTTGGNTPPTTNNGGNTTPPSANIPGSDTSNTSTGNSASTTSTMNAYDPYNSKEASLPTTGDSDNALYLLLGLLAVGTAMALTKKARASK

SEQ ID NO: 2403 - protein, 374 aa, Cuervea integrifolia
ALSIAGAVQSQKLAVRAISQLQSLPGGDIKLLCDTAVESVRNLTGYDRVMVYKFHEDEHGEVVAESRRPDLEPYIGLHYPATDIPQASRFLFKQNRVRIIVDCHASPVSVIQDDGLMQPLCLVGSTLRAPHGCHAQYMENMGSIASLAMAVIINGNDEDGIGGRNPTRLWGLVVCHHTSARCIPFPLRYACEFLMQAFGLQLNMELQLAAQLLEKHVLKTQTLLCDMLLRESPTGIVTQSPSIMDLVKCDGAALYYQANYYPLGVTPTEAQIRDIVEWLLAFHGDSTGLSTDSLADAGYPGATLLGDAVCGMAVAYITNRDFLFWFRSHTAKEIKWGGAKHHPEDKDDGQRMHPRSSFKAFLEVVKSRSLPWEN

SEQ ID NO: 2404 - protein, 326 aa, Streptomyces avermitilis MA-4680
MTWLITGGAGYIGAHVAWAMTEAGERVLVLDDLSAGVPDRLPTSIPLVQGSSLDGALLKRVFAEHSVTGVVHLAARKQVGESVAQPTRYYQENVGGLTTLLDAVAGAGIQRFLFSSSAAVYGNPDVDLITEDTPCAPVNPYGETKLAGEWLVRAAGRAHGISTVCLRYFNVAGAASPELADTGVFNVVPMVFDRLTRGEAPRIFGDDYPTSDGTCVRDYIHVADLADAHLAAARRLTAGATGDLTVNIGRGEGVSVRELITLIGEVSGDTTPALVEPRRPGDAPRAVASAALAAEELGWHARRGVREMVESAWRGWRHHHPEAARG

SEQ ID NO: 2405 - protein, 178 aa, Clostridium perfringens str. 13
MLYDFKVKDIEGNEVSLGEYKGKVLLIVNTATGCGFTPQYEGLEVLYKKYHDKGFEILDFPCNQFFEQAPGSNEEIVGFCKLNYGTTFKTFAKVEVNGENACELYKFLKKEAPMAKEDETSLGFYDKLKGLGFTTEGEEIKWNFTKFLIDKNGEVVARFAPTFEPEKLDELIEELLEE

SEQ ID NO: 2406 - protein, 164 aa, Triticum aestivum
  unsure (1)..(164): unsure at all Xaa locations
DHLXYXASVIXXLISPRRIFGDLGTYXAVNWFFLGGAIAPLLXWLAHKAFPGQKWILLVNMPVLLGGISHMPPATAVXXTXWICVAFLSGYVVYKYXHNWWKRXNYLLSGALDCGLAFMAVLIYLCLELDNITLNWWGNVSDGCPLASCPTAKGIIVHGCPVHN

SEQ ID NO: 2407 - protein, 331 aa, Triticum turgidum
MTQNLGISVPIMSSSPMFANAPPEKKGVKNFAIDFLMGGVSAAVSKTAAAPIERVKLLIQNQDEMIKAGRLSEPYKGIGDCFGRTIKDEGFGSLWRGNTANVIRYFPTQALNFAFKDYFKRMFNFKKDKDGYWKWFGGNLASGGAAGASSLFFVYSLDYARTRLANDAKASKGGGDRQFNGLVDVYRKTLKSDGIAGLYRGFNISCVGIIVYRGLYFGLYDSLKPVLLTGTLQDNFFASFALGWLITNGAGLASYPIDTVRRRMMMTSGEAVKYKSSLDAFQQILAKEGAKSLFKGAGAKLLRAIAGAGVLSGYDQLQILFFGKKYGSGGA

SEQ ID NO: 2408 - protein, 251 aa, Acinetobacter sp. SE19
MEKIMSNKFNNKVALITGAGSGIGKSTALLLAQQGVSVVVSDINLEAAQKVVDEIVALGGKAAANKANTAEPEDMKAAVEFAVSTFGALHLAFNNAGILGEVNSTEELSIEGWRRVIDVNLNAVFYSMHYEVPAILAAGGGAIVNTASIAGLIGIQNISGYVAAKHGVTGLTKAAALEYADKGIRINSVHPGYIKTPLIAEFEEAEMVKLHPIGRLGQPEEVAQVVAFLLSDDASFVTGSQYVVDGAYTSK

SEQ ID NO: 2409 - protein, 462 aa, Methanosarcina acetivorans C2A
MNPKRIRTLKPGKSGDGSVAYWMSRDQRVEDNWALLFAQVIAQEANVPVVVVFCLIEGFLGAGRRHYEFMLKGLQELEEALSRKKIPFYFLRGDPGQKIPEFVKEYEVGTLITDFSPLRIKAEWVGKIISAIEIPFFEVDAHNVVPCWEASPKQEYAAHTFRPKLYGHLSEFLEEFPELEPNSESLKIRSGTGMPGILFRTRETEIKALFPEEISDENKDLLFEPEHFEPGEKAARKEMESFLAARLDSYNTLRNDPTKNALSNLSPYLHFGQISAQRVVLEVEKAKSDPESKKAFLDEILVWKEIADNFCYYNPGYDSFESFPDWAKKSLNAHRNDRRKYIYTFEEFEAGKTHDPLWNASQIELLRTGKMHSYMRMYWAKKILEWSESPEKALEVAICLNDRYELDGRDPNGYAGIAWSIGGLHDRAWREREVTGKIRYMSYEGCKRKFNVKLYIAKYSAL

SEQ ID NO: 2410 - protein, 554 aa, Asparagus falcatus
PYEVPMTAAGALQSYKLAAKAISRLESLPGGSMEKLCNAVVEEVFELTGYDRAMAYRFHEDDHGEVFSEVTKPGLEPYLGLHYPATDIPQAARFLFMKSKVRMICDCRAKPVRVLQDEKLPFDITFCGSTLRAPHSCHLQYMENMNSIASLVMAVVVNEGGEDEGEGEAGQASSPAQQQQGLRRKRLWGLVVCHNESPRFVPFPLRYACQFLMQVFAIHVNKEFELEHQIREKNILRTQTLLCDILLREAGPLGIVTARSPNVTDLVRCDGAALLYEDKIWRLGRTPTDSEIRDIAYWLVEYHADSTGLSTDSLLEAGYPGAFALGDLVCGLAAARINSRDILFWFRSHTAAEVRWGGAKHDPSDEDDGRRMHPRSSFKAFLEVVKTRSLPWSDYEMDAIHSLQLILRGSFNDVKKSEGLDSRMRSLRVEGMEELQAVTNEMVRLIETATVPILAVDVDGVINGWNLKIAELTGLPVDEAIGKHLLALVEDSSVAQVRRMLLLALQGTEEQNVEFQMKTCGDRGDDGPVILVVNACASRDLNEKVVGVCFVAIT

SEQ ID NO: 2411 - protein, 353 aa, Oryza sativa (japonica cultivar-group)
MAHRRIALAVLVTLLLSAFRPCLAQQSNDDTSKHHRSATAGGFTPTTVVVLVALITAFVLLTVFSVLINRCAQARAPPRRAFRSTASHQPVGGAAAASRASRGLDKEVVEAFPTAVYGDVKARMAAKSGPLECAVCLAEFADSDELRVLPACCHVFHPDCIDPWLAAAVTCPLCRANLTAPPVSLAAAESSDLTAPEEAVQEEESEELDEASLMATFTPESVIDFGATHDHEFDRAGYPHYRRTQSAMDAAPDRHTLRLPEHVMKELAADRRHRRAASLAGYPDSVERTPRWLTSLWRSVSWQRQSRADWDAGEEHGGSKRVHPVAGAQDETPSGSGSDGSKENSDSDALNRV

SEQ ID NO: 2412 - protein, 178 aa, Triticum aestivum
  unsure (1)..(178): unsure at all Xaa locations
MMAETKAVASAAGPAEEGGSKTVVLVAVDDSDHSYRALEWAVRHVAATAGVPGARAVELVVVHAKPSPSPVVTMGGPGVSGDVVRLVEADLRKXXEGVVDRAXRXCVANSVQGVVXVVDGEPRHVLCNAVEKHHADLLVVGSHGYGAIKRALLGSVSDYCAHHAHCSVMIVKQPKSKN

SEQ ID NO: 2413 - protein, 562 aa, Oryza sativa
  unsure (1)..(562): unsure at all Xaa locations
AFKAGHNCNWIGLHWGRVLQKIVWHVTDLEVVRDSMSAGFAELERQQQLLASCTRLYKQLEEHFASLERGLAARSDSLRHKRRAEEARASAAMDSLRRREASIDGSVSXXALDHLDDLASVLSVPSDAAAAAEGVAESLRAMCARMDSAVFFGFVVARRKEVDALRAEMPPALKCCVDPAKFVMDAVADVFPVDRRDAXEPHRLAWACVLILEAAVRGPAGPEAEIGAARLLVPRAARERARGMAREWKEAAERKGGVEWTKPPDAHAFLQHVATFAVAEREDRGIYRRIVVSFSWRRQMPRLALTLGLEEDMADIIEELIAKGQQLDAVNFAYEAGLQEKFPPVPLLKSYLADSKKTSCTVSDNSSTSSGQSGSNARKEQSVLRAVIKCIEDRKLEAEFPLEDLQRQLEELEKAKTEKKKATSSAXPAAVAVXPATKRIRASNGGPMPPAKAGRLTNNACVSSTPAATTFVRSPSHTSYAMASPYPYDRPVVYCNQSPPAIREPYAPGLPYSSPPISYPHAYGGYNNGMGAYNNGMAPAFHQAYYRXDQSGKSLMNDMTNN

SEQ ID NO: 2414 - protein, 409 aa, Medicago truncatula
MAIPKLVPGFRFSPTGVELIKYFLKRKVMGKKVLNDVIAELDIYKYAPWDLPDLSYLQNGDLEWYFFCPIEKKYGNGSRMNRATEIGFWKATGKDRAVQQNNQTVGMIKTLIFHTGKAPRGDRTDWVMHEYRLEDKDLADKGIVQDSYVICKVFQKEGPGPRNGAQYGRPFNEEDWSDDEVGTPFAEPAALAPTLPVTSNSFVLNDQNLHAIGYNGSISMPCQSGLVPSPDPANSCQTGLPPSPDPANSSQIGLTPSPDPVNSCQTGFMSSPDPSNSCQTGYMPYPDSANECQIGFMSPDPANSHQTGLVLSPPDPVNSHLTGLVPSPDPVDNSYLENQAVNTDNILSMLDMFNDNDILPEENIAEGALSTDFFEVWETWIAWDLLARMLTLAHTVWLLRVMTTWISWS

SEQ ID NO: 2415 - protein, 224 aa, Pyrococcus horikoshii
MKTFGAFITIALYAFFSYLYSRKRNPFLNPVLLSILTIGVILKAFGISYESYMESARVISFFLGPAVVSLAIPLYKQAKIVKEYSKEITIGIIVGGVTAIFSTILMLKAFHAPEILQRSFAPKSVTTAIAMGISEKIRGIPQLTAVLVILTGILGNAFAPELLDLFKVKDRVARGLGTGVSSHGLGTARIILEDELAGAVSGLGMALNGIFTAFILPALIEVIV

SEQ ID NO: 2416 - protein, 447 aa, Streptococcus pyogenes MGAS315
MASNHMNEQEREQAKFSLSGATLYGINAVIGSGIFLLPRAIYKGLGPASIAVMFGTAILTIMLAVCFAEVSGYFGKNGGAFQYSKRAFGDFIGFNVGFLGWTVTIFAWAAMAAGFARMFIITFPAFEGWHIPLSIGLIILLSLMNIAGLKTSKIVTITATIAKLIPIVAFCACTLFFIKNGLPNFTPFVQLEPGTNLLGAISNTAVYIFYGFIGFETLSIVAGEMRDPEKNVPRALLGSISIVSVLYMLIIGGTIAMLGSQIMMTNAPVQDAFVKMIGPAGAWMVSIGALISITGLNIGESIMVPRYGAAIADEGLLPAAIAKQNQNGAPLVAILVSGAIAIVLLLTGSFENLAKLSVVFRFFQYIPTALAVMKLRKDDPDANVIFRVPFGPIIPILAVIVSLVMIWGDNPMNFVYGAVGVIIASSVYYLMHGRNHQMDQMPPKEQI

SEQ ID NO: 2417 - protein, 320 aa, Thermosynechococcus elongatus BP-1
MQTRSLGRTEIQITPLILGTWQAGKRWWVGIEDEESIRTIRAAVEAGMTTIDTAEVYGEGHSERIVAAAVGDLRDRCVYATKVFANHLRYKDVIAACERSLRNLNTDYIDLYQIHWPAGSFGSEIVPIEETMQAMVELQAAGKIRAIGVSNFSRAQLAEAMQYGRIESVQPPYSLFWRWAEAELIPFCIEHEITVLAYSPLAQGLLTGRFGPGHQFEPEDNRSKNQLFQGETYARALEAIELMKPIATSLGTTVGNLALAWLLHQPQTCAIVGARHPEQVRENIKAADLPLDRSILAMLDEISQPVIATLDPENPVMWKW

SEQ ID NO: 2418 - protein, 304 aa, Helicodiceros muscivorus
MGGHDSGRSDISFGGRFASSAFAACFAELCTIPLDTAKVRLQLQKKSVAGDGVSLPKYRGMLGTVATIAREEGLSALWKGIVPGLHRQCLFGGLRIGLYEPVKSFYVGEGFVGDVPLSKKILAGLTTGALAITVANPTDLVKVRLQAEGKLSPGIPRRYSGALNAYSTIVKQEGLGALWTGLGPNIARNAIINAAELASYDQVKQTILKIPGFSDNIFTHILAGLGAGFVAVCIGSPVDVVKSRMMGDSTYKSTLDCFIKTFKNDGPLAFYKGFIPNFGRLGSWNVIMFLTLEQVKKVFIKEAP

SEQ ID NO: 2419 - protein, 79 aa, Zea mays
DVHQKWIEGGNYELCIEDVRDEIWDMVKPADPLRISLSDLLSCKQGGTIASMLVDVRGFWAHDNRENLLQEEEEQVEET

SEQ ID NO: 2420 - protein, 349 aa, Oceanobacillus iheyensis HTE831
MEALNLYGIEDLRYEDTPKPMIEKDDDVIIKVKSVGICGSDTSRYKKLGPYVEGMTFGHEFAGEVIEVGKSVTNFKSGDRVVACPTFSCGNCHYCREGHPTRCVELTVIGARNPGAYAEYTKLPEGHVKILPDSIDDDTAALVEPSAVVAHGFYRASITPGSSVAIMGVGSIGLLAVQWAKIFGASKVIAIDIDDHKLKIAQELGADIVVNPMKENAEGIVKQHTDELGVDLAVESAGSPITSEQVLALPKKGGEVVFLGIPYGDITLKRYYFEKIVRNELRILGSWNALSAPFPGKEWNATLHYMSTGQLNIKPMISHRLGLQAGPEIFHQITNKLSDAVKVIFHPGK

SEQ ID NO: 2421 - protein, 576 aa, Clostridium thermocellum ATCC 27405
MKTSPVFEVRTIKNLRDMIEQSSKLFANKDAFRVKTKDNSYRGITFAEFKNDIDAFGTALLDLLGTEKGFVAVIGENRYEWCVTYLATINGVGVVIPLDKELPLPELENLLKQSNANAIVYSGKFHDAIKEMSSRLSNIKYFINMNTNEHEDDKFLSFWVLLEKGKKLLESGKKDYLNAPIDENAMSAMIFTSGTTGQAKAVMLSHKNICSNMMAVSASVYMDSTDSVLSILPLHHTYECTAGFLTMIYNGATITFNEGLKYIGKNLKEAQPTILILVPLILESMYNKIWEQASKDKSLKFKLKAGLFISNLLYKVFKIDIRRKLFKSVIDNVGGKLRLVISGAAALDPEVAKGFEAMGIKVLQGYGLTEASPIVAVNRDKSYRHDSVGLPLPGLDVEIINPDKEGFGEIIVKGDSVMLGYYNNDDATKAVLKDGWLYTGDLGRMDEKGFIYITGRKKNIIVTKTGKNIFPEEVEAYLNKSPYIKESLVSGRENDKNDETIVVAQIVPDMDAIKAKLKTDTVPSPEEVYKLIKAEIRAINKNMPVYKRVVDITIRENEFAKTSSKKIKRYLEKTNV

SEQ ID NO: 2422 - protein, 182 aa, Zea mays
MNRKPGDWDCRACQHLNFSRRDICQRCSEPRGVADRGGGGGGGDYASFGGRGGSSFGGGFGAAGSDVRPGDWYCSCGAHNFASRSSCFKCSAYKEEAAVNSGAGGFDGDMSRSRGYGFGSGAAGAGAGAARTTNRPGWKSGDWICTRSGCNEHNFASRMECFRCNAPRDSGSAAMTYENYLH

SEQ ID NO: 2423 - protein, 246 aa, Pseudomonas putida KT2440
MSLQGKVALVTGASRGIGQAIALELGRQGATVIGTATSASGAERIAATLKEHGITGTGMELNVTSAESVEAVLAAIGEQFGAPAILVNNAGITRDNLMLRMKDDEWFDVIDTNLNSLYRLSKGVLRGMTKARWGRIISIGSVVGAMGNAGQANYAAAKAGLEGFSRALAREVGSRGITVNSVTPGFIDTDMTRELPEAQREALQTQIPLGRLGQADEIAKVVSFLASDGAAYVTGATVPVNGGMYM

SEQ ID NO: 2424 - protein, 326 aa, Glycine max
  unsure (1)..(326): unsure at all Xaa locations
MGGWAIAVHGGAGVDPNLPLERQEEAKQLLTRCLNLGISALNSNLPAIDVVELVRELETDPLFNSGRGSALTEKGTVEMEASIMDGPKRRCGAVSGLTTVKNPISLARLVMDKSPHSYLAFSGAEEFARQQGVEVVDNEYFITPDNVGMLKLAKEANTILFDYRIPTSGYETXCGSGVESPLQMNGLPISVYAPETVGXWVVDREGRCAAATSTGGLMNKMTGRIGDSPLIGAGTYACDVCGVSCTGEGEAIIRGTLAREVAAVMEYKGLKLQEAVDFVIKHRLDEGMAGLIAVSNAGEVAYGFNCNGMFRGCATENGFMEVGIWE

SEQ ID NO: 2425 - protein, 372 aa, Zea mays
MAKDGGPDWNGLLKWSLAHGDSTNPPRALSEEDRKWFMDAMQANTVDVVKRMKEITQVMKTPEDVLQSQGVTPENIEDMLDELQEHVESIDMANDLHSIGGLDPLLSYLKNSNAGIRAKAAEVVSTIVQNNPKSQQLVMESNGLEPLLTNFKSDPSTNARTKALGAISSLIRHNQPGVSAFRLGNGYAGLKDALGSDDARLQRKALNLIQYLLHNYKADRSVATELGLPKLMMHLVSSDDSLVREAALGGLLELARDKTSGNALPDQEKLKDMLKSRIEGISAMDTDDLHAAREERQLVDSLWKECYNEPSSLREKGLVVLPGEDAPQQPPPDVAGKMFEPPLRAWAAARPAQEDDSDSGSGKKDPPLLLKF

SEQ ID NO: 2426 - protein, 291 aa, Ralstonia metallidurans
MAPARLRADTGSGEPIIHSTLLYILLAATISGVGSIFGAALLSLTVASRVVERMVSFSVGVLLATALLHSLPEAFESGADTRALFGTLLAGLLGFFLLEKISLLRHSHHHEGDGHHHHHGHDREEAGRSGLTILVGDTFHNFADGIVIAAAFLANPHIGIVTALAIAAHEIPQEVGDFIVLLNAGFSKARAFAFNLLSSLAAIIGGLVGYFLLDQLTGWIPYVLVIASSSFLYIAVSDLMPQMQRKPRLKESAVQVVLVAAGIAAIVFITNGVHEQHGHRHSRTAAGVTSN

SEQ ID NO: 2427 - protein, 366 aa, Oceanobacillus iheyensis HTE831
MEKHIILLPGDGIGREIIDSAKQVLTAIASEYNHRFTFEEHAIGGSAIDEYGTPLPDKTVDACSKADAILLGAVGGPKWDANPSHLRPEKGLLGIRKQLGLFANLRPVKTISSLLYASPLKEEIVSQADMLIIRELTGGIYFGTPSERTTNGVVDTLQYSREEIERIVERGFEAARIRKKHLTSVDKANVLESSKLWREIVEEKSKDYPDVAVNHLLVDAAAMKLVTQPSFFDVIVTENLFGDILSDEASVLTGSLGMLPSASLRADGLGLYEPVHGSAPDIAGKGIANPLAMILSAALMLEHSFGLVDEAKEIERAVNDCLLQGFHTADIHIPGGVQVGTKQMTDAVLENVTTKSISDSICSSYV

SEQ ID NO: 2428 - protein, 439 aa, Glycine max
  unsure (1)..(439): unsure at all Xaa locations
LIVYVVIPVSYWGLNVYNANRFPIFSSHLFTAQGQKYSSPKIVDNHFELNVAEYEKQGTSRLGVSFALTYGFGFATIASTLTHVVCFYGREIMERYRASSKGKEDIHTKLMRRYKDIPSWWFHSLLLVTLLVSLALCIFLKDQVQMPWWGLLFAGVLAFGFTLPISIITATTNQTPGLNIITEYVFGLIYPGRPIANVCFKTYGYISMAQAVSFLSDFKLGHXMHSFCSHMYICXFIGTMLAGTINIGVAWWLLNSIKNICHDDLLPEGSPWTCPGDRVFFDASVIWGLVGPKRIFGSQGNYSAMNWFFLGGAVGPIIVWLLHKAFPKQSWIPLINLPVLLGATGMMPPATPLNYNAWIFVGTIFNFFIFRYRKKWWQRYNYVLSAALDSGVAFMTVLLYFALGLENKSLNWWGNDGEHCPLAVCPTAKGVIVDGCPAN

SEQ ID NO: 2429 - protein, 454 aa, Oryza sativa (japonica cultivar-group)
MEARRVSANPRPSCVRRVLARKRRRPEATANSARKLQRREISALPCRAFSASTTRERFRNIQLQEEFDTHDPKEMGSLLPYLMKRSEIIEIVGASDIIFALSQSGVCAAFSRVSNQRICFLNGRPDEVIRSLFYNKNNDSLITVSVYGSENFSALRCRTTRIEYIRRGKPDAGFPLFETESLKWPGFVEFDDVNGKVLTYSAQDSTYKVFDLKNYTLLYTISDKNVQEIKISPGIMLLIYSRKKGCIPLDILSIEDGKRLKSFKHLLHRNKKVDFIEQFNEKLLIKQEGENLQILDVRNFQSIEVSRSEFVTPSAFIFLYEMQLFLTFRSRSVSVWNFRGELVTSFEDHMLWHPDCNTNSIYITSNQDLIISYCKADPNDPSSEENACSINISEILTGKCLAKIKAGNLNKQRVSKFQSTPSEALGDITALYYDEEREEIYTGNRLGLVHVWSN

SEQ ID NO: 2430 - protein, 145 aa, Oryza sativa
MNIQRKPGDWNCKSCQHLNFSRRDYCQRCHTPRQDLPLGDGYVPGGVLTSLDIRPGDWYCNCGYHNFASRASCFKCGAIVKDLPAGQGGGVANGDFARALDSSAVRAGWKAGDWICTRPGCNVHNFASRIECYRCNAPREAGNVK

SEQ ID NO: 2431 - protein, 351 aa, Zea mays
MYGWEMLSFNIHDGFLEAIVRGNRSGLLTAADYNNLCQCETLDDIKMHLTATEYGPYLQNEPSPLHTTTIVEKCTLKLVDEYKHMLCQATEPLSTFLQYITYGHMIDNVVLIVTGTLHERDVNELLEKCHPLGMFDSIASLAVAQNMRELYRLVLVDTPLAPYFSECITSEDLDDMNIEIMRNTLYKAYLEDFYKFCQKLGGATAEIMCDLLSFEADRRAVNITINSIGTELTRDDRRKLYSNFGLLYPYGHEELAVCEDVDQVRGAMEKYPPYQSIFSRISYGESQMLDKAFYEEEVKRLCLSFEQQFHYAVFFAYIRLREQEIRNLMWISECVAQNQKSRVHDSVVFIF

SEQ ID NO: 2432 - protein, 180 aa, Oceanobacillus iheyensis HTE831
MFLPYPRLDTNRLFLRQVEESDTEDIFAYASDPLLTTHVTWDAHQTLQDTQNFIQFACKQYEENGVGPWAIVWKETNQVIGTIDLIWNKKHHSAELAYAISREFWRQGIGTEAIRKIIDFGFNKMELERIQARCVPENIASYRLMETVGMTYEGTLRKSMFRKGKQDDLKMYAILQSEYL

SEQ ID NO: 2433 - protein, 326 aa, Bradyrhizobium japonicum USDA 110
MPIATPLTSLLEIRHPILLAPMDVVAGSRLVAAVSRAGGFGILGGGYGERAWLERETAKLSGLRAPFGIGFITWSLAKRPELLDIAVAAKPSAIMLSFGDPAPFVPKIRSAGARLICQVQDEAMARQALDAGADILIAQGTEAGGHGASRTTVDLVPAVVDLAAGRVPVVAAGGIADGRGLAAMMMLGASGVLLGTRFYASQEADGAEEAKRRICAASSGSTVRGIIFDLSRNNVWPAPFTGRCLLNDHARRWIGREVEMMQNVAAVAADYAVAKAADNFDVAAVIAGEAVGLIHDIPPAAEIVERIATEAEQSLAGRRNSVASVA

SEQ ID NO: 2434 - protein, 2132 aa, Emericella nidulans
MAFPGGELPEGRHSSESSGNNSGLSQETIRDDGRRYGRIVPSGRSISPHSKDDGSDRLELPAPRPPSLGAPNDLYTSMFSWGSPDISPTDVRKNQGFGSHRKALAVLGNDDPGPPPINNPSPRVNTNYGDYFQHDPQGTLSYSPRLGTGDAHGTFFHDHSEHEASPATATFRPGTGRTLASDAPDLDYNGDHRRPSVASATTVSSQGSKSSTSGLFRKKLQGFFGDDPNASDSKQDHDGHHSSGSKPSSIDYFRSRQRADSEGSRRPSDGVQDDAHQPGRPRTPLPSSDITPWEYQRYNDIPQLGEAPVREAPTALDRHRIGSQGASSTSRDPTRRHFSGHRHSRSKEEKANAAGDLAGYPDRPSTGRDDFSVGLRPSRDGSLGFRPAANSSINLAGRSTSPTPSLQSFYTKDSGQGSPGAPSSKRSFLGKLRRPNLKHFPGSKGPTDAIRGTSKLARRDASPGRRGRQGSLEGAPSKGAENGEHERKKDGKGLGIATGKLRGRRGAGHETPIGKETNPSEAPGVWALDTDLSHMEGIVQPAADDGDKTNEGKTVRHDEKRLGDQLGAGNWDAPESWHVKRQRNEVLAKVPKMTNDAARTIAEPDGVPYFIRVFRIDGTFATLSNGLHATVADVLLSLGKKSFLTDHLNNYEIVMRKNDISRQLDPNEQPILMQKKLLEQIGYTEKDRIEELGREDHSYILRFTFLPTKLSGYSSLEGEPGFSKNQKFSHVDLQGRSLVTIPIALYKKAPEIISLNLSRNLELDVPKDFIQGCINLREIKYIGSEALRLPPSFSLASRLTYLDVSNNFLDQLDHANLDRLQGLVSIKLANNRLTKLPDYFGNFKSLRSLNIASNNFQVFPEFLCNLKSLVDLDISFNNISELPNIGNLTSLERLWMTNNGFRGPFGESIKDLVNLKEIDARFNEIVNIDSLTLLPRLEQLLIGHNSVSKFRGSFPKLRNLVLDHCPVTQFDIDAPMPTLTSLNIASAKLVQFRDTLFDSLPNLTKLILDKNHFMSMSPHIGKLRKLEHFSMAKNPLSSLPPSIGCLTELKYLNLRECNLRRLPQEIWYCLKLETLNVSSNVLDSFPKHGGPPPQLPGEATAGTTPAMTPGGSVTPSYDDLGTVEEQETRRPSQASGSAPSGSSPGGGSTRKPSVASSLSQGGRKVSTASKFAEGSPSSRKDSNFSQHVATTFGGSLRNLYLADNRLEDDVFRELSFIPELRIVNLSYNVLNEIPPGLLKRWPLLTELYLSGNELTSLPSDDLEEGSSLKILNINANRFQVLPAELCKVSKLSILDVGSNYLKYNVSNWPYDWNWNWNRNLKYLNFSGNKRLEIKPNVSSLGSQPPNGADLTDFNSLTHLRVLGLMDVTLTTSNIPEENEDRRVRTSASLAGSLAYGMADFLGRSEHLSIIDMIVPRMRQDNVETVVGMFDGQPSSTGGSRVAKFLHENFLHTFSAELKRLRRDEQETPLDAFRRTFLTLNRNMAFACYKSIDQDVRLFQEDSSDQKKVRLNKEDLQSGGVATVLYLNNTDLYAANIGDAQAILVKSDGSMRYLTRNHDPAEAGERARIRAAGGFVSRNGRLNDYLPVSRSFGYFNLMPAVIAAPHTMHVSLTEQDEMIILASKELWDYVTPDLVVDVTRAERRDLMVAAQKIRDLALSFGANNKLMVMILGVGDLRKRERRPPRFPSMNSFSQVDDSILPSPKRTKKPRDMPGDSRLARFDYVDAPTGELAIIFTDIKQSTGLWETCPDAMRSAIQIHNDILRRQLGIIGGYEVKTEGDAFMVAFSTTTAALLWCFNCQYQLLEAEWPTEILEQPQCQVQFDMENNIIFRGLSVRMGIHWGEPVCEKDPITNRMDYFGPMVNRASRISAVADGGQIFVSSDFMNDMQRNLELFADSERAASTGSEESYALDLGDNIRRELQQLNSQGFVIKDQGERKLKGLENPEPLYLIYPHALSGRLSTQDQMSGEESTPTTISQHSQLQIQTEAIWRLWEITLRLERLCGALEHPGEPRLDKPNSALFDIIKKHGGELADSSVVSLIEQQVTRIEVAISTLALRHMLRPFKPGDRLDDHAAPIGDVLQELRTQLAEYRALKEQIATNGAGITGASPSSTATDLHYTPDFHSSASSSSFT

SEQ ID NO: 2435 - protein, 348 aa, Zea mays
MYAAAVLAAVSAVSVVAAQSPEPRDNQTVADVMSISIFMAVFFPVFVVLLAFACLHLFRAPDDDDPQAPDAASAPEWPRGGGSRKGGLDAAAIAALPLVFFREVRQHRIVDGREDALECSVCLLEFDDDDALRILPTCPHAFHPECIGLWLERHATCPLCRASVLDDAPPPAPAAQLELHTAPPLTPDSSPVHAAIVLIGGAGASEVGEEEDRTTIQRLARNRRAAGRQALPRSNSTGHSASDGGMERFALRLPEHVRLELLMSHRLRHVTSAVASVRVMEGSARDTSTVGGSARSTMARLLSLFTPGAGWKGDGDDKSGKAEATAASSLRRRENSSRGAVGEEKRSV

SEQ ID NO: 2436 - protein, 828 aa, Fusobacterium nucleatum subsp. nucleatum ATCC 25586
MQIVTDKNKVALYYKDIAVTYKEFILNTKKIKQFTKIKEFTNNMIYMENRPELLYSFFAIWDSRATCVCIDASSTAVELTYYIDNSDVVKIFTTKMQVEKVKGALSILSKQIEIIVVDEINLSEIKIDENSSENLVINSPEKEDTALILYTSGTTGKPKGVMLTFDNILANVDSLDVYKMYEETDVTIALLPLHHILPLLGTGVMPLLYSATIVFLEDISSVALIDAMKKYKGTMMIGVPKLWEVMHKKIMDTINSKAITRFIFKLAKKVNSLSFSKLIFKKVSEGFGGHIKFFVSGGSKLNPQITKDFYTLGIKICEGYGMTETSPIISYTPKNNIVFDSAGKVIKDVEVKIADDNEILVKGRNVMKGYYKNPEATVEIIDKDGWLHTGDLGKLVNDYLYITGRKKEMIVLSNGKNINPIEIETKISSMTNLISEIVVTEYNSILTAVIHPDLEKVKEEKVDNIYENLKWEVVDKYNQKTPDYKKILDVKIINEDFPKTKIGKIKRFMIADMLDGKIEKQERKPEPDFEEYNKIKKYLVDIKGKDVYFDSHIEIDLGMDSLDMVEFQYFLDLNYGIKEENLISKYPTLLELANYIKGNRNQEKIGNLDWKEIVNKDTTAKLPSSSFIAIIFKFLSFIFFKTFFRVKVKGKEKIEKDKPTIFVANHQSFLDGFLFNYSVPLKVLKKTYFLATVIHFKSSIMKFMADSSNVVLVDMNKDIAEVMQILAKLLKENKNIAIYPEGLRTRDGKMNKFKKSFAILAKELNIDVQPYVIDGAYDLFPAGKKFPRPGKIRVEFLDKIKVEKLTYDEIVNEAYSVIKNKIESDTEN

SEQ ID NO: 2437 - protein, 274 aa, Azotobacter vinelandii
MSAVPFAPLIDLVRQAGAAILPYWRMDGIDVQEKDDASPVTAADLAAHRVLCAGLRALEPTVPVLSEEDCAIPLAERAGWRRWWLVDPLDGTKEFIAGSEEFTVNVALIEEGRVLLGVVGVPATGCCYFGGAGLGAWSSEMSGVERPIAVRRAPGEDFTVVASRRHSSPAQERLLQGLAARFGNLRLTSVGSSLKFCLLAEGLADFYPRLAPTSQWDTAAAQGVLEGAGGEVLDLQGRALDYAARADFLNPSFLALPRTAGWRDGLLELARTLE

SEQ ID NO: 2438 - protein, 428 aa, Brassica rapa
ENSHTSFLLVFFLLTLFSPAFSINTLSSIESLTISNSRTLVSPGNVFELGFFRTTSSSRWYLGMWYKKLSERTYVWVANRDNPLSCSIGTLKICNMNLVLLDHSNKSVWSTNHTRGNERSPVVAELLANGNFVLRDSNNNDRSGFLWQSFDYPTDTLLPEMKLGYDLKTGLNRFLTSWRSSDDPSSGDFSYKLQTRRLPEFYLFKDDFLVHRSGPWNGIRFSGMPEDQKLSYMVYNFTQNSEEVAYTFLMTNNSIYSRLTISSSGYFERLTWTPSSGMWNVFWSSPEDLQCDVYKICGAYSYCDVNTSPVCNCIQGFNPSNVQQWDQRVWAGGCIRRTRLSCSGDGFTRMKNMKLPETTMATVDRSIGVKECEKKCLSDCNCTAFANADIRDGGTGCVFWTGRLDDMRNYVADHGQDLYVRLAAADLV

SEQ ID NO: 2439 - protein, 169 aa, Zea mays
KALNLIQYLLHNYKADRSVATELGLPKLMMHLVSSDDSLVREAALGGLLELARDKTSGNALPDQEKLKDMLKSRIEGISAMDTDDLHAAREERQLVDSLWKECYNEPSSLREKGLVVLPGEDAPQQPPPDVAGKMFEPPLRAWAAARPAQEDDSDSGSGKKDPPLLLKF

SEQ ID NO: 2440 - protein, 244 aa, Pseudomonas aeruginosa UCBPP-PA14
MLCLSFLGFDAVSTLAEETRDPQRDIPRAIVITTVGAGLLFTVLAVFSQLVFPGSVFQDAESAANEVMLAAGGKFLASFFTAAYVAGAAGSALASQASVSRILYSMGRDGILPRRVFGSLSERFKTPVIAILVVSVISLLAVVIDLTTLASMISFGALVAFSAVNLAVIRSYLLLDGRRAPRDLLRYGLVPAIGLGLTLWLWTSLSALTLVIGLTWFAAGLAYLALHTGGFRRKAPTVTFSEQN

SEQ ID NO: 2441 - protein, 115 aa, Musa acuminata
PGREDKTLPREEGRLPDATKGSDHLRDVFGHMGLSDQDIVALSGGHTVGRCHKERSGFEGAWTSNPLIFDNSYFKELLSSEKDDLIQLPSDKALLTDPVFRPLVEKYAADVNACS

SEQ ID NO: 2442 - protein, 339 aa, Escherichia coli K12
MKSILIEKPNQLAIVEREIPTPSAGEVRVKVKLAGICGSDSHIYRGHNPFAKYPRVIGHEFFGVIDAVGEGVESARVGERVAVDPVVSCGHCYPCSIGKPNVCTTLAVLGVHADGGFSEYAVVPAKNAWKIPEAVADQYAVMIEPFTIAANVTGHGQPTENDTVLVYGAGPIGLTIVQVLKGVYNVKNVIVADRIDERLEKAKESGADWAINNSQTPLGEIFTEKGIKPTLIIDAACHPSILKEAVTLASPAARIVLMGFSSEPSEVIQQGITGKELSIFSSRLNANKFPIVIDWLSKGLIKPEKLITHTFDFQHVADAISLFEQDQKHCCKVLLTFSE

SEQ ID NO: 2443 - protein, 73 aa, Sinningia cardinalis
ISGTNGEVMPGQWEFQVGPSVGIEAGDHIWCARYLLERITEQTGVVLSLDPKPIEGDWNGAGCHTNYSTKSMR

SEQ ID NO: 2444 - protein, 370 aa, Lactococcus lactis subsp. lactis
MPETTTILYRGGVFMRAARFYDRGDIRIDEINEPIVKAGQVGIDVAWCGICGTDLHEFLDGPIFCPSAEHPNPITGEVPPVTLGHEMSGVVNFIGEGVSGLKVGDHVVVEPYIVPEGTDTSETGHYNLSEGSNFIGLGGNGGGLAEKISVDERWVHKIPDNLPLDEAALIEPLSVGYHAVERANLSEKSTVLVVGAGPIGLLTAAVAKAQGHTVIISEPSGLRRKKAQEAQVADYFFNPIEDDIQAKVHEINEKGVDAAFECTSVQPGFDACLDAIRMGGTVVIVAIWGKPASVDMAKLVIKEANLLGTIAYNNTHPKTIDLVSTGKIKLDQFITAKIGLDDLIDKGFDTLIHHNETAVKILVSPTGKGL

SEQ ID NO: 2445 - protein, 404 aa, Pyrococcus horikoshii
MMMMRAFIAENVRGIYAFDEDGKLVGKRYFTDKPEKILDGLLKGELVKDLEEFLNELREKGYDEFIFEHPELSRKAKELGFNATTEFPNLAGERLRSNPEEFLGENWFDDYYNVGVALTRMRIQEQSGARDKMVIQAIEALDDVDKVINLLVSRLREWYSLHFPELDEILPRHPQYVAFVKAIGHRDNVDEEKLRELGLSDEKIKKIIEAKEKTMGAWMDETDIAIVQHFAEEIDRLYKLRKELEDYIDKAMDDVAPNLKALVGAKLGARLISLAGGLKELAMLPSSTIQVLGAEKALFRHLRTGAKPPKHGVIYQYPAINRSPWWQRGKIARALAGKLAIAARVDYFSGEYIAEELKKELEARIKEIKEKYPRPPKRRKEERKGRKPWKEKKKKKKKKKGGRR

SEQ ID NO: 2446 - protein, 84 aa, Glycine max
GSRTSGSARTAMDASPELQQFLEQEKQKMVMSEMVTKLTNVCWDKCITSTPGSKFSSGETTCLTNCAQRYLDMSMIIAKRFQMQ

SEQ ID NO: 2447 - protein, 377 aa, Triticum aestivum
MAAASVSLKSSLFLSSPLSDFGGAAISISAQNRRRSWQPRGARMQVAAAADSKNILIMGGTRFIGLFLSRKLVQEGHQVTLFTRGKAPITQQLPGESDAEYAEFSSKVLHLKGDRKDFDFVKTSLAAKGFNVVYDINGREATEVSPILEALPNLEQFIYCSSAGVYLKSDLLPHFETDAVDPKSRHKGKLETESLLETSGVNWTSIRPVYIYGPLNYNPVEEWFFHRLKAGRPIPIPNAGNQITQLGHVKDLATAFIKVLGNPKASKQVYNISGSKYVTFDGLARACAKAGGFPEPEIIHYNPKDFDFGKKKAFPFRDQHFFASVEKASKDLGVTPEYDLLDGLTDSYNLDFGRGTFRKEADFTTDDMILGKKLVSV

SEQ ID NO: 2448 - protein, 548 aa, Rhizobium sp. NGR234
MDDRQVQPGRVIVVTGAAGGIGRALVDIFAANGDVVVAVDLPDSGVIELGQNLGEPHLGLEVDVSREDDVVALRALLEKRFSRIEVLVNNAGIGPTMAATADTALEDFQRALAINLVGAYSVACETAKLMKPGAAIVNVASLAGLLGNPKRSAYAASKAGLISITKSLACRWASRGIRVTAVAPGHVRTPMVAELERAGKLDVSAIRRRVPLGRIARPDEIARAVRFLASAQASYITGSTLVVDGGWMSVNQPGGAHQAQDRTPGAEFMRPVEDTDARTVIVMGGATGVGAAIARRFAENGDTVVIADGDGEEAVKLAGLLGDKHLSRRVDRTVETEVVSLFEELRERFGHLDVFVNGMNEILVPNTEESPEVLKRILDVNLTGAFTCVREAAISMRSGSVILNLGASLSLSPLAPSHAYGAYNAGIDMLTRCTAAELGPLGIRTATVAPGYIRTCAANRLAAVAGMDSASLRQRIPLGRVGDAEEVAEAAYFLASFDASYINGSILHVDGGLISSREAGWGSEVDGAISAEMRPQRRPAARWRLLSP

SEQ ID NO: 2449 - protein, 272 aa, Glycine max
MGIVEEAHNVKVLGSGTRHIVLAHGFGTDQSVWKHLVPYLLDEFRVVLYDNMGAGTTNPDYFDFERYSTLEGYAHDLLAILEELRVDSCIFVGHSVSAMIGTIASISRPELFAKIIMISASPRYLNDMEYFGGFEQEDLDQLFNAMAANYKAWCSGFAPMAVGGDMESVAVQEFSRTLFNMRPDIALSVLQTIFQSDIRQILNLVSVPCHIIQSMKDLAVPVVVAEYLHQHIGGDSIVEVMSTEGHLPQLSSPDIVVPMLLKHIRLDIATRH

SEQ ID NO: 2450 - protein, 278 aa, Zea mays
MSQEQPRRPSGHEETSGGGEQGAVRYGDVFPAVSGGLAEKPVARRTATMQSAENLVFGQTLKGGPAAAMQSAATTNERMGAVGHDQATDATAVQGVTVSETRVPGGGRIVTEFVAGQAVGQYLARDDDGGGGIAGPGAGAGVAGKDITKVTIGEALEATALAAGDAPVERSDAARIQAAEARATGLDANVPGGLARQAQSAAAANSWAWGDEDKATLGDVLANATARLVADKPVESADALGVAGAENRNRNDGTARPGGVAASMAAAARLNRNEAVWE

SEQ ID NO: 2451 - protein, 257 aa, Leuconostoc pseudomesenteroides
MTKKVAMVTGGAQGIGEAIVRRLSADGFAVAVADLNEAKSKEVATDIEKNGGTAIAVKLDVSDREGFFAAVKEVAEKLGGFDVLVNNAGLGPTTPIDTITPELFDKVYHINVAGDIWGIQAAVEQFKKNGNGGKIINATSQAGVVGNPNLSLYSSTKFAVRGLTQVAARDLAEQNITVNAYAPGIVKTPMMFDIAHEVGKNAGKDDEWGMQTFAKDIALKRLSEPEDVAAAVAFLAGPDSNYITGQTIEVDGGMQFH

SEQ ID NO: 2452 - protein, 141 aa, Glycine max
MDVEVRQIFNKFDKNGDGKISVTELKDMLAALGSKTTDEELKRMMEELDQNGDGFIDLKEFADFHCNGGAGKDDSKELRDAFDLYDVDKNGLISAKELHDVLRNLGEKCSLSDCRRMISNVDADGDGNVNFEEFKKMMTRS

SEQ ID NO: 2453 - protein, 67 aa, Zea mays
MAKFNVVQKKRRALIADKKRQLHGDPLTGKLKIKDQPLSLSGKRRRKLFKKWRRDHKDALQNGLVHM

SEQ ID NO: 2454 - protein, 538 aa, Oryza sativa (japonica cultivar-group)
MADDFLSSQPQPWPPLLQLSAAVLFFLLPLLYLLFLRGSNGEVRGRQGNSASAPSLPGPCRQLPVLGNLLQIGSRPHRYFQAVSRRYGPVVQVQLGGVRTVVVHSPEAAEDVLRTNDVHCCSRPPSPGPRMLSYNYLDVAFAPYSDYWREMRKLFVVELTSVSRVRSFAYARAAEVARLVDTLAASPPGVPVDLSCALYQLLDGIIGTVAFGKGYGAAQWSTERAVFQDVLSELLLVLGSFSFEDFFPSSALARWADALAGVERRRRRIFRQVDGFLDSVIDKHLEPERLSAGVQEDMVDALVKMWREQQDRPSGVLTREHIKAILMNTFAGGIDTTAITAIWIMSEIMRNPRVMQKARAEVRNTVKNKPLVDEEDSQNLKYLEMIIKENFRLHPPGNLLVPRQTMQPCLIGGYNVPSGTRVFINIWAMGRGPMIWDNPEEFYPERFEDRNMDFRGSNFELVPFGSGRRICPGVAMAVTSLELVVANLLYCFDWKLPKGMKEEDIDMEEIGQISFRRKVELFIVPVKHEQYQLMGHIN

SEQ ID NO: 2455 - protein, 449 aa, Helicobacter pylori 26695
MSNTTWSPTSWHSFKIEQHPTYKDKQELERVKKELHSYPPLVFAGEARNLQERLAQVIDNKAFLLQGGDCAESFSQFSANRIRDMFKVMMQMAIVLTFAGSIPIVKVGRIAGQFAKPRSNATEMLDNEEVLSYRGDIINGISKKEREPNPERMLKAYHQSVATLNLIRAFAQGGLADLEQVHRFNLDFVKNNDFGQKYQQIADRITQALGFMRACGVEIERTPILREVEFYTSHEALLLHYEEPLVRKDSLTNQFYDCSAHMLWIGERTRDPKGAHVEFLRGVCNPIGVKIGPNASVSEVLELCDVLNPRNIKGRLNLIVRMGSKMIKERLPKLLQGVLEEKRHILWSIDPMHGNTVKTSLGVKTRAFDSVLDEVKSFFEIHRAEGSLASGVHLEMTGENVTECIGGSQAITEEGLSCHYYTQCDPRLNATQALELAFLIADMLKKQHA

SEQ ID NO: 2456 - protein, 447 aa, Zea mays
MEMHADVDGCSVPLAVLLKRELCNQKVERPDILFGEANKSKKGEDFTLLVPRCHRTPGGSGGGENAGDDDTISVFAIFDGHNGSAAAIYTRENLISSVLAAIPPNLTSEEWKAALPRALVAGFVKTDKDFQGKGIINGMPAARSGTTVTFVIIDGWVVTVASVGDSRCILESAEGSIYFLSADHRLDANEEEVERVTASGGEVGRINIAGGAGIGPLRCWPGGLCLSRSIGDIDVGEFIVPVPHVKQVKLSNAGGRLVIASDGVWDALHFQEALNYTRGLPAEAAANRIVKEAVTSKGLRDDTTCIVVDILPPEKLSPPLKRPGKGVIKALFRRRPSDEMSEDQMDRGCLETDVVEEIYEEGSAMLARRLNINYPEGNMFKLHDCAVCQLEMKPGEGTSVHGNMPKHSRVDPWGGPFLCSSCQLKKEAMEGKLHSRNSQSAVQPVPK

SEQ ID NO: 2457 - protein, 167 aa, Citrus sinensis
MASQSKTSVHDFTVKDAKGQDVDLSIYKGKLLLIVNVASQCGLTNSNYTELSQLYDKYKNQGLEILAFPCNQFGAQEPGDNEQIQEFACTRFKAEFPIFDKVDVNGDNAAPLYKHLKSSKGGLFGDSIKWNFSKFLVDKEGNVVERYAPTTSPLSIEKDIKKLLETA

SEQ ID NO: 2458 - protein, 185 aa, Rickettsia prowazekii
MLIVPYKGIIPKIAKSAYVAKNSALIGDVVIGNNSSIWFNTVLRGDVESIKIGNNTNVQDGSVIHTSRFNGPVEIGNNITIGHLSLIHACTIHSNAFIGMSATIMDYAVIEEYAFIAAGSLVPPKKIIKSNELWMGSPAQFVRYLTDKDLQYMEDNIRNYVELANLYKTQSQCKSHSTNNCKKLS

SEQ ID NO: 2459 - protein, 790 aa, Neurospora crassa
MDGGNRCYSPSITTTNMKSSWASYCLLSCTSALVSAIDLPFQTYPDCVNGPLASLKVCDATLSPPQRAAALVAAMTTEEKLQNLVSKSKGAPRIGLPAYNWWSEALHGVAYAPGTQFRSGDGPFNSSTSFPMPLLMAATFDDELIEKVGEVIGTEGRAFGNAGFSGFDYWTPNVNPFKDPRWGRGSETPGEDILRIKRYAASMIRGLQGPLPERRVVATCKHYAANDFEDWNGSTRHDFDAKVTLQDLAEYYLSPFQQCARDSKVGSIMCSYNAVNGVPACANTYLMQTILREHWNWTAPGNYITSDCEAVLDIFANHHYAKTNAEGTALAFEAGTDSSCEYESSSDIPGAWTQGLLEQSTVDRALTRLYEGLVRVGYFDGNHSEYASLGWKDVNSPKSQEVALQTAVEGIVLLKNDQTLPLGLKTDPKSKLAMIGFWANDPKTLSGGYSGKPAFEHSPVYAAEAMGFNVTTAGGPVLQNSTSNDTWTQAALEAAQDANYILYFGGLDTSAAGETKDRTTINWPEAQLQLIKTLTKLGKPLVVVQMGDQLDNTPLLATKTVNSILWANWPGQDGGTAVMQILTGLKSPAGRLPVTQYPANYTAAVPMTDMNLRPSDRLPGRTYRWYPTAVQPFGFGLHYTTFQAKIAAPLPRLAIQDLLSRCGGDNANAYPDTCALPPLKVEVTNSGNRSSDYVVLAFLAGDAGPRPYPIKTLVSYTRLRDVSPGHKTTAHLEWTLGDIARYDEQGNTVLYPGTYTVTVDEPAQASASFVVEGEAVVLDRWPAPSGQVVV

SEQ ID NO: 2460 - protein, 261 aa, Streptomyces galilaeus
MPPAAERVAIVTGATSGIGLAVARSLAERGARVFVCARDGDRVAHTVKELREAGHDVDGASCDVRDTARVRAFVQEARDRFGPVDVLVNNAGRSGGGHTAQIPDELWLDVIETNLNSVFRMTREVLTTGGMLERGAGRIVNIASTGGKQGVALGAPYSASKHGVVGFTKALGLELAKTGITVNAVCPGYVETPMAERVRQGYAGAWDITEDEVLERFEAKIPLGRYSTPDEVAGLVGYLLSSTAASITAQAMNVCGGLGNY

SEQ ID NO: 2461 - protein, 305 aa, Miscanthus condensatus
IESVGEGVTDVAPGDHVLPVFTGECKECAHCRSAESNMCDLLRINTDRGVMIGDGKSRFSINGKPIYHLVGTSTFSEYTVMHVGCVAKINPEAPLDKVCVLSCGISTGLGASINVAKPPKGSTVAIFGLGAVGLAAAEGARIAGASRIIGVDLNPSRFEEARKFGCTEFLNPKDHKKPVQEVLAEMTNGGVDRSVECTGNINAMIQAFECVHDGWGVAVLVGVPHKDAEFKTHPMNFLNERTLKGTFFGNFKPRTDLPNVVELYMKKELEVEKFITHSVPFAEINKAFDLMAKGEGIRCIIRMEN

SEQ ID NO: 2462 - protein, 50 aa, Triticum aestivum
VQDDYLDCFGDPESIGKIGTDIEDYKCSWLVVQALEHADEPPQKKKKGGG

SEQ ID NO: 2463 - protein, 389 aa, Brassica rapa
MGYIGAHGAAALHRYKYSGEDHSYLAKYLLQPFWTRFVKVFPLWMPPNMITLMGFMFLVTSSLLGYIYSPQLDSPPPRWVHFAQGLLLFLYQTFDAVDGKQARRTNSSSPLGELFDHGCDALACALEAMAFGSTAMCGRETFRSWVISAIPLQGATWEHYFTNTLILREINGPTEGLALIYVSHLFTALVGAEWWAQQLGQSIPLFSWVPFVNAIQTSRAVLYMMIAFAVIPTVAINVSNVYKVVQSRKGSMLLALAMLYPFVVLLGGVLIWDSLSPINLIETYPHLVVLGTGLAFGFLVGRMILAHLCDEPKGLKTNMCMSLLYLPFALANALTARLNAGVPLVDELWVLLGYCIFTVSLYLHFATSVIHEITAALGIYCFRITRKEA

SEQ ID NO: 2464 - protein, 363 aa, Arabidopsis suecica
IRCKAAVAWEAGKPLVMEEVEVAPPQKHEVRIKILFTSLCHTDVYFWEAKGQTPLFPRIFGHEAGGIVESVGEGVTDLQPGDHVLPIFTGECGDCPHCHSEESNMCDLLRINTERGGMIHDGESRFSINGKPIHHFLGTSTFSGYTVVHSGQVAKINPDAPLDKVCIVSCGLSTGLGATLNVAKPKKGQSVAIFGLGAVGLAAAEGARIAGASRIIGVDLNSQRFDQAKEFGVTEFVNPKDHDKPVQQVIAEMTNGGVDRSVECTGSVQAMIQAFECVHDGWGVAVLVGVPSKDDAFKTHPMNFLNERTLKGTFFGNYKPKTDIPGVVEKYMNKELELEKFITHTVPFSEINKAFDYMLKGES

SEQ ID NO: 2465 - protein, 161 aa, Oryza sativa (japonica cultivar-group)
MAQESWKNESEETVHTPEAPILCVNNCGFFGSSMTNNMCSKCYRDFVKVTTMAAPVVEKKAFTPASSSKTPLEPAKPDEVPAAAVEDKQAAQEPPKPPSNRCLSCRKKVGLTGFQCRCGGTFCSTHRYTEAHDCTFDYKKAGRDQIAKQNPVVIAEKINKI

SEQ ID NO: 2466 - protein, 263 aa, Zea mays
MLELRLVQGSLLKKVLESIKDLVNDANFDCSTTGFSLQAMDSSHVALVSLLLRSEGFEHYRCDRNLSMGMNLGNMSKMLKCAGNDDIITIKADDGGDTVTFMFESPKQDKIADFEMKLMDIDSEHLGIPDAEYHSIVRMPSNEFSRICKDLSTIGDTVVISVTKEGVKFSTAGDIGTANIVLRQNTTVDKPEDAIVIEMNEPVSLSFALRYMNSFTKATPLSDTVTISLSSELPVVVEYKVAEMGYIRYYLAPKIEEDEEDKA

SEQ ID NO: 2467 - protein, 186 aa, Oryza sativa
  unsure (1)..(186): unsure at all Xaa locations
RPDYIRPVSIYPSRVPLRVGLLCASWTRRGNERSSDRWRLARRAGGKKKKKKKKNIGPLLCVNLVMHAAVLGLAGWSLSKFIDGETHHXXLGGNTSSGYLLVFSLMAGVVGVCSVLPRLLHVRAWRGETLAAAASTGLVSWALTAHSFGLACKHITLGNPRXXRLRTLEAFIAILTLTQLLXLILX

SEQ ID NO: 2468 - protein, 144 aa, Glycine max
MEDASASKFIPHQIGGVQNDVLRFGLHGVKSDIVGSHPLQSSLQSTRRMDEAMKKQCKVNLYGTAFPLKEELDRQILSRFQRPPGPIPSSMLGLETVTGSVDHFGFEDCLNDPRESETFRPLDMHHGMEVRLGLSKGPVYPSII

SEQ ID NO: 2469 - protein, 244 aa, Escherichia coli O157:H7 EDL933
MNFEGKIALVTGASRGIGRAIAETLAARGAKVIGTATSENGAQAISDYLGANGKGLMLNVTDPASIESVLEKIRAEFGEVDILVNNAGITRDNLLMRMKDEEWNDIIETNLSSVFRLSKAVMRAMMKKRHGRIITIGSVVGTMGNGGQANYAAAKAGLIGFSKSLAREVASRGITVNVVAPGFIETDMTRALSDDQRAGILVQVPAGRLGGAQEIANAVAFLASDEAAYITGETLHVNGGMYMV

SEQ ID NO: 2470 - protein, 173 aa, Oryza sativa
MAGVGRTMIAPLLVLNLIMYLIVIGFASWNLNHYINGETNHPGVAGNGATFYFLVFAILAGVVGAASKLAGVHHVRSWGAHSLAAGAASALIAWAITALAFGLACKEIHIGGYRGWRLRVLEAFVIILAFTQLLYVAMLHGGLFSGNHAAGAGGYGGDYPADHHHKPAAAARV

SEQ ID NO: 2471 - protein, 458 aa, Glycine max
  unsure (1)..(458): unsure at all Xaa locations
MLDLNLNADSASDLQMESSGSFNSSVVNAADTDDSCSYGDAVAYNFAILNNAATSDGLPLGAAGEPSVRTIQLFPAADSGASAAAWLDFSSKVDQHGAPPEQRITPRQQQVKKSRRGPRSRSSQYRGVTFYRRTGRWESHIWDCGKQVYLGGFDTAHAAARAYDRAAIKFRGVDADINFNVSDYDEDIKQMSNFTKEEFVHILRRQSTGFSRGSSKYRGVTLHKCGRWEARMGQFLGKKYIYLGLFDSELEAARAYDKAAIKCNGREAVTNFEPSLYEGEVISQSDNEDTKQSLDLNLGIAPPSYSDGQIKNTPSNGSGMIAPQSWDDIPLDXRVMFEHSGSRSRTIQPPHHGFSIASGQHPSVWNGSNFFPIYEEPAIEKRMEAAPVPNWAWQVQGPYGRATLAPPFSTAASSGFPSTIIPSAADTQIRFPNMTFLHSHFPSSITNSGTISPFFFGS

SEQ ID NO: 2472 - protein, 290 aa, Chlorobium tepidum TLS
MLKSWQLLKSFHCRSNSFINQEREVFMAKYKLDVNIANVNEVYDGAGGILWEMLMGEQIHVGAEAETDVLARKAGVTAETHLLDVCSALGGPARYLAKNYGCRVTGLDATQRMHAEAIRRTIEAGLSGKIDYVLGNALDMPFPASSFDVVWGQDAWCYITDKQRLIGECARVLKPGGVLAFTDWLEAGPMTDEELTALNTFMVFPYMETLDGYAMLAEQAGLTVIEKEDLTPDFAAHVQGYLDMVQNQYRQAIVDNYGQEMYDAVEQGIMLWRDASAAGKVGRGRLVARK

SEQ ID NO: 2473 - protein, 375 aa, Zea mays
MVMANPDMLPPGFRFHPTDEELILHYLRNRAANAPCPVAIIADVDIYKFDPWDLPSRAAYGDKEWYFFSPRDRKYPNGIRPNRAAGSGYWKATGTDKPIHSSTTAGESVGVKKALVFYEGRPPKGTKTNWIMHEYRLAADAQAAHAYRPMKFRNASMRLDDWVLCRIYKKASCQVPAMAAVPQLSDHDQDEHCGFDDNPYAAMLLQGASYSYPAPPHAAAGAQRMPRIPSLTELFNDPSLAHFFEEGGGMQDMARLSNPQQQQQQQHAPLLARPVTSQQLLLNNGHSMPGGGQAQMDPHPPAAAASTSSAAAGNNKRKRSSPTTDAGALSSSQASEAKKPNGSCFGATFQIGNGLQGPSLGHHHMPLHSNMGTMN

SEQ ID NO: 2474 - protein, 154 aa, Pisum sativum
MKGGKSKGESKKAETKLAVNKKGAPATKGGKKPAKGKEPKDPNKPKRPPSAFFVFMEDFRKQFKKGNADNKAVSAVGKAAGAKWKSMTEAEKAPYAAKAEKRKAEYEKSMKSYNKKQAEGPAAVEEEEESEKSESEVHDENDDEEESEEEDDDE

SEQ ID NO: 2475 - protein, 300 aa, Oryza sativa (japonica cultivar-group)
MPEHGSKPDISFAGRFTASAIAACFAEVCTIPLDTAKVRLQLQKNVAADAAPKYRGLLGTAATIAREEGAAALWKGIVPGLHRQCIYGGLRIGLYEPVKSFYVGKDHVGDVPLTKKIAAGFTTGAIAISIANPTDLVKVRLQAEGKLAPGARAYAGAMDAYAKIVRQEGFAALWTGIGPNVARNAIINAAELASYDQVKQTILKLPGFKDDVVTHLLSGLGAGFFAVCVGSPVDVVKSRMMGDSAYTSTIDCFVKTLKNDGPLAFYKGFLPNFARLGSWNVIMFLTLEQVQKLFVRKPGS

SEQ ID NO: 2476 - protein, 363 aa, Streptomyces coelicolor A3(2)
MRRARAAVVREPGAPFTVLEVELEDPRPREVLVRMTAAGVCHTDLGIQAGWPRRLTPMVFGHEGAGRVEAVGAEVTGLVPGDTVCLTFASCGGCGQCTAGHPAYCDAARDLNLSGGRGDGSTPLRLDGAPLHGGFFGQSSFATYAVVHEHGVVRVPADLPATLAAPLGCGGQTGAGTVLNRLRPEPGTSLVVLGAGGVGLSALMAAVAVGCDPVLAVDPVASRRDLARALGARAALPPDDALVAAVRQLTDGGAHHVVDTTGRPGMLDRAVAALRPRGALALLGLGGEVTFDMMRLMTKGVRLHGVMEGDSDPARFVPELIALHRRGLFPVDRLVTTFAFEEIGAAVAAMRDGSAVKPVLTFS

SEQ ID NO: 2477 - protein, 250 aa, Brassica napus
MNSVSTFSELLGSENESPVGSDYCPMLAASCPKKPAGRKKFRETRHPIYRGVRLRKSGKWVCEVREPNKKSRIWLGTFKTAEIAARAHDVAALALRGRGACLNFADSAWRLRIPETTCAKDIQKAAAEAALAFEAEKSDTTTNDHGMNMASQVEVNDTTDHDLDMEETIVEAVFREEQREGFYMAEETTVVGVVPEEQMSKGFYMDEEWMFGMPTLLADMAAGMLLPLPSVQWGHNDDFEGVADINLWSY

SEQ ID NO: 2478 - protein, 155 aa, Zea mays
  unsure (1)..(155): unsure at all Xaa locations
FWFVGEREEMAASDVEYRCFVGGLAWATDDHSLNNAFSTYGEVLESKIILDRETQRSRGFGFVTFSXXXAMRSAIEGMNGKELDGRNITVNEAQSRGGRGGGGGGYGGGRRDGGGYGGGGGGYGGGRGGYGGGGGGYGGGNRGGGYGNNDGNWRN

SEQ ID NO: 2479 - protein, 145 aa, Zea mays
MAASDVEYRCFVGGLAWATDDHSLNNAFSTYGEVLESKIILDRETQRSRGFGFVTFSTEDAMRSAIEGMNGKELDGRNITVNEAQSRGGRGGGGGGYGGGRRDGGGYGGGGGGYGGGRGGYGGGGGYGGANRGGGYGNNDGNWRN

SEQ ID NO: 2480 - protein, 152 aa, Glycine max
MVKAVAVLGSSEGVTGTIFFTQEGNGPTTVTGSLAGLKPGLHGFHVHALGDTTNGCLSTGAHFNPNNNEHGAPEDENRHAGDLGNVNVGDDGTVSFSITDSQIPLTGPNSIIGRAVVVHADSDDLGKGGHELSKTTGNAGGRVACGIIGLQG

SEQ ID NO: 2481 - protein, 319 aa, Streptomyces coelicolor A3(2)
MPYRRTGRSGLKLPALSLGLWHNFGPDRPVETQRAILRRAFDLGVTHFDLANNYGPPPGSAESALGEALKADFAPYRDELVISTKAGYLMWPGPYGEWGSRKSLLSSLDQSLSRMGLEYVDVFYSHRPDPKTPLEETMGALHTAVQQGKALYVGVSNYSPEQTREAARILAELGTPLLIHQPRYSMLDRRPETGGLLDALDELEVGSIAYSPLEQGLLTGRYLNGIPEDSRAASDSPFLNSDAVTEELVGKLRGLNEIAGSRGQSLAQLALAWVLRQGRVTSALVGASSPRQLEDSVAAIGNLDFDADELARIDKIVQG

SEQ ID NO: 2482 - protein, 386 aa, Listeria monocytogenes EGD-e
MKHVFPTYKRFPIDLVNGTGTVVTDKNGKTYLDFTSGIAVCNLGHCPTNVAEAVQQQLGNIWHTSNLYECALQDSVAELIADGKERLVFFCNSGTESNEAALKLARKYTGKEKIITFEKSFHGRTFGSMSATGQAKIHQGFGELVPGFTYVPYNDIEAFRAEIDENTAAVMLEVIQAEGGVIPANAAFLLEVQLLCKKMGALLIIDEVQTGLGRTGTLYGFEQIGLDPDIFTLAKGLGNGLPIGAMVGKSDLISAFGPGSHGSTFGGNKLALAAAKEILLTMKQTGFLEEVNAKADYFRNLLEANLEVLDNVSDIRGGGFLIGIELENAAEPVITELRDKGLLILTAGTNVLRILPPLTVSYAEIDQAIYLLKSVLENQLIGSEEG

SEQ ID NO: 2483 - protein, 344 aa, Oryza sativa
  unsure (1)..(344): unsure at all Xaa locations
XYPSNDLKQLIRAVARISPSRCRSATRRRRSPCRSRSRRPTTTTSAPPAGGAMHPXXASAGAAPPPPLEELERVRRVGSGAGGTVWMVRHRGTGKEYALKVLYGNHDDAVRRQIAREIAILRTAEHPAVVRCHDMYERGGELQILLEYMDGGSLDGRRIADERFLADVARQVLSGIAYLHRRHIVHRDIKPVNLLYDFGARVKIADLGVGRILNQTMDPCNSSVGTIAYMSPERINTDLNDGAYDGYAGDIWSFGLSILEFYMGKFPFGXNLGKQGDWAALMCAICYSDPPEPPAAVSPEFRSFVGYCLQKNPAKRPSAAQLMQHPFVAGPQQQPVAAPPPAAS

SEQ ID NO: 2484 - protein, 423 aa, Mesorhizobium sp. ZJ15B7
WGFDGSSTMQAEGRSSDCVLKPVALYPDPARTNGILVMCEVMMPDGVTPHESNSRATILDDEDAWFGFEQEYFFYKDGRPLGFPESGYPAPQGPYYTGVGYKNVGDVARKIVEEHLDQCLAAGINHEGINAEVAKGQWEFQIFGKGSKKAADQIWMARYLLLRLTETYGIDIEFHCKPLGDTDWNGSGMHCNFSTKFMREVGGKAYFEALMAQFDKNLMDHIAVYGPDNDKRLTGKHETAPWNKFSYGVADRGASIRVPHSFVKNDYKGYLEDGRPLGANEQVVEIETVPTGSLGLDIALGVGGLPRGRIIEIYGPESSGKTTLALHTVAEAQKKGGICAFVDAEHALDPVYARKLGVDLENLLISQPDTGEQALEICDTLVRSGAIDVLVVDSVAALTPRAEIEGEMGDSLPGLQARLMSQA

SEQ ID NO: 2485 - protein, 365 aa, Hordeum vulgare
MWRCILLSAVVVALALAPAPALGVPFTEKDLASEESLRGLYERWRSHYTVSRRGLGADAEERRFNVFKQNARYVHEGNKRDMPFRLALNKFADMTTDEFRRTYAGSRVRHHLSLSGGRRGDGGFRYGDADNLPPAVDWRQKGAVTAIKDQGQCGSCWAFSTIVAVEGINKIRTGKLVSLSEQELMDCDNVNNQGCDGGLMDYAFQFIQKNGITTESNYPYQGEQGSCDQAKENAQAVTIDGYEDVPANDESALQKAVAGQPVSVAIDASGQDFQFYSEGVFTGECSTDLDHGVAAVGYGATRDGTKYWIVKNSWGEDWGEKGYIRMQRGVSQTEGLCGIAMQASYPTKSAPHASTVREESHTDEL

SEQ ID NO: 2486 - protein, 851 aa, Schizosaccharomyces pombe
MTARNSASIPTSIRKTSENEVSGDETPAGVGNLSTKTASKTSLTFRQSSSDESTSSYSGNHHNINIQHHPNRPFRTNSSSFSPNDYSISESPSKSKKDGVHVSAVQLDNETDSEVESEVEELERELEAIEDSVYPEVRAAVNPTDDVNLPVNTWRTWVLTTIFVIVFAAVNQFFSLRYPALSISFIVAQLILFPLGKLLNLLPNWKIGYGRFSFYLNSSPFNVKEHAAITIAVSLTSSTAYATNILSAQTSFYKQNLSWGYKILIVLTSQMLGYGFAGLTRRWIVYPAAMIWPQTLVSTVLFRTLHGNSGNDIGVLKNNRISANGWTISRYRFFAYVMIGSFVFYWFPGFIFKGLSYFTVLCWIWPKNRVVNQLFGYNSGLGILPLTFDWQQVVYNSNPLASPWWVICNTFGSVVLIFWIVVPILYYKGVWFSNYLPMLSSSTFDHTGVSYNSSRVLNSDYSFNHTKYESYSPLYMPMSYSMSTALNFAAVTAIFTHCALYNGKDIWQRLWKESGKDECIHRKLMRNYKEAPQWWYATLFIVVFGLTIFTVRYYDTQCPVWALIVALLIFIVNFIPQGVLEGITNQHVGLNIITELIGGYILPGKPLANLMIKLYGFIPMRQGLEFSRDLKLAQYMKIPPRILFFVQLFATILGGITQVAVQEWMNYHIPGICTTSQSNGFTCPNGRSIYNASLIWGAIGPAKMFSKGKPYYPLIFFFLIGAVAPFITWGLRKRFPKSWIGKLNAPVLFTGPGNIPPATGINYSSWAIVGFIFNYVIRKRAIHWWRKYNYVLAAAMDSGVAVAGVVIFLCVSYPGGKITWWGNTVYTKTYDWKSVPYRSLGPNETFGYTNW

SEQ ID NO: 2487 - protein, 477 aa, Thermoplasma acidophilum
MSGNSDSKLKANSVGFMPLLGQAIAMISPLGAVAATMTGSASIALGSLPLAYLIAIFAVLFWINTPYQYSRKIASAGGFYTYNTEGAGPYYGSVSGYILFFSYYMTYTNAILFITGVFIPGLFSIFFGITLNAYIWIPTLIVFGLIILLPAYLGIEGSTKYSFASSIIQIMLLVILSIAIIIIKGPANTLAPFTPKPAGGFGPVFVGMILAIFSMSGSSAVVSLGEEAKQPKKNIRNALLISFLITGVVFVLTSYALTIGWGINNMSTFAESGTSLAYGNGVPGIIVALKYLGMPMAIAMMIFAVNSLYTGSLAPLNSAGRMLYAMARDGIAPKIFSRVHGKRKTPHIALIFIAVSGMAVSLIAGLIMGPFMGFLYLVTASAVALFIGHIMTDISLPIAFRKFREFSIAKHAILPGISIVLLLIGIYYSFFPPSYPTNIAIISAVVFMIVVTIALNIYLKRKGITENMIAETSPSTN

SEQ ID NO: 2488 - protein, 517 aa, Zea mays
MDPSSAGSGGNSLPSVGPDGQKRRVCYFYDPDVGNYYYGQGHPMKPHRIRMTHSLLARYGLLNQMQVYRPNPARDRDLCRFHADDYINFLRSVTPETQQDQIRLLKRFNVGEDCPVFDGLYSFCQTYAGASVGGAVKLNHGHDIAINWSGGLHHAKKCEASGFCYVNDIVLAILELLKHHERVLYVDIDIHHGDGVEEAFYTTDRVMTVSFHKFGDYFPGTGDIRDIGHSKGKYYSLNVPLDDGIDDESYQSLFKPIMGKVMEVFRPGAVVLQCGADSLSGDRLGCFNLSIKGHAECVRYMRSFNVPLLLLGGGGYTIRNVARCWCYETGVALGQEPEDKMPVNEYYEYFGPDYTLHVAPSNMENKNTRQQLDDIRSKLLDNLSKLRHAPSVHFQERVPDTEIPEQDEDQDDPDERHDPDSDMEVDDHKAVEESSRRSILGIKIKREFGENATRVQDGGRVASEHRGLEPMAEDIGSSKQAPQADASAMAIDEPSNVKNEPESSTKLQGQAAAYHKP

SEQ ID NO: 2489 - protein, 157 aa, Zea mays; identical to SEQ ID NO: 1554

SEQ ID NO: 2490 - protein, 455 aa, Bacillus halodurans
MKASQAESEKMLKWWELSLLGVGCIIGTGFFLGSSIAIQMAGPSVLLAFILAGIGTYIVFDALAQMTSADPEKGSFRSYAKKAYGRWAGFTSGWVYWASEMLIMGSQLTALSIFSRFWFPDVPLWIFASGFAVLGIIVILTGSKGFDRIENLFAVMKVAAIVMFIALAILALFGVFRAGPEGAGIPRTWNGLFPEGFLGLWPALIFGFYAFGGIEIMGLLANRLEEKGDAAKSGRAMLLLLTFLYVVSVGLALILVPLNRFNTETSPFITALKPYGLPIVSHLFNGVLIIAGFSTMVASLFAVTSILVTLAADKDAPNLFAKKVKNKIALPAIGLTAIGMALSVVLSLLIPGRIYEYFTTAAGLMLLYNWLFIIASSGKLIQYRLTKRWIGTLFILLAVIGTLFHRTSRPGFLFSLGFLVVIGIVTLMMKKRWKQEEGDGKKRPSIFVKLKPNSE

SEQ ID NO: 2491 - protein, 595 aa, Glycine max
  unsure (1)..(595): unsure at all Xaa locations
MAVDSAISSPLGPPACEKDAKALRFIEEMTRNADAVQXRVLEEILTRNAQTEYLKRFELDGAADRQAFKSKIPVITYEDVQPEIQRIANGDRSPILSAHPISEFLTSSGTSAGERKLMPTIKEELDRRQLLYSLLMPVMNLYVXPGLDKGKGLYFLFVKSETRTPGGLLARPVLTSYYKSDHFKTRPYDPYNVYTSPNEAILCSDSFQSMYTQMLCGLIERHHVLRLGAVFASGLLRAIRFLQLNWPELAHDIQTGTLNSRITDPAIRSYMDKVLKSDPELAQFVTQQCSKDNWEGIITRIWPNTKYLDVIVTGAMAQYIPTLNYYSGGGLRXACTMYASSECYFGLNLNPMCKPSEVSYTIMPNMAYFEFLPHDPKPGSTSSKLVELADVEVGKEYELVITTYAGLYRYRVGDILRVTGFHNSAPQFHFVRRKNVLLSIDSDKTDESELQKGIENASKLLSEFNTSVVEYTSXDTTTIPGHYVIYWELLTKDSTNSPSHEVLNRCCLEMEECLNSVYRQCRVADHSIGPLEIRVVRNGTFEELMDYAISRGASINQYKVPRCVNFTPIMELLDSRVVSVHFSQELPHWTPERRR

SEQ ID NO: 2492 - protein, 106 aa, Zea mays
MDTSSPAALVNAKIMNMFVGQRVRTVVQVQHNDGGMLVGQSPDGHQLSIKSAMDVPVSHFMEVYGIAENSQTIRAEVCTDFGPDFDPETFNQLCNLASNKFKHMFL

SEQ ID NO: 2493 - protein, 411 aa, Schizosaccharomyces pombe
MALYSISKPVGSKINKHSYQDENTLVGKQALSKGTEKTKLSTNFEINLPRRTVLSDVSNVGKNNADEKDTKKAKRSFDESNLSTNEEADKPVESKFVKKLKVYSKNADPSVETLQKDRVSNVDDHLSSNPLMAEEYAPEIFEYIRKLDLKCLPNPKYMDQQKELTWKMREILNEWLVEIHSNFCLMPETLYLAVNIIDRFLSRRSCSLSKFQLTGITALLIASKYEEVMCPSIQNFVYMTDGAFTVEDVCVAERYMLNVLNFDLSYPSPLNFLRKISQAEGYDAQTRTLGKYLTEIYLFDHDLLRYPMSKIAAAAMYLSRRLLRRGPWTPKLVESSGGYEEHELKEIAYIMLHYHNKPLEHKAFFQKYSSKRFLKASIFVHQLVRQRYSVNRTDDDDLQSEPSSSLTNDGH

SEQ ID NO: 2494 - protein, 457 aa, Shigella flexneri 2a str. 2457T
MESKNKLKRGLSTRHIRFMALGSAIGTGLFYGSADAIKMAGPSVLLAYIIGGIAAYIIMRALGEMSVHNPAASSFSRYAQENLGPLAGYITGWTYCFEILIVAIADVTAFGIYMGVLFPTVPHWIWVLSVVLIICAVNLMSVKVFGELEFWFSFFKVATIIIMIVAGFGIIIWGIGNGGQPTGIHNLWSNGGFFSNGWLGMVMSLQMVMFAYGGIEIIGITAGEAKDPEKSIPRAINSVPMRILVFYVGTLFVIMSIYPWNQVGTAGSPFVLTFQHMGITFAASILNFVVLTASLSAINSDVFGVGRMLHGMAEQGSAPKIFSKTSRRGIPWVTVLVMTTALLFAVYLNYIMPENVFLVIASLATFATVWVWIMILLSQIAFRRRLPPEEVKALKFKVPGGVATTIGGLIFLLFIIGLIGYHPDTRISLYVGFAWIVVLLIGWMFKRRHDRQLAENQ

SEQ ID NO: 2495 - protein, 359 aa, Triticum aestivum
  unsure (1)..(359): unsure at all Xaa locations
MAAAAVALSNGSGGDSKAEFAEIYSRLKXEMLDDPAFEFPHESVQSTDRTLHYNVLGAKCNRGLSVVDSYKTWKGVDVLXGKEETVLACTLGWCIEWLQXAYFLVLDDIMDDSQTXRGRPCRLGGPPVGLKAVNDGIILRNLISRILQRHFRGKPYYVXDLIDLFNEVEFTDSFRASCWDLITTHEGEKDLTKYNLNVHRRIVQYKTAYYSFYLPVACALLLSGENLDNFGAMXKNILVEMGTYFXVQDDYXDCFGDPESIGKIGTDIEDYKCSWLVVQALEHADESQKGILLENYGKSDPESVAKVKDLYKELDLETAFHKYERESYNKLIADIEAQPRKAVQKVLMSXLEKIYKRQK

SEQ ID NO: 2496 - protein, 601 aa, Oryza sativa
  unsure (1)..(601): unsure at all Xaa locations
MATYYSSPGSERDSQTMYSRDPGSASYPMSSALGNLLYLNNPSSGPYTEFSGILQPQQNCMEMPGPGHASAMSQDPSSRESDMLSSHQGQRSFSHVKDMKNEMLMHMMDGAQGSGSELIHDDAHTGSQLEFGVLNNHNSSSVPSMQSQGLSLSLNTQIMAPSLPYWSIKPDMLTPQSYHDNLRGEDMRMKNLQSEASRAIRNSRYLKAAQELLDEVVSVWKSIKQKAQKEKVESGKADGKETDGGPKSEGVSSNPQESGANAAPELSTAEKQELQNKMAKLMAMLDEDAINDQINVIRKKLGEEENSSGKEGKLTRLRYIDQQLRQQRAFQQYGMIPQNAWRPQRGLPENSVTILRAWLFEHFLHPYPKDSEKLMLARQTGLTRSQISNWFINARVRLWKPMIEDMYKEEIGDLEQDSNSSSDNAPRSKDKMASSEDKEDLKNSRARICETSQLSESRTSIGAMNVGGAPVGFQNEPNPDDSFMNLMLKDQRSNEVDGGLLLHNTVAQHSDENARFMAYHLAELGRYGNGNVSLTLGLQHSSSNLVXXNAQPGFPGVNEDDIYNATAPLGVTVASSDYDSMNQMDQRQRFEHSPLLHDFVA

SEQ ID NO: 2497 - protein, 350 aa, Listeria innocua
MRAAVLYENNVIKAEQIDEATCGKDQVRVEVKAVGICGSDIHKMQTRWKYPLPAVMGHEFAGVVTEIGSEVTNVAIGDRVAGIPLEPCMECNYCKAGDFALCDNYRMVGSHFHGGFAENVVMKADNVISIGDLDFEEGAMIEPLAVSMHGVLGIEPRLGDTVIVFGIGTIGILVVQCLLLAGVKDIIAVDISDKKLADAREFGCKYTINPKNEDLKERVFAYTNGLGADIALECAGSKITQEQCLLVTKKKGKVGYLGIAYADVLLHEEAFENIFRRELTLKGFWNSYSAPFPGEEWRTSIEFVKQGRIKLKPLISHRYKLEETKEAFDMILSREHDYNKVMILPQKGDD

SEQ ID NO: 2498 - protein, 369 aa, Neurospora crassa
MLLLFALGSNGSGQLGIGHKEDVSVPKDAHFDADLPATASITKIVAGGNHTIILTTTGDIYWSGDPNTGACGKFTQTQISQPPRFHPVDISSVSTPQDPFRVGMVAAAWEASIFTRLDAQGRNTRVYSCGTGLKGELGLGTFIFRTATPSLIPDFPPPDTEVVDLAACMGHVVAVLSNGDVWGWGNGRKGQIGAPEDIVHSPRKIEGLGFKVVKAVCGKEFTCFLGSPESGNIMVLGSDKWGIRGEVPDQVVGWREVGASWGNLFILKGDGSLLSWGRNDHGQLAPANLPQTKHIAVGSEHALALSEEGDVTAWGWGEHGNCGPLSSSDVTKGQQNVIASSKFIPSGAKITTIGAGCATSWVAIQMPST

SEQ ID NO: 2499 - protein, 274 aa, Oryza sativa
MERGEGRRGDCSVQVRKKRTRRKSDGPDSIAETIKWWKEQNQKLQEENSSRKAPAKGSKKGCMAGKGGPENSNCAYRGVRQRTWGKWVAEIREPNRGRRLWLGSFPTALEAAHAYDEAARAMYGPTARVNFADNSTDANSGCTSAPSLMMSNGPATIPSDEKDELESPPFIVANGPAVLYQPDKKDVLERVVPEVQDVKTEGSNGLKRVCQERKNMEVCESEGIVLHKEVNISYDYFNVHEIVEMIIVELSADQKTEVHEEYQEGDDGFSLFSY

SEQ ID NO: 2500 - protein, 110 aa, Lolium perenne
MGRSPCCEKMGLKRGPWTAEEDKILVAHITSFGHGNWRALPKQAGLLRCGKSCRLRWINYLRPDIKRGNFSDEEEQSIIQLHQLLGNRWSAIAARLPGRTDNEIKNYWNT

SEQ ID NO: 2501 - protein, 350 aa, Listeria innocua
MAYKITSLAGDGIGPEIMASGIKILEAIAAKYNHTFEIESHPFGGAGIDAAGDPIPPETLKACQNADAILLGAIGGPKWDNAPKRPEDGLLALRKALGLFANIRPIQVPSSITHLSPLKKEIVENTDFVVVRELTGGLYFGEPKHWDDVAAVDSLTYTRVEIERIIEKAFEIASTRNKKVTSVDKANVLASSKLWRKIAEEVASRHPDITLEHLYVDAAAMLMIQRPTTFDVIVTENLFGDILSDEASVITGSLGMLPSASHAENGPSLYEPIHGSAPDIANQNIANPMSMISSVSMMLRQSFSLFKEADAIDAATARTMQAGFLTADLGGNTSTTDFTNEVLKQIEGGE

SEQ ID NO: 2502 - protein, 385 aa, Vitis labrusca
MDDAKISELKQFVNSVKSDPSILHNPSLSFFKSYLQSLGARIPAKPDKCGCGTSDHGEHVDAKKTNLCSEDDKFEDDIVESDIELDDTDVVEPDNDPPQKMGDLSIDVTEENQDAAQMLKSKAMEAISEGKLDEARDNLTEAIMLNPSSAILYATRASVYVKLKKPNAAIRDADAALKINPDSAKGYKIRGMARAMLGLWEEAATDLHVASRLDYDEEIALVLKKVEPNARKIEEHRRKYARLCKERELRKYGHQKQQQQAQPHDPEAAAALKDGQVMAIHSSSELETKLKAASKTSRLAILYFTATWCGPCRYISPVFTSLSGKYPKVVFLKVDIDGAQDVAVSWNVSSVPTFFFIKNGKEIDKVVGVDKSALETKIAQYAGQS

SEQ ID NO: 2503 - protein, 641 aa, Streptomyces avermitilis MA-4680
MHNFGLPPSATPVMTGGLADSVFETALGNPGLPQIARRSHDSPGTWTQVSAAQLRDEVVDLARGLIASGIRPGNRVAIMSRTRYEWTVLSCALWSLGAEIVPLYPNSSHEQVAWILKDADCVGVLVEDEQGVMTVGSVCAGLPRLRHVWQLDSGSLDELVERGRPVPAATVDSLRRIVLPDSTAVIAYTSGTSGHPRGCALSHRSLASTCDTLLDGWRHTAASPGEQPAVLAFLPFSHVYGLMVQGLCLRGGLLMGHEPDLRAESLAAAFRSFRPTYLYAVPSVFEKIYKSFLTAAERTGRGTLFERAARTAQDYAEAAEQQRLGTGPGPGFDLKLQHALYERAVYRKLRDSLGGRICGAVSGGSPLNRELTLFYAGIGIMVHDGYGLTETSGGITAQPVGREKFGTVGRPLPGTDIQVAEDGEILVRGPSVFQGYVNDIPGTRASLRDGWLATGDLGRLDSEGYLSITGRKKDTIVTSSGKSVAPSVLEERLRVHPLIHQAVIVGENRPCVGALITLDPDYLPHWRTMVAAQADAPSREAREQNAVLQEVTRAVAAANSFVSRSESIRVFRILPEPFDPANGLLTPSMKLRRDVIVRRYATEIDAMYQSSARTRVKSLSDEPVSWEEHEENEDDVFRRVR

SEQ ID NO: 2504 - protein, 333 aa, Cytophaga hutchinsonii
MSTVLVTGGAGYIGSHAVRALANLNYQVIVLDNLIYGHREAIVNSEVRFVEGDIANKALVIDILKTYKVDAVMHFAAFAYVGESVTEPTKYYNNNLAASITLLDAMREAGCKNIIFSSTCASYGSPKYMPIDEAHPQEPINPYGASKWMLERVIKDYHHAYGINYAFLRYFNASGCSADGLIGEDHDPEPHLIPLILKAIKGERDAITVFGTDYETPDGTCVRDYIHVEDLADAHIKAFTYLLSGKGPVICNLGTGVGYSVKEMIDAAERATGKKVPVKYGERRAGDPSHLVANAEKAWKELGWKARYVNIEEIIATAWKWENGERSGRYGKN

SEQ ID NO: 2505 - protein, 227 aa, Zea mays
MASLDAVRGDLALLILYLNKAEARDKICRAIQYGSKFISNGEPGPAQNVDKSTSLARKVFRLCKFVNDLHALISPPAKGTPLPLILLGKSKNAMLSTFLFLDQIVWAGRTGIYKNKERAEFLGRIAFYCFLGSNTCTAIIELAELQRLSTSMKKLEKELKHQELYKNEQYRMKLHKSNERLLALVKSSLDISKPPSKPEQSPILVPSPVSQENNPFSDGWDSRLCPP

SEQ ID NO: 2506 - protein, 276 aa, Streptomyces sp. TP-A0274
MTQQSDTTADSVGEVYDQFADAGASTAMGGNIHVGYWDDDDPEVPIAEATDRLTDLVAERLALRPDRQLLDVGCGIGVPALRIAGAHDVRVTGITVSQQQVTEAAARAVESDAGGRVSFRLADAMDLPFEDVSFDGAFAIESLLHLPDQTPALKEIHRVVRPGGRLVIADLCQRQPFTGADKEVLDGMLLMYEIAGINTPEEHHARLAEAGWELLELTDIGEQVRASYGHAAAAFRGLAGALDAGAAQQMNAAADLMEAFGGHPYAGYVLITAQRS

SEQ ID NO: 2507 - protein, 457 aa, Leuconostoc mesenteroides subsp. mesenteroides ATCC 8293
MSDSKGDSNLPKRGLQNRHVQLIAIGGTIGTGLFMGAGNSIHFAGPSILLVYLVIGMFMFVVMRAIGELLYADPSQHTFISFITKFLGNRAGFFARWSYWLTVVFMGMAELTAVAKYIQFWLPDLPSWLIQIVMLILLTSINLIAVALYGETEFWFAMIKIVAILSLIVTGIIMALTGFETPVGKVAFSNVWHHFELFPNGVGNFINAFQMVMFAFVGMEFIGMTTAETENPRSVLPKAINQIPWRILFFYLGALFIIMTIYPWQKIPEDQSPFVMVFQLAGVKWAAALINFVVLTSAASALNSVLFSASRNFFALSFQSKAKFLQPFRKTSKTQLPVNAVLVTSLMVAFSALISVIPSITNAFSFVTSASTDLFLMIYVLILFAYMKYRKSDSYMPDGFLVIAPKTLVPLAILFFSFVFITLFFNPESRLPAIGATIWMVVFGCISMKQPKQALNK

SEQ ID NO: 2508 - protein, 408 aa, Schizosaccharomyces pombe
MSLNNLSNSYNQYLAQESHQILRHLFLNKQYSPLVKRDDDSSATVTCGGDANEFNEYGHLGYRIGAIFVILATSLIGMNLPLVLSKITKNRPNVYIEYLYLFARYFGSGVILATAFIHLLAPACNKLYDPCLDDLFGGYDWAPGICLISCWFILLLEVLLNRYVEWRFGMEIGDHHGPTLGAKQHSHSHEDGAHGVHEHPVYDIEECADGVEHECVKDDLEEVKLEPYTNTDSTDLTTKEEARSFLLKQQLTAFIILESSIILHSVIIGLTTAVSGEEFKTLFPVIIFHQAFEGCGLGSRLAGMAWGPKTAWVPWVLGVIYSLVTPIGMAAGLGVREHWDPLAHGSYAAQGVLDAISSGILVYAGLVELLAHDFLFSPERERNWYKLIYLLACSMAGTGVMALLGKWA

SEQ ID NO: 2509 - protein, 273 aa, Ureaplasma urealyticum
MDIINKKINWFPGHMKKATDEILKNLKNVDFFIQLVDARCPLTSSNIELLKEVSSKPVINLANKADLSDWKKNFDNNFLLISTKKRNDKNKIIQHLYQLFDQKIKIYQKKGLINPKFVGMIIGLPNIGKSSLINFLAPKKVLKVENRPGVTKTQCIRQINQHFYLIDTPGIFLKNIQNERDSFVLTLINCVKKEVLELESIVHFAYDFYLKNYRNELFIKYKMNKVLNFDDFIHHICELYNYKLTNNEFDHVRAYENLFNDFSNGLICKVNYD

SEQ ID NO: 2510 - protein, 645 aa, Neurospora crassa
MWAPPVRYGDENIPPADPTHQSKRSDSKIKAMMAVNGTLNAPPKRAACFDKSNTSKPLADGGNKDMLKNRVKPMVTTSSTRDLRSDGRENNRSAAEEHYMRPTATSKAASHGHQKYSSTAPLSSHAASGAYGGIRSHNAIAKLSAPVKKTTNVYRDNKVKEESTSHAPTSSSVDDLVAMVDKHIKDPRHYKSQPQLKSDQQHTLHRNQSKYVPNYENLNDVDDPDDSNADYAESYEDAVEQLSRDLDIPANTDPAAIVHANHMSIAQASYDSMPQGAPLAPSKPVRALPLPPNVSDPEEYSEDDDDQDLYDDQGYTTAHSYRSHCDNTTGGPPTLVAPKFTADIQKELDIAKAWVLEHQTEEEVEEENWDVSMVAEYGDEIFEYLRELEERMLPNPHYMDIQTEIRWSMRSVLMDWLVQVHHRFSLLPETLFLTVNYIDRFLSVKVVSLGKLQLVGATAIFVAAKYEEINCPSIQELVYMVDQGYSVEEILKAEKFMLTMLNFELGWPGPMSFLRRISKADDYDLETRTLAKYLLEVTIMDERFVGCPASYLAAGAHCLSRFFLQRGPWTHAHVHFSGYTLAQLRPLIISILDCCQEPRKHHGAVYDKYSHQRFKSASTFVEGKIANGFVLPIRTNASISDSAQS

SEQ ID NO: 2511 - protein, 380 aa, Hirschfeldia incana
SSNKTLVSPGDVFELGNFKTTTRSSQDGSTDRWYLGIWYKTTSDHRTYVWIANRDNPLHNSIGTLKISHSSNLVLLDQSDTPVWSTNLTGVVKSPATAELLANGNFVLRGSYTIDLDHFMWQSFDFPVDTLLPEMKLGRNLIGPEHEKILTSWKSPTDPSSGDYSLILETEGFLHEFYLFKNEFKVYRTGPWNGVRFNGIPKKMQNWSYIVNNFIDNKEEVAYSFQVNNNHNIHSRFRMSSTGYLQVITWTKTVPQRNMFWSFPEDACDLYQVCGPYAYCDMHTTPMCNCIKGFVPKNAGRWDLRDMSGGCVRSSPLTCGEGDGFMVLGQMKMPETSEAFVEEMIGLEECSQKCVRDCNSTGFAIMDNMNGGSGCVMWTG

SEQ ID NO: 2512 - protein, 117 aa, Zea mays
  unsure (1)..(117): unsure at all Xaa locations
MMYACCSLLGADIPWLAEGHFDRIXADATREHCLQAARARQKSSDEGFVCQRVCTSQRMLKKVGAFSNDPIPYSCVSDLGXVSELNACADTCTRSVCVXHHQVPNXNDGCLTRWLSE

SEQ ID NO: 2513 - protein, 476 aa, Mesorhizobium loti
MASQTSQKLSLAALTAMVVGSMIGAGIFALPRTFGAATGPIGAVIAWCIAGTGMYTLALVFQALAARKPELDAGIFSYAKAGFGDYAGFLSAFGYWLVACIADVSYWVLIKSTLGAFFPVFGNGDTVPAVVVSSIALWLFHFTILRGIREAAFINTVVTVAKVIPILVFILILAGTSNANIFVTNLWGGELAARSGLFEQIRATMLVTIFVFIGIEGASVYSRYAKDRADVGRATILGFIGVLFLLVLVTLLPYAVLPQAEIAGLRQPSMAAVLEAVVGHWGAVFVSVGLIVSLLGAYLAWSLICVEVLFAAAKSGDMPRIFARENRNNVPAAALWLTNVIIQAFLISTLFSQDAFALMVKLSSAMVLIPYLLVAGYGFLLALRRETYDAEPAQRSRDLIVAGIATLYVAFMIYAGGLKFLLLSSILYAPGTLLYVQVRREQNMPVLVGVEWIVLAAAAIGCLVGIYGIASGDIVL

SEQ ID NO: 2514 - protein, 566 aa, Ustilago maydis
MTSATLATVSDIPMKPHRMRMTHNLVTNYGLHKKMDILRPKRATRDQMTRFHTDEYVDFLHRVTPETVHELTNEGTRYLIGEDCPAFDGLYEFCSISAGGSLAAATRLNSGESDVAINWAGGLHHAKKREASGFCYVNDIVLAILELLRVHLRVLYIDIDIHHGDGVEEAFYTTDRVMTASFHKFGDFFPGTGDVRDIGMKKGKNYCVNVPLRDGIGDLEFGNIFRPIISHIMEWYRPGAVVLQCGADSLAGDKLGCFNLSMRGHAECVAFMQTFDVPLITLGGGGYTVRNVARTWTYETGLLVGQKLDEDLPFNDYIQYFGPEYKLEVPPTSMDNLNSREYLDNLRTKIIDNLRNLPSAPGVQMQETPRTTLNPADVEMSDGEDSDLDERISQHLRDAHVQHWDDELSGDEAQVDGERLESVWAMATDRSSGASNGRSRPGIMDPLKPYEHDLGLKYISHNGVAAAKGKPRAKRTFFAARTAKPGLADLHLDDDDEQDDDEQRHHIANQFGGRRTRAFFAANQGSTRLPRDATPLSDVDIGSPALSAAAVASTNGQARSAVNGRR

SEQ ID NO: 2515 - protein, 374 aa, Quetzalia occidentalis
ALSIAGAVQSQKLAVRAISQLQSLPGGDIKLLCDTVVESVRDPTGYDRVMVYKFHEDEHGEVVAESKRPDLEPYIGLHYPAADIPQASRFLFKQNRVRMIVDCHATPVSVIQDDGLMQPLCLVGSTLRAPHGCHAQYMANMGSMASLAMAVVINGNDEEGIGGRNTTRLWGLVVCHHPSARGIPFPLRYACEFLLQALGLQLNMELQLAAQLSEKHVLRTQTLLCDMLLRDSPTGIVTQNPSIMDLVKCDGAALYYQGKYYPLRVTPTEAQIKGIVEWMLAFHGDSTGLSTDSLADAGYPGAASLGDAVCGMAVAYITNRDFLFWFRSNTAKEIKWGGAKHHPKDKDDGQRMHPRSSFKAFLEVVKSRSLPWEN

SEQ ID NO: 2516 - protein, 117 aa, Euphorbia characias
ESEFKEAFSLFDKDGDGCITTKELGTVMRSLGQNPTEAELQDMINEVDADGNGTIDFPEFLNLMARKMKDTDSEEELKEAFRVFDKDQNGFISAAELRHVMTYLGEKLTDEEVMRYP

SEQ ID NO: 2517 - protein, 637 aa, SYNECHOCOCCUS SP. WH 8102
MTASWMPTAREQQALQRHGHIQELERVDAVWPWLAERHGTITAVDAPHAAHAERFSFAELAQRIATAAAAFQRQGVQEGDVVALFAENSPRWLVADQGLMRCGAADAVRGASAPVEELRYILDDCNATALVVQNADLWRRLDLTASQRQGLRLVLQLEGEPEQGVLGWEAFLASGAGQQSVTPTSARTAIATVLYTSGTTGQPKGVPLTHANLLHQMQSLACVAHPQPGAPVLSVLPIWHAYERSASYYFLSCACTQTYTNIKQLKKDLPRVRPIAMATVPRLWESVQAGFEDVVKTFPPSRQRLLRAALANSAAHRKAVRTARNLLLQPVALPGRMTAAAVAALRWPLHALASALIWPKLRLQLSGGRLAYPISGGGAIAPHIDAFFEAVGIELLVGYGLTETSPVVSCRRPWRNIRGSSGLPMPDTEFRIVDQESGASLGFRERGRVLVRGPQVMGGYLGKPEASAKVLSADGWFDTGDLGMLLPDGSVALTGRAKDTIVLSSGENIEPGPLEEALVASPLIEQVMLVGQDERQLGALLVPRVEPIRAWASEQGLSVGEDLGGRPGDSVLLNLLMRECNLVLRLRPGARGDERLCGVGLVEPFSIENGLLTQTLKQRRDRISRRDAAVIERIYGR

SEQ ID NO: 2518 - protein, 322 aa, uncultured proteobacterium EBAC31A08
MKTKITELFGIEHPIIQGGMHHVGFAELAAAVSNAGGLGTITGLTQGTPEKLANEIARCKEMTNKPFAVNLTFLPSLTPPDYPGLIKVIIDAGVPVVETAGRNPAEYLPALKEAGIKVIHKCTSVRHSLKAQAIGCDAVSVDGFECGGHPGEDDIPNFILLPRAADELEIPFVASGGMADGRSLVAAMSLGAEGMNMGTRFIATQDAPVHQNVKEAIVNASELDTRLIMRSLTNTERVLNNEAVERLIEKEKALGDELTFADIVDEVAGVYPKIMHEGTMEVGAWSCGMVAGLVNDIPTVEELMHSIMAEADSIIKERLSKF

SEQ ID NO: 2519 - protein, 342 aa, Parthenium argentatum
MSTDIRSKFLQVYDTLKSELINDPAFEFDDDSRQWIEKMLDYNVPGGKLNRGLSVIDSYQLLKGGKLTDDEIFHASALGWCVEWLQAYFLVLDDIMDESHTRRGQPCWFRLPKVGMIAANDGIILRNHVPRILKKHFRGKPYYVDLVDLFNEVEFQTASGQMIDLITTLVGEKDLSKYSLSIHRRIVQYKTAYYSFYLPVACALLMFGEDLEKHVEVKNVLVEMGTYFQVQDDYLDCFGAPEVIGKIGTDIEDFKCSWLVVKALELANEEQKKVLHENYGKKDPSPVAKVKELYNTLNLQGVFEDYENTSYKKLITSIEGHPSKAVQAVLKSFLGKIYRRQK

SEQ ID NO: 2520 - protein, 461 aa, Oryza sativa (indica cultivar-group)
MRISMALAAAALLLLLSLAAADMSIVSYGERSEEEARRLYAEWKAEHGKNYNAVGEEERRYAAFRDNLRYIDEHNAAADAGVHSFRLGLNRFADLTNEEYRDTYLGLRNKPRRERKVSDRYLAADNEALPESVDWRTKGAVAEIKDQGGCGSCWAFSAIAAVEGINQIVTGDLISLSEQELVDCDTSYNEGCNGGLMDYAFDFIINNGGIDTEDDYPYKGKDERCDKNAKVVTIDSYEDVTPNSETSLQKAVANQPVSVAIEAGGRAFQLYSSGIFTGKCGTALDHGVAAVGYGTENGKDYWIVRNSWGKSWGESGYVRMERNIKASSGKCGIAVEPSYPLKKGENPPNPGPTPPSPTPPPTVCDNYYTCPDSTTCCCIYEYGKYCYAWGCCPLEGATCCDDHYSCCPHEYPICNVQQGTCLMRGVGGWHGPHHVQQRSQLPGRPGTVTTHHVHRYLLHCR

SEQ ID NO: 2521 - protein, 152 aa, Zea mays; identical to SEQ ID NO: 631

SEQ ID NO: 2522 - protein, 173 aa, Helicobacter pylori
MNLEKLEISHDANALCVVIEISKHSNIKYELDKESGVLMVDRVLYGAQNYPANYGFVPNTLGSDGDPVDALVLSDVAFQAGSVVKARLVGVLNMEDESGMDEKLLALPIDKIDPTHSYVKDIDDLSKHTLDKIKHFFETYKDLEPNKWVKVKGFENKESAIKVLEKAIKAYQG

SEQ ID NO: 2523 - protein, 366 aa, Zea mays
MGKGAQGSDAAAAGGEVEENMAAWLVAKNTLKIMPFKLPPVGPYDVRVRMKAVGICGSDVHYLREMRIAHFVVKEPMVIGHECAGVVEEVGAGVTHLSVGDRVALEPGVSCWRCRHCKGGRYNLCEDMKFFATPPVHGSLANQVVHPADLCFKLPDGVSLEEGAMCEPLSVGVHACRRAGVGPETGVLVVGAGPIGLVSLLAARAFGAPRVVVVDVDDHRLAVARSLGADAAVRVSPRAEDLADEVERIRAAMGSDIDVSLDCAGFSKTMSTALEATRPGGKVCLVGMGHNEMTLPLTAAAAREVDVVGVFRYKDTWPLCIDFLRSGKVDVKPLITHRFGFSQRDVEEAFEVSARGRDAIKVMFNL

SEQ ID NO: 2524 - protein, 169 aa, Zea mays
NLSHADPPYKSLAALNCVVFGCANIWDINRAYETFVAIKEKFDLTPDIHSYNALLCAFGKLKQTGEACNVFQHVLTLGVKPNATTYSLLVDAHLANKDPKAALAIIDEMVDAGFTPSKDTLRKVRRRCSRESDFDSDEKVQSLAKQFNYRMGGENRREMLYSIEYNPVY

SEQ ID NO: 2525 - protein, 368 aa, Glycine max
MAEPSSSKPAVPLLKDELDIVIPTIRNLDFLEMWRPFFEPYHLIIVQDGDPNRTIKVPDGFDYELYNRNDINRILGPKASCISFKDSACRCFGYMVSKKKYIYTIDDDCFVAKDPSGKDINALEQHIKNLLCPSTPFFFNTLYDPYRAGADFVRGYPFSLREGAPTAVSHGLWLNIPDYDAPTQLVKPLERNTRYVDAVLTIPKGTLFPMCGMNLAFDRQLIGPAMYFGLMGDGQPIGRYDDMWAGWCVKVICDHLGLGVKTGLPYIWHSKASNPFVNLKKEYKGIFWQEEIIPFFQSATIPKECTSVQKCYIELSKQVKEKLGAVDPYFTKLADAMVTWIEAWDELNSTTSEEASSKSANGAAAATK

SEQ ID NO: 2526 - protein, 319 aa, Lycopersicon hirsutum
MGSKYSKATNSINDALSSSYLVPFESYRVPLVDLEEATNNFDDKFFIGAGVFGKVYKGVLRDGTKVALKRRKPESSQGIEEFETEIEILSFCSHPHLVSLIGFCDERNEMILIYKYMENGNLKSHLYGSDLPSMSWEQRLEICIGAARGLYYLHTRAVIHRDVKSINILLDENFVPKITDFGISKKGTELDQTHLSTVVQGTLGYLDPEYFIKGRLTEKSDVYSFGVVLFEVLCARSAIVQSLPREMVNLAEWAVESHNNGQLEQIIDPNLADKITPESLRKFGETAVKCLALSSEDRPSMGDVLWKLEYALRLQESVI

SEQ ID NO: 2527 - protein, 322 aa, Mycobacterium tuberculosis H37Rv
MVLSTAFSQMFGIDYPIVSAPMDLIAGGELAAAVSGAGGLGLIGGGYGDRDWLARQFDLAAGAPVGCGFITWSLARQPQLLDLALQYEPVAVMLSFGDPAVFADAIKSAGTRLVCQIQNRTQAERALQVGADVLVAQGTEAGGHGHGPRSTLTLVPEIVDLVTARGTDIPVIAAGGIADGRGLAAALMLGAAGVLVGTRFYATVEALSTPQARDPLLAATGDDMCRTTIYDQLRRYPWPQGHTMSVLSNALTDQFEDTELDILHREEAMARYWRAVAARDYSIANVTAGQAAGLVNAVLPAADVITGMAQQAARTLTAMRAV

SEQ ID NO: 2528 - protein, 95 aa, Oxalis tuberosa
  unsure (1)..(95): unsure at all Xaa locations
LYAGINISGTNGEVMPGQWEYQVGPSVGIEAGDHIWASRYILERITEQAGVVLTLDPKPIDGDWNGAGCHTNYSXKSMRDEGGFEVIKKAIFNLS

SEQ ID NO: 2529 - protein, 167 aa, Oryza sativa (japonica cultivar-group)
MVAVASASPLTAAAAPSMCCSPPAFLPLRAHRRRIFRAEAMKTQQEKKQTEVAVEESFPFRETAPPDEPLVTAEESWVVKLEQSVNIFLTESVITILDGLYRDRNYARFFVLETIARVPYFAFISMLHMYETFGWWRRADYIKVHFAESWNEFHHLLIMEELGGNSL

SEQ ID NO: 2530 - protein, 333 aa, Rhodobacter sphaeroides
MMKVLVIGGCGFIGSHVVDLLLQEGCRVRVFGRRPEAFRPPLAGVDYVMGDYSDPALVFRALHDVEAVLHLASATVPATANLNPGLDIEANLLATVRLLDVMRATGKRRLVFLSSGGTVYGVPQADPVPEEHPLRPIGSYGIVKVAIESYIRMEQALYGLAPVVLRASNPYGPRQGHTGVQGIIGTHLWRAARGEPVEIWGDGQVTRDFIHVRDLAALCVATLRSDTCGFFNAGSGTGTSVAEIVAGIDRTVQASGGPPVRALRQPGRGYDVPRVVLDISRARAAFDWAPRIGLEEGLAETWRWVCTTLAHETAAEAPPPRAKLARSRRSARF

SEQ ID NO: 2531 - protein, 373 aa, Candida maltosa
MSVKTKTITILPGDHVGTEIVNEAIKVLEAIEAATPYQKIHFDFKHHLIGGSAIDATGVPLPDDALESAKNSDAVLLGAVGGPKWGTGALRPEQGLLKIRKELNLYANIRPCNFASDSLLELSPLRPEVVKGTNLIIVRELVGGIYFGDREEQEESEDKQTAWDTEKYTVDEVTRITRIAAFMALQHNPPLPIWSLDKANVLASSRLWRRTVDKVISEEFPTLSVQHQLIDSAAMILIQNPTKLNGIIITSNMFGDIISDEASVIPGSLGLLPSASLASLPDTNTVFGLYEPCHGSAPDLPANKVNPIATILSAASMLRLSLDCVKEAEALEEAVKQVLDKGIRTADLRGTSSTTEVGDAIVEAVTKILKEKA

SEQ ID NO: 2532 - protein, 214 aa, Citrus limon
IDFRPVKPYEVPMTAAGALQSYKLAAKAITRLQSLPSGSMERLCDTMIQEVFELTGYDRVMAYKFHEDDHGEVVSEITKSGLEPYLGLHYPATDIPQAVRFLFMKNKVRMIVDCRARHVKVLQDEKLPFDLTLCGSTLRAPHSCHLQYMENMNSIASLVMAVVVNDEEEEGDNTLPQKRKRLWGLVVCHNTTPRFVPFPLRYACEFLAQVFAIH

SEQ ID NO: 2533 - protein, 1126 aa, Marchantia paleacea var. diptera
MSTTKVTYSSGSSAKSKHSVRIVQTTADAKLQAVFEESGESGDSFDYTKSINASKSTGESVPAQAVTAYLQRMQRGGLTQTFGCMLAVEELTFRVLAYSENAPEMLDLMPQAVPCVGQQDVLGIGTDARTLFNSASAVALEKAAGALDVSMFNPISVQCKSSGKPFYAIVHRIDAGLVIDIEPVRPSDPSVSAAGALQSHKLAAKAISRLQSLPGGDIGLLCDTVVEEVRELTGYDRVMAYKFHEDEHGEVVAEIRRSDLEPYLGLHYPATDIPQASRFLFMKNRVRMICDCCAQPVQVIQDKELRQPLSLAGSTLRAPHGCHAQYMGNMGSIASLVMAVIINVNDEEYSSRGYHHKGRKLWGLVVCHHTTPRSVPFPLRSACEFLMQVFGLQLNMEVELAAQLREKRILRTQTLLCDMLLRDAPIGIVSQSPNIMDLVKCDGAALYYGKRYWVLGTTPTELQIKDIADWLLEYHKDSTGLSTDSLADAGYPGAASLGDAVCGMAAARITSKDFLFWFRSHTAKEIKWGGAKHDPDDKDDGRKMHPRSSFKAFLEVVKRRSLPWEDVEMDAIHSLQLILRGSFQDIDDSDTKTMIHARLNDLKLQGMDELSTVANEMVRLIETATAPILAVDSSGFINGWNAKVAELTGLPVSEAMGRSLVKDLALEESVETVERLLYLALQGEEEQNVEIKLQTYGAQKDKGAVILIVNACSSRDVTENVVGVCFVGQDVTGQKVVMDKFTRIQGDYKAIVQNPNPLIPPIFGSDEFGYCSEWNPAMEKLAGWKREEVIGKMLVGEIFGTQMMCCRLKGQDAMTKFMIVLNSAMDGQDSEKFPFAFFDRQGKFVEALLTANKRTDSEGAFTGVFCFLQIASMELLQALTVQRATEKVAFSKLKELAYIRQEIKNPLYGIMFTRNLVEDTNLTEEQKQFIETSALCERQLRRILDDMDLESIEDGYLELDTAEFIMGTVMDAVISQGMITSREKGLQLIWDTPRDTKNLCLFGDQVRLQQVLADFLLNAIRFTPSSEGWVGIKGVSSRHRQGGGVHVVHFEFRVTHPGAGLPEELVQEMFDRGRGMTQEGLGLNMCRKLLKLMSGDVQYIREAGKCYFLVNVELPIAQRDDAGSVK

SEQ ID NO: 2534 - protein, 387 aa, Oryza sativa (japonica cultivar-group)
MEVTAEFGGAYYGGAAGREKKALQQGCGDHFAVDDLLVLPYGEEDETTREGEATGGKEEAAGFGNASADSSTITALDSCSNSFGLADGDFPGELCEPYDQLAELEWLSNYMNEGDDAFATEDLQKLQLISGIPSGGFSTASVPSAQAQAASAAASMAVQPGGFLPEAPVPAKARSKRSRAAPGNWSSRLLVLPPPPASPPSPASMAISPAESGVSAHAFPIKKPSKPAKKKDAPAPPAQAQLSSVPVHSGGSAPAAAAGEGRRCLHCETDKTPQWRTGPMGPKTLCNACGVRYKSGRLVPEYRPAASPTFMVSKHSNSHRKVLELRRQKEMHQQTPHHHQPQVAAAGGVGSLMHMQSSMLFDGVSPVVSGDDFLIHHHLRTDFRPPI

SEQ ID NO: 2535 - protein, 437 aa, uncultured crenarchaeote 4B7
MTNTQEIYKKKTKNSAKLFTKSKKVHINGVHHNIRFFEPYPFITKSADGKFLKDVDSNKYVDYWMGHWSLILGHAQKQIQKKASGQLKKGWMHGTSNENAISLSEKISKAVPVAEKIRYASTGTEATMYSVRLARAVTGKKIIAKIDGGWHGYTTDLLKTVNWPFDVSESQGLTDEEHIISLPLNNLQESLKILNSIKNDLAGVLVEPILGGGGAIPATQEYLKGIQEMVKTNNALFMLDEIVTGFRFRYGCIYSKMKLDPDIVTLGKIIGGGFPIGVICGKDEIMEHANTSLNSKKNRTYIGGGTFSANPLTMIAGDTTLDVLKNKTNTLYKKLNGLGDNTSKMLKKIFSDDVIVTGKGSLFMTHFPRDEMTEINNAADAAKCDSTKLFNYHFEMITKNGIFFLPGKLGAFSDAHSTVDVKDMKKATEDFVSNFKK

SEQ ID NO: 2536 - protein, 338 aa, Glycine max
MRVQVTILPVPPQRRGAHRNGMVTKNQIVLIKILCFEMVNHNDQNPPERRCMLRGFRLLRCPYWIRPSITVSDHSGVLFSTKKHLRTRELLPEDFWFSAPKKGVMVFALPGEPGLTELAGDFKIHFHDRQGDFYCWLNTTMTENRKVLNTSDLDGFDKRKLPSPGFMVEVVLVDYNGNDVTSKTETTTKKSDESSSNNPASSAPVERSTTPAQNADKESDSHDKDDVFSDGEAEQSASSRSKQTKAPSEAVETVTNDTRISESNRVSNEIANLSHATEQVSLGNKSSTPIRHASEPGSNVDGKTVSSLEVPSAESEFKAMAADASVFTFGDDEDYESD

SEQ ID NO: 2537 - protein, 248 aa, Triticum aestivum
MDTRAVSEITPEEAAGDKKEEIEEQSAAFWTTIAPNVDDYSSSVARLIAKGSGQLVRGIIWCGDITASGLKCGEAVLKKGAGANGKPTQVKPSSLKRMKRARRVTKMSNKVANSILSGVLKVSGFVTSTVVNSKPAQKFFKLMPGEVILASLDGFGKVWDAVEVSGKNNVMKTSSVVTTSVVTHRYGDRAGEITQDYLHATGNALGVAWAVFKIRKALDPKGHIKKSSLASSAAHAVAKQSISLQKKK

SEQ ID NO: 2538 - protein, 363 aa, Oryza sativa (japonica cultivar-group)
MELGRLVTVVMAAAVSSALVMVARCDPQVPCYFIFGDSLVDNGNNNYIVSLARANYPPYGIDFAGGPSGRFTNGLTTVDVIAQLLGFDNFIPPYAATSGDQILNGANFASAAAGIRAETGQQLGGRIPFAGQVQNYQTAVQTLISILGDQDTASDRLSKCIFSVGMGSNDYLNNYFMPAFYNTGSQYTPEQFADSLIADYRRYVQVLYNYGARKVVMIGVGQVGCSPNELARYSADGATCVARIDSAIQIFNRRLVGLVDEMNTLPGAHFTFINAYNIFSDILANAASYGFTETTAGCCGVGRNNGQVTCLPYEAPCSNRDQHIFWDAFHPSEAANIIVGRRSYRAESPNDAYPMDIATLASV

SEQ ID NO: 2539 - protein, 214 aa, Paeonia peregrina
IVESVGKGVTDVKPGDHVLPIFTGECKECRHCKSEESNMCDLLRINTDRGVMLNDDKSRFSINGQPIFHFVGTSTFSEYTVLHFGCLAKINPEAPLDKVCVLSRGISTGLGATLNVAKPKKGSIVAIFGLGAVGLAAAEGARIAGASRIIGVDLNPKRFDEARKFGVTEFVNPKDYNKPIQEVIAEMTGGGVDRSVECTGSIMAMMSAFECVHD

SEQ ID NO: 2540 - protein, 188 aa, Corynebacterium efficiens YS-314
MTEATTGPLILPFNGKTPRIHESAWIAPNATIIGDVEIGADASVFYGVVLRGDVNAIRIGARTNIQDNCVLHVDADAPCTLGDDVTVGHMALVHGSTVGNGTLVGMKAGLLSRSVIGPGSLIAAGAIVLEGQEIPAKSLAAGVPAKVRRELSDEQSSAFIPHAGRYVQTSKAQASISETLPLDEVRFS

SEQ ID NO: 2541 - protein, 127 aa, Glycine max
MARGGKLMKLKSVLKKWNSFGNGSKHSRHHSSSAVADDESSSRSDLHAVYVGKSRRLYRVSSDVVDHPVFRELVERSRDSDQQQNEDTTTINVVACEVVLFEHLLWMLDNADPQPESLNELVDFYGC

SEQ ID NO: 2542 - protein, 484 aa, Medicago sativa
MRKSVTLKAGEVPSRLTRARAVALSTSGQLPPMKEVAPGTQNQKQPLRANSKRAVSDVTYLPHEMRAILQDVTNNCGENTNRSCLNPTEIQAKKRKVAKPAQPDVSNEVPSAAERPPFIADSKPVSSMEMRLRSSEDFRCLDDLEDNAPFRMSSNQSGTNNNLLQNQTSRISARLLSSQKKASQIVAAKKGNISELLDVSKHPDVADIDADFEDPQLCSHYAADIYDHLRVAELSRRPYPNFMETVQQDITPSMRAILVDWLVEVSEGYKLQANTLFLTVYLIDWFLSKNCIERERLQLLGITCMLIATKYEEINAPRIEDFCFITDNTYVKEEVVKLESLVLKSSSYQLFAPTTKTFLRRFLRAAQASYKRPSIELEYLANYLAELTLMNYGFLNFLPSMVAASSVFLARWTLDQSSHPWNPTLEQYASYKASDLKATVLALQDLQLNSNDDCPLTAIRKKYTQDKLNCVAALSSPKLLETLF

SEQ ID NO: 2543 - protein, 394 aa, Saccharomyces cerevisiae
MPPKKQVEEKKVLLGRPGNNLKAGIVGLANVGKSTFFQAITRCPLGNPANYPFATIDPEEARVIVPSPRFDKLCEIYKKTASEVPAHLTVYDIAGLTKGASAGEGLGNAFLSHIRSVDSIYQVVRCFDDAEIIHVEGDVDPVRDLEIINQELRLKDIEFAQKALEGAEKIAKRGGQSLEVKQKKEEMDLITKIIKLLESGQRVANHSWTSKEVEIINSMFLLTAKPCIYLINLSERDYIRKKNKHLLRIKEWVDKYSPGDLIIPFSVSLEERLSHMSPEDAEEELKKLQTISALPKIITTMRQKLDLISFFTCGPDEVREWTIRRGTKAPQAAGVIHNDLMNTFILAQVMKCEDVFEYKDDSAIKAAGKLMQKGKDYVVEDGDIIYFRAGAGKN

SEQ ID NO: 2544 - protein, 137 aa, Debaryomyces hansenii
QTHESEPTTVSSEIAGNSPNAERGFHIHEFGDATNGCVSAGPHFNPFKKTHGAPTDEVRHVGDMGNVKTDENGVAKGSFKDSLIKLIGPTSVVGRSVVIHAGQDDLGKGDTEESLKTGNAGPRPACGVIGLTNKPNS

SEQ ID NO: 2545 - protein, 418 aa, Chlorella vulgaris
MVAALTTQLVCSAAIVRSARPSGLSRALPLRRRVTLRVANIAAPAEDMLVGQPAVVPPFEGGKRLANAPPFTLQDMRDAIPAECFEKDTFRSAAHLALDVGIVAALAIGAYTIGNPLVWPLYWFLQGTMFWALFVVGHDCGHQSWSNNKTLNDFVGNIVHSSIMVPYHGWRISHRTHHANHGHVENDESWHPIVKSNYEKLDKWAKLGRLLFPFPLFAYPFYLLNRSPGKNGSHYDPKSDLFTASEGPLVETSNKFQCAWIGFLAGCTVALGPLAMLNLYVLPYWVFVVWLDVVTYLHHHGPSDPEEEVPWYRGEEWSYFRGGLSTIDRDYGIFNKLHHDIGTHVVHHLFPQIPHYHLQKATEAVKPIMGDYYREPEKSPGPIPTHLFEPLRRSFARDHFVDNTGDIVFYQQDKNLKL

SEQ ID NO: 2546 - protein, 161 aa, Glycine max
MAASSSSSEKQVVLIGIDDSEQSTYALNWALDHFFPSPIFKLVLIHSRPTATSAVGFAGPGAAEILPIVDSDLRKIAARVLETAKQLCFNKSVNDVTAEVVEGDPRNVLCDAVDKYRAAMLVVGSHGYGAIKRAVLGSVSDYCAHHAHCTVMIVKKPKIKH

SEQ ID NO: 2547 - protein, 614 aa, Glycine max
MSYDKNPSPVPTSTTGDEEKKVTGGGYDVGVYSAHGRVDHNARAVDGHDLNDSYDPSKESLLTRLGLNIESFKRAPGTTRGLVAHGDIPPEYLQHDNPLLQQKMKPRHLQMIAVGGSIGTGLFVGSGASLGNGGPAAVLMAWIIMGVMLIMVTQALGEMAIIYPVSGGFYTLASRMLDPSFAFAMGWNYVLQWAVVLPLEITVAGTTVQYWTDKVPLGVWITIFFLLIIFFATLGTLGYAEEEFWSSCLKLAVVIMFIFIGIVCICGGGPASGDYGSYVGGRYWQNPGAFANGFKGVCAMFVTAAFSFAGTELVGLAATETPNPRKTLPSAVKNTFWRITIIYITSLTIIGLLIPYDDPDLFGGSGANVSPFVIVLDRANIGGLNHLVNATICISVLSIGLSCVYAGSRTLTALAETGYAPKMFTYVDKSGRPLYSVLAILAFGPIAYVNLANVGTDVFNWLLALSGLSTLFTWLAICVTHIRFRQAWKIQGHSVEELPFTAIAGVWGSWLGAILIVIVLIAQFYIGLFPLGGVESGNARAESFFLSYLAFPILLAFWVVGYAWKRTLPRKTTEIDLDTGRKSWLTVEEMRQYKAERRLAPWWKRIYRMLFTSS

SEQ ID NO: 2548 - protein, 92 aa, Oxalis lotoides
  unsure (1)..(92): unsure at all Xaa locations
XINISGTNGEVMPGQWEYQVGPSVGIEAGDHIWASRYILERITEQAGVVLTLDPKPIDGDWNGAGCHTNYSTKSMRDEGGFEVIKKAILNLS

SEQ ID NO: 2549 - protein, 208 aa, Pirellula sp.
MSRRKIMTVATIAALVTGGVFLLSRTTRAGYESAEYKVVESDGEFEIREYPDLMLVATKTKIDAQGRDGSFMKLFRYISGANEAEQKISMTTPVFMENDKADSEVQMGFVMPKEVAVEGVPSPTGPDVDVRKRAGGRFAVIRFAGKLDKKLAKESEAKLRAWMETKGLTAAVSEDTESSQTSGVEAASYDPPFTPAPLRRNEVLIRLK

SEQ ID NO: 2550 - protein, 123 aa, Lycopersicon esculentum
DLKPENVLVREDGHIMLSDFDLSLWCCVNPTLVRSSDEPSCAISAYCIQPSCIDPACKLPVCVEPSCFQPSCFKPRLFNNKTTKTRGDRATMISSDSLPVLVAEPTTARSMSFVGTHEYLAPE

SEQ ID NO: 2551 - protein, 751 aa, Geobacillus stearothermophilus
MENQNRQNAAQCPFHGSVTNQSSNRTTNKDWWPNQLNLSILHQHDRKTNPHDEEFNYAEEFQKLDYWALKEDLRKLMTESQDWWPADYGHYGPLFIRMAWHSAGTYRIGDGRGGASTGTQRFAPLNSWPDNANLDKARRLLWPIKKKYGNKISWADLFILAGNVAIESMGGKTIGFGGGRVDVWHPEEDVYWGSEKEWLASERYSGDRELENPLAAVQMGLIYVNPEGPDGKPDPKAAARDIRETFRRMGMNDEETVALIAGGHTFGKAHGAGPATHVGPEPEAAPIEAQGLGWISSYGKGKGSDTITSGIEGAWTPTPTQWDTSYFDMLFGYDWWLTKSPAGAWQWMAVDPDEKDLAPDAEDPSKKVPTMMMTTDLALRFDPEYEKIARRFHQNPEEFAEAFARAWFKLTHRDMGPKTRYLGPEVPKEDFIWQDPIPEVDYELTEAEIEEIKAKILNSGLTVSELVKTAWASASTFRNSDKRGGANGARIRLAPQKDWEVNEPERLAKVLSVYEDIQRELPKKVSIADLIVLGGSAAVEKAARDAGFDVKVPFFPGRGDATQEQTDVESFAVLEPFADGFRNYQKQEYSVPPEELLVDKAQLLGLTAPEMTVLVGGLRVLGANYRDLPHGVFTDRIGVLTNDFFVNLLDMNYEWVPTDSGIYEIRDRKTGEVRWTATRVDLIFGSNSILRSYAEFYAQDDNQEKFVRDFINAWVKVMNADRFDLVKKARESVTALQYAYYSRSTTKNMLQ

SEQ ID NO: 2552 - protein, 141 aa, Oryza sativa
MASGSIVKKEVGENHDVLRFGFNNSVKGDLAPQHPIQATVHKEAKFWADKKRFGAEAIYGSAFNIRKDLDAQILSKFQRPPGALPSSMLGYEALTGSLDDFGFEDYLNLPQDSDSFHAPDMHHGMEVRLGDSGGPGCGCQI

SEQ ID NO: 2553 - protein, 167 aa, Triticum aestivum
MAETEYRCFVGGLAWATDDNNLQQAFSQYGEILDAKIINDRETGRSRGFGFVTFGSEESMRQAIEEMNGKELDGRNITVNEAQSRRSGGGGGGGGGYGGQRGGGGGYGGGGGYGGGGGGYGGQGGGGYGGQRGGGGGYGGGGGYGGGGGYGGQRGGGGGDSGGQWRN

SEQ ID NO: 2554 - protein, 258 aa, Pseudomonas stutzeri
MRALFDYGPEDIRATNIQDPRLNDDHAMLVEVSATSICGSDLHVYRGVLDSMMEKGRSQTGHELIGRVKEIGKDVGRFKPGDRVSMAYSCSCGDCYMCNVGQTAHCETTNKAVYGFGVPFGDLNGTHAEALILPMPTRTPSRCPTQFQIRAGLMLSCNLPSAIIANKLADIAPGENVALIGCGPTGLMCLDIALQKSAGTVVAMDKVAHRLSVAAKKGAVPINPSDSDWMEKHSRKQARGVLTKSLKWLGIPKGYRWH

SEQ ID NO: 2555 - protein, 375 aa, Pirellula sp.
MSFTRPPHAHLVPVRPMNSSIVLLPGDGIGPEIVEQARLVLVKVAERFGHTFDFSSHQIGGIAIDETGDPLPQPTIDACRNAAAILLGAVGGPKWDDPSAKTRPEAGLLKIRKELGLFANLRPIKLFDELADASPLRADIVKGTDILFFRELTGGIYFGESGTSGSGEEETAFQSMTYSVGEVKRIVRMAAQAARGRSNRLTSVDKANVLEPSRLWRRVAAEVMANEFPDVQYDVVLVDSMAMHLINRPSEFDVVVTGNMFGDILTDEASMLPGSLGMLPSASLGDGGPGLYEPIHGSAPDIAGKSVANPLATILAAAMMLRHSLGLTDEAEAIEKAVAGVITDGLRTPDLARGDQSKSVSTEEMGAAVVAKLAS

SEQ ID NO: 2556 - protein, 368 aa, Glycine max
NSVRNLNFVIAMADASVAPPPPLKDELDIVIPTIRNLDFLEMWRPFFQPYHLIIVQDGDPTKTIKVPPGFDYELYNRNDINKLLGPRASCISFKDSACRCFGYMVSKKKYIFTIDDDCFVANDPSGKAINALEQHIKNLLCPSTPLFFNTLYDPFREGADFVRGYPFSLREGVPTAISHGLWLNIPDYDAPTQLVKPLERNTRYVDAVLTIPKGTLFPLCGMNLAFDRDLIGPAMYFGLMGDGQPIGRYDDMWAGWCCKVITDHLGLGVKTGLPYIYHSKASNPFVNLRKEYKGIFWQEDIIPFFQNVVLPKECTTVQKCYIELSKQVKEKLSKIDPYFDKLADAMVTWIEAWDELNPEGASQANGKA

SEQ ID NO: 2557 - protein, 445 aa, Escherichia coli
MGSQELQRKLGFWAVLAIAVGTTVGSGIFVSVGEVAKAAGTPWLTVLAFVIGGLIVIPQMCVYAELSTAYPENGADYVYLKNAGSRPLAFLSGWASFWANDAPSLSIMALAIVSNLGFLTPIDPLLGKFIAAGLIIAFMLLHLRSVEGGAAFQTLITIAKIIPFTIVIGLGIFWFKAENFAAPTTTAIGATGSFMALLAGISATSWSYTGMASICYMTGEIKNPGKTMPRALIGSCLLVLVLYTLLALVISGLMPFDKLANSETPISDALTWIPALGSTAGIFVAITAMIVILGSLSSCVMYQPRLEYAMAKDNLFFKCFGHVHPKYNTPDVSIILQGALGIFFIFVSDLTSLLGYFTLVMCFKNTLTFGSIIWCRKRDDYKPLWRTPAFGLMTTLAIASSLILVASTFVWAPIPGLICAVIVIATGLPAYAFWAKRSRQLNALS

SEQ ID NO: 2558 - protein, 150 aa, Hordeum vulgare subsp. vulgare
MSIVRRSNAFDPFADLWADPFDTFRSIVPAFSGNSETAAFANARVDWKETPEAHVFKADLPGVKKEEVKVEVEDGNVLVVSGERTKEKEDKNDKWHRVERSSGKFVRRFRLPEDAKVEEVKAGLENGVLTVTVPKTEVKKPEVKAIEISG

SEQ ID NO: 2559 - protein, 669 aa, Glycine max
MKASVSSNADFLKMGLFFLFVAVTFFFVGKHFSDSSSQQLIFFSATTAATTAATTTTSAEVTISPNFNQFFNVNALIEAQTPKTNPSQQPPPPPPPPELLDTIKRFGILNDNGTMSDDFEIGHFEEGLPEDWGNDTVVEDSVSAPRIAVSKFGMCPRGMSEHIPCLDNAGAIRRLKSTQRGENFERHCPEEGKRLNCLVPPPKGYRPPIPWPRSRDEVWYNNVPHTRLVEDKGGQNWITRGKDKFRFPGGGTQFIHGADQYLDHISEMVPDIKFGQNIRVALDVGCGVASFGAYLLSRNVITMSVAPKDVHENQIQFALERGVPAMVAAFSTRCLLYPSQAFDLVHCSRCRINWTRDDGILLLEVNRMLRAGGYFVWAAQPVYKHEEVLEEQWKEMLNLTNRLCWKLLKKDGYVAIWQKPSDNSCYLNREAGTQPPLCDPSDDLDNVWYVNLKSCISQLPENGYGANVARWPARLHTPPDRLQSIKFDAFISRNELFRAESKYWGEIIGGYVRVLRWKKMRLRNVMDMRAGFGGFAAALIDQSMDSWVMNVVPVSGPNTLPVIYDRGLIGVMHDWCEPFDTYPRTYDLLHAANLLSVEKKRCNLSSIMLEMDRILRPGGRVYIRDSLDIMDELQEIAKAIGWYVMLRDTEEGPHASYRVLVCDKHLLRS

SEQ ID NO: 2560 - protein, 501 aa, Asparagus officinalis
MTVSITAAVQLFLLLLLLLQLLFVHHKTKPKTKCRSPPGPPPLPVIGNLHQLSLLLHQSLYRLSKIHGPIFKLSLGRVPVLVISSPSLAKQVLKTHDLAFCSRASTVSFKEYTYDGCDVAGAPYGDSWRNLRKIFVLNLLSSKKLTSFRLVQEEEIEGMISSIRTRSDTNATVNITEFVVRLANNITFRVAFGYRSEGEYGEKSRFQRLLESGNDTVASFYVGDYFPGLGWLDKITGKLGKMKRNARDLDEFYQEVIDAHMKDGRKEDGKEDIVDVLLRLREEGQLTMDHIKGALMNIFVGGTDTSAASIAWAMAELARKPKVMKKAQEEVRKAASKKGKVEENDLAQLQYIKCVVNETLRLHLPLPLLVPRETIQHCEINGYDVSAKTRVLVNAWAIGRDEDAWENPEEFNPDRFVGSSLDYKGQDFQFIPFGAGRRICPGIQFGVETVELALANLLYAFNWELPPGVERENIDMHEAPGLVTRRATDLRLVATNYEEAN

SEQ ID NO: 2561 - protein, 420 aa, Oryza sativa
  unsure (1)..(420): unsure at all Xaa locations
MENTIVTSIIILERKNAQLATAGYPWNIRASSNAAAAHRTPNTGIVPTSHPATSPANRKHRWTPPTRVDLLNTWRARGGTARLHPSCRHAAPDPVEAAPSVTASTLRCRNYASPRGAHSAIHSHPPTAAATISKPTNTHSHRELERGKKSFRSERLRASSSPTSPFSFPHAFAYGGGLAQQPELSPAQMHYIQARLHLQRQAAQAGPLGPRAQPMKASSSSASAAGAAATPPRPQKLYRGVRQRHWGKWVAEIRLPRNRTRLWLGTFDTAEEAALAYDQAAYRLRGDAARLNFPDXXAASRGPLHASVDAKLQTLCQNIAAAKNAKKSSVSASAAATSSAPTSNCSSPSSDDASSCLESADSSPSLSPSSAATTAETPATXXAGDAAARLQPPWDEAAAFALTKYPSYEIDWDSLLAANX

SEQ ID NO: 2562 - protein, 119 aa, Zea mays
NNSGSSPLVTTLHQPSCIYKIFRDGPPFQQPCLIHTNLFECLSRGHSQNEQYQDKMRQSDERLLALVKAAMDVVVAVGLLQLAPKKVPPRVTGAFGFVTSLISCYQQLPSRAPVAKVKV

SEQ ID NO: 2563 - protein, 751 aa, Geobacillus stearothermophilus
MENQNRQNAAQCPFHGSVTNQSSNRTTNKDWWPNQLNLSILHQHDRKTNPHDEEFNYAEEFQKLDYWALKEDLRKLMTESQDWWPADYGHYGPLFIRMAWHSAGTYRIGDGRGGASTGTQRFAPLNSWPDNANLDKARRLLWPIKKKYGNKISWADLFILAGNVAIESMGGKTIGFGGGRVDVWHPEEDVYWGSEKEWLASERYSGDRELENPLAAVQMGLIYVNPEGPDGKPDPKAAARDIRETFRRMGMNDEETVALIAGGHTFGKAHGAGPATHVGPEPEAAPIEAQGLGWISSYGKGKGSDTITSGIEGAWTPTPTQWDTSYFDMLFGYDWWLTKSPAGAWQWMAVDPDEKDLAPDAEDPSKKVPTMMMTTDLALRFDPEYEKIARRFHQNPEEFAEAFARAWFKLTHRDMGPKTRYLGPEVPKEDFIWQDPIPEVDYELTEAEIEEIKAKILNSGLTVSELVKTAWASASTFRNSDKRGGANGARIRLAPQKDWEVNEPERLAKVLSVYEDIQRELPKKVSIADLIVLGGSAAVEKAARDAGFDVKVPFFPGRGDATQEQTDVESFAVLEPFADGFRNYQKQEYSVPPEELLVDKAQLLGLTAPEMTVLVGGLRVLGANYRDLPHGVFTDRIGVLTNDFFVNLLDMNYEWVPTDSGIYEIRDRKTGEVRWTATRVDLIFGSNSILRSYAEFYAQDDNQEKFVRDFINAWVKVMNADRFDLVKKARESVTALQYTHFDRSVDAAVSK

SEQ ID NO: 2564 - protein, 99 aa, Saccharomyces cerevisiae
MAATKEAKQPKEPKKRTTRRKKDPNAPKRRLSAYMFFANENRDIVRSENPDVTFGQVGRILGERWKALTAEEKQPYESKAQADKKRYESEKELYNATRA

SEQ ID NO: 2565 - protein, 1124 aa, Lathyrus sativus
MSTTRPSQSSNNSGRSRNSARIIAQTTVDAKLHATFEESGSSFDYSSWVRVSGSVDGDQQPRSNKVTTAYLNHIQRGKQIQPFGCLLALDEKTCKVVAYSENAPEMLTMVSHAVPSVGDHPALGIGTDIRTVFTAPSASALQKALGFAEVSLLNPILVHCKTSGKPFYAIIHRVTGSLIIDFEPVKPYEVPMTAAGALQSYKLAAKAITRLQSLASGSMERLCDTMVQEVFELTGYDRVMAYKFHEDDHGEVIAEIAKPGLEPYLGLHYPATDIPQAARFLFMKNKVRMIVDCNAKHVKVLQDEKLPFDLTLCGSTLRAPHSCHLQYMANMDSIASLVMAVVVNDSDEDGDSADAVLPQKKKRLWGLVVCHNTTPRFVPFPLRYACEFLAQVFAIHVNKEIELEYQILEKNILRTQTLLCDMLMRDAPLGIVSQSPNIMDLVKCDGAALFYRNKLWLLGATPTEYQIREIALWMSEYHTDSTGLSTDSLLDAGFPGALSLSDTVCGMAAVRITSKDIVFWFRSHTAAEIRWGGAKHEPGEQDDGRKMHPRSSFKAFLEVVKARSVPWKDFEMDAIHSLQLILRNASKDTDIIDLNTKAINTRLNDLKIEGMQELEAVTSEMVRLIETATVPILAVDVDGTVNGWNIKIAELTGLPVGEAIGKHLLTLVEDSSTDIVKKMLNLALQGEEEKNVQFEIKTHGDQVEFGPISLIVNACASRDLRENVVGVCFVAQDITAQKTVMDKFTRIEGDYKAIVQNPNQLIPPIFGTDEFGWCCEWNAAMIKLTGWKREEVMDKMLLGEVFGTQMSCCRLKNQEAFVNFGIVLNKAMTGLETEKVAFGFFSRKGKYVECLLSVSKKIDAEGLVTGVFCFLQLASPELQQALHIQRLSEQTALKRLKVLTYMKRQIRNPLAGIVFSSKMLEGTDLETEQKQIVNTSSQCQRQLSKILDDSDLDGIIDGYLDLEMAEFTLHEVLVTSLSQVMNRSNTKGIRIANDVAEHIAKESLYGDSLRLQQVLADFLLISINSTPNGGQVVIASSLTKEQLGKSVHLVNLELSITHGGSGVPEAALNQMFGNNVLESEEGISLHISRKLLKLMNGDVRYLKEAGKSSFILSVELAAAHKLKG

SEQ ID NO: 2566 - protein, 193 aa, Zea mays
MSKYGTIPTSSSAGGGPVPLGGASPLDFISRAKARGASALATRRPWRELVDVHAVGLPPSLGDAYLRVRANLAHFAMNYAIVVLVVVFLSLLWHPVSLIVFLVCMLAWLVLYFLRDEPLVLFGRVVADGYVLAVLAVVTLVLLLLTDATANILSSLLIGLVLVLVHAALHKAEDNAADEADRWYAPVSQQPSH

SEQ ID NO: 2567 - protein, 354 aa, Ralstonia metallidurans
MSPAASGHAAERIFQTRLAALLDIRYPILLGGMQLLGTSDVVAAVVNAGAMGFITARSFPTLEAFRADLRRCRTLTRGRPFGVNVTLSAREDRNQLAAAWIDVALDEGVRVFESAGMSPERLVAPIHAGGGLLIHKCPSVRHAVTAQRLGVDAVALVGLEEGGHPGANQLSAFVNGAFALERVEIPLVIGGGIGSGRQIAAALALGADGVVMGSRFMVAAEIATHRALKERIVAADEHCSIAILRSLNDTWRVLDNAAAREVRRLEAEGARSHAAFGDLILSSRTQERVYLGGDTDAGIVSLGPAGGFADAIESAGKIVERLVEGACAAWEVMTGRVDGRGLESHDRQFCRSTP

SEQ ID NO: 2568 - protein, 1135 aa, Sorghum bicolor
MSSPLNNRGTCSRSSSARSRHSARVVAQTPVDAQLHAEFESSQRNFDYSSSVSAAIRPSVSTSTVSTYHQTMQRGLYIQPFGCLLAVHPDTFTLLAYSENAPEMLDLTPHAVPTIDQRDALAVGADVRTLFRSQSSVALHKAATFGEVNLLNPILVHARTSGKPFYAILHRIDVGLVIDLEPVNPVDVPVTAAGALKSYKLAAKAISRLQSLPSGNLSLLCDVLVREVSELTGYDRVMAYKFHEDEHGEVISECRRSDLEPYLGLHYPATDIPQASRFLFMKNKVRMICDCSATLVKIIQDDSLAQPLSLCGSTLRASHGCHAQYMANMGSVASLVMSVTISNDEEEDVDTGSDQQPKGRKLWGLVVCHHTSPRFVPFPLRYACEFLLQVFGIQLNKEVELAAQAKERHILRTQTLLWDMLLRDAPVGIFTQSPNVMDLVKCDGVALYYQNQLLLLGSTPSESEIKSIATWLQENHDGSTGLSTDSLVEAGYPGAAALREVVCGMAAIKISSKDFIFWFRSHTTKEIKWGGAKHEPVDADDNGRKMHPRSSFKAFLEVVKWRSVPWEDVEMDAIHSLQLILRGSLQDEDANRNNVRSIVKAPPDDTKKIQGLLELRTVTNEMVRLIETATAPVLAVDIAGNINGWNNKAAELTGLPVMEAIGRPLIDLVVVDSIEVVKRILDSALQGIEEQNLEIKLKAFHEQECNGPIILMVNSCCSRDLSEKVIGVCFVGQDLTTQKMIMDKYTRIQGDYVAIVKNPSELIPPIFMINDLGSCLEWNKAMQKITGIQREDVIDKLLIGEVFTLHDYGCRVKDHATLTKLSILMNAVISGQDPEKLLFGFFDTDGKYIESLLTVNKRINAEGKITGAICFLHVASPELQHALQVQKMSEQAATNSFKELTYIHQELRNPLNGMQFTCNLLEPSELTEEQRKLLSSNILCQDQLKKILHDTDLESIEQCYMEMNTVEFNLEEALNTVLMQGIPLGKEKRISIERDWPVEISRMYLYGDNLRLQQVLADYLACALQFTQPAEGPIVLQVIPKKENIGSGMQIAHLEFRIVHPAPGVPEALIQEMFRHNPEVSREGLGLYICQKLVKTMSGTVQYLREADTSSFIILIEFPVAQLSSKRSKPSTSKF

SEQ ID NO: 2569 - protein, 370 aa, Pseudomonas aeruginosa PAO1
MIKSRAAVAFAPNKPLEIVEVDVAPPQKGEVLVRIVATGVCHTDAYTLSGQDSEGVFPCILGHEGGGIVEAVGEGVTSLQVGDHVIPLYTAECGKCKFCLSGKTNLCQAVRATQGKGLMPDGTSRFSYKGEPVFHYMGCSTFSEYTVLPEISLAKIPKDAPLEKVCLLGCGVTTGIGAVLNTAKVEEGATVAIFGLGGIGLAAIIGAKMAKAARIIAVDINPGKFDIARELGATDFINPKDYDKPIQDVIVELTDGGVDYSFECVGNVQLMRAALECCHKGWGESVIIGVAGAGQEISTRPFQLVTGRVWRGSAFGGVRGRSELPSYVEKAQKGEIPLDTFITHTMGLEDINEAFELMHEGKSIRTVIHY

SEQ ID NO: 2570 - protein, 156 aa, Oryza sativa
  unsure (1)..(156): unsure at all Xaa locations
EGEKKMITLKSSDGEEFEVEAVGMESQTIRHMIEDKCADNGIPLPNVNSKILSKVIEYCNKHVHASADDSTSSADLKNWXADFVKVDQATLFDLILAANYLNIKGWXLLDLSCXQTVADMIKGKTPEEIRKTFNIKKDLAPEEEEEIRRENQWAFE

SEQ ID NO: 2571 - protein, 173 aa, Hordeum vulgare
MAETEYRCFVGGLAWATDDHNLQAAFSQYGEILDAKIINDRETGRSRGFGFVTFGSEESMRQAIEEMNGKELDGRQVTVNEAQSRRSAGGGGGGYGGQRGGGGGYGGGGGYGGQGGGYGGQGGGGYGGQGGGGYGGQRGGGGGYGGGGGGYGGGGGGYGGQRGGGDSGGQWRS

SEQ ID NO: 2572 - protein, 248 aa, Rosa rugosa
MAYENKPNTVLDSDAQRRLGRGKIEIKRIENTTNRQVTFCKRRNGLLKKAYELSVLCDAEVALIVFSNRGRLYEYSNNSVRETIERYKKACADSSNNGSVSEATTQYYQQEAAKLRAQITTLQNSNRGYMAEGLSNMSIKELKGVETKLEKAISRIRSKKNELLFAEIEYMQKRELDLHNNNQLLRAKIAENERHQQSINAIAGGHGSYDIMQPTQPFHEARNYFQVNALQPNIHQYSRHDQISLQLV

SEQ ID NO: 2573 - protein, 236 aa, Streptomyces coelicolor
MKAVQVVGYGKNLEMAEVPAPEVTGPYDVIVRIGGAGVCRTDLHILEGQWAEKSGVELPYTIGHENAGWVHAVGSAVTNVSEGDKVIVHPLITCGLCRACRAGDDVHCENNRFPGIDTAGGYAEYLKTSARSVVRLDDSLEPADVAALADAGLTAYHAAAKAARRLRPGDRCVVIGAGGLGHIGIQVLGALTAAEIVVVDRNPDAVDLAVSVGADHGVLADGGHVDRVRELTGGHG

SEQ ID NO: 2574 - protein, 121 aa, Zea mays
  unsure (1)..(121): unsure at all Xaa locations
WIESLETEGAEKLIDRMLLSGTFADDESYTSVVGLLIRQNLAGPSQKLXYLVLKSGYMLELTVFTDYMRACLRSVRLDTCSSIIEKCETTDLNTVLCPEWTWRIDIPDAAFQADNSPLTLF

SEQ ID NO: 2575 - protein, 80 aa, Zea mays
MDSSALSNPRLMALIEEEKKRAMANELVAKLTFVCWDKCVTGSVGSSLSRSETSCLSNCAKRFAEVKMMALQRFTTTGRG

SEQ ID NO: 2576 - protein, 173 aa, Escherichia coli O157:H7 EDL933
MKRFSLAILALVVATGAQAASEKVEMNLVTSQGVGQSIGSVTITETDKGLEFSPDLKALPPGEHGFHIHAKGSCQPATKDGKASAAESAGGHLDPQNTGKHEGPEGAGHLGDLPALVVNNDGKATDAVIAPRLKSLDEIKDKALMVHVGGDNMSDQPKPLGGGGERYACGVIK

SEQ ID NO: 2577 - protein, 96 aa, Zea diploperennis
MGRRACCEKEGVKRGAWTTKEDDALAAYVKAHGEGKWREVPQKAGLRRCGKSCRLRWLNYLRPNIRRGNISYDEEDLIIRLHRLLGNRWSLIAGRL

SEQ ID NO: 2578 - protein, 379 aa, Schizosaccharomyces pombe
MSKGPGDFKKSWNGFAAQTPQNTPSSDVHLSKAALEKARQTLQSQLEDKSAHDEVSGLLRNNPAMLSMIEGRLSSLVGKSSGYIESLAPAVQNRITALKGLQKDCDAIQYEFRQKMLDLETKYEKKYQPIFSRRAEIIKGVSEPVDDELDHEEEIFQNNLPDPKGIPEFWLTCLHNVFLVGEMITPEDENVLRSLSDIRFTNLSGDVHGYKLEFEFDSNDYFTNKILTKTYYYKDDLSPSGEFLYDHAEGDKINWIKPEKNLTVRVETKKQRNRKTNQTRLVRTTVPNDSFFNFFSPPQLDDDESDDGLDDKTELLELDYQLGEVFKDQIIPLAIDCFLEEGDLSDFNQMDEEDSEDAYTDEEDLSSDDEEILSSEISD

SEQ ID NO: 2579 - protein, 198 aa, Triticum aestivum
TGGPFGTMKNPGEQSHAANAGLDIAVRLLDPIKDQLPILSYADFYQLAGVVAVEVTGGPEVPFHPGRQDKPEPPPEGRLPDATQGSDHLRQVFSAQMGLSDKDIVALSGGHTLGRCHKERSGFEGAWTSNPLIFDNSYFTELVSGEKEGLLQLPSDKALMADPAFRPLVEKYAADEDAFFADYAEAHLKLSELGFAEA

SEQ ID NO: 2580 - protein, 379 aa, Chlamydophila pneumoniae J138
MKHLAVLGSTGSIGRQTLEIVRRYPSEFKIISMASYGNNLRLFFQHLEEFAPLAAAVYNEEVYNEACQRFPHMQFFLGQEGLTQLCIMDTVTTVVAASSGIEALPAILESMKKGKALALANKEILVCAGELVSKTAKENGIKVLPIDSEHNALYQCLEGRTIEGIKKLILTASGGPLLNKSLEELSCVTKQDVLNHPIWNMGSKVTVDSSTLVNKGLEIIEAYWLFGLENVEILAVIHPQSLIHGMVEFLDGSVISIMNPPDMLFPIQYALTAPERFASPRDGMDFSKKQTLEFFPVDEERFPSIRLAQQVLEKQGSSGSFFNAANEVLVRRFLCEEISWCDILRKLTTLMECHKVYACHSLEDILEVDGEARALAQEI

SEQ ID NO: 2581 - protein, 276 aa, Mesorhizobium loti
WGFDGSSTMQAEGHSSDCVLKPVAVYPDPTRTNGVLVMCEVMMPDGVTPHASNKRATILDDEGAWFGFEQEYFFYKDGRPLGFPESGYPAPQGPYYTGVGYKNVGDVARQIVEDHLDLCLAAGINHEGINAEVAKGQWEFQIFGKGSKKAADQMWIARYLLLRLTEKYRIDIEFHCKPLGDTDWNGSGMHANFSTAYMREVGGKAYFESLMAQFDKNLMDHIAVYGPDNDKRLTGKHETAPWNKFSYGIADRGASIRVPHSFVQNDYKGYGEDRRP

SEQ ID NO: 2582 - protein, 370 aa, Clostridium acetobutylicum
MNFKKIFIISTVLGISISLANANNNFRVHAQTITTGLSSFVIKADGSLWATGTNEYGCLGDGTYIDKSTWEKVGDNFSDVECSCGYSLGIKKDGTLWACGINWSGELGNNEDRETKVANWKMVGSDFSQIACGAEHSLGIKKDGTLWACGSNQLGELGDGTTTDKYIWEKVGSGFSQVASQGDHSLALKKDGSLWSTGYNQFGELGDGTTTDRSTWEKVGDNFVQISCGKAFSMALKADGTIWAAGFNIYGQLGDGTTTSRSTWEKVGTGFSQISCGAVHSLALKKNGSLWATGNNENGQLGDGTTTDRSTWEKVGDGFCKINARNANTIAIKIDGSVWDCGWGYYGQLGNGNEYQRESLKEVLTGADIH

SEQ ID NO: 2583 - protein, 292 aa, Medicago sativa
QGGDCAESFKEFSANNIRDTFRVILQMGVVLMFGAQMPVIKVGRMAGQFAKPRSDSFEEKNGVKLPSYRGDNVNGDAFDAASRIPDPQRMVRAYCQSVATLNLLRAFATGGYAAMQRVNQWNLDFMEQSEQGDRYRELAHRVDEALGFMSVAGVTSDHPIMTTTDFWTSHECLLLPYEQALTREDSTSGLHYDCSAHMLWVGERTRQLDGAHVESLRGVANPLGIRVSDKMDPNELVKLIDILNPNNKPGRITVIVRMGAENMRVKLPHLIRAVRNAGQIVAWVSDPMHGNT

SEQ ID NO: 2584 - protein, 486 aa, Glycine max
MLDLNLNAEWTDSFSNGESPLPLEKFPDGLRNQMAESGTSNSSVVNADGSSNGGGDEDSDSTRAADDVYTTFNFDILKVEGANGFVTKELFPVMSEGAKGHATSSFSGTNGFVDLSFDGDGGNTSEMKMLQPQNQNQTQTRTQTQQPAKKSRRGPRSRSSQYRGVTFYRRTGRWESHIWDCGKQVYLGGFDTAHAAARAYDRAAIKFRGVDADINFNLSDYEDDLKQMQNLSKEEFVHILRRQSTGFSRGSSKYRGVTLHKCGRWEARMGQFLGKKYIYLGLFDSEVEAARAYDKAAIKCNGREAVTNFEPSTYEGELKSAAINEGGSQNLDLNLGIATPGPPKENWGQLQFPSFPYNTHGGRSSMMETNVSSGIGNPSLKRMVATEDRPSLWNGMSPNFFPNGERAERIGVDPSNGLPNWAWQTHGQVNATPVPTFSAAASSGFSISATFPSAAIFPTSSMNSIPQSLCFTSSSMPTRNASEYYY

SEQ ID NO: 2585 - protein, 86 aa, Zea mays
MARLHWLEAVLPLGIIGGMLCIMGNAQYFIHKAAHGRGIDQPQTFLDVDEPRSKAQKYCSFVSCTIGTKTCLFCFEISTVRRIICI

SEQ ID NO: 2586 - protein, 343 aa, Thermoplasma acidophilum
MGTIMKYVRYGKTASFVSVLAFGAMTLGEKNRWKLGGVTQELSDKMVKAAFDAGINLYDTADVYDEGDSEIMLGKSLKPYRDQVMIATKVRGRTGNGINESGLSRHHMSIAIRKSLERLDTKWIDIYQYHGWDLHGEFDEFLSTMEHFVDSGYVIYPAVSNFTAWQMATLQAMAVERGYARYESAQMNYSLLNRDIEHEVLPLMKYWSMTLLSWSPLHGGVLTGKYRRGEKPASGTRMGDRGFFFPYFDEVHGWDIVDEVRNIAQEQGCTMSQAALAWIVSKGHVAIIGARNMEQLQENLESINVNLKKEQIERLDKISENREIYPNWMVKRQNGDRNFEILS

SEQ ID NO: 2587 - protein, 326 aa, Streptococcus pneumoniae R6
MAILVTGGAGYIGSHTVVELLNLGKEVIIVDNLSNSSILVLDRIEAITGIRPVFYELDVCDKPALRKVFEQESIDAAIHFAGYKAVGESVQKPVMYYKNNIMSTLALVEVMSEFNVKKIVFSSSATVYGINNQSPLIETMQTSATNPYGYTKVMLEQILKDVHVADSEWSIALLRYFNPIGAHESGLIGEDPSGIPNNLMPYIAQVAVGKLSELSVFGNDYDTLDGTGVRDYIHVVDLAIGHIKALEKVSEKTDVYIYNLGSGEGTSVLQLVNTFESVNKIPIPYKIVPRRSGDVATCYANADKAYKELNWRTTKSIEDMCRDTWN

SEQ ID NO: 2588 - protein, 535 aa, Brassica nigra
LQLDKRLDTTEQVVEEIMRIHRSLPPRPGLDEVEAARSLIQKLEKEEPILLEAIANQRKPSEVPDELFAVLQEMKRGLVRFRSKEQIREAAKLLDLETVHSHFDDFIQRASDCIASPSPNGVSAPASSRPLPRAPTPPSSLYFSEKTPARPKEMVSRDDSFVSKAKPSLYGDGFVAPRTPQIVDSTLTAGKFADNDGEKLSLIKLASLIEVSAKKATKELNLQNKLSAQVEWLPDSIGKLSTLTSLDLSENNIVVLPNTIGGLVSLTNLDLRSNRINQLPESIGELLNLVYLDLSSNQLSSLPSSFSRLLQLEELNLSCNNLPVLPESVGSLANLKKLDVETNDIEEIPYSIGGCSSLKELRADYNKLKALPEAIGKITTLEILSVRYNNIRQLPTTMSSLASLRELDVSFNELESVPESLCFATSLVKLNVGNNFADMISLPRSLGNLEMLEELDISNNQIRVLPESFRSLTKLRVFASQENPLQVPPRDIAEKGPQAVVQYMNDLVETRNAKSLVVKPKKSWVQMCFFSKPEF

SEQ ID NO: 2589 - protein, 394 aa, Zea mays subsp. mays
LGAARRARLPPGEMGWPLVGGMWAFLRAFKSGKPDAFIASFVRRFGRTGVYRSFMFSSPTVLVTTAEGCKQVLMDDDAFVTGWPKATVALVGPRSFVAMPHDEHRRIRKLTAAPINGFDALTGYLPFIDSTVTSSLRAWADHGGSVEFLTELRRMTFKIIVQIFLGGADQATTRALERSYTELNYGMRAMAINLPGFAYRGALRARRRLVAVLQGVLDERRAARAKGVSGGGVDMMDRLIEAQDERGRRLDDDEIIDVLVMYLNAGHESSGHITMWATVFLQENPDMFARAKAEQEAIMRSIPSSQQGLTLRDFRKMEYLSQVIDETLRLVNISFVSFRQATRDVFVNGYLIPKGWKVQLWYRSVHMDPQVYPDPTKFDPSRWEGHSPRAGTFL

SEQ ID NO: 2590 - protein, 391 aa, Cytophaga hutchinsonii
MKDPQKKYIAILGSTGSIGTQALEVIRNNKDRFVVEVLTAENNAALLIEQAVEFRPNVVVIGNEGLYSNVQHALEPLDIKVYCGVKALASVVEMEDIDVVLTALVGYAGLIPTIHAIKAGKHIALANKETLVVAGDIVTALARQHRVAILPVDSEHSAIFQCLPGEGMNEIEKIILTASGGPFRGMKRADLEHVTKKQALKHPNWSMGAKITIDSASLMNKGLEVIEAKWLFGLEADQIDVVVHPQSIIHSMVQFQDGSIKAQMGLPDMKLPIQYALAFPERLKSDYPRFDFTQYPALTFDKPDTETFHNLSLAYDALRKGGNMACILNAANEIAVEKFLQDEIAFLEMPDLIAECMAKVPYIVVPTLDDYIQTDTQTRALARAYTQVKVK

SEQ ID NO: 2591 - protein, 192 aa, Streptococcus agalactiae 2603V/R
MNNLDTLYCKLAMCNTVLTERLRLQPVELTNVNDFLEFSSDSETVFYMQRYKANTVEEAQVVLANVCMKSPLGIYAMIEKESQKMIGIIELEIRDEFSAEFGYILNKNYNGKGYMTEACSKLMSIGFEHLDLERIYARFDINNKKSGNVMERIGMKKEGELRHLAKNPKGEWKTRAYYSILKEEYFNKVNTK

SEQ ID NO: 2592 - protein, 166 aa, Chloroflexus aurantiacus
MTIYQFSAQRIDGSTQSLADFRGQVLLIVNVASMCGLAPQYAGLEQLYRRYRDQGFTVLGFPSNQFMQEPRNNEAIAEFCERTYQVTFPLFAKIDVNGPNEHPLFTYLKTQLPGLFGSTAIKWNFTKFLVDRNGKPYRRYAPTDLPSQIEDDIVLLLRQQPKSLSA

SEQ ID NO: 2593 - protein, 455 aa, Coxiella burnetii RSA 493
MTPEVQHNASYRLLRYSLFPLFLITVCPPAAIIMWYTNVALNGSLTALAVLFTQKGFFTTLYQIWSPVFFGTREAWFIISIFMITQLLLMRIVPGKRFEGPITPKGNVPVYKANGVLCFGITLTLFYLCAYQFRWFPPTIVYDHFGGILGALNIFSLIFCFILYFKGRFAPSTSDHSLSGNFIFDYYWGTELYPRILGWDIKMFTNCRFGMMGWPIIILSFAAKQNQLYGLSNSMLVALLIQLVYIGKFFWWERGYLRSLDIMHDRAGFYICWGCLVWVPSIYTSPLLYLVNHPIPLSWFSADIILFLGVGCVFINYFADAQRQKVRASNGNCKIWGKKPALIRATYTTEQGKQKQTVLLASGWWGISRHFHYLPEIGAAFFWTVPALFSHFLPYFYVVYLTILLTHRSLRDENRCHKKYGPDWEIYCQQVPSRIIPYFLTKRFNAMVKWRKSAN

SEQ ID NO: 2594 - protein, 425 aa, Serratia marcescens
MSVTASDLAFDQRHIWHPYTSMSRPLPCYPIESASGVELQLADGRSLVDGMSSWWAAIHGYNHPRLNQAASQQLEKMSHVMFGGITHPAAISLCRRLVEMTPEALQCVFLADSGSVAVEVSLKMALQYWQARGERRQRILTLRHGYHGDTFGAMSVCDPDNSMHSLYQGYLAPHLFATAPQCRFDEEWREEDIAPFAALLEQHAGEVAAVILEPVVQGAGGMRIYHPTYLKRVRDVVRVAIKLLLIADEIATGFGRTGKLFACEHAQVVPDILCLGKALTGGYMTLSATLTTRHVAETISNGAAGCFMHGPTFMGNPLACAVADASLALLAENRWQAQVSAIETQLKRELLPLGRCRRWPHVRVLGAIGVVEMREPVDVAELQRGFVERGVWIRPFGKLIYLMPPYIIEAEQLSRLTAAVADAAR

SEQ ID NO: 2595 - protein, 382 aa, Ruegeria sp. PR1b
MPQWIMICFMKGRFRVVMPLGHRLLALLLHQCLRHASGRPVSPGPGQDGLLRMRQIEAGLEHEEGSQDVRALVIGGCGFIGSHVVDVLHQAGMGLRVLDRRPEAFRAPVPGVEYVYCDMQDRAQLFEAVSGVDAVVHLASTTVPATSNLDPVADVSGNLVTTLSLLEVMRAAGVRRMVYLSSGGTVYGVPQQDLVSEDHPLNPISSYGIVKVAVEKYLFMEHQLHGLEYVVLRASNPYGPRQGHRGIQGLIGTHLWRLSRQEEIEVWGDGSIVRDFLHVRDLAQLCLLAMTSGKSGIFNAGRGQGASVAEVVEQICATVAASGGRSVAPIYKPGRNFDVPRVVLDTTRARAELGWQAEITLQDGIAETWDWVQAQARQQGQG

SEQ ID NO: 2596 - protein, 650 aa, Halobacterium sp. NRC-1
MDPRDAEREYDDHVIARQTLSRTFEDAAERHADSPAQAYKGGVYDRSLAPEVVDPAPDGGVETLSYDALRDIVRTLAAGFRDLGVTAGDRVGVFAHTRMEWAQCDLAVLAAGGAVTTVYASSSPAQIAHLLGDSGAVGVVVENDALRQRVREVESDLDDLEFVATMDTPSDDTRPLSAVYDRGRDAFDPDAYQGWIDDRDPDDLASLIYTSGTTGTPKGVALTHRNFHANLNQSRRRFGPRPDRGDAPAVTSDSRHLSFLPLAHVLERLSGHFLPLASGAQVCYAESPDTLREDFGLFEPTSATSVPRVYEKLYDTIREQAADSPVSERVFEWATRVGRAAHTTDDPGIGLRAAHALADTLVFSDIRDALGGEIEFFISGGGSLSPELCALFHGMGLPILEGYGLTETSPVLAVNPYEDPIVGTIGPPVTDTELTVDETIASPEQRQRCDGAAGELLARGPQVFDGYWGLPDATDAAFVTREGKEWFRTGDVVELRPDGYVRFLERAKQLLTLSTGKNVAPGPIEDAFAASPLVAQAMVVGDGQKFVSAILVPNFDAVSEWAASQEIALPDDRDAICRDERVRARIQSAVDDVNTGFEPYERIKQFRLVATEFTEANDLLTPTMKKKRHHIRDRFADAVGDVYDDSEFST

SEQ ID NO: 2597 - protein, 550 aa, Glycine max
  unsure (1)..(550): unsure at all Xaa locations
VFLCSLKDERVGILFRGSLKSFVPCFNVSDNLVLGLSDGNEVDRQCRHDLMQNVVGSFXPNYKIPLRWPTGRDVIWVANVKITAQEVLSSGSFTKRMMMLDEEQISFRSASLMFDGVEDYSHQIAEMIGLRNESYFIQAGVRTILDIGCGYGSFGAHLFDSQLLTMCIANYEPSGSQVQLTLERGLPAMIASFTSKQLPYPSLSFDMLHCARCGIDWDQKDGLLLIEADRLLKPGXGYFVWTSPLTNARNKENQKRWKFMQDFTLTLCWELLSQQDETVVWKKTSKKSCYASRKSGSGPSLCGRGIDVETPYYRELQNCIGGIQSSRWVPIEKRERWPSRANLNNNNLAIYGLQPDELTEDSDSWKTALQNYWSLMSPLIFSDHPKRPGDEDPSPPYNMFRNVLDMNAHFGGFNSALLQARKSAWVMNVVPISGPNYLPLIQDRGYVGVLHDWCEAFPTYPRTYDLVHAAGLLSLETEQHRCSMLDLFIEIDRILRPEGWVIIRDTVPLIESARPLTAQLKWDARVIEIESDSDQRLLICQKPFFKRQAS

SEQ ID NO: 2598 - protein, 306 aa, Clostridium acetobutylicum
MKTLNIGKGELSNVSEISLGCMRLSELTVSDASKLISTALEEGINFFDHADIYGGGRCEEIFSEAIDMKPSVREKLIIQSKCGIRKGFFDFSKEHILNSVDQSLKRLKTEYLDVLLLHRPDALMEPEEVAEAFETLSSSGKVRHFGVSNQNPMQIELLSKYLNNKIIINQLQLSIMHTGMIDAGLNVNMKNEASINCDGSVLDYCRLNDITIQPWSPFQYGFFEGVFLDNDKFPELNKVINNIARDKGVKNTAIAIAWLLRHPAKMQPIVGTTNVNRLKDICKASDIELTRKEWYEIYRAAGNKLP

SEQ ID NO: 2599 - protein, 197 aa, Oryza australiensis
GQTPVFPRILGHEAGGIVESVGEGVTELTPGDHVLPVFTGECKECAHCKSEESNMCDLLRINVDRGVMIGDGQSRFTINGKPIFHFVGTSTFSEYTVIHVGCLAKINPEAPLDKVCILSCGISTGLGATLNVAKPKKGQTVAIFGLGAVGLAAMEGARLSGASRIIGVDLNPAKFEQAKKFGCTDFVNPKDHSKPVH

SEQ ID NO: 2600 - protein, 101 aa, Ferroplasma acidarmanus
MFCSKCGALMTPSRDKYICNSCGNEIPKAGTADQKIISKSSDKEIIMVAKEVNAEPLDSDAVCPVCHHTGAYYLLKQTRSADEPETKFYTCESCGHRWREY

SEQ ID NO: 2601 - protein, 247 aa, Zea mays
  unsure (1)..(247): unsure at all Xaa locations
MAEREQQVGSDDAAEWKHVAELRAVTQAQDPSCNDEDDYTLRRFLRARDHNISKAXAMLLKYLKWKPVAKPHGAIAAAEVAREAAQGKLYLQGHDREGRPLIYGFGARHHPARRDMEEFKRYVVHVLDATVARLPPPGPGRQEKFAAVADLKGWGYANCDIRGYLAALDIMQSYYPERLGRVFLIHVPYVFMAAWKIVYPFIDDNTKKKFVFVADKDLDRTLREAIDDSQLAEIYGGKLKLVAPPAN

SEQ ID NO: 2602 - protein, 351 aa, Sulfolobus solfataricus
MHKTAFIWTDEYYNYSFPDYHPFKSLRESMTKRLLEERGAFHFITLVEPKSIPEEALQLVHSKEYIEFVKYKSKEGQGYLDDGDTPAFKGIYEAALIRVSGSVKALELIKSGEFNHTINIGGGFHHAKRNRAAGFCVFNDVALISKLGESFFSRIAIVDIDGHHADGTQELLIDDNNILKISLHMFHPNFFPGTGDVNEIGLGKGEGYTINIPLPPGTGDDGYLLAFDEIVVPAIERYKPELIILVAGGDSHFNDPLVELKLSTHGYLDVVTKIHRLVHEYSNGRLIMLGGGGYNYDATARIWTISIAEIAGIYDLEYETLHDSFSTKSSQFVMEKIRNTISLIKKIHSLN

SEQ ID NO: 2603 - protein, 477 aa, Zea mays
  unsure (1)..(477): unsure at all Xaa locations
TSALAPARPRRGRGDARPICYSRRRRRDLAVIKDVGVAXGRIRRAGSVALGDFLRREASAERAALGGGERPSVAAGQACRAKKGEDFALLKPACERRPGAPSTSFSAFALFDGHNGSAAAVYAEEHLLANVLGCVPADLSRDDWLAALPRALVAGFVKTDKDFQTKAHSSGTTVTLAIIDGSVVTVASVGDSRCVLDAAGSIYYLSADHRFDANEEEVGRVTECGGEVGRLNVVGGAEIGPLRCWPGGLCLSRSIGDQDVGEFIIPVPYVKQIKLSNAGGRLIISSDGVWDALTAEMAFRCARGLPPEAAAEQIVKEAVESKGLRDDTTCIVIDIIPPEKQKCTIESPKTPGKGLVLLKNFFLRKTASGSLSLADKDNYPEPDFVEEVFEDGCPSLSRRLNSEYPVRDMFKLFACAICQIDLESGQGISIHEGSSKTGKLRPWDGPFLCHSCQEKKEAMEGKRHSRDSSSRNSGSSE

SEQ ID NO: 2604 - protein, 191 aa, Populus alba
RLVPDTVYLTVNYIDRYPSGNVMNRQRLQLLGVACMMIAAKYEEICAPQVEEFCYITDNTYFRDEVLEMESTVLNYLKFEMTAPTAKCFLRRFVRAAQGIIEAPSMQLECLANYIAELPLLEYSMLCYAPSLVAASAIFLAKYILLPSKRPWNSTLQHYTLYEPVDLSDCVKDPHRLCCGDHNSTLPAIRE

SEQ ID NO: 2605 - protein, 235 aa, Bradyrhizobium japonicum USDA 110
MSGLDLSGRIAVISGGCGGIGQAVRERLAASGAKVVVWDVADGADQRIDLTDEAAVNDVMTGHLARFGRIDILVNAAGITGPTVNIEQYSLAEWRRVLDVNLTSTFLCCKAAVAPMRRKNAGRIVNLASIAGKEGNAGMTGYSAAKAGVIALTKSLGKELAGTDIRVNAIAPAVIATDLVKQMSDEAYRNVLAKIPLGRAGRPDEVAALVTWLASDECSFSTGAVFDLSGGRATY

SEQ ID NO: 2606 - protein, 483 aa, Oryza sativa
MTTPHGLLQYSSGAFSDQVPADDSAEEHGVKDHAMLAPFTAAWQTAISPPLVIERSEGCYVYDVNGTKYLDALAGLLSTALGGSEPRLVKAATEQLNKLPFYHSFWNHTTRPSLDLAKELISMFTAREMGKVFFTNSGSEANDSQVKIVWYYNNALGRPKKKNIISRTQSYHGTTFISASLSGLPTLHQDFDLPGRFVLHTDCPHYWRFHLPGETEEEFATRLADNLENLILKQGPETIAAFIAEPVIGAGGVILPPKTYFEKIQAVVKKYDNLFIVDEVITGFERLGTMFGSDLYNIKPDLVSLAKALSSAYAPIGAILVSPEISDVIHSHSNKLGTFAHGFTYSGHPVSCAVALEALKIYRERDIPGHVTHVAQRFQEGIKAFAAGSPIVGETRGVGLLIATEFTDNKSPYELFPFEWGVGEIFGQECKKRGMMVKVLGNLIAMSPPLIITREEIDKLVSIYGEALKATEERVAELKSKKN

SEQ ID NO: 2607 - protein, 104 aa, Arabidopsis lyrata
MRIRRREEKENQEYKKGLWTVEEDNILMDYVLNHGTGQWNRIVRKTGLKRCGKSCRLRWMNYLSPNVNKGNFTEQEEDLIIRLHKLLGNRWSLINSQKSTGKNR

SEQ ID NO: 2608 - protein, 393 aa, Streptococcus mutans
MAEKVSFEEGKLQVPDKPVIPYIEGDGVGQDIWKNAQIVFDKAIAKVYGGHKQVIWREVLAGKKAYKETGNWLPNETLEIIKTHLLAIKGPLETPVGGGIRSLNVALRQELDLFACVRPVRYFKGVPSPLKHPEKTAITIFRENTEDIYAGIEWNAGTAEVQKVINFLQDDMQVKKIRFPKSSSIGIKPISIEGSQRLIRAAIEYALANNLTKVTLVHKGNIQKFTEGGFRKWGYELAKREYAAELASGQLVVDDIIADNFLQQILLKPERFDVVALTNLNGDYASDALAAQVGGIGISPGANINYQTGHAIFEATHGTAPDIAGQDLANPSSVLLSGCMLFDYIGWSKVSDLIMKAVEKAIANGQVTIDFAKELGVEALTTCQFSEVLLTYL

SEQ ID NO: 2609 - protein, 261 aa, Streptomyces griseus
MSDQDKRVAVVTGATSGIGLSVARLLASQGHRVFIGARSAENVAATVKELVAEGLDVDGAVVDVRSDADVEAWIQAAVDRFGTVDVVVNNAGRSGGGVTADIDPELWHDVIDTNLNSVFRVTRSALNTGGLRSKSRGRIINIASTAGKQGVVLGAPYSASKHGVVGFTKALGNELAPTGITVNAVCPGYVETPMAQRVRQGYAAAYDATEDAILEKFQAKIPLGRYSTPDEVAGLVGYLASDTAASITSQALNVCGGLGNF

SEQ ID NO: 2610 - protein, 993 aa, Pseudomonas syringae pv. tomato str. DC3000
MIEHTLDANPDAALEAALAECAREPIRIPGAIQPHGVLLSVAGDPLCIEQVSANCAKSLGLESAELLGQPLSILLSAAHSMLINQAYSQPAMPNSDPIRLTVRAVDYNASLSRAGDVLIIELEPFVEAAHEQSRIITRVLRNLQAATTLETLFDIGVHEIQALTGYDRVMIYRFEPEGHGKVVAQALTGPLPSYSGLNFPGSDIPAQARELYRLNWIRLIPDATYVPVALIPTLRPATGQPLDLSLSTLRSVSPVHCEYLKNMGVRSSMSISLLDGGELWGLITCSHPEPLLVSRELRDACAMIGQLLSVKISAIVATHIQREREEKVVLLGQLADAMNRADHEILHGLVSRPQLLQALTQADGAAVLIDDQVHLFGQCPTSEEVRALYQWIRDTGLTRQRSKERATGLQGLGVFHTDSMQRERPESAAYRETASGVIAFTLPKPVDNAVMWFRSQLASTMNWSGNPAHHVSTRAAGSASHGLRPRQSFDVWKQEVTGIARPWSRADLYGAEDIRRSALESDLERQVQREQEAVRLRDELVAVVSHDLRNPMSIIIMQCGMMQRWAVDDTNFENRNIRRALGTIEKATTRMNSLLEDLLDTAQIEAGRYQLSRLALSVTSLLEEACSLLVMLTTEKNIELNCTSAQGLVIDADPERIFQVLSNLVGNAIKFTPKGGRINIDAVADGDDVLFRVSDDGIGIPAQHLPYIFQRYWSVKEGNPRGNGLGLYICQGIITAHGGRLWADSSLDSGSVFSFTLPMHQGQDTIGESTFLKQSGTTHRLAQSISSKLERQQLEDRLTRAGLLNELNHRVKNTLATVQAIASLTVNSSTSLDSFRKSFDARLFALSQARAEWMSTELADLLAQLQDVNGGQHRITFTGDPVRLEPRISLTLSMVLHKLMANALQHGALSSPAGQVTVASTLNSHHNPPTLSIDWLETEGPPVVASNVKGFGLRLIRRSIERELKGKVDIKFASTGVSWSMLIPWPEKPESSL

SEQ ID NO: 2611 - protein, 651 aa, Brucella melitensis biovar Abortus
MSVLKTDDQINGTHRAHHQVLTKLINAQTPSDFDILQSDFTDGMHDAVYRLMAEIMGLNTGYCGGRGGSMHMRDAASGIAGTSAIVGGNIPHAAGYALADKILNRKGISVAFFGDGASLQGATYEAMNIAALYRLPVIFYVENNLYAVSTHIQDATRETRIASRGPMLGFTGIECDGMDILSVHQAMREACRIIEEEGGPVVIEAQCYRYLHQSGSKSGSDFGYRTREEEEEWKSRDPIALAERRLKELGIAGDAEFLKIDERVTAAVQAAGERLTETAAGSNVLRIPDALWPSASSVDDGILGDGSEFSGAEFREIEDYQPDELEKMRFAAAASDVLGRAMEKDPTIIVMGEDVHRFAGGVSGFTRNALELFPDRVLAMPIAENGFTGVALGAALRGLRPVVEIMFGDFCFVAADQIANGISKVRHMFGDGFPVPIVMRVRVSPHTGYGSQHSGDPSALFGMFPGWRVVSPTNAFDYIGLMNSALKSDDPVAVIEHVEFYQRESLVPRNDRDYCIPLGKAKIVRPGSACTVLATSVMVQASIKAAEEAGIDAEIIDMRSLDMFGIDWALIGASIGKTNRVVIAEQVASGLSLGRHWIAEIQKRFFNDLDHEVLHVTGSMASPVVSLVLNKAALGSADKVRSALEQITHSA

SEQ ID NO: 2612 - protein, 126 aa, Neurospora crassa
MLGQITTKELGTVMRSLGQNPSESELQDMINEVDADNNGTIDFPEFLTMMARKMKDTDSEEEIREAFKVFDRDNNGFISAAELRHVMTSIGEKLTDDEVDEMIREADQDGDGRIDYNEFVQLMMQK

SEQ ID NO: 2613 - protein, 845 aa, Rhodopseudomonas palustris
MPRKVDLTSCDREPIHIPGSIQPCGCLLACDAQAVRITRISENAGAFFGRETPRVGELLADYFGETEAHALRNALAQSSDPKRPALIFGWRDGLTGRTFDISLHRHDGTSIVEFEPAAADQADNPLRLTRQIIARTKELKSLEEMAARVPRYLQAMLGYHRVMMYRFADDGSGKVIGEAKRSDLESFLGQHFPASDIPQQARLLYLKNAIRVISDSRGISSRIVPERDASGAALDLSFAHLRSVSPIHLEYLRNMGVSASMSLSIIIDGTLWGLIACHHYEPRAVPMAQRVAAEMFADFFSLHFTAAHHQRRFQSSLRTRRTLDSLTSEMSFDASVDDFLRGNLKRIADLIPSDGVGLWMNGVWTAHGSTPPADALPSILHLLTGRAGNEIVATHALTDRIAAATDYAGAAAGMLAIPLSQVAGDYLLFFRKEQVQTLNWAGDPNKTYDTGPLGDRLTPRKSFSIWKEQVDGQSVPWSPDDRDTAATIQVGLREVLLRQSEILSAERKKAEVRQRVLNEELNHRVKNILALIKSLVNQPAGEGKSLEEFASALRGRIMALSFAHDQVVRSDGGGALLDLIQAELSPYPASQITLEGPDVGVDARAYSVLALVLHELATNAAKYGALSRSSGRLKVAWTVGDDGRCDIEWTESCGPPVRPPTRQGFGTVLLSRSIPFDLGGWSEVDYLPGGVVARLGIPGQFVTETLQRLSSVQASGQSTDSSALNIADASILLVEDQLVIALDAEDMLGAIGAKLVTSVASAEEALQTIAQQPPTLAILDVNLGNGSSLPVADELERLGIPFIFATGYGDTAMIPERMRGLPIVRKPYSIDSLRGALSAMLDDRE

SEQ ID NO: 2614 - protein, 168 aa, Zea mays
MAAASSATSVHDFTVKDSSGKDVDLSVYRGKVLLIVNVASQCGLTNSNYTQQAQLYDKYKNQGFEILAFPCNQFGGQEPGTNEEIAQFACTRFKAEYPIFDKVDVNGNNAAPIYKFLKSSKGGLFGDSIKWNFSKFLVDKEGRVVDRYAPTTSPLSIEKDIKKLLGSS

SEQ ID NO: 2615 - protein, 195 aa, Glycine max
  unsure (1)..(195): unsure at all Xaa locations
MSTLDATRAELGLLVLYLGKAEARDKICRAIQYGSKFLSNGEPGTAQNVDKTTSLARKVFRLFKFVNDLHALISPTPQGTPLPLILLGKSKNALLSTFLFLDQFVWLGRTGIYQNKERTELIGRISLYCWLGSSVCTTLVELGELGRLSSSMEKLEEDLKNKNXYDNEQYRAKLNKSNERTLSLIQAGIDTVVAD

SEQ ID NO: 2616 - protein, 151 aa, Photobacterium leiognathi
QDLTVKMTDLQTGKPVGTIELSQNDYGVVFIPELADLTPGMHGFHIHQNGSCASSEKDGKVVLGGAAGGHYDPEHTNKHGFPWTDDNHKGDLPALFVSANGLATNPVLAPRLTLKELKGHAIMIHAGGDNHSDMPKALGGGGARVACGVIQ

SEQ ID NO: 2617 - protein, 162 aa, Corynebacterium efficiens YS-314
MEAMTSIHDIPVTLTDGTETTMADWAGHLVMVVNVASRCGLTPQYEGLQRLFEDYQDRGFFVIGVPCNQFMGQEPGTDAEICTFAQEKYDVTFPLLAKTDVNGENEHPLYTELKRFGEGGDIEWNFEKFLINADGETIARFGPRMDPEDDEVTSVIEDNLPV

SEQ ID NO: 2618 - protein, 253 aa, Glycine max
  unsure (1)..(253): unsure at all Xaa locations
MGKSYPTVSADYQKAVEKAKKKLRGFIAEXKRCAPLMLRLAWHSAGTYDVSSKTGGPFGTIKHPSELAHGANNGLDIAVRLLEPLKAEFPILSYADFYQLAGVVAVEVTGGPEVPFHPGREDKPEPPPEGRLXPDATKGSDHLRDVFGKAMGLSDRDIVALSGGHTIGAAHKERSGFEGPWTSNPLIFDNSYFKELLSGEKEGLXLQLPSDKALLSDPVFRPLVEKYASDEDAFFADYAEAHQKLSELGFAEA

SEQ ID NO: 2619 - protein, 789 aa, Escherichia coli
MLMANYGFCTIFAATSGNKGRKIHMKWLCSVGIAVSLALQPALADDLFGNHPLTPEARDAFVTELLKKMTVDEKIGQLRLISVGPDNPKEAIREMIKDGQVGAIFNTVTRQDIRAMQDQVMELSRLKIPLFFAYDVLHGQRTVFPISLGLASSFNLDAVKTVGRVSAYEAADDGLNMTWAPMVDVSRDPRWGRASEGFGEDTYLTSTMGKTMVEAMQGKSPADRYSVMTSVKHFAAYGAVEGGKEYNTVDMSPQRLFNDYMPPYKAGLDAGSGAVMVALNSLNGTPATSDSWLLKDVLRDQWGFKGITVSDHGAIKELIKHGTAADPEDAVRVALKSGINMSMSDEYYSKYLPGLIKSGKVTMAELDDAARHVLNVKYDMGLFNDPYSHLGPKESDPVDTNAESRLHRKEAREVARESLVLLKNRLETLPLKKSATIAVVGPLADSKRDVMGSWSAAGVADQSVTVLTGIKNAVGENGKVLYAKGANVTSDKGIIDFLNQYEEAVKVDPRSPQEMIDEAVQTAKQSDVVVAVVGEAQGMAHEASSRTDITIPQSQRDLIAALKATGKPLVLVLMNGRPLALVKEDQQADAILETWFAGTEGGNAIADVLFGDYNPSGKLPMSFPRSVGQIPVYYSHLNTGRPYNADKPNKYTSRYFDEANGALYPFGYGLSYTTFTVSDVKLSAPTMKRDGKVTASVQVTNTGKREGATVVQMYLQDVTASMSRPVKQLKGFEKITLKPGETQTVSFPIDIEALKFWNQQMKYDAEPGKFNVFIGTDSARVKKGEFELL

SEQ ID NO: 2620 - protein, 504 aa, Triticum aestivum
MDASAAAAEIAANGVLAKLEEEREAQKRYWEEHSRDLTVEAMMLDSRAADLDKEERPEILSLLPSYEGKSVLELGAGIGRFTGELAKTAGHVLAMDFIESVIKKNESINGHYKNASFMCADVTSPDLVIEDNSIDLIFSNWLLMYLSDAEVEKLVERMVKWLKVGGHIFFRESCFHQSGDSKRRVNPTHYREPRFYTKVFKEGHAIDQSGSSSELSLLTCKCVGAYVKNKKNQNQICWLWQKVNSTEDRDFQRFLDNVQYKISGILCYERVFGQGFVSTGGIETTKEFVDLLDLKPGQKVLDVGCGIGGGDFYMAENYDVHVVGIDLSINMVSFALEHAIGRKCAVEFEVADCTTKTYPDNTFDVIYSRDTILHIQDKPALFRSFFKWLKPGGKVLISDYCRSPGKPSEEFAAYIKQRGYDLHNVETYGQMLQNAGFHDVIAEDRTDQFLKVLQRELAEVEKNKDEFLADFGQEDYDDIVTGWNAKLQRSSAGEQRWGLFIGTK

SEQ ID NO: 2621 - protein, 459 aa, Staphylococcus aureus subsp. aureus Mu50
MENNELQRGLSARQIQMIALGGTIGVGLFMGATSTIKWTGPSVILAYLIAGIFLFLIMRAMGEMIYLNPTTGSFATFASDYIHPAAGYMTAWSNIFQWIVVGMSEVIAVGEYMKFWFPELPTWIPGVIAILLLMAANLFSVKAFGEFEFWFALIKVVTIILMIIAGFGLIFFGFGNGGHAVGISNLWTNGGFMPNGIVGFFFALSIVIGSYQGVELIGITAGETKDPQKNIVKAVNGVIWRILIFYLGAIFVIVSVYPWNQLGDIGSPFVATFAKIGITFAAGLINFVVLTAAMSGCNSGIFSASRMIYTLAHKGEMPKIFTKIMRNGVPLYTVVAVSLGILIGALLNVILPLYIDGAKSIFVYVYSASILPGMIPWFMILFSHLRFRKLHPEELEGHPFKMPGGAVTNYLTILFLILVLVGMVFNVETRISVLIGVIFLTIVTIYYFIRYNKNNVKAK

SEQ ID NO: 2622 - protein, 191 aa, Zea mays
MGVKLRLQASARLIPAGSSSSAKRAYRRPDPGPKMTESLVRNKPGMASIKEMPVVQDGPPPGGFAPVRFARRIPTSGPSATAIFLTTFGAFAYGMYQVGQGNKVRRSPVLATWGWNHACRALKEEKIAARSAILPMLQAEEDERFVKEWKKYLEEEARIMKDVPGWKVGESVYNSGKWMPPATGELRPEVW

SEQ ID NO: 2623 - protein, 367 aa, Mycoplasma genitalium
MLSAGIVGLPNVGKSTLFSAITNLQVEIANYPFATIEPNTGIVNVSDERLDKLASLINPEKIVYTTFRFVDIAGLVKGASQGQGLGNQFLANIREVDLICHVVRCFQDKKIVHVNNTIDPVFDFEIIVNELIQADFELITNRIGKLKRKAESGDKIAKEEFVLLEIVLNGLKQGQMPIQTLSESELKTIKSLNLLTAKPILIVANVSENDLLNLDNNEALKKLNAFLDQKKIPKAITVCSLIEKELSGLKLEQRQYFLDELGLKNYSGLNRVIQAAYQTLNLWSFFTFGKKEVRAWTFKKGWNAPQCAGQIHSDFEKGFIKVEVISWDQLFAMKSLQEAKKQGLIRLEGKNYLIKDGDVCNFKFNVT

SEQ ID NO: 2624 - protein, 147 aa, Glycine max
NCNYFCAILVPEKDQTRADSARGESFFNFFNPPEVPEDDDDIDEDAVEELQNLMERDYDIGSTIRDKIIPHAVSWFTGEAAQSDFEDIDEVDYDDEEGDEDEDEDEDEEEEEEEEEEKKGKSRSKSGGRVKPGKDQPTERPPECKQQ

SEQ ID NO: 2625 - protein, 461 aa, Pseudomonas putida KT2440
MSGNNSNDLAQGLKQRHVTMLSIAGVIGAGLFVGSGHAIAAAGPAVLLAYAAAGTLVVLVMRMLGEMAVASPDTGSFSTYADRAIGRWAGFTIGWLYWWFWVLVIPLEANAAAAILHAWFPAVDLWAFSLIITLALTLTNLCSVKNYGEFEFWFALLKVLAIIGFIAVGCAALFGFVPSSQVSGTSHLFDTQGFMPNGLGAVLAAMLTTMFSFMGTEIVTIAAAESKDPGKQISRATNSVIWRICLFYLVSIFLVVALVPWNDPALAETGSYQTVLSRIGVPNAKLIVDIVVLIAVTSCLNSALYTSSRMLFSLSKRGDAPAIAQRTTKAATPHVAVLLSTAAAFLCVFANFVAPAQVFEFLLASSGAIALLVYLVIAVSQLRMRAQREARGEKITFKMWLFPGLTWATIAFIVAILVVMALREDHRAEIIATALLSIGVVAAGLLVHRKREAAGRAALDS

SEQ ID NO: 2626 - protein, 145 aa, Sorghum bicolor
KNHVMSERKRREKLNEMFLILKLLVPSIQKVAKVSLLAETIAYLKELQRKVQELKSSRELLSRPSETTARPTKPCGIGSESVRKKLSAGSKRKSPDFSGDVEKEHPWVLPKDGTSNVTVAVSDRDVLLEVQCRWEELLMTRVFDA

SEQ ID NO: 2627 - protein, 150 aa, Methanosarcina barkeri
MSDLANQRRLASKILECGLDRVWLNPEASEEIASAITREDIRGLIENGTIKAKPIKGVSRGRARALAAKRKYGHCKGQGSRKGKKGARTPKKEQWIKKIRALRRRLKELRADGTLDKSVYCRLYRKAKGGEYRSVAHLNSHLGSEKLLKK

SEQ ID NO: 2628 - protein, 279 aa, Borrelia burgdorferi B31
MANKINWFPGHMKRALDLIKNNLQKANIVLEILDARAPFSSKNPLTEKITKNQAKIILLHKSDVAQINEIIKWKKYFENLGNTVIISNIYKKGMRKQIIDIIKKLAIVKKIKNYKEKIKVLIIGVPNVGKSSIINLLSGKKSAKVANKPGYTKNIQIVKINEEINLFDMPGILWHNLVDQSIAKKLAILDMIKNEIVDNTDLALYLLEIMDQNNKNILLKKYEIYHKNSLDILQNFAKARKLIGKKNELNLEKASKILIKEFREGKFGKIILDKNYNAF

SEQ ID NO: 2629 - protein, 347 aa, Mesorhizobium loti
MKSYSIAMIPGDGIGRDVTAAAWTVLEAAAKHAGFALTGTEFPWSCKFYKDTGRMMPEDGIETLRGFDAILLGAVGWPAEVPDSVSLHGLLLPIRKAFVQYANIRPHRLLPGVTGPLRAEGFDILCIRENTEGEYSGAGGRVHQGTLDEVAVETSIFTRAGVERILRFGFEQARTRNGKLASVTKSNAQKYSMVFWDEITRKLAAEYSDVAVTSYHVDALAARMIMAPESLDVVVASNLFGDILTDIGAAIQGGLGYAASANINPDHSAPSMFEPVHGSAPDIAHLGIANPIATIWSGAMMLDHLGEKPAADRVMKAVEVATARGIGTIPAKDRTEAITAAVVAALT

SEQ ID NO: 2630 - protein, 215 aa, Ranunculus bulbosus
ALRHEMSVLCDAEVGLIIFSARGKLYEFASAGGMSRTLERYHKNSFSNQDSNLAIDRETQSWYQEVSKLKAKYESLQRSQRHLLGEDLGPLNVKELQNLEKQLEGALAQARSRKTQIMLEQMEALRRKERELGDMNKQLKNKYQLEAEGQGSLRAMQGSWESNALNNYSGHPSHSSSMDCEPTLQIGYHQYVSADGGPIQRNNAGENNFIQGWEL

SEQ ID NO: 2631 - protein, 375 aa, Sinorhizobium meliloti
MDARAAVAIQAGKPLEVMTVQLEGPRAGEVLVEVKATGICHTDDFTLSGADPEGLFPAILGHEGAGIVIDVGPGVTSVKKGDHVIPLYTPECRACPSCLSRKTNLCTAIRATQGQGVMPDGTSRFSLNGDKIHHYMGCSTFSNFTVLPEIALAKVNPDAPFDKICYIGCGVTTGIGAVINTAKVEIGATAIVFGLGGIGLNVIQGLRLAGADMIIGVDLNNDKKPWGEKFGMTHFVNPKEVGDDIVPYLVNLTKRGADQIGGADYTFDCTGNTRVMRQALEASHRGWGKSVIIGVAGAGQEIATRPFQLVTGRTWMGTAFGGARGRTDVPKIVDWYMEGKIAIDPMITHTMPLDDINKGFELMHSGESIRSVVLF

SEQ ID NO: 2632 - protein, 432 aa, Nicotiana sylvestris
MAQILAPSGEWQMRMTKSSTDANPLTSKMWSSVVLKIIKELAVKSSAKFRFFALESDSGTVNQSEQLLNLDVTPYTDKIIAEYIWIGGSGIDMRSKSRTISKPVKHASELPKWNYDGSSTGQAPGEDSEVILYPQAIFKDPFRGGNNILVICDAYTPAGEPIPSNKRHKAAQIFSDSKVVSEVPWFEIEQEYTLLQQNVKWPLGWPVGGYPGTQGPYYLCAGADKSFGLDISDAHYKACLYAGINISGTNGEVMPGQWEFQVGPSVGIEAGDHIWCARYILERITGQAGVVLSLDPKPIEGDWNGAGCHTNYSTLSMREDGGFEVIKKANLNLSLRHKEHINAYGEGILEKLTGNHETASIDKFSWGVAFRGASIRVGADTEKQGKGYLEDRRPASNMDPYVVTGLLAETTILWEPTNEAEALAAQKLALKV

SEQ ID NO: 2633 - protein, 109 aa, Triticum aestivum
MLPSYLYDFPFLGDDSTITVDDNCVDPLYKHIFPPEVAPHLSFIGLPWKIIPFPLFELQSKWVARVLSGRVKLPSKDKMMEDVKAFYSKLEALGWPKRYTHNFSNHQVA

SEQ ID NO: 2634 - protein, 500 aa, Lupinus albus
FLHLRPTPTAKSKALRHLPNPPSPKPRLPFIGHLHLLKDKLLHYALIDLSKKHGPLFSLYFGSMPTVVASTPELFKLFLQTHEATSFNTRFQTSAIRRLTYDSSVARVPFGPYWKFVRKLIMNDLLNATTVNKLRPLRTQQIRKFLRVMAQGAEAQKPLDLTEELLKWTNSTISMMMLGEAEEIRDIAREVLKIFGEYSLTDFIWPLKHLKVGKYEKRIDDILNKFDPVVERVIKKRREIVRRRKNGEVVEGEVSGVLLDTLLEFAEDETMEIKITKDHIKGLVVDFFSAGTDSTAVATEWALAELINNPKVLERAREEVYSVVGKDRLVDEVDTQNLPYIRAIVKETFRMHPPLPVVKRKCTEECEINGYVIPEGALILFNVWQVGRDPKYWDRPSEFRPERFLETEAEGEARPLDLRGQHFQLLPFGSGRRMCPGVILATSGMATLLASLIQCFDLQVLGPQGQILKGGDAKVSMEERAGLTVPRAHSLVCVPLARIG

SEQ ID NO: 2635 - protein, 213 aa, Candida tropicalis
ISLLNILVAGRDTTAGLLSFVFFELARTPRVANKLREEIEDKFGLGQDARVEEISFESLKSCEYLKAVLNECLRLYPSVPQNFRVATRNTTLPRGGGKDGLSPVLVRKGQTVMYSVYAAHRNKQIYGEDALEFRPERWFEPETKKLGWAFLPFNGGPRICLGQQFALTEASYVTVRLLQEFSHLTMDPNTEYSPKKMSHLTMSLFDGANIQMY

SEQ ID NO: 2636 - protein, 275 aa, Neurospora crassa
MPGFDFSNYNRNAALHARGVPLPKATSTGTTIVGCIYDGGVVIAADTRATSGPIVADKNCEKLHFIAPNIWCAGAGTAADTEFTTALISSQLELHSLSTGRKPRVVTCMTMLKQHLFRYQGHIGAYLVVAGVDPTGTHLFTVHAHGSTDKLPYVTMGSGSLAAMSVFETQWKPQLNKEEAMKLCSQAIEAGIWNDLGSGSNVDLAVITPEKTTLHRGFVKPNERTQKLKSYKFKRGTTAVLNEKVIKKEEMGNYISVVELAEETPASGDKMEVDT

SEQ ID NO: 2637 - protein, 539 aa, Bacillus subtilis subsp. subtilis str. 168
MNQLHRRMGTFSLMMVGLGSMIGSGWLFGAWRAAQIAGPAAIISWVIGMVVILFIALSYSELGSMFPEAGGMVKYTQYSHGSFIGFIAGWANWIAIVSVIPVEAVASVQYMSSWPWEWAKWTSGLVKNGTLTGEGLAFASVLLLIYFLLNYWTVNLFSKANSLITIFKIIIPGLTIGALLFVGFHGENFTGGQSIAPNGWASVLTAVATSGIVFAFNGFQSPINMAGEAKNPGKSIPIAVVGSLFVATVIYVLLQIAFIGAVNPSDIAHGWSHLNFNSPFADLAIALNINWLVIVLYADAFVSPSGTGITYTATTSRMVYGMEKNKYMPSIFGKLHPIYGVPRQAMFFNLIVSFIFLFLFRGWGVLAEIISVATLISYITGPITVMTLRRTGKDLYRPLRLKGLNVIAPLGFIFASLVLYWARWPLTGQVLFIILIGLPIYFYYQAKAKWKGFGRNFKAGVWMVFYLLAMMVISYLGSDKFGGLNVIHYGWDMVLIAMVSLVFYVWALKSGYQTEYLKDAKEINSQLLNGQSEAAAGKE

SEQ ID NO: 2638 - protein, 214 aa, Prunus dulcis
TGVRPYEVPMTAAGALQSYKLAVKAIARLQSLPSGSMERLCDTMVQEVFELTGYDRVMAYKFHDDDHGEVVSEITKPGLEPYLGLHYPSTDIPQASRFLFMKNKVRMIVDCCAKQVKVLQDEKLPFDLTLCGSTLRAPHSYHLQYMKNMESIASLVMAVVVNEGDDEVASPDSVQPQKRKRLWGLVVCHNTSPRFVPFPLRYACEFLAQVFPYT

SEQ ID NO: 2639 - protein, 507 aa, Sulfolobus tokodaii
MEKKTNYLRKELSLLNLVIIGIAGAVGTGVLFSSAGMAALAGPAIVISWLLGGIFYLFIGLTYVQLASYYPEAGGPSRYPLYSHGRITNLINAFSDLIWYLFIPPIEALAVVEGLNYFTSNYKIVLINSNGFPTLLGAIIGVLIMLLFIPFNYYSVRFFGMSTTWFGSIKLLLYLAVLLGFLIYFFHFSNFTAYGGFAPFGFAGIFSAIPLAMFAFGGIGVIPDYAEETKDHSVLGKAIIYTVLGQTAIYVAFAIAFIAALDWKGLGISPGNWAALSNLPGNPFIDIAGTRGVISLLVLTGIIGIIGPFVTGYIYQGGGMRVLFAISRSKYVSEKIQELNKYSIPLWALIVFVIVGAVVAYIAAPLPTIYGLISDSVVAGYIGFSANPVAMQALISKGKMKPMIAGSNIISALAFIFASLIIYWSGWPSVPYAVLLLLIACIVFSVVYKVKEDFWNSIWYIAYIGFLTLMTFIGDNGALAILNFYEASAVTAIASLIFYYWGIRSSK

SEQ ID NO: 2640 - protein, 374 aa, Bradyrhizobium japonicum
LQAIEIEGHASAHLFAGPDDLSTLNYTGGTTGKSKGAVRYHRENAGAAAAILADFEIPEDARYLAVAPISHVAGTKVLPTLMRGGTVHMLKGFDPEAVLATIARERINFTLFVPTMIYVLLDHPALSRTDLSSLELVLYGASAMSPSRLIEGIERIGPVFSQLYGQTECYPISVLRKKDHDHRTPELFLSCGFPIAACEVRILDDNDQEVKTGEAGEICVRAPHVMAEYWKRPDITAETLKNGWVHTGDIARKDERGYMFILDRKKDMIVSGGFNIFPREVEDVLSQHADVAMVAVVGIPDEKWGEAVTAIVVPREGAKPDPDELINFVKTRKGFAHAPKQIQFVKQLPMTGVGKVDKKVLRAGFWSGRDRMVG

SEQ ID NO: 2641 - protein, 234 aa, Zea mays
MSRLAAAALRCVVTASRDTSSSRFAVSAPVSARLFSADASGEAAATAAESQDDSFFKASREGLAYGRFYSVIGGGSRLEKNILKTDIIHHLDRCGLSLDDVKIEYNKGYAPLAALLRFSSKAMFTTAIRQANQNRLHRIDEISRETWDLKKSFDGKAVLLQGVPRNALADDIERFLCGTNFEPPPFETFLRAGVPEPIRMMLVKFHTKTDAMNAFITKNRSFCLNSQVSMRVLQ

SEQ ID NO: 2642 - protein, 487 aa, Escherichia coli CFT073
MTRRGKCRGALPSDTLSRGFRMGQSSQPHELGGGLKSRHVTMLSIAGVIGASLFVGSSVAIAEAGPAVLLAYLFAGLLVVMIMRMLAEMAVATPDTGSFSTYADKAIGRWAGYTIGWLYWWFWVLVIPLEANIAAMILHSWVPGIPIWLFSLVITLALTGSNLLSVKNYGEFEFWLALCKVIAILAFIFLGAVAISGFYPYADVSGISRLWDSGGFMPNGFGAVLSAMLITMFSFMGAEIVTIAAAESDTPEKHIVRATNSVIWRISIFYLCSIFVVVALIPWNMPGLKAVGSYRSVLELLNIPHAKLIMDCVILLSVTSCLNSALYTASRMLYSLSRRGDAPAVMGKINRSKTPYVAVLLSTGAAFLTVVVNYYAPAKVFKFLIDSSGAIALLVYLVIAVSQLRIRKILRAEGSEIRLRMWLYPWLTWLVIGFITFVLVVMLFRPAQQLEVISTGLLAIGIICTVPIMARWKKLIMWQKTPIHNTR

SEQ ID NO: 2643 - protein, 149 aa, Mougeotia scalaris
MADQLTEEQIAEFKEAFSLFDKDGDGSITTKELGTVMRSLGQNPTEAELQDMINEVDADGNGTIDFPEFLNLMARKMKDTDSEEELKEAFKVFDKDQNGYISAADWRHVMTNLGEKLTDEEVDEMIREADVDGDGQVNYEEFVKMMMAK

SEQ ID NO: 2644 - protein, 82 aa, Glycine max
  unsure (1)..(82): unsure at all Xaa locations
MAMATKSVSYFTLIFILVLVFFXEAPEIEXQDSECLKEYGGNVGFGFCAXXXFPXICYIRCRXDKDAKGGXCFXGDAGAFDF

SEQ ID NO: 2645 - protein, 383 aa, Zea mays
MAEDRSPKPIHCKAAVCRAAGEPLTIEEIVVDPPKAYEIRIRVICTSLCHTDITFWKAKVAPVFPRILGHEAYGVVESVGEHVEGFAAGDTVVPTFLGQCERCASCASEHSNVCDAVPFVIGPGMRRDGTTRFRDARGSPLHDLLAVSSFSEYTVVDVNQVVKVDPAVPPKLACLLSCGAGTGVGAAWRSAKVEPGSTVAIFGLGSVGLAVVQGAKMCGASKIIGVDLNPDKEEVGRSFGVTDFVNPSQLDKRSVVEVIVEMTGGGVDYSFECIGVPSVMTDAFRCTKMGKGKTIVLGLGRDSDEVCLPSLELLFGRCVMGSLFGGLKPKTHIPVLAKKCMDKELQLDALVTHELGLQDINKAFDLLLQGKSLRCILWMDKDK

SEQ ID NO: 2646 - protein, 366 aa, Bacillus coagulans
MKMKLAVLPGDGIGPEVMDAAIRVLKTVLDNDGHEAVFENALIGGAAIDEAGTPLPEETLDICRRSDAILLGAVGGPKWDHNPASLRPEKGLLGLRKEMGLFANLRPVKAYATLLNASPLKRERVENVDLVIVRELTGGLYFGRPSERRGPGENEVVDTLAYTREEIERIIEKAFQLAQIRRKKLASVDKANVLESSRMWREIAEETAKKYPDVELSHMLVDSTSMQLIANPGQFDVIVTENMFGDILSDEASVITGSLGMLPSASLRSDRFGMYEPVHGSAPDIAGQGKANPLGTVLSAALMLRYSFGLEKEAAAIEKAVDDVLQDGYCTGDLQVANGKVVSTIELTDRLIEKLNNSAAGPRIFQ

SEQ ID NO: 2647 - protein, 211 aa, Gossypium thurberi
DVYYWECKGYTPLFPRILGHEASGIVESVGEGVNDLKPGDHVLPIFTGECKECRHCLSEETNNMCELLRINCDRGVMLADGKTRFSINGKPIYHFVGTSTFSQYTVVHVGQVAKISPTAPLDKVCPISCGICTGFGATVNVAKPKKGQTVAVFGLGAVGLAAAEGARVCGASRIIAVDVNPRRFEEAKRFGITEFVNPKDYDKPVQEVIVE

SEQ ID NO: 2648 - protein, 476 aa, Ralstonia solanacearum
MSLFRTKNLDHMIRTGQGDTGLKKVFGPLDLTFLGVGAIIGTGIFVLTGTGALTAGPALTLSFVVAALACGFAALCYAEFASTIPVSGSIYTYAYATLGELVAWIIGWDLMLEYGLATSAVSVGWSGYFQSLMAGFGLHLPAALMAAPGAIPGVQTLFNLPALLIMLIITAVLSLGVRESARFNNIMVAIKVAVVVLFIVVGARHVQPANWQPFMPFGMSGVFGAAALVFFAFIGFDAVTAAAEEVRNPERDLPIGIIGSLGVCTILYVVVAAIMTGIVPYTKFAGVDHPVSLALQMGGETWVAGFVDLGAIIGMTTVILVMGYGQTRVIFAMSRDGLLPKRLSRVHPRYATPFFNTWLVGIVFALIAAFVPLNVLAELINIGTLAAFSLIAIAVLVLRRKRPDLPRGFRCPGVPFVPAAAVVLCVFLMSQLQALTWIAFVVWMVIGLLVYFGYARSRSLLHAPDRAAVPGSEAAH

SEQ ID NO: 2649 - protein, 396 aa, Pseudomonas syringae pv. syringae B728a
MSGPQQISILGATGSIGLSTLDVVARHPALYQVFALTGFSRLDELLALCIRHTPQYAVVPDQVVARKLQDDLAAAGLDTRVLVGEGGLCEVAADPRVDAVMAAIVGAAGLRPTLAAVEAGKKVLLANKEALVMSGALFMQAVRQNGAVLLPIDSEHNAIFQCLPGDFARGLGAVGVRRIMLTASGGPFRETPLEQLHNVTPEQACAHPVWSMGRKISVDSATMMNKGLELIEACWLFDARPDQVEVVIHPQSVIHSLVDYVDGSVLAQLGNPDMRTPIANALAWPARVDSGVAPLDLFRIGQLDFQAPDEERFPCLRLARQAAEAGGSAPAMLNAANEVAVAAFLDGRIRYLEIAGIIEEVLDHEPVTAVEGLEAVFAADAKARLLAGQWFERHGR

SEQ ID NO: 2650 - protein, 451 aa, Glycine max
  unsure (1)..(451): unsure at all Xaa locations
MSQHHGDEMEYAADDNEMAEVEEDMYFRGRAFGESDSEXDDDDYEYDPLENRIXDTTAAEARRGKDIXQGIPWDRLSISREKYRQTRLEQYKNYENIPQSGEKSEKECKPTDKGGKYYDFWQNTRSGXRTILHFQLRNLVWSTSKHDVYLVSRYXIVHWSSLTSKRSEILNVSGHVAPCEKHPGSLLEGFTQTQISTLAVRDNLLIAGGFQGELICKYLDRPGVSFCSRTTYDDNAITNAVEIYEHPSGAVHFMASNNDSGVRDFDMERFQLSKHFCFPWPVNHTSLSPDGKLLAVVGDNPKGLLVDSQTGKTITPLRGHLDFSFASAWHPDGRIFATGNQDKTXCRVWDVRNLSKSVAVLKGNLXGAIRSIRFTSDGQFMAMAEPADFVHVYDAKHGFENEQEIDFFGEISGVSVQPXDQQSLFIGVWDRTYGSLLQFNRRRNYMYLDCL

SEQ ID NO: 2651 - protein, 144 aa, Glycine max
  unsure (1)..(144): unsure at all Xaa locations
MKKQQQQEKHKKQMVNEESKKKERHIVTWTQEEDDILREQIGVHGTENWAIIASKFKDKTTRQCRRRWYTYLNSDFKKGGWSPEEDMLLCEAQKIFGNRWTEINRVVSGRTDNAVXNCFSTLCKKRAKYEXLSKREQHFIHQFK

SEQ ID NO: 2652 - protein, 139 aa, Zea mays
MEKMNVVASRKQPGDWSCRSCQYVNFCKRDACQRCGEGKLGVERTDYAALGGDWDVKPGDWYCYRCGVNNYASRASCFKCAAAKNESTAAVAQGWGYTVAGQAGMMPGDWICPRLGCNVQNYANRTECFRCSMPKSYYG

SEQ ID NO: 2653 - protein, 440 aa, Oryza sativa
  unsure (1)..(440): unsure at all Xaa locations
MSFRSIVRDVRDGFGSLSRRGFEVRILGHRRGKSHGAVHELHDPVPVIQSSCWASLPPELLRDIIERLEESEATWPSRKHVVACAGVCRTWREMCKEIVKNPELCGKITFPISLRQPGPRDGTMQCFIRRDKSTQTYYLYLSLGSAVLVDNGKFLLSAKRNWHATCTEYVISMNANNLSRSTNTNIGKLRSNFLGTKFVIYDTHTPYNATSDSQSGKTSRRFSNKGTAKHPCSTYSIANISYELNVFGTRGPRRMCCLMHSIPASSLEAGGTVPSQPDSILAHSLNESSFRSVSFSKSSVMDHSMHFSSAQFSDISIGDCPRRGQVLSDDEECKETPLILQNKAPRWHEQLQCWCLNFRGRVTVASVKNFQLIAAXXQPAAGAPTPSQPVPPPPPEHDKVILQFGKVAKDMFTMDYHYPLSAFQAFAISLSSFDTKLACE

SEQ ID NO: 2654 - protein, 439 aa, Triticum aestivum
  unsure (1)..(439): unsure at all Xaa locations
MSNYHDDHVEDMEDDYDMDDPAEDMVDAHHERGLRDSDSEDDEYAHSNDKIPDTSAADARKGKDIQGIPWERLAITRENYRQTRLEQYKNYENIPNSGEAAAKECKPTVKGGMYYEFRQNTRSVKSTXILHFQLRNLVWATSKHDVYLMSHYSVLHWSALSGVDTELMNVQGHVAPREKHPGSLLEGFSQTQVSTLAVKDNLLVAGGFQGELICKHLDREGISFCCRTTYDDNAITNAVEIFNTASGAVHFMASNNDSGVRDYDMERFQLCKHFQFDWPVNHTSLSPDGKLVVIVGDDPNDLLIDANSGXKTLHSMKGHHDFSFASAWSPDGRTFATGTNDKTGRIWEARNLSKAVHVLKGNLGAISSFRFTSDGQFLSMAEPVDFVERLQEKANSNTSSERYFVGASARTYMSPSSDGRIEDMWDRTYGSLLQFGRPV

SEQ ID NO: 2655 - protein, 373 aa, Thermosynechococcus elongatus BP-1
MGSWPSWDCSASSCNGWPNPWGSAMKAAVLYGKEDVRIETVPDPTPGPGEVVIRVRAATTCGTDLKVWRRGGHARMLTPPILFGHEAAGEIVALGAGVTGWQVGDRVVANNSAPCGQCFYCQRQAFSLCPHLEFNNGTFAEYLKLPASIVRQNLLPIPESLPFALAALTEPLACVLHGVARSGFDPAMVATWPSPPQIVVLGDGAIGLMFVGVLAQQGARVLAFGGSNQRLAIATTFGAEQTINHHQCGDIPAVVKDWTEGRGADIVIEATGVPEVWETAIACGRPGATINLFGGCPRETTIRVDTERLHYEELTLKGVFHNTPSFVRQALQLIASGTLPFEKLISGQAPLMEIETVLQAMKARQVIKVALQP

SEQ ID NO: 2656 - protein, 236 aa, Clostridium perfringens str. 13
MNNLVNNPLFGILLTLFAFEIGMTIYKKTKIPLLNPLLIAIALVIAVLVSCHISFETYNIGGSFINAFLGPATVILAVPLYKQLQLLKNHFVPIMTGIIVGSFASMCCVIIMGYFLGVNHELIASLVPKSVTTPIGVEVASGLGGIPSITVIAVIITGITGAIIAPMVCKLLKIEHEVAMGVSMGTAAHAVGTTKALEIGETHGAMSSLSIGVAGLITVFLAPPIYMISALILKFV

SEQ ID NO: 2657 - protein, 183 aa, Shigella flexneri 2a str. 301
MQDSILTTVVKDIDGEVTTLEKYAGNVLLIVNVASKCGLTPQYEQLENIQKAWADRGFVVLGFPCNQFLEQEPGSDEEIKTYCTTTWGVTFPMFSKIEVNGEGRHPLYQKLIAAAPTTVAPEESGFYARMVSKGRAPLYPDDILWNFEKFLVGRDGKVIQRFSPDMTPEDPIVMESIKLALAK

SEQ ID NO: 2658 - protein, 242 aa, Syringa vulgaris
  unsure (1)..(242): unsure at all Xaa locations
LVQLRRMENKINRQVTFSKRRNGLLKKAYELSVLCDAEVGLIIFSSRGKLYEFGSAGMTATLERYQRCCFNPQNAGAGAERETQSWYQEVSKLKAKYESLQRTQRHLLGEDLGPLNVKELENLEKQLEGSLSQARQRKTKIMMEQMEDLRRKERQLGEMNKQLKIRVSLELSSHETEGQGLRGFPCQXNAAASAGTSNFMAQPGTNPMEFEPEPVLQMGYHHYNLGEGPLFQDHGYRSFDLF

SEQ ID NO: 2659 - protein, 266 aa, Glycine max
MLELRLVQGSLLKKVLESVKELVNDANFDCSSTGFSLQAMDSSHVALVALLLRSEGFEHYRCDRNISMGMNLNNMAKMLKCAGNDDIITIKADDGSDTVTFMFESPTQDKISDFEMKLMDIDSEHLGIPEAEYHAIVKMPSSEFARICKDLSSIGDTVVISVTKEGVKFSTKGDIGTANIVCRQNTSVDKPEEATVIEMNEPVSLTFALRYMNSFTKATPLSNTVTISLSNELPVVVEYKIAEMGYVRFYLAPKIEEDEEDTKPQV

SEQ ID NO: 2660 - protein, 182 aa, Oryza sativa
SGLLLRSHYSGPRVPKLITTMVKGGKPVMLVGIDDSDHSYYALEWTLKHFFALGQPQQYHLVLLTSKPPASAVIGIAGLGTTELLPTLELDLKRGAARVIEKAKEMCSQVIVIDASYEVLEGDARNILCEAVERHHADMLVVGSHGYGAWKRAVLGSVSDYCSHHAHCTVMIVKRPKHNTHS

SEQ ID NO: 2661 - protein, 264 aa, Triticum aestivum
  unsure (1)..(264): unsure at all Xaa locations
MLELRLVQGSLLKKVLEAIKELVTDANFDCSGTGFSLQAMDSSHVALVALLLRSEGFEHYRCDRNLSMGMNLGNMAKMLRCAGNDDIITIKADHGSDTVTFXMFESPNQDKIADFEMKLMDIDSEHLGIPDSEYQAIVRMPSSEFSRICKDLSSIGDTVIISVTKEGVKFSTAGDIGTANIVCRQNKTVDKPEESTIIEMQEPVSLTFALRYMNSFTKASPLSDQVTISLSSELPVVVEYKIGEMGYIRFYLAPKIEEDEEMKA

SEQ ID NO: 2662 - protein, 199 aa, Leavenworthia stylosa
SVGEGVTDLQPGDHVLPIFTGECGHCPHCHSEESNMCEFLRINTERGGMILDGESRFSINGKPIHHFLGTSTFSEYTVVHSGQVVKINHKAPLDKVCIVSCGLTTGLGATLNVAKPKKGQSVAVFGLGAVGLGAAEGARIAGASRIIGVDLNSKRFEEAKKFGVTEFVNPKEHNKPVQQVIAEMTNGGVDRSVECTGSV

SEQ ID NO: 2663 - protein, 315 aa, Deinococcus radiodurans
MEYRKLGKSGLKVSEVALGGWETYGVNQDASKMVGDIVRAAYDEGVNFFDQADVYARGQSEQLMGAVLRDFPRHTLVLSSKVFWPMSDDVNDRGLSRKHVLESIDGSLRRLGTDYLDIYFAHRYDPEVPMEEIVMAFDQVIRDGKALYWGTSMWPAARIAQAVEFAKANGLHAPVTEQPEYSMVRRDRVEQEILPYTEGAGIGLVVWSPLAMGLLTGKYDEGRPEGARLTEKENWAGSYLTDENIQKVRDLKSIADDLGVTRAQLALAWLLRQKGVSSVITGATKVNQIQDTVKAAGVRLSDDVQRRIEDILKPA

SEQ ID NO: 2664 - protein, 314 aa, Triticum aestivum
MMTAMVKAEPTGAAAGAEGSSGRRDAEAELNLPPGFRFHPTDDELVVHYLCRKVAGQPQPVPIIAEVDLYKFNPWDLPERALFGSREWYFFTPRDRKYPNGSRPNRSAGTGYWKATGADKPVAPRESGGRTVGIKKALVFYSGRAPRGVKTDWIMHEYRIAEADRAPGKKGSLKLDEWVLCRLYNKKNNWEKLKVEQDMAVEAGPNGEVMDALATDAMSDSFQTHDSSEIDSASGLQQRGFMDMAQRQARMVTVKEDSDWFTGLSMDDLQTCYMNMGQMVNPTAMPGQNGSGYLQPMSSPQMMRPMWQTILPPF

SEQ ID NO: 2665 - protein, 248 aa, Vibrio vulnificus CMCP6
MTDLLNLSGKVALVTGASRGIGRAIAETLVARGATVIGTATSENGAAAISEYLGENGKGFALNVTDAESVESVLKAINDEFGAVDILINNAGITRDNLLMRMKDDEWNDIMDTNLTSIFRLSKAVMRGMMKKRDGRIINVGSVVGTMGNAGQANYAAAKAGVIGFTKSLAREVASRGVTVNTVAPGFIETDMTRALNDEQRATTLANVPAGRLGDPREIAEAVVFLASPAAAYITGETLHVNGGMYMV

SEQ ID NO: 2666 - protein, 296 aa, Euglena gracilis
RSYMEKYAKDEVAYFRDFATAYQRLAELGVPELPVPWDEIRADVAALVAEKGCAPILIRLAWHDAGTYDQQSNTGGPRAVMRFPGGEAEHGSNNGLDIARGLLQPIVDKYSWVSTADLWAFASVVATEVSGGPKIPFRPGRRDAVTAKEAVERGRLPDATQTTNHLRDVFYRMGMTDEEIVALSGAHTMGRCHAERSGFEGPWTDNPLVFDNSYFKLLLERKWTAVTNSVGNLQFQDETGTLMMLTSDLALLMDPSFRKHVERFAADQDAFFRVYAGAYQKLTEGGCPFSKGAVPL

SEQ ID NO: 2667 - protein, 140 aa, Zea mays; identical to SEQ ID NO: 1542

SEQ ID NO: 2668 - protein, 578 aa, Podospora anserina
MSAVQNPVEEAVVLPQPQRLSLLKGPTDPPLVDLTLGELLNLQCLHHGNREGIVIPWTGARWTYNELNHHSRLLAAALLEMGIGVGDRVGIMAGNCEQYAAVFFAATRIGAILVIMNNTYTPTEALYGLDFSECKVFFTTKKIGRLDQGPLLTQLAARATGPKVVILRGDSEGYPIYKELLTQGARVDPERLHHAESKVLPHLVCNLQFTSGTTGLPKAAMLTHHNIVNNSRFIGDRMRLTHNDVLCCPPPLFHCFGLVLGLMAVITHGGKIIYPAEVFDAPATLRTIIGEQCTAVHGVPAMFDSLLALPEAKNLKAADLRLRTGIVAGAPVPRHLMELMVSKLGMKEFTSSYGLTEASPTCFNAFTDDPIDTRLTTVGTLMPHARAKIVDRDGVIVPIGTRGELCIGGYQLQAGYWNNSEKTNDCMMKDEAGVLWLHTGDEAVFDERGYCTITGRFKDIIIRGGENIYPLEIEERLVAHPSISMAVVVGLKDAHYGEVVGAFLQLDPAHTASTKPTVEEVREWCRRKLGKHKAPTHVFWLGHDGVPAAVPLTGSGKVRKFEMAQLGNKLLEGVKAKL

SEQ ID NO: 2669 - protein, 113 aa, Zea mays
MAPREHHQPQEEEEEDTAGVVKLISAEGFEFVVDKKAAMVSNTLRNMLTSPGGFSETRQGEVRFPEIPTNILEKICQYFYWSLHYSSGKETAEFLIEPEITLELMMAANYLDT

SEQ ID NO: 2670 - protein, 279 aa, Triticum aestivum
MAKQKQQQQPKPAADAAPPPREFKTAHSPWFTYASMVTLFSLCPPFVILLWYTVVHADGSVARTYEHLRDRGILEGLKAIWPMPTVVAGKIILGFALFEAALQLLLPGKRFEGPISPAGNVPVYKANGLLAYAVTLVTYLSLWWFGIFNPAIVYDHLGEIYSALVFGSLVFWLCLYIKGHVAPSSSDSGSSGNGVIDFYWGMELFPRIGKHFDIKVFTNCPVGMMSWAVLAGTYCIKPYEMKGRVADSMLGNLDGSDLFTKGFWGWESGYWCTMDIAHD

SEQ ID NO: 2671 - protein, 254 aa, Triticum aestivum
MAAKCYPTVSDEYLAAVAKARRKLRGFIAEKNCAPLMLRLAWHSAGTFDVATKTGGPFGTMKCPAELAHGANAGLDIAVRLLEPIKEQFPILSYADFYQLAGVVAVEVTGGPEVPFHPGRQDKPEPPPEGRLPDATQGSDHLRQVFSTQMGLSDQDIVALSGGHTLGRCHKERSGFEGAWTANPLIFDNSYFTELLSGEKEGLLQLPTDKTLLTDPAFRPLVDKYAADEDAFFADYAEAHLKLSELGFGEAGCC

SEQ ID NO: 2672 - protein, 206 aa, Michelia figo
  unsure (1)..(206): unsure at all Xaa locations
VQLKRMENKINRQVTFSKRRNGLLKKAYELSVLCDAEVALIIFSSRGKLYEFGSAGTNKTLERYQRCCYTPQDVVVSDRETQGWYQEVSKLKAKYESLQRSQRHLLXEDLGPLSVKELQHLERQLEVALSQARQRKTQIMIEQMEELRKKERQLGDINKQLKIKLEAEGQGPFRCIQGSWESGAMVGNNTFSMNAPQAAPLDAXSP

SEQ ID NO: 2673 - protein, 1078 aa, Listeria ivanovii
MREKNWLQGVLIITLLTMIVACISMDFKTNVRAASISQPMPINKLFPDPGLSETIAETLSKKNITDVVSQQELSSIDELYADESWIKSIKGVQYLSNLRKIFFQKNQIKDISDLASLIKLEEVRLNGNQISDISALANLSKLNVLDLSNNQIKDIDALSNLVKLKSLNLDDNQLTDISRLESLTALKELFFTGNQITDIRVLSKLTNLTELVFNKNQVTNIAALSKLTNLTALGFRENNVKDIAPLVKLVKLTTLAFSQNQVKDISVLETLDILVYLAFDGNQVKDISVLAKLNHLAYLVFDDNQVTNIDALAKLPNLIGVMFNDNRVRNMSPLANLTKLEKLHAEGNYIQDVKALSSLTKLKELKLDRNCIVDISPLAGLNNLDELELSNQIFTNSTIGYQENLTISNIIKDRAGELIVPDTISDNGTYKKPNISWNIPTLKKEVSYDFELYVIIGQAGSYFSGKVIQPLNKLDTIEYNKAINAYGRVKSGVKSAIWSHPYRTKDAKQIGTLSVYAGKNLRILQEAKTTSGTYYQIRVGKKTIGWVEAKNIAFFYKPSMEKKANGVRYIAPGKESQHVYKLPVIDAAIDEGTLAKFKGKKLTLQREVTIEKEKWMLLQGIGWVKATNLSTEHYDKVLYNKAITAYARVQIAKGKQVWSTPYRIAGYKVIGSLSRYNGKNLRILREAKTRSGIYYQVRVGKKTIGWVEAKNITVFYKPSMEKKANGVRYIAPGKESQHVYKLPVVDAAIDGGTLAKFKGKKLTLQREAIIGKEKWVLLQGVGWVKATNVSALRYDKVFYNKTVTAYARVKTVMVWSNPYRNAGNKAIGSLSRYTGKNLRILREAKTRSGVYYQVRAGKKMIGWIEAKNLTVFYKPSMEKKVKGTRYIVPGKEGQHVYKLPVADAAIDGGTLARFKGKKLTLQREVTIGKEKWVRLQGVGWVKATNVSALRYDKVFYNKAVIAYAKVKTPMVWSTPYRTAGYKAVGPLLHYTSKNLRILREAKTRSGVYYQVRVGKKTIGWLEAKNLAVFYKPSMEKKAAGTCYVVARKKNNLYYSLPVADGTISRGKLQKISRKNLTR

SEQ ID NO: 2674 - protein, 349 aa, Burkholderia fungorum
MRYNQLGRTGVFVSELCLGTMTFGGGEGMWKQIGDLQQGDAERLVGRALDAGINFIDTADVYAEGLSEQITGQALKNLKVPRDKVVVATKVFGQTGEFPNARGASRYHIIDGVKASLKRLQLDHVDLYQIHGFDAATPIEETLRALDTLVQHGHVRYVGVSNWAAWQIAKALGISERLGLARFETLQAYYTLAGRDLERELAPMLRSEGLGLMVWSPLAGGLLSGKYGREQQGEAGSRRTTFDFPPVNRERAYDCIDVMRDIAGTKKVSVAQIALAWLLHQRVVTSVIVGAKKVEQLDDNIAATAVSLTADELAKLDQVSALPAEYPGWMLDRQGEPRRKQLEEVRHPA

SEQ ID NO: 2675 - protein, 84 aa, Triticum aestivum
  unsure (1)..(84): unsure at all Xaa locations
MGLAMGKLMLGKIIVETPKHEVLHTGDGYEIRKYPPCVAAEVTYDPKEMKGDRDGGFQVLANYIGAFGKPQNTKPEAIXMTAPV

SEQ ID NO: 2676 - protein, 169 aa, Leavenworthia stylosa
NTERVGMIHDGESRFSIKGKPIHHFLGTSTFSEYTVVHSGQVAKINPEAPLDKVCIVSCGLSTGLGATLNVAKPKKGQSVAVFGLGAVGLGAAEGARIAGASRIIGVDLNSNRFEQAKKFGVTEFVNPKEHDKPVQQVIAEMTNGGVDRSVECTGSVQAMIQAFECVHD

SEQ ID NO: 2677 - protein, 755 aa, Novosphingobium aromaticivorans
MPPGRARARRHRLLGGARKHRGRIFLGRRHHVSQYRPRSRDPGNGDDPHRRRPRAALCLRPRAEARAQAPDQRDQVQRHRYHHALLGPARRSHRRRVSRRQPRQVPHRHPDRAVRAEPRPLRRGRRLQPVRRYPLRPRPGLHRDDRRCTFGQHQSRRHPPLAVRAGPRFCPRHRGPGHRQSRRPDLVGGDDAGTPGRGRGRRCHHARGRAGPRYAIGPHSRSQGRCKHRCLRQGHRRSARLGHCGARQKMLRSAVRKRRGRAFIPAFGQTLSCRGHRLGPLVTRMERAAMNALSPTLTNRSLVDIDRDHLIHSVTSFRGHEQHGAIVLESGDGMWLTDAEGNRILDAFAGLWCVNVGYGQESIVEAAAAQMRKLPYATGYFHFASEPAIRLAGELTAAAPSGLDHVFFTQGGSDAVDSAIRYIVHYWNAAGKPSKKHFIALEWGYHGSSSLGAGLTALGNFHRNFDLPRPWQHHIASPYPYRHPQGDDDAAVIASTVAALEAKVAELGADNVAAFCCEPIQGSGGVIVPPRGWLKALREACTRLGILMLVDEVITGFGRTGPLFACEEEGVSPDFMTTAKGLTAGYIPMGAMFMADHVYQTIADAAPAALPIGHGQTYSGHPVAAAVGLEVLRLYREGGLLENGRKTGERFAWHMERIRAHPLVGDVRYRGLLGAIELTPDKATKAIFDASLDIGGRLSKLTYANGVIVRCFGNAVLGFAPALCCTLEEMDMIFERVERSLDQLLDQPDIRALVV

SEQ ID NO: 2678 - protein, 216 aa, Oryza sativa
MGLYDTLKRRWERDDGGALPLHRKVAAGLFSGGVGAAVGNPADVAMVRMQADGRLPAAQRRNYRSVADAIVRMARDEGVCSLWRGSPLTVKRAMIVAASQLATYDQAKEAILARRGQGADGLATHVAAGLAAGLVAASASTPVDVVKTRVMNMKVVAGAPPPYSGALDCLIKTVRSEGAMALYKGFVPTVTRQGPFTIVLFVTLEQVRKLLKGVDF

SEQ ID NO: 2679 - protein, 373 aa, Rhodopseudomonas palustris
MHPRLQSHAKAWMAGTSPAMTDENRDRCHHQKTRPPMDYRSLGRSGLKVSPLCLGTMMFGGATDEPTSARIIDKARNAGINFIDTADVYSMGASEQVVGRAIAAHREHWILATKVANPMGDGPNRAGLSRRRVLQAADDSLKRLGTDWIDIYYLHREDHATPLDETVRAIGDLIRAGKIRYFGVSNYRAWRVAEICNICDRLGIDRPVVSQPYYNAMNRMPEVEHIPACGFYGLGIVPYSPLARGVLTGKYAPDVQPDKDSRAGRADKRMLQTEWRPESLKLAQQIRAHAEAKGATAVQFAVGWVLNNALVTSVIAGPRTEQQWDDYVRALDYRFTSDDEALVDALVASGHPSTPGYNDPAYPIEGRTVRHAG

SEQ ID NO: 2680 - protein, 542 aa, Cytophaga hutchinsonii
MLVSFHSMQSSLFRTKNPNELHTEVSALKRTLTFKDLTALGIAAVIGAGIFGTIGQAAYDGGPGIIFLFIITSLGCLFSAFCYAEFAASTPISGSAYTYAYISFGELIAWIIGWDLFMEYAVGNMAVAISWSDYFTAFLKGVNIEFPLWLSMDYFTAVHQKSAAAQQAYVHAPRIFDFPVIVDLPAILITVLITILVYIGIQESKRTNNVLVVFKIIVLLLFIIVGFTTVNTANWSPFIPNGWSGIFKGTAAVFFAYIGFDALSTTTEECVNPKRDLPRAIFSSLLISTLIYIAIALVITGMVSYHDLNVGDPLAYALEKTGLHKFAGLLSFSAIVSMTGVLLVFQIGQPRIWMNMSRDGLLPKALSRIHPRYQTPSVATVLTGGSIILPLLFLDLKEVVDLTSIGTLFAFLIVCAGIWLKKEKIKTESFTVPFIGGRYLLPVTMLPVLYLYLHTVSTENVFSFTQIPLYSCILAMIATIFYGSVRNLSLLPGIGVCLNLLLLSTMHHQNWIRFVAWLAIGLIVYMTYGRKHSVLAGPSTKG

SEQ ID NO: 2681 - protein, 159 aa, Glycine max
MSRPGDWNCRTCNHLNFQRRESCQRCGEPRSGGGGDYGGGFGGGRGSSSFGFTTGPDVRPGDWYCTVGNCGAHNFASRSSCFKCGAPKEDSSAGPFDADMPRMRPYGFGGGSSARPGWKSGDWICTRSGCNEHNFANRMECYRCNAPRDSSSARSPYSS

SEQ ID NO: 2682 - protein, 384 aa, Brachylophon curtisii
DLEPVNPADVPVTAAGALKSYKLAAKAISRLQSLPSGNISMLCDVLVKEVRDLTGYDRVMVYKFHEDEHGEVVSECRRPDLEAYLGLHYPATDIPQASRFLFMKNKVRMICDCLAPPVKVIQDERLPQPLSLCGSTLRSPHGCHAQYMANMGTIASLVMSVTINEDDDMMDGDQRQMARKLWGLVVCHHTSARFVPFPLRYACEFLIQVFGVQINKEVELAAQVREKHILRIQTLLCDMLLRDAPVAIITQSPNVMDLVKCDGAALYYKKKFWLLGITPTEAQIRDIAEWLLEYHNGNTGLSTDSLMEAGYPGASVLGDAVCGMAAVSITSRDFLFWFRSHTAKEIKWGGAKHDPDDKDDGRKMHPRSSFKAFLEVVKWRSLPW

SEQ ID NO: 2683 - protein, 78 aa, Triticum aestivum
MDASALNDPRFQALLEEEKKKAMMNEMIAKLTDTCWDRCITGSIGSSFSNSETSCLSNCAKRFIDVKMLTMQRANSSS

SEQ ID NO: 2684 - protein, 412 aa, Triticum aestivum
PIPRFLPSTPPRRSGAEPDAAQASKKDAEPAERPILGRFSSHLKIGIVGLPNVGKSTFFNIVTKLSIPAENFPFCTIEPNEARVHVPDERFDYLCQLFKPKSEVAAYLEINDIAGLVRGASAGEGLGNAFLSHIRAVDGIFHVLRAFEDTEITHIDDTVDPVRDLETISQELRLKDIEFVQAKIDDLEKSMKRSNDKQLKIDHELCQRVMTHLQDGKDVRLGEWKAAEIEILNAFQLLTAKPVVYLVNMSEKDYLRKKNKFLPKIHAWVKEHGGETIIPFSCAFEQKLVDMPEDEAAKYCTENQTTSLIPKIIKTGFAAIHLIYFFTAGHGEVKCWQIRRQSKAPQAAGAIHTDFERGFICAEVMKFEDLKELGSESAVKAAGKYRQEGKTYVVQDGDIIFFKFNVSGGGKK

SEQ ID NO: 2685 - protein, 104 aa, Triticum aestivum
MVYIGAHGVETLKRYRYSGQDHSVVAKYVLQPFWSRCVTLFPLWMPPNMITLMGFMFLLTSSLLSYIYSPHLDTAPPRWVHLAHGILLFLYQTFDAVDGKQARR

SEQ ID NO: 2686 - protein, 155 aa, Aeropyrum pernix
MDYRFQRRLAAEILGVGESRIWISPDPELREEIEGAVTKADVRALIKRGVIKVLPEKGNAGHASKVRHLQRRKGRRRGMGRRKGVATARLDPKERWMHRIRKIRRYLRYLRDKQVIDRKTYRRLYMLAKGGTFRDLASLKRYMADRGLVPEEKIR

SEQ ID NO: 2687 - protein, 77 aa, Lycopersicon esculentum
YKGIYWQEEIIPFFQSATLPKDCTSVQQCYLELSKQVKEKLSAIDPYFTKLADAMVTWIEAWDELNPKPSISNGPGK

SEQ ID NO: 2688 - protein, 335 aa, Ralstonia solanacearum
MSLPPILQNRLSVPVVGSPLFIISNPDLVIAQCKAGVVGSFPALNARPAELLETWLQRITTALAEYDAQHPDKPSAPFAVNQIVHKSNDRLEHDLALCVKYKVPIVITSLGAREEVNHAVHSYGGIVLHDVINNTFAKKAIDKGADGLIAVAAGAGGHAGTTSPFALIHEIREWFDGPLLLSGAIANGNAILAALAAGADLAYVGSAFIATEEANAIEAYKQAIVESTASDIIYTNLFTGVHGNYLRKSIVASGLDPDALPESDPSKMNFGSGDGAKAKAWKDIWGAGQGVGAVKRVVPAAELVRRFAKEFEMARRRLGHIEALRAPTGASATTA

SEQ ID NO: 2689 - protein, 328 aa, Sinorhizobium meliloti
MVAPRILVTGGAGYIGSHTAKLLRLEGIEPVVYDNLTTGNRSAVRWGPFVQGDILDGRRLIEVIEAHQPDAVIHFAASAYVGESVADPAKYYNNNVRGTLSLLDACRQTGVDKVIFSSSCATYGVPAVLPIDEATPQAPINPYGKTKLVAEHMLADYAAAFALNYVSLRYFNACGADPEGDLGEWHDPETHLIPRALMAAAGRIPHLEIFGEDYDTPDGTCVRDYIHVADLASAHVLAYRHLAKGGGNVALNLGTGRGFSIKEVLRTIGEITGHDVPVVFRRRRAGDPPALYADAGLACRTLGFLPRYSDLETIVRTAAPFFGLEVRS

SEQ ID NO: 2690 - protein, 376 aa, Tripsacum dactyloides
ALSIAGAVQSQKLAVRAISRLQALPGGDVKLLCDTVVEHVRELTGYDRVMVYRFHEDEHGEVVAESRRDNLEPYLGLHYPATDIPQASRFLFRQNRVRMIADCHATPVRVIQDPGLSQPLCLVGSTLRAPHGCHAQYMANMGSIASLVMAVIISSGGDDEQTGRGGISSAMKLWGLVVCHHTSPRCIPFPLRYACEFLMQAFGLQLNMELQLAHQLSEKHILRTQTLLCDMLLRDSPTGIVTQSPSIMDLVKCDGAALYYHGKYYPLGVTPTESQIKDIIEWLTVCHGDSTGLSTDSLADAGYLGAAALGDAVCGMAVAYITPSDYLFWFRSHTAKEIKWGGAKHHPEDKDDGQRMHPRSSFKAFLEVVKSRSLPW

SEQ ID NO: 2691 - protein, 332 aa, Mycoplasma pulmonis
MSDKLTLNNIEALTNAIDVKMEEDKTIVLYGQDAGFEGGVFRATAGLQKKYGEERVWDSPIAEASQTGVGVGAAIYGLKPIVEIQFQGFSYPAFQQLMVHAARYRNRSRGRFSVPMVLRMPMGGQVRALEHHSEAIEALYSHIPGLKVVMPSNPYDTKGLMIAAIEDPDPVVFLEHKRIYRSFKQEIPAGRYTVEIGKANVIYEGDDLTLVTYGAQVHDTIKAMDLLDEEGKEYSIELIDLRTISPLDSETIIESFKKTGRLLVVHEAVRSFSVSAEIMARVSEEAGDYIKTPLARLTGWDITVPLAKGEQYHALSPERIADAIKKVMEREE

SEQ ID NO: 2692 - protein, 78 aa, Oryza sativa
MDASALSNPRLQAMLEEEKRKAMANEFVAKLTDVCWDKCITGSIGSSFSNSEASCLSNCAKRFLELKMLTMQRVSSPR

SEQ ID NO: 2693 - protein, 221 aa, Clostridium thermocellum ATCC 27405
MQKQGAYGFVILGGIINNRGKVVFEVAVLVTGGAGYIGSHTVAELVEKKEEVIVVDNLEKGHRDAVAGAKLIVGDLRDKEFVKKVFLENDIEAVIHFAAYIEVGESVQNPLKYYNNNVIATLNLLTAMEEAKVDKIVFSSTAATYGEPENIPILETDRTLPTNPYGETKLAVEKALKWCDRAYGIKYIALRYFNASGAHESGEIGEDHSPESHLIPLVIQA

SEQ ID NO: 2694 - protein, 379 aa, Arabis pauciflora
MITTGQIIRCKAAVAWEAGKPLVMEEVEVAPPQKHEVRIKILFTSLCHTDVYFWEAKGQTPLFPRIFSHEAGGIVESVGEGVTDLQPGDHVLPIFTGECGDCRHCHSEESNMCDLLRINTERGGMIHDGESRFSINGKPIYHFLGTSTFSEYTVVHSGQVAKINPDAPLDKVCIVSCGLSTGLGATLNVAKPKKGQSVAILGLGAVGLAAAEGARIAGAARIIGVDLNPKRFEEAKKFGVTEFVNPREHDKPVQEVIAEMTDGGVDRSLECTGSVQAMIQAFECVHDGWGVAVLVGVPSKDDAFKTHPMNFLNERTLKGTFFGNYKPKTDIPGVVEKYMNKELELEKFITHTVPFSEINKAFDYMLKGESIRCIITMGA

SEQ ID NO: 2695 - protein, 327 aa, Trichodesmium erythraeum IMS101
MAQTLLFNALRAAIDEEMAHDPTVYVLGEDVGHYGGSYKVTKGLYEKYGELRILDTPIAENSFTGMAIGSALTGLRPIIEGMNMGFLLLAFNQIANNAGMLRYTSGGNFKIPLVIRGPGGVGRQLGAEHSQRLEAYFQAVPGLKIVACSTPYNAKGLLKSAIRDENPVLFFEHVLLYNLKEDLPEDEYLLPLDKAEVVQTGKDVTILTYSRMRHHVTQAVQTLKKQGYDPEVIDLISLKPLDFETIGASIKKTHRVIIVEECMKTGGIAAELIASINEKLFDELDAPILRLSSQDIPTPYNGLLERLTIVQPEQIVEAVQKMVAIKV

SEQ ID NO: 2696 - protein, 491 aa, Zymomonas mobilis
MLSLPIWFSCDYRKSGKGRVSKMPEKSPKLSKTLSSFHLWGIAVGLVISGEYFGWSYGWATAGTMGFLIATVIVAAIYTSFIFSFTELTCSIPQAGGPFAYSFRALGKWGGAIAGMATLVEFLFAPPAIALAIGSYLNVQFPSLSPKMAAACAYIVFMALNIVGVRIAATFELFITVAAIFELLVFMGVVAPAFSWEQFLHDGWGVASHFDIQAIGGIFAAVPFAIWFFLAIEGVAMAAEEAKNPRRSIPIAYTAGILTLVSLAFGVMVFAGGSMDWHQLANLNDPLPQAMKHVVGAHSGWLHMLVFLGLFGLVSSLHGIIMGYGRQIFALARAGFLPATLGKLHIKLQTPYAATIAGGLVGIAAIFADDVLSFGGHSLTAILVTMSVLGSLTMYVLSMVSLFRLRQTMPDLPRPYKAPLYPFLPALALIGAFFLLAAVIYYNAGISFIYALLMCIACPLCLYSYKRSQNKKTEENDITTSAILAAEGAEE

SEQ ID NO: 2697 - protein, 158 aa, Streptococcus pneumoniae R6
MTSLYDFSVLNQNNQATPLDSYRGKVLLIVNTATGCGLTPQYQGLQELYERYQDQGFEILDFPCNQFMGQAPGSAEEINTFCSLHFQTTFPRFAKIKVNGKEADPLYVWLKDHKSGPLGKRIEWNFAKFLIGRDGQVFERFSSKTDPKQIEEAIQTLL

SEQ ID NO: 2698 - protein, 585 aa, Trichodesmium erythraeum IMS101
MFKIHYTSLENKAQIYHPEVEQELAQYYLTSTAEDNNIIEDNLEWRKLESINESLEVLDLEEPIDFLTLKLEELIYAQNNWSYVDIDYIDKKRALDLKILDLSNSTLTNEDLQGVEQFPNITTLIVGRNSITKLEFINNYKKLQHLTIIGKEVFNYICSYQPLTLLSQFKELREITLIDNNLSDLKFVKQANLQHLNKLILDDNQITDLQPLSQLTALEYLSVANNKIQSIDCLKKLSNLKNLILRNNQIGNIKSYWRQFNKLIELDLKNNKITDLRPFTVMKSLKKLNISSNPIQTIIPLQGLFLSLEELWWYNINLMINISKKPEKLLPIQQLETVTVNAQGKEIARNQFSVFVREIVIAGSIKLSLVPIPKGEYMMGEGYGQKLVKVEEFWMSQYQITQEQWDAVANLEKIGTELDGSPSNWKGKKLPVEKVTWSEAQEFCRRLSKKTGEQFRLPTKEEWEYACRAGTTTPFYFGETITSELANFNGRETHANEPQGAYRERTTDVGIFPPNAFGLYDMHGNVNEWCNDNFDGDKDRKVIRGGYCQAAPSSCRSAARSSYISYQSSYSIGFRVVIVPPKTLQ

SEQ ID NO: 2699 - protein, 130 aa, Triticum aestivum
  unsure (1)..(130): unsure at all Xaa locations
MMSSVWLLELSLSYGVEACQRLHVALHGLRVILYLVHYXVKLLTSAVKYLAXIGARTIPLAWTGYSAGXSEQTIPGVMISSIGLLSCGKLSEPLWGTKESSKLCMHSQVLNFNVRLGTSYSCVVDDAPKE

SEQ ID NO: 2700 - protein, 174 aa, Glycine max
VLQASMLWRKRFLAIAQEYPDVELSHMYVDNASMQLIRNPKQFDTMVTNNIFGDILSDEASMVTGSIGMLPSASLGASGPGLFEPIHGSAPDIAGQDKANPFATVLSAAMLLRYGLGEEKAAKRIENAVVDTLNRGFRTGDIYSAGTKLVGCKQLGEEILKSVESNVHAGAATV

SEQ ID NO: 2701 - protein, 247 aa, Triticum aestivum
MDTRAVSEITPEEAAGDKKEEIEEQSAAFWTTIAPNVDDYSSSVARLIAKGSGQLVRGIIWCGDITASGLKCGEAVLKKGAGANGKPTQVKPSSLKRMKRARRVTKMSNKVANSILSGVLKVSGFVTSTVVNSKPAQKFFKLMPGEVILASLDGFGKVWDAVEVSGKNVMKTSSVVTTSVVTHRYGDQAGEITQVYLHATGNALGVAWAVFKIRKALDPKGHIKKLSLASSAAHAVAKQSISLQKKK

SEQ ID NO: 2702 - protein, 188 aa, Triticum aestivum
MNRKPGDWDCRSCQHLNFSRRDLCQRCGEPRSAADRGSVGGALGGDYANFGGRGVGGSSFGTGFGAGSDVRPGDWYCTCGAHNFASRSSCFKCAAFKEEAAVNGGAGGFDGDMSRSRGFGFGAVGGMGAGAPAGAAGGRASRPGWKSGDWICTRSGCNEHNFASRQECFRCNAPRDSGSATPYENFLH

SEQ ID NO: 2703 - protein, 370 aa, Pseudomonas fluorescens PfO-1
MIKSRAAVAFEAKKPLEIVEVDVAMPKAGEVLLRVVASGVCHTDAYTLSGADPEGIFPSILGHEGGAIVEAIGEGVTSVAVGDHVIPLYTPECGQCKFCKSGKTNLCQAIRATQGKGLMPDGTSRFSYKGQTIFHYMGTSTFSEYTVLPEISVAKISKDAPLEKVCLLGCGVTTGIGAVINTAKVKPGDTVAIFGLGGIGLSAVIGAVKAKASRIIAIDINPAKFEIAKQLGATDCVNPKDFDRPIQEVIVDMTDGGVDFSFECIGNVQLMRAALECCHKGWGESVIIGVAGAGQEISTRPFQLVTGRVWRGSAFGGVRGRTELPSYVDMAQSGEIPLDTFITHTMGLEDINKAFDLMHEGKSIRTVIHF

SEQ ID NO: 2704 - protein, 765 aa, Hypocrea jecorina
MRLCDLSSLASWVLVTVALPSSGAAAKGVSQIPSTHSSQSKGNGPWAHAYRRAEKLVRQMTLEEKANITRGFTGDNVCAGNTGSVPRLGWPGMCVHDAGNGVRATDLVNSYPSGIHVGASWDRNLTYERGLHMGGEFKAKGVNVPLGPNAGPLGRTPLGGRNWEGFSIDPYLSGQLNAETITGMQDAGVIANIKHFIANEQETLRRPYFGVEAVSANIDDRTLHEYYLWPFMDSVHAGVGSVMCSYNRINNTYGCMNDKLMNGILKAELGFQGFVMLDWNAQHDLQSANAGLDMVMPLGGSWGKNLTDAVANGTVSESRITDMATRIIAAWYLVGQDGNNFPVPGIGLKQLTKPHEQVDARDPASKPVLLEGAIAGHVLVKNENNALPFNKKLTMISVFGYDATIPRTKNTDILFQLGYTSSPEMAQAVLGNEAHFDQAAKGGTIMTGGRAGANAPSYIDDPLAAIQRRARKDDTWVNWDLDSFNPEVNAASDACLVFINAIATEGWDRDGLHDDFSDGLVLNVAANCSNTIVVVHAAGTRLVDQWIEHPNVTAAVIAHLPGQDSGRALVKLLYGEANFSGKLPYTIAKNESDYSVYTPCQRRSPEDTDPQCDFTEGVYLDYRAFDANNMTPRFEFGYGLSYTSFNYSALSIKKAKGLRQSRCTDDLWQAAAQVTASITNSGGMSGSEVAQLYLAIPNSPPKQLRGFNKLLLRPHESGTVHFGLTKRDLSVWDVVSQSWVIQEGEYKVFVGASSRDIRLSGKLHI

SEQ ID NO: 2705 - protein, 358 aa, Lactuca sativa
MALLSDLVNLDLSSINDKIIAEYIWIGGSGMDLRSKARTISRPVSDPSELPKWNYDGSSTGQAPGEDSEVIIYPQAIFKDPFKRGNHILVMCDAYTPAGEPIPTNKRAAAAKIFSNPEVEKEVTWYGIEQEYTLLQKDTNWPLGWPLGGFPGPQGPYYCGIGADKAFGRDIVHAHYKACLYAGVNISGINGEVMPGQWEFQVGPSVGIAAADQIWVARYILERITEIYGVVVSFDPKPIPGDWNGAGAHTNYSTKTMREEGGYEVIKKAIEKLGLRHKEHIAAYGEGNERRLTGRHETADINTFLWGVANRGASIRVGRDTEKEGKGYFEDRRPASNMDPYVVTSMIAETTILWDNKS

SEQ ID NO: 2706 - protein, 48 aa, Picea abies
LTGSLDEFSFEDYLNDPRESETFVPADMHHGMEVRLGLSKGPVCRSFM

SEQ ID NO: 2707 - protein, 133 aa, Zea mays
  unsure (1)..(133): unsure at all Xaa locations
MLELRLVQGSLLKKXLEAIKELGTDANFDCSGTGFSLQAMDSSHGALVALLLRSEGFEHYRCDRNLSMGMNLGNMAKMLRCAGNDDIITIKADDGSDTVTFMFESPNQDKIADFEMKLMNIDSEHLGIPDSEY

SEQ ID NO: 2708 - protein, 330 aa, Agrobacterium tumefaciens str. C58 (Cereon)
MIVRGPAKVGRRRSYQMTKIALAIHGGCGVMPEDSMTAAEWAAAREDLAAALRAGYGVLKAGGTALEAVEAAVVVMEDSPHFNAGHGAALNENGIHELDASIMDGATLSAGAISASRAIRNPVKAARALMVDERAVYLTGEAADRFATEKGLATEPQSYFTTQKRLEALAAMKRHAATGTEATENEKHGTVGAVALDAAGHLAAATSTGGYTNKPDGRVGDSPVIGAGTYARDGACAVSGTGKGEFFIRYVVGHEIASRVAYLGQDLETAAGNLVHRDLAPYDIGAGLVAIDAKGGITAPYNTPGMFRGWVTASGEAFVATHAEAYAVKL

SEQ ID NO: 2709 - protein, 475 aa, Streptomyces coelicolor A3(2)
MTSAQVDTDKAPEEGYERGLNSRQVQMIAIGGAIGVGLFLGAGANIAKAGPSIILMYALAGVIIFFIMRALGELLLYRPVSGSFAEYSREFLGPFFGYFTGWTYWLMWVVTGMAELTAAAIYIHYWFPDIPQWVSALVFLVLLFVANLISVKLFGEIEFWFSMVKVTAIIGMIVIGVGVLTLGFSQAGDTAAVSNLWEFDGFFPKGIGSSLMTLQGVMFAYLAVELVGVTAGESENPEKTLPKAINTLPWRIALFYVGALTVILAVVKWTEFAEGVSPFVEAFAVIGIPAGAGIVNFVVLTAALSSCNSGMYSTGRMLRTLADNGEAPRIFNKLSSTKTPAIGIAVSVVFMAIGVVLNYLVPEKAFGYVTSVATAAGIWTWLMILISHVRYRRKVVAGRLPASSFPAPGGSVCSYIAIAFLLFVTCLIAYDADARVCLYVMAGWAAALGIGWAVLKSRNPQITERPGEPEFEKIG

SEQ ID NO: 2710 - protein, 375 aa, Glycine max
MGSTDSSSGSQQPNLPPGFRFHPTDEELVVHYLKKKTASAPLPVAIIAEVDLYKFDPWELPAKAAFGEQEWYFFTPRDRKYPNGARPNRAATSGYWKATGTDKPVLTSGGTQKVGVKKALVFYGGKPPRGIKTNWIMHEYRLTDNKPNNRPPPGCDLGNKKNTLRLDDWVLCRIYKKSNTHRSPMEHDREDSMDDMIGGIPPSINVGHMSARFHHLSKMTTAYNNGALLENDHHNLLEGMMIGNSNGGMNTTTTTTPGPMSSHLGGSKEELSFVPTMTHSSNTSKRTLSSLYWNDEDVAGTSSSNKRFNLELSGDNNNHGSVVRDDQENGTASSIATLLNQLPQTPSLHQQSILGSIGDGLLRTTYQIPGMNWYA

SEQ ID NO: 2711 - protein, 106 aa, Zea mays; identical to SEQ ID NO: 498

SEQ ID NO: 2712 - protein, 514 aa, Ipomoea batatas
MGNRTSRHKHGEKHRSEAGSHQTHIEYTKSPGQGAGLPVRPPSIPKSVSKSDAILGKAYEDVRAHYSLGKELGRGQFGVTYLCTEIRTGKQYACKSISKKKLVTKGDKDDMRREVQIMQHLSGQPNIVEFKGAYEDANSVYLVMELCAGGELFDRIIAKGHYSERAAASLCRSIVNVVHTCHFMGVMHRDLKPENFLLSDKTENAALKATDFGLSVFIEEGRVYKDLVGSAYYVAPEVLGRKYGKEADVWSAGVMLYILLSGVPPFWAETERGIFNAILKGELDFQTKPWPSISSIAKDLVRGMLAPDPKRRLTAAQVLEHPWMREDGEASDRPLDSAVLSRMKQFRAMNKLKKLALKFIAENLSEEEIHGLKAMFTNIDTDNSGTITYEELKKGLAQLGANLTEAEVKQLMEAADVDGNGSIDYIEFITATMHKHRLEREENLYKAFQYFDKDSSGFITRDELETAMKEHGIADAATIKEIISEVDADHDGRINYEEFCTMMRSGTKQQAKLF

SEQ ID NO: 2713 - protein, 839 aa, Brassica rapa
GVRNIYHHSYTFLLVFFVMILFRPAFSLSTLSSTESLTISSNRTLVSPGNIFELGFFRTNSRWYLGMWYKKLSGRTYVWVANRDNPLSNSIGTLKISNMNLVLLDHSNKSVWSTNLTRENVRSPVVAELLANGNFVVRDPSGFLWQSFDYPTDTLLPEMKLGYDLKTGLNRFLVSWRSSDDPSSGDFSYKLDIQRGLPEFYTFKDNTLVHRTGPWNGIRFSGIPEEQQLSYMVYNFTENSEEVAYTFLVTNNSIYSRLTINFSGFFERLTWTPSLVIWNPIWSSPASFQCDPYMICGPGSYCDVNTLPLCNCIQGFKPLNVQEWDMRDHTRGCIRRTRLSCRGDGFTRMKNMKLPETTMATVDRSIGVKECEKKCLSDCNCTAFANADIRDGGTGCVIWTGRLDDMRNYAVSGQDLYVRLAAADVVEKRTANGKIVSLIVGVCVLLLLIFFCLWKRKQRRAKAMATSIVHRQRKQILLMNGMTLSNNRQLSRENKTGEFELPLIELEAVVKSTENFSNCNKLGQGGFGIVYKGTLDGQEIAVKRLSKTSVQGADEFMNEVTLIARLQHINLVQILGCCIDADEKMLIYEYLENLSLDSYLFGKTRSSKLNWKERFDITNGIARGLLYLHQDSRFRIIHRDLKVSNILLDKNMIPKISDFGMARIFARDETEANTMRVVGTYGYMSPEYAMEGIFSEKSDVFSFGVIVLEIVTGKRNREFNNENNLLSYAWSNWKEGRALEIVDPDIVDSLSPLSSTFQPQEVLKCIQIGLLCVQELAEHRPTMSSVVWMLGSEATEIPQPKPPGYWVRRSSYELDPSSSKCDDDSWTVNQYTCSVIDAR

SEQ ID NO: 2714 - protein, 273 aa, Glycine max
MFLCWYCQKSGVHHAVNPDPYRGIFGSDGEKYARDVQDIINFGTSGNVAAFISEAIQGVGGIIELAPGYLPVVYNAIKKAGGLFIADEVQAGFGRTGSHFWGFEAHNVVPDIVTIAKGIGNGIPLGAVVTTPEIAEVLTRRSYFNTFGGNPVCTAAGLAVLKVIEKEQLQQNAFVVGSHLKERLTALKDKYELIGDVRGRGLMLGVELVTDRELKTPAKNETLHVMDQMKELGVLIGKGGYYGNVFRITPPLCFTKEDADFVADAMDLTLSRM

SEQ ID NO: 2715 - protein, 363 aa, Vicia faba
MDRRFIFAIVLFAAVATSSTDNTNTDDFIIRQVVDNEEDHLLNAEHHFTSFKSKFSKSYSTKEEHDYRFGVFKSNLIKAKLHQKLDPTAEHGITKFSDLTASEFRRQFLGLKKRLRLPAHAQKAPILPTTNLPEDFDWREKGAVTPVKDQGSCGSCWAFSTTGALEGAHYLATGKLVSLSEQQLVDCDHVCDPEQAGSCDSGCNGGLMNNAFEYLLQSGGVVQEKDYAYTGRDGSCKFDKSKVVASVSNFSVVSLDEEQIAANLVKNGPLAVGINAAWMQTYMSGVSCPYVCAKSRLDHGVLLVGFGKGAYAPIRLKEKPYWIVKNSWGQNWGEQGYYKICRGRNVCGVDSMVSTVAAAQSNN

SEQ ID NO: 2716 - protein, 453 aa, Schizosaccharomyces pombe
MFLLQRFFIYGLFLACFYTTVFGEKHFEAEEYRDSFLSQENMNKINHTTIERLFREMTENDPSLLSSSKTLAELSKGELAKAREDLKSVLSFLKNNLPVDTESSSEAFTIEKDNNSCVWLNSVKSFVEKQFSYSSGTNGILATFLTAIPPNIFILLVPKSFDTSMLNLFVAVSAGSLLGDVFLQLLPTVYSTNGGDFPASSVYSILIGALVFFLMDKGIRILIHERPSSLSKPKKDGEETSSVNKPSASSTQTDVKGVEGLRKRNVKDDQNSKGHEPDLIRHVVEEVSEEYNDKTVVYLNLLCDSFHNFMDGLAITSAFFTNTSIGISTTFAVLLHEIPAEIGDLAILLRNGYTKSQVLVLQMITMVTGLLGAIVATYIYTASSSSSPYGSFLLQLEDKLLPFTAGGFLYIAYLGVFPELLEINLSKGKLGNMIYTALYMMFIVGGFSFLYYV

SEQ ID NO: 2717 - protein, 331 aa, Oryza sativa (indica cultivar-group)
MEANLPPGFRFHPRDEELIVDYLYHKLSGGGGGGGAGEFYGGVAMVDVDLNKCEPWELPAYFLHNLIIFPARARARAAGRRRRADAARVGATEWYFFSLHDRKYATGQRTNRATRSGYWKATGKDRAIVTRRRAAGGEAVAGGEVVGMRKTLVFYQGRAPRGSKTEWVMHEFRVDGHAVADHPSSSTSSSSSNLLKEDWVLCRVFYKSRTANPRPVVSGEAAVSLSGELSLPPPPPLPVAPAVIDGYTGGGYYEQDSSAGCHHHHHRPPTSAALPFKDLTDFRDLLSNMVQGGGAAAAAAKSEGFHLGWSEEESSGYVQQSAMASQAWNPF

SEQ ID NO: 2718 - protein, 312 aa, Oryza sativa
  unsure (1)..(312): unsure at all Xaa locations
XSVFSYQTDPNIPYELLLSYSIRPILLISGRSPLPPESSWHANAGNSTVAPEVRLDKQLQAWKNNPIWSDEPPEIKVTVPQGSLCNLNLKFKAGLPPDAVYNIIIDPENKRVFKNIKEVISRKVVLDEGQRQIVEVEQAAIWRFLWWSGVLSVHVFVDQNRTNHTVKFKQGRTGFMKKFEGCWKIEPLFVDKEACHPLDPCTLEKYDSCTNGTGRVGSSITLDQLIEPAMVPPPPFSWYLRGITTRTTEMLVNDLIAETARLRGLANNAIDKQYVEGKCDTSRDHLTEECNDIKERWRQRRKTGRHGNSLRL

SEQ ID NO: 2719 - protein, 144 aa, Triticum aestivum
MASSAGDPLLPGEPPHRRRFLPPSIRLKTSVWSELGGAVGDLGTYIPIVLALSLASHLDLGTTLIFTALYNFASGVLFGIPMPVQPMKSIAAVALSSAHLTVPQIMGAGIAVAAILLFLGATGLMTCLYRILPLPVVRGVQLSQ

SEQ ID NO: 2720 - protein, 415 aa, Schizosaccharomyces pombe
MDVSTQTRHATYFQDENQLQKDHIYVKKKSHIKLNTGVRAPFKAVDNINQQDEPTLIEGNNESSISSSTGDTFEEDFAYQDKVEIEERSIRSTPKSIGDDDLENREGSFDAPEGILTHGKHRLPTIPEWTKEDLAALSEAAARLQANPSPEDIETDPSMVPDYDPEIFHYMQSLERKLAPPPNYMSVQQEIDWVTRHMLVDWIVQVQIHFRLLPETLFLAVNLIDRFLSIKVVSLQKVQLVGLSALLIACKYEEIHPPSIYNFAHVVQGIFTVDEIIRAERYMLMLLDFDISWPGPMSFLRRISRADSYDHDIRMLAKYLQEVTLMDEIFIGAHISFIAATAYYLSMQMLGHLDWTPCHVYYSGYTARQLKPCAIIIMECLVDAPNHHNAIYRKYSENRMKRVSAFAHNWVLSVI

SEQ ID NO: 2721 - protein, 167 aa, Oryza sativa
  unsure (1)..(167): unsure at all Xaa locations
TLGAGFXLSSCRRMGVYFQIXDDYLDCFGDPXKXIXXVGTNXEXNYNCPWLIXQAXXXXXXNEMKXLFENXGXSDPXCXPKLKIXXGELDLQDIFLEYEXRVYKHLVSTIDAETDRXXRDILKSFLKXIYXRKKXNXFXPWLLEFXHNRLASWTXGXCDXXLNDXHX

SEQ ID NO: 2722 - protein, 458 aa, Oryza sativa
MAVDDLNHHLIAVGVGEEAATAHCGLRTLVRNMAQLVVSLGILVAADKLVEQAFAAASIKFPSALFAMFCVFALLLFLPPSLANGFMAFFDPATVFIHRWLPLFFVPSLVVLPLAVRDVSPASALKILFITFGGWFASLVVAGYTALSVRRIVKTQLIPAEPMKRPSPFGPLEFWAWAAVFVASFAVAYVSPTALGTTATTCLPFLLASTVFGYILGSRLPSGVKKVLHPIICCALSADLAAVAYGYLSRSGVDAVLGDYLTESPSNPGAGDILMGFLGSVIISFAFSMFNQRKLVRRHAAEIFTSIAVASTFSLYSTAILGRVVELEPILTISILPRCITVALALRVVSLFEGVNTSVTAAVVVLTGLIGANFAQAVMDKLRLKDPIARGIGTASSAHGLGTAAVSAKEPEALPFCAIAYALTGVVASLFCSLPAIRHSLVFIAGDASASQTQHFSY

SEQ ID NO: 2723 - protein, 475 aa, Bacillus anthracis str. Ames
MTDGVVQIEKKLGFFPLIALVVGTMVGGGVFSLPHDLAVGANSGSIIIGWCITAMGMIPLALVYQTLARKKPELEGGIYSYARAGFGEYIGFNSAWGYWLAGILGNVATIMLLFSTLGYFFPIFKGGNSVASIVGASLLLWTLHFLILFGIREASIMNVIATIGKLVPIVLFIVVMVTAFRWDTFTQDFWGEGTISVSSILGQVKNTMLVTLWVFIGVEGAVVLSGRAKNSRDVGKATVLGLILVMSIYILISVLSMGAMTRGELSVLETPSMGHVLEHVVGTWGAVAINIGLVASLVGTLIGWFLLVSEISHVAGKDGVFPKVFTKTNKKQTPHMALWISNGVAQVIFIIVLFSESTYQIMYFIASTSILVPYLLSALFQFKLVITNELKDAKVKNGSLALIASLYSVWLIYAAGLKNLLLVSIVYGIGIIVYVYARKEKGNRCFTGIERYVMWAIVVAAVTSLYMLLTGNIKM

SEQ ID NO: 2724 - protein, 809 aa, Streptomyces venezuelae
MTGKTRIPRVRRGRTTPRAFTLAVVGTLLAGTTVAAAAPGAADTANVQYTSRAAELVAQMTLDEKISFVHWALDPDRQNVGYLPGVPRLGIPELRAADGPNGIRLVGQTATALPAPVALASTFDDTMADSYGKVMGRDGRALNQDMVLGPMMNNIRVPHGGRNYETFSEDPLVSSRTAVAQIKGIQGAGLMTTAKHFAANNQENNRFSVNANVDEQTLREIEFPAFEASSKAGAASFMCAYNGLNGKPSCGNDELLNNVLRTQWGFQGWVMSDWLATPGTDAITKGLDQEMGVELPGDVPKGEPSPPAKFFGEALKTAVLNGTVPEAAVTRSAERIVGQMEKFGLLLATPAPRPERDKAGAQAVSRKVAENGAVLLRNEGQALPLAGDAGKSIAVIGPTAVDPKVTGLGSAHVVPDSAAAPLDTIKARAGAGATVTYETGEETFGTQIPAGNLSPAFNQGHQLEPGKAGALYDGTLTVPADGEYRIAVRATGGYATVQLGSHTIEAGQVYGKVSSPLLKLTKGTHKLTISGFAMSATPLSLELGWVTPAAADATIAKAVESARKARTAVVFAYDDGTEGVDRPNLSLPGTQDKLISAVADANPNTIVVLNTGSSVLMPWLSKTRAVLDMWYPGQAGAEATAALLYGDVNPSGKLTQSFPAAENQHAVAGDPTSYPGVDNQQTYREGIHVGYRWFDKENVKPLFPFGHGLSYTSFTQSAPTVVRTSTGGLKVTVTVRNSGKRAGQEVVQAYLGASPNVTAPQAKKKLVGYTKVSLAAGEAKTVTVNVDRRQLQTGSSSADLRGSATVNVW

SEQ ID NO: 2725 - protein, 173 aa, Sulfolobus acidocaldarius
MKLSPGKNAPDVVNVLVEIPQGSNIKYEYDDEEGVIKVDRVLYTSMNYPFNYGFIPGTLEEDGDPLDVLVITNYQLYPGSVIEVRPIGILYMKDEEGEDAKIVAVPKDKTDPSFSNIKDINDLPQATKNKIVHFFEHYKELEPGKYVKISGWGSATEAKNRIQLAIKRVSGGQ

SEQ ID NO: 2726 - protein, 245 aa, Thermosynechococcus elongatus BP-1
MSETAVAIVTGASRGIGRAIALELAKEGATVVVNYARSAEAALEVVQRIEQQGGTAIAIAADVSVPEQVDTLVAKTVETYGRVDVLVNNAGITRDTLLLRMSLEDWQAVINLNLTGVFLCTRAVSKLMLKQKRGRIINIASVAGQMGNPGQANYSAAKAGVIGFSKTVAKELASRGITVNAVAPGFIATEMTAELKAEDILKFIPLGRYGEPTEVAGMVRFLALDPAAAYITGQVFNVDGGMVMA

SEQ ID NO: 2727 - protein, 388 aa, Bacillus subtilis subsp. subtilis str. 168
MKNICLLGATGSIGEQTLDVLRAHQDQFQLVSMSFGRNIDKAVPMIEVFQPKFVSVGDLDTYHKLKQMSFSFECQIGLGEEGLIEAAVMEEVDIVVNALLGSVGLIPTLKAIEQKKTIALANKETLVTAGHIVKEHAKKYDVPLLPVDSEHSAIFQALQGEQAKNIERLIITASGGSFRDKTREELESVTVEDALKHPNWSMGAKITIDSATMMNKGLEVIEAHWLFDIPYEQIDVVLHKESIIHSMVEFHDKSVIAQLGTPDMRVPIQYALTYPDRLPLPDAKRLELWEIGSLHFEKADFDRFRCLQFAFESGKIGGTMPTVLNAANEVAVAAFLAGKIPFLAIEDCIEKALTRHQLLKKPSWRTFKKWTKIPGDTSIQYSHKVVCS

SEQ ID NO: 2728 - protein, 246 aa, Zea mays
MAKNYPTVSAEYSEAVDKARRKLRALIAEKSCAPLMLRLAWHSAGTFDVSSRTGGPFGTMKHQSELAHGANAGLDIAVRLLEPIKEEFPILSYADFYQLAGVVAVEVTGGPEIPFHPGREDKPQPPPEGRLPDATKGSDHLRQVFGKQMGLSDQDIVALSGGHTLGRCHKERSGFEGAWTTNPLVFDNSYFKELLSGDKEGLLQLPSDKALLSDPVFRPLVEKYAADEKAFFDDYKEAHLKLSELG

SEQ ID NO: 2729 - protein, 488 aa, Pseudomonas syringae pv. tomato str. DC3000
MAHRHASGHSTSVLRVAQMSVATRFIDDQLTRITPAAAETLYQFDESPLLARQSRQESNARSYPRRIPLALKRAKGIHVEDVEGRRFIDCLAGAGTLALGHNHPVIIDAIQQVISDELPLHTLDLTTPVKDQFVQDLFGLLPPALANEAKIQFCGPTGTDAVEAALKLVRTATGRSTVLSFQGGYHGMSQGALSLMGSLGPKKPLGALLSSGVQFLPYPYDYRCPFGLGGEQGVRANLHYLENLLNDPEAGVQLPAAVILEVVQGEGGVIPADLDWLRGVRRITEKAGVALIVDEIQSGFARTGKMFAFEHAGIIPDVVVLSKAIGGSLPLAVVVYRSWLDTWLPGAHAGTFRGNQMAMATGSAVMRYLQEHNVCEHATAMGARLVGHLQALQRDFPQLGDIRGRGLMLGVELVDPAGARDAQGHPPVFARLAPLIQRECLKRGLILELGGRHGSVVRFLPPLVITAEQIDEVAEIFGRALNAAVAQL

SEQ ID NO: 2730 - protein, 314 aa, Thermotoga maritima
MTVRTRVTDLLEIEHPILMGGMAWAGTPTLAAAVSEAGGLGIIGSGAMKPDDLRKAISELRQKTDKPFGVNIILVSPWADDLVKVCIEEKVPVVTFGAGNPTKYIRELKENGTKVIPVVASDSLARMVERAGADAVIAEGMESGGHIGEVTTFVLVNKVSRSVNIPVIAAGGIADGRGMAAAFALGAEAVQMGTRFVASVESDVHPVYKEKIVKASIRDTVVTGAKLGHPARVLRTPFARKIQEMEFENPMQAEEMLVGSLRRAVVEGDLERGSFMVGQSAGLIDEIKPVKQIIEDILKEFKETVEKLRGYIEE

SEQ ID NO: 2731 - protein, 469 aa, Zea mays
GTSPATSTTSLQAVDTFSGIRGSMSNYYDDYDDIDEMEDDYDMDDPIDDMVDEQQGIRDSDAEDNDYGQPNDKIPDTSSADARKGRDIQGIPWEQINITRKKYRQSRLEQYKNYENVPNSGEEAMKDCKPTEKGGIYYEFRRNTRSVKSTILHFQLRNLVWATSKHDIYLVSHYSIRHWSALSGVDTELINVQGHVAPREKHAGSLLEGFYQTQVSTLTVKDNLLVAGGFQGELICKHLDQEGISFCCRTTYDDNAITNAVEIFNTSSGAVHFMASNNDSGVRYYDMERFQLFKHFQFEWPVNHASLSPDRKVVVIVGDDPDGLLIDANSGKTVHSIKGHRDYSFASAWSPDGRTFATGNQDKTCRIWDVRNLSKSVHVLRGNLGAIRSIRFTSDGQFMSMAEPADFVHIYDVKSDYNKRQELDFFGEISGTSFSPDTDTLFVGVWDRMYGSLLQFGRLYNYSYLDSLF

SEQ ID NO: 2732 - protein, 462 aa, Escherichia coli O157:H7 EDL933
MTANSPLQRVGQEKGIAMGSQELQRKLGFWAVLAIAVGTTVGSGIFVSVGEVAKAAGTPWLTVLAFVIGGLIVIPQMCVYAELSTAYPENGADYVYLKNAGSRPLAFLSGWASFWANDAPSLSIMALAIVSNLGFLTPIDPLLGKFIAAGLIIAFMLLHLRSVEGGAAFQTLITIAKIIPFTIVIGLGIFWFKAENFAAPATTAIGATGSFMALLAGISATSWSYTGMASICYMTGEIKNPGKTMPRALIGSCLLVLVLYTLLALVISGLMPFDKLANSETPISDALTWIPALGSTAGIFVAITAMIVILGSLSSCVMYQPRLEYAMAKDNLFFKCFGHVHPKYNTPDVSIILQGALGIFFIFVSDLTSLLGYFTLVMCFKNTLTFGSIIWCRKRDDYKPLWRTPAFGLMTPLAIASSLILVASTFVWAPIPGLICAVIVIATGLPAYAFWAKRSRQLNALS

SEQ ID NO: 2733 - protein, 394 aa, Zea mays subsp. mays
LGSARRARLPPGEMGWPLVGGMWAFLRAFKSGKPDAFIASFVRRFGRTGVYRSFMFSSPTVLVTTAEGCKQVLMDDDAFVTGWPKATVALVGPRSFVAMPYDEHRRIRKLTAAPINGFDALTGYLPFINRTVTSSLRAWADHGGSVEFLTELRRMTFKIIVQIFLGGADQATTRALERSYTELNYGMRAMAINLPGFAYRGALRARRRLVAVLQGVLDERRAARAKGVSGGGVDMMDRLIEAQDERGRRLDDDEIIDVLVMYLNAGHESSGHITMWATVFLQENPDMFARAKAEQEAIMRSIPSSQRGLTLRDFRKMEYLSQVIDETLRLVNISFVSFRQATRDVFVNGYLIPKGWKVQLWYRSVHMDPQVYPDPTKFDPLRWEGHSPRAGTFL

SEQ ID NO: 2734 - protein, 296 aa, Rhizobium sp. USDA 3584
RGKTQIKEFAEFPTLEQLPLWGFDGSSTQQAEGHSSDCVLKPVAVFPDPARTNGVLVMCEVMMPDGVTPHASNKRATILDDEGAWFGFEQEYFFYKDGRPLGFPESGYPAPQGPYYTGVGYSNVGSVARQIVEEHLDLCLAAGINHEGINAEVAKGQWEFQIFGKGSKKAADQMWMARYLLQRLTEKYGIDIEYHCKPLGDTDWNGSGMHANFSTAYMREVGGKAYFEALMAAFDKNLMDHIAVYGPDNDKRLTGKHETAPWNRFSYGIADRGASIRVPHSFIKSDYKGYLEDRRP

SEQ ID NO: 2735 - protein, 294 aa, Streptococcus agalactiae 2603V/R
MSLIILTVILVLVIVLLITSLYVVKQQTVAIIERFGKYQKTATSGIHIRVPLGIDKIAARVQLRLLQSEIIVETKTKDNVFVTLNIATQYRVNENNVTDAYYKLIKPEAQIKSYIEDALRSSVPKLTLDELFEKKDEIALEVQHQVAEEMSTYGYIIVKTLITKVEPDAEVKQSMNEINAAQRKRVAAQELANADKIKIVTAAEAEAEKDRLHGVGIAQQRKAIVDGLADSIQELKDANVTLTEEQIMSILLTNQYLDTLNTFAINGNQTIFLPNNPEGVEDIRTQVLSALKTR

SEQ ID NO: 2736 - protein, 523 aa, Perilla frutescens
MISAAVSLIICTSILGVLVYFLFLRRGGGSNGRPLPPGPRPWPIVGNLPQLGPKPHQSMAALARVHGPLMHLKMGFVHVVVAASATVAEKFLKVHDTNFLSRPPNSGAEHIAYNYNDLVFAPHGPRWRLLRKICALHLFSSKALDDFRHVREEEVGILIRNLASVGEMPASIGQMMYVCATNAISRVMLGRHVLGDEHRGAAGGGDTTAEEFKAMVVELMALAGVFNVGDFIPPLKGLDLQGVVAKMKKLHQRFDAFFSGILHDHKINGSNAAEGHVDLLTTLISLKDVDNNGEGGKLTDTEIKALLLNLFTAGTDTTSSTVEWAITELIRNPNILARVRKELDLIVGKDKLVKESDLGQLTYLQAVIKENFRLHPSTPLSLPRVAQESCEINGYYIPKDSTLLVNVWAIGRDPNVWPDPLEFRPERFLMGGEKPNVDVRGNDFELIPFGSGRRICAGMNLGIRMVQLLIATMVHAFDFELANGQLAKDLNMEEAYGITLQRADPLVVHPRPRLARHVYQAQV

SEQ ID NO: 2737 - protein, 151 aa, Zea mays; identical to SEQ ID NO: 743

SEQ ID NO: 2738 - protein, 430 aa, Lotus japonicus
  unsure (1)..(430): unsure at all Xaa locations
MAQILAPSTQWQTRITKTSPNASPITSNMWSSLLWKQNKKVARASKFRVLAIKSDGSTINRLEGLLNLDVTPYTDKFIAEYIWIGGTGVDVRSKSRTISKPVSHPSELPKWNYDGSSTGQAPGDDSEVILYPQAIFRDPFRGGNNILVICDAYTPQGEPIPTNKRHRAAEIFSNPKVQAEIPWYGIEQEYTLLQTDVKWPLGWPVGGYPGPQGPYYCAAGADKSFGRDISDAHYKACLYAGINISGTNGEVMPGQWEYQVGPXVGIEAGDHIWASRYLLERITXQAGVVLTLDPKPIEGDWNGAGAHTNYSTKSMREEGGFEVIKKAILNLSLRHQDHIRAYGEGNERRLTGKHETADINTFSWGVANRGCSIRVGRDTEKEGKGYLEDRRPASNMDPYVVTALLAETTLLWEPTLEAEALAAQKIQLKV

SEQ ID NO: 2739 - protein, 353 aa, Pseudomonas fluorescens PfO-1
MINRISPCGEQQMLTIYSDDHHLHHGRCELIDGQLKPCFEMPSRADHVLQRVKNQNLGPVEAPKDFGLGPIERIHSRDYLDFFKGAWARWTEFNTDGDLLPYTWPARTLRQVKPTSLHGQLGYYSFDGGAPITAGTWQAAYSAAQVALTAQAEIQRGARGAFALCRPPGHHAAGDLMGGYCYLNNAAIAAQAFLDQGHKKVAILDVDYHHGNGTQSIFYERSDVLFTSIHGHPEAEFPFFLGYEDERGEGAGEGFNFNYPLPAGSGWDIWSAALDQACQEIDNYGADIIVVSLGVDTFKDDPISQFKLDSPDYLAMGKRIAALGKPTLFVMEGGYAVEEIGINAVNVLEGFEQ

SEQ ID NO: 2740 - protein, 90 aa, Glycine max
  unsure (1)..(90): unsure at all Xaa locations
MDTSNPAVFVNAQLIPNFIGKKVRTVVQVSQCDGGXPQVPLMNYIEVIGIAESNNSIDAEIWTDFGSTFDTFSYNQLCQLANGEFKGLFL

SEQ ID NO: 2741 - protein, 751 aa, Geobacillus stearothermophilus
MENQNRQNAAQCPFHGSVTNQSSNRTTNKDWWPNQLNLSILHQHDRKTNPHDEEFNYAEEFQKLDYWALKEDLRKLMTESQDWWPADYGHYGPLFIRMAWHSAGTYRTGDGRGGASTGTQRFAPLNSWPNNANLDKARRLLWPIKKKYGNKISWADLFILAGNVAIESMGGKTIGFGGGRVDVWHPEEDVYWGSEKEWLASERYSGDRELENPLAAVQMGLTYVNPEGPDGKPDPKAAARDIRETFRRMGMNDEETVALIAGGHTFGKAHGAGPATHVGPEPEAAPIEAQGLGWISSYGKGKGSDTITSGIEGAWTPTPTQWDTSYFDMLFGYDWWLTKSPAGAWQWMAVDPDEKDLAPDAEDPSKKVPTMMMTTDLALRFDPEYEKIARRFHQNPEEFAEAFARAWFKLTHRDMGPKTRYLGPEVPKEDFIWQDPIPEVDYELTEAEIEEIKAKILNSGLTVSELVKTAWASASTFRNSDKRGGANGARIRLAPQKDWEVNEPERLAKVLSVYEDIQRELPKKVSIADLIVLGGSAAVEKAARDAGFDVKVPFFPGRGDATQEQTDVESFAVLEPFADGFRNYQKQEYSVPPEELLVDKAQLLGLTAPEMTVLVGGLRVLGANYRDLPHGVFTDRIGVLTNDFFVNLLDMNYEWVPTDSGIYEIRDRKTGEVRWTATRVDLIFGSNSILRSYAEFYAQDDNQEKFVRDFINAWVKVMNADRFDLVKKARESVTALQTIISYRSAGDVTLQ

SEQ ID NO: 2742 - protein, 438 aa, Brassica rapa
TFSFLIVLAVLILFHPALSIYVNTLLSTESLTISSNRTLVSPGNVFELGFFTPGSSSRWYLGIWYKKLSDRTYVWVANRDSPLSSSIGTLKISNMNLVLLDHSNKPVWSTNLTRGNERSPVVAELLANGNFVMRYSNNNDSSGFLWQSFHYPTDTLLPEMKLGYDRKTRLNRYLTSWRNSDDPSSGEISYFLDIQTGMPEFYLLQSGARMHRSGPWNGVRFSGMPGDQKLNYMVYNFTENSEDVAYTFRMTNKSIYSRLKVSSEGFLERLTWTPNSITWNMFWYLPLENQCDIYMICGRYAYCDVNTSPLCNCIQGFNRSNEERWDLKDWSSGCIRRTRLSCSGDGFTRMRKMKLPETKMAIVDRSIGVKECEKRCLSDCNCTAFANADIRNGGTGCVIWTGDLEDLRNYYADGQDLYVRVAAADLVKKSNANWKIIS

SEQ ID NO: 2743 - protein, 136 aa, Zea mays
  unsure (1)..(136): unsure at all Xaa locations
RGRSARAHDTIRFGDQRRASKPTSPRRDPLQSTIQSETKFWADKKKFGTDAIYGSALNIRKDLDAQILSRFQRPPGALPSSLLGYEAXTGSLDDFGFEDYLNMPHDSDSFRQPDMHHGMERSPLVCPRGPICPSFN

SEQ ID NO: 2744 - protein, 681 aa, Nostoc sp. PCC 7120
MATFTVTTLNDVVNPNDGLLSLREAVTAAEALPGTDTIAINGIALLNSPVVIRQGNSINFQGNGTSFTGFNGQGRTSLFLIDNSTVTFNNLQINRGLAQGGNGSRGGGGGLGAGGGLFLNPGANVTADNVVFFDNRAVGGNSFTGRGDGGRGGNDSSAGSNGFPGGSGGLPSFFAIGGIVPTSGGNGGAAGRIVGSTGLGAGGGVSGSSGGFGVGGGSGGGGGGGAGGAGAFRNATGGGGGGFGGYGGGGGGGGGGGGGGANVLGGQARPGGAGGLGGAAGAFAGAGRDGANGGNGRSTFNGNSPGNGGVGGQGGGGAGLGGAVFVSNSATFNVRNSSFLFNSAVGGSGFQNGQGRGGAIFVQSGGLLRDMGGVRFIQNSASTANPDSNIYPVKVNRGDRTIEVEGFQGVGRGSNPSLEVRETFDELIFTGEGLVAKNLLLTQTGDDLVVSFEGVDDTQVILKDFALENLDNLPIPGGQHGQIGNIMFDGDETLQDSFDVFDADSTQNRIWNRNTVTFLNDLDNHVRGFDNSDDVINGQGGNDIIGGLSGDDILRGGEGNDILYAGTGTDILVGGLGNDTLYLGSDRHIDTVIYRQGDGSDVIHQFQRGAGGDLLQFEGIEAIDVVVHGRNTYFHLGDGVTGNTGFGSGELLAELRGVGGFTSDNIGLNLASGNTAQFLFA

SEQ ID NO: 2745 - protein, 224 aa, Zea mays
  unsure (1)..(224): unsure at all Xaa locations
MAAAADVVLLDFWVRPFWQRCRIALGEKGVAYEYREQDLLDKGELLLRSNPIHKKIPVLLHAGRTDCXSLVMLQYIDEAWSDVTPLLPKDYPYTRAQALFWADYIDKKIYDSQTRLWKFEGEAREQAKKDLVEVLETLEGELADKPFFGGGALGFXVDVALVPFTSWFLAYEKLGGFSIQEHCPXRIVAWAARCRERESVAKALSDPAKVLEFVQFLQSKFGAK

SEQ ID NO: 2746 - protein, 394 aa, Lygeum spartum
EPARTEDPALSIAGAVQSQKLAVRAISRLQALPGGDVKLLCDTVVEHVRELTGYDRVMVYKFHDDEHGEVLAESRRTDLEPYLGLHYPATDIPQASRFLFRQNRVRMIADCHAAPVKVFQDPAMPQPLCLVGSTLRSPHGCHAQYMANMGSIASLVMAVIISSGGDDEHNMSRGVIPSAMKLWGLVVCHHTSPRCIPFPLRYACEFFMQAFGLQLNMELQLAHQLSEKHILRTQTILCDMLLRDSPTGIVTQSPSIMDLVKCDGAALYYHGKYYPLGVTPTESQIKDIIDWLTVCHGDSTGLSTDSLADAGYPGAAALGDAVCGMAVAYITPSDYLFWFRSHTAKEIKWGGAKHHPEDKDDGQRMHPRSSFKAFLEVVRSRSLPWENAEMDAIH

SEQ ID NO: 2747 - protein, 364 aa, Pirellula sp.
MPQSFHLVILGGDGIGPEVCDQSVRLLEIMQPHLDGVEFQLDRHSVGVGEYQRSGEALPQSAYDACLASDAVLLGAMGLPNVRYPNGKEIAPQLDLRERLQLYGGVRPIRLYHEADTPLKGHGPGEIDFVLVRESTEGLFYGRDAIADLEADEATNLLRITRSASERVCRLAFETARRRDGKKTVTLIDKANVLSSMVYFRHVFDEVAKEFLDIKAEHVYVDAAALFLVRRPQDFDVMVTENMFGDILSDLAAGLVGGMGMAPSGDIGDDAAVFQPSHGSAPDIAGQSIANPIAMHLSTAMMLEWLDHPETRRAADALNAAIADVLSDPTQRTADMGGNLSTVEITDKIAERLSKRLQGETTAV

SEQ ID NO: 2748 - protein, 68 aa, Glycine max
  unsure (1)..(68): unsure at all Xaa locations
MSDGGKRQGGRALPPPPRGPPPPPPSRPRLEPVDREKTCPXXHRXXTXXWXHQTXEDXSXRGKEPKDE

SEQ ID NO: 2749 - protein, 369 aa, Zea mays
AKLPNPPFCEPYNFFFYNKASAGEQLYLYTSSLICPCPATRTAPIRISSLRVIGTTELFNYCFILSTCSSIQLLKHYYGMAELATAAVLLVTGGVEDQGQDPVRDIEARPAAAAGRGPLRGAGHRPLRDGLRRHQRPRAMRPALRSAPIYVLTCAWACSPTTHCSVVICVRVCVCVCDPPDANWRRCAPVAIDAANLTRLRIARLRYFDPRRSTAMAMAYKMATEGMDVKEECQRWFMEMKWKKVHRFVVYRIDERSRAVLVDRVGGPGEGYEELVAALPGDDCRYAVFDFDFVTVDNCQKSKIFFIAWYVRTYVRIPEPLAFSFPSNGLAVQSVQHPNVTKAGKLLLAAIIPAAFIKVAGYFIRSDLA

SEQ ID NO: 2750 - protein, 271 aa, Zea mays
  unsure (1)..(271): unsure at all Xaa locations
MGIVEEAHNLRVVGEGKRGVIVLAHGFGTDQSVWKHLVPHLVADYRVVLFDTMGAGPTNPDYFDFSRYSTLEGYALDLLAILQELGVQSCIYVGHSVSAIIGALASISRPDLFTKLVLLSASPRYLNDVDYYGGFEQDELDELFEAMQSNYKAWXLGFAPLCVGGDMESVAVQEFSRTLFNIRPDIALNVAQTIFQSDVRSLLPHVSVPCHIVQSTKDLAVPVVVSEYLHRHLGGDSIVEVMPSEGHLPQLSSPDIVTPVLLRHIQHDIAV

SEQ ID NO: 2751 - protein, 1118 aa, Lycopersicon esculentum
MSSSSTTNKTNCSRGSSARSRRSARVIAQTPVDAKLHVEFEESEQQFDYSSSVNLSNSTSNVPSSTVSDYLQKMQRGSLIQPFGCMIAIDAQNFAVIAYSENAPEMLDLTPHAVPSIEQQEALTFGTDVRKLFRSSGASALEKAVSFGELSLLNPILVHCKNSGKPFYAILHRIEVGLVIDLEPVDPHEVPVTTAGAIKSYKLAAKAIRKLQSLPSGDISLLCDVLVREVSHLTGYDRVMVYKFHEDEHGEVVAECRTPELEPYLGLHYPATDIPQASRFLFMKNKVRMICDCLAPPIRVIQDPRLAQSLSLGGSTLRAPHGCHAQYMTNMGTVASMAMSVMINEQDDELDSDQQVGRKLWGLVVCHHTCPRFLSFPLRYASEFLLQVFSVQVNKEVEMAAQLKEKQILQIQTVLCDMLLRDAPMGIVTQSPNVMDLVKCDGAALYYRNKLWLHGVTPAESQIRDIAEWLNESHGDSTGLNTDSLMEAGFPGASVLGDAVCGMAAVKITSKDFLFWFRSHTAKEIKWGGAKHLPGDKDDGRKMHPRSSFKAFLEVVKRRSLPWEDVEMDAIHSLQLILRGSLQDEAADCSKMIVNVPAVDTIIDRVDTLHINDMVRLVETASMPVLAVDTSGRINGWNSKVSELTGLPVENVIGVPLVDLVIGGTTNTIKRVLSLALQGKEEKNVEIKLRTLGPQEKVGSISIVVNACCSRDFKQNIVGVCFTGKDVTGLKLIKDKYSRVQGDYVGIIHSPSPLIPPIFVMDEQGRCVEWNDAMHKLTGSKREEVIDQMLLGEVFTVNSFGCRVKDQDTLTQLTILLNRVIAGGEGEKLFFGLFNKQDKYIEALISANKKVDDDGRVTGVLCFLHVPSPELQYAMHVQKLSEQAAKNSLKKLAYVRLELKNPLNGINCIQNLLKSSDLSKDQRQLLKTSTMCQKQLAKIIDDTDIESIEECYTEMNSCEFNLGEVVTVVINQVMILSQERKVQVTWDSPVEVSQLYLIGDNLRLQQVLSDFLTTAILFTPFEDSSVHFRVIPRKERIGTKMYIMHLEFRITHPSPGIPDDLIQHMFHYSRSISREGFGLYISQKLVKIMDGTVQYLREADRSSFIILVEFPLMEKKNN

SEQ ID NO: 2752 - protein, 353 aa, Glycine max
MASATPLLKDELDIVIPTIRNLDFLEMWRPFFEPYHLIIVQDGDPSKIIKVPEGFDYELYNRNDINRILGPKANCISFKDSACRCFGYMVSKKKYIYTIDDDCFVATDPSGHKINALKQHIENLLCPSTPFFFNTLYEPFREGADFVRGYPFSLREGVPTAVSHGLWLNIPDYDAPTQLVKPLERNTRYVDAILTIPKGTLFPMCGMNLAFDRDLIGAAMYFGLMGDGQPIGRYDDMWAGWCCKVICDHLGLGIKTGLPYIYHSKASNPFVNLRKEYKGIFWQEDIIPFFQSIVLPKEATTVQKCYIELAKQVKEKLSKVDPYFDKLADAMVTWIEAWDELNPAGASVANGKA

SEQ ID NO: 2753 - protein, 329 aa, Oryza sativa
  unsure (1)..(329): unsure at all Xaa locations
MASNGMASSPSSFFPPNFLLHMAQQQAAPPHDPQEHHHHHHHGHHLGPPPPPPPHPHNPFLPSSAQCPSLQEFRGGDGGGGGDEVNGGGEDELSDDGSQAGEKKRRLNVEQVRTLEKNFELGNKLEPERKMQLARALGLQPRQVAIWFQNRRARWKTKQLEKDYDAXKRQLDAVRXENDALLNHNKSDKMQIVALKGREAASELINLNKETEASCSNRSENSSEINLDISRTPPPPPPPWRRRRRRRRWRHXIPFYTSIARPGGGGVDIDQLLHSSSGGAXXGPKMEXXHGGGGNVQAASVDTASFGNLLCGVDEPPPFWPWPDHQHFH

SEQ ID NO: 2754 - protein, 391 aa, Streptomyces hygroscopicus
MGAPLPSAWESLPAEQQPEWDAHPAHAAALGRLHGAAPLVTHTEVATLGWGLAKVARGQARLVQAGDCAESFYESGAGHTAAKASALDALADRMAARTGQWVLRIGRIAGQYAKPRSAPVETVDGVTLPVFRGHMVNLETASELARRPDPRRMVWAYHASTEILRDLRARSLAAADGGRLGPWSSHEALVLDYEAGLVRHDPAAGRSLLGPTHFPWIGERTRQLDHAHVALLASVRNPVGCKTGPSTTPDILLRLCAALDPDRVPGRLSLIFRMGRGAVAEALPPLVRAVVSAGHPVVWLSDPMHGNTRRAAGGLKTRYLADLIAESREFRRVVERAGRHVGGLHLEVAAERVTECVGRPEEENALTERYLSLCDPRLTVEQASELIDAVF

SEQ ID NO: 2755 - protein, 463 aa, Yersinia pestis CO92
MEKKLGLTALTALVLSSMLGAGVFSLPQNMAEVASPAALLIGWSITGIGIIFLAFAMLLLTRLRPDLDGGIFTYAKEGFGDLIGFFSAWGYWLCAVIANVSYLVIVFAALSFFTDKSGSIIFGEGNTWQALLGASFLLWLVHALVLRGVQTAASINLAATLAKLLPIGGFIILAGIAFSLDTFSIDFTGLALHTPVWQQVKDTMLITLWVFIGVEGAVVVSARARNKKDVGRATMLAVISALSVYLLITLLSLGVVPRAELAGMRNPSMAGIMVEMIGPWGEIIIATGLIISVCGAYLSWTIMAAEVPMVAAKHGAFPKIFRHQNKNNAPAQSLWLTNSAVQVALVLIWLTGSNYNTLLTIASEMILVPYFLVGAFLFKVALKRQDWRLIVAASGACLYGLWLIYAAGLVYLLLSVLLYAPGLLVFIYARKGHEGLRLLNTVERAAIFLVLLATIPATWLMMH

SEQ ID NO: 2756 - protein, 230 aa, Bacillus anthracis str. A2012
MASTMTPYFGIVVSLIAYGIGTLLFKHSKGFFLFTPLFVAMVLGIVFLKVGNFTFEEYNTGGKMISFFLEPATIAFAIPLYKQVDKLKKYWWQILSAIVVGSICSVIVVFIVAKAIGLDTAVMNSMLPQAATTAIALPISESIGGIPAITSFAVIFNAVIVYALGALFLKTFRVKHPIAKGLALGTAGHALGVAVGIEMGEVEAAMASIAVTVVGVVTVVVIPMFMPFIG

SEQ ID NO: 2757 - protein, 640 aa, Rhodopseudomonas palustris
MVEHLQPNLRQALLVADVERLGPGRVLAHDHRALHLAGVDQQVLRGIAHRLGKLAGGEIAVEGVFVLLVVLVDRLGDLVGRRARRDERRFQPRGPRHQRQHNFRDVAGDHRVDLVFIHGALESAYGIGRRGVVVVADDLDLAAVDAALRVDFFSGELRSLRNGSAGDRLRFGDHADLDRVGGERRRSTESDRSRGDHSAHRPRTDIRGGWRHGVSSLLSLFGGALAGGLLISREKCSARFVAGKHNAFAFTRIRYVQRSVECQRPLGQMKPRHARHKGGTELNQSKDQYRIAVIAGDGIGKEVMPEGLRVLEAAAKKHRVKLVFDHFDFASYDYYEKHGQMMPDDWKEKIGGHDAIFFGAVGWPAKIPDHISLWGSLIKFRREFDQYVNLRPVRLMPGVPSPLAGRKPGDIDFWVVRENTEGEYSSVGGRMFPDTEREFVTQQSVMTRVGVDRILKFAFELAQSRPKRHLTSATKSNGISITMPYWDERVEAVAKSYPEVKWDKYHIDILTAHFVLHPDWFDVVVGSNLFGDILSDLGPACTGTIGIAPSGNINPEGDFPSVFEPVHGSAPDIAGQGIANPIGMIWSGAMMLEHLGEKQAADSIVKAIERTLEERTLRTRDLGGQADTSACGKGVAEMVE

SEQ ID NO: 2758 - protein, 354 aa, Agrobacterium tumefaciens
MEYRLLGRSGLKVSTLTVGTMTFGGVGWAKTVGDLGVTEAKRLVDLCLDAGINLIDTADVYSDGKSEEILGEILGGKRKGGALVATKARFNMGPGPNDGGLSRQYLIAACEASLKRLKTDVIDLYQLHEWDGQTPLEETMEALDTLVRQGKVRYIGCSNFTGWQIMKALGISEKDKRQRFVSQQIHYTLEARDAEYELLPISVDQGLGVLIWSPLAGGLLSGKHRRNQSAPEGSRQFAGWTEPPVRDEERLWNIVDTLLSVADGRGVSAAQVALAWLIGRKAVTSIIIGGRTEAQFKDNLAAADLQLSAEERKRLDDVSLLQLLYPYWHQRNNASDRLSEADLELLAPHLSKKG

SEQ ID NO: 2759 - protein, 79 aa, Zea mays
  unsure (1)..(79): unsure at all Xaa locations
ARLCVFEFFLLSCFFDMTCNNGCVGAYRIHPPDMYDLTNMTGLECLXSAAMETYLSVIRXQIRNSPETSRRMLSYYILH

SEQ ID NO: 2760 - protein, 330 aa, Pyrus communis
DVYFWEAKGQNPLFPRIYGHEAGGIVESIGEGVTDLKAGDHVLPVFTGECKDCAHCKSEESNMCDLLRINTDRGVMLSDGKSRFSIKDKPIYHFVGTSTFSEYTVVHVGCLAKINPLAPLDKVCLLSCGISTGLGATLNVAKPKKGSTVAVFGLGAVGLAAAEGARFSGASRIIGVDLHSGRFEEAKKFGVTEFVNPKEHKKPVQEVIAELTNGGVDRSIECTGSVEFMISAFECVHDGWGVAVLVGVPHKEAVFKTHPLNFLNERTLKGTFFGNYKPRTDIPSVVEKYMNKELQLEKFITHKVPFSEINKAFEYMLKGEGLRCIIHMED

SEQ ID NO: 2761 - protein, 82 aa, Oxalis laxa var. hispidissima
INISGTNGEVMPGQWEYQVGPSVGIEAGDHIWASRYILERITEQAGVVLTLDPKPIDGDWNGAGCHTNYSTKSMREEGGFEV

SEQ ID NO: 2762 - protein, 170 aa, Trichodesmium erythraeum IMS101
MDLSLIPAQPKPGLINVLIEITGGSKNKYEFDKDLQAFALDRVLYSSVQYPYDYGFVPNTLADDGDPLDGIVIMDEPTFPGCVIPARPVGMLEMIDGGDRDEKILCVPDKDPRYTEVKSLKDVAHHRLEEIAEFFRTYKNLEKKVTEILGWKDVEHVMPLVEKCVKAASK

SEQ ID NO: 2763 - protein, 303 aa, Bacillus anthracis str. A2012
MKRWQMEWLLVSVALVWGANYTIGKYGVAYMSSIQFNSLRFLVASPVLLLITFLMERSLRIERKDWLRLVAVGIVGTTMYQTMFMLSVKYTSATNASLLIAMSPIFTGILAVLHKQERFSMKVQIGSIVAFIGAAFVLLTGHTGGATYEYAWLGNIIGLVAAIAWGWYPILAQPLITKYSAMRVTSWSTLIGIVPLVIYCLFNVNSLTWPVDTLSWGSLAYSIIFATIFGLAMWYVGISQIGSTKVMVYMYLVPLFAVIFAAVTIGEQINMMQLVGGLIIFVGLYVVKKGGIKKPALNLKKVS

SEQ ID NO: 2764 - protein, 260 aa, Corynebacterium efficiens YS-314
MSNPTPETGSHGSHAPRTVLITGAAGGLGRAFAEGFAAAGDRVAVADINLAGAQETAELLTTSGAQAKAFQVDVTSPESTEALAAAVAEFGGGTIDVVVNNAAIYATVTRSPLEEIDPAEWDLVMGVNLKGPWLVTRAVSPHLSENARIVNLSSATVMSGSAQWAHYVASKGGVIALTRVMAKELGTRGITVNAVAPGFTLTEASLNLMDDAATYGVDRGSIKRASQPEDIVGATLFLASPQAGYITGQTLVVDGGRQFI

SEQ ID NO: 2765 - protein, 150 aa, Pisum sativum
MAHILSEEQIVDFKEAFGLFDKDGDGCVTVEELATVIRSLDQNPTEEELQDMISEVDADGNGTIEFDEFLNLMARKMKDTDAEEELREAFKVFDKDQNGYISPSELRHVMMNLGEKLSDEEVKQMIKEADMDGDGQVDYDDFVKMMMAIR

SEQ ID NO: 2766 - protein, 371 aa, Glycine max
MEAIRKQASKLREQVARQQQAVLKQFGAGGYGGSDNMVTDEVELQQHQKLEKLYISTRAGKHYQRDIVRGVEGYIVTGSKQVEIGTKLSEDNRKYGADNTCTSGSTLSRAALNYAHARAQMEKERGSLLKALGTQVAEPLRAMVMGAPLEDARHLAQRYDRMRQEAEAQAIEVSKRQAKVRETPGNAENAMKLEAAETKLQDLKTNMAILGKEAAAAMAAVEAQQQRLTLQRLIAMVEAEHAYHQRVLQILDQLEGEMISERQRIEAPPTPSVDSSMTPPPSYEEVNGVCASQAHNGSTDSMGYFLGEVLFPYHAESEVELNLSVGDYIVVRKVTNNGWAEGECKGKAGWFPFGYIERRERVLASKVAEVF

SEQ ID NO: 2767 - protein, 392 aa, Callaeum septentrionale
DLEPVNPADVPVTAAGALKSYKLAAKAISRLQSLPSGNISLLCDVLVKEVRDLTGYDRVMVYKFHEDEHGEVVSECRRSDLESYLGLHYPATDIPQASRFLFMKNKVRMICDCLAPPVKVIQDERLPQPLSLCGSTLRSPHGCHAQYMTNMGTIASLVMSVTINEDDDMMDGDQQQMTRKLWGLVVCHHTSPRFVPFPLRYACEFLIQVFGVQINKEVELAAQVREKHILQIQTMLCDMLLRDAPVAIITQSPNVMDLVKCDGTALYFKNKTWLLGVTPTEEQIRDIAEWLLEYHSGNTGLSTDSLMEAGYPGASVLGDAVCGMAAVSITSRDFLFWFRSHTAKEIKWGGAKHDPDEKDDGRKMHPRSSFKAFLEVVKWRSMPWEDIEMDAI

SEQ ID NO: 2768 - protein, 352 aa, Halobacterium sp. NRC-1
MQHRELGDSGVEVSEVGFGAWVVGTDWWGDRDEDDALEMVEYALDHGITYFDTGDVYGHGRSEELLGEALAEHGDEMTVATKVGYDFYNNPQAGHGELPKEMGVDYLRDAVEKSMDRLGVDHVDVLQLHNPDVDELTPDVLDLLDDLRADGRADAIGVALGPSIGWLAEGDHAIEAAFDSVQYVGNVLEQDVHNHFVDSVRERGAATSLIPRVPHSSGLLNEQVTPDTELGEGDHRGFRPEEWYETGWEKVDALRFLERDGERTMGQAAIQWLLSFDEVATVTPTFRSKADIEAWASASETPALSDAERERVAELYADNFGVDRFDGMEKEDYRTSVDGDDLRDAGILGSAD

SEQ ID NO: 2769 - protein, 174 aa, Pseudomonas putida KT2440
MAIYQYDNLAPNLHPETFIAEDASVIGDVTLEQGVSVWPQAVLRGDNEAIRIGQHSNVQEGAVLHADPGFALTVGQGVTIGHQAMLHGCTIGDGALIGIQAVVLNGAVIGNNCLVGAGAIVTEGKVFPDNSLILGAPAKVVRELTAEAIAGMQRNATEYVAKGQSFKEKLIRIR

SEQ ID NO: 2770 - protein, 72 aa, Zea mays
MDNPEMQRFLQQEQQKAMMNEMVGKLTSVCWDKCITSAPGSKFSSGESTCLTNCAQRFLDMSVMIAKRFEMK

SEQ ID NO: 2771 - protein, 434 aa, Leptospira interrogans serovar lai str. 56601
MDVQNKDVNSHPKGLTILFFTETWERFSFYGMRALLVLFLTKVFHFSDVDANRIYGIYTGLVYLTPLLGGYLADRYLGFKKCIFLGATLMMFGHLSLAFETKPFFFLGLGLLILGVGFFKPNIATVLGRIYDEDNKTRMKDSGFTIFYMGINLGGFLGPLFCGYFSKSWGWGYGFGVAAFGVLFGILILLLGQKQFPEKVFEPGKKYHTVEGQKHSTLKKEEKQKLAVIFIFTLFVIIFWAAFEQIGSSINLFIDRHVNRNLFGYDIPTPFFQSLNPLLILIFAPIIASFWTTLAKNNWKPDTSTRFATGFFILALGFSVLTLVTLDFRPGHKISAVWLLLMVLCITVGELFTSPGGLALVTKLSPKQLGGFMMGVWLLSSFFGNILAGELAGFMKTDSFPTFFGMFAILAFVGGMILYITRKKLQNWMHGADQ

SEQ ID NO: 2772 - protein, 443 aa, Oryza sativa
  unsure (1)..(443): unsure at all Xaa locations
XIMTDELRSFLELNLPKVKEGKKAKYSVGVMEPKVGSHISEATGIPCQCNEFVQELLRGVRLHFDHFIDQLKPTDLEKAQLGLGHSYSRAKVKFNVNRVDNMVIQAIFLLDTLDKDINSFSMRVREWYSWHFPELVKIVNDNYVYSKIAKFVVNKSDLAEKDIPALADIIGDEDKAKEIVEAAKASMGQDLSPVDLINVQQFAQRVMNLSEYRKNLYEYLVTKMNDIAPNLTSLIGEIVGGLELELNTSVXSVRSCANKLRRDXTSMTRVLHRVRTLXVMKAAINDMTNAVSEDGGEKEKNDTSAKKNKKKKSKAEADGEEMDLDKPAKVAAEETDPENENKKKKKHKLEEPQDQEMAVNGNLEQDETPKKKKKKKPEASEDVEPRTATEGKKRKKKNEVLQYLFDFLNNTKSSEPSCKQLRRFLANNNAVLLELCQKCQCSF

SEQ ID NO: 2773 - protein, 752 aa, Geobacillus stearothermophilus
MENQNRQNAAQCPFHGSVTNQSSNRTTNKDWWPNQLNLSILHQHDRKTNPHDEEFNYAEEFQKLDYWALKEDLRKLMTESQDWWPADYGHYGPLFIRMAWHSAGTYRIGDGRGGASTGTQRFAPLNSWPDNANLDKARRLLWPIKKKYGNKISWADLFILAGNVAIESMGGKTIGFGGGRVDVWHPEEDVYWGSEKEWLASERYSGDRELENPLAAVQMGLIYVNPEGPDGKPDPKAAARDIRETFRRMGMNDEETVALIAGGHTFGKAHGAGPATHVGPEPEAAPIEAQGLGWISSYGKGKGSDTITSGIEGAWTPTPTQWDTSYFDMLFGYDWWLTKSPAGAWQWMAVDPDEKDLAPDAEDPSKKVPTMMMTTDLALRFDPEYEKIARRFHQNPEEFAEAFARAWFKLTHRDMGPKTRYLGPEVPKEDFIWQDPIPEVDYELTEAEIEEIKAKILNSGLTVSELVKTAWASASTFRNSDKRGGANGARIRLAPQKDWEVNEPERLAKVLSVYEDIQRELPKKVSIADLIVLGGSAAVEKAARDAGFDVKVPFFPGRGDATQEQTDVESFAVLEPFADGFRNYQKQEYSVPPEELLVDKAQLLGLTAPEMTVLVGGLRVLGANYRDLPHGVFTDRIGVLTNDFFVNLLDMNYEWVPTDSGIYEIRDRKTGEVRWTATRVDLIFGSNSILRSYAEFYAQDDNQEKFVRDFINAWVKVMNADRFDLVKKARESVTALQLLVFDRYEKGTAVSK

SEQ ID NO: 2774 - protein, 174 aa, Zea mays
MTTATAVGSVADRIMPHLLNIYGSSATARDFEIYAPNATFEDPLMRAHGVKQIKSAFYTLPKVFGESKITEYTVQENPMGPGKTEVVIQNKQHYKVLGKPVDLTSLIRLQLQDGKVVKHEDWWHGKPLKNRDTVGVPLVGRLAEASRRGAMLLTHALMGFGKDPTQPPPPPPTH

SEQ ID NO: 2775 - protein, 407 aa, Schizosaccharomyces pombe
MRGIVTRIVLSTQKCLPSVNCTRRYYSKQKDISIVRQRLGRPGNHLKIGIVGMPNIGKSTLFQILTKTNLGNPANYPFATIDPVHAKAPVLDSQYELLCEIYQPKTRIPAQLTIYDTAGLTRNSSKGEGLGNAFLSNIRSVDALFQLVRAFPEAQVPHVEKSVDPVRDLQIIQEELLLKDAEFLESYLKKEGRSPKTCAKALDTARRALEVVLGKGRQISKAEWNDEQIPILNSLNLLTAKPVVYLVNMDQDDYLSDEQEALKGIKEWVEKNSFGDQVIPLSVLFEEQLFMLTPEEAAQECASLGKNSQLSEIICAGYSALNLIHYFTASEKIVQAWTIADGSKAPDAAGIIHSDFKKKFVAGEVIKFSDFEKYKSVDACKSVGKCKTKGKDYTVEPGDIIFWKIAR

SEQ ID NO: 2776 - protein, 348 aa, Deinococcus radiodurans
MRALSKQQPGEGIWMIETEVPTPGPNDLLIRIRKGSICGTDVHIYKWDDWASQTVPVPMVVGHEYVGVVAGMGSEVRGFEIGDRVSGEGHVTCGHCRNCRAGRRHLCRNTQGVGVNRPGSFAEYLVLPAFNAFKLPDDIPDDVAAIFDPFGNAVHTALSFDLVGEDVLITGAGPIGCMAAAVARHVGARNVVITDVNDYRLDLARQMGVTRAVNVAREDLWTVATQELDMHEGFDVGMEMSGSGPAFAQMVSVMNNGGKVALLGIPSGEVQIDWNAVIFKMLTIKGIYGREMFETWYKMAALIQSGLDLTPVITHHYGIGDFQQGFDAMLSGQSGKVILDWETEEQSA

SEQ ID NO: 2777 - protein, 596 aa, Listeria innocua
MINKQHFYKVIQAFIGVLLIGSVFIWLGSNNDVNAEEQSITEPTPINEIFPDAKLAEVMRNYLSKTNVTDTVTQEELNNITIVGATSTGIESLEGIQYLPNVTTFNFNGEKIQDISFLSNSTKLENLDLSGNPIKDFSPIANLTKLHTLNLMNCEISDISFITNLTELKSLYLSNNRITNISPLANLTKLDYLIIENNQITDLTPLKNMKNLNNLVISGNQINDITTIAELTSLQNLSISDNQIVDISPLANLNNLNSLAIHKNNIVDTSPLANLTQLKFINIRDNQIDDITGLTNLTNLTNLHLGGNEISDLTPLANLTNLNLLDLTNNQISEVIPLANLTNLSNLWLNGNNIIDISPLKDLKGLKNLSLSDQRIQKNPELFKTNFTLTNNIKDLDGGLVEITDISHNGTYDNPIVTWELPRYVNEISYKYTQHVQIGNSKTDYDVTVRQPLSLPSHTVNFIVDDVLKTSLEVKEEALITQPAAPKKAGYTFTGWYDAKTGGDKWDFETAEMPRNDMTLYAQFSENEVIPVDEDVDLIVEESGPVQESNDDVPPVTEPTKNIVMLPKTGDSNNMLFVGLGLLLFGTGVVISKKLR

SEQ ID NO: 2778 - protein, 751 aa, Geobacillus stearothermophilus
MENQNRQNAAQCPFHGSVTNQSSNRTTNKDWWPNQLNLSILHQHDRKTNPHDEEFNYAEEFQKLDYWALKEDLRKLMTESQDWWPADYGHYGPLFIRMAWHSAGTYRIGDGRGGASTGTQRFAPLNSWPDNANLDKARRLLWPIKKKYGNKISWADLFILAGNVAIESMGGKTIGFGGGRVDVWHPEEDVYWGSEKEWLASERYSGDRELENPLAAVQMGLIYVNPEGPDGKPDPKAAARDIRETFRRMGMNDEETVALIAGGHTFGKAHGAGPATHVGPEPEAAPIEAQGLGWISSYGKGKGSDTITSGIEGAWTPTPTQWDTSYFDMLFGYDWWLTKSPAGAWQWMAVDPDEKDLAPDAEDPSKKVPTMMMTTDLALRFDPEYEKIARRFHQNPEEFAEAFARAWFKLTHRDMGPKTRYLGPEVPKEDFIWQDPIPEVDYELTEAEIEEIKAKILNSGLTVSELVKTAWASASTFRNSDKRGGANGARIRLAPQKDWEVNEPERLAKVLSVYEDIQRELPKKVSIADLIVLGGSAAVEKAARDAGFDVKVPFFPGRGDATQEQTDVESFAVLEPFADGFRNYQKQEYSVPPEELLVDKAQLLGLTAPEMTVLVGGLRVLGANYRDLPHGVFTDRIGVLTNDFFVNLLDMNYEWVPTDSGIYEIRDRKTGEVRWTATRVDLIFGSNSILRSYAEFYAQDDNQEKFVRDFINAWVKVMNADRFDLVKKARESVTALQHCCHLRSSAETVLQ

SEQ ID NO: 2779 - protein, 433 aa, Mesembryanthemum crystallinum
MAQILAPSLQVKMSITKSSTPASSMLPNTWTSVVLKQSRKGSIKNSTKFKVCASIKPDVSVQNRVEQLLNLDVTPFTDKIIAEYIWIGGAGIDLRSKSRTLSKPVEHPSELPKWNYDGSSTGQAPGEDSEVILYPQAIFKDPFRGGNNILVICDAYTPAGEPIPTNKRHKAAEIFSNPKVVSEVPWYGIEQEYTLMQPNVKWPLGWPVGAYPGPQGPYYCGVGADKSFGRDISDAHYKACLYAGINISGTNGEVMPGQWEFQVGPSVGIEAGDHVWCARYILERITEQVGVVLTLDPKPIEGDWNGAGCHTNYSTKSMREEGGFEVIKKAILNLSLRHKDHISAYGEGNERRLTGKHETASIDSFSWGVANRGCSIRVGRDTEKAGKGYLEDRRPASNMDPYVVTGLLAETTLLWEPTLEAEALAAQKIAMKV

SEQ ID NO: 2780 - protein, 266 aa, Glycine max
MLELRLVQGSLLKKVLESIKELVNDANFDCSSTGFSLQAMDSSHVALVALLLRSEGFEHYRCDRNTSMGMNLNNMAKMLKCAGNDDIITIKADDGSDTVTFMFESPTQDKISDFEMKLMDIDSEHLGIPEAEYHAIVKMPSSEFARICKDLSSIGDTVVISITKEGVKFSTKGDIGTANIVCRQNTSVDKPEEATVIEMNEPVSLTFALRYMNSFTKATPLSNTVTISLSNELPVVVEYKIAEMGYVRFYLAPKIEEDEEDTKPQV

SEQ ID NO: 2781 - protein, 426 aa, Methanosarcina mazei Goe1
MEEKSDLKRDLSLVEITLTGIGNILGAGIYVLMGKAAGLAGNFVWFSFLFAGVTAALSAFSYMELSSMYPRAGAEYEFVKRAFGERTGLFAGLLVVYYVTITSSAVALGFGRYFSSLFGASSLVGVAGLFLFLSLVMVYGVKESARLAVFISLIELTGLLVIVYAGFPYIGTVNYFEAPDLAGLFEASALIFFAFLGFEDIVRLSQETKNAEKTTPRALIIAISVTVFLYVCVAIASVSVLDFRVLGLSEVPLADVAAVAFGNDAFVLLSWIALFSTMNTVLVVMLGGSRIVYGMADAGSFPRALARVHPRFRTPWAAIFGIAFISGFFVLLGDITTVANIANFMIFIVFFMVNVSLIKLRYAEPERHRPFRVPVSIGRLPLFPSLGALSAVFLFSQISLEIMAYGFFLIVIGFIIVLIRTRKIPP

SEQ ID NO: 2782 - protein, 477 aa, Helianthus tuberosus
HEWVLGVGKPKNLPPGPTRLPIIGNLHLLGALPHQSLAKLAKIHGPIMSLQLGQITTLVISSATAAEEVLKKQDLAFSTRNVPDAVRAYNHERHSISFLHVCTEWRTLRRIVSSNIFSNSSLEAKQHLRSKKVEELIAYCRKAALSNENVHIGRAAFRTSLNLLSNTIFSKDLTDPYEDSASGKEFREVITNIMVDSAKTNLVDVFPVLKRIDPQGIKRGMARHFSKVLGIFDQLIEERMRTGRFEQGDVLDVCLKMMQDNPNEFNHTNIKALFLDLFVAGTDTTSITIEWAMTELLRKPHIMSKAKEELEKVIGKGSIVKEDDVLRLPYLSCIVKEVLRLHPPSPLLLPRKVVTQVELSGYTIPAGTLVFVNAWAIGRDPTVWDDSLEFKPQRFLESRLDVRGHDFDLIPFGAGRRICPGIPLATRMVPIMLGSLLNNFDWKIDTKVPYDVLDMTEKNGTTISKAKPLCVVPIPLN

SEQ ID NO: 2783 - protein, 288 aa, Zea mays
TRPAGLDKHLRFFQIDGKRNPKIQSIFIGDCPVHKASFLPDGSEVILSGRRKFFYSFDLVNAAVSKIGPLTGREEKSLESFEISPDSRTIAFVGNEGYILLISAKTKQLITTLKMNGSVRSLAFADGGNQLLSSGGDGHVYHWDLGTRKCIHKATDDGSLAGLSLCTSRDSSLFATGSSSGIVNVYKRDDFLGGKRKPMKTIENLTTDIGEMKFNHDAQILAISSRKERNGMRLVHVPSFSVFQNWPGPRFSLHYPRCLDFSPGSGFLSVGHAGGKVLLYKLHHYENA

SEQ ID NO: 2784 - protein, 143 aa, Zea mays
  unsure (1)..(143): unsure at all Xaa locations
MTEAMIRKKPGMASVKDMPVLQDGPPPGGFAXXRFARRIPNTGPSAIVFFLTTFGAFSWGMYQVGQGNQKRRALKEEKYAARRAILPVLQAEEDERFVKEWHKYLEYEAEVMXXVPGWKVGESVYHSGRWMPPASGELRPEVW

SEQ ID NO: 2785 - protein, 346 aa, Zea mays
  unsure (1)..(346): unsure at all Xaa locations
MAGQEVANKRVVLKRYVTGFPGADDMEVVTGTARVAVPPGSTAMVLKNLYVSCDPYMRGRMTKHERPSYVPDFVVGEVLENFGVCKVIASGHQDFKVGDLVWGMTGWEEYTLIHNPESFFKINHPELPLSYYTGVLGMPGLTAWAGFFDVGKPKKGDCVFVSAASGAVGQLVGQFAKLTGCYVVGSAGSDEKVNLLKTKFGFDEAFNYKKEQDLDAAFERYFPEGIDIYFEXNVGGSTLEAVLPNMRIHGRIPTCGMISXYNLEEPEGVHNLFEIIAKRLRMEGFMVFDYYSQYHKFEQEMVGYLKAGKIAYVEDIAEGLEKAPEALIGLFTGRNVGKQLVAIARE

SEQ ID NO: 2786 - protein, 336 aa, Yersinia enterocolitica
MSILITGGAGYIGSHTVLTLLEQGRNVVVLDNLINSSAESLARVSKICGRKPNFYHGDILDRSCLKLIFSSHKIDSVIHFAGLKSVGESVEKPIEYYQNNVVGSITLLEEMCLANVKKLIFSSSATVYGEPEFVPLTEKARIGGTTNPYGTSKVMVEQILKDFSLAHPDYSITALRYFNPVGAHPSGLIGEDPNGKPNNLLPFITQVAIGKLSKLLVYGNDYDTPDGSGIRDYIHVMDLAEGHLSTLINLTSGFRIYNLGTGVGYSVLHMIKEFERITGKNIPFDIVSRRPGDIAECWASPELAHLELGWYAKRTLVDMLQDAWKWQKMNPNGYNC

SEQ ID NO: 2787 - protein, 425 aa, Microbulbifer degradans 2-40
MMENIFKDLESNVQSYALSFPVIFNRAKNEELFDTEGNAYIDFLAGAGSLNYGHNNDVIKKALVEYIMEDGVTHGLDMHTKAKAEFMDSFNTHILQPRELDYTMQFTGPTGANAVEAALKLARKVKGRTNVVSFTNGFHGVTAGAVAATGNQHHRDGTGVPLANVSRMPFCGYHGQNVDTIKMIDKLIGDPSSGVDAPAAAIVEVVQGEGGLNVAQDEWLRQLEKLCRKHDMLLIVDDIQAGCGRTGTFFSFEKAGIKPDIITLSKSFSGYGLPMAVVLMSPELDIWKPGEHNGTFRGNNHAFVTAKAAIEHYWKDDKFQNEIAEKSAKVTKRLKHIADKYGVTKARLKGRGLMQGIDVVSGEIADEITTKAFEKGLIIETAGNLSQVIKVFCPLTITMEKLNAGLDIVESAFAEVLGDKLRNVS

SEQ ID NO: 2788 - protein, 319 aa, Oryza sativa
  unsure (1)..(319): unsure at all Xaa locations
MTRRCSHCSHNGHNSRTCPNRGVKIFGVRLTDGSIRKSASMGNLSLLSSAAGSTSGGASPADGPDAAPTAADGXYASDDFVQGSSSATRDRKKGVPWTEEEHRRFLLGLQKLGKGDWRGISRNFVVSRTPTQVASHAQKYFIRQSNMTRRKRRSSLFDMVPDESMDLPPLPGGQEPETQVLNQPALPPPREEEEVDSMESDTSAVAESSSASAIMPDNLQSTYPVIVPAYFSPFLQFSVPFWQNQKDEDGPVQETHEIVKPVPVHSKSPINVDELVGMSKLSIGESNQETVSTSLSLNLVGGQNRQSAFHANPPTRAQA

SEQ ID NO: 2789 - protein, 137 aa, Oryza sativa
MSILWEKSAGWRWLVRRTRDSKPFFFTFAALCGVVPGVVGYGVMQLTSSRNDQLEAHLRSTARPETAMMGQVNRERLAEFLGELQRKEDTNDRYVAALKGETLTRKRYERIQPVNKEGTPESPPVKEQATTESVKAK

SEQ ID NO: 2790 - protein, 278 aa, Geobacter metallireducens
MSDVTDAQAIADHWGRGDVFGLIVAALNQMAKPLDGLTVEELAPVDHFHSRGFPATVEFADRLPINAGEQILDIGCGLGGPARYMAKRFQCRVSGIDITGPFVEAANRLTALLHMEQQVEIAQGNGQRLPYPDSCFDGAYTQDVTMNVAERAGFFAEAYRVLKPGAFFALSEHGLGPQGKPHYPVPWSDDGTGAYLTAPAETRAILERTGFEAITVEDTGAKCVAGYGKVIERAEKGALPPLGLHLFMGESMVEKMRNAARNIEEGRTHPIQLICRKP

SEQ ID NO: 2791 - protein, 136 aa, Zea mays
FYRDSQLFLAHVRWVSFPDVHIQAACFVPTPGPAPAPPGSSATNTNDSSAAPRPAKPSAFPPPMYGGVTPGSLQPHECGGRCAGRCSATAYQKPCLFFCRKCCAACLCVPPGTYGNKNTCPCYNNWKTKRGGPKCP

SEQ ID NO: 2792 - protein, 221 aa, Zingiber officinale
DDLPDSIDWRENGAVVPVKNQGGCGSCWAFSTVAAVEGINQIVTGDLISLSEQQLVDCTTANHGCRGGWMNPAFQFIVNNGGINSEETYPYRGQDGICNSTVNAPVVSIDSYENVPSHNEQSLQKAVANQPVSVTMDAAGRDFQLYRSGIFTGSCNISANHALTVVGYGTENDKDFWIVKNSWGKNWGESGYIRAERNIENPDGKCGITRFASYPVKKGTN

SEQ ID NO: 2793 - protein, 346 aa, Saccharomyces cerevisiae
MKASHICSYLLSIAPLVVSHGVHHNRDHGHEANHESKQSFLILKQESIFYSLVCFLQNHLFVLGPRYNAIVAILIIQLMPCLFVLFVPGLRKNDRASLTLSLLVSFSLGTLLGDILLHVIPESLSGVTDVTMVGGAIFLGFISFLTLDKTMRILSGTSNDDGSIHSHSHSHTPQQTAEKKAGFNMSAYLNVISGIAHHITDGIALATSFYSSTQVGIMTSIAVTFHEIPHELGDFAILLSSGFTFPQAIRAQAVTAFGAVVGTSIGCWMNEIGNNSHKATSSSANASELMLPFTAGGLIYIATTSVVPQILHSSAPDSKLREFKKWALQLVFIFVGFAVMALMDEH

SEQ ID NO: 2794 - protein, 407 aa, Nymphaea alba
PFYGILHRIDVGLVIDLEPVNPTDVPVTAAGALKSYKLAAKAISRLQALPSGNIGLLCDVLVREVSELTGYDRVMAYKFHEDHHGEVIAECKKPDLEPYLGLHYPATDIPQASRFLFMKNKVRMICDCTAPSVKVIQDKQLEAAVELCGSTLRSPHGCHAQYMVNMGSIASLVMSVVIMNHDEEPANDNPQKGSKLWGLVVCHHTSPRFIPFPLRYACEFLIQVFAVQLNKEVELAAQLREKHILRTQTVLCDMLLRDAPVGIVTPSPNVMDLVKCDGAALYYGKQFWLLGTTPTETQVRDIAGWLYECHGGSTGLSTDSLMEAGYSGAVALGDAACGMAAVKITYRDFLFWFRSHTAKEIKWGGAKHDTVDKDAGKRMHPRSSFKTFLEVVKHRSHPWENAEMDAI

SEQ ID NO: 2795 - protein, 211 aa, Pinus radiata
MDSRPATVLVIIVSAIMASATAKDVNPQHSGTSIAEFIKSSCQVSRYPQLCVSSLSPYAGSLKPTLCDLVKAAMNVSLVNARTVSVWAAGLKGRSAEMSERERAALNDCIQNFDDTVDEIQKSLKELEQLQRSNFNPQMNDMQTFMSAALTDQGSCLNGFEDVKAAAGKISAMVKVRVQNESELISNALALLNALALNAFANTGVDDGIHA

SEQ ID NO: 2796 - protein, 512 aa, Torenia hybrida
MDTVLITLYTALFVITTTFLLLLRRRGPPSPPGPLSLPIIGHLHLLGPRLHHTFHEFSLKYGPLIQLKLGSIPCVVASTPELAREFLKTNELAFSSRKHSTAIDIVTYDSSFAFSPYGPYWKYIKKLCTYELLGARNLGHFQPIRNLEVRSFLQLLMHKSFKGESVNVTDELVRLTSNVISHMMLSIRCSEDEGDAEAARTVIREVTQIFGEFDVTDIIWFCKKFDLQGIKKRSEDIQRRYDALLEKIISDRERSRRQNRDKHGGGNNEEAKDFLDMLLDVMESGDTEVKFTREHLKALILDFFTAGTDTTAIATEWAIAELINNPNVLKKAQEEISRIIGTKRIVQESDAPDLPYLQAIIKETFRLHPPIPMLSRKSTSDCTVNGYKIQAKSLLFVNIWSIGRNPNYWESPMEFRPERFLEKGRESIDVKGQHFELLPFGTGRRGCPGMLLAIQEVVSIIGTMVQCFDWKLADGSGNNVDMTERSGLTAPRAFDLVCRLYPRVDPATISGA

SEQ ID NO: 2797 - protein, 155 aa, Zea mays
  unsure (1)..(155): unsure at all Xaa locations
MAASDVEYRCFVGGLAWATDDHSLHNAFSTYGEVLESKIILDRETQRSRGFGFVTFSTEEAMRNAIEGMNGKELDGRNITVNEAQSRGGRGGGGGGYGGGRGGGGYGGGGRRDGGGGYGGGGGYGGGGGYXGGGGGYXGGNRGXGYGNSDGNWRN

SEQ ID NO: 2798 - protein, 365 aa, Triticum aestivum
  unsure (1)..(365): unsure at all Xaa locations
MTVDRKDAEAAAAAATPFEIPALQPGRTCGAEESTRSHVLVKPIXKKRPRRSRDGPNSVSETIRRWKEVNQQLEHDPQGAKRARKPPAKGSKKGCMQGKGGPENTQCGFRGVRQRTWGKWVAEIREPNRVSRLWLGTFPTAEDAARAYDEAARAMYGALARTNFPAHPAQAPAVAVPAAIEGVVRGASASCESTTTSTNHSDVASSLPRQAQAPEIYSQPDALESTESVVLESVEHYSHQDTVPDAXSSISRSTSXEEDVFEPLEPISSLPDGEADGFDIEELLRLMEADPIEVELVTGGSWNGGANTGVEMGQQEPLYLDGLDQGMLEGMLQSDYPYPMWISEDRAMHNSAFHDAEMSEFFEGL

SEQ ID NO: 2799 - protein, 164 aa, Cleisostoma racemiferum
IENKINRQVTFAKRRNGLLKKAYELSVLCDAEVALIIFSNRGKLYEFCSSTSMLKTLEKYQKCNFGSPESTIISRETQSSQQEYLKLKSRVEALQRSQRNLLGEDLGPLGSKELEQLERQLDSSLKQIRSTRTQFMLDQLADLQRREHMLCEANKALKRRFEES

SEQ ID NO: 2800 - protein, 374 aa, Hippocratea volubilis
ALSIAGAVQSQKLAVRAISQLQSLPGGDIKLLCDTAVESVRDLTGYDRVMVYKFHEDEHGEVVAESKRPDLEPYIGLHYPATDIPQASRFLFKQNRVRIIVDCHASPVNVIQDDGLMQPLCLVGSTLRAPHGCHAQYMENMGSIASLAMAVVINGNDEDGIGGRNPTRLWGLVVCHHTSARCIPFPLRYACEFLMQAFGLQLNMELQLAAQLLEKHVLKTQTLLCDMLLRESPTGIVTQSPSTMDLVKCDGAALYYQANYYPLGVTPTEAQIKDIVEWLLVFHGDSTGLSTDSLADAGYPGATLLGDAVCGMAVAYITNRDFLFWFRSHTAEEIKWGGAKHHPEDKDDGLRMHPRSSFKAFLEVVKSRSLPWEN

SEQ ID NO: 2801 - protein, 361 aa, Oryza sativa
MSCFACCGDEDTQGVPDNRNPYPGNHPARSDAYRTADPTPRGPQPVKVQPIAVPIIPVDEIREVTKNFGDEALIGEGSFGRVYFGVLRNGRSAAVKKLDSSKQPDQEFLAQVSMVSRLKHEHVVELLGYCVDGNLRVLAYEFATMGSLHDMLHGRKGVKGAQPGPVLSWAQRVKIAVGAAKGLEYLHEKAQPHIIHRDIKSSNVLLFDDDVAKIADFDLSNQAPDMAARLHSTRVLGTFGYHAPEYAMTGQLSSKSDVYSFGVVLLELLTGRKPVDHTLPRGQQSLVTWATPRLSEDKVRQCVDSRLGGDYPPKAVAKFAAVAALCVQYEADFRPNMSIVVKALQPLLNARATNPGENAGS

SEQ ID NO: 2802 - protein, 206 aa, Oryza sativa
  unsure (1)..(206): unsure at all Xaa locations
TARSSTAATPPPWRLGAARLSPLPPLPRVEAGGSACCRRSRSCQAAPKXXRCFVGGLDWATDDRSLEAALCTFGEMLESKIINDRETGRARGSGFVTFSSEQAMRDAIEGMNGKELDGRNITGNEAQSRRSGGGGGGGYGQRGGGGGYGGGGLYGGGXGGGARPGLAXREGGYGGGGGYGGGRGGGGYRGGYGRLGGGTXRGNWID

SEQ ID NO: 2803 - protein, 119 aa, Dioscorea tokoro
GGVMIGDGQSRFSINGKPIYHFVGTSTFSEYTVVHVGCVAKINPSAPLDKVCVLSCGISTGLGAALNVAKPVKGSSVAVFGLGAVGLAAAEGARIAGASRIIGVDINPKRFNAAKKFGV

SEQ ID NO: 2804 - protein, 365 aa, Hordeum vulgare
MWRCILLSAVVVALALAPAPALGVPFTEKDLASEESLRGLYERWRSHYTVSRRGLGADAEERRFNVFKENARYVHEGNKRDRPFRLALNKFADMTTDEFRRTYAGSRVRHHLSLSGGRRGDGGFRYADADNLPPAVDWRQKGAVTAIKDQGQCGSCWAFSTIVAVEGINKIRTGKLVSLSEQELMDCDNVNNQGCEGGLMDYAFQFIQKNGITTESNYPYQGEQGSCDQAKENAQAVTIDGYEDVPANDESALQKAVAGQPVSVAIDASGQDFQFYSEGVFTGECSTDLDHGVAAVGYGATRDGTKYWIVKNSWGEDWGEKGYIRMQRGVSQTEGLCGIAMQASYPTKSAPHASTVREGSHTDEL

SEQ ID NO: 2805 - protein, 286 aa, Schizosaccharomyces pombe
MASLAKNILQFRSKITGKLNTPDFRVYCYKNNKPISFFHDVPLTSDKDTFNMVTEIPRWTQAKCEISLTSPFHPIKQDLKNGKLRYVANSFPYHGFIWNYGALPQTWEDPNVIDSRTKMKGDGDPLDVCEIGGSIGYIGQIKQVKVLGALGLIDQGETDWKILAIDINDPRAKLLNDISDVQNLMPRLLPCTRDWFAIYKIPDGKPKNRFFFDGNYLPKSDALDIIAQCHQHWKVSRDRKQYIKNFHNESVNNVDLINKINSLKEEVSQNVSNYPSFPYFHTIPNL

SEQ ID NO: 2806 - protein, 236 aa, Glycine max; identical to SEQ ID NO: 1180

SEQ ID NO: 2807 - protein, 378 aa, Thermosynechococcus elongatus BP-1
MLIALILAAAIALCNGLSSAQLAASHPVSGGTYEYGYHYLSPPFGFTAGWMFLVAKSASAATAALGSVAYLYQWLGLEDSSGRWQVMAALGLLAVLTGVVLLGIRRSTQVNLGILLVTFTSLLLFVGIGHLQQRGGSPWLATSQPLSLKHLLQATALLFVAYAGYARIAVLAEEVKTPRQTIPRAIVLTIVIALLLYLSVAWVVLGSHHSGNLTTAASLAVVASRFGVPWLPPLMALGAIAALVGILLNLLLGLSRVVLAMARRRDLPPTLAQIPPQGKQPVAAILAVSGGIALLILLGNVQTTWSFSAFSVLIYYAITNLAALQLQEPQFPRWLAVAGLIGCLGLAFWVEVQVWVSGCGLLLLGLAWHYWMRRAKAL

SEQ ID NO: 2808 - protein, 247 aa, uncultured bacterium
MHIDLTGKKALVTGASRGLGRAIALSLAKAGADVVITYEKSAEKAQAVANEITALGRYGEAIQANSANAQAIQNAVNHTIQSLGGLDILVNNAGIARGGPLESLSLEDIDALINVNIRGVVVAIQAALPHLPEGGRIINIGSCLANRVAQPGIAVYAMTKSALNSLTRGLARDLGPRGITVNLVHPGPTDSDMNPADGEQADSQRQLIATGHYGTPEDVAAAVTFLASPAAGQISGTGLDVDGGLNA

SEQ ID NO: 2809 - protein, 151 aa, Photobacterium leiognathi
QDLTVKMTDLQTGKPVGTIELSQNKYGVVFIPELADLTPGEHGFHIHQNGSCASSEKDGKVVLGGAAGGHYDPEHTNKHGFPWTDDNHKGDLPALFVSANGLATNPVLAPRLTLKELKGHAIMIHAGGDNHSDMPKALGGGGARVACGVIQ

SEQ ID NO: 2810 - protein, 357 aa, Glycine max
MADASVAPPPPLKDELDIVIPTIRNLDFLEMWRPFFQPYHLIIVQDGDPSKTIKVPEGFDYELYNRNDINRILGPKANCISFKDSACRCFGYMVSKKKYIYTIDDDCFVATDPSGHKINALKQHIENLLCPSTPFFFNTLYEPFREGADFVRGYPFSLREGVPTAVSHGLWLNIPDYDAPTQLVKPLERNTRYVDAVLTIPKGTLFPMCGMNLAFDRDLIGAAMYFGLMGDGQPIGRYDDMWAGWCCKVICDHLGLGIKTGLPYIYHSKASNPFVNLRKEYKGIFWQEDIIPFFQSVVLPKEATTVQKCYIELAKQVKEKLSKVDPYFDKLADAMVTWIEAWDELNPEGASQANGKA

SEQ ID NO: 2811 - protein, 312 aa, Hordeum vulgare subsp. spontaneum
MATAGKVIKCKAAVAWEAGKPLSMEEVEVAPPQAMEVRVKILYTALCHTDVYFWEAKGQTPVFPRILGHEAGGIVESVGEGVTELVPGDHVLPVFTGECKECAHCMSEESNLCDLLRINVDRGVMISDGQPRFTIDGKPIFHFLGTSTFSEYTVIHVGCVAKIDPEAPLDKVCLLSCGISTGLGATLNVAKPKKGMAVAIFGLGAVGLAAMEGARLSGASRIIGVDLNPAKHEQAKKFGCTDFVNPKDHTKPVQEVIVEMTDGGVDRAVECTGNADAMISAFECVHDGWGVAVLVGVAHKEPVFKTHPMNFL

SEQ ID NO: 2812 - protein, 340 aa, Burkholderia fungorum
MQYKQLGKSGLRVSGLCLGMMSYGSSKWAPWVLDKSAGAAFVMQALEHGINFFDTADFYSYGASEEVLGEAINSVGRRHETVISTKVGLPMDQSTNGRGLSRKHIHESVNASLRRLKTDYIDLYTLHVPDSATPIEETVDALNDLVGAGKILYYGASNYMTWQLAHAHYTALSRSGRGFTSMQLQYNLLYREEERDMLPFCDLEGLGVMVYSPLARGWLVSGDGSASELTDREKTRATQDAKTKTLYGSNPDHAVRNRLLEIAGARGLPPGRIALAWLHSRPGVSSVIVGALETSHLDEAVASLEVRLTNEEIALLEEAYTPVSIKSDGLAAVLKQQKAR

SEQ ID NO: 2813 - protein, 375 aa, Triticum aestivum
MAQHSAGGGGGGGSQHMVQHNAGGGADGGMDIGMGVVAVSGDGKGDQGGEAGQDEQVKKKRGRPRKYKPDGSVTLGLSPSPSTPHSSSPGMGAMVTTPGSGFGPGTGSGGSGSGALTEKRGRGRPPGSGKMQQLASLGKWFLGSVGTGFTPHVIIISAGEDVAARIMSFSQQGPRAICIISATGAVSTATLHQDSDSGAVTYEGRFEILCLSGSYLVVEEGGTRTRSGGLCIALCGPDHRVIGGSVSGVLTAAGTVQVIVGSFMYGGGSKKNKGKADQDVENEEQNGGGGGREETPTLALPEHPHNMLPHPMSGWPPGLMNQMDPRASPMYGSSSKQQNKTQSGPEIGGPKTQPRWPAAVAKNPLTMAHPEDNHE

SEQ ID NO: 2814 - protein, 249 aa, Azoarcus sp. EbN1
MTQRLKDKLAVITGGANGIGRAIAERFAVEGADIAIADLVPAPEAEAAIRNLGRRVLTVKCDVSQPGDVEAFGKQVISTFGRCDILVNNAGIYPLIPFDELTFEQWKKTFEINVDSGFLMAKAFVPGMKRNGWGRIINLTSTTYWLKIEAYTHYISTKAANIGFTRALASDLGKDGITVNAIAPSLVRTATTEASALSAMFDVLPNMLQAIPRLQVPLDLTGAAAFLASDDASFITGQTLAVDGGMVRH

SEQ ID NO: 2815 - protein, 376 aa, Staphylococcus epidermidis ATCC 12228
MMSYLFNNYKRDNIEFVDANQNELIDKDNNVYLDFSSGIGVTNLGFNMEIYQAVYNQLNLIWHSPNLYLSSIQEEVAQKLIGQRDYLAFFCNSGTEANEAAIKLARKATGKSEIIAFKKSFHGRTYGAMSATGQKKITDQFGPVVPGFKFAIFNDFNSFKSLTSNNTAAVIIEIIQGESGVLPADPLFMKQLNEYCKQKDILIIVDEVQTGIGRTGKLYAHEHYQLSPDIITLAKGLGNGLPIGAMLGKKNLGHAFGYGSHGTTFGGNRLSLAAANQTLSIINDADLLNDVQSKGQFLIENLRKSLVNKRNVIEVRGVGLMVGIEVTNDPSQVVREAKRMGLIILTAGKNVIRLLPPLTITKKQLEKGIEILTEII

SEQ ID NO: 2816 - protein, 369 aa, Mesorhizobium loti
MTMTYYTLGNSGLRVSRLALGTMTFGKEWGWGADRDTARAMFDAYVEAGGNFFDTADLYTGGTAEAWLGEFIAERGLRDTAVIASKFTMNMQPGNPNAGGNGRKNILRAVDASLKRLGTDYIDLYLMHVWDRLTPAEEVMRTLDDLVRMGKVRHVGLSDVPAWYAGRAQAIAELRGYEPVSALQLEYSLAERAIENEFVPFGTRHGAGIMVWSPLASGLLSGKYRPAQAGNAGRLDGFRNSTHPGFQKFTERNWAIVAELEKVASELGRGMPQVAINWVATQPGIATVILGATTLAQIQDNLGALDFEIPATLRDRLDSVSRTPAPFPYSYFGPQIQARVTGGAATGDKPSGYASPVLVEGEPASVSTD

SEQ ID NO: 2817 - protein, 310 aa, Trichodesmium erythraeum IMS101
MRILIMGGTRFIGVYLTKILVEKGHEVVLFNRGNKPAPVSGIKEIYGDRTDINQLKEKLASEKFDAIFDNNGRKLSDTKPLAEIFKGQVKHFVYMSSAGVYLKSDQMPHIEGDTIDPKSRHLGKYETETELANQGLPWTSIRPTYIYGPQNYNDLEAWFFDRIVRDRPIPIPGNGLHITQLGHVKDLAMAMVNILGNDKAIGQIYNISGERFITFDGLARSCAEATGKSPDSIKLVHYDPKKFDFGKKKAFPLRMQHFFASINKAITELNWQPKYDLISGLKDSFENDFIASGRAQAEVDFSIDDEILKV

SEQ ID NO: 2818 - protein, 394 aa, Sagittaria sp. Mathews 383
PYEVPMTAAGALQSYKLAAKAISRLQSLPGGSMQKLCDTVVQEVFELTGYDRVMAYKFHEDDHGEVVSEVTKPGLDPYLGLHYPATDIPQAARFLFMKNKVRMICDCRAKPVKVYQDEKLAFDLTFCGSTLRAPHSCHLQYMENMDSIASLVMAVIVNEGDEEDEVLGSRAQQQQQQQQRRKRLWGLVVCHNRTPRFIPFPLRYACEFLMQVFAIHVNKEFELENQMREKNILRTQTLLCDMLFRDALLGIISQNPNIMDLVRCDGAALVYQSKIWRLGMAPTESQICDIAAWLSEYHMDSTGLSTDSLHDAGYPGVLALGDSVCGMAAARITSKDILFWFRSHTAAEIRWGGAKHDPADEDDGRRMHPRSSFKAFLEVVKTRSMPWKDYEMDA

SEQ ID NO: 2819 - protein, 403 aa, Novosphingobium aromaticivorans
MNRRMPMSITPLMPVYPRCGVRPVRGEHCHLISEDGTRYLDFASGIAVNLLGHSNEHLIGAIQKQAATLMHVSNLYGSPQGEHLAQRLVDLTFADTVFFTNSGAEAVECAIKTARAYHSSVGNDHKYELITFKNAFHGRTMATISASKQEKMHKGFLPLLEGFKYVDFDDLEGAKAAMGPNTAGFLVEPIQGEGGIRDASDEFLKGLRALCDEHDLVLIFDEVQCGVARTGTLYAYEQYGITPDVMATAKGIGGGFPIGACLATEKAARGMVAGTHGSTYGGNPLAMAAGEAVLDVVANEEFLGEVRAKGERLRGRIEQFIGNYPDLFIGVRGRGLMLGLMMKVEPRPFVAHMRDNHQLLTVSAGDNTVRVIPPLVIDDSHIDEFMERLSAAAASYAPEAPVT

SEQ ID NO: 2820 - protein, 522 aa, Candida tropicalis
MTVHDIIATYFTKWYVIVPLALIAYRVLDYFYGRYLMYKLGAKPFFQKQTDGCFGFKAPLELLKKKSDGTLIDFTLQRIHDLDRPDIPTFTFPVFSINLVNTLEPENIKAILATQFNDFSLGTRHSHFAPLLGDGIFTLDGAGWKHSRSMLRPQFAREQISHVKLLEPHVQVFFKHVRKAQGKTFDIQELFFRLTVDSATEFLFGESVESLRDESIGMSINALDFDGKAGFADAFNYSQNYLASRAVMQQLYWVLNGKKFKECNAKVHKFADYYVNKALDLTPEQLEKQDGYVFLYELVKQTRDKQVLRDQLLNIMVAGRDTTAGLLSFVFFELARNPEVTNKLREEIEDKFGLGENASVEDISFESLKSCEYLKAVLNETLRLYPSVPQNFRVATKNTTLPRGGGKDGLSPVLVRKGQTVIYGVYAAHRNPAVYGKDALEFRPERWFEPETKKLGWAFLPFNGGPRICLGQQFALTEASYVTVRLLQEFAHLSMDPDTEYPPKKMSHLTMSLFDGANIEMY

SEQ ID NO: 2821 - protein, 493 aa, Ralstonia metallidurans
MSHPHPHQHPVVEHDDLHRKLKARHLTMIALGGAIGTGLFVASGASIAQSGPGGALLAYCLIGLMVYCLMTSLGELAVHMPVAGSFVTYSALYVDEGFGFALGWNYWFSLAVTIAVELTAAQLVMQYWFPEVPGIYWSAGFLALMFALNAFSVKGFGEAEYWFAMIKVVTVVVFLCVGVLMILGILKGGPQSGWHNFTTGEAPFVGGLPGLFAVAMIAGFSFQGTETVGVAAGEAADPGRTIPRAIRQTFWRILLFYVVAILIIGVLIPYTDPNLLRNDVTDVGVSPFALVFQHAGLAFAAALMNAVVLTALLSAGTSSMYVSTRILYGLAVSQRAPRALAKLTPNGVPFNALLVTTGIGALCFFSSLFGDKAVYLWLLNTSAMTGFFAWLGIAVSHYRFRKGLLYQGYKVSDLAYRSPLYPFGPIFAGVLCLVIVGGQNYQAFTDIPGRWQEIVSTYIGVPVFLALWLGYRIVRGTRMIDYEDMPFELVKKD

SEQ ID NO: 2822 - protein, 372 aa, Kluyveromyces lactis
MAATSDIVEKTHILQKYLELDQRGAIIAEYVWIDSEGGLRSKGRTLNKKVTSVDSLPEWNFDGSSTGQAPGHDSDIYLKPVAFYPDPFRRGDNIVVLAECWNNDGTPNKFNHRHEAAKLFEAHKDAEMWFGLEQEYTLFDQYDQVYGWPKGGFPAPQGPYYCGVGAGKVFARDVIEAHYRACLYAGVNISGINAEVMPSQWEFQVGPCEGIAMADQLWIARYFLHRVAEEFGVKVSLHPKPLKGDWNGAGCHTNVSTKLMRAPGGMKYIEDAIEKLSKRHNEHIKLYGADNEQRLTGRHETASMSTFSSGVANRGASIRIPRSVNKEGYGYFEDRRPASNIDPYLVTGIMCETVCGAIENANMTKEYERESL

SEQ ID NO: 2823 - protein, 330 aa, Lactobacillus helveticus
MKVLVIGGAGYIGSHAVRELVKEGNDVLVLDALYTGHRKAVDPKAKFYQGDIEDTFLVSKILRDEKIDAVMHFAAYSLVPESVKKPLKYYDNNVTGMISLLQAMNDANVKYLVFSSSAATYGIPKKLPITEDTPLNPINPYGETKMMMEKIMAWADKADGIKYTALRYFNVAGASSDGSIGEDHAPETHLIPNILKSAISGDGKFTIFGDDYDTKDGTNVRDYVQVEDLIDAHILALKHMMKTNKSDVFNLGTAHGYSNLEILESAKKVTGIDIPYTMGPRRGGDPDSLVADSTKARTVLGWKPKHENVDDVIATAWKWHKSHPKGYEDK

SEQ ID NO: 2824 - protein, 173 aa, Zea mays
MTTATAGGSVADRIMPHLLNIYGSSATARDFEIYAPNATFEDPLMRAHGVKQIKSAFYTLPKVFGESKITEYTVQENPMGPGKTEVVIQNKQHYKVLGKPVDLTSLIRLQLQDGKVVKHEDWWHGKPLKNRDTVGVPLVGRLAEASRRGAMLLTHALMGFGKDPTQPPPPPTL

SEQ ID NO: 2825 - protein, 342 aa, Xylella fastidiosa 9a5c
MYRRWLYGCAGLWFLWRLPMTVLVTGAAGFIGAHVCRALAARNDTVVGLDNYNAYYDPQLKRDRVTALCPDVHIRTLDLTDRERCAALFNEVQPDQVVHLAAQAGVRYSIENPHAYVDSNLVGFLNVLELCRHCRVQHLVYASSSSVYGDSATPPFSEQQRVDQPRSLYGATKVANEVMAYSYAQLYGLRATGLRFFTVYGPWGRPDMAPLIFSRAVLEGRPIEVFNHGRMERDFTFINDIVAGVIGALDAPGEQAVPHRLFNLGNHTPVPLEHFINVIEQAAGRPADKHYKPMQLGDMMATMADIAAARAAFGFEPVTSIEIGMPQVVEWCRHYFDVRAAT

SEQ ID NO: 2826 - protein, 348 aa, Pseudomonas putida
MLAIRKTKAGPGGLSVDDVAAPKEAHSTDVLVKVEAAGICGTDLLIYKWGEFAKRMKLPTILGHEVSGVIEQVGSDVKGLRPGMRVSLESHLPCGTCYTCRRGWAHVCPKTRYPGVDFDGGFASFVVVPESVCWPVPCGIPPLQAAMMEPFGLAVHASLEGSGVSGLNVLVSGCGPIGLMNIAAAKALGASKVIAPDIHPLRLTAAAKMGADECINATEESVYKTVRSLLGERGVDVAIDYSGQAAALKELIQSITHGGELRLMGVPSHDILLNLEEWLFKGLIVRGLHGRRLYERWERSTSLLVTGRVDLSSLVSHRLPLSAAEDAFEMALNGQSLKILFEPNGSCI

SEQ ID NO: 2827 - protein, 328 aa, Streptomyces rochei
MRLLVTGAAGFIGSTYVRNVLAGAYGEAGEVRITALDKLTYAGNPANLAEVRGHPDLTFVQGDICDTELLADLVPGHDAVVNFAAESHVDRSIAGADDFVRTNVLGTQALLSAARAARVPRFVHISTDEVYGSIESGSWTEDCALLANSPYAASKAGADILARAYARTYGMDVSVTRCSNNYGPRQYPEKLIPLFVTNLLEGERVPLYGDGLNVRDWLHVDDHCRGVQLVLEKGRAGQAYNIGGGEELTNLELTRLLLAECGADPERIVHVPDRPGHDRRYCVDDSRIRELGYAPRVPFRDGLAHTVEWYRDNPQWWKPLRRTPAVAV

SEQ ID NO: 2828 - protein, 179 aa, Dendrobium grex Madame Thong-IN
LTLTKCCMQRGSHFRSRSGSQEARSGSSMSRCNSMDTKFCYYNNYNVNQPRHFCKNCQRYWTAGGSMRNVPVGAGRRKNKHTGSVYRHTVITPDSLASLQVDGPDLVDHKPLSPFKVNGTILKFGPDAPLCESMASILNLGEQNLSSQLDFTAGAENREETSCSSACKPVKKKDITQHN

SEQ ID NO: 2829 - protein, 250 aa, Zea mays
MAKNYPTVSAEYSEAVEKARRKLRALIAEKSCAPLMLRLAWHSAGTFDVSSRTGGPFGTMKHQSELAHGANAGLDIAVRLLEPIKEEFPILSYADFYQLAGVVAVEVTGGPEIPFHPGREDKPQPPPEGRLPDATKGSDHLRQVFGKQMGLSDQDIVALSGGHTLGRCHKERSGFEGAWTTNPLVFDNSYFKELLSGDKEGLLQLPSDKALLSDPVFRPLVEKYAVDEKAFFDDYKEAHLKLSELGFADA

SEQ ID NO: 2830 - protein, 462 aa, Corynebacterium glutamicum ATCC 13032
MSWTVDIPKEVLPDLPPLPEGMQQQFEDTISRDAKQQPTWDRAQAENVRKILESVPPIVVAPEVLELKQKLADVANGKAFLLQGGDCAETFESNTEPHIRANVKTLLQMAVVLTYGASTPVIKMARIAGQYAKPRSSDLDGNGLPNYRGDIVNGVEATPEARRHDPARMIRAYANASAAMNLVRALTSSGTADLYRLSEWNREFVANSPAGARYEALAREIDSGLRFMEACGVSDESLRAADIYCSHEALLVDYERSMLRLATDEEGNEELYDLSAHQLWIGERTRGMDDFHVNFASMISNPIGIKIGPGITPEEAVAYADKLDPNFEPGRLTIVARMGHDKVRSVLPGVIQAVEASGHKVIWQSDPMHGNTFTASNGYKTRHFDKVIDEVQGFFEVHRALGTHPGGIHIEFTGEDVTECLGGAEDITDVDLPGRYESACDPRLNTQQSLELAFLVAEMLRN

SEQ ID NO: 2831 - protein, 170 aa, Forsythia x intermedia
ALAAGSNVTLLADQIKRFHPQLVAVRNESLVDELKEALADMKDKPEIIPGEQGTIEVARHPDAVTVVTGIVGCAGLKPTVAAIEAGKDIALANKETLIAGGPFVLPLAHKHKVKILPADSEHSAIFQCIQGLPEGALRRIILTASGGAFRDWPVDKLKEVKVADALKHPT

SEQ ID NO: 2832 - protein, 215 aa, Glycine max
MARDRNSRIGISVVMLLCFAAHFYVLPLAEAVWLTLPTSGTKCLSEEIQSNVVVLADYYVVTQEGGLQTLSVKVTSPYGNNLHHNENATQGQFAFTTAESGNYVACFWMDGKHQEEATVSLDWKTGIYAKDWESVAKKEKIEGVELELRKLEGAVEAIHGYLVYLKDKEARMREVSERTNGRVAWFSIMSLSVCILVSVLQVWYLKRFFLKKKLI

SEQ ID NO: 2833 - protein, 591 aa, Neurospora crassa
MSRVSVGGQKWQSKKISKHSAVLIPGDRRLSSCTGGIERRPIAHNTPIPAHPVTQSPINPESSYDNITAKMANVNYLLFESAVGFSLFEVVHQADTVGLELPEVKDAMKDLDKFGKMVKLRSFNPWNSAAHGLEAINLISEGIMPDHLKNTLELNLPQTSGKKSKIVLGVVDKRLAGEISGNFPGIQCEAADTSEVVAALLRGIRTHAGKLLKGLQDGDINRAQLGLGHAYSRAKVKFSVHKNDNHIIQGIATLDALDKGINSGAMRVREWYGWHFPELIRIVSDNGTYAKVVLAVGNKKSLSDESLDELANVLNQDEDKAKAIIQAAKVSMGQDISDMDLNMVKDLADNVSKMADYRRILAESLDKKMGEVAPNLQVILGTPVAARLISHAGSLTNLAKYPASTLQILGAEKALFRALKTKGATPKYGLLYQSTFIGRAGPKVKGRISRYLANKCSIASRIDNFSENPTKRFGEVMREQLEQRLEWYAKGIKPMKNTEAMDKAIKLVMDDEGDMDIDTEMVDSHTATHAADSKKDKKEKKDKKKDKEEKKEKKDKKDKKRKATSEDVEMVDAPDAAEPEKKKKKKKSKSE

SEQ ID NO: 2834 - protein, 263 aa, Arabidopsis thaliana
METLHPFSHLPISDHRFVVQEMVSLHSSSSGSWTKEENKMFERALAIYAEDSPDRWFKVASMIPGKTVFDVMKQYSKLEEDVFDIEAGRVPIPGYPAASSPLGFDTDMCRKRPSGARGSDQDRKKGVPWTEEEHRRFLLGLLKYGKGDWRNISRNFVVSKTPTQVASHAQKYYQRQLSGAKDKRRPSIHDITTGNLLNANLNRSFSDHRDILPDLGFIDKDDTEEGVIFMGQNLSSENLFSPSPTSFEAAINFAGENVFSAGA

SEQ ID NO: 2835 - protein, 139 aa, Tolypothrix sp. PCC 7601
LYKFDDDGHGSVIAEEKLDSMEPYLGLHYPESDIPKPARKLFASNFIRLIPDAHAEPVQILPINHPQSQQPIDLTNSILRTAANCHLEYLHNMGVGASLTISLIKDGKLWGLIACHHQTPKYVSYEFRKACEFLGRVIF

SEQ ID NO: 2836 - protein, 334 aa, Lactobacillus plantarum WCFS1
MAVLVLGGAGYIGSHAVDRLVAKGYDVAVVDNLVTGHRAAVNEHARFYEGDVRDTAFMNTVFDQENVEGVIHFAAFSVVPESMKDPLKYFDNNTAGMVKLLKVMAKHDVKKIVFSSTAATYGEPKQVPIKESDPQVPTNPYGESKLAMEKIMHWSDVAYGIKFVALRYFNVAGAKPDGSIGEDHAPETHLVPIILQVAAGERDQLQIFGDDYPTPDGTNVRDYVHVVDLADAHILALEYLKQGHDSDAFNLGSSTGFSNKQMLDAAREVTGKPIPAVMAPRRAGDPSTLVAASDKARTVLGWTPQYDDVKEIIKTAWTWKESHPAGYDDRGGQA

SEQ ID NO: 2837 - protein, 414 aa, Rhodospirillum rubrum
  unsure (1)..(414): unsure at all Xaa locations
MGSIFSRSTTRPCRAGPNGCASRQPRFIPMRTRTPLSRRSSRSVRIPALAXXXXXXXXXXXXXXXXXXPHLVGALERQGRKLWHLSNVYRISEAERLAERLTAACFADVAFFANSGAEANECAIKIARRHHDAHGRPERWRIITFDGAFHGRTLATMAAGGNRKYLDGFGPAVDGFDQCPLEDIEAVRARVGPRTAALMIEPIQGESGIRPVSHGFLRQLRELCDERGLLLIFDEIQCGMARTGHLFAHQEAGVVPDIMSLAKGLGGGFPIGACLATRGAAFGMRPGAHGSTFGGNPLAGAVANAVLDIVMDDGVLAEIRRKSALLRGLLEELAGRYPDLLVEVRGRGLMLGLKTTRPSPEIVEALRARAKVLTIAAGDTVTRVLPPLIVTDKDIRLFAERCDETFAGLSRPAA

SEQ ID NO: 2838 - protein, 273 aa, Pseudomonas syringae pv. tomato str. DC3000
MSVQQRNNVNIMGDGPATLIFAHGFGCDQHMWRFMAPHFAERFKVVLFDLVGSGNSDVSAWYPHKYASLKGYATDLLELADEFAGTGPVVHIGHSVSCMIAVLAELQSPSRFDSHIMVGPSPHYLNDGDYLGGFTRADVDSLLETLESNYLGWASTMAPTLMGAGDRPELSEELASSFCRTNAEIAKQFARVTFLSDHRADVARFNSRTLILQSSDDLVVPVQVGEYLHHVIADSALHMIDNVGHYPHMSAPQECITAMNLFLAPYESPDHAA

SEQ ID NO: 2839 - protein, 348 aa, Pseudomonas putida
MLAIRKTKAGPGGLSVDDVAAPKEAHSTDVLVKVEAAGICGTDLLIYKWGEFAKRMKLPTILGHEVSGVIEQVGSDVKGLRPGMRVSLESHLPCGTCYTCRRGWAHVCPNTRYPGVDFDGGFASFVVVPESVCWPVPCGIPPLQAAMMEPFGLAVHASLEGSGVSGLNVLVSGCGPIGLMNIAAAKALGASKVIATDIHPLRLTAAAKMGADECINATEESVYKTVRSLLGERGVDVAIDYSGQAAALKELIQSITHGGELRLMGVPSHDILLNLEEWLFKGLIVRGLHGRRLFETWERSTSLLVTGRVDLSSLVSHRLPLSAAEDAFEMALNGESLKILFEPNGTCI

SEQ ID NO: 2840 - protein, 294 aa, Rhizobium sp. USDA 2061
RGKTQIKEFDAFPTLEQLPLWGFDGSSTQQAEGRSSDCVLKPVAVYPDPVRTNGALVMCEVMMPDGKTPHPSNTRATVLDDESAWFGFEQEYFFYKNGRPLGFPEQGYPAPQGPYYTGVGYKNVGDIARRIVEEHLDICLAAGINHEGINAEVAKGQWEFQVFGKGSKKAADEVWLARYLLLRLTEKYGIDVEFHCKPLGDTDWNGSGMHANFSTAYMREVGGKDYFEALMAAFEKNLHDHINVYGPDNHLRLTGKHETAPWDKFSYGVADRGASIRVPHSFVNNGYRGYVEDR

SEQ ID NO: 2841 - protein, 276 aa, Mesorhizobium mediterraneum
WGFDGSSTMQAEGHSSDCVLKPVAIYPDPARTNGVLVMCEVMMPDGVTPHASNKRATILDDEGAWFGFEQEYFFYKDGRPLGFPESGYPAPQGPYYAGVGYSNVGSVARQIVEEHLDLCLAAGINHEGINAEVAKGQWEFQIFGKGSKKAADQMWMARYLMQRLTEKYGIDIEYHCKPLGDTDWNGSGMHANFSTAHMREVGGKAYFEALMAAFDKNLMDHIAVYGPDNDKRLTGKHETAPWNRFSYGIADRGASIRVPHSFINNGYKGYLEDRRP

SEQ ID NO: 2842 - protein, 339 aa, Neisseria meningitidis serogroup C
MKKILVTGGTGFIGSHTVVSLLKSGHQVVILDNLCNSSINILPRLKTITGQEIPFYQGDIRDREILRRIFAENRIDSVIHFAGLKAVGESVAEPMKYYDNNVSGSLVLAEEMARAGVFKIVFSSSATVYGDPGKVPYTEDMQPGDTTSPYGTSKSMVERILSDIQKADPRWSVILLRYFNPIGAHESGLIGEQPNGIPNNLLPYICQVAAGKLPQLAVFGGDYPTPDGTGMRDYIHVMDLAEGHVAAMQAKSNVAGTHLLNLGSGRASSVLEIIRAFEAASGLTIPYEVKPRRAGDLACFYADPSYAKAQIGWQTQRDLTQMMEDSWRWVSNNPNGYDD

SEQ ID NO: 2843 - protein, 153 aa, Glycine max
MATCFAPFSVSGGSHELWLTKRVGPKLTVQRRSNLVIKRNHTSSISAEYRDNRGGGGGDFVAGFLLGGAVFGTLAYIFAPQIRRSLLNEDEYGFRKAKRPIYYDEGLERTRQTLNEKIGQLNSAIDNVSSRLRGGNNVPAAKIESDPEVEATM

SEQ ID NO: 2844 - protein, 310 aa, Zea mays
MGSEQKKPAYIKYLFGGLSGMGATLFVQPLDLVKNRMQLSGAGGGKKEYKNTFDALSKILRTEGITGIYKGLGAGFLRQATYTTTRLGVYTGLNDSYKIKFGGSPNLLASMLMGVIAGASGAFVGTPAEVALIRMTADGRLPLNERRNYASVFNALTRITREEGVLTLWRGCIPTMGRAMVVNAAQLASYSQAKQYLIRSGYFTEGIKLHFVASMMSGFITTVASMPVDIAKTRLQNMKVSADGKAEYRGTVDVLSRVIRQEGLFALWKGFTPYFCRLGPHTVLTFIFLEQMNSMYNKFVLGDSGSGSGL

SEQ ID NO: 2845 - protein, 806 aa, Caulobacter crescentus CB15
MNTTLTRRLFGASLAALSAAALPSLAQAAGQAPKTSGGKPLYKDPTQPVDARIQDLLSRMTLEEKAAQLIGIWLTKAKIQTPEGEFSAEQASKNFPHGLGQISRPSDRKGAKPVTVIGAAAGADDGAINRNAAETARYTNAAQKWAIEKTRLGIPLLMHDEALHGYVARDATSFPQSIALASTFDTELTEKIFAVAAREMRARGSNLALAPVVDVARDPRWGRIEETYGEDPHLCAEIGLASIRGFQGATLPLAKDKVFVTLKHMTGHGQPENGTNVGPAQIAERTLRENFFPPFERAVTELPVRAVMPSYNEIDGVPSHANRWLLTKILREEWGYKGSIQSDYFAIKEMISRHKLTSDLGETAVMAMRAGVDVELPDGEAYALIPELVKAGRIPQFEVDAAVARVLEMKFQAGLFENPYCDEKTADAKTATPDAVALAREAARKSVVLLKNDKGLLPLDGKKFKRMALLGTHAKDTPIGGYSDIPRHVVSIHEGLTAEAKAQGFALDYAEAVRITEQRIWAQDAVNFTDPAVNAKLIAEAVEVAKKADIVVMVLGDNEQTSREAWADHHLGDRDSLDLMGQQNDLARAIFDLGKPTVVFLLNGRPLSINLLKERADAIIEGWYLGQETGHAAADVLFGRANPGGKLPVSIARDVGQLPVYYNRKPTARRGYLDGETTPLYPFGFGLSYTTFDVSAPRLAKAKIGQGETVKVEVDVTNTGKVAGDEVVQLYVHDEAASVTRPVLELKHFKRVTLAPGAKTTVTFEIKPSDLWMWNLDMKRVVEPGDFSILVGPNSVDLKKTTLTVA

SEQ ID NO: 2846 - protein, 253 aa, Pseudomonas aeruginosa PAO1
MHTHSPIPRTALVTGGSSGIGLAIARRLRQQGYRIALVARDSQRLQRAAAELGGVPWMAADLSRREAVEAVAAWVGDTFQGLDVLVNNAGFTRKIAATTPLAEAEREWDALLDGNLKSAFLMSLAVLPHFAEEGGRIIHIGSIAAQTGSGSPGALGYAAAKAGLHGFGVALARELGSRGITVNSVAPGYIADTRFFPGGLDPQRVAAIVGETPLGRTGRVEDIAAAVAWLASPEAGFVTGTVVSVNGGWRVGN

SEQ ID NO: 2847 - protein, 399 aa, Caulobacter crescentus CB15
MGALTSPRKVVVLGSTGSIGLSTLSLFEESGAPVQILALTAGRNVERLIEQARRWKPSLAVIEDESRLDDLRAGLAGTGVEAAAGADAVRDAAAMGADWVMSAIVGAAGLAPTVAAARTGAVIALANKESLVCAGPALLAIAKAAGGSVIPVDSEHSAIFQVLQSECAHRVSRLILTASGGPFRTWDKAAMARATPEQAIAHPNWSMGAKISVDSATMMNKGLEMIEASYLFATPEDRVDVVIHPQSVIHSLVEYVDGSTLAQLGPPDMRAPIACAFAWPDRLPWPAPRLDLAAYGQLTFESPDVERFPAIGIAREALRLGGGAPAAMNAANEVAVAAFLDRRIGFLDIAGAVAGTLERMNSLGDLSVAESDAVETAMLIDGSARRIAAEVVAQKRQRA

SEQ ID NO: 2848 - protein, 394 aa, Anomochloa marantoidea
EPARTEDPALSIAGAVQSQKLAVRAISRLQALPGGDVKLLCDTVVEHVRELTGYDRVMVYKFHDDEHGEVVAESRRADLEPYLGLHYPATDIPQASRFLFRQNRVRMIADCHAAPVRVIQNPSLTQPLCLVGSTLRAPHECHAQYMANMGSIASLAMAVIISSSGDDENNVGRCGISSTMKLWGLVVCHHTSPRCIPFPLRYACEFLMQAFGLQLNMELQLAHQLSEKHILRTQTLLCDMLLRDSPTGIATQSPSIMDLVKCDGAALYYHGKYYPLGVTPTESQIKDIIEWLGMCHGDSTGLSTDSLADAGYPGAASLGDAVSGMAVAYITPNDYLFWFRSHTAKEIKWGGAKHHPDDKDDGQRMHPRSSFKAFLEVVKSRSLPWENAEMDAIH

SEQ ID NO: 2849 - protein, 341 aa, Sinorhizobium meliloti
MKAAVLVEPRRFEVREVGIPEIGPADVLIRVTRAGICGTDLHIFNGHYAADRLPIVPGHEFCGTIAEIGASVTHLKTGMRVVADINIGCGNCYWCRRNEVLNCGEVEQIGIGRDGAFAQYVALPGRLVLPVPDGVPEAVLALVEPVACVVRAARKAGAAFGRSGVVLGAGPIGNLHVQMMRLVGMAPIIVADLSSERCRMAVEAGADAAVSEPATLRSKVLEMTGGRGADFVVESVGSSKLYRQAFDLVRKGGHVAFFGITPPGETIPIEILRTVLEENSLKGSVAGMGEDMHDALTLLSHGRFRTAAFTAAHYPLERIQEAFETIPARTGHLKTQILLDA

SEQ ID NO: 2850 - protein, 232 aa, Oryza sativa
MKKIFGAKKSKDPPPSIQDATERINKRGESVDDKIKKLDEELGRYKEQIRKTRPGPSQDAIKARAIRLLKHKRMYEEQRNMLYNQTYNLDQVAFAADGLKDAQQTMNAMKAANKELKGMMKTVKIEDIDNMQDEMTDLMDVSNEIQESLGRSYNIPDDVDEEELMGELDALEADMEFESSAVPSYLQPDKESDFDAELNLPAAPTAPAAVPVSRQQVDELGLPAVPRASIRS

SEQ ID NO: 2851 - protein, 505 aa, Oryza sativa (japonica cultivar-group)
MDPAPQAHPILSYVLSRLPTLAKARPAGGGGDFDIEQPPVHTPSPRTPSTAGEFELVERMPGLRHPSVLRAMTRAVADVSAARSALQVLGPRPDHELVDSSRAIVAATDAEAGGSRRVPEGDLEACRAVVRLEETHDAYEALLQEAEGRLEAVYRSAMEGKDLEEPDGRDESAAAAAGDDAAVQEEVIAVLRQAEEGKPVESVRLVDRQLRHLPEAFGRIQGLRVLDVSRNQLEVIPDAIGGLDHLEELRLASNALISLPDSIGLLLNLRILNVGSNRLRSLPDSISKCRSLIELDASYNGLAYLPTNIGYELVNLRKLWVHMNKLRSLPSSICEMRSLYLLDAHFNELCGLPSAIGKLSSLEILNLSSNFSDLKDLPASFGDLLNLRELDLSNNQIHALPDNFGRLDKLEKLNLEQNPLSMPPMEIVNKGVDAVKEYMLQRWLDILLEEERKSIAAAESPQAPTTPSAWLARSVSWVSDVSGSLVGYLSGENKTEKDAYLDQQY

SEQ ID NO: 2852 - protein, 215 aa, Cucumis sativus
EIKRIENTTNRQVTFCKRRNGLLKKAYELSVLCDAEVALIVFSSRGRLYEYANNSVKATIDRYKKASSDSSNTGSTSEANTQFYQQEAAKLRVQIGNLQNPNRNMLGESLSSLTAKDLKGLETKLEKGISRIRSKKNELLFAEIEYMRKREIDLHNNNQMLRAKIAESERNVNMMGGEFELMQSHPYDPRDFFQVNGLQHNHQYPRQDNMALQLV

SEQ ID NO: 2853 - protein, 409 aa, Yersinia pestis KIM
MGSVMTDKLAVNRNTFDQVILPVYAPAQFIPVKGKGSRVWDQQGTEYIDFAGGIAVTALGHCHPALVSALHQQGETLWHTSNVFTNEPALRLAQKLIAATFADRVFFANSGAEANEAAFKLARHYAIERHSPYKTKIIAFHNAFHGRTLFTVSVGGQPKYSDGFGPKPADIIHVPFNDLAAVKAVMDDHTCAVVLEPIQGEGGITSATPEFLQGVRALCDQHNALLVFDEVQSGMGRSGKLFSYMHYGVTPDILTTAKALGGGFPISAMLTTEEIASVMTVGTHGTTYGGNPLACAVAEAALDVINTPEVLNGIEQRHGLFVQALQSINSKYDVFSDIRGMGLLIGAELTAKYRGQAREFLAAAAANGLMILNAGPDVLRLAPSLVIELEDIQQGMARLEKAMASVIKG

SEQ ID NO: 2854 - protein, 250 aa, Brucella suis 1330
MELLKEKLVLVTGAGRGLGAAISSGAAEQGARVILVDIDGTAAKAQADALTAKGFVAEGHALDVTDRDAVAALADDILSRFGGLDVLVNNAGVAGRAAFDQPEAVEVWDRVIGVNLEGAFNVSHALVPALKAAKGNVVHLCSVAGFVSGGSTAGYVVSKGAIRSLTQVMARDLAPHGIRVNAVAPGIMMSEMAVAQLNRPGGTDWFMNRVMMKRIGETSEVVDPVVFLASPMASYITGTILPVDGGFLAA

SEQ ID NO: 2855 - protein, 96 aa, Zea diploperennis
MRRRACCEKEGVKRGAWTTKEDDALAAYVKAHGEGKWREVPQKAGLRRCGKSCRLRWLNYLRPNIRRGNISYDEEDLIIRLHKLLGNRWSLIAGRL

SEQ ID NO: 2856 - protein, 390 aa, Dichomitus squalens
MAFKLWSMLPLVALATVAVAAPSRQTVCSDGTVVPDSVCCEFVPLAQALQKEVLMGDCGEDAHELLRLTFHDAIAISRSKGPSAGGGADGSMLIFPTVEPAFFANLGIADSVNNLIPFLSQFPKISAGDLVQFAGAVAVGNCPGAPQLEFRAGRPNATAPAIEGLIPEPQNNITEILERFDDAGGFSPFEVVSLLASHTVARADHVDPTLDAAPFDSTPFTFDTQIFLEVLLKGVGFPGTGNNTGEVSSPLPVSSGTDVGELRLQSDFGLAHDERTACFWQGFVNEQEFMAQSFKAAMAKLAVLGHNADDLVDCSAVVPKPKPATGKPASFPATKGPKDLELSCTSKKFPTLTTDHGAQETLIPHCSNGSMNCTTVQFDGPATNFDGDDS

SEQ ID NO: 2857 - protein, 335 aa, Bacteroides thetaiotaomicron VPI-5482
MDYPLNNQPATDRYDRMQYKYCGKSGLQLPLISLGLWHNFGSVDNFSVATDMIKYAFDHGITHFDLANNYGPVPGSAETNFGRILKENFQGYRDEMIISSKAGHDMWAGPYGGNSSRKNLMASIDQSLRRTGLEYFDIFYSHRYDGVTPVEETIQTLIDIVKQGKALYIGISKYPPLQARIAYEMMAKAGVPCLISQYRYSMFDRAVEAESLPLAAEYGSGFIAFSPLAQGLLTDKYLNGIPEGSRAARPSTFLQRSQVTPEKVEAARQLNEIARHRGQTLAEMALAWVLRDERMTSVIVGASSVNQLADNLQALNQLEFTAEELNGIERILCKV

SEQ ID NO: 2858 - protein, 233 aa, Oryza sativa (japonica cultivar-group)
MDHNLLAQHSLQTQKVLVQLASQLGLERRKPERRRRPRRRRRGRGEEPVAAAVVEMEGEDAVVPEAVAADAEKAEEKESGSRMITLKSNEGKAFVVTEVSARQSTTIGHMIDDDCTREAVPLPNVDSKTLEKVIEYFDEHANNKADTDDEKAALDKFDKDFIGELDGDKAFLFHVTMAANYLHAQGLLDLTTQCIADTIKGKTPEEIRTAFNIAYDLTEEDQEEIKEEDAWAF

SEQ ID NO: 2859 - protein, 117 aa, Buchnera aphidicola
NLFGDIVSDECAIITGSIGMLPSASLNEKKFGLYEPAGGSAPDIEGKNIANPIAQILSVSMLVRYGMNLKKIADKIDQSVISVLKKGYRTADISNNNNYLKTNEMGDVIANTLISGE

SEQ ID NO: 2860 - protein, 217 aa, Pimpinella brachycarpa
MVRGKTQMRRIENATSRQVTFSKRRNGLLKKAFELSVLCDAEVALIIFSPRGKLHEFASSSMHETIERYRKHTKDVQSNNTPVVQNMQHLKHETASLAKKIELLEVSKRKLLGEGLGTCSINELQQIEQQLEKSVCTVRARKMQVFKEQIEQLKEKEKTLAADNAILLAKYDVQPRQESPEDGGNLTSTTENSENSDVETELFIGPPEKRFKRIMEK

SEQ ID NO: 2861 - protein, 305 aa, Shigella flexneri 2a str. 301
MQYNPLGKTDLRVSRLCLGCMTFGEPDRGNHAWTLPEESSRPIIKRALEGGINFFDTANSYSDGSSEEIVGRALRDFARREDVVVATKVFHRVGDLPEGLSRAQILRSINDSLRRLGMDYVDILQIHRWDYNTPIEETLEALNDVVKAGKARYIGASSMHASQFAQALELQKQHCWAQFVSMQDHYNLIYREEEREMLPLCYQEGVAVIPWSPLARGRLTRPWGETTARLVSDEVGKNLYKESDENDAQIAERLTGVSEELGATRAQVALAWLLSKPGIAAPIIGTSREEQLDELLNAVDITLKP

SEQ ID NO: 2862 - protein, 328 aa, Podospora anserina
MVCALFLNRIGVEDLLIAGIGLFLGSGRSLASAGPGGAVLCYILMGTVQNYHLFCVICPDLLTVTSHRVKMTALMSVNAPVMEFPRRFMSRGVGFAVGWVYWFAYAVLAGEQLVAVSNAINSRWVRGLIMPCGYPCFRPMLMLPFKVFGELEYIFGCFKLMFIILLIMVGHSIEGSLGTLLGVWTTFTSVMSSYIGMDIVAATAAESRALSDVESMKMAARKINLRVITLYSLAMLPASFVVPMDHPFINGHSTSVGARSIFIIAVVEAGMPKVAHFFNAVFVFSAFTCGINSMYIATRVLHTLALRGQTGPEFITRRLRQCRSGVPS

SEQ ID NO: 2863 - protein, 392 aa, Peixotoa glabra
DLEPVNPSDVPVTAAGALKSYKLAAKAISRLQSLPSGNISLLCDVLVKEVRDLTGYDRVMVYKFHEDEHGEVVSECRRSDLESYLGLHYPATDIPQASRFLFMKNKVRMICDCLAPPVQVIQDERLPQPLSLCGSTLRSPHGCHAQYMTNMGTIASLVKSVTVNEDDDTMDGDQQQMTRKLWGLVVCHHTSPRFVPFPLRYACEFLIQVFGVQINKEVELAAQVREKHILQIQTMLCDMLLRDAPVAIITQSPNVMDLVKCDGAALYFKNKTWLLGVTPTEEQIRDIAEWLLKYHSGNTGLSTDSLMEAGYPGASTLGDAVCGMAAVSITSRDFLFWFRSHTAKEIKWGGAKHDPDDKDDLRKMHPRSSFKAFLEVVKWRSMPWEDVEMDAI

SEQ ID NO: 2864 - protein, 170 aa, Glycine max
  unsure (1)..(170): unsure at all Xaa locations
MASADVEFRCFVGGLAWVTGNDALEKAFSIYGDIVESKVINDRETGRSRGFGFVTFASEQSMKDAIAGMNGQDLDGRNITVNEAQTRASRGGGXXGGFGSGGGYNRGSGGYGGGGGGGGYGGRREGGYNRNGGGGGGGYGGGRDRGYGGDGGSRYSRGGEGGGSDGNWRN

SEQ ID NO: 2865 - protein, 179 aa, Bacillus cereus ATCC 14579
MKKRLFFSCCLLFLMAGCDQGKPKEIEVKLHNASGDEVGTAKVVQQTSGVKITIKGEGFTPGPHGLHVHEIGECKAPRFESSGNHFNPDDKKHGLLNPKGAENGDLPNVVADGSGKIKAEIDAPHITLEEGKTTIHRKDGASIIITENPDDGMTQPTGKSGDRIACGVIVKKASDMKKK

SEQ ID NO: 2866 - protein, 338 aa, Nostoc punctiforme
MKKKILVTGGAGYIGSHVVRQLGEAGYDVVVYDNCSTSSPASVLHGKLIIGDLVDTGHLYQVFAQHEFSAVLHFAASLIVPESVAHPLDYYANNTRNTLNLLRCCSVMGVNKFIFSSTAAVYGEVEENPVTELNPTQPINPYGRSKLMSEWLIQDYAAASSMRYVILRYFNVAGSEPRGLLGQMSPNATHLIRAACDAALKRKPEVRIFGTDFPTPDGTAIRDYIHVEDLATAHLDALDYLEKRGESQIFNCGYGQGYSVRQVIERVKAISGVDFPVIAAPRRPGDPACVEACADKIRRVLGWQPKHNDLDEIIDTTITWEKHKSNLARQKHLNMAYA

SEQ ID NO: 2867 - protein, 120 aa, Lycopersicon esculentum
DLKPENVLVRDEGHIMLSDFDLSLRCSVNPTLVKSSSVHGGGGGGNPSSGSGILDNDNAVQGCIQPSTFFPRNILPTKKNRKSKSDFGLFVGGSLPELMAEPTNVRSMSFVGTHEELAPE

SEQ ID NO: 2868 - protein, 753 aa, Clostridium thermocellum ATCC 27405
  unsure (1)..(753): unsure at all Xaa locations
MKGKMKVCVLTGKEKLEWVERDIPQPGRGELQIKLKHVGVCGSDLHFYKEGRLANWELDGPLALGHEPGGIVSAIGEGVEGFEIGDKVALEPGVPCGECEDCRKGHYNLCKHIKFMAIPHEKDGVFAEYCVHSASMCYKLPENVDTMEGGLMEPLSVALHATELSNAKIGETAIVLGSGCIGLCTVMALKARGVSEIYVTDVVDKRLEKALEVGATRVFNSQREDIVEFAKTLPGGGADQVYECAGSRVTTLQTCKLIKRAGKVTLVGVSPEPVLELDIATLNAMEGTVYSVYRYRNMYPIAXXXXXXXXXXXXXXXXXXXXXXXXXXXXXXXXXXXXXXXXXXXXXXXXXXXXXXXXXXXXXXXXXXXXXXXXXXXXXXXXXXXXXXXXXXXXXXXXXXXXXXXXXXXXXXXXXXXXXXXXXXXXXXXXXXXXXXXXXXXXXXXXXXXXXXXXXXXXXXXXXXXXXXXXXXXXXXXXXXXXXXXXXXXXXXXXXXXXXXXXXXXXXXXXXXXXXXXXXXXXXXXXXXXXXXXXXXXXXXXXXXXXXXXXXXXXXXXXXXXXXXXXXXXXXXXXXXXXXXXXXXXXXXXXXXXXXAGTIGALAHEERLRGFKDTIAKYPDIEIVDEQRDNDEVEKAISITESWLQAYPNLGGILCNNMSNPVGACQAVADAGKSGKIVIGGMDHDLRALNALKDGTLYVAQVQNCYDMGYKLIYNAIKTIDGEKVEESTAVGSTSVYAQDADKFINMLYGEAN

SEQ ID NO: 2869 - protein, 517 aa, Zea mays
GFADREESGKKRGERRGRHLGFPRAAPPAWPPPASSKAPATSDSDSEGLAESLRALCARMDSAAFLGFVVARRKEADALRAEMPPALKLCVDPAKFVMDAVADVFPVDRREVRNPADLAWACVLILEAAVPALADTDPDIGPARPLVPRAARDRARGMARDWKEAAEKKGGVEGAKPPDAHAFLQLVATFAVAEREDRPLYRRIVVSFSWRRQMPRLALTLGLEEQMADIIEELIAKRQQLDAVNFAYEAGLQEKFPPVPLLKSYLEDSKKTSTAASDNSSTSSGQSGSNVNKKEQSALRAVIKCVEDRKLEAEFPLEGLRKQLEELEKAKTEKKKAASSATSGGSSGPATKRIRASTGGPMPPAKAGRLTNNACVSSLPAPTTLTQSPSHASYANTSPSRTSYANTSPSHASYATVSPSHASYATPSPPHASYATASPYPYDRPVGHGVYCTRSPPVIREPYVYPAEEVATVNVGIPMAYSTPPMSYPAAPYGGYGNGMPAYTNGMAPAFHQAYYR

SEQ ID NO: 2870 - protein, 172 aa, Escherichia coli
MSKKIAVLITDEFEDSEFTSPADEFRKAGHEVITIEKQAGKTVKGKKGEASVTIDKSIDEVTPAEFDALLLPGGHSPDYLRGDNRFVTFTRDFVNSGKPVFAICHGPQLLISADVIRGRKLTAVKPIIIDVKNAGAEFYDQEVVVDKDQLVTSRTPDDLPAFNREALRLLGA

SEQ ID NO: 2871 - protein, 170 aa, Oceanobacillus iheyensis HTE831
MSKHIAVLVTDMVEEIELTDPVKAYKEAGHTVDIISNEGNKTINGKNGDKIEADKGINDVDPSAYDALLVPGGFSPDLLRIDPKNGEFAKAFMKDNKPVFAICHGPQFLVETDLLKGKTLTSFVSVRKDLENAGATVKDEEVVVDGNLVTSRTPDDLPAFNRESLKLLEK

SEQ ID NO: 2872 - protein, 366 aa, Burkholderia fungorum
MSFARVRKARAVSAFVHAVRIIRRSSRQPMETIAMSQINRQLVLASRPQGAVTPDNFRLVEAPLAPLADGELRVRNHYLSLDPYMRGRMNDSKSYAPPQPLNEVMIGGTVGEVVESKNPKFAVGDKVVAMFGWQEYGTSNGTGLQKVDDTHVPLSAYLGPVGMPGVTAWYGLNRIIAPKAGETVVVSAASGAVGSVVGQLAKLAGARAVGIAGGADKCRYVTGTLGFDACVDYKAGNLYQDLKAATPNGVDGYFENVGGEVLDATLARMNPFGRIALCGFIAGYDGQPVPLRHPSLMLTQRLLVQGFIVSEHMDVWPEALKRLGTLVAQKKLHYRETIAQGLDAAPEAFMGLLKGKNFGKQLVKLI

SEQ ID NO: 2873 - protein, 199 aa, Leptospirillum ferrooxidans
SGVMKKIRFPKTASIGIKPVSEEGTKRLVRAAIRFALANNRKSVTLVHKGNIMKFTEGYFRKWGYEVAKEEFGDKTVSWDDCGGNAPAGKLLIKDEIADAFLQKILLRANEYDVIATLNLNGDYLSDALAAQVGGIGIAPGANINYETGAAVFEATHGTAPKYANHDKVNPGAVILSGEMMFRYMGWNEVADLILKGLR

SEQ ID NO: 2874 - protein, 333 aa, Bacillus anthracis str. Ames
MAILSNIGTALFLIAFILLILCIISFFKKNGKAKQYGRPAVILFMISIVLIITSAETANNPIVEFFSILSFVLFVFFLVLAILSVIKKTGVAKKQFIITAILFVIFGALSSISNPTSEKTTATSKQVASNNAEQKDSEKKKELEKKEADEKAQKQEDEKRQADEQARKQEDEKRQADEQARKQQEEQKRLADEQTRKQQEEQKRQADEQARKQQEEQKRQADEQARKQQEEQKRQADEQARKQQEEQKRQADEQARKQQEEQKRLADEQARKQQEEQKKSQQTQTQPASGNTSSAYYKNCAAVRAAGKAPLYKGQPGYDSHLDRDGDGVACEK

SEQ ID NO: 2875 - protein, 312 aa, Staphylococcus aureus subsp. aureus Mu50
MKQFVNLGKSDVEVFPIALGTNAVGGHNLYPNLDEEQGKDVVRQAINHGINLLDTAYIYGPERSEELVGEVVKEYPREQIKIATKGSHEFDENQEVHQNNQPEYLKQQVENSLKRLQTDYIDLYYIHFPDDNTPKDQAVAALQELKEQGKIKAIGVSNFTLDQLKEANKDGYVDVVQLEYNLLHRENEAVLQYCVDHLITFIPYFPLASGILAGKYDENTKFSDHRTTRRDFIPGVFEENVRRVKALESLAAAHQTSIANIVLAFYLTRPAIDVIIPGAKRAEQVIENIKAADIVLSDDEIQYIDELFPIED

SEQ ID NO: 2876 - protein, 545 aa, Solanum tuberosum
MPMDIETKQSGDLIFRSKLPDIYIPKHLPLHSYCFENLSEFNSRPCLIDGANDRIYTYAEVELTSRKVAVGLNKLGIQQKDTIMILLPNCPEFVFAFIGASYLGAISTMANPLFTPAEVVKQAKASSAKIVITQACFAGKVKDYAIENDLKVICVDSAPEGCVHFSELIQSDEHEIPDVKIQPDDVVALPYSSGTTGLPKGVMLTHKGLVTSVAQQVDGENANLYMHSDDVLMCVLPLFHIYSLNSVLLCALRVGAAILIMQKFDIAQFLELIPKHKVTIGPFVPPIVLAIAKSPLVHNYDLSSVRTVMSGAAPLGKELEDAVRAKFPNAKLGQGYGMTEAGPVLAMCLAFAKEPFDIKSGACGTVVRNAEMKIVDPDTGCSLPRNQPGEICIRGDQIMKGYLNDPEATARTIEKEGWLHTGDIGFIDDDDELFIVDRLKELIKYKGFQVAPAELEALLINHPDISDAAVVPMIDEQAGEVPVAFVVRSNGSTITEDEVKDFISKQVIFYKRIKRVFFVETVPKSPSGKILRKDLRARLAAGISN

SEQ ID NO: 2877 - protein, 211 aa, Zea mays
MTASVFPALLLAVAAVLLLPAAEAVWLELPPSGTKCVSEEIQPNVVVLADYAIMYESHPSSHPTVAVKVTSPYGNTVHHNENATTGQFAFTTSEAGNYLACFWIDSVEKGSGTSLNLDWKIGIAAKDWDTIAKKEKIEGVELELRKLEAAVESIHHNLLYLKAREADMRTVSERTNSRVAWFSILSLGVCVAVSVLQLWHLQGFFRKKKLI

SEQ ID NO: 2878 - protein, 348 aa, Mesorhizobium loti
MPYVAAENRYEKMIYNRCGRSGLKLPAISLGLWHNFGNDTPHKTKQAIVRKAFDLGITHFDLANNYGPPPGSAETAFGEILRTDFSAYRDELIISTKAGYEMWAGPYGEWGGRKYMLASLDQSLKRMGLDYVDIFYSHRFDPDTPLEETMGALDHAVRSGKALYAGISSYNSQRTREAADILRQLGTPCVIHQPSYSMLNRWVEEDGLLDTLEGLGVGSIVFSPLAQGMLTDKYLGGIPEGSRASQGKSLKSAFINDRTIANIRALNAIAGKRGQTLAQMALAWVLRKGKVTSALIGASRPEQVEDCVGALKVLDFSDAELAEIDSYARESDINLWAASAERKGPPRK

SEQ ID NO: 2879 - protein, 369 aa, Nostoc sp. PCC 7120
MEVKAAIAYGAGKPLTIETVQLEGPKAGEVLVEVKASGVCHTDAYTLSGNDPEGLFPAILGHEGAGVVVDVGAGVTSVKPGDHVIPLYTPECRQCAYCLSFKTNLCQAIRGTQGRGVMPDGTSRFSINGQMIHHYMGTSTFANYTVLPEIAVAKIREDAPFDKVCYIGCGVTTGIGAVIYTAKVEAGANVVVFGLGGIGLNVIQGARMVGANMIVGVDINPSKRALAEKFGMTHFVNPQEVEGDLVAYLVDLTKGGADYSFECIGNVNVMRQALECCHKGWGVSVIIGVAGAGQEISTRPFQLVTGRVWKGSAFGGARGRTDVPKIVDWYMDGKINIDDLITHVMPIEKINDAMDLMHRGESIRSVVTF

SEQ ID NO: 2880 - protein, 357 aa, Streptomyces avermitilis MA-4680
MSSALTDLFPHPIVQAPMAGGVSVPQLAAAVSEAGGLGFLAAGYKTADGMYQEIKQLRGLTGRPFGVNLFMPQPEQADPAAVEVYANQLAGEASWYETELGDPDSGRDDGYDAKLAVLLDNPVPVASFHFGCPARDVLEALARAGTFTLVTATTVDEALAVQRAGAGAVIVQGVEAGGHQGTHRDNPEADGAGIGLLSLLAQVREAVTLPIVAAGGIMRGSQIAAVLAAGASAAQLGTAFVATPESGANALHKQALTNPLFVRTELTRAFSGRPARGLVNRFMREHGPYAPAAYPEVHHLTSPLRKAAAKAGDAQGMALWAGQGHRMARELPAGQLVRTLADEVEAAKTALSGGGAR

SEQ ID NO: 2881 - protein, 448 aa, Pseudomonas aeruginosa UCBPP-PA14
MSQSWSPESWRAKPIQQQPEYPDAAHLARVEQTLAGYPPLVFAGEARELRRQFAEVTAGRAFLLQGGDCAESFAEFSAAKIRDTFKVLLQMAVVMTFAAGCPVVKVGRMAGQFAKPRSSGDETQNGVTLPAYRGDIVNGIGFDEKSRVPDPERLLQAYHQSTASLNLLRAFAQGGFADLHQVHRWNLDFIANSALAERYQQLADRIDETLAFMRACGLDSAPQLRETSFFTAHEALLLNYEEALTRRDSLTGEWYDCSAHMLWIGDRTRQLDGAHVEMLRGVGNPIGVKVGPSMDSEELIRLIDILNPDNDPGRLNLIVRMGADKVGDHLPRLIQAIQREGRQVLWSSDPMHGNTIKASSGYKTRDFARVLAEVRQFFEVHQAEGSYAGGIHIEMTGQNVTECIGGSRPITEDGLSDRYHTHCDPRLNADQSLELAFLIAETLKQVRR

SEQ ID NO: 2882 - protein, 277 aa, Trichodesmium erythraeum IMS101
MTEAVTIAQKYYDSTETDKLYAAIWGGEHIHYGIYTRPDEPIHDASLSTVKTIAQTLKKIDQNSRVIDLGAGYGGAARYLAKTYGCSVCCLNLSQLQNQRNGQLNQEQNLDPLVEITQGSFEDIPYPNNSFDIVWSQDAILHSGDRCLVFQEIKRILKPGGEFIFTDPMESETFPPGALQTAFDRLGISDMGSYRFYSQTLKDLGFEELNFIDLSQNVAIHYRRFREEVQKRYNEVVKLTSTEFVDKTLDSIQPWIERYEQGYMQWAILHFRLLEKN

SEQ ID NO: 2883 - protein, 369 aa, Zea mays
MYSWEMLSFNIHDGFLEAIVRGNRSGLLTQADYNNLCQCETLDDIKMHLSATEYGPYLQNEPSPLHTTTIVEKCTLKLVDEYKHMLCQANEPLSTFLQYITYGHMIDNVVLIVTGTLHERDVNELLEKCHPLGMFDSIASLAVAQNMRELYRLVLVDTPLAPYFSECITSEDLDDMNIEIMRNTLYKAYLEDFYKFCAKLAIATAEAGRDFYKFCQKLGGATAEIMCDLLSFEADRRAVNITINSIGTELTRDDRRKLYSNFGLLYPYGHEELAVCEDVDQVRGAMEKYPPYQSIFSRISYGESQMLDKAFYEEEVKRLCLSFEQQFHYAVFFAYIRLREQEIRNLMWISECVAQNQKSRVHDSVVFIF

SEQ ID NO: 2884 - protein, 555 aa, Pseudomonas aeruginosa UCBPP-PA14
MVTANRLPLEVFFEREKRHPQRRYLVQPIGGGRVEELSWGEVGDQARRAAAWLRSLDLPAGSRIAIISKNCAHWIVTDLAIWMAGHVSVPLYPNLTAESARQVLEHSESAVVFVGKLDDWPAMAPGVPEGIPTVAMPLHPEGRFDRQWSDLQACAPLEGDTPTAAEQLATLIYTSGTTGVPKGVMHNFSSFAFAASRGVELFGTREDDRMLSYLPLCHVAERMFVEMGSLYGGTTVFFAESLDTFLEDMKRARPTLLFGVPRIWTKFQMGVYSKMPAQKLDRLLKLPILGRIVGRKVLAGLGLDAVRYALCGAAPVPEALLLWYRRLGLDVLEVYGMTENSGYSHVCRPGRQKTGWIGQNSPGVEVRISDEGEVQVRSGATMVGYYKEPEKTAEVLTSDGFLRTGDKGEQDADGNLRLTGRMKEIFKTSKGKYVAPAPIENRLAVHDRIEQVCVVGEGLSAPLGLCVLSEVGRREALNGTRGALESSLRAHLEQVNGALDKHERLVGLVLVQETWAVDNGFLTPTLKIKRNMVEGAYGSRFHEWVERREAVLWHE

SEQ ID NO: 2885 - protein, 286 aa, Zea mays
MHIREEEATPSTVTGIMSTLTSAGQQKLKEPISPGGGSASVAGSAAERNNGGRGKGKTEIKRIENTTNRQVTFCKRRNGLLKKAYELSVLCDAEVALIVFSSRGRLYEYANNSVKGTIERYKKATSDNSSAAGTIAEVTIQHYKQESARLRQQIVNLQNSNRALIGDSITTMSHKELKHLETRLDKALGKIRAKKNDVLCSEVEYMQRREMELQNDNLYLRSRVDENERAQQTANMMGAPSTSEYQQHGFTPYDPIRSFLQFNIVQQPQFYSQQEDRKDFNDQGGR

SEQ ID NO: 2886 - protein, 155 aa, Triticum aestivum
  unsure (1)..(155): unsure at all Xaa locations
YQFCXSIGGPTAEVMGDILRFEADRRTINITINSFGTELPKEDRRKLFPTIGRLYPEGNARLAIADEIDQVKSVCEIFHEYRSFFDTTTSNKTLEDRFFETEVFLNRQAFQQQFNYGVFYAYIKLKEQEIRNIVWIAECISQNQKDRINSYIPIL

SEQ ID NO: 2887 - protein, 143 aa, Zea mays
MAMAYKMATEGMNVKEECQRWFMEMKWKKVHRFVVYKIDERSRAVLVDKVGGPGEGYEELVAALPGDDCRYAVFDFDFVTVDNCQKSKIFFIAWSPAASRIRAKILYATSKQGLRRLLDGVHYEVQATDPSEIGFDVIRGRAQ

SEQ ID NO: 2888 - protein, 464 aa, Lycopersicon esculentum
MAFFLIFLSSFFGLCIFCTALLRWNQVKYNQKNLPPGTMGWPLFGETTEFLKLGPSFMKNQRARYGSFFKSHILGCPTIVSMDSELNRYILVNEAKGLVPGYPQSMIDILGKCNIAAVNGSAHKYMRGALLSLISPTMIRDQLLPKIDEFMRSHLTNWDNKVIDIQEKTNKMAFLSSLKQIAGIESTSLAQEFMSEFFNLVLGTLSLPINLPNTNYHRGFQARKIIVNLLRTLIEERRASKEIQHDMLGYLMNEEATRFKLTDDEMIDLIITILYSGYETVSTTSMMAVKYLHDHPKVLEELRKEHMAIREKKKPEDPIDYNDYRSMRFTRAVILETSRLATIVNGVLRKTTQDMEINGYIIPKGWRIYVYTRELNYDPRLYPDPYSFNPWRWMDKSLEHQNSFLVFGGGTRQCPGKELGVAEISTFLHYFVTKYRWEEIGGDKLMKFPRVEAPNGLRIRVSAH

SEQ ID NO: 2889 - protein, 341 aa, Pseudomonas fluorescens PfO-1
MRSFFHPEQLLHHPRSYYSRGQMRTPQEVPERAQRLVQAAHGLGFSVEQPADAGLAPLLAVHGAPYLTFLQEAHARWKEIPEDWGDEVMSNIFVREPNALRGILAQAARYLADGSCPVGEQTWRSAYWSAQSAVAGAQALIDGEPAAYALCRPPGHHARAEAAGGFCYVNNAAVAAQVLRDKFEKVAVLDTDMHHGQGIQEIFYDRDDVLYVSVHGDPTNFYPGVAGFADERGSGAGEGFNLNLPMAHGSSEADFLGQLEVALAAVREFGAEVLVLSLGFDIYELDPQSKVAVTREGFAALGERIRSLDLPCLIVQEGGYHLESLEDNARAFFVNAEVWQI

SEQ ID NO: 2890 - protein, 245 aa, Tontelea attenuata
ALSIAGAVQSQKLAVRAISQIQSLPGGDIKLLCDTVVESVRDLTGYDRVMVYKFHEDEHGEVVAESKRPDLEPYIGLHYPATDIPQASRFLFKQNRVRMIVDCHASPVRVIQDDGLMQPLCLVGSTLRAPHGCHAQYMENMGSIASLAMAVIINGNDEEVIGGRNPTRLWGLVVCHHTSARCIPFPLRYACEFLTQAFGLQLKMELQLAAQLLEKHVLKTQTLLCDMLLRDSPTGIVTQSPSIMD

SEQ ID NO: 2891 - protein, 250 aa, Zantedeschia aethiopica
MGKSYPAVSEEYQKAVDKAKKKLRGLIAEKNCAPLMLRLAWHSAGTFDVCTKSGGPFGTMRLAEELGHGANNGLDIAIRLLEPIKEQFPILSYADFYQLAGVVAVEITGGPEIPLNPGREDKPVPPPEGRLPDATKGSDHLRQVFGQQMGLCDQDIVALSGGHTLGRAHRERSGFEGAWTSNPLIFDNSYFTELLTGEKEGLLQLPSDKALLSDPVFRPLVEKYAADEDAFFADYSEAHLKLSELGFPEC

SEQ ID NO: 2892 - protein, 441 aa, Antirrhinum majus
MGSRHQVVQQQNRGDVVPGAIKQKSMAVEKKNRRALGDIGNVVTVRGVEGKALPQVSRPITRGFCAQLIANAEAAAAENNKNSLAVNAKGADGALPIKRAVARVPVQKKTVKSKPQEIIEISPDTEKKKAPVLEKEITGEKSLKKKAPTLTSTLTARSKAASVVRTKPKEQIVDIDAADVNNDLAVVEYVEDMYKFYKSAENDSRPHDYMDSQPEINEKMRAILIDWLVQVHYKFELSPETLYLTINIVDRYLASKTTSRRELQLLGMSSMLIASKYEEIWAPEVNDLVCISDGSYSNEQVLRMEKKILGALEWYLTVPTPYVFLVRFIKASLPDSDVEKNMVYFLAELGMMNYATIIMYCPSMIAAAAVYAARCTLNKMPIWNETLRMHTGFSEVQLMDCAKLLIDFHGGSTDQKLQGIYRKYSRLEKGAVALLPQPLLA

SEQ ID NO: 2893 - protein, 110 aa, Pyrobaculum aerophilum str. IM2
MRFCPNDKSLLIPVRKGNVTVLRCPKCGYEEEVSQDVKNRYQSKTAVESRNSVIVVADTTPNLPKVKTRGCPKCGHDEAYVWVQQTRAADEPPTRFYRCTKCGYTWREYE

SEQ ID NO: 2894 - protein, 154 aa, Emericella nidulans
MVKAVAVLRGDSKVSGTVTFEQADENSNTTVSWNITGNDPNAERGFHIHQFGDNTNGCTSAGPHFNPFGKTHGAPEDEVRHVGDLGNFKTDAEGNSKGSKTDKLIKLIGAESVLGRTLVVHAGTDDLGRGDSEESKKTGNAGARPACGVIGIAA

SEQ ID NO: 2895 - protein, 159 aa, Chloroflexus aurantiacus
MLCILFAAPASASGETMIDVVQIGLGFVLSIVIGGVAFARRSLSESGWLGAVLVGTLTFGFGGWAWGITLIVFFVSSSLLSHYKESIKERRAAEKFAKGGRRDFFQTIANGGLGALCAVAYALNDQPAVLLAAFVGLMATVTADTWANELGVLSPHEHD

SEQ ID NO: 2896 - protein, 403 aa, Glycine max
MAATLFQGLGVVTPSFSSSHSNKFMLSSLSERKDGIFVVRSDADARILKTGARKHELLVTNAVATKGASSAASTSKSGSGHELLLFEALREGLEEEMERDPCVCVMGEDVGHYGGSYKVTKGLAPKFGDLRVLDTPIAENAFMGMGIGAAMTGLRPVVEGMNMGFLLLAFNQISNNCGMLHYTSGGQFKIPIVIRGPGGVGRQLGAEHSQRLESYFQSIPGIQMVACSTPYNAKGLMKAAIRSENPVILFEHVLLYNLKERIPDEEYVLSLEEAEMVRPGEHVTILTYSRMRYHVMQAAKTLVNKGYDPEVIDIRSLKPFDLHTIGNSVKKTHRVLIVEECMRTGGIGASLTAAITENFHDHLDAPIVCLSSQDVPTPYAGTLEEWTVVQPAQIVTAVEKLCQ

SEQ ID NO: 2897 - protein, 155 aa, Zea mays
MARSDVEYRCFVGGLAWATDDHSLHNAFSTYGEVLESKIILDRETQRSRGFGFVTFSTEERMRNRIEGMNGKELDGRNITVNEAQSRGGRGGGGGGYGGGRGGGGYGGGGRRDGGGGYGGGGGYGGGGGYGGGGGGYGGGNRGGGYGNSDGNWRN

SEQ ID NO: 2898 - protein, 324 aa, Streptomyces lincolnensis
MSGRYCVTGGAGFIGSHFVETAPRRGRHPGEVVAYDDLSNTTTGGFEPLLADERLRFVRADVLDTARLTEELTGWTQDDVVHLASSVDMRKGYHDRGFDLRQCAEGTLSVLNAMRASGPRTVLFSSSSTVYGDPVTLPTPEHAGPYAPISMYGAGKLAAEALLSANCHLDGFTAHVFRFGNVVGGRMNHGVIHDFIEKLDARRDRLQVLGDGRQRKNYFLVEECVDGILTASGKLGPGFHVLNLGNPGTVSVDEIAAIVIDEMGLKGVGLEHEGGVRGWPGDVPVVEYDLTRVHELGWSAPTDGRQAIRTCARRLLAERGWQRP

SEQ ID NO: 2899 - protein, 299 aa, Zea mays
  unsure (1)..(299): unsure at all Xaa locations
LPLIPHPPLLPSLDWPDLFPADREALPHHHHHHHHHHTMLNMMTDLSCGPSSKVKEQVAAAPTGSGDRQGQGRGKIEIKRIENTTNRQVTFCKRRNGLLKKAYELSVLCDAEVALVVFSSRGRLYEYANNSVKSTIERYKKANSDSSNSXGTVAEVNAQYYQQESSKLRQMIHSLQNANTRNIVGDSIHTMGLRDLKQMEGKLEKAISKIRARKNELLYAEVDYMQKREMDLQTDNMYLTSKIAESNETGQPAMHMTMGVPPPTSEYDHMAPFDSRNFLQVSMPQHYSHQLQPTTLQLG

SEQ ID NO: 2900 - protein, 114 aa, Oryza sativa
TKLASSTKIPFLLLAVLLLLSVAFPAEVMAGGHGRGGSSGGGGGVAGGGNLRPWECSPKCAGRCSNTQYKKACLTFCNKCCAKCLCVPPGTYGNKGACPCYNNWKTKEGGPKCP

SEQ ID NO: 2901 - protein, 448 aa, Oryza sativa
  unsure (1)..(448): unsure at all Xaa locations
MSFRSIVRDVRDSFGSLSRRSFEVTLAGLSGLTGHHRGKSQSTVHELCDADLIIQESRWASLPPELLRDVIRRLEASESTXWPSRKDVVSCAAVCKAWREMCKEIVLSPEFCGKLTFPLSLKQPGPRDGMIQCFIKRDKSKSTYHLYLCLSTAVLADSGKFLLSAKRHRKTTCTEYVISMDADNISRSSSTYIGKLRSNFLGTKFIIYDTQPSYNGAVIPPVXXRSSRRFNSKKVSPKMPSGSYNIAQVTYELNVLGTRGPRRMHCVMHSIPASSVEPGGIVPGQPEQIVPRAFEESFRSTTSFSKSSIMDRSMGFQXFPXDFSSARFSDIAGGTSDEEGQNKERPLVLRNKAPRWXHEQLQCWCLNFRGRVTIASVKNFQLIAAXQHRPPAGAPTPSQPAPPEQDKIILQFGKVAKDMFTMDYRYPLSAFQAFAICLSSFDTKLACE

SEQ ID NO: 2902 - protein, 362 aa, Ralstonia solanacearum
MGTWPDTRLLALFQIDVPIVLAPLAGVGGVELAVAVARAGGLGSLPCAMLNADQIREQVGQFRAAVRAPINLNFFCHVPPQPDPEREARWRAHLAPYYAEFGIDPAATAPFVNRAPFDAAACAVVESLRPEVVSFHFGLPEAGLLARVRAAGARILASATTVEEACWLEANGCDAVIAQGAEAGGHRGMFLATAVESQVGTFALVPQVADAVRVPVIATGGVADARGMAAAFALGAAGVQIGTAYMLSPEAKTSAIHRAALKRAADGDTALTNLFTGRPARGIVNRLMREIGPMSSFAPAFPTAGGALAPLRAKTEPAGSGDFINLWSGQAPRLATEDSAEAITRRIAAQALARLAPATRLA

SEQ ID NO: 2903 - protein, 457 aa, Agrobacterium tumefaciens str. C58 (Cereon)
MLSNSLIELDRAHLVHPVSSFRGHEKLGVRVLKSASGATVTDMTGHQLIDGFAGLWCVNAGYGHDSIVEAAAKQMRELPYATAYFDIGSEPAIRLASELADRAPGDLNHVYFTLGGSDAVDSTIRFIRYYWHAKGQPQRDQFISIEQGYHGSTTAGSGLTALPAFHAGFGVPYDWQHKIPSHYAYRNPAGSDPAAIIASSLQILKDKIEAIGPDRVAAFYAEPIQGSGGVLVPPPGWIKAMRELCSSYGILFVADEVITGFGRTGPLFACADEDIVPDFITAAKGLTSGYVPMGAVFMADHVYDTIADFAGEAAIGHGYTYSAHPVSAAVGLEVLKLYEGGLLENGRRAGQRLMAGLEGLRNHPLVGDVRGRGMLAAIELVTDKDKKTPLPAAAAPARKVFDRAWENGLIVRAFANGILGYAPPLCCTDGEIDAIVERTLKTLDQTLEDPAVRAAMA

SEQ ID NO: 2904 - protein, 459 aa, Brassica oleracea
MTSINVKLLYHYVITNLFNLCFFPLTAIVAGKAYRLTIDDLHHLYYSYLQHNLITIAPLFAFTVFGSVLYIATRPKPVYLVEYSCYLPPTHCRSSISKVMDIFYQVRKADPSRNGTCDDSSWLDFLRKIQERSGLGDETHGPEGLLQVPPRKTFAAAREETEQVIIGALGNLFKNTNVSPKDIGILVVNSSMFNPIPSLSAMVVNTFKLRSNVRSFNLGGMGCSAGVIAIDLAKDLLHVHKNTYALVVSTENITYNIYAGDNRSMMVSNCLFRVGGAAILLSIKPGDRRRSKYELVHTVRTHTGADDFSFRCVQQGDDENGKTGVSLSKDITDVAGRTVKKNIATWGPLILPLSEKLLFFVTFMGKKLFKDKIKHYYVPDFKLAIDHFCIHAGGRAVIDVLEKNLALAPIDVEASRSTLHRFGNTSSSSIWYELAYIEAKGRMKKGNKVWQIALGSGFK

SEQ ID NO: 2905 - protein, 454 aa, Pseudomonas syringae pv. tomato str. DC3000
MSTQLKPTLGTIHLWGIAVGLVISGEYFGWSYGWGAAGTLGFLVTALMVATMYTCFIFSFTELTTAIPHAGGPFAYSRRAFGEKGGLIAGMATLIEFVFAPPAIAMAIGAYLNVQYPGLDPKHAAVGAYIVFMALNIVGVKLAATFELVVCILAVAELLVFMGVVAPAFSFSNFALNGWAGSQTFGPQAIAGMFAAIPFAIWFFLAIEGAAMAAEEAKDPKRTIPKAYISGILTLVFLAIGVMLFAGGVGDWRTLANINDPLPQAMKAVVGDNSGWLHMLVWIGLFGLVASFHGIIMGYSRQFFALARAGYLPSSLARLSRFQTPHRAIIAGGLIGIAAIYSDGLINLSGMTLTAAMITMAVFGAIVMYIMSMLSLFKLRKTEPNLERSFRAPGYPVVPGIALALAVVCLVAMAWFNMLIGVIFLGLMAIGFIYFSLTAKSRADAPADSMLTGQ

SEQ ID NO: 2906 - protein, 358 aa, Glycine max
MTNDNIAVTDLTSALNEENRADLVNALKSKIQSLAGAHSDVLETLSPNVRKRVESLREIQGKHDELEADFLKEREALEAKYQKLYQPLYTKRYEIVNGVTEVEGAANESTDESEENKEKGVPSFWLNAMENNDVLAEEISERDEGALKFLKDIKWSRIENPKGFKLDFFFDTNPYFSNTVLTKTYHMIDEDEPILEKAIGTEIEWYPGKCLTQKVLKKKPKKGSKNAKPITKTESCESFFNFFKPPEVPEDDADIDEDLAEELQNQMEQDYDIGSTLRDKIIPHAVSWFTGEAAQGDEFEDLEDDEDEEEDEDEDEDEEDDEDEDDEEEDDTKTKKKKSGKAQAGDGDGERPPECKQQ

SEQ ID NO: 2907 - protein, 197 aa, Burkholderia cepacia
MEKAMAAKKILFLTGDFAEDYETMVPFQALQAVGHHVDAVCPGKRAGDKVKTAIHDFEGDQTYTEKPGHQFTLNATFDDVDASRYDALAIAGGRAPEYLRLDPNVIALVRAFAEAGKPIAAICHAAQLLAAADVIRGKRISAYPACAPEVKLAGGEYADIPVDAAVTDAPFVNAPVWAENPAWVSQFLALLGTRIEL

SEQ ID NO: 2908 - protein, 377 aa, Bradyrhizobium japonicum USDA 110
MKSPICDMLGIEFPLLAFSHCRDVVAAVSRAGGFGVLGATVHTPDTLERELKWIDDHVDGKPYGIDVLIPENISTAGEKDVTWKSLEARVPQEHRNYTRDLLKKYDIELTTTEMADNQPQPFDGKTALQLLEVSFNHPIRLIANALGVPPKAMIEMGKKHGVPVAALVGAKEHALRQVAAGVDILVVQGTEAGGHCGEVSTMVLVPEVIKAIKKIRDVPVLAAGGIMTGRQMAACMAMGAAGAWTGSVWLATVEAETTEIFREKMIAASSRDAVRSKGRTGKPARQLRSVWTDAWDRAPESPGALPMPLQSIISRDAFNSIDRAAAAGNARARDLVSYFVGQGVGLIDSVKSAGAVVQEFKEEFAEAVEHMNELVAE

SEQ ID NO: 2909 - protein, 317 aa, Oryza sativa (japonica cultivar-group)
MSKYGTIPTSSSSSSSGAAPPPLPLGGGGGASPLDFFSRAKARGATALATRRPWRELADPHALGLPPSLADAYLRVRANLAHYAMNYAIVVLAVVFLSLLWHPASLIVFLVCMVAWLVLYFLRDEPIVLFGRVVGDGAVLAALAAVTLVLLLLTGATANIVSSLLIGVLLVVLHAALHKAEENVDDEVGRCLLTQSIEALNLCVKCELDNENTDTYNELNSNVVFRRFDAICSGSECVIHAELCCHTALFIRAVSRSLGSDPAMIQGCELQRIPLVYPTFVNVMQPFPLVFMYQIGREKVKTRLDSGVENQCPVTCV

SEQ ID NO: 2910 - protein, 214 aa, Paeonia sinjiangensis
IVESVGEGVTDVKPGDHVLPIFTGECKECRHCKSEESNMCDLLRINTDRGVMLNDGKSRFSINGQPIFHFVGTSTFSEYTVLHVGCLAKINPEAPLDKVCVLSCGISTGLGATLNVAKPNKGSTVAIFGLGAVGLAAAEGARIAGASRIIGVDLNPKRFDEARKFGVTEFVNPKDYNKPVQEVIAEMTGGGVDRSVECTGSIMAMMSAFECVHD

SEQ ID NO: 2911 - protein, 195 aa, Glycine max
  unsure (1)..(195): unsure at all Xaa locations
MGNDAGSPQGPVTCGSWIRRPENLNLVVLGRSRRGNSCPSLLEIFSFDPKTTSLSTCPLTTYVLEAEEGDPVAIAVHPSGDDFVCALSNGSCKLFELYGRETNMKLLAKELAPLQXXGPQKCIAFSVDGSKFAAGGLXGHLRIMEGPRMXVILGDPGPPGAGRDGDFSLDSEFLASTSTDGSARIWKIEDXGPLT

SEQ ID NO: 2912 - protein, 276 aa, Sinorhizobium meliloti
WGFDGSSTQQAEGRSSDCVLKPVAVYPDPVRTNGALVMCEVMMPDGKTPHPSNTRATVLDDESAWFGFEQEYFFYKNGRPLGFPEQGYPAPQGPYYTGVGYKNVGDIARQIVEEHLDICLAAGINHEGINAEVAKGQWEFQVFGKGSKKAADEVWLARYLLLRLTEKYGIDVEFHCKPLGDTDWNGSGMHANFSTAYLREVGGKDYFEALMAAFEKNLHDHINVYGPDNHLRLTGKHETAPWDKFSYGVADRGASIRVPHSFVNNGYRGYLEDRRP

SEQ ID NO: 2913 - protein, 748 aa, Pseudomonas putida
MTADNSLADAMERCAQEPIQVPGSIQPHGFLLVLDATDLRVLQASENVEHWLGLPARELIGCHFADLVHEGFDLHAHLTRLPEDEVFPFHIGDVRLRQGAPISALLHMLVHCHDQVLIAEFEPPRLPADLVGQGDYYPLVRSFVASLQVASSIEDLLQQTVLQLKRITGFGRVKAYRFDAEGNGQVLAEVVDPGYPSYAGLCFPAADIPRQARELYRVNRIRVIEDANYQPSPLLPATNPRTGKPLDMSFAALRSVSPVHLQYMRNMGTLASMSLSIVVDGQLWGLISCHHQQPRPVDLRTRTACELLASVLSLQIESRESHASTRKLLTLRQHIVRMISSMADHDSVSDGLRDLPEVLLAFADAQGAAVISAERCDLIGQTPPEAQVTALVHWLGQRDEDKVFHSDNLRRDITELPELANHAGGVLAVAISQIHSHYLLWFRPEQIRTVNWAGQPTKQVGPQGNLDPRHSFERWQEEQRGYSQAWDPLVIEGVIELRAAVLGIVLRKAEELAQLAGELRRSNKELEAFSYSVSHDLRAPLRHIAGYTELLGEIEGQGLSERGKRFLQHIGEAAHFAGSLVDNLLNFSQMGRSALRLSDVDLNALVEAIRSELAPDYEGRAIVWDIAPLPKVIGDPAFINMALHNLIANAIKYTRGRTPARIEISAVQHPEETEVCIRDNGVGFDMAYANKLFGVFQRLHRMEDFEGTGIGLASVRRIIERHDGRVWATGQVDQGASFHFTLPRNTAT

SEQ ID NO: 2914 - protein, 150 aa, Pyrococcus furiosus
MNTLKMQRRIAAEILKCGENRIWIDPERIDDVASAIPREDIKRLIKEGVIKKKPIKGQSRYRAKIRHEQKKKGRHRGPGSRKGKKTARMGKKELWIKTIRALRKELRKLKAQKKIDRKTYRMLYIRAKGGQFKNKHQLYLFLEEHGLLKK

SEQ ID NO: 2915 - protein, 165 aa, Microsporum canis
MAAAATSKITLTSSDGVDITIDRQVAERSILIKNMLKDLGDSGEAIPIPNVNESVLKKVIEWCKHHKGDPPSTGDDDVDSRRKTTDIDEWDQKFMQVDQEMLFEIILAANYLDIKALLDVGCKTVANMIKGKSPEEIRKTFNIQNDFTPEEEDQIRRENEWAEDR

SEQ ID NO: 2916 - protein, 334 aa, Staphylococcus epidermidis ATCC 12228
MNNEQIVFNKVPDGMPQDDTFKYEDIDVIEPSENELQLKTLYISVDPYMRGRMTNADSYVDPFKQGEPFNGHTVSKVLKSKDSNFDEGDIVVGMLPWRKINTVNSEYVNKVPTSDVPLHLYLSVLGMPGQTAYHGLLDIGQPKEGETVVISAASGAVGSVVGQIAKLKGCRVVGIAGGDKKVNYLKNELRFDAGIDYKKDNFPEALKEAVPNGIDVYFENVGGYIGDEVFKHLNTHARIPVCGAISSYNHPEKDIGPRIQQTLIKNQAMMRGFIVAEFADGFKEASKQLAQWVQENKIKTQVSVEDGFDKVPQAFRNLLTGDNFGKQVIKVASE

SEQ ID NO: 2917 - protein, 367 aa, Streptomyces coelicolor A3(2)
MKFGAAVLRAYENPFTVEEVVLAEGPAEGEILVRIAGCGMCRTDLAVRRSGGRSPLPAVLGHEGSGVVVETGGTGTGLSAGDHVVLSFDSCGHCRNCMGAAPAHCDSFAALNLFGGRREHAARFTDTTGTALAPRWFGQSSFAEYALVPARNAVRVDPALPLELLGPLGCGFLTGAGAVLNSFGVGPGDTLAVFGAGAVGLAAVMAAHAAGAATVAVDRHPGRLALAERLHAVAVPATPTGLSDRILRLTGGGTTYALDTTGSAGLINEALRSLRPTGRLGLVARLHGTLPIEAGTLDRGRAIFHICEGDAVPGLLIPRLTALWQAGRFPFDQLIRTYPLADINEAEHDCETGRVVKPVLIPDGRRP

SEQ ID NO: 2918 - protein, 344 aa, Magnetospirillum magnetotacticum
MDKARQRLEHLWRRGRDFLGTEYAIMGGAMSWISERRLVAAISNGGGFGVLACGSMSPGLLREEIRATQELTAKPFGVNLITLHPDLDALIDVCAEMQVGHIVLAGGLPSGAAIKRAKDTGAKVICFAPAVVLAKKLLRSGVDALVIEGAEAGGHVGPVATSVLAQEILPVVDQVPVFVAGGIGRGEAIVSYLEMGASGCQLGTRFVCATECIAHPNFKQAFIRAAARDALPSVQVDPQFPVIPVRALGNNATKRFILFQMEVISRFKSGEIEQKDAQLEIEHFWAGALKRAVIDGDVENGSLMAGQSVGMVTREQATAEILQELLNQALAALADRHGPVPVQV

SEQ ID NO: 2919 - protein, 429 aa, Zea mays
MMLEGKSYLVSRSVPSSCEPEAEWEYLAHAVLSGKRPAPEDDVEVEDPDETGSGGKRSKPASPQPHTPDICEGHGSNRHATGSGEQRITGSNPMTSIGRDLTLNCLLRLSRSDYGSVASLSRDFRSMVRSGEIYRLRRQNGVAEHWVYFSCNVLEWDAYDPYRERWIQVPKMPPDECFKCSDKESLAVGTELLVFGMARIVFRYSILTNSWSRADPMNYPRCLFGSTSVGGKAFVAGGTDCVGNILSSAEMYDSETHTWTPLPSMNTARKMCSGVFMDGKFYVIGGVANSNRVLTCGEEYDLKRGSWRTIENMSGGLNGVTGAPPLIAVVSNELYAADYGEKDLKKYDKKNNRWITLGKLPERSVSMNGWGLAFRACGDRLIVIGGPRTYTGGTIELNSWIPDERPPVWNLIARRPSGNFVYNCAVMGC

SEQ ID NO: 2920 - protein, 380 aa, Halobacterium sp. NRC-1
MHDRAAVNTYGCLPGVPVLGARSRTPEGAAGSVTTLPLGVVDDCMRDTSREWVFAERPEGEPDMDSFELRERDVPEPRHGELLVRVRYLSVDPYMRGRMRDSDSYADPWTVGEPLSGGVVGEVVESESDAYEAGDLVSGNGTWADYSLLDAANVAPVDPSVADLPAYLGVLGMPGRTAYFGLLEVGAPKPGDTVVVSGAAGAVGSVVGQIAKHNGCRVVGFAGSEEKVDWLTEDLGFDAGINYKQVDDYSAALDDAAPDGVDVYFDNVGGPISDAVFTKLNVDARVAVCGQIAHYNNEDVPTGPRKLPQLIAPRAKVQGLLVGDFATRFGEASEQLGQWVAAGDIEHRETVVSGLENAPDAFLGLFSGDNIGKQVVGVSE

SEQ ID NO: 2921 - protein, 302 aa, Triticum aestivum
  unsure (1)..(302): unsure at all Xaa locations
MMGGGVAMMDRRMAFPADGGAAASKGRPRRPPSQQDQQARRKKMSRAQDGILKYMLKMMEAVQXASGFVYGIVPRERQGPWAAPSDNLRAWWKEKVRFDRNAPAAIAKHRSDNAAPLCGGEDGAGAAAGPRSLHELQDTTLGSLLSSLMQHCDPPQRRFPLEKGVPPPWWPQGPSEAWWPEAGVPDDLRPPPYKKXHDLKKAWKGRVLTAVIKXLSPDVHKVRPSLASTLVVLPSIMSVYPPLPSRLFANAHPSTSPLNYTTVPPSLFLHSALYLHQPPPSSHYTTPSPHFASTPTNSSFSL

SEQ ID NO: 2922 - protein, 715 aa, Oryza sativa
  unsure (1)..(715): unsure at all Xaa locations
MEKDHQPVISLRPGGGGGGPRPGRLFSPAFAAAASGSGDLLRSHVGGASKIGDPNFEVRERVRYTRDQLLELREIVDIPEAILRINQEIDIELHGEDQIWGRPESDVQVQTQXXQAQPHNRYGETDNRDWRARTVQPPAANEEKSWDNIREAKAAHASSGRQQEQVNRQDQLNHQFASKAQVGPTPALIKAXXDVISLIFEKAVFEPTFCPMYAQLCSDLNEKLPSFPSEEPGGKEITFKRVLLNNCQEAFEGAESLRAEIAKLTGPDQEMERRDKERIVKLRTLGNIRLIGELLKQKMVPEKIVHHIVQELLGSGPDKKACPEEENVEAICQFFNTIGKQLDENPKSRRINDTYFIQMKELTTNLQLAPRLRFMVRDVVDLRSNNWVPRREEIKAKTISEIHDEAMKTLGLRPGATGLTRNGRNAPGGPLSPGGFPMNRPGTGGMMPGMPGTPGMPGSRKMPGMPGLDNDNWEVPRSKSMPRGDSLRNQGPLLNKPSSINKPSSINSRLLPHGSGALIXXPAVVPVTDKAAGSSHEMPAAVQKKTVSLLEEYFGIRILDEAQQCIEELQCPEYYSEIVKEAINLALDKGPNFIDPLVRLLEHLHAKKIFKTEDLKTGCLLYAALLEDIGIDLPLAPALFGEVVARLSLSCGLSFEVVEEILKAVEDTYFRKGIFDAVMKTMGGNSSGXSSAGAAAGACAGPELHRRLARSSLGT

SEQ ID NO: 2923 - protein, 204 aa, Heliobacillus mobilis
MVLERLRDAFEEEKPARAIDWTPEEAEIVRGLFLLTSKPVLYVANVSEDEVGQPDNPLVKEVRARADQEGAGVVVICAKIEAEIAELTDPEERAMFLSDLGLEESGLDRLIRETYTLLGLITYFTAGVQEVRAWTITKGMKAPQAAGVIHTDFERGFIRAEVTGYDDLISTGSQAAARDKGLMRLEGKEYVMHDGDVVHFRFNV

SEQ ID NO: 2924 - protein, 319 aa, Bifidobacterium longum DJO10A
MKTQEIGQSGMIASRVALGVMRMDALDAADAARTVAVAHDSGIDYFDTADIYGFHDHAAHASSKRFGQAWKDAGLDRSTIFIQTKFGIDYSFGENDGGANGYDFSAKHLIDALDHELEALQTDYVDAVLLHRIDTLFELNEVAEAFDALESSGKVRHFGVSNMGPWQIELLQSGLRQKLEINQLQFGLMHTQMLDAEIQFNMASDPAADRTGGILPYSRLKHMTIQAWCPFQSGTEYGPFVGNEHFPELNAELTRLAGKYGSTPNGIAVAWILRHPAGIQPLLGSMTPERIRQMAAGADIELERRDWWSLYQAAGNPLV

SEQ ID NO: 2925 - protein, 461 aa, Shigella flexneri 2a str. 2457T
MAINSPLNIAAQPGKTRLRKSLKLWQVVMMGLAYLTPMTVFDTFGIVSGISDGHVPASYLLALAGVLFTAISYGKLVRQFPEAGSAYTYAQKSINPHVGFMVGWSSLLDYLFLPMINVLLAKIYLSALFPEVPPWVWVVTFVAILTAANLKSVNLVANFNTLFVLVQISIMVVFIFLVVQGLHKGEGVGTVWSLQPFISENAHLIPIITGATIVCFSFLGFDAVTTLSEETPDAARVIPKAIFLTAVYGGVIFIAASFFMQLFFPDISRFKDPDAALPEIALYVGGKLFQSIFLCTTFVNTLASGLASHASVSRLLYVMGRDNVFPERVFGYVHPKWRTPALNVIMVGIVALSALFFDLVTATALINFGALVAFTFVNLSVFNHFWRRKGMNKSWKDHFHYLLMPLVGALTVGVLWVNLESTSLTLGLVWASLGGAYLWYLIRRYRKVPLYEGDRTPVSET

SEQ ID NO: 2926 - protein, 288 aa, Zea mays
MATAATASATAATRFTLLAGAGLRSRITRLPTAVRFQRQRGLTTTALLKTADLQPKEQGKPETLDYRVFLVDGGGRKVSPWHDVPLRAGDGVFHFVVEIPKESSAKMEVATDEAFTPIKQDTKKGNLRYYPYNINWNYGLLPQTWEDPTSANSEVEGAFGDNDPVDVVEIGERRANVGDVLKVKPLAALAMIDEGELDWKIVAISLDDPKASLVNDVDDVEKHFPGTLTAIRDWFRDYKIPDGKPANKFGLGNKPASKEYALKVIQETNESWEKLVKRNIPAGELSLA

SEQ ID NO: 2927 - protein, 513 aa, Vicia sativa
MELETLISWLLFSTSLFWFLFLATKTKSKPPKTPSSTTNTPIPKSYPIFGSAFSLLANFHRRIQWTSDILQTIPSSTFVLHRPFGARQVFTAQPAVVQHILRTNFTCYGKGLTFYQSINDFLGDGIFNADGESWKFQRQISSHEFNTRSLRKFVETVVDVELSDRLVPVLSQASNSQTTLDFQDILQRLTFDNICMIAFGYDPEYLLPSLPEIPFAKAFDESSQLSIERLNALIPLLWKVKRFLNIGVERQLKEAVAEVRGLATKIVKNKKKELKEKALQSESESVDLLSRFLSSGHSDESFVTDMVISIILAGRDTTSAALTWFFWLLSKHSHVENEILKEITGKSETVGYDEVKDMVYTHAALCESMRLYPPLPVDTKVAVHDDVLPDGTLVKKGWRVTYHIYAMGRSEKIWGPDWAEFRPERWLSRDEVGKWSFVGIDYYSYPVFQAGPRVCIGKEMAFLQMKRVVAGIMGRFRVVPAMVEGIEPEYTAHFTSVMKGGFPVKIEKRSPLV

SEQ ID NO: 2928 - protein, 216 aa, Schizosaccharomyces pombe
MASGAPPSVDLTSIQWRMPEWVQSMGGLRTENVLEYFSQSPFYSHKSNNEMLKMQSQFNALDLGDLNSQLKRLTGIQFVIIHERPPFLWVIQKQNRLNENEVKPLTVYFVCNENIYMAPNAYTLLATRMLNATYCFQKALTKIEKFPQYNPQEGYTYPKLSNDNLEVDHSNTNEPADENKNQSIENADYSFSPEDFSVVRAFMQSLHSSKEAPDVK

SEQ ID NO: 2929 - protein, 78 aa, Gossypium hirsutum
PKRPAGRKKFRETRHPVYRGVRRRNPGKWVSEVREPNKKSRIWLGTFPKADMAARAHDVAAIALRGKSACLNFADSAW

SEQ ID NO: 2930 - protein, 119 aa, Triticum aestivum
MAQDMPPKGGYEPVQYKRNLPARGLRPGILLLGMGAVMGYGWYKLIGGMREMNELGREKMWARINLIPVLQAEEDRDQVRRYLADQKREKELLGDNAKVYNSNRFVRPTFAVTPPPTTN

SEQ ID NO: 2931 - protein, 167 aa, Atriplex nummularia
MSSARTVRKDKPRGRHHGLTQQKRQEIKEAFELFDTDGSGTIDAKELNVAMRALGFEMTEEQINQMIADVDKDGSGAIDFDEFCHMMTAKIGERDTKEELMKAFRIIDQDNNGKISPEDIQRIAKELGENFTVKDIQDMIEEADRDRDGEVNVEEFLRMMKRTSYAY

SEQ ID NO: 2932 - protein, 242 aa, Pasteurella multocida
MQGKIALVTGATRGIGRAIAEELSAKGAFVIGTATSEKGAESISAYLGEKGKGLVLNVSDLASIETTLEKIKADFGEIDILVNNAGITRDNLLMRMKDEEWFDIMQTNLTSVYHLSKAMLRSMMKKRFGRIITIGSVVGSMGNPGQTNYCAAKAGLIGFSKALAKEVASRGITVNVVAPGFIATDMTDVLTEEQKAGILSQVPAGRLGDPKDIAKAVAFLASDDAGYITGTTLHVNGGMYTN

SEQ ID NO: 2933 - protein, 337 aa, Zea mays
MRPDTAASASPTPKKKPDSKAALDLASWSFNVTTSVGLIMVNKALMATYGFTFATTLTGLHFATTTVMTLVFRWVGLSQPSQLPLPDLAKFVVFSNLSIVGMNVSLMWNSVGFYQVAKLCMIPASCLLEVVLDRVHYSRDTRLSIAVVLAGVAVCTVTDVSVNARGLVAAVVAVWSTALQQYYVHFLQRKHSLNSFSLLGHTAPAQAGSLLLAGPFVDYLLTGQRVDHFSFSSLALLFLALSCFIAIGVNLSQFICIGRFSAVSFQVLGHMKTVLVLSLGFLFFGKEGLSLQVVVGMALAVLGMVWYGNASAKPGGKERRGKDLPVSLKQDKDDTDK

SEQ ID NO: 2934 - protein, 427 aa, Oenococcus oeni MCW
MPALRWQFLFLLAAIISGISGMAYSEFASALPVAGSAYSYGSVIFGQVVVGWFLGWSLILEYFLATSAVSVGFSSYLAGLLQTDHISGFNSILAGPMEGGIINLPAVVLLLVILGIQIIGLSTTRWVENVFVAIKLAILAIFIIVGLFFIKSNNYVPFYPKEFQTGAFGLSGIWMATSGIFFAFIGFDTLAAHTAEVKNPKKQVARGIIYTVIVAAVLYTLFAIVLTGMVNYTKLNVSDPASFAFTFVGQKGLASVIGIGSMIGMFTGVLALVFASSRLIYSFGRDGLLPNFIGKISGSQHVPFNALLIAGVVEIILAGFVPLSYLASLINAGTLAAFTFVNFGIIPLRHRTDLPNENGFRVPGYPIIPIIGGLTSFFFITQLETKTLVMFGVWTLVGLLIYFTYGVRHSMVKESKFDQSIIKENNA

SEQ ID NO: 2935 - protein, 516 aa, Escherichia coli O157:H7 EDL933
MFMATYMTFSLKQSGRAMSKHDTDTSDQHAAKRRWLNAHEEGYHKAMGNRQVQMIAIGGAIGTGLFLGAGARLQMAGPALALVYLICGLFSFFILRALGELVLHRPSSGSFVSYAREFLGEKAAYVAGWMYFINWAMTGIVDITAVALYMHYWGAFGGVPQWVFALAALTIVGTMNMIGVKWFAEMEFWFALIKVLAIVTFLVVGTVFLGSGQPLDGNTTGFHLITDNGGFFPHGLLPALVLIQGVVFAFASIEMVGTAAGECKDPQTMVPKAINSVIWRIGLFYVGSVVLLVMLLPWSAYQAGQSPFVTFFSKLGVPYIGSIMNIVVLTAALSSLNSGLYCTGRILRSMAMGGSAPSFMAKMSRQHVPYAGILATLVVYVVGVFLNYLVPSRVFEIVLNFASLGIIASWAFIIVCQMRLRKAIKEGKAADVSFKLPGAPFTSWLTLLFLLSVLVLMAFDYPNGTYTIAALPIIGILLVIGWFGVRKRVAEIHSTAPVVEEDEEKQEIVFKPETAS

SEQ ID NO: 2936 - protein, 157 aa, Zea mays; identical to SEQ ID NO: 642

SEQ ID NO: 2937 - protein, 352 aa, Pseudomonas aeruginosa PAO1
MKALRWHAARDLRLSELERQAPRPGEVELEVAYCGICGSDLHEYQSGPHSIPQAEAHPLSGCRAPLTLGHEFCGVVAALGPGVEGPRIGDRVAVEPEYRCGECRYCREGRYNLCESMGFIGLMGDGGFAERARVPAYMLHRLPDAVGFRQAAVLEPAAVALHALRRSSLAPGQRCAVFGLGPIGLLLVMLARLRGIEDIAAVDVSPERLALAGEFGASRALDARDGDTAARLREGGALDCAFEAAGSQASLDAALASLRKGGELVLVSLMGEVRLDAFDLVNRELRLLGSVGYRDAYPELIALLADGRLDLARAVTRSVPLEQAVEHGFEALLRDKSQLKVLVNPNPALADA

SEQ ID NO: 2938 - protein, 504 aa, Arabidopsis thaliana
MVVINSLRRLARTTQVHLHSKYATCMSGNSTSRRIFTTEAAPEKKNTVGSKGHDMLAPFTAGWQSADLDPLVIAKSEGSYVYDDTGKKYLDSLAGLWCTALGGNEPRLVSAAVEQLNTLPFYHSFWNRTTKPSLDLAKVLLEMFTANKMAKAFFTSGGSDANDTQVKLVWYYNNALGRPEKKKFIARKKSYHGSTLISASLSGLPPLHQNFDLPAPFVLHTDCPHYWRFHLPGETEEEFSTRLAKNLEDLIIKEGPETIGAFIAEPVMGAGGVIPPPATYFEKVQAVVKKYDILFIADEVICAFGRLGTMFGCDKYNIKPDLVTLAKALSSAYMPIGAILMSQEVADVINSHSSKLGVFSHGFTYSGHPVSCAVAIEALKIYKERNIPEYVAKVAPRFQDGVKAFASGSPIIGETRGTGLILGTEFVDNKSPNEPFPPEWGVGAFFGAECQKHGMLVRVAGDGILMSPPLIISPEEIDELISIYGKALKATEEKVKELKAQHKK

SEQ ID NO: 2939 - protein, 137 aa, Oryza sativa
  unsure (1)..(137): unsure at all Xaa locations
XITEPIKAGIRDAKLGVGKQEQDDFFTSEDNVQRRKLNIELEETEEHIKKRERFKEMKEMHSSSSRDDRQKREQQREEKELAKFAQLYPSHVLQQQQKQEPSESSSERITMKNLPNPSNQDQRKTLKFGFSKMAPSK

SEQ ID NO: 2940 - protein, 332 aa, Zea mays
MSTLKKSDKKAALDFAAWSFNVTTSVGLIMVNKALMATYGFSFATTLTGLHFVTTTLMTILFRWLGLSQPSHLPLADLVKFVIFSNLSIVGMNVSLMWNSVGFYQIAKLCMIPASCLLEVVFDHVHYSRDTKLSIMVVLIGVAVCTVTDVSVNARGLIAAVIAVWSTALQQYYVHFLQRKYSLNSFNLLGHTAPAQAGSLLLVGPFADYLLTGKRVDQFSLSSLALFFLALSCFIAIGVNLSQFICIGRFSAVSFQVLGHMKTVLVLSLGFLFFGKEGLNLQVVLGMVLAVLGMIWYGNASAKPGGKERRSILPVRSASLKGSSEEKAGAEK

SEQ ID NO: 2941 - protein, 486 aa, Glycine max; identical to SEQ ID NO: 2584

SEQ ID NO: 2942 - protein, 108 aa, Oryza sativa
  unsure (1)..(108): unsure at all Xaa locations
XDCCGDPSFIGKIGSGIQGVKCSWLVGQALQRAYEGQKSVLFANYANKDPACVPTVKSLFRVLTLWAVFVGYETESCKQFLPHIGAQPSIAVQNVLKPFLHEICQTHT

SEQ ID NO: 2943 - protein, 400 aa, Bacillus halodurans
MKMQSSTSAVIEKTEKYGAKNYHPLPIVISEAKGVWVKDPEGRKYLDMLSAYSAVNQGHCHPKIIQALKDQADKITLTSRAFHNDQLAPFYEKVSKLTGKNMLLPMNTGAEAVETAVKAARRWAYDVKGVPDNQAEIIVCEDNFHGRTMTAVSLSSNDEYKRGFGPMLPGIKVIPYGDLEALKAAITSHTAAFLVEPIQGEAGIRIPQEGFLKEAYALCKRENVLFIADEIQSGLGRSGKWFACDWEDVKPDMYILGKALGGGVFPISVVCADRDILGVFEPGSHGSTFGGNPLACAVSIAALEVLEEEKLVERSYEYGNYLLTKLKEIDNPIIKDVRGRGLFIGVELHEPARKYCEQLKEEGLLCKETHETVIRFAPPLVISKEDLDWAIEKIYYVLKP

SEQ ID NO: 2944 - protein, 112 aa, Triticum aestivum
GANPVDQSDSATVQAAEMRATGSNLTVPGGVAAAVQAAADQNERAAREEDKVKLRDVLSDARSKLPADKGATREDAERVVSADMRNKLDLTTTPGGVAEAVTTAARLNQERP

SEQ ID NO: 2945 - protein, 291 aa, Zea mays
PRPPAEPSKKPSPFSTSEIWAWSAIFVASFGVACFNPTAFGTTARTCLPFLLAANVLGYMVGSGLPPGVKKVLHPIISCALCADFAALAYGYISGFGLDAVLGAYLTKVPSNPGAGDVLMTFLGSVIISFAFSIFKQRKLVKRHATEIFTSIAIASTFSLYSTAIIGRLIGLEPSLTISILPRCITLALALSIVSFFEGVNSSVTAVVVVLTGLIGANFVLAAMEKLGLNDPISRGVGTASSAQGLGTAALAAKEPEALPFCAIAYSFTGIFGTLICSVPAVRQSLIFIAG

SEQ ID NO: 2946 - protein, 460 aa, Pseudomonas putida KT2440
MQSHGLKQSLKQRHITMIALGGVIGAGLFMGSGSLIASAGPAAILSYFIGGLVVTLVMFMLGEMACRNPDAGSFSTYANTYLGDWAGFAVGWLYWFKSMMTITLEAVLLGAILHDFLPWLPIWAGAFLMLVTLMASNAYSVRSFAEVEYWLAAMKVATILIFMLLGVSILLGLHSDIPAPGLINLTAHDGFMPNGLSPVMAGVIVVIFSLGGSEIAAVAAGESENPRQNVIRAIKSVILRVMLFYVGSVSILILCLPWTDKANLASPYVSLFSLAGFGGAAVAMKLVLFVSFMSVMNSFMFSNSRMLFSLSQRGHAPKLFSRTSAKGVPINALLLSLSICTMILTVHFVSGGDLFMTLAKSTGSLVMVVWIFIIIAHVAMRIKTRHEAVAPNAFRAWLFPYTNIIALFALLAVIGTQAFDPASRFQFWFTVLTVLLVVAGYFLMRQRLASSAVLAHERDA

SEQ ID NO: 2947 - protein, 327 aa, Rhodopseudomonas palustris
MTRRHILVTGGAGYIGSHMTLALLGAGERPLVIDNLSTGSRAIVPTDVPFFEGNVGDADFVGRIMDEHPIEAIIHFAASIVVPESVTQPLAYYGNNTANARTLLECAVNHGVPHVVFSSTAAVYGEPDRTPVEEDDPTRPINPYGRSKLMVEWMLADIAQAYPFSYAALRYFNVAGADPQGRAGQSTPNATHLIKIAVQAALGKRSGLDVYGTDYSTPDGSCIRDYVHVSDLAQAHLDALDYLRAGKPSITCNIGYANGYSVLDVINVVKRVSGVDFEVRIKGRRAGDPAALIAANQRARTALSWTPRYDDLEQIVRDALAWERRLG

SEQ ID NO: 2948 - protein, 305 aa, Kluyveromyces lactis
MSTDKKQSNFAIDFLMGGVSAAVSKTAAAPIERVKLLIQNQDEMIKQGSLDRRYTGIVECFKRTAADEGVASFWRGNTANVIRYFPTQALNFAFKDKIKAMFGFKKEEGYAKWFAGNLASGGLAGGLSLLFVYSLDYARTRLAADSKSAKKGGERQFNGLVDVYKKTLASDGVAGLYRGFLPSVVGIVVYRGLYFGLYDSLKPLLLTGSLENSFLASFLLGWAVTTGASTASYPLDTVRRRMMMTSGQAVKYDGAFDAFRKIVAAEGIKSLFKGCGANILRGVAGAGVISMYDQLQVILFGKTFK

SEQ ID NO: 2949 - protein, 177 aa, Zea mays
  unsure (1)..(177): unsure at all Xaa locations
MTGSMDLPAKGGFSFNLGRRNNMLEKNGLKVPGFRKTGTTIVGLVFQDGXVVLGANTRATEGPIVADKNWEKIHFMAPNIYCCGAGTAADTEAVTDMGSSQLQFHRYATGRESKVETALTLLKSHLFKYQGHVRVALVLGGGDCTGPHLHTVYPHGPTDTLPFATMGSGSLAAMPGF

SEQ ID NO: 2950 - protein, 283 aa, Streptococcus pneumoniae R6
MATIQWFPGHMSKARRQVQENLKFVDFVTILVDARLPLSSQNPMLTKIVGDKPKLLILNKADLADPAMTKEWRQYFESQGIQTLAINSKEQVTVKVVTDAAKKLMADKIARQKERGIQIETLRTMIIGIPNAGKSTLMNRLAGKKIAVVGNKPGVTKGQQWLKTNKDLEILDTPGILWPKFEDETVALKLALTGAIKDQLLPMDEVTIFGINYFKEHYPEKLAERFKQMKIEEEAPVIIIDMTRALGFRDDYDRFYSLFVKEVRDGKLGNYTLDTLEDLDGND

SEQ ID NO: 2951 - protein, 308 aa, Zea mays
  unsure (1)..(308): unsure at all Xaa locations
MGGGTPRSSIGHILPGAGFLAVGLWHLFNHIRLFSLRPDAYVAPVWFPAPRVRHLELILVIAGSAAEFSMEMFVDHSTFLPFDADGSIPSDRLHNHEHAIICLALLVYAASALHLDRARARCRDALSLLLVAAVFAQELLVFHFHSTDHXGLEGQFHWLLQLVVAACLATALLGIGFPRSFAVSWVRSACVTFHGVWFMVIGAMVWVPSRVPKGCSLVEEDGRNTVRCHSEASLHRAKALANLQFGWYLSSMTVFVVVLYVNVCKWYPAETAYVRLPPEAGEEEEHLKRKCGIVCSGDHGFTPLEIEV

SEQ ID NO: 2952 - protein, 580 aa, Oryza sativa
  unsure (1)..(580): unsure at all Xaa locations
MSSAAGGGGGYGGGGGEHQHQQQQHHLLLGXXAAGQLYHVPQHSRREKLRFPPDHPAESPPXXPPPGSWPLPPAFYSYASSSSSYSPHSPTLAHAQLVAHGMPPGXPRPQIPSQNFALSLSSASSNPPPTPRRQFGGPGGGGGAAGPYGPFTGYAAVLGRSRFLGPAQKLLEEICDVGGRPAQLDRGSDEGLLDVDAMDAAGSVDHEMDGSDRAVADAVTVSGAEQQWRKTRLISLMEDVCKRYRQYYQQLQAVVSSFETVAGLSNAAPFASMALRTMSKHFKYLKGIILNQLRNTGKGATKDGLGKEDTTNFGLMGGGAGLLRGNNVNSFSQPHNIWRPQRGLPERAVSVLRAWLFEHFLHPYPTDSDKQMLAKQTGLTRNQVSNWFINARVRLWKPMVEEIHNLEMRQLQKNPSLDKNQLSMQHXXQHSSDSSGKPCDPSNSLQGQSSSMTRNHSISASRHIEDGLSQMPHDISGQVSFAYNGLAAHHSIAMAHHHQPDLIGTGGAANAGGVSLTLGLHQNNNRAYIAEPLPAALPLNLAHRFGLEDVSDAYVMSSFGGQDRHFTKEIGGHLLHDFVG

SEQ ID NO: 2953 - protein, 319 aa, Zea mays
MMESQPLQAPTATAPAPGSAEPAGAPPAVTPGKEFTRTCKGLVVVLIGGYVLLQLLPSSLNYLAIIPSKTIPYVWTVFTAGYIEQVLPGAIGSSLGLLFCGKDIEPAWGRKEFLKFIILINSICGILAFCFAIGLYYVTGKESFLVTPLSGFHGCLAGFLVALKQLLPNLELPMCFFWKIKAKWMPFFVVCFSSIMAFIVPDSINFLPTLVSGMYVSWLYLRYFQRNPLTGLKGDPSDDFSFPSLFPAAMRPVTDPVANLFDRLLCARSRTLEVALPISDPTKASRRRERGERVLEERLAADNAGDTEASPRGHGTAED

SEQ ID NO: 2954 - protein, 385 aa, Thermotoga maritima
MYLMNTYSRFPATFVYGKGSWIYDEKGNAYLDFTSGIAVNVLGHSHPRLVEAIKDQAEKLIHCSNLFWNRPQMELAELLSKNTFGGKVFFANTGTEANEAAIKIARKYGKKKSEKKYRILSAHNSFHGRTLGSLTATGQPKYQKPFEPLVPGFEYFEFNNVEDLRRKMSEDVCAVFLEPIQGESGIVPATKEFLEEARKLCDEYDALLVFDEVQCGMGRTGKLFAYQKYGVVPDVLTTAKGLGGGVPIGAVIVNERANVLEPGDHGTTFGGNPLACRAGVTVIKELTKEGFLEEVEEKGNYLMKKLQEMKEEYDVVADVRGMGLMIGIQFREEVSNREVATKCFENKLLVVPAGNNTIRFLPPLTVEYGEIDLAVETLKKVLQGI

SEQ ID NO: 2955 - protein, 439 aa, Brassica rapa
MLLESDGEMSLETTNSPISSGTESCSSFSRLSFDAPPSTTAIIPEEESCLSLKPHRSSDFAYAEILRRRKHSLTFRDFRLMRRIGAGDIGTVYLCRLAGDQEESRSSYFAMKVVDNEALAMKKKMHRAEMEKKILKMLDHPFLPSLYAEFEASHFSCIVMEYCSGGDLHSLRHRQPQHRFSLSSARFYAAEVLVALEYLHMLGIIYRDLKPENILVRSDGHIMLSDFDLSLCSDSIAAVESSSSTPENYPHSSPRRLTRLAKLFNRVLRSKKVQTLEPNRLFVAEPVTARSGSFVGTHEYVAPEVASGGSHGNAVDWWAFGVFLYEIIYGRTPFAAPTNDVILRNIVKRPLSFPTDSPATMFELHARSLISGLLNKDPSTRLGSRRGAAEVKVHPFFKGLNFALIRTMTPPEVPSDVRRPKKSATFGGRSSKPAAFDFF

SEQ ID NO: 2956 - protein, 228 aa, Triticum aestivum
MKKIFGAKKSRDPPPTIQDATNQINKRGESVDEKIKKLDEELARYKEQIRKARPGPSQEAIKARAIRLLKHKRMYEEQRNMLYNQTYNLDQVGFAADGLKDAQQTMGAMKAANKELKGMMKTVKIEDIDNMQDEMTDLMDVSNEIQESLGRSYNIPDDVDEEDLMGELDALEADMEFESAAVPSYLQPDEESDLNLPAAPTYPAAVPVSRHQEDELGLPPVPRASLRS

SEQ ID NO: 2957 - protein, 498 aa, Oryza sativa
  unsure (1)..(498): unsure at all Xaa locations
XAMEADEDDVGLLEEDDLHLRLPDDRPADCWAITQESLPAAQQQDLSMVMNLLNIKQHLARTLLIHHRWKMHCIYDHLDRKGRDRMLSEACIILPKNSMSAASSTSVTCNVCFEDFSMTDVSTMDCGHCFCNDCWTEHFFASINTGNKQIRCMEVKCKAICDEDIVRRLLSLKYPAASKRFDLLLLESYLEDNDSVKWCPSAPHCGRAIQVGSERYCEVACPCGVSFCFNCAGQVHSPCPCAIWEKWKAKGHGDSDSVKWILANTKSCPKCSKPIEKNGGCNLVHCKCGQCLCWLCGGPTGREHTWDSISGHSCNRYKEENGDKVDTSRQQMQRYTHYWDRYNIHAGSYKVEQKDLGPAVEEQVKKLESNLTGPKMNWDGSWLAMAYQSLLASRQVLSRSYAFAYYMFGGGEVKTHPSERASLAVAQNLFEDRQEQLERHVEHLSKELATDLLGLPEEEIVLKKVEIANLAKIVQAICGQLYRCIQDELLPLLVQPMX

SEQ ID NO: 2958 - protein, 62 aa, Brassica napus
MRGILVDWLVEVAEEYTLVPDTLYLTVYLIDWFLNGNYVERNRLQLLGVTCMLIASKYEEIY

SEQ ID NO: 2959 - protein, 465 aa, Spathiphyllum clevelandii
SGKPFYAIMHRIDMGLIIDLEPVNPADVPVTAAGALKSYKLAAKAISRLQSLPSGNISLLCDVLVREVRELTGYGRVMAYKFHEDEHGEVVSECRRPDLEPYLGLHYPATDIPQASRFLFMKNKVRMICDCSAQPIKVIQDKRLAQPLSLCGSTLRAPHGCHAQYMANMGSIGSLVMSVTINEDEDDDSSGEQQQKGRKLWGLVVCHHTSPRFVPFPLRYACEFLMQVFAIQLNKEVELAAQTREKHILRTQTLLCDMLLRDTPVGIFTQSPNVMDLVKCDGAALYYQNQFWLLRVTPTEAQIRDIAAWLIDCHNSTTGLSTDSLSEAGYPSASTLGDAVCGMAAIKITSRDLIFWFRSHTAKEIKWGGAKHDPVDRDDDGRKMHPRSSFKAFLEVVKRRSLPWEDVEMDAIHSLQLILRSSLQDENVRDNSKGIVNVISDDAKKIQGVDELRTVANEMVRLMET

SEQ ID NO: 2960 - protein, 589 aa, Candida albicans
MTRTTRIDTQEATKHKDLPPVPSPLSLSSNPNPECLMESKSLGRKNFKKLSLDASPVKSTSGSLRSSDMMLIKEPTSLRQKRQRPPPILHLPTASSSATSTPTSNITGSSSASSIQFAQKSPGSGVIVSQTLSRPSSAGGIPSSGYSSLNVNQSNRNVDPDNVVSTDMILNQISNLDLTSMNHHRQHYQNSHHHLPTTNRKRQTVISSISPTKSSAASSPLEPQIQLLPASSQSPIATTSALKLNNKDLLTLKQLGSGNSGSVLKILHIPTQKTMAKKIIHIDLKSVIQTQIIRELRILHECHSPYIIEFYGACLNNNNTIVICMEYCNCGSLDKILPLCENKQFPTFVLKKLSFAILSGLTYLYTTHKIIHRDIKPNNVLMTHKGEFKLCDFGVSRELTNSLAMADTFVGTSMYMSPEEIQGLDYGVKSDVWSTGLMLIELASGVPVWSEDDNNNDDDEDDEDDAYVRQGSIAAERNGQNIPSRSRKNKQKGNGYNSYNGPEGILDLLQRIVNEDAPTLTNKINPVTKLPYDKYLCQFIDLCLIKDDSVRKTPWQLLEDKEHFFKGVEEGVYDKEHKSWAKKIRKCKV

SEQ ID NO: 2961 - protein, 294 aa, Halobacterium sp. NRC-1
MRVLVHGGAGAPPDAPAPRQDTLETAADTGASHATPVDAVTAAVRVLERDPAFNAGTGATPQSDGVIRTDAGMMTSDRAAGAAASMPGVEAAVAVARAVMADTPHVLLSGVHAVDFAADTGIPVESDLWTADTRARWDDLDSHPDGSPTDHRDWVRERFGRTDPGGRESPPGDHDTVGAVASDGDRFATATSTGGRWLALAGRVGDVPQIGAGFYAAPAGAASATGAGEAIAKTTLSRRAVRHLEAGLGAQAAADRAIEEFSELTGASAGVIVVDRDGGCGTAHNAAAMQTARH

SEQ ID NO: 2962 - protein, 419 aa, Oryza sativa (japonica cultivar-group)
MASYCYYGNTSNPNPNPNPSPAPSAPPLYPTLSMADLAPVQIGPSSPSSPMSPASPATPVDAYANAPPPSEDVLLRIPGAQLHLIDRHRSYPLAAGDLSLLRIRSGDTSLAAIALLHPIQWPLARDVASVKLDPCHYSFSLTVPPSADDPNPGPLHYGLTLSHPDPRLDGILATYTSFSVQSVVGGEALASKVRDEVEAAAYWTAVAPNVEEYGGKVANAIATGAGHLAKGILWCSELTVDRLRWGNEVLKRRMQPGDADAEVSPEMLRRIKRVKMVTKMSEKVATGILSGVVKVTGYFTNSIANSKAGKKFFNLLPGEIVLASLDGFGKICDAVEVAGTNVLSTSSTVTTGLVSHKYGEKAAAATNEGMDAAGHAIGTAWAVFKIRQALNPKSVLKPTSLAKSTIKAAAADYRAKQKK

SEQ ID NO: 2963 - protein, 306 aa, Candida albicans
MTDSKYDYSDITPVDINTEEPQICQILYDEDYKQIMGLLLALMKAEEYSERALHITELGINELASHYTIWIYRFNILKNLPNRNLYDELDWCEEIALDNEKNYQIWNYRQLIIGQIMELNNNDFDPYREFPILEAMLSSDPKNHHVWSYRKWLVDTFDLHNDAKELSFVDKVIDTDLKNNSAWSHRFFLLFSKKHLATDNTIDEELNYVKDKIVKCPQNPSTWNYLLGIHERFDRSITQLEEFSLQFVDLEKDQVTSSFALETLAKIYTQQKKYNESRTVYDLLKSKYDPIRSNFWDYQISKLTSV

SEQ ID NO: 2964 - protein, 372 aa, Triticum aestivum
  unsure (1)..(372): unsure at all Xaa locations
RPSQSTQPPRTKKKQRERERRKPRSLSPTAPRREPSRASMGSSSGEEGEEEWVPPSRRPELADVAPLPQADGPCPVVSIAYRGDFREVMDSFRALYAAGERSPRALRLTADAIHLNPGNYTVWHFRRVVLEALDADLLLEMHFVDQIAESNPKNYQVWHHKRWLAMRKXDPDAANSEHDFTRKILAMDAKNYHAWSHRQWVLQALGGWESELQYCNQLLEEDVFNNSAWNQRYLVVTRSPILGGLAAMRDSEVDYTVEAIMVNPQNESPWRYLRGLYKDDNNLLVADNRISDACLKVLNKDWTCVFALSFLLDLLRMGLQPSDELKGTIEAMENSDPETGHADIAVAVCSILQKCDPLRINYWSWYQTTLSS

SEQ ID NO: 2965 - protein, 380 aa, Washingtonia robusta
MSSTAGKVIKCRAAVAWEAGKPLVIEEVEVAPPQAMEVRMKILYTALCHTDVFFWEAKGQNPLFPRILGHEAGGIVESVGEGVTDLAPGDHVLPVFTGECRECAHCLSEESNMCELLRINTDRGVMINDGKSRFSINGKPIYHFVGTSTFSEYTVVHSGCVAKINPLAPLNIVCILSCGISTGLGATLNVAKPTKGSTVAVFGLGAVGLAAAEGARLAGASRIIGVDLNPRRFHEAKKFGVNEFVNPKDYNKPVQEVIAEMTNGGVDRSIECVGNIDAMVSAFECVRDGWGVAVLVGVPHKDAMFKSHPVNFLNERTLKGTFFGNYKPRSDLPAVVEMYMNKELELEKFITHEVPFSEINKAFDYMASRGQLRCIIRMDG

SEQ ID NO: 2966 - protein, 369 aa, Acinetobacter baumannii
MKSRAAVAFAPGKPLEIVEIDVAPPKAGEVLIKITHTGVCHTDAFTLSGDDPEGVFPAILGHEGAGVVIEVGEGVTSVQPGDHVIPLYTAECKECLFCKSGKTNLCVAVRATQGKGVMPDGTTRFSYKGEPIYHYMGCSTFSEYTVVAEVSLAKINPEANHEQVCLLGCGVTTGIGAVHNTAKVQEGDSVAVFGLGGIGLAVVQGARQAKAGRIIVVDTNPDKFELAKQFGATDFLNPKDYDQPIQQVIVEMTGWGVDHSFECIGNVNVMRSALECAHRGWGQSVIIGVAGAGQEISTRPFQLVTGRKWLGTAFGGVKGRSQLPKMVEDAMKGDIQLEPFVTHTMPLQDINTAFDLMHEGKSIRTVIHF

SEQ ID NO: 2967 - protein, 537 aa, Pseudomonas putida KT2440
MSGKFKKQLSLLDLTFIGLGAIFGSGWLFAASHVSAIAGPAGILSWFLGGFAVLLLGIVYCELGAALPRAGGVVRYPVYSHGPLLGYLMGFITLIAFSSLIAIEVVASRQYAAAWFPGLTKAGSSDPTVLGWLVQFALLGLFFFLNYRSVKTFAKANNLVSVFKFIVPLLVIGVLFTFFKPENFEVQGFAPFGLSGVEMAVSAGGIIFAYLGLTPIISVASEVKNPQRTIPIALILSVLLSTAIYALLQLAFLGSVPTEMLANGWASVTKELALPYRDIALALGVGWLAYLVVADAVISPSGCGNIYMNATPRVIYGWAQTGTFFKYFTRIDAESGIPRPALWLTFGLSVFWTLPFPSWEALINVVSAALVLSYAVAPVSVAALRRNAPHMPRPFRVKGMTVLGPLSFIIAALIVYWSGWNTVSWLLALQIVMFVLYLLCSRFVPTQHLSLGQQVRSSAWLIGFYALTILLSWLGSFGGLGVIGHPFDTVVVAACALGIYYWGAATGVPAHLVRLEGDDESEACAETSNGRPVAVAS

SEQ ID NO: 2968 - protein, 793 aa, Neurospora crassa
MDEIVECKPAPAADLRELNEKYDIQHVAPIETKTAAIAKDGSVDAESADITTDTTVDTPLQLVTKTLDTSDDPTENIYTFRAFVLGLGLSAFGAVLGEIFYFKPQTVNVSIVFLIMIAYCLGEATVLIPRWGPVGRFLNPGPFTQKEHVFIVIMASSAATCALGTEQLAAQSLYYGNQPNAASAIFMLFSSQCIGYGLLGGIRKAFIYPTKFVWPSQLPNAALFQSMHLNKELAKKRLKIFWCICLAVMVWEIVPQWMFPLTTGISIFCLANQDSAFFTRLFGGANGNEGMGFLSWCMDWQYIGEKEFTLPLSTLVNQLIGYIGCIALTLGAYYSNLWDAKRFPFMAQSLFTSNGTVYDQTQILGPDNQVDPAALQAYGLPRFATSKALSLLMKNMGITAAVVHVILWNWHDIKFIFGPFRPSTWKQNVQKARTWWHHGFSSSFWKNFTSDADTPRKEYPGTEGDPHYAAMRAYKEVPSLWYLSILAISIMIGLICCYQQKTGLPWWAFLLAVLLAWILTIFFACMYGIVGFYYQPTSAVQMIGAYMVPRRPVANMMFTLYGSNALVQAIQMLGDLKLAQYAKLPPRATFLAQILGTCAGSVFNWVMMNSIVDNRRDILLSVQGTNVWSGQNVQTYNSQAVAWGGTANEILYHSGRHGTYWMVPMGLFFGIFAPLPFWIGHKYFPQLRLNHINTFLICTWLGWLSVGINSSLLAYFVFGFFSQGYLRRYKPALFAKWNNICAAAIAGGCSLIIFILTFAVAGGSGKARDFPKWWGNNMDGNVDRCKYMYLNGK

SEQ ID NO: 2969 - protein, 376 aa, Aquifex aeolicus VF5
MTYLMNNYARLPVKFVRGKGVYLYDEEGKEYLDFVSGIGVNSLGHAYPKLTEALKEQVEKLLHVSNLYENPWQEELAHKLVKHFWTEGKVFFANSGTESVEAAIKLARKYWRDKGKNKWKFISFENSFHGRTYGSLSATGQPKFHKGFEPLVPGFSYAKLNDIDSVYKLLDEETAGIIIEVIQGEGGVNEASEDFLSKLQEICKEKDVLLIIDEVQTGIGRTGEFYAYQHFNLKPDVIALAKGLGGGVPIGAILAREEVAQSFTPGSHGSTFGGNPLACRAGTVVVDEVEKLLPHVREVGNYFKEKLKELGKGKVKGRGLMLGLELERECKDYVLKALEKGLLINCTAGKVLRFLPPLIIQKEHIDRAISVLREIL

SEQ ID NO: 2970 - protein, 197 aa, Oryza brachyantha
GQTPVFPRILGHEAGGIVESVGEGVTELAPGDHVLPVFTGECKECAHCKSEESNMCDLLRINVDRGVMIGDGQSRFTIGGKPIFHFVGTSTFSEYTVIHVGCLAKINPEAPLDKVCILSCGISTGLGATVNVAKPKKGQTVAIFGLGAVGLAAMEGARLSGASRIIGVDLNPAKFEQAKKFGCTDFVNPRDHKKPVQ

SEQ ID NO: 2971 - protein, 321 aa, Oryza sativa (japonica cultivar-group)
MASRRAPPPLPTSRGHPASSSPASGRPRPPGDLLPRSRPAVATRRPLYILQHGHTEDVAGDSYSPYMCTPFEETACKRSKNLHQFSRDSHHFHQPTTCHVHEGDSWQTRLPRRPMQQGKATKRLSPLIKLKLLLTASLATMSNTTEKKMPQQQQVERPTALAPADAEIERVFTRFDADGDGRISPSELAAVTRAIAPPPSESAGGREVAAMMNELDTDRDGFVDLGEFAAFHGRGRGDAEHEAELRAAFDVYDVDGDGRITAAELGKVLGRIGEGCSAEECERMIASVDVDGDGCVGFEEFKKMMCRDAAATGGADKAKTE

SEQ ID NO: 2972 - protein, 104 aa, Triticum aestivum
LWHPDCNTNSIYITSNQDLIISYCKAEPDDPSSEDNACSINISEILTGKCMAKIKAGNLCKQKSSKFLCTPLEALGDITSLYYDEEREEIITGNHQGLIHVWSN

SEQ ID NO: 2973 - protein, 305 aa, Miscanthus condensatus
IESVGEGVTDVAPGDHVLPVFTGECKECAHCRSAESNMCDLLRINTDRGVKIGDGKSRFSINGKPIYHFVGTSTFSEYTVMHVGCVAKINPEAPLDKVCVLSCGISTGLGASINVAKPPKGSTVAIFGLGAVGLAAAEGARIAGASRIIGVDLNPSRFEEARKFGCTEFLNPKDHKKPVQEVLAEMTNGGVDRSVECTGNINAMIQAFECVHDGWGVAVLVGVPHKDAEFKTHPMSFLNERTLKGTFFGNFKPRTDLPNVVELYMKKELEVEKFITHSVPFAEINKAFDLMAKGEGIRCIIRMEN

SEQ ID NO: 2974 - protein, 489 aa, Escherichia coli O157:H7 EDL933
  unsure (1)..(489): unsure at all Xaa locations
MVSETKTTEAPGLRRELKARHLTMIAIGGSIGTGLFVASGATISQAGPGGALLSYMXIGLMVYFLMTSLGELAAYMPVSGSFATYGQNYVEEGFGFALGWNYWYNWAVTIAVDLVAAQLVMSWWFPDTPGWIWSALFLGVIFLLNYISVRGFGEAEYWFSLIKVTTVIVFIIVGVLMIIGIFKGAQPAGWSNWTIGEAPFAGGFAAMIGVAMIVGFSFQGTELIGIAAGESEDPGKNIPRAVRQVFWRILLFYVFAILIISLIIPYTDPSLLRNDVKDISVSPFTLVFQHAGLLSAAAVMNAVILTAVLSAGNSGMYASTRMLYTLACDGKAPRIFAKLSRGGVPRNALYATTVIAGLCFLTSMFGNQTVYLWLLNTSGMTGFIAWLGIAISHYRFRRGYVLQGHDINDLPYRSGFFPLGPIFAFILCLIITLGQNYEAFLKDTIDWGGVAATYIGIPLFLIIWFGYKLIKGTHFVRYSEMKFPQNDKK

SEQ ID NO: 2975 - protein, 160 aa, Glycine max
HASAEIEWYPGKCLTQKVLKKKPKKGSKNAKPITKTESCESFFNFFKPPEVPEDDVDIDEDLAEELQNQMEQDYDIGSTIRDKIIPHAVSWFTGEAVEGDEFEDLEDDEDGDDDEDDEEEDEDEDDDDGDEEEEDSKTKKKKSGRAQAGDGERPPECKQQ

SEQ ID NO: 2976 - protein, 158 aa, Streptococcus intermedius
MTKIYDFSIFDQNNRSISLEIYKGNVLLIVNTATGCGLTPQYKGLQHLYTRYQNQGFEILDFPCNQFMGQAPGTAEEINRFCSLHYQTTFPRFAKVKVNGKEADPLYIWLKEQQAGPLGKRIEWNFTKFLINREGQVVKRFSSKAEPKEIEESLQKLL

SEQ ID NO: 2977 - protein, 229 aa, Vibrio cholerae
MSTSLLSLFCFLLTLLFYYASKFLYRRKRSLLLMPLLLAPLLLVIVVMMFHIPYQAYMADAHWLLWLLGPATVAFAVPVYDNRALLRQHWLSLSVGVVVSVLVAISSTVLLARWLNLPDLLQRSLAMRSITTPFAVEATKSIGGQSDLTALFVVLTGVIGMAVGEIILTVLSIRSRLGKGASLGASAHGAGTAKAYQIGNSEGVVSSVVMMLAGMVTVVIAPWIGRWFW

SEQ ID NO: 2978 - protein, 369 aa, Escherichia coli
MKSRAAVAFAPGKPLEIVEIDVEPPRKGEVLVKITHTGVCHTDAFTLSGDDPEGVFPAVLGHEGAGVVVEVGEGVTSVKPGDHVIPLYTAECGECLFCKSGKTNLCVSVRATQGKGLMPDGTTRFSYKGQPLFHYMGCSTFSEYTVVAEVSLAKINPQANHEHVCLLGCGVTTGIGAVHNTAKVQPGDTVAIFGLGGIGLAAVQGARQAKAGRIFAIDTNPEKFDLARSFGATDCINPKDYDKPIQDVLIELTGWGVDHTFECIGNVNVMRSALEAAHRGWGQSVVIGVAGAGKEISTRPFQLVTGRVWKGSAFGGVKGRTQLPGMVEDAMKGEIDLAPFVTHTMGLEEINDAFDLMHEGKSIRTVIHY

SEQ ID NO: 2979 - protein, 499 aa, Triticum aestivum
  unsure (1)..(499): unsure at all Xaa locations
MDTITVVENVFGEVERKVXQKSYWEEHSKDLTVESMMLDSRAKDLDKEERPEVLAILPSYAGKTVLELGAGIGRFTGELAKEAGHVIALDFIDSVIKKNEEINGDIYKNITFMCADVTSPELKIEDNSIDIVFSNWLLMYLNDEEVEKLIGRIVKWLKPGGHIFIRESCFHQSGDSKRKVNPTHYREPRFYTKVFKECHSYDQEGNSFELSLVTSKCIGAYVKSKKNQNQICWLWEKVKCTEDKGFQRFLDNVQYKSTGILRYERVFGEGYVSTGGFETTKEFVDKLDLKAGQKVLDVGCGIGGGDFYMAETYDVHVLGIDLSINMVSFAIERAIGRSCSVEFEVADCTTKEYAENTFDVIYSRDTILHIQDKSALFRNFFKWLKPGGKVLISDYCRSPGTPSEEFAAYIKQRXYDLHDVKTYGKMLEDAGFHDVVAEDRTDQFLRVLERELGETEKNKEAFLADFTQEDYDDIVNGWSAKLKRSSAGEQKWGLFIATK

SEQ ID NO: 2980 - protein, 402 aa, Vibrio cholerae
MRKLTILGATGSIGASTLKVIAQNPQQFSIVALVAGVNVAKMYQLCQQWRPKYAVMATASAASELQGLLKNQAMATEVLYGEEAMCQVAALDDVDTVMAAIVGAAGLLPTMAAVKAGKRVLLANKEALVMSGQLFIDAVAQSGAELMPVDSEHNAIFQCLPTEIQTQLGRCDLSQHGIDHILLTGSGGPFRYSDLATLDSVTPEQAIAHPNWSMGPKISVDSATMMNKGLEYIEAKWLFNTSREQLKVLIHPQSVIHSMVQYQDGSVIAQLGEPDMATPISYAMAYPERVTAGVPALDFTRLQQLTFMEVDFARYPCLQLAMDACFLGQHATTSLNAANEVAVDAFLKRKIRFTDIALINDQVLSKVCATNTQLHCRDLESLLELDTMARHFAHQVLKERQA

SEQ ID NO: 2981 - protein, 356 aa, Saccharomyces cerevisiae
MDDSVSFIAKEASPAQYSHSLHERTHSEKQKRDFTITEKQDEVSGQTAEPRRTDSKSILQRKCKEFFDSFKRQLPPDRNSELESQEKNNLTKSIKSRHLVMISLGTGIGTGLLVGNGQVLGTAGPAGLVLGYGIASIMLYCIIQAAGELGLCYAGLTGNYTRYPSILVDPSLGFAVSVVYTIQWLTVLPLQLVTAAMTVKYWTSVNADIFVAVVFVFVIIINLFGSRGYAEAEFIFNSCKILMVIGFVILAIIINCGGAGDRRYIGAEYWHNPGPFAHGFKGVCTVFCYAAFSYGGIEVLLLSAAEQENPTKSIPNACKKVVYRILLIYMLTTILVCFLVPYNSDELLGSSDSSGS

SEQ ID NO: 2982 - protein, 277 aa, Schizosaccharomyces pombe
MLVSSNEEQLTAHTPTSSSSIEPKILAACSYSLSVGPCSLAVSPKGVNSKSPSLKNETAFVVDSVSTLSAESSALLYNTQSSLLTGLSMNGYLGEYQEDIIHHLITREKNFLLNVHLSNQQPELRWSMRPALVNFIVEIHNGFDLSIDTLPLSISLMDSYVSRRVVYCKHIQLVACVCLWIASKFHETEDRVPLLQELKLACKNIYAEDLFIRMERHILDTLDWDISIPTPASYIPVLDPIFFLVLDASMFVPNLFKFPASKIACSVMNIVNEHVGS

SEQ ID NO: 2983 - protein, 340 aa, Glycine max
MDRGDQMALSGSYYMQQRGIPGSGAPPELHISPNMRPISNPNLPFQSSIGGGTIGSTLPLESSAISAHGVNVGAPTGAPPGEPVKRKRGRPRKYGTDGSVSLALTPTPTSSSYPGALTQSQKRGRGRPPGTGKKQQLASLGELMSGSAGMGFTPHIINIASGEDIATKIMAFSQQGARAVCILSANGAVSTVTLRQPSTSGGTVTYEGRFEIVCLSGSYLVTDNGGSRNRTGGLSVSLASPDGRVIGGGVGGVLIAASPVQVILGSFSWGASKTKIKKKEGSEGAEVAMETDHQTVHNPVAVNSISPNQNLTPTSSLSPWPASRPLDMRNSHIDIDLMRG

SEQ ID NO: 2984 - protein, 318 aa, Thermobifida fusca
MEQRHLGRSGLWVSTIALGTMTWGEDTEEGEAADLLATFVDAGGTLIDTADIYQGGQGERILGRLLPTVVRRDDVIIATKAGHCLDRRRPSNTSRRHLLAALEASLRRLQTDYVDLWQLHVYDPTTPLEETLAAVDSAVASGKARYVGVGQVTGWQLARYATWQQATLASGSSPIVAVGTEYSLLNRECERELLPAARACGVGILAWSPLGRGVLTGKYRTGVPRDSRGASAHMASFVEPYLDEQGRRIVESVYTAAQGLGVPPLGVALRWVLSQPGVAAACVGPRTVAQLSEILAAENVVLPREISEALADASAAAV

SEQ ID NO: 2985 - protein, 509 aa, Leuconostoc mesenteroides subsp. mesenteroides ATCC 8293
MSVLLDRLNKQLELHENEIQLIDVKSEIKLTGKETKEAIHLFREQFINQNIQRGDVVLIGLENSIWITIIEQALWEIGAIAHPVAETTGIKEILSEFTAYRYSGAIVSDRLRMELANQEILSERSFEVLSHLVNLFSFNGTSVRKIADDDEQQLALILNTSGTTGKPKRVGITNKKILLATQAVTKSQNIKESDHALIVMPMFHINAQIVSTVTSRINGCRVIVAPKFSASQFWTIVAKYQVTWLSVVPTIINILLKNQNSNQQYEKVKKAVHLEYVRSASFSLPEQLLTDFERRFNVKVQEGYGMTESTTVVSINPLDKPKVGSVGPVVDTDIAIHSSVYGITYKPNQHGEIVIRGPRVLQAYLDPKDNILVDGYFRTGDIGYFDEEGYLYVIGRIKEIINHGGEKVAPAKVEGIISQFQFVTEVAVIGLPDELYGERVVAALHLNNSSDHNQEIDEIRGKISKELAKYEQPSEYLITGAFPRNQTGKILRAQLIERLKGEMQHATIK

SEQ ID NO: 2986 - protein, 319 aa, Triticum aestivum
MDMAHERDSSSEEEVMAGDLRRGPWTVEEDILLVNYIAAHGEGRWNSLARSAGLKRTGKSCRLRWLNYLRPDLRRGSITPQEQLLILELHSRWGNRWSKIAQHLPGRTDNEIKNYWRTRVQKHAKQLKCDVNSQQFKDVMRYLWMPRLVERIQAAATADAVQAAADTPLSWQHGADDALYESPELPVDACWPTEYAAVAGGQLPNASVAELSSTTTAGSSSPSTTDSGAGAQPSWPAAVDGAEWFTTACDASSAAATICDTDQLIQQQAPSQPAGAWTSEPLPSLGFPELGVADFEMGSFDVDSIWSMDDLWNTQPQFV

SEQ ID NO: 2987 - protein, 276 aa, Triticum aestivum
  unsure (1)..(276): unsure at all Xaa locations
GRRASGRDCGGEEGARPNGHAGDGGGPAGWTMVAERRAGRPAGVPAARRAPAPRRRRXLRTRGPNVGKAAAMFLKSLPWTRATQPRGSITEAAVRGELVQDKLYVQGFDSAGRPLVYLFGHRLVAAGRPLVDLFRYRLFAPDRARAEFKRYVVYILDNTCTKLPAGPDYDIRAKLAALGGLPNCDPRPLRPAFLILLPYVPVRPGRVVLPLVPYVFMAAWKMVYPFIDDNTKKKFVFVADKDLDATLRDAIDVSQLPEQYGGKLRLEGYKSSSTCN

SEQ ID NO: 2988 - protein, 751 aa, Geobacillus stearothermophilus
MENQNRQNAAQCPFHGSVTNQSSNRTTNKDWWPNQLNLSILHQHDRKTNPHDEEFNYAEEFQKLDYWALKEDLRKLMTESQDWWPADYGHYGPLFIRMAWHSAGTYRTGDGRGGASTGTQRFAPLNSWPNNANLDKARRLLWPIKKKYGNKISWADLFILAGNVAIESMGGKTIGFGGGRVDVWHPEEDVYWGSEKEWLASERYSGDRELENPLAAVQMGLTYVNPEGPDGKPDPKAAARDIRETFRRMGMNDEETVALIAGGHTFGKAHGAGPATHVGPEPEAAPIEAQGLGWISSYGKGKGSDTITSGIEGAWTPTPTQWDTSYFDMLFGYDWWLTKSPAGAWQWMAVDPDEKDLAPDAEDPSKKVPTMMMTTDLALRFDPEYEKIARRFHQNPEEFAEAFARAWFKLTHRDMGPKTRYLGPEVPKEDFIWQDPIPEVDYELTEAEIEEIKAKILNSGLTVSELVKTAWASASTFRNSDKRGGANGARIRLAPQKDWEVNEPERLAKVLSVYEDIQRELPKKVSIADLIVLGGSAAVEKAARDAGFDVKVPFFPGRGDATQEQTDVESFAVLEPFADGFRNYQKQEYSVPPEELLVDKAQLLGLTAPEMTVLVGGLRVLGANYRDLPHGVFTDRIGVLTNDFFVNLLDMNYEWVPTDSGIYEIRDRKTGEVRWTATRVDLIFGSNSILRSYAEFYAQDDNQEKFVRDFINAWVKVMNADRFDLVKKARESVTALQGCSRSRSDVIEGLQ

SEQ ID NO: 2989 - protein, 433 aa, Brassica rapa
IFSFVVMILFHPALSIYINTLSATESLTISSKRTLVSPGNVFELGFFKTTLSSRWYLGIWYKKVSERTYVWVANRDNPLSNSIGTLKISGNNLVLLGHSNKSVWSTNLTRGNERSPVVAELLANGNFVMRDSNNNDASGFLWQSFDYPTDTLLPEMKLGYDLKTGLNRFLISWRSSNDPSSGNFSYKLENRELPEFYLQQNDIRAHRSGPWNGIGFSAIPEDRKLSYMVYNFTENSEEVAYTFLMTNDSIYSRIQMSSEGDLRRLMWTPTSWEWSLFWSAPVDPQCDVYKTCGPYAYCDLNTSPLCNCIQGFMPSNVQQWDLRNPSSGCIRRTRLGCSGDGFNKMKNMKLPETTTAIVDRSIGMKECKKRCLSDCNCTAFANADIRNGGTGCVIWTERLHDIRNYFDNGQDLYVRLAAADLGQERNANGKIII

SEQ ID NO: 2990 - protein, 416 aa, Listeria ivanovii
MVKKSIRALLLTFIVACLNTSLGTKVNAASIPHPMPIDKVFPDPSLANEMKITLGKKSVTDVVTQKELESKNEFNAAHKNIQSIEGLQYLTNLEVLYLSGNQITSISPLKSLKKLVVLNLDANELSDISDITKFSSSSALTHLFLNNNQLTDISALANLTNLETLDAMDNKLSSIQALASLEKLKMLRLSGNQVSDITGLEGLNNLEYVEIINQECINEPICYQPFLIIPNTIKTLEGKLIAPKKIRNNGKYAQENVQWVLSSYVDEVSYTFDELIRIGKTRAKFHGRVIQPLERKKLFIDNLKSIKEIFPDANLAEILRRALKKKHVTDLVSQHELDKIKEVHADDRDITSIEGLQYLFNLNKLYLADNQISDIRSLEVLTNLKELYLDNNGLTDKSVSGLINLAHLNTLSIRDN

SEQ ID NO: 2991 - protein, 348 aa, Agrobacterium tumefaciens str. C58 (Cereon)
MQTRVARLYSREDIRVETQDVAPPGPGEVLLAMAAGGICGSDLHYYQDGGFGPVRVREPIICGHEASGHIAALGAGVSGLAIGQLVAVNPSQPCGHCQFCLKGQPIHCLDMRFMGSAMRLPHEQGMFRDRLVVPAKQCATFSDATSPAEAACTEPLAVCLHAVAQAGDLAGAKVLVTGAGPIGLLTIAAARQAGAGIIVATDLTDAALERAPAMGADRTINVAKDADALLPYQDNKGYFDVIFDCSAAGPALRSAFACVRPRGTIVQVGVTGDVTIPLNALVGKEIVWRGSQRFHDEFAIAAGLISSRKIDVRPIISHSFPLGDAKAAFEQAGDRSAACKVQLTFSAD

SEQ ID NO: 2992 - protein, 498 aa, Emericella nidulans
MASAFRSSLKLRASARLPAVRTITTTPRLRAAEKPYFPNEPTAPKLATAIPGPKNKAASEQLNEVFDVRSLNMLADYTKSVGNYIADLDGNMLLDVYAQIASIPVGYNNPHLLKVAASPEMATSLINRPALGNFPSADWAHILKTGILKVAPKGLDQVFTAMAGSDANETAYKAAFMYYRQQQRGGPEKEFTEEEIQSSMLNQTPGSPQLSIMSFKAGFHGRLFGSLSTTRSKPIHKLDIPAFDWPQAPFPSLKYPLEEHAKENAEEEQRCLQEAERLIKEWHNPVAAIIVEPIQSEGGDNHASPAFFRGLREITKRNNVLFIVDEVQTGVGATGKFWAHDHWNLETPPDMVTFSKKAQTAGYYFGNPALRPNKPYRQFNTWMGDPSRALIFRGIIEEIERLFLVENTAATGDYLYSGLERLAKQYPEHLQNLRGKGQGTFIAWDTPKRDEFLVKGKGVGINIGGSGQNAVRLRPMLIFQKHHADILLESIEKIIKQL

SEQ ID NO: 2993 - protein, 381 aa, Heteropterys leona
ETPAGALKSYKLASKAISRLQSLPSGNISLLCDVLVKEVRDLTGYDRVMVYKFHEDEHGEVVSECRRSDLESYLGLHYPATDIPQASRFLFMKNKVRMICDCLAPPVKVIQDETLPQPLSLCGSTLRSPHGCHAQYMTNMGTIASLVMSVTINEDDDMMDGDQQQMTRKLWGLVVCHHASPRFVPFPLRYACEFLIQVFGVQITKEVELAAQVREKHILQIQTMLCDMLLRDAPVAIITQSPNVMDLVKCDGAALYFKNKTWLLGVTPTEEQIRDIAEWLLEYHGGNTGVSTDSLMEAGYPGASILGDAVCGMAAVSITSRDFLFWFRCHTAKEIKWGGAKHDPDDKDDLRKMHPRSSFKAFLEVVKWRSMPWEDIEMDAI

SEQ ID NO: 2994 - protein, 306 aa, Glycine max
  unsure (1)..(306): unsure at all Xaa locations
MSTPALSGGTGLFSGFTRLCKGLAVVLVCGHIAVQFIPSAVNYLALIPARTIPFAWNLITAGYVEQSIYGVVVSTLSLLFIGKLLEPIWGSREFFKFIFVVNLLTSVCLFITAIALYYITRLETYLYMPLSGFHGVVSGFLVGIKQIIPDQELPFIKIKTKWLPSITVLLSIAISFWTLEXTAYLPTIISGTYISWIYLRYWQRKPETKHRGDLSEDFAFSTFFPEFLRPVIDPIASIFHRMLCGRYDASNDGQGNSLESEPLPGSDSIEASRRRERGARALEERLAAERLAVARRELQREAEENV

SEQ ID NO: 2995 - protein, 215 aa, Glycine max
MESGSSTRKEGEQQRVPLRERAEWSDVTPLPQNDGPNPVVPIQYTEDFSQVMDYFRAVYLADERSPRALALTAEAVQFNSGNYTVCQVRIKCFRLHLFLFISSLLQVWHFRRLLLESLKVDLNAELDFVERMAAGNSKNYQMWHHRRWVAEKLGPEARKNELEFTKKILSVDAKHYHAWSHRQWVLQALGGWEDELNYCTELLKEDIFNNSAWNQ

SEQ ID NO: 2996 - protein, 126 aa, Methanosarcina barkeri
CRKTVESFSCNDETQQCCRAIVVNGETAGCIALFLKSDVYCKNAEIAYWLGEPFWGRGIMSEAIKQLCRTAFEQYDIVRIFAEPYAQNIGSRKALEKAGFVLEGIMKKGVYKNGNFFDYCMYALVK

SEQ ID NO: 2997 - protein, 350 aa, Oryza sativa (indica cultivar-group)
MDPGRVVFDSGVARRACPGGAQMLLFGGGGSANSGGFFRGVPAAVLGMDESRSSSSAAGAGAKRPFFTTHEELLEEEYYDEQAPEKKRRLTAEQVQMLERSFEEENKLEPERKTELARRLGMAPRQVAVWFQNRRARWKTKQLEHDFDRLKAAYDALAADHHALLSDNDRLRAQVISLTEKLQDKETSPSSATITTAAQEVDQPDEHTEAASTTGFATVDGALAAPPPGHQQPPHKDDLVSSGGTNDDGDGGGAAVVVFDVTEGANDRLSCESAYFADAAEAYERDCAGHYALSSEEEDGGAVSDEGCSFDLPDAAAAAAAMFGAAGVVHHDAADDEEAQLGSWTAWFWS

SEQ ID NO: 2998 - protein, 148 aa, Spinacia oleracea
AZZLTDEQIAEFKEAFSLFDKDGDGCITTKELGTVMRSLGQNPTEAELQDMINEVDADGNGTIDFPEFLNLMARKMKDTDSEEELKEAFRVFDKDQNGFISAAELRHVMTNLGEKLTDEEVDEMIREADVDGDGQINYEEFVKVMMAK

SEQ ID NO: 2999 - protein, 751 aa, Geobacillus stearothermophilus
MENQNRQNAAQCPFHGSVTNQSSNRTTNKDWWPNQLNLSILHQHDRKTNPHDEEFNYAEEFQKLDYWALKEDLRKLMTESQDWWPADYGHYGPLFIRMAWHSAGTYRIGDGRGGASTGTQRFAPLNSWPDNANLDKARRLLWPIKKKYGNKISWADLFILAGNVAIESMGGKTIGFGGGRVDVWHPEEDVYWGSEKEWLASERYSGDRELENPLAAVQMGLIYVNPEGPDGKPDPKAAARDIRETFRRMGMNDEETVALIAGGHTFGKAHGAGPATHVGPEPEAAPIEAQGLGWISSYGKGKGSDTITSGIEGAWTPTPTQWDTSYFDMLFGYDWWLTKSPAGAWQWMAVDPDEKDLAPDAEDPSKKVPTMMMTTDLALRFDPEYEKIARRFHQNPEEFAEAFARAWFKLTHRDMGPKTRYLGPEVPKEDFIWQDPIPEVDYELTEAEIEEIKAKILNSGLTVSELVKTAWASASTFRNSDKRGGANGARIRLAPQKDWEVNEPERLAKVLSVYEDIQRELPKKVSIADLIVLGGSAAVEKAARDAGFDVKVPFFPGRGDATQEQTDVESFAVLEPFADGFRNYQKQEYSVPPEELLVDKAQLLGLTAPEMTVLVGGLRVLGANYRDLPHGVFTDRIGVLTNDFFVNLLDMNYEWVPTDSGIYEIRDRKTGEVRWTATRVDLIFGSNSILRSYAEFYAQDDNQEKFVRDFINAWVKVMNADRFDLVKKARESVTALQSSRCFRSTDNAVLQ

SEQ ID NO: 3000 - protein, 187 aa, Oryza sativa
  unsure (1)..(187): unsure at all Xaa locations
MAAPDVEYRCFVGGLAWATDDRSLEAAFSTFGEILESKIINDRETGRSRGFGFVTFSSEQAMRDAIEGMNGKELDGRNXITVNEAQSRRSGGGGGGGYGQRGGGGGYGGGGYRWGGGGGGYRQRREGGYGGGGGYRGGRGGGGFGGGVRXSRGGGNFDGNLETERWGPLGQVIHLSNRASLIIVPCV

SEQ ID NO: 3001 - protein, 318 aa, Enterococcus faecalis V583
MNQELCELLGINYPIFQGGMAWVADASLASAVSNAGGLGIIAGGNAPKEVVKKEIKKVKELTEQPFGVNIMLLSPFADEIVDLVCEEQVPVVTTGAGNPAKYMARFKEHNIKVIPVVPSVALAKRMEKIGADAVIFEGMEAGGHIGKLTTMSGLPQIVDAVSIPVIAAGGIGDGRGMAAAFMLGAEAVQLGTRFLIAKECNVHPDYKQKVLKARDLDAVITCQHFGHPVRTLKNKLTAQYNQLEKQELQKEVPDLEMFEKIGQGALRKAVVDGDMDYGSVMAGQIAGLIKKEETAQEIIDSLMSECKAIVHKMNQRWG

SEQ ID NO: 3002 - protein, 211 aa, Claviceps purpurea
GGKCNRGMSVPDSVSLLLGRPLQEEEYFHAATLGWMTELLQAFFLVSDDIMDGSITRRRKPCWHRQDGVGMIAINDAFLIESAIYALLKKYFRSHPAYVDMLELFHEATFQAELGQLCDLITGPVDKVDLGNFSMDKYRFIVIYKTAYYSFYLPVALALHQLNLATPRNLKVAEDILIPLGEYFQVQDDYLDNFGRPEHIGKIGTDIQDNK

SEQ ID NO: 3003 - protein, 882 aa, Xylella fastidiosa Ann-1
MPLPIAAPLTLATALILLLATTPTTAAPSPEQHAAALVAQMTRQEKIAQTMNAAPAIPRLGIPAYDWWSEGLHGIARNGYATVFPQAIGLAASWNTDLLQHVGTVTSTEARAKFNLTGGPGKDHPRYAGLTLWSPNINIFRDPRWGRGMETYGEDPYLTGQLAVSFIRGLQGDTPDHPRTIATPKHFAVHSGPEQGRHSFDVDVSAYDLEATYTPAFRAAIVDGHAGSVMCAYNALHGTPACASDWLLNTRLRNDWGFNGFVVSDCDAIEDMTRFHFFRQDNASASAAALKSGDDLNCGNTYRDLNQAIARGDIDESTLDQALIRLFTARQRLGTLQPREHDPYAAIGIKHIDTPAHRALALQAAAQSLVLLKNSGNTLPLPPETTLAVLGPDADSLTALEANYQGTSSTPVTPLTGLRTRFGTAKVHYAQGASLAPGVPSTIPETALRNHGHPGLKGEYFDTIDFSGAPHLVRQDRIIAFNWDHIAPAPGMNPHRYAVRWTGELLPPGPGTYTFAVHVARCFDCNGHDPIRLYIDDRQIIPDNATAAQATTAPQQTDNTHLEATLHFTDTRPHHIRLDMEHRGEDQGVRLEWLAPAAPQLAEAERAVAHADAIVAFVGLSPEVEGEELHIDTPGFSGGDRTTIDLPATQETLLQHVKTTGKPLIVVLMSGSAVALNWAQHHADAILAAWYPGQSGGTAIAQALAGDVNPGGRLPVTFYRSTQDLPPYISYDMTGRTYRYFKGQPLYPFGYGLSYTQFAYEAPQLSTATLKAGNTLTVTAHVRNTGTRAGDEVVQLYLEPPYSPQAPLRSLVGFKRVTLRPGESRLLTFTLDARQLSGVQQTGQRSVEAGHYHLFVGGGQPNTGAPGGTAAFSIIGRAMLPK

SEQ ID NO: 3004 - protein, 392 aa, Triaspis hypericoides
DLEPVNPADVPVTAAGALKSYKLAAKAISRLQSLPSGNISLLCDVLVKEVRDLTGYDRVMVYKFHEDEHGEVVSECRRSDLESYLGLHYPATDIPQASRFLFMKNKVRMICDCVAPPVKVIQDKRLPQPLSLCGSTLRSPHGCHAQYMTNMGIIASLVMSVTVNEEDDMVDGDQLQMARKLWGLVVCHHTSTRFVPFPLRYACEFLIQVFGVQINKEVELAAQVREKHILQIQTMLCDMLLRDAPVAIITQSPNVMDLVKCDGAALYFKNKTWLLGVTPTEEQIRDIAEWLLEYHSGNTGLSTDSLMEAGYPGASALGDAVCGMAAVSITSTDFLLWFRSHTAKEIKWGGAKHDPDDKDDGRKMHPRSSFKAFLEVVKWRSMPWEDVEMDAI

SEQ ID NO: 3005 - protein, 538 aa, Amanita muscaria
MASEELEKQSPVYDKPGPEAESLQGVANDGLSRQLKNRHIAMISIGGVIGTGLFLGTATALRNGGPVGMLLGYALMGLICFCVMISLGEMVAFLPIPGGHIKLAERFVDPAFSFTMGWNYWYNWSIVLPAELSASSVIVGFWNHNINPAVWVIICLVVVVTINMLGAGVYGEAEFWFASIKVITITGLIILGIVLDLGGGPNHDRLGFRYWKNPGPFVQFGGISGTTGQFLGFWAVLTQAAFSYIGTEIVAIAAGETKNPRRNLPRAIKRVYIRILLSYICGTLIIGLLVPSNDSGLNLGDGTAASSPFVIAIERAGINSLPHIINACLLTSAWSAASSDLYTSSRALFGLAVSGNAPKIFLTTTSSGLPYVSIAFECMLLRLLAFMATSSGAGKVFGWFANMTAIAGLMTWFGICVSYIRFYNALKVQGYDRKTLPFSSRLQPFAAYFAAGFILVACFFSGFAVFLKGKWATDTFVTNYLPFVLFPIMYGLARLYYKQGPKPYDEIDLVTGLKEIEQQTYDEPPPNNFLERVWQWVM

SEQ ID NO: 3006 - protein, 212 aa, Glycine max
MGNRAMLTLLLLLFFSTNLVPSALAIWLTLPTTGTKCVSDEIQHNVVVLADYVVIPSDHAHNLTIAVKVTSPYGNNLHHKENTTHGSIAFTTQEAGNYLACFWVDSPSQGVGEVNVNLDWKIGIAAKDWDSVARKEKIEGVELELRKLEGAVEAIHENLLYLKGREAEMRIVSEKTNGRVAWFSIMSLAMCIAVSGLQLWYLKRYFQKKKLI

SEQ ID NO: 3007 - protein, 379 aa, Arabis procurrens
MITTGQIIRCKAAVAWEAGKPLVMEEVEVAPPQKHEVRIKILFTSLCHTDVYFWEAKGQTPLFPRIFGHEAGGVVESVGESVTDLAPGDHVLPIFTGECGDCPHCHSEESNMCDLLRINTERGVMIHDGESRFSIDGKPIYHFVGTSTFSEYTVIHSGQVAKINPDAPLDKVCIVSCGLSTGLGATLNVAKPKKGQSVAIFGLGAAGLAAAEGARIAGASRIIGVDLNSKRFDEAKKFGVTEFVNPRDHDKPVQQVIAEMTDGGVDRSVECTGSVQAMIQAFECVHDGWGVAVLVGVPSKDDAFKTDPMNFLNERTLKGTFFGNYKPKTDIPGLVEKYMNKELEIEKFITHTVPFSEINKAFDYMLKGKGIRCIITMGA

SEQ ID NO: 3008 - protein, 270 aa, Mycoplasma genitalium
MDTYTSAKINWFPGHMKKIHDQLKKLSSQIDGIIEIVDARAPTLTHNSEIISYFLNKPKLILALKTDLAQYKPNKKILFGSLKEPFKLKKKVLKTLTTLFANKRQQLKAKGLLIKQFRLAVIGMPNVGKSSLINLLINKNHLKVANRAGITKSLNWIQISPELLLSDTPGVFLKRIDEIQIGYKLVLTNVIRREVVNIEEVGMFAFNYLKKHYKQLLPFEADSFINFLEKFAKVRGLIKKANELNTNLACEIFINELINGKYGKLSYELN

SEQ ID NO: 3009 - protein, 162 aa, Zea mays
  unsure (1)..(162): unsure at all Xaa locations
KSRVPDPQRMIRAYSQSVATLNLLRALATGGYAAMQRVTQWNLDFMDXSEQGDRYRELAHRVDEALGFMTAAGLTVDHPIMTTTDFWTSHECLLLPYEQSLTRKDSKDYACLFVDAWCGGLVGALGTSYMLGSYRRVPVALWKTVASIMCCNCMPSFHVLGA

SEQ ID NO: 3010 - protein, 368 aa, Zea mays
  unsure (1)..(368): unsure at all Xaa locations
MEAIRKQASKFREQVARQQQAVMKQFGGGYGADGVFANEAEAQQHSKLEKLYISTRAAKHFQRDIVWGVKGYIVTGSKQVEIGNKLCEDGKKYGTENTCSSGSTLSKAALSFAKARSMMEKERGNLLKALGTQVAEPXRDHYLEHPNKIFFFCSCDELRELVFEXQAIEVSKRQMKLREASGNSDMVSRLEAAESKLQELKSNMGVLGKEAVAAMTAVEAQQQRLTLQRLIALVESERNYHQKVLQILDQLEREMVSERQRIEGAPPVVESSMPPPPAYEEVNGIFMRNTVAELVETVEYFLAEAIQSYQAESDTELNLSTGDYIVVRKVVSNNGWAEGECRGKAGWFPYDYIEKRERVLASKVGQVF

SEQ ID NO: 3011 - protein, 150 aa, Triticum aestivum
RHEGHIAGDPIRPPRLEDAGLEDCALPQESIAEAFSLAALAVSSRLPHLSLSDDEDEGDDPLAPRGGCVEAGPTCGAIPESLVGGGRGSECHADEVMVVAGRGDEEDRVVVVVGQELGQEKGCAEGTREGEQRKVEDGIVEKAILVKDFA

SEQ ID NO: 3012 - protein, 612 aa, Oryza sativa (indica cultivar-group)
MSSAAGGGGYGGGQGGGAEHHHHHHGHAGHLLLHHHPQHVAGAAVAAAAAAAGGQMYHVPQHSRREKLRFPPDAGDSPPPHGHGHGHAPQQQQQHGSWPPPPAFYSYASSSSSYSPHSPTLAQAQLVAHGLAPPLPQIPTQNFSLSLSSASSNPPPPQAQPRRQLGGLAQATGPFGPFTGYAAVLGRSRFLGPAEKLFEEICDVGGAASHVDRTISDEGLLDADPMDGVDHDVVDHDLGGADRAAADAGPISGAEQQWKKTKLISMMEEVCKRYRQYYQQVQAVMASFETVAGFSNAAPFAALALRAMAKHFKCLKSMILNQLRNTSNKVAVKDGLNKEIAVFGLAGGSSGGAGLQRANSASAFGQPHNIWRPQRGLPERAVSVLRAWLFEHFLHPYPTDGDKQMLAKQTGLTRNQVSNWFINARVRLWKPMVEEIHNLEMRQMHKHSVVDKGQHSVHHQAQHSSQCSGNPSVPSDSHPGQSSSITRNHNTAASQGFPDELSQMSQSIQGQVSFAYNGLTSQHNIASPHHQHQQVGGVSIGGGNGGVSLTLGLHQNNRVCIAEPLPAALPANLAHRFGLEEVSDAYVMSSFGGQDRHFGKEIGGHLLHDFVG

SEQ ID NO: 3013 - protein, 751 aa, Geobacillus stearothermophilus
MENQNRQNAAQCPFHGSVTNQSSNRTTNKDWWPNQLNLSILHQHDRKTNPHDEEFNYAEEFQKLDYWALKEDLRKLMTESQDWWPADYGHYGPLFIRMAWHSAGTYRTGDGRGGASTGTQRFAPLNSWPNNANLDKARRLLWPIKKKYGNKISWADLFILAGNVAIESMGGKTIGFGGGRVDVWHPEEDVYWGSEKEWLASERYSGDRELENPLAAVQMGLTYVNPEGPDGKPDPKAAARDIRETFRRMGMNDEETVALIAGGHTFGKAHGAGPATHVGPEPEAAPIEAQGLGWISSYGKGKGSDTITSGIEGAWTPTPTQWDTSYFDMLFGYDWWLTKSPAGAWQWMAVDPDEKDLAPDAEDPSKKVPTMMMTTDLALRFDPEYEKIARRFHQNPEEFAEAFARAWFKLTHRDMGPKTRYLGPEVPKEDFIWQDPIPEVDYELTEAEIEEIKAKILNSGLTVSELVKTAWASASTFRNSDKRGGANGARIRLAPQKDWEVNEPERLAKVLSVYEDIQRELPKKVSIADLIVLGGSAAVEKAARDAGFDVKVPFFPGRGDATQEQTDVESFAVLEPFADGFRNYQKQEYSVPPEELLVDKAQLLGLTAPEMTVLVGGLRVLGANYRDLPHGVFTDRIGVLTNDFFVNLLDMNYEWVPTDSGIYEIRDRKTGEVRWTATRVDLIFGSNSILRSYAEFYAQDDNQEKFVRDFINAWVKVMNADRFDLVKKARESVTALQSRYRCRSNTVIGLQ

SEQ ID NO: 3014 - protein, 463 aa, Streptococcus pyogenes M1 GAS
MTIFRKKKKYSNKTEMQRHFKVIDLVFLGLGSMVGTGIFTVTGIGAAKYAGPALTISIIISAIAIGILALFYAEFASRMPSNGGAYSYVYATLGEFPAWLVGWYIIMEFLTAISSVAVGWGSYLKGLLANYNIVLPNALNGTFNLKNGTYIDILPVLVMFFVTGIVLMNSKLALRFNSFLVILKFSALALFIFVGIFFIDHNNWSHFAPYGVGQITGGKTGIFAGASVMFFAFLGFESISMAVDEVKEPQKTIPKGIILSLIIVTALYIVVTTILTGIVHYTKLNVPDAVAFALRNIRLYWAADYVSIVAILTLITVCISMTYALARTIYSISRDGLLPKSLYTLTKKNKVPQNATLVTGLLAMICAGIFPLSSLAEFVNICTLAYLIILSGAIIKLRRIEGEPKANEFKTPLVPFLPMLAIIICLSFMSQYKAFTWIAFAIATIIGTLIYLAYGYTHSIENK

SEQ ID NO: 3015 - protein, 426 aa, Schizosaccharomyces pombe
MSNGEFIDQYLLPESGAILQDYLDDYFYTSWYTGNRNLIQLDHYGFPTASNFELNPKSTDNCGTVDFQGIPWGNKAIGKRKNFRLYRLHTYSLSCNHSDWSPEELSLDTVQVAAEDSFYEFQRFLKNPNCLRNHHHLCKSVKVVGEHSVIYVSNNSIRMENTLHDNSVQIIDLKNNILQKKAISCLDTTNAVGCLGTLYGQYCIFNFKNGSFSTRKLSDDSINHIQLFSEKKFILGCNDGAVYVEDVQRTSPILVYRCSNAVNCVQLFDETPLALVCTDSKDAMLIDIRSNSVSAKLPHSDSVLTGSWHPNGNILATGGQDTTAKVWDIRALGKSFRNLGSQMSAVTNLCFSPLGESLAVTEQADFVQLFDTKLFNTSQVIDFFGEIAGTAYSSSGDSLFIGVDDPMLGGILEFRRPLQHPLSFIF

SEQ ID NO: 3016 - protein, 395 aa, Glycine max
MGNDAGSPQGPVTCGSWIRRPENLNLVVLGRSRRGSSCPSLLEIFSFDPKTTSLSTSPLTTYVLEAEEGDPVAITVHPSGDDFVCALSNGSCKLFELYGRETNMKLLAKELAPLQGIGPQKCIALSVDGSKFAAGGLDGHLRIMEWPSMRVILDEPRAHKSVRDMDFSLDSEFLASTSTDGSARIWKIEDGVPLTTLSRNSDEKIELCRFSKDGTKPFLFCSVQKAGDTSVTAVYEISTWNKIGHKRLIRKSASVMSISHDGKYLSLGSKDGDICVVEVKKMQIYHYSKRLHLGTNIAYLEFCPGERVLLTTSVEWGALVTKLTVPKDWKEWQIYLVLLGLFLASAVAFYIFFENSDSFWNFPMGKDQPARPRFKPVLKDPQSYDDQNIWGPVDM

SEQ ID NO: 3017 - protein, 361 aa, Escherichia coli O157:H7 EDL933
MMKTMRIAAIPGDGIGKEVLPEGIRVLQAAAERWGFALSFEQMEWASCEYYSHHGKMMPDDWHEQLSRFDAIYFGAVGWPDTVPDHISLWGSLLKFRREFDQYVNLRPVRLFPGVPCPLAGKQPGDIDFYVVRENTEGEYSSLGGRVNEGTEHEVVIQESVFTRRGVDRILRYAFELAQSRPRKTLTSATKSNGLAISMPYWDERVEAMAENYPEIRWDKQHIDILCARFVMQPERFDVVVASNLFGDILSDLGPACTGTIGIAPSANLNPERTFPSLFEPVHGSAPDIYGKNIANPIATIWAGAMMLDFLGNGDERFQQAHNGILAAIEEVIAHGPKTPDMKGSATTPQVADAICKIILR

SEQ ID NO: 3018 - protein, 245 aa, Eucryphia billardieri
ALSIAGAVQSQKLAVRAISQLQSLPGGHIKLLCDTVVESVRELTGYDRVMVYKFHEDEHGEVVAESKRPDLEPYIGLHYPATDIPQASRFLFKQNRVRMIVDCHATPVRVIQDEGLIQPLCLVGSTLRAPHGCHAQYMANMGSTASLAMAVIINGNDEEAIGGRNSMRLWGPVVCHHTSARSIPFPLRHACEFLMQAFGLQLNMELQLALQLSEKHILRTQTLLCDMLLRDSPTGIVTQSPSIMD

SEQ ID NO: 3019 - protein, 601 aa, Neurospora crassa
MATAEIVAADASSNYDLEKHNTASTTQKHIPIEDDYEGKPTQEELDTLRRVPGSLPIIAYMICIIEFCERASYYGVQPLISNYVNRPLPQGGNGWGAPARGTQQTAGALGMGQSTSNAVTQSFSMLAYALPLVFGWLADAKTGRFKLICWGVIVFGIAHVLLIVAGAKNLLADGTSKAPFFIAVYILAFGAGMFKPNVSPLLLDQVTNTKPMIKVLKTGERVIEDPEATTERVMLWFYLMINIGGFMGVATAYSEKYIGWWLAFLIPLILYLPLPLLLWFLRKRLILHPPGGSDLPNVFRVLGVCLRRGGIKKIGRHGFWELAKPSNIAAAGLEGTYKTQWSDQFVEDVRRTFQGTGIFCFFPIQYLNDNGLGSAANFLSTMLRTDGVPNDVISNFNSLSIIATAPVLNYGLYPALRRLGIHYGPIARITTGLALSTLGGVGYTLLNYYAYKLSPCGEYGSSDCTIGTGVANISIWYLAIPFAIGGISELFVNVPAYGIAYSRAPVNMRGLVSAINLFSTAVAYIIGLACSSVVTDPYLTWDFGGPAIAGGVLTIIFYITFRHIDKEETVFSQRETIEATPVEDSSSQVGEKPSPVYSEKK

SEQ ID NO: 3020 - protein, 357 aa, Wigglesworthia glossinidia endosymbiont of Glossina brevipalpis
MGLKIGIIGLPNVGKSTLFNALTNSQVKAKNFPFCTIKPNIAIAPVPDVRLFKLKNIVKSKKIVPNFIEFIDIAGLVKGASKGEGLGNSFLNQIRNVNVVCHVIECFSEKLISKSEYVKNILKDIKIINDELRISDINLCKKKIESLKNKNNEKKDLFEIEQYLDILLNKNICTLQIYKNSKKINSNIDLLVFKPKMYIVNIKEKNKNNDFYLKNIKYFTNKYDIPTIEICAKSESDYISSIKHNSSNFDINSNLLNTSLGKIINCGFNLLKLKTFFSVGPKEVKAWSSDLNSTAIQAAGKIHTDFQKGFIRAKVISFSDFIFYKNFLTAKKYGKIKIEGKNYIIKDGDIIEFLFNV

SEQ ID NO: 3021 - protein, 595 aa, Saccharomyces castellii
MESSKKNETSPEVNSITSSTLKTPNVTEKFEPYPDTTAVKHRTHFNRFVDSFKRAEVNHNGIDLEDGTNSIQSDDNLKKAMKSRHVIMMSLGTGIGTGLLVANAKGLYLAGPASLVIGYFMVSFITYFVIQAAGEMAVTYPTLPGGFNNYASIFVSKPFGFATVWLFCIQWLTVLPLELITASMTIKYWNDKINADVFVVILYVFLLFIHFFGVRAYGEAEFIFNSCKILMIGGFVILSIVVNCGGAGVDGYIGGKYWRDPGAFASDNAASRFKGVAFVLVTAYFSYGGVELFALSVNEQENPRRSTPAAAKQSIYRILIIYLLTMILIGFNVPHNSDQLMGAGGSATHASPYVLAVSIHGVKVVPHIINAVILISVTSVANSALYASPRLLRSLAEQGYAPKYFNYVDREGRPLRALILCSIFGVIAFCACSDQEEVIFTWLAAIAGLSELFTWSSILLSHVRFRLAMKAQGKSLNELGYISITGIWGSLYGCFFNVLVFIAQFWVALSPPGSKGVYSAEAFFESYLAFPVWLFFYLGYMLYSRDFTFLTDLKKIDLDNHRRLYDPELLRQEDEETKERIRNGGWTQKLLNFWC

SEQ ID NO: 3022 - protein, 98 aa, Triticum aestivum
  unsure (1)..(98): unsure at all Xaa locations
MEGLFFNVNNGYIEGXVRGYRNXLLTGQNYTXNLTQCETIDDLKLQLGPXYGDFLASLPPNPSTSSLAAKASDKLXSEFRYVRANASGGHXQKFMGLH

SEQ ID NO: 3023 - protein, 335 aa, Oryza sativa
  unsure (1)..(335): unsure at all Xaa locations
TRPGHRPVGSARGFVVRSIDRVHAAPAEGRRRPSGGAPWATAHHDAPQLVGRTGASTTTARRRAARSAVTVTMALKEEPEGSRSGFAGGVPSWDPGLEIQVPFEQRPVNEYSALKDSVLYSWAELSPGSFFLRLGSLWLITFTVLAAPIAAASFSPGKDPLKFVLAAGIGTLLLVSLVVLRIYLGWSYVGDRLLSAVVPYEETGWYDGQMWVKPPEVLARDRLLGSYKVKPVINLLKQTLVGTGALLVGAVSLFAFAAPVEDFLHSVXXAPPSAASSKPSLRREELLRLPVEVRQDDDLAAAAAEAADGRPVYCRDRYYRALAGGQYCKWDDLLN

SEQ ID NO: 3024 - protein, 376 aa, Oryza sativa
  unsure (1)..(376): unsure at all Xaa locations
VSEEEEDGEGRERSRGGGGGGGRSRXEEENMAAWLVAKNTLKIMPFKLPPVGPYDVRVRMKAVGICGSDVHYLREMRIAHFVVKEPMVIGHECAGVIEEVGSGVTHLAVGDRVALEPGISCWRCRHCKGGRYNLCEDMKFFATPPVHGSLANQIVHPGDLCFKLPENVSLEEGAMCEPLSVGVHACRRADVGPETGVLIMGAGPIGLVTLLAARAFGAPRVVIVDVDEHRLSVARSLGADAAVRVSARAEDVGEEVERIRAAMGGDIDVSLDCAGFSKTVATALQATRGGGKVCLVGMGHNEMTVPLTSAAIREVDVVGIFRYKDTWPLCIEFLRSGKIDVKPLITHRFGFSQEDVEEAFEVSARGRDAIKVMFNL

SEQ ID NO: 3025 - protein, 416 aa, Zea mays
MAAAFDAYTDKNAVFRRLKAKPENKMCFDCNAKNPTWASVTYGIFLCLDCSAAHRSLGVHITFVRSTNLDSWTPDQLKMMAFGGNNRAHAFFKQHGWTDGGKVEAKYTSRAAELYRQMLTKEVAKSATTDNALPSSPVASEASKPPSDDFPEFKLPDVPAPPAEDLNGKHEPKSPKAAPRSPKAATHPTFATSVKKPIGAKKVGGKTGGLGVRKLTTKPNESLYEQKPEEPKPAVPALAASTKKGGQALHSRFEYVENEPSADSRTGGSVSRVSGHVAPPKSSDFFQEYGMGNGFQKKSSNASKTQVEETDEARKKFSNAKAISSSQFFGTQNREEKEAQLSLQKFAGSSSISSADLFGRNDADNSNLDLSAADLINRISFQASQDLSSLKDIAGETGKKLTSLASNFISDLDRIL

SEQ ID NO: 3026 - protein, 327 aa, Mesostigma viride
MTVRFLFEALNMAIDEEMARNDKVALLGEDIGHYGGSYKVTQNLYAKYGEHRVIDTPIAENSFVGAAIGAAMTGLVTVVEGMNMGFILLAFSQISNNMGMLSATSGGHYHIPIVLRGPGGVGKQLGAEHSQRLECYFQSVPGLQIVACSTPYNAKGLLKSAIRSKNPIFFLEHVLLYNLKAEVPDNDYVLPLEKAEIVRQGNDITILTYSRMRYNVIQAVKVLVEKGYDPEIIDLISLKPFDIETIGKSIQKTHKVLIVEESMMTGGISNVLQSLILENFFDDLDNRPMCLSSPNVPTPYSGPLEEVSIVQTADIIESVEQILTNKM

SEQ ID NO: 3027 - protein, 579 aa, Brassica napus
MNNNWLGFSLSPYEQNHHRKDVYSSTTTTVVDVAGEYCYDPTAASDESSAIQTSFPSPFGVVVDAFTRDNNSHSRDWDINGCACNNIHNDEQDGPKLENFLGRTTTIYNTNENVGDGSGSGCYGGGDGGGGSLGLSMIKTWLRNQPVDNVDNQENGNAAKGLSLSMNSSTSCDNNNDSNNNVVAQGKTIDDSVEATPKKTIESFGQRTSIYRGVTRHRWTGRYEAHLWDNSCKREGQTRKGRQVYLGGYDKEEKAARAYDLAALKYWGTTTTTNFPMSEYEKEVEEMKHMTRQEYVASLRRKSSGFSRGASIYRGVTRHHQHGRWQARIGRVAGNKDLYLGTFGTQEEAAEAYDIAAIKFRGLTAVTNFDMNRYNVKAILESPSLPIGSAAKRLKEANRPVPSMMMISNNVSESENSASGWQNAAVQHHQGVDLSLLHQHQERYNGYYYNGGNLSSESARACFKQEDDQHHFLSNTQSLMTNIDHQSSVSDDSVTVCGNVVGYGGYQGFAAPVNCDAYAASEFDYNARNHYYFAQQQQTQQSPGGDFPAAMTNNVGSNMYYHGEGGGEVAPTFTVWNDN

SEQ ID NO: 3028 - protein, 326 aa, Lactococcus lactis
MTVLVLGGAGYVGSHAVDMLLKRGYDVAVVDNLVTGHRESVPANVRFYEGDVRDHAFLASVFEKENIEGIMHFCAYSLVGESMQKPLMYFNNNVGGAQVILETMEEFGVKHIVFSSTAATFGIPEKSPISEKTPQKPINPYGESKLIMEKMMKWQSQATDMTYVALRYFNVAGAKDDGSIGEAHKNETHLIPIILQTALGQREFITIYGDDYHTPDGTCIRDYIDMEDLIEAHIKALEYLKAGGQSDQFNLGSSKGYSNLEVLETARKVTGKEIPSQMGERRAGDPDELVADSTKAGEILGWKAQNDLEHIITNAWKWHQSHPKGY

SEQ ID NO: 3029 - protein, 338 aa, Ralstonia eutropha
MARKLSIKLAINEAIDQEMTRDPSVIMLGEDIVGGAGADGEKDAWGGVLGVTKGLYAKHGDRLLDTPLSESAYVGAAIGAAACGMRPIAELMFIDFMGVCFDQIFNQAAKFRYMFGGKAETPVVIRAMVGAGFRAAAQHSQMLTPLFTHIPGLKVVCPSTPYDTKGLLIQAIRDNDPVIFCEHKNLYGLEGEVPEGAYAIPFGEANIVRDGKDVSIVTYGLMVHRALEAAATLAKEGIEAEIVDLRTLSPLDMDTVLESVENTGRLVVVDEASPRCNIATDISAQVAQQAFGALKAGIEMVCPPHTPVPFSPTLEDLYIPSAAQIAAAARKTMKGGKH

SEQ ID NO: 3030 - protein, 230 aa, Fusobacterium nucleatum subsp. nucleatum ATCC 25586
MKDTIVGNLFFGLIISYFSFEIGRWIFKKTQSPICNPFLIGTSIVIFILKFFDISTDDYYKGAGMILFLLGPATVALAVPLYKKWDLFKKFFVPVMTGAVVGSFVGIISVIILGKLFGMEEQLIFSLMPKSITTPFGIEISSMLGGIPAITVVSIMLTGITGNVTAPLISKIFRVKHSVAVGIGIGVSSHAVGTSKAMEIGEIEGSMSALSIVFAGLLTLIWVPLLKFLV

SEQ ID NO: 3031 - protein, 362 aa, Pseudomonas putida KT2440
MNDLSHTHMRAAVWHGRHDIRVEQVPLPADPAPGWVQIKVDWCGICGSDLHEYVAGPVFIPVEAPHPLTGIQGQCILGHEFCGHIAKLGEGVEGYAVGDPVAADACQHCGTCYYCTHGLYNICERLAFTGLMNNGAFAELVNVPANLLYRLPQGFPAEAGALIEPLAVGMHAVKKAGSLLGQTVVVVGAGTIGLCTIMCAKAAGAAQVIALEMSSARKAKAKEAGANVVLDPSQCDALAEIRALTAGLGADVSFECIGNKHTAKLAIDTIRKAGKCVLVGIFEEPSEFNFFELVSTEKQVLGALAYNGEFADVIAFIADGRLDIRPLVTGRIGLEQIVELGFEELVNNKEENVKIIVSPGVR

SEQ ID NO: 3032 - protein, 238 aa, Peperomia caperata
  unsure (1)..(238): unsure at all Xaa locations
VQLKRMENKINRQVTFSKRRTGLLKKAHEISVLCDAEVALIVFSTKGKLYEYATNSSSMPGILDRYERHSFTDKEFFIKEGEPPEGAWTLEYAKLKARYELLQKNYRHYLGEDLGSLSGKELQQLEGQLDASLKNVRSRRTQALFHTISDLQKKEKSLLEQNSVMIKKLQDLEKAEKAQQSQLEMQNHERTQNQPPLILLPPPALSXGSFRQENGPSVEGEAAPRVAQKNSLLPPWMX

SEQ ID NO: 3033 - protein, 488 aa, Rhodococcus erythropolis
MSLSDHATGKNAGAAGAHHDGADFHAEDNSYLEKRTLRKGTAGWVLLAGLGVSYVISGDYAGWNNGLAEGGFGGLLIAAVVIAGMYLAMVLGMAEMSSALPAAGGGYTFARRAMGPWGGFATGTAILIEYSIAPAAIATFIGAYVESLNLFGITDGWWVYLAVYAIFIGIHLTGAGEALKAMFIITAIALVGLVVFAVSAVGLFDSSNLTDIAVDTSAVGSSSFLPFGLLGIWAAVPFAIWFFLAVEGVPLAAEEAREPEKNVPRGIIISMLILIVTGATVLFLATGALGADALSTSGNPLVEALGDSGAAKAVNYIGLAGLVASFFSIMYAYSRQTFALSRAGYLPKNLSVTNKRKAPTLALVVPGIIGFALSLTGEGAMLLNMAVFGAAVSYVLMMVSHIVLRKREPNMPRPYRTPGGIATTSFALVIAAVSVVATFLVDPVAALLTLVAFGVLMAYFGLYSRHHLVANSPDEEFAVLAQAEEELG

SEQ ID NO: 3034 - protein, 547 aa, Zea mays
  unsure (1)..(547): unsure at all Xaa locations
MALYLLFESASGYGLFHAYGIDEIGQSVXAVRSSVLDLDRFGKAVKLTAFNPFSSAVDALNQCNAXISEGIMTDELRSFLELNLPKPKEGKKAKYSLGVVEPKVGSHISEVTGIPCQSNEFVQELLRGVRLHFDRFINELKDSDLXEKAQLGLGHSYSRAKVKFNVNRVDNMVIQAIFLLDTLDKDINSFSMRVREWFSWHFPELVKIVNDNYLYAKXAKFIVNKSDLTEKDIPALADIVGDEDKAKEIVEAAKASMGQDLSPVDLINVQQFAQRVMNLSEYRKNLYEYLVTKMNDIAPNLTSLIGEVVGARLISHAGSLSNLAKCAASTLQILGAEKALFRALKTRGNTPKYGLIFHSSFIGRASTKNKGRMARYLANKCSIASRIDCYSEASTSVFGQKLREQVEERLEFYDKGVAPRKNLDVMKAAIDSMVNGTSMDDDDIEKTDASPKKSKKKKTKTKADGDAMDVDKPSNVAGGEAEPGTEKKKKKKKHKLEEEAQEENGAADTTPKKKKKKSREASEEAEPKTATDGKKKKKKKAKAEDDE

SEQ ID NO: 3035 - protein, 163 aa, Dunaliella tertiolecta
ASAQQPLNQQAPPPPTSFASQLQHTLGQQQFCDPTLIDRGLQHADKRRRDWIDVDALNEDDTQACSAYAVPIFEHLREAELVRRPNALYPEAFQTDVNAKMRAILVDWLVEVAEEYKLCADTLYLSVNYIDRFLSIHPVQRSNLQLVGIACMWIASKYEEIYP

SEQ ID NO: 3036 - protein, 219 aa, Gossypium aridum
DIYYWECKGYTPLFPRILGHEASGIVESVGEGVNDLKPGDHVLPIFTGECKECRHCLSEESNNMCELLRINCDRGVMLADGKTRFSINGKPIYHFVGTSTFSQYTVVHAGQVAKISPTAPLDKVCPISCGICTGFGATVNVAKPKKGQTVAVFGLGAVGLAAAEGARVCGASRIIAVDVNPRRFEEAKRFGITEFVNPKDYDKPVQEVIVEMTGGGVDR

SEQ ID NO: 3037 - protein, 434 aa, Schizosaccharomyces pombe
MDTPETSTPYEQVEKGSFFSFRPQKKRVTYHLDEQVGNYHYGDKHPMKPHRITITNHLVMGYGLHNKMSVFSPRMATFGEMSEFHREDYLDFLKRVTPDNAEQFADKFQQFNIGDDCPVFDGTYEFSQRSAGASLDASRKLVQGQTDIAINWSGGLHHAKRGEASGFCYVNDIVLAILNMLRFFPRVLYIDIDIHHGDGVQQAFYESDRVLTVSFHKYNGDFFPATGNFDENGVKGGKYFALNVPLEDGIGDEQYTSLFKSIIEPTINTFQPSAIVLQCGADSLGYDRLGVFNLSIHAHGECVRFTRSFNIPMLVVGGGGYTLRNVARAWCYETSICVNEQIPSELPRETLYYEFFAPDYTLHPRLTTKIENKNTPKALEDLRIRALEQLRYLGGAPSVQMQQIPPDLTGHLEEEDERLNDEYLDKAVDVRVRG

SEQ ID NO: 3038 - protein, 294 aa, Zea mays
IRLELTPVQPQKPVDSRGSHCNAGSDSGEAPFDICMSGNKCAVKLKPSIFETNRERKQRDRECSKDVRPLQLRPGMVLLKRFIKPNDQVKIVKLCSQLGVGPGGFYRPGYRNGALLKLWMMCLGKNWDPDSSSYGDRRLFDGAQPPTIPEEFQKFVQDGIQASHEFLKQQKGATNVVQEIPAMSPDICIVNFYNSSGRLGLHQDKDESQSSLDKGLPVVSFSIGETAEFMFGDVRDEEKISKVDLESGDVLIFGGESRLIFHGVNNTKPKTAPKWLTDETSLRPGRLNLTFRQY

SEQ ID NO: 3039 - protein, 760 aa, Zea mays
  unsure (1)..(760): unsure at all Xaa locations
MGEIGTDHRGLAEAEAGVGGKEEGIVLGGHEEEEETSPVEQVRLTVPSTDDPSLPVWTFRMWSIGLLSCALMSFLNQFFSYRTEPLIVTQITVQVASLPLGHFMARALPRARFRAPALLGGGEWSLNPGPFNIKEHVLISIFANAGFAFGNGSAYAVAIIDIIRAFYHRHISFFTAWLLVVTTQVLGYGWAGLLRKYVVQPAHMWWPGTLVQVSLFRALHEKDESAKASRQISRSKFFLVXLACSFAWDAVPGYLFPTLTSISWVCWVFSRSVTAQQLGSGMSGLGLGAFTLDWSTVSSFLFSPLISPFFATANIFFGYVFFVYVIMPAAYWGFDLYSAKTFPIFSSHLFMSNGSSYDVQSIVNNRFELDLDAYGKNGKVSLSVFFALSYGFSFATIAATITHVGLFYGKEIYYRFRSSQKEKPDIHTKLMERYSEIPAWWFYSLMALSIVVSLLLCTVLKREVQLPWWGLIFACGMAFVFTLPISIITATTNQTPGLNVITEYAMGLIMPGSPIAVVCFKVYGYMSMAQAVAFLSDFKLGHYMKIPPKSMFLVQFVGTIVAGTVNIGTAWWLLGSIDGICSDSLPPDSPWTCPNDRVFFDASVIWGLVGPRRIFGPDGNYGALNWFFLIGAAGPVIVYALHRTFPGQRWIPLINLPVLFGATAYMPPATAVNYNSWLLVGTVFNFFVFRYRKKWWTRYNYILSAALDAGVAFMGVVLYFSLTMQNKSIDWWGTAGEHCPLARCPTAKGVDLGDGVCPVF

SEQ ID NO: 3040 - protein, 318 aa, Enterococcus faecium
MEYRKSGHSGLKLPILSLGLWQNFGDYDPIHNQREILRGAFDMGITHFDLANNYGGPAGAAEKNFGRIFREDFQAYRDELIISSKAGYHMWEGPYGEWGSRKSIISSCDQSLQRMGLDYVDIFYHHRPDPDTPLEETAEALMQLVRQGKALYIGISNYNGEDTKKMTEILKRKEAPFIIHQMRYNMFSRALLEDDLSPVLEEEGLGAITFSPLAQGLLTNRYLHGIPEDSRAHRKEIPFLSEEQVGSTLEKIKALQTIAVSRGQSLAQMALAWNLRQKSVTSVLVGASRLSQLQESVRMMDNLDFSPEEELRIDQILE

SEQ ID NO: 3041 - protein, 302 aa, Oryza sativa
  unsure (1)..(302): unsure at all Xaa locations
XSVFSYQTDPNIPYELLLSYSIRPILLISGRSPLPPESSWHANAGNSTVAPEVRLDKQLQAWKNNPIWSDEPPEIKVTVPQGSLCNLNLKFKAGLPPDAVYNIIIDPENKRVFKNIKEVISRKVVLDEGQRQIVEVEQAAIWRFLWWSGVLSVHVFVDQNRTNHTVKFKQGRTGFMKKFEGCWKIEPLFVDKEACHPLDPCTLEKYDSCTNGTGRVGSSITLDQLIEPAMVPPPPFSWYLRGITTRTTEMLVNDLIAETARLRGAAAVRAGHGADALEVATRRRGTDPARRRRRRRRQRHQD

SEQ ID NO: 3042 - protein, 250 aa, Raphanus sativus
MTKNYPAVSEEYQKEIEKCKRKLRGLIAEKNCAPIMVRLAWHSAGTFDCASRTGGPFGTMRFDDELAHGANNGLHIALRLLEPIREQFPTISHADFHQLAGVVAVEVTGGPEIPFHPGREDKPQPPPEGRLPDATKACDHLRQVFLKQMGLTDQDIVALSGAHTLGRCHKDRSGFEGAWTSNPLIFDNSYFKELLSGEKEGLLQLPSDKALLDDPVFRPLVEKYAADEEAFFADYAEAHLKLSELGFADA

SEQ ID NO: 3043 - protein, 281 aa, Leavenworthia uniflora
MTTTTGQIIRCKAAVAWEAGKPLVMEEVEVAPPQKHEVRIKILFTSLCHTDVYFWEAKGQTPLFPRIFGHEAGGIVESVGEGVTDLQPGDHVLPIFTGECGECPHCHSEESNMCELLRINTERGGMILDGESRFSINGKPIHHFLGTSTFSEYTVVHSGQVVKINPKAPLDKVCIVSCGLTTGLGATLNVAKPKKGQSVAVFGLGAVGLGAAEGARIAGASRIIGVDLNSKRFEEAKKFGVTEFVNPKEHNKPVQQVIAEMTNGGVDRSVECTGSVQAMIQ

SEQ ID NO: 3044 - protein, 450 aa, Lactobacillus gasseri
MTNNNSVPKKLSFISIYFLGINAVIGSGTFLLPSVIYRYMNLTAILVLLCTAVTVSMIALCYADLSSRFTQSGAAWLYSYNAFGRFAGYELGIFTWFLGCTTLSAEVVALLTVLKSFLPIFKNNAVYIGSIIFLILLFSVINFFGRSWVKIVNNISAAAKIITLIVFIIVGAFFIKKANFTPVIPHAALTGVTPFFKHFGDAFTPIFYLFTGFSFIPIAAKQMNNPEKNIPRVLIAVMTSVTILDCLMLLVAIGLSGQKLGSYSNPLASALKTGVGQWGFAFMIIGMLISIFGVAFSASFNTPSLIASLANEHGMLPKWIGKKNKHDAPWVGIIFTAILSAALATQSYLFLVSCTVLASFVQYVPSILAVIKFKHSNEYPTHGFSLPGKYTVPIIALIISCYMVTNFTPKTLLLGAVVAVLAAACYFFIDKDEKLEKEHDDFLAKLRHIK

SEQ ID NO: 3045 - protein, 235 aa, Fusobacterium nucleatum subsp. vincentii ATCC 49256
MSDIIQKILFSPFFGIVLSLIAYEIGKYFFSKTKSIFCNPLLIGIILTIVFLMVLDIPFEAYDKGGSIIKIFISPVESVIIGVALYEQFQILKRNWFPILVSTVLGSTFSIIILYILGKLFGLPEDIFHATLPKSVTTAIALDIASKNGWQEALIPMMTVSTGIIGAVIAPVVTKFMKSRVAKGLAMGTASHAVGTAKAIEMGEVEGAMSGLALSLSAISTSFMIPLLLSTILKL

SEQ ID NO: 3046 - protein, 363 aa, Escherichia coli O157:H7
MSKNYHIAVLPGDGIGPEVMTQALKVLDAVRNRFAMRITTSHYDVGGAAIDNHGQPLPPATVEGCEQADAVLFGSVGGPKWEHLPPDQQPERGALLPLRKHFKLFSNLRPAKLYQGLEAFCPLRADIAANGFDILCVRELTGGIYFGQPKGREGSGQYEKAFDTEVYHRFEIERIARIAFESARKRRHKVTSIDKANVLQSSILWREIVNEIATEYPDIELAHMYIDNATMQLIKDPSQFDVLLCSNLFGDILSDECAMITGSMGMLPSASLNEQGFGLYEPAGGSAPDIAGKNIANPIAQILSLALLLRYSLDADDAASAIERAINRALEEGIRTGDLARGAAAVSTDEMGDIIARYVAEGV

SEQ ID NO: 3047 - protein, 224 aa, Triticum aestivum
  unsure (1)..(224): unsure at all Xaa locations
MAGEKGLVLLDFWVSPFGQRVRIALAEKGLPYEYVEEDLMAGKSDRLLRSNPVHKKIPVLLHDGRPVNESLIILQYLEXDAFPDAPALLPSDPYARAQARFWADYVDKKVYDCGSRLWKLKGEPQAQARAEMLEILKTLDGALGDKPFFGGDKFGFVDAAFAPFTAWFHSYERYGEFSLAEXVRPRSPAWAKRCGERESVAKSLYSPDKVYDFIGLLKKKYGIE

SEQ ID NO: 3048 - protein, 176 aa, Rhodopseudomonas palustris
MAIYELDGHRPDLPADGNCFIADSASVVGKVRLGSSVSVWFGAVLRGDNEWIEIGEGSNIQDGTTCHTDPGFPLRVGKGCTIGHNVILHGCTIDDSVLIGMGAIVMNGAKLARGCVVGAGAVVTEGKSFPENSLILGAPAKVARTLTPEQVQAMLAGAGFYVANGQRYAKGLKKIG

SEQ ID NO: 3049 - protein, 426 aa, Sporosarcina pasteurii
MLLTKEKNGMEIIEERESAVRSYSRSFPTVFEKAKDHLVWDVDGKEYIDFFAGAGSLNYGHNNEKMKTKIMDYVMNDGISHSLDMGTVARAEFLETFNEVILRPRNLDYKVMFPGPTGTNTVESALKIARKVTGRQNIISFTNAFHGMTLGSLSISGNSSIRNGAGVPLTNTISMPYDTFFKNGNAIDYLEQYLEDTGSGVDLPAAMILETVQGEGGINAASFEWLRGIEKLCRRYDILLIIDDVQAGCGRTGTFFSFEPAGIQPDIVCLSKSIGGYGLPLAITLIKPEHDIWEPGEHNGTFRGNNMAIVAATEALSYWKTDDLAKSVQKKSKIIKLRFEQIVEDYPELKATTRGRGFMQGIACGKGKEAYATKICAKAFEKGVIMETSGPSGEVVKFLGALTIDETSLIKGLGILEEATEEVVRQ

SEQ ID NO: 3050 - protein, 331 aa, Lactobacillus plantarum WCFS1
MSILVLGGAGYIGSHMVDRLVEHGTDVVVVDNLVTGHRAAVNSAAKFYQGDLRDADFLNHVFDTEDIEAVVHFAAFSIVPESMSKPLKYFDNNTGGMITLLETMQAHDVKQIVFSSTAATYGTPKQIPIKETDPQLPINPYGASKLMMEQIMHWADVAYGIKFVALRYFNVAGAKPDGSIGEDHGPETHLVPIILQVAQGKRDELKIFGDDYNTPDGTNVRDYVHVVDLADAHILALKYLAAGNDSNAFNLGSSTGFSNKQMLAAAREVTGQPIPAKLAPRRPGDPDSLVAASDKARDVLGWQPNYDNVNDIIETAWAWTQKHPNGYDDRD

SEQ ID NO: 3051 - protein, 426 aa, Rhizobium leguminosarum
MNATSLTDRKNAAISRGVGMTTQIYADRAENAEIWDKEGRRYIDFAAGIAVLNTGHRHPRVIAAVKDQLDRFTHTCHQVVPYESYVHLAERLNALLPGDFEKKTIFVTTGAEAVENAVKIARAATGRSAVIAFGGGFHGRTFMGMALTGKVVPYKVGFGAMPGDVFHIPFPVELHGVTADQSLAALKKLFAADVDPQRVAAIIIEPVQGEGGFYSAPAAFMKALRELCDQHGILLIADEVQTGFARTGRMFAMDHHEVAPDLTTMAKSLAGGFPLAAVTGRAAIMDAPGPGGLGGTYGGNPLGIAAAHAVLDVIVDEDLCNRANLLGGRLKQRLESMRETVPEIVDIRGPGFMNAVEFNDRTTGLPSAEFANRVRLIALDKGLILLTCGVHGNVIRFLAPITIQDEIFGEALDILEASMLQASAAK

SEQ ID NO: 3052 - protein, 233 aa, Triticum aestivum
MASLDTVRGDLGLVVLYLSKAEARDKICRAIQYGSKFLSNGQPGPAQNVDKSTSLARKVFRLFKFVNDLQALISPPAKGTPLPLILLGKSKNAMLSTFLFLDQIVWAGRTGVYKNKERAEFLGRIAFYCFLGSNTCTTIIELAELQRLSKSMKKLEKDLKHQELHKNEQYRMKLQKSNERLLALIKSSLDIVVAVGLLQLAPKKVTPRVTGAFGFASSLIACYQLLPAPAKSK

SEQ ID NO: 3053 - protein, 379 aa, Arachis hypogaea
MGAGGRVTKIEAQKKPLSRVPHSNPPFSVGQLKKAIPPHCFERSLFISFSYVVYDLLMAYLLFYIATTYFHKLPYPFSFLAWPIYWAIQGCILTGVWVIAHECGHHAFSKYQLVDDMVGLTLHSCLLVPYFSWKISHRRHHSNTGSLDRDEVFVPKPKSKVSWYNKYMNNPPGRAISLFITLTLGWPLYLAFNVSGRPYDRFASHYDPYAPIYSNRERLLIYVSDSSVFAVTYLLYHIATLKGLGWVVCVYGVPLLIVNGFLVTITYLQHTHASLPHYDSSEWDWLRGALATVDRDYGILNKAFHHITDTHVAHHLFSTMPHYHAMEATNAIKPILGDYYQFDGTPVYKALWREAKECLYVEPDDGASQKGVYWYKNKF

SEQ ID NO: 3054 - protein, 1372 aa, Cercospora zeae-maydis
MPTSNGGRTSPASLRSHHVRYASDSNIALRSTIMEQPEGPPELETYDSSGTNSSGNDGDEYAGTQESHSDSDGISSRHFVPGSGQAYAQDEVTPLTNVSTYGWSQPGSSNVSRTTTRGSVGSALPGTPAYEGTGTAMTNGTRRPANTRKESSNIYAPNRGPGSSMRYALNTGTRPRNGFTHMRRRNPNDEYRAQEKAYVQRIRQDGPDNDFQTEPRTPSLDYSFGSEDDEESPTNANYADHDPAEVDTLLYYGQEDLEPSVEELNIPANRERLEWHAMLANVLTGDVVKQEKKRLIGGPEQQGENTLKTEVWIGVRAKTCGRSIAAQKRLVEDGRSKVKQTIESIVAFEIKGEAEVGQSPMQQVQDVVKKIEKIEGLYPPRQAFRAAHPPAASSAYEHTCDAVIAWNNTTELIGTELGILQSWVGNMELDFTTARVRPEGEQHNELFDDSSFIDRILKEDGLKSLQGDKNLLNGVNTVIHKAKATLIANAEAFSDRHLPPYIEELLTLINFPSRLIQEIIRMRLSYAKKMKDAAQQGVMTAEQMILQFQILLQLAVKIKEQYLLIGQPEPGWDLPPCIDDNFDSVVLDALKFYFKMLNWKLMANKNTFKEAEILEQEWDFSNELGRHLDGGDVEVAEQFSSLTSKSMGRLAAPFEKELQRPADEVAGTAEMDKRYKSILDSVRVRQRKIFRFSRILSQRFENATEYNINIDNELYEDFLLALRLSGHFLVETNAESSVPTPGENEKAGGKVYILASPVLKERPKDIQSMLGTCYHAEDSPEDPSNPYVLILRPELPLVWEGDRMDASHSGKETLKVPQTLDLKTGRLRLVADGSLQRLQNANMAFTTATGNFDLTILVEQRANLCRESTKNWQRFAKLHTSSPTHSWTRSPLFALRSKPREGKAKAKNSTHPELLCFCYGIWSAFCHSHGRTTAGGQSHKLTKLALDWVSFICDDCVASDRKTFRWAVVALEFAMVMTRGQNILSISDEEYALLRSKVAGCRSLLISHFDIMGARGTVAAQAEKQRMDAMVGKLRLDIGKLKDDDESSRIVRAQWLDELEKLDQARKDREAERQALGRVLEDSNDADRALTHLSASAGNVHLRWQQGQFVGGGTFGSVYAAINLDSGHLMAVKEIRLQDPKMIPTVVSQIRDEMGVLQVLDHPNVVQYYGIEPHRDKVYIFMEYCSGGSLAGLLEHGRIEDETVVQVYALQLLEGLGYLHEASVVHRDIKPDNILLDHNGVIKFVDFGAAKVIAKQGKTMVADGPTGNGRQRSVQGTPMYMSPEVIKGGKHTGRLGAADIWSLGCVISEMATGSRPWANMDNDFAIMYNIANGNSPQMPTRDQMSDVGLDFLQAMLRTRPCEACVRCGASAT

SEQ ID NO: 3055 - protein, 289 aa, Capsella rubella
MMLEKDDLGLSLGLNYPKKQMNLNSNPSVSVTPSSSSFGLLRRSSLNESFTSSVPNSDSSQKETRTFIRGIDVNRPPSTAEYGEEDAGVSSPNSTVSSSTGKRSEREEDTDPQGSRGGISDDEDGDNSRKKLRLSKDQSAILEETFKDHSTLNPKQKQALAKQLGLRARQVEVWFQNRRARTKLKQTEVDCEFLRRCCENLTEENRRLQKEVTELRALKLSPQFYMHMSPPTTLTMCPSCEHVSAPPPQQPPQAATSAQHHRGSLPVNAWAQGTRISHGLTFDALRPRS

SEQ ID NO: 3056 - protein, 189 aa, Desulfitobacterium hafniense
YGASKLMIEQSFYWLEQAYGLKWMALRYFNAAGAAWDGSLGEAHTPETHLIPLVLKTALGQREAISIFGTDYKTPDGTCIRDYIHVLDLAEAHIRALEALEQGVPCGAYNVGTGTGYSVREVLAMAGKVTGLDIPVLEAPRREGDPDRLVAKVEKIQRRLGWQARYSDLETIIKTAWQWHQKHPHGYGD

SEQ ID NO: 3057 - protein, 394 aa, Rhizobium etli
MRARVASSPSGRSSHSRSNCGRTQENIMVKITAAVAVKPKSPLEFRELELADPEGNEILVRTVASGICHTDLLLRDGIFGPPAPVIPGHEGVGVVEAVGPEVQSLKVGDHVALSQSSCGFCADCRRSHPMNCQNYTQYNLTGLRPNGKKALLCDEVGIGSNFVGQSSFATHILATENNAALLPKTDLDLTDAAPLGCGMATGAGTVINAMKPEIGSTIAVFGAGAVGMAAVMAAKVRRCSKIIIIDLNQQRLDMAMGLGATHAINGKDPDVVNQIHALTGGGADFAIDAVGIIPVILNSIKCTRAGGHVVLLGLDALGNDIPIPLDLMVFNRKIQGAILGDQIPQLFIPQMMDLNQAGLFPFQKLITKYPFEKINEAIADAEAGRVIKPVVVFN

SEQ ID NO: 3058 - protein, 160 aa, Glycine max
EVAKPGEVKQVKVLGVMALLDEGETDWKIIVIDVNDPLAPRLNDVEDVERHLPGLLRATGARFRIYKIPDGKPENQFAFSGECKNKKYAMDIVRECAESWEKLITGKTQKGDINLTNTAVSHSNDRVEASTLNIPQGENKAPAPIDPSIDKWFYISGASA

SEQ ID NO: 3059 - protein, 434 aa, Hordeum vulgare
MQVRRDDDGAGGCAGDAVPGGGEGQDGVPARQPAGRVWGVSRAARATSGFKVLALGPETTGVIQRMQQLLDMDTTPFTDKIIAEYIWVGGSGIDLRSKSRTISKPVEDPSELPKWNYDGSSTGQAPGEDSEVILYPQAIFKDPFRGGNNILVICDTYTPQGEPIPTNKRHMAAQIFSDPKVTSQVPWFGIEQEYTLMQRDVNWPLGWPVGGYPGPQGPYYCAVGSDKSFGRDISDAHYKACLYAGIEISGTNGEVMPGQWEYQVGPSVGIDAGDHIWASRYILERITEQAGVVLTLDPKPIQGDWNGAGCHTNYSTLSMREDGGFDVIKKAILNLSLRHDLHIAAYGEGNERRLTGLHETASISDFSWGVANRGCSIRVGRDTEAKGKGYLEDRRPASNMDPYTVTALLAETTILWEPTLEAEALAAKKLALKV

SEQ ID NO: 3060 - protein, 166 aa, Zea mays
MNRKPGDWDCRACQHLNFSRRDACQRCSEPRGVGDRSGGGGDLGGRGGSSFGGGFGAGSDVRPGDWYCSCGAHNFASRSNCFRCSAYKEEAAGAFDSDMSRSRGYAGFGSGAAARTNRPGWKSGDWICTRSGCNEHNFASRMECFRCNAPRDSGSAATTTYENYLH

SEQ ID NO: 3061 - protein, 485 aa, Enterococcus faecalis V583
MTWLNKQVQKRPDHPAFYFQDESWTFLEVQQEVSHWVATYQQVLAPEEKRVALFSKNSKELYFSILALWELGKELLFLNTHLTLAELTFQLKDAQVKTIIGAPETQALLEEISFVDVQPMIKKQHSLSHQEFQQPSDLESVASIMYTSGTTGQPKGVLQRFKNHLASARGTQENMGITAEDCWLCAVPLFHISGLSIVVRQLVLGCSIRLYDKFDEQQVTQDLQEGRGTVISVVATMLQQLLSVYPEAGYSASFKGMLLGGGPIAPDKLAQCEEKGIPVIQSYGMTETCSQVVALKFEDAALKIGSAGQPLKDMQIKIVDELGQEQPEKQVGEILLKGPNVVSGYLNQRQPEKWTADGWFKTGDMGYLDAQSYLYLVSRLSELIISGGENIYPTEVEQVLQAITGIKAAAVVGEPDAQWGAVPVAYVISDQEITLAQIQDQCSRKLAKYKRPKRIYFCHSFPQTASGKIAKHRFMTEEREAFLIR

SEQ ID NO: 3062 - protein, 176 aa, Agrobacterium tumefaciens str. C58 (U. Washington)
MPLYRLADRVPQTPAPDRYWIAPDANVIGSVTLGEDVGIWFGATLRGDNEPISVGRGTNIQEGVMVHSDPGFAAVIGDMCTIGHHAIVHGCSIGDNSLIGMGATILNGAKIGHNCLVGANALVTEGKEFPDNSLIVGSPARAIRTLDEDTVAGIRRSAEKYIENWKRFSTDLAIIE

SEQ ID NO: 3063 - protein, 294 aa, Zea mays
GAQALDVVEAVVRELETDPFFNSGRGSALTRAGTVEMEASIMDGRGRRCGAVSGVSTVKNPVSLARRVMDNSPHSYLAFDGAEEFARAQGLETVDNSYFITEDNVGMLKLAKEAGSILFDYRIPLAGTDTCSALAGAADSNGGGVHKAGMVMNGLPISVYAPETVGCAVVDATGACAAATSTGGLMNKMAGRIGDSPLIGSGTYACGACAVSCTGEGEAIIRCTLARDVAAVMEYKGLPLQEAVDYCVKERLDQGFAGLIAVSGTGEVAYGFNCTGMFRGCATEDGFMEVGIWE

SEQ ID NO: 3064 - protein, 362 aa, Prochlorococcus marinus subsp. marinus str. CCMP1375
MASHKITLLTGDGIGPEISIVAKKILAALSEKHSITFTIEEKPFGGQAIELTGKPLPEDTLNSCKASDAVLLAAIGDPKYDDLPRDLRPETGLLNLRAGLNLFANIRPIKIRQALISSSSLKSEIIKDVDLVVVRELTGGIYFGQPKGRISTEEAGERAFNTMTYSDYEIDRIAKIAFDLSETRRKKICSIDKANVLEVSQLWRERVIKAQEQYPNIELTHQYVDNAAMQLVREPAQFDVILTSNLFGDIISDEAAMLTGSIGMLPSASLGEDGPGVFEPVHGSAPDIAHKNLANPIAMILSTAMMLRTGLMEYKAATDLENAIDKVLGKGFRTIDLNRDQSNTKLGCREMGDQIIKAINGI

SEQ ID NO: 3065 - protein, 350 aa, Thermoanaerobacter tengcongensis
MSIMDGLMTAVVKQYHKEGADIVKKEIPKIGPDEVLIKVKATSICGTDVHIYVWNEWAKSRIKPPKTMGHEFVGEVVEIGENVTSVKVGDLVSAETHIVCGKCRACRTGNAHICENTLILGVDTDGAFAEYIKVPESNVWINDKNIPLEILSIQEPLGNAVHTVFSGDVVGKSVAVIGCGPIGMMAIPLLKRTGAAAIFAIEPADYRRELAHKLGATRVINPLREDVVSIIKSETEGYGADVVLDFSGNPTAIRQGLEYIAKGGRMSILGLPDNEVPIDITNNVVFKGITIQGITGRRMYDTWYTVKGLLKSGLAEDLKPIITHTFPLTEYQKGMELMIKGQCGKVVLYP

SEQ ID NO: 3066 - protein, 439 aa, Raphanus sativus
MKGVRKTYDNSYTSSFLLVFFVLVLVHPAISMYINTLSATESLTISSNRTLVSPGDVFELGFFRTTSSSRWYLGMWYKKFSERIYVWVANRDNPLSNSIGTLKISGNNLVLLDHSNKSVWSTNFTRGNERFPVVAELLANGNFVMRDSNNNDASGFLWQSFDYPTDTLLPEMKLGYDLKKGRNRLLTSWRNSDDPSSGDYSYKLEPRRLPEFYLLQGDVRAHRSGPWNGIEFSGIPEDQKLSYMVYNFTENSEEVAYTFRMTNSSFYSRLTISSEGYLERLTWAPSSAVWNVFWSSPNHQCDTYRICGPYSYCYVNTSPSCNCIQGFNPENVQQWALRISISGCKRRTRLSCSGDGDGFTRMKNMKLPETTMAIVDRSIGVKECKKRCLSNCNCTAFANADIRNGGTGCVIWTGQLDDMRNYVADGQDLYVRLAAADLV

SEQ ID NO: 3067 - protein, 350 aa, Agrobacterium tumefaciens str. C58 (Cereon)
MKALVLEEKGKLSLRDFDIPGGAGSGELGPKDVRIRTHTVGICGSDVHYYTHGKIGHFVVNAPMVLGHEASGTVIETGSDVTHLKIGDRVCMEPGIPDPTSRASKLGIYNVDPAVRFWATPPIHGCLTPEVIHPAAFTYKLPDNVSFAEGAMVEPFAIGMQAALRARIQPGDIAVVTGAGPIGMMVALAALAGGCAKVIVADLAQPKLDIIAAYDGIETINIRERNLAEAVSAATDGWGCDIVFECSGAAPAILGMAKLARPGGAIVLVGMPVDPVPVDIVGLQAKELRVETVFRYANVYDRAVALIASGKVDLKPLISATIPFEDSIAGFDRAVEARETDVKLQIVMPQ

SEQ ID NO: 3068 - protein, 356 aa, Salmonella typhimurium LT2
MMDYARHEENRMKQQTNRNRRWVLASRPHGAPQMDNFRLEEDDVATPGEGQVLLRTVFLSLDPYMRGRMSDEPSYAPPVEPGCVMVGGTVSRVVASNHPDYRPDEWVLSYNGWQDYDISDGEGLVKLGDNPQHPSWSLGILGMPGFTAYMGLLDIGQPKEGETLVVAAATGPVGATVGQIGKLKGCRVVGIAGGAEKCRHATDVLGFDLCLDHHADNFPQQLAQACPQGIDIYYENVGGKVFDAVLPLLNTSARIPLCGLVSGYNATALPDGPDRLPLLMATLLKKRIRLQGFIINQDYGHRIHEFQQEMGRWIKEGKIHYREQITDGLENAPEAFMGLLAGKNFGKVVIRLADDA

SEQ ID NO: 3069 - protein, 214 aa, Paeonia rockii
IVESVGEGVTDLKPGGHVLPVFTGECKECRHCKSEESNMCDLLRINTDRGVMLSDGKSRFSINGQPIFHFIGTSTFSEYTVVHVGCVAKINPEAPLDKVCVLSCGISTGLGATLNVAKPKKGSSVAIFGLGAVGLAAAEGARIAGASRIIGVDLNPKRFEEAKKSGVTEFVNPKDYDKPAQEVIAEMTDGGVDRSIECTGSIMAMVSAFECVHD

SEQ ID NO: 3070 - protein, 581 aa, Zea mays subsp. mays
MKREYQDAGGSGGDMGSSKDKMMAAAAGAGEQEEEDVDELLAALGYKVRSSDMADVAQKLEQLEMAMGMGGVGGAGATADDGFVSHLATDTVHYNPSDLSSWVESMLSELNAPPAPLPPATPAPRLASTSSTVTSGAAAGAGYFDLPPAVDSSSSTYALKPIPSPVAAPSADPSTDSAREPKRMRTGGGSTSSSSSSSSSMDGGRTRSSVVEAAPPATQASAAANGPAVPVVVVDTQEAGIRLVHALLACAEAVHQENFSAAEALVKQIPMLASSQGGAMRKVAAYFGEALARRVYRFRPPPDSSLLDAAFADLLHAHFYESCPYLKFAHFTANQAILEAFAGCRRVHVVDFGIKQGMQWPALLQALALRPGGPPSFRLTGVGPPQPDETDALQQVGWKLAQFAHTIRVDFQYRGLVAATLADLEPFMLQPEGDDTDDEPEVIAVNSVFELHRLLAQPGALEKVLGTVRAVRPRIVTVVEQEANHNSGTFLDRFTESLHYYSTMFDSLEGAGAGSGQSTDASPAAAGGTDQVMSEVYLGRQICNVVACEGAERTERHETLGQWRSRLGGSGFAPVHLGSNA

SEQ ID NO: 3071 - protein, 405 aa, Desulfitobacterium hafniense
SYLIGGLVIFFIMRMLGEMAVDEPVSGSFSHFAYKYWGEFPGFLSGWNYWFNYIVVSMAELTAVGIYINFWFPDIPHWLTALVCLVLVTLLNLISVGTFGEFEFWFAIVKVVAIIGMIVFGLFLIFSGINGEATGFDNLWIHGGFIPNGMIGILFSLVPVMFSFGGIELIGITAGEADNPQKSIPKAINQVMWRILIFYVGALSVLMVLYPWNQVGADGSPFVMIFSKIGIPAAATLLNIVVLTAALSVYNSGVYSNGRMLYSLAMQGNAPKLFAKLNKRGIPVAGVLVSSGITLVGVILNFLLPGKIFTYLMAVAIIAAVITWTTIIIVNLKFRKAKIAQGEGDALHFKTPLHPYTNYFCAAFLVMIVILMAFTESMKMAVLVLPIWLLILWISFKIKKSRESK

SEQ ID NO: 3072 - protein, 466 aa, Arabidopsis thaliana
MNSGDVFILSRSKGHDMLAPFTAGWQSADLDPLVIAKSEGSYVYDDTGKKYLDSLAGLWCTALGGNEPRLVSAAVEQLNTLPFYHSFWNRTTKPSLDLAKVLLEMFTANKMAKAFFTSGGSDANDTQVKLVWYYNNALGRPEKKKFIARKKSYHGSTLISASLSGLPPLHQNFDLPAPFVLHTDCPHYWRFHLPGETEEEFSTRLAKNLEDLIIKEGPETIGAFIAEPVMGAGGVIPPPATYFEKVQAVVKKYDILFIADEVICAFGRLGTMFGCDKYNIKPDLVTLAKALSSAYMPIGAILMSQEVADVINSHSSKLGVFSHGFTYSGHPVSCAVAIEALKIYKERNIPEYVAKVAPRFQDGVKAFASGSPIIGETRGTGLILGTEFVDNKSPNEPFPPEWGVGAFFGAECQKHGMLVRVAGDGILMSPPLIISPEEIDELISIYGKALKATEEKVKELKAQHKK

SEQ ID NO: 3073 - protein, 141 aa, Canavalia gladiata
MPKVKADAKAADNRLKRKGAGAGRKQSKKAAKDPNKPKRPPSAFFVFMSEFREQYKKEHPTNKSVAVVGKAGGDKWKSLSDAEKAPFVARAEKKKEEYDKSILAYNRKLEGKNPSEEEKSDKSKSEVNDEDEDEEEDQDDE

SEQ ID NO: 3074 - protein, 507 aa, Pirellula sp.
MTSTLPPQRHQFANDHPPRHEGDYVVYWLIAQRRLHWNFALQHAIDRALEFEKPLLIFEPLRVRYQWASDRIHRFIIEGMRDNAAEAESLPVVYYPYVEPKPGVGSPLLHRLAKHACTVVTDEYPCFFLPHMIDAVKDKLPARLELIDSNGVLPLRAAEKTYTVAHSYRRFMQKNILPALEQLPLANPLDRNSNRPALPCPDGESMAERRKKLLPSKILSKWPAADLEKLLGQDGLSEIPIDHSVRPSQATPGGTVEATRRWQEFLNKKLSRYNDDRNHPDEHATTGLSPHLHFGHISAHEMVSSILEHEGWSADQTSKPNGKNHSFWNVGENAEALLDQLLTWREIGFNWSFQNPDTYDSLESLPDWAQKTLNETRDDERPHLYTLAEFENAETHDEIWNAAQRELVETGEMHNYMRMLWGKKILHWTQTPEEALEFMIHLNNKYGLDGRDPNSYCGILWVLGRTDRAWGPKRPVFGSVRYMTSDSTRKKLKLTKYLQRFAGSNKK

SEQ ID NO: 3075 - protein, 327 aa, Prochlorococcus marinus str. MIT 9313
MSGTLLFNALRDAIDEEMARDSHVCVMGEDVGQYGGSYKVTKDLYEKYGELRVLDTPIAENSFTGMAVGAAMTGLRPIVEGMNMGFLLLAFNQISNNMGMLRYTSGGNFTIPTVVRGPGGVGRQLGAEHSQRLEAYFHAVPGIKIVACSTPTNAKGLMKAAIRDNNPVLFFEHVLLYNLIEELPDGDYVCALDQADLVREGKDVTILTYSRMRHHCLKAVEQLEADGIDVELIDLISLKPFDMETIVRSIRKTHRVIVVEECMKTGGIGAELIALITEQCFDELDARPIRLSSQDIPTPYNGKLENFTIIQPHQIVEAAKQIVLKGL

SEQ ID NO: 3076 - protein, 495 aa, Pirellula sp.
METADVHDLLSALIHHAKQRPDEIALIDSQTGAAAFTWSELTCRVDATAIMLRSKFSEATTTKRLTYRCTNRPEDVVLSLACVAAGFTEIPIDAFLPAPQQDVLIKRSKALHWAHEIHANSIHSSKVADAISNLETAARDVDIHSPSLVLWTSGTTSEPRGVMLSQHNLTTNAKAKLLAVPQHTSDLRLSLLSIAHAYARTSDMGTWLLSGCRWSLGRGRSTLRSLPENLCPTLINAVPVLINDILNRIESGQSSLQSLRLLGCGGVAMSLGQFERCKQNGIGVIQGYGCTETSPVICSASPDNATPNRVGPLVAGWESKVEHGRLFVRGPGVMIGYLDEEAATQQKVSPGGWLDTGDLVEIHDDGQFQILGRADDVIVMDNGFKVFPATIERQLLQLEGIEQAVLLHHQGQLCLLLSHSQPQVTADAPTGRDPIESCLADSLPPGTSVKRLKLSEPLSIKSGELTAKGTPRRPIIRQRRLSSPPDSRPNHSRDP

SEQ ID NO: 3077 - protein, 235 aa, Zea mays
MASLDAVRGDLALLILYLNKAEARDKICRAIQYGSKFISNGEPGPAQNVDKSTSLARKVFRLCKFVNDLHALISPPAKGTPLPLILLGKSKNAMLSTFLFLDQIVWAGRTGIYKNKERAEFLGRIAFYCFLGSNTCTAIIELAELQRLSTSMKKLEKELKHQELYKNEQYRMKLHKSNERLLALVKSSLDIVVAVGLLQLAPKKVTPRVTGAFGFASSLIACYQLLPSPPAKQSK

SEQ ID NO: 3078 - protein, 143 aa, Zea mays; identical to SEQ ID NO: 1020

SEQ ID NO: 3079 - protein, 136 aa, Taraxacum japonicum
YFLVLDDIMDESHTRRGQPCWFRLPKVGMIAANDGIILRNHVPRILKKHFRGKPYYIDLVDLFNEVEFQTASGQMIDLITTLVGEKDLSKYSLSIHRRIVQYKTAYYSFYLPVACALLMFGEDLEKHVEVKDVLVE

SEQ ID NO: 3080 - protein, 370 aa, Zea mays
  unsure (1)..(370): unsure at all Xaa locations
MEALKKQASKLREHVAKQQQAVLKQFSTRYSQDPSLVDEAELECHQNLQRLYSTTRAAKHFQRNIVRGVEXGFIAVSTKQMEIVKKLAGDCWKYGDDNQHFGFALARASEEFGKSHKQIEKEREDLLKILGEQIFEPLREMIMSAPLEDARLLTYRYQRIRQDMESQVTDVMRKQLKSKESSGNTDNSVKLQHAESKLSDLRTTLAALGREATAAMEAVEAQQQQVTYERLLAMVDAERTYHQNAADILNKLHDEVCNLPTKIQVHSRSTSEDPVLTKPSESTGNSQEVQFLGEVSHEFLFYLLFGQVIHPFDAQADGELSLAVGEYVVVRQVAANGWSEGECKGKAGWFPSAYVEQRDKAPASKVIEPG

SEQ ID NO: 3081 - protein, 263 aa, Candida albicans
MPKNTLYVTGFSRESKAADLAPDFEKYGELVRLDIPPPRSDDGEKYAFVEYKDAESCERALELDGKTLPYSIKDGLVVQVARSDPYRVRQQFSGPRGGYRDGGYGGRGGYRDGGYGGRGGYRDGGYGGRGGYGGGRGGGYGGYRDGGRGGYRDGGRGGYGGYRDGGRGGGYGGYRDGGRGGGYRDGGYRDGGYRDGGRGGYGGGRGGYDRDREEGRGGYDREEDRGGYERDEGREPRVEERRYSRSPSRSPPRRDRSRSPERY

SEQ ID NO: 3082 - protein, 398 aa, Buchnera aphidicola str. APS (Acyrthosiphon pisum)
MKKITILGSTGSIGINALSIIQKNPDLFKVIALVANKNFSIMLRQCELFSPDWVAMRDEKSAHILRKKLKHSKINTQVLTGEKDICALAALEETDHVISAIVGMAGLLPTLSAIHAGKTILLANKESLITSGYFFMKALSSSGAKIIPIDSEHNAIFQVLPLEIQKNLGKTTLEKNSIKHLVLTGSGGPFYKFSSSDLSNVTPDQACSHPNWLMGKKISVDSATMMNKGLEYAEARWLFNALESEIKILIHPESIIHSMVQYYDGSLLAQLSVPDIRTSISYAMSWPDRICTEVDYLNFYKINNLTFFEPDFTQFPCLKLAIDAFSQGQASMTVLNAANEIAVSSFLDSKISFTKIYEINMEILMSSCFSEPKCIQDILEIDRKVRILAKNKVSSLIF

SEQ ID NO: 3083 - protein, 341 aa, Corynebacterium efficiens YS-314
MGGMGILDSLSVPVIVAPMAGGPSTPELVTAAGQVGSLGFLAGGTSSVAQFRTQLAQVSGRFGVNLFRPQEEKPTPSDVDEVAGLLTQAFREYRLGEPVVPAVDLTNGWAEKFHLAVAARPAVISSTFGMFTPDEFATLKQAGIEAWVTVTNENDARTAERAGADVLVVQGPEAGGHRSTWSLTEEPDRRSLDELLRAVVGQVRIPVVAAGGVSTREGVQRMLDLGASAVACGSVFLLADEAGTSATNRELLLTAGERGVTTTCSRAFSGRYARGVKTRFVRENESLPPVYPYLNVMIAPLRAAAGATGNWDYAYCLVGTGIGNIKTGSVKQILSTMNPSV

SEQ ID NO: 3084 - protein, 164 aa, Glycine max
  unsure (1)..(164): unsure at all Xaa locations
GFHGVVSGFLVGVKQIIPDQELPFIKIKXSFWTLEATAYLPTIISGTYISWIYLRYWQRKPETKHRGDLSEDFAFSTFFPEFLRPVIPAVDPIASVFHRMLCGRYDASNDGQGYSLESEPLPGSDSIEASRRRERGARALEERLAAERLAAARRELQREAEENV

SEQ ID NO: 3085 - protein, 448 aa, Coxiella burnetii RSA 493
MRVTPLDQKLDAEPIKEFGGAWGVFFIMLGSHLVLYYLWIAWRFYGGALIYPHGFSDVLPFFNRFFNYIVNNAAPTWEAWGIYLTFLIIQGIFAAFLPGIKIKGLPIPSKGNVQLEYQCNGISAWYITLALIAVLHFTAIFPLTKIYNQFGSLMTVAIISGDIMALIIYWGAKLTQNTHRMSNNFWYDYFMGAWLNPRIGKLDLKMWAEIRIAWILLFLLTLSAAAHQYATYHVISTPMIFMVLAHGLYTNACMKGEECIPTTWDIFYEKWGWMLIFWNFAGVPFVYCFNSMYIASHAPFEHSLPYTLLCFALLIGAYYVWDTSQSQRNRFRMQERGTYVKRKAFPQLPWGTLKNPTYFQTKHGSLLLTDGWWRYARKIHYTADIVMALSWGLICGFNHFLPYFYVIFFVGMIAHRARRDINRCRQKYGEDWDHYCKKVPWLFIPFIF

SEQ ID NO: 3086 - protein, 478 aa, Vitreoscilla sp. C1
MYKKSTIRIFATTSHKMNIDKEINMTNTTLNATANHLHPFSDNQQLKEKGVRVITKADGIYIYDDAGNKIIDGMAGLWCVNIGYGRKELADIARDQMNELAYYNTFFKTSHPAVINLSAKLASIAPAGFNHVFYTGSGSESVDSMIRMVRHYWDSVGKPSKKTLIGRWNGYHGSTIGGVSMGGMKGMHKQGGFPIEGIVHIEQPWFYGLHEEGETAEQFGIRAANWLEEKILEIGADNVAAFVGEPIQGAGGVIIPPSTYWPRIQEICQKYDILLVADEVICGFGRTGEWFGHETFGFQPDIFTTAKGLSSGYLPIGAVFVGDKVVEGILKGGDFNHGFTYAGHPVAAAVALKNVEILDDEGIIKNVHDKTGPYMQAKWREMLSQFKYVDDVRGVGLIQGFTLVKNKATREMFPNEGETGTMLRDIFFSNNLIMRACGDHIVASPPLTITKEEIDLMLATAEKCLQEFETAMDSKLGA

SEQ ID NO: 3087 - protein, 178 aa, Streptomyces coelicolor A3(2)
MTQKALITGIGGKDPKVDAEVFVAPTASVVGDVTLHAGASVWYGAVLRGDVERISVGADSNVQDNCTLHADPGFPVTVGERVSIGHNAVVHGATVEDDCLIGMGATVLNGAVIGAGSLVAAQALVPQGMRVPPGSLVAGVPAKVKRELTEEERQGVTLNGTMYAALAGQHRDAVGEVR

SEQ ID NO: 3088 - protein, 220 aa, Gossypium schwendimanii
DVYYWECKGYTPLFPRILGHEASGIVESVGEGVNDLKPGDHVLPIFTGECKECRHCLSEESNNMCELLRTNCDRGVMLADGKTRFSINGKPIYHFVGTSTFSQYTVVHVGQVAKISPTAPLDKVCPISCGICTGFGATVNVAKPKKGQTVAVFGLGAVGLAAAEGARVCGASRIIAVDVNPRRFEEAKRFGITEFVNPKDYDKPVQEVIVEMTGGGVDRS

SEQ ID NO: 3089 - protein, 104 aa, Cucumis sativus
ILVREDGHIMLTDFDLSLRCTVNPTLLKSSSFNADLVKTSGPCTDSSCAEPFCIEPSCQVPCFSPRFLPAAAKTRKSKPDLTTQIRSLPQLVAEPTDARSNSFV

SEQ ID NO: 3090 - protein, 896 aa, Pseudomonas viridiflava
MAAVLGGYFTWMQLYELQSQLLQRGEMIAQDLAPLSANALGRKDKILLTRIATQTLEQSDVRAVSFLDTDRSVLAHAGPTMISPSPIGSSTQLLNSSGNDATRYLLPVFGHQRHLTSPIIPAEADTLLGWVELEISHNGTLLRGYRSLFASLLLIFTGLAFTAILAVRMSRTINGPLSQIKQAVSQLKDGNLETRLPPLGSRELDELASGINRMAATLQNAQEELQMSIDQATEDVRQNLETIEIQNIELDLARKEALEASRIKSEFLANMSHEIRTPLNGILGFTHLLQKSELTPRQYDYLGTIEKSADNLLSIINEILDFSKIEAGKLVLDNIPFNLRDLLQDTLTILAPAAHAKQLELVSLVYRDTPLALSGDPLRLRQILTNLVSNAIKFTRQGTIVARAMLEDETEEHAQLRISVQDTGIGLSSQDVRALFQAFSQADNSISRQPGGTGLGLVISKRLIEQMGGEIGVDSTPGEGSEFWISLNLPKAREDREETANQALEGLRAAVLEHHDLARQALEHQLEDCGLQTVVFTNLENLLNGVTAAHETPQAIDLVVLGVTALEISPERLRQHIWDLENLNCKVMVLCPTTEHALFQMSVHDVYTQLQAKPACNRKLQKALSELVAPRAVRTDVALPLSSRAPRVLCVDDNPANLLLVQTLLEDMGAEVVAVDGGYAAVSAVQQEAFDLVLMDVQMPGMDGCQATEAIRAWETERNQTSLPIVALTAHAMANEKRSLLQSGMDDYLTKPISERQLAQVVLKWTGLALRNPIPERQTESSNAHVGPLVLDHEEGLRLAAGKPDLAADMLAMLLASLDADREAIRAARANDDIQGLIERVHRLHGATRYCGVPQLRTACQRAETLLKQNAPHTEDALDDLDKAITRLEAEARVTA

SEQ ID NO: 3091 - protein, 166 aa, Triticum aestivum
  unsure (1)..(166): unsure at all Xaa locations
ANAGACSVFAINLVTALRVFYGKPISFLVSLLVVLTSQVLGFGWAGIFRRYLVEPAAMWWPSNLVQVSLFRALHEKERRRKGGMTRTQFFMVAFACSFAYYIFPGYLFEMLTSISWICWIFPASVVAQQLGSGLHGLGIGAIGLDWSSISSYLGSPLASPLFXTAN

SEQ ID NO: 3092 - protein, 398 aa, Escherichia coli O157:H7 EDL933
MKQLTILGSTGSIGCSTLDVVRHNPEHFRVVALVAGKNVTRMVEQCLEFSPRYAVMDDEASAKLLKTMLQQQGSRTEVLSGQQAACDMAALEDVDQVMAAIVGAAGLLPTLAAIRAGKTILLANKESLVTCGRLFMDAVKQSKAQLLPVDSEHNAIFQSLPQPIQHNLGYADLEQNGVVSILLTGSGGPFRETPLRDLATMTPDQACRHPNWSMGRKISVDSATMMNKGLEYIEARWLFNASASQMEVLIHPQSVIHSMVRYQDGSVLAQLGEPDMRTPIAHTMAWPNRVNSGVKPLDFCKLSALTFAAPDYDRYPCLKLAMEAFEQGQAATTALNAANEITVAAFLAQQIRFTDIAALNLSVLEKMDMREPQCVDDVLSVDASAREVARKEVMRLAS

SEQ ID NO: 3093 - protein, 263 aa, Zea mays
MLEEAIPALLSAVHGWFTPAVLFVVLNIVIGTIAVTSKAAASATGGDEEEVAAAGAGWEPHRRLARVPSMAFERLKSFNGRFATAEPAPAETGVVDLGYNKQPHTAEMEKEGPVVVEGAVDPEPEPEPQHAAHMERSRSEADAEAKLPLLPSRLHKSASDKSAFAHFGAEEVEETVRAVEARRPATTRENRGRRLPVAEPEPASESSESESESEEEEASGGEVDARADDFINQFRHQLKLQRIDSFIRHRETVRRGQAAAQGV

SEQ ID NO: 3094 - protein, 161 aa, Oryza sativa
MAAPDVEYRCFVGGLVFATDDRSLEAAFSTYGEILESKIINDRETGRSRGFGFVTFSSEQAMRDAIEGMNGKELDGRNITVNEAQSRRSGGGGGGGYGQRGGGGGYGGGGYGGGGGGGGYGQRREGGYGGGGGYGGGRGGGGYRGGYRSRGGGNSDGNWRN

SEQ ID NO: 3095 - protein, 356 aa, Vibrio parahaemolyticus RIMD 2210633
MKDKKKQSKEYTKPIVISVGLHALLVAALLWGTDFAMTKPEPTGQMVQAVVIDPKLVQQQAKEIRQQREKAAKKEQDRLDKLRREAEQLEKNRKAEEEQIRKLKEQQAKDAKAAREAEAARKQKEQERKAEEERVRQEKERTAKLEKERKAKEEAVRKAEQERLAKEAAIAKAEQERVAREKAAKEAEEKAKREREAAQKAEQERIAKEKAAKEAAEKARKEKERLKRLERERKEQEAALDDIFAGLESEASANQQAQGKFVADEVSRYSSIYIQLIQSRLLKDDYLLGKECRVNIKLIPTGTDMIVSSVNVLSGDSRVCAAAKSAIAQVPSFPMSTDSTVNQRLKDINLTVALQQ

SEQ ID NO: 3096 - protein, 218 aa, Pseudomonas aeruginosa UCBPP-PA14
MVFYLLTLALMLAIVPWDQAGQSQSPFVTVMQAIGLPGATGVMNFVVLVAALSAMNSQLYITTRMMFSLSRAGHAPKGLGELSRQGVPLNALLLSSVGIALATLLNLVYPEQSFTLMMAVSMFGALFTWLMIFFTHLCFRRHRARHGGAPLAFRMRLAPWSTLLGLALMAAILVTTFFTEAFRMTLVFGVPFLALLSALYLVFVRKPGRDCPIERATP

SEQ ID NO: 3097 - protein, 294 aa, Zea mays
MAIPNAFDSSLAVRSAVGAALAAVIAVRAVRRRSLDASGGVAGFVVMAVHIACGYRYGALLLAFFFSSSKVTKIGEDHKRRIEENFKEGGQRNWIQVLANSTIATVLVVIFALMTGGQDQCMDSNGSKLITGIIGGIIGHYCCCNGDTWSSEIGVLSNEQPRLITSLKPVRKGTNGGVTLQGLLAATGGGLIIGLTFVVVGLLTAECSSDMAIRQLLVLPISAAAGLLGSLIDSLLGATLEFSGYCSVRKKVVSKRGPTVTRISGMTILDNDAVNAVSILLTTVLTAYVCIYIF

SEQ ID NO: 3098 - protein, 464 aa, Lardizabala biternata
SGKPFYAIIHRVTGSLIIDFEPVKPYEVPMNAAGALQSYKLAAKAIARLQSLPNASMDRLCDTVVQEVFELTGYDRVMAYKFHDDDHGEVVSEITKPGLELYLGLHYPATDIPQAARFLFMKNKIRMICGCNATHVKVFQDEKLPLDLTLCGSTLRAPHSCHLQYMDNMGSIASLVMAVVVNEGDEENDGSGPAQPQKRKRLWGLVVCHNTTPRFVPFPLRYACEFLIQVFAIHINKELELENQVLEKTFYVPQTLLCDMLMRNAPLGIVSQSPNIMDLVKCDGAALLYKNKIWRLGLSPSEFHIRDIASWLYEYHMDSTGLSTDSLHDAGFPGALSLGDGVCGMAAVRITSKDMIFWFRSHIATEVRWGGAKHDPSEKDDGRKMHPRSSFKAFLEVAKTRSLAWKDYEMDAIHSLQLILRNAFKDGDTADLNSSVIHSRLDNLKIDGMEELEAVTNEMVRLME

SEQ ID NO: 3099 - protein, 367 aa, Oryza sativa
MAAASSLHAAPRVGSSSSFSSSSSAGRRSASAARSVRVAAAAGSHEVLLFEALREALIEEMKEDPTVCVFGEDVGHYGGSYKVTKGLAEMFGDLRVLDTPIAENSFTGMGVGAAMKGLRPVVEGMNMGFLLLAYNQISNNCGMLHYTSGGQFKIPIVIRGPGGVGRQLGAEHSQRLESYFQSIPGLQMVACSTPYNAKGLMKAAIRSENPVVLFEHVLLYNLKEKIPDEEYVLCLEEAEMVRPGEHVTILTYSRMRYHVMQAAKTLVNKGYDPEVIDIRSLKPFDLHTIGNSIKKTHRVLIVEECMRTGGIGASLRSAIIDNFWDYLDAPIMCLSSQDVPTPYAAPLEDATVVQPAQIVAAVEQICQ

SEQ ID NO: 3100 - protein, 343 aa, Streptococcus mutans UA159
MARELLFMKAINEALDMAMAKDDKIILLGEDIAGGVKVKHLEEQNEEAWGGVMGVTSGLMAKYSRDRVIDTPLSEHGYMSASVGMALTGLHPVPELMFNDFIGFCFDALIGQGSKMRYMFGGKAKVPMTVRTMHGAGASAAAQHSGSYYGIFGSIPGIKVVVPATPYDAKGLLLSALEDDNIVIFSEDKTLYGFKGEVPEDYYTVPIGKAVVRREGNDLTIVTIGKMLYVAYEVADRLAKDGISVEVIDLRTVAPWDQETVLNSVKKTGRLIVIDESNPHNNTATDIASVVNDKAFDYLDGPIKCVCAPNVPVPFAINLEQLYIPNADRVIEAAAELIDDLKA

SEQ ID NO: 3101 - protein, 495 aa, Zea mays
  unsure (1)..(495): unsure at all Xaa locations
MAAAVNGSLDVHERKAQKSYWEEHSGELNLEAIMLDSRAAELDKEERPEVLSLLPSYEGKSILELGAGIGRFTGELAKTSGXVFAVDFVESVIKKNGSINDHYGNTSFMCADVTSPDLMIEANSIDLIFSNWLLMYLSDEEIDKLVERMVKWLKVGGYIFFRESCFHQSGDTERKFNPTHYREPRFYTKVFKECQTFNQDGTSFKLSLITFKCIGAYVNIKKDQNQICWLWKKVNSSEDGGFQSFLDNVQYKATGILRYERIFGDGYVSTGGAETTKEFVEKLNLKPGQKVLDVGCGXGGGDFYMAEKYGTHVVGIDLSINMIMFALERSIGCKCLVEFEVADCTTKTYPDHMFDVIYSRDTILHIQDKPSLFKSFFKWLKPGGKVLISDYCKSPGKPSEEFATYIKQRGYDLHDVEAYGQMLKNAGFSHVIAEDRTDQFLSVLQKELDKFEKNKDDFLSEFAQEDYDDIVNGWKAKLQRSSAGEQRWGLFVATK

SEQ ID NO: 3102 - protein, 122 aa, Glycine max
MVMAWKWIVRRTRESKPFFLAFATICGVVPGVIGYGVMQLTNTRNEKLESHLRTNARPESLMMGQVNKERLAEYLGELQRKEDTNDRYVAALRGETLTRKPYVRIQPIPEHIDTKANKEQKN

SEQ ID NO: 3103 - protein, 294 aa, Saccharomyces cerevisiae
MKTLVHVASVEKGRSYEDFQKVYNAIALKLREDDEYENYIGYGDDLVRLAWHISGTWDKHDNTGGSYGGTYRFKKEFNDPSNAGLQNGFKFLEPIHKEFPWISSGDLFSLGGVTAVQEMQGPKIPWRCGRVDTPEDTTPDNGRLPDADKDAGYVRTFFQRLNMNDREVVALMGAHALGKTHLKNSGYEGPWGAANNVFTNEFYLNLLNEDWKLEKNDANNEQWDSKSGYMMLPTDYSLIQDPKYLSIVKEYANDQDKFFKDFSKAFEKLLENGITFPKDAPSPFIFKTLEEQGL

SEQ ID NO: 3104 - protein, 681 aa, Pyrobaculum aerophilum str. IM2
MRRPWEFLKGDTFPKLLQERALLNPRGVAFREKTWGIWRPTTWHEYYERVSKFAYGLLALGFRRGDHLAVVGYNRPEILIAEQSAMALGGISVGVYPDTLPEERAYWLDYTDVKVVVAEDQEQVDKILVVKKDLPKLEYIIYWDERMMWQYKDIKEPGLLSWKEVEKLGEEVRKSDSKLLEELIAKTHPDDVCLILSTSGTTGRPKGVMLTYSSMMSMAKNLWEVDPIQENFEYVSYLPFGWIGEQMMSLAMHMLVGFKINFVEEPETFWRDFREIAPHFMFGPARVYEMIYSKIMEHLEDTWDFDKKIFEIALNIGYRKVEAELTGKRIPFWLTLLWHISRMLIYRSILDKTGLKRIKYAYVGGSFLGPDYLKFYRALGVNLKRIWGMTEVSGIATVHPDNEVRLDTVGKPIANTEIKIAEDGEILVRTPAVMAGYYKRPEATAEALKEIVSLVGPNGAGKSTTLKAISGIVKTERGEITKGRILYNGEDLTNRKPEDIARLGIIHVLEGRRVFEELTVKEHLILAQRQARKLGAKPDVDIVFQYFPRLKERTDIRAGYLSGGEQQMLVIGMALIMRPKVMLLDEPSLGLSPKVTEELFQILKSMNEHEKITILLAEQNVYMSLRISNYGYILENGRVVLDGPSEQLLNNPDIKEFYLGLKGERFSYKDVKYWKRKKRYL

SEQ ID NO: 3105 - protein, 357 aa, Xanthomonas axonopodis pv. citri str. 306
MMTRFSNVDAFQQRFGLRLPILLSPMAGACPVPLSAAVANAGGMGAMGAVLSQPHDIVAWMAAFREASAGPAQINLWIPDPAPARDAAAEARLRAFLAQWGPPVPETAGDATPADFDAQLDALLAARPAVASSIMGIFRPDQVARLTNAGIAWFACATTLDEALAAQAAGADAVVAQGAEAGGHRGAFEAGRAAQQMTGLLALLPRLVDRLDIPVIAAGGIADARGIAAALTLGASAVQIGTGLLRTPEAALPSAWADALSQAEPEHTQPTRAFSGRLGRALTTPYVGAANAADAPPPAPYPVQRGLTAPMRQAAARDNRLDAMQAWAGQSAWMAPAQPAAQVVTQWWEQAQALLCR

SEQ ID NO: 3106 - protein, 144 aa, Zea mays
  unsure (1)..(144): unsure at all Xaa locations
MATADTAAGRGATRFTLLAGGGLRSRISRLRNAARVQRHRGLTTTGLLENADLQPNEHGKADMLDYRVFLRHDFFLNAPPRQDVPLLAGDGVLHFHREIPKESSAQMEGATXEALTSIKYDTNDVNRPYYPHNIKWNYGRLPRT

SEQ ID NO: 3107 - protein, 325 aa, Ralstonia eutropha
MATAPHLPPILQNLTLPVISSPMFTVSYPELVLAQCKAGIVGSFPALNARQPELLDEWLTLMREELDTFRAANPGAIVGPLAVNQIAHTSNVRLEQDVATCVRHRVPIFITSLRAPVREIVEAVHSYGGIIFHDVVNLRHAEKALEAGVDGLILVAAGAGGHAGTLSPMALVGEVRRRFNGPIALSGAIATGDAILAAQAMGADFAYIGTRFIASEEANASPDYKQSLIKAGASDIVYSNLFSGVHGNYVRESIERIGLDPDNLREGEKSKMSFADGRSKPKAWKDIWGAGHGVAQIHDIPTTSEIVRRLSREYVAARDRIARLP

SEQ ID NO: 3108 - protein, 112 aa, Zea mays
SIGGGFGAGSDVRPGDRDCSCGAHNFARRSNCFKCSAYNEEAAGALDSDMSRSHGYARFGRGAAARTKRPGLESGDWVCTKSRCNEHNFSNTMECFKWNTPQDSGSAATTTY

SEQ ID NO: 3109 - protein, 195 aa, Zea mays
  unsure (1)..(195): unsure at all Xaa locations
SARGGSVRGDAWRASTVYGPTATAPPPGSAQPAGAPASAAPVKEFTHTCNVLAXVLIXGYDDALXVLSAALNYLGIIPSKTIPYVXTVFTAXYIKRGLPAAIGSSLGRLFCGKDIESXWGRYEFLNIIIMINCIXGILATXFAIVLYYVTGKESFLVTTLSGFARMLAGLLGSXKQVLPKLELTMXLFWKIRQSG

SEQ ID NO: 3110 - protein, 860 aa, Aspergillus niger
MRFTLIEAVALTAVSLASADELAYSPPYYPSPWANGQGDWAQAYQRAVDIVSQMTLDEKVNLTTGTGWELELCVGQTGGVPRLGVPGMCLQDSPLGVRDSDYNSAFPAGMNVAATWDKNLAYLRGKAMGQEFSDKGADIQLGPAAGPLGRSPDGGRNWEGFSPDPALSGVLFAETIKGIQDAGVVATAKHYIAYEQEHFRQAPEAQGFGFNISESGSANLDDKTMHELYLWPFADAIRAGAGAVMCSYNQINNSYGCQNSYTLNKLLKAELGFQGFVMSDWAAHHAGVSGALAGLDMSMPGDVDYDSGTSYWGTNLTISVLNGTVPQWRVDDMAVRIMAAYYKVGRDRLWTPPNFSSWTRDEYGYKYYYVSEGPYEKVNQYVNVQRNHSELIRRIGADSTVLLKNDGALPLTGKERLVALIGEDAGSNPYGANGCSDRGCDNGTLAMGWGSGTANFPYLVTPEQAISNEVLKHKNGVFTATDNWAIDQIEALAKTASVSLVFVNADSGEGYINVDGNLGDRRNLTLWRNGDNVIKAAASNCNNTIVVIHSVGPVLVNEWYDNPNVTAILWGGLPGQESGNSLADVLYGRVNPGAKSPFTWGKTREAYQDYLVTEPNNGNGAPQEDFVEGVFIDYRGFDKRNETPIYEFGYGLSYTTFNYSNLEVQVLSAPAYEPASGETEAAPTFGEVGNASDYLYPSGLQRITKFIYPWLNGTDLEASSGDASYGQDSSDYLPEGATDGSAQPILPAGGGPGGNPRLYDELIRVSVTIKNTGKVAGDEVPQLYVSLGGPNEPKIVLRQFERITLQPSEETKWSTTLTRRDLANWNVEKQDWEITSYPKMVFVGSSSRKLPLRASLPTVH

SEQ ID NO: 3111 - protein, 479 aa, Fusarium sporotrichioides
MAENLTSDVPGPAGIPYFGNYLEIYPDHLGNHQRLFEKYGPLFTTSSMGNRLYQTNNSELSNIFLSEDHYFTKDIVPGHPLHPIKNQEAGVFLADTNTEQWRLAHKFLPPALGPKAVRHYAPTMQRTVESSFKVFDELDQKGEAWNVYQYMLKLGSQAVGKLVLGMDFAHFEQVDSPLHEMVLKIAENLELNKRVSSMGAWYAQMPFGDPKKVRQTMARIMEMMDESIARASKGQEDLELQDAALKADNVVDYFLRATDNKGNKLPPSQFAPALLVATAAGFTTTSSLLSWLIYSLVKYPGNQERLLQELIDNDWDEDTQVTADTTSKLTFLEKFIKETQRLHNPSFQPGRTAKVDMILPGGYRLPKGAVVISALHHMHNNKDVWENPGRFDPDRWDTEQVKNRPPGSYIPFATGPRMCIGFNFALQEIKVFLPKLVYRYKFSLAQDGPIEYDPYFQLIRPNNLYVQAEKRVKWPPKSE

SEQ ID NO: 3112 - protein, 364 aa, Oryza sativa
  unsure (1)..(364): unsure at all Xaa locations
MRGRTIVEVGYPVFLQHRFALERPLAPQPLQAAAAAARKERHRPHWRGLEEPKRGVGIRMDGQDRVVTIIGRNLWETGNDAGGEMSPPPPPPPPRVVICVGDVHGYISKLESLWANLQSALPPDAFATALVVFLGDYCDRGPSTREVIDFLLALPSRHPAQRHAFLCGNHDLAFAAFVGALPPPPDGTPFSSTWGEYIQNEENEGWYRGPGHEGMHCQGRRWGGIMKEKRNPKRGSSYMGSIYDARPTFESYGVAHGSPDLVKAVPEEHKKFLRELVWIHEEENVPIDTNEGQIICKLIAVHAGLERSIDLNEQFRILRTKDTKISKVAMLSGRQDVWNIPKIXTLLVPQHKSYASIRFSHCLX

SEQ ID NO: 3113 - protein, 112 aa, Oryza sativa
MLEGKAMVEDTDMPVKMQLQAMSAAYKALDRFDVLDCRSIAAHIKKEFDMIHGPGWQCVVGASFGCYFTHSKGSFIYFKLGALRRSIVADELKATSTSREANMHLIRNNQSE

SEQ ID NO: 3114 - protein, 344 aa, Listeria monocytogenes
  unsure (1)..(344): unsure at all Xaa locations
LDQVTTLQADRLGIKSIDGLEYLNNLTQINFSNNQLTDITPLKDLTKLVDILMNNNQIADITPLANLTNLTGLTLFNNQITDIDPLKNLTNLNRLELSSNTISDISALSGLTNLQQLSLGNQVTDLKPLANLTTLERLDISSNKVSDISVLAKLTNLESLIATNNQISDITPLGILTNWDELSLNGNQLKDIGTLASLTNLTDLDLANNQISNLAPLPGLTKLTELKLGANQISNISPLAGLTALTNLELNENQLEDISPISNLKNLTYLTLYFNNISDISPVSSLTKLQRLFFYNNKVSDVSSLANLTNINWLSAGHNQISDLTPLANLTRITQLGLXDQEWT

SEQ ID NO: 3115 - protein, 360 aa, Glomerella cingulata
MATEAAVVSNPNTLAKYLKLDQKGSIMAEYIWIDADGETRSKSRTLKEKEYTPEDLPMWNFDGSSTGQAPGDNSDVYLKPVAVFPDPFRGSPNILVLSECWNADGTPNKYNYRHECAKLMEAHAAHEPWFGLEQEYTLLDLSNRPFGWPANGFPAPQGPYYCGVGTGKVVQRDIVDAHYKACLYSGVKISGTNAEVMPAQWEFQVGPCVGIEMGDHLWLARFLLARIAEEFGAKVSVDPKPIPGDWNGAGLHSNFSTKEMRVEGGMKHIEAAIKKLEGRHKEHIAVYGEGNEKRLTGRHETGAIDQFSYGVANRGASIRIPREYTAKGYGYFEDRRPASNADPYRITGILMETIYGSVDN

SEQ ID NO: 3116 - protein, 163 aa, Zea mays
MASEGENKRMITLRSSDLEEFEVEEAVAMESQTLRHMIEDDCADNGIPLPNVNSRILSKVIEYCNSHVHAAAKPADSAASEGGEDLKSWDAKFVKVDQATLFDLILAANYLNIKGLLDLTCQTVADMIKGKTPEEIRKTFSIKNDFTQEEEDEIRMENQWAFE

SEQ ID NO: 3117 - protein, 459 aa, Chlorobium tepidum TLS
MAKAITIDERRILRLNQREDRQGPVIYWMSRDQRVRHNWALLFACQKANQLGQPLEVVFTLSPSFLGAPMRHYDFMFRGLREVETRLRELGVPFTVLYGEPGETLPKYTEKRNAGVVVADFSPLKLVRGWKLAVAQQLSCAFYEVDAHNIVPCWLASPKQEYAARTIRPKLNALQGEFLTGFPEPELRHQPDTLPPPVQWNAMETLLKVDRSIKAVPGLEPGETAAEARLRSFVTGRLSRYADERNDPNSGAVSGLSPYLHFGQLSAQHATFEAARSKASEVNREAFVEELFIRRELSENYCYYNERYDSFDGIPEWAKKTLMEHAGDHRDAIYTPEQFERAQTHDPLWNAAQTQLLETGIIHGYMRMYWAKKILEWSATPAAAFDIALMLNDRYALDGRDPNGYVGVAWSIGGLHDRPWTERPVYGTIRYMNSNGCKRKFDVPRYIAEMTGKSQATLF

SEQ ID NO: 3118 - protein, 275 aa, Glycine max
  unsure (1)..(275): unsure at all Xaa locations
FNPSVPVTGRKKKSKIWKFYGHSAAISGKETSTRSSRLTQVGPFKGCMAWDSSIFTDCQSSANGVHYGTQNLKDINSNPLGPGKVVHHTQSVFKPLCKLFNPPPETLGAAALALHYANVIIVIXKLAASSHLIGLDARDDLYNMLPRRVRASLKAKLKPYTKTMAALSSSIYDPSLAEEWNEAMSSILEWLAPLAHNLIRWQSERSYEQQSFVSRTNVLLVQTLYFANQEKTEEVISELLVGLNYVWKYGRELNAKALAECGSFRVDNEYPNLNG

SEQ ID NO: 3119 - protein, 497 aa, Coxiella burnetii RSA 493
MRTSHQNQPSSPFLLPPDVLPLIFYGLTPVDLARLFVVAKGARPWFETFFASDTDYKAYLQLNIPQLFMVIGNNLFFDYSLVWIARAGVWGWGNNYTGQLDFGNIHEMTKPARIPLDSFIPEMAPDDYVVQFASADFLSGKARSLVATRQGQLHEYYWERISNTRSEFIQHRHYELNVTIVQLLSDYRHAFILTEEGGIYGWGFNISGELGLGDRFERSQPTELPQNFFPYLLERGDRIVQLNFADRYLVARTAQGHVYVWGFNYRGRLGLDDEQDRLHPVELSWDFFPEWHPDDYIIQVVVGDRHTLALTQLGYIYAWGKNSYGQLGFRDQQDRNRPALLPWNRFPGLLERNDRIIELIAGGARSLARTEQGFIYIWGARWLLVRGDPEFRHHPMLLTENYFPGLRRRGDHLVELIAGPDHTLARTEQGYIYAWGRNYYGQLGLGDRRIQRQPALLDPNAIPPLSQWRNAFSFIKSFREEKIEDTDSFSYAPFSRK

SEQ ID NO: 3120 - protein, 216 aa, Zea mays
MVSLKLQKRLAASYLKCGKGKVWLDPNEVSEISMANSRVYVFAILTGQNIRKLVKDGFIIKKPHKIHSRSRARRAHDAKQKGRHSGYGKRRGTREARLPTKVLWMRRMRVLRRLLRKYREAKKIDKHMYHDMYMKVKGNAFKNKRVLMESIHKSKAEKAREKTLSDQFEAKRAKSKASRERKIARREERLAQGPREITPPVSSTAPATGAPKKAKK

SEQ ID NO: 3121 - protein, 384 aa, Zea mays
MAGDDGSGGSGGGNREDEVHVQIAGSSKPETSSTNETSPQNSHTKHWHWWLMVTLNIFFPARGQTASTLLGRFYYNQGGNSKWMSTFVQTAGFPVLFVALYLFRSKSPSTQTTTSNPETSVTKITLIYVVLGLIIAADDLMYSYGLLYLPVSTYSLICASQLAFNAVFSYVLNAQKFTPFIFNSVILLTFSAALLGVDEDSQGTNGLSRGKYILGFALTLGASATYSLILSLMQVAFEKVIKKETFSVVLNMQIYTALVATVASLIGLFASGEWKTLEGEMHAFSSGRVSYVMTLLWTAVSWQIASVGVVGLIFVVSSLFSNVISTLALPIIPIFAVIFFHDKMDGVKIIAMLMAIWGFVSYGYQLYISDKKARKTSVSVEENS

SEQ ID NO: 3122 - protein, 379 aa, Hordeum vulgare subsp. vulgare
IPWERLQITRKDYRKARLEQYKNYENFPQSGELMDKLCKQVESSSKYYEFQYNTRIVKPSILHFQLRNLLWATSKHDVYFMSNSTVGHWSSLSHKMTDVLDFSGHVAPAKKHPGCALEGFTGVQVSTLAVNEGLLVAGGFQGELVCKSLGERDVKFCTRTTLSDNAITNAMDIHRSTSGSLRITVSNNDSGVREFDMERFQLLNHFRFNWPVNHTSVSPDKKLLAVVGDDRDALLVDSRNGKVTSTLVGHLDYSFASAWHLDGVTFATGNQDKTCRVWDIRNPSTSLAVLRGNIGAIRCIRYSSDGRFLLFSEPADFVHVYSTAECYRKRQEIDFFGEISGISLSPDDESLFVGVCDRVYASLLNYRLVHANGYLDSYM

SEQ ID NO: 3123 - protein, 299 aa, Glycine max
NSAPTRPIPTLPISTTTEKSEQMIETSEASVYGVMASWLTPSNLFIFINLVIGTIAISSRFANTTKRQHQLVRSPSLLERLASFNLCYHKHEPTTRMMTTTTTMFHRVVDPVERLDEFRLDQVPSSSLLDRVRSFNLGFYKSDNIERHGPVHNSDLPQLAQLDRLPSSSLLDHVKPLNLEIERPDLVHRLDSSQLDRVSSISLLERVRSFNLGFSKVEMEKPDSIQQQLTRAPSILQRLKSSLSFEPESEVTGGGELAEETEEEGVDAKADDFINRFRQQLRLQRLDSIIRYRDMLKRY

SEQ ID NO: 3124 - protein, 238 aa, Populus balsamifera subsp. trichocarpa
MAYQNEPQESSPLRKLGRGKVEIKRIENTTNRQVTFCKRRNGLLKKAYELSVLCDAEVALIVFSSRGRLYEYSNNSVKSTIERYKKACADSSNNGSVSEANAQFYQQEAAKLRSQIGNLQNSNRNMLGESLSALSVKELKSLEIKLEKGIGRIRSKKNELLFAEIEYMQKREIDLHNNNQLLRAKIAENERKRQHMNLMPGGVNFEIMQSQPFDSRNYSQVNGLPPANHYPHEDQLFS

SEQ ID NO: 3125 - protein, 394 aa, Zea mays subsp. mays
  unsure (1)..(394): unsure at all Xaa locations
LGAERRARLPPGEMGWPLVGGMWDFLRAXKSGKPDXFIASFVRRFGRTGVYRSFMFSSPTVLVTTAEGCKQVLMDDDAFVTGWPKATVALVGPRSFVAMPYDEHRRIRKLTAAPINGFDALTGYLPFIDRTVTSSLRAWADHGGSVEFLTELRRMTFKIIVQIFLGGADQATTRALERSYTELNYGMRAMAINLPGFAYRGALRARRRLVAVLQGVLDERRAARAKGVSGGGVDMMDRLIEAQDERGRRLDDDEIIDVLVMYLNAGHESSGHITMWATVFLQENPDMFARAKAEQEAIMRSIPSSQQGLTLRDFRKMEYLSQVIDETLRLVNISFVSFRQATRDVFVNGYLIPKGWKVQLWYRSVHMDPQVYPDPTKFDPSRWEGHSPRAGTFL

SEQ ID NO: 3126 - protein, 419 aa, Brassica nigra
NHHSCTIFFVVLLQFHHVFSINTLSPNEALTISSNKTLVSPGDVFELGFFKTTTRNSQDSADRWYLGIWYKTTSERTYVWIANRDNPLHNSIGTLKISHANLVLLDQSDTPVWSTNLTGVVQSSVTAELLANGNFVLRGSYSTEDEFMWQSFDFPVDTLLPEMKLGWNLKPGPERILTSWKSPTDPSSGDFSFMLETHTIRLHEFYLLKNEFIVYRTGPWNGVRFNGIPKMQNWSYIVNSFTDNNGEVAYAFHVDNHNIHSRFRMSSTGYLQVITWTKTVPQRNMFWSFPEDSCDAYKVCGPYAYCDMNTTPTCNCIKGFVPKNASRWELRDMSGGCVRSSRLSCGEGDGFLRMSQMKLPETSEAVAVLVDKRIGFKECKERCIRDCNCTGFANMDIMNGESRCVIWSGELVDMRNYVA

SEQ ID NO: 3127 - protein, 349 aa, Hordeum vulgare
MSLSTLILALLAMSSAVAAPRALAARQLAGDEAITVDAAMVSRHEKWMAEHGRTYANEEEKARRLEVFRANAKLIDSFNSAEDSTHRLATNRFADLTDEEFRAARTGLRRPPAAAAGAGSGAGGFRYENFSLADAAGSMDWRAMGAVTGVKDQGSCGCCWAFSAVAAVEGLTKIRTGRLVSLSEQQLVDCDVYGDDEGCAGGLMDNAFEYMINRGGLTTESSYPYRGTDGSCRRSASAASIRGYEDVPANNEAALMAAVAHQPVSVAINGGDSVFRFYDSGVLGGSGCGTELNHAITAAGYGTASDGTKYWIMKNSWGGSWGEGGYVRIRRGVRGEGVCGLAQLASYPV

SEQ ID NO: 3128 - protein, 193 aa, Oryza sativa
  unsure (1)..(193): unsure at all Xaa locations
MDYFRALYFAGERSVRALHLTAEVIDLNPGNYXXWVLQALGGWETELQYCNQLLEEDVFNNSAWNQRYLVITSSPLLGGLAAMRDSEVDYTVGAILANPQNESPWRYLKGLYKGENNLLMADERISDVCLKVLKHDSTCVFALSLLLDLLQIGLQPSDELKGTIEAIKNSDPEADEADLFSNLKHAVASMRSX

SEQ ID NO: 3129 - protein, 450 aa, Amycolatopsis lactamdurans
MVLEMPAARVPAGPDARDVRQALARHVLTDGYDLVLDLEASAGPWLVDAVTGTRYLDLFSFFASAPLGINPSCIVDDPAFVGELAAAAVNKPSNPDVYTVPYAKFVTTFARVLGDPLLPHLFFVDGGALAVENALKAAFDWKAQKLGLDDRAVNRLQVLHLERSFHGRSGYTMSLTNTDPSKTARYPKFDWPRIPAPALEHPLTTHAEANREAERRALEAAEEAFRAADGMIACFLAEPIQGEGGDNHFSAEFLQAMQDLCHRHDALFVLDEVQSGCGLTGTAWAYQQLGLRPDLVAFGKKTQVCGVMGGGRIGEVESNVFAVSSRISSTWGGNLADMVRATRVLETIERTDLLDSVVQRGKYLRDGLEALAERHPGVVTNARGRGLMCAVDLPDTEQRDAVLRRMYTGHQVIALPCGTRGLRFRPPLTVTESELDQGLEALAASLASRG

SEQ ID NO: 3130 - protein, 334 aa, Schizosaccharomyces pombe
SSTITCDGKSLNTLPTPKQEDVEFGVPLQPEDTQDLQRKLKPRHMQMIAIGGCVGTGLFVGSGNALADGGPASILIAFAVIGTYVLFTTSALAELSAIYPVSGSFYTYFSKFIDPAWGFAVGIQYWLSFAVTVPLELTVAPLIINFWNASGPVSIWISVFYVIIIAINIWGTEGYGEVEFFLSIMKVISVIGFVILSIIIAAGGVPTDDRGVIGVSYWKQPLVFNNGFKGLCAVSVIAIFSLSGTELVGLAASEAKNPQKTVPAAVKQIFWRIFLFYIVALFMLTLVVPSDLPGLRTSDNSNVLISPFVIAIQLANIRALPSIMNVVILLSTLS

SEQ ID NO: 3131 - protein, 685 aa, Leptospira interrogans serovar lai str. 56601
MKMYKNLADMLIQSTEKYGDRPVFWSKGEDKEFHPTSYNQLYDMGIALAEALIQLGLKAREHVGVLADNRLEWILTDYAVQFSGAANVPRGTDVTESELEYILNHSEAKIVFIENDKMLEKYNKVKSKVPKVETIIIMDKSSSAKGKNIHKIYDLVEEGRSLRAKGSKKAEKRIEEIKPEDLFTLIYTSGTTGMPKGVMLMHSNMIHQMVYVVPMLLTEIKPTDSMLSILPIWHIFERINEYGAISSGIQTYYTKVADLRNDLAKAKPSFMASAPRVWENVYANIYNKINDPKQTPPIRRVLFKLAYFFSKHYNASRRFLNGLEVDYENRNIMKSLVIGIRSLIVLLLTGPFTLSAISILAYLTLPVYGIHLPNWLFFSLVGLGLVFNAKTLDTIVLSKIRAATGGRLKASLSGGGALQSHVDNFFNDIGMLVLEGYGMTETSPVISVRPFVKPIIGSVGFLVPKSELIIKDENGNVLTHINDQYEVLAGKLGQKGIVFVKGPQVMKGYYKNPEVTKKTIVDGWMNTGDIGFINFKKTLTLTGRAKDTVVLLGGENVEPVPIENKMDESPFIKQSMVIGQDQKVLGAIIVPDMEHLGVWCKENGIDSSKIDEIIKNPKVIDFYKKEVRSYNSTKTGFKSFEQVQHVILAKKPFEVGDELTDLLKMKRHVITEKYSKEIKKIYEKD

SEQ ID NO: 3132 - protein, 381 aa, Glycine max
  unsure (1)..(381): unsure at all Xaa locations
MAVCIAAYEATGSQVQLSLERGLPAMIGNFISRQLPYPSLSYDMVHCAQCGIMWXKKNGMFLIEVDRVLKPGGYFVLTSPTSRPQGSSREKKRIMANPMEGLTQQLCWTLLAQQDETFIWQKTADIDCYASRKQRTIXVCKGDDTQSYYRPLLPCISGTSSKRWIAIQNRSSESELGSAELKIHGKYFQPEEFYEDFQYWRSAVNNYWSLLTPLIFSDHPKRPGDEDPLPPYNMIRNVMDMSANFGGLNAALLEEXKTVWVMNVVPARASNALPLILDRGFAGVTHDWCEPFPTYPRTYDMLHAYGLISHLSSERCSMVDLFLEMDRILRPEGWVILSDTIGAIEMARMLAAQVRWDARIIDLQNGSDQRLLVCQKPFVKK

SEQ ID NO: 3133 - protein, 414 aa, Saururus cernuus
SGKPFYAIVHRVTGSLIIDFEPVKPFEVPMTAAGALQSYKLAAKAISRLQSLPSGSMERLVDTVVQEVFELTGYDRVMAYKFHEDDHGEVISEVTIPHLEPYIGLHYSATDIPQAARFLFMKNKVRMICDCHAKPVKVYQDDKLSFDLTLCGSTLRAPHSCHLQYMENMGSIASLVMAVVVNEGGDEDKGPDSSQQLGDNRRKRLWGLVVCHNTRPRFVPFPLRYACEFLTQVFAIHVSKELELERQIREKNILRTQTLLCDMLLRDAPMGIVNQSPNIMDLIKCDGAALFYKDKVFRLGNAPSETDIRDIAQWLFAHHMDSTGLSTDSLHDAGYPKAAFLGNLVCGMAAVKITCSDMLFWFRTHTAAEIRWGGAKHDHSERDDGKRMHPRSSFKAFLEVVKTRSLPWKDYEMD

SEQ ID NO: 3134 - protein, 396 aa, Staphylococcus aureus subsp. aureus Mu50
MTKSEKIIELTNHYGAHNYLPLPIVISEAEGVWVKDPEGNKYMDMLSAYSAVNQGHRHPKIIQALKDQADKVTLVSRAFHSDNLGEWYEKICKLAGKDKALPMNTGAEAVETALKAARRWAYDVKGIEPNKAEIIAFNGNFHGRTMAPVSLSSEAEYQRGYGPLLDGFRKVDFGDVDALKAAINENTAAVLVEPIQGEAGINIPPEGYLKAIRELCDEHNVLFIADEIQAGLGRSGKLFATDWDNVKPDVYILGKALGGGVFPISVVLADKEVLDVFTPGSHGSTFGGNPLACAASIAALDVIVDEDLPGRSLELGDYFKEQLKQIDHPSIKEVRGRGLFIGVELNESARPYCEALKEEGLLCKETHDTVIRFAPPLIITKEELDLALEKIRHVFQ

SEQ ID NO: 3135 - protein, 551 aa, Oryza sativa
  unsure (1)..(551): unsure at all Xaa locations
MSRAAGLWRALGDAEVGRLRGDRVRLEGVRLLVADDDAALLSLALAEMAAACADLSRAVARLSARCADPLLRRLDALFAALVRGGRLADPHRLRYSAARKMDRKARKMQRLVASTALLSQELDVLAELEQAAAGGLRRSGTRRKGAASGGGGEGEAARRVAQQRQEVDRLRAASLWNRSFDYAVRLLARSLFTIVARIAQVFGLEPKNVATMDDDAXXISLATTRLSWTNSFVGSVHSLVYPSDFAADTHTPRRSLLDAKSGKVSNGGEHVRRFLVSRSQSLRHSNGQWPGSTSSAAWSVGAGLRTARGGRSMEMVIFHXXLQLLRVSQXNDDYSSINSPFQGDHTNXESLNSVRVVIAQLGXXNAPAVTTLGAAALALHYANLIIFIEKLAVAPRHICPDERDALYNMLTDRIRASLRARLRPIAKNMAASSSSSSSACDPAMAAEWSGTVQRILGWLAPLAHNMLRWQSERNFEQRNVASSGTGVLLLQTLHFADQKKSEAAIVELLVGLNYLWKAGRELDAKAKKLVSGGGKRDEFTDYYSSNRMECR

SEQ ID NO: 3136 - protein, 303 aa, Leuconostoc mesenteroides subsp. mesenteroides ATCC 8293
MKRGHYTTLSVNVRKDICLMAQIIQWFPGHMAKAFRLMRENLKLVDVVFELVDSRIPESSRNPEVDKLIGNKPRLLIMTKADLADPDQTRAWKKHFEAQGYTVLVLDTRDPRTPQLVTKAARRAVEAKKAAQLAKGIQDQPIRAMISGVPNVGKSTLLNHLVMKNVAPTADRPGVTKKIAWLKTPTKLELLDSPGVLWPKFEDQNIGMKLALTGAVKDTIFAKDDAALFLINFFREYRPEAIIERYHLNDNIFDQENVDVLLSITSKLGFKDDYDKASERILNDLRKNKLGAFTLDLIETKND

SEQ ID NO: 3137 - protein, 363 aa, Vibrio parahaemolyticus RIMD 2210633
MTDKSYKIAVLPGDGIGPEVMAQAHKVLDAIEQKHGISFEREEHDVGGIAIDNHGCPLPESTVTACEESDAVLFGSVGGPKWEHLPPNDQPERGALLPLRKHFQLFCNLRPAQIHAGLEAFSPLRADISGRGFDIVVVRELTGGIYFGQPKGREGEGANEKAFDTEVYHRYEIERIAKIAFESARLRRKKVCSIDKANVLQSSILWREVVEEIAKDYPDVELSHMYIDNATMQLIKDPAQFDVMLCSNIFGDIISDECAMITGSMGMLPSASLNESKFGLYEPAGGSAPDIAGKNIANPVAQILSAALMLRYSLGEEAAAQDIESAVSKALSAGELTADLASDKPALTTSEMGDKIAEYILNS

SEQ ID NO: 3138 - protein, 435 aa, Brassica oleracea var. alboglabra
MKGVGKPYENSHTSFLLVFFVLTLFSPAFSINTLSSIESLKISNSRTLVSPGNVLELGFFRTPSSSRWYLGMWYKKLSERTYVWVANRDNPLSCSIGTLKISNMNLVLLDHSNKSLWSTNHTRGNERSPVVAELLANGNFVLRDSNKNDRSGFLWQSFDYPTDTLLPEMKLGYDLRTGLNRFLTSWRSSDDPSSGDFSYKLQTRRLPEFYLFKDDFLVHRSGPWNGVGFSGMPEDQKLSYMVYNFTQNSEEVAYTFLMTNNSIYSRLTISSSGYFERLTWTPSSGMWNVFWSSPEDFQCDVYKICGAYSYCDVNTSPVCNCIQRFDPSNVQEWGLRAWSGGCRRRTRLSCSGDGFTRMKKMKLPETTMAIVDRSIGLKECEKRCLSDCNCTAFANADIRNGGTGCVIWTGQLEDIRTYFANGQDLYVRLAPADLV

SEQ ID NO: 3139 - protein, 201 aa, Glycine max
  unsure (1)..(201): unsure at all Xaa locations
HASGHSGIASVLVVAIWVLTEGKDKCLNSEESPLITALIGAVIGHYSCCNGDTWSSELGILSDEKPRLITNFKFVKKGTNGGVTKRGLLAAAAAGSVIGLSFVLLGISATRCEGKGSTVLKQLLVIPIATLAGLCGSVIDSLLXATLQFTGFCSIRGKMVGKPGPTVRRISGANILDNNAVNFVSILLTSFFTSIACLYIF

SEQ ID NO: 3140 - protein, 172 aa, Triticum aestivum
SARGEDEPGDANAEVSPEMLRRIKRAKRVSQISEKVATGILSGVVKVTGYFTSSLANSKAGKKFFNMLPGEIVLASLDGFGKICDAVEVAGKNVLSTSSTVTTGLVSHKYGDKAAAATNEGLDAAGHAIGTAWAVFKIRQALNPKSVLKPTTLAKSTIKANVAELRTKHGSK

SEQ ID NO: 3141 - protein, 509 aa, Yersinia pestis KIM
MMSGKHSAETHHAAKKRWLDSHDTGYHKSMGLRHIQMIAIGGSIGTGLFLGTGARLQMAGPALALVYLVCGIFSFFILRALGELVLHRPTSGSFVSYAREFLGEKASYVAGWMYFLNWAMTGIVDITAVALYMHYWGTFSDVPQWLFALGALSIVATMNMIGVRWFAEMEFWFALIKVAAIALFLIVGVIFLGTGQSVAGHTTGIHLITDNGGFFPHGLLPALIMVQGVIFAFAGIELIGTAAGECKDPEKMLPKAINSVIWRIGLFYVGSVVLLVCLLPWHAYQAGQSPFVTFFSNLGVPYIGTIMNIVVLSAALSSLNSGLYSTGRILRSLSMGGSAPKFMSKMSPQSVPYAGILVTVGIYVLGVLLNYLVPSQVFEIVLNIASLGIISSWAFIIICQMKLRQAIKRGMAKPVSFKMPGAPVTSWLTLIFLAGVLVMMAFDYPNGTWTIASIPVLTLLLIAGWFSLRKRANEVAAAPIDVWSQEILFEEPDAQNVSPKELYEQKSVG

SEQ ID NO: 3142 - protein, 392 aa, Mcvaughia bahiana
DLEPVNPADVPVTAAGALKPYKLAAKAISRLQSLPSGNISLLCDVLVKEVRDLTGYDRVMVYKFHEDEHGEVVTECRRSDLESYLDLHYPATDIPQASRFLFMKNKVRMICDCLAPPVKVIQDKRLSQPLSLCGSTLRSPHGCHAQYMANMGAVASLVMSVTINEDDDTVDGDQQQMARKLWGLVVCHHTSPRFVPFPLRYACEFLIQVFGVQITKEVELAAQVREKHILRIQTLLCDMLLRDAPVAIITQSPNVMDLVKCDGAALYYRKKFWLLGVTPTEAQIRDIAEWLLEYHSGNTGLSTDSLLEVGYPGASALGEVVCGMAAVSITSRDFLFWFRSHTAKEIKWGGAKHDPDDKDDSRKMHPRSSFKAFLEVVEWRSLPWEDVEMDAI

SEQ ID NO: 3143 - protein, 432 aa, Glycine max
MAQILAPSTQWQMRISKSSPNASPITSNMWSSLLWKQNKKVSPTSSAKFRVMAIKSDNSIINRLEGLLNLDITPFTDKIIAEYIWIGGTGIDVRSKSRTISKPVEHPSELPKWNYDGSSTGQAPGDDSEVILYPQAIFKDPFRGGNNILVICDSYTPQGEPIPTNKRHRAAEIFSNPKVQAEVPWYGIEQEYTLLQTNVKWPLGWPVGGYPGPQGPYYCSAGADKSFGRDISDAHYKACLYAGINISGTIGEVMPGQWEYQVGPSVGIEAGDHIWASRYILERITEQAGVVLSLDPKPIEGDWNGAGCHTNYSTKSMREDGGFEVIKKAILNLSLRHKDHISAYGEGNERRLTGKHETASINTFSWGVANRGCSIRVGRDTEKNGKGYLEDRRPTSNMDPYVATSLLAETTLLWEPTLEAEALAAQKLALKV

SEQ ID NO: 3144 - protein, 392 aa, Janusia californica
DLEPVNPADVPVTAAGALKSYKLASKAISRLQSLPSGNISLLCDVLVKEVRDLTGYDRVMVYKFHEDEHGEVVSECRRSDLESYLGLHYPATDIPQASRFLFMKNKVRMICDCLAPPVKVIQDERLPQPLSLCGSTLRSPHGCHAQYMTNMGTIASLVMSVTVNEDDDTMDGDQQQMTRKLWGLVVCHHTSPQSVPFPLRYACEFLIQVFGVQINKEVELAAQVREKHILQIQTMLCDMLLRDAPVAIITQSPNVMDLVKCDGAALYFKNKTWLLGVTPTEEQIRGIAEWLLKYHSGNTGLSTDSLMEAGYPGASGLGDAVCGMAAVSITSRDFLFWFRSHTAKEIKWGGAKHDPDDKDDLRKMHPRSSFKAFLEVVKWRSMPWEDIEMDAI

SEQ ID NO: 3145 - protein, 210 aa, Papaver somniferum
SVLCDAEVALIVFSTKGKLFEYSTDACMDAILERYERQCCVEEELVGTDQESQGNWSLEHAKLKAKVEVLQRTQRHMMGEDLESFNVKELQNLEHQLDTSLKHIRSKKNQLLYASISELQRKEKALQEQNTILGKKIKEKEQEMGRLDQQQQSNQAQNSCSQAQNSAQNSPTFLLSQELPSLTICTGTYEPAARPIAIQTVMPPWMLRHL

SEQ ID NO: 3146 - protein, 368 aa, Glycine max
  unsure (1)..(368): unsure at all Xaa locations
MDAIRKQASKLREQVARQQQAILRQLGQISNEPLMTDESEIECLQQLQKLYTSTKTAKHFQRHIVRAIEGFISVSSKQMEIVCLRRMARDCCKYGTENLGSSYPLARASLQFGNTYDTMENERETLLGILGDQVCIXSEPLRAQITGAPLEDARHLTRRYDKLHQEVEAQAAEVLRRRSKLRNSSVSAESSARLQNAETRLKELKSALAALGRQAXTSAMLSVEEQQQQMTLQSLRTMVDAERSYHQHVLVILEKLYTEIIEDRQPKEATSFTLPKDGYNQPADENANSSGIDYKHNSQTATYFFAKVVHPFDAQAEGELSLSVDDFVVVRQVGPNGWSEGECKGNAGWFPSAYVQRQDMIPASKITE

SEQ ID NO: 3147 - protein, 128 aa, Zea mays
  unsure (1)..(128): unsure at all Xaa locations
MAKPQEVRSVDSFSQLPFIRPAPAPRDATIRLFGREFPSDHNQQQQDAASDSPDAANNGSTVTCESNGAAKSGAAAERKFECHYCCRNFPTSQALGGHQNAHKRERQHAKRAHXQAFLAMHRFLPGHM

SEQ ID NO: 3148 - protein, 229 aa, Staphylococcus epidermidis ATCC 12228
MNEYLQAVLMILLTIVLYYVSKKIQDKYNNPLLNPALIASIAIIIVLLVCGVSYKGYMKGGTWINHVLNATVVCLAYPLYQNKKKIKKYLTIIFTSVLTGVVLNFVLVFTTLKIFGYSKDTIVTLLPRSITAAVGIEVSQELGGTDTITVLFIITTGLIGSILGSMLLRMGGFKSSIARGLTYGNASHAFGTAKALELDIESGAFSSIGMILTAVISSVLIPVLILLFY

SEQ ID NO: 3149 - protein, 149 aa, Phytophthora infestans
MADQLTEEQIAEFKEAFSLFDKDGDGTITTKELGTVMRSLGQNPTEAELQDMINEVDADGNGTIDFPEFLTMMARKMKDTDSEEEILEAFKVFDKDGNGFISAAELRHIMTNLGEKLTDEEVDEMIREADIDGDGQINYEEFVKMMMSK

SEQ ID NO: 3150 - protein, 265 aa, Oryza sativa
MKKIFGAKKNQEPPPSIQDATDRVSFCLSCFDSIFNSILFNSSTKQSNESNQTNPQISKRGDSVDDKIKKLDAELARYKDQIKKTRPGPAQEAIKARAMRVLKQRRMYEGQRDMLYNQTYNLDQVAFASEGLKDAQQTMTAMKAANKELKGMMKTVKLEDIDSLQDEMMDLMDVSNEIQETLGRSYNVPDDIDEEELMGELDALEADMDFESNSVPSYLQPDKESDLDSELNLPAAPTGHTPAPPNRQQEDELGLPTVPQASIRS

SEQ ID NO: 3151 - protein, 158 aa, Staphylococcus aureus subsp. aureus Mu50
METIYDFVVETNKGVTYKLDAYKGDVMLIVNTASECGFTSQFEGLQSLYEKYKDQGFVILGFPCNQFGGQEPGSGEEAAQNCKLNYGVTFPMHQKIDVKGEHQLPLFRYLTAAQHGFFNEKIKWNFTKFLVDREGNVVKRFAPQKKPVQIEREIEKLL

SEQ ID NO: 3152 - protein, 285 aa, Schizosaccharomyces pombe
MSNGLVILHAGAGLYSGQREIQAKKTCSDACKAAIQALKVGQSALSAAIQAAKIMEDSPVTNAGVGSNLNIDGKVECEAGVMDSESGLTASVACCNCCRHPSEACLYILNKRKVMSQHGLVPPAMLVGNGIEKLLLHSNIKLVPESHLITERSMKTQIKWKEILYQNPINLSSQDTIGVICVDKNGRIAVVSSSGGLLLKPAGRIGSSPIPGHGFWIESFDNKSHSSTCAVATSGTGEHISNTCFACRSSQLLVSEDNVVSSLNKLINDFHGKLIDLCVRIPYLF

SEQ ID NO: 3153 - protein, 100 aa, Zea mays
GDTRNVCLYIAVETEPDAVASESKTQKEAIDLKELKRIDHILSSLKRKIGAAPPPPPYPKGYVPPSAEQEKAPDDVAASEAPPQLDPIIDQGPSKRPRFQ

SEQ ID NO: 3154 - protein, 385 aa, Oryza sativa
MAASATQEADCKASEDARLFFDAAKPPPFRIGDVRAAIPAHCWRKTPLRSLSYVARDLLIVAALFAAAATRIDVSVAWAAWPLYWAAQGTMFWALFVLGHDCGHGSFSDSAMLNNVVGHLLHSFILVPYHGWRISHRTHHQNHGHIEKDESWHPITEKLYRKLETRTKKLRFTLPFPLLAFPVYLWYRSPGKTGSHFLPSSDLFSPKEKSDVIVSTTCWCIMISLLVALACVFGPVPVLMLYGVPYLVFVMWLDLVTYLHHHGHNDLPWYRGEEWSYLRGGLTTVDRDYGWINNIHHDIGTHVIHHLFPQIPHYHLVEATKAARPVLGRYYREPEKSGPLPLHLFGVLLRSLRVDHFVSDVGDVVYYQTDHSLNGTDWAEDAKHK

SEQ ID NO: 3155 - protein, 166 aa, Nostoc sp. PCC 7120
MMKSSLANCPVPVDQQPLNEYEELKTSWLFRDCALNWREYATKLIWIWSLSWLVAGPVAAASFPPNKQLTHFLLCGAAGASVGVVLSLVRLYLGWLYVRDRLYSMTVFYEESGWYDGQTWIKPQEVLTRDRLIVTYEIKPILQRLQFTFTGLAGLFLIGTIVWHLF

SEQ ID NO: 3156 - protein, 362 aa, Streptomyces coelicolor A3(2)
MAQEVRGVIAPGKDEPVRIETIVVPDPGPGEAVVKIQACGVCHTDLHYKQGGINDEFPFLLGHEAAGVVESVGAGVTDVAPGDFVILNWRAVCGKCRACRRGRPWYCFDTHNAEQRMTLASTGQELSPALGIGAFAEKTLVAAGQCTKVDPAVPAEVAGLLGCGVMAGIGAAINTGNVGRGDTVAVIGCGGVGDAAIAGSYLAGASKVIAVDIDDRKLETARTMGATHTVNSRGTDPVEAIRELTGGFGADVVIEAVGRPETYRQAFYARDLAGTVVLVGVPTPEMKLELPLLDVFGRGGSLKSSWYGDCLPSRDFPMLVDLHLQGRLDLGKFVTETIRLDEVEQAFDRMHAGDVLRSVVVL

SEQ ID NO: 3157 - protein, 142 aa, Triticum aestivum
MAETEYRCFVGGLAWATDDNNLQQAFSQYGEIPRAKIINDRETGRSRGFGFVTFGSEESMRQAIEEMNGKELDGRNITVNEAQSRRSGGGGGGGGGYGGQRGGGGGYGGGGGYGGGGGYGGGGGYGGQRGGGGGDSGGQWRN

SEQ ID NO: 3158 - protein, 107 aa, Pinus taeda
FDKDGDGCITTKELGTVMRSLGQNPTEAELQDMISEVDADGNGTIDFPEFLNLMARKMKDTDSEEELKEAFKVFDKDQNGFIIHAELRHVMTNLGEKLTDEEVEEMI

SEQ ID NO: 3159 - protein, 486 aa, Streptomyces avermitilis MA-4680
MSEQSLKGEAQGAIRTGTQPSRHVDAGDAGYAKSLKSRHVNMIAIGGAIGTGLFLGAGGRLADAGPSLFVAYAVCGIFAFLVVRALGELVLYRPSSGAFVSYAREFLGEKGAYTAGWMYFLNWATTGIADITAVAVYTHYWGMFSDIPQWVIALIALAVVLTVNLISVRMFGELEFWFAIIKVSALVVFMLIGIFLLVTQHPVDGHHPGPSLITDHGGIFPHGLLPMLLIIQGVVFAYASVELVGVAAGETENPEKIMPKAINSIMWRVGLFYVGSVVLLSMLLPWNKYTAGQSPFVTVLSNIGVPAAGGVMNLVVLTAAMSSLNSGLYSTGRILRSMAMSGSAPKFTGVMSRSQVPYGGILLTSGICILGVGLNFVVPADAFEIVLNFAAIGILATWGMIMLCHLMFWRKTRTGELSRPSYRLPGSPWTEIVTIGFLVSVLVLMYADGGAGRTTVLCLPLIAAALVAGWYGVRGRVARKASGADA

SEQ ID NO: 3160 - protein, 439 aa, Shewanella oneidensis MR-1
MSKSENKIGVVQLTIITIVNMMGSGIIMLPTQLAQVGTISVLSWLVTAAGSTALAFAFAKCGMFSKKSGGMGGYAEYAFGRSGNFMANYTYAVSLLIANVAIAISAVGYAAVLLEVNLSPMAICLATIGVLWLATVANFGGARITGRVSSVTVWGIILPVIGVSLIGWFWFDIDLYKGAWNPHDMPFFKALGGSIAMTLWAFLGLESACANSEAVDNPEKNVPIAVMGGTLGAALIYIVSTNVIAGIVPNAELASSNAPFGLAFAQMFNPVVGKIVMACAIISCTGSLLGWQFTIAQVFKASADEGFFPKVFAKVSKADAPIWGMTIIVSIQTLLSLMTISPSLSKQFEALVNLAVVTNIVPYILSMAALGVMQKQLKVPANKARVANVIAVIGALYSFYALYSSGETAVMLGAIATFFGWTIYGVISNKTPSVEIKAA

SEQ ID NO: 3161 - protein, 363 aa, Buchnera aphidicola (Uroleucon aeneum)
MTRKYRIAVLPGDGIGPEVMREAYKILNILKDDFSLPLEIKEFNIGGAAIDQEGVALPKKTLLGCENSDAILFGSVGGKKWDNLPINQRPERASLLPLRKHFNLFANLRPAQLYSELKNLSPLRSNIIKNGFNILCIRELTGGIYFGKPTGRLKKNNIEYAFDTEIYYNYEINRIAHLAFQLSQTRNYKVCSIDKSNVLNSSILWREIVKKVSKHYPDVHLSHLYIDNATMQIIKDPNQFDVLLCSNLFGDIISDECAMITGSIGMLPSASLNEKKFGLYEPAGGSAPDIEGKNIANPIAQILSLSMLVRYSMNLKKIADKIDQSVISVLKKGYRTADISNNNDYLKTNEMGDVIASALISGE

SEQ ID NO: 3162 - protein, 362 aa, Buchnera aphidicola str. APS (Acyrthosiphon pisum)
MGFKCGIIGLPNVGKSTLFNLLTKGNSAVANFPFCTIKPNIGIVPVIDERINNLNQIVSPQKTVNAFIEFIDIAGLVKGASQGEGLGNQFLGNIRDVHAIAHVVRCFKDDNITHIYNQVQPIKDIDIINSELILSDFDLCEKTILKLQKKTLLKNKETQEKINTLKKCLNHLKQFFMLKTLNLNKTEKQLISYLRFLTLKPTMYIANINEEKESYYFLDKLNEIAKKEGSIVIPIHANLELDLVKMSDEEKKSFMKLFNIKTLGLNSIISSGYHLLNLITFFTVGDKEIRAWAIPNGSTSIEAAHKIHSDFSKGFIRAQIIKYVDFITYKSEAKIKEMGKFRTEGKQYYIQDGDIIHFLFNV

SEQ ID NO: 3163 - protein, 152 aa, Zea mays
MAGMTDMPMRPARPGPPMQHRGPPPMARLRPEPIDREKTCPLLLRVFTRVAGHHQNEEFSVRGKEPKDEVQIYTWKDATLRELTDLVKEVALPARKRNARLSFAFVYPDKNGRFVVRQVGSTFAYGHGRGDDAKTLAELGFQIGDYLSVAIM

SEQ ID NO: 3164 - protein, 272 aa, Ferroplasma acidarmanus
MKNQIVIHGGANSPSTLNEKLQNILDNLDVNGSSLDLAVKSVVMMEDDPTFNAGTGSVPRIDGSIQMDAAVMSDSGFGSVMCIENVKHPVMVARDVMEKSPHIMLAGEGAVEFARKLGYEYYNPETEKSREMMDKLKASIKNNTLPEKFKFMVKSSSDTVGAVARIDDKFAAAVSTGGAFPMLRGRVGDSPVIGAGIYQGEKGAVVATGIGEDIAKDLLSFRIYQQIGTDDLNEIVKKEIDKFKVSVGIIAISDNEYSVYANTDMAHAEREL

SEQ ID NO: 3165 - protein, 353 aa, Arabidopsis thaliana
MANISVVTTATNNQVILRNYVSGFPKESDLYIAATTVDLRVPPGSMAVLVKNLYLSCDPFSRIRMEKPDPSSPASVARAYSIGKPISGFGVAKAIDSCHPNYKTGDLLWGRVGWEEYSVITPTPSSHFKIHHTDVPLSFYTGLLGIPGLTAYVGFYEICSPKKGETVFVSAASGAVGQLVGQFAKMAGCYVVGSASSKEKVDLLKTKFGYDEAFNYKEEHDLSAALKRCFPEGIDIYFENVGGKMLDAVLENMRTHGRIAACGMISQYNLKEPEGVHNLASIVYKRIRVQGFAAVEFFDKYSKFLDFILPYVREGKITYVEDIAQGLENGPSALIGLFHGKNVGKQLVAVARE

SEQ ID NO: 3166 - protein, 305 aa, Miscanthus sinensis var. sinensis
IESVGEGVTDVAPGDHVLPVFTGECKECPHCKSAESNMCDLPRINTDRGVMIGDGKSRFSINGKPIYHFVGTSTFSEYTVMHVGCVAKINPQAPLDKVCVLSCGISTGLGASINVAKPPKGSTVAIFGLGAVGLAAAEGARIAGASRIIGVDLNPSRFEEAGKFGCTEFVNPKDHKKPVQEVLAEMTNGGVDRSVECTGNINAMIQAFERVHDGWGVAVLVGVPHKDAEFKTHPMNFLNERTLKGTFFGNFKPRTDLPNVVELYMKKELEVEKFITHSIPFAEINKAFDLMAKGEGIRCIIRMEN

SEQ ID NO: 3167 - protein, 394 aa, Buergersiochloa bambusoides
EPARTEDPALSIAGAVQSQKLAVRAISRLQALPGGDVKLLCDTVVEHVRELTGYDRVMVYRFHDDEHGEVVAESRRADLEPYLGLHYPATDIPQASRFLFRQNRVRMIADCHAAPVRVIQDSALPQPLCLVGSTLRGPHGCHAQYMANMGSIASLVMAVIISSGGDDEHNSAQGGIPSAMKLWGLVVCHHTSPRCIPFPLRYACEFLMQAFGLQLNMELQLAHQLSEKHILRTQTLLCDMLLRDSPTGIVTQSPSIMDLVKCDGAALYYHGKYYLLDVTPTEAQIKDIIEWLTLCHGDSTGLSTDSLADAGYPGAAALGDAVCGMAVAYITPSDYLFWFRSHTAKEIKWGGAKHHPEDKDDGQRMHPRSSFKAFLEVVKSRSLPWENAEMDAIH

SEQ ID NO: 3168 - protein, 88 aa, Glycine max
FRDQNRARVLGPGERVRSGRRRAMDNPEMQRFLQQEQQKAMMNEMVGKLTSVCWDKCITSAPGSKFSSGESTCLTNCAQRFLDMSVMI

SEQ ID NO: 3169 - protein, 359 aa, Shewanella oneidensis MR-1
MPCRLTRLFGIEFPIIQAPMAGVQGSALAIAVSEAGGLGSLPCAMLSLEALEAELTAIRSQTAKPINVNFFCHREPVAQAAKQAAWLEQLAPYFAEFNLDPNAQPAGAQRTPYSKAQAEVLAKFKPEVVSFHFGLPDEELLLEIKSWGSKVISTATTVEEALWLEARGADAIIAQGLEAGGHRGHFLSEDLTEQLGTFSLLPQIIAAVEIPVIAAGGIVDATTVRAAMTMGASAVQVGTAYLLCPECNTSAIHREALQSDAAQHTALTNLFSGRPARGIVNRFMAEMGPMNEAVPDFPLASSAVAGLRTAAERLGFWDFSPLWCGQNASGCRAIPAADLTRSFVLSLPSSCVEPQEKSG

SEQ ID NO: 3170 - protein, 172 aa, Oceanobacillus iheyensis HTE831
MKKRIATVITDMFEDVEFTDPVQSFKEAGHEVITIEKEKGKTIKGKSNDTSVTIDESIDNVNPENFDALFIPGGFSPDILRGDDRFVTFAKHFMDEKKPVMAICHGPQLLITARSLEGRGATGYKSIQVDMEYAGAKVKDEEVVVCQNQLVTSRQPDDIPAFNRESLKVLEG

SEQ ID NO: 3171 - protein, 96 aa, Carica papaya
GPLAVAINAAYMQTYIGGVSCPYICSRRLNHGVLLVGYGSAGYAPIRLKEKPYWVIKNSWGENWGENGYYKICRGRNICGVDSMVSTVAAVHTTSQ

SEQ ID NO: 3172 - protein, 152 aa, Carica papaya
MVKAVAVLSSSEGVSGTIFFTQAADGPTTVTGEISGLKPGHHGFHVHALGDTTNGCMSTGPHFNPAGKEHGAPEDDIRHAGDLGNVNVGDDGKVSFSIIDSQIPLTGPNSIVGRAVVVHADPDDLGKGGHELSKTTGNAGGRVACGVIGLQG

SEQ ID NO: 3173 - protein, 179 aa, Zea mays
MVSFEMNDLKKIGLGLTGFGIFFSFLGIIFFFDKGLIAMGNILFLSGLGLTIGLKSTMQFFTKPKNYKGTISFAAGFFLVLIGWPFLGMLLEAYGFVVLFSGFWPTLAVFLQRIPIIGWIFQQPFVTSVCKGSNSFRLLYGKERRLGRIEVTCDSCDAMWLFSSVIPLPGLVWELSFEL

SEQ ID NO: 3174 - protein, 475 aa, Bacillus cereus ATCC 14579
MQQPTNEKLHRTMKSRHLFMIALGGVIGTGFFLGSGYTINQAGPGGAILSYLVGGFIMYLTMLCLGELTVAMPVSGSFQKYATKFIGPGTGFMIGWLYWLGWAVTVGLELTSIGLMMKRWFPNVDVWVWCLVFGVILYASNAISAKSYAELEFWFSSIKVITILAFVVLGGSALLGFISYDGKEAAPLFSNFVSNGGLFPNGLAAVLLTMITVNFSFQGTELIGIAAGESENPEKTIPRAIRNTVWRIMLFFILTMTILVGLISWKEAGVIESPFVVVFDKIGIPYAADIMNFVIITALLSVANSGLYAATRILWSLANEGMAPTSFQKVNKRGIPITALVVTIAVAGLSLFTSFLAEDTVYMYLLSIAGLSAVSSWIIIALSQLRFRSQYIKGGGKLEDLKYRTPLYPIVPILALITNSIVVISLAFIPEQRMALYCGIPFIIFCYIYYYISKKRQKPMKVEMEKTNETNNQTR

SEQ ID NO: 3175 - protein, 348 aa, Lactococcus lactis subsp. lactis
MKSVYFVEKNKMQVREFPKAQLVKETDAIIKIVRACVCGSDLWWFRGISERQPGPVGHEAIGLIEEVGTGVKNFKVGDFVIVPFTHGCGHCPICLAGFEANCPNAKDGVNGGYQGEFYRAINTDGALVKIPGQPSDYSDDQLASLTALADVMPTGFHAAKAADVHEGDTVVVFGDGAVGLCAVISAKLLGAKRIIAMSRHEDRAALARDFGATDIIDERGEEAIQKIMSLTNGYGADAALECVGTKQAIESAFQAVRAGGRVGRVGVPHDVDYNEWIDSLFWKNIQLGGGVASVARWDKEILLEAVLSGEINPGRVFTAEFSLDEIQKAYEAMDQRTAIKSLLRISEV

SEQ ID NO: 3176 - protein, 248 aa, Triticum aestivum
  unsure (1)..(248): unsure at all Xaa locations
QFVPGLPPPMPSTSAESVQTRLSKLLMSPRTGKTKASSGPITRREREGAGAPSRVHPPMQQLSSSCPIIGQRPLSGQKGGVDWRKLLDPPASTVGGAGLDQQYANVIVSAEELLQMEAEGRQEEANAERAEMYEMLPGKLRAAVRSKLRDWWRDPGPLDAGLAEGWKEAVERIMAWLGPMARDTVQWQSERNMDRTRRFDGGTRVYALQTLRWADKDKAEAAIVEVLVALSCVCWYEEXRRRGSVRVS

SEQ ID NO: 3177 - protein, 114 aa, Glycine max
ICLSLDLPPKGGFSFDLCRRNAMLQNKGLKAPTFLKTGTTIVGLVFQDGVILGADTRATEGPIVADKNCEKIHYMAPNIYCCGAGTAADTEAVTDMVSSQLQLHRYHTGRESRV

SEQ ID NO: 3178 - protein, 160 aa, Zea mays
  unsure (1)..(160): unsure at all Xaa locations
MAEEASAMTMVVXXDESEHSFXALQWALQHFFPPGQPQQYRLVVXXXXXXXXXAVGLAGPRRRGVLPYVEADLKRSALRVVEKAKGLCTQASDAVFEALEGDARNVLCEAVERHGAEMLVVGSHGYGAIKRAVLGSVSDYCAHHAHCTVMIVKKPKQHKH

SEQ ID NO: 3179 - protein, 215 aa, Chlamydophila pneumoniae CWL029
MSKKPLYVAHPWHSPTLTQDNYESLCCYIEITPYDSVKFELDKATGLLKVDRPQKFSNFCPCLYGLLPQTYCGTASGNYSGEQTRREGIQGDKDPLDVCVLTEKNIHHGNILLQARPIGGLRIIDSGEADDKIIAVLEDDLVFAEIEDISDCPGTVLDMIQHYFLTYKATPNHLIKGSPAKIEIVGIYGKKEAQKVIQLAHEDYLSYIGDTAEVN

SEQ ID NO: 3180 - protein, 287 aa, Kluyveromyces lactis
MSYTTRQVGAKNSLDYKVYIEKDGKPISAFHDIPLYADEANGIFNMVVEIPRWTNAKLEITKEEPLNPIIQDTKKGKLRFVRNCFPHHGYIHNYGAFPQTWEDPNESHPETKAVGDNDPLDVLEIGEQVAYTGQVKQVKVLGVMALLDEGETDWKVIAIDINDPLAPKLNDIEDVEKHLPGLLRATNEWFRIYKIPDGKPENQFAFSGEAKNKKYTLDVIRECNEAWKKLISGKSADAKKIDLTNTTLSDTATYSAEAASAVPAANVLPDEPIDKSIDKWFFISGSA

SEQ ID NO: 3181 - protein, 394 aa, Drimys winteri
DLEPVNPVDVPVTAAGALKSYKLAAKAISKLQYLPSGNISLLCDVLVREVSELTGYDRVMAYKFHGDEHGEVIAECRRSDIEPYLGLHYPATDIPQASRFLFMKNKVRMICDCTARPVKVIQDKKLAQPLSLCGSALRAPHGCHAQYMANMGSIASLVMSVTISEDDDEASTEEQRQKGRKLWGLVVCHHVTPRFVPFPLRYACEFLIQVFGIQLNKEVELEAQLREKNMLRTQTMLCDMLLRDAPVGIVTQSPNVMDLVKCDGAALYYRNQFWLLGITPTEAQIRDIAEWLLEYHNSTTGLSTDSLMEAAYPGASILGDAVCGMAAVKITCKDFLFWFRSHTAKEIKWGGAKHDPGDKDGDGRKMHPRSSFKAFLDVVKQRSLPWEDVEMDAI

SEQ ID NO: 3182 - protein, 382 aa, Fusobacterium nucleatum subsp. nucleatum ATCC 25586
MKELKGIKIGKYYIEKPIVQGGMGVGVSWDQLAGTVSKNGGLGTISGICTGYYDNLKYCKKVVNGRPIGADALNSREAMIELFKNARKICGDKPLACNILHALNDYSKIVEYALEAGANIIVTGAGLPLELPKLVESYPDVAIVPIVSSGRALKIICKKWQAAGRLPDAVIVEGPKSGGHQGVKADDLFIPEHQLESIVPEVKEERDKWGDFPIIAAGGIWDNDDIQKIMALGADAVQLGTRFIGTYECDASEEFKNILINAKKEDIVIVKSPVGYPGRAVKTNLIKNLTHDTPTIKCYSNCVTPCNLGEEARKVGFCIANCLSDSYNGKVDTGLFFSGENGYRIEKLVSVEDLINELMTSTKNTILAKVNSENIIENTVNF

SEQ ID NO: 3183 - protein, 226 aa, Triticum aestivum
  unsure (1)..(226): unsure at all Xaa locations
MAPPRAVICVGDVHGYISKLESLWANLRSALPADAFATALVIFLGDYNDRGPHTRRVLDFLLALPARHPAQRHVFLCGNHDLAFAAFVGALPPPPDGSPFAATWAQYIDNEAHEGWFXGPGHEDMHVQGRRWGGVIKERWNPKKGLPYKGSIYDAQPTFESYGVAHGSPDLMKAVPEEHKKFLAXLGFWVHERGRRSYLXRWEGQILCKLIAVHAGLEKSLDLNEQ

SEQ ID NO: 3184 - protein, 310 aa, Oryza sativa
  unsure (1)..(310): unsure at all Xaa locations
MSNYHEDHIEEMEDDYDMDDTADDMGEENYERGMRDSDSEDEEHGQSNDKIPDTSSVDARKGKDIQGIPWEKLAITRDKYRQTRLDQYKNYENMPNSGEAAAKECKPTEKGGMYYEFRRNTRSVKSTILHFQLRNLVWATSKHDVYLMAHFSVLHWSALSGLDTELMNVQGHVAPREKHPGSLLEGFSGTQVSTLSVKDNLLVAGGFQGELICKHLDREGISFCCRTTYDENAITNAVEIFNTTSGAVHFMASDNDSGVRDXXMEXFXLYKHFXFEWPXXXTALSPDRSLLLIXGDXPXGLLNXGISGKX

SEQ ID NO: 3185 - protein, 91 aa, Oxalis teneriensis
  unsure (1)..(91): unsure at all Xaa locations
IXISGTNGEVMPGQWEYQVGPSVGIEAGDHIWASRYILERITEQAGVVLTLDPKPIDXXXXXXXXXXXXXTKSMRDEGGFEVIKKAIXNLS

SEQ ID NO: 3186 - protein, 383 aa, Cytophaga hutchinsonii
MKLFDVYPLIPIEPVRALGSRLWDAAGTEYLDLYGGHAVISIGHSHPYYVQKITDQINKIGFYSNSVIISLQQELADKLGVVSGHNDYQLFLCNSGAEANENALKLASFHNGKKKIVAFKKGFHGRTSLAVAATDNPSIVAPVNETDNIIFLPWNDEAALEATFKSHGNEITAVIIEGIQGVGGIHEASMSMLKKIRTLCDEYNAVYIADSVQCGYGRSGKFYSHDFAGVSADIYSMAKGMGNGFPIGAISIAPYLKPKHGLLGTTFGGNHLACAAAIAVLDVIKQENLLEHTTQLGNYIIEQARKIQGVKEVRGKGLMIGIELEIPCAEIRNTLLSEHKMFTGSSSDKFTIRILPALNLKKADADAFLNALKAVLEKSLKSA

SEQ ID NO: 3187 - protein, 295 aa, Bacillus cereus ATCC 14579
MDYLLSKEKVKRWPKDMIAAGRCHTVGLKSDGTVVAVGRNKEGECNVSGWRDIEAVAVGNVHMATNTGNAHTIGLTCDSTAVALGWNKHEQCDVNDWHNIVAVAAGWRRTIGLKSDGTVVAVGRNKEGECNVSSWQGIVAVTAGDWHTVGLKLDGTLTTVGNNRYGQCNVSSWRGIVAVKAGYLHTVGLKRDGTVTAVGNDKHNQCDVSGWRDIVAIAAGTNHTIGLKSNGTVVAVGWNEYGQCNVSDWRDIVAIAAGCAHTVGLKSDGTVIAVGNNEFGQCDVGSWRDIRLPGK

SEQ ID NO: 3188 - protein, 471 aa, Streptococcus mutans UA159
MMTIFRKKNTNLDKTEMKRHFKVIDLIFLGLGSMVGTGIFTITGIGAAKYAGPALIISIIVSAIAVGISALFYAEFTSRIPANGGAYSYLYATLGEFPAWLAGWYIIMEFLTAISSVASGWGSYFKGLLSSYGIELPSLLNGTFNPAKNNYIDLLPALVIFLVTGIVLLNSKIALRFNSSLVVMKFSALALFIIIGLFYIKPENWSNFAPFGFGKIYGGQTGIMAGASLMFFAFLGFESISMAVDEVQKPQKNIPKGIIASLTIVTILYVSVTLVLTGIVHYSKLNVADAVAFALRQAGLVWAANYISVVAILTLITVCISMTFALARTVYSISRDGLLPKQLGIVTKHSKVPKNATLLVGFASMICAGVFPLSSIAEFLNICTLAYLIMLAIAIIKLRKDQGQPKIGEFKTPFIPFLPIVSIVICLSLMSQYKSVTWIAFGISTSIGFLIYFAYGYRHSTIFIKNNPKIR

SEQ ID NO: 3189 - protein, 168 aa, Leuconostoc mesenteroides subsp. mesenteroides ATCC 8293
MSKKVAVLVTDLVEDIEFTDPVKALKESGASVTTISFSTEAVTGKHGTKIDIDKSIGDVAPSDFDALFIPGGFSPDQLRADERFVNFTKHFLATNKSLFSICHGPQLMIPTGLVLGRTMTAYRTVQPDLYYAGARIENKPVVIDGNLITSREPKDIPSFNEAIIDALN

SEQ ID NO: 3190 - protein, 195 aa, Triticum aestivum
MDTACGSKPPQSKKVCIIGAGMAGLAAARELRREGHDVTVLEQSGDVGGQWLYDPRTDADDALGVAAPVKVHSSIYASLRLISPRQTTGFTDFPFCPKSGRDDRRFPGHREVHLYLKDFCDAFGLMEAVRLNTRVLHAAMTPACKWAVRSMDLGIGECDGADGKELDAYVDEVFDAVVVASGHYSQPRLPSIKGM

SEQ ID NO: 3191 - protein, 85 aa, Triticum aestivum
  unsure (1)..(85): unsure at all Xaa locations
GSRTSGSARTAMDASPELQQFLEQEKQKMVMSEMVXKLTNVCWDKCITSTPGSKXFSSGETTCLTNCAQRYLDMSMIIAKRFQMQ

SEQ ID NO: 3192 - protein, 230 aa, Triticum aestivum
IRHEAKLCMIPASCLLEVVFDRVHYSRDTKLSIMVVLVGVAVCTVTDVSVNAKGMLAAVIAVWSTAFQQYYVHYLQRKYSLNSFNLLGHTAPAQAGSLLLVGPFVDYLLTGKRVDHFNFTSLSLLFVVLSCIIAIGVNLSQFICIGRFSAVSFQVLGHMKTVLVLFLGFLFFGKEGLNLHVVLGMILAVLGMMWYGNASAKPGGKERRSVLPVRSDRHNGGSEDKDGGEK

SEQ ID NO: 3193 - protein, 580 aa, Schizosaccharomyces pombe
MNNYGVSSIGTSLTPSPTGSIDEYTSKEVKHPEDVKVDASYEKEEVGYGELEVVPERGNLFQRWYRSFLPPEDGKPQKLKRTLTARHIQMIGIGGAIGTGVWVGSKNTLREGGAASVLICYSLVGSMVLMTVYSLGELAVAFPINGSFHTYGTRFIHPSWGFTLGWNYLASFLATYPLELITASICLQFWININSGIWITVFIALLCFVNMFGVRGYGEVEFFVSSLKVMAMVGFIICGIVIDCGGVRTDHRGYIGATIFRKNAFIHGFHGFCSVFSTAAFSYAGTEYIGIAASETKNPAKAFPKAVKQVFIRVSLFYILALFVVSLLISGRDERLTTLSATAASPFILALMDAKIRGLPHVLNAVILISVLTAANGITYTGSRTLHSMAEQGHAPKWFKYVDREGRPLLAMAFVLCFGALGYICESAQSDTVFDWLLSISNLATLFVWLSINVSYIIYRLAFKKQGKSYDEVGYHSPFGIYGACYGAFIIILVFITEFYVSIFPIGASPDAGAFFQSYLCFPVVVIVFIAHALITRQKFRKLSEIDLDTGFSKYDRLEESDKGPMTAKSLAKSVLSFCV

SEQ ID NO: 3194 - protein, 168 aa, Glycine max
MAATRAITIASNSTCSLLAKKPFVGGTALSLNNLNFCRTRRSYTCRAIYNPQVVVKEEGQPETLDYRVFFVDKSGKKVSPWHDIPLRLGDDIYNFIVEIPKESSAKMEVATDESFTPIKQDTKKGKLRYYPYNIHWNYGLLPQTWEDPSFANSEVEGALGDNDPEENR

SEQ ID NO: 3195 - protein, 382 aa, Glycine max
  unsure (1)..(382): unsure at all Xaa locations
HFLSYLCSVRSFRNTPTSFITFSNWLLMYLSDIEVQKLAERMLRWLKDAGYIFFRESCFHQSGDSKRKYNPTHYREPRFYTKVFKECHMSDNTGSSCKCIGAYVRNKKNQNQICWIWQKVRSQDDRDFQCFXDRVEYSYKSILRSERMYGPGFVSTGGPETTKEFVAKLGLKPGQKVLDVGCGVGGGDFYMAENFDVEVIGIDLSINMISLAIERAIGLNYAVEFDCADCYRKTYPENTFDVIYTRDTMLHVKDKPTLFRSFYKWLKPGGKILITDYCKSAGSPSLEFAEYIKKGGYYLHDIKAYRQMLEDAGFDDIIAESRTDQFVKTLQQELNALENKKDDFIGDFSEEDYNEIVERWKAKQTRGASREQMWGLFIAKKN

SEQ ID NO: 3196 - protein, 281 aa, Nostoc punctiforme
MSSLIDSVNPWLVAVVLNTILLGLAWIAPKKLLTPAGSFHAWFLAILIWVTLGWQGYTVVMFYFLVGSGVTRIGMAQKEAEGIAEKRSGARGPENVWGSALTGALCALGVGIINSGFILPSSQYFDFAQYKSLVPNTPAALSTSLQSLLLLGYVASFSTKLADTTASEVGKAYGKSTFLITTLKPVPRGTEGAVSLEGTLAGIVASVAIAFVGWGVGLIDLLGVAWCVLAAFIATNLESVIGATLQSKYTWLTNEVVNIFNTLIGAIAAVLLSWTWINIIK

SEQ ID NO: 3197 - protein, 427 aa, Coxiella burnetii
MTELTGVSIVTYQHIKVPSQGEKITVNKAVLEVPDRPIIPFIEGDGIGIDIAPVMKNVVDAAVEKSYAGKRKIEWMEIYAGEKATKVYGKDNWLPDETLEAIKEYQVAIKGPLTTPVGGGIRSLNVALRQQLDLYVCLRPVRYFTGVPSPVKTPEKVNMVIFRENSEDIYAGIEWPAGSPEAVKLINFLQNEMGVKKIRFPETAGIGIKPVSKEGTSRLVRRAIQYAIDNDRDSVTLVHKGNIMKFTEGAFKDWGYEVAVKEFGAKPLDGGPWHVFENPKTGQKITIKDVIADAFLQQILLRPAEYSVIATLNLNGDYISDALAAEVGGIGIAPGANLSDTVGLFEATHGTAPKYAGQDKVNPGSLILSAEMMLRYLGRKEAADLVVQGIEGAIESKTVTYDFARLMTGAKEVSTSQFGKAIIKHIL

SEQ ID NO: 3198 - protein, 115 aa, Zea mays
  unsure (1)..(115): unsure at all Xaa locations
MVSLKLQKRLAAXYVKCGKGKVWLDXNEVSEISLGKSRQNIRELVKDGFNIKKTYKIHPRSRARREHDHKQKGRQXGYGKRRGTXEARLPTEVLWMRRMRAVRRLIRKYVEANQI

SEQ ID NO: 3199 - protein, 197 aa, Oryza rhizomatis
GQTPVFPRILGHEAGGIVESVGEGVTELAPGDHVLPVFTGECKECAHCKSEESNMCDLLRINVDRGVMIGDGQSRFTIKGKPIFHFVGTSTFSEYTVIHVGCLAKINPEAPLDKVCILSCGIFTGLGATLNVAKPKKGQTVAIFGLGAVGLAAMEGARLSGASRIIGVDLNPAKFEQAKKFGCTDFVNPKDHSKPVH

SEQ ID NO: 3200 - protein, 246 aa, Oryza sativa (japonica cultivar-group)
MAAAAAAAAEEEEEKESGSSRMITLKSNDEKLVEVTEASARQSRAIANLIDDGCADVIPLPNVDSKTLAKVIPYCDEHGRANSGTDEERAALGRFDADFVGELDKDKASLIDVIMAANYLNIQGLLDITCQRVADTIGSATAEKIREAFDIEDDLTEAEKKEIREENAWAFDGIPCLLVGIWFDGGIPIQEIRLQICNISQWSVLDRSGNAFPAREFALGASLVLLAWIVVRIELRMGKKHRCDFI

SEQ ID NO: 3201 - protein, 148 aa, Zea mays
  unsure (1)..(148): unsure at all Xaa locations
MASEGDNKRMITLRSSDLEEFEVEEAVAMESQTLRLMIEDDCADNGIPLPNVNSRILSKVIEYCNPLTPXLKSWDAKFVKVDQATLFDLILAANYLNIKGLLDLTCQTVADMIKGKTPEEIRKTFSIKNDFTQEEEDEIRMENQWAFE

SEQ ID NO: 3202 - protein, 461 aa, Lactobacillus plantarum WCFS1
MTKENSQPATEQLSRGLKSRHVQLIAIGGTIGTGLFLGAGQSIHLAGPAILIAYLVTGLVCFLLMRALGELLLSDLHTHSYIDFIKQYLGDKTGFVAGWTYWVCWITIAMAEITAAGEYMQFWWPRLPQWLPGLIILILLLGLNSINVSAFGETEFWFAIIKIAAILALIAVGIGMVLLSVKTPVGHASLTNLVSYGGFMPHGIKGLVLSFQMVLFSFIGIEMVGMTASETADPKTVIPKAINDIPVRIILFYVGSLFFLMCMYPWQYFSAAHSPFVQVFTNLGIRSAAAIINFVVLTAAASSCNSALFSTGRMLFSLTYDGKSKFAKRMGILSTRQVPRNALWFSTLVIGLSVILNLLMPGKVFSLIASVSTTCFIFIWGAIVVAHIKYRRQAGSQAKVKFRMPLFPLSDYFILVFLAFIAVVLCLKFETLIALLVSAVWVVGLYIVKIVSDRIRQRTHD

SEQ ID NO: 3203 - protein, 305 aa, Miscanthus condensatus
IESVGEGVTDVAPGDHVLPVFTGECKECAHCRSAESNMCDLLRINTDRGVMIGDGKSRFSINGKPIYHFVGTSTFSEYTVMHVGCVAKIDPEAPLDKVCVLSCGISTGLGASINVAKPPKGSTVAIFGLGAVGLAAAEGARIAGASRIIGVDLNPSRFEEARKFGCTEFLNPKDHKKPVQEVLAEMTNGGVDRSVECTGNINAMIQAFECVHDGWGVAVLVGVPHKDAEFKTHPMNFLNERTLKGTFFGNFKPRTDLPNVVELYMKKELEVEKFITHSVPFAEINKAFDLMAKGEGIRCIIRMEN

SEQ ID NO: 3204 - protein, 608 aa, Malus x domestica
MAPKANADGRTRSSVQIFIAAGLCCFFYILGAWQRSGFGKGDSIALAITKNEADCNIIPSLSFDSQHAGEVGNIDESESKPKVFEPCHHRYTDYTPCQDQKRAMTFPREDMNYRERHCPPEEEKLHCLIPAPKGYVTPFPWPKSRDYVPYANAPYKSLTVEKAVQNWIQYEGNVFRFPGGGTQFPQGADKYIDQLAAVIPIKNGTVRTALDTGCGVASWGAYLLSRNVLAMSFAPRDSHEAQVQFALERGVPAVIGVLGTIKLPYPSRAFDMAHCSRCLIPWGINDGKYLKEVDRVLRPGGYWVLSGPPINWKNNYQAWQRPKEDLQEEQRQIEEAAKLLCWEKKSEKGETAIWQKRVDSDSCGDRQDDSRANFCKADEADSVWYKKMEGCITPYPKVSSGELKPFPKRLYAVPPRISSGSVPGVSVEDYEEDNNKWKKHVNAYKRINKLIDTGRYRNIMDMNAGLGGFAAAIESPKLWVMNVMPTIAEKNTLGVVYERGLIGIYHDWCEGFSTYPRTYDLIHAHGVFSMYNGKCNWEDILLEMDRILRPEGAVIFRDEVDVLIKVKKIVGGMRWDTKLVDHEDGPLVPEKVLVAVKQYWVGNSTSAQ

SEQ ID NO: 3205 - protein, 212 aa, Oryza sativa
  unsure (1)..(212): unsure at all Xaa locations
ARGTRRHPPLLLLFLAVACRRPIAGASQSTRPRPAVSPAAAADFVRRSCRVTRYPQVCERSLMPQAPAVGRSPRLLAQAALTVGADRARSCSGYLGGGGXLQLVQALRRRRHGAVGDCADTLRDAEERLRQSAAEMSRMGRSGSPRFAWRLSNVQTWASAALTDASTCLDSLATYAAPGIDVDALRKRVGAVSQATSNALALVNNLDPHHHL

SEQ ID NO: 3206 - protein, 72 aa, Triticum aestivum
MDNPGTRRFLLQEQQKAMMNEMVGKLTSVCWDKCITSAPGSKFSSGESTCLTNCAQRFLDMSVLIAKRFEMQ

SEQ ID NO: 3207 - protein, 548 aa, Listeria monocytogenes
MKKRWNSVFKLVLMVTAILGLSLYVTTSQGVEVRAESITQPTAINVIFPDPALANAIKIAAGKSNVTDTVTQADLDGITTLSAFGTGVTTIEGVQYLNNLIGLELKDNQITDLTPLKNLTKITELELSGNPLKNVSAIAGLQSIKTLDLTSTQITDVTPLAGLSNLQVLYLDLNQITNISPLAGLTNLQYLSIGNAQVSDLTPLANLSKLTTLKADDNKISDISPLASLPNLIEVHLKNNQISDVSPLANTSNLFIVTLTNQTITNQPVFYQNNLVVPNIVKGPSGAPIAPATISDNGTYASPNLTWNLTSFINNVSYTFNQSVTFKNTTVPFSGTVTQPLTEAYTAVFDVDGKQTSVTVGANELIKEPTAPTKEGYTFTGWYDAKTGGNKWDFGVDKMPAENITLYAQFTINSYTASFDNDGKLTTQKVTYQSLLEEPAAPTKTGYTFKGWYDAKTGGTKWDFATGKMPAGNITLYAQFTKNDSPNPNDPTPNTPTGNGDGTSNPSNSGGNTTLPTAGDENTMLPIFIGVFLLGTATLILRKTIKVK

SEQ ID NO: 3208 - protein, 367 aa, Pseudomonas sp. M1
MKITAAVTRANSNGFSIENLELDEPRDDEVLVRIVGVGICHTDLVAAAGVLPIQPPAVFGHEGAGVVIKTGSKVTGVQSGDHVALSFHSCGECPRCRVDDPSYCHSFGLLNFTGIRQGGSNLHDATGAAVAGNFFGQSSFASHCVANQRNVVKVSKDIPLELVGPLGCGIQTGFGGVARALACEADSSILILGGGAVGLSAVMAAVIRGCQQIILTEPHAARRALALELGATAVIDQISEDVEQLFKGFLPAGVNYAFDTSGIGAALETAYRCLAPRATFGLVGVPQDWEQKLPGTLAEMVQSGIIFKGIIEGDSDPQQSIPELIALYQAGRLPIDKLVTTFPLAQINKAIAAQHAGTCVKHVLLAG

SEQ ID NO: 3209 - protein, 383 aa, Treponema pallidum
MFWDRCSMSVRRVVVLGITGSIGAAALKLLRRFPDRFLLVGASGHRQTEYARALAREFSLSDITMTGSCSEQEGRARIKRLLSSCEAEVVVNGIAGAAGLFASLEVLKTRCTLALANKESVVLAASLLHAAARESGATIVPVDSEHAAIFQLIAAHGAHAVAQVVLTASGGPFRTFSKECLAHVTVEDALQHPTWRMGKKISVDSATLANKALEVIEAVQFFRIPVDRVTVVVHPQSIVHALVQCHSGETYAQLSVPDMASPLLYALLYPDAPPAYQTPLDFTSGLSLHFEPPRVDDFPLLRMGFDVARAQRAYPIAFNAANEEAVRAFLQRNIGFLDIAHVTAQALQEDWRAIPQTFEEVMACDTRARMCARTCIAQRWRER

SEQ ID NO: 3210 - protein, 109 aa, Neurospora crassa
MDATNGNGGASKYITLVSKDGFEFVVLREATLCSDYIRGMLRNNMTEARTGRCELQDINGVILEKVVEYFHYWYKYRDREDVPDMEIPVENCLELVVAADYLGMDSKPH

SEQ ID NO: 3211 - protein, 663 aa, Glycine max
MTGHFLRTPLTLKIAAFFFIAVTFFYFGKHWSDGYQQLVFFTQRSDPDSNSNPFVSTSPNNAKSFNVSALIENNTQPAPPENAPPPPAPEEGSIEKLGVVNENGTMSDEFEVGDFDPGMVDQWVNETQVDESEGSSSDVGFGIKKFGLCPREMSEYIPCLDNEDEIRKLPSTEKGERFERHCPEQGRGLNCLVPAPNGYRTPIPWPRSRDEVWYNNVPHTRLVEDKGGQNWISRDKDKFKFPGGGTQFIHGANEYLDHISKMIPDITFGKHIRVVLDVGCGVASFGAYLLSRNVVTMSVAPKDVHENQIQFALERGVPAMAAAFATRRLLYPSQAFDLVHCSRCRINWTRDDGILLLEVNRMLRAGGYFVWAAQPVYKHEEVLEEQWEEMLNLTTRLCWNFLKKDGYIAVWQKPSDNSCYRDREAGTKPPMCDPSDDPDNVWYVDLKACISELPKNGYGANVTEWPARLQTPPDRLQSIKLDAFTSRSELFRAESKYWNEIIASYVRVLHWKEIRLRNVMDMRAGFGGFAAALINQNLDSWVMNVVPVSGPNTLPVIYDRGLIGVMHDWCEAFDTYPRTYDLLHAANLLSVEKKRCNVSSIMLEMDRILRPGGRVYIRDSLDIMDELQEIAKAIGWYVMLRDTEEGPHASYRVLVCDKHLLRS

SEQ ID NO: 3212 - protein, 258 aa, Streptomyces rishiriensis
MTGPAASAVACEPVAMVTGAGRGIGAATAERLAAEGMAVIVVDRVEQDTTATVSAIRAAGGRASGLGCDVSVAQAVTATVASAVEEFGHLDVLVNCAGITQDRLLLTMSDQEWDRVLDVNLGGSMRCSFAVGRHMRRQGHGRIINFSSVAARGNAGQTNYATAKGAIAGFTRTLAAEFGPHGVTVNSIAPGFVATPMVAELTERLGVDRDTVLLEAAMSSAVGRIGTPEEIAAVVAFVTRPESGYLTGETIHVEGGRR

SEQ ID NO: 3213 - protein, 401 aa, Bacillus subtilis subsp. subtilis str. 168
MTALSKSKEIIDQTSHYGANNYHPLPIVISEALGAWVKDPEGNEYMDMLSAYSAVNQGHRHPKIIQALKDQADKITLTSRAFHNDQLGPFYEKTAKLTGKEMILPMNTGAEAVESAVKAARRWAYEVKGVADNQAEIIACVGNFHGRTMLAVSLSSEEEYKRGFGPMLPGIKLIPYGDVEALRQAITPNTAAFLFEPIQGEAGIVIPPEGFLQEAAAICKEENVLFIADEIQTGLGRTGKTFACDWDGIVPDMYILGKALGGGVFPISCIAADREILGVFNPGSHGSTFGGNPLACAVSIASLEVLEDEKLADRSLELGEYFKSELESIDSPVIKEVRGRGLFIGVELTEAARPYCERLKEEGLLCKETHDTVIRFAPPLIISKEDLDWAIEKIKHVLRNA

SEQ ID NO: 3214 - protein, 392 aa, Zea mays
  unsure (1)..(392): unsure at all Xaa locations
MATPLRATAVLAWGSGEDGQLGMGGNEEKDWPHFVEALGPYAVTAVVAGSRNSLAICDDGRLFTWGWNQRGTLGHPPETKTESSPGPVDALAGFKIVQAAIGGWHCLAVDDKGRAYAWGGNEYGQCGEEPERKEDGTRALRRDIPIPQRCALKLKVRQVAAGGTHSVVLTQEGHVWTWGQPWPPGDIKQISTPVRVQGLEKVRVIAVGAFHNLALTEDVILWAWGNNEYGQLGTGDTQPRSHQITLYXVEGLSDLSLVDIAAGGWHSTALTIDGEVYAWGRGEHGRLGFGDDKSSHMVPLKVELLAGEDIVQVSCGGTHSVALARDGRMFSYGRGDHGRLGYGRKVTTGHPMELPINLPPLSSSRDGRWQAKYVACGGRHTLAIAEWTEATD

SEQ ID NO: 3215 - protein, 184 aa, Trichodesmium erythraeum IMS101
MSFKDAKDMFEYTQDSQVSKYTGWYTHNSIKDTKLFLQYTINNYKNNQLSNWGIVHKAGQKFIGTAGFIDWKIEHSRAEIGYTLSRKYWGKGYMTEVVNAIIYFGFRTMMLNRIEARCLIENIASARVMEKVGMKYEGVLRECIFMKGKYQDLKIYSILKEEFSAKKYDYPIKISTTVCGFHPL

SEQ ID NO: 3216 - protein, 258 aa, Synechocystis sp. PCC 6803
MDNSLLSEIWRQSLAFPWLSAVILNSFLLALAAIAPKKLLTPWGYGHAWVLGVIIWAALGWRGYLVVLAYFFVGSAVTRIGQKEKEAAGIAEKRSGQRGPENVWGSALTAALCALAIAFGPEPWQLWLALGYVASFSTKLSDTTASEVGKAYGKNTFLITTLQPVPRGTEGAVSVEGTLAGFAAGLALAVLGYGVGLISFGGIIFSTLAAFIATNLESVIGATLQNKWPWLTNEVVNGINTFLGAAIAIGIEATAQLI

SEQ ID NO: 3217 - protein, 751 aa, Geobacillus stearothermophilus
MENQNRQNAAQCPFHGSVTNQSSNRTTNKDWWPNQLNLSILHQHDRKTNPHDEEFNYAEEFQKLDYWALKEDLRKLMTESQDWWPADYGHYGPLFIRMAWHSAGTYRTGDGRGGASTGTQRFAPLNSWPNNANLDKARRLLWPIKKKYGNKISWADLFILAGNVAIESMGGKTIGFGGGRVDVWHPEEDVYWGSEKEWLASERYSGDRELENPLAAVQMGLTYVNPEGPDGKPDPKAAARDIRETFRRMGMNDEETVALIAGGHTFGKAHGAGPATHVGPEPEAAPIEAQGLGWISSYGKGKGSDTITSGIEGAWTPTPTQWDTSYFDMLFGYDWWLTKSPAGAWQWMAVDPDEKDLAPDAEDPSKKVPTMMMTTDLALRFDPEYEKIARRFHQNPEEFAEAFARAWFKLTHRDMGPKTRYLGPEVPKEDFIWQDPIPEVDYELTEAEIEEIKAKILNSGLTVSELVKTAWASASTFRNSDKRGGANGARIRLAPQKDWEVNEPERLAKVLSVYEDIQRELPKKVSIADLIVLGGSAAVEKAARDAGFDVKVPFFPGRGDATQEQTDVESFAVLEPFADGFRNYQKQEYSVPPEELLVDKAQLLGLTAPEMTVLVGGLRVLGANYRDLPHGVFTDRIGVLTNDFFVNLLDMNYEWVPTDSGIYEIRDRKTGEVRWTATRVDLIFGSNSILRSYAEFYAQDDNQEKFVRDFINAWVKVMNADRFDLVKKARESVTALQHFVAARSKTAEELQ

SEQ ID NO: 3218 - protein, 301 aa, Oryza sativa; identical to SEQ ID NO: 1652

SEQ ID NO: 3219 - protein, 208 aa, Triticum aestivum
MVSLKLQKRLAASVLKCGKGKVWLDPNEVSEISMANSRQNIRKLVKDGFIIKKPQKIHSRSRARRAHEAKQKGRHSGYGKRRGTREARLPTKILWMRRMRVLRRLLRKYREAKKIDKHMYHAMYMKVKGNMFKNKRVLMESIHKTKAEKTREKTLSDQFEAKRAKSKASRERKIARREERLAQGPREPTAAPAAAPAPAAAAPKKAKK

SEQ ID NO: 3220 - protein, 386 aa, Zea mays
CVFSVLVVFDTFVPPLAKAFIGFFEPATLFIQRWLSLFYVPTLVVLPLAVGDIPAASGIKILAITFGGWFATLTVAGYTVLAMRKLVKTELLAPSEPTKKPSPLSTSEIWAWSAIFVASVGVACFTAMPIISSHNSMPCPHHLAAANVLGYMVDQSARGKPKLCRLFLCAALTTIPDSMAATAMIRITTLHGLDAVLGDYLTKAPSNPGAGDVLMTFLGSVIISFAFSIFKQRKLVKRHATEIFTSIAIASTFSLYSTAIIGRLIGLEPSLTISILPRCITLALALSIVSFFEGVNSSVTAVVVVLTGLIGANFVLAAMEKLGLNDPISRGVGTASSAQGLGTAALAAKEPEALPFCAIAYSFTGIFGTLICSVPAVRQSLIFIAG

SEQ ID NO: 3221 - protein, 244 aa, Triticum aestivum
MQEAGMSALWNTVHGWFTPWVLFLVLHLIVATIFVTSRATSSAGSGEGAPAGAVGERRSLSLVDSMAIDRPHFTAPAPEAPVTGLLDLGQPDEQPPPLQMEPEDQGEHDAFTKEGEHDEHTHMERSMSEAAVEAELPRLPTRLRKSASDKPAFAHFVAESDTKEVEAPRRATRRDAERRRPLVAEPEEPASEVEIEEAGGEVDARADEFINRFHHQLKMQHMDSFMRSQKRLHRRRATVVPEAR

SEQ ID NO: 3222 - protein, 477 aa, Arabidopsis thaliana
MQRFAAKRSVQNISVSLWRRCISSTSQAATASVKDSDEFQARLPPFAYTPPPYTGPSADVILSKRKEFLSPSMFCLYRKPLNIVDGKMQYLFDESGRRYLDAFAGIAVVNCGHCHPDVVEPVINQIKRLQHPTVLYLNHAIADFSEALASKLPGDLKVVFFTNSGTEANELALMMAKLYTGCQDIVAVRNGYHGNAAATMGATGQSMWKFNVVQNSVHHALNPDPYRGVFGSDGEKYAKDLQDLIQYGTTGHIAGFICEAIQGVGGIVELAPGYLSAAYDTVKKAGGLFIADEVQSGFARTGNFWGFEAHNVVPDIVTMAKGIGNGFPLGAVVTTPEIAGVLTRRSYFNTFGGNSVSTTAGLAVLNVIEKEKLQENAAMVGSYLKEKLTQLKEKHEIIGDVRGRGLMLGVELVSDRKLKTPATAETLHIMDQMKELGVLIGKGGYFGNVFRITPPLCFTKDDADFLVEAMDYSMSKM

SEQ ID NO: 3223 - protein, 436 aa, Brassica rapa
TLYFLLVFFVLILPRPAFSINTLSSTESLTISSNRTLVSPGNFFELGFFRTNSRWYLGMWYKKLSVRTYVWVANRDNPVANSVGTLKISGNNLVLLGHSSKSVWSTNLTRRNERSSVVAELLANGNFVMRDSNNNDASRFLWQSFDYPTDTLLPEMKLGYDLKTGLNRFLTAWRSSDDPSSGEISYKLEPRRLPEFYLLKRRVFRLHRSGPWNGIRFSGIPEDQKLSYMIYNFTENSEELAYTFRITNNSIYSILTVSSEGKLERLMWNPSLAMWNVFWFFPVDSQCDTYMMCGPYSYCDVNTSPVCNCIQGFNPMYVEEWDLREWSSGCIRRTLLSCSEDGFTRMKNMKLPDTTMAIVDRSIGLKECEKRCLSDCNCTAFANADIRNGGTGCVIWTGKVEDMRNYGADGQDLYVRLAAADIIDKKRNANGKIISL

SEQ ID NO: 3224 - protein, 329 aa, Rhodococcus erythropolis
MKLLVTGGAGYVGSVCSTVLLERGHEVVVIDDLSTGNADAVPAGAEFIEGDVGALAADVLGSAGSPVFDGVLHFAAQSLVGESVLHPEKYWRGNVVTTIELLEAIRVSGTPRLVFSSTAATYGEPEQSPIVETAPTRPTNPYGATKLAIDHAITSYSIAHGLGATSLRYFNVAGAYKSAGENRVIETHLIPLVLQVALEQRDKISVFGTDWPTPDGTAVRDYIHVLDLAEAHLLALESSVPGEHRIYNLGSGAGFSVREVIAACARVTGLPINVEDASRRLGDPAVLIASSDKAIAELGWTPTRTDLDVIVADAWQFLQDLGDRSHAAR

SEQ ID NO: 3225 - protein, 558 aa, Pseudomonas fluorescens PfO-1
MTHTCLSNNSQEGDAMSGQGKFKKQLSLIDLTFIGLGAIFGSGWLFAASHVSAIAGPAGIFSWLLGGFAVLLLGIVYCELGAALPRAGGVVRYPVYSHGPLLGYLMGFITLIAFSSLVAIEVVASRQYAAAWFPSLTKAGSGDPTLLGWLVQFGLLCVFFLLNYRSVKTFAKANNLVSVFKFIVPLLVIGVLFTFFKPENFQIQGFAPFGLSGIEMAVSAGGVIFAYLGLTPIISVASEVKNPQRTIPIALILSVLLSTAIYVLLQTAFLGGIPTELLANGWAGVSKEFALPYRDIALALGVGWLAYLVVADAVISPSGCGNIYMNATPRVIYGWAQTGTFFKVFTHIDAKSGIPRPALWLTFALSVFWTLPFPSWEALINVVSAALVLSYAVAPVTVAALRRNAPDMPRPFRVKCMGVLGPVSFIIAALIVYWSGWNTVSWLLGLQILMFVVYLLCGRFVPTAQLSLSRQVRSSAWLIAFYAVTIVLSKLGTFGGLGILTHPFDTLVVAACAMGIYYWGAATGVPAHLLRLESEEDESEVASPSPASTANPRAAGAY

SEQ ID NO: 3226 - protein, 606 aa, Triticum aestivum
  unsure (1)..(606): unsure at all Xaa locations
MALATNTAAAAAALTGGAAQPRRAGFLPLKRRTISAVHAADPARSGGASVPAAEEPGLCPVGGDPQPAPRVXTASWSVDSWRKKKALQLPEYPNKEELDAVLKTIETLPPIAFAGGARCPGPSFAEAAMGRAFVLQGGDCAESFKEFNANNIRDTFRVLLQMGAVLMFGGQVPVVKVGRMAGQFAKPRSDNFEEKDGVKLPSYRGDNVNGDAFDLKSRTPDPDRMIRAYAQSVATLNLLRAFATGGYAAMQRVIQWNLDFMDHNEQGDRYRELAHRVDEALGFMTAAGLGMDHPIMTTTDFWTSHECLLLPYEQALTREDSTSGLFYDCSAHMVWVGERTRQLDGAHVEFLRGIANPLGIKVSDKMNPAELVKLIDILNPSNKPGRITIITRMGAENMRVKLPVRPRDKWRKTDGERNNGCRRKSEAARLDGEPVRHPCTHGAAAERHRLRVHRAGPVHQGRAPPQVQPGVHEGPGAHPRRQTHLRVAGHRAVRRRGLGGHGPLDPPRRPLRSRRRSHLGRLRRQQALAGLGRHHVGRRRKGGESGKGRRHASGYRPIRGGVRQVLEGKGLLRRRFRRGTSTSSSARSCPGFEALRKLFGRRGRVR

SEQ ID NO: 3227 - protein, 581 aa, Zea mays subsp. mays
MKREYQDAGGSGGDMGSSKDKMMAAAAGAGEQEEEDVDELLAALGYKVRSSDMADVAQKLEQLEMAMGMGGVGGAGATADDGFVSHLATDTVHYNPSDLSSWVESMLSELNAPPAPLPPATPAPRLASTSSTVTSGAAAGAGYFDLPPAVDSSSSTYALKPIPSPVAAPSADPSTDSAREPKRMRTGGGSTSSSSSSSSSMDGGRTRSSVVEAAPPATQASAAANGPAVPVVVVDTQEAGIRLVHALLACAEAVQQENFSAAEALVKQIPMLASSQGGAMRKVAAYFGEALARRVYRFRPPPDSSLLDAAFADLLHAHFYESCPYLKFAHFTANQAILEAFAGCRRVHVVDFGIKQGMQWPALLQALALRPGGPPSFRLTGVGPPQPDEIDALQQVGWKLAQFAHTIRVDFQYRGLVAATLADLEPFMLQPEGDDTDDEPEVIAVNSVFELHRLLAQPGALEKVLGTVRAVRPRIVTVVEQEANHNSGTFLDRFTESLHYYSTMFDSLEGAGAGSGQSTDASPAAAGGTDQVMSEVYLGRQICNVVACEGAERTERHETLGQWRSRLGGSGFAPVHLGSNA

SEQ ID NO: 3228 - protein, 238 aa, Glycine max
  unsure (1)..(238): unsure at all Xaa locations
MSTLDATRAELGLLVLYLGKAEARDKTCRAIQYGSKFLCDGEPDTAQNVDKTSQLEHEKSSVFFKFVNDLHALISPTPQGHSPFPLFLLGKSKNALLSTFLFLDQFVRLGMNRHLPVIKSALELIGRISLYXWLGSSVCTTLVELGELGRLSSSMKKLEKDLKNKNKYDNEQYRAKLNKSNERTLSLIKAGIDTVVAVGLLQLAPKTVTPRVTGAFGFVSSLISCYQLLPAPAKSKTL

SEQ ID NO: 3229 - protein, 350 aa, Zea mays
LSSGYGGGALAHQHQHAAAGGAPERLTANLSDLVSNWSIAPPNPCLGDAHHHHRTGVVAAACDNDNAKAGMFLGSGGGVCNHEIGGHGAMLEGAATGGGGGGGQEFLRPAAGAGYSSMLGLSRNNRTMYMEAPWGSNAAGATRSLSDLISFGGTPLGKPEQPTPAATSTKAQAAEYKKQGREISSPTETSSEGGSKGSSDGKKKKRSDGRQGSEANAKKSKNEASSPTSSSLKQASQLPKVKLGDKITALQQIVSPFGKTDTASVLYEAINYIKWLHEQVQLLSDPYMKTSSSKDYNAWGGLDWKDKSETEMDLQSRGLCLVPVSCTPQVYRDNNGPDYWTPPYRSCLYR

SEQ ID NO: 3230 - protein, 331 aa, Listeria innocua
MEYVKFGNTGMDVSKICLGTMGFGDKDKWIHKWVLDEANSRPIIKKALDLGINFFDTANIYSYGESEKIVGRALKDYANRDDIVLATKIHQTMRPDRPNSGGLSRKTILSEIDHSLKRLETDYVDLYIIHRFDENTPIEETMEALHDVVKSGKARYIGASAMYAWQFQKAQRVAERNGWTKFVSMQNHYNMIYREEEREMIPFCRDEKIAITPYSPLASGRLTRDFAETTNRSETDPIQKSKYDGMMNSDKGIIERVAELALEHEVSRDKIALAWLLNKDEITSPIIGAQKESHLESAIGALDIKLTEAEVNYLEELYIPHPVVGALPTSK

SEQ ID NO: 3231 - protein, 454 aa, Bradyrhizobium japonicum USDA 110
MPLLSRQQRSAAVTLHQIPNTIKTDSFWMPFTANRQFKKAPRLFSSAEGMHYTTVDGRKVIDGSAGLWCVNAGHGRKQIAAAVERQLMTLDFAPTFQMGHPLAFDFAERLAEIAPKGLDRIFFTNSGSESVDTALKIALAYHRATGQSSRTRLIGRERGYHGVGFGGTSVGGMVANRRAFATLLPGVDHIRHTHDLSRNAFAKDQPEHGAELADDLERLVGLHGAETIAAVIVEPVPGSTAVLPPPKGYLQRLREICDKHGILLIFDEVITGFGRLGTPFAANFFGVTPDLMTTAKGITNGTIPCGAVFASRKVHDGMMVGPENQMELFHGYTYSAHPTACAAGIATLDIYKDEGLLTRGASIAEYWRDALHSLKGLPNVVDIRNCGLMGAVELAPRAGVVGARGYDVMVDCFNTGLYLRMSGDSFAMSPPLIVEKSHIDQMVSILGDAIKKVA

SEQ ID NO: 3232 - protein, 143 aa, Zea mays
  unsure (1)..(143): unsure at all Xaa locations
MTESLVRNKPGMASIKEMPVLQDGPPPGGFAPVRYARRIPTSGPSATAIFLTXSAPSRMGMYQVGQGNKVRRALKEEKIAARSAILPMLQAEEDERFVKEWKKYLEEEARIMKDVPGWKVGESVYNSGKWMPPATGELRPEVW

SEQ ID NO: 3233 - protein, 146 aa, Glycine max
MSRPGDWNCRSCQHLNFQRRDSCQRCGDSKYGDRVVDFGGFGGRGGSSFGLTGSDVRPGDWYCAAANCGAHNFASRSSCFKCGAFKDDLAGGGYNSSDILRSRAFGGSGRPGWKSGDWICSRSGCNEHNFASRMECFKCSAPRDTY

SEQ ID NO: 3234 - protein, 465 aa, Akebia quinata
SGKPFYAIVHRVTGSLIIDFEPVKPYEVPMNAAGALQSYKLAAKAIARLQSLPNASMDRLCDTVVQEVFELTGYDRVMAYKFHDDDHGEVVSEITKPGLEPYLGLHYPATDIPQAARFLFMKNKIRMICDCNATHVKVFQDEKLPLDLTLCGSTLRAPHSCHSQYMENMGSIASLGMAVVINEGDEEDNGSGSAQPQRRKRLWGLVVCHNTTPRFVPFPLRYACEFLIQVFAIHINKELELGNQVLEKSVLRTQTLLCDMLMRNAPLGIVSQSPNIMDLVKCDGATLLYKNKIWRLGLSPSEFHIRDIASWLYEYHMDSTGLSTDSLHDAGFPGALSLGDGICGMAAVRITSKDMIFWFRSHTAAEVRWGGAKHDPCEEDDGRKMHPRSSFKAFLEVAKTRSLAWKDYEMDAIHSLQLILRNAFKDGDTADLNPSVIHSRLDNLKIEGMEELEAVTNEMVRLMET

SEQ ID NO: 3235 - protein, 187 aa, Thermoanaerobacter tengcongensis
MFYQPVLETSRLILKKISLEDAEDMFEYASDPEVTKYVSWEYHKNIEDSLNLIKRILSISDKEEVAIWGLYLKENEKLIGTCELNIDRKNMIGEIAFALGKKYWNKGIMTEAVREVIEFGFEKLNLNRIQARCMVENIASERVMQKVGMKFEGILREALFAKGRFWDMKMYSILKREYGEIGEGKDS

SEQ ID NO: 3236 - protein, 245 aa, Methanosarcina barkeri
MFKAAINAELLKDAVAALAVIVDEVRFKINPEGISVKAVDPANVAMGIFELGSSAFDEYNADECEIGVDLNKITDLLGIADKNDTVRMELEEENHKLLIDVGGLSYTLSLLDPSTIRAEPRVPQLELPAKVVLNGADLRRAVKAAEKISDHMLMGVSDDTFYMEAKGDTDQVRLEMGRDQLIDLKAGEACSLFSLDYLTDIVKPTNKVNEVTLSLGKDFPILIDFEIANGSGRISYLLAPRIESD

SEQ ID NO: 3237 - protein, 406 aa, Escherichia coli K12
MSQPITRENFDEWMIPVYAPAPFIPVRGEGSRLWDQQGKEYIDFAGGIAVNALGHAHPELREALNEQASKFWHTGNGYTNEPVLRLAKKLIDATFADRVFFCNSGAEANEAALKLARKFAHDRYGSHKSGIVAFKNAFHGRTLFTVSAGGQPAYSQDFAPLPADIRHAAYNDINSASALIDDSTCAVIVEPIQGEGGVVPASNAFLQGLRELCNRHNALLIFDEVQTGVGRTGELYAYMHYGVTPDLLTTAKALGGGFPVGALLATEECARVMTVGTHGTTYGGNPLASAVAGKVLELINTPEMLNGVKQRHDWFVERLNTINHRYGLFSEVRGLGLLIGCVLNADYAGQAKQISQEAAKAGVMVLIAGGNVVRFAPALNVSEEEVTTGLDRFAAACEHFVSRGSS

SEQ ID NO: 3238 - protein, 201 aa, Azoarcus evansii
MPCYEIDGLRPVVHPSAYVHPDAVLVGDVHIGARCYVAPLASLRGDFGPIILREGANVQDCCVMHGFPGIDTLVEENGHVGHGAILHSCHVGRNALVGMNAVVMDRAVIGESSIVAACSFVKAGMEIPPQVLVAGVPAKVVRTLTRQEMDWKVEGTRCYHDLAARSLTTLKPCEPLTEAEADRPAMVLPEVVPLFELKRRS

SEQ ID NO: 3239 - protein, 554 aa, Glycine max
  unsure (1)..(554): unsure at all Xaa locations
SVRRPPPRTVKSFIKNKKFGKKKVKQDSVSALFDPTSNEVNNKSVSGTTQLVCERCWCAIENNEGVTSLDSLSPGEGINSVNVHSGAASAGCNSSREVTKVKKNTVLKEQLEFSQSSKSSQGDYSSSTSTSDESNLSGSSCGNRPHMSKDVRWKAIRHAQMQHGVLGLRHFNLLKKLGCGDIGTVYLAELIGKNCLFAIKVMDNEFLARRKKTPRAQTEREILRMLDHPFLPTLYAQFTSDNLSCLVMEYCPGGDLHVLRQKQLGRSFSEPAARFYVAEVLLALEYLHMLGVVYRDLKPENILVREDGHIMLTDFDLSLRCDVSPTLLKSSSDVDPTKISGPCAQSSCIEPFCIEPACQVPCFSPRILPPAAKARKLKTDLAAQLRSLPQLVAEPTDARSNSFVGTHEYLAPEIIKGEGHGAAVDWWTFGVFLYELLYGRTPFKGSNNEETLANVVLQGLRFPENPNVSFQAKDLIRGLLVKEPENRLGSEKGAAEIKQHPFFEGLNWALIRCAIPPELPDLYDFGVSDMVXSQGKGAKYLECKVGEHVEFELF

SEQ ID NO: 3240 - protein, 605 aa, Schizosaccharomyces pombe
MSSPNNQPLSCSLRQLSISPTAPPGDVGTPGSLLSLSSSSSSNTDSSGSSLGSLSLNSNSSGSDNDSKVSSPSREIPSDPPLPRAVPTVRLGRSTSSRSRNSLNLDMKDPSEKPRRSLPTAAGQNNIGSPPTPPGPFPGGLSTDIQEKLKAFHASRSKSMPEVVNKISSPTTPIVGMGQRGSYPLPNSQLAGRLSNSPVKSPNMPESGLAKSLAAARNPLLNRPTSFNRQTRIRRAPPGKLDLSNSNPTSPVSPSSMASRRGLNIPPTLKQAVSETPFSTFSDILDAKSGTLNFKNKAVLNSEGVNFSSGSSFRINMSEIIKLEELGKGNYGVVYKALHQPTGVTMALKEIRLSLEEATFNQIIMELDILHKAVSPYIVDFYGAFFVEGSVFICMEYMDAGSMDKLYAGGIKDEGVLARTAYAVVQGLKTLKEEHNIIHRDVKPTNVLVNSNGQVKLCDFGVSGNLVASISKTNIGCQSYMAPERIRVGGPTNGVLTYTVQADVWSLGLTILEMALGAYPYPPESYTSIFAQLSAICDGDPPSLPDSFSPEARDFVNKCLNKNPSLRPDYHELANHPWLLKYQNADVDMASWAKGALKEKGEKRS

SEQ ID NO: 3241 - protein, 405 aa, Salmonella enterica subsp. enterica serovar Typhi
MATEQTAITRATFDEVILPVYAPADFIPVKGKGSRVWDQQGKEYIDFAGGIAVTALGHCHPALVEALKSQGETLWHTSNVFTNEPALCLGRKLIDATFAERVLFMNSGTEANETAFKLARHYACVRHSPFKTKIIAFQNAFHGRSLFTVSVGGQPKYSDGFGPKPADIIHVPFNDLHAVKAVMDDHTCAVVVEPIQGEGGVQAATPEFLKGLRDLCDKHQALLVFDEVQCGMGRTGDLFAYMHYGVTPDILTSAKALGGGFPVSAMLTTQEIASAFHVGSHGSTYGGNPLACAVAGAAFDIINTPEVLQGIHTKRQQFVQHLQAIDEQFDIFSDIRGMGLLIGAELKPKYKGRARDFLYAGAEAGVMVLNAGADVMRFAPSLVVEEADINEGMQRFAQAVGKVVA

SEQ ID NO: 3242 - protein, 499 aa, Enterococcus faecalis V583
MTNFLFVVFKLEILKEIAILKRDRHRIFHENSYYFRYLFKKVEILLRFFSLNEMRESMEKKQLKREITTFGALSTVMGTVIGAGVFFKAASVVGHAQSASLAIFAWVLGGALTICAGLTSAELATAIPETGGAVKYIEYTYGKLAGFLLGWAQSIIYYPANISALSIIFSTQLINLFHLSANLLIPIAILAGTSITIINLLGTKIASLVQSTTLVVKLIPIALISLVGLFTPGQVAVSLFPVETTANTGFLVAFSGALVATMFAYDGWLGVGNVAGEMKRPERDLPKAIIFGLLLITLIYALINFVFLKTLPIEQIAGNLNAASDASVAIFGPIGGKIVTIGILISVYGALNGYTMTGIRIPYALALDNLMPFSRQFQKLSKRFVVPYVAGIFQLAVAIIMMFFGTFDLLTDMLVFVMWLFNLLIFLAVFILRKREPELKRPYKVPGYPIIPIIASLGGIFILVTTSITQPILALIGIGITLLGIPVYLVNKQKTKPKT

SEQ ID NO: 3243 - protein, 441 aa, Amycolatopsis mediterranei
MKRQPDFAAHGRAVDRVLAGRLSAALARPAAQQPGWPDAERAAEVIELLHDAEPIVAPEETARLRARLASVARGEAFLLQGGDCAETFAGNTEPHLRANLGVLARMGEVLAEAAGLPVVKIARMAGQFAKPRSRTVDALGLPVYRGDIVNSPECTVAARTPDPHRMLLAYAHAAGAMDLVRKLCAEGLEEPLAAQVVLAGARRASSPGGRPFPDFGRPPRPAEIYVSHEMLLLDYERAVLRTDSSGPEPRLSSGLAHFLWIGERPASSTAPTSTFAELLSNPIGLKLGPSCTPEEVVEYVRRLDPHRTPGRLTLVSRMGHAQVRELLPPIVEKVAASGHEVIWQCDPMHGNTRTSGNGYKTRHFGHVVAELAGFFAVHRQLGTHPGGIHVEVTGDDVTECLGGAAGIAEADLPDRYLTACDPRLNADQSVELAFAIAKMLR

SEQ ID NO: 3244 - protein, 361 aa, Campylostemon angolense
QKLAVRAISQLQSLPGGDIKLLCDAAVESVRNLTGYDRVMVYKFHEDEHGEVVAESRRPDLEPYIGLHYPATDIPQASRFLFKQNRVRIIVDCHASPVSVIQDDGLMQPLCLVGSTLRAPHGCHAQYMENMGSIASLAMAVIINGNDEDGIGGRNPTRLWGLVVCHHTSVRCIPFPLRYACEFLMQAFGLQLNMELQLAAQLLEKHVLKTQTLLCDMLLRESPTGIVTQSPSIMDLVKCDGAALYYQGNYYPSGVTPTEAQIKDIVNWLLAFHGDSTGLSTDSLADAGYPGATLLGDAVCGMAVAYITNRDFLFWFRSHTAKEIKWGGAKHHPEDKDDGQRMHPRSSFKAFLEVVKSRSLP

SEQ ID NO: 3245 - protein, 127 aa, Zea mays
  unsure (1)..(127): unsure at all Xaa locations
PSILSFTTTVSFSFFFLNASFPFLVGFLPVWGXXXLCIKTKATVNDQSAKKHQKVKSILCQDCEGNGAIVCTKCEGNGVNSVDYFEGRFKAGSLCWLCGRVRVILCGNCNGAGFLGGFLSTFDETAQ

SEQ ID NO: 3246 - protein, 459 aa, Staphylococcus aureus subsp. aureus MW2
MENNELQRGLSARQIQMIALGGTIGVGLFMGATSTIKWTGPSVILAYLIAGIFLFLIMRAMGEMIYLNPTTGSFATFASDYIHPAAGYMTAWSNIFQWIVVGMSEVIAVGEYMKFWFPELPTWIPGVIAILLLMAANLFSVKAFGEFEFWFALIKVVTIILMIIAGFGLIFFGFGNGGHAVGISNLWTNGGFMPNGIVGFFFALSIVIGSYQGVELIGITAGETKDPQKNIVKAVNGVIWRILIFYLGAIFVIVSVYPWNQLGDIGSPFVATFAKIGITFAAGLINFVVLTAAMSGCNSGIFSASRMIYTLAHKGEMPKIFTKIMRNGVPLYTVIAVSLGILIGALLNVILPLYIDGAKSIFVYVYSASILPGMIPWFMILFSHLRFRKLHPEELEGHPFKMPGGAVTNYLTILFLILVLVGMVFNVETRISVLIGVIFLTIVTIYYFIRYNKNNVKAK

SEQ ID NO: 3247 - protein, 542 aa, Burkholderia fungorum
MLLQHPTCNQAASPKPTRLTDTLPRYQALAAQNAVCGSKTLHARSLGFFLAERHACGSRYYQGVSLTVRNVPGITIMSKTSLIAADRKHLIHPVINYRAHEARGATVLESGQGAYLRDIDGNELLDAFSGLWCVNVGYGQQSIVEAATRQMTKLPYATTYFHFSSEPAIELADKLVALAPASLQHVYFTLGGSDAVDSAIRFITHYFNATGRPSKKQMIALERGYHGSSSVGAGLTALPAFHRNFDLPLPHQHHLPSPYAYRQTHGDDAQALIAASVAALEAKVAALGTDNVAAFFCEPIQGSGGVIVPPVGWLKAMRDACRRLDILFVADEVITGFGRTGPLFACEAEQVEPDLMTVAKGLTSGYAPMGAVLMSDEIYQGIAGDARDTAIVGHGQTYSAHPVSAAIGLEVLRLYQEGGLLANGQAQAPRFAAGLDALLGHPLVGDSRHRGLLGALELVADKDSRARFDPALKLPDRIAAAAYRNRLVFRAFGDSILGFAPALCFGEAEFEQMFGRLKRTLDEVLDETEVRAALRTAGRAAA

SEQ ID NO: 3248 - protein, 250 aa, Glycine max
MGKSYPTVSADYQKAVEKAKKKLRGFIAEKRCAPLMLRLAWHSAGTFDKGTKTGGPFGTIKHPAELAHSANNGLDIAVRLLEPLKAEFPILSYADFYQLAGVVAVEVTGGPEVPFHPGREDKPEPPPEGRLPDATKGSDHLRDVFGKAMGLTDQDIVALSGGHTIGAAHKERSGFEGPWTSNPLIFDNSYFTELLSGEKEGLLQLPSDKALLSDPVFRPLVDKYAADEDAFFADYAEAHQKLSELGFADA

SEQ ID NO: 3249 - protein, 76 aa, Zea mays
NYVCRALKEEKIAARSAILPMLQAEEDERFVKDWKKYLEEEARIMKDVPGWKVGESVYNSGKWMPPATGELRPEVW

SEQ ID NO: 3250 - protein, 429 aa, Pantoea agglomerans
MTQDDLAFDRRHIWHPYTSMTSPLPVYPVQSAQGCELQLASGEQLVDGMSSWWAAIHGYNHPHLNAAMKTQIEAMSHVMFGGITHAPAVSLCRKLVAMTPEALECVFLADSGSVAVEVSMKMALQYWQAKGESRRRFLTFRRGYHGDTFGAMSACDPDNSMHSLWAGYLPDNLFAPAPESRFDGEWDERDIVGFARLMAAHRHEIAAVILEPIVQGAGGMRLYHPEVLKRIRRMCDREGILLIADEIATGFGRTGKLFACEHADITPDILCLGKALTGGTMTLSATLTTRAVAETIRNGEAGCFMHGPTFMGNPLACAVANASLELLARGEWQVQVAAIEAQLKRELAPARAAETVADVRVLGAIGVIETHQPVNMAALQRFFVEQGVWIRPFGKLIYLMPPYVISPEQLSKLTDAVLAAVAHPAHFAP

SEQ ID NO: 3251 - protein, 458 aa, Escherichia coli K12
MKNASTVSEDTASNQEPTLHRGLHNRHIQLIALGGAIGTGLFLGIGPAIQMAGPAVLLGYGVAGIIAFLIMRQLGEMVVEEPVSGSFAHFAYKYWGPFAGFLSGWNYWVMFVLVGMAELTAAGIYMQYWFPDVPTWIWAAAFFIIINAVNLVNVRLYGETEFWFALIKVLAIIGMIGFGLWLLFSGHGGEKASIDNLWRYGGFFATGWNGLILSLAVIMFSFGGLELIGITAAEARDPEKSIPKAVNQVVYRILLFYIGSLVVLLALYPWVEVKSNSSPFVMIFHNLDSNVVASALNFVILVASLSVYNSGVYSNSRMLFGLSVQGNAPKFLTRVSRRGVPINSLMLSGAITSLVVLINYLLPQKAFGLLMALVVATLLLNWIMICLAHLRFRAAMRRQGRETQFKALLYPFGNYLCIAFLGMILLLMCTMDDMRLSAILLPVWIVFLFMAFKTLRRK

SEQ ID NO: 3252 - protein, 381 aa, Triticum aestivum
RQDDGSGSSSRAQGGDEGPSADGFDPGAPPPFGLADIRAAIPKHCWVKDPWRSMGYVVRDVVVVLALAATAARLDSWLAWPVYWAAQGTMFWALFVLGHDCGHGSFSNNAKLNSVVGHILHSSILVPYNGWRISHRTHHQNHGHVENDESWHPLPEKLYRSLDSSTRKLRFALPFPMLAYPFYLWSRSPGKSGSHFHPSSDLFQPNEKKDILTSTTCWLAMAGLLAGLTVVMGPLQILKLYAVPYWIFVMWLDFVTYLHHHGHNDKLPWYRGKAWSYLRGGLTTLDRDYGWLNNIHHDIGTHVIHHLFPQIPHYHLVEATEAAKPVLGKYYREPDKSGPFPFHLFGALARSMKSDHYVSDTGDIIYYQTDPKLAAGAHTSD

SEQ ID NO: 3253 - protein, 346 aa, Arabidopsis thaliana
METTVKNKQVILRNYVKGIPKESDLMIITASDPVELKVKPGSAAVMVRNLYLSCDPYMGILMREPTPSTLALLDAFIPGKPIAGIGVSQVIDSDDPSFTKGDMIWGIVNWEEFSTINPAAIFKIDVNINVPLSYYTGILGMIGLTAYAGFFEICSPKKGDTVFVSAASGAVGQLVGQFAKLMGCYVVGSAGSKQKVDLLLNKFGYDDAFNYKEEPDLDSALKRCVPKGIDIYFENVGGKMLDAVLLNMKTYGRIAVCGMISQYHLETRDRLQNLPDIIFKKIRMQGFASYDFIDRFPKFLEFVLPYIKEEKLAYVEDIVEGLENGPAALVGLLHGKNVGKQVLKVA

SEQ ID NO: 3254 - protein, 258 aa, Methanosarcina barkeri
MASYKTLVKDVIKKADVLLEVIDARFPDETQNSEVEREIIRLNKPFIIVINKSDLVSREKLEKTKARLLRIAPVVFVSSKDRSGTTMLRHQILESAAIKAGIKGQDILVGTLGYPNVGKSSVINGVTGRHRASTSSVSGHTKGVQHVNAGSHIMFIDTPGVIPFDEKDEYLQGLLGIKDVTHLKDKIGVALKIIEKMLSENKVSLESFYSITIKDETAYDALELIGKQCNFLQKKGEVDENRTATRIINDWQNGLLLI

SEQ ID NO: 3255 - protein, 675 aa, Prochlorococcus marinus subsp. marinus str. CCMP1375
MGNKFSMSKIWRKSVDFDKRVKHFRKRSNLDLAESTWIPAKEEKQALEAHISVKGINRVDQIWPWLKENHGNVLAVNSPHYIFPERYNYEELADKIAVAAAAFESLGVVSGDVVALFSENSPRWLIADQGLMRLGASNAVRGSSAPVEELRYILADSRSVGLVVQSSELWKALALSEDDKKQFKFVLQIEGQPENNLLGWEEFLLKGANKSPINAFKEATGITANSSIATILYTSGTTGKPKGVPLTHDNLLHQMRSLACIASPPPGTPLLSVLPIWHSYERSAEYYFFSCACSQHYTTIKHFKQDLQTVRPVVMATVPRLWEAVKTGFDEALKKMPRSRQMVLKAALNNSRLFKAALRKSRNLLLLEINKTNRAIAFSEVVFRWPIHALASKLLWPKVLQQLSGGRLRFPINGGGAIAPHVDTFFEALGVELLVGYGLTETSPVLSCRRTWRNIRGSSGLPLPETEFRIVDPLNGGPLKFSQQGRVLVRGPQVMNGYLRKPEETSKVLDQKGWFDTGDLGMLLADGSIVLTGRAKDTIVLSNGENVEPGPLEEFLLGSPLIEQIIMIGQDERQLGALIVPDIDQILKWAHQRNLFLKEDLGGGMGDLKLRRLLQREVNDILSKRPGSRSDERVAGIALVKPFSIENGLLTQTLKQRRNKIVERDQKAIEDIFNR

SEQ ID NO: 3256 - protein, 262 aa, Bacillus halodurans
MIVLALLGVLLLSVYAYKTKKLTLSGAISAFVVGALISFGLGFKGLLLLAIFFFTSGFWSRFYQERKENEITAKGSTRDGWQVLANGGFAAICALLFSILQDPIYICGFVASLAAANADTWASEVGPLAKRRPIHIIKWKPVDAGTSGAVSAIGTAAAFAGSFIIVVVSIFFWWSSSFASHHLLFSLTLAGFLGNLFDTLVGATGQVLYQCPRCGLETERKIHCNGPTEKKYGLRFLNNDTVNAICTGTGALFGIVAGLILL

SEQ ID NO: 3257 - protein, 523 aa, Thauera aromatica
MSEQLQPQQSMNAADEIIGRPLAQGLGEQTAMLCAERSITYRELDAATNRHGNALRAHGVGKGDRVLFLMDDSPELVAAYLGTLRIGAVAVALNVRLAPRDVLYVIQDSACRLLYIDAEFLHLYQQIAGELEQPPQVVVRGDEAPAPAIIAFKHFLDGQAATLESVQVAPDDVAYWLYSSGTTGRPKAVMHAHRSVLIADRLEREYFGIKPGDRVFTTSKMFFGWSLGHSLMGGLQCGATVIVAPGWPDAERVMATAARHRPTILFSTPVMYRNLLREGAGESAAMRDIRHFVSAGEKLPENIGQQWLDTFGIPITEGIGASETVFLFLCARPDAYRIGSCGKRVPWAEVRLLDELGNEITTPDTPGLIAIRMASQFVGYWKLPETTEKALRDGWYYPGDMFSFDADGFWYHNGRADDMLKISGQWVSPGEIESCASAVPGIAEAVVVAVPNDDGLTRLTLFIVPEDPSASQQKLSEAWMTTLRGTLSIYKCPRTIQFLEELPRTATGKVQKYRLRDMLQATL

SEQ ID NO: 3258 - protein, 246 aa, Triticum aestivum
  unsure (1)..(246): unsure at all Xaa locations
MMGISALRSHHPLPLSTARPATALPRATSPTSHQPSSLALLRCRCRCRRSLPHSCCSSSPRASLSPGAPDSAAFMALAPNNAALRHRLIAPNSTAGSGDAAATGGLPSVVGIAHLAVSLGIVLATDKYLKQAFVAASIKFPSALFGMFCIFSVLLVLDTVAPALAKAFMDFFEPATLFIQRWLPLFYVPSLVVLPLAVRDVPAASGLKICLITFGGWFASLAVAXYTALTVRKIVKTELIAAEPMG

SEQ ID NO: 3259 - protein, 181 aa, Zea mays
  unsure (1)..(181): unsure at all Xaa locations
MARSHLRLLRCRRSMSAALITWPCLSLISLPHGEYRCFVGGLAWATDDHSLHNXFSTYGEVLESKIILDRETQRSRGFGFVTFSTEEVMRNAIEGMNGKELDGRNITVNEAQSRGGRGGGGGGGYGGGRGGGGYGGGGRRDGGGGYGGGGGYGGGGGGYGGGGGGYGGYGGYGNSDGNWRN

SEQ ID NO: 3260 - protein, 392 aa, Byrsonima crassifolia
DLEPVNPADVPVTAAGALKSYKLAARAISRLQSLPSGNISLLCDVLVKEVRDLTGYDRVMVYKFHEDEHGEVISECRRPDLEAYLGLHYPATDIPQASRFLFMKNKVRMICDCLAPPVKVIQDERLLQPLSLCGSTLRSPHGCHAQYMANMGTIASLVMSVTINEDDDMMDMDQQHMAGKLWGLVVCHHTSPRFVPFPLRYACEFLIQVFGVQINKEVELAAQVREKHILRTQTLLCDMLLRDAPVAIITQSPNVMDLVKCNGAALYYRKKFWLLGVTPTEAQIRDIAEWLLEYHSGNTGLSTDSLMEAGYPGASDLGHAVCGMAAVKITSRDFLFWFRSHTAKEIKWGGAKHDPDDKDDGRKMHPRSSFKAFLEVVKWRSLPWEDMEMDAI

SEQ ID NO: 3261 - protein, 221 aa, Triticum aestivum
MAETEYRCFVGGLAWATDDHNLQQAFSQYGEILDAKIINDRETGRSRGFGFVTFGSEESMRQAIEEMNGKELDGRNITVNEAQSRRSGGGGGGGGYCGQRGGSGGYGGGGGGYCGQGGGGYGQGGGGFGGQRGGGGYGGGRRGYGGSGGVFRFPPCVCHLPRSLEELGGGALSAIPPILSLSLRLPHARLSANSLVYCLYLGSALFRVYRRSFWCASVLLL

SEQ ID NO: 3262 - protein, 751 aa, Geobacillus stearothermophilus
MENQNRQNAAQCPFHGSVTNQSSNRTTNKDWWPNQLNLSILHQHDRKTNPHDEEFNYAEEFQKLDYWALKEDLRKLMTESQDWWPADYGHYGPLFIRMAWHSAGTYRTGDGRGGASTGTQRFAPLNSWPNNANLDKARRLLWPIKKKYGNKISWADLFILAGNVAIESMGGKTIGFGGGRVDVWHPEEDVYWGSEKEWLASERYSGDRELENPLAAVQMGLTYVNPEGPDGKPDPKAAARDIRETFRRMGMNDEETVALIAGGHTFGKAHGAGPATHVGPEPEAAPIEAQGLGWISSYGKGKGSDTITSGIEGAWTPTPTQWDTSYFDMLFGYDWWLTKSPAGAWQWMAVDPDEKDLAPDAEDPSKKVPTMMMTTDLALRFDPEYEKIARRFHQNPEEFAEAFARAWFKLTHRDMGPKTRYLGPEVPKEDFIWQDPIPEVDYELTEAEIEEIKAKILNSGLTVSELVKTAWASASTFRNSDKRGGANGARIRLAPQKDWEVNEPERLAKVLSVYEDIQRELPKKVSIADLIVLGGSAAVEKAARDAGFDVKVPFFPGRGDATQEQTDVESFAVLEPFADGFRNYQKQEYSVPPEELLVDKAQLLGLTAPEMTVLVGGLRVLGANYRDLPHGVFTDRIGVLTNDFFVNLLDMNYEWVPTDSGIYEIRDRKTGEVRWTATRVDLIFGSNSILRSYAEFYAQDDNQEKFVRDFINAWVKVMNADRFDLVKKARESVTALQGCAALRSKIGKRLQ

SEQ ID NO: 3263 - protein, 233 aa, Ralstonia solanacearum
MSSPSLAAPALARARDRLARRRTAGVLSRHHLLIIAIAIVIAIIALLLPRTCHAAAGAQAAPAPQPAAAGPCPTALDFRVRRLQDDAPQNLCQYAGRVVLVVNTASYCGYTYQYEGLEALYARFRDKGLTVLGFPSNDFEQEPGTGKQIADFCYNTYGVKFPMFSKTSVVGPAASPLYHWLAQQTGQPPKWNFHKYLLDRSGRVVAVYPSKVEPGDPALIKRIDALLAEPAPR

SEQ ID NO: 3264 - protein, 487 aa, Desulfovibrio desulfuricans G20
MHSGRLSYSTVPPQEARGHAAGAPVLYWMHREMRARDNWALLHAQQCAAAGGAPLAVVFCLVPQFIDAGLRHFHFMLQGLEETARILEELGIPLFLLRGTPPEEVVRFAQAHGASRVVTDFDTLRIKRQWIRSAVEAARQLDIAVDVVDSRNVVPCLRASDKREYAARTIRPKIHRLLDEYLDPLPALQPAAVPWKGAYQRPDWQAALDSLQADASVQPAGWLPPGENAALAELTAFIRVRMHRYAAERNNPLMPVLSHLSPYLHFGMLSAQRAVLEVMQAQGTAAGGTYGEGAAAFVEELVVRRELADNFCWYEPSYDSVEAFPDWALKTLDRHRADRRPYLYDEQQLEKARTHDPLWNAAQQEMVLTGKMHGYMRMYWAKKILEWTESPEEALRIVIRQNDRWSLDGRDSNGYAGAAWSVGGVHDRPWREREVFGTIRFMSYNGARSKFDVDGYVAAVAALENHPVPAPVSRCGGRRKPAQGLLL

SEQ ID NO: 3265 - protein, 287 aa, Saccharomyces cerevisiae
MTYTTRQIGAKNTLEYKVYIEKDGKPVSAFHDIPLYADKENNIFNMVVEIPRWTNAKLEITKEETLNPIIQDTKKGKLRFVRNCFPHHGYIHNYGAFPQTWEDPNVSHPETKAVGDNDPIDVLEIGETIAYTGQVKQVKALGIMALLDEGETDWKVIAIDINDPLAPKLNDIEDVEKYFPGLLRATNEWFRIYKIPDGKPENQFAFSGEAKNKKYALDIIKETHDSWKQLIAGKSSDSKGIDLTNVTLPDTPTYSKAASDAIPPASPKADAPIDKSIDKWFFISGSV

SEQ ID NO: 3266 - protein, 205 aa, Neisseria meningitidis
MPYTEDMRPGDTANPYGASKAMVERMLTDIQKADPRWSMILLRYFNPIGAHESGLIGEQPNGIPNNLLPYICQVAAGKLPQLAVFGDDYPTPDGTGMRDYIHVMDLAEGHVAAMQAKSNVAGTHLLNLGSGRASSVLEIIRAFEAASGLTIPYEVKPRRAGDLACFYADPSYTKAQIGWQTQRDLTQMMEDSWRWVSNNPNGYDD

SEQ ID NO: 3267 - protein, 218 aa, Pseudomonas syringae pv. syringae B728a
MSGWPHCNWEWALARQTLRHAVACRQTTTISRAAMMKLRFFSIPLLLLAMSGAAMAADCPPLLQGELPKLRAKENIDLCKRFAGKPLVVVNTASFCGFAPQFKGLEALSQRYKGQGLEVLGVPSNDFKQEAKDGEETAKVCYVNYGVTFTMTEPQAVRGDDATHLFKVLAEQSSAPRWNFYKYVVDRQGKVIANFSSMTKPDDPELIAAIEKAIASKP

SEQ ID NO: 3268 - protein, 751 aa, Geobacillus stearothermophilus
MENQNRQNAAQCPFHGSVTNQSSNRTTNKDWWPNQLNLSILHQHDRKTNPHDEEFNYAEEFQKLDYWALKEDLRKLMTESQDWWPADYGHYGPLFIRMAWHSAGTYRIGDGRGGASTGTQRFAPLNSWPDNANLDKARRLLWPIKKKYGNKISWADLFILAGNVAIESMGGKTIGFGGGRVDVWHPEEDVYWGSEKEWLASERYSGDRELENPLAAVQMGLIYVNPEGPDGKPDPKAAARDIRETFRRMGMNDEETVALIAGGHTFGKAHGAGPATHVGPEPEAAPIEAQGLGWISSYGKGKGSDTITSGIEGAWTPTPTQWDTSYFDMLFGYDWWLTKSPAGAWQWMAVDPDEKDLAPDAEDPSKKVPTMMMTTDLALRFDPEYEKIARRFHQNPEEFAEAFARAWFKLTHRDMGPKTRYLGPEVPKEDFIWQDPIPEVDYELTEAEIEEIKAKILNSGLTVSELVKTAWASASTFRNSDKRGGANGARIRLAPQKDWEVNEPERLAKVLSVYEDIQRELPKKVSIADLIVLGGSAAVEKAARDAGFDVKVPFFPGRGDATQEQTDVESFAVLEPFADGFRNYQKQEYSVPPEELLVDKAQLLGLTAPEMTVLVGGLRVLGANYRDLPHGVFTDRIGVLTNDFFVNLLDMNYEWVPTDSGIYEIRDRKTGEVRWTATRVDLIFGSNSILRSYAEFYAQDDNQEKFVRDFINAWVKVMNADRFDLVKKARESVTALQPYSFIRSEGSAGLQ

SEQ ID NO: 3269 - protein, 194 aa, Triticum aestivum
MRTDVRRGAAAAGRDQFPVGMRVLAVDDDPVCLKVLETLLRRCQYHVTATNQAVIALRMLRENRDMFDLVISDVHMPDMDGFKLLELVGLEMDLPVIMLSVNGETKTVMKGITHGACDYLLKPVRIEELRNIWQHVVRRKFSTRDSVNLDTYEECNKPPSADSDYVYGQVTCGSPDQSGRPSKERKEYQYEEED

SEQ ID NO: 3270 - protein, 493 aa, Rhodopseudomonas palustris
MAGIWTRKSLSSLQIEAAAGDSGDGEVRHLKRSLSAVNLVALGVGGIIGAGIFVLTGHAAAANAGPAVSLSFLLGAITCAFAGLCYAEMASTVPVSGSAYTYAYATIGELVAWIIGWDLILEYAVGAITVAIGWSGYFVSLLGNFGIHLPPQFTTAPLAYDAATHAWSTTGAFLNLPAIAIVVAIATLLVIGIQESARFNNVIVGIKLTVIALFLIFAAPMVTPANWVTAANPDGAFIPPAQENGIFGWSGVLRGAAVVFFAFIGFDAVSTAAQEAKNPQRDMPLGILGSLAICTVLYVSVAFVLTGIVPYDRLNVPDPIAVGIDAAGIGWLSSIVKIGVVTGLTSVILVLMLGQTRVLRAMAHDGLMPRGAAATHPRFRTPHVATIGTGVIVAGLAGVLPIGLVGELVSIGTLFAFAVVCVGVLALRIKHPEQHRPFKVPAIWLVAPAGAIVSFILMLGLPLDTWIRLAVWLAIGLAIYFLYGRHHSKPARR

SEQ ID NO: 3271 - protein, 368 aa, Zea mays
  unsure (1)..(368): unsure at all Xaa locations
FCRGPRAPRPIGCTALVVCTPLVTHTLPHIPFSPTALLAARNNMSNRATHWCYACRRPIRLRGQDIICPNCNDGFIQEISEMGGVLNTYGLIEPDFEERQARRFGMMDAISSLMRQRLSEIGRDSLFDIHGRQGTGTEYGRRSTAIPTLVFGGIPSPAVGSSDVNVVIREGRRAGAARPNFSSLVVGPSLEALFEQLLLQNNRQGPPPAPQSAIDSMPVVKINRRHLDEDPQCAVCKDKFEVGAEAREMPCKHLYHTDCIIPWLVQHNSCPVCRHPLPSQRSGSXSSARPSAYYNEAADPPGVTRADLEPASRDGGRESQERRRYFSXLWPYGAPEXRSSYYKYEQNXDESVVYDXNQIXYVEWNYDH

SEQ ID NO: 3272 - protein, 907 aa, Pseudomonas syringae pv. syringae
MLLLTILPASLMAAMLGGYFTWMQLSELQSQLLQRGEMIAQDLAPLAANALGRKDKVLLSRIATQTLEQTDVRAVSFLDTDRTVLAHAGPTMISPSPIGSGSQLLSSTGTDATRYLLPVFGSQRHLTSPIIPAEADTLLGWVELEISHNGTLLRGYRSLFASLLLILTGLAFTATLAVRMSRTINGPMSQIKQAVSQLKDGNLETRLPPLGSRELDELASGINRMAATLQNAQEELQLSIDQATEDVRQNLETIEIQNIELDLARKEALEASRIKSEFLANMSHEIRTPLNGILGFTHLLQKSELTPRQFDYLGTIEKSADNLLSIINEILDFSKIEAGKLVLDNIPFNLRDLLQDTLTILAPAAHAKQLELVSLVYRDTPLALSGDPLRLRQILTNLVSNAIKFTREGTIVARAMLEDETEEHAQLRISVQDTGIGLSSQDVRALFQAFSQADNSLSRQPGGTGLGLVISKRLIEQMGGEIGVDSTPGEGSEFWISLKLPKAREDKEESLNIPLGGLRAAVLEHHDLARQALEHQLEDCGLQTIVFNNLENLLNGVTAAHETPAAIDLAVLGVTALEISPERLRQHIWDLENLNCKVMVLCPTTEHALFQLAVHDVYTQLQAKPACTRKLQKALSELIAPRAVRADIGPPLSSRAPRVLCVDDNPANLLLVQTLLEDMGAEVVAVEGGYAAVNAVQQEAFDLVLMDVQMPGMDGRQATEAIRAWEAERNQSSLPIVALTAHAMANEKRSLLQSGMDDYLTKPISERQLAQVVLKWTGLALRNPAPERQNEALEVHVGPLVLDHEEGLRLAAGKADLAADMLAMLLASLDADREAIRVARANQDVHALIERIHRLHGATRYCGVPQLRSACQRAETLLKQNAPHTEEALNDLDKAIIRLEAEARVMA

SEQ ID NO: 3273 - protein, 337 aa, Thermobifida fusca
MNVLLTGGAGYIGTHVAVELLENGHDVVVVDNLRNSHAEAVRRVERITGRSVHFYVGDCADRELMDRVFTEHRIDAAVHCAGLKAVGESVELPLLYYRNNLDALLTVCEAMDAHGVRSLVFSSSATVYGDPDRVPIPEDAPLRATNPYGATKLFAERILSDLVASAPDWRIITLRYFNPVGAHPSGLIGEDPEGVPNNLFPYIAQVAAGRRERVLVYGDDYATPDGTGVRDYLHVMDLARGHVAALERLGDAYGMRTYNLGSGHGVSVLEAIAAFERACGKTIPYEVVARRPGDIAVCYADPSAANRDLGWKTAYTLDEACAHLWRWQTMNPNGFAG

SEQ ID NO: 3274 - protein, 345 aa, Streptomyces coelicolor A3(2)
MQYRTLGRTGVQVSSLALGAMNFGSIGRTTQDEATAIVDAALEGGINLIDTADMYGRGESEEMVGKAIAGRRDDIVLATKANMPMSDEPNHQGSSRRWLVTALDNSLRRLGVDHVDLYQIHRWDPATSDEETLSALTDLQRAGKIRYFGSSTFPAYRIVEAQWAAREHRLSRYVTEQPSYSLLQRGIESHVLPVTEQYGLGVLVWSPLASGWLSGAVRAGREAATHRSAVLPERFDTALPANRARLDAVEKLAAVADEAGLTLIQLALGFVTAHPAVTAALVGPRTLNHLHSQLAAADTVLSDDVLDAVDAVVAPGTDLAAHEKFDATPALLDPALRRRRRPAAG

SEQ ID NO: 3275 - protein, 160 aa, Bacillus subtilis subsp. subtilis str. 168
MSIYHMKVRTITGKDMTLQPFAGKVLMIVNTASKCGFTSQLKQLQELYDTYQQEGLEILGFPCNQFMNQEPGEEADIQEFCETNYGVTFPMFSKVDVNGKNAHPLFVYLTEHAKGMLGTKAIKWNFTKFIVDRNGEIVGRYSPNTNPKELEDDIVKLLEQ

SEQ ID NO: 3276 - protein, 641 aa, Zea mays
MATYYSSPGSERDSQTMYSAESGNVSYPVPSALGNFLYTNNASSGPYTEFSGIVQPQQNFMELTGHPSAMSHDSSSNEATNMGSSLTEQRSFGPLKDMRNEMLMHLMDGAHSSGSDLIHNDAHSTVQLEFGMLNNHNSTSVPLAPGQGLSLSLNTHILAPSYPHWSAKQDLLTPNSYQGDDNRMKNMQSEASQAIRNSKYLKAAQELLDEIVSVWKSVKQKTDKGPSEAGKSYRWKTDGGTKSEGVSFDPQESGANTAAELSTAEKQELQNKMAKLMTMLDEVDRKYKHYYHRMQLVMSSFNMVAGAGAAKPYTAVALQTISRHFRCLKDAINDQISVIRKKLGEDDNTSGKEGKLTRLRYIDQQIRQQRAFQQYGMLQQNAWRPQRGLPENSVSILRAWLFEHFLHPYPKDSEKLMLSRQTGLTRSQISNWFINARVRLWKPMIEDMYKEEIGEAELDSNSSSDNVQRNKDKAPSSEENEDHKTSTSQVCQTSQLGESKANIGGVMSFSGAPAGGFHNDANPDDSFMSLMLKAQRPGETDGSGLLHDAVAHHSDESARFMAYHLTEFGRYGNNNVSLTLGLQHAENTQPGFPGVRDQDIYNSTAPLNVTSTSSEYDSASQIDQQQRQRFEVSPLMHDFVA

SEQ ID NO: 3277 - protein, 156 aa, Fagus sylvatica
MNSRAFIFLALLFASVLLISSAVATKTSKDEEKPEESNPVDDTKYGGYGGHYGGGHGGGYGGGHGGGYGGGHGGRGGGGGGRGGGGGYGGRREHVAEESIGRDTKYGGYGGGHGGHGGHGGGHGGGHGGGGGGPSRKLKAKLYNSLKSFASSYVPK

SEQ ID NO: 3278 - protein, 392 aa, Aspicarpa brevipes
DLEPVNPADVHVTAAGALKSYKLAAKAISRLQSLPSGNVSLLCDVLVKEVRDLTGYDRVMMYKFHEDEHGEVVSECRRSDLESYLGLHYPATDIPQASKFLFIKNKVRMICDCLAPSVKVIQDERLTQPLSLCGSTLRSPHGCHAQYMTNMGAIASLVMAVTVNEDEDTMDGDQQHMTRKLWGLVVCHHTSPRFVPFPLRYACEFLIQVFGVQVTKEVELAAQVREKHSLQIQTMLCDMLLRDALVAIITQSPNVMDLVKCDGAALYFKNKTWFLGVTPTEEQIRGIAEWLLKYHSGNTGLSTDSLMEAGYPGASGLGDAVCGMAAVSITSRDFLFWFRSHTAKEIKWGGAKHDPDDKDDLRKMHPRSSFKAFLEVVKWRSTPWEDIEMDAI

SEQ ID NO: 3279 - protein, 230 aa, Bacillus cereus ATCC 14579
MSQILIGVGWVLFTVLLYQLSKKIYKLFPTPFTIPMLVATGLMAFLFIVLDIPYQHYMESGGGWIAKLLGPGVVAFAIPLYKQRHVLQKYVVPIAGGVLVGTTVAIASDFAIASLMGTDKSLILSSLPKSVTMPVAMSVSEQVGGVPSLTAAFVVIAGITGTITGPLLLKWSRVTNSVGKGIGFGCASHIMGVMRAMKNNEHEGVIGSVTMTLTAILTCLLGPLFAMMFM

SEQ ID NO: 3280 - protein, 162 aa, Chlamydomonas reinhardtii
AANTEQLTEEQIAEFKEAFALFDKDGDGTITTKELGTVMRSLGQNPTEAELQDMISEVDADGNGTIDFPEFLMLMARKMKETDHEDELREAFKVFDKDGNGFISAAELRHVMTNLGEKLSEEEVDEMIREADVDGDGQVNYEEFVRMMTSGATDDKDKKGHK

SEQ ID NO: 3281 - protein, 153 aa, Saccharomyces cerevisiae
VQAVAVLKGDAGVSGVVKFEQASESEPTTVSYEIAGNSPNAERGFHIFEFGDATNGCVSAGPHFNPFKKTHGAPTDEVRHVGDMGNVKTDENGVAKGSFKDSLIKLIGPTSVVGRSVVIHAGQDDLGKGDTEESLKTGNAGPRPACGVIGLTN

SEQ ID NO: 3282 - protein, 100 aa, Zea mays
MPLPEEEMPAAAEEQAAPAATVKVLFFARARDLTGVADSAVEVPPGSTAGECLARVLARFPKLEEIRGSVVLALNEEYAADSAAVADGDELAVIPPISGG

SEQ ID NO: 3283 - protein, 215 aa, Populus balsamifera subsp. trichocarpa
IVHRVTGSLIIDFEPVKPYEVPMTAAGALQSYKLAAKAITRLQSLPSGSMERLCDTMVQEVFELTGYDRAMAYKFHDDDHGEVVSEVTKPGMEPYLGLHYPATDIPQASRFLFMKNKVRMIVDCHAKHVKVLQDEKLPFDLTLCGSTLRAPHSCHLQYMENMNSIASLVMAVVVNDGDEDGDTPDSVNPQKRKRLWGLVVCHNTSPRFVPFPLRY

SEQ ID NO: 3284 - protein, 74 aa, Zea mays
  unsure (1)..(74): unsure at all Xaa locations
SNPRLMALIEEEKKRXMANELVAKLTFVCWDKCVTGSVGSSLSRSETSCLSNCAKRFAEVKMMALQRFTTTGRG

SEQ ID NO: 3285 - protein, 144 aa, Glycine max
  unsure (1)..(144): unsure at all Xaa locations
MASVVASLPPPLLLPARKSHMGNFPSSPVSLLSGRWNRVSFVVKASGESSESSTTLTVFKSVQNIWDQPEDRLGLIGLGFAAVAAFWASTNLIAAIDKLPLFPTVLELVGIFYSVWFTYRYLIFKPDREELFQIXKQSASDILG

SEQ ID NO: 3286 - protein, 182 aa, Triticum aestivum; identical to SEQ ID NO: 2063

SEQ ID NO: 3287 - protein, 124 aa, Vicia faba
  unsure (1)..(124): unsure at all Xaa locations
MASTKKITLKSSDGEAFEVDEAVALESQAIKHMIEDDCADSGIPLPNVTSKILAKVIEFCKKHVXAAASDDKPTEDELKAWDADFVKVDQVTLFDLILAANYLNIKNLLDLTCQTVADMIKGKT

SEQ ID NO: 3288 - protein, 309 aa, Oryza sativa (indica cultivar-group)
MGSFKGHVLPGTLFLAVGAWHVWAAAARFAADPRGFRLRAWNPVDVGGGGAPAWLPAHLELYVIAGGAFLHMCVEVLYSTHLHIFADGGINPAHLNDLEHGGMLLMFFLFGILALLSQKTRYLPLPEGALCLVASTAFMAELLLFYFHSTTHQGLEGYYHYLLVVVVALCVATTVLGALLPASFPVDIASGAAIALQGLWFYQTAFTLYGPSLPAGCRRDADGHIDCHTHAAQERAEQLANFQLFGLVFLVCAYALGCFAVAAARHGHPDLATMHAKHVAAMEAQLAGAGAGEGDRFVGSALPLEDTAI

SEQ ID NO: 3289 - protein, 744 aa, Saccharomyces cerevisiae
MAAPDYALTDLIESDPRFESLKTRLAGYTKGSDEYIEELYSQLPLTSYPRYKTFLKKQAVAISNPDNEAGFSSIYRSSLSSENLVSCVDKNLRTAYDHFMFSARRWPQRDCLGSRPIDKATGTWEETFRFESYSTVSKRCHNIGSGILSLVNTKRKRPLEANDFVVAILSHNNPEWILTDLACQAYSLTNTALYETLGPNTSEYILNLTEAPILIFAKSNMYHVLKMVPDMKFVNTLVCMDELTHDELRMLNESLLPVKCNSLNEKITFFSLEQVEQVGCFNKIPAIPPTPDSLYTISFTSGTTGLPKGVEMSHRNIASGIAFAFSTFRIPPDKRNQQLYDMCFLPLAHIFERMVIAYDLAIGFGIGFLHKPDPTVLVEDLKILKPYAVALVPRILTRFEAGIKNALDKSTVQRNVANTILDSKSARFTARGGPDKSIMNFLVYHRVLIDKIRDSLGLSNNSFIITGSAPISKDTLLFLRSALDIGIRQGYGLTETFAGVCLSEPFEKDVGSCGAIGISAECRLKSVPEMGYHADKDLKGELQIRGPQVFERYFKNPNETSKAVDQDGWFSTGDVAFIDGKGRISVIDRVKNFFKLAHGEYIAPEKIENIYLSSCPYITQIFVFGDPLKTFLVGIVGVDVDAAQPILAAKHPEVKTWTKEVLVENLNRNKKLRKEFLNKINKCTDGLQGFEKLHNIKVGLEPLTLEDDVVTPTFKIKRAKASKFFKDTLDQLYAEGSLVKTEKL

SEQ ID NO: 3290 - protein, 471 aa, Streptomyces collinus
MYSPRWPPGTPGRIRRRAVERTLADRLEAALARPAAQQPGWPDPDRVRAVVRRLTAGEPLVTPAETRRLLDRLGAVARGEALLLQSGDCAETFAESTEPHLRANLGLLRRMALVLTHAAGLPVVTVARAAGQYAKPRSAAVDAHGLPVYRGDIVNSAESSHTARTPDPERMVRAHHHAREAMTVVRRLAHGDLADAHALHEENHRFVSTAPGGRRHRARAAEIGRGLRFMTGVGAPAPRLGEIWTSHKALLLDYKRTLLWADPDGPEPRLSSGLAHFLWIGERTRHPDGAHIAFAELLANPVGVKIGPNTTPEQALDYLRRLDPHGEPGRVTLISRMGHNRVREVLPPIVEKVTASGRQVIWSCDPMHGNSRTTAAGYKTRCYDHILDKITGFLEVHRALGTHPGGLHLEATGEDVTECTGGARGLTEDNLPARYRTACDPRLNAEQSMELAFTVAESYATWATRSTEAPR

SEQ ID NO: 3291 - protein, 560 aa, Coxiella burnetii RSA 493
MNNVHAYKRRIGPIGLMMSAVSAMIGSGWLFSSLYVGRLAGPASILAWIFGGILVMIVALTYAEIVTMLPITGGSTRFPQLTHGTFVSLFFGWITWFTLMTAPAIEVQAMIQYAANYWPTLIRHHGAGMHGLSPLGYLIATLMMIGFSLINIYSIRLITRLNNIFSFWKLIIPVLTAIVLMVVAFHPNNFNNPHYGGFMPNGWKGVFAALATGGILFAFNGFKQAVELAGEAENPNRTVIIGILGSLIIVLIIYLLLEIGFIGALSPESLSKGWFFVHFIGDAGPLAGLLMTFGVTWMAILLYIDAMIATSAAGLVYSTSSSRTLYGLSANRQLPKFLQEVNERGIPAKAVFVNFIVGMTFFLPFHGWYAMAEFMSSIIALSYITGPICCLSLRYQLPEHKRVFRLPLITVWSFFGFYICTLIVYWAGWSVVSKLGLSLFISFMLFVVYRLFSKRPRGIHMNWRAATWMWPYLVGLNVISYLGSYGGGINKIHFGWDFLYLAILCFCCLYLAVTFRASDKHVAETLVRFEEEVKTGIPSTVPDEEFENPSLVRKEVSYID

SEQ ID NO: 3292 - protein, 328 aa, Glycine max
MGGWAIAVHGGAGVDPNLPPERQEQAKQLLTRVLNLGISALRSDASALDVVELVVRELETDPLFNSGRGAALTEKGTAELEASIMDGSNRRCGAVSGVTTVKNPISLARLVMENSPHSYLAFNGAEDFARQQGVEIVENEYFITPENVGMLKLAKEANAILFDYRVPLHNGYESCGVEVENPLQMNGLPISVYAPETVGCVVVDSEGRCAAATSTGGLMNKKCGRIGDSPLIGAGTYACKVCGVSCTGEGEAIIRGTLAREVAAVMEYKGLGLEEAVEYVMEHRLDGGKAGLIAVSSSGEVAYGFNSNAMFRACATQDGFMESWNNGK

SEQ ID NO: 3293 - protein, 253 aa, Oryza sativa
  unsure (1)..(253): unsure at all Xaa locations
XSDRAEVITDDGAVPRRDDDPVAAETERIKAILLNDQEKSEATLLELLRRLQQLELTVDTLTVTEIGKAVSSYRKHNSKQIRHLVRLLIEGWKRIVDEWMSSRDAIDERGLSSPSMDEGALFATPSTSIRLSEENQGSKFFDGMDDDGNTRSNGGRDNGRLYTRNQEPARRPLPPMAQQYDPDQSWKQEQSAXEAVETTGTEQWXRRESNSSRRCLQGPQTQSPAEEXQQLQQQPELVKMRHQFHHPAPRDHX

SEQ ID NO: 3294 - protein, 1139 aa, Triticum aestivum
MSSSRSNNRPACSRGSSARSKHSERVVAQTPVDARLHAEFEGSQRHFDYSSSVSALNRSGASTSSAVSAYIQNMQRGRYIQPFGCLLAIHPESFALLAYSENAAEILDLTPHAVPTIDQRDALAVGADVRTLFRSQSAVALHKAAVFGEVNLLNPILVHARTSGKPFYAILHRIDVGLVIDLEPVNPADVPVTAAGALKSYKLAAKAISRLQSLPSGNLSLLCDVLVREVSELTGYDRVMAYKFHEDEHGEVIAECRRSDLEPYLGLHYPATDIPQASRFLFMKNKVRMICDCAASPVKLIQDDNLSQPISLCGSTMRAPHGCHAQYMANMGSIASLVMSITINEDDDEDGDTGSDQQPKGRKLWGLVVCHHTSPRFVPFPLRYACEFLLQVFGIQLNKEVELASQAKERHILRTQTLLCDMLLRDAPVGIFTQSPNVMDLVKCDGAALCYQNQIMVLGSTPSEGEIKKIVAWLLECHDGSTGLSTGLTLEAGYPGASALGEVVCGMAAIKISSKGFIFWFRSHTAKEIKWGGAKHEPGDADDNGRRMHPRSSFRAFLEVVKWRSVPWEDVEMDAIHSLQLILRGSLQDEDANDNNARSIVEAPSDDIKKIQGLLELKIVTNEMVRLIETATAPILAVDIVGNINGWNNKVAEITGLPTTEAIGMLLVDLVEGDSVEVVKQMLNSALQGTEEQNLEIKLKTMHQQESKGPVVLMVNACCSRDLSDKVVGVCFVAQDLTGHKMVMDKYTRIQGDYVAIVKNPNELIPPIFMINDLGSCLEWNEAMQKITGIKREDAIDKLVIGELFTLHDYGCRVKDQVTLTKLSILMNTVISGQEPEKLAFGFFNTDGKYMESLLTANKRTDAEGKITGALCFLHVASPELQHALQVQKMSEQAATHSFKELTYIRQELKNPLNGMQFTRKLLEPSDLTEEQRQLFASNVLCQEQLKKILHDNDLEGIEQCYMEMNTVEFNLEEALNTVLMQGMSVSKEKQISLDRDWPVEVSSMYLYGDNLRLQQVLADYLACTLQFTRPAEGPIVLQVIPKKEHIGSGMQIAHLEFRLVHPAPGVPEALIQEMFRHGPGVSREGLGLHISQKLVKTMSGTVQYLREAESSSFIVLVEFPVAQLNSKRSRPSTSKSNF

SEQ ID NO: 3295 - protein, 355 aa, Pisum sativum
MADQDNSTRRPQREAKKRAVAALCEQRKRKRVALGDITNDVVSETEKLVSDSHSHTQKKKKRNIAKSPVPEKLEDPQLCEPYVSDIHDYLRNLEVDPSKRPLPDYIQKVQRDINANMRGVLVDWLVEVAEEYKLVADTLYFSVSYIDRFLSLNDLSRQKLQLLGVSSMLIASKYEEIKPPEVEDFCYITDNTYSKEEVLSMEAEILKTLKFELGGPTIKTFLRRFITKVGQEGVDASELQFEFLCCYLAELSLLDYNCVKFLPSMVAASVVFLARFMLNPKSRPWNSAICQFTSYKPADLKECVLNMHDLYLGRKGATLQAVRDKYKQHKFKCVATTPSPPEISLSFFEFRGADP

SEQ ID NO: 3296 - protein, 346 aa, Saccharomyces cerevisiae
MAEASIEKTQILQKYLELDQRGRIIAEYVWIDGTGNLRSKGRTLGHDSDIYLKPVAYYPDPFRRGDNIVVLAACYNNDGTPNKFNHRHEAAKLFAAHKDEEIWFGLEQEYTLFDMYDDVYGWPKGGYPAPQGPYYCGVGAGKVYARDMIEAHYRACLYAGLEISGINAEVMPSQWEFQVGPCTGIDMGDQLWMARYFLHRVAEEFGIKISFHPKPLKGDWNGAGCHTNVSTKEMRQPGGMKYIEQAIEKLSKRHAEHIKLYGSDNDMRLTGRHETASMTAFSSGVANRGSSIRIPRSVAKEGYGYFEDRRPASNIDPYLVTGIMCETVCGAIDNADMTKEFERESS

SEQ ID NO: 3297 - protein, 371 aa, Glycine max
MALGDDAQHHSPSFLDALLCEERETFEEDFDENGYERETENNEPSVIKSQSLPLVLHDNDLFWEDEELVSLIAKEGETHLCFHGVVANGALEGPRVEAVNWISKVCGHYGFSALTTVLAVNYFDRFITSLKFQNDKPWMTQLTAVACLSLAVKTEETHVPLLLDLQVEESRFVFEAKTIQRMELLVLSTLKWRMHPVTPISFFEHIVRRLGLKSRLHWEFLWRCERVLLNVIADSRVMSYLPSTLAAATMIRVIKEIESFNATEYIDQLLGLLKISEEQVNQCYKIIQKLLGCYEGIYSLHQKRKRLSEPGSPGAVTDASFSCDSSNDSWTVSSSVSLSLEPLLKRRKSQDQQMRLPSVNCVSIDVLNSPR

SEQ ID NO: 3298 - protein, 188 aa, Anomochloa marantoidea
VIHVGCLAKINPEAPLDKVCITSCGVSTGLGATLNVAKPKKGSTVAIFGLGAVGLAAVEGARLAGASRIIGVDLNPAKFGQAKKFGCTDFVNPKDYNKPVQEVLIAMTNGGVDRSVECTGHIDAMISAFECVHDGWGVAVLVGVPHKEALFKTHPMNFLNEKTLKGTFFGNYKPRSDLPNVVEMYMKK

SEQ ID NO: 3299 - protein, 782 aa, Nostoc punctiforme
MIDEQEIEKLWQAFKVLDVDGNGAISTDELGEVMRSLGQNPTETGLRDLIKEIDVDLSGTIDFDEFKTLMIAKVGDRESRLKLAFSAFDEDNSGQITAVELRTVMSQFGLTDAELKEMLQEVDHDGDGSIDFEEFCQLVLEESESKTGYKDSPISLESSLKTVATNNTPVADTTQPTLQEATSNTTPELAQLREQLVQHPNSPNQKRSGTSRLQMQIGLFRLIQGAAYRSFRESFSANHETHLRVKNLPYRITDFVEFVKQAIALYKGLGVVEEACYPVLDAVVESIADEYARLQERIKDWKTVAKTPEMLAEEKKILEARSKFANVKEKFAAGVEFAITIKKKSLSLGDIVEGVLAINELNRLRGIEMNEEMAPPPPKSEGNPRDYLFKWNRVILSQATEEVDGAMMPVAYWYEDFMPKLLAAFSVSTAADIQSNTIPDEAALDEWYDLTKKSGEFNRYGADVAENFLNCTAKEKLILKQAWRLTHHYLNGVQKRRERLEFGRESGALSQYVSFIDVYLNRTEVKDSQMRVSFPYYIGPAVWRFFHTTAEIVCTKTDIQQKTLMAIFKDFFQLFATMYPCPYCRHHLNMYVVQNKEVDMYPVEYLVLGRDPNLRDFEVSLEAKLSTVVDGSSLRLFFWKLHNTVSSSIARSEEWYHKDEKAFYTTRFWPSLDSELARANALRYTSIETARIYNIYGMLKPLARLTGVKTELPKLLQKGDENSLKEACIVAQNHIADLEEAVIRGEFLQETYYFDPDVVDKAPLFTPEEEEFARTGMFIEAA

SEQ ID NO: 3300 - protein, 338 aa, Glycine max
  unsure (1)..(338): unsure at all Xaa locations
DVHTRIMKRNYEQVPEWWFVSILLLMIVVALITCEGFGKQLQLPWWGVLMSLVIALVFTLPIGVIQATTNMQVGLNVITELIXGYIYPGRPLANVAFKTYGYISMSQALGFLQDFKLGHYMKIPPKSMFAVQLVGTIVASGVYLGTAWWLLTTIPDICDDANLPAGSPWTCPGDEVFYNASIIWGIVGPQRMFTKDGIYPGMNWFFLIGLLAPVPVWMLSRKFPNHKWIELINMPLIIAGSGGIPPARSVNYITWGMVGILFNFYVYNKFKAWWARHNYILSAALDAGVAFMGVILYFALQYYDIFGPTWWGQDADDHCPLAKCPTAPGIISHGCPVL

SEQ ID NO: 3301 - protein, 501 aa, Staphylococcus aureus subsp. aureus MW2
MNFDWIKTRSDFDDDKPAVIDHAKQTSWTYQQLNARADNMAHYLTSQGVKKGDVIGIFAPNDIAILDLLFACFKTGAVFLPLNWRLNPKEIAAIVEDAQLKLLFYAEKHLSSLTDIDQNLLHMDIDVAQYDEIVNPDYHQPFQATPVEPQDLAALIYTSGTTGSPKGVMFSYESFVHNGANLELTYKFNSNYITIVSTPMFHVLGFNDTVLPVLMSGGTLILQRYFNGEELNDMIAQYHPTFIIMIPTMYYSTLRASNFNPENFKAMDYIIQGGSQPLPSIQAAFKQYGINIINGYGLTEAPLVLVNTPENSKRKPMSIGKAVMFVDARILDDNGEEVPTGEIGELAIKAKNVTPGYWNKPAETAKAFHGRYLLTGDLAKMDDDGDIFIIDRKKELIITGGENVLPSEVENALAEHPLVDRCVVVGYDHPKYGESIAAAIILREDEPHYAEILDQHMRSRLAGYKVPRMYVPVTHMPLNSTQKPDKLAIRQMMNDKVSQTL

SEQ ID NO: 3302 - protein, 847 aa, Brassica rapa
MKGAQSTCHHSYTLSLLLVSILLFHHPTVSVDVNTLSSTESLTISSNRTLVSPGGVFELGFFKPSALQRWYLRIWYRKVFDQKTYAWVANRDNPLSNSIGTLKISGNNLVLLGHSVLWSSNLTRGNVSSPVVAELLPNGNFVMRYSNKSGFLWQSFDFPTDTLLPGMKLGYHRKTGRSRFLTSWRSSDDPSSGYFTYELDTRRGLPEFFVMYNDIELYRGGPWNGIDFSGISKPKDQELYYNYTDNSEEVTYTFLSANQSIYSRFTIVYYGSLYLSTWIPPSSGWRDFDALPTAECDYYNICGPNAYCKLNNTCHCLEGFDPMNPRQWSARERSEGCVRRTPLSCSGNRFLLLKKTKLPDTKMASFDRRINLKKCEERCLRDCTCTSFAAADVRNGGTGCVMWTRQLNDTRTYSIGGQDLYVKLAAADTVFSSDEERDRNGKKIGWSVGVSLMLILSVIVFCFWKRRQKQAKPAATPIVQNQGLMIGVVLPRQIPSRRNLSEENAVEDLELPLMEFEAVLTATEHFSNCNKVGEGGFGAVYKGRLLDGQEIAVKRLSEMSAQGTNEFMNEVRLIARLQHINLVRLLGCCVDEGEKILIYEYLENLSLDSHLFGLTRSSMLNWQMRFDIINGIARGILYLHRDSSIRIIHRDLKASNILLDKDMTPKISDFGMARIFGRDETEANTRKVVGTYGYMSPEYAMEGIFSMKSDVFSFGVLLLEIISGKRNKGFNNLGRDNNLLDCVWRNWKEGQGLEIVDTVIIDSSSPTFRPRDIQRCLQIGLLCVQARPDDRPIMSAVVFMLESEAADIPQPKPPGYCVIGNYSTWSKQRDRESCTVNQITMSIIDAR

SEQ ID NO: 3303 - protein, 192 aa, Triticum aestivum
APATAPPPGSAEPAGAPPAVTPGKEFTRTCKGLVVVLIGGYVLLQLLPSSLNYLAIIPSKTIPYVWTVFTAGYIEQVLPGAIGSSLGLLFCGKDIEPAWGRKEFLKFIILINSICGILAFCFAIGLYYVTGKESFLVTPLSGFHGCLAGFLVALKQLLPNLELPMCFFWKIKAKWMPFFVVCFSSIMAFIVP

SEQ ID NO: 3304 - protein, 489 aa, Oryza sativa
  unsure (1)..(489): unsure at all Xaa locations
MAGRKENPVLTACQAPSGRITRAQAAAMDGLGLLPPYHYXARTERKQTAKGKTKRGALDEITSASTATSAPQPKRRTVLKDVTNIGCANSSKNCTTTSKLQVQKSKPTQRVKQIPSKKQCAKKVPKLPPPAVAGTSFVIDSKSSEETQKVELLAKAEEPTNLFENEGLLSLQNIERNRDSNCHEAFFEARNAMDKHELADSKPGDSSGLGFIDIDNDNGNPQMCASYASEIYTNLMASELIRRPRSNYMEALQRDITKGMRGILIDWLVEVSEEYKLVPDTLYLTINLIDRFLSQHYIERQKLQLLGITSMLIASKYEEICAPRVEEFCFITDNTYTKAEVLKMEGLVLNDMGFHLSVPTTKTFLRXFCQIFKLYFQVPSITLGYLANYLAELTLIDYSFLKFLPSVVAASAVFLARWTLDQSDIPWNHTLEHYTSYKSSDIQICVCALRELQHNTSNCPLNAIREKYRQQKFECVANLTSPELGQSLF

SEQ ID NO: 3305 - protein, 226 aa, Zea mays
  unsure (1)..(226): unsure at all Xaa locations
MAAQPALKASFRGELNAVSFLDSSRGPFGQHKVDFTFQRKGKRAISLRRTCCSMQQAPPPAWPGRAVAEPGRRSLDGPKPISIVGSTGSIGTQTLDIVAENPDKFRVVALSAGSNVTLLADQVKTFKPKLVAVRNETLVDELKEALADCEEKPEIIPGEQGVIEVARHPDAITVVTGNSKGVQGLKPTIAAIEAGKDIALANKRTLLQXGPFVLPLHTTQVKIFLL

SEQ ID NO: 3306 - protein, 155 aa, Zea mays
FWFVGEREEMAASDVEYRCFVGGLAWATDDHSLNNAFSTYGEVLESKIILDRETQRSRGFGFVTFSTEDAMRSAIEGMNGKELDGRNITVNEAQSRGGRGGGGGGYGGGRRDGGGYGGGGGGYGGGRGGYGGGGGGYGGGNRGGGYGNNDGNWRN

SEQ ID NO: 3307 - protein, 369 aa, Nostoc sp. PCC 7120; identical to SEQ ID NO: 2879

SEQ ID NO: 3308 - protein, 426 aa, Azotobacter vinelandii
MSRTNESLMQRRIAAVPRGVGQIHPIFAEHARNCSVVDVEGREYIDFAGGIAVLNTGHLHPKVVEAVQRQLHKLSHTCFQVLAYEPYVELCEKLNARVPGDFAKKTLLVSTGSEAVENAVKIARAATGRTGVIAFTSAYHGRTLMTLALTGKKVPYAAGMGLLPGGVFRARYPSALHGIDVAEALASVERVFKNDAEPRDIAAILVEPVQGEGGFNVAPPEFMRGLRAICDRHGILLIADEVQTGAGRTGTFFAMEQMGVAADLTAFAKSIAGGFPLAGVCGRAEPMDAIAPGGLGGTYAGSPLACAAALAVLEVFEEERLLERARDIGARLSEGLRAIQGRHPSIVEVRGLGAMVAMELCEGGDPHKPATALTGQLVVRARDKGLILLSCGAYGNVLRFLMPLTVPDELLERGLAILAECFDELA

SEQ ID NO: 3309 - protein, 123 aa, Dianthus caryophyllus
MITIHHPWVFAFGLLGNFISFMVFLAPLPTFIRVYKKKSTEGFQSFPYVVAIFSAMLWIYYALLKGNSLLLITVNVTGVIIETIYVIIFITYAPRQARISTMKLLLFMNFGGFCMIVPRPRPR

SEQ ID NO: 3310 - protein, 244 aa, Oryza sativa
  unsure (1)..(244): unsure at all Xaa locations
NAAATSILLRVGHTLRLQAFTPSAWPFLYSPPSPRXSRLVSVSRPTASIVRPRLHATVSQPPASSSGDRSAAARSSMAAAPSATSVHDFTVKDASGKDVNLSTYKGKVLLIVNVASQCGLTNSNYTELSQLYEKYKVQGFEILAFPCNQFGGQEPGSNEEIVQFACTRFKAEYPIFDKVDVNGNNAAPLYKYLKSNKGGLFGDSIKWNFSKFLVDKEGRVVDRYAPTTSPLSIEKDIKKLLGSS

SEQ ID NO: 3311 - protein, 283 aa, Glycine max
  unsure (1)..(283): unsure at all Xaa locations
MATLFQGLGVVNPSLSSSNSNNFLLPSRTSLSERKDGIFVVRSDARVSSKVLKAGARKHELLVTNAVATKEGSSAASTSKSGHELLLFEALREGLEEEMERDPCVCVMGEDVGHYGGSYKVTKGLATKFGDLRVLDTPIAENXSFTGMVIGAAMTGLRPVVEGMNMGFLLLAFNQISNNCGMLHYTSGGQFKIPIVIRGPGGVGRQLGAEHSQRLESYFQSIPGIQDVACSTPYNAKGLMKAAFRSENPVILLSHFCFINLRGRFQNLKMFCHPQKPEMLSPA

SEQ ID NO: 3312 - protein, 372 aa, Hordeum vulgare
MTVDRKGAQAAAAAAATSAPFEIPALQPGRKKRPRRSRDGPNSVSETIKRWKEVNQQLEHDPQGAKRARKPPAKGSKKGCMQGKGGPENTQCGFRGVRQRTWGKWVAEIREPNRVSRLWLGTFPTAEVAAQAYDEAARAMYGPLARTNFPVQDAQAAPAVAVPVATEGVVRGSSASCESTTTSNHSDVASSSHNKQRQIQAPEISSRSDLLESTQSVEYSQQQSVPDAVSSIAMSTSEEDVYEPLEPISNLPDGEADCFDIEELLKLMEADPVEVDPVTVGSWNEFQDAGANARGSWNEFQCARANTGVSWNANAGMEMGQQEPLYLDGLDQGMLEGMLHSDYPFPVWISEDRPMHNPAFHDAEMSEFFEGL

SEQ ID NO: 3313 - protein, 458 aa, Pseudomonas syringae pv. tomato str. DC3000
MTSQDGLKRGLSARHIRFMALGSAIGTGLFYGSASAIQQAGPAVLLAYLIGGAAVYMVMRALGEMAVHDPVSGSFSHYATRYMGPLAGFVLGWTYAFEMIIVCLADVTAFGIYMGFWFPEVPRWIWVLGIVFLIGALNLCNVKVFGETEFWLSILKVSAIVAMIVAGFGIMIFGIGSSTSGTEIGISNLWAHGGFMPNGVTGLIASFAVVMFAFGGIEIIGITAGEAKDPQRSLPQAINAVPLRILLFYVLTLFVLMCIYPWPQIGTQGSPFVQIFDNLGIASAATILNIVVISAAVSAINSDIFGAGRMMYGLARDGQAPASFARLSRQGVPWMTVLVMGVTLLGGVLLNYLIPKDVFLLIASLATFATVWVWLMILLTQVAMRRSMSREEVTQLKFAVPFWPYGPAAAIAFMLFIFGVLGYFPDNRAALIVGAIWIALLLIAYGLWVKPKALNKTH

SEQ ID NO: 3314 - protein, 589 aa, Candida albicans
MTRTTRIDTQEATKHKDLPPVPSPLSLSSNPNPECLMESKSLGRKNFKKLSLDASPVKSTSGSLRSSDMMLIKEPTSLRQKRTRPPPILHLPTASSSATSTPTSNITGSSSASSIQFAQKSPGSGVIVSQTLSRPSSAGGIPSSGYSSLNVNQSNRNVDPDNVVSTDMILNQISNLDLTSMNHHRQHYQNSHHHLPTTNRKRQTVISSISPTKSSAASSPLEPQIQLLPASSQSPIATTSSLKLNNKDLLTLKQLGSGNSGSVLKILHIPTQKTMAKKIIHIDLKSVIQTQIIRELRILHECHSPYIIEFYGACLNNNNTIVICMEYCNCGSLDKILPLCENKQFPTFVLKKLSFAILSGLTYLYTTHKIIHRDIKPNNVLMTHKGEFKLCDFGVSRELTNSLAMADTFVGTSMYMSPERIQGLDYGVKSDVWSTGLMLIELASGVPVWSEDDNNNDDDEDDEDDAYVRQGSIAAERNGQNSPSRSRKNKQKGNGYNSYNGPEGILDLLQRIVNEDAPTLTNKINPVTKLPYDKYLCQFIDLCLIKDDSVRKTPWQLLEDKEHFFKGVEEGVYDKEHKSWAKKIRKCKV

SEQ ID NO: 3315 - protein, 93 aa, Zea mays
MAASKVKQDMPPPGGYGPIDYKRNLPRRGLSGYSMFALGIGALILGYWRIMRWNRERRRLLIEDLEARIALMPLLQAEKDRRTLQILRENLEE

SEQ ID NO: 3316 - protein, 189 aa, Glycine max
  unsure (1)..(189): unsure at all Xaa locations
MEEEEEGLAMLITHLHHFSHSLSPLFFTLHPPLLSHQLPRLSFFDIDDYSLDDFCGLVMAAGKSGSSRMLEPLKHPSKKSRRDRSLGKSSGRSSRDEAMEQQIWKKLPEDLFEPVIARLPIATFFCFRSVCQRWNSLLTSQSFSQHCAQVPQANPWFYTVTHEHANSGAMYDPSMKEGDIPLYQHCPQX

SEQ ID NO: 3317 - protein, 357 aa, Sinorhizobium meliloti
MPKMKAAIFVAPGRIVLDEKQIPDVGPLDALMRITTTTICGTDVHILRGEYPVARGLTIGHEPVGVIEKLGSAVRGYSEGQRVIAGAICTSGHSNAALCGCHAQDGPGTKHGWKGMGGWKFGNTIDGSQAEYVLVPDAMANLAPVPDGLADEQVLMCPDIMSTGFSGAESGAVRVGDAVAVFAQGPIGLCATAGARLIGATTIIAVESVPARMEMARRMGADDVVDFTVSDPTAEIMRLTDGRGVDVAIEALGRQETFEGALRVLRPGGTLSSLGVYSGDLRIPLDGFLAGLGDHTIRTTLCPGGKERMRRLMEVIASGRVDTRPLVTHRFKLDQIEEAYDLFANQRDGVLKVAINP

SEQ ID NO: 3318 - protein, 263 aa, Glycine max
  unsure (1)..(263): unsure at all Xaa locations
KTDNSILYRRLVLLSAXRNQIRKLALSLGLAQQMPDMIEELISKGQQLDAVHFTYEVGLVEKFPPVPLLKSFLKDAKKVAASILEDPNNAGRAAYLAARKEQSALRAVIKCIEEYKLEDEFPPENLKKRLDQLEKVKMVKTEKRKPVAVPANKRTRASNGNGGPMPPAKAGRLIKGYVSSFPAAPPFVRSPSHGQYPVVXHPYPSPPHMYGSRSPPANPYAAYSPEPAPAIAGSYPAAPMNYPHAYGGYGNVLAPPYQQAFYR

SEQ ID NO: 3319 - protein, 244 aa, Triticum aestivum
  unsure (1)..(244): unsure at all Xaa locations
PPPPPSLPPSPQPPAPHSPAEIPRSGAIPAPGAFALAGCLLPGAACCSAEAVWPHMPQTATKCGSGEIAAKRGXHSPTVLFCECAPTSHSPPISDTITSVKWTSPYRYALHENLDVSDAQSANITSESGNFLACFWIDSAEKGSGVSVNLEWKTRIGTKDWDAIAKKEKIEGVELELRKLEVAVQSIHHNMVYLKAREAEMRXVSEKTNGRVAWFSIMSLGVCVVVSVLQLWHLQGYFRKKKLI

SEQ ID NO: 3320 - protein, 191 aa, Triticum aestivum
TRFDFLVKRLPGTPSARLCDLQPGDLVPVGGSVVGRGFEVTRIADARDVLVFATGSGISPIRSLIESGFGENEKIDVSLFYGVRNLQRMAYQERFSDWESRGIKIIPVLSRPDEQWTGQRGYVQNAFSRAKKVINPSSTGAILCGHKQMTEEITRALVADGMPKDQILTNFLSSTPFLPFLAVHLLYHPQI

SEQ ID NO: 3321 - protein, 322 aa, Streptomyces viridochromogenes
MSMFPGFSAGTRLLVTGGAGFIGSHVVDAFLEAGAEVTVLDDLTTGDPERLDPRAVIRRVDVTDAAALDEAVRSARPDVICHLAAQIDVRVSVATPAVDARVNVEGTINVLEAAHAVGARVVFASTGGALYGEGVPVPTNEDTLPRPGAPYGTAKYCAEKYIGLFNRLHGTEHSVLRLGNVYGPRQSPGGEAGVIAIYCGLASEGGVPTVFGDGSQTRDYVYVGDVAAAFVAPYGTVGPASGTSDTGKGSTVLEVLDHIAAASGRDLPPRFAPRRPGEIQHSTLDVTRVAADLGWTASVPLEKGIAATYAWVRSGSPVRQQA

SEQ ID NO: 3322 - protein, 173 aa, Helicobacter pylori
MNLEKLEISHDANALCVVIEISKYSNIKYELDKESGALMVDRVLYGAQNYPANYGFVPNTLGSDGDPVDALVLSDVAFQAGSVVKARLVGVLNMEDESGMDEKLLALPIDKIDPTHSYVKDIDDLSKHTLDKIKHFFETYKDLEPNKWVKVKGFENKESAIKVLEKAIKAYQG

SEQ ID NO: 3323 - protein, 362 aa, Buchnera aphidicola str. Sg (Schizaphis graminum)
MGFKCGIIGLPNVGKSTLFNVLTKGNSAVANFPFCTIKPNIGIVSVPDNRINNLSKIILPKKITNAFIEFVDIAGLVKGASKGEGLGNQFLSNIRDTHAIAHVVRCFKDDNVSHIYNQLQPKIDVDIINSELILADFETCEKSILKLQKKLNFNKKEIEEKLVVLSKCLDHLKKFLMLKTLELDENEKKIISYLRFLTLKPTMYIANINEQKESCFFLNELEKMAKKEGSSVIPINSNLELDLIKMNEDEQKYFMKSFNITNLGLNNIIKSGYKILNLITFFTAGIKEVRAWAIPNGSTSLQAADKIHSDFRRGFIRAQIINYLDFIKYKSETKVKEAGKYRSEGKFYQIQDGDIINFLFNV

SEQ ID NO: 3324 - protein, 468 aa, Methanosarcina mazei Goe1
MSEHNEAANLVKTLRPFHIWALGVGIVLVGEYMGWNFTVAKGGILGSLLAMLVAGTMYVIIALCASELGSATKLAGGPYDWARLFVGPGAAASVGLAVYMEYIALEAADAIVVAFIAQSIFPELQVFPVTLLVIALLTFINYRGVVAALTLNFVLTMIAFIAIVVFFFATAFGGVNIHPEYLFQGALPNGMIGLFAALQFGPWFYLGIEGAAMCAEECKHPSRAVPLGQQAGMITLLVGAAMTLYLCSVLIPTDLLGVSVYPLFEAAQNSGIFIFIALLGLGTFLTCVASANGCVCDSSRSWFALSRDKYVSSWFSAVHPRYNTPYRAVIFTMPVAIGFAFSGFLDQVITFSIVSGLLCYVLIPFSLIRFRNLFPQTTSKVRPFAGPLQPYIAYFAIAIAITILSTLFWGYKYNLIFAFVFYGIAYFYFSHRHKNSNIENNWAEMGWPLPNGSENGRIGKEAVGFGDE

SEQ ID NO: 3325 - protein, 859 aa, Brassica rapa
MKGVHNIYHHSYTFSFLLVFLALILFHPALSTYVNTMSSSESLTISSNRTLVSPGGVFELGFFKPSGRSRWYLGIWYKKVSQKTYAWVANRDNPLSNSIGTLKISGNNLVLLGQSNNTVWSTNLTRENVRSPVIAELLPNGNFVMRYSNNKDSSGFLWQSFDFPTDTLLPEMKLGYDFKTGRNRFLTSWRSYDDPSSGKFTYELDIQTGLPEFILINRFLNQRVVMQRSGPWNGIEFSGIPEVQGLNYMVYNYTENSEEIAYSFQMTNQSIYSRLTVSDYTLNRFTRIPPSWGWSLFWSLPTDVCDSLYFCGSYSYCDLNTSPYCNCIRGFVPKNRQRWDLRDGSHGCVRTTQMSCSGDGFLRLNNMNLPDTKTASVDRTIDVKKCEEKCLSDCNCTSFATADVRNGGLGCVFWTGDLVEIRKQAVVGQDLYVRLNAADLDFSSGEKRDRTGTIIGWSIGVSVMLILSVIVFCFWRRRQKQAKADATPIVGNQVLMNEVVLPRKKIHFSGEDEVENLELSLMEFEAVVTATEHFSDFNKVGKGGFGVVYKGRLVDGQEIAVKRLSEMSAQGTDEFMNEVRLIAKLQHNNLVRLLGCCVYEGEKILIYEYLENLSLDSHLFDETRSCMLNWQMRFDIINGIARGLLYLHQDSRFRIIHRDLKASNVLLDKDMTPKISDFGMARIFGQDETEADTRKVVGTYGYMSPEYAMNGTFSMKSDVFSFGVLLLEIISGKRNKGFCDSDSNLNLLGCVWRNWKEGQGLEIVDRVIIDSSSPTFRPREILRCLQIGLLCVQERVEDRPMMSSVVLMLGSETALIPQPKQPGYCVSQSSLETYSSWSKLRDDENWTVNQITMSIIDAR

SEQ ID NO: 3326 - protein, 152 aa, Nicotiana plumbaginifolia
MVKAVAVLSSSEGVSGTIFFTQDGDAPTTVTGNVSGLKPGLHGFHVHALGDTTNGCMSTGPHYNPAGKEHGAPEDEVRHAGDLGNITVGEDGTASFTLTDKQIPLAGPQSIIGRAVVVHADPDDLGKGGHELSKTTGNAGGRVACGIIGLQG

SEQ ID NO: 3327 - protein, 100 aa, Zea mays
  unsure (1)..(100): unsure at all Xaa locations
SDDLLLDQSALRQQVKKGGGGEGGGGGSVSGSGGGNLNPWECSPKCXSRCSKTQYRKACLTLCNKCCAKCLCVPPGFYGNKGACPCYNNWKTKEGGPKCP

SEQ ID NO: 3328 - protein, 1129 aa, Solanum tuberosum
MASGSRTKHSHHSSSQAQSSGTSNVNYKDSISKAIAQYTADARLHAVFEQSGESGKFFDYSQSVKTTTQSVPERQITAYLTKIQRGGHIQPFGCMIAVDEASFRVIAYSENACEMLSLTPQSVPSLEKCEILTIGTDVRTLFTPSSSVLLERAFGAREITLLNPIWIHSKNSGKPFYAILHRVDVGIVIDLEPARTEDPALSIAGAVQSQKLRSEGLFLICNHFLVGTLKLLCDTVVESVRELTGYDRVMVYKFHEDEHGEVVAESKRSDLEPYIGLHYPATDIPQASRFLFKQNRVRMIVDCHATPVRVTQDESLMQPLCLVGSTLRAPHGCHAQYMANMGSIASLTLAVIINGNDEEAVGGGRNSMRLWGLVVGHHTSVRSIPFPLRYACEFLMQAFGLQLNMELQLASQLSEKHVLRTQTLLCDMLLRDSPPGIVTQSPSIMDLVKCDGAALYYQGKYYPLGVTPTEAQIKDIVEWLLAYHGDSTGLSTDSLPDAGYPGAASLGDAVCGMAVAYITSKDFLFWFRSHTAKEIKWGGAKHHPEDKDDGQRMHPRSSFKAFLEVVKSRSSPWENAEMDAIHSLQLILRDSFKDAEASNSKAIVHAHLGEMELQGIDELSSVAREMVRLIETATAPIFAVDVEGRINGWNAKVAELTGVSVEEAMGKSLVHDLVYKESQETAEKLLYNALRGEEDKNVEIKLRTFGAEQLEKAVFVVVNACARDYTNNIVGVCFVGQDVTGEKVVMDKFINIQGDYKAIVHSPNPLIPPIFASDENTCCSEWNTAMEKLTGWSRGEIVGKMLVGEIFGSCCRLKGPDAMTKFMIVLHNAIGGQDTDKFPFSFFDRNGKYVQALLTRNKRVNMEGDTIGAFCFIQIASPELQQALRVQRQQEKKCYSQMKELAYICQEIKSPLNGIRFTNSLLEATNLTENQKQYLETSAACERQMSKIIRDIDLENIEDGSLTLEKEDFFLGSVIDAVVSQVMLLLREKGVQLIRDIPEEIKTLTVHGDQVRIQQVLADFLLNMVRYAPSPDGWVEIQLRPSMMPISDGVTVVHIELGLYAPGRLPPELVQDMFHSSRWVTQEGLGLSMCRKMLKLMNGEIQYIRESERCYFLIILDLPMTRKGPKSVG

SEQ ID NO: 3329 - protein, 491 aa, Pseudomonas aeruginosa PAO1
MHNESRPEAPLRVLVVGAGFAGLGLAIRLRQAGIDDYLVLEKAADVGGCWRENRYPGAACDVPSHLYSFSFEPKADWSRKFAPQAEILDYLRHCADKYRLREKIRFHCEVEEARFDAGSGEWQVRCADGQTLRARALVCATGQLSRPLLPRLPGLERFQGPAFHSANWDAEVELAGKRVAVIGTGASAIQFVPRIAPQVQRLSLFQRSAPYVIAKPDRTYADWERRLKARWPWLQRLDRGLKYLHHESRMLAFATFPALMKVMRLSFHRHLHRQIADPQLRARLVPDYPLGCKRILISNDYYPALARSNVELVDTGIREVTEDAVVGRDGRRHEVDAIIFGTGFAATEFLAPMRILGLDGRDLRQAWADGAEAYKGISVSGFPNLFILYGPNTNLGHNSIVYMLESQFPYVLGCLRQLQEQGLRYLDVKPEVQRRFNLEVQQGLRHTVWERGCDSWYKTAAGKNTNNWPGYTFVYRWRTRRPELADYDLAR

SEQ ID NO: 3330 - protein, 367 aa, Triticum aestivum
  unsure (1)..(367): unsure at all Xaa locations
MAKDGAGGGPDWNGLLKWSLAHGSDGTNPPRALSEEDXKWFMEAMQANTVDVVGRMKEIAQXLMKTPDDVLQSHGVTPENIEDMLDELQEHVEXSIDMANDLHSIGGLDPLLGYLKNSNAGIRAKXAEVVSTMESNGLEPLLTNFRSDPSTTARTKALGAISSLIRNNQSGLAAFRLGNGHAALKDALGSDDARLQRKALHLTQYLLNNKADRNVAEKIGLPNQLIHLASSDDSGVREAALGGLLELARDKTPAARNALPDQDKLKDVLKSRIEGISAMDADDLQAAREERQLVDSLWKECYGEPSSLREKGLVVLPGEDAPQQPPPDVVGKMFEPPLRVWAVPRPAPAEDPDYGSGKKDPPLLLGP

SEQ ID NO: 3331 - protein, 375 aa, Neurospora crassa
MAVGTVLVTGGTGYIGSFTTLALLDNGYDVVIVDSLLNSSKAALDRIELICGKRPTFYQVDITDEAGLDDVFSKHPDIDSVIHFAALKAVGESGEIPLEYYRVNVGGSITLLRSMAKHNVSNIVFSSSATVYGDATRIPGMIPIPENCPIGPTNTYGHTKVMIETVISDHIEAERRKAKKAGKPFEQWNGALLRYFNPCGAHPSGIMGEDPQGVPYNLLPLLGKVATGERDKLLVFGDDYASKDGTAIRDYIHVLDLASGHLAALNYLREKKPGVKAWNLGSGRGSTVFEMIKAFSKVVGRDLPYQVVDRRLGDVLDLTANPALANEELQWKTKLTLEDACADLWRWVENNPKGYRQDPPAELLEKLKASKAVKN

SEQ ID NO: 3332 - protein, 356 aa, Nostoc sp. PCC 7120
MQKWKTSCTLVISLILWNNFPMADAVNQQIVLKSRPFGEPQESDFALVESPIPQPGEGEVLSRTIYLSLDPYMRGRLSANASYAASTELNSVIVGGTVSQVIKSHHLEFQAGDFVLSNHGWQTYAVAKGETLRKLDPNQAPLSYNLGVLGMPGLTAYAALLDIGQPKAGETVVISAASGAVGAVAGQIAKIKGARVVGIVGSDEKRDYIVNELGFDVGINRRTQEVSSALKEAAPDGIDVYFDNTAGEILEAVLQQINLGARIPLVGLISQYNASSPPPGPNLLPLLIKRALIKGFLVSDYQYRFPDFVRDVAGWLQSGQLKYKEDVVVGLENAPRAFIGLLRGDNFGKLIVKVSQ

SEQ ID NO: 3333 - protein, 349 aa, Nostoc punctiforme
MELIDRFKALLAALLYGQEDLRLEQVADPTPAAGEVVIQVGAATTCGTDLKVWRRGGHAKMLKPPTLFGHEGAGRIVALGAGVTNWQVGDRIVANNSAPCMKCFFCQRQEYSLCPNLTWNNGTFAEYLKIPAPIVEHNLLQIPDELPWELAAMTEPLACVLHGVARSNIKPKDRVVVLGDGAIGLMFVAALSEKAEVLLWGGNNHRLEIGQKLGATQTFNYHQIPDIPNLVKELTQGWGADVAIEATGVPSVWETAIACARPGATVNLFGGCPRDTSITVNTEQLHYSELTIKGVFHNTPEYVREALALIASRKIPFELLISEQRPLKDLEQVFCEMKARQVIKAAMIP

SEQ ID NO: 3334 - protein, 250 aa, Zea mays
  unsure (1)..(250): unsure at all Xaa locations
VPRGRPERCLPSHISSATISSLPIPLRLPPPPPLPLPPPPLRSCLRRSIRSPRRRRCHGREMLSVDIHDGFLEAFVWCDRSCLLTDADYDNLCRCEILDDFXMLVTATEXYGAYLHNEXDLLHTTTIVERRSLRLCYEYXHMLCHDTVPLCTLLQYITYGHMIDSVVLIVTVTLHERYVNKLLENCHPLGMLDSIDSLADALXMRELYRLALDDTAVAPYFSXSITSEDVDDVTIVIMSDALYXAYLEDF

SEQ ID NO: 3335 - protein, 389 aa, Triticum aestivum
MGYVGSHGVATLRKYKYSGVDHSIVAKYILQPFWSRFVNVFPLWFPPNMITLTGFMFLLTSAFLGFLYSPHLDTAPPRWVHLAHGILLFLYQTFDAVDGKQARRTNSSSPLGELFDHGCDALACTFESLAFGSTAMCGNATFWFWVISAVPFYFATWEHYFTNTLVLPIVNGPTEGLMLIYVCHIFTFFTGAEWWAQDFRKSLPLLNWVPLVPEISLYGIVLFLMIAFAVIPTIGSNTHNVYKVVEARKGSMVLALAMLFPFGLLMAGTLVWSYLSPSDIMRNQPHLLIIGTGFAFGYLVGRMILAHLCDEPKGLKTGMCMALAYFPFAIANALTARLDDGNPLFDEQLVLLIYCLFTVALYMHFATSVIHEITNALGIHCFRITSKKA

SEQ ID NO: 3336 - protein, 150 aa, Zea mays
MATACHLAAPLGLAPLPRGCASAGVVAVVRCARSSGSKIPRGVAVRATSGGEGATEEVPEIVKAAQDAWDKVEDKYAVATIGVAAIVALWTVVGAIKAIDKLPLLPGVLEIVGIGYTGWFTYRNLVFQPDREALIGKIKSTYKEITGSSN

SEQ ID NO: 3337 - protein, 88 aa, Glycine max
MLEGKAMVKETDMSTKMQIHAMASASQALDLYDVYDCISIAAHIKKEFDSVYGNGWQCVVGSNFGCYFTHSSGTFIYFALATLNFLIF

SEQ ID NO: 3338 - protein, 379 aa, Yersinia pestis KIM
MEMIKTRAAVAWGPNQPLSVEEVDLMPPQKGEVLVRIVASGVCHTDAYTLSGADPEGVFPTILGHEGGGIVEAIGEGVTSVAVVDHVIPLYTPECGECKYCRSGKTNLCQAIRSTQGKGLMPDGTTRFSKNGQPIFHYMGTSTFSELTVVPEISLAKINKEAPLEEVCLLGCGVTTGMGAVMNTAKVKPGDTVAIFGLGGIGLSAVIGAQMAGASRIIGIDLNTSKFELARKLGATDLINPKDYDKPIQEVIVELTDGGVDFSFECIGNVNVMRSALECCHKGWGESVIIGVAGAGEEISTRPFQLVTGRVWRGSAFGGVKGRSELPGIVQQYLDGKFALNDFITHTMALDQINEAFDLMHEGKSIRSVIHFNHSSESK

SEQ ID NO: 3339 - protein, 325 aa, Bacillus halodurans
MWETRVTSLLNIQYPIIQGGLAYLAYSELAAAVSNAGGLGQITAMSLQGPEQLRKEIERVREKTEHPFGVNFAIGQHGRPFEDMVQVAIEEDVPVVSMTGGNPAPILTMLEHTSIRKLVLVASRRQAVKAEELGADAVMVVGHEGGGHLGRDDVGTMVLVPQVVDAVSIPVIASGGIGDGRAWMAAHALGAEGIEMGTRFIATVECIHAHAKYKERLVQGSELDTVVIKRSLGSPARVIRNDWTDHILTIEQTNPSYDALKEYISGEANKNFIYDGQEDKGFGWAGQVMGRIRDIPTVQQLFTRMIEEAIDVRKRWELSERKDDK

SEQ ID NO: 3340 - protein, 333 aa, Phacelurus digitatus
TGYDRVMVYRFHEDEHGEVVAESRRDNLEPYLGLHYPATDIPQASRFLFRQNRVRMIADCHATPVRVIQDPGLSQPLCLVGSTLRAPHGCHAQYMANMGSIASLVMAVIISSGGDDEQTGRGGISSAMKLWGLVVCHHTSPRCIPFPLRYACEFLMQAFGLQLNMELQLAHQLSEKHILRTQTLLCDMLLRDSPTGIVTQSPSIMDLVKCDGAALYYHGKYYPLGVTPTESQIKDIIEWLTVCHGDSTGLSTDSLADAGYLGAAALGDAVCGMAVAYITPSGYLFWFRSHTAKEIKWGGAKHHPEDKDDGQRMHPRSSFKAFLEVVKSRSLPW

SEQ ID NO: 3341 - protein, 461 aa, Shigella flexneri 2a str. 2457T
MADNKPELQRGLEARHIELIALGGTIGVGLFMGAASTLKWAGPSVLLAYIIAGLFVFFIMRSMGEMLFLEPVTGSFAVYAHRYMSPFFGYLTAWSYWFMWMAVGISEITAIGVYVQFWSPEMAQWIPALIAVALVALANLAAVRLYGEIEFWFAMIKVTTIIVMIVIGLGVIFFGFGNGGQSIGFSNLTEHGGFFAGGWKGFLTALCIVVASYQGVELIGITAGEAKNPQVTLRSAVGKVLWRILIFYVGAIFVIVTIFPWNEIGSNGSPFVLTFAKIGITAAAGIINFVVLTAALSGCNSGMYSCGRMLYALAKNRQLPAAMAKVSRHGVPVAGVAVSIAILLIGSCLNYIIPNPQRVFVYVYSASVLPGMVPWFVILISQLRFRRAHKAAIASHPFRSILFPWANYVTMAFLICVLIGMYFNEDTRMSLFVGIIFMLAVTAIYKVFGLNRHGKAHKLEE

SEQ ID NO: 3342 - protein, 762 aa, Triticum aestivum
  unsure (1)..(762): unsure at all Xaa locations
MPPLYVFSLGLLLLLHIPHWCPSSAAASDTLTAGQSLAVGSKLVSRNGKFALGFFQPAAGITSKSQNTTSSSWYLGIWFNKIPVFTAVWVANRDQPITGPNLNLTQLKISSYGNLVIVNNDSVVWSTHTVNNRTQTSSINTTTGAAVLLNSGNLALTVTESPSSSDLPLWQSFDYPTDIFLPGSKFGRNKVTGLIHQSISKKSLIDPGLGSYSIELEETKGIVLKRRNPLVVYWHWASSKTSSLSLIPILNSILDLDPRTKGLINTTYVDNNQEEYYTYTSPNESSPTFVSLDISGLIKLNVWSQANQSWQIIYTQPADPCTPAATCGPFTVCNGIAQPFCDCMMNFSQKSPLDWEFNDRTGGCIRSTPLHCNTSSNNKNITSSTDMFHSIAQVTLPYNPQSIDFANTQSECEEACLSSCSCTAYSYNSSRCSVWHGELLSVNLNDGIDNTSEDVLYLRLAVKDLLPSLKKKKKKPKVGVTIASIIGFGLIMVMLLLLIWRYKFKCCGLPIYDNPGSAGGIVAFRYTDLVRATKSFSEKLGGGGFGSVYKGVLSDSTTTIAVXRLDGARQGEKQFRAEVSSIGLIQHINLVKLIGFCCEGDHRLLVYEHMLNGSLDGHLFKKSNANVVVLNWNIRCQISLGVARGLCYLHQSCRECIIHCDVKPGNILVDASFAPKVADFGLAAFVGRDFSRVMTTFRGTAGYLAPEWLSGVAITPKIDVLCEEGWGGGGWVCVGVGCGVLGVAVGVEGCYVQVGVGDGEGG

SEQ ID NO: 3343 - protein, 413 aa, Bradyrhizobium japonicum USDA 110
MCRTCITVHRNPRLRHRAHCAGVQSANDASRSPALPRSLRPRLFVTTRLRPPSCLSIGQTSLRLGARRCAALASVAVMASFFGLSGAARAATLVVTSTADSGAGSLRGEIVSATSGDTILFQVSGTITLLSELPIITKNITIDGNGNNPTISGAGTYRPFFIGDAGTTGSTYSVTLKSLTIANAVAQGGAGLGSGAGAGLGGAVFVSSNGALTLSNVAVSNTQAKGGGVVDNFGEVGGGGGMGGKSYPLTPAGGGGLFVGSDANSSGTAGGSSGGVHNGGSGPQTGGAGGFASGGGGGSSGGGPVAGGAGGFGGGGANAGGATTGGSGGYGGGGGSAAGLSTSTGGAGGFGGGGGGGITAAGSGGFGAGNGGSGGTGSNSGGGGLGAGGAIFVQSGGTVAVQGDLSNALTHSR

SEQ ID NO: 3344 - protein, 413 aa, Triticum aestivum
  unsure (1)..(413): unsure at all Xaa locations
MESGPAGTMGGPLSDVPAMLDGDRYELVRSIGSGNFGVARLMRNRASGELVAVKYIDRGEKIDENVQREIINHRSLRHPNIIRFKEVILTPTHLAIVMEYASGGELFERICTAGRFSVDEARFFFQQLISGVSYCHSMQVCHRDLKLENTLLDGSTAPRLKICDFGYSKSSVLHSQPKSTVGTPAYIAXPEVLLKKEYDGKIAXDVWSXGVTLYVMLVGAYPFRXIPDEPKNFRKTIQRILXVQYSIPDYVHISSECRDLIAKIFVGNPATRITIPEIRNHPWFLKNLPADLVDDSTMSSQYEEPEQPMQSMDEIMQILAEATIPAAGSRINQFLNDGLDLGDDLDDPDSNAEPHVQKNGGKKVCLLTRPKPLQLPKGLGFPAVSDNPPHKGYFGWRWVLALPWWRTTGLALW

SEQ ID NO: 3345 - protein, 341 aa, Shewanella oneidensis MR-1
MKALSKLKAEKGIWLVDAPKPEMGHNDLLIKIKKTAICGTDMHIYNWDEWSQKTIPVPMVVGHEYVGEVVDIGQEVRGFNIGDRVSGEGHITCGHCRNCRAGRTHLCRNTSGVGVNREGSFAEYLVIPAFNAFKIPDDISDDLASIFDPFGNAVHTALSFDLVGEDVLITGAGPIGIMAAAVCRHVGARHVVITDVNEYRLELARKMGATRAVNVAQENLKDVMKELGMTEGFDVGLEMSGVPSAFRAMLDTMNHGGKIAMLGIPGGEMAIDWSKVIFKGLVIKGIYGREMFETWYKMASLIQSGLDISPIITHHYKIDDFQKGFDAMGSGQSGKVILSWD

SEQ ID NO: 3346 - protein, 171 aa, Bacillus cereus ATCC 14579
MSKKIAILITDYFEDTEYTEPVAAFNQKEYELTTIEMEKGKTVHGKQGKSEVVIDKSIDDVSPENFDALFIPGGFSPDILRADERFVRFSKAFMDAEKPVFAICHGPQLLITAQTLEGRDVTGYKSIEVDLKNAGGNFHDKEVVVCQNQLVTSRQPEDIPAFIEESLRILG

SEQ ID NO: 3347 - protein, 317 aa, Oryza sativa
  unsure (1)..(317): unsure at all Xaa locations
ARGRSMEVQPKRRPAADYIETGRVDVTANMRAILVDWLVEVAEEYKLVSDTLYLTVSYIDRFLSAKAINRQRLQLLGVSAMLIASKYEEISPPNVEDFCYITDNTYMKQEVVKMERDILNVLKFEMGNPTTKTFLRMFIRSSQEDDKYPSLPLEFMCSYLAELSLLEYGCVRLLPSVVAASVVFVARLTLDSDTNPWSKKLQEVTGYRASELKDCITCIHDLQLNRKGSSLMAIRDKYKQHRFKGVSTLLPPVEIPASYFEDLNEXMLLDDDVVRLRLSFPQDRSMVTEVERGLVSTLSTRDVLPWMLDCQSLARSS

SEQ ID NO: 3348 - protein, 784 aa, Thermoanaerobacter ethanolicus
MKPLYLDSTQSVEKRVEDLLQQMTIEEKVAQLNSIWVYEILDDMKFSFDKAKRLMSYGISQITRLGGASNLSPRETVRIANQIQKFLIENTRLGIPALIHEESCSGYMPKGATIFPQTIGVASTWNNEIVEKMASVIREQMKAVGARQALAPLLDITRDPRWGRTEETFGEDPYLVMRMGVSYIRGLQTESLREGIVATGKHFVGYGNSEGGMNWAPAHIPERELREVFLYPFEAAVKEPKLSSIMPGYHELDGVPCHKSKKLLNDILRKDWGFEGIVVSDYFAISQLYEYHHVTSDKKGAAKLALEAGVDVELPSTDYYGLPLRELIESGEIDIDFVNEAVKRVLKIKFELGLFENPYINEEKAVEIFDTNEQRELAYKIAQESIVLLKNENNLLPLKKDLKSIAVIGPNADSIRNMIGDYAYPCHIESLLEMRETDNVFNTPLPESLEAKDIYVPIVTVLQGIKAKASSNTEVLYAKGCDVLNNSKDGFKEAVEIAKQADVAVVVVGDKSGLTDGCTSGESRDRADLNLPGVQEELIKAVYETGTPVIVVLINGRPMSISWIAEKIPAIIEAWLPGEEGGRAVADVIFGDYNPGGKLPISIPQSVGQLPVYYYHKPSGGRSHWKGDYVELSTKPLYPFGYGLSYTEFSYTNLNISNRKVSLRDRMVEISVDIKNTGTLKGDEVVQLYIHQEALSVTRPVKELKGFKRITLDAGEEKTVIFKLSIEQLGFYDENMEYVVEPGRVDVMIGSSSEDIRLRDYFEIVGEKEKVAKKFITEVRVENK

SEQ ID NO: 3349 - protein, 394 aa, Pharus lappulaceus
EPARTEDPALSIAGAVQSQKLAVRAISRLQALPGGDVKLLCDTAVEHVRELTGYDRVMVYRFHDDKHGEVVAESRRDDLEPYLGLHYPETDIPQASRFLFRQNRVRMIADCHAAPVRVIQDPALPQPLCLVGSTLRAPHGCHAQYMANMGSIASLVMAVIISSGGDDEHNVARGAISSAMKLWGLVVCHHTSPRCIPFPLRYACEFLMQAFGLQLNMELQLAHQLSEKHILRTQTLLCDMLLRDSPTGIVTQSPSIMDLVKCDGAALYYHGKYYPLGVTPTEAQIKDIIEWLTLCHGDSTGLSTDSLADAGYPGAAALGDAVCGMAVAYITPSDYLFWFRSHTAKEIKWGGAKHHPEDKDDGQRMHPRSSFKAFLEVVKSRSLPWENAEMDAIH

SEQ ID NO: 3350 - protein, 120 aa, Triticum aestivum
MVGKGGEAAASAQHKEEHEEDGDMVGVVKLISAEGFEFVIDKKAAMVSNTLRNMLTSPGGFAETREGEVRFPEISTAILEKICQYFYWSLHYASGKETAEFPIEPEITLELMMAANYLDT

SEQ ID NO: 3351 - protein, 323 aa, Pyrococcus horikoshii
MVKSVTDKIKFYEFEGGLSVFKKYGVPIREEDLEEIRKMDAILFGATTTPFDVPRYKSLIITLRKELDLYANLRIIPNFKLRKEIIIVRENSEGLYSGEGAYDSNKVVDFRIITRKGAERIAKFAVKLAKDRSTFLTFVHKANILESDRFFRKIVLDIARKEDVKVREEIVDSFTIKLVKDPWNLGIILSENMFGDILSDLATIHAGSIGIVPSGNYGEDIALFEPIHGSAPDIAGKGIANPIGAILSAAMMLDYLGLDGSIIWKAVGRYVRRGNLTPDMEGRATTLEVTNGIISEIYRLDEYEIDEVWRDEVRLGRILLEIS

SEQ ID NO: 3352 - protein, 594 aa, Glycine max
  unsure (1)..(594): unsure at all Xaa locations
MAIANGDDKNAKTLQFIEDMTRNTDSVQERVLAEILSQNAQTEYLKRFELNGATDRDTFKSKVPVVSYDDLKHDIQRIANGDRSPILCAHPITEFLTSSGTSAGERKLMPTISQETERRQLIFSLPMPVMNQYVADLDKGKALLFLFTKAETKTPSGLVARPVSXSLYKSDQFKNRPYDPFNVYTSPDEAILCPDSFQSMYTQVLCGLIMRHQVLRVGAVFASGLLRAIRFLQLNWAELAHDISTGTLNPKISDLPIKQRMTQILTPDPELADFIVKECSGENWDRIIPRIWPNTKYXVDVIVTGAMAQYIPTLDYYSGGLPIASTMYASSECFFGLNLNPFCNPSDVSYTIMPNMGYFEFLPHDHDDDDGALYSGSDSSSRLTDLADVELGKSYEIVVTTYSGICRYRVGDILRVTGFHNSTPQFSFVRRKNVLLSIDSDKTDEAELQNAVENASVLLKEFKTSVVEYTSFADTKSIPGHYVIYWELLMKDSSNAPKSEALEQCCLRMEESLNAVYRQCRVAEHSIGPLEIRVVKNGTFEELMDYAISRGASISQYKVPRCVSFTPITELLDSRVXSVHFSPAEPHWTPERRR

SEQ ID NO: 3353 - protein, 205 aa, Triticum aestivum
LAGMNVAAGPKLAAAVTNAGGLGVLGGIGYTPEMLREQIDELKSFLTDKNAPFGVDLLIPQVGGSARKTNYDYTKGKLDELISIIIESGSKLFVSAVGVPPKRVVDRLHSAGVLYMNMIGHPKHVRKCLDLGVDIICAQGGEGGGHTGDVPTTVLIPAVVAMCKGKTSPMTGKPVQVVAAGGIYNGQTVAAALMMGANAVWVGTR

SEQ ID NO: 3354 - protein, 250 aa, Glycine max; identical to SEQ ID NO: 3248

SEQ ID NO: 3355 - protein, 129 aa, Schizosaccharomyces pombe
MWLSDLQKIGVGTTALGFLFMIMGIFMFFDGPLLSLGNLLLVFGFFMIAGFSKSVSFFLRKDRMLGSISFFSGLLLTLFHFPIIGFFVECLGFFNLFKVFYPLIISFLRTVPYIGPYIDRLTSYQQSPV

SEQ ID NO: 3356 - protein, 510 aa, Oryza sativa (japonica cultivar-group)
MDPSSAGAGGNSLASASCGDAQKRRVCYFYDPEVGNYYYGQGHPMKPHRVRMTHALLAHYGLLAPAKMEVLRPLPARGIDLCRFHSDDYVAFLRAVTPETQLGQVRALRRFNIGPDCPVFDGLYAYCQTYAGASVGAAVKLNHGTHDIAINWSGGLHHAKKSEASGFCYVNDIVLAILELLKLHERVLYIDIDIHHGDGVEEAFYTTNRVMTVSFHKFGDYFPGTGDIRDIGYSEGKYYCLNVPLDDGIDDDSYQSIFKPIISKVMEMYRPGAVVLQCGADSLSGDRLGCFNLSGKGHAECVKFMRSFNVPLLLLGGGGYTIRNVARCWCYETGVALGEELQEKLPYNEYYEYFGPEYSLYVAASNMENRNTNKQLEEIKCNILDNLSKLQHAPSVQFQERIPETKLPEPDEDQEDPDERHDPDSDMVLDDHKPTGHSARSLIHNIGVKREITETETKDQHGKRLTTEHKGPEPMAEDLGSSKQAPTADANAVAVNAPGNARNEPGSSPK

SEQ ID NO: 3357 - protein, 160 aa, Catharanthus roseus
MASADVEFRCFVGGLAWATTDQSLSEAFSQYGEVLESKVINDRETGRSRGFGFVTFGDEKSMKDAIVGMNGQTLDGRNITVNEAQSRGSGGGGGGGGFRGPRREGGGGYGGGGRRDGGYGGNGGGYGGGRRDGGYGGGDRGYGGGDRYSRGGGSDGNWRN

SEQ ID NO: 3358 - protein, 461 aa, Oryza sativa
MPRTVAVVGAGAAGLVAARELLREGHAVTVFERSARVGGTWAYDPGSDPDPPCLDTAAPGAAAVHGSLYASMRTNLPRELMGFSGFALAGRVFAGDPRTFPGHREVLAFLDAFAVESGVAGRVRLRAEVVRVGPLAGHGERWTVAWRGEGGVEEEEEEVFDAVVVCNGHCTVPLVPKLRGIGNWQGKQMHSHNYRTPEPFQDQVQDAVSVTVSIVVVVGLGASGVDIAREISNVAKEVHIASRYTEDRLGKVDTFQNTWLHSEVDCIQDDGQVRFSEGSASIAADTFLYCTGYRYHFPFLDVEGVTVDGNRVGPLYKHVFPPKHAPNLSFVGLPVKTIMFQSFELESRWVARALSGRAELPGEEAMAAAVEEDYRRMDAAGKPKRHTHALMPDWLTMFRPLVAATIDERQVEYMDWVAAQVGEPPMEARRREIYEKALRCIWSLDDSYRDSWEEEEEEENR

SEQ ID NO: 3359 - protein, 475 aa, Pseudomonas aeruginosa UCBPP-PA14
MLPAGAALCAERDQPRPAVAADLHRARLLHPVHGDHPGGDRLARRHRHRPRPDHGPRRTGRRFPRADRGRLRRRPLRPVHRHVDVLRRRPARRVPLAVPARNRARRAGAPAQRAYLRPARKPTMKALRWHAARDLRLSELERQAPRPGEVELEVAYCGICGSDLHEYQSGPHSIPQAEAHPLSGCRAPLTLGHEFCGVVAALGPGVEGLRIGDRVAVEPEYRCGECRYCREGRYNLCESMGFIGLMGDGGFAERARVPAYMLHRLPDAVGFRQAAVLEPAAVALHALRRSSLAPGQRCAVFGLGPIGLLLVMLARLRGIEDIAAVDVSPERLALAGEFGASRALDARDGDTAARLREGGALDCAFEAAGSQASLDAALASLRKGGELVLVSLMGEVRLDAFDLVNRELRLLGSVGYRDAYPELIALLADGRLDLARAVTRSVPLEQAVEHGFEALLRDKSQVKVLVNPNPALADA

SEQ ID NO: 3360 - protein, 300 aa, Antirrhinum majus
MEQPNNDGNNGGSCYRPQLPNQSPPANGVPNSTTTNSTHSPPNESVKRKRGRPRKYGTPEQAAAAKRLSAPKKRDSASGVASVSSASSKKSPLAALGNMGQSFSPHIITVAAGEDVGQKIMMFVQQSKREICVISASGSVSSASLRQQASSGGSVTYEGRFDILSLSGSFIHAEFGGRTGGLSVCLSSSDGQIIGGGVGGPLTAAATIQVIVGTFVVETKKDANVEAAASGKSPSPNGGASAPGLSFRSPADSGIQMGGGGNPFLIQNRTMHMTPMEWIGSADHGMHQSPENGDYDHIPD

SEQ ID NO: 3361 - protein, 185 aa, Xanthomonas axonopodis pv. citri str. 306
MLLNRLLALVLTGFFATPAFAAGTPVLDVEYRPLAGKTPINLNRTYGGKVVMVVNTASKCGFTPQYEGLEALNHRFGSRGFTVLGFPSNDFQGQEPGSEKQIQEFCTLTYGVKFPMFEKVHVLGAEATPLYQRLTQATGVAPGWNFHKYLIGRDGRVVAQFPSKIKPDDPSVLAAIERELKAPAR

SEQ ID NO: 3362 - protein, 114 aa, Glycine max
APLDIMGRYPHLVVIGTGLTFGYLVGRMILAHLCDEPKGLKTGMCMSLMFLPLAIANVLASRLNDGVPLVDERLVLLGYCAFSVTLYLHFATSVIHEITNALGIYCFRITRKEA

SEQ ID NO: 3363 - protein, 345 aa, Thermus thermophilus [sequence omitted]

SEQ ID NO: 3364 - protein, 281 aa, Nicotiana tabacum
MVRAPCCEKMGLKKGPWTPEEDQILVSYIQTNGHGNWRALPKLAGLLRCGKSCRLRWTNYLRPDIKRGNFTREEEDSIIQLHEMLGNRWSAIAARLPGRTDNEIKNVWHTHLKKRLKNYQPPQNSKRHSKNNLDSKAPSTSQTFNNSDNFSNIQEDINGPVTGPNSPQRSSSEMSTVTVDSTAMTTITIDDQNMFKQLDEMDSSENFIPEIDESFWTDDLSTSDNSTFGMEGTGGELQVQFPFSSVKQESMDMVGAKLEDDMDFWYNVFIKSGDLLDLPEF

SEQ ID NO: 3365 - protein, 397 aa, Hedyosmum sp. SM-2000
DLEPVNPAEVPVIAAGALKSYKLAAKAISKLRSLPSGNISLLCDVLVREVSELTGYDRVMAYKFHEDEHGEVIAECRRSDLEPYLGLHYPATDIPQASRFLFMKNKVRMICDCSAPPVKVIQDKRLGQPLSLCGSTLRAPHGCHAQYMTNMGSIASLVMSITINEDDEETDNEQQLQQEKPKKLWGLVVCHHTSPRFIPFPLRYACEFLIQVFGIQLNKEVELAAQVREKHTLKTQTVLCDMLLRDAPMGILTQSPNVMDLVKCDGAALNYKNQFWLLGTTPTEAQIKDLAEWLLECHDGTTGLSTDSLTEAGYPGSYVLGDAVRGMAAVKITSKDFLFWFRSHSAKEIKWGGAKHDPIDKDDDGRKMHPRSSFKAFLEVVRQRSVPWEDIEMDAIQ

SEQ ID NO: 3366 - protein, 435 aa, Desulfovibrio desulfuricans G20
MQTAWRGSPVVAGGGATCFHTSLFCNTVLKDTKQSSSRSLPMQLGRYRFDRMELAGSLGDLGTLLPLAVGMIMVNGLDPMGLFFAVGLYYIIAGHYYGVPVAVQPMKSIGGYAVATGVGTGSVSAACLIMGLGMLAVGRWNLAEALRRHIPQAVIRGVQASTGVLLATQGVRFMLGTHSLQQQLSEPFLGLGGLGPVPWSLILGLAFLTCALLLLNNPRFPAALVVVGSGLLLGLVFSDATFSFGLHLPRLLPLGLPSLADFAYALPVLVMPQLPMTLGNAVIANADLSHTYFPESSSRVTPRSLCYSMGAACTGAFLLGGMPMCHGAGGLAAHYRFGARTCGSNLIIGAVFVLFSVMLGAGMLDAVRLLPLAVLGTLLLLAGLELCLTVRDVLDRSGLFVVFCMLTLTLTTNLAVSFVAGTALALLMARGRITL

SEQ ID NO: 3367 - protein, 808 aa, Saccharopolyspora erythraea
MTGGERVKRLVIRIAPLLLVVPLLVAAVSPVRHSQRVDELIGQLTLDEKLSFVYWDYNEKDPLAKLWLPGVPRLGIPQIRGTDGPAGVTIHQPAIAMPAPVALASAFDDRLAHEYGTVLGREGRAFEQDIILGPMVNNIRVPQAGRNFETFSEDPLVTARTAAAQIRGIHSQGLMTSAKHYAANTQETDRFTIDVDVDQRTLRELELPGFEAAVAAGATSVMCAYPKVNGTHACGHRQLLTEILKEQWGFKGWVMSDWTATHATEDLVAGLDQEMGVEVREDGSLFRGKYLGEALKKAIREGRIPESALDASVRRILTQFERFGLLDETKPPRPERDVAGGTRIAQEVAESGAVLLRNEGGVLPLDPAAGQDIAVIGPSAQQPKVTGLGSSYVEPDFANAPLDTITQRVGSGGRVGYSVGEELKGAPIPETALQPAFVPGEVTPPPSGGVIYDGRLKVDADGLYRIAARIDGGNGSLQIDGGAPIGVGDVFGPLTSVPVWLTKGEHTIQMTGAAPVGGGSLDVDLTWVTPGHAQREFDAAVERARDSDVAVVFAYDDGAETADRTSLSLPGTQDKLIDAVASVNPNTVVVLNTGSSVTMPWLDKTRAVLDMWYPGQAGAEATTALLFGDAEPGGRLTQTFPVSQERTPVGGDPARFPGVDGKVHYSEGIFSGYRWYDREGVDPLFPFGHGLSYTTFERTDPVVERTRDGLDVTVTVRNTGQRRGSDVVQVYLGPSPQVPLDQAPRQLAGYQKVELAPGETKRVRVHVAERALQHWDEAAGGWKLGGGKRAVEIGSSSRDIDLRADINL

SEQ ID NO: 3368 - protein, 448 aa, Rhizobium sp. NGR234
MWHWHRFQEHEARRSDAIVLLRKIMSNESKSNSLYAFESLESNVRFYSRSFPVVFEKAAGAILHDESGREFIDFLSGSGVLNYGHNDPYFLDEATQYLRSNGIIHGLDMATPAKREFMECFDAIILRPRGLTYKFQFCGPTGANAVEAALKLARKATGRHSIVSFTNGFHGMSLGALAVTGNRYYRDAAGFPPAGVAFMPYDGYWGADNDTSEYLDKVLADASSGVDVPAAIILETVQGEGGINAARKEWLQSIQRICRSHGILLIVDDIQAGCGRAGNFFSFEFAGLSPDVVVLSKSISGCGLPLSLLLLKPELDVWRPGEHNGTFRGNNLAFVTGAAALRKYWTNDALSARVMETGRIIAERLRQVAQTNRARSLSVRGRGMMLGLNCGTGKLAERIVRKAFEEGLVVERCGAEDQVIKLLPPLTTDEQTLRRGLDILHKSVAASI

SEQ ID NO: 3369 - protein, 67 aa, Zea mays
MLKKVGAFFKDPIPETWVTVFGVFELNAWAHAWGGPVWVNQPQVPHWNDVCLKRCQREGLKLSSNLM

SEQ ID NO: 3370 - protein, 480 aa, Zea mays
MSFRSIVRDVRDGFGSLSRRSFEVTLASIYGLTGHHKGKTQSSSHVLDDSPSIIRESRWANLPPELIRDIIRRLEADESTWPARKHVVCFAAVCRTWREMCKEIVLSPEFCGKLTFPVSLKQPGPRDGNTMVQCFIKRNKSKSTYHLYLCLSNVVTSESGKFLLSAKRHRKTTCTEYTISMDSGNISRSKRTYIGKIRSNFLGTRFLIYDTQAPYNGAVVPPAGRTSRRFNSTKVSPKLPSVSYNIAQVSYELNVLGTRGPRRMRCIMHSIPASSVEPGGTVPGQPEQIVPRALEDSFRSTASFSQSFRSTASFSKSIMDSSMDFNSARFSDIAGSSARFTGVPGSSARFAGVPGSSARFSGIAGARLDNDEESETKERPLVLRNKPPRWHEQLQCWCLNFRGRVTIASVKNFQLIAAATPPPAGAPTPSQPAPSDPDKVILQFGKVARDMFTMDYRYPLSAFQAFAICLSSFDTKLACE

SEQ ID NO: 3371 - protein, 188 aa, Carmichaelia sp. 'Lavin 6201'
YDRVMAYKFHEDDHGEVVSEIRRSDLEPYLGLHYPSTDIPQAARFLFKQNRVRMICDCHAKPVKVIQSEELRQPLCLVNSTLRSPHDCHTQYMANMGSIASLVMAVIVNGNDSTRLWGLLVCHHSSPRYVPFPVRYACEFLMQAFGLQLYMEIQLASQMAEKRILKTQTLLCDMLLRDAPFGIVTQSQ

SEQ ID NO: 3372 - protein, 213 aa, Zea mays
  unsure (1)..(213): unsure at all Xaa locations
SGLLLIVRPNVGVSGAHCDNSYGAHVVFLRGVANPLDIKASDLMNPSXLVKLIDIVNPTDKPERITILTRMGAENMMVKLPHLIRAVRNAGLIVTWITDPMHGNTIKAPCGLKTRPFDSILAEVRAFFDVHDQEGSHPGGVHLEMTGQNVTECIGGSRTVTFDDLSDRYHTHCDPRLNASQSLELAFIIAERLRKRRMRSGLNSSLPLPPLAF

SEQ ID NO: 3373 - protein, 467 aa, Zea mays
LCHVCRAYLTGSWARDFTNLGDWCAHLLRVSPTGTVHVHVLGCTVTANPANVEYMLKTNFDNLPKGKTFAALLGDLLGRGIFNVDGHAWRHQRKMASLELGSVAVRSYAFGIIAQEVEARLLPLLAGAADSGAVVDLQDVFRRFAFDTICKISFGLDPGCLEPEMPVSELADAFDTATRLSATRGAAAAPLLWRAKRLLNVGSERELRAAIKLVDELAAAVIRERRKLGVAPSGHDLLSRFMASAGADDDDRYLRDIVVSFLLAGRDTVSSALTTLFMLLSENPGVAAAMRAEDGDGDGGSALPLTYEHLKRLHYTHAVLYENMRLFPPVQFDSKFCAGPDVLPDGTYVPGGTRVMYHPYAMGRMPRIWGADHGAFRPGRWLTGAGGSFVPESLYRYPVFQAGLRVCLGKELAVTEMKAVAVAVVRAFDVHVVGDSSSAACKPKFVSGLTASISGGLPVRISRRVRS

SEQ ID NO: 3374 - protein, 477 aa, Stigmatella aurantiaca
MLKQNWTPGSWRAKPVKHMPDDYPDARELARVEEELSRLPPLVFAEETRRLTAALGQVAEGQAFLLQGGDCAESFKEFTTDNVRDSLRLILQMAVVLTFSGGRPVVKVGRIAGQFAKPRSGASETIEGVTLPAYRGDIINGMEFEPGDRMPDPKRLLKAYHQSSDTLGLLRLFSQGGYADLCNMHRWTFDFVADSVQGGQYRKLADKILESLRFMSALHVSPGQQMPLNRVDMFTSHEALLLNFEEAMTRADPISGDWYDTSAHMLWIGERTRQLDGGHVEFMRGIQNPIGLKCGPTMEPEDLLRLMDILNPDAIPGKLTLIGRFGADKIAERLPRLMAATKRDGRPVVWSTDPMHGNTLKARNGYKTRPFDRILSEVKTFVQVATSEGVHPGGLHLEMTGQNVTECLGGAQAVTEDDLSSRYHTHCDPRLNANQALQLAFLVADKLQSLRVSEAWAAVSTDSLTEMSGKEYHAAPK

SEQ ID NO: 3375 - protein, 342 aa, Streptomyces avermitilis MA-4680
MRYRLLGRTGLRVSELFLGAMTFGEQGGVGAPRPECARILDAYAEAGGNVIDTAINYRGGESETIVGELLKGQRDRFVLSTKYTISRDGADPNAAGNHRKNLTLSLETSLRRLGTDYIDVYWVHIWDRNTPIEETVRALDDAVRSGKVLYVGISDVPAWVVSRANTLAEWRGWTPFSALQVPYSLLNRDIERELLPMAEAFGMSVAAWSPLQNGILSGKYTRPGGLEPGTAARLPAEAIGDRERAEAEAVQSAADELGVSCAQVAIAWTMAHSPAVHPILGARRVEQLVENLGAAELTLPTEVLAALESATDFRAGFPADFIDDTSAWVYGTAGHRVVGRAG

SEQ ID NO: 3376 - protein, 161 aa, Nostoc punctiforme
MSNTISDIAVKTINGEDKQLKDYTGKVLLIVNVASYCGYTSQYEGLEKLNQKYREQGLRILGFPCNDFGAQEPGSNEEIVQFCTSKYSVTFELFDKIHAKGPQQHPLYERLTKAVEPTGTIAWNFEKFLVNKKGEVTARFNSSVQPNSPELIAIIEKELAK

SEQ ID NO: 3377 - protein, 309 aa, Sinorhizobium meliloti
MTTHLYENPVFLKHEVPEGHPERPDRLKALNLALEHPNFADLERLEASKGDENLVLLAHTEEHLLGIKRDIPDEDINQIESDTYASPQSLEAALTGIGGAVAAVDAVFAGEADNAFVAARPPGHHAEKNRAMGFCFFNNVAIAARYAQTAHGAERVAIVDWDVHHGNGTQDIFWDDPSVLFCSTHQIPLYPGTGAKDETGVRNNVVNAPISPNSGSEHFRDAFRSRVLPALENFRPDFLLISAGFDAHHRDPLAQINLVGEDFDWATGRLLDVAGRSAGNRIVSLLEGGYDLQGLAESAGLHILRLMRG

SEQ ID NO: 3378 - protein, 343 aa, Xylella fastidiosa Ann-1
MKINSNLFDCLLPIVAAPMAGGSTTVALAQAVSGVGGFPFLAGGYKSVEALATEIAVLRASGGNFGVNLFVPSPDMVDAEAFSIYAAKLQSEALPYGLRLDPLPVMGDDDGWPDKLALLLNDPVPVVSFTFGLPAVRDIAALRCAGSRVLASVTLPAEAQAAMEAGVDGLVVQGPDAGGHSATYDPGRPFTPLKTVSLVRRVCAVSSLPVIAAGGVDGPVMVRALLQAGAAAVAIGTLLLRTKESGATQVHKDALANPAYTETVITHAFTGRPARTLRNGFVNRYHASAPLGYPAIHHLTRPLRQAAASAGDADVLHLWAGTGYRQAMDGSAVDVIQYLAAGL

SEQ ID NO: 3379 - protein, 420 aa, Brassica villosa
YHHSYTLFFFVILVLFPHVFSTNTLSPNEALTISSNKTLVSPGDVFELGFFKTTTRNSPDGTDRWYLGIWYKTTSGHRTYVWVANRDNALHNSMGTLKISHASLVLLDHSNTPVWSTNFTGVAHLPVTAELLANGNFVLRDSKTNDLDRFMWQSFDYPVDTLLPEMKLGRNLIGSENEKILTSWKSPTDPSSGDYSFILETEGLLHEFYLLKNEFKVYRTGPWNGVRFNGIPKMQNWSYIDNSFIDNNEEVAYSFQVNNNHNIHTRFRMSSTGYLQVITWTKTVPQRNMFWSFPEDTCDLYKVCGPYAYCDMHTSPTCNCIKGFVPKNAGRWDLRDMSGGCVRSSKLSCGEGDGFLRMSQMKLPETSEAVVDKRIGLKECREKCVRDCNCTGYANMDIMNGGSGCVMWTGELDDMRKYDA

SEQ ID NO: 3380 - protein, 352 aa, Triticum aestivum
MCIANYEASGSQVQITLERGIPAMIGSFASKQLPYPYLSFDMVHCAKCNIEWDKNDGIFLVEVDRLLRPGGYFVWTSTLHTHRALRDKENQKTWTAIRDLANNLCWEILSQQAGDSSWVIVGRKGPLQCSGICARPRSYAWRLSFPGQGFIATYTRVNSEVFAEDTSSWDSMVRRYWSLLSPLIFSDHPKRPGDEEPHPPFNMLRNVLDMNAHFGGFNAALLKSGKSVWVMNVVPINAPNYLPLIFDRGFIGVQHDWCEAFPTYPRTYDMVHADGFLSLEKRQKRRCSTLDIFLEVDRILRPEGWIIIRDTAPLIEAARSVAAQLRWDARILDLDIASDEKLLVCQKPFLKK

SEQ ID NO: 3381 - protein, 465 aa, Rickettsia conorii
MSFLRKKSFESVKEIGSSSGLSKTLGAFDLILLGLGAMIGTGVFVVTGIIAAKYSGPAVMLSYAIAGITCIFVALVYTELAAMLPTSGSIYTYSYVAFGEVFAWMIGSVIILELGVAAGIVAAGWSGYVQGILAAGGINLPKELTTVPTNGGIINLPAFLISGFIGFILYLGTKDSKRLNAILVFIKMTAIFVFILAAAPHFDATNWSNFMPFGFSNVLVGASILFLAFTGFGTIATAAEECKNPKRDIMIGIIGSLVLTTIVYVTMAGLVTGIAPFDQLNNDQPLAYALTINNSKIGSAIVATGAVCGMMTVLMMNIYGTSRIFYAIARDGLLPKSFAKLHPKYDSPYITIIIFASLAAILGGFCSTELLTQLTSMGALIDYITVTIIVVLFRVTLPDAQRPFRCPLVFIIVPFILIACAYLLFIQIYDGEFNLLTAGRALIYWFITIFVLYIIRSFFMQKEQN

SEQ ID NO: 3382 - protein, 372 aa, Sinapis arvensis
SSNKTLVSPGGIFELGFFKPSGRSRWYLGIWYKKVSQKTYAWVANRDSPLSNSIGTLKISGNNLILLNQSNNTVWSTNITRSNARSSVIAELLPNGNFVMRCSNNKESSGFLWQSFDFPTDTLLPDMKLGYDSQNRAQQVPYIVEGSDDPSSGNLVYKLDIRRGLPEFILVNQFLNQRVEMQRSGPWNGIEFSGIPEVQGLNYMVYNYTENSEEIVYSFHMTNHKAIYSILTVSELALDRLTWIPPSSTWTLFWTLPTDVCDPLYLCGSYSYCDLNTSPNCNCIKGFVPKNPQQWDLRDGSQGCVRRTRLSGSGDGFLRLNNMNLPDTKTATVDRTIDVKKCEERCLSDLNCTSFAMRMFRNGGSGCVMWTG

SEQ ID NO: 3383 - protein, 507 aa, Lolium rigidum
MNLEVAFLHEYASPRALVVAVVLVLVAVHLARSTSRAERLRRKLPCPRFTLPVIGHLHLIGSLPHVGLRDLARKHGPDVMLLRLGAVPTLIVSSPSAARAVLRTHDHVFASRPDTVVGDILFVGSTNVGHSPYGEYWRQVRKIITTHVLTAKKIRANLPYREQEARLALASVREAAAAGTAVDLTHLFSHFAHDMVSQAVAGRIHREDRWGKLFHDLFVGNGQLLGGFNLDDCFPSLARLGIGSANIAKQRKRWDDLLDEVIDRHTSTPMEKGDEPDFIDVMLSVQDEYKLTRNNIKSILMDMFQAGTDTTFIWLDYAMAELARAPQVMAKLQAEVRRCSTTNQLLTQEDLSSMSYLKAVMKETMRLHPPGPLLLPHASIADCEVEGYVVPAGTRVIINVWAIGRHASSWERAEEFVPERFLEGSVDANSDFYGNDFRLLPFGSGRRMCPGINFATLTFEIILANLIYHFDWELPEGSPGVDMTEAFGMDVHRKENLLLVPRVAKIV

SEQ ID NO: 3384 - protein, 151 aa, Zea mays
  unsure (1)..(151): unsure at all Xaa locations
ARPRYLGDINWSTIEDPTGFNLGWWFDTNPFLKNFVLSKTFHMVXDEDDPILEKAIGTVIEWYSGXINLSHMILTKKATMGXMNTKAITKTEDWDSFFNFLNPPHVPEDDDDLDEDTAVELLCLMXHDCDIGTLLRDKIIPQSLGWFTGDA

SEQ ID NO: 3385 - protein, 369 aa, Triticum aestivum
  unsure (1)..(369): unsure at all Xaa locations
MEAIRKQASKLREQVARQQQAVLKQFGGGYADSVFADEGEAQQHSKLEKLYISTRAAKHFQRDIVRGVEGYIVTGSKQVELGNKLCDDGKKYGVENTCTSGSTLSRAALSFAKARSLMEKERANLLKAFGTQVAEPLRAMVMGAPLEDARHLAQRYDRMRQEAEAQAXEVSKRQMKLRETSGNGDMISRLEAAESKLQELKSNMGTLGKEAVAAMTAVEAQQQRLTLQRLIAMVESERSYHQRVLQILDQLEREMVSERQRIEGAPPPVIENSMPPPPAYEEVNGIFMRTPTVAELVETVEHFLAEAIQSYRAESETELNLSTGDYIVVRKVSNNGWAEGECRGKAGWFPSEFIEKRDRVLASKVAQVF

SEQ ID NO: 3386 - protein, 152 aa, Zea mays; identical to SEQ ID NO: 631

SEQ ID NO: 3387 - protein, 356 aa, Triticum aestivum
  unsure (1)..(356): unsure at all Xaa locations
MAPLLKDELDIVIPTIRNLDFLEMWRPFFQPYHLIIVQDGDPTRTVMVPEGFDYELYNRNDINRILGPKASCISFKDSACRCFGYMVSKKKYXYTIDDDXFVAKDPTGKDIDALAKHIQNLLCPSTPLFFNTLYDPYQEGADFVRXGYPFSLREGVPTAVSHGLWLNIPDYDAPTQLVKPRERNGRYVDAVMTIPKGSLFPMCGMNLAFDRELIGPAMYFGLMGDGQPIGRYDDMWAGWCVKVICDHLGLGVKTGLPYIWHSKASNPFVNLKKEYKGIFWQEDIIPFFQAAKLTKECDTVQKCYISLSQQVKEKLGKIDPYFVKLADAMVTWIEAWDMLNSKDSKEADANGKLKGR

SEQ ID NO: 3388 - protein, 296 aa, Oryza sativa
  unsure (1)..(296): unsure at all Xaa locations
MAHRRIALAVLVTLLLSASCLAQQSNDDTSKQPERHGRLTPTTVVVLVALITAFVLLTVFSVLINRCAQARAPPRXGVPQHGVPSARRRRRXXASRASRGLDKEVVEAFPTAVYGDVKARMAAKSGPLECAVCLAEFADSDELRVLPACCHVFHPDCIDPWLAAAVTCPLCRANLTAPPVSLAAAESSDLTAPEEAVQEEESEELDEASLMATFTPESVIDXRRDARPXIRQSRVPSLPEDAVGHXDAAPDRHTLRLPEHVMKELAADRRHRRAASLAGYPDSGRGRRGKQVLYYS

SEQ ID NO: 3389 - protein, 744 aa, Listeria monocytogenes
MKTVLGKTNVTDTVSQTDLDQVTTLQADRLGIKSIDGLEYLNNLTQINFSNNQLTDITPLKDLTKLVDILMNNNQIADITPLANLSNLTGLTLFNNQITDIDPLKNLTNLNRLELSSNTISDISALSGLTNLQQLSFGNQVTDLKPLANLTTLERLDISSNKVSDISVLAKLTNLESLIATNNQISDITPLGILTNLDELSLNGNQLKDIGTLASLTNLTDLDLANNQISNLAPLSGLTKLTELKLGANQISNISPLAGLTALTNLELNENQLEDISPISNLKNLTYLTLYFNNISDISPVSSLTKLQRLFFYNNKVSDVSSLASLTNINWLSAGHNQISDLTPLANLTRITQLGLNDQAWTNAPVNYKANVSIPNTVKNVTGALIAPATISDGGSYAEPDITWNLPSYTNEVSYTFNQSVTIGKGTTTFSGTVTQPLKAIFNAKFHVDGKETTKEVEAGNLLTEPAKPVKEGYTFVGWFDAQTGGTKWNFSTDKMPTNDIDLYAQFSINSYTATFDNDGVTTSQTVDYQGLLQEPTAPTKEGYTFKGWYDAKTGGDKWDFATSKMPAKNITLYAQYSANSYTATFDVDGKTTTQAVDYQGLLKEPKTPTKAGYTFKGWYDEKTDGKKWDFATDKMPANDITLYAQFTKNPVAPPTTGGNTPPTTNNGGNTTSPSANIPGSNTSNTSTGNSASTTSTMNAYDPYNSKEASLPTTGDSDNALYLLIGLLAVGTAVALTKKARASK

SEQ ID NO: 3390 - protein, 106 aa, Glycine max
MDMSNPSVFVNAQLIPNFIGKKVRAVVQVSQCDGGVTTAKSTDDCQLTIKGLPQVPLMNYIEVIGIAESNSSIDAEIWTDFGSTFDTFSYNQLCQLANGEFKGLFL

SEQ ID NO: 3391 - protein, 345 aa, Pseudomonas aeruginosa UCBPP-PA14
MSQSTQVNRRIVLASRPHGAPTRDNFRIEQVPLPEPGAGQVLLRTVYLSLDPYMRGRMSDAPSYAPPVELGAVMVGGTVSRVEASNHPGFKVGDWVLSANGWQDYALSDGSGLARLGESPEHPSYALGLLGMPGFTAYMGLLDIGKPQAGETLVVGAATGPVGATVGQIGKLKGCRVVGVAGGAEKCRHAVQVLGFDACLDHHAADFAERLAEACPDGIDIYYENVGGKVFDAVFPLLNAKARIPVCGIVAHYNDTDLPPGPDRLPALMGTILRKRIKVQGFIIFDDYGHRYDEFQRDMSKWFADGLIQYREERVDGLENAPEAFFGLLQGRNFGKLVVRVGADA

SEQ ID NO: 3392 - protein, 253 aa, Oryza sativa (japonica cultivar-group)
MGFLEDFQASVEALPAMLQRNYSLMRELDKSLQGVQTGNEQRCQQEIEDIKHGLESGSITYDPAKLKFSDEAIEEQKHCVRIADEKVALASQTYDLVDAHIQQLDQFMRKLEELRQEKEAATTAAAAAAAAAASVATGTPVAATVTASAGTSTADNTPKGGRSSERGRGGRKKTAKVPTEQPAPAIDLELPVDPNEPTYCLCNQVSYGEMVACDNNDCKIEWYHFGCVGVKEHPKGKWYCPSCIGFQKKRKGK

SEQ ID NO: 3393 - protein, 759 aa, Hordeum vulgare subsp. vulgare
MGIAAPPCQATRQHVSTPKSSAAIQDDGRPATASSMSHSQGFHQGSSGVYGFSSDGFDRPGSSQDQQHQEHDHVAQQSRRDKLRVQGFDPAAAGLLPIDGDQHVEPGAMYDHAAAAGASNMLAEMFNFSAQTPSGPSATELLASQMNANYRFGFRQQAPGAVAGLPGDGGWFGSAGPGRAGVVLGGANLLGETSSPKQQGGMAGLATDPAAAMQLFLMNPQQQQQSRSSPTSPPPSDAQSAIQHHEAFQAYGNAASSFGGGGAGVVEGQGLSLSLSPSLQQLEMAKQAEELRVRDGVLYFNRQQQQQQQQQAASVQQLPMALHGQVGSMGQQLHVGYGPAGVAGVLRNSKYTRAAQELLDEFCSVGRGQTIKGGGRGGSSSNPNASKGGPSSSGAAQSPSSASKEPPQLSPADRFEQQRKKAKLISMLDEVDRRYNHYCDQMQMVVNFFDSVMGFGAATPYTALAQKAMSRHFRCLKDAIAAQLRHTCELLGEKDAGTSSGLTKGETPRLRAIDQSLRQQRAFHHMGMMEQEAWRPQRGLPERSVSILRSWLFEHFLHPYPSDADKHLLARQTGLSRNQVSNWFINARVRLWKPMIEEMYQQETKELEGSSAAAGGGGGVGGPESGNDPSGADDLHSPTTTGSQQQLVIHHGGGRYGQQEHGMSGVHPHKLDPGAGPSVADAAFVGLDPAELLGGDAHVGAADDLYGRFEPGVRMRYGPATTGAVSGDVSLTLGLQHAGAGNQGPDGSGRFSLRDYNGC

SEQ ID NO: 3394 - protein, 149 aa, Halobacterium sp. NRC-1
MSDLSAQKRLAADVLDVGENRVWFDPDAQSEIADAITREDIRELVADGTIDAEDTQGNSRGRARERDAKESYGHKKGAGSRKGKAGARQNEKREYVAGIRAQRQQLRELRDDGTLSPAQYREMYNMANGGEFDSVRRLTNYVEENYGDS

SEQ ID NO: 3395 - protein, 152 aa, Zea mays
MVKAVAVLGNSENVGGTIYFNQEGNGPTTVTGSLSGLKPGLHGFHVHAMGDTTNGCMSTGAHFNPHGKEHGAPEDQNRHAGDLGNVNVGDDGTVSFTITDSQIPLTGPNSIIGRAVVVHADPDDLGKGGHELSKTTGNAGGRVACGIIGLQG

SEQ ID NO: 3396 - protein, 243 aa, Glycine max
  unsure (1)..(243): unsure at all Xaa locations
EAHTRFARHHVQPQLLAAERAFATEAAKSISPSADRVKWDYRGQRKIIPLGQWLPKVAVDAYVAXPNVVLAGQVTVWDGAFVWPGCVLPGDLNKDQRWVFGPNVQERSVIHAAWSSPTGLPADTSIERYVTIGAYSLLRSCTIEPECIIGQHSILMEGSLVETQSILEAGSVVPPGRRIPTGELWAGNPARFVRTLTHEEILEIPKLAVAINDLSRDHYSEFLPYSTVYLEVEKFKKSLGISV

SEQ ID NO: 3397 - protein, 523 aa, Yarrowia lipolytica
MIILYVLAVAVSFLIFKRVTYTMRSRELAKKWHCEEPHNLNEFPLNLPLFFLIINASRRHELLDTLLGLFRSFAPTKTVKQVLLGSFTIIPTNDPENIKAVLATQFKDFCLGQRHGQLAPVLGDGIFTLDGQGWQHSRAMLRPQFARDQVSDVEMIERHVQMMLLRIPNNKKFDIQELFFNLTLDTATEFLFGQTVGSQTVEMPNEDKSTVSDMPKDMRKSFQEDFNVAQHHGGIRTRFQMFYWLWRPTELFSSSKRVHAFVDHYVEKALANSDEEKSDDKYIFLRELAREVKDPRVLRDQALNILLAGRDTTAGVLSWIVYELARHPEVWKKLRAEIHQDFGDGSDLSQITFEGLKRCEYLRFVINETLRLYPSVPLNVRYASRDTTLPRGGGPDESKPILVRKGDTIVYNVFSMHRTEEFWGKDCDEFRPERWAEKGSRGWEYLPFNGGPRICLGQQYALTETSYVITRICQLFTNIENADTAVEPPQKLHALTLCHLNGVFVKMTRDEAAFAETEKLINA

SEQ ID NO: 3398 - protein, 99 aa, Glycine max
  unsure (1)..(99): unsure at all Xaa locations
VNAELLHFYVGRMVRIVVQVVRSDGGVVIXKSTDEKQLVCKRSRPPVAPLTTFDEVYGLVNSDKSIGAEIWTNFGDAIDMDSYNKLCQLANGEFKHLFL

SEQ ID NO: 3399 - protein, 175 aa, Tripsacum dactyloides
APLDKVCVLSCGISTGLGASINVAKPPKGSTVAVFGLGAVGLAAAEGARIAGASRIIGVDLNPSRFEEARKFGCTEFVNPKDHNKPVQEVLAEMTNGGVDRSVECTGNINAMIQAFECVHDGWGVAVLVGVPHKDAEFKTHPMNFLNERTLKGTFFGNYKPRTDLPNVVELYMKK

SEQ ID NO: 3400 - protein, 429 aa, Triticum aestivum
  unsure (1)..(429): unsure at all Xaa locations
MAQAVVPAMQCQVGVRGRSAVPARQPAGRVWGVRRTARATSGFKVLALGPETTGVIQRMQQLLDMDTTPFTDKIIAEYIWVGGSGIDLRSKSRTISKPVEDPSELPKWNYDGSSTGQAPGEDSEVILYPQAIFKDPFRGGNNILVICDTYTPQGEPIPTNKRHMAAQIFSDPKVTAQVPWFGIEQEYTLMQRDVNWPLGWPVGGYPGPQXGPYYCAVGSDKSFGRDISDAHYKXACLYAGIEISGTNGEVMPGQWEYQVGPSVGIDAGDHIWASRYILERITEQAGVVLTLDPKPIQGDWNGAGCHTNYSTLSMREDGGFDVIKKAILNLSLRHDLHIAAYGEGNERRLTGLHETASISDFSWGVANRGCSIRVGRETEAKGKGYLEDRRPASNMDPYTVTALLAETTILWEPTLEAEALAAKKLALKV

SEQ ID NO: 3401 - protein, 274 aa, Thermoplasma volcanium
MRNVLLIHGGAGSDPSYSGRLNSYASFASEEISALDNAVKAVVKMEDDPDFNAGTGSVPRLDGSIQMDAAVMIPGHFGSVINIERVKNPVLVARDVMAKSPHIMISGDGAVKFARLMGYPDYDPTTEKAKKLLQQFEEEAEKNEIPDKFKIYFKYVKPHDTVGAVARVEGEFAGAVSTGGSFPMVRGRVGDSPIPGAGIYVGEKGAVVATGIGEEIAKNILSFRIYNRIGEKRLYDIVKEEVDKFSVSVGIIAVDEKDYAYYANRPMAVGIKEF

SEQ ID NO: 3402 - protein, 514 aa, Vicia sativa
MFQFHLEVLLPYLLPLLLLILPTTIFFLTKPNNKVSSTSTNNNIITLPKSYPLIGSYLSFRKNLHRRIQWLSDIVQISPSATFQLDGTLGKRQIITGNPSTVQHILKNQFSNYQKGTTFTNTLSDFLGTGIFNTNGPNWKFQRQVASHEFNTKSIRNFVEHIVDTELTNRLIPILTSSTQTNNILDFQDILQRFTFDNICNIAFGYDPEYLTPSTNRSKFAEAYEDATEISSKRFRLPLPIIWKIKKYFNIGSEKRLKEAVTEVRSFAKKLVREKKRELEEKSSLETEDMLSRFLSSGHSDEDFVADIVISFILAGKDTTSAALTWFFWLLWKNPRVEEEIVNELSKKSELMVYDEVKEMVYTHAALSESMRLYPPVPMDSKEAVNDDVLPDGWVVKKGTIVTYHVYAMGRMKSLWGDDWAEFRPERWLEKDEVNGKWVFVGRDSYSYPVFQAGPRVCLGKEMAFMQMKRIVAGIVGKFKVVPEAHLAQEPGFISFLSSQMEGGFPVTIQKRDS

SEQ ID NO: 3403 - protein, 315 aa, Bacillus halodurans
MNHLLQTLGITRPFIQGGMGNVSHVSLAVAVSKAGGLGTIGVGTMEIEKMEQMIKEMHEKTPHPFAVNVPINVRPDLEAVISLIKDLHVPVVSLSAGNPAPFIPFFKDAGTKVICVVANVKQALKAEQHGADVIVAEGFEAAGLNSSEELTTFTLIPQIAKAVTVPLIAAGGVGNGAGLLAALSLGAQGVQMGTRLIATKEAQVHDSYKQALKEASANDTIIVGRSYGHRRRLLNTPYAQELLALELKGMSREDYFKKTDETHHIKGAIEGKLSEGHINAGQITALIDDIPTVQELFDEMIREARAQQEKLATLL

SEQ ID NO: 3404 - protein, 242 aa, Zea mays
MQGGRIPFAGQVQNYQTAVQTLVSILGDQDTASDHLSRCIFSVGMGSNDYLNNYFMPAFYNTGSRYTPEQFADSLIADYRRHLRVLYNYGARKVVMIGVGQVGCSPNELARYSADGVTCVDRIDDAIQMFNRRLVGLVDEFNALPGAHFTFINAYNIFDDILANAASYGFTVTNAGCCGVGRNNGQVTCLPYQAPCANRDQHIFWDAFHPSEAANIIVGRRSYRAESPNDVYPMDISTLASI

SEQ ID NO: 3405 - protein, 386 aa, Triticum aestivum
  unsure (1)..(386): unsure at all Xaa locations
RNSDLYHESLGIDMPNLKNLSDSKDXSEEAEHNETGMNGDQHFDEDLNELSPRAYSIKRIEDWISRIDIDSDIIVEEQGESSSSASTKYSESVISVSAVRPDAKSPLGMEIAYTYISKLTPVSSSAQLANLGLFAIPRLSAFSGLRLLNLSGNSIVRITAGALPKGLHMLSLSKNNISIIEGLRELTRLRLNYNRISRIGHGLASCSSLKELYLAGNKISEVDGLHRLLKLKVLDLRHNKISTSNGLGQLAANYNSLEAINLDGNPAQKNVGDQHLKKYLLGLLPNLAVYNKQPVRATGSKEVSDRHTRKISSSHRSDRSSRSDRKSSRLVAGTSSRHARPAHTSGPLVKQLRSRNMPMAALGSRPVEYAGAGVPAKQIQLEEKSQ

SEQ ID NO: 3406 - protein, 348 aa, Novosphingobium aromaticivorans
MRLAQRLGLRHPLIQAPMAGTSTPSLAAAVCEAGALGSVAVGAVDAGTARTMIADLRARTARPFNVNAFVHHRALRDLAAEQAWIAAMAPLFERFGAAPPAALNEIYRSLNDDPDMLAVLVEAAPAVVSFHFGLPTDEAIAALKARGCMLMASATSLAEAEAAVAAGMDAVVAQGFEAGGHRGVFDPEAPDERMPTLDLVRLLSSRLDVPVIAAGGIMDGADIRRALDAGADAAQLGTAFVGCPESAADAGYRAMLARAKGTTLTAAISGRPARCLDNDFVAWARDTDARVPGYPVTYDAGKALIAAAKGAGECGFGAHWAGTQFARARPMPAGELVMLLAQEAGFDA

SEQ ID NO: 3407 - protein, 407 aa, Rhodopseudomonas palustris
MSPVPLKNAEPAHGGVRTVSVLGATGSIGDSTMDLIRAEPERYQVEALTGNANVAGLAKLAKEFSARFVAVADPARLGELRAALAGTDVACGAGESAVIEAAARPADWVMAAISGAAGLKPALAAVDRGTTVALANKECLVCAGDFFMSRATAAGAQILPADSEHNALFQALASGNRHELTRVIITASGGPFRTWAAADIEQATLAQALKHPNWSMGQKITIDSASMMNKGLEVIEASYLFALSPDEIDVLVHPQSIVHGLVEFADRSVVAQLGAPDMRIPIAHCLGFPDRITGRAAKLDLAKIGQLTFEAPDFTRFPGLRLAYDALRTGNGATTVYNAANEVAVAAFIAQKIRFGAIARLVEDTLNSWVRAGNQAPLGSADDAIALDQQARNLAATLLPQIAAKAS

SEQ ID NO: 3408 - protein, 376 aa, Oryza sativa
  unsure (1)..(376): unsure at all Xaa locations
MGGDKENLDLSDLNASLPAAAAALSAEDRAGLVNALKDKLQSLAGQHTDVLEALSPNVRKRVEYLREIQGQHDEIELKFFEERAALEAKYQKLYEPLYTKRYNIVNGVVEVDGGNDEPASENAAXXAKGVRVPDFWLTAMKTNEVLSEEIQERDEPALKYLKDIKWARIDDPKGFKLDFFFDTNPFFKNSVLTKTYHMVDEDEPILEKAIGTEIEWYPGKNLTQKILKKKPKKGSKNAKPITKTEVCESFFNFFSPPQVPDDDEDIDEDTADELQGQMEHDYDIGTTIRDKIIPHAVSWFTGEAVQAEDFDDMEDDEEDDEDDDEDEEEEEEDEDEDEDDEEEKSKPKKKSAGKPKLPSKGGAQGGADQPADCKQQ

SEQ ID NO: 3409 - protein, 324 aa, Zea mays
  unsure (1)..(324): unsure at all Xaa locations
CEKESDLCLQLRILVWATSKHDIYLVSHYSIRHWSALSGVDTELINVQGHVAPREKHAGSLSEGFYQTQVSTLTVKDNLLVAGGFQGELICKHLDQEGISFCCRTTYDDNAITNAVEIFNTSSGAVHFMASNNDSGVRYYDMERFQLFKHFQFEWPVNHASLSPDXKVVVIVGDDPDGLLIDANSGKTVHSIKGHRDYSFASAWSPDGRTFATGNQDKTCRIWDVRNLSKSVHVLRGNLGAIRSIRFTSDGQFMSMAEPADFVHIYDVKSDYNKRQELDFFGEISGTSFSPDTDTLFVGVWDRMYGSLLQFGRLYNYSYLDSLF

SEQ ID NO: 3410 - protein, 459 aa, Pneumocystis carinii
MNAARRVTRQTATFNLNDENKLHGQISRVKQVSTQGLEGVNKPWTAATRKRAALGDVSNVHNKENQTAKTKTQPLSTKARVVTKTGVQSHQSKESVHTVPTGELRGEETTRKRRTSKVLTEQEVIIEVEQTQASKKVRTDGLLNGSVQEHPASQDWDDLDADDAHDPLMVSEYVEEIMGYMRELEVLTLPLPDYMDRQKELQWKMRGILVDWLIEVHAKFRLLPETLFLSVNIIDRFLSLRVCSLPKLQLVGITALFIAAKYEEVMCPSIQNFMYMADGGYTNEEILKAEQYVLQVLGYDMSYPNPINFLRRVSKADNYDIQTRTVAKYLMEISLLDHRFLPFVPSNIAASGIYLARIMVTGGNWNANLIHYSGYKESDLVPCSKMMLDYLSRSVIKHEAFFKKYASKKFMKASLFVRDWVKKHYDLEANVRLNTISFDYDNHESNEIHQDLEEEEGSL

SEQ ID NO: 3411 - protein, 150 aa, Glycine max
MAASSSEKQVVVIGIDDSEQSTYALNWALDNFFPSPIFKLVLIHSRPTATSAVGFAGPDSDLRKIGARVLETAKQLCINKSVNDVTAEVVEGDPRNVLCDAVDKYRAAMLVVGSHGYGAIKRAVLGSVSDYCAHHAHCTVMIVKKPKIKH

SEQ ID NO: 3412 - protein, 468 aa, Triticum aestivum
QTQQQKEHSNKQPARHRQRERSKCLQPPSHTPPHAPIHPHARPPGTLGPPAPRPRRRSGRGTARAGARAGGRGAGVCAGPSGPHASQQSNNQAKSRVPYRLAVATQRDRRKSLSFSHRLAQHTTAPTTSTSHKHALARWAIAIHGGAGVDPNLPEHRQEEAKRVLARCLQVGVDLLRAGATALDVVEAVVRELETDPCFNSGRGSALTRAGTVEMEASIMDGRGRRCGAVSGVSTVKNPVSLARRVMDKSPHSYLAFDGAEDFAREQGLEVVDNSYFITEENVGMLKLAKEANSILFDYRIPLAGTDTCSAQAAAVEGHGSNGMVMNGLPISIYAQETVGCAVVDSNGFTAAATSTGGLMNKMTGRIGDSPLIGAGTYACGHCAVSCTGEGEAIIRSTLARDVAAVMEYKGLPLQEAVDFCVKERLDEGFAGLIAVSGTGEVAYGFNCTGMFRGCATEDGFMEVGIWD

SEQ ID NO: 3413 - protein, 447 aa, Streptococcus pyogenes MGAS8232
MASNHMNEQEREQAKFSLSGATLYGINAVIGSGIFLLPRAIYKGLGPASIAVMFGTAILTIMLAVCFAEVSGYFGKNGGAFQYSKRAFGDFIGFNVGFLGWTVTIFAWAAMAAGFARMFIITFPAFEGWHIPLSIGLIILLSLMNIAGLKTSKIVTITATIAKLIPIVAFCVCTLFFIKNGLPNFTPFVQLEPGTNLLGAISNTAVYIFYGFIGFETLSIVAGEMRDPEKNVPRALLGSISIVSVLYMLIIGGTIAMLGSQIMMTNAPVQDAFVKMVGPAGAWMVSIGALISITGLNMGESIMVPRYGAAIADEGLLPAAIAKQNQNGAPLVAILVSGAIAIVLLLTGSFENLAKLSVVFRFFQYIPTALAVMKLRKDAPDANVIFRVPFGPIIPILAVIVSLVMIWGDNPMNFVYGAVGVIIASSVYYLMHGRNHQMDQMPPEEQI

SEQ ID NO: 3414 - protein, 392 aa, Hiraea fagifolia
DLEPVNPADVPVTAAGALKSYKLAAKAISRLQSLPSGNISLLCDVLVKEVRDLTGYDRVMVYKFHEDEHGEVVSECRRPDLEPYLGLHYPATDIPQASRFLFMKNKVRMICDCLAPPVKVIQDKRLPQPLSLCGSTLRSPHGCHAQYMTNMRTIASLVMSVTINEDDDTMDGDQQQMTRKLWGLGCCHHTSPRFVPFPLRYACEFLIQVFGVQINKEVELAAQVREKHILQIQTMLCDMLLRDAPVAIITQSPNVMDLVKCDGAALYFKNKIWLLGVTPKEEQIRDIAEWLLEYHSGNTGLSTDSLMEAGYPGASVLGDAVCGMAAASITSGDFLFWFRSHTAKEIKWGGAKHEPGDKDDGRKMHPRSSFKAFLEVVKWRSMPWEDVEMDAI

SEQ ID NO: 3415 - protein, 281 aa, Gossypium hirsutum
MQLETYWMLQMKAVTSVRKCEVSSLGFSFNLYINTCRVKTFVTLKRNLTMAKSDAEVKVLGTWASPFVMRVRIALNIKSVAYEFLQERLWEGKSELLLKSNPVHRKVPVLIHGDDTICESLIIVQYIDEVWPSVPILPSDPHERAAARFWAAYLDDKWFPSLRAIGMAEGEDARKAAIGQVEEGLMLLEEAFGKCSQGQALFGKDQIGYLDITFGCFLGWLRVTEKMSGIKLLNEINTPALLKWANRFCNDAAVKDVMPETEKLAEFAKMLRGRVRATPTS

SEQ ID NO: 3416 - protein, 424 aa, Schizosaccharomyces pombe
MAKGAVKKEKFEYEFFGPIGALGVTVLTTVVSFGSFYICNEEGCPAKFSKISHIFKKTPLFDQKSLILYLLWFSTLTLLWKCTNGKWAKGTPIDDKGTRLLYKINGFNSACLILGVVCTSIYLLGASCMEFIWDNFLQLMFAAYVFSVVLCTFCYVQSFFGKQQLAKGGTSGNILFDWFIGRSLNPRIGNFDIKCFCELRPGLILWVVFDIAFACHQYLVLGGRITDSMVLVIIFHTWYVLDSLINESAVLTTMDITTDGFGYMLSFGDLVWVPFLYSLQARYLAFHPVDLGLVKTLAILCLQFLGYYIFRGANGQKNRFRSNPNDPKLKHLKFIQTKRGTKLLTSGWWGMARHINYFGDWIMAWAWCLPAGFGSPIPYFYVAYFGVLLVHRNARDDHKCRVKYGEDWEKYCKAVKYRIIPYVY

SEQ ID NO: 3417 - protein, 156 aa, Nicotiana sylvestris
MAEVEYRCFVGGLAWATTDQTLGEAFSQFGEILDSKIINDRETGRSRGFGFVTFKDEKAMRDAIEGMNGQDLDGRNITVNEAQSRGSGGGGGGGGYRGGSGGGYGGGGRREGGYGGGGGYGGGRREGGYGGGGGGGYGGGRREGGYGGGSEGNWRS

SEQ ID NO: 3418 - protein, 259 aa, Zea mays
ACSIYKVFELKNYSFLYSIPDENVQEIKISPGIMLLIYDRTPSYVPLKILSIEDGKQLKSFKHLLHRNKKIDFIEQFNEKLLVKQENENFQIFDVRSSELIEVSVSKFMTPSAFIFLYENNLFLTFRNRTVAVWDFRGELVTSFEDHLLWHNDCSTNNIYITSDQDLIISYCKSEAVAEDGTVGSINISEIMTGRCIAKITANDPSLSVPGRRNGYSKRSSDWSTVPEALEDVTALFYDEDRNEIYTGNSHGLVHVWSN

SEQ ID NO: 3419 - protein, 444 aa, Leuconostoc mesenteroides subsp. mesenteroides ATCC 8293
MSKNKEILEEEKIHLANATRVKYFDIVIDHGKGAIITDADGHEYIDLLASASATNTGHSHPKVVEAITSQAQKLIQYTPAYFANTVTAKLADRLVNVAPGNFQKQVAFGNSGSDANDAIIKFARGYTGRQYVVSFTGAYHGSTYGSLSISGVSLNMTRKIGPLLPNTVKVPFPDQTQRIAGESDNDFSERLFKQFKLPFETYLPADEVALVIIEPIQGDGGIIKAPQHYVELVYEFTREHGIVFAVDEVNQGLGRTGKMWSIDHFGIAPDLMSVGKSIASGLPLSAVIGRKEIMDSLQAPANVYTTAGNPVTAAAALATLDVIEEENLVARSRQLGELAKAFFESAAKRYAFIGDVRLYGLNGGIDIINDHGEPDNEATNKLIYRIFELGAIMISLRGNTLRFQPPLVIQEEELQRAFEILEKAFSDLASGKIALPKTDNHIGW

SEQ ID NO: 3420 - protein, 252 aa, Prochlorococcus marinus subsp. marinus str. CCMP1375
MSIFVGNLPFRAEQEDVIQLFAPYGEVANCSLPLERDTGRKRGFAFIEMADEAAEAAAIEALQGAELMGRPLRINKAEPRGGGGGGRGGGYGGGGRGGYGGGGGYGGGGGYGGGGYGGGGGQGGYGGGGQGGYGGGGQGGYGGGGQGGYGGGGQGGYGGGGQGGYGGGGQGGYGGGGQGGYGGGGQGGYGGGGQGGYGGGQDTEQRASGAQGWEDRSYGSSDSSERDDTRSKRRRGASSEADQDADYGGAEG

SEQ ID NO: 3421 - protein, 367 aa, Triticum aestivum
  unsure (1)..(367): unsure at all Xaa locations
MGKGGKGEAAAAVAGEGENMAAWLVAKNTLKIMPFKLPPLGPYDVRVRMKAVGICGSDVHYLKEMRIAHFVVKEPMVIGHECAGIIEEVGDGVKHLAVGDRVALEPGISCWRCRHCKGGRYNLCDDMKFFATPPYHGSLADQIVHPGDLCFKLPDNVSLEEGAMCEPLSVGVHACRRADVGAEKSVLIMGAXGPIGLVTMLXARAFGAPRIVIADVDDHRLSVAKSLXGADAVVKVSGNTEDLAGEIERIQAAMGGDIDVSLDCAGFSKTMSTALEATRPGGRVCLVGMGHNEMTVPLTSAAIREVDVVGIFRYKDTWPLCLEFLRSGKIDVKPLITHRFGFSQGEVEEAFEVSARGRDAIKVMFNL

SEQ ID NO: 3422 - protein, 330 aa, Triticum aestivum
MEEVFSSNSKSKAGQMAGEAIAGAEKKPRPKPEQKVECPRCKSGNTKFCYYNNYSMSQPRYFCKACRRYWTHGGSLRNVPIGGGCRKPKRSGTSDAHKLGVASSPEPTTVVPPSTCTGMNFANVLPTFMSVGFEIPSSLSLTAFGSSSSSNTAAMMSPGGTTSFLDVLRGGAGGLLDGSLSQNNGYYYGGPAIGSGNGMLMTPPAVSFGIPVPMQQHGDLVVGGNGIGAATASIFQGATSEEGDDGMGGVMGLQWQPQVGNGGGGGGVSGGVHHLGTGNNVTMGNSNIHNNNNNDSGGDDNNGGSSRDCYWINNGGSNPWQSLLNSTSLM

SEQ ID NO: 3423 - protein, 185 aa, Fusobacterium nucleatum subsp. vincentii ATCC 49256
MLRDREAILTFVDEVEKEYGKIDILVNNAGITKDGLLMRMTEDQWDAVINVNLKGVFNMTQAVSRSMLKARKGSIITLSSVVGLHGNAGQTNYAATKGGVVAMSKTWAKEFGGRNVRANCVAPGFIQTPMTDVLSEDTIKGMLDATPLGRLGQVEDIANAVLFLASDESSFITGEVISVSGGLML

SEQ ID NO: 3424 - protein, 162 aa, Triticum aestivum
MAAARTYVDFVPSHELVEDAAKQTLVVNLPGFKKEHLRVQIDNYGRLRVSGERPLEGGQWSRFRKEFQVPEGCNAGGIRARFEKDGVLHVIMPRLTPLEDASKSAADHEAEAARHAAAAEEKKRHEEMEEDARKRRAGDEDDYASDDGEGARQPASAGRQAY

SEQ ID NO: 3425 - protein, 94 aa, Zea mays
VLGILAMIDEGETDCKVIAINVDDPDAANYNDINDVKRLKPGYLEATVDWFRRYKVPDGKPENEFAFNAEFKDKDFAIDIIKSTHDHWKALVTK

SEQ ID NO: 3426 - protein, 202 aa, Glycine max
MLYTAQHFVNNSVTLSNNFFAAMASHSAATERTYKESFDSAANKLYADHIIPHILHLYGSCATSRDFEIYAAHASYEDPLMCAHGVKQIKSAFYTLPKVFKESKIVEYSIKENMVSPGKGEILIDNKQYYKFLGKDINMVSLIKLYIEEGKVVRHEDWWEKKPISNRETVKLPLLGRIAEMTRRGSMLATHVLMRFGKDPNV

SEQ ID NO: 3427 - protein, 400 aa, Sulfolobus tokodaii
MITIGLIGKTNVGKSTFFSAATLIDVPIANRPFVTIEPNVGIAYVKKKCVHVEFGVKCNPKNSICIGDYRFIPVKLVDVAGLIPGAHEGRGLGNKFLDDLRKADVLIHVIDASGSTNEEGIPVAPGSRDPEEDISFIEKEIEEWFYSIISKDWQKFARTVDLSNKDPIDELLSKLSGLSINKYHIIETLRETKLENLKLMQWSEEDLRNFARKLREISKPIVIAANKADIPESRKFIEKLKRKYNYVIPTSAEAELALRKASKAGIIEYIPGEKDFKILKELNPKQKEALDYIKKNVLEIYGSTGVQEALNTAVFGALSMIVVYPVEDEKKLTDHNGNILPDAILIKKGSSPKDLASVIHSELAKGFLFAINVKKKVRVGEEYQLQDGDVIKIVSSTARP

SEQ ID NO: 3428 - protein, 381 aa, Triticum aestivum
  unsure (1)..(381): unsure at all Xaa locations
RAAFFLSSPLSDFGGAAISISAQNRRRSWQPRGARMQVAAAADSKNILIMGGTRFIGLFLSRXLSKEGHQGGHCSPRGKAPITQQXQVNQDAEYTKFSSKVLHLKGDRKDFDFVKDSLVAXGYNVVYDINGREAXNDIPILEALPNMEXQFIYSASAGVXFKSELLPHLRRPDTIGAPKRRHKGKVXTKRQLGTTETNWRRVRRGXIYGPLNQYPVDERFFHKLKXGRPIPIPNARETRTPHLRDHVNGFGXTAFINGASTTPTLSKQVYNIXGSKYVPFDGLXARACAKAGGFXEPEIXHYNPKDFDFGQEEGLIPFRXQHFLASVGEXSKDRRGYAGSADLLDGLTDXSYNLDFGRGTSMKAAAGTTHDMILTQEARER

SEQ ID NO: 3429 - protein, 182 aa, Zea mays
  unsure (1)..(182): unsure at all Xaa locations
MNRKPGDWDCRACQHLNFSRRDICQRCSEPRGVADRGGGGGGGDYASFGGRGGSSFGGGFGAAGSDVRPGDWYCSCGAHNFASRSSCFKCSAYKEEAAVNSGAGGFDGDMSRSRGYGFGSGAAGAGAGAARTXTAPGWKSGDWICTRSGCNEHNFASRMECFRCNAPRDSGSAAMTYENYLH

SEQ ID NO: 3430 - protein, 1122 aa, Armoracia rusticana
MSGSRPSQSSEGSRRSRHSARIIAQTTVDAKLHADFEESGSSFDYSTSVRVTGPVVENQPPRSDKVTTTYLHHIQKGKLIQPFGCLLALDEKTFKVIAYSENSPELLTMASHAVPSVGEHPVLGIGTDIRSLFTAPSASALQKALGFGDVSLLNPILVHCKTSAKPFYAIVHRVTGSIIVDFEPVKPYEVPMTAAGALQSYKLAAKAITRLQSLPSGSMERLCDTMVQEVFELTGYDRVMAYKFHEDDHGEVVSEVTKPGLEPYLGLHYPATDIPQAARFLFMKNKVRMIVDCNAKHARVLQDEKLSFDLTLCGSTLRAPHSCHLQYMANMDSIASHVMAVVVNEEDGEGDATDSTTQPQKRKRLWGLVVCHNTTPRFVPFPLRYACEFLAQVFAIHVNKEVELENQIVEKNILRTQTLLCDMLMRDAPLGIVSQSPNIMDLVKCDGAALLYKDKIWKLGTTPSELHLQEIASWLYEYHTDSTGLSTDSLHDAGFPKALSLGDAVCGMAAVRISLKDMIFWFRSHTAGEVRWGGAKHNPDDRDDARRMHPRSSFKAFLEVVKTRSLPWKDYEMDAIHSLQLILRNAFKDGESTDVNTNIIHSKLNDLKIDGIQELEAVTSEMVRLIETATVPILAVDSDGLVNGWNTKIAELTGLPVDEAIGKHLLTLVEDSSVEIVKRMLENALEGTEEQNVQFEIKTHQSRADAGTISLAVNACASRDLHENVVGVCFVAHDLTGQKTVMDKFTRIEGDYKAIIQNPNPLIPPIFGTDEFGWCTEWNPAMSKLTGLKREEVIDKMLLGEVFGTQKSCCRLKNQEAFVNLGIVLNGAVTSQESEKVSFAFFTRGGKYIECLLCVSKKLDREGVVTGVFCFLQLASHELQQALHVQRLAERTALKRLKAIAYIKRQIRNPLSGVMFTRKMMEGTELGPEQRQILHTSALCQEQLSKVLDDSDLESIIEGCLDLEMKEFSLNEVLTASTSQVMMKSNGKSVRITNETGEEVMSDTLYGDSIRLQQVLADFMLMSVNFTPSGGQLTVTASLRKDQLGRSVHLAYLEIRLTHTGAGIPEFLLNQMFGTEEDVSEEGLSLMVSRKLVKLMNGDVQYLRQAGKSSFIISAELAAANK

SEQ ID NO: 3431 - protein, 233 aa, Zea mays
MMAEAWTPVLLPATAPCFWQQDTHSVLWRRGDAWTVEENKLFEKALAQIDRNAPDRWEKVAAVLPWKTVDDVRSQYHALEKDVGVIEAGGLVPFPRYSGSVPPPSGFALEDWGGGDRGFRRARGSEEMQERKKGVPWTEEEHKLFLMGLRKYGRGDWRNISRKYVTTRTPTQVASHAQKYFIRLSSGGKDKRRSSIHDITTVNLPGDAPRSSPPAATTNPSAGALVVDVKPFV

SEQ ID NO: 3432 - protein, 186 aa, Triticum aestivum
  unsure (1)..(186): unsure at all Xaa locations
MMREMYMDVLPPVDHIAARSNWFPAAARLWTAEENKRFESALAGLDLCHPDWEKVAQAIPGRTVREVVSHFKNLQLDVQQIESGQVPLPVYGSGASSFTLQWDGNGGYGPGDFRHGYRFGGGCGKRHHGRTPEQERKKGVPWTEEEHKLFLLGLKKYGKXGDWRNISRNFVQTRTPTQVASHAQKY

SEQ ID NO: 3433 - protein, 437 aa, Brassica napus
MKGVRKTYDNSYTLSSLFVFFVLIILRPIFSTTTLSSTESLTISSNRTLVSPGNIFELGFFNTTSSSRWYLGIWYKKISERSYVWVANRDNPLSNAVGTLKISGNNLVLLGHSNRSVWSTNLTRENERSPVVAELLANGNFVMRDTNNNRSSRFLWQSFDYPTDTLLPEMKLGYEPKTGLNRFLTSWRSSDNPSSGDFSYKLEARRLPELYLSSGIFRVHRSGPWNGIRFSGIPDDKKLSYLVYNFTENSEEVAYTFLMTNKSIYSRLTVSFSGYLERQTWNPTLGMWNVSWSLPFDSQCDSYRMCGPYSYCDVNTSPICNCIQGFIPSNVEQWDQRVWANGCIRRTRLSCSGDGFIRMKNMKLPETTMATVDRSIGVKECEKKCLSDCNCTAFANADIRNGWTGCVFWTGRLDDMQNYVTDHGQDLYVRLAAADLV

SEQ ID NO: 3434 - protein, 434 aa, Brassica napus
MGKENVVSRPLTRAFASALRASTTENQQRANTKRPASEDVNVTAPPNKKKKRAVLGDISNASFSAAKLEARDIKQVKKSQGLASASCVTSEVTDLQSGTEAKAEVVSVTAGNTNDTADNCIEKHKLPPRPLGRSSASIVEKSGVIRSSTALDLPKFTDIDSDDKDPLLCCLYAPEIYYNLRVSELKRRPVPNFMERIQKDVTQSMRGILVDWLVEVSEEYTLVPDTLYQTVYLIDWFLHGNYLERQRLQLLGITCMLIASKYEEINAPRIEEFCFITDNTYTRDQVLEMENQVLAHFSFQIYTPTPKTFLRRFLRAAQASYLIPRRELECLASYLTEVTLIDYHFLKFLPSVIAASAVFLAKWTLDQSNHPWNPTLEHYTTYKASDLKASVHALQDLQLNTKGCPLSAIRMKYKQEKFKSVAVLMSPKLLDTLF

SEQ ID NO: 3435 - protein, 337 aa, Pseudomonas fluorescens PfO-1
MSYRTLGHSGLQVSALTLGTMMFGEQTSAEDSLRIIDKAWDQGINFIDTADVYTNGRSEEIVGEAIARHRHEWVLATKVGFGPVDGVPNRSGLSRKHIFNGLEASLTRLGTDYLDIYYLHREDHNTPLEVTISAIGDLIRQGKIRYWGLSNYRGWRIAEVIRVADKLGVDRPVISQPLYNIVNRQAETEQITAAQTYGLGVVPYSPLARGVLSGKYAPDVTPDANSRAGRQDKRILETEWRVESLRIAQQIQQYTRERGVGIVEFAIAWVLNNGAVTSAIVGPRTEEQWDAYTKAQAVKITAEDEAFIDSLVTPGHASTPGFNDVSHFVSGRKPRSA

SEQ ID NO: 3436 - protein, 305 aa, Miscanthus transmorrisonensis
IESVGEGVTDVAPGDHVLPVFTGECKECPHCKSAESNMCDLLRINTDRGVMIGDGKSRFPINGKPIYHFVGTSTFSEYTVTHVGCVAKINPQAPLDKVCVLSCGISTGLGASINVAKPPKGSTVAIFGLGAVGLAAAEGARIAGASRIIGVDLNPSRFEEARKFGCTEFVNPKDHKKPVQEVLAEMTNGGVDRSVECTGNINAMIQAFECVHDGWGVAVLVGVPHKDAEFKTHPMNFLNERTLKGTFFGNFKPRTDLPNVVELYMKKELEVEKFITHSVPFAEISKAFDLMAKGEGIRCIIRMEN

SEQ ID NO: 3437 - protein, 362 aa, Xylella fastidiosa 9a5c
MGMASLAAAPLIGALSAGTARAQSAAAARAIGSGNYKHLGRTGLKVSRIALGCMNFGELTDEPNSFRIMSEALDSGVNLFDTADVYGGPQTPDMEKGFGTSEEYIGRWLAQDKSRRDRIVLATKVYQPMGTGPNDKYLSAYHIRRACEASLKRLKTDHIDLYQMHHVDRSTPWQEIWQAMEQLVREGKITYVGSSNFAAWDIARAQGVAESRNFLGLVSEQSLYNLIQRTIELEVIPAVRELGIGLIPWSPIGMGLLGGVLGKITEGRRATPGLQAQIQKFRPQLEAYEALCRELGQPPAVVALAWVIHNPVVTAAISGPRTVEQMRENLKALSLNLSSETLAKLDEIWPGPGGEAPKAYAW

SEQ ID NO: 3438 - protein, 210 aa, Triticum aestivum
  unsure (1)..(210): unsure at all Xaa locations
MAGTSSWSSSSSCASSSGSPDHDVVCVTEPDSVGAAGAVADAEGSVKFLCSYGGRILPRRTDGTLRYVGGDNRVLSVDRPIRFYVLQRKLRELCGGWEAXLRCQLPTEDLDALISVTCDDDLAKLLEEYDEASKDRLQSLKIRAFLFPTRTPAPSILQRRSPPSIAHLHWQNTSPPPAAAGVSLTCAPRWWAAPQASRQAQNYDRHSLGE

SEQ ID NO: 3439 - protein, 151 aa, Triticum aestivum
  unsure (1)..(151): unsure at all Xaa locations
MAGMGEMSMRPRPGPPMHRGPPPMARPRPEPIDREKTCPLLLRVFTKVGGHHLNEEFSERGKEPKDEVQIYTWKDATLRELTDLVKEVALPARKRNARLSFAFVYPDKNGRFVVKQVGSTFSYGHGRGDDAKSLWGSLXFQIGDYLSVSIM

SEQ ID NO: 3440 - protein, 391 aa, Glycine max
MASRVSIGNLTSSAPYINSPHFRSPLKISNNPSLQNASHKVLMRDKTVLVTGGAGYIGSHTVLQLLLGGFRAVVLDNLENSSEVAMHRVRELAGEFGNNLSFHKVDLRDRAALDQIFSSTQFDAVIHFAGLKAVGESVQKPLLYYNNNLTGTITLLEVMAAHGCKKLVFSSSATVYGWPKEVPCTEEFPLSAMNPYGRTKLIIEEICRDVHCAEPDCKIILLRYFNPVGAHPSGYIGEDPRGIPNNLMPFVQQVAVGRRPALTVFGNDYNTSDGTGVRDYIHVVDLADGHIAALLKLDEPNIGCEVYNLGTGKGTSVLEMVRAFEMASGKKIPLVMAGRRPGDAEIVYASTKKAERELKWKAKYGIDEMCRDQWNWASKNPYGYGDQGSTD

SEQ ID NO: 3441 - protein, 245 aa, Aleurites moluccana
ALSIAGAVQSQKLAVRAISRLQSLPGGDIKLLCDTVVECVKELTGYDRVMVYKFHEDEHGEVVAESKRPDLEPYIGLHYPSADIPQASRFLFKQSRVRMIVDCHATAVSVIQDEALMQPLCLVGSTLRAPHGCHAQYMANMGSIASLAMAVIINGNDEEAIGGRNSMRLWGLVVCHHTSARSIPFPLRYACEFLMQAFGLQLNMDLQLASQFSEKHVLRTQALLCDMLLRDSPTGIVTQSPSIMD

SEQ ID NO: 3442 - protein, 265 aa, Oryza sativa (japonica cultivar-group)
MGRGKIEIKRIENKTSRQVTFCKRRNGLLKKAYELAILCDAEIALIVFSSRGRLYEFSNVNSTRSTIERYKKASASTSGSAPVIDVNSHQYFQQEAAKMRHQIQTLQNANRHLIGESIGNMTAKELKSLENRLEKGISRIRSKKHELLFSEIEYMQKREADLQNENMFLRAKVAEAERAEHDDQQAAEDDEMAPAPAVGGGSSSGTELEALPATFDTREYYQPAPPVSMLAAAAAAAAAQYSSDHHQTALHLGYFKVDSGKGGLL

SEQ ID NO: 3443 - protein, 263 aa, Streptomyces avermitilis MA-4680
MTEATEQTSCRRLVGRTAVITGAGSGIGLATARRLASEGAHVVCGDIDEVSGKAAADEVGGTFVQVDVTDAEQVEALFRTAYDTYGSVDIAFNNAGISPPDDDSILETGLEAWKRVQEVNLTSVYLCCKAAIPYMRRQGRGSIINTASFVARMGAATSQISYTASKGGVLAMSRELGVQFAREGIRVNALCPGPVNTPLLQELFAKDPERAARRLVHIPVGRFAEADEIAAAVAFLASDDSSFVNATDFLVDGGISGAYVTPL

SEQ ID NO: 3444 - protein, 459 aa, Rhodopseudomonas palustris
MSIQVADSSLVARLSPPKPSALAHVPGDEGWPIIGRTLAVLADPKGEVEKMARTYGPVYRSRVLGETSITLLGPEANELVLFDNTKLFSSTHGWGPILGRLFPRGLMMLDFDEHRLHRRTLSVAFKAGPMQSYLAELNAGIAHRVAEWRARPGEMLCYPAMKQLTLDLAATSFLGTAIGAETEEVNRAFIDMVAASVAPIRKPWPGTAMARGVKGRQRIVAYFAEQIPIRRAKGGDDLFSQLCRATHDDGALLSNQAIIDHMSFLMMAAHDTLTSSLTSFVAALAAHPEWQQKLREEIAGLGLKPGEPISFEQLDALPLTEMAFKEAMRLRPPVPSLPRRATRAFSFKGYTIPAGTMVAVNPLFTHHMPEIWPNPDQFDPLRFTDEASRGRHRFAWIPYGGGAHMCLGLNFAYMQAKCFAVHLLQHLDLSLPPNYQASWQMWPIPKPKDGLRVNVAPLN

SEQ ID NO: 3445 - protein, 131 aa, Oryza sativa
  unsure (1)..(131): unsure at all Xaa locations
XDIHSFNAXXACIGKRKKTEEACNVFQHLVSLGVKPNATTYGLLVDTHLVNRDAKAALAVIAEMVDAGFTPSKEPLKKVRRRCSRESDFDSAEKVQSLAKQFNSRMGGENRREMLFTIEYSAEFASTPSPS

SEQ ID NO: 3446 - protein, 645 aa, Leptospira interrogans serovar lai str. 56601
MKTATIPKIQSKTLYNVMKASAETFADSTAQYYKPDGKNYQANSFKNLYETVQQIGCGLISLGIEPGTPIGLIADSGARWLWCSMGITNIGCADVPRGTDSTSDDLRYILNHAECSITFLENETALKKVLSQKSEFPHLKKIILFDQKGTLEDTKSFEIILLNDLIEKGKTWIQNKGKDEFHKRGSAIREEDLATIVYTSGTTGKPKGVMLTHKNIVFNVDSALQGEDLNVYPTDRSMAYLPPWHIAERLVETVCIRAGGAEAFTSISSLSQDLADIKPTLLLSVPRVWESLYNKIHDKVRNSSPVQQALFGAFKEIAITYYKHLSRLQNLEYSLTEQSTFASLWQKLISFWIVILLWIPNQISQLAFNKIKQGLGGELKFALSGAGALPQYIDTFFNAIGIPILEGYGMTELSGISTRRILGEITVGTLGRCIPGVQIKLMDEKGNEITKPGIKGIAWHKGDHVMKGYYKEPEKTKEILSSDGWLNSGDLLTWTTSGELKYSGRAKDTIVLLGGENLEPEPIEFALVRSRFIQQAMVIGHDQKTLGALIVPDREILEKYLKESKSKMLNEIENLNGDLDIVALFKNEIKTFVSSENGFKNFEKVSNFRILNKKFEPGDELTQTMKIKRNVVTDKYKKEIEEMYQ

SEQ ID NO: 3447 - protein, 481 aa, Vicia faba var. minor
MVVEKNASNNHHQTFYVSIDQQIDSKFFDDDGRVKRTGTSWTASAHVITAVIGSGVLSLAWAIAQLGWIAGPIVMFLFAWVTYYTSVLLCECYRNGDPVNGKRNYTYMEVVHSNLGGFQVQLCGLIQYLNLVGVAIGYTVASAISMMAIVRSNCFHRSGGKDPCHMNSNIYMIAFGAVQIIFSQIPDFDQLWWLSIVAVVMSFTYSTIGLGLGIGKVIENKKFAGTITGINDVTKAQKTWGSLQALGDIAFAYSFSMILIEIQDTIKAPPPSESKTMKKATLISVIVTTFFYMLCGCFGYAAFGNSSPGNLLTGFGFYNPFWLLDIANAAIVIHLIGAYQVYCQPLFAFVENYTAKRFPDSDFVNKDVKIPIPGLDRYKLNLFRLVWRTVYVILTTLISMLLPFFNDIVGLLGAIGFWPLTVYFPVEMYIIQKKIPKWSTKWICLQLLSGACLIITIAATIGSIAGLILDLKVFKPFKTIY

SEQ ID NO: 3448 - protein, 436 aa, Oryza sativa (japonica cultivar-group)
MVLDLNVESPGGSAATSSSSTPPPPPDGGGGGYFRFDLLGGSPDEDGCSSPVMTRQLFPSPSAVVALAGDGSSTPPLTMPMPAAAGEGPWPRRAADLGVAQSQRSPAGGKKSRRGPRSRSSQYRGVTFYRRTGRWESHIWDCGKQVYLGGFDTAHAAARAYDRAAIKFRGLDADINFNLNDYEDDLKQMRNWTKEEFVHILRRQSTGFARGSSKYRGVTLHKCGRWEARMGQLLGKKYIYLGLFDSEIEAARAYDRAAIRFNGREAVTNFDPSSYDGDVLPETDNEVVDGDIIDLNLRISQPNVHELKSDGTLTGFQLNCDSPEASSSVVTQPISPQWPVLPQGTSMSQHPHLYASPCPGFFVNLREVPMEKRPELGPQSFPTSWSWQMQGSPLPLLPTAASSGFSTGTVADAARSPSSRPHPFPGHHQFYFPPTA

SEQ ID NO: 3449 - protein, 364 aa, Moraxella catarrhalis
MTNTGTTDMKNIDTSPSNSEHYLPKKILVTGGAGYIGSHTLIELIQAGFVPVVYDNLSNSSFVAVQRVEQIVGKHIEFIQGDVLDKTHLDAVFKAHQFFAVVHFAGLKAVGESTKNPLKYYQNNVVGTLSLLELMAKYGVKNCIFSSSATVYGSSNRLPITEDMPRFCTSPYGQSKLMVEHILEDLVNADDTWNVVCLRYFNPIGAHESGRIGEDPTDIPNNLMPYISQVAVGNLKQLSVFGNDYETPDGTGVRDYIHVVDLAKGHVAALHYLVGQSVGIGFCPINLGTGQGTSVLQLIKAFESNTGQSVPYVITSRRTGDIAAYYASADKAKAILNWTAELDIERMCVDTWRWQSNNPKGYLS

SEQ ID NO: 3450 - protein, 468 aa, Methanosarcina acetivorans C2A
MSEHYESASLVKTLRPFHVWALGVGIVLVGEYMGWNFTVAKGGVLGSLLAMLVAGTMYVIISLCASELGAATKLAGGPYDWARLFIGPGAAASVGLAVYMEYIALEAADAIVVAFIAQSIFPELQVFPVTLLVIALLTFINYRGVVAALTLNFFLTMIAFISIVVFFFATAFGGVDIHPEYLFHGALPNGMIGLFAALQFGPWFYLGIEGAAMCAEECKHPSRAVPLGQQAGMITLLVGAAMTLYLCSVLIPTDQLGVSVYPLFEAAQNSGMFIFIALLGLGTFLTCVASANGCVCDSSRSWFALSRDNYVSSWFSAVHPRYNTPYRAVIFTMPVAIGFAFSGFLDQVITFSIVSGLLCYVLIPFALIRFRSLFPQNTSTIRPFVSPLQPYIAYFAIAIAITILSTLYWGYKYNLIFAFVFYGIAYFYFSHRHRSLNIENNWTEMGWPLPRGSENTGIRKEATGIGDE

SEQ ID NO: 3451 - protein, 313 aa, Zea mays
MQLDLNVAEAPPPVEMEASDSGSSVLNASEAASAGGAPAPAEEGSSSTPAALEFSILIRSDSDAAGADEDEDATPSPPPRHRHQHQQQLVTRELFPAGAGPPAPAPRHWAELGFFRADLQQQQAPGPRIVPHPHAAPPPAKKSRRGPRSRSSQYRGVTFYRRTGRWESHIWDCGKQVYLANRFSGEFFVMAYDRAAIKFRGVDADINFNLSDYDDDMKQMKSLSKEEFVHALRRQSTGFSRGSSKYRGVTLHKCGRWEARMGQFLGKKYIYLGLFDSEVEAARAYDKAAIKCNGREAVTNFEPSTYHGELPTE

SEQ ID NO: 3452 - protein, 155 aa, Triticum aestivum
  unsure (1)..(155): unsure at all Xaa locations
MMSGSSPPPPSLPAGSGGFFRGYTKLCKGLAVILLIVHLVVQLFPSAVTYLALIPGRTIPFAWNLITAGYVEQTIPGMVVSIXGLLLFGKLLEPLWGSKELSKFIFIVNLSTSACVFKTAIVLYYITXQEIYLLYXFSGFXGXTXLLVGIKHFYR

SEQ ID NO: 3453 - protein, 199 aa, Leavenworthia crassa
SVGEGVTDLQPGDHVLPIFTGECGECLHCHSEESNMCELLRINTERGGMILDGESRFSINGKPIHHFLGTSTFSEYTVVHSGQVVKINPKAPLDKVCIVSCGLTTGLGATLNVAKPKKGQSVAVFGLGAVGLGAAEGARIAGASRIIGVDLNSNRFEEAKKFGVTEFVNPKEHNKPVQQVIAEMTNGGVDRSVECTGSV

SEQ ID NO: 3454 - protein, 499 aa, Listeria monocytogenes
MKRNKTALRILVTLAVVLAITFWVGMSSKEVQAAVIEHPTPINEIFTDPVLTDNVKTLLGKADVTDEVTQTDLDSVTHLSAKSAGITTIEGLQYLTNLSELELIDNQVTDLNPLKNLTKITELRLSGNPLKDVSALAGLKNLKTMDLIYTDITDVTPLAGLSNLQVLNLDINQITDITPLAGLSNLQFLSFGSTQVSDLTPLANLSKLTTLNAMNSKVSDVSPLTGLSNLTEVYLEENQISDVSPLAKLPNLSIVTLTNQTITNQPVFYQNKPIVPNVVTGLSGELIAPDTISDNGTYTSPNLTWDLNSFINSVSYTFNQSVTFKNTTAPFSGTVTQPLTEVYAVVFDVDGEQTSAMVGVNELINEPTAPAKEGYIFDGWYDAKTDGNKWDFGIDKMPASDITLYAKFTENEEPNASSPINVEPNDNNSDNAEPNASSSINVQENGTNEGINNLNSSGEDKVNIKLPITGDELNVLPIFVGAVLIGIGLVLFRKKRQTK

SEQ ID NO: 3455 - protein, 552 aa, Zea mays
  unsure (1)..(552): unsure at all Xaa locations
MALATNAAAAAAAAISGGSASQPRRASPSLLLLRRRCAVGAVHAAEPSKNPGVVPAAAKASTPTVVPENDTVPAPSLGPNASLRARWAVDSWRTKKALQQPEYPNQTELEEAVNTIEKSPPIVFAGEARHLEERLADAAVGRAFLLQGGDCAESFKEFTSANIRDTFRVILQMAVVLTFGGQMPVVKVXRMAGQFAKPRSDAFEERGGVKLPSYRGDIINGEAFDEKSRVPDPQRMLKAYYQSASKLNLLSAFATGGYADIQRVTQWNLDFTKHSEQGDRYRELAHRVDDALGFMGAAGLTVDQPLTTMIEFWTSHECLLLPYEQALTRQDSTTGLFYDCSAHMLWXGERTRQLDGAHVEFLRGIANPLGIKVSDKMEPGELVKLIDILNPTNKPGRITVITRMGAENIRVKLPHLIRAVRQAGQSVTWITDPMHGNTIKTPCGRKTRPFDSILAEVRAFFDVHDQEGSQPGGVHLEMTGQNVTECTGGSSNVTFDNLRDRYHTQCDPRLNASQSLELAFILAEKLRKRRMRRSSVASGLGGSILPLPPFGF

SEQ ID NO: 3456 - protein, 305 aa, Miscanthus sinensis var. formosanus
IESVGEGVTDVAPGDHVLPVFTGECKECAHCRLAESNMCDLLRINTDRGVMIGDGKSRFSINGKPIYHFVGTSTFSEYTVMHVGCVAKINPQAPLDKVCVLSCGISTGLGASINVAKPPKGSTVAIFGLGAVGLAAAEGARIAGASRIIGVDLNPSRFEEARKFGCTGFVNPKDHKKPVQEVLAEMTNGGVDRSVECTGNINAMIQAFECVHDGWGVAVLVGVPHKDAEFKTHPMNFLNERTLKGTFFGNFKPRTDLPNVVELYMKKELEVEKFITHSVPFAEINKAFDLMAKGEGIRCIIRMEN

SEQ ID NO: 3457 - protein, 161 aa, Gossypium hirsutum
RIIVQYIDEVWPSAPILPSDPHERATARFWAAYLDDKWFPSLRAIGMAEGEDARKAAIGQVEEGLMLLEEAFGKCSQGQAFFGKDQIGYLDITFGCSLGWLRVTEKMSGIKLLNEINTPALLKWANRFCNDAAVKDVMPETEKLAEFAKMLRGRVRATPTS

SEQ ID NO: 3458 - protein, 219 aa, Leymus triticoides
  unsure (1)..(219): unsure at all Xaa locations
GRRRVEMEDRHVAKLALGGDPEVALFAVFDGHGGAAEFAAENMPKFMAEXVRKVDGGGSEEIEGAVKKCYLKTDEEFLKREESGGACCVAALLQKGGLTVSNTGDCRAVLSRAGTAEALASDHRASCEDERERIENLGGFIVNNRGTWRVQDSLAVSRGIGDAHLKQWVVADPDTRTLLVDPQCEFLVLASDGLWDKVDNQEAIDIARPLCIGNDKASR

SEQ ID NO: 3459 - protein, 1122 aa, Physcomitrella patens
MSAPKKTYSSTSSAKSKAHSVRVAQTTADAALHAVFEKSGVSGDNFDYSKSVSKSTAGSLHTGAVTAYLQRMQRGGLTQSFGCMVAVEETGFRVIAYSENAPEFLDLMPQAVPNIGEINTLGIGTDVRTLFTPSSAASLEKAAETQEISLLNPITVYCRSKKPLYAIAHRIDIGIVIDFEAVNMNDVTISADGALQSHKLAAKAITRLQALPGGDIGLLCDTVVEEVRELTGYDRVMAYKFHEDEHGEVVAEIRRTDLEPYLGLHYPATDIPQASRFLFMKNRVRMIGDCSAPPEKIVQDPNLRQPVSLAGSTLRSPHGCHAQYMGNMGSISSIVMAVIINDNEDDSRGSVQRGRKQWGLVVCHHTSPRTVPFPLRSACEFLMQVFGLQLNMEVELAAQLREKHILRTQTLLCDMLLRDAPTGIVSQVPNIMDLVKCDGAALYYGKRFWLLGTTPTESQIKDIAEWLLEYHKDSTGLSTDSLADANYPAAHLLGDAVCGMAAAKITSKDFLFWFRSHTAKEIKWGGAKHDPGEKDDNRKMHPRSPFKAFLEVVKRRSLPWEDVEMDAIHSLQLILRGSFQDIDDSDTKTMIHARLNDLKLHDMDELSIVANEMVRLIETATAPILAVDSNGMINGWNAKIAQETGLPVAEAMGRSLVKDLVMDESLEVVERLLYLALRGEEEQGVEIKLKTFGAQTVKGAVTLIVNACASRDVSENVVGVCFVGQDVTGQKMFMDKFTRIQGDYKTIVQNPHPLIPPIFGADEFGYCFEWNPAMEGLTGWKRDEVIGKLLVGEIFGMQKMCCQMKSQDAMTKFMISLNSAMDGQNTDKFSLSFFDREGRYVDALLSTNKRTNADGAITGVICFLQIASSELQQALRVQQATEKVAIAKLKELAYIRQEIKNPLCGITFTRQLLEDTDLSNDQKQFLDTSAVCEQQLQKVLNDLDLESIEDGYLELDTAEFEMRTVMDAVISQGMTISREKGLQIIRETPREIITMRLFGDQVRLQQVLSDFLLNAVRFTPSSEGWVKIKVVPTRKRLGGNEHVMHLEFRVSHPGAGLPEELVLEMFDKGKGMTQEGLGLNICRKLVRLMNGDVQYVREAMQCYFVLYVELPLAQQDDAASQM

SEQ ID NO: 3460 - protein, 326 aa, Dimorphotheca sinuata
KKAIPPHCFERSLIRSSYYVVHDLIVAYVFYFLANTYIPLLPAPLAYLAWPVYWFCQASILTGLWVIGHECGHHAFSEQQWIGDTVGFILHSALFTPYFSWKYSHRSHHANTNSLDNDEVYIPKRKSKVRNYSKILNNPPGRVFTLVFRLTLGFPLYLLTNVSGKKYERFANHFDPMSPIFTERERIQVVLSDLGIIAVCYALKVLVAAKGATWVMCMYGVPVIGVHAFFVLITYLHHTHLSLPHYDSSEWNWIKGALSTIDRDFGFLNRVFHDVTHTHVLHHLISYIPHYHAKEARDAIIPVLGEFYKIDRTPIFKAMWREAKEC

SEQ ID NO: 3461 - protein, 569 aa, Ustilago maydis
MSSTFLASNSIVNTYNGTSASGAPPSADEPLFAPISSSSNPNSSRVCYFFDSDIGNYHYGPGHPMKPTRIRMCHSLVMNYGLYKRMEIFRAKPATKREMSQFHTDEYVEFLNRVTPDNVDSFVREQAKFNVGDDCPVFDGLFEYCSISAGGSMEGAAKLSRDKCDIAINWAGGLHHAKKGEASGFCYINDIVLGILELLRYHPRVLYIDIDVHHGDGVEEAFYTTDRVMTCSFHKYGEFFPGTGELRDIGIGKGKMYSCNFPLRDGITDESYKSVFEPVISQIMQHYQPSAVVLQCGSDSLAGDKLGCFNLSMRGHANCVEYVKSFGLPLLLLGGGGYTMRNVSRAWAFETGLAAGQELNAQIPVNEYYEYFGPDYRLDVRPNNMQDLNTREYLEKIKIQVFENLRQTAHAPSVQGHVEPRSIVESMHLQHVNGDMEERIDLGDKNGMQILDDKYPDERLVDTREFQDHSTRADELDRDARANPTRIDDAVHARAARPALADSRNPTADPSEHAIDEQIQADAMAKLLAPKPTLQAEHPLSSSAQPAHTPNSHQPSHSPTPPAPNPPHP

SEQ ID NO: 3462 - protein, 513 aa, Agrobacterium tumefaciens str. C58 (Cereon)
MTAHVLVIDDDPVQRRLLKNAVERYGHLALLAENGRAGLELLKQYSGEINVIVLDLMMPEMDGLAFLKAVGELGTDVPVIVQTGQGGIDTVVQAMRAGAFDFVVKPVSPERIGAAISNALKLDRKEAKARTGRRGRSNAVNFTDIVSASPAMLRVIELAQRAAQSSIPVVLEGESGVGKEMVARAIQSGGDRANKPFITVNCGAIPHNLVESILFGHEKGAFTGATEKHVGKFMEADGGTLFLDEIGDLPLDVQVKLLRAVQQGEIETVGSARVQKVNVRLISATNKNLIEEVKEGRFREDLYYRLNVFPITIPALRRRKEDIPHLARVFAERFSAEQKLPNPVGLDASALALLTAYDWPGNIRQLENAVFRAVVLSQGSELSDSDFPQIALQLPEFSNGDDGDDIIRSPSGSSLKLAAYSPPPAAESHAVIEEPSDISTTIYRGGNLISSTDDSGNIRKLAEIEEELIRFALRFYRGQMSQVARKLGIGRSTLYRKLKDYGIDPDDPLRDVA

SEQ ID NO: 3463 - protein, 173 aa, Helicobacter pylori
MNLDQLEVSHDADSLCVVIEISKHSNIKYELDKESGALMVDRVLYGAQNYPANYGFVPNTLGSDGDPVDALVLSDVAFQAGSVVKTRLVGVLNMEDESGMDEKLLALPIDKIDPTHSYVKDIDDLSKHTLDKIKHFFETYKDLEPNKWVKVKGFENKESAIKVLEKAIKAYQG

SEQ ID NO: 3464 - protein, 414 aa, Degeneria vitiensis
SGKPFYAIIHRVTGSLIIDFEPVKPYEVPMTAAGALQSYKLAAKAIAKLQALPSGSMEKLVDTIVQEVFELTGYDRAMAYKFHEDDHGEVISEVTKPGLEPYLGLHYPATDIPQAARFLFMKNKVRMICDCHAKPVEVYQDEKLTFDLTLCGSTLRAPHSCHLQYMENMDSIASLVMAVVINEGEDESGGPEQQQQQLKRKRLWGLVVCHNMTPRFVPCPLRYACEFLMQVFAIHVNKEFELENQIREKNILRTQTMPCDMLLRDAPLGIVTQSPNIMDLVKCDGAALLYNNKIWRLGFTPTESQIHDISIWLSEYHTDSTGLSTDSLRDAGYPDALALGDVVCGMAAVRISPKDMLFWFRSPTAAEVRWGGAKHDPCDKDDGRRMHPRSSFKAFLEVVKTRSLPWKDYEMDGI

SEQ ID NO: 3465 - protein, 407 aa, Oryza sativa
  unsure (1)..(407): unsure at all Xaa locations
LSLSLCFVCRGSGEDGQLGMGGYEEEDWARGVAALDALAVSAVVAGSRNSLAICADGRLFTWGWNQRGTLGHPPETKTESSPAPVDALAGVSIVQAAIGGWHCLAVDDKGRAYAWGGNEYGQCGEEAERKEDGTRALRRDIPIPQGCAPKLKVRQVAAGGTHSVVLTQDGHVWTWGQPWPPGDIKQISTPVRVQGLENVKVIAVGAFHNLALTEDGILWAWGNNEYGQLGTGDTQPRSQPIRVEGLSDLSLVDIAAGGWHSTALTKEGEVYAWGRGEHGRLGFGDDKSSHMVPQKVELLAGEDIIQVSCGGTHSVALTRDGRMFSYGRGDHGRLGYGRKVTTGHPMEVPIDLPPPXXTSGGDSGGQWQARYVACGGRHTLAIATWTEADEXSIASWFFKAKSRSWYR

SEQ ID NO: 3466 - protein, 294 aa, Saccharomyces cerevisiae
TTPLVHVASVEKGRSYEDFQKVYNAIALKLREDDEYDNYIGYGPVLVRLAWYTSGTWDKHDNTGGSYGGTYRFKKEFNDPSNAGLQNGFKFLEPIHKEFPWISSGDLFSLGGVTAVQEMQGPKIPWRCGRVDTPEDTTPDNGRLPDADKDADYVRTFFQRLNMNDREVVALMGAHALGKTHLKNSGYEGPWGAANNVFTNEFYLNLLNEDWKLEKNDANNEQWDSKSGYMMLPTDYSLIQDPKYLSIVKEYANDQDKFFKDFSKAFEKLLENGITFPKDAPSPFIFKTLEEQGL

SEQ ID NO: 3467 - protein, 152 aa, Zea mays; identical to SEQ ID NO: 2114

SEQ ID NO: 3468 - protein, 305 aa, Thermobifida fusca
MSDRETVPGTVVVGVDGSEGSLHALDWAIDAAAGRGATLRLVYAMGLPLVTVPLGGPIRTAPSPEVSQAAKALLEEALRRVQEAAPSLRAVTEVSRAEAHHALLKSAQDAELLVVGSRGYSGVASLFLGSVAQRVASHATCPVVVVPPTSQEAAARRGRVVVGVDGSEHAAAALRFALVEAERLRAELVAVYAWQAPDAPVDPFTVLQADVAVDREQQVARAREWLLRTVDEARTPLTQRVPVRVETPEKHPAAALLDEGADADLIVVGSRGRGGFTGLLLGSVSQQVLNHAVVPVAVVRVSSAG

SEQ ID NO: 3469 - protein, 494 aa, Oryza sativa
  unsure (1)..(494): unsure at all Xaa locations
SGGRRRRRDGGAQEVAAEGAAPRDGAAEGRRRRRGRRRERGRRRRGRGQEAAAGRVNSAAKLQRREIGGRQLAARGGGAASAVPERFRNMHLQEEFDTYDHNAHLFVKLQFLKKRSKIIEIVAAKDIIFALAHSGLCAAFSRVTNKRISPRAAGPRHVVRSLFYNKNNDSLVAVSVYASDHFSTLKCRTTPIEYIRRNQLDAGFPLFETESLKWPGFVEFDDVNGKVLTYSAQDGIYKVFDLKNYSFLYSIPDTNVQEIKISPGIMLLIYERTPCHVPLKILSIEDGRPLKSFTHLLHRNKKIDFIEQFNEKLLVKQEDENLQILDVRSSELIEVSVTKFMTPSAFIFLYENNLFLTFRNRTVAVWNFRGELVTSFEDHLLWHQDCSTNNIYITSDQDLIISYCKAGVDDGTVPPXFGSINMSAIMTGKCIAKIAANDPTLRIGPRKNGNSERSSIXXSTIPEALEDVTALFYDEDRNEIYTGNRHGLVHVWSN

SEQ ID NO: 3470 - protein, 332 aa, Clostridium tetani E88
MGGINLSILICGGAGYIGSHMVARLLEEKEDIIILDNFQKGHRKAILGGKVYKGDIRNKALLDKIFNENSIEGVIDFAASSLVRESVEKPLEYFDNNIGGTIVLLKSMIEHNVKNIVFSSTAATYGEPENIPIREEDKTNPTNPYGESKLAVEKILKWCDKAYGLKYTVLRYFNAAGAYDTGKIGEDHRPETHLIPIIIEVALGKRDKIQVFGNDYNTKDGTCIRDYVHVMDLTEAHLLAMNKLKNGGKSGIYNLGNGEGFSVKEVIDMVQKVTGRKIKWEVANRRKGDPRVLIASSEKAKTQLGWHPKYNSLEKIIETAWKWHKNNPDGYM

SEQ ID NO: 3471 - protein, 125 aa, Magnetococcus sp. MC-1
MKLLSIDDSRTIRRVISGVGAMLGFEVLEAENGMVGLKVLEESSHEVGLILLDWNMPGLNGLEVLKKVKADERFMHIPVMMVTTEGEKDNIIRAIQAGACHYMTKPFSQEEMAGRIMEAIGMGGM

SEQ ID NO: 3472 - protein, 103 aa, Archaeoglobus fulgidus DSM 4304
MEFCPKCKSLMIYQGDKLVCRKCGYEKEADDSEELVIKVERNKEDVPVIEGENLKTLPTTKAICPACGHNEAFWWLRQLRAADESEVRFFRCTKCGKTWREYD

SEQ ID NO: 3473 - protein, 249 aa, Burkholderia fungorum
MEKTLDKQIAIVTGASRGIGRAIALELARQGATVIGTATSESGAAAISEAFNAAGASGRGAVLNVNDAAAAEALIDGTVKEFGALHVLVNNAGITQDQLAMRMKDDDWDAVIDTNLKSVFRLSRAVLRPMMKAKGGRIINITSVVGSAGNPGQVNYAAAKAGVAGMTRALAREIGSRGITVNCVAPGFIDTDMTRTLPEEQQTALKTQIPLGRLGSPEDIAHAVAFLASPQAGYITGTTLHVNGGMYMS

SEQ ID NO: 3474 - protein, 570 aa, Emericella nidulans
MSPPSAKSMEEGRTPSVQYGYGDPKTLEGQIEEHTATKRGLSSRQLQLLAIGGCIGTGLFVGTSTVLTQTGPAPLLMSYIVMASIVWFVMNVLGEMTTYLPIRGVSVPYLIGRFTEPSIGFASGYNYWYSFAMLLACEVSTMALLSFLSCWNPDNVGHCLGLIIEYWNPPVSVGLWIAIVLVESEFWFAGLKILAIIGLIILGVVLFFGGGPNHERLGFRYWQDPGAFNPYLVPGDTGKFLGFWTALIKSGFSFIFSPELITTAAGEVEAPRRNIPKATKRFIYRVFTFYILGSLVIGVTVAYNDPTLEAGVESGGSGAGASPFVVAIKTLVLEGSTMSSMLPSGSLPGHPVTHGCYAGSEKLYSLAGEGQAPKIFTRTNRTGVPYVAVLATWTIGLLSFLNLSSSGQTVFYWFTNITTVGGFINWVLIGIAYLVCFPPSLHLNTPDQKQRFRKALQFHGMLDMLPFKTPLQPYGTYYVMFIISILTLTNGYAVFFPGRFTASDFLVSYIVFAIFLALYAGHKIWYRTPWLTKVSEVDIFTGKDEIDRLCENDMERQPRNWLERVWWWIF

SEQ ID NO: 3475 - protein, 117 aa, Zea mays
SKTSKLITKTEDCESFFNFFSPPQVPDADEEIDEDTAEQLQNQMEQDYDIGSTIRDKIIPHAVSWFTGEAAQDEDFEVMDGEDDDDEDDDDEDDEDEDDDDYDTKKTKGTAGGEGQQ

SEQ ID NO: 3476 - protein, 751 aa, Geobacillus stearothermophilus
MENQNRQNAAQCPFHGSVTNQSSNRTTNKDWWPNQLNLSILHQHDRKTNPHDEEFNYAEEFQKLDYWALKEDLRKLMTESQDWWPADYGHYGPLFIRMAWHSAGTYRTGDGRGGASTGTQRFAPLNSWPNNANLDKARRLLWPIKKKYGNKISWADLFILAGNVAIESMGGKTIGFGGGRVDVWHPEEDVYWGSEKEWLASERYSGDRELENPLAAVQMGLTYVNPEGPDGKPDPKAAARDIRETFRRMGMNDEETVALIAGGHTFGKAHGAGPATHVGPEPEAAPIEAQGLGWISSYGKGKGSDTITSGIEGAWTPTPTQWDTSYFDMLFGYDWWLTKSPAGAWQWMAVDPDEKDLAPDAEDPSKKVPTMMMTTDLALRFDPEYEKIARRFHQNPEEFAEAFARAWFKLTHRDMGPKTRYLGPEVPKEDFIWQDPIPEVDYELTEAEIEEIKAKILNSGLTVSELVKTAWASASTFRNSDKRGGANGARIRLAPQKDWEVNEPERLAKVLSVYEDIQRELPKKVSIADLIVLGGSAAVEKAARDAGFDVKVPFFPGRGDATQEQTDVESFAVLEPFADGFRNYQKQEYSVPPEELLVDKAQLLGLTAPEMTVLVGGLRVLGANYRDLPHGVFTDRIGVLTNDFFVNLLDMNYEWVPTDSGIYEIRDRKTGEVRWTATRVDLIFGSNSILRSYAEFYAQDDNQEKFVRDFINAWVKVMNADRFDLVKKARESVTALQLLPNTRSIGSDMLQ

SEQ ID NO: 3477 - protein, 109 aa, Schizosaccharomyces pombe
MQFCPTCGNHLIVAVDEEGRNAFDCRTCPYHFPISTFLYSRHEFAQKEVDDVLGGEEAFESNQQTEVTCENTKCDNNRAYFFQLQIRSADEPMSTFYRCTKCKFQWREN

SEQ ID NO: 3478 - protein, 457 aa, Escherichia coli O157:H7 EDL933
MESKNKLKRGLSTRHIRFMALGSAIGTGLFYGSADAIKMAGPSVLLAYIIGGIAAYIIMRALGEMSVHNPAASSFSRYAQENLGPLAGYITGWTYCFEILIVAIADVTAFGIYMGVWFPTVPHWIWVLSVVLIICAVNLMSVKVFGELEFWFSFFKVATIIIMIVAGFGIIIWGIGNGGQPTGIHNLWSNGGFFSNGWLGMVMSLQMVMFAYGGIEIIGITAGEAKDPEKSIPRAINSVPMRILVFYVGTLFVIMSIYPWNQVGTAGSPFVLTFQHMGITFAASILNFVVLTASLSAINSDVFGVGRMLHGMAEQGSAPKIFSKTSRRGIPWVTVLVMTTALLFAVYLNYIMPENVFLVIASLATFATVWVWIMILLSQIAFRRRLPPEEVKALKFKVPGGVATTIGGLIFLLFIIGLIGYHPDTRISLYVGFAWIVVLLIGWMFKRRHDRQLAENQ

SEQ ID NO: 3479 - protein, 798 aa, Aspergillus oryzae
MPGAASIVAVLAALLPTALGQANQSYVDYNSEANPDLFSECLETGGTSFPDCESGPLSKTLVCDTSAKPHDRAAALVSLLTFEELVNNTANTGHGAPRIGLPAYQVWNEALHGVAHADFSDAGDFSWSTSFPQPISTMAALNRTLIHQIATIISTQGRAFMNAGRYGLDVYSPNINTFRHPVWGRGQETPGEDAYCLASTYAYEYITGIQGGVDANPLKLIATAKHYAGYDIENWDNHSRLGNDMQITQQDLAEYYTPQFLVASRDAKVHSVMCSYNAVNGVPSCSNSFFLQTLLRDTFDFVEDGYVSGDCGAVYNVFNPHGYATNESSAAADSIRAGTDIDCGVSYPRHFQESFHDQEVSRQDLERGVIRLYASLIRAGYFDGKTSPYRNITWSDVVSTNAQNLSYEAAAQSIVLLKNDGILPLTSTSSSTKTIALIGPWANATTQMLGNYYGPAPYLISPLQAFQDSEYKITYTIGTNTTTDPDSTSQSTALTTAKEADLIIFAGGIDNTLETEAQDRSNITWPSNQLSLITKLADLGKPLIVLQMGGGQVDSSALKNNKNVNALIWGGYPGQSGGQALADIITGKRAPAARLVTTQYPAEYAEVFPAIDMNLRPNGSNPGQTYMWYTGTPVYEFGHGLFYTNFTASASAGSGTKNRTSFNIDEVLGRPHPGYKLVEQMPLLNFTVDVKNTGDRVSDYTAMAFVNTTAGPAPHPNKWLVGFDRLSAVEPGSAKTMVIPVTVDSLARTDEEGNRVLYPGRYEVALNNEREVVLGFTLTGEKAVLFKWPKEEQLIAPQ

SEQ ID NO: 3480 - protein, 379 aa, Arabis gemmifera
MSTTGQIIRCKAAVAWEAGKPLVMEEVEVAPPQKHEVRIKILFTSLCHTDVYFWEAKGQTPLFPRIFGHEAGGIVESVGEGVTDLQPGDHVLPIFTGECGDCPHCHSEESNMCDLLRINTERGGMIHDGESRFSINGKPIHHFLGTSTFSEYTVVHSGQVAKINPDAPLDKVCIVSCGLSTGLGATLNVAKPRKGQSVAIFGLGAVGLAAAEGARIAGASRIIGVDLNSQRFAQAKEFGVTEFVNPRDHGKPVQQVIAEMTNGGVDRSVECTGSVQAMIQAFECVHDGWGVAVLVGVPSKDDAFETHPMNFLNERTLKGTFFGNYKPKTDIPGVVEKYMNKELELEKFITHTVPFSEINKAFDYMLKGESIRCIITMGA

SEQ ID NO: 3481 - protein, 461 aa, Mycobacterium tuberculosis H37Rv
MATATTQRPLKGPAKRMSTWTMTREAITIGFDAGDGFLGRLRGSDITRFRCAGRRFVSISHPDYVDHVLHEARLKYVKSDEYGPIRATAGLNLLTDEGDSWARHRGALNSTFARRHLRGLVGLMIDPIADVTAARVPGAQFDMHQSMVETTLRVVANALFSQDFGPLVQSMHDLATRGLRRAEKLERLGLWGLMPRTVYDTLIWCIYSGVHLPPPLREMQEITLTLDRAINSVIDRRLAEPTNSADLLNVLLSADGGIWPRQRVRDEALTFMLAGHETTANAMSWFWYLMALNPQARDHMLTELDDVLGMRRPTADDLGKLAWTTACLQESQRYFSSVWIIAREAVDDDIIDGHRIRRGTTVVIPIHHIHHDPRWWPDPDRFDPGRFLRCPTDRPRCAYLPFGGGRRICIGQSFALMEMVLMAAIMSQHFTFDLAPGYHVELEATLTLRPKHGVHVIGRRR

SEQ ID NO: 3482 - protein, 235 aa, Zea mays; identical to SEQ ID NO: 3077

SEQ ID NO: 3483 - protein, 304 aa, Triticum aestivum
RSLGGFDTAHAAARAYDRAAIKFRGLEADINFNLSDYEEDLKQMRNWTKEEFVHILRRQSTGFARGSSKYRGVTLHKCGRWEARMGQLLGKKYIYLGLFDSEVEAARAYDRAAIRFNGREAVTNFESSSYNGDAPPDAENEAIVDADALDLDLRMSQPTAHDPKRDNIVAGLQLTFDSPESSTTMISSQPMSSSSSQWPVHQHGTAVAPQQHQRLYPSACHGFYPNVQVQVQERPMEARPPEQPSSFPGWGWQAQAMPPGSSHSPLLYAAASSGFSTAAAGANLAPPPPYPDHHRFYFPRPPDN

SEQ ID NO: 3484 - protein, 275 aa, Azoarcus sp. EbN1
MLLHEGGWCMSNLVGLDEVKAVYNGAEGDLWELIMGHQIHIGGFRSSMDLSERAGLAGAKHGVDLCCCNGAGMRFLVRFRNVQKMTGVDAAKTVIDRGRDRCFEEELDKQIEFVHSDVTHSSLPDNYTDFVWGEDAWCYVVDKPALIREAARIVKPGGKIAFTDWVLGNVSMSDDEIRRYLSFMKFPNVESLEGYPKLLEASGCEVIEASDTGRFDPYVDLYLDMVDKQLTYDALRILNFDTAMLGAVAGEMKFLGELARAGKIAQGRFVARKKG

SEQ ID NO: 3485 - protein, 381 aa, Phanerochaete sordida
MAFSTLVALVALAAIARAAPTTDSAVCSDGTTVNNAACCAFIPLAQDLQANLFQNDCGEDAHEVIRLTFHDAIAISQSQGPTAGGGADGSMLLFPTVEPNFGANNGIDDSVNNLIPFMQKHNTISAGDLVQFAGAVALANCPGAPRLEFLAGRPNKTTAAIDGLVPEPQDSVTKILQRFADAGNFSPFEVVSLLASHSIARADKVDETIDAAPFDSTPFTFDTQVFLEVLLKGVGFPGAANNTGEVTSPLPTGSGADTGEMRLQSDFALARDSRTACFWQGFVNEQAFMASSFRAAMSKLAVLGHSRSALIDCSDVVPQPKPAVNKPATFPASTGPQDLELACTTSKFPTLTTDPGASETLIPHCSDGSMSCPAIQFDGPA

SEQ ID NO: 3486 - protein, 108 aa, Glycine max
MLICELTSDQATTGMWVTDECKNSFMDMKWKKEHRYIVFKIDEGSRLVTVDKLGGPPEGYDDLTASLPTDDCRYAVFDFDFVTVDNCRKSKIFFIAWCFFICFSLLLF

SEQ ID NO: 3487 - protein, 429 aa, Shigella flexneri 2a str. 2457T
MKALNREVIEYFKEHVNPGFLEYRKSVTAGGDYGAVEWQAGGLNTLVDTQGQEFIDCLGGFGIFNVGHRNPVVVSAVQNQLAKQPLHSQELLDPLRAMLAKTLAALTPGKLKYSFFCNSGTESVEAALKLAKAYQSPRGKFTFIATSGVFHGKSLGALSATAKSTFRKPFMPLLPGFRHVPFGNIEAMRTALNECKKTGDDVAAVILEPIQGEGGVILPPPGYLTAVRKLCDEFGALMILDEVQTGMGRTGKMFACEHENVQPDILCLAKALGGGVMPIGATIATEEVFSVLFDNPFLHTTTFGGNPLACAAALATINVLLEQNLPAQAEQKGDMLLDGFRQLAREYPDLVQEARGKGMLMAIEFVDNEIGYNFASEMFRQRVLVAGTLNNAKTIRIEPPLTLTIEQCELVIKAARKALAAMRVSVEEA

SEQ ID NO: 3488 - protein, 500 aa, Clostridium acetobutylicum
MKKLKTKHLITALACLVSLSTFAYTNTCKAAADEAPTVGVTYDAHVQNIGWQNWVSDGEEAGTDGKNLSLEALKINLTNAPSDAKILYQSHVQNFGWQDWVYDGAETGTDGKCLRLEAIRIKLENLPGYSVEYQTHVQNIGWQAPVSDGAIAGTVGQGLRVEAIRIRLVKNVPVTSIALNKETDTLSSGDSDTLTATITPSNASNKNINWTSSDNSIVSVDNSGKITAIAEGSGTATATITAASSDSQKTATCVVTVNKRTPITFKDNNLETSIRNMINKPTGSLYKEDVQGITSFYNTNPNIHYLDGIENLSNLEFLTFSNTPIKDLTPLKSLTKLKHLQLDNVTINDFTPIASLTNLTNLSLQNTGLSDLSVLNNLTNLKDLFLGNNNISNIDALANLHNLTTVSLLGNHIKNINSLANLYNLNLIDLSYNIITDLSSLANLSNLNKLYLSNNNLENISSLNKLSNLQTLDISNTLVNKSDVDSLQAALPNCLIKYNY

SEQ ID NO: 3489 - protein, 151 aa, Ipomoea batatas
MVKRVAVLSSSEGVSGTIFFSQEGDGPTTVTGNVSGLKPGLHGFHVHALGDTTNGCMSTGPHFNPAGKEHGAPGDDNRHAGDLGNITVGEDGTASFTITDKQIPLTGANSVIGRAVVVHGDPDDLGKGGHELSKSTGNAGGRVACACRVKV

SEQ ID NO: 3490 - protein, 370 aa, Zea mays
MMRDGVPPSVAGSGGAAGGDGPRRCSQCGHHGHNARTCTARPVKLFGVRIGDKPIRKSASMGNIAHLAAEGSGGREEGYGSDGERPHKKRGEAWTEEEHKKFLLGLNKLGKGDWRGISRKYVVSRTPTQVASHAQKYFNRQTNVHRRKRRSSLFDMVIDDPSDQLPLSRSSSQEMEQQHLDDPQPVAALPAPVVSPATVVPPVPVEVSASVPSPVQVPVPVSAPVMTSQPMEQDSDTTSSIAGEAGTVMPGAMPPYLYPMMIPPPYYHTAFVPMPCYGYVPFYCEPQGAAQAPHEVVKPVAVHSTPPLNAKDLYNMSELSLKGDSNANGGVPASPLPPKPIGRPERQSAFHGKGPTPTGGSSGGLIPAVK

SEQ ID NO: 3491 - protein, 323 aa, Cytophaga hutchinsonii
MQVRRFGRTNWNVSEIGYGMWGASGWKGSDDSQSEQSLDLAVSKGVNFFDTAWGYGEGHSEQLLGKLVKRHQSKKIYVATKIPPMNFKWPSKKSYTIGECFPVSHIKEYTETSLKNLGVEKIDLMQFHVWEDAWATDESWQRAVEDLQKEGKVDAFGISVNRWEPENCLETLKTGLIDSVQVIYNIFDQAPEDALLPLCKKLDIAVIARVPFDEGTLTGTITKDTTFEEGDWRASYFVPENLISSAEHADRLRPILPSGMTMAEMALRFILMNDDIATTIPGMRKERNVLANTGVSDGKKLSLDLYNELKKHRWDREPTSWSQ

SEQ ID NO: 3492 - protein, 373 aa, Pisum sativum
TINRVEDLLNLDITPFTDSIIAEYIWIGGTGIDVRSKSRTISKPVSHPSEVPKWNYDGSSTGQAPGEDSEVILYPQAIFKDPFRGGNNILVVCDAYTPAGEPIPTNKRHRAAEIFSNPKVEAEIPWYGIEQEYTLLQTNVKWPLGWPVGGYPGPQGPYYCAAGADKSFGRDISDAHYKACIYAGINISGTNGEVMPGQWEYQVGPSVGIEAGDHIWASRYILERITEQAGVVLTLDPKPIEGDWNGAGCHTNYSTKSMREDGGFEVIKKAILNLSLRHKIHIEAYGEGNERRLTGKHETASINDFSWGVANRGCSIRVGRDTEKNGKGYLEDRRPASNMDPYVVTALLAESTLLWEPTLEAEALAAQKIALKV

SEQ ID NO: 3493 - protein, 105 aa, Triticum aestivum
  unsure (1)..(105): unsure at all Xaa locations
MNRKPGDWDCRSCQHLNFSRRDICQRCSEPRGVADRGSGGGGDYANFGGRGGSSFGGGFGAGSDVRPGDWYCSCGAHNFASRSSCFKCSAYXEEAAVNSGAGGFD

SEQ ID NO: 3494 - protein, 250 aa, Lycopersicon esculentum
MGKCYPTVSEEYLKAVDKCKRKLRGLIAEKNCAPIMLRLAWHSAGTYDVCSKTGGPFGTMRFKAELQHGANNGLDIALRLLEPIREQFPTLSHADFHQLAGVVAVEVTGGPDVPFHPGREDKPEPPVEGRLPDATKGCDHLRDVFKKQMGLSDQDIVALSGAHTLGRAHKERSGFEGPWTANPLIFDNSYFTELLSGEKQGLLQLPSDKALLCDPAFRPLVEKYAADEDAFFADYAEAHLKLSELGFAEA

SEQ ID NO: 3495 - protein, 200 aa, Zea mays
QFTGKLTSKTLCVFRRSTNLDSWTPDQLKMMAFGGNNRAHAFFKQHGWTDGGKVEAKYTSRAAELYRQMLTKEVAKSATTDNALPSSPVASEASKPPSDDFPEFKLPDHEPKSPKAAPRSPKAATHPTFATSVKKPIGAKKVGGKTGGLGVRKLTTKPNESLYEQKPEEPKPAVPALAASTKKGGQALHSRFEYVENEPS

SEQ ID NO: 3496 - protein, 296 aa, Thermococcus litoralis
MTVPRPVPRTNTFADDNPYALERVRVLRVYQLTELEKLFLFRFEDPTIAENWTFKPGQFVQLTIPGIGEVPISVCSSPMRQGFFELCIRKAGRVTTVVHKLKPGDTVLVRGPYGNGFPVDEWEGMDLLLIAAGLGTAPLRSVFLYAMDNRWKYGNITFINTARYGKDLLFYKELEAMKDIAEAENVKIIQSVTRDPDWPGLKGRPQNFIVEANTNPKNTAVAICGPPRMYKDVFESLINYGYRPENIYVTLERMMKCGIGKCGHCNVGTSTSWKYVCKDGPVFTYFDIVSTPGMLD

SEQ ID NO: 3497 - protein, 255 aa, Medicago truncatula
MAMTRESWAFVFGIIGNIISFAVFLSPLPTFYVIFKKKSAEGFQALPYVVALFSAMLWIYYAFVKRESALLLITINTFGIVVESAYIIMFLIYAPKKQRLSTIKLLLLLNVFGFGAMLLSTLYLSKGAKRLAIIGWICLVFNISVFAAPLFVISKVIRSRSVEYMPFFLSFFLTINAVMWFFYGLLLRDYYVALPNTLGFVFGIIQMVVYLIYRNATPVVEAPMKGQELSGGHIIDVVKIGTDSNRAGGGAGSKV

SEQ ID NO: 3498 - protein, 443 aa, Oryza sativa
  unsure (1)..(443): unsure at all Xaa locations
RPGSPPRSPRSHYKTPPPRAAAAAAAATAAGIRDLSPSRHARARASKERERNGHRCRRLAAVRAARRRLRLRQAQIRRARQERARGRGGRSVRARGGAVVARAAVTACADATAESSGHEVLLFEALREALIEEMKEDPTVCVFGEDVGHYGGSYKVTKGLAEMFGDLRVLDTPIAENSFAGMGVGAAMKGLRPIVEGMNMGFLLLAYNQISNNCGMLHYTSGGQFKIPVVIRGPGGVGRQLGAEHSQRLESYFQSIPGLQMVACSTPYNAKGLMKAAIRSENPVVLFEHGLLYNLKEKIPDEEYICCLEEAEMVRPGEHVTILHVLSALRYHCXCQAAKTLVNKGYDPEVIDIRSLKPFDLHTIXGNSIKKTPRVLIVEECMRTGGIGASLRSAIIDNFWDYLDAPIMCLSSQDVPTPYAATLEDATVVQPAQIVAAVEQICQ

SEQ ID NO: 3499 - protein, 145 aa, Oryza sativa
  unsure (1)..(145): unsure at all Xaa locations
XADVEFRCFVGGLAWATDDRSLETAFSKYGDVVESKIINDRETGRSRGFGFVTFGSEKAMRDAIEGMNGQDLDGRNITVNEAQSRGSGGGGRGGGGYGGRREGGGGGGGYNRGYEGGGGGGARRDGGYGGGGDSYSRGGGGHVVD

SEQ ID NO: 3500 - protein, 441 aa, Pteridophyllum racemosum
  unsure (1)..(441): unsure at all Xaa locations
PYEVPMTAAGALQSYKLAAKAIAKLQPLHSGNMERLCDTVVQEVFDLTGYDRTMAYKFHDDDHGEVISEVTKPGLEPYLGLHYPATDIPQAARFLFMKNKIRMICDCNAKQVKVLQDEKIPFDLTLCGSTLRAPHTCHLLYMKNMGSAASLVMAIVXNEGDEEEEASGPSQPQKKKRLWGLVVCHNTTPRFVPFPLRYACEFLLQVFAIHVNKEFELENQILEKNILRTQTLLCDMLMRDAPLGILSQSPNIMDLVRCNGAALLYKNKIHRLGLTPSDFQIHDIASWLSEHHMDSTGLSTDSLYDAGFPGALSLGDQVCGMAAVRITSKDMLFWFRSHTAAEVRWGGAKHNPSEEDDGRKMHPRSSFKAFLEVVKTRSSPWRDYEMDAIHSLQLILRNAFKDAETADLNATVIHSGLNNLKIEGMEELEAVTNEMVRLIET

SEQ ID NO: 3501 - protein, 455 aa, Zea mays
  unsure (1)..(455): unsure at all Xaa locations
MRIEEVQSTSKKQRIATHTHIKGLGLDXNGMSMPLAAGFVGQAAAREAAGLAVDMIRQKKMAGRALLLAGPPATGKTALALGIAQELGSKVPFCPMVGSEVYSSEVKKTEVLMENFRRAIGLRIKENKEVYEGEVIELSPEEAESTTGGYAKSISHVIIGLKTVKGTKQLKLDPSIYDALIKEKVAVGDVIYIEANSGAVKRVGRCDSFATEYDLEAEEYVPIPKGEVHKKKEIVQDVTLHDLDAANAQPQGGQDILSLMGQMMKPRKTEITEKLRQEINKVVNRYIDEGIAELVPGVLFIDEVHMLDIECFSYLNRALESPLSPIVILATNRGICNVRGTDMTSPHGIPVDLLDRLVIIRTETYGPTEMIQILAIRAQVEEIDIDEESLAYLGEIGQQTSLRHAIQLLSPASVVAKTNGREKICKADLEEVSGLYLDAKSSARLLQEQQERYIT

SEQ ID NO: 3502 - protein, 297 aa, Oryza sativa
MSYVLRDVVVVLGLAAAAARVDSWLVWPLYWAAQGTMFWALFVLGHDCGHGSFSSNAKLNSVVGHILHSSILVPYHGWRISHRTHHQNHGHVEKDESWQPFARSPGKKGSHFNPSSDLFQPNEKKDVITSTASWLAMVGILAGLTFVMGPLKMLKLYAVPYVIFVMWLDFVTYLHHHGHEDKLPWYRGKEWSYLRGGLTTLDRDYGWINNVHHDIGTHVIHHLFPQIPHYHLVEATEAAKPVLGKYYKEPEKSAPLPFHLLGVLAKSLNSDHYVSDTGDVVYYQTDLKTSSSAQSSD

SEQ ID NO: 3503 - protein, 751 aa, Geobacillus stearothermophilus
MENQNRQNAAQCPFHGSVTNQSSNRTTNKDWWPNQLNLSILHQHDRKTNPHDEEFNYAEEFQKLDYWALKEDLRKLMTESQDWWPADYGHYGPLFIRMAWHSAGTYRTGDGRGGASTGTQRFAPLNSWPNNANLDKARRLLWPIKKKYGNKISWADLFILAGNVAIESMGGKTIGFGGGRVDVWHPEEDVYWGSEKEWLASERYSGDRELENPLAAVQMGLTYVNPEGPDGKPDPKAAARDIRETFRRMGMNDEETVALIAGGHTFGKAHGAGPATHVGPEPEAAPIEAQGLGWISSYGKGKGSDTITSGIEGAWTPTPTQWDTSYFDMLFGYDWWLTKSPAGAWQWMAVDPDEKDLAPDAEDPSKKVPTMMMTTDLALRFDPEYEKIARRFHQNPEEFAEAFARAWFKLTHRDMGPKTRYLGPEVPKEDFIWQDPIPEVDYELTEAEIEEIKAKILNSGLTVSELVKTAWASASTFRNSDKRGGANGARIRLAPQKDWEVNEPERLAKVLSVYEDIQRELPKKVSIADLIVLGGSAAVEKAARDAGFDVKVPFFPGRGDATQEQTDVESFAVLEPFADGFRNYQKQEYSVPPEELLVDKAQLLGLTAPEMTVLVGGLRVLGANYRDLPHGVFTDRIGVLTNDFFVNLLDMNYEWVPTDSGIYEIRDRKTGEVRWTATRVDLIFGSNSILRSYAEFYAQDDNQEKFVRDFINAWVKVMNADRFDLVKKARESVTALQDYTNIRSGGVDTLQ

SEQ ID NO: 3504 - protein, 462 aa, Mycobacterium tuberculosis CDC1551
MNWTVDIPIDQLPSLPPLPTDLRTRLDAALAKPAAQQPTWPADRALAMRTVLESVPPVTVPSEIVRLQEQLAQVAKGEAFLLQGGDCAETFMDNTEPHIRGNVRALLQMAVVLTYGASMPVVKVARIAGQYAKPRSADIDALGLRSYRGDMINGFAPDAAAREHDPSRLVRAYANASAAMNLVRALTSSGLASLHLVHDWNREFVRTSPAGARYEALATEIDRGLRFMSACGVADRNLQTAEIYASHEALVLDYERAMLRLSDGEDGEPQLFDLSAHTVWIGERTRQIDGAHIAFAQVIANPVGVKLGPNMTPELAVEYVERLDPHNKPGRLTLVSRMGNHKVRDLLPPIVEKVQATGHQVIWQCDPMHGNTHESSTGFKTRHFDRIVDEVQGFFEVHRALGTHPGGIHVEITGENVTECLGGAQDISETDLAGRYETACDPRLNTQQSLELAFLVAEMLRD

SEQ ID NO: 3505 - protein, 238 aa, Pseudomonas putida KT2440
MMLDWQGALDAVIHHPLFGIGITLGAYQVVLAAYEKTRWIFLQPVLVSMLLVIGVLLLCGIDYSEYRKSTEIMNILLGPATVALAVPLYLNLRRIRQLFWPTFTTLVVGGLFATLCCLVLGWWFGAEHMILMTMAPKSVTSPIAMLVAEQIGGVAALAAVFVLITGVIGAIFGPALLSRFGVHSPEARGMSLGVTAHAVGTSVALQESDECGAFAALAMSLMGVATAVFLPLAVSLVA

SEQ ID NO: 3506 - protein, 383 aa, Zea mays
MATAFSLRAAAPATAPRAVSRSTSAARVVPVASALAGRGRLVARAAVTAKADVPSSTSDGHEVLLFEALREALMEEMELDPTVCVFGEDVGHYGGSYKVTKGLADTFGDLRVLDTPIAENSFTGMGVGAGMKGLRPVVEGMNMGFLLLAYNQISNNCGMLHYTSGGQFKIPLVIRGPGGVGRQLGAEHSQRLESYFQSIPGLQMVACSTPYNAKGLMKAAIRSENPVVLFEHVLLYNLKEKIPDEEYVLCLEEAEMVRPGEHVTILTYSRMRYHVMQAAKTLVNKGYDPEVIDIRSLKPFDLHTIGNSIKKTHRVLIVEECMRTGGIGASLRSAIVDNFWDYLDAPIMCLSSQDVPTPYAATLEDATVVQPAQIVAAVEQLCA

SEQ ID NO: 3507 - protein, 394 aa, Elymus sp. Kellogg s.n.
EPARTEDPALSIAGAVQSQKLAVRAISRLQALPGGDVKLLCDTVVEHVRELTGYDRVMVYKFHDDEHGEVLSESRRGDLEPYLGLHYPATDIPQASRFLFLQNRVRMIADCHAAAVRVIQDPAMPQPLCLVGSTLRSPHGCHAQYMANMGSIASLVMAVIISSGGEDEHNMTRGVIPSAMKLWGLVVCHHTSPRCIPFPLRYACEFLMQAFGLQLNMELQLAHQLSEKHILRTQTLLCDMLLRDSPTGIVTQTPSIMDLVKCDGAALFYHGKYYPLGVTPTESQIKDIIEWLTVCHGDSTGLSTDSLADAGYPGATALGDAVCGMAVAYITPSDYLFWFRSHTAKEIKWGGAKHHPEDKDDGQRMHPRSSFKAFLEVVKSRSLPWENAEMDAIT

SEQ ID NO: 3508 - protein, 136 aa, Triticum aestivum
MSILWEKSPAWRWLVGRTRDSKPFFFTFAALCGVVPGVVGYGVMQLTSSRNDKLEAHLRSNARPETTMMGQVNRERLAEFLGEIQRKENTNDRYVAALKGETLTRKRYERIQPVPQQAAQENAKDQQATKESAKAK

SEQ ID NO: 3509 - protein, 180 aa, Pseudomonas putida KT2440
MMSAQLNGKRVAFLVTDGFEQVELTGPREALENSGAVVDILSEKEGTVRGWNHDKPADAFSVDATFDSAQLDLYDALVLPGGVQNSDTIRLIPGAQKLVKSHDAAGRPLAVICHGAWLLISSGLAKGKRMTSYKTLQDDIRNAGGTWVDEQVVVDGNLITSRQPDDIPAFNEQLIKALAD

SEQ ID NO: 3510 - protein, 149 aa, Vicia faba
MKGGKSKGESKKAETKLAVNKKGAAATKGGKKPAKGKEPKDPNKPKRPPSAFFVFMADFREQYKKDHPNNKSVAAVGKACGEEWKSLSEEEKAPYVDRALKKKEEYEITLQAYNKKLEGKDDEEGSDKSKSEVNDEDEDEEDEEDEDDD

SEQ ID NO: 3511 - protein, 154 aa, Paecilomyces tenuipes
MVKAVCVLRGDAKVGGTVTFEQESESAPTTITYDLTGNDPNAERGFHIHTFGDNTNGCTSAGPHFNPHGKTHGAPTDAARHVGDLGNVKTDAQGNAKGSIQDSQVKLIGPHSVIGRTVVVHAGTDDLGKGGNEESLKTGNAGPRPACGVIGVAN

SEQ ID NO: 3512 - protein, 308 aa, Glycine max
KLSFYGLEFMAKWIVKGERQRPPIYLSVDEGLVLSALLTAGRTYNSDLLVASWAVLDRSLRKKKVPNPESYLGKIYALASLGNLQKAFGTLNEYEAAYGDSGQEAEDLFCPFTSLHPLVVACSKKGFETLDNVYFQLENLNRAEPPYKSVAALNCVILGCANIWDLDRAYQTFESIGSTFGLIPDIHSYNGLMYAFGKLKKTHEATRVFEHLVSLGLKPNAKSYSLLVDAHLINRDVKSALAVIDDMRAAGYEPSKEVLKKVRRRCMREMDNESDARVQSLVNSLNYRLGSENRRDILFNLNYSSMGY

SEQ ID NO: 3513 - protein, 311 aa, Cytophaga hutchinsonii
MQNRITQLFNIQYPIIQAGMVWCSGWRLASAVSNAGGLGLIGAGSMSADLLREHIQKCITATSKPFGVNLPLLYAHIDQHIQVLLDEKVKIVFTSAGNPATYTARLKEAGITVVHVVSSTKFALKAQQAGVDAIVAEGFEAGGHNGREETTTLCLIPSVADAVSIPVIAAGGIASGRAMLAAFALGAEGVQVGSAFAVSEESSAHHIFKQRVVEALEGETILTLKQLTPVRLIKNNFYEQIKKAETNGASAEDLKNIVSKGRSKKGIFEGDLNEGELEIGQVSAQLKAVKPAASVITDIWEEFEQARKNIF

SEQ ID NO: 3514 - protein, 952 aa, Saccharomyces cerevisiae
MTDETAQPTQSASKQESAALKQTGDDQQESQQQRGYNNYNNGSNYTQKKPYNSNRPHQQRGGKFGPNRYNNRGNYNGGGSFRGGHMGANSSNVPWTGYYNNYPVYYQPQKMAAAGSAPANPIPVEEKSPVPTKIEITTKSGEHLDLKEQHKAKLQSQERSTVSPQPESKLKETSDSTSTSTPTPTPSTNDSKASSEENISEAEKTRKNFIEQVKLRKAALEKKRKEQLEGSSGNNNIPMKTTPENVEEKGSDKPEVTEKTKPAEEKSAEPEVKQETPAEEGEQGEKGQIKEESTPKVLTFAERLKLKKQQKEREEKTEGKENKEVPVQEETKSAIESAPVPPSEQVKEETEVAETEQSNIEESATTPAIPTKSDEAEAEVEAEAGDAGTKIGLEAEIETTTDETDDGTNTVSHILNVLKDATPIEDVFSFNYPEGIEGPDIKYKKEHVKYTYGPTFLLQFKDKLNVKADAEWVQSTASKIVIPPGMGRGNRSRDSGRFGNNSSRGHDFRNTSVRNMDDRANSRTSSKRRSKRMNDDRRSNRSYTSRRDRERGSYRNEEKREDDKPKEEVAPLVPSANRWVPKFKSKKTEKKLAPDGKTELLDKDEVERKMKSLLNKLTLEMFDAISSEILAIANISVWETNGETLKAVIEQIFLKACDEPHWSSMYAQLCGKVVKELNPDITDETNEGKTGPKLVLHYLVARCHAEFDKGWTDKLPTNEDGTPLEPEMMSEEYYAAASAKRRGLGLVRFIGFLYRLNLLTGKMMFECFRRLMKDLTDSPSEETLESVVELLNTVGEQFETDSFRTGQATLEGSQLLDSLFGILDNIIQTAKISSRIKFKLIDIKELRHDKNWNSDKKDNGPKTIQQIHEEEERQRQLKNNSRSNSRRTNNSSNRHSFRRDAPPASKDSFITTRTYSQRNSQRAPPPKEEPAAPTSTATNMFSALMGESDDEE

SEQ ID NO: 3515 - protein, 221 aa, Magnetospirillum magnetotacticum
MYHFPTNIFAESMPDARLIILGRLITYGGRAAEPWRNRLATAGGNMRRTLLFTALGLVFAGTSALAAELVIPINAINTEGVGAIIGSVKVKDGKGGMTVTPKLSGLTPGPHGFHVHENPSCQPKEQDGKMVPGLSAGGHFDPAKAGKHEGPWGHGHQGDLPALAVNGDGNATDAVVASMLKVADLKGRAIVIHAGADNYSDQPKPLGGGGGRVACGVVPSK

SEQ ID NO: 3516 - protein, 554 aa, Zea mays
MSSPAGARPHPSRHLARRPPLPSIKSDRQLLAAAHSSPLWLFLAPRAPTHLHALSQLDRPHWQSRRLPYPFLFLQKDWTGSSQSSRSESRRIFFDEASICCSPSACWGLAPYPKMSFRSMVRDIRESFGNISRRNFEVRIHHRGRSLGSSGDLQDRPAEVQQSRWASLPPELLCDVMKRLEEDDSSWPDRKDVVSCASVCTTWRDMCKDIVRSPEHCAKLTFPVSLKQPGPRDGVIQCFIKRDKSKLTYRLYLSLSSGVLDENGKFLLAAKRSRRMAHTEYAIFMDSRNFSRSSTGYIGKLRSNFLGTKFIIYDTQAPYNGGRVCTQERAPSRRLSSRKVSPRVPSGSYPVAQVNYELNVLGTRGPRRMQCAMHSIPASAVEPGGVVPGQPKELLPRLFDESFRSTATSSFSKYSVADSSMDLGSCPFSEVEVGGGSLREGDESEKERPLVLRNKAPRWHEQLQCWCLNFRGRVTVASVKNFQLIAPAKTQPQPQASGPPPPPPPSSSSYHDPVILQFGKVGRDMFTMDYRYPLSAFQAFAICLTSFDTKLACE

SEQ ID NO: 3517 - protein, 73 aa, Nematanthus villosus
ISGTNGEVMPGQWEFQVGPSVGIEAADHTWCARYLLERITEQAGVVLSLDPKPIEGDWNGAGCHTNYSTKSTR

SEQ ID NO: 3518 - protein, 396 aa, Hedycarya angustifolia
DLEPVNPADVPVTAAGALKSYKLAAKAISKLQSLPSGNISVLCDVLVREVSELTGYDRVMAYKFHDDEHGEVIAECRRSNLEPYLGLHYPATDIPQASRFLFMKNKVRMICDCSAPPVKVIQDKSLAQPLSLGGSTLRAPHGCHAQYMANMGSIASLVMSVTINEDDDETSSGSEQQQQKGRKLWGLVVCHHTSPRFVPFPLRYACEFLIQVFGIQLNKEVELAAQMREKHILRTQTVLCDMLLLDAPVGIITKTPNVMDLVKCDGAALYYLNQFWLLGTTPTEAQIRDIVSWLQEYHNGSTGLSTDSLMEANYPGAFVLGDAVCGMAAVRITSKDFLFWFRSHTAKEIKWGGAKHNIVDKDDDGRKMHPRSSFKAFLEVVKRRSLPWEDIEMDAI

SEQ ID NO: 3519 - protein, 376 aa, Chionachne koenigii
ALSIAGAVQSQKLAVRAISRLQALPGGDVKLLCDTVVEHVRELTGYDRVMVYRFHEDEHGEVVAESRRDNLEPYLGLHYPATDIPQASRFLFRQNRVRMIADCHATPVRVVQDPGLSQPLCLVGSTLRSPHGCHAHYMANMGSIASLVMAVIISSGGDDEHTGRGGISSAMKLWGLVVCHHTSPRCIPFPLRYACEFLMQAFGLQLNMELQLAHQLSEKHILRTQTLLCDMLLRDSPTGIVTQSPSIMDLVKCDGAALYYHGKYYPLGVTPTESQIKDIIEWLTVCHGDSTGLSTDSLADAGYLGAATLGDAVCGMAVAYITPSDYLFWFRSHTAKEIKWGGAKHHPEDKDDVQRMHPRSSFKAFLEVVKSRSLPW

SEQ ID NO: 3520 - protein, 312 aa, Nostoc punctiforme
MRILIMGGTRFIGIYLTQLLVEQGHEVVLFNRGNRATPSLQGVGQIIGDRTDPTQLKAKLSQESFDVIFDNNGRELTDTQPLAEIFQGRVQHFVYMSSAGVYLKSDQLPHVEGDLVDPKSRHKGKHETEAYLTQLGLPFTSIRPTYIYGPRNYNELEGWFFDRIVRDRPIPIPGNGLHITQLGHVKDLAKAMTQILGNKQAIGQIYNISGDRFVTFDGLARASAVAAGKSPDATKIVHYDPKKFDFGKRKAFPMRVQHFFASVNKAQTELNWHPEYDLISGLQNSLENDYLANAKDKADVDFSVDEEILQAL

SEQ ID NO: 3521 - protein, 570 aa, Glycine max
MVKSIGVCKRLSGSSSCLSTSTATRDNDIARRLQFHICTCILSLSLHNLTSRVRITRDSLSRHNTNMVIIIKYYTYIYIPTIEKSEQNPTKAAMAAMQRPLKRTIAIAKQRACFSSLLPSAAAAAAADTVAPPQLPPFDHQPHPYNGPSADEVFAKRKTFLGPSVFHYYKKPLNIVEGKMQYLYDDSGRRYLDAFAGIVTVSCGHCHPEILNAITEQSKLLQHATTIYLHHTIGDFAEALAAKMPGNLKVVYFVNSGSEANELAMMMARLYTGNLGMISLRNAYHGGSSSTLGLTALNSWKYPIPEGHVHHVMNPDPYHGAFGTDAASYANDVQDHIDYGTSGKVAGFIAESIQGVGGAVELAPGYLKLVYDIIHKAGGVCIADEVQTGFGRTGSHYWGFETQGVIPDIVTMAKGIGNGLPLGAVVTTPEIASVMAQKIQFNTFGGNPVCSAGGLAVLRVLDKEKRQAHCADVGSYLLERLRFLMERHDIIGNVRGRGLMVGLELVTDRTNKTPAKAETAVVFEKLRELGVLVGKGGLHGNVFRIKPPMCFSKDDADFLVDALDYSLSKL

SEQ ID NO: 3522 - protein, 354 aa, Novosphingobium aromaticivorans
MSGALHTVLVERLGCRAPIIQTAMGWVAEPSLVIGSSNAGAFGFLGAAVMTPDECREKILAVRRGTDRPFGVNFHSFQPGADQIVELILANRDQVRAVSFGRGPNAKMIGRFRDAGILCIPTVGAVKHAKKMEELGVDMVSVQGGEGGGHTGSVPTTVLLPQVLDTVKVPVIASGGFADGRGLVAALAYGAVGIAMGTRFLLTRESPVPDSAKAAYLKAGTDQIIVTTKLDGIPQRMIRTRLMDRIEKSGSLAMWLRAFEAGAAMKRQTGASWLHFIKAARGMTGHGDVPLKQAMMAATMPMLIQKAVVDGDIENGVMATGVVGGRISEIPTCQELVDRIMAEAHGRLSALCAS

SEQ ID NO: 3523 - protein, 428 aa, Medicago sativa
MAQILAPSIQCQTRITKTSPLATPISSKMWSSLVMKQNKKVARSAKFRVMAINSGTINRVEDLLNLDITPFTDSIIAEYIWIGGTGIDVRSKSRTISKPVEHPSELPKWNYDGSSTGQAPGEDSEVILYPQAIFKDPFRGGNNILVICDAYTPQGEPIPTNKRHKAAEIFSNPKVEAEIPWYGIEQEYTLLQTDVKWPLGWPVGGYPGPQGPYYCAAGADKSFGRDISDAHYKACLYAGINISGTNGEVMPGQWEYQVGPSVGIEAGDHIWASRYILERITEQAGVVLTLDPKPIEGDWNGAGCHTNYSTKSMREDGGFEVIKKAILNLSLRHKVHIEAYGEGNERRLTGKHETASINTFSWGVANRGCSIRVGRDTEKNGKGYLEDRRPASNMDPYVVTALLAESTLLWEPTLEAEALAAQKIALKV

SEQ ID NO: 3524 - protein, 363 aa, Yersinia pestis
MTKTYHIAVLPGDGIGPEVMAQASKVLDAVRQRFGLKISTSVYDVGGAAIDRHGSPLPAATVAGCEQADAILFGSVGGPKWEHLPPAEQPERGALLPLRKHFKLFSNLRPARLYQGLEDFCPLRSDIAARGFDILCVRELTGGIYFGQPKGREGQGMHERAFDTEVYHRFEIERIARIAFESARKRRSKVTSIDKANVLQSSILWREVVNGIAADYPDVALSHMYIDNATMQLIKDPSQFDVLLCSNLFGDILSDECAMITGSMGMLPSASLNEQGFGLYEPAGGSAPDIAGKNIANPIAQILSLTLLLRFSLGKDDAADAIERAINQALEQGYRTADLAGDGHAIGTHEMGDIIAKFVVEGV

SEQ ID NO: 3525 - protein, 339 aa, Oceanobacillus iheyensis HTE831
MSEQNQQIKLTKRPEGTPTNEHFEIVDIPINNPNDGEVLIKTIYLSVDPYMRGRMSAGKSYVKPFEVDKPMNGTIVGEVVTSESESFSKGDLVRGMLPWQRYNVVSASYVEKIDPSVAPLTAYLSVLGLTGLTAYFGLLDIGQPKEGETVVVSAAAGAVGSSVGQIAKIKGAHVVGIAGTDEKIDYLENQLGFDKAVNYKDADFKQQLKEACPNGVDVYFDNVGGEVTDNVISLLNDFARIPLCGAISTYNLKPGEDHGPSILPKILKTRTTMKGFIVSDYQEQFPEAIKDLAKWVAEDKLSYEVTTVDGFENTPTAFLDLFEGKNKGKQLVKVSEISS

SEQ ID NO: 3526 - protein, 465 aa, Sinorhizobium meliloti
MDDTTSAAPEPDRLRLLRVLGPAHVWALGVGIVLVGEYMGWNFSVGKGGMIAGLMACWVAGLLYTCVAMIDSEVTSTVAAAGGQYAQAKHIVGPLMAFNVGLFLVMAYTMLEAANAITVGFLLDTVAGMQGQTGLNQQPFIVLAIMFLAWLNYRGVLATLTFNLVITAIAFLAIVALFVSVQFGASAVPLDFSAITSDPLPYGWVGIVASLHFGLWYYLGIEGTCQAAEEVRSPARSLPYGTMAGIMTLLIAATMTWYICSGLMPWEYLGQAGTPLFDAARVTGSTGLMVLLFVGTAFATLASANGCINDASRAWFSMSRDRYLPSWFGAVHPVYRTPYRAIVFLVPIALIFALGAPLDQVVTFSILSGLLGYTFMTFNMVMFRNKWPLGRIKRGYVHPFHPLPTVVLLILCSTAYFAVFLGYGTQLSAMMCFYIVASLWFHFRRYKFVRRGDQFTMPWPKPHGY

SEQ ID NO: 3527 - protein, 423 aa, Oryza sativa (japonica cultivar-group)
MAKCQFSPIPRAIAASSLVLPLPPHPGEHILRHRCLLRSPFIARASTASSLVLPLPPHPGEHILRHRRLLRSPSIARASEGRRRSSCCFRRIDKMPNRATHWCYACRRPIRVSGQDITCPNCNDGFIQEISEIGGSLNTYGIFDPSFDERRDRSFGMVEAMSDLMRQRMAEMGRNRVLDFHGTRGASSHQGRQPTVRPMLIFGSNAPDRVSSSSEEADILLRQGRRIGADRPNFSRFLVGPSLEALFEQLLLHNNRQGPPPAPQSAIDSMPVVKINLRHLRDDPHCPVCTDKFEVGTEAREMPCKHLYHAECIIPWLVQHNSCPVCRHPLPSSSHRSGSTRSSSTHSNEAISHGVARSDADPVPVARSDDSRNHEMHGSFSFLWPFDSPTPDSSSYTHEGGVGEPTVHDDAGQMTYSEWHYDY

SEQ ID NO: 3528 - protein, 495 aa, Aspergillus parasiticus
MGGDGWPSDGHILLLIVLTVLTPPSLALYRLWIHPLRSYPGPRWWAIWRGPYILSNIRGNLVRDLQRLHQQFGPVVRIAPNELSFIVPEAASPIYTSNPEFPKDPMHLPPFHNGTPGILAADHAHHRRYRRLLAFSFSDKGLRHERSLIERSIDLLITQLHENCGQGPLDLALWFNWATFDIIGDLAFGDSFGCLENVQTHPWIASIQGNVKLIPILNAFRRYRLDGLLRLLGSRKLLEQRRRNAQFTTDQVDRRLKNSSTPRGDIWDAVLAQKPDGEPPMTRDEMISNASAIVLAGSETSATLLSGCTWLLLKNPSHLHQLTSRIRSQFTHASEIDSQSVSRVEGLQAVLEESLRLYPPVPMQSNRIVPQAGAYIAGGWVPGGTSVGLQQFVACRSSSNFHRPDEFLPERWQGQGEFAHDRREVSQPFSIGPRNCIGRQLAYVEMRLILVKLLWHFDLRLDTTRMKDTDWLAEQGIWILWDKKPLWVTLEPRNE

SEQ ID NO: 3529 - protein, 108 aa, Brassica oleracea
VVRPGAPPPFNLADIRAAIPKHCWVKNPWRSMSYVVRDVAIVFGLAAVAAYFNSWLLWPLYWFAQGTMFWALFVLGHDCGHGSFSNDPRLNSVAGHLLHSSILVPYHG

SEQ ID NO: 3530 - protein, 261 aa, Trichodesmium erythraeum IMS101
MLSNINSVNPWLVAILLNIILLSLVYFAPKKLLTPWGIVHAWILGVLIWGSLGWPGYAVVVFYFLVGSGVTRIGMAEKQAAGIAEKREGARGPENVWGSALTAAICAMGVWVIGLLYPNNFPIENLPLLLMLGYVASFSTKLSDTCASEVGKAYGQRTFLITTLQPVPRGTEGAVSLEGTLAGVVASFAIAVVGWTVGLIDLTGIVFCVISAFIATNLESLIGATMQSQFEWLTNEVVNIINTSIGAIAAIVLAIVWFNKY

SEQ ID NO: 3531 - protein, 348 aa, Pseudomonas putida
MLAIRKTKAGPGGLSVDDVAAPKEAHSTDVLVKVEAAGICGTDLLIYKWGEFAKRMKLPTILGHEVSGVIEQVGSDVKGLRPGMRVSLESHLPCGTCYTCRRGWAHVCPNTRYPGVDFDGGFASFVVVPESVCWPVPCGIPPLQAAMMEPFGLAVHASLEGSGVSGLNVLVSGCGPIGLMNIAAAKALGASKVIATDIHPLRLTAAAKMGADECINATEESVYKTVRSLLGERGVDVAIDYSGQAAALKELIQSITHGGELRLMGVPSHDILLNLEEWLFKGLIVRGLHGRRLFETWERSTSLLVTGRVDLSSLVSHRLPLSAAEDAFEMALNGQSLKILFEPNGTCI

SEQ ID NO: 3532 - protein, 234 aa, Zea mays; identical to SEQ ID NO: 2641

SEQ ID NO: 3533 - protein, 456 aa, Pseudomonas aeruginosa PAO1
MSNPPPTAERTQLRKSLKLWQIVMIGLAYLTPMTVFDTFGIVSGISQGHVPTAYLLALAGVLFTAISYGKLVRQFPTAGSAYTYAQRAINPHVGFMVGWSSLLDYLFLPMINALLAKIYLTALFPEVAPWIWVVMFVLIMTLINIKSVNLVANFNTVFVLVQLAIIVVFIGLVIHGLNNGEGTATVLSTQPFFSEHAHLSAMVAGATILCFSFLGFDAVTTLSEETRDAGRVIPRAIFLTALYGGVIFITVSYFLQSYFPTNVRFKEPDAALPEIALYVGGKLFQSIFLCATFINTLASGLASQASVSRLLYVMGRDNVLPERIFGFVHPKWRTPSINVLIVGMVALSAISFDLVTATALINFGALVAFTFVNLSVIVHFYVRGGRNRSLKEHFHYLVLPLLGAAIVAVLWLNLESTSLVMGLIWAGLGFGYLFYLTRSFSRPPPRFQESELSPTQ

SEQ ID NO: 3534 - protein, 381 aa, Zea mays
  unsure (1)..(381): unsure at all Xaa locations
MVKRIVTLYMERLLPISFFFLILYSSIHRQISSSSAARKIIALSLIKISFLYMEAKKIYEGTVLSNNLVKPSVIAYMMKWLWARLVAAFLWPLHNLAKILVYKKIHSAIGISKAXISGGGSLPMHVDKFFEAIGIKVQNGYGLTETSPVVAARRPFCNVLGTVGHPIKHTEIKIFDIETGEVLPDGSKGIVKIKGPQVMKGYYKNPSATNEAFDQEGWFSTGDVGWIVPHHAMGPSRQCGGMIVLEGRAKDTIVLSTGENVEPAEIEEAASRSTLINQIVVIGQDQRRLGAIIVPNNDEVLAEAKRKSILGEDGELAKDKVMNMLYDELRTWTAHCSFRVGPILVVDEPFTIDNGLMTPTMKIRRDKVTDKYRREIEALFK

SEQ ID NO: 3535 - protein, 532 aa, Adiantum capillus-veneris
MSEQGCYTDCWGAIWWIWESGIKAMAGLEGEIQTRRLRGREIPVLPPVTRSAAASAANVGYNENTRKTKVSTKRAAADDTSSRVASNVPVQHAKKRAALANLTNQSNSAITRNSSLPSKSHASAVNGKTRAAAGQVKEVQQVAQQVVEPLQEVGREPNTGRSSLANSSITFDNDENACPERATSSVGMKSRTLDVLQLVGNENKTVASLERKTQHSLYISKDTKPRARQGGLFEDCKDDNEEGGWSSKNYMDIDNHKDPQMCSAYAAEIYHHLRMAELKRRPSLNFMDTVQQDINASMRGILVDWLVEVAEEYKLVPDTLYLTISYIDRFLSGNLVTRQRLQLLGVASMLIASKYEEICAPQVDEFCYITDNTYNREEVLEMERSVLNHLHFELTGPTTKSFLRRFVRAAQAGQKSPTLQLEFLGNYLAELTLLEYGFLHFLPSMIAGAAVLVARVTLNPTWRPWNSTLQHYSGYKASELKECAKAILELQKNTKNCTLPAIREKYRQHKFKCVATLHPPASIPAEYFDDIE

SEQ ID NO: 3536 - protein, 235 aa, Oryza sativa
  unsure (1)..(235): unsure at all Xaa locations
GRATPRDRRRRERERERVGASRSAAMAAVAAMVVVVALLLGGGAVEAVWLDLPPTGTKCVSEEIQPNVVVLADYALMYESHPTAHPTVAVKVTSPYGNTVHHNENATTGQFAFTTSEAGNYLACFWLDSPEKGSGVSLNLDWKIGIAAKDWDTVAKKEKIEGVELELRKLEAAVESIHHNLLYLKAREAEMRTVSEKTNSRVXAWFSILSLGVCIVVSVLQLWHLQGFFRKKKLI

SEQ ID NO: 3537 - protein, 121 aa, Glycine max
MARTFVLMLVAAAALLLSSTMAQSPASSPALSPTNTPVATPPRRALSPSPVPAAVPPSSSPPAPPTSSPSEPPIAAATPNIPPSTISTPPSEAPGPAANGAVFNRVGGSALILIIASAMLV

SEQ ID NO: 3538 - protein, 139 aa, Triticum aestivum
RAAARAGTSIRHALSAVKLGVDFLSIDGFECAGHVGETDITNLILLSRSRQVMPIPFIASGGFCDGYGLAAALNLGAEGINMGTRFMCTIEAPIHHNIKVAITKAQETDTQLVLRKWRNTSRLFKNKVSSEAYLGRDHA

SEQ ID NO: 3539 - protein, 467 aa, Staphylococcus epidermidis ATCC 12228
MNDTGDKKLSRTSLIGLVIGSMIGGGAFNIQSDMGGHAGGLAIIIGWLITAIGMISLALVFQNLTNERSDLDGGIYSYAQAGFGDFIGFASAWGYWFSAFLGNVAYATLLMSSIGNFFPIFKGGNTFPSIIVASILLWSVHFLILKGVETAALINSIVTITKLIPILLVIICMIVAFNFNTFKIGFFGMDGYGSLSFHFANTMSQVKSTMLVTVWVFIGIEGAVVFSGRAKNKKDVGTATVIGLISVLLIYFLLTVLAQGIVIQNHISKLEAPSMAQILAYIVGDWGATFVNIGLIISVLGAWLGWTLLAGELPFIVAKDGLFPKWFAKENKNGAPMNALFITNVLVQIFLISMLFTKSAYHFAFSLAASAILYPYMFSAFYQVKYTIEHKLTATPKQWIIGILASIYAIWLVYASGIDYLLLTMLLYIPGIIVYVVVQKNNQKRLTQFDYIFFSLIVILALIGLLR

SEQ ID NO: 3540 - protein, 364 aa, Maytenus fournieri
VQSQKLAVRAISQLQSLPGGDVKLLCETVVESVKDLTGYDRVMVYKFHDDEHGEVVAERKRPDLEPYIGLHYPATDIPQASRFLFKQNRVRMIVDCHALPVRVIQDDGLMQPLCLVGSTLRAPHGCHAQYMENMGSIASLAMAVIINGNDEEVIGGRNPTRLWGLVVCHHTSARCIPFALRYACEFLMPAFGLQLNMELQLAAQLLEKHVLKTQTLLCDMLLRDSPTGIVTQSPSIMDLVKCDGAALYYQGSYYPLGVTPTEAQIKDIVEWLLAFHGDSTGLSTDSLADAGYPGAALLGDAVCGMAVAYITNRDFLFWFRSHTAKEIKWGGAKHHPEDKDDGQRMHPRSSFKAFLEVVKSRSMP

SEQ ID NO: 3541 - protein, 155 aa, Glycine max
MYSGSSDGESHDAPQSQRKIPPASSMLWVRNLRRFIGSGAGLGSEALMELETKRILLDIFKEKQKKTAEAATIPTFYKKKPEDGSISHRVQRLAKYRFLRKQSDLLLNADDLDAMWVCLKENCVIDDATGAEKMNYEDFCHIASVCTEQIGPKCR

SEQ ID NO: 3542 - protein, 142 aa, Glycine max
MSGGGPLSQDWEPVVLRKKAPTAAAKKDEKAVNAARRSGAEIETLKKYNAGTNKAASSSTSLNTKRLDDDTESLAHEKVPTELKKAIMQARMDKKLTQSQLAQLINEKPQVIQEYESGKAIPNQQIIGKLERALGAKLRGKK

SEQ ID NO: 3543 - protein, 444 aa, Glycine max
MSAIPISSSYASTFSYSAAHALPFFFARNNYSTRINLHPPVFCQLQSETEKPLTRRCSPFLESSLLSGNGGVASNEWKAVPDIWRSSAEKYGDKIALVDPYHDPPSTMTYKQLEDAILDFAEGLRVIGVRPNEKLALFADNSCRWLVADQGMMACGAINVVRGSRSSIEELLQIYNHSESVALAVDNPEMLNRIAKLFYLKASMRFIILLWGEKSGLVSEGDKEVPVFTFTEVIHLGQESRRVLFDSLDTRMPYLSLHFDYMYLSINYVIFATLVYTSGTTGNPKGVMLTHQNLLHQIKNLGDIVPAEVGDRFLSMLPSWHAYERACEYFIFSCGVEQVYTTVRNLKEDLGHYQPHYLISVPLVYETLYSGIQKQISTSSLVRKLVALTFIRVSLRYMECKRIYEGKCLTKDQKPPSYLHSILDWLWARVVATILFPVHLLAKI

SEQ ID NO: 3544 - protein, 434 aa, Raphanus sativus
MKGVRKTYNNSYTLSFLLAFFVFILFRLAFSINTLSSTESLTISSNRTLVSPGDVFELGFFRTNSRWYLGIWYKKLSERTYVWVANRDNPLSNSIGTLKISGNKLVILGHSNKSVWWTNITRGNESSPVVAELLANGNFVMRDSNNNSASGFLWQSFDYPTDTLLPEMKLGYDLRKGLNRFLASWRSSDDPSSGDFLYKLETGRIPEFYLSSGIFRLHRSGLWNGIRFSGIPEDQKLSYVVYNFTENREEVAYTFRMTNNNIYSRLTLSYSGYIERQTWNPSLGIWNVVWSFPLDSQCDVYRMCGPYSYCDVNTSPICNCIQGFNPSNVEQWDLKSWSGGCIRRTPLSCSRDGFNRMKNVKLPETTMAIVDRSIGVKECEKRCLSDCNCTAFANADIRNGGTGCVIWTGALEDIRTYFAEGQDLYVRLAAADLV

SEQ ID NO: 3545 - protein, 349 aa, Streptococcus pyogenes MGAS8232
MKAATYLSTGNLQLIDKPKPVIIKPTDAIVQLVKTTICGTDLHILGGDVPACKEGTILGHEGIGIVKEIGDAVTNFKIGDKVIISCVTSCHTCYYCKRGLSSHCEDGGWILGHLINGTQAEYVHIPHADGSLYHAPDTIDDEALVMLSDILPTSYEIGVLPSHVKPGDNVCIVGAGPVGLAALLTAQFFSPANIIMVDLSQNRLEAAKTFGATHTICSGSSEEVKTIIDDITNGRGVDISMECVGYPATFDICQKIISVGGHIANVGVHGKPVDFNLDELWIKNITLNTGLVNANTTEMLLNVLKTGKIDATRLITHHFKLSEVEKAYETFKHAGANNALKVIIDNDIS

SEQ ID NO: 3546 - protein, 320 aa, Oryza sativa
  unsure (1)..(320): unsure at all Xaa locations
MSTASGDGGDGGGGGDGASSAAGGGGRRIPPASSMPWVRNLRRFVGTGAGLGSEALMELETKRILLEIFKERQRKSMEAGAIPSFYKKKPEDGSISNRVQKLAKYRFLKKQSELLLNADDLDAMWVCLRENCVIDDATGAEKMNYEDFCHIATVCTEQIGQKCKRFFSPSNFMKXKACIKKVLLSNCLQELMELHQESEEEVTDTEQAENWFSLTSAQRICDMFLALDKDTNGTLSKQELKEYADGTLTDIFIERVFDEHVRRSKVGGGNSREMDFESFLDFVLALENKDTPEGLTYLFRCLDLNGRGFLTTADIHTLFX

SEQ ID NO: 3547 - protein, 412 aa, Thermosynechococcus elongatus BP-1
MLAAPLPSFSTDAFDQVVMSTYGRFPITLVRGEGCRVWDDQGRSYLDFVAGIATCTLGHAHPALVETVSRQMQTLHHVSNLYYIPQQGALAQWLVAHSCGDRVFFCNSGAEANEAAIKLARKYAHTVRHIANPIIITAQASFHGRTLATITATGQPKYQKYFDPLVPGFAYVPYNDLGALEALVASLDQPQPQVAAILLEPLQGEGGVRPGDRAYFEQVRQLCTEKGILLIFDEVQVGMGRTGSLWGYETLGVEPDIFTSAKGLAGGVPIGAMIAKEFCAVFQPGDHASTFGGNPLATAAALTVCETLEKENLLENVRDRGQQLRTGLQELAAAYPQVIAEVRGWGLINGLELQPDTPLTAAEVVKAALAEGLLLVPAGPKVVRFVPPLIVSATEIDMALGAMSRALAHLAA

SEQ ID NO: 3548 - protein, 362 aa, Elaeodendron orientale
QSQKLAVRAISQLQSLPGGDIKLLCDTVVECVRDLTGYDRVMVYKFHEDEHGEVVAESKRPDLEPYIGLHYPSTDIPQASRFLFKQNRVRIIVDCHASPVCVIQDDGLMQPLCLVGSTLRAPHGCHAQYMENMGSIASLAMAVVINGNDEEVIRGKNLTRLWGLVVCHHTSARCIPFPLRYACEFLMQAVGLQLNMELQLAAQLLEKHVLKTQTLLCDMLLRDSPIGIVTQSPSIMDLVKCDGAALYYQGNYYPLGVTPSEVQIKDIVEWLLAFHGDSTGLSTDSLADAGYPRAALLGDAVCGMAVAYITNRDFLFWFRSHTAKEIKWGGAKHHPEEKDDGQRMHPRSSFKAFLEVVKSRSC

SEQ ID NO: 3549 - protein, 227 aa, Methanosarcina barkeri
MPLFGILLSLVAFQIGTLLYKKTQLSILNPLLVASVLVMVFLLFFGINYETYNLGGNYISFFLGPATVVLAVPLYKKIQLLKSNALPILAGIIAGCIAGISSILVLSSLLGLDDTISRSLAPKSVTTPIGIEISKQIGGLPAITVAAIVFTGIIGAILGPFICRCFRIKDKVAVGVAIGTSSHALGTTRAIELGETEGAMSGLAIGIAGLITVFLVPMLLYVFGLIT

SEQ ID NO: 3550 - protein, 453 aa, Oryza sativa
  unsure (1)..(453): unsure at all Xaa locations
GHPMKPHGVRMTHALLAHYGLLAQMKVLRPLPARGIDLCRFHSDDYVAFLRAVTPETQLGQVRALRRFNIGPDCPVFDGLYAYCQTYAGASVGAAVKLNHGTHDIAINWSGGLHHAKKSEASGFCYVNDIVLAILELLKLHERVLYIDIDIHHGDGVEEAFYTTNRVMTVSFHKFGDYFPGTGDIRDIGYSEGKYYCLNVPLDDGIDDDSYQSIFKPIISKVMEMYRPGAVVLQCGADSLSGDRLGCFNLSGKGHAECVKFMRSFNVPLLLLGGGGYTIRNVARCWCYETGVALGEELQEKLPYNEYYEYFGPEYSLYVAASNMENRNTNKQLEEIKCNILDNLSKLQHAPSVQFQERIPETKLPEPDEDQEDPDERHDPDSDMVLDDHKPTGHSARSLIHNIGVKREITETETKDQELCLFIKGERSSFTYMDTSKRCLQIFTLXRRLQHFX

SEQ ID NO: 3551 - protein, 125 aa, Zea mays
MVDAWWPLLGAAFPALVAGQFIRTKRRRDEEQRLKAARGREKSSDEVFVCERVCTSKRMLNKVGAFSKDPIPETCVTVCGVSELDACADACARTVCVNQHQVPNWNDVCLKRCQSECLKLSSTLM

SEQ ID NO: 3552 - protein, 228 aa, Gossypium sturtianum
FTSLCHTDVYFWEAKGQTPLFPRIFGHEAGGIVESVGEGVAHLKPGDHVLPVFTGECGNCRHCKSKESNMCDLLRINTDRGVMLSDGKTRFSINGKPIYHFVGTSTFSEYTVAHVGSVAKINPAAPLDKVCILSCGISTGLGATLNVAKPTKGSTVAIFGLGAVGLAAAEGARIAGASRIIGVDLNPNRFEEAKKFGCTEFVNPKDHNKPVQEVLAEMTNGGVDRSVE

SEQ ID NO: 3553 - protein, 439 aa, Oryza sativa
MEVQGEVDGSGVPLAVLLKRELCNQKVERPDMLFGEASKSKKGEDFTFLLPKCSRRPGQAQADGEDAGGAGDDDTISVFAIFDGHNGSAAAIYTRENLLNNVLAAIPPNLTSEEWTTALPRALVAGFVKTDKEFQTKAARSGTTVTFVIIDGWVVTVASVGDSRCILESAEGSVYFLSADHRLDTNEEEVERVTASGGDVGRINIAGGAGIGPLRCWPGGLCLSRSIGDIDVGEFIVPVPHVKQVKLSNAGGRLVIASDGVWDALRFQEALNYTRGLPAEAAASRIVKESVSSKGLRDDTTCIVVDILPPEKLSPPLKKHGKGGIKALFRRRPSDELTEDQMDRGCLEPDVVEEIYEEGSAMLAQRLKINYPTGNMFKLHDCAVCQLVMKPGEGISVHGSIPRNSRVDPWGGPFLCSSCQLKKEAMEGKQHLTSMNAFI

SEQ ID NO: 3554 - protein, 358 aa, Glycine max
MTNDNIAVTDLTSALNEDNRADLVNALKSKIQSLAGAHSDVLETLSPNVRKRVESLREIQGKHDELEADFLKEREALEAKYQKLYQPLYTKRYEIVNGVTEVEGAANESTDESEENKEKGVPSFWLNAMKNNDVLAEEISERDEGALKFLKDIKWSRIENPKGFKLDFFFDTNPYFSNTVLTKTYHMIDEDEPILEKAIGTEIEWYPGKCLTQKVLKKKPKKGSKNAKPITKTESCESFFNFFKPPEVPEDDADIDEDLAEELQNQMEQDYDIGSTLRDKIIPHAVSWFTGEAAQGDEFEDLEDDEDEEEDEDEDEDEEDDEDEDDEEEDDTKTKKKKSGKAQAGDGDGERPPECKQQ

SEQ ID NO: 3555 - protein, 129 aa, Glycine max
  unsure (1)..(129): unsure at all Xaa locations
MAHSLSFAPICSFKSSCTQGAISGNSVXRKAFQINEACQDSKARNFQSLKAADGNPSTKTKSIVCPDCEGNGAILCTQCKGTGVNSVDHFNGQFKAGGLCWLCRGKRDILCGSCKGAGFIGGFMSTFDD

SEQ ID NO: 3556 - protein, 333 aa, Halobacterium sp. NRC-1
MRDLLAAEDVAGAVFDGAAREQWYDDHDIGEYDHLVPAASHAQTSFGLLYMWAHDFEYGVFIDDDTLPHDEWDFFGRHLENLHHEGPVESVSSDERWVNVLYQSDSALYPRGYPYAAMDETTTTGQAETDHVVASQGLWTNVPDLDAVRILMDGDLRGQAQTRTETADFDRDFVAAEGDYLTVCSMNLAFRREVIPAFYQFPMDDNAWDVGRFDDIWSGVVLKRAADVVGGDIYNGAPLCEHNKAPRSTFDDLANEVAGLELNEHFWEEVAAADPATETYAGVAEAVGRRLADGEYDSYNNGAFLNECGEYLLDWVACLDALADREIAAAAGD

SEQ ID NO: 3557 - protein, 329 aa, Thermobifida fusca
MVRSSVRDSGPAPRRDRQWRAVGCRGPRCATFPGPVPVPTRKDAGCGGPVRGAASGAVCFLLRWRGPAFLRCGVEFATPPSNEVICVTILFWWLRRPLAMDEPLFSPGRVEVAPGAVHVPGWLDLEEQRALVDLCREWMRGPGGMTRHRTRGGTMSVAMTSLGWYWRPYRYSATLPDGRPVPPLPPVLSTLALRGLAAAYGTVPAPAPAYDVALVNFYAATATMGMHRDTDERTDAPVVSVSLGDTCVFRFGNTATRTRPYTDVELRSGDLFVFGGPSRWAYHGVPRVFAGTANPALGLESGRINITVRASGLPPAERGPAGASSSEAV

SEQ ID NO: 3558 - protein, 408 aa, Oryza sativa
  unsure (1)..(408): unsure at all Xaa locations
MDHLAIIATELGDSSDFEVEGIQNLTENDVSDEEIEAEDLARRMWKDRIKLRRIKERQDIALQQAVDKSKGKPISDQAMRKKMSRAQDGILKYMLKLMEVCNARGFVYGIIPDKGKPVSGASDNIRAWWKEKVKFDKNGPAAIAKYESENLASADAPSSGIKSQHSLMDLQDATLGSLLSSLMQHCDPPQRKYPLERGTPPPWWPSGNEDWWIALGLPRGQIPPYKKPHDLKKVWKVGVLTGVIKHMSPNFDKIRNHVRKSKCLQDKMTAKESLIWLGVLQREERLVLSIDNGMSEVTHHGALEYRNGDTHSSSNEYDVDGFEEAPLSTSSGDDEQDQXRAKVKRPNQVVPKKAGTKEPPKRKRPRHSSLCIVTVIEQEVQRADDASEHSRNMIPDMNRLDQKLDRCN

SEQ ID NO: 3559 - protein, 291 aa, Magnetospirillum magnetotacticum
AYKVSQGLLDEFGAERVIDTPITEMGFAGLACGAGYAGLKPIVEFMTMNFSMQAIDHVINSAAKTLYMSGGQLTCPIVFRGPNGAASRVGAQHSQDYASWYAHCPGLKVVAPWSAADAKGLLKASIRDPNPVVFLENELLYGQSFDVPDDPDFVLPIGKAKIERAGAHVTITAYSRMVQIALDAAEILKGEGIEAEVINLRTIRPLDTATIVASVQKTNRIVSLEEGWAYAGIGSEIAAVMMEQAFDWLDAPVVRVCGADVPMPYAANLEKLALPQIEHVVAAARSVCYRA

SEQ ID NO: 3560 - protein, 278 aa, Magnetospirillum magnetotacticum
MLERLVRHKVRDRFGGKLKAFVSGGAPLPYEVGVFFMALGVRILQGYGQTEAAPVIAVNRPDRNRIETVGPPMLGVEIRIASDGEILVRGEMVMQGYWRDAHSTAQAVDSEGWLHTGDIGEIDPDGALRITDRKKDIIVNSGGDNIAPQRIESFLTLEPEIAQAMVHGDRKPHLVALIVPDPEWRQSMGLADPESEDTLQKTLGRVVDRVNRQLSAIEKIRRFKVIDDPFSVENGMLTPTLKIRRHQIRIIHGESLNQLYEDKSTPQQHPFNEIHDNR

SEQ ID NO: 3561 - protein, 198 aa, Oryza longiglumis
GQTPVFPRIFGHEAGGIVESVGEGVTDLAPGDHVLPVFTGECKECPHCKSAESNMCDLLRINTDRGVMIGDGKSRFSINGKPIYHFVGTSTFSEYTVMHVGCVAKINPEAPLDKVCVLSCGISTGLGATINVAKPPKGSTVAIFGLGAVGLAAAEGARIAGASRIIGVDLNPNRFEEARKFGCTEFVNPKDHDKPVQQ

SEQ ID NO: 3562 - protein, 287 aa, Listeria monocytogenes EGD-e
MTIQWFPGHMAKARREVTEKLKLVDVIFELVDARIPLSSSNPMLEEIIHQKRRVIILNKADTADEKTTKEWIDYFAEKGLPAVAVNAQEGKGLFKIEQAAEKLMAEKFDRLRSKGMKPRAIRAMILGIPNVGKSTLINRLAKKNIARTGNKPGVTKAQQWIKVGKTLELLDTPGILWPKFEDQEIGYKLALTGAIKDDLLQMEEIAGYGLRFLENHYPDRLQTWLKVETVSEDPIETLAFIAEKRGLLDRYNDPDYSRAAETVVREIRQQKLGRMSFDFPNWEDEVE

SEQ ID NO: 3563 - protein, 348 aa, Eucommia ulmoides
MAELKKEFLNVYSVLKKELLHDPAFSLTEDSRNWVERMLDYNVPGGKLNRGLSVVDSYKLLKELSSSKKGAQLTESEIFHSSVLGWCIEWLQACALVLDDIMDSSHTRRGQMCWYKLPKVGMIAINDGLILRNHVPRILKKHFRSKPYYLELLDLFHEVECQTVGGQMIDLITTLVGEIDLSEYSLPTHRQITVSKTSYYSFYLPVACALLMTGEKLESHSGMKDILIEMGSYFQVQDDYLDCFGDPEVIGKIGSDIEDFKCTWLVVKALELCNEEQKKILYDNYGKKDPESVARVKDLYKTLKLQDVFEEYEKKTHEKLNKSIDAYPSKAVQAVLQSFLAKIHRRLK

SEQ ID NO: 3564 - protein, 273 aa, Triticum aestivum
  unsure (1)..(273): unsure at all Xaa locations
MALATNTAAAAAAAAALTGGAAQPRRAGFLPLKRRTISAVHAADPARSGASVPAAAAAKTSSPTVAPDVAAAARPASWSVDSWRKKKALQLPEYPNKEELDAVLKTIESFPPIVFAGEARHLEDRLAEAAMGRAFVLQGGDCAESFKEFNANNIRDTFRVLLQMGAVLMFGGQVPVVKVGRMAGQFAKPRSDNFEEKDGVKLPSYRGDNVNGDAFDLKSRTPDPDRMIRAYSQSXATLNLLRAFATGGYAAMQRVIQWNLXDFMDHNEAGRQV

SEQ ID NO: 3565 - protein, 104 aa, Petunia x hybrida
MAKLASFFLLALIAISIVATTALAADGQYHLDAARYGPGSLKPTQCLPQCIRRCSHTQYHNACMLFCQKCCKKCLCVPPGFYGNKGVCPCYNNWKTKEGGPKCP

SEQ ID NO: 3566 - protein, 429 aa, Zea mays
  unsure (1)..(429): unsure at all Xaa locations
MMLEGKSYLVSRSVPSSCEPETEWXYLAHAVLSGKRPAPEDDVEVEDPDETGSGGKRSKPPSPQPHTPDICEGHGSNRHATGSGEQRITGSNPMTSIGRDLTLNCLLRLSRSDYGSVASLSRDFRSMVRSGEIYRLRRQNGVAEHWVYFSCNVLEWDAYDPYRERWIQVPKMPPDECFKCSDKESLAVGTELLVFGMARIVFRYSILTNSWSRADPMNSPRCLFGSTSVGGKAFVAGGTDCVGNILSSAEMYDSETHTWTPLPSMNTARKMCSGVFMDGKFYVIGGVANSNRVLTCGEEYDLKRGSWRTIENMSGGLNGVTGAPPLIAVVSNDLYAADYGEKDLKKYDKKNNRWITLGKLPERSVSMNGWGLAFRACGDRLIVIGGPRTYTGGTIELNSWIPDERPPVWNLIARRPSGNFVYNCAVMGC

SEQ ID NO: 3567 - protein, 235 aa, Tradescantia virginiana
VQLKRMENKINRQVTFSKRRTGLLKKAHEISVLCDAEVGLIIFSTKGKLYEYSTDNSMAKILERYDRYATAERAVLEANLNLEVGSHYEYRKIKAKVDALQKSQRHLMGEQLDTMTNKELQQLEQQLETALKHIRSRKNQMMLESVAALQKKEKALREQKSILEKKLIEKQKDMEISQIHQYQAHEDNTSPTSLVLTNSLPTTLNTNGCITHAIEEEHAPTLPHTNNNNLPPWMV

SEQ ID NO: 3568 - protein, 564 aa, Desulfitobacterium hafniense
MAILLPAHALPPMDTASLYALSERYYLPVYRPRRIVLDHGKGSRVWDLDGREYVDFGAGIAVNALGHAHPALIAALTEQAGKLWHTSNVFVSEPPLRLAEQLVSASGFAERVFLCNSGAEANEAAIKLARKWATGEGREPERRVILSFRGSFHGRTLAAVTATAQPKYHEGFEPLPPGFRYSDFNDLAAAEAAMADGAVCAVLVEPVQGEGGVTPASEAFLQGLRALCDRHGALLILDEIQCGMGRTGELFACHAYGVKPDVVTLAKGARQRLPDRRDAGRPQAGAVDAVRRPRHHLRRQSAGGGGGRRGAARAALARAAGQRRSSGTGDPRRRRRARRRAGAVFRSAWPRPDDRRTTARRARRQGRRNPRPLRRTWPAAVAGGAGRAALRAGAEHRRCRHRRRPAALARGAAAVPRPLNRAGAAAMDCVFCRMLAGAAPASFVHRDQHVAAFVDLRQAVDGHVLIVPNRHVETLYELDEDTAGRLMALAVRVARALAADGAPPGLNLWQSNGHAGGQEVPHVHLHVQPRRVGDGLMRVYPNGVPAPSPRETLDALAARIAARL

SEQ ID NO: 3569 - protein, 425 aa, Bacillus israeli
MIVAEGQKITMTNGTLNVPNDPIIPFIEGDGTGPDIWRAASKVLEAAVEKAYNGEKKIVWKEVLAGEKAFKETGEWLPQETLDVIREYMIAIKGPLTTPVGGGIRSLNVALRQELDLFVCLRPVRYFNGVPSPVKRPQDTDMVIFRENTEDIYAGIEYAKGTEEVKKVIEFLQKELGVNKIRFPETSGIGIKPISEEGTKRLVRAAINYAIEHGRKSVTLVHKGNIMKFTEGAFKNWGYELAEQEFGDKVFTWAEYDRIVEKEGKEAANKAQEEAEKAGKIIIKDAIADIFLQQILTRPREFDVVATMNLNGDYISDALAAQVGGIGIAPGANINYETGHAIFEATHGTAPKYAGLDKVNPSSVILSGVLMLEHLGWKEAADLIIQAMEKTIASKVVTYDFARLMDGATEVKCSEFGNELIKNMG

SEQ ID NO: 3570 - protein, 147 aa, Saccharomyces cerevisiae
MSSNLTEEQIAEFKEAFALFDKDNNGSISSSELATVMRSLGLSPSEAEVNDLMNEIDVDGNHQIEFSEFLALMSRQLKSNDSEQELLEAFKVFDKNGDGLISAAELKHVLTSIGEKLTDAEVDDMLREVSDGSGEINIQQFAALLSK

SEQ ID NO: 3571 - protein, 477 aa, Neurospora crassa
MGSQERRFNVKKIAIVGAGPAGLAAAKYLIAQKVFEDIVIFERQDEVGGAWYYSREPTHTLHVPQVSAFCPPDPPLHPEGKPPVFPSPMYEVLHTNIPRHLMQFSDKPFPEDSLIFPSRELVHEYLVEYAKDMRHLVRFSTLVQDVRLRRDSDGRDQWDVDALALETGEVTTTTYDAVVVASGHYYTTYLPDVKNIADFHKAHPDVITHSKLYRTPEPFSNKKVIVVGNSASGIDVAAQISRVSQQPLLLSVHSATPPAHLEWIRAEEVPAIEEFLVEERGVRFADGRVEKGVDAIVYATGYLFTFPFLKSLQPPLVTDGRRVYDLYKDLIHIDHPTLVFPGLPIKVVPFPFTESQAAIFSRTWANLLPLPSVEEMKKWEDDEAKKRGHAFHVWPKLGDANFINEVHDWIKKSGTEGKEPPCWNGELIWQRGIFMEAKLQFEIDGQKAKSLEELGFRYEPEDKELASKKTTPTETLL

SEQ ID NO: 3572 - protein, 199 aa, Leavenworthia stylosa
SVGEGVTDLEPGDHVLPIFTGECGHCPHCHSEESNMCELLRINTERGGMILDGESRFSISGKPIHHFLGTSTFSEYTVVHSGQVVKINPKAPLDKVCIVSCGLTTGLGATLNVAKPKKGQSVAVFGLGAVGLGAAEGARIAGASRIIGVDLNSKRFEEAKKFGVTEFVNPKEHNKPVQQVIAEMTNGGVDRSVECTGSV

SEQ ID NO: 3573 - protein, 449 aa, Pseudomonas aeruginosa PAO1
MAIEQFGYRQQLRRSLSLSDLIIYGMIFMIPIAPFGVYGWVHADAHGMVPMAYLVGMLAMLFTALSYGAMAKAFPIAGSVYSYAQRGIHPHVGFIAGWVLLLDYLLIPPLLYVFSALALNHLFPAIPKLAWMLLFLVSATLVNLRGITFAARANLLFLIGELVVLAIFLVVGYQALEGGLGNGRLTLEPLYRPEAFDLGLVMKAASIAVLSFLGFDAISTLAEEVKGDPARQIGRAALIALFIMGGIFIAQTWLATDLAAGMNFKSADTAFYEIAEAAGGQWLSMLTAVATALAWGVTVSITSQAAVSRLLYSMARDGRLPRALARVHPRYQTPHVSLYLVAVLSLGIGWAFLDAPDVLTSLVNFGALTGFCLLHLSVINHYYRRQRSGQWLRHLLFPLVGLAIIAYVLYSMSLDAQLLGLAWIAVGLVYLALLQRGGRQAPTELAKDL

SEQ ID NO: 3574 - protein, 132 aa, Zea mays
MALEWVVLGYAAGAEAIMLLLLTLPGLDALRRGMISVVRSALKPMMSVVPFCLFLLMDIYWKYEMRPTCDDEHACTPSEHLRHQKSIMKSQRNALLIAAALLLYWILFSVTSLVVKLDHLQQRVDKLKKRDD

SEQ ID NO: 3575 - protein, 502 aa, Solanum tuberosum
MQFLSLASIFLFLSFLFLLRKWKNSNSQSKKLPPGPWKLPLLGSMLHMAGGLPHHVLRDLAKKYGPLMHLQLGEVSAVVVTSPDMAKEVLKTHDIAFASRPKLLAPEIVCYNRSDIAFCPYGDYWRQMRKICVLELLSAKNVRSYGSIRRDEVDRLVNFIRSSSGEPVNFTERLFLFTSSMTCRSAFGKVFKEQDKFIQLIKEVIGLAGGFDVADIFPSLKFLHVLSGMKGKIMNAHHKVDAIVEDVINEHKKKFAIGKTNGALGGEDLIDVLIRLMNDGGLQFPITNDNIKAIIFDMFAAGTETSSSTLVWAMVQMMKNPSVIAKAQAEVREAFKDKETFDENDVEELKYLKLVIKETLRLHPPVPLLVPRECREETDINGYTIPVKTKVMVNVWALGRDPKYWDDAESFKPERFEQRSVDFVGNNFEYLPFGGGRRICPGISFGLANVYLPLAHLLYHFDWKLPIGMEPKDLNLTELVGVTAARKDDLILVATPYEPPRQ

SEQ ID NO: 3576 - protein, 452 aa, Pseudomonas putida KT2440
MPQPLYEFTDSPLLQRQQQQESNARSYPRRIPLALRRARGIHVEDVEGRQFIDCLAGAGTLALGHNHPVVVEAIQRVLADELPLHTLDLTTPVKDRFVQDLFGILPEALRREAKVQFCGPTGTDAVEAALKLVRTATGRSTVLAFQGAYHGMSQGALNLMGSHGPKQPLGALLGNGVQFMPYPYDYRCPFGLGGEAGVKANLHYLENLLLDPESGVPLPAAVILEVVQGEGGVVPADIEWLKGVRRITEQAGVALIVDEIQSGFARTGRMFAFEHAGIVPDVVTLSKAIGGSLPLAVVVYRDWLDTWKPGAHAGTFRGNQMAMAAGSAVINYLVEHRLAEHAEAMGQRLRGHLQRLQRDYPQLGDIRGRGLMLGVELVDPQGQPDALGHPPANRDLAPKVQRECLKRGLILELGGRHGAVVRFLPPLIISAEQIDEVAQRFSAAVAAAVGSV

SEQ ID NO: 3577 - protein, 304 aa, Oryza sativa
  unsure (1)..(304): unsure at all Xaa locations
XRARADARAATLAASVAGVCLPLFARSVPALRPDGGLFAVVKAFASGVILGTGYMHVLPDSFNDLTSPCLPRKPWSEFPFAAFVAMLAAVFTLMVDSLMLTFHTRGSKGRASSAVAHHGDHGHCHAHALGQADVAALSTTEEAQLLRNRVIVQVLEMGIVVHSVVIGLGMGASQNVCTIRPLVAALCFHQMFEGMGLGGCILQAGYGGRTRSALVFFFSTTTPFGIALGLALTRVYSDSSPTALVVVGLLNAASAGLLHYMALVELLAADFMGPKLQGNVRLQLAASLAILLGAGGMSVMAKWA

SEQ ID NO: 3578 - protein, 315 aa, Enterococcus faecium
MSCYLITGGAGFIGSTLANHLGEEHVVIVVDDLSMGKVENLDMTKNITFIEGDVAEKSLMEEIMKANKFDYIFHLAAVASVADSVARPVETHRVNFESVLMILELIRKYQPDLKRIVFSSSAAVYGDEPTLPKKEESVIRPLTPYAVDKFAAEQYVLDYCHLYDVPGSAVRFFNVYGPNQNPNSPYSGVISILVDRYKKQIVGEATSFTLFGDGSQSRDFVYIDDVIQALLLVANEEAALGKQFNVGTGKATTLLELIHAINEILGVELTLEYKEERSGDIHDSLADITKIQSIGYQPKYGILSGMTNYLKTEIN

SEQ ID NO: 3579 - protein, 210 aa, Zea mays
  unsure (1)..(210): unsure at all Xaa locations
MTRRCSHCSHNGHNSRTCPNRGVKIFGVHLTDGSAIRKSASMGNLSLLSAGSTSGGASPADGPDLADGGGGYASDDFVQGSSSASRDRKKGVPWTEEEHRRFLLGLQKLGKGDWRGISRNFVVSRTPTQVASHAQKYFIRQSNMSRRKRRSSLFDMVPDESMDLPPLPGSQEPETSMLNQPPLPPAVXGEVGSMESDTSAVAEKSGASAL

SEQ ID NO: 3580 - protein, 500 aa, Beta vulgaris
FLHLRPTPTAKSKALRHLPNPPSPKPRLPFIGHLHLLKDKLLHYALIDLSKKHGPLFSLYFGSMPTVVASTPELFKLFLQTHEATSFNTRFQTSAIRRLTYDSSVAMVPFGPYWKFVRKLIMNDLLNATTVNKLRPLRTQQIRKFLRVMAQGAEAQKPLDLTEELLKWTNSTISMMMLGEAEEIRDIAREVLKIFGEYSLTDFIWPLKHLKVGKYEKRIDDILNKFDPVVERVIKKRREIVRRRKNGEDVEGEVSGVFLDTLLEFAEDETMEIKITKDHIKGLVVDFFSAGTDSTAVATEWALAELINNPKVLEKAREEVYSVVGKDRLVDEVDTQNLPYIRAIVKETFRMHPPLPVVKRKCIEECEINGYVIPEGALILFNVWQVGRDPKYWDRPSEFRPERFLETGAEGEARLLDLRGQHFQLLPFGSGRRMCPGVNLATSGMATLLASLIQCFDLQVLGPQGQILKGGDAKVSMEERAGLTVPRAHSLVCVPLARIG

SEQ ID NO: 3581 - protein, 226 aa, Phytolacca americana
GLVKKAHEISILCDADVALIVFSTKGKLFQYATGSCMEKILERYERYSYAERQLITPDPESHLSWTLEHAKLKARVEILQKNQRNYMGEELDTLSLKELQTLEHQLDSALKQIRSKKNQLMYESISQLQKKDKALQEQNKSLSKEVKEKEKEKEKTMTQQAQWDNQNQDINSSSCLMSDQALPSLNIGMNYQTESGSSSVENEAIQQQNRNNTTIALMPHWMLSHL

SEQ ID NO: 3582 - protein, 264 aa, Nicotiana tabacum
MLELRLVQGSLLKKVLESIKDLVNDANFDCSATGFSLQAMDSSHVALVALLLRSEGFEHYRCDRNISMGMNLGNMAKMLKCAGNDDIITLKADDGSDTVTFMFESPTQDKIADFEMRLMDIDSEHLGIPEAEYHAILIMPSAEFARICKDLSSIGDTVVISVTKEGVKFSTRGDIGTANVVCRQNTTVDKPEEATVIEMPEPVSLTFALRYLNSFTKATPLSNTVTISLSSEIPVVVEYKIAEMGYIRFYLAPKIEEDEEETKP

SEQ ID NO: 3583 - protein, 357 aa, Helianthus tuberosus
MAILSPYSSSFLDTLFCNEQQDHEYHEYEYEDEFTQTTLTDSSDLHLPPLDQLDLSWEHEELVSLFTKEQEQQKQTPCTLSFGKTSPSVFAARKEAVDWILKVKSCYGFTPLTAILAINYLDRFLSSLHFQEDKPWMIQLVAVSCLSLAAKVEETQVPLLLDLQVEDTKYLFEAKNIQKMELLVMSTLKWRMNPVTPISFLDHIVRRLGLTDHVHWDFFKKCEAMILCLVSDSRFVCYKPSVLATATMLHVVDEIDPPNCIDYKSQLLDLLKTTKDDINECYELIVELAYDHHNKRKHDANETTTNPVSPAGVIDFTCDESSNESWELNAHHFREPSFKKTRMDSTIRVRVWFTYKL

SEQ ID NO: 3584 - protein, 735 aa, Zea mays
MPLWLYLMATATSSAPLLPKPALRAASSSSLHTPNPRSKIQRATPEQQDQHVDTKWRRQPRAPPRRGEGAKRRLRSLVQRGEIDEALVLFDSMASGGGRNCPPVVPCNILIKRLCSDGRVSDAGRVFAALGPSATVVTYNTMVNGYCRAGRIEDARRLINGMPFPPDTFTFNPLIRALCVRGRIPDALAVFDDMLHRGCSPSVVTYSILLDATCKASGYRQAMALLDEMRAKGCEPDIVTYNVLINAMCNEGDVDEALNILSNLPSHGCKPDAVTYTPVLKSLCGSERWKEVEELLAEMTSNNCAPDEVTFNTIVTSLCQQGLVDRAIEVVDHMSEHGCVADIVTYSSILDGLCDVGRVDDAVELLSRLKSYGCKPDTIAYTTVLKGLCSTEQWERAEELMAEMLCSDCPPDEVTFNTVVASLCQKGLVDRAIRVVEQMSENGCSPDIVTYNCIIDGLCNESCIDDAMELLSDLQSCGCKPDIVTFNTLLKGLCGVDRWEDAEQLMANMMRSNCPPDEMTFNTVITSLCQKGLLTQAMETLKIMAENGCVPNSSTYNIVVDALLKAGKAQAALELLSGMTNGTPDLITYNTVISNLTKAGKMEEALDLLRVMVSNGLCPDTTTYRSLAYGVCREDGTDRAVRMLRRVQDTGLSPDTTFYNGVLLGFCRDRRTDLAIDCFAHMVSSGCMPDESTYVILLEALAYGGLLDEAKRLLASLCSLGVLDKKLIEEESHYS

SEQ ID NO: 3585 - protein, 368 aa, Bradyrhizobium japonicum USDA 110
MTPENAGTPMSANNAFHIAVLAGDGIGPEVMAPAIEVLRKIEQKSDLRFRFTEAPAGANNYLATGKSMPERTIKLCEEADAILLGACGLPSVRYPDNTEIAPQIELRFIFDLYAGVRPARLIPGVPSPIVGADTRGIDLVVIRESTEGLFASMGKGVVTHEDARETMVITRRTSERLFEFSFRLAARRKARGKPGMLTCVDKANVFKAFAFFRGIFDEIAKKHPEVRTDRLYVDACSAMLVKRPWDFDVMVMENMFGDIVSDITASLIGGLGMAPSADIGDKYAVFQPCHGTAPDIMGQGKANPTGMILSAAMMLDWIADKHGVESAAEAGETIERAVDQVYAGGIKPMEFGGSNGTADITKAVLGAL

SEQ ID NO: 3586 - protein, 235 aa, Magnetospirillum magnetotacticum
MKWEFPGRVAVVTGGMRGIGRTIADGLLAGGAEVHVFDRETGELPKGMTAHAVDVSNSDSVNAAFAAIGKPVHLLVNNAGITRDRTLLKMSDEEWASVITVNLTSAFNTIRAAGPGMVQAGVGRIVNMISINGLRGKMGQGNYAASKAGMVGLTKTAAKELGPKGVTCNAVAPGMVLTEMTLKLDQQFRDKALAEAALSILPDTTDIANAVLFLLSDAARCITGEVIKVDSGQYI

SEQ ID NO: 3587 - protein, 511 aa, Nicotiana tabacum
MALLDLQLSTSLLFCLVPLLFLFFVKFKKTITNTLLSSNNSSKIPRSYPLIGSYFSILANHDRRIKWISDIILTTPNLTFTLIRPLNFRTIFTANPSNVQHVLKTNFQVYQKGHGSYSTLKDFLSNGIFNVDGDIWKYQRQVASHEFNTRSLRKFVETVVDTELSERLIPILATAAANKTVLDFQDILQRFAFDNICKIAFGYDPGYLLPSLPEAEFAVAFEDAVRLSTERFIVPFSLIWKIKRALNIGSEKKLRVAVEQVREFAKEIVREKQKELNDKSSLDSADLLSRFLSTGHSDEDFVTDIVISFILAGRDTTSAALTWFFWLISKHPEVESQIMKEVGEKSESLLLYDEVKNMMYTHASLCESMRFYPPVPMDSKEATKDDILPDGTFVKKGTRVTYHPYAMGRVEKVWGEDWAEFKPERWLDKDEVTGNWTFVPKDAYTYPVFQAGPRICLGKEMAFLQMKRVVAGVLRRFKVVPVVEQGVEPVFISYLTAKMKGGFPVTIEERI

SEQ ID NO: 3588 - protein, 142 aa, Glycine max
MAGIGPIRQDWEPIVARKKAQNAADKKDEKAVNAARRSGAEIDTTKKYNAGTNKAASSGTSLNTKRLDDDTENLSHERVSSDLKKNLMQARLDKKMTQAQLAQMINEKPQVIQEYESGKAIPNNQIIGKLERALGAKLRSKK

SEQ ID NO: 3589 - protein, 367 aa, Mesorhizobium loti
MATKHLFLLPGDGIGPEAMAEVKKLISAMNEKLGSGFATDEGLVGGCAYDAHGAAISDADMAKAMAADAVLFGAVGGPKWDAVPYEVRPEAGLLRLRKDMELFANLRPAICYPALAASSSLKQEVVEGLDILIVRELTGGVYFGEPKQIIDLGNGQKRGIDTQVYDTFEIERISGVAFELARTRKNHVTSMEKRNVMKSGVLWNEVVTQTHKARYADVKLDHMLADAGGMQLVRWPKQFDVIVTDNLFGDMLSDIAAMLTGSIGMLPSASLGAPDVKTKKRKALYEPVHGSAPDIAGKGIANPIAMIASFAMCLRYSFGMVDEADRLEGAIAAVLDQGLRTKDIFSPGMTEVGTVEMGDAIIAKFLG

SEQ ID NO: 3590 - protein, 614 aa, Zea mays
MAVMAEVVSTTGAALRSPASQPLPAAVKNADAEKLQFIEEMTSNVDAVQERVLGEILARNAGTEYLAKYGLAAATTDRATFRAKVPMATYEDLQPYIRRIADGDRSPILSGHPVSEFLTSSGTSAGERKLMPTIEDELNRRQLLYSLQMPVMNLYVPGMDKGKALHFLFVKSETKTPGGLAARPVLTSYYKSNHFKNRPFDAYNNYTSPTAAILCADAFQSMYAQMLCGLCQRQDVLRVGAVFASGLLRAIRFLQLNWEQLAEDIEAGSLTPRVTDPSVREAVAGILRADPELAALVRSECSKGDWAGIITRIWPSTKYLDVIVTGAMAQYIPTLKYYSGGLPMACTMYASSECYFGLNLRPMCDPSEVSYTLMPNMCYFEFLPMDSAAASGGDASQLVDLARVEVGREYELVITTYAGLNRYRVGDVLQVTGFHNSAPQFRFVRRKNVLLSIESDKTDEAELQRAVERASALLRPHGAAVVEYTSQAYTKSIPGHYVIYWELLAKGPAGGAAVGEGTLERCCLEMEEALNTVYRQSRVADGSIGPLEIRVVRPGTFEELMDYAISRGASINQYKVPRCVTFPPIIELLDSRVVSSHFSPALPHWTPGQRSDSD

SEQ ID NO: 3591 - protein, 291 aa, Burkholderia fungorum
MACSTASTHCCRCCRLPCCCSARERDMQKRLTLLGSTGSIGDSTLDVVARHPERFSVYALSAHRNGDKLVEQCLRFEPEVAVVGDADTAARVAAKLREAGCKTEVTYGPQALVDVSESDGCDTVVAAIVGAAGLAPSLAAARAGKRILLANKEALVMSGAIFMDAVRDNGAVLLPVDSEHNAIFQCLPREAALHGGVSKIILTASGGPFRTREPATLVDVTPEEACKHPNWVMGRKISVDSATMMNKGLEVIEAHWLFDLPGERIDVLIHPQSVIHSLVSYADGSVLAQLG

SEQ ID NO: 3592 - protein, 388 aa, Triticum aestivum
  unsure (1)..(388): unsure at all Xaa locations
MGVGKKVLNDVKPYMMMILLQIGYAGMYIVSVASLKRGMSHYVLVTYRNLVATLVMLPFALFFEKGIRPKMTLRIFIKILGLALLEPVLVRSLYLLGVXRRKEVACVARRSSFSVVISLFDFVRPQEFMSSWCSSCYHMLLXSLDLLMTRMHVFMYHAPLAQCPWAININXTFYSTPPPPPSASATWLKGTIAIITSCVAWAGFFVLQSNTLNSYPAALTLTTLICAMGTGINGSMALVAERHDMSAWVIGLDTRLFTVVYSGVVCSGVAFFVQGIVTETRGPVFVTAFQPLCMIITAVLGSVILKEETTLGSVIGAAIIVLGLYSLIWGKSNDIIDKPVHSVAEKLALPLTSVNGNGTNGTNGGRHVNGGQVAHDVETPAVKGAICH

SEQ ID NO: 3593 - protein, 107 aa, Zea mays
  unsure (1)..(107): unsure at all Xaa locations
MTDSVLLNKPGMASIKEMPVLXDRPPPGGFAPVRYTQXFPRLSPAPMECSSMASRALRYGMYNVDQDNKLRHALKEDKITVRNAILPMLQAEEDERCVKEWKKYLEE

SEQ ID NO: 3594 - protein, 245 aa, Sulfolobus tokodaii
MHIVYDDVRDLKAIIQALLKLVDEALFDIKPEGIQLVAIDKAHISLIKIELPKEMFKEYDVPEEFKFGFNTQYMSKLLKAAKRKEEIIIDADSPEVVKLTLSGALNRVFNVNNIEVLPPEVPEVNLEFDIKATINASGLKNAIGEIAEVADTLLISGNEEKVVVKGEGENKVEVEFSKDTGSLADIEFNKESSSAYDVEYLNDIISLTKLSDYVKVAFADQKPMQLEFNMEGGGKVTYLLAPKLS

SEQ ID NO: 3595 - protein, 175 aa, Ralstonia solanacearum
MALYQLGDAVPTIDDDAYVAPEATVIGRVVLKARSSVWPGAVIRGDNEPIVVGEASNVQEGAVLHTDPGCPLDIGDRVTIGHQAMLHGCTIGEGSLIGIQAVVLNRAVIGRDCLVGAGAIVTEGKVFPDRSLILGAPAKAVRELTDDDIAKMRLNTETYAVRQAMYKQQLKRIDG

SEQ ID NO: 3596 - protein, 169 aa, Sulfolobus solfataricus
MPIEEYLGKTPKVSQKAYIHPTSYIIGDVEIGDLTSIWHYVVIRGDNDSIRIGKESNVQENTTIHTDYGYPVEIGDKVTIGHNAVIHGAKVSSHVIVGMGAILLNGSQVKEYSIIGAGSVVTQGTVIPPYSVAVGVPAKVIKKLREDEILIIDENAEEYLKHTRRLLKL

SEQ ID NO: 3597 - protein, 362 aa, Novosphingobium aromaticivorans
MKAAVLVEPGKPLDIQHLSVSKPGPHEVLIRTAACGLCHSDLHFIEGAYPHPLPAVPGHEAAGIVEAVGSEVRTVKVGDAVVTCLSAFCGHCEFCVTGRMSLCLGGDTRRGAGEAPRLTRTDDGSAVNQMLNLSAFAEQMLVHEHACVAINPEMPLDRAAVIGCAVTTGAGAVFNAAKLTPGETVCVVGCGGVGLATVNAAKIAGAGRIIAVDPMPEKRELAMKLGATDVMDAGPDAAAQIVEMTKGGVHHAIEAVGRPASGDLAVATLRRGGTATILGMMPLAHKVGLSAMDLLSDKKLQGAIMGRNHFPVDLPRLVDFYMRGLLDLDTIIAERIPLEGINDGFEKMKQGHSARSVIVFDQ

SEQ ID NO: 3598 - protein, 387 aa, Emericella nidulans
MAAPPAPQPPSLLGYHRVLSPLAGIRVSPLCLGTMHFGGQWMRAMGDVTKETAFALLDRFYEAGGNFIDTANFYQGEGSEKWLGEWVASRGNRDELVLATKYTMSYRLTGPEKIKSNFQGSHSKSLRLSVEASLAKLRTDYIDLLYVHMWDFSTSVEEVMQSLHHLVAAGKVLNIGISDAPAWVVAKCNEYARFHGLTRFCVYQGRWACSYRDFEREILPMCQSEGLALAPWGALGRGQYKSAEEFQQEGTRNMGPQEEKHRLMGAKLTEVGERKGVAAAAIALAYLLHKSPYVFPVIGCRTVEQLEANITSLGVELSDEEIYEIEDTIPFDVGFPMAFLFESPQQKYRSDMTTRHIWQVTCNARIESVPKPRPIEPKQGYKQMDRK

SEQ ID NO: 3599 - protein, 476 aa, Staphylococcus aureus
MNESGDNKLSKSSLIGLVIGSMIGGGAFNIMSDMGGKAGGLAIIIGWIITAIGMISLAFVFQNLTNERPELDGGIYSYAQAGFGDFVGFISAWGYWFSAFLGNVAYATLLMSAVGNFFPIFKGGNTLPSVIVASLLLWGVHFLILKGVETAAFINSIVTVAKLIPILLVIICMIIAFNFDTFKTGFFSMTSEGVLPFSWASTMSQVKSTMLVTVWVFIGIEGAVIFSSRAKNKKDVGSATVIGLISVLIIYFLLTVLAQGVILQNHISQLDSPSMAQVLATIVGGWGSTLVNIGLIISVLGAWLGWTLLAGELPFIVAKDGLFPKWFAKENKNGAPVNALLITNILVQLFLISMLFTQSAYQFAFSLASSAILYPYMFSAFYQVKYTLEHRQQATTKQWTIGIIASIYAIWLIYAAGINYLLLTMLLYIPALLVYTIVQKNNQTRLIKSDYILFMIIIVLAVIGLIKLLMGTINVF

SEQ ID NO: 3600 - protein, 199 aa, Leavenworthia stylosa
SVGEEVTDLQPGDHVLPIFTGECGECPHCHSEESNMCELLRINTERGGMILDGESRFSINGKPIHHFLGTSTFSEYTVVHSGQVVKINPKAPLDKVCIVSCGLTTGLGATLNVAKPKKGQSVAVFGLGAVGLGAAEGARIAGASRIIGVDLNSKRFEEAKKFGVTEFVNPKEHNKPVQQVIAEMTNGGVDRSVECTGSV

SEQ ID NO: 3601 - protein, 287 aa, Schizosaccharomyces pombe
MEKLLAFSTQLQAQGNSSNSPPDPKDLDPSVLDHIFGANPADEMRKAMDAIEDPSVPLDQKEIAFDNLEMLVEHIDNANNLVPLQLWPRLLKQLESPESTLRRLAAWTIATAVQNNPKSQQALIENDGLKILFGALKKEDSDETKNKVLYAITSELKLNEAGIALLDKIPNSWEMLIEILELKHSVMTKRVIFFFYALLIQEDKSKQIILQKAHEFQIPEKVYQFSLEHSVDEDCVTKSLHTLYLFQKNKVSVANTNELLKSLVQFKSEFPEIFTVDEWKAFHEALE

SEQ ID NO: 3602 - protein, 325 aa, Glycine max
SARVLTMLDEVYRRYRQYYQQMQAVVTSFEYVSGLSNAAPYASLAIKAMSKHFRCLKNAITDQIQFANKAHFHISNRKDESPRFGNSDRGPYGQRPGFLEHQPVWRPQRGLPERAVTVLRAWLFEHFLHPYPTDTDKLMLAKQTGLSRSQVSNWFINARVRLWKPMVEEIHMLETRQAPKNLQKEEHCTNKPSDHLPSDNSIVSENPSTSTDKFQEAPYKRAINELPNIPVRTQEQLNLPCTSNQPGGVGVSMGGSASNSVSLTLGLYQNHGIGLAEPFPLNAAQRFGVALETNNEGYVMSDYESQNRHFGRDVIGGQLLHDFVG

SEQ ID NO: 3603 - protein, 420 aa, Diplotaxis siifolia
YHYSCTFFFVILVLFPHAFSTNTLSSNESLTISSNKTLVSPGDVFELGFFKTTTRNSRNGTDRWYLGIWYKTTSDQRTYVWVANRDNPLHNSIGTLKISHANLVLLDQSNTSVWSTNLAGVVQSPVTAELLANGNFVLRGSYSTEDEFMWQSFDFPVDTLLPEMKLGWKLNSSEKEKILKSWKSPTDPSSGDYSFRLETEEFLYEFYLMKNEFKVHRTGPWNRVRFNGVPKMQNWSYISNNFIDNEDEVAYSFLVNNNNHNIHTRFRMSSTGYLQVITWTKTVPQRNMFWSFPEDTCDLYKVCGPYAYCDMNTTPMCNCIKGFVPKNAGQWELRDASGGCMRSSQLSCGEGDGFLRMSQMKLPETSEAVAVLVDNGLKECKERCVRDCNCTGFANMDSMNGGPSCVIWSGELEDMRNYVA

SEQ ID NO: 3604 - protein, 485 aa, Chlamydophila pneumoniae AR39
MTSRTKSSKNLGTIALAGMVVSSIIGGGIFSLPQNMAATAGAGAVILSWILTGFGMFFIANTFRILSTIRPDLKEGIYMYSREGFGPYIGFTIGWGYWLCQIFGNVGYAVITMDALNYFFPPYFQGGNTLPAILGGSILIWVFNFIVLKGIRQASIINVIGTIFKIIPLIIFIILTAFFFKLAVFKTDFWGHAVTKAQPSLGSVSSQLKGTMLVTLWAFIGIEGAVVMSGRAKNPLSVGQATVLGFLGCLTIYILFSLLPFGSLFQHQLANIPNPSTAGVLDILVGKWGEVLMNVGLIIAVLSSWLSWTIIVAEIPFSAAKNGTFPEIFTIENKEKSPSVSLYITSSVMQLAMLLVYFSSNAWNTMLSITGVMVLPAYLASAAFLFKLSKSKTYPKKGSIKAPLAMITGILGVVYSLWLIYAGGLKYLFMALVLLALGIPFYIDAGKKKKNAKTFFAKKEIVGMTFIGLLALTAIFLFSTGRIKI

SEQ ID NO: 3605 - protein, 344 aa, Tropheryma whipplei str. Twist
MGLTVGIVGLPNVGKSTLFNALTRGKALAANYPFATIEPNVGIAPLADARLEKLSTIFASEKIIFATVSFVDIAGLVEGASRGEGLGSKFLANIREVDAIAHVVRVFSDSQVVRAQDTLGPAADVDIVNTELALADMQTLEKVLAKKHPQPTSSQPDRVQLQKAYDALASNLVPEKISGLNLLRAKPVIYVINADQEVLSDTAARAQIESAFSPCVFLDAKFESDLAELDDKTALELRELSGNESCLDTFVAASFSALQLQTFFTAGPKEARAWTIKQLTKAPQAAGVIHSDFEKKFIRAEIISCTDLFECGSMNAARALGKVRLEGRDYVMHDGDVVEFRHAA

SEQ ID NO: 3606 - protein, 449 aa, Zea mays
  unsure (1)..(449): unsure at all Xaa locations
MKKQRQSEDQRVEKISRGGGSIRGLLYNDHLLPPLPPTPPNLLCSPPPPGPAAESGGAERSRSGGREWERHSPATAAMAGTVTVPGSSTPSTPLLKDELDIVIPTIRNLDFLEMWRPFFQPYHLIIVQDGDPTKTIKVPEGFDYELYNRNDINRILGPKASCISFKDSACRCFGYMVSKKKYIYTIDDDCFVAKDPSGKDINXALEQHIKNLLSPSTPFFFNTLYDPYREGADFVRGYPFSLREGAHTAVSHGXLWLNIPDYDAPTQLXSSPRERNERYVDAVMTIPQGNLGSPCVAWNLAFDRDLIGPXAMYFGLMGDGQPXIGRYDDXMWAGWCVKVICDHLSLGVKTGLPYIWHSKAXSNPFVNLKKEYKGIFWQEDIIPFFQNVTIPKDCDTVQKCYIYLSGQVKEKLGTIDPYFVKLGDAMVTWIEAWDELNPSTPAAANGKAK

SEQ ID NO: 3607 - protein, 341 aa, Escherichia coli K12
MKALSKLKAEEGIWMTDVPVPELGHNDLLIKIRKTAICGTDVHIYNWDEWSQKTIPVPMVVGHEYVGEVVGIGQEVKGFKIGDRVSGEGHITCGHCRNCRGGRTHLCRNTIGVGVNRPGCFAEYLVIPAFNAFKIPDNISDDLAAIFDPFGNAVHTALSFDLVGEDVLVSGAGPIGIMAAAVAKHVGARNVVITDVNEYRLELARKMGITRAVNVAKENLNDVMAELGMTEGFDVGLEMSGAPPAFRTMLDTMNHGGRIAMLGIPPSDMSIDWTKVIFKGLFIKGIYGREMFETWYKMAALIQSGLDLSPIITHRFSIDDFQKGFDAMRSGQSGKVILSWD

SEQ ID NO: 3608 - protein, 266 aa, Gossypium mustelinum
LSVEEIEVAPPQKNEVRVKIHFTSLCHTDVYFWEAKGQNPLFPRILGHEAGGVVESVGEGVTDVQPGDHVLPIFTGECKECPHCLSEASNMCDLLRINTERGGMLHDGQTRFSKDGKPIYHFLGTSTFSEYTVVHVGQVAKINPEAPLDKVCVLSCGMSTGFGATVNVAKPKKGGSVAVFGLGAVGLAAAEGARVCEASRIIGIDLNPNRFEEAKKFGCTEFVNPKDHNKPVQEVISEMTGGGVDCSIECTGSTQAMVSAFECVHD

SEQ ID NO: 3609 - protein, 242 aa, Porphyra yezoensis
MVSDLEKAVRADLQALIKEKNCHGIMVRVAWHDAGTYSKEDGTGGANGTQRFAPESGHGANAGLDIARNMCEDIKAKHPEISYADLYQLASVVAIEDAGGPVIPFRMGRKDADAPQCTPDGRLPDADKRMPHLRDIFYRMGFNDAEIVALSGAHTLGAAHKDRSGFDGPWTSNPNTFDNSYFKEIMKETPESGLLHLPSDKALLDEPECKALVETYASDQAKFFEDYAKAHQKLSELGAVWA

SEQ ID NO: 3610 - protein, 408 aa, Oryza sativa (japonica cultivar-group); identical to SEQ ID NO: 1741

SEQ ID NO: 3611 - protein, 250 aa, Capsicum annuum
MGKCYPTVSEEYLKAVDKCKRKLRGLIAEKNCAPLMLRLAWHSAGTYDVCSKTGGPFGTMRFKTEQSHGANNGIDIALRLLEPIREQFPILSYADFYQLAGVVAVEVTGGPDVPFHPGREDKPEPPVEGRLPDATKGSDHLRDVFVKQMGLSDQDIVALSGGHTLGRCHKERSGFEGPWTANPLIFDNSYFKELLGGEKEGLLQLPSDKALLSDPAFRPLVEKYAADEDAFFADYAEAHLKLSELGFAEA

SEQ ID NO: 3612 - protein, 514 aa, Solanum tuberosum
MDGTAVQGTSSVDSFLRNYKLGKTLGIGSFGKVKIAEHTLIGHKVAVKILNRRKIRNMDMEEKVSREIKILRLFMHGHISRLYEVIETPSDIYVVMEYVKSGELFDYIVEKGRLQEDEARNFFQQIISGVEYCHINMVVHRDLKPENLLLDSKWNVKIADFGLSNIMRDGHFLKTSCGSPNYAAPEVISGKLYAGPEVDVWSCGVILYALLCGTLPFDDENIPNLFKKIKGGYITLPSHLSAGARDLIPRMLIVDPMKRMTIPEIRLHPWFQAHLPRYLAVPPPDTMQQAKKIDEEILQEVVKMGFDRNNLTESLRNRVQNEGTVPYYLLLDNRHRVSTGYLGAEFQESMEYGYNRINSNETAASPVGQRFPGIMDYQQAGARQFPIERKWALGLQSRAHPREIMTEVLKALQELNVCWKKIGQYNMKCRWVPSVPGHHEGMGVNSMHGNQFFGDDSSIIENDGDTKLTNVVKFEVQLYKTREEKYLLDLQRIQGPQFLFLDLCAAFLAQLRVL

SEQ ID NO: 3613 - protein, 481 aa, Oryza sativa (japonica cultivar-group)
MAAAAAAATVEAVGVAGGRRRRSGSVALGDLLRREASAERASASASAGAGGRERERRPSVAAGQACRAKKGEDFALLKPACERLPAGGAPFSAFALFDGHNGSGAAVYAKENILSNVMCCVPADLSGDEWLAALPRALVAGFVKTDKDFQTRGTTVTFVIIDGYVVTVASVGDSRCVLEAEGTIYHLSADHRFDASEEEVGRVTECGGEVGRLNVVGGAEIGPLRCWPGGLCLSRSIGDQDVGEFIIPVPYVKQIKLSSAGGRIIISSDGVWDALTVDTAFSCARGLPPEAAADQIVKEAIASKGLRDDTTCIVIDIIPPEKISPTVQPAKKAGKGLFKNIFYKKATSDSPCHADKDQCTQPDLVEEVFEDGCPSLSRRLDSEYPVRNMFKLFICAICQVELESGQGISIHEGLSKSGKLRPWDGPFLCHSCQEKKEAMEGKRHSRAVSSLPSILHECCCEDWYEFTTCLLVLEYRKMRSP

SEQ ID NO: 3614 - protein, 470 aa, Bacillus subtilis subsp. subtilis str. 168
MNSAHNKNETTFQRSMKSRHLFMLSLGGVIGTGLFLSSGYTIQQAGPAGTILAYLVGAGIVYLVMLCLGELSVAMPVTGAFHTYAAKYIGPGTGFTVAWLYWLTWTVALGSEFTAAGLLMQRWFPHTSVWMWSAVFALFIFLLNAFSVKFFAESEFWFSSIKVLAIVLFILLGGSAMFGIIPIKGGEAAPMLSNFTAEGGLFPNGFVPILMTMLSVNFAFSGTELIGIAAGESVDPDKTIPKAIKTTVWRLSLFFVGTIFVLSGLIPIQDAGVIKSPFVAVFDRVGVPYAADIMNFVILTAILSAANSGLYASSRMLWSLSKEKTLHPTFAKLTSKGTPFNALVFSMIGGILSLLSSVFAPDTVYVVLVSISGFAVVVVWMGIAASQFMFRKRYIEAGNKVTDLKYRTPLYPFVPIAAFLLCLASVVGIAFDPNQRIALYCGVPFMAICYAIYYVKNRKSQPAADMTHSK

SEQ ID NO: 3615 - protein, 340 aa, Lactobacillus plantarum WCFS1
MYQASQKRYDHMIYNRVGNSGLKLSAIGLGLWNNFGSVDPIANQKAIIHQAFDLGITYYDLANNYGPEPGSAETNFGRIMATDMRPYRDEMVIASKAGYVMWPGPYGNWGSRKSIIASADQSLQRTGLDYFDIFYSHRPDPETPMEETATALDQLVRQGKTLYVGISNYNGKQTAAMTKIFESLGTPYIIHQPRYNMFNRQVEQDLFPVLQATHKAAVGFSSLSQGLLTDKYLHGITTDSRANKQTIPFLSPVQVEQTLATVKRLNEVAQQREQSLAQMALAWNLRQPALASVLIGASRPEQVVNNVAALEKLKFSESELATIEQILTEQPAIDWNAGRS

SEQ ID NO: 3616 - protein, 263 aa, Arabidopsis thaliana
METLHPFSHLPISDHRFVVQEMVSFHSSSSGSWTKEENKMFERALAIYAEDSPDRWFKVASMIPGKTVFDVMKQYSKLEEDVFDIEAGRVPIPGYPAASSPLGFDTDMCRKRPSGARGSDQDRKKGVPWTEEEHRRFLLGLLKYGKGDWRNISRNFVVSKTPTQVASHAQKYYQRQLSGAKDKRRPSIHDITTGNLLNANLNRSFSDHRDILPDLGFIDKDDTEEGVIFMGQNLSSENLFSPSPTSFEAAINFAGENVFSAGA

SEQ ID NO: 3617 - protein, 256 aa, Glycine max
MEAVRAGREGAIGLGQGDGVAKDSTETELTKIRLLRAIVETRDPSSKEEDDFMIRRFLRARDLDVEKASAMLLKYLKWRNSFVPNGSVSVSDVPNELAQDKVFMQGHDKIGRPILMVFGGRHFQNKDGLDEFKRFVVYVLDKVCASMPPGQEKFVGIAELKGWGYSNSDVRGYLSALSILQDYYPERLGKLFIVNAPYIFMKVWQIVYPFIDNKTKKKIVFVEKNKVKSTLLEEMEESQVPEIFGGSLPLVPIQDS

SEQ ID NO: 3618 - protein, 88 aa, Buchnera aphidicola
FGLYEPAGGSAPDIVGKNIANPIAQILSIAMLVRYTMKLPMISDHIESAVIDTLKKGYRTLDIANDKEKYVSTNDIGDIIADILKKRI

SEQ ID NO: 3619 - protein, 214 aa, Paeonia californica
IVESVGEGVTDVKPGDHVLPIFTGECKECRHCKSEESNMCDLLRINTDRGVMLNDGKSRFSVNGQPIFHFVGTSTFSEYTVLHVGCLAKINPEAPLDKVCVLSCGISTGLGATLNVAKPKKGSTVAIFGLGAVGLAAAEGARISGASRIIGVDLNPKRFDEARKFGVTEFVNPKDYNKPVQEVIAEMTGGGVDRSVECTGSVMAMMSAFECVHD

SEQ ID NO: 3620 - protein, 353 aa, Pennisetum alopecuroides
TGYDRVMVYRFHEDQHGEVVAECRRDNLEPYLGLHYPATDIPQASRFLFRQNRVRMIADCHATPVRVIQYPGLSQPLCLVGSTLRAPHECHAQYMANMGSIASLVMAVIISSGGDDEQTTRGGISSAMKLWGLVVCHHTSPRFIPFPLRYACEFLMQAFGLQLNMELQLAHQLSEKHILRTQTLLCDMLLRDSPTGIVTQSPSIMDLVKCDGAALYYHGKYYPLGVTPTESQIKDIIEWLTVCHGDSTGLSTDSLADAGYHGAAALGDAVCGMAVAYITPSDCLFWFRSHTAKEIKWGGAKHHPEDKDDGQRMHPRSSFKAFLEVVKSRSLPWENAEMDAIHSLQLILRDSFR

SEQ ID NO: 3621 - protein, 556 aa, Mycobacterium marinum
MSFLLVQPEMVSAATESLTAIRSALGEVSAAVAGPTTAVVAAAGDEVSAAISQVFGAYGQEFQALNAQAAAFQAEFEGLLSGGAAAYVSAEALNSSVFGPPMQELLKVVNAPTQMLLGRSLIADGANATVAGGDGRPGGILMGKGGDGAPGGPGQPGGNGGAAGLIGTGGAGGKEAPSMPGGLGGRGGLLWGDGGKGGDGGAPVYDAWGYLLAEAGTGGAGGLPGMFGGLPGVAGAWGGEVPTALAAPMALSAAASSPAAVGGAYQTLFDNTWTNLQAIGATWNADPAPFLSQFIANQQTYANTVFTSLSNSVQDFGAGLVALPAAYQGAFQALMTGNVSGAVEILGKGYLGLVFNGFDYTNVPVVTVQGALGDLLPITTIPGQISQNMTNVLQTVTDTSIMANISLLSPSFTTGFPLTLALDALGAPIVTGQAALQSATTFIDAVQAGDVAGAFGAIVDAPAVIANGFLNGEGTITLDLPTYLSPISGTESLTSAIPIGGILTPLQPVDSTIVFRVLPHTPPVTQHITLGGTEFGGLIPGLQSASAQLADAIKLS

SEQ ID NO: 3622 - protein, 576 aa, Zea mays
PTRPPTRPISHDFCEPLGDHTVDSDSHHDMPYSQSNLPRSQSAIFQNDCTSDPEGSVDSEILGCRSVDGLCSLTDEKFDYLRGGEMYHCKSNLDVYCAPSPNMHRASNIDDHGSVGCSDVAAEGQRSTGSTEEFFVRDGILVGHEYWDGKYICGDHSLGPVALFCADYYHSGNDVDLSEATGQERELSNRDSTLHQSLVVEVPESVSISDTNDISGEPEHSRTDIDEDPSELTPRTYNIKRIEDWINQIDINDIALDGQGENSVSALAKSREPMAGVPAVRPDAKSPLGMEIAYTYISKLTPASSSAQLANLGLVAIPRLSAFSGLRVLNLSGNSIVRVTAGALPKGLHMLSLSKNNISTIEGLRELTRLRLLDISYNRISRIGHGLASCSSLKELYLAGNKISEVDGLHRLLKLKILDLRHNKISTSKGLGQLAANYNSLEAINLAGNPAQKNVGDEHLKKYLLGLLPNLAVYNKQPIRATGSKDVSDRHTRKISSSHHSDRGGRPDRRSSRLVGAPSAHKPQSSRHGRSGYVSSSALKYTRARNTHKTSLGSRPLEHASAIDLAKQTQTEGRTQ

SEQ ID NO: 3623 - protein, 101 aa, Zea mays
  unsure (1)..(101): unsure at all Xaa locations
PGAPDVXPYVETDFKRSPLRVVEKAKGLCTQASDAVFXALEGDARNVLCEAVKRHGAKMLVVGTHGYGAIKRAVLGSVSDYCAHHAHCTVMIVKKPKQPKP

SEQ ID NO: 3624 - protein, 744 aa, Listeria monocytogenes
MKTVLGKTNVTDTVSQTDLDQVTTLQADRLGIKSIDGVEYLNNLTQINFSNNQLTDITPLKNLTKLVDILMNNNQIADITPLANLTNLTGLTLFNNQITDLDPLKNLTNLNRLELSSNTISDISALSGLTSLQQLSFGNQVTDLKPLANLTTLERLDISSNKVSDISVLAKLTNLESLIATNNQISDITPLGILTNLDELSLNGNQLKDIGTLASLTNLTDLDLANNQISNLAPLSGLTKLTELKLGANQISNISPLAGLTALTNLELNENQLEDISPISNLKNLTYLTLYFNNISDISPVSSLTKLQRLFFYNNKVSDVSSLANLTNINWLSAGHNQISDLTPLANLTRITQLGLNDQAWTNAPVNYKANVSIPNTVKNVTGALIAPATISDGGSYAEPDITWNLPSYTNEVSYTFNQSVTIGKGTTTFSGTVTQPLKAIFNAKFHVDGKETTKEVEAGNLLTEPAKPVKEGHTFIGWFDAQTGGTKWNFSTDKMPTNDIDLYAQFSINSYTATLDNDGVTTSQTVDYQGLLQEPTAPTKEGYTFKGWYDAKTGGDKWDFATSKMPAKNITLYAQYSANSYTATFDVDGKTTTQAVDYQGLLKEPKTPTKAGYTFKGWYDEKTDGKKWDFATDKMPANDITLYAQFTKNPVAPPTTGGNTPPTTNNGGNTTPPSANIPGSDTSNTSTGNSASTTSTMNAYDPYNSKEASLPTTGDSDNALYLLLGLLAVGTAMALTKKARASK

SEQ ID NO: 3625 - protein, 456 aa, Pseudomonas fluorescens PfO-1
MTSTTQLKPTLGTLHLWGIAVGLVISGEYFGWSYGWGTAGTLGFLVTALMVATMYTCFIFSFTELTTAIPHAGGPFAYSRRAFGEKGGLIAGIATLIEFVFAPPAIAMAIGAYLNVQYPGLDPKLAAVGAYFVFMTLNILGVSIAATFELVVTVLAVAELLVFMGVVAPGFSFSNFVLNGWSGANEFTMGSIPGIFAAIPFAIWFFLAIEGAAMAAEEAKDPKRTIPRAYVSGILTLVFLAIGVMVMAGGVGDWRQLSNINDPLPQAMKAVVGNNSTWMHMLVWIGLFGLVASFHGIILGYSRQFFALARAGYLPKGLAKLSRFQTPHRAILAGGVVGIAAIYSDGLVNLQGMTLTAAMITMSVFGAIVMYIISMLSLFKLRKTEPNLERTFRAPGYPVVPAIALFLAVVCLVAMAWFNTLIGCVFLGFMAAGYLYFQLTAKQRSEAPADAMLEGI

SEQ ID NO: 3626 - protein, 494 aa, Zea mays
MSFRSIVRDVRDSIGSLSRRSFEVTAAAAAGGLSGRTAAQHRRGRSQSTVHELRDTGVVVQQDESRWASLPPELLRDVVRRLEASESAWPNRKHVVSCAAVCRAWREMCREIVLSPEVCGKLTFPVSLKQPGPRDGMIQCFIKRDKSKSTYRLYLCLSTAVLMENGKFLLSAKRSRRTTCTQYIISMDADNISRSSSTYIGKLRSNFLGTKFVVSDTQPPPYRYSGAAPPPPRAAGRRASRRFDSRKVSPKVPTPAGAGGGSYSIAQVTYELNVLSTRGPRRMHCVMRSIPASAVEPGGTVPGQPERILPRALLEEQEEEEDSSSFRRTGTGTTSFSKSSASIMDRSVDFGGSSSSSFRDFSSARFSDIVDGGGGGDGEQDRERPLVLRNKAPRWHEQLQCWCLNFRGRVTIASVKNFQLIAAAPSLQAQAPAAGAGAPLAPSSQPAPQDQDKVILQFGKVAKDMFTMDYRYPLSAFQAFAICLSSFDTKLACE

SEQ ID NO: 3627 - protein, 327 aa, Caulobacter crescentus CB15
MQTVLVAGGAGYVGSHCCLALAAAGFRPVVYDDLSNGHREHVQWGPLEVGDIRDGARLDAVFAAHAPVAVLHFAARIEVGESVKNPGAFFDNNVGGTITLIEAARRAGVNAMVFSSTCATFGDPVHLPMAEDHPQAPLNPYGRSKLMVEQALADYDRYVGFKSAVMRYFNAAGADPEGRIGEWHEPETHAIPLAIQVALGQRSHFTIFGDDYDTRDGTAVRDYIHVLDLADAHVSALRRLLAGGSSDSYNLGTGTGTTVRELVDGVGRVTGKPLPVQMAPRRAGDAPVLVGDNTRAREHLGWKPSRDLDATLSSAWRWHQAQALVGR

SEQ ID NO: 3628 - protein, 335 aa, Vibrio vulnificus CMCP6
MTGGMGYIGSHTCVQMMAAGMEPIIVDNLCNAKVDVLSRIEALTGKQPTFYQGDIRDEAFLDSVFAQHDIQAVIHFAGLKAVGESVAKPLEYYDNNVNGSLVLARCMRKAGVKSIVFSSSATVYGDPEIVPITEDSPTGATTNPYGRSKYMVEQCLSDLFHAENDWSITLLRYFNPVGAHPSGSMGEDPQGIPNNLMPFIAQVAVGRREKLSVFGNDYPTPDGTGVRDYIHVMDLADGHIAALKSVGKTSGLHIYNLGTGKGSSVLEMVEAFAAACGKPVPYELCPRRPGDIAECWASTEKAERELGWKATRSVAEMTADTWNWQSNNPNGYSPA

SEQ ID NO: 3629 - protein, 183 aa, Magnetococcus sp. MC-1
MPLYPFAGRWPSVDPSAFVHPDAVIIGDVAIGPESSIWPGVVIRGDVNHIRIGARTNIQDGSVLHVTRGKPDKPAGLPLILGDDITIGHRVTLHACTLKSGCMVGMGATVMDGVVIESGAMVAAGAMVTPGKQIATGELWMGSPAKLARPIRATEAQEITATNQNYIKLGQHYLQELAALNHG

SEQ ID NO: 3630 - protein, 391 aa, Coptis trifolia
DLEPVNPADVPVTAAGAMKSYKLAAKAISRLQSLPSGNIAVLCDVLVQEVSDLTGYDRVMVYKFHEDDHGEVIAECRVPELEPYLGLHYPATDIPQASRFLFMRNKVRMICDCSAAPVKVIQDNKLEQPLSLGGSALRAPHGCHAQYMANMGSVASLVMSVTINENDDQMETDQQKGRKLWGLLVCHHTSPRFVPYPLRYACEFLIQVFGMQINKEVELATQVRERHILQTQTVLCDMLLRDAPIGIVTQSPNIMDLVKCNGAALYYRSRFWLLGVTPTEAQIRDIAEWLLQYHNASTGLSTDSLMEAGFPGASVLGTAVCGMAAIKITLKDFLFWFRSHTAKEIKWGGAKHNPTEKDDGWKMHPRSSFKAFLEVVKHRSLPWEDVEMDAI

SEQ ID NO: 3631 - protein, 482 aa, Pseudomonas aeruginosa PAO1
MSLEQTGHAPATSGIDFESVDADYFQHRQLKKGAAGWVLLVGLGVAYVISGDYAGWNFGLAQGGWGGMFLATLLMATMYLCMCFSLAELSSMIPTAGGGYGFARSAFGPWGGFLTGTAILIEYAIAPAAIACFIGAYCESLFGVGGWLIYLVFYIVFIGIHILGAGEALKLMFVITAVAAIALGVFIVAMVPHFDSANLFNIPQTAATGASSFLPFGYVGVWAAIPYAIWFFLAVEGVPLAAEETKNPKRDLPRGLIGAMLVLLAFAALILVVGPGAAGAKELMGSGNPLVEALESAYKGSTWMSQFVNLVGLAGLIASFFSIIYAYSRQIFALSRAGYLPRSLSLTNRKKAPVLALVVPGVIGFGLSLTGQGDLLILVAVFGATISYVLMMAAHITLRIRRPDMQRPYRTPGGILTSGVALALACVAVVAGFLVDPRVVVGAVAIYAVLIGYFALYSRHHLVSGTPEEEFAAIQAAEQDLR

SEQ ID NO: 3632 - protein, 135 aa, Glycine max
MEGRRRGGYSGRRIVASRRGSGKSNANININNNNNNKNKNNINVIKKLQSREIWSKPHRAFASVTASHRFRSMCLTHQYDTHDPSKTPSSLWPFLMKRTKVVEIVAAKNVVFALYHSGLCAAFSRGEVALKNYDS

SEQ ID NO: 3633 - protein, 399 aa, Sinorhizobium meliloti
MAATTPLYDTYLRAPLRFERGEGVWLIAEDGTRYLDFAAGVAVNSLGHAHPHLVEALKAQADKVWHLSNLYEIAGQESLARRLTQVTFADRVFFTNSGAEALECAIKTARRYHFAKGHVEKFHVITFEGAFHGRTLATIAAGGQQKYIEGFGPKAPGFYQVPFGDIGAVKNAINEETAAILVEPIQGEGGIRTASKEFMQGLRELCDEFGLLLILDEVQSGVGRTGKLFAHEWAGIKPDIMAVAKGIGGGFPLGACLATEAAAAGMVAGTHGSTYGGNPLAMAVGNAVLDVVLAEGFLDQVREVALVFRQGLASLKDRFPDVIEEIRGDGLMLGIKAKVPSADLLKAIRAEKLLVVPAGENVLRLLPPLITTPAEAREGLARLERAAEAVSGKSGNAAA

SEQ ID NO: 3634 - protein, 123 aa, Narcissus pseudonarcissus
QPMSVFWLVPQFFLVGAGEAFCYIGQLDFFLRECPKGMKTMSTGMFLSTLSLGFFLSSALVTIVHKVTGESGQGAWLPDDLNRGKLYDFYWLLAVLSAVNLVAFLVSARWYVYKENRMATDDG

SEQ ID NO: 3635 - protein, 154 aa, Saccharomyces cerevisiae
MVQAVAVLKGDAGVSGVVKFEQASESEPTTVSYEIAGNSPNAERGFHIHEFGDATNGCVSAGPHFNPFKKTHGAPTDEVRHVGDMRNVKTDENGVAKGSFKDSLIKLIGPTSVVGRSVVIHAGQDDLGKGDTEESLKTGNAGPRPACGVIGLTN

SEQ ID NO: 3636 - protein, 152 aa, Sandersonia aurantiaca
MVKAVAVLNGSEGVKGTVFFTQEGDGPTTVTASLSGLKPGLHGFHVHALGDTTNGCMSTGPHFNPAGKEHGAPEDENRHAGDLGNVTAGEDGNVNFTTSDCQIPLTGPHSIIGRAVVVHADPDDLGKGGHELSKSTGNAGGRVACGIIGLQA

SEQ ID NO: 3637 - protein, 342 aa, Pirellula sp.
MKALQLSAPKQWEQIEIDEPSPPGPGEALVRIHRVGVCGTDLGGYLGKFPFFSYPRIPGHELGVEVVAVGEGVENVKVGDRCSVEPYINCQKCYSCERGLTNCCESHQTLGVMCDGGLTEKMILPARKLHPANNLSYEQSALVETLAIGCHAIDRAHVTEKDTVLVIGSGPIGLSAIEFARVAGARVIVADLSQTRLDFVTEKMGMTDTIQFDGSEADIEKLEAMTDGRRADVVVDATGNHHSMRRAMEMAAFGGRVVYVGITQQDLQFPHAPFLHRRELTILASRNALTGDFARIIQLIESGVIDTDPWITHHAKFEEVIESFPAWTDPESGVVKAVIHIS

SEQ ID NO: 3638 - protein, 372 aa, Salmonella typhimurium LT2
MKSRAAVAFGPGQPLKIVEIDVAPPKKGEVLVKITHTGVCHTDAFTLSGDDPEGVFPAVLGHEGGGVVVEVGEGVTSLKPGDHVIPLYTAECGECKFCKSGKTNLCQAVRATQGKGLMPDGTTRFSYNGEPVYHYMGTSTFSEYTVCAEISLAKVNPQAPLDKVCLLGCGVTTGIGAVHNTAKVKAGDTVAVFGLGGIGLAVIQGAVQAKAGRILAVDTNPEKFTLAGEMGATDFINPNDYDKPIQDVIVELTDGGVDFSFECIGNVNVMRAALECCHKGWGESIIIGVAGAGQEIKTRPFQLVTGRVWRGSAFGGVKGRTQLPGMVEDAMNGKIRLDPFITHRLPLEQINDAFELMHQGKSIRTVIHFGDN

SEQ ID NO: 3639 - protein, 337 aa, Bifidobacterium longum NCC2705
MTVLVTGGCGYIGAHVVHALHQAGEKVVVVDDLSYGKPTRIEGSRLYGMDIATPGAGERLAEILDAEGVDSVIHFAARKQVGESVEKPLWYYQQNINGMLNVLTGMTQSKNAKKLVFSSSAATYGVPPVDVVPEDVVPMLPINPYGQTKLFGEWMARACEQPFGIRFCALRYFNVAGCGPVELEDPAILNLIPMLFNRLKQGKAPAIFGDDYPTPDGTCVRDYIHVSDLADAHIAALKYLDRDKRKYDAFNVGTGEGTSVRQIVDEVKKVTGLPFTEAVMARRAGDPPHLIGSPKRINEEMGWHAKYDVEDIVKSAWDAWQANPEHHIDVDTWKQAD

SEQ ID NO: 3640 - protein, 195 aa, Glycine max
PNPCLGCFIWTKPWANPGAGDILMGFLGSVILSFSFSMFKQRKLVKRHAAEIFTSVIISTVFSLYSTALVGRLVQLEPSLTVSILPRCITVALALSIVSLFDGANSSLTAAVVVLTGLVGANFVQATLDKLSFRDPIARGIATASSAHGLGTAALSAKEPEALPFCAIAYALNGIFGSILCSIPAVRQSLLAIVG

SEQ ID NO: 3641 - protein, 248 aa, Rhodopseudomonas palustris
MTRHAIVTGASRGIGRAIALGLAQRGYDLALTDIAAQESVLRETVEEVKQLGRKCIPILADVSKIEDCQRSVTEAVAGLGHVDVLVNNAGILRLAMIDETTPEHWDQTFAVNVRGVFQMTQAVVVHMKERRYGRIVNIASLAARTGGPGQSHYAASKSAVVGFTRVSSMEFGGHGITVNAVCPGIIQTEMGRNNLRDPERVTYFEKITDLHRLGEPEDVVGPVAFFASDDSAFVTGQALNVDGGIFYS

SEQ ID NO: 3642 - protein, 364 aa, Glycine max
MDRSAMTVGPGMDMPIMHDSDRYELVRDIGSGNFGVARLMRDKHTEELVAVKYIERGDKIDENVRREIINHRSLRHPNIVRFKEVILTPTHLAIVMEYASGGELFERICNAGRFSEDEARFFFQQLISGVSYCHAMQVCHRDLKLENTLLDGSPAPRLKICDFGYSKSSVLHSQPKSTVGTPAYIAPEVLLKKEYDGKIADVWSCGVTLYVMLVGAYPFEDPEEPKNFRKTIHRILKVQYSIPDYVHISPECRHLISRIFVADPAQRISIPEIRNHEWFLRNLPADLMVENTMNNQFEEPDQPMQSIEEIMQIISEATIPAAGTQSLNQYLTGSLDIDDDDMDEDLETDPDLDIDSSGEIVYAM

SEQ ID NO: 3643 - protein, 455 aa, Zea mays
  unsure (1)..(455): unsure at all Xaa locations
MSFRSIVRDVRDGFGSLSRRSFEVTLASIYGLTGHHKGXKTQSSSHVLDDSPSIICESRWANLPPELIRDIIRRLEADESTWPARKHVVRFAAVCRTWREMCKEIVLSPEFCGKLTFPVSLKQPGPRDGNTMXIRCFIKXRNKSKSTYHLYLCLSNVVTSESGKFLLSAKRHRKTTCTEYTISMDSGNISRSKRTYIGKIRSNFLGTRFLIYDTQPPYNGAVVPPAGRTSRRFNSTKVSPKLPSVSYNIAQVSYELNVLGTRGPRRMRCIMHSIPASSVEPGGTVPGQPEQIVPRALEDSFRSTASFSQSFRSTASFSKSIMDSSMDFNSARFSDIAGSSARFTGESETKERPLVLRNKPPRWXHEQLQCWCLNFXRGRVTIASVKNFQLIAAATPPPAGAPTPSQPAPSDPDKVILQFGKVARDMFTMDYRYPLSAFQAFAICLSSFDTKLACE

SEQ ID NO: 3644 - protein, 374 aa, Plagiopteron suaveolens
ALSIAGAVQSQKLAVRAISQLQSLPGGDIKLLCDTVVQSVRDLTGYDRVMVYKFHEDEHGEVIAESKRPDLEPYIGLHYPATDIPQASRFLFKQNRVRIIVDCHASPVSVIQDDGLMQPLCLVGSTLRAPHGCHAQYMDNMGSIASLAMAVIINGNDEDGTGGRNPTRLWGLVVCHHTSARCIPFPLRYACEFLMQAFGLQLNMELQLAAQLLEKHVLKTQTLLCDMLLRESPTGIVTQSPSIMDLVKCDGAALYYQANYYPLGVTPTEAQIKDIVEWLLAFHGDSTGLSTDSLADAGYPGATLLGDAVCGMTVAYITNRDFLFWFRSHTAKEIKWGGAKHHPEDKDDGQRMHPRSSFKAFLEVVKSRSLPWEN

SEQ ID NO: 3645 - protein, 283 aa, Streptococcus agalactiae NEM316
MATIQWFPGHMSKARRQVQENIKHVDFVTILVDARLPLSSQNPMLTKIVGDKPKLMILNKADLADPIRTKEWRDFYESQGLKTLAINSKEQSTVKKVTDIAKILMSDKIAKLRGRGIQKETLRTMIIGIPNAGKSTLMNRLAGKKIAVVGNKPGVTKGQQWLKSNKELEILDTPGILWPKFEDELVGLKLALTGAIKDQLLPMDEVTIFGLNYFKTYYPDRLKERFKSINLEDEAPEIIMALTQKLGYRDDYDRFYNLFVKEVRDGKLGRYTLDIVGEHDGNN

SEQ ID NO: 3646 - protein, 389 aa, Glycine max
MGYIGTHGVAALHRYKYSGVDHSYVAKYVLQPFWSRFVNFFPLWMPPNMITLMGFMFLLLSALLGYIYSPQLDTAPPRWVHFAHGLLLFLYQTFDAVDGKQARRTNSSSPLGELFDHGCDALACTFEALAFGSTAMCGRTTFWWWLISAITFYGATWEHYFTNTLILPVINGPTEGLMIIYICHFFTAIVGAEWWVQQFGKSLPFLNWLPYLGGIPTFKAILCLMIAFGVTPTVTCNVSNVYKVVKGKNGSMPLALAMLYPFVVLVGGVLVWDYLSPSDIMGKYPHLVVIGTGLTFGYLVGRMILAHLCDEPKGLKTGMCMSLMFLPLAIANVLASRLNDGVPLVDERLVLLGYCAFSVTLYLHFATSVIHEITNALGIYCFRITRKEA

SEQ ID NO: 3647 - protein, 380 aa, Bacillus cereus ATCC 14579
MKNISLLGASGSIGTQTLDVLRSHPDQFRLVAFSVGKNIDYAVKVIQEFSPQIVSVQREEDVLKLQSVSGNTKIVYGSEGLLEVALHPDAEIVVNAVVGSVGLLPTLRAIEAKKTIGIANKETLVTAGHLVMEAARKHNVSLLPVDSEHSAIFQCLNGENEKRISRLIITASGGSFRDKTRDELHHVTVEDALRHPNWSMGSKITIDSATMMNKGLEVIEAHWLFGIPYEQIDVVLHKESIIHSMVEFEDRSVMAQLGSPDMRVPIQYALTYPDRLPLSDTKQLNLWEIGTLHFEKMDQERFRCLRFAYEAGKAGGSMPAVMNAANEVAVEAFLQKRIGFLTVEDLIEKAMNHHNVIARPSLEEILEIDAATRRFVMEQI

SEQ ID NO: 3648 - protein, 394 aa, Zea mays subsp. mays
LGSARRARLPPGEMGWPLVGGMWAFLRAFKSGKPDAFIASFVRRFGRTGVYRSFMFSSPTVLVTTAEGCKQVLMDDDAFVTGWPKATVALVGPRSFVAMPHDEHRRIRKLTAAPINGFDALTGYLPFIDSTVTSSLRAWADHGGSVEFLTELRRMTFKIIVQIFLGGADQATTRALERSYTELNYGMRAMAINLPGFAYRGALRARRRLVAVLQGVLDERRAARAKGVSGGGVDMMDRLIEAQDERGRRLDDDEIIDVLVMYLNAGHESSGHITMWATVFLQENPDMFARAKAEQEAIMRSIPSSQQGLTLRDFRKMEYLSQVIDETLRLVNISFVSFRQATRDVFVNGYLIPKGWKVQLWYRSVHMDPQVYPDPTKFDPSRWEGHSPRAGTFL

SEQ ID NO: 3649 - protein, 364 aa, Shewanella oneidensis MR-1
MSYQIAVLAGDGIGPEVMAEARKVLKAVEARFGLNIEYTEYDVGGIAIDNHGCPLPEATLKGCEAADAILFGSVGGPKWEKLPPNEQPERGALLPLRGHFELFCNLRPAKLHDGLEHMSPLRSDISARGFDVLCVRELTGGIYFGKPKGRQGEGESEEAFDTMRYSRREISRIARIAFEAARGRRKKVTSVDKANVLACSVLWRQVVEEVAVDFPDVELEHIYIDNATMQLLRRPDEFDVMLCSNLFGDILSDEIAMLTGSMGLLSSASMNSTGFGLFEPAGGSAPDIAGKGIANPIAQILSAALMLRHSLKQEEAASAIERAVTKALNSGYLTGELLSSDQRHKAKTTVQMGDFIADAVKAGV

SEQ ID NO: 3650 - protein, 472 aa, Oryza sativa
  unsure (1)..(472): unsure at all Xaa locations
XARASVLELQRVSKAVKLAGFXPFSSAVDALNQCNAISEGIMTDELRSFLELNLPKVKEGKKAKYSVGVMEPKVGSHISEATGIPCQCNEFVQELLRGVRLHFDHFIDQLKPTDLEKAQLGLGHSYSRAKVKFNVNRVDNMVIQAIFLLDTLDKDINSFSMRVREWYSWHFPELVKIVNDNYVYSKIAKFVVNKSDLAEKDIPALADIIGDEDKAKEIVEAAKASMGQDLSPVDLINVQQFAQRVMNLSEYRKNLYEYLVTKMNDIAPNLTSLIGEMLGARLISHAGSLSNLAKCAASTLQILGAEKALFRALKTRGNTPKYGLIFHSSFIGRASTRNKGRIARYLANKCSIASRIDCYSELNTSVFGQKLREQVEERLDFYDKGIAPRKNLDVMKAAINDMTNAVSEKEKNDTSAKKNKKKKSKAEADGEEMAKKKKKKKPEASEDVEPRTATEGKKRKKKKSKTLXDNES

SEQ ID NO: 3651 - protein, 1137 aa, Oryza sativa
MSSSRSNNRATCSRSSSARSKHSARVVAQTPMDAQLHAEFEGSQRHFDYSSSVGAANRSGATTSNVSAYLQNMQRGRFVQPFGCLLAVHPETFALLAYSENAAEMLDLTPHAVPTIDQREALAVGTDVRTLFRSHSFVALQKAATFGDVNLLNPILVHARTSGKPFYAIMHRIDVGLVIDLEPVNPVDLPVTATGAIKSYKLAARAIARLQSLPSGNLSLLCDVLVREVSELTGYDRVMAYKFHEDEHGEVIAECKRSDLEPYLGLHYPATDIPQASRFLFMKNKVRMICDCSATPVKIIQDDSLTQPISICGSTLRAPHGCHAQYMASMGSVASLVMSVTINEDEDDDGDTGSDQQPKGRKLWGLMVCHHTSPRFVPFPLRYACEFLLQVFGIQINKEVELAAQAKERHILRTQTLLCDMLLRDAPVGIFTQSPNVMDLVKCDGAALYYQNQLWVLGSTPSEAEIKNIVAWLQEYHDGSTGLSTDSLVEAGYPGAAALGDVVCGMAAIKISSKDFIFWFRSHTAKEIKWGGAKHEPIDADDNGRKMHPRSSFKAFLEVVKWRSVPWEDVEMDAIHSLQLILRGSLQDEDANKNNNAKSIVTAPSDDMKKIQGLLELRTVTNEMVRLIETATAPILAVDITGSINGWNNKAAELTGLPVMEAIGKPLVDLVIDDSVEVVKQILNSALQGIEEQNLQIKLKTFNHQENNGPVILMVNACCSRDLSEKVVGVCFVAQDMTGQNIIMDKYTRIQGDYVAIVKNPSELIPPIFMINDLGSCLEWNEAMQKITGIKREDAVDKLLIGEVFTHHEYGCRVKDHGTLTKLSILMNTVISGQDPEKLLFGFFNTDGKYIESLMTATKRTDAEGKITGALCFLHVASPELQHALQVQKMSEQAAMNSFKELTYIRQELRNPLNGMQFTRNLLEPSDLTEEQRKLLASNVLCQEQLKKILHDTDLESIEQCYTEMSTVDFNLEEALNTVLMQAMPQSKEKQISIDRDWPAEVSCMHLCGDNLRLQQVLADFLACTLQFTQPAEGPIVLQVIPRMENIGSGMQIAHLEFRLVHPAPGVPEALIQEMFRHSPGASREGLGLYISQKLVKTMSGTVQYLREAESSSFIVLVEFPVAQLSTKRCKASTSKF

SEQ ID NO: 3652 - protein, 115 aa, Escherichia coli O157:H7
MGKAVIAIHGGAGAISRAQMSLQQELRYIEALSAIVETGQKMLEAGESALDVVTEAVRLLEECPLFNAGIGAVFTRDETHELDACVMDGNTLKAGAVAGVSHLRNPVLAARLVME

SEQ ID NO: 3653 - protein, 152 aa, Zea mays; identical to SEQ ID NO: 1713

SEQ ID NO: 3654 - protein, 437 aa, Triticum aestivum
FRWVLLFIPPLTLGPPPPLTHPNPTPRTAPPPNHPPARPAFLCRCGCRIPPPPRAGPRRRRGSAPHRQPRLVRGPEQDWARFIGAPGAYAESAVVAGSRKARAICDDGRLSTAGWNQRGTLGHPPETKTESSPAHVDALIGVNIVQAAIGGWHCLAVDDKGRAYAWGGNEYGQCGEEPERKEDGTRALRRDIPIPQRCALKLKVRQVAAGGTHSVVLTQEGHVWTWGQPWPPGDIKKISTPVRVQGLEQVSMIAVGAFHNLALSVDGILWAWGNNEYGQLGIGDTQPRSQPIRVEGLSNLSLVDIAAGGWHSAALTKEGEVYAWGRGEHGRLGFGDDKSSHMVPLKVQLLAGEDIVQVSCGGTHSVVLTSDGRIFSYGRGDHGRLGDGREVTTGHPMEVPINLPPPKTSTSSEGLWQANYVACGGRHTLAIVTWTDM

SEQ ID NO: 3655 - protein, 724 aa, Methanosarcina mazei Goe1
MIRSFSMKQVVLNLKDGDLTVEDVPIPTLKGSGVLVRNYYSVISAGTESGLVDLADKSLIGKARARPDLAMKVINKAKQDGPISAFQQAMGRLEKREPLGYSSAGTVISVSEDIASIKVGDRVACAGAGYANHADVAFVPKNLCVKVPDNVDLKNACFTTVGSIAMQGVRNADVRVGENVVVVGLGLIGLITVQILKASGCRVFGIDLDESKVKLAKELGADFALSRNTPNIEESVRQFSRGIGADVTIIAAATRSNDPVDFAGKITRERGKVVIVGLVGMDIPREEYYNKEIELRVSRSYGPGRYDRAYEEFGRDYPAPYVRWTENRNMQAFLDLLSMKKISMDPIISHEFAIEQAPDAYDIIEQRKPYLGIVLRYDTNREIEDKIVLKAPESKPFPSGTPVVGVIGAGIFATSTLLPNLSKIDGIKLKGLSAATGISCESVAKKYGFGYCTSDYHKIMEDPEINCVSIVTRNSLHAPLVIEALKHGKNVLVEKPLALNEEELEAVRAAWEKHGGLVMVGFNRRYSELGMKLRDFFKKRSQPMVALYRVNAESIPKDHWIYDNSEGGSRIITECCHFIDFLQYIIGSSPTEVYARKIEPEIKSPEDNENVSITISFEDGSIGTIIYTTHGDSSLSKERAEFFADGMAGVITDFKQLEMVKGGKKEKIAKRMVTEKGHKNEFEKFLEMVKKGSSEYNFEGNVLTTLVTLKAVDSLQNNSPVKIF

SEQ ID NO: 3656 - protein, 147 aa, Oryza sativa
  unsure (1)..(147): unsure at all Xaa locations
LINXLLKRRIVSXAAPRPGVTRELRWXVRFGSDLELLDSPGIXLPMRISDQTAAIKLAICDDIGERSYDFADVAAILVQLLVRHPAVGPEAFRRRYRLDMDSDCGKMFVTKLSVHLFNGDASQAAFRILSDYRKGKFGCVALERPPT

SEQ ID NO: 3657 - protein, 165 aa, Nicotiana sylvestris
MAEVEYRCFVGGLAWATTDRTLGEAFSQYGEVLESKIINDRETGRSRGFGFVTFGDEKSMRDAIEGMNGQDLDGRNITVNEAQSRGSGGGGGGGGFRGGRREGGGGYGGGGYGGGRREGGGGGYGGGGYGGGRDRGYGGGDRGYGGDGGSRYSRGGGDSDGNWRN

SEQ ID NO: 3658 - protein, 305 aa, Miscanthus transmorrisonensis
IESVGEGVTDVAPGDHVLPVFTGECKECPHCKSAESNMCDLLRINTDRGVMIGDGKSRFSINGKPIYHFVGTSTFSEYTVMHVGCVAKINPQAPLDKVCVLSCGISTGLGASINVAKPPKGSTVAIFGLGAVGLAAAEGARIAGASRIIGVDLNPSRFEEARKFGCTEFVNPKDHKKPVQEVLAEMTNGGVDRSVECTGNINAMIQAFECVHDGWGVAVLVGVPHKDAEFKTHPMNFLNERTLKGTFFGNFKPRTDLPNVVELYMKKELEVEKFITHSVPFAEINKAFDLMAKGEGIRCIIRMEN

SEQ ID NO: 3659 - protein, 194 aa, Hordeum vulgare subsp. vulgare
MMLSSAYSTPAADELGGPPPLPPPPGADVSVIVGALTGVLLGLFLFLIYAKHCRQRGRGGARGAAGGLGLGFRASSTCDRCRSGVSLSVVDALPVVRFGDMGGAAAAAQPECAVCLGTFDPAADELLRVLPKCRHAFHADCVDTWLEAHSTCPVCRRRVGKEDAFAVIPELEAADADWYPAREAEMQIVVRRPA

SEQ ID NO: 3660 - protein, 445 aa, Brassica rapa
MKGVHNIYHHSYTFSFLLVFLALILFHPALSTYVNTMSSSESLTISSNRTLVSPGGVFELGFFKPSGRSRWYLGIWYKKVSQKTYAWVANRDNPLSNSSGTFKISGNNLVLLGQSNNTVWSTNLTRCNARSPVIAELLPNGNFVMRYSSNRDSSGFLWQSFDFPTDTLLPDMKLGYDLKTGRNRFLTSWNSSDDPSSGNTTYKLDLRRGLPEFILINTFLNQRVEMQRSGPWNGMEFSGIPEVQGLNYMVYNYTENSEEISYSFQMTNQSIYSRLTVSEFTLDRFTRIPPSWGWSLFWSLPTDVCDSLYFCGSYSYCDLNTSPNCNCINGFVPKNPQQWDLRDGTQGCVRTTQMSCSGDGFLRLNNMNLPDTKTATVDRTIDVKKCEEKCLSDCNCTSFAIADVRNGGLGCVFWTGELVEMRKYAVGGQDLYVRLNAADLGTCTG

SEQ ID NO: 3661 - protein, 330 aa, Leuconostoc mesenteroides subsp. mesenteroides ATCC 8293
MVYAADEQRYEKLPYRRVSDSGLILPAVSFGLWRNLGDQMPLENSRNVILKAFDSGIFSFDNASNYGPSNGTAEVTFGNVYRNDLKPYRDELVITTKAGYHMWPGPLGEFSGKKTLVAALDLSLQRMGLDYVDIFYAHRWDPNTRLEETARALDLIVKQGKALYVGVSNYTAEQTKAITKIFDELGTPFIGNQVSYNMLNRTAEKDGLLDVLDQNHAGLVAYGPLAEGLLTDRYLKEIPADYPIHPTNQFLFKNGKDALIAKLNALNAIAQGRGQKLSQMALAWLLKDERVATVVIGASKVEHLVDNLKFSDNLDFSAAELKEIQAILDK

SEQ ID NO: 3662 - protein, 227 aa, Lycopersicon esculentum
RKRRLNMEQVKTLEKNFELGNKLEPERKMQLARALGLQPRQIAIWFQNRRARWKTKQLEKDYELLKRQFDAIKAENDALRNSKSKSLHAEIMSLRIESTTESINLNKETEGSCSNRSENSSEIKLDISRTPAIHSPLSNHHPNISSRPFFPPSMIRSNNNNNNNGVVVPHQLFHINSSSSRQDLKLMDQNTTTNNSSSVKEESLSNMFCGIDDQTSFWPWLEQQHFN

SEQ ID NO: 3663 - protein, 214 aa, Paeonia humilis
IVESVGEGVTDVKPGDHVLPIFTGECKECRHYKSEESNLCDLLRINTDRGVMLNDGKSRFSINGQPIFHFVGTSTFSEYTVLHVGCLAKINTEAPLDKVCVLSCGISTGLGATLNVAKPKKGSTVAIFGLGAVGLAAAEGARIAGASRIIGVDLNPKRFDEARKFGVTEFVNPKDYNKPVQEVIAEMTGGGVDRSIECTGSIMAMMSAFECVHD

SEQ ID NO: 3664 - protein, 260 aa, Pyrococcus furiosus DSM 3638
MPCYNLKNKVAIVTGGGQGIGAAIAQLFAENGAKVVLAEIDEEAGLEREAMLRERGLDVTFIKTDVADEESVKNMVKKTVELYGGVDILVNNAAIMSVKSIFERTLEEWERVIRVNLTGPYICSRYAAEEMIKRGGGVIINIASTRALMSEPDTEPYSASKGGLLALTHSLAISLAKYRIRVVAVSPGWIETSRWKKSKLRSEPKLRPIDHEQHPAGRVGDPMDIAHICAFLADNEKAGFITGVNFVVDGGMTVKMIYAD

SEQ ID NO: 3665 - protein, 211 aa, Gossypium raimondii
DVYYWECKGYTPLFPRILGHEASGIVESVGEGVNDLKPGDHVLPIFTGECKECRHCLSEESNNMCELLRINCDRGVMLADGKTRFSINGKPIYHFVGTSTFSQYTVVHVGQVAKISPTAPLDKVCPISCGICTGFGATVNVAKPKKGQTVAVFGLGAVGLAAAEGARVCGASRIIAVDVNPRRFEEAKRFGITEFVNPKDYDKPVQEVIVE

SEQ ID NO: 3666 - protein, 357 aa, Xylella fastidiosa 9a5c
MSKQILILPGDGIGHEIVAEAVKVLEHVNVRHTLNLRLSFDALGGAAYEKYGSPLADETLARARDADAVLLGAVGGPQWDTIDPALRPERGLLKIRAQLGLFANLRPALLYPQLADASTLKPEVVAGLDILIVRELTGGLYFGQPRGSRISKNGEREAFDTLPYCESEIRRILKVGFEMARLRGKKLCSVDKANVLASSQLWRTVAGEMAKDYPDVTLSHMYVDNAAMQLVRHPKQFDVIVTENMFGDILSDQASMLTGSIGMLPSASLDANNKGMYEPCHGSAPDIAGQGVANPLATILSVAMLLRYSMGHIKTADAIEHAVGVVLDSGLRTADIWSEGMTKVGTVAMGDAVVAAL

SEQ ID NO: 3667 - protein, 178 aa, Prunus dulcis
DQGHCGSCWTFSTTGALEAAYVQAFGKQISLSEQQLVDCAGAFNNFGCHGGLPSQAFEYIKYNGGLDTEAAYPYVGTDGACKFSAENVGAQVLDSVNITLGDEQELKHAVAFVRPVSVAFQVVKSFRFYKSGVYTSDTCGSSPMDVNHAVLAVGYGEEGGVPFWLIKNSWGESWGDNG

SEQ ID NO: 3668 - protein, 549 aa, Malus x domestica
MWDLNDSPDQRPRGEESEGCSSQKTSADGDEEKRKRVGSVSNSSSSAVVIEEDGSDQEEDQDDGPTKLAKKQGGGGGKIFGFSVAHEESMDSDPPATVTRQFFPVELDYSSSSNLDVMGPAEGGGSIPPPPSTSSSFPRAHWVGVNFGQSDSGSPGNPPPAGEASHQPMKKSRRGPRSRNSQYRGVTFYRRTGRWESHIWDCGKQVYLGGFDTAHAAARAYDRAAIEFRGVEADINFSIEDYEEDLKQMRNLTKEEFVHVLRRQSTGFPRGSSKYRGVTLHKCGRWEARMGQFLGKTYVYLGLFDTEVDAARAYDKAAIKCNGKEAVTNFDPSIYDNELNSSESSGVIAADHNLDLSLGSTNSKKNNQALGNDHHSQNVAMEHQHSVSMQLDANWRSQGLRPKLNIQRDRSRDDIDAQRRDGYSESEAMQLLLRTNLQSQAPAEVHKYGQFNRRLTAGDIQMSHNFPPNFNSPNYHHIQFPSSSEGGGRIGSDLSLSTSDHQQQWQSATPTSNLFATAAASSGFPPQLRPLPTQNSWLQKNGFHTLARR

SEQ ID NO: 3669 - protein, 328 aa, Pseudomonas aeruginosa UCBPP-PA14
MGVFRTRFTETFGVEHPIMQGGMQWVGRAEMAAAVANAGGLATLSALTQPSPEALAAEIARCRELTDRPFGVNLTLLPTQKPVPYAEYRAAIIEAGIPVVETAGNDPGEHIAEFRRHGVKVIHKCTAVRHALKAERLGVDAVSIDGFECAGHPGEDDIPGLVLLPAAANRLRVPIIASGGFADGRGLVAALALGADAINMGTRFLATRECPIHPAVKAAIRAADERSTDLIMRSLRNTARVARNAISQEVLAIEARGGAGYADIAALVSGQRGRQVYQQGDTDLGIWSAGMVQGLIDDEPACAELLRDIVEQARQLVRQRLEGMLAGV

SEQ ID NO: 3670 - protein, 375 aa, Thermus caldophilus
MVIYREEYRLYNFGPDHPFSPVRLEMLTSLLQALGVWRAPLSPPEASREEVLSVHSERLVKRVEAASRGELYPDLEHYGLGTGDTPVFPGMDRAARILVGGTLEGARRIMAGEKRVLQLGGGLHHAQYDRASGFCVYNDLSVAIRHMTRAGLRVAYVDIDVHHGDGVQWIHYEEGEVLTLSLHESGRYLFPGTGHVYEIGRGAGLGKKLNLPLEPFTEDESYLEVFEALVPWALKAFRPDVLVVQAGADAHYLDPLADLLLTARAYERLFRLLLEYAEAYAGGRVLFTLGGGYSLDGTVRVWALLYHLFHGLPLPERLPEGWLRTWEARLGRPLTPTLHDPEGAYPEIPRREEIAKRNRLTLQRLTELVAPHLLH

SEQ ID NO: 3671 - protein, 593 aa, Schizosaccharomyces pombe
MTSFTESKKLDEIESPVPEIIVPSTTNGNGTIESYKEKSVGTSFLDFFRSYKLRPDNEFAEVHNSEDFLKPRHLQMIAIGSCIGTGLFVSTGKSLKNAGPGSLMINFIILSAMILALILSLGEMCCFLPNQSSITMYTGRLLNNNIGFAQSWLYFWIWLTVLPSEISAACEVVDFWTTQHLNPAIWVTIFLAYVVLVNAFGARSYGECEFVSSFLKVVIVIIFFFVAIIINCGAAPKGGYIGAHYWHHPGSFRNGFKGFCSVFISSAYSLSGTENIGTAAGNTSNPQRAIPSAVKKVFYRMGFFYIITIFLITLVVPYDNPDLGNVSPFIIAIKNGGIHVLPHITNAVILVSVLSVGNAAVFAASRNAMALVKQGWAPRFLGRVDQKGRPVISYLCSLAMACIAYVNAAPDGSVVFDWLMSVSGGGAFVIWGLSFIDHIRLRYAMKAQKIPDTVLPYKFPGSVYLSYYGVLINFLALCALVYISIFPVTHEKPSAYGFFVSFLGPSVFIAYLLISPIFVKPTFQSLKDVDLTTGRYDLVNSQMYVAESSTSELSEKDLTKPNLQSNDNKNSEDLESNTPPQKKSALQKVADFL

SEQ ID NO: 3672 - protein, 170 aa, Zea mays
  unsure (1)..(170): unsure at all Xaa locations
MGGVDRTGRPIIVGLLAKXYSANRDMAEFKSTVDDICARIPRGQEKFLAIMDLKGWGYANCDVRAYIAAIEIMQNYYPERLGKALMINVPYIFLKVWKTMIYPFIDANTRDKFVFVDDKSLRETLRREIDESQLPEFLGGKMPLVSLKDYAQQPQPVCDVSRSDVPARGP

SEQ ID NO: 3673 - protein, 363 aa, Prochlorococcus marinus subsp. pastoris str. CCMP1378
MNNILITGGAGYLGSHACLNLLEAGYGIYIVDSLENSSFESISRVNRFFKEKNKFADNKIKFFKADITNFEKLKIIFEHALCNNQKIIAVLHFAGLKAVSESEENPIKYWEYNVSGSINLFKVMELYDCKNIVFSSSAAVYGNNQNCPIKEDSSLIPSNVYGKTKKTIEEILTDLHFRKNWGVAILRYFNPVGAHHSGIIGENPISNKNNLFPIICEVAKDNNKKLNIFGKDWPTRDGTCLRDYVHVEDIIDGHEKALRLLLNSKHNLIKVNLGTGKGTTVLELINTFKKVNDIKIEYEFSERRIGDCGVLFADSRLSNSILNWKARKTLDDICRDGWRWGLKNPYGYIKNLEELDLSIYCEI

SEQ ID NO: 3674 - protein, 283 aa, Cytophaga hutchinsonii
MLDEFGAKRIIDTPISELGFAGIGVGAAMNGLRPIIEFMTFNFSLVAIDQIINGAAKIMSMSGGQYTAPIVFRGPTGNAGQLSSQHSQNFENWFANTPGLKVVVPANPYDAKGLLKSAIRDNDPVIFMESEVMYGDKGPVPEGEYLLPIGVADVKREGTDVTLVSYGKILKVALQAAEDLAKEGVSAEVIDLRTVRPIDFEAIVHSVKKTNRLVIVEETWPLASISSEISYHVQRYAFDHLDSPILRVTSRDLPLPYAPTLIQEILPNVKRTIDAVKTVMYQK

SEQ ID NO: 3675 - protein, 374 aa, Oceanobacillus iheyensis HTE831
MQVKTAVLRTQGADSPYKESKPIKIETLELDAPQLGEVLIQIKAASLCHSDLSVINGSRPRPLPMALGHEASGVVVEVGEGVTYLEPGDHIVCVFVPSCGHCVPCKEGRPALCEPGADSNTAGTLISGGIRLHADGEAINHHLGVSAFSEFAVVSRNSLVKVKKDIPFEKLALFGCAVITGVGAVVNTANVKLGSTVAIVGLGGIGLSALLGAVAAGASRIIAVDINENKLKQAKELGATDVFNSTEETVIQQIKEATDGGVNYAFETAGAVPAMEVAYGITKRGGTTVTTGLPHPEHQFSFPYVTLTAEEKTLKGSYVGSCVPDRDIPRYMNLFKQDRLPVDKLMTDFISLDEINEGFDKLAKGDSSRIIIKM

SEQ ID NO: 3676 - protein, 329 aa, Streptomyces avermitilis MA-4680
MKAAVIESVGKAVVAEVPDPTPGPREVVVEVAACGLCGTDLHILQGEFAPKLPIVPGHEFAGEVVGLGTQVTEVSVGDRVAVDPSLYCYECRYCRTGHNNLCERWAAIGVTTAGGAARYAVAPVANCVKLPEHVRTQDAALIEPLSCAVRGYDVLRSRLGAHVLVYGSGTMGLMMLELAKRTGAASVDVVDVNPARLTTARQLGVSGSAANADELDRPQGWDVVVDATGNAAAIQDGLGRVAKAGTFLQFGVADYATRVTIDPYRIYNQEITITGSMAVLHSFERAAELFAGGVLDPDVFISDRIPLARYPQALEQFASGVGRKIVVVP

SEQ ID NO: 3677 - protein, 614 aa, Xylella fastidiosa Temecula1
MSFSKHFGKLMLATCLSLSAAPAFSYSISHGKVVDDKGNQIQLRGVNWFGFETGDHVVNGLWARNWKEFITQLQGMGFNAIRLPFCPANLNSNTSPSSIDYSRNPDLQGLSSLQILDKVVKELSDRRMYVLLDHHRPDCSAISELWYTDSYSEKQWIDDLRFVAHRYANVHGVIGLEVKNEPHGRTTWGTGDPKTDWNTAVEHAAAAILEAAPKWLIGVEGIGENPICSSTIGHFWGENLEPMDCTPLKVPADHLLLMPHVYGPDVYVQPYFNSPDFPNNMAAIWDKHFGHFAKAGYAMAIGEFGGKYGEGDPRDIAWQNAFVDYLISIGVTDAFYWAANQNSVDTGGMVGNDWTTPRDDKVKLLNKLWNAGGGASGGSGGGAGASSGSGAGGGSSGGAGTGSGSGAGGGSSGGAGTGSGSGAGGGSSGGAGASSGSGAGGGSSGGAGTGSGSGAGGGSSGGAGASSGSGAGGGSSGGAGASSGSGAGGGSSGGAGAGSGSGARGGSSGGAGAGSGSGAGGGSGSGSDPTKSKIAVNTIVDSDWHTGYCERIQVTNTSDSPNTWTVTIPIKGKIQTLWSARWSVKDNALTAFGMDWNKTLDPKGRTEFGFCSNY

SEQ ID NO: 3678 - protein, 111 aa, Glycine max
  unsure (1)..(111): unsure at all Xaa locations
KLKKTHEAXRVFEHLVSLGLKSNAKSYSLLVDAHLINRDVKSALAVIDDMRAAGYEPSKEMLKKVRRRCTREMDNESDARVQSLANSLNYQLGSENRRDILFNLNYSMGYA

SEQ ID NO: 3679 - protein, 292 aa, Salmonella typhimurium
MCTPRGLTPPWFFIVLIGQKLMESNNKLKRGLSTRHIRFMALGSAIGTGLFYGSADAIKMAGPSVLLAYIIGGVAAYIIMRALGEMSVHNPAASSFSRYAQENLGPLAGYITGWTYCFEILIVAIADVTAFGIYMGVWFPAVPHWIWVLSVVLIICAINLMSVKVFGELEFWFSFFKVATIIIMIVAGIGIIVWGIGNGGQPTGIHNLWSNGGFFSNGWLGMIMSLQMVMFAYGGIEIIGITAGEAKDPEKSIPRAINSVPMRIWYFMSARCSSLCLSIRGIRSAQTAVHLC

SEQ ID NO: 3680 - protein, 447 aa, Salmonella typhimurium LT2
MKKVKKLSLTDLVLYGLVFMVPIAPVSLYGVVYNLSHGMVALVYIIGAIAMFFTAYSYSTLSQHISSSGSAYAYAGVCINPAVGFLTGWILLLDYLLFPTLVAVLGGVAVHAILPQIPVWVWPLIYVAIGTGVNYLGIQQTAKFDKLLVFIQLGILAIFVLLIVRLMLLDSSQITLSFRPFFDSQWFTPGLIATAISVAALNFLGFDAISTLSEESEGGGRAVSKATLLALVLATVLFIIVVAFAAFATGNVDRFAEGNATNEAFFTIAGNVGGIWLKVAFSIIVAFVCAVGNIITAQTAVSRVLFSMGRDRMLPAFLAHVHTTRKTPDYAILFTGGVTLLLSYLFSGKIESISTLVNFGALFAFFVVNLCVFILFNFRMKAQRRIFAHVISPIMGMIVIGYVCLNMNIHALILGISWAAIGIAILCYRKAHNQNIAIDLEGKKLLD

SEQ ID NO: 3681 - protein, 367 aa, Daucus carota
MLELRLVQGGLLKKVLESIKDLVNDANFDCSASGFSLQAMDSSHVALVAVLLRSEGFEHYRCDRNISMGMNLGNMAKMLRCAGNDDIVTMKADDDGDVITFMFESPTQDKISDFEMKLMDIDSEHLGIPESEYEYEAIVRMPSAEFARICKDLSTIGDTVVISVTKEGVKFSTRGDIGTANIVCRQNTSVDKPEDATIIEMQETVSLTFALRYMNSFTKATPLANQVTISLSSELPVVVEYKIAEMGYIRYYLAPKIEEEDEAANYAQPAQNSAAAATSNNGTKKNEGNNKVDSKKRAIKSEFVDDSEAATDAQPQAKAKTKTEAGEDDDVEVMDTKPKNEPDDGDEVMETKPKTESNGEVEVMDIE

SEQ ID NO: 3682 - protein, 165 aa, Bacillus subtilis subsp. subtilis str. 168
MFPILETDRLILRQITDQDAEAIFACFSNDEVTRYYGLENMESIEQAISMIQTFAALYQEKRGIRWGIERRDTKELIGTIGFHALAQKHRRAEIGYEIIPEHWRNGFASEVISKVVSYGFSALGLSRIGAVVFTDNEASNRLLLKMGFQKEGVLRQYMYSKWDSI

SEQ ID NO: 3683 - protein, 392 aa, Lasiocarpus sp. Anderson 13834
DLEPVNPADVPVTAAGALKSYKLAAKAISRLQSLPGGNISLLCDVLVKEVRDLTGYDRVMVYKFHEDEHGEVVSECRRSDLESYLGLHYPAIDIPQASRFLFMKNKVRMICDCLAPPVKVIQDKRLSQPLSLCGSTLRSPHGCHAQYMANMGTIASLVMSVTVNEDDDMIDGDQQQMARKLRGLVVCHHTSPRFVPFPLRYACEFLIQVFGVQINKEVELAAQVREKHILRIQTMLCDMLLRDAPVAIITQSPNVMDLVKCDGAALYYKNKFWLLGVTPTEAQIRDIAEWLLEYHSGNTGLSTDSLMEAGYPGASVLGDAVCGMAAVSITSRDFLFWFRSHTAKEIKWGGAKHDPEDKDDGRKMHPRSSFKAFLEVVKWRSLPWEDVEMDAI

SEQ ID NO: 3684 - protein, 173 aa, Oryza sativa
MNRKPGDWDCRACQHLNFSRRDLCQRCGEPRGAADRGSGGGGDYANFGGRGGSSFGGGFGTGSDVRPGDWYCNCGAHNFASRSSCFKCAAFKDDAAVNSGGAGAFDGGDMSRSRGYGFGSGAVRASRPGWKSGDWICTRSGCNEHNFASRMECFRCNAPRDSGSAMTYENYLH

SEQ ID NO: 3685 - protein, 168 aa, Zea mays; identical to SEQ ID NO: 728

SEQ ID NO: 3686 - protein, 405 aa, Pseudomonas aeruginosa PAO1
MDDLLQRVRRCEALQQPEWGDPSRLRDVQAYLRGSPALIRAGDILALRATLARVARGEALVVQCGDCAEDMDDHHAENVARKAAVLELLAGALRLAGRRPVIRVGRIAGQYAKPRSKPHEQVGEQTLPVYRGDMVNGREAHAEQRRADPQRILKGYAAARNIMRHLGWDAASGQEANASPVWTSHEMLLLDYELSMLREDEQRRVYLGSTHWPWIGERTRQVDGAHVALLAEVLNPVACKVGPEIGRDQLLALCERLDPRREPGRLTLIARMGAQKVGERLPPLVEAVRAAGHPVIWLSDPMHGNTIVAPCGNKTRLVRSIAEEVAAFRLAVSGSGGVAAGLHLETTPDDVTECVADSSGLHQVSRHYTSLCDPRLNPWQALSAVMAWSGAEAIPSATFPLETVA

SEQ ID NO: 3687 - protein, 483 aa, Burkholderia fungorum
MMERGGDMQRSTETTELKAGLKQRHMTMIALGGVIGAGLFVGSGVVVQQAGPAAVLSFLITGALVVLVMRMLGEMACAMPAVGSFYEYARLAFGGKRACGNLAGFLTGWMYWYFWVIVVAVEAVAGAKLVQFWLPDVPAWAISLVLLVTLTATNLVSVGSYGEFEFWFASIKVAAIMVFLFLGSMYVLGLWPASKHVTEVLPTLFSHGGLMPKGIGPVLSGAVAATGFYFGAEIVTIAAAEAQEPAKAVARATNSVITRVLVFYVGSILLVVALVPWNSPKMATPYVSALDAMGIPAAASVMNAIVLTAVLSALNSGLYAASRMIFALTRHGDAPAALARVNRRGVPVRAILIGTVFGYASVVMSYVSPDTVFAFLVNSYGTVAIFVYVLIAISQLKLRARIERDAPQTLRVRMWCYPYLTWVSIIGMVGILVAMAFIPEQRQPLWFGVASLGVLLLAYPLRGRRSDAMPGEPETVEYRHHHR

SEQ ID NO: 3688 - protein, 305 aa, Miscanthus sinensis f. glaber
IESVGEGVTVVAPGDHVLPVFTGECKECPHCKSAESNMCDLLRINTDRGVMIGDGKSRFSINGKPIYHFVGTSTFSEYTVMHVGCVAKINPQAPLDKVCVLSCGISTGLGASINVAKPPKGSTVAIFGLGAVGLTAAEGARIAGGSRIIGVDLNPSRFEEARKFGCTEFVNPKDHKKPVQEVLAEMTNGGVDRSVECTGNINAMVQAFECVHDGWGVAVLVGVPHKDAELKTHPMNFLNERTLKGTFFGDFKPRTDLPNVVELYMKKELEVEKFITHSVPFAEINKAFDLMAKGEGIRCIIRMEN

SEQ ID NO: 3689 - protein, 380 aa, Phanerochaete chrysosporium
MAFASSLLALVALAAVTSAAPATTQATCPDGTKVNNAACCAFIPLAQDLQETIFQNDCGEDAHEVIRLTFHDAIAISQSKGPSAGGADGSMLLFPTIEPNFSANNGIDDSVNNLIPFMQKHNTISAGDIVQFTGAVALTNCPGAPQLEFLARRPNKTIPAIDGLIPEPQDSVTSILERFKDAGNFSPFEVVSLLASHSVARADKVDETIDAAPFDTTPFVFDTQIFLEVLLKGVGFPGTRTTRGEVASPLPLTSGSDTGELRLQSDFALARDERTACIWQGFVNEQALMASFKAAMRKLAVLGQHRNTLIDCSDVVPAPKPAVNKPASFPATTGPQDLELSCNTKPFPSLSVDAGAQQTLIPHCSDGDMTCQSVQFNGPA

SEQ ID NO: 3690 - protein, 214 aa, Brassica napus
  unsure (1)..(214): unsure at all Xaa locations
MTSFSTFSEMLGSEYESPVTLGGEYCPKLAASCPKKPAGRKKFRETRHPVYRGXRLRNSGKWVCEVREPNKKSRIWLGTFLTAEIAARAHDVAAIALRGKSACLNFADSAWRLRIPETTCPKEIQKAAAEAALAFQAEINNTTTDHGLDMEETIVEAIFTEENNDVFYMDEESMLEMPALLASMAEGMLLPPPSVHFGHNYDFDGDADVSLWSY

SEQ ID NO: 3691 - protein, 460 aa, Lactobacillus plantarum WCFS1
MSKQTHLSRQMESRHVLMISLGGVIGTGLFLSSGYTIHQAGPIGTLLAYTIGAILVYLVMLCLGELSVAMPYTGAFHVYAKKYIGPGTGFTVAILYWLTWTIALGSEFTAAGLIMQTWFPHIATWIWSLVFMVVIFTVNALSVRWFAETEFWFASIKVIAIIAFIVLGGLAMVGILPLHGHTSAPFLSNYTRNGWFPNGFGGVFTTMLTVNFAFSGTELIGITAGETKDPAHTIPTAIKTTLWRLIIFFIGSMFVMAALIPYKQAGVTQSPFVLVFKAIGIPYAADLMNFVVLTAIMSAANSGLYASTRMLWSLANEGTIPKVFKRTTKRDVPLVALITSMLGGILALLSSVYAAGSVYLVLVSISGLAVVIVWMAIALSEINFRKAYLKSGQSLDQLTFKTPGYPVVPWLAFILSGLSCILIWFDPNQRIALYYTIPFVAICYLGYYLNQRYRRTHAAK

SEQ ID NO: 3692 - protein, 474 aa, Catharanthus roseus
  unsure (1)..(474): unsure at all Xaa locations
MALNSLSPPKIKTISFLDSSKSNYNLNLLKLPGGFAFKKKDFGASGGKKIQCSVQPPPPAWPGRAVAEPGYKTWEGQKPISIVGSTGSVGTQTLDIVAENPDKFRVVALAAGSNVTLLADQVKTFKPQLVSVRNESLVNELKEALSDVDDKPEIIPGEQGVVEVVRHSDAVTVVTGIVGCAGLKPTVAAIEAGKDIALANKETLIAGXPFVLPLAHKHKVKILPADSEHSAIFQCIQGLPEGALRRIILTASGGAFRDWPVEKLKEVKVADALKHPNWNMGKKITVDSATLFNKGLEVIEAHYLFGAEYDNIDIVIHPQSIIHSMVETQDSSVLAQLGWPDMRLPILYTLSWPDRISCSEITWPRLDLCKLGSLTFKTPDNVKYPSMDLAYAAGRAGGTMTGVLSAANEKAVELFIDEKISYLDIFKVVELTCAKHQAELVTSPSLDEIIHYDLGARDYAASFQNSLGLSPALV

SEQ ID NO: 3693 - protein, 167 aa, Zea mays
  unsure (1)..(167): unsure at all Xaa locations
MGSKIRSLALQKRVAXSYLKCGKGKARVDPNEDREIYMANYXNSIRKWVQDGXIINKPNKXIHSTSRAXGHMTAKQKGRHSXMAKRQGTREARLPTKVLPMTRMRVLTRLLRKYREXQHIDMHMYYDMYMKVKGNALNNKRGLMXESIHKTKAEKATXKTLSDQLGG

SEQ ID NO: 3694 - protein, 429 aa, Buchnera aphidicola str. Bp (Baizongia pistaciae)
MQKNNLNFDKQHIWHPYASMIQPTPCILVKSAKGIILKLHNGKKLIDGMSSWWSTIHGYNHPRLNNALKNQINKMSHVMFGGITHYPAISLCKKLIEITPNSLTRIFLSDSGSVSIEIAIKMILQYWQSLGKNKVIFLTIKKSYHGDTFAAMSVCDPKNSFHQFYHNFLPINIFADNPKCSFDGLWNKKDIISFKKLIQKHKDVVAAVILEPIVQSVGGMKFYHPNYLKQVRFLCDLYKIPLILDEIATGFGRTGKFFAFEHSNIVPDVLCIGKAITGGTITLSATLTTDKIANVISNSASGCLMHGPTFMGNPLACAAAYENILILQENKWKIQVKNIETCLRTYLFPLKTHYEVYDVRVLGAIGVVECYHYINISMMQNYFVKNNVWIRPFRKLIYLVPAYIIDNASLKKLINVISNALNYENFFMK

SEQ ID NO: 3695 - protein, 267 aa, Sulfolobus tokodaii
MKKFKWFSISPLALGTWGMGGGYWSTDYSNDENDIKAIIKAIELGITAIDTAEMYGNGHAEELVGKAIKNFKREELFIITKVWPNHAKYEDVLKSAIASSKRLGTYIDLYFLHWPSNVPICETIKAFEDLVDKGVIRYFGLSNFKWREIEKASECVKKYEIAAVENHYSLWDRGDEETLEYANKKGLLYLAYTPIEKGRIKNDKFLSEIAKKYNKTPIQIALNWYIRIPSLVPIVKSSNISHLEENVGALGWELSEEDWKKINEHFK

SEQ ID NO: 3696 - protein, 893 aa, Microbulbifer degradans 2-40
MNKHFLVGVITLGVILQGLTACSKSAAPNANQPQDTAASTATYPFRDASLSVDARVDDLVSRLTTTEKIAQMFNDTPAIERLGIPAYNWWNESLHGVARAGKATVYPQAIGLASTFDEDLMLRVATSISDEGRAKYHDFLSKDVRTIYGGLTFWSPNINIFRDPRWGRGQETYGEDPFLTGRMAINFVKGIQGENDNSDYLKAVATIKHYAVHSGPEKTRHSDDYHPTRKDLFETYLPAFRMAIAETNVQSLMCAYNRVDGAPACGNNELMQEILRGDMGFNGYVVSDCGAIADFYESRSHHVVDSPAEAAAWAVKSGTDLNCGDSHGNTYTNLHYALQQGLITEDYIDIAVKRLFKARIKLGMFDEQDRVPYSEIGMDVVGSPKHLALTQEAAEKSIVLLKNNGVLPLKAGVKVAVIGPNAVDEDVLVGNYHGVPVKPVLPLEGIVNRVGEANVFYAPGSAQIADIYSHYEPISAENFYHKDANGNLAAGLKAEYYADYYNAAEINDDTFSATPALNRIDADINFSWPVSPIDNSLDDEFSAVWTGILKPKKSGSYRFSGTVALAINGKPVNGAVNLKAGESYNIKAIFGVQKWWPVNAIHPYGKLTWLDESRDLEEEALAAARKADVIIFMGGIDAHLEGEEMPLELDGFTHGDRTHINLPKVQTNLLKQLKATGKPVVMVNFSGSAMALNWESEKLDAILQAFYPGEATGTALANILWGDVSPSGRLPVTFYKGVDDLPAFNDYHMENRTYKFYRGEPLYAFGHGLGYVDFAYNNLVVANTAEAGKALPIAVSVTNTGKMQAEDVAQVYISLLDAPANTPIRDLKAFKRTKLAAGESTELEFNLPARVLTYIDDNGKTQTYTGRVEVTVGSGQKGYVKENAIAVATINVQ

SEQ ID NO: 3697 - protein, 615 aa, Corynebacterium glutamicum ATCC 13032
MTSPNTLQEYTEPAKYTIGESETCLTALLDQIKTRPYGVLFSKPANYEWVNVTAKEFQDEVFAVAKGIISVGVEQGDRVALLSNTRYEWAVLDFAIWAAGAVSVPIYSSSSLSQIEWIIEDSGAVLAITETPDHTDLMKNLVIGEDGTPAIKGSPSKLRRILEINSSALETLKFEGRELSDELVWERIHATKAADLASLVYTSGTTGRPKGCELSHYHWLAEVRALITNDIGAIAMPGSRLLTFLPLAHVLARAVHLAFAVTGATQSHWSDFSTLTLELQRSRPNLILGVPRVFEKVRNAAAANAADGGAIKRIMFERAEKAAIEYSMALDTAEGPSKSQVMAHKAFDKLVYSKIRAAVGGDVQYAITGGSAMGQELLHFFRGVGMTIYEGYGLTESAAAAAVDFTDQKIGTVGKPMGGMTIKINEDGEIMLKGEMLFQGYWNNPEATAEALHDGWFNTGDLGELLESGHLVITGRKKDLIVTAGGKNVSPGPMEDIIRAHPLVSQAMVVGDGKPFVGLLVTLDPDMLKRWKLNHNIAESRTVSEIATDPALRAEIQDAVNNANATVSHSEAIKRFYILDRDLTEEADELTPTLKVKRNVVVRRYADAIDHIYNR

SEQ ID NO: 3698 - protein, 250 aa, Glycine max
MGKSYPTVSADYQKAVEKAKKKLRGFIAEKRCAPLMLRLAWHSAGTYDVSSKTGGPFGTIKHPSELAHGANNGLDIAVRLLEPLKAEFPILTYADFYQLAGVVAVEVTGGPEVPFHPGREDKPEPPPEGRLPDATKGSDHLRDVFGKAMGLSDRDIVALSGGHTIGAAHKERSGFEGPWTSNPLIFDNSYFKELLSGEKEGLLQLPSDKALLSDPVFRPLVEKYASDEDAFFADYAEAHQKLSELGFAEA

SEQ ID NO: 3699 - protein, 273 aa, Zea mays
  unsure (1)..(273): unsure at all Xaa locations
MTGSMDLPAKGGFSFDLCRRNNMLEKNGLKVPGFRKTGTTIVGLVFQDGVVLGADTRATEGPIVADKNCEKIHFMAPNIYCCGAGTAADTEAVTDMVSSQLQLHRYATGRESRVVTALTLLKSHLFKYQGHVSAALVLGGVDCTGPHLHTVYPHGSTDTLPFATMGSGSLAAMSVFESKYKEGLTREXGIQIVCEAICAGIFNDLGSGSNVDVCVITKGKTEYLRNHQLPNPRTYASSKGYSFTKGQTEVLSSKVTLLKQKVEVAEGGDAMEE

SEQ ID NO: 3700 - protein, 576 aa, Zea mays
MSSAAAGSYGAAGGAEHQHLLLGQASGQLYHVPQHSRREKLRFPPDPADSPPPTAWPAPPPFYSYASSSTSSYSPHSPTLAHTQLVAHALPAGAGAQIPSQNFALSLSSASSNPPPAPRRQLAAGVAAGPYGPFTGYAAVLGRSRFLGPAQKLLEEICDVGGRPPHLDRRSDDEGMLDMDAAGGVDHEMDGGDCATAEAVAVSGAEQQWRKTRLISLMDDVCRRYKQYYQQLQSVISSFETVAGLSNAAPFAFMALRTMSKHFKCLKGMVMSQLRNTSKVIANHGIIAKDDMANFALMGGGAGLLRGNSVNAFSQPHNIWRPQRGLPERAVSVLRSWLFEHFLHPYPTDSDKQMLAKQTGLTRNQVSNWFINARVRLWKPMVEEIHNLEMRQLHKTTSVDQNQLGMQQQNHHSSDGSGRPSSDPSNSQRGQSSGMTRNLSSRAPRHIQDDELSQMPHDMAGQVSFAYSGLPPAHHGLALSHHHHPQQAQAEAVGVGGVAASSGGGVSLTLGLHQNNNNNRAYIAEPLPAALPLSLPHRFGLEDVSDAYVMGPFGGQDRHFSKGIGGGHNLLHDFVG

SEQ ID NO: 3701 - protein, 287 aa, Listeria innocua
MTIQWFPGHMAKARREVTEKLKLVDVIFELVDARIPLSSSNPMLEEIIHQKRRVIILNKADTADEKTTKEWIDYFAEKGLPAVAVNAQEGKGLFKIEQAAEKLMAEKFERLRSKGMKPRAIRAMILGIPNVGKSTLINRLAKKNIARTGNKPGVTKAQQWIKVGKTLELLDTPGILWPKFEDQEIGYKLALTGAIKDDLLQMEEIAGYGLRFLEKHYPDRLQNWLKVEKVSEDPIETLAFIAEKRGLLDRYNDPDYSRAAETVVREIRQQKLGRMSFDFPNWEDDAE

SEQ ID NO: 3702 - protein, 166 aa, Triticum aestivum
  unsure (1)..(166): unsure at all Xaa locations
MATSSAKSVHDFTVKDAKGNDINLGDYKGKVLIIVNVASQCGLTNSNYTELSQLYEKYKQKGLEILAFPCNQFGAQEPGSNEQIQEFVCTRFKAEFPVFDKVDVNGDKAAXLYKYLKSSKGGLFGDGIKWNFSKFLVDKEGNVVDRYAPTTXPXSIEKDLLKLLDA

SEQ ID NO: 3703 - protein, 228 aa, Gossypium pilosum
  unsure (1)..(228): unsure at all Xaa locations
FTSLCHTDVYFWEAKGQTPLFPRIFGHEAGGIVESVGEGVTHLKPGDHVLPVFTGECGNCRHCKSKESNMCDLLRINTDRGVMLSDGKTRFSINXKPIYHFVGTSTFSEYTVAHVGSVAKINPAAPLDKVCILSCGISTGLGATLNVAKPAKGSTVAIFGLGAVGLAAAEGARIAGASRIIGVDLNPNRFEEAKKFGCTEFVNPKDHNKPVQEVLAEMTNGGVDRSVE

SEQ ID NO: 3704 - protein, 475 aa, Pseudomonas aeruginosa PAO1
MSKVVLASQLPNKRNASLAPGLKQRHVTMLSIAGVIGAGLFVGSGHAIAAAGPAALLAYLIAGTLVVLVMRMLGEMAVASPDTGSFSTYADRSIGRWAGFTIGWLYWWFWVLVIPLEAIAAAAILNAWFPAIDTWIFALAVTFLLTVTNLFSVARYGEFEFWFALLKVIAIIAFIVLGAVAIVGGLPEREVSGLSSLMASHGGFVPNGYGAVLGALLTTMFSFMGTEIVTIAAAESKDPAKQITRATNSVIWRIGLFYLVSIFIVISIVPWNDPLLIQVGSYQRALELLDIPHAKLIVDLVVLVAVASCLNSAIYTSSRMVFSLAKRGDAPSVLKLTNTAHVPRPAVLASTAVGFLTTIVNYFAPEKVFTFLLASSGAVALLVYLVIAVAQLRMRKQLQASGQPIEFRMWLYPWLTWAVILFIVAALSIMLIMPEHRHEVFATALLTIFTVCLGLLNARRKPRLGEDYAGKTARV

SEQ ID NO: 3705 - protein, 243 aa, Lactococcus lactis subsp. lactis
MKFSGKKVLITGAASGIGLAQTKVFLAEGAEVVAVDLQEFTDESIINSKNLSVKILDVSDAQSVEKLADEVGSIDVLLNTAGVLDAYKTLEETDFAEWQRILSTNLNSMYLMISAFLPKMKAQKSGVIINMASVAGLIAGGGGVAYTTSKHAIVGLTKQLALDEAQHGIQVAAIAPGAINTPMNAADFTENNGQMAQWVADETPAKRWASPREVADLTLFLASPQASYMSGAIVPIDGGWTIK

SEQ ID NO: 3706 - protein, 344 aa, SYNECHOCOCCUS SP. WH 8102
MTCRILITGGAGFIGSHTCLVLLEQGHSLVVVDNFDNSSPEALRRVQELAASDALQLVEGDLRNPDVLDRAFRSGRPVDGVIHFAGLKAVGESVADPLRYWDVNLNGSRVLAAVMERHGCRTLVFSSTSTVYGEPEQFPLHEGMATAPVHPYAQTKLAVEQMLGALCRSGSWRVACLRYFNPVGAHPSGRIGEDPLGIPNNLFPFITQVAAGRRDKLRVFGQDYPTPDGTGIRDYLHVMDLAEAHGVTLTHLLNQEPPTQLTVNIGTGTGLSVLDVIKGFEQATGITIPYEVVARRPGDVPRLQACPRQAEAVLGWTARRGLVEMCRDGWAWQQANPMGYRSAP

SEQ ID NO: 3707 - protein, 775 aa, Glycine max
MQQGDPTVLSLRPGGGRGGGSRLFAHSSSSSSLSADLPLSRPHASFSLKTGDSRFEGHERVRYTRDQLLQLKEAVEVPDDILKIKQDIEAELFGEDPSWGRAESNLPHQLQNRYSEPDNRDWRGRSGQPPASTDERSWENLRDNREFGNRQQDASQVNRHDQLNSQFARTQISSMQGGGPTPTLVKAEVPWSARRGSLSEKDRVLKTVKGILNKLTPEKFDVLKGQLIDSGITSADILKDVISLIFDKAVLEPTFCPMYAHLCSDLNEKLPPFPSEEPGGKEITFKRVLLNNCQEAFEGAENLREELKRMTVPEREMERTDKGRLLKLRTLGNIRLIGELLKQKMVPEKIVHHIVQELLGSPDSKSCPVEENVEAICQFFNTIGKQLDESPKSRRINDIYFSRLKELSSNLQLVPRLRFMIRDVIELRASNWVPRREEVKAKTITEIHSEAEKNLGLRPGATASMRNSRGGVQGNASSGGFHIARPGAGGLMPGMPGTRKRPGFDNDNWEMPKTRSMPRGDSSGVQAAGCSNSALLSKSTTLNSKLLPQGSGGIISGRNSALVHGGGTFSTSSTNFCLGPEAAPQLSSPAPVPVSSEKPQPPAARLNTDDLCRRTVSLLEEYFSVRLLEEALQCVEELKSPSYHPEVVKEAIYLALDKSPPCVETVANLIEYLYIKKILTPLDIGTGCLLFGSLLDDIGIDLPKAPSNFGEIIGKLILAGGLDFKVVGEILKKVDDDMFRRAIFDSVVGAIRSASEQAILDAQTSDIEVCQSQLK

SEQ ID NO: 3708 - protein, 767 aa, Chenopodium rubrum
MSSRNNFFCFLVLFILLSAEARAAPLACDPKSGLTRALRFCRVNLPIRARVQDLIGRLNLQEKVKLLVNNAAPVPRLGISGYEWWSEALHGVSNVGPGTKFRGAFPAATSFPQVITTAASFNASLWEAIGQVVSDEARAMYNGGTAGLTYWSPNVNIFRDPRWGRGQETPGEDPTLASQYAASYVRGLQGIYNKNRLKVAACCKHYTAYDLDNWNAVDRFHFNAKVSKQDLEDTYNVPFKGCVQEGRVASVMCSYNQVNGKPTCADPDLLRNTIRGQWRLNGYIVSDCDSVGVLYDDQHYTRTPEEAAADTIKAGLDLDCGPFLAVHTEAAVKRGLLTEADVNQALTNTFTVQMRLGMFDGEAAAQPFGHLGPKDVCSPAHQDLALQAARQGIVLLQNRGRSLPLSTARHRNIAVIGPNADATVTMIGNYAGVACGYTSPLQGIARYAKTVHQAGCIGVACTSNQQFGAATAAAAHADATVLVMGLDQSIEAEFRDRASVLLPGHQQELVSKVALASRGPTILVLMCGGPVDVTFAKNDPKISAILWVGYPGQAGGTAIADVLFGTTNPGGKLPNTWYPQSYVAKVPMTDLAMRANPSNGYPGRTYRFYKGPVVFPFGFGLSYTRFTQSLAHAPTKVMVPLANQFTNSNITSFNKDALKVLHTNCDNIPLSLHIDVKNKGKVDGSHTILVFSTPPKGTKSSEKQLIGFKRVHVFAGSKQRVRMNIHVCNHLSRADEFGVRRIPIGEHTLHIGDDHKHKLSLHIDIGK

SEQ ID NO: 3709 - protein, 648 aa, Cochliobolus carbonum
MVDGNDMAGPTGAVHINNGTASQPKKVAYFYDSDVGNYAYVAGHPMKPHRIRMAHSLIMNYGLYTKMEIYRAKPASKYEMTQFHTDEYIEFLHKVTPDNMEQFTREQSKYNVGDDCPVFDGLFEFCGISAGGTMEGAARLNRGKCDVAVNWAGGLHHAKKSEASGFCYVNDIVLGIIELLRYKQRVLYIDIDVHHGDGVEEAFYTTDRVMTVSFHKYGEYFPGTGELRDIGVGSGKNYSVNFPLRDGITDETYRNIFEPVIEAVMTYYGPEAIVLQCGGDSLSGDRLGCFNLSMDGHANCVRYVKSFGVPVIVLGGGGYTMRNVARTWAYETGELVSQKMSKQLPFNDYYEYFAPDYELDVRPSNMENANSHDYLHKIKSAVIENIRRTGRPSVEAFTTIPDVPTALGRAMDSDAEDEEDDMDADENRDVRMTQRQRDKQIEHDGELYDASDDEDYKNNLGVRAQPGVKKRRNITDFPNPNAAPADALDLMEDINGGSAVSTRQPSAGAKSRTQTPAAAEQEVDKDGDVDMDAPVPESAPEPVPEAALETAPETAPAAAPPAAIETTDTAAPATAPEREPSPAGVVTPPESPPTAVPATMAPTSAPVADVEMAETDDKEETSAAKEEGEAERDTENVKGEVRAEVAKD

SEQ ID NO: 3710 - protein, 254 aa, Oryza sativa (japonica cultivar-group)
MSQGQPRRPPPDGSGARPVMYGDVFDVSGELAGQPVAPRDAAKLQSAEEAVLGEAQKGGPAAAMQSAAAINARAGHVGRAQVTGAIADEGVAVAVAETELPGRRVVTESVAGQVVARLATPPRVVATQPSGSLDKDAVTIGRALEWRPRPPRRRVSRWTRATRRQSRPPRCSPRGAPSPSPEASPPRRRLRRTTTPRPRHATRTGSSSGTSSRGRGASCRRTRRRRGRTRRGCRRPRCGTGRTWRRRRAAWRTR

SEQ ID NO: 3711 - protein, 1131 aa, Pinus sylvestris
MASNSRHTQSQSTGSNNRRSSTNTNTTTNKATAMAQYNSDARLLQVFEQSGESGKSFDYTRSIQVHNRAVPEQQITAYLSRIQRGGRIQPFGCVLAVEETTFRIIAYSENEEMLDLGAQSVPSMEKPQQDVLTIGTDVRTLFTAASAHSLEKAAVAQEISLMNPIWVHCKNSRKPFYAIVHRIDVGMVIDLEPLRTGDAFMSAAGAVQSQKLAVRAISRLQSLPCGDVGLLCDTVVENVRELTGYDRVMVYKFHEDEHGEVVAEIRRSDLEPYLGLHYPATDIPQASRFLFMQNRVRMICDCMATPVKVIQSEELMQPLCLVGSTPSAPHGCHAQYMANMGSIRSLLMAVIINGNDDEGGGSGRNSMKLWGLVVCHHTSPRAVPFPLRYACEFLMQALGLQLNMELQLAAQLTEKHILRTQTLLCDMLLRDAPMGIVTQSPSIKDLVKCDGAALYYGGMCWMLGVTPTEAQIKDIADWLLEHHGDSTGLSTDSLADAGYPGAASLGDAVCGMASARITSKDFLFWFRSHTAKEMKWGGAKHHPDDKDDARRMHPRSSFKAFLEVVKRRSLPWDNVEIDAIHSLQLILRCSFRDIDDSGTKTMVHSRLNYLRLQGIDELSSVASEMVRLIETATAPILAVDYNGLVNGWNAKVAELTGLPVGEAMGMSLVQDLVFEQSVERVEKMLHNALRGEEEKNVEMMLKTFGPQKEKEAVILVVNACSSRDFTDNIVGVCFVGQDVTSQKVVMDKFIRIQGDYRSIVQSPNPLIPPIFASDEYACCSEWNAAMEKVTGWTHDEVIGKMLVGEIFGGCCRLKGQDAVTKFTIVLHQCNHGQEIEKFPFAFFDKQGKYVEALLTANKRTDADGRITGSFCFFRIASSELQHALEVQRQQEKKCFARLKELAYIRQEIKNPLYGMMFTRKLLEETDLSDDQKQFVETSAVCERQMQKVMDDMDLESLEDGYMELDTAEFILGTVIDAVVSQGMIVLREKGLQLIREIPGEVKTMRLYGDEVKIQQILADFLLNVLRFTPSPEGWVAIKVFPTLKQLGGGLHVVHLEFRITHPGLGLPAELVQDLFDRSQWATQEGVGLSMCRKLLKLMNGDVRYIRESGICYFLVNVEFPMAQREDAASIK

SEQ ID NO: 3712 - protein, 148 aa, Zea mays
  unsure (1)..(148): unsure at all Xaa locations
FLAVDNSXAMNILGIIVPLYSPIKQGASLVALSFFGASQVKFPGVERNHKCLVGSVLSPVGVFPYVFRQPYCYQLWPQKLVSPSMHLDYVSISVAPFFVSNPNVSLSQPFWFLWQVVSHPVGYTFQPKISPNPVVPVKKKKKKRRGRP

SEQ ID NO: 3713 - protein, 136 aa, Narcissus pseudonarcissus
LGMDGAVCKLDKSKIAASVSNFSVVSIDEEQIAANLVQHGPLAIGINAAFMQTYIGGVSCPYICGKHLDHGVLLVGYGSSGWAPIRFKEKPYWIIKNSWGENWGEKGYYKICKGRNVCGVDSMVSTVTAIHTTPKD

SEQ ID NO: 3714 - protein, 319 aa, Eucommia ulmoides
MAELKKEFLNVYSVLKKELLHDPAFSLTEDSRNWVERMLDYNVPGGKLNRGLSVVDSYKLLKELSSSKKGAQLTESEIFHSSVLGWCVEWLQACALVLDDIMDSSHTRRGQMCWYKLPKVGMIAINDGLILRNHVPRILKKHFRSKPYYLELLDLFHEVECQTVGGQMIDLITTLVGEIDLSEYSLPTHRQITVSKTSYYSFYLPVACALLMTGEKLESHSGMKDILIEMGSYFQVQDDYLDCFGDPEVIGKIGSDIEDFKCTWLVVKALELCNEEQKKILYDNYGKKDPESVARVKDLYKTLKLQDVFEETRKRRTRS

SEQ ID NO: 3715 - protein, 352 aa, Chlorobium tepidum TLS
MMYKIVSIPGDGIGPEVVAGALDVLNAVAKKHGFEVSVEEHLFGGASYDVHGSMLTDETLEACKNCDAVLLGAVGGYKWENLPHDKKPEAALLKIRKELGLFANLRPARVYDALVASSTLKTEVVQGTDFMVFRELTGGIYFGQPRGYDETRGWNTMVYERYEVERIARLAFEYAQKRGNAKVTSIDKANVLEVSQFWRNIVHEVHQDFPEIELVDMYVDNAAMQVVRNPKQFEVIVTSNLFGDILSDISGMITGSLGMLPSASIGSEHALYEPIHGSAPDIAGQNKANPIATIASVAMMFENSFNRPEVAADIYAAIEGALAAGFRTGDIAAAGEAISSTTEMTAAIVARI

SEQ ID NO: 3716 - protein, 442 aa, Triticum aestivum
MSNYHDDHVEDMEDDYDMDDPAEDMVDAHHERGLRDSDSEDDEYAHSNDKIPDTSAADARKGKDIQGIPWERLAITRENYRQTRLEQYKNYENIPNSGEAAAKECKPTVKGGMYYEFRQNTRSVKSTILHFQLRNLVWATSKHDVYLMSHYSVLHWSALSGVDTELMNVQGHVAPREKHPGSLLEGFSQTQVSTLAVKDNLLVAGGFQGELICKHLDREGISFCCRTTYDDNAITNAVEIFNTASGAVHFMASNNDSGVRDYDMERFQLCKHFQFDWPVNHTSLSPDGKLVVIVGDDPNGLLIDANSGKTLHSMKGHHDFSFASAWSPDGRTFATGNQDKTCRIWDARNLSKAVHVLKGNLGAIRSIRFTSDGQFLSMAEPADFVHIFDVKSDYNRRQELDFFGEISGMSFSPDTDALFVGVWDRTYGSLLQFGRLYNKLVP

SEQ ID NO: 3717 - protein, 379 aa, Cucumis melo
MPSLTAPHGLPLFLFLLLFLFSSVSAQFQPAPDPRSDPYQYRLSGSMAVIIVILIAALFFMAFFSVYIRHCNDSPSNTVRPITAAAGRSRRATRGLDPAVIETFPTLIYSDVKEHKIGKSALECAVCLNEFEDDETLRLIPKCDHVFHPECIDAWLASHSTCPVCRANLSPQPTDSVHRADDSNAVVNSDTDGGDIEAQSNDVVSETTAPPTVQIQTESELSTTTSNKALNRTRTRGSRSNRLRWLFPRSHSTGHSLVQPGEDTERFTLRLPVEIRKQVVNRKLHRATSMVVLARQSSSMRGYRFGSGEGSSRGKYYRRLERLDRTSKSDRWVLSMTPPFFTRMSSMKTPRGGSNRAEPGSGRELGQGNTAVDSSRLPV

SEQ ID NO: 3718 - protein, 341 aa, Mesorhizobium loti
MKAARLYGPGDLRVEDVAPPGIPDPGWVKLRVDAAGICGSDLHNFRTGQWISRSPSTAGHELTGTVTALGEGVDTVAVGDRVVADSRFWCEECVQCRAGRRHLCASLGFVGEVCDGGFAEQVVLPARLLHVVDAALDERVAAMAEPLAVALHAVRRLPKTAGSVLVVGCGPIGGLAALLLSRSFAGTVLVADRNQARCARVARVTGATIVDLDRDAIAAATGYAPLLAAVEATGSIAAFNQLLGVLDSGSAVAMVGIFHGRLDIDPNLLVEREIALLGCHAFADELPDAVRMLGELSEPLLALIDREIGLDDIPAAYERLLAGQSDGLKTIIRMRQPVEPA

SEQ ID NO: 3719 - protein, 436 aa, Limnanthes douglasii
MASWVLSQYALNPLPHIFRTPRTSITSHKLTVSHTNNRATPDLTKLSLIKFRERKLGLRVSAPFQIASTTPEEEDEVAEFDPGSPPPFKLADIRAAIPKHCWVKNQWRSMSYVVRDVVIVLGLAAAAVAANSWAVWPLYWVAQGTMFWALFVLGHDCGHGSFSNNHKLNSVVGHLLHSSILVPYHGWRIRHRTHHQNHGHVENDESWHPMSEKLFRSLDKIALTFRFKAPFPMLAYPFYLWERSPGKTGSHYHPDSDLFVPSEKKDVITSTICWTTMVGLLIGLSFVMGPIQILKLYVVPYWIFVMWLDFVTYLDHHGHEDKLPWYRGEEWSYLRGGLTTLDRDYGLINNIHHDIGTHVIHHLFPQIPHYHLVEATQAAKPIFGKYYKEPAKSKPLPFHLIDVLLKSLKRDHFVPDTGDIVYYQSDPQISGSLKPE

SEQ ID NO: 3720 - protein, 154 aa, Glycine max
  unsure (1)..(154): unsure at all Xaa locations
MCPWGGLPPKGGVXFXLCRXNPMLXRGGVKXPTFLKTGTTIVGVXFXDGVILXAXTXGTEGPIVGXKNCEKIHYXAPKGGGXGAXASSXTXAGTXMGSSQLRLHRYHTGRESRVWTGRTLLXKHLFNYQGRXSXALVLGGGXITGPHXHTIYPH

SEQ ID NO: 3721 - protein, 765 aa, Salmonella typhimurium LT2
MKWLCSVGVAVSLAMQPALAENLFGNHPLTPEARDAFVTDLLKKMTVDEKIGQLRLISVGPDNPKEAIREMIKDGQVGAIFNTVTRQDIRQMQDQVMALSRLKIPLFFAYDVVHGQRTVFPISLGLASSFNLDAVRTVGRVSAYEAADDGLNMTWAPMVDVSRDPRWGRASEGFGEDTYLTSIMGETMVKAMQGKSPADRYSVMTSVKHFAAYGAVEGGKEYNTVDMSSQRLFNDYMPPYKAGLDAGSGAVMVALNSLNGTPATSDSWLLKDVLRDEWGFKGITVSDHGAIKELIKHGTAADPEDAVRVALKAGVDMSMADEYYSKYLPGLIKSGKVTMAELDDATRHVLNVKYDMGLFNDPYSHLGPKESDPVDTNAESRLHRKEAREVARESVVLLKNRLETLPLKKSGTIAVVGPLADSQRDVMGSWSAAGVANQSVTVLAGIQNAVGDGAKILYAKGANITNDKGIVDFLNLYEEAVKIDPRSPQAMIDEAVQAAKQADVVVAVVGESQGMAHEASSRTNITIPQSQRDLITALKATGKPLVLVLMNGRPLALVKEDQQADAILETWFAGTEGGNAIADVLFGDYNPSGKLPISFPRSVGQIPVYYSHLNTGRPYNPEKPNKYTSRYFDEANGPLYPFGYGLSYTTFTVSDVTLSSPTMQRDGKVTASVEVTNTGKREGATVIQMYLQDVTASMSRPVKQLKGFEKITLKPGERKTVSFPIDIEALKFWNQQMKYDAEPGKFNVFIGVDSARVKQGSFELL

SEQ ID NO: 3722 - protein, 285 aa, Trichodesmium erythraeum IMS101
MTIQWYPGHIAKAERNLKEQLKRVDVVLEVRDARIPLATRHPQVSEWVGSKAQVLVINRIDMISSEVMKIWTEWFEANGEMPYFTNAQLGDGVKNLAKAVREAGRAVNLRRRDRGMLPRPVRAVVIGFPNVGKSALINRLLKRKVVESARRPGVTKQLRWVRISDEIELLDAPGVIPSQIKNREDAIKLAICEDIGDAAYDNQQVAASMIDFLTFLETDSNGFVSTSCLKYRYQLEAHNYTGESYLHELANQIYQGDVERTSRRILDDFRKGFLGKISLELPPFK

SEQ ID NO: 3723 - protein, 470 aa, Shigella flexneri 2a str. 301
MPLNKKDTQGKGVKNASTVSEDTASNQEPTLHRGLHNRHIQLIALGGAIGTGLFLGIGPAIQMAGPAVLLGYGVAGIIAFLIMRQLGEMVVEEPVSGSFAHFAYKYWGPFAGFLSGWNYWVMFVLVGMAELTAAGIYMQYWFPDVPTWIWAAAFFIIINAVNLVNVRLYGETEFWFALIKVLAIIGMIGFGLWLLFSGYGGEKASIDNLWRYGGFFATGWNGLILSLAVIMFSFGGLELIGITAAEARDPEKSIPKAVNQVVYRILLFYIGSLVVLLALYPWVEVKSNSSPFVMIFHNLDSNVVASALNFVILVASLSVYNSGVYSNSRMLFGLSVQGNAPKFLTRVSRRGVPINSLMLSGAITSLVVLINYLLPQKAFGLLMALVVATLLLNWIMICLAHLRFRAAMRRQGRETQFKALLYPFGNYLCIAFLGMILLLMCTMDDMRLSAILLPVWIVFLFVAFKTLRRK

SEQ ID NO: 3724 - protein, 186 aa, Zea mays
FDFLNPYCLKACIYGLCFEVRSSELIEVSVSKFMTPSAFIFLYENNLFLTFRNRTVAVWDFRGELVTSFEDHLLWHNDCSTNNIYITSDQDLIISYCKSEAVAEDGTVVPVGSINISEIMTGRCIAKITANDPSLSVPGRRNGYSKRSSDWSTVPEALEDVTALFYDEDRNEIYTGNSHGLVHVVV

SEQ ID NO: 3725 - protein, 173 aa, Zea mays
  unsure (1)..(173): unsure at all Xaa locations
MAAEGEKKMITLKSSDGEEFEVEEAVAMESQTIRHMIEDDCADNGIPLPNVNSKILSKVIEYCNKHVHAAAAAAAASKAGSDDDLKNWDADFVKVDQATLFDLILTPXDQLRIDLHAANYLNIKGLLDLTCQTVADMIKGKTPEEIRKTFNIKNDFTPEEEEEIRRENQWAFE

SEQ ID NO: 3726 - protein, 1131 aa, Zea mays
MSSSRPAHSSSSSSRTRQSSRARILAQTTLDAELNAEYEESGDSFDYSKLVEAQRSTPPEQQGRSGKVIAYLQHIQRGKLIQPFGCLLALDEKSFRVIAFSENAPEMLTTVSHAVPNVDDPPKLGIGTNVRSLFTDPGATALQKALGFADVSLLNPILVQCKTSGKPFYAIVHRATGCLVVDFEPVKPTEFPATAAGALQSYKLAAKAISKIQSLPGGSMEALCNTVVKEVFDLTGYDRVMAYKFHEDEHGEVFAEITKPGIEPYIGLHYPATDIPQAARFLFMKNKVRMICDCRARSVKIIEDEALSIDISLCGSTLRAPHSCHLKYMENMNSIASLVMAVVVNENEEDDEPEPEQPPQQQKKKRLWGLIVCHHESPRYVPFPLRYACEFLAQVFAVHVNKEFELEKQIREKNILRMQTMLSDMLFKESSPLSIVSGSPNIMDLVKCDGAALLYGDKVWRLQTAPTESQIRDIAFWLSEVHGDSTGLSTDSLQDAGYPGAASLGDMICGMAVAKITSKDILFWFRSHTAAEIKWGGAKHDPSDKDDNRRMHPRLSFKAFLEVVKTKSLPWSDYEMDAIHSLQLILRGTLNDASKPAQASGLDNQIGDLKLDGLAELQAVTSEMVRLMETATVPILAVDGNGLVNGWNQKVAELSGLRVDEAIGRHILTLVEDSSVSLVQRMLYLALQGREEKEVRFELKTHGSKRDDGPVILVVNACASRDLHDHVVGVCFVAQDMTVHKLVMDKFTRVEGDYKAIIHNPNPLIPPIFGADQFGWCSEWNAAMTKLTGWHRDEVVDKMLLGEVFNSSNASCLLKSKDAFVRLCIVINSALAGEEAEKASFGFFDRNEKYVECLLSVNRKVNADGVVTGVFCFIHVPSDDLQHALHVQQASEQTAQRKLKAFSYMRHAINKPLSGMLYSRETLKSTGLNEEQMRQVRVGDNCHRQLNKILADLDQDNITDKSSCLDLDMAEFVLQDVVVSAVSQVLIGCQAKGIRVACNLPERSMKQKVYGDGIRLQQIVSDFLFVSVKFSPAGGSVDISSKLTKNSIGENLHLIDFELRIKHRGAGVPAEILSQMYEEDNKEQSEEGFSLAVSRNLLRLMNGDIRHLREAGMSTFILTAELAAAPSAVGR

SEQ ID NO: 3727 - protein, 343 aa, Triticum aestivum
MAEVSNKRVILKRYVTGFPSEDDMELVPATARLAVPPGSAAVVVKNLYLSCDPYLRSRMSGNDEPSHVPDFVQGEVLTTLGVSKVVESGHQDYKPGDLVWGMTGCEEYTLITDLQSHFKINHPELPLSYYTGVLGMPGLTAYVGFFDVAKPKKGDYVFVSAASGAVGQLVGQLAKISGCYVVGSAGSDEKVNLLKTKFGFDDAFNYKKEQDLDATLKRCFPEGIDIYFENVGGAMLDAVLLNMRLHGRVSVCGLISQYNLEQSEGVRNLFCIITKRIRMEGFIVTDHYGSYRKFEEEMAGYLKEGKITYVEDVAEGIESFPTALIGLFYGRNIGKQLVVVARE

SEQ ID NO: 3728 - protein, 111 aa, Triticum aestivum
PDNLLALSSSSCPLPPPPPELGFWRSSPVPLGDPSPSAMDDTAELQRFIEQEKEKMMVSEMIGKVTSECWDKCITGAPGSKLSSGETSCLSNCAQRFVDMSEMIAKRFGAH

SEQ ID NO: 3729 - protein, 332 aa, Rhodopseudomonas palustris
MMIKTRFTEAFGVEHPIVQGGMQWVGRAELVAAVANAGALGMITALTQPTPEDLAKEIARCREMTDKPIGVNLTILPAIKPPPYAEYRRVIIESGVKIVETAGNKPQEHVEDFKKHGVKVLHKCTSVRHALSAERMGVDGISIDGFECAGHPGEDDTPGLVLIPAAADKIKIPMIASGGFADARGLVAALALGADGINMGTRFMCTKESPIHQAVKEKIVANDERSTDLIFRTLRNTSRVAKNAISQQVIELEKQGATFEQVKELVAGSRGKMVYVNGDTDEGVWSAGMVQGLIHDIPSCAELVSRIVREAEAIIRGRLEALLSGGAREAAE

SEQ ID NO: 3730 - protein, 394 aa, Burkholderia fungorum
MNFNEYPIESLMYITNRPEIVFTHGKGSWLYDNNGKRYLDFIQGWAVNSLGHCNDGMIEALNKQAQLLINPSPAFYNEPMAKLAGLLTQHSCFDKVFFANSGAEANEGAIKLARKWGKKFKDGAFEIITFDHSFHGRTLATMSASGKPGWDTIYAPQVPGFPKADLNDIASVEKLINAKTVAVMLEPIQGEGGVIPATREFMQQLRALTNKHNLLLIVDEVQSGCGRAGTLFAYELSGIEPDIMTLGKGIGGGVPLAALLSKADVAVFEAGDQGGTYNGNPLMTAVGYSVISQLTAPGFLESVRARGEYLRSKLLELSEERGFVGERGEGLLRALLLGKDIGNQIVEKARDMQPDGLLLNAARPNLLRFMPALNVSNEEIDQMMAMLRSILDTL

SEQ ID NO: 3731 - protein, 186 aa, Neisseria meningitidis Z2491
MNMKTLLALAVSAVCSVSVAQAHEHNTIPKGASIEVKVQQLDPVNGNKDVGTVTITESNYGLVFTPDLQGLSEGLHGFHIHENPSCEPKEKEGKLTAGLGAGGHWDPKGAKQHGYPWQDDAHLGDLPALTVLHDGTATNPVLAPRLKHLDDVRGHSIMIHTGGDNHSDHPAPLGGGGPRMACGVIK

SEQ ID NO: 3732 - protein, 258 aa, Lactobacillus gasseri
MLFETSDNVKINYELTGKGKTIVLVNGFGAYQEIWSAQVPFLNNLGYQVLTYDHRNMGKSQRTERGHNIVRLTQDLEELISFLKIKQAIFMGHSMGASIIFCLIKRWPTVVKRALVVDQSPKMLNDKNWKYGFMDYTSENYHKKCQERPHVHETFAGLDDGVYAKLMKAKEENPFNRKDNVDLLENHMSLDWRKVIENATIPITFFIAKESPYYREGYEKLLEEKNDQVDSFIMSPTGHVIMAEIPKQFNNKLKDILG

SEQ ID NO: 3733 - protein, 607 aa, Azotobacter vinelandii
MGRGKPHRRPARAGLRAAQPAGGEPPAGRRRQPLPGHRREPPVRLHRHGRAVAAERPGTGARLRAAQPAPAADPGGGAGAHGELPRAGALPEPALHHRLHRGEARRERELQAGDQLLGAGLPAALGVIRQAFPGPPTGRWAAPRVRGGLSMKDATGNPQTRHWQALGHAHHLPPFSDYRQLKEHGPRIITRASGVYLWDSEGNCILDGMAGLWCVNVGYGREELVEAASRQMRELPYYNLFFQTAHPPAVELARAIAELAPPGMHHVFFTGSGSEANDTVLRLVRHYWAIKGQPRKNVVIGRWNGYHGSTVAGASLGGMKAMHGQGDLPIPGIEHIDQPYWFGEGGGLDPEAFGIRVADQLERKILEIGEERVAAFIAEPIQGAGGVIIPPDSYWPRIREILRKYDILFAADEVVCGFGRTGEWFGSQYYGLEPDLMAIAKGLTSGYLPMGGVVVRDRIVEVLEEGGEFYHGFTYSGHPVAAALALENIRLLREEGIVERVRTRTGPYLQRRWRELAEHPLVGEVRGLGMLAALELVKDKKTRERFPADLAAGMRCREHCFANGLVMRAVGDTMIVAPPLVISEAEIDELIAKARHCLDLTASEMPG

SEQ ID NO: 3734 - protein, 342 aa, Saccharomyces cerevisiae
MQYSSRFLELNIPDSFLNINKIPDATKFITVTYICLTATLFCIRRSLYNKLVLEDPNLDYNLITSPLLQMVPSQIWRYPTSLVLSNFIDTKAWKVVVNLLNLIIGGSFIERNWNSSKEMFKFIIVLGSLTNVLIIMLTLLVSFFSNKVRLDIPLDGNYTILIGFPIIYRQLLPETTIIHLKTPQFLAKNFRFKLLPIFVMFTMTVTQIIWFHHFAQLFSIWVTFFASWSYLRFFQKLAPLNCPSLPTTNSQGGQEILVGDASDTFQLIYFFPDLIKPILRPIFNFIYNVVVVKFKVIKPFHDIDIDIGNTIAESRGAKKIMTVEERRRQLALQVLEERMVNP

SEQ ID NO: 3735 - protein, 462 aa, Mycobacterium tuberculosis CDC1551
MIGIGGAIGTGLFLGAGGRLAKAGPGLFLVYGVCGVFVFLILRALGELVLHRPSSGSFVSYAREFFGEKAAYAVGWMYFLHWAMTSIVDTTAIATYLQRWTIFTVVPQWILALIALTVVLSMNLISVEWFGELEFWAALIKVLALMAFLVVGTVFLAGRYPVDGHSTGLSLWNNHGGLFPTSWLPLLIVTSGVVFAYSAVELVGTAAGETAEPEKIMPRAINSVVARIAIFYVGSVALLALLLPYTAYKAGESPFVTFFSKIGFHGAGDLMNIVVLTAALSSLNAGLYSTGRVMHSIAMSGSAPRFTARMSKSGVPYGGIVLTAVITLFGVALNAFKPGEAFEIVLNMSALGIIAGWATIVLCQLRLHKLANAGIMQRPRFRMPFSPYSGYLTLLFLLVVLVTMASDKPIGTWTVATLIIVIPALTAGWYLVRKRVMAVARERLGHTGPFPAVANPPVRSRD

SEQ ID NO: 3736 - protein, 581 aa, Zea mays subsp. mays
MKREYQDAGGSGGDMGSSKDKMMAAAAGAGEQEEEDVDELLAALGYKVRSSDMADVAQKLEQLEMAMGMGGVGGAGATADDGFVSHLATDTVHYNPSDLSSWVESMLSELNAPPAPLPPATPAPRLASTSSTVTSGAAAGAGYFDLPPAVDSSSSTYALKPIPSPVAAPSADPSTDSAREPKRMRTGGGSTSSSSSSSSSMDGGRTRSSVVEAAPPATQASAAANGPAVPVVVVDTQEAGIRLVHALLACAEAVQQENFSAAEALVKQIPMLASSQGGAMRKVAAYFGEALARRVYRFRPPPDSSLLDAAFADLLHAHFYESCPYLKFAHFTANQAILEAFAGCRRVHVVDFGIKQGMQWPALLQALALRPGGPPSFRLTGVGPPQPDETDALQQVGWKLAQFAHTIRVDFQYRGLVAATLADLEPFMLQPEGDDTDDEPEVIAVNSVFELHRLLAQPGALEKVLGTVRAVRPRIVTVVEQEANHNSGTFLDRFTESLHYYSTMFDSLEGAGAGSGQSTDASPAAAGGTDQVMSEVYLGRQICNVVACEGAERTERHETLGQWRSRLGGSGFAPVHLGSNA

SEQ ID NO: 3737 - protein, 405 aa, Yarrowia lipolytica
MEPETKKTKTDSKKIVLLGGDFCGPEVIAEAVKVLKSVAEASGTEFVFEDRLIGGAAIEKEGEPITDATLDICRKADSIMLGAVGGAANTVWTTPDGRTDVRPEQGLLKLRKDLNLYANLRPCQLLSPKLADLSPIRNVEGTDFIIVRELVGGIYFGERKEDDGSGVASDTETYSVPEVERIARMAAFLALQHNPPLPVWSLDKANVLASSRLWRKTVTRVLKDEFPQLELNHQLIDSAAMILIKQPSKMNGIIITTNMFGDIISDEASVIPGSLGLLPSASLASLPDTNEAFGLYEPCHGSAPDLGKQKVNPIATILSAAMMLKFSLNMKPAGDAVEAAVKESVEAGITTADIGGSSSTSEVGDLLPTRSRSCSRRSKSFLRRIDGRSKLTRLRVGLPAGSASV

SEQ ID NO: 3738 - protein, 160 aa, Pseudomonas aeruginosa PAO1
MSAFHDLTLQGLDGQDLPLSPFKGKVLLVVNVASKCGLTPQYAGLENLYQTYRERGFAVLGVPCNQFAGQEPGSEADIQSFCSLNYGVSFPMSAKVEVNGSARHPLYRLLAGEGAEFPGDITWNFEKFLLGPDGRVLARFSPRTAPDDPALVQAIEKALG

SEQ ID NO: 3739 - protein, 364 aa, Buchnera aphidicola (Thelaxes suberi)
MTKKLYKIAVLPGDGIGPEIIQEAYKIIDVLQKKFSFNVKMHEYDIGGISIDKHGTALTQETIEGCENSDAILFGSVGGSKWDHLPEIEKPEKAGLLKLRKHFNLFANIRPCKLSQHLLDISPLKNSIIKKGIDLICIRELTGGIYFGKSNKITNIDDPYAFDTEIYFRSEIKRIAKIAFQIAQSRKKKIVSIDKANVLKSSILWRDTVNKMAYKFPNVKLEHMYIDNATMELIKNPSSFDVILCSNLFGDIISDECAAIIGSIGLLPSASLNKSGFGLYEPAGGSAPNIAGKTIANPIAQILSLSMLLKYSLHLPFLSSCIDEAVHEALVKKYMTMDISKNPQNFLKTNEIGDKISDLLAKKA

SEQ ID NO: 3740 - protein, 130 aa, Glycine max
MLPDAAPGDDPAAGSAEAAEKVRVKVLFFARARDLTGVAEASVEVPSGSAAGECLGRVLASFPKLDEIRRSMVLALNEEYAPESAPVADGDELAIIPPISGGSLNSGRKKERKVVFFLQYLSLLPDQCAR

SEQ ID NO: 3741 - protein, 161 aa, Prochlorococcus marinus str. MIT 9313
MSMAINISQIVVRTPEGAEKSLSEYSGTVLLIVNVASRCGFTKQYKGLQALQNTYGPQGLKVLGFPCNDFGAQEPGTLEEIKSFCSTTYGASFELFDKVHAMGKTTEPYTTLNQTEPAGDVAWNFEKFLVGKDGTVLKRFKSGVEPESTELKAAIDQALMA

SEQ ID NO: 3742 - protein, 527 aa, Streptomyces coelicolor A3(2)
MAQTAREPARDGLPKGFRSAELGWPELHRIPHPPYRLPLLGDVVGASRRTPMQDSLRYARRLGPIFRRRAFGKEFVFVWGAALAADLADEARFAKHVGLGVANLRPVAGDGLFTAYNHEPNWQLAHDVLAPGFSREAMAGYHVMMLDVAARLTGHWDLAEASGRAVDVPGDMTKLTLETIARTGFGHDFGSFERSRLHPFVTAMVGTLGYAQRLNTVPAPLAPWLLRDASRRNAADIAHLNRTVDDLVRERRANGGTGGGTGSGSGSGDLLDRMLETAHPRTGERLSPQNVRRQVITFLVAGHETTSGALSFALHYLAQHPDVAARARAEVDRVWGDTEAPGYEQVAKLRYVRRVLDESLRLWPTAPGFAREAREDTVLGGTHPMRRGAWALVLTGMLHRDPEVWGADAERFDPDRFDAKAVRSRAPHTFKPFGTGARACIGRQFALHEATLVLGLLLRRYELRPEPGYRLRVTERLTLMPEGLRLHLVRRTAAAPAPGRRTAAPGAADDAGDTVSAPGCPVHRAGD

SEQ ID NO: 3743 - protein, 210 aa, Paeonia lutea
IVESVGEGVTDLKPGDHVLPVFTGECKECRHCKSEESNMCDLLRINTDRGVMLNDGKSRFSINGQPIFHFVGTSTFSEYTVVHIGCVAKINPEAPLDKVCVLSCGISTGLGATLNVAKPKKGSSVAIFGLGAVGLAAAEGARIAGASRIIGVDLNPKRFEEAKKFGVTEFVNPKDYNKPVQEVIAEMTGGGVDRSVECTGSIMAMISAFE

SEQ ID NO: 3744 - protein, 365 aa, Saccharomyces naganishii
MAQTTKHIVVLPGDHVGQEITEEAIKVLNAISSVRPNVNFDFQHHLIGGAAIDATGVPLPDEALEASKKADAVLLGAVGGPKWGTGSVRPEQGLLKIRKELQLYANLRPCNFASDSLLDLSPLKPEIVKGTDICIVRELVGGIYFGERKEDEGDGVAWDSEKYSVSEVQRITRMAGFLALQHNPPLPVWSLDKANVLASSRLWRKTVEETIKNEFPTLTVQHQLIDSAAMILVKNPTHLNGVVIANNMFGDIISDEASVIPGSLGLLPSASLASLPDTNTAFGLYEPCHGSAPDLPKGKVNPVATILSVAMMLKLSLNMTEEGIAVEKAVKQVLDSGVRTADLRGSNSTSEVGDAIAKAVKEILA

SEQ ID NO: 3745 - protein, 246 aa, Triticum aestivum
MMDLHIKPDPQQEAHESAPSTKSFQHSPEATGTELERALHGRHLQFIAIGAAVGTGLFIGTGNALATAGPVSLLIAFIFVGTLLFSVMTALGEMAAYIPVAGAFTTYATRFLDPTFGFAMGWIYWFSWSITFALELTAAGLIIQYWEKDLSIGIWITVFWFLFTAANFMPVRWFGEFEMWFSSIKVITIIGFIIFSICVNAGVGDQGYIGFKYWKDPGAFNEHIVEGDIGRFVGFWSVLITAGFSY

SEQ ID NO: 3746 - protein, 462 aa, Cryptococcus neoformans var. neoformans
MHPQNSSTPSTNSPSTFSLPKSSISRKKPPGLDISKSILRPTRTAPVLPANGSSPSNFVSEADRLRDDIANLQLSSRSTGSNHSPEALDSPRAFQSDSSVASGLAKKEKSRDGKERGDKEKRKKKHKDKDGEDLVKDEDLEILHDLGAGNGGTVTKVWNKKRKCVMARKLILVDAKPSIRKQILRELQIMNDCDSPYIVGYYGCFPVDVHVGIVMEFMDAGSLDYIYRHHGAIDIDIVGKVAQAVLEGLIYLYDKHRIIHRDIKPSNVLANTRGEIKICDFGVSGELINSIANTFVGTSTYMSPERIQGAPYTIKSDIWSLGISLIELAVGRFPFSDSPDSEELSPSVSDFDPDPTLPRSVRRPKIESNSRHNGVSQSGGPHAMSILDLLQHIVNEPAPRLASRRRRFPQEAVAFVEGCLIKDPDQRRSPKELLSSSWITNLKTTKEDLQTWAQSMVGPREE

SEQ ID NO: 3747 - protein, 157 aa, Daucus carota
MAEVEYRCFVGGLAWATNDESLEQAFSQFGDITDSKIINDRETGRSRGFGFVTFKDEKSMRDAIEGMNGQELDGRNITVNEAQSRGSGGGGGRREGGGGGYGGGGGYGGRREGGGGGGYGGRREGGGGGYGGGGGGYGGRREGGDGGYGGGGGGSRW

SEQ ID NO: 3748 - protein, 221 aa, Cucumis sativus
MGRGKIEIKRIENTTNRQVTFCKRRNGLLKKAYELSVLCDAEVVLIVFSSRGRLYEYANNSVKATIDRYKKASSDSSNTGSTSEDNTQFYQQEAAKLRVQIGNLQNSNRNMLGESLSSLTAKDLKGLETKLEKGISRIRSKKNELLFAEIEYMRKREIDLHNNNQMLRAKIAVSERNVSMMGGEFELMQSHPYDPRDFFQVNGLQHNHQYPRQDNMALQLV

SEQ ID NO: 3749 - protein, 166 aa, Leavenworthia crassa
NTDRVGMIHDGESRFSIKGKPIHHFLGTSTFSEYTVVHSGQVAKINPEAPLDKVCIVSCGLSTGLGATLNVAKPKKGQSVAVFGLGAVGLGAAEGARIAGASRIIGVDLNSNRFEQAKKFGVTEFVNPKEHDKPVQQVIAEMTNGGVDRSVECTGSVQAMIQAFEC

SEQ ID NO: 3750 - protein, 252 aa, Ralstonia eutropha
MSTSKPLDGRRAVVTGAGSGIGEAIALAYAQAGAQLLLADIDAARADSVARRCRALGAQAETVIGDVGDESTAHRIIDRCVQAFGGIDILVNNAGMLTQSRCADMSTAMWDEMLRVDLRSVFLCARRAVPHMQAQRWGRIISIASQLGIKGGVELSHYAAAKAGVIGFTKSLALEVAPDNVLVNAIAPGPIATPLVDGISADWKRAKEASLPLGRFGRADEVAPTAVLLASDPGGNLYVGQTLGPNSGDVMP

SEQ ID NO: 3751 - protein, 214 aa, Paeonia peregrina
  unsure (1)..(214): unsure at all Xaa locations
IVESVGEGVTDLKPGDHVLPVFTGECKECRHCKSEESNMCDLLRINTDRGVMLNDGKSRFSINGQPIFHFVGTSTFSEYTVVHVGCVAKINPEAPLDKVCVLSCGISTGLGATLNVAKPKKGSSVTIFGLGAVGLAAAEGARIAGASRIIXVDLNPKRFEEAKKFGVTEFVNPKDYNKPVQEVIAEMTGGGVDRSVECTGSIMAMISAFECVHD

SEQ ID NO: 3752 - protein, 247 aa, Oryza sativa
  unsure (1)..(247): unsure at all Xaa locations
MGSKSYPTVSDEYLAAVGKARRKLRGLIAEKNCAPLMLRLAWHSAGTFDVSSRTGGPFGTMKNPGEQSHAANAGLDIAVRLLDPIKDQLPILSYADFYQLAGVVAVEVTGGPEVPFHPGRQDKPEPPPEGRLPDATQGSDHLRQVFSAQMGLSDKDIVALSGGHTLGRCHKERSGFEGAWTSNPLIFDNSYFTELVSGEKEGLLQLPSDKALMADPAFRPLVEKYAADEDAFFADYAEAHLKLSELX

SEQ ID NO: 3753 - protein, 751 aa, Geobacillus stearothermophilus
MENQNRQNAAQCPFHGSVTNQSSNRTTNKDWWPNQLNLSILHQHDRKTNPHDEEFNYAEEFQKLDYWALKEDLRKLMTESQDWWPADYGHYGPLFIRMAWHSAGTYRTGDGRGGASTGTQRFAPLNSWPNNANLDKARRLLWPIKKKYGNKISWADLFILAGNVAIESMGGKTIGFGGGRVDVWHPEEDVYWGSEKEWLASERYSGDRELENPLAAVQMGLTYVNPEGPDGKPDPKAAARDIRETFRRMGMNDEETVALIAGGHTFGKAHGAGPATHVGPEPEAAPIEAQGLGWISSYGKGKGSDTITSGIEGAWTPTPTQWDTSYFDMLFGYDWWLTKSPAGAWQWMAVDPDEKDLAPDAEDPSKKVPTMMMTTDLALRFDPEYEKIARRFHQNPEEFAEAFARAWFKLTHRDMGPKTRYLGPEVPKEDFIWQDPIPEVDYELTEAEIEEIKAKILNSGLTVSELVKTAWASASTFRNSDKRGGANGARIRLAPQKDWEVNEPERLAKVLSVYEDIQRELPKKVSIADLIVLGGSAAVEKAARDAGFDVKVPFFPGRGDATQEQTDVESFAVLEPFADGFRNYQKQEYSVPPEELLVDKAQLLGLTAPEMTVLVGGLRVLGANYRDLPHGVFTDRIGVLTNDFFVNLLDMNYEWVPTDSGIYEIRDRKTGEVRWTATRVDLIFGSNSILRSYAEFYAQDDNQEKFVRDFINAWVKVMNADRFDLVKKARESVTALQFRYNRRSGDVTVLQ

SEQ ID NO: 3754 - protein, 194 aa, Glycine max
MEGLGMLKQLIGQLQQLLDTYQSQSHSSSTLILQPPHTLLFQQQHPRWTTSLDIEDSSVDDLCGLVMTARKSGSFRMSDPVKPPPSKKSRRDRSRGKSSGRSCTTEVMEQEIWKDFPEDLFEAVIARLPIATFFRFRSVCPQWNSMLTSHSFSLHCTQVTQESPWFYTITHENVNSGAMYDPSLKKWHHPTIST

SEQ ID NO: 3755 - protein, 457 aa, Arabidopsis thaliana
MASLSQITLPRAPSSEIGLLRRRLERPIIRTRIGFNGRIASVLTNAGDQAVSVKASVSQKVIEEEAKVIVGTYARAPVVLSSGKGCKLFDPEGKEYLDCASGIAVNALGHGDPDWLRAVTEQAGVLAHVSNVYYTIPQIELAKRLVASSFADRVFFCNSGTEANEAAIKFSRKFQRFTHPEDKEVATGFIAFTNSFHGRTLGALALTSKEQYRTPFEPIMPGVTFLEYGNIQAATDLIRSGKIAAVFVEPIQGEGGIYSATKEFLQSLRSACDAAGSLLVFDEVQCGLGRTGLMWAYEAFGVTPDIMTVAKPLAGGLPIGAVLVTEKVAETINYGDHGSTFAGSPLVCSAAIAVMDKVSKPSFLSSVSNKGRYFRDLLVKKLGGNSHVKEVRGEGLIIGVELDVPASSLVDACRDSGLLILTAGKGNVVRIVPPLVISEEEIERAVEIMSQNLTALD

SEQ ID NO: 3756 - protein, 271 aa, Streptomyces roseofulvus
MTTAAPHTRPGEAGTTRGPALVTGATRGIGLAVAEALVARGYPVVVCARDAEAVARTVKELAAGGARVEGVVADVTDAASVHELVATTVARFGPVEVLVNNAGRSGGGVTAELSESLWDDVIATNLKSVFLVTREVLTTGGMTGRGRGVVNIASTGGKQGVVFGAPYSASKHGVVGFTKALGLELARSGITVNAVCPGYVETPMAAGVRRHYADLWDVTEEDVLARFEAKIPLGRYTRPDEVAALVDYLVTDAAAAVTAQALNVCGGLGNY

SEQ ID NO: 3757 - protein, 517 aa, Candida tropicalis
MIEQLLEYWYVVVPVLYIIKQLLAYTKTRVLMKKLGAAPVTNKLYDNAFGIVNGWKALQFKKEGRAQEYNDYKFDHSKNPSVGTYVSILFGTRIVVTKDPENIKAILATQFGDFSLGKRHTLFKPLLGDGIFTLDGEGWKHSRAMLRPQFAREQVAHVTSLEPHFQLLKKHILKHKGEYFDIQELFFRFTVDSATEFLFGESVHSLKDESIGINQDDIDFAGRKDFAESFNKAQEYLAIRTLVQTFYWLVNNKEFRDCTKSVHKFTNYYVQKALDASPEELEKQSGYVFLYELVKQTRDPNVLRDQSLNILLAGRDTTAGLLSFAVFELARHPEIWAKLREEIEQQFGLGEDSRVEEITFESLKRCEYLKAFLNETLRIYPSVPRNFRIATKNTTLPRGGGSDGTSPILIQKGEAVSYGINSTHLDPVYYGPDAAEFRPERWFEPSTKKLGWAYLPFNGGPRICLGQQFALTEAGYVLVRLVQEFSHVRSDPDEVYPPKRLTNLTMCLQDGAIVKFD

SEQ ID NO: 3758 - protein, 357 aa, Phytophthora infestans
MSQLDRAVYDQYMSLDVSESVTLAEYVWIGGSGQDLRCKTKTLTKPVKSVADLPIWNFDGSSTGQAPGEDSEVLLRPVAIFKDPFRRGQHILVLCDCLKPDMTPIANNTRADAARVMKAAEGEEPWFGIEQEYTLFEKDGVTPYGWPKGGFPGPQGPYYCGAGAHSVFGRIIVDAHYRASLYAGINISGINAEVMPGQWEYQVGPCTGIESGDHLWMSRYILLRVCEDFGVNVSWDPKPIPGDWNGAGCHTNYSTKAMREEGGMAKIIEAIEKMKLKHKEHIAAYGTGNERRLTGRHETASMDTFSYGVANRGASIRIPRVAEAEGKGYFEDRRPASNMDPYVVTGRIIKTTILNEA

SEQ ID NO: 3759 - protein, 182 aa, Vibrio parahaemolyticus RIMD 2210633
MSSIRSYKGIKPQLGERVYVDSTSVLVGDIRIGDDSSIWPLVAARGDVNHIHIGDRTNIQDGSVLHVTHKNSENPNGYPLIIGNDVTIGHKVMLHGCEIHDRVLVGMGAIVLDAVVIESEVMIGAGSLVPPGKRLESGYLYVGSPVKQARPLSETERAFLQKSANNYVQNKNDYLHEVEDLN

SEQ ID NO: 3760 - protein, 182 aa, Thermosynechococcus elongatus BP-1
METCCFGHPAMSIDLSRIPAQPKPGVVNVLVEIAGGSRNKYEFDKEMKVFALDRVLYSAVVYPYDYGFIPNTLADDGDPLDGLVMMDEPTFPGCVIPARPIGMLEMIDSGDRDEKILCVPVDDPRYAEVKSLKDIAPHRLEEIAEFFRTYKNLQKKVTEILGWQDVDAVQPLVEKCIKAYKG

SEQ ID NO: 3761 - protein, 142 aa, Zea mays; identical to SEQ ID NO: 812

SEQ ID NO: 3762 - protein, 782 aa, Trichodesmium erythraeum IMS101
MLDLGSNQLTSMPESITKLSNLTELYLDGNQLTRLPESITKLSNLTKLDLRNNQLTRLPESITKLSNLTKLNLSWNKLTSLPESIGKLSNLTSLYLRDNQLTILPESITTLSNLGWLYLNNNPLENPPIEIATKGIQEIRDYFQQEREKGIDYIYEAKLLIVGEGGAGKTTLANKILDQNYQLKDEDTTKGIEVHQYKFQTKNQNDFQINIWDFGGQEIYHATHQFFLTKRSLYTLVADTRKEDTDFYYWLNVVELLSGNSPLLIVKNEKQERKREINQRALQGQFTNIKEVLATNLKTNRGLEEIIREIEHHISKLPHVGSRLPKTWKQVREILELDSRNYISLEEYLSICEQNGFEKREYKLQLSGYLHDLGICLHFQDDPLLNKTVILKPEWGTAAVYKALDNQTVRNNFGEFTKDDLANIWNEEKYVNMRDELLQLMIRFKLCYKIYGNSQTYIAPQLLTENQPEYDWDESNNLILRYTYEFLPKGIITQFIVAMHKDIEEQKYVWKSGVILKKNETRAEVIEYYNIREIKIRVSGREKQYLMTIVTYEFDKIHSSYNNRLKYNQLIPCNCNVCQNNQNPTSYKFEILKNRINNGKETIECDYPPFYEVNIKSLIDDVINISEYDKLSQSNSHPNNVYNKYYSYTNYGGDWNIDAKDTNSQIMGNKTMNKNIDKSRKIENKDGNITGNVLGDESNIEGNITTHSPAPKTEKPDKFGWLDFLTWAQNGQMIFYLASATIGIFVLIIYPKLFPSGFPKLIEKVQEIFPAPQEEIESEQNQ

SEQ ID NO: 3763 - protein, 291 aa, Brassica napus
MANHKNLFFLCFLIGLGLCSARRALLSSYEPEDEVAGYGEKSSLHAGYGIGVDAGVGVGGGGGEGGGAGYGGAEGIGGGGGGGHGGGAGGGGGGGPGGGSGYGGGSGEGGGAGYGGGGAGGHGGGGGSGGGGGGGAGGAHGGGYGGGEGAGAGGGYGGGGAGGHGGGGGGGNGGGGGGGGAHGGGYGGGEGAGAGGGYGGGGAGGHGGGGGGGKGGGGGGGSGAGGAHGGGYGAGGGAGEGYGGGGGEGGHGGGGGGGGGAGGGGGGGGGYAAAGSGHGGGAGRGEGGGGY

SEQ ID NO: 3764 - protein, 433 aa, Brassica rapa
MKGVRNIYHHSYTFLLVFFVMILFRPAFSLSTLSSTESLTISSNRTLVSPGNIFELGFFRTNSRWYLGMWYKKLSGRTYVWVANRDNPLSNSIGTLKISNMNLVLLDHSNKSVWSTNLTRENVRSPVVAELLANGNFVVRDPSGFLWQSFDYPTDTLLPEMKLGYDLKTGLNRFLVSWRSSDDPSSGDFSYKLDIQRGLPEFYTFKDNTLVHRTGPWNGIRFSGIPEEQQLSYMVYNFTENSEEVAYTFLVTNNSIYSRLTINFSGFFERLTWTPSLVIWNPIWSSPASFQCDPYMICGPGSYCDVNTLPLCNCIQGFKPLNVQEWDMRDRSSGCIRRTRLSCRGDGFTRMKNMKLPETTMATVDRSIGVKECEKKCLSDCNCTAFANADIRDGGTGCVIWTGRLDDMRNYVADHGQDLYVRLAPADLVSSFS

SEQ ID NO: 3765 - protein, 261 aa, Zea mays
  unsure (1)..(261): unsure at all Xaa locations
MANAGGGAAGEGEWLKVAQLRALVQEDHRAKEVDNLTLRRFLRARGHNVDKAAAMLLKFLRWRAEAAPGGGTVREEQVRGELEQDKIYMGGVDRTGRPIIVGLLAKHYSANRDMAEFKSFVVYFFDKICARIPRGQEKFLAIMDLKGWGYANCDVRAYIAAIEIMQNYYPERLGKALMINVPYIFLKVWKTMIYPFIDANTRDKVMSMSCHAAXFVFVDDKSLRETLRREIDESQLPEFLGGKMPLVSLKDYAQQPQPVCE

SEQ ID NO: 3766 - protein, 900 aa, Oryza sativa
MRPSPALAGGGRTVANLLSATEWMLPSPATQVHTISVLPSHSPPSPPHHFAFSNLTTAPKRNGGKGEEEGRPRFEVVRDDLLHPLANGNKARKLDALLPLLRRRGATDVVRAHRCIPLHPALITSCFSNLMVSSLFWTSDCRDEMLYNHARKVAGTGGTVLWADDISKEDFVLDEDNGCEIGSRRVVIIKEGAGDVQALLGVIRLVEYLYNLSSFHKHENVHVVVDAGTGTTAVGLALGAVCLGLHWRVTAVMLADTLERYKEREKSLISDFKKLCHNNYHEMVGENDIGDSLVEWVERFSPRRFGKVLNGEIALCRQIAQQTGILLDPMYTLAGWEQAVDLCVGDSRTKVVMIHTGGTLGFCGLAQRRRERRRRQRRRRRPHESAAAGVARSSPPTHARTARWRAHGVTNRRNRSKFLDATRHDVYVTTPTARDRLGRARARHARTPDATQRKPPAPSRRRHRDGWAARCSSVLRRSSALPAARGRGSARRSGGLGSMAAAGAGASGPAAETAAATFRRVYGTLKAELLKDPSFDFNDDAIQWLESMLDYNVLGGKLNRGLAVVESYKILKGATEPSEEELFLACILGWGIEWLQAYFLVLDDIMDNSQTRRGKPCWFRLPKVGLIAINDGLVLRSQISRIFRRYFRGKSYYVDLLDLFNEVACALLLFDESLDNYAQVKHILVEMGVYFQSQDDYLDCFGEPEIIGKIGSDIEDFKCSWLFVQALERADEKQKGVLFRVFSEYERESYEKLISAIEAQPNEAVRAVLKSFLHKIYKRSNINTRSDRSARHGFDPAGRMRGTAVPRNHSAAPTSGTAEPSRGTGADQRSRMPVPVPRHGYAGPRSPPRSRVTGQRDRPYSALPTCGTEAMSRVCNGPTFPSCGRDSAADATEPNDADGL

SEQ ID NO: 3767 - protein, 93 aa, Pinus pinaster
ESLASSASSAMTAWGLTLLAMGLACKEIHVGGRNSKLITLESFLIILSGTQLFYILVIHGGYFGGNYGSYQDTYVATTTAEPREGSTPAGSSV

SEQ ID NO: 3768 - protein, 341 aa, Shigella sonnei
MSRYEEITQQLIFSPKTWLITGVAGFIGSNLLEKLLKLNQVVIGLDNFSTGHQYNLDEVKTLVSTEQWSRFCFIEGDIRDLTTCEQVMKGVDHVLHQAALGSVPRSIVDPITTNATNITGFLNILHAAKNAQVQSFTYAASSSTYGDHPALPKVEENIGNPLSPYAVTKYVNEIYAQVYARTYGVKTIGLRYFNVFGRRQDPNGAYAAVIPKWTAAMLKGDDVYINGDGETSRDFCYIDNVIQMNILSALAKDSAKDNIYNVAVGDRTTLNELSGYIYDELNLIHHIDKLSIKYREFRSGDVRHSQADVTKAIDLLKYRPNIKIREGLRLSMPWYVRFLKG

SEQ ID NO: 3769 - protein, 135 aa, Glycine max
  unsure (1)..(135): unsure at all Xaa locations
MTNNNDNIAVTDLTSALNEENRADLVNALKSKIQSLAGAHSDVLETLSPNVRKRVESLREIQGKHDEIEADFLKEKEALEAKYQKLYQPLYTKRYEIVNGVIEVEGAANETTDESEEDKEKGVPSFWLNAMXNND

SEQ ID NO: 3770 - protein, 154 aa, Cryptococcus neoformans var. grubii
MVKAVVVLKGESYVHGTVCFTQESENAPVCITGEIKDMDADAKRGMHVHEFGDNTNGCTSAGPHYNPFKKHHGAPTDSERHVGDLGNIQTNSCGAAQLDFSDKIISLYGPHSIIGRSLVVHASTDDLGKGGNEESLKTGNAGARLACGVIGIST

SEQ ID NO: 3771 - protein, 363 aa, Glycine max
MMSWASRSESEESASPNNLIPSLPDDVALNCLGRIPRSQHPTLSLVSKPIRTLLSSPILFTTRTLLQCTQPLLYLTLRSRHSSLLQFFTLHRTNPNNPLLAPLPPIPSPAVGSAYAVLGPTIYVLGGSIHDVPSPNVWLLDCRFNRWLRGPSMRVGREFAAAGVLHGKIYVLGGCVADTWSRSANWAEVLDPATGQWERVASPTEVREKWMHASAVVGERIYAMADRGGIAYEPRSGAWESVGGELDHGWRGRACVVEGILYCYDYLGKIKGFDVGRGVWEELKGLENALPRFLCGATMADLGGKLCVVWECQCNGKEMEIWCAEIGVKKNSDGELWGQLGWFGKVLSVPKGSSIVNCSSVSL

SEQ ID NO: 3772 - protein, 165 aa, Nicotiana sylvestris
MAEVEYSCFVGGLAWATTDRTLGEAFSTYGEVLESKIINDRETGRSRGFGFVTFGDEKSMRDAIEGMNGQDLDGRNITVNEAQSRGSGGGGGGGGFRGGRREGGGGYGGGGYGGGRREGGGGGYGGGGYGGGRDRGYGGGDRGYGGDGGSRYSRGGGDSDGNWRN

SEQ ID NO: 3773 - protein, 219 aa, Glycine max
  unsure (1)..(219): unsure at all Xaa locations
MKLATSLSSKFLRLSPKRIFRAKSKSSSVSRSEPSSFSSGASSDGSYSDLKPGPAATPVSVLPGEQDFYSELIQAFKLIDRDDDGVVSRKELAALLSGLSPEPPSQEEVTLMLQEVDGGGDGCISLEELASRVAGSSSDSDESSVEMREVFEFFDVDHDGRISAEELHRVFGVIGDERCTLEECVRMIATVDGNGDGFVCFDDFCRMMEAXAPAMSDHH

SEQ ID NO: 3774 - protein, 825 aa, Listeria monocytogenes
MKSKNNYFKQITTIMTVVSLLIMVLGIQGNNDVKAAPQVAPPASINQIFPDADLAEGIRAELQKSSVTDVVTKEELESISQLSVYAKKIASIEGLEYLTNLKFLNLNGNQITDLSPLSNLTKLTEIYIGDNKISDISPLQNLTNVTDLYLVDNDISDLRPLANLTQMYSLRLGGNSNISDLNPVRNMTRLNNLEVTGSILKDLTPLADVTSLTRLTLSDNQIEDLSPLAGLTKLGNIAAYSNKITDITPVTNLTRLQYLDLGSNEITDLSPVANLQKLTSLHLANNQITNISMLEDLTNLTSLGLQNNKISDISVLKNLTHVTYLQLGYNQIVDVKIIGGLTNLTSLQLTQNHITDISPLANLTKIQYSDFSNQMITNLERNFSKTLSVPNNITSIDGTLIAPETISNNGTYDAPNLKWSLPNYLPEVKYTFSQKIPIGTGTSNYSGFITQPLKELLDYKVTFNVEGNTSEVETVTEGNLIPEPTSPTKQGYTFDGWYDAETGGTKWDFTTGQMPANDLTLYAHFSVNSYQANFDIDGVVTNEAVVYDTLLNEPTTPTKQGYTFDGWYDAETGGNKWDFKTMKMPANDVAFYAHFTINNYQANFDIDGEVKNETIAYDTLLNEPTTPTKQGYTFDGWYDAETGGTKWDFKTKEMPANDVTLYAHFTINNYQANFDIDGAVTEEVVNYDALIPEPTSPSKTGFTFEGWYDAEVGGTKWDFKTMKMPANDITLYAHFSKETPIIPSPDEGLDSDSTNGPITINEPSATSTPSQNNNITVTAGENTTELATAKLPKTGDNAPWKTLFAGILLSSSAFYIWRKKASRIL

SEQ ID NO: 3775 - protein, 331 aa, Oryza sativa
  unsure (1)..(331): unsure at all Xaa locations
GAARALPLPXLLLLLLVVGGGFHVANAQASPAPPQTGTRAVNRAVSTVITVVIGVFFVLVFVCVIVNQCCDCDSSAGAGAGQGQSSAARRRRGLDPAAVAAIPVVPYAEVRKQSGGGGALECAVCLTVFDDGDDLRLLPQCSHAFHPDCIDPWLEGHVTCPLCRANLEKQPAPSPAAAAAAAEESRTPEAAAVRVEEVAEASDEEETRRREEEAVELESLRAVRRAARMPRSNSTGHSLPGDGGDHERFTVRLPPHVREEVLKSRRLRHATSLVLGIRGSSXRGQLEGRRRELARRXRRWPSFLARTVSWARGGVGADTSAKETPCRDAVX

SEQ ID NO: 3776 - protein, 363 aa, Vicia faba
MDRRFIFAIVLFAAVATSSTDDTNTDDFIIRQVVDNEEDHLLNAEHHFTSFKSKFSKSYSTKEEHDYRFGVFKSNLIKAKLHQKLDPTAEHGITKFSDLTASEFRRQFLGLKKRLRLPAHAQKAPILPTTNLPEDFDWREKGAVTPVKDQGSCGSCWAFSTTGALEGAHYLATGKLVSLSEQQLVDCDHVCDPEQAGSCDSGCNGGLMNNAFEYLLQSGGVVQEKDYAYTGRDGSCKFDKSKVVASVSNFSVVSLDEEQIAANLVKNGPLAVGINAAWMQTYMSGVSCPYVCAKSRLDHGVLLVGFGKGAYAPIRLKEKPYWIVKNSWGQNWGEQGYYKICRGRNVCGVDSMVSTVAAAQSNN

SEQ ID NO: 3777 - protein, 152 aa, Zea mays
MVKAVAVLGSSDGVKGTIFFTQEGDGRTAVTGSVSGLKPGLHGFHVHALGDTTNGCMSTGPHYNPASKEHGAPEDENRHAGDLGNVTAGADGVANINVTDSQIPLTGPNSIIGRAVVVHADPDDLGKGGHELSKSTGNAGGRVACGIIGLQG

SEQ ID NO: 3778 - protein, 380 aa, Lagenaria leucantha
MKKMALHSNKHRTQRLHNSLFFFDFLHCTEQQHLQTEHPIFLNNGGTNDFPLFQQTTTHFLVYEDEELNHLLSKEKDQNLQTGAVLKTLVQTDNALSLARTEAIDWLLKVNAFYGFSSLTALLAINYLDRILSGPYFQRDKPWMLQLAAVTCISLAAKVEEIRVPLLLDLQVEDSKYIFEAKTIQRMELLVLTALQWKMHPVAPVSFLGIITKGLGMKNQYIQREFLRRCERILLSLVSDSRSVGILPSIMAVSAMVSVVEEMGNCNPLEEFQDQLLNALKINKGRVKECCKVIMEAKIKGSGKRKHVEEEAEAEAESESSEAETEGEAEAEAGSPNGVMEANFSCESSNDSWEMGTIVSEYTHFSSSSSSSSKRIRPTR

SEQ ID NO: 3779 - protein, 456 aa, Zea mays
MRIEEVQSTSKKQRIATHTHIKGLGLDQANGMSMPLAAGFVGQAAAREAAGLAVDMIRQKKMAGRALLLAGPPATGKTALALGIAQELGSKVPFCPMVGSEVYSSEVKKTEVLMENFRRAIGLRIKENKEVYEGEVIELSPEEAESTTGGYAKSISHVIIGLKTVKGTKQLKLDPSIYDALIKEKVAVGDVIYIEANSGAVKRVGRCDSFATEYDLEAEEYVPIPKGEVHKKKEIVQDVTLHDLDAANAQPQGGQDILSLMGQMMKPRKTEITEKLRQEINKVVNRYIDEGIAELVPGVLFIDEVHMLDIECFSYLNRALESPLSPIVILATNRGICNVRGTDMTSPHGIPVDLLDRLVIIRTETYGPTEMIQILAIRAQVEEIDIDEESLAYLGEIGQQTSLRHAIQLLSPASVVAKTNGREKMCKADLEEVSGLYLDAKSSARLLQEQQERYIT

SEQ ID NO: 3780 - protein, 377 aa, Hypocrea jecorina
MSPSAVDDAPKATGAAISVKPNIGVFTNPKHDLWISEAEPSADAVKSGADLKPGEVTIAVRSTGICGSDVHFWHAGCIGPMIVEGDHILGHESAGEVIAVHPTVSSLQIGDRVAIEPNIICNACEPCLTGRYNGCEKVEFLSTPPVPGLLRRYVNHPAVWCHKIGNMSWENGALLEPLSVALAGMQRAKVQLGDPVLVCGAGPIGLVSMLCAAAAGACPLVITDISESRLAFAKEICPRVTTHRIEIGKSAEETAKSIVSSFGGVEPAVTLECTGVESSIAAAIWASKFGGKVFVIGVGKNEISIPFMRASVREVDIQLQYRYSNTWPRAIRLIESGVIDLSKFVTHRFPLEDAVKAFETSADPKSGAIKVMIQSLD

SEQ ID NO: 3781 - protein, 175 aa, Glycine max
  unsure (1)..(175): unsure at all Xaa locations
SLPAYPHEFDDVMNNSHTTLGTSCCIRTSKEVMIVSNAAFLLRNQIMQSLKKHLGREPYNEHLMDMLKQAQLLTAEEQMIDLMTSLXDRXDLSTYTLTLCQHIVQNKTAYSSFHRSVACALHMAGDDNDNHVTVTNIRAEIGTYLRVQDDYMDTGGDPQQLKRCAHILNMSCALV

SEQ ID NO: 3782 - protein, 871 aa, Neurospora crassa
MATTRDEKAVNITPAGSDQASASPAKYDEKIDGIHEVGLDRMDSEEAQVLEGHLDVTEEDLLQAKAAAESLSLEEVVKLMKNVVSMHGRDPNFPHVVLEKIQEFLANEQNILSNPEKYDDIITEMKIEAALIQSNSPYAEVRAVVDNTDDPSTPCSTIRSWTIGILFSVILAFVNQLFSVRQPSISIESNVAQLLAFPLGKAWEMWMPYYEFTLFGTKHNLNPGRFSKKEHMLIAIMANTAKSLPYTQYIVWTQVLPQYFNQPYANSFAYQILIALSTNFIGYGLAGITRRFIVYPSYCVWPASLVTIALNSALHHEENHIVPGPFKKLYRMSRFKFFMWAFGAMFVYFWFPNYLFEALTFFSWMQWIAPNMFNPFPTFDWNVLLFDSVDPLMVPAFTTFNKTFGMAFFGFIILGIWYTNVWNTGHLPINSNRVFDHYGSLYNVSRAIDEKGMFDEAKYMDYSAAYLSAANAIVYFAFFAIYAATISHIILFHRAEIAIGFRNIWKTVKPKRWTKRNAAGESVEEEDVGYKDVHNRLMAVYPEVSELWYLGCLVIAMALGFAGVAAWPTYTTAGVVPYGLFLAIIFVIPIGIIKAMTGIEVTLNVLAEFIGGAWVEGNALAMNFFKSFGYVTCAHAISFANDLKLAHYIKIPPRHTFTAQMVATLISTFICTGVLNFQVNIENICQTNAPMRFFCPGINTFFTAAVLWGTIGPVKVFGIHGQYKWLLLGFPIGLCIPVIFWLIIRKFPRNKFIRQFHPVALFYGALNWAPYSMSYCWPAVPIAWLSWIYVRNRYLAFWSKYNFVLSAAFSAGIALSGIVMLFSVQWARVSVEWWGNTQPYKGCEDTACTIKTLSEGERFFPWWDANKVPAP

SEQ ID NO: 3783 - protein, 399 aa, Mycobacterium tuberculosis CDC1551
MVVLGSTGSIGTQALQVIADNPDRFEVVGLAAGGAHLDTLLRQRAQTGVTNIAVADEHAAQRVGDIPYHGSDAATRLVEQTEADVVLNALVGALGLRPTLAALKTGARLALANKESLVAGGSLVLRAARPGQIVPVDSEHSALAQCLRGGTPDEVAKLVLTASGGPFRGWSAADLEHVTPEQAGAHPTWSMGPMNTLNSASLVNKGLEVIETHLLFGIPYDRIDVVVHPQSIIHSMVTFIDGSTIAQASPPDMKLPISLALGWPRRVSGAAAACDFHTASSWEFEPLDTDVFPAVELARQAGVAGGCMTAVYNAANEEAAAAFLAGRIGFPAIVGIIADVLHAADQWAVEPATVDDVLDAQRWARERAQRAVSGMASVAIASTAKPGAAGRHASTLERS

SEQ ID NO: 3784 - protein, 752 aa, Geobacillus stearothermophilus
MENQNRQNAAQCPFHGSVTNQSSNRTTNKDWWPNQLNLSILHQHDRKTNPHDEEFNYAEEFQKLDYWALKEDLRKLMTESQDWWPADYGHYGPLFIRMAWHSAGTYRIGDGRGGASTGTQRFAPLNSWPDNANLDKARRLLWPIKKKYGNKISWADLFILAGNVAIESMGGKTIGFGGGRVDVWHPEEDVYWGSEKEWLASERYSGDRELENPLAAVQMGLIYVNPEGPDGKPDPKAAARDIRETFRRMGMNDEETVALIAGGHTFGKAHGAGPATHVGPEPEAAPIEAQGLGWISSYGKGKGSDTITSGIEGAWTPTPTQWDTSYFDMLFGYDWWLTKSPAGAWQWMAVDPDEKDLAPDAEDPSKKVPTMMMTTDLALRFDPEYEKIARRFHQNPEEFAEAFARAWFKLTHRDMGPKTRYLGPEVPKEDFIWQDPIPEVDYELTEAEIEEIKAKILNSGLTVSELVKTAWASASTFRNSDKRGGANGARIRLAPQKDWEVNEPERLAKVLSVYEDIQRELPKKVSIADLIVLGGSAAVEKAARDAGFDVKVPFFPGRGDATQEQTDVESFAVLEPFADGFRNYQKQEYSVPPEELLVDKAQLLGLTAPEMTVLVGGLRVLGANYRDLPHGVFTDRIGVLTNDFFVNLLDMNYEWVPTDSGIYEIRDRKTGEVRWTATRVDLIFGSNSILRSYAEFYAQDDNQEKFVRDFINAWVKVMNADRFDLVKKARESVTALQTNRINRSNNGTVLSK

SEQ ID NO: 3785 - protein, 539 aa, Schizosaccharomyces pombe
MTSNRSTRSSTKREEVSKNGVEKRELDESDVMKNGKKPVKRAKVSSLPKPVRVPGSAKRINKIPELPTERLNVYVFGSGSMNELGMGEEEMDVVYRPRLNPILSTDKVGVVDLAVGGMHSAALLHDGRVYTWGVNDDYALGRLTKDQKDENGDKVDNDLLEGTPSKVEGALSHLRVTKVICSDNLTAAITDNGCCFTWGTFRCSDGVLGYSDSQKRTAEPTQMRLPEICQLATGTDHIIALTTTGKVYTWGNGQQFQLGRRMLERRRLQGLTPQPLALKNIISVGAGSYHSFAIDNKGRVYAWGLNITRQCGIEVEDEEEGAVITKPTLVDALEGYNVKSITGGEHHTLALLEDGRVLAWGRDDRHQLGIPDNALPETVVKDEKGNNYYLSTPTIIPGLTNVIQVVCGTHHNLAVTSDGKVYSWGSAENYEVGQGDNDEDVAVPTLVRSKAIKEVAIRVAGAGGQFSIIAGIPNASEEPVANGIKSEPENEKKLKTEETSKTDDSPVTDAKPDVTSNGEPSTATSDSKDSVLEPSSTTA

SEQ ID NO: 3786 - protein, 373 aa, Zea mays
  unsure (1)..(373): unsure at all Xaa locations
MAKDGGPDWNGLFKWSIAHGDGTNPPRALSEEDRKWFMEAMQANTIDVVKRMKEITRVMRTPQDVLQSQGVTPENIEDMLDELHEHVESIDMANDLHSIGGLDPLLGYLKNSNAGIRAKAAEVVSTVAQNNPKSQQLVMESNGLEPLLRNFKSDPSTNARTKALGAISSIIRHNQPGVSAFRLGNGYAGLKDAPGSDDAKLQRKALNLIQYLLHNNKADRSFATELGLPKLMMHLAASDDPLVREAALSGLLELSQDQTSGNALPDQDKLKXILNLKSRIEGVSAMDSDDLHAAREERQLVDSLWKECYSEPPLREKSLVVLPGEDAPQQPPPDDTVKMFEPPLXPWAAVRPAEEGDSDSGCGKKDPPLLLKF

SEQ ID NO: 3787 - protein, 264 aa, Zea mays
MSSSSRRSRTAGSPCSPSSVTSSRGSPELDREKNFEHIDIFRIEYLEAGRAGNPQYIPTLRLLSGAARVPSSIRSAECTPPFPTPIESMAAEGEKKMITLKSSDGEEFEVEEAVAMESQTIRHMIEDDCADNGIPLPNVNSKILSKVIEYCNKHVHAAAAAAAASKAGSDDVGAASANSTAASGEDLKNWDADFVKVDQATLFDLILAANYLNIKGLLDLTCQTVADMIKGKTPEEIRKTFNIKNDFTPEEEEEIRRENQWAFE

SEQ ID NO: 3788 - protein, 425 aa, Brassica napus
MSKTTNQNRRPSFTSSTESSMRKRHGPSSSSSAVKPISNTAVMVAKKRAPLGNITNQRKDSRIFPNSSSADSAHCPNKSAKLKLAAPTQPVCVNACETKSTCEEEVVPIERKAFSNLCITPSSDTTTNVMSETENKEEKFMNIDNKDDADPQLYATFACDIYNHLRAAEAKKQPAVDYMETVQKDVNSTMRGILVDWLVEVSEEYRLVPETLYLTVNYIDRYLSGNVISRQKLQLLGVACMMIAAKYEEVCAPQVEEFCYITDNTYLKDEVLDMESAVLNYLKFEMSAPTVKCFLRRLFSGCPRVHEAPCMQLECMASYIAELSLLEYTMLSHPPSLVAASAIFLAKYTLDPTRRPWNSTLRHYTQYEAMELRGCVMDLQRLCSNAHVSTLPAVRDKYSQHKYKFVAKKFCPSIIPPDFFKNSLY

SEQ ID NO: 3789 - protein, 500 aa, Vicia villosa
FLHLRPTPTAKSKALRHLPNPPSPKPRLPFIGHLHLLKDKLLHYALIDLSKKHGPLFSLYFGSMPTVVASTPELFKLFLQTHEATSFNTRFQTSAIRRLTYDSLVAMVPFGPYWKFVRKLIMNDLLNATTVNKLRPLRTQQIRKFLRVMAQGAEAQKPLDLTEELLKWTNSTISMMMLGEAEEIRDIAREVLKIYGEYSLTDFIWPLKHLKVGKYEKRIDDILNKFDPVVERVIKKRREIVRRRKNGEVVEGEVSGVFLDTLLEFAEDETTEIKITKDHIKGLVVDFFSAGIDSTAVATEWALAELINNPKVLEKAREEVYSVVGKDRLVDEVDTQNLPYIRAIVKETFRMHPPLPVVKRKCTEECEINGYVIPEGALILFNVWQVGRDPKYWDRPSEFRPERFLETGAEGEARPLDLRGQHFQLLPFGSGRGMCPGVNLATSGMATLLASLIQCFDLQVLGPQGQILKGGDAKVSMEERAGLTVPRAHSLVCVPLARIG

SEQ ID NO: 3790 - protein, 158 aa, Zea mays
MAAADVEYRCFVGGLAWATSNESLENAFASYGEILDSKVITDRETGRSRGFGFVTFSSENSMLDAIENMNGKELDGRNITVNQAQSRGGGGGGGGYGGGRGGGGYGGGRRDGGYGGGGGYGGRREGGGGGYGGGGGYGGRREGGGGGYGGGGGGGWRD

SEQ ID NO: 3791 - protein, 164 aa, Triticum aestivum
  unsure (1)..(164): unsure at all Xaa locations
MADVEYRCFVGGLAWATDDQSLQNAFSKYGDVIDSKIITDRETGXRSRGFGFVTFASDEAMRQAIEAMNGQDLDGRNITVNEAQSRRSGGGGGGGFGGGGGGYGGQRREGGGGGGYGGGGGGYGGGRSGGGGGYGSRDGGGYGGGGGGGYGGSRGGSGGGNWRE

SEQ ID NO: 3792 - protein, 463 aa, Bacillus cereus ATCC 14579
MQHTNKSGTLNRGLKERHITLMSLGSAIGVGLFLGSASAIKLAGPSILLGYMIAGLVIFFIMRALGEMAIEQPVAGSFSKYAYDYIGPLAGYITGWNYWFLWVVTCMAEITAAGIYMQYWFPDIPRWTWALLALLLMSAFNFLSVKVFGELEFWFALIKIVTIICMIVVGAGIILFGFGNGGIATGISNLWSHGGWFPNGFSGLLLSMQMVLFAYLGVELIGVTAGEAQNPKKTLAKAIDNVFWRILLFYVGALFVMMAIYPWNELGEKGSPFVLTFQQIGIAKAAGIINFVVLTAALSSCNGGLFSTGRMLYTLAQQKKAPERFGRLNKNGIPSQGIVATAIVLLIGVILNYLVPAKVFTWLTSISTFGAIWTWGIILVAQIKFRKSLPTQNKQKLSYKMPLYPLSSYFSLVFLVLVLGIMAYSEDTRIALIVGPIWLIGLAIVYYMKGFHKIDETPNSKIS

SEQ ID NO: 3793 - protein, 114 aa, Sulfolobus solfataricus
MIVVKFCPKCNSMMVPKKSNGKNVYRCTKCGYEKEVPETTIVVTSKVKHSIKEKTLVLEEEEMPSGAQKIKGVLCPSCKNDEAYFWILQTRRADEPPTRFYKCTKCGKVWREYE

SEQ ID NO: 3794 - protein, 268 aa, Symplocarpus foetidus
MGDHGPRTEISFAGSSRAAFAACFAELCTIPLDTAKVRLQLQKKAVTGDVVALPKYRGMLGTVATIAREEGLSALWKGIVPGLHRQCLFGGLRIGLYEPVKSFYVGDNFVGDIPLSKKILAGLTTGALAIIVANPTDLVKVRLQSEGKLPPGVPRRYSGALNAYSTIVKKEGLGALWTGLGPNIARNAIINAAELASYDQVKQMKSRMMGDSAYKSTFDCFIKTLKNDGPLAFYKGFIPNFGRLGSWNVIMFLTLEQVKKFFIKEVPN

SEQ ID NO: 3795 - protein, 344 aa, Daucus carota
MANYNFKYIFIFLLLISISAPAVLSVVEDCGWEEDNSCVNKMKARPLKIIADVSQLINSMIGVCYYLVTRSIPALSPEWNLFVICIVKKFALGIILATGFMHVLPDSFDMLSSSCLKEHPWHKYPFTPMLSRIVTMAFDSIAESLASKRHNGGVVNPEGDTEMAVAGNHDHSHHHHGSLSTKEGLDGKTLLFYRVGTMVLLGIIVHSIVIGLSLGASSNTCTNKGLVSALCFTQMFEGMGLGGCILQAEYKFMKKAIMACFFAVFWIALGILSTTYEENSPRALVTVGLLNASSLGLLIYMACVDLLAADFMGNKLQGSWKSQIKSYMAVLLGAMGMSVMAIWA

SEQ ID NO: 3796 - protein, 254 aa, Pseudomonas aeruginosa UCBPP-PA14
MEISMSVSSASLAGKVAFVQGGSRGIGAAIVRRLAAEGASVAFTYVSSADKSRALAAELEGAGASILALHADSADAAALVAAVDEAAARFGRIDILVNNAAVLALGSVEELPLADFERTLAINVRSVFVATQAAVKHMGDGGRVISIGSTNAERMPFAGGATYAMSKSALVGLTKGLARDLGPRGITVNNVQPGPVDTDMNPDDGDFAETLKGLMALPRYARSEEIASFVAYLAGPEAAYITGASLTIDGGFSA

SEQ ID NO: 3797 - protein, 336 aa, Haloferax volcanii
MTTLEDIDLDFVPFGQTGLQTSELQFGTWRFGKETEQGNVEIDEERAHELLDAYEAAGGRFIDTADIYGGGASERWIGDWLEDRDRERFTIASKIYWQIRDGDPNSRGTNRKNVRHRIDALLDRLDTDYVDVLYIHRWDDETPTREMMKTLNGLVEDGKVHYLGASTLRPNAWKVARANEIARAEGWEPFTVAQPRYNLVDREIEGDYLEMTRSYGIAVCPWSPLGQGFLTGKYTREDGLTGESRAAESSRFEESYLTEENFDVHDELDAVAGEVDATPAQTALAWLMHRDGVTAPIVGARTVEQLTENLEAATIDLTDEQVDRLTGAKPDPYVGL

SEQ ID NO: 3798 - protein, 456 aa, Escherichia coli
MMEGQQHGEQLKRGLKNRHIQLIALGGSIGTGLFLGSASVIQSAGPGIILGYAIAGFIAFLIMRQLGEMVVEEPVAGSFSHFAYKYWGSFAGFASGWNYWVLYVLVAMAELTAVGKYIQFWYPEIPTWVSAAVFFVVINAINLTNVKVFGEMEFWFAIIKVIAVVAMIIFGGWLLFSGNGGPQATVSNLWDQGGFLPHAFTGLVMMMAIIMFSFGGLELVGITAAEADNPEQSIPKATNQVIYRILIFYIGSLAVLLSLMPWTRVTADTSPFVLIFHELGDTFVANALNIVVLTAALSVYNSCVYCNSRMLFGLAQQGNAPKALASVDKRGVPVNTILVSALVTALCVLINYLAPESAFGLLMALVVSALVINWAMISLAHMKFRRAKQEQGVVTRFLLLYPLGNWICLLFMAAVLVIMLMTRGMGIWVYLIPVWLIVLGIGYLFKEKTAKAVKAH

SEQ ID NO: 3799 - protein, 336 aa, Pseudomonas putida KT2440
MIYRPLGHSGLQVSALTLGSMMFGEQTSTEDALRIIDKAWDQGINFIDTADVYNAGRSEEIVGEAVARHRHDWIVASKVGFGPADGLPNRSGLSRKHIFNAVDATLTRMGMDYLDIYYLHREDHKVPLEETVQAIGDLLRQGKIRYWGVSNFRGWRIAEVCHVAERLGVPRPIVSQPLYNIVNRQAEPEQLTAAAAHGLGVVPFSPLARGVLSGKYAPGAVPEAGSRAGRQDKRIMEVEWRQESLTIARQIQTYAEAKGVGIVEFAIAWVLNNQWVSSAIVGPRTEEQWDTYGGALAAKITAEDEAFIDSLVTPGHASTSGFNDVAHYVSGRLARS

SEQ ID NO: 3800 - protein, 417 aa, Sulfolobus solfataricus
MSEKKLLTFWQALFIGLGNIIGAGIFVMAGSTISVAGPGAIIAFIFTAIFAMSIGLNSAELSSIFTDVEGGVYSFTLKTLGEMSGFLVGWFRVISYVIGGAATALGFSGYLLLFGLPKTLYYTLAVILIVILLVLDYFGIGTVAEVDTIFVIINISSLILFSLTIPIIVGIKVHNFVPLFPHGIQGVLTTSNLAFFSYSGFNTIVTLTPSTKNGEKVIPRAIVMSLIITSIIYISVIFSMVDAMPWYYYGQTSAPLSLALSQIHAPTWLFLITSISAILATISVTLSIIVASERTLRQLSRDFQLPVKHELLVVGGIMLASLLLGNVEAIALASNFGIIFSYMLTGLEVIIVRRKGLRGSFRSPAFPVIQVFAIILSALFMISLGLNSLEIGVVTLFIGILVYETLREVKAHENRKK

SEQ ID NO: 3801 - protein, 369 aa, Xanthomonas campestris pv. campestris str. ATCC 33913
MKSRAAVAFGPGKPLEIVEIDVAPPQAGEVLVRITHTGVCHTDAFTLSGDDPEGIFPSVLGHEGGGIVEQIGEGVTGVKVGDHVIPLYTAECRKCKFCLSGKTNLCQAVRATQGKGLMPDGTTRFSYNGEPIFHYMGCSTFSEYTVVPEISLAVVNPEAPLEKVCLLGCGVTTGIGAVHNTAKVKPGESVAVFGLGGIGLAVIQGAVQAKAGRILAIDTNPGKFDLARSMGATDCINPKDYDKPIQEVIVELTDGGVDFSFECIGNVNVMRSALECCHKGWGESVIIGVAGAGQEISTRPFQLVTGRVWRGSAFGGVKGRTQLPGMVEQSMKGEIDLDPFITHTMPLEQINEAFDLMHEGKSIRTVIHF

SEQ ID NO: 3802 - protein, 175 aa, Glycine max
MSEPPKTRAVICVGDIHGFITKLQSLWKNLEGSLDRSEFETATLIFLGDYCDRGPATRQVIDFLISLPSRYPRQKHVFLCGNHDLAFAAFLRLLPAPADGCGFSEGWREYEASEEREGWFKGEGYEDMHLQGRRWSGKIKVKFNTVKGTEYQGSIYDAGPTFESYGVPHGSAGKW

SEQ ID NO: 3803 - protein, 206 aa, Sinorhizobium meliloti
MPPMLVLPKGVRHIPGFLDRSRQEELVEAVRAVVAEAPLFAPAMPKTGKPMSVRMTNCGALGWVTDRERGYRYQATHPVTGKPWPPIPGMLQDIWNAVAGSDKSPEACLVNFYSAEARMGLHQDRDERDLETAVVSISLGDDCLFRVGGRTRGGQTVSFRLESGDVVVLGGEGRLAFHGVDRIYPNTSTLLRSGGRLNLTLRRVNP

SEQ ID NO: 3804 - protein, 446 aa, Oryza sativa
MSNYHEDHIEEMEDDYDMDDTADDMGEENYERGMRDSDSEDEEHGQSNDKIPDTSSVDARKGKDIQGIPWEKLAITRDKYRQTRLDQYKNYENMPNSGEAAAKECKPTEKGGMYYEFRRNTRSVKSTILHFQLRNLVWATSKHDVYLMSHFSVLHWSALSGLDTELMNVQGHVAPREKHPGSLLEGFSGTQVSTLSVKDNLLVAGGFQGELICKHLDREGISFCCRTTYDENAITNAVEIFNTTSGAVHFMASDNDSGVRDCDMERFQLYKHFQFEWPVNHTALSPDRKLAVIVGDDPNGLLIDANSGKTLHSLKGHFDYSFASAWSPDGRTFATGNQDKTCRIWDARNLSKSLHVLRGNLGAIRSIRFTSDGQFMSMAEPADFVHVFDVGSDYTRRQELDFFGEISGMSFSPDTDMLFVGVWDRTYGSLLQFGRLYNHSYLDSLC

SEQ ID NO: 3805 - protein, 173 aa, Oryza sativa
MSRVLEPLIVGKVIGEVLDNFNPTVKMTATYGANKQVFNGHEFFPSAVAGKPRVEVQGGDLRSFFTLVMTDPDVPGPSDPYLREHLHWIVTDIPGTTDASFGREVVSYESPRPNIGIHRFILVLFRQKRRQAVSPPPSRDRFSTRQFAEDNDLGLPVAAVYFNAQRETAARRR

SEQ ID NO: 3806 - protein, 1171 aa, Oryza sativa (japonica cultivar-group)
MASGSRATPTRSPSSARPAAPRHQHHHSQSSGGSTSRAGGGGGGGGGGGGGAAAAESVSKAVAQYTLDARLHAVFEQSGASGRSFDYTQSLRASPTPSSEQQIAAYLSRIQRGGHIQPFGCTLAVADDSSFRLLAYSENTADLLDLSPHHSVPSLDSSAVPPPVSLGADARLLFAPSSAVLLERAFAAREISLLNPLWIHSRVSSKPFYAILHRIDVGVVIDLEPARTEDPALSIAGAVQSQKLAVRAISRLQALPGGDVKLLCDTVVEYVRELTGYDRVMVYRFHEDEHGEVVAESRRNNLEPYIGLHYPATDIPQASRFLFRQNRVRMIADCHAAPVRVIQDPALTQPLCLVGSTLRSPHGCHAQYMANMGSIASLVMAVIISSGGDDDHNISRGSIPSAMKLWGLVVCHHTSPRCIPFPLRYACEFLMQAFGLQLNMELQLAHQLSEKHILRTQTLLCDMLLRDSPTGIVTQSPSIMDLVKCDGAALYYHGKYYPLGVTPTEVQIKDIIEWLTMCHGDSTGLSTDSLADAGYPGAAALGDAVSGMAVAYITPSDYLFWFRSHTAKEIKWGGAKHHPEDKDDGQRMHPRSSFKAFLEVVKSRSLPWENAEMDAIHSLQLILRDSFRDSAEGTSNSKAIVNGQVQLGELELRGIDELSSVAREMVRLIETATVPIFAVDTDGCINGWNAKVAELTGLSVEEAMGKSLVNDLIFKESEETVNKLLSRALRGDEDKNVEIKLKTFGPEQSKGPIFVIVNACSSRDYTKNIVGVCFVGQDVTGQKVVMDKFINIQGDYKAIVHNPNPLIPPIFASDENTCCSEWNTAMEKLTGWSRGEVVGKLLVGEVFGNCCRLKGPDALTKFMIVLHNAIGGQDCEKFPFSFFDKNGKYVQALLTANTRSRMDGEAIGAFCFLQIASPELQQAFEIQRHHEKKCYARMKELAYIYQEIKNPLNGIRFTNSLLEMTDLKDDQRQFLETSTACEKQMSKIVKDASLQSIEDGSLVLEKGEFSLGSVMNAVVSQVMIQLRERDLQLIRDIPDEIKEASAYGDQYRIQQVLCDFLLSMVRFAPAENGWVEIQVRPNIKQNSDGTDTMLFLFRFACPGEGLPPEIVQDMFSNSRWTTQEGIGLSICRKILKLMGGEVQYIRESERSFFHIVLELPQPQQAASRGTS

SEQ ID NO: 3807 - protein, 527 aa, Oryza sativa (japonica cultivar-group)
MATLLSKLLALPQQWQLLLLLLLLPIASLLLVIGRNTGGRRRRRHLRLPPGPARLPVLGNLLQLGALPHRSLRDLARRHGPVMMLRLGAVPAVVVSSPEAAQEVLRTHDADCCSRPSSPGPMRLSYGYKDVAFAPYDAYGRAARRLFVAELFSAPRVQAAWRARQDQVEKLIGKLTRPEPEPVELNDHIFALTDGIIGAVAFGSIYGTERFAGGGRKRFHHLLDDVMDMLASFSAEDFFPNAAAARLFDHLTGLVAHRERVFQQLDAFFEMVIEQHLDSDSSNAGGGGGNLVGALIGLWKQGKQYGDRRFTRENVKAIIFDAFIGGIGTSSVTILWAMAELMRSPRVMRKVQAEIRATVGDRDGGGMVQPDDLPRLAYLKMVVKETLRLHPPATLLMPRETMRDVRIGGYEVAARTRVMVNAWAIGRDAARWEEAEVFDPDRFEAKRVEFNGGHFELLPFGSGRRICPGIAMGAANVEFTLANLLHCFDWALPVGMAPEELSMEESGGLVLHRKAPLVLVPTRYIQL

SEQ ID NO: 3808 - protein, 468 aa, Pseudomonas aeruginosa PAO1
MNDPQGFEAISRREQGLQRRLSAAQMSMIAIGGAIGTGLFMGSAFAIGFAGPSVLLSYAIGALITLLLMGCLAEMTVAHATPGSFGAFAEHYVGPLAGFLVRYAYWAAIVLAVGTEVTAVAMYMKYWFAGIPEWVWIISFSTLLIGLNASSVKAFGNFEYCFSTLKIAAIVAFILLGAYLVFGSANPAYGVHNYSAHGGFFPHGLKGMWIAVVVSIFSYLSVEMIAVAAAEAEHPEQAVRSAFRSTIVRLVVFYLLTLALMLAIVPWDQAGQSQSPFVTVMQAIGLPGATGVMNFVVLVAALSAMNSQLYITTRMMFSLSRAGHAPKGLGELSRQGVPLNALLLSSVGIALATLLNLVYPEQSFTLMMAVSMFGALFTWLMIFFTHLCFRRHRARHGGAPLAFRMRLAPWSTLLGLALMAAILVTTFFTEAFRMTLVFGVPFLALLSALYLVFVRKPGRDCPIERATP

SEQ ID NO: 3809 - protein, 311 aa, Zea mays
  unsure (1)..(311): unsure at all Xaa locations
LEAGRGIDTNGGPTGRFXPGLTTVDVIAKLLGFDDLVPPFSEASGQQLLRGANFASAAAGIREETGQQLGARISFSGQVQNYQAAVQEVVSILGDDEAAAAAHLGRCVFTVGMGSNDYLNNYFMPALYSTGSRYTPERYADALAEQYAGALRAMYRYGARKVALVGVGQVGCSPNELAQRSSDGVACVEQINGAVRMFNRRLVGLVDSFNRILPGAHFTYVNVYGIFEDIIKAPGAHGLTVTNAGCCGVGRNNGQVTCLPFQTPCANRNEYLFWDAFHPTEAANILVGRRAYSAALPSDVHPMDLRTLARI

SEQ ID NO: 3810 - protein, 97 aa, Zea mays
QDFVQHFSQIDRVLTEDEMGHPEIGDAIARHKEVLEYNAIGGKYNRGLTVVVAFRELVEPRKQDADSLQRAWTVGWCVELLQAFFLVADDIMDSSLT

SEQ ID NO: 3811 - protein, 184 aa, Rosa hybrid cultivar
MLKMMEVCQARGFVYGIIPEKGKPVSGASDNIRAWWKEKVKFDKNGPAAIDKYEAEILAMTDADNNRNGNSHTILQDLQDATLGSLLSALMQHCDPPQRKYPLEKAVPPPWWPTGNEDWWMKSGLPCGQSPPYKKPHDLKKMWKVGVLTAVIKHMSPDIAKIRRHVRQSKCLQDKMTAKITSEF

SEQ ID NO: 3812 - protein, 316 aa, Corynebacterium efficiens YS-314
MKQRMVGTSGLRVTRMGLGTSTWGLGTELPEAGAMLTDFLTAGGTLIDVSPTYATGAAEQMLGELLRTHTPRPDLVISSSAGVNPHLPIGRRVDCSRRSLIAQLDATLASLGTEYLDLWSVGYWDDRTPPHEVADTLDYAVRTGRVRYAGVRGYSGWQLAVTHAASHHAAAAARPIVVAQSEYSLLVRRPEEELLPATQHLGVGFFAGAPLGQGVLTAKYRSQIPPDSRAASSGRDAEMQGYLDSRAHTIVDALDTAARGLGLSPAVTATTWVRDRPGVTSVIVGARTPEQLQQLLRVEEVVLPAPIIKALEDVSL

SEQ ID NO: 3813 - protein, 339 aa, Salmonella typhimurium LT2
MKSIVIEKPNTLTIETRALPQPAPGEVRIKVKLAGICGSDSHIYRGHNPFAKYPRVIGHEFFGVIDAVGDNVNHDRIGERVSVDPVISCGHCYPCSVGKPNVCTSLVVLGVHRDGGFSEYAVAPARNAHRIPDNIADHHAVMVEPFTIAANVTGQVNPTEQDVALIYGAGPMGLTTVQALKGVYQVKTVIVVDRIEERLAMAKQSGADWTLNNGQHSLAEFLQQKALKPTLIVDAACHPAILQEAITLASPAARIVLMGFSSDPCEIVQQGITGKELAIYSSRLNANKFPVVIDWLNKGLIDPDKLITHTFDYQHVTDAIELFEKDQRQCCKVLLTFAK

SEQ ID NO: 3814 - protein, 497 aa, Pseudomonas fluorescens PfO-1
MSGQNSQSGELKRGLKNRHIQLIALGGAIGTGLFLGSAGVLKSAGPSMILGYAICGFIAFMIMRQLGEMIVEEPVAGSFSHFAHKYWGGFAGFLSGWNCWILYILVGMSELTAVGKYIHYWAPEIPSWVTAAAFFVLINAINLANVKVFGEAEFWFAIIKVVAIVGMIALGSYLLVSGHGGPQASVSNLWSHGGFFPNGVSGLVMAMAIIMFSFGGLEMLGFTAAEADKPKTVIPKAINQVIYRILIFYIGALVILLSLTPWDSLLETLNASGDSYSGSPFVQVFSMLGSNTAAHILNFVVLTAALSVYNSGTYCNSRMLLGMAEQGRCAESAGEDRQARRAGAFDPGLGGRDSGGGAAQLPDPATRAGTADVAGGCNAGDQLGDDQLLALQVPPAHEQDPPEAAVQGAVVPVRQLHLPGVRPVHPRRDAADPGHSDLGVRDSGVGGVHVDLLRDQEQTWRAAGTARSERSQVSVVAKTTNPAKCRVFCTFAVSCGF

SEQ ID NO: 3815 - protein, 148 aa, Zea mays
  unsure (1)..(148): unsure at all Xaa locations
WRGARPATPPPHVHRIESLSAPAAKRRSLKLGRGVASSVLKCGKGTDWLDPNELSEISMANSRQNIRKLVXKDGFIITKPYKVHSKPRARRXHQAKPTGMHSGYRTRRRTRGARLPTKILXMTRPRVLRLLLRTYREGNKIDKHMYHD

SEQ ID NO: 3816 - protein, 406 aa, Escherichia coli K12
MAIEQTAITRATFDEVILPIYAPAEFIPVKGQGSRIWDQQGKEYVDFAGGIAVTALGHCHPALVNALKTQGETLWHISNVFTNEPALRLGRKLIEATFAERVVFMNSGTEANETAFKLARHYACVRHSPFKTKIIAFHNAFHGRSLFTVSVGGQPKYSDGFGPKPADIIHVPFNDLHAVKAVMDDHTCAVVVEPIQGEGGVTAATPEFLQGLRELCDQHQALLVFDEVQCGMGRTGDLFAYMHYGVTPDILTSAKALGGGFPISAMLTTAEIASAFHPGSHGSTYGGNPLACAVAGAAFDIINTPEVLEGIQAKRQRFVDHLQKIDQQYDVFSDIRGMGLLIGAELKPQYKGRARDFLYAGAEAGVMVLNAGPDVMRFAPSLVVEDADIDEGMQRFAHAVAKVVGA

SEQ ID NO: 3817 - protein, 296 aa, Rhizobium sp. USDA 1115
  unsure (1)..(296): unsure at all Xaa locations
RGKTQIKEFDAFPTLEQLPLWGFDGSSTQQAEGRSSDCVLKPVAVYPDPVRTNGALVMCEVMMPDGKTPHPSNTRATVLDDESAWFGFEQEYFFYKNGRPLGFPEQGYPAPQGPYYTGVGYKNVGDIARQIVEEHLDICLAAGINHEGINAEVAKGQWEFQXFGKGSKKAADEVWLARYLLLRLTEKIRIDVEFHCKPLGDTDWNGSGMHANFSTAYLREVGGKDYFEALMAAFEKNLHDHINVYGPDNHLRLTGKHETAPWDKFSYGVADRGASIRVPHSFVNNGYRGYLEDRRP

SEQ ID NO: 3818 - protein, 311 aa, Triticum aestivum
  unsure (1)..(311): unsure at all Xaa locations
RDIEHRTYHGGIGSGGEQPAGLWERRASTGEGTTGWDEEVEFRLPRGHRPVENLDTEGLEQASVDTRLAASNVGFRLLRKMGWKSGKGLGKNEQGILEPIKAGIRDAKLGSGEGRSRMTSYLFTAEDNVKRKRLNVELEETQDHIKMRVTXSREQKISSEVKEIQKTFFCNLCNKHYKLAYEFESHLSSYDHNHRKRFKEMKDIQSGGSGNRDDRQKREQQREEKELAKFAQLADAHRKQQKEKQEQPDISGEQATPKNLPTPGNQDQRRTLKFGFSKMTPSKAPVGNMSKKPKIATKVPSVFGNDSDEEA

SEQ ID NO: 3819 - protein, 513 aa, Zea mays
MDPSSAGSGGNSLPSVGPDGQKRRVCYFYDPDVGNYYYGQGHPMKPHRIRMTHSLLARYGLLNQMQVYRPNPARERELCRFHAEEYINFLRSVTPETQQDQIRLLKRFNVGEECPVLDGLYSFCQTYAGASVGGAVKFNHGHDIAINWSGGLHHAKKCEASGFCYVNDIVLAILELLKHHERVLYVDIDIHHGDGVEEAFYTTDRVMTVSFHKFGDYFPGTGDIRDIGHSKGKYYSLNVPLDDGIDDESYQSLFKPIMGKVMEVFRPGAVVLQCGADSLSGDRLGCFNLSIKGHAECVRYMRSFNVPLLLLGGGGYTIRNVARCWCYETGVALGQEPEDKMPVNEYYEYFGPDYTLHVAPSNMENKNTRQQLDDIRSKLSKLRHAPSVHFQERVPDTEIPEQDEDQDDPDERHDPDSDMEVDDHKAVEESSRRSILGIKIKREFGENATRVQDGGRVASEHRGLEPMAEDIGSSKQAPQADASAMAIDEPSNVKNEPESSTKLQGQAAAYHKP

SEQ ID NO: 3820 - protein, 130 aa, Triticum aestivum
MAFSKSLGFILLAAFFISFTVAQSPAPAPSNGGGRRISPAHSPKKALSPAQAVSPSPQTALTPESSASPPSPPSVDSPLADSPSDSSAVSPSSISNSPAQAPAPVSGAVSNSYAVFGSIAVMLSAAVLAM

SEQ ID NO: 3821 - protein, 244 aa, Vibrio parahaemolyticus RIMD 2210633
MNLEGKIALVTGASRGIGRAIAELLVERGATVIGTATSEGGAAAISEYLGENGKGLALNVTDVESIEATLKAINDEFGAIDILVNNAGITRDNLLMRMKDDEWNDIINTNLTPIYRMSKAVLRGMMKKRAGRIINVGSVVGTMGNAGQTNYAAAKAGVIGFTKSMAREVASRGVTVNTVAPGFIETDMTKALNDDQRAATLANVPAGRLGDPREIASAVVFLASPEAAYITGETLHVNGGMYMV

SEQ ID NO: 3822 - protein, 388 aa, Ajellomyces capsulatus
MFSLRTAQPAQSLFRAATNTYSTSLPRSAIAARSFATVQSDIFKPTKYGGKYTVTLIPGDGIGTEVAESVKTIFKADNVPIEWEQVDVSGLDAGNKHSEDLFKESIASLKRNKLGLKGILHTPVERSGHQSFNVALRQELDIYASIVLIKNIPGYKTRHDNVDLCIIRENTEGEYSGLEHQSVSGVVESLKIITRAKSERIAKFAFSFALANNRKKVTCIHKANIMKLADGLFRSTFHKVAESYPTLETNDMIVDNASMQAVARPQQFDVMVMPNLYGGILSNVGAALVGGPGIVPGCNMGRDVAVFEPGCRHVGLDIKGKDQANPTALILSGSMLLRHLGLDEHANRISKAVYDVIGEGVTRTRDMGGQASTHEFTRAVLDKMESAL

SEQ ID NO: 3823 - protein, 342 aa, Shigella flexneri 2a str. 301
MERIMRVLVTGGSGYIGSHTCVQLLQNGHDVIILDNLCNSKRSVLPVIERLGGKHPTFVEGDIRNEALMTEILHDHAIDTVIHFAGLKAVAESVQKPLEYYDNNVNGTLRLISAMRAANVKNFIFSSSATVYGDQPQIPYVESFPTGTPQSPYGKSKLMVEQILTDLQKAQPDWSIALLRYFNPVGAHPSGDMGEDPQGIPNNLMPYIAQVAVGRRDSLAIFGNDYPTEDGTGVRDYIHVMDLADGHVVAMEKLANKPGVHIYNLGAGVGSSVLDVVNAFSKACGKPVNYHFAPRREGDLPAYWADASKADRELNWRVTRTLDEMAQDTWHWQSRHPQGYPD

SEQ ID NO: 3824 - protein, 197 aa, Porteresia coarctata
GQTPVFPRILGHEAGGIVESVGEGVTELAPGDHVLPVFTGECKECAHCKSEESNMCDLLRINVDRGVMIGDGQSRFTINGKPIFHFVGTSTFSEYTVIHVGCLAKINPEAPLDKVCILSCGISTGLGATLNVAKPKKGQTVAIFGLGAVGLAAMEGARLSGASRIIGVDLNPAKFEQAKKFGCTDFVNPKDHKKPVQ

SEQ ID NO: 3825 - protein, 595 aa, Ferroplasma acidarmanus
MYVEINFIFIKKITKFIILTKVLNKLPVSIAMQDVDNKVLGKRTKTGMRRGMSTHEAIMFGVGGAVGSGILFAAAGGTGYAGPAIIVSWIIAAIFIILVTLPFAEYAAMFPRSGISARVAYYSYGSYGGFMSGWGLLIWAATIPAIEAVAVSTYASLYFPFLYDSTTGVLTGYGILLAILLLLGFFALNMVGIARFGKFNKVLTWVKIGVVVAFIVILPLFIWHWGNFTSGLVGASSAGGFAGFMPSVGGLFIAIPASGILFSFGGYRQVADMAGEVKNPGKTMPKIIGTVLAVQSLLYIAMAVVIVGTVSWAGFGIQTGDWSFVAALGSPLSSIIHANIIPGMTVAEADLLGGMVIVFFLFAIFSPGGTLGVYLTGASRIIFGYSEEDALPKGFRKTTKHGAPYFALILALVLAIIFLLPLPSWYALVDFVVVAAVANFAVASISLPVLRRLYPNVERPFKIPHPMAWAFVSFEVATFLIYWATFPTTLYALGAVLAGSVVFIYQASRKHFMGLNLRNSVWIPVYIAGMIILSYVGGTPTGGLNIIAYPFDYVVLAIYAAIFFVIGLMSAPKEALISADSLLDTTKEVDVEGEY

SEQ ID NO: 3826 - protein, 249 aa, Aeropyrum pernix
MADARFYFSDARTWRYMVASIEKIIEEGVFVATGEGLSLRALDTSHVAMVDLYYPNTAFIEYDIGGESVEFGVSFDLLSKVLRRARKEDELVLEVEGSRLAVKLKSRGERTFRIPQVVMTYEKLPEPKVSFTVRARMLGSTFREAVRDLEPHSETLTLRALEDALLLVGSSEMATVEIELSQSRGSLLDYEAESQDRASYSIEYFSEMLSAAQAADAVVVSFSEDAPVRVDMEYLGGGRLTFYVSPKIE

SEQ ID NO: 3827 - protein, 157 aa, Oceanobacillus iheyensis HTE831
MSIYEYQVEKSNGEEISLSQYQDNVLLIVNTATKCGFANQFEGLEELHQKYQDEGLRVLGFPSNQFNEQEPVDDENMEEACKVNFGVTFPLFKKIDVKGPNAAPLFKYLTEEQKGLLGSNVKWNFTKFLVDRNGNVVKRFAPKDKPAKIEDDIKALL

SEQ ID NO: 3828 - protein, 140 aa, Triticum aestivum; identical to SEQ ID NO: 670

SEQ ID NO: 3829 - protein, 353 aa, Oryza sativa
  unsure (1)..(353): unsure at all Xaa locations
MVSALLRTILVTGGAGYIGSHTVLQLLQLGFRVVVLDNLDNASELAILRVRELAGHNANNLDFRKVDLRDKQALDQIFSSQRFEAVIHFAGLKAVGESVQKPLLYYDNNLIGTITLLQVMAAHGXCTKLVFSSSATVYGWPKEVPCTEESPLCAMNPYGRTKLVIEDMCRDLHASDPNWKIILLRYFNPVGAHPSGYIGEDPCGIPNNLMPFVQQVAVGRRPALTVYGTDYNTKDGTGVRDYIHVVDLADGHIAALRKLYDDRIGCEVYNLGTGKGTSVLEMVAAFEKASGKKIPLVFAGRRPGDAEIVYAQTAKAEKELKWKAKYGVEEMCRDLWNWASKNPYGYGSPDSSN

SEQ ID NO: 3830 - protein, 226 aa, Carica papaya
PQSIDWRAKGAVTPVKNQGACGSCWAFSTIATVEGINKIVTGNLLELSEQELVDCDRHSYGCKGGYQTTSLQYVANNGVHTSKVYPYQAKQYKCRATDKPGPKVKITGYKRVPSNCETSFLGALANQPLSVLVEAGGKPFQLYKSGVFDGPCGTKLDHAVTAVGYGTSDGKNYIIIKNSWGPNWGEKGYMRLKRQSGNSQGTCGVYKSSYYPFKGFAKDLGFHTYI

SEQ ID NO: 3831 - protein, 1142 aa, Saccharomyces cerevisiae
MAINGNSIPAIKDNTIGPWKLGETLGLGSTGKVQLARNGSTGQEAAVKVISKAVFNTGNVSGTSIVGSTTPDALPYGIEREIIIMKLLNHPNVLRLYDVWETNTDLYLVLEYAEKGELFNLLVERGPLPEHEAIRFFRQIIIGVSYCHALGIVHRDLKPENLLLDHKYNIKIADFGMAALETEGKLLETSCGSPHYAAPEIVSGIPYQGFASDVWSCGVILFALLTGRLPFDEEDGNIRTLLLKVQKGEFEMPSDDEISREAQDLIRKILTVDPERRIKTRDILKHPLLQKYPSIRDSKSIRGLPREDTYLTPLSESNSSIDATILQNLVILWHGRDPEGIKEKLREPGANAEKTLYALLYRFKCDTQKELIKQQQVKKRQSISSVSVSPSKKVSTTPQRRRNRESLISVTSSRKKPISFNKFTASSASSSNLTTPGSSKRLSKNFSSKKKLSTIVNQSSPTPASRNKRASVINVEKNQKRASIFSTTKKNKRSSRSIKRMSLIPSMKRESVTTKLMSTYAKLAEDDDWEYIEKETKRTSSNFATLIDEIFEYEKYEQIRKEKEELERKVREAKAREELERRRRKQEEKERARKLLEKEDLKRKQEELKKQIEIDISDLEQELSKHKEEKLDGNIRSISAPMENEEKNINHLEVDIDNILRRRNFSLQTRPVSRLDPGIMFSSPTEEVSPVEPKRTENERLTTEKKILETIRRSKFLGSSFNIDKELKLSKMEYPSIIAPQRLSEERVVSDSNDGYESLILPKDGNGVSQLKDSTATTAPVSDGRLRKISEIRVPQFTRKSRHFSESNKRLSVLSMYSTKESFTNLVDILKNGNLDVNNQQSQRIPTPRSADDSEFLFETVNEEAEYTGNSSNDERLYDVGDSTIKDKSALKLNFADRFNGSNEAKQTDNLHLPILPPLNGDNELRKQNSQEGDQAHPKIKSMIPESGSSSHTEKEEENEEKEEKKPEQHKQEEDQEKREKVVDDMEPPLNKSVQKIREKNAGSQAKDHSKDHLKEHKQDKNTAIGNGSFFRKFSKSSDKTMELYAKISAKQLFNGLEKLLRGWTQYGLKNIKSHPNNLTLTGKLSSDNIFSLRSTLFEVNIYPRGKMSVVQFKKVSGSFKAVKKLVNEVENVLNKEGVLQK

SEQ ID NO: 3832 - protein, 1131 aa, Lycopersicon esculentum
MASGSRTKHSYHNSSQGQAQSSGTSNMNYKDSISKAIAQYTADARLHAVFEQSGESGKSFDYSQSVKTTTQSVPERQITAYLTKIQRGGHIQPFGCMIAVDEASFRIIAYSENACEMLSLTPQSVPSLDKSEILTVGTDVRTLFTPSSSVLLERAFGAREITLLNPIWIHSKNSGKPFYAILHRVDVGIVIDLEPARTEDPALSIAGAVQSQKLAVRAISHLQSLPGGDIKLLCDTVVESVRELTGYDRVMVYKFHEDEHGEVVAESKRSDLEPYIGLHYPATDIPQASRFLFKQNRVRMIVDCHATPVRVTQDESLMQPLCLVGSTLRAPHGCHAQYMANMGSIASLTLAVIINGNDEEAVGGGRNSMRLWGLVVGHHTSVRSIPFPLRYACEFLMQAFGLQLNMELQLASQLSEKHVLRTQTLLCDMLLRDSPPGIVTQSPSIMDLVKCDGAALYYQRKYYPLGVTPTEAQIKDIVEWLLAYHGDSTGLSTDSLADAGYPGAASLGDAVCGMAVAYITSKDFLFWFRSHTAKEIKWGGAKHHPEDKDDGQRMHPRSSFKAFLEVVKSRSSPWENAEMDAIHSLQLILRDSFKDAEASNSKAIVHALGEMELQGIDELSSVAREMVRLIETATAPIFGVDVNGRINGWNEKVVELTGLSAEEAKGKSLVHDLLYKESQESAEKLLYNALRGVEGKNVEIKLRTFGAEQVEKAVFLVVNACSSRDYTNSIVGVSFVGQDVTGEKIVMDKFIHIQGDYKAIVHSPNPLIPPIFASDENTSCSEWNTAMEKLSGWSREEIVGKMLVGEIFGSCCRLKGPDAMTKFMIVLHNAIGGQDTDKFPFSFFDRNGKYVQALLTANKRVNMEGDTIGAFCFIQIASPELQQALRVQRQQEKKCYSQMKELAYICQEVKSPLNGIRFTNSLLEATNLTEYQKQYLETSAACERQMSKIIRDVDLENIEDGSLTLEKEDFFLGSVIDAVVSQVMLLLREKGVQLIRDIPEEIKTLTVHGDQVRIQQVLADFLLNMVRYAPSPDGWVEIQLRPSMMPISDGATVVHIELRIICPGEGLPPELVQDMFHSSRWVTQEGLGLSMCRKMLKLMNGEIQYIRESERCYFMIILDLPMTRKGPKSVG

SEQ ID NO: 3833 - protein, 313 aa, Vibrio parahaemolyticus RIMD 2210633
MTKPFSIAIHGGAGTILREQMSDELQQSILADLEAAVKAGHQILEQGGEALDAVVAAVKVLEDSPNFNAGKGSVLTHNEMVEMDASVMDGRNLAAGAVAGVRHIKNPIELARDVMLRSNHVLLVGEGAEKFAFEQGHQYTEQDYFFTDRRYEQLLSMREKGLFALSESRYPDDRKHGTVGAVALDQQGNLAAATSTGGVTNKQYGRVGDSALIGCGTVAENGVVAVSTTGVGEFFIRKRVAEDVAARMRYLQEDVHTACEAIIQGDLKTMGGEGGLIAIDANGELHFAMNSTGMYRAGINTRGELSVKIYAND

SEQ ID NO: 3834 - protein, 262 aa, Muhlenbergia setarioides
WPCSSCVHWGMQGVRPLQVVWEQPVWSAQDQHRPGCDDWCRQLTVSIDGKPIYHFVGTSTFSEYTVIHVGCLAKINPEAPLDKVCVLSCGISTGLGASINVAKPPKGSTEAVFGLGAVGLAAAEGARIAGASRIIGIDLNTSRFEEAKKFGCTEFVNPKDHDKPIQEVLAEMTNGGVDRSVECTGNINAMIQAFESVHDGWGVAVLVGVPHMDAEFKTKPMNFLNERTLKGTFFGNFKPRTDIPNVVELYLKKELVLEKFIN

SEQ ID NO: 3835 - protein, 171 aa, Neurospora crassa
MAENDERALQKVSLQSNDGQIITVDRVVAERSLLIKNLIEDLGDEAVMNEAIPLPNVNEPVLRKVVEWCEHHRKDPPQTTEDENDSRKKSTEIDEWDQKFMQVDQEMLFEIILAANYMDIKPLLDVGCKTVANMIKGKSPEEIRKTFNITNDFTPEEEEQIRRENEWAEDR

SEQ ID NO: 3836 - protein, 576 aa, Schizosaccharomyces pombe
MQPQEVDLMENSTMRNGARVLPPEAISKRHIGPYIIRETLGEGSFGKVKLATHYKTQQKVALKFISRQLLKKSDMHMRVEREISYLKLLRHPHIIKLYDVITTPTDIVMVIEYAGGELFDYIVEKKRMTEDEGRRFFQQIICAIEYCHRHKIVHRDLKPENLLLDDNLNVKIADFGLSNIMTDGNFLKTSCGSPNYAAPEVINGKLYAGPEVDVWSCGIVLYVMLVGRLPFDDEFIPNLFKKVNSCVYVMPDFLSPGAQSLIRRMIVADPMQRITIQEIRRDPWFNVNLPDYLRPMEEVQGSYADSRIVSKLGEAMGFSEDYIVEALRSDENNEVKEAYNLLHENQVIQEKSHLSKSKRVDSFLSVSPPAFSEYTSELQKKSKQELIDPTLEGPRWTVSDPPTYAKQTIDSNICVLVPTAEKNKLEMRTLADAASAVDTSQSTRKKSRRNKWHFGVRCRGDAPEILLAVYRALQRAGAQFTVPKPVNGKYRSDMYTIKSRWEIPHCKREGKNTYAYIELQLYEVMPGCFMLDVKSNGYKDIYSHPERTADHGMDDLKSSFPFLDLCAMLVCKLFSA

SEQ ID NO: 3837 - protein, 205 aa, Betula pendula
MPCSTEAMEKAGHGHASTPRKRSLSNSSFRLRSESLNTLRLRRIFDLFDKNSDGIITVDELSRALNLLGLETDLSELESTVKSFTREGNIGLQFEDFISLHQSLNDSYFAYGGEDEDDNEEDMRKSILSQEEADSFGGFKVFDEDGDGYISARELQMVLGKLGFSEGSEIDRVEKMIVSVDSNRDGRVDFFEFKDMMRSVLVRSS

SEQ ID NO: 3838 - protein, 406 aa, Shigella flexneri 2a str. 301
MAIEQTAITRATFDEVILPIYAPAEFIPVKGQGSRIWDQQGKEYVDFAGGIAVTALGHCHPALVNALKTQGETLWHISNVFTNEPALRLGRKLIEATFAERVVFMNSGTEANETAFKLARHYACVRHSPFKTKIIAFHNAFHGRSLFTVSVGGQPKYSDGFGPKPADIIHVPFNDLHAVKAVMDDHTCAVVVEPIQGEGGVTAATPEFLQGLRELCDQHQALLVFDEVQCGMGRTGDLFAYRYYGVTPDILTSAKALGGGFPISAMLTTAEIASAFHPGSHGSTYGGNPLACAVAGAAFDIINTPEVLEGIQAKRQRFVDHLQKIDQQYDVFSDIRGMGLLIGAELKPHYKGRARDFLYAGAEVGVMVLNAGPDVMRLAPSLVVEDADIDEGMQRFAHAVAKVVGA

SEQ ID NO: 3839 - protein, 337 aa, Novosphingobium aromaticivorans
MRCADFTGPGQIVFRPAATPPTPGPGEVLVAVRTCGICGSDLHMFRDNSYRDKLVRETVEGYAVPGHEFAGTIAALGDGVAGWSIGDRVVGVTGMGGGMADLVAVPANPWQLVKVPDGLSWELAATTEPLADGLQMVRKGAPTDGENVVVIGVGIIGLGVIQAILARGISPARIIAVDVHQTRLDTALQVGATHAVNARDGDVFEAIGAICGIGETYAGQSANISVIFDCAGYIRHMKGPPPLETALRLVVPGGRIVCFGGFEGRMEIDMSPLIEKQPTIFGSNGYAPEELVEALDLMSGGKVDRACLISHEFPLEQVAEAFDRQLQPDAVKVMLRI

SEQ ID NO: 3840 - protein, 333 aa, Dichanthium aristatum
TGYDRVMVYRFHEDEHGEVVAESRRDNLEPYLGLHYPATDIPQASRFLFRQNRVRMIADCHATPVRVIQDPGLSQPLCSVGSTLRAPHGCHAQYMANMGSIASLVMAVIISSGGDDEQTGRGGISSSMKLWGLVVCHHTSPRCIPFPLRYACEFLMQAFGLQLNMELQLAHQLSEKHILRTQTLLCDMLLRDSPTGIVTQSPSIMDLVKCDGAALYYHGKYYPLGVTPTESQIKDIIEWLTVCHGDSTGLSTDSLADAGYLGAAALGDAVCGMAVAYITPSDYLFWFRSHTAKEIKWGGAKHHPEDKDDGQRMHPRSSFKAFLEVVKSRSLPW

SEQ ID NO: 3841 - protein, 307 aa, Actinobacillus pleuropneumoniae serovar 1 str. 4074
MQGPMAWMTDAKFVAAVSNAGGLGILGPNAGLQKAPKTTEDLLRTFREEIRKTKALTDKPFGAPVILSYDFSTIDLLVDLLIEEHVPVALINGIDGYDYKPMMKKFKAAGTKTIFRPHTPTVENAHYAEEIGADIFVATGFDEGGTVPNQVIGTFSIVPQMVDAVSIPVMAAGGIADVRGVRASFALGAEGVFVGSVLLATEENRMHESVKQLVVDSTAQDLLLFRTQPAYYRSLPTQLAHKLVEMDENGATRDELAKAQTGGYGMRQGMLLGDFEKGYISVGNGITYIKSIRSVKNVVEDLMQDFV

SEQ ID NO: 3842 - protein, 265 aa, Glycine max
MEGVSPEPLRSELDSKSKQDTAKEEDDDTFKESTDAEVTKIRLMRAFVESRDPSSKEVDDLMIRRFLRARSLDVEKASAMFLKYLKWKRSFVPNGYISPSEIAEDIAQDKVFTQGLDKKGRPIVVAFAAKHFQSKNGADGFKRYVVFVLEKLCSRMPPGQEKFLAIADIKGWAYVNSDLRGYLNSLSILQDCYPERLGKMLIVHAPYMFMKIWKMIYPFIDENTKKKIVFVENKKLKSTLLEEIEESQIPDIYGGQMPLVPIQNS

SEQ ID NO: 3843 - protein, 250 aa, Zea mays; identical to SEQ ID NO: 2044

SEQ ID NO: 3844 - protein, 371 aa, Oryza sativa (japonica cultivar-group)
MAAAGAGAGAPDRAALTVGPGMDMPIMHDSDRYELVRDIGSGNFGVARLMRDRRTMELVAVKYIERGEKIDDNVQREIINHRSLKHPNIIRFKEVILTPTHLAIVMEYASGGELFERICKNVRFSEDEARYFFQQLISGVSYCHSMQVCHRDLKLENTLLDGSPAPRLKICDFGYSKSSVLHSQPKSTVGTPAYIAPEVLLKKEYDGKTADVWSCGVTLYVMVVGAYPFEDPEEPKNFRKTIQRILNVQYSIPENVDISPECRHLISRIFVGDPSLRITIPEIRSHGWFLKNLPADLMDDDSMSSQYEEPDQPMQTMDQIMQILTEATIPPACSRINHILTDGLDLDDDMDDLDSDSDIDVDSSGEIVYAM

SEQ ID NO: 3845 - protein, 218 aa, Zea mays
  unsure (1)..(218): unsure at all Xaa locations
GVPAMVAHTVAGYRFAGLLLVFFFTSSRVTRVGEARKRALDPEFKEGGQRNWKQVLSNSGIASILVVLIASVTGGTDRCLDSKESTRVTALIDGVIGHYACYNGDTWSSELGILCKAEPQIITTFXRVRKATIGGVTIDGLLAAAAGFLIGLAFVLIGFFTTQCDPDVFWNQLLAIPLXTAAGLCRKLIDSFLSATSXYSGFYSVRKKGKANKFQYLK

SEQ ID NO: 3846 - protein, 481 aa, Papaver somniferum
SLVAVVITTFLYLIFRDSSPKGLPPGPKPWPIVGNLLQLGEKPHSQFAQLAETYGDLFSLKLGSETVVVASTPLAASEILKTHDRVLSGRYVFQSFRVKEHVENSIVWSECNETWKKLRKVCRTDLFTQKMIESQAEVRESKAMEMVEYLKKNVGNEVKIAEVVFGTLVNIFGNLIFSQNIFKLGDESSGSVEMKEHLWRMLELGNSTNPADYFPFLGKFDLFGQSKDVADCLQGIYSVWGAMLKESKIAKQHNNSKKNDFVEILLDSGLDDQQINALLMEIFGAGTETSASTIEWALSELTKNPQVTANMRLELLSVVGKRPVKESDIPNMPYLQAFVKETLRLHPATPLLLPRRALETCKVLNYTIPKECQIMVNAWGIGRDPKRWTDPLKFSPERFLNSSIDFKGNDFELIPFGAGRRICPGVPLATQFISLIVSSLVQNFDWGLPKGMDPSQLIMEEKFGLTLQKEPPLYIVPKTRD

SEQ ID NO: 3847 - protein, 473 aa, Staphylococcus epidermidis ATCC 12228
MDENKLGKTSLIGLVIGSMIGGGAFNIISDMGGQAGGLAIIIGWIITAIGMISLAFVFQNLTNERPDLDGGIYSYAQTGFGDFIGFSSAWGYWFAAFLGNVAYATLLMSAVGNFFPIFKGGNTLPSIIIASILLWGVHFLILRGVETAAFINSIVTVAKLIPIFLVIICMIVVFNFSTFKSGFYGMTSGSVGVFSWGDTMAQVKSTMLVTVWVFTGIEGAVVFSGRAKSKKDVGTATVIGLISVLVIYFLMTVLAQGVIQQNQISKLANPSMAQVLEHIVGHWGSVLVNIGLIISVLGAWLGWTLLAGELPFIVAKDGLFPKWFAKENKNKAPVNALIITNILVQLFLISMLFTDSAYQFAFSLASSAILIPYTLSAFYQVKYTIQNKSKANLKQWIIGIIASIYTIWLVYAAGLDYLLLTMLLYIPGLLVYSYVQRDNNKHLTKLDYTLFIFIIVLAIIGIVRLITGNISVF

SEQ ID NO: 3848 - protein, 370 aa, Pseudomonas syringae pv. tomato str. DC3000
MIKSRAAVAFEAKKPLEIVEVDVAMPKAGEVLLKVVASGVCHTDAYTLSGADPEGIFPSILGHEGGAIVEAIGEGVTSVAVGDHVIPLYTPECRQCKFCRSGKTNLCQAIRSTQGKGLMPDGTTRFSYKGEPIFHYMGTSTFSEYTVLPEISVAKIDKKAPLEKVCLLGCGVTTGIGAVLNTAKVKPGDTVAVFGLGGIGLSAVIGAVKAKAARIIAIDINPAKFEIAKQLGATDCVNPKDFDRPIQEVIVDMTDGGVDFSFECIGNVQLMRSALESCHKGWGESVIIGVAGAGQEISTRPFQLVTGRVWRGSAFGGVRGRTELPSYVDMAQTGEIPLDTFITHTMGLEDINKAFDLMHEGKSIRTVIHF

SEQ ID NO: 3849 - protein, 347 aa, Burkholderia fungorum
MAYEAASERYSDMQYRVCGKSGLKLPALSLGLWHNFGDTTPISTQRDILRTAFDLGITHFDLANNYGPPYGSAETNFGRLFKDDFKPYRDELLISSKAGWDMWPGPYGQGGGSRKYVLASLDKSLQRMGLDYVDIFYSHRFDAETPLEETAGALASAVQQGKALYIGISSYSASKTLEMAKLLAEYKVPLLIHQPSYNMLNRWIEHELLGALEKAGAGAIAFTPLAQGLLTSKYLNGVPEDARVNKPGGGSLKQEHLSPQNIEHVRKLNDIAQRRGQSLAQMALAWALRDPRVTSVLIGASRAEQVRENVGALKNLAFSKDELAEIDRYATEGGINLWEKPSTDQAI

SEQ ID NO: 3850 - protein, 154 aa, Triticum aestivum
LVPNSARGGSGPGAGFSSFIARRQQRRAATRGLDAEVVKAFPTMRYAEAKALRVGRKAAPLLECAVCLSEFEDEDRLRLLPKCSHAFHPDCIGEWLASHVTCPVCRRNLDPKQGRWRRTRVTPRCLEPKQQPPAIARWFRHHQKAGAGPWVQSN

SEQ ID NO: 3851 - protein, 340 aa, Novosphingobium aromaticivorans
MTVNRRFLLARRPHGTPVPEDFSLVEQTVPDAPEGGFVVRNCYASLDPAQRGWMDDAPSYMPPIPLGTPVRASTVGVVATSRNPDFAVGDWVLGLNGLEDYSVNEPGGFTMKVDPSVVQSPSRFLSAMGAVGLTAYFGLTEVAKPKPGETLLVSGAAGAVGSAVGQIGKILGCRVIGIAGGPAKCRRLIDDYGFDVAIDYKGKSVEQLAAEIREAAPGGADVVFENVGGDVMDAELLNLAKHARIVLCGLISEYNSPTKIGVRNLWQVLTQQATLFGYLIMDYAPRFAEGGAVMAQWMAEGRLRIDEDVQVGLENAYDAFMRLFTGANTGKLVLKIADGL

SEQ ID NO: 3852 - protein, 350 aa, Glycine max
MPAPLILVTGGAGYIGSHTILQLLFGGYHVFAVDNFDNSSETAINRVKELAGELANNLSFCKLDLRDRAALEKIFSTVKFDAVIHFAGLKAVGESVKKPLLYFDNNLIGTIVLFEVMAAHGCKKLVFSSSATVYGWPKEVPCTEEFPLSATNPYGRTKLFIEKICRDIHRADSDWTVILLRYFNPVGAHPSGYIGEDPLGIPNNLMPFVQQVAVGRRPALTVFGSDYKTTDGTGVRDYIHVLDLADGHIAALRKLDDPKIGCEVYNLGTGKGTSVLEMVNAFEQASGKKIPLAMAGRRPGDAEIVYASTEKAERELKWKTKYCIDDMCRDQWNWARKNPYGYGGSEDSSN

SEQ ID NO: 3853 - protein, 111 aa, Glycine max
MSGVGPLSQDWEPVVLRKKAPTAAAKKDEKAVNAARRSGAEIETLKKYNAGTNKAASSGTSLNTKRLDDDTESLAHEKVPTELKKAIMQARMDKKLTQSQLAQVLLVVYYR

SEQ ID NO: 3854 - protein, 87 aa, Glycine max
  unsure (1)..(87): unsure at all Xaa locations
TIIQTCPLLLRVFTKIGSHHSMENFAVKGKEPEDEVXIYTWKDATLXXLTDLVKGVAPAARRKNAKLSFAFIFPDKNGRFKSRCCNL

SEQ ID NO: 3855 - protein, 315 aa, Aspergillus oryzae
MVLPTAPEPPTLLGYHRILSPSAGVRVSPLCLGTMSFGNGWKGVMGECDQATSFNMLDTFYESGGNFIDVANFYQGGDSERWVGEWMAQRQNRDEIVLSTKYTMGYTMFGPQKIKSNYQGNHTKSLRLSVKASLQKLQTDYIDLLYVHMWDFTTSVEEVMRSLNHLVANGKVLYLGVSDTPAWLVVKCNAFARANGLTPFSVYQGHWSCAFRDFERDILPMCESEGMGLAPWGVLGRGQFRSAEEFSREGRKMGPQDEKHRRLGEKLDQMAQQKNIKATSIAQAYVMHKAPYVFPVIGVARWSTSRRTLRLSAWY

SEQ ID NO: 3856 - protein, 364 aa, Neurospora crassa
MEGLLFNVNNGYIEGIVRGYRNSLLTSTNYTNMTQCESIDDLKLQLGPAYGDFLASLPPKPSTSALAAKTTDKLVSEFRYVRANAAGSLAKFMDYLTYGYMIDNVALLITGTLHERDTRELLERCHPLGWFETMPVLCVATNIEELYNSVMIETPLAPYFKSSLSLQDLDELNIEIVRNTLYKNYLEDFYHFVNTHPDMAGTPTAEVMSELLEFEADRRAINITLNSFGTELSKADRKKLYPNFGQLYPEGTLMLSRADDFEGVRLAVEGVADYKSFFDAAGLGGGPSGPGNMGGGGTEGKSLEDMFYQKEMEISKMAFTRQFTYAIVYAWVKLREQEIRNITWIAECIAQNQKERINNYISVF

SEQ ID NO: 3857 - protein, 423 aa, Trichodesmium erythraeum IMS101
MSPETIVQQSLETSNAYTTFSADNFNTYVMNTYGRFPIAIERGEGCRVWDTEGKEYLDFVAGIATCTLGHAHPVMMATVSEQIKRLHHVSNLYYIPVQGELAQWLIQHSCADKAFFCNSGAEANEGAIKLARKYAHEKLNIENPTILTAHASFHGRTLATMTATGQPKYHKGFSPLMPGFYYVPYNDIAAIESAIEELDKDKRQVAAIMLEALQGEGGIRPGDMTYFKRIREICNEKGILLILDEVQAGMGRSGKIWGYENLGIEPDIFTSAKGLGGGIPIGAMLCKSHCDVFEPGSHASTFGGNPFACAVALAVCHTLEQENLLANVQQRGDELRIELKAIADKYPNLFSEVRGWGLINGLELNATATLTSIDIVKAAMNEGLLIVPAGPKVLRFVPPLIVTETEVKEAMDLLAKAIANTVN

SEQ ID NO: 3858 - protein, 257 aa, Rhodobacter sp. DSMZ 12077 [sequence omitted]

SEQ ID NO: 3859 - protein, 475 aa, Helicobacter pylori J99
MEHQNTTQKQGELKRDMKMRHLLMIAFGGAIGTGLFVGTGGNIASAGPLGTLIAYCFGGLVVYCIMLSLGELASVYPTTGSFGDYAAKFIGPGTGYMVFWMYWLGWVITVALEYIAIGMLMQRWFVNIPIHYWVISCIALVFLLNFFSVKIFAEGEFFFSLIKVLAVIAFISIGVIGIIYQIYLHGFSSIFDNFHFGDKGFFPNGSEAVFSAMLAVIFAFTGTEVIGVAVGETKNASEVMPKAIKATLWRIVFFFLGSVFVISVFLPMSDSSIAQSPFVSVLERINLPFIGMGIPYVADIMNAVIITAMFSTANSGLYGASRMIYGLSKQKMFFKVFSQLNRQGTPTYAMFFSLSFSLIGLLVQIYAKENVVEALINVISFTVIIVWVSVSISQYSFRKQYLKAGHSLEDLPYKAPFLPFLQLIGITGCIIGVIGSAMDKDQRIGMILTIVFAVVCYIGYYFTQKANENNKKDLI

SEQ ID NO: 3860 - protein, 374 aa, Tripterygium regelii
ALSIAGAVQSQKLAVLAISQLQSLQGGDIKLLCDTVVESVRDLTGYDRVMVYKFHEDEHGEVVAESKRPDLEPYIELHYPATDIPQASRFLFKQNRVRTIVDCHALPVRVIQDDGLMQPLCLVGSTLRAPHGCHAQYMENMGSMASLAMAVVINGNDEEVIGGRNTTRLWGLVVCHHTSARCIPFPLRYACEFLMQAFGLQLNMELQLAAQLMEKHVLKTRTLLCDMLLRDSPTGIVTQSPSIMDLVKCDGAALHYQGNYYPLGVTPTEAQIKDIVGWLLDFHGDSTGLSTDSLADAGYPEAALLGDAVCGMAVAYITNRDFLFWFRSHTAKEIKWGGAKHHPGDKDDGQRMHPRSSFKAFLEVVKSRSLPWEN

SEQ ID NO: 3861 - protein, 306 aa, Saccharopolyspora erythraea
MSVKQKSALQDLVDFAKWHVWTRVRPSSRARLAYALFADDHEATTEGAYINLGYWKPGCAGLEEANQELANQLAEAAGISEGDEVLDVGFGLGAQDFFWLETRKPARIVGVDLTPSHVRIASERAERENVQDRLQFKEGSATDLPFGAETFDRVTSLESALHYEPRTDFFKGAFEVLKPGGVLAIGDIIPLDLREPGSDGPPKLAPQRSGSLSGGIPVENWVPRETYAKQLREAGFVDVEVKSVRDNVMEPWLDYWLRKLQDESFKKSVSRLFYSQVKRSLTSDSGMKGELPALDFVIASARKPGA

SEQ ID NO: 3862 - protein, 420 aa, Sinapis arvensis
YHHSNTFFFVVLVLFPHVFSTNTLSSNDALTISSNKTLVSPGNVFELGFFRTTTRNSQDGADRWYLGIWYKTTSDQRTYVWVANRDNPLHNSIGTLKISNANLLLLDHSDSPVWSTNLTGVVEPPVTAELLANGNFVLRGSYSTEDEFMWQSFDFPVDTLLPEMKLGWNRKPGPERILTSWKSPTDPSSGDFSFMLETHTIGLHEFYLRKNEFIMYRTGPWNGVRFSGIPKMQNWSYIVNSFVDNHKEVAYTFHVDNHKINSRFRMSSTGYLQVITWTMTVPQRNMFWSFPEDTCDLYQVCGPYAYCDMNTAPTCNCIKGFVPKNAAQWELRDASGGCVRSSRLSCGEGDGFLRMSQMKLPETSEAVAVLVDKRNGFKECKERCIRDCNCTGFANMDSMNGESRCVIWSDELLDMRKYVA

SEQ ID NO: 3863 - protein, 235 aa, Glycine max
MSLFAAFSICKVAKDAAGVAGNVFAFGLFVSPIPTFRRIIRNGSTEMFSGLPYIYSLLNCLICMWYGTPLISADNLLVTTVNSIGAVFQFVYTIIFLMYAEKAKKVRMVGLLLAVLGMFAIVLVGSLQIDDVIMRRFFVGFLSCASLISMFASPLFIIKLVIQTKSVEFMPFYLSLSTFLMSTSFLLYGLFNDDAFIYVPNGIGTILGMIQLILYFYFESKSRVSSREPLIVSYA

SEQ ID NO: 3864 - protein, 463 aa, Glycine max
PRVRESQANGVHSSKHDDDGRLKRRGTWLTATSHIVTAVIGSGVLSLAWAVAQLGWIAGPAILTIFSVITVFTSSLLSDCYRYPDSVHGTRNHNYREMVKNILGGRKYLFCGLAQFANLIGTGIGYTVTASISMVAVIRSNCFHKYGHEAKCHTSNYPYMTIFAVIQILLSQIPDFQELSGLSIIAAVMSFGYSSIGIGLSIAKIAGGNDAKTSLTGLIVGEDVTSQEKLWNTFQAIGNIAFAYAFSQVLVEIQDTLKSSPPENQAMKKATLAGCSITSLFYMLCGLLGYAAFGNKAPGNFLTGFGFYEPYWLVDIGNVFVFVHLVGAYQVFTQPVFQLVETWVAKRWPESNFMGKEYRVGKFRFNGFRMIWRTVYVIFTAVVAMILPFFNSIVGLLGAISFFPLTVYFPTEMYLVQAKVPKFSLVWIGVKILSGFCLIVTLVAAAGSIQGIIADLRIYEPFK

SEQ ID NO: 3865 - protein, 209 aa, Austrosteenisia blackii
DRVMAYKFHEDDHGEVIAEITKPGLEPYLGLHYPATDIPQAARFLFMKNKVRMIVDCHAKHVKVLQDEKLPFDLTLCGSTLRAPHSCHLQYMANMNSIASLVLAVVVNDNEEDGDSSDAVQPQKRKRLWGLVVCHNTTPRFVPFPLRYACEFLAQVFAIHVNKEIELEYQIIEKNILRTQTLLCDMLMRDAPLGIISQSPNIMDLVKCD

SEQ ID NO: 3866 - protein, 480 aa, Corynebacterium efficiens YS-314
MQHTPFHVKGLRRAMNRGVSWTVDIPKEVLPDLPPLPEGMNEQFQDTIARDAKQQPTWDRAQADNVRRILESVPPIVVAPEVIELKKKLADVANGKAFLLQGGDCAETFESNTEPHIRANIKTLLQMAVVLTYGASTPVIKMARIAGQYAKPRSADLDANGLPNYRGDIVNGVEATPEARRHDPARMIRAYANSSAAMNLVRALTSSGTANLYRLSDWNREFVANSPAGARYEALAREIDSGLRFMEACGVSDESLRTAEIYCSHEALLVDYERSMLRLGEDENGEQALYDLSAHQLWIGERTRGMDDFHVNFAAMIANPVGIKIGPGITPEEAVAYADKLDPNFEPGRLTMVARMGHDKVRSVLPGVIQAVEASGHKVIWQSDPMHGNTFTASNGYKTRHFDKVIDEVQGFFEVHRALGTHPGGIHIEFTGEDVTECLGGAEDITDVDLPGRYESACDPRLNTQQSLELSFLVAEMLRN

SEQ ID NO: 3867 - protein, 346 aa, Escherichia coli O157:H7
MVWLANPERYGQMQYRYCGKSGLRLPALSLGLWHNFGHVNALESQRAILRKAFDLGITHFDLANNYGPPPGSAEENFGRLLREDFAAYRDELIISTKAGYDMWPGPYGSGGSRKYLLASLDQSLKRMGLEYVDIFYSHRVDENTPMEETASALAHAVQSGKALYVGISSYSPERTQKMVELLHEWKIPLLIHQPSYNLLNRWVDKSGLLDTLQNNGVGCIAFTPLAQGLLTGKYLNGIPEDSRMHREGNKVRGLTPKMLTEANLNSLRLLNEMAQQRGQSMAQMALSWLLKDERVTSVLVGASRAEQLEENVQALNNLTFSTEELAQIDQHIADGELNLWQASSDK

SEQ ID NO: 3868 - protein, 134 aa, Triticum aestivum
ISLSLGKTFSKSLGDILLATGDISFTEAQSPVPAPSNRGGRRISPEQSPKKVISAAQAVSPSPQTAGTPATSASPPSPPYYESPLAESASDTPAVSSSSISNSADQAPDTCTGDVSNTYAHERIHRCHAICYSI

SEQ ID NO: 3869 - protein, 654 aa, Zea mays
  unsure (1)..(654): unsure at all Xaa locations
MEEHQVKPSDLPPTSLHNQDSAATPVTSADPARPAASNDSPSQVASAAPAAVSAPTAAPAEDAAGREASASVFSASGLSSWAKNLKIPQPSPGQESPTGKNTFARLTSGLGLRLSPKAAQQDEGAEGSTSPTXDSLGVFGSLTKGIVDSSKNAVKAVQVKARHMVSQNKRRYQEXGGFDLDMTYITENIIAMGFPAGDLSSGLFGYFEGFYXRNHMEEVIRFFEMHHKGKYKVYNLCSERLYDASLFEGKVACFPFDDHNCPPIQLVISFCHSAYSWLKEDIENVVVVHCKAGKARTGLMISSLLLFLKFFPTAEESIEYYNQKRCVDGKGLILPSQIRYVKYFERILTYFNGENQPPRRCMLRGFRLHRCPYWIRPSITVSNHNGVLFSTKKHPRTKELMPEDFWFSAPKKGIMVFALPGEPGLAEVAGDFKIQFHDRQGDFYCWLNTTMMENRVTLEXTDLDDFDKRKLPSPGFQIEVVLVDYDGSQPAKPKPGAGPAADKSHADSSASTVAKENSAAPEESNKGTGSNNDRDEVFSDSDGEDGSSNGRKEKTAGGGQSSVNAAKPSQTGNMEEAAASAAASRLDKVAISSEQGTTKAPDGTSLKTEVSSKASSTDSTTSSXADSSSMSEFKAIAADASVFSFGDEDDYESE

SEQ ID NO: 3870 - protein, 335 aa, Brucella suis 1330
MTILVTGGAGYIGSHTCVQLIEAGHEVVVVDNFDNSHPEALHRIEKITGRAPRREPGDIRDRALMEQVIKRHKCTAVIHFAGLKAVGESSEKPLLYYDCNVLGTLRLLQAMEATGVKKLVFSSSATVYGDPDKLPITEDQPLSATNPYGRTKLVIEDMLRDLYNSDNSWAIAILRYFNPVGAHESGLIGEDPKGIPNNLMPIIAQVATGRREKLNIWGNDYPTPDGTGVRDYIHVNDLAAGHLKALKKLDKPKCFAVNLGTGQGYSVLDVIKAFEHVSNREIKYEIAPRRPGDVAECYADPGFAKKFLGWSAEKNLREMCQDMWNWQSKNPNGYE

SEQ ID NO: 3871 - protein, 288 aa, Oryza sativa
  unsure (1)..(288): unsure at all Xaa locations
PRVRATLLELLRRLQQLELTVDTLTVTEIGKAVSSYRKHNSKQIRHLVRLLIEGWKRIVDEWMSSRDAIVDHTPQSMHPSGLEQDERGLSSPYEGALFATPSTSIRLSEENQGSKFFDGMDDDGNTRSNGGRDNGRLYTRNQEPARRPLPPMAQQYDPDQSWKQEQSAXEAVETTGTEQWADXESNSSRRCLQGPQTQSPVLXRPQPRTKQHQDASPAQGRSQPMPSDAKLEVTKRKLQEGYQEFDNAKKQRTIQMVENLPKQANRNWQPNGRPRNNSNFNNNRNWSR

SEQ ID NO: 3872 - protein, 369 aa, Ralstonia metallidurans
MRRGRARSVARPAGGGRPDRAGPGRYQEVIREGVVMSYRVEIAETQQVFMVAPGESVLDAALRCGVNLAHECTFGGCGTCRVRVVDGAVTYEEFPMGLTEEEDAAGFALACQARPAGDLVISTARAAEPAIPARRTTATVQAITSLGPDVLHLRLALSDDEAFAFEPGQYMKILLEDGSHRSFSMASAPNGNTVDFHVRQIAGGRFTTGQLPQLRPGDKLDVEVPHGSFSLRKEDYRPLLMVATGTGLAPIKSMLEALMDDPDCPPVWLYWGMRSAADLYLHDEIARWGERLYDFQYVPVLSRADDTWQGRRGYVHDAVAADIGDLSEHAIYLCGSPNMIHDAKQTFMVLGAQAPFIYSDGFTFQHAPG

SEQ ID NO: 3873 - protein, 1277 aa, Streptococcus pyogenes SSI-1
MKMKKISKCAFVAISALVLIQATQTVKSQEPLVQSQLVTTVALTQDNRLLVEEIGPYASQSAGKEYYKHIEKVIVDNDVYEKSLEGERTFDINYQGIKINANLIKDGKHELTIVNKKDGDILITFIKKGDKVTFISAQKLGTTDHQDSLKKDVLSDKPVPQNQGTQKVVKSGKNTANLSLITKLSQEDGAILFPEIDRYSDNKQIKALTQQITKVTVNGTVYKDLISDSVKDTNGWVSNMTGLHLGTKAFKDGENTIVISSKGFEDITITVTKKDGQIHFVSAKQKQHVTAEDRQSTKLDVTTLEKAIKEADAIIAKESNKDAVKDLAEKLQVIKDSYKEIKDSKLLADTHRLLKDTIESYQAGEVSINNLTEGTYTLNFKANKENSEESSMLQGAFDKRAKLVVKADGTMEISMLNTALGQFLIDFSIESKGTYPAAVRKQVGQKDINGSYIRSEFTMPIDDLDKLHKGAVLVSAMGGQESDLNHYDKYTKLDMTFSKTVTKGWSGYQVETDDKEKGVGTERLEKVLVKLGKDLDGDGKLSKTELEQIRGELRLDHYELTDISLLKHAKNITELHLDGNQITEIPKELFSQMKQLRFLNLRSNHLTYLDKDTFKSNAQLRELYLSSNFIHSLEGGLFQSLHHLEQLDLSKNRIGRLCDNPFEGLSRLTSLGFAENSLEEIPEKALEPLTSLNFIDLSQNNLALLPKTIEKLRALSTIVASRNHITRIDNISFKNLPKLSVLDLSTNEISNLPNGIFKQNNQLTKLDFFNNLLTQVEESVFPDVETLNLDVKFNQIKSVSPKVRALIGQHKLTPQKHIAKLEASLDGEKIKYHQAFSLLDLYYWEQKTNSAIDKELESIEEYQQLLQEKGSDTVSLLNDMQVDWSIVIQLQKKASNGQYVTVDEKLLSNDPKDDLTGEFSLKDPGTYRIRKALITKKFATQKEHIYLISNDILVAKGPHSHQKDLVENGLRALNQKQLRDGIYYLNASMLKTDLASESMSNKAINHRVTLVVKKGVSYLEVEFRGIKVGKMLGYLGELSYFVDGYQRDLAGKPVGRTKKAEVVSYFTDVTGLPLADRYGKNYPKVLRMKLIEQAKKDGLVPLQVFVPIMDAISKGSGLQTVFMRLDWASLTTEKAKVVKETNNPQENSHLTSTDQLKGPQNRQQEKTPTSPPSAATSIANLTDLLAKKATGQSTQETSKTDDTDKAEKLKQLVRDHQTSIEGKTAKDTKTKKSDKKHRSNQQSNGEESSSRYHLIAGLSSFMIVALGFIIGRKTLFK

SEQ ID NO: 3874 - protein, 498 aa, Triticum aestivum
MDTITVVENVFGEVERKVQKSYWEEHSKDLTVESMMLDSRAKDLDKEERPEVLAILPSYAGKTVLELGAGIGRFTGELAKEAGHVIALDFIDSVIKKNEEINGDIYKNITFMCADVTSPELKIEDNSIDIVFSNWLLMYLNDEEVEKLIGRIVKWLKPGGHIFIRESCFHQSGDSKRKVNPTHYREPRFYTKVFKECHSYDQDGNSFELSLVTSKCIGAYVKSKKNQNQICWLWEKVKCTEDKGFQRFLDNVQYKSTGILRYERVFGEGYVSTGGFETTKEFVDKLDLKAGQKVLDVGCGIGGGDFYMAETYDVHVLGIDLSINMVSFAIERAIGRSCSVEFEVADCTTKEYAENTFDVIYSRDTILHIQDKPALFRNFFKWLKPGGKVLISDYCRSPGTPSEEFAAYIKQRGYDLHDVKTYGKMLEDAGFHDVVAEDRTDQFLRVLERELGETEKNKEAFLADFTQEDYDDIVNGWSAKLKRSSAGEQKWGLFIATK

SEQ ID NO: 3875 - protein, 315 aa, Lupinus angustifolius
MSLLSDLINLNLSDTTEKIIAEYIWVGGSGVDLRSKARTLSGPVNDPSKLPKWNYDGSSTGQAPGKDSEVILWPQAIFKDPFRRGNNILVICDTYTPSGKPIPTNKRHAAAKIFSHPDVAAEEPWFGIEQEYTLLQKDIHWPIGMALGGFPGPQGPYYCGTGAEKAFGRDIVDSHYKACLYAGINISGINAEVMPGQWEFQVGPSIGISAGDELWVARYILERITEIAGVVLSLDPKPIPGDWNGAGAHTNYSTKSMRNDGGYEVIKQAIEKLEKRHNEHIAAYGEGNERRLTGRHETADISTFSWGVANRGASI

SEQ ID NO: 3876 - protein, 373 aa, Lactobacillus plantarum WCFS1
MKIKAAVVDKVNDPFVIKDDIELAEMKATDLQIKMVATGICHSDEAIRRGDASLGYPVILGHEGSGIVEKVGSEVTNFEVGDHVILSFYADGTCDNCLKGMPTKCRNYADYNLSGTRPDGSDHFQENGHHISDMFDQSSFTTHTVVDQRNAVKVPKELDLRRLGPLGCGYVTGSGTVLNSLQPRPGQTIAVFGTGAVGLAAMMAGKISGCTEVIAVDIVDSRLELAKELGATHAINSKEEDPVEAIKKLTHGYGVDFAVDTTGVEPVMVSAIHALAQGGTAALIAVTAKNITISSWNDLCVDDKKVIGVNMGDAIPGVDIPRLIDFYQHGMFPFEKTEKFYKFEDINQANADSGSGKTIKPVLIIDEDYQPGK

SEQ ID NO: 3877 - protein, 349 aa, Bradyrhizobium japonicum USDA 110
MTSTALAATLFGPEDLRMIEHPLDKLASGMVRIRFGAGGICGSDMHYFRHARTGDFVVKSPLVLGHEISGEVVEISGSAANLKVGDRVAVNPSRWCGHCVACREGRPNLCENIYFMGSASKTPHMQGGFANYFDAIPAQCVKIPDHVSYQAAALAEPLAVCLHAVARAGNIEGKRGIIFGAGPIGLLTMLAAHRAGMADITVADIAPAPLAFASRLGASHVENVSGGEEGLKAQAAARPYDVAFEVSGTAAGLASAIGIVRRGGVVVQIGNLPGGQIPTPSNAVMAKEIDLRGSFRFGFEFMTAVELISAGSVDVLSLVTAERPLSTAPDALRLALDRSQSVKVVLTAN

SEQ ID NO: 3878 - protein, 392 aa, Malpighia stevensii
DLEPVNPADVPVTAAGALKSYKLAAKAISRLQSLPSGNISLLCDVLVKEVRDLTGYDRVMVYKFHEDEHGEVVSECRRSDLESYLGLHYPATDIPQASRFLFMKNKVRMICDCVAPPVKVIQDDRLPQPLSLCGSTLRSPHGCHAQYMTNMGIIASLVMSVTVNEDDDMVDGDQPQMARKLWGLVVCHHTSTRFVPFPLRYACEFLIQVFGVQINKEVELAAQVREKHILQIQTMLCDMLLRDAPVAIITQSPNVMDLVKCDGAALYFKNKTWLLGVTPTEEQIRDIAEWLLEYHSGNTGLSTDSLMEAGYPGASALGDVVCGMAAVSITSRDFLFWFRSHTAKEIKWGGAKHDPDDKDDGRKMHPRSSFKAFLEVVKWRSMPWEDVEMDAI

SEQ ID NO: 3879 - protein, 391 aa, Acorus gramineus
PYEVPMTAAGALQSYKLAAKAIARLQSLPGGSMERLCDTMVREVFELTGYDRVMAYKFHEDDHGEVVAEITKQGLEPYLGLHYPATDIPQAARFLFMKNKVRMICDCRAKPVKVFQDEKLTIDLAFCGSTLRAPHSCHLQYMENMDSIASLVMAVVINDGDDDDDHVGDNNNDNSKKKRLWGLVVCHNTSPRFVPFPLRYACEFLTQVFAIHVHKELELENQMPEKNILRTQTLLCDMILRDAPLGIVSQTPNIMDLVKCDGAALLYKDKIWQLGTTPTERQIRDIAIWLTDYHMDSTGLSTDSLHDAGYPDALALGDVVCGMAAARITSKDILFWFRSPTTSEIQWGGAKHERSDQDDGRRMHPRSSFKAFLEVVKTRSLPWKDYEMDAI

SEQ ID NO: 3880 - protein, 351 aa, Vibrio parahaemolyticus RIMD 2210633
MKNNAFNALLGTELPVIQAPMAGVQDSQMAIAVSNVGGLGSLPCGMLNKDAIVKELQLIQQATNRPFNLNFFCHEMPKYDANKHEEWQKTLQPYFAEVGATVQAQPNAPTRMPFNHDIADAIEPFAPPVISFHFGFPADDLLARIRGWGGKILSTATTVDEALWLEAKGVDGIIAQGLEAGGHRGMFLSDDLSTQLGLLALLPQIVKRVNLPVIAAGGIANKSGVEAALKLGASAVQVGSAYLLCDEAKTSSLHRYAIASERAQHTAVTNVFSGRPARGIVNRAMSELGYICESAPKFPYASIEMTQLRALMEKQNRDEFTPLWCGQNSSGCKEVSAAEMTLSLVEGIDLN

SEQ ID NO: 3881 - protein, 462 aa, Bacillus subtilis
MMSSLFRKKPLETLSAQSKSKSLARTLSAFDLTLLGIGCVIGTGIFVITGTVAATGAGPALIISFILAGLACALAAFCYAEFSSSIPISGSVYSYSYVTLGELLAFLIGWDLMLEYVIALSAVATGWSSYFQSLLAGFNLHIPAALTGAPGSMAGAVFNLPAAVIILLITAIVSRGVKESTRFNNVIVLMKIAIILLFIIVGIGYVKPDNWSPFMPFGMKGVILSAATVFFAYLGFDAVSNASEEVKNPQKNMPVGIISALAVCTVLYIAVSLVLTGMMPYAKLNVGDPVSFALKFVGQDAVAGIISVGAIIGITTVMLALLYAQVRLTFAMSRDGLLPGLFAKVHPSFKTPFRNTWLTGIVAAGIAGFINLGTLAHLVNMGTLAAFTVISIAVIVLRKKHPEIKASFRVPFVPVVPIISAGICLWFMYSLPGVTWLSFVIWIAVGTLVYFLYSRKHSLLNK

SEQ ID NO: 3882 - protein, 327 aa, Desulfovibrio desulfuricans G20
MYGCLKTAVLYAVNCTTFRTDTGDVRMRPRIIVHGGAWTIPAERRQEHLDGVRAAVEAAWPLLEQGADALDAVQAAVNVMEADPTFDAGRGAVLNADGQIELDAAIMDGRTLNYGGVAGVRRFMTPVDIARKVLETEFCLLIADGAERFARECGLPEVDPRELLTDRELELYQKLCSREGYCTHDAFKPVPQGTVGAVAMDVRGNIAAATSTGGTPCKKPGRVGDSPLCGAGTYADNETGGASATGFGEGIIRTLMTRSACDCLRGHDAMQAARMGIELLHRRVQGHAGLIMLDNRGEYGFYHNTDHMAFAYARHDGSVHASVHMAE

SEQ ID NO: 3883 - protein, 577 aa, Zea mays
  unsure (1)..(577): unsure at all Xaa locations
MSSAAGGGYGAAGGAEHQHLLLGQASGQLYHVPQHSRREKLRFPPDPADSPPPTAWPAPPPFYSYASSSTSSYSPHSPTLAHTQLVAHALPAGAGAQIPSQNFALSLSSASSNPPPAPRRQLAAGVAAGPYGPFTGYAAVLGRSRFLGPAQKLLEEICDVGGRPPHLDRRSDDEGMLDMDAAGGVDHEMDGGDCATAEAXSLSGAEQQWRKTRLISLMDDVCRRYKQYYQQLQSVISSFETVAGLSNAAPFAFMALRTMSKHFKCLKGMVMSQLRNTSKVIANHGIIAKDDMANFALMGGGAGLLRGNSVNAFSQPHNIWRPQRGLPERAVSVLRSWLFEHFLHPYPTDSDKQMLAKQTGLTRNQVSNWFINARVRLWKPMVEEIHNLEMRQLHKTTSVDQNQLGMQQQNHHSSDGSGRPSSDPSNSQRGQSSGMTRNLSSRAPRHIQDDELSQMPHDMAGQVSFAYSGLPPAHHGLALSHHHHPQQAQAEAVGVGGVAASSGGGVSLTLGLHQNNNNNNRAYIAEPLPAALPLSLPHRFGLEDVSDAYVMGPFGGQDRHFSKGIGGGHNLLHDFVG

SEQ ID NO: 3884 - protein, 925 aa, Medicago truncatula
MMELQVIRIFRLVVAFVLCLCIFIRSASSATKGFESIACCADSNYTDPKTTLTYTTDHIWFSDKRSCRQIPEILFSHRSNKNVRKFEIYEGKRCYNLPTVKDQVYLIRGIFPFDSLNSSFYVSIGVTELGELRSSRLEDLEIEGVFRATKDYIDFCLLKEDVNPFISQIELRPLPEEYLHGFGTSVLKLISRNNLGDTNDDIRFPDDQNDRIWKRKETSTPTSALPLSFNVSNVDLKDSVTPPLQVLQTALTHPERLEFVHDGLETDDYEYSVFLHFLELNGTVRAGQRVFDIYLNNEIKKEKFDVLAGGSKNSYTALNISANGSLNITLVKASGSEFGPLLNAYEILQARSWIEETNQKDLEVIQKMREELLLHNQENEALESWSGDPCMIFPWKGITCDDSTGSSIITKLDLSSNNLKGAIPSIVTKMTNLQILNLSHNQFDMLFPSFPPSSLLISLDLSYNDLSGWLPESIISLPHLKSLYFGCNPSMSDEDTTKLNSSLINTDYGRCKAKKPKFGQVFVIGAITSGSLLITLAVGILFFCRYRHKSITLEGFGKTYPMATNIIFSLPSKDDFFIKSVSVKPFTLEYIEQATEQYKTLIGEGGFGSVYRGTLDDGQEVAVKVRSSTSTQGTREFDNELNLLSAIQHENLVPLLGYCNEYDQQILVYPFMSNGSLLDRLYGEASKRKILDWPTRLSIALGAARGLAYLHTFPGRSVIHRDVKSSNILLDQSMCAKVADFGFSKYAPQEGDSYVSLEVRGTAGYLDPEYYKTQQLSEKSDVFSFGVVLLEIVSEREPLNIKRPRIEWSLVEWAKPYIRASKVDEIVDPGIKGGYHAEALWRVVEVALQCLEPYSTYRPCMVDIVRELEDALIIENNASEYMKSIDSLGGSNRYSIVMDKRALPSTTSTAESTITTQTLSHPQPR

SEQ ID NO: 3885 - protein, 136 aa, Triticum aestivum
MSILWEKSRAWRWLVGRTRDSKPFFFTFAALCGVVPGVVGYGVMQLTSSRNDKLEAHLRSNARPETTMMGQVNRERLAEFLGEIQRKENTNDRYVAALKGETLTRKRYERIQPVPQQAAQENAKDQQATKESAKAK

SEQ ID NO: 3886 - protein, 342 aa, Zea mays
ISNFDQGIGTPSGRNPQKVKTSYDASKDVPSVDPSAGISERPSPMSVLDSSFDHEDLFPSSRNPNSLAVDDERQTLGEPWKPSVTKPTEVGMQSKNNKLANVVSLLQKLEQLSVSKDEDAPPVDHMAFLCETESPDHRYVSEILLASGLLMKELGSGQAGLQLQLHSSGYPINPDLFHVLEQRKAGWASIPDGIHQSRSGAKSDPKRAHRKLVFDTANELLLQKFEKETTVYAVSSSTGAKDHPPAKALSGQQLLKFVSSEIEGMGTERSSTCQMEGGVIPDAEILQRLQGWTSFSRELPGMVLEIERSVFKELVDEVVHGESADGPEMKAAGRRRRRRLFA

SEQ ID NO: 3887 - protein, 143 aa, Glycine max
MTEAHIRKKPGMASVKDMPVLQDGPPPGGFAPVRFARRIPNKGPSAVAIFLTTFGAFSWGMYQVGQGNKIRRALKEEKYAARRSILPVLQAEEDERFVKEWHKYLEYEAEVMKDVPGWKVGESVYHSSRWVPPASGELRPDVW

SEQ ID NO: 3888 - protein, 365 aa, Saccharomyces cerevisiae
MVLAKQWVLKNLPTPGEPFNFHFHDPACTFELIEKELSSEQLKDGELLLETTYLSNDPAQKFWISSMDKNYAKGVQPGEIIPARGIGKVLASRNKAFSPGDYVSAVTGWTTHAIISQENVQGLRKLDKNKVGKLWWYLSVLGGTSLTAYFIFFTYAQLQEREEDYGKVYLISGAAGAVGTVCIQLALNVFKASKVIAIAGGPEKVAFVESFGDNVVGVDYKDPSFKQKLIEAAGGENTVDYFIDNVGSNVLEAGVLLLKQRAMLIACGAISAYNDPSKFVFKGYSFILTKRLVVKGVLVTDNIDDFPKALDKLGSLVKHGKIDLLKSATLEDGTGDKFKNVPLIWKGLFSGVNKGKLITKVNNEE

SEQ ID NO: 3889 - protein, 216 aa, Escherichia coli K12
MLDLFADAEPWQEPLAAGAVILRRFAFNAAEQLIRDINDVASQSPFRQMVTPGGYTMSVAMTNCGHLGWTTHRQGYLYSPIDPQTNKPWPAMPQSFHNLCQRAATAAGYPDFQPDACLINRYAPGAKLSLHQDKDEPDLRAPIVSVSLGLPAIFQFGGLKRNDPLKRLLLEHGDVVVWGGESRLFYHGIQPLKAGFHPLTIDCRYNLTFRQAGKKE

SEQ ID NO: 3890 - protein, 251 aa, Xylella fastidiosa 9a5c
MEHVSMITDNSPRFRALVTGGSGHLGTAICRQLIADGAHVIVHANHHRSRADTLVECLCAEGGSAEVIVFDVTAAQASKTALENLLQTGPIQIIINNAGIHDDAPMAGMSSTQWHRVIDVSLHGFFNVTQPLLLPMARTRWGRIVCISSVTAVLGNRGQSNYAAAKAGLHGAARSLAREMANRGITVNVVAPGVIESEMVGKTFTPEMIKQLVPTGRPGRPEEVAALIGFLCSEKAGYINGQVIGINGGMG

SEQ ID NO: 3891 - protein, 86 aa, Glycine max
EKDKDRRQSKELEEEEEEEEKKMNLRWMEAVLPLGIIAGMLCVMGNAQYYIHRAAHGRPKHIGNDMWDVAMERRDKKLIEQASPSN

SEQ ID NO: 3892 - protein, 453 aa, Glycine max
  unsure (1)..(453): unsure at all Xaa locations
MATWVLSECGLRPLPPVFPRSTRPISCQKPSKSRFLSTNKGVPDLNLQARGLTCCSFRDRKWELXLSAPLKVATNEGEEEERTNGANNGVGEEVSEFDPSAPPPFKLADIRAAIPKHCWVKDPWKSMSYVVRDVIVVFGLAAAAAYLNNWVVWPLYWAAQGTMFWALFVLGHDCGHGSFSNNPKLNSVAGHLLHSSILVPYHGWRISHRTHHQNHGHVENDESWHPLPEKIFKSLDNVTRILRFTLPFPLLAYPIYLWSRSPGKTGSHFNPDSDLFVPSERKDVITSTICWTAMAALLVGLGFVMGPVQLLKLYGIPYAIFVMWLDLVTYLHHHGHEDKLPWYRGEEWSYLRGGLTTIDRDYGWINNIHHDIGTHVIHHLFPQIPHYHLIEATEAAKPVLGQYYREPKKSSPLPIYLIGELLRSMKKDHFVSDSGDIVYYQTDPTLSSSSTSQ

SEQ ID NO: 3893 - protein, 325 aa, Triticum aestivum
MGVKGFVEGGIASIVAGCSTHPLDLIKVRMQLQGESSAAAAAVPQPALRPALAFQAGAHTVTLPHAPTPVPKPGPIGICTQILRAEGAAGLFSGISATMLRQTLYSTTRMGLYDILKKRWTQENGGVLPLHLKIAAGLIAGGVGAAVGNPADLAMVRMQADGRLPLADRRNYRSVGDAIARMTRDEGVRSLWRGSALTVNRAMIVTASQLATYDQAKEAILARRGPAADGLGTHVAASFAAGIVAAAASNPVDVVKTRVMNMKVAPGAPPPYAGALDCALKTVRSEGVMALYKGFIPTVSRQGPFTVVLFVTLEQVRKVFKDVEF

SEQ ID NO: 3894 - protein, 119 aa, Glycine max
  unsure (1)..(119): unsure at all Xaa locations
MADLKSTFLNVYSVLKSELLHDPAFEFSDDARNWVDRMLDYNVPGGKLNRGLSVIDSYRLLKERQALNDDEIFHASALGWSIEWLQAYFLVLDDIXGMIAANDGVLLRNHIPRILKKHF

SEQ ID NO: 3895 - protein, 152 aa, Glycine max
MKEGEQQRVPLRERAEWSDVTPLPQNDGPNPVVPIQYTEDFSQVMDYFRAVYLADERSPRALALTAEAVQFNSGNYTVWHFRRLLLESLKVDLNAELDFVERMAAENSKNYQMWHHRRWVAEKLGPEARKNELEFTKKILSVDAKHYHAWSH

SEQ ID NO: 3896 - protein, 296 aa, Bacillus anthracis str. A2012
MVIQWFPGHMAKARRQVTEKLKLIDVVIELVDARLPLSSRNPMIDEIITHKPRLVVLNKADMADDRLTKQWIAYFKEKGHMAISINAQAGQGMKEIAAACKVLVKEKFDKMVAKGIRPRVIRALIVGIPNVGKSTLINKLAKKNIAKTGDRPGVTTAQQWIKVGKEMELLDTPGILWPKFEDELVGLRLATTGAIKDSILNLQDVAVYALRFMEKHYPERLKERYNLNDIPEDIVELFDAIGKNRGCLMGGGMIDYDKTSELVLRELRGGKLGKMTFETPEEFAEQTEDAEKVEEV

SEQ ID NO: 3897 - protein, 156 aa, Nicotiana glutinosa
MAEVEYRCFVGGLAWATTDQTLGDAFSQYGEILDSKIINDRETGRSRGFGFVTFKDEQAMRDAIEGMNGQDLDGRNITVNEAQSRGSGGGGGGYRGGRGGGGGGYGGGGRREGGYGGGGGGYGGGRREGGYGGGGGYGGGRREGGYGGGSEGNWRN

SEQ ID NO: 3898 - protein, 620 aa, Candida albicans
MSEQAQPQASADQQQHQHNHHHHHHHHHHNENQSQQQVPIDPAANPANRIGRYQILKTLGEGSFGKVKLAQHLGTGQKVALKIINRKTLAKSDMQGRVEREISYLRLLRHPHIIKLYDVIKSKDEIIMVIEFAGKELFDYIVQRGKMPEDEARRFFQQIIAAVEYCHRHKIVHRDLKPENLLLDDQLNVKIADFGLSNIMTDGNFLKTSCGSPNYMPAPEVISGKLYAGPEVDVWSAGVILYVMLCGRLPFDDEFIPALFKKISNGVYTLPNYLSAGAKHLLTRMLVVNPLNRITIHEIMEDDWFKQDMPDYLLPPDLSKNKNSKIDVDEDVIRALSVTMGYDRDCKIVNVIEKANKQVAAGNSSSQQSKSSNEILDAYLLMKENHALVKDLKKSKSENIESFLSQSPPPSPFPNRGSTSSAPGVQQSLTYQTLATVPDLSTLPNSTIAILPTSLPSIHRAYMAETKQNGDPSQQHAPPPTKKSKTRWHFGIRSRSYPLDVMGEIYRALKNLGAEWAKPTEEELWTIRVRWKYDTSAQFECGSAPNLMKMQIQLFQLEPNNYLVSFKFSGWESAHGNAGTDSPQSHRQQDLDEVGSFSAYPFLHLATRLIMELAVNSQSG

SEQ ID NO: 3899 - protein, 152 aa, Zea mays; identical to SEQ ID NO: 3163

SEQ ID NO: 3900 - protein, 494 aa, Zea mays
MELDLNVAEVAPEKPAAALEASDSGSSGSSVLNAEAASAGGGGPAPGEEGSSSTPAVLEFSILRSDSDAAGADADDGDATPSPPRHHHQQLVTRELFPAPQHWAELGFFRAGPQQQPDIRVLPHPHPHPPPPPPAQPQPAKKSRRGPRSRSSQYRGVTFYRRTGRWESHIWDCGKQVYLGGFDTAHAAARAYDRAAIKFRGVDADINFNLSDYDDDMKQMKSLSKEEFVHALRRQSTGFSRGSSKYRGVTLHKCGRWEARMGQFLGKKYIYLGLFDSEVEAARAYDKAAIKCNGREAVTNFEPSTYDGELLLTAEASAEVADDVDLNLSISQPASSQSPKRDKNCLGPQLHHHHGRPFDGSAVLKKTKIDAPSELSSAGRPHRSFLPHLVAAEHLPPRSHPFFITHHESDASRRDPSWAAAAAWKVTAAAPPPPTTTLLPLPLPSTSSAAASSGFSNTATTAAAAPSAASSRRFDPPPPSSSSSSSHHHHHHRR

SEQ ID NO: 3901 - protein, 814 aa, Rhizobium etli
MIDKKALLDNMTLAEQVSLLSGDTFWSLPPIDRLGIGRLRLTDGPNGARGAGSFVGGVTAAAFPVGIAIGASWNPDLAKEIGSALGDEVLSKGAHVSLAPTVNIQRSVTNGRNFECFSEDPILTAELAVGYIEGLQSTKVGATIKHFVGNESEIERTTISSDIDERTLREVYLIPFETAVKRAKVWAVMSSYNKLNGTYTAESHWLLNEVLRGDWGFNGVVMSDWFGSRSTAPTVNAGLDLEMPGPTRDRGSKLLAAVEGGEVSVETIRACVRNILTLMERTGAINDHREFKEYAIDQPKHRALIRRAGAESAVLLQNDGILPLAQQGMVAIIGPNAKVAQVMGGGSAQLNPHYVISPWQGLVDALGEENLCYAQGCNNYRFQPLIENPTTFEFFQGRELAGEPVKVVEEPSSLGVWLPPVAEGFVDPLRFSARMRTIFTASEAGVYRVGLTSAGLGRVYVDGRLVVDAWASWIRGTTFFEEGCEEVVGEITLEAGRTYEVVAEYARHDHVNLYIAAIRVGIGRFSAEAEIAEAAAVAAKADHAVVFVGRTGDWDTEGSDLRGIALPGLQNQLVEAVIAANPNTIVVLQTGGPVEMPWLSGARAVLQCWYPGQEAGNAIADVLLGKAEPSGRLAQTFPVRWADNPTHTEDDAVYPGKDGHVRYDEGVFVGYRHYDRHGIKPLFPFGHGLGYSSFAMSDLTVGLPDAAGAVTVTLELTNISERPGSAVVQIYVGDVEASIPRPVKELKAFSKIALEPGEKRRLRFILDARTFAFFDTTERRWRIEAGEFAVMAGFSATDIRLSLTVTQKGAVLAL

SEQ ID NO: 3902 - protein, 489 aa, Escherichia coli K12
MVSETKTTEAPGLRRELKARHLTMIAIGGSIGTGLFVASGATISQAGPGGALLSYMLIGLMVYFLMTSLGELAAYMPVSGSFATYGQNYVEEGFGFALGWNYWYNWAVTIAVDLVAAQLVMSWWFPDTPGWIWSALFLGVIFLLNYISVRGFGEAEYWFSLIKVTTVIVFIIVGVLMIIGIFKGAQPAGWSNWTIGEAPFAGGFAAMIGVAMIVGFSFQGTELIGIAAGESEDPAKNIPRAVRQVFWRILLFYVFAILIISLIIPYTDPSLLRNDVKDISVSPFTLVFQHAGLLSAAAVMNAVILTAVLSAGNSGMYASTRMLYTLACDGKAPRIFAKLSRGGVPRNALYATTVIAGLCFLTSMFGNQTVYLWLLNTSGMTGFIAWLGIAISHYRFRRGYVLQGHDINDLPYRSGFFPLGPIFAFILCLIITLGQNYEAFLKDTIDWGGVAATYIGIPLFLIIWFGYKLIKGTHFVRYSEMKFPQNDKK

SEQ ID NO: 3903 - protein, 365 aa, Zea mays
  unsure (1)..(365): unsure at all Xaa locations
MAGTVTVPGSSTPSTPLLKDELDIVIPTIRNLDFLEMWRPFFQPYHLIIVQDGDPTKTIKVPEGFDYELYNRNDINRILGPKASCISFKDSACRCFGYMVSKKKYIYTIDDDCFVAKDPSGKDINALEQHIKNLLSPSTPFFFNTLYDPYREGADFVRGYPFSLREGAHTAVSHGLWLNIPDYDAPTQLVKPKERNERYVDAVMTIPKXGTLFPMCGMNLAFDRDLIGPAMYFGLMGDGQPIGRYDDMWAGWCVKVICDHLSLGVKTGLPYIWHSKASNPFVNLKKEYKGIFWQEDIIPFFQNVTIPKDCDTVQKCYIYLSGQVKEKLGTIDPYFVKLGDAMVTWIEAWDELNPSTPAAANGKAK

SEQ ID NO: 3904 - protein, 252 aa, Oryza sativa
  unsure (1)..(252): unsure at all Xaa locations
AAALELCIPRAVVNSARGRGGLASPPPPGSVRVRFDFGFFFGSGVGGKAXAAPDVEYRCFVGGLAWATDDRSLEAAFSTYGEILESKIINDRETGRSRGFGFVTFSSEQAMRDAIEGMNGKELDGRNITVNEAQSRRSGGGGGGGYGQRGGGGGYGGGGYGGGGGGGGYGQXRREXAATAVAVATVAAXVVAAATXVVATAAAAAATPTGTGGTDRGGPHGQVIYLSNRAPIXIIIRSLSSLGWCGTITTWC

SEQ ID NO: 3905 - protein, 392 aa, Rhynchophora phillipsonii
DLEPVNPADVPVTAAGALKSYKLAAKAISRLQSLPSGNISLLCDVLVKEVRDLTGYDRVMVCKFHEDEHGEVVSECRRSDLESYLGLHYPATDIPQASRFLFMKNKVRMICDCVAPPVKVVQDERLPQPLSLCASTLRSPHGCHAQYMTNMGIVASLVMSVTVNEEDDMVDSDQPQMARKLWGLVVCHHTSTRFVPFPLRYACEFLIQVFGVQINKEVELAAQVREKHILQIQTMLCDMLLRDAPVAIITQSPNVMDLVKCDGAALYFKNKTWLLGVSPTEEQIRDIAEWLLEYHSGNTGLSTDSLMDAGYPGASALGDAVCGMAAVSITSRDFLLWFRSHTAKEIKWGGAKHDPDDKDDGRKMHPRSSFKAFLEVVKWRSMPWEDVEMDAI

SEQ ID NO: 3906 - protein, 355 aa, Schizosaccharomyces pombe
MTGVHEGTVLVTGGAGYIGSHTCVVLLEKGYDVVIVDNLCNSRVEAVHRIEKLTGKKVIFHQVDLLDEPALDKVFANQNISAVIHFAGLKAVGESVQVPLSYYKNNISGTINLIECMKKYNVRDFVFSSSATVYGDPTRPGGTIPIPESCPREGTSPYGRTKLFIENIIEDETKVNKSLNAALLRYFNPGGAHPSGELGEDPLGIPNNLLPYIAQVAVGRLDHLNVFGDDYPTSDGTPIRDYIHVCDLAEAHVAALDYLRQHFVSCRPWNLGSGTGSTVFQVLNAFSKAVGRDLPYKVTPRRAGDVVNLTANPTRANEELKWKTSRSIYEICVDTWRWQQKYPYGFDLTHTKTYK

SEQ ID NO: 3907 - protein, 243 aa, Oryza sativa
  unsure (1)..(243): unsure at all Xaa locations
XTRPPASPATPVDAYANAPPPWEDVLLRIPGAAXLHLIDRHRSYPLAAGDLSLLRIRSGDTSLAAIALLHPIQWPLARDVASVKLDPCHYSFSLXXVPPSADDPNPGPLHYGLTLSHPDPRLDGILATYTSFSVQSVVXXGEALASKVRDEVEAAAYWTAVAPNVEEYGGKVANAIATGAGHLAKGILWCSELTVDRLRWGNEVLKRRMQPGDAAPEVSPEMLRADQKVVTLSPFYYQGMNAV

SEQ ID NO: 3908 - protein, 201 aa, Chlamydomonas reinhardtii
  unsure (1)..(201): unsure at all Xaa locations
MLLTRKNVAVRPARAARRDVRAMSLLGNLFGGGSKPTSSTSNFHQLSALDIDKKNVDFKSLNNRVVLVVNVASKXGLTAANYKEFATLLGKYPATDLTIVAFPCNQFGGQEPGTNAEIKAFASARGFSGAGALLMDKVDVNGANASPVYNFLKVAAGDTSDIGWNFGKFLVRPDGTVFGRYAPTTGPLSLEKYIVELINSR

SEQ ID NO: 3909 - protein, 331 aa, Agrobacterium tumefaciens str. C58 (Cereon)
MKYNHCGKTGLKLPAISLGLWHNFGNDTPHQTKQAICRRAFDLGITHFDLANNYGPPPGSAETAFGEILKTDFRGYRDEMIISSKAGYNMWPGPYGEWGSRKYLISSCDQSLKRMGLDYVDIFYSHRFDPNTPLEETCGALDQIVRSGKALYVGISSYNSKRTREAAAILKDLGTPCIIHQPSYSMINRWIEEDGLVDTLEELGIGSIVFSPLAQGMLTTKYLGGVPDGSRASQSKSLNPAFLNERNVENIRALNSIAERRGQTLAQMAIAWVLRGGRITSALIGASRVEQVEDCVKALDNAEFSTEELAEIDRYAKDADINLWAKSAERV

SEQ ID NO: 3910 - protein, 342 aa, Solanum tuberosum
MTRRCSHCSTNGHNSRTCPNRGVKLFGVRLTDGLIRKSASMGNLTHFASGSGGGSTPLNGVVHDSPGDTPDHPAVGGGSADGYASEDFVAGSSSSRERKKGVPWTEEEHRMFLLGLQKLGKGDWRGIARNYVISRTPTQVASHAQKYFIRQSNMSRRKRRSSLFDIVADESGDTPMVSRDFLADDPAQAEMQSNNLLPPTPAVDEECESMGSAASANSIDGEHALPIPESSQYQHPLVYPAYVAPFYPMPYPCWPGYTAEPAIAETHEVLKPIAVHSKSPINVDELVGMSKLSLGESIGDAAKPPSLSLKLVEGSSRQSAFHANPSSGSSGMNSSHNPIHAV

SEQ ID NO: 3911 - protein, 328 aa, Pseudomonas aeruginosa PAO1
MGVFRTRFTETFGVEHPIMQGGMQWVGRAEMAAAVANAGGLATLSALTQPSPEALAAEIARCRELTDRPFGVNLTLLPTQKPVPYAEYRAAIIEAGIRVVETAGNDPGEHIAEFRRHGVKVIHKCTAVRHALKAERLGVDAVSIDGFECAGHPGEDDIPGLVLLPAAANRLRVPIIASGGFADGRGLVAALALGADAINMGTRFLATRECPIHPAVKAAIRAADERSTDLIMRSLRNTARVARNAISQEVLAIEARGGAGYADIAALVSGQRGRQVYQQGDTDLGIWSAGMVQGLIDDEPACAELLRDIVEQARQLVRQRLEGMLAGV

SEQ ID NO: 3912 - protein, 441 aa, Pyrococcus horikoshii
MAVIEELPAIKFERVGAHSHIKGLGLDENGKAKFIGDGMVGQVKAREAAGIAVKLIKQGKLAGKGILLVGPTGSGKTAIAMGIARELGEDVPFVQISGSEIYSAEVKKTEFLKQALRRAIGVRISEERKVYEGMVEKMEIRKTRHPFNPYIEIPESIRITLKTKDDKKTIRAGREIAYQLLDMGVEEGDVIQIDAETGRVSKIGTTKEEEGLFFKKKVELPTGPVLKIKEFTYTVTLHDLDVVNARAGGIFSLIFGGGMEINDEIRERVDQTVKQWIEEGKATLVPGVLFIDECHMLDIEAFSFLARAMENELAPILILATNRGMTKIRGTDIEAPHGIPVDMLDRLLIINTEPYKKDEIREIIKIRAKEEKVELSEEALEYLADLGEKTSLRYAVQLLAPASIIAGGKRVEKEHVEKAREYFADIKRSISFVEKLEGMLK

SEQ ID NO: 3913 - protein, 175 aa, Cytophaga hutchinsonii
MALIKSVLGKTPQFGENCWLADNATVVGNVEMGEFCSVWFNAVVRGDVNRIKIGNKVNIQDGVCIHCTYEKHATIIGDNVSIGHNAIVHGCIVEENVLIGMGAIVMDGCYIEKNSLIAAGAILLEGTRVESGSLYAGIPAKKVKDLAPEQFNTLIDRIANNYVTYAGWFKEEEEK

SEQ ID NO: 3914 - protein, 407 aa, Triticum aestivum
MEHHVRPRTHARTPEESISQLQQRRRLSGGMAKEGAGGGPDWNGLLKWSLAHGSDGTNPPRALSEEDRKWFMEAMQANTVDVVGRMKEIAQVMKTPDDVLQSHGVTPENIEDMLDELQEHVESIDMANDLHSIGGLDPLLGYLKNSHAGIRAKAAEVVSTVVQNNPKRLQLVMESNGLEPLLTNFRSDPSTTARTKALGAISSLIRNNQSGLAAFRLGNGHAALKDALGSDDARLQRKALHLTQYLLNNKADRNVAEEIGLPNQLIHLASSDDSGVREAALGGLLELARDKTPAARNALPDQDKLKDVLKSRIEGISAMDADDLQAAREERQLVDSLWKECYGEPSSLREKGLVVLPGEDAPQQPPPDVVGKMFEPPLRVWAVPRPAPAEDPDCGSGKKDPPLLLGP

SEQ ID NO: 3915 - protein, 380 aa, Oryza sativa (japonica cultivar-group)
MEALWKQASRLKEQVSRQGVFKPFGAAYGNSENAFTDESEVNLHQRLEKLYLSTRAAKHFQRDIVRGVEGYIVTGSKQVDIGNKLSDDSQKYGTGNTCTSDNTLSKAAMYYGKARSLMEKERGNMLRAFGTQVAEPLRAMVMGAPLEDARHLAQRYDRMRQEAEAQAVEVSRRQNRVRESAPNGDVITKLEAAEYKLEELKSSMVGLGKEAVAAMAAVEAQQQRLTLQRLIAMLLISLALKVEAERAYHQRVLEILDHLEQEMVSERQKIEAPPTPSAENYMAQPPPSYDEVNGMFASSSVDDSVTSVDFFLGEALDSFKAESESELNLSAGDIVIVRKISTNGWAEGECKGKAGWFPHDADGNKMAWKSKLCQGRSTMP

SEQ ID NO: 3916 - protein, 396 aa, Shewanella oneidensis MR-1
MQNMVILGATGSIGASTLSVISANPTAYRVYALVANASVDKMLTLCLAHRPQVAHMVDHKAALALKAQLPAALNIQVTSGEDELIALVTAPAVDTVMAAIVGAAGLVPTLAAVKAGKRVLLANKEALVMSGELFIEATRASGATLLPVDSEHNAIFQCLPEEVQSNLGRCDLAASGISHILLTGSGGPFLTAELSNLAAMTPAQACKHPNWSMGPKISVDSATMMNKGLEFIEARWLFNTQKDQLKVVIHPQSVIHSMVQYRDGSVIAQMGNPDMRTPIAHCMSYPQRIRSGVEPLDFFKVGQLSFCEPDFNRFPCLALAIEACSQGQEATTVLNAANEIAVEAFLQGKIGFTHIGKINEDCLLSVPKQAMASIEDIIALDAQTRIYARELLAKFA

SEQ ID NO: 3917 - protein, 344 aa, Oceanobacillus iheyensis HTE831
MKALVKTELGHGNLHIQNVEEPSVSSHQVKIKVAYAGICGSDIHTYEGHYKVAAPVTLGHEFSGRIVEVGEGVTDFKVGDRVTSETTFSICGECRYCQTGDYNLCNHRKGLGTQQNGGFTNYLIAREESLHHLPDEVDDRSASMTEPLACTYHAIQKINIKPGDLVVVLGPGPIGLLAAQVAKSYGATVMMSGLDNDKIRLDKAKEVGIDYVINIQEEDIKEKIAALTDGYGVDVVLECSGSIHAANQGLDLLRKKGSYAQVGIFPDSHVKFDMEKVIQKEIHVVGSRSQKSADWEPSLQLMKEKKVDAKALVTHEFTIDQWDEAYQAIKDGEAIKVLLKPLQD

SEQ ID NO: 3918 - protein, 450 aa, Glycine max
MEGLAMLKQLIAQLQHLFDTYHSQSSLIFQQQHPRWTTSLDIEDNSVDDFCGLVMTAGKSGSFRMSEPGKPPPTKKSRRDRSRGKSSGRSCTTEVMEQEIWKDFPEDLFEAVIARLPISTFFRFRSVCRQWNSMLNSQSFSQHCTQVTQENPWFYTITHENVNSGAMYDPSLKKWHHPTISTPPTKLIVLPVASSGGLVCFLDIGHRNFFVCNPLTQSFKELPARSVKVWSRVAVGMMANGNFAGSGYKIVWVGCDGEYEVYDSVRNSWSRPGNMPVGMKLPLSLNFRSQAVSIGSTLYFMRSDPDGIVSYDMATGVWKQYIIPAPLHLTDHTLAECDGQVMLVGLLTKNAATCVCIWELQKMTLLWKEVDRMPNIWCLDFYGKHVRMTCLGNKGLLMLSLRSKQMNRLVTYNIAKKEWLKVPGCVVPRGRKRQWIACGTAFHPCLTAVV

SEQ ID NO: 3919 - protein, 151 aa, Zea mays; identical to SEQ ID NO: 743

SEQ ID NO: 3920 - protein, 1136 aa, Picea abies
MSTTRPRAATHSASSGSVSRSSKHSARVITQTPVDAKLQAEFEGSVHSFDYTKSIDISGDSSSVPSETVKAYLQRLQKEMLIQPFGCVLAVEEGSCAVVGYSENAPEMLDVVGGAHAVPSIGGQQQEGGGGGGGLLRIGMDARTLFKPASAAALQKAATFADMHLVNPIFVRCNRSGKPFYAILNRIDAGLVIDFEPVMPSDVPVSAAGALQSYKLAAKAISRLQSLPGGDIRLLCDTVVQEVRELTGYDRVMAYRFHEDEHGEVVAEMRRPDLEPYLGLHYPATDIPQASRFLFMKNRVRMICDCCAPPVNVIQDKRLRQPLSLCGSTLRAPHGCHAQYMANMGSIASLVMSVTTNENGDDSEGGGQQQPQNRRKLWGLVVCHHTSPRVIPFPLRYACEFLMQVFGIQLNKEVELAAQLREKHILRVQPVLCDMLLRDAPVGIVSQTPNIMDLVKCDGAALLYGKRLWLLGTTPTEAQILDIADWLLEHHRDSTGLSTDSLAEAGYPGAASLGDAVCGIAAARITSKDFLFWFRSHTAKEIIWGGAKHDPNDKDDGRRMHPRSSFKAFLEVVKRRSLPWEDVEMDAIHSLQLILRDSFHDIDDSDSKTMIHARLNDLRLQGIDELSAVTNEMVRLIETATVPILAIDSNGLVNGWNTKAAELTGLLADEVIGRPLIDLVQHDSVEIVKKMLYLALQGEEEQNVEIKLKTFGIQEEKGPVVLIVNACSSRDLEENVVGVCFVAQDVTWQRIAMDKFTHLQGDYRAIVQNPNPLIPPIFGADEYGYCSEWNPAMEKLTGWKREEVIGKMLVGEVFGIHRMSCQLKGQDGLTKLRIVLNNAMAGKETEKFPFSFFDRHGKNTEALLSANKRTDAEGIITGVFCFLHVTSTELQQALQVQRMAEQAAMDRLKELAYIRQEIRNPLYGIIFTRKLMESTDLSEEQKQIVQTSALCQRQLVKVLDDADLESIEDGYLELDTIEFTLGTVLDAVVSQGMILSREKGLQLIRDSPEEIKTMCLYGDQLRLQQILSNFLINALRFSTSEGWVGNKVVPTKRHLGSGVNVMHMEFRITHSGQGIPEELIKEMFVHNQDMFQEGLGLYMCQQLVKIMNGDVQYLREAGRSSFIINVEFPLAQTDKQ

SEQ ID NO: 3921 - protein, 593 aa, Oryza sativa (japonica cultivar-group)
MMGAAVTMVDRRMAFAAEADVDSKAAFGFFGGECFVGEGDLVNPAPPPPQQQQVHEGGFAAEDESDGDDDDDDDDDVDDIEELERRMWRDRVRHKRLKELQQSRAGRESRAGDAGGGGRQQRQSQEQARRKKMSRAQDGILKYMLKMMEVCNAQGFVYGIIPEKGKPVSGASDNLRSWWKEKVRFDRNGPAAIAKYQADNAVPGCDGDAGGAAPAGPHSLHELQDTTLGSLLSALMQHCDPPQRRFPLEKGVPPPWWPEGSEAWWPEAGVPKELGPPPYKKPHDLKKAWKVAVLTAVIKHMSPDVDKVRRLVRQSKCLQDKMTAKEIVTWLAVLKQEEDLYLKLHPGALPPPLSAASFNASVSGEYDVEGVDGDEAGNNNLQKAQNDATAFMDLTTTMDAALSNNKFLIMPLMKEEAIDVDFIQKRSEPELMLSSDSHARVYTCGNVQCPHSNYALGFLDRNERNAHQYACKHNAAAAAAESKPPPPHIFEPLGSFDFDLPVDGQRCLAGLMTMYDNDVAAATQMHHHHHQQQQANFFIRDDAPFGGDVAATAAAALEFRFSSNFNVTGGGAVDYGGAMQQPPAKYAGSNWFY

SEQ ID NO: 3922 - protein, 162 aa, Oryza sativa
MAAPDVKYRCFVGGLAWATDDRSLEAAFSTYGEILDSKIINDRETGRSLGFGFITFSSEQSMRDAIEGMNGKELDGRNITVNEAQSRRSGGGGGGYGGGGGGYGGGRGGGGYGGGGGGGYGRREGGYGGGGGYGGGRGGGGGGYGGSRGGGYGGDSGGNWRN

SEQ ID NO: 3923 - protein, 339 aa, Neisseria meningitidis
MKKILVTGGTGFIGSHTVVSLLKSGHQVVILDNLCNSSINILPRLKTITGQEIPFYQGDIRDREILRRIFAENRIDSVIHFAGLKAVGESVAEPMKYYDNNVSGSLVLAEEMARAGVFSIVFSSSATVYGDPGKVPYTEDMPLGDTTSPYGTSKSMVERILTDIQKADPRWSVILLRYFNPIGAHESGLIGEQPNGIPNNLLPYICQVAAGKLPQLAVFGDDYPTPDGTGMRDYIHVMDLAEGHVAAMQAKGGVAGVHLFNLGSGRAYSVLEIIRAFEAASGLNIPYQIQPRRAGDLACSFADPSHTKQETGWETKRSLAQMMEDSWRWVSRNPDGYGD

SEQ ID NO: 3924 - protein, 368 aa, Nostoc sp. ATCC 53789
MPLAAVMTAPNQPVEVQQLPDPVLEKGGIILETLYSEVCGTDVHLLHGRLEGVPYPIIPGHFSVGRVVETGGAVSDVNGKLIQPGAIATFLDVHETCYNCWYCLVAKASTRCPKRKVYGVTYSAKDGLLGGWSELIYLKPGVKVLTLPEEVSPKQFIAGGCALPTALHAIDRAQIQIGDVVVVQGCGPVGLSVAILALLSGAGKVIVIDKFESRLVVAKSFGVDETLAIKADDPRQHIERVLELTNGHGADVTIEATGIPIAVKEGLNMTRNGGRYVIVGHYTNTGEILINPHLEINLKHIDIRGTWGIDFSHFYRMIELLKRHSDSSKNIAWSSIISRSYTLQQINQALADVEQGSVLKAVIQPNLS

SEQ ID NO: 3925 - protein, 519 aa, Helicobacter pylori 26695
MLLIVFFKFYFQYSIKKKSFYFIFVIIQAIFIFNLRRCRMDNQKITHQNITQKQGELKRDMKMRHLLMIAFGGAIGTGLFVGTGGNIASAGPLGTLIAYCFGGLVVYCIMLSLGELASVYPTTGSFGDYAAKFIGPGTGYMVFWMYWLGWVITVALEYIAIGMLMQRWFADIPIHYWVILCIALVFLLNFFSVKIFAEGEFFFSLIKVLAVIAFIGIGAIGIIYQIYSHGFGSIFDNFHFGDKGFFPNGSAAVFSAMLAVIFAFTGTEVIGVAVGETKNASEVMPKAIKATLWRIVFFFLGSVFVISVFLPMNDSSITQSPFVSVLERINLPFIGMGIPYVADIMNAVIITAMFSTANSGLYGASRMIYGLSKQKMFFKVFSQLNRQGTPTYAMFFSLSFSLIGLLVQIYAKENVVEALINVISFTVIIVWVSVSVSQYSFRKQYLKAGHSLEDLPYKAPFLPFLQLIGITGCAIGVIGSAMDKDQRIGMILTIVFAVICYIGYYFTQKANENNKKDLI

SEQ ID NO: 3926 - protein, 151 aa, Glycine max
MAPALNLAAGGIPLSFSSSVDRSASFPRRSSVRAVAAEAVDTQRPAASLYEVLRVERDASPTEIKSAYRSLAKLYHPDAAVQRSPETDGDGDFIQLRNAYETLSDPSARAMYDRTLAAAHGGRHRRFSTSLSRNHSSAFYTTRRWETDQCW

SEQ ID NO: 3927 - protein, 75 aa, Zea mays
  unsure (1)..(75): unsure at all Xaa locations
MVKVRDDVNLPIYQGENINDKTFDEKSHVLDPYKMLXEYTQFIVMLNLLYAFSTGSYSNIQRVTPWKLDVTEHSK

SEQ ID NO: 3928 - protein, 439 aa, Escherichia coli O157:H7 EDL933
MSQAKSNKMGVVQLTILTMVNMMGSGIIMLPTKLAEVGTISIISWLVTAVGSMALAWAFAKCGMFSRKSGGMGGYAEYAFGKSGNFMANYTYGVSLLIANVAIAISAVGYGTELLGASLSPVQIGLATIGVLWICTVANFGGARITGQISSITVWGVIIPVVGLCIIGWFWFSPTLYVDSWNPHHAPFFSAVGSSIAMTLWAFLGLESACANTDVVENPERNVPIAVLGGTLGAAVIYIVSTNVIAGIVPNMELANSTAPFGLAFAQMFTPEVGKVIMALMVMSCCGSLLGWQFTIAQVFKSSSDEGYFPKIFSHVTKVDAPVQGMLTIVIIQSGLALMTISPSLNSQFNVLVNLAVVTNIIPYILSMAALVIIQKVANVPPSKAKVANFVAFVGAMYSFYALYSSGEEAMLYGSIVTFLGWTLYGLVSPRFELKNKHG

SEQ ID NO: 3929 - protein, 242 aa, Haemophilus influenzae Rd
MQGKIALVTGSTRGIGRAIAEELSSKGAFVIGTATSEKGAEAISAYLGDKGKGLVLNVTDKESIETLLEQIKNDFGDIDILVNNAGITRDNLLMRMKDEEWFDIMQTNLTSVYHLSKAMLRSMMKKRFGRIINIGSVVGSTGNPGQTNYCAAKAGVVGFSKSLAKEVAARGITVNVVAPGFIATDMTEVLTDEQKAGILSNVPAGRLGEAKDIAKAVAFLASDDAGYITGTTLHVNGGLYLS

SEQ ID NO: 3930 - protein, 153 aa, Saccharomyces cerevisiae
VQAVAVLKGDAGVSGVVKFEQASESEPTTVSYEIAGNSPNAERGFHIHEFGDATNGCVSAGPHFNPFKKTHGAPTDEVRHVGDMGNVKTDENGVAKGSFKDSLIKLIGPTSVVGRSVVIHAGQDDLGKGDTEESLKTGNAGPRPACGVIGLTN

SEQ ID NO: 3931 - protein, 319 aa, Staphylococcus aureus
MENRVSKILNIEKPIIQGPMNGLTNANFVASVSEAGGLGILGPNAGEARITNSPFETAEKMRLEVKKVKKLTSKPFASTIMVSEDLSYTSYLIDMLIEENISAVLINGILDQTIFNKLKENNIKIIFRPLTPTIENAIKSEELGADVFVATGFDEGCTVPEKIIGTFSIIPMIADAIKIPVIAAGGIGDVRGVRAAFCLGAEGVFVGSVLIPTFENPAAENVKQYIVDSNAEDLILFRTIPSYYRSLPGKLARELEEMDKNGATNEELAKHMGGGRNMRLGMLNGDTENGYVSVGTGISPINSIRSTKSVIDDLMQDFN

SEQ ID NO: 3932 - protein, 458 aa, Cicer arietinum
MEKMKIEEVQSTTKKQRVATHTHIKGLGLEVSGKALPFASGFVGQAEAREACGLVVDMIRQKKMAGKALLLAGPPGTGKTALALGICQELGTKVPFCPMVGSEVYSTEVKKTEVLMENFRRAIGLRIKENKEVYEGEVTELSPEETESLTGGYGKSISHVIIGLKTVKGTKQLKLDPTIYDALIKEKVAVGDVIYIEANSGAVKRVGRSDAFATEFDLEAEEYVPLPKGEVHKKKEIVQDVTLHDLDAANARPQGGQDILSLMGQMMKPRKTEITDKLRQEINKVVNRYIDEGVAELVPGVLFIDEVHMLDMECFSYLNRALESSLSPIVIFATNRGICTVRGTDMTSPHGIPVDLLDRLVIIRTQTYGPAEIIQILAIRAQVEELVVDEESLAFLGEIGQRTSLRHAVQLLSPASVVAKINGRDNICKADLEEICSLYLDAKSSAKLLQEQQEKYIS

SEQ ID NO: 3933 - protein, 252 aa, Sinorhizobium meliloti
MGTALLEGNFAVITGAASRRGLGKATARLFAEHGATVAILDLDEADAREAAASLGPRHVGMACNVTDLASVRTVMDALVSQWGRIDILVNNAGITQPLKIMEIAPENYDAVLDVNLRGTLYCSQAVIPHMRSRKQGKIVNLSSVSAQRGGGIFGGPHYSAAKAGVLGLTKAMARELAPDNVRVNAICPGFIATDITGGLLTPEKLEEIKAGIPMGRPGTADDVAGCALFLASDLSAYVTGSEVDVNGGSLIH

SEQ ID NO: 3934 - protein, 238 aa, Methanosarcina mazei Goe1
MQADFLNEFLGTPLFGILLSLAAFQAGSLLYKKTRFSVFNPLLVGIVLVILVLLYFRIDFETYNVGGDYISFFLGPATVVLAVPLYKKIQLLKNDAVPIIAGISAGCIAGISSILIFSSLLGLDNVITSSLVPKSVTTPIGIEISKQIGGMPAITVAAISITGIIGAVLGPFICRSFRIKDSVAVGIAIGTSSHALGTTRAIELGETEGAMSGLAIGIAGLITVFLAPALLYVFGVLP

SEQ ID NO: 3935 - protein, 833 aa, Hypocrea jecorina
MADIDVEAILKKLTLAEKVDLLAGIDFWHTKALPKHGVPSLRFTDGPNGVRGTKFFNGVPAACFPCGTSLGSTFNQTLLEEAGKMMGKEAIAKSAHVILGPTINMQRSPLGGRGFESIGEDPFLAGLGAAALIRGIQSTGVQATIKHFLCNDQEDRRMMVQSIVTERALREIYALPFQIAVRDSQPGAFMTAYNGINGVSCSENPKYLDGMLRKEWGWDGLIMSDWYGTYSTTEAVVAGLDLEMPGPPRFRGETLKFNVSNGKPFIHVIDQRAREVLQFVKKCAASGVTENGPETTVNNTPETAALLRKVGNEGIVLLKNENNVLPLSKKKKTLIVGPNAKQATYHGGGSAALRAYYAVTPFDGLSKQLETPPSYTVGAYTTVPPILGEQCLTPDGAPGMRWRVFNEPPGTPNRQHIDELFFTKTDMHLVDYYHPKAADTWYADMEGTYTADEDCTYELGLVVCGTAKAYVDDQLVVDNATKQVPGDAFFGSATREETGRINLVKGNTYKFKIEFGSAPTYTLKGDTIVPGHGSLRVGGCKVIDDQAEIEKSVALAKEHDQVIICAGLNADWETEGADRASMKLPGVLDQLIADVAAANPNTVVVMQTGTPEEMPWLDATPAVIQAWYGGNETGNSIADVVFGDYNPSGKLSLSFPKRLQDNPAFLNFRTEAGRTLYGEDVYVGYRYYEFADKDVNFPFGHGLSYTTFAFSNLSVSHKDGKLSVSLSVKNTGSVPGAQVAQLYVKPLQAAKINRPVKELKGFAKVELQPGETKAVTIEEQEKYVAAYFDEERDQWCVEKGDYEVIVSDSSAAKDGVALRGKFTVGETYWWSGV

SEQ ID NO: 3936 - protein, 377 aa, Rhodopseudomonas palustris
MHGAPGLLRFARSDGARAGLEYAEVVMSVTFRAAVLHELNRPLSIETVEAPPLAAGQLLVKLAYSGVCHSQVMEARGGRGPDRYLPHMLGHEGSGVVVEIGGGVTKVKRGDRVILGWIKGQGADTQGVRYASGERVINAGAVTTFNEYAVVAENRVTPLPAGLPMDVAVLFGCALPVGAGIVINIAKPQPGATLAIFGLGGIGLAALMACKLFACNQVIAVDVEAAKLKMATELGATTVIDASRIDPVEEIRRLTGGLGVDYAIESAGLTRVIEQAFDATRRFGGLCVFASHPRSGEKIALDPFELICGKRILGTWGGDSKPERDIELLAGLYRDGKLPLDAMFTRRYKLDEINEALDDLEHRRSVRPLIEIDPSLR

SEQ ID NO: 3937 - protein, 54 aa, Glycine max
MWLCRLGSLTFKTPDNVNYPSMNLAFSAGRAGGTMTGVLSAANEKAVEMFVEEK

SEQ ID NO: 3938 - protein, 249 aa, Streptomyces collinus
MELALHGRKLLITGGTRGIGRGIVLAAARAGADVLTCYRQESEAVDSLTAALKETAGDHHVIRADVGDTAEADRLVGEAKDRFGRLDGVVNNAGVISHIPFGELPADEWSRILDTNLTAAYRIIHQALPLLGTGSSVVNIGSRGAAAGIPLRAHYTAAKAAMIGLTRSLAKELGPKGIRVNVVAPGVIETEAFADMPAERAAGLRATYSQKTALARLGTVEELAGPVLFLLSDAAAYITGETLNVDGGI

SEQ ID NO: 3939 - protein, 434 aa, Glycine max
  unsure (1)..(434): unsure at all Xaa locations
MMALNISSPAEVKSIFFADYFKSNCITAKFTGGFAFKRKERGAASGGRSCCSVLAPPPPAWPGRAVPEQGSKTWDGPKPISIGGSTGSIGTQTLDIVAENPDKFKVVALAAGSNVTLLADQVKRFKPQLVAVRNESLIAELEEALHDVEEKPEIIPGEQGIVEVARHPDAVSVVTGIVGCAGLKPTVAAIEXGKDIALANKETLIVEVLLSFIFSAGHSLKAPPDXQLKDIKLADALKHPIWSLGRKITIDSATLFNKGLEVIEAHYLFGASYNNLNIIVIHPQSIIHSLVETQDSSVIAQLGIPDMRLPLLYTLSWPERIYCSEVTWPRLDLSKYGSLTFYAPDDKKFPSVNLCYAAGRAGGTMTGVLSAANEKAVEMFVEEKISYLDIFKVVELTCQEHQKELVASPSLEEIIHYDQWARQYAASLQKASSV

SEQ ID NO: 3940 - protein, 359 aa, Desulfitobacterium hafniense
MKLDIRVKFILSFFVILLIPVLMTPAAVGSNLDAGGQDISLRIVIIGIPFVGYFAVLSWYLTRNYLLPLQQLLEATQKIAEGNLDFSISYQKENEMGALCEAFDLMRQNLKASLEQQNHLNHSRQELIASISHDLRTPLSSIRGYVEGLPKAVHDPEKLNRYLSVLKNKTALLDTLIERLFEYSQLDMDDSQGAFCLWDAKEMLESILAPVELEFADQLVQLLLARPFPSVPIEANPDQIAQVFDNLISNARRYLGEKGTIAIAAKVEGADLHISVTDDGTGIAPEDLPHVFDQFYRAEKSRSRSFGGAGLGLAICQKIIENHGGEIWAESEVGVGTRFSLRLPVLNTRMIVTKNDFKH

SEQ ID NO: 3941 - protein, 366 aa, Desulfitobacterium hafniense
MLRASSAERARMWPDRRIQDLFGIALPIVQAPMAGAHKAELAIAAARAGALGSLPCAMLSPQQAREQVAQFRAAVGAPVNLNFFCHRSAAPDPAREAAWRARLRPYYLEFGLDPDAASAAAARAPFDETWCALVEELRPQVVSFHFGLPEPALLARVRAAGARAIGSATTVAEAVWLERNGCDAVIAQGNEAGGHRGVFLDDEFSNGEDVSRQAGLFALLPRVADAVKVPVIAAGGIFDGRGIAAAFALGAAAVQVGTAYLFCAEATIAPLHRRALAAGEGDDTALTNVFSGRPARGIVNRAMREVGPLSPLAPTFPGAGAALAPLRGHAEAAGVRWVHVAVVGPGAARACAVRVRADPRTRRGKR

SEQ ID NO: 3942 - protein, 270 aa, Cytophaga hutchinsonii
MMNVLKRNNVTILGEGEKVLLFAHGFGCDQNAWKYIQNFFTENYKLVLLDFVGAGKSDLSSYDPEKYASLDGYVTDIMEICDALKLSNAIFIGHSVSCMIGALASIKRPDIFEKLVFIGPSPCYISIGDYIGGFDKETIDALFEVMEEDYISWARSIAPSIMDSKNGNERTRELSDSFCSIDPIIAKQFARVTFLSDNRKDLPLIPVESLTIQCSDDMIAPLAVGEYIHANTPDNTLVVLEAYGHCPHMSHPTETAKAIMRFCSKPVQVV

SEQ ID NO: 3943 - protein, 382 aa, Thermoanaerobacter tengcongensis
MKKLIILGSTGSIGRQTLDVVRSLKEEFEIVGLTGYNNVSLLSKQIKEFRPKVVAVKDEEKARKLRENLDEPIEVLTGKEGLKEIVKYEADMVVVAVEGIAGLIPTVEAIKLGKNIALANKEVLVTAGEIVMGLVKEKKIEFLPVDSEHSAILQCLKGNNKREVSNLILTASGGPFRGKKKKDLVNVTVEEALKHPNWKMGKKITIDSATLMNKGFEVIEARWLFDMPLDKIKVVIHPQSIIHSMVEYVDGSVIAQLSVPDMRIAIQYALNYPDRKYVEGVKFLDFYALGQLTFEEPDFETFKCLSLAYHAAECGGTMTAVLNAADEVAVSLFLQNKINFLEIAEIIEEALENHKNIQNPTLDDIISVDLETRERIMRKYLR

SEQ ID NO: 3944 - protein, 304 aa, Streptococcus pyogenes MGAS315
MAWVADGDLAGAVSNAGGLGIIGGGNAPKEVVKANIDRVKAITDRPFGVNIMLLSPFADDIVDLVIEEGVKVVTTGAGNPGKYMERLHQAGIIVVPVVPSVALAKRMEKLGVDAVIAEGMEAGGHIGKLTTMSLVRQVVEAVSIPVIAAGGIADGHGAAAAFMLGAEAVQIGTRFVVAKESNAHQNFKDKILAAKDIDTVISAQVVGHPVRSIKNKLTSAYAKAEKAFLIGQKTATDIEEMGAGSLRHAVIEGDVVNGSVMAGQIAGLVRKEESCETILKDIYYGAARVIQNEAKRWQSVSIEK

SEQ ID NO: 3945 - protein, 537 aa, Zea mays
LNRHQSLPLNRGRKTPHPTPRPPPQTTPTFLTSPPTRRRRPTAGMPPAIPSLVHPSRVRILHPGGSHIHGPVVYWMLRDQRLADNWALLHAAELAAASTPAAPLAIAFTLFPRPFLLGAHLRQLGFLLRGLRRLAADAHARGLPFFLLEGGPAELPSLVRRLGASALVADFSPLRPVREALDAVVQELLRDAANMAVHQVDAHNVVPVWTASGKLEYSAKTFRSKVNKVINEYLVEYPEVPQWAPWCMEQPKSVDWDALINSIFSEAENVPEINWCEPGESSAMEVLLGSKDGFLTKRIKNYDTGRNDPTKPHALSCLSPYLHFGHISAQRCALEAKKRRHLSPKSVDTFLEELIIRRELADNFCYYQPQYDSLAGAWEWARKTLTDHTGDKREHIYTREQLENAKTSDPLWNASQLEMVHHGKMHGFMRMYWAKKILEWTSQPEEALSIAIYLNDKYHIDGRDPNGYVGCMWSICGLHDQGWKERPVFGKIRYMNYAGCKRKFDVDAYISYVKRLVPRAKKRKTEEGESTVKESNV

SEQ ID NO: 3946 - protein, 176 aa, Zea mays
  unsure (1)..(176): unsure at all Xaa locations
MNPSRRRLDTVAECQHLNFSRLDICHRCNETHKPADPAAGGGGRYYANFMGRAGSSFSAVFATAGSDIRTADWDCSCSAYKFTSRSTXLQCSDYNEEAAVQHGHLCAFDGDMSRSQGYCFRSDAAAAVAEAARTNNRPAXKSGDWICTISECNEHYFTSRMXSFQCNAPRDSGTDV

SEQ ID NO: 3947 - protein, 364 aa, Zea mays
MAGTVTVPGSSKPSTPLLKDELDIVIPTIRNLDFLEMWRPFFQPYHLIIVQDGDPTKTIKVPEGFDYELYNRNDINRILGPKASCISFKDSACRCFGYMVSKKKYIYTIDDDCFVAKDPSGKDINALEQHIKNLLSPSTPFFFNTLYDPYREGADFVRGYPFSLREGAHTAVSHGLWLNIPDYDAPTQLVKPKERNERYVDAVMTIPKGTLFPMCGMNLAFDRDLIGPAMYFGLMGDGQPIGRYDDMWAGWCVKVICDHLSLGVKTGLPYIWHSKASNPFVNLKKEYKGIFWQEDIIPFFQNVTIPKDCDTVQKCYIYLSGQVKEKLGKIDPYFAKLGDAMVTWIEAWDELNPAGPAAGKDKAK

SEQ ID NO: 3948 - protein, 131 aa, Solanum tuberosum
MALEWVVLSYAAGAEAIMLLLLTIPGLDPLRKGLIAVTRNLLKPFLSIVPFCLFLLMDIYWKYETRPTCESAESCPPSEHLRHQKSIMKSQRNALLIASALFFYWLLYSVTGLVVKVEQLNKRVEKLKAQD

SEQ ID NO: 3949 - protein, 292 aa, Triticum aestivum
  unsure (1)..(292): unsure at all Xaa locations
IPPSSSALLSLSLSTSVSDPPLPTSSLGSATRCRSSGCGAAESEQEPQGGGAPGGVDEDLTLIIRRGDWTEDGDHALARAAAQSRAGRWSPLPRAAGLRRTGKSCRLRGLNYLRPDVLRGNCTAHELLRILDYYSRWGXRWSKIAXQHLPGRTDNEIKNYWRTRVQKHAKQLNCDVGSATFKDAMRYLWMPRLVERIHAAEHPAIPQSATPRARQESGRWLPRHRHHISRQQLSRQRGHHQQVGIVGFVHVGALRRGEEPASPWQRREDNERRGLDAGRGPRVLGHAYADPA

SEQ ID NO: 3950 - protein, 469 aa, Staphylococcus aureus subsp. aureus Mu50
MARKLHRELNNRHIQLIAIGGAIGTGLFLGSGQTISLTGPSLLFTYMIIGVVLFAFMRALGELLLSNTRFNSFVDIANEYLGPFGGFVIGWTYWLCWIVSSMSDLTAMGQYFAFWYPQVPNWITVLFIVLILISFNLLGARLFGELEFWFSIIKVVTIIAMVIVGLVLIFFSFKTHYGHASFTNLISHGGMFPGGTFGFLMSFQIAVYSFIGIELIGVTAGETKDPEKTLPKAINNVPIRILLFYIGGLLVIMSVIPWNDIDPNSSPFVKLFTLIGVPFAAGVVNFVVLTAAASATNSGIYSNSRILFGLSQQGLGPKVLNKTNSHGVPYLSMLVSSIALLIAALLNYIFPNAIQLFIYVTTLSTVLFLVVWAMIIVAYLMYLKKHPEAHKNSKFKLIGGKPIAYIILAFFFFVFILLFFSDETRAAIYISPFWFIFLFFFYKKYKTNAEKLAYEQRQNDSGHFRYDNQ

SEQ ID NO: 3951 - protein, 367 aa, Hirschfeldia incana
SSNKTLVSPGNVFELGFFRTTSSSRWYLGIWYKKLSNRTYVWVANRDNPLSNSIGTLKISNMNLVLLDHSNKSVWSTNLPRGNERYPVVAELLANGNFVMRYSDNNDASGFLWQSFDFPTDTLLPEMKLGYDLKTGLNRFLTAWRNLDDPSSGDYSYKLENRELPEFYLSKNGFQVHRSGPWNGVQFSGIPENQKLSYMVYNFTENSEEVAYTFRMTNNSIYSRLKVSSDGYLQRLTLIPESIIWNLFWSSPVDIRCDLYKTCGPYSYCDGNTSPLCNCIQGFDPWNMEQWDQRVSAGGCIRRTPLSCSGDGFTRMKNMKLPDTTMATVDRSIDVKECEKRCLSDCNCTAFANADIRSGGSGCVSGP

SEQ ID NO: 3952 - protein, 368 aa, Coprinopsis cinerea
MLEAKLAEAGLLKKLLDAIKELVTDANFECNEEGINLQAMDNSHVALVAVKILVSGFKRYRCDRPMPLGVNLGSLTKVLKCAKDDDICTLKAADEADVLNLIYEAKNSDRIAEYEMKLMEIDADALTIPDTEYEARVTMPSSEFARIVRDLSQLGESVRIEVSKEGVRFAAEGESANGNVLLRQTEGAITGGRIVAKTEEDEDGDGEKGEDGDEEDEDVKPEKKKIKKEKVDEDVDMNEDEEEEFKPDVDEDGEEEQDEDEDEDEESGKKRKKKANGSAKPAKKAKTGSSSKGKKKSDDDDDVDGILIEMNQHVSLTFSLKYLVNFAKSTSLSAKVQLMMSNDVPLLVSYDFGQGYIRYYLAPKIGDD

SEQ ID NO: 3953 - protein, 369 aa, Synechococcus sp. PCC 7942
MKSRAAIAWAAGQTADDREVDVQAPQAGEVMVKLVATGVCHTDAFTLSGADPEGIFPCILGHEGAGIVVEVGEGVTSVAVGDHVIPLYTPECGECKFCKSGKTNLCQAIRATQGKGLMPDGTSRFSLNGQPIYHFMGTSTFSEYTVLPEIAIAKINPAAALDKVCLLGCGITTGIGAVLNTAKVEPGSTVAVFGLGGVGLSVIQGAVLAKASRILAIDINPDKAEFAKQLGATDFINPKDYDRPIQEVIVELTDGGVDYSFEAIGNVNTMRAALESCHKGWGESTIIGVAGAGQEISTRPFQLVTGRVWRGSAFGGVKGRSQLPGYVEQYLNGQIKVDEFVTETRPLEEINEAFEDMHAGKVIRTVITF

SEQ ID NO: 3954 - protein, 107 aa, Triticum aestivum
MALKASFPGELSSLLDSGTTRSRRGAAAAFRHRQRQRKVDFTFQRRDKRAAYLRTCCSMQQGPPPAWPGRAVLEPERRSWEGPKPISIVGSTGSIGTQTLDIVAEKP

SEQ ID NO: 3955 - protein, 569 aa, Arabidopsis thaliana; identical to SEQ ID NO: 312

SEQ ID NO: 3956 - protein, 305 aa, Miscanthus sinensis var. sinensis
IESVGEGVTDVAPGDHVLPVFTGECKECAHCRSAESNMCDLRRINTDRGVMIGDGKSRFSINGKPIYHFVGTSTFSEYTVMHVGCVAKINPEAPLDKVCVLSCGISTGLGASINVAKPPKGSTVAIFGLGAVGLAAAEGARIAGASRIIGVDLDPSRFEIARKFGCTEFLNPKDHKKPVQEVLAEMTNGGVDRSVECTGNINAMIQAFECVHDGWGVAVLVGVPHKDAEFKTHPMNFLNERTLKGTFFGNFKPRTDLPNVVELYMKKELEVEKFITHSIPFAEINKAFDLMAKGEGIRCIIRMEN

SEQ ID NO: 3957 - protein, 94 aa, Zea mays
  unsure (1)..(94): unsure at all Xaa locations
RLGVGKQEEDDFFTAEENIQRKKLDVELEETEXHVKKREVLAEREQKIQTEVKEIXKVFYCDLCNKQYKLAMEFEAHLSSYDHNHRKVNNLNKH

SEQ ID NO: 3958 - protein, 516 aa, Leptospira interrogans serovar lai str. 56601
MFQKENLVRVREIKQNPILEEKPYILYWMSMARRLVWNHSLDYSIHLSQKYKKELLIYEPLKMNYPWSSLRLHKFILEGMSYNIKEAKRLGLTYRAFVETPGNRIEEAFEKISSEAALVITDDYPAYIIPELLEQVSKKIKCKFLAVDSNSIIPLTFYGEFVSAARILRPRVHKLFPEVWKFRSFHKPNKPFREKGDSWLEKNPNSPLKKNIWFEGDVDQISEICKKCNFNFQNIPPVPGKKGGREEGIKLLQKFLKRGLSGYAELRSNPKPPEESYSSFLSPYIHFGHISQEEIVSEVLNWNLDGSWTPGVIIPENKNRKEGYFHPDPNVNSFLDELITWRDVGFLMFWKKPSFRKDLSILPDWIQKNLDFHKNDVRPYIYTKEQLENSKTHDVIWNAAQKELVLSGCMQNYLRMLWGKKVIEWSPDYQTAFEILEEFNNKYAYDGRDPNSYNGILWCFGLFDRPWFPERNVFGNIRTMSSDSTKKKFKLQTYLDYVQSLEERNDKLDSQLLFPT

SEQ ID NO: 3959 - protein, 332 aa, Zea mays
  unsure (1)..(332): unsure at all Xaa locations
MQYKNLGRSGLRVSQLSYGAWVTFGNQLDVKEAKALLQACRDAGVNFFDNAEVYANGRAEEIMGQAIRDLGWRRSDVVISTKLFWGGQGPNDKGXLSRKHXVVEGLRASLRRLDMDYVDVVYCHRPDASTPVEETVRAINWVIDQGWAFYWGTSEWSAQQITEXWAVANRLXDLVGPIVEQPEYNLFSRHKVESEFLPLYSTYGIGLTTWSPLASGVLTGKYTKGNIPXADSRFALDNYKNLANRSLVDDTLRKVNGLKPIAAELGVSLAQLSIAWCASNPNVSSVITGATKESQIVENMKALDVIPLLTPEVVDRIEAVVQSKPKRTESYR

SEQ ID NO: 3960 - protein, 227 aa, Gossypium bickii
FTSLCHTDVYFWEAKGQTPLFPRIFGHEAGGIVESVGEGVTHLKPGDHVLPVFTGECGNCRHCKSKESNMCDLLRINTDRGVMLSDGKTRFSINGKPIYHFVGTSTFSEYTVAHVGSVAKINPAAPLDKVCILSCGISTGLGATLNVAKPTKGSTVAIFGLGAVGLAAAEGARIAGASRIIGVDLNPNRFEEAKKFGCTEFVNPKDHNKPVQEVLAEMTNGGVDRSV

SEQ ID NO: 3961 - protein, 358 aa, Maytenus undata
SQKLAVRAISQLQSLPGGDIKLLCDTVVESVRDLTGYDRVMVYKFHEDEHGEVMAESKRPDLEPYIGLHYPASDIPQASRFLFKQNRVRMIVDCHASPVLVIQDDRLMQPLCLVGSTLRAPHGCHAQYMENMGSIASLAMAVIINVNDGEGIGGRNPTRLWGLVVCHHTSARCIPFPLRYACEFLMQAFGLQLNMELQLAAQLLEKHVLKTQTLLCDMLLRDSPTGIVTQSPSIMDLVKCDGAALYYQGNYYPLGVTPTEAQIKDIVEWLLAFHGDSTGLSTDSLADAGYPGAALLGDAVCGMAVAYITNRDFLFWFRSHTAKEIKWGGAKHHPEDKDDGQRMHPRSSFKAFLEVVKS

SEQ ID NO: 3962 - protein, 394 aa, Zea mays subsp. mays
LGAERRARLPPGEMGWPLVGGMWDFLRAFKSGKPDAFIASFVRRFGRTGVYRSFMFSSPTVLVTTAEGCKQVLMDDDAFVTGWPKATVALVGPRSFVAMPHDEHRRIRKLTAAPINGFDALTGYLPFIDSTVTSSLRAWADHGGSVEFLTELRRMTFKIIVQIFLGGADQATTRALERSYTELNYGMRPMAINLPGIAYRGALRARRRLVAVLQGVLDERRAARAKGVSGGGVDMMDRLIEAQDERGRRLDDDEIIDVLVMYLNAGHESSGHITMWATVFLQENPDMFARAKAEQEAIMRSIPSSQRGLTLRDFRKMEYLSQVIDETLRLVNISFVSFRQATRDVFVNGYLIPKGWKVQLWYRSVHMDPQVYPDPTKFDPLRWEGHSPRAGTFL

SEQ ID NO: 3963 - protein, 237 aa, Zea mays
MSSLHATRAELGLVVLYLNKAEARDKICRAIQYGSKFVSNGQPGTAQEVDRSTTLARKVFRLLKWVNDLHALISPPAKGTPLTLVLLGKSKNALLSTFLFLDQFVWLGRTGIVKNKEATDRVARLSLYCWMASSACAGLVELGELKRLSRSMRKLARELRDTDKYENEQYQDKMRQSDERLLALVKAAMDVVVAVGLLQLAPKKVTPRVTGAFGFVTSLISCYQQLPSRAPVAKVKV

SEQ ID NO: 3964 - protein, 87 aa, Zea mays
  unsure (1)..(87): unsure at all Xaa locations
LRGLDLNGRGFLTTANIKTLFKDVRGKXIEEGTYNLCLKNVRDEIWTMVKPENPLRILLXNLFFCKQGGTVPSLLLNFRGSWPNTTR

SEQ ID NO: 3965 - protein, 493 aa, Nicotiana tabacum
MRHANIKHGSFHLEEHNMRITRARARVSGSSGRLPPLHPSTKQDKKQALGAESKRSKRSASDENRPGTSSIATGVQPKRRAVLKDMKNVLHENSHMNCINGSKIQVKKGSDKRNNKAKPAVSLKLSQLQEKGKEDIADKVKKVKVEGSQEISSGANCKEDMLPQLSRDVTPAQCGLVHLVPVNRSSCKAFPLQNVMKKDESKVCQKQEGFANLGIADIDSRHKDPLMCSLYAPDIYNNLHAIEFDRSPSVDYLEKLQLDINKGMRGILIDWLVEVSEEYRLVPDTLYLTVNLIDRFLSENYIEKQKLQLLGVTCMLIASKFEEICAPRVEEFCFITDNTYSKEEVIKMESRVLNLLSFQLASPTTKKFLRRFIQAAQASYKVPSVELEFMANYLAELTLVDYGFLKFLPSLTAASAVFLARWTLDQSNHPWNPTLEHYTRYKVSELRTTVFALQELQMNTSGCTLNAIREKYRQPKFKSVATLAASKPVQSLF

SEQ ID NO: 3966 - protein, 556 aa, Bifidobacterium longum DJO10A
  unsure (1)..(556): unsure at all Xaa locations
MVADRQAARRMEVQRHADHRLGQRRPFGMGAARQTRLRARRGRRGQGRQRPGHDHPAVLRXXXXXXXXXXXXXXXXXXXXXXXXXXXXXXXXEAVKTGLLDESLIDDAVARILALKFRLGLFEDPRLPDAERIKAVIGSAEHQQINLELARESVALLRNDGTLPFAANTAKRIAVVGPLADDAQNQLGDWTGNSGQVSWMPDGQPRDMIATVLDGLIQLAADDCEVVYSRGANVIDLVPDPAGEFYPDGQPRPKIGVSAAVDQALIDEAVANARQSDLIVAVVGDVVQLVGETCSTATLELLGGQNALLDALAAVSRETGKPMVTVLISSKPQVLPASIVGEYGVFAKRVSDPETGTGSILWAPNPGMRGGQAIAEIILGLTNPSGRLPITFPRHAGQLPVYYNQIRGQHGDRYADLTQDPAFAFGEGLSYTTFAYGEPTIVGGASNADGTFAEADTVHAEITLANTGERAGVEIVQAYIGDIVTSYSWTDRELKAFQRVALEPGETKTVAFEIPVANCTIVDPDANRIVEPGEFELLIGHSSRREDLKRTTFTVA

SEQ ID NO: 3967 - protein, 245 aa, Xanthomonas campestris pv. campestris str. ATCC 33913
MSTSVPQRRALVTGGSGDLGGAICRQLAAQGRHVLVHANRNLARAEEVVASIVAAGGSAEAVAFDVADAQASADALAALLEAGPIHIVVNNAGIHDDAPMAGMNAQQWHRVIDVSLHGFFNVTQPLLLPMARARWGRIVSVSSVAAVLGNRGQTNYAAAKAALHGASKSLAREMASRGIAVNVVAPGVIESEMVGDSFAPEMIKQMVPAGRVGKPDEVAALVAFLCSDVAGYINGQVIGINGGMG

SEQ ID NO: 3968 - protein, 363 aa, Simicratea welwitschii
QSQKLAVRAISQLQSLPGGDIKLLCDTAVESVRDLTGYDRVMVYRFHEDEHGEVVAESKRPDLEPYIGLHYPATDIPQASRFLFKQNRVRIIVDCHASPVSVIQDDGLMQPLCLVGSTLRAPHGCHAQYMENMGSIASLAMAVIINGNDEEGMGGRNPTRLWGLVVCHHTSSRCIPFPLRYACEFLMQAFGLQLNMELQLAAQLLEKHVLKTQTLLCDMLLRESPTGIVTQRPSIMDLVKCDGAALYYQANYYPLGVTPTEAQIRDIVEWVLACHGDSTGLSTDSLADAGYPGATLLGDAVCGMAVAYITNRDFLFWFRSHTAKEIKWGGAKHHPEDKDDGQRMHPRSSFKAFLEVVKSRSLP

SEQ ID NO: 3969 - protein, 464 aa, Azotobacter vinelandii
MNIAVADIEAATDEPPLYQLDENPLLARQARQESNARSYPRRIPLALKRARGIHVEDVEGRVFIDCLAGAGTLALGHNHPVVVEAIRQVLADELPLHTLDLTTPVKDRFVQDLFGALPAEFARRAKIQFCGPTGTDAVEAALKLVRTATGRSTVLAFQGGYHGMSQGALSLMGNLKAKTPLGALLAQGVQFLPFPYDYRCPFGLGGEQGVEVGLRYIANLLSDPEGGVQPPAAVIVEAVQGEAGAIPAADAWLRGLREITARAGIPLILDEIQSGFARTGRMFAFEHAQIVPDVVVLSKAIGGSLPLSVVVYRDELDKWQPGAHAGTFRGNQMAMAAGSAVIRHIQEHDLARHAEQVGEHLRGLLQALQRTYPQLGDVRGRGLMLGVEIVEPDGEPDALGHPPLDPALASAIQRECLKRGLILELGGRHGSVVRFLPPLIIRHEEVEQVAGIFARAVSAAVSAG

SEQ ID NO: 3970 - protein, 264 aa, Daucus carota
MLELRLVQGSLLKKVMDSIKDLVNDANFDCSATGFSLQAMDSSHVALVAVLLRSEGFEHYRCDRNISMGMNLGNMAKMLKCAGNDDIITIKADDGSDTVTFMFESPTQDKIADFEMKLMDIDSEHLGIPEAEYHAIVRMPSAEFARICKDLSSIGDTVVISVTKEGVKFSTRGDIGTANIVCRQNTTVDKPEEATVIEMNEPVSLTFALRYMNSFTKLSPLSSTVTISLSSELPVVVEYKIAEMGYIRFYLAPKIEEEEDESKP

SEQ ID NO: 3971 - protein, 565 aa, Oryza sativa (japonica cultivar-group)
MPPTSVSPPRTAPGPANPSPAHPSRVRVIHPGGGKPGGPVVYWMLRDQRLADNWALLHAAGLAAASASPLAVAFALFPRPFLLSARRRQLGFLLRGLRRLAADAAARHLPFFLFTGGPAEIPALVRRLGASTLVADFSPLRPVREALDAVVGDLRREAPGVAVHQVDAHNVVPVWTASAKMEYSAKTFRGKVSKVMDEYLVEFPELPAVVPWDREQPEGVDWDALIARVCSEAENVPEIDWCEPGEEAAIEALLGSKDGFLTKRIKSYETDRNDPTKPRALSGLSPYLHFGHISAQRCALEAKKCRHLSPKMFEVTCVLKQSVDAFLEELVVRRELADNFCYYQPQYDSLSGAWEWARKTLMDHAADKREHIYTREQLENAKTHDPLWNASQLEMVHHGKMHGFMSKPLVHIILFDSGQTFYTIFVQLLFWIWKERKVTVPVRTFSFPNVVVVCRMYWAKKILEWTSGPEEALSTAIYLNDKYEIDGRDPSGYVGCMWSICGLHDQGWKERPVFGKIRYMNYAGCKRKFDVDAYISYVKRLAGQSKKRNAEESPNPVVKLSKSQH

SEQ ID NO: 3972 - protein, 181 aa, Bacillus cereus ATCC 14579
MKLVGKHIYIRLYKTADANELANLHIRNREFFQRVCPLLPEVFYTEEHQKIRLEQALKKTAEGQVYPFGIFLRENDKLIGDISLTQIVRGDLQSCYTGFTLDKEHNTKGYTTEALQLVVDFAFRELELHRIEAGAMLANLASIRVLEKMGFKKEGIAKENIRINGKWTDHQIVAIINSLDV

SEQ ID NO: 3973 - protein, 105 aa, Lactococcus lactis
MEVLMTVLVLGGAGYVGSHAVDMLLKRGYDVAVVDNLLTGHRESVPANVRFYEGDVRDHAFLASVFEKENIEGIMHFCAYSLVGESMQKPLMYFNNNVGGAQVIL

SEQ ID NO: 3974 - protein, 192 aa, Glycine max
QLVILCCSSCCTLLHIEGSLSSPSPSPSPSPSPFIKSSCSSTQYPALCVSSLSVYASSIQQDPHQLVQTALSLSLNRTQATKTFVANCNKFRGLKPREHAALKDCAEEISDSVDRLSRSLKELKLCKVKGEDFTWHISNVETWVSSALTDESTCGDGFSGKALNGKIKDSIRARMLNVAQVTSNALSLINTM

SEQ ID NO: 3975 - protein, 389 aa, Zea mays
MGYIGHHGVATLRRYKYSGVDHSLVAKYILQPFWSRFVNIFPLWFPPNMITLTGFMFLLTSAFLGFLYSPHLDTAPPRWVHLAHGLLLFLYQTFDAVDGKQARRTNSSSPLGELFDHGCDALACAFESLAFGSTAMCGKATFWFWFISAVPFYFATWEHFFTNTLILPIVNGPTEGLMLIYLCHFFTFFTGAEWWAQDFQKSMPLLGWVPLISEIPVYDIVLCLMIAFAVIPTIGSNIHNVYKVVEARKGSMLLALAMLFPFGLLLAGVLVWSYLSPSDIMRTQPHLLIIGTGFAFGFLVGRMILAHLCDEPKGLKTGMCMSLAYFPFAIANALTARLDDGNPLVDEQLVLLMYCLFTVALYMHFATSVIHEITNALGIHCFRITRKKA

SEQ ID NO: 3976 - protein, 176 aa, Methanopyrus kandleri AV19
MMNLWKDLEPGPNPPDVVYAVIEIPRGSRNKYEYDEERGFFKLDRVLYSPFHYPLDYGFIPRTLYDDGDPLDILVIMQDPTFPGCVIEARPIGLMKMLDDSDQDDKVLAVPTEDPRFKDVKDLDDVPKHLLDEIAHMFSEYKRLEGKETEVLGWEGADAAKEAIVHAIELYEEEHG

SEQ ID NO: 3977 - protein, 583 aa, Saccharomyces kluyveri
MSSDMSTANSKKEEESTYAIIQTSSPCSKKYSYISGQVNRFINSFRRKGESEDVKELKGENEECGAATKMKKSIKSRHLLMISLGTGIGTGLLVGNGKALAKAGPAGLVIGYAVASIMLYCIIQAAGELGICYSGMAGNYTAYSSLLVDPALGFSVSWVYCVQWMTVLPLQLVTAAMTVRYWTNANPDIFVAVFFVVIMVINMFGAKGYAEAEFLFNICKVLMIAGFVILGIAINCGGAGTSGYIGAKYWHSPGSFAAGFKGVCYVFCYAAFSYGGIEVMVLTASEQENPRKSIPNACKKVIYRILMIYMLTTIIVCFLVPYNSSELMGSSGESASHASPLVIAVASHGVKIVPHIINAVILISVISVGNSSMYSAPRLLLSLSEQGYAPKFLNYVDRQGRPLICFAITLLVALIAFVAASDAEEDIFAWLLAISGLSQIFIWTSICLSHVRFRDAMHAQGLSLGQIGYKSQTGYWGSWFAIVISVLVLIAQFWVAIAPIGEEGRLNAETFFQNYLAFPILLGAYFGYKVYHKDWRLCIPASEVDLSSHRNISDEEILRQEDYEWNEKMSNSSIWVRLCHFWC

SEQ ID NO: 3978 - protein, 512 aa, Torenia hybrida
MSPLALMILSTLLGFLLYHSLRLLLFSGQGRRLLPPGPRPWPLVGNLPHLGPKPHASMAELARAYGPLMHLKMGFVHVVVASSASAAEQCLRVHDANFLSRPPNSGAKHVAYNYEDLVFRPYGPKWRLLRKICAQHIFSVKAMDDFRRVREEEVAILSRALAGKRAVPIGQMLNVCATNALSRVMMGRRVVGHADGTNDAKAEEFKAMVVELMVLSGVFNISDFIPFLEPLDLQGVASKMKKLHARFDAFLTEIVRERCHGQINNGGAHQDDLLSTLISFKGLDDGDGSRLTDTEIKALLLNLFAAGTDTTSSTVEWAVAELLRHPKTLAQVRQELDSVVGKNRLVSETDLNQLPYLQAVVKETFRLHPPTPLSLPRLAEDDCEIDGYLIPKGSTLLVNVWAIARDPKVWADPLEFRPERFLTGGEKADVDVKGNDFELIPFGAGRRICAGVGLGIRMVQLLTASLIHAFDLDLANGLLPQNLNMEEAYGLTLQRAEPLLVHPRLRLATHVY

SEQ ID NO: 3979 - protein, 277 aa, Zea mays
  unsure (1)..(277): unsure at all Xaa locations
ILTDLSCGPSSKAKGGQPAAAPGSGGDRQGRGKIEIKRIENTTNRQVTFCKRRNGLLKKAYELSVLCDAEVALVVFSSRGRLYEYANNSVKSTIERYKKANSDTSNSGTVAEVNAQHYQQESSKLRQAIDSLQNANSRTIVGDSIHTMGLRELKQMEGKLEKAINKIRARKNELLYAEVEYMQRREMDLQTDNMYLRSKIAENNNETGQPAMNMIGVPSTSEYDHMASFVDSRNFLQVNMQQQQPQHYSHXAATNDPPTRMMKLRIFGQQSMHASTQ

SEQ ID NO: 3980 - protein, 463 aa, Pseudomonas putida KT2440
MNTVGSDGNLAQGFKPRHVTMLSIAGIIGAGLFVGSGHAIAAAGPATIISYFVAGTLVVLVMRMLGEMAVAHPDTGSFSTYADQAIGRWAGYTIGWLYWWFWVLVIPIEALAAGHVLNAWFPQVDSWIFALASVLLLAGTNLFSVAKYGEFEFWFAILKVTAILGFIGLGFAALMDWLPNREVSGLSGLMAEYGGFAPKGWSAVVGAFITVMFSFIGTEAVTIAASESSDPSRNIAKATRSVIWRISTFYILSIFVIISVVPWNDPQLAVVGSYQRALEIMNIPNAAFMVDLVVLVAVTSCMNSSIYIASRMMFSLAKRGDAPAFLNKTSKVGVPRAAVFGSTLIGAAIAVLNYFAPKGVFEFLLASSGAIALLVYMVIAISQLRMRRRLERENTELKFRMWLFPYLTWAVIIFIAGALAVMMYTPEHRAEVSSTLGLAIVISFLGIVTSRGHAQPVAARSMG

SEQ ID NO: 3981 - protein, 152 aa, Zea mays
MFANCLVMNVRKSPSGMLLCFEEIGLGLTGFGIFFSFLGIVFFFDKGLIAMGNILFLSGLGLTIGLKSTMQFFTKPKNYKGTISFGAGFFLVLIGWPFFGMLLEAYGFIVLFSGFWPTLSVFLQRIPIIGWIFQQPFVTSFLDRYGGKRGPV

SEQ ID NO: 3982 - protein, 393 aa, Schizosaccharomyces pombe
MVENVNINNKRAGKMSAAPTPHNTPSGTSAPNFGAKAPQVNTIDEGDENLEAIDGKLGSLLHLTSEGVSELPEAVQRRISGLRGLQKRYSDLESQFQKELFELEKAYAKKYAPIFKRRSEVVRGADEPTEEEIKKGEAADENEKKEPTSSESKKQEGGDDTKGIPEFWLTAMKNVLSLSEMITPEDEGALSHLVDIRISYMEKPGFKLEFEFAENPFFTNKILTKTYYYMEESGPSNVFLYDHAEGDKVDWKENADLTVRTVTKKQRNKNTKQTRVVKVSVPRDSFFNFFNPPTPPSEEDEESESPELDELLELDYQIGEDFKEKLIPRAVEWFTGEALALENYDGFSDLDVEEDEDDVESSSNEEVSDSDEEDSDSKHTAHGQQNAAECRQQ

SEQ ID NO: 3983 - protein, 327 aa, Glycine max
  unsure (1)..(327): unsure at all Xaa locations
MGGWAIAVHGGAGVDPNLPLERQEEAKQLLTHCLNLGISALNSNLPAIDVVELVVRELETDPLFNSGRGSALTEKGTVEMEASIMDGPKRRCGAVSGLTTVKNPISLARLVMDKSPHSYLAFSGAEEFARQQGVEVVDNEYFITPDNVGMLKLAKEANTILFDXYRIPTSGYETCGSGVESPLQMNGLPISVYAPETVGCVVVDREGRCAAATSTGGLMNKMTGRIGDSPLIGAGTYACDVCGVSCTGEGEAIIRGTLAREVAAVMEYKGLKLQEAVDFVIKHRLDEGMAGLIAVSNAGEVAYGFNCNGMFRGCATENGFMEVGIWE

SEQ ID NO: 3984 - protein, 151 aa, Zea mays; identical to SEQ ID NO: 743

SEQ ID NO: 3985 - protein, 153 aa, Triticum aestivum
  unsure (1)..(153): unsure at all Xaa locations
NDGMVLEAIIYRLLKKYFDEQPFYVNLLEIFLETTYQTELGQMLDLLSQPQGEGNVDLSTLNHKAYXKIVIYKTAFYSFYLPVALGMLLTGYQFKKDRAXSTKPLYSHTMGEFFKIXDDYLDCYGDQRXLARPSHIEEKKCGGWPHCIARARR

SEQ ID NO: 3986 - protein, 334 aa, Thermobifida fusca
MEFRHLGKSGLVVSEIAYGNWITHGSQVEEETAIACVHAALDEGITTFDTADVYAQGRAEEVLGKALKGQRRDGIEIFSKVYWPVGPGKNDRGLSRKHIIRGVEESLRRLGTDYLDLYQAHRFDYATPLEETLRAFDDLVRQGKVLYVGVSEWRAEEIEQALKIADEMGFDRIVSNQPQYNMLWRVIEAEVVPLCKREGIGQIVWSPIAQGVLTGKYKPGQPPPSGSRATDEKSGAQFIRKFLDNQQLLERVQQLLPLAAEAGLTPAQLAVAWVLQNSNVSAAIIGASRPEQVRDNAKAAGVKLDAELMRRIDEILGDAVERDPALTASPKERP

SEQ ID NO: 3987 - protein, 360 aa, Zea mays
PRPYKSLFEKAVFEPTFCPMYAQLCSDLNEKLPTFPPEEPGGKEITFKRVLLNNCQEAFEGASSLRAEIAKLTGPDQEMERRDKERLVKLRTLGNIRLIGELLKQRMVPEKIVHHIVMELLGSGPDKKTCPEEEDVEAICHFFNTIGKQLDENPKSRRINDTYFIQMKELTMNPQLAPRLRFMVRDVIDLRSNNWVPRREEIKAKTISEIHSEAEKNLGLRPGAASVIRNGRSSPGGPLSPGGGFPMNRPGTGGMMPGMPGSRKMPGMPGLDNDNWEVPRSKSMPRGDSIRNQGLLLNKPSTVHKTSSINTRLLPQGSGAALIGKSALLGTGVSASRPLSFTPGPTPARVTPKPIRTAPG

SEQ ID NO: 3988 - protein, 342 aa, Hordeum vulgare subsp. vulgare
MDRYEVVRDIGSGNFGVAKLVRDVRTREHFAVKFIERGHKIDEHVQREIMNHRSLKHPNIIRFKEVVLTPTHLAIVMEYASGGELFQRICNAGRFSEDEGRFFFQQLISGVSYCHSMQVCHRDLKLENTLLDGSVAPRLKICDFGYSKSSVLHSQPKSTVGTPAYIAPEVLSRREYDGKVADVWSCGVTLYVMLVGAYPFEDPDEPRNFRKTIARILSVQYSVPDYVRVSMDCIHLLSRIFVGNPQQRITIPEIKNHPWFLKRLPVEMTDEYQRGMQLADMNTPSQSLEEAMAIIQEAQKPGHNALGLAGQVACLGSMDLDDIDFDVDDIDIENSGDFVCPL

SEQ ID NO: 3989 - protein, 462 aa, Rhodospirillum rubrum
MRRKDKPMVSNALRDADLSYTIHPYTNLVAHETKGPLIAVRGEGVRVFDDKGKDYIEGMAGLWCASLGFSEPRLAAAAARQMAELPFFHMFSHKSHEPGIRLSEELVKRAPVPMARAFFCNSGSEANDTAIKMIWYINNALGRPQKKKIIARKRAYHGVTVASASLTGLPANHRDFDLPIANILHTSSPDYYREGKPGESEEAFAKRCADELEAMILAEDPNTVAAFFAEPIMGAGGVVLPPKGYFEHIQAVLKKYDILLVADEVICGFGRTGQYWGSQTFGLKPDILTCAKALSSAYMPISAVLVTEEVYKPLRDNSGKIGTFGHGYTYSAHPVAAAVALETLAIYDERDILGNVAVSGARLQERLRSFADHPLVGNVRGIGLIGAIELVADKATHGAFPASDAVGPRVVTKAEEAGVILRAMAGDVVAFSPPLIITPEEVDQMMDRFTVALEAVTAEVLG

SEQ ID NO: 3990 - protein, 133 aa, Glycine max
MSYTLCFAPICSLKSPNRPGTIAGNSVTQKAFGMNEVCQNSKVPSFQSLKVKATEDKTTQSKTIRSIVCSDCDGNGAKSCTQCKGTGVNSVDHFNGQFKAGGLCWLCRGKKDILCGSCNGAGFLGGIMSTFDD

SEQ ID NO: 3991 - protein, 167 aa, Helianthus annuus
MATQSKKTLYDFTVKDAKGNDVDLSVYKGKVVLIVNVASKCGLTNNSYDELNQIYLKYKEKGFEILAFPCNQFGQQEPGTNEEIVDFVCTKFKSEFPIFDKIDVNGENAAPVYEFLKTGFYGILGGDIQWNFSKFLVDKNGQPVDCYYPTTSPLTVERDIQKLLGLL

SEQ ID NO: 3992 - protein, 132 aa, Candida glabrata
VIAIDINDPLAPKLNDIEDVEKYFPGLLRATNEWFRIYKIPDGKPENQFAFSGEAKNKKYALDIIKETNESWKQLIAGKSTDSKDIALENTKVTDSPYYSASAASAIPAAAPQADAPIDKSVDKWFFISGSA

SEQ ID NO: 3993 - protein, 149 aa, Candida albicans
MAEKLSEQQIAEFKEAFSLFDKDSDGKITTKELGTVMRSLGQNPSESELTDMINEVDVNSDGSIDFPEFLTMMARKMKDTDSEAEIAEAFKVFDRNGDGKISAAELRHLLTSIGEKLSDADVDQMIKEADTNNDGEIDIQEFTLLLAAK

SEQ ID NO: 3994 - protein, 461 aa, Escherichia coli O157:H7 EDL933
MADNKPELQRGLEARHIELIALGGTIGVGLFMGAASTLKWAGPSVLLAYIIAGLFVFFIMRSMGEMLFLEPVTGSFAVYAHRYMSPFFGYLTAWSYWFMWMAVGISEITAIGVYVQFWFPEMAQWIPALIAVALVALANLAAVRLYGEIEFWFAMIKVTTIIVMIVIGLGVIFFGFGNGGQSIGFSNLTEHGGFFAGGWKGFLTALCIVVASYQGVELIGITAGEAKNPQVTLRSAVGKVLWRILIFYVGAIFVIVTIFPWNEIGSNGSPFVLTFAKIGITAAAGIINFVVLTAALSGCNSGMYSCGRMLYALAKNRQLPAAMAKVSRHGVPVAGVAVSIAILLIGSCLNYIIPNPQRVFVYVYSASVLPGMVPWFVILISQLRFRRAHKAAIASHPFRSILFPWANYVTMAFLICVLIGMYFNEDTRMSLFVGIIFMLAVTAIYKVFGLNRHGKAHKLEE

SEQ ID NO: 3995 - protein, 248 aa, Helianthus annuus
MSFQNEDSGDISPQRRIGKGKIEIKRIENTTNRQVTFCKRRNGLLKKAYELSVLCDAEVALIVFSSRGRLYEYANNSVTGTIDRYKKSCLDPPSTGSVAEANAQFYQQEATKLRQQIANLQNQNRQFYRNIMGESLADMPGKELKNLESKLEKAINRIRAKKNELLFAEIEYMQKRELELHNSNQFLRARIAENERAQQQHMSLMPGSSGYNDLGPHQSFDGLNDLQTNELQLNNNYSCQDQTPLQLV

SEQ ID NO: 3996 - protein, 161 aa, Oenococcus oeni MCW
MNGRSFEIAVLPGDYIGPEIMRAGLAVLAVVSKNKNFDYKIKELPFGGAAIDKDGDPLPANTLKECQDSDAILLAAIGGPKWDQASKRPEAGLLEIRKALNLFANIRPTAISPAMQKYSPLKQIKKIDFLIVRELTSGIYFGKPREESEQAALDTMRYSAT

SEQ ID NO: 3997 - protein, 512 aa, Solanum tuberosum
MDGTAVQGTSSVDSFLRNYKLGKTLGIGSFGKVKIAEHTLIGHKVAVKILNRRKIRNMDMEEKVSREIKILRLFMHGHISRLYEVIETPSDIYVVMEYVKSGELFDYIVEKGRLQEDEARNFFQQIISGVEYCHINMVVHRDLKPENLLLDSKWNVKIADFGLSNIMRDGHFLKTSCGSPNYAAPEVISGKLYAGPEVDVWSCGVILYALLCGTLPFDDENIPNLFKKIKGGYITLPSHLSAGARDLIPRMLIVDPMKRMTIPEIRLHPWFQAHLPRYLAVPPPDTMQQAKKIDEEILQEVVKMGFDRNNLTESLRNRVQNEGTVPYYLLLDNRHRVSTGYLGAEFQESMEYGYNRINSNEPLLPCWQRFPGIMDYQQAGARQFPIERKWALGLQSRAHPREIMTEVLKALQELNVCWKKIGQYNMKCRWVPSVPGHHEGMGVNSMHGNQFFGDDSSIIENDGDTKLTNVVKFEVQLYQTREEKYLLDLQDQGSQFLFLDLCAAFLAQLRVL

SEQ ID NO: 3998 - protein, 382 aa, Thermoplasma volcanium
MSIRIGLIGEPNVGKSTFFSAATENEAEINNFPFTTIKPNLGMTYFVVKCPEVEISGKCNPREGYCENGNRHIPVQIIDVPGLIEGASEGKGMGNEFLDNIRDVDSILLLFDASAGDIATVRKSIEMVKSELLKWISQRIYSDWDHFSRKSEASGERRDIALKRKLSLFGISEHQISEMMEKDFFPAKLSIWTREDADKLALSIIKYAKPLLLVGNKSDLVSPNTLSEMKNALGDSYFVSAEYELALKRARKSGLVSTTLNDFAILGGNEKQKEVLAKIRDWFNTPGIIRIHDLLQKVVRDYLHYIIVYPVYDESKWTDKSGNVLPDAFVMPYGSTSLDLAYKIHTDIGEGFIRAVNARTRMVLGKDYILKDGDVIKIISKK

SEQ ID NO: 3999 - protein, 215 aa, Oryza sativa
  unsure (1)..(215): unsure at all Xaa locations
ARSESEKTSTALSHQTGAFFGSRTYVELCMRSFLAPSRSRSTPNPSPKSCSFGSTTSSSSSSLAASSSDDSAATTPRSVLPASAAASSSXXTKKPAAVAVTREDLEVALRRIVSSKEELAAMLAEAECAGXXLVLEEIAAXXAADEGELKETFAVFDADGDGRISAEELRAVLASLGDELCSVDDCRRMIGGVDTDGDGFVCFDEFARMMMCGRA

SEQ ID NO: 4000 - protein, 78 aa, Glycine max
LVFSITFLLLTCGLKAIDAFLEELIVRRELADNYCFYQPHYDSLKGAWAWAQNTLTEHATDKREHIYTKEQLEKAQTG

SEQ ID NO: 4001 - protein, 244 aa, Triticum aestivum
MLTETVNIVLNEKEKKKKNGLAPQPDRRRRRAAAKMVSLKLQKRLASSVLKCGKGKVWLDPNEVNEISMANSRQNIRKLVKDGFIIRKPQKIHSRSRARRAHEAKQKGRHSGYGKRRGTREARLPTKILWMRRMRVLRRLLRKYREAKKIDKHMYHDMYLKVKGNMFKNKRVLMESIHKSKAEKAREKTLSDQFEAKRAKSKASRERKIARREERLAQGPRDHAPAPAAAAPAQAAAAPKKAKK

SEQ ID NO: 4002 - protein, 366 aa, Zea mays
MAHAQEIQLQIRGIPDEESVDARDGPKAATGRSTRSSFRWWMTVLVDMLMVLCGTTVATLLGRLYFNSGGNSKWMATLTQSGGSPLLVVPLLLSPARSAEERRPAALKMVAIYAGIGVMIGFDNLMYSYALQYLPVSTFSLVAATQLGFNAITSRLINAQRFTALIANSVVVLTFSAAILGVGSSSDETSSNVPRGKYPLGFVLVLAASAVFALILSLFELTFEKVVRVRTARWVLRMQMHTNLVASAVSVAGLLASGDWRTIPGEMASFKDGRTRYVLTLVGTAVSWQAAAVGLVRLIMRVSSLFANVTCTLALPLVPVFAVALFGDRMTGIKIVAMLMAVWGFLSYMYQHYIDARRRAGAENAE

SEQ ID NO: 4003 - protein, 248 aa, Rickettsia conorii
MIKRRKKMIDLTGKTSLITGASGGIGGAIARLLHKLGSHVIISGSNEEKLQSLGKVVKDNYTIEVCNLADKEECRNLISKASKLDILVCNAGITSDTLAIRMKDEDFDKVIDINLKANFILNREAIKKMIQNRYGRIINISSIVGISGNPGQANYCASKAGLIGMTKSLSYEVATRGITVNTVAPGFIKSDMTDKLNEKQREAIVQKIPLGTYGMPEDVAHAVAFLASDQASYITGQTIHVNGGMLMV

SEQ ID NO: 4004 - protein, 235 aa, Oryza sativa
  unsure (1)..(235): unsure at all Xaa locations
MATAGSRKGGRGRKALTAVLDNDANISAGKADVAAAAGILSPPQKAKRATSKSSKGKAAAAAAAEEQASVVDAVSELQGMLEELRLEKEKAEEMVRERDEVIRRKEEEQGRLQAELKKVQRAKEFKPTVSIPLVKALIEKDQEGEKKKGKGKAGHDRKKPCPAYVLWCKDQWNEIKKESPDADFKEVSNALGAKWKALGAEEKQPYEERYRQEKEAYXXVVGQEKREAEAMKLLX

SEQ ID NO: 4005 - protein, 645 aa, Solanum tuberosum
MATYFPSPNNQRDADQTFQYFRQSLPESYSEASNAPENMMVFMNYSSSGAYSDMLTGTSQQQHNCIDIPSIGATPFNTSQQEILSNLGGSQMGIQDFSSWRDSRNEMLADNVFQVAQNVQGQGLSLSLGSNIPSGIGISHVQSQNPNQGGGFNMSFGDGDNSQPKEQRNADYFPPDNPGRDLDAMKGYNSPYGTSSIARTIPSSKYLKAAQYLLDEVVSVRKAIKEQNSKKELTKDSRESDVDSKNISSDTPANGGSNPHESKNNQSELSPTEKQEVQNKLAKLLSMLDEIDRRYRQYYHQMQIVVSSFDVVAGEGAAKPYTALALQTISRHFRCLRDAICDQIRASRRSLGEQDASENSKAIGISRLRFVDHHIRQQRALQQLGMMQQHAWRPQRGLPESSVSVLRAWLFEHFLHPYPKDSDKIMLARQTGLTRSQVSNWFINARVRLWKPMVEEMYKEEAGDAKIDSNSSSDVAPRLATKDSKVEERGELHQNAASEFEQYNSGQILESKSNHEADVEMEGASNAETQSQSGMENQTGEPLPAMDNCTLFQDAFVQSNDRFSEFGSFGSGNVLPNGVSLTLGLQQGEGSNLPMSIETHVSYVPLRADDMYSTAPTTMVPETAEFNCLDSGNRQQPFWLLPSAT

SEQ ID NO: 4006 - protein, 142 aa, Glycine max
  unsure (1)..(142): unsure at all Xaa locations
MSGVGPLSQDWEPVVLRKKAPTAAAKKDEKAVNAARRSGAEIETLKKYNAGTNKAASSGTSLNTKRLDDDTESLAHEKVPTEPKKXIMQVRMDKKLTQSQLAQLINEKPQVIQEYESGKAIPNQQIISKLERALGAKLRGKK

SEQ ID NO: 4007 - protein, 469 aa, Oceanobacillus iheyensis HTE831
MNDSDKLLKSLGKKETFALAFGAMIGWGWVVTSGLWITEAGALGAIIAFLLGGLLVVFVGLTYAELSSALPFVGGEHVYTYKAMGRVTSFIATWAIILGYVSVIAFEAVALPTVFEYLVPNYSQGYLYTIAGWDVTLTWAGVGIIGSVLVAWINYRGIKLSSIINFILTILILIAGIMLITGSTFSGNMSNMNPLFETGMTGIMTVLMMTSFMFVGFDVIPQAAEEINLPNKKIGQLLILSVVVAVIWYIAIIFGVSRMLTPSEINASNLVTADAVAKAFGNSEMMGNFLVLGGIGGILTSWIGFYVGGSRAIYALAKAGMLPKSLGQLHPKYNTPHKAILLIAVLSTAAPLLGRPALVWLVNAGGLGLVVAWLMVTISFIILRKKAPEMQRPFRLPGGTTIGWIATIMAIGVTILYLPGMPSALIWPYEWLIIGTWIILGFVLYNYSMRKYGKKNTDDYMKKEVNKSA

SEQ ID NO: 4008 - protein, 192 aa, Ceratopteris richardii
MAWSVSVGSTSIPQDEDETKQSVITSGISKTKGHNQGHRKHPSKDVTKDIGDGDELMCGVEKKRRLTAEQVNFLETSFSMDLKLEPERKAHLAKQLGIQPRQVAIWFQNRRARWKNQQIEQDYESLKASYEAVVEEKERLLKEHDLALEANKRLQAEIARLTRSLQSYDRNGMSEPKGGTAEQWQIRGNVNQ

SEQ ID NO: 4009 - protein, 281 aa, Physcomitrella patens subsp. patens
MGRGKIEIKKIENTTSRQVTFSKRRGGLLKKAHELAVLCDAEVALVIFSSTGKHFEFASSGSMRDIIERYRKSSDGAVKRGTNTDLLGREVIKLKQQVERLESSQRHMLGEDLSALKVSDLLELEQQLDQGASRVRARKNQLILEEIEDLRRKEHELMIANEALRKKIADAEGAAEAAARANFPDARLESPKPFASDFSRDMSVSSQLAASVYPHPNLLQAQRSQTSLQLGWLSEQQIPSTEEGCAGESSLKWDHPHFHIQNRLHANISPSVRTYKLHVDR

SEQ ID NO: 4010 - protein, 754 aa, Geobacillus stearothermophilus
MENQNRQNAAQCPFHGSVTNQSSNRTTNKDWWPNQLNLSILHQHDRKTNPHDEEFNYAEEFQKLDYWALKEDLRKLMTESQDWWPADYGHYGPLFIRMAWHSAGTYRIGDGRGGASTGTQRFAPLNSWPDNANLDKARRLLWPIKKKYGNKISWADLFILAGNVAIESMGGKTIGFGGGRVDVWHPEEDVYWGSEKEWLASERYSGDRELENPLAAVQMGLIYVNPEGPDGKPDPKAAARDIRETFRRMGMNDEETVALIAGGHTFGKAHGAGPATHVGPEPEAAPIEAQGLGWISSYGKGKGSDTITSGIEGAWTPTPTQWDTSYFDMLFGYDWWLTKSPAGAWQWMAVDPDEKDLAPDAEDPSKKVPTMMMTTDLALRFDPEYEKIARRFHQNPEEFAEAFARAWFKLTHRDMGPKTRYLGPEVPKEDFIWQDPIPEVDYELTEAEIEEIKAKILNSGLTVSELVKTAWASASTFRNSDKRGGANGARIRLAPQKDWEVNEPERLAKVLSVYEDIQRELPKKVSIADLIVLGGSAAVEKAARDAGFDVKVPFFPGRGDATQEQTDVESFAVLEPFADGFRNYQKQEYSVPPEELLVDKAQLLGLTAPEMTVLVGGLRVLGANYRDLPHGVFTDRIGVLTNDFFVNLLDMNYEWVPTDSGIYEIRDRKTGEVRWTATRVDLIFGSNSILRSYAEFYAQDDNQEKFVRDFINAWVKVMNADRFDLVKKARESVTALQSYTTPFLDLRLVLNCSK

SEQ ID NO: 4011 - protein, 288 aa, Zea mays
MATAATASATAATRFTLLAGAGLRSRISRLPTAVRFQRQRGLTTTALLKTADLQPKEQGKPETLDYRVFLVDGGGRKVSPWHDVPLRAGDGVFHFVVEIPKESSAKMEVATDEAFTPIKQDTKKGNLRYYPYNINWNYGLLPQTWEDPTSANSEVEGAFGDNDPVDVVEIGERRANVGDVLKVKPLAALAMIDEGELDWKIVAISLDDPKASLVNDVDDVEKHFPGTLTAIRDWFRDYKIPDGKPANKFGLGNKPASKEYALKVIQETNESWEKLVKRNIPAGELSLA

SEQ ID NO: 4012 - protein, 397 aa, Streptogyna americana
TGYDRVMVYRFHDDEHGEVVAESRRADLEPYLGLHYPATDIPQASRFLFRQNRVRMIADCHAAPVKVIQDPALPQPLCLVGSTLRAPHGCHAQYMANMGSIASLVMAVIISSGGDDEHNMMRGGIPSAMKLWGLVVCHHTSPRCIPFPLRYACEFLMQAFGLQLNMELQLAHQLSEKHILRTQTLLCDMLLRDSPTGIVTQSPSIMDLVKCDGAALYYHGKYYPLGVTPTEAQIKDIIEWLTLCHGDSTGLSTDSLADAGYPSAAALGDAVCGMAVAYITPSDYLFWFRSHTAKEIKWGGAKHHPEDKDDGQRMHPRSSFKAFLEVVKSRSLPWENAEMDAIHSLQLILRDSFRDAAEGTSNSKAIVNGQVQLGELELRGIDELSSVAREMVRLIET

SEQ ID NO: 4013 - protein, 392 aa, Brassica rapa subsp. pekinensis
MGYIGAHGAAALHRYKYSGEDHSYLAKYLLNPFWTRFVKVFPLWMPPNMITLMGFMFLVTSSLLGYIYSPQLDSPPPRWVHFAHGLLLFLYQTFDAVDGKQARRTNSSSPLGELFDHGCDALACAFEAMAFGSTAMCGRDTFWFWVISAIPFYGATWEHYFTNTLILPVINGPTEGLALIYVSHFFTALCGSEWWAQQLGESIPLFSWVPFVNAIQTSRAVLYMMIAFAVIPTVAINVSNVYKVVQSRKGSMVLALAMLYPFVVLLGGVLIWDYLSPINLIETYPHLVVLGTGLAFGFLVGRMILAHLCDEPKGLKTNMCTSLVYLPFALANALTARLNNGVPLVDELWVLLGYCIFTVSLYLHFATSVIHEITAALGIYCFRITKKLEKKP

SEQ ID NO: 4014 - protein, 411 aa, Xylella fastidiosa Temecula1
MSAVSESVLSLSRYYLPVYRPCQVVLVRGQGSRVWDEQGRDYLDLAAGIAVCCLGHCDPDLVAALVEQAGRLWHTSNVFYSEPSLRLAQELVDVSRFAERVFLCSSGTEANEAAIKLVRKWAAAQGRLPEHRTIVTFRGSFHGRTLGAVTATAQPKYQEGYEPLPGGFRYVDFNHIEALEAAMVGGDVAAVMLEPIQGEGGVMPIAPGYLAQVRALCDRYGALLVLDEIQCGMGRTGTLFAYWQEEVVPDIVTLAKGLGGGFPIGAMLAGPKVAEVMQFGAHGTTFGGNPMAAAVARVALRKLASVEIAANVQRQSVALRAGLEEISEAFGGVFTQVRGRGLMLGAVLAPLYAGQASAILEVAAEHGVLLLQAGPDVLRFVPALNVSDEELADGLVRLRAALGDYVSRCRG

SEQ ID NO: 4015 - protein, 393 aa, Zea mays
MGFIGAHGVETLKRYRYSGEDRSVVAKYVLQPFWSRCVTLFPLWMPPNMITLTGFSFLVLSALLGYICSPHLDTAPPRWVHLAHGLLLFLYQTFDAVDGKQARRTSSSSPLGELFDHGCDALACAFEALALGSTLMCGGWTFCFWVVAAVPFYLATWEHFFTNTLILPTINGPTEGLMLIYVSHLFTFFTGAEWWAQDFRKSLPFFGWIPLPFLSEIEIPLYVLVLILMIVCAVIPTVRSNVSNVQEVVEARKGSMALALAMILPFIVLIAGVAIWCYLSPSSIMGSEREREGIGTGFNFGYLVGRMILAHLCDEPKGLKSGMFKSNKELRFPIANALIAKINDGSPLVDELVLLLLYCAYTVGLYLHLAVSVVHEIKDALGIYCFRIARKEA

SEQ ID NO: 4016 - protein, 460 aa, Sinorhizobium meliloti
MPVEILMPALSPTMEEGTLSKWLKNEGDKVSSGDVIAEIETDKATMEVEAVDEGTIGKLLIAAGTEGVKVNTPIAVLLQDGEAASDIDSMKTEAPKAETPKPAAAEAPAASAAPVAAQPKADVPSDPAIPAGTEMATMTVREALRDAMAEEMRANEDVFVMGEEVAEYQGAYKVTQGLLQEFGARRVVDTPITEHGFAGVGVGAAMTGLRPIVEFMTFNFAMQAIDQIINSAAKTLYMSGGQMGAPIVFRGPSGAAARVAAQHSQCYAAWYSHIPGLKVVMPYTAADAKGLLKAAIRDPNPVIFLENEILYGQSFEVPKLDDFVLPIGKARIHRTGKDATLVSFGIGMTYAIKAAAELEAQGIDVEIIDLRTIRPMDLPTVIESVKKTGRLVTVEEGYPQSSVGTEIATRVMQQAFDYLDAPILTIAGKDVPMPYAANLEKLALPNVAEVVDAVKAVCYK

SEQ ID NO: 4017 - protein, 181 aa, Paenibacillus polymyxa
MSIYDYSAIAMNGKEIVLSDYKDKVVLIVNTASQCGFTFQYQDLQRLYDQFKDRGLVILGFPCNQFADQEPDSNESVQTFCTLNYGVAFPMFQKVNVRDEQAHPLFTYLASSLPFEGFDETHSVAKILIPLIHERHPEYLPGDSIKWNFTKFLIDRNGKVIKRFEATTDPLDMEEYIEALL

SEQ ID NO: 4018 - protein, 171 aa, Glycine max
MASSDVEYRCFVGGLAWATDDQALERAFSQYGEIVETKIINDRETGRSRGFGFVTFASEQSMKDAIEGMNGQNLDGRNITVNEAQSRGGGGGGGGGGGGYGGGRGGGYGGGGRGGGGGYNRSGGGGGYGGGGGYGGGGGGGYGGGRDRGYGGGGDRGYSRGGDGGDGGWRN

SEQ ID NO: 4019 - protein, 353 aa, Glycine max
MASATPLLKDELDIVIPTIRNLDFLEMWRPFFEPYHLIIVQDGDPSKIIKVPEGFDYELYNRNDINRILGPKANCISFKDSACRCFGYMVSKKKYIYTIDDDCFVATDPSGHKINALKQHIENLLCPSTPYFFNTLYEPFREGADFVRGYPFSLREGVPTAVSHGLWLNIPDYDAPTQLVKPLERNTRYVDAILTIPKGTLFPMCGMNLAFDRDLIGAAMYFGLMGDGQPIGRYDDMWAGWCCKVICDHLGLGIKTGLPYIYHSKASNPFVNLRKEYKGIFWQEDIIPFFQSIVLPKEATTVQKCYIELAKQVKEKLSKVDPYFDKLADAMVTWIEAWDELNPAGASVANGKA

SEQ ID NO: 4020 - protein, 373 aa, Methanocaldococcus jannaschii
MMVRVMRYKKVPVKKIVNKIIDECDVILLVLDARDPEMTRNRELEKKIKAKGKKLIYVLNKADLVPKDILEKWKEVFGENTVFVSAKRRLGTKILREMIKQSLKEMGKKEGKVGIVGYPNVGKSSIINALTGKRKALTGSVAGLTKGEQWVRLTKNIKLMDTPGVLEMRDEDDLVISGALRLEKVENPIPPALKILSRINNFDNSIIKEYFGVDYEEVDEELLKKIGNKRSYLTKGGEVDLVRTAKTIIKEYQDGKLNYYKVDLKKYGQDRERDISFITKYLKDFPFIEDAKMIVTHLKDFDGLYKKIKKPVLGSEEIDGNIVVVSFGEKTKDACRKKVENLCRERNIEVLSKFGDKIGANNIYVAVGKRVKE

SEQ ID NO: 4021 - protein, 338 aa, Salmonella enterica subsp. enterica
MKLLITGGCGFLGSNLASFALSQGIDLIVFDNLSRKGATDNLHWLSSLGNFEFVHGDIRNKNDVTRLITKYMPDSCFHLAGQVAMTTSIDNPCMDFEINVGGTLNLLEAVRQYNSNCNIIYSSTNKVYGDLEQYKYNETETRYTCVDKPNGYDESTQLDFHSPYGCSKGAADQYMLDYARIFGLNTVVFRHSSMYGGRQFATYDQGWVGWFCQKAVEIKNGINKPFTISGNCKQVRDVLHAEDMISLYFTALANVSKIRGNAFNIGGTIVNSLSLLELFKLLEDYCNIDMRFTNLPVRESDQRVFVADIKKITNAIDWSPKVSAKDGVQKMYDWTSSI

SEQ ID NO: 4022 - protein, 246 aa, Triticum aestivum
  unsure (1)..(246): unsure at all Xaa locations
MGALAASIASHVPSGMLSAGLAALAALPNPGELVRKAARLEDELRELLRLNGRGAEARAEQGAGNRAQQTRERFLRAYERLKDELLNDRAFNFDFTEETRQWVAKMLDYNVPGGKLNRGLVXIDSYMLLREGTEVDEEDFYLARRLRSRIVRLQASALVMDDITDNAYTRRDNLCWYKLPTVGLSAINDGVLLKCHVQAIIKRYFKEKFYFMELMELWNEVCTIQCAPSNQFPDLLSVPLLSSSRS

SEQ ID NO: 4023 - protein, 368 aa, Pichia ohmeri
MSTKTITVVPGDHVGTEICDEAIKVLKAIEKVSPVKFEFKHHLIGGAAIDATGVPLPDETLEAAKSSDAVLLGAVGGPKWGTGAVRPEQGLLKIRKELNLYANLRPCNFVSDSLLELSPLKSEIVKGTNFTVVRELVGGIYFGERQEQEESSDGQSAWDTEKYSVEEVTRITRMAAFMALQHNPPLPIWSLDKANVLALSRLWRKTVDHVMSTEFPQLKVQHQLIDSAAMILVKSPSQLNGVIITSNMFGDIISDEASVIPGSLGLLPSASLASLPDTNSAFGLYEPCHGSAPDLPANKVNPVATILSVAMMLRLSLDCLKEAEALEKAVGQVLDAGIRTADLRGSSSTKEVGDAVAAAVEKILAEGK

SEQ ID NO: 4024 - protein, 172 aa, Glycine max
  unsure (1)..(172): unsure at all Xaa locations
MGSIPDPGELSELTQPSFDEFQRQTSLMTSCTLLWKELSDHFSSLEQDLNHXSEALKRKIHTLHDADDTSPDGEVDDTAGLVLKLKSFCLRMDAFGFFAFVSAKKKELDGLRAEMPVALAECVDPAKFVLEAISEVFPVDKRGEKAGHDLGWACVLVLESLIPVVVDPVIGK

SEQ ID NO: 4025 - protein, 338 aa, Bacillus anthracis str. A2012
  unsure (1)..(338): unsure at all Xaa locations
MAILITGGAGYXGSHTCVELLNNNYKIIVVDNLSNSSIESLNRVKEITGKQFEFYKENVLNREKMNEIFLENNIEAVIHFAGFKAVGESTTTPLAYYYNNIISAIVLCDVMQKHNVKNFIFSSSATVYGIPKTLPITEEFPLSVTNPYGQTKLMIEQIMRDVAKADDEWSIALLRYFNPFGAHQSGRIGEDPNGIPNNLMPYVTQVAVGKLKELNIFGNDYPTKDGTGVRDYIHVVDLAKGHVKALEKVLKTKGIEAYNLGTGKGYSVLEMVKAFEKVSGKKIPYKVIGRRPGDVAICFADVSKAKRELGWEAEYGLEEMCVDSWRWQVNNKNGYQMI

SEQ ID NO: 4026 - protein, 226 aa, Glycine max
MASNAKRSRQVSHYEVKRTLYNDIYLRRSQFQAPSPCSSRILFLRSTTIITSFSLRTDHTMATSSAKSVHDFTVKDAKGNDINLGDYKGKVLIIVNVASQCGLTNSNYTELSQLYEKYKQKGLEILAFPCNQFGAQEPGSNEQIQEFVCTRFKAEFPVFDKVDVNGDKAAPLYKYLKSSKGGLFGDGIKWNFSKFLVDKEGNVVDRYAPTTSPLSIEKDLLKLLDA

SEQ ID NO: 4027 - protein, 444 aa, Yersinia pestis CO92
MSTDDQKVGLIPVTLMVAGNIMGSGVFLLPANLASTGGIAIWGWLVTIIGALALSMVYAKISSLDDSPGGSYAYARRAFGPFLGYQTNVLYWLACWIGNIAMVVIGVGYLSYFFPILKEPMVLTITCVVFLWIFVGLNIIGPKMITRVQAVATSLALIPIVGIALFGWFWFKGETYMAAWNVSGLGTFGAIQSTLNVTLWSFIGVETASVAAGVVKNPKRNVPIATVGGVLIAAVCYVLSSSAIMGMIPNAELRLSASPFGDAARLALGDTAGAVVSLCAAAGCLGSLGGWTLVAGQTAKAAADDGLFPPIFGKVNKAGTPVAGLLILGVLMTIFQISSISPNAAKEFGLVSSVSVIFTLVPYLYTCSALLLVGHGHLGNQVKTYVGITLIAFVYCIWAVVGSGAEEVMWSFVTLMVITALYTFNYNRTHKNPFPLDAPVKNGQ

SEQ ID NO: 4028 - protein, 230 aa, Bacillus anthracis str. A2012
MSQILIGIGWVLFTVLLYQLSKKIYKLFPTPFTIPMLVATGLMAFLLIVLDIPYQHYMESGGGWIAKLLGPGVVAFAIPLYKQRHVLQKYVVPIAGGVLVGTTVAIASDFAIASLMGTDKSLILSSLPKSVTMPVAMSVSEQVGGVPSLTAAFVVIAGITGTITGPLLLKWSRVTNSVGKGIGFGCASHIMGVMRAMKNNEHEGVIGSVTMTLTAILTCLLGPLFAMMFM

SEQ ID NO: 4029 - protein, 862 aa, Volvariella volvacea
MPPSDFAKANIDEIVEQLTLDEAISLTAGVGFWHTHAIERLGVPAVKVSDGPNGIRGNHFFMGTPAKCLPSSTALGATWDPEVVEEVGLKLLAPEAKLRAASLVLAPTSNIQRNPLGGRSFESFSEDPYLSGIISASYVNGVQKGGIGATIKHFVGNDKEDDRQGYDSIISERALREIYLLPFMLTQKYAAPWAIMTAYNRVNGVHVAEDPFLLKQVLRNEWKYKGLIMSDWFGMYSVDHGIKAGLDLEMPGINKWRTLDLVNRTIQARKLTPRDIKDRARVVLELVKKCAQGAPEILDGDGEERTVELESDKLLMRRIASESIVLLKNDNVLPLKPEGGAIKKIAVVGGNAKAQVLSGGGSAALKASYFISPYDGIKAALEPHGVEVTFSEGARAYKTLPTLEWDLETETGERGWIGTWHTHESDDSMTALDQPFIAPRLVDETRIFISTSYPKGITKRWTMRLKGYLKPREKDTNFEFGLIAAGRAKLWVDGQLVIDNWTRQRRGEAFFGSGSQEETGVYLLKAGKKHEIYVEYCNVRAPADGDEDEAIMDSNPGVRLGGAEVANADDLLSEAVKLASEADAVIAVVGLNADWETEGNDRRTLALPGRTDELVEKVAKVNSKTVVVTQAGSAITLPWLDSVAAVVHAWYLGNATGDAIADVLFGKQNPSGKLSLTFPKRLEDVPSHGHFGSENGKVRYAEDLFVGYKHYHHRNIEPLFPFGFGLSYTTFSLSNLQLSAPVIDHATSSFSLTATLSITNTGPVTGSEVAQLYVSYPETSELTHAPLQLRAFKKVKDLQPGETREVKLELDKYAVSYWNDRYQTWAVENGEYEIKVGNSSVSKDLTLVQRFVVKDGFEWRGI

SEQ ID NO: 4030 - protein, 430 aa, Escherichia coli CFT073
MMNTEGNNGNKPLGLWNVVSIGIGAMVGAGIFALLGQAALLMEASTWVAFAFGGIVAMFSGYAYARLGASYPSNGGIIDFFRRGLGNGVFSLALSLLYLLTLAVSIAMVARAFGAYAVQFLHEGSQEEHLILLYALGIIAVMTLFNSLSNHAVGRLEVILVGIKMMILLLLIIAGVWSLQPAHISVSAPPSSGAFFSCIGITFLAYAGFGMMANAADKVKDPEVIMPRAFLVAIGVTTLLYISLALVLLSDVSALELEKYADTAVAQAASPLLGHVGYVIVVIGALLATASAINANLFAVFNIMDNMGSERELPKLMNKPLWRQSTWGNIIVVVLIMLMTAALNLGSLASVASATFLICYLAVFVVAIRLRHDIHASLPILIVGTLVMLLVIVGFIYSLWSQGSRALIWIIGALLLSLIVAMVMKRNKTV

SEQ ID NO: 4031 - protein, 133 aa, Zea mays
QDDKFRELARRVTEVLEFRSAAGLIFCHPIMTTTEFWMSHECLLVPYEQALTHEEFFPSIYYDCSAYFLWVGKCTRQLDGGRSGSEIGALDAGVGIVGTGLGLIRLGIGAVAGLITSGLGTVSSGQGNFSIYV

SEQ ID NO: 4032 - protein, 70 aa, Brassica rapa subsp. pekinensis
VCYENPSPTAGIHRVVFILFRQLGRQTVYAPGWRQNFNTREFAEIYNLGLPVAAVFYNCQRESGCGGRRL

SEQ ID NO: 4033 - protein, 155 aa, Nostoc punctiforme
MIDEQEIEKLWQAFKVLDVDGNGAISTDELGEVMRSLGQNPTETGLRDLIKEIDVDLSGTIDFDEFKTLMIAKVGDRESRLKLAFSAFDEDNSGQITAVELRTVMSQFGLTDAELKEMLQEVDHDGDGSIDFEEFCQLVLEESESKTGYKDSPIS

SEQ ID NO: 4034 - protein, 140 aa, Zea mays; identical to SEQ ID NO: 901

SEQ ID NO: 4035 - protein, 117 aa, Zea mays
KDKKKRLSQYLYHPAAAASQFPHPLLQSKNRARVLGGERAADGGSMDNPEMQRFIQKEQQKAMMNEMVGKLTSACWDKCITSAPGSKFSSGESTCLTNCAQRFLDLSVLIAKRFEMQ

SEQ ID NO: 4036 - protein, 492 aa, Listeria monocytogenes EGD-e
MSTNKEKTFFGHPRGLATLFNTEFWERFSYYGMRALLLYYMYTAVADGGLGFSQSTATAIMSIYGSLVFMSGVIGGWFADRVLGARKTIFYGGVLIMVGHIVLALPNGGAAALFGSMAFIILGTGLLKPNVSNVVGDLYPAGDNRRDAGFSIFYMGINLGAFIAPPIVSAVSDNAGSYHAGFGVAAVGMAIALVVYVLTGKRYLKDAGKKAPNPLQRSEAKSLTFKIIGIVLGIGLLIAVLTLITGSLTIDTIILAVTVMGVGVPLAYFIMMMTSKKTEADEKSRLTAYIPLFLIAVLFWMIEEQGSSTLALFAAERTDLSIWGMNLNPANFQSLNPVFVITLSPIFAWIWTKLGDRQPSTPRKFALGLFFAGLSFVVMMLPGILHGNTTTLVSPLWLVLSFFICIFGEMFISPVGLSATTKLAPKAFASQTMSLWFLSDAMGQSFNAQLTQLFNADTEIAYFGITGFVAIAFAIALFIFAPFLKKYMKGVH

SEQ ID NO: 4037 - protein, 328 aa, Arabidopsis thaliana
MNSDKEEEPLEEIGDSNNVLDLTSYQLHSLDTVELPPNLIELDLTANRLSGLDSRIAQLSTLKKLSLRQNLIDDSAVEPLSHWDALSDLEELVLRDNKLAKVPDVSIFTKLLVYDISFNEITSLEGISKASSTLKELYVSKNEVNKIMEIEHLHNLQILELGSNRLRVMENLENFTKLEELWLGRNRIKVVNLCGLKCIKKISLQSNRLTSMKGFEECVALEELYLSHNGISKMEGLSALVNLRVLDVSNNKLTSVDDIQNLTKLEDLWLNDNQIESLEAITEAVTGSKEKLTTIYLENNPCAKSSDYVAAVRQIFPNVEQIDSNIFA

SEQ ID NO: 4038 - protein, 398 aa, Zea mays
WALRVSAATRLTSAVEEDKRSSPLGEGDEHVAASGAAGGEFDPGAPPPFGLAEIRAAIPKHCWVKDPWRSMAYVLRDVVVVLGLAAAAARLDSWLVWPLYWAAQGTMFWALFVLGHDCGHGSFSNNPKLNSVVGHILHSSILVPYHGWRISHRTHHQNHGHVEKDESWHPLPERLYKSLDFMTRKLRFTMPFPLLAFPLYLFARSPGKSGSHFNPSSDLFQPNEKKDIITSTASWLAMVGVLAGLTFLMGPVTMLKLYGVPYFVFVAWLPAGTYLHHHGHEDKLPWYRGQEWSYLRGGLTTLDRDYGLINNIHHDIGTHVIHHLFPQIPHYHLIEATEAAKPVLGKYYKEPKKSGPLPWHLFGVLAQSLKQDHYVSDTGDVVYYQTDSKTNTSAQKSD

SEQ ID NO: 4039 - protein, 173 aa, Glycine max
  unsure (1)..(173): unsure at all Xaa locations
MASSDVEYRCFVGGLAWATDDQALERAFSQYGEIVETKIINDRETGRSRGFGFVTFASEQSMKDAIEGMNGQNLDGRNITVNEAQSRGGGGGGGGGGXGGGYGGGRGGGYGGGGPGGGGGYNRSGGGGGYGGGGGYGGGGGGGYGGGRDRGYGGGGDRGYSRGGDGGDGGWRN

SEQ ID NO: 4040 - protein, 421 aa, Prochlorococcus marinus str. MIT 9313
MAELVDALDSKSSAFGHVGSSPTAPTAVMGTYKRFPVTLLRGKGCWVWDDHGHQYLDAVAGIATCALGHSDRALRRSLGQQLKQLQHVSNLYRIPEQEALAHWLVENSCADSVFFCNSGAEANEAAIKLARKHGHRRRGIDRPIILTANSSFHGRTLAAISATGQPNFHKGFEPMVEGFEFFPFNNLQAFEQQLNRLEAQGPSVAAVLIEPLQGEGGVNPGEAGFFRRLRELCSQHQILLIFDEVQVGMGRCGNWWGYQQLGIEPDAFTLAKGLGGGHAIGALLVKQHADLFEPGDHASTFGGNPFACKAALTVAKEIERRGLIAKVQQRGAQLREGLTDLVQRFPRQLKGVRGWGLLQGLVLQDESTFTAPNVAQAALEEKLLVIAAGPKVVRMVPPLIIKPSEIRQLLQRLEATLAHFR

SEQ ID NO: 4041 - protein, 250 aa, Xanthomonas campestris pv. campestris str. ATCC 33913
MELRMTSRVALVTGGTGGIGTAICKRLADQGHRVASNFRNEEKAREWQQRMQVQGYEFALFRGDVASSDHARALVDDVEAALGPIEVLVNNAGITRDTTFHRMTAEQWHDVINTNLNSVFNVTRPVIEGMRKRGWGRVIQISSINGLKGQYGQANYAAAKAGMHGFTISLARENAAFGITVNTVSPGYVATDMVMAVPEEVRAKIVADIPTGRLGRPEEIAYAVAFLVAEEAAWITGSNLDINGGHHMGW

SEQ ID NO: 4042 - protein, 412 aa, Pachysandra americana
SGKPFYAIMHRIDVGLVIDLEPVNPADVPVTAAGALKSYKLAAKAISKLQSLPSGNISLLCDVLVKEVNELTGYDRVMVYKFHEDEHGEVVAECRRTDLEPYLGLHYPATDIPQASRFLFLKNKVRMICDCLAPPIRVIQDKRLEQPLSLCGSTLRAPHGCHAQYMENMGSIASLVMSVTINEDDDDDDVESDQQKGRKLWGLVVCHHTSPRFVPFPLRYACEFLIQVFGIQINKEVELAAQTKEKHILRNQTMLCDMLLRESPVGIVTKSPNVIDLVKCDGAALYYKNKFWLLGVTPTEAQIRDISEWLIEYHNGSTGLSTDSLMEAGYPGASVLGDAVCGMAAIKITSKEFLFWFRSQTAKEIKWGGAKHEPFNKDDARKMHPRSSFKAFLEAVKQRCLPWEDVEMDAIQ

SEQ ID NO: 4043 - protein, 354 aa, Thermotoga maritima
MKIAVLPGDGIGPEVVREALKVLEVVEKKTGKTFEKVFGHIGGDAIDRFGEPLPEETKKICLEADAIFLGSVGGPKWDDLPPEKRPEIGGLLALRKMLNLYANIRPIKVYRSLVHVSPLKEKVIGSGVDLVTVRELSYGVYYGQPRGLDEEKGFDTMIYDRKTVERIARTAFEIAKNRRKKVTSVDKANVLYSSMLWRKVVNEVAREYPDVELTHIYVDNAAMQLILKPSQFDVILTTNMFGDILSDESAALPGSLGLLPSASFGDKNLYEPAGGSAPDIAGKNIANPIAQILSLAMMLEHSFGMVEEARKIERAVELVIEEGYRTRDIAEDPEKAVSTSQMGDLICKKLEEIW

SEQ ID NO: 4044 - protein, 314 aa, Vibrio parahaemolyticus RIMD 2210633
MVNNSIQWFPGHMHKARKEIEEAIPQVDVIIEVLDARIPFSSENPMISKIRGEKPVVKVLNKRDLADPELTQLWIDHLEKEQNVKAMAITTSEPQEVHKIMELCRKLAPHREEVGKNIRTMIMGIPNVGKSTIINTLAGRTIAVTGNQPAVTRRQQRINLQNGIVLSDTPGILWPKVENPHSGFRLAATGAVKDTAMEYDEVAFYTVEYLAAHYPERLKERYQIEELPESDIEIMEEIGRRRGALRAGGRVDLHKVSEILLHELRQGTLGQITLELPEMITQELIEVEIETARKEEEKAKRKEERRKRYLRNKR

SEQ ID NO: 4045 - protein, 735 aa, Gluconacetobacter xylinus
MRLSRKIFLLSAVACGMALAQAPAFARHAHDGGGDQADARARQVLASMSLEDKMSLLFSVDGGGFNGSVAPPGGLGSAAYLRAPQGSGLPDLQISDAGLGVRNPAHIRRNGEAVSLPSGQSTASTWDMDMARQAGVMIGREAWQSGFNILLGGGADLTRDPRGGRNFEYAGEDPLQTGRMVGSTIAGVQSQHVISTLKHYAMNDLETSRMTMSADIDPVAMRESDLLGFEIALETGHPGAVMCSYNRVNDLYACENPYLLNKTLKQDWHYPGFVMSDWGATHSSARAALAGLDQESAGDHTDARPYFRTLLAADVKAGRVPEARINDMAERVVRALFAAGLVDHPAQRGPLDVVTDTLVAQKDEEEGAVLLRNQGNILPLSPTARIAVIGGHADAGVISGGGSSQVDPIGGEAVKGPGKKEWPGDPVYFPSSPLKAMQAEAPGARITYDPGTSIASAVRAARAADVVVVYATQFTFEGMDAPSMHLDDNADALITAVAAANPRTVVVMETGDPVLMPWNSSVAGVLEAWFPGSGGGPAIARLLFGKVAPSGHLTMTFPQAESQLAHPDIAGVTADNVFEMQFHTDQELVYDEGSDVGYRWFDRNHFKPLYPFGYGLTYTTFSTDGLKVTERHGQVTATFNVHNTGTRAGVDVPQVYVGLPDGGARRLAGWQRISLAPGESRQVSVQLEPRLLAHFDGKHDRWSVPSGTFRVWLASCATDDSQQTTMHLHGRTMAP

SEQ ID NO: 4046 - protein, 344 aa, Cytophaga sp. KUC-1
MLPKTMKAAVIREFGSLLKIEEVEVKRPGRNEILVKVIASGVCHTDLHAVEGDWPVKPKMPLIPGHEAVGYVVAVGQEVKNVKEGDAVGVPWLYSACGGCDQCITGWETLCDTQQNGGYSVDGGFAEYVIADARYVGLLPSNVNFMEMAPILCAGVTVYKGLKETEVKPGEWVAISGIGGLGHVAVQYAKAMGMHVAAIDVADDKLDLAKKLGADLVVNAKNQNPGEFLKKEVGGMHGALITAVSPIAFKQGLETLRRKGTMALNGLPPGNFDLSIFDTVLNRITIRGSIVGTRKDMKEAIEFAVEGKVKATVTPAKLENINEVFDKMKKGQIEGRVVLEIAKA

SEQ ID NO: 4047 - protein, 216 aa, Escherichia coli CFT073
MLDLFADAEPWQEPLAAGAVILHRFAFNAAEQLIRDINDVASQSPFRQMVTPGGYTMSVAMTNCGRLGWTTHRQGYLYSPIDPQTNKPWPAMPQSFHNLCQRAATAAGYPDFQPDACLINRYAPGAKLSLHQDKDEPDLRAPIVSVSLGLPAIFQFGGLKRNDPLKRLLLEHGDVVVWGGESRLFYHGIQPLKAGFHPLTTDCRYNLTFRQAGKKE

SEQ ID NO: 4048 - protein, 222 aa, Lycopersicon esculentum
MAPKEKIGAVTAMAMVNLNGISKEVHYRGVRKRPWGRYAAEIRDPGKKSRVWLGTFDTAEEAARAYDNAAREFRGAKAKTNFPKLEMEKEEDLKFAVKNEINRSPGQTSTVESSSPVMVDSSSPLDLSLCGSIGGFNHHTVKFPSSGGGFTGSVQAVNRMYYIEALARAGVIKLEQIGRKRLDYLGGGDSDSSTVIDFMRVDVKSTTAGLNLDLNFPPPENM

SEQ ID NO: 4049 - protein, 453 aa, Zea mays
MAASARDSTDAAERVVDDHDGWASDAEMDVEMDVVEGDADRRDGGADGDDEYLLLTRIRDTSAAEARAGKDIQGIPWERIHIARQDYRKARLEQYKNYENFPQSGELMDKLCKQVEKSSKYYEFQHNTRSVKPSILHFQLRNLLWATSKHDVYFMSNSTVSHWSSLSHKLSEVLDFSGHVAPAEKYPGSLLEGFSGVQVSTLAVNEGLVVAGGFQGELIGKDVEGCSVKFCMRTTLSDNAITNAIDIHRSISGSLHITVSNNDCGVREYDMERYQLVNHYRYNWPVNHTSVSPDKKLLAVVGDDRDALLVDSRNGKVTSTLVGHLDYSFATAWHPDSRTFATGNQDKTCRIWDTRNLSTSLAVLRGNIGAIRCIRYSSDGRFLVFSEPADFVHVYSVAADYKKRQEIDFFGEVSGITLSPDDESLFIGVCDRVYASLLQYRMIRGFDYLDSYV

SEQ ID NO: 4050 - protein, 521 aa, Bifidobacterium longum DJO10A
MRNNRAAEKRNEISMADTNVNGGTQQATGKLKSVESLDQTNEMERGLSNRHVQFIAIGGTIGTGLFLGSGKSISLTGPSIIFVYILVGVIMFFLMRAIGEMMYRDPSQHTFINFITRYLGNGWGHFAGWTYWAALVLLGMTEITAVSTYFITFFDTFGIDLTHWKWLIELCFLVSLVSINLIAVKVFGEVEFWFSMIKITLICAMIATAVVMIVIGYHYPAVQIHGVDHVSPAGHAGFDNLFAIFSFAPNGWMAFLMSFQMVFFAYEMIEFVGVTVSETKNPRKVLPKAINEIIVRVLIFYVGALVAIMCIVPWTSFKPNEDGSFASPFIMVFQYAGLNWASALVFFVVITAASSALNSLLYSAGRHLYQLSEVSPNPTLNKLGKVSDRKVPARAILVSAALILLSPIVNAIPGISGAFVLFSSASSAVFLFIYILTLLAHRRYRRSADFIADGFVMPAWKVLNTVAIVFFVFIYLTLFLADDTRNSAIAGLVWLVGFGGFSMLRERYRSRDLKAALEHKE

SEQ ID NO: 4051 - protein, 305 aa, Eucommia ulmoides
MLDYNVPGGKLNRGLSVVDSYKLLKELSSSKKGAQLTESEIFHSSVLGWCIEWLQACALVLDDIMDSSHTRRGQMCWYKLPKVGMIAINDGLILRNHVPRILKKHFRSKPYYLELLDLFHEVECQTVGGQMIDLITTLVGEIDLSEYSLPTHRQITVSKTSYYSFYLPVACALLMTGEKLESHSGMKDILIEIQDDYLDCFGDPEVIGKIGSDIEDFKCTWLVVKALELCNEEQKKILYDNYGKKDPESVARVKDLYKTLKLQDVFEEYEKKTHEKLNKSIDAYPSKAVQAVLQSFLAKIHRRLK

SEQ ID NO: 4052 - protein, 247 aa, Xylella fastidiosa 9a5c
MNKPLQGEVALVTGASRGIGAAVADLLADHGATVIGTATSVSGAQLIGDRLALLAGHGRALDVNDTAAVGALVGEIAEQFGSVSILVNNAGITRDNLLMRMKDEDWESIVDTNLSSIFRTSRAVVRDMMKARKGRIINIASVVGVTGNAGQANYAAAKAGVIGFTKSLAKEVGPRGITVNVVAPGFIDTDMTRVLSEGVRNDILNRVPLGHLGDPVDIAHAVAFLAAPAARYITGETLHVNGGMYMP

SEQ ID NO: 4053 - protein, 630 aa, Borrelia burgdorferi B31
MSIAKAFFEVADQQKDKIAQMYKVCNGYAHVTYGDLKNNVLKLASFLKSINVKHQDKIFICSENRAEWTVIDFAILSLGAVDIPKGSDVTLFEAEIIFNSVLPSVVILENLNLLNMFIQIKFTVKPIFIIIENLNQEDRLKYSDFEIYTYSDCILFGDTLRKDSEIIEIASKVDSNDMATIIYTSGTTGHPKGVMLSHANLLYQVSSFSLMVDTHVGQIFMCILPIWHSFQRSFSYNIFLKGMVCLFSTIVPRAMLDDIKNVNPHYIAAVPRLWIAIRQNIYKEVSKKPFISRMIFHFFVKAAFLSDICYRVVMGLYPDNGFSLFFPIKKILGIFGLICAFPFKALGNVLIFNKINKILGNNFVVGITGGGSMPLSAVRFFNSIGIELANAYGLTETSPGVASNKHKKVIIGTCGKILPGTVAEIRDIDGNKLKKPGKGILFVKGPQVMLGYYKDKEATCKIIGSDGFLNTGDIAKLSKDNVVQIIGREKDTIVLNNGENVEPAPIEIKLEESALIEKAVVVGQDQKFLGALILPNFEEINKYLESVGQKIFDANNRRQIIANNIVLKAINDEIKKLINKANGFKPFEQILKFTLLEKPFEVGKEMSIKMDIKRSYILNFYKNEIKNLFI

SEQ ID NO: 4054 - protein, 347 aa, Schizosaccharomyces pombe
MSAVDKRAKFESALPVFVDEIVNYLKTINIPDDVTEWYKNSLFHNTLGGKYNRGLSVIDSYEILLGHPLDEAAYMKAAVLGWMVELLQSFFLIADDIMDASKTRRGQPCWYLMPGVGNIAINDAFMVESAIYFLLKKHFRQESCYVDLIELFHDVTFQTELGQQLDLLTAPEDSVDLSKFSLQKHSFIVIYKTAFYSFYLPVALAMHLAGVATPENLKCAQDILIILGKYFQVQDDYLDCYGDPTVTGKIGTDILDNKCSWIINLALAKCTPEQRVILDDNYGRKDSESEKRVKAVFEELNIRGEFENYEESEVSEIKKLIDGVDESTGLKKSIFTTFLGKIYKRNK

SEQ ID NO: 4055 - protein, 334 aa, Burkholderia fungorum
MRKERCWPPVQVPVGSSQCHHGRTRMLPAYISHRDCVKHEMGPMHPESPDRIGAIHDMLLIKGLLDCMQTYEAPLATEEQLAQAHSLPYIRSIAGMAPLEGYVRVDPDTSMNPYTYQAALRAAGAAVLATDLVLAGEACCAFCNIRPPGHHAKYAAAGGFCFFNNVAVGIRHALNVHGLTRVALIDFDVHHGDGSEDILHADARVLMCSIFEDKLYPFCGNEPRGSNMVNVPLPTRSYGDVFRAAVTEKWLPALEAFRPEMIFISAGFDGHREDDMGNLGLVEADYAWVTGRLVDIARRHSGGRIVSCLEGGYELSSLARGVAAHVRELIGMDC

SEQ ID NO: 4056 - protein, 197 aa, Oryza latifolia
GQTPVFPRILGHEAGGIVESVGEGVTELAPGDHVLPVFTGECKECAHCKSEESNMCDLLRINVDRGVMIGDGQSRFTINGKPIFHFVGTSTFSEYTVIHVGRLAKINPEAPLDKVCILSCGISTGLGATLNVAKPKKGQTVAIFGLGAVGLAAMEGARLSGASRIIGVDLNPAKFEQAKKFGCTDFVNPKDHSKPVH

SEQ ID NO: 4057 - protein, 58 aa, Saccharomyces cerevisiae
MSQKDLATKINEKPTVVNDYEAARAIPNQQVLSKLERALGVKLRGNNIGSPLGAPKKK

SEQ ID NO: 4058 - protein, 469 aa, Listeria monocytogenes EGD-e
MDMTNWLQKRVRLSPKETALVFEGKEETFEEISEAVERLAGKLFALGIRKDEMIALLGKNDRMTFLLIHALQQLGAVTLFLNNRLTKKEIAYQLANAEVKQVIVADTFEDKVGAGISYSELAETDYKEPELLETWDLSRTASIMYTSGTTGKPKGVIQTYENHWWSAVASVLNLGLTEKDSWLCAVPIFHISGLSIMMRSVIYGIPVYLEEHFDEEKITQLLESGKVSTISVVTSMLERLLKIHGGSYHPNVRTILLGGGPASKTVLEICKQRDIPLVQSFGMTETASQIVTLPPKDALNKIGSSGKALFPAEVKIADDGEILLKGPSITPGYLHNKKATEASFVDGWFKTGDIGYLDEEGFLFVVERRSDLIISGGENIYPTEIEHVIGEYVAVKEVAVIGQPDDKWGSVPVAFIVAEETFDEDELQLICQTNLASYKIPKQIIIVEKLPKTASGKIQRNKLKERHSK

SEQ ID NO: 4059 - protein, 335 aa, Zea mays
MAPGSKAERKAALDAGAWMFNVVTSVGIIMVNKALMATHGFSFATTLTGLHFAMTTLMTLVMKWLGYIQPSYLPLPELVKFAFFANLSIVGMNVSLMWNSVGFYQIAKLCIIPVLCILEIMFDKVRYSRDTKLSIVLVLVGVAVCTVTDVSVNSQGLLAAVIAVWSTALQQHYVHHLQWKYSLGSFNLLGHTAPAQAASLLVLGPFVDFWLTNKRVDAFNYTSIVTFFIVLSCIIAVGTNLSQFICIGRFTAVSFQVLGHMKTVLVLTLGFFFFGKEGLNFHVALGMFLAVIGMIWYGNASSKPGGKERQVYSTPSEKTQKHGVLSSQSELDQKV

SEQ ID NO: 4060 - protein, 453 aa, Zea mays
MAASARDSTDAAERVVDDHDGWASDAEMDVEMDVVEGDADRRDGGADGDDEYLLLTRIRDTSAAEARAGKDIQGIPWERIHIARQDYRKARLEQYKNYENFPQSGELMDKLCKQVEKSSKYYEFQHNTRSVKPSILHFQLRNLLWATSKHDVYFMSNSTVSHWSSLSHKLSEVLDFSGHVAPAEKYPGSLLEGFSGVQVSTLAVNEGLVVAGGFQGELIGKDVEGCSVKFCMRTTLSDNAITNAIDMHRSISGSLHITVSNNDCGVREYDMERYQLVNHYRYNWPVNHTSVSPDKKLLAVVGDDRDALLVDSRNGKVTSTLVGHLDYSFATAWHPDSRTFATGNQDKTCRIWDTRNLSTSLAVLRGNIGAIRCIRYSSDGRFLVFSEPADFVHVYSVAADYKKRQEIDFFGEVSGITLSPDDESLFIGVCDRVYASLLQYRMIRGFDYLDSYV

SEQ ID NO: 4061 - protein, 454 aa, Oryza sativa; identical to SEQ ID NO: 2429

SEQ ID NO: 4062 - protein, 308 aa, Oryza sativa
MCFGSKYKAGRKRNCIVQACYVEELQGHNVQSNEVNECETVNSFSLGFQWLKPGFTVPPKRSHGLAVRTLDPESSNPSSNLGSRVASALPSRSGRTGGRPVGTTVISPLQTYRHRWVGFSSPSRFGSVRVRFDFVFFSSSWGWWESMAAPDVEYRCFVGGLAWATDDRSLEAAFSTFGEILESKIINDRETGRSRGFGFVTFSSEQAMRDAIEGMNGKELDGRNITVNEAQSRRSGGGGGGGYGQRGGGGGYGGGGGYGGGGGGGYGQRREGGYGGGGGYGGGRGGGGGYGGGYGSRGGGNSDGNWRN

SEQ ID NO: 4063 - protein, 389 aa, Pimpinella brachycarpa
MGYIGAHGVAALHKHKYSGVDHSYLAKYVLQPFWTKCVTFFPLWMPPNMITLVGSMFLVTSAALGFIYSPHLDSPPPRWVHVAHGLLLFLYQTFDAVDGKQARRTNSSSPLGELFDHGCDALACTFEALAFGSTAMCGKDTFWFWVISAVPFYGATWEHFFTNTLILPVVNGPTEGLMLIYVGHIFTAIVGAEWWVHQFGKSVPFLSWVPILSEVPTYRAVLYLMIAFAVIPTLTFNVQNVYKVVQARKGSMLLALAMLYPFVVLMAGILIWDYLSPYDIMVNYPYMVVLGTGLAFGFLVGRMVLAHLCDEPKGLKTNMCLSLLYLPFAIANTLTARLNDGVPLVEEKWVLLGYCVYTGALYLHFATSVIHEITTALGIYCFRITRKEA

SEQ ID NO: 4064 - protein, 280 aa, Schizosaccharomyces pombe
MASLGLERFKNLQSLCLRQNQIKKIESVPETLTELDLYDNLIVRIENLDNVKNLTYLDLSFNNIKTIRNINHLKGLENLFFVQNRIRRIENLEGLDRLTNLELGGNKIRVIENLDTLVNLEKLWVGKNKITKFENFEKLQKLSLLSIQSNRITQFENLACLSHCLRELYVSHNGLTSFSGIEVLENLEILDVSNNMIKHLSYLAGLKNLVELWASNNELSSFQEIEDELSGLKKLETVYFEGNPLQKTNPAVYRNKVRLCLPQLRQIDATIIPKTSKQFP

SEQ ID NO: 4065 - protein, 221 aa, Medicago truncatula
MSKGDNVVVLDFWASPFCARVKIALEEKGVPHVDNEEDLFGKKSELLLKSNPIHQKVPVFLHNDKPVLESGIIVSYIDQVWSSNPLLPADAYDLAQARFLADFIDKKVFDTGRSIWASNGEEREVGTRDFIEVLKHLEEALGEKDYFGGDVFGYVDIIAIPHSAWFLAYEKLGNFKVEDHSPKISAWIKRSLQRESVKKVLPDPEKVYQFVLHFRKISGLE

SEQ ID NO: 4066 - protein, 368 aa, Prunus cerasus
MGKGGMSSQGGALEPMDGEQENMAAWLVGVNTLKIQPFKLPTVGPNDVRVKIKAVGICGSDVHYLKTMKCADFIVQEPMVIGHECAGIVDEVGSMVKNLLPGDRVALEPGISCWRCEQCKGGRYNLCPDMKFFATPPVHGSLANQIVHPADLCFKLPENVSLEEGAMCEPLSVGVHACRRANIGPETNVLVIGAGPIGLVSVLSARAFGAARIVIVDVDDERLSIAKSLGADDSVKVSTNPQDLENEVSKISKAMRGGVDVSFDCVGFNKTMSTALSATRPGGKVCLVGMGHGVMTVPLTPAAAREVDVVGIFRYKNTWPLCLEFLRTGKIDVKPLITHRFGFTQKEIEEAFETSARGGNAIKVMFNL

SEQ ID NO: 4067 - protein, 536 aa, Piromyces equi
MKTSIVLSIVALFLTSKASADCWSERLGWPCCSDSNAEVIYVDDDGDWGVENNDWCGIQKEEENNNSWDMGDWNQGGNQGGGMPWGDFGGNQGGGMQWGDFGGNQGGGMPWGDFGGNQGGGMPWGDFGGNQGGNQGGGMPWGDFGGNQGGNQGGGMPWGDFGGNQGGGMQWGDFGGNQGGNQGGGMPWGDFGGNQGGGMQWGDFGGNQGGNQGGGMPWGDFGGNQGGGMQWGDFGGNQGGGMQWGDFGGNQGGNQDWGNQGGNSGPTVEYSTDVDCSGKTLKSNTNLNINGRKVIVKFPSGFTGDKAAPLLINYHPIMGSASQWESGSQTAKAALNDGAIVAFMDGAQGPMGQAWNVGPCCTDADDVQFTRNFIKEITSKACVDPKRIYAAGFSMGGGMSNYAGCQLADVIAAAAPSAFDLAKEIVDGGKCKPARPFPILNFRGTQDNVVMYNGGLSQVVQGKPITFMGAKNNFKEWAKMNGCTGEPKQNTPGNNCEMYENCKGGVKVGLCTINGGGHAEGDGKMGWDFVKQFSLP

SEQ ID NO: 4068 - protein, 250 aa, Zea mays
MVKAYPTVNEDYLKAVDKAKRKLRGLIAEKNCAPLMLRLAWHSAGTFDVATKTGGPFGTMKNPAEQAHGANAGLEIAIRLLEPIKEQFPILSYADFYQLAGVVAVEVTGGPDVPFHPGRQDKPEPPPEGRLPDATQGSDHLRQVFSTQMGLSDQDIVALSGGHTLGRCHKDRSGFEGAWTSNPLIFDNSYFKELLSGEKEGLLQLPSDKALLSDPSFRPLVDKYAADEDAFFADYAEAHLKLSELGFAEA

SEQ ID NO: 4069 - protein, 336 aa, Ralstonia solanacearum
MSNTYQRIVLASRPEGAVTPDNFRLETAQIPELQDGQVLVRNHFLSLDPYMRGRMNDSKSYAQPQPLGEVMIGGTVGVVEASRNPAYAVGDNVVGMFGWQEVGISDGRGMQKVDTRHVPLSAYLGSVGMPGVTAWYGLNRIMHPKPGQTVAVSAASGAVGSVVGQLAKLKGCRAVGFAGGKDKCDYVVNELGFDACIDYKAAKDPKELYAMLKEATPDGIDAYFENVGGDILDAVLRRMNPFGRIAMCGMIAGYDGQPLPLQNPQLILVSRLTVEGFIVSEHMDVWPEALRELGGSVAQGKLKFRESVAQGLASAPEAFIGLLKGKNFGKQLVKLV

SEQ ID NO: 4070 - protein, 307 aa, Triticum aestivum
RPGCYCRSPRGSSTGAGLGNSFLSHIRAVDAIFQVVRCFDDAEIIHIEGDVNPTRDLDIISEELRLKDIEFTEKALENQKKKTRMGGQSLEQKKAVQDQATLEKVLAWLNDGKDVRKGNWGPKEIEVINPLFLLTAKPVVYLVNLSEKDFIRKKNKHLPKIVEWINENAKGDPLIPISVSYESRLTLCETEAESKEEQKTAGADSVLPKVILQMRKTLQLGSFFTVGPDEVRQWTIRNGTKAPQAAGVIHNDFEKTFIQALVFNYNILKELGDESEVKAKGKIMTKGKEYVMEDGDIVHFKAGAAKG

SEQ ID NO: 4071 - protein, 387 aa, Novosphingobium aromaticivorans
MALPASRNTLKPRPSTSAALRSDHLGGTMSSNTRSYSIAVIPGDGIGKEVMPEGMRVLEKAASIFGFEIEQKWHDFACCDYYARHGKMMPDNWKEEIGRPDAIFFGAVGWPDTVPDHVSLWGSLLQFRREYDQYVNLRPVRLMPGVPCPLAGREPGDIDFWVVRENTEGEYSSVGGIMFPNTDREVVIQETVMTRIGVDRVLRYAFDLAQKRERKHLTSATKSNGIAITMPYWDQRVEAIGAEYPDVSHDKYHIDILTAQFVLNPDRFDVVVGSNLFGDILSDLGPACTGTIGVAPSGNINPEGIHPSLFEPVHGSAPDIAGQGIANPVGQIWSAAMMLEHLGEAEAAAAIMRAVEQVLATPSARTRDLKGAASTDACGKAIAEALG

SEQ ID NO: 4072 - protein, 402 aa, Haemophilus somnus 129PT
MNNKQKLVILGSTGSIGTSTLSVIAKNPEQYQALALVGGKNVELMLQQIIKFQPHFVAMNDESAAKKLREKLAFLESKTEVLSGQKAICELAAHPEADQVMAAIVGAAGLLPTLSAVQAGKRILLANKETLVTCGKIFIDEVRKNKAQLLPVDSEHNAIFQSLPPQAQQQIGFCPLTQLGISKIVLTGSGGPFRYTDLKAFEHITPEQAVAHPNWSMGKKISVDSATMMNKGLEYIEARWLFNASADEMEVIIHPQSIIHSMVRYIDGSVIAQMGNPDMRTPIAETMAYPHRTFAGVEPLDFYQLSGLTFLKPDYQRYPCLKLAIEAFSAGQYATTALNAANEMAVEAFLNKRIKFTDIAKINTAVLEKIESQVITSIEDVLLVDKQARELANSFVLRTSGT

SEQ ID NO: 4073 - protein, 394 aa, Zea mays subsp. mays
LGAERRARLPPGEMGWPLVGGMWAFLRAFKSGKPDAFIASFVRRFGRTGVYRSFMFSSPTVLVTTAEGCKQVLMDDDAFVTGWPKATVALVGPRSFVAMPHDEHRRIRKLTAAPINGFDALTGYLPFIDSTVTSSLRAWADHGGSVEFLTELRRMTFKIIVQIFLGGADQATTRALERSYTELNYGMRAMAINLPGFAYRGALRARRRLVAVLQGVLDERRAARAKGVSGGGVDMMDRLIEAQDERGRHLDDDEIIDVLVMYLNAGHESSGHITMWATVFLQENPDMFARAKAEQEAIMRSIPSSQRGLTLRDFRKMEYLSQVIDETLRLVNISFVSFRQATRDVFVNGYLTPKGWKVQLWYRSVHMDPQVYPDPTKFDPLRWEGHSPRAGTFL

SEQ ID NO: 4074 - protein, 123 aa, Glycine max
  unsure (1)..(123): unsure at all Xaa locations
MTSSSSALVLLLAAIFVFSGVAQSPALHNLRRRLLSPLXTPPKAATPSPSSSKSPPAVSPTPSPSGGISPPSPPSLVPASSPSSISSPPSDAPAPSENAAVSNGFAAAGSVVVGLVAAASLIM

SEQ ID NO: 4075 - protein, 184 aa, Triticum aestivum
  unsure (1)..(184): unsure at all Xaa locations
MAGVGRNMVAPLLVLNLIMYLIVIGFASWNLNHFINGLTNXRPGVGGNGATFYFLVFAILSRGSLAPLSKLAGVHHVRTXWXGDSLATSASSSLVAWGXPPLAFGLACKEIHIGGYRXGWRLRVLEAFVIILAFTQLLYVIALHSGLFGNXFGGNHAGGYPAEHAYGAGDPHNKGMGTGGVARV

SEQ ID NO: 4076 - protein, 264 aa, Thermoplasma volcanium
MWRQNMEKAMWYGIGKRMYKDLDSRYIEIFEMLRMGRTPELDGEGKKPDLRSLLIEYGNYRIKQEFTEDQAAIKVAAVREEMDQLINKYYEKCLAFAIPFDLKVTSDPCAYFRQGSTIDGISELFSYGSKMCDFRGQLDERVKEMARQILPNTTALVGERLAMDLLVHAHGLKRLAYMPSSSIQMLGAERALFTAIQKRGNTPKYGVLFKYPKLSTLRPRQRGKIARIIANKVAITARADLLGTKVDAESFREKIDNMIKSSKK

SEQ ID NO: 4077 - protein, 244 aa, Glycine max
MAGNPATTSSSALSPEKFNFNFSPDNPSRITLTSDQVNHCTQALNILKEKLHAPNVITQEFAHLQANRITPSEMRRRCTVAYDAVNLSKNRYTDVLPFDKNRVVLKSSTDYRPEAQGYINASLISTSSAGNVSHFIATQGPLPHTCEDFWEMITQYHCPVIIMLTRLVDNYKMVKCVDYFQAEDGPREVGNISIIGKWENTTETSLVLRHLEVNHREYPEWPDHGVPKDTLAVREILKRLYHLP

SEQ ID NO: 4078 - protein, 142 aa, Ricinus communis
MAGVGPISQDWEPVVIRKKAPTAAAKKDEKVVNAARRAGAEIETLKKSNAGTNKAASSSTSLNTRKLDEETENLTHDRVPTELKKAIMQARMEKKFTQAQLAQMINEKPQIIQEYESGKAIPNQQIIGKLERALGVKLRGKK

SEQ ID NO: 4079 - protein, 445 aa, Methanothermobacter thermautotrophicus str. Delta H
MIHAERIRNLNGEEPDLRGSYVVYWMQASVRSHWNHALEYAIETANSLKKPLIVVFGLTDDFPNANSRHYRFLIEGLRDVRSNLRERGIQLVVERDSPPSVLLKYADDAAAAVTDRGYLDIQKEWVDEAAGALHIPLTQVESNVIVPVETASDKEEYSAGTFKPKIKRHLKRFMVPLRMRTLKMDSLDLEPGPEFEDAVRDFRAPEDLEPSVFRGGTSTALSIFSEFLREKLECFERYRNDPVKNCLSNMSPYLHFGQISPLYLALRASEAGECPEFLEELIVRRELSMNFVHYSDSYSSISCLPEWAQRTLMDHVADPREYEYSLRELESASTHDPYWNAAQQEMVITGKMHGYMRMYWGKKILEWTDHPARAYDIALYLNDRYEIDGRDPNGFAGVAWCFGKHDRAWAEREIFGKVRYMNDRGLKRKFRIDEYVDRIRGLMDE

SEQ ID NO: 4080 - protein, 133 aa, Pterosperma cristatum
IREAFDLFDTDGSGTIDAKELKVPMRALGFEPKKEEIKKMIADIDKDGSGTIDFEEFLQMMTAKMGERDSREEIMKAFRLFDDDETGKISFKNLKRVAKELGENMSDEELQEMIDEADRDGDGEVNEEEFFRI

SEQ ID NO: 4081 - protein, 208 aa, Sagittaria montevidensis
MGRGKIEIKRIENSANRQVTYSKRRNGIIKKAREISVLCGCEVSLVIFSSSGKMSEFHSTTLSKILETFQQNQGQTLWGAKHESLKAEIDRMKKENDNMRIQLRHMKGEDLTSMEPRDLYTIETALINGIANVRGKQMEIFKKKAKNQKALEEENKQLAYILHQQSLAMNGNLREMPQDYHQKDRDFTAPVPFGFRVQPMQPNLQENK

SEQ ID NO: 4082 - protein, 282 aa, Streptococcus pyogenes MGAS8232
MAMIQWFPGHMSKARRQVQENLKHVDFVTILVDARLPLSSQNPMLTKIVGDKPKLMILNKADLADATRTKEWKAYYESQGIKTLAINSKEQSTVKKVTEAAKELMADKIKRLRDRGIQKETLRTMIIGIPNAGKSTLMNRLAGKKIAVVGNKPGVTKGQQWLKSNKELEILDTPGILWPKFEDELVGLKLALTGAIKDQLLPMDEVTIFGLNYFKTHYPSRLTKRFKNIPLEEEAPEIIMTLTRQLGFKDDYDRFYSLFVKEVRDGKLGQYTLDQVGDMDAD

SEQ ID NO: 4083 - protein, 84 aa, Glycine max
MAGMGEMSMRPRPGPPMHRGPPPMARPRPEPIDREKTCPLLLRVFTKVGGHHLNEEFSERGKEPKDEVQIYTWKDATLRELTDL

SEQ ID NO: 4084 - protein, 363 aa, Buchnera aphidicola
MKQKYRIAILPGDGIGPEVMREAYKILNILKNDFLLPLEFQEFNIGGIAIDNEGLALPKKTLLGCENADAILFGSVGGKKWDTLPIDQRPERAALLPLRKHFNLFANLRPAKLYSELEYLSPLCSKITKNGFDILCVRELTGGVYFGHPHGRVKKDDIEYAFDTEVYYDYEINRIAHLAFQLARNRKNKVCSIDKSNVLNSSLLWKEIVEKVSNSYSDVRLSHLYIDNATMQIIKNPNQFDVLLCSNLFGDIISDECAAISGSIGMLPSASLNENNFGLYEPAGGSAPDIEGKNIANPIAQILSVSMLVRYGMHLTKIADQIDKSVISVLKRGYRTADISNNNNYLKTHEMGDVIADALINGK

SEQ ID NO: 4085 - protein, 365 aa, Yersinia pestis CO92
MRLAMKKTYRIAAIPGDGIGHEVMPEGINVLQAAALRWDLDISFENIEWASCEYYQHHGQMMPNDWQRQLQCFDAIYFGAVGWPATVPDHISLWGSLLKFRRDFQQYVNLRPVRLFPGIPCPLVGKQPGDIDFYVVRENTEGEYSSVGGRLFEGTEQEMVLQASIFTRRGVDRILKYAFELAQMRPRKRLTSATKSNGLAFSMPYWDERFEVMAAQYPQISADKQHIDILCARFVLNPERFDVVVASNLFGDILSDLGPACAGTIGIAPSANLNPERDFPSLFEPVHGSAPDIYKRNIANPIAMIWAGAMMLDFLGQGDERYHAAHNGILNAIEQVIAQGPKTPDMCGDASTQQVGSAIVQVLSH

SEQ ID NO: 4086 - protein, 345 aa, Thermus thermophilus
MKVAVLPGDGIGPEVTEAALKVLRALDEAEGLGLAYEVFPFGGAAIDAFGEPFPEPTRKGVEEAEAVLLGSVGGPKWDGLPRKIRPETGLLSLRKSQDLFANLRPAKVFPGLERLSPLKEEIARGVDVLIVRELTGGIYFGEPRGMSEAEAWNTERYSKPEVERVARVAFEFARKRRKHVVSVDKANVLEVGEFWRKTVEEVGRGYPDVALEHQYVDAMAMHLVRSPARFDVVVTGNIFGDILSDLASVLPGSLGLLPSASLGRGTPVFEPVHGSAPDIAGKGIANPTAAILSAAMMLEHAFGLVELARKVEDAVAKALLETPPPDLGGSAGTEAFTATVLRHLA

SEQ ID NO: 4087 - protein, 110 aa, Zea mays
MEFCPVCGMLLQIDPGTASHRLRLFCSVCPYVCPIQNKIVKKARLVKKEVEPIFSTADEMKSAPKTAVTCQRCNHGEAYFKQMQIRSADEPMTTIYRCCKEECQHEWRED

SEQ ID NO: 4088 - protein, 367 aa, Streptomyces avermitilis MA-4680
MDPVRLALTRRLVDAFGLDREIEVVSAKPAGESTLRLVHREDYIEAVKAASAEPDAADGKYGLGTLDDPAFAGMHEVSALIAGQSVGAAEAVWHGDALHAVNFAGGLHHAMPGGASGFCIYNDASLAIARLLELGAERVAYIDVDVHHGDGVQAAFWEDPRVLTISLHEHPQTLFPQTGWPTETGADRAEGSAVNVALPAGTGDAGWLRAFHAVVPELIADFRPQVLVTQHGADTHFEDPLAHLAVSLDAQRAVQLACHDLAHQYADGRWVALGGGGYAVVDVVPRSWTHLVAIAAGRPLEPESMIPESWRQEVFARTRQLAPMRMTDGRWPVSWADWESGYDPADRLDQAVLATRKAAFPLRGMLP

SEQ ID NO: 4089 - protein, 392 aa, Tricomaria usillo
DLEPVNPADVPVTAAGALKSYKLASKAISRLQSLPSGNMSLLCDVLVKEVRDLTGYDRVMVYKFHEDEHGEVVSECRRSDLESYLGLHYPATDVPQASRFLFMKNKVRMICDCLAPPVKVIQDERLPQPLSLGGSTLRSPHGCHSQYMTNMGTIASLVMSVTINEEDERMDGDQQQMTTKLWGLVVCHHTSPRFVPFPLRYACEFLIQVFGVQIDKEVELVAQVREKHILQIQTMLCGMLLRDAPVAIVTQSPNVMDLVKCDGAALYFKSKTWLRGVTPTEEQIKDIAEWLLKYHSGNTGLSTDSLMEAGYPGASVLGDAVCGMAAVGITSRDFLFWFRSHTAKEINWGGAKHDPDDKDDGRKMHPRSSFKAFLEVVKWRSMPWEDMEMDAI

SEQ ID NO: 4090 - protein, 178 aa, Glycine max
  unsure (1)..(178): unsure at all Xaa locations
MASEVIEYRCFVGGLAWATDSDALEKAFSHYGXIDRETGRSRGFGFVTFASEQAMKDAIEGMNGQNLDGRSITVNEAQSRGRGGGGGGYGGGGGYGGGGYSRGGGGYGGGGRREGGGGGYNRNGGGGGYGGGGGYGGGGGHGGGGGYGGGGRDRGYGGDGGSRYSRGGGASDGGSWRN

SEQ ID NO: 4091 - protein, 376 aa, Urochloa mutica
ALSIAGAVQSQKLAVRAISRLQALPGGDVKLLCDTVVEHVRELTGYDRVMVYRFHEDEHGEVVAECRRDNLEPYLGLHYPATDIPQASRFLFRQNRVRMIADCHATPVRVIQDPGLSQPLCLVGSTLRAPHGCHAQYMANMGSIASLVMAVIISSGGDDEQTARGGISSSMKLWGLVVCHHTSPRFIPFPLRYACEFLMQAFGLQLNMELQLAHQLSEKHILRTQTLLCDMLLRDSPTGIVTQSPSIMDLVKCDGAALYYHGKYYPLGVTPTESQIKDIIEWLTVCHGDSTGLSTDSLADAGYHGATALGDAVCGMAVAYITPSDYLFWFRSHTAKEIKWGGAKHHPEDKDDGQRMHPRSSFKAFLEVVKSRSLPW

SEQ ID NO: 4092 - protein, 339 aa, Neisseria meningitidis Z2491
MKNILVTGGTGFIGSHTVVSLLKSGHQVVILDNLCNSSINILPRLKTITGQEIPFYQGDIRDREILRRIFAENRIDSVIHFAGLKAVGESVAEPMKYYDNNVSGSLVLAEEMARAGVFSIVFSSSATVYGDPGKVPYTEDMPLGDTTSPYGTSKSMVERILTDIQKADPRWSMILLRYFNPIGAHESGLIGEQPNGIPNNLLPYICQVASGRLPQLSVFGGDYPTPDGTGMRDYIHVMDLAEGHVAAMQAKSNVAGTHLLNLGSGRASSVLEIIRAFEAASGLTIPYEVKPRRAGDLACFYADPSYTKAQIGWQTQRDLAQMMEDSWRWVSNNPNGYDD

SEQ ID NO: 4093 - protein, 392 aa, Peixotoa glabra
DLEPVNPADVPVTAAGALKSYKLAAKAISRLQSLPSGNISLLCDVLVKEVRDLTGYDRVMVYKFHEDEHGEVVSECRRSDLESYLGLHYPATDIPQASRFLFMKNKVRMICDCLAPPVQVIQDERLPQPLSLCGSTLRSPHGCHAQYMTNMGTIASLVMSVTVNEDDDTMDGDQQQMTRKLWGLVVCHHTSPRFVPFPLRYACEFLIQVFGVQITKEVELAAQVRKNHTLQIQTMLCDMLLRDAPVAIITQSPNVMDLVKCDGAALYFKNKTWLLGVTPTEEQIRDIAEWLLKYHSGNTGLSTDSLMEAGYPGASTLGDAVCGMAAVSITSRDFLFWFRSHTAKEIKWGGAKHDPDDKDDLRKMHPRSSFKAFLEVVKWRSMPWEDVEMDAI

SEQ ID NO: 4094 - protein, 259 aa, Pyrocystis lunula
MALEAHLQQAVLLKKVVDAIKDLCKDVNFDCSEKGLQVQSMDSSHVALVSLLLRESAFAEFRCDRPTSLGMNVDSLAKILKMCGTSDSLKLRWRGDADMVSFQCESGEEDRIADFELKLMQIESEHMEIPEQHYKVSAKLPSSEFQKICRDLKEFGETMQVKASKEGITFSVQGDMGAGNVMLKPREAEKPEDKVTLSVHEPVTATFALRYLVNFAKAAPLSGTVELGLGPDAPLLVKYDLDKADNGHLQFYLAPKIDE

SEQ ID NO: 4095 - protein, 216 aa, Ranunculus bulbosus
  unsure (1)..(216): unsure at all Xaa locations
GLVKKAHEISVLCDAEVALIVFSTKGKLFEYSTDSGMDKILERYERYSYAERELVTNDTDSQGNWSLEYTKLKAKVEILQKNQRHFRGEEIGNLGLKELQNLEQQLDTALKLIRARKNQLLFESISEYQKKEKALNEQNNQLEKQLKEKEKELAKRPQWEQPPNQGQTSQSFTLQSHPCLNIGGNYQGGSSGREDEVPQTQARPTILMPPWMVXHL

SEQ ID NO: 4096 - protein, 188 aa, Zea mays
  unsure (1)..(188): unsure at all Xaa locations
HEPAPPLSPNSSPSSGNAVLIFRAERIREAAWDVEYRCFVGGXLPGPTDDHSLHNGLQXTTGEVLESKIILDRETQRSRGXFGFVTFSTEEAMRNAIEGMNGKELDGRNITVNEAQSRGGRGGGGGGGYGGGRGGGGYGGGGRRDGGGGYGGGGGYGGGGGGYGGGGGGYGGGNRGGGYGNSDGNWRN

SEQ ID NO: 4097 - protein, 344 aa, Magnetospirillum magnetotacticum
MEYRQFGRSGLKVPVLSLGAATFGGTDAFFKNWGSTDVAEASRLIDLCLDAGVNFIDTADIYSSGDSEKILGEAIKGRRDRLLISTKATFRAGEDVNAVGSSRHHLIRACEASLKRLQTDHIDVYFMHGFDALTPVEETLRALDDLTRAGKIGYIGASNFSGWQLMKALATSEKYGLARYVVYQGYYSLIGRHYEWELMPLGLDQGVGLMVWSPLGWGRLTGKIRRGQAASGGRLATAGGAEGGPTVSDDYLYGVVDALDAVAAETGKTVPQVALNWLLTRPTVCNIVIGARTEEQLKQNLGAVGWSLSQDQIARLDAASREHPIYPYWHQTGFDERNPKPTDV

SEQ ID NO: 4098 - protein, 765 aa, Salmonella enterica subsp. enterica serovar Typhi
MKWLCSVGVAVSLAMQPALAENLFGNHPLTPEARDAFVTDLLKKMTVDEKIGQLRLISVGPDNPKEAIREMIKDGQVGAIFNTVTRQDIRQMQDQVMALSRLKIPLFFAYDVVHGQRTVFPISLGLASSFNLDAVRTVGRVSAYEAADDGLNMTWAPMVDVSRDPRWGRASEGFGEDTYLTSIMGETMVKAMQGKSPADRYSVMTSVKHFAAYGAVEGGKEYNTVDMSSQRLFNDYMPPYKAGLDAGSGAVMVALNSLNGTPATSDSWLLKDVLRDEWGFKGITVSDHGAIKELIKHGTAADPEDAVRVALKAGVDMSMADEYYSKYLPGLIKSGKVTMAELDDATRHVLNVKYDMGLFNDPYSHLGPKESDPVDTNAESRLHRKEAREVARESVVLLKNRLETLPLKKSGTIAVVGPLADSQRDVMGSWSAAGVANQSVTVLAGIQNAVGDGAKILYAKGANITNDKDIVDFLNLYEEAVKIDPRSPQAMIDEAVQAAKQADVVVAVVGESQGMAHEASSRTNITIPQSQRDLITALKATGKPLVLVLMNGRPLALVKEDQQADAILETWFAGTEGGNAIADVLFGDYNPSGKLPISFPRSVGQIPVYYSHLNTGRPYNPEKPNKYTSRYFDEANGPLYPFGYGLSYTTFTVSDVTLSSPTMQRDGKVTASVEVTNTGKREGETVIQMYLQDVTASMSRPVKQLKGFEKITLKPGERKTVSFPIDIEALKFWNQQMKYDAEPGKFNVFIGVDSARVKQGSFELL

SEQ ID NO: 4099 - protein, 744 aa, Hypocrea jecorina
MRYRTAAALALATGPFARADSHSTSGASAEAVVPPAGTPWGTAYDKAKAALAKLNLQDKVGIVSGVGWNGGPCVGNTSPASKISYPSLCLQDGPLGVRYSTGSTAFTPGVQAASTWDVNLIRERGQFIGEEVKASGIHVILGPVAGPLGKTPQGGRNWEGFGVDPYLTGIAMGQTINGIQSVGVQATAKHYILNEQELNRETISSNPDDRTLHELYTWPFADAVQANVASVMCSYNKVNTTWACEDQYTLQTVLKDQLGFPGYVMTDWDAQHTTVQSANSGLDMSMPGTDFNGNNRLWGPALTNAVNSNQVPTSRVDDMVTRILAAWYLTGQDQAGYPSFNISRNVQGNHKTNVRAIARDGIVLLKNDANILPLKKPASIAVVGSAAIIGNHARNSPSCNDKGCDDGALGMGWGSGAVNYPYFVAPYDAINTRASSQGTQVTLSNTDNTSSGASAARGKDVAIVFITADSGEGYITVEGNAGDRNNLDPWHNGNALVQAVAGANSNVIVVVHSVGAIILEQILALPQVKAVVWAGLPSQESGNALVDVLWGDVSPSGKLVYTIAKSPNDYNTRIVSGGSDSFSEGLFIDYKHFDDANITPRYEFGYGLSYTKFNYSRLSVLSTAKSGPATGAVVPGGPSDLFQNVATVTVDIANSGQVTGAEVAQLYITYPSSAPRTPPKQLRGFAKLNLTPGQSGTATFNIRRRDLSYWDTASQKWVVPSGSFGISVGASSRDIRLTSTLSVA

SEQ ID NO: 4100 - protein, 324 aa, Oryza sativa
  unsure (1)..(324): unsure at all Xaa locations
LNRTIVVQQTSQIFCANDVFHCVFXXAATTLTGLHFATTTLMTLVMKWLGHIQPSYLPLPELVKFVFFANLSIVGMNVSLMWNSVGFYQIAKLCIIPVLCILEILFDKVRYSRNTKLSIVLVLVGVAVCTVTDVSVNSKGLLAAVIAVWSTALQQHYVHHLQKKYSLGSFNLLGHTAPAQAASLLILGPFVDFWLTNRRVDTFNYTTIVTVFLHSLNFQFFIVLSCTIAVGTNLSQFICIGRFTAVSFQVLGHMKTILVLTLGFLFFGKEGLNFHVVLGMMLAVIGMIWYGNASSKPGGKERQIYSVPSEKTQKSSQSELDQKV

SEQ ID NO: 4101 - protein, 427 aa, Oryza sativa; identical to SEQ ID NO: 887

SEQ ID NO: 4102 - protein, 435 aa, Brassica rapa
MQGVRYIYHHSYTFLLVFVVMILFHPALSIYINTLSSTESLTISNNRTLVSPGDVFELGFFKTTSSSRWYLGIWYKQLPEKTYVWVANRDNPLPNSIGTLKISNMNLVLLDHSNKSVWSTNLTRRNERTPVMAELLANGNFVMRDSNNNDASEFLWQSFDYPTDTLLPEMKLGYDLKTGLNRFLISWRSSDDPSSGDYSYKLEPRRLPEFYLLQGDVREHRSGPWNGIRFSGILEDQKLSYMEYNFTETSEEVAYTFRMTNNSFYSRLTLSSTGYFERLTWAPSSVIWNVFWSSPANPQCDMYRMCGPYSYCDVNTSPSCNCIQGFDPRNLQQWALRISLRGCKRRTLLSCNGDGFTRMKNMKLPETTMAIVDRSIGEKECKKRCLTDCNCTAFANADIRNGGTGCVIWTGNLADMRNYVADGQDLYVRLAAADL

SEQ ID NO: 4103 - protein, 506 aa, Glycine max
  unsure (1)..(506): unsure at all Xaa locations
MSFQGFLSLQSMSATCGFLVFAFTLLFSFFSFLVFVSRMKPWCNCDVCKSYLTVSWLNKFPNLCDWYTHLLRKSPTGTIHVHVLENTITSNPVNVEYILKTNFQNYPKGKPFSVILGDLLGRGIFNVDGESWKLQRKMASLELGSVAIRTNAMELVNEEIHARLIPFIMGSVTHDELNDSVCVLDLQDILRRFSFDNICKFSFGLDPGCLLPNLPVSNLADAFDLASKLSAERAMNASPFIWKLKRLLNVGSERKLREAINVVNDVANEMIKQRIEMGFNTRNDLLSRFTGSINDDVYLRDIVVSFLLAGRDTIASGLTGFFMLLSKSPEVEELIKXKPARVVGPGQEFPSFEQIREMHYLNAAIHESMRLFPPIQFDSKFATEDDVLPDGTFVRKGSRVTYHPYAMGRMENIWGPDCLEFRPERWLRDGVFVPACPFKYPVFQAGVRVCLGKDLALMEMKSVVLALVRRFDIRVVQSGQEPRFEPGLTATLRGGLPVRVRVCERK

SEQ ID NO: 4104 - protein, 148 aa, Nicotiana sylvestris
MAEVEYSCFVGGLAWATTDRTLADAFGTYGEVLDSKIINDRETGRSRGFGFVTFKDEKCMRDAIEGMNGQELDGRSITVNEAQARGSGGGGGGYGGGRREGGGGGYGGGGGGYGGGRREGGGGGYGGGRREGGGGGYGGGGYGGGGRY

SEQ ID NO: 4105 - protein, 391 aa, Androstachys johnsonii
DLEPVNPADVPVTAAGALKSYKLAAKAISRLQSLPSGNISLLCDVLVKEVSDLTGYDRVMVYKFHEDEHGEVVAECRRPDLEPYLGLHYPATDIPQASRFLFMKNKVRMICDCLAPPVEVVQDGKLSQPLGLCGSTLRSPHGCHSQYMRNMGTIASLVMSVTINENDDEMEGDQQKGRKLWGLVVCHHTSPRFVPFPLRYACEFLIQVFGVQINKEVELAAQMREKHILRTQTLLCDMLLRNAPVAIITQSPNVMDLVKCDGAALYYRKKFWLLGITPTEAQIRDIAEWLLEYHSGTTGLSTDSLMEAGYPGASILGDAVCGMAAVRITSKDFLFWFRSHTAKEIKWGGAKHDPNDKEDGRKMHPRSSFKAFLEVVKRRSLPWEDMEMDAI

SEQ ID NO: 4106 - protein, 365 aa, Bacillus halodurans
MFQTALCKRLSIEFPIVQAGMAGGPTTPELVAAVSNHGGLGTIGAGYMTVEALEVAIKRIRQLTDRPFAVNLFCTDWACDYSRLEEVKPVLDQIRANLGLGKLEEVPAGRDMFRDKFDLLLKERVPVFSSAFGLLAKHDVERLKEFGILWTAMVTTVGEAQEAEQQGADVIVAQGSDAGGHRGTFSVDEKKDGASIGTFSLVPQIVDHVQVPVVAAGGVVDGRGLVAALALGAAGVQMGTRFLLTKEAGTASYYRKALLTSTEEDTVLTRAFSGRPARGIDNEFINQFETSGVEPLPFPAQNHLTSTIRKEAGRQQKQEYSSLWSGQGLRLLQRDGEEAGAVIAQLMNEAKSIWRGWNKTAQDPL

SEQ ID NO: 4107 - protein, 456 aa, Bilophila wadsworthia
MTYDKAELVALDKKYVWHHLTQHKNFEPAIYVKGEGMRITDIDGKTYLDAVSGGVWTVNVGYGRKEIVDAVAKQMMEMCYFANGIGNVPTIKFSEKLISKMPGMSRVYLSNSGSEANEKAFKIVRQIGQLKHGGKKTGILYRARDYHGTTIGTLSACGQFERKVQYGPFAPGFYEFPDCDVYRSKFGDCADLGVKMAKQLEEVILTVGPDELGAVIVEPMTAGGGILVPPAGYYETIREICDKYELLLIIDEVVCGLGRTGKWFGYQHFNVQPDIVTMAKGVASGYAPISCTVTTEKVFQDFVNDPADTDAYFRDISTFGGCTSGPAAALANIEIIERENLLENCTKMGDRLLEGLKGLMAKHPIIGDVRGKGLFAGIEIVKDRATKEPIAEAVANAMVGAAKQAGVLIGKTSRSFREFNNTLTLCPALIATEADIDEIVAGIDKAFTTVEQKFGL

SEQ ID NO: 4108 - protein, 166 aa, Pyrococcus abyssi
MRVLILSADQFEDVELIYPYHRLKEEGHEVLVASFKRGVITGKHGYTVNVDLAFEEVNPDEFDALVLPGGRAPERVRLNEKAVEIAKKMFSEGKPVASICHGPQILISAGVLRGRRGTSYPGIKDDMINAGVDWVDAEVVVDGNWVSSRVPGDLYAWMREFVKLLK

SEQ ID NO: 4109 - protein, 152 aa, Triticum aestivum
MVKTVAVLTGSEGVKGTIFFTQEGDGPTTVTGSVTGLKEGLHGFHVHALGDTTNGCMSTGPHFNPAGHVHGAPEDEIRHAGDLGNVTAGVDGVASINITDCHIPLTGPNSIVGRAVVVHGDADDLGKGGHELSKSTGNAGARVACGIIGLQG

SEQ ID NO: 4110 - protein, 98 aa, Glycine max
MKKEDTVKLISSEGFEFVVDKEAAIVSQTIHNMLTSPGSFAERQHGEVTFPEISTTILEKICQYFYWHLQFASGKETEFSIEPELTLELMMAANYLHT

SEQ ID NO: 4111 - protein, 167 aa, Chlorobium tepidum TLS
MHPEIHDSVFLAEGSYVIGDVKIGAHSSIWFNAVVRGDVCPITIGEKTSVQDNATLHVTHDTGPLKIGSNVTIGHAATLHACTVEDNVLIGMSATLLDHCVVEPWSIVAAGSLVKQGFRVPSGMLVAGVPAKVIRPITEEERANIAESPENYVRYVAHYREEGYEGR

SEQ ID NO: 4112 - protein, 372 aa, Bifidobacterium longum DJO10A
MLADCSRQKPTIQDPQKKSTNIRRNTMKAVVLEEQGVINVREVPDVKDPGPGELRIAPHTVGVCGSDLHYYTHGRVGKYVVEQPMILGHEAAGTVLEVGPGVTDFKPGDRVALEPGIPDMTSRASRLGMYNVDPAVRFFATPPIDGCLCEEVIHPAAFTYHLPDSMSFGEGALLEPTAVGMWAATKARIKPGDVCVVTGSGTVGMLTASAALAGGASKVLVSDVSSIKLGIIGQIPGVIPVDLTTEDLVERVREETAGWGADVAFECSGAPKAYETFWKLIAPGGCAVLVGIPVNPVPIDVTELQATEVRIENIFRYANVYQKAIDLVDSGRLNLKPFITDTFAMKDAKAAFDRMDEGRPGDIKLQITVNRD

SEQ ID NO: 4113 - protein, 454 aa, Zea mays
  unsure (1)..(454): unsure at all Xaa locations
MAKPKPSSAGAKPTAAATAPAPPVTVHSALVTYTSMLALLSLCPPFVILLWYTMVHADGSVVRTYEHLRDHGVLEGLKAIWPMPTLVAWKIIFGFGLFEAVLQLLLPGKRFEGPISPAGNVPVYKANGLQAYAVTLITYLGLWWFGIFNPAIVYDHLGEIYSALVFGSFVFCIFLYIKGHVFPSSSDSGSXGNVIIDFYWGMELYPRIGKYFDIKVFTNCRFGMMSWAVLAVTYCIKQYEMNGXVADSMLVNTALMLIYITKFFWWESGYWCTMDIAHDRAGFYICWGCLVWVPSIYTSPGMYLVNHPLNLGPQLALSILLAGMLCIYINYDCDRQRQEFRRTNGKCSVWGKAPSKIVASYQTTKGETKTSLLLTSGWWGLSRHFHYVPEILSAFFWTVPALFNHFLPYFYVIFLTILLFDRAKRDDDRCSSKYGKYWKIYCNKVPYRVIPGIY

SEQ ID NO: 4114 - protein, 158 aa, Glycine max
  unsure (1)..(158): unsure at all Xaa locations
MVKAVAVLGQQVEGGPLETNSTSFKEGSGSQPTVXLGSLAGLKPGLHGXFHVHALGDTTNGCLSTGSHFNPNNKEHGAPEDENRHAGDLGNVNVGDDGTVSFTITDSQIPLTGPNNIIGRAVVVHADPDDLGKGGHELSKTTGNAGGRVACGIIGLQG

SEQ ID NO: 4115 - protein, 290 aa, Zea mays
  unsure (1)..(290): unsure at all Xaa locations
MHACGSSEFGIRPITRAPAPLTRPFPPHKTHTESRHPTSPTRTSIMAVASTSPLSATAPSPPAPVSGFLALPARRGCATRLGSAAAWRRLRVEAIWKQQEKQRAEVSVEEPAPVREAAAPLDGVGADDPMVPSSDESWVVRLEQSVNIFLTESVIILLNTVYRDRNYARFFVLETIARVPYFAFISVLHMYETFGWWRRADYLKVHFAQSLNEFHHLLNMEDGISHAIWVXERHAYSTYDEFLKLHEEELKKXLPTSEAALNYYMNEDLYLFDEFQASRTPGSRRPKIIN

SEQ ID NO: 4116 - protein, 162 aa, Oryza sativa; identical to SEQ ID NO: 3922

SEQ ID NO: 4117 - protein, 483 aa, Chlamydia muridarum
MFLKKRSSSGILGTLSLTGVVISSMVGGGIFSLPQNMAASASAGAIIIAWLLSGIGIFFIANTFKTLSLVRPDLKAGIYTYSREGFGPYVGFTIAWGYWLCQIFGNVGYAVITMDALNYFFPPYFEGGNTLPAILLGSILIWVFNSIVLRGIRQAAFMNVIGVIFTLIPLLIFILITALFFKFSIFKTDFWGTAPQHHLGSIGSQLKSTMLVTLWAFIGIEGAVVMSGRASNPSSVGKATILGFSGCLLIYVLLSLLPFGSLSQYQLAKIADPSTAGVLKFLVGKWGEVLMNTGLLIAVLTSWLSWTILTAEIPYAAAKNGTFPECFAIENAKHSPAFSLFITSGLMQITMLLVYFSSNAWHTMLEITSVMVLPAYLTSSLFLVKLSLSKKYPKQAPIKARVAIFTGILGTLYSLWLIYAGGLQHLFMVAVLLALGIPFYIDSGIRHDQEKTFLNRKEVMKMTTLALIALLAVFLFSANKIHL

SEQ ID NO: 4118 - protein, 130 aa, Glycine max
  unsure (1)..(130): unsure at all Xaa locations
MVSFEMNDRKKIGLGLTGFGIFFSFLGLIFFFDKGLLAMGNILFVSGVSLTIGLKSTMQFFMXRSNFKGTISFGIGFFILILGWPILGMIVESYGFIVLFSGFWPTLAVFLQKXPVLGWLFQQPFVRSLL

SEQ ID NO: 4119 - protein, 151 aa, Zea mays
MAMAYKMATEGMNVKEECQRWFMEMKWKKVHRFVVYKIDERSRAVLVDKVGGPGEGYEELVAALPGDDCRYAVFDFDFVTVDNCQKSKIFFIACWRLLLSCWSPAASRIRAKILYATSKQGLRRLLDGVHYEVQATDPSEMGFDVIRGRAQ

SEQ ID NO: 4120 - protein, 475 aa, Lactococcus lactis subsp. cremoris
MIKFFNSMIFKGVVAHLLLFVILFMSNFDYNLIHLSTFIGYYLFSLVFVLVFLNQQHRMIVNVSKQMNDIKNGYLNRDKIPKGTSKINELYEEILKLGEDIVRTQNNLENQRNQLDSILAYMVDGVIATDRRGNIIMANKSALHYLNTSNELLMEKNIVDVLKIADQYNFYDLLEKEPEITIETHDAGNESISLHIKFALFRRESGFISGIIAVLHDMTKQDKAERERRLFVSNVSHELRTPLTSVKAYLEALEDGAIDDKETASSFIRCFTNRNQSDDSVISDLLTLSRMDQDRIVLNKEIINLIAFLDYQINRLDQILETESNDLISSNFTLVRKYSDKPIWVEIDTDKIAQVIDNIIGNAIKYSPKGGTITIYVETRERDVLISIKDEGMGIPKSDLLKIFDRFYRVDNASRNSKVGGTGLGLSIVHDIVKIHGGTIFASSEGEGKGTTFSFTLPYSSETSEYWDDAADDFE

SEQ ID NO: 4121 - protein, 483 aa, Triticum aestivum
  unsure (1)..(483): unsure at all Xaa locations
MGMEKGKADPAAFSIAEAGFGDRTDIDDDGRERRTGTLVTASAHIITAVIGSGVLSLAWAIAQLGWVIGPAVLVAFSVITWFCSSLLADCYRSPDPVHGKRNYTYGQAVRANLGVXQYRLCSLAQYVNLVGVTIGYTITTAISMGAIGRSNCFHRNGHNAACEASNTTNMIIFAAIQILLSQLPNFHKIWWLSIVAAVMSLAYSSIGLGLSIAKIAGGVHAKTTLTGVTVGVDVSGREKIWRTFQSLGDIAFAYSYSNVLIEIQDTLRSSPAENTVMKKASLIGVSTTTTFYMLCGVLGYAAFGSSAPGNFLTGFGFYEPFWLVDIGNVCIVVHLVGAYQVFCQPIYQFVEGWARSRWPDSAFLHAERVLRLPAVLGGGEVPVSPFRLVWRTAYVVLTAVVAMLFPFFNDFLGLIGAVSFWPLTVYFPVEMYMAQAKVRRFSPTWTWMNVLSVACLVVSVLAAAGSVQGLIKDVAGYKPFKVS

SEQ ID NO: 4122 - protein, 388 aa, Zea mays
  unsure (1)..(388): unsure at all Xaa locations
MEVSPECADGGRVKTEVDLFLVDELLDLPYDEEEDAREAVVGDGEAAGDGGKQASVLHRACGDGGEEGAASNASNDSSAVTAXLDSCSNNSLSVSGLADGDFSGGLCEPYDQLVELEWLSNYMGEDNLPAEDLKKLRLINGIPPAATATAPAAVAAAAQAQPPADGALPPEAPVPGKARSKRPRVAPCSWATRLLVLPPTPASPPSAAISPSESGTAAPVAFPAKKPSKPAKKKEAPTTPVPDNSAGAGESRRCLHCETDKTPQWRTGPLGPKTLCNACGXRYKSGRLVPEYRPAASPTFVVSKXSNSHRKVLEXRRQKEAHLXPXPHQYQYQPQPQPQPQAFAHGGGGALVHAPTPLLFDGPAAPLIGDDHFLIHSHIVGPNFRQLI

SEQ ID NO: 4123 - protein, 469 aa, Glycine max
  unsure (1)..(469): unsure at all Xaa locations
MAPSISDEMPSTTTSLLRRNRWLPSSIKLKTTLFSELSGAVGDLGTYIPIVLALSLVNNLDLTTTLVFTALYNIATGLLFGLPMPVQPMKSIAAVAISAAXPLTIPQISAAGLSVAAVLLLLGATGLMSVLYRYLPLPVVRGVQLSQGLSFAFSAVKYIRYDQDLAKSKSGPPRPWLAVDGVAVALAAVLFLVLTTGAGDEPPPPPPQQQEEEIDDRREKVRRRLRVLSTIPAALIVFLFGLVLCFIRDPSIFGDLRFGPSRISLIKITWEDLKIGFVSAAIPQIPLSVLNSVIAVCKLSGDLFPEREASAMHVSVSVGLMNFVGCWFGAMPCCHGAGGLAGQYRFGGRSGASVVFLGIAKLVLALVFGNSLGRILGQFPIGILGVLLLFAGIELAMAAKDMNTKQESFVMLVCAAVSLTGSSAALGFFVGIVLYLLLKLREVECRGFGFCGSNHTKSSLEDEQASLIA

SEQ ID NO: 4124 - protein, 327 aa, Agrobacterium tumefaciens str. C58 (U. Washington)
MARTILVTGGAGFIGSHICKALAQSGFKPIAYDNLSTGHADSVRWGPLIEGDILDGVLLKATLREFSPAFVIHCAANAYVGESVEDPRKYYRNNVGGSLSLLDACLDQNIGGLVFSSSCATYGVPQQLPIREETAQMPVNPYGRTKLIFEMALEDYAAAYGLRFVALRYFNAAGADPDGELYERHEPETHLIPRALMAAAARLPQLDVFGADYDTSDGTCIRDYIHVSDLADAHLAAVNYLSDGGETLRVNLGSGHGTSVGDIIRAIHRVTGQEVPVHFGARRAGDPPALFADIRRAEETLGFTPKRSDIDTIIRTAGPGFGLEARS

SEQ ID NO: 4125 - protein, 149 aa, Sonneratia paracaseolaris
MADPLTDDQISEFKEAFSLFDKDGDGSITTKELGTVMRSLGQNPTEAELQDMINEVDADGNGTIDFPEFLNLMARKMKDTDSEEELKEAFRAFDKDQNGLISAAAELRHLMTNLGEKLTDEEVDEMIREADVDGDGQINYDEFVKVMMA

SEQ ID NO: 4126 - protein, 331 aa, Bradyrhizobium japonicum USDA 110
MLQTRFTKLVGVEHPIVQGGMQWVGRAELVAAVANAGALGFITALTQPTPEDLTKEIARCRDLTDKPFGVNLTILPAIKPPPYAEYRAAIIESGITVVETAGNKPQEHVDEFRKHGVKVVHKCTSVRHALSAERMGVDAISIDGFECAGHPGEDDTPGLILIPAAANKVKIPMIASGGFADARGLVAALALGAEGINMGTRFMATKESPIHQSIKEKIVANDERETELIFRTMRNTSRVARNAVSTKVVAMEKEGAKFEDIRELVAGARGKMVYATGNSDEGIWSAGQVQGLIHDIPSCAELVSRIVSEAQAIIRSRLEGMIVQPQREAAE

SEQ ID NO: 4127 - protein, 354 aa, Cicer arietinum
MSPDIAKIRKLVRQSKCLQDKMTAKESATWLAIINQEEALARELYPDYCPSLSSGGGSGSMVINDCSEYDVDGADDETNFDVVEDRKPENLHPSNLGMERMRGMVPVQQPSLPMKGEVVTNLDFIRKRKISNDFNMIIDQKLYTCEHPQCPYSEVRLAFQDRSSRDNHQLNCPYRNSPADYGGSNFHATEVKPIIFPQSFVQPNSTAQPAGLVPPSFDLTGLGVPEDGQKMITELMSIYDTNVIGNKNASSTNCVAVENQNLSQPCIQQQQDNFFSSQGMVMEAANFFTRDESQFDRFKPINSPFETNHNNNNIHLMFGSPCDLASFDFKEDIQLQGVGIDTFHKQPDMSIWYN

SEQ ID NO: 4128 - protein, 374 aa, Siphonodon celastrineus
ALSIAGAVQSQKLAVRAISQLQSLAGGDIKLLCDTVVESVRDLTGHDRVMVYKFHEDEHGEVLAESKRPDMEPYIGLHYPATDIPQASRFLFKQNRVRMIVDCHASPVRVIQDDGLMRPLCLVGSTLRAPHGCHAQYMENMGSTASLVMAAYINGNDKKATGGRNATKLWGLAVCHHTSARCIPFPFRYACEFLMQAFGLQLNMELQLAAQLSEKHVLKTQTLLCDMLLRDSPTGIVTQSPSIMDLVRCDGAALYYQGNYYPLGVTPTEAQIKDIVEWLLAVHGDSMGLSTDCLADAGYPGSALLGDAVCGMAVAHITNRDFLLWFRSHTAEEIKWGGAKHRPKDKDDGQRMHPRSSFKAFLEVVKSRSLPWEN

SEQ ID NO: 4129 - protein, 103 aa, Triticum aestivum
EPVLKYLKDIKWSRIDDPKGFKLEFFIDTNPFFKNSVLTKSYHMVDEDDPILEKAIGTEIEWYPGKNVTQKILKKKPKKGSKNTKPITQKLKSARASSTFSAP

SEQ ID NO: 4130 - protein, 246 aa, Triticum aestivum
  unsure (1)..(246): unsure at all Xaa locations
MASSGGGGGDAGEGEWLKVAELKAMAEAQDPHVKEVDNMTLRRFLRARDHDVGKASAMLLKFVAWRREAVPGGVGGVMPADLVRTELSQDKAXWGGVDRAGRPVLLVFPARHLSADRDMAEHKRLVVYLLDRISARIPRGQDKFMCIVDLKGWGYANSDVRAYIAAIEIMQGYYPERLGKALMVHVPYIFMKAWKMVYPFIDTNTRDKFVFVDDKNLEETLRREMDESQVPEMYGGKLPTVPLTDD

SEQ ID NO: 4131 - protein, 379 aa, Zea mays
PCPHHQLYQPKLGYLFPPNQIVNDNYLYAKLAKFIVNKSDLAEKDIPALADIVGDDDKAKEIVEAAKASMGQDLSPVDLINVQQFAQRVMNLSEYRKNLYEYLVTKMNDIAPNLTSLIGEVVGARLISHAGSLSNLAKCAASTLQILGAEKALFRALKTRGNTPKYGLIFHSSFIGRASTKNKGRMARYLANKCSIASRIDCYSEASTSVFGQKLREQVEERLEFYDKGVAPRKNLDVMKAAIDSLVNDTLMDDDDNEKADTSAKKSKKKKTKTETDGDAMDVDKPSNVADGEAELGTEKKKKKKKHKLEEAQENGAAHANGAEETQTPKKKKKKSREISEEAEPKTATEGKKKKNEEAEPKTATEGKKKKKKAVKADE

SEQ ID NO: 4132 - protein, 162 aa, Chlamydomonas reinhardtii
MANPEFYGLSTTTLSGQPFPFKDLEGKAVLIVNVASKCGFTPQYKGLEELYQQYKDRGLVILGFPCNQFGGQEPGDASAIGEFCQRNFGVTFPIMEKSDVNGNDANPVFKYLKSQKKQFMMEMIKWNFEKFLVDKSGQVVARFSSMATPASLAPEIEKVLNA

SEQ ID NO: 4133 - protein, 366 aa, Pisum sativum
MTNNKEAFNISDLSSALNEEDRADLVNALKSKIQSLAGQHSDVLESLSPVVRKRVEVLREIQGEHDELEAKFLEERAALEAKYQILYQPLYTKRYDIVNGVAEVVGVRVETAVAEEDKEKGVPSFWLNAMKNNDVGGEEITERDEGALKFLKDIKWTRIEEPKGFKLEFFFDSNPYFSNSVLTKIYHMVDEDEPILEKAIGTEIQWLPGKCLTQKVLKKKPKKGAKNAKPITKTETCESFFNFFNPPEVPEDDEDIDEDMAEELQNQMEQDYDIGSTIRDKIIPMSWFTGEAAQGEEFGDLDDEDEDEDDDAEEDDEEEDEDEDDDDEEEEETKTKKKSSASKKRIGIAQLGDGQQGERPPECKQQ

SEQ ID NO: 4134 - protein, 216 aa, Schizosaccharomyces pombe
MMVSLKSSLFFMLALLTVVHALNFDIPAKTNPEPFCLREYVGEKNLVIVNLKTTGNMGDGQTLSMMITDSSGNTHSSIQNVLGEKSVAFDVDASAMLDICFLNTLTPGAIESEHKKRSVKLEFTVGADADDYSSLQKANNLEPVEADIRRARDFIEEIKGKIYYLQAREARFRNTNESTNERVKNFAYLTFISLFVLVIWQILYLRSFFQRKHLIP

SEQ ID NO: 4135 - protein, 648 aa, Sulfolobus tokodaii
MSERETKGARDLGISSDRQLRRSLGKFELLYLSLGGIIGSGWLFASLATATYAGASAILSWIIAGILVMFIGLVYAEIGAAIPKSGGITRYPHYTHGGLVGYLITWAYFLSAASVPAIEAAAAIEYIGSYYPQLITTGTFDGTTVTILTPLGIGLAGLLLILFFFLNYFGVNILGKVTHGAGWWKLLIPTITFLALLALDLHSANFSLGGGFLPSAEYVKGGSSGIYGFSAVLYAIPSTGVIFSYLGFRQAVEYGGEGKNPKKDIPFAVIGSLLIAIVLYTLLQVAFVGGIDWNKLYLNESGKLVPVTPGNWSALSTAVTASGVPISAGPFLVLSRLASVSGLAAAFFTALAVLLTIDAVVSPSGTGWIYTGTSTRTLYAFASNGYLPEIFLKIGKTKIPTYSLIAALIIGFIFLLPFPSWYALVGFISSATVLTYIMGGIGLTVLRKHAAELNRPFKLPAAPIIGAIATLAAGLIVYWSSFAVLFYVFTGVFLGLPLFFIFYADKMLGINKVVSIIVGVINLAINLGMGLLLFNETSGLSAANNLFFTIYIVVIAAMLIGDMIFLLKTVPSDVKKEINAGWWLIYFILAIYIVSYFGGFGLYTVIPFPYDTIVAAIVVLIGYFWAVRSGFRTQAIEDIIQATKEEAV

SEQ ID NO: 4136 - protein, 157 aa, Zea mays
LLRPHHLRLLSVVALASAVPVPAPAQSPTEWAEAPLASVRPATADASLFHVSLDLSAHRGLLASHTAAGQFLRFRLPASLYHIFLAIASPPPPPSCFEFLVKRLPGTPSARLCDLRPGDLVHVGASVVGRGFDVARISDARDVLVFATGSGIRYPCH

SEQ ID NO: 4137 - protein, 346 aa, Shigella flexneri 2a str. 301
MVWLANPERYGQMQYRYCGKSGLRLPALSLGLWHNFGHVNALESQRAILRKAFDLGITHFDLANNYGPPPGSAEENFGRLLREDFAAYRDELIISTKAGYDMWPGPYGSGGSRKYLLASLDQSLKRMGLEYVDIFYSHRVDENTPMEETASALAHAVQSGKALYVGISSYSPERTQKMVELLHEWKIPLLIHQPSYNLLNRWVDKSGLLDTLQNNGVGCIAFTPLAQGLLTGKYLNGIPQDSRMHREGNKVRGLTPKMLTEANLNSLRLLNEMAQQRGQSMAQMALSWLLKDDRVTSVLIGASRAEQLEENVQALNNLTFSTEELAQIDQHIADGELNLWQASSDK

SEQ ID NO: 4138 - protein, 276 aa, Zea mays
PRFDSFGRKQPGGRGRQARPEERKRKGEGASGSPPPSVWKHLVPHLVDDYRVVLYDNMGAGTTNPDYFDFDRYSNLEGYSFDLIAILEDLKIESCIFVGHSVSAMIGVLASLNRPDLFSKIVMISASPRYVNDVDYQGGFEQEDLNQLFEAIRSNYKAWCLGFAPLAVGGDMDSIAVQEFSRTLFNMRPDIALSVGQTIFQSDMRQILPFVTVPCHILQSVKDLAVPVVVSEYLHANLGCESVVEVIPSDGHLPQLSSPDSVIPVILRHIRNDIAM

SEQ ID NO: 4139 - protein, 401 aa, Triticum aestivum
  unsure (1)..(401): unsure at all Xaa locations
MASYTRPNPANPSSPAPSAPPLYPSLTMADLAPPEIPRSPVSPDAPAPSDDVLLRAPGAQLHLVDRRRSHPLAAGELSLHRIRAGDTSLAAIAALGPVQWPLARDVAAVKLDPRHYSFSFAVPASPDDPAPDPLHYGLTLSVPDPRLDALLGAYTRFSAHSVAGSEGLAGGVRGEVEAAAYWTAVAPHVEEYGSAGARAFASGAEDVPQGILWCGVMTLDRLRSGQEASRKDTHGHPADSRWYYSXAITMTFAVRXADQDPGFRAGAPPGGVVVTSYVTSSLVNSKAGKKFFSLLPGEVVLASLDGFGKISDAVEVAGKDVLSTSSTVTTGLVSHKYGEKAAAATNEGLDAAGHAIGTAWAVFKLRQALNPKSVLKPTSLAKSTVKAGAAELRAKSSSKSK

SEQ ID NO: 4140 - protein, 364 aa, Mycoplasma penetrans
MKSINLPTSMKALVFVEKNKIQIVNKPIPTVGPNDALIKVTTTTICGTDIHIVKGEYPVKPGLTIGHEAVGILAAVGDEVTGFELGERVLAGAITPSGYTAACQSGQSSQDGIGTKYGYKPTAGWKFGNIMDGCQAEYVLVKNAMANLARVPNALTDEQVLMCPDIMSTGFSGPENANIKLGDYVGVIAQGPIGLCATTGAKLMGASIIIAIDGNDRRLEIAKELGATHTINFRNVDVVQEVNRITDGRMLDSAIECLGSQSTFEQGFRLLRAGGTLSSLGVYSSDIKLPLDALAAGLGDHKISFALCPGGSERMRRLMSLIENKRVDLRSLVTHTLPFDRIAEGYNIFANQKDGVLKVAIKVS

SEQ ID NO: 4141 - protein, 336 aa, Oryza sativa (japonica cultivar-group)
MAAVASASPLPAAAAPSTRCSPPPAFLPLRAHRPRVGTVATRRVFRAEAMRTQREKEQTEVAVEESFPFRETAPPDEPLVTAEESWVVKLEQSVNIFLTESVITILDGLYRDRNYARFFVLETIARVPYFAFISVLHMYETFGWWRRADYIKVHFAESWNEFHHLLIMEELGGNSLWVDRFLARFAAFFYYFMTVAMYMVSPRMAYHFSECVERHAYSTYDKFIKLHEDELKKLPAPEAALNYYLNEDLYLFDEFQTARVPCSRRPKIDNLYDVFVNIRDDEAEHCKTMKACQTHGNLRSPHSMQKCLETDTECVIPEDDCEGIVDCVKKSLVSKE

SEQ ID NO: 4142 - protein, 294 aa, Zea mays
KKKKKKKKLKLDPSIYDALIKEKVAVGDVIYIEANSGAVKRVGRCDSFATEYDLEAEEYVPIPKGEVHKKKEIVQDVTLHDLDAANAQPQGGRDILSLMGQMMKPRKTEITEKLRQEINKVVNRYIDEGIAELVPGVLFIDEVHMLDIECFSYLNRALESPLSPIVILATNRGICNVRGTDMTSPHGIPVDLLDRLVIIRTETYGPTEMIQILAIRAQVEEIDMDEESLAYLGEIGQQTSLRHAIQLISPASVVSKTNGREKICKADLEEVSGLYLDAKSSARLLQEQQERYIT

SEQ ID NO: 4143 - protein, 332 aa, Glycine max
MAAIFSSSLFASSPLPKPLSSSYSRIHTAPQLFRARSSLLQDNEKKVIVHDSFPSKTSPLHTADKSTGGNSINTSAFEKRIIKVEQSVNIFLTDSVIKILDTLYHDRHYARFFVLETIARVPYFAFMSVLHMYESFGWWRRADYLKVHFAESWNEMHHLLIMEELGGNAWWFDRFLAQHIAIFYYIMTVLMYAVSPRMAYHFSECVESHAFETYDKFIKVQGDELKKMPAPEVAVNYYTGDDLYLFDEFQTSRVPNSRRPKIENLYDVFVNIRDDEAEHCKTMKACQTHGNLRSPHSYAEDDDSSVCALEADCEGIVDCIKKSVASNPAKVK

SEQ ID NO: 4144 - protein, 454 aa, Mycobacterium leprae
MAPKCSSDLFSQIVSSGPGSFVAKQLGVPRPETLRRYRPSDAPLCGSLLIGGDGRLVEPLRATLEKDYDLVSNNLGGRWTDSFGGLVFDATGITAPAELKGLHNFFTPLLRNLGRCARVVVIGTTPDATTSTDERIAQRALEGFSRSLGKELRRGATVALVYLSPDAKPAATGLESTMRFILSAKSAYVNGQVFYVGAADSTPPTNWDRPLENKVAIVTGAARGIGAAIAEVVARDGARVVAIDVESAAEALDETANRVGGTTLSLDVTADDAVDKITEHLHDYQGGHADILVNNAGITRDKLLANMDDCRWDAVLEVNLLAPQRLTEGLVGNGSISKGGRVIVLSSMAGIAGNRGQTNYATAKAGVIGLTQALAPGLAEKGITINAVAPGFIETQMTAAIPLATREVGRRLNSLLQGGLPVDVAETIAYFAIPASNAVTGNVIRVCGQAMLGA

SEQ ID NO: 4145 - protein, 200 aa, Zea mays
MKKIFGAKKDKGPPPSIQDATERINKRGETVDEKIKKLDEELARYEEQRNMLYNQTYNLDQVGFAADGLKDAQQTMNAMKAANKELKGMMKTVKIDEIDNMQDEMTDLMDVSNEIQETLGRSYNIPDDVDEEELMGELDALESDMEFDSAAVPSYLQPDSDFDADLNLPAAPSRPAMVPAGGLQEDELGLPAVPRASLRS

SEQ ID NO: 4146 - protein, 482 aa, Pseudomonas aeruginosa PAO1
MSQESSQKLRLGALTALVVGSMIGGGIFSLPQNMAASADVGAVLIGWAITAVGMLTLAFVFQTLANRKPELDGGVYAYAKAGFGDYMGFSSAWGYWISAWLGNVGYFVLLFSTLGYFFPIFGKGDTVAAIVCASVLLWALHFLVLRGIKEAAFINTVTTVAKVVPLFLFILICLFAFKLDIFTADIWGKSNPDLGSVMNQVRNMMLVTVWVFIGIEGASIFSSRAEKRSDVGKATVIGFITVLLLLVLVNVLSMGVMTQPELAKLQNPSMALVLEHVVGHWGAVLISVGLLISLLGALLSWVLLCAEIMFAAAKDHTMPEFLRRENANQVPANALWLTNICVQVFLVVVFFTSGDPDGMDPYTKMLLLATSMILIPYFWSAAYGLLLTLKGETYENDARERSKDLVIAGIAVAYAVWLLYAGGLKYLLLSALLYAPGAILFAKAKHEVGQPIFTGIEKLIFAAVVIGALVAAYGLYDGFLTL

SEQ ID NO: 4147 - protein, 446 aa, Yersinia pestis KIM
MVNRISDFCWGAEIHSDDEFLNLLFTLIKGGNMEQPSPVTRQSFDEWIVPTYAPADFIVVRGEGSTLWDQQGKSYIDFAGGIAVNALGHGHPAVRAALIEQADKVWHLGNGYTNEPVLRLAKQLIDATFAEKVFFCNSGAEANEAALKLARKYALDNFANKAGQQGEKNQIVAFRNAFHGRTLFTVSAGGQPKYSQDFAPLPGGIHHGIFNDLASAEHLITDQTCAVIVEPIQGEGGVLPADKEFLHGLRALCDRHNALLIFDEIQTGVGRTGELYAYMHYGVSPDVLTSAKALGGGFPIGAMLTTTKYASALSVGSHGTTFGGNPLACAVAGTVLSLINQPTLLAGVKARHQWFIDELAEINARHNVFAEIRGRGLLIGCVLNAQYAGKSKEIVQAAAQYGLIALIAGPDVVRFAPSLIISPKEIKEGLARLAMGIEQVCQKVTS

SEQ ID NO: 4148 - protein, 167 aa, Helianthus annuus
EFQVGPSVGISAGDELWVARYILERITEIAGVVVSFDPKPIPGDWNGAGAHTNYSTKSMRDEGGYEVIKKAIEKMGLKHKEHIAAYGEGNERRLTGRHETADINTSLWGVANRGASIRVGRDTEKEGKGYFEDRRPASNMDPYVVTSMIAETTIFVEQILKIIRFGP

SEQ ID NO: 4149 - protein, 172 aa, Triticum aestivum
  unsure (1)..(172): unsure at all Xaa locations
MAAASSATSVHDFTVKDASGKDVDLSVYKGKVLLIVNVASQCGLTNSNYTELSQLYPKYKDQGFEILAFPCNQFGGQEPGTNDEIVQFACTRFKAEYPIFDKVDVNGSNVSPLYKFLKSSKGGLFGXDSIKWNFSKFLVMTRRVTLLDRYAPNPLPPVSIXEKDIKKLLGSS

SEQ ID NO: 4150 - protein, 384 aa, Rhodospirillum rubrum
MFPLPLSPKRSFMIVSRAAIAWEAGKPLSVEEVEVAPPRQGEVLVRIIATGVCHTDAYTLSGSDPEGVFPAILGHEGGGIVEEIGPGVTSVAVGDHVIPLYTPECGTCKFCRSGKTNLCQAIRATQGQGLMPDGTSRFSIKGREIRHYMGTSTFSEYTVLPEIALAKVNKAAPLEKICLLGCGVTTGMGAVLNTAKVEPGATVAIFGLGGIGLSAIIGCVMAGAGRIIGVDINPDKFEIARQLGATDVINSRDYDRPIQEVLIDMTDGGVDYSFECIGNVGVMRSALECCHKGWGQSVIIGVAGAGQEISTRPFQLVTGRVWRGSAFGGVKGRSELPALVERYLAGDFELDTFITHTMGLADINHAFELMHEGKSIRSVIHYDL

SEQ ID NO: 4151 - protein, 306 aa, Lycopersicon esculentum
MGGGDHGGKSDISFAGIFASSAFAACFAEACTLPLDTAKVRLQLQKKAVEGDGLGLPKYRGLLGTVGTIAKEEGVASLWKGIVPGLHRQCIYGGLRIGMYEPVKNLYVGKDHVGDVPLSKKILAALTTGALGITVANPTDLVKVRLQAEGKLPAGVPRRYSGALNAYSTIVKQEGVRALWTGLGPNIGRNAIINAAELASYDQVKEAVLRIPGFTDNVVTHLIAGLGAGFFAVCIGSPVDVVKSRMMGDSAYKNTLDCFVKTLKNDGPLAFYKGFIPNFGRLGSWNVIMFLTLEQAKKFVKNLESP

SEQ ID NO: 4152 - protein, 318 aa, Persea americana
  unsure (1)..(318): unsure at all Xaa locations
DIIKNAAEIIAKTSFGMNHQYAERVFEKLKAMQVTLYRSGRLLGVPFGRLVYLKQTLEERKLGKEIDDLLLSIITARKASHIAEPPKDLLGLLLPDNHVNELLGKKLSPRELVDECKTFFFGGHETTALASLWTLFLLAKQPKWQTLLREXIMEVTGGEPLDFTMLPKLEKMGWVMNEVLRLYPPAPNVQRQVREDIQVGDTIIPKGTNIWIDLVGMHHDPALWGEDVNEFRPERFKEDVLYGGCKHKMGYLPFGFGGRMCVGRNLALMEYKTVLSLILTRFSMSLSPNYLHSPTHLLSLRPSCGMPLILQPITPNHP

SEQ ID NO: 4153 - protein, 193 aa, Oryza sativa
  unsure (1)..(193): unsure at all Xaa locations
MESPDSSSGSAPPRPELPPGFRFHPTDEELVVHYLKKKAASVPLPVTIIAEVDLYKFDPWDLPEKANFGEQEWYFFSPRDRKYPNGARPNRAATSGYWKATGTDKPIMSSGSTREKVGVKKALVFYRGKPPKGVKTNWIMHEYRLTDTPPPPITGGSKGAVSLRLDDWVLCRIYKKTNKAVSRIWHNIGTITX

SEQ ID NO: 4154 - protein, 143 aa, Triticum aestivum
MAMAYKMATEGMNIKEECKRWFTEMKWKKVHRFVVYKIDERTRAVLVDKVGGPGEGYDELVAALPGDDCRYAVFDFDFVSVDNCQKSKIFFIAWSPAASRIRAKILYATSKQGLRRVLEGVHYEVQATERSEMGFDVIRERAQ

SEQ ID NO: 4155 - protein, 153 aa, Emericella nidulans
  unsure (1)..(153): unsure at all Xaa locations
MVKAVAVRGDSKVSGTVTFEQADENSNTTVSWNITGNDPNAERGFHIHQFGDNTNGCTXAGPHFNPFGKTHGAPEDEVRHVGDLGNFKTDAEGNSKGSKTDKLIKLIGAESVLGRTLVVHAGTDDLGRGDSEESKKTGNAGARPACGVIGIAA

SEQ ID NO: 4156 - protein, 104 aa, Triticum aestivum
  unsure (1)..(104): unsure at all Xaa locations
LWHPDCNTNSIYXTSNQDLIXSYCKAXPDDPSSEDNACSINISDILTGKCMAKIKAGNLCKQKSSKFLCTPLEALGDITSLYYDEEREEIITGNHQGLIHVWSN

SEQ ID NO: 4157 - protein, 214 aa, Paeonia suffruticosa subsp. spontanea
IVESVGEGVTDLKPGDHVLPVFTGECKECRHCKSEESNMCDLLRINTDRGVMLNDGKSRFSINGQPIFHFVGTSTFSEYTVVHVGCVAKINPEAPLDKVCVLSCGISTGLGATLNVAKPKKGSSVAIFGLGAVGLAAAEGARIAGASRIIGVDLNPKRFEEAKKFGVTEFVNPKDYNKPVQEVIAEMTGGGVDRSVECTGSIMAMMSAFECVHD

SEQ ID NO: 4158 - protein, 182 aa, Deinococcus radiodurans
MFRTLTVVPLLALGLSLSACADLGQPTVRADLLDQTGKVTGTATFSPSPIGTRVSIEVSGLKAGPHGLHIHENPNCNPGPDAQGQTIPFGAAGGHFDPGASHNHDGPHARNDQGHGGDLPMITVGEDGKGRLNFDTNRLKMTGPTGVLGRSIVIHADADDYQTNPAGNSGGRERCGVFQAIN

SEQ ID NO: 4159 - protein, 396 aa, Zea mays
MAAAASSALHAVGAVASAKPRSVVPAVATRRSVRVAPAAKRGPGSGGGRLVARSAVAAKADEAAAAAGSKSGGHELLMFEALREALIEEMNLDPTVCVMGEDVGHYGGSYKVTKGLAEMFGDLRVLDTPIAENSFTGMGVGAAMKGLRPVVEGMNMGFLLLAYNQISNNCGMLHYTSGGQFKIPVVIRGPGGVGRQLGAEHSQRLESYFQSIPGLQMVACSTPYNAKGLMKAAIRSENPVVLFEHVLLYNLKEKIPDEEYICCLEEAEMVRPGEHVTILTYSRMRYHVMQAAKTLVNKGYDPEVIDIRSLKPFDLHTIGNSIKKTHRVLIVEECMRTGGIGASLRSAIIDNFWDYLDAPIMCLSSQDVPTPYAATLEDATVVQPAQIVAAVEQICQ

SEQ ID NO: 4160 - protein, 547 aa, Zea mays
  unsure (1)..(547): unsure at all Xaa locations
MALATNSAAAAAAGRXPAGAASQPHRAATFLPLKRRTISAIHAADPSKNNGPAVXAAAAAKSSASAVATPEKNPAAPVKWAVDSWKSKKALQLPEYPNQEELDTVLKTIETFPPVVFAGEARHLEERMAEAAMGRAFILQGGDCAESFKEFHANNIRDTFRILLQMGAVXLMFGGQVPVVKVGRMXLGQFAKPRSEPLEERDGXSSCPSYRGDNVNGDDFTEKSRVPDPQRMIRAYSQSVATLNLLRAXATGGYAAMXQRVTQWNLDFMDHSEQGDRYRELAHRVDEALGFMTAAGLTVDHPIMTTTDFWTSHECLLLPYEQSLTRKDSTSGLFYDCSAHMLWXVGERTRQLDGAHVEFLRGVANPLGIKVSDKMNPSDLVKLIEILNPSNKPGRITIITRMGAENMRVKLPHLIRAVRNAGLIVTWITDPMHGNTIKAPCGXLKTRPFDSILAEVRAFFDVHDQEGSHPGGXIHLEMTGQNVTECIGGSRTVTFDDLSDRYHTHXDPRAERPPQSLGLAFIIAERLRKRRMRSGLNNSLPLPPLAF

SEQ ID NO: 4161 - protein, 376 aa, Rhodopseudomonas palustris
MLHVGRTEGRRVRFRVRHRDERRWHLQREDRMTKYKLEYIWLDGYKPTPNLRGKTTIKEFEIYPTLEQLPLWGFDGSSTMQAEGHSSDCVLKPVAMYPDAARKNGILVLCEVMMPDGVTPHPTNTRATILDDEGAWFGFEQEYFFYKNGRPLGFPEAGYPAPQGPYYTGVGYKHVGDIARQIVEEHLDLCLAAGINHEGINAEVAKGQWEFQVFGKGSRTAADQMWMARYLMLRLTEKYGIDIEFHCKPLGDTDWNGSGMHCNFSTAYMREVGGKEYFEAMMKAFEANLDDHIAVYGPDNHMRLTGKHETAPWNKFSYGIADRGASIRVPHSFVNNGYKGYLEDRRPNSQGDPYQIASQVLKTISSVPTSKSAAAA

SEQ ID NO: 4162 - protein, 540 aa, Triticum aestivum
  unsure (1)..(540): unsure at all Xaa locations
MALYLLFECVPGYALFHAHGIDEIGQSVDAVRSTVLDLKRFSKAVKLAGFTPFLSAVDALNQCNAISEGIMTDELRNFLELNLPKVKEGKKAKFTVGVMEPKVGSHITEATGIPCQSNDYVQELLRAVRLHFDQFIEQLKPSDLEKAQLGLGHSYSRAKVKFNVNRVDNMVIQAIFLLDTLDKDVNSFSMRVREWYGWHFPELVKIVNDNYLYAKLAKFVVNKSDLSEKDIPALADLIGDEDKAKEIVEAAKASMGQDLSPVDLINVQQFAPRVMNLSEYRKNLIWXLRTMINDLIRSLRSVIXVGARLISHAGSLSNFAKCPASTLQILGAEKALFRALKTRGNTPKYGLIFHSSFIGRASTKNKGRMARYLANKCSIASRIDCYSDMSSSIFGEKLREQVEERLDFYISXDKGVAPRKNLDVMKAAIDGLTNTEDNDGKENGDTSVKKSKKKKSKAEANGDAMDVENAAPEAETGTEKKKKKHKLEEPKDEEMQANGDDETPKKKKKKNREAESVDPKTGTEGKSKKKKKKSKTDDDE

SEQ ID NO: 4163 - protein, 215 aa, Magnetospirillum magnetotacticum
GNSKGPVCTGAPRAFSVPLMRRRNLRTLTRCRGITTRLTPRGQGQRGIRISAKAPGGRRQNVMARYLLQRLCEKYEIDIEYHCKPLGDTDWNGSGMHCNFSTTFMRETGGKDYFEAMMAAFERNLEDHMAVYGPDNHMRLTGKHETAPWNKFSYGVADRGASVRVPHSFVNNGYKGYLEDRRPNSMGDPYQIASQVLKTISEVPLPSEAAQKAVA

SEQ ID NO: 4164 - protein, 173 aa, Helicobacter pylori
MNLEKLEISHDADALCVVIEISKHSNIKYELDKESGALMVDRVLYGAQNYPANYGFVPNTLGSDGDPVDALVLSDVAFQAGSVVKVRLVGVLNMEDESGMDEKLLALPIDKIDPTHYYVKDIDDLSKHTLDKIKHFFETYKDLEPNKWVKVKGFENKESAIKVLEKAIKAYQG

SEQ ID NO: 4165 - protein, 220 aa, Triticum aestivum
SLCKADIKPWLFSKKKGSKSLDADGAKVDIFWDLSAARFGAGPEPLEGFYVALLFDLELALLLGDMKKDAYRKTGANRPALNAAFVARKEHIYGKKIYSAKAQFCDNGQFHDLVIECDTVGLKDPCLEIRIDKKPVMQVKRLAWKFRGNQTILVDGLPVEVFWDVHSWLFGPTTASNAVFMFQTCQAPEKSMPWSYSQIFRESQLQGLGFSLILHAWKIE

SEQ ID NO: 4166 - protein, 775 aa, Glycine max
  unsure (1)..(775): unsure at all Xaa locations
MQQGDPTVLSLRPGGGRGGGSRLFGHSSSSLSADLPLCRPHAYFSLKTRDSRFEGHERVRYSRDQLLQLQEAVEVPDDILKIKQDIEAEIFGENPSWGRAESNLPHQLQNRYSEPDNRDWRGHSGQLPANSDERSWENLRDNREXLVIDSRMLSQXNRHDQLNSQFARTQISSXKGGGPTPTLVKAEVPWSARRGSLSEKDRVIKTVKGILNKLTPEKFDILKGQLIDSGITSADILKDVISLIFDKAVLEPTFCPMYAQLCSDLNEKLPPFPSEDPGGKEITFKRVLLNNCQEAFEGAENLREELKRMTAPEQEMERMDKERLLKLRTLGNIRLIGELLKQKMVPEKIVHHIVQELLGSPDSMFCPVEENVEAICQFFNTIGKQLDESLKSRRINDVYFSRLKELSSNLQLVPRLRFMIRDVIELRASNWVPRREEVKAKTITEIHSEAEKNLGLRPGATASMRNPRGGVQGNASSGGFPIARPGAGGLMPGMPGTRKMPGMPGFDNGNWEMPKTRSMPRGDLPGVQAAGQSNSALLSKSTTLNSKLLPQGSGGIISGRNSALVHGGGTNFGLGPEAAPQLSSPAKTATPVPVSSEKPQHPAARLNTDNLRCRTVSLLEEYFSVQLLEEALQCVEELKSPSYHPEVVKEAISLALDKSPPCVEPVANLIEYLYIKKILTPIDIGTGCLLFGSLLDDIGIDLPKAPSNFGEIIGKLILAGGLDCKLVREILKKVDDGMFQRAIFDSVVGAIRSASGQAVLDAQTSDIEACQSMLK

SEQ ID NO: 4167 - protein, 311 aa, Streptomyces exfoliatus
MPNGIVRLHRFGAALVMSGLLSALSAAPGVAAEPSSVSVAATSVVAWGGNNDWGEATVPAEAQSGVDAIAGGYFHGLALKGGKVLGWGANLNGQLTMPAATQSGVDAIAAGNYHSLALKDGEVIAWGGNEDGQTTVPAEARSGVDAIAAGAWASYALKDGKVIAWGDDSDGQTTVPAEAQSGVTALDGGVYTALAVKNGGVIAWGDNYFGQTTVPAEAQSGVDDVAGGIFHSLALKDGKVIAWGDNRYKQTTVPTEALSGVSAIASGEWYSLALKNGKVIAWGSSRTAPSSVQSGVSSIEAGPNAAYALKG

SEQ ID NO: 4168 - protein, 448 aa, Streptomyces sp.
VNANTSVAGGHTWRDLPAAQQPEYPDAEALRDVLADLESYPPLVFAGECDQLRARLGAVAKGEAFLLQGGDCAEAFDGVSAEHIRAKLKTLLQMSAVLTYAASVPVVKIGRIAGQYSKPRSKPTETRDGVTLPTYRGDSVNGFEFTEAARIPDPQRLKQMYHASASTLNLVRAFTTGGYADLRQVHAWNQDFVKSSPSGQRYEALAREIDNALNFMKACGTDPAEFKAVEFYASHEALLLDYESSLTRTDSRTGQLYDTSGHMVWVGERTRQMDGAHIEFASKIRNPIGIKLGPTTTVDEALGYIDRLDPEREPGRLTFIVRMGADKVRDKLPELVEKVTASGAKVVWVTDPMHGNTFEAASGHKTRRFDDVLDEVKGFFEVHKQLGTHPGGIHVELTGDDVTECVGGGHEIFVDDLHQRYETACDPRLNRSQSLDLAFLVAEMYRDQ

SEQ ID NO: 4169 - protein, 346 aa, Clostridium thermocellum ATCC 27405
MSMLQSVMVSPGKIEFHEVEKPELKPGQVLIKIMRIGICGSDIHVNHGKHPFTKYPVTQGHEVSGKIVEVAEDVEHLKVGQKVTIEPQVVCGKCHPCRTGKYNLCEELKVMGFQTVGAGSEYFAVDAKNVTTVPDHLSYDEAAMIEPLAVTVHAANRVGDVKDKDIVVIGAGPIGILLVQTLKAKGARKVMVTDVSDYRLELALKCGADFAVNTKKEDFGEAMLRCFGPDKADVIYDCAGNNTTMEQAIKHSRKGSIIVLVAVFEGMATVDLATLNDKELDLNTTMMYRHEDYVEAIELVEAGKVKLTPLMSKHFAFRDWEKAYEYIDNNREITMKVLIDVNNDDD

SEQ ID NO: 4170 - protein, 149 aa, Ajellomyces capsulatus
MADSLTEEQVSEYKEAFSLFDKDGDGQITTKELGTVMRSLGQNPSESELQDMINEVDADNNGTIDFPEFLTMMARKMKDTDSEEEIREAFKVFDRDNNGFISAAELRHVMTSIGEKLTDDEVDEMIREADQDGDGRIDYNEFVQLMMQK

SEQ ID NO: 4171 - protein, 329 aa, Bradyrhizobium japonicum
MTKYKLEYIWLDGYTPTPNLRGKTQIKEFASFPTLEHVPLWGFDGSSTQQAEGHSSDCVLKPVAVFPDAARTNGVLVMCEVMMPDGKTPHASNKRATILDDAGAWFGFEQEYFFYKDGRPLGFPTSGYPAPQGPYYTGVGFSNVGDVARKIVEEHLDLCLAAGINHEGINAEVAKGQWEFQIFGKGSKKAADEMWMARYLMLRLTEKYGIDIEFHCKPLGDTDWNGSGMHANFSTEYMRTVGGKEYFEALMAAFDKNLMDHIAVYGPDNDKRLTGKHETAPWNKFSYGVADRGASIRVPHSFVNNGYKGYLEDRRPNSQGDPYQIVRRS

SEQ ID NO: 4172 - protein, 177 aa, Triticum aestivum
  unsure (1)..(177): unsure at all Xaa locations
MASLDTVTGDLGLVVLYLSKAEARDKICRAIQYGSKFLXSNGQPGPAQNVDKSTSLARKVFRLFKFVNDLQALISPPAKGTPLXPLILLGKSKNAXLSTFLFLDQIVWAGRTGVYKNKERAEFLGRIAFYCFLGSNTCTTIIEAXELQRLSKSMKKLDEAPSTQQELEKNEEDGEEP

SEQ ID NO: 4173 - protein, 311 aa, Synechocystis sp. PCC 6803
MRILIMGGTRFIGIHLCRVLVAQGHEVVLFNRGNRPDPVNGVAQIHGDRRVAEQLREKLEKEEFDVIFDNNGRELSDTQPLVDLYNGRVQQFVYMSSAGVYQASSQMPHRETDAVDPQSRHKGKFETERYLAQSGIPWTAIRPTYIYGPHNYNALESWFFDRLVRGRAIPIPGNGQYITQLGHVEDLAIAMAKTIVTPAAIGQIYNISGDRYVTMNGLAQACATAAGLDPQGVKLVHYDPKDFDFGKRKAFPLRQQHFFADIQKAQDHLDWHPNYGLVEGLKNSFQLDYLPSGKGEEKGDFDLDEQILAFS

SEQ ID NO: 4174 - protein, 147 aa, Triticum aestivum
MMSSVSPPAPSLPSGGGSFFRGYTKLCKGLAVILLLVHLLVQLFPSAVNYLALIPARTIPFAWNLITAGYVEQTIPGVIISIIGLLLFGKLLEPLWGTKELSKFVFIVNFSTSMCVFVTAIAVYYVTQQESYLYTPLSGFYGVLSGL

SEQ ID NO: 4175 - protein, 235 aa, Zea mays
MASLDAVRGDLALLILYLNKAEARDKICRAIQYGSKFISNGEPGPAQNVDKSTSLARKVFRLCKFVNDLHALISPPAKGTPLPLILLGKSKNAMLSTFLFLDQIVWAGRTGIYKNKERAEFLGRIAFYCFLGSNTCTAIIELAELQRLSTSMKKLEKELKHQELYKNEQYRMKLHKSNERLLALVKSSLDIVVAVGLLQLAPKKVTPRVTGAFGFASPLIACYQLLPSPPAKQSK

SEQ ID NO: 4176 - protein, 622 aa, Neurospora crassa
MSSSRYSLRQTPRLDLGHHHVTFSTTPLSLLPGPCEAASRVKCGLLTFHDSKKELFQGMVETPVRRNTRRSKSQIPESSDGESSASATETVSKQTSAKAKNDTLRKRNLKTTGKFFEHIDEEENTMQPTPPYTSSDEPDVENAPLLSGNSSSSSRSSLDANGKPGAEKLIDGWRPGMDPKIDTSGHFEFGGSLGTGAMMIFFPILMWYMWIGATQYNGGIPSREPGQSWADFAAHLCDLVYTKAFPHAKAWLWYWTFLIFEGAFYCLMPGVTAYGKPLPHEGGKMLKYHCSAYVSFYVTFAIAGVLHFTGIFPLYQIIDEFGPLLSVAIISGFLVSIVAYVSAFVRGATHRMTGHHVYDFFMGAELNPRMFGVLDFKMFFEVRLPWYILLLLSLGAAARQWDRYGYVSGEVGFLVMAHYLYANACSKGEELIVTTWDMYYEKWGFMLIFWNLAGVPLSYCHCTIFLASHHPDEYRWNRFALVGLYVSYLFVYWVWDTCNSQKNRFRAQERGKLLYRKTFPQLPWQTVKNPQKIETETGDSILVDGWYGLARKVHYTCDAYFAICWGLITGFSSPFPWFYPVFFCCMIAHRAWRDITRCREKYGDAWKEYERRVPYLFIPYVI

SEQ ID NO: 4177 - protein, 379 aa, Neurospora crassa
MSRYLRPAVRLAATASRVQVARPAAPSFFKPASVAAFQKRTYADAPAGTKDYTVRDALNEALAEELEANDKVFVMGEEVAQYNGAYKVTKGLLDRFGDRRVIDTPITEMGFTGLAVGAALSGLHPVCEFMTFNFAMQSIDHIVNSAAKTLYMSGGIQPCNITFRGPNGFAAGVAAQHSQDYSAWYGSVPGLKVVSPWSAEDAKGLLKAAIRDPNPVIVLENELMYGQVFPMSEAAQKDDFVIPFGKAKIERAGSDLTIVTMSRCVGQSIVAAEALKKKYGVEVEVLNLRSIKPLDLDAILKSIKKTHRLMTVESGFPSYGVGAEIVALAVEYGFDFLDAPPQRVTGADVPTPYAQGLEEMAFPTESLIENHAAKLLKLI

SEQ ID NO: 4178 - protein, 449 aa, Archaeoglobus fulgidus DSM 4304
MAGEIREITQTFERISAHSHIRGLGLDENLRAKDVADGLVGQKRAREAAGVIVRLIKSGKMAGRGILMAGPPGTGKTAIAVAISKELGKDIPFVQVSASEFYSAEMKKTEALIQAMRKAIGVRIRETRTVLEGEVVGLDYNMVPNPYNPTQKIPESATLTLATKDEKRTFSVGGRLAMQFFTQGIEVGDVIVIDKETGRIGKLGRSEKAKKKYDLGDDEVVPVPSGKVEKEKEFTYVVTLHDLDEANARRTSIFSLFSPPSREIDNEVREAVDEQVKRLVEEGRAELVPGVLFIDETHLMDIELFAFMNRAMESEMAPIIILASNRGFSRIRGTDIVAPHGIPLDLLDRLLIITTEPYSREEIKTIIEIRAAESGIMLSNEAMEKLTDIGEKTSLRYAVQLLAPAYEFAKMRNSGKVELEDVERAASIFADVSQSSAYLKKWEEKMLGM

SEQ ID NO: 4179 - protein, 72 aa, Zea mays
MTESLVRNKPGMASIKEMPVLQDGPPPGGFAPVRYARRIPTSGPSATAILLTAFGAFAYGMYQVGQGNKVRR

SEQ ID NO: 4180 - protein, 444 aa, Asparagus falcatus
  unsure (1)..(444): unsure at all Xaa locations
DLEPVNPADVPVTAAGALKSYKLAAKAISRLQSLPSGNISLLCDVLVREISDLTGYDRXMAYKFHDDEHGEVIAECRRSDLEPYIGLHYPATDIPQASRFLFMKSKVRMICDCSAHPVKIIQDKKLAQPLSLCGSTLRAPHGCHAQYMSNMGSVASLVMSVTINEDDDESGSDQKGRKLWGLVVCHHTNPRFVPLPLRYACEFLLQVFGIQLNKEVELAAQAREKHILRTQTVLCDMLLRDAPIGIFTQTPNVMDIVKCDGAALYYKNQIWVLGTTPAEPQIRDISAWLLECHDGSTGLSTDSLMEAGYPGALALGDAVCGMAAIKITDKDFIFWFRSHTAKEIKWGGAKHEPANRDDEGRKLQPRSSFKAFLEVVKWRSLPWEDIEMDSVHSLQLILRESLHNEIAVGESKTLVNSTLDDMKRIQGMDELRAVTNEMVRLIET

SEQ ID NO: 4181 - protein, 1609 aa, Neurospora crassa
MDAQNAVEPASTKPAIRAASPKRQGSDSDQPRSSTVIRTSSTSTVQSTTARFDPIFRNDKNDRDNKHRINNNASKAASNIEDHDDSLTAEGNSDAETIVLPGKDGHHSPVKVRKPIIKQNDNRSDDDDVVSSHRKHANHNSSRQQQQQQQQQQDRESDRGDRSEKPDRSVAVAGNGPNGSNEGSVGSSSLGALGAKKRKLPDKAKAKDGSSGLSSAPESPPQRRRRSSNGHSKSDSEPAPVDSLSKLPAQSTQQDKPVPPKSLDNNKVVPNKRKHPKAESDDEAEPPKVRRQRTSGSGLDASRRPHPPPPNKSSSHHEPHASTRTRSVSPHARAHRRSISTQLPGHTAHGLSLKKRRVPVPLHSADYFSDESSERGSPHPRSSKLRSLATPAAAEFTHSPAGRMAPHKKHLDAHGQTFLARACAKGEYNVAKQRLQERPEDIDVADYAGNTPLQIAAINGFDDIVKLLVEAGCNLDCLNNEKDTPLIDAVENGHYEVVKILLDAGVNPRKANAYGEEPIDRVNEDHDNADDIKRAINEAKQRMGERRPTSEDHHLDHATDTRSSHGPDSPRQSPASASINPSSGRRAGTVRATKTSNHLLYMPMDDKTLRAAAAKGDEETVLRILQVRDQFDDPESMVAAARGGHDLVMQLLLAIGGANPDPQPISTNEYSTPILAAIGQENIKVIRLLLDQANFDPTKKYKGETYYEIARKRRGPNWMQEEHMLKEAFDEYKKKPSSNAKSQRLSNSRETDREPRRTRTEIKEDASKSHRRKASSPAKEAKKTGPSKVPASPREKRRSDSVATHQEDQTSPKRGPGRPKKDDKIPTIAISDREASPAGRVTTKAKRADHDVAAASSEGETPKPRRKLISGRELKGEREKQRRASVTSNGSSFRDQPSSPRDECEKPQMMEKYHDRTKAIRRDESRDRSSVSGESSGKRHRASATPPHPGSTEKDPSEIPSKKRRLDVEGKDRRLKPNSAEDRHLKPSVSRESSLAAPPDGRVRSRSRDDEDRRSTSKPRKSESTSEHVRFDSGKPTIPEPSIHVKSEDGEVEMGDADHAAQEESTRQMLEKRKLQEIRKKQAEMESEARELKRKEEERKRKDEERERKRFEDESRRAAQEERQRLEELRKQRQAEEDRKRREEEEERKQREEEEAREREREREKERERKRREEEEEQKKKEAAERKRREQEEEERKRLEHEEKVRRERLEREAADEARRKREEERRKREEEERQEKERREKAMREEAERKRVAAQEAEERRIRHEQEVIRIANLPPALRWLEGAANPRIPQIAEKFSIMQGVRYDCIDPEATGTPEGREQWLLNTQIALLLGEKDLRLSKYNSWTRIPASKIAKRVLWQLESDRYALTSPNLYDLGKELPGYYGTDDTDSIVYRVTQKLRSAAWEKFAALEMFFVKASDFLRIIPTMPHLRDIRLVMAYRELPENETYFRDFRPLEKWKKDPDAGRNHGFAPGSKYFVNGQFIWEERPKVGMVSKMPFEEERVPRRGLAPVRPDDPEYAELCRKQGLGHLLGEAQGSHVLPNGHRSASPISTTSSSNRVNGITSPRARTVNGHAHGHHPISPSSETGPAQARPLLNGHHEMLSGDEED

SEQ ID NO: 4182 - protein, 162 aa, Oryza sativa
ARGPHQLRPSSYPINPELFLIVEQAKPDEEKLHRRLIFDLANELLAQQMDANHTVNSSVQFFQSKKLSGWQLFKDLCAEIDMIQSRSSMIRCSEEEDSRLAEDAMQGMKEWKSSDSERQGIVLAIEKSIFKDLIDEIISGVDKGKVHLTQWKLRRQLSFISI

SEQ ID NO: 4183 - protein, 208 aa, Triticum aestivum
  unsure (1)..(208): unsure at all Xaa locations
MPAPAALALAASLLLAAASICAEAVWLDMPQTGTKCVSEEIQANVVVLADYALMYESHPSAHPTIAVKVTSPYGYTLHESGNVTVGQFAFTTSEAGNFLACFWIDSAEKGSGVSVNLDWKTGIATKDWDAIAKKEKIEGVELELRKLEVAVQSIHQNMVYLKAREADERXARKQTAGWFSIMSLGVCVVVSVLQLWHLQGYFRKKKLI

SEQ ID NO: 4184 - protein, 427 aa, Bacillus anthracis str. A2012
MLVAATLSLPFAVYATPILAATAATENMAVQSPKKHVFDAVIKAYKDNSDEESYATVYIKDPKLTIENGKRIITATLKDSDFFDYLKVEDSKEPGVFHDVKVLSEDKRKHGTKVIQFEVGELGKRYNMQMHILIPTLGYDKEFKIQFEVNMRTFVESDIEEDEEEQIEDTQNIIRDKRLQQAINKNVLNRKDVNEPIFEEDLKEIKELNIYAGQGIESLKGLEYMENLERITIQGSDVRNIAPISQLKRLKVVDLSFNKIENVEPLVNLEKLDILELQNNRIADVTPLSQLKKVRTINLSGNKISDIKPLYNVSSLRKLYVSNNKITDFTGIEQLNKLGTLGVGSNGLVNIEPISQMSGIVELNLEKNDIKDITSLSKLTGLQSLNLEENYVSDVSSLSNLINLYELKLATNEIRDIRPIQELGKRI

SEQ ID NO: 4185 - protein, 276 aa, Bradyrhizobium japonicum
WGFDGSSTQQAEGHSSDCVLKPVAVFPDAARTNGVLVMCEVMMPDGKTPHASNKRATILDDAGAWFGFEQEYFFYKDGRPLGFPSSGYPAPQGPYYTGVGFSNVGDVARKIVEEHLDLCLAAGINHEGINAEVAKGQWEFQIFGKGSKKAADEMWMARYLMLRLTEKYGIDIEFHCKPLGDTDWNGSGMHANFSTEYMRTVGGKEYFEALMAAFDKNLMDHIAVYGPDNDKRLTGKHETAPWNKFSYGVADRGASIRVPHSFVNNGYKGYLEDRRP

SEQ ID NO: 4186 - protein, 380 aa, Hirschfeldia incana
SSNKTLVSPGDVFELGFFKTTTRSSQDGSTDRWYLGIWYKTTSDHRTYVWIANRDNPLHNSIGTLKISHSSNLVLLDQSDTPVWSTNLTGVVKSPATAELLANGNFVLRGSYTIDLTHFMWQSFDFPVDTLLPEMKLGRNLIGPEHEKILTSWKSPTDPSSGDYSLILETEGFLHEFYLFKNEFKVYRTGPWNGVRFNGIPKKMQNWSYIVNNFIDNKEEVAYSFQVNNNHNIHSRFRMSSTGYLQVITWTKTVPQRNMFWSFPEDACDLYQVCGPYAYCDMHTTPMCNCIKGFVPKNAGRWDLRDMSGGCVRSSPLTCGEGDGFMVLGQMKMPETSEAFVEEMIGLEECSQKCVRDCNCTGFAIMDNMNGGSGCVMWTG

SEQ ID NO: 4187 - protein, 363 aa, Salmonella enterica subsp. enterica serovar Typhi
MSKNYHIAVLPGDGIGPEVMAQALKVMDAVRSRFDMRITTSRYDVGGIAIDNHGHPLPKATVEGCEQADAILFGSVGGPKWENLPPESQPERGALLPLRKHFKLFSNLRPAKLYQGLEAFCPLRADIAANGFDILCVRELTGGIYFGQPKGREGSGQYEKAFDTEVYHRFEIERIARIAFESARKRRRKVTSIDKANVLQSSILWREIVNDVAKAYPDVELAHMYIDNATMQLIKDPSQFDVLLCSNLFGDILSDECAMITGSMGMLPSASLNEQEFGLYEPAGGSAPDIAGKNIANPIAQILSLALLLRYSLDADEAATAIEQAINRALEEGVRTSDLARGAAAVSTDEMGDIIARYVAEGV

SEQ ID NO: 4188 - protein, 305 aa, Miscanthus sinensis var. sinensis
IESVGEGVTDVAPGDHVLPVFTGECKECPHCRSAESNMCDLLRINTDRGVMIGDGKSRFSINGKPIYHFVGTSTFSEYTVMHVGCVAKINPQAPLDKVCVLSCGISTGLGASINVAKPPKGSTVAIFGLGAVGLAAAEGARIAGASRILGVDLNPSRFEEARKFGCTEFLNPKDHKKPVQEVLAEMTNGGVDRSVECTGNINAMIQAFECVHDGWGVAVLVGVPHKDAEFKTHPMNFLNERTLKGTFFGNFKPRTDLPNVVELYMKKELEVEKFITHSIPFAEINKAFDLMAKGEGIRCIIRMEN

SEQ ID NO: 4189 - protein, 160 aa, Zea mays
  unsure (1)..(160): unsure at all Xaa locations
MTESLVRNKPGMASIKEMPVVQDGPPPGGFAPVRFARRIPXRGPAATAIFLTTFGAFAYGMYQVGQGNKVRRALKEEKIAARSAILPMLQAEEDERFVKEWKKCLEEEARIMKDVPGWKVGESVYNSGKWMPPATGELRPEGLVRGLLQALNAIMSRGHG

SEQ ID NO: 4190 - protein, 99 aa, Triticum aestivum
  unsure (1)..(99): unsure at all Xaa locations
IRKFSFSKQKSEGFRVLERAGRREQPWDASPELQQFLEQEKQKMVMSEMVTKLTNVCWDKCITSTPGSKVSSXETTCLTNXAQRDLDLSMIIGXKVXMQ

SEQ ID NO: 4191 - protein, 250 aa, Oryza sativa; identical to SEQ ID NO: 2069

SEQ ID NO: 4192 - protein, 364 aa, Zea mays
  unsure (1)..(364): unsure at all Xaa locations
MAGTVTVPGSSTPSTPLLKDELDIVIPTIRNLDFLEMWRPFFQPYHLIIVQDGDPTKTIKVPEGFDYELYNRSDINRILGPKASCISFKDSACRCFGYMVSKKKYIYTIDDDCFVAKDPSGKDINALEQHIKNLLSPSTPFFFNTLYDPYREGADFVRGYPFSLREGAHTAVSHGLWLNIPDYDAPTQLVKPKERNERYVDAVMTIPKGTLFPMCGMNLAFDRDLIGPAMYFGLMGDGQPIGRYDDMWXGWCVKVICDHLSLGVKTGLPYIWHSKASNPFVNLKKEYKGIFWQEDIIPFFQNVTIPKDCDTVQKCYIYLSGQVKEKLGKIDPYFAKLGDAMVTWIEAWDELNPAGPAAGKDKAK

SEQ ID NO: 4193 - protein, 342 aa, Solanum tuberosum
MTRRCSHCSTNGHNSRTCPNRGVKLFGVRLTDGLIRKSASMGNLTHFASGSGGGSTPLNGVVHDSPGDTPDHPAVGGGSADGYASEDFVAGSSSSRERKKGVPWTEEEHRMFLLGLGKLGKGDWRGIARNYVISRTPTQVASHAQKYFIRQSNMSRRKRRSSLFDIVADESGDTPMVSRDFLADDPAQAEMQSNNLLPPTPAVDEECESMGSAASANSIDGEHALPIPESSQYQHPLVYPAYVAPFYPMPYPCWPGYTAEPAIAETHEVLKPIAVHSKSPINVDELVGMSKLSLGESIGDAAKPPSLSLKLVEGSSRQSAFHANPSSGSSGMNSSHNPIHAV

SEQ ID NO: 4194 - protein, 250 aa, Brassica napus
MNSVSTFSELLGSENESPVGGDYCPMLAASCPKKPAGRKKFRETRHPIYRGVRLRKSGKWVCEVREPNKKSRIWLGTFKTAEIAARAHDVAALALRGRGACLNFADSAWRLRIPETTCAKDIQKAAAEAALAFEAEKSDTTTNDHGMNMASQAEVNDTTDHGLDMEETMVEAVFTEEQRDGFYMAEETTVEGVVPEEQMSKGFYMDEEWMFGMPTLLADMAAGMLLPPPSVQWGHNDDFEGDVDMNLWNY

SEQ ID NO: 4195 - protein, 543 aa, Ralstonia solanacearum
MEKHVQRNLGAWPLMLTGLGSIIGSGWLFGAGHAAKVAGPAAIFTWVIGAVVILAIALTYAELGAMFPESGGMVRYARYSHGSLVGFVAAWANWIAIVTVIPIEAEASIQYMSSWPWPWAQGLFQHGELTPLGLALSAVLVIIYFLLNYWGVKVFAKANTTITVFKFVIPGLTAVALIGAGFHPSNFGGTDAASFAPYGWSSVLTAIATCGIVFSFNGFQSPINLAGEARNPGRNVPLAVIGSIVLAAIIYVALQIAFLGAVPAESLVKGWHGIDFHSPFAQLAIALNLNWLAIVLYLDAFVSPSGTGSTYMATTTRMIYAMERNNTMPAMFGRVHPIFGVSRSAMWFNLAVSFIFLFFFRGWGALAAVISVATVISYLTGPTSVMSLRKSSPGLHRPLRLPGLSLIAPFAFVCASLILYWAKWPLTGEIIVLMLVALPVYFYYQAKAGWPDFKRELKGAWWMIGYLPAIAALSYFGSTEFGGLGLLPYGWDMVIVSAVSLFFYYWGVASGWHTRYLDEVEYVHEDAVAPAGERVPGGVPQGV

SEQ ID NO: 4196 - protein, 369 aa, Caulobacter crescentus CB15
MKTRAAVAFEAKKPLEIVEVDLEGPKAGEVMVEIKATGVCHTDAYTLDGFDSEGIFPSILGHEGAGVVVEVGAGVTSVAVGDHVIPLYTPECRQCKSCLSGKTNLCTAIRATQGKGLMPDGTSRFSYKGQPIYHYMGCSTFSNYTVLPEIAVAKIRRDAPFKTACYCGCGVTTGVGAVTNTAKVEPGANAIVFGLGGIGLNVIQGLKLVGANMIVGVDINPDREEWGRKFGMTHFVNPKDVQGDLVAHLVALTDGGADYTFDATGNTGVMRTALEACHRGWGESIIIGVAEAGKEISTRPFQLVTGRVWKGTAFGGARGRTDTPKIVDWYMDGKIQIDPMITHVLPLEEINKAFDLMHAGESIRTVVTF

SEQ ID NO: 4197 - protein, 391 aa, Xanthorhiza simplicissima
DLEPVNPADVPVTAAGAMKSYKLAAKAISRLQSLPSGNITVLCDVLVQEVSDLTGYDRVMVYKFHEDDHGEVVAECRVPELEPYLGLHYPATDIPQASRFLFMKNKVRMICDCSAAPVKVIQDNKLAQPLSLGGSALRAPHGCHALYMANMGSVASLVMSVTINEDDDQMETDQQKGRKLWGLLVCHHTRPRFVPYPLRYACEFLIQVFGMQINKEVELATQFREKHILQTQTVLCDMLLRDAPIGIVTQSPNIMDLVKCNGGALYYRSRFWLLGVTPTEAQIKDIAEWLLQYHNASTGLSTDSLMEAGFPGASVLGNEVCGMAAIKITTKDFLFWFRSHTAKEVKWGGAKHNPTEKDDGWKMHPRSSFKAFLEVVKHRSLPWEDVEMDAI

SEQ ID NO: 4198 - protein, 512 aa, Ocimum basilicum
MAALLLLLLLPLLLPAIFLLHHLYYRLRFRLPPGPRPLPIVGNLYDVKPVRFRCFADWAQSYGPIISVWFGSTLNVIVSNTELAKEVLKEKDQQLADRHRSRSAAKFSRDGQDLIWADYGPHYVKVRKVCTLELFSPKRLEALRPIREDEVTAMVESIYHDCTAPDNAGKSLLVKKYLGAVAFNNITRLAFGKRFVNSEGIIDKQGLEFKAIVSNGLKLGASLAMAEHIPSLRWMFPLDEDAFAKHGARRDQLTREIMEEHTRAREESGGAKQHFFDALLTLKDKYDLSEDTIIGLLWDMITAGMDTTAISVEWAMAELIKNPRVQQKAQEELDRVIGYERVMTELDFSNLPYLQCVAKEALRLHPPTPLMLPHRSNSNVKIGGYDIPKGSNVHVNVWAVARDPAVWKNPCEFRPERFLEEDVDMKGHDFRLLPFGAGRRVCPGAQLGINLVTSMIGHLLHHFNWAPPSGVSSDELDMGENPGLVTYMRTPLEAVPTPRLPSDLYKRIAVDL

SEQ ID NO: 4199 - protein, 359 aa, Fragaria x ananassa
MSIEQEHPNKASGWAARDSSGVLSPFNFSRRETGEKDVMFKVLYCGICHSDHHMVKNEWGFSTYPLVPGHEIVGEVTEVGSKVQKFKVGDRVGVGCIVGSCRSCENCTDHLENYCPKQILTYGANYYDGTTTYGGCSDIMVAHEHFVVRIPDNLPLDGAAPLLCAGITTYSPLRYFGLDKPGMHVGVVGLGGLGHVAVKFAKAMGVKVTVISTSPKKEEEALKHLGADSFLVSRDQDHMQAAIGTMDGIIDTVSAQHPLLPLIGLLKSHGKLVMVGAPEKPLELPVFPLLMGRKMVAGSGIGGMMETQEMIDFAAKHNITADIEVIPIDYLNTAMERLVKADVRYRFVIDIGNTLKASS

SEQ ID NO: 4200 - protein, 389 aa, Glycine max; identical to SEQ ID NO: 3646

SEQ ID NO: 4201 - protein, 366 aa, Ipomoea batatas
MAPRLSLLFLCTLLATTSLVFAEDDGDDILIRQVVGDGDGDLLNADHHFAVFKRRFGKAYASDEEHDYRLSVFKANMRRAKRHQQLDPAAVHGVTQFSDLTPTEFRRKFLGLNRRLKFPADAKTAPILPTDELPSDFDWRDRGAVTPVKNQGTCGSCWSFSTTGALEGANFLATGKLVSLSEQQLVDCDHECDPEEAGSCDSGCNGGLMNSAFEYTLKAGGLMREEDYPYTGNDLQVCRFDKTKIAAKVANFSVVSLDEDQIAANLVKNGPLAVAINAVFMQTYIGGVSCPYICSKRLDHGVLLVGYGSAGYAPIRMKEKPYWIIKNSWGESWGENGYYKICRGRNVCGVDSMVSTVAAVSTTTSD

SEQ ID NO: 4202 - protein, 411 aa, Microbulbifer degradans 2-40
MSIFEQRESTIRAYSRVYPVVFKTAINALQTDTTGKTYIDFFAGAGLLNFGHNNPKMKKAMIEYMQKDGVLHSLDMETEAKAAFMQHFTDLILKPRNMPHRMQFTGPTGTNAIEAAMKLARRVTGRSTIVAFNNGFHGMTLGALAATANPYFRGAAGVPLEHVTHAEFNTSNGDISALEAKYCASSANAPAAFMLETIQAEGGVNVANKEWILAVAKLAKKLGALLIVDDIQVGCGRTGSYFSFDDIDIAPDIICLAKGLGGMGTPMAMNLVLPELDDQWSPGEHTGTFRGQNLSFIAGKVALEYFANNQLMSDVKLKTTLMQEALEPLLHSDSTLTLRGKGMIMGLDIGNSERAAAIVQECFKNGLIVASCGVGGQVIKLIPPLTIANAHLTEGLNILIQATRNTMEEAA

SEQ ID NO: 4203 - protein, 397 aa, Glycine max
  unsure (1)..(397): unsure at all Xaa locations
MSSYFPSFGTKIPRMGKGYDDVLFTVINQLVKPGSWSNYKVPCNLSKQHIGFVSKFDQICSSPVMMEDEHKKLDSLPEFGLSEPEKYSKELEVAVRAVQMACSLCQRVQDTLISNARTNHRQVQSKDDNSPVTVADWSVQAIVSWMLSECLGSQNVSIVAEEDAQTLSEANASELLEAVVETVNQCLAEAPRFGVQEPKSPLGTSDVLEIISRCNSXPASSQTWNESCVIYAKRGSGKAWIQPLLHVNDKFVWPNHAKQVSVSSIDNLEMATFCQPVEKANLSHSFAEGLAHSVGFSNQPLRVYNTMKYTAIACGDAEVFIKFARAGYKEKIWDHAAGAIIIQETGGMVTDAKGHPLDFSKGLYFERLDRGIVACAGATLHEKIIDAVDASWASSCL

SEQ ID NO: 4204 - protein, 357 aa, Ralstonia metallidurans
MRAFFSDDQLLHQPRQFMRAGRLCEPTDVPARAAVLQRALDARGIELVAPPDYGRAPLETVHSPAYLDFLTSAFERWMAQATPTLEPGIEVLPNLSPYHSGKIDKTRRGPCPSGSVIAEAGYYLGDLSCPLGPHSWQSILRSAHSAVAAARHVCAPHDGNGMAYALCRPSGHHAHADRAGGFCYVNNSAIAAQTLLERFDKVAVLDVDAHHGDGTQQIFYQRSDVMTISLHADPSSYYPFYTGYATERGHGAGYGYNLNFPLPHGTGDAGFLSALDSALDALRDYRPQALVLALGFDTYKHDPISVLQVGLEAYRGVGERIHALGVPTVVVQEGGYEVDAIGIALEAFLAGFVPAMA

SEQ ID NO: 4205 - protein, 318 aa, Zea mays
MGTLVGHVAPGAGFLLIGLWQLFSHTRLFLLRPSSYSAPVWFPVPGVRHLELILIIIGTVLSILMELVIGPAKHQPFDDDGTIPSDHLHNFEHASISLALLVFAAVTIHLDRARAPMRDAVSQLVAAAAFAQQLLIFHLHSADHMGVEGQFHWLLQTAIAVTLATTLLGIPYPRSFAVSLVRSASLVFQGVWFVVMGVMLWTPALIPKGCFLNFEEGHDVVRCRTDDALDRAKSLVNLQFSWYLTGTVVFVVLFYLQMAKLYPEEPQYLPLVKGGGSGSDGRFSIGDDDHDDEDDVEAAKRGGFGHVVSGTRPVEIER

SEQ ID NO: 4206 - protein, 168 aa, Rhodospirillum rubrum
MSPLYDIEVTTLDGAPQTLADYAGKVLLIVNVASKCGFTPQYKGLEALQRRYRDRGFCVLGFPCNQFGHQEPGDAGEIKSFCTLTYDVSFPMFAKIDVNGPDAHPLYRLLKAEAKGLLGSEAIKWNFTKFLVSADGETISRFAPTDTPESLRARIEALLPAAQGPLGA

SEQ ID NO: 4207 - protein, 261 aa, Cucumis sativus
MAISKTLSFGFLLLVSLGLASAARSLLSYDIPPHRSGYDNYDHPVVNPKVGYEHDRRDGYYHDRDHHDAPYGGGAGGGYGAGAGAGSSLGGSGYGSGGGGGSGYGGVGNHEVGYGSGGGGGYGAGVGSDLGGSGYGSGGGGGTGGGYGDLGGRGKGYGSGGGGGSGYGGRGDHGVGYGSGGGGGYGSGVGGGAGVVDHGVGYGSGGGGGAGSGYGGSKGYGGGSGGGGGAGYGGGAHGSGYGSGGGAGSGEEGGYDGGYAP

SEQ ID NO: 4208 - protein, 146 aa, Glycine max
RKEQLEKAQTADPLWNASQLEMVHYGKMHGFMRMYWAKKILEWTRGPEEALEISLYLNDKYELDGRDPNGYVGCMWSICGVHDQGWKERPIFGKIRYMNYAGCKRKFDVDKYIAYVNKLVRELKKRKAENLLSQKEKVVRSCDPED

SEQ ID NO: 4209 - protein, 550 aa, Neurospora crassa
MAGSITKPKKPKSKRTPVRLRHKIQKASAAKQRKDRKLAKKNPEWRSKLKKDPGIPNLFPYKEKLLNQIEEDRIRRKEQEQKRREMAKAAKTGQDTKTGAEGDVEAFDDDLMDDDDAMEEDGSDVDDESNPLAALVASARKAAEQYDRELQSGDEMDDDDESDDETDGEPTQSGVIEVPGGASSRKAFDKVFKQVVEQADVILYVLDARDPEGTRSRDVERAVMAAAHGGKRLILILNKVDLIPPPVLRGWLTHLRRYFPTLPLRASNPAPNAHTFQHRDITVQSTSAALFRALKSYAVSRNLKRSIQVGVIGYPNVGKSSVINALLSRLSNSRGQHNACPAGAEAGVTTSIRQVKIDSKLTLLDSPGIVFPSTAGNSTFTPKNQTEAHAHLVLLNAIPPKQIEDPVPAVTLLLKRLSATPELMDKMMKVYDLPPLLRDPNNGDPTMDFLVQVARKRGRLGRGGIPNIQAAAMTVVTDWRDGRIQGWIDAPVLAVAGTATAPAPAGGKSATADEPLADQKVIVTEWAKEFKLDGLWGDEEETATPDVEMQ

SEQ ID NO: 4210 - protein, 310 aa, Schizosaccharomyces pombe
MAQNSTQLEKISGSFTRLAEAFQLALTACREIEESLPSILGEKSEVSKPFKPAVTDPSNAKKEINMAIESPSKKATSPKKATPAAVAPVEATSAVDTSEAVASMTPNKRKARDPAQPKRPPSAYNLFQKNQRSEIKESLGEKSNDVKEVNKAMHEKWGSLSEDDRKTYEEEASKLREAYEEEMAAYNASKENASVADSRVTAEETSTKPSEDLSSPTKKDLIDFSETRPLAQASRATPDIKEQHAKKPKRKHTRSTVPTSNVEPVSQPQPSPDKIVSSPNPPSAKREKKKRRKSSMSSSITTPPTAKVAN

SEQ ID NO: 4211 - protein, 392 aa, Annona sp. SM-1999
PYEVPMTAAGALQSYKLAAKAIARLQALPSGNLQKLIDTVVEEVFELTGYDRAMAYKFHDDDHGEVISEITKPGLEPYLGLHYPATDIPQAARFLFMKNKVRMICDCNAKPVKVYQDEKLKLELTLCGSTLRAPHSCHLKYMENMGSIASLVMAVVINESDNEDDNSMVEQQQQQQPKRKRLWGLVVCHNTTPKFVPFPLRYACEVLMQVFAIHVNKELELENQIREKHLRTQTLLCDMLMRDAPLGIVTQSPNIMDLVKCDGAALLYNNKFWRLGLTPSEAHMRHIVSWLNEYHMDSTGLSTDSLHDAGYPGALALGDAVCGMAAVRITSKDILFWFRTHTAAEIRWGGAKHDPSDKDDGRRMHPRSSFKAFLEVVKSSSFPWKDYEMDAI

SEQ ID NO: 4212 - protein, 327 aa, Methylobacillus sp. 12S
MKVLVVGGAGYIGSHMVKMLLGEGHDVITFDNLSSGYRDAVVGGTFVQADLADKAALDEVFVKHTPDAVMHFASYIQVGESVRHPDKYYLNNFTNTMNLLDAMVKHGVNYFIFSSTAAVFGEPEYVPIDEAHAKNPLNPYGRSKLMVEQALGDYERAYGIKSVCLRYFNAAGADPEGQLGERHEPETHLIPLVLQAISGRRDNITVFGRDYDTPDGTCIRDYIHIVDLCSAHSLALRKLMETNISRRYNLGNGAGFSVQEVIAAAQKVTGKPIKVAEGERREGDPARLVADASLARSELGWKPVYADLDTIIQHAWQWESKTVGKPV

SEQ ID NO: 4213 - protein, 159 aa, Glycine max
ETVRTREGALAKDTTETELTKIPLLRATVETLHPSSKEEDDFMIRRFLRARDLDVEKASAMFLKYLKWRHEFVPNGSVSVSDVPIELAQDKVFMQGRDKIGRPILIVFGRRHFQNKDGLDEFKRFVVYVLDKVCASMPPGQERLVGIAELKGWGYSNSD

SEQ ID NO: 4214 - protein, 498 aa, Rhodococcus sp. Q15
MAVKDEQAGSGRSKLFRTKSIEQSIKDTDEPETKLRKELNSWDLTVFGVAVVIGAGIFTLTARTAGNVAGPSVSLAFVIAAIACGLAALCYAEFASTVPVAGSAYTFSYATFGEFVAWIIGWDLILEFALASSVVAKGWSLYLGEVMGSRSPIVELGPISFDWGAVLVIAVITILLATGTKLSSRVSLVITAIKVAVVLLVIVVGLFYIDTDNYSPYIPPSEPGSTGEGIHQSLFSYVTGAGGSTFGWYGLLAAASLVFFAFIGFDVVATTAEEAKEPQKALPRGILGSLLIVTVLYVAVTLVLTGMVKYTELEGDTSNLATAFAFHDITWAKNVISFGALAGLTTVVMVLMLGQTRVLFAMARDGLMPRRLAPTGKHGTPVRITILVGVVVAVLAGVFPIGTLEEMVNIGTLFAFVLVSIGVLVLRRTRPDLPRGFRVPLVPLVPILAVLACLWLMFNLSVETWMRFVVWMALGVVIYFAYSRQHSMIGKRERGEIE

SEQ ID NO: 4215 - protein, 173 aa, Helicobacter pylori
MNLDQLEVSHDADSLCVVIEISKHSNIKYELDKESGALMVDRVLYGAQNYPANYGFVPNTLGSDGDPVDALVLSDVAFQAGSVVKTRLVGVLNMEDESGMDEKLLALPIDKIDPTHSYVKDIDDLSKHTLDKIKHFFETYKDLEPNKWVKVKGFENKESAIKVLEKAIKAHQG

SEQ ID NO: 4216 - protein, 388 aa, Salmonella enterica subsp. arizonae
QNGKLNVPENPIIPFIEGDGIGVDVTPAMLKVVDAAVEKAYKGERKISWMEIYTGEKSTQVYGQDVWLPAETLDLIRDYRVAIKGPLTTPVGGGIRSLNVALRQELDLYVCLRPVRYYQGTPSPVKHPELTDMVIFRENSEDIYAGIEWKADSADAEKVIKFLREEMGVKKIRFPEHCGIGIKPCSEEGTKRLVRAAIEYAITNDRDSVTLVHKGNIMKFTEGAFKDWGYQLARDEFSGELIDGGPWLKIKNPNTGKEIVVKDVIADAFLQQILLRPAEYDVIACMNLNGDYISDALAAQVGGIGIAPGANIGDECALFEATHGTAPKYAGQDKVNPGSIILSAEMMLRHMQWFEAADLIVKGMEGAIAAKTVTYDFERLMDGAKLLK

SEQ ID NO: 4217 - protein, 146 aa, Glycine max
  unsure (1)..(146): unsure at all Xaa locations
MAETKTAPAAEDGSRKKTVVLVXVDDSDHSYRALEWAVRHAATAGVAAELVVVHAKPPASSVVTFGSPAAAGDVVRVVDADLRKRAEDVVDRARRLCVANSVHXLIEVMEGEARYVLCDAVDKHHADLLVVGSHGYGAIKRAFXXE

SEQ ID NO: 4218 - protein, 825 aa, Triticum monococcum
MAFSPRSPWSRSKKPDIYSTVVVHDDEDNARGGGAARAEDDDDDDPSALPPLLQRLPKDFGGASFDDDDDPYSSDLDDASLSATVVIKRGAPASTSSSSRSPFLDLRRSSPRAAEADPFSTFVVHGTARSGGASSPRESVSGTFIRHSGGPPSPRESVSGTFIRHTRGSSSPHESFSGTFIHHTSSASSPRDSASGAGAGFGSSFITPSSGQAEEDRQPSLLMQQQQSRRKASMSSLPDSVTREDPSTKYELLHELGKGSYGAVYKARDLRTQELVAVKIISLTEGEEGYEDIRGEIEMLQQCSHPNVVRYFGSYQGEEYLWIVMEYCGGGSVADLIGITEEPLDEPQIAYICRETLKGLAYLHTIFKVHRDIKGGNILLTEQGEVKLGDFGVAAQLTRTMSKRNTFIGTPHWMAPEVIQESRYDGKVDVWALGVSAIEMAEGMPPRSTVHPMRVIFMISSEPAPMLEDKEKWSLLFHDFIAKCLTKDARLRPPAIEMLKHKFIEKCNTGASKMLAKIKEAKIIRETAVQNQLPDSDDAMDATVRINEDYGETVPTNSQSTHETKNDGSGGDFGTMIVHPEDGDEAAESSIFPRAEFIPGLGSINSFTHDPKRAELISKFWAESTAESDASKERDLYGLPDIQEPKTMPRSTGTVKHHKGVEGTVLRHDITASPGVASTMNKLSSSPSRKAFSVQDKLWSIYAAGNTVPIPFLKAIDISPLALVSDSVAGNGPAGSSTTDALEAVRELFSGDGQAKKGRKGQNEAPLPPGVHDRLTTSPTLMNLAQALAYHKTCYEDMPLQDSQATEEQQTIQNLCDTLRTILRL

SEQ ID NO: 4219 - protein, 1403 aa, Schizosaccharomyces pombe
MSSKPPSNTPKFSYARALASSQSNKSNSTKASENNTATAEKQAVKPSGVEPTNTSRANAQKKTESTGKITSEADTEKYNSSKSPVNKEGSVEKKSSEKSSTNNKPWRGDNTSKPSANSSAERTSSQHQKPETSSQIGKDNAAPVENVNEKSTSQETAPPVSTVPIQFGSITRNAAIPSKPKVSGNMQNKSGVSSYSSKSQSVNSSVTSNPPHTEEPVAAKPEASSTATKGPRPTTSASNTNTSPANGAPTNKPSTDINTTDPATQTTQVSASNSPALSGSSTPSNTSSRSNRQNHGNFSEKRHYDRYGNSHPSYNKYSHYQHGFNYNNSGNNRNESGHPRFRNSRRNYNNQGAYPTYMSNGRSANQSPRNNPQNVNNGSTPIQIPVSLQTPYGQVYGQPQYIVDPNMVQYGPILQPGYVPQYYPVYHQTPYTQNFPNMSRSGSQVSDQVVESPNSSTLSPRNGFAPIVKQQKKSSALKIVNPVTHTEVVVPQKNASSPNPSETNSRAETPTAAPPQISEEEASQRKDAIKLAIQQRIQEKAEAEAKRKAEEKARLEAEENAKREAEEQAKREAEEKAKREAEEKAKREAEEKAKREAEENAKREAEEKAKREAEEKAKREAEEKAKREAEEKAKREAEEKAKREAEEKAKREAEEKAKREAEENAKREAEEKAKREAEENAKREAEEKVKRETEENAKRKAEEEGKREADKNPEIKSSAPLASSEANVDTSKQTNATEPEVVDKTKVEKLKASEGKSTSSLSSPSHSTSSKRDLLSGLESLSLKTNPKSEQCLESLLNSQFITDFSALVYPSTIKPPSTEEALKAGKYEYDVPFLLQFQSVYTDKPMKGWDERMKETVASAFSDKSSRGMYSSSRQSSRSGSNTHSHAGPGFGGPSERKGISRLGIDRGFSSSGAGFGSGSNYKSAPSRGVSHHGHGGMSGSHRGSQRGSRRGGGERDKPDPSSLTIPVDQVAPLQLSANRWQPKKLTEKPAETKGEDEEALLPPEVVQRKVKGSLNKMTLEKFDKISDQILEIAMQSRKENDGRTLKQVIQLTFEKATDEPNFSNMYARFARKMMDSIDDSIRDEGVLDKNNQPVRGGLLFRKYLLSRCQEDFERGWKANLPSGKAGEAEIMSDEYYVAAAIKRRGLGLVRFIGELFKLSMLSEKIMHECIKRLLGNVTDPEEEEIESLCRLLMTVGVNIDATEKGHAAMDVYVLRMETITKIPNLPSRIKFMLMDVMDSRKNGWAVKNEVEKGPKTIAEIHEEAERKKALAESQRPSSGRMHGRDMNRGDSRMGGRGSNPPFSSSDWSNNKDGYARLGQGIRGLKSGTQGSHGPTSLSSMLKGGSVSRTPSRQNSALRREQSVRAPPSNVAVTSANSFELLEEHDHDNDGGQKDSNSKTSS

SEQ ID NO: 4220 - protein, 207 aa, Sulfolobus tokodaii
METNNKLKILKTGTTTVGIKVKDGVVLAADRRASAGMYVAHKYVRKVLYVAPNIGITTAGSVADLQFIYDLLKNIYHYNLITGMRPITIKALATYLANMLSFSKYLPYIVQILIGGVDEQPRLYNLDYVGDITEEDYTATGSGSVEAIGVIEDEYRPDMTLDEAADLARRAIFSSIKRDPYTGTGVIVSKITKNGHEEKEYYPQRKI

SEQ ID NO: 4221 - protein, 462 aa, Escherichia coli
MTANSPLQRIGQEKGIAMGSQELQRKLGFWAVLAIAVGTTVGSGIFVSVGEVAKAAGTAWLTVLAFVIGGLIVIPQMCVYAELSTAYPENGADYVYLKNAGSRPLAFLSGWASFWANDAPSLSIMALAIVSNLGFLTPIDPLLGKFIAAGLIIAFMLLHLRSVEGGAAFQTLITIAKIIPFTIVIGLGIFWFKAENFAAPTTTAIGATGSFMALLAGISATSWSYTGMASICYMTGEIKNPGKTMPRALIGSCLLVLVLYTLLALVISGLMPFDKLANSETPISDALTWIPALGSTAGIFVAITAMIVILGSLSSCVMYQPRLEYAMAKDNLFFKCFGHVHPKYNTPDVSIILQGALGIFFIFVSDLTSLLGYFTLVMCFKNTLTFGSIIWCRKRDDYKPLWRTPAFGLMTTLAIASSLILVASTFVWAPIPGLICAVIVIATGLPAYAFWAKRSRQLNALS

SEQ ID NO: 4222 - protein, 262 aa, Prochlorococcus marinus str. MIT 9313
MGPYDPARTNHAMTSPRPLTGQTALITGASRGIGRAVALALAEAGAEVVVNYSSSADAAEEVVQAITSNGGSAYAIKANVAEEDAVDQLIKTVLERSSRLDILINNAGITRDGLLMRMKTEDWQAVVNLNLTGVFLCTRAVARTMLKQKSGRIINITSVVGLMGNAGQANYAAAKAGVVGLTKSTAKEVASRGITVNAVAPGFITTDMTKELDSEPILAAIPLGSFGTPEQVAGAVRFLVADPAAAYITGQVLQVDGGMLMG

SEQ ID NO: 4223 - protein, 529 aa, Thermoplasma volcanium
MNGDYQLTIDKMLESGVSSNPNQIINYSGKKTFTYKEFRERVYRLAKALISIGVKKGDTVAVIDWDTYVYLEAYFAVPMIGAVLHTVNVRYPQDLIYYTMDHAEDKYVIVRDEFVPILSKNKEAFYFIKGWIIYSEYGNVPDELSPKYIYDELMSKNYDIELPEISENDLATTFYTSGTTGIPKGVQFTHRQIVLHAISSGLALSDRPISLTADDVIMPLVPMFHVHAWGVPYMTIMSGRQYVLPGRYDFDHIIDLIAQENITVIAMVPSILYMIVTNPNVGKIAGRKIRAIIGGGALPEGLQKAAEKLGIMAISGYGLSETAPILTLATYNSDVKKLPLEEQKKYHLKTGIPIPLVQLRVIDDKWNDVPRDEKTIGEIVVRAPWLTSVYVKNKEGTEALWKGGWMHTGDLAVMDKFGYIKIVDREKDAVKSGGEFIPSLILEDAISACPGVVENAVVGKPHEKWGERPVAFYTGTAKPEEIRKCLEDIVRQGRIAKFWIPDDFINVKEFVKTSTGKIDKKVLREMLKK

SEQ ID NO: 4224 - protein, 305 aa, Thermoplasma acidophilum
MEMVDEAEFYKIVRKAYDAGINFFDTANIYHGRVEKNEDHIDHIGNSEKILGRSLKGYDRESLVIATKVRGPVSTFPNGEGLSRKHIMWQIRESLNRLDVDYVDLYQIHWPDQNTPHLETMRTLSHLVDMDLVRYVGESNHSATDIEDFMNISERYGLHPFVTMQEPYNIMQRGIEKDKLNVARKYGLGLLAYIPLAQGVLSGKYLRPPEPGSRSSYYPDLISFSRKNEGIIKELMELAKEKGITGSQLAIAWIIKRSEIEKIPMIPLLGVTKEKYLDENLAALDVRLNDDDMKRIDQLTSGVES

SEQ ID NO: 4225 - protein, 380 aa, Schizosaccharomyces pombe
MQQSPTAGKIINCKAAVAWQPAAPLSIENVQVFPPRVHEVRIKIVNSGVCHTDAYTLSGKDPEGLFPVILGHEGAGIVESVGPQVTTVQVGDPVIALYTPECKTCKFCKSGKTNLCGRIRTTQGKGLMPDGTSRFSCNGNTLLHFMGCSTFSEYTVVADISVVAIERLAPLDSVCLLGCGITTGYGAATITADIKEGDSVAVFGLGSVGLAVIQGAVKKRAGRIFGIDVNPEKKNWAMSFGATDFINPNDLQSPIQDVLIHETDGGLDWTFDCTGNVHVMRSALEACHKGWGQSIVIGVAAAGQEISTRPFQLVTGRVWRGCAFGGVKGRSQLPDLVKEYLDHKLEIDKYITHRRPLKEINEAFTDMHNGNCIKTVLSIP

SEQ ID NO: 4226 - protein, 288 aa, Glycine max
MAATRAITIASNSTCSLLAKKPFVGGTALSLNNLNFCRTRRSYTCRAIYNPQVVVKEEGQPETLDYRVFFVDKSGKKVSPWHDIPLRLGDDIYNFIVEIPKESSAKMEVATDESFTPIKQDTKKGKLRYYPYNIHWNYGLLPQTWEDPSFANSEVEGALGDNDPVDVVEIGERQRKIGEVLKVKPFGALAMIDEGELDWKIVAISLDDPKAPFVNDVDDVEKHFPGTLTAIRDWFRDYKIPDGKPANKFGLGNKAADKDYALKVIKETNESWNKLIKRSIPAGELSLV

SEQ ID NO: 4227 - protein, 176 aa, Zea mays
MAAEGEKKMITLKSSDGEEFEVEEAVAMESQTIRHMIEDDCADNGIPLPNVNSKILSKVIEYCNKHVHAAAAAAAASKAGSDDVGAASANSTAASGEDLMNWDADFVKVDQATLFDLILAANYLNIKGLLDLTCQTVADMIKGKTPEEIRKTFNIKNDFTPEEEEEIRRENQWAFE

SEQ ID NO: 4228 - protein, 352 aa, Saccharomyces cerevisiae
MASEKEIRRERFLNVFPKLVEELNASLLAYGMPKEACDWYAHSLNYNTPGGKLNRGLSVVDTYAILSNKTVEQLGQEEYEKVAILGWCIELLQAYFLVADDMMDKSITRRGQPCWYKVPEVGEIAINDAFMLEAAIYKLLKSHFRNEKYYIDITELFHEVTFQTELGQLMDLITAPEDKVDLSKFSLKKHSFIVTFKTAYYSFYLPVALAMYVAGITDEKDLKQARDVLIPLGEYFQIQDDYLDCFGTPEQIGKIGTDIQDNKCSWVINKALELASAEQRKTLDENYGKKDSVAEAKCKKIFNDLKIEQLYHEYEESIAKDLKAKISQVDESRGFKADVLTAFLNKVYKRSK

SEQ ID NO: 4229 - protein, 332 aa, Glycine max
  unsure (1)..(332): unsure at all Xaa locations
MSPIKLGLVAREPTGEVNVRGNPNNNNLFDGCQGESDHWSELDTDLYHWTKALRPVQWFPGHIAKAEKELKEQLKLMDVVIEVRDGRIPMSTSHPQMELWLGNRKRILVLNREDMISTADRNAWADYFTRNGTKVVFSNGQLGMGTMKLGRLAKELAADVNVKRRTKGLLPRAVQAGIVGYPNVGKSSLVNRLLKRRMCPAAPRPGVTRELRWVRFGKDLELLDSPGILPMRINDQSAAIKLAICDDIGERSYDVADVAAILVQMLTKLPTVGRDALCKRYKIDVDCRDGRIFIEKLAVXVFNGDVHQAAFRVLADFRKGKFGWTALERPPK

SEQ ID NO: 4230 - protein, 133 aa, Beta vulgaris
GEGVTDLQPGDHVLPVFTGECKECAHCKSVESNMCDLLRINTDRGVMLNDGKSRFSIKGKPIFHFVGTSTFSEYTVVHVGCLAKINPEAPLDKVCILSCGISTGFGATVNVARPKKGQTVAIFGLGAIGLAVS

SEQ ID NO: 4231 - protein, 283 aa, Zea mays
MAAAAFDAYTDKNAIFRRLKAKPENKMCFDCNAKNPTWASVTYGIFLCLDCSAVHRSLGVHITFVRSTNLDSWTPDQLKMMAFGGNNRAHAFFKQHGWTDGGKVEAKYTSRAAELYRQMLNKEVAKSAITDNALPSSPVTVSEASKPSDDFPEFKLSDAPAPPAENLNGKHEPKSPKSAPRSPKAATHPTFATSVKKPIGAKKVGGKTGGLGVRKLTTKPNESLYEQKPEEPKPAIPALTAPTAKGGPSLHSRFEYVENEPSAAVLLSYLHRITDSSCTATAL

SEQ ID NO: 4232 - protein, 200 aa, Oryza sativa (japonica cultivar-group)
MAAGKGKGKEGECDMAAAAAEAEKKGEGSTVSRGAAGERVVEDSGGGRRTIHLKSKDGKQHDVTEASARLSKTIAGMILAGGGGGGADQCIPTPDIDHDTLRVVMQYCDKHAADDADEEDLKEWDEDFVDELDQDALFDVIAAANYLDIDGLLDLTCKRVADTIKGKTPEEIRKEFNIVNDLSKEEEEEIRRENPWAFEQ

SEQ ID NO: 4233 - protein, 198 aa, Oryza nivara
GQTPVFPRIFGHEAGGIVESVGEGVTDLAPGDHVLPVFTGECKECAHCKSAESNMCDLLRINTDRGVMIGDGKSRFSINGKPIYHFVGTSTFSEYTVMHVGCVAKINPAAPLDKVCVLSCGISTGLGATINVAKPPKGSTVAIFGLGAVGLAAAEGARIAGASRIIGIDLNANRFEEARKFGCTEFVNPKDHDKPVQQ

SEQ ID NO: 4234 - protein, 435 aa, Zea mays
  unsure (1)..(435): unsure at all Xaa locations
MVAYATTSYVAAQALASSLQPQVVAAVFFTSAACTVALAVLLASLRLRPPWWCACAVCEAYVTASWTAEFDNLCDWYAHLLRRAPGRTVHVHVLGNVLTANPPTVDHMLRGRFDNYPKGAPFSAARXILADFLGRGIFNVDGDSWLFQRKLAAAELASPALRCFAAGVVASELRCRLIPLLHSAAGDEKLLDLQDVFRRFAFDCICRISFGLDPGCLELSLPMSAFADAFDTASMLSARRATAPMHVFWKLKRLLNVGXERQLRDAIGLVDTLAAEVIRQRRKLGTAASGDDLLSRFMGSIDDDRYLRDIVVSFMLAGRDTVASALTAFFLLLSDHPDVATAIRDEVSRVTXDGDGHAATSEKLKDMHYVHTELHECMRLIPPVQIDSKFAAGDDMLPDGTIVDRGTRVTYHAYAMGRMESKWGPDCAQIPPGRW

SEQ ID NO: 4235 - protein, 547 aa, Nicotiana tabacum
MPMETTTETKQSGDLIFRSKLPDIYIPKHLPLHSYCFENISEFSSRPCLINGANDQIYTYAEVELTCRKVAVGLNKLGIQQKDTIMILLPNSPEFVFAFMGASYLGAISTMANPLFTPAEVVKQAKASSAKIIITQSCFVGKVKDYASENDVKVICIDSAPEGCLHFSELTQSDEHEIPEVKIQPDDVVALPYSSGTTGLPKGVMLTHKGLVTSVAQQVDGENANLYMHSEDVLMCVLPLFHIYSLNSILLCGLRVGAAILIMQKFDIAPFLELIQKYKVSIGPFVPPIVLAIAKSPIVDSYDLSSVRTVMSGAAPLGKELEDAVRTKFPNAKLGQGYGMTEAGPVLAMCLAFAKEPFDIKSGACGTVVRNAEMKIVDPDTGCSLPRNQPGEICIRGDQIMKGYLNDPEATTRTIDKEGWLHTGDIGFIDEDDELFIVDRLKELIKYKGFQVAPAEIEALLLNHPNISDAAVVPMKDEQAGEVPVAFVVRSNGSAITEDEVKDFISKQVIFYKRVKRVFFVETVPKSPSGKILRKDLRARLAAGVPN

SEQ ID NO: 4236 - protein, 347 aa, Cytophaga hutchinsonii
MIQAKGYAAQNEKTDLAPWNFERRDVGPHDVQFDIHYCGVCHSDLHQIRNDWFKGIFPMVPGHEIVGKIVKVGAHVTKFKIGDLAGTGCLVDSCRTCDNCKDGLEQYCVNGNSGTYNSLEQDKKTPTYGGYSNTIVVHEDFVLHISDKLDLAAAAPLLCAGITTYSPLRHWKVGKGHKLAVLGLGGLGHMAVKFGVAFGAEVTVLSTSPNKEADAKKLGAHKFVVTSDAAQVNSVKGYFDFILDTVSAPHDVNMYMSLLKTNGVHICVGVPPTPYEVHAFSIIGGRKSLAGSNIGGLPETQEMLDFCAQHNITSDIERIDIKNIHASYERMLKGDVRYRFVIDMSTL

SEQ ID NO: 4237 - protein, 706 aa, Fusarium oxysporum
MAPRGFEDEELTISLSSSHVRRPQQQQQQQSQQQQQHASSDAPTPGSRPADAPLKERIKTEQRIGAYKVLRTLGEGSFGKVKLAIHNGTGQQVALKIIARKKLISRDMAGRVEREIEYLQLLRHPHIIKLYTPNEIIMVLEYAGGELFDYIVQHGRMKEPEARRFFQQMLCAVEYCHRHKIVHRDLKPENLLLDENLNVKIADFGLSNIMTDGNFLKTSCGSPNYAAPEVIGGKLYAGPEVDVWSCGVILYVLLVGRLPFDDEHIPSLFAKIAKGTYSIPQWMPAGAANLIKKMLVVNPVHRATIEDIRADPWFTTDLPAYLQLPVEEFFNTGVDPNKAIKKNDIAPNASEKVQERLHNEVTEKISKTMGYGKSDVEEALQAAEPAAIKDAYMIVRENKMMQVNHNPEALLAEPEGSSPMLSMSSARSTTSQATTTPRPYVSKVGILPSSLPAYHKDYMEREKAGSVENSPPKVLINDEPPSNRTDAEKEETARRLRPHSRSQLRMDEANTRPQGMTPINPPKKNKPVRWQFGIRSRNSPWEALLCIHKALHKLGATYIPDEDYESRTAEERAEASGEGSFADSHDNNRGSSSSIDPKKRYNLPADPWHINVRWDTSAIKKKAASVPGTPSSPSTPEGQHHPKEPFVALHMDIQIYEMEHGVYLVDFKCSGYETAHGRLLEEKDVTSPFPFLDMAAKLIMQLAEAD

SEQ ID NO: 4238 - protein, 371 aa, Glycine max
  unsure (1)..(371): unsure at all Xaa locations
SKAIAQYTEDARLHAVFEQSGESGRSFNYSESIRIASESVPEQQITAYLVKIQRGGFIQPFGSMIAVDEPSFRILGYSDNARDMLGITPQSVPSLDDKNDAAFALGTDVRALFTHSSALLLEKAFSAREISLMNPIWIHSRTSGKPFYGILHRIDVGIVIDLEPARTEDPALSIAGAVQSQKLAVRAISQLQSLPGGDVKLLCDTVVESVRELTGYDRVMVYKFHEDEHGEVVSESKRPDLEPYIGLHYPATDIPQASRXXFKQNRVRMIVDCHASAVRVVQDEALVQPLCLVGSTLRAPHGCHAQYMANMGSIASLVMAVIINGNDEEGVGGRSSMRLXXLVVCHHTSARCIPFPLRYACEFLMQAFGLQ

SEQ ID NO: 4239 - protein, 749 aa, Geobacillus stearothermophilus
MENQNRQNAAQCPFHGSVTNQSSNRTTNKDWWPNQLNLSILHQHDRKTNPHDEEFNYAEEFQKLDYWALKEDLRKLMTESQDWWPADYGHYGPLFIRMAWHSAGTYRIGDGRGGASTGTQRFAPLNSWPDNANLDKARRLLWPIKKKYGNKISWADLFILAGNVAIESMGGKTIGFGGGRVDVWHPEEDVYWGSEKEWLASERYSGDRELENPLAAVQMGLIYVNPEGPDGKPDPKAAARDIRETFRRMGMNDEETVALIAGGHTFGKAHGAGPATHVGPEPEAAPIEAQGLGWISSYGKGKGSDTITSGIEGAWTPTPTQWDTSYFDMLFGYDWWLTKSPAGAWQWMAVDPDEKDLAPDAEDPSKKVPTMMMTTDLALRFDPEYEKIARRFHQNPEEFAEAFARAWFKLTHRDMGPKTRYLGPEVPKEDFIWQDPIPEVDYELTEAEIEEIKAKILNSGLTVSELVKTAWASASTFRNSDKRGGANGARIRLAPQKDWEVNEPERLAKVLSVYEDIQRELPKKVSIADLIVLGGSAAVEKAARDAGFDVKVPFFPGRGDATQEQTDVESFAVLEPFADGFRNYQKQEYSVPPEELLVDKAQLLGLTAPEMTVLVGGLRVLGANYRDLPHGVFTDRIGVLTNDFFVNLLDMNYEWVPTDSGIYEIRDRKTGEVRWTATRVDLIFGSNSILRSYAEFYAQDDNQEKFVRDFINAWVKVMNADRFDLVKKARESVTALQRFDRSMNTATLQ

SEQ ID NO: 4240 - protein, 132 aa, Glycine max
MEFRLLIRAKLTQNFVHPIICLLILITNTQVCVVDFSACNMASIIMSFAPATGRVFAATAAKGAGGSKEEKGLLDWILGGLQKEDQLLETDPILKKVEEKNGGTTSNTGRNKNSVAVPQKKKGGFGGLFAKN

SEQ ID NO: 4241 - protein, 157 aa, Oryza sativa
  unsure (1)..(157): unsure at all Xaa locations
ARRWIWTAAATLLAWPQQQYTSPMNHRPTENLDTEGLEQASVDTQLTSSNIGFRLLQKMGWKGKGLGKNEQGIKLHLLFYYRQNGGGLFXVISFSIHHLSIPTIMMVSVQTLDIFSNIFELIEFRHTFLSKEMNIPLSFFAQCKYQKLSTLATIWIY

SEQ ID NO: 4242 - protein, 395 aa, Neurospora crassa
MATSFYHHPPHHRPQTMHGLNVSSSHNDPRSLPSPGSALPPIRSIIPDFDKLDMDYGRRQSQAQKDTIDGGNSQGYTTDRLPTTGSSPSINVFSQHSHGQQDSGARTYLDGPLPRLPPSNAFAQHNGYHQNSEPRRGYPQYGQHQPIYRQDSYPPHGYPQDSYYPPLEHRHGPFPQPGSQQNLYEQRARSERLHYAHPWGGHSDSAVSPRGGDGGKNKRRGNLPKEVTEKLYAWLYGHLNHPYPTEDEKQKMMRETNMQMNQISNWFINARRRKVPLLIEQAKAETEAAKHYRPNSSPIARRTRPVSVSHTRHYSRSGPGRGVPSRRSVSVEPSINHLLNCPESDADVRPPQYATPMSDRGVLDYSSRESSESYEMDSRYQSYGHGHGHGHHASI

SEQ ID NO: 4243 - protein, 455 aa, Oryza sativa
  unsure (1)..(455): unsure at all Xaa locations
MTDELRSFLELNLPKVKEGKKAKYSVGVMEPKVGSHISEATGIPCQCNEFVQELLRGVRLHFDHFIDQLKPTDLEKAQLGLGHSYSRAKVKFNVNRVDNMKCYAIHPLCISAECSSGESLPPREWYSWHFPELVKIVNDNYVYSKIAKFVVNKSDLAEKDIPALADIIGDEDKAKEIVEAAKASMGNYNTICSIIXXMSLIVAVVASLQFTYVXPCLSNLAKCAASTLQILGAEKALFRALKTRGNTPKYGLIFHSSFIGRASTRNKGRIARYLANKCSIASRIDCYSELNTSVFGQKLREQVEERLDFYDKGIAPRKNLDVMKAAINDMTKEDGGEKEKNDTSAKKNKKKKSKAEADGEEMDLDKPAKVAAEETDXXENENKKKKKHKLEEPQDQEMAVNGNLEQDETPKKKKKKKPEASEDVEPSPALQGSARGKKKSKTLLIMSHDQLKCQG

SEQ ID NO: 4244 - protein, 393 aa, Mascagnia stannea
VIEPVNPADVPVTAAGALKSYKLAAKAISRLQSLPSGNISLLCDVLVKEVRDLTGYDRVMVYKFHEDEHGEVVSECRRSDLESYLGLHYPATDIPQASRFLFMKNKVRMICDCLAPPVEVIQDERLPQPLSLCGSTLRSPHGCHAQYMTNMGTIASLVMSVTINEDDDMMDGDQQQQMTRKLWGLVVCHHTSPRFVPFPLRYACEFLIQVFGVQINKEVELAAQVREKHILQIQTMLCDMLLRDAPVAIITQSPNVMDLVKCDGAALYFKNKTWLLGVTPTEEQIRDIAEWLLEYHSGNTGLSTDSLMEAGYPGASVLGDGVCGMAAVSITSRDFLFWFRSHTAKEIKWGGAKHDPGDKDDGRKMHPRSSFKAFLEVVKWRSMPWEDVEMDAI

SEQ ID NO: 4245 - protein, 222 aa, Streptomyces avermitilis MA-4680
MDAELFPRSRAQVAPDAVHVPDWADAGRQRRFLAACRDWARPPAGLRTVHTPGGGTMTSRQVCLGWHWYPYGYARTVVDGDGAPVKPLPDWLAELGRDAVSDALGPQAVPPVPYDIALINFYGADARMGMHRDSDEKSGAPVVSLSVGDTCVFRFGNARTRTRPYTDVELRSGDLFVFGGASRLAYHGVPRVYADTAPPELGLVGRLNITLRVSGFQDPSGE

SEQ ID NO: 4246 - protein, 220 aa, Desulfitobacterium hafniense
MTLPSRKVAVLGATGSIGASALDVIARHPQALSASVLAAGGKVEALLALCERHRPEHAVIADAAGFDALREGLRARGLGTQAHCGSQALDDLVGSDACDTVVAAIVGAAGLDSTLAAARAGKRLLLANKESLVLAGELLMRAAHEAGACIVPIDSEHNAIFQCLPDAHAHAGLRRILLTASGGPFRGRTRSQLGEVTPEQAVAHPKWSMGPKISVDSATL

SEQ ID NO: 4247 - protein, 118 aa, Pinus pinaster
KPFMTEALWVLYITGVKHFRLYPRTYDLLHAWHIFSDINERGCSIEDLLLEMDRILRPTGFIIIRDKAAIVNYIMKYLAPLRWDSWSSNVEPESDPLSSGDEIVLMARKRLWLPGETH

SEQ ID NO: 4248 - protein, 287 aa, Oryza sativa
  unsure (1)..(287): unsure at all Xaa locations
MYGWEMLSFNIHDGFLEAIVRGNRSGLLTAADYNNLCQCENLDDVKMHLTATEYGPYLQNEPSPLHTTTIVEKCTLKLVDEYKHMMCQATEPLSTFLQYITYGHMIDNVVLIVTGTLHERDVNELLEKCHPLGMFDXXYSVAQNMRELYRLVLVDTPLAPYFSECITSEDLDDMNIEIMRNTLYKAYLEDFYKFCEKLGGATAEIMCDLLSFEADRRAVNITINXXYPYGHEELAVCEDVDQVRGVMEKYPPYQAIFAKISYGESQMLDKAFYEEEVRRLCLSFEQQ

SEQ ID NO: 4249 - protein, 400 aa, Glycine max
  unsure (1)..(400): unsure at all Xaa locations
MDASKLNQLKHFIEQCKSNPSLLSDPSLSFFRDYLESLGAKLPESAYSESTGVESDEDIEDVTEEQEKVEEEEEDDEIIESDVELEGETCQSDDDPPQKMGDPSVEVTEENRDASQMAKIKAMDAISEGKLEEAIENLTEAILLNPTSAIMYGTRASVYIKMKKPNAAIRDANAALEINPDSAKGYKSRGVARAMLGQWEEAAKDLHVASKLDYDEEINAVLKKVEPNAHKIEEHRRKYERLHKEREDKKKEXERQRRRAEAQAAYEKAKKQEQSSSSRNPGGMPGGFPGGMPGGFPGAGGMPGGFPGAGGMPGGFPGGXGMPGGGFPGAGGMPGGVPGNIDFSKILSDPELMAAFSDPEVMAALQDVMKNPANFAKHQSNPKVGPVIAKMMTKLGGGPK

SEQ ID NO: 4250 - protein, 209 aa, Zea mays
  unsure (1)..(209): unsure at all Xaa locations
MVSLKLQKRLAASVLKCGKGKVWLDPNEVSEISMANSRQNIRKLVKDGFIIRKPQKVHSRSRARRAHEAKQXKGRHSGYGKRRGTREARLPTKILWMRRMRVLRRLLRKYREAKKIDKHMYHDMYMKVKGNMFKNKRVLMESIHKSKAEKAREKTLSDQFEAKRAKSKASRERKIARREERAXPQGPREPTAPVAAPAPSTGVPKKAKK

SEQ ID NO: 4251 - protein, 555 aa, Nicotiana tabacum
MLVLFETPAGFALFKVLDEGKLSKVEDLWKEFSTTDSARKVVKLKAFSKFENTSEALSAATLLIDSKPSKGLRKFLKAHCDGETLGVADSKLGNAIKEKLQIDCVHNNAVMELMRGVRSQLTELITGLGSQDLAPMSLGLSHSLSRYKLKFSPDKVDTMIVQAISLLDDLDKELNTYAMRVREWYGWHFPELAKIVQDNILYAKAVKLMGDRVNAAKLDFSEILPEEVEAELKEASMISMGTEVSDLDLENIKDLCSQVLSFSEYRAQLYDYLKSRMNTIAPNLTALVGELVGARLIAHGGSLLNLAKQPGSTVQILGAEKALFRALKTKHATPKYGLIYHASLIGQAAPKHKGKISRSLAAKTALAIRYDALADSQDNTMGLENRAKLEARLRALEGKELGKSAGSAKGKPKIEVYDKDRKKGAGALITPAKVYNPAADSVIGHTENEEKMSIDGQPSQIKEAAEEVPVTEGEKKKKKKKKSAETEDNAVGTDGAEPEDTGKKEKKKKKKHADEVESVEVEKSKKKKRKHADEDEAETTDKKKDKKKKKKKTEE

SEQ ID NO: 4252 - protein, 510 aa, Nicotiana tabacum
MALLDLQPSTSLLFCLVPLLFLFFIKFNKTITNTLLSSNSSKIPRSYPLIGSYFSILANHDQRIKWISDIILSTPNLTFTLIRPLNFHTIFTANPSNVQHMLKTNFQVYQKGHNSNTTLKDFLSNGIFNVDGDIWKYQRQVASHEFNTRSLRKFVETVVDTELSERLIPILATAAANKTVLDFQDILQRFAFDNICKIAFGYDPGYLLPSLPEAEFAVAFEDAVRLSTERFILPFPLIWKMKRALNIGSEKKLRFAVEQVREFAKEIVREKQRELKDKSSLDSADLLSRFLSTGHSDENFVTDIVISFILAGRDTTSAALTWFFWLISKHPEVESQILKEIGEKSESLLLYDEVKNMIYTHASLCESMRFYPPVPMDTKEATKDDILPDGTFVKKGNRVTYHPYAMGRVEKVWGKDWAEFRPERWLDKDEVTGNWTFVSKDAYTYPVFQAGPRVCLGKEMAFLQMKRVVAGVLRRFKVVPVVEQGAEPVFISYLTAKMKEVFPVTIEERI

SEQ ID NO: 4253 - protein, 1307 aa, Ceratodon purpureus
MSATKKTYSSTTSAKSKHSVRVAQTTADAALEAVYEMSGDSGDSFDYSKSVGQSAESVPAGAVTAYLQRMQREGLIQNFGCMVAVEEPNFCVIAYSENASEFLDLIPQAVPSMGEMDVLGIGTDIRTLFTPSSSAALEKAAATQDISLLNPITVHCRRSGKPLYAIAHRIDIGIVIDFEAVKMIDVPVSAAAGALQSHKLAARAITRLQALPGGDIELLCDTIVEEVRELTGYDRVMAFKFHEDEHGEVVAEIRRMDLEPYMGLHYPATDIPQASRFLLMKNRVRLIADCYASPVKLIQDPDIRQPVSLAGSTLRAPHGCHAQYMGNMGSIASLVMAVIINDNEEYSRGAIQRGRKLWGLVVCQHTSPRTVPFPLRSVCEFLMQVFGMQLNLHVELAAQLREKHILRTQTLLCDMLLRDAPIGIVSQTPNIMDLVKCDGAALYYGKRVWLLGTTPTENQIKEIADWLLEHHNDSTGLSTDSLADANYPGAHLLGDAVCGMAAAKITAKDFLFWFRSHTATEVKWGGAKHDPDEKDDGRKMHPRSSFKAFLEVVNKRSPPWEDVEMDAIHSLQLILRGSFRDIADSDTKTMIHARLNDLKLQGVEERNALANEMSRVLETAAAPILAVDSRGMINAWNAKIAQVTGLPVEEAMHCSLTKDLVLDESVVVVERLLSLALQGEEEQNVEIKLKTFGTQTTERAVILIVNACCSRDASDFVVGVFFVGQDVTEQRMFMDRFTRIQGGEKTTVQDPHPLMRPSFDGDEFGRTFKRNSALGGLKDHATGSVERLDLYLRRAEECMEVMETIPSPKFNNKQCQYLAGKLKAVLQSASLFLRISHHEHHELGASIDMGRHVEIFKLLLALAKEIESFIQGCCKDEWIKAAMTLTNVSEYVSSMGFNLELCKIAFCKSCAASGSLTLDQIEVICKDEAEVVKRNASIDVDTLFAKVIYDLTEKTLSSDQNDLAIYLLQRLKRAKPILPSFSSRPSWWNFYDDWSFSEKFFQWIQITGSLGSGSSATVEKAVWLGTPVAKKTFYGRNNEDFKREVEILAELCHPNITSMFCSPLYRRKCSIIMELMDGDLLALMQRRLDRNEDHDSPPFSILEVVDIILQTSEGMNYLHEKGIIHRDLKSMNILVKSVKVTKSEIGYVHVKVADFGLSKTKDSSTRYSNQTWNRGTNRWMAPEVINLGYESTEGEISFDGKVPKYPLKSDVYSFGMVCYEVLTGDVPFPEEKNPNNVKRMVLEGVRPDLPAHCPIELKALITDCWNQDPLKRPSFAVICQKLKYLKYLLMTGFSSYQDSYPSTEEPS

SEQ ID NO: 4254 - protein, 438 aa, Brassica rapa
YHHSYTFSILLVFLVLILFHPALSTYVNTMSSSESLTISSKRTLVSPGGVFELGFFKPSGRSRWYLGIWYKKVSQKTYAWVANRDNPLTNSIGTFKISSNNLVLLGQSNNTVWSTNLTRCNARSPVVAELLPNGNFVMRHSNNKDSNGFLWQSFDFPTDTLLPEMKLGYDLKTGRNRFLTSWKGSDDPSSGNFVYKLDIRRGLPEFILINQFLNQRIETQRSGPWNGIEFSGIPEVQGLNYMVYNYTENSEEIAYSFQMTNQSIYSRLTVSEFTLDRFTWIPPSWGWSLFWTLPTDVCDPLYLCGSYSYCDLNTSPNCNCIKGFVPKNPQQWDLRDGTQGCVRTTQMSCSGDGFLRLNNMNLPDTKTASVDRTIDVKKCAEKCLSDCNCTSFATADVRNGGLGCVFWTGELVEMRKNAVGGQDLYVRLNAADLGTCTG

SEQ ID NO: 4255 - protein, 88 aa, Zea mays
  unsure (1)..(88): unsure at all Xaa locations
DYPSHRLLLGLGQTFRMAKDRKQTRXRTNSSSPVCEPFXQGCNXLTCASKSIAFGSTAKCGKATFWVWLISTVPFYFATWEHFFTNTL

SEQ ID NO: 4256 - protein, 267 aa, Hordeum vulgare
MGRSPCCEKAHTNKGAWTKEEDDRLTAYIKAHGEGCWRSLPKAAGLLRCGKSCRLRWINYLRPDLKRGNFSHEEDELIIKLHSLLGNKWSLIAGRLPGRTDNEIKNYWNTHIRRKLTSRGIDPVTHRAINSDHAASNITISFESAQRDDKGAVFRRDAEPAKAAAAAAAISHHVDHHHRSNPQLDWGQGKPLKCPDLNLDLCISPPIHEDPMVDTKPVVKREAGVGVGVVGLCFSCSMGLPRSSDCKCSSFMGLRTAMLDFRSIEMK

SEQ ID NO: 4257 - protein, 923 aa, Melilotus alba
  unsure (1)..(923): unsure at all Xaa locations
MELQIIWILRLVVACVLCLCIFIRSASSATKGFESIACCADSSYKDLKTTLNYTTDYIWFSDKXSCRQIPEILFSHRSNKNVRLFDIDEGKRCYDLPTIKDQVYLIRGTFPFDSLNSSFYVSIGATELGEVRSSRLDDFEIEGVFRATKDYIDFCLLKKDVNPFISQLELRPLPEEYLHGLATSVLKLISRNNLGGTEDDIRFPVDQNDRIWKATSTPSSALPLPSNVSNVDLKGSVTPPLQVLQTALTHPERLEFVHDGLETDDYEYSVFLYFLELNGTLKAGQRVFDIYLNNEIKKEKLDVLAGGSKNSYTVLNISANGSLNITLVKASGSEFGPLLNAYEILQARPWIEETNQIDLEVVQMMREKLLLHNQDNEALESWSGDPCMLFPWKGIACDDSNGSSIITKLDLSSNNLKGTIPSTVTEMTNLQILNLSHNHFDGYIPSFPPSSVLISVDLSYNDLTGQLPESIISLPHLKSLYFGCNQHMSDEDTAKLNSSLINTDYGRCKAKKPKFGQVFVIGAITSGSLLITLAVGILFFCRYRHKSISLEGFGGKTYPMATNIIFSLPSKDDFFIKSVSVKPFTLEYIEQATEQYKTLIGEGGFGSVYRGTLDDGQEVAVKVRSSTSTQGTREFDNELNLLSAIQHENLVPLLGYCNEYDQQILVYPFMSNGSLLDRLYGEAAKRKILDWPTRLSIALGAARGLAYLHTFPGRSVIHRDVKSSNILLDNSMCAKVADFGFSKYAPQEGDSYVSLEVRGTAGYLDPEYYKTQQLSEKSDVFSFGVVLLEIVSGREPLNIKRPRIEWSLVEWAKPYIRASKVDEIVDPGIKGGYHAEALWRVVEVALQCLEPYSTYRPCMVDIVRELEDALIIENNASEYMKSIDSLGGSNRYSIVMDKRALPSTTSTAESAITIQTLSHPQPR

SEQ ID NO: 4258 - protein, 277 aa, Oryza sativa
  unsure (1)..(277): unsure at all Xaa locations
MAKPRASAAAAKAPASTPPKTVHSALVTYASMLSLLSLCPPFVILLWYTMVHADGSVVRAYEHLREHGVQGLKAIWPMPTMAAWKIIFGFGLFEAALQLLLPGKRFEGPVSPSGNVPVYKANGLQAYAVTLITYLSLWWFGIFNPAIVYDHLGEIYSALVFGSFVFCIFLYIKGHLAPSSSDSGSLXGNVIIDFYWGMELYPRIGKHCDIKVVTNCRFGMMSWAVLAVTYCIKQYEMNGRVADSMLVNTALMLIYVTKFFWWESGYWCTMDIAHDRX

SEQ ID NO: 4259 - protein, 324 aa, Triticum aestivum
  unsure (1)..(324): unsure at all Xaa locations
MTVDRKDAEAAAAAAPFEIPALQPGRTXRPRRSRDGPNSVSETIRRWKEVNQQLEHDPQGAKRARKPPAKGSKKGCMQGKGGPENTQCGFRGVRQRTWGKWVAEIREPNRVSRLWLGTFPTAEDAARAYDEAARAMYGALARTNFPEHPAQAPAVAVPAAIEGVLRGAXLSCASPKTSNXTTHKLDVFEPLEPIASLPDGESDGFDIEELFRLMEADPIEVEGVSYCCGWGSLSFLTRRGYEINGSCTNLTLSRXTGGSWNCGTNTGVEMGLQEPLXYLDGLDQGMLEGMLQADYPYPMWISEDRAMRNPAFHDAEMSEFFEGL

SEQ ID NO: 4260 - protein, 371 aa, Nitrosomonas europaea ATCC 19718
MRRIRAAVVYQKGGPFQIEDLRLEAPRTDEVLVRIVATGMCHTDMVARDQLYDVPLPVVLGHEGSGIVEQIGDGVRKVAVGNHVVLTYMWCGHCKPCLRGDLTYCEHFYALNFGGVREDGSTSTCLANDTRRPIHDHFFGQSSFGTFALVHERNVIKVPETAPLELLGPLGCGIQTGAGAVINTLKVSPGSSFVAFGGGAVGLSAVMAAHAAGATTIISVDVVPSRLALAMELGATHTINSRETDPVEAVHKIINGGADFTLESSGRPAVLRQAIDALAIRGTCGIVGAPALGTEASFDVNGVMTTGKRIIGIVEGDSKPDLFIPALVELYQQGKFPFDRLVKFYSLDQINQAAEDSEKGITIKPIIRLQS

SEQ ID NO: 4261 - protein, 143 aa, Zea mays
  unsure (1)..(143): unsure at all Xaa locations
MAGIGPIRQDWEPVVVRKKAPTAAAKKDEKAVNAARXAPAPEIETMKKYNAGMNKAASSGTSLNTKRLDDDTENLAHERVPSDLKKNLMQARLDKKLTQAQLAQMINEKPQVIQEYESGKAIPNQQIIGKLERALGTKLRGKK

SEQ ID NO: 4262 - protein, 319 aa, Zea mays
MGGGGEGRDSGGGGGAASFREAARDFSNVASFSELPFLQRSAAPPRGSPHNSGIRIFGIDVPHSPPERNSNKDATAATTTTAAASATQSSGGGGATTDSSSSSSRKFECHYCCRNFPTSQALGGHQNAHKRERQHAKRVQMQSAMAAAAAAAAAAGGAHHHHLLGYPQHRFGVAGPTVATLYPSWPTMRPPAPAGAGAGAVAIGGPQFYSGIGSIAQPINGSPLLTAAGLWRGPPPPAAGHGNASLPSSPGGERRRPVALSSSSPVFRGDDPRASTSLLAAASSPSSSSSLLLSPQGQFVCEQPAATTAAEGVSLDLHL

SEQ ID NO: 4263 - protein, 369 aa, Treponema pallidum
MCQKSSPCTYARVRSLPSVRLFSFLALAFASFLRAEDAFDHFREGERLLSLQQAQQAIGPLHKAAQQKPAHPKAALYLGMAYLQTGRYTQAIQWLQNPPVHSQEYAHLYAYNLGNVYFVQHRYEEAQHAYEQALALKHDYPPALLNRANTAMKRQAYAHALADYKKYVSQNPTASQHYEVQRMIAALEQWLQRKEAEEARRKEAEEARRKEAEEARRKEAEEARRKEAEEARRKEAEEARRKEAEEARRKEAEEARRKEAEEARRKEAEEARRKEAEEARRKEAEEARRKEAEEARRKEAEEARRKEAEEARRKEAEEARRKEAEEARRKEAEFEALKRALRLKQAEDARTLSTGSEDTVPYQEEHNLE

SEQ ID NO: 4264 - protein, 458 aa, Bacillus subtilis subsp. subtilis str. 168
MTDDMTKDNINQQTLQRGLKNRHIQLIAIGGAIGTGLFLGSGKSIHFAGPSILFAYMITGIICFLIMRSLGELLLSNLNYHSFVDFVQDYLGDMAAFITGWTYWFCWISIAMADLTAVGLYTQYWLPGVPQWVPGLIALIILLIMNLATVKLFGELEFWFALIKVIAILALIVIGLVMIFKGFSTSSGVSSFTNLWSHGGLFPNGMHGFILSFQMVVFAFVGIELVGLTAGETENPEKVIPKAINNIPVRVLLFYIGALLVIMSIYPWDIINPSESPFVQVFVAVGIVGAASIINFVVLTSAASACNSAVFSTSRMVYSLAKDHNAPESMAKLTQRKVPRNALFFSAIVILIGVTLNYIMPEGVFTLITSISTVCFIYIWGITVICHMKYRKTRPELAKTNKFKLPLYPFTNYLILAFLAFVLVVLALAQDTRVSLFVTPVWFILLIVIYKVRKAKHQ

SEQ ID NO: 4265 - protein, 166 aa, Triticum aestivum
ARGTSLGADATVKVSTRAEDLESEVERIQAAMGSEIDVSLDCAGFSKTMSTALEATRPGGKVCLVGMGHNEMTLPMTSAAAREVDVVGVFRYKDTWPLCIDFLRTGKVDVKPLITHRFGFSQRDVEEAFEVSARGRDAIKVMFNLLGGWLELDHRRRLDLSVQPAG

SEQ ID NO: 4266 - protein, 800 aa, Listeria monocytogenes EGD-e
MRKKRYVWLKSILVAILVFGSGVWINTSNGTNAQAATITQDTPINQIFTDTALAEKMKTVLGKTNVTDTVSQTDLDQVTTLQADRLGIKSIDGVEYLNNLTQINFSNNQLTDITPLKNLTKLVDILMNNNQIADITPLANLTNLTGLTLFNNQITDIDPLKNLTNLNRLELSSNTISDISALSGLTSLQQLSFGNQVTDLKPLANLTTLERLDISSNKVSDISVLAKLTNLESLIATNNQISDITPLGILTNLDELSLNGNQLKDIGTLASLTNLTDLDLANNQISNLAPLSGLTKLTELKLGANQISNISPLAGLTALTNLELNENQLEDISPISNLKNLTYLTLYFNNISDISPVSSLTKLQRLFFYNNKVSDVSSLANLTNINWLSAGHNQISDLTPLANLTRITQLGLNDQAWTNAPVNYKANVSIPNTVKNVTGALIAPATISDGGSYTEPDITWNLPSYTNEVSYTFSQPVTIGKGTTTFSGTVTQPLKAIFNVKFHVDGKETTKEVEAGNLLTEPAKPVKEGHTFVGWFDAQTGGTKWNFSTDKMPTNDINLYAQFSINSYTATFDNDGVTTSQTVDYQGLLQEPTAPTKEGYTFKGWYDAKTGGDKWDFATSKMPAKNITLYAQYSANSYTATFDVDGKSTTQAVDYQGLLKEPKAPTKAGYTFKGWYDEKTDGKKWDFATDKMPANDITLYAQFTKNPVAPPTTGGNTPPTTNNGGNTTPPSANIPGSDTSNTSTGNSASTTSTMNAYDPYNSKEASLPTTGDSDNALYLLLGLLAVGTAMALTKKARASK

SEQ ID NO: 4267 - protein, 383 aa, Ceratopteris richardii
MNTFLSSGPHTYLNNLRCGEWGSGTAPGPIADPKSAAYYRDHTKNDKVNDLSNRLHSYGPPEALQYPNQHAIAADTEKMEVENSGKMAASVERSAQDAHASGALQEDVVAAYVDNMPACVAGVTLVPQGGRGTIPIRRIDNPTSRQVTFSKRRNGLLKKAYELSVLCDAEVGVMVFSATGRLSEFASTSMQKVLERYQEHSNGAPSRKVLLQDVEFWKREVLFLRDQLFHLKNYENHILGENQIPLDLAEIQRVETRLENALNKIRIQKVQVLHGEMQQIYKQEARLFEENNILRKKLAEATTINGMRGSMSTMTMSHEDLPGSTNQSYGTKALQGGCPSDTSTTTSNDPNHHSSHPPSHPSASQPLTLHLTSPCSPKLDLRL

SEQ ID NO: 4268 - protein, 200 aa, Agrobacterium tumefaciens str. C58 (Cereon)
MFGPYFLCKLNDDIGRFLVADKYRLPEEFFTTRFLVRRIVPTDAEAIFEGWNTDPEVTKYLTWKPHSELGQTQRAIEENYSAWNAGTSFPAVICHRERPHELIGRIDARPMGHKVSYGWLVRRTWWGRGVASEVVQLAVEHALSHPRIFRTEASCDVLNTASARVMEKVGMTKEAVLRRYLFHPNFSNMPRDAFLYSKVR

SEQ ID NO: 4269 - protein, 303 aa, Corynebacterium efficiens YS-314
MAKPQGAPPVDNTDPEPRAVDKSCGVLPVPADIRTLADTTRVMTKSTNRSPGHLESGEPGSDTKEHIMKTTPLFTGPLPRAVIATLAATGLFALSACASEEDTQNNGTTTDTTTETALETTTATTAGGDTGADTGADTGSEPDLTAAVTTAEGAEVGTAEFREQDGAVSITVGFNDMEPGFYGLHIHQIGVCETDSAAPDNPDNTGDFLSAGSHLGAGESDHPDHPGDLPQLLVKNDGTAVMTVETDRFTLADLEDDDGSALMIHSDADNFANIPERYSPDGADEDTLGTGDAGSRLACGVIG

SEQ ID NO: 4270 - protein, 218 aa, Ipomoea batatas
MGRGKVEIRRIEKSTNRRVTFWKRRNGLLKKAMEMGILCDAEVGLMIFSSTGKLHEFATTSIRSVIERYNKTQGDSLQSPLDPTLELKFWQIEVAILRQQLHNMQEDHRKVMGEVYGLSVKDLQNLENQLEMSLSGIRMKKEQILIEQIQELTHKQGSFVHQENFELFNKFQAYGTSDPNAVNGDTISPYDFTISEESQGHIHFQLPQNFSDLARALY

SEQ ID NO: 4271 - protein, 212 aa, Glycine max
MVSLKLQKRLAASVLKCGKGKVWLDPNEVNEISMANSRQNIRKLVKDGFIIRKPTKIHSRSRARRMKEAKRKGRHSGYGKRKGTREARLPTKILWMRRMRVLRRLLRKYRESKKIDKHMYHDMYMKVKGNVFKNKRVLMESIHKSKAEKAREKTLSDQFEAKRAKNKASRERKNARREERLAQGPGERPSAAQTTTPATASQPAQALKKSKK

SEQ ID NO: 4272 - protein, 591 aa, Thermoanaerobacter tengcongensis
MGCSVSRRNSMRKVIIVFLVLITLLFLFLYLHPADKRNHSEKDPIDELIKNMTVEEKIGQMLMPAIDGTKATPQLEKMIKDYHLGGVILFSENIQSIEQIVKLTNDIQSLSLQIPLFISTDQEGGLVYRLSQGTKFPGNMALGATFSEDLAYKVGKVIGSELKAVGINWDLAPVMDVNVNPYNPVIGIRSFGGNPDVVAKLGVAFMKGLQENKIASCVKHFPGHGDVDVDSHLGLGTVNKNRETLEKIELKPFEEAIQAGTDALMTAHLSFPALDDTKVIAKTSEGVQKEITIPATLSHKILTDLVRKTWGYEGVIITDAMNMKAISDNFGPVDAVVRAVKAGADIILMPVDLNGAFNELVLETKKGIISEKRIDDSVRRILKLKYKLGLMETKDIDLENMIQQARAIVGNEKNLLVEKEVAERSITLLRNSGNLLPLGKETLNKKILIIGGTKDLVNGFVNELKKYHPGNNAFLVINNGTLRGSGSLTSDLKKAIDGSDIVILMTNNIMSPNSLAEKIVNYGGDKVIGIAVRNPYDIMYYPQVKVYLVQYGWNPCSIKAMVDVLFGAVNPTGKLPVEIPGLYPIGYGLSY

SEQ ID NO: 4273 - protein, 224 aa, Triticum aestivum
MEKAMETEAGRQSEVTCVDFWANEFGMRVRIALRELGVAFEYVEEDLRVRERSDLVRRMNPALRMVPILIHHGRPVCGSVNIVEYIDEVWGEETRLLPGDPVDRADARFWADFVDHKVFGAQVRFLESKGEEKDELVEQLKRLEEVLGDKAFFSGDEFGFLDIVTIPFSSMFHGYEQLGRFHLDVECPKLTQWAKRCKQRESVRAVLPDDTEMYELHKHLYGIE

SEQ ID NO: 4274 - protein, 342 aa, Rhodospirillum rubrum
MRVFFSPRQLAHAPASEFSRGEMIAFRECPVRAQSILAALAAAGFPAPSQPVDPGLAPVLAIHDGEYVEFLRTAWTRWRAGGATVAAYPTAWPVPGIGERRPDTVEGLLGWYIFDSGTPIVAETWDAVKAGADTAHAGALAVATGAHSAFALCRPPGHHAARALAGGYCYLNNAAIAAQTLRDQGAGRVAILDVDYHHGNGTQEIFYERGDVLFVSLHADPAFGYPYYTGYGDQSGRGAGEGTTLNLPLAAGTTEAEWLAALEHGLARLGEFAPDAVVVSLGVDTWAGDPLSHFKVSARAFPALGARLAGLGLPTLFVMEGGYATAELGKNVVGVLSGFEDA

SEQ ID NO: 4275 - protein, 278 aa, Triticum aestivum
METGGSKREGDCPGQERKKKVRRRSTGPDSVAETIKKWKEENQKLQQENGSRKAPAKGSKKGCMAGKGGPENSNCAYRGVRQRTWGKWVAEIREPNRGNRLWLGSFPTAVEAARAYDDAARAMYGAKARVNFSEQSPDANSGCTLAPPLPMSNGATAASHPSDGKDESESPPSLISNAPTAALHRSDAKDESESAGTVARKVKKEVSNDLRSTHEEHKTLEVSQPKGKALHKAANVSYDYFNVEEVLDMIIVELSADVKMEAHEEYQDGDDGFSLFSY

SEQ ID NO: 4276 - protein, 224 aa, Triticum aestivum
  unsure (1)..(224): unsure at all Xaa locations
MGLAMGKLMLGKIIVETPKHEVLHTGDGYEIRKYPPCVAAEVTYDPKEMKGDRDGGFQVLANYIGAFGKPQNTKPEAIAMTAPVITSSGGGEAEPIAMTAPVITSSEPEPVAMTVPVLTAEGREEQAGKVTMQFLLPSKYAKAEEAPRPTDERVVLREVGERKYAVVTFGGLAGDKVVXEKAEGLKAALEKDGHAVTGPFVLSRYNPPWTLPPLRTNEVMFPVK

SEQ ID NO: 4277 - protein, 357 aa, Pseudomonas fluorescens PfO-1
MSQPCGIAHEGLSTRLHSTRVPVMTNQTNRQFLLAKRPAGAATRETFTYQELPVGEPAAGQILVKNEYLSLDPAMRGWMNEGKSYIPPVGLGEVMRALGVGKVVASNNPGFAVGDYVNGAIGVQDYFLGEPKGFYKVDPKLAPLPVYLSALGMTGMTAYFALLDVGAPKAGDTVVLSGAAGAVGSIAGQIAKIKGCRVIGIAGGADKCKFLVDELGFDGAIDYKSEDVLAGLKRECPKGVDVYFDNVGGDILDAVLSRLNFKARVVICGAISQYNNKEAVKGPANYLSLLVNRARMEGFVVMDYAAQYASAAQEMAGWMAKGQLKSKEDIVEGLETFPETLGKLFSGENFGKLVLKV

SEQ ID NO: 4278 - protein, 187 aa, Pseudomonas putida KT2440
MTPPRSFPSDLCLDSPRLQLRPMRHADAAQWLAIMADPEVMRYWHHAPWQDLAEAESALAADREAYANGDQLKLGMYRRDNGELIGMVQLFNIDDISRRGEIGYCLASAVQGRGYMDEALTCFIDYLAHTLHMRRLEGEIDPRNQGSARTLERQGFVLEGTLRARWCVAGELSDSGIYGLLLEPPVA

SEQ ID NO: 4279 - protein, 422 aa, Saccharomyces cerevisiae
MVDLIARDDSVDTCQASNGYNGHAGLRILAVFIILISSGLGVYFPILSSRYSFIRLPNWCFFIAKFFGSGVIVATAFVHLLQPAAEALGDECLGGTFAEYPWAFGICLMSLFLLFFTEIITHYFVAKTLGHDHGDHGEVTSIDVDAPSSGFVIRNMDSDPVSFNNEAAYSIHNDKTPYTTRNEEIVATPIKEKEPGSNVTNYDLEPGKTESLANELVPTSSHATNLASVPGKDHYSHENDHQDVSQLATRIEEEDKEQYLNQILAVFILEFGIIFHSVFVGLSLSVAGEEFETLFIVLTFHQMFEGLGLGTRVAETNWPESKKYMPWLMGLAFTLTSPIAVAVGIGVRHSWIPGSRRALIANGVFDSISSGILIYTGLVELMAHEFLYSNQFKGPDGLKKMLSAYLIMCCGAALMALLGKWA

SEQ ID NO: 4280 - protein, 365 aa, Candida boidinii
MSIIEKKIVLLPGDHVGVEVVEEAVKILKSISEVKPEIQFKFENHLIGGAAIDATGVPLPDEALEAAKKSDAVLLGAVGGPKWGTGEVRPEQGLLKIRKELNLYANLRPCNFASDKLLDLSPLKSDIVKGTDFTVVRELVGGIYFGDRVEDDGSGFASDSESYSVPEVERITRMAAFLSLQNDPPLPIWSLDKANVLASSRLWRKTVDRVIKEEFPKLTVQHQLIDSAAMILVKSPTKLNGIVITNNMFGDIISDEASVIPGSLGLLPSASLASLPDTNQAFGLYEPCHGSAPDLPKNKVNPIATILSAAMMLKLSLNLVKEGNAVEEAVRKVLDQGIMTGDLGGNNSTTEVGDAIAKEVKLLLA

SEQ ID NO: 4281 - protein, 143 aa, Fusarium oxysporum
  unsure (1)..(143): unsure at all Xaa locations
XDSLTEEQVSEFKEAFSLFDKDGDGQITTKELGTVMRSLGQNPSESELQDMINEVDADNNGTIDFPEFLTMMARKMKDTDSEEEIREAFKVFDRDNDGFISAAELRHVMTSIGEKLTDDEVDEMIREADQDGDGRIDYNEFVQ

SEQ ID NO: 4282 - protein, 238 aa, Magnetospirillum magnetotacticum
MHARVDGAALTARRPGAVHRPRPGRMGTMPDGPAPTPRTVTILGSTGSIGTQAIDVVRAHPDRFRVEALSAGGSDVDLLARQAADLGVRAVGVADATRAAALAEALSAACAGREVVPEVLAGPDAAAELAARGSDVVLNGVTGSVGLGPTLAALRAGSTLALANKESLVAGGALVRAAQQRPDQIVPVDSEHSAIAQCLRSGTRPEVRRLILTASGGPFRGWAADAVKAASVDQALAH

SEQ ID NO: 4283 - protein, 436 aa, Brassica rapa
MKGVRKTYDNSHTFSFLLVFFVLILFRPAFSINILSSTESLTISSNRTLVSPGNVFELGFFTPGSSSRWYLGIWYQKLPDRTYVWVANRDNPLSNSIGTLKISNMNLVLLDQSNKSVWSTNLTRGNERSPVLAELLANGNLVIRDSNNNDASGFLWQSFDSPTDTLLPEMKLGYDLKKGINRFLTSWRNSDDPSRGEFSYQLDTQRGMPEFYLLKDGLQGHRSGPWNGVQFSGIPEDQKLNYMVYNFTENSEEVAYTFRMTNNSIYSRIQINSEGFLERLTWTPNSIAWNLFWSSPVTFCDVYKACGSYSYCDLNTSPVCNCIQGFKPLNVQQWDLRDGSSGCIRKTQLSCSGDGFTRMRRMKLPETMKAIVDRSIDVKECENRCLSDCNCTAFANADIRNGRTGCVIWTGVLEDMRTYFAEGQDLHVRLAAADLV

SEQ ID NO: 4284 - protein, 342 aa, Saccharomyces cerevisiae
MVLVKQVRLGNSGLKISPIVIGCMSYGSKKWADWVIEDKTQIFKIMKHCYDKGLRTFDTADFYSNGLSERIIKEFLEYYSIKRETVVIMTKIYFPVDETLDLHHNFTLNEFEELDLSNQRGLSRKHIIAGVENSVKRLGTYIDLLQIHRLDHETPMKEIMKALNDVVEAGHVRYIGASSMLATEFAELQFTADKYGWFQFISSQSYYNLLYREDERELIPFAKRHNIGLLPWSPNARGMLTRPLNQSTDRIKSDPTFKSLHLDNLEEEQKEIINRVEKVSKDKKVSMAMLSIAWVLHKGCHPIVGLNTTARVDEAIAALQVTLTEEEIKYLEEPYKPQRQRC

SEQ ID NO: 4285 - protein, 203 aa, Shigella flexneri 2a str. 301
MERTLTTVSYYAFEGLIPVVHPTAFVHPSAVLIGDVIVGAGVYIGPLASLRGDYGRLIVQAGANIQDGCIMHGYCDTDTIVGENGHIGHGAILHGCVIGRDALVGMNSVIMDGAVIGEESIVAAMSFVKAGFSGEKRQLLMGTPARAVRSVSDDELHWKRLNTKEYQDLVGRCHASLHETQPLRQMEENRPRLQGTTDVTPKR

SEQ ID NO: 4286 - protein, 168 aa, Clostridium acetobutylicum
MIYSYDDKKPNIHSSVFIAKSADIIGDVNIDKNSSVWFGAVIRGDSNYIRIGEGTNIQDNSVLHTNTYDNGIDIKNNVTIGHGVILHGCTINSNCIIGMGATILDDVEIGEYTIVGANSLITSGKKIPGGVLCMGSPAKVIRELTVDEKLEIDKNAEHYIEMGKKYFK

SEQ ID NO: 4287 - protein, 276 aa, Triticum aestivum
  unsure (1)..(276): unsure at all Xaa locations
MSQGQQRRPSSDQAQAGGGGQGQGQGGGAVRYGDVFPAVTGGLAEKPVAPQDAAXMQSAENLVFGETIKGGPAAAMQSAAMRNERMGLVGHDQATDATAEQGVSVSETRVPGGRIVTEFVAGQAVGQYLAPDDAADAGGAGGDDTKITIGEALEAAGYSAGGRPVERSDAAAIQGRPKVXATGAWTVNIPGGLAGAGAVGRPTPNAWGRAPTMKKAKLGDVLSNATAKLVADKEVEADDAARVASAETRNKDDKTVRPGGIAASVAAAARLNKQGA

SEQ ID NO: 4288 - protein, 453 aa, Pseudomonas fluorescens
MTRNNPQTREWQALSNDHHLAPFSDFKQLKEKGPRIITHAKGVYLWDSEGNKILDGMAGLWCVAVGYGREELADAASQQMRELPYYNLFFQTAHPPVLELSKAIADIAPEGMNHVFFTGSGSEGNDTMLRMVRHYWAIKGQPNKKVIISRKNGYHGSTVAGASLGGMTYMHEQGDLPIPGIVHIAQPYWFGEGGDMSPEEFGVWAANQLEEKILELGVDNVGAFIAEPIQGAGGVIVPPDSYWPRMKEILAKYDILFVADEVICGFGRTGEWFGTDYYGLKPHMMTIAKGLTSGYIPMGGLIVRDDVVAVLNEGGDFNHGFTYSGHPVAAAVALENIRILRDEKIIERVHAETAPYLQKRLRELNDHPLVGEVRGVGLLGAIELVQDKATKRYEGKGVGMICRQFCFDNGLIMRAVGDTMIIAPPLVISKAEIDELVTKARQCLDLTLSALQG

SEQ ID NO: 4289 - protein, 135 aa, Triticum aestivum
MADVEYRCFVGGLAWATDDQSLQNAFSKYGDVIDSKIITDRETGRSRGFGFVTFASDEAMRQAIEAMNGQDLDGRNITVNEAQSRRYGGGGGGYGGGRSGGGGGYGSRDGGGYGGGGGGGYGGSRGGSGGGNWRE

SEQ ID NO: 4290 - protein, 160 aa, Zea mays
THLTYIPLSRRTQQHNSRALLRQDEQEARRLGLQGGGFGAAGSDVRPGDWYCSCGAHNFASRSSCFKCSAYKEEAAVNSGAGGFDGDMSRSRGYGFGSGAAGAGAGAARTTNRPGWKSGDWICTRSGCNEHNFASRMECFRCNAPRDSGSAAMTYENYLH

SEQ ID NO: 4291 - protein, 178 aa, Brassica napus
MENMGTRVIEPLIVGRVVGDVLDNFTPTIKMNVSYNKKQVSNGHEFLPLAVSSKPRVEIHDGDLRSFFTLVMTDPDVPNPSDPFLKERLPWLVMNIPGTTDAAFGKEVVSYELPKPNIGIHRYVFVLFRQKQRRVKFPSNIISRDQFNTREFAIENDLGLPVAAVFFNAQRETASRRR

SEQ ID NO: 4292 - protein, 161 aa, Zea mays
LTFCQAQWINFHVPKQGICEDRTLEFYLVTYDDIGGVTCRRFRDTQSQNSGYSPVFWTTDTTFLEPPFSEQELVNYASRDHIQGVTSNHAGAENRVVSRILRINSSYDVVDTHLSTPLDDGRSVEGRIWLYEDGTFGFGFVGSNSIIDLRHVSSAGCILDT

SEQ ID NO: 4293 - protein, 296 aa, Rhodococcus ruber
VGRPVGPGVANIREGDHVVLAFIPACGRCRACAKGLQNICDEGANLLTGQAIADKTHRVTLNGDPVIQMCLLGTFAPYVTVHEASVIKIEDDFPLDKAALLGCGVATGWGSATAIGGTKVGDSVVVIGIGGVGINAVQGAAHAGARHVVAIDPVEFKRDQAKKFGATHTFASIEEALPVIGEITWGAMADVTIITVGEIHGDIIAPSMALTGKGGQVVVVGMGSAADTQVTLSLFELTLLQKRLQGAIFGGVGPRLQIPKLLDLYRSGQLELDKLVTKTYRLEDINDGYADMHEAR

SEQ ID NO: 4294 - protein, 333 aa, Ferroplasma acidarmanus
MKAYVLKEPGVLELINTEARKPDTGEVQIKTRACGICGTDFHAYNGKHLAVKYPVIPGHEFSGVITSIGEGVKSFMPGDRVVVDPNITCGQCEYCKGGKENFCENIKTVGINYPGGYGEYVTVPEKVVYKIPDTMSFEAAAIVEPVACIIHAFDNTHVPLGGSAIISGTGFIGLAFLQILKGMGYYPVYTMDTNPTRNLLAKKYGSDKIYTGIDDLMESDIIGKANVVVEATGSNSILSKTIDMASPSGKIFAFSVYPPGEKIEIESNKIYSKEISIFGDFVNPYTMRKAINMISSGLIDYSGMEDPVIKINDIGNLFQSGKRNFIKPLISYE

SEQ ID NO: 4295 - protein, 769 aa, Streptomyces antibioticus
MTLEEKLSFVHWSYHTSDESAKVYLPGVPRLGIPEMRATDGPAGITIHRPSLALPAPVALASTFDDGLARSYGAVIGREGRAFGQDVVFAPMVNSIRVPYAGRNFETFSEDPLVTSRMAAAEIKGIQSQGLIAATKHYAANNQEKNRFSVNVNVDEQTLRERELPGFESAVAAGTGSVMCAYNKVNGQPACGSDELLNKVLKEQWKFRGWVTSDWLATQSTDALTKGLDQELGIELDHEPAPGEPIPGGKFFGDPLKTAIREGRIPESALDEAVTRIVSQMARFRLLDEDPPARPARDLAGGLKVARQVAEDGAVLLRNEGATLPLTTETAADIAVIGPTAKVPKVTGLGSSYIVPDGASAPLDTIRERAGAGSTVRYSTGEETVGVPVPQSAPLPRPRPSGEVFPAGGGGVLYDGTITVPVTGSYRIAARAQGGNAYVELDGQEPFGRRPWVYGDVSSRPMRLAAGTHKLRITGAALAKSPMTFELTWVTPQAAQEAIDRAVSIARTARTAVVFAYDDGSEDGDRTSLSLPGRQDDLISAVAAVNPRTVVVLNTGSSLTMPWLRKTAAVLTMWYPGQAGAEATTALLFGDADPGGRLTQTFPADEGQTPFAGDARRYPGVDDQLDYSEGIYSGYRWYEQQGVQPLFSFGHGLCYTSFDYRDLKVTATADGGLDVCFTLRNTGTRTGKEVPQVYVGPSPHVRVAQAKRALAAYGKVELRPGESRRLTLHVERRALQNWDSGAHTWVTGPGRQVMVGPSLGRLPLSATAP

SEQ ID NO: 4296 - protein, 154 aa, Staphylococcus aureus
  unsure (1)..(154): unsure at all Xaa locations
KEGNDISIITYGAMVQESMKAAEELEKEGNDISNQSHRCKWFKKSNESXQKNLXKDGYSVEVIDLRTVQPIDVDTIVASVEKTGRAVVVQEAQRQAGVGAAVVAELSERAILSLEAPIGRVAAADTIYPFTQAENVWLPNKNDIIEKAKETLEF

SEQ ID NO: 4297 - protein, 110 aa, Zea mays
MEFCPVCGILLQIDPGTGSHRLRLFCPVCPYVCPILNKIVKKARLVKKEVEPISSTADEMKSAPKTAVTCQRCNHGEAYFKQMQIRSADEPMTTIYRCCKEECQHEWRED

SEQ ID NO: 4298 - protein, 350 aa, Glycine max
  unsure (1)..(350): unsure at all Xaa locations
MVAESWFRSLWKAPRKHDANSEKVVIEVLAFEIASLMSKLVNLWQSLSDKQIVRFREEITNSVGIRKLVSDDDHFIERLICLEILENMAHVAESVARLAKKCSDPILKGFGNAFYEFITTGSDPYGWEFTGKKMEKKIKRMXEKFISTNASLYQEMEVLAXDLEQTFTRVKANGESEWXTLMEYQKKVAWKRMEVKHLQDXSLWNRTYDYTILLLARALFTLFCKINHVFGLTEMVDVGRTTNSSVLNSDFIYRSQSVSTILQSSYQPSQNNIPRFSSGPLNAITARSGPIGQTTNKTSISHSGPLGDSSTKSGPILEKHSTNVNFYSGPLGRKFNPSVPVTGKEKKSKI

SEQ ID NO: 4299 - protein, 337 aa, Triticum aestivum
MGWKGVLGFDYGVVQAPLGPDISGPELAAAVANAGAIGLLRLPDWPAPDHVRELIRRTRSLTEKPFGAAIVLAFPHEENLRVVLEEKLAVLQVYWGEFPKERVDEAHRAGVKVLHQVGNLEEAAKAKEAGVDGIIVQGREAGGHVIGQEGLLPLLPRVVDLVSDSTVSVIAAGGIVDGRGYAAALALGAHGVCLGTRFVATEESFAHPLYKKKLIEMNCTDYTTVFGRARWPGAPQRVLKTPFYVEWKNLPDHETEENQPIIGHSIIHGVHKDIRRFAGTVPNATTTGDIDSMAMYAGQGVGLITGIVPAREVVERLVAEAQRVIGTKLSGFPKSSE

SEQ ID NO: 4300 - protein, 509 aa, Ralstonia solanacearum
MHTPITPTGLEGQSELRRRLRARHLTMIALGGAIGTGLFVASGASIAQAGPGGALFTYTLIGVMVYCLMTSLGELAVHLPVSGSFVTYSRLYVEEGFGFALGWNYWFALAVSVAVELAAAQLVMKYWFPGVSGMVWSAAFLLLMFVLNAFSVRGFGEAEYWFSMIKVVTIVVFLLIGLAMIFGIMKGGPQSGWHNFTVGDAPFVGGLPAMIGVAMIAGFSFQGVETIGVAAGEAENPARTIPRGIRQTFWRILLFYVLAILIIAVLLPYTDPNLLRNEATDIGVSPFALVFQHAGLAFAAGMMNAVVLTALLSSGTSSLYVSTRILYDLALEGQAPRWFARVSGNGVPHRALLATSAVGALCFFSSLFGDQVVYLWLLNTSAVTCFIAWFGIALAHYRFRKGFLHQGHTVDQLEYRSPFFPFGPILVAALCVIIILGQNTKALFAPIDNFGAFVATYCGVFLFVAIWLGYRWRYKTRFVRYEQMQFSPRHIRAAQAGDGGAALPGVAAD

SEQ ID NO: 4301 - protein, 220 aa, Triticum aestivum
  unsure (1)..(220): unsure at all Xaa locations
MENRSYYGGIGSGSGSKNPPPSGKEAGEGGYGGGYDRLDEEVEFRLPRGHRPVENLDTEGLEQASVDTRLAASNVGFRLLQKMGWKSGKGLGKNEQGILEPIKAGIRDAKLGXWGKQEQDDFFTPEDIVQRKRLNVELEETXEEHIKKAVRVTAEXREQKIRSEVKEIQKTFFCSLCNKQYKLPYEFESHLSSYDHNHRKRFKEMKESQRRSAAIRVASK

SEQ ID NO: 4302 - protein, 364 aa, Nicotiana tabacum
MAFQIARRLLRSRASSSIRYLDRSFSSESNSNLIRATLFPGDGIGPEIADSVRQIFKTAEVPIEWEEHYVGKEIDPRTNSFLTWESLESVRRNKVGLKGPMATPIGKGHRSLNLTLRKELNLYANVRPCYSLPGYKTRYDDVNLITIRENTEGEYSGVEHQVVRGVVESLKIITRQASLRVAEYAFHYAKAHGRERVSAIHKANIMQKTDGLFLKCCREVAEKYPEIKYEEVVIDNCCMMLVKNPALFDILVMPNLYGDIISDLCAGVIGGLGLTPSCNIGEGGIALAEAVHGSAPDIAGKNLANPTALLLSAVTMLRHLELHDKADRIQGAVLNTIAEGKYRTGDLGGTSSTTDFTNAICDHL

SEQ ID NO: 4303 - protein, 464 aa, Bacillus cereus ATCC 14579
MDKNLKKDLKIRHITMISIGGVIGAGLFVGSGAVVHSAGPGSIVSYALAGLLVIFVMRMLGEMAAVNPTSGSFATYAREAIGPWAGYTIGWLYWFFWVIVIAIEATAGAGIIQYWIPQIPLWLLSLILTILLTLTNVFSVKSFGEFEYWFSFIKVISIVLFLCLGLAVILGFVPGTEAPGTSNLIGQGGFMPNGISSVLLGITVVIFSFMGSEIVAVAAGESAEPVKAVKTATNSVIWRILVFFIGSIAVVVTLLPWNSANILKSPFVAVLEHIGIPAAAQIMNFIVLTAVLSCLNSGLYTNSRMLFSMAERGDAPKSFLKLNSSGVPVRAVLFGTFFAYIGVVFSYISPDKVFLFLVNASGGIALLVYLVIAVSHLKMRKKMGKVEQQNLKVKMWLFPYVTYVTIAAIIAVLVAMFAIDTLRSQALLTMFVTVLIILSYFIFNRNKNSTVLNPKSKNEESVRF

SEQ ID NO: 4304 - protein, 463 aa, Streptococcus pyogenes SSI-1
MEFRMSIKEQTDNNELENGMVRGLENRHVQLIAIAGTIGTGLFLGAGRSIALTGPSIIFVYMITGAFMFMMMRAIGEMLYYDPDQHTFINFISKYIGPGWGYFSGLSYWISLIFIGMAEITAVGAYVQFWFPSWPAWLIQLVFLVLLSSINLIAVRVFGETEFWFAMIKILAILALIATAIFMVLTGFETHTGHASLSNIFDHFSMFPNGKLKFFMAFQMVFFAYQAIEFVGITTSETANPRKVLPKAIQEIPTRIVIFYVGALVSIMAIVPWHQLPVDESPFVMVFKLIGIKWAAALINFVVLTSAASALNSTLYSTGRHLYQIANETPNALTNRLKINTLSRQGVPSRAIIASAVVVGISALINILPGVADAFSLITASSSGVYIAIYALTMIAHWKYRQSKDFMADGYLMPKYKVTTPLTLAFFAFVFISLFLQESTYIGAIGATIWIIVFGIYSNVKFK

SEQ ID NO: 4305 - protein, 199 aa, Leavenworthia crassa
SVGEGVTDLQPGDHVLPIFTGECGECPHCHSEESNMCELLRINTERGGMILDGESRFSINGKPIHHFLGTSTFSEYTVVHSGQVVKINPKAPLDKVCIVSCGLTTGLGATLNVAKPKKGQSVAVFGLGAVGLGAAEGARIAGASRIIGVDLNSNRFEEAKKFGVTEFVNPKEHNKPVQRVIAEMTNGGVDRSVECTGSV

SEQ ID NO: 4306 - protein, 463 aa, Oryza sativa
MTMRTTRLTATVPINIWIHTNTNGIVVLARLLPRDYKNGSFAAAPAAPPPPVHLGRRRCRCRDRDPRLDRLPQEPAAAAAGVAWHRGRPARAFSLFCAAAAAAGRSVFLAQAASMAAANGSACGGGGVDKEKEEFKQIYGVLKEELLRDPAFEFTDSSRQWIDRVMLFSPSPFSSCVADRMCFSSRIVSSGFSVGFRSGKCNRGLSVVDSYKLLKGTNVLSQEDMFLASTLGWCVEWLQAYFLVLDDIMDDSHTRRGQPCWFRVPQVGSIAINDGIILRNHITRMLRLHFRGKLYYADLLDLFNEVEFKTASGQLLDLITTHEGEKDLNKYNIGVHRRIVQYKTSYYSFYLPDDYLDCYGDPKFIGKIGTDIEDYKCSWLVVQALERADESQKSVLFENYGKKDPACVAKVKSLYRELNLEAVFLDYENESYKKLIADIEAQPSIAVQNVLKSFLHKIYKRQK

SEQ ID NO: 4307 - protein, 211 aa, Zea mays
MARPRSVAAAAPLLLLLLAAAAAGLVSAASPAASDFVRKSCRTTQYPSVCEQSLASYGGSPPPRSPRELARAALSVSADRARAASAYVGRLCGASNGKGAKKGSGSGSASAGPVRDCLDNLADSVGHLRDAAQEMGGAGMGRAGTPAFRWHLSNVQTWCSAALTDEDTCLDGLSSRAVDAGTRAAIRGKVVEVAQVTSNALALVNKVGPGY

SEQ ID NO: 4308 - protein, 307 aa, Vibrio alginolyticus
MNQVWVTGDAVVDLIPESETSLLKCPGGAPANVAVAIARLSGKSAFFGRVGDDPFGRFMQSILDQEGVCTEFLIKDPEQRTSTVVVDLDDQGERSFTFMVKPSADQFMSVEDMGNFKQGDWLHVCSISLANEPSRSSTFEAIKRAKAAGGFISFDPNLRDEVWQDQSEIQAVVMKAVAMADVVKFSEEELLFLTDSTSMAQGLQQIAAMNIALVLVTQGAKGVWRVFESQSELITGQVVSPIDTTGAGDAFVGGLLACLSRHADWKNHPVVSSAIQWANGCGALATTQKGAMTALPTQTELLRFIGQ

SEQ ID NO: 4309 - protein, 520 aa, Oryza sativa
  unsure (1)..(520): unsure at all Xaa locations
MAKTRKAAAAPPPPPPPPPAETPARRKGKKKGRPSLLDLQRRSLRLQAQNPSPAPSPSRRDANPSDEDDDGVGSGGRRRQKRLKSVLSSSGGGEDDEAPAAPVVVKVXVXXKKKKVSSKATXKGDAASDGGPTTGTPLPDKKLLLFILDRLQKKDTYGVFSEPVDHEELPDYHEIIEHPMDFSTIREKLLNDSYTTLEQFEARSIEALAKKDFENLRQASEPEEEQQPKTVPRRGRPPKYAKKIEKTENDVSPDLSNAKTKSADHAETIRKRPSKYGKKTTPTISDDERRSTYDQQYFHSSPLFSALGGERKVLVPVGLQQQHAYARSLARFAAKFGPVGWDIAAKRIRRLLPSGTNFGPGWVVDGEPPENSQWPRVPMLSDPSIQSTGVPASNVISKNDESNQKSGLTSNEDSGQGFLGQMQLTHAQVLGMFSGVNGRTNGFIHGHPLVANSIKAPQNGDVGKVATNPSPDAGHDSEAALSQTMTSSAPSLSAGVQPSGSMPSEKLANPKKHPDLALQL

SEQ ID NO: 4310 - protein, 228 aa, Oryza sativa; identical to SEQ ID NO: 1920

SEQ ID NO: 4311 - protein, 149 aa, Glycine max
ANIWDRARAYQTFVSFGSTFGLIPDIHSYNGLMYAFGKLKKTHEATRVFEHLVSLGLKPNAKSYSLLVDAHLINRDVKSALAVIDDMRAAGYEPSKEVLKKVRRRCMREMDNESDARVQSLVNSLNYRLGSENRRDILFNLNYSSMGYA

SEQ ID NO: 4312 - protein, 374 aa, Euonymus europaeus
ALSIAGAVQSQKLAVRAISRLQSLPGGDIKLLCDTVVESVRDLTGYDRVMVYKFHDDEHGEVVAESKRHDLEPYFGLHYPATDIPQASGFLFKQNRVRMIVDCHASPVRVIQDDRLIQPLCLVGSTLRAPHGCHAQYMENMGSKASLAMAVIINGNDEEVIGGRNATRLWGLVVCHHTSARCTPFPLRYACEFLLQAFGLQLNMELQLAAQLSEKHVLKTQTLLCDMLLRDSPTGIVTKSPSIMDLVKCDGAALYYQGKYYPLGVTPAEAQIKDIVEWLLAFHGDSTGLSTDSLADAGYPGAASLGDSVCGMAVAYITNRDFLFWFRSHTTEEIKWGGAKHHPEDKDDGQRMHPRSSFQAFLEVVKSRSFPWEN

SEQ ID NO: 4313 - protein, 450 aa, Zea mays
MRGSMSNYYDDYDDIDEIEDDYDMDDPADDMVDEQRGVRDSDAEDNDYGQPNDKIPDTSSADARNGRDIQGIPWEQLNITRKKYRQSRLEQYKNYENVPNSGEEAMKDCKPTEKGGMYYEFRRNTRSIKSTILHFQLRNLVWATSKHDIYLVSHYSIRHWSALSGVDTELINVQGHVAPREKHAGSLSEGFYQTQVSTLAVKDNLLVAGGFQGELICKHLDREGISFCCRTTYDDNAITNAVEIFNTSSGAVHFIASNNDSGVRYYDMERFQLFKHLQFEWPVNHASLSPDRKTVVIVGDDPDGLLIDANSGKTLHSIKGHRDYSFASAWSPDGRTFATGNQDKTCRIWDARNLSKSVHVLRGNLGAIRSIRFTSDGQFMSMAEPADFVHVYDVKSDYNKRQELDFFGEISGTSFSPDTDALFVGVWDRMYGSLLQFGRLYNYSYLDSVF

SEQ ID NO: 4314 - protein, 506 aa, Lolium rigidum
MNDDLVYVCSALAVSILAIAVVQLLKARQRLPPGPLNLPVIGSAHRLVNALPHRAMRDLAGVHGPLMYLRVGQVPLVVVTSKEVAREVLKTHDAIFATRPKLMAGDIVAYGSTDLLFCSTPGDYFRKLRRLCVQEILSNDRIRSYQDIREDEVRSLVEDIRAAGPSAPVDLSRKIYKLTNGIVSRAAFGMKSSKAEDFVAAIKHSFVYSTGFSIADLFPGFTGILSFLTGQRRTLEGVRDTIDGILEEIINEREQILKSGRSTASEKNLVEVLLGLQGNEDFGFPITRSTVKAVILDIFAGGTETSGTSMEWAMSELMANPKVMGKLQGEIRAAFGDKEFISEADLRASGGVMKYLGLVIKETFRLHPPAPILVPRESTEACEINGYVIPAKTRVVINSWAIMRDPRYWEDAEEFRPERFEGGRMDFLGGNFEYTPFGSGRRMCPGYNYGMASMELTLVQLLHSFDWSLPDGVDQLDMTEIVSLSLTRKTHLMLRAAPHRAPLPSS

SEQ ID NO: 4315 - protein, 385 aa, Bacillus subtilis subsp. subtilis str. 168
MSSLFQTYGRWDIDIKKAKGTYVEDQNGKTYLDFIQGIAVSNLGHCHEAVTEAVKKQLDSVWHVSNLFQNSLQEQAAQKLAGHSAGDLVFFCNSGGQANEGAYKLARKATGKTKIITFLQSFHGRTYAGMAATGQDKIKTGFGPMLGGFHYLPYNDPSAFKALGEEGDIAAVMLETVQGEGGVNPASAEFLSAVQSFCKEKQALLIIDEIQTGIGRTGKGFAYEHFGLSPDIITVAKGLGNGFPVGAVIGKKQLGEAFTPGSHGTTFGGNMLAMAAVNATLQIVFQPDFLQEAADKGAFLKEQLEAELKSPFVKQIRGKGLMLGIECDGPVADIIAELQTLGLLVLPAGPERDSAAAPLTVTKDEIAEAVSKLKQAIAHHSAVNQ

SEQ ID NO: 4316 - protein, 1156 aa, Glycine max
MLQQAERRIPPFRRRKSTPHEQRLSHHSSNNNNNIDSMSKAIAQYTEDGVHAVFEQSGESGRSFNYSESIRIASESVPEQQITAYLVKIQRGGFIQPFGSMIAVDEPSFRILGYSDNARDMLGITPQSVPSLDDKNDAAFALGPQSVPSLDDKNDAAFALGTDVRALFTHSSALLLEKAFSAREISLMNPIWIHSRTSGKPFYGILHRIDVGIVIDLEPARTEDPALSIAGAVQSQEALVRAISQLQSLPSADVKLLCDTVVESVRELTGYDRVMVYKFHEDEHGEVVSESKRPDLEPYIGLHYPATDIPQASRFLFKQNRVRMIVDCHASAVRVVQDEALVQPLCLVGSTLGAPHGCHAQYMANMGSIASLVMAVIINGNDEEGVGGRSSMRLWGLVVCHHTSARCIPFPLRYACEFLMQAFGLQLNMELQLAAQSLEKRVLRTQTLLCDMLLRDSPTGIVTQSPSIMDLVKCDGAALYFQGNYYPLGVTPTEAQIRDIIEWLLAFHGDSTGLSTDSLGDAGYPGLPRLGMQFVGWQVAYITEKDFLFWFRSHTAKEIKWGGAKLILRTRMMGQRMHPLSSFKAFLEVVKSRSLPWENAEMDAIHSLQLILRDSFKDAEHRNSKAVVDPHVSEQELQGVDELSSVAREMVRLIETATAPIFAVDVDGHVNGWNAKVSELTGLPVEEAMGKSLVHDLVFKESEETVNKLLSREEDKNVETKMRTFGKEHQNKAAFLVVNACSSKHFTNNVVGVCFVGQNVTGQKIVMHKFINIQGDYKAIVHSPNPLIPPIFASDDNTCCLEWNTAMEKLDPSNENVTVGGVDVIGKMLVGEVFGSCCQLKGSDSITKFMIVLHNALGGQDTDKFPFSFLDRHGKYVQTFLTANKRVNMEGQIIGAFCFLQIMSPELQQALKAQRQQEKEFLGRMKELAYICQGVKKPLSGIRFTNSLLEATSLTNEQKQFLETSVACEKQMLKIIRDVDLESIEDGSLELEKGEFLLGNVINAVVSQVILLLRERNLQLIRDIPEEIKTLAVYGDQLRIQQVLSDFLLNIVRYAPSPDGWVEIHVRPRIKQISDGLTLLHAEFRMVCPGEGLPPELIQDMFNNSRWGTQEGLGLSMSRKILKLMNGEVQYIREAERCYFYVLLELPVTRRSSKKC

SEQ ID NO: 4317 - protein, 500 aa, Euphorbia lagascae
MEQKNLSFPSILISFLLVLILVVVMRLWKKQNPPPGPWKFPIIGNLPHLLLTSDLGHERFRALAQIYGPVMSLQIGQVSAVVISSAEAAKEVMKTQADAFAQRPIVLDAQIVFYNRKDVLFASYGDHWRQMKKIWILEFLSAKKVQSSRLIREEEMEDAITFLRSKAGSPVNITKIIYGIIISIMIRTSVGNCKQKERLLSVADAVNEAATSFGTADAFPTWKLLHYIIGAESKPRRLHQEIDDILEEILNEHKANKPFEADNLMDVLLNLQKNGNVPVPVTNESIKASVLQMFTAGSETTSKATEWVMAELMKNPTELRKAQEEVRQVFGEMGKVDESRFHDLKFFKLVVKETLRLHPPVVLIPRECRETTRIDGYEIHPNTRIVVNAWAIGRDPNTWSEPGKFNPERFKDCAIDYKGTTFELVPFGAGKRICPGITSAITNLEYVIINLLYHFNWELADGITPQTLDMTEAIGGALRKKIDLKLIPIPYQVSLGSNIS

SEQ ID NO: 4318 - protein, 400 aa, Chlorobium tepidum TLS
MNTPAINLETEKQLFFHNYARLPLDIASGKGSFLYTASGERYLDMIAGVGVNAIGYGDKRLEQAITEQASKYIHVSNLFMQKPQFDLAAKLLEISRMSKVFFCNSGTEAIEAAIKLARRFAARNGDTDKTQVLSLTNCFHGRTYGALSLTAKPKYVDGFEPLVPETGMIDFNDVEDLERKVSNRTAAVFVEFVQGEGGIHKVSEAFIAKLKELAKEHDFLIVADEIQAGCGRTGAFFSYMPFDIQPDLVCVAKPLGGGLPLGAIIGSEKVAEVFTPGSHGTTFGGNPVACAAGLAMIEAILADGLMQNALEVGSMMRTAFEKMAEKHAQILEIRQYGLMIGVTVHREAKYYVEEALKRGVLVNATSNNVIRLLPPLSISKEEAQLCLDTLDAIFTEEAKA

SEQ ID NO: 4319 - protein, 406 aa, Oryza sativa
  unsure (1)..(406): unsure at all Xaa locations
ATRASILKLCRRLQLCRHLFSSGSFKSSLLLLPSSSGWHHHSIYTISLLLPRSLFANGQATQQGRDRRREQRRLXXSGVCGGGGGGSGEVEPRRRQKRPRRSAPRDCPSQRSSAFRGVTRHRWTGRFEAHLSRGNTWNESQSKKGRQVYLGAYDGEEAAARAYDLAALKYWGHDTVLNFPLSTYDEELKEMEGQSREEYIGSLRRKSSGFSRGVSKYRGVASCFIXRHHHNGKWEARIGRVFGNKYLYLGTYATQEEAAVAYDIAAIEHRGLNAVTNFDINLYIRAPPPPPPSKTMISPKPSPPRCKASTSSPSSPATTRQLQTADDDDDDLVAQLPPQQPTVPKDDQYNVDMSSVAAARCSFPDDVQTYFGLDDDGFGYPEVDTFLFGDLGAYAAPMFQFELDVX

SEQ ID NO: 4320 - protein, 338 aa, Haemophilus somnus 2336
MAILVTGGAGYIGSHTVVELLNHHFEIVVLDNLSNSSEVSLQRVQQITGKNITFYQGDILDREILQRIFSTHKIEAVIHFAGLKAVGESVKKPLHYYQNNVNGSITLLEEMLKAGIYNLVFSSSATVYGDPEIIPITETCKVGGTTNPYGTSKFMVERILQDAVSANPHLSVVILRYFNPVGAHESGLIGEDPNGIPNNLLPYISQVAVGKLPQLSVFGSDYDTHDGTGVRDYIHVVDLAIGHLKALEKHQNDPGCHIYNLGTGIGYSVLDMVKAFEKANDIQIPYKLVERRPGDIATCYSNPQKALEKLGWKTERDLTQMMKDTWNWQKNNPNGYKS

SEQ ID NO: 4321 - protein, 769 aa, Bacteroides thetaiotaomicron VPI-5482
MNVVAFAQSSLLPYKNPVLSVDERVKDLLSRMTLEDKVGQLLCPLGWEMYEIKDDEVHPSEKFKRLMKEKNAGMLWATYRADPWTKKTLENGLNPELAAKAGNALQKYVIENTRLGIPLFLAEEAPHGHMAIGTTVFPTGIGMAATWSPTLIEEVGNVIAKEIRSQGAHISYGPVLDLSRDPRWSRVEETFGEDPVLSGRLGAAMILGLGSGDLSCEYATIATLKHFLAYAVPEGGQNGNYASVGTRDLHENFLPPFREAIDAGALSVMTSYNSIDGVPCTANHYLLTQLLRNEWRFRGFVVSDLYSIEGVHESHFVAPTIEEAAMQAVSAGADIDLGGDAFMNLTHAVQFGKISEAVIDTAVCRVLRMKFEIGLFEHPYVNPKTATKIVRSKDHIKLARKVAQSSIVLLKNENSILPLNKKIKKVAVVGPNADNRYNMLGDYTAPQEDENIKTVLDGVISKLSPSKVEYVRGCAIRDTTVNEIAEAVEAASRSEVIIAVVGGSSARDFKTSYQETGAAIADEKSISDMECGEGFDRATLTLLGKQQDLLIALKATGKPLIVVYIEGRPLDKVWASEYADALLTASYPGQEGGYAIADVLFGDYNPAGRLPVSIPRSVGQIPVYYNKKAPRNHDYVEQAASPLYTFGYGLSYTTFEYSDLQVIRKSPCHFEVSFKVKNTGSYDGEEVAQLYLRDEYASVVQPLRQLKCFERFFLKRGEEKEIFFTLTEKDLSIIDRNMKRVVETGDFRIMIGASSDDIRLTKDISVESL

SEQ ID NO: 4322 - protein, 413 aa, Oryza sativa (japonica cultivar-group)
MARLLLSGVAPLPLLPCRRRAIAFALPLGNVRLRLRVAAPTSRVATVEEDDNENNAPPPPCEDFDPGAAPPFGLADIRAAIPKHCWVKDPWRSMGYVLRDVVVVFALAAAAARLHSCLAWPLYWAAQGTMFWALFVLGHDCGHGSFSNNSRLNSVMGHILHSSILVPYHGWRISHRTHHQNHGHVDKDESWHPLPERLYRSLNRATRMLRFSIPFPMLAYPFYLWSRSPGKSGSHFHPSSDLFQPNERNDVLTSTACWVAMAALLAGLTFLMGPLLMLNLYFVPYWIFVMWLDFVTYLHHHGHNDKLPWYRGKEWSYLRGGLTTVDRDYGWINNIHHDIGTHVIHHLFPQIPHYHLIEATEAAKGVMGKYYREPDKSGPFPLHLFGALSRSLKRDHYVSDTGDVVYYQTDPAN

SEQ ID NO: 4323 - protein, 143 aa, Glycine max
  unsure (1)..(143): unsure at all Xaa locations
LPPCRRVLVFKIFSPLTLQGQHDELEAKFFEERAALXAKYQKLYQPLYTKRYEIVNGTTEVEEGAVKETAPDNEEDQEKGVPAFWLTAMKNNEVLAEEISXRDEGALKYLKDIKWSRIENPKGFRLDFFFDTNPYFTKXCLDK

SEQ ID NO: 4324 - protein, 218 aa, Candida albicans
MNRLFGTKSTAPKPSLNDAIKGIDERVGSLDVKLSKINSELSTYQQKISRMRDGPGKSALKQKAIKLLRQRKQIEAQKDQLENQSWNMTQASMTTDNLQNTMVTINAMKTANKSLKQTYGKINIDELEDLQDEMLDLIDKSNELQEALSTSYDVPDDISESELDAELEALGEEIDFENEMAESGIGAPSYLNDTEPTAADKLPTFIDEQPEEAQKIAN

SEQ ID NO: 4325 - protein, 973 aa, Adiantum capillus-veneris
MSSKTMTYSSSAAEPRSSSSSVVGSKHNRRVVVAQTTADAKLHAVFEQAQSEGDTGGSSFDYMRSIEDARGSVLSERVPAQAVTAYLQRMQRGGLIQPFGCMLALEEGSFRVIAYSENAAEMLDLMPQSVPSVGVQVLVLGIGTDARTLFTYASAAALEKASGAVDVSMLNPITVHCRSSSKPFNAIVHRIDVGLVIDFEPVRPADVAVWAAAGALQSHKLAAKAISRLQALPVGDIDLLCDSVVEEVRELTGYDRVMAYKFHEDEHGEVLAEIRRSDLEPYLGLHYPATDIPQASRFLFMKNRVRMICDCRALPVRVIQDKELRQPLSLAGSTLRAPHGCHSQYMANMGSIASLVMAVVVNDNDEDVSNRSQQPKMRRLWGLVVCHHTTPRAVPFALRSACEFLMQVFGLQLNMELELAAQMREKHILRTQTLLCDMLLRDAPIGIVSESPNIMDLVKCDGAALYYGKNFWLLGTTPIEAQIKDLAEWLLDVHRDSTGLSTDSLADAGYPGAAALGDAVCGMAAAKITTRDFLFWFRSHTAKEIKWGGAKHDPEDRDDGRKMHPRSSFKAFLEVVKRRSLPWEDMEMDAIHSLQLILRGSFQDIDDSDTKTMIHARLNDLKLHGMDELSTVANEMVRLIETATAPIFAVDAGGFINGWNAKVAELTGLTVEEAMSRSLVRDVVVNASMETAERVLDLALQGQEEQNVEIKLKTYGDQAIKGPVILIVNACSSRDFTDNVVGVCFVGQDVTGQKVVMDKFTRIQGDYKTIVQNPNPLIPPIFGADEFGYCSEWNPAMEKFSGWKREDVIGKMLIGEVFGSDLACCKLRGQDSMTKFMIILNAAMGGRDSDRFPFGFFDRYGKYAEALLIANKRTDSDGAITGVFCFLHTASPELQQALQVQKRSARTALDRLKEVAYMKQEIRNPLYGIVFTRKLLDNTNLTDEQKQIMETSSLCEKQLQNILDEDNFEKLDQ

SEQ ID NO: 4326 - protein, 238 aa, Pseudomonas syringae pv. tomato str. DC3000
MTLDWHGAWMSVIHHPLFGIAVTLGAYQMAMAAYEKTRWLFLQPVLVSMVVVIGVVLVCDLEYTEYRKSTEILSTLLGPATVALAVPLYLNMRRIRQLFWPVLTTLVIGGVFATGLCVGLGVLFGADHMILMTMAPKSVTSPIAMLVAEQIGGVAALAAVFVLITGVFGAIFGPGLLSLAGVDNPAARGMALGLTAHAVGTSVALQEGEESGAFAALAMSLMGVATALFLPLAMSLAI

SEQ ID NO: 4327 - protein, 344 aa, Oryza sativa
  unsure (1)..(344): unsure at all Xaa locations
MASSLSKSDKKKVLDFAAWSFNITTSVGIIMVNKALMATHGFSFATTLTGLHFVTTTLMTIVFRWLGLSQPSHLPLPDLIKFVIFSNLSIVGMNVSLMWNSVGFYQIAKLCMIPASCLLEVVFDHVHYSRDTKLSIMVVLIGVAVCTVTDVSVNAKGLAAAVIAVWSTALQQYYVHFLQRKYSLNSFNLLGHTAPAQAGSLLLVGPFVDFLLTGKRVDHFGFTSIALFYLTMAFLSFXQFFLTLSCVIAIGVNLSQFICIGRFSAVSFQVLGHMKTVLVLSLGFLFFGKEGLNFQVVLGMILAVVGMIWYGNASAKPGGKERRSVLPVRSEKPSGALDEKDGSE

SEQ ID NO: 4328 - protein, 574 aa, Neurospora crassa
MASPGFPPRHLDATTGREVVYCYGCENEWYRDDYPHLDLECPRCHNDFVQIVEPDNDPRPGVQQQGHRSDSDPEEDDIEQFLERGPGSFFMRRSVYQSPDSPFNRSSGNGLEDLDSSPDRPRARPDDPGEAVLSRFADMFVELSGARPGQQGGNAFGTQPRIQRTTFTRAGDGMASFTFTTTTTAGGPAGDGPEAPAFDTLFRGLFGNIPPPGAEDPGGGQGQGQGGGPRGPPLGFATGLQDFIATLLNPQAAVHGDAVYTQEALDRIITTLMEANPQSNAAPPATQAAIEKLPKKILDEQMVGPEGKAECTICIDDMYKGEEVTVLPCKHWFHGECVTLWLKEHNTCPICRMPIEGNNPSGSNSNNNNNNNSQPSASRQEASTNSASAFASSSAPGRNPFESLNPFGSQAQSARERLRRSEQEREERLERIRNVAGIRRTDSQSEGISRRTSHSPPSRENSRFDMRSRDRDPSPPRDRGTSTAWQPNPSSNSQSNISSRYSGGLNNLWGRNNGNNGEGNSRDRDGQQQQNQQQQQQQQSSSSGNGALGWLRDHFGRGSSGSGSGADRDRERRR

SEQ ID NO: 4329 - protein, 396 aa, Pseudomonas syringae pv. tomato str. DC3000
MSGPQHITILGATGSIGLSTLDVVARHPTLYQVFALTGFSRLDELLALCIKHTPQYAVVPEQVAARKLQDDLAAAGLDTRVLVGEGGLCEVAAHPMVDAVMAAIVGAAGLRPTLAAVEAGKKVLLANKEALVMSGALFMQAVRQSGAVLLPIDSEHNAIFQCLPGDFARGLGAVGVRRIMLTASGGPFRETPLEQLQDVTPEQACAHPVWSMGRKISVDSATMMNKGLELIEACWLFDARPDQVEVVIHPQSVIHSLVDYVDGSVLAQLGNPDMRTPIANALAWPARVDSGVAPLDLFRIGQLDFQEPDEERFPCLRLARQAAEAGGSAPAMLNAANEVAVAAFLDGRIRYLEIAGIIEEVLNREPVTAVVGLDAVFAADAKARLLAGQWLERNER

SEQ ID NO: 4330 - protein, 388 aa, Glycine max
MGDTVVAEVPAKRGRGRRALKEKTPSTNDANIIIATPISPSSDKAQVPSKKKQDSKKQQSFEKELLEMQEMLQQMRLEKEKTEELLKLKDEALKQKDEELKNRGREQEKLQSELKKLQKLKEFKPTMNLPVLKDNEEKKDKKKKGCSEKKRPSPPYILWMKDQWNEIKKANSEAEFKEISTMLGSKWKTVTAEEKKPYEEIYHAEKEAYLQMIAKEKRETEAMRLLEDEQKQKTAMELLEQYMQFKQEAEKEGKKNKKEKDPLKPKHPMSAYFLFTNDRRAALAAENKNFLEVPKITAEEWKNMTEEQKRPYEEMAKKNKEQYALEMEAYKQKKDEEAAHFMKEEEEQMKLQKQEALQLLKKKEKTENIIKKTKQKNKQNKDDKNSDP

SEQ ID NO: 4331 - protein, 185 aa, Rhodobacter sphaeroides
MSRTIAIAAAALLAAPALAQDVPARAENATAAPGQPGFPERTATFMSVEGTPLGKATIAPLPHGVLFTLDLQGLPPESWLGFHIHETGECDTGTGFKSAGGHFSIAETEHGLMVEAGPHSGDMPNQYVGADGILRAQVFNTFVQLGGENASDLTGRALMLHSGPDDYVSQPAGDAGDRLACAVIE

SEQ ID NO: 4332 - protein, 360 aa, Aralia cordata
MGSLEAERKTTGWAARDPSGVLSPYTYTLRETGPEDVFIKIIYCGICHTDIHQIKNDLGASNYPMVPGHEVVGEVVEVGSDVTKFKVGDCVGDGTIVGCCKTCRPCKADVEQYCNKKIWSYNDVYTDGKPTQGGFSGHMVVDQKFVVKIPDGMAPEQAAPLLCAGVTVYSPLTHFGLKEISGLRGGILGLGGVGHMGVKLAKAMGHHVTVISSSDKKKEEAIDHLGADAYLVSSDATQMQEAADSLDYIIDTVPVFHPLEPYLSLLKLDGKLILMGVINTPLQFISPMVMLGRKAITGSFIGSMKETEEMLDFCNEKGITSTIEVVKMDYINTAFERLEKNDVRYRFVVDVAGSKLDQET

SEQ ID NO: 4333 - protein, 341 aa, Oryza sativa (japonica cultivar-group)
MDHRELWPYGLRVLVIDDDCSYLSVMEDLLLKCSYKVTTYKNVREAVPFILDNPQIVDLVISDAFFPTEDGLLILQEVTSKFGIPTVIMASSGDTNTVMKYVANGAFDFLLKPVRIEELSNIWQHIFRKQMQDHKNNNMVGNLEKPGHPPSILAMARATPATTRSTATEASLAPLENEVRDDMVNYNGEITDIRDLGKSRLTWTTQLHRQFIAAVNHLGEDKAVPKKILGIMKVKHLTREQVASHLQKYRMQLKKSIPTTSKHGATLSSTALDKTQDHPSRSQYFNQDGCKEIMDYSLPRDDLSSGSECMLEELNDYSSEGFQDFRWDSDKQEYGPCFWNF

SEQ ID NO: 4334 - protein, 342 aa, Glycine max
  unsure (1)..(342): unsure at all Xaa locations
MDRGDQMTLPGSASYYMQRGIPGAGKQPELHNSPNIRPLSNPNLPFQSSIGGGGTIGSTLPLESSGISAPCVNVRAPSGALPGETVKRKRGRPRKYGPDGAVSLALTPTPASHPGALTQSQKRGRGRPPGSGKKQQLASLGELMSGXEWDLFTPHIINIAEKTLQQKSFLSFSQQGPRASANGATVGSVSTVTSXQPFNIIIGGTVTYEGRFEIVCLSGSYLVADSGGSRNRTGGLSVSLASPDGRVIGGGVGGVLIAASPVQVILGSFSWGASKTKIKKKEGSEGAEVAMETDHQTVHNPVAVNSISPNQNLTPTSSLSPWPASRPLDMRNSHIDIDLMRG

SEQ ID NO: 4335 - protein, 161 aa, Glycine max
  unsure (1)..(161): unsure at all Xaa locations
AGQILAEDFTGSAILKNVGIHGHHTNVKVMCADVTCPNLHISEGSADLILSKWILMYLSDIEDDTLSAMLIXRPKVGGYVLFRLSCVHQSGHSKRNFHPTDYREPIFHTEVFKECRMSDDTMNSLVLWLAGXQCIGAYVRHEKSHTQICWVWTNLRSQADR

SEQ ID NO: 4336 - protein, 271 aa, Triticum aestivum
MPFATELTKRLGIRVPVVQGGMMHVGTADLASAVSNAGGLGLITALIFPTPEELRKEIQRCRTLTKNPFGVNITLLPSMVPPNYAAFAQTIIDEGIKVVETAGNSPGPVITQLKKAGIIVLHKCTTIRHAQSAVKLGVDFLSIDGFECAGHVGESDITNFILLSKARQTLGVPFIASGGFADGYGLAAALCLGACGINMGTRFMCTVEAPVHIKVKEEIVRAQETDTTLLLRRWTNTTRLYKNKVAMDALEIEKKSESGEFAEVAPYMSGS

SEQ ID NO: 4337 - protein, 363 aa, Pisum sativum
MDRRFLFALFLFAAVATAVTDDTNNDDFIIRQVVDNEEDHLLNAEHHFTSFKSKFSKSYATKEEHDYRFGVFKSNLIKAKLHQNRDPTAEHGITKFSDLTASEFRRQFLGLKKRLRLPAHAQKAPILPTTNLPEDFDWREKGAVTPVKDQGSCGSCWAFSTTGALEGAHYLATGKLVSLSEQQLVDCDHVCDPEQAGSCDSGCNGGLMNNAFEYLLESGGVVQEKDYAYTGRDGSCKFDKSKVVASVSNFSVVTLDEDQIAANLVKNGPLAVAINAAWMQTYMSGVSCPYVCAKSRLDHGVLLVGFGKGAYAPIRLKEKPYWIIKNSWGQNWGEQGYYKICRGRNVCGVDSMVSTVAAAQSNH

SEQ ID NO: 4338 - protein, 242 aa, Corylus avellana
MEFQNQSMSVSPQRKLGRGKIEIKRIENTTNRQVTFCKRRNGLLKKAYELSVLCDAEIALIVFSSRGRLYEYANNSSVKTTIERYKKACADSSNSGSVSEANTQFYQQEAAKLRGQIRSVQDSNRHMLGEALSELNFKELKNLEKNLEKGINRIRSKKNELLLAEIEYMHKREVDLHNNNQFLRAKIAENERNQQNLNVMPGGGNYELMQSQSFDSRNYFQVDALQPNHHYPRQDQMALQLV

SEQ ID NO: 4339 - protein, 214 aa, Paeonia arietina
IVESVGEGVTDVKPGDHVLPIFTGECKECRHYKSEESNLCDLLRINTDRGVMLNDGKSRFSINGQPIFHFVGTSTFSEYTVLHVGCLAKINPEAPLDKVCVLSCGISTGLGATLNVAKPKKGSTVAIFGLGAVGLAAAEGARIAGASRIIGVDLNPKRFDEARKFGVTEFVNPKDYNKPVQEVIAEMTGGGVDRSVECTGSIMAMMSAFECVHD

SEQ ID NO: 4340 - protein, 153 aa, Triticum aestivum
  unsure (1)..(153): unsure at all Xaa locations
MVKAVAVLGSSDGVKGTIFFTQEGDGPTAVTGSVSGLKPGLHGFHVHALGDTTNGCMSTGPHYNPASKEHGAPEDENRHAGDLGNVTAGADGVANINVTDSQIPLXTGPNSIIGRAVVVHADPDDLXGKGGHELSKSPGNAGGRVPCGDHDQG

SEQ ID NO: 4341 - protein, 352 aa, Zea mays
MASGEGVVDQLYEAAGGEAVAKIEGEAKVEAEAKMETEEPVLYLDLTSYQLHDLSEVEIPPTLEEVDLTANRLSSVDPRIGQLPHLRKLSFRQNLLDDDAVAPLTSWEAIAGLKEFVLRDNKLTRIPDAGIFKDLLVFDVSFNEISSLTGLSKVSIKLKELYVSKNEVAKMEELEHFHALEILELGSNRLRVMENLETLTNLQELWLGRNRIRAVNLCGLKLIKKISLQSNRLTSMHGFQECAALEELYLSHNGIQKMEGLSTLHNLRILDVSANKLTTIENIETLTRLEDLWLNDNQIPSLEGIETALAGSREKLTTIYLERNPCAKTPDYSSTLRKIFPNLEQIDSDIIA

SEQ ID NO: 4342 - protein, 274 aa, Archaeoglobus fulgidus DSM 4304
MNRIAKLLKTKYPIVQGPMAGITLGEFASTVSEAGGLGVIASAGLSPEKLKEEIEKVKNRTDKPFAVNIPIYQPGSEKNLETALKADVGIIYTSAGSPEKYTERVKESGAKVIHKVSRLKEGLKAEKAGVDAVVAMGFEAGGIIGRSGVTSFCLIPELADNLSIPVVAAGGIADERGFAAALILGAEGVEIGTRLLATKECPVPESIKQAILKATCDSTMVIESPVVMRALKPELSGDSENPALGGQVSGLIKEILTVEEVIRKIAEGLNKAKF

SEQ ID NO: 4343 - protein, 559 aa, Prunus dulcis
  unsure (1)..(559): unsure at all Xaa locations
MGSLEEERSLLEDGLIQDETNGLYTGDGSVDITGKPVLKQSTGNWXACPFILGTECCERLAFYGISTNLVTYLTHKLHEGNVSAARNVTTWSGTCYLTPLIGAVLADAYWGRYWTIAIFSTIYFIGMCTLTISASVPALKPPQCVDSVCPSASPAQYGVFFFGLYLIALRTGGIKPCVSSFGADQFDDTDSRERVKKGSFFNWFYFSINIGALVSSTLIVWVQDNAGWGLGFGIPALFMGIAIVSFFSGTPLYRFQKPGGSPLTRMCQVLVASFRKWNLDVPRDSSLLYETQDKGSAIKGSRKLEHSDELNCLDKAAVISETETKTGDFSNPWRICTVTQVEELKILIRMFPIWATGIVFSAVYAQMATMFVEQGMMMDTSVGSFTIPPASLSSFDVISVIFWVPIYDRFIVPIARKFTGKERGFSELQRMGIGLFLSVLCMSAAAVVEMKRLQLATELGLVDKEVAVPLSIFWQIPQYFLLGAAEIFTFIGQLEFFYDQSSDAMRSLCSALSASDDFIGKLSELFDSDIVTYFTTQGGKAGWIPDNLNDGHLDYFSGS

SEQ ID NO: 4344 - protein, 372 aa, Oryza sativa (japonica cultivar-group)
MLLDLNVESPERSGTSSSSVLNSGDAGGGGGGGGGGGLFRFDLLASSPDDDECSGEQHQLPAASGIVTRQLLPPPPPAAPSPAPAWQPPRRAAEDAALAQRPVVAKKTRRGPRSRSSQYRGVTFYRRTGRWESHIWDCGKQVYLGGFDTAHAAARAYDRAAIKFRGLEADINFNLSDYEDDLKQMRNWTKEEFVHILRRQSTGFARGSSKFRGVTLHKCGRWEARMGQLLGKKYIYLGLFDTEVEAARAYDRAAIRFNGREAVTNFEPASYNVDALPDAGNEAIVDGDLDLDLRISQPNARDSKSDVATTGLQLTCDSPESSNITVHQPMGSSPQWTVHHQSTPLPPQHQRLYPSHCLGFLPNLQIQILFKS

SEQ ID NO: 4345 - protein, 778 aa, Thermotoga maritima
MELYRDPSQPIEVRVRDLLSRMTLEEKVAQLGSVWGYELIDERGKFSREKAKELLKNGIGQITRPGGSTNLEPQEAAELVNEIQRFLVEETRLGIPAMIHEECLTGYMGLGGTNFPQAIAMASTWDPDLIEKMTTAVREDMRKIGAHQGLAPVLDVARDPRWGRTEETFGESPYLVARMGVSYVKGLQGEDIKKGVVATVKHFAGYSASEGGKNWAPTNIPEREFKEVFLFPFEAAVKEANVLSVMNSYSEIDGVPCAANRKLLTDILRKDWGFEGIVVSDYFAVKVLEDYHRIARDKSEAARLALEAGIDVELPKTECYQYLKDLVEKGIISEALIDEAVTRVLRLKFMLGLFENPYVEVEKAKIESHRDIALEIARKSIILLKNDGILPLQKNKKVALIGPNAGEVRNLLGDYMYLAHIRALLDNIDDVFGNPQIPRENYERLKKSIEEHMKSIPSVLDAFKEEGIEFEYAKGCEVTGEDRSGFEEAIEIAKKSDVAIVVVGDKSGLTLDCTTGESRDMANLKLPGVQEELVLEVAKTGKPVVLVLITGRPYSLKNVVDKVNAILQVWLPGEAGGRAIVDIIYGKVNPSGKLPISFPRSAGQIPVFHYVKPSGGRSHWHGDYVDESTKPLFPFGHGLSYTKFEYSNLRIEPKEVPPAGEVVIKVDVENIGDRDGDEVVQLYIGREFASVTRPVKELKGFKRVSLKAKEKKTVVFRLHMDVLAYYNRDMKLVVEPGEFKVMVGSSSEDIRLTGSFSVVGEKREVVGMRKFFTEACEE

SEQ ID NO: 4346 - protein, 439 aa, Triticum aestivum
MSFRSIVRDVRDGFGSLSRRGFDVRFLGHRRGKSHSAVHELHDPAPVIQSSCWANLPPELLHDVIERLEASEATWPSRKHVVACAAVCRTWREMCQEIVKNPEFCGKITFPVSLKQPGPRDGTIQCFIKRDKSTQTYYLYLCLTSAVVAENGKFLLLAKRHSRPTCTEYTIFMNTDNTSRSSNMYIGKLRSNLLGTKFVIYDTQHPCNIPNVSQSGKTSRRFYSRKVSPKASPSTYSIAQVSYELNVLGTRGPRRMNCVMNSIPASSLVAGGTVLCQPDSAVAHSLDESFGSISFSKSSIRDRSIRFSSTRFSGISIGGSRNGGQALGDNDECKEWPLTLRNKAPRWHDQLQCWCLNFKGRVTVASVKNFQLVAATESTAEAPTPSQPAPPPPSEHDKVILQFGKGAKDMFTMDYRYPLSAFRAFAICLSSFDTKLACE

SEQ ID NO: 4347 - protein, 392 aa, Janusia californica
DLEPVNLADVPVTAAGALKSYKLASKAISRLQSLPSGNISLLCDVLVKEVRDLTGYDRVMVYKFHEDEHGEVVFECRRSDLESYLGLHYPATDIPQASRFLFMKNKVRMICDCLAPPVKVIQDERLPQPLSLCGSTLRSPHGCHAQYMTNMGTIASLVMSVTVNEDDDTMDGDQQQMTRKLWGLVVCHHTSPQFVPFPLRYACEFLIQVFGVQINKEVELAAQVREKHILQIQTMLCDMLLRDAPVAIITQSPNVMDLVKCDGAALYFKNKTWLLGVTPTEEQIRGIAEWLLKYHSGNTGLSTDSLMEAGYPGASGLGDAVCGMAAVSITSRDFLFWFRSHTAKEIKWGGAKHDPDDKDDLRKMHPRSSFKAFLEVVKWRKMPWEDIEMDAI

SEQ ID NO: 4348 - protein, 393 aa, Actinobacillus pleuropneumoniae serovar 1 str. 4074
MNSNDIKQLDADYIAQTYGRFNLALSHGKGCDVWDFEGNQYLDFTSGIGTNSLGWADDGWLAAVTTQAGKLQHTSNIFFTEPSAVLAKSLVEASGLKRVFFCNSGAEANEGAIKTARKYSHDKYGKGRATLLSLVNSFHGRTISTLAATGQDVFHQHFFPFTQGFEHTPANDLDALHARIEQDDVCAIILEIVQGEGGVCALDTEYLQGVQAICQAKDIILIIDEVQTGIGRTGKLFAYQHFGLQPDIITLAKGLGGGLPIGAFVLGGKCQNTLGKSDHGSTFGANPVCCAAANAVLAKIDEKFLADVAAKGEKLRAALLTLPKVKSVSGLGLMLGIEFEDGVKAADVVAKAIEKGVLTLTAKTKLRLLPPLVISEQQIDHGVAVLREVLESL

SEQ ID NO: 4349 - protein, 206 aa, Glycine max
PRPAESSEPPSHRQKPTTGDDDRISHLPDVLLLQILSLLPTKQAVITGILSKRGRPLWPAVSVLDFDDESSPEFHHPGGLTGFAEFVYSVLLLHDAPAIERFRLRCANPNYSARDIATWLCHVARRRAERVELSLSLSRYVALPRCLFHCDTVSVMKLNGVFLNALASFSVSLPLLKVLHVGDRVLFGCHDYVVKLIAGCPRLEDL

SEQ ID NO: 4350 - protein, 151 aa, Methanosarcina acetivorans C2A
MSDLSNQRKLASKVLGCGLDRVWLNPEASEEIASAITREDIRGLIEEGTIKAKPVKGVSRGRARALAAKRKYGHCKGHGSRKGKKGARTPKKEQWIKKIRALRRRLKELRADGALDKSVYCRLYRKAKGGEYRSVSHLNSHLESEKLLKKE

SEQ ID NO: 4351 - protein, 300 aa, Prochlorococcus marinus subsp. marinus str. CCMP1375
MGGTRFVGKALLGKLQEQGHDLTIFTRGVNSLPSNVRHIQGDRNGDEIEKLNGLKFDVIIDSSGRTKDQTKKVLDITGPPANRFLYVSSAGIYADSETLPLTEDSKVDLESRHIGKAETENWLRLSKVPFTSFRPTYIYGAGNYNPIEKWFFERILNDRPIPIPNEGNTITQLGHVNDLAEAMSLSLEKEVSNNRIYNCSGKKAITFRGLIYSSALACGKDPNDIKLFSFDPSKIDKKARKIFPLRLNHFFTDISLIENHLNWSPRIELNEGLRESFQNDYLINKNEKPDFSLDINLIGY

SEQ ID NO: 4352 - protein, 277 aa, Oryza sativa
  unsure (1)..(277): unsure at all Xaa locations
MSQEQPRRPSEKAAGGGGGEQGIRYGDVFPVTGSLAAKPIAPRDAATMQSAENLVLGKTVKGGPAAAMESAASRNEEMGVVGHDQATDAAAEQGVNVSDTLVPGGGRIVTEFVAGQAVGHYVEQDDGAAVVAGVVGAAPGAVRVEEPAKITIGEALEAAALAAGGTPVERSDAAAIQAAEAKATGTDTYMPGGLAAQAQSAAVANLWTARDADKTKLGDVLSNATAKLAADKEVESGDAARVAGAEMRNKPGAAARPGGVAASMAAAARLNRGPTTX

SEQ ID NO: 4353 - protein, 449 aa, Picea abies
MALVLSDCCVLKTLPSLKMGSKHKPMVPQAAVPATVGLRPLPSLCLGRSFPKHKGAGTFPYGPLRRGPRLGGETGVAVPLRPTLVSDNENGEAGFDPSAPPPFTLAEIRAAIPKHCWGKNTWKSISYVVRDVAVVIGLAAAASYFNNWVFWPIYWVAQGTMFWALFVLGHDCGHGSFSSNHKLNSVIGHLTHSSILVPYHGWRISHRTHHQNHGHVENDESWHPMSKKLYNSLDETTRKLRFNIPWALLAYPFYLWGRTPGKKGSHFHPDSDLFVPSEKKDVITSTACWSAMVALLAGLTVFMGPAWIIKFYVIPYWIFVMWLDLVTYLHHHGYDEKVPWYRGKEWSYLRGGLTTIDRDYGLINNIHHDIGTHVVHHLFPQIPHYHLVEATEAVKPVLGKYYREPKQSGPLPLHLLDPLVKSMSQDHYVNDEGEIVYYQADPDIKKSRR

SEQ ID NO: 4354 - protein, 163 aa, Glycine max
TIISLQFGNHHSISFLSRGRRRRLQIEANDAARRTVRGRSKVIPSTHPSTPRSAARMVDAWWPLLAAAVPAIVAGQAIRVKRRRDEEQRLKAARGREKSSDEVFVCERVCTSKRMLKKVGAFSKDPIPDTCVTVCGVSELDACADACARTVCVNQHQVPNWND

SEQ ID NO: 4355 - protein, 139 aa, Pennisetum glaucum
  unsure (1)..(139): unsure at all Xaa locations
KKHVMSERKRREKLNEMFLVLKSLVPSIHKVDKASILAETIAYLNELQRRVQELESSREPMMLRQSETRKVTRRHDDDEDVGNXSGSKRKASELGSGVEREHPTKDDTSNVTVTISNKEVLLEVQCRWEELMMTSVFDA

SEQ ID NO: 4356 - protein, 456 aa, METHYLOPHAGA SP. SK1
MATRIAILGAGPSGMAQLRAFQSAQEKGAEIPELVCFEKQADWGGQWNYTWRTGLDENGEPVHSSMYRYLWSNGPKECLEFADYTFDEHFGKPIASYPPREVLWDYIKGRVEKAGVRKYIRFNTAVRHVEFNEDSQTFTVTVQDHTTDTIYSEEFDYVVCCTGHFSTPYVPEFEGFEKFGGRILHAHDFRDALEFKDKTVLLVGSSYSAEDIGSQCYKYGAKKLISCYRTAPMGYKWPENWDERPNLVRVDTENAYFADGSSEKVDAIILCTGYIHHFPFLNDDLRLVTNNRLWPLNLYKGVVWEDNPKFFYIGMQDQWYSFNMFDAQAWYARDVIMGRLPLPSKEEMKADSMAWREKELTLVTAEEMYTYQGDYIQNLIDMTDYPSFDIPATNKTFLEWKHHKKENIMTFRDHSYRSLMTGTMAPKHHTPWIDALDDSLEAYLSDKSEIPVAKEA

SEQ ID NO: 4357 - protein, 357 aa, Trichodesmium erythraeum IMS101
MQSNTVLDQTNDTKSIELPFTLQEVKAAIPAHCFKSSLWRSLSYFFLDIGIIAGLYGIAYSLDSWFFFPFFWLMQGTMFWALFVVGHDCGHGSFSKYKWVNNLVGHLCHTPILVPFHGWRISHRTHHANTGNIETDESWYPVSESKYNMMLWYEKLFRFYLLLLAYPLYLFKRSPNREGSHFVPNSPLFRPHEKSDVLTSSALWMLMVGFLGCLTYQFGWVFLVKYYLVPYIIFVIWLDLVTFLHHTDSDIPWYRGKDWYFLKGALSSIDRDYGFINSIHHDIGTHVAHHIFLNMPHYHLKTATEAIKPILGEYYHKSSEPIWKSFINSYMNCHFVSDTGSQIYYRSAWKKPSEELS

SEQ ID NO: 4358 - protein, 366 aa, Bacillus coagulans
MKMKLAVLPGDGIGPEVMDAAIRVLKTVLDNDGHEAVFENALIGGAAIDEAGTPLPEETLDICRRSDAILLGAVGGPKWDHNPASLRPEKGLLGLRKEMGLFANLRPVKAYATLLNASPLKRERVENVDLVIVRELTGGLYFGRPSERRGPGENEVVDTLAYTREEIERIIEKAFQLAQIRRKKLASVDKANVLESSRMWREIAEETAKKYPDVELSHMLVDSTSMQLIANPGQFDVIVTENMFGDILSDEASVITGSLGMLPSASLRSDRFGMYEPVHGSAPDIAGQGKANPLGTVLSAALMLRYSFGLEKEAAAIEKAVDDVLQDGYCTGDLQVANGKVVSTIELTDRLIEKLNNSAARPRIFQ

SEQ ID NO: 4359 - protein, 292 aa, Rhizobium sp. CC2155
RGKTQIKEFDAFPTLEQLPLWGFDGSSTQQAEGRSSDCVLKPVAVYPDPVRTNGALVMCEVMMPDGKTPHPSNTRATVLDDEGAWFGFEQEYFFYKNGRPLGFPEQGYPAPQGPYYTGVGYKNVGDIARRIVEEHLDICLAAGINHEGINAEVAKGQWEFQVFGKGSKKAADEVWLARYLLLRLTEKYGIDVEFHCKPLGDTDWNGSGMHANFSTAYMREVGGKDYFEALMAAFEKNLHDHINVYGPDNHLRLTGKHETAPWDKFSYGVADRGASIRVPHSFVNNGYRRYVE

SEQ ID NO: 4360 - protein, 725 aa, Rhodospirillum rubrum
MGDDGDHDRARHGRGHGYQPYGDGARFRPEDRRGAASGDHGPSPGAPGLSRRERRRRGGATRQDRRGDRLMASRRSRRAPEYADVHRLDTFPKVLADNAKRFPQDIALREKDLGIWKEVTWAEYGLMVRLYALGLKDLGVERGQVIALLGANRPEWLWGEIAAHALGCASLGIYKDVLDDEADYLLAHSGAVAVIAEDEEQVDKLLTLAARVPSLRHIVYCDPRGLRKYSDPRLISQDDLKARGRALDARDPGLYEREVAAGHGDDVAVLCTTSGTTARPKLAMLQAGAFLRHCLDYLEADPRHPGDDYVSVLPLPWIMEQVYAVGQALIARGIVNFVEEEATTMADLREIGPRFVLLAPRVWEGIAADVRARMMDASPFKRAMFEIGMGLGKRALARNRRSWLAEALLFRALRDRLGFSFLTSAATGGAAMGPETFSFFHAMGVPLKQLYGQTELAGAYVIHRAGDIDPETVGLPFAKSAVRIDNPDAEGVGEILGRDQGLFAGYFGAGDATAIDDLRDGWLHTGDAGFLKKENGHLVVIDRVKDLAVMSNGVRFSPQFIENKLKFSAFIAEAVILGRDRPYLAAIICIRWSILAKWAEQRAISFTGYSSLAARPEVYALLRAEVERVNASLPAAQRVRKFLLLYKELDPDDGELTRTRKVRRGVVAEKYAKEITALYQGDDAVDIDTHITFQDGTTARIQTRLKVETLISADENGPIASKAAE

SEQ ID NO: 4361 - protein, 74 aa, Zea mays
  unsure (1)..(74): unsure at all Xaa locations
PNLDLCKLXSLTFRASDNLNYPSMARAYAAGRAGGTMTGVLSAANENAVELFIDEKXSYLDILFFAYRLLPALF

SEQ ID NO: 4362 - protein, 471 aa, Bacillus cereus ATCC 14579
MVQIEKKLGFFPLIALVVGTMVGGGVFSLPHDLAVGANSGAIIIGWCITAMGMIPLALVYQTLARQKPELEGGIYSYARAGFGEYIGFNSAWGYWLAGILGNVATIMLLFSTLGYFFPIFKGGNNVASIVGASLLLWTLHFLILFGIREASIMNVIATIGKLVPIVLFIVVMVTAFRWDTFTHDFWGEGTISLSAILGQVKNTMLVTLWVFIGVEGAVVLSGRAKNSRDVGKATVLGLILVMSIYILISVLSMGAMTRGELSVLETPSMGHVLEHVVGPWGAVAINIGLVASLVGTLIGWFLLVSEISHVAGKDGVFPKVFTKTNKKQTPHMALWISNGVAQIIFIIVLFSESTYQIMYFIASTSILLPYLLSALFQFKLVITNELKDAKLKNGALALIASIYSVWLLYAAGLKNLLLVSIVYGIGIIVYTFARKEQGNRCFVGAEKYVMWAIIVAAITSIYMLLTGNIKM

SEQ ID NO: 4363 - protein, 521 aa, Simmondsia chinensis
MKAKTITNPEIQVSTTMTTTTTTATLPNFKSSINLHHVKLGYHYLISNALFLVFIPLLGLASAHLSSFSAHDLSLLFDLLRRNLLPVVVCSFLFVLLATLHFLTRPRNVYLVDFACYKPHPNLITSHEMFMDRTSRAGSFSKENIEFQRKILERAGMGRETYVPKSVTKVPPEPSIAAARAEAEEVMYGAIDEVLEKTGVKPKQIGILVVNCSLFNPTPSLSSMIVNHYKLRGNILSYNLGGMGCSAGLISIDLAKDLLQVYRNTYVLVVSTENMTLNWYWGNDRSMLITNCLFRMGGAAIILSNRWRDRRRSKYQLLHTVRTHKGADDKSYRCVLQQEDENNKVGVALSKDLMAVAGEALKANITTLGPLVLPMSEQLLFFATLVARKVFKMTNVKPYIPDFKLAAKHFCIHAGGKAVLDELETNLELTPWHLEPSRMTLYRFGNTSSSSLWYELAYAEAKGRIRKGDRTWMIGFGSGFKCNSVVWRALRSVNPAREKNPWMDEIENFPVHVPKIAPIAS

SEQ ID NO: 4364 - protein, 335 aa, Agrobacterium tumefaciens str. C58 (Cereon)
MLMEETMRQASVLAPHTNGPTVTAGEILVEIMATTVGDGFLEPQTLIGPFPSGAPAIFIDQVARCGGTAGIIAAVGDDDFGRLNIERLRRDGVDVSAITTIADRPTGSAFVRYRENGARDFVFNIAHSAASETRMTDEAQALIEKAGHVHIMGSAFAIAGIGAIILEAVKSVKARGGSVSFDPNIRKELAQGDEGRRLIDDLLAVTDLLLPSGEELQAASGLDDEEAAIEKLLAAGIGEIVLKRGANGASHFSRAHGRIDAPGLEVEEIDPTGAGDCFGATYLTCRRLGMRPGKALVYANASGAHNVTKRGPMEGAASLAELDAFMAAQLSEEVL

SEQ ID NO: 4365 - protein, 292 aa, Streptomyces venezuelae
MRHTRLRDLEVSRIGLGTMGMSFGYTGSGSDDAGSVRALHRALDLGVTFLDTAEIYGPYTNERLVGRALGARRDQVVLATKFGLVSHAGGGPGQLDSSPANVRTAVEGSLRRLGTDHIDLCYQHRVDTVGALAELVAEGKIRHIGLSEAGPATIRRAHAVHPVTAVQSEYSLWTRDPEEAVLPVLRELGIGFVAYSPLGHGFLTGTVRAAGRFTPRTSGRTTPASPRRTCPGHLRIADEIAAVAAEADATPAQVALAWLLTRARPAESEHPWPRGELRQGCGGHIPHPGGVP

SEQ ID NO: 4366 - protein, 217 aa, Triticum aestivum
  unsure (1)..(217): unsure at all Xaa locations
MGHQHQMFEDPFASSISSLEADIFSVAAGHHHPQWPGLDHDVPLXPAANNGTSSGGYGSPGGGDGSGSHXRKISHNAYERDRRKQLNELYSDLRSLLPDTDHTKKLSIPITVSRVLKYIPELQKQVDGLEKKKEELTRANCNPGGRPWRGTRAACAAACRVDRXIMVQVNLVSTWPXXAHFKCIKVLENXXSGHNSFRLPKQTYPTEPTERMPGFLK

SEQ ID NO: 4367 - protein, 208 aa, Zea mays
  unsure (1)..(208): unsure at all Xaa locations
MVSLKVPKRLAASVLKCGKGKVWLDPNEVSEISMANSRHNIRKLVKDGFIIKKPQKIHSRSRARRAHEAKQKGRHSGYGKRRGTREARLPTKVLWMRRMRVLRRLLRKYREAKKIDKHMYHDMYMKVKGNSFKNKRVLMESIHKSKAEKAREKTLSDQFEARRAKSKASRERKNARREERAGPGPQEXIPPPVSATAPTTGAPKKAKK

SEQ ID NO: 4368 - protein, 469 aa, Glycine max
MDKVNRVCAKDEERPLRITRARARALRGITPYSRPSLKNEQKNVLRANSKRAASSGNKTFAVVPAVVQQKGRAVLSDISNMCAKPHDKCTKASKFQAKGVCTKKNTKLAASSVSTDVSSSHDDVRAKLAEELSTIKMVESNDTLREGVTADTSLSMQNSVKSDELRNSPNKDIDIICEKLGASDSLTIVDIDSELKDPQLWSFYAPDIYSNIRVTELQRKPLTNYMDKLQKDINPSMRGILVDWLVEVSEEYKLVPDTLYLTVNLIDRYLSTRLIQKQKLQLLGVTCMLIASKYEEMCAPRVEEFCFITDNTYTKEEVLKMEREVLNLVHFQLSVPTIKTFLRRFIQAAQSSYKAPYVELEFLANYLAELALVECSFFQFLPSLIAASAVFLAKWTLNESEHPWNPTLEHYTKYKASDLKTVVLALQDLQLNTKGCFLNAVREKYKQQKFNCVANLSPKSVQSLFQNQV

SEQ ID NO: 4369 - protein, 392 aa, Zea mays
  unsure (1)..(392): unsure at all Xaa locations
YTGSHPQERHGGHIVPEEQPSPPVYHLRLQWRSRSRLHLNERPRGHIIPEKQPSPGASHLRPQGRNCKQSPALRRKRLTRVFVSRLLVKXGHQVTLFTRGKAPITQQLPGESDAEYADFSSKVLHLKGDRQDFEFVKTSLAANGYDVVYDINGREAVQVEPIIEALPNLQQYIYCSSAGVYLKSDILPHCEVDAVDPKSRHKGKLETESLLTSRGVNWTSIRPVYIYGPLNYNPVEEWFFHRLKAGRPIPIPGAGNQITQLGHVKDLARAFNLVLGNPKASKQIFNISGAKYVTFDGLARACAKAGGFPEPELVHYNPKEFDFGKKKAFPFRDQHFFASVEKATSELGWTPEFDLVQGLTNSYNLDFGRGTFRKEADFTTDDMILDKKLATV

SEQ ID NO: 4370 - protein, 136 aa, Glycine max
  unsure (1)..(136): unsure at all Xaa locations
MSTKKIVLKSSDGESFEVDEAVALESQTIAHMVEDDCVDNGVPLPNVTSKILAKVIEYCKKHVDAAASKSEAVDGGGSSDDDLKAWDAEFMKIDQATLFELILAANYLNIKNLLDLTCQTVADMIXGKTPEEIRTT

SEQ ID NO: 4371 - protein, 322 aa, Streptomyces lincolnensis
MSGRYCVHRGAGFIGSHFVERLLAEEGTRGVAYDDLSNTTTRWIEPLLADERLRFVRADVLDTARLTEELTGWTQDDVCHLASSVDMRKGYHDRGFDLRQCAEGTLSVLNAMRASGPRTVLFSSSSTVYGDPVTLLPTPEHAGPYAPISMYGAGKLAAEGLLSANCHLDGFTAHVFRFGNVVGGRMNHGVIHDFIEKLDARRVRLQVLGDGRQRKNYFLVEECVDGILTASGKLGPGFHVLNLGNPGTVSVDEIAAIVIDEMGLKGVGLEHEGGVRGWPGDVPVEYDLTRVHELGWSAPTDGRQAIRTCARRLLAERGWQRP

SEQ ID NO: 4372 - protein, 223 aa, Zea mays
  unsure (1)..(223): unsure at all Xaa locations
MAAAFDAYTDKNAVFRRLKAKPENKMCFDCNAKNPTWASVTYGIFLCLDCSAAHRSLGVHITFVRSTNLDSWTPDQLKMMAFGGNNRAHAFFKQHGWTDGGKVEAKYTSRAAELYRQMLTKEVAKSATTDNALPSSPVASEASKPPSDDFPEFKLPDVAAPPAENLNGKHEPKSPKAAPRSPKAATHSTFATSVKKPIGAKKXGGQTGGLGVRKLTTSQMKPV

SEQ ID NO: 4373 - protein, 600 aa, Zea mays
  unsure (1)..(600): unsure at all Xaa locations
MRRRPLLPLLLVLVAATAAPTSSARAAFACAPGGPATSLPFCRQSLPLRARARDLVSRLTRAEKVRLLVNNAAGVPRLGVAGYEWWSEALHGVSDTGPGVRFGGAFPGATAFPQVIGTAASLNATLWELVGRAVSDEARAMYNGGRAGLTFWSPNVNIFRDPRWGRGQETPGEDPAVSARYAAAYVRGLQQPYAVPNGGHLNRLKLAACCKHFTAYDLDKWGGTDRFHFXAVVAAQDLEDTFNVPFRACVEDGRAASVMCSYNQVNGVPTCADAAFLRGTIRGRWGLDGYVVSDCDSVDVFFRDQHYTRTPEEAAAATLRAGLDLDCGPFLALYAGSAVAAGKVADADVDAALLNTVTVQMRLGMFDGDPAAGPFGRLGPADVCTREHQDLALDAARQGVVLLKNRRGAKHNRDVLPLRPAAHRVVAVVGPHADATVAMVGNYAGKPCRYTTPLQGVAAYAARVVHQAGCTDVACHGNQPIAAAVEAARQADATVVVAGLDQNVEAEGLDRTTLLLPGRQAELISTVAKASKGPVILVLMSGGPIDIAFAQNDPRIDGILWVGYPGQAGGQAIADVIFGHHNPGGKLPVTWYPQDYLQAC

SEQ ID NO: 4374 - protein, 398 aa, Shigella flexneri 2a str. 301
MLQRGCDGCKQNQSREPATIDGFMPKAQESIMGQQKQRNRRWVLPSRPHGAPVPENFRLEEDDVATPGEGQVLLRTVYLSLDPYMRGRMSDEPSYSPPVDIGGVMVGGTVSRVVESNHPDYQPGDWVLGYSGWQDYDISSGDDLVKLGDHPQNPSWSLGVLGMPGFTAYMGLLDIGQPKEGETLVVAAATEPVGATVGQIGKLKGCRVVGVAGGAEKCRHATEVLGFDVCLDHHADDFAEQLAKACPKGIDIYYENVGGKVFDAVLPLLNTSARIPVCGLVSSYNATELPPGPDRLPLLMATVLKKRIRLQGFIIAQDYGHRIHEFQKEMGQWVKEDKIHYREDITDGLENAPQTFIGLLKGKNFGKVVIRVAGDDKSFNGGVSRHKNPGKKLIFSFN

SEQ ID NO: 4375 - protein, 145 aa, Zea mays
MNNQRKPGDWNCKNCQHLNFSRRDYCQRCRDPRPDLQFGDGYSTVGVLTSLDIRPGDWYCSCGYHNFASRSSCFKCGTIVRDFPAGQGAAGAEGDFAGGRDSAAVRAGWKAGDWICTRPGCNVHNFASRMECYRCNAPREAGTGR

SEQ ID NO: 4376 - protein, 461 aa, Escherichia coli
MAINSPLNIAAQPGKTRLRKSLKLWQVVMMGLAYLTPMTVFDTFGIVSGISDGHVPASYLLALAGVLFTAISYGKLVRQFPEAGSAYTYAQKSINPHVGFMVGWSSLLDYLFLPMINVLLAKIYLSALFPEVPPWVWVVTFVAILTAANLKSVNLVANFNTLFVLVQISIMVVFIFLVVQGLHKGEGVGTVWSLQPFISENAHLIPIITGATIVCFSFLGFDAVTTLSEETPDAARVIPKAIFLTAVYGGVIFIAASFFMQLFFPDISRFKDPDAALPEIALYVGGKLFQSIFLCTTFVNTLASGLASHASVSRLLYVMGRDNVFPERVFGYVHPKWRTPALNVIMVGIVALSALFFDLVTATALINFGALVAFTFVNLSVFNHFWRRKGMNKSWKDHFHYLLMPLVGALTVGVLWVNLESTSLTLGLVWASLGGAYLWYLIRRYRKVPLYDGDRTPVSET

SEQ ID NO: 4377 - protein, 359 aa, Streptomyces avermitilis MA-4680
MVRAAVLPAVGAPLEITGIELPEPGPGQVRVRLAAAGVCHSDLSLSDGTMRVPVPAVLGHEGAGTVVSVGEGVTQVSPGAGVVLNWAPSCGRCHACSLGEVWLCADALTGAGTVYARRTDGSDLYPGLNVAAFAEETVVPAACVLPVPDGVPLTDAALLGCAVLTGYGAVHHSAKVQPGETVAVFGVGGVGLATLQAARIAGASKIVAVDVSPEKESLARRAGATDYLVASENTAREIRGLTDKQGVDVAVECVGRAVTIRTAWDSTRRGGRTTVVGIGGKDQQVVFNALEIFHWGRTLSGCVYGNSDPAKDLPVLAEHVRAGRLDLGALVTERIALDGIPAAFDNMLAGKGGRALVVF

SEQ ID NO: 4378 - protein, 249 aa, Triticum aestivum
  unsure (1)..(249): unsure at all Xaa locations
HFSSRIHTQILTQPPPQSQTPRHIDFSVGSSSKSGVXTSQAALLGGENGSVDGLCKEQVAPAMEGQQPRKRGRKPANGRVEALNHVEAERQRREKLNQRFYALRAVVPNISKMDKASLLGDAITHITXDLQKKLKEMESGKRHVLGSLGMVDRRVQTPRPXEVDIQVGQDEVLVRVMSPMDNYPINNVFQAFEEAEVKVGESKIASNNGKVMHSFVIKSPGSEQQTREKLIAAMSPCNELHVRYITLMH

SEQ ID NO: 4379 - protein, 375 aa, Rhodococcus ruber
MKTKGAILWGLNEPWSVEEIEIGDPVAGEVQIRMEAAGMCHSDHHIVTGATPMPSFPVMGGHEGSGVITKVGDGVVGLEVGDHVVLSFIPACGRCPSCATGHSNLCDLGAGLLSGMAISDGTYRIQARGQHVIPMCLLGTFSPYMTVNQTQVVKIDKDVPFELAALVGCGVPTGWGSATHVADVKPGEAVAVIGVGGVGISALQGAVASGARQIFAIDPVPWKREQALKFGATHALPRRWRALMPIMETTWGRMADKTIITVGEMRGEYVEEALQLTAKNGRCVVTAMGHMTDMDVKLNAFLFAMLQKDLQGNIFGGCNARVDIPNLLAMYKAGQLNLADMVTRTYTLEQVNDGYQDMLDGKNIRGVIRYTDADR

SEQ ID NO: 4380 - protein, 157 aa, Glycine max
MVKDTKPLAYAANNGYQQKGSSFDFDPSAPPPFKIAEIRASIPKHCWVKNPWRSLSYVLRDVLVIAALVAAAIHFDNWLLWLIYCPIQGTMFWALFVLGHDCGHGSFSDSPLLNSLVGHILHSSILVPYHGWRISHRTHHQNHGHIEKDESWVPLTE

SEQ ID NO: 4381 - protein, 153 aa, Bruguiera gymnorrhiza
MVKAVVVLGSSAGVTGTVFFNQEGDGPTTVTGNVSGLKSGLHGFHVHALGDTTNGCMSTGPHFNPGSKEHGAPEDENRHAGDLGNVNVADDGTATFTITDNQIPLTGPNSIVGRAVVVHADPDDLGKGGHELSKSTGNAGGRVACGIIGLTAA

SEQ ID NO: 4382 - protein, 214 aa, Paeonia sinjiangensis
IAESVGEGVTDLKPGDHVLPVFTGECKECRHCKSEESNMCDLLRINTDRGVMLNDGTSRFSINGQPIFHFVGTSTFSEYTVVHVGCVAKINPEAPLDKVCVLSCGISTGLGATLNVAKPKKGSSIAIFGLGAVGLAAAEGARIAGASRIIGVDLNPKRFEEAKKFGVTEFVNPKDYNKPVQEVIAEMTDGGVDRSVECTGSIMAMISAFECVHD

SEQ ID NO: 4383 - protein, 336 aa, Pyrobaculum aerophilum str. IM2
MIVYYSEVFKRHVPPYRHPEAPDRLDYLIEGVREAGGRVKEPKMREDVWQLIHLAHDKNYVNLINKLCEKGQGEIDGDTYVSPGTCEAAALAVSAVADAVEKRETALIAARPPGHHAGFMGRALTAPTQGFCIFNTAAIAALYVGEGAAVVDIDVHHGNGTQEILYDKDLLYISTHQHPATLYPGTGYPEEVGEGRGEGYNINIPLPPQVGDDVYIKVVDEVVIPLLRQYDPKVIVVSLGWDAHRDDPLADLNLSLKSYLYFFDQVLKMQKLTVVVLEGGYNRSVIKNGTEALLRLALRGEFAPKESATETAHSVYKHFETTMREVRQYAGRYWRL

SEQ ID NO: 4384 - protein, 339 aa, Bacillus subtilis subsp. subtilis str. 168
MKAVQVRKAYDLVTAEVKKPVLSKDDEVLVKVKRVGICGSDMHIYHGTNPLATLPRVIGHEVTGQVEAVGANVQSLKPGDHVVIEPISYCGSCYACRKGRPNVCAKLSVFGVHEDGGMREYIVLPERQLHAVSKDLPWEEAVMAEPYTIGAQAVWRGQVEKGDTVLIQGAGPIGICVLKMAKLAGAAVMMTDLNNERLAFAKENGADAVVNVQAEHVAERVLEWTGNEGANVVIDAVCLPETFALSIEAVSPAGHVVVLGFDERAAQISQLPITKKEVTITGSRLQTNQFPKVVELLNGGRLMHNGLVTHTFSVDDVHHAFQFIKEHPDQVRKAVITFD

SEQ ID NO: 4385 - protein, 388 aa, Molinia caerulea
EDPALSIAGAVQSQKLAVRAISRLQALPGGDVKLLCDTVVENVRELTGYDRVMVYRFHEDEHGEVVAESRRADLEPYLGLHYPATDIPQASRFLFRQNRVRMIADCHATPVRVIQDPGLSQPLCLVGSTLRAPHGCHAQYMANMGSIASLVMAVIIIIGGDDEQTARGSISSAMKLWGLVVCHHTSPRFIHFPLRYACEFLMQAFGLQLNMELQLAHQLSEKHILRTQTLLCDMLLRDSPSGIVMQSPSIMDLVKCDGAALYYHGKYYPLGVTPTESQIMDIIEWLTMCHGGSTGLSTDSLADAGYLGAAALGDAVCGMAVAYITSSDYLFWFRSHTAKEIKWGGAKHHPEDKDDGQRMHPRSSFKAFLEVIKSRSLPWENAEMDAIH

SEQ ID NO: 4386 - protein, 140 aa, Zea mays
MEQQQVKPSLPPSDAPMDNQDSSPLPAVTTADPVPRALSNDSATQAASPNPVAPSSPSAPTSATTQDAAGRESPSSMFSTSGLSSWAKNLKIPQPSSGQESPPGKNTVSRLASGLGLRLSPKYPQQDESAEGSTTPTTAQ

SEQ ID NO: 4387 - protein, 114 aa, Glycine max
  unsure (1)..(114): unsure at all Xaa locations
NLVTLQWHTLVYWSTAGRSPPPRXPGSAPPQPSDLEPWRGPLPISGLGSTGSIGSHTLRVAAEFPXRWQVVSLAAGSGIPRLADQIPSWLSELVGLSAVPPGADLQEAAAAGDH

SEQ ID NO: 4388 - protein, 333 aa, Saccharomyces cerevisiae
MSSVSKGDRKASIDAASWLFNVVTSVGIILVNKALMATYGFSFATTLTGLHFATTTLLTLILKSLGYIQTSHLPLSDIIKFVLFANFSIVGMNVSLMWNSVGFYQIAKLSMIPVSCFLEVVLDNVRYSRDTKLSIVLVLLGVAVCTVTDVSVNAKGFIAAVIAVWSTALQQYYVHFLQRKYSIGSFNLLGHTAPAQAASLLLVGPFMDYWLTGKRVDAYGYGLTSTLFIILSCTIAVGTNLSQFICIGRFTAVTFQVLGHMKTILVLILGFIFFGKEGLNLHVVLGMIIAIAGMVWYGSASSKPGGKERRSFSLPKTQDYSSLPVSSEPDTKE

SEQ ID NO: 4389 - protein, 330 aa, Zea mays subsp. parviglumis
MGRAPCCEKVGLKRGRWTAEEDQLLANYIAEHGEGSWRSLPKNAGLLRCGKSCRLRWINYLRADVKRGNISKEEEDIIIKLHATLGNRWSLIASHLPGRTDNEIKNYWNSHLSRQIHTYRRKYTAGPEDTAIAIDMSKLQSTDRRRGGRTPGRPPKTSASRTKQPDADQPGGEAKGAAASSPRHSDAVNPGPNQPNSSSGSTGTAEEEGPSSEDASGPWVLEPIELGDLVWGEADSEMDALMPIGPGGHDSAALEGLGAVGCEAQVDDLFDMDWDGFAAHLWGGPEQDDHSAQLRQAAEPLEASAAATAACTPDDRELEAFENWLLSDSF

SEQ ID NO: 4390 - protein, 356 aa, Hevea brasiliensis
MSLLSDLINLNLSDTTDKIIAEYIWIGGSGMDMRSKARTLSGPVSDPSKLPKWNYDGSSTGQAPGEDSEVILYPQAIFKDPFRRGNNILVMCDAYTPAGEPIPTNKRHAAAKIFSHPDVVAEEPWYGIEQEYTLLQRDVKWPIGWPLGGYPGPQGPYYCSIGADKSFGRDVVDSHYKSCLYAGINISGINGEVMPGQWEFQVGPAVGISAGDELWVARYILERITEIAGVVLSFDPKPIQGDWNGAGAHTNYSTKSMRHDGGYEVIKKAIEKLGLRHKEHIAAYGEGNERRLTGRHETADINTFLWGVANRGASIRVGRDTEKQGKGYFEDRRPASNMDPYVVTSMIAETTILWKP

SEQ ID NO: 4391 - protein, 317 aa, Actinidia chinensis
MSITLSRPSLSRPSLSRHPSLTLHSSLSHAPPHHRPVAFLRHPTLRYHHHGRLLSVASAILQDTAIRQDTYIWTPVPISRVLPAAAESLFKVIVDLSRSPDLVYNFVSPGQYVQIRIPEAIVNPPPRPAYFYIASPPSLVKKNLEFEFLIRSVPGTTSEVLCSLKEGDVVDLTQIIGRGFDIEQILPPEDYPTVLISVTGYGMSAGRSFIEEGFGANKRSDVRLYYGAENLETMGYQERFKDWEASGVRVIPVLSRPPPNWNGAVGYVQDVYLKDKPIADPRTTGAVLIGNPNMVEETRGILVAQGVSREKILVTQD

SEQ ID NO: 4392 - protein, 285 aa, Brassica napus
MSELQLPPGFRFHPTDEELVMHYLCRKCASQSIAVPIIAEIDLYKYDPWELPGLALYGEKEWYFFSPRDRKYPNGSRPNRSAGSGYWKATGADKPIGLPKPVGIKKALVFYAGKAPKGEKTNWIMHEYRLADVDRSSAARKKKNSLRLDDWVLCRIYNKKGAIEKRGPPPTPVVYGDEVVEEKPRLSEMGMPPPPVMPNDFVYFDTSDSVPKLHTTESSCSEQVVSPEFTSEVQSEPKWKDWSGEKSSLDFGFNYIDATAFGGGGGSNQLFPLQDMFMYNMPKPY

SEQ ID NO: 4393 - protein, 224 aa, Vibrio cholerae
MWLIITLGVFFVARWVAQKCTTPLANPLLISIGILIPLLTYLKVPFETYYADNQWLSYLLQPAVVALAYPLYEQLPQIRANWRIIALACGVGSVMSMITASLIAVSMGADIELIAALMGKSVTTPIAMEVARQLGGEPAIAAILVLLVGLFGAILAYPIYKLLNITHPIAKGLTMGTVSHALGTATCAEKDPRDAAFSSLALVVCGVITSVLAPSLFAFALWLQ

SEQ ID NO: 4394 - protein, 391 aa, Leptospira interrogans serovar lai str. 56601
MDMTTSVCLLGASGSVGESTLKVLRAHPEKFRLHSFSVHSNLEKAKEIQKEFSPDFICVSSDFADVGVLGNKLGRTQILYGESSLCELVREPEVEIVITAIVGSVGLRPTIAAITAGKRLGIANKETLVTSGPLIQSLIAKHNTKVVPVDSEHNALFQLLESLNPNSVEKIILTASGGAFRDLPVEQLSSVTKEQALHHPTWNMGPKITIDSNGMINKGLEVIEAHFLFNVPYDKIGVVIHPQSIAHGIVELKDGASFLYASYPDMIFPIAHSLFHPEPVPKVLRSYPAKDWGKLEFREPDFKRYPGLGLAFEAGKVGGTAPCIFNAANEAAVELFLKDEIRFIEIPDYIRETLDEIKIEFPLSLEEYEEADRIARETVRNLKARKVVSAC

SEQ ID NO: 4395 - protein, 713 aa, Zea mays
  unsure (1)..(713): unsure at all Xaa locations
EPASTEDPALSIAGAVQSQKLAVRAISRLQALPGGDVKLLCDTVVEHVRELTGYDRVMVYRFHEDEHGEVVAESRRDNLEPYLGLHYPATDIPQASRFLFRQNRVRMIADCHATPVRVIQDPGLSQPLCLVGSTLRAPHGCHAQYMANMGSIASLVMAVIISSGGDDEQTGRGGISSAMKLWGLVVCHHTSPRCIPFPLRYACEFLMQAFGLQLNMELXLAHQLSEKHILRTQTLLCDMLLRDSPTGIVTQSPSIMDLVKCDGAALYYHGKYYPLGVTPTESQIKDIIEWLTVFHGDSTGLSTDSLADAGYLGAAALGEAVCGMAVAYITPSDYLFWFRSHTAKEIKWGGAKHHPEDKDDGQRMHPRSSFKAFLEVVKSRSLPWENAEMDAIHSLQLILRDSFRDAAEGTSNSKAIVNGQRHLGVLELRGINELSSVAREMVRLIETATVPIFAVDTDGCINGWNAKIAELTGLSVEEAMGKSLVNDLIFKESEATVEKLLSRALRGEEDKNVEIKLKTFGSEQSKGPIFVVVNACSSRDYTQNIVGVCFVGQDVTGQKVVMDKFVNIQGDYKAIVHNPNPLIPPIFASDENTSCSEWNTAMEKLTGWSRGEVVGKFLIGEVFGNCCRLKGPDALTKFMVIIHNAIGGQDYEKFPFSFFDKNGKYVQALLTANTRSKMDGKSIGAFCFLQIASTEIQQAFEIQRQQEKKCYAR

SEQ ID NO: 4396 - protein, 191 aa, Zea mays
  unsure (1)..(191): unsure at all Xaa locations
MVKAVAVLGSSDGVKGTIFFTQEGDGPTTVTGSVSGLKPGLHGFHVHALGDTTNGCMSTGPHYNPASKEHGAPEDENRHAGDLGNVTAGADGVANINVTDXQIPLTGPNSIIGRAVVVHADPDDLGKGGHEXLSKSTGNAGGRVACGTTTHFPAAFPYAVTPDQLPVLLPHTLWILYRIIFVATGIIGLQG

SEQ ID NO: 4397 - protein, 386 aa, Betula pendula
MKEPVLEEMENAGGFGNGFHGVVEKDDFDPSAPPPFKIAEIRAAIPKHCWAKNPWRSLSYALRDVFVVIALAAAAIYFKAWIFWPLYWAAQGTMFWALFVLGHDCGHGSFSDNPELNNLVGHVLHSAILVPYHGWRISHRTHHQNHGNVENDESWVPLTEKLYKSLGYSTRLLRFTVPFPLFAYPIYLWSRSPGKEGSHFNPYSNLFSPNERKDVITSTLCWSLMAALLIYSSCAIGPIQMLKLYGVPHLIFVMWLDLVTYLHHHGYEQKLPWYRGKEWSYLRGGLTTVDRDYGWFNNIHHDIGTHVIHHLFPQIPHYHLVEATNAAKPVLGKYYREPKRSGPFPIHLIKNLVRSISEDHYVNDNGDIVYYQTDPELYKSSNTKSD

SEQ ID NO: 4398 - protein, 219 aa, Oryza sativa
MKKIFGAKKNQEPPPSIQDATDRISKRGDSVDDKIKKLDAELARYKDQIKKTRPGPAQEAIKARAMRVLKQRRMYEGQRDMLYNQTYNLDQVAFASEGLKDAQQTMTAMKAANKELKGMMKTVKLEDIDSLQDEMMDLMDVSNEIQETLGRSYNVPDDIDEEELMGELDALEADMDFESNSVPSYLQPDKESDLDSELNLPAAPTGHTPAPPNRQQVHG

SEQ ID NO: 4399 - protein, 156 aa, Zea mays
  unsure (1)..(156): unsure at all Xaa locations
MNRKPGDWDCRACQHLNFSRRDACQRCSEPRGVGDRSGGGGDLGGRGGSSFGGGFGAGSDVRPGDWYCSCGAHNFASRSNCFRCSAYKEEAAGAFDSDMSRSRGYAGFGSGAAARTNRPGWKSGDWICTRXASGCNEHNFASRMECFRCNAPRDLR

SEQ ID NO: 4400 - protein, 173 aa, Helicobacter pylori
MNLDQLEVSHDASVLSVVIEISKHSNIKYELDKESGALMVDRVLYGAQNYPANYGFVPNTLGSDGDPVDALVLSDVAFQAGSVVKARLVGVLNMEDESGMDEKLLALPIDKIDPTHSYVKDINDLSKHTLDKIKHFFETYKDLEPNKWVKVKGFENKESAIKVLEKAIKAYQG

SEQ ID NO: 4401 - protein, 245 aa, Afrostyrax sp. Cheek 5007
ALSIAGAVQSQKLAVRAISQLQSLPGGDIKLLCDTVVESVREHTGYDRVMVYKFHEDEHGEVVAESKRSDLEPYLGLHYPATDIPQASRFLFKQNRVRMIVDCNAMPVPVSQDEGLMQPLCLVGSTLRAPHDCHAQYMANMGSIASLAMAVIINGNDDEAIGGRNSMRLWGLVVCHHTSARCIPFPLRYACEFLMQAFGLQLNMESQLATQLVEKHVLRTQTLLCDMLLRDSPTGIVTQNPSTMD

SEQ ID NO: 4402 - protein, 425 aa, Helicobacter pylori J99
MAYNPKILQKPKEGEEITIKDGKLHVPNYPIIPFIEGDGIGSDITPAMIKVVDSAVQKAYKGEKKIAWYEVFVGEKCYQKFKDHKELSPEEQWLLPDTIEAINHYKVSIKGPLTTPIGEGFRSLNVALRQKMDLYVCLRPVRWYGSPSPVKEPQKVDMVIFRENSEDIYAGIEWQEGSAEAKKLIHFLQNELKVEKIRFPESSGVGIKPISKEGTERLVRKAIEYAIDNDKPSVTFVHKGNIMKYTEGAFMKWGYALAQKEFNAQVIDKGPWCSLKNPKTGKEIIIKDMIADAFLQQILLRPSEYSVIATMNLNGDYISDALAAMVGGIGIAPGANLNDTVGMFEATHGTAPKYAGLDKVNPGSIILSAEMMLRHMGWVEAADLIVSAMEKAIKSKKVTYDFARLMDGAKEVKCSEFASVMIENM

SEQ ID NO: 4403 - protein, 374 aa, Psammomoya choretroides
ALSIAGAVQSQKLAVRAISQLQSLPGGDIKLLCDTVVESVADLTGYDRVMVYRFHEDEHGEVVAESKRPDLEPYIGLHYPATDIPQASRFLFKQNRVRMIVDCHASPVHVIQDDGLMQPLCLVGSTLRAPHGCHAQYMENMGSIASLAMAVIINGNDEEVIGGRNPTRLWGLVVCPHTSARCIPFPLRYACEFLMQAFGLQLNMELQLAAQLLEKHVLKTQTLLCDMLLRDSPTGIVTQSPSIMDLVKCDGAALYYRGNYYPLGVTPTEAQIKDIVEWLLAFHGDSTGLSTDSLADAGYPGAALLGDAVCGMAVAYITNRDFLFWFRSHTAKETKWGGAKHHPEDKDDGQRMHPRSSFKAFLEVVKSRSLPWEN

SEQ ID NO: 4404 - protein, 461 aa, Mesorhizobium loti
MPIEILMPALSPTMEEGNLSKWLKNEGDKVVAGDVIAEIETDKATMEVEAVDEGTLAKIVVPAGTEGVKVNAVIAVLAVEGEDTDKAGEGIGEEPAKAETASPAPVAAKSEAAAPVAAAPKTEIAADPDIPAGTEMVSTTVREALRDAMAEEMRRDGDVFVMGEEVAEYQGAYKITQGLLQEFGPRRVVDTPITEHGFAGVGVGAAMAGLKPIVEFMTFNFAMQAIDQIINSAAKTLYMSGGQMGAPIVFRGPNGAAARVAAQHSQCYAAWYSHIPGLKVVMPYTAADAKGLLKAAIRDPNPVIFLENEILYGQSFDVPKLDDFVLPIGKARIHKQGKDVTIVSFGIGMTYAVKAEAELRGLGIDAEIIDLRTIRPLDLDTIIASVKKTNRLVVVEEGFPQSSVGDHIANQVSQRAFDFLDAPVITIAGKDVPMPYAANLEKLALPNVGEVIEAVKAVTYR

SEQ ID NO: 4405 - protein, 478 aa, Nicotiana tabacum
MAAVNGVGISWPSKLTQGQRPKLVFSPSPRRCTPSSSTIKMTASVDEKKKTFTLQKSEEAFSKAKELMPGGVNSPVRAFKSVGGQPIIIDSVKGSRMRDIDGNEYIDYVGSWGPAIIGHADDEVLAALAETMKKGTSFGAPCLLENTLAEMVISAVPSIEMVRFVNSGTEACMGVLRLARAFTGRPKIIKFEGCYHGHADPFLVKAGSGVATLGLPDSPGGPKAATSDTLTAPYNDISAVESLFEEHKGEVAAIILEPVVGNAGFIQPNLDFLAAIRKITKENDALLIFDEVMTGFRLAYGGAQEYFGITPDLTTLGKIIGGGLPVGAYGGRRDIMEMVAPAGPMYQAGTLSGNPLAMTAGIHTLKRLQGPGTYEYLDKITGELTQGILDAGKKTGHAMCGGYIRGMFGFLFAEGPVNNFSDAKKSDTEKFGRFYRGMLEEGVYFAPSQFEAGFTSLAHTSEDIQKTVAAAEKVLKQI

SEQ ID NO: 4406 - protein, 251 aa, Xylella fastidiosa Temecula1
MEHVSMITDDSPRFRALVTGGSGNLGTAICRQLIADGAHVIVHANHHRSRADTLVECLCAEGGSAEVIVFDVTAAQASKTALENLLQAGPIQIIINNAGIHDDAPMAGMSSTQWHRVIDVSLHGFFNVTQPLLLPMARTRWGRIVCISSVTAVLGNRGQSNYAAAKAGLHGAARSLAREMANRGITVNVVAPGVIESEMVGKTFTPEMIKQLVPTGRPGRPEEVAALIGFLCSEKAGYINGQVIGINGGMV

SEQ ID NO: 4407 - protein, 820 aa, Rhodobacter sphaeroides
MGAVAFREMRRAREAAGQRHVDDAHVGLHQQVARLLQPQFHVVALGRAIEVAAEQPLELAGRHAHLLGQIGGADRILDIGLHLADHLGELRVPHADPGRDREALRVLIGADRGIDQLVGHGVGDVVALIAGDDLQHHVDRGRAARSGQPVAVHHEDGFRQPHLLEFLGEAVLVLPVDGGLLAVEKPRLGQRIGPGAEPADRDAPPRLAPEPVHHRPGGGLLHVDPAADQKHILAVDLLEAHVEPEGRAVRADRLGPVLAGQRPGIERPSRDPVRDPQRLDGAREGDHRETVEQQEDEASGPAGLVGGGGLGGRDGHVATLCVVCSPVKQDLKHPSRCNFDQFRFPRAVAFRISRPRPKAAGGPVMTRGWTKTDWRAKPRIQMPDYPDAAAVKAVEGQLAKYPPLVFAGEARKLKAALAEAAEGRAFLLQGGDCAESFSEFSADNIRDTFRVLLQMAIVLTYGAKVPVVKVGRMAGQFAKPRSAPTEVINGMELPSYRGDIINGFDPSPEARIPDPQRMLQAYTQAAASLNLLRAFSTGGFADIHRVHSWTLGFCEQDKAERYRDISNRISDALDFMSAAGVNGSTSHNLSTVDFYTSHEALLLEYEEALCRIDSITGQPVAGSGHMIWIGDRTRQIDGAHVEFCRGVLNPIGLKCGPSTTVEDLKVLMAKLNPQNEAGRLTLIARFGAGKVGEHLPRLIRAVREEGAKVTWCCDPMHGNTIKAASGYKTRPFDSVLREVREFFSIHKAEGSIPGGVHFEMTGQDVTECTGGLRAVTDEDLSNRYHTACDPRLNASQSLELAFLVAEELTTMREAARRVAL

SEQ ID NO: 4408 - protein, 207 aa, Agrobacterium tumefaciens str. C58 (Cereon)
MVTGSSVASMVSARSRSKSPDRQETQREDTAMPLYRLADRVPQTPAPDRYWIAPDANVIGSVTLGEDVGIWFGATLRGDNEPISVGRGTNIQEGVMVHSDPGFAAVIGDMCTIGHHAIVHGCSIGDNSLIGMGATILNGAKIGHNCLVGANALVTEGKEFPDNSLIVGSPARAIRTLDEDTVAGIRRSAEKYIENWKRFSTDLAIIE

SEQ ID NO: 4409 - protein, 381 aa, Oryza sativa (japonica cultivar-group)
MARHRHRLAAAAALLLLLLSSAAALSSSAAEGEEDPLIEQVVGGGEEEDAQLDAEAHFASFERRFGRTYRDAGERAYRMSVFAANLRRARRHQRLDPTATHGVTKFSDLTPGEFRDRFLGLRRPSLEGLVGGEPHEAPILPTDGLPDDFDWREHGAVGPVKDQGSCGSCWSFSTSGALEGAHFLATGKLEVLSEQQMVDCDHECDASESRACDSGCNGGLMTTAFSYLMKSGGLQSEKDYPYAGRENTCKFDKSKIVAQVKNFSVISVNEDQIAANLVKHGPLAIAINAAYMQTYIGGVSCPFICGRHLDHGVLLVGYGSAGYAPIRFKEKPYWIIKNSWGENWGEKGYYKICRGPHDKNKCGVDSMVSSVTAIHTSKKEE

SEQ ID NO: 4410 - protein, 351 aa, Clostridium beijerinckii
MKGFAMLGINKLGWIEKERPVAGSYDAIVRPLAVSPCTSDIHTVFEGALGDRKNMILGHEAVGEVVEVGSEVKDFKPGDRVIVPCTTPDWRSLEVQAGFQQHSNGMLAGWKFSNFKDGVFGEYFHVNDADMNLAILPKDMPLENAVMITDMMTSGFHGAELADIQMGSSVVVIGIGAVGLMGIAGAKLRGAGRIIGVGSRPICVEAAKFYGATDILNYKNGHIVDQVMKLTNGEGVDRVIMAGGGSETLSQAVSMVKPGGIISNINYHGSGDALLIPRVEWGCGMAHKTIKGGLCPGGRLRAEMLRDMVVYNRVDLSKLVTHVYHGFDHIEEALLLMKDKPKDLIKAVVIL

SEQ ID NO: 4411 - protein, 350 aa, Geobacter metallireducens
MGMLGLTELPGACIHDCPRADEASLLTFHSPDYLQRLREFSDSDEPRADFRYGLGDLDNPVFKGFYDWAILGVGGTMEAARLVTEEGYDIAFTMAGGWHHAHRSKASGFSYLNDAVIAINTLVAKGLRVAYLDIDAHHGDGVQEAFYDTDQVLTVSIHESGIYFFPGTGFEDEIGRGQGRGYSVNVPLVAHTDDALFMKAFDEVAYPLIAAYNPDVLVTQLGVDTFRTDPLTRLEITTHSYTYILRKLKALKIPWVAVGGGGYNMINVARGWTLAWGIMNGVELPPKLPAQFVDMIAPMGHPNRMLLDAMHWAEEDDRNRALDAVERSIAAIRETVFPVIIGNYAAAAGE

SEQ ID NO: 4412 - protein, 264 aa, Streptomyces venezuelae
MSQQEKQEKRVALVTGATSGIGLAVARLLASQNHRVFLGARNAENVAATVKQLQDEGLEVDGTTLDVRSGEDVKAFVQAAVDRFGTVELLVNNAGRSGAGVTADIADELWNDVIDTNLNCVFRLTREALTTGGMREKSRGRIINMASTAGKQGVVLGAPYSASKHGVVGFTKALGNELAPTGITVNAVCPGYVETPMAQRVRQGYAAAYETSEDAILEKFQSKIPLGRYSTPEEVAGLVGYLASDTAASITSQALNVCGGLGNF

SEQ ID NO: 4413 - protein, 433 aa, Zea mays
  unsure (1)..(433): unsure at all Xaa locations
MAASARDSTDAAERVVDDHDGWASDAEMDVEMDVVEGDADRRDGGADGDDEYLLLTRIRDTSAAEARAGKDIQGIPWERIHIARQDYRKARLEQYKNYENFPQSGELMDKLCKQVEKSSKYYEFQHNTRSVKPSILHFQXSHWSSLSHKLSEVLDFSGHVAPAEKYPGSLLEGFSGVQVSTLAVNEGLVVAGGFQGELIGKDVEGCSVKFCMRTTLSDNAITNAIDIHRSMSGSLHITVSNNDCGVREYDMERYQLVNHYRYNWPVNHTSVSPDKKLLAVVGDDRDALLVDSRNGKVTSTLVGHLDYSFATAWHPDSRTFATGNQDKTCRIWDTRNLSTSLAVLRGNIGAIRCIRYSSDGRFLVFSEPADFVHVYSVAADYKKRQEIDFFGEVSGITLSPDDESLFIGVCDRVYASLLQYRMIRGFDYLDSYV

SEQ ID NO: 4414 - protein, 340 aa, Boea crassifolia
MGRAPCCDKTGLLMKKGPWSQEEDQKLLDYIQKYGYGNWRTLPTNAGLQRCGKSCRLRWTNYLRPDIKRGRFSFEEEETIIRLHSILGNKWSLIAARLPGRTDNEIKNYWNTNIRKRLLRMGIDPVTHSPRLQLLDLSTILNSSLCNNSPTQMNFSRLQPRFNPELLRFAASLFSSNCQSQDFPMQNQITSNNQIPPPFMQTSVQDVAVLPDLCADTNLGTSFSVHDEVQEFQQNPAGYGMPSALTGEYVPVLNDGYYGSGDQPFVDPTPSSVTSNFQSYCSNSLGFQSIFSTPPSSPTPLNSNSTYVNSCSSTEDETESYYNSMWKFEIPDNLRINDFM

SEQ ID NO: 4415 - protein, 168 aa, Bacteroides thetaiotaomicron VPI-5482
MDFILRPWKVSDAKALARHLNNKKIWDNCRDGLPFPYTETDADAFIKYASEQVEQNEYCIEANHEAIGNIGFVRGTDVERFNAEVGYWISETYWNKGLATAALERAIEHYFQHTDVIRLYATVYEHNAASMRVLEKAGFQKAGIHRKACFKNGQFIDAHYYELLKNKS

SEQ ID NO: 4416 - protein, 379 aa, Chlamydophila pneumoniae AR39
  unsure (1)..(379): unsure at all Xaa locations
MKHLAVLGSTGSIGRQTLEIVRRYPSEFKIISMASYGNNLRLFFQQLEEFAPLAAAVYNEEVYNEACQRFPHMQFFLGQEGLTQLCIMDTVTTVVAASSGIEALPAILESMKKGKALALANKEILVCAGELVSKTAKENGIKVLPIDSEHNALYQCLEGRTIEGIKKLILTASGGPLLNKSLEELSCVTKQDVLNHPIWNMGSKVTVDSSTLVNKGLEIIEAYWLFGLENXEILAVIHPQSLIHGMVEFLDGSVISIMNPPDMLFPIQYALTAPERFASPRDGMDFSKKQTLEFFPVDEERFPSIRLAQQVLEKQGSSGSFFNAANEVLVRRFLCEEISWCDILRKLTTLMECHKVYACHSLEDILEVDGEARALAQEI

SEQ ID NO: 4417 - protein, 147 aa, Oryza sativa (japonica cultivar-group)
MVKAVAVLASSEGVKGTIFFSQEGDPTSVTGSVSGLKPGLHGFHVHALGDTTNGCMSTPHFNPTGKEHGAPQDENRHAGDLGNITAGADVANVNVSDSQIPLTGAHSIIGRAVVVHADPDDLGKGHELSKTTGNAGGRVACIIGLQG

SEQ ID NO: 4418 - protein, 334 aa, Lactococcus lactis
MTYIPNPTRYDHMIYRPAGNSGLLLPALSLGLWHNFGSVDDFENARDMIHTAFDLGITHFDLANNYGPEPGSAERNFGRILKEDFQKLRDELIISTKAGYPMWPGPYGNWGSKKSLLASLDQSLERLGLDYVDIFYSHRPDPNTPIEETMGALKSALDSGKALYVGLSNYSAKETEAAVLAAEKLGFKLLIHQPRYSMLDRWIEDDLQETLTEAGIGTIAFKPLYQGLLTEKYLHGIPEDSRMRDPHYATLHDDSLTKERLEQVQALNDLAQSRGQSLAQMALAWVLRERDDKVQGITSALIGASRPQQIIENVAALEHLKFTDEELIKIEKLL

SEQ ID NO: 4419 - protein, 329 aa, Zea mays
  unsure (1)..(329): unsure at all Xaa locations
GVVAYNAMVAGYCRAGQLESARRLAAAVPVPPNAYTYFPVVRALCARGRIADALAVLDEMPRRGCAPIPPMYHVILEAACRGGGFRSAVRVLEDLHARGCALDVGNCNLVLNAICDQGSVDEALHLLRDLPSFGCEPDVVSYNAVLKGLCMAKRWGCVQELMEEMVRMACPPNIVTFNTLISYLCRNGLFERVHEVLAQMVEHGCTPDIRMYATIIDGICKEGXILEVAHEILNRMPSYGLKPNVVCYNTLLKGLCSAERWEEXPEELLAEMFDKDCPLDDVTFNILGDFFCQKGLVDRXVIELLEQMLEHGCMXPDVITYTTSDQWAS

SEQ ID NO: 4420 - protein, 286 aa, Saccharomyces cerevisiae
TYTTRQIGAKNTLEYKVYIEKDGKPVSAFHDIPLYADKENNIFNMVVEIPRWTNAKLEITKEETLNPIIQDTKKGKLRFVRNCFPHHGYIHNYGAFPQTWEDPNVSHPETKAVGDNDPIDVLEIGETIAYTGQVKQVKALGIMALLDEGETDWKVIAIDINDPLAPKLNDIEDVEKYFPGLLRATNEWFRIYKIPDGKPENQFAFSGEAKNKKYALDIIKETHDSWKQLIAGKSSDSKGIDLTNVTLPDTPTYSKAASDAIPPASLKADAPIDKSIDKWFFISGSV

SEQ ID NO: 4421 - protein, 181 aa, Triticum aestivum
MAGVGRNMVAPLLVLNLIMYLIVIGFASWNLNHFINGLTNRPGVGGNGATFYFLVFAILAGVVGAASKLAGVHHVRTWRGDSLATSASSSLVAWAVTALAFGLACKEIHIGGYRGWRLRVLEAFVIILAFTQLLYVLALHSGLFGNQFGGNHAGGYPAEHGAYGAGDPHNKGMGTGGVARV

SEQ ID NO: 4422 - protein, 329 aa, Corynebacterium glutamicum ATCC 13032
MKLLVTGGAGYVGSVAAAVLLEHGHDVTIIDNFSTGNREAVPADARLIEGDVNDVVEEVLSEGGFEGVVHFAARSLVGESVEKPNEYWHDNVVTALTLLDAMRAHGVNNLVFSSTAATYGEPDVVPITEDMPTQPTNAYGATKLSIDYAITSYAAAFGLAATSLRYFNVAGAYGNIGENREVETHLIPLVLQVATGHREKTFMFGDDWPTPDGTAVRDYIHILDLAKAHVLALESNEAGKHRIFNLGSGDGYSVKQVVEMCREVTGHPIPAEVAPRRAGDPATLIASSEKAKQELGWTPEHTDLRTIVEDAWAFTSALGDRSHAAKKKA

SEQ ID NO: 4423 - protein, 414 aa, Zea mays
MASRGSPSSYSSPRTPTSSTANPARPPPPPLYPTLSMADLAPVEIGPASSPTASDDYNAPPPSEDVLLRVPGARLHLVDRSRSHPLAAGDLSLLRIRSGDTSLAAIALLGPVQWPLARDVAAVKLDPCHYAFSLTVPASADDPSPDPLHYGLTLSRPDVRLDGVLAAYTSFSVHAVVGAGQLEARVRDEAEAAAYWTAVAPNVEAYGGAVARTIATGAEHLAKGILWCGEVTVESLRWGNEVLKRRMQPGDANAEVSPEMLRRIKRAKRVSQISEKVATGILSGVVKVTGYFTSSLANSKAGKKFFNMLPGEIVLASLDGFGKICDAVEVAGKNVLSTSSTVTTGLVSHRYGDKAAAATNEGLDAAGHAIGTAWAVFKIRQALNPKSVLKPTALATSTIRANVAELRAMHGSSK

SEQ ID NO: 4424 - protein, 173 aa, Pyrococcus abyssi
MVVYELNGKKPKIHPSAFIDESAVVIGDVVLEEKTSVWPSAVLRGDIERIYVGKYSNVQDNVSIHTSHGYPTEIGEYVTIGHNAVVHGAKIGNYVIIGIGSVILDGAKIGDHVIIGAGAVVPPNKEIPDYSLVLGVPGKVVRQLTEEEIEWTKKNAEIYVELAEKHLKGRRKL

SEQ ID NO: 4425 - protein, 1124 aa, Mougeotia scalaris
MSSSKRSQSSGRSSTQTRIQNRVTQASADAKLSTAFEVSSSSGGDSFDYTKSVTASLNPTEPLAAKSVTAYLQRMQRGSIIQSFGCMMAVEPGTFRIIAYSENVSEMLGVTPQSVPTGDHQNAIGIGTDVRSLLSPSSVSVVEKAVAANDVSMMNPIAVYSLATQKLFFAILHMNDVGLVIDLEPISSSSDSAMFSAGAVQSHKLAAKAISRLQSLPGGDICGLCDVVVEEVRELTGYDRVMAYKFHDDEHGEVVAEIRRSDLEPYLGLHYPATDIPQASRFLFIKNRIRMICDCTSPQVKVVQDSRIPQEMSLAGSTMRGVHGCHTQYMMNMGSTASLVMSVTINDTNEIAGGPGMKGRKLWGLIVCHHSTPRHIPFPIRSACEFLMQVFGLQLNMEVELAAQHREKHILRTQTLLCDMLLRDAPMGIVSQSPNVMDLVKCDGAALLFGGRCWLLGISPTQEQVKDIATWLISSHTDTTGLSTDSLVDAGYPKARELGVDVCGMAAARITENDFLFWFRGHAQKEVKWAGAKDGGSEEDGSRMHPRSSFKAFLEVVKQRSLPWEDVEMDAIHSLQLILRGSFQDIEDKEDRKIVHARLKEMHLQGMEELSSVASEMVRLIETATAPILAVDTAGCVNGWNFKISELTGLSIPEVMGKSLVKDLTHPSSKDTVEKLLYMALNGEEEQNVEIRLKTWGMQQGKGPVILMVNACASRDVSEKVVGVCFVAQDVTGEKIVQDKFTRIQGDYTTIVRSHNSLIPPIFGSDESGFCVEWNPAMERLSGVKREEAIGKMLTRELFGGILRLKNVDGLTKFMIVLNAAMSSHDTDKFPFTFYDRSGKIVEVLLTTSKRCNSEGVVTGVFCFLHTASSELQQALTVQKAAERVAEVKAKELAYIRQEIQNPLDGIHFARSFMEHTVLSEDQKQLIETSATCEKQLRRILADMDLASIEKGYLELETGEFSMATVMNSVVSQGMIQSTQKNLQLYCDTPPDFKSLSVFGDQVRLQQVLADFLLNAVQFTPPSGWVEIKVEPVVKKLPGGVSVANVDFRVSHPGEGLPEDLIDQMFDRADARVKSQEGLGLSICRKLVRLMNGEVQYRREGERNFFLLQLELPLAQRDDQASMK

SEQ ID NO: 4426 - protein, 240 aa, Glycine max
MAAPHGTVLGGADSFSQLPLVRVAAQQPADSTIRLFGCDFSNDAVAAGDQLPKADAAAAAGEGETRKFECHYCCRNFPTSQALGGHQNAHKRERQHARRAHLEASLAAAYLPAGAHVYGALFGGYGHHQAAPMPPPQYPVWPGMYGSVARSAAYGGMTVPGMVWRPTPVGADAFGAAGRHDEATAAVAGTGEVPGKGGHNAVMSVVATLPSCLTGGSPTEIGRSEMMGQKEGVVSLDLCL

SEQ ID NO: 4427 - protein, 332 aa, Oryza sativa
  unsure (1)..(332): unsure at all Xaa locations
MQYKNLGRSGLRVSQLSYGAWVTFGNQLDVKEAKALLQACRDAGVNFFDNAEVYANGRAEEIMGQAMRDLGWRRSDVVXSPPSSSWECRAXQRQGPLPEAHRRGPPRLAQGPRHGLRXDVVYCHRPDATTPVEETVRAMNWVIDXTAWXLLLGHLRVVXAQQITEAWSVANRLDLVGPIVEQPEYNLFSRHKVESEFLPLYSTYGLGLTTWSPLASGVLTGKYAKGNIPADSRFALENYKNLANRSLVDDTLRKVNGLKPIASELGVSLAQLAIAWCASNPNVSSVITGATKENQIVENMKALDVIPLLTPEVVDKIEAVVQSKPKRTESYR

SEQ ID NO: 4428 - protein, 219 aa, Halobacterium sp. NRC-1
MSRRCSRRCRSPRSTRTRCGRRSRRTPTARRRHRGVQPRPTARRPTTGRRPSWSRVSVMAVRTLPRRRRWAAPTRARRSRRWWTWIISGWLTVRSSPGGRETTRVIFPPTTSNRGMQFCDECGSMMHKQDGEMVCASCGASADSEGSEGFVETASQDTSDVIETSEDAASEGKPTAEETCPECGHGEAWYTIKQTGSADEPPTRFFKCQDCGNRWRDYN

SEQ ID NO: 4429 - protein, 464 aa, Mycosphaerella graminicola
MAKLYQNVDSAQLQRDADDCLLTYGTDFHPEIITNAEGQSITTASGHRMLDWTSGQMSTLIGHANPEIVETIHAHARNLDHLFSGMLSPPVISLAKRLTSVTPPGLDKALFLSTGGESNEAAIRLAKFYTGKFEIVGLASSWHGVTSGAIAAQYHAGRAGYGPNMPGNIALPTPNSYRSIFRHPDGSHDWKTELEYGFDLVDKQSCGSLAALILEPILSSGGMLVLPPGYLKAVKQHCERRGMLLIIDEAQTGIGRAGDMFAFQHFAEDDGVVPDILTLSKTLGNGLPLSAVVTSNKIASFAKENNFLFYTTHINDPLPAAVGDKVLEIVIRDHLVERSREMGKVFQERLRALQSRYGCIGDVRGRGLMAGVEIVADRVTKEGDIDLGAAIGKRMTENGLWAQLSTMASFGGVFRLAPPLTTTDEELMAGLDIIEEAFASTPGTKPLYERDVAAAYDSQVDARL

SEQ ID NO: 4430 - protein, 446 aa, Glycine max
  unsure (1)..(446): unsure at all Xaa locations
MANNEKDACSSFTDFPEDIQVCILSFLGPSEIATLACTSKKLGSLCSTVSKLWFSMCERRWGSNTRITQWAQGKKPAISFKQLYHTLHRWENLLGFWRRSGTGIPSLLFFEWGPSFISASRVSPSASDSDSNTYGVTKTPFLWMSLSEEGHVVTFLDPDGRRSDFKPENRSELVAVDVSFMGKTHFVVEEKRVRGGACHDCGDDVVVVESGSPPERLMAEIYQHFANPRSPGSDRSRRQRRREKERLYGRKWEPQHFVKIVNCSPTPARPLQGLWKGICGDMSLAFYLVGYDDIGGIACRRIGDPPDRFSGHAPVFWTSNATFLESPFSPEEESLYDSRVHLRPLQPGNEVLEQFPFSDSEVVNQIQQFQLSDNVVDRILHISSSYDLVVPGLAGTMNRRSAEGRIWQYRNGTXFGFGFLSDNFVIDMKHIVHNGCIVDTVNSSAN

SEQ ID NO: 4431 - protein, 247 aa, Petunia x hybrida
MVFPNQEFESSSSQRKSGRGKIEIKRIENTTNRQVTFCKRRNGLLKKAYELSVLCDAEVALIVFSSRGRLYEYANNSVRATIDRYKKHHADSTSTGSVSEANTQYYQQEAAKLRRQIRDIQTYNRQIVGEALSSLSPRGLKNLEGKLEKAIGRVRSKKNELLFSEIELMQKREIEMQNANMYLRAKIAEVERATQQMNLMHGGGSEYQQQPMSSTSQPYDARNFLPVNLLEPNPHYSRQDQTALQLV

SEQ ID NO: 4432 - protein, 383 aa, Oryza sativa
  unsure (1)..(383): unsure at all Xaa locations
MEARRISASPRPCSGRRVVARKRPRHEAAVNSVRKLQRREISSCRDRAFSMSAAQERFRNIQLQEEFDTHDPKENSLLLPYLRKRSKIIEIVAARDIVFALSQSGVCAAFSRDEVIRSLFYNKNNESLITVSVYGSENFSALRCRTTRIEYIRRAKPDAGFPLFESESLKWPGFVEFDDVNGKVLTYSAQDSTYKVFDLKNYTLLYSISDKNVQEIKISPGIMLLIYTRTSSSVPLKILSIEDGTVLKSFNHLLHRNKKVDFIEQFNEKLLVKQEGENLQILDVRNFQLTEVSRTEFMTPSAFIFLYELQLFLTFRNRSVAVWNFRGELVTSFEDHLLWHPDCNTNNIYITSDQDLIISYCKADSNDSSSEENVCFISFSCIX

SEQ ID NO: 4433 - protein, 324 aa, Solanum tuberosum
MVFSSFPVYLDHPNLHQLQQPDGHQQGNTGLENPTLQPPPMQVGASPGSIRPGSMVDRARLAKIPLPEAGLKCPRCDSTNTKFCYFNNYNLSQPRHFCKTCRRYWTRGGALRSVPVGGGCRRNKRSKSNNNNNSSKTAGSNVNTNTIASGTSTSASPSSCSTEIMNGRHHFSHEQPPQLTPLMAAFQNLNHHYGGFQPPPLVSTHHGNGTGALGHHHEMGFQIGSSTNTNNLPVPPGGGSDHQWRLPSLAANTNLYPFQHGTDQGIHESSSVNNNNINAHDDQGLNSTKQFLGTMENNTNQYWGGNAWTGFSGLNSSSSASHLL

SEQ ID NO: 4434 - protein, 156 aa, Zea mays
MAASDVEYRCFVGGLAWATDDHSLHNAFSTYGEVLESKIILDRETQRSRGFGFVTFSTEEAMRNAIEGMNGKELDGRNITVNEAQSRGGRGGGGGGYGGGRGGGGYGGGGRRDGGGGYGGGGGGYGGGGGYGGGGGGYGGGNRGGGYGNSDGNWRN

SEQ ID NO: 4435 - protein, 429 aa, Salmonella typhimurium LT2
MKALNREVIDYFKEHVNPGFLEYRKSVTAGGDYGAVEWQAGSLNTLVDTQGQEFIDCLGGFGIFNVGHRNPVVVSAVQNQLAKQPLHSQELLDPLRAMLAKTLAALTPGKLKYSFFCNSGTESVEAALKLAKAYQSPRGKFTFIATSGAFHGKSLGALSATAKSTFRRPFMPLLPGFRHVPFGNIDAMSMAFSEGKKTGDEIAAVILEPIQGEGGVILPPQGYLTEVRKLCDEFGALMILDEVQTGMGRTGKMFACEHENVQPDILCLAKALGGGVMPIGATIATEEVFSVLFDNPFLHTTTFGGNPLACAAALATINVLLEQNLPAQAEQKGDTLLDGFRQLAREYPNLVHDARGKGMLMAIEFVDNETGYRFASEMFRQRVLVAGTLNNAKTIRIEPPLTLTIELCEQVLKSARNALAAMQVSVEEV

SEQ ID NO: 4436 - protein, 326 aa, Glycine max
MGGWAIAVHGGAGVDPNLPLERQEEAKQLLTRCLNLGISALNSNLPAIDVVELVVRELETDPLFNSGRGSALTEKGTVEMEASIMDGPKRRCGAVSGLTTVKNPISLARLVMDKSPHSYLAFSGAEEFARQQGVEVVDNEYFITPDNVGMLKLAKEANTILFDYRIPTSGYETCGSGVESPLQMNGLPISVYAPETVGCVVVDREGRCAAATSTGGLMNKMTGRIGDSPLIGAGTYACDVCGVSCTGEGEAIIRGTLAREVAAVMEYKGLKLQEAVDFVIKHRLDEGMAGLIAVSNAGEVAYGFNCNGMFRGCATENGFMEVGIWE

SEQ ID NO: 4437 - protein, 265 aa, Agrobacterium tumefaciens str. C58 (Cereon)
MHFLRCGETVIHYRAKGLDSGKPVIAFINSLGTDFRIWDAVIEALGDDYAYVLHDKRGHGLSDVGRAPYSIDDHAGDLIALLDHLEIKSAVIWGLSVGGLIAQGLYARRPDLVRALLLSNTAHRIGTTEMWNARIDKIAADGLASLVDPVMERWFTPAFRQRENAAYAGARNMLSQQPEAGYSGTCAAIRDADFTEQAGRIAVPALCIAGDQDGSTPPELVQSLAGLIPKSRFVTIAGCGHIPCLEQPLVYAQAASIFLKTLPEH

SEQ ID NO: 4438 - protein, 436 aa, Achromobacter obae
MTKALYDRDGAAIGNLQKLRFFPLAISGGRGARLIEENGRELIDLSGAWGAASLGYGHPAIVAAVSAAAANPAGATILSASNAPAVTLAERLLASFPGEGTHKIWFGHSGSDANEAAYRAIVKATGRSGVIAFAGAYHGCTVGSMAFSGHSVQADAAKADGLILLPYPDPYRPYRNDPTGDAILTLLTEKLAAVPAGSIGAAFIEPIQSDGGLIVPPDGFLRKFADICRAHGILVVCDEVKVGLARSGRLHCFEHEGFVPDILVLGKGLGGGLPLSAVIAPAEILDCASAFAMQTLHGNPISAAAGLAVLETIDRDDLPAMAERKGRLLRDGLSELAKRHPLIGDIRGRGLACGMELVCDRQSREPARAETAKLIYRAYQLGLVVYYVGMNGNVLEFTPPLTITETDIHKALDLLDRAFSELSAVSNEEIAQFAGW

SEQ ID NO: 4439 - protein, 109 aa, Oryza sativa
  unsure (1)..(109): unsure at all Xaa locations
MSQQGIWYGDVFPLTRSLAAKPIVPWDAATMQSAENLVLGKTVKGGPAAAMEFATSRNEEMGVIGHDQSTDATAEHGVNISDTLVPGGGRIVTEFVPARMMAQQLKDVX

SEQ ID NO: 4440 - protein, 376 aa, Oryza sativa
  unsure (1)..(376): unsure at all Xaa locations
VSEEEEDGEGRERSRGGGGGGGRSRXEEENMAAWLVAKNTLKIMPFKLPPVGPYDVRVRMKAVGICGSDVHYLREMRIAHFVVKEPMVIGHECAGVIEEVGSGVTHLAVGDRVALEPGISCWRCRHCKGRRYNLCEDMKFFATPPVHGSLANQIVHPGDLCFKLPENVSLEEGAMCEPLSVGVHACRRADVGPETGVLIMGAGPIGLVTLLAARAFGATRVVIVDVDEHRLSVARSLGADAAVRVSARAEDVGEEVERIRAAMGGDIDVSLDCAGFSKTVATALEATRGGGKVCLVGMGHNEMTVPLTSAAIREVDVVGIFRYKDTWPLCIEFLRSGKIDVKPLITHRFGFSQEDVEEAFEVSARGRDAIKVMFNL

SEQ ID NO: 4441 - protein, 412 aa, Sulfolobus solfataricus
MMKIYLIEHVIGAVAYDENGNIVDYITNPRDLGKITEELLNNEKGIPFSATVELLKKVNPQEVVVENEAEVPKLQALGYRVSYEPYSKVSRIFRESLPKVAIDIKFASNEEDYYNFLHELSLEYTRRKLRSAAQKRDLLAIQAVRAMDDIDKTINLFSERLREWYSIHFPELDKLIEDHEEYATIVSRFGDRGFLTIDSLKELGFNEQRINRILDAAKKSIGADISEDDLSAMRMIANTILDLYNIRRNLNNYLEGVMKEVAPNVTALVGPALGARLLSIAGSLDELAKMPASTIQVLGAEKALFRALRSGGRPPKHGIIFQYPAIHTSPRWQRGKIARALAAKLAIAARVDAFSGRFIGDQLNEQLKKRIDEIKEKFAQPPPKKPQQQKPQQPQKQQAKGKKGGKRRGKRK

SEQ ID NO: 4442 - protein, 427 aa, Salmonella enterica subsp. enterica serovar Typhi
MNTNNTLMQRCHNAVPRGVGQIHPIFAERAENCRVWDVEGREYLDFAGGIAVLNTGHLHPGIVSAVEAQLKKLSHTCFQVLAYEPYLALCERMNQKVPGDFAKKTLLVTTGSEAVENAVKIARAATKRSGAIAFSGAYHGRTHYTLSLTGKVHPYSAGMGLMPGHVYRALYPCPLHNISDDDAIASIERIFKNDAAPEDIAAIIIEPVQGEGGFYAASPAFMQRLRALCDQHGIMLIADEVQSGAGRTGTLFAMEQMGVAADITTFAKSIAGGFPLAGVTGRADVMDAIAPGGLGGTYAGNPIACVAALAVLDIFEQENLLQKANTLGKTLRDGLMEIAETHREIGDVRGLGAMIAIELFENGDPGKPNATLTADIVARAREKGLILLSCGPYYNILRILVPLTIEASQIRQGLEIIAQCFDEAKQA

SEQ ID NO: 4443 - protein, 443 aa, Zea mays
MGEVAALRQLVGQVQELWDLYGANGNPVPRWYLPDFEHGSIKDDYCGGSSGYNSELLKIMETNQSPPCKRPRRDRNREKAPSSNKIEVMEQEIWRDFPEDLFETVIARLPVAAIFRFRTVCRRWSSLLGSDSFSRQYSEAPHGLPWFYTITHENSNNNVAMYDPLLKKWHHQSVPLNHTKIVIPVASVGGLVCLLDLSHRNFYICNPLTQSLKEIPPRSVHGWSRVVVGMVLNGRSSSDGYKVMWLDIDGTCEVYDSTKNVWSCPGTFPPSIKLPLALNLRSQPVAVGSMIYFMCAEPDGVLSYDVSTGIWRQFAIPLPLHLTDHTLAEFQGRVMLVGLLCKNAATCICIWELQKMTLLWKEVDRMPNLWCLEFYGKHMKMKCLGNSGLLMLSLKAKHMNRLVTYNLLKREWQKVPDCMLPWSRKRQWITCGTAFDPVPCALV

SEQ ID NO: 4444 - protein, 294 aa, Saccharomyces cerevisiae
TTPLVHVASVEKGRSYEDFQKVYNAIALKLREDDEYDNYIGYGPVLVRLAWHTSGTWDKHDNTGGSYGGTYRFKKEFNDPSNAGLQNGFKFLEPIHKEFPWISSGDLFSLGGVTAVQEMQGPKIPWRCGRVDTPEDTTPDNGRLPDADKDADYVRTFFQRLNMNDREVVALMGAHTLGKTHLKNSGYEGPWDATNNVFDNSFYLNLLNEDWKLEKNDANNEQWDSKSGYMMLPTDYSLIQDPKYLSIVKEYANDQDKFFKDFSKAFEKLLENGITFPKDAPSPFIFKTLEEQGL

SEQ ID NO: 4445 - protein, 300 aa, Lycopersicon esculentum
MAIMDEAANMVCVPLDYSRKRKSRSRRDRTKNVEETLAKWKEYNEKLDNEGKGKPVRKVPAKGSKKGCMRGKGGPENWRCKYRGVRQRIWGKWVAEIREPKRGSRLWLGTFGTAIEAALAYDDAARAMYGPCARLNLPNYACDSVSWATTSASASASDCTVASGFGEVCPVDGALHEADTPLSSVKDEGTAMDIVEPTSIDEDTLKSGWDCLDKLNMDEMFDVDELLAMLDSTPVFTKDYNSDGKHNNMVSDSQCQEPNAVVDPMTVDYGFDFLKPGRQEDLNFSSDDLAFIDLDSELVV

SEQ ID NO: 4446 - protein, 397 aa, Sagittaria sp. Mathews 383
DLEPVNLSDVPVTAAGALKSYKLAAKAISRLQSLSSGNISLLCDVLVREVRDLTGYGRVMAYKFHEDEHGEVISESRRSDLEPYLGLHYPATDIPQASRFIFMKNKLRMICDCTAQPVKVIQDKKFTQPLSLCGSTLRAPHGCHAQYMANMGSIASLVMSATISDEDEDDASSGQQRKRRKLWGLVVCHLTSPRFVPFPIRYACEFFMQVFAIQLNKEVELAAQTMEKYIFRTQTFLCDMLLRDAPVGIFTQSPNAMDIVKCDDAALYYKNQFWLLGITPAEGQIRGIAGWLRDCHNTTTGLSTDSLTAFSEAGYRGASTLGDAVCGMTAIKFTSRDFIFWFRSHTAKEIKWRGAKHDPVDKDDDGRKMHPRSSLKAFLDVVKRRSLPWEDVEMDAI

SEQ ID NO: 4447 - protein, 394 aa, Smilax rotundifolia
DLEPVNPADVPVTAAGALKSYKLAAKAISRLQSLPSRNISLLCDVLVREVSELTGYDRVMAYKFHEDEHGEVISECRRSDLEPYLGLHYPATDIPQASRFLFMKNKVRMICDCSAASVKVIQDKKLAQPLSLGGSTLRAPHGCHAQYMANMGSIASLVMSVTINEDDEEMDGDQQQKGRKLWGLVVCHHTSPRFVPFPPRYACEFLLQVFGIQLNKEVELAAQAKGKHIFWMQTLLCDMLLRDAPIGIFTQSPNVMDLVKCDGAALYYRKQFWLLGITPTEAQIKDIVAWLLECHDGTTGLSTDSLTEAGYPGSSALGNAICGMAAIKITSKDFIFWFRSHTSKDIRWGGAKHEPADRDDESQKMHPRSSFKAFLEVVKLRSLPWEDMEMDAIQ

SEQ ID NO: 4448 - protein, 401 aa, Oryza sativa
  unsure (1)..(401): unsure at all Xaa locations
PGRRRRRSHGELAAGRPRPRRRRRRRRRPPPSQHLGSTTRLAAPAAFVWIASARSXLTLSSSSXDPAPRPALTREQVKYCKEALKVLKKKLKQTAAIDISKEFHALPDIQTAFQTGKFTAAQNPANREKNRYSDVMPFDETRVRLKPCDHPSSNEYINASLIETDDQESHTKFISTQGPLVKTFGDFWQMVYENQCPXVIVMVTKFDGAKKKWQCDRYLPTNEGEERDYGKFSVKITKFKXXDGVLELRGLEVQQNESLTVRHVLHILYSDWPDHGVPHDSAFVRKILKRLYGIPKEXXPIVAHCSAGIGRTGAYITIHNTIERILLGDMSALDLSKTVKKFRSQRPGMVQTEDQYKFCYMAVVSELNDLLSNSKHXIISMEQSVPWVSLTDCRPSTPSIL

SEQ ID NO: 4449 - protein, 491 aa, Candida albicans
MVALKREAEPRENGKSKKAKTSLATSSFVLHSYSKLPNINEYAKAKSTPLDVFVWGTGSMCELGLGPSAKNKEVKRPRLNPYLTEEKLGGTKIVDFAVGGMHTLALDGKNRIWSWGGNDSGVLGRDTSQAKEVLKDIDGKNGNDDDDDDDDEDGDLNEAESTPALVENLPEGEIVQLAATDNLSAALLSNGDVYAWGCFRCNEGLLGFLRDEIKLQKTPLKIKELKNIVQLAAGKDHLLALDSKGIVYAWGNGQQYQLGRRILERHRYRSLEPQQFGLYNIKYIASGDFHCFAIDHSDNVYAWGLNQYGQCALTGDNGELEDGSVLMKPTLIPELSHKGIKEIAAGEHHTLALTEDGQVYAWGRYDMKEIGIPKDKLPKSTFKDQHGNPRSVPVPTKLEFAVKIKTIGVGSHHSFAVTEDGVVYAWGFAETYGPGLGPSIDDVEKPTRIVNTATKNEDILLIGAGGQFSVSGGVKSKTKRKQKLNLISMKI

SEQ ID NO: 4450 - protein, 259 aa, Zea mays; identical to SEQ ID NO: 1212

SEQ ID NO: 4451 - protein, 209 aa, Triticum aestivum
RLLLTFSAALVGVSHGSDGTNSSVPPGKFPLGFALTLTASALFSLILSLMQLTFDKVLRSDTFHDVMEMQFWSNTAAAVVSVAGLFISGEWSALHGEMDGYKKGRVAYGMTLAWTAISWQLTTMGLMGLVASVSSLFTNVISTVGLPLSPIIAVIFLGDRMDGVKVLAMLVAVWGFLSYIYQHYLDDAKVKKILAERSAEHRTVKLATE

SEQ ID NO: 4452 - protein, 333 aa, Pisum sativum
MAGNIEVEEDDRVPLRLRPEWSDVTPIPQDDGPSPVVPINYSEEFSEVMDYFRAVYFAKELSSRALALTAEAIGLNAGNYTVWHFRRLLLESLKVDLHVEREFVERVASGNSKNYQIWHHRRWVAEKLGPEARNSELEFTKKILSVDAKHYHAWSHRQWVLQNLGGWEDELSYCSELLAEDIFNNSAWNQRYFVITRSPVLGGLKAMRESEVLFTVEAIISYPENESSWRYLRGLFKDESTLYVNDAQVSSLCLKILKTKSNYLFALSTLLDLSASVIQPNEDFRDAIEALRLQILIKQDSDIAITICSILEQVDPIRVNYWVWRKSRLPQAA

SEQ ID NO: 4453 - protein, 428 aa, Brassica rapa
DNSYTLTFLLVFFVLILFRPAFSINTLSATESLTISSNRTLVSPGNVFELGFFRTTSSSRWYLGIWYKKLTDRTYVWVANRDNPLSSSTGTLKISGNNLVILGHSNKSVWSTNVTRGNERSPVVAELLANGNFVIRDSNNTDASGFLWQSFDFPTNTLLPEMKLGYDLKTGLNRFLTSWRGSDDPSSGDHLYKLEPRSFPEFYIFNDDFPVHRIGPWNGIGFSGIPEDQKSSYMVYNFTENSEEVAYSFQMTNNSIYSRLIISSEGYFQRLTWTPSTKIWEVFWSSPVSLQCDPYRICGPYAYCDENTSPVCNCIQGFDPKNRQQWDVRVASSGCIRRTRLSCCGDGFTRMKNMKLPDTTMAIVDRSIDVKECKKRCLSDCNCTAYANADIRNGGTGCVIWTGTLEDIRTYFAEGQDLYVKLAAADLV

SEQ ID NO: 4454 - protein, 489 aa, Cladosporium fulvum
MASQSPPRNASAAAAVRTRAADAAEQPYFPDEPAAPVIRTAIPGPKSQEAIKELDRVFDTRSLNMMANYQNSFGNYIADLDGNVLLDVYAQIVSIPVGYSNPSLLLAATSPDMASAIINRPALGNFPQHDWAHILETGILKVAPPGCDQVFTAQAGSDANELAYKAAFMWRRRQERGGPEVEFTQEEIDSSMNNKSPGSPDMSILSFKTAFHGRLFGSLSTTRSKPIHKLDIPAFDWPQASFPSLKYPLEQHAEENAKEEARCLAEVEELLTTYHNPPAAVIVEPIQSEGGDNHASPAFFNGLREVTRKHNVLLIVDEVQTGVGATGKFWAHEHWNLRDPPDMVTFSKKAQTAGYYFGNPELRPNKPYRQFNPWMGDPARALLFRAIINEVERLNLVQNTAETGVYLYSGLENLGQKYPGEIQNLRGKGQGTFIAWDSPQTRRGSEEGEGCWYQHWGSGERAVRLRPMLIFQKKHADIFLEALEKVLKS

SEQ ID NO: 4455 - protein, 245 aa, Pinus armandii
YTYSLRKKGPEDVIVKVIYCGICHSDLVQMRNEMGMSNYPMVPGHEVVGMVTELGSEVKKFKVGDHVGVGCIVGSCRSCGNCNQSMEQYCSKRIWTYNDVNHDGTPTQGGFASSMVVDQMFVVRIPENLPLEQAAPLLCAGVTVFSPMKHFGMTEPGKRCGILGLGGVGHMGVKIAKAFGLHVTVISSSDKKKEEAMEVLGADAYLVSKDAEKMMEAAESLDYIMDTIPVAHPLEPYLALLKTNG

SEQ ID NO: 4456 - protein, 98 aa, Buchnera aphidicola
LPSASLNDSNFGLYEPAGGSAPDIAGKNIANPIAQILSIAMLVRYTMKLPIISDQIESSVIDTLKKGYRTLDIANDKEKCESTNDIGDIISYILKKRI

SEQ ID NO: 4457 - protein, 694 aa, Saccharomyces cerevisiae
MTEQYSVAVGEAANEHETAPRRNIRVKDQPLIRPINSSASTLYEFALECFTKGGKRDGMAWRDIIDIHETKKTIVKRVDGKDKPIEKTWLYYELTPYITMTYEEMICVMHDIGRGLIKIGVKPNGENKFHIFASTSHKWMKTFLGCMSQGIPVVTAYDTLGESGLIHSMVETDSVAIFTDNQLLSKLAVPLKTAKNVKFVIHNEPIDPSDKRQNGKLYKAAKDAVDKIKEVRPDIKIYSFDEIIEIGKKAKDEVELHFPKPEDPACIMYTSGSTGTPKGVVLTHYNIVAGIGGVGHNVIGWIGPTDRIIAFLPLAHIFELTFEFEAFYWNGILGYANVKTLTPTSTRNCQGDLMEFKPTVMVGVAAVWETVRKGILAKINELPGWSQTLFWTVYALKERNIPCSGLLSGLIFKRIREATGGNLRFILNGGSAISIDAQKFLSNLLCPMLIGYGLTEGVANACVLEPEHFDYGIAGDLVGTITAKLVDVEDLGYFAKNNQGELLFKGAPICSEYYKNPEETAAAFTDDGWFRTGDIAEWTPKGQVKIIDRKKNLVKTLNGEYIALEKLESIYRSNPYVQNICVYADENKVKPVGIVVPNLGHLSKLAIELGIMVPGEDVESYIHEKKLQDAVCKDMLSTAKSQGLNGIELLCGIVFFEEEWTPENGLVTSAQKLKRRDILAAVKPDVERVYKENT

SEQ ID NO: 4458 - protein, 469 aa, Lactococcus lactis subsp. lactis
MGFMRKADFELYRDADKHYNQVLTTRDFLALGVGTIISTSIFTLPGQVAAQFAGPGVVFSYLLAALVAGFVALAYAEMSTVMPFAGSAYSWISVLFGEGFGWIAGWALLAEYFIAVAFVGSGFSANLQQLLAPLGFHLPKVLANPFGTDGGVVDIISLLVILLSAIIVFRGASDAGRISQILVVLKVAAVIAFIIVGITVIKPANYHPFIPPHNPKTGFGGFSGIWSGVSMIFLAYIGFDSIAANSAEAKKPQKTMPRGIIGSLLIAVVLFAAVTLVLVGMHPYSAYAGNAAPVGWALQQSGYSVLSEVVTAIALAGMFIALLGMVLAGSRLLYAFGRDGLLPKGLGKMNARNLPANGVWTLAIVAIVIGAFFPFAFLAQLISAGTLIAFMFVTLGIYSLRRRQGKDLPEATYKMPFYPVLPALGFIGSLFVFWGLDVQAKLYSGIWFLIGILIYFAYGNRRSRKSEEK

SEQ ID NO: 4459 - protein, 176 aa, Zea mays
MVKAVAVLAGTDVKGTIFFSQEGDGNSRHMFLTYNEDLCGLTRISASWVGPTTVTGSISGLKPGLHGFHVHALGDATNGCMSTGPHFNPVGKEHGAPEDEDRHAGDLGNVTAGEDGVVNVNITDSQIPLAGPHSIIGRAVVVHADPDDLGKGGHELSKSTGNAGGRVACGIIGLQG

SEQ ID NO: 4460 - protein, 151 aa, Zinnia elegans
WFQNRRTRWKTKQLERDYGVLKSNFDSLKHKYESLKQDNESMVKQIKELKSKLYEEDEPDNIPMPEQSDDKPKSPENMVETAYFPDFKDGSSDSDSSAIMGDAQKAYQPQFVKLEEHNFFGGDESCNFFSDDQAPTLQWYCQDQWNLSEEN

SEQ ID NO: 4461 - protein, 576 aa, Myxococcus xanthus
MVRRPGGVMMGAPSSQSPFMEARLPASLATVFAALPDPSYVLDDTGRVLVCSQAGARTVGRLPEELVGRHWGELGFPPEELARLETARARVMLIQDTCELEAPWTTQTGLRRHALMLSPLPSEDGGACCVLVTARPLTDAEGVFSRAMELELAARAEVEQDERRRSFLNQGMTTLFTHPPDPESIYTLLAHLAVPDVVDWCLVDTLEQRPWVTRVAAACLDPTEEERSGALPTRTELWDDATVGLLPVLRTGDPELVPAVTDSLLRAAAAETAHPALLRLLQARSYMIVPLRARGHTLGAVNFVSSGSGRGYGPDDLALAEELCLRARLAIDNARLVGESRRAARAREDLLAVVSHDLKNPLGVVQLGAALLLRGAGAKPGGSVAKQATRIQDATERMSRLISDLLDWGRLEAGGLPLEWAEHRVVGLLTEALDSIRPLAESKRLRLSVEFPTAGVRVLCDKVRLQVLANLLANAVKFTTAGGDLMLGARARGGEVSVHVRDTGSGITPDALPHIFDRYWQARDAGSRGTGLGLPSPRGSSKTHGGGIQAESTLPSAGASASHAVHPPLARRATDA

SEQ ID NO: 4462 - protein, 206 aa, Cicer arietinum
VFLPDWYVISNHQLWKILRISCSFYYLVASSACFVHIMKIQVLAEREQKIQTEVKEIRKVFYCELCNKQYKLAMEFEAHLSSYDHNHRKRFKQMKEMHGSSSRDDRQKREQQRQEREIAKFAQIADAQKQQRLQLQQESGSAPVSASSESRTATALTDQEQRNTLKFGFSSKGTASKSTISAKKQNVPKKQNVPVASIFGNDSDDE

SEQ ID NO: 4463 - protein, 507 aa, Yersinia pestis
SGKHSAETHHAAKKRWLDSHDTGYHKSMGLRHIQMIAIGGSIGTGLFLGTGARLQMAGPALALVYLVCGIFSFFILRALGELVLHRPTSGSFVSYAREFLGEKASYVAGWMYFLNWAMTGIVDITAVALYMHYWGTFSDVPQWLFALGALSIVATMNMIGVRWFAEMEFWFALIKVAAIALFLIVGVIFLGTGQSVAGHTTGIHLITDNGGFFPHGLLPALIMVQGVIFAFAGIELIGTAAGECKDPEKMLPKAINSVIWRIGLFYVGSVVLLVCLLPWHAYQAGQSPFVTFFSNLGVPYIGTIMNIVVLSAALSSLNSGLYSTGRILRSLSMGGSAPKFMSKMSPQSVPYAGILVTVGIYVLGVLLNYLVPSQVFEIVLNIASLGIISSWAFIIICQMKLRQAIKRGMAKPVSFKMPGAPVTSWLTLIFLAGVLVMMAFDYPNGTWTIASIPVLTLLLIAGWFSLRKRANEVAAAPIDVWSQEILFEEPDAQNVSPKELYEQKSVG

SEQ ID NO: 4464 - protein, 428 aa, Brassica napus
ENSYTLSFLLVFFVLILLPPAFSINTLSSEESLTISSNRTLVSRGDVFELGFFKTTSSSRWYLGIWYKKFPYRTYVWVANRDNPLPNSIGTLKISNMNLVLLDHSNKSVWSTNLTRRNERTPVMAELLANGNFVMRDSNNNDASEFLWQSFDYPTDTLLPEMKLGYNLKKGLNRFLISWRSSDDPSSGDYSYKLEPRRLPEFYLLQGDVREHRSGPWNGIRFSGILEDQKLSYMEYNFTETSEEVAYTFRMTNNSFYSRLTLSSTGYFERLTWAPSSVVWNVFWSSPNHQCDMYKICGPYSYCDVTTSPVCNCIQGFRPKNRQQWDLRISLRGCIRRTRLSCSGDGFARMKYMKLPETTMAIVDRSIGVKECEKRCLSDCNCTAFANADVRNGGTGCVIWTGRLDDMRNYVPDHGQDLYVRLAAADLV

SEQ ID NO: 4465 - protein, 245 aa, Zea mays
MAMVLGMVLGKIPVETPKHEVLHTGAGYEIRKYPPSIAAELTYDPKEMKGDPDGGFTVLANYIGVLGKPQNTKPEKIAMTAPVITTGSGSGGDGEKIAMTAPVITTGSGSGGDGEKIAMTAPVITTGGGEPEPVAMTAPVITDDQQAPGKVTMQFLLPSKYTRVEEAPRPTDERVVIREVPERKFGVARFSGVATDRTVREKAKGLKAALEKDGYTIKGPFVLARYNPPFTLPPLRTNEVMFPVE

SEQ ID NO: 4466 - protein, 363 aa, Oryza sativa
DFEVEGIQNLTENDVSDEEIEAEDLARRMWKDRIKLRRIKERQDIALQQAVDKSKGKPISDQAMRKKMSRAQDGILKYMLKLMEVCNARGFVYGIIPDKGKPVSGASDNIRAWWKEKVKFDKNGPAAIAKYESENLASADAPSSGIKSQHSLMDLQDATLGSLLSSLMQHCDPPQRKYPLERGTPPPWWPSGNEDWWIALGLPRGQIPPYKKPHDLKKVWKVGVLTGVIKHMSPNFDKIRNHVRKSKCLQDKMTAKESLIWLGVLQREERLVLSIDNGMSEVTHHGALEYRNGDTHSSSNEYDVDGFEEAPLSTSSGDDEQHAPTRRERAKVKRPNQVVPKKAGTKEPPKRKRPRHRPNCVSP

SEQ ID NO: 4467 - protein, 470 aa, Shigella flexneri 2a str. 301
MVDQVKVVADDQAPAEQSLRRNLTNRHVQLIAIGGAIGTGLFMGSGKTISLAGPSIIFVYMIIGFMLFFVMRAMGELLLSNLEYKSFSDFASDLLGPWAGYFTGWTYWFCWVVTGMADVVAITAYAQFWFPDLSDWVASLAVIVLLLTLNLATVKMFGEMEFWFAMIKIVAIVSLIVVGLVMVAMHFQSPTGVEASFAHLWNDGGWFPKGLSGFFAGFQIAVFAFVGIELVGTTAAETKDPEKSLPRAINSIPIRIIMFYVFALIVIMSVTPWSSVVPEKSPFVELFVLVGLPAAASVINFVVLTSAASSANSGVFSTSRMLFGLAQEGVAPKAFAKLSKRAVPAKGLTFSCICLLGGVVMLYVNPSVIGAFTMITTVSAILFMFVWTIILCSYLVYRKQRPHLHEKSIYKMPLGKLMCWVCMAFFVFVVVLLTLEDDTRQALLVTPLWFIALGLGWLFIGKKRAAELRK

SEQ ID NO: 4468 - protein, 158 aa, Rhodopseudomonas palustris
MASIYDFTAKSLVGKDVSLKQFEGKVLLIVNTASACGFTPQYKGLEALQEKYGPRGFSVLGFPCNQFGAQEPGDEAQIAQFCSTNYGVTFPMFAKIDVNGAGAHPLYKFLKDEKGGLLGSAIKWNFTKFLVDRSGRVVSRHAPTTTPEALSKEIETLL

SEQ ID NO: 4469 - protein, 118 aa, Lycopersicon esculentum
QIAEFKEAFSLFDKDGDGCITTKELGTVMRSLGQNPTEAELQDMINEVDADGNGTIDFPEFLNLMARKMKDTDSEEELKEAFRVFDEDQNGFISAAELRHVMTNLGEKLTDEEVDEMI

SEQ ID NO: 4470 - protein, 164 aa, Triticum aestivum
MAAPHGTVLGGADSFPQLPLVVRPAGQPPADATIRLFGCDFSNDAAAAADQLPPKAEAAVGEGETRKFECHYCCRNFPTSQALGGHQNAHKRERQHARRAHLEASLAAAYLPAGAHVYGALFGGYGHHQAAPMPPPQYPVWPGMYGGVARSAAYGGMPVPGMGW

SEQ ID NO: 4471 - protein, 329 aa, Triticum aestivum
  unsure (1)..(329): unsure at all Xaa locations
MGVKGFVEGGIASIVAXGCSTHXPLDLSQGPGMQLQGESSAAAAQXRSRPALAFPGPGRHTADAPRTRPXRRALPRPIVICTQILRADGRLRALLGXSSATMLRQTLYSTTRXMGLYDILKISGPPTEPPAAACCRCTSPPAFAGGVGEPPAVPADLATGVLRIDGRLTARRPRNYRSVGDAIARMTRDEGVRSLWRGSALTVNRAMIVTASQLATYDQAKEAILARRGPAADGLGTHVAASFAAGIVAAAASNPVDVVKTRVMNMKVAPGAPPPYAGALDCALKTVRSEGVMALYKGFIPTVSRQGPFTVVLFVTLEQVRKVFKDAEF

SEQ ID NO: 4472 - protein, 408 aa, Salmonella enterica subsp. enterica serovar Typhi
MSLSVTRENFDEWMVPVYVPAPFIPVRGEGSRLWDQQGKEYIDFAGGIAVNALGHAHPALREALNEQANRFWHTGNGYTNEPALRLAKKLIDATFAERVFFCNSGAEANEAALKLARKYAHDRVGNHKSGIVAFKNAFHGRTLFTVSAGGQPTYSQDFAPLPPDIRHAAYNDLNSASALIDDNTCAVIVEPVQGEGGVIPATNAFLQGLRELCDRHQALLIFDEVQTGVGRTGELYAYMHYGVTPDILTTAKALGGGFPIGAMLTTQDYASVMTPGTHGTTYGGNPLATAVAGKVLDIINTPEMQNGVRQRHDAFIERLNTINVRFGMFSEIRGLGLLLGCVLQTEFAGKAKLIAQEAAKAGVMVLIAGGDVVRFAPALNVSDEEIATGLDRFALACERLQAGGASCG

SEQ ID NO: 4473 - protein, 409 aa, Oryza sativa
  unsure (1)..(409): unsure at all Xaa locations
RALPTPLHRAPLRSPGLQPNFCFAKQASSPRRPRSLLLGWAACLTREAAAMAFDAFTDKNAVFRRLKAKPENKMCFDCSAKNPTWASVTYGIFLCLDCSAVHRSLGVHITFVRSTNLDSWTPDQLKMMAFGGNNRAHAFFKQHGWTDGGKVDAKYTSRAAELYRQILQKEVAKSSAXXNVLPSSPVAASQPQNPSDDFPEFKLPEAPAENTNGKQEPDVTNSQKAPTHSVKKSIGAKKIGGKTGGLGVKKLTTKPSESLYDQKPEEPKPAAPVMTTSTTKSGPSLHSRFEYVENEPAVDSRNGGTQMTGHVAPPKSSNFFQEYGMDNGFQKKTSTAATKTQGSSSISSADLFGRRDNDSNLDLSAADLINRISFQASQDLSSLKNMAGETGKKLTSIASNFISDLDRIL

SEQ ID NO: 4474 - protein, 210 aa, Schizosaccharomyces pombe
MHRLFGRKPPTQPTASLTDAIDSLDKRSDSVEVKIAKLDAQLSVFQQKIANTRPGPGQTALKQRAMNVLRQKKIYESQLQQLQQQSFNMEQAAMTTESLKNTMATVQTMQETARQLKSQSKNVSIEKIEKLQDEIQDYMDAAGELNEVLGQNMTDINVDEEELDAELEALQQESSWLGDQSTAEKPSYLMPSNELPNFVDEEVAEPSTAQ

SEQ ID NO: 4475 - protein, 276 aa, Mesorhizobium tianshanense
WGFDGSSTMQAEGHSSDCVLKPVAVYPDPARTNGVLVMCEVMMPDGVTPHASNKRATILDDEGAWFGFEQEYFFYKDGRPLGFPESGYPAPQGLYYTGVGYSNVGSVARQIVEEHLDQCLAAGINHEGINAEVAKGQWEFQIFGKGSKKAADQMWMARYLMQRLTEKYGIDIEYHCKPLGDTDWNGSGMHANFSTAYMREVGGKDYFEALMAAFDKNLMDHIAVYGPDNDKRLTGKHETAPWNRFSYGIADRGASIRVPHSFINNGYKGYLEDRRP

SEQ ID NO: 4476 - protein, 163 aa, Triticum aestivum
ATNEAFDQEGWFSTGDIGWIVPHHGIGPSRQCGGMIVLEGRAKDTIVLSTGENVEPAEIEEAAGRSNLINQIVVIGQDQRRLGAIIVPNNDEILAEAKRKSILGENGDLAKDKVMNMLYDELKTWTMHCSFRVGPIMIVDEPFTIDNGLMTPTMKIRRDKVTD

SEQ ID NO: 4477 - protein, 169 aa, Streptomyces avermitilis MA-4680
MTTDNAATSVLDTEIDALQGGSADLSQYAGKAVLIVNVASKCGLTPQYAGLERLQERYAAQGFTVLGVPCNQFLGQEPGTSEEIAEFCSATYGVTFPLTEKVEVNGDARHALYESLVGFADGEGHTGDIRWNFEKFLIGRDGKVVARFSPQTEPESAEVVTAVERQLAG

SEQ ID NO: 4478 - protein, 282 aa, Escherichia coli CFT073
MAYITLSSLRVNPEFQDFSLCCYDYLVKCFTLSSQRRRIIGIPIFCTSTFLIFFSVCCFFTLFAAFAHKTVLFCILKDLHKANNVPKVISKSFIVEVSMSDVLRPYRDLFPQIGQRVMIDDSSVVIGDVRLADDVGIWPLVVIRGDVHYVQIGARTNIQDGSMLHVTHKSSYNPAGNPLTIGEDVTVGHKVMLHGCTIGNRVLVGMGSILLDGAIVEDDVMIGAGSLVPQNKRLESGYLYLGSPVKQIRPLSDEEKAGLRYSANNYVKWKDEYMDQGNHTQP

SEQ ID NO: 4479 - protein, 170 aa, Prochlorococcus marinus subsp. pastoris str. CCMP1378
MLSSIDKFLKLMVVDVQNTTVVSANGEAKKLGQYSGNVILIVNVASYCGNTAQYKDLQKLHDKYSKKGLRILAFPCNDFGNQEPDSLTEIKNFCSTKYGVEFEIMEKVHAKGNTSEPYTTLNNVEPKGDVEWNFEKFLIGKDSNVIARFKPGIQPFDENLIAAIEVAIDS

SEQ ID NO: 4480 - protein, 149 aa, Zea mays
REEMAASDVEYRCFVGGLAWATDDHSLNNAFSTYGEVLESKIILDRETQRSRGFGFVTFSTEDAMRSAIEGMNGKELDGRNITVNEAQSRGGRGGGGGGYGGGRRDGGGYGGGGGGYGGGRGGYGGGGGGYGGGNRGGGYGNNDGNWRN

SEQ ID NO: 4481 - protein, 173 aa, Photobacterium leiognathi
MNKAKTLLFTALAFGLSHQALAQDLTVKMTDLQTGKPVGTIELSQNKYGVVFTPELADLTPGMHGFHIHQNGSCASSEKDGKVVLGGAAGGHYDPEHTNKHGFPWTDDNHKGDLPALFVSANGLATNPVLAPRLTLKELKGHAIMIHAGGDNHSDMPKALGGGGARVACGVIQ

SEQ ID NO: 4482 - protein, 255 aa, Leuconostoc mesenteroides subsp. mesenteroides ATCC 8293
MLLKNKVALVTGASRGIGAAIAKEYAKQGAFVIINYLENTKKADEVVAEIISDGGQAIAIACDVRDEKQVKNMLYDIFENFGTIDIIVNNALSQYQFDPKHRKMLDQLKWSDYQNQIDGSLKAVLNVTQGALSRLKTNNSSRIINITSNLIRSPAIPYHDYIVGKSAILGLTRTMASELGAFGIRVNAIAPGLTYPTASSKYTHRDIREALIAQTPTKRLTTPEDVAGSAVFLASELSNNMTGQCLFIDGGLTML

SEQ ID NO: 4483 - protein, 497 aa, Schizosaccharomyces pombe
MADYLLYESATGYSLFDVVGADQIAAKTKEVQLSLQDISKFGKVVQLRSFIPFKNAAHALENANDISEGVLNDFLKNFLELNLPKASKKKKVSLGVQDKNLATSIKSEIDAIECDTSELTQDLLRGIRFHGDKLLKQLSPGDFERAQLGLGHSYSRAKVKFNVNRNDNMIIQAIAILDQLDKDINTFAMRMKEWYSWHFPELSKIVGDNYKYAVIVTLVGDKTTINDEMLHDLAAVVDDDKDIAQSIINAGKVSMGQDISEIDLENILSFAERVIKLSNYRKQLHNYLVQKMNVVAPNLAELIGEMVGARLISHAGSLTNLSKCPASTVQILGAEKALFRALKTRGNTPKYGIIYHSSFIGKAGAKNKGRISRFLANKCSIASRIDNFSDAPTTAFGQVLRRQVEERLNFFDTGVAPTRNSIAMAEAYEKALSSVNIDGDEEVDIDVEETVETISEKPSKKEKKDKKEKKKEKSKKKRSADDASEEVKKSKKKKKSH

SEQ ID NO: 4484 - protein, 152 aa, Pisum sativum
MVKAVAVLSNSNEVSGTINFSQEGNGPTTVTGTLAGLKPGLHGFHIHALGDTTNGCISTGPHFNPNGKEHGAPEDETRHAGDLGNINVGDDGTVSFTITDNHIPLTGTNSIIGRAVVVHADPDDLGKGGHELSKTTGNAGGRVACGIIGLQG

SEQ ID NO: 4485 - protein, 379 aa, Chlamydophila pneumoniae CWL029
MKHLAVLGSTGSIGRQTLEIVRRYPSEFKIISMASYGNNLRLFFQQLEEFAPLAAAVYNEEVYNEACQRFPHMQFFLGQEGLTQLCIMDTVTTVVAASSGIEALPAILESMKKGKALALANKEILVCAGELVSKTAKENGIKVLPIDSEHNALYQCLEGRTIEGIKKLILTASGGPLLNKSLEELSCVTKQDVLNHPIWNMGSKVTVDSSTLVNKGLEIIEAYWLFGLENVEILAVIHPQSLIHGMVEFLDGSVISIMNPPDMLFPIQYALTAPERFASPRDGMDFSKKQTLEFFPVDEERFPSIRLAQQVLEKQGSSGSFFNAANEVLVRRFLCEEISWCDILRKLTTLMECHKVYACHSLEDILEVDGEARALAQEI

SEQ ID NO: 4486 - protein, 214 aa, Paeonia rockii
IVESVGEGVTDVKPGDHVLPIFTGECKECRHCKSEESNMCDLLRINTDRGVMLNDGKSRFSINGQPIFHFVGTSTFSEYTVLHVGCLAKINPEAPLDKVCVLSCGISTGLGATLNVAKPKKGSTVAIFGLGAVGLAAAEGARIAGASRIIGVDLNPKRFDEARKFGVTEFVNPKDYNKPVQEVIAEMTGGGVDRSVECTGSIMAMMSAFECVHG

SEQ ID NO: 4487 - protein, 330 aa, Streptomyces avermitilis MA-4680
MEYTQLGRTGLKVSRLVLGTMNFGPQTDEADSHAIMDAALDAGINYFDTANVYGWGENKGRTESIIGNWFAQGGDRRDKVVLATKVYGNMAAGGDPWPNHDKLSALNIRRAVDASLKRLQTDYIDIYQFHHVDRSTPFEEIWQAVDVLVQQGKILYVGSSNFPGYKIAQANEIAARRHGTIGLVSEQCLYNLAERRAEMEVIPAAQEYGLGVIPWSPLHGGLLGGVIKKEAEGGRRASGRAADSLANTAIRAQIQSYEDLLDKHGVEPGEAALAWLLTRPGVTGPIVGPRTAEQLDSALRAVELELSEELLSGLDEIFPGPGPSPEAFAW

SEQ ID NO: 4488 - protein, 474 aa, Solanum tuberosum
DLFLLSFATILTIIIYVFFKYFFAKPKEKIPPGTFGWPIIGETIQFFISLYYGMVHEFVQERTKKYNSHVFKTSLLGQKVVIFSGPAANKFIFTQGNKLIIGWRPKSVQKLFASTSFVPIEHDTKRAHNVISYLLNSQNVERLISTMDNMSHLHLKNHWKGKNEVIVYDLVKLFTFSLSIRAFIGIKESDKILNLYEKFKIFTYGLLAVDINLPGTTFYKAMKAGNELRKQMKVIIKQRRAELSENPNLSKVDVLTQMINEQDEDGKYMTEVEIEDKVFGFIIGSYDTTATTITLTMKYLQQMPEFFNEIIQEQNEISMQMMPRKELCWNDIQKMKKTWSFVNEVLRNTPVVQGIFREVIEDFTYEDFYIPKGWKIYLSFGATQKNGEYFPNPTKFDPSRFEGNGQVPYTSVPFGGGHRMCPGKEFARILILVFLHHLLKNFRWEPKVPSEKILYPFFLLAIPTDGYPITLSAV

SEQ ID NO: 4489 - protein, 223 aa, Desulfitobacterium hafniense
MIKAHARSSMTMNFVRALIDGGFADLHHPEYWNLSWVGHSPLADEYRRMVNAIGDAVRFMETLSGSEVHNLNRVDFYTSHEALLLPYEESLTRQVPRHWGHFNLSTHYPWIGMRTAAVDGAHAEYFRGIRNPIALKVGPSVTPDQMLRTIDLLNPEDEPGRLTFIHRMGATAIADKLPPLLEAMRRDGRRVLWVCDPMHGKHEKPSNGYRTGGTENRAEIKQL

SEQ ID NO: 4490 - protein, 479 aa, Escherichia coli K12
MISGRHDRKPYYAGEAAIMAINSPLNIAAQPGKTRLRKSLKLWQVVMMGLAYLTPMTVFDTFGIVSGISDGHVPASYLLALAGVLFTAISYGKLVRQFPEAGSAYTYAQKSINPHVGFMVGWSSLLDYLFLPMINVLLAKIYLSALFPEVPPWVWVVTFVAILTAANLKSVNLVANFNTLFVLVQISIMVVFIFLVVQGLHKGEGVGTVWSLQPFISENAHLIPIITGATIVCFSFLGFDAVTTLSEETPDAARVIPKAIFLTAVYGGVIFIAASFFMQLFFPDISRFKDPDAALPEIALYVGGKLFQSIFLCTTFVNTLASGLASHASVSRLLYVMGRDNVFPERVFGYVHPKWRTPALNVIMVGIVALSALFFDLVTATALINFGALVAFTFVNLSVFNHFWRRKGMNKSWKDHFHYLLMPLVGALTVGVLWVNLESTSLTLGLVWASLGGAYLWYLIRRYRKVPLYDGDRTPVSET

SEQ ID NO: 4491 - protein, 254 aa, Zea mays
MAAKCYPTVSDEYLAAVAKARRKLRGLIAEKNCAPLMLRLAWHSAGTFDVATKTGGPFGTMKCPAELAHGANAGLDIAVRLLKPIKEQFPILSYADFYQLAGVVAVEVTGGPEVPFHPGRQDKPEPPPEGRLPDATQGSDHLRQVFSTQMGLSDQDIVALSGGHTLGRCHKERSGFEGAWTANPLIFDNSYFTELLSGEKEGLLQLPTDKTLLTDPAFRPLVDKYAADEDAFFADYAEAHLKLSELGFGEAGCC

SEQ ID NO: 4492 - protein, 286 aa, Saccharomyces cerevisiae
TYTTRQIGAKNTLEYKVYIEKDGKPVSAFHDIPLYADKENNIFNMVVEIPRWTNAKLEITKEETLNPIIQDTKKGKLRFVRNCFPHHGYIHNYGAFPQTWEDPNVSHPETKAVGDNEPIDVLEIGETIAYTGQVKQVKALGIMALLDEGETDWKVIAIDINDPLAPKLNDIEDVEKYFPGLLRATNEWFRIYKIPDGKPENQFAFSGEAKNKKYALDIIKETHDSWKQLIAGKSSDSKGIDLTNVTLPDTPTYSKAASDAIPPASLKADAPIDKSIDKWFFISGSV

SEQ ID NO: 4493 - protein, 430 aa, Escherichia coli K12
MMNTEGNNGNKPLGLWNVVSIGIGAMVGAGIFALLGQAALLMEASTWVAFAFGGIVAMFSGYAYARLGASYPSNGGIIDFFRRGLGNGVFSLALSLLYLLTLAVSIAMVARAFGAYAVQFLHEGSQEEHLILLYALGIIAVMTLFNSLSNHAVGRLEVILVGIKMMILLLLIIAGVWSLQPAHISVSAPPSSGAFFSCIGITFLAYAGFGMMANAADKVKDPQVIMPRAFLVAIGVTTLLYISLALVLLSDVSALELEKYADTAVAQAASPLLGHVGYVIVVIGALLATASAINANLFAVFNIMDNMGSERELPKLMNKSLWRQSTWGNIIVVVLIMLMTAALNLGSLASVASATFLICYLAVFVVAIRLRHDIHASLPILIVGTLVMLLVIVGFIYSLWSQGSRALIWIIGSLLLSLIVAMVMKRNKTV

SEQ ID NO: 4494 - protein, 519 aa, Ferroplasma acidarmanus
MPKKENLKRDIGLVGLVGIGVGGVIGSGIFALPAIMGAVAGPGFVISVVAVGIIILILGLIYAELGSTYTMTGGPYSLPRKALGNDTGFVLGWGYFIYAFTGTAAIIDIFITYLGFYVPGLSVGLVLTPLGIGISLVALAIFTIINVFGVKFGALFSVITTIGKIIPLVIFAVIGFLVFKIANFTPFLPYGLGGLGLAMALDFFAFTGFESVVIPSGEVKNPSKVIPRAMIFTILIVIAVYAIMSIAFTGMFNWSAAGIPVGDWGAIGNLSSPFATAADSIGLPVLAAIVVAGVIISTLGAGEDWVLLQARIPYAMADNDLFWAPMGKVNEKYKTPQNALIFSSVLTGVTMILLPSFPEVALLASITTLVPYAAAALSLPILRKTDKDTTRPFKLYGGTIFAFFGFVLSTFLIYFASWPWTIIGGILILIGYVLYIFVKKEKTFELKRNLWLIVYLVGIVVISYIGSKTYIYDNILPIAPLGILNSPYDLITLGIFASIIFVWAYFENIKYKPLADQVE

SEQ ID NO: 4495 - protein, 359 aa, Brassica napus
MEKYELVKDIGAGNFGVARLMKVKDSKELVAMKYIERGPKIDENVAREIYNHRSLRHPNIIRFKEVVLTPTHLAIAMEYAAGGELFERICGAGRFSEDEARYFFQQLISGVSYCHAMQICHRDLKLENTLLDGSPAPRLKICDFGYSKSSLLHSRPKSTVGTPAYIAPEVLSRREYDGKMADVWSCGVTLYVMLVGAYPFEDQEDPKNFRKTIQKIMAVQYKIPDYVHISQDCKHLLSRIFVANSLKRITIAEIKKHPWFTKNLPRELTETAQAAYFKKENPTFSAQTAEEIMKIVDDAKTPPPVSRSIGGFGWGGEGDLEGKEEEEVDEEEVEEEEDEEDEYDKTVKEVHASGEVRIS

SEQ ID NO: 4496 - protein, 182 aa, Zea mays
  unsure (1)..(182): unsure at all Xaa locations
MAGALALAVLLAVASLHAEAVWLDVPQSGTKCVSEEIQSNVVVLTDYSIXVTSPYGNTLHHSENSTVGQFAFTTAEAGNYVACFWVDSAEKGSGVSVNLDWKIGIATKDWDAIAKKEKIEGVELELRKLEVAVQAIHQNLIYLKEREAEMRTVSETTNSRXSVWFSTLSLWVCIAVSGFASP

SEQ ID NO: 4497 - protein, 244 aa, Zea mays
  unsure (1)..(244): unsure at all Xaa locations
MAKTYPVVSAEYQEAVEKARQKLRALIAEKNCSPLMLRLAWHSAGTFDVSSKTGGPFGTMKKPAEQAHAANAGLDIAVRMLEPIKEEIPTISYADLYQLAGVVAVEVSGGPVIPFHPGREDKPQPPPEGRLPDATKGSDHLRQVFGKQMGLSDQDIVALSGGHTLGRCHKERSGFEGPWTRXNPLKFDNSYFTELLSGDKEGLLQLPSDKTLLTDPVFRPLVEKYAADEKAFFEDYKEAHLRLS

SEQ ID NO: 4498 - protein, 152 aa, Panax ginseng
MVKAVTVLSGSGGVSGVIHFTQEEDGPTTVTGKLSGLAPGLHGFHVHALGDTTNGCLSTGPHYNPANKEHGAPEDETRHAGDLGNVTVGEDGTAEFTIVDKQIPLIGSGSIIGRAVVVHADPDDLGKGGHELSKSTGNAGGRLACGFIGLQG

SEQ ID NO: 4499 - protein, 197 aa, Gossypium marchantii
IVESVGEGVTHLKPGDHVLPVFTGECGNCRHCKSKESNMCDLLRINTDRGVMLSDGKTRFSINGKPIYHFVGTSTFSEYTVAHVGSVAKINPAAPLDKVCILSCGISTGLGATLNVAKPAKGSTVAIFGLGAVGLAAAEGARIAGASRIIGVDLNPNRFEEAKKFGCTEFVNPKDHNKPVQEVLAEMTNGGVDRSVE

SEQ ID NO: 4500 - protein, 294 aa, Zea mays
MAIPNAFDSPLAARSAVGAALAAVIAVRAVRRRSLDASGGVAGFVVMAVHIACGYRYGALLLAFFFSSSKVTKIGEDHKRRIEENFKEGGQRNWIQVLANSTIATVLVVIFALMTGGQDQCMDSNGSKLITGIIGGIIGHYCCCNGDTWSSEIGVLSNEQPRLITSLKPVRKGTNGGVTLQGLLAATGGGLIIGLTFVVVGLLTAECSSDMAIRQLLVLPISAAAGLLGSLIDSLLGATLEFSGYCSVRKKVVSKRGPTVTKISGMTILDNDAVNAVSILLTTVLTAYVCIYIF

SEQ ID NO: 4501 - protein, 148 aa, Haloarcula marismortui
TDLSAQKRLAADVLDVGKNRVWFNPERQGDIADAITREDVRELVDEGAIQAKDKKGNSRGRARERQKKRAKGHQKGAGSRKGKAGARQNSKEDWESRIRAQRTKLRELRDEGTLSSSQYRDLYDKAGGGEFDSVADLERYIDANHGDA

SEQ ID NO: 4502 - protein, 237 aa, Glycine max
MKRVFGVKKNKDPPPSIQDASDRITKRGDSVDDKIKKLDAELSRYKEQIKKTRPGPAQEAVKARAMRVLKQKRMYEGQRDMLYNQTFNLDQVQFAAEGIKDAQQTMTALKSANKELKGMMKTVKIQDIDNLQDEMMDLMDVSNEIQETLGRSYNVPDDIDEDDLMGELDALELDMGNETEADGVPSYLQPDKEPDLDAELNLPPAPTGQTAVPPGRFNAQTEDELGLPAVPRASIRG

SEQ ID NO: 4503 - protein, 751 aa, Geobacillus stearothermophilus
MENQNRQNAAQCPFHGSVTNQSSNRTTNKDWWPNQLNLSILHQHDRKTNPHDEEFNYAEEFQKLDYWALKEDLRKLMTESQDWWPADYGHYGPLFIRMAWHSAGTYRIGDGRGGASTGTQRFAPLNSWPDNANLDKARRLLWPIKKKYGNKISWADLFILAGNVAIESMGGKTIGFGGGRVDVWHPEEDVYWGSEKEWLASERYSGDRELENPLAAVQMGLIYVNPEGPDGKPDPKAAARDIRETFRRMGMNDEETVALIAGGHTFGKAHGAGPATHVGPEPEAAPIEAQGLGWISSYGKGKGSDTITSGIEGAWTPTPTQWDTSYFDMLFGYDWWLTKSPAGAWQWMAVDPDEKDLAPDAEDPSKKVPTMMMTTDLALRFDPEYEKIARRFHQNPEEFAEAFARAWFKLTHRDMGPKTRYLGPEVPKEDFIWQDPIPEVDYELTEAEIEEIKAKILNSGLTVSELVKTAWASASTFRNSDKRGGANGARIRLAPQKDWEVNEPERLAKVLSVYEDIQRELPKKVSIADLIVLGGSAAVEKAARDAGFDVKVPFFPGRGDATQEQTDVESFAVLEPFADGFRNYQKQEYSVPPEELLVDKAQLLGLTAPEMTVLVGGLRVLGANYRDLPHGVFTDRIGVLTNDFFVNLLDMNYEWVPTDSGIYEIRDRKTGEVRWTATRVDLIFGSNSILRSYAEFYAQDDNQEKFVRDFINAWVKVMNADRFDLVKKARESVTALQPDNINRSTGTRKLQ

SEQ ID NO: 4504 - protein, 228 aa, Gossypium robinsonii
FTSLCHTDVYFWEAKGQTPLFPRIFGHEAGGIVESVGEGVAHLKPGDHVLPVFTGECGNCRHCKSKESNMCDLLRINTDRGVMLSDGKTRFSINGKPIYHFVGTSTFSEYTVAHVGSVAKINPAAPLDKVCILSCGISTGLGATLNVAKPTKGSTVAIFGLGAVGLAAAEGARIAGASRIIGVDLNPNRFEEAKKFGCTEFVNPKDHNKPVQKVLAEMTNGGVDRSVE

SEQ ID NO: 4505 - protein, 426 aa, Oceanobacillus iheyensis HTE831
MTTIVDKARNDMAVFEEMESAVRSYSRGWPVVFEKAKGYKLWDKNGNEYIDFFAGAGALNYGHNPSEMQKVMIDYIQNDGVIHSLDMATAPRKKFLESFNEIILKPRNMDYKVMFPGPTGTNTVESALKIARKVTGRDTVIGFTNAFHGMTIGSLSVTGNSFKRNGAGIPLNHAISMPFDQYVDEQDSIAYIERFLEDSGSGVALPAAFILETVQGEGGINAARLEWVKKIEEICRKWDILLIIDDVQAGCGRTGTFFSFEEAGINPDIVCLSKSIGGVGLPMAITLIKPEFDQWGPGEHNGTFRGNNLAFLAATEALNNWKTDAFSQNIKKMSSLFQERMKRIVEKFPELNADLRGRGLMLGIGVHVDGLAGEICAEAFSRGLILETSGAKDEVVKFLPPLIIDEDGIEKGMDILEESIQAALEK

SEQ ID NO: 4506 - protein, 399 aa, Methanothermobacter thermautotrophicus str. Delta H
MITMIQIAVTGKPNVGKSSFFNAATLSEAEVASYPFTTIDANHAVAYASCRCPCRELGVECNPRNSRCINGVRLIPVELIDVAGLVPGAHEGRGLGNKFLDDLRQARAFLHVIDASGSTDEEGRPVEAGSHDPLEDVEFLEEEITMWLYGILERNWERLLRKAASEKLDMNRIIHEQLSGTGITPEDIIEASRKVDADVYSWGKDELLQFLDELLRIAKPMLIVANKADLPSAGENIERLKDAYPHVVPASAEAELALRRAAEAGLISYTPGGSEFEIIDESKLTDKQRAALEYIRENVLEVYGSTGVQEAINRAVFDLLDMIVVFPVEDEHRFTDQKGNVLPDAILVPRGSSPRDLAYLIHTEIGDSFLHAVDARKGMRVASDHELEDGDIISIICSR

SEQ ID NO: 4507 - protein, 340 aa, Zea mays
MRPMASNGIASSLSPFFPPNFLLQMQQTPSDHDPQEHHHLPAPPLHLHHNPFLPSSQCPSLQDFRGMAPMLRKRPTMYCGADDVGVGGEEASCGATNEDEVSDDGSLQAVGPGEKKRRLNVEQVRTLEKNFELGNKLEAERKLQLARALGLQPRQVAIWFQNRRARWKTKQLEKDYDALRPQLDAVKADNDALLSHNKKLIPKQILSLKGREAGGSSELINLNKETEASCSNRSENSSEINLDISRAPASEAPLDPTPPPGAGGGGMIPFYPPSVGGRPASAAGVDIDQLLHTSAPKLEQHGSGGAVVVQAAETASFGNLLCGVDEPPPFWPWADHQHFH

SEQ ID NO: 4508 - protein, 475 aa, Bacillus anthracis str. A2012
MQQTTNEKLHRTMKSRHLFMIALGGVIGTGFFLGSGYTINQAGPGGAILSYLVGGFIMYLTMLCLGELTVAMPVSGSFQKYATKFIGPGTGFMIGWLYWLGWAVTVGLELTSIGLMMKRWFPNVDVWVWCLVFGVILYASNAISAKSYAELEFWFSSIKVITILAFVVLGGSALLGFISYDGKEAAPLFSNFVSEGGLFPNGLAAVLLTMITVNFSFQGTELIGIAAGESENPEKTIPRAIRNTVWRIMLFFILTMTILVGLISWKEAGVIESPFVVVFDKIGIPYAADIMNFVIITALLSVANSGLYAATRILWSLANEGMAPTSFQKVNKRGIPITALVVTIAVAGLSLFTSFLAEDTVYMYLLSIAGLSAVSSWIIIALSQLRFRSQYIKGGGKLEDLKYRTPLYPIVPILALITNSIVVISLAFIPEQRMALYCGIPFIIFCYIYYYINKKRQKPMKVEMEKANETNNQTR

SEQ ID NO: 4509 - protein, 376 aa, Coelorachis selloana
ALSIAGAVQSQKLAVRAISRLQALPGGDVKLLCDTVVEHVRELTGYDRVMVYRFHEDEHGEVVAESRRDNLEPYLGLHYPATDIPQASRFLFRQNRVRMIADCHATPVRVIQDPGLSQPLCLVGSTLRAPHGCHAQYMANMGSIASLVMAVIISSGGDDEQTGRGGISSSMKLWGLVVCHHTSPRCIPFPLRYACEFLMQAFGLQLNMELQLAHQLSEKHILRTQTLLCDMLLRDSPTGIVTQSPSIMDLVKCDGAALYYHGKYYPLGVTPTESQIKDIIEWLTVCHGDSTGLSTDSLADAGYLGAAALGDAVCGMAVAYITPSDYLFWFRSHTAKEIKWGGAKHHPEDKDDGQRMHPRSSFKAFLEVVKSRSLPW

SEQ ID NO: 4510 - protein, 159 aa, Zea mays
MAAADVEYRCFVGGLAWATSNESLENAFASYGEILDSKVITDRETGRSRGFGFVTFSSENSMLDAIENMNGKELDGRNITVNQAQSRGGGGGGGGYGGGRGGGGGYGGGRRDGGYGGGGGYGGRREGGGGGYGGGGGYGGRREGGGGGYGGGGGGGWRD

SEQ ID NO: 4511 - protein, 392 aa, Acridocarpus natalitius
DLEPVNPADVPVTAAGALKSYKLAAKAISRLQSLPSGNISLLCDVLVKEVRDLTGYDRVMVYKFHEDEHGEVVSECRRSDLEAYLGLHYPATDIPQASRFLFMKNKVRMICDCLAPPIKVIQDERLPQPLSLGGSTLRSPHGCHAQYMANMGTIASLVMSVTINEDDDMMDGDQQQMARKLWGLVVCHHTSPRFVPFPLRYACEFLIQVFGVQINKEVELAAQVREKHILQIQTLLCDMLLRDAPVAIITQSPNVMDLVKCDGAALYYKKKFWLLGITPTEAQIRDIVEWLLEFHSGNTGLSTDSLMEAGYPGASVLGDAVCGMAAVSITSKDFLFWFRSHTAKEIKWGGAKHDPDVKDDGRKMHPRSSFKAFLEVVKWRSLPWEDVEMDAI

SEQ ID NO: 4512 - protein, 222 aa, Glycine max
  unsure (1)..(222): unsure at all Xaa locations
ILGFGWAGLFRKFLVEPGEMWWPSNLVQVSLFSALHEKSKRPNGGTTRTQFFLLVLVSGLAYYVFPGYLFSMLTSFSWMCWLAPKSVLVQQLGSGLRGLGIAAFGIDWSTISAYLGSPLASPWFATANIAVGFFLVMYVMTPIAYWSNAYEAKTFPIFSSKLFMGNGSLYDISTIVNSEFHLDRXAYSIKRPXHLSTFFCMTYXXSIAALSATXCACLLFHG

SEQ ID NO: 4513 - protein, 308 aa, Oryza sativa
  unsure (1)..(308): unsure at all Xaa locations
MARLLLSGVAPLPLLPCRRRAIAFALPLGNVRLRSRVATVEEDDNENNAPPPPCEDFDPGAAPPFGLADIRAAIPKHCWVKDPWRSMGYVLRDVVVVFALAAAAARLHSCLAWPLYWAAQGTMFWALFVLGHDCSDLFQPNERNDVLTSTACWVAMAALLAGLTFLMGPLLMLNLYFVPYWIFVMWLDFVTYLHHHGHNDKLPWYRGKEWSYLRGGLTTVDRDYGWINNIHHDIGTHVIHHLFPQIPHYHLIEATEAASVMGKYYREPDKSGPFPLHLFGALSRSLKRDHYVSDTGDVVYYQTDPANX

SEQ ID NO: 4514 - protein, 392 aa, Blepharandra heteropetala
DLEPVNPADVPVTAAGALKSYKLAARAISRLQSLPSGNISLLCDVLVKEVRDLTGYDRVMVYKFHEDEHGEVISECCRPDLEAYLGLHYPATDIPQASRFLFMKNKVRMICDCLAPAVKVIQDERLPQALSLCGSTLRSPHGCHAQYMANMGTIASLVMSVIINEDNDMMDGDQQHIARKLWGLVVCHHTSPRFVPFPLRYACEFLIQVFGVQINKEVELAAQVREKHILRTQTLLCDMLLRDAPVAIITQSPNVMDLVKCDGAALYYRKKFWLLGVTPTEVQIRDIAEWLLEYHGGNAGLSTDSLMEAGYPGASDLGNAVCGMAAVRITSRDFLFWFRSHTAKEIKWGGAKHHPNDKDDVRKMHPRSSFKAFLEEVKWRSLPWEDIEMDAI

SEQ ID NO: 4515 - protein, 198 aa, Oryza meyeriana
GQTPMFPRIFGHEAGGIVESVGEGVTDLSPGDHVLPVFTGECKDCPHCKSAESNMCDLLRINTDRGVMIGDGKSRFSINGKPIYHFVGTSTFSEYTVMHVGCVAKINPKAPLDKVCVLSCGISTGLGATINVARPPKGSTVAIFGLGAVGLAAAEGARIAGASRIIGVDLNANRFEEARKFGCTEFVNPKDHDKPVQQ

SEQ ID NO: 4516 - protein, 405 aa, Thermoplasma acidophilum
MAYIQVKEDGTLQVPDRVTIGYIEGDGIGPDISKTTINVLNAALDIAYGGKRSIEWKKILAGDEAYDKTGDRLPQSSLDELKKCVVSLKGPLTTPIGEGFRSLNVTLRQYLDLYANIRPVRYFPGVPSPVVHPEYMNMVVFRENTEDLYAGIEWRYDSDGAKKVREFLASTFNINLTSDTGIGIKPISKFKSTRLVRKAIQYAIANKRKSVTLVHKGNIMKYTEGAFKEWGYEVAKTEFGNYTVTETEYLQDPEKYSNKIVIKDRITDNMFQQVLTRTQEYDVIATPNLNGDYLSDALAAQVGGIGLAPGANIGDHYAVFEAVHGTAPKYAGMDVANPTSLILSGEMMLQHIGWNEAANILDEAIMQTYRDQKLTQDIARLLNVKALKCSEFGEEIINRMKKPVH

SEQ ID NO: 4517 - protein, 262 aa, Zea mays
MALYLLFESASGYALFHAHGIDEIGQSVDAVRSTVLDLKRFSKAVKLAGFTPFLSAVDALNQCNAISEGIMTDELRNFLELNLPKVKEGKKAKFTVGVMEPKVGSHITEATGIPCQSNDYVQELLRAVRLHFDQFIEQLKPSDLEKAQLGLGHSYSRAKVKFNVNRVDNMVIQAIFLLDTLDKDVNSFSMRVREWYGWHFPELVKIVNDNYLYAKLAKFVVNKSDLSEKDIPALADLIGDEDKAKEIVEAAKASMGQDLFTW

SEQ ID NO: 4518 - protein, 489 aa, Pirellula sp.
MFWQVRSPMIRPLTPWTIIPVTSPQPISSETEPTVPAESISADSVPDFRSTNRPVSRVAVLGATGSIGVAALDVIENLNRCDPDFAWEVSSMSGHSQIDPLIELAGGCHTPPKCVVVSDAEMEAQAAKALRTASTQTSSRLTERCRLDVGPDALVRAATENDVDVVVAAIVGRAGLESTLAAVHAGKRVALANKETLVVAGPVVTRAAANNGAQLLPVDSEHSAIFQCLAESRARQSQYATAKQSIQPESVRATDPPSSTTDSPAKTHWPGVRRLILTASGGPFRDWTTAQMREATIEQALAHPTWKMGAKITIDSASMMNKALEVIEAKWLFDVPADKIEVVVHPQSLIHSLVEFEDGSLIAQVSPPDMRIPIQYALTYPRRLPCPAPELDRSQAWDMSLCPADPDRFPALALGFEVARVGGTAGAVVNAANETAVDLFLHGQIRFTDIPEICRRTLLDHDHESSPTLERLLKLDVWARARARELAQI

SEQ ID NO: 4519 - protein, 109 aa, Triticum aestivum
MDMHASFVNAIVNGVFLKLFVGQRVRTVLKVQHTQGGILVGQSTDGHQLTIRGASEGRESHYLEVVGIADNDQSISAESCKDFGDDFDADAFNGLCKLVVNVKVKEVFL

SEQ ID NO: 4520 - protein, 250 aa, Nicotiana tabacum
MGKCYPTVSEEYLKAVDKCKRKLRGLIAEKNCAPLMLRLAWHSAGTYDVCSKTGGPFGTMRLKAEQGHGANNGIDIAIRLLEPIKEQFPILSYGDFYQLAGVVAVEVTGGPDVPFHPGREDKTEPPVEGRLPDATKGSDHLRDVFVKQMGLSDKDIVALSGGHTLGRCHKERSGFEGPWTTNPLIFDNSYFTELLSGEKEGLLQLPSDKALLSDPAFRPLVEKYAADEDAFFADYAEAHLKLSELGFAEA

SEQ ID NO: 4521 - protein, 80 aa, Zea mays
MGWKGVLGFDYGVVQAPLGPDISGPELAAAVANAGAIGLLRLPDWPAPDHVRGLIRRTRSLTEKPFGAAIVLAFPHEENL

SEQ ID NO: 4522 - protein, 368 aa, Ipomoea batatas
MAFRFSLLFLCTLLATTSLVFAAEDDDGDDVLIRQVVGDGDGDLLNADHHFTVFKRRFGKAYASDEEHDYRLSVFKANMRRAKRHQELDPAAVHGVTQFSDLTPTEFRRKFLGLNRRLKFPADAKTAPILPTDELPSDFDWRDHGAVTPVKNQGTCGSCWSFSTTGALEGANFLATGKLVSLSEQQLVDCDHECDPEEAGSCDSGCNGGLMNSAFEYTLKAGGLMREEDYPYTGNDLQVCRFDKTKIAAKVANFSVVSLDEDQIAANLVKNGPLAVAINAVFMQTYIGGVSCPYICSKRLDHGVLLVGYGSAGYAPIRMKEKPYWIIKNSWGESWGENGYYKICRGRNVCGVDSMVSTVAAVSTTTSD

SEQ ID NO: 4523 - protein, 463 aa, Corynebacterium glutamicum ATCC 13032
MAKSNEGLGTGLRTRHLTMMGLGSAIGAGLFLGTGVGIRAAGPAVLLAYIIAGAIVVLVMQMLGEMAAARPASGSFSRYGEDAFGHWAGFSLGWLYWFMLIMVMGAEMTGAAAIMGAWFGVEPWIPSLVCVVFFAVVNLVAVRGFGEFEYWFAFIKVAVIIAFLIIGIALIFGWLPGSTFVGTSNFIGDHGFMPNGISGVAAGLLAVAFAFGGIEIVTIAAAESDKPREAISLAVRAVIWRISVFYLGSVLVITFLMPYESINGADTAAESPFTQILAMANIPGTVGFMEAIIVLALLSAFNAQIYATSRLVFSMANRQDAPRVFSKLSTSHVPTNAVLLSMFFAFVSVGLQYWNPAGLLDFLLNAVGGCLIVVWAMITLSQLKLRKELQANDEISTVRMWAHPWLGILTLVLLAGLVALMLGDAASRSQVYSVAIVYGFLVLLSFVTVNSPLRGGRTPSDLN

SEQ ID NO: 4524 - protein, 173 aa, Helicobacter pylori 26695
MNLEKLEVSHDADSLCVVIEISKHSNIKYELDKESGALMVDRVLYGAQNYPANYGFVPNTLGSDGDPVDALVLSDVAFQAGSVVKARLVGVLNMEDESGMDEKLIALPIDKIDPTHSYVKDIDDLSKHTLDKIKHFFETYKDLEPNKWVKVKGFENKESAIKVLEKAIKAYQG

SEQ ID NO: 4525 - protein, 380 aa, Phaseolus acutifolius
MSSTAGQVIKCKAAVAWEAGKPLVMEEVEVAPPKAGEVRLKILYTSLCHTDVYFWEAKGQTPLFPRIFGHEAGGIVESVGEGVTHLKPGDHALPVFTGECGECAHCKSEESNMCDLLRINTDRGVMIHDSQTRFSIKGQPIYHSVGTSTFSEYTVVHAGCVAKVNPAAPLDKICVLSCGICTGLGATVNVAKPKPGSSVAIFGLGAVGLAAAEGARISGASRIIGVDLVSSRFEEAKKFGVNEFVNPKDHDKPVQEVIAEMTNGGVDRAVECTGSIQAMISAFECVHDGWGVAVLVGVPNKDDAFKTHPVNFLNERTLKGTFYGNYKPRTDLPLVVEQYMNGELELDKFITHTVPFSEINKAFDYMLKGESIRCIIRMGE

SEQ ID NO: 4526 - protein, 337 aa, Ralstonia metallidurans
MSKQTYKRIVLASRPEAAVTPDNFRIEELPVPELADGQVLVRNHFLSLDPYMRGRMSDSKSYADPQPLNEVMIGGTVGEVIASKNPKWNVGDKVIGMFGWQELGVSDGGMMQKVDTTHIPLSAYLGSVGMPGVTAWYGLNKIIAPKAGETVVVSAASGAVGSVVGQLAKLAGCYVVGVAGGKEKCDYVVNELGFDACVDYKAAKDAKELYAMVKAVTPNGIDGYFENVGGDILDVVLSRLNPFARIAVCGLIAGYDGQDMPIRNPRAILVARAKIEGFIVSEHMELWPQALRELGTYVAQGKIKFRESIAEGLASAPEAFIGLLKGKNFGKQLVKLA

SEQ ID NO: 4527 - protein, 188 aa, Glycine max
  unsure (1)..(188): unsure at all Xaa locations
MKRVFGVKKNKDPPPSIQDASERITKRGDTVDDKIKKLDAELSRYKEQIKKTRPGPAQEAVKARAMRVLKQKRMYEGQRDMLYNQTFNLDQVQFAAEGIKDAQQTMTALKSAXNKELKGMMKTVXKIQDIDNLQDEMMDLMDVSNEIQETLGRSYNVPDDIDEDDLMGELDALELDMGNETELDGGPS

SEQ ID NO: 4528 - protein, 63 aa, Brassica napus
MRGILADWLVEVSEEYTLVPDTLYLTVYLIDWFLHGNHIERQNLQLLGITCMLIASKYEEIYP

SEQ ID NO: 4529 - protein, 218 aa, Streptomyces avermitilis MA-4680
MQSTEKGCGQALPGVPTARVVQPATREGSRTMTQELRGMRVGILATDGVERVELDQPRGALQGAGAKTEIVSLHPGEIQARQFDLNAAGTFPVDRLVADASVDDYHALLLPGGTMNPDQLRMDRDAVQFVKDFMASGKPVASICHGPWTLVEADAVRGRRLTSWPSIRTDLRNAGAEVVDQEVVVDGQLVTSRSPADLPAFCAAVVEQFARAHHPMPG

SEQ ID NO: 4530 - protein, 281 aa, Zea mays
LQMAVVLTFGGQMPVVKVGRMAGQFAKPRSDAFEERGGVKLPSYRGDIINGEAFDEKSRVPDPQRMLKAYYQSASKLNLLRAFATGGYADIQRVTQWNLDFTKHSEQGDRYRELAHRVDEALGFMGAAGLTVDQPLTTMIEFWTSHECLLLPYEQALTREDSTTGLYYDCSAHFLWVGERTRQLDGAHVEFLRGIANPLGIKVSDKMDPAELVRLIDILNPENRAGRITIITRMGPENMRVKLPHLIRAVRGAGQIVTWVTDPMHGNTMKAPCGLKTRSFD

SEQ ID NO: 4531 - protein, 257 aa, Bradyrhizobium japonicum USDA 110
MAQNIYDNPDFFAGYSQLPRQVHGLDGAPEWPAIRAMLPDLVGKRVVDLGCGFGWASRWMREQGAASVLGLDLSQNMIERARADTADTAIEYRIADLDTLDLPEAAFDLAYSALTFHYVQDFGRLVHVIRKTLVPDGHFVFTIEHPIFMAAAHPHWISDEEGRKTWPVNRYSVEGERRTDWFAKGVLKYHRTLGTTLNTLIGAGLQIRRIEEFAPTREQIQQMPQLAEELERPMMLIVSASTSIGGKLRSLRDIRPD

SEQ ID NO: 4532 - protein, 454 aa, Salmonella enterica subsp. enterica serovar Typhi
MTMSHNVTPNTSRVELRKTLTLVPVVMMGLAYMQPMTLFDTFGIVSGLTDGHVPTAYAFALIAILFTALSYGKLVRRYPSAGSAYTYAQKSISPTVGFMVGWSSLLDYLFAPMINILLAKIYFEALVPSIPSWVFVVALVAFMTAFNLRSLKSVANFNTVIVVLQVVLIAVILGMVVYGVFEGEGAGTLASTRPFWSGDAHVIPMITGATILCFSFTGFDGISNLSEETKDAERVIPRAIFLTALIGGLIFIFATYFLQLYFPDISRFKDPDASQPEIMLYVAGKTFQVGALIFSTITVLASGMAAHAGVARLMYVMGRDGVFPKSFFGYVHPKWRTPAMNIILVGAIALLAINFDLVMATALINFGALVAFTFVNLSVISQFWIREKRNKTLKDHFQYLFLPMCGALTVGALWVNLEESSMVLGLIWAGIGLIYLACVTKSFRNPVPQYEDVA

SEQ ID NO: 4533 - protein, 347 aa, Mesorhizobium loti
MEYRTLGRSGLKVSTLTLGTMTFGGTGPFAAVGNSDLGEARRMIDMCIDAGINLIDTANVYSNGLSEEIIGEALGGKRRNDVLIASKARMRIGSGPNDEGLSRHHLIRECEKSLKRLKTDVIDIYFVHQWDGLTPVEETVAALDTLVNQGKVRYIGCSNWSGWQVMKALSISDSRHQQRFVTQQIHYTLEAREAEYELLPISVDQGLGVLVWSPLAGGLLSGKYHRDSPTARQLAGWSEPPIRDEDRLWRIVDVLVEIGKARGVSAAQVALAWLLGRPAVSSLVIGARNDAQLKDNLAAASLALSPEERQRLDAVSRPPVLYPYWHQQLTAKDRFGPADMVLDRSVI

SEQ ID NO: 4534 - protein, 417 aa, Saccharomyces cerevisiae
MRALAYFGKGNIRFTNHLKEPHIVAPDELVIDIEWCGICGTDLHEYTDGPIFFPEDGHTHEISHNPLPQAMGHEMAGTVLEVGPGVKNLKVGDKVVVEPTGTCRDRYRWPLSPNVDKEWCAACKKGYYNICSYLGLCGAGVQSGGFAERVVMNESHCYKVPDFVPLDVAALIQPLAVCWHAIRVCEFKAGSTALIIGAGPIGLGTILALNAAGCKDIVVSEPAKVRRELAEKMGARVYDPTAHAAKESIDYLRSIADGGDGFDYTFDCSGLEVTLNAAIQCLTFRGTAVNLAMWGHHKIQFSPMDITLHERKYTGSMCYTHHDFEAVIEALEEGRIDIDRARHMITGRVNIEDGLDGAIMKLINEKESTIKIILTPNNHGELNREADNEKKEISELSSRKDQERLRESINEAKLRHT

SEQ ID NO: 4535 - protein, 459 aa, Pneumocystis carinii
MNAARRVTRQTATFNLNDENKLHGQISRVKQVSTQGLEGVNKPWTAATRKRAALGDVSNVHNKENQTAKTKTQPLSTKARVVTKTGVQSHQSKESVHTVPTGELRGEETTRKRRTSKVLTEQKVIIEVEQTQASKKVRTDGLLNGSVQEHPASQDWDDLDADDAHDPLMVSEYVEEIMGYMRELEVLTLPLPDYMDRQKELQWKMRGILVDWLIEVHAKFRLLPETLFLSVNIIDRFLSLRVCSLPKLQLVGITALFIAAKYEEVMCPSIQNFMYMADGGYTNEEILKAEQYVLQVLGYDMSYPNPINFLRRVSKADNYDIQTRTVAKYLMEISLLDHRFLPFVPSNIAASGIYLARIMVTGGNWNANLIHYSGYKESDLVPCSKMMLDYLSRSVIKHEAFFKKYASKKFMKASLFVRDWVKKHYDLEANVRLNTISFDYDNHESNEIHQDLEEEEGSL

SEQ ID NO: 4536 - protein, 563 aa, Thermoplasma volcanium
MGDLNSASTDANISYSENQDRKLRKALSTWDLLMLSVGGIIGSGWLFAAYAASVLSGPASILAWVLGGIIVIFIALVYAELGAMIPRSGAIVRYGHLSHGSFAGFLFGWAYFLSAVSVPAIEAEAVVTYAASYVTKPALIANGIMTVFGTLIAMLLMIAFFFLNYAGIHLMGKTNQGITWIKVIIPVITVIVLIAVHFNPSEIVPPNGFLPYGWAPVFAAISSTGIVFSYFGFRQAIDYGGEAKNPQRSIPIATIGSVLIGILLYSLLQVVFVGGIDWSKMGLEPGQWTLLNAYATAAHASTEHPLAYQLMNAPFATIALSAGLVWLTYTLYASAYIAPSGTLNVYLGTSTRTLYGMAVNGHLPKIFAKVADRNKIPVIPLITTLLVGFLFFLPFPSWYKMVGFISGATVFTYIVGGAALMNLRKQAPELKRPFKLWSANVLAPIAFILASEAVYWTGWPTTLYLAIAIFLGLVLYGALVGLHKIEQTFDKKNVKAGLWVPVFIVILTILSYLGEYGGINVLHFPLDLIVVAIASAIIYVWAIKSGIKTEEIAAMIANEDQYV

SEQ ID NO: 4537 - protein, 404 aa, Pseudomonas putida KT2440
MGCRMGCDVSRPQRITVLGATGSIGLSTLDVIARHPDRYQAFALTGYSRIDELLALCVRHRPAFAVVPSTEAAVRLRASLAAAGCTTEVLEGEAGLCQVASAAEVDAVMAAIVGAAGLRPTLAAVEAGKKVLLANKEALVMSGALFMEAVRQKGAVLLPIDSEHNAIFQCMPGDYARGLSAVGVRRILLTASGGPFRETPVEALLDVTPEQACAHPNWSMGRKISVDSASMMNKGLELIEACWLFDAVPSKVEVVVHPQSVIHSLVDYVDGSVLAQLGNPDMRTPIANALAWPERIDSGVAPLDLFAIARLDFQAPDEQRFPCLRLARQAAEAGNSAPAVLNAANEVAVQAFLERRIRFPEIAGMIEQVLDQEPVVPLPSLDAVFAADQRARELSREWLRRHGR

SEQ ID NO: 4538 - protein, 388 aa, Bacillus anthracis str. A2012
MSSAFIYSDDFRGYSFSPDHPFNQLRVTLTYDLLQKGGFISPSQIISPRMATDEEIAYIHTEEYINAVKRAGEGKLEKSIAMTYGLGTEDTPMFPNMHEASALLVGGTLTAVDAVLSGKVKHALNLGGGLHHGFRGKASGFCIYNDSSIAMKYIQKKYGLRVLYIDTDAHHGDGVQWSFYDDPNVCTISLHETGRYLFPGTGAVNERGQGNGYSYSFNVPLDAFTEDESFLDSYRTVVKEVAAYFKPDIILTQNGADAHYYDPLTHLCATMNIYREIPKLAREIANEYCEGRWIAVGGGGYDHWRVVPRAWALIWLEMNNIQNISGYLPPEWIDAWKGQAETELPLTWEDPNNMYKPIPRKPEIEEKNALTVAKSLEIIRNNMKKSLY

SEQ ID NO: 4539 - protein, 489 aa, Escherichia coli O157:H7
MVSETKTTEAPGLRRELKARHLTMIAIGGSIGTGLFVASGATISQAGPGGALLSYMLIGLMVYFLMTSLGELAAYMPVSGSFATYGQNYVEEGFGFALGWNYWYNWAVTIAVDLVAAQLVMSWWFPDTPGWIWSALFLGVIFLLNYISVRGFGEAEYWFSLIKVTTVIVFIIVGVLMIIGIFKGAQPAGWSNWTIGEAPFAGGFAAMIGVAMIVGFSFQGTELIGIAAGESEDPGKNIPRAVRQVFWRILLFYVFAILIISLIIPYTDPSLLRNDVKDISVSPFTLVFQHAGLLSAAAVMNAVILTAVLSAGNSGMYASTRMLYTLACDGKAPRIFAKLSRGGVPRNALYATTVIAGLCFLTSMFGNQTVYLWLLNTSGMTGFIAWLGIAISHYRFRRGYVLQGHDINDLPYRSGFFPLGPIFAFILCLIITLGQNYEAFLKDTIDWGGVAATYIGIPLFLIIWFGYKLIKGTHFVRYSEMKFPQNDKK

SEQ ID NO: 4540 - protein, 276 aa, Rhizobium leguminosarum bv. viciae
WGFDGSSTQQAEGRSSDCVLKPVAIYPDPARTNGALVMCEVMMPDGVTPHASNARATILDDEDAWFGFEQEYFFYQNGRPLGFPEQGYPAPQGPYYTGVGYSNVGDVAREIVEEHLDLCLAAGINHEGINAEVAKGQWEFQIFGKGSKKAADQIWMARYLLQRLTEKYGIDIEYHCKPLGDTDWNGSGMHCNFSTKYMREIGGKAYFEALMAQFEKNLMDHINVYGPDNDKRLTGKHETAPWNKFSYGVADRGASIRVPHSFVKNDYKGYLEDRRP

SEQ ID NO: 4541 - protein, 365 aa, Ralstonia solanacearum
MRILVLPCDGIGPEIVGAAMEVLRSADSVFKLDLAFDYDDVGFTSLEKYGTTLRDEVLAKAKTYDGVILGTQSHADYPAPDKGGRNVSAGFRIGLDLYANVRPARTRPFLTSNMREGRTMDLVIMREATEGFYPDRNMTKGWAELMPSPDMAISLRKITRHCSERIARRAFELAMKRKKKVTAIHKANSFHMTDGLFLECVRDVARDFPEVRLDDLLIDASTAHLVRAPERFDVLVATNFYGDIISDLASELSGSLGLAGSMMASDTHCCAQAQHGSAPDIAGQDKANPVSMILSVAMLIQWMGEHHQNPAYLAAAQAMEAAVDSVLENPATRTPDLGGNCGCKAFGQLVAKVIQAVRVPSSSGT

SEQ ID NO: 4542 - protein, 752 aa, Geobacillus stearothermophilus
MENQNRQNAAQCPFHGSVTNQSSNRTTNKDWWPNQLNLSILHQHDRKTNPHDEEFNYAEEFQKLDYWALKEDLRKLMTESQDWWPADYGHYGPLFIRMAWHSAGTYRIGDGRGGASTGTQRFAPLNSWPDNANLDKARRLLWPIKKKYGNKISWADLFILAGNVAIESMGGKTIGFGGGRVDVWHPEEDVYWGSEKEWLASERYSGDRELENPLAAVQMGLIYVNPEGPDGKPDPKAAARDIRETFRRMGMNDEETVALIAGGHTFGKAHGAGPATHVGPEPEAAPIEAQGLGWISSYGKGKGSDTITSGIEGAWTPTPTQWDTSYFDMLFGYDWWLTKSPAGAWQWMAVDPDEKDLAPDAEDPSKKVPTMMMTTDLALRFDPEYEKIARRFHQNPEEFAEAFARAWFKLTHRDMGPKTRYLGPEVPKEDFIWQDPIPEVDYELTEAEIEEIKAKILNSGLTVSELVKTAWASASTFRNSDKRGGANGARIRLAPQKDWEVNEPERLAKVLSVYEDIQRELPKKVSIADLIVLGGSAAVEKAARDAGFDVKVPFFPGRGDATQEQTDVESFAVLEPFADGFRNYQKQEYSVPPEELLVDKAQLLGLTAPEMTVLVGGLRVLGANYRDLPHGVFTDRIGVLTNDFFVNLLDMNYEWVPTDSGIYEIRDRKTGEVRWTATRVDLIFGSNSILRSYAEFYAQDDNQEKFVRDFINAWVKVMNADRFDLVKKARESVTALQLDSAPDLARLMICSK

SEQ ID NO: 4543 - protein, 853 aa, Bacteroides thetaiotaomicron VPI-5482
MIMMKRYKKILLTGVLSALSCSFVHAQELYKNENAPVHERVMDLISRLTVEEKISLLRATSPGIPRLGIDKYYHGNEALHGVVRPGRFTVFPQAIGLAATWNPELQKRVATVISDEARARWNELDQGREQKEQFSDVLTFWSPTVNMARDPRWGRTPETYGEDPFLSGIMGTAFVNGLQGDDPHYLKIVSTPKHFAANNEEHNRFVCNPQISEKQLREYYFPAFEMCVKEGKAASIMSAYNALNDVPCTLNPWLLQKVLRQDWGFQGYVVSDCGGPALLVNAHKYVKTKEAAATLSIKAGLDLECGDDVYDGPLLNAYKQYMVSDADIDSAAYHVLTARMKLGLFDSGERNPYTKISPSVIGSKEHQQIALDAARQCVVLLKNQKNRLPLNADKLKSIAVVGINAGKCEFGDYSGAPVVEPVSILQGIRNRVGDRVKVVYAPWKSAADGLELIQGENFPEGLQAEYFDNTRLEGTPRVRKESWINFEPANQAPDPFLPKSPLSVRWTGKLKPTVSGRYTFSFTSDDGCRLSINNQMLIDAWQAHAVSTDSASIYLEAGKEYQLKAEYYDNRDYAIAKLQWKVPQIGKATRLDLYGEAGKAVRECETVVAVMGINKSIEREGQDRYDIQLPADQREFLQEIYKVNPNIIVVLVAGSSLAINWMDEHIPAIVNAWYPGEQGGTAVAEVLFGDYNPAGRLPLTYYKSLDELPPFDDYDITKGRTYKYFKGDVLYPFGYGLSYSSFTYSDLQVKDGGGEVTVSFRLKNTGKRNGDEVAQVYVRIPETGGIVPLKELKGFRRVPLKSGESRRVEIKLDKEQLRYWDVEKGQFVVPKGAFDVMVGASSKDIRLQTVIDL

SEQ ID NO: 4544 - protein, 95 aa, Oxalis tuberosa
LYAGINISGTNGEVMPGQWEYQVGPSVGIEAGDYIWASRYILERITEQAGVVLTLDPKPIDGDWNGAGCHTNYSTKSMRDEGGFEVIKKAIFNLS

SEQ ID NO: 4545 - protein, 120 aa, Glycine max
MKRIFGAKNNKEPPPSIQDASDRINKRGESVEDKVKRLDAELCKYKDQIKRTRPGPAQEAIKARAMRVLKQKKMYEGQRDMLYNQTFNLDQVSFAAEGLKDAQQTMTALKSANKELKGMM

SEQ ID NO: 4546 - protein, 168 aa, Glycine max
VIEYRCFVGGLAWATDSDALEKAFSHYGEIVESKVIIDRETGRSRGFGFVTFASEQAMKDAIEGMNGQNLDGRSITVNEAQSRGRGGGGGGYGGGGGYGGGGYSRGGGGYGGGGRREGGGGGYNRNGGGGGYGGGGGYGGGFICCTGGVTGAPVPTTNLRISPPPPSF

SEQ ID NO: 4547 - protein, 347 aa, Rhodospirillum rubrum
MKVTGVVLERQGALSLRDIDIPGTLAPGANEVRIAIKSVGICGSDVHYFKHGRIGDFIVTEPMILGHEASGVVEEIGSAVTHLRVGDRVCMEPGVPDFSSIETLRGMYNLDPSVRFWATPPYHGCLTAEVVHPASLTYRLPDSVSFAEGAMVEPLAIGVYAAAKAQIRPGDIAVVTGAGTIGMMVVFAALAAGCAEVIVSDVAAEKLALLASHPEVTTVDLTRESLADAVAARTDGRGVDVFFEASGSTRPYETMIDLIGRGGRIVLVGMPQEKPQLDVVALQVKEISLTGTFRYANVWDRTLKLLGSGKIDLKPLISATFPFSDSVRAFDRAAQHLPSDVKIQISL

SEQ ID NO: 4548 - protein, 72 aa, Teramnus labialis
WEYQVGPSVGIEAGDHIWASRYILERITEQAGVVLSLDPKPIEGDWNGAGCHTNYSTKSMREDGGYEVIKKA

SEQ ID NO: 4549 - protein, 280 aa, Glycine max
SHTAQVGGFLTAGRTYNTDLLVASWAVLDRSLRKKKAPNPESYLGKIYAHASLGNLQKAFGTLNEYESAYGDSGQEAEDLFCPFTSLHPLVVACSKKGFETLDNVYFQLENLNRAEPPYKSVAALNCVILGCANIWDLDRAYQTFESIGSTFGLIPDIHSYNGLMYAFGKLKKTHEATRVFEHLVSLGLKSNAKSYSLLVDAHLINRDVKSALAVIDDMRAAGYEPSKEMLKKVRRRCTREMDNESDARVQSLANSLNYQLGSENRRDILFNLNYSMGYA

SEQ ID NO: 4550 - protein, 486 aa, Corynebacterium efficiens YS-314
MAMSEVPAAAQPGAAPGSSETTSDPNRRQELGTGLRTRHLTMMGLGSAIGAGLFLGTGVGIRAAGPAVLLAYIAAGVIVVLVMQMLGEMAAARPHSGSFSKYAEDAFGHWAGFSLGWLYWFMLIMVMGAEMTGAAAIMGAWFGVDPWIPALVCVVFFAIVNLAAVRGFGEFEYWFAFIKVAVIVVFLIVGVGLIFGLLPGSTFVGTSNFIGDHGFMPNGLSGVAAGLLAVAFAFGGIEIVTIAAAESDQPRRAISLAVRAVIWRISLFYLGSVLVITFLMPYESIDNAETAAESPFTRILDMANIPGAVGLMEAVIVLALLSAFNAQIYATSRLVFAMSRNQDAPRVFSVLSRSGVPTAAVLLSMFFAFVSVALQYFNPAGLLDFLLNAVGGCLLVVWAMIALSQLRLRPKLEHNGEISTVRMWGHPWLGILTLVLLAGLVLLMLGNEGSRSQVFSVAVVYGFLVALSFTTTRSPLRGKRTGLIDR

SEQ ID NO: 4551 - protein, 58 aa, Equisetum arvense
  unsure (1)..(58): unsure at all Xaa locations
AEKKAVAVLKGTSNVEGVINLFQEDDGPTTVKVKISGLAPGRHGFHLHQFXDTTNXXM

SEQ ID NO: 4552 - protein, 103 aa, Zea mays; identical to SEQ ID NO: 1858
  unsure (1)..(103): unsure at all Xaa locations

SEQ ID NO: 4553 - protein, 239 aa, Triticum aestivum
MASSVGGDAGEGEWLKVAELRAMAEAQDPHVQEVDNLTLRRFLRARGHAVGKASSMLLKFVAWRREAVPGGVVPAELVRTELSHEMAYMGGADRAGRPVMLAFPAKHFSATRDMAGFKRYIVYLFDAMCARIPRGQEKFLCVVDLKGWGYANCDVRAYIAAIEILQNYYPERLGKALMIHVPYLFMKAWKLVQPFIDANTRDKFVFVDDKSLEETLRREMEDGQLPEMYGGKMPIVPLE

SEQ ID NO: 4554 - protein, 152 aa, Oryza sativa; identical to SEQ ID NO: 2297

SEQ ID NO: 4555 - protein, 363 aa, Zea mays
MASASHAPTPLLKDELDIVIPTIRNLDFLEMWRPFFQPYHLIIVQDGDPTRTVMVPEGFDYELYNRNDINRILGPKASCISFKDSACRCFGYMVSKKKYVYTIDDDCFVAKDPTGKDIDALAKHIQNLLCPSTPLFFNTLYDPYQEGADFVRGYPFSLREGVPTAVSHGLWLNIPDYDAPTQLVKPRERNGRYVDAVMTIPKGSLFPMCGMNLAFDRELIGPAMYFGLMGDGQPIGRYDDMWAGWCVKVICDHLGLGVKTGLPYIWHSKASNPFVNLKKEYKGIFWQEDIIPFFQAAKLTKECDTVQKCYISLSQQVKEKLGKIDPYFVKLADAMVTWIEAWDMLNSKDSKEADVANGKLKGK

SEQ ID NO: 4556 - protein, 98 aa, Zea mays
LDQPKGDPSEEFSFSSFFPEFVRPFLDPIASVFHRLLCGRSDARGETLDTSPLPGSDSFEANRRRERGQRALEQRLAEKLAAVRSSEGGTSLDAADKV

SEQ ID NO: 4557 - protein, 223 aa, Leavenworthia crassa
GQTPLFPRIFGHEAGGIVESVGEGVTDLQPGDHVLPIFTGECGECPHCHSEESNMCELLRINTERGGMILDGESRFSINGKPIHHFLGTSTFSEYTVVHSGQVVKINPKAPLDKVCIVSCGLTTGLGATLNVAKPKKGQSVAVFGLGAVGLGAAEGARIAGASRIIGVDLNSKRFEEAKKFGVTEFVNPKEHNKPVQQVIAEMTNGGVDRSVECTGSVQAMIQ

SEQ ID NO: 4558 - protein, 92 aa, Oxalis nubigena
  unsure (1)..(92): unsure at all Xaa locations
GXNIXGTNGEVMPGQWEYQVGPSVGIEAGDHIWASRYILERITEQAGVVLTLDPKPIDGDWNGAGCHTNYSTKSMRDEGGFEVIKKAILNLS

SEQ ID NO: 4559 - protein, 95 aa, Oxalis pachyrrhiza
LYAGINISGTNGEVMPGQWEYQVGPSVGIEAGDHIWASRYILERITEQAGVVLTLDPKPIDGDWNGAGCHTNYSTKSMREEGGFEVIKKAILNLS

SEQ ID NO: 4560 - protein, 331 aa, Pseudomonas putida KT2440
MQYVKLGSTGLDISRLCLGCMTFGEPDAGTHPWTLGEDASRPIIRHAVEQGINFFDTANSYSAGTSEIILGKLLREFTRREETVIATKVFFPANMWEGASRPNEQGLSRKAIMANIDASLSRLGTDYVDLYQIHRWDYHTPIEETMEALHDVVKAGKARYIGASSMYAWQFAKAQQVAANHGWSRFVSMQNYLNLIYREEEREMIPLCLDQGVGLMPWSPMARGRLTRPHGQQTQRTRTDVSGQSFYEKTEVEDGRVIDVVEQIASERGVPMAQVALAWVLGRAGVSAPIVGASKPAHLDDALGALSLQLSEDEVARLQAPYVPHAVTGFK

SEQ ID NO: 4561 - protein, 742 aa, Glycine max
  unsure (1)..(742): unsure at all Xaa locations
MAVAAKSSSTHAEKAANGESSAERCPENEVALQFPETDDPSLTVMTLLAWLLRIASCVLLIFLNTFFTLRTQPLTIXPFCMHIAVLPIGRFMGSTLPTKXYRFLGWSLTFNPGPFNMKEHVIITIFANCRVSFGGGDPYSIGAITVMKAYYKHRLSFLCALFIVLTTQMLRYGWAGILRRYLVDPVEMWWPANLAQVSLFRALHEKEPKSKGLTRMQFFLIAMGASFLYYALPGYLFMVLTFFSWICWAWPHNITAQQIGSGYHGLGIGAFTLDWAGISAYHGSPLVSPWSSIVNVGIGFIMFIYIIVPVCYWKFNTFDAHKFPIFSNQLFTASGHKYDTTKILTPEYDLNVDAYNKYSKLYLSPLFALSIGSGFARFTATLTHVALFYGRDIWRQSRSAMSNAKLDIHGRLMKAYKQVPEWWFLSILFGSMALSLLMAFVWKTDVQLPWWGMLFAFGLAFIVTLPIGVIQATTNQQPGYDIIAQFMIGYVLPGQPIANLLFKIYGRISTVHALSFLSDLKLGHYMKIPPRCMYTAQLVGTLVAGVVNLAVAWWMLDSIKDICMDDKVHHDSPWTCPKYRVTFDASVIWGLIGPKRLFGPGGLYRNLVWLFLIGAVLPVPIWVLSKIFPEKKWIPLINIPVITYGFAGMPPATPANIASWLVTGMIFNYFVFRYNKRWWQKYNYVLSAALDAGTAFMGVLIFFALQNAGHNLKWWGSELDHCPLATCPTAPGIEVEGCPVFK

SEQ ID NO: 4562 - protein, 441 aa, Pseudomonas fluorescens PfO-1
MARLQRTLSLGSVVLFGIAYMTPIIVLGTFGILAQSTAGMVPAAYLAALVAMFFTAMSYGRMAAAFPVAGSAYSYVRKAISPKLGFIAGWAVLLDYLFLPMAIWLIGAAYLASAFPSIPQWIWVLAFIGITSAINIIGLKLANGINALLMLVQFLVLIAFVGLCVHYVGGDASQPLWSIKPFFNGDMQMPLIMSGAAIACYSFLGFDAVSTLTEETRDPRRTIPRAIMLITLIGGLIFVGVSYFVQIAHPSFQFDSVDSAAYEIARNIGGDLFVSIFLIGLIVGQFASGLSAQASGSRLLFAMGRDGVLPKSFFGTLHERFGTPVNSILLCAVVALLALKLDVTTSTSFINFGAFLAFSLVNLSVIFHYWIGGEKKGLRELILFLIFPFIGLAADLWLMVSLDHLAVYLGLSWLAIGVVYLAVLTGGFRRQPPEMDFQEAA

SEQ ID NO: 4563 - protein, 188 aa, Aster tripolium
MAGPGVGGHGPHGAIAMMNANGKKGPGAGFELPGQFKGKAGKNETKNGKDGKKGGGGENGKKGKGVYQFVDKYGANFSVISTDEDQIAANLVKNGPLAIGINAAWMQTYIGKVSCPYVCSKKPLDHGVLLVGYGSAGYAPSRLKEKPYWIIKNSWGPDWGEDGYYKICSGHNLCGMDTMVSAVVSTSA

SEQ ID NO: 4564 - protein, 354 aa, Agaricus bisporus
MANTYHNDLLAPYLSLDQGDKIQAEYVWIDGDGGLRCKTTTVSKKVTDIGQLRIWDFDGSSTNQAPGHDSDVYLRPAAIFKDPFRGGDNILVLAETYNNDGTPNRTNHRHHAKKVFDEAKEHEPWFGLEQEYTLFDADDQPYGWPKGGFPGPQGPYYCGAGTGKVFARDLIEAHYRACLYAGINISGINAEVMPSQWEFQVGPCEGISMGDHLWMARYLLVRIAEQWGVKVSFHPKPLKGEWNGAGCHTNFSTKAMREAGGMKFIEDAIEKLAKRHDEHIAVYGEDNDLRLTGRHETGHISNFSSGVANRGASIRVPRHVASQGYGYLEDRRPASNIDPYRVTSIIAETTILDK

SEQ ID NO: 4565 - protein, 371 aa, Nicotiana tabacum
MANEENKAAPTNTSRASNKRAFDDTLAAASSNGNDPLLKRVVLGELTNLEYVVGSTKTNTHNSKHKIKLKKTAPTKRKKIAIQSFKSDAATNFSPNDDLQKCAYAPLIYQHLHSLEVEARRRPLSNYMEKVQNDVTPTMRMILVDWLVEVADEYKLVSDTLYLTVTFVDRFLSSHVMARNSLQLLGVSCMLVASKYEEISPPHVEDFCYITDNTYTGEEVVNMERDLLNFLNFEISNPTTKTFLRIFTKVSQDNVDFLTLHFEFLGCYLAELSLLDYSCVRFLPSAVAASAIFLSRFTLLPKVHPWNLALQHCTGYKPSELKDCVLVIHELQSGRRAASVQAVRKKYMDHKYKCVAALHPPDIPACFFDDA

SEQ ID NO: 4566 - protein, 298 aa, Zea mays
MGKQQQAPPARRSPAMSAPPPPKRRKKKGRPSLLDLQKRNLRLEQQLQQQQQQQQPKGRRSNRRSAGSADEDDDGPASGSGRREKKLRLVMGLHDGSPKVEKARKATDGHEEPSDSGPTTPLPNKKLLLFILDRLQKKDTYGVFSEPVDPEELPDYHDIVKHPMDFSTIRKKLDKGAYSNLEQFEDDVFLISTNAMCYNSPDTIYYRQARGIQEIAKKDFENLRQDSDASDPEPEPELGLEPEPEEPKPQPRRGRPPNKNNAKQKVGKPPTERATADLEGARDPTGRGESRTRPSRQP

SEQ ID NO: 4567 - protein, 582 aa, Zea mays subsp. mays
MKREYQDAGGSGGGDMGSSKDKMMAAAAGAGEQEEEDVDELLAALGYKVRSSDMADVAQKLEQLEMAMGMGGVGGAGATADDGFVSHLATDTVHYNPSDLSSWVESMLSELNAPPAPLPPATPAPRLASTSSTVTSGAAAGAGYFDLPPAVDSSSSTYALKPIPSPVAAPSADPSTDSAREPKRMRTGGGSTSSSSSSSSSMDGGRTRSSVVEAAPPATQASAAANGPAVPVVVVDTQEAGIRLVHALLACAEAVQQENFSAAEALVKQIPMLASSQGGAMRKVAAYFGEALARRVYRFRPPPDSSLLDAAFADLLHAHFYESCPYLKFAHFTANQAILEAFAGCRRVHVVDFGIKQGMQWPALLQALALRPGGPPSFRLTGVGPPQPDETDALQQVGWKLAQFAHTIRVDFQYRGLVAATLADLEPFMLQPEGDDTDDEPEVIAVNSVFELHRLLAQPGALEKVLGTVRAVRPRIVTVVEQEANHNSGTFLDRFTESLHYYSTMFDSLEGAGAGSGQSTDASPAAAGGTDQVMSEVYLGRQICNVVACEGAERTERHETLGQWRSRLGGSGFAPVHLGSNA

SEQ ID NO: 4568 - protein, 358 aa, Daucus carota
MKTGLVLLVFLSGALVFTVAENFEVTEHDLATDESLWDLYERWRSHHTVSRDLTEKQIRFNVFKTNVKHIHKVNQMNKPYKLEVNKFADMTYHEFRNSYGGSKVKHFRSLRGDRARTGFMHENTKHLPSSVDWRKHGAVTPIKNQGRCGSCWAFSAIVGVEGINKIKTNQLVSLSEQELVDCESDNQGCNGGLMENALEFIKRSGGVTTERVYPYRARDERCDATKMNAPVVKIDGHENVPENNEYALAQAVANQPVSVAIDAGGSDMQFYREGVYTGECGTELDHGVAVVGYGATNDGTKYWIVKNSWGTDWGERGYIRMVRDINAAEGICGIAMEASYPVKLTADNPKAVPQKDEL

SEQ ID NO: 4569 - protein, 338 aa, Ralstonia solanacearum
MYSAHDVRVENVPDATIVEPTDAIVRVTQACICGSDLWPYRAMEPSETGQSMGHEAIGVVEAIGSGVNKIKVGDVVIMPFAYSDGRCEFCHEGLQTACVHGGFFGYGGFNGAQAEALRIPQADGTLYALPGGVDSALMASLLTLSDVMGTGHHAARVARVRPGTSAAVIGDGAVGLCGVIAAKRLGAERIILMGRHPDRIALAQAFGATDIVSERGEEAIERVRALTGGHGVHSVLECVGTDQSMQTAANIARPGGAVGRVGVPHYNAIPADTTFFKNVIVGGGPAPVRAYIDDLLPDVLDGKIQPGRVFDRVIGLDEVPDGYRAMDERQAIKVMINL

SEQ ID NO: 4570 - protein, 143 aa, Triticum aestivum
  unsure (1)..(143): unsure at all Xaa locations
MSRTGPIAQDWEPVVVRKKLPNAAAKKDEKAVNAARRAGVDIDIAKKHNAGTNKAAHSTTSLNTKRLDDDTENLAHERVPSDLKKSIMQARTDKKLTQAQLAQLINEKPQVIQEYXESGKAIPNQQIIGKLERALGTKLRGMK

SEQ ID NO: 4571 - protein, 458 aa, Rhodobacter sphaeroides
MFDMRDDAPNSWESRADASSFYGFTDLPSVHQRGTVVLTHGKGPYIYDVHGRAYLDANSGLWNMVAGFDHPGLIEAAKAQYERFPGYHAFFGRMSDQTVMLSEKLVEVSPFARGRVFYTNSGSEANDTMVKMLWFLGAAEGHPERRKIITRVNSYHGVTAVSASMTGKPYNSLFGLPLPGFIHVGCPHYWRFGQAGETEAEFTQRLARELEATIIKEGPDTIAGFFAEPVMGAGGVIPPSEGYFQAVQPVLKRYGIPLIADEVICGFGRTGNTWGCQTYDFMPDGIISSKNITAGFFPMGAVILGPELADRLQAASEAVEEFPHGFTASGHPVGCAIALKAIDVVMNEGLAENVRALTPKFEAGLAYLAENPNIGEWRGKGLMGALEAVKDKATKTPFPGDLSVSERIANSCTDHGLICRPLGQSIVLCPPFIMTEAQMDEMFEKLGAALKKVFAEVA

SEQ ID NO: 4572 - protein, 691 aa, Prochlorococcus marinus str. MIT 9313
MADPRASSQARGICVRCIALLALFALKMSDEVAAGRRLKDHNHEGSLAKAVWRPSPHEEDGLAHQGHVAQMGRVDQIWLWLAQKHGQILAVDAPHATHPERFRYGELAEQIALAAAAFSHLGIGAGDVVAFFAENSPRWLIADQGLMRTGAANAVRGATAPLEELRYILADSRAVALVVQNAELWHKLALTDEQRRPLRLVLQLEGEPADGVMGWQELLAAGAGQPAPDPLKDRDSGSAATVTATILYTSGTTGQPKGVPLSHANLLHQMRCLACVAFPSPGAPVLSVLPIWHAYERSAEYYFFSCACTQSYTTIKQLKRDLPRVRPIVMATVPRLWEAIQAGFDEAVKGMPTGRQRLLRMALANSGSQRKAWRRSRNLLLEPLPLTTRTLALLEATLRWPLHGLAGALLWPKVLNQLCGGRLRFPINGGGAIAPHVDAFFEAVGLELLVGYGLTETSPVVSCRRPWRNIRGSSGPPLPETEFRIVDPESGVDLMFRQRGRVLVRGPQVMAGYLRKPEATAKVLDGQGWFDTGDLGMLLPDGSLVLTGRAKDTIVLSSGENIEPGPLEAALVASPLLEQVMLVGQDERQLAALVVPREEEMLAWAEDQGLLMQTGLSGSPGDEALRRLLRGELNRLLAQRSGSRADERLAGVALVEAFTIENGLLTQTLKQRRDRITLRDGALIAALYGRS

SEQ ID NO: 4573 - protein, 335 aa, Novosphingobium aromaticivorans
MRAAVMQGLHKPLAIDTIPDPTPGEGDVVVKVGRCGICGSDLHMTEDPAYGQGAGSVLGHEFAGEVVALGKGVEGLRTGDLVSVIPLQSCGQCHSCRTGEVQWCERFGLQGGGYAEFALTRPNQCVRLPASASMADGAIVEPLAVALHGLALSRMKIGDKVLVLGAGPIGLAVAFWARRFGAGRVVVQDLAEWQRDRALQMGAHDFVVDAADPVGSAGRALGGKADIVFECVGVPGLIAQAVEQVRNDGTITLLGLCTRPDTFNSFAMLSKQVKLVTSAFFTRQEYEAALDALVRGAVEPRLLVTDTISLDATPDVFESLRKRTHQCKVLINPGE

SEQ ID NO: 4574 - protein, 451 aa, Gibberella fujikuroi
EAERKRKEEEERQRREEEEKRKKQQREAEEKARREEAEKQRIEEERKKKEEEEQKQREEEERLHREQLEREAAEEARRLREEEERKERERRERAHREDMERKRAAREAEQRRFREEQERIRLDKLPPLLRWLDTCPNPKLPVLAEKFKRIQGCRYDTIRHEANGTPEGREQWVLNTHAALLLGEKDLDLSRYTAWERAPVTELAKLSLWRVEWRLYSLLDDKLWDLGRQLPEYYGDEDPVELSYGTKQRLKAEAWEKFLNMDMFFVKVSDLMYTVPHIPHLRHIRLEVEYRELLETEAQSRGWGTCQKWKQDPDSARYNRLAPRCKYYHNGAFVGEDKPQLAQTSSTPFLDKKVPRRGLVQVLPDDPDYTRICLEQGLEHLINGHLSPPVVNGIHSSPMSQKSMTSVGPPMNGMIKALTPGSTSESLTISNAGHETLVNGINGNTNGNPAH

SEQ ID NO: 4575 - protein, 748 aa, Xanthomonas axonopodis pv. citri str. 306
MKPFTAHQNRPRPLVLAVVMGLGVAFAAPLAVAQGAPSSQPWMDTALTPDQRADRLLAQMSEDEKFQMLRSYFGLGTDKIPKPEGALGSAGYVPGIPRLGIPAQQLADAGVGVTNPGGIRKGDYATAMPSGPSTASSWNRQLAYTGGKTMGRESWQQGFNVLLAGSVNLQRDPRNGRNFEYAGEDPLLAGTMVGESIRGVQSEHVLSTMKHFALNDMETRRNFHSAQIGEQAMHESDLLAFEIALKIGDPASVMCSYNKINGIYGCEHDYLLNQVLKQEWKYPGYVMSDWGGVHSGSKAALAGLDQQSAGEVFDAAVFFDAPLRMAVSAGVVPRARFDDMVKRVLRSLFAHGAFDHPTQRQPIDGKAGLLAAQRVAEEGSVLLRNEQAALPLSKDVRRIAVIGGYADKGVMSGGGSSRVDYTINGGNAVPGITPTTWPGPVIIHPSSPLQALRAALPNVQIDYLDGTDRAAAARAAKAADVAIVFATQWAAESVDLPDMRLPDNQDALIETVAKANPKTTVVLETNGPVRMPWAERVPAVLQAWYPGIGGGEAIANLLTGAVNPSGHLPVTWPVDESQLPRPSIPGLGFKPAKPGEDSIDYAIEGANVGYKWFAARKLTPRYPFGHGLSYTQFRMGGLQVEARGSQLTASFEVENTGPREGAAVPQLYVALPDGHATPLRLIGWQKLTLKPGEKRSVQVVAEPKTLADFDAKARRWTIAAGTYRVQLARSTSEPVQTAEVTLQAAQLP

SEQ ID NO: 4576 - protein, 199 aa, Leavenworthia crassa
SVGEGVTDLQPGDHVLPIFTGECGECPHCHSEESNMCELLRINTERGGMILDGESRFSINGKPIHHFLGTSTFSEYTVVHSGQVVKINPKAPLDKVCIVSCGLTTGLGATLNVAKPKKGQSVAVFGLGAVGLGAAEGARIAGASRIIGVDLNSKRFEEAKKFGVTEFVNPKEHNKPVQQVIAEMTNGGVDRSVECTGSV

SEQ ID NO: 4577 - protein, 369 aa, Rhodococcus ruber
MKTKAAVLFDLHKPFEIIELELDDPGPGEVLIKYTAAGLCHSDLHLSDGSLPPRFPIVGGHEGAGIIEAVGVGVTKVKPGDHVVCSFIPNCGTCRYCSTGRQNLCDMGATILEGHMPDGTFRFHAGGKDFGAMCMLGTFSERSVISQHSVVKVDDWLPLDKAVLVGCGVPSGWGTATYAGNVRQGDTVVIYGIGGLGINAVQGAVHSGARHVVVVDPVQFKRDEALKFGATHAFADAAEAHAEVEKLTWGQMADQALILVGTVDEPVVSSAFDVIGKGGTVVITGLGNMTDKTVQVSGTMMALFGKTITGTVFGSANPQYDIVKLLRLYDEGKLKLDELITTTYTLDQVNEGYQDLQDGKIMRGVIIHD

SEQ ID NO: 4578 - protein, 602 aa, Saccharomyces cerevisiae
MSNTSSYEKNNPDNLKHNGITIDSEFLTQEPITIPSNGSAVSIDETGSGSKWQDFKDSFKRVKPIEVDPNLSEAEKVAIITAQTPLKHHLKNRHLQMIAIGGAIGTGLLVGSGTALRTGGPASLLIGWGSTGTMIYAMVMALGELAVIFPISGGFTTYATRFIDESFGYANNFNYMLQWLVVLPLEIVSASITVNFWGTDPKYRDGFVALFWLAIVIINMFGVKGYGEAEFVFSFIKVITVVGFIILGIILNCGGGPTGGYIGGKYWHDPGAFAGDTPGAKFKGVCSVFVTAAFSFAGSELVGLAASESVEPRKSVPKAAKQVFWRITLFYILSLLMIGLLVPYNDKSLIGASSVDAAASPFVIAIKTHGIKGLPSVVNVVILIAVLSVGNSAIYACSRTMVALAEQRFLPEIFSYVDRKGRPLVGIAVTSAFGLIAFVAASKKEGEVFNWLLALSGLSSLFTWGGICICHIRFRKALAAQGRGLDELSFKSPTGVWGSYWGLFMVIIMFIAQFYVAVFPVGDSPSAEGFFEAYLSFPLVMVMYIGHKIYKRNWKLFIPAEKMDIDTGRREVDLDLLKQEIAEEKAIMATKPRWYRIWNFWC

SEQ ID NO: 4579 - protein, 114 aa, Zea mays
MPPPREHHQPQDEEDDDTAGVVKLISAEGFEFVVDRKAAMVSNTLRNMLTSPGGFSETRQGEVRFPEIPTNILEKICQYFYWSLHYSSGKETAEFPIEPEITLELMMAANYLDT

SEQ ID NO: 4580 - protein, 869 aa, Cellvibrio japonicus
MKDDFPQRLLRVSAASLLVLAALAGCDSRAPSTTDSTTTVSADTVTTQATEKVEWPVLNSAIKKDPAVEARVDDLLARMTLEEKIGQLVQPEIRHVTPEDIKQYHVGSVLNGGGSTPGANKYASLEDWVKLADSFYYASVDKSDGRIGIPVIWGTDAVHGLGNVIGATLFPHNIGLGATNNPELLKQIGWATAREIAATGLDWDFSPTVAVARDDRWGRTYESWSEDPQIVHAFAGKMVEGLQGTGGSDRLFTHEHVIATAKHFIGDGGTLNGVDRGETQGDEKVLRDIHGAGYFSAIESGVQVVMASFTSWEGTRMHGHKYLLTDVLKDRMGFDGLVVGDWSGHSFIPGCTALNCPQSLMAGLDIYMVPEPDWKELYKNLLAQAKTGELPMARVDDAVRAILRVKIRAGLFEKGAPSTRPLAGKKDVLGAPEHREVARQAVRESLVLLKNKNNLLPLARQQTVLVTGDGADNIGKQSGGWSVSWQGTGNTNADFPGATSIYAGINAVVEQAGGKTLLSDDGSFSEKPDVAIVVFGEDPYAEMQGDVGNMAYKPRDTSDWELLKKLRSQGIPVVSLFISGRPLWVNREINASDAFVAVWLPGTEGQGIADVIFRNAQGEINYDVKGRLSFSWPKRPEQTPLNRGDANYDPLFPYGYGLSYGDKDTLGDNLSEEGIQLAEALDVLDLFNRRPIEPWQLEIIGYQNDRVPMASSTVTASSLKIQAVDRNEQEDARRVQWNGSGPGQVALSVGDRQDFIGYVKSDSALVFDIKVNAAPTVTTYLRLGCGSYCASDIDLTEKLKGFAGQDWQTVTVPLHCYPNSGANFGVTQPPEEFWTQVLQPFSLLTSGTLDVTFAQVRVVKGAGKDVACP

SEQ ID NO: 4581 - protein, 140 aa, Glycine max
MVSFEMNDRKKIGLGLTGFGIFFSFLGLIFFFDKGLLAMGNILFVSGVSLTIGLKSTMQFFMKRSNFKGTISFGIGFFILILGWPILGMIVESYGFIILFSGFWPTLAVFLQKIPVLGWLFQQPYVRSLLDRYRGRRVPV

SEQ ID NO: 4582 - protein, 152 aa, Brassica juncea
MGKGVRVLNSSEGVKGTIFFTQEGNGTTTVTGTVSGLKPGLHGFHVHALGDTTNGCMSTGPHFNPEGKTHGAPEDANRHAGDLGNITVGDDGTATFTITDSQIPLDGPNSIVGRAVVVHAEPDDLGKGGHELSLTTGNAGGRVACGIIGLQG

SEQ ID NO: 4583 - protein, 150 aa, Aspergillus fumigatus
  unsure (1)..(150): unsure at all Xaa locations
ACGLLTVVLSAANSNVYSGSRILIGLAQEGFAPRLFXRTSKKGVPYYSVAFTSAFGLLGFMNVSNAGSTVFNWFLNISGVAGFITWASLNACHIAFMRALKARNISRDLLPYKALWQPWYAYYGLFFNVLIILTQGFTAWIPTFSVTVVG

SEQ ID NO: 4584 - protein, 620 aa, Burkholderia fungorum
RKSCLQTLLSVCFFARENPWFRCRGGVQPLNYAPRVGCTCLEWTVAQARASPVSSATSDVTRCRHGFAANLHGAGLGAETPAPADTGEDVKSSIQRNIGPFALMLTGLGSIIGSGWLFGAWKAAKIAGPAAICAWVIGAVVILAIALTYAELGAMFPESGGMVRYARYSHGALVGFISAWANWIAIVSVIPIEAEASIQYMSTWPYPWAHALFVDGSLTTHGLLLSAALVIIYFLLNYWGVKLFARANSAITIFKFLIPGATILGLMLTGFHKENFGEVSTFAPYGWSAVLTAVATSGIVFAFNGFQSPINLAGEARNPARSVPFAVIGSILLALVIYVLLQIAYIGAVNPSDVMKGWSHFNFASPFAELAIALNLNWLAILLYVDAFVSPSGTGTTYMATTSRMIYAMERNNTMPKMFGNVHPFYGVPRPAMWFNLLVSFIFLFFFRGWSSLAAVISVATVISYLTGPISLMSLRRAATDLERPLHIPGMKIIAPFAFVCASLILYWAKWPLTGEIILLMVVALPVYFYFQAKSGFAGWGRDLKAAWWLVAYLPVMAILSLIGSKQFGGHDLIPYGWDMLVVIAFSLVFYYWGVNSGYRSEYLDERQEHDEVLEGIGAH

SEQ ID NO: 4585 - protein, 266 aa, Gossypium raimondii
LSVEEIEVAPPQKNEVRVKIHFTSLCHTDVYFWEAKGQNPLFPRILGHEAGGVVESVGEGVMDVQPGDHVLPIFTGECKECPHCLSEASNMCDILRINTEWGGMLHDGHTRFSKDGKPIYHFLGTSTFSEYTVVHVGQVAKINPEAPLDKVCVLSCGMSTGFGATVNVAKPKKGGSVAVFGLGAVGLAAAEGARVCEASRIIGIDLNPNRFEEAKKFGCTEFVNPKDHNKPVQEVIAEMTGGGVDCSIECTGSTQAMVSAFECVHD

SEQ ID NO: 4586 - protein, 776 aa, Halobacterium sp. NRC-1
MIGAGIFVLPKIAAEQAGPASMVSFFVGGMVSLFAALSLSELATGMPKAGGSYYYVNRALGPFFGSIVGWGMWAGLTFASAFYMIGFGQYLLPGLGEYVGVLAGWGDLGITVAALAMAALLTAVNYYGVKETSALQNVIVLTLVGLVLAFLGLGAVTGPTITEFNPNGWPAVAATIGTVYVTFIGFEVIATSAEEIKNPSRNLPLAMIAAVVTPTLMYVGVMFVSTGTIDIPVLAGSDVPVALVAREIFQPLAGAVSWLPFVSVQPATAGSVGALAMIVGAVLATVSSANASILSAARVNFAMGRDKILVNWLNEVHDRFRTPYRAIAATGVITLLLIGIGVGVGTLAEVASFMYLVTYALVHVSVVVLRRANPDTYDPAFRIPAVLYPVVPVLGAAACVAVLVQMSVTFSPMTIGVASVAVVLPVTPTPVGAIGTVLVAFGIAWYYCYARARAPSQSLVGDALAPSSSPDTDTPDTYTVVVPVANPDTEHDLLRMAAASAHAHTDAHAEVIAVNVIEVPRQTSLSQDLAFEEERVERQQELLDAASAAAADLDVRLRTRAVASHDTGAAILDVIEDTAADHVLLGWGGTRRRDHVLGSTIDPVVGHASCDATLVRLGPAAAGDASDIMVLAGEGPHAPVAARRAAEFVAADETDASLTLLNVQPPADDDDDADASATERGAAVIDALAERAGIKYMTYDTEVVVSTDTEAAVIDAAADFDMVYAGATRSGPVSQAVFGSIPEAVGAGVDQTVVMARGPDNTPMSVRDAITRRFGG

SEQ ID NO: 4587 - protein, 502 aa, Mentha x piperita
MYSIAFMLVLRKMDEIISHTLAFQALVSLILLISITKWLSNSPKNKNSSPPSPRKLPILGNLLQLGSLPHHNLRSMARKHGPIMLLHLGSVRPVSSRRRPRGNHENSRSRLRRPRGSRSAALQLQGRVGGYGEYWRQLKTICVVQLLSNKRVQSFRSVREEETELLMKKIGDSSGNVNLSHMFTQLTNDVVCRSAIGRKYGAGDENGEKFLEILREFLELLGAISIGDFVPSLWWINRINGFDRRVDRIAKEMDEFLEKVIHERLENPAAKAEENFVDILLEIYRNNSAGVSIDRDSIKAIILDVFAAGTDTTAVVLEWAMTELLRHPEIMKKLQSEVRQVVKDKHNITDDDIEKMHYLKAVMKETMRFHTPIPLLVPRVARNDVEVMGYDVPVGTMVMINAWAIGRDPTSWDEPEKFRPERFLNSSVDFKGLDFELIPFGAGRRGCPGTTFPMATLEFTLANLMQKFDWELPHECRELDMSERPGVAIRRVIPLLAIGTKM

SEQ ID NO: 4588 - protein, 235 aa, Zea mays; identical to SEQ ID NO: 3077

SEQ ID NO: 4589 - protein, 231 aa, Bacteroides thetaiotaomicron VPI-5482
MSFLENNFFLLAVTFGVFFFAKLLQKKTGLVLLNPILLTIAVLIIFLKMANISYETYNQGGHLIEFWLRPAVVALGVPLYLQLEMIKKQLLPILLSQLAGCIVGVISVVLIAKFMGASQEVILSLAPKSVTTPIAMEVTKAIGGIPSLTAAVVVAVGLLGAICGFKTMKIMHVGSPIAQGLSMGTAAHAVGTSTAMDISSKYGAYASLGLTLNGIFTALLTPTILRLLGVL

SEQ ID NO: 4590 - protein, 307 aa, Oryza sativa (japonica cultivar-group)
MDTRGVIRTFEEYDAAVEWSRSAEADAVKISLPGKNTINSIHLSLDQLGFKREEIRVLVDNHGHLRTRGERPVAGNRWSRFQKDFQLPADCNVDGIRAKFENEALTITLPKKTPSPLTPSPTPSPVTPPPQQPPQPEPRRPPAAPLPGVRTPPSPPRRAPAPAPAPLTPALSQRFLAERRPAPVPEPVTRKRSDLGTLMKPKEDKVEETTKPLPPPAAAAAAAEEEEERMAREARGKMEEDKKKANEEVTDMAQLRRPASASRRQLVNVAVAAVVLLGITLYVWNTLRNAATGGGGNGHGASYSDEM

SEQ ID NO: 4591 - protein, 158 aa, Glycine max
VKSSNVKEPVISPTSLVFGYLNLFSDGVHNFTDGMALGSAFLLYGSVGGWSRTLFLLAHELPQEIGDFGILIRSGFSIPKALFFNFLSALVALAGTALDPGQSSLIEGFTAGGFIYIAIAGVLAEMNNSGNTTLRNTVVQIISLTMGMAVALGISLVE

SEQ ID NO: 4592 - protein, 246 aa, Streptomyces antibioticus
MVHNGRGVALVTGGSRGIGRAVVLRLVREGFDVAFCYQREAVAAADLEKAVAELGGRVAHRRVDVSDAVQVKEWVRDVESELGPVEVVVTSAGIVRDGPLVMMQDKDWQDVIDVNLNGTFNVCRAAVFGMMKRKSGCLINLSSVAGVSGHATQSNYSASKAGIIGFTKSLSKELGRYGIRANVVAPGFIDTDMVAGISDGLRTKAVAGVALGRFGRPDEVADAVAYLASAEYVTGAVLQIDGGLSI

SEQ ID NO: 4593 - protein, 572 aa, Neurospora crassa
MSDIEKGSAGSHDKETRVDAATLPAYEAGSVAEAQQEDFMTRNGLNLASFKPRRFHTGDGTEIERTMKSRHLHMIAIGGSIGAGFFVGSGKALHNGGPASLLIDFAIIGVMMFNVVYALGELAVMFPVTGGFYTYSTRFIDPSWGFAMGWNYVFQWAIVLPLELTVCGFTVGYWNQDITVWITIFLVAIIIINVFGTLGYAEEEFWASAFKLGATIVFLIICLVMVLGGGPKGSRYDHYTGAALWYSPGAFANGFRGFCSCFVTAAFAFSGTELVGLAAAEAKNPVKSLPGAIKQVFWRITLFYILGLFFVGLLIPYDDENLLGANPFINVNASPFVLVGKYANLTGFDSFMNVVILVSVLSLGVSCVYGGSRTLTALAQQGYAPKIFTYVDRSNRPLFSVLLIIAFGPLAYVNLAAAGPTVFDWLLSLSGLAALFTWGSICLSHIRFRKAWALKGHSVEEIPFRAAGGVWGSWLGLVLVVLVLIAQFYVAICPPGGGFNTVEGFFVQYLALPVVIVFWIGGFIWKRTSWLRVDQIDVDTGRREHDWESINAYQAELAAMPAWKRWFHKLFV

SEQ ID NO: 4594 - protein, 225 aa, Zea mays
  unsure (1)..(225): unsure at all Xaa locations
MASLDAVRGDLALLILYLNKAEARDKICRAIQYGSKFISNGEPGPAQNVDKSTSLARKVFRLCKPXAKGTPLPLILLGKSKNAMLSTFLFLDQIVWAGRTGIYKNKERAEFLGRIAFYCFLGSNTFTAIIELAELQRLSTSMKKLEKELKHQELYKNEQYRMKLHKSNERLLALVKSSLDIVVAVGLLQLAPKKVTPRVTGAFGFASSLIACYQLLPSPPAKQSK

SEQ ID NO: 4595 - protein, 691 aa, Mycobacterium tuberculosis H37Rv
MTDDERFSLLVGLTGASDLWPVRDERIPQGVPMCAGYVPGIPRLGVPALLMSDAGLGVTNPGYRPGDTATALPAGLALAASFNPVLARSSGKAIGREARSRGFNVQLAGAINLARDPRNGRNFEYLSEDPLLSATMAAESIIGIQQQGVIATTKHFSLNCNETNRHWLDAVIDPDAHRESDLLAFEIVIERSQPGAVMAAYNKVNGDYAAGNDHLLNDVLKGAWGYRGWVMSDWGGTPSWECALAGLDQECGAQIDAVLWQSEAFTDRLRAAYADGNLPKGRLSDMVRRILRSMFAVGIDRWKPAPAPDMNAHNEIAAQMARQGIVLLQNRGLLPLAPESAGRIAVIGGYAHLGVPAGYGSSAVTPPGGYAGVIPIGGSGLAAGLRNLYLLPSSPLSELRKRLPNAQFEFDPGINPAEAVLAARRADIAIVFAIRAEGEGFDSADLSLPWGQDALIAAVASANANTVVVLETGNPVTMPWRDSVNAIMQAWYPGQAGGQAVAEIVTGQVNPSGRLPITFPVDLGQTPRSQPPELGAPWGTSTTIHYTEGADVGYRWFASTNQTPMFAFGHGLSYTSFEYRDLVVTGGHTVHASFSVTNTGDRSGADVPQLYMIAAPGESRLRLLGFERVELEPGQTRRVRIEADPRLLARYDGEARSWRIEPGGYTVAVGASAVALKLAAKVKLAGRGFGR

SEQ ID NO: 4596 - protein, 746 aa, Listeria monocytogenes
MKTVLGKTNVTDTVSQTDLDQVTTLQADRLGIKSIDGLEYLNNLTQINFSNNQLTDITPLKDLTKLVDILMNNNQIADITPLANLSNLTGLTLFNNQITDIDPLKNLTNLNRLELSSNTISDISALSGLTSLQQLSFGNQVTDLKPLANLTTLERLDISSNKVSDISVLAKLTNLESLIATNNQISDITPLGILTNLDELSLNGNQLKDIGTLASLTNLTDLDLANNQISNLAPLSGLTKLTELKLGANQISNISPLAGLTALTNLELNENQLEDISPISNLKNLTYLTLYFNNISDISPVSSLTKLQRLFFYNNKVSDVSSLANLTNINWLSAGHNQISDLTPLANLTRITQLGLNDQAWTNPPVNYKTNVSIPNTVKNVTGALIAPATISDGGSYAEPDITWSLPSYTNEVSYTFNQSVTIGKGTTTFSGTVKQPLKAIFNAKFHVDGKETTKEVEAGNLLTEPANPVKEGHTFIGWFDAQTGGTKWNFSTDKMPTNDIDLYAQFSINSYTATFDNDGVTTSQTVDYQGLLQEPTAPTKEGYTFKGWYDAKTGGDKWDFATSKMPAKNITLYAQYSANSYTATFDVDGKTTTQAVDYQGLLKEPKTPTKAGYTFKGWYDEKTDGKKWDFATDKMPANDITLYAQFTKNPVAPPTTGGNTPPTTNNGGNTTPPSANIPGSDTSNTSTGNSASTTSTMNAYDPYNSKDASLPTTGDSDNALYLLLGLLAVGTAVVLTKKTVLNKAK

SEQ ID NO: 4597 - protein, 358 aa, Streptomyces avermitilis MA-4680
MRAAVLHEIGQDKLEVLDDVESVGFGPGRVRIRVRATGLCHSDLSAMSGVLPQPAPFVPGHEGAGEIVEVGEGVSHLKPGDRVVVCWLPACGVCPACKRGQSQLCLAGFMNAGTPNFRRPGGDVFGFAGTGTFAEEVVVDAGSAVPIPDDVPFDIAALIGCGVTTGLGAALNTADVAAGSSVAVIGCGGVGISAVQGARLKGAAEIVAVDPVASRRESALRFGATQAVSPDELAAAKQAVTGGEGFDYVFEVVGRSATARTAYENTRRGGTLVVVGAGALDDFLQLNMFELFFDEKRILPSMYGGGDVLRSYERTIALWRAGRIDLEGLITHRVPLAEINEALDQMRTGTALRTCIEI

SEQ ID NO: 4598 - protein, 125 aa, Oryza sativa
  unsure (1)..(125): unsure at all Xaa locations
MAKGGLSKLKCMIKRWHSSSRISRTPSGAAGRCRSTARTACPXGLHPVYVGKSRRRYLIAADLVGHPMFQNLVDRSGGGGVGGGGGGGTVVGCEVVLFEHLLWMLENADXXQPESLDELVEYYAC

SEQ ID NO: 4599 - protein, 276 aa, Triticum aestivum
MMSMMADLSCGASGVTVNDHQLAAPAPEDSAVAGSEKMGRGRIEIKRIENTTNRQVTFCKRRNGLLKKAYELSVLCDAEVALIVFSSRGRLYEYSNNSVKATIERYKKANSDTSNSGTVAEVNAQYYQQESSKLRQQISSLQNSNSRSLVRDSVSTMTLRDLKQLEGRLEKGIAKIRARKNELMYAEVEYMQKREMELHNDNIYLRSKVSENERGQQPMNMMASGSTSSEYDHMVPPFDSRNFLQANILQQQQQQQQHYSQQLQPTALQLGQQYFN

SEQ ID NO: 4600 - protein, 224 aa, Triticum aestivum
TPPEEEGGFDEELTLAGEDGDWVVRFEQSFNVFLTDTVIFILDILYRDRDYARFFVLETIARVPYFAFISVLHLYETFGWSRRADNIKVHFAESMNEFHHLLIMEALGGNSVWLDRFLARFSAFFYYFVTVGMYMLSPRMAYHFSECVERHAYSTYDKFLKLNGEELKKLPAPEVAVNYYMNEDLYMFDEFQTSRAPNSRRPKVDNLYDVFVNVRDDERSIARQ

SEQ ID NO: 4601 - protein, 105 aa, Aspergillus leporis
SLFDKDGDGQITTKELGTVMRSLGQNPSESELQDMINEVDADNNGTIDFPEFLTMMARKMKDTDSEEEIREAFKVFDRDNNGFISAAELRHVMTSIGEKLTDDEV

SEQ ID NO: 4602 - protein, 178 aa, Pyrococcus horikoshii
MNPFHDLEPGPNVPEVVYALIEIPKGSRNKYELDKETGLLKLDRVLYTPFHYPVDYGIIPRTWYEDGDPFDIMVIMREPTYPLTIIEARPIGLFKMIDSGDKDYKVLAVPVEDPYFKDWKDISDVPKAFLDEIAHFFKRYKELEGKEIIVEGWEGAEAAKREILRAIEMYKEKFGKKE

SEQ ID NO: 4603 - protein, 170 aa, Triticum aestivum
GKPSTFATLEFWAWGAVFVASFATAFVNPTALGTTARTCLPFMLASTVLGYMVGSGLPPGIKKLLHPIICCALSANLSAVAYGYLSGSGIDAALGDYLTKVPSNPGAGDVLMGFLGSVILSFAFSMVKQRKLVKRHAAEIFTSIAIASTFFLYSTAILGRLIGLEPTLTI

SEQ ID NO: 4604 - protein, 546 aa, Caulobacter crescentus CB15
MPDRRRFAGRWGNAHMAGNRLFLKKSIASIQKEAAHSQLKRTLGPINLMSLGVGAIIGAGIFVLTGQVASANAGPAIMLSFIVAGIACALAGLCYAELASTMPVSGSAYTYAYGTLGEVFAWIMGWLLVLEYGVAASTVAVGWSGYVVSTLHALGINFPMIQVAGADAPMWATPLIQAVAAPGGGTMFAMTGTLNLVAAIGIAMVSALLVVGVSESANVNNAIVVIKVIVLVTFIAVGAQYINPANWHPFIPEPTGQPGEFGIGGIFRGAAIIFFAYVGFEAVSTAAAEAKNPSRDVPIGILGALIICTLIYMAVAAVMTGVVPFRELASPAPIAVAIDRMGLEWADIPYAAAEGGKLNLLSFAIKIGAITGLSSVMLVLCYGQTRIFYTMARDGLLPKVFAEIHPKFRTPWLGTILLGVVIAIAASFLPISLLGDLVSLGTAVAFSIVCLSVIYLRIKHPDLPRPFKVPGGIFTAAAGIAACLFLPYQNFQPMIVHAMNDNPLPLMILGGYAAVGAIIYIAYGYWHSKLAKGIDITEETDPNSPA

SEQ ID NO: 4605 - protein, 460 aa, Lactobacillus plantarum WCFS1
MKITNADGTIRALSNRHVQMIAIGGTIGTGLFLGSGSTISKTGPSVMWVYLVLGFFFFLMMRAIGEMFYSDPTQHTFVAFISRYLGPSVGYFTGWTYWIGLIFVCMAELTATATYVKFWLPNVPAWLIEISFLLILAGVNLTAARLFGEAEFWFAMIKIVAIIALIITGIFMMVGHHPTPLGQASIGNLFHNYQVFPNGIANFISAFPMVFFAFQGIEFVSITIGEAKNPHRVIKKAVNETLLRILLFYIGALIVIMGIIPWTSLSPDSSPFVQVFKLAGYPAAAAIINFVVLTSAASSLNSCLFSAGRHFYQLATEMPVTSRMHQIFGQISKSGVPAAAIVLSAILVLVTPIMSLSAATTAVFTVVTGISSDMYLIVYTLAMLAHRKYRLSNDYLADGFKMPAYRITSPLTIAFFVLIFASLFFIQADIVGAIGAIIWTLLFGGITFAHQARLRAVTRS

SEQ ID NO: 4606 - protein, 476 aa, Nectria haematococca
MTTYRFGGPLGATGIVFGLPVLMSVLFLGCNDVSGCPAPALMDPRTLTWEKLRDQIPWPEDGIWGFCSWEASGWLAAYYLLSLFLYRVLPAKQVYGTKLRESGRPLEYRFNAFSSTVVQLAACAVGTIIYGAEFPVWTFITDNYLQLLNANIILSFIISIYVYVDSFNVKKGNPEMRELAKGGHTGNLIYDFFIGRELNPRMTLPFFGEVDLKAWLEMRPGLTGWALLDLAYIAKQYRTYGYISDSIIVITLVQSYYVLEGHTPSLDFLGMMDITTDGLGFMLGFGDIVWVPFLYSTQCRYLSVYPVHLGWLNFAAIATVFSVGLYIFRASNSQKNLFRTNPDHPAFANMTYIQTKRGTRLLTGGWWGMARHINYFGDWLQSLPFSLPTGISGYVILPAGSAVTGVGITKMLDGRVVTQEGVAGWGMLFTYFYAAWFAFMLIHREGRDDAACAEKYGDDWVQYKKTVKWRILPGVY

SEQ ID NO: 4607 - protein, 205 aa, Nicotiana tabacum
  unsure (1)..(205): unsure at all Xaa locations
MTAKTTMDVPQKGGFSFDLCRRNEMLVNKGLRSPSFLKTGTTIVGLIFQDGVILGADTRATEGPIVADKNCEKIHYMAPNIYCCGAGTAADTEAVTDMVSSQLKLHRFHTGRESRVVTALTLLKTHLFSYQGYVSAALVLGGVDVTGPHLXTIYPHGSTDTLPYATMGSSSLAAIAIFESKYREGLITPLREVVEVIEGGDAMEK

SEQ ID NO: 4608 - protein, 432 aa, Glycine max
MGATVHSPLVTYASVISLLTLCPPFVILLWYTMTLADGSVSETFHYLRQNGLQGLLHIWPTPTPTACKIIAVYAAFEAALQLLLPGKTVYGPISPTGHRPVYKANGLQAYFVTLITYFALWWFGIFNPTIVYHHLGEIYSALIFGSFLFCVFLYIKGHLAPSSTDSGSSGNLIIDFYWGMELYPRIGKHFDIKVFTNCRFGMMSWAVLALTYCIKQYEENGKVADSMLVNTALMLVYVTKFFWWEAGYWSTMDIAHDRAGFYICWGCLVWVPSVYTSPGMYLVNHPVNLGIKLALSILVAGILCIYINYDCDRQRQEFRRTNGKGTVWGKAPSKIEATYTTTSGETKRSLLLTSGWWGLSRHFHYVPEILAAFFWTVPALFEHFLPYFYVIFLTILLFDRAKRDDDRCRSKYGKYWKLYCDKVPYRIIPGIY

SEQ ID NO: 4609 - protein, 144 aa, Gossypium bickii
LGTSTFSEYTVVHVGQIAQINPQAPLDKVCVLSCGMSTGFGATVNVAKPKKGGSVAVFGLGAVGLAAAEGARFCEASRIIGIDLNPNRFEEAKKFGSTEFVNPKDHNKPVQEVIAEMTGGGVDCSIECTGTTQAMVSAFECVHD

SEQ ID NO: 4610 - protein, 251 aa, Zea mays
  unsure (1)..(251): unsure at all Xaa locations
MAKNYPTVSAEYSEAVEKARRKLRALIAEKSCAPLMLRLAWHSAGTFDVSSRTGGPFGTMKCPAELAHGANAGLDIAVRLLEPIKEEFPTLSYADFYQLAGVVAVEVTGGPEIPFHPGREDKPQPPPEXGRLPDATKGSDHLRQVFGKQMGLSDQDIVALSGGHTLGRCHKERSGFEGAWTTNPLVFDNSYFKELLSGDKEGLLQLPSDKALLSDPVFRPLVEKYAADEKAFFDDYKEAHLKLSELGYADA

SEQ ID NO: 4611 - protein, 380 aa, Actinidia chinensis
MGLPKSFVSMSLLFFSTLLILSLAFNAKNLTQRTNDEVKAMYESWLIKYGKSYNSLGEWERRFEIFKETLRFIDEHNADTNRSYKVGLNQFADLTDEEFRSTYLRFTSGSNKTKVSNRYEPRVGQVLPSYVDWRSAGAVVDIKSQGECGGCWAFSAIATVEGINKIVTGVLISLSEQELIDCGRTQNTRGCNGGYITDGFQFIINNGGINTEENYPYTAQDGECNVDLQNEKYVTIDTYENVPYNNEWALQTAVTYQPVSVALDAAGDAFKQYSSGIFTGPCGTAVDHAVTIVGYGTEGGIDYWIVKNSWDTTWGEEGYMRILRNVGGAGTCGIATMPSYPVKYNNQNHPKPYSSLINPPAFSMSKDGPVGVDDGQRYSA

SEQ ID NO: 4612 - protein, 397 aa, Agrobacterium tumefaciens
MTNASEMPRKLTILGSTGSIGTNTLDVVRQLGGRDGFEIMALTGAGNIALLAEQAREFGAQLAVTADDDKYEALKSALAGTGIKVAAGMAGLEEAASMDAGWVMAAIAGTPGLAPTLTAARRGADIALANKECLVSAGDVFLRTVKQGGGRLIPVDSEHSAIFQCLTGEYKQAVERIVLTASGGPFRTWSRDEMSNVTADIARAHPNWSMGLKVSIGSASMFNKGLEMIEAKYLFDLRPDQVDVIVHPQSIIHSMVGYTDGSYIAQLGSPDMRTAISYALTYPERGNLSVERLDFAKLARLDFEAPDEARFPALRLARMALERGGLQGAALNAAEETAFHAFVAGGIGFLDMAEIVETVMDRMHDGRTAETMDDVFSADEEARRHALELIATKEKAA

SEQ ID NO: 4613 - protein, 448 aa, Pseudomonas aeruginosa PAO1
MSQSWSPESWRAKPIQQQPEYPDAAHLARVEQTLAGYPPLVFAGEARELRRQFAEVTAGRAFLLQGGDCAESFAEFSAAKIRDTFKVLLQMAVVMTFAAGCPVVKVGRMAGQFAKPRSSGDETQNGVTLPAYRGDIVNGIGFDEKSRVPDPERLLQAYHQSTASLNLLRAFAQGGFADLHQVHRWNLDFIANSALAERYQQLADRIDETLAFMRACGLDSAPQLRETSFFTAHEALLLNYEEALTRRDSLTGEWYDCSAHMLWIGDRTRQIDGAHVEMLRGVGNPIGVKVGPSMDSEELIRLIDILNPDNDPGRLNLIVRMGADKVGDHLPRLIQAIQREGRQVLWSSDPMHGNTIKASSGYKTRDFARVLAEVRQFFEVHQAEGSYAGGIHIEMTGQNVTECIGGSRPITEDGLSDRYHTHCDPRLNADQSLELAFLIAETLKQVRR

SEQ ID NO: 4614 - protein, 256 aa, Rhodobacter sphaeroides
MRLDGKTALITGSARGIGRAFAEAYVREGARVAIADINLEAARATAAEIGPAACAIALDVTDQASIDRCVAELLDRWGSIDILVNNAALFDLAPIVEITRESYDRLFAINVSGTLFMMQAVARAMIAGGRGGKIINMASQAGRRGEALVGVYCATKAAVISLTQSAGLNLIRHGINVNAIAPGVVDGEHWDGVDAKFADYENLPRGEKKRQVGAAVPFGRMGRAEDLTGMAIFLATPEADYIVAQTYNVDGGNWMS

SEQ ID NO: 4615 - protein, 134 aa, Oryza sativa
  unsure (1)..(134): unsure at all Xaa locations
XFRVPPFNSMIAPEVRLDKQLQAWKNNPIWSDEPPEIKVTVPQGSLCNLNLKFKAGLPPDAVYNIIIDPENKRVFKNIKEVISRKVVLDGGLSPLGEPPQAAFCRFLWWSGNLNLVLEQKNTYSCSSFCGRFQE

SEQ ID NO: 4616 - protein, 166 aa, Brassica rapa subsp. pekinensis
HFTANQAILEAFEGKKRVHVIDFSMNQGLQWPALMQALALREGGPPVFRLTGIGPPAADNSDHLHEVGCKLAQLAEAIHVEFEYRGFVANSLADLDASMLELRPSEIEAVAVNSVFELHKLLGRTGGIEKVLGVVKQIKPVIFTVVEQESSHNGPVFLDRFTESLH

SEQ ID NO: 4617 - protein, 210 aa, Bifidobacterium longum DJO10A
YGVPGILSGAALVFFAFIGFDVVATASEETKNPHKNVPLGIGVGMLLIIVMYMLVAVVTTGMVSYADLAKQDSPSLATAFELVGADWAAKIISFGIVLGLATVVMVLLLGLTRIVFAMSRDGLLPRGLSKTGKHGTPAALQIVVGAVVALVAAFFDIGVLSDMVNIGTLSAFTLVAISIPIMRKKRPDLPRAFKMPGSPWIPILIAVANF

SEQ ID NO: 4618 - protein, 120 aa, Oryza sativa
  unsure (1)..(120): unsure at all Xaa locations
XAVPANKRTQASYNGPMPXAKAGRITNAYVSSFPFIRSPSHSPQYASPAAYPSPPTTVYSNRSPPYPYSPEIIPGSYQGSPIGYPAYNGYCNGPVPAPAPPVYHPHHHQHHQFHHQQHYY

SEQ ID NO: 4619 - protein, 630 aa, Listeria monocytogenes
MKEKHNPRRKYCLISGLAIIFSLWIIIGNGAKVQAETITVSTPIKQIFPDDAFAETIKDNLKKKSVTDAVTQNELNSIDQIIANNSDIKSVQGIQYLPNVTKLFLNGNKLTDIKPLTNLKNLGWLFLDENKIKDLSSLKDLKKLKSLSLEHNGISDINGLVHLPQLESLYLGNNKITDITVLSRLTKLDTLSLEDNQISDIVPLAGLTKLQNLYLSKNHISDLRALAGLKNLDVLELFSQECLNKPINHQSNLVVPNTVKNTDGSLVTPEIISDDGDYEKPNVKWHLPEFTNEVSFIFYQPVTIGKAKARFHGRVTQPLKEVYTVSYDVDGTVIKTKVEAGTRITAPKPPTKQGYVFKGWYTEKNGGHEWNFNTDYMSGNDFTLYAVFKAETTEKTVNLTRYVKYIRGNAGIYKLPREDNSLKQGTLASHRCKALTVDREARNGGKLWYRLKNIGWTKAENLSLDRYDKMEYDKGVTAYARVRNASGNSVWTKPYNTAGAKHVNKLSVYQGKNMRILREAKTPITTWYQFSIGGKVIGWVDTRALNTFYKQSMEKPTRLTRYVSANKAGESYYKVPVADNPVKRGTLAKYKNQKLIVDCQATIEGQLWYRIRTSSTFIGWTKAANLRAQK

SEQ ID NO: 4620 - protein, 97 aa, Zea mays
TGSQETGTAGSDVRPGDWYCSCGAHNFASRSNCFRCSAYKEEAAGAFDSDMSRSRGYAGFGSGAAARTNRPGWKSGDWICTRSGCNEHNFASRMECF

SEQ ID NO: 4621 - protein, 662 aa, Dianthus caryophyllus
MSFFENMGYYPNFEFPPQATVVREEEPVAEVEQEGNDEDYSDDDVDVDELERRMWRDKMLLKRLKEQNKDRCREGIDNVKKRQSQEQARRKKMSRAQDGILKYMLKMMEVCKAQGFVYGIIPEKGKPVSGASDNLRAWWKDKVRFDRNGPAAIAKYQADHLVQGMDEDCTAMGSTPHTLQELQDTTLGSLLSALMQHCDPPQRRFPLEKGHPPPWWPVGNEIRLPGLGIPNDQGPPPYKKPHDLKKAWKVSVLTAVIKHMSPDIEKIRKLVRQSKCLQDKMTAKESATWLAIVNQEESLARKLFPDRCPPPAPGGGGSLVISDTSDYDVDGAGPDSSSDVEDCKPQNINVFNFREKFMGHPVNMITPAIKGEVVETGFDFPVKRKQPSSGSQTVIDQKVFLCENPQCPYNDPCLGFPDRILRHDHQLNCPFRSRGVEVTNTQTTLEKHPSSESTNFTSSFAQQEKFSLQSAMQSPATFNPCTGTVLETGDQLQQNMQRKTTDGRFVGQGSALYGNSTYLGQQSQFQIDNVGFFASHGGNGSQGMFVNGKNNNQVKQKPSLQMSNGFNGVSPSRQQMQAPMDGGFRGLSNMSGNIPQRTKTSAGHPVFSSGGMQQQQQLDQCRTFDSSFPMHLNDDITDFGFNSPFNIDFEPLLRPDNPIWNI

SEQ ID NO: 4622 - protein, 303 aa, Zea mays
HTRPRTVGKAEFRRTYLGVRSENLVTPCSDLTPAEFRRTYLGLRKSRRALLRELGESAHEAPVLPTDGLPDDFDWRDHGAVGPVKNQGSCGSCWSFSASGALEGAHYLATGKLEVLSEQQFVDCDHECDSSEPDSCDSGCNGGLMTTAFSYLQKAGGLESEKDYPYTGSDGKCKFDKSKIVASVQNFSVVSVDEAQISANLIKHGPLAIGINAAYMQTYIGGVSCPYICGRHLDHGVLLVGYGASGFAPIRLKDKPYWIIKNSWGENWGENGYYKICRGSNVRNKCGVDSMVSTVSAVHASKE

SEQ ID NO: 4623 - protein, 242 aa, Streptococcus agalactiae NEM316
MELLKTPIFGICFSLILYTIGQHLFKKSKGFFLLQPLFFAMVSGIVILWLMSKGLGTDVKTFYTQAYKPGGDLIFWFLNPATIAFAVPLYKKNDVVKKYWVEILSSLVIGMIVSLMLIVAISKMVGLSQVGIASMLPQAATTAIALPITAAIGGNTAVTAMACILNAVIIYALGKKLVSFFHLNDSKIGAGLGLGTSGHTVGAAFALELGELQGAMAAIAVVVIGLVVDLVIPIFSHLIGLL

SEQ ID NO: 4624 - protein, 379 aa, Arabidopsis lyrata subsp. lyrata
  unsure (1)..(379): unsure at all Xaa locations
MITTGQIIRCKAAVAWVAGKPLVMEEVEVAPPQKHEVRIKILFTSLCHTDVYFWEAKGQTPLFPRIFGHEAGGIVESVGEGVTDLQPGDHVLPIFTGECGDCPHCHSEESNMCDLLRINTERGGMIHDGESRFSINGKPIHHFLGTSTFSEYTVVHSGQVAKINPDAPLDKVCIVSCGLSTGLGGTLNVVKPKKGQSVAIFGLGAVGLAAAEGARIAGASRIIGVDLNSQRFDQAKEFGVTEFVNPRDHDKPVQQVIAEMTNGGVDRSVECTGSVQAMIQAFECVHDGWGVAVLVGVPSKDDAFKTHPMNFLNERTLKGTFFGNYKPKTDIPGVVEKYMNKELELEKFITHTLPFSEINKAFDYMLKGESIRCXIPMGA

SEQ ID NO: 4625 - protein, 165 aa, Zea mays
MAASDVEYRCFVGGLAWATDDHSLNNAFSTYGEVLESKIILDRETQRSRGFGFVTFSTEDAMRSAIEGMNGKELDGRNITVNEAQSRGGRGGGGGGGYGGGRGGGGGYGRRDGGGGGYGGGGGGYGGGRGGYGGGGGGYGGGGGGYGGGSRGGGGYGNSDGDWRN

SEQ ID NO: 4626 - protein, 366 aa, Sinapis arvensis
SSNKTLVSPGDVFELGFFRTNSRWYLGMWYKKLPYRTYVWVANRDNPLSNSIGTLKITGNNLVILGHSNKSVWSTNLTRRNERSKVVAELLANGNFVMRDSNNNDASAFLWQSFDYPTDTLLPEMKLGYDLKKGLNRFLISWRSLDDPSSGNFSYKLENRKLPEFYLLSGVFELYRSGPWNGIRFSGIPDDQKLSYLVYDFTENTEEVAYTFRMTNNSLYSRLIVSSEGYIERQTWNPPIRDVERVLVFSLDSQCDAYRMCGPYSYCDVNTSPVCNCIQGFSPLNVEQWDQRSWSGGCIRRTRLSCSGDGFTRMKNIKLPETMMATVDRSIGVKECEKRCLGDCNCTAFANADIRNGGSGCVMWTG

SEQ ID NO: 4627 - protein, 190 aa, Triticum aestivum
MSKYGTIPTSSSAAAGAPHLGGASPLDFISRAKARGATALATRRPWRELADVHAVGLPPSLGDAYLRVRANLAHFAMNYAIVVLVVVFLSLLWQPISLIVFLVCMVGWLVLYFLRDEPIVLFGRVVGDGVVLAVLAAVTLILLLLTGATTNILTSLLIGFVLVVVHAALHKAEDNVDEEVGRWYAPVPAQ

SEQ ID NO: 4628 - protein, 431 aa, Glycine max
MFFQQSSFYPRVDSTNPDANSPFSIPAPSSSSSSIYPSVETTENLIWEEPNTTTEEAMENVLVTVPGAILHLIEKDSSVHLASGDLTISTLGEGDKVVAVLACVGDQVQWPLAKDVSAVKLDESHYFFTVQVPQEHGEEKGFEVLNYGLTVAAKGQERVLRELDEVLDKYSFLSKEKLKGVGGWEVLDGSVSTETSPEELQGSEERKEVVEERSGAYWTTLAPNVEDYSGSFARWIAAGSGQVVRGILWAGDVTVDRLKWGNDFLKKRLEPGSHSQVSPQALESIKRVKKLTKMSEKVATGVLSGVVKVSGFFTSSVVNSKAGKKFFSLLPGEIVLATMDGFNKVLDAAEVAGRNVMSTSSVVTTGLVSHKYGEEAAHVTNEGLDAAGHAIGTAWAVFKLGKALNPKSAIKPTTLAKAAAEATSARLKAKK

SEQ ID NO: 4629 - protein, 214 aa, Paeonia officinalis
IVESVGEGVTDVKPGDHVLPIFTGECKECRHCKSEESNLCDLLRINTDRGVMLNDGKSRFSFNGQPIFHFVGTSTFSEYTVLHVGCLAKINPEAPLDKVCVLSCGISTGLGATLNVAKPKKGSTVAIFGLGAVGLAAAEGARIAGASRIIGVDLNPKRFDEARKFGVTEFVNPKDYNKPVQEVIAEMTGGGVDRSVECTGSIMAMMSAFECVHD

SEQ ID NO: 4630 - protein, 97 aa, Oryza sativa
PSGFVKLISAEGFEFVVDKKAAMVSNTLRNMLTSPGGFSETREGEVRFPEISTPILEKICQYFYWSLHYSSGKETSEFQIEPEITLELMMAANYLDT

SEQ ID NO: 4631 - protein, 392 aa, Hypecoum imberbe
DLEPVNPSDVPITAAGALKSYKLAAKAISRLQSLPSGNIPLLCDVLAREVRELTGYDRVMVYKFHEDEHGEVIAECRELDLEPYLGLHYPATDIPQASRFLFLKNKVRMICDCSAQPVKVIQDEKLAQPLSLCGSTLRAPHGCHSQYMTNMGSVASLVMSLTINEDDDEMETSTQKGRKLWGLVVCHHTSPRFVPYPLRYACEFLIQVFGIQLNKEVELASQLMEKHILKMQTVLCDMLLRDAPVGIVAQSHNVMDLVKCDGAALYYRNKLWLLGVTPTEAQVRDIARWLLECHYGTTGLSTDSLMEAGYPGASGLGDAVCGTAAISITSKDFLFWFRSQTAKEIKWGGAKHDPMDKDGLRKMHPRSSFKAFLEVVKCRSVPWEDIEMDAIQ

SEQ ID NO: 4632 - protein, 566 aa, Rhodopseudomonas palustris
MMVYRFDEQGHGEVFSERHVPGLESYFGNRYPSSDIPQMARRLYERQRVRVLVDVSYQPVPLEPRLSPLTGRDLDMSGCFLRSMSPIHLQYLKNMGVRATLVVSLVVGGKLWGLVACHHYLPRFIHFELRAICELLAEAIATRITALESFAQSQSELFVQRLEQRMIEAITREGDWRAAIFDTSQSILQPLHADGCALVYEDQIRTIGDVPSTQDVREIAGWLDRQPRAAVTSTASLGLDVPELAHLTRMASGVVAAPISDHRGEFLMWFRPERVHTVTWGGDPKKPFTMGDTPADLSPRRSFAKWHQVVEGTSDPWTAADLAAARTIGQTVADIVLQFRAVRTLIAREQYEQFSSQVHASMQPVLITDAEGRILLMNDSFRDMLPAGSPSAVHLDDLAGFFVESNDFLRNVAELIDHGRGWRGEVLLRGAGNRPLPLAVRADPVTRTEDQSLGFVLIFSDATDRRTADAARTRFQEGILASARPGVRLDSKSDLLHEKLLSALVENAQLAALEITYGVETGRIAELLEGVRQSMLRTAEVLGHLVQHAARTAGSDSSSNGSQNKK

SEQ ID NO: 4633 - protein, 364 aa, Oryza sativa
MAGTVTVPSASVPSTPLLKDELDIVIPTIRNLDFLEMWRPFFQPYHLIIVQDGDPTKTIRVPEGFDYELYNRNDINRILGPKASCISFKDSACRCFGYMVSKKKYVFTIDDDCFVAKDPSGKDINALEQHIKNLLSPSTPFFFNTLYDPYREGADFVRGYPFSLREGAKTAVSHGLWLNIPDYDAPTQMVKPRERNSRYVDAVMTVPKGTLFPMCGMNLAFDRDLIGPAMYFGLMGDGQPIGRYDDMWAGWCMKVICDHLSLGVKTGLPYIWHSKASNPFVNLKKEYKGIFWQEDIIPFFQNATIPKECDTVQKCYLSLAEQVREKLGKIDPYFVKLADAMVTWIEAWDELNPSTAAVENGKAK

SEQ ID NO: 4634 - protein, 227 aa, Momordica charantia
MGRGKIEIKRIENTTNRQVTFCKRRNGLLKKAYELSVLCDAEVALIVFSSRGRLYEYSNNSIKTTIGRYKKACSDSSATSSVTELNTQYYQQESAKLRQQIQMLQNSNSNLVRHLMGDSLSALTVKELKQLENRLERGITRIRSKKHEMLLAEIEYLQKREIELENENVCIRTKIAEVERLQQANMVSGQELNAIQALASRNFFTPNMMEGGAVTFSHQDKKMLHLG

SEQ ID NO: 4635 - protein, 240 aa, Burkholderia fungorum
MTRTALITGGVSGIGAATAKQLQSGGYSVIANYFGNDAEADAFHKETGIPIFGWNVADFDATQQAVAKIVAQSGPIDILVNNAGITRDSTLHKMTLEQWRSVIDVDLGGCFNTCRAVIESMRERRFGRIVNISSVNALSGQFGQTNYSAAKAGLIGFTKALALEGASRGITANVIAPGYTDTGMVHGVPDEILKTIVSGVPAGRLATPDEIARGVVFLVADEAAFINGATLSINGGKYMA

SEQ ID NO: 4636 - protein, 103 aa, Zea mays
MLEGRARVEDTDMPARMQDAATSAASRALDLFDVADCRAIAGHIKTEFDKRYGVGWQCVVGANFGCFFTHSSGTFIYFSMERLSFLLFKAAVVAAAAAAAVAS

SEQ ID NO: 4637 - protein, 463 aa, Oryza sativa (japonica cultivar-group)
MASSAGDPLLSGEAGDGRRRFVPSTIRLKTSVWSELGGAVGDLGTYIPIVLALSLASHLDLGTTLIFTALYNFATGLLFGIPMPVQPMKSIAAVALSSAHLTIPQIMSAGLAVAAILLFLGVTGLMTTLYRLLPLPVVRGVQLSQGLSFAFTAVKYIRYVQDFSRSSSASTSVPRPLLGLDGLVLALAALLFIILATGSGDDEDVNRDGTSRRRRSCSRVPAALIVFALGLVLCFVRDPSILQDLRFGPAPLGLVKITWDDFKIGFWEGAVPQLPLSVLNSVIAVCKLSSDLFPERAELSPARVSVSVGLMNFVGCWFGAMPCCHGAGGLAGQYRFGGRTGASVVFLAIGKLALGLVFGNSFVTILGQFPIGILGVMLLFSGIELAMASRDMGSKQESFVMLVCAGVSLTGSSAALGFISGIVLYLLLRLRDLEWDIRGLLGRWAAGRRQSTNEANEDGAGDA

SEQ ID NO: 4638 - protein, 590 aa, Thermoplasma volcanium
MNDNSNLVSGKLRKSLNSTDLFFLAVTGMIGSGWLFAALDTASYVGPGSIFTWMIAALFFFVIALAFAELSSIIPYSGSIVRFNQYSHGSISNFMIGWAYLIGAVSTVTVEAISLVTYTSTYMPQLYNSSVGVLTPLGIIVSIFLILFFFFIQFMGVNVYGKLNTVLTTWKIAIPVITVVLLMSFSFHPGNFKVAHGFLPYGTSAIFAALIPSGVVYAFEGFRQGIEYAGEAKNPQRDVPMSLIAALLVTIAIYVALQIAFIGSIRWSDLSLSPGDWTLLSKSTWASGPFYYATKYSGVAILAIFAIVILIDAFISPLASLGVYEGTSARSFYGLSRLNVLPEFFGSIHPKFRTPWVGLIFTLIISSLFLAPFPSWYLIVGINASFTVYAYLSAGTTNSVLRKLAPDLNRPFKLPFATVLSPVAFVAASMLVYWSGWSIIDFLILIVYAGLPLLILSKFRESLDITSREAIALSAVYWILLSIVGYFGYISYIPFEVYWPILNSIPAITFAFLYIRSRSNEVVSSVWIIVYNSILGTMSYFGSLGTNAIAYPYDYLIFAALSFFIFFVSVKTGIETNELTELKRSGPVPE

SEQ ID NO: 4639 - protein, 419 aa, Hordeum vulgare
MTVDRKGAQAAAAAAATSAPFEIPALQPGRTCGAEESTRSHVLVEPIGSSDLLCNEYALLAQQNPKGDALPVASILRKKRPRRSRDGPNSVSETIKRWKEVNQQLEHDPQGAKRARKPPAKGSKKGCMQGKGGPENTQCGFRGVRQRTWGKWVAEIREPNRVSRLWLGTFPTAEVAAQAYDEAARAMYGPLARTNFPVQDAQAAPAVAVPVATEGVVRGSSASCESTTTSNHSDVASSSHNKQRQIQAPEISSRSDLLESTQSVEYSQQQSVPDAVSSIAMSTSEEDVYEPLEPISNLPDGEADCFDIEELLKLMEADPVEVDPVTVGSWNEFQDAGANARGSWNEFQCARANTGVSWNANAGMEMGQQEPLYLDGLDQGMLEGMLHSDYPFPVWISEDRPMHNPAFHDAEMSEFFEGL

SEQ ID NO: 4640 - protein, 338 aa, Azospirillum brasilense
MNTPHTVLVTGGAGYVGSHCVAELLDRGFRVVVLDNLRQGHRVAVPSDAAFVEADLADMDALTRVFAEWRFDAVFHFAALSLVGESMRDPHLYLHGNTVNSLNLIRAATTAGVRKMVFSSTANLFGTPERLPIDEETTIDPGSPYGESKFFIERALHWADRCHGLRSACLRYFNAAGAHPNGTLGEDHAPETHLIPLVLDAPAAGRSHIEIFGDDYPTADGTCVRDYIHVCDLADAHLRVLPALETRSRFNLGNGTGYSVREVIAATERVTGLTVPVRVGPRRAGDPAVLIASSERIRGELGWSPRFPDLDSIIGSAWEWRRRHPGGYRGPAVAQAAE

SEQ ID NO: 4641 - protein, 170 aa, Oryza sativa (japonica cultivar-group)
MKKIFGAKKSKDPPPSIQDATERINKRGESVDDKIKKLDEELGRYKEQIRKTRPGPSQDAIKARAIRLLKHKRMYEEQRNMLYNQTYNLDQVAFAADGLKDAQQTMNAMKAANKELKGMMKTVKIEDIDNMQDEMTDLMDVSNEIQESLGRSYNIPDDVDEEELMGGIWK

SEQ ID NO: 4642 - protein, 274 aa, Ralstonia solanacearum
MTTQMPIASPRTEFYERAFGGFHDQAVAEVRKETYGEDLGQNDWSTVDEMRQFSQWLELSPQSHLLDVCSGSGGPALFLARNSGCRVTGVDLHPDALQTGRQLAQALELHDRSQFVECDVRQRMPFPDGTFDALWCIDSVIHIPDRLALLREWCRLLKPGGRFLYTDPTLVTGMVSKEEILLRGTPGYFLYTPIGLNERLIEQAGLRLDMQADLTHSITELSERWHAAREKRCAVLTATEGEEAFARMQSFLTATHRVSVEGRLSRWVFVGVRP

SEQ ID NO: 4643 - protein, 470 aa, Escherichia coli CFT073
MVDQVKVVADDQAPAEQSLRRNLTNRHIQLIAIGGAIGTGLFMGSGKTISLAGPSIIFVYMIIGFMLFFVMRAMGELLLSNLEYKSFSDFASDLLGPWAGYFTGWTYWFCWVVTGMADVVAITAYAQFWFPGLSDWVASLSVIILLLVLNLATVKMFGEMEFWFAMIKIVAIVSLIVVGLVMVAMHFQSPTGVEASFAHLWNDGGWFPKGLSGFFAGFQIAVFAFVGIELVGTTAAETKDPEKSLPRAINSIPIRIIMFYVFSLIVIMSVTPWSSVVPEKSPFVELFVLVGLPAAASVINFVVLTSAASSANSGVFSTSRMLFGLAQEGVAPKAFAKLSKRAVPAKGLTFSCICLLGGVVMLYVNPSVIGAFTMITTVSAILFMFVWTIILCSYLVYRKQRPHLHEKSIYKMPLGKLMCWVCMAFFVFVLVLLTLEDDTRQALLVTPLWFIALGLGWLFIGKKRAAELRK

SEQ ID NO: 4644 - protein, 428 aa, Glycine max
MAARSDHQTVPLSVLLRRELANEKIEKPEIAHGQACQSKKGEDLTLLKTECQRVVGDGVSTYSVFGLFDGHNGSAAAIYSKENLLNNVLSAIPPDLNRDEWIAALPRALVAGFVKTDKDFQEKGQKSGTTVTFVIIEGWVVTVASVGDSRCVLESSDGELYYLSADHRLETNEEERVRITSSGGEVGRLNTGGGAEVGPLRCWPGGLCLSRSIGDMDIGEFIVPVPYVKQVKMSTAGGRLVICSDGVWDSLPAEVALDCCRGMPADAAAPHIVKEAVQAKGLRDDTTCIVVDILPQEKPPVSAPQTKRPVKGMLKSMFRKKSSESSSYIDKEYMEPDVVEELYEEGSAMLSERLDTKYPVCNMFKLFMCAVCQVEIKPGEGISIHEGAPDSRKFRPWDGPFLCSSCQEKKEAMEGKRSSGRISSGSDE

SEQ ID NO: 4645 - protein, 178 aa, Glycine max
  unsure (1)..(178): unsure at all Xaa locations
MERGANNKKLSPLSSEQFISLTTPLVFLEKEAEASSTGVSQERVIEDAEKDEFQVDDCPIEQVRLTVPITDDPTQPALTFRTWVLGLASCVFLAFVNQFFGYRTNPLKISSVSAQIITLPLGKLMAATLSTKPIRVPFTKWSXSLNXGPFSLKEHVLITIFATSGSSGVYAISIITIV

SEQ ID NO: 4646 - protein, 458 aa, Zea mays
MEPRRISASPRPCSGRRVVARKRPRQEAVVSSVRKLQRREISSRRDRTFTMSAAQERFRNIQLQEEFDTHDPKENASLLPYLRKRSKIIEIVAARDIVFALSQSGVCAAFSRETNRRICFLNGSPDEVIRSLFYNKNNDSLITVSVYGSENFSALRCRTTRIEYVRRGQPDAGFPLFESESLKWPGFVEFDDVNGRVLTYSAQDSTYKVFDLKNYTLLYLVSDKNVQEIKISPGIMLLIYARTSSSVPLKILSIDDGTVLKSFSHLLHRNKKVDFIEQFNEKLLVKQEGENLQILDVRNFQLTEVSRTEFMTPSAFIFLHELQLFLTFRNRAVSVWNFRGELVTSFEDHLLWHPDCNTNNIYITSDQDLIISYCKADSTDSTSEENAGSINISSILSGKCLAKINTGNSNACKERKKAWKFRNTVSEALEDITALYYDEDRDEIYTGNRHGLVHVWSS

SEQ ID NO: 4647 - protein, 376 aa, Zea mays
TSSRITHYPLPAPDRATALWCTGVSRPSSLTPSAATPSSILPDGAPGSRNKMSNRATHWCYACRRPIRLRGQDIVCPNCNDGFIQEISEMGGILNTYGLIEPDFEERRARRFGMMDAMSSLMRQRMEEMGRDGLFDIRGRQGTGTEYGRRPTAVPTLVFGGIPSPGVDSGDVNVVLRGGRRVGAAQPNFSSLVVGPSLEALFEQLLLQNNRQGPAPAPQSAIDSMPVVKINRRHLDDDPQCAVCKDKFEVGAEAREMPCKHLYHTDCIIPWLVQHNSCPVCRHPLPSQRSGSTSSARPSAYYNEAADPPGVTRADLEPAPRDGGRESQERRRSFSFLWPFGPSSSRSSSYQYEQNVDEPAVYDPNQIAYSEWHYDH

SEQ ID NO: 4648 - protein, 168 aa, Tripsacum dactyloides
APLDKVCVLSCGISTGLGASINVAKPPKGSTVAVFGLGAVGLAAAEGARIAGASRIIGVDLNPSRFEEEFVNPKDHNKPVQEVLAEMTNGGVDRSVECTGNINAMIQAFECVHDGWGVAVLVGVPHKDAEFKTHPMNFLNERTLKGTFFGNYKPRTDLPNVVELYMKK

SEQ ID NO: 4649 - protein, 222 aa, Triticum aestivum
MAGEKGLVLLDFWVSPFGQRVRIALAEKGLPYEYVEEDLMAGKSDRLLRSNPVHKKIPVLLHDGRPVNESLIILQYLEDAFPDAPALLPSDPYARAQARFWADYVDKKVYDCGSRLWKLKGEPQAQARAEMLEILKTLDGALGDKPFFGGDKFGLVDAAFAPFTAWFHSYERYGEFSLAEVAPKIAAWAKRCGERESVAKSLYSPDKVYDFIGLLKKKYGIE

SEQ ID NO: 4650 - protein, 368 aa, Medicago sativa subsp. X varia
MRPIQLPPPTATGSATASGSPNNNNNSRPQRRRKDHLTLPLPQRDTNLAVPLPLPPSGGSGGSGGGGNGSGSGGASQQLVIPFSELERLNRIGSGSGGTVYKVVHKINGRAYALKVIYGHHEESVRRQIHREIQILRDVDDVNVVKCHEMYDHNAEIQVLLEYMDGGSLEGKHIPQENQLADVARQILRGLAYLHRRHIVHRDIKPSNLLINSRKQVKIADFGVGRILNQTMDPCNSSVGTIAYMSPERINTDINDGQYDAYAGDIWSLGVSILEFYMGRFPFAVGRQGDWASLMCAICMSQPPEAPTTASPEFRDFVSRCLQRDPSRRWTASRLLSHPFLVRNGSNHNQSPPNMHQLLPPPPRSLSS

SEQ ID NO: 4651 - protein, 406 aa, Zea mays
MSDQALFSNKRAPHDKPRAAVGRRRIQTESRRRHHYYHPRPNELLPTPTPAQSDPRTTPCARAASRPSSPARRAARAAARISPSPCPSARSPPPSPSRSLSRQPPPPPGGPPRRASPRPPPRRSSSSSRPPLAELERVRRVGSGAGGTVWMVRHRGTGRPYALKVLYGNHDDAVRRQIAREIAILRTAEHPAVVRCHGMYERGGELQILLEYMDGGSLDGRRIAAEPFLADVGRQVLSGIAYLHRRHIVHRDIKPSNLLIDSARRVKIADFGVGRILNQTMDPCNSSVGTIAYMSPERINTDLNDGSYDGYAGDIWSFGLSILEFYLGRFPFGENLGRQGDWAALMCAICYNDPPEPPPTASREFRGFIACCLQKNPAKRLTAAQLLQHPFVAGPHPQPLAAPPPS

SEQ ID NO: 4652 - protein, 394 aa, Zea mays subsp. mays
LGAERRARLPPGEMGWPLVGGMWAFLRAFKSGKPDAFIASFVRRFGRTGVYRSFMFSSPTVLVTTAEGCKQVLMDDDAFVTGWPKATVALVGPRSFVAMPYDEHRRIRKLTAAPINGFDALTGYLPFIDRTVTSSLRAWADHGGSVEFLTELRRMTFKIIVQIFLGGADQATTRALERSYTELNYGMRAMAINLPGFAYRGALRARRRLVAVLQGVLDERRAARAKGVSGGGVDMMDRLIEAQDERGRRLDDDEIIDVLVMYLNAGHESSGHITMWATVFLQENPDMFARAKAEQEAIMRSIPSSQQGLTLRDFRKMEYLSQVIDETLRLVNISFVSFRQATRDVFVNGYLIPKGWKVQLWYRSVHMDPHVYPDPTKFDPSRWEGHSPRAGTFL

SEQ ID NO: 4653 - protein, 158 aa, Triticum aestivum
MTSAPAMATTALSDPEALSGDGGTKQPLSLLERARDNLSFRSAWSELNGAMGDLGTYIPIVLSLALSRHLDLGTTLIFTGIYNAVTGLVYGVPMPVQPMKAIAATALSDPSFDIPEIMAAGILTAAFVLLLGVTRLMKLVYWLVPLPVVRGIQLAQGL

SEQ ID NO: 4654 - protein, 369 aa, Schaefferia frutescens
ALSIAGAVQSQKLAIRSISQLQSLPGGDIKLLCDTVVESVRELTGYDRVMVYKFHEDEHGEVVAESKRPDLEPYIGLHYPATDIPQASRFLFKQNRVRMIVDCHASPVLVIQDDGLMQPLCLVGSTLRAPHGCHAQYMENMGSKASLAMAVIINGNDEEVTGGRNATRLWGLVVCHHTSARCIPFPLRYACEFLMQAFGLQLNMELQLAAQLSEKHVLKTQTLLCDMLLRDSPTGIVTQSPSIMDLVKCDGAALYYQGKYYPIGVTPAEAQIKDIVEWLLAFHGDSTGLSTDSLADAGYPGATLLGDAVCGMAVAYITNRDFLFWFRSHTTKEIKWGGAKHHPEDKDDGPRMHPRSSFKAFLEVVKSRS

(The sequence listing continues in the following parts.)
